United States Patent Application Publication US 2007/0042381 A1 - sequence listing, part 71

SEQ ID NO: 3236496 - RNA, 18 nt, Human
uauaauguauucauauuu

SEQ ID NO: 3236497 - RNA, 17 nt, Human
uauaauucuacuuugag

SEQ ID NO: 3236498 - RNA, 20 nt, Human
uauaauguaagcucuacuga

SEQ ID NO: 3236499 - RNA, 19 nt, Human
uauaauguaagcucuacug

SEQ ID NO: 3236500 - RNA, 14 nt, Human
uauaauguaagcuc

SEQ ID NO: 3236501 - RNA, 18 nt, Human
uauaaugggauuggguuu

SEQ ID NO: 3236502 - RNA, 20 nt, Human
uauaauguauucauauuugu

SEQ ID NO: 3236503 - RNA, 17 nt, Human
uauacccccugcaaagc

SEQ ID NO: 3236504 - RNA, 15 nt, Human
uauacucauuagaau

SEQ ID NO: 3236505 - RNA, 16 nt, Human
uauacucauuagaauu

SEQ ID NO: 3236506 - RNA, 22 nt, Human
uauacucauuagaauuaccauu

SEQ ID NO: 3236507 - RNA, 20 nt, Human
uauacucuuauagacaacau

SEQ ID NO: 3236508 - RNA, 18 nt, Human
uaguuugcauuucagaaa

SEQ ID NO: 3236509 - RNA, 17 nt, Human
uaguuugcauuucagaa

SEQ ID NO: 3236510 - RNA, 15 nt, Human
uaguuugcauuuaag

SEQ ID NO: 3236511 - RNA, 17 nt, Human
uaguuugcauuuaagaa

SEQ ID NO: 3236512 - RNA, 21 nt, Human
uaguuugcauuuaagaauugc

SEQ ID NO: 3236513 - RNA, 16 nt, Human
uaguuugcauuucaga

SEQ ID NO: 3236514 - RNA, 13 nt, Human
uaguuugcauuuc

SEQ ID NO: 3236515 - RNA, 19 nt, Human
uaguuuuacccuauaucua

SEQ ID NO: 3236516 - RNA, 20 nt, Human
uauaaugaaugaaacauuuu

SEQ ID NO: 3236517 - RNA, 17 nt, Human
uauaaauugucuuaaug

SEQ ID NO: 3236518 - RNA, 11 nt, Human
uauaaugaaug

SEQ ID NO: 3236519 - RNA, 18 nt, Human
uauaaugaaugaaacauu

SEQ ID NO: 3236520 - RNA, 22 nt, Human
uauaaauuuauuuacugcuagu

SEQ ID NO: 3236521 - RNA, 20 nt, Human
uauaaauuucgcuucuuaga

SEQ ID NO: 3236522 - RNA, 15 nt, Human
uauaaauuuguguaa

SEQ ID NO: 3236523 - RNA, 16 nt, Human
uauaaauuuguguaau

SEQ ID NO: 3236524 - RNA, 17 nt, Human
uauaaugaacaaaauua

SEQ ID NO: 3236525 - RNA, 16 nt, Human
uauaaauuuauuuacu

SEQ ID NO: 3236526 - RNA, 15 nt, Human
uauaaauuuauuuac

SEQ ID NO: 3236527 - RNA, 14 nt, Human
uauaaauuuauuua

SEQ ID NO: 3236528 - RNA, 20 nt, Human
uauaaauugucuuaauggau

SEQ ID NO: 3236529 - RNA, 14 nt, Human
uauaaauugucuuu

SEQ ID NO: 3236530 - RNA, 22 nt, Human
uauaaauugucuuuaaaaacug

SEQ ID NO: 3236531 - RNA, 23 nt, Human
uauaaauugucuuuaaaaacugu

SEQ ID NO: 3236532 - RNA, 18 nt, Human
uagugaugguuccccugu

SEQ ID NO: 3236533 - RNA, 14 nt, Human
uagugaugguuccc

SEQ ID NO: 3236534 - RNA, 16 nt, Human
uaguggaaaauaggcu

SEQ ID NO: 3236535 - RNA, 17 nt, Human
uaguggacccugaaaug

SEQ ID NO: 3236536 - RNA, 15 nt, Human
uaguggacccugaaa

SEQ ID NO: 3236537 - RNA, 17 nt, Human
uagugcugugaaaaaaa

SEQ ID NO: 3236538 - RNA, 16 nt, Human
uagugcugugaaaaaa

SEQ ID NO: 3236539 - RNA, 13 nt, Human
uagugcugugaaa

SEQ ID NO: 3236540 - RNA, 12 nt, Human
uagugcugugaa

SEQ ID NO: 3236541 - RNA, 23 nt, Human
uagucaacaguacccugguugug

SEQ ID NO: 3236542 - RNA, 19 nt, Human
uagucaagacgaacaugua

SEQ ID NO: 3236543 - RNA, 13 nt, Human
uagugaugguucc

SEQ ID NO: 3236544 - RNA, 21 nt, Human
uaguguagauuccauuuacug

SEQ ID NO: 3236545 - RNA, 15 nt, Human
uaguggauguucuga

SEQ ID NO: 3236546 - RNA, 15 nt, Human
uaguggauggaaggg

SEQ ID NO: 3236547 - RNA, 21 nt, Human
uaguggacccugaaaugugug

SEQ ID NO: 3236548 - RNA, 20 nt, Human
uaguggacccugaaaugugu

SEQ ID NO: 3236549 - RNA, 19 nt, Human
uaguggacccugaaaugug

SEQ ID NO: 3236550 - RNA, 18 nt, Human
uaguggacccugaaaugu

SEQ ID NO: 3236551 - RNA, 18 nt, Human
uaguggauggaaggggcu

SEQ ID NO: 3236552 - RNA, 21 nt, Human
uaguuguaccgcaaugugacu

SEQ ID NO: 3236553 - RNA, 20 nt, Human
uaguuguagacaaaguacau

SEQ ID NO: 3236554 - RNA, 16 nt, Human
uaguuuacugagaaug

SEQ ID NO: 3236555 - RNA, 18 nt, Human
uaguuuagugugguuuuc

SEQ ID NO: 3236556 - RNA, 22 nt, Human
uaguuuagugugguuuucuguu

SEQ ID NO: 3236557 - RNA, 17 nt, Human
uaguuuauuuuaaaaca

SEQ ID NO: 3236558 - RNA, 12 nt, Human
uaguuugcaguu

SEQ ID NO: 3236559 - RNA, 13 nt, Human
uaguuucuccaag

SEQ ID NO: 3236560 - RNA, 14 nt, Human
uaguuucugugguu

SEQ ID NO: 3236561 - RNA, 21 nt, Human
uaucaugucaaacgugaaaau

SEQ ID NO: 3236562 - RNA, 15 nt, Human
uauccuuuucugugu

SEQ ID NO: 3236563 - RNA, 14 nt, Human
uauccuuuucugug

SEQ ID NO: 3236564 - RNA, 17 nt, Human
uauccuuuucuguguuu

SEQ ID NO: 3236565 - RNA, 16 nt, Human
uauccuuuucuguguu

SEQ ID NO: 3236566 - RNA, 18 nt, Human
uauccugggcuuuuguuu

SEQ ID NO: 3236567 - RNA, 23 nt, Human
uauccugggcuuuuguuuugcuu

SEQ ID NO: 3236568 - RNA, 15 nt, Human
uaucuaaauguugaa

SEQ ID NO: 3236569 - RNA, 15 nt, Human
uaucguuaucacugu

SEQ ID NO: 3236570 - RNA, 18 nt, Human
uaucguuaucacugugca

SEQ ID NO: 3236571 - RNA, 19 nt, Human
uaucgcccuggcaggcagg

SEQ ID NO: 3236572 - RNA, 15 nt, Human
uaucagcacgugugg

SEQ ID NO: 3236573 - RNA, 13 nt, Human
uauauuuuuaucu

SEQ ID NO: 3236574 - RNA, 22 nt, Human
uauauuuuuaucuauauaaaau

SEQ ID NO: 3236575 - RNA, 13 nt, Human
uauauuuuauaua

SEQ ID NO: 3236576 - RNA, 18 nt, Human
uauauuuuauauaaagua

SEQ ID NO: 3236577 - RNA, 17 nt, Human
uauauuuuucuuaaaaa

SEQ ID NO: 3236578 - RNA, 15 nt, Human
uauauuuuucuuaaa

SEQ ID NO: 3236579 - RNA, 20 nt, Human
uauauuuuucuuaaaaagua

SEQ ID NO: 3236580 - RNA, 18 nt, Human
uauauuuuucuuaaaaag

SEQ ID NO: 3236581 - RNA, 23 nt, Human
uaucaggauuuccucuugaacca

SEQ ID NO: 3236582 - RNA, 22 nt, Human
uaucagggaaacuaagauucuu

SEQ ID NO: 3236583 - RNA, 16 nt, Human
uaucaggauuuccucu

SEQ ID NO: 3236584 - RNA, 16 nt, Human
uaucaugucaaacgug

SEQ ID NO: 3236585 - RNA, 11 nt, Human
uaucaugaaug

SEQ ID NO: 3236586 - RNA, 12 nt, Human
uaucaugaauuu

SEQ ID NO: 3236587 - RNA, 15 nt, Human
uaucaugaauuuuaa

SEQ ID NO: 3236588 - RNA, 16 nt, Human
uaucaugaauuuuaaa

SEQ ID NO: 3236589 - RNA, 18 nt, Human
uaucaugaauuuuaaagu

SEQ ID NO: 3236590 - RNA, 19 nt, Human
uaucaugaauuuuaaagua

SEQ ID NO: 3236591 - RNA, 24 nt, Human
uaucaugaauuuuaaaguaugcau

SEQ ID NO: 3236592 - RNA, 11 nt, Human
uaucaugaagc

SEQ ID NO: 3236593 - RNA, 15 nt, Human
uaucaguguuuaugu

SEQ ID NO: 3236594 - RNA, 13 nt, Human
uauauaauaaauu

SEQ ID NO: 3236595 - RNA, 14 nt, Human
uauacuguguguga

SEQ ID NO: 3236596 - RNA, 23 nt, Human
uauacugugugugagugugaaua

SEQ ID NO: 3236597 - RNA, 21 nt, Human
uauacuuccuuacuuuuaagg

SEQ ID NO: 3236598 - RNA, 19 nt, Human
uauaugcauauauauaugu

SEQ ID NO: 3236599 - RNA, 23 nt, Human
uauauacaucacguuaaaguagg

SEQ ID NO: 3236600 - RNA, 19 nt, Human
uauauaccugcgcuuguuu

SEQ ID NO: 3236601 - RNA, 15 nt, Human
uauauaccguggggg

SEQ ID NO: 3236602 - RNA, 22 nt, Human
uauauuuccuauaccauuuccg

SEQ ID NO: 3236603 - RNA, 21 nt, Human
uauauuuccuauaccauuucc

SEQ ID NO: 3236604 - RNA, 18 nt, Human
uauauuuccuauaccauu

SEQ ID NO: 3236605 - RNA, 12 nt, Human
uauauuucaagu

SEQ ID NO: 3236606 - RNA, 21 nt, Human
uauauuucccugaaggaacca

SEQ ID NO: 3236607 - RNA, 13 nt, Human
uauauguaugugu

SEQ ID NO: 3236608 - RNA, 21 nt, Human
uauauuuauugacucuugagu

SEQ ID NO: 3236609 - RNA, 12 nt, Human
uauauuuauuga

SEQ ID NO: 3236610 - RNA, 13 nt, Human
uauauuuauugac

SEQ ID NO: 3236611 - RNA, 22 nt, Human
uauauggugguaauaagggaaa

SEQ ID NO: 3236612 - RNA, 20 nt, Human
uauauggugguaauaaggga

SEQ ID NO: 3236613 - RNA, 22 nt, Human
uauaugcauauauauaugugug

SEQ ID NO: 3236614 - RNA, 17 nt, Human
uauauggucuaauguuu

SEQ ID NO: 3236615 - RNA, 15 nt, Human
uauauggucuaaugu

SEQ ID NO: 3236616 - RNA, 15 nt, Human
uaggaacugcugggc

SEQ ID NO: 3236617 - RNA, 18 nt, Human
uaggaacugcugggcuug

SEQ ID NO: 3236618 - RNA, 17 nt, Human
uaggaacacuccuucac

SEQ ID NO: 3236619 - RNA, 14 nt, Human
uaggaacaaaucuu

SEQ ID NO: 3236620 - RNA, 22 nt, Human
uaggaacaaaucuuccuggucg

SEQ ID NO: 3236621 - RNA, 16 nt, Human
uaggaacaaaucuucc

SEQ ID NO: 3236622 - RNA, 13 nt, Human
uaggaacacuccu

SEQ ID NO: 3236623 - RNA, 14 nt, Human
uaggaacacuccuu

SEQ ID NO: 3236624 - RNA, 16 nt, Human
uagcugggaaagcaua

SEQ ID NO: 3236625 - RNA, 18 nt, Human
uagcugggaaagcauaaa

SEQ ID NO: 3236626 - RNA, 13 nt, Human
uaggaacaaaucu

SEQ ID NO: 3236627 - RNA, 16 nt, Human
uaggaagacuuuggaa

SEQ ID NO: 3236628 - RNA, 17 nt, Human
uaggaagacuuuggaaa

SEQ ID NO: 3236629 - RNA, 21 nt, Human
uaggaagacacauuaucuucu

SEQ ID NO: 3236630 - RNA, 21 nt, Human
uaggaaggcacuucugccuga

SEQ ID NO: 3236631 - RNA, 19 nt, Human
uaggaaggcacuucugccu

SEQ ID NO: 3236632 - RNA, 17 nt, Human
uaggaaggcacuucugc

SEQ ID NO: 3236633 - RNA, 14 nt, Human
uaggaagacuuugg

SEQ ID NO: 3236634 - RNA, 15 nt, Human
uaggaagacuuugga

SEQ ID NO: 3236635 - RNA, 13 nt, Human
uaggaagacuuug

SEQ ID NO: 3236636 - RNA, 15 nt, Human
uaggccaaagacaaa

SEQ ID NO: 3236637 - RNA, 23 nt, Human
uaggaauugacccacaagaaaug

SEQ ID NO: 3236638 - RNA, 20 nt, Human
uaggaauugacccacaagaa

SEQ ID NO: 3236639 - RNA, 15 nt, Human
uaggaagguuaaugu

SEQ ID NO: 3236640 - RNA, 14 nt, Human
uaggaaggucauuu

SEQ ID NO: 3236641 - RNA, 19 nt, Human
uaggaaguuaaaagcacaa

SEQ ID NO: 3236642 - RNA, 23 nt, Human
uaggaaggucauuuccauguaug

SEQ ID NO: 3236643 - RNA, 19 nt, Human
uaggaaggucauuuccaug

SEQ ID NO: 3236644 - RNA, 18 nt, Human
uaggaaggucauuuccau

SEQ ID NO: 3236645 - RNA, 16 nt, Human
uaggaaggucauuucc

SEQ ID NO: 3236646 - RNA, 13 nt, Human
uaggccaugggac

SEQ ID NO: 3236647 - RNA, 17 nt, Human
uaggccguuccuucaaa

SEQ ID NO: 3236648 - RNA, 22 nt, Human
uaggccuacuggggaucagagu

SEQ ID NO: 3236649 - RNA, 18 nt, Human
uaggccaaagacaaauag

SEQ ID NO: 3236650 - RNA, 21 nt, Human
uaggaaguuagccuuuaucua

SEQ ID NO: 3236651 - RNA, 19 nt, Human
uaggccaaagacaaauagu

SEQ ID NO: 3236652 - RNA, 18 nt, Human
uaggccaaucagaagcua

SEQ ID NO: 3236653 - RNA, 14 nt, Human
uaggccuggccaga

SEQ ID NO: 3236654 - RNA, 19 nt, Human
uaggccucaggugaaacuc

SEQ ID NO: 3236655 - RNA, 13 nt, Human
uaggccuggccag

SEQ ID NO: 3236656 - RNA, 16 nt, Human
uagccccacaggaggu

SEQ ID NO: 3236657 - RNA, 12 nt, Human
uagcccugcccg

SEQ ID NO: 3236658 - RNA, 18 nt, Human
uagcccucacccuggggc

SEQ ID NO: 3236659 - RNA, 16 nt, Human
uagccuaggugacaga

SEQ ID NO: 3236660 - RNA, 11 nt, Human
uagccucacgc

SEQ ID NO: 3236661 - RNA, 14 nt, Human
uagcccaaaaccaa

SEQ ID NO: 3236662 - RNA, 20 nt, Human
uagcccaggauauauuuuau

SEQ ID NO: 3236663 - RNA, 22 nt, Human
uagcccaggauauauuuuauuu

SEQ ID NO: 3236664 - RNA, 21 nt, Human
uagcccaggauauauuuuauu

SEQ ID NO: 3236665 - RNA, 17 nt, Human
uagcucuguacaucuuu

SEQ ID NO: 3236666 - RNA, 11 nt, Human
uagcugggacu

SEQ ID NO: 3236667 - RNA, 19 nt, Human
uagcugggacuacaggcac

SEQ ID NO: 3236668 - RNA, 20 nt, Human
uagcugggacuacaggcacc

SEQ ID NO: 3236669 - RNA, 18 nt, Human
uagcugggacuacaggug

SEQ ID NO: 3236670 - RNA, 22 nt, Human
uagcugggagaaagagagagcu

SEQ ID NO: 3236671 - RNA, 17 nt, Human
uagcuggagaggagccc

SEQ ID NO: 3236672 - RNA, 23 nt, Human
uagcuggagaggagcccugccuc

SEQ ID NO: 3236673 - RNA, 19 nt, Human
uagcuggagaggagcccug

SEQ ID NO: 3236674 - RNA, 21 nt, Human
uagcucuaggagggcuggcaa

SEQ ID NO: 3236675 - RNA, 11 nt, Human
uagaugugugg

SEQ ID NO: 3236676 - RNA, 16 nt, Human
uagaugugcugcuuug

SEQ ID NO: 3236677 - RNA, 15 nt, Human
uagaugugagaaaac

SEQ ID NO: 3236678 - RNA, 21 nt, Human
uagauacaccucaacuaaauc

SEQ ID NO: 3236679 - RNA, 15 nt, Human
uagauaauuaaccaa

SEQ ID NO: 3236680 - RNA, 12 nt, Human
uagauacaauca

SEQ ID NO: 3236681 - RNA, 13 nt, Human
uagauacaaucag

SEQ ID NO: 3236682 - RNA, 14 nt, Human
uagauacaaucagc

SEQ ID NO: 3236683 - RNA, 16 nt, Human
uagauacaaucagcug

SEQ ID NO: 3236684 - RNA, 17 nt, Human
uagauacaaucagcugc

SEQ ID NO: 3236685 - RNA, 19 nt, Human
uagauacaaucagcugcuu

SEQ ID NO: 3236686 - RNA, 21 nt, Human
uagauacaaucagcugcuuug

SEQ ID NO: 3236687 - RNA, 22 nt, Human
uagauacaaucagcugcuuugu

SEQ ID NO: 3236688 - RNA, 12 nt, Human
uagauguauaua

SEQ ID NO: 3236689 - RNA, 16 nt, Human
uagauguaauuuugug

SEQ ID NO: 3236690 - RNA, 14 nt, Human
uagauguaaauuuu

SEQ ID NO: 3236691 - RNA, 13 nt, Human
uagauguaaauuu

SEQ ID NO: 3236692 - RNA, 20 nt, Human
uagcagggcauggcugggaa

SEQ ID NO: 3236693 - RNA, 23 nt, Human
uagcagagaaugaaagggcccag

SEQ ID NO: 3236694 - RNA, 19 nt, Human
uagcagagaaugaaagggc

SEQ ID NO: 3236695 - RNA, 13 nt, Human
uagcagaguuaaa

SEQ ID NO: 3236696 - RNA, 14 nt, Human
uagcagaguuaaau

SEQ ID NO: 3236697 - RNA, 16 nt, Human
uagcagaguuaaaucu

SEQ ID NO: 3236698 - RNA, 17 nt, Human
uagcagaucuguuuugu

SEQ ID NO: 3236699 - RNA, 16 nt, Human
uagcacuuugggaggc

SEQ ID NO: 3236700 - RNA, 15 nt, Human
uagauugagaaaugu

SEQ ID NO: 3236701 - RNA, 13 nt, Human
uagauguuuuaua

SEQ ID NO: 3236702 - RNA, 18 nt, Human
uagauuaaaucauacucc

SEQ ID NO: 3236703 - RNA, 21 nt, Human
uagagucauuguaauguugug

SEQ ID NO: 3236704 - RNA, 19 nt, Human
uagagucauuguaauguug

SEQ ID NO: 3236705 - RNA, 16 nt, Human
uagagucauuguaaug

SEQ ID NO: 3236706 - RNA, 15 nt, Human
uagagucauuguaau

SEQ ID NO: 3236707 - RNA, 14 nt, Human
uagagucauuguaa

SEQ ID NO: 3236708 - RNA, 18 nt, Human
uagagucaacuacacaaa

SEQ ID NO: 3236709 - RNA, 21 nt, Human
uagagucaacuacacaaagca

SEQ ID NO: 3236710 - RNA, 19 nt, Human
uagaguagagguauaauug

SEQ ID NO: 3236711 - RNA, 13 nt, Human
uagaguacacugc

SEQ ID NO: 3236712 - RNA, 19 nt, Human
uagaguaaaaagaaaacaa

SEQ ID NO: 3236713 - RNA, 17 nt, Human
uagaguacacugccugc

SEQ ID NO: 3236714 - RNA, 21 nt, Human
uagaguacacugccugccuua

SEQ ID NO: 3236715 - RNA, 22 nt, Human
uagaguacacugccugccuuaa

SEQ ID NO: 3236716 - RNA, 16 nt, Human
uagagagagaccacuu

SEQ ID NO: 3236717 - RNA, 17 nt, Human
uagaguaaaaagaaaac

SEQ ID NO: 3236718 - RNA, 20 nt, Human
uagacugccacaaggaagaa

SEQ ID NO: 3236719 - RNA, 21 nt, Human
uagaccuauaauccuugauaa

SEQ ID NO: 3236720 - RNA, 16 nt, Human
uagaacccuugcacag

SEQ ID NO: 3236721 - RNA, 12 nt, Human
uagaaccaggca

SEQ ID NO: 3236722 - RNA, 23 nt, Human
uagaaccaggcaacuugggaacu

SEQ ID NO: 3236723 - RNA, 22 nt, Human
uagacugccagcucuuccuagc

SEQ ID NO: 3236724 - RNA, 20 nt, Human
uagacuggccugaaccacag

SEQ ID NO: 3236725 - RNA, 17 nt, Human
uagacugccagcucuuc

SEQ ID NO: 3236726 - RNA, 16 nt, Human
uagacugccagcucuu

SEQ ID NO: 3236727 - RNA, 14 nt, Human
uagacugccagcuc

SEQ ID NO: 3236728 - RNA, 13 nt, Human
uagacugccagcu

SEQ ID NO: 3236729 - RNA, 12 nt, Human
uagacugccagc

SEQ ID NO: 3236730 - RNA, 11 nt, Human
uagacugccag

SEQ ID NO: 3236731 - RNA, 23 nt, Human
uagacugccacaaggaagaaauu

SEQ ID NO: 3236732 - RNA, 22 nt, Human
uagacugccacaaggaagaaau

SEQ ID NO: 3236733 - RNA, 11 nt, Human
uagagacaggg

SEQ ID NO: 3236734 - RNA, 17 nt, Human
uagagaacuaaacuagu

SEQ ID NO: 3236735 - RNA, 23 nt, Human
uagacuuuuccaauaugugauuu

SEQ ID NO: 3236736 - RNA, 20 nt, Human
uagacuuuuccaauauguga

SEQ ID NO: 3236737 - RNA, 14 nt, Human
uagacuuuuccaau

SEQ ID NO: 3236738 - RNA, 13 nt, Human
uagacuugaaaag

SEQ ID NO: 3236739 - RNA, 14 nt, Human
uagacuugaaaaga

SEQ ID NO: 3236740 - RNA, 18 nt, Human
uagacuugaaaagagaca

SEQ ID NO: 3236741 - RNA, 19 nt, Human
uagacuugaaaagagacag

SEQ ID NO: 3236742 - RNA, 20 nt, Human
uagacuugaaaagagacagg

SEQ ID NO: 3236743 - RNA, 23 nt, Human
uagacuugaaaagagacaggcag

SEQ ID NO: 3236744 - RNA, 17 nt, Human
uaauuuugacacugaaa

SEQ ID NO: 3236745 - RNA, 20 nt, Human
uaauuuugacacugaaauaa

SEQ ID NO: 3236746 - RNA, 20 nt, Human
uaauuuugauagugggacca

SEQ ID NO: 3236747 - RNA, 18 nt, Human
uaauuuugauagugggac

SEQ ID NO: 3236748 - RNA, 19 nt, Human
uaauuuuguaauguaucaa

SEQ ID NO: 3236749 - RNA, 12 nt, Human
uaauuuuguaau

SEQ ID NO: 3236750 - RNA, 11 nt, Human
uaauuuugucu

SEQ ID NO: 3236751 - RNA, 13 nt, Human
uacaauuuuuauu

SEQ ID NO: 3236752 - RNA, 17 nt, Human
uacaauuuuuauuucuu

SEQ ID NO: 3236753 - RNA, 22 nt, Human
uacaauuuuuauuucuuuuacu

SEQ ID NO: 3236754 - RNA, 20 nt, Human
uacacaaaaucaaauaauac

SEQ ID NO: 3236755 - RNA, 13 nt, Human
uacacaaaaucaa

SEQ ID NO: 3236756 - RNA, 19 nt, Human
uacaagagcuuaacagugu

SEQ ID NO: 3236757 - RNA, 17 nt, Human
uacaagacaacauugua

SEQ ID NO: 3236758 - RNA, 15 nt, Human
uacaagacacaguga

SEQ ID NO: 3236759 - RNA, 18 nt, Human
uacaagacaacauuguaa

SEQ ID NO: 3236760 - RNA, 15 nt, Human
uacacacgcugccuu

SEQ ID NO: 3236761 - RNA, 14 nt, Human
uacacacgcugccu

SEQ ID NO: 3236762 - RNA, 15 nt, Human
uacacacacauacac

SEQ ID NO: 3236763 - RNA, 21 nt, Human
uacacacacacgcgugcacac

SEQ ID NO: 3236764 - RNA, 21 nt, Human
uacacaaugguuuucuugugu

SEQ ID NO: 3236765 - RNA, 17 nt, Human
uacacaaugguuuucuu

SEQ ID NO: 3236766 - RNA, 16 nt, Human
uacacugugcugaguc

SEQ ID NO: 3236767 - RNA, 23 nt, Human
uacacuggcaaugguaguuucug

SEQ ID NO: 3236768 - RNA, 24 nt, Human
uacacuggcaaugguaguuucugu

SEQ ID NO: 3236769 - RNA, 18 nt, Human
uacacugccugccuuaag

SEQ ID NO: 3236770 - RNA, 21 nt, Human
uacacugccugccuuaaguga

SEQ ID NO: 3236771 - RNA, 20 nt, Human
uacacuggcaaugguaguuu

SEQ ID NO: 3236772 - RNA, 22 nt, Human
uacacuggcaaugguaguuucu

SEQ ID NO: 3236773 - RNA, 18 nt, Human
uacacuggcaaugguagu

SEQ ID NO: 3236774 - RNA, 16 nt, Human
uacacacgcugccuuc

SEQ ID NO: 3236775 - RNA, 17 nt, Human
uacacugccugccuuaa

SEQ ID NO: 3236776 - RNA, 17 nt, Human
uacagcccaccuggcuu

SEQ ID NO: 3236777 - RNA, 21 nt, Human
uacagcuugaccgugaggcca

SEQ ID NO: 3236778 - RNA, 22 nt, Human
uacagcuugaccgugaggccag

SEQ ID NO: 3236779 - RNA, 18 nt, Human
uacaggaaaagcugcuga

SEQ ID NO: 3236780 - RNA, 17 nt, Human
uacaggaaaagcugcug

SEQ ID NO: 3236781 - RNA, 23 nt, Human
uacagcuugaccgugaggccaga

SEQ ID NO: 3236782 - RNA, 20 nt, Human
uacagccuuaauauuuuccu

SEQ ID NO: 3236783 - RNA, 16 nt, Human
uacaggcacccaccau

SEQ ID NO: 3236784 - RNA, 19 nt, Human
uacaggaaaagcugcugac

SEQ ID NO: 3236785 - RNA, 18 nt, Human
uacagaaucuuguuuuga

SEQ ID NO: 3236786 - RNA, 14 nt, Human
uacagaauuugaau

SEQ ID NO: 3236787 - RNA, 16 nt, Human
uacagaauuugaauua

SEQ ID NO: 3236788 - RNA, 17 nt, Human
uacagaauuugaauuau

SEQ ID NO: 3236789 - RNA, 13 nt, Human
uacacuuuaugca

SEQ ID NO: 3236790 - RNA, 19 nt, Human
uacagaaaaacaaugguaa

SEQ ID NO: 3236791 - RNA, 21 nt, Human
uacaugagguacugagaguga

SEQ ID NO: 3236792 - RNA, 22 nt, Human
uacaugagguacugagagugaa

SEQ ID NO: 3236793 - RNA, 22 nt, Human
uacaugaugauuucagaaacaa

SEQ ID NO: 3236794 - RNA, 17 nt, Human
uacaugaugauuucaga

SEQ ID NO: 3236795 - RNA, 15 nt, Human
uacaugaugauuuca

SEQ ID NO: 3236796 - RNA, 11 nt, Human
uaccaaaauaa

SEQ ID NO: 3236797 - RNA, 18 nt, Human
uacauuuguauuuuucca

SEQ ID NO: 3236798 - RNA, 17 nt, Human
uacauuuguaauuuaag

SEQ ID NO: 3236799 - RNA, 19 nt, Human
uacauuuguaauuuaaggu

SEQ ID NO: 3236800 - RNA, 23 nt, Human
uacauuuuauuaagcuuuuugga

SEQ ID NO: 3236801 - RNA, 16 nt, Human
uaccaacacgagcagg

SEQ ID NO: 3236802 - RNA, 13 nt, Human
uaccaaaauuuua

SEQ ID NO: 3236803 - RNA, 14 nt, Human
uaccaaaauuuuaa

SEQ ID NO: 3236804 - RNA, 23 nt, Human
uaccaaaauuuuaaaaaagggag

SEQ ID NO: 3236805 - RNA, 21 nt, Human
uaccaacuuucaagaacuugu

SEQ ID NO: 3236806 - RNA, 15 nt, Human
uaccaacuuucaaga

SEQ ID NO: 3236807 - RNA, 14 nt, Human
uaccaacuuucaag

SEQ ID NO: 3236808 - RNA, 12 nt, Human
uaccaacuuuac

SEQ ID NO: 3236809 - RNA, 14 nt, Human
uaccaacuuuacug

SEQ ID NO: 3236810 - RNA, 13 nt, Human
uaccaacuuucaa

SEQ ID NO: 3236811 - RNA, 12 nt, Human
uaccaacuuuca

SEQ ID NO: 3236812 - RNA, 13 nt, Human
uaccaaauuaaaa

SEQ ID NO: 3236813 - RNA, 19 nt, Human
uaccaaauuaaaaaaaaau

SEQ ID NO: 3236814 - RNA, 23 nt, Human
uaccaaauuaaaaaaaaauugua

SEQ ID NO: 3236815 - RNA, 22 nt, Human
uacauaagauaaaugugcugaa

SEQ ID NO: 3236816 - RNA, 17 nt, Human
uacaguuacuuuuccuu

SEQ ID NO: 3236817 - RNA, 16 nt, Human
uacaguuacuuuuccu

SEQ ID NO: 3236818 - RNA, 15 nt, Human
uacaguuacuuuucc

SEQ ID NO: 3236819 - RNA, 14 nt, Human
uacaguuacuuuuc

SEQ ID NO: 3236820 - RNA, 19 nt, Human
uacauaagauaaaugugcu

SEQ ID NO: 3236821 - RNA, 18 nt, Human
uacauaagauaaaugugc

SEQ ID NO: 3236822 - RNA, 13 nt, Human
uacaguuauaaaa

SEQ ID NO: 3236823 - RNA, 14 nt, Human
uacaguuauaaaau

SEQ ID NO: 3236824 - RNA, 17 nt, Human
uacaguuauaaaauuaa

SEQ ID NO: 3236825 - RNA, 17 nt, Human
uacauaagauaaaugug

SEQ ID NO: 3236826 - RNA, 15 nt, Human
uaccaccacgcccgg

SEQ ID NO: 3236827 - RNA, 20 nt, Human
uaccauuggaaauuucacgu

SEQ ID NO: 3236828 - RNA, 19 nt, Human
uaccauuggaaauuucacg

SEQ ID NO: 3236829 - RNA, 17 nt, Human
uaccauuggaaauuuca

SEQ ID NO: 3236830 - RNA, 15 nt, Human
uaccauuggaaauuu

SEQ ID NO: 3236831 - RNA, 13 nt, Human
uaccauuggaaau

SEQ ID NO: 3236832 - RNA, 23 nt, Human
uaccauuuugggguacccacugc

SEQ ID NO: 3236833 - RNA, 22 nt, Human
uaccauuuccguaauucuuauu

SEQ ID NO: 3236834 - RNA, 20 nt, Human
uaccauuuccguaauucuua

SEQ ID NO: 3236835 - RNA, 19 nt, Human
uaccauuuccguaauucuu

SEQ ID NO: 3236836 - RNA, 13 nt, Human
uaccauuucagua

SEQ ID NO: 3236837 - RNA, 21 nt, Human
uaccaaugcucuuuucacagc

SEQ ID NO: 3236838 - RNA, 21 nt, Human
uaccaagaaaggaaccuguca

SEQ ID NO: 3236839 - RNA, 22 nt, Human
uacccaggugcuaggaacacuc

SEQ ID NO: 3236840 - RNA, 18 nt, Human
uacccagcgagcccuggu

SEQ ID NO: 3236841 - RNA, 16 nt, Human
uacccagcgagcccug

SEQ ID NO: 3236842 - RNA, 14 nt, Human
uacccacugcucug

SEQ ID NO: 3236843 - RNA, 13 nt, Human
uacccacugcucu

SEQ ID NO: 3236844 - RNA, 12 nt, Human
uacccacugcuc

SEQ ID NO: 3236845 - RNA, 11 nt, Human
uacccacugcu

SEQ ID NO: 3236846 - RNA, 17 nt, Human
uacccacccccacccaa

SEQ ID NO: 3236847 - RNA, 19 nt, Human
uacccacccccacccaagg

SEQ ID NO: 3236848 - RNA, 23 nt, Human
uacccacccccacccaagggccu

SEQ ID NO: 3236849 - RNA, 12 nt, Human
uacccaccccca

SEQ ID NO: 3236850 - RNA, 15 nt, Human
uacccacccccaccc

SEQ ID NO: 3236851 - RNA, 12 nt, Human
uagaacagguuu

SEQ ID NO: 3236852 - RNA, 14 nt, Human
uagaacagguuuuu

SEQ ID NO: 3236853 - RNA, 18 nt, Human
uagaacaguggaaacuau

SEQ ID NO: 3236854 - RNA, 20 nt, Human
uagaacaguggaaacuaugu

SEQ ID NO: 3236855 - RNA, 13 nt, Human
uagaacagguuuu

SEQ ID NO: 3236856 - RNA, 17 nt, Human
uagaaauguuugcugaa

SEQ ID NO: 3236857 - RNA, 15 nt, Human
uagaaauguuugcug

SEQ ID NO: 3236858 - RNA, 17 nt, Human
uagaacaacauauacaa

SEQ ID NO: 3236859 - RNA, 23 nt, Human
uagaaauaucugaaaauguaugu

SEQ ID NO: 3236860 - RNA, 21 nt, Human
uagaaauaucugaaaauguau

SEQ ID NO: 3236861 - RNA, 20 nt, Human
uagaaauaucugaaaaugua

SEQ ID NO: 3236862 - RNA, 15 nt, Human
uagaaauauaauuga

SEQ ID NO: 3236863 - RNA, 15 nt, Human
uagaaauauucacau

SEQ ID NO: 3236864 - RNA, 13 nt, Human
uacuuuauagaag

SEQ ID NO: 3236865 - RNA, 16 nt, Human
uacuuuaccucucugu

SEQ ID NO: 3236866 - RNA, 17 nt, Human
uacuuuaccucucuguc

SEQ ID NO: 3236867 - RNA, 18 nt, Human
uacuuuaccucucuguca

SEQ ID NO: 3236868 - RNA, 19 nt, Human
uacuuuaccucucugucau

SEQ ID NO: 3236869 - RNA, 22 nt, Human
uacuuuaccucucugucaugug

SEQ ID NO: 3236870 - RNA, 18 nt, Human
uagaaacuggaaauacua

SEQ ID NO: 3236871 - RNA, 17 nt, Human
uagaaacuggaaauacu

SEQ ID NO: 3236872 - RNA, 14 nt, Human
uagaaacuggaaau

SEQ ID NO: 3236873 - RNA, 15 nt, Human
uacuuuccaauucuc

SEQ ID NO: 3236874 - RNA, 21 nt, Human
uacuuuaucaugaaugcuuuu

SEQ ID NO: 3236875 - RNA, 22 nt, Human
uacuuuaucaugaaugcuuuua

SEQ ID NO: 3236876 - RNA, 19 nt, Human
uacuuuauagaagaaugca

SEQ ID NO: 3236877 - RNA, 18 nt, Human
uacuuuauagaagaaugc

SEQ ID NO: 3236878 - RNA, 16 nt, Human
uacuuuauagaagaau

SEQ ID NO: 3236879 - RNA, 14 nt, Human
uacuuuauagaaga

SEQ ID NO: 3236880 - RNA, 15 nt, Human
uagaaauaaaccuua

SEQ ID NO: 3236881 - RNA, 21 nt, Human
uagaaaguguucuguuacaaa

SEQ ID NO: 3236882 - RNA, 20 nt, Human
uagaaaguguucuguuacaa

SEQ ID NO: 3236883 - RNA, 22 nt, Human
uagaaaguguucuguuacaaaa

SEQ ID NO: 3236884 - RNA, 22 nt, Human
uagaaagcuuuguugaaagaaa

SEQ ID NO: 3236885 - RNA, 19 nt, Human
uagaaaguguucuguuaca

SEQ ID NO: 3236886 - RNA, 16 nt, Human
uagaaaguguucuguu

SEQ ID NO: 3236887 - RNA, 23 nt, Human
uagaaagcugcugugaucccagu

SEQ ID NO: 3236888 - RNA, 16 nt, Human
uacuugcacucuucua

SEQ ID NO: 3236889 - RNA, 16 nt, Human
uacuugcccugaccau

SEQ ID NO: 3236890 - RNA, 22 nt, Human
uacuugcccugaccaugcauuu

SEQ ID NO: 3236891 - RNA, 14 nt, Human
uacuugcacucuuc

SEQ ID NO: 3236892 - RNA, 16 nt, Human
uacuugauaagggacu

SEQ ID NO: 3236893 - RNA, 21 nt, Human
uacuugauaacaauguuuuaa

SEQ ID NO: 3236894 - RNA, 17 nt, Human
uacuugauaacaauguu

SEQ ID NO: 3236895 - RNA, 14 nt, Human
uacuugaauaguau

SEQ ID NO: 3236896 - RNA, 15 nt, Human
uacuugaauaguauu

SEQ ID NO: 3236897 - RNA, 21 nt, Human
uacuuagcacuuggccugaga

SEQ ID NO: 3236898 - RNA, 17 nt, Human
uacuuagcacuuggccu

SEQ ID NO: 3236899 - RNA, 17 nt, Human
uacuuggaaauauuaaa

SEQ ID NO: 3236900 - RNA, 21 nt, Human
uacuuggaaauauuaaaagaa

SEQ ID NO: 3236901 - RNA, 14 nt, Human
uacuuguggacaca

SEQ ID NO: 3236902 - RNA, 19 nt, Human
uacuuggucacagccaggc

SEQ ID NO: 3236903 - RNA, 15 nt, Human
uacuuggucacagcc

SEQ ID NO: 3236904 - RNA, 18 nt, Human
uacuuggucacagccagg

SEQ ID NO: 3236905 - RNA, 17 nt, Human
uacuuggucacagccag

SEQ ID NO: 3236906 - RNA, 18 nt, Human
uacuuguggacacagcuc

SEQ ID NO: 3236907 - RNA, 15 nt, Human
uacuuguggacacag

SEQ ID NO: 3236908 - RNA, 19 nt, Human
uacuuguggacacagcucu

SEQ ID NO: 3236909 - RNA, 23 nt, Human
uacuuuaacuuaguuuugcauag

SEQ ID NO: 3236910 - RNA, 22 nt, Human
uacuuuaacuuaguuuugcaua

SEQ ID NO: 3236911 - RNA, 21 nt, Human
uacuuuaacuuaguuuugcau

SEQ ID NO: 3236912 - RNA, 13 nt, Human
uacuuuaacaugc

SEQ ID NO: 3236913 - RNA, 14 nt, Human
uacuuuaacaugcc

SEQ ID NO: 3236914 - RNA, 17 nt, Human
uacugugugugagugug

SEQ ID NO: 3236915 - RNA, 23 nt, Human
uacugugugugagugugaauaua

SEQ ID NO: 3236916 - RNA, 21 nt, Human
uacuguuuaagacacuuccgu

SEQ ID NO: 3236917 - RNA, 16 nt, Human
uacgaaguucaagauc

SEQ ID NO: 3236918 - RNA, 17 nt, Human
uacgaaguucaagauca

SEQ ID NO: 3236919 - RNA, 18 nt, Human
uacgaaguucaagaucaa

SEQ ID NO: 3236920 - RNA, 21 nt, Human
uacgacaaaggacgcucccag

SEQ ID NO: 3236921 - RNA, 21 nt, Human
uacgacucuuuuccaaacaca

SEQ ID NO: 3236922 - RNA, 12 nt, Human
uacuaacuucua

SEQ ID NO: 3236923 - RNA, 18 nt, Human
uacuaacuucuaaaacug

SEQ ID NO: 3236924 - RNA, 17 nt, Human
uacuaacuucuaaaacu

SEQ ID NO: 3236925 - RNA, 15 nt, Human
uacuacagucaagau

SEQ ID NO: 3236926 - RNA, 17 nt, Human
uacuacagucaagauag

SEQ ID NO: 3236927 - RNA, 21 nt, Human
uacuacagucaagauagaaag

SEQ ID NO: 3236928 - RNA, 17 nt, Human
uacuacaauauguacau

SEQ ID NO: 3236929 - RNA, 14 nt, Human
uacuacaauaugua

SEQ ID NO: 3236930 - RNA, 12 nt, Human
uacuacaguccu

SEQ ID NO: 3236931 - RNA, 17 nt, Human
uacuacaguccucccau

SEQ ID NO: 3236932 - RNA, 22 nt, Human
uacuaauaaaauuuaaaagucu

SEQ ID NO: 3236933 - RNA, 20 nt, Human
uacuaacuucuaaaacugua

SEQ ID NO: 3236934 - RNA, 19 nt, Human
uacuaacuucuaaaacugu

SEQ ID NO: 3236935 - RNA, 19 nt, Human
uaccuugucauuuuggucu

SEQ ID NO: 3236936 - RNA, 23 nt, Human
uaccuugcacacaucaucuguaa

SEQ ID NO: 3236937 - RNA, 12 nt, Human
uaccuugcccca

SEQ ID NO: 3236938 - RNA, 15 nt, Human
uaccuugccccaacc

SEQ ID NO: 3236939 - RNA, 16 nt, Human
uaccuugccccaaccc

SEQ ID NO: 3236940 - RNA, 20 nt, Human
uaccuugccccaacccuucu

SEQ ID NO: 3236941 - RNA, 21 nt, Human
uaccuugccccaacccuucuu

SEQ ID NO: 3236942 - RNA, 23 nt, Human
uaccuugccccaacccuucuuca

SEQ ID NO: 3236943 - RNA, 20 nt, Human
uaccuuugaauucaagaaca

SEQ ID NO: 3236944 - RNA, 16 nt, Human
uaccuugaacugaagg

SEQ ID NO: 3236945 - RNA, 21 nt, Human
uaccuugcacacaucaucugu

SEQ ID NO: 3236946 - RNA, 22 nt, Human
uacccaucccauaugccugggc

SEQ ID NO: 3236947 - RNA, 23 nt, Human
uacugauguuccuagugaaagag

SEQ ID NO: 3236948 - RNA, 14 nt, Human
uacugauggaauuu

SEQ ID NO: 3236949 - RNA, 22 nt, Human
uacugaggauauggacacuggu

SEQ ID NO: 3236950 - RNA, 21 nt, Human
uacugagcagugauauucuuu

SEQ ID NO: 3236951 - RNA, 19 nt, Human
uacugagagugaacaaauu

SEQ ID NO: 3236952 - RNA, 18 nt, Human
uacugagcagugauauuc

SEQ ID NO: 3236953 - RNA, 15 nt, Human
uacugagcagugaua

SEQ ID NO: 3236954 - RNA, 15 nt, Human
uacugaggugcuaug

SEQ ID NO: 3236955 - RNA, 12 nt, Human
uacucccaucug

SEQ ID NO: 3236956 - RNA, 14 nt, Human
uacucccaucugug

SEQ ID NO: 3236957 - RNA, 16 nt, Human
uacucccaucugugaa

SEQ ID NO: 3236958 - RNA, 17 nt, Human
uacucccaucugugaaa

SEQ ID NO: 3236959 - RNA, 16 nt, Human
uacucauggaagagau

SEQ ID NO: 3236960 - RNA, 19 nt, Human
uacuccugucuucugcuuu

SEQ ID NO: 3236961 - RNA, 17 nt, Human
uacuccugucuucugcu

SEQ ID NO: 3236962 - RNA, 15 nt, Human
uacuccugucuucug

SEQ ID NO: 3236963 - RNA, 13 nt, Human
uacuccugucuuc

SEQ ID NO: 3236964 - RNA, 21 nt, Human
uacuccugucuucugcuuugu

SEQ ID NO: 3236965 - RNA, 20 nt, Human
uacuccugucuucugcuuug

SEQ ID NO: 3236966 - RNA, 22 nt, Human
uacuccugucuucugcuuuguu

SEQ ID NO: 3236967 - RNA, 15 nt, Human
uacuaccuccucucc

SEQ ID NO: 3236968 - RNA, 17 nt, Human
uacuaccuccucuccug

SEQ ID NO: 3236969 - RNA, 14 nt, Human
uacuaccuguaaug

SEQ ID NO: 3236970 - RNA, 14 nt, Human
uacucaccucaccc

SEQ ID NO: 3236971 - RNA, 12 nt, Human
uacucaccucac

SEQ ID NO: 3236972 - RNA, 19 nt, Human
uaauucuuugaccuguugg

SEQ ID NO: 3236973 - RNA, 13 nt, Human
uaauucuuugcaa

SEQ ID NO: 3236974 - RNA, 11 nt, Human
uaauucuuugc

SEQ ID NO: 3236975 - RNA, 21 nt, Human
uaauucuuugcaaaaauccaa

SEQ ID NO: 3236976 - RNA, 17 nt, Human
uaauucuuugcaaaaau

SEQ ID NO: 3236977 - RNA, 16 nt, Human
uaauucuuugcaaaaa

SEQ ID NO: 3236978 - RNA, 14 nt, Human
uaauucuuugcaaa

SEQ ID NO: 3236979 - RNA, 22 nt, Human
uaauucuuauuccauauuagaa

SEQ ID NO: 3236980 - RNA, 19 nt, Human
uaauucuuauuccauauua

SEQ ID NO: 3236981 - RNA, 17 nt, Human
uaauucuuauuccauau

SEQ ID NO: 3236982 - RNA, 16 nt, Human
uaauucuuauuccaua

SEQ ID NO: 3236983 - RNA, 15 nt, Human
uaauucuuauuccau

SEQ ID NO: 3236984 - RNA, 20 nt, Human
uaauugacaggauuauugga

SEQ ID NO: 3236985 - RNA, 15 nt, Human
uaauucuuuuuuauu

SEQ ID NO: 3236986 - RNA, 16 nt, Human
uaauucuuuuuuauua

SEQ ID NO: 3236987 - RNA, 17 nt, Human
uaauucuuuuuuauuaa

SEQ ID NO: 3236988 - RNA, 18 nt, Human
uaauucuuuuuuauuaau

SEQ ID NO: 3236989 - RNA, 19 nt, Human
uaauucuuuuuuauuaauc

SEQ ID NO: 3236990 - RNA, 20 nt, Human
uaauucuuuuuuauuaauca

SEQ ID NO: 3236991 - RNA, 21 nt, Human
uaauucuuuuuuauuaaucac

SEQ ID NO: 3236992 - RNA, 23 nt, Human
uaauugaaaagaaguagugucug

SEQ ID NO: 3236993 - RNA, 22 nt, Human
uaauugacaggauuauuggaaa

SEQ ID NO: 3236994 - RNA, 19 nt, Human
uaauugacaggcgaaagaa

SEQ ID NO: 3236995 - RNA, 17 nt, Human
uaauugaaagaauguaa

SEQ ID NO: 3236996 - RNA, 15 nt, Human
uaauugaaagaaugu

SEQ ID NO: 3236997 - RNA, 14 nt, Human
uaauucuuauucca

SEQ ID NO: 3236998 - RNA, 15 nt, Human
uaauucuguucugau

SEQ ID NO: 3236999 - RNA, 20 nt, Human
uaauucuguucugauauuaa

SEQ ID NO: 3237000 - RNA, 21 nt, Human
uaauucuguucugauauuaau

SEQ ID NO: 3237001 - RNA, 22 nt, Human
uaauucuguucugauauuaauu

SEQ ID NO: 3237002 - RNA, 14 nt, Human
uaauucugaaguua

SEQ ID NO: 3237003 - RNA, 20 nt, Human
uaauucugaaguuauauuuc

SEQ ID NO: 3237004 - RNA, 19 nt, Human
uaauucugaaguuauauuu

SEQ ID NO: 3237005 - RNA, 17 nt, Human
uaauucugaaguuauau

SEQ ID NO: 3237006 - RNA, 16 nt, Human
uaauucugaaguuaua

SEQ ID NO: 3237007 - RNA, 23 nt, Human
uaauucugaaguuauauuuccua

SEQ ID NO: 3237008 - RNA, 22 nt, Human
uaauuacagugccuaaaauaag

SEQ ID NO: 3237009 - RNA, 15 nt, Human
uaauuaauuuggagc

SEQ ID NO: 3237010 - RNA, 20 nt, Human
uaauuaauuuggagcacaaa

SEQ ID NO: 3237011 - RNA, 19 nt, Human
uaauuacagugccuaaaau

SEQ ID NO: 3237012 - RNA, 19 nt, Human
uaauuacaauauuucugau

SEQ ID NO: 3237013 - RNA, 18 nt, Human
uaauuacaauauuucuga

SEQ ID NO: 3237014 - RNA, 16 nt, Human
uaauuacaauauuucu

SEQ ID NO: 3237015 - RNA, 14 nt, Human
uaauuaauuucagu

SEQ ID NO: 3237016 - RNA, 13 nt, Human
uaauuaauuucag

SEQ ID NO: 3237017 - RNA, 11 nt, Human
uaauuaauuuc

SEQ ID NO: 3237018 - RNA, 14 nt, Human
uaauuaaacuguua

SEQ ID NO: 3237019 - RNA, 15 nt, Human
uaauuaaacuguuaa

SEQ ID NO: 3237020 - RNA, 20 nt, Human
uaauuaaaagaauauuuuaa

SEQ ID NO: 3237021 - RNA, 17 nt, Human
uaauuaaaacacaacau

SEQ ID NO: 3237022 - RNA, 20 nt, Human
uaauuaaguacuauguauca

SEQ ID NO: 3237023 - RNA, 17 nt, Human
uaauuaauauauuaaaa

SEQ ID NO: 3237024 - RNA, 20 nt, Human
uaauuaauauauuaaaauuc

SEQ ID NO: 3237025 - RNA, 22 nt, Human
uaauuaauauauuaaaauucca

SEQ ID NO: 3237026 - RNA, 16 nt, Human
uaauguuuaagcagaa

SEQ ID NO: 3237027 - RNA, 23 nt, Human
uaaugcgcaggcuggcccugccc

SEQ ID NO: 3237028 - RNA, 15 nt, Human
uaauguuuauuaaau

SEQ ID NO: 3237029 - RNA, 16 nt, Human
uaauguuuauuaaaug

SEQ ID NO: 3237030 - RNA, 17 nt, Human
uaauguuuauuaaaugc

SEQ ID NO: 3237031 - RNA, 22 nt, Human
uaauguuuauuaaaugcuucau

SEQ ID NO: 3237032 - RNA, 22 nt, Human
uaauguuuaagcagaauuggaa

SEQ ID NO: 3237033 - RNA, 19 nt, Human
uaaugcgcaggcuggcccu

SEQ ID NO: 3237034 - RNA, 22 nt, Human
uaaugcgcaggcuggcccugcc

SEQ ID NO: 3237035 - RNA, 15 nt, Human
uaaugccuuuguaac

SEQ ID NO: 3237036 - RNA, 15 nt, Human
uaaugccugcuuuuu

SEQ ID NO: 3237037 - RNA, 20 nt, Human
uaaugccugcuuuuuggaaa

SEQ ID NO: 3237038 - RNA, 22 nt, Human
uaauuuuccuuuaauaugaaau

SEQ ID NO: 3237039 - RNA, 14 nt, Human
uaauuuuauuuugu

SEQ ID NO: 3237040 - RNA, 15 nt, Human
uaauuuuauuccaga

SEQ ID NO: 3237041 - RNA, 18 nt, Human
uaauuuuauuuuaaaauu

SEQ ID NO: 3237042 - RNA, 19 nt, Human
uaauuuuauuuuaaaauuu

SEQ ID NO: 3237043 - RNA, 19 nt, Human
uaauuuggaccauuuuccu

SEQ ID NO: 3237044 - RNA, 15 nt, Human
uaauuuguguguuuu

SEQ ID NO: 3237045 - RNA, 21 nt, Human
uaauuuguuggggcuuuacau

SEQ ID NO: 3237046 - RNA, 22 nt, Human
uaauuuguuggggcuuuacaua

SEQ ID NO: 3237047 - RNA, 12 nt, Human
uaauuuguuucc

SEQ ID NO: 3237048 - RNA, 16 nt, Human
uaauuuguuuccagca

SEQ ID NO: 3237049 - RNA, 17 nt, Human
uaauuuguggugauuug

SEQ ID NO: 3237050 - RNA, 15 nt, Human
uaauuuguaagaaua

SEQ ID NO: 3237051 - RNA, 17 nt, Human
uaauuuggaaacuaaua

SEQ ID NO: 3237052 - RNA, 19 nt, Human
uaauuuggaaacuaauaaa

SEQ ID NO: 3237053 - RNA, 20 nt, Human
uaauuuggaaacuaauaaaa

SEQ ID NO: 3237054 - RNA, 21 nt, Human
uaauuuggaaacuaauaaaau

SEQ ID NO: 3237055 - RNA, 22 nt, Human
uaauuuggaaacuaauaaaaua

SEQ ID NO: 3237056 - RNA, 23 nt, Human
uaauuuggaaacuaauaaaauau

SEQ ID NO: 3237057 - RNA, 20 nt, Human
uaauuuggaccauuuuccug

SEQ ID NO: 3237058 - RNA, 17 nt, Human
uaauuuggagcacaaaa

SEQ ID NO: 3237059 - RNA, 21 nt, Human
uaauuuggagcacaaaauuca

SEQ ID NO: 3237060 - RNA, 23 nt, Human
uaauuuggagcacaaaauucaaa

SEQ ID NO: 3237061 - RNA, 17 nt, Human
uaauuuggaccauuuuc

SEQ ID NO: 3237062 - RNA, 20 nt, Human
uaauuggcuuuacuauuuuu

SEQ ID NO: 3237063 - RNA, 20 nt, Human
uaauugguuaucaugggaaa

SEQ ID NO: 3237064 - RNA, 14 nt, Human
uaauugcacaacag

SEQ ID NO: 3237065 - RNA, 17 nt, Human
uaauugcauuugcuuuu

SEQ ID NO: 3237066 - RNA, 17 nt, Human
uaauugaucaguuuuca

SEQ ID NO: 3237067 - RNA, 16 nt, Human
uaauugcugaggcaug

SEQ ID NO: 3237068 - RNA, 22 nt, Human
uaauugugcaagcuuuuccuaa

SEQ ID NO: 3237069 - RNA, 12 nt, Human
uaauuguauuuu

SEQ ID NO: 3237070 - RNA, 15 nt, Human
uaauuguauuuuugu

SEQ ID NO: 3237071 - RNA, 12 nt, Human
uaauugugugaa

SEQ ID NO: 3237072 - RNA, 19 nt, Human
uaauugugugaacuuggaa

SEQ ID NO: 3237073 - RNA, 20 nt, Human
uaauugugugaacuuggaag

SEQ ID NO: 3237074 - RNA, 21 nt, Human
uaauugugugaacuuggaagc

SEQ ID NO: 3237075 - RNA, 22 nt, Human
uaauugugugaacuuggaagca

SEQ ID NO: 3237076 - RNA, 19 nt, Human
uaauugugugauauuucag

SEQ ID NO: 3237077 - RNA, 15 nt, Human
uaauugugugauauu

SEQ ID NO: 3237078 - RNA, 12 nt, Human
uaauuguuccag

SEQ ID NO: 3237079 - RNA, 14 nt, Human
uaauuguugcauag

SEQ ID NO: 3237080 - RNA, 22 nt, Human
uaauugugugauauuucagaaa

SEQ ID NO: 3237081 - RNA, 21 nt, Human
uaauugugugauauuucagaa

SEQ ID NO: 3237082 - RNA, 20 nt, Human
uaauugugugauauuucaga

SEQ ID NO: 3237083 - RNA, 15 nt, Human
uaauauauuuaaagg

SEQ ID NO: 3237084 - RNA, 19 nt, Human
uaauauauuuaaagggaaa

SEQ ID NO: 3237085 - RNA, 18 nt, Human
uaauauauuuaaagggaa

SEQ ID NO: 3237086 - RNA, 22 nt, Human
uaauauauuuaaagggaaauug

SEQ ID NO: 3237087 - RNA, 18 nt, Human
uaauauaauacacaaaau

SEQ ID NO: 3237088 - RNA, 12 nt, Human
uaauauagaaaa

SEQ ID NO: 3237089 - RNA, 19 nt, Human
uaauauagaaaaaaacauu

SEQ ID NO: 3237090 - RNA, 22 nt, Human
uaauauagaaaaaaacauucua

SEQ ID NO: 3237091 - RNA, 23 nt, Human
uaauauagaaaaaaacauucuau

SEQ ID NO: 3237092 - RNA, 12 nt, Human
uaauauauuaaa

SEQ ID NO: 3237093 - RNA, 15 nt, Human
uaauauauuaaaauu

SEQ ID NO: 3237094 - RNA, 16 nt, Human
uaauauauuaaaauuc

SEQ ID NO: 3237095 - RNA, 21 nt, Human
uaauauauuaaaauuccaaau

SEQ ID NO: 3237096 - RNA, 18 nt, Human
uaauauguuuccuucccu

SEQ ID NO: 3237097 - RNA, 20 nt, Human
uaauccucuaggaggucucu

SEQ ID NO: 3237098 - RNA, 15 nt, Human
uaauccuugauaaua

SEQ ID NO: 3237099 - RNA, 16 nt, Human
uaauccuugauaauau

SEQ ID NO: 3237100 - RNA, 13 nt, Human
uaaucgaccugcc

SEQ ID NO: 3237101 - RNA, 14 nt, Human
uaaucgaccugccu

SEQ ID NO: 3237102 - RNA, 16 nt, Human
uaaucgaccugccucg

SEQ ID NO: 3237103 - RNA, 16 nt, Human
uaaucguguccccuau

SEQ ID NO: 3237104 - RNA, 17 nt, Human
uaaucgggguauaauag

SEQ ID NO: 3237105 - RNA, 16 nt, Human
uaaugauaugcuugua

SEQ ID NO: 3237106 - RNA, 18 nt, Human
uaaugaucgaaaaaauaa

SEQ ID NO: 3237107 - RNA, 19 nt, Human
uaaugaucgaaaaaauaau

SEQ ID NO: 3237108 - RNA, 20 nt, Human
uaaugaucgaaaaaauaauu

SEQ ID NO: 3237109 - RNA, 13 nt, Human
uaaugauauacug

SEQ ID NO: 3237110 - RNA, 15 nt, Human
uaaugauaugcuugu

SEQ ID NO: 3237111 - RNA, 19 nt, Human
uaaugccacuaaauugaca

SEQ ID NO: 3237112 - RNA, 23 nt, Human
uaaugaugucguuugaaucacag

SEQ ID NO: 3237113 - RNA, 17 nt, Human
uaaugaugucguuugaa

SEQ ID NO: 3237114 - RNA, 12 nt, Human
uaaugauuguuu

SEQ ID NO: 3237115 - RNA, 14 nt, Human
uaaucuuaauguau

SEQ ID NO: 3237116 - RNA, 16 nt, Human
uaaucuuaauguauau

SEQ ID NO: 3237117 - RNA, 14 nt, Human
uaaucucuucuuau

SEQ ID NO: 3237118 - RNA, 15 nt, Human
uaaucucuucuuaua

SEQ ID NO: 3237119 - RNA, 16 nt, Human
uaaucucagugcuuuc

SEQ ID NO: 3237120 - RNA, 20 nt, Human
uaauaaagcgaaaaacucaa

SEQ ID NO: 3237121 - RNA, 17 nt, Human
uaauaaagcgaaaaacu

SEQ ID NO: 3237122 - RNA, 14 nt, Human
uaauaaccagacac

SEQ ID NO: 3237123 - RNA, 13 nt, Human
uaauaaccagaca

SEQ ID NO: 3237124 - RNA, 19 nt, Human
uaauaaccuuuaagucaga

SEQ ID NO: 3237125 - RNA, 15 nt, Human
uaauaaccagacaca

SEQ ID NO: 3237126 - RNA, 23 nt, Human
uaauaagggaaaaaucaaguauu

SEQ ID NO: 3237127 - RNA, 18 nt, Human
uaauaagggaaaaaucaa

SEQ ID NO: 3237128 - RNA, 17 nt, Human
uaauaagggaaaaauca

SEQ ID NO: 3237129 - RNA, 16 nt, Human
uaauaagggaaaaauc

SEQ ID NO: 3237130 - RNA, 15 nt, Human
uaauaagggaaaaau

SEQ ID NO: 3237131 - RNA, 14 nt, Human
uaauaagggaaaaa

SEQ ID NO: 3237132 - RNA, 15 nt, Human
uaauaaagacucuac

SEQ ID NO: 3237133 - RNA, 14 nt, Human
uaauaaagacucua

SEQ ID NO: 3237134 - RNA, 15 nt, Human
uaaggcaugaaggau

SEQ ID NO: 3237135 - RNA, 22 nt, Human
uaaggccaaguacacugagagc

SEQ ID NO: 3237136 - RNA, 16 nt, Human
uaauaauaaagaauag

SEQ ID NO: 3237137 - RNA, 21 nt, Human
uaauaguucagguaacaggca

SEQ ID NO: 3237138 - RNA, 20 nt, Human
uaauaauuuuuaagaaauaa

SEQ ID NO: 3237139 - RNA, 16 nt, Human
uaauacacaaaaucaa

SEQ ID NO: 3237140 - RNA, 14 nt, Human
uaauacacaaaauc

SEQ ID NO: 3237141 - RNA, 17 nt, Human
uaauacacaaaaucaaa

SEQ ID NO: 3237142 - RNA, 19 nt, Human
uaagaucucagugguuaag

SEQ ID NO: 3237143 - RNA, 13 nt, Human
uaagaucucagug

SEQ ID NO: 3237144 - RNA, 17 nt, Human
uaagaucgguuaacaaa

SEQ ID NO: 3237145 - RNA, 16 nt, Human
uaagaucgguuaacaa

SEQ ID NO: 3237146 - RNA, 19 nt, Human
uaagaucgguuaacaaaua

SEQ ID NO: 3237147 - RNA, 22 nt, Human
uaagcaugacagaaaauaugua

SEQ ID NO: 3237148 - RNA, 23 nt, Human
uaagcaucuaaggacaagguaag

SEQ ID NO: 3237149 - RNA, 17 nt, Human
uaagcaucuaaggacaa

SEQ ID NO: 3237150 - RNA, 13 nt, Human
uaagccagacauc

SEQ ID NO: 3237151 - RNA, 17 nt, Human
uaagccaaaauuaaggu

SEQ ID NO: 3237152 - RNA, 19 nt, Human
uaagccaaaauuaaggugu

SEQ ID NO: 3237153 - RNA, 21 nt, Human
uaagccaaaauuaagguguuu

SEQ ID NO: 3237154 - RNA, 13 nt, Human
uaaggcaugaagg

SEQ ID NO: 3237155 - RNA, 20 nt, Human
uaagccagacaucaacagau

SEQ ID NO: 3237156 - RNA, 21 nt, Human
uaagccagacaucaacagaua

SEQ ID NO: 3237157 - RNA, 21 nt, Human
uaagccuuuggaaacagcucg

SEQ ID NO: 3237158 - RNA, 21 nt, Human
uaagccuuuguugaacuguua

SEQ ID NO: 3237159 - RNA, 14 nt, Human
uaagccuuuggaaa

SEQ ID NO: 3237160 - RNA, 17 nt, Human
uaagccuuuggaaacag

SEQ ID NO: 3237161 - RNA, 13 nt, Human
uaagccaugagaa

SEQ ID NO: 3237162 - RNA, 13 nt, Human
uaagaaauaaauc

SEQ ID NO: 3237163 - RNA, 19 nt, Human
uaagaacugcuuucuuucg

SEQ ID NO: 3237164 - RNA, 22 nt, Human
uaagaacugcuuucuuucguuu

SEQ ID NO: 3237165 - RNA, 13 nt, Human
uaagaagaaacua

SEQ ID NO: 3237166 - RNA, 22 nt, Human
uaagaggcagggucucacucug

SEQ ID NO: 3237167 - RNA, 22 nt, Human
uaagagauuggaucaaguauua

SEQ ID NO: 3237168 - RNA, 24 nt, Human
uaagaaagacuaucuaaauguuga

SEQ ID NO: 3237169 - RNA, 22 nt, Human
uaagaaccuuuugagugccuua

SEQ ID NO: 3237170 - RNA, 15 nt, Human
uaagaaauaucugug

SEQ ID NO: 3237171 - RNA, 18 nt, Human
uaagaaauaucugugaaa

SEQ ID NO: 3237172 - RNA, 19 nt, Human
uaagaaauaucugugaaau

SEQ ID NO: 3237173 - RNA, 18 nt, Human
uaagaaauacuguacaau

SEQ ID NO: 3237174 - RNA, 16 nt, Human
uaagaaauacuguaca

SEQ ID NO: 3237175 - RNA, 15 nt, Human
uaagaaauacagacu

SEQ ID NO: 3237176 - RNA, 23 nt, Human
uaagagggauuagggagagaaga

SEQ ID NO: 3237177 - RNA, 23 nt, Human
uaagagggagggagggcuccaga

SEQ ID NO: 3237178 - RNA, 12 nt, Human
uaagagggaggg

SEQ ID NO: 3237179 - RNA, 22 nt, Human
uaagagggagggagggcuccag

SEQ ID NO: 3237180 - RNA, 14 nt, Human
uaagauaaaugugc

SEQ ID NO: 3237181 - RNA, 17 nt, Human
uaagauaaaugugcuga

SEQ ID NO: 3237182 - RNA, 16 nt, Human
uaagauaaaugugcug

SEQ ID NO: 3237183 - RNA, 21 nt, Human
uaagaucacuguuuagauuug

SEQ ID NO: 3237184 - RNA, 18 nt, Human
uaagaucacuguuuagau

SEQ ID NO: 3237185 - RNA, 20 nt, Human
uaagaucacuguuuagauuu

SEQ ID NO: 3237186 - RNA, 12 nt, Human
uaagaucacugu

SEQ ID NO: 3237187 - RNA, 13 nt, Human
uaagaucacuguu

SEQ ID NO: 3237188 - RNA, 14 nt, Human
uaagaucacuguuu

SEQ ID NO: 3237189 - RNA, 15 nt, Human
uaagaucacuguuua

SEQ ID NO: 3237190 - RNA, 17 nt, Human
uaagaucacuguuuaga

SEQ ID NO: 3237191 - RNA, 12 nt, Human
uaagauacuguu

SEQ ID NO: 3237192 - RNA, 23 nt, Human
uaagauauacuuguuuuuguaaa

SEQ ID NO: 3237193 - RNA, 16 nt, Human
uaagauauacuuguuu

SEQ ID NO: 3237194 - RNA, 15 nt, Human
uaagauauuugcagu

SEQ ID NO: 3237195 - RNA, 22 nt, Human
uaagauauuugcaguuuuucau

SEQ ID NO: 3237196 - RNA, 17 nt, Human
uaacagcaguuucaggu

SEQ ID NO: 3237197 - RNA, 15 nt, Human
uaacagcaguuucag

SEQ ID NO: 3237198 - RNA, 15 nt, Human
uaacagccgcuccag

SEQ ID NO: 3237199 - RNA, 18 nt, Human
uaacagccgcuccagagu

SEQ ID NO: 3237200 - RNA, 16 nt, Human
uaacagccgcuccaga

SEQ ID NO: 3237201 - RNA, 22 nt, Human
uaacaggcaaacauuuucucuu

SEQ ID NO: 3237202 - RNA, 20 nt, Human
uaacaggcaaacauuuucuc

SEQ ID NO: 3237203 - RNA, 15 nt, Human
uaacaggcaaacauu

SEQ ID NO: 3237204 - RNA, 13 nt, Human
uaacaggcaaaca

SEQ ID NO: 3237205 - RNA, 22 nt, Human
uaaauuuaaguaaguuuuauaa

SEQ ID NO: 3237206 - RNA, 23 nt, Human
uaaauuuaaguaaguuuuauaag

SEQ ID NO: 3237207 - RNA, 23 nt, Human
uaaauugggguuuauuucagcaa

SEQ ID NO: 3237208 - RNA, 13 nt, Human
uaaauuguaaaac

SEQ ID NO: 3237209 - RNA, 14 nt, Human
uaaauugucuuaau

SEQ ID NO: 3237210 - RNA, 15 nt, Human
uaaauugucuuuaaa

SEQ ID NO: 3237211 - RNA, 16 nt, Human
uaaauugucuuuaaaa

SEQ ID NO: 3237212 - RNA, 18 nt, Human
uaaauugucuuuaaaaac

SEQ ID NO: 3237213 - RNA, 22 nt, Human
uaaauugucuuuaaaaacuguu

SEQ ID NO: 3237214 - RNA, 23 nt, Human
uaaauugucuuuaaaaacuguuu

SEQ ID NO: 3237215 - RNA, 14 nt, Human
uaacaauuaauugu

SEQ ID NO: 3237216 - RNA, 17 nt, Human
uaacaauuaauugucuu

SEQ ID NO: 3237217 - RNA, 20 nt, Human
uaacaauuaauugucuugca

SEQ ID NO: 3237218 - RNA, 20 nt, Human
uaaauuguuuaguggaaaau

SEQ ID NO: 3237219 - RNA, 23 nt, Human
uaaauugacacuuaaaaaugguu

SEQ ID NO: 3237220 - RNA, 15 nt, Human
uaaauugcuccuuga

SEQ ID NO: 3237221 - RNA, 24 nt, Human
uaaauugcucacaguuauuacaua

SEQ ID NO: 3237222 - RNA, 19 nt, Human
uaaauugcucacaguuauu

SEQ ID NO: 3237223 - RNA, 19 nt, Human
uaaauugauguugaugcaa

SEQ ID NO: 3237224 - RNA, 18 nt, Human
uaaauugauguugaugca

SEQ ID NO: 3237225 - RNA, 20 nt, Human
uaaauugauguugaugcaau

SEQ ID NO: 3237226 - RNA, 13 nt, Human
uaaauugcaagaa

SEQ ID NO: 3237227 - RNA, 12 nt, Human
uaaauugacugu

SEQ ID NO: 3237228 - RNA, 19 nt, Human
uaaauccacccauguuauc

SEQ ID NO: 3237229 - RNA, 15 nt, Human
uaaauugauguugau

SEQ ID NO: 3237230 - RNA, 14 nt, Human
uaaauugauguuga

SEQ ID NO: 3237231 - RNA, 13 nt, Human
uaaauugauguug

SEQ ID NO: 3237232 - RNA, 12 nt, Human
uaaauugauguu

SEQ ID NO: 3237233 - RNA, 21 nt, Human
uaacauuaaugccugcuuuuu

SEQ ID NO: 3237234 - RNA, 19 nt, Human
uaacaggcagauacaggaa

SEQ ID NO: 3237235 - RNA, 23 nt, Human
uaaccacagcuccuuuuccagag

SEQ ID NO: 3237236 - RNA, 21 nt, Human
uaaccacagcuccuuuuccag

SEQ ID NO: 3237237 - RNA, 19 nt, Human
uaaccacagcuccuuuucc

SEQ ID NO: 3237238 - RNA, 14 nt, Human
uaaccacaacuuuc

SEQ ID NO: 3237239 - RNA, 21 nt, Human
uaaccacaacuuucacuauaa

SEQ ID NO: 3237240 - RNA, 18 nt, Human
uaaccacagcuccuuuuc

SEQ ID NO: 3237241 - RNA, 17 nt, Human
uaaccacagcuccuuuu

SEQ ID NO: 3237242 - RNA, 14 nt, Human
uaaccacagcuccu

SEQ ID NO: 3237243 - RNA, 13 nt, Human
uaaccacagcucc

SEQ ID NO: 3237244 - RNA, 21 nt, Human
uaaccaagguagaaugaccuu

SEQ ID NO: 3237245 - RNA, 19 nt, Human
uaaccaggccauuuuuggu

SEQ ID NO: 3237246 - RNA, 16 nt, Human
uaaccagggccagaag

SEQ ID NO: 3237247 - RNA, 23 nt, Human
uaacuguccguaguaucagagau

SEQ ID NO: 3237248 - RNA, 23 nt, Human
uaacuguccuuuuucuucccuua

SEQ ID NO: 3237249 - RNA, 18 nt, Human
uaacuggugauauaucuc

SEQ ID NO: 3237250 - RNA, 17 nt, Human
uaacuggugauauaucu

SEQ ID NO: 3237251 - RNA, 16 nt, Human
uaacuguauauuugua

SEQ ID NO: 3237252 - RNA, 17 nt, Human
uaacuguauauuuguau

SEQ ID NO: 3237253 - RNA, 19 nt, Human
uaacuguauauuuguauga

SEQ ID NO: 3237254 - RNA, 20 nt, Human
uaacuguauauuuguaugau

SEQ ID NO: 3237255 - RNA, 19 nt, Human
uaacuguaauuauuugaau

SEQ ID NO: 3237256 - RNA, 18 nt, Human
uaacuguaauuauuugaa

SEQ ID NO: 3237257 - RNA, 16 nt, Human
uaacuguaauuauuug

SEQ ID NO: 3237258 - RNA, 23 nt, Human
uaacugcaaccuuguuuauuaaa

SEQ ID NO: 3237259 - RNA, 17 nt, Human
uaacugagugccuuuug

SEQ ID NO: 3237260 - RNA, 23 nt, Human
uaacugauuaguaagucuugccu

SEQ ID NO: 3237261 - RNA, 18 nt, Human
uaacugacuuaguucuuc

SEQ ID NO: 3237262 - RNA, 21 nt, Human
uaaccuaauuaauauauuaaa

SEQ ID NO: 3237263 - RNA, 13 nt, Human
uaaccuaguuaaa

SEQ ID NO: 3237264 - RNA, 17 nt, Human
uaaccuaguuaaagaaa

SEQ ID NO: 3237265 - RNA, 19 nt, Human
uaaccuaguuaaagaaagg

SEQ ID NO: 3237266 - RNA, 20 nt, Human
uaaccuaguuaaagaaagga

SEQ ID NO: 3237267 - RNA, 22 nt, Human
uaaccuaguuaaagaaaggaaa

SEQ ID NO: 3237268 - RNA, 16 nt, Human
uaacugagugccuuuu

SEQ ID NO: 3237269 - RNA, 14 nt, Human
uaacuccacugcuu

SEQ ID NO: 3237270 - RNA, 20 nt, Human
guuucuuugaauuuucauuu

SEQ ID NO: 3237271 - RNA, 19 nt, Human
guuucuuugaauuuucauu

SEQ ID NO: 3237272 - RNA, 18 nt, Human
guuucuuugaauuuucau

SEQ ID NO: 3237273 - RNA, 17 nt, Human
guuucuuugaauuuuca

SEQ ID NO: 3237274 - RNA, 12 nt, Human
guuucuuugaau

SEQ ID NO: 3237275 - RNA, 20 nt, Human
guuucuuucucugaggacaa

SEQ ID NO: 3237276 - RNA, 19 nt, Human
guuucuuucucugaggaca

SEQ ID NO: 3237277 - RNA, 16 nt, Human
guuugaaccaagaacu

SEQ ID NO: 3237278 - RNA, 20 nt, Human
guuucuuugaucaugaauaa

SEQ ID NO: 3237279 - RNA, 21 nt, Human
guuucuuugaauuuucauuuu

SEQ ID NO: 3237280 - RNA, 18 nt, Human
guuugagaucagccuggg

SEQ ID NO: 3237281 - RNA, 14 nt, Human
guuucuaaagcugc

SEQ ID NO: 3237282 - RNA, 15 nt, Human
guuucuaaagcugcc

SEQ ID NO: 3237283 - RNA, 16 nt, Human
guuucuaaagcugcca

SEQ ID NO: 3237284 - RNA, 21 nt, Human
guuuccuugaggggagccagg

SEQ ID NO: 3237285 - RNA, 13 nt, Human
guuuccuucccuc

SEQ ID NO: 3237286 - RNA, 19 nt, Human
guuuguggaaaaugaaaau

SEQ ID NO: 3237287 - RNA, 18 nt, Human
guuuguuccccaagacau

SEQ ID NO: 3237288 - RNA, 13 nt, Human
guuugucucuucu

SEQ ID NO: 3237289 - RNA, 15 nt, Human
guuugucucuucugg

SEQ ID NO: 3237290 - RNA, 14 nt, Human
guuugucucuucug

SEQ ID NO: 3237291 - RNA, 16 nt, Human
guuugguuuuaaaaua

SEQ ID NO: 3237292 - RNA, 14 nt, Human
guuugguuuuuauu

SEQ ID NO: 3237293 - RNA, 17 nt, Human
guuugguuuuaaaauac

SEQ ID NO: 3237294 - RNA, 15 nt, Human
guuuguaaaaaugua

SEQ ID NO: 3237295 - RNA, 22 nt, Human
guuugguuuuuauuucuccuuu

SEQ ID NO: 3237296 - RNA, 20 nt, Human
guuugaugcauuaaaagaaa

SEQ ID NO: 3237297 - RNA, 13 nt, Human
guuugaucuuccu

SEQ ID NO: 3237298 - RNA, 22 nt, Human
guuugaucuuccucugcuaaau

SEQ ID NO: 3237299 - RNA, 21 nt, Human
guuugaucuuccucugcuaaa

SEQ ID NO: 3237300 - RNA, 15 nt, Human
guuugauaaauagug

SEQ ID NO: 3237301 - RNA, 14 nt, Human
guuugauaaauagu

SEQ ID NO: 3237302 - RNA, 18 nt, Human
guuugaggaaauuugcag

SEQ ID NO: 3237303 - RNA, 22 nt, Human
guuugaggauuaguuuagaaca

SEQ ID NO: 3237304 - RNA, 19 nt, Human
gguugggagaaugucagua

SEQ ID NO: 3237305 - RNA, 17 nt, Human
guuuacucacagccagc

SEQ ID NO: 3237306 - RNA, 16 nt, Human
guuuacucacagccag

SEQ ID NO: 3237307 - RNA, 23 nt, Human
gguugggacccaguggcagggca

SEQ ID NO: 3237308 - RNA, 14 nt, Human
guuuacuuuaacuu

SEQ ID NO: 3237309 - RNA, 13 nt, Human
guuuacuuuaacu

SEQ ID NO: 3237310 - RNA, 13 nt, Human
guuuagaaagcuu

SEQ ID NO: 3237311 - RNA, 21 nt, Human
gguuggccccugcccggcugc

SEQ ID NO: 3237312 - RNA, 18 nt, Human
gguuggcaaaaaggcagg

SEQ ID NO: 3237313 - RNA, 19 nt, Human
gguuggcugggaaaucgag

SEQ ID NO: 3237314 - RNA, 19 nt, Human
gguugggacccaguggcag

SEQ ID NO: 3237315 - RNA, 22 nt, Human
gguugggacccaguggcagggc

SEQ ID NO: 3237316 - RNA, 21 nt, Human
gguugggacccaguggcaggg

SEQ ID NO: 3237317 - RNA, 20 nt, Human
guuuaggauguugaaaaagu

SEQ ID NO: 3237318 - RNA, 12 nt, Human
guuuagauuugc

SEQ ID NO: 3237319 - RNA, 22 nt, Human
guuuagauuugccauagaguac

SEQ ID NO: 3237320 - RNA, 14 nt, Human
guuuagauuuugug

SEQ ID NO: 3237321 - RNA, 22 nt, Human
guuuagauuuuguguuuauucu

SEQ ID NO: 3237322 - RNA, 17 nt, Human
guuuagauuuuguguuu

SEQ ID NO: 3237323 - RNA, 22 nt, Human
guuuccugcccugggaggcagu

SEQ ID NO: 3237324 - RNA, 21 nt, Human
guuuccuggcacugcuuccag

SEQ ID NO: 3237325 - RNA, 22 nt, Human
guuuccuggcacugcuuccagu

SEQ ID NO: 3237326 - RNA, 16 nt, Human
guuuccuggcacugcu

SEQ ID NO: 3237327 - RNA, 20 nt, Human
guuuccuggcacugcuucca

SEQ ID NO: 3237328 - RNA, 13 nt, Human
guuuccugcccug

SEQ ID NO: 3237329 - RNA, 17 nt, Human
guuuccugcccugggag

SEQ ID NO: 3237330 - RNA, 23 nt, Human
guuucagguagaggugcaugccu

SEQ ID NO: 3237331 - RNA, 14 nt, Human
guuuccauaguuua

SEQ ID NO: 3237332 - RNA, 19 nt, Human
guuucagguagaggugcau

SEQ ID NO: 3237333 - RNA, 14 nt, Human
uaaaaaaagaaaaa

SEQ ID NO: 3237334 - RNA, 15 nt, Human
uaaaaaaagaaaaaa

SEQ ID NO: 3237335 - RNA, 11 nt, Human
uaaaaaaagaa

SEQ ID NO: 3237336 - RNA, 10 nt, Human
uaaaaaaaga

SEQ ID NO: 3237337 - RNA, 14 nt, Human
uaaaaaaacagcuu

SEQ ID NO: 3237338 - RNA, 15 nt, Human
uaaaaaaaaauugua

SEQ ID NO: 3237339 - RNA, 12 nt, Human
uaaaaaaaagaa

SEQ ID NO: 3237340 - RNA, 14 nt, Human
uaaaaaaaagaaaa

SEQ ID NO: 3237341 - RNA, 11 nt, Human
uaaaaaaaaga

SEQ ID NO: 3237342 - RNA, 20 nt, Human
uaaaaaaaacucuuuaacuu

SEQ ID NO: 3237343 - RNA, 17 nt, Human
uaaaaaaaagaaaaaag

SEQ ID NO: 3237344 - RNA, 16 nt, Human
uaaaaaaaagaaaaaa

SEQ ID NO: 3237345 - RNA, 15 nt, Human
uaaaaaaaagaaaaa

SEQ ID NO: 3237346 - RNA, 17 nt, Human
guuuuuauuucuccuuu

SEQ ID NO: 3237347 - RNA, 16 nt, Human
guuuuuauuucuccuu

SEQ ID NO: 3237348 - RNA, 12 nt, Human
guuuuucaguuc

SEQ ID NO: 3237349 - RNA, 20 nt, Human
guuuuucaguucaaagucau

SEQ ID NO: 3237350 - RNA, 21 nt, Human
guuuuucaguucaaagucaug

SEQ ID NO: 3237351 - RNA, 20 nt, Human
uaaaaaacugcugacuguuu

SEQ ID NO: 3237352 - RNA, 23 nt, Human
uaaaaaacugcugacuguuuucu

SEQ ID NO: 3237353 - RNA, 15 nt, Human
uaaaaaagcugugug

SEQ ID NO: 3237354 - RNA, 21 nt, Human
uaaaaaacuuucuacucauuu

SEQ ID NO: 3237355 - RNA, 21 nt, Human
uaaaaagaaaacaaaaccaaa

SEQ ID NO: 3237356 - RNA, 22 nt, Human
uaaaaaugagguacucuccugg

SEQ ID NO: 3237357 - RNA, 17 nt, Human
uaaaaagaaaacaaaac

SEQ ID NO: 3237358 - RNA, 14 nt, Human
uaaaaacugaaguu

SEQ ID NO: 3237359 - RNA, 16 nt, Human
uaaaaacugaaguucu

SEQ ID NO: 3237360 - RNA, 15 nt, Human
uaaaaacugaaguuc

SEQ ID NO: 3237361 - RNA, 21 nt, Human
uaaaaaauuuaaaaagcccaa

SEQ ID NO: 3237362 - RNA, 15 nt, Human
uaaaaacaaaaggca

SEQ ID NO: 3237363 - RNA, 14 nt, Human
uaaaaaaugacaaa

SEQ ID NO: 3237364 - RNA, 22 nt, Human
uaaaaaaucaugccaguauuuu

SEQ ID NO: 3237365 - RNA, 16 nt, Human
guuuucauuaucucaa

SEQ ID NO: 3237366 - RNA, 13 nt, Human
guuuuccugaaga

SEQ ID NO: 3237367 - RNA, 22 nt, Human
guuuucggugccaucagugccc

SEQ ID NO: 3237368 - RNA, 16 nt, Human
guuuucaguguacaug

SEQ ID NO: 3237369 - RNA, 17 nt, Human
guuuucaguguacaugg

SEQ ID NO: 3237370 - RNA, 22 nt, Human
guuuucaggugcucaaaaugca

SEQ ID NO: 3237371 - RNA, 16 nt, Human
guuuguugugaggauu

SEQ ID NO: 3237372 - RNA, 18 nt, Human
guuuguucuuguuuuuaa

SEQ ID NO: 3237373 - RNA, 19 nt, Human
guuuguugagcugguaaca

SEQ ID NO: 3237374 - RNA, 21 nt, Human
guuuguugagcugguaacauc

SEQ ID NO: 3237375 - RNA, 22 nt, Human
guuuguugagcugguaacaucg

SEQ ID NO: 3237376 - RNA, 10 nt, Human
guuuguuuca

SEQ ID NO: 3237377 - RNA, 15 nt, Human
guuuuuaaaaauuag

SEQ ID NO: 3237378 - RNA, 14 nt, Human
guuuuuaaaaauua

SEQ ID NO: 3237379 - RNA, 16 nt, Human
guuuuguuuuuugagu

SEQ ID NO: 3237380 - RNA, 15 nt, Human
guuuuuaaaaucuua

SEQ ID NO: 3237381 - RNA, 13 nt, Human
guuuuuaaaaucu

SEQ ID NO: 3237382 - RNA, 20 nt, Human
guuuuuaaaaucuuauuaaa

SEQ ID NO: 3237383 - RNA, 12 nt, Human
guuuucucuuga

SEQ ID NO: 3237384 - RNA, 19 nt, Human
guuuucucuugagagggug

SEQ ID NO: 3237385 - RNA, 13 nt, Human
guuuucucucuau

SEQ ID NO: 3237386 - RNA, 13 nt, Human
guuuuguuuuuug

SEQ ID NO: 3237387 - RNA, 13 nt, Human
guuuugugaaauu

SEQ ID NO: 3237388 - RNA, 18 nt, Human
guuuugugaaauuuuuca

SEQ ID NO: 3237389 - RNA, 14 nt, Human
guuuugugaaauuu

SEQ ID NO: 3237390 - RNA, 17 nt, Human
guuuugugguuuggaau

SEQ ID NO: 3237391 - RNA, 23 nt, Human
guuuugugaaauuuuucauauuu

SEQ ID NO: 3237392 - RNA, 22 nt, Human
guuuugugaaauuuuucauauu

SEQ ID NO: 3237393 - RNA, 20 nt, Human
guuuugugaaauuuuucaua

SEQ ID NO: 3237394 - RNA, 19 nt, Human
guuuugugaaauuuuucau

SEQ ID NO: 3237395 - RNA, 17 nt, Human
uaaacuuugaaauauau

SEQ ID NO: 3237396 - RNA, 14 nt, Human
uaaacuuuuaccac

SEQ ID NO: 3237397 - RNA, 22 nt, Human
uaaacuuuuaccacuugcugca

SEQ ID NO: 3237398 - RNA, 16 nt, Human
uaaacuuugaaauaua

SEQ ID NO: 3237399 - RNA, 15 nt, Human
uaaacuuugaaauau

SEQ ID NO: 3237400 - RNA, 14 nt, Human
uaaacuuugaaaua

SEQ ID NO: 3237401 - RNA, 13 nt, Human
uaaacuuugaaau

SEQ ID NO: 3237402 - RNA, 12 nt, Human
uaaacuuugaaa

SEQ ID NO: 3237403 - RNA, 11 nt, Human
uaaacuuugaa

SEQ ID NO: 3237404 - RNA, 18 nt, Human
uaaacuuucuuaauauuu

SEQ ID NO: 3237405 - RNA, 23 nt, Human
uaaagcauauccauucagaauga

SEQ ID NO: 3237406 - RNA, 14 nt, Human
uaaagcgaaaaacu

SEQ ID NO: 3237407 - RNA, 17 nt, Human
uaaagcgaaaaacucaa

SEQ ID NO: 3237408 - RNA, 14 nt, Human
uaaagcucaaauga

SEQ ID NO: 3237409 - RNA, 15 nt, Human
uaaagcucaaaugaa

SEQ ID NO: 3237410 - RNA, 17 nt, Human
uaaagcucaaaugaaau

SEQ ID NO: 3237411 - RNA, 18 nt, Human
uaaagcucaaaugaaaug

SEQ ID NO: 3237412 - RNA, 19 nt, Human
uaaagcucaaaugaaaugu

SEQ ID NO: 3237413 - RNA, 20 nt, Human
uaaagcucaaaugaaaugua

SEQ ID NO: 3237414 - RNA, 17 nt, Human
uaaaguuugaucuuccu

SEQ ID NO: 3237415 - RNA, 13 nt, Human
uaaaguuucuguu

SEQ ID NO: 3237416 - RNA, 15 nt, Human
uaaaguuugaucuuc

SEQ ID NO: 3237417 - RNA, 12 nt, Human
uaaaguuugauc

SEQ ID NO: 3237418 - RNA, 24 nt, Human
uaaaguuucaaaaaucugaagauu

SEQ ID NO: 3237419 - RNA, 19 nt, Human
uaaaucagccguguaacca

SEQ ID NO: 3237420 - RNA, 22 nt, Human
uaaaucaaccaccuauuuuuga

SEQ ID NO: 3237421 - RNA, 19 nt, Human
uaaaucaaguuggcuucua

SEQ ID NO: 3237422 - RNA, 15 nt, Human
uaaaucauaaaguca

SEQ ID NO: 3237423 - RNA, 16 nt, Human
uaaaucauaaagucag

SEQ ID NO: 3237424 - RNA, 17 nt, Human
uaaaucauaaagucagu

SEQ ID NO: 3237425 - RNA, 22 nt, Human
uaaaucauacuccuaugcuuua

SEQ ID NO: 3237426 - RNA, 20 nt, Human
uaaaucauauauaauaaauu

SEQ ID NO: 3237427 - RNA, 19 nt, Human
uaaauauguagauaaugga

SEQ ID NO: 3237428 - RNA, 14 nt, Human
uaaauauuaagcau

SEQ ID NO: 3237429 - RNA, 19 nt, Human
uaaauauucacacuugaac

SEQ ID NO: 3237430 - RNA, 18 nt, Human
uaaauauucacacuugaa

SEQ ID NO: 3237431 - RNA, 14 nt, Human
uaaauauucacacu

SEQ ID NO: 3237432 - RNA, 17 nt, Human
uaaauauaccacucuuu

SEQ ID NO: 3237433 - RNA, 19 nt, Human
uaaauauaccacucuuuac

SEQ ID NO: 3237434 - RNA, 21 nt, Human
uaaauauaccacucuuuaccu

SEQ ID NO: 3237435 - RNA, 21 nt, Human
uaaauauagcaguagucuuuu

SEQ ID NO: 3237436 - RNA, 11 nt, Human
uaaacacuguu

SEQ ID NO: 3237437 - RNA, 14 nt, Human
uaaacacuguguau

SEQ ID NO: 3237438 - RNA, 18 nt, Human
uaaacaaaguuucagagu

SEQ ID NO: 3237439 - RNA, 23 nt, Human
uaaacaaaguuucagaguauauu

SEQ ID NO: 3237440 - RNA, 16 nt, Human
uaaacaaaucuuucca

SEQ ID NO: 3237441 - RNA, 13 nt, Human
uaaacaaaucuuu

SEQ ID NO: 3237442 - RNA, 19 nt, Human
uaaaauggcaaguuuucca

SEQ ID NO: 3237443 - RNA, 22 nt, Human
uaaaauggcaacaaacugcaca

SEQ ID NO: 3237444 - RNA, 20 nt, Human
uaaaauggcaacaaacugca

SEQ ID NO: 3237445 - RNA, 18 nt, Human
uaaaauggcaacaaacug

SEQ ID NO: 3237446 - RNA, 13 nt, Human
uaaaaugcaaaaa

SEQ ID NO: 3237447 - RNA, 20 nt, Human
uaaaaugcaaaaaaucuuaa

SEQ ID NO: 3237448 - RNA, 19 nt, Human
uaaaaugcaaaaaaucuua

SEQ ID NO: 3237449 - RNA, 18 nt, Human
uaaaaugcaaaaaaucuu

SEQ ID NO: 3237450 - RNA, 17 nt, Human
uaaaaugcaaaaaaucu

SEQ ID NO: 3237451 - RNA, 15 nt, Human
uaaaaugcaaaaaau

SEQ ID NO: 3237452 - RNA, 20 nt, Human
uaaaauggaaaacuuaguuu

SEQ ID NO: 3237453 - RNA, 17 nt, Human
uaaaauggcaacaaacu

SEQ ID NO: 3237454 - RNA, 16 nt, Human
uaaaauggcaacaaac

SEQ ID NO: 3237455 - RNA, 20 nt, Human
uaaacugcccccucugcccu

SEQ ID NO: 3237456 - RNA, 21 nt, Human
uaaacugcccccucugcccug

SEQ ID NO: 3237457 - RNA, 22 nt, Human
uaaacugcccccucugcccugc

SEQ ID NO: 3237458 - RNA, 23 nt, Human
uaaacugcccccucugcccugcg

SEQ ID NO: 3237459 - RNA, 17 nt, Human
uaaaaugaagaauuuaa

SEQ ID NO: 3237460 - RNA, 15 nt, Human
uaaaaugaagaauuu

SEQ ID NO: 3237461 - RNA, 16 nt, Human
uaaaaugaagaauuua

SEQ ID NO: 3237462 - RNA, 15 nt, Human
uaaaaugauugaaaa

SEQ ID NO: 3237463 - RNA, 22 nt, Human
uaaaauauuuaugaagaaaaua

SEQ ID NO: 3237464 - RNA, 15 nt, Human
uaaaaucuccuaaau

SEQ ID NO: 3237465 - RNA, 17 nt, Human
uaaaaucuccuaaaugc

SEQ ID NO: 3237466 - RNA, 15 nt, Human
uaaaaucacguuaaa

SEQ ID NO: 3237467 - RNA, 12 nt, Human
uaaaauauuuuc

SEQ ID NO: 3237468 - RNA, 21 nt, Human
uaaaauauuuaugaagaaaau

SEQ ID NO: 3237469 - RNA, 12 nt, Human
uaaaaggcccag

SEQ ID NO: 3237470 - RNA, 14 nt, Human
uaaaaggcccagag

SEQ ID NO: 3237471 - RNA, 13 nt, Human
uaaaaggcccaga

SEQ ID NO: 3237472 - RNA, 13 nt, Human
uaaaauauuuucu

SEQ ID NO: 3237473 - RNA, 14 nt, Human
uaaaauauuuucug

SEQ ID NO: 3237474 - RNA, 15 nt, Human
uaaaauauuuucugu

SEQ ID NO: 3237475 - RNA, 16 nt, Human
uaaaauauuuucugug

SEQ ID NO: 3237476 - RNA, 17 nt, Human
uaaaauauuuucugugu

SEQ ID NO: 3237477 - RNA, 18 nt, Human
uaaaauauuuucugugug

SEQ ID NO: 3237478 - RNA, 19 nt, Human
uaaaauauuuucugugugu

SEQ ID NO: 3237479 - RNA, 20 nt, Human
uaaaauauuuucuguguguu

SEQ ID NO: 3237480 - RNA, 21 nt, Human
uaaaauauuuucuguguguuc

SEQ ID NO: 3237481 - RNA, 22 nt, Human
uaaaauauuuucuguguguucc

SEQ ID NO: 3237482 - RNA, 23 nt, Human
uaaaauauuuucuguguguuccu

SEQ ID NO: 3237483 - RNA, 24 nt, Human
uaaaauauuuucuguguguuccug

SEQ ID NO: 3237484 - RNA, 12 nt, Human
uaaaagcccagg

SEQ ID NO: 3237485 - RNA, 18 nt, Human
uaaaagcauuuuguaaua

SEQ ID NO: 3237486 - RNA, 17 nt, Human
uaaaagcauuuuguaau

SEQ ID NO: 3237487 - RNA, 14 nt, Human
uaaaagcauuuugu

SEQ ID NO: 3237488 - RNA, 16 nt, Human
uaaaagcauuuuguaa

SEQ ID NO: 3237489 - RNA, 15 nt, Human
uaaaagcauuuugua

SEQ ID NO: 3237490 - RNA, 22 nt, Human
uaaaagcuaucuucauguaaau

SEQ ID NO: 3237491 - RNA, 15 nt, Human
uaaaagcuuucaugu

SEQ ID NO: 3237492 - RNA, 16 nt, Human
uaaaagcuuucauguc

SEQ ID NO: 3237493 - RNA, 12 nt, Human
uaaaagccuugg

SEQ ID NO: 3237494 - RNA, 21 nt, Human
uaaaagccuuggccucagagg

SEQ ID NO: 3237495 - RNA, 19 nt, Human
uaaaagccuuggccucaga

SEQ ID NO: 3237496 - RNA, 19 nt, Human
uaaaagccuaggucuauuu

SEQ ID NO: 3237497 - RNA, 19 nt, Human
uaaaagcccaggagcccau

SEQ ID NO: 3237498 - RNA, 18 nt, Human
uaaaagcccaggagccca

SEQ ID NO: 3237499 - RNA, 17 nt, Human
uaaaagcccaggagccc

SEQ ID NO: 3237500 - RNA, 16 nt, Human
uaaaagcccaggagcc

SEQ ID NO: 3237501 - RNA, 15 nt, Human
uaaaagcccaggagc

SEQ ID NO: 3237502 - RNA, 14 nt, Human
uaaaagcccaggag

SEQ ID NO: 3237503 - RNA, 20 nt, Human
uaaaaaugguaucaaaauua

SEQ ID NO: 3237504 - RNA, 16 nt, Human
uaaaagaugcaaugua

SEQ ID NO: 3237505 - RNA, 14 nt, Human
uaaaagaugaaaau

SEQ ID NO: 3237506 - RNA, 17 nt, Human
ugggguggggaccucag

SEQ ID NO: 3237507 - RNA, 16 nt, Human
uggggcauccaugggg

SEQ ID NO: 3237508 - RNA, 22 nt, Human
ugggucaugaugcucuuuccca

SEQ ID NO: 3237509 - RNA, 17 nt, Human
uggguagggcucugaca

SEQ ID NO: 3237510 - RNA, 22 nt, Human
uggguagcuguaaggcaugaag

SEQ ID NO: 3237511 - RNA, 22 nt, Human
ugggguggggggaugguaagag

SEQ ID NO: 3237512 - RNA, 13 nt, Human
uggguagcuguaa

SEQ ID NO: 3237513 - RNA, 23 nt, Human
ugggugucaagagggucugagga

SEQ ID NO: 3237514 - RNA, 21 nt, Human
ugggugucaagagggucugag

SEQ ID NO: 3237515 - RNA, 23 nt, Human
uggguccaggccuacuccugucu

SEQ ID NO: 3237516 - RNA, 21 nt, Human
uggguccaggccuacuccugu

SEQ ID NO: 3237517 - RNA, 18 nt, Human
uggguccaggccuacucc

SEQ ID NO: 3237518 - RNA, 17 nt, Human
uggguccaggccuacuc

SEQ ID NO: 3237519 - RNA, 16 nt, Human
uggguucacugcaacc

SEQ ID NO: 3237520 - RNA, 23 nt, Human
uggguucaagcgauucuucugcu

SEQ ID NO: 3237521 - RNA, 14 nt, Human
uggguuaguggaug

SEQ ID NO: 3237522 - RNA, 17 nt, Human
uggguuggaaaacagua

SEQ ID NO: 3237523 - RNA, 21 nt, Human
uggguuccagcaauucuccug

SEQ ID NO: 3237524 - RNA, 21 nt, Human
uggguuccuuccucugagccu

SEQ ID NO: 3237525 - RNA, 22 nt, Human
uggguuccuuccucugagccuu

SEQ ID NO: 3237526 - RNA, 18 nt, Human
ugggccuucagggaguga

SEQ ID NO: 3237527 - RNA, 15 nt, Human
ugggccuucagggag

SEQ ID NO: 3237528 - RNA, 16 nt, Human
ugggccuccugugugu

SEQ ID NO: 3237529 - RNA, 14 nt, Human
ugggccuccugugu

SEQ ID NO: 3237530 - RNA, 23 nt, Human
ugggcauuacuguuuaagacacu

SEQ ID NO: 3237531 - RNA, 14 nt, Human
ugggcagucauuuu

SEQ ID NO: 3237532 - RNA, 24 nt, Human
ugggagcugccuguucagcuccag

SEQ ID NO: 3237533 - RNA, 18 nt, Human
ugggagcuggaguccacu

SEQ ID NO: 3237534 - RNA, 19 nt, Human
ugggcuucaguggcagcug

SEQ ID NO: 3237535 - RNA, 18 nt, Human
ugggcuucaguggcagcu

SEQ ID NO: 3237536 - RNA, 18 nt, Human
ugggcgugagaccugccc

SEQ ID NO: 3237537 - RNA, 19 nt, Human
ugggcgugagaccugcccc

SEQ ID NO: 3237538 - RNA, 17 nt, Human
ugggcgugagaccugcc

SEQ ID NO: 3237539 - RNA, 13 nt, Human
uggggcagcuuga

SEQ ID NO: 3237540 - RNA, 21 nt, Human
ugggcuuggggaccagagcug

SEQ ID NO: 3237541 - RNA, 16 nt, Human
uggggcagcuugaggg

SEQ ID NO: 3237542 - RNA, 19 nt, Human
ugggcuuggggaccagagc

SEQ ID NO: 3237543 - RNA, 20 nt, Human
ugggcuucaguggcagcugc

SEQ ID NO: 3237544 - RNA, 17 nt, Human
ugggcuucaguggcagc

SEQ ID NO: 3237545 - RNA, 14 nt, Human
uggcucuacacaua

SEQ ID NO: 3237546 - RNA, 12 nt, Human
uggcucuacaca

SEQ ID NO: 3237547 - RNA, 15 nt, Human
uggcucuacacauau

SEQ ID NO: 3237548 - RNA, 13 nt, Human
uggcucuuccagg

SEQ ID NO: 3237549 - RNA, 15 nt, Human
uggcucuuccaggcu

SEQ ID NO: 3237550 - RNA, 12 nt, Human
uggcugggggcc

SEQ ID NO: 3237551 - RNA, 16 nt, Human
uggcucuuccaggcug

SEQ ID NO: 3237552 - RNA, 20 nt, Human
uggcucagguggggucacuc

SEQ ID NO: 3237553 - RNA, 22 nt, Human
uggcucagguggggucacucug

SEQ ID NO: 3237554 - RNA, 15 nt, Human
uggcuccugcccacu

SEQ ID NO: 3237555 - RNA, 13 nt, Human
uggcuccugccca

SEQ ID NO: 3237556 - RNA, 18 nt, Human
uggcgaaucucaaaauua

SEQ ID NO: 3237557 - RNA, 18 nt, Human
uggcgcuagaggccaugg

SEQ ID NO: 3237558 - RNA, 14 nt, Human
uggcgcugccccug

SEQ ID NO: 3237559 - RNA, 22 nt, Human
uggcgugcaguggugcgaucug

SEQ ID NO: 3237560 - RNA, 14 nt, Human
uggccuucggccuc

SEQ ID NO: 3237561 - RNA, 18 nt, Human
uggccuugggauccaggc

SEQ ID NO: 3237562 - RNA, 15 nt, Human
uggccuuguggucca

SEQ ID NO: 3237563 - RNA, 16 nt, Human
uggccuugugguccaa

SEQ ID NO: 3237564 - RNA, 19 nt, Human
uggccuugugguccaaaua

SEQ ID NO: 3237565 - RNA, 21 nt, Human
uggccuugugguccaaauagg

SEQ ID NO: 3237566 - RNA, 21 nt, Human
uggccuugggauccaggcccc

SEQ ID NO: 3237567 - RNA, 17 nt, Human
uggccuucggccuccau

SEQ ID NO: 3237568 - RNA, 18 nt, Human
uggccuucggccuccauc

SEQ ID NO: 3237569 - RNA, 16 nt, Human
ugggacaugggaaagg

SEQ ID NO: 3237570 - RNA, 19 nt, Human
ugggacauccugucaucug

SEQ ID NO: 3237571 - RNA, 16 nt, Human
ugggacagggcauggc

SEQ ID NO: 3237572 - RNA, 20 nt, Human
ugggaccacaggugcccgcc

SEQ ID NO: 3237573 - RNA, 22 nt, Human
ugggacccaguggcagggcaca

SEQ ID NO: 3237574 - RNA, 21 nt, Human
ugggacccaguggcagggcac

SEQ ID NO: 3237575 - RNA, 20 nt, Human
ugggacccaguggcagggca

SEQ ID NO: 3237576 - RNA, 19 nt, Human
ugggacccaguggcagggc

SEQ ID NO: 3237577 - RNA, 18 nt, Human
ugggacccaguggcaggg

SEQ ID NO: 3237578 - RNA, 17 nt, Human
ugggacccaguggcagg

SEQ ID NO: 3237579 - RNA, 14 nt, Human
ugggacccaguggc

SEQ ID NO: 3237580 - RNA, 23 nt, Human
ugggagcugccuguucagcucca

SEQ ID NO: 3237581 - RNA, 23 nt, Human
ugggagccgggcaaacuggccgc

SEQ ID NO: 3237582 - RNA, 13 nt, Human
ugggagccgggca

SEQ ID NO: 3237583 - RNA, 20 nt, Human
ugggaauguauaguauuuga

SEQ ID NO: 3237584 - RNA, 14 nt, Human
ugggaauguauagu

SEQ ID NO: 3237585 - RNA, 23 nt, Human
ugggaauguauaguauuugaaaa

SEQ ID NO: 3237586 - RNA, 22 nt, Human
ugggaauguauaguauuugaaa

SEQ ID NO: 3237587 - RNA, 21 nt, Human
ugggaauguauaguauuugaa

SEQ ID NO: 3237588 - RNA, 21 nt, Human
ugggaaugaaugucaguguga

SEQ ID NO: 3237589 - RNA, 22 nt, Human
ugggaaugaaugucagugugac

SEQ ID NO: 3237590 - RNA, 14 nt, Human
uggcuuuucacugc

SEQ ID NO: 3237591 - RNA, 17 nt, Human
uggcuuuuacccuuuuu

SEQ ID NO: 3237592 - RNA, 22 nt, Human
uggcugguuagagguucccuuu

SEQ ID NO: 3237593 - RNA, 14 nt, Human
uggcugggggccuc

SEQ ID NO: 3237594 - RNA, 15 nt, Human
uggaauuauuuuaaa

SEQ ID NO: 3237595 - RNA, 23 nt, Human
uggaauuagaacccuugcacagc

SEQ ID NO: 3237596 - RNA, 22 nt, Human
uggaauuagaacccuugcacag

SEQ ID NO: 3237597 - RNA, 12 nt, Human
uggaauauuaaa

SEQ ID NO: 3237598 - RNA, 13 nt, Human
uggaauauuaaaa

SEQ ID NO: 3237599 - RNA, 20 nt, Human
uggaaucauuguccagagcu

SEQ ID NO: 3237600 - RNA, 18 nt, Human
uggaaucauuguccagag

SEQ ID NO: 3237601 - RNA, 21 nt, Human
uggaagugugggucugugugu

SEQ ID NO: 3237602 - RNA, 20 nt, Human
uggaagugugggucugugug

SEQ ID NO: 3237603 - RNA, 14 nt, Human
uggaagacagcucu

SEQ ID NO: 3237604 - RNA, 23 nt, Human
uggaagugugggucugugugugu

SEQ ID NO: 3237605 - RNA, 21 nt, Human
uggaagugugugaucuguggg

SEQ ID NO: 3237606 - RNA, 18 nt, Human
uggaaguuaaagugaggc

SEQ ID NO: 3237607 - RNA, 12 nt, Human
uggaaaaauaaa

SEQ ID NO: 3237608 - RNA, 17 nt, Human
uggaaaaauaaaacugu

SEQ ID NO: 3237609 - RNA, 15 nt, Human
uggaaaauaaaucaa

SEQ ID NO: 3237610 - RNA, 11 nt, Human
uggaaaauaaa

SEQ ID NO: 3237611 - RNA, 14 nt, Human
uggaaaaaaacauc

SEQ ID NO: 3237612 - RNA, 16 nt, Human
uggaaaauaaauuauu

SEQ ID NO: 3237613 - RNA, 15 nt, Human
uggaaaauaaauuau

SEQ ID NO: 3237614 - RNA, 14 nt, Human
uggaacucucgagc

SEQ ID NO: 3237615 - RNA, 23 nt, Human
uggaacucuugacagcuauaauu

SEQ ID NO: 3237616 - RNA, 11 nt, Human
uggaagacagc

SEQ ID NO: 3237617 - RNA, 12 nt, Human
uggaagacagcu

SEQ ID NO: 3237618 - RNA, 18 nt, Human
ugcuucucugcccagcuu

SEQ ID NO: 3237619 - RNA, 16 nt, Human
ugcuucuucagagacu

SEQ ID NO: 3237620 - RNA, 12 nt, Human
ugcuucugccac

SEQ ID NO: 3237621 - RNA, 13 nt, Human
ugcuucugccacc

SEQ ID NO: 3237622 - RNA, 19 nt, Human
ugcuuccagugaggcucug

SEQ ID NO: 3237623 - RNA, 20 nt, Human
ugcuuccagugaggcucugc

SEQ ID NO: 3237624 - RNA, 16 nt, Human
ugcuuccagugaggcu

SEQ ID NO: 3237625 - RNA, 18 nt, Human
ugcuuccagugaggcucu

SEQ ID NO: 3237626 - RNA, 13 nt, Human
ugcugccucaugc

SEQ ID NO: 3237627 - RNA, 14 nt, Human
ugcugccuccagaa

SEQ ID NO: 3237628 - RNA, 15 nt, Human
ugcugccucaggaau

SEQ ID NO: 3237629 - RNA, 13 nt, Human
ugcugccucagga

SEQ ID NO: 3237630 - RNA, 14 nt, Human
ugcuuuccaaagcc

SEQ ID NO: 3237631 - RNA, 23 nt, Human
ugcuuucaagaucuaaaucauau

SEQ ID NO: 3237632 - RNA, 20 nt, Human
ugcuuuuuuugaaacuuuga

SEQ ID NO: 3237633 - RNA, 15 nt, Human
ugcuuuuuuugaaac

SEQ ID NO: 3237634 - RNA, 13 nt, Human
ugcuuuuuuugaa

SEQ ID NO: 3237635 - RNA, 19 nt, Human
ugcuuuuuuccaaaacaaa

SEQ ID NO: 3237636 - RNA, 20 nt, Human
ugcuuuuuuccaaaacaaaa

SEQ ID NO: 3237637 - RNA, 22 nt, Human
ugcuuuccauauuuuuuuccuu

SEQ ID NO: 3237638 - RNA, 21 nt, Human
ugcuuuccauauuuuuuuccu

SEQ ID NO: 3237639 - RNA, 15 nt, Human
ugcuuuccauauuuu

SEQ ID NO: 3237640 - RNA, 14 nt, Human
ugcuuuccauauuu

SEQ ID NO: 3237641 - RNA, 18 nt, Human
ugcuuguuaacugagugc

SEQ ID NO: 3237642 - RNA, 14 nt, Human
ugcuugaacuuaca

SEQ ID NO: 3237643 - RNA, 16 nt, Human
ugcuuguuaacugagu

SEQ ID NO: 3237644 - RNA, 14 nt, Human
ugcuuguugacaga

SEQ ID NO: 3237645 - RNA, 18 nt, Human
ugcuuuagacuugaaaag

SEQ ID NO: 3237646 - RNA, 19 nt, Human
ugcuuuagacuugaaaaga

SEQ ID NO: 3237647 - RNA, 21 nt, Human
ugcuuuagacuugaaaagaga

SEQ ID NO: 3237648 - RNA, 16 nt, Human
uggagagcccagaguc

SEQ ID NO: 3237649 - RNA, 14 nt, Human
uggagagauaggaa

SEQ ID NO: 3237650 - RNA, 20 nt, Human
uggagaggcccggccucuca

SEQ ID NO: 3237651 - RNA, 17 nt, Human
uggaauuauuuuaaaag

SEQ ID NO: 3237652 - RNA, 16 nt, Human
uggacaggcauguucu

SEQ ID NO: 3237653 - RNA, 12 nt, Human
uggacaggcaug

SEQ ID NO: 3237654 - RNA, 13 nt, Human
uggagagaaauau

SEQ ID NO: 3237655 - RNA, 17 nt, Human
uggagacugucucaaga

SEQ ID NO: 3237656 - RNA, 14 nt, Human
uggaggcucaaauu

SEQ ID NO: 3237657 - RNA, 20 nt, Human
uggaggcauugaugcaugcu

SEQ ID NO: 3237658 - RNA, 22 nt, Human
uggaggcaugugaugagaggaa

SEQ ID NO: 3237659 - RNA, 15 nt, Human
uggauaccauuauau

SEQ ID NO: 3237660 - RNA, 13 nt, Human
uggauaccauuau

SEQ ID NO: 3237661 - RNA, 17 nt, Human
uggauacgugucaaugu

SEQ ID NO: 3237662 - RNA, 21 nt, Human
uggauacgugucaaugugugc

SEQ ID NO: 3237663 - RNA, 20 nt, Human
uggccacuccagaccccugg

SEQ ID NO: 3237664 - RNA, 22 nt, Human
uggccacuccagaccccuggcu

SEQ ID NO: 3237665 - RNA, 20 nt, Human
uggcagugggagcugccugu

SEQ ID NO: 3237666 - RNA, 21 nt, Human
uggcagggcacagggccuggc

SEQ ID NO: 3237667 - RNA, 20 nt, Human
uggcagggcacagggccugg

SEQ ID NO: 3237668 - RNA, 19 nt, Human
uggcagggcacagggccug

SEQ ID NO: 3237669 - RNA, 19 nt, Human
uggcagugggagcugccug

SEQ ID NO: 3237670 - RNA, 16 nt, Human
uggcagugggagcugc

SEQ ID NO: 3237671 - RNA, 15 nt, Human
uggcagugggagcug

SEQ ID NO: 3237672 - RNA, 14 nt, Human
uggcagugggagcu

SEQ ID NO: 3237673 - RNA, 13 nt, Human
uggcagugggagc

SEQ ID NO: 3237674 - RNA, 18 nt, Human
uggcagggcacagggccu

SEQ ID NO: 3237675 - RNA, 17 nt, Human
uggcagggcacagggcc

SEQ ID NO: 3237676 - RNA, 16 nt, Human
uggcagggcacagggc

SEQ ID NO: 3237677 - RNA, 15 nt, Human
uggcagggcacaggg

SEQ ID NO: 3237678 - RNA, 14 nt, Human
uggcagggcacagg

SEQ ID NO: 3237679 - RNA, 13 nt, Human
uggcagggcacag

SEQ ID NO: 3237680 - RNA, 21 nt, Human
uggcaggcaggggcccugcag

SEQ ID NO: 3237681 - RNA, 11 nt, Human
uggcaggcagg

SEQ ID NO: 3237682 - RNA, 12 nt, Human
uggcaggcaggg

SEQ ID NO: 3237683 - RNA, 22 nt, Human
uggcagcugcgguccacccagg

SEQ ID NO: 3237684 - RNA, 21 nt, Human
uggcagcugcgguccacccag

SEQ ID NO: 3237685 - RNA, 19 nt, Human
uggcagcugcgguccaccc

SEQ ID NO: 3237686 - RNA, 22 nt, Human
uggcacuugccauuccaaaaua

SEQ ID NO: 3237687 - RNA, 14 nt, Human
uggaugccuggugg

SEQ ID NO: 3237688 - RNA, 20 nt, Human
uggaugccucauuaugucaa

SEQ ID NO: 3237689 - RNA, 14 nt, Human
uggcacugcuucca

SEQ ID NO: 3237690 - RNA, 16 nt, Human
uggcacugcuuccagu

SEQ ID NO: 3237691 - RNA, 18 nt, Human
uggcacugcuuccaguga

SEQ ID NO: 3237692 - RNA, 17 nt, Human
ugcaggaaauggcugug

SEQ ID NO: 3237693 - RNA, 22 nt, Human
ugcagcuuuaaaaaauuaaucu

SEQ ID NO: 3237694 - RNA, 14 nt, Human
ugcaggaccucagg

SEQ ID NO: 3237695 - RNA, 15 nt, Human
ugcaggaccucaggu

SEQ ID NO: 3237696 - RNA, 16 nt, Human
ugcaggaccucaggug

SEQ ID NO: 3237697 - RNA, 18 nt, Human
ugcaggaccucaggugag

SEQ ID NO: 3237698 - RNA, 13 nt, Human
ugcagcuuuaaaa

SEQ ID NO: 3237699 - RNA, 17 nt, Human
ugcagccacuuaggaca

SEQ ID NO: 3237700 - RNA, 16 nt, Human
ugcagccacuuaggac

SEQ ID NO: 3237701 - RNA, 16 nt, Human
ugcagauaaacaguag

SEQ ID NO: 3237702 - RNA, 20 nt, Human
ugcagaguauuuuuguauuc

SEQ ID NO: 3237703 - RNA, 24 nt, Human
ugcagaguucagggaagauaaguu

SEQ ID NO: 3237704 - RNA, 19 nt, Human
ugcagaguucagggaagau

SEQ ID NO: 3237705 - RNA, 15 nt, Human
ugcacuuuguucugg

SEQ ID NO: 3237706 - RNA, 18 nt, Human
ugcacuuuguucuggcuc

SEQ ID NO: 3237707 - RNA, 19 nt, Human
ugcacuuuguucuggcucu

SEQ ID NO: 3237708 - RNA, 16 nt, Human
ugcacguacacacaca

SEQ ID NO: 3237709 - RNA, 16 nt, Human
ugcacuugcagacucu

SEQ ID NO: 3237710 - RNA, 21 nt, Human
ugcacuugcagacucuacaga

SEQ ID NO: 3237711 - RNA, 21 nt, Human
ugcacuugggggcucagcaag

SEQ ID NO: 3237712 - RNA, 19 nt, Human
ugcacuugggggcucagca

SEQ ID NO: 3237713 - RNA, 22 nt, Human
ugcacuugggggcucagcaagg

SEQ ID NO: 3237714 - RNA, 21 nt, Human
ugcacuuggggcacagggaga

SEQ ID NO: 3237715 - RNA, 17 nt, Human
ugcacuuggggcacagg

SEQ ID NO: 3237716 - RNA, 18 nt, Human
ugcacagcuaacauggaa

SEQ ID NO: 3237717 - RNA, 20 nt, Human
ugcacagcuaacauggaagu

SEQ ID NO: 3237718 - RNA, 23 nt, Human
ugcacagcuaacauggaaguacu

SEQ ID NO: 3237719 - RNA, 23 nt, Human
ugcacaggcagagcccagacccu

SEQ ID NO: 3237720 - RNA, 12 nt, Human
ugcacaggcaga

SEQ ID NO: 3237721 - RNA, 18 nt, Human
ugcacagugcaucucagc

SEQ ID NO: 3237722 - RNA, 20 nt, Human
ugcacagugcaucucagccc

SEQ ID NO: 3237723 - RNA, 19 nt, Human
ugcacagugcaucucagcc

SEQ ID NO: 3237724 - RNA, 18 nt, Human
ugcacauaaacucuuuua

SEQ ID NO: 3237725 - RNA, 13 nt, Human
ugaaguccggaac

SEQ ID NO: 3237726 - RNA, 17 nt, Human
ugaagucuuuguacaga

SEQ ID NO: 3237727 - RNA, 20 nt, Human
ugaagucuuuguacagacaa

SEQ ID NO: 3237728 - RNA, 22 nt, Human
ugaagucuuuguacagacaaca

SEQ ID NO: 3237729 - RNA, 17 nt, Human
ugaagucuguauuguaa

SEQ ID NO: 3237730 - RNA, 17 nt, Human
ugcacagcuaacaugga

SEQ ID NO: 3237731 - RNA, 19 nt, Human
ugcauuaaaagaaaauaaa

SEQ ID NO: 3237732 - RNA, 18 nt, Human
ugccaacugaucuguuau

SEQ ID NO: 3237733 - RNA, 21 nt, Human
ugccaaccucgcuccaacucc

SEQ ID NO: 3237734 - RNA, 19 nt, Human
ugccaaccucgcuccaacu

SEQ ID NO: 3237735 - RNA, 15 nt, Human
ugccaaccucgcucc

SEQ ID NO: 3237736 - RNA, 22 nt, Human
ugccaaaacccagcugcacccc

SEQ ID NO: 3237737 - RNA, 21 nt, Human
ugccaaaacccagcugcaccc

SEQ ID NO: 3237738 - RNA, 20 nt, Human
ugccaaaacccagcugcacc

SEQ ID NO: 3237739 - RNA, 19 nt, Human
ugccaaaacccagcugcac

SEQ ID NO: 3237740 - RNA, 18 nt, Human
ugccaaaacccagcugca

SEQ ID NO: 3237741 - RNA, 17 nt, Human
ugccaaaacccagcugc

SEQ ID NO: 3237742 - RNA, 16 nt, Human
ugccaaaacccagcug

SEQ ID NO: 3237743 - RNA, 22 nt, Human
ugcaucagcugcugaaacaaca

SEQ ID NO: 3237744 - RNA, 19 nt, Human
ugcaucagcugcugaaaca

SEQ ID NO: 3237745 - RNA, 17 nt, Human
ugcaggcagccaggcca

SEQ ID NO: 3237746 - RNA, 18 nt, Human
ugcaggcagccaggccac

SEQ ID NO: 3237747 - RNA, 16 nt, Human
ugcaggcagccaggcc

SEQ ID NO: 3237748 - RNA, 22 nt, Human
ugcaggagcaguaucaugaagc

SEQ ID NO: 3237749 - RNA, 13 nt, Human
ugcaggagcuucu

SEQ ID NO: 3237750 - RNA, 15 nt, Human
ugcaucguuucaucu

SEQ ID NO: 3237751 - RNA, 16 nt, Human
ugcaugugucuuuaua

SEQ ID NO: 3237752 - RNA, 21 nt, Human
ugcauccuccgccucccgggu

SEQ ID NO: 3237753 - RNA, 15 nt, Human
ugcauccuccgccuc

SEQ ID NO: 3237754 - RNA, 18 nt, Human
ugcauccuccgccucccg

SEQ ID NO: 3237755 - RNA, 12 nt, Human
ugcaucaguucu

SEQ ID NO: 3237756 - RNA, 19 nt, Human
ugcaucaucuugaacauua

SEQ ID NO: 3237757 - RNA, 13 nt, Human
ugccaguauuuuu

SEQ ID NO: 3237758 - RNA, 18 nt, Human
ugccaguauuuuuaaagg

SEQ ID NO: 3237759 - RNA, 14 nt, Human
ugccagucaccccg

SEQ ID NO: 3237760 - RNA, 23 nt, Human
ugccaguaccagccccacccugu

SEQ ID NO: 3237761 - RNA, 22 nt, Human
ugccaguaccagccccacccug

SEQ ID NO: 3237762 - RNA, 24 nt, Human
ugccagguuuuuggucugacccac

SEQ ID NO: 3237763 - RNA, 24 nt, Human
ugccaguaacacaggccacccugu

SEQ ID NO: 3237764 - RNA, 23 nt, Human
ugccaguaacacaggccacccug

SEQ ID NO: 3237765 - RNA, 23 nt, Human
ugccaagagcccgucugcuccug

SEQ ID NO: 3237766 - RNA, 19 nt, Human
ugccaagagcccgucugcu

SEQ ID NO: 3237767 - RNA, 11 nt, Human
ugccagggaca

SEQ ID NO: 3237768 - RNA, 22 nt, Human
ugccagggacagaggggguggc

SEQ ID NO: 3237769 - RNA, 15 nt, Human
ugcccaccuggccuc

SEQ ID NO: 3237770 - RNA, 17 nt, Human
ugcccaccuggccucug

SEQ ID NO: 3237771 - RNA, 18 nt, Human
ugcccaccuggccucugc

SEQ ID NO: 3237772 - RNA, 14 nt, Human
ugcccaccuggccu

SEQ ID NO: 3237773 - RNA, 10 nt, Human
ugcccagccc

SEQ ID NO: 3237774 - RNA, 15 nt, Human
ugccaucucugcucc

SEQ ID NO: 3237775 - RNA, 13 nt, Human
ugccaucucugcu

SEQ ID NO: 3237776 - RNA, 16 nt, Human
ugccaucucugcucca

SEQ ID NO: 3237777 - RNA, 20 nt, Human
ugcucagcugucaaggcuca

SEQ ID NO: 3237778 - RNA, 16 nt, Human
ugcucagcugucaagg

SEQ ID NO: 3237779 - RNA, 19 nt, Human
ugcuccucuccccagcaag

SEQ ID NO: 3237780 - RNA, 18 nt, Human
ugcuccucuccccagcaa

SEQ ID NO: 3237781 - RNA, 21 nt, Human
ugcuccugagcccccagcuuc

SEQ ID NO: 3237782 - RNA, 16 nt, Human
ugcuccugagccccca

SEQ ID NO: 3237783 - RNA, 15 nt, Human
ugcuccugagccccc

SEQ ID NO: 3237784 - RNA, 14 nt, Human
ugcuccugagcccc

SEQ ID NO: 3237785 - RNA, 13 nt, Human
ugcuccugagccc

SEQ ID NO: 3237786 - RNA, 12 nt, Human
ugcuccugagcc

SEQ ID NO: 3237787 - RNA, 20 nt, Human
ugcucaucucaguccucaaa

SEQ ID NO: 3237788 - RNA, 23 nt, Human
ugcucaucucaguccucaaagcu

SEQ ID NO: 3237789 - RNA, 20 nt, Human
ugcuagaacucccuuucaac

SEQ ID NO: 3237790 - RNA, 21 nt, Human
ugcuagaacucccuuucaaca

SEQ ID NO: 3237791 - RNA, 16 nt, Human
ugcuaggaacacuccu

SEQ ID NO: 3237792 - RNA, 17 nt, Human
ugcuaggaacacuccuu

SEQ ID NO: 3237793 - RNA, 19 nt, Human
ugcuaggaacacuccuuca

SEQ ID NO: 3237794 - RNA, 19 nt, Human
ugcuagaacucccuuucaa

SEQ ID NO: 3237795 - RNA, 18 nt, Human
ugcuagaacucccuuuca

SEQ ID NO: 3237796 - RNA, 16 nt, Human
ugcguaugcaguguag

SEQ ID NO: 3237797 - RNA, 23 nt, Human
ugcucuuuggccugaugaccaau

SEQ ID NO: 3237798 - RNA, 20 nt, Human
ugcucuuuggccugaugacc

SEQ ID NO: 3237799 - RNA, 21 nt, Human
ugcucuuucuucuuccacaca

SEQ ID NO: 3237800 - RNA, 19 nt, Human
ugcuccuggcccacugcau

SEQ ID NO: 3237801 - RNA, 16 nt, Human
ugcuccuucccuugcu

SEQ ID NO: 3237802 - RNA, 22 nt, Human
ugcugaaugguuuucaaaauaa

SEQ ID NO: 3237803 - RNA, 18 nt, Human
ugcugaaugguuuucaaa

SEQ ID NO: 3237804 - RNA, 17 nt, Human
ugcugaaugguuuucaa

SEQ ID NO: 3237805 - RNA, 16 nt, Human
ugcugaaguccggaac

SEQ ID NO: 3237806 - RNA, 18 nt, Human
ugcugaauacagaggcaa

SEQ ID NO: 3237807 - RNA, 23 nt, Human
ugcugaauacagaggcaacugca

SEQ ID NO: 3237808 - RNA, 21 nt, Human
ugcugaaggcucgagcaugcc

SEQ ID NO: 3237809 - RNA, 22 nt, Human
ugcugaaaauugccuuucugug

SEQ ID NO: 3237810 - RNA, 21 nt, Human
ugcugagucuguucugguaau

SEQ ID NO: 3237811 - RNA, 16 nt, Human
ugcugagucuguucug

SEQ ID NO: 3237812 - RNA, 19 nt, Human
ugcugagucuguucuggua

SEQ ID NO: 3237813 - RNA, 23 nt, Human
ugcugaugacccccccagcuuca

SEQ ID NO: 3237814 - RNA, 22 nt, Human
ugcugaugacccccccagcuuc

SEQ ID NO: 3237815 - RNA, 16 nt, Human
ugcugacagacacagg

SEQ ID NO: 3237816 - RNA, 23 nt, Human
ugcugagucugaaggcuggguuc

SEQ ID NO: 3237817 - RNA, 15 nt, Human
ugcugacagacacag

SEQ ID NO: 3237818 - RNA, 18 nt, Human
ugcugauggugcaaugac

SEQ ID NO: 3237819 - RNA, 20 nt, Human
ugcugauggugcaaugaccu

SEQ ID NO: 3237820 - RNA, 23 nt, Human
ugcugauggugcaaugaccuuuc

SEQ ID NO: 3237821 - RNA, 15 nt, Human
ugcugcaguugccag

SEQ ID NO: 3237822 - RNA, 13 nt, Human
ugcugcagauacu

SEQ ID NO: 3237823 - RNA, 21 nt, Human
ugcugcagggcuuuaaaauuc

SEQ ID NO: 3237824 - RNA, 16 nt, Human
ugcugcagggcuuuaa

SEQ ID NO: 3237825 - RNA, 23 nt, Human
ugcggugcuaucucccccagccc

SEQ ID NO: 3237826 - RNA, 21 nt, Human
ugcggugcuaucucccccagc

SEQ ID NO: 3237827 - RNA, 13 nt, Human
ugcgcaggcuggc

SEQ ID NO: 3237828 - RNA, 16 nt, Human
ugcgcaggcuggcccu

SEQ ID NO: 3237829 - RNA, 17 nt, Human
ugcgcaggcuggcccug

SEQ ID NO: 3237830 - RNA, 18 nt, Human
ugccuuauggaacacucu

SEQ ID NO: 3237831 - RNA, 20 nt, Human
ugccuuauggaacacucuga

SEQ ID NO: 3237832 - RNA, 21 nt, Human
ugccuuauggaacacucugag

SEQ ID NO: 3237833 - RNA, 22 nt, Human
ugccuuauggaacacucugaga

SEQ ID NO: 3237834 - RNA, 21 nt, Human
ugccuggauggggcugcaccg

SEQ ID NO: 3237835 - RNA, 18 nt, Human
ugccuucagcucuacagc

SEQ ID NO: 3237836 - RNA, 17 nt, Human
ugccuucagcucuacag

SEQ ID NO: 3237837 - RNA, 17 nt, Human
ugccuuauguugaaaaa

SEQ ID NO: 3237838 - RNA, 13 nt, Human
ugccuucagcucu

SEQ ID NO: 3237839 - RNA, 16 nt, Human
ugccuccuuugugagg

SEQ ID NO: 3237840 - RNA, 17 nt, Human
ugccuccuuugugagga

SEQ ID NO: 3237841 - RNA, 18 nt, Human
ugccuccuuugugaggaa

SEQ ID NO: 3237842 - RNA, 14 nt, Human
ugccucugggacug

SEQ ID NO: 3237843 - RNA, 18 nt, Human
ugccuccuugauauuugu

SEQ ID NO: 3237844 - RNA, 22 nt, Human
ugccuccuugauauuuguauuu

SEQ ID NO: 3237845 - RNA, 17 nt, Human
ugccugaagucacacag

SEQ ID NO: 3237846 - RNA, 18 nt, Human
ugccugaagucacacagu

SEQ ID NO: 3237847 - RNA, 22 nt, Human
ugccugaagucacacagugagu

SEQ ID NO: 3237848 - RNA, 23 nt, Human
ugccuaggauucacaccccaccu

SEQ ID NO: 3237849 - RNA, 22 nt, Human
ugccuaggauucacaccccacc

SEQ ID NO: 3237850 - RNA, 20 nt, Human
ugccuaggauucacacccca

SEQ ID NO: 3237851 - RNA, 19 nt, Human
ugccuaaggcugaacuugu

SEQ ID NO: 3237852 - RNA, 11 nt, Human
ugcccagcccc

SEQ ID NO: 3237853 - RNA, 20 nt, Human
ugcccagaucagccagaagc

SEQ ID NO: 3237854 - RNA, 17 nt, Human
ugcccagaucagccaga

SEQ ID NO: 3237855 - RNA, 16 nt, Human
ugcccagaucagccag

SEQ ID NO: 3237856 - RNA, 23 nt, Human
ugcccaggcuggcgugcaguggu

SEQ ID NO: 3237857 - RNA, 22 nt, Human
ugcccagcccccuggucuuuga

SEQ ID NO: 3237858 - RNA, 14 nt, Human
uguauuuguagugu

SEQ ID NO: 3237859 - RNA, 17 nt, Human
uguauuuguaguguuau

SEQ ID NO: 3237860 - RNA, 12 nt, Human
ugucagugugac

SEQ ID NO: 3237861 - RNA, 20 nt, Human
ugucagugugacugaucucu

SEQ ID NO: 3237862 - RNA, 14 nt, Human
ugucagucacuaaa

SEQ ID NO: 3237863 - RNA, 14 nt, Human
ugucaguguuuggu

SEQ ID NO: 3237864 - RNA, 14 nt, Human
ugucaguuuauguu

SEQ ID NO: 3237865 - RNA, 18 nt, Human
ugucauaaagugagaaaa

SEQ ID NO: 3237866 - RNA, 20 nt, Human
ugucauaaagugagaaaacu

SEQ ID NO: 3237867 - RNA, 22 nt, Human
ugucauaaagugagaaaacugu

SEQ ID NO: 3237868 - RNA, 22 nt, Human
ugucaguuuauguuuuggucca

SEQ ID NO: 3237869 - RNA, 16 nt, Human
ugucaguuuauguuuu

SEQ ID NO: 3237870 - RNA, 20 nt, Human
ugucauacucgagucugagg

SEQ ID NO: 3237871 - RNA, 16 nt, Human
ugucaucaccauggaa

SEQ ID NO: 3237872 - RNA, 21 nt, Human
ugucauagaauagcauguugu

SEQ ID NO: 3237873 - RNA, 13 nt, Human
ugucauagccagu

SEQ ID NO: 3237874 - RNA, 23 nt, Human
ugucauucgcuacuaugauuuaa

SEQ ID NO: 3237875 - RNA, 13 nt, Human
ugucauugcuucu

SEQ ID NO: 3237876 - RNA, 18 nt, Human
ugucauugcuucuucuga

SEQ ID NO: 3237877 - RNA, 17 nt, Human
ugucauugcuucuucug

SEQ ID NO: 3237878 - RNA, 24 nt, Human
ugucauuagugagacauauuuaca

SEQ ID NO: 3237879 - RNA, 22 nt, Human
ugucauuagugagacauauuua

SEQ ID NO: 3237880 - RNA, 19 nt, Human
ugucccaugugagcugcug

SEQ ID NO: 3237881 - RNA, 14 nt, Human
uguccauuuuuaca

SEQ ID NO: 3237882 - RNA, 16 nt, Human
uguccauuuuuacaag

SEQ ID NO: 3237883 - RNA, 23 nt, Human
uguagcaaacccugucaaacauu

SEQ ID NO: 3237884 - RNA, 22 nt, Human
uguagcaaacccugucaaacau

SEQ ID NO: 3237885 - RNA, 21 nt, Human
uguagcaaacccugucaaaca

SEQ ID NO: 3237886 - RNA, 19 nt, Human
uguagcaaacccugucaaa

SEQ ID NO: 3237887 - RNA, 18 nt, Human
uguagcaaacccugucaa

SEQ ID NO: 3237888 - RNA, 15 nt, Human
uguagcaaacccugu

SEQ ID NO: 3237889 - RNA, 16 nt, Human
uguagauuugauuuuu

SEQ ID NO: 3237890 - RNA, 17 nt, Human
uguagauuuuauagugu

SEQ ID NO: 3237891 - RNA, 18 nt, Human
uguagauuuuauagugug

SEQ ID NO: 3237892 - RNA, 13 nt, Human
uguagauuugauu

SEQ ID NO: 3237893 - RNA, 14 nt, Human
uguauaauauugaa

SEQ ID NO: 3237894 - RNA, 20 nt, Human
uguauaauauugaaaauuga

SEQ ID NO: 3237895 - RNA, 21 nt, Human
uguauaauauugaaaauugaa

SEQ ID NO: 3237896 - RNA, 22 nt, Human
uguauaauauugaaaauugaaa

SEQ ID NO: 3237897 - RNA, 20 nt, Human
uguauaauucaaagcaccaa

SEQ ID NO: 3237898 - RNA, 15 nt, Human
uguauaauacuuugu

SEQ ID NO: 3237899 - RNA, 17 nt, Human
uguauaauacuuuguau

SEQ ID NO: 3237900 - RNA, 20 nt, Human
uguauaauacuuuguauaca

SEQ ID NO: 3237901 - RNA, 22 nt, Human
uguauaauacuuuguauacaag

SEQ ID NO: 3237902 - RNA, 19 nt, Human
uguauacguuucaaaaaca

SEQ ID NO: 3237903 - RNA, 12 nt, Human
uguauacaugug

SEQ ID NO: 3237904 - RNA, 18 nt, Human
uguauacaaguacuggua

SEQ ID NO: 3237905 - RNA, 19 nt, Human
uguauacaaguacugguaa

SEQ ID NO: 3237906 - RNA, 23 nt, Human
uguaucccaugagccucagcauc

SEQ ID NO: 3237907 - RNA, 19 nt, Human
uguaucccaugagccucag

SEQ ID NO: 3237908 - RNA, 16 nt, Human
uguaucccaugagccu

SEQ ID NO: 3237909 - RNA, 12 nt, Human
uguaucuaagaa

SEQ ID NO: 3237910 - RNA, 15 nt, Human
uguaucuaagaauaa

SEQ ID NO: 3237911 - RNA, 19 nt, Human
uguaucuaagaauaauaaa

SEQ ID NO: 3237912 - RNA, 20 nt, Human
uguaucuaagaauaauaaaa

SEQ ID NO: 3237913 - RNA, 21 nt, Human
uguaucuaagaauaauaaaau

SEQ ID NO: 3237914 - RNA, 20 nt, Human
uguaugcaagcaguuucaau

SEQ ID NO: 3237915 - RNA, 19 nt, Human
uguaugcaagcaguuucaa

SEQ ID NO: 3237916 - RNA, 18 nt, Human
uguaugcaagcaguuuca

SEQ ID NO: 3237917 - RNA, 16 nt, Human
uguaugcaagcaguuu

SEQ ID NO: 3237918 - RNA, 14 nt, Human
uguaugcacuuugu

SEQ ID NO: 3237919 - RNA, 12 nt, Human
uguaugcauaau

SEQ ID NO: 3237920 - RNA, 22 nt, Human
uguaugcauaauaauccugcaa

SEQ ID NO: 3237921 - RNA, 17 nt, Human
uguaugcauaauaaucc

SEQ ID NO: 3237922 - RNA, 12 nt, Human
uguauuugaaag

SEQ ID NO: 3237923 - RNA, 13 nt, Human
uguauuugaaagu

SEQ ID NO: 3237924 - RNA, 13 nt, Human
uguauugcuuucu

SEQ ID NO: 3237925 - RNA, 17 nt, Human
uguauugcuuucuuuca

SEQ ID NO: 3237926 - RNA, 17 nt, Human
uguauuguaacuauguu

SEQ ID NO: 3237927 - RNA, 17 nt, Human
uguaaacacucagcugu

SEQ ID NO: 3237928 - RNA, 18 nt, Human
uguaaacacucagcuguu

SEQ ID NO: 3237929 - RNA, 14 nt, Human
uguaaacaaaucuu

SEQ ID NO: 3237930 - RNA, 19 nt, Human
uguaaacaaaucuuuccau

SEQ ID NO: 3237931 - RNA, 18 nt, Human
uggguuuccaacaauuca

SEQ ID NO: 3237932 - RNA, 14 nt, Human
ugguaguuucugug

SEQ ID NO: 3237933 - RNA, 17 nt, Human
ugguaguugaggaaagc

SEQ ID NO: 3237934 - RNA, 20 nt, Human
ugguagugguuguaucugug

SEQ ID NO: 3237935 - RNA, 15 nt, Human
uguaaauuuauguga

SEQ ID NO: 3237936 - RNA, 22 nt, Human
uguaaauugacuguacuaggcc

SEQ ID NO: 3237937 - RNA, 16 nt, Human
uguaaauuuaugugau

SEQ ID NO: 3237938 - RNA, 15 nt, Human
uguaaauucugauuu

SEQ ID NO: 3237939 - RNA, 18 nt, Human
uguaaauucugauuucuu

SEQ ID NO: 3237940 - RNA, 19 nt, Human
uguaaauucugauuucuuu

SEQ ID NO: 3237941 - RNA, 22 nt, Human
uguaaauucugauuucuuuuca

SEQ ID NO: 3237942 - RNA, 13 nt, Human
uguaaauucugau

SEQ ID NO: 3237943 - RNA, 14 nt, Human
uguaaauucugauu

SEQ ID NO: 3237944 - RNA, 12 nt, Human
uguaaauucuga

SEQ ID NO: 3237945 - RNA, 23 nt, Human
uguaacuaaaauaauuuuguaau

SEQ ID NO: 3237946 - RNA, 19 nt, Human
uguaacgugugcuguguuu

SEQ ID NO: 3237947 - RNA, 18 nt, Human
uguaacgugugcuguguu

SEQ ID NO: 3237948 - RNA, 22 nt, Human
uguaacgugugcuguguuugcu

SEQ ID NO: 3237949 - RNA, 15 nt, Human
uguaacuaaaauaau

SEQ ID NO: 3237950 - RNA, 14 nt, Human
uguaacuaaaauaa

SEQ ID NO: 3237951 - RNA, 14 nt, Human
uguaaucacagcua

SEQ ID NO: 3237952 - RNA, 21 nt, Human
uguaacuguuaccauuggaaa

SEQ ID NO: 3237953 - RNA, 15 nt, Human
uguaaucacagcuac

SEQ ID NO: 3237954 - RNA, 12 nt, Human
uguaauccagca

SEQ ID NO: 3237955 - RNA, 20 nt, Human
uguaacuguuaccauuggaa

SEQ ID NO: 3237956 - RNA, 17 nt, Human
uguaacuguuaccauug

SEQ ID NO: 3237957 - RNA, 14 nt, Human
uguaacuguuacca

SEQ ID NO: 3237958 - RNA, 12 nt, Human
uguaacuguuac

SEQ ID NO: 3237959 - RNA, 15 nt, Human
uguaacuguuacagu

SEQ ID NO: 3237960 - RNA, 16 nt, Human
uguaacuguuacagua

SEQ ID NO: 3237961 - RNA, 18 nt, Human
uguaacuguuacaguaau

SEQ ID NO: 3237962 - RNA, 23 nt, Human
uguaacugcucuugggcaauauu

SEQ ID NO: 3237963 - RNA, 22 nt, Human
uguaacugcucuugggcaauau

SEQ ID NO: 3237964 - RNA, 17 nt, Human
uguaacuauguuuuauc

SEQ ID NO: 3237965 - RNA, 13 nt, Human
uguaacuauguuu

SEQ ID NO: 3237966 - RNA, 12 nt, Human
uguaacuauguu

SEQ ID NO: 3237967 - RNA, 13 nt, Human
uguacuccuccca

SEQ ID NO: 3237968 - RNA, 12 nt, Human
uguacuccuccc

SEQ ID NO: 3237969 - RNA, 20 nt, Human
uguacuauaacauagaauug

SEQ ID NO: 3237970 - RNA, 18 nt, Human
uguacuaucuuaucucag

SEQ ID NO: 3237971 - RNA, 19 nt, Human
uguacuauaacauagaauu

SEQ ID NO: 3237972 - RNA, 16 nt, Human
uguacgucugacaggc

SEQ ID NO: 3237973 - RNA, 17 nt, Human
uguacgucugacaggca

SEQ ID NO: 3237974 - RNA, 14 nt, Human
uguagagugggagc

SEQ ID NO: 3237975 - RNA, 17 nt, Human
uguacugauuucaguaa

SEQ ID NO: 3237976 - RNA, 12 nt, Human
uguagauuugau

SEQ ID NO: 3237977 - RNA, 23 nt, Human
uguaccauuaaaauaugcacuaa

SEQ ID NO: 3237978 - RNA, 19 nt, Human
uguaccauuaaaauaugca

SEQ ID NO: 3237979 - RNA, 17 nt, Human
uguaccauuaaaauaug

SEQ ID NO: 3237980 - RNA, 15 nt, Human
uguaccauuaaaaua

SEQ ID NO: 3237981 - RNA, 12 nt, Human
uguaaugacagg

SEQ ID NO: 3237982 - RNA, 20 nt, Human
uguaauguaggggaaaguuu

SEQ ID NO: 3237983 - RNA, 14 nt, Human
uguaauguaacugc

SEQ ID NO: 3237984 - RNA, 13 nt, Human
uguaauguaacug

SEQ ID NO: 3237985 - RNA, 12 nt, Human
uguaauguaacu

SEQ ID NO: 3237986 - RNA, 18 nt, Human
uguaauguaacugcucuu

SEQ ID NO: 3237987 - RNA, 15 nt, Human
uguaauguaacugcu

SEQ ID NO: 3237988 - RNA, 23 nt, Human
uguaauguaucaaauacauuuaa

SEQ ID NO: 3237989 - RNA, 14 nt, Human
uguaccauuaaaau

SEQ ID NO: 3237990 - RNA, 13 nt, Human
uguaccauuaaaa

SEQ ID NO: 3237991 - RNA, 14 nt, Human
ugugcaagagaggg

SEQ ID NO: 3237992 - RNA, 18 nt, Human
ugugcaagcuuuuccuaa

SEQ ID NO: 3237993 - RNA, 17 nt, Human
ugugauauaaacagcuu

SEQ ID NO: 3237994 - RNA, 19 nt, Human
ugugcaagcuuuuccuaau

SEQ ID NO: 3237995 - RNA, 21 nt, Human
ugugaguuuguuucuuugaau

SEQ ID NO: 3237996 - RNA, 19 nt, Human
ugugaguuuguuucuuuga

SEQ ID NO: 3237997 - RNA, 17 nt, Human
ugugaguuuguuucuuu

SEQ ID NO: 3237998 - RNA, 15 nt, Human
ugugaguauucucau

SEQ ID NO: 3237999 - RNA, 13 nt, Human
ugugaguauucuc

SEQ ID NO: 3238000 - RNA, 23 nt, Human
ugugaguauucucauucuuccca

SEQ ID NO: 3238001 - RNA, 18 nt, Human
ugugaggggcucucucau

SEQ ID NO: 3238002 - RNA, 18 nt, Human
ugugaguacuacaguccu

SEQ ID NO: 3238003 - RNA, 12 nt, Human
ugugagggcagu

SEQ ID NO: 3238004 - RNA, 22 nt, Human
ugugagggaaagagcuuuccua

SEQ ID NO: 3238005 - RNA, 15 nt, Human
ugugagggaaagagc

SEQ ID NO: 3238006 - RNA, 14 nt, Human
ugugagggaaagag

SEQ ID NO: 3238007 - RNA, 19 nt, Human
ugugaguacuacaguccuc

SEQ ID NO: 3238008 - RNA, 20 nt, Human
ugugaguacuacaguccucc

SEQ ID NO: 3238009 - RNA, 23 nt, Human
ugugaguacuacaguccucccau

SEQ ID NO: 3238010 - RNA, 15 nt, Human
ugugagggcagugca

SEQ ID NO: 3238011 - RNA, 21 nt, Human
ugugaauacugcuugaauaaa

SEQ ID NO: 3238012 - RNA, 16 nt, Human
ugugaauaauuacagu

SEQ ID NO: 3238013 - RNA, 14 nt, Human
ugugaauaauuaca

SEQ ID NO: 3238014 - RNA, 14 nt, Human
ugugaauacugcuu

SEQ ID NO: 3238015 - RNA, 18 nt, Human
ugugaauacugcuugaau

SEQ ID NO: 3238016 - RNA, 15 nt, Human
ugugaauauaaaugu

SEQ ID NO: 3238017 - RNA, 17 nt, Human
ugugaauauaaaugugu

SEQ ID NO: 3238018 - RNA, 18 nt, Human
ugugaauauaaaugugug

SEQ ID NO: 3238019 - RNA, 20 nt, Human
ugugaauauaaaugugugua

SEQ ID NO: 3238020 - RNA, 21 nt, Human
ugugacaaggauugcuacugu

SEQ ID NO: 3238021 - RNA, 22 nt, Human
ugugaauuuucuaaaagcuuuc

SEQ ID NO: 3238022 - RNA, 22 nt, Human
ugugaccacugcagaagacagu

SEQ ID NO: 3238023 - RNA, 21 nt, Human
ugugacaucucuauuccccac

SEQ ID NO: 3238024 - RNA, 20 nt, Human
ugugacaucucuauucccca

SEQ ID NO: 3238025 - RNA, 13 nt, Human
ugugacaguguug

SEQ ID NO: 3238026 - RNA, 16 nt, Human
ugucuuuuuucacuac

SEQ ID NO: 3238027 - RNA, 19 nt, Human
ugucuuuggacccugaggc

SEQ ID NO: 3238028 - RNA, 22 nt, Human
ugucuuuggacccugaggccca

SEQ ID NO: 3238029 - RNA, 17 nt, Human
ugucuuuggacccugag

SEQ ID NO: 3238030 - RNA, 18 nt, Human
ugucuuuggacccugagg

SEQ ID NO: 3238031 - RNA, 16 nt, Human
ugucugcuccagcucu

SEQ ID NO: 3238032 - RNA, 20 nt, Human
ugugaaaaaaaaaaugcuga

SEQ ID NO: 3238033 - RNA, 17 nt, Human
ugugaaaaaaaaaaugc

SEQ ID NO: 3238034 - RNA, 14 nt, Human
ugugaaaggaaaga

SEQ ID NO: 3238035 - RNA, 13 nt, Human
ugugaaaggaaag

SEQ ID NO: 3238036 - RNA, 13 nt, Human
ugugaaaaaucug

SEQ ID NO: 3238037 - RNA, 17 nt, Human
ugugaaaaugugugugu

SEQ ID NO: 3238038 - RNA, 14 nt, Human
ugugaaacagacuu

SEQ ID NO: 3238039 - RNA, 14 nt, Human
ugucuggcugcaga

SEQ ID NO: 3238040 - RNA, 17 nt, Human
ugucuggcugcagagca

SEQ ID NO: 3238041 - RNA, 16 nt, Human
ugucuggcugcagagc

SEQ ID NO: 3238042 - RNA, 16 nt, Human
ugucugccccaaguuu

SEQ ID NO: 3238043 - RNA, 19 nt, Human
ugucugcccaaugaauaau

SEQ ID NO: 3238044 - RNA, 22 nt, Human
ugucugccccaaguuuugugaa

SEQ ID NO: 3238045 - RNA, 17 nt, Human
ugucugccccaaguuuu

SEQ ID NO: 3238046 - RNA, 18 nt, Human
ugucugccacauuaacua

SEQ ID NO: 3238047 - RNA, 16 nt, Human
ugucugccacauuaac

SEQ ID NO: 3238048 - RNA, 21 nt, Human
ugucucaguccaugaagaugu

SEQ ID NO: 3238049 - RNA, 22 nt, Human
ugucccaugugagcugcugcca

SEQ ID NO: 3238050 - RNA, 20 nt, Human
ugucccaugugagcugcugc

SEQ ID NO: 3238051 - RNA, 19 nt, Human
ugucucaagagggcacugg

SEQ ID NO: 3238052 - RNA, 12 nt, Human
uguccccaccau

SEQ ID NO: 3238053 - RNA, 11 nt, Human
uguccccacca

SEQ ID NO: 3238054 - RNA, 21 nt, Human
uguccccaccaucugcugucu

SEQ ID NO: 3238055 - RNA, 17 nt, Human
uguccccaccaucugcu

SEQ ID NO: 3238056 - RNA, 16 nt, Human
uguccccaccaucugc

SEQ ID NO: 3238057 - RNA, 14 nt, Human
uguccccaccaucu

SEQ ID NO: 3238058 - RNA, 17 nt, Human
ugucucaggucccugca

SEQ ID NO: 3238059 - RNA, 16 nt, Human
ugucucaggucccugc

SEQ ID NO: 3238060 - RNA, 21 nt, Human
ugucucaagagggcacuggug

SEQ ID NO: 3238061 - RNA, 20 nt, Human
ugucucaagagggcacuggu

SEQ ID NO: 3238062 - RNA, 23 nt, Human
ugucucaagagggcacugguggc

SEQ ID NO: 3238063 - RNA, 19 nt, Human
uguggaaaagccaagaggc

SEQ ID NO: 3238064 - RNA, 23 nt, Human
uguggaaaagccaagaggcugca

SEQ ID NO: 3238065 - RNA, 21 nt, Human
uguggaaaagccaagaggcug

SEQ ID NO: 3238066 - RNA, 17 nt, Human
uguggaaaaugaaaauu

SEQ ID NO: 3238067 - RNA, 13 nt, Human
uguggacacagcu

SEQ ID NO: 3238068 - RNA, 14 nt, Human
uguggacacagcuc

SEQ ID NO: 3238069 - RNA, 12 nt, Human
uguggagaagcg

SEQ ID NO: 3238070 - RNA, 21 nt, Human
uguggcuccuggggguucuuu

SEQ ID NO: 3238071 - RNA, 15 nt, Human
uguggacacagcucu

SEQ ID NO: 3238072 - RNA, 15 nt, Human
uguggacuuaggaag

SEQ ID NO: 3238073 - RNA, 16 nt, Human
ugugggggucugugug

SEQ ID NO: 3238074 - RNA, 13 nt, Human
uguggggggaggc

SEQ ID NO: 3238075 - RNA, 23 nt, Human
uguggggggaggcugacuccugg

SEQ ID NO: 3238076 - RNA, 21 nt, Human
ugugggggccccgucucaggu

SEQ ID NO: 3238077 - RNA, 14 nt, Human
ugugggucugugug

SEQ ID NO: 3238078 - RNA, 16 nt, Human
ugugggucugugugug

SEQ ID NO: 3238079 - RNA, 12 nt, Human
uguggcuucugg

SEQ ID NO: 3238080 - RNA, 12 nt, Human
ugugggaagggg

SEQ ID NO: 3238081 - RNA, 22 nt, Human
ugugggcuaguugggcuuccuc

SEQ ID NO: 3238082 - RNA, 20 nt, Human
ugugcguaugcaguguagau

SEQ ID NO: 3238083 - RNA, 20 nt, Human
ugugcgugcauguguguuca

SEQ ID NO: 3238084 - RNA, 15 nt, Human
ugugccuuauguuga

SEQ ID NO: 3238085 - RNA, 23 nt, Human
ugugccugcuucagccucccaca

SEQ ID NO: 3238086 - RNA, 14 nt, Human
ugugccugcuucag

SEQ ID NO: 3238087 - RNA, 18 nt, Human
ugugcaugugucuuuaua

SEQ ID NO: 3238088 - RNA, 17 nt, Human
ugugccucugggacugg

SEQ ID NO: 3238089 - RNA, 15 nt, Human
ugugccucugccugu

SEQ ID NO: 3238090 - RNA, 19 nt, Human
ugugcuguguuugcucccc

SEQ ID NO: 3238091 - RNA, 21 nt, Human
ugugcuguguuugcuccccuu

SEQ ID NO: 3238092 - RNA, 20 nt, Human
ugugcuguguuugcuccccu

SEQ ID NO: 3238093 - RNA, 15 nt, Human
ugugcuaaacgugua

SEQ ID NO: 3238094 - RNA, 22 nt, Human
ugugcuaaacguguauguuuuu

SEQ ID NO: 3238095 - RNA, 21 nt, Human
ugugcuaaacguguauguuuu

SEQ ID NO: 3238096 - RNA, 21 nt, Human
ugugcguggggcucccgccuc

SEQ ID NO: 3238097 - RNA, 22 nt, Human
ugugcguggggcucccgccucc

SEQ ID NO: 3238098 - RNA, 22 nt, Human
ugugcuuauguaugagguacaa

SEQ ID NO: 3238099 - RNA, 15 nt, Human
ugugcuucugccacc

SEQ ID NO: 3238100 - RNA, 16 nt, Human
ugugccucugggacug

SEQ ID NO: 3238101 - RNA, 15 nt, Human
ugugccucugggacu

SEQ ID NO: 3238102 - RNA, 13 nt, Human
ugugccucuggga

SEQ ID NO: 3238103 - RNA, 14 nt, Human
ugugccucugccug

SEQ ID NO: 3238104 - RNA, 13 nt, Human
ugugccucugccu

SEQ ID NO: 3238105 - RNA, 16 nt, Human
ugugcaguugcuguuu

SEQ ID NO: 3238106 - RNA, 19 nt, Human
ugugcaguugcuguuuacu

SEQ ID NO: 3238107 - RNA, 22 nt, Human
ugugcacaugcacgugugugca

SEQ ID NO: 3238108 - RNA, 16 nt, Human
ugugcacaugcacgug

SEQ ID NO: 3238109 - RNA, 15 nt, Human
ugugcaccugggcuc

SEQ ID NO: 3238110 - RNA, 21 nt, Human
ugugcagagcugaagagcugg

SEQ ID NO: 3238111 - RNA, 13 nt, Human
ugugcagaugaag

SEQ ID NO: 3238112 - RNA, 15 nt, Human
ugugcagagcugaag

SEQ ID NO: 3238113 - RNA, 16 nt, Human
ugugcaguaucuguga

SEQ ID NO: 3238114 - RNA, 14 nt, Human
ugugcaguaacuug

SEQ ID NO: 3238115 - RNA, 15 nt, Human
uuacagaggacagua

SEQ ID NO: 3238116 - RNA, 16 nt, Human
uuacagagaugucucu

SEQ ID NO: 3238117 - RNA, 13 nt, Human
uuacaauguauua

SEQ ID NO: 3238118 - RNA, 14 nt, Human
uuacaauguauuaa

SEQ ID NO: 3238119 - RNA, 20 nt, Human
uuacagagacagaaagcaga

SEQ ID NO: 3238120 - RNA, 15 nt, Human
uuacaauguaacuuu

SEQ ID NO: 3238121 - RNA, 15 nt, Human
uuacaaguuauagua

SEQ ID NO: 3238122 - RNA, 19 nt, Human
uuacaaguuauaguacuag

SEQ ID NO: 3238123 - RNA, 23 nt, Human
uuacaauaaaaucuugaaaaugc

SEQ ID NO: 3238124 - RNA, 13 nt, Human
uuacaauauuugu

SEQ ID NO: 3238125 - RNA, 16 nt, Human
uuacaauauuugugug

SEQ ID NO: 3238126 - RNA, 15 nt, Human
uuacaauauuugugu

SEQ ID NO: 3238127 - RNA, 22 nt, Human
uuacaauauuugugugcuaaac

SEQ ID NO: 3238128 - RNA, 18 nt, Human
uuacaauauuugugugcu

SEQ ID NO: 3238129 - RNA, 13 nt, Human
uuacauuuguaau

SEQ ID NO: 3238130 - RNA, 15 nt, Human
uuacauuucgauguu

SEQ ID NO: 3238131 - RNA, 19 nt, Human
uuacauuuguaauuuaagg

SEQ ID NO: 3238132 - RNA, 18 nt, Human
uuacauuuguaauuuaag

SEQ ID NO: 3238133 - RNA, 14 nt, Human
uuacauuuguaauu

SEQ ID NO: 3238134 - RNA, 20 nt, Human
uuacgguuuuccagguuuaa

SEQ ID NO: 3238135 - RNA, 19 nt, Human
uuacgaaguucaagaucaa

SEQ ID NO: 3238136 - RNA, 20 nt, Human
uuacgaaguucaagaucaaa

SEQ ID NO: 3238137 - RNA, 17 nt, Human
uuaaugucacaggcagg

SEQ ID NO: 3238138 - RNA, 18 nt, Human
uuaauggaugaaaucaua

SEQ ID NO: 3238139 - RNA, 12 nt, Human
uuaauggaugaa

SEQ ID NO: 3238140 - RNA, 14 nt, Human
uuaauggaaauguu

SEQ ID NO: 3238141 - RNA, 18 nt, Human
uuaaugucacaggcaggu

SEQ ID NO: 3238142 - RNA, 22 nt, Human
uuaauguccucucaaaguaaaa

SEQ ID NO: 3238143 - RNA, 19 nt, Human
uuaauuauuauaaaaauau

SEQ ID NO: 3238144 - RNA, 14 nt, Human
uuaauaucuuucug

SEQ ID NO: 3238145 - RNA, 16 nt, Human
uuaauaucuuucugca

SEQ ID NO: 3238146 - RNA, 13 nt, Human
uuaauaugaaauu

SEQ ID NO: 3238147 - RNA, 23 nt, Human
uuaauaugaaauuuuuuuucaug

SEQ ID NO: 3238148 - RNA, 14 nt, Human
uuaauaugaaauuu

SEQ ID NO: 3238149 - RNA, 16 nt, Human
uuaaugccugcuuuuu

SEQ ID NO: 3238150 - RNA, 18 nt, Human
uuaaugccugcuuuuugg

SEQ ID NO: 3238151 - RNA, 19 nt, Human
uuaaugccugcuuuuugga

SEQ ID NO: 3238152 - RNA, 21 nt, Human
uuaaugccugcuuuuuggaaa

SEQ ID NO: 3238153 - RNA, 23 nt, Human
uuaaugcuaaucuugugaaaaua

SEQ ID NO: 3238154 - RNA, 22 nt, Human
uuaaugcuaaucuugugaaaau

SEQ ID NO: 3238155 - RNA, 18 nt, Human
uuaaugcuaaucuuguga

SEQ ID NO: 3238156 - RNA, 17 nt, Human
uuaaugcuaaucuugug

SEQ ID NO: 3238157 - RNA, 15 nt, Human
uuaaggccacaucca

SEQ ID NO: 3238158 - RNA, 14 nt, Human
uuaaggauaaauca

SEQ ID NO: 3238159 - RNA, 22 nt, Human
uuaaggauaaaucauaaaguca

SEQ ID NO: 3238160 - RNA, 23 nt, Human
uuaaggauaaaucauaaagucag

SEQ ID NO: 3238161 - RNA, 21 nt, Human
uuaauaauuagaaacaccaaa

SEQ ID NO: 3238162 - RNA, 21 nt, Human
uuaaggaagacaaugugaaaa

SEQ ID NO: 3238163 - RNA, 13 nt, Human
uuaagcuuuuugg

SEQ ID NO: 3238164 - RNA, 14 nt, Human
uuaagcuuuuugga

SEQ ID NO: 3238165 - RNA, 16 nt, Human
uuaagcuuuuuggaau

SEQ ID NO: 3238166 - RNA, 23 nt, Human
uuaaggaaauuuguaccauuuca

SEQ ID NO: 3238167 - RNA, 15 nt, Human
uuaaggacugacuga

SEQ ID NO: 3238168 - RNA, 16 nt, Human
uuaaggacugacugag

SEQ ID NO: 3238169 - RNA, 18 nt, Human
uuaaggacugacugaggc

SEQ ID NO: 3238170 - RNA, 17 nt, Human
uuaaggagaaucauguu

SEQ ID NO: 3238171 - RNA, 22 nt, Human
uuaaggagaaucauguuucuuu

SEQ ID NO: 3238172 - RNA, 21 nt, Human
uuaaggagaaucauguuucuu

SEQ ID NO: 3238173 - RNA, 20 nt, Human
uuaaggagaaucauguuucu

SEQ ID NO: 3238174 - RNA, 18 nt, Human
uuaaggagaaucauguuu

SEQ ID NO: 3238175 - RNA, 20 nt, Human
uuaaagcuuauuaaaacuca

SEQ ID NO: 3238176 - RNA, 11 nt, Human
uuaaagaugua

SEQ ID NO: 3238177 - RNA, 16 nt, Human
uuaaagauguagcaaa

SEQ ID NO: 3238178 - RNA, 15 nt, Human
uuaaagauguagcaa

SEQ ID NO: 3238179 - RNA, 21 nt, Human
uuaaagauguagcaaacccug

SEQ ID NO: 3238180 - RNA, 18 nt, Human
uuaaaagauaaauauuau

SEQ ID NO: 3238181 - RNA, 16 nt, Human
uuaaaacaucauuccu

SEQ ID NO: 3238182 - RNA, 18 nt, Human
uuaaaacaucauuccuuu

SEQ ID NO: 3238183 - RNA, 23 nt, Human
uuaaaacaucauuccuuuuuauu

SEQ ID NO: 3238184 - RNA, 15 nt, Human
uuaaaacauuaaaau

SEQ ID NO: 3238185 - RNA, 14 nt, Human
uuaacaugcugugu

SEQ ID NO: 3238186 - RNA, 23 nt, Human
uuaacaugcuguguaagcugugu

SEQ ID NO: 3238187 - RNA, 17 nt, Human
uuaaaugcccagccccu

SEQ ID NO: 3238188 - RNA, 18 nt, Human
uuaaaugcccagccccuu

SEQ ID NO: 3238189 - RNA, 16 nt, Human
uuaaaugcuucauuug

SEQ ID NO: 3238190 - RNA, 20 nt, Human
uuaaaugcaguuacaaauua

SEQ ID NO: 3238191 - RNA, 18 nt, Human
uuaaauaguaaaaauaaa

SEQ ID NO: 3238192 - RNA, 17 nt, Human
uguuuguugucagcuga

SEQ ID NO: 3238193 - RNA, 16 nt, Human
uguuuguugucagcug

SEQ ID NO: 3238194 - RNA, 20 nt, Human
uguuuccuggcacugcuucc

SEQ ID NO: 3238195 - RNA, 21 nt, Human
uguuuccuggcacugcuucca

SEQ ID NO: 3238196 - RNA, 22 nt, Human
uguuuccuggcacugcuuccag

SEQ ID NO: 3238197 - RNA, 15 nt, Human
uguuuccuggcacug

SEQ ID NO: 3238198 - RNA, 16 nt, Human
uguuucucccgugcuu

SEQ ID NO: 3238199 - RNA, 15 nt, Human
uguuucucccgugcu

SEQ ID NO: 3238200 - RNA, 16 nt, Human
uguuuugccagcccau

SEQ ID NO: 3238201 - RNA, 17 nt, Human
uguuuuggacuuuguua

SEQ ID NO: 3238202 - RNA, 19 nt, Human
uguuuuggacuuuguuaca

SEQ ID NO: 3238203 - RNA, 19 nt, Human
uguuuugcuuuugcucgau

SEQ ID NO: 3238204 - RNA, 17 nt, Human
uguuuugcuuccccucc

SEQ ID NO: 3238205 - RNA, 17 nt, Human
uguuuugccagcccauu

SEQ ID NO: 3238206 - RNA, 22 nt, Human
uguuuuggauuuggagagaaau

SEQ ID NO: 3238207 - RNA, 21 nt, Human
uguuuuggauuuggagagaaa

SEQ ID NO: 3238208 - RNA, 19 nt, Human
uguuuuucaguucaaaguc

SEQ ID NO: 3238209 - RNA, 17 nt, Human
uguuuuucaguucaaag

SEQ ID NO: 3238210 - RNA, 15 nt, Human
uguuuuucaguucaa

SEQ ID NO: 3238211 - RNA, 14 nt, Human
uguuuuucaguuca

SEQ ID NO: 3238212 - RNA, 13 nt, Human
uguuuuucaguuc

SEQ ID NO: 3238213 - RNA, 12 nt, Human
uguuuuucaguu

SEQ ID NO: 3238214 - RNA, 22 nt, Human
uguuuuguaaacuuugaaauau

SEQ ID NO: 3238215 - RNA, 15 nt, Human
uguuuuguaaacuuu

SEQ ID NO: 3238216 - RNA, 13 nt, Human
uguuuuguaaacu

SEQ ID NO: 3238217 - RNA, 21 nt, Human
uguuuuguaaacuuugaaaua

SEQ ID NO: 3238218 - RNA, 20 nt, Human
uguuuuguaaacuuugaaau

SEQ ID NO: 3238219 - RNA, 19 nt, Human
uguuuuguaaacuuugaaa

SEQ ID NO: 3238220 - RNA, 18 nt, Human
uguuuuguaaacuuugaa

SEQ ID NO: 3238221 - RNA, 17 nt, Human
uguuuuguaaacuuuga

SEQ ID NO: 3238222 - RNA, 16 nt, Human
uguuuuguaaacuuug

SEQ ID NO: 3238223 - RNA, 17 nt, Human
uguuuuucgucauucca

SEQ ID NO: 3238224 - RNA, 13 nt, Human
uguuuuugucuua

SEQ ID NO: 3238225 - RNA, 11 nt, Human
uguuuuucuca

SEQ ID NO: 3238226 - RNA, 14 nt, Human
uguuuuuguuuugu

SEQ ID NO: 3238227 - RNA, 19 nt, Human
uguuuuuuaagauggcaau

SEQ ID NO: 3238228 - RNA, 17 nt, Human
uguuuuuugagucuuuu

SEQ ID NO: 3238229 - RNA, 16 nt, Human
uguuuuuugaaguguu

SEQ ID NO: 3238230 - RNA, 15 nt, Human
uguuuuuugaagugu

SEQ ID NO: 3238231 - RNA, 13 nt, Human
uguuuuuugaagu

SEQ ID NO: 3238232 - RNA, 13 nt, Human
uuaaaacacguuu

SEQ ID NO: 3238233 - RNA, 19 nt, Human
uuaaaacacguuuuaagga

SEQ ID NO: 3238234 - RNA, 21 nt, Human
uuaaaacacguuuuaaggacu

SEQ ID NO: 3238235 - RNA, 22 nt, Human
uuaaaacacguuuuaaggacug

SEQ ID NO: 3238236 - RNA, 23 nt, Human
uuaaaacacguuuuaaggacuga

SEQ ID NO: 3238237 - RNA, 18 nt, Human
uguuuuuguuuuguugca

SEQ ID NO: 3238238 - RNA, 9 nt, Human
uguuuuuug

SEQ ID NO: 3238239 - RNA, 12 nt, Human
uguucaguguua

SEQ ID NO: 3238240 - RNA, 18 nt, Human
uguucaggaaguccuuau

SEQ ID NO: 3238241 - RNA, 17 nt, Human
uguucacuaaacucuga

SEQ ID NO: 3238242 - RNA, 15 nt, Human
uguucacuaaacucu

SEQ ID NO: 3238243 - RNA, 17 nt, Human
uguucagcuuuuauucc

SEQ ID NO: 3238244 - RNA, 21 nt, Human
uguucaggaaaagguugaaua

SEQ ID NO: 3238245 - RNA, 23 nt, Human
uguucaggaaaagguugaauaau

SEQ ID NO: 3238246 - RNA, 12 nt, Human
uguucucugccc

SEQ ID NO: 3238247 - RNA, 16 nt, Human
uguucucugcccucca

SEQ ID NO: 3238248 - RNA, 18 nt, Human
uguucucugaggacacua

SEQ ID NO: 3238249 - RNA, 16 nt, Human
uguucucugaggacac

SEQ ID NO: 3238250 - RNA, 13 nt, Human
uguucucugagga

SEQ ID NO: 3238251 - RNA, 11 nt, Human
uguugaaagau

SEQ ID NO: 3238252 - RNA, 15 nt, Human
uguucugacccugcu

SEQ ID NO: 3238253 - RNA, 19 nt, Human
uguucucugcccuccaaga

SEQ ID NO: 3238254 - RNA, 18 nt, Human
uguucugacccugcuuca

SEQ ID NO: 3238255 - RNA, 15 nt, Human
uguucugauauuaau

SEQ ID NO: 3238256 - RNA, 17 nt, Human
uguucugcacacagcac

SEQ ID NO: 3238257 - RNA, 14 nt, Human
uguuuacagaggac

SEQ ID NO: 3238258 - RNA, 21 nt, Human
uguuuacagaggacaguauuu

SEQ ID NO: 3238259 - RNA, 17 nt, Human
uguuuacagauccccaa

SEQ ID NO: 3238260 - RNA, 13 nt, Human
uguuuaaaaucau

SEQ ID NO: 3238261 - RNA, 12 nt, Human
uguuguuuguau

SEQ ID NO: 3238262 - RNA, 14 nt, Human
uguuguuuuguaca

SEQ ID NO: 3238263 - RNA, 19 nt, Human
uguuguuuuguacagaugu

SEQ ID NO: 3238264 - RNA, 16 nt, Human
uguuguuuuguacaga

SEQ ID NO: 3238265 - RNA, 12 nt, Human
uguuuaaaacac

SEQ ID NO: 3238266 - RNA, 20 nt, Human
uguuuaaaacaccuucuaua

SEQ ID NO: 3238267 - RNA, 14 nt, Human
uguuggccaggcug

SEQ ID NO: 3238268 - RNA, 13 nt, Human
uguuggccaggcu

SEQ ID NO: 3238269 - RNA, 13 nt, Human
uguuguuuaagug

SEQ ID NO: 3238270 - RNA, 20 nt, Human
uguuguuucuuaauuuggaa

SEQ ID NO: 3238271 - RNA, 19 nt, Human
uguuguucuuggcaauaaa

SEQ ID NO: 3238272 - RNA, 23 nt, Human
uguuguucuuggcaauaaauuuu

SEQ ID NO: 3238273 - RNA, 13 nt, Human
uguuggaaaaaau

SEQ ID NO: 3238274 - RNA, 14 nt, Human
uguuggaaaaaauu

SEQ ID NO: 3238275 - RNA, 15 nt, Human
uguuggaaaaaauuu

SEQ ID NO: 3238276 - RNA, 20 nt, Human
uguugcuuauguuguuuugu

SEQ ID NO: 3238277 - RNA, 14 nt, Human
uguugcuuauguug

SEQ ID NO: 3238278 - RNA, 14 nt, Human
uguugcugccucau

SEQ ID NO: 3238279 - RNA, 11 nt, Human
uguuggccagg

SEQ ID NO: 3238280 - RNA, 15 nt, Human
uguuggccaaagcca

SEQ ID NO: 3238281 - RNA, 14 nt, Human
uguugaacuguuag

SEQ ID NO: 3238282 - RNA, 15 nt, Human
uguugaacuguuaga

SEQ ID NO: 3238283 - RNA, 12 nt, Human
uguugaacaaaa

SEQ ID NO: 3238284 - RNA, 19 nt, Human
uguugaacaaaauaaauug

SEQ ID NO: 3238285 - RNA, 18 nt, Human
uguugaacaaaauaaauu

SEQ ID NO: 3238286 - RNA, 15 nt, Human
uguugaacaaaauaa

SEQ ID NO: 3238287 - RNA, 14 nt, Human
uguugaacaaaaua

SEQ ID NO: 3238288 - RNA, 13 nt, Human
uguugaagagcag

SEQ ID NO: 3238289 - RNA, 11 nt, Human
uguugaagagc

SEQ ID NO: 3238290 - RNA, 18 nt, Human
uguugaagagcagcuccu

SEQ ID NO: 3238291 - RNA, 13 nt, Human
uguugcugccuca

SEQ ID NO: 3238292 - RNA, 16 nt, Human
uguugcugauuuuauu

SEQ ID NO: 3238293 - RNA, 14 nt, Human
uguugcugauuuua

SEQ ID NO: 3238294 - RNA, 21 nt, Human
uguugagcugguaacaucguu

SEQ ID NO: 3238295 - RNA, 22 nt, Human
uguugaggcuuauauuugugua

SEQ ID NO: 3238296 - RNA, 19 nt, Human
uguugauaaaaauacugac

SEQ ID NO: 3238297 - RNA, 11 nt, Human
uguguguaugu

SEQ ID NO: 3238298 - RNA, 19 nt, Human
ugugugcggagucauuuug

SEQ ID NO: 3238299 - RNA, 20 nt, Human
ugugugccucuagcugaauu

SEQ ID NO: 3238300 - RNA, 12 nt, Human
uguguguaugug

SEQ ID NO: 3238301 - RNA, 18 nt, Human
ugugugccucuagcugaa

SEQ ID NO: 3238302 - RNA, 17 nt, Human
ugugugccucuagcuga

SEQ ID NO: 3238303 - RNA, 16 nt, Human
ugugugccucuagcug

SEQ ID NO: 3238304 - RNA, 22 nt, Human
ugugugccgagcccuugcccau

SEQ ID NO: 3238305 - RNA, 13 nt, Human
ugugugcccagcu

SEQ ID NO: 3238306 - RNA, 14 nt, Human
ugugugcccagcuu

SEQ ID NO: 3238307 - RNA, 21 nt, Human
ugugugccgagcccuugccca

SEQ ID NO: 3238308 - RNA, 20 nt, Human
ugugugccgagcccuugccc

SEQ ID NO: 3238309 - RNA, 18 nt, Human
ugugugccgagcccuugc

SEQ ID NO: 3238310 - RNA, 17 nt, Human
ugugugcagagcugaag

SEQ ID NO: 3238311 - RNA, 14 nt, Human
ugugugcagagcug

SEQ ID NO: 3238312 - RNA, 17 nt, Human
ugugugagugugaauau

SEQ ID NO: 3238313 - RNA, 19 nt, Human
ugugugcacuuuuuuucua

SEQ ID NO: 3238314 - RNA, 15 nt, Human
ugugugauauuucag

SEQ ID NO: 3238315 - RNA, 15 nt, Human
uguguuuaugugugu

SEQ ID NO: 3238316 - RNA, 23 nt, Human
uguguuuauucaaacugaaaagc

SEQ ID NO: 3238317 - RNA, 22 nt, Human
uguguuuauucaaacugaaaag

SEQ ID NO: 3238318 - RNA, 14 nt, Human
uguguuuauucaaa

SEQ ID NO: 3238319 - RNA, 12 nt, Human
uguguuuauuca

SEQ ID NO: 3238320 - RNA, 20 nt, Human
uguguuuauucuugaugaaa

SEQ ID NO: 3238321 - RNA, 15 nt, Human
uguguuuauucuuga

SEQ ID NO: 3238322 - RNA, 14 nt, Human
uguguuuauucuug

SEQ ID NO: 3238323 - RNA, 12 nt, Human
uguguuuauucu

SEQ ID NO: 3238324 - RNA, 13 nt, Human
uguguuuaugugu

SEQ ID NO: 3238325 - RNA, 12 nt, Human
uguguuuauaug

SEQ ID NO: 3238326 - RNA, 15 nt, Human
uguguuuauauggaa

SEQ ID NO: 3238327 - RNA, 22 nt, Human
uguguuuagaauugaagguuuu

SEQ ID NO: 3238328 - RNA, 14 nt, Human
uguguugugugugg

SEQ ID NO: 3238329 - RNA, 23 nt, Human
uguguugugugugggagugugua

SEQ ID NO: 3238330 - RNA, 13 nt, Human
uguguugugcuuu

SEQ ID NO: 3238331 - RNA, 19 nt, Human
uguguguccccuugcagcc

SEQ ID NO: 3238332 - RNA, 17 nt, Human
uguguuuacagagaugu

SEQ ID NO: 3238333 - RNA, 17 nt, Human
uguguuuagaauugaag

SEQ ID NO: 3238334 - RNA, 18 nt, Human
uguguuuagaauugaagg

SEQ ID NO: 3238335 - RNA, 23 nt, Human
uguguaugugggggucugugugu

SEQ ID NO: 3238336 - RNA, 13 nt, Human
uguguaugugugu

SEQ ID NO: 3238337 - RNA, 14 nt, Human
uguguauguggggg

SEQ ID NO: 3238338 - RNA, 13 nt, Human
uguguaugugggg

SEQ ID NO: 3238339 - RNA, 21 nt, Human
uguguauauuugauuuauuaa

SEQ ID NO: 3238340 - RNA, 15 nt, Human
uguguauauuugauu

SEQ ID NO: 3238341 - RNA, 16 nt, Human
uguguagggcgggagg

SEQ ID NO: 3238342 - RNA, 15 nt, Human
uguguagauaguaug

SEQ ID NO: 3238343 - RNA, 16 nt, Human
uguguauaaauugucu

SEQ ID NO: 3238344 - RNA, 22 nt, Human
ugugugaagcuuaagggucaua

SEQ ID NO: 3238345 - RNA, 23 nt, Human
uguguauuucaguuauugucccu

SEQ ID NO: 3238346 - RNA, 15 nt, Human
uguguauuuucaguc

SEQ ID NO: 3238347 - RNA, 20 nt, Human
uguguauuguuguaaaaugu

SEQ ID NO: 3238348 - RNA, 13 nt, Human
uguguauuguugu

SEQ ID NO: 3238349 - RNA, 16 nt, Human
uguucacagccagacu

SEQ ID NO: 3238350 - RNA, 18 nt, Human
uguucaauuauuuccccc

SEQ ID NO: 3238351 - RNA, 14 nt, Human
uguucagcuccagc

SEQ ID NO: 3238352 - RNA, 11 nt, Human
uguucagcugg

SEQ ID NO: 3238353 - RNA, 22 nt, Human
uguucagcuccagcucaccagc

SEQ ID NO: 3238354 - RNA, 16 nt, Human
uguucagcuccagcuc

SEQ ID NO: 3238355 - RNA, 15 nt, Human
uguucagcuccagcu

SEQ ID NO: 3238356 - RNA, 14 nt, Human
uguuaguuuuccuu

SEQ ID NO: 3238357 - RNA, 21 nt, Human
uguucaaaggagcaagaacuu

SEQ ID NO: 3238358 - RNA, 22 nt, Human
uguucaaaggagcaagaacuuu

SEQ ID NO: 3238359 - RNA, 20 nt, Human
uguuagauuaagaaauagac

SEQ ID NO: 3238360 - RNA, 17 nt, Human
uguuagauuaagaaaua

SEQ ID NO: 3238361 - RNA, 12 nt, Human
uguuagauguuu

SEQ ID NO: 3238362 - RNA, 17 nt, Human
uguuagauguuuguuga

SEQ ID NO: 3238363 - RNA, 19 nt, Human
uguuagaauguaagguaua

SEQ ID NO: 3238364 - RNA, 13 nt, Human
uguuagaauguaa

SEQ ID NO: 3238365 - RNA, 16 nt, Human
uguuaccauuggaaau

SEQ ID NO: 3238366 - RNA, 19 nt, Human
uguuacauaagauaaaugu

SEQ ID NO: 3238367 - RNA, 15 nt, Human
uguuacauguaucaa

SEQ ID NO: 3238368 - RNA, 12 nt, Human
uguuacauguau

SEQ ID NO: 3238369 - RNA, 15 nt, Human
uguuacugucuucag

SEQ ID NO: 3238370 - RNA, 16 nt, Human
uguuacugucuucagu

SEQ ID NO: 3238371 - RNA, 17 nt, Human
uguuaccauuggaaauu

SEQ ID NO: 3238372 - RNA, 23 nt, Human
uguguuuauucuugaugaaaagc

SEQ ID NO: 3238373 - RNA, 22 nt, Human
uguguuuauucuugaugaaaag

SEQ ID NO: 3238374 - RNA, 16 nt, Human
uguguuugcuccccuu

SEQ ID NO: 3238375 - RNA, 19 nt, Human
uuuagaagaagugugucac

SEQ ID NO: 3238376 - RNA, 14 nt, Human
uuuagaacagguuu

SEQ ID NO: 3238377 - RNA, 15 nt, Human
uuuagaacagguuuu

SEQ ID NO: 3238378 - RNA, 17 nt, Human
uuuagaagaaguguguc

SEQ ID NO: 3238379 - RNA, 22 nt, Human
uuuagaaaagggaguuuaaaaa

SEQ ID NO: 3238380 - RNA, 12 nt, Human
uuuagacuugaa

SEQ ID NO: 3238381 - RNA, 13 nt, Human
uuuagacuugaaa

SEQ ID NO: 3238382 - RNA, 14 nt, Human
uuuagacuugaaaa

SEQ ID NO: 3238383 - RNA, 15 nt, Human
uuuagacuugaaaag

SEQ ID NO: 3238384 - RNA, 19 nt, Human
uuuagacuugaaaagagac

SEQ ID NO: 3238385 - RNA, 20 nt, Human
uuuagacuugaaaagagaca

SEQ ID NO: 3238386 - RNA, 21 nt, Human
uuuagacuugaaaagagacag

SEQ ID NO: 3238387 - RNA, 22 nt, Human
uuuagacuugaaaagagacagg

SEQ ID NO: 3238388 - RNA, 23 nt, Human
uuuagacuugaaaagagacaggc

SEQ ID NO: 3238389 - RNA, 15 nt, Human
uuuacuuuguguuca

SEQ ID NO: 3238390 - RNA, 23 nt, Human
uuuacuuuuuuuaguaaguuaau

SEQ ID NO: 3238391 - RNA, 21 nt, Human
uuuacuuuuuuuuuauuuuau

SEQ ID NO: 3238392 - RNA, 22 nt, Human
uuuacuuuuuuuuuauuuuauu

SEQ ID NO: 3238393 - RNA, 13 nt, Human
uuuacaauguauu

SEQ ID NO: 3238394 - RNA, 14 nt, Human
uuuacaauguauua

SEQ ID NO: 3238395 - RNA, 15 nt, Human
uuuacaauguauuaa

SEQ ID NO: 3238396 - RNA, 18 nt, Human
uuuaaucuacugcauuua

SEQ ID NO: 3238397 - RNA, 20 nt, Human
uuuacaagacaacauuguaa

SEQ ID NO: 3238398 - RNA, 16 nt, Human
uuuaaucuacugcauu

SEQ ID NO: 3238399 - RNA, 17 nt, Human
uuuaaucuacugcauuu

SEQ ID NO: 3238400 - RNA, 13 nt, Human
uuuaaucuacugc

SEQ ID NO: 3238401 - RNA, 15 nt, Human
uuuaaucaugaauau

SEQ ID NO: 3238402 - RNA, 20 nt, Human
uuuaaucaugaauaugauga

SEQ ID NO: 3238403 - RNA, 18 nt, Human
uuguauuguuagauguuu

SEQ ID NO: 3238404 - RNA, 20 nt, Human
uuguauuguuagauguuugu

SEQ ID NO: 3238405 - RNA, 16 nt, Human
uuguauuguccuauua

SEQ ID NO: 3238406 - RNA, 18 nt, Human
uuguauucaauuaaagaa

SEQ ID NO: 3238407 - RNA, 13 nt, Human
uuguauucaauua

SEQ ID NO: 3238408 - RNA, 14 nt, Human
uuguauucugucuu

SEQ ID NO: 3238409 - RNA, 21 nt, Human
uuguauucaauuaaagaaaua

SEQ ID NO: 3238410 - RNA, 15 nt, Human
uuguauuuauuuagu

SEQ ID NO: 3238411 - RNA, 9 nt, Human
uuguauuuu

SEQ ID NO: 3238412 - RNA, 14 nt, Human
uuguauuuauucuu

SEQ ID NO: 3238413 - RNA, 14 nt, Human
uuuaugcagugcug

SEQ ID NO: 3238414 - RNA, 16 nt, Human
uuuaugcagugcugcu

SEQ ID NO: 3238415 - RNA, 17 nt, Human
uuuaugcagugcugcuu

SEQ ID NO: 3238416 - RNA, 19 nt, Human
uuuaugcagugcugcuuug

SEQ ID NO: 3238417 - RNA, 18 nt, Human
uuuaugcaaggucuugca

SEQ ID NO: 3238418 - RNA, 23 nt, Human
uuuauuauuuauuuuuuuuaauu

SEQ ID NO: 3238419 - RNA, 14 nt, Human
uuuauucaaacuga

SEQ ID NO: 3238420 - RNA, 13 nt, Human
uuuauuccagagc

SEQ ID NO: 3238421 - RNA, 23 nt, Human
uuuauugcaucuggguagcugua

SEQ ID NO: 3238422 - RNA, 24 nt, Human
uuuauugcaucuggguagcuguaa

SEQ ID NO: 3238423 - RNA, 22 nt, Human
uuuauugccaaaacccagcugc

SEQ ID NO: 3238424 - RNA, 14 nt, Human
uuuauugucaaagu

SEQ ID NO: 3238425 - RNA, 16 nt, Human
uuuauugucaaagugg

SEQ ID NO: 3238426 - RNA, 19 nt, Human
uuuauuuaguuccuugagu

SEQ ID NO: 3238427 - RNA, 12 nt, Human
uuuauugucugu

SEQ ID NO: 3238428 - RNA, 14 nt, Human
uuuauugucuguaa

SEQ ID NO: 3238429 - RNA, 15 nt, Human
uuuauuuauauguau

SEQ ID NO: 3238430 - RNA, 15 nt, Human
uuuauuuauauuuau

SEQ ID NO: 3238431 - RNA, 17 nt, Human
uuuauuuauauuuauug

SEQ ID NO: 3238432 - RNA, 15 nt, Human
uuuaugaagaaaaua

SEQ ID NO: 3238433 - RNA, 18 nt, Human
uuuaugaagaaaauacuu

SEQ ID NO: 3238434 - RNA, 16 nt, Human
uuuaugaagaaaauac

SEQ ID NO: 3238435 - RNA, 12 nt, Human
uuuaugaagaaa

SEQ ID NO: 3238436 - RNA, 13 nt, Human
uuuaugaagaaaa

SEQ ID NO: 3238437 - RNA, 20 nt, Human
uuuaucuagauguaaauuuu

SEQ ID NO: 3238438 - RNA, 17 nt, Human
uuuaucuagauguaaau

SEQ ID NO: 3238439 - RNA, 16 nt, Human
uuuaucuagauguaaa

SEQ ID NO: 3238440 - RNA, 15 nt, Human
uuuaucuagauguaa

SEQ ID NO: 3238441 - RNA, 12 nt, Human
uuuaucuauaua

SEQ ID NO: 3238442 - RNA, 15 nt, Human
uuuaucuauauaaaa

SEQ ID NO: 3238443 - RNA, 20 nt, Human
uuuaucuauauaaaauaacu

SEQ ID NO: 3238444 - RNA, 12 nt, Human
uuuaucuuugau

SEQ ID NO: 3238445 - RNA, 16 nt, Human
uuuaucuuugauaaca

SEQ ID NO: 3238446 - RNA, 21 nt, Human
uuuaucuaccaacuuucaaga

SEQ ID NO: 3238447 - RNA, 14 nt, Human
uuucuaaagcugcc

SEQ ID NO: 3238448 - RNA, 17 nt, Human
uuucuaaagcugccagc

SEQ ID NO: 3238449 - RNA, 21 nt, Human
uuuccucuuuggucuacacug

SEQ ID NO: 3238450 - RNA, 23 nt, Human
uuuccugacagaaggacucaggu

SEQ ID NO: 3238451 - RNA, 12 nt, Human
uuuccucuugaa

SEQ ID NO: 3238452 - RNA, 22 nt, Human
uuuccucuuagucgagccaagu

SEQ ID NO: 3238453 - RNA, 14 nt, Human
uuuccuauaccauu

SEQ ID NO: 3238454 - RNA, 16 nt, Human
uuuccuauaugaugau

SEQ ID NO: 3238455 - RNA, 17 nt, Human
uuuccuaucauguuaac

SEQ ID NO: 3238456 - RNA, 16 nt, Human
uuuccuauaccauuuc

SEQ ID NO: 3238457 - RNA, 21 nt, Human
uuuccuacuugcacucuucua

SEQ ID NO: 3238458 - RNA, 22 nt, Human
uuucugagaaagacuauucaaa

SEQ ID NO: 3238459 - RNA, 14 nt, Human
uuucucuuugaaac

SEQ ID NO: 3238460 - RNA, 13 nt, Human
uuucucuuugaaa

SEQ ID NO: 3238461 - RNA, 15 nt, Human
uuucugagaaagacu

SEQ ID NO: 3238462 - RNA, 12 nt, Human
uuucucuuugaa

SEQ ID NO: 3238463 - RNA, 12 nt, Human
uuucucuuagaa

SEQ ID NO: 3238464 - RNA, 13 nt, Human
uuucucuucuccc

SEQ ID NO: 3238465 - RNA, 12 nt, Human
uuucucuucaua

SEQ ID NO: 3238466 - RNA, 13 nt, Human
uuucucuuagaaa

SEQ ID NO: 3238467 - RNA, 20 nt, Human
uuucucuucuccccuuccau

SEQ ID NO: 3238468 - RNA, 19 nt, Human
uuucucuucuccccuucca

SEQ ID NO: 3238469 - RNA, 16 nt, Human
uuucucuucuccccuu

SEQ ID NO: 3238470 - RNA, 15 nt, Human
uuucuagccagagga

SEQ ID NO: 3238471 - RNA, 20 nt, Human
uuucuaagguaacaagauga

SEQ ID NO: 3238472 - RNA, 17 nt, Human
uuucuagaguuccuacc

SEQ ID NO: 3238473 - RNA, 19 nt, Human
uuucuagcauauauguguc

SEQ ID NO: 3238474 - RNA, 18 nt, Human
uuucuagcuuuuuaauua

SEQ ID NO: 3238475 - RNA, 17 nt, Human
uuucuccguaugcacau

SEQ ID NO: 3238476 - RNA, 18 nt, Human
uuucauugcugugacagu

SEQ ID NO: 3238477 - RNA, 15 nt, Human
uuucauugcugugac

SEQ ID NO: 3238478 - RNA, 13 nt, Human
uuuccaggaaggc

SEQ ID NO: 3238479 - RNA, 19 nt, Human
uuuccagagcauuccaguc

SEQ ID NO: 3238480 - RNA, 13 nt, Human
uuuccaaauuauu

SEQ ID NO: 3238481 - RNA, 14 nt, Human
uuuccaaauuauuu

SEQ ID NO: 3238482 - RNA, 22 nt, Human
uuuccaaauuauuucuuaauua

SEQ ID NO: 3238483 - RNA, 12 nt, Human
uuuccagagcau

SEQ ID NO: 3238484 - RNA, 17 nt, Human
uuuccagagcauuccag

SEQ ID NO: 3238485 - RNA, 13 nt, Human
uuuccagagcauu

SEQ ID NO: 3238486 - RNA, 22 nt, Human
uuucauugcugggcuugucugu

SEQ ID NO: 3238487 - RNA, 22 nt, Human
uuucagguagaggugcaugccu

SEQ ID NO: 3238488 - RNA, 15 nt, Human
uuucagccaagaauu

SEQ ID NO: 3238489 - RNA, 12 nt, Human
uuucaggaaaau

SEQ ID NO: 3238490 - RNA, 14 nt, Human
uuucagcaggcagc

SEQ ID NO: 3238491 - RNA, 18 nt, Human
uuucagcaugaaaaugug

SEQ ID NO: 3238492 - RNA, 13 nt, Human
uuucagcaggcag

SEQ ID NO: 3238493 - RNA, 19 nt, Human
uuucaaucucguauagaag

SEQ ID NO: 3238494 - RNA, 13 nt, Human
uuucaaucucgua

SEQ ID NO: 3238495 - RNA, 23 nt, Human
uuucaaucucguauagaagucuu

SEQ ID NO: 3238496 - RNA, 13 nt, Human
uuuauuuuaaaac

SEQ ID NO: 3238497 - RNA, 17 nt, Human
uuucaauauuuuccuuc

SEQ ID NO: 3238498 - RNA, 20 nt, Human
uuucaauaggaaaaacugau

SEQ ID NO: 3238499 - RNA, 22 nt, Human
uuucaauaggaaaaacugauuu

SEQ ID NO: 3238500 - RNA, 19 nt, Human
uuucaauaggaaaaacuga

SEQ ID NO: 3238501 - RNA, 21 nt, Human
uuuauuucuccuuuuguguuc

SEQ ID NO: 3238502 - RNA, 13 nt, Human
uuuauuucuuuua

SEQ ID NO: 3238503 - RNA, 19 nt, Human
uuuauuucagcaaacuugu

SEQ ID NO: 3238504 - RNA, 16 nt, Human
uuuauuucagcaaacu

SEQ ID NO: 3238505 - RNA, 14 nt, Human
uuuauuucaaugua

SEQ ID NO: 3238506 - RNA, 15 nt, Human
uuuauuucaauguaa

SEQ ID NO: 3238507 - RNA, 13 nt, Human
uuuauuuccagug

SEQ ID NO: 3238508 - RNA, 20 nt, Human
uuuauuuccaauguuucaag

SEQ ID NO: 3238509 - RNA, 17 nt, Human
uuuauuucuccuuuugu

SEQ ID NO: 3238510 - RNA, 16 nt, Human
uuuauuucuccuuuug

SEQ ID NO: 3238511 - RNA, 15 nt, Human
uuuauuucuccuuuu

SEQ ID NO: 3238512 - RNA, 13 nt, Human
uuuauuucuccuu

SEQ ID NO: 3238513 - RNA, 21 nt, Human
uuugcagaggcuaugggaaga

SEQ ID NO: 3238514 - RNA, 14 nt, Human
uuugcagcucagaa

SEQ ID NO: 3238515 - RNA, 14 nt, Human
uuugcagacaggca

SEQ ID NO: 3238516 - RNA, 22 nt, Human
uuugcacuuuuucuuaaucauu

SEQ ID NO: 3238517 - RNA, 13 nt, Human
uuugcacuuuucu

SEQ ID NO: 3238518 - RNA, 16 nt, Human
uuugauauaccaaauu

SEQ ID NO: 3238519 - RNA, 21 nt, Human
uuugauauaccaaauuaaaaa

SEQ ID NO: 3238520 - RNA, 22 nt, Human
uuugauauaccaaauuaaaaaa

SEQ ID NO: 3238521 - RNA, 20 nt, Human
uuugccaugugcuucugcca

SEQ ID NO: 3238522 - RNA, 21 nt, Human
uuuggaacagugcuacugaaa

SEQ ID NO: 3238523 - RNA, 18 nt, Human
uuugccauguuggccagg

SEQ ID NO: 3238524 - RNA, 21 nt, Human
uuugcauagauucccugagca

SEQ ID NO: 3238525 - RNA, 15 nt, Human
uuugcagcuuccaau

SEQ ID NO: 3238526 - RNA, 16 nt, Human
uuugccagugggaacu

SEQ ID NO: 3238527 - RNA, 15 nt, Human
uuugccagugggaac

SEQ ID NO: 3238528 - RNA, 14 nt, Human
uuugccaugugcuu

SEQ ID NO: 3238529 - RNA, 22 nt, Human
uuugccauagaguacacugccu

SEQ ID NO: 3238530 - RNA, 18 nt, Human
uuugccaucucugcucca

SEQ ID NO: 3238531 - RNA, 15 nt, Human
uuugccaucucugcu

SEQ ID NO: 3238532 - RNA, 16 nt, Human
uuugagguggaagagg

SEQ ID NO: 3238533 - RNA, 19 nt, Human
uuugagucaaagacuuaaa

SEQ ID NO: 3238534 - RNA, 23 nt, Human
uuugagguuggaaaauaucuuug

SEQ ID NO: 3238535 - RNA, 22 nt, Human
uuugagucuuuuuuuuuuaagu

SEQ ID NO: 3238536 - RNA, 12 nt, Human
uuugagucuuuu

SEQ ID NO: 3238537 - RNA, 14 nt, Human
uuugagcucagccc

SEQ ID NO: 3238538 - RNA, 18 nt, Human
uuugagcuacuggauucu

SEQ ID NO: 3238539 - RNA, 20 nt, Human
uuugagcuacuggauucuua

SEQ ID NO: 3238540 - RNA, 10 nt, Human
uuugagcucc

SEQ ID NO: 3238541 - RNA, 19 nt, Human
uuugagcucccacuucugc

SEQ ID NO: 3238542 - RNA, 17 nt, Human
uuugaggaaauuugcag

SEQ ID NO: 3238543 - RNA, 13 nt, Human
uuucuuagacuuu

SEQ ID NO: 3238544 - RNA, 15 nt, Human
uuugagcagggcuca

SEQ ID NO: 3238545 - RNA, 15 nt, Human
uuugagcccuuguuu

SEQ ID NO: 3238546 - RNA, 13 nt, Human
uuucuuaauauau

SEQ ID NO: 3238547 - RNA, 20 nt, Human
uuucuuaauauauagcauuu

SEQ ID NO: 3238548 - RNA, 16 nt, Human
uuucuuaauauauagc

SEQ ID NO: 3238549 - RNA, 15 nt, Human
uuucuuaaucauuuu

SEQ ID NO: 3238550 - RNA, 22 nt, Human
uuucuuaauauauagcauuuau

SEQ ID NO: 3238551 - RNA, 21 nt, Human
uuucuuaaucauuuuuuauau

SEQ ID NO: 3238552 - RNA, 21 nt, Human
uuucuuaauuauuauaaaaau

SEQ ID NO: 3238553 - RNA, 23 nt, Human
uuucuuaauuauuauaaaaauau

SEQ ID NO: 3238554 - RNA, 14 nt, Human
uuucuuaauuugga

SEQ ID NO: 3238555 - RNA, 15 nt, Human
uuucuuaauuuggaa

SEQ ID NO: 3238556 - RNA, 17 nt, Human
uuucuuaauuuggaaac

SEQ ID NO: 3238557 - RNA, 18 nt, Human
uuucuuaauuuggaaacu

SEQ ID NO: 3238558 - RNA, 17 nt, Human
uuuguuaauaaagugca

SEQ ID NO: 3238559 - RNA, 16 nt, Human
uuuguuaauaucacuc

SEQ ID NO: 3238560 - RNA, 23 nt, Human
uuuguucauuucauccuuucacu

SEQ ID NO: 3238561 - RNA, 23 nt, Human
uuuguugugugccucuagcugaa

SEQ ID NO: 3238562 - RNA, 21 nt, Human
uuuguugugugccucuagcug

SEQ ID NO: 3238563 - RNA, 13 nt, Human
uuuguugugugcc

SEQ ID NO: 3238564 - RNA, 16 nt, Human
uuuguugucagcugaa

SEQ ID NO: 3238565 - RNA, 18 nt, Human
uuuguuccagaaucugua

SEQ ID NO: 3238566 - RNA, 18 nt, Human
uuuguccuccugcugcca

SEQ ID NO: 3238567 - RNA, 13 nt, Human
uuuguguuccaaa

SEQ ID NO: 3238568 - RNA, 21 nt, Human
uuugucauuuucauuagcaaa

SEQ ID NO: 3238569 - RNA, 22 nt, Human
uuuguguuuauucuugaugaaa

SEQ ID NO: 3238570 - RNA, 16 nt, Human
uuuguguuuauucuug

SEQ ID NO: 3238571 - RNA, 15 nt, Human
uuuguguuuauucuu

SEQ ID NO: 3238572 - RNA, 12 nt, Human
uuuguguuuauu

SEQ ID NO: 3238573 - RNA, 13 nt, Human
uuuguccccaccg

SEQ ID NO: 3238574 - RNA, 21 nt, Human
uuuguccccaccgcagacagg

SEQ ID NO: 3238575 - RNA, 18 nt, Human
uuugucauuuucauuagc

SEQ ID NO: 3238576 - RNA, 16 nt, Human
uuugucauuuucauua

SEQ ID NO: 3238577 - RNA, 15 nt, Human
uuugucauuuucauu

SEQ ID NO: 3238578 - RNA, 14 nt, Human
uuugucauuuucau

SEQ ID NO: 3238579 - RNA, 14 nt, Human
uuuguauacaagua

SEQ ID NO: 3238580 - RNA, 21 nt, Human
uuugguuauagugcaauauau

SEQ ID NO: 3238581 - RNA, 15 nt, Human
uuugucacugcuuca

SEQ ID NO: 3238582 - RNA, 23 nt, Human
uuugucaguguagaucaacucau

SEQ ID NO: 3238583 - RNA, 13 nt, Human
uuugguuauagug

SEQ ID NO: 3238584 - RNA, 18 nt, Human
uuugguuauagugcaaua

SEQ ID NO: 3238585 - RNA, 16 nt, Human
uuugguuauagugcaa

SEQ ID NO: 3238586 - RNA, 20 nt, Human
uuugguuaugaauacuuugc

SEQ ID NO: 3238587 - RNA, 15 nt, Human
uuuggaauauuaaaa

SEQ ID NO: 3238588 - RNA, 16 nt, Human
uuuggugucuuucucu

SEQ ID NO: 3238589 - RNA, 12 nt, Human
uuuuaaaaugua

SEQ ID NO: 3238590 - RNA, 15 nt, Human
uuuuaaaauguacau

SEQ ID NO: 3238591 - RNA, 14 nt, Human
uuuuaaaauguaca

SEQ ID NO: 3238592 - RNA, 13 nt, Human
uuuuaaaauuuua

SEQ ID NO: 3238593 - RNA, 23 nt, Human
uuuuaaaauuguacaugaacaug

SEQ ID NO: 3238594 - RNA, 21 nt, Human
uuuuaaaauguacauguauua

SEQ ID NO: 3238595 - RNA, 15 nt, Human
uuuuaaaauuucaua

SEQ ID NO: 3238596 - RNA, 22 nt, Human
uuuuaaaaucuuauuaaaguuu

SEQ ID NO: 3238597 - RNA, 15 nt, Human
uuuuaaaaucuuauu

SEQ ID NO: 3238598 - RNA, 14 nt, Human
uuuuaaaaucuuau

SEQ ID NO: 3238599 - RNA, 13 nt, Human
uuuuaaaaucuua

SEQ ID NO: 3238600 - RNA, 22 nt, Human
uuuguuguuucuuaauuuggaa

SEQ ID NO: 3238601 - RNA, 19 nt, Human
uuuuaauuucaagcuuauu

SEQ ID NO: 3238602 - RNA, 16 nt, Human
uuuuaauuuugucugc

SEQ ID NO: 3238603 - RNA, 13 nt, Human
uuuuaauuuuguc

SEQ ID NO: 3238604 - RNA, 16 nt, Human
uuuuacagcugccugc

SEQ ID NO: 3238605 - RNA, 23 nt, Human
uuuuaccaucacacauguucaga

SEQ ID NO: 3238606 - RNA, 22 nt, Human
uuuuacuccagguuauugcaau

SEQ ID NO: 3238607 - RNA, 23 nt, Human
uuuuacuccagguuauugcaaua

SEQ ID NO: 3238608 - RNA, 14 nt, Human
uuuuaucaggauuu

SEQ ID NO: 3238609 - RNA, 20 nt, Human
uuuuauaucaauuuaaaaaa

SEQ ID NO: 3238610 - RNA, 16 nt, Human
uuuuauauauaugcau

SEQ ID NO: 3238611 - RNA, 20 nt, Human
uuuucacugcuggcugccuu

SEQ ID NO: 3238612 - RNA, 19 nt, Human
uuuucacugcuggcugccu

SEQ ID NO: 3238613 - RNA, 15 nt, Human
uuuucacaguucucu

SEQ ID NO: 3238614 - RNA, 24 nt, Human
uuuucaaucucguauagaagucuu

SEQ ID NO: 3238615 - RNA, 20 nt, Human
uuuucaaucucguauagaag

SEQ ID NO: 3238616 - RNA, 16 nt, Human
uuuucaauauauuugu

SEQ ID NO: 3238617 - RNA, 13 nt, Human
uuuucaaugugau

SEQ ID NO: 3238618 - RNA, 13 nt, Human
uuuuaugaugacg

SEQ ID NO: 3238619 - RNA, 20 nt, Human
uuuuaugaugacguacaagu

SEQ ID NO: 3238620 - RNA, 22 nt, Human
uuuucaacgcagcccugcuuug

SEQ ID NO: 3238621 - RNA, 21 nt, Human
uuuucaacgcagcccugcuuu

SEQ ID NO: 3238622 - RNA, 19 nt, Human
uuuucaaccucuagaauuu

SEQ ID NO: 3238623 - RNA, 17 nt, Human
uuuucaaccucuagaau

SEQ ID NO: 3238624 - RNA, 17 nt, Human
uuuucaacgcagcccug

SEQ ID NO: 3238625 - RNA, 20 nt, Human
uuuucaaguauuuaagccua

SEQ ID NO: 3238626 - RNA, 17 nt, Human
uuuucaaguauuuaagc

SEQ ID NO: 3238627 - RNA, 16 nt, Human
uuuucaaguauuuaag

SEQ ID NO: 3238628 - RNA, 12 nt, Human
uuuucaaguauu

SEQ ID NO: 3238629 - RNA, 16 nt, Human
uuuucaagaaguucuu

SEQ ID NO: 3238630 - RNA, 14 nt, Human
uuuuccauuuuaua

SEQ ID NO: 3238631 - RNA, 13 nt, Human
uuuuccauuuuau

SEQ ID NO: 3238632 - RNA, 18 nt, Human
uuuuccaugaguccccug

SEQ ID NO: 3238633 - RNA, 19 nt, Human
uuuuccaugaguccccugu

SEQ ID NO: 3238634 - RNA, 17 nt, Human
uuuuccuaucauguuaa

SEQ ID NO: 3238635 - RNA, 15 nt, Human
uuuuccauuuuauaa

SEQ ID NO: 3238636 - RNA, 17 nt, Human
uuuuccuucagauauuu

SEQ ID NO: 3238637 - RNA, 18 nt, Human
uuuuccucgcuucuuuca

SEQ ID NO: 3238638 - RNA, 17 nt, Human
uuuuccucgcuucuuuc

SEQ ID NO: 3238639 - RNA, 13 nt, Human
uuuucuaaaagcu

SEQ ID NO: 3238640 - RNA, 14 nt, Human
uuuucuaaaagcuu

SEQ ID NO: 3238641 - RNA, 14 nt, Human
uuuucuucucccuc

SEQ ID NO: 3238642 - RNA, 17 nt, Human
uuuucuugcaugaggcu

SEQ ID NO: 3238643 - RNA, 19 nt, Human
uuuucuugauaauuuuccu

SEQ ID NO: 3238644 - RNA, 16 nt, Human
uuuucuugauaauuuu

SEQ ID NO: 3238645 - RNA, 12 nt, Human
uuuucuugauaa

SEQ ID NO: 3238646 - RNA, 15 nt, Human
uuuuccuucagugcc

SEQ ID NO: 3238647 - RNA, 21 nt, Human
uuuuccucgcuucuuucaagg

SEQ ID NO: 3238648 - RNA, 17 nt, Human
uuuuccucuuagaagaa

SEQ ID NO: 3238649 - RNA, 14 nt, Human
uuuuccuugcauac

SEQ ID NO: 3238650 - RNA, 13 nt, Human
uuuuccuugcaua

SEQ ID NO: 3238651 - RNA, 13 nt, Human
uuuuucuuaauca

SEQ ID NO: 3238652 - RNA, 18 nt, Human
uuuuuuaggguuucugau

SEQ ID NO: 3238653 - RNA, 23 nt, Human
uuuuuuaguaaguuaauguauau

SEQ ID NO: 3238654 - RNA, 21 nt, Human
uuuuucuuaauauauagcauu

SEQ ID NO: 3238655 - RNA, 15 nt, Human
uuuuucuuaaaaagu

SEQ ID NO: 3238656 - RNA, 17 nt, Human
uuuuuuccuucagugcc

SEQ ID NO: 3238657 - RNA, 15 nt, Human
uuuuuucuaccuaua

SEQ ID NO: 3238658 - RNA, 22 nt, Human
uuuugaaaaaugcacugggaaa

SEQ ID NO: 3238659 - RNA, 22 nt, Human
uuuugaaaucaguaaacacugu

SEQ ID NO: 3238660 - RNA, 11 nt, Human
uuuugaaaagu

SEQ ID NO: 3238661 - RNA, 20 nt, Human
uuuugaaaaguaauauuuau

SEQ ID NO: 3238662 - RNA, 15 nt, Human
uuuugaaacugcauu

SEQ ID NO: 3238663 - RNA, 11 nt, Human
uuuuucuguau

SEQ ID NO: 3238664 - RNA, 11 nt, Human
uuuuucugugg

SEQ ID NO: 3238665 - RNA, 13 nt, Human
uuuuucugcuuua

SEQ ID NO: 3238666 - RNA, 20 nt, Human
uuuuucugcuuuagacuuga

SEQ ID NO: 3238667 - RNA, 20 nt, Human
uuuugaaaugcugaaaauug

SEQ ID NO: 3238668 - RNA, 18 nt, Human
uuuugaaaugcugaaaau

SEQ ID NO: 3238669 - RNA, 16 nt, Human
uuuugaaaugcugaaa

SEQ ID NO: 3238670 - RNA, 13 nt, Human
uuuugaaaugcug

SEQ ID NO: 3238671 - RNA, 13 nt, Human
uuccuuccucuga

SEQ ID NO: 3238672 - RNA, 17 nt, Human
uuccuuccucugagccu

SEQ ID NO: 3238673 - RNA, 15 nt, Human
uuccuucagugccuu

SEQ ID NO: 3238674 - RNA, 19 nt, Human
uuccuucauucaacccacc

SEQ ID NO: 3238675 - RNA, 23 nt, Human
uuccuucagugccuuauggaaca

SEQ ID NO: 3238676 - RNA, 16 nt, Human
uuccuucagugccuua

SEQ ID NO: 3238677 - RNA, 19 nt, Human
uuccuucagugccuuaugg

SEQ ID NO: 3238678 - RNA, 13 nt, Human
uuccugcccuggg

SEQ ID NO: 3238679 - RNA, 16 nt, Human
uuccugcccugggagg

SEQ ID NO: 3238680 - RNA, 22 nt, Human
uuccugcccugggaggcaguga

SEQ ID NO: 3238681 - RNA, 19 nt, Human
uuccugcccugcuguuuau

SEQ ID NO: 3238682 - RNA, 11 nt, Human
uuccugcccug

SEQ ID NO: 3238683 - RNA, 18 nt, Human
uucggccuccauccugag

SEQ ID NO: 3238684 - RNA, 19 nt, Human
uucggccuccauccugagg

SEQ ID NO: 3238685 - RNA, 12 nt, Human
uuccuuucuuga

SEQ ID NO: 3238686 - RNA, 15 nt, Human
uucggccuccauccu

SEQ ID NO: 3238687 - RNA, 13 nt, Human
uucuaaagacagg

SEQ ID NO: 3238688 - RNA, 12 nt, Human
uucuaaagauag

SEQ ID NO: 3238689 - RNA, 19 nt, Human
uucuaaacuaggcuccuuc

SEQ ID NO: 3238690 - RNA, 20 nt, Human
uucuaaacuaggcuccuuca

SEQ ID NO: 3238691 - RNA, 23 nt, Human
uucuaauaagcuaguugaauacu

SEQ ID NO: 3238692 - RNA, 17 nt, Human
uucuaauaagcuaguug

SEQ ID NO: 3238693 - RNA, 19 nt, Human
uucuaauaagcuaguugaa

SEQ ID NO: 3238694 - RNA, 20 nt, Human
uucuaauaagcuaguugaau

SEQ ID NO: 3238695 - RNA, 14 nt, Human
uuccuagccaccgc

SEQ ID NO: 3238696 - RNA, 21 nt, Human
uuccuagccaccgccuccuac

SEQ ID NO: 3238697 - RNA, 15 nt, Human
uuccuagccaccgcc

SEQ ID NO: 3238698 - RNA, 19 nt, Human
uucccuuugacgccauccc

SEQ ID NO: 3238699 - RNA, 14 nt, Human
uuccuagagaacug

SEQ ID NO: 3238700 - RNA, 20 nt, Human
uucccuuccaguuuauucca

SEQ ID NO: 3238701 - RNA, 15 nt, Human
uucccuuuagcugug

SEQ ID NO: 3238702 - RNA, 22 nt, Human
uuccccacuugagaauuacccu

SEQ ID NO: 3238703 - RNA, 22 nt, Human
uuccccacccuccccuucccag

SEQ ID NO: 3238704 - RNA, 21 nt, Human
uuccccacccuccccuuccca

SEQ ID NO: 3238705 - RNA, 18 nt, Human
uucccugguaagaaaaag

SEQ ID NO: 3238706 - RNA, 17 nt, Human
uucccugguaagaaaaa

SEQ ID NO: 3238707 - RNA, 16 nt, Human
uucccugguaagaaaa

SEQ ID NO: 3238708 - RNA, 23 nt, Human
uucccuggguuagacugccagcu

SEQ ID NO: 3238709 - RNA, 21 nt, Human
uucccuggguuagacugccag

SEQ ID NO: 3238710 - RNA, 13 nt, Human
uucccuggguuag

SEQ ID NO: 3238711 - RNA, 22 nt, Human
uucccugguaagaaaaagcaaa

SEQ ID NO: 3238712 - RNA, 22 nt, Human
uuccuagccaccgccuccuaca

SEQ ID NO: 3238713 - RNA, 12 nt, Human
uuccuagugaaa

SEQ ID NO: 3238714 - RNA, 18 nt, Human
uuccuaggggaaugaggg

SEQ ID NO: 3238715 - RNA, 18 nt, Human
uuccuaguucaucccuuc

SEQ ID NO: 3238716 - RNA, 22 nt, Human
uuccuagcuggagaggagcccu

SEQ ID NO: 3238717 - RNA, 23 nt, Human
uuccucauaguaugguggcuggg

SEQ ID NO: 3238718 - RNA, 22 nt, Human
uuccuaguucaucccuucucuu

SEQ ID NO: 3238719 - RNA, 21 nt, Human
uuccuaguucaucccuucucu

SEQ ID NO: 3238720 - RNA, 15 nt, Human
uuccuauaacacugu

SEQ ID NO: 3238721 - RNA, 22 nt, Human
uuccucccucccucuuucccuc

SEQ ID NO: 3238722 - RNA, 12 nt, Human
uuccuccugaca

SEQ ID NO: 3238723 - RNA, 20 nt, Human
uuccuccugacaccccacuu

SEQ ID NO: 3238724 - RNA, 19 nt, Human
uuccuccugacaccccacu

SEQ ID NO: 3238725 - RNA, 21 nt, Human
uuccucccucccucuuucccu

SEQ ID NO: 3238726 - RNA, 19 nt, Human
uuccucccucccucuuucc

SEQ ID NO: 3238727 - RNA, 12 nt, Human
uuccucccuccc

SEQ ID NO: 3238728 - RNA, 16 nt, Human
uucucuccagccccug

SEQ ID NO: 3238729 - RNA, 18 nt, Human
uucucuccagccccugga

SEQ ID NO: 3238730 - RNA, 12 nt, Human
uucucuccauuu

SEQ ID NO: 3238731 - RNA, 20 nt, Human
uucucucuacugguccucuu

SEQ ID NO: 3238732 - RNA, 21 nt, Human
uucucucucucucaaaauuau

SEQ ID NO: 3238733 - RNA, 16 nt, Human
uucuccaagcaggaca

SEQ ID NO: 3238734 - RNA, 13 nt, Human
uucuccacccugc

SEQ ID NO: 3238735 - RNA, 11 nt, Human
uucuccaggcu

SEQ ID NO: 3238736 - RNA, 16 nt, Human
uucugacccaugcugc

SEQ ID NO: 3238737 - RNA, 18 nt, Human
uucucuguacauauuagc

SEQ ID NO: 3238738 - RNA, 12 nt, Human
uucucuguacau

SEQ ID NO: 3238739 - RNA, 11 nt, Human
uucucuguaca

SEQ ID NO: 3238740 - RNA, 22 nt, Human
uucucugguacaauuucuuuug

SEQ ID NO: 3238741 - RNA, 18 nt, Human
uucugacccaugcugccc

SEQ ID NO: 3238742 - RNA, 20 nt, Human
uucugacccaugcugcccug

SEQ ID NO: 3238743 - RNA, 21 nt, Human
uucugacccaugcugcccugu

SEQ ID NO: 3238744 - RNA, 21 nt, Human
uucugacccugcuucaaauau

SEQ ID NO: 3238745 - RNA, 20 nt, Human
uucucugaggacacuaacca

SEQ ID NO: 3238746 - RNA, 12 nt, Human
uucucucugcuc

SEQ ID NO: 3238747 - RNA, 17 nt, Human
uucucugcccuccaaga

SEQ ID NO: 3238748 - RNA, 20 nt, Human
uucucugcccagcuuuucau

SEQ ID NO: 3238749 - RNA, 18 nt, Human
uucucugcccagcuuuuc

SEQ ID NO: 3238750 - RNA, 15 nt, Human
uucucugcccagcuu

SEQ ID NO: 3238751 - RNA, 14 nt, Human
uucuauuguuucuu

SEQ ID NO: 3238752 - RNA, 13 nt, Human
uucuauuuauaau

SEQ ID NO: 3238753 - RNA, 13 nt, Human
uucuauuuuacaa

SEQ ID NO: 3238754 - RNA, 22 nt, Human
uucuauuuucucugauacuuuu

SEQ ID NO: 3238755 - RNA, 16 nt, Human
uucuauuuucucugau

SEQ ID NO: 3238756 - RNA, 23 nt, Human
uucucaucuugacagagccugcc

SEQ ID NO: 3238757 - RNA, 11 nt, Human
uucucaugccu

SEQ ID NO: 3238758 - RNA, 12 nt, Human
uucucaugccuc

SEQ ID NO: 3238759 - RNA, 14 nt, Human
uucucaugccucag

SEQ ID NO: 3238760 - RNA, 23 nt, Human
uucaaagcauggacauuuagaag

SEQ ID NO: 3238761 - RNA, 19 nt, Human
uucaaagcaccaaaauaag

SEQ ID NO: 3238762 - RNA, 23 nt, Human
uucaaagcaccaaaauaagaaaa

SEQ ID NO: 3238763 - RNA, 21 nt, Human
uucaaagcaccaaaauaagaa

SEQ ID NO: 3238764 - RNA, 13 nt, Human
uuauuuugaugua

SEQ ID NO: 3238765 - RNA, 15 nt, Human
uucaaagcaaauguc

SEQ ID NO: 3238766 - RNA, 14 nt, Human
uuauuuucuaaagu

SEQ ID NO: 3238767 - RNA, 16 nt, Human
uuauuuugauguaaag

SEQ ID NO: 3238768 - RNA, 15 nt, Human
uucaaagagaaaaca

SEQ ID NO: 3238769 - RNA, 23 nt, Human
uucaaagagaaaacaucucauca

SEQ ID NO: 3238770 - RNA, 14 nt, Human
uuauuuucagcaug

SEQ ID NO: 3238771 - RNA, 12 nt, Human
uuauuuucuaaa

SEQ ID NO: 3238772 - RNA, 13 nt, Human
uuacgugaguccu

SEQ ID NO: 3238773 - RNA, 14 nt, Human
uuacgugaguccug

SEQ ID NO: 3238774 - RNA, 18 nt, Human
uucaauucucauuuguca

SEQ ID NO: 3238775 - RNA, 14 nt, Human
uucaauuauuuccc

SEQ ID NO: 3238776 - RNA, 17 nt, Human
uucaauuauuuccccca

SEQ ID NO: 3238777 - RNA, 16 nt, Human
uucaauuaaagaaaua

SEQ ID NO: 3238778 - RNA, 15 nt, Human
uucaauuaaagaaau

SEQ ID NO: 3238779 - RNA, 14 nt, Human
uucaauuaaagaaa

SEQ ID NO: 3238780 - RNA, 14 nt, Human
uucaauguguauaa

SEQ ID NO: 3238781 - RNA, 19 nt, Human
uucaauguguauaaauugu

SEQ ID NO: 3238782 - RNA, 21 nt, Human
uucaauguguauaaauugucu

SEQ ID NO: 3238783 - RNA, 22 nt, Human
uucaaugugauauaaacagcuu

SEQ ID NO: 3238784 - RNA, 15 nt, Human
uucaauguaauuaaa

SEQ ID NO: 3238785 - RNA, 16 nt, Human
uucaauguaauuaaac

SEQ ID NO: 3238786 - RNA, 23 nt, Human
uucaaucucguauagaagucuuc

SEQ ID NO: 3238787 - RNA, 22 nt, Human
uucaaucucguauagaagucuu

SEQ ID NO: 3238788 - RNA, 16 nt, Human
uucaaucccaggaugu

SEQ ID NO: 3238789 - RNA, 15 nt, Human
uucaaccucuagaau

SEQ ID NO: 3238790 - RNA, 23 nt, Human
uucaaccucuagaauuuuaagcc

SEQ ID NO: 3238791 - RNA, 14 nt, Human
uucaacgcagcccu

SEQ ID NO: 3238792 - RNA, 20 nt, Human
uucaacccccuuaacuguau

SEQ ID NO: 3238793 - RNA, 13 nt, Human
uucaacgcagccc

SEQ ID NO: 3238794 - RNA, 20 nt, Human
uucaaccauuccccauggga

SEQ ID NO: 3238795 - RNA, 17 nt, Human
uucaaccauuccccaug

SEQ ID NO: 3238796 - RNA, 20 nt, Human
uucaacaaggcuugcugcag

SEQ ID NO: 3238797 - RNA, 15 nt, Human
uucaaccauucccca

SEQ ID NO: 3238798 - RNA, 19 nt, Human
uucaacagcaagugugaau

SEQ ID NO: 3238799 - RNA, 20 nt, Human
uucaacagcaagugugaaua

SEQ ID NO: 3238800 - RNA, 14 nt, Human
uucacucuuggagc

SEQ ID NO: 3238801 - RNA, 19 nt, Human
uucacucuuggagccugca

SEQ ID NO: 3238802 - RNA, 18 nt, Human
uucacucuuggagccugc

SEQ ID NO: 3238803 - RNA, 14 nt, Human
uucacucuccuugg

SEQ ID NO: 3238804 - RNA, 20 nt, Human
uucaccccaucccuccuuaa

SEQ ID NO: 3238805 - RNA, 23 nt, Human
uucaccccaucccuccuuaagag

SEQ ID NO: 3238806 - RNA, 22 nt, Human
uucagcuccagcucaccagccc

SEQ ID NO: 3238807 - RNA, 22 nt, Human
uucagaggcucagauuguaaua

SEQ ID NO: 3238808 - RNA, 13 nt, Human
uucagaggcucag

SEQ ID NO: 3238809 - RNA, 12 nt, Human
uucagaggcuca

SEQ ID NO: 3238810 - RNA, 13 nt, Human
uucagacucucuc

SEQ ID NO: 3238811 - RNA, 15 nt, Human
uucagagacuccugc

SEQ ID NO: 3238812 - RNA, 17 nt, Human
uucagcugacuuuucug

SEQ ID NO: 3238813 - RNA, 16 nt, Human
uucaggaagcucaggg

SEQ ID NO: 3238814 - RNA, 17 nt, Human
uucagcucugcaagaau

SEQ ID NO: 3238815 - RNA, 24 nt, Human
uucagcucugcaagaauugaagca

SEQ ID NO: 3238816 - RNA, 23 nt, Human
uucagcuccagcucaccagcccc

SEQ ID NO: 3238817 - RNA, 15 nt, Human
uucaggaagcucagg

SEQ ID NO: 3238818 - RNA, 20 nt, Human
uucaggaagcucagggccug

SEQ ID NO: 3238819 - RNA, 17 nt, Human
uucaggaagcucagggc

SEQ ID NO: 3238820 - RNA, 19 nt, Human
uucaggaagcucagggccu

SEQ ID NO: 3238821 - RNA, 16 nt, Human
uucaggcauauuuuaa

SEQ ID NO: 3238822 - RNA, 17 nt, Human
uucaggcauuuuccccc

SEQ ID NO: 3238823 - RNA, 15 nt, Human
uucaggcucuucucc

SEQ ID NO: 3238824 - RNA, 14 nt, Human
uuccagccugccac

SEQ ID NO: 3238825 - RNA, 12 nt, Human
uuccagccugcc

SEQ ID NO: 3238826 - RNA, 16 nt, Human
uuccagccugccacuc

SEQ ID NO: 3238827 - RNA, 17 nt, Human
uuccaucuaaaaauaua

SEQ ID NO: 3238828 - RNA, 20 nt, Human
uuccagcacaaccuucaagc

SEQ ID NO: 3238829 - RNA, 23 nt, Human
uuccagcaauucuccugccucag

SEQ ID NO: 3238830 - RNA, 13 nt, Human
uuccagcaggagg

SEQ ID NO: 3238831 - RNA, 12 nt, Human
uuccagcaggag

SEQ ID NO: 3238832 - RNA, 23 nt, Human
uuccagcaggagggacagucuca

SEQ ID NO: 3238833 - RNA, 24 nt, Human
uuccagcaugagguaucuaaggau

SEQ ID NO: 3238834 - RNA, 19 nt, Human
uuccacuuauaggaauuga

SEQ ID NO: 3238835 - RNA, 21 nt, Human
uuccacuuagaaauugcauuu

SEQ ID NO: 3238836 - RNA, 17 nt, Human
uucauuuugcuuuaauu

SEQ ID NO: 3238837 - RNA, 15 nt, Human
uucauuuugcuuuaa

SEQ ID NO: 3238838 - RNA, 13 nt, Human
uuccacugagacc

SEQ ID NO: 3238839 - RNA, 19 nt, Human
uucauuuuacaguuacuuu

SEQ ID NO: 3238840 - RNA, 14 nt, Human
uucauuuugcuuua

SEQ ID NO: 3238841 - RNA, 13 nt, Human
uucauuuugcuuu

SEQ ID NO: 3238842 - RNA, 17 nt, Human
uuccaugaguccccugu

SEQ ID NO: 3238843 - RNA, 19 nt, Human
uuccaugucgccucugcau

SEQ ID NO: 3238844 - RNA, 18 nt, Human
uuccaugucgccucugca

SEQ ID NO: 3238845 - RNA, 16 nt, Human
uuccaugucgccucug

SEQ ID NO: 3238846 - RNA, 21 nt, Human
uuccaugaguuaucaugaauu

SEQ ID NO: 3238847 - RNA, 17 nt, Human
uuccaugucgccucugc

SEQ ID NO: 3238848 - RNA, 14 nt, Human
uuccaucugauucc

SEQ ID NO: 3238849 - RNA, 17 nt, Human
uuccaucugauuccagc

SEQ ID NO: 3238850 - RNA, 17 nt, Human
uuccaugaauguuccug

SEQ ID NO: 3238851 - RNA, 13 nt, Human
uuccaugacaaua

SEQ ID NO: 3238852 - RNA, 12 nt, Human
uuccaugaaugu

SEQ ID NO: 3238853 - RNA, 17 nt, Human
uuccauuuacugcauuc

SEQ ID NO: 3238854 - RNA, 21 nt, Human
uuccaugucgccucugcauuc

SEQ ID NO: 3238855 - RNA, 20 nt, Human
uuccaugucgccucugcauu

SEQ ID NO: 3238856 - RNA, 14 nt, Human
uuccccaaauacaa

SEQ ID NO: 3238857 - RNA, 14 nt, Human
uuccccaagacauu

SEQ ID NO: 3238858 - RNA, 13 nt, Human
uucauaaugacuu

SEQ ID NO: 3238859 - RNA, 23 nt, Human
uucauaaugacuuaagcacacuu

SEQ ID NO: 3238860 - RNA, 22 nt, Human
uucaguuuauuugaaccaauaa

SEQ ID NO: 3238861 - RNA, 18 nt, Human
uucaguuucuaaaauuga

SEQ ID NO: 3238862 - RNA, 19 nt, Human
uucaguuucuaaaauugag

SEQ ID NO: 3238863 - RNA, 14 nt, Human
uucauaagauauuu

SEQ ID NO: 3238864 - RNA, 19 nt, Human
uucagugccuuauggaaca

SEQ ID NO: 3238865 - RNA, 21 nt, Human
uucagugccuuauggaacacu

SEQ ID NO: 3238866 - RNA, 16 nt, Human
uucaggcucuucuccu

SEQ ID NO: 3238867 - RNA, 22 nt, Human
uucaggcuuuaggcauaugcuu

SEQ ID NO: 3238868 - RNA, 19 nt, Human
uucagggaagauaaguugg

SEQ ID NO: 3238869 - RNA, 18 nt, Human
uucagggaagauaaguug

SEQ ID NO: 3238870 - RNA, 21 nt, Human
uucagggaagauaaguuggaa

SEQ ID NO: 3238871 - RNA, 20 nt, Human
uucagggaagauaaguugga

SEQ ID NO: 3238872 - RNA, 23 nt, Human
uucagggaagauaaguuggaaac

SEQ ID NO: 3238873 - RNA, 18 nt, Human
uucagugccuuauggaac

SEQ ID NO: 3238874 - RNA, 23 nt, Human
uucaucucuagggaccagaacca

SEQ ID NO: 3238875 - RNA, 20 nt, Human
uucaucuuccaacucaaacu

SEQ ID NO: 3238876 - RNA, 11 nt, Human
uucaucuugaa

SEQ ID NO: 3238877 - RNA, 12 nt, Human
uucaucuugaau

SEQ ID NO: 3238878 - RNA, 13 nt, Human
uucaugaaaugcu

SEQ ID NO: 3238879 - RNA, 12 nt, Human
uucaugaaaugc

SEQ ID NO: 3238880 - RNA, 23 nt, Human
uucaugaaaugcuaugucauuuc

SEQ ID NO: 3238881 - RNA, 22 nt, Human
uucaugaaaugcuaugucauuu

SEQ ID NO: 3238882 - RNA, 21 nt, Human
uucaugaaaugcuaugucauu

SEQ ID NO: 3238883 - RNA, 20 nt, Human
uucaugaaaugcuaugucau

SEQ ID NO: 3238884 - RNA, 15 nt, Human
uucaugaaaugcuau

SEQ ID NO: 3238885 - RNA, 16 nt, Human
uucauuucauccuuuc

SEQ ID NO: 3238886 - RNA, 14 nt, Human
uucauuucauccuu

SEQ ID NO: 3238887 - RNA, 17 nt, Human
uucauuuguaugucaaa

SEQ ID NO: 3238888 - RNA, 18 nt, Human
uucauuuguaugucaaag

SEQ ID NO: 3238889 - RNA, 15 nt, Human
uucauuuuaaaaagu

SEQ ID NO: 3238890 - RNA, 16 nt, Human
uucauuuuaaaaaguc

SEQ ID NO: 3238891 - RNA, 18 nt, Human
uucauuuaggugaggaag

SEQ ID NO: 3238892 - RNA, 19 nt, Human
uucauuuaggugaggaagc

SEQ ID NO: 3238893 - RNA, 17 nt, Human
uuggauucugagagcug

SEQ ID NO: 3238894 - RNA, 15 nt, Human
uuggauucugagagc

SEQ ID NO: 3238895 - RNA, 20 nt, Human
uuggcaaacucuccaccaca

SEQ ID NO: 3238896 - RNA, 16 nt, Human
uuggcaaacucuccac

SEQ ID NO: 3238897 - RNA, 17 nt, Human
uuggcaaaaaggcagga

SEQ ID NO: 3238898 - RNA, 14 nt, Human
uuggaccauuuucc

SEQ ID NO: 3238899 - RNA, 15 nt, Human
uuggaaguuuuaauc

SEQ ID NO: 3238900 - RNA, 20 nt, Human
uuggaagggcuuuucaaaau

SEQ ID NO: 3238901 - RNA, 20 nt, Human
uuggaagugaaaacuuugua

SEQ ID NO: 3238902 - RNA, 11 nt, Human
uuggaaggaac

SEQ ID NO: 3238903 - RNA, 19 nt, Human
uuggaaggaacguccccug

SEQ ID NO: 3238904 - RNA, 14 nt, Human
uuggaaauauuaaa

SEQ ID NO: 3238905 - RNA, 17 nt, Human
uuggaaauauuaaaaga

SEQ ID NO: 3238906 - RNA, 12 nt, Human
uuggaaagucag

SEQ ID NO: 3238907 - RNA, 14 nt, Human
uuggaaagucagaa

SEQ ID NO: 3238908 - RNA, 23 nt, Human
uuggaaagaguaggaagacuuug

SEQ ID NO: 3238909 - RNA, 16 nt, Human
uuggaaaucaaaugua

SEQ ID NO: 3238910 - RNA, 19 nt, Human
uuggaaaucaaauguaaag

SEQ ID NO: 3238911 - RNA, 18 nt, Human
uuggaaaucaaauguaaa

SEQ ID NO: 3238912 - RNA, 21 nt, Human
uuggaaaucaaauguaaaguu

SEQ ID NO: 3238913 - RNA, 20 nt, Human
uuggaacaguaaucaguuug

SEQ ID NO: 3238914 - RNA, 19 nt, Human
uuggaacaguaaucaguuu

SEQ ID NO: 3238915 - RNA, 13 nt, Human
uuggaaauuucac

SEQ ID NO: 3238916 - RNA, 23 nt, Human
uugcugccucggauccccuuccu

SEQ ID NO: 3238917 - RNA, 22 nt, Human
uugcugccucggauccccuucc

SEQ ID NO: 3238918 - RNA, 16 nt, Human
uugcugguaaaaugaa

SEQ ID NO: 3238919 - RNA, 23 nt, Human
uugcugguaaaaugaagaauuua

SEQ ID NO: 3238920 - RNA, 15 nt, Human
uugcugguaaaauga

SEQ ID NO: 3238921 - RNA, 14 nt, Human
uugcugguacacac

SEQ ID NO: 3238922 - RNA, 12 nt, Human
uugcuuaaaugu

SEQ ID NO: 3238923 - RNA, 24 nt, Human
uugcuuaaaugugaauuacuaacu

SEQ ID NO: 3238924 - RNA, 20 nt, Human
uugcuuaaaugugaauuacu

SEQ ID NO: 3238925 - RNA, 17 nt, Human
uugcuuaaaugugaauu

SEQ ID NO: 3238926 - RNA, 16 nt, Human
uugcuuaaaugugaau

SEQ ID NO: 3238927 - RNA, 15 nt, Human
uugcuuaaaugugaa

SEQ ID NO: 3238928 - RNA, 14 nt, Human
uugcuuaaauguga

SEQ ID NO: 3238929 - RNA, 13 nt, Human
uugcuuaaaugug

SEQ ID NO: 3238930 - RNA, 21 nt, Human
uugcuuaauuacaauauuucu

SEQ ID NO: 3238931 - RNA, 18 nt, Human
uugcugcaauuuuauaag

SEQ ID NO: 3238932 - RNA, 17 nt, Human
uugcugcacucuugcac

SEQ ID NO: 3238933 - RNA, 19 nt, Human
uugcugcacucuugcacau

SEQ ID NO: 3238934 - RNA, 20 nt, Human
uugcugauuuuauucuugau

SEQ ID NO: 3238935 - RNA, 11 nt, Human
uugcugccuca

SEQ ID NO: 3238936 - RNA, 12 nt, Human
uugcugccucau

SEQ ID NO: 3238937 - RNA, 15 nt, Human
uugcugccucaugcu

SEQ ID NO: 3238938 - RNA, 22 nt, Human
uugcugauggugcaaugaccuu

SEQ ID NO: 3238939 - RNA, 17 nt, Human
uugcugauuuuauucuu

SEQ ID NO: 3238940 - RNA, 19 nt, Human
uugcugauuuuauucuuga

SEQ ID NO: 3238941 - RNA, 18 nt, Human
uugcugauuuuauucuug

SEQ ID NO: 3238942 - RNA, 20 nt, Human
uugcugauggugcaaugacc

SEQ ID NO: 3238943 - RNA, 19 nt, Human
uugcugauggugcaaugac

SEQ ID NO: 3238944 - RNA, 18 nt, Human
uugccucugccucugaca

SEQ ID NO: 3238945 - RNA, 16 nt, Human
uugccucugccucuga

SEQ ID NO: 3238946 - RNA, 14 nt, Human
uugccucugccucu

SEQ ID NO: 3238947 - RNA, 11 nt, Human
uugccucugcc

SEQ ID NO: 3238948 - RNA, 19 nt, Human
uugcccagccucuuucccu

SEQ ID NO: 3238949 - RNA, 16 nt, Human
uugcccagccucuuuc

SEQ ID NO: 3238950 - RNA, 12 nt, Human
uugcccagccuc

SEQ ID NO: 3238951 - RNA, 21 nt, Human
uugccagucuuuuguccugca

SEQ ID NO: 3238952 - RNA, 18 nt, Human
uugccagucaccccggcc

SEQ ID NO: 3238953 - RNA, 13 nt, Human
uugccagucaccc

SEQ ID NO: 3238954 - RNA, 18 nt, Human
uugccacugccucuuccu

SEQ ID NO: 3238955 - RNA, 17 nt, Human
uugccauagaguacacu

SEQ ID NO: 3238956 - RNA, 23 nt, Human
uugcccacgcuggagugcaguga

SEQ ID NO: 3238957 - RNA, 23 nt, Human
uugccauagaguacacugccugc

SEQ ID NO: 3238958 - RNA, 21 nt, Human
uugcccacuccugcucugcuc

SEQ ID NO: 3238959 - RNA, 17 nt, Human
uugcccacuccugcucu

SEQ ID NO: 3238960 - RNA, 16 nt, Human
uugcccacuccugcuc

SEQ ID NO: 3238961 - RNA, 15 nt, Human
uugcccacuccugcu

SEQ ID NO: 3238962 - RNA, 22 nt, Human
uugcccacuccugcucugcucg

SEQ ID NO: 3238963 - RNA, 22 nt, Human
uuggguggggggcuucauacac

SEQ ID NO: 3238964 - RNA, 21 nt, Human
uuggguggggggcuucauaca

SEQ ID NO: 3238965 - RNA, 20 nt, Human
uuggguggggggcuucauac

SEQ ID NO: 3238966 - RNA, 19 nt, Human
uuggguggggggcuucaua

SEQ ID NO: 3238967 - RNA, 17 nt, Human
uuggguggggggcuuca

SEQ ID NO: 3238968 - RNA, 16 nt, Human
uuggguggaugccugg

SEQ ID NO: 3238969 - RNA, 12 nt, Human
uugggaggcuga

SEQ ID NO: 3238970 - RNA, 16 nt, Human
uugggaggccauuugu

SEQ ID NO: 3238971 - RNA, 22 nt, Human
uuggcuuuggguugcaggaccu

SEQ ID NO: 3238972 - RNA, 23 nt, Human
uuggcaaacucuccaccacacgu

SEQ ID NO: 3238973 - RNA, 13 nt, Human
uuggcauucccca

SEQ ID NO: 3238974 - RNA, 24 nt, Human
uuggccaaagccaaagcuaggccu

SEQ ID NO: 3238975 - RNA, 14 nt, Human
uuggccaggcuggu

SEQ ID NO: 3238976 - RNA, 21 nt, Human
uuggccauaagcaacaauuuu

SEQ ID NO: 3238977 - RNA, 16 nt, Human
uuggcugcugaaggcu

SEQ ID NO: 3238978 - RNA, 18 nt, Human
uuggcugggggccucagu

SEQ ID NO: 3238979 - RNA, 22 nt, Human
uuggcugggggccucagugcca

SEQ ID NO: 3238980 - RNA, 21 nt, Human
uuggcugggggccucagugcc

SEQ ID NO: 3238981 - RNA, 18 nt, Human
uuguaaauaaaggaacca

SEQ ID NO: 3238982 - RNA, 23 nt, Human
uuguaaagaaaaauauuuaaugu

SEQ ID NO: 3238983 - RNA, 18 nt, Human
uuguaaagauuucuguuc

SEQ ID NO: 3238984 - RNA, 17 nt, Human
uuguaaagauuucuguu

SEQ ID NO: 3238985 - RNA, 16 nt, Human
uuguaaagauuucugu

SEQ ID NO: 3238986 - RNA, 12 nt, Human
uugguccugcug

SEQ ID NO: 3238987 - RNA, 17 nt, Human
uuguaaagaaaaauauu

SEQ ID NO: 3238988 - RNA, 22 nt, Human
uuggucccccuuccauggacuu

SEQ ID NO: 3238989 - RNA, 16 nt, Human
uuggucccccuuccau

SEQ ID NO: 3238990 - RNA, 18 nt, Human
uuguaaaugugcuuuuaa

SEQ ID NO: 3238991 - RNA, 14 nt, Human
uuguaaaugugcuu

SEQ ID NO: 3238992 - RNA, 11 nt, Human
uuguaaaugug

SEQ ID NO: 3238993 - RNA, 23 nt, Human
uuguacacccaugaaagaaaacu

SEQ ID NO: 3238994 - RNA, 12 nt, Human
uuguacagacaa

SEQ ID NO: 3238995 - RNA, 13 nt, Human
uuguacagacaac

SEQ ID NO: 3238996 - RNA, 12 nt, Human
uuguagauuuga

SEQ ID NO: 3238997 - RNA, 19 nt, Human
uuguaucacaaaucuuaac

SEQ ID NO: 3238998 - RNA, 13 nt, Human
uuguacauaaaca

SEQ ID NO: 3238999 - RNA, 18 nt, Human
uuguagauacaaucagcu

SEQ ID NO: 3239000 - RNA, 20 nt, Human
uuguagauacaaucagcugc

SEQ ID NO: 3239001 - RNA, 22 nt, Human
uuguagauacaaucagcugcuu

SEQ ID NO: 3239002 - RNA, 15 nt, Human
uuguagagccagggu

SEQ ID NO: 3239003 - RNA, 14 nt, Human
uuguagagccaggg

SEQ ID NO: 3239004 - RNA, 18 nt, Human
uuguacagauucuuuauu

SEQ ID NO: 3239005 - RNA, 16 nt, Human
uugaacugagcuugga

SEQ ID NO: 3239006 - RNA, 15 nt, Human
uugaacugagcuugg

SEQ ID NO: 3239007 - RNA, 19 nt, Human
uugaacucuucaaucucuu

SEQ ID NO: 3239008 - RNA, 16 nt, Human
uugaacucuucucauu

SEQ ID NO: 3239009 - RNA, 19 nt, Human
uugaacucuucucauuacu

SEQ ID NO: 3239010 - RNA, 20 nt, Human
uugaacucuucucauuacuu

SEQ ID NO: 3239011 - RNA, 15 nt, Human
uugaaagaauguaaa

SEQ ID NO: 3239012 - RNA, 21 nt, Human
uugaacucuucucauuacuug

SEQ ID NO: 3239013 - RNA, 12 nt, Human
uugaacugaagg

SEQ ID NO: 3239014 - RNA, 14 nt, Human
uugaagagacagag

SEQ ID NO: 3239015 - RNA, 20 nt, Human
uugaagagacagagacaagu

SEQ ID NO: 3239016 - RNA, 14 nt, Human
uugaaucuuuaauu

SEQ ID NO: 3239017 - RNA, 13 nt, Human
uugaaucuuuaau

SEQ ID NO: 3239018 - RNA, 17 nt, Human
uugaagacagagcuaca

SEQ ID NO: 3239019 - RNA, 19 nt, Human
uugaagacuuuucuuucag

SEQ ID NO: 3239020 - RNA, 20 nt, Human
uugaagaccuaaccagggcc

SEQ ID NO: 3239021 - RNA, 16 nt, Human
uugaagacuucaaaau

SEQ ID NO: 3239022 - RNA, 20 nt, Human
uugaagacuucaaaauauug

SEQ ID NO: 3239023 - RNA, 23 nt, Human
uucuuucaagggcuuuccugugc

SEQ ID NO: 3239024 - RNA, 19 nt, Human
uucuuucaagggcuuuccu

SEQ ID NO: 3239025 - RNA, 19 nt, Human
uugaaaacacuguucucug

SEQ ID NO: 3239026 - RNA, 21 nt, Human
uugaaaacacuguucucugcc

SEQ ID NO: 3239027 - RNA, 18 nt, Human
uucuuuauaauucuacuu

SEQ ID NO: 3239028 - RNA, 12 nt, Human
uucuuguaucug

SEQ ID NO: 3239029 - RNA, 14 nt, Human
uucuuguaucugga

SEQ ID NO: 3239030 - RNA, 22 nt, Human
uucuuguaucuggauucaaauu

SEQ ID NO: 3239031 - RNA, 20 nt, Human
uucuuuaguagcaacuaaaa

SEQ ID NO: 3239032 - RNA, 12 nt, Human
uucuuuagucuu

SEQ ID NO: 3239033 - RNA, 23 nt, Human
uugaaaagacuccaaagaaaugu

SEQ ID NO: 3239034 - RNA, 22 nt, Human
uugaaaagacuccaaagaaaug

SEQ ID NO: 3239035 - RNA, 18 nt, Human
uugaaaagacuccaaaga

SEQ ID NO: 3239036 - RNA, 16 nt, Human
uugaaaagacuccaaa

SEQ ID NO: 3239037 - RNA, 23 nt, Human
uugaaacugagaugugaacacau

SEQ ID NO: 3239038 - RNA, 14 nt, Human
uugaaacuuugaga

SEQ ID NO: 3239039 - RNA, 16 nt, Human
uugaaacugcauuugu

SEQ ID NO: 3239040 - RNA, 17 nt, Human
uugaaacugcauuugug

SEQ ID NO: 3239041 - RNA, 18 nt, Human
uugaaacugcauuugugc

SEQ ID NO: 3239042 - RNA, 20 nt, Human
uugaaacuuugagaucuaaa

SEQ ID NO: 3239043 - RNA, 16 nt, Human
uugaaacuuugagauc

SEQ ID NO: 3239044 - RNA, 20 nt, Human
uucugagcaccgaauauuga

SEQ ID NO: 3239045 - RNA, 21 nt, Human
uucugagcaccgaauauugag

SEQ ID NO: 3239046 - RNA, 14 nt, Human
uucugacucuuccc

SEQ ID NO: 3239047 - RNA, 17 nt, Human
uucuguccgagcuuuga

SEQ ID NO: 3239048 - RNA, 21 nt, Human
uucuguccgagcuuugaaaau

SEQ ID NO: 3239049 - RNA, 23 nt, Human
uucuguggguuucuaaagcugcc

SEQ ID NO: 3239050 - RNA, 16 nt, Human
uucuguggcucacaga

SEQ ID NO: 3239051 - RNA, 12 nt, Human
uucuguggcuca

SEQ ID NO: 3239052 - RNA, 17 nt, Human
uucuguccuacucugug

SEQ ID NO: 3239053 - RNA, 20 nt, Human
uucugagcuuacguaguucu

SEQ ID NO: 3239054 - RNA, 14 nt, Human
uucugagcuggccu

SEQ ID NO: 3239055 - RNA, 20 nt, Human
uucugugguuggcugggaaa

SEQ ID NO: 3239056 - RNA, 22 nt, Human
uucuguggcgaggcaugcuauc

SEQ ID NO: 3239057 - RNA, 22 nt, Human
uucuguuaaaaugcaugauugc

SEQ ID NO: 3239058 - RNA, 16 nt, Human
uucuguuaaaaugcau

SEQ ID NO: 3239059 - RNA, 13 nt, Human
uucuguuaaaaug

SEQ ID NO: 3239060 - RNA, 17 nt, Human
uucuguguuuauucaaa

SEQ ID NO: 3239061 - RNA, 22 nt, Human
uucuguuacaaaauguaacugu

SEQ ID NO: 3239062 - RNA, 20 nt, Human
uucuguuacaaaauguaacu

SEQ ID NO: 3239063 - RNA, 17 nt, Human
uucuguuacaaaaugua

SEQ ID NO: 3239064 - RNA, 16 nt, Human
uucuguuacaaaaugu

SEQ ID NO: 3239065 - RNA, 15 nt, Human
uucuguuacaaaaug

SEQ ID NO: 3239066 - RNA, 14 nt, Human
uucuguuacaaaau

SEQ ID NO: 3239067 - RNA, 13 nt, Human
uucuguuacaaaa

SEQ ID NO: 3239068 - RNA, 15 nt, Human
uucuuauuucauuuc

SEQ ID NO: 3239069 - RNA, 11 nt, Human
uucuucaaaau

SEQ ID NO: 3239070 - RNA, 17 nt, Human
uucuuauuuuuguacuu

SEQ ID NO: 3239071 - RNA, 21 nt, Human
uucuucaaaauauaaaaugcc

SEQ ID NO: 3239072 - RNA, 16 nt, Human
uucuucaaaccuuugu

SEQ ID NO: 3239073 - RNA, 23 nt, Human
uucuucaaaauauaaaaugccaa

SEQ ID NO: 3239074 - RNA, 14 nt, Human
uucuucaacucccu

SEQ ID NO: 3239075 - RNA, 23 nt, Human
uucuuauuuaaugaaagacugua

SEQ ID NO: 3239076 - RNA, 19 nt, Human
uucuuauuuaaugaaagac

SEQ ID NO: 3239077 - RNA, 13 nt, Human
uucuguucugaua

SEQ ID NO: 3239078 - RNA, 18 nt, Human
uucuuauuuaaucuuuuc

SEQ ID NO: 3239079 - RNA, 21 nt, Human
uucuuauuuaaucuuuucuua

SEQ ID NO: 3239080 - RNA, 18 nt, Human
uucuucacucaaauuuug

SEQ ID NO: 3239081 - RNA, 18 nt, Human
uugaauguaugcuucaua

SEQ ID NO: 3239082 - RNA, 20 nt, Human
uugaauggcaauguuuugcu

SEQ ID NO: 3239083 - RNA, 20 nt, Human
uugaccgugaggccagagac

SEQ ID NO: 3239084 - RNA, 21 nt, Human
uugaccgugaggccagagaca

SEQ ID NO: 3239085 - RNA, 15 nt, Human
uugaccucaggugau

SEQ ID NO: 3239086 - RNA, 14 nt, Human
uugacgccauccca

SEQ ID NO: 3239087 - RNA, 22 nt, Human
uugacgccaucccagccccaau

SEQ ID NO: 3239088 - RNA, 12 nt, Human
uugaccugaggc

SEQ ID NO: 3239089 - RNA, 19 nt, Human
uugaccugaggcccuucuc

SEQ ID NO: 3239090 - RNA, 22 nt, Human
uugaccugaggcccuucucucc

SEQ ID NO: 3239091 - RNA, 20 nt, Human
uugacgccaucccagcccca

SEQ ID NO: 3239092 - RNA, 19 nt, Human
uugacguauuauuguccuu

SEQ ID NO: 3239093 - RNA, 17 nt, Human
uugaggaaauuugcagc

SEQ ID NO: 3239094 - RNA, 21 nt, Human
uugaggaaaaauaugugaagg

SEQ ID NO: 3239095 - RNA, 20 nt, Human
uugaggaaaaauaugugaag

SEQ ID NO: 3239096 - RNA, 17 nt, Human
uugaggaaaaauaugug

SEQ ID NO: 3239097 - RNA, 15 nt, Human
uugaggaaaaauaug

SEQ ID NO: 3239098 - RNA, 14 nt, Human
uugagcugguaaca

SEQ ID NO: 3239099 - RNA, 21 nt, Human
uugagcugcuuuuuuugaaac

SEQ ID NO: 3239100 - RNA, 20 nt, Human
uugagcugcuuuuuuugaaa

SEQ ID NO: 3239101 - RNA, 18 nt, Human
uugagcugcuuuuuuuga

SEQ ID NO: 3239102 - RNA, 19 nt, Human
uugauagcacagacccugc

SEQ ID NO: 3239103 - RNA, 20 nt, Human
uugauagcacagacccugcc

SEQ ID NO: 3239104 - RNA, 20 nt, Human
uugcauacaaacaagcauau

SEQ ID NO: 3239105 - RNA, 14 nt, Human
uugcauacaaacaa

SEQ ID NO: 3239106 - RNA, 13 nt, Human
uugcauacaaaca

SEQ ID NO: 3239107 - RNA, 18 nt, Human
uugcauagauucccugag

SEQ ID NO: 3239108 - RNA, 15 nt, Human
uugccacugccucuu

SEQ ID NO: 3239109 - RNA, 14 nt, Human
uugccacugccucu

SEQ ID NO: 3239110 - RNA, 16 nt, Human
uugcagacaggcaagc

SEQ ID NO: 3239111 - RNA, 21 nt, Human
uugcagaacuugaagccugcu

SEQ ID NO: 3239112 - RNA, 11 nt, Human
uugcagaacuu

SEQ ID NO: 3239113 - RNA, 17 nt, Human
uugcaacaaaauacauu

SEQ ID NO: 3239114 - RNA, 23 nt, Human
uugcaggagcaguaucaugaagc

SEQ ID NO: 3239115 - RNA, 14 nt, Human
uugaugaaaagcuu

SEQ ID NO: 3239116 - RNA, 15 nt, Human
uugaugaaaagcuuu

SEQ ID NO: 3239117 - RNA, 13 nt, Human
uugauuuauuaac

SEQ ID NO: 3239118 - RNA, 14 nt, Human
uugauuuauuaacu

SEQ ID NO: 3239119 - RNA, 15 nt, Human
uugauuuauuaacuu

SEQ ID NO: 3239120 - RNA, 17 nt, Human
uugauuuauuaacuuaa

SEQ ID NO: 3239121 - RNA, 20 nt, Human
uugauuuauuaacuuaauaa

SEQ ID NO: 3239122 - RNA, 18 nt, Human
uugauagcacagacccug

SEQ ID NO: 3239123 - RNA, 21 nt, Human
uugauagcacagacccugccc

SEQ ID NO: 3239124 - RNA, 19 nt, Human
uugaucuuccucugcuaaa

SEQ ID NO: 3239125 - RNA, 17 nt, Human
uugaucuuccucugcua

SEQ ID NO: 3239126 - RNA, 22 nt, Human
uugauuucuaguuauuuauucu

SEQ ID NO: 3239127 - RNA, 22 nt, Human
uugauuuuccaucuaaaaauau

SEQ ID NO: 3239128 - RNA, 19 nt, Human
uugauuuuccaucuaaaaa

SEQ ID NO: 3239129 - RNA, 21 nt, Human
uugauuuauuaacuuaauaau

SEQ ID NO: 3239130 - RNA, 13 nt, Human
uugcaaaaaucca

SEQ ID NO: 3239131 - RNA, 19 nt, Human
uugauuuuuuuuuuuaauc

SEQ ID NO: 3239132 - RNA, 17 nt, Human
uugcaacaggcugggcu

SEQ ID NO: 3239133 - RNA, 14 nt, Human
uugcaacaggcugg

SEQ ID NO: 3239134 - RNA, 13 nt, Human
uugcaacaaaaua

SEQ ID NO: 3239135 - RNA, 12 nt, Human
uugcaacaaaau

SEQ ID NO: 3239136 - RNA, 12 nt, Human
ccaucagcccaa

SEQ ID NO: 3239137 - RNA, 22 nt, Human
ccaucauugaaaucuuuuugcu

SEQ ID NO: 3239138 - RNA, 21 nt, Human
ccauccaccguccccucccag

SEQ ID NO: 3239139 - RNA, 12 nt, Human
ccaucauuucug

SEQ ID NO: 3239140 - RNA, 17 nt, Human
ccaucauugaaaucuuu

SEQ ID NO: 3239141 - RNA, 13 nt, Human
ccaucauuucugg

SEQ ID NO: 3239142 - RNA, 18 nt, Human
ccauccuccuccuuccua

SEQ ID NO: 3239143 - RNA, 16 nt, Human
ccauccuccuccuucc

SEQ ID NO: 3239144 - RNA, 12 nt, Human
ccauccucugua

SEQ ID NO: 3239145 - RNA, 19 nt, Human
ccauccucuguacagagcc

SEQ ID NO: 3239146 - RNA, 19 nt, Human
ccaucuccuuucucuggua

SEQ ID NO: 3239147 - RNA, 19 nt, Human
ccaucuggagagcccagag

SEQ ID NO: 3239148 - RNA, 12 nt, Human
ccaucuggagag

SEQ ID NO: 3239149 - RNA, 22 nt, Human
ccaucugcugucuuuucuuugc

SEQ ID NO: 3239150 - RNA, 17 nt, Human
ccagugaggcucugccc

SEQ ID NO: 3239151 - RNA, 20 nt, Human
ccagugaggcucugcccuug

SEQ ID NO: 3239152 - RNA, 18 nt, Human
ccagugaggcucugcccu

SEQ ID NO: 3239153 - RNA, 19 nt, Human
ccagugaggcucugcccuu

SEQ ID NO: 3239154 - RNA, 14 nt, Human
ccauagugacuuuu

SEQ ID NO: 3239155 - RNA, 13 nt, Human
ccauacuaauuau

SEQ ID NO: 3239156 - RNA, 23 nt, Human
ccauacuaauuauacccccugca

SEQ ID NO: 3239157 - RNA, 12 nt, Human
ccauacuaauua

SEQ ID NO: 3239158 - RNA, 19 nt, Human
ccauauccauagugacuuu

SEQ ID NO: 3239159 - RNA, 21 nt, Human
ccauaucaaaagacacagggg

SEQ ID NO: 3239160 - RNA, 18 nt, Human
ccauaucaaaagacacag

SEQ ID NO: 3239161 - RNA, 13 nt, Human
ccauauagaaagc

SEQ ID NO: 3239162 - RNA, 18 nt, Human
ccauaguugacaguucca

SEQ ID NO: 3239163 - RNA, 18 nt, Human
ccauaguuacuguaaaau

SEQ ID NO: 3239164 - RNA, 17 nt, Human
ccauaguuacuguaaaa

SEQ ID NO: 3239165 - RNA, 19 nt, Human
ccauaguuaaagaagacau

SEQ ID NO: 3239166 - RNA, 14 nt, Human
ccauaugcagaaau

SEQ ID NO: 3239167 - RNA, 16 nt, Human
ccauaugcagaaauag

SEQ ID NO: 3239168 - RNA, 14 nt, Human
ccaucacagcuugu

SEQ ID NO: 3239169 - RNA, 15 nt, Human
ccaucacagcuuguu

SEQ ID NO: 3239170 - RNA, 14 nt, Human
ccaugaagauguag

SEQ ID NO: 3239171 - RNA, 22 nt, Human
ccaucuggagagcccagagucc

SEQ ID NO: 3239172 - RNA, 22 nt, Human
ccaugaacugucaagugugugu

SEQ ID NO: 3239173 - RNA, 18 nt, Human
ccaugauguuuuccauga

SEQ ID NO: 3239174 - RNA, 19 nt, Human
ccaugauuaaccacuucag

SEQ ID NO: 3239175 - RNA, 21 nt, Human
ccaugauuaaccacuucagcu

SEQ ID NO: 3239176 - RNA, 12 nt, Human
ccaugccagccg

SEQ ID NO: 3239177 - RNA, 14 nt, Human
ccaugcugcccugu

SEQ ID NO: 3239178 - RNA, 11 nt, Human
ccaugcugccc

SEQ ID NO: 3239179 - RNA, 13 nt, Human
ccaugcugcccug

SEQ ID NO: 3239180 - RNA, 20 nt, Human
ccauccucuguacagagccc

SEQ ID NO: 3239181 - RNA, 18 nt, Human
cccaaaccaccagaagcc

SEQ ID NO: 3239182 - RNA, 17 nt, Human
cccaaaccaccagaagc

SEQ ID NO: 3239183 - RNA, 22 nt, Human
cccaaaccaccagaagcccaga

SEQ ID NO: 3239184 - RNA, 15 nt, Human
cccaaaccuuucccc

SEQ ID NO: 3239185 - RNA, 12 nt, Human
cccaaagaugca

SEQ ID NO: 3239186 - RNA, 15 nt, Human
cccaaagaugcagcc

SEQ ID NO: 3239187 - RNA, 16 nt, Human
cccaaagcagugcaug

SEQ ID NO: 3239188 - RNA, 18 nt, Human
cccaaaaggcagaagcaa

SEQ ID NO: 3239189 - RNA, 13 nt, Human
cccaaaaggcaga

SEQ ID NO: 3239190 - RNA, 22 nt, Human
ccauuuuggugucuuucucuuu

SEQ ID NO: 3239191 - RNA, 21 nt, Human
ccauuuuggugucuuucucuu

SEQ ID NO: 3239192 - RNA, 20 nt, Human
ccauuuuggugucuuucucu

SEQ ID NO: 3239193 - RNA, 20 nt, Human
cccaaaacucuccucugcug

SEQ ID NO: 3239194 - RNA, 23 nt, Human
ccauuuuggauucuuauggacaa

SEQ ID NO: 3239195 - RNA, 20 nt, Human
ccauuuugggguacccacug

SEQ ID NO: 3239196 - RNA, 22 nt, Human
ccauuuugggguacccacugcu

SEQ ID NO: 3239197 - RNA, 19 nt, Human
ccauuuuggugucuuucuc

SEQ ID NO: 3239198 - RNA, 18 nt, Human
ccauuuuggugucuuucu

SEQ ID NO: 3239199 - RNA, 21 nt, Human
ccaugcuguuuucccuuugcc

SEQ ID NO: 3239200 - RNA, 18 nt, Human
ccaugcugucuggcacag

SEQ ID NO: 3239201 - RNA, 16 nt, Human
ccaugcugucuggcac

SEQ ID NO: 3239202 - RNA, 23 nt, Human
ccaugcugucuggcacagccugc

SEQ ID NO: 3239203 - RNA, 22 nt, Human
ccaugcugucuggcacagccug

SEQ ID NO: 3239204 - RNA, 21 nt, Human
ccaugcugucuggcacagccu

SEQ ID NO: 3239205 - RNA, 20 nt, Human
ccaugcugucuggcacagcc

SEQ ID NO: 3239206 - RNA, 13 nt, Human
ccauggacuuugu

SEQ ID NO: 3239207 - RNA, 14 nt, Human
ccauggacuuuguu

SEQ ID NO: 3239208 - RNA, 15 nt, Human
ccauucuccaccugc

SEQ ID NO: 3239209 - RNA, 16 nt, Human
ccauucuccaccugcc

SEQ ID NO: 3239210 - RNA, 18 nt, Human
ccauucugccugcccagg

SEQ ID NO: 3239211 - RNA, 17 nt, Human
ccauucugccugcccag

SEQ ID NO: 3239212 - RNA, 17 nt, Human
ccauucuccaccugcca

SEQ ID NO: 3239213 - RNA, 16 nt, Human
ccauucugccugccca

SEQ ID NO: 3239214 - RNA, 20 nt, Human
ccauucugccugcccaggcc

SEQ ID NO: 3239215 - RNA, 19 nt, Human
ccauucugccugcccaggc

SEQ ID NO: 3239216 - RNA, 14 nt, Human
ccauucuccaccug

SEQ ID NO: 3239217 - RNA, 21 nt, Human
ccauucugccugcccaggccc

SEQ ID NO: 3239218 - RNA, 22 nt, Human
ccaggaaguagcacaggcugag

SEQ ID NO: 3239219 - RNA, 20 nt, Human
ccaggaagccagcaggcucu

SEQ ID NO: 3239220 - RNA, 22 nt, Human
ccaggaagccagcaggcucuca

SEQ ID NO: 3239221 - RNA, 21 nt, Human
ccaggaaguagcacaggcuga

SEQ ID NO: 3239222 - RNA, 19 nt, Human
ccaggaaguagcacaggcu

SEQ ID NO: 3239223 - RNA, 18 nt, Human
ccaggaaguagcacaggc

SEQ ID NO: 3239224 - RNA, 16 nt, Human
ccaggaaguagcacag

SEQ ID NO: 3239225 - RNA, 20 nt, Human
ccaggacaggagaugcugug

SEQ ID NO: 3239226 - RNA, 14 nt, Human
ccagcucuggucca

SEQ ID NO: 3239227 - RNA, 17 nt, Human
ccagcucugguccauag

SEQ ID NO: 3239228 - RNA, 21 nt, Human
ccagcucugguccauagagag

SEQ ID NO: 3239229 - RNA, 22 nt, Human
ccagcucugguccauagagagc

SEQ ID NO: 3239230 - RNA, 18 nt, Human
ccagcugccuaggauuca

SEQ ID NO: 3239231 - RNA, 20 nt, Human
ccagcugcuugggcuucauc

SEQ ID NO: 3239232 - RNA, 15 nt, Human
ccagcugcugagccg

SEQ ID NO: 3239233 - RNA, 14 nt, Human
ccagcugcugagcc

SEQ ID NO: 3239234 - RNA, 19 nt, Human
ccagcugcugagccgcaga

SEQ ID NO: 3239235 - RNA, 18 nt, Human
ccagcugcugagccgcag

SEQ ID NO: 3239236 - RNA, 17 nt, Human
ccagcugcugagccgca

SEQ ID NO: 3239237 - RNA, 16 nt, Human
ccagcugcugagccgc

SEQ ID NO: 3239238 - RNA, 23 nt, Human
ccagcugcuugggcuucauccuc

SEQ ID NO: 3239239 - RNA, 23 nt, Human
ccagcugcugagccgcagagaag

SEQ ID NO: 3239240 - RNA, 19 nt, Human
ccagccuugaccauucucc

SEQ ID NO: 3239241 - RNA, 20 nt, Human
ccagccuugaccauucucca

SEQ ID NO: 3239242 - RNA, 16 nt, Human
ccagagcccaccuugg

SEQ ID NO: 3239243 - RNA, 19 nt, Human
ccagagcauuccagucagg

SEQ ID NO: 3239244 - RNA, 18 nt, Human
ccagagcauuccagucag

SEQ ID NO: 3239245 - RNA, 22 nt, Human
ccagagcccaccuuggcucaag

SEQ ID NO: 3239246 - RNA, 23 nt, Human
ccagagcauuccagucaggcucu

SEQ ID NO: 3239247 - RNA, 21 nt, Human
ccagagcauuccagucaggcu

SEQ ID NO: 3239248 - RNA, 16 nt, Human
ccagcgagcccuggug

SEQ ID NO: 3239249 - RNA, 15 nt, Human
ccagcgagcccuggu

SEQ ID NO: 3239250 - RNA, 13 nt, Human
ccagcgagcccug

SEQ ID NO: 3239251 - RNA, 14 nt, Human
ccagcgagcccugg

SEQ ID NO: 3239252 - RNA, 12 nt, Human
ccagcucugguc

SEQ ID NO: 3239253 - RNA, 13 nt, Human
ccagcucuggucc

SEQ ID NO: 3239254 - RNA, 11 nt, Human
ccagcucuggu

SEQ ID NO: 3239255 - RNA, 19 nt, Human
ccaggcuuucuagaaagaa

SEQ ID NO: 3239256 - RNA, 12 nt, Human
ccaggcuuucua

SEQ ID NO: 3239257 - RNA, 13 nt, Human
ccagggccaaaag

SEQ ID NO: 3239258 - RNA, 13 nt, Human
ccaggccccugcc

SEQ ID NO: 3239259 - RNA, 16 nt, Human
ccaggccccccuguca

SEQ ID NO: 3239260 - RNA, 15 nt, Human
ccaggccccccuguc

SEQ ID NO: 3239261 - RNA, 19 nt, Human
ccaggcuggucucaaacuc

SEQ ID NO: 3239262 - RNA, 14 nt, Human
ccaggcuggucuca

SEQ ID NO: 3239263 - RNA, 21 nt, Human
ccaggcuggucucgaacuccu

SEQ ID NO: 3239264 - RNA, 20 nt, Human
ccaggcuguaucccaugagc

SEQ ID NO: 3239265 - RNA, 18 nt, Human
ccaggccccucccucucc

SEQ ID NO: 3239266 - RNA, 16 nt, Human
ccaggccccucccucu

SEQ ID NO: 3239267 - RNA, 12 nt, Human
ccaggccccucc

SEQ ID NO: 3239268 - RNA, 20 nt, Human
ccagugaaaucaguuacucu

SEQ ID NO: 3239269 - RNA, 13 nt, Human
ccagucuuuuguc

SEQ ID NO: 3239270 - RNA, 15 nt, Human
ccagucuuuuguccu

SEQ ID NO: 3239271 - RNA, 18 nt, Human
ccaguauaaaauuacagu

SEQ ID NO: 3239272 - RNA, 21 nt, Human
ccaguauaaaauuacagugga

SEQ ID NO: 3239273 - RNA, 23 nt, Human
ccaguagcugggaccacaggugc

SEQ ID NO: 3239274 - RNA, 15 nt, Human
ccaguagcaggcccg

SEQ ID NO: 3239275 - RNA, 22 nt, Human
ccaguacauucucaguuuuucu

SEQ ID NO: 3239276 - RNA, 19 nt, Human
ccaguacauucucaguuuu

SEQ ID NO: 3239277 - RNA, 17 nt, Human
ccaguacauucucaguu

SEQ ID NO: 3239278 - RNA, 15 nt, Human
ccaguacauucucag

SEQ ID NO: 3239279 - RNA, 23 nt, Human
ccaguaccuggguccccagcccu

SEQ ID NO: 3239280 - RNA, 19 nt, Human
ccaguaccuggguccccag

SEQ ID NO: 3239281 - RNA, 14 nt, Human
ccagguucagcuug

SEQ ID NO: 3239282 - RNA, 22 nt, Human
ccagguggugggcauucucucu

SEQ ID NO: 3239283 - RNA, 20 nt, Human
ccaguaacacaggccacccu

SEQ ID NO: 3239284 - RNA, 12 nt, Human
ccaguaacacag

SEQ ID NO: 3239285 - RNA, 12 nt, Human
ccaguaagauca

SEQ ID NO: 3239286 - RNA, 14 nt, Human
ccaguaagaucacu

SEQ ID NO: 3239287 - RNA, 15 nt, Human
ccaguaagaucacug

SEQ ID NO: 3239288 - RNA, 16 nt, Human
ccaguaagaucacugu

SEQ ID NO: 3239289 - RNA, 17 nt, Human
ccaguaagaucacuguu

SEQ ID NO: 3239290 - RNA, 21 nt, Human
ccaguaagaucacuguuuaga

SEQ ID NO: 3239291 - RNA, 17 nt, Human
ccaguacaagaucucag

SEQ ID NO: 3239292 - RNA, 22 nt, Human
ccaggucccuuucauuugcuau

SEQ ID NO: 3239293 - RNA, 17 nt, Human
ccaggugccaguuaugg

SEQ ID NO: 3239294 - RNA, 13 nt, Human
ccaggugccaguu

SEQ ID NO: 3239295 - RNA, 19 nt, Human
ccaggugcuaggaacacuc

SEQ ID NO: 3239296 - RNA, 15 nt, Human
ccaggugccuccuga

SEQ ID NO: 3239297 - RNA, 21 nt, Human
ccaggugaaggaggcuccagg

SEQ ID NO: 3239298 - RNA, 20 nt, Human
ccaggugaaggaggcuccag

SEQ ID NO: 3239299 - RNA, 16 nt, Human
ccaggugaaggaggcu

SEQ ID NO: 3239300 - RNA, 23 nt, Human
ccaggucuaccccucccggcccu

SEQ ID NO: 3239301 - RNA, 15 nt, Human
ccaggagcagccaca

SEQ ID NO: 3239302 - RNA, 16 nt, Human
ccaggagcagccacau

SEQ ID NO: 3239303 - RNA, 15 nt, Human
ccaggagccccgagg

SEQ ID NO: 3239304 - RNA, 13 nt, Human
ccaggcauggugg

SEQ ID NO: 3239305 - RNA, 14 nt, Human
ccaggcauucccca

SEQ ID NO: 3239306 - RNA, 24 nt, Human
ccaggcauuccccaggaggccagc

SEQ ID NO: 3239307 - RNA, 23 nt, Human
ccaggcauuccccaggaggccag

SEQ ID NO: 3239308 - RNA, 22 nt, Human
ccaggcauuccccaggaggcca

SEQ ID NO: 3239309 - RNA, 13 nt, Human
ccaggagccuccu

SEQ ID NO: 3239310 - RNA, 14 nt, Human
ccaggagccuccug

SEQ ID NO: 3239311 - RNA, 18 nt, Human
ccaggagccuccugcccu

SEQ ID NO: 3239312 - RNA, 12 nt, Human
ccaggagccucc

SEQ ID NO: 3239313 - RNA, 12 nt, Human
ccaggaggccag

SEQ ID NO: 3239314 - RNA, 12 nt, Human
ccaggagcccau

SEQ ID NO: 3239315 - RNA, 11 nt, Human
ccaggagccca

SEQ ID NO: 3239316 - RNA, 13 nt, Human
ccaggagcccauu

SEQ ID NO: 3239317 - RNA, 13 nt, Human
ccaggaggccagc

SEQ ID NO: 3239318 - RNA, 17 nt, Human
cccaagggccuggccug

SEQ ID NO: 3239319 - RNA, 13 nt, Human
cccaacacaaaga

SEQ ID NO: 3239320 - RNA, 13 nt, Human
cccaaauuuaauu

SEQ ID NO: 3239321 - RNA, 23 nt, Human
cccaaauggaaaugggcagagca

SEQ ID NO: 3239322 - RNA, 19 nt, Human
cccaaaugugugcccagcu

SEQ ID NO: 3239323 - RNA, 18 nt, Human
cccaaaugugugcccagc

SEQ ID NO: 3239324 - RNA, 17 nt, Human
cccaaaugugugcccag

SEQ ID NO: 3239325 - RNA, 21 nt, Human
cccaaauugucaccugcuucu

SEQ ID NO: 3239326 - RNA, 18 nt, Human
cccaagggccuggccuga

SEQ ID NO: 3239327 - RNA, 19 nt, Human
cccaagggccuggccugag

SEQ ID NO: 3239328 - RNA, 23 nt, Human
cccaagggccuggccugagcugg

SEQ ID NO: 3239329 - RNA, 19 nt, Human
cccaaguuuugugaaauuu

SEQ ID NO: 3239330 - RNA, 17 nt, Human
cccaaguuuugugaaau

SEQ ID NO: 3239331 - RNA, 16 nt, Human
cccaauaccccaugga

SEQ ID NO: 3239332 - RNA, 21 nt, Human
cccaaguuuugugaaauuuuu

SEQ ID NO: 3239333 - RNA, 17 nt, Human
cccaauaccccauggac

SEQ ID NO: 3239334 - RNA, 23 nt, Human
cccaaugcacuuuguucuggcuc

SEQ ID NO: 3239335 - RNA, 16 nt, Human
cccaauccaucagugc

SEQ ID NO: 3239336 - RNA, 16 nt, Human
cccacaccuccugggg

SEQ ID NO: 3239337 - RNA, 20 nt, Human
cccagagggccugcaaggga

SEQ ID NO: 3239338 - RNA, 18 nt, Human
cccagagggccugcaagg

SEQ ID NO: 3239339 - RNA, 15 nt, Human
cccagagucccccca

SEQ ID NO: 3239340 - RNA, 20 nt, Human
cccagaguccccccacuccc

SEQ ID NO: 3239341 - RNA, 18 nt, Human
cccagcaagugagagcug

SEQ ID NO: 3239342 - RNA, 16 nt, Human
cccagcaagugagagc

SEQ ID NO: 3239343 - RNA, 22 nt, Human
cccagauugcaacaggcugggc

SEQ ID NO: 3239344 - RNA, 21 nt, Human
cccagauugcaacaggcuggg

SEQ ID NO: 3239345 - RNA, 20 nt, Human
cccagauugcaacaggcugg

SEQ ID NO: 3239346 - RNA, 15 nt, Human
cccagaucagccaga

SEQ ID NO: 3239347 - RNA, 14 nt, Human
cccagaucagccag

SEQ ID NO: 3239348 - RNA, 19 nt, Human
cccagaucagccagaagcc

SEQ ID NO: 3239349 - RNA, 15 nt, Human
cccagcgagcccugg

SEQ ID NO: 3239350 - RNA, 18 nt, Human
cccagcgagcccuggugg

SEQ ID NO: 3239351 - RNA, 17 nt, Human
cccagcgagcccuggug

SEQ ID NO: 3239352 - RNA, 23 nt, Human
cccagcgagcccugguggcagug

SEQ ID NO: 3239353 - RNA, 19 nt, Human
cccagcgagcccugguggc

SEQ ID NO: 3239354 - RNA, 21 nt, Human
cccagcgcugacgugucagga

SEQ ID NO: 3239355 - RNA, 16 nt, Human
cccagcgagggcccca

SEQ ID NO: 3239356 - RNA, 20 nt, Human
cccagcgugaagccagggcc

SEQ ID NO: 3239357 - RNA, 14 nt, Human
cccagcuccacccc

SEQ ID NO: 3239358 - RNA, 12 nt, Human
cccagccugcua

SEQ ID NO: 3239359 - RNA, 21 nt, Human
cccagccucaaauccaggacc

SEQ ID NO: 3239360 - RNA, 16 nt, Human
cccagccucuuucccu

SEQ ID NO: 3239361 - RNA, 15 nt, Human
cccagccucuuuccc

SEQ ID NO: 3239362 - RNA, 13 nt, Human
cccagccucuuuc

SEQ ID NO: 3239363 - RNA, 19 nt, Human
cccagcccuuccucugcuc

SEQ ID NO: 3239364 - RNA, 22 nt, Human
cccagcaagugagagcugggug

SEQ ID NO: 3239365 - RNA, 21 nt, Human
cccagcaagugagagcugggu

SEQ ID NO: 3239366 - RNA, 20 nt, Human
cccagcaagugagagcuggg

SEQ ID NO: 3239367 - RNA, 19 nt, Human
cccagcaagugagagcugg

SEQ ID NO: 3239368 - RNA, 11 nt, Human
cccagccccuu

SEQ ID NO: 3239369 - RNA, 13 nt, Human
cccaggcaggucu

SEQ ID NO: 3239370 - RNA, 11 nt, Human
cccaggcaggu

SEQ ID NO: 3239371 - RNA, 14 nt, Human
cccaggcaaauaaa

SEQ ID NO: 3239372 - RNA, 15 nt, Human
cccaggcaaauaaaa

SEQ ID NO: 3239373 - RNA, 16 nt, Human
cccaggcaaauaaaau

SEQ ID NO: 3239374 - RNA, 21 nt, Human
cccaggcaaauaaaauucccu

SEQ ID NO: 3239375 - RNA, 22 nt, Human
cccaggcaaauaaaauucccua

SEQ ID NO: 3239376 - RNA, 17 nt, Human
cccaggauauauuuuau

SEQ ID NO: 3239377 - RNA, 15 nt, Human
cccaggauauauuuu

SEQ ID NO: 3239378 - RNA, 18 nt, Human
cccaggaggccagccuug

SEQ ID NO: 3239379 - RNA, 10 nt, Human
cccaggaggg

SEQ ID NO: 3239380 - RNA, 13 nt, Human
cccaggaggccag

SEQ ID NO: 3239381 - RNA, 22 nt, Human
cccaggaggccagccuugacca

SEQ ID NO: 3239382 - RNA, 18 nt, Human
cccaggagccccgaggcc

SEQ ID NO: 3239383 - RNA, 21 nt, Human
cccaggagccccgaggccuuc

SEQ ID NO: 3239384 - RNA, 19 nt, Human
cccaggagccugcccagcc

SEQ ID NO: 3239385 - RNA, 17 nt, Human
cccaggagccugcccag

SEQ ID NO: 3239386 - RNA, 19 nt, Human
cccaggaggacucccugcu

SEQ ID NO: 3239387 - RNA, 22 nt, Human
cccaggccccugccacccuggg

SEQ ID NO: 3239388 - RNA, 21 nt, Human
cccaggccccugccacccugg

SEQ ID NO: 3239389 - RNA, 18 nt, Human
cccaggccccugccaccc

SEQ ID NO: 3239390 - RNA, 16 nt, Human
cccaggccccugccac

SEQ ID NO: 3239391 - RNA, 11 nt, Human
cccaggccccu

SEQ ID NO: 3239392 - RNA, 22 nt, Human
cccaggcauuccccaggaggcc

SEQ ID NO: 3239393 - RNA, 23 nt, Human
cccaggcauuccccaggaggcca

SEQ ID NO: 3239394 - RNA, 20 nt, Human
cccaggcauuccccaggagg

SEQ ID NO: 3239395 - RNA, 21 nt, Human
cccaggcauuccccaggaggc

SEQ ID NO: 3239396 - RNA, 18 nt, Human
cccaggcauuccccagga

SEQ ID NO: 3239397 - RNA, 17 nt, Human
cccaggcaggucuugaa

SEQ ID NO: 3239398 - RNA, 13 nt, Human
cccaggugccagu

SEQ ID NO: 3239399 - RNA, 22 nt, Human
cccaggugcuaggaacacuccu

SEQ ID NO: 3239400 - RNA, 23 nt, Human
cccaggugcuaggaacacuccuu

SEQ ID NO: 3239401 - RNA, 15 nt, Human
cccagguggcugugg

SEQ ID NO: 3239402 - RNA, 14 nt, Human
cccagguggcugug

SEQ ID NO: 3239403 - RNA, 13 nt, Human
cccagugcccaca

SEQ ID NO: 3239404 - RNA, 20 nt, Human
cccagucuggaaugcagugg

SEQ ID NO: 3239405 - RNA, 13 nt, Human
cccagucccagca

SEQ ID NO: 3239406 - RNA, 19 nt, Human
cccagucccagcagccagc

SEQ ID NO: 3239407 - RNA, 17 nt, Human
cccagucccagcagcca

SEQ ID NO: 3239408 - RNA, 15 nt, Human
cccagucccagcagc

SEQ ID NO: 3239409 - RNA, 14 nt, Human
cccagucccagcag

SEQ ID NO: 3239410 - RNA, 21 nt, Human
cccagucaauuacauguuugg

SEQ ID NO: 3239411 - RNA, 17 nt, Human
cccaggccuccuacagc

SEQ ID NO: 3239412 - RNA, 18 nt, Human
cccaggccuccuacagcu

SEQ ID NO: 3239413 - RNA, 18 nt, Human
cccaggcgccccuucccc

SEQ ID NO: 3239414 - RNA, 16 nt, Human
cccaggccugccuguu

SEQ ID NO: 3239415 - RNA, 15 nt, Human
cccaggccugccugu

SEQ ID NO: 3239416 - RNA, 14 nt, Human
cccaggcugagccu

SEQ ID NO: 3239417 - RNA, 22 nt, Human
cccagggggcuuccugagggga

SEQ ID NO: 3239418 - RNA, 19 nt, Human
cccagggugagguggcaug

SEQ ID NO: 3239419 - RNA, 22 nt, Human
ccccaaauggaaaugggcagag

SEQ ID NO: 3239420 - RNA, 21 nt, Human
ccccaaauggaaaugggcaga

SEQ ID NO: 3239421 - RNA, 14 nt, Human
ccccacccaagggc

SEQ ID NO: 3239422 - RNA, 20 nt, Human
ccccacccaagggccuggcc

SEQ ID NO: 3239423 - RNA, 13 nt, Human
ccccaccaucugc

SEQ ID NO: 3239424 - RNA, 19 nt, Human
ccccaccaucugcugucuu

SEQ ID NO: 3239425 - RNA, 18 nt, Human
ccccaccaucugcugucu

SEQ ID NO: 3239426 - RNA, 15 nt, Human
ccccaccaucugcug

SEQ ID NO: 3239427 - RNA, 14 nt, Human
ccccaccaucugcu

SEQ ID NO: 3239428 - RNA, 17 nt, Human
ccccaagcgcccuggcc

SEQ ID NO: 3239429 - RNA, 13 nt, Human
ccccaagccuggc

SEQ ID NO: 3239430 - RNA, 14 nt, Human
ccccaagccuggca

SEQ ID NO: 3239431 - RNA, 13 nt, Human
ccccaagcgcccu

SEQ ID NO: 3239432 - RNA, 17 nt, Human
cccaugcugcccuguga

SEQ ID NO: 3239433 - RNA, 14 nt, Human
cccauggaccaugc

SEQ ID NO: 3239434 - RNA, 16 nt, Human
cccaugggcaggagac

SEQ ID NO: 3239435 - RNA, 14 nt, Human
cccaugggcaggag

SEQ ID NO: 3239436 - RNA, 16 nt, Human
cccaugggaggcugga

SEQ ID NO: 3239437 - RNA, 13 nt, Human
cccaugggaggga

SEQ ID NO: 3239438 - RNA, 21 nt, Human
cccaugggagggagcugagaa

SEQ ID NO: 3239439 - RNA, 23 nt, Human
cccaugggagggagcugagaaga

SEQ ID NO: 3239440 - RNA, 23 nt, Human
cccauggccggcuuucaggagcu

SEQ ID NO: 3239441 - RNA, 15 nt, Human
cccaugcugcccugu

SEQ ID NO: 3239442 - RNA, 16 nt, Human
cccaugcugcccugug

SEQ ID NO: 3239443 - RNA, 23 nt, Human
cccaguggcagggcacagggccu

SEQ ID NO: 3239444 - RNA, 22 nt, Human
cccaguggcagggcacagggcc

SEQ ID NO: 3239445 - RNA, 20 nt, Human
cccaguggcagggcacaggg

SEQ ID NO: 3239446 - RNA, 17 nt, Human
cccaguggcagggcaca

SEQ ID NO: 3239447 - RNA, 16 nt, Human
cccaguggcagggcac

SEQ ID NO: 3239448 - RNA, 15 nt, Human
cccaguggcagggca

SEQ ID NO: 3239449 - RNA, 14 nt, Human
cccaguggcagggc

SEQ ID NO: 3239450 - RNA, 13 nt, Human
cccaguggcaggg

SEQ ID NO: 3239451 - RNA, 18 nt, Human
cccagugccgagaaggaa

SEQ ID NO: 3239452 - RNA, 17 nt, Human
cccagugccgagaagga

SEQ ID NO: 3239453 - RNA, 20 nt, Human
cccagugcccacaggaucag

SEQ ID NO: 3239454 - RNA, 15 nt, Human
cccagugcccacagg

SEQ ID NO: 3239455 - RNA, 17 nt, Human
ccccaggaggccagccu

SEQ ID NO: 3239456 - RNA, 16 nt, Human
ccacggccuccuuucc

SEQ ID NO: 3239457 - RNA, 23 nt, Human
ccacggccaggccagagggagug

SEQ ID NO: 3239458 - RNA, 18 nt, Human
ccacggccaggccagagg

SEQ ID NO: 3239459 - RNA, 16 nt, Human
ccacggccaggccaga

SEQ ID NO: 3239460 - RNA, 18 nt, Human
ccacgcuggagugcagug

SEQ ID NO: 3239461 - RNA, 15 nt, Human
ccacccccacccaag

SEQ ID NO: 3239462 - RNA, 13 nt, Human
ccaccccauggcc

SEQ ID NO: 3239463 - RNA, 13 nt, Human
ccacgcuggagug

SEQ ID NO: 3239464 - RNA, 16 nt, Human
ccacgcuggagugcag

SEQ ID NO: 3239465 - RNA, 15 nt, Human
ccaccccacacacgc

SEQ ID NO: 3239466 - RNA, 15 nt, Human
ccacuagacccacug

SEQ ID NO: 3239467 - RNA, 17 nt, Human
ccacuagacccacugga

SEQ ID NO: 3239468 - RNA, 22 nt, Human
ccacuccagaccccuggcuuuu

SEQ ID NO: 3239469 - RNA, 21 nt, Human
ccacuccagaccccuggcuuu

SEQ ID NO: 3239470 - RNA, 20 nt, Human
ccacuccagaccccuggcuu

SEQ ID NO: 3239471 - RNA, 13 nt, Human
ccagaagcccaga

SEQ ID NO: 3239472 - RNA, 12 nt, Human
ccagaagcccag

SEQ ID NO: 3239473 - RNA, 20 nt, Human
ccagaagccacccaaagcag

SEQ ID NO: 3239474 - RNA, 23 nt, Human
ccagaaguuugagaucagccugg

SEQ ID NO: 3239475 - RNA, 14 nt, Human
ccagaagcccagaa

SEQ ID NO: 3239476 - RNA, 22 nt, Human
ccagaaguuugagaucagccug

SEQ ID NO: 3239477 - RNA, 18 nt, Human
ccagaaaugucccuuucu

SEQ ID NO: 3239478 - RNA, 10 nt, Human
ccagaaauuc

SEQ ID NO: 3239479 - RNA, 22 nt, Human
ccagaaaugucccuuucuucuc

SEQ ID NO: 3239480 - RNA, 13 nt, Human
ccacuucagcuga

SEQ ID NO: 3239481 - RNA, 14 nt, Human
ccacuucagcugac

SEQ ID NO: 3239482 - RNA, 15 nt, Human
ccacuucaaaacaaa

SEQ ID NO: 3239483 - RNA, 14 nt, Human
ccacuucaaaacaa

SEQ ID NO: 3239484 - RNA, 20 nt, Human
ccacuuagccuuucuuuucu

SEQ ID NO: 3239485 - RNA, 21 nt, Human
ccacuuagaaauugcauuucc

SEQ ID NO: 3239486 - RNA, 13 nt, Human
ccacugcagaaga

SEQ ID NO: 3239487 - RNA, 18 nt, Human
ccacugcagaagacagua

SEQ ID NO: 3239488 - RNA, 22 nt, Human
ccacucccagcaucgcacucug

SEQ ID NO: 3239489 - RNA, 19 nt, Human
ccacuuagaaauugcauuu

SEQ ID NO: 3239490 - RNA, 23 nt, Human
ccacugcacuccagccuggguga

SEQ ID NO: 3239491 - RNA, 20 nt, Human
ccagacaccuugacagggca

SEQ ID NO: 3239492 - RNA, 18 nt, Human
ccagacacaaacugccaa

SEQ ID NO: 3239493 - RNA, 12 nt, Human
ccagacacaaac

SEQ ID NO: 3239494 - RNA, 23 nt, Human
ccagacaagcuguugaccaggca

SEQ ID NO: 3239495 - RNA, 15 nt, Human
ccagacaagcuguug

SEQ ID NO: 3239496 - RNA, 21 nt, Human
ccagacaccuugacagggcac

SEQ ID NO: 3239497 - RNA, 21 nt, Human
ccagaauuucccaaagcagug

SEQ ID NO: 3239498 - RNA, 18 nt, Human
ccagaauuucccaaagca

SEQ ID NO: 3239499 - RNA, 12 nt, Human
ccagaauuuccc

SEQ ID NO: 3239500 - RNA, 19 nt, Human
ccagaauuucccaaagcag

SEQ ID NO: 3239501 - RNA, 13 nt, Human
ccagaauuucaaa

SEQ ID NO: 3239502 - RNA, 14 nt, Human
ccagaauuauuuuu

SEQ ID NO: 3239503 - RNA, 16 nt, Human
ccagaaugcuuuagga

SEQ ID NO: 3239504 - RNA, 23 nt, Human
ccagaauggucuuucuaaugugu

SEQ ID NO: 3239505 - RNA, 17 nt, Human
ccagaccccuggcuuuu

SEQ ID NO: 3239506 - RNA, 16 nt, Human
ccagaccccuggcuuu

SEQ ID NO: 3239507 - RNA, 15 nt, Human
ccagaccccuggcuu

SEQ ID NO: 3239508 - RNA, 14 nt, Human
ccagaccccuggcu

SEQ ID NO: 3239509 - RNA, 16 nt, Human
ccacacccucacugcu

SEQ ID NO: 3239510 - RNA, 22 nt, Human
ccacacccagcccacuucugcc

SEQ ID NO: 3239511 - RNA, 21 nt, Human
ccacacccagcccacuucugc

SEQ ID NO: 3239512 - RNA, 15 nt, Human
ccacacccagcccac

SEQ ID NO: 3239513 - RNA, 20 nt, Human
ccacacccagcccacuucug

SEQ ID NO: 3239514 - RNA, 14 nt, Human
ccacaccagcccca

SEQ ID NO: 3239515 - RNA, 13 nt, Human
ccacaccagcccc

SEQ ID NO: 3239516 - RNA, 20 nt, Human
ccacacagacuugggcaggg

SEQ ID NO: 3239517 - RNA, 14 nt, Human
ccacacaugcaagg

SEQ ID NO: 3239518 - RNA, 20 nt, Human
ccacacaugcaagggaugaa

SEQ ID NO: 3239519 - RNA, 20 nt, Human
ccacacauuucacugucugu

SEQ ID NO: 3239520 - RNA, 19 nt, Human
ccacacauuucacugucug

SEQ ID NO: 3239521 - RNA, 22 nt, Human
ccaauaugugauuuuuuuuccc

SEQ ID NO: 3239522 - RNA, 22 nt, Human
ccacacguaaugaaacuuggau

SEQ ID NO: 3239523 - RNA, 14 nt, Human
ccacagcugcucaa

SEQ ID NO: 3239524 - RNA, 12 nt, Human
ccacacuccagc

SEQ ID NO: 3239525 - RNA, 16 nt, Human
ccacaggaucagucug

SEQ ID NO: 3239526 - RNA, 16 nt, Human
ccacaggcccuuccuc

SEQ ID NO: 3239527 - RNA, 15 nt, Human
ccacaggcccuuccu

SEQ ID NO: 3239528 - RNA, 16 nt, Human
ccacaggcauguccca

SEQ ID NO: 3239529 - RNA, 22 nt, Human
ccacaggcccuuccucuccacu

SEQ ID NO: 3239530 - RNA, 19 nt, Human
ccacaggcccuuccucucc

SEQ ID NO: 3239531 - RNA, 18 nt, Human
ccacaggcccuuccucuc

SEQ ID NO: 3239532 - RNA, 17 nt, Human
ccacaggcccuuccucu

SEQ ID NO: 3239533 - RNA, 23 nt, Human
ccacaggcccuuccucuccacug

SEQ ID NO: 3239534 - RNA, 18 nt, Human
ccacaggcaugucccaug

SEQ ID NO: 3239535 - RNA, 21 nt, Human
ccaccaacauacucccaucug

SEQ ID NO: 3239536 - RNA, 22 nt, Human
ccacauguuacuggauaaauug

SEQ ID NO: 3239537 - RNA, 15 nt, Human
ccaccaacccucaga

SEQ ID NO: 3239538 - RNA, 17 nt, Human
ccacaucuugcucugcu

SEQ ID NO: 3239539 - RNA, 18 nt, Human
ccacaucuugcucugcug

SEQ ID NO: 3239540 - RNA, 19 nt, Human
ccacaucuugcucugcuga

SEQ ID NO: 3239541 - RNA, 16 nt, Human
ccacaugccaggggcc

SEQ ID NO: 3239542 - RNA, 16 nt, Human
ccacauuccugaugcu

SEQ ID NO: 3239543 - RNA, 16 nt, Human
ccacaugugcacaugc

SEQ ID NO: 3239544 - RNA, 18 nt, Human
ccacagguaauuucuccu

SEQ ID NO: 3239545 - RNA, 14 nt, Human
ccacaggugcccgc

SEQ ID NO: 3239546 - RNA, 23 nt, Human
ccacaguauauuuuauuucaaug

SEQ ID NO: 3239547 - RNA, 14 nt, Human
ccacaucccucucu

SEQ ID NO: 3239548 - RNA, 21 nt, Human
ccacaucccucucugcuggac

SEQ ID NO: 3239549 - RNA, 21 nt, Human
ccacauccggggccagcuccg

SEQ ID NO: 3239550 - RNA, 19 nt, Human
ccacagucucccccacccu

SEQ ID NO: 3239551 - RNA, 21 nt, Human
ccacaguguaccauuaaaaua

SEQ ID NO: 3239552 - RNA, 16 nt, Human
ccacauccacagucuc

SEQ ID NO: 3239553 - RNA, 12 nt, Human
ccacauccacag

SEQ ID NO: 3239554 - RNA, 16 nt, Human
ccaauauucauagcag

SEQ ID NO: 3239555 - RNA, 17 nt, Human
ccacccccacccaaggg

SEQ ID NO: 3239556 - RNA, 23 nt, Human
ccacccaggagccccgaggccuu

SEQ ID NO: 3239557 - RNA, 17 nt, Human
ccacccaagcaggaggc

SEQ ID NO: 3239558 - RNA, 21 nt, Human
ccacccaggagccccgaggcc

SEQ ID NO: 3239559 - RNA, 15 nt, Human
ccacccaagcaggag

SEQ ID NO: 3239560 - RNA, 16 nt, Human
ccacccaaagcagugg

SEQ ID NO: 3239561 - RNA, 13 nt, Human
ccacccaaagcag

SEQ ID NO: 3239562 - RNA, 20 nt, Human
ccaagccuggucagcccaaa

SEQ ID NO: 3239563 - RNA, 19 nt, Human
ccaagccuggucagcccaa

SEQ ID NO: 3239564 - RNA, 19 nt, Human
ccaagccuuggcucuaccc

SEQ ID NO: 3239565 - RNA, 15 nt, Human
ccaagccuggcaagg

SEQ ID NO: 3239566 - RNA, 22 nt, Human
ccaagccuacuuuugccauuga

SEQ ID NO: 3239567 - RNA, 13 nt, Human
ccaagccguggcu

SEQ ID NO: 3239568 - RNA, 15 nt, Human
ccaagcucccaggca

SEQ ID NO: 3239569 - RNA, 16 nt, Human
ccaagcucccaggcau

SEQ ID NO: 3239570 - RNA, 22 nt, Human
ccaagcucccaggcauucccca

SEQ ID NO: 3239571 - RNA, 17 nt, Human
ccaaggccaaaggaagc

SEQ ID NO: 3239572 - RNA, 14 nt, Human
ccaagcucccaggc

SEQ ID NO: 3239573 - RNA, 13 nt, Human
ccaagcgcccugg

SEQ ID NO: 3239574 - RNA, 16 nt, Human
ccaagcgcccuggccc

SEQ ID NO: 3239575 - RNA, 14 nt, Human
ccaagcgcccuggc

SEQ ID NO: 3239576 - RNA, 22 nt, Human
ccaagcgcccuggcccccacau

SEQ ID NO: 3239577 - RNA, 17 nt, Human
ccaagcgcccuggcccc

SEQ ID NO: 3239578 - RNA, 22 nt, Human
ccaagcauaccaacacgagcag

SEQ ID NO: 3239579 - RNA, 20 nt, Human
ccaagguagaaugaccuugu

SEQ ID NO: 3239580 - RNA, 19 nt, Human
ccaagggguccccuccagg

SEQ ID NO: 3239581 - RNA, 22 nt, Human
ccaaggggaauguuugccucug

SEQ ID NO: 3239582 - RNA, 19 nt, Human
ccaagggccuggccugagc

SEQ ID NO: 3239583 - RNA, 16 nt, Human
ccaagggccuggccug

SEQ ID NO: 3239584 - RNA, 18 nt, Human
ccaagggccuggccugag

SEQ ID NO: 3239585 - RNA, 18 nt, Human
ccaaggccaaaggaagca

SEQ ID NO: 3239586 - RNA, 21 nt, Human
ccaaggccaaaggaagcacau

SEQ ID NO: 3239587 - RNA, 16 nt, Human
ccaaggccaaaggaag

SEQ ID NO: 3239588 - RNA, 15 nt, Human
ccaagggccuggccu

SEQ ID NO: 3239589 - RNA, 23 nt, Human
ccaagguuuggggaagaacgaag

SEQ ID NO: 3239590 - RNA, 13 nt, Human
ccaaggugggagg

SEQ ID NO: 3239591 - RNA, 15 nt, Human
ccaaggugauguugu

SEQ ID NO: 3239592 - RNA, 20 nt, Human
ccaagucaagugaaaaagga

SEQ ID NO: 3239593 - RNA, 14 nt, Human
ccaaguacacugag

SEQ ID NO: 3239594 - RNA, 22 nt, Human
ccaaguuuugugaaauuuuuca

SEQ ID NO: 3239595 - RNA, 17 nt, Human
ccaaguuuugugaaauu

SEQ ID NO: 3239596 - RNA, 16 nt, Human
ccaaguuuugugaaau

SEQ ID NO: 3239597 - RNA, 12 nt, Human
ccaaguuuugug

SEQ ID NO: 3239598 - RNA, 22 nt, Human
ccaauaguuguugauuggcagg

SEQ ID NO: 3239599 - RNA, 16 nt, Human
ccaauaggcaaauuaa

SEQ ID NO: 3239600 - RNA, 18 nt, Human
ccaauaggcaaauuaauc

SEQ ID NO: 3239601 - RNA, 19 nt, Human
ccaauaggcaaauuaauca

SEQ ID NO: 3239602 - RNA, 17 nt, Human
ccaauaccccauggacc

SEQ ID NO: 3239603 - RNA, 16 nt, Human
ccaauaccccauggac

SEQ ID NO: 3239604 - RNA, 14 nt, Human
ccaauaccccaugg

SEQ ID NO: 3239605 - RNA, 19 nt, Human
ccaacaagaauaaaggcag

SEQ ID NO: 3239606 - RNA, 21 nt, Human
ccaacaagaauaaaggcagcu

SEQ ID NO: 3239607 - RNA, 23 nt, Human
ccaaauuucauaccuaucaucuu

SEQ ID NO: 3239608 - RNA, 23 nt, Human
ccaaauuuuaauuuuugcuuuua

SEQ ID NO: 3239609 - RNA, 17 nt, Human
ccaacauacucccaucu

SEQ ID NO: 3239610 - RNA, 18 nt, Human
ccaacauacucccaucug

SEQ ID NO: 3239611 - RNA, 19 nt, Human
ccaacauacucccaucugu

SEQ ID NO: 3239612 - RNA, 20 nt, Human
ccaacauacucccaucugug

SEQ ID NO: 3239613 - RNA, 16 nt, Human
ccaacauacucccauc

SEQ ID NO: 3239614 - RNA, 20 nt, Human
ccaacagccacucagaaaag

SEQ ID NO: 3239615 - RNA, 21 nt, Human
ccaacauacucccaucuguga

SEQ ID NO: 3239616 - RNA, 22 nt, Human
ccaacauacucccaucugugaa

SEQ ID NO: 3239617 - RNA, 20 nt, Human
ccaaccaaguggcucccaca

SEQ ID NO: 3239618 - RNA, 20 nt, Human
ccaacagguagcauagcucu

SEQ ID NO: 3239619 - RNA, 17 nt, Human
ccaacaggggcuccaug

SEQ ID NO: 3239620 - RNA, 21 nt, Human
ccaaccacacuugucggcucc

SEQ ID NO: 3239621 - RNA, 17 nt, Human
ccaaagcgaauuuuaaa

SEQ ID NO: 3239622 - RNA, 15 nt, Human
ccaaagcuaggccug

SEQ ID NO: 3239623 - RNA, 17 nt, Human
ccaaagcuaggccuggc

SEQ ID NO: 3239624 - RNA, 16 nt, Human
ccaaagcuaggccugg

SEQ ID NO: 3239625 - RNA, 21 nt, Human
ccaaagcuaggccuggccaga

SEQ ID NO: 3239626 - RNA, 15 nt, Human
ccaaaggaagcacau

SEQ ID NO: 3239627 - RNA, 23 nt, Human
ccaaaggaagcacaugccucucu

SEQ ID NO: 3239628 - RNA, 14 nt, Human
ccaaagccaaugug

SEQ ID NO: 3239629 - RNA, 23 nt, Human
ccaaagcaguggagcccaggagu

SEQ ID NO: 3239630 - RNA, 12 nt, Human
ccaaacauuaau

SEQ ID NO: 3239631 - RNA, 19 nt, Human
ccaaagcaguggagcccag

SEQ ID NO: 3239632 - RNA, 17 nt, Human
ccaaagccuccuccagc

SEQ ID NO: 3239633 - RNA, 22 nt, Human
ccaaagccuccuccagccgcca

SEQ ID NO: 3239634 - RNA, 19 nt, Human
ccaaagcagugcaugcugu

SEQ ID NO: 3239635 - RNA, 23 nt, Human
ccaaagcagugcaugcugucccu

SEQ ID NO: 3239636 - RNA, 19 nt, Human
ccaaagccaaagcuaggcc

SEQ ID NO: 3239637 - RNA, 20 nt, Human
ccaaacucaccugccccuca

SEQ ID NO: 3239638 - RNA, 17 nt, Human
ccaaacagugcuguuuc

SEQ ID NO: 3239639 - RNA, 15 nt, Human
ccaagaggcugcagc

SEQ ID NO: 3239640 - RNA, 14 nt, Human
ccaagaggcugcag

SEQ ID NO: 3239641 - RNA, 21 nt, Human
ccaagacuuauuuucacaugu

SEQ ID NO: 3239642 - RNA, 16 nt, Human
ccaagaggcugcagcc

SEQ ID NO: 3239643 - RNA, 23 nt, Human
ccaagagguuuggcuccugccca

SEQ ID NO: 3239644 - RNA, 22 nt, Human
ccaagagguuuggcuccugccc

SEQ ID NO: 3239645 - RNA, 21 nt, Human
ccaagagguuuggcuccugcc

SEQ ID NO: 3239646 - RNA, 21 nt, Human
ccaagaguggccccaccuggc

SEQ ID NO: 3239647 - RNA, 15 nt, Human
ccaagaguggcccca

SEQ ID NO: 3239648 - RNA, 13 nt, Human
ccaagaguggccc

SEQ ID NO: 3239649 - RNA, 20 nt, Human
ccaagaguggccccaccugg

SEQ ID NO: 3239650 - RNA, 19 nt, Human
ccaagaguggccccaccug

SEQ ID NO: 3239651 - RNA, 18 nt, Human
ccaagaguggccccaccu

SEQ ID NO: 3239652 - RNA, 16 nt, Human
ccaagaguggccccac

SEQ ID NO: 3239653 - RNA, 22 nt, Human
ccaaccccucgcccagucccag

SEQ ID NO: 3239654 - RNA, 18 nt, Human
ccaaccccucgcccaguc

SEQ ID NO: 3239655 - RNA, 17 nt, Human
ccaaccccucgcccagu

SEQ ID NO: 3239656 - RNA, 15 nt, Human
ccaagaagcccagga

SEQ ID NO: 3239657 - RNA, 12 nt, Human
ccaacccucauc

SEQ ID NO: 3239658 - RNA, 15 nt, Human
ccaacccucagagcc

SEQ ID NO: 3239659 - RNA, 14 nt, Human
ccaacccucagagc

SEQ ID NO: 3239660 - RNA, 19 nt, Human
ccaagaagcccaggaaagg

SEQ ID NO: 3239661 - RNA, 20 nt, Human
ccaagaagcccaggaaaggc

SEQ ID NO: 3239662 - RNA, 19 nt, Human
ccaagaauagaugcugacu

SEQ ID NO: 3239663 - RNA, 20 nt, Human
ccaagaauagaugcugacug

SEQ ID NO: 3239664 - RNA, 17 nt, Human
ccaagaaguuuaaggaa

SEQ ID NO: 3239665 - RNA, 18 nt, Human
ccaaacaggcccuccucc

SEQ ID NO: 3239666 - RNA, 16 nt, Human
ccaaacaggcccuccu

SEQ ID NO: 3239667 - RNA, 17 nt, Human
ccaaacucaccugcccc

SEQ ID NO: 3239668 - RNA, 19 nt, Human
ccaaacauccuacaagaca

SEQ ID NO: 3239669 - RNA, 20 nt, Human
ccaaacauccuacaagacac

SEQ ID NO: 3239670 - RNA, 20 nt, Human
cauuuuucccaggcaaauaa

SEQ ID NO: 3239671 - RNA, 21 nt, Human
cauuuuguguugaagagcagc

SEQ ID NO: 3239672 - RNA, 12 nt, Human
cauuuuucaaua

SEQ ID NO: 3239673 - RNA, 21 nt, Human
cauuuuucaaaaaguaaaaag

SEQ ID NO: 3239674 - RNA, 16 nt, Human
cauuuuagcuaauuua

SEQ ID NO: 3239675 - RNA, 13 nt, Human
cauuuuaaaaagu

SEQ ID NO: 3239676 - RNA, 18 nt, Human
cauuuguuugguuauagu

SEQ ID NO: 3239677 - RNA, 18 nt, Human
cauuuuguguugaagagc

SEQ ID NO: 3239678 - RNA, 12 nt, Human
cauuuuguaaua

SEQ ID NO: 3239679 - RNA, 16 nt, Human
cauuuuguaauaauaa

SEQ ID NO: 3239680 - RNA, 13 nt, Human
cauuuuguaauaa

SEQ ID NO: 3239681 - RNA, 13 nt, Human
cauuugcuccuuu

SEQ ID NO: 3239682 - RNA, 14 nt, Human
cauuugcuccuuuc

SEQ ID NO: 3239683 - RNA, 18 nt, Human
cauuugagcagggcucag

SEQ ID NO: 3239684 - RNA, 17 nt, Human
cauuugagcagggcuca

SEQ ID NO: 3239685 - RNA, 20 nt, Human
cauuugagcagggcucagcg

SEQ ID NO: 3239686 - RNA, 16 nt, Human
cauuugagcagggcuc

SEQ ID NO: 3239687 - RNA, 21 nt, Human
cauuugaaaccccuguaggcc

SEQ ID NO: 3239688 - RNA, 19 nt, Human
cauuugaaaccccuguagg

SEQ ID NO: 3239689 - RNA, 15 nt, Human
cauuguagagcuucu

SEQ ID NO: 3239690 - RNA, 21 nt, Human
cauugccguggcaucuuaaaa

SEQ ID NO: 3239691 - RNA, 23 nt, Human
cauugccccaaauggauuccugu

SEQ ID NO: 3239692 - RNA, 22 nt, Human
cauugccccaaauggauuccug

SEQ ID NO: 3239693 - RNA, 21 nt, Human
cauuguagagcuucuggcacu

SEQ ID NO: 3239694 - RNA, 19 nt, Human
cauuguagagcuucuggca

SEQ ID NO: 3239695 - RNA, 17 nt, Human
cauuguagagcuucugg

SEQ ID NO: 3239696 - RNA, 16 nt, Human
cauuguagagcuucug

SEQ ID NO: 3239697 - RNA, 19 nt, Human
cauuguauagauauaauga

SEQ ID NO: 3239698 - RNA, 20 nt, Human
cauuguauagauauaaugaa

SEQ ID NO: 3239699 - RNA, 24 nt, Human
cauuguauagauauaaugaacaaa

SEQ ID NO: 3239700 - RNA, 14 nt, Human
cacccaagggccug

SEQ ID NO: 3239701 - RNA, 15 nt, Human
cacccaagggccugg

SEQ ID NO: 3239702 - RNA, 15 nt, Human
cauuguccagagcug

SEQ ID NO: 3239703 - RNA, 14 nt, Human
cauuguccagagcu

SEQ ID NO: 3239704 - RNA, 19 nt, Human
cauugucccugaagagaag

SEQ ID NO: 3239705 - RNA, 22 nt, Human
cauuguccagagcugcuucccc

SEQ ID NO: 3239706 - RNA, 19 nt, Human
cauuguccccaaugaauau

SEQ ID NO: 3239707 - RNA, 20 nt, Human
cauuguccagagcugcuucc

SEQ ID NO: 3239708 - RNA, 18 nt, Human
cauuguccagagcugcuu

SEQ ID NO: 3239709 - RNA, 16 nt, Human
cauuguccagagcugc

SEQ ID NO: 3239710 - RNA, 15 nt, Human
cauugucugucugca

SEQ ID NO: 3239711 - RNA, 18 nt, Human
cauuguuggccaaagcca

SEQ ID NO: 3239712 - RNA, 17 nt, Human
cauuguuggacauuugg

SEQ ID NO: 3239713 - RNA, 17 nt, Human
cauuguuggccaaagcc

SEQ ID NO: 3239714 - RNA, 20 nt, Human
cauuuccugacagaaggacu

SEQ ID NO: 3239715 - RNA, 13 nt, Human
cauuuccugacag

SEQ ID NO: 3239716 - RNA, 17 nt, Human
cauuuaggccaugggac

SEQ ID NO: 3239717 - RNA, 17 nt, Human
cauuuagggaguauucu

SEQ ID NO: 3239718 - RNA, 20 nt, Human
cauuuagggaguauucuaau

SEQ ID NO: 3239719 - RNA, 21 nt, Human
cauuuagggaguauucuaaua

SEQ ID NO: 3239720 - RNA, 13 nt, Human
cauuuaaaagaca

SEQ ID NO: 3239721 - RNA, 21 nt, Human
cauuuaaaacauuaaaauaua

SEQ ID NO: 3239722 - RNA, 20 nt, Human
cauuuaaaacauuaaaauau

SEQ ID NO: 3239723 - RNA, 13 nt, Human
cauuuccuguguc

SEQ ID NO: 3239724 - RNA, 12 nt, Human
cauuuccugugu

SEQ ID NO: 3239725 - RNA, 18 nt, Human
cauuucuaauuccuguuu

SEQ ID NO: 3239726 - RNA, 16 nt, Human
cauuucuaauuccugu

SEQ ID NO: 3239727 - RNA, 20 nt, Human
ccgacuugugcacaggcaga

SEQ ID NO: 3239728 - RNA, 19 nt, Human
ccgacuugugcacaggcag

SEQ ID NO: 3239729 - RNA, 18 nt, Human
ccgacuugugcacaggca

SEQ ID NO: 3239730 - RNA, 19 nt, Human
cccuuuuuuggcugcugaa

SEQ ID NO: 3239731 - RNA, 15 nt, Human
cccuuuuuuccuuuc

SEQ ID NO: 3239732 - RNA, 21 nt, Human
cccuuuuuuccuuuccaccuu

SEQ ID NO: 3239733 - RNA, 17 nt, Human
ccgagaaggaagccucc

SEQ ID NO: 3239734 - RNA, 18 nt, Human
ccgagauagccaaggcca

SEQ ID NO: 3239735 - RNA, 17 nt, Human
ccgagacggcacugaga

SEQ ID NO: 3239736 - RNA, 19 nt, Human
ccgagauagccaaggccaa

SEQ ID NO: 3239737 - RNA, 22 nt, Human
ccgagauagccaaggccaaagg

SEQ ID NO: 3239738 - RNA, 11 nt, Human
cccuuuuccuu

SEQ ID NO: 3239739 - RNA, 9 nt, Human
cccuuuucc

SEQ ID NO: 3239740 - RNA, 13 nt, Human
cccuuuucuguuu

SEQ ID NO: 3239741 - RNA, 17 nt, Human
cccuuuuuuggcugcug

SEQ ID NO: 3239742 - RNA, 18 nt, Human
cccuuuuuuggcugcuga

SEQ ID NO: 3239743 - RNA, 17 nt, Human
ccgaggccuucucugaa

SEQ ID NO: 3239744 - RNA, 18 nt, Human
ccgagaucacgccacugc

SEQ ID NO: 3239745 - RNA, 19 nt, Human
ccgauccuccccuggacuc

SEQ ID NO: 3239746 - RNA, 20 nt, Human
ccgauccuccccuggacucc

SEQ ID NO: 3239747 - RNA, 23 nt, Human
ccgaguguguuucauccuuccca

SEQ ID NO: 3239748 - RNA, 22 nt, Human
ccgaguguguuucauccuuccc

SEQ ID NO: 3239749 - RNA, 22 nt, Human
ccgagucucuucuccacuggau

SEQ ID NO: 3239750 - RNA, 21 nt, Human
ccgagucucuucuccacugga

SEQ ID NO: 3239751 - RNA, 16 nt, Human
ccgccccugagcccac

SEQ ID NO: 3239752 - RNA, 15 nt, Human
ccgccccugagccca

SEQ ID NO: 3239753 - RNA, 17 nt, Human
ccgccccugagcccacu

SEQ ID NO: 3239754 - RNA, 14 nt, Human
ccgccccugagccc

SEQ ID NO: 3239755 - RNA, 13 nt, Human
ccgccccugagcc

SEQ ID NO: 3239756 - RNA, 15 nt, Human
ccgaucgccagcaaa

SEQ ID NO: 3239757 - RNA, 20 nt, Human
ccgaugcaaacauuggaaga

SEQ ID NO: 3239758 - RNA, 17 nt, Human
ccgaugcaaacauugga

SEQ ID NO: 3239759 - RNA, 20 nt, Human
cccuuccucuccacugccuu

SEQ ID NO: 3239760 - RNA, 17 nt, Human
cccuuccucuccacugc

SEQ ID NO: 3239761 - RNA, 16 nt, Human
cccuuccucuccacug

SEQ ID NO: 3239762 - RNA, 17 nt, Human
cccuuaccacugcucug

SEQ ID NO: 3239763 - RNA, 21 nt, Human
cccuuaccacugcucugauga

SEQ ID NO: 3239764 - RNA, 15 nt, Human
cccuuccuccauccu

SEQ ID NO: 3239765 - RNA, 13 nt, Human
cccuuccucucca

SEQ ID NO: 3239766 - RNA, 21 nt, Human
cccuuccuaauuccacagcug

SEQ ID NO: 3239767 - RNA, 17 nt, Human
cccuugccgucuaccug

SEQ ID NO: 3239768 - RNA, 18 nt, Human
cccuugccgucuaccuga

SEQ ID NO: 3239769 - RNA, 12 nt, Human
cccuugcagccg

SEQ ID NO: 3239770 - RNA, 12 nt, Human
cccuuggcucuc

SEQ ID NO: 3239771 - RNA, 18 nt, Human
cccuuggggagcaggcuc

SEQ ID NO: 3239772 - RNA, 14 nt, Human
cccuugugguccca

SEQ ID NO: 3239773 - RNA, 16 nt, Human
cccuuguggucccacc

SEQ ID NO: 3239774 - RNA, 18 nt, Human
cccuuguggucccacccc

SEQ ID NO: 3239775 - RNA, 20 nt, Human
cccuuugacgccaucccagc

SEQ ID NO: 3239776 - RNA, 21 nt, Human
cccuuucuucucccccauccu

SEQ ID NO: 3239777 - RNA, 17 nt, Human
cccuuucuucuccccca

SEQ ID NO: 3239778 - RNA, 14 nt, Human
cccuuucuucuccc

SEQ ID NO: 3239779 - RNA, 13 nt, Human
cccuuucuuccuc

SEQ ID NO: 3239780 - RNA, 12 nt, Human
cccuuucuuccu

SEQ ID NO: 3239781 - RNA, 22 nt, Human
cccuuucugggcaccggggccu

SEQ ID NO: 3239782 - RNA, 18 nt, Human
cccuuucuacuuccaaga

SEQ ID NO: 3239783 - RNA, 17 nt, Human
cccuuuguccuccugcu

SEQ ID NO: 3239784 - RNA, 22 nt, Human
cccuuuguccuccugcugccag

SEQ ID NO: 3239785 - RNA, 21 nt, Human
cccuuuguccuccugcugcca

SEQ ID NO: 3239786 - RNA, 21 nt, Human
cccccgcugucagccauuccu

SEQ ID NO: 3239787 - RNA, 12 nt, Human
ccccccugucac

SEQ ID NO: 3239788 - RNA, 13 nt, Human
cccccucugcccu

SEQ ID NO: 3239789 - RNA, 14 nt, Human
cccccucugcccug

SEQ ID NO: 3239790 - RNA, 16 nt, Human
cccccucugcccugcg

SEQ ID NO: 3239791 - RNA, 16 nt, Human
ccccgucccccucugg

SEQ ID NO: 3239792 - RNA, 20 nt, Human
ccccgucccccucuggcucc

SEQ ID NO: 3239793 - RNA, 21 nt, Human
ccccgucucugguuccucccc

SEQ ID NO: 3239794 - RNA, 13 nt, Human
ccccgucucaggu

SEQ ID NO: 3239795 - RNA, 13 nt, Human
ccccccacuccca

SEQ ID NO: 3239796 - RNA, 12 nt, Human
ccccccagcuuc

SEQ ID NO: 3239797 - RNA, 16 nt, Human
cccccaucucuucugg

SEQ ID NO: 3239798 - RNA, 11 nt, Human
cccccaggucu

SEQ ID NO: 3239799 - RNA, 12 nt, Human
cccccagcccca

SEQ ID NO: 3239800 - RNA, 19 nt, Human
cccccagcuucacuucuga

SEQ ID NO: 3239801 - RNA, 18 nt, Human
cccccagcuuccagcagg

SEQ ID NO: 3239802 - RNA, 14 nt, Human
cccccagcuuccag

SEQ ID NO: 3239803 - RNA, 12 nt, Human
ccccacugguga

SEQ ID NO: 3239804 - RNA, 13 nt, Human
ccccacuggugac

SEQ ID NO: 3239805 - RNA, 18 nt, Human
ccccagcccuuccucugc

SEQ ID NO: 3239806 - RNA, 19 nt, Human
ccccagcccuccuuaucaa

SEQ ID NO: 3239807 - RNA, 20 nt, Human
ccccagcgcugacgugucag

SEQ ID NO: 3239808 - RNA, 19 nt, Human
ccccagcgagagucccugc

SEQ ID NO: 3239809 - RNA, 20 nt, Human
ccccagcccuuccucugcuc

SEQ ID NO: 3239810 - RNA, 22 nt, Human
ccccagccucaaauccaggacc

SEQ ID NO: 3239811 - RNA, 13 nt, Human
ccccaggaggcca

SEQ ID NO: 3239812 - RNA, 15 nt, Human
ccccagcuugggcag

SEQ ID NO: 3239813 - RNA, 21 nt, Human
ccccagcuucucagcucgcug

SEQ ID NO: 3239814 - RNA, 21 nt, Human
ccccagcuuccagcaggaggg

SEQ ID NO: 3239815 - RNA, 19 nt, Human
ccccagcuuccagcaggag

SEQ ID NO: 3239816 - RNA, 18 nt, Human
ccccagcuuccagcagga

SEQ ID NO: 3239817 - RNA, 10 nt, Human
ccccagcucc

SEQ ID NO: 3239818 - RNA, 11 nt, Human
ccccagcuccc

SEQ ID NO: 3239819 - RNA, 17 nt, Human
ccccagcuuccagcagg

SEQ ID NO: 3239820 - RNA, 16 nt, Human
ccccagcuuccagcag

SEQ ID NO: 3239821 - RNA, 14 nt, Human
ccccagcuuccagc

SEQ ID NO: 3239822 - RNA, 18 nt, Human
ccccagcuucacuucuga

SEQ ID NO: 3239823 - RNA, 14 nt, Human
ccccaggaggccag

SEQ ID NO: 3239824 - RNA, 15 nt, Human
ccccaggaggccagc

SEQ ID NO: 3239825 - RNA, 21 nt, Human
ccccaggaggccagccuugac

SEQ ID NO: 3239826 - RNA, 22 nt, Human
ccccaggaggccagccuugacc

SEQ ID NO: 3239827 - RNA, 23 nt, Human
cccccaaccaaguggcucccaca

SEQ ID NO: 3239828 - RNA, 16 nt, Human
ccccucagggucccug

SEQ ID NO: 3239829 - RNA, 13 nt, Human
ccccucccaggga

SEQ ID NO: 3239830 - RNA, 18 nt, Human
ccccucccccagccacuc

SEQ ID NO: 3239831 - RNA, 17 nt, Human
ccccucccccagccacu

SEQ ID NO: 3239832 - RNA, 19 nt, Human
cccugguggcagugggagc

SEQ ID NO: 3239833 - RNA, 16 nt, Human
cccugguggcaguggg

SEQ ID NO: 3239834 - RNA, 15 nt, Human
cccugguggcagugg

SEQ ID NO: 3239835 - RNA, 21 nt, Human
cccugguuuccugcccuggga

SEQ ID NO: 3239836 - RNA, 19 nt, Human
ccccuaaagccucaaaaca

SEQ ID NO: 3239837 - RNA, 15 nt, Human
ccccgucugccuggc

SEQ ID NO: 3239838 - RNA, 18 nt, Human
ccccucagggucccuggu

SEQ ID NO: 3239839 - RNA, 20 nt, Human
ccccucagggucccuggugg

SEQ ID NO: 3239840 - RNA, 17 nt, Human
ccccucagggucccugg

SEQ ID NO: 3239841 - RNA, 16 nt, Human
cccugugggcccccaa

SEQ ID NO: 3239842 - RNA, 15 nt, Human
cccugugggccccca

SEQ ID NO: 3239843 - RNA, 22 nt, Human
cccugguuuccugcccugggag

SEQ ID NO: 3239844 - RNA, 23 nt, Human
cccugguuuccugcccugggagg

SEQ ID NO: 3239845 - RNA, 15 nt, Human
cccuguuuguuucug

SEQ ID NO: 3239846 - RNA, 16 nt, Human
cccuguuucagaggcu

SEQ ID NO: 3239847 - RNA, 19 nt, Human
cccuguuucagaggcucag

SEQ ID NO: 3239848 - RNA, 18 nt, Human
cccugugggcccccaaau

SEQ ID NO: 3239849 - RNA, 13 nt, Human
cccugugugaaug

SEQ ID NO: 3239850 - RNA, 13 nt, Human
cccuguguuaauu

SEQ ID NO: 3239851 - RNA, 22 nt, Human
ccgggaggcagagguugcagug

SEQ ID NO: 3239852 - RNA, 13 nt, Human
ccggcuggccugg

SEQ ID NO: 3239853 - RNA, 15 nt, Human
ccgggcacucagaag

SEQ ID NO: 3239854 - RNA, 12 nt, Human
ccggcuggccug

SEQ ID NO: 3239855 - RNA, 12 nt, Human
ccggcugcccuu

SEQ ID NO: 3239856 - RNA, 23 nt, Human
ccgcuuucuacccagcgagcccu

SEQ ID NO: 3239857 - RNA, 14 nt, Human
ccgcuggggccagu

SEQ ID NO: 3239858 - RNA, 23 nt, Human
ccguuugauuugucacugcuuca

SEQ ID NO: 3239859 - RNA, 21 nt, Human
ccguuugauuugucacugcuu

SEQ ID NO: 3239860 - RNA, 13 nt, Human
ccuaaaaauuggu

SEQ ID NO: 3239861 - RNA, 15 nt, Human
ccuaaaaauaaagca

SEQ ID NO: 3239862 - RNA, 14 nt, Human
ccuaaaaauaaagc

SEQ ID NO: 3239863 - RNA, 12 nt, Human
ccuaaaaauaaa

SEQ ID NO: 3239864 - RNA, 11 nt, Human
ccuaaaaauaa

SEQ ID NO: 3239865 - RNA, 23 nt, Human
ccguggcuucccgcucagcccuc

SEQ ID NO: 3239866 - RNA, 21 nt, Human
ccguggcuucccgcucagccc

SEQ ID NO: 3239867 - RNA, 15 nt, Human
ccguggcuucccgcu

SEQ ID NO: 3239868 - RNA, 17 nt, Human
ccgugccuucagcucua

SEQ ID NO: 3239869 - RNA, 16 nt, Human
ccgugccuucagcucu

SEQ ID NO: 3239870 - RNA, 15 nt, Human
ccgugccuucagcuc

SEQ ID NO: 3239871 - RNA, 14 nt, Human
ccgugccuucagcu

SEQ ID NO: 3239872 - RNA, 17 nt, Human
ccgggcaaacuggccgc

SEQ ID NO: 3239873 - RNA, 16 nt, Human
ccgggaugggagccgg

SEQ ID NO: 3239874 - RNA, 19 nt, Human
ccgggccuggagaacuaga

SEQ ID NO: 3239875 - RNA, 19 nt, Human
ccuaaagccucaaaacaaa

SEQ ID NO: 3239876 - RNA, 13 nt, Human
ccuaaagccucaa

SEQ ID NO: 3239877 - RNA, 16 nt, Human
ccuaaagauuuugauc

SEQ ID NO: 3239878 - RNA, 13 nt, Human
ccuaauuccacag

SEQ ID NO: 3239879 - RNA, 12 nt, Human
ccuaaagagaua

SEQ ID NO: 3239880 - RNA, 15 nt, Human
ccuaaagauuuugau

SEQ ID NO: 3239881 - RNA, 14 nt, Human
ccuaauuccacagc

SEQ ID NO: 3239882 - RNA, 15 nt, Human
ccuaauuccacagcu

SEQ ID NO: 3239883 - RNA, 16 nt, Human
ccuaauuccacagcug

SEQ ID NO: 3239884 - RNA, 17 nt, Human
ccuaauuccacagcugc

SEQ ID NO: 3239885 - RNA, 17 nt, Human
ccuaauucuaugccugu

SEQ ID NO: 3239886 - RNA, 12 nt, Human
ccuaccugguaa

SEQ ID NO: 3239887 - RNA, 14 nt, Human
ccuaccccugacuu

SEQ ID NO: 3239888 - RNA, 21 nt, Human
ccuagagagugugauguucac

SEQ ID NO: 3239889 - RNA, 19 nt, Human
ccuaucaaaaagauaucaa

SEQ ID NO: 3239890 - RNA, 16 nt, Human
ccuaucaaaaagauau

SEQ ID NO: 3239891 - RNA, 14 nt, Human
ccuauauuuuccug

SEQ ID NO: 3239892 - RNA, 17 nt, Human
ccuaucagaaguuucuc

SEQ ID NO: 3239893 - RNA, 14 nt, Human
ccuaucauguuaac

SEQ ID NO: 3239894 - RNA, 17 nt, Human
ccucacaguccuuacca

SEQ ID NO: 3239895 - RNA, 12 nt, Human
ccucaauuucaa

SEQ ID NO: 3239896 - RNA, 23 nt, Human
ccucaagugauucuccugccuca

SEQ ID NO: 3239897 - RNA, 19 nt, Human
ccuauguagacaauauaag

SEQ ID NO: 3239898 - RNA, 12 nt, Human
ccucaccccacu

SEQ ID NO: 3239899 - RNA, 20 nt, Human
ccucacaguccuuaccagca

SEQ ID NO: 3239900 - RNA, 22 nt, Human
ccucacaguccuuaccagcaga

SEQ ID NO: 3239901 - RNA, 15 nt, Human
ccucaccccacugug

SEQ ID NO: 3239902 - RNA, 17 nt, Human
ccucaccuuucccaucu

SEQ ID NO: 3239903 - RNA, 16 nt, Human
ccucacgugcaaagcc

SEQ ID NO: 3239904 - RNA, 14 nt, Human
ccucucacugccuc

SEQ ID NO: 3239905 - RNA, 12 nt, Human
ccucucacugcc

SEQ ID NO: 3239906 - RNA, 23 nt, Human
ccuccugugugugcgccuacagg

SEQ ID NO: 3239907 - RNA, 18 nt, Human
ccuccuuaucaaaggaca

SEQ ID NO: 3239908 - RNA, 20 nt, Human
ccuccuuaucaaaggacacc

SEQ ID NO: 3239909 - RNA, 12 nt, Human
ccucucccauca

SEQ ID NO: 3239910 - RNA, 16 nt, Human
ccucuccacugccuuc

SEQ ID NO: 3239911 - RNA, 14 nt, Human
ccucuccacugccu

SEQ ID NO: 3239912 - RNA, 13 nt, Human
ccucuccacugcc

SEQ ID NO: 3239913 - RNA, 12 nt, Human
ccucuccacugc

SEQ ID NO: 3239914 - RNA, 13 nt, Human
ccucucugcccua

SEQ ID NO: 3239915 - RNA, 18 nt, Human
ccucuccccgcaguguuu

SEQ ID NO: 3239916 - RNA, 23 nt, Human
ccucugaaaaccaauguucucuc

SEQ ID NO: 3239917 - RNA, 15 nt, Human
ccucugacacacagc

SEQ ID NO: 3239918 - RNA, 16 nt, Human
ccucugacacacagcu

SEQ ID NO: 3239919 - RNA, 22 nt, Human
ccucugcacuccccugcugggu

SEQ ID NO: 3239920 - RNA, 16 nt, Human
ccucugcauaaauauu

SEQ ID NO: 3239921 - RNA, 14 nt, Human
ccucugcacucccc

SEQ ID NO: 3239922 - RNA, 19 nt, Human
ccucugcacuccccugcug

SEQ ID NO: 3239923 - RNA, 20 nt, Human
ccucugcacuccccugcugg

SEQ ID NO: 3239924 - RNA, 21 nt, Human
ccucugcacuccccugcuggg

SEQ ID NO: 3239925 - RNA, 20 nt, Human
ccucugcacaagcugcaccc

SEQ ID NO: 3239926 - RNA, 17 nt, Human
ccucugcacaagcugca

SEQ ID NO: 3239927 - RNA, 19 nt, Human
ccucugcacaagcugcacc

SEQ ID NO: 3239928 - RNA, 11 nt, Human
ccucugcacaa

SEQ ID NO: 3239929 - RNA, 15 nt, Human
ccucugcacaagcug

SEQ ID NO: 3239930 - RNA, 17 nt, Human
ccucugacacacagcuc

SEQ ID NO: 3239931 - RNA, 15 nt, Human
ccucugcuuuuaucu

SEQ ID NO: 3239932 - RNA, 12 nt, Human
ccucugggacug

SEQ ID NO: 3239933 - RNA, 11 nt, Human
ccucugggccc

SEQ ID NO: 3239934 - RNA, 16 nt, Human
ccucuggcuccagcug

SEQ ID NO: 3239935 - RNA, 17 nt, Human
ccucuggcuccagcugg

SEQ ID NO: 3239936 - RNA, 16 nt, Human
ccucuggcucuacaca

SEQ ID NO: 3239937 - RNA, 13 nt, Human
ccuccuggacucc

SEQ ID NO: 3239938 - RNA, 13 nt, Human
ccuccugggcuaa

SEQ ID NO: 3239939 - RNA, 22 nt, Human
ccuccugugugugcgccuacag

SEQ ID NO: 3239940 - RNA, 15 nt, Human
ccuccugugugugcg

SEQ ID NO: 3239941 - RNA, 13 nt, Human
ccuccugugugug

SEQ ID NO: 3239942 - RNA, 18 nt, Human
ccuccuguggccugccag

SEQ ID NO: 3239943 - RNA, 14 nt, Human
ccuccuccuggacu

SEQ ID NO: 3239944 - RNA, 22 nt, Human
ccuccugaguugaagucaugcu

SEQ ID NO: 3239945 - RNA, 13 nt, Human
ccucccggugccc

SEQ ID NO: 3239946 - RNA, 15 nt, Human
ccucccggcccugcc

SEQ ID NO: 3239947 - RNA, 17 nt, Human
ccucccggcccugccug

SEQ ID NO: 3239948 - RNA, 22 nt, Human
ccucccggcccugccugcuggu

SEQ ID NO: 3239949 - RNA, 18 nt, Human
ccucccggcccugccugc

SEQ ID NO: 3239950 - RNA, 15 nt, Human
ccucccucccucuuu

SEQ ID NO: 3239951 - RNA, 13 nt, Human
ccucccucccucu

SEQ ID NO: 3239952 - RNA, 16 nt, Human
ccucccggugcccaag

SEQ ID NO: 3239953 - RNA, 16 nt, Human
ccucccucccucuuuc

SEQ ID NO: 3239954 - RNA, 15 nt, Human
ccuccucccacugcc

SEQ ID NO: 3239955 - RNA, 14 nt, Human
ccuccucccacugc

SEQ ID NO: 3239956 - RNA, 13 nt, Human
ccucccugccagu

SEQ ID NO: 3239957 - RNA, 22 nt, Human
ccuccucccacugcccacuggc

SEQ ID NO: 3239958 - RNA, 19 nt, Human
ccuccucccucccagcucc

SEQ ID NO: 3239959 - RNA, 21 nt, Human
ccucacuaggcuucugguuga

SEQ ID NO: 3239960 - RNA, 21 nt, Human
ccucacuaucccggcugcccu

SEQ ID NO: 3239961 - RNA, 16 nt, Human
ccucagaaaaugagua

SEQ ID NO: 3239962 - RNA, 14 nt, Human
ccucagcauccugg

SEQ ID NO: 3239963 - RNA, 17 nt, Human
ccucagcauccuggcac

SEQ ID NO: 3239964 - RNA, 16 nt, Human
ccucagcauccuggca

SEQ ID NO: 3239965 - RNA, 14 nt, Human
ccucaggccugggg

SEQ ID NO: 3239966 - RNA, 21 nt, Human
ccucaggccugggggcugggc

SEQ ID NO: 3239967 - RNA, 10 nt, Human
ccucaggccu

SEQ ID NO: 3239968 - RNA, 11 nt, Human
ccucaggccug

SEQ ID NO: 3239969 - RNA, 14 nt, Human
ccucagggucccug

SEQ ID NO: 3239970 - RNA, 14 nt, Human
ccucagucucccuc

SEQ ID NO: 3239971 - RNA, 15 nt, Human
ccucagucuggcccu

SEQ ID NO: 3239972 - RNA, 19 nt, Human
ccucaggugauccacccac

SEQ ID NO: 3239973 - RNA, 17 nt, Human
ccucaggugauccaccc

SEQ ID NO: 3239974 - RNA, 22 nt, Human
ccucaggugagaagcagaggaa

SEQ ID NO: 3239975 - RNA, 22 nt, Human
ccucaggugauccacccaccuc

SEQ ID NO: 3239976 - RNA, 22 nt, Human
ccucagggucccugguggcagc

SEQ ID NO: 3239977 - RNA, 21 nt, Human
ccucagguaaucgaccugccu

SEQ ID NO: 3239978 - RNA, 16 nt, Human
ccucaggugagaagca

SEQ ID NO: 3239979 - RNA, 22 nt, Human
ccucagguaaucgaccugccuc

SEQ ID NO: 3239980 - RNA, 23 nt, Human
ccucagguaaucgaccugccucg

SEQ ID NO: 3239981 - RNA, 15 nt, Human
ccugaggcagguccc

SEQ ID NO: 3239982 - RNA, 13 nt, Human
ccugacaaauuuu

SEQ ID NO: 3239983 - RNA, 18 nt, Human
ccugaggcagguccccag

SEQ ID NO: 3239984 - RNA, 12 nt, Human
ccugaggcccag

SEQ ID NO: 3239985 - RNA, 13 nt, Human
ccugaggcccaga

SEQ ID NO: 3239986 - RNA, 14 nt, Human
ccugaggcccagag

SEQ ID NO: 3239987 - RNA, 12 nt, Human
ccugacaacacu

SEQ ID NO: 3239988 - RNA, 14 nt, Human
ccugacaacacuca

SEQ ID NO: 3239989 - RNA, 15 nt, Human
ccugacaacacucau

SEQ ID NO: 3239990 - RNA, 16 nt, Human
ccugacaacacucauu

SEQ ID NO: 3239991 - RNA, 19 nt, Human
ccugaggcagguccccaga

SEQ ID NO: 3239992 - RNA, 17 nt, Human
ccugaggcuccacuugg

SEQ ID NO: 3239993 - RNA, 23 nt, Human
ccugaggcccuucucuccagccc

SEQ ID NO: 3239994 - RNA, 21 nt, Human
ccugaggcccuucucuccagc

SEQ ID NO: 3239995 - RNA, 22 nt, Human
ccugaggcccuucucuccagcc

SEQ ID NO: 3239996 - RNA, 16 nt, Human
ccugaggcccuucucu

SEQ ID NO: 3239997 - RNA, 17 nt, Human
ccugaggcccuucucuc

SEQ ID NO: 3239998 - RNA, 19 nt, Human
ccugaggcccuucucucca

SEQ ID NO: 3239999 - RNA, 20 nt, Human
ccugaggcccuucucuccag

SEQ ID NO: 3240000 - RNA, 18 nt, Human
ccugaggcuccacuuggu

SEQ ID NO: 3240001 - RNA, 20 nt, Human
ccugaggcuccacuuggucu

SEQ ID NO: 3240002 - RNA, 14 nt, Human
ccugaggcccuucu

SEQ ID NO: 3240003 - RNA, 14 nt, Human
ccugaugcuucuuc

SEQ ID NO: 3240004 - RNA, 19 nt, Human
ccugauugugucucuuggu

SEQ ID NO: 3240005 - RNA, 23 nt, Human
ccugauugugucucuugguccug

SEQ ID NO: 3240006 - RNA, 17 nt, Human
ccugaugcuucuucaga

SEQ ID NO: 3240007 - RNA, 18 nt, Human
ccugaugcuucuucagag

SEQ ID NO: 3240008 - RNA, 22 nt, Human
ccugaugcuucuucagagacuc

SEQ ID NO: 3240009 - RNA, 17 nt, Human
ccugaacaacgagccuu

SEQ ID NO: 3240010 - RNA, 23 nt, Human
ccugaaccacaggagaggauggc

SEQ ID NO: 3240011 - RNA, 17 nt, Human
ccugaagucacacagug

SEQ ID NO: 3240012 - RNA, 16 nt, Human
ccugaagucacacagu

SEQ ID NO: 3240013 - RNA, 13 nt, Human
ccugaaggccccg

SEQ ID NO: 3240014 - RNA, 15 nt, Human
ccugaagucacacag

SEQ ID NO: 3240015 - RNA, 19 nt, Human
ccugaauccaaaagaaaaa

SEQ ID NO: 3240016 - RNA, 18 nt, Human
ccugaaagaggaaugaag

SEQ ID NO: 3240017 - RNA, 13 nt, Human
ccugaaagaggaa

SEQ ID NO: 3240018 - RNA, 24 nt, Human
ccucuuuugcuugccaaaguacag

SEQ ID NO: 3240019 - RNA, 12 nt, Human
ccucuuuugugc

SEQ ID NO: 3240020 - RNA, 18 nt, Human
ccucuuuuguuguuucuu

SEQ ID NO: 3240021 - RNA, 23 nt, Human
ccugaaagaggaaugaaguacuc

SEQ ID NO: 3240022 - RNA, 22 nt, Human
ccucuuuggucuacacugugcu

SEQ ID NO: 3240023 - RNA, 19 nt, Human
ccucuuuggucuacacugu

SEQ ID NO: 3240024 - RNA, 19 nt, Human
ccucuuccucccucauucc

SEQ ID NO: 3240025 - RNA, 16 nt, Human
ccucuuccuccugaca

SEQ ID NO: 3240026 - RNA, 13 nt, Human
ccucuuccuccug

SEQ ID NO: 3240027 - RNA, 10 nt, Human
ccucuuccuc

SEQ ID NO: 3240028 - RNA, 16 nt, Human
ccucuuccucccucau

SEQ ID NO: 3240029 - RNA, 15 nt, Human
ccucuuccucccuca

SEQ ID NO: 3240030 - RNA, 17 nt, Human
ccucuuaugggcugggu

SEQ ID NO: 3240031 - RNA, 21 nt, Human
ccucuuagaagaauauuguau

SEQ ID NO: 3240032 - RNA, 23 nt, Human
ccucuuagaagaauauuguauug

SEQ ID NO: 3240033 - RNA, 21 nt, Human
ccucuucccugguaagaaaaa

SEQ ID NO: 3240034 - RNA, 17 nt, Human
ccucuguccaggcacug

SEQ ID NO: 3240035 - RNA, 14 nt, Human
ccucuguacagagc

SEQ ID NO: 3240036 - RNA, 15 nt, Human
ccucuguacagagcc

SEQ ID NO: 3240037 - RNA, 16 nt, Human
ccucuguacagagccc

SEQ ID NO: 3240038 - RNA, 17 nt, Human
ccucuguacagagccca

SEQ ID NO: 3240039 - RNA, 18 nt, Human
ccucuguacagagcccac

SEQ ID NO: 3240040 - RNA, 23 nt, Human
ccucuguacagagcccacgcccc

SEQ ID NO: 3240041 - RNA, 14 nt, Human
ccucuuaugggcug

SEQ ID NO: 3240042 - RNA, 15 nt, Human
ccucuuaugggcugg

SEQ ID NO: 3240043 - RNA, 16 nt, Human
ccucuuaugggcuggg

SEQ ID NO: 3240044 - RNA, 14 nt, Human
ccucuuagaaaaac

SEQ ID NO: 3240045 - RNA, 21 nt, Human
ccucuguucugcacacagcac

SEQ ID NO: 3240046 - RNA, 23 nt, Human
ccuuugacgccaucccagcccca

SEQ ID NO: 3240047 - RNA, 17 nt, Human
ccuuucuuuucuuucuu

SEQ ID NO: 3240048 - RNA, 17 nt, Human
ccuuucuucucccccau

SEQ ID NO: 3240049 - RNA, 12 nt, Human
ccuuucuucucc

SEQ ID NO: 3240050 - RNA, 19 nt, Human
ccuuucuuccucauucccu

SEQ ID NO: 3240051 - RNA, 15 nt, Human
ccuuucuuccucauu

SEQ ID NO: 3240052 - RNA, 13 nt, Human
ccuuucuuccuca

SEQ ID NO: 3240053 - RNA, 12 nt, Human
ccuuucuuccuc

SEQ ID NO: 3240054 - RNA, 11 nt, Human
ccuuucuuccu

SEQ ID NO: 3240055 - RNA, 12 nt, Human
ccuuucuguguu

SEQ ID NO: 3240056 - RNA, 14 nt, Human
ccuuugcuucccuu

SEQ ID NO: 3240057 - RNA, 21 nt, Human
ccuuugcuucccuuuuuuccu

SEQ ID NO: 3240058 - RNA, 15 nt, Human
ccuuugcagcucaga

SEQ ID NO: 3240059 - RNA, 13 nt, Human
ccuuggcugcagg

SEQ ID NO: 3240060 - RNA, 12 nt, Human
ccuuggcugcag

SEQ ID NO: 3240061 - RNA, 16 nt, Human
ccuuguggucccaccc

SEQ ID NO: 3240062 - RNA, 19 nt, Human
ccuuguggucccaccccac

SEQ ID NO: 3240063 - RNA, 20 nt, Human
ccuuguggucccaccccaca

SEQ ID NO: 3240064 - RNA, 16 nt, Human
ccuuucugaucuucac

SEQ ID NO: 3240065 - RNA, 15 nt, Human
ccuuucugaucuuca

SEQ ID NO: 3240066 - RNA, 13 nt, Human
ccuuuaagagaaa

SEQ ID NO: 3240067 - RNA, 18 nt, Human
ccuuuaaagaaacauggu

SEQ ID NO: 3240068 - RNA, 21 nt, Human
cgauugcaggagucccugcca

SEQ ID NO: 3240069 - RNA, 21 nt, Human
cgauucuucugcuucagccuc

SEQ ID NO: 3240070 - RNA, 19 nt, Human
cgauucuucugcuucagcc

SEQ ID NO: 3240071 - RNA, 13 nt, Human
cgauucuucugcu

SEQ ID NO: 3240072 - RNA, 19 nt, Human
cgaucuggguucacugcaa

SEQ ID NO: 3240073 - RNA, 15 nt, Human
cgauccuucaaaguc

SEQ ID NO: 3240074 - RNA, 14 nt, Human
cgauccuccccugg

SEQ ID NO: 3240075 - RNA, 23 nt, Human
cgauugcaggagucccugccauc

SEQ ID NO: 3240076 - RNA, 22 nt, Human
cgcaagcaccauccccuccggc

SEQ ID NO: 3240077 - RNA, 18 nt, Human
cgcaagggaggcccagcg

SEQ ID NO: 3240078 - RNA, 11 nt, Human
cgcaaugugac

SEQ ID NO: 3240079 - RNA, 23 nt, Human
cgcacuucgggaggucgaggcag

SEQ ID NO: 3240080 - RNA, 12 nt, Human
cgaggacaggga

SEQ ID NO: 3240081 - RNA, 13 nt, Human
cgaggacagggag

SEQ ID NO: 3240082 - RNA, 19 nt, Human
cgaggccuucucugaagga

SEQ ID NO: 3240083 - RNA, 18 nt, Human
cgaggccuucucugaagg

SEQ ID NO: 3240084 - RNA, 23 nt, Human
ccuuuguaaauugucagaugcug

SEQ ID NO: 3240085 - RNA, 12 nt, Human
ccuuuguaacca

SEQ ID NO: 3240086 - RNA, 24 nt, Human
cgagcugggaccaguaccuggguc

SEQ ID NO: 3240087 - RNA, 16 nt, Human
cgcgacaaugcaaacc

SEQ ID NO: 3240088 - RNA, 17 nt, Human
cgcgacaaugcaaacca

SEQ ID NO: 3240089 - RNA, 15 nt, Human
cgcgacaaugcaaac

SEQ ID NO: 3240090 - RNA, 15 nt, Human
cgcccccacugguga

SEQ ID NO: 3240091 - RNA, 19 nt, Human
cgcccaggcuggagugcaa

SEQ ID NO: 3240092 - RNA, 20 nt, Human
cgcccaggcuggagugcaau

SEQ ID NO: 3240093 - RNA, 12 nt, Human
cgcccaggcugg

SEQ ID NO: 3240094 - RNA, 13 nt, Human
cgcagacaggacc

SEQ ID NO: 3240095 - RNA, 14 nt, Human
cgcagacaggacca

SEQ ID NO: 3240096 - RNA, 16 nt, Human
cgcuagcacagcuccc

SEQ ID NO: 3240097 - RNA, 15 nt, Human
cgcuagcacagcucc

SEQ ID NO: 3240098 - RNA, 20 nt, Human
cgcuacuaugauuuaauuug

SEQ ID NO: 3240099 - RNA, 22 nt, Human
cgcuaacuugcuuaaaugugaa

SEQ ID NO: 3240100 - RNA, 14 nt, Human
cgcuaagagggagg

SEQ ID NO: 3240101 - RNA, 15 nt, Human
cgcuaagagggaggg

SEQ ID NO: 3240102 - RNA, 16 nt, Human
cgcuaagagggaggga

SEQ ID NO: 3240103 - RNA, 20 nt, Human
cgcgugcacacaccagagcc

SEQ ID NO: 3240104 - RNA, 19 nt, Human
cgcgugcacacaccagagc

SEQ ID NO: 3240105 - RNA, 16 nt, Human
cgcgugcacacaccag

SEQ ID NO: 3240106 - RNA, 20 nt, Human
cgggaggauguucugggaca

SEQ ID NO: 3240107 - RNA, 22 nt, Human
cgggagccugaucaccugcccu

SEQ ID NO: 3240108 - RNA, 21 nt, Human
cgggagccugaucaccugccc

SEQ ID NO: 3240109 - RNA, 14 nt, Human
cggccuuucccacu

SEQ ID NO: 3240110 - RNA, 13 nt, Human
cggccuuucccac

SEQ ID NO: 3240111 - RNA, 12 nt, Human
cgggcaugacac

SEQ ID NO: 3240112 - RNA, 15 nt, Human
cgggcaucauucucu

SEQ ID NO: 3240113 - RNA, 15 nt, Human
cgggcaugacacgaa

SEQ ID NO: 3240114 - RNA, 16 nt, Human
cgggcauggcagcccu

SEQ ID NO: 3240115 - RNA, 17 nt, Human
cgggaggucgaggcagg

SEQ ID NO: 3240116 - RNA, 16 nt, Human
cgggaggucgaggcag

SEQ ID NO: 3240117 - RNA, 14 nt, Human
cggccuccauccug

SEQ ID NO: 3240118 - RNA, 16 nt, Human
cggccuccauccugag

SEQ ID NO: 3240119 - RNA, 17 nt, Human
cggccuccauccugagg

SEQ ID NO: 3240120 - RNA, 19 nt, Human
cggccccagcuucucagcu

SEQ ID NO: 3240121 - RNA, 14 nt, Human
cggccccagcuucu

SEQ ID NO: 3240122 - RNA, 15 nt, Human
cggcuggccuggccc

SEQ ID NO: 3240123 - RNA, 16 nt, Human
cggcuggccuggcccc

SEQ ID NO: 3240124 - RNA, 14 nt, Human
cggcuggccuggcc

SEQ ID NO: 3240125 - RNA, 18 nt, Human
cggcuggccuggccccuc

SEQ ID NO: 3240126 - RNA, 17 nt, Human
cgcuauugucaccaggg

SEQ ID NO: 3240127 - RNA, 20 nt, Human
cgcuagguagagucugaggg

SEQ ID NO: 3240128 - RNA, 21 nt, Human
cgcuagguagagucugagggc

SEQ ID NO: 3240129 - RNA, 20 nt, Human
cgcuauaguuacuguccugu

SEQ ID NO: 3240130 - RNA, 22 nt, Human
cgcucgaaguugaucuccccag

SEQ ID NO: 3240131 - RNA, 13 nt, Human
cgcuccugugucu

SEQ ID NO: 3240132 - RNA, 20 nt, Human
cggaaugaaccacaucuugc

SEQ ID NO: 3240133 - RNA, 12 nt, Human
cggacaaaauau

SEQ ID NO: 3240134 - RNA, 13 nt, Human
cggacaaaauauc

SEQ ID NO: 3240135 - RNA, 18 nt, Human
cggaaccugugagcugca

SEQ ID NO: 3240136 - RNA, 19 nt, Human
cggaaccugugagcugcac

SEQ ID NO: 3240137 - RNA, 18 nt, Human
cggacagccacggccagg

SEQ ID NO: 3240138 - RNA, 16 nt, Human
cggacagccacggcca

SEQ ID NO: 3240139 - RNA, 15 nt, Human
cggacagccacggcc

SEQ ID NO: 3240140 - RNA, 21 nt, Human
cggauccugcacugacucugg

SEQ ID NO: 3240141 - RNA, 22 nt, Human
cggauccugcacugacucugga

SEQ ID NO: 3240142 - RNA, 22 nt, Human
cggcaauaaaagcccaggagcc

SEQ ID NO: 3240143 - RNA, 20 nt, Human
cggcaauaaaagcccaggag

SEQ ID NO: 3240144 - RNA, 19 nt, Human
cggcaauaaaagcccagga

SEQ ID NO: 3240145 - RNA, 18 nt, Human
cggcaauaaaagcccagg

SEQ ID NO: 3240146 - RNA, 17 nt, Human
cggcaauaaaagcccag

SEQ ID NO: 3240147 - RNA, 16 nt, Human
cggcaauaaaagccca

SEQ ID NO: 3240148 - RNA, 13 nt, Human
cggcacagccugg

SEQ ID NO: 3240149 - RNA, 13 nt, Human
cggcaaaaggaaa

SEQ ID NO: 3240150 - RNA, 15 nt, Human
cggauugcaaagcaa

SEQ ID NO: 3240151 - RNA, 15 nt, Human
cguagugcagcaggg

SEQ ID NO: 3240152 - RNA, 18 nt, Human
cguagucggcacagccug

SEQ ID NO: 3240153 - RNA, 21 nt, Human
cguagucggcacagccugguc

SEQ ID NO: 3240154 - RNA, 19 nt, Human
cguagucggcacagccugg

SEQ ID NO: 3240155 - RNA, 13 nt, Human
cguagcuugucug

SEQ ID NO: 3240156 - RNA, 23 nt, Human
cggugcuaucucccccagcccca

SEQ ID NO: 3240157 - RNA, 14 nt, Human
cggggccagcuccg

SEQ ID NO: 3240158 - RNA, 22 nt, Human
cguccacgugcguguuuucuga

SEQ ID NO: 3240159 - RNA, 14 nt, Human
cgucccccucuggc

SEQ ID NO: 3240160 - RNA, 21 nt, Human
cgucccccucuggcuccagcu

SEQ ID NO: 3240161 - RNA, 15 nt, Human
cguauguuauacaac

SEQ ID NO: 3240162 - RNA, 15 nt, Human
cguauggcuuuauuu

SEQ ID NO: 3240163 - RNA, 20 nt, Human
cguaugcaguguagauuuua

SEQ ID NO: 3240164 - RNA, 22 nt, Human
cguauaugucucaggucccugc

SEQ ID NO: 3240165 - RNA, 14 nt, Human
cguauagaagucuu

SEQ ID NO: 3240166 - RNA, 16 nt, Human
cguauagaagucuuca

SEQ ID NO: 3240167 - RNA, 16 nt, Human
cgucacuaccuggcug

SEQ ID NO: 3240168 - RNA, 17 nt, Human
cgucacuuuauuucauu

SEQ ID NO: 3240169 - RNA, 17 nt, Human
cgucugcuccugcgagg

SEQ ID NO: 3240170 - RNA, 14 nt, Human
cgucugacaggcaa

SEQ ID NO: 3240171 - RNA, 13 nt, Human
cgucugacaggca

SEQ ID NO: 3240172 - RNA, 14 nt, Human
cgucuacagcuccc

SEQ ID NO: 3240173 - RNA, 13 nt, Human
cgucuacagcucc

SEQ ID NO: 3240174 - RNA, 17 nt, Human
cgucuacagcuccccca

SEQ ID NO: 3240175 - RNA, 19 nt, Human
cgucuacauuucacauuau

SEQ ID NO: 3240176 - RNA, 14 nt, Human
cgucuaccugaggg

SEQ ID NO: 3240177 - RNA, 21 nt, Human
cgucuaaccacagcuccuuuu

SEQ ID NO: 3240178 - RNA, 19 nt, Human
cgucuaaccacagcuccuu

SEQ ID NO: 3240179 - RNA, 18 nt, Human
cgucuaaccacagcuccu

SEQ ID NO: 3240180 - RNA, 17 nt, Human
cgucuaaccacagcucc

SEQ ID NO: 3240181 - RNA, 11 nt, Human
cguccccuguc

SEQ ID NO: 3240182 - RNA, 22 nt, Human
cgucccccucuggcuccagcug

SEQ ID NO: 3240183 - RNA, 14 nt, Human
cguccccugucccc

SEQ ID NO: 3240184 - RNA, 10 nt, Human
cguccccucc

SEQ ID NO: 3240185 - RNA, 22 nt, Human
cgugcacacaccagagcccacc

SEQ ID NO: 3240186 - RNA, 22 nt, Human
cgugcaguggugcgaucugggu

SEQ ID NO: 3240187 - RNA, 21 nt, Human
cgugcacacaccagagcccac

SEQ ID NO: 3240188 - RNA, 20 nt, Human
cgugcacacaccagagccca

SEQ ID NO: 3240189 - RNA, 16 nt, Human
cgugaagauacuuugu

SEQ ID NO: 3240190 - RNA, 17 nt, Human
cgugaagauacuuugua

SEQ ID NO: 3240191 - RNA, 18 nt, Human
cgugaagauacuuuguau

SEQ ID NO: 3240192 - RNA, 19 nt, Human
cgugaagauacuuuguauu

SEQ ID NO: 3240193 - RNA, 21 nt, Human
cgugaagauacuuuguauugu

SEQ ID NO: 3240194 - RNA, 22 nt, Human
cgugaagauacuuuguauuguc

SEQ ID NO: 3240195 - RNA, 16 nt, Human
cguuuugcaagguaaa

SEQ ID NO: 3240196 - RNA, 15 nt, Human
cguuuacucacagcc

SEQ ID NO: 3240197 - RNA, 22 nt, Human
cguuccuucaaagcaaaugucu

SEQ ID NO: 3240198 - RNA, 12 nt, Human
cguggcugcuuc

SEQ ID NO: 3240199 - RNA, 14 nt, Human
cguggcugcuucaa

SEQ ID NO: 3240200 - RNA, 15 nt, Human
cguggcugcuucaag

SEQ ID NO: 3240201 - RNA, 18 nt, Human
cgugccuucagcucuaca

SEQ ID NO: 3240202 - RNA, 16 nt, Human
cgugccuucagcucua

SEQ ID NO: 3240203 - RNA, 15 nt, Human
cgugccuucagcucu

SEQ ID NO: 3240204 - RNA, 13 nt, Human
cgugccuucagcu

SEQ ID NO: 3240205 - RNA, 12 nt, Human
cgugccuggcca

SEQ ID NO: 3240206 - RNA, 16 nt, Human
cgugccuggccacgcc

SEQ ID NO: 3240207 - RNA, 15 nt, Human
ccugcuuuuuggaaa

SEQ ID NO: 3240208 - RNA, 20 nt, Human
ccugcuuuuuggaaagucag

SEQ ID NO: 3240209 - RNA, 21 nt, Human
ccuggaaaaaaacaucagaaa

SEQ ID NO: 3240210 - RNA, 15 nt, Human
ccuggaaaccugucu

SEQ ID NO: 3240211 - RNA, 17 nt, Human
ccugcuuugggcugccc

SEQ ID NO: 3240212 - RNA, 18 nt, Human
ccugcuuugggcugcccu

SEQ ID NO: 3240213 - RNA, 15 nt, Human
ccugcuuggcccagg

SEQ ID NO: 3240214 - RNA, 14 nt, Human
ccugcuuggcccag

SEQ ID NO: 3240215 - RNA, 13 nt, Human
ccugcuuggccca

SEQ ID NO: 3240216 - RNA, 17 nt, Human
ccugcuucucugcccag

SEQ ID NO: 3240217 - RNA, 15 nt, Human
ccugcuucucugccc

SEQ ID NO: 3240218 - RNA, 14 nt, Human
ccugcuucucugcc

SEQ ID NO: 3240219 - RNA, 12 nt, Human
ccugcuucucug

SEQ ID NO: 3240220 - RNA, 21 nt, Human
ccugcuggguguggcgcagca

SEQ ID NO: 3240221 - RNA, 13 nt, Human
ccugcugguucag

SEQ ID NO: 3240222 - RNA, 22 nt, Human
ccugcucccuccgggucuuccu

SEQ ID NO: 3240223 - RNA, 19 nt, Human
ccugcugguucaggguugg

SEQ ID NO: 3240224 - RNA, 15 nt, Human
ccugcugucauugcu

SEQ ID NO: 3240225 - RNA, 22 nt, Human
ccugcugucauugcuucuucug

SEQ ID NO: 3240226 - RNA, 20 nt, Human
ccugcugucauugcuucuuc

SEQ ID NO: 3240227 - RNA, 15 nt, Human
ccugcuuccucagag

SEQ ID NO: 3240228 - RNA, 23 nt, Human
ccugcgucucauacucaccucac

SEQ ID NO: 3240229 - RNA, 22 nt, Human
ccugcaaccaaacucccaucag

SEQ ID NO: 3240230 - RNA, 20 nt, Human
ccugcaaccaaacucccauc

SEQ ID NO: 3240231 - RNA, 23 nt, Human
ccugcaaaguacagguacuuugu

SEQ ID NO: 3240232 - RNA, 22 nt, Human
ccugcaaaguacagguacuuug

SEQ ID NO: 3240233 - RNA, 19 nt, Human
ccugcaacaccuuguuucc

SEQ ID NO: 3240234 - RNA, 16 nt, Human
ccugcaaccugauugu

SEQ ID NO: 3240235 - RNA, 18 nt, Human
ccugcaacaccuuguuuc

SEQ ID NO: 3240236 - RNA, 19 nt, Human
ccugcaaagcccagcuuga

SEQ ID NO: 3240237 - RNA, 18 nt, Human
ccugauuuuaauugugaa

SEQ ID NO: 3240238 - RNA, 15 nt, Human
ccugauuucuccugc

SEQ ID NO: 3240239 - RNA, 13 nt, Human
ccugcuccagcug

SEQ ID NO: 3240240 - RNA, 14 nt, Human
ccugcuccagcugu

SEQ ID NO: 3240241 - RNA, 22 nt, Human
ccugcuccagcuguucagcugg

SEQ ID NO: 3240242 - RNA, 12 nt, Human
ccugcuccagcu

SEQ ID NO: 3240243 - RNA, 17 nt, Human
ccugcguguucucagag

SEQ ID NO: 3240244 - RNA, 14 nt, Human
ccuggacuccugca

SEQ ID NO: 3240245 - RNA, 17 nt, Human
ccuggacucccguguag

SEQ ID NO: 3240246 - RNA, 12 nt, Human
ccuggacucccg

SEQ ID NO: 3240247 - RNA, 13 nt, Human
ccuggacccugug

SEQ ID NO: 3240248 - RNA, 14 nt, Human
ccuggacccugugg

SEQ ID NO: 3240249 - RNA, 17 nt, Human
ccuggaccccagccuca

SEQ ID NO: 3240250 - RNA, 16 nt, Human
ccuggaccccagccuc

SEQ ID NO: 3240251 - RNA, 15 nt, Human
ccuggaccccagccu

SEQ ID NO: 3240252 - RNA, 14 nt, Human
ccuggaccccagcc

SEQ ID NO: 3240253 - RNA, 13 nt, Human
ccuggaccccagc

SEQ ID NO: 3240254 - RNA, 12 nt, Human
ccuggaccccag

SEQ ID NO: 3240255 - RNA, 14 nt, Human
ccuggacaggccag

SEQ ID NO: 3240256 - RNA, 20 nt, Human
ccuggcacugcuuccaguga

SEQ ID NO: 3240257 - RNA, 17 nt, Human
ccuggcacugcuuccag

SEQ ID NO: 3240258 - RNA, 21 nt, Human
ccuggcacugcuuccagugag

SEQ ID NO: 3240259 - RNA, 14 nt, Human
ccuggcagccccug

SEQ ID NO: 3240260 - RNA, 16 nt, Human
ccuggcagccccuguu

SEQ ID NO: 3240261 - RNA, 16 nt, Human
ccuggcaugggaauga

SEQ ID NO: 3240262 - RNA, 17 nt, Human
ccuggcaugggaaugaa

SEQ ID NO: 3240263 - RNA, 14 nt, Human
ccuggcaugggaau

SEQ ID NO: 3240264 - RNA, 19 nt, Human
ccuggcagccgugccuuca

SEQ ID NO: 3240265 - RNA, 18 nt, Human
ccuggcagccgugccuuc

SEQ ID NO: 3240266 - RNA, 12 nt, Human
ccuggcagccgu

SEQ ID NO: 3240267 - RNA, 14 nt, Human
ccuggccccucagg

SEQ ID NO: 3240268 - RNA, 18 nt, Human
ccuggcaugggaaugaau

SEQ ID NO: 3240269 - RNA, 22 nt, Human
ccuggcagcccgcaucagcugc

SEQ ID NO: 3240270 - RNA, 21 nt, Human
ccuggcccccacauggugaug

SEQ ID NO: 3240271 - RNA, 15 nt, Human
ccuggcccccacaug

SEQ ID NO: 3240272 - RNA, 13 nt, Human
ccugggaggcagu

SEQ ID NO: 3240273 - RNA, 16 nt, Human
ccugggaucccucauc

SEQ ID NO: 3240274 - RNA, 20 nt, Human
ccugggaucccucauccuca

SEQ ID NO: 3240275 - RNA, 20 nt, Human
ccugggaggucaaggcugca

SEQ ID NO: 3240276 - RNA, 17 nt, Human
ccugggauaggggcaga

SEQ ID NO: 3240277 - RNA, 23 nt, Human
ccugggcacacgcugcucugccc

SEQ ID NO: 3240278 - RNA, 14 nt, Human
ccugggcagaagga

SEQ ID NO: 3240279 - RNA, 23 nt, Human
ccugggauaggggcagaggaggc

SEQ ID NO: 3240280 - RNA, 18 nt, Human
ccugggauaggggcagag

SEQ ID NO: 3240281 - RNA, 12 nt, Human
ccugggcagaag

SEQ ID NO: 3240282 - RNA, 19 nt, Human
ccugggcacacgcugcucu

SEQ ID NO: 3240283 - RNA, 18 nt, Human
ccugggcacacgcugcuc

SEQ ID NO: 3240284 - RNA, 17 nt, Human
ccugggcacacgcugcu

SEQ ID NO: 3240285 - RNA, 15 nt, Human
ccugggcacacgcug

SEQ ID NO: 3240286 - RNA, 20 nt, Human
ccugugaguacuacaguccu

SEQ ID NO: 3240287 - RNA, 16 nt, Human
ccugugagcugcacca

SEQ ID NO: 3240288 - RNA, 14 nt, Human
ccugugagcugcac

SEQ ID NO: 3240289 - RNA, 13 nt, Human
ccugugagcugca

SEQ ID NO: 3240290 - RNA, 18 nt, Human
ccugugacuucagcucug

SEQ ID NO: 3240291 - RNA, 14 nt, Human
ccugugagaugugu

SEQ ID NO: 3240292 - RNA, 23 nt, Human
ccugugagauguguaucaguguu

SEQ ID NO: 3240293 - RNA, 17 nt, Human
ccugucccccugacaac

SEQ ID NO: 3240294 - RNA, 16 nt, Human
ccugucccccugacaa

SEQ ID NO: 3240295 - RNA, 18 nt, Human
ccuguccccgcacugggc

SEQ ID NO: 3240296 - RNA, 22 nt, Human
ccugucaaacauuaguacuuua

SEQ ID NO: 3240297 - RNA, 17 nt, Human
ccugugccucugggacu

SEQ ID NO: 3240298 - RNA, 15 nt, Human
ccugugccucuggga

SEQ ID NO: 3240299 - RNA, 21 nt, Human
ccugugccaggugaaggaggc

SEQ ID NO: 3240300 - RNA, 14 nt, Human
ccugugccagguga

SEQ ID NO: 3240301 - RNA, 12 nt, Human
ccugugccaggu

SEQ ID NO: 3240302 - RNA, 19 nt, Human
ccugugccagcccagaggc

SEQ ID NO: 3240303 - RNA, 17 nt, Human
ccugugccagcccagag

SEQ ID NO: 3240304 - RNA, 15 nt, Human
ccugugccagcccag

SEQ ID NO: 3240305 - RNA, 14 nt, Human
ccugugccagccca

SEQ ID NO: 3240306 - RNA, 20 nt, Human
ccugugauggggcccugccu

SEQ ID NO: 3240307 - RNA, 21 nt, Human
ccugugauggggcccugccuc

SEQ ID NO: 3240308 - RNA, 22 nt, Human
ccugugauggggcccugccucc

SEQ ID NO: 3240309 - RNA, 18 nt, Human
ccugugauggggcccugc

SEQ ID NO: 3240310 - RNA, 19 nt, Human
ccugugauggggcccugcc

SEQ ID NO: 3240311 - RNA, 17 nt, Human
ccugugauggggcccug

SEQ ID NO: 3240312 - RNA, 15 nt, Human
ccuggugcugccaca

SEQ ID NO: 3240313 - RNA, 21 nt, Human
ccuggugcugccacacuucag

SEQ ID NO: 3240314 - RNA, 18 nt, Human
ccuggugcugccacacuu

SEQ ID NO: 3240315 - RNA, 13 nt, Human
ccugguggcagcu

SEQ ID NO: 3240316 - RNA, 12 nt, Human
ccugguggcagc

SEQ ID NO: 3240317 - RNA, 14 nt, Human
ccugguggcagcuc

SEQ ID NO: 3240318 - RNA, 16 nt, Human
ccugguggcagcucac

SEQ ID NO: 3240319 - RNA, 17 nt, Human
ccugguggcagcucacc

SEQ ID NO: 3240320 - RNA, 18 nt, Human
ccugguggcagcucaccu

SEQ ID NO: 3240321 - RNA, 23 nt, Human
ccuguaauuguuguuuguaugua

SEQ ID NO: 3240322 - RNA, 20 nt, Human
ccuguaauccuagcacuuug

SEQ ID NO: 3240323 - RNA, 21 nt, Human
ccuguagagugggagcugagu

SEQ ID NO: 3240324 - RNA, 19 nt, Human
ccuguagagugggagcuga

SEQ ID NO: 3240325 - RNA, 23 nt, Human
ccuguagagugggagcugagugg

SEQ ID NO: 3240326 - RNA, 16 nt, Human
ccugucaaacauuagu

SEQ ID NO: 3240327 - RNA, 14 nt, Human
ccugucaaacauua

SEQ ID NO: 3240328 - RNA, 13 nt, Human
ccugucaaacauu

SEQ ID NO: 3240329 - RNA, 21 nt, Human
ccuugacaaagucaagccaca

SEQ ID NO: 3240330 - RNA, 23 nt, Human
ccuugacaaagucaagccacaug

SEQ ID NO: 3240331 - RNA, 13 nt, Human
ccuugacagggca

SEQ ID NO: 3240332 - RNA, 14 nt, Human
ccuugacacauuac

SEQ ID NO: 3240333 - RNA, 14 nt, Human
ccuugacagggcac

SEQ ID NO: 3240334 - RNA, 19 nt, Human
ccuugaccauucuccaccu

SEQ ID NO: 3240335 - RNA, 20 nt, Human
ccuugaccauucuccaccug

SEQ ID NO: 3240336 - RNA, 17 nt, Human
ccuugacagggcacacc

SEQ ID NO: 3240337 - RNA, 15 nt, Human
ccuugacagggcaca

SEQ ID NO: 3240338 - RNA, 19 nt, Human
ccuuggauuguccccgacc

SEQ ID NO: 3240339 - RNA, 15 nt, Human
ccuugauauuuguau

SEQ ID NO: 3240340 - RNA, 16 nt, Human
ccuugauaauauauug

SEQ ID NO: 3240341 - RNA, 23 nt, Human
ccuugauaauauauuguguugac

SEQ ID NO: 3240342 - RNA, 22 nt, Human
ccuugaugaaauaacacagcag

SEQ ID NO: 3240343 - RNA, 22 nt, Human
ccuugaguugauucagcucugc

SEQ ID NO: 3240344 - RNA, 23 nt, Human
ccuugaguugauucagcucugca

SEQ ID NO: 3240345 - RNA, 21 nt, Human
ccuugaccauucuccaccugc

SEQ ID NO: 3240346 - RNA, 20 nt, Human
ccuugaguugauucagcucu

SEQ ID NO: 3240347 - RNA, 17 nt, Human
ccuugaaugaugccaug

SEQ ID NO: 3240348 - RNA, 16 nt, Human
ccuugaacuggguacu

SEQ ID NO: 3240349 - RNA, 19 nt, Human
ccuugaaaacacuguucuc

SEQ ID NO: 3240350 - RNA, 21 nt, Human
ccuugaaaacacuguucucug

SEQ ID NO: 3240351 - RNA, 22 nt, Human
ccuugaaaacacuguucucugc

SEQ ID NO: 3240352 - RNA, 14 nt, Human
ccuugaacugggua

SEQ ID NO: 3240353 - RNA, 18 nt, Human
ccuucgcuccugugucuu

SEQ ID NO: 3240354 - RNA, 15 nt, Human
ccuucgcuccugugu

SEQ ID NO: 3240355 - RNA, 14 nt, Human
ccuucgcuccugug

SEQ ID NO: 3240356 - RNA, 13 nt, Human
ccuucgcuccugu

SEQ ID NO: 3240357 - RNA, 15 nt, Human
ccuugaaaacacugu

SEQ ID NO: 3240358 - RNA, 16 nt, Human
ccuucuuuuucuucuu

SEQ ID NO: 3240359 - RNA, 14 nt, Human
ccuucuuuuucuuc

SEQ ID NO: 3240360 - RNA, 16 nt, Human
ccuucuuugcccuuua

SEQ ID NO: 3240361 - RNA, 11 nt, Human
ccuuuggcuuc

SEQ ID NO: 3240362 - RNA, 12 nt, Human
ccuucagccuga

SEQ ID NO: 3240363 - RNA, 13 nt, Human
ccuucagugccuu

SEQ ID NO: 3240364 - RNA, 14 nt, Human
ccuucagugccuua

SEQ ID NO: 3240365 - RNA, 12 nt, Human
ccuucagugccu

SEQ ID NO: 3240366 - RNA, 20 nt, Human
ccuucagugccuuauggaac

SEQ ID NO: 3240367 - RNA, 17 nt, Human
ccuucaguuuuuguguu

SEQ ID NO: 3240368 - RNA, 15 nt, Human
ccuucagugccuuau

SEQ ID NO: 3240369 - RNA, 19 nt, Human
ccuucagugccuuauggaa

SEQ ID NO: 3240370 - RNA, 16 nt, Human
ccuuccaccucuggga

SEQ ID NO: 3240371 - RNA, 17 nt, Human
ccuuccaccugcucugc

SEQ ID NO: 3240372 - RNA, 16 nt, Human
ccuuccaccugcucug

SEQ ID NO: 3240373 - RNA, 15 nt, Human
ccuuccaccugcucu

SEQ ID NO: 3240374 - RNA, 17 nt, Human
ccuuccaccucugggag

SEQ ID NO: 3240375 - RNA, 15 nt, Human
ccuuccagggguggg

SEQ ID NO: 3240376 - RNA, 16 nt, Human
ccuuccagggguggga

SEQ ID NO: 3240377 - RNA, 19 nt, Human
ccuuccaccugcucugcug

SEQ ID NO: 3240378 - RNA, 18 nt, Human
ccuuccaccugcucugcu

SEQ ID NO: 3240379 - RNA, 18 nt, Human
ccuuccaggggugggaca

SEQ ID NO: 3240380 - RNA, 23 nt, Human
ccuuccaugucgccucugcauuc

SEQ ID NO: 3240381 - RNA, 21 nt, Human
ccuuccaugucgccucugcau

SEQ ID NO: 3240382 - RNA, 20 nt, Human
ccuuccaugucgccucugca

SEQ ID NO: 3240383 - RNA, 19 nt, Human
ccuuccaugucgccucugc

SEQ ID NO: 3240384 - RNA, 14 nt, Human
ccuuccucuuucca

SEQ ID NO: 3240385 - RNA, 12 nt, Human
ccuuccucugcu

SEQ ID NO: 3240386 - RNA, 14 nt, Human
ccuuccucugaggc

SEQ ID NO: 3240387 - RNA, 17 nt, Human
ccuuccauuucugccuu

SEQ ID NO: 3240388 - RNA, 15 nt, Human
ccuucgauacaccgg

SEQ ID NO: 3240389 - RNA, 13 nt, Human
ccuuccucugcuc

SEQ ID NO: 3240390 - RNA, 13 nt, Human
ccuucgccaccug

SEQ ID NO: 3240391 - RNA, 23 nt, Human
ccuucgauacaccgggccuggag

SEQ ID NO: 3240392 - RNA, 22 nt, Human
ccuucgauacaccgggccugga

SEQ ID NO: 3240393 - RNA, 20 nt, Human
ccuucgauacaccgggccug

SEQ ID NO: 3240394 - RNA, 19 nt, Human
ccuguggaaggcagagaaa

SEQ ID NO: 3240395 - RNA, 20 nt, Human
ccuguggaaggcagagaaau

SEQ ID NO: 3240396 - RNA, 14 nt, Human
ccuuaccagcagag

SEQ ID NO: 3240397 - RNA, 15 nt, Human
ccuuaccagcagagc

SEQ ID NO: 3240398 - RNA, 16 nt, Human
ccuuaccagcagagca

SEQ ID NO: 3240399 - RNA, 15 nt, Human
ccuguggccugccag

SEQ ID NO: 3240400 - RNA, 20 nt, Human
ccuuaccucggugccuuccu

SEQ ID NO: 3240401 - RNA, 14 nt, Human
ccuuagacaguccc

SEQ ID NO: 3240402 - RNA, 21 nt, Human
ccuuagaagguauuaagauua

SEQ ID NO: 3240403 - RNA, 18 nt, Human
ccuuagaagguauuaaga

SEQ ID NO: 3240404 - RNA, 21 nt, Human
ccuuagacagucccugccaau

SEQ ID NO: 3240405 - RNA, 18 nt, Human
ccuuagacagucccugcc

SEQ ID NO: 3240406 - RNA, 19 nt, Human
ccuuagacagucccugcca

SEQ ID NO: 3240407 - RNA, 16 nt, Human
ccuuagacagucccug

SEQ ID NO: 3240408 - RNA, 17 nt, Human
ccuuagacagucccugc

SEQ ID NO: 3240409 - RNA, 18 nt, Human
ccuuagaaccuuucuuac

SEQ ID NO: 3240410 - RNA, 16 nt, Human
ccuuagaaccuuucuu

SEQ ID NO: 3240411 - RNA, 15 nt, Human
ccuuagaaccuuucu

SEQ ID NO: 3240412 - RNA, 14 nt, Human
ccuuagaaccuuuc

SEQ ID NO: 3240413 - RNA, 15 nt, Human
ccuucaaagcaaaug

SEQ ID NO: 3240414 - RNA, 15 nt, Human
ccuucaagcugcuuu

SEQ ID NO: 3240415 - RNA, 14 nt, Human
ccuucaaccauucc

SEQ ID NO: 3240416 - RNA, 19 nt, Human
ccuucaacaaggcuugcug

SEQ ID NO: 3240417 - RNA, 14 nt, Human
ccuucaacaaggcu

SEQ ID NO: 3240418 - RNA, 23 nt, Human
ccuucaacaaggcuugcugcaga

SEQ ID NO: 3240419 - RNA, 19 nt, Human
ccuucaaagcaaaugucuu

SEQ ID NO: 3240420 - RNA, 22 nt, Human
ccuucaaagucucaaugaaaua

SEQ ID NO: 3240421 - RNA, 15 nt, Human
cugccagcaacgcag

SEQ ID NO: 3240422 - RNA, 14 nt, Human
cugccacccugggg

SEQ ID NO: 3240423 - RNA, 20 nt, Human
cugccacccuggggagaaag

SEQ ID NO: 3240424 - RNA, 16 nt, Human
cugccacccuggggag

SEQ ID NO: 3240425 - RNA, 15 nt, Human
cugccacccugggga

SEQ ID NO: 3240426 - RNA, 19 nt, Human
cugcagggcuuuaaaauuc

SEQ ID NO: 3240427 - RNA, 18 nt, Human
cugcagggcuuuaaaauu

SEQ ID NO: 3240428 - RNA, 22 nt, Human
cugccacacuucaggcucuucu

SEQ ID NO: 3240429 - RNA, 17 nt, Human
cugccacacuucaggcu

SEQ ID NO: 3240430 - RNA, 13 nt, Human
cugccacacuuca

SEQ ID NO: 3240431 - RNA, 19 nt, Human
cugccaccacgcccggcua

SEQ ID NO: 3240432 - RNA, 17 nt, Human
cugccaggcacaggcag

SEQ ID NO: 3240433 - RNA, 16 nt, Human
cugccaggcacaggca

SEQ ID NO: 3240434 - RNA, 15 nt, Human
cugccaggcacaggc

SEQ ID NO: 3240435 - RNA, 14 nt, Human
cugccaggcacagg

SEQ ID NO: 3240436 - RNA, 13 nt, Human
cugccaggcacag

SEQ ID NO: 3240437 - RNA, 15 nt, Human
cugccaugccagcuu

SEQ ID NO: 3240438 - RNA, 21 nt, Human
cugccaggcacaggcagggca

SEQ ID NO: 3240439 - RNA, 20 nt, Human
cugccaggcacaggcagggc

SEQ ID NO: 3240440 - RNA, 19 nt, Human
cugccaggcacaggcaggg

SEQ ID NO: 3240441 - RNA, 18 nt, Human
cugccaggcacaggcagg

SEQ ID NO: 3240442 - RNA, 17 nt, Human
cugccaugccagcuuau

SEQ ID NO: 3240443 - RNA, 19 nt, Human
cugccaugccagcuuaucu

SEQ ID NO: 3240444 - RNA, 22 nt, Human
cugccaggcacaggcagggcag

SEQ ID NO: 3240445 - RNA, 19 nt, Human
cugccagccgagauagcca

SEQ ID NO: 3240446 - RNA, 15 nt, Human
cugccaggaagccag

SEQ ID NO: 3240447 - RNA, 16 nt, Human
cugccaggaagccagc

SEQ ID NO: 3240448 - RNA, 18 nt, Human
cugccaggaagccagcag

SEQ ID NO: 3240449 - RNA, 19 nt, Human
cugcccuccaagaccuucu

SEQ ID NO: 3240450 - RNA, 15 nt, Human
cugcccggcugcgga

SEQ ID NO: 3240451 - RNA, 11 nt, Human
cugcccggcug

SEQ ID NO: 3240452 - RNA, 23 nt, Human
cugccccugcuacugccaaccuc

SEQ ID NO: 3240453 - RNA, 22 nt, Human
cugccccugcuacugccaaccu

SEQ ID NO: 3240454 - RNA, 22 nt, Human
cugcccuccacacccgcgcccc

SEQ ID NO: 3240455 - RNA, 13 nt, Human
cugcccugcccac

SEQ ID NO: 3240456 - RNA, 14 nt, Human
cugcccugcccacc

SEQ ID NO: 3240457 - RNA, 15 nt, Human
cugcccugcccaccu

SEQ ID NO: 3240458 - RNA, 16 nt, Human
cugcccugcccaccug

SEQ ID NO: 3240459 - RNA, 16 nt, Human
cugccauuucugagau

SEQ ID NO: 3240460 - RNA, 17 nt, Human
cugcccaaccugcucuc

SEQ ID NO: 3240461 - RNA, 20 nt, Human
cugcccagcuuuucauugcu

SEQ ID NO: 3240462 - RNA, 14 nt, Human
cugccccuggcagc

SEQ ID NO: 3240463 - RNA, 15 nt, Human
cugccccuggcagcc

SEQ ID NO: 3240464 - RNA, 16 nt, Human
cugccccuggcagccc

SEQ ID NO: 3240465 - RNA, 20 nt, Human
cugcccggcaggguccuaga

SEQ ID NO: 3240466 - RNA, 18 nt, Human
cugcccaggccugccugu

SEQ ID NO: 3240467 - RNA, 17 nt, Human
cugcccaggccugccug

SEQ ID NO: 3240468 - RNA, 19 nt, Human
cugcccaggccugccuguu

SEQ ID NO: 3240469 - RNA, 23 nt, Human
cugccucuccgccccugagccca

SEQ ID NO: 3240470 - RNA, 22 nt, Human
cugccucuccgccccugagccc

SEQ ID NO: 3240471 - RNA, 21 nt, Human
cugccucuccgccccugagcc

SEQ ID NO: 3240472 - RNA, 19 nt, Human
cugccucuccgccccugag

SEQ ID NO: 3240473 - RNA, 13 nt, Human
cugccucuucucu

SEQ ID NO: 3240474 - RNA, 23 nt, Human
cugccugaagucacacagugagu

SEQ ID NO: 3240475 - RNA, 12 nt, Human
cugccucuuccu

SEQ ID NO: 3240476 - RNA, 23 nt, Human
cugccuguugggccaggagccuc

SEQ ID NO: 3240477 - RNA, 14 nt, Human
cugccugcccaggc

SEQ ID NO: 3240478 - RNA, 13 nt, Human
cugccugcccagg

SEQ ID NO: 3240479 - RNA, 22 nt, Human
cugccugaggggcagccugccu

SEQ ID NO: 3240480 - RNA, 20 nt, Human
cugccugaggggcagccugc

SEQ ID NO: 3240481 - RNA, 23 nt, Human
cugccugaggggcagccugccuu

SEQ ID NO: 3240482 - RNA, 20 nt, Human
cugccugacagagggaugga

SEQ ID NO: 3240483 - RNA, 15 nt, Human
cugccuaagugcagc

SEQ ID NO: 3240484 - RNA, 15 nt, Human
cugcccugggaggca

SEQ ID NO: 3240485 - RNA, 22 nt, Human
cugcccugggaggcagugaugg

SEQ ID NO: 3240486 - RNA, 12 nt, Human
cugcccugggag

SEQ ID NO: 3240487 - RNA, 13 nt, Human
cugcccugggagg

SEQ ID NO: 3240488 - RNA, 11 nt, Human
cugcccuggga

SEQ ID NO: 3240489 - RNA, 13 nt, Human
cugccucagccuc

SEQ ID NO: 3240490 - RNA, 14 nt, Human
cugccucuccgccc

SEQ ID NO: 3240491 - RNA, 17 nt, Human
cugcuccucuccccagc

SEQ ID NO: 3240492 - RNA, 16 nt, Human
cugcuccucuccccag

SEQ ID NO: 3240493 - RNA, 14 nt, Human
cugcucccccuuuu

SEQ ID NO: 3240494 - RNA, 17 nt, Human
cugcucccccuuuuccc

SEQ ID NO: 3240495 - RNA, 19 nt, Human
cugcuccagcucuggcaug

SEQ ID NO: 3240496 - RNA, 14 nt, Human
cugcuccagcucug

SEQ ID NO: 3240497 - RNA, 19 nt, Human
cugcucccccuuuucccuc

SEQ ID NO: 3240498 - RNA, 18 nt, Human
cugcucccccuuuucccu

SEQ ID NO: 3240499 - RNA, 19 nt, Human
cugcuccccuaaagccuca

SEQ ID NO: 3240500 - RNA, 22 nt, Human
cugcucccuccgggucuuccua

SEQ ID NO: 3240501 - RNA, 18 nt, Human
cugcuccucuccccagca

SEQ ID NO: 3240502 - RNA, 20 nt, Human
cugcuccugagcccccagcu

SEQ ID NO: 3240503 - RNA, 18 nt, Human
cugcuccugagcccccag

SEQ ID NO: 3240504 - RNA, 17 nt, Human
cugcuccugagccccca

SEQ ID NO: 3240505 - RNA, 16 nt, Human
cugcuccugagccccc

SEQ ID NO: 3240506 - RNA, 17 nt, Human
cugcuccuucccuugcu

SEQ ID NO: 3240507 - RNA, 16 nt, Human
cugcuccuucccuugc

SEQ ID NO: 3240508 - RNA, 15 nt, Human
cugcuccuguggccu

SEQ ID NO: 3240509 - RNA, 12 nt, Human
cugcuccuuccc

SEQ ID NO: 3240510 - RNA, 14 nt, Human
cugcuccuucccuu

SEQ ID NO: 3240511 - RNA, 11 nt, Human
cugcucugacg

SEQ ID NO: 3240512 - RNA, 20 nt, Human
cugcggaaugaaccacaucu

SEQ ID NO: 3240513 - RNA, 13 nt, Human
cugccuuaaguga

SEQ ID NO: 3240514 - RNA, 16 nt, Human
cugccuuaagugagga

SEQ ID NO: 3240515 - RNA, 15 nt, Human
cugcgguccacccag

SEQ ID NO: 3240516 - RNA, 21 nt, Human
cugcggaaugaaccacaucuu

SEQ ID NO: 3240517 - RNA, 16 nt, Human
cugcgguccacccagg

SEQ ID NO: 3240518 - RNA, 17 nt, Human
cugcguguucucagagg

SEQ ID NO: 3240519 - RNA, 16 nt, Human
cugcguguucucagag

SEQ ID NO: 3240520 - RNA, 14 nt, Human
cugcuccagcuguu

SEQ ID NO: 3240521 - RNA, 22 nt, Human
cugcuaaggauuagucccuggc

SEQ ID NO: 3240522 - RNA, 22 nt, Human
cugcuaaauugauguugaugca

SEQ ID NO: 3240523 - RNA, 19 nt, Human
cugcuaaauugauguugau

SEQ ID NO: 3240524 - RNA, 18 nt, Human
cugcuaaauugauguuga

SEQ ID NO: 3240525 - RNA, 17 nt, Human
cugcuaaauugauguug

SEQ ID NO: 3240526 - RNA, 14 nt, Human
cugcuaaauugaug

SEQ ID NO: 3240527 - RNA, 20 nt, Human
cugauccagcccugaguucc

SEQ ID NO: 3240528 - RNA, 19 nt, Human
cugauagcauaugacaaau

SEQ ID NO: 3240529 - RNA, 16 nt, Human
cugauacuuuuuugaa

SEQ ID NO: 3240530 - RNA, 15 nt, Human
cugauacuuuuuuga

SEQ ID NO: 3240531 - RNA, 17 nt, Human
cugauagccccucuccc

SEQ ID NO: 3240532 - RNA, 22 nt, Human
cugauagcauaugacaaauguu

SEQ ID NO: 3240533 - RNA, 12 nt, Human
cugaugugaaac

SEQ ID NO: 3240534 - RNA, 13 nt, Human
cugaugugaaacu

SEQ ID NO: 3240535 - RNA, 16 nt, Human
cugauguguugccacu

SEQ ID NO: 3240536 - RNA, 17 nt, Human
cugauguauuuugugag

SEQ ID NO: 3240537 - RNA, 21 nt, Human
cugauguuccuagugaaagag

SEQ ID NO: 3240538 - RNA, 20 nt, Human
cugauguuccuagugaaaga

SEQ ID NO: 3240539 - RNA, 18 nt, Human
cugauguuccuagugaaa

SEQ ID NO: 3240540 - RNA, 13 nt, Human
cugauguuccuag

SEQ ID NO: 3240541 - RNA, 13 nt, Human
cugauguuugugc

SEQ ID NO: 3240542 - RNA, 17 nt, Human
cugauguucccuccggu

SEQ ID NO: 3240543 - RNA, 16 nt, Human
cugauguucccuccgg

SEQ ID NO: 3240544 - RNA, 20 nt, Human
cugauuauugaguuccaguu

SEQ ID NO: 3240545 - RNA, 22 nt, Human
cugauuaguaagucuugccuau

SEQ ID NO: 3240546 - RNA, 15 nt, Human
cugauucccaagcuc

SEQ ID NO: 3240547 - RNA, 18 nt, Human
cugauucccaagcucugc

SEQ ID NO: 3240548 - RNA, 17 nt, Human
cugauucccaagcucug

SEQ ID NO: 3240549 - RNA, 20 nt, Human
cugauucccaagcucugcuc

SEQ ID NO: 3240550 - RNA, 19 nt, Human
cugauucccaagcucugcu

SEQ ID NO: 3240551 - RNA, 22 nt, Human
cugauucccaagcucugcuccu

SEQ ID NO: 3240552 - RNA, 13 nt, Human
cugagucugaagg

SEQ ID NO: 3240553 - RNA, 14 nt, Human
cugagucugaaggc

SEQ ID NO: 3240554 - RNA, 15 nt, Human
cugagucugaaggcu

SEQ ID NO: 3240555 - RNA, 16 nt, Human
cugagucugaaggcug

SEQ ID NO: 3240556 - RNA, 14 nt, Human
cugagugccuuuug

SEQ ID NO: 3240557 - RNA, 21 nt, Human
cugagugcaggcccacccugc

SEQ ID NO: 3240558 - RNA, 14 nt, Human
cugagugcaggccc

SEQ ID NO: 3240559 - RNA, 13 nt, Human
cugagugcaggcc

SEQ ID NO: 3240560 - RNA, 20 nt, Human
cugagugcaggcccacccug

SEQ ID NO: 3240561 - RNA, 17 nt, Human
cugagugcaggcccacc

SEQ ID NO: 3240562 - RNA, 16 nt, Human
cugagugcaggcccac

SEQ ID NO: 3240563 - RNA, 15 nt, Human
cugagugcaggccca

SEQ ID NO: 3240564 - RNA, 20 nt, Human
cugagugagaggggaggcca

SEQ ID NO: 3240565 - RNA, 16 nt, Human
cugagugagaggggag

SEQ ID NO: 3240566 - RNA, 15 nt, Human
cugagugagagggga

SEQ ID NO: 3240567 - RNA, 15 nt, Human
cugagugccuuuugg

SEQ ID NO: 3240568 - RNA, 16 nt, Human
cugagugccuuuuggu

SEQ ID NO: 3240569 - RNA, 20 nt, Human
cugagucccaggcugagccu

SEQ ID NO: 3240570 - RNA, 15 nt, Human
cugaggggagacaga

SEQ ID NO: 3240571 - RNA, 13 nt, Human
cugaguccgaccu

SEQ ID NO: 3240572 - RNA, 14 nt, Human
cugagggcuuguag

SEQ ID NO: 3240573 - RNA, 17 nt, Human
cugagggcuuguaguuc

SEQ ID NO: 3240574 - RNA, 20 nt, Human
cugagggcuuguaguucuuu

SEQ ID NO: 3240575 - RNA, 14 nt, Human
cugaggggagacag

SEQ ID NO: 3240576 - RNA, 13 nt, Human
cugcacaaagccc

SEQ ID NO: 3240577 - RNA, 20 nt, Human
cugcacaaagcccuuccaug

SEQ ID NO: 3240578 - RNA, 18 nt, Human
cugcacaaagcccuucca

SEQ ID NO: 3240579 - RNA, 21 nt, Human
cugcacaaagcccuuccaugu

SEQ ID NO: 3240580 - RNA, 17 nt, Human
cugcacccucaggcagg

SEQ ID NO: 3240581 - RNA, 16 nt, Human
cugcacccucaggcag

SEQ ID NO: 3240582 - RNA, 18 nt, Human
cugcacccucaggcaggu

SEQ ID NO: 3240583 - RNA, 21 nt, Human
cugcacagugcaucucagccc

SEQ ID NO: 3240584 - RNA, 22 nt, Human
cugcaccagguagaacgccagg

SEQ ID NO: 3240585 - RNA, 13 nt, Human
cugcacaagcugc

SEQ ID NO: 3240586 - RNA, 14 nt, Human
cugcacaagcugca

SEQ ID NO: 3240587 - RNA, 15 nt, Human
cugcacaagcugcac

SEQ ID NO: 3240588 - RNA, 16 nt, Human
cugcacaagcugcacc

SEQ ID NO: 3240589 - RNA, 18 nt, Human
cugcacagugcaucucag

SEQ ID NO: 3240590 - RNA, 23 nt, Human
cugcagccaggccacuggccccu

SEQ ID NO: 3240591 - RNA, 22 nt, Human
cugcagccaggccacuggcccc

SEQ ID NO: 3240592 - RNA, 17 nt, Human
cugcagccaggccacug

SEQ ID NO: 3240593 - RNA, 16 nt, Human
cugcagccaggccacu

SEQ ID NO: 3240594 - RNA, 11 nt, Human
cugcagccuca

SEQ ID NO: 3240595 - RNA, 12 nt, Human
cugcagcccugg

SEQ ID NO: 3240596 - RNA, 13 nt, Human
cugcagcccuggc

SEQ ID NO: 3240597 - RNA, 15 nt, Human
cugcagcccuggccc

SEQ ID NO: 3240598 - RNA, 17 nt, Human
cugcagcccuggcccau

SEQ ID NO: 3240599 - RNA, 15 nt, Human
cugcagccaggccac

SEQ ID NO: 3240600 - RNA, 21 nt, Human
cugcagauacuacugaccaga

SEQ ID NO: 3240601 - RNA, 20 nt, Human
cugcagauacuacugaccag

SEQ ID NO: 3240602 - RNA, 20 nt, Human
cugcagccucaaccuccugg

SEQ ID NO: 3240603 - RNA, 19 nt, Human
cugcagccucaaccuccug

SEQ ID NO: 3240604 - RNA, 22 nt, Human
cugcagccucaaccuccugggc

SEQ ID NO: 3240605 - RNA, 22 nt, Human
cugcagggaguccgaaagggac

SEQ ID NO: 3240606 - RNA, 16 nt, Human
cugcagggccaagcac

SEQ ID NO: 3240607 - RNA, 17 nt, Human
cugcagggacugccagu

SEQ ID NO: 3240608 - RNA, 15 nt, Human
cugcagggacugcca

SEQ ID NO: 3240609 - RNA, 18 nt, Human
cugcagagcagugggccu

SEQ ID NO: 3240610 - RNA, 20 nt, Human
cugcagagcaggaaacauga

SEQ ID NO: 3240611 - RNA, 23 nt, Human
cugcagagcagugggccuggcca

SEQ ID NO: 3240612 - RNA, 21 nt, Human
cugcagagcagugggccuggc

SEQ ID NO: 3240613 - RNA, 21 nt, Human
cugcagagcugcgggcugggu

SEQ ID NO: 3240614 - RNA, 12 nt, Human
cugcagagcugc

SEQ ID NO: 3240615 - RNA, 21 nt, Human
cugcagagcaguaagggaaca

SEQ ID NO: 3240616 - RNA, 23 nt, Human
cugcagaagacaguauggcagcu

SEQ ID NO: 3240617 - RNA, 13 nt, Human
cugcagaagacag

SEQ ID NO: 3240618 - RNA, 20 nt, Human
cugcagaacagcuucauguu

SEQ ID NO: 3240619 - RNA, 17 nt, Human
cugcaccggcuggccug

SEQ ID NO: 3240620 - RNA, 18 nt, Human
cugcaccggcuggccugg

SEQ ID NO: 3240621 - RNA, 19 nt, Human
cugcaccggcuggccuggc

SEQ ID NO: 3240622 - RNA, 16 nt, Human
cugcacuugcagacuc

SEQ ID NO: 3240623 - RNA, 14 nt, Human
cugcacuugcagac

SEQ ID NO: 3240624 - RNA, 16 nt, Human
cugcaccggcuggccu

SEQ ID NO: 3240625 - RNA, 23 nt, Human
cuggauuauucaaaaugauguau

SEQ ID NO: 3240626 - RNA, 17 nt, Human
cuggauucaaauuuauu

SEQ ID NO: 3240627 - RNA, 16 nt, Human
cuggauggggcugcac

SEQ ID NO: 3240628 - RNA, 15 nt, Human
cuggauguaccacca

SEQ ID NO: 3240629 - RNA, 17 nt, Human
cuggaggagcugggccc

SEQ ID NO: 3240630 - RNA, 15 nt, Human
cuggaggcucaaauu

SEQ ID NO: 3240631 - RNA, 21 nt, Human
cuggaggcucaaauuuugagu

SEQ ID NO: 3240632 - RNA, 18 nt, Human
cuggaggcucaaauuuug

SEQ ID NO: 3240633 - RNA, 15 nt, Human
cuggauggggcugca

SEQ ID NO: 3240634 - RNA, 21 nt, Human
cuggauggcggaagcugcuac

SEQ ID NO: 3240635 - RNA, 21 nt, Human
cuggauggaggaaaaccaagc

SEQ ID NO: 3240636 - RNA, 16 nt, Human
cuggcacagggcagug

SEQ ID NO: 3240637 - RNA, 14 nt, Human
cuggcacagccugc

SEQ ID NO: 3240638 - RNA, 13 nt, Human
cuggcacagccug

SEQ ID NO: 3240639 - RNA, 17 nt, Human
cuggcacagggcagugg

SEQ ID NO: 3240640 - RNA, 15 nt, Human
cuggcacagccugca

SEQ ID NO: 3240641 - RNA, 19 nt, Human
cuggcacaguuuucugaga

SEQ ID NO: 3240642 - RNA, 18 nt, Human
cuggcacaguuuucugag

SEQ ID NO: 3240643 - RNA, 22 nt, Human
cuggcacuauaauguaagcucu

SEQ ID NO: 3240644 - RNA, 23 nt, Human
cuggcacuauaauguaagcucua

SEQ ID NO: 3240645 - RNA, 13 nt, Human
cuggcacugcuuc

SEQ ID NO: 3240646 - RNA, 14 nt, Human
cuggcacugcuucc

SEQ ID NO: 3240647 - RNA, 12 nt, Human
cuggauuuaacu

SEQ ID NO: 3240648 - RNA, 22 nt, Human
cuggcaauggaugaacugaaag

SEQ ID NO: 3240649 - RNA, 12 nt, Human
cuggcacagccu

SEQ ID NO: 3240650 - RNA, 22 nt, Human
cuggcaaugguaguuucugugg

SEQ ID NO: 3240651 - RNA, 16 nt, Human
cuggcaaugguaguuu

SEQ ID NO: 3240652 - RNA, 21 nt, Human
cuggcaaugguaguuucugug

SEQ ID NO: 3240653 - RNA, 12 nt, Human
cuggcccacugc

SEQ ID NO: 3240654 - RNA, 13 nt, Human
cuggcccacugca

SEQ ID NO: 3240655 - RNA, 16 nt, Human
cuggccaacgggguga

SEQ ID NO: 3240656 - RNA, 16 nt, Human
cuggccagaugcacca

SEQ ID NO: 3240657 - RNA, 15 nt, Human
cuggcacugcuucca

SEQ ID NO: 3240658 - RNA, 16 nt, Human
cuggcacugcuuccag

SEQ ID NO: 3240659 - RNA, 17 nt, Human
cuggcacugcuuccagu

SEQ ID NO: 3240660 - RNA, 20 nt, Human
cuggccagaugcaccagccc

SEQ ID NO: 3240661 - RNA, 19 nt, Human
cuggccagaugcaccagcc

SEQ ID NO: 3240662 - RNA, 18 nt, Human
cuggccagaugcaccagc

SEQ ID NO: 3240663 - RNA, 17 nt, Human
cuggccagaugcaccag

SEQ ID NO: 3240664 - RNA, 21 nt, Human
cuggccagaugcaccagcccu

SEQ ID NO: 3240665 - RNA, 20 nt, Human
cuggaggaccugcccggugg

SEQ ID NO: 3240666 - RNA, 16 nt, Human
cuggacucaccucccc

SEQ ID NO: 3240667 - RNA, 15 nt, Human
cuggacuauagcugu

SEQ ID NO: 3240668 - RNA, 23 nt, Human
cuggagaggagcccugccucucc

SEQ ID NO: 3240669 - RNA, 21 nt, Human
cuggagaggagcccugccucu

SEQ ID NO: 3240670 - RNA, 18 nt, Human
cuggagaggagcccugcc

SEQ ID NO: 3240671 - RNA, 17 nt, Human
cuggagaggagcccugc

SEQ ID NO: 3240672 - RNA, 17 nt, Human
cuggagagcccagaguc

SEQ ID NO: 3240673 - RNA, 16 nt, Human
cuggagagcccagagu

SEQ ID NO: 3240674 - RNA, 17 nt, Human
cugcuuuccaaagccaa

SEQ ID NO: 3240675 - RNA, 15 nt, Human
cugcuuuccaaagcc

SEQ ID NO: 3240676 - RNA, 13 nt, Human
cugcugaaacaac

SEQ ID NO: 3240677 - RNA, 14 nt, Human
cugcucuuuggccu

SEQ ID NO: 3240678 - RNA, 17 nt, Human
cugcucuuucuucuucc

SEQ ID NO: 3240679 - RNA, 12 nt, Human
cugcucugauga

SEQ ID NO: 3240680 - RNA, 19 nt, Human
cugcucuugggcaauauuc

SEQ ID NO: 3240681 - RNA, 15 nt, Human
cugcucuugggcaau

SEQ ID NO: 3240682 - RNA, 18 nt, Human
cugcuuugggcugcccug

SEQ ID NO: 3240683 - RNA, 17 nt, Human
cugcuuugggcugcccu

SEQ ID NO: 3240684 - RNA, 20 nt, Human
cugcuuugggcugcccuggu

SEQ ID NO: 3240685 - RNA, 19 nt, Human
cugcuuugggcugcccugg

SEQ ID NO: 3240686 - RNA, 15 nt, Human
cugcuccugagcccc

SEQ ID NO: 3240687 - RNA, 17 nt, Human
cugcuuuguugugugcc

SEQ ID NO: 3240688 - RNA, 14 nt, Human
cugcuuugucuccu

SEQ ID NO: 3240689 - RNA, 13 nt, Human
cugcuuuguuacc

SEQ ID NO: 3240690 - RNA, 19 nt, Human
cugcuuuguuaccuuaaaa

SEQ ID NO: 3240691 - RNA, 23 nt, Human
cugcuuugggcugcccuggugcu

SEQ ID NO: 3240692 - RNA, 22 nt, Human
cugcuuugggcugcccuggugc

SEQ ID NO: 3240693 - RNA, 21 nt, Human
cugcuuugggcugcccuggug

SEQ ID NO: 3240694 - RNA, 15 nt, Human
cugcuuuuaucucag

SEQ ID NO: 3240695 - RNA, 17 nt, Human
cugcuuuuaucucagau

SEQ ID NO: 3240696 - RNA, 23 nt, Human
cugcuuuguugugugccucuagc

SEQ ID NO: 3240697 - RNA, 21 nt, Human
cugcuuuguugugugccucua

SEQ ID NO: 3240698 - RNA, 20 nt, Human
cugcuuuguugugugccucu

SEQ ID NO: 3240699 - RNA, 20 nt, Human
cuggaagcagugcccaggug

SEQ ID NO: 3240700 - RNA, 19 nt, Human
cuggaagcagugcccaggu

SEQ ID NO: 3240701 - RNA, 18 nt, Human
cuggaagcagugcccagg

SEQ ID NO: 3240702 - RNA, 17 nt, Human
cuggaagcagugcccag

SEQ ID NO: 3240703 - RNA, 16 nt, Human
cuggaagcagugccca

SEQ ID NO: 3240704 - RNA, 15 nt, Human
cuggaagcagugccc

SEQ ID NO: 3240705 - RNA, 15 nt, Human
cuggaagcacagcuu

SEQ ID NO: 3240706 - RNA, 18 nt, Human
cuggaagcacagcuucau

SEQ ID NO: 3240707 - RNA, 14 nt, Human
cuggaagcacagcu

SEQ ID NO: 3240708 - RNA, 14 nt, Human
cuggaagcagugcc

SEQ ID NO: 3240709 - RNA, 15 nt, Human
cuggaaugcaguggu

SEQ ID NO: 3240710 - RNA, 14 nt, Human
cuggaaugcagugg

SEQ ID NO: 3240711 - RNA, 18 nt, Human
cuggaaguuaaagugagg

SEQ ID NO: 3240712 - RNA, 19 nt, Human
cuggaaguuaaagugaggc

SEQ ID NO: 3240713 - RNA, 22 nt, Human
cugggcacacgcugcucugccc

SEQ ID NO: 3240714 - RNA, 18 nt, Human
cugggcaccacaaaauau

SEQ ID NO: 3240715 - RNA, 20 nt, Human
cugggcaccacaaaauauac

SEQ ID NO: 3240716 - RNA, 21 nt, Human
cugggcacacgcugcucugcc

SEQ ID NO: 3240717 - RNA, 20 nt, Human
cugggcacacgcugcucugc

SEQ ID NO: 3240718 - RNA, 18 nt, Human
cugggcacacgcugcucu

SEQ ID NO: 3240719 - RNA, 16 nt, Human
cugggcacacgcugcu

SEQ ID NO: 3240720 - RNA, 15 nt, Human
cugggcacacgcugc

SEQ ID NO: 3240721 - RNA, 14 nt, Human
cugggcacacgcug

SEQ ID NO: 3240722 - RNA, 20 nt, Human
cugggcaaugugauaaaacc

SEQ ID NO: 3240723 - RNA, 12 nt, Human
cugggagugagc

SEQ ID NO: 3240724 - RNA, 13 nt, Human
cugggagugagcu

SEQ ID NO: 3240725 - RNA, 16 nt, Human
cugggagugagcuggu

SEQ ID NO: 3240726 - RNA, 21 nt, Human
cugggauuacaggcuccugcc

SEQ ID NO: 3240727 - RNA, 22 nt, Human
cugggauuacaggcuccugcca

SEQ ID NO: 3240728 - RNA, 19 nt, Human
cugggauuacaggcuccug

SEQ ID NO: 3240729 - RNA, 20 nt, Human
cugggauuacaggcuccugc

SEQ ID NO: 3240730 - RNA, 17 nt, Human
cugggauaggggcagag

SEQ ID NO: 3240731 - RNA, 21 nt, Human
cugggauuacaggcgugagcc

SEQ ID NO: 3240732 - RNA, 16 nt, Human
cugggaggcagugaug

SEQ ID NO: 3240733 - RNA, 14 nt, Human
cugggaggcaguga

SEQ ID NO: 3240734 - RNA, 18 nt, Human
cugggaggucaaggcugc

SEQ ID NO: 3240735 - RNA, 22 nt, Human
cugggaacccaaguccaagcau

SEQ ID NO: 3240736 - RNA, 14 nt, Human
cugggaacagaacu

SEQ ID NO: 3240737 - RNA, 15 nt, Human
cugggaacagaacuc

SEQ ID NO: 3240738 - RNA, 15 nt, Human
cugggagcucugcag

SEQ ID NO: 3240739 - RNA, 14 nt, Human
cugggagcucugca

SEQ ID NO: 3240740 - RNA, 13 nt, Human
cugggagcucugc

SEQ ID NO: 3240741 - RNA, 20 nt, Human
cuggcuguuggcugggggcc

SEQ ID NO: 3240742 - RNA, 18 nt, Human
cuggcuguuggcuggggg

SEQ ID NO: 3240743 - RNA, 18 nt, Human
cuggcuuacacuggcaau

SEQ ID NO: 3240744 - RNA, 12 nt, Human
cuggcuuauuua

SEQ ID NO: 3240745 - RNA, 14 nt, Human
cuggcuucacagau

SEQ ID NO: 3240746 - RNA, 14 nt, Human
cuggcuuacacugg

SEQ ID NO: 3240747 - RNA, 21 nt, Human
cuggcuggguggcaccagcag

SEQ ID NO: 3240748 - RNA, 19 nt, Human
cuggcuguuggcugggggc

SEQ ID NO: 3240749 - RNA, 20 nt, Human
cuggcuuuucacugcuggcu

SEQ ID NO: 3240750 - RNA, 19 nt, Human
cuggcuuuucacugcuggc

SEQ ID NO: 3240751 - RNA, 17 nt, Human
cuggcuuuucacugcug

SEQ ID NO: 3240752 - RNA, 19 nt, Human
cugggaacaccauagguca

SEQ ID NO: 3240753 - RNA, 16 nt, Human
cuggcuuuucacugcu

SEQ ID NO: 3240754 - RNA, 15 nt, Human
cuggcuuuucacugc

SEQ ID NO: 3240755 - RNA, 19 nt, Human
cuggcuugaauuggugaca

SEQ ID NO: 3240756 - RNA, 18 nt, Human
cuggcucuuccaggcugg

SEQ ID NO: 3240757 - RNA, 19 nt, Human
cuggcucuuccaggcuggg

SEQ ID NO: 3240758 - RNA, 17 nt, Human
cuggcucuuccaggcug

SEQ ID NO: 3240759 - RNA, 21 nt, Human
cuggccugaaccacaggagag

SEQ ID NO: 3240760 - RNA, 15 nt, Human
cuggccucuucuaga

SEQ ID NO: 3240761 - RNA, 13 nt, Human
cuggccugagcug

SEQ ID NO: 3240762 - RNA, 19 nt, Human
cuggcugccuuagaaccuu

SEQ ID NO: 3240763 - RNA, 14 nt, Human
cuggcugccuuaga

SEQ ID NO: 3240764 - RNA, 17 nt, Human
cuggcugggacugggaa

SEQ ID NO: 3240765 - RNA, 15 nt, Human
cuggcugggacuggg

SEQ ID NO: 3240766 - RNA, 18 nt, Human
cuggcugcggggcgggca

SEQ ID NO: 3240767 - RNA, 12 nt, Human
cuggcugcgggg

SEQ ID NO: 3240768 - RNA, 17 nt, Human
cugggguggggaccuca

SEQ ID NO: 3240769 - RNA, 18 nt, Human
cugggguggggaccucag

SEQ ID NO: 3240770 - RNA, 19 nt, Human
cugggguggggaccucagg

SEQ ID NO: 3240771 - RNA, 17 nt, Human
cugggggccucagugcc

SEQ ID NO: 3240772 - RNA, 13 nt, Human
cugggggccucag

SEQ ID NO: 3240773 - RNA, 21 nt, Human
cugggguggggaccucaggcc

SEQ ID NO: 3240774 - RNA, 22 nt, Human
cugggguggggaccucaggccu

SEQ ID NO: 3240775 - RNA, 23 nt, Human
cugggguggggaccucaggccug

SEQ ID NO: 3240776 - RNA, 20 nt, Human
cuggguacuuguggacacag

SEQ ID NO: 3240777 - RNA, 23 nt, Human
cuggguacuuguggacacagcuc

SEQ ID NO: 3240778 - RNA, 21 nt, Human
cuggguacuuguggacacagc

SEQ ID NO: 3240779 - RNA, 19 nt, Human
cuggguacuuguggacaca

SEQ ID NO: 3240780 - RNA, 14 nt, Human
cuggguagcuguaa

SEQ ID NO: 3240781 - RNA, 13 nt, Human
cuggguagcugua

SEQ ID NO: 3240782 - RNA, 15 nt, Human
cuggguagcuguaag

SEQ ID NO: 3240783 - RNA, 20 nt, Human
cugggcuucaguggcagcug

SEQ ID NO: 3240784 - RNA, 19 nt, Human
cugggcuucaguggcagcu

SEQ ID NO: 3240785 - RNA, 17 nt, Human
cugggcuucaguggcag

SEQ ID NO: 3240786 - RNA, 18 nt, Human
cugggcuucaguggcagc

SEQ ID NO: 3240787 - RNA, 21 nt, Human
cugggcuuggggaccagagcu

SEQ ID NO: 3240788 - RNA, 19 nt, Human
cugggcucccguguaucug

SEQ ID NO: 3240789 - RNA, 17 nt, Human
cugggcuuggggaccag

SEQ ID NO: 3240790 - RNA, 20 nt, Human
cugggcuuggggaccagagc

SEQ ID NO: 3240791 - RNA, 13 nt, Human
cugggcuugggga

SEQ ID NO: 3240792 - RNA, 22 nt, Human
cugggcuucaguggcagcugcu

SEQ ID NO: 3240793 - RNA, 21 nt, Human
cugggcuucaguggcagcugc

SEQ ID NO: 3240794 - RNA, 14 nt, Human
cuggucgccuucca

SEQ ID NO: 3240795 - RNA, 18 nt, Human
cugguccauagagagcaa

SEQ ID NO: 3240796 - RNA, 14 nt, Human
cuggucccacucag

SEQ ID NO: 3240797 - RNA, 18 nt, Human
cuggucccacucagucca

SEQ ID NO: 3240798 - RNA, 15 nt, Human
cuggucccacucagu

SEQ ID NO: 3240799 - RNA, 15 nt, Human
cugguccauagagag

SEQ ID NO: 3240800 - RNA, 17 nt, Human
cugguccauagagagca

SEQ ID NO: 3240801 - RNA, 13 nt, Human
cuggguuggaggg

SEQ ID NO: 3240802 - RNA, 18 nt, Human
cuggguuggaaaacagua

SEQ ID NO: 3240803 - RNA, 13 nt, Human
cuggguuggaaaa

SEQ ID NO: 3240804 - RNA, 19 nt, Human
cuggguucuacccaggugc

SEQ ID NO: 3240805 - RNA, 23 nt, Human
cugguggcagugggagcugccug

SEQ ID NO: 3240806 - RNA, 19 nt, Human
cugguggcagugggagcug

SEQ ID NO: 3240807 - RNA, 19 nt, Human
cuggucuauaccuuaagaa

SEQ ID NO: 3240808 - RNA, 22 nt, Human
cuggucguaaacaucucagaga

SEQ ID NO: 3240809 - RNA, 21 nt, Human
cuggucguaaacaucucagag

SEQ ID NO: 3240810 - RNA, 20 nt, Human
cuggucguaaacaucucaga

SEQ ID NO: 3240811 - RNA, 15 nt, Human
cuggucgccuuccac

SEQ ID NO: 3240812 - RNA, 17 nt, Human
cuccauugguguugaca

SEQ ID NO: 3240813 - RNA, 14 nt, Human
cuccaugugggcua

SEQ ID NO: 3240814 - RNA, 22 nt, Human
cucccaaggggcccaaauucuu

SEQ ID NO: 3240815 - RNA, 21 nt, Human
cucccaaggggcccaaauucu

SEQ ID NO: 3240816 - RNA, 15 nt, Human
cucccaggcauuccc

SEQ ID NO: 3240817 - RNA, 17 nt, Human
cucccagucauuuaaua

SEQ ID NO: 3240818 - RNA, 14 nt, Human
cucccaggcgcccc

SEQ ID NO: 3240819 - RNA, 22 nt, Human
cucccaggcauuccccaggagg

SEQ ID NO: 3240820 - RNA, 17 nt, Human
cucccaggcauucccca

SEQ ID NO: 3240821 - RNA, 19 nt, Human
cucccaggcauuccccagg

SEQ ID NO: 3240822 - RNA, 20 nt, Human
cucccaggcauuccccagga

SEQ ID NO: 3240823 - RNA, 21 nt, Human
cucccaggcauuccccaggag

SEQ ID NO: 3240824 - RNA, 23 nt, Human
cuccauccugaggcuccacuugg

SEQ ID NO: 3240825 - RNA, 17 nt, Human
cuccaucuaaacugccc

SEQ ID NO: 3240826 - RNA, 20 nt, Human
cuccaucgcugucaucucag

SEQ ID NO: 3240827 - RNA, 18 nt, Human
cuccaucuaaacugcccc

SEQ ID NO: 3240828 - RNA, 13 nt, Human
cuccaucuccacu

SEQ ID NO: 3240829 - RNA, 21 nt, Human
cuccauccugaggcuccacuu

SEQ ID NO: 3240830 - RNA, 20 nt, Human
cuccauccugaggcuccacu

SEQ ID NO: 3240831 - RNA, 11 nt, Human
cuccaggcucc

SEQ ID NO: 3240832 - RNA, 13 nt, Human
cuccagcuguuca

SEQ ID NO: 3240833 - RNA, 19 nt, Human
cuccagcuggguuggaaaa

SEQ ID NO: 3240834 - RNA, 23 nt, Human
cuccagccuggaaaccugucuga

SEQ ID NO: 3240835 - RNA, 18 nt, Human
cuccagcuguucagcugg

SEQ ID NO: 3240836 - RNA, 19 nt, Human
cuccagcuguucagcuggu

SEQ ID NO: 3240837 - RNA, 21 nt, Human
cuccacucuccucuuccaggc

SEQ ID NO: 3240838 - RNA, 11 nt, Human
cuccacugccu

SEQ ID NO: 3240839 - RNA, 18 nt, Human
cuccagaccccuggcuuu

SEQ ID NO: 3240840 - RNA, 17 nt, Human
cuccagaccccuggcuu

SEQ ID NO: 3240841 - RNA, 15 nt, Human
cuccagaccccuggc

SEQ ID NO: 3240842 - RNA, 14 nt, Human
cuccagaccccugg

SEQ ID NO: 3240843 - RNA, 20 nt, Human
cuccagaccccuggcuuuuc

SEQ ID NO: 3240844 - RNA, 19 nt, Human
cuccagaccccuggcuuuu

SEQ ID NO: 3240845 - RNA, 20 nt, Human
cuccagcucaccagccccag

SEQ ID NO: 3240846 - RNA, 19 nt, Human
cuccagcucaccagcccca

SEQ ID NO: 3240847 - RNA, 14 nt, Human
cuccagcaggccca

SEQ ID NO: 3240848 - RNA, 22 nt, Human
cuccagcaggcccaugggaggc

SEQ ID NO: 3240849 - RNA, 12 nt, Human
cuccacccugcu

SEQ ID NO: 3240850 - RNA, 15 nt, Human
cuccaccugccaggg

SEQ ID NO: 3240851 - RNA, 17 nt, Human
cuccaccugccagggac

SEQ ID NO: 3240852 - RNA, 18 nt, Human
cuccaccugccagggaca

SEQ ID NO: 3240853 - RNA, 21 nt, Human
cuccaccugccagggacagag

SEQ ID NO: 3240854 - RNA, 11 nt, Human
cuccacccugc

SEQ ID NO: 3240855 - RNA, 20 nt, Human
cuccacauauuucagugagg

SEQ ID NO: 3240856 - RNA, 22 nt, Human
cucagugucuggcugcagagca

SEQ ID NO: 3240857 - RNA, 21 nt, Human
cucagugucuggcugcagagc

SEQ ID NO: 3240858 - RNA, 13 nt, Human
cucaggucugagu

SEQ ID NO: 3240859 - RNA, 23 nt, Human
cucaggucccaggcuccuaugca

SEQ ID NO: 3240860 - RNA, 20 nt, Human
cucagugucuggcugcagag

SEQ ID NO: 3240861 - RNA, 19 nt, Human
cucaggugucccugcacuu

SEQ ID NO: 3240862 - RNA, 18 nt, Human
cucaggugucccugcacu

SEQ ID NO: 3240863 - RNA, 17 nt, Human
cucaggugucccugcac

SEQ ID NO: 3240864 - RNA, 19 nt, Human
cucauaguaugguggcugg

SEQ ID NO: 3240865 - RNA, 18 nt, Human
cucauaguaugguggcug

SEQ ID NO: 3240866 - RNA, 15 nt, Human
cucauagguuaaaaa

SEQ ID NO: 3240867 - RNA, 22 nt, Human
cucauagguuaaaaaaaaaagu

SEQ ID NO: 3240868 - RNA, 22 nt, Human
cucagguggggucacucuggca

SEQ ID NO: 3240869 - RNA, 23 nt, Human
cucagguggggucacucuggcag

SEQ ID NO: 3240870 - RNA, 16 nt, Human
cucaggugucccugca

SEQ ID NO: 3240871 - RNA, 15 nt, Human
cucaggugucccugc

SEQ ID NO: 3240872 - RNA, 20 nt, Human
cucagguacuucucucuccu

SEQ ID NO: 3240873 - RNA, 18 nt, Human
cucaggucccugcagggc

SEQ ID NO: 3240874 - RNA, 17 nt, Human
cucaggucccugcaggg

SEQ ID NO: 3240875 - RNA, 12 nt, Human
cucagggucccu

SEQ ID NO: 3240876 - RNA, 23 nt, Human
cuaaaaggcccagagagaagagc

SEQ ID NO: 3240877 - RNA, 18 nt, Human
cuaaaaggcccagagaga

SEQ ID NO: 3240878 - RNA, 14 nt, Human
cuaaaaggcccaga

SEQ ID NO: 3240879 - RNA, 13 nt, Human
cuaaaaggcccag

SEQ ID NO: 3240880 - RNA, 12 nt, Human
cuaaaaggccca

SEQ ID NO: 3240881 - RNA, 23 nt, Human
cuaaaagguaugcaaucaaaucu

SEQ ID NO: 3240882 - RNA, 22 nt, Human
cguuuugcaagguaaaauuuua

SEQ ID NO: 3240883 - RNA, 17 nt, Human
cucauuccagaggaagg

SEQ ID NO: 3240884 - RNA, 15 nt, Human
cucauuccagaggaa

SEQ ID NO: 3240885 - RNA, 21 nt, Human
cucauuccaccuucccaugcc

SEQ ID NO: 3240886 - RNA, 16 nt, Human
cucauucagcaucuga

SEQ ID NO: 3240887 - RNA, 18 nt, Human
cucauuccaccuucccau

SEQ ID NO: 3240888 - RNA, 12 nt, Human
cucauucuucug

SEQ ID NO: 3240889 - RNA, 21 nt, Human
cucauucccucgucuuuccca

SEQ ID NO: 3240890 - RNA, 20 nt, Human
cucauucccucgucuuuccc

SEQ ID NO: 3240891 - RNA, 14 nt, Human
cucauucuucugua

SEQ ID NO: 3240892 - RNA, 13 nt, Human
cucauucuucugu

SEQ ID NO: 3240893 - RNA, 13 nt, Human
cucauugaccuga

SEQ ID NO: 3240894 - RNA, 15 nt, Human
cucauugaccugagg

SEQ ID NO: 3240895 - RNA, 23 nt, Human
cucauucuucuguacgucugaca

SEQ ID NO: 3240896 - RNA, 16 nt, Human
cucauugaccugaggc

SEQ ID NO: 3240897 - RNA, 21 nt, Human
cucauuagcauuuugcuaaau

SEQ ID NO: 3240898 - RNA, 17 nt, Human
cucauuaggauggcuag

SEQ ID NO: 3240899 - RNA, 18 nt, Human
cucauuaggauggcuagu

SEQ ID NO: 3240900 - RNA, 15 nt, Human
cucauucagcaucug

SEQ ID NO: 3240901 - RNA, 14 nt, Human
cucauucagcaucu

SEQ ID NO: 3240902 - RNA, 17 nt, Human
cucaucucaguccucaa

SEQ ID NO: 3240903 - RNA, 23 nt, Human
cucauuaggcaugguuuugggcu

SEQ ID NO: 3240904 - RNA, 12 nt, Human
cucaucauuuuu

SEQ ID NO: 3240905 - RNA, 14 nt, Human
cuccuucaccuuug

SEQ ID NO: 3240906 - RNA, 16 nt, Human
cuccuucaccuuuguc

SEQ ID NO: 3240907 - RNA, 19 nt, Human
cuccuucaccuuugucccc

SEQ ID NO: 3240908 - RNA, 21 nt, Human
cuccuucaccuuuguccccac

SEQ ID NO: 3240909 - RNA, 15 nt, Human
cuccugcaggcagcc

SEQ ID NO: 3240910 - RNA, 21 nt, Human
cuccugcaggcagccaggcca

SEQ ID NO: 3240911 - RNA, 22 nt, Human
cuccugcaggcagccaggccac

SEQ ID NO: 3240912 - RNA, 11 nt, Human
cuccugugugu

SEQ ID NO: 3240913 - RNA, 23 nt, Human
cuccugugucuugcaauggcagc

SEQ ID NO: 3240914 - RNA, 15 nt, Human
cuccugugucuugca

SEQ ID NO: 3240915 - RNA, 11 nt, Human
cuccugccacc

SEQ ID NO: 3240916 - RNA, 20 nt, Human
cuccuucuguccuacucugu

SEQ ID NO: 3240917 - RNA, 15 nt, Human
cuccuucuguccuac

SEQ ID NO: 3240918 - RNA, 14 nt, Human
cuccuucuguccua

SEQ ID NO: 3240919 - RNA, 13 nt, Human
cuccuucaccuuu

SEQ ID NO: 3240920 - RNA, 13 nt, Human
cuccuucacuguu

SEQ ID NO: 3240921 - RNA, 15 nt, Human
cuccuucacuguuuc

SEQ ID NO: 3240922 - RNA, 16 nt, Human
cucgaacuggcugcaa

SEQ ID NO: 3240923 - RNA, 22 nt, Human
cuccuugauauuuguauuuauu

SEQ ID NO: 3240924 - RNA, 15 nt, Human
cuccuugauauuugu

SEQ ID NO: 3240925 - RNA, 11 nt, Human
cuccuucuucc

SEQ ID NO: 3240926 - RNA, 21 nt, Human
cuccuugaaaacacuguucuc

SEQ ID NO: 3240927 - RNA, 19 nt, Human
cucuaacaguggacaaagu

SEQ ID NO: 3240928 - RNA, 15 nt, Human
cucuaacaguggaca

SEQ ID NO: 3240929 - RNA, 22 nt, Human
cucuaaagucuguugauuaaag

SEQ ID NO: 3240930 - RNA, 22 nt, Human
cucggccucccaaagugcuggg

SEQ ID NO: 3240931 - RNA, 23 nt, Human
cucggccucccaaagugcuggga

SEQ ID NO: 3240932 - RNA, 23 nt, Human
cucggauccccuuccuaccaccc

SEQ ID NO: 3240933 - RNA, 14 nt, Human
cucggaucagcuga

SEQ ID NO: 3240934 - RNA, 18 nt, Human
cucggaucaggcucccag

SEQ ID NO: 3240935 - RNA, 15 nt, Human
cucggauccccuucc

SEQ ID NO: 3240936 - RNA, 12 nt, Human
cucggagaagag

SEQ ID NO: 3240937 - RNA, 18 nt, Human
cucggacuuagcugggag

SEQ ID NO: 3240938 - RNA, 19 nt, Human
cucggacuuagcugggaga

SEQ ID NO: 3240939 - RNA, 20 nt, Human
cucggagaagagcuguucac

SEQ ID NO: 3240940 - RNA, 13 nt, Human
cucggagaagagc

SEQ ID NO: 3240941 - RNA, 23 nt, Human
cucggaaccugugagcugcacca

SEQ ID NO: 3240942 - RNA, 21 nt, Human
cucgcuauugucaccagggcu

SEQ ID NO: 3240943 - RNA, 19 nt, Human
cucgcuacauuuccgccac

SEQ ID NO: 3240944 - RNA, 13 nt, Human
cucgcgacaaugc

SEQ ID NO: 3240945 - RNA, 15 nt, Human
cucgcgacaaugcaa

SEQ ID NO: 3240946 - RNA, 19 nt, Human
cucgcuauugucaccaggg

SEQ ID NO: 3240947 - RNA, 21 nt, Human
cucgcggccucuucucucaga

SEQ ID NO: 3240948 - RNA, 20 nt, Human
cucgcccagucccagcagcc

SEQ ID NO: 3240949 - RNA, 19 nt, Human
cucgcccagucccagcagc

SEQ ID NO: 3240950 - RNA, 18 nt, Human
cucgcccagucccagcag

SEQ ID NO: 3240951 - RNA, 16 nt, Human
cucgcccagucccagc

SEQ ID NO: 3240952 - RNA, 14 nt, Human
cucgcccaguccca

SEQ ID NO: 3240953 - RNA, 14 nt, Human
cucgaugcagacag

SEQ ID NO: 3240954 - RNA, 16 nt, Human
cucgaguuacagacaa

SEQ ID NO: 3240955 - RNA, 20 nt, Human
cucgaguuacagacaaagcg

SEQ ID NO: 3240956 - RNA, 21 nt, Human
cucgaaguugaucuccccagc

SEQ ID NO: 3240957 - RNA, 12 nt, Human
cucgagucugag

SEQ ID NO: 3240958 - RNA, 19 nt, Human
cucgacauuuuauggaaag

SEQ ID NO: 3240959 - RNA, 12 nt, Human
cuccucagaucu

SEQ ID NO: 3240960 - RNA, 14 nt, Human
cuccucagaucuuc

SEQ ID NO: 3240961 - RNA, 22 nt, Human
cuccucuauccugggcuuuugu

SEQ ID NO: 3240962 - RNA, 18 nt, Human
cuccucuugccacugccu

SEQ ID NO: 3240963 - RNA, 19 nt, Human
cuccucuugccacugccuc

SEQ ID NO: 3240964 - RNA, 17 nt, Human
cuccucuauccugggcu

SEQ ID NO: 3240965 - RNA, 22 nt, Human
cuccucggcuggcuguccaccc

SEQ ID NO: 3240966 - RNA, 21 nt, Human
cuccucggcuggcuguccacc

SEQ ID NO: 3240967 - RNA, 20 nt, Human
cuccucggcuggcuguccac

SEQ ID NO: 3240968 - RNA, 19 nt, Human
cuccucggcuggcugucca

SEQ ID NO: 3240969 - RNA, 15 nt, Human
cuccucggcuggcug

SEQ ID NO: 3240970 - RNA, 13 nt, Human
cuccugcaggcag

SEQ ID NO: 3240971 - RNA, 14 nt, Human
cuccugcaggcagc

SEQ ID NO: 3240972 - RNA, 12 nt, Human
cuccugcaggca

SEQ ID NO: 3240973 - RNA, 17 nt, Human
cuccugaguagcuggga

SEQ ID NO: 3240974 - RNA, 23 nt, Human
cuccugagcccccagcuuccagc

SEQ ID NO: 3240975 - RNA, 22 nt, Human
cuccugagcccccagcuuccag

SEQ ID NO: 3240976 - RNA, 21 nt, Human
cuccugagcccccagcuucca

SEQ ID NO: 3240977 - RNA, 20 nt, Human
cuccugagcccccagcuucc

SEQ ID NO: 3240978 - RNA, 19 nt, Human
cuccugagcccccagcuuc

SEQ ID NO: 3240979 - RNA, 17 nt, Human
cuccugagcccccagcu

SEQ ID NO: 3240980 - RNA, 14 nt, Human
cuccugagccccca

SEQ ID NO: 3240981 - RNA, 11 nt, Human
cuccugagccc

SEQ ID NO: 3240982 - RNA, 13 nt, Human
cuccugagccccc

SEQ ID NO: 3240983 - RNA, 12 nt, Human
cuccugagcccc

SEQ ID NO: 3240984 - RNA, 14 nt, Human
cuccugaccuuagg

SEQ ID NO: 3240985 - RNA, 14 nt, Human
cuccugaccucagg

SEQ ID NO: 3240986 - RNA, 19 nt, Human
cuccugacacaccugcagc

SEQ ID NO: 3240987 - RNA, 20 nt, Human
cuccugacacaccugcagcc

SEQ ID NO: 3240988 - RNA, 22 nt, Human
cuccugacacaccugcagccuc

SEQ ID NO: 3240989 - RNA, 20 nt, Human
cuccugacaccccacuuagc

SEQ ID NO: 3240990 - RNA, 19 nt, Human
cuccugacaccccacuuag

SEQ ID NO: 3240991 - RNA, 16 nt, Human
cuccugacaccccacu

SEQ ID NO: 3240992 - RNA, 15 nt, Human
cuccugacaccccac

SEQ ID NO: 3240993 - RNA, 13 nt, Human
cucccuuucaaca

SEQ ID NO: 3240994 - RNA, 12 nt, Human
cucccuuucaac

SEQ ID NO: 3240995 - RNA, 17 nt, Human
cucccuuggauuguccc

SEQ ID NO: 3240996 - RNA, 23 nt, Human
cuccuagguagcccccucuuccc

SEQ ID NO: 3240997 - RNA, 23 nt, Human
cuccuaguagggguaccacugaa

SEQ ID NO: 3240998 - RNA, 16 nt, Human
cucccuucucuucaca

SEQ ID NO: 3240999 - RNA, 17 nt, Human
cucccuugaccugcuga

SEQ ID NO: 3241000 - RNA, 14 nt, Human
cucccuucuguuga

SEQ ID NO: 3241001 - RNA, 15 nt, Human
cucccuugaccugcu

SEQ ID NO: 3241002 - RNA, 13 nt, Human
cucccuuccucuu

SEQ ID NO: 3241003 - RNA, 14 nt, Human
cucccuuccucuuu

SEQ ID NO: 3241004 - RNA, 14 nt, Human
cucccaucucacac

SEQ ID NO: 3241005 - RNA, 15 nt, Human
cucccaucucacaca

SEQ ID NO: 3241006 - RNA, 18 nt, Human
cucccaucucacacauga

SEQ ID NO: 3241007 - RNA, 10 nt, Human
cucccuuccu

SEQ ID NO: 3241008 - RNA, 23 nt, Human
cucccuucccaccucucucacuc

SEQ ID NO: 3241009 - RNA, 20 nt, Human
cucccuucaaccauucccca

SEQ ID NO: 3241010 - RNA, 19 nt, Human
cucccuucaaccauucccc

SEQ ID NO: 3241011 - RNA, 18 nt, Human
cucccuucaaccauuccc

SEQ ID NO: 3241012 - RNA, 12 nt, Human
cucccuucaacc

SEQ ID NO: 3241013 - RNA, 21 nt, Human
cugaagagaagggcagggcug

SEQ ID NO: 3241014 - RNA, 11 nt, Human
cugaagaggag

SEQ ID NO: 3241015 - RNA, 14 nt, Human
cugaagaggaggag

SEQ ID NO: 3241016 - RNA, 15 nt, Human
cugaagaggaggagg

SEQ ID NO: 3241017 - RNA, 21 nt, Human
cugaagacucauucuucugua

SEQ ID NO: 3241018 - RNA, 19 nt, Human
cugaagacucauucuucug

SEQ ID NO: 3241019 - RNA, 19 nt, Human
cugaacgauccuucaaagu

SEQ ID NO: 3241020 - RNA, 20 nt, Human
cugaacgauccuucaaaguc

SEQ ID NO: 3241021 - RNA, 16 nt, Human
cugaacuuggcgcugc

SEQ ID NO: 3241022 - RNA, 21 nt, Human
cugaacuuggcgcugccccug

SEQ ID NO: 3241023 - RNA, 15 nt, Human
cugaacuuggcgcug

SEQ ID NO: 3241024 - RNA, 16 nt, Human
cugaaccugucuuuug

SEQ ID NO: 3241025 - RNA, 14 nt, Human
cugaaccugucuuu

SEQ ID NO: 3241026 - RNA, 13 nt, Human
cugaaccugucuu

SEQ ID NO: 3241027 - RNA, 19 nt, Human
cucuuuggucuacacugug

SEQ ID NO: 3241028 - RNA, 18 nt, Human
cucuuugggccuggcucc

SEQ ID NO: 3241029 - RNA, 13 nt, Human
cucuuuggaaaag

SEQ ID NO: 3241030 - RNA, 12 nt, Human
cucuuuggaaaa

SEQ ID NO: 3241031 - RNA, 21 nt, Human
cugaaccuggguaacuaggga

SEQ ID NO: 3241032 - RNA, 20 nt, Human
cugaaccugggaaagagauu

SEQ ID NO: 3241033 - RNA, 19 nt, Human
cugaaccugggaaagagau

SEQ ID NO: 3241034 - RNA, 22 nt, Human
cugaagucacugcacagugcau

SEQ ID NO: 3241035 - RNA, 16 nt, Human
cugaagucacugcaca

SEQ ID NO: 3241036 - RNA, 17 nt, Human
cugaagucacugcacag

SEQ ID NO: 3241037 - RNA, 24 nt, Human
cugaagucuuuguacagacaacaa

SEQ ID NO: 3241038 - RNA, 15 nt, Human
cugaagucacacagu

SEQ ID NO: 3241039 - RNA, 14 nt, Human
cugaagucacacag

SEQ ID NO: 3241040 - RNA, 16 nt, Human
cugaauacagaggcaa

SEQ ID NO: 3241041 - RNA, 19 nt, Human
cugaauaagcacuuuuuaa

SEQ ID NO: 3241042 - RNA, 18 nt, Human
cugaauaagcacuuuuua

SEQ ID NO: 3241043 - RNA, 16 nt, Human
cugaauaagcacuuuu

SEQ ID NO: 3241044 - RNA, 16 nt, Human
cugaauaccaguggag

SEQ ID NO: 3241045 - RNA, 19 nt, Human
cugacagacacaggcccgg

SEQ ID NO: 3241046 - RNA, 14 nt, Human
cugaauuuaucuuu

SEQ ID NO: 3241047 - RNA, 17 nt, Human
cugaauuuaucuuugau

SEQ ID NO: 3241048 - RNA, 16 nt, Human
cugaauuuaucuuuga

SEQ ID NO: 3241049 - RNA, 21 nt, Human
cugaauuggaaugcacucaga

SEQ ID NO: 3241050 - RNA, 23 nt, Human
cugaauugagccuaaaaauaaag

SEQ ID NO: 3241051 - RNA, 22 nt, Human
cugaauugagccuaaaaauaaa

SEQ ID NO: 3241052 - RNA, 21 nt, Human
cugaauugagccuaaaaauaa

SEQ ID NO: 3241053 - RNA, 20 nt, Human
cugaauugagccuaaaaaua

SEQ ID NO: 3241054 - RNA, 21 nt, Human
cugacagacacaggcccggcu

SEQ ID NO: 3241055 - RNA, 17 nt, Human
cugacagacagcccucc

SEQ ID NO: 3241056 - RNA, 19 nt, Human
cugacagacagcccuccau

SEQ ID NO: 3241057 - RNA, 11 nt, Human
cugacaggcaa

SEQ ID NO: 3241058 - RNA, 16 nt, Human
cugacagagggaugga

SEQ ID NO: 3241059 - RNA, 20 nt, Human
cugaauuuaucuuugauaac

SEQ ID NO: 3241060 - RNA, 18 nt, Human
cugaauuuaucuuugaua

SEQ ID NO: 3241061 - RNA, 20 nt, Human
cugaauucaccacagacuuu

SEQ ID NO: 3241062 - RNA, 15 nt, Human
cugaaucuucugaaa

SEQ ID NO: 3241063 - RNA, 15 nt, Human
cugaaucuguacaga

SEQ ID NO: 3241064 - RNA, 14 nt, Human
cugaaucuguacag

SEQ ID NO: 3241065 - RNA, 12 nt, Human
cugaaucuguac

SEQ ID NO: 3241066 - RNA, 13 nt, Human
cugaaucccugua

SEQ ID NO: 3241067 - RNA, 19 nt, Human
cugaauccaaaagaaaaac

SEQ ID NO: 3241068 - RNA, 17 nt, Human
cugaauccaaaagaaaa

SEQ ID NO: 3241069 - RNA, 21 nt, Human
cugaauauugccauuaugcuu

SEQ ID NO: 3241070 - RNA, 19 nt, Human
cugacaggcaaugcuggcu

SEQ ID NO: 3241071 - RNA, 18 nt, Human
cugacaggcaaugcuggc

SEQ ID NO: 3241072 - RNA, 17 nt, Human
cugacaggcaaugcugg

SEQ ID NO: 3241073 - RNA, 16 nt, Human
cugacaggcaaugcug

SEQ ID NO: 3241074 - RNA, 20 nt, Human
cugacaggcaaugcuggcug

SEQ ID NO: 3241075 - RNA, 17 nt, Human
cugacauuguuggccaa

SEQ ID NO: 3241076 - RNA, 11 nt, Human
cugacccacug

SEQ ID NO: 3241077 - RNA, 14 nt, Human
cugaccaugcauuu

SEQ ID NO: 3241078 - RNA, 15 nt, Human
cugaccaugcauuuu

SEQ ID NO: 3241079 - RNA, 17 nt, Human
cucuugaacugagcuug

SEQ ID NO: 3241080 - RNA, 16 nt, Human
cucuugaacugagcuu

SEQ ID NO: 3241081 - RNA, 18 nt, Human
cucuugaacuccugaccu

SEQ ID NO: 3241082 - RNA, 19 nt, Human
cucuugaacugagcuugga

SEQ ID NO: 3241083 - RNA, 15 nt, Human
cucuugaccucaggu

SEQ ID NO: 3241084 - RNA, 13 nt, Human
cucuugaccucag

SEQ ID NO: 3241085 - RNA, 16 nt, Human
cucuugaccucaggug

SEQ ID NO: 3241086 - RNA, 16 nt, Human
cucuugacucuugccu

SEQ ID NO: 3241087 - RNA, 22 nt, Human
cucuuggagccugcagagcugc

SEQ ID NO: 3241088 - RNA, 15 nt, Human
cucuuggagccugca

SEQ ID NO: 3241089 - RNA, 22 nt, Human
cucuugggcaauauucucugua

SEQ ID NO: 3241090 - RNA, 20 nt, Human
cucuugggcaauauucucug

SEQ ID NO: 3241091 - RNA, 16 nt, Human
cucuugggcaauauuc

SEQ ID NO: 3241092 - RNA, 15 nt, Human
cucuugggcaauauu

SEQ ID NO: 3241093 - RNA, 12 nt, Human
cucuugggacau

SEQ ID NO: 3241094 - RNA, 18 nt, Human
cucuugguccugcugcag

SEQ ID NO: 3241095 - RNA, 19 nt, Human
cucuugguccugcugcagu

SEQ ID NO: 3241096 - RNA, 17 nt, Human
cucuugguccugcugca

SEQ ID NO: 3241097 - RNA, 21 nt, Human
cucuuggggacaugggucgcc

SEQ ID NO: 3241098 - RNA, 17 nt, Human
cucuugucuuccuauuu

SEQ ID NO: 3241099 - RNA, 17 nt, Human
cucuuuccaucuacccu

SEQ ID NO: 3241100 - RNA, 15 nt, Human
cucuuucccacccag

SEQ ID NO: 3241101 - RNA, 11 nt, Human
cucuuucagug

SEQ ID NO: 3241102 - RNA, 14 nt, Human
cucuuuauugucug

SEQ ID NO: 3241103 - RNA, 20 nt, Human
cucuuuauugucuguaaauc

SEQ ID NO: 3241104 - RNA, 23 nt, Human
cucuugucuuccuauuucagaag

SEQ ID NO: 3241105 - RNA, 21 nt, Human
cucuugucuuccuauuucaga

SEQ ID NO: 3241106 - RNA, 15 nt, Human
cucuuuggacacuca

SEQ ID NO: 3241107 - RNA, 18 nt, Human
cucuuuggacacucacac

SEQ ID NO: 3241108 - RNA, 17 nt, Human
cucuuucuauuguuucu

SEQ ID NO: 3241109 - RNA, 10 nt, Human
cucuuucccu

SEQ ID NO: 3241110 - RNA, 20 nt, Human
cucuuucccacccagccugg

SEQ ID NO: 3241111 - RNA, 19 nt, Human
cucuuucccacccagccug

SEQ ID NO: 3241112 - RNA, 18 nt, Human
cucuuucccacccagccu

SEQ ID NO: 3241113 - RNA, 17 nt, Human
cucuuucccacccagcc

SEQ ID NO: 3241114 - RNA, 16 nt, Human
cucuggcagcucagag

SEQ ID NO: 3241115 - RNA, 17 nt, Human
cucuggcagcucagaga

SEQ ID NO: 3241116 - RNA, 18 nt, Human
cucuggcagcucagagag

SEQ ID NO: 3241117 - RNA, 19 nt, Human
cucuggcagcucagagagg

SEQ ID NO: 3241118 - RNA, 19 nt, Human
cucuguucugcacacagca

SEQ ID NO: 3241119 - RNA, 20 nt, Human
cucuguucugcacacagcac

SEQ ID NO: 3241120 - RNA, 21 nt, Human
cucuguucugcacacagcacg

SEQ ID NO: 3241121 - RNA, 24 nt, Human
cucuuaaaacccaagugccuuagc

SEQ ID NO: 3241122 - RNA, 20 nt, Human
cucuuaaaagaggaaaauga

SEQ ID NO: 3241123 - RNA, 13 nt, Human
cucuuaaaaccca

SEQ ID NO: 3241124 - RNA, 20 nt, Human
cucuucaguuaagccuuugg

SEQ ID NO: 3241125 - RNA, 23 nt, Human
cucuucaguuaagccuuuggaaa

SEQ ID NO: 3241126 - RNA, 19 nt, Human
cucuucaguuaagccuuug

SEQ ID NO: 3241127 - RNA, 17 nt, Human
cucuucucucugcucug

SEQ ID NO: 3241128 - RNA, 15 nt, Human
cucuucucucugcuc

SEQ ID NO: 3241129 - RNA, 14 nt, Human
cucuucucucugcu

SEQ ID NO: 3241130 - RNA, 21 nt, Human
cucuucuccccuuccauuucu

SEQ ID NO: 3241131 - RNA, 20 nt, Human
cucuucuccccuuccauuuc

SEQ ID NO: 3241132 - RNA, 17 nt, Human
cucuucuccccuuccau

SEQ ID NO: 3241133 - RNA, 16 nt, Human
cucuucuccuuucaca

SEQ ID NO: 3241134 - RNA, 13 nt, Human
cucuucucucaga

SEQ ID NO: 3241135 - RNA, 14 nt, Human
cucuucucucagac

SEQ ID NO: 3241136 - RNA, 23 nt, Human
cucuucucucagaccgucuuccu

SEQ ID NO: 3241137 - RNA, 15 nt, Human
cucuucuccuuucac

SEQ ID NO: 3241138 - RNA, 13 nt, Human
cucuucuccuuuc

SEQ ID NO: 3241139 - RNA, 14 nt, Human
cucuucuggaaugg

SEQ ID NO: 3241140 - RNA, 22 nt, Human
cucuuccaggcugggagagccu

SEQ ID NO: 3241141 - RNA, 21 nt, Human
cucuuccaggcugggagagcc

SEQ ID NO: 3241142 - RNA, 23 nt, Human
cucuuccaggcugggagagccuu

SEQ ID NO: 3241143 - RNA, 17 nt, Human
cucuucauauucagcuu

SEQ ID NO: 3241144 - RNA, 12 nt, Human
cucuucuccagg

SEQ ID NO: 3241145 - RNA, 16 nt, Human
cucuucuccccuucca

SEQ ID NO: 3241146 - RNA, 14 nt, Human
cucuucuccccuuc

SEQ ID NO: 3241147 - RNA, 19 nt, Human
cucuucuccacuggaugga

SEQ ID NO: 3241148 - RNA, 14 nt, Human
cucuucuccacugg

SEQ ID NO: 3241149 - RNA, 17 nt, Human
cucuucuccacuggaug

SEQ ID NO: 3241150 - RNA, 15 nt, Human
cucuucuccacugga

SEQ ID NO: 3241151 - RNA, 16 nt, Human
cucuccacugccuucg

SEQ ID NO: 3241152 - RNA, 18 nt, Human
cucuaaguguuugcugca

SEQ ID NO: 3241153 - RNA, 16 nt, Human
cucuaaggcaggaugu

SEQ ID NO: 3241154 - RNA, 23 nt, Human
cucucaggccagcugcuugggcu

SEQ ID NO: 3241155 - RNA, 22 nt, Human
cucucaggccagcugcuugggc

SEQ ID NO: 3241156 - RNA, 16 nt, Human
cucuccagcaggccca

SEQ ID NO: 3241157 - RNA, 12 nt, Human
cucuccagcagg

SEQ ID NO: 3241158 - RNA, 13 nt, Human
cucuccagccccu

SEQ ID NO: 3241159 - RNA, 12 nt, Human
cucuccagcccc

SEQ ID NO: 3241160 - RNA, 15 nt, Human
cucuccacugccuuc

SEQ ID NO: 3241161 - RNA, 22 nt, Human
cucuccauuuuggugucuuucu

SEQ ID NO: 3241162 - RNA, 18 nt, Human
cucucccaucacuucccu

SEQ ID NO: 3241163 - RNA, 14 nt, Human
cucucccaucacuu

SEQ ID NO: 3241164 - RNA, 20 nt, Human
cucucccaucacuucccuac

SEQ ID NO: 3241165 - RNA, 13 nt, Human
cucucccaucacu

SEQ ID NO: 3241166 - RNA, 15 nt, Human
cucucucacuccuug

SEQ ID NO: 3241167 - RNA, 16 nt, Human
cucucucacuccuuga

SEQ ID NO: 3241168 - RNA, 12 nt, Human
cucucucaggcc

SEQ ID NO: 3241169 - RNA, 17 nt, Human
cucucugaguauuuccu

SEQ ID NO: 3241170 - RNA, 21 nt, Human
cucucugaaggaggccaccuc

SEQ ID NO: 3241171 - RNA, 20 nt, Human
cucucugaaggaggccaccu

SEQ ID NO: 3241172 - RNA, 19 nt, Human
cucucugaaggaggccacc

SEQ ID NO: 3241173 - RNA, 14 nt, Human
cucucucacuccuu

SEQ ID NO: 3241174 - RNA, 15 nt, Human
cucucgcggccucuu

SEQ ID NO: 3241175 - RNA, 22 nt, Human
cucucgcggccucuucucucag

SEQ ID NO: 3241176 - RNA, 23 nt, Human
cucucgcggccucuucucucaga

SEQ ID NO: 3241177 - RNA, 22 nt, Human
cucuggacaggcauguucucug

SEQ ID NO: 3241178 - RNA, 15 nt, Human
cucugcuuuggaaau

SEQ ID NO: 3241179 - RNA, 18 nt, Human
cucugccuuugcucuggu

SEQ ID NO: 3241180 - RNA, 15 nt, Human
cucugccuuugcucu

SEQ ID NO: 3241181 - RNA, 13 nt, Human
cucugccuuugcu

SEQ ID NO: 3241182 - RNA, 14 nt, Human
cucugccucugaca

SEQ ID NO: 3241183 - RNA, 16 nt, Human
cucugccuccucuuca

SEQ ID NO: 3241184 - RNA, 15 nt, Human
cucugccuccucuuc

SEQ ID NO: 3241185 - RNA, 14 nt, Human
cucugcccuccaag

SEQ ID NO: 3241186 - RNA, 15 nt, Human
cucugcccuccaaga

SEQ ID NO: 3241187 - RNA, 16 nt, Human
cucugcccuccaagac

SEQ ID NO: 3241188 - RNA, 23 nt, Human
cucugcccuccaagaccuucucc

SEQ ID NO: 3241189 - RNA, 23 nt, Human
cucugcccuaaugcgcaggcugg

SEQ ID NO: 3241190 - RNA, 11 nt, Human
cucugcccugc

SEQ ID NO: 3241191 - RNA, 12 nt, Human
cucugcccugcg

SEQ ID NO: 3241192 - RNA, 14 nt, Human
cucugccuccucuu

SEQ ID NO: 3241193 - RNA, 22 nt, Human
cucugcccuaaugcgcaggcug

SEQ ID NO: 3241194 - RNA, 21 nt, Human
cucugccccagcuugggcaga

SEQ ID NO: 3241195 - RNA, 15 nt, Human
cucugccccagcuug

SEQ ID NO: 3241196 - RNA, 13 nt, Human
cucugccccagcu

SEQ ID NO: 3241197 - RNA, 22 nt, Human
cucugcccagcuuuucauugcu

SEQ ID NO: 3241198 - RNA, 14 nt, Human
cucugcccagcuuu

SEQ ID NO: 3241199 - RNA, 13 nt, Human
cucugcccagcuu

SEQ ID NO: 3241200 - RNA, 16 nt, Human
cucugcaaaggaaaua

SEQ ID NO: 3241201 - RNA, 19 nt, Human
cucugcaguacuugaugua

SEQ ID NO: 3241202 - RNA, 23 nt, Human
cucugcauacucauuaggauggc

SEQ ID NO: 3241203 - RNA, 22 nt, Human
cucugcaagaauugaagcagga

SEQ ID NO: 3241204 - RNA, 16 nt, Human
cucugauguauuuugu

SEQ ID NO: 3241205 - RNA, 18 nt, Human
cucugauuuauuuuguau

SEQ ID NO: 3241206 - RNA, 13 nt, Human
cucugauguauuu

SEQ ID NO: 3241207 - RNA, 18 nt, Human
cucugauacuuuuuugaa

SEQ ID NO: 3241208 - RNA, 22 nt, Human
cucugauacuuuuuugaaauca

SEQ ID NO: 3241209 - RNA, 20 nt, Human
cucugauacuuuuuugaaau

SEQ ID NO: 3241210 - RNA, 17 nt, Human
cucugauacuuuuuuga

SEQ ID NO: 3241211 - RNA, 17 nt, Human
cucugaugaagaggagu

SEQ ID NO: 3241212 - RNA, 16 nt, Human
cucugaggacacuaac

SEQ ID NO: 3241213 - RNA, 15 nt, Human
cucugagccuuggga

SEQ ID NO: 3241214 - RNA, 16 nt, Human
cucugagcaaaugugg

SEQ ID NO: 3241215 - RNA, 19 nt, Human
cucugaggaugauguacuu

SEQ ID NO: 3241216 - RNA, 13 nt, Human
cucucugcccuaa

SEQ ID NO: 3241217 - RNA, 21 nt, Human
cucucugcccuaaugcgcagg

SEQ ID NO: 3241218 - RNA, 12 nt, Human
cucucugcccua

SEQ ID NO: 3241219 - RNA, 14 nt, Human
cucucugcucugac

SEQ ID NO: 3241220 - RNA, 16 nt, Human
cuuccuaguucauccc

SEQ ID NO: 3241221 - RNA, 20 nt, Human
cuuccuagcuggagaggagc

SEQ ID NO: 3241222 - RNA, 18 nt, Human
cuuccuacucuucucucu

SEQ ID NO: 3241223 - RNA, 16 nt, Human
cuuccuacucuucucu

SEQ ID NO: 3241224 - RNA, 15 nt, Human
cuuccuacucuucuc

SEQ ID NO: 3241225 - RNA, 14 nt, Human
cuuccuacucuucu

SEQ ID NO: 3241226 - RNA, 17 nt, Human
cuuccuagccuugcacu

SEQ ID NO: 3241227 - RNA, 14 nt, Human
cuuccuagccuugc

SEQ ID NO: 3241228 - RNA, 23 nt, Human
cuuccuacucuucucucugcucu

SEQ ID NO: 3241229 - RNA, 22 nt, Human
cuuccuacucuucucucugcuc

SEQ ID NO: 3241230 - RNA, 21 nt, Human
cuuccuacucuucucucugcu

SEQ ID NO: 3241231 - RNA, 19 nt, Human
cuuccuacucuucucucug

SEQ ID NO: 3241232 - RNA, 17 nt, Human
cuuccuugccagucuuu

SEQ ID NO: 3241233 - RNA, 18 nt, Human
cuuccuucuuugcccuuu

SEQ ID NO: 3241234 - RNA, 16 nt, Human
cuuccuucuuugcccu

SEQ ID NO: 3241235 - RNA, 15 nt, Human
cuuccuucuuugccc

SEQ ID NO: 3241236 - RNA, 19 nt, Human
cuuccuuggacucauuuua

SEQ ID NO: 3241237 - RNA, 15 nt, Human
cuucgcuccuguguc

SEQ ID NO: 3241238 - RNA, 14 nt, Human
cuucgcuccugugu

SEQ ID NO: 3241239 - RNA, 13 nt, Human
cuucgcuccugug

SEQ ID NO: 3241240 - RNA, 17 nt, Human
cuucggccuccauccug

SEQ ID NO: 3241241 - RNA, 13 nt, Human
cuucggcauuuga

SEQ ID NO: 3241242 - RNA, 18 nt, Human
cuucggccuccauccuga

SEQ ID NO: 3241243 - RNA, 20 nt, Human
cuucgggaggucgaggcagg

SEQ ID NO: 3241244 - RNA, 21 nt, Human
cuucgggaggucgaggcagga

SEQ ID NO: 3241245 - RNA, 21 nt, Human
cuucuaaaacuguacuuugau

SEQ ID NO: 3241246 - RNA, 20 nt, Human
cuucuaaaacuguacuuuga

SEQ ID NO: 3241247 - RNA, 19 nt, Human
cuucuaaaacuguacuuug

SEQ ID NO: 3241248 - RNA, 18 nt, Human
cuucuaaaacuguacuuu

SEQ ID NO: 3241249 - RNA, 14 nt, Human
cuucuaaaacugua

SEQ ID NO: 3241250 - RNA, 17 nt, Human
cuucugccauauucugu

SEQ ID NO: 3241251 - RNA, 15 nt, Human
cuucugccauauucu

SEQ ID NO: 3241252 - RNA, 12 nt, Human
cuucucucagac

SEQ ID NO: 3241253 - RNA, 21 nt, Human
cuucucucagaccgucuuccu

SEQ ID NO: 3241254 - RNA, 22 nt, Human
cuucucucagaccgucuuccuc

SEQ ID NO: 3241255 - RNA, 23 nt, Human
cuucucucagaccgucuuccucc

SEQ ID NO: 3241256 - RNA, 21 nt, Human
cuucugccauauucuguuggc

SEQ ID NO: 3241257 - RNA, 17 nt, Human
cuucugcuucagccucc

SEQ ID NO: 3241258 - RNA, 16 nt, Human
cuucugcuucagccuc

SEQ ID NO: 3241259 - RNA, 13 nt, Human
cuucugcuucagc

SEQ ID NO: 3241260 - RNA, 18 nt, Human
cuucugcuucagccuccc

SEQ ID NO: 3241261 - RNA, 11 nt, Human
cuucugcuuug

SEQ ID NO: 3241262 - RNA, 22 nt, Human
cuucugcuuuguugugugccuc

SEQ ID NO: 3241263 - RNA, 20 nt, Human
cuucugcuuuguugugugcc

SEQ ID NO: 3241264 - RNA, 15 nt, Human
cuucugcuuuguugu

SEQ ID NO: 3241265 - RNA, 12 nt, Human
cuucugcuuugu

SEQ ID NO: 3241266 - RNA, 22 nt, Human
cuucuccuucaccuuugucccc

SEQ ID NO: 3241267 - RNA, 19 nt, Human
cuucuccuucaccuuuguc

SEQ ID NO: 3241268 - RNA, 17 nt, Human
cuucuccuuucacaacc

SEQ ID NO: 3241269 - RNA, 14 nt, Human
cuucuccuuucaca

SEQ ID NO: 3241270 - RNA, 22 nt, Human
cuucuccuuucacaaccuucug

SEQ ID NO: 3241271 - RNA, 20 nt, Human
cuucuccuuucacaaccuuc

SEQ ID NO: 3241272 - RNA, 15 nt, Human
cuucuccacccugcu

SEQ ID NO: 3241273 - RNA, 14 nt, Human
cuucuccacccugc

SEQ ID NO: 3241274 - RNA, 14 nt, Human
cuucuccaggcugu

SEQ ID NO: 3241275 - RNA, 17 nt, Human
cuucuccaggcuguauc

SEQ ID NO: 3241276 - RNA, 14 nt, Human
cuuccaagagccug

SEQ ID NO: 3241277 - RNA, 19 nt, Human
cuuccaaccauuuaucuug

SEQ ID NO: 3241278 - RNA, 21 nt, Human
cuuccaaccauuuaucuugaa

SEQ ID NO: 3241279 - RNA, 14 nt, Human
cuucauuuggagau

SEQ ID NO: 3241280 - RNA, 13 nt, Human
cuucauuuggaga

SEQ ID NO: 3241281 - RNA, 21 nt, Human
cuuccaaagcagagagcauua

SEQ ID NO: 3241282 - RNA, 15 nt, Human
cuuccaagagccuga

SEQ ID NO: 3241283 - RNA, 22 nt, Human
cuuccacaagagcccaggccuc

SEQ ID NO: 3241284 - RNA, 23 nt, Human
cuuccacaagagcccaggccucc

SEQ ID NO: 3241285 - RNA, 11 nt, Human
cuucagugccu

SEQ ID NO: 3241286 - RNA, 12 nt, Human
cuucagugccuu

SEQ ID NO: 3241287 - RNA, 22 nt, Human
cuucagguaaagggcaaauaau

SEQ ID NO: 3241288 - RNA, 23 nt, Human
cuucagguaaagggcaaauaaug

SEQ ID NO: 3241289 - RNA, 13 nt, Human
cuucagugccuua

SEQ ID NO: 3241290 - RNA, 14 nt, Human
cuucagugccuuau

SEQ ID NO: 3241291 - RNA, 18 nt, Human
cuucauuuccugugucuu

SEQ ID NO: 3241292 - RNA, 19 nt, Human
cuucaaaacaaacagaugc

SEQ ID NO: 3241293 - RNA, 18 nt, Human
cuuauuuuggagagauag

SEQ ID NO: 3241294 - RNA, 23 nt, Human
cuuauuuuuauaacaucuuuauu

SEQ ID NO: 3241295 - RNA, 11 nt, Human
cuucagcugac

SEQ ID NO: 3241296 - RNA, 14 nt, Human
cuucaggcucuucu

SEQ ID NO: 3241297 - RNA, 18 nt, Human
cuucaggcucuucuccuu

SEQ ID NO: 3241298 - RNA, 17 nt, Human
cuucaggcucuucuccu

SEQ ID NO: 3241299 - RNA, 16 nt, Human
cuucaggcucuucucc

SEQ ID NO: 3241300 - RNA, 15 nt, Human
cuucaggcucuucuc

SEQ ID NO: 3241301 - RNA, 16 nt, Human
cuuccacauguuacug

SEQ ID NO: 3241302 - RNA, 12 nt, Human
cuuccagcagga

SEQ ID NO: 3241303 - RNA, 11 nt, Human
cuuccagcagg

SEQ ID NO: 3241304 - RNA, 23 nt, Human
cuuccagcaggagggacagucuc

SEQ ID NO: 3241305 - RNA, 13 nt, Human
cuuccagcaggag

SEQ ID NO: 3241306 - RNA, 21 nt, Human
cuuccaggggugggacacccu

SEQ ID NO: 3241307 - RNA, 22 nt, Human
cuuccaggggugggacacccug

SEQ ID NO: 3241308 - RNA, 24 nt, Human
cuuccaggggugggacacccugug

SEQ ID NO: 3241309 - RNA, 15 nt, Human
cuuccagugaggcuc

SEQ ID NO: 3241310 - RNA, 16 nt, Human
cuucccacucuucuca

SEQ ID NO: 3241311 - RNA, 15 nt, Human
cuucccacucuucuc

SEQ ID NO: 3241312 - RNA, 14 nt, Human
cuucccacucuucu

SEQ ID NO: 3241313 - RNA, 13 nt, Human
cuucccacucugu

SEQ ID NO: 3241314 - RNA, 14 nt, Human
cuuccagugaggcu

SEQ ID NO: 3241315 - RNA, 12 nt, Human
cuucccagggca

SEQ ID NO: 3241316 - RNA, 23 nt, Human
cuucccgccgcccagcccacccc

SEQ ID NO: 3241317 - RNA, 20 nt, Human
cuucccgccgcccagcccac

SEQ ID NO: 3241318 - RNA, 15 nt, Human
cuucccgcucagccc

SEQ ID NO: 3241319 - RNA, 18 nt, Human
cuucccucccugcuguca

SEQ ID NO: 3241320 - RNA, 16 nt, Human
cuucccucccugcugu

SEQ ID NO: 3241321 - RNA, 14 nt, Human
cuucccucccugcu

SEQ ID NO: 3241322 - RNA, 13 nt, Human
cuucccucccugc

SEQ ID NO: 3241323 - RNA, 17 nt, Human
cuucccgcucagcccuc

SEQ ID NO: 3241324 - RNA, 16 nt, Human
cuucccgcucagcccu

SEQ ID NO: 3241325 - RNA, 23 nt, Human
cuuccuaccacccgguccccacu

SEQ ID NO: 3241326 - RNA, 22 nt, Human
cuuccuaccacccgguccccac

SEQ ID NO: 3241327 - RNA, 22 nt, Human
cuuaacugugguguugaggcuu

SEQ ID NO: 3241328 - RNA, 17 nt, Human
cuuaacuguauagcucu

SEQ ID NO: 3241329 - RNA, 14 nt, Human
cuuaaauuccucaa

SEQ ID NO: 3241330 - RNA, 20 nt, Human
cuuaaauuccucaacagugu

SEQ ID NO: 3241331 - RNA, 22 nt, Human
cuuaaauuccucaacaguguuu

SEQ ID NO: 3241332 - RNA, 22 nt, Human
cuuaacccugacaaauuuuaau

SEQ ID NO: 3241333 - RNA, 15 nt, Human
cuuaacccagugucc

SEQ ID NO: 3241334 - RNA, 13 nt, Human
cuuaaauuuuaac

SEQ ID NO: 3241335 - RNA, 16 nt, Human
cuuaaauuuuaacuaa

SEQ ID NO: 3241336 - RNA, 18 nt, Human
cuuaaauuuuaacuaaau

SEQ ID NO: 3241337 - RNA, 23 nt, Human
cuuaaauuuuaacuaaauuuuaa

SEQ ID NO: 3241338 - RNA, 19 nt, Human
cuuaaauuaguacagcacu

SEQ ID NO: 3241339 - RNA, 18 nt, Human
cuuaaauguuauguauau

SEQ ID NO: 3241340 - RNA, 17 nt, Human
cuuaaauguuauguaua

SEQ ID NO: 3241341 - RNA, 16 nt, Human
cuuaaauguuauguau

SEQ ID NO: 3241342 - RNA, 22 nt, Human
cuuaaaugugaauuacuaacuu

SEQ ID NO: 3241343 - RNA, 19 nt, Human
cuuaaaugugaauuacuaa

SEQ ID NO: 3241344 - RNA, 17 nt, Human
cuuaaaugugaauuacu

SEQ ID NO: 3241345 - RNA, 22 nt, Human
cuuaaaugcaaccauuugaaac

SEQ ID NO: 3241346 - RNA, 16 nt, Human
cuuaaaugugaauuac

SEQ ID NO: 3241347 - RNA, 14 nt, Human
cuuaaaugugaauu

SEQ ID NO: 3241348 - RNA, 13 nt, Human
cuuaaaugugaau

SEQ ID NO: 3241349 - RNA, 12 nt, Human
cuuaaaugugaa

SEQ ID NO: 3241350 - RNA, 19 nt, Human
cuuaaaaaaaacucuuuaa

SEQ ID NO: 3241351 - RNA, 18 nt, Human
cuuaaugccacuaaauug

SEQ ID NO: 3241352 - RNA, 22 nt, Human
cuuaaucauuuuuuauauauau

SEQ ID NO: 3241353 - RNA, 18 nt, Human
cuuaaucauuuuuuauau

SEQ ID NO: 3241354 - RNA, 23 nt, Human
cuuaaucauuuuuuauauauaug

SEQ ID NO: 3241355 - RNA, 20 nt, Human
cuuaaugagcaauaucugcu

SEQ ID NO: 3241356 - RNA, 16 nt, Human
cuuaaguuuauacucu

SEQ ID NO: 3241357 - RNA, 21 nt, Human
cuuaaguuaguuccacugaga

SEQ ID NO: 3241358 - RNA, 19 nt, Human
cuuaaguuaguuccacuga

SEQ ID NO: 3241359 - RNA, 12 nt, Human
cuuaaucauuuu

SEQ ID NO: 3241360 - RNA, 11 nt, Human
cuuaauauuuc

SEQ ID NO: 3241361 - RNA, 12 nt, Human
cuuaauauuucu

SEQ ID NO: 3241362 - RNA, 15 nt, Human
cuuaauauuucuuca

SEQ ID NO: 3241363 - RNA, 19 nt, Human
cuuaauauuucuucaaaua

SEQ ID NO: 3241364 - RNA, 20 nt, Human
cuuaauauuucuucaaauau

SEQ ID NO: 3241365 - RNA, 14 nt, Human
cuuaauauuuuuac

SEQ ID NO: 3241366 - RNA, 16 nt, Human
cuuaauauuuuuacau

SEQ ID NO: 3241367 - RNA, 15 nt, Human
cuuaauauuuuuaca

SEQ ID NO: 3241368 - RNA, 12 nt, Human
cuuaagaaauaa

SEQ ID NO: 3241369 - RNA, 11 nt, Human
cuuaagaaaaa

SEQ ID NO: 3241370 - RNA, 16 nt, Human
cuuaagaacugcuuuc

SEQ ID NO: 3241371 - RNA, 15 nt, Human
cuuaagaaauaaauc

SEQ ID NO: 3241372 - RNA, 20 nt, Human
cuuaagugaggaaaucaaag

SEQ ID NO: 3241373 - RNA, 21 nt, Human
cuuaagugaggaaaucaaagu

SEQ ID NO: 3241374 - RNA, 19 nt, Human
cuuaagugaggaaaucaaa

SEQ ID NO: 3241375 - RNA, 18 nt, Human
cuuaagugaggaaaucaa

SEQ ID NO: 3241376 - RNA, 17 nt, Human
cuguuuugaguuccuau

SEQ ID NO: 3241377 - RNA, 17 nt, Human
cuguuuucucuugagag

SEQ ID NO: 3241378 - RNA, 18 nt, Human
cuguuuugugguuuggaa

SEQ ID NO: 3241379 - RNA, 19 nt, Human
cuguuuugugguuuggaau

SEQ ID NO: 3241380 - RNA, 20 nt, Human
cuguuuugugguuuggaaua

SEQ ID NO: 3241381 - RNA, 14 nt, Human
cuguuuugccagcc

SEQ ID NO: 3241382 - RNA, 21 nt, Human
cuguuuguuucugaaagggac

SEQ ID NO: 3241383 - RNA, 23 nt, Human
cuguuuguuucugaaagggacgc

SEQ ID NO: 3241384 - RNA, 13 nt, Human
cuguuuucucuug

SEQ ID NO: 3241385 - RNA, 14 nt, Human
cuguuuucucuuga

SEQ ID NO: 3241386 - RNA, 15 nt, Human
cuguuuacaguguuc

SEQ ID NO: 3241387 - RNA, 13 nt, Human
cuguuuacagugu

SEQ ID NO: 3241388 - RNA, 17 nt, Human
cugguugaugccuguga

SEQ ID NO: 3241389 - RNA, 19 nt, Human
cuguuuacuugaauaguau

SEQ ID NO: 3241390 - RNA, 19 nt, Human
cuguuuaucccuuaagaau

SEQ ID NO: 3241391 - RNA, 18 nt, Human
cuguuuaucccuuaagaa

SEQ ID NO: 3241392 - RNA, 19 nt, Human
cuguuuagucuccuuuuua

SEQ ID NO: 3241393 - RNA, 18 nt, Human
cuguuuguuucugaaagg

SEQ ID NO: 3241394 - RNA, 20 nt, Human
cuguuucuaauuugcugcug

SEQ ID NO: 3241395 - RNA, 18 nt, Human
cuguuucucagucucaca

SEQ ID NO: 3241396 - RNA, 17 nt, Human
cuguuucucagucucac

SEQ ID NO: 3241397 - RNA, 14 nt, Human
cuuaugacuaugua

SEQ ID NO: 3241398 - RNA, 23 nt, Human
cuuaugauagcaaauggccucau

SEQ ID NO: 3241399 - RNA, 15 nt, Human
cuuauuuaaugaaag

SEQ ID NO: 3241400 - RNA, 15 nt, Human
cuuauuuaaucuuuu

SEQ ID NO: 3241401 - RNA, 22 nt, Human
cuuauuuaaucuuuucuuauuu

SEQ ID NO: 3241402 - RNA, 14 nt, Human
cuuaucaaaggaca

SEQ ID NO: 3241403 - RNA, 17 nt, Human
cuuauauuguaagaaau

SEQ ID NO: 3241404 - RNA, 14 nt, Human
cuuauauuguaaga

SEQ ID NO: 3241405 - RNA, 18 nt, Human
cuuauauuguaagaaaua

SEQ ID NO: 3241406 - RNA, 20 nt, Human
cuuauauuuacaacacuuua

SEQ ID NO: 3241407 - RNA, 16 nt, Human
cuuaucaaaggacacc

SEQ ID NO: 3241408 - RNA, 19 nt, Human
cuuaucaaaguagcaaaug

SEQ ID NO: 3241409 - RNA, 14 nt, Human
cuuauauuugugua

SEQ ID NO: 3241410 - RNA, 17 nt, Human
cuuauaaccuaguuaaa

SEQ ID NO: 3241411 - RNA, 19 nt, Human
cuuauaaccuaguuaaaga

SEQ ID NO: 3241412 - RNA, 21 nt, Human
cuuauaaccuaguuaaagaaa

SEQ ID NO: 3241413 - RNA, 22 nt, Human
cuuauaaccuaguuaaagaaag

SEQ ID NO: 3241414 - RNA, 20 nt, Human
cuuaggugauccacucgccu

SEQ ID NO: 3241415 - RNA, 17 nt, Human
cuuaggguuuucucucu

SEQ ID NO: 3241416 - RNA, 17 nt, Human
cuuagguuggcaaaaag

SEQ ID NO: 3241417 - RNA, 20 nt, Human
cuuauaaaacagaguaaucu

SEQ ID NO: 3241418 - RNA, 15 nt, Human
cuuauaaaacagagu

SEQ ID NO: 3241419 - RNA, 21 nt, Human
cuuauaaaacagaguaaucuu

SEQ ID NO: 3241420 - RNA, 19 nt, Human
cuuauaggaauugacccac

SEQ ID NO: 3241421 - RNA, 13 nt, Human
cuuagaucauagu

SEQ ID NO: 3241422 - RNA, 16 nt, Human
cuuagaucauaguuuu

SEQ ID NO: 3241423 - RNA, 17 nt, Human
cuuagaucauaguuuua

SEQ ID NO: 3241424 - RNA, 18 nt, Human
cuuagaucauaguuuuau

SEQ ID NO: 3241425 - RNA, 19 nt, Human
cuuagaucauaguuuuauu

SEQ ID NO: 3241426 - RNA, 21 nt, Human
cuuagaucauaguuuuauuua

SEQ ID NO: 3241427 - RNA, 22 nt, Human
cuuagaucauaguuuuauuuau

SEQ ID NO: 3241428 - RNA, 17 nt, Human
cuuagacagucccugcc

SEQ ID NO: 3241429 - RNA, 18 nt, Human
cuuagacagucccugcca

SEQ ID NO: 3241430 - RNA, 19 nt, Human
cuuagacagucccugccaa

SEQ ID NO: 3241431 - RNA, 11 nt, Human
cuuagacaguc

SEQ ID NO: 3241432 - RNA, 15 nt, Human
cuuagacagucccug

SEQ ID NO: 3241433 - RNA, 16 nt, Human
cuuagacagucccugc

SEQ ID NO: 3241434 - RNA, 14 nt, Human
cuuagacagucccu

SEQ ID NO: 3241435 - RNA, 15 nt, Human
cuuagaagucacaca

SEQ ID NO: 3241436 - RNA, 15 nt, Human
cuuagaaccuuucuu

SEQ ID NO: 3241437 - RNA, 16 nt, Human
cuuagaagaauauugu

SEQ ID NO: 3241438 - RNA, 17 nt, Human
cuuagaagaauauugua

SEQ ID NO: 3241439 - RNA, 21 nt, Human
cuuagaagaauauuguauugu

SEQ ID NO: 3241440 - RNA, 21 nt, Human
cuuagaagguauuaagauuau

SEQ ID NO: 3241441 - RNA, 14 nt, Human
cuuagaagguauua

SEQ ID NO: 3241442 - RNA, 20 nt, Human
cuuagaacaguggaaacuau

SEQ ID NO: 3241443 - RNA, 17 nt, Human
cuuagaaauugcauuuc

SEQ ID NO: 3241444 - RNA, 16 nt, Human
cuuagaaauugcauuu

SEQ ID NO: 3241445 - RNA, 15 nt, Human
cuuacuuuguaaauu

SEQ ID NO: 3241446 - RNA, 17 nt, Human
cuuacuuuguaaauucu

SEQ ID NO: 3241447 - RNA, 19 nt, Human
cuuacuuuguaaauucuga

SEQ ID NO: 3241448 - RNA, 20 nt, Human
cuuacuuuguaaauucugau

SEQ ID NO: 3241449 - RNA, 21 nt, Human
cuuacuuuguaaauucugauu

SEQ ID NO: 3241450 - RNA, 21 nt, Human
cuuacuuuuaaggauaaauca

SEQ ID NO: 3241451 - RNA, 14 nt, Human
cuuaauggaugaaa

SEQ ID NO: 3241452 - RNA, 19 nt, Human
cuuaauggaugaaaucaua

SEQ ID NO: 3241453 - RNA, 19 nt, Human
cuuacuaguuucccuugca

SEQ ID NO: 3241454 - RNA, 15 nt, Human
cuuacgugaguccug

SEQ ID NO: 3241455 - RNA, 18 nt, Human
cuuacuuuccugaaaaua

SEQ ID NO: 3241456 - RNA, 19 nt, Human
cuuacuuuaccucucuguc

SEQ ID NO: 3241457 - RNA, 20 nt, Human
cuuacuuuaccucucuguca

SEQ ID NO: 3241458 - RNA, 12 nt, Human
cuuacuuuguaa

SEQ ID NO: 3241459 - RNA, 14 nt, Human
cuuacuuuguaaau

SEQ ID NO: 3241460 - RNA, 11 nt, Human
cuuacuuugua

SEQ ID NO: 3241461 - RNA, 22 nt, Human
cuuugacacuuuucauaucauu

SEQ ID NO: 3241462 - RNA, 22 nt, Human
cuuugacagcgcacagcugcuc

SEQ ID NO: 3241463 - RNA, 20 nt, Human
cuuugacagcgcacagcugc

SEQ ID NO: 3241464 - RNA, 19 nt, Human
cuuugacagcgcacagcug

SEQ ID NO: 3241465 - RNA, 19 nt, Human
cuuugaauuuucauuuuac

SEQ ID NO: 3241466 - RNA, 21 nt, Human
cuuugaauuuucauuuuacag

SEQ ID NO: 3241467 - RNA, 20 nt, Human
cuuugaauuuucauuuuaca

SEQ ID NO: 3241468 - RNA, 20 nt, Human
cuuugcauugucugucugca

SEQ ID NO: 3241469 - RNA, 17 nt, Human
cuuugccaaaaagcaua

SEQ ID NO: 3241470 - RNA, 23 nt, Human
cuuuggaaagacuuuuccaaccc

SEQ ID NO: 3241471 - RNA, 12 nt, Human
cuuuggaaagac

SEQ ID NO: 3241472 - RNA, 15 nt, Human
cuuuguucuggcucu

SEQ ID NO: 3241473 - RNA, 15 nt, Human
cuuuguggugagaau

SEQ ID NO: 3241474 - RNA, 16 nt, Human
cuuuguucuggcucuu

SEQ ID NO: 3241475 - RNA, 21 nt, Human
cuuuguucuggcucuuccagg

SEQ ID NO: 3241476 - RNA, 19 nt, Human
cuuugugaggaagccgcug

SEQ ID NO: 3241477 - RNA, 13 nt, Human
cuuuguggcuucc

SEQ ID NO: 3241478 - RNA, 23 nt, Human
cuuugugaggaagccgcuggggc

SEQ ID NO: 3241479 - RNA, 23 nt, Human
cuuugggaggccaaggugggagg

SEQ ID NO: 3241480 - RNA, 16 nt, Human
cuuuggcacucugacu

SEQ ID NO: 3241481 - RNA, 14 nt, Human
cuuucugucucucu

SEQ ID NO: 3241482 - RNA, 13 nt, Human
cuuucuguguuua

SEQ ID NO: 3241483 - RNA, 15 nt, Human
cuuucuguuaaaaug

SEQ ID NO: 3241484 - RNA, 14 nt, Human
cuuucuguuaaaau

SEQ ID NO: 3241485 - RNA, 13 nt, Human
cuuucuguuaaaa

SEQ ID NO: 3241486 - RNA, 19 nt, Human
cuuucuguguuuauucaaa

SEQ ID NO: 3241487 - RNA, 16 nt, Human
cuuucuuccucugcug

SEQ ID NO: 3241488 - RNA, 19 nt, Human
cuuucuguuaaaaugcaug

SEQ ID NO: 3241489 - RNA, 16 nt, Human
cuuucuguuaaaaugc

SEQ ID NO: 3241490 - RNA, 17 nt, Human
cuuucugaucuucacua

SEQ ID NO: 3241491 - RNA, 16 nt, Human
cuuucugcacacaaau

SEQ ID NO: 3241492 - RNA, 19 nt, Human
cuuucugcacacaaauauu

SEQ ID NO: 3241493 - RNA, 16 nt, Human
cuuugaaaauauauac

SEQ ID NO: 3241494 - RNA, 19 nt, Human
cuuucuuuuuuuuuuuuga

SEQ ID NO: 3241495 - RNA, 15 nt, Human
cuuucuuuucuuucu

SEQ ID NO: 3241496 - RNA, 10 nt, Human
cuuucuuuuu

SEQ ID NO: 3241497 - RNA, 19 nt, Human
cuuucuugcucccugacug

SEQ ID NO: 3241498 - RNA, 15 nt, Human
cuuucuugcucccug

SEQ ID NO: 3241499 - RNA, 14 nt, Human
cuuucuugcucccu

SEQ ID NO: 3241500 - RNA, 13 nt, Human
cuuucuugcuccc

SEQ ID NO: 3241501 - RNA, 14 nt, Human
cuuucuucuuccca

SEQ ID NO: 3241502 - RNA, 16 nt, Human
cuuucuucuuccacac

SEQ ID NO: 3241503 - RNA, 12 nt, Human
cuuucuucuccc

SEQ ID NO: 3241504 - RNA, 19 nt, Human
cuuuccucaaaacuucaga

SEQ ID NO: 3241505 - RNA, 13 nt, Human
cuuuagguuuuuu

SEQ ID NO: 3241506 - RNA, 18 nt, Human
cuuuagguuuuuuuaaug

SEQ ID NO: 3241507 - RNA, 20 nt, Human
cuuuagguuuuuuuaaugau

SEQ ID NO: 3241508 - RNA, 22 nt, Human
cuuuagguuuuuuuaaugauau

SEQ ID NO: 3241509 - RNA, 15 nt, Human
cuuuagcgcccaguu

SEQ ID NO: 3241510 - RNA, 21 nt, Human
cuuuaggcauaugcuucuuua

SEQ ID NO: 3241511 - RNA, 15 nt, Human
cuuuagcuuucugag

SEQ ID NO: 3241512 - RNA, 18 nt, Human
cuuuagcuuauuuuuaca

SEQ ID NO: 3241513 - RNA, 14 nt, Human
cuuuagcuguguua

SEQ ID NO: 3241514 - RNA, 14 nt, Human
cuuuagcugacaga

SEQ ID NO: 3241515 - RNA, 17 nt, Human
cuuuagacuugaaaaga

SEQ ID NO: 3241516 - RNA, 21 nt, Human
cuuuagacuugaaaagagaca

SEQ ID NO: 3241517 - RNA, 20 nt, Human
cuuuagagaagauggauaug

SEQ ID NO: 3241518 - RNA, 14 nt, Human
cuuuagagaagaug

SEQ ID NO: 3241519 - RNA, 18 nt, Human
cuuuccuccuucacuguu

SEQ ID NO: 3241520 - RNA, 19 nt, Human
cuuuccuccuucacuguuu

SEQ ID NO: 3241521 - RNA, 21 nt, Human
cuuucugagcaagaggauuuu

SEQ ID NO: 3241522 - RNA, 16 nt, Human
gaaaaguaauauuuau

SEQ ID NO: 3241523 - RNA, 17 nt, Human
gaaaaguaauauuuauu

SEQ ID NO: 3241524 - RNA, 19 nt, Human
gaaaaguaauauuuauuaa

SEQ ID NO: 3241525 - RNA, 20 nt, Human
gaaaaguaauauuuauuaaa

SEQ ID NO: 3241526 - RNA, 14 nt, Human
gaaaaguaauauuu

SEQ ID NO: 3241527 - RNA, 22 nt, Human
gaaaagucaaggguaggguggg

SEQ ID NO: 3241528 - RNA, 13 nt, Human
gaaaaccuagaaa

SEQ ID NO: 3241529 - RNA, 15 nt, Human
gaaaaccccuuccca

SEQ ID NO: 3241530 - RNA, 16 nt, Human
gaaaacauggaacagu

SEQ ID NO: 3241531 - RNA, 17 nt, Human
gaaaagggaguuuaaaa

SEQ ID NO: 3241532 - RNA, 22 nt, Human
gaaaagggaguuuaaaaauggu

SEQ ID NO: 3241533 - RNA, 13 nt, Human
gaaaagguugaau

SEQ ID NO: 3241534 - RNA, 16 nt, Human
gaaaagguugaauaau

SEQ ID NO: 3241535 - RNA, 19 nt, Human
gaaaagguugaauaauaua

SEQ ID NO: 3241536 - RNA, 19 nt, Human
gaaaaggugauaaaaucau

SEQ ID NO: 3241537 - RNA, 18 nt, Human
gaaaaggugauaaaauca

SEQ ID NO: 3241538 - RNA, 15 nt, Human
gaaaaccuagaaaac

SEQ ID NO: 3241539 - RNA, 18 nt, Human
gaaaacgauuuaauuuau

SEQ ID NO: 3241540 - RNA, 17 nt, Human
gaaaacgauuuaauuua

SEQ ID NO: 3241541 - RNA, 20 nt, Human
gaaaacacuguucucugccc

SEQ ID NO: 3241542 - RNA, 21 nt, Human
gaaaacacuguucucugcccu

SEQ ID NO: 3241543 - RNA, 18 nt, Human
gaaaacacuguucucugc

SEQ ID NO: 3241544 - RNA, 22 nt, Human
gaaaacaaaaccaaaaguuauu

SEQ ID NO: 3241545 - RNA, 19 nt, Human
gaaaacacuguucucugcc

SEQ ID NO: 3241546 - RNA, 19 nt, Human
gaaaacaaaaccaaaaguu

SEQ ID NO: 3241547 - RNA, 18 nt, Human
gaaaaauuugaaaaugau

SEQ ID NO: 3241548 - RNA, 14 nt, Human
gaaaaauuucacga

SEQ ID NO: 3241549 - RNA, 15 nt, Human
gaaaaauuucacgau

SEQ ID NO: 3241550 - RNA, 20 nt, Human
gaaaaauaucuguaagagug

SEQ ID NO: 3241551 - RNA, 12 nt, Human
gaaaaauaugug

SEQ ID NO: 3241552 - RNA, 13 nt, Human
cuuuuuuacaaag

SEQ ID NO: 3241553 - RNA, 21 nt, Human
gaaaaaucaaguauuauaaac

SEQ ID NO: 3241554 - RNA, 20 nt, Human
gaaaaauauuuaauguugaa

SEQ ID NO: 3241555 - RNA, 16 nt, Human
gaaaaauauuuaaugu

SEQ ID NO: 3241556 - RNA, 15 nt, Human
gaaaaauauuuaaug

SEQ ID NO: 3241557 - RNA, 20 nt, Human
gaaaaaucaaguauuauaaa

SEQ ID NO: 3241558 - RNA, 13 nt, Human
gaaaaauauguga

SEQ ID NO: 3241559 - RNA, 15 nt, Human
gaaaaauaugugaag

SEQ ID NO: 3241560 - RNA, 14 nt, Human
gaaaaauaugugaa

SEQ ID NO: 3241561 - RNA, 10 nt, Human
gaaaaauauu

SEQ ID NO: 3241562 - RNA, 16 nt, Human
gaaaaauaugugaagg

SEQ ID NO: 3241563 - RNA, 18 nt, Human
cuuuuugcucuaaaauau

SEQ ID NO: 3241564 - RNA, 16 nt, Human
cuuuuugcucuaaaau

SEQ ID NO: 3241565 - RNA, 15 nt, Human
cuuuuugcucuaaaa

SEQ ID NO: 3241566 - RNA, 14 nt, Human
cuuuuuuaaauuaa

SEQ ID NO: 3241567 - RNA, 15 nt, Human
cuuuuuuaaauuaau

SEQ ID NO: 3241568 - RNA, 16 nt, Human
cuuuuuuaaauuaaua

SEQ ID NO: 3241569 - RNA, 11 nt, Human
cuuuuuggaau

SEQ ID NO: 3241570 - RNA, 12 nt, Human
cuuuuuggaauc

SEQ ID NO: 3241571 - RNA, 18 nt, Human
cuuuuuggaaucuuugua

SEQ ID NO: 3241572 - RNA, 14 nt, Human
cuuuuugcucuaaa

SEQ ID NO: 3241573 - RNA, 18 nt, Human
cuuuuugaaucuuuaauu

SEQ ID NO: 3241574 - RNA, 13 nt, Human
cuuuuugaaucuu

SEQ ID NO: 3241575 - RNA, 17 nt, Human
cuuuuugaaucuuuaau

SEQ ID NO: 3241576 - RNA, 15 nt, Human
cuuuuugaaucuuua

SEQ ID NO: 3241577 - RNA, 21 nt, Human
cuuuuguuuuuugaaguguug

SEQ ID NO: 3241578 - RNA, 23 nt, Human
cuuuuuaaagcuuuugauguggu

SEQ ID NO: 3241579 - RNA, 19 nt, Human
cuuuuguuuuuugaagugu

SEQ ID NO: 3241580 - RNA, 18 nt, Human
cuuuuguuuuuugaagug

SEQ ID NO: 3241581 - RNA, 17 nt, Human
cuuuuguuuuuugaagu

SEQ ID NO: 3241582 - RNA, 13 nt, Human
cuuuuguuuuuug

SEQ ID NO: 3241583 - RNA, 15 nt, Human
cuuuuguuuugcuuu

SEQ ID NO: 3241584 - RNA, 14 nt, Human
cuuuuguuuugcuu

SEQ ID NO: 3241585 - RNA, 15 nt, Human
cuuuuguuguuucuu

SEQ ID NO: 3241586 - RNA, 17 nt, Human
cuuuuguuguuucuuaa

SEQ ID NO: 3241587 - RNA, 15 nt, Human
cuuuucuguuugcua

SEQ ID NO: 3241588 - RNA, 23 nt, Human
cuuuucuguccgagcuuugaaaa

SEQ ID NO: 3241589 - RNA, 11 nt, Human
cuuuucuuauu

SEQ ID NO: 3241590 - RNA, 17 nt, Human
cuuuucuuauuuuugua

SEQ ID NO: 3241591 - RNA, 18 nt, Human
cuuuucuguguuuacaga

SEQ ID NO: 3241592 - RNA, 13 nt, Human
cuuuucuguguuu

SEQ ID NO: 3241593 - RNA, 22 nt, Human
cuuuucuguguuuacagagaug

SEQ ID NO: 3241594 - RNA, 22 nt, Human
cuuuguugugugccucuagcug

SEQ ID NO: 3241595 - RNA, 21 nt, Human
cuuuguuuguugucagcugaa

SEQ ID NO: 3241596 - RNA, 17 nt, Human
cuuuguuuuacugucuu

SEQ ID NO: 3241597 - RNA, 20 nt, Human
cuuuguuuguugucagcuga

SEQ ID NO: 3241598 - RNA, 18 nt, Human
cuuuguugugugccucua

SEQ ID NO: 3241599 - RNA, 17 nt, Human
cuuuguugugugccucu

SEQ ID NO: 3241600 - RNA, 13 nt, Human
cuuuguugugugc

SEQ ID NO: 3241601 - RNA, 22 nt, Human
cuuuguugaacuguuagaaugu

SEQ ID NO: 3241602 - RNA, 17 nt, Human
cuuuguugaacuguuag

SEQ ID NO: 3241603 - RNA, 16 nt, Human
cuuuguugaaagaaag

SEQ ID NO: 3241604 - RNA, 13 nt, Human
cuuuguugaaaga

SEQ ID NO: 3241605 - RNA, 14 nt, Human
cuuggaagcuccgc

SEQ ID NO: 3241606 - RNA, 20 nt, Human
cuuggaagcuccgcuuucua

SEQ ID NO: 3241607 - RNA, 20 nt, Human
cuugcuucaaccccaugaga

SEQ ID NO: 3241608 - RNA, 16 nt, Human
cuugcugcacucuugc

SEQ ID NO: 3241609 - RNA, 17 nt, Human
cuugcugcacucuugca

SEQ ID NO: 3241610 - RNA, 21 nt, Human
cuugcugcacucuugcacaug

SEQ ID NO: 3241611 - RNA, 23 nt, Human
cuugcugcacucuugcacaugga

SEQ ID NO: 3241612 - RNA, 22 nt, Human
cuugcccuguuaaaagaugaaa

SEQ ID NO: 3241613 - RNA, 16 nt, Human
cuugccccaacccuuc

SEQ ID NO: 3241614 - RNA, 22 nt, Human
cuugcucugcugacagacacag

SEQ ID NO: 3241615 - RNA, 17 nt, Human
cuugcucugcugacaga

SEQ ID NO: 3241616 - RNA, 21 nt, Human
cuugcccaugcugggcucccg

SEQ ID NO: 3241617 - RNA, 17 nt, Human
cuugcccaugcugggcu

SEQ ID NO: 3241618 - RNA, 18 nt, Human
cuugcccuggugccucac

SEQ ID NO: 3241619 - RNA, 14 nt, Human
cuugcccuguuaaa

SEQ ID NO: 3241620 - RNA, 12 nt, Human
cuugccagucuu

SEQ ID NO: 3241621 - RNA, 22 nt, Human
cuugccagcugcugagccgcag

SEQ ID NO: 3241622 - RNA, 13 nt, Human
cuugcaugaggcu

SEQ ID NO: 3241623 - RNA, 14 nt, Human
cuugcaugaggcua

SEQ ID NO: 3241624 - RNA, 23 nt, Human
cuugcaucaauuuuucuuauuuc

SEQ ID NO: 3241625 - RNA, 21 nt, Human
cuugcagacucuacagaggcc

SEQ ID NO: 3241626 - RNA, 20 nt, Human
cuugcagacucuacagaggc

SEQ ID NO: 3241627 - RNA, 12 nt, Human
cuugcacauuug

SEQ ID NO: 3241628 - RNA, 14 nt, Human
cuugcacacaucau

SEQ ID NO: 3241629 - RNA, 13 nt, Human
cuugcacacauca

SEQ ID NO: 3241630 - RNA, 23 nt, Human
cuugcacacaucaucuguaagcu

SEQ ID NO: 3241631 - RNA, 20 nt, Human
cuugcacacaucaucuguaa

SEQ ID NO: 3241632 - RNA, 19 nt, Human
cuugcacacaucaucugua

SEQ ID NO: 3241633 - RNA, 18 nt, Human
cuugcacacaucaucugu

SEQ ID NO: 3241634 - RNA, 20 nt, Human
cuugaguugauucagcucug

SEQ ID NO: 3241635 - RNA, 20 nt, Human
cuugaggggagccaggaggg

SEQ ID NO: 3241636 - RNA, 17 nt, Human
cuugaggggagccagga

SEQ ID NO: 3241637 - RNA, 18 nt, Human
cuugaguugauucagcuc

SEQ ID NO: 3241638 - RNA, 19 nt, Human
cuugaguugauucagcucu

SEQ ID NO: 3241639 - RNA, 18 nt, Human
cuugcaauggcagccuug

SEQ ID NO: 3241640 - RNA, 17 nt, Human
cuugcaauggcagccuu

SEQ ID NO: 3241641 - RNA, 16 nt, Human
cuugcaauggcagccu

SEQ ID NO: 3241642 - RNA, 15 nt, Human
cuugcaauggcagcc

SEQ ID NO: 3241643 - RNA, 12 nt, Human
cuugagccuggg

SEQ ID NO: 3241644 - RNA, 15 nt, Human
cuugagccugggagg

SEQ ID NO: 3241645 - RNA, 17 nt, Human
cuugaggguugggcugg

SEQ ID NO: 3241646 - RNA, 15 nt, Human
cuugaggguugggcu

SEQ ID NO: 3241647 - RNA, 16 nt, Human
cuugaggggagccagg

SEQ ID NO: 3241648 - RNA, 17 nt, Human
cuucuggcacuuggaga

SEQ ID NO: 3241649 - RNA, 14 nt, Human
cuuguagauuugau

SEQ ID NO: 3241650 - RNA, 15 nt, Human
cuuguagauuugauu

SEQ ID NO: 3241651 - RNA, 20 nt, Human
cuuguaauguaacugcucuu

SEQ ID NO: 3241652 - RNA, 13 nt, Human
cuuguaauguaac

SEQ ID NO: 3241653 - RNA, 15 nt, Human
cuuguaauguaacug

SEQ ID NO: 3241654 - RNA, 14 nt, Human
cuuguaauguaacu

SEQ ID NO: 3241655 - RNA, 15 nt, Human
cuuggggccuaugca

SEQ ID NO: 3241656 - RNA, 15 nt, Human
cuugggggaaaauac

SEQ ID NO: 3241657 - RNA, 18 nt, Human
cuugggcucugcugaguc

SEQ ID NO: 3241658 - RNA, 14 nt, Human
cuugggcucugcug

SEQ ID NO: 3241659 - RNA, 13 nt, Human
cuugggcucugcu

SEQ ID NO: 3241660 - RNA, 18 nt, Human
cuugggccgagccugccu

SEQ ID NO: 3241661 - RNA, 15 nt, Human
cuuggaagcuucugg

SEQ ID NO: 3241662 - RNA, 15 nt, Human
cuuggaagcuguuug

SEQ ID NO: 3241663 - RNA, 16 nt, Human
cuuggaagcuguuugg

SEQ ID NO: 3241664 - RNA, 19 nt, Human
cuuggaagcuguuuggaaa

SEQ ID NO: 3241665 - RNA, 20 nt, Human
cuuggaagcuguuuggaaaa

SEQ ID NO: 3241666 - RNA, 16 nt, Human
cuuggacucauuuuaa

SEQ ID NO: 3241667 - RNA, 22 nt, Human
cuuggagccaauggagacuguc

SEQ ID NO: 3241668 - RNA, 18 nt, Human
cuugggccacugugaaga

SEQ ID NO: 3241669 - RNA, 20 nt, Human
cuugggccacugugaagaga

SEQ ID NO: 3241670 - RNA, 20 nt, Human
cuugggagugugguuucuuu

SEQ ID NO: 3241671 - RNA, 17 nt, Human
cuugggauccaggcccc

SEQ ID NO: 3241672 - RNA, 19 nt, Human
cuugggcaauauucucugu

SEQ ID NO: 3241673 - RNA, 15 nt, Human
cuugggcaauauucu

SEQ ID NO: 3241674 - RNA, 13 nt, Human
cuugggcaauauu

SEQ ID NO: 3241675 - RNA, 21 nt, Human
cuugggcaauauucucuguac

SEQ ID NO: 3241676 - RNA, 20 nt, Human
cuugggcaauauucucugua

SEQ ID NO: 3241677 - RNA, 22 nt, Human
cuugggcaauauucucuguaca

SEQ ID NO: 3241678 - RNA, 19 nt, Human
cuuuaaaaaagcuauaaau

SEQ ID NO: 3241679 - RNA, 14 nt, Human
cuuguuuauuaaau

SEQ ID NO: 3241680 - RNA, 12 nt, Human
cuuguuucuccc

SEQ ID NO: 3241681 - RNA, 12 nt, Human
cuuguugacaga

SEQ ID NO: 3241682 - RNA, 15 nt, Human
cuuguugaauuuauu

SEQ ID NO: 3241683 - RNA, 20 nt, Human
cuuguucuuccaaagcagag

SEQ ID NO: 3241684 - RNA, 18 nt, Human
cuuguucuuccaaagcag

SEQ ID NO: 3241685 - RNA, 13 nt, Human
cuuguucuuccaa

SEQ ID NO: 3241686 - RNA, 20 nt, Human
cuuguugccuauaagccaaa

SEQ ID NO: 3241687 - RNA, 12 nt, Human
cuuuagacuuga

SEQ ID NO: 3241688 - RNA, 13 nt, Human
cuuuagacuugaa

SEQ ID NO: 3241689 - RNA, 14 nt, Human
cuuuagacuugaaa

SEQ ID NO: 3241690 - RNA, 15 nt, Human
cuuuagacuugaaaa

SEQ ID NO: 3241691 - RNA, 17 nt, Human
cuuuaccugugaagugu

SEQ ID NO: 3241692 - RNA, 16 nt, Human
cuuuaccucucuguca

SEQ ID NO: 3241693 - RNA, 22 nt, Human
cuuuaaaaaauuaaucugggcc

SEQ ID NO: 3241694 - RNA, 22 nt, Human
cuuuaaaaaagcuauaaauuau

SEQ ID NO: 3241695 - RNA, 21 nt, Human
cuuuaaaaagcuccaaaugca

SEQ ID NO: 3241696 - RNA, 13 nt, Human
cuuuaaaaacugu

SEQ ID NO: 3241697 - RNA, 14 nt, Human
cuuuaaaaacuguu

SEQ ID NO: 3241698 - RNA, 15 nt, Human
cuuuaaaaauuuacu

SEQ ID NO: 3241699 - RNA, 12 nt, Human
cuuguucuucca

SEQ ID NO: 3241700 - RNA, 14 nt, Human
cuuguucuuacuuu

SEQ ID NO: 3241701 - RNA, 16 nt, Human
cuuguuaagauaguua

SEQ ID NO: 3241702 - RNA, 21 nt, Human
cuugugggugugagcagcacc

SEQ ID NO: 3241703 - RNA, 14 nt, Human
cuugugguccaaau

SEQ ID NO: 3241704 - RNA, 15 nt, Human
cuugugguccaaaua

SEQ ID NO: 3241705 - RNA, 16 nt, Human
cuuguggucccacccc

SEQ ID NO: 3241706 - RNA, 19 nt, Human
cuuguggucccaccccaca

SEQ ID NO: 3241707 - RNA, 15 nt, Human
cuuguggucccaccc

SEQ ID NO: 3241708 - RNA, 17 nt, Human
cuuguagauuugauuuu

SEQ ID NO: 3241709 - RNA, 22 nt, Human
gaagggguaggauuacuaggug

SEQ ID NO: 3241710 - RNA, 16 nt, Human
gaagggggcugggaca

SEQ ID NO: 3241711 - RNA, 19 nt, Human
gaagggggcugggacaugg

SEQ ID NO: 3241712 - RNA, 14 nt, Human
gaagcggcuggcag

SEQ ID NO: 3241713 - RNA, 15 nt, Human
gaagggggcugggac

SEQ ID NO: 3241714 - RNA, 22 nt, Human
gaagguggccuuccugcuguua

SEQ ID NO: 3241715 - RNA, 15 nt, Human
gaaguacuggagaaa

SEQ ID NO: 3241716 - RNA, 12 nt, Human
gaaguagcacag

SEQ ID NO: 3241717 - RNA, 16 nt, Human
gaaguaccuuaucaaa

SEQ ID NO: 3241718 - RNA, 18 nt, Human
gaaguacuauaauuuacc

SEQ ID NO: 3241719 - RNA, 14 nt, Human
gaaguauccuucag

SEQ ID NO: 3241720 - RNA, 14 nt, Human
gaaguagcuuugca

SEQ ID NO: 3241721 - RNA, 18 nt, Human
gaaguagcacaggcugag

SEQ ID NO: 3241722 - RNA, 16 nt, Human
gaaguagcacaggcug

SEQ ID NO: 3241723 - RNA, 15 nt, Human
gaaguagcacaggcu

SEQ ID NO: 3241724 - RNA, 13 nt, Human
gaaguagcacagg

SEQ ID NO: 3241725 - RNA, 16 nt, Human
gaaguaggggaagaau

SEQ ID NO: 3241726 - RNA, 18 nt, Human
gaaguagggguggcccga

SEQ ID NO: 3241727 - RNA, 21 nt, Human
gaaguaggggaagaauaauuu

SEQ ID NO: 3241728 - RNA, 23 nt, Human
gaaguagugucuggaucaguaaa

SEQ ID NO: 3241729 - RNA, 21 nt, Human
gaagucaugcuccccugugcc

SEQ ID NO: 3241730 - RNA, 16 nt, Human
gaaguauccuucagcc

SEQ ID NO: 3241731 - RNA, 21 nt, Human
gaaguuucugccgcagcccug

SEQ ID NO: 3241732 - RNA, 15 nt, Human
gaagucuuagaugua

SEQ ID NO: 3241733 - RNA, 20 nt, Human
gaaguuucugccgcagcccu

SEQ ID NO: 3241734 - RNA, 17 nt, Human
gaauauuugaauguaug

SEQ ID NO: 3241735 - RNA, 19 nt, Human
gaauagggcccaugggagg

SEQ ID NO: 3241736 - RNA, 21 nt, Human
gaauagggcccaugggaggga

SEQ ID NO: 3241737 - RNA, 16 nt, Human
gaauauuuuaacuucc

SEQ ID NO: 3241738 - RNA, 17 nt, Human
gaaucaaauaaaaauuc

SEQ ID NO: 3241739 - RNA, 22 nt, Human
gaauagcugggacuacaggugu

SEQ ID NO: 3241740 - RNA, 23 nt, Human
gaauagcugggacuacaggugug

SEQ ID NO: 3241741 - RNA, 21 nt, Human
gaauaggacuuguuuuuguuu

SEQ ID NO: 3241742 - RNA, 19 nt, Human
gaauaggacuuguuuuugu

SEQ ID NO: 3241743 - RNA, 18 nt, Human
gaauaggacuuguuuuug

SEQ ID NO: 3241744 - RNA, 22 nt, Human
gaauagcuuuaaugauaugcuu

SEQ ID NO: 3241745 - RNA, 15 nt, Human
gaauaccuguccccc

SEQ ID NO: 3241746 - RNA, 13 nt, Human
gaauaccuguccc

SEQ ID NO: 3241747 - RNA, 17 nt, Human
gaauaauacaguaucuc

SEQ ID NO: 3241748 - RNA, 17 nt, Human
gaauaagcacuuuuuaa

SEQ ID NO: 3241749 - RNA, 16 nt, Human
gaauaagcacuuuuua

SEQ ID NO: 3241750 - RNA, 21 nt, Human
gaauacagaggcaacugcauu

SEQ ID NO: 3241751 - RNA, 19 nt, Human
gaauaacauguaauuaagu

SEQ ID NO: 3241752 - RNA, 18 nt, Human
gaauaacauguaauuaag

SEQ ID NO: 3241753 - RNA, 14 nt, Human
gaauaacauguaau

SEQ ID NO: 3241754 - RNA, 16 nt, Human
gaauaaaaauuccaga

SEQ ID NO: 3241755 - RNA, 20 nt, Human
gaaguuugagaucagccugg

SEQ ID NO: 3241756 - RNA, 15 nt, Human
gaaguuugauaaaua

SEQ ID NO: 3241757 - RNA, 19 nt, Human
gaaguuugauaaauagugu

SEQ ID NO: 3241758 - RNA, 16 nt, Human
gaaguuugauaaauag

SEQ ID NO: 3241759 - RNA, 20 nt, Human
gaaguuugauaaauaguguu

SEQ ID NO: 3241760 - RNA, 18 nt, Human
gaauguaugcuucauaca

SEQ ID NO: 3241761 - RNA, 16 nt, Human
gaauguaugcuucaua

SEQ ID NO: 3241762 - RNA, 22 nt, Human
gaaugguuuucaaaauaaaaau

SEQ ID NO: 3241763 - RNA, 13 nt, Human
gaauguaaagcaa

SEQ ID NO: 3241764 - RNA, 21 nt, Human
gaauguaugcuucauacaggg

SEQ ID NO: 3241765 - RNA, 13 nt, Human
gaaugucagugug

SEQ ID NO: 3241766 - RNA, 14 nt, Human
gaaugucaguguga

SEQ ID NO: 3241767 - RNA, 18 nt, Human
gaauggcaauguuuugcu

SEQ ID NO: 3241768 - RNA, 15 nt, Human
gaauggacauuucua

SEQ ID NO: 3241769 - RNA, 16 nt, Human
gaauggugauuuuaaa

SEQ ID NO: 3241770 - RNA, 14 nt, Human
gaauggugauuuua

SEQ ID NO: 3241771 - RNA, 21 nt, Human
gaauggugauuuuaaaugugu

SEQ ID NO: 3241772 - RNA, 17 nt, Human
gaauggugcauuguaua

SEQ ID NO: 3241773 - RNA, 19 nt, Human
gaauggugauuuuaaaugu

SEQ ID NO: 3241774 - RNA, 23 nt, Human
gaaugaaccacaucuugcucugc

SEQ ID NO: 3241775 - RNA, 16 nt, Human
gaaugaagaauucaga

SEQ ID NO: 3241776 - RNA, 18 nt, Human
gaaugaaccacaucuugc

SEQ ID NO: 3241777 - RNA, 22 nt, Human
gaaugaaccacaucuugcucug

SEQ ID NO: 3241778 - RNA, 19 nt, Human
gaaucuuuguaccaaaauu

SEQ ID NO: 3241779 - RNA, 12 nt, Human
gaaugaaaauaa

SEQ ID NO: 3241780 - RNA, 13 nt, Human
gaaugaaaauaac

SEQ ID NO: 3241781 - RNA, 20 nt, Human
gaaugaaaauaacugaauuu

SEQ ID NO: 3241782 - RNA, 23 nt, Human
gaaugaaaauaacugaauuugga

SEQ ID NO: 3241783 - RNA, 16 nt, Human
gaaucuuguuuugaaa

SEQ ID NO: 3241784 - RNA, 20 nt, Human
gaaucuuguuuugaaaauaa

SEQ ID NO: 3241785 - RNA, 13 nt, Human
gaaucuuuaauua

SEQ ID NO: 3241786 - RNA, 18 nt, Human
gaaucuuuaauuaaaacc

SEQ ID NO: 3241787 - RNA, 11 nt, Human
gaaugcagugg

SEQ ID NO: 3241788 - RNA, 16 nt, Human
gaaugaagcaguauuu

SEQ ID NO: 3241789 - RNA, 17 nt, Human
gaaugaagcaguauuuu

SEQ ID NO: 3241790 - RNA, 14 nt, Human
gaaugcauaaaaug

SEQ ID NO: 3241791 - RNA, 14 nt, Human
gaaugaagguuuuu

SEQ ID NO: 3241792 - RNA, 21 nt, Human
gaaugcaugcuuuccauauuu

SEQ ID NO: 3241793 - RNA, 18 nt, Human
gaaugcaugcuuuccaua

SEQ ID NO: 3241794 - RNA, 13 nt, Human
gaaugcuuuagga

SEQ ID NO: 3241795 - RNA, 21 nt, Human
gaaugcuuuuagugugugcau

SEQ ID NO: 3241796 - RNA, 22 nt, Human
gaauuguuuagauuuuguguuu

SEQ ID NO: 3241797 - RNA, 20 nt, Human
gaauuguuuagauuuugugu

SEQ ID NO: 3241798 - RNA, 15 nt, Human
gaauuguaaggaaug

SEQ ID NO: 3241799 - RNA, 22 nt, Human
gaauuguaaggaaugauuaauu

SEQ ID NO: 3241800 - RNA, 21 nt, Human
gaauuuauuuuuaagaaagaa

SEQ ID NO: 3241801 - RNA, 15 nt, Human
gaauuucccaaagca

SEQ ID NO: 3241802 - RNA, 16 nt, Human
gaauuuaucuuugaua

SEQ ID NO: 3241803 - RNA, 15 nt, Human
gaauuuaucuuugau

SEQ ID NO: 3241804 - RNA, 20 nt, Human
gaauuuaaagaaaaaaaugu

SEQ ID NO: 3241805 - RNA, 22 nt, Human
gaauuuaaagaaaaaaauguca

SEQ ID NO: 3241806 - RNA, 19 nt, Human
gaauucuuuaaaauuacaa

SEQ ID NO: 3241807 - RNA, 14 nt, Human
gaauugaaaaacca

SEQ ID NO: 3241808 - RNA, 19 nt, Human
gaauugagccuaaaaauaa

SEQ ID NO: 3241809 - RNA, 17 nt, Human
gaauucucagaaucuca

SEQ ID NO: 3241810 - RNA, 20 nt, Human
gaaugucagugugacugauc

SEQ ID NO: 3241811 - RNA, 21 nt, Human
gaaugucagugugacugaucu

SEQ ID NO: 3241812 - RNA, 19 nt, Human
gaauucaccacagacuuua

SEQ ID NO: 3241813 - RNA, 18 nt, Human
gaauucaccacagacuuu

SEQ ID NO: 3241814 - RNA, 11 nt, Human
gaauguaugua

SEQ ID NO: 3241815 - RNA, 12 nt, Human
gaauucauucau

SEQ ID NO: 3241816 - RNA, 17 nt, Human
gaagagaagggcagggc

SEQ ID NO: 3241817 - RNA, 19 nt, Human
gaagagaaugcacaaacag

SEQ ID NO: 3241818 - RNA, 19 nt, Human
gaagacuucaucccucugg

SEQ ID NO: 3241819 - RNA, 20 nt, Human
gaagacuuuucuuucagcca

SEQ ID NO: 3241820 - RNA, 14 nt, Human
gaagacuuuggaaa

SEQ ID NO: 3241821 - RNA, 17 nt, Human
gaagacuuuggaaagag

SEQ ID NO: 3241822 - RNA, 19 nt, Human
gaagagccccacucucaga

SEQ ID NO: 3241823 - RNA, 16 nt, Human
gaagagccccacucuc

SEQ ID NO: 3241824 - RNA, 15 nt, Human
gaagagccccacucu

SEQ ID NO: 3241825 - RNA, 13 nt, Human
gaagagccccacu

SEQ ID NO: 3241826 - RNA, 12 nt, Human
gaagagccccac

SEQ ID NO: 3241827 - RNA, 16 nt, Human
gaagagcagcuccuuc

SEQ ID NO: 3241828 - RNA, 12 nt, Human
gaacuuuguaua

SEQ ID NO: 3241829 - RNA, 15 nt, Human
gaacuuuguauaguu

SEQ ID NO: 3241830 - RNA, 21 nt, Human
gaacuuuguauaguuauguaa

SEQ ID NO: 3241831 - RNA, 11 nt, Human
gaagacuuugg

SEQ ID NO: 3241832 - RNA, 13 nt, Human
gaagacuuuggaa

SEQ ID NO: 3241833 - RNA, 19 nt, Human
gaagaacucaccaggguuu

SEQ ID NO: 3241834 - RNA, 16 nt, Human
gaagaacugaaaggcu

SEQ ID NO: 3241835 - RNA, 17 nt, Human
gaagaacucaugugauu

SEQ ID NO: 3241836 - RNA, 17 nt, Human
gaagcauuuacuuugug

SEQ ID NO: 3241837 - RNA, 12 nt, Human
gaagagggcugc

SEQ ID NO: 3241838 - RNA, 20 nt, Human
gaagauaauauuaaggaaga

SEQ ID NO: 3241839 - RNA, 17 nt, Human
gaagauguagaggagaa

SEQ ID NO: 3241840 - RNA, 18 nt, Human
gaagauguagaggagaaa

SEQ ID NO: 3241841 - RNA, 14 nt, Human
gaagauaaguugga

SEQ ID NO: 3241842 - RNA, 12 nt, Human
gaagauacuuug

SEQ ID NO: 3241843 - RNA, 13 nt, Human
gaagauacuuugu

SEQ ID NO: 3241844 - RNA, 23 nt, Human
gaagagacagagacaaguaauuu

SEQ ID NO: 3241845 - RNA, 18 nt, Human
gaagauaaguuggaaaca

SEQ ID NO: 3241846 - RNA, 14 nt, Human
gaagauacuuugua

SEQ ID NO: 3241847 - RNA, 15 nt, Human
gaagauacuuuguau

SEQ ID NO: 3241848 - RNA, 20 nt, Human
gaagccagcaggcucucagg

SEQ ID NO: 3241849 - RNA, 19 nt, Human
gaagccagcaggcucucag

SEQ ID NO: 3241850 - RNA, 21 nt, Human
gaagccagcaggcucucaggc

SEQ ID NO: 3241851 - RNA, 22 nt, Human
gaagccagcaggcucucaggcc

SEQ ID NO: 3241852 - RNA, 13 nt, Human
gaagcccaggaaa

SEQ ID NO: 3241853 - RNA, 15 nt, Human
gaagcccaggaaagg

SEQ ID NO: 3241854 - RNA, 16 nt, Human
gaagcccaggaaaggc

SEQ ID NO: 3241855 - RNA, 23 nt, Human
gaagcccuucuaccuuccugcaa

SEQ ID NO: 3241856 - RNA, 23 nt, Human
gaagcccaggaaaggcuccagga

SEQ ID NO: 3241857 - RNA, 17 nt, Human
gaagccacccaaagcag

SEQ ID NO: 3241858 - RNA, 22 nt, Human
gaaccuuuugagugccuuacac

SEQ ID NO: 3241859 - RNA, 12 nt, Human
gaacgcccacuu

SEQ ID NO: 3241860 - RNA, 13 nt, Human
gaacgccagggac

SEQ ID NO: 3241861 - RNA, 16 nt, Human
gaacgauccuucaaag

SEQ ID NO: 3241862 - RNA, 18 nt, Human
gaacgauccuucaaaguc

SEQ ID NO: 3241863 - RNA, 13 nt, Human
gaacuaaacuagu

SEQ ID NO: 3241864 - RNA, 19 nt, Human
gaacuaaacuaguuuuucc

SEQ ID NO: 3241865 - RNA, 22 nt, Human
gaacuaaacuaguuuuuccuau

SEQ ID NO: 3241866 - RNA, 23 nt, Human
gaacuaaacuaguuuuuccuauc

SEQ ID NO: 3241867 - RNA, 21 nt, Human
gaacguuugguucaaaugugu

SEQ ID NO: 3241868 - RNA, 18 nt, Human
gaacguuugguucaaaug

SEQ ID NO: 3241869 - RNA, 19 nt, Human
gaaccuuuugagugccuua

SEQ ID NO: 3241870 - RNA, 21 nt, Human
gaaccuuuugagugccuuaca

SEQ ID NO: 3241871 - RNA, 18 nt, Human
gaaccuuuugagugccuu

SEQ ID NO: 3241872 - RNA, 14 nt, Human
gaaccucugauuua

SEQ ID NO: 3241873 - RNA, 15 nt, Human
gaacauugguucuuu

SEQ ID NO: 3241874 - RNA, 23 nt, Human
gaacauugcauauaacuuauauu

SEQ ID NO: 3241875 - RNA, 21 nt, Human
gaacauugcauauaacuuaua

SEQ ID NO: 3241876 - RNA, 21 nt, Human
gaaccaaacccacccuuucua

SEQ ID NO: 3241877 - RNA, 22 nt, Human
gaaccaaacccacccuuucuac

SEQ ID NO: 3241878 - RNA, 13 nt, Human
gaacacucugaga

SEQ ID NO: 3241879 - RNA, 14 nt, Human
gaacacucugagac

SEQ ID NO: 3241880 - RNA, 16 nt, Human
gaaauuucacgucaua

SEQ ID NO: 3241881 - RNA, 12 nt, Human
gaaauuucacgu

SEQ ID NO: 3241882 - RNA, 11 nt, Human
gaaauuucacg

SEQ ID NO: 3241883 - RNA, 22 nt, Human
gaaauuuauugaggaaaaauau

SEQ ID NO: 3241884 - RNA, 21 nt, Human
gaaauuuauugaggaaaaaua

SEQ ID NO: 3241885 - RNA, 23 nt, Human
gaaaauaguuuauuuuaaaacaa

SEQ ID NO: 3241886 - RNA, 19 nt, Human
gaaaauaguuuauuuuaaa

SEQ ID NO: 3241887 - RNA, 20 nt, Human
gaaaauaguuuauuuuaaaa

SEQ ID NO: 3241888 - RNA, 23 nt, Human
gaaaauaaaucaaugcuauaacu

SEQ ID NO: 3241889 - RNA, 18 nt, Human
gaaaauagagaugagcuu

SEQ ID NO: 3241890 - RNA, 21 nt, Human
gaaaauacuuaaauguuaugu

SEQ ID NO: 3241891 - RNA, 17 nt, Human
gaaaauacuuaaauguu

SEQ ID NO: 3241892 - RNA, 16 nt, Human
gaaaauacuuaaaugu

SEQ ID NO: 3241893 - RNA, 15 nt, Human
gaaaauacuuaaaug

SEQ ID NO: 3241894 - RNA, 13 nt, Human
gaaaauaguuuau

SEQ ID NO: 3241895 - RNA, 14 nt, Human
gaaaauaguuuauu

SEQ ID NO: 3241896 - RNA, 15 nt, Human
gaaaauaguuuauuu

SEQ ID NO: 3241897 - RNA, 13 nt, Human
gaaaauaggcuuu

SEQ ID NO: 3241898 - RNA, 19 nt, Human
gaaaauaggaacgacucua

SEQ ID NO: 3241899 - RNA, 22 nt, Human
gaacagaugaccccugcccaga

SEQ ID NO: 3241900 - RNA, 20 nt, Human
gaacagaugaccccugccca

SEQ ID NO: 3241901 - RNA, 20 nt, Human
gaaauuucacgucauaggaa

SEQ ID NO: 3241902 - RNA, 15 nt, Human
gaacacucugagacu

SEQ ID NO: 3241903 - RNA, 21 nt, Human
gaacagcggcuggacuuggag

SEQ ID NO: 3241904 - RNA, 16 nt, Human
gaacagugauuaccag

SEQ ID NO: 3241905 - RNA, 20 nt, Human
gaacagugauuaccagggac

SEQ ID NO: 3241906 - RNA, 14 nt, Human
gaacauaauucuua

SEQ ID NO: 3241907 - RNA, 13 nt, Human
gaacauacaaaug

SEQ ID NO: 3241908 - RNA, 16 nt, Human
gaacauaauucuuauu

SEQ ID NO: 3241909 - RNA, 15 nt, Human
gaacauacaaaugca

SEQ ID NO: 3241910 - RNA, 17 nt, Human
gaacauacaaaugcauc

SEQ ID NO: 3241911 - RNA, 22 nt, Human
gaacauacaaaugcaucuuuga

SEQ ID NO: 3241912 - RNA, 23 nt, Human
gaacauacaaaugcaucuuugau

SEQ ID NO: 3241913 - RNA, 15 nt, Human
gaacauaaaauacaa

SEQ ID NO: 3241914 - RNA, 18 nt, Human
gaacagugcaccugggac

SEQ ID NO: 3241915 - RNA, 21 nt, Human
gaacaguguggccucuucuga

SEQ ID NO: 3241916 - RNA, 18 nt, Human
gacucuacaugcuuguug

SEQ ID NO: 3241917 - RNA, 21 nt, Human
gacucuacagaggccaugggc

SEQ ID NO: 3241918 - RNA, 15 nt, Human
gacucuacagaggcc

SEQ ID NO: 3241919 - RNA, 15 nt, Human
gacucuaaagucugu

SEQ ID NO: 3241920 - RNA, 13 nt, Human
gacuacagggccg

SEQ ID NO: 3241921 - RNA, 18 nt, Human
gacuccugcaggcagcca

SEQ ID NO: 3241922 - RNA, 19 nt, Human
gacuccugcaggcagccag

SEQ ID NO: 3241923 - RNA, 20 nt, Human
gacuccugcaggcagccagg

SEQ ID NO: 3241924 - RNA, 15 nt, Human
gacuacaggcaccca

SEQ ID NO: 3241925 - RNA, 13 nt, Human
gacuacaggcacc

SEQ ID NO: 3241926 - RNA, 18 nt, Human
gacuacaggcacccacca

SEQ ID NO: 3241927 - RNA, 12 nt, Human
gacuacagggcc

SEQ ID NO: 3241928 - RNA, 14 nt, Human
gacugacugaggca

SEQ ID NO: 3241929 - RNA, 15 nt, Human
gacugacugaggcag

SEQ ID NO: 3241930 - RNA, 16 nt, Human
gacugacugaggcagu

SEQ ID NO: 3241931 - RNA, 16 nt, Human
gacugaggggagggga

SEQ ID NO: 3241932 - RNA, 14 nt, Human
gacugccacaagga

SEQ ID NO: 3241933 - RNA, 20 nt, Human
gacugccagucccccugccc

SEQ ID NO: 3241934 - RNA, 18 nt, Human
gacugccagcucuuccua

SEQ ID NO: 3241935 - RNA, 15 nt, Human
gacugccagcucuuc

SEQ ID NO: 3241936 - RNA, 14 nt, Human
gacugccagcucuu

SEQ ID NO: 3241937 - RNA, 13 nt, Human
gacugccagcucu

SEQ ID NO: 3241938 - RNA, 16 nt, Human
gacugccaccuccccu

SEQ ID NO: 3241939 - RNA, 15 nt, Human
gacugccaccucccc

SEQ ID NO: 3241940 - RNA, 14 nt, Human
gacugccaccuccc

SEQ ID NO: 3241941 - RNA, 13 nt, Human
gacugccaccucc

SEQ ID NO: 3241942 - RNA, 12 nt, Human
gacugccaccuc

SEQ ID NO: 3241943 - RNA, 19 nt, Human
gacugccacaaggaagaaa

SEQ ID NO: 3241944 - RNA, 18 nt, Human
gacugccacaaggaagaa

SEQ ID NO: 3241945 - RNA, 12 nt, Human
gacugaucucag

SEQ ID NO: 3241946 - RNA, 16 nt, Human
gacugauguuugugca

SEQ ID NO: 3241947 - RNA, 19 nt, Human
gacugcuccugagccccca

SEQ ID NO: 3241948 - RNA, 17 nt, Human
gacugcuccugagcccc

SEQ ID NO: 3241949 - RNA, 14 nt, Human
gacuggcacaguuu

SEQ ID NO: 3241950 - RNA, 22 nt, Human
gacuggcacaguuuucugagaa

SEQ ID NO: 3241951 - RNA, 18 nt, Human
gacuggcacaguuuucug

SEQ ID NO: 3241952 - RNA, 21 nt, Human
gacugccagcucuuccuagcu

SEQ ID NO: 3241953 - RNA, 19 nt, Human
gacugccagcucuuccuag

SEQ ID NO: 3241954 - RNA, 16 nt, Human
gacugcuccugagccc

SEQ ID NO: 3241955 - RNA, 14 nt, Human
gacugcuccugagc

SEQ ID NO: 3241956 - RNA, 16 nt, Human
gacuggcaagaaaaga

SEQ ID NO: 3241957 - RNA, 17 nt, Human
gacuggauguaccacca

SEQ ID NO: 3241958 - RNA, 23 nt, Human
gacuggccaagguuuggggaaga

SEQ ID NO: 3241959 - RNA, 16 nt, Human
gacugggaacagaacu

SEQ ID NO: 3241960 - RNA, 12 nt, Human
gacuucaucccu

SEQ ID NO: 3241961 - RNA, 20 nt, Human
gacuucaucccucuggggcu

SEQ ID NO: 3241962 - RNA, 22 nt, Human
gacuucagggagucagcuguuu

SEQ ID NO: 3241963 - RNA, 14 nt, Human
gacuucagcucugu

SEQ ID NO: 3241964 - RNA, 17 nt, Human
gacuucaaaauauugag

SEQ ID NO: 3241965 - RNA, 19 nt, Human
gacuucaaaauauugagca

SEQ ID NO: 3241966 - RNA, 19 nt, Human
gacuuaguggacaggggag

SEQ ID NO: 3241967 - RNA, 15 nt, Human
gacuuagcugggaga

SEQ ID NO: 3241968 - RNA, 12 nt, Human
gacuuagaaucc

SEQ ID NO: 3241969 - RNA, 20 nt, Human
gacuuagaaucccuguguua

SEQ ID NO: 3241970 - RNA, 21 nt, Human
gacuuagaaucccuguguuaa

SEQ ID NO: 3241971 - RNA, 23 nt, Human
gacuuagaaucccuguguuaauu

SEQ ID NO: 3241972 - RNA, 18 nt, Human
gaccuuccaagagccuga

SEQ ID NO: 3241973 - RNA, 22 nt, Human
gaccuucacucuaagauguuau

SEQ ID NO: 3241974 - RNA, 17 nt, Human
gaccuuccaagagccug

SEQ ID NO: 3241975 - RNA, 16 nt, Human
gaccuuccaagagccu

SEQ ID NO: 3241976 - RNA, 20 nt, Human
gaccuucacucuaagauguu

SEQ ID NO: 3241977 - RNA, 19 nt, Human
gaccuucacucuaagaugu

SEQ ID NO: 3241978 - RNA, 20 nt, Human
gaccuucuccuucaccuuug

SEQ ID NO: 3241979 - RNA, 21 nt, Human
gaccuucuccuucaccuuugu

SEQ ID NO: 3241980 - RNA, 14 nt, Human
gaccuugaacuggg

SEQ ID NO: 3241981 - RNA, 15 nt, Human
gaccuucuccuucac

SEQ ID NO: 3241982 - RNA, 16 nt, Human
gaccuucuccuucacc

SEQ ID NO: 3241983 - RNA, 14 nt, Human
gaccuucuccuuca

SEQ ID NO: 3241984 - RNA, 20 nt, Human
gacccuugccgucuaccuga

SEQ ID NO: 3241985 - RNA, 23 nt, Human
gacccuugccgucuaccugaggg

SEQ ID NO: 3241986 - RNA, 19 nt, Human
gacccuugccgucuaccug

SEQ ID NO: 3241987 - RNA, 19 nt, Human
gaccuggggcugcugugaa

SEQ ID NO: 3241988 - RNA, 16 nt, Human
gaccuggccugucugu

SEQ ID NO: 3241989 - RNA, 15 nt, Human
gaccuggccugucug

SEQ ID NO: 3241990 - RNA, 14 nt, Human
gaccuuaaaugcaa

SEQ ID NO: 3241991 - RNA, 18 nt, Human
gaccuguuaaaauuauac

SEQ ID NO: 3241992 - RNA, 13 nt, Human
gaccuggucaggg

SEQ ID NO: 3241993 - RNA, 18 nt, Human
gacuaaccccaccacacc

SEQ ID NO: 3241994 - RNA, 16 nt, Human
gacuaacuugucuuug

SEQ ID NO: 3241995 - RNA, 23 nt, Human
gacuaacuugucuuuggacccug

SEQ ID NO: 3241996 - RNA, 23 nt, Human
gacuaagaucgguuaacaaauaa

SEQ ID NO: 3241997 - RNA, 22 nt, Human
gacuaagaucgguuaacaaaua

SEQ ID NO: 3241998 - RNA, 11 nt, Human
gacguguuaug

SEQ ID NO: 3241999 - RNA, 14 nt, Human
gacguguuaugacu

SEQ ID NO: 3242000 - RNA, 22 nt, Human
gaccuuuaagagaaaugagcug

SEQ ID NO: 3242001 - RNA, 11 nt, Human
gaccuuucaau

SEQ ID NO: 3242002 - RNA, 19 nt, Human
gaccuuucaauaggaaaaa

SEQ ID NO: 3242003 - RNA, 20 nt, Human
gaccuuucaauaggaaaaac

SEQ ID NO: 3242004 - RNA, 22 nt, Human
gacgcugugcugcccugcccac

SEQ ID NO: 3242005 - RNA, 21 nt, Human
gacgcugugcugcccugccca

SEQ ID NO: 3242006 - RNA, 18 nt, Human
gacgcuucacaggacagg

SEQ ID NO: 3242007 - RNA, 13 nt, Human
gacggagucccac

SEQ ID NO: 3242008 - RNA, 23 nt, Human
gacggagucccaccuuggcugca

SEQ ID NO: 3242009 - RNA, 21 nt, Human
gacggcgagaaaugccucugg

SEQ ID NO: 3242010 - RNA, 22 nt, Human
gacggcacugagagagcgcagc

SEQ ID NO: 3242011 - RNA, 16 nt, Human
gacguggcaccuccuc

SEQ ID NO: 3242012 - RNA, 14 nt, Human
gacguggcaccucc

SEQ ID NO: 3242013 - RNA, 14 nt, Human
gacaguugugcagg

SEQ ID NO: 3242014 - RNA, 14 nt, Human
gacaucaacagaua

SEQ ID NO: 3242015 - RNA, 16 nt, Human
gacaucaacugcauca

SEQ ID NO: 3242016 - RNA, 23 nt, Human
gacaucaacugcaucaagaugug

SEQ ID NO: 3242017 - RNA, 13 nt, Human
gacaucacuggca

SEQ ID NO: 3242018 - RNA, 22 nt, Human
gacaggcauguucucugaggac

SEQ ID NO: 3242019 - RNA, 14 nt, Human
gacagggcauggcc

SEQ ID NO: 3242020 - RNA, 15 nt, Human
gacaggccagguggu

SEQ ID NO: 3242021 - RNA, 22 nt, Human
gacagggcauggccagguggcc

SEQ ID NO: 3242022 - RNA, 20 nt, Human
gacagggcauggccaggugg

SEQ ID NO: 3242023 - RNA, 15 nt, Human
gacagggcauggcca

SEQ ID NO: 3242024 - RNA, 22 nt, Human
gacaguuaagagaaaugagcuu

SEQ ID NO: 3242025 - RNA, 19 nt, Human
gacaguucauucagggccg

SEQ ID NO: 3242026 - RNA, 18 nt, Human
gacaguucauucagggcc

SEQ ID NO: 3242027 - RNA, 18 nt, Human
gacaggcaagcaccuccu

SEQ ID NO: 3242028 - RNA, 17 nt, Human
gacaggcaagcaccucc

SEQ ID NO: 3242029 - RNA, 13 nt, Human
gacaggcaagcac

SEQ ID NO: 3242030 - RNA, 22 nt, Human
gacagcagucuuaugcuuccag

SEQ ID NO: 3242031 - RNA, 19 nt, Human
gacagcagucuuaugcuuc

SEQ ID NO: 3242032 - RNA, 19 nt, Human
gacaggcaaugcuggcugu

SEQ ID NO: 3242033 - RNA, 18 nt, Human
gacaggcaaugcuggcug

SEQ ID NO: 3242034 - RNA, 20 nt, Human
gacaggcaagcaccuccugc

SEQ ID NO: 3242035 - RNA, 21 nt, Human
gacaggcauguucucugagga

SEQ ID NO: 3242036 - RNA, 20 nt, Human
gacaggcauguucucugagg

SEQ ID NO: 3242037 - RNA, 23 nt, Human
gacaggcaaugcuggcuguuggc

SEQ ID NO: 3242038 - RNA, 13 nt, Human
gacagagccugcc

SEQ ID NO: 3242039 - RNA, 17 nt, Human
gacagagcgacagagca

SEQ ID NO: 3242040 - RNA, 21 nt, Human
gacagagccugccccagcgcu

SEQ ID NO: 3242041 - RNA, 16 nt, Human
gacagagccugcccca

SEQ ID NO: 3242042 - RNA, 15 nt, Human
gacagagccugcccc

SEQ ID NO: 3242043 - RNA, 20 nt, Human
gacagagcuacacaggggaa

SEQ ID NO: 3242044 - RNA, 18 nt, Human
gacagagcgacagagcag

SEQ ID NO: 3242045 - RNA, 16 nt, Human
gacagacagcccucca

SEQ ID NO: 3242046 - RNA, 16 nt, Human
gacagagugagacucu

SEQ ID NO: 3242047 - RNA, 21 nt, Human
gacagagucucacuguugccc

SEQ ID NO: 3242048 - RNA, 23 nt, Human
gacagaggcagccccauucugcc

SEQ ID NO: 3242049 - RNA, 14 nt, Human
gacagagucucacu

SEQ ID NO: 3242050 - RNA, 22 nt, Human
gaauuucccaaagcagugcaug

SEQ ID NO: 3242051 - RNA, 16 nt, Human
gaauuucccaaagcag

SEQ ID NO: 3242052 - RNA, 18 nt, Human
gaauuucccaaagcagug

SEQ ID NO: 3242053 - RNA, 22 nt, Human
gacacgaauauugcugauggug

SEQ ID NO: 3242054 - RNA, 21 nt, Human
gacacuaaccacgcuggaccu

SEQ ID NO: 3242055 - RNA, 22 nt, Human
gacagacacaggcccggcucca

SEQ ID NO: 3242056 - RNA, 20 nt, Human
gacagacacaggcccggcuc

SEQ ID NO: 3242057 - RNA, 16 nt, Human
gacacuagaagauuuu

SEQ ID NO: 3242058 - RNA, 17 nt, Human
gacagacacaggcccgg

SEQ ID NO: 3242059 - RNA, 12 nt, Human
gacccccuggag

SEQ ID NO: 3242060 - RNA, 10 nt, Human
gacccugagg

SEQ ID NO: 3242061 - RNA, 11 nt, Human
gacccugaggc

SEQ ID NO: 3242062 - RNA, 12 nt, Human
gacccugaggcc

SEQ ID NO: 3242063 - RNA, 16 nt, Human
gacccugaggcccaga

SEQ ID NO: 3242064 - RNA, 17 nt, Human
gacccugcccugugggc

SEQ ID NO: 3242065 - RNA, 20 nt, Human
gacccugcccugugggcccc

SEQ ID NO: 3242066 - RNA, 22 nt, Human
gacccugcccugugggccccca

SEQ ID NO: 3242067 - RNA, 17 nt, Human
gacccaugcugcccugu

SEQ ID NO: 3242068 - RNA, 14 nt, Human
gacccaugggcagg

SEQ ID NO: 3242069 - RNA, 16 nt, Human
gacccaugggcaggag

SEQ ID NO: 3242070 - RNA, 15 nt, Human
gacccaugggcagga

SEQ ID NO: 3242071 - RNA, 18 nt, Human
gacccaugggcaggagac

SEQ ID NO: 3242072 - RNA, 17 nt, Human
gacccaugggcaggaga

SEQ ID NO: 3242073 - RNA, 20 nt, Human
gacccaugggcaggagacug

SEQ ID NO: 3242074 - RNA, 11 nt, Human
gaccccagaau

SEQ ID NO: 3242075 - RNA, 14 nt, Human
gaccccagccucaa

SEQ ID NO: 3242076 - RNA, 12 nt, Human
gaccccagccuc

SEQ ID NO: 3242077 - RNA, 15 nt, Human
gacccccccagcuuc

SEQ ID NO: 3242078 - RNA, 18 nt, Human
gacccaaaaggcagaagc

SEQ ID NO: 3242079 - RNA, 19 nt, Human
gacccaaaaggcagaagca

SEQ ID NO: 3242080 - RNA, 11 nt, Human
gaccagccagg

SEQ ID NO: 3242081 - RNA, 14 nt, Human
gaccagcccacgcu

SEQ ID NO: 3242082 - RNA, 12 nt, Human
gaccagcccacg

SEQ ID NO: 3242083 - RNA, 11 nt, Human
gaccagcccac

SEQ ID NO: 3242084 - RNA, 23 nt, Human
gaccagccagggaaagacuggca

SEQ ID NO: 3242085 - RNA, 17 nt, Human
gaccagcagucugccug

SEQ ID NO: 3242086 - RNA, 12 nt, Human
gacccacugcuu

SEQ ID NO: 3242087 - RNA, 19 nt, Human
gacccacuggacucaccuc

SEQ ID NO: 3242088 - RNA, 23 nt, Human
gaccagcccacgcugacuacagg

SEQ ID NO: 3242089 - RNA, 16 nt, Human
gaccagcccacgcuga

SEQ ID NO: 3242090 - RNA, 19 nt, Human
gacccaugcugcccuguga

SEQ ID NO: 3242091 - RNA, 20 nt, Human
gacccaugcugcccugugag

SEQ ID NO: 3242092 - RNA, 18 nt, Human
gacccaugcugcccugug

SEQ ID NO: 3242093 - RNA, 23 nt, Human
gacccaguggcagggcacagggc

SEQ ID NO: 3242094 - RNA, 12 nt, Human
gacccaguggca

SEQ ID NO: 3242095 - RNA, 22 nt, Human
gacccaguggcagggcacaggg

SEQ ID NO: 3242096 - RNA, 20 nt, Human
gacccaguggcagggcacag

SEQ ID NO: 3242097 - RNA, 19 nt, Human
gacccaguggcagggcaca

SEQ ID NO: 3242098 - RNA, 18 nt, Human
gacccaguggcagggcac

SEQ ID NO: 3242099 - RNA, 17 nt, Human
gacccaguggcagggca

SEQ ID NO: 3242100 - RNA, 16 nt, Human
gacccaguggcagggc

SEQ ID NO: 3242101 - RNA, 15 nt, Human
gacccaguggcaggg

SEQ ID NO: 3242102 - RNA, 14 nt, Human
gacccaguggcagg

SEQ ID NO: 3242103 - RNA, 16 nt, Human
gaccacugcagaagac

SEQ ID NO: 3242104 - RNA, 21 nt, Human
gaccagacaccuugacagggc

SEQ ID NO: 3242105 - RNA, 22 nt, Human
gaccagacaccuugacagggca

SEQ ID NO: 3242106 - RNA, 16 nt, Human
gaccacccauaucaug

SEQ ID NO: 3242107 - RNA, 12 nt, Human
gaccaccagagg

SEQ ID NO: 3242108 - RNA, 23 nt, Human
gaccacaggugcccgccaccaca

SEQ ID NO: 3242109 - RNA, 19 nt, Human
gaccacaggugcccgccac

SEQ ID NO: 3242110 - RNA, 20 nt, Human
gaccagcaccaucucuccuc

SEQ ID NO: 3242111 - RNA, 21 nt, Human
gaccagcaccaucucuccucc

SEQ ID NO: 3242112 - RNA, 14 nt, Human
gaccagcacacucc

SEQ ID NO: 3242113 - RNA, 13 nt, Human
gaccagcacacuc

SEQ ID NO: 3242114 - RNA, 18 nt, Human
gaccagcacacucccgag

SEQ ID NO: 3242115 - RNA, 19 nt, Human
gaccagagcugccaccugc

SEQ ID NO: 3242116 - RNA, 23 nt, Human
gaccagacaccuugacagggcac

SEQ ID NO: 3242117 - RNA, 21 nt, Human
gaccagagcugccaccugccu

SEQ ID NO: 3242118 - RNA, 18 nt, Human
gaccacaaaacuuuucua

SEQ ID NO: 3242119 - RNA, 13 nt, Human
gaccaauuuuaac

SEQ ID NO: 3242120 - RNA, 16 nt, Human
gaccacacuccagcug

SEQ ID NO: 3242121 - RNA, 22 nt, Human
gaccacacuccagcugggauca

SEQ ID NO: 3242122 - RNA, 14 nt, Human
gaccacacuccagc

SEQ ID NO: 3242123 - RNA, 17 nt, Human
gaccaaguauaaacuuu

SEQ ID NO: 3242124 - RNA, 18 nt, Human
gaccaaggcucugaaaua

SEQ ID NO: 3242125 - RNA, 21 nt, Human
gaguguguaauuuaaaauugu

SEQ ID NO: 3242126 - RNA, 22 nt, Human
gacuuccugauugguuucucuu

SEQ ID NO: 3242127 - RNA, 22 nt, Human
gaguguguaauuuaaaauugug

SEQ ID NO: 3242128 - RNA, 21 nt, Human
gacuuccugauugguuucucu

SEQ ID NO: 3242129 - RNA, 20 nt, Human
gacuuccccaauaucuugcu

SEQ ID NO: 3242130 - RNA, 18 nt, Human
gacuuccccaauaucuug

SEQ ID NO: 3242131 - RNA, 17 nt, Human
gacuuccccaauaucuu

SEQ ID NO: 3242132 - RNA, 23 nt, Human
gauaaaaucauaaguauuuggaa

SEQ ID NO: 3242133 - RNA, 19 nt, Human
gauaaaaucauaaguauuu

SEQ ID NO: 3242134 - RNA, 13 nt, Human
gauaaaaucauaa

SEQ ID NO: 3242135 - RNA, 13 nt, Human
gauaaacaguagu

SEQ ID NO: 3242136 - RNA, 16 nt, Human
gauaaagaccagaaau

SEQ ID NO: 3242137 - RNA, 18 nt, Human
gauaaagaccagaaauuc

SEQ ID NO: 3242138 - RNA, 18 nt, Human
gauaaaccuagauaaaga

SEQ ID NO: 3242139 - RNA, 22 nt, Human
gauaaauuaugguaaaauuuug

SEQ ID NO: 3242140 - RNA, 22 nt, Human
gauaacaauguuuuaacaagaa

SEQ ID NO: 3242141 - RNA, 21 nt, Human
gauaacaccaccauucacaag

SEQ ID NO: 3242142 - RNA, 19 nt, Human
gauaacaauguuuuaacaa

SEQ ID NO: 3242143 - RNA, 13 nt, Human
gauaaguuggaaa

SEQ ID NO: 3242144 - RNA, 22 nt, Human
gauaaguuggaaacacuaaaug

SEQ ID NO: 3242145 - RNA, 19 nt, Human
gauaaguuggaaacacuaa

SEQ ID NO: 3242146 - RNA, 18 nt, Human
gauaaguuggaaacacua

SEQ ID NO: 3242147 - RNA, 17 nt, Human
gauaaguuggaaacacu

SEQ ID NO: 3242148 - RNA, 23 nt, Human
gauaacagggauugauuuuaaaa

SEQ ID NO: 3242149 - RNA, 14 nt, Human
gauaaccauagcau

SEQ ID NO: 3242150 - RNA, 22 nt, Human
gauaacagggauugauuuuaaa

SEQ ID NO: 3242151 - RNA, 20 nt, Human
gauaacagggauugauuuua

SEQ ID NO: 3242152 - RNA, 17 nt, Human
gauaaccauagcauagg

SEQ ID NO: 3242153 - RNA, 14 nt, Human
gaucaggcucccag

SEQ ID NO: 3242154 - RNA, 15 nt, Human
gaucaggcucccagg

SEQ ID NO: 3242155 - RNA, 20 nt, Human
gaucacggcucacugcagcc

SEQ ID NO: 3242156 - RNA, 23 nt, Human
gaucacggcucacugcagccuca

SEQ ID NO: 3242157 - RNA, 14 nt, Human
gaucacugaaauaa

SEQ ID NO: 3242158 - RNA, 20 nt, Human
gaucacugaaauaaaagcua

SEQ ID NO: 3242159 - RNA, 18 nt, Human
gaucacugaaauaaaagc

SEQ ID NO: 3242160 - RNA, 14 nt, Human
gaucacagccucug

SEQ ID NO: 3242161 - RNA, 16 nt, Human
gaucacauguggacuu

SEQ ID NO: 3242162 - RNA, 17 nt, Human
gauaucuguuagaugcu

SEQ ID NO: 3242163 - RNA, 13 nt, Human
gauaucaaaggca

SEQ ID NO: 3242164 - RNA, 22 nt, Human
gauaauuuuccuuuaauaugaa

SEQ ID NO: 3242165 - RNA, 18 nt, Human
gauaauucuagcuuugag

SEQ ID NO: 3242166 - RNA, 16 nt, Human
gauaauauauuguguu

SEQ ID NO: 3242167 - RNA, 23 nt, Human
gauaauuaaccaagguagaauga

SEQ ID NO: 3242168 - RNA, 18 nt, Human
gauaggaaggucauuucc

SEQ ID NO: 3242169 - RNA, 17 nt, Human
gauaggaaggucauuuc

SEQ ID NO: 3242170 - RNA, 22 nt, Human
gauaggaaggucauuuccaugu

SEQ ID NO: 3242171 - RNA, 21 nt, Human
gauaggaaggucauuuccaug

SEQ ID NO: 3242172 - RNA, 23 nt, Human
gauaggaaggucauuuccaugua

SEQ ID NO: 3242173 - RNA, 18 nt, Human
gauauaugcucugcaugu

SEQ ID NO: 3242174 - RNA, 21 nt, Human
gauauagagucauuguaaugu

SEQ ID NO: 3242175 - RNA, 14 nt, Human
gauauaaacagcuu

SEQ ID NO: 3242176 - RNA, 20 nt, Human
gauagugucccacggugccu

SEQ ID NO: 3242177 - RNA, 13 nt, Human
gauaggggcagag

SEQ ID NO: 3242178 - RNA, 21 nt, Human
gauaguugaauguugcaaugu

SEQ ID NO: 3242179 - RNA, 12 nt, Human
gauccugagcca

SEQ ID NO: 3242180 - RNA, 16 nt, Human
gauccucccaggcuuc

SEQ ID NO: 3242181 - RNA, 17 nt, Human
gauccuccccuggacuc

SEQ ID NO: 3242182 - RNA, 15 nt, Human
gauccuccccuggac

SEQ ID NO: 3242183 - RNA, 18 nt, Human
gauccuccccuggacucc

SEQ ID NO: 3242184 - RNA, 13 nt, Human
gaucuaggaagac

SEQ ID NO: 3242185 - RNA, 14 nt, Human
gaucuaggaagacu

SEQ ID NO: 3242186 - RNA, 18 nt, Human
gaucuaggaagacuuugg

SEQ ID NO: 3242187 - RNA, 20 nt, Human
gaucuggguucacugcaacc

SEQ ID NO: 3242188 - RNA, 20 nt, Human
gaucuaggaagacuuuggaa

SEQ ID NO: 3242189 - RNA, 17 nt, Human
gauccucccaccucagc

SEQ ID NO: 3242190 - RNA, 21 nt, Human
gauccucccaccucagccucc

SEQ ID NO: 3242191 - RNA, 14 nt, Human
gauccuccaggugc

SEQ ID NO: 3242192 - RNA, 16 nt, Human
gauccucccaccucag

SEQ ID NO: 3242193 - RNA, 23 nt, Human
gaucccuuccaccugcucugcug

SEQ ID NO: 3242194 - RNA, 22 nt, Human
gaucccuuccaccugcucugcu

SEQ ID NO: 3242195 - RNA, 20 nt, Human
gaucccuuccaccugcucug

SEQ ID NO: 3242196 - RNA, 23 nt, Human
gauccuaaugaaugcauaaaaug

SEQ ID NO: 3242197 - RNA, 12 nt, Human
gauccuccaggu

SEQ ID NO: 3242198 - RNA, 13 nt, Human
gaucauccacugu

SEQ ID NO: 3242199 - RNA, 22 nt, Human
gaucauaguuuuauuuauauuu

SEQ ID NO: 3242200 - RNA, 12 nt, Human
gaucauaguuuu

SEQ ID NO: 3242201 - RNA, 13 nt, Human
gaucauaguuuua

SEQ ID NO: 3242202 - RNA, 14 nt, Human
gaucauaguuuuau

SEQ ID NO: 3242203 - RNA, 15 nt, Human
gaucauaguuuuauu

SEQ ID NO: 3242204 - RNA, 16 nt, Human
gaucauaguuuuauuu

SEQ ID NO: 3242205 - RNA, 18 nt, Human
gaucauaguuuuauuuau

SEQ ID NO: 3242206 - RNA, 19 nt, Human
gaucauaguuuuauuuaua

SEQ ID NO: 3242207 - RNA, 19 nt, Human
gaucccuuccaccugcucu

SEQ ID NO: 3242208 - RNA, 13 nt, Human
gaucccuuccacc

SEQ ID NO: 3242209 - RNA, 21 nt, Human
gaugaaaugaggucagagccu

SEQ ID NO: 3242210 - RNA, 15 nt, Human
gaugaaaugagguca

SEQ ID NO: 3242211 - RNA, 19 nt, Human
gaucuucuuuauaauucua

SEQ ID NO: 3242212 - RNA, 18 nt, Human
gaucuuccucugcuaaau

SEQ ID NO: 3242213 - RNA, 17 nt, Human
gaucuuccucugcuaaa

SEQ ID NO: 3242214 - RNA, 22 nt, Human
gaucuucuguggguuucuaaag

SEQ ID NO: 3242215 - RNA, 15 nt, Human
gaugaccccugccca

SEQ ID NO: 3242216 - RNA, 14 nt, Human
gaugaccccugccc

SEQ ID NO: 3242217 - RNA, 22 nt, Human
gaugaauuguaaaagcaacauc

SEQ ID NO: 3242218 - RNA, 18 nt, Human
gaugaccaauuuuaacuu

SEQ ID NO: 3242219 - RNA, 22 nt, Human
gaugaauaaauguuauagcugc

SEQ ID NO: 3242220 - RNA, 16 nt, Human
gaugaaauguaaauac

SEQ ID NO: 3242221 - RNA, 23 nt, Human
gaugcaccagcccuuagcaggga

SEQ ID NO: 3242222 - RNA, 15 nt, Human
gaugcaccagcccuu

SEQ ID NO: 3242223 - RNA, 14 nt, Human
gaugagaggaaauc

SEQ ID NO: 3242224 - RNA, 14 nt, Human
gaugcaccagcccu

SEQ ID NO: 3242225 - RNA, 23 nt, Human
gaugagaaauaaaguuucuguug

SEQ ID NO: 3242226 - RNA, 18 nt, Human
gaugaccuugaaugaugc

SEQ ID NO: 3242227 - RNA, 20 nt, Human
gaugagaacagauaaagauu

SEQ ID NO: 3242228 - RNA, 16 nt, Human
gaugccugguggcagc

SEQ ID NO: 3242229 - RNA, 15 nt, Human
gaugccugguggcag

SEQ ID NO: 3242230 - RNA, 14 nt, Human
gaugcagugcuucc

SEQ ID NO: 3242231 - RNA, 14 nt, Human
gaugccugguggca

SEQ ID NO: 3242232 - RNA, 19 nt, Human
gaugcagccucacaguccu

SEQ ID NO: 3242233 - RNA, 21 nt, Human
gaugcagacagggggccagaa

SEQ ID NO: 3242234 - RNA, 20 nt, Human
gaugcagacagggggccaga

SEQ ID NO: 3242235 - RNA, 16 nt, Human
gaugcagcucuuccug

SEQ ID NO: 3242236 - RNA, 23 nt, Human
gcaaacuggccgcgggggcaggg

SEQ ID NO: 3242237 - RNA, 15 nt, Human
gcaaaccaucauuga

SEQ ID NO: 3242238 - RNA, 19 nt, Human
gcaaaccuaauugcacaac

SEQ ID NO: 3242239 - RNA, 20 nt, Human
gcaaacccugucaaacauua

SEQ ID NO: 3242240 - RNA, 19 nt, Human
gcaaacccugucaaacauu

SEQ ID NO: 3242241 - RNA, 15 nt, Human
gcaaacccugucaaa

SEQ ID NO: 3242242 - RNA, 22 nt, Human
gcaaaccuuucuauaauuuuac

SEQ ID NO: 3242243 - RNA, 17 nt, Human
gcaaaccaucauugaaa

SEQ ID NO: 3242244 - RNA, 19 nt, Human
gcaaaccaucauugaaauc

SEQ ID NO: 3242245 - RNA, 20 nt, Human
gcaaaccaucauugaaaucu

SEQ ID NO: 3242246 - RNA, 21 nt, Human
gcaaaccaucauugaaaucuu

SEQ ID NO: 3242247 - RNA, 16 nt, Human
gcaaaccaucauugaa

SEQ ID NO: 3242248 - RNA, 16 nt, Human
gauuuuaaauguguga

SEQ ID NO: 3242249 - RNA, 15 nt, Human
gauuuuaaaugugug

SEQ ID NO: 3242250 - RNA, 14 nt, Human
gauuuuaaaugugu

SEQ ID NO: 3242251 - RNA, 12 nt, Human
gauuuuaaaugu

SEQ ID NO: 3242252 - RNA, 22 nt, Human
gauuuuaaaauguacauguauu

SEQ ID NO: 3242253 - RNA, 21 nt, Human
gauuuuaaaauguacauguau

SEQ ID NO: 3242254 - RNA, 18 nt, Human
gauuuuaaaauguacaug

SEQ ID NO: 3242255 - RNA, 13 nt, Human
gauuuuaaaaugu

SEQ ID NO: 3242256 - RNA, 12 nt, Human
gauuuuaaaaug

SEQ ID NO: 3242257 - RNA, 23 nt, Human
gcaaagaaaaaaaaaaaagccag

SEQ ID NO: 3242258 - RNA, 22 nt, Human
gcaaagaacucuuacccuggca

SEQ ID NO: 3242259 - RNA, 14 nt, Human
gcaaagaacucuua

SEQ ID NO: 3242260 - RNA, 19 nt, Human
gcaaagagacccagucaau

SEQ ID NO: 3242261 - RNA, 23 nt, Human
gcaaaguucccuacuuccuguga

SEQ ID NO: 3242262 - RNA, 20 nt, Human
gcaaauaaugaucgaaaaaa

SEQ ID NO: 3242263 - RNA, 14 nt, Human
gcaaauggccucau

SEQ ID NO: 3242264 - RNA, 18 nt, Human
gcaacugcauuggcuuug

SEQ ID NO: 3242265 - RNA, 23 nt, Human
gcaacuuucuggggccuaauaaa

SEQ ID NO: 3242266 - RNA, 16 nt, Human
gcaagaugugggcagu

SEQ ID NO: 3242267 - RNA, 16 nt, Human
gcaagauugauguuuc

SEQ ID NO: 3242268 - RNA, 12 nt, Human
gcaagauguggg

SEQ ID NO: 3242269 - RNA, 17 nt, Human
gcaagauggcacagggc

SEQ ID NO: 3242270 - RNA, 22 nt, Human
gcaagauggcacagggcaugaa

SEQ ID NO: 3242271 - RNA, 19 nt, Human
gcaagauggcacagggcau

SEQ ID NO: 3242272 - RNA, 15 nt, Human
gcaagcaccaucccc

SEQ ID NO: 3242273 - RNA, 18 nt, Human
gcaagcaagaaacacugg

SEQ ID NO: 3242274 - RNA, 16 nt, Human
gcaagcaccuccugcc

SEQ ID NO: 3242275 - RNA, 15 nt, Human
gcaagcaccuccugc

SEQ ID NO: 3242276 - RNA, 20 nt, Human
gcaagcaccuccugccucga

SEQ ID NO: 3242277 - RNA, 18 nt, Human
gcaagcaccuccugccuc

SEQ ID NO: 3242278 - RNA, 22 nt, Human
gcaagcaguuucaauaaaguuu

SEQ ID NO: 3242279 - RNA, 14 nt, Human
gcaagcugaaauuu

SEQ ID NO: 3242280 - RNA, 17 nt, Human
gcaagcugaaauuuuag

SEQ ID NO: 3242281 - RNA, 15 nt, Human
gcaagcaguuucaau

SEQ ID NO: 3242282 - RNA, 14 nt, Human
gcaagcaguuucaa

SEQ ID NO: 3242283 - RNA, 18 nt, Human
gcaagcaccauccccucc

SEQ ID NO: 3242284 - RNA, 17 nt, Human
gcaagcaccauccccuc

SEQ ID NO: 3242285 - RNA, 14 nt, Human
gcaaggcugucaau

SEQ ID NO: 3242286 - RNA, 18 nt, Human
gcaaggcugucaauuaca

SEQ ID NO: 3242287 - RNA, 14 nt, Human
gcaagggaggccca

SEQ ID NO: 3242288 - RNA, 21 nt, Human
gcaagggaauuucuucaacuc

SEQ ID NO: 3242289 - RNA, 13 nt, Human
gcaaggcugucaa

SEQ ID NO: 3242290 - RNA, 20 nt, Human
gcaaggaagguaaaaaguua

SEQ ID NO: 3242291 - RNA, 17 nt, Human
gcaauccugcaagaaca

SEQ ID NO: 3242292 - RNA, 13 nt, Human
gcaauccuuacaa

SEQ ID NO: 3242293 - RNA, 16 nt, Human
gcaauccuuacaaaug

SEQ ID NO: 3242294 - RNA, 14 nt, Human
gcaauccuuacaaa

SEQ ID NO: 3242295 - RNA, 14 nt, Human
gcaaucuauaauau

SEQ ID NO: 3242296 - RNA, 19 nt, Human
gcaauccuuacaaaugauu

SEQ ID NO: 3242297 - RNA, 18 nt, Human
gcaaggucuugcucuccu

SEQ ID NO: 3242298 - RNA, 15 nt, Human
gcaagggaggcccag

SEQ ID NO: 3242299 - RNA, 15 nt, Human
gauugggccccugcc

SEQ ID NO: 3242300 - RNA, 14 nt, Human
gauuguuauuaaau

SEQ ID NO: 3242301 - RNA, 16 nt, Human
gauuguuauuaaaugu

SEQ ID NO: 3242302 - RNA, 14 nt, Human
gauuuaaacucuga

SEQ ID NO: 3242303 - RNA, 13 nt, Human
gauuuaaacucug

SEQ ID NO: 3242304 - RNA, 11 nt, Human
gauuguuuaaa

SEQ ID NO: 3242305 - RNA, 21 nt, Human
gauuguuuaucuagauguaaa

SEQ ID NO: 3242306 - RNA, 17 nt, Human
gauuuaaacucugaauu

SEQ ID NO: 3242307 - RNA, 19 nt, Human
gauuuguuaaugauagcua

SEQ ID NO: 3242308 - RNA, 17 nt, Human
gauuuguugauucucuc

SEQ ID NO: 3242309 - RNA, 14 nt, Human
gauuuccaagccuc

SEQ ID NO: 3242310 - RNA, 19 nt, Human
gauucuuuccugaggcugg

SEQ ID NO: 3242311 - RNA, 17 nt, Human
gauucccaagcucugcu

SEQ ID NO: 3242312 - RNA, 16 nt, Human
gauucccaagcucugc

SEQ ID NO: 3242313 - RNA, 20 nt, Human
gauucuuuccugaggcuggg

SEQ ID NO: 3242314 - RNA, 22 nt, Human
gauucuuuccugaggcugggcu

SEQ ID NO: 3242315 - RNA, 16 nt, Human
gauugcaacaggcugg

SEQ ID NO: 3242316 - RNA, 19 nt, Human
gauucuuuuaaauuagaaa

SEQ ID NO: 3242317 - RNA, 20 nt, Human
gauucuuuuaaauuagaaaa

SEQ ID NO: 3242318 - RNA, 17 nt, Human
gauugcaacaggcuggg

SEQ ID NO: 3242319 - RNA, 15 nt, Human
gauugcaacaggcug

SEQ ID NO: 3242320 - RNA, 22 nt, Human
gauuggauuuuauguugacauu

SEQ ID NO: 3242321 - RNA, 19 nt, Human
gauuggauuuuauguugac

SEQ ID NO: 3242322 - RNA, 23 nt, Human
gauugcuguguguugccugggac

SEQ ID NO: 3242323 - RNA, 21 nt, Human
gauuaauuucugccauuucau

SEQ ID NO: 3242324 - RNA, 21 nt, Human
gauuacaagcgugagccacug

SEQ ID NO: 3242325 - RNA, 13 nt, Human
gauuacaagcgug

SEQ ID NO: 3242326 - RNA, 13 nt, Human
gauucagacagcu

SEQ ID NO: 3242327 - RNA, 14 nt, Human
gauucagacagcug

SEQ ID NO: 3242328 - RNA, 17 nt, Human
gauucagacagcugccu

SEQ ID NO: 3242329 - RNA, 15 nt, Human
gauucccaagcucug

SEQ ID NO: 3242330 - RNA, 18 nt, Human
gauucauuuuugaaacug

SEQ ID NO: 3242331 - RNA, 20 nt, Human
gauucaggcauuuucccccu

SEQ ID NO: 3242332 - RNA, 17 nt, Human
gauucaggcauuuuccc

SEQ ID NO: 3242333 - RNA, 19 nt, Human
gauucaguuucuaaaauug

SEQ ID NO: 3242334 - RNA, 14 nt, Human
gauguuugugcagu

SEQ ID NO: 3242335 - RNA, 16 nt, Human
gauguuugagcagugg

SEQ ID NO: 3242336 - RNA, 18 nt, Human
gauguucuggauaccauu

SEQ ID NO: 3242337 - RNA, 16 nt, Human
gaugcuagaacucccu

SEQ ID NO: 3242338 - RNA, 15 nt, Human
gaugcgcaguugcug

SEQ ID NO: 3242339 - RNA, 18 nt, Human
gaugcgggcauggcagcc

SEQ ID NO: 3242340 - RNA, 20 nt, Human
gaugccugugaacugaacuc

SEQ ID NO: 3242341 - RNA, 18 nt, Human
gauguucuagcauggcug

SEQ ID NO: 3242342 - RNA, 15 nt, Human
gaugcuacuaagaaa

SEQ ID NO: 3242343 - RNA, 21 nt, Human
gcacaggcugagugcaggccc

SEQ ID NO: 3242344 - RNA, 20 nt, Human
gcacaggcugagugcaggcc

SEQ ID NO: 3242345 - RNA, 22 nt, Human
gcacaugccucucucaggccaa

SEQ ID NO: 3242346 - RNA, 19 nt, Human
gcacaggcugagugcaggc

SEQ ID NO: 3242347 - RNA, 18 nt, Human
gcacaggcugagugcagg

SEQ ID NO: 3242348 - RNA, 17 nt, Human
gcacaggcugagugcag

SEQ ID NO: 3242349 - RNA, 13 nt, Human
gcacaggcugagu

SEQ ID NO: 3242350 - RNA, 21 nt, Human
gcacaggcagggcaggaccag

SEQ ID NO: 3242351 - RNA, 20 nt, Human
gcacaggcagggcaggacca

SEQ ID NO: 3242352 - RNA, 16 nt, Human
gcacaggcagggcagg

SEQ ID NO: 3242353 - RNA, 15 nt, Human
gcacaggcagggcag

SEQ ID NO: 3242354 - RNA, 11 nt, Human
gcacaggcaga

SEQ ID NO: 3242355 - RNA, 14 nt, Human
gcacaggcagggca

SEQ ID NO: 3242356 - RNA, 13 nt, Human
gcacaggcagggc

SEQ ID NO: 3242357 - RNA, 16 nt, Human
gcacagcuucauuucc

SEQ ID NO: 3242358 - RNA, 19 nt, Human
gcacagcuaacauggaagu

SEQ ID NO: 3242359 - RNA, 14 nt, Human
gcacagcugcucug

SEQ ID NO: 3242360 - RNA, 20 nt, Human
gcacagcucccuucuguuga

SEQ ID NO: 3242361 - RNA, 19 nt, Human
gcacagcguuaugugucug

SEQ ID NO: 3242362 - RNA, 13 nt, Human
gcaaugaccuuuc

SEQ ID NO: 3242363 - RNA, 14 nt, Human
gcaaugaccuuuca

SEQ ID NO: 3242364 - RNA, 19 nt, Human
gcaccacugcacuccagcc

SEQ ID NO: 3242365 - RNA, 13 nt, Human
gcaccacccuccu

SEQ ID NO: 3242366 - RNA, 17 nt, Human
gcaccacccuccuuccc

SEQ ID NO: 3242367 - RNA, 16 nt, Human
gcaccacccuccuucc

SEQ ID NO: 3242368 - RNA, 15 nt, Human
gcaccacccuccuuc

SEQ ID NO: 3242369 - RNA, 18 nt, Human
gcaccacucaagaccaaa

SEQ ID NO: 3242370 - RNA, 17 nt, Human
gcaccacucaagaccaa

SEQ ID NO: 3242371 - RNA, 13 nt, Human
gcaccacucaaga

SEQ ID NO: 3242372 - RNA, 15 nt, Human
gcaccuccugccucg

SEQ ID NO: 3242373 - RNA, 14 nt, Human
gcaccuccugccuc

SEQ ID NO: 3242374 - RNA, 17 nt, Human
gcacccggccccugcug

SEQ ID NO: 3242375 - RNA, 15 nt, Human
gcacccggccccugc

SEQ ID NO: 3242376 - RNA, 14 nt, Human
gcacccggccccug

SEQ ID NO: 3242377 - RNA, 16 nt, Human
gcacccauccaccguc

SEQ ID NO: 3242378 - RNA, 23 nt, Human
gcacccauccaccguccccuccc

SEQ ID NO: 3242379 - RNA, 22 nt, Human
gcacccauccaccguccccucc

SEQ ID NO: 3242380 - RNA, 15 nt, Human
gcacugucaagauga

SEQ ID NO: 3242381 - RNA, 22 nt, Human
gcacugggcuuggggaccagag

SEQ ID NO: 3242382 - RNA, 23 nt, Human
gcacugggcuuggggaccagagc

SEQ ID NO: 3242383 - RNA, 14 nt, Human
gcacugggcuuggg

SEQ ID NO: 3242384 - RNA, 14 nt, Human
gcagaagacaguau

SEQ ID NO: 3242385 - RNA, 19 nt, Human
gcagaacuugaagccugcu

SEQ ID NO: 3242386 - RNA, 13 nt, Human
gcagaaggaagac

SEQ ID NO: 3242387 - RNA, 14 nt, Human
gcagaaggaagacu

SEQ ID NO: 3242388 - RNA, 12 nt, Human
gcagaaggaaga

SEQ ID NO: 3242389 - RNA, 18 nt, Human
gcacuaaggugugcucug

SEQ ID NO: 3242390 - RNA, 17 nt, Human
gcacugaggaccagcca

SEQ ID NO: 3242391 - RNA, 22 nt, Human
gcacugauauauuuaaaaacaa

SEQ ID NO: 3242392 - RNA, 17 nt, Human
gcacuaaggugugcucu

SEQ ID NO: 3242393 - RNA, 11 nt, Human
gcaggaggaag

SEQ ID NO: 3242394 - RNA, 22 nt, Human
gcaggagcuucugggagauuuu

SEQ ID NO: 3242395 - RNA, 22 nt, Human
gcaggagcaguaucaugaagcc

SEQ ID NO: 3242396 - RNA, 17 nt, Human
gcaggagcaguaucaug

SEQ ID NO: 3242397 - RNA, 13 nt, Human
gcaggagcaguau

SEQ ID NO: 3242398 - RNA, 22 nt, Human
gcaggaccagcccacgcugacu

SEQ ID NO: 3242399 - RNA, 14 nt, Human
gcaggaccagccca

SEQ ID NO: 3242400 - RNA, 13 nt, Human
gcaggaccagccc

SEQ ID NO: 3242401 - RNA, 19 nt, Human
gcaggaccagcccacgcug

SEQ ID NO: 3242402 - RNA, 18 nt, Human
gcaggaccagcccacgcu

SEQ ID NO: 3242403 - RNA, 16 nt, Human
gcaggaccagcccacg

SEQ ID NO: 3242404 - RNA, 15 nt, Human
gcaggaccagcccac

SEQ ID NO: 3242405 - RNA, 14 nt, Human
gcagccuggacccu

SEQ ID NO: 3242406 - RNA, 12 nt, Human
gcagccuggcuc

SEQ ID NO: 3242407 - RNA, 13 nt, Human
gcagccuggcucc

SEQ ID NO: 3242408 - RNA, 14 nt, Human
gcagccuggcuccc

SEQ ID NO: 3242409 - RNA, 22 nt, Human
gcagccucaaccuccugggcua

SEQ ID NO: 3242410 - RNA, 21 nt, Human
gcagccucaaccuccugggcu

SEQ ID NO: 3242411 - RNA, 18 nt, Human
gcagccgugccuucagcu

SEQ ID NO: 3242412 - RNA, 24 nt, Human
gcagccugccuugcccacuccugc

SEQ ID NO: 3242413 - RNA, 20 nt, Human
gcagccucaaccuccugggc

SEQ ID NO: 3242414 - RNA, 19 nt, Human
gcagccucaaccuccuggg

SEQ ID NO: 3242415 - RNA, 17 nt, Human
gcagccgugccuucagc

SEQ ID NO: 3242416 - RNA, 15 nt, Human
gcagccgugccuuca

SEQ ID NO: 3242417 - RNA, 14 nt, Human
gcagccgugccuuc

SEQ ID NO: 3242418 - RNA, 20 nt, Human
gcagcagggagggcuucugc

SEQ ID NO: 3242419 - RNA, 12 nt, Human
gcagcagggcag

SEQ ID NO: 3242420 - RNA, 19 nt, Human
gcagauuuugcccuugaca

SEQ ID NO: 3242421 - RNA, 13 nt, Human
gcagaugccuggg

SEQ ID NO: 3242422 - RNA, 14 nt, Human
gcagaugcagcucu

SEQ ID NO: 3242423 - RNA, 19 nt, Human
gcagaugcagcucuuccug

SEQ ID NO: 3242424 - RNA, 15 nt, Human
gcagaugcagcucuu

SEQ ID NO: 3242425 - RNA, 15 nt, Human
gcagaguuacuugau

SEQ ID NO: 3242426 - RNA, 13 nt, Human
gcagaguuacuug

SEQ ID NO: 3242427 - RNA, 14 nt, Human
gcagaguucaggga

SEQ ID NO: 3242428 - RNA, 19 nt, Human
gcagaguugaagacagagc

SEQ ID NO: 3242429 - RNA, 16 nt, Human
gcagaguugaagacag

SEQ ID NO: 3242430 - RNA, 17 nt, Human
gcagaguugaagacaga

SEQ ID NO: 3242431 - RNA, 21 nt, Human
gcagcaaggucuugcucuccu

SEQ ID NO: 3242432 - RNA, 21 nt, Human
gcagcacccagguuuugcacu

SEQ ID NO: 3242433 - RNA, 15 nt, Human
gcagcacagcugaga

SEQ ID NO: 3242434 - RNA, 19 nt, Human
gcagcaccgccucuucccg

SEQ ID NO: 3242435 - RNA, 16 nt, Human
gcagcaccgccucuuc

SEQ ID NO: 3242436 - RNA, 17 nt, Human
gcagcaaggucuugcuc

SEQ ID NO: 3242437 - RNA, 16 nt, Human
gcagauuuuggccaug

SEQ ID NO: 3242438 - RNA, 14 nt, Human
gcagcaacacacau

SEQ ID NO: 3242439 - RNA, 15 nt, Human
gcagaguugaagaca

SEQ ID NO: 3242440 - RNA, 13 nt, Human
gcagaguuaaauc

SEQ ID NO: 3242441 - RNA, 21 nt, Human
gcagaguuaaaucucaaauag

SEQ ID NO: 3242442 - RNA, 17 nt, Human
gcagagaccaucccuga

SEQ ID NO: 3242443 - RNA, 14 nt, Human
gcagagaccauccc

SEQ ID NO: 3242444 - RNA, 15 nt, Human
gcagagaccaucccu

SEQ ID NO: 3242445 - RNA, 23 nt, Human
gcagagaaugaaagggcccagag

SEQ ID NO: 3242446 - RNA, 22 nt, Human
gcagagaaugaaagggcccaga

SEQ ID NO: 3242447 - RNA, 21 nt, Human
gcagagaauucucuuauccaa

SEQ ID NO: 3242448 - RNA, 21 nt, Human
gcagagaagugacgguuccua

SEQ ID NO: 3242449 - RNA, 21 nt, Human
gcagagaaugaaagggcccag

SEQ ID NO: 3242450 - RNA, 20 nt, Human
gcagagaaugaaagggccca

SEQ ID NO: 3242451 - RNA, 19 nt, Human
gcagagaaugaaagggccc

SEQ ID NO: 3242452 - RNA, 16 nt, Human
gcaucaggccaggccc

SEQ ID NO: 3242453 - RNA, 17 nt, Human
gcaucaggccaggcccu

SEQ ID NO: 3242454 - RNA, 13 nt, Human
gcaucaggccagg

SEQ ID NO: 3242455 - RNA, 15 nt, Human
gcaucaggccaggcc

SEQ ID NO: 3242456 - RNA, 17 nt, Human
gcaugccuggauggggc

SEQ ID NO: 3242457 - RNA, 22 nt, Human
gcaugccuggauggggcugcac

SEQ ID NO: 3242458 - RNA, 21 nt, Human
gcaugcaucccacugcugacu

SEQ ID NO: 3242459 - RNA, 15 nt, Human
gcaugcugucccuua

SEQ ID NO: 3242460 - RNA, 14 nt, Human
gcaugcuuuccaua

SEQ ID NO: 3242461 - RNA, 21 nt, Human
gcaugcuguauuaugaaaucg

SEQ ID NO: 3242462 - RNA, 14 nt, Human
gcaugcuuaaauuu

SEQ ID NO: 3242463 - RNA, 18 nt, Human
gcaugcuuaaauuuuaac

SEQ ID NO: 3242464 - RNA, 15 nt, Human
gcaugccuggauggg

SEQ ID NO: 3242465 - RNA, 15 nt, Human
gcaugccuucaaauc

SEQ ID NO: 3242466 - RNA, 19 nt, Human
gcauggagaaugcaccaua

SEQ ID NO: 3242467 - RNA, 22 nt, Human
gcauguucucugaggacacuaa

SEQ ID NO: 3242468 - RNA, 20 nt, Human
gcauggacauuuagaagaaa

SEQ ID NO: 3242469 - RNA, 22 nt, Human
gcauggacauuuagaagaaaga

SEQ ID NO: 3242470 - RNA, 17 nt, Human
gcauuagugggaaaaag

SEQ ID NO: 3242471 - RNA, 17 nt, Human
gcauuccagucaggcuc

SEQ ID NO: 3242472 - RNA, 21 nt, Human
gcauuagagucaacuacacaa

SEQ ID NO: 3242473 - RNA, 20 nt, Human
gcauuagauuucucauuugc

SEQ ID NO: 3242474 - RNA, 15 nt, Human
gcauguuuugcaugu

SEQ ID NO: 3242475 - RNA, 13 nt, Human
gcauguuuugcau

SEQ ID NO: 3242476 - RNA, 14 nt, Human
gcauuaaaagaaaa

SEQ ID NO: 3242477 - RNA, 13 nt, Human
gcauuaaaagaaa

SEQ ID NO: 3242478 - RNA, 12 nt, Human
gcauuuuaccau

SEQ ID NO: 3242479 - RNA, 17 nt, Human
gcauuugcugaauacag

SEQ ID NO: 3242480 - RNA, 14 nt, Human
gcauuugcuuuugu

SEQ ID NO: 3242481 - RNA, 23 nt, Human
gcauuugcugaauacagaggcaa

SEQ ID NO: 3242482 - RNA, 12 nt, Human
gcauuccccacu

SEQ ID NO: 3242483 - RNA, 15 nt, Human
gcauucucacuccua

SEQ ID NO: 3242484 - RNA, 13 nt, Human
gcauucucacucc

SEQ ID NO: 3242485 - RNA, 14 nt, Human
gcauucggagggag

SEQ ID NO: 3242486 - RNA, 21 nt, Human
gcauugccucggcuggcuccc

SEQ ID NO: 3242487 - RNA, 23 nt, Human
gcauugccaguaacacaggccac

SEQ ID NO: 3242488 - RNA, 14 nt, Human
gcauucucucucca

SEQ ID NO: 3242489 - RNA, 23 nt, Human
gcauucucuccauuucacuggcu

SEQ ID NO: 3242490 - RNA, 18 nt, Human
gcauucucacuccuaccu

SEQ ID NO: 3242491 - RNA, 22 nt, Human
gcauuuugcuaaaugugaauga

SEQ ID NO: 3242492 - RNA, 20 nt, Human
gcauuuucccccuuggcucu

SEQ ID NO: 3242493 - RNA, 19 nt, Human
gccaaaacccagcugcacc

SEQ ID NO: 3242494 - RNA, 16 nt, Human
gccaaaacccagcugc

SEQ ID NO: 3242495 - RNA, 13 nt, Human
gccaaaacccagc

SEQ ID NO: 3242496 - RNA, 13 nt, Human
gcauuuuggcgcu

SEQ ID NO: 3242497 - RNA, 12 nt, Human
gcauuuuguaau

SEQ ID NO: 3242498 - RNA, 22 nt, Human
gccaaaagcuucccucccugcu

SEQ ID NO: 3242499 - RNA, 20 nt, Human
gccaaaagcuucccucccug

SEQ ID NO: 3242500 - RNA, 15 nt, Human
gccaaaagcuucccu

SEQ ID NO: 3242501 - RNA, 14 nt, Human
gccaaaagcuuccc

SEQ ID NO: 3242502 - RNA, 14 nt, Human
gccaaaauuaaggu

SEQ ID NO: 3242503 - RNA, 21 nt, Human
gccaaaauuaagguguuugaa

SEQ ID NO: 3242504 - RNA, 23 nt, Human
gccaaacaaaaugagaucucauu

SEQ ID NO: 3242505 - RNA, 16 nt, Human
gccaaaggaagcacau

SEQ ID NO: 3242506 - RNA, 20 nt, Human
gccaaaggaagcacaugccu

SEQ ID NO: 3242507 - RNA, 14 nt, Human
gccaaaggaagcac

SEQ ID NO: 3242508 - RNA, 12 nt, Human
gccaaagacaaa

SEQ ID NO: 3242509 - RNA, 15 nt, Human
gccaaagacaaauag

SEQ ID NO: 3242510 - RNA, 14 nt, Human
gccaaagacaaaua

SEQ ID NO: 3242511 - RNA, 21 nt, Human
gccaaacucaccugccccuca

SEQ ID NO: 3242512 - RNA, 23 nt, Human
gccaaacauuaauguugauuucu

SEQ ID NO: 3242513 - RNA, 22 nt, Human
gccaaacauuaauguugauuuc

SEQ ID NO: 3242514 - RNA, 24 nt, Human
gccaaacauuaauguugauuucua

SEQ ID NO: 3242515 - RNA, 19 nt, Human
gccaaacucaccugccccu

SEQ ID NO: 3242516 - RNA, 23 nt, Human
gccaaaauuaagguguuugaaaa

SEQ ID NO: 3242517 - RNA, 13 nt, Human
gccaaacacacag

SEQ ID NO: 3242518 - RNA, 19 nt, Human
gccaaacauuaauguugau

SEQ ID NO: 3242519 - RNA, 12 nt, Human
gccaaacauuaa

SEQ ID NO: 3242520 - RNA, 11 nt, Human
gccaaacauua

SEQ ID NO: 3242521 - RNA, 14 nt, Human
gccaaacaggcccu

SEQ ID NO: 3242522 - RNA, 15 nt, Human
gcauauucaggaagc

SEQ ID NO: 3242523 - RNA, 21 nt, Human
gcauauauuaaagcaucagga

SEQ ID NO: 3242524 - RNA, 18 nt, Human
gcauauauauaugugugu

SEQ ID NO: 3242525 - RNA, 14 nt, Human
gcauauauauaugu

SEQ ID NO: 3242526 - RNA, 17 nt, Human
gcauauucaggaagcuc

SEQ ID NO: 3242527 - RNA, 18 nt, Human
gcauauucaggaagcuca

SEQ ID NO: 3242528 - RNA, 20 nt, Human
gcauauucaggaagcucagg

SEQ ID NO: 3242529 - RNA, 21 nt, Human
gcauauucuaguaauaaagac

SEQ ID NO: 3242530 - RNA, 21 nt, Human
gcaucaagaugugacauguuu

SEQ ID NO: 3242531 - RNA, 14 nt, Human
gcauauugacuuuu

SEQ ID NO: 3242532 - RNA, 23 nt, Human
gcauauucuaguaauaaagacuc

SEQ ID NO: 3242533 - RNA, 22 nt, Human
gcauauucuaguaauaaagacu

SEQ ID NO: 3242534 - RNA, 23 nt, Human
gcauaggccugcuuugucuccuc

SEQ ID NO: 3242535 - RNA, 22 nt, Human
gcauaggccugcuuugucuccu

SEQ ID NO: 3242536 - RNA, 16 nt, Human
gcauaggccugcuuug

SEQ ID NO: 3242537 - RNA, 23 nt, Human
gcauauaacuuauauuguaagaa

SEQ ID NO: 3242538 - RNA, 16 nt, Human
gcauauaacuuauauu

SEQ ID NO: 3242539 - RNA, 15 nt, Human
gcauauaacuuauau

SEQ ID NO: 3242540 - RNA, 18 nt, Human
gcauagauucccugagca

SEQ ID NO: 3242541 - RNA, 20 nt, Human
gcauagcaguauauguuaau

SEQ ID NO: 3242542 - RNA, 18 nt, Human
gcagugggagcugccugu

SEQ ID NO: 3242543 - RNA, 17 nt, Human
gcagugggagcugccug

SEQ ID NO: 3242544 - RNA, 20 nt, Human
gcaguuacaaauuauaaugu

SEQ ID NO: 3242545 - RNA, 13 nt, Human
gcaguuacaaauu

SEQ ID NO: 3242546 - RNA, 16 nt, Human
gcaguucgaccagcca

SEQ ID NO: 3242547 - RNA, 23 nt, Human
gcaguuccccuggaagcagugcc

SEQ ID NO: 3242548 - RNA, 17 nt, Human
gcaguuccccuggaagc

SEQ ID NO: 3242549 - RNA, 18 nt, Human
gcaguucgaccagccagg

SEQ ID NO: 3242550 - RNA, 14 nt, Human
gcagguccccagac

SEQ ID NO: 3242551 - RNA, 23 nt, Human
gcagguccccagacuccaccaag

SEQ ID NO: 3242552 - RNA, 16 nt, Human
gcagugggagcugccu

SEQ ID NO: 3242553 - RNA, 23 nt, Human
gcagugcuuccaaggauggacca

SEQ ID NO: 3242554 - RNA, 15 nt, Human
gcaggcuacugucag

SEQ ID NO: 3242555 - RNA, 14 nt, Human
gcagggagggccug

SEQ ID NO: 3242556 - RNA, 17 nt, Human
gcagggagggccugggc

SEQ ID NO: 3242557 - RNA, 20 nt, Human
gcaggauucuuccucccucc

SEQ ID NO: 3242558 - RNA, 12 nt, Human
gcagggcucagc

SEQ ID NO: 3242559 - RNA, 16 nt, Human
gcagggagggcuucug

SEQ ID NO: 3242560 - RNA, 18 nt, Human
gcagggagggccugggcc

SEQ ID NO: 3242561 - RNA, 22 nt, Human
gcagggagggccugggccccag

SEQ ID NO: 3242562 - RNA, 13 nt, Human
gccuauuguaaua

SEQ ID NO: 3242563 - RNA, 21 nt, Human
gccuauuguaauauagaaaaa

SEQ ID NO: 3242564 - RNA, 14 nt, Human
gccucaaauccagg

SEQ ID NO: 3242565 - RNA, 18 nt, Human
gccucaaauccaggaccc

SEQ ID NO: 3242566 - RNA, 16 nt, Human
gccucaaauccaggac

SEQ ID NO: 3242567 - RNA, 15 nt, Human
gccucaaauccagga

SEQ ID NO: 3242568 - RNA, 21 nt, Human
gccuauuuucaugauuucuuu

SEQ ID NO: 3242569 - RNA, 23 nt, Human
gccuauuuuuuuagauugagaaa

SEQ ID NO: 3242570 - RNA, 21 nt, Human
gccuaagauauacuuguuuuu

SEQ ID NO: 3242571 - RNA, 21 nt, Human
gccucagcauccuggcacccg

SEQ ID NO: 3242572 - RNA, 17 nt, Human
gccucagcauccuggca

SEQ ID NO: 3242573 - RNA, 18 nt, Human
gccucagcauccuggcac

SEQ ID NO: 3242574 - RNA, 24 nt, Human
gccucaagugauucuccugccuca

SEQ ID NO: 3242575 - RNA, 22 nt, Human
gccucaagugauucuccugccu

SEQ ID NO: 3242576 - RNA, 22 nt, Human
gccucaaauccaggacccugcc

SEQ ID NO: 3242577 - RNA, 19 nt, Human
gccucaaauccaggacccu

SEQ ID NO: 3242578 - RNA, 17 nt, Human
gccguugcugacuuaga

SEQ ID NO: 3242579 - RNA, 18 nt, Human
gccguugcugacuuagaa

SEQ ID NO: 3242580 - RNA, 18 nt, Human
gccguugccgcugauguu

SEQ ID NO: 3242581 - RNA, 15 nt, Human
gccuaaaaauaaagc

SEQ ID NO: 3242582 - RNA, 19 nt, Human
gccguugcugacuuagaau

SEQ ID NO: 3242583 - RNA, 13 nt, Human
gccguggcuuccc

SEQ ID NO: 3242584 - RNA, 12 nt, Human
gccguggcuucc

SEQ ID NO: 3242585 - RNA, 11 nt, Human
gccguggcuuc

SEQ ID NO: 3242586 - RNA, 18 nt, Human
gccgucuaccugaggggc

SEQ ID NO: 3242587 - RNA, 20 nt, Human
gccgucuaccugaggggccu

SEQ ID NO: 3242588 - RNA, 22 nt, Human
gccgucuaccugaggggccucu

SEQ ID NO: 3242589 - RNA, 23 nt, Human
gccgucuaccugaggggccucuu

SEQ ID NO: 3242590 - RNA, 13 nt, Human
gccgcagcccugc

SEQ ID NO: 3242591 - RNA, 16 nt, Human
gccgggcaaacuggcc

SEQ ID NO: 3242592 - RNA, 17 nt, Human
gccgggcagagcacagc

SEQ ID NO: 3242593 - RNA, 14 nt, Human
gccgggcagagcac

SEQ ID NO: 3242594 - RNA, 21 nt, Human
gccggggcuucugugcaccug

SEQ ID NO: 3242595 - RNA, 16 nt, Human
gccgcagcccugcaga

SEQ ID NO: 3242596 - RNA, 17 nt, Human
gccgcagcccugcagag

SEQ ID NO: 3242597 - RNA, 15 nt, Human
gccgcagcccugcag

SEQ ID NO: 3242598 - RNA, 17 nt, Human
gccgagauagccaaggc

SEQ ID NO: 3242599 - RNA, 16 nt, Human
gccgagauagccaagg

SEQ ID NO: 3242600 - RNA, 15 nt, Human
gcccuugcccaugcu

SEQ ID NO: 3242601 - RNA, 23 nt, Human
gcccuucucuccagccccuggau

SEQ ID NO: 3242602 - RNA, 13 nt, Human
gcccuucucucca

SEQ ID NO: 3242603 - RNA, 21 nt, Human
gcccuucggaggaccagggcu

SEQ ID NO: 3242604 - RNA, 21 nt, Human
gcccuuccucuccacugccuu

SEQ ID NO: 3242605 - RNA, 22 nt, Human
gcccuuccucuccacugccuuc

SEQ ID NO: 3242606 - RNA, 17 nt, Human
gcccuuccucugcuccc

SEQ ID NO: 3242607 - RNA, 15 nt, Human
gcccuuccucugcuc

SEQ ID NO: 3242608 - RNA, 14 nt, Human
gcccuuccucugcu

SEQ ID NO: 3242609 - RNA, 13 nt, Human
gcccuuccucugc

SEQ ID NO: 3242610 - RNA, 15 nt, Human
gccugcagagcugcg

SEQ ID NO: 3242611 - RNA, 20 nt, Human
gccugcagagcugcgggcug

SEQ ID NO: 3242612 - RNA, 14 nt, Human
gccuggacccugug

SEQ ID NO: 3242613 - RNA, 22 nt, Human
gccugcuggcucccuuacuuua

SEQ ID NO: 3242614 - RNA, 11 nt, Human
gccugcccagg

SEQ ID NO: 3242615 - RNA, 21 nt, Human
gccucugcacuccccugcugg

SEQ ID NO: 3242616 - RNA, 15 nt, Human
gccucugcacucccc

SEQ ID NO: 3242617 - RNA, 12 nt, Human
gccucugcauuc

SEQ ID NO: 3242618 - RNA, 16 nt, Human
gccugaaauccugguu

SEQ ID NO: 3242619 - RNA, 19 nt, Human
gccugaaauccugguuccu

SEQ ID NO: 3242620 - RNA, 14 nt, Human
gccugagaugccug

SEQ ID NO: 3242621 - RNA, 13 nt, Human
gccugagaugccu

SEQ ID NO: 3242622 - RNA, 17 nt, Human
gccucugcacuccccug

SEQ ID NO: 3242623 - RNA, 18 nt, Human
gccucugcacuccccugc

SEQ ID NO: 3242624 - RNA, 19 nt, Human
gccucugcacuccccugcu

SEQ ID NO: 3242625 - RNA, 20 nt, Human
gccucugcacuccccugcug

SEQ ID NO: 3242626 - RNA, 16 nt, Human
gccucugcacuccccu

SEQ ID NO: 3242627 - RNA, 15 nt, Human
gccucugacacacag

SEQ ID NO: 3242628 - RNA, 15 nt, Human
gccucucccaucacu

SEQ ID NO: 3242629 - RNA, 14 nt, Human
gccucccugccagu

SEQ ID NO: 3242630 - RNA, 23 nt, Human
gccucccuccgcggcgggcccug

SEQ ID NO: 3242631 - RNA, 19 nt, Human
gccucccgaauagcuggga

SEQ ID NO: 3242632 - RNA, 18 nt, Human
gccucccgaauagcuggg

SEQ ID NO: 3242633 - RNA, 23 nt, Human
gccucccgaguagcugggacuac

SEQ ID NO: 3242634 - RNA, 21 nt, Human
gccucccgaguagcugggacu

SEQ ID NO: 3242635 - RNA, 20 nt, Human
gccucccgaauagcugggac

SEQ ID NO: 3242636 - RNA, 20 nt, Human
gccucccgaguagcugggac

SEQ ID NO: 3242637 - RNA, 14 nt, Human
gccucagccuccca

SEQ ID NO: 3242638 - RNA, 12 nt, Human
gccucagccucc

SEQ ID NO: 3242639 - RNA, 17 nt, Human
gccucccaucacccgcu

SEQ ID NO: 3242640 - RNA, 14 nt, Human
gcuaagaauauuug

SEQ ID NO: 3242641 - RNA, 23 nt, Human
gcuaagaaaccaggaguaaaaga

SEQ ID NO: 3242642 - RNA, 22 nt, Human
gcuaacuugcuuaaaugugaau

SEQ ID NO: 3242643 - RNA, 20 nt, Human
gcuaacuugcuuaaauguga

SEQ ID NO: 3242644 - RNA, 19 nt, Human
gcuaacuugcuuaaaugug

SEQ ID NO: 3242645 - RNA, 18 nt, Human
gcuaacuugcuuaaaugu

SEQ ID NO: 3242646 - RNA, 22 nt, Human
gcuacacaggggaaaagaggag

SEQ ID NO: 3242647 - RNA, 15 nt, Human
gcgugagaccugccc

SEQ ID NO: 3242648 - RNA, 14 nt, Human
gcgugagccacugc

SEQ ID NO: 3242649 - RNA, 15 nt, Human
gcgugagccacugca

SEQ ID NO: 3242650 - RNA, 16 nt, Human
gcgugagaccugcccc

SEQ ID NO: 3242651 - RNA, 17 nt, Human
gcuaacauggaaguacu

SEQ ID NO: 3242652 - RNA, 18 nt, Human
gcuaacauggaaguacua

SEQ ID NO: 3242653 - RNA, 14 nt, Human
gcuaacauggaagu

SEQ ID NO: 3242654 - RNA, 15 nt, Human
gcuacauuuccgcca

SEQ ID NO: 3242655 - RNA, 20 nt, Human
gcuacauggggucugggugg

SEQ ID NO: 3242656 - RNA, 21 nt, Human
gcuacauuuccgccacauccc

SEQ ID NO: 3242657 - RNA, 18 nt, Human
gcuagagaaauucuuguu

SEQ ID NO: 3242658 - RNA, 21 nt, Human
gcuagacgagcaggcuucuuc

SEQ ID NO: 3242659 - RNA, 22 nt, Human
gcuagacgagcaggcuucuucc

SEQ ID NO: 3242660 - RNA, 23 nt, Human
gcgguccacccaggagccccgag

SEQ ID NO: 3242661 - RNA, 20 nt, Human
gcgguccacccaggagcccc

SEQ ID NO: 3242662 - RNA, 23 nt, Human
gcggggacagcuccuucuguccu

SEQ ID NO: 3242663 - RNA, 21 nt, Human
gcgcuucacuuggguccaggc

SEQ ID NO: 3242664 - RNA, 19 nt, Human
gcggacagccacggccagg

SEQ ID NO: 3242665 - RNA, 16 nt, Human
gcggacagccacggcc

SEQ ID NO: 3242666 - RNA, 23 nt, Human
gcggacagccacggccaggccag

SEQ ID NO: 3242667 - RNA, 19 nt, Human
gcggggacagcuccuucug

SEQ ID NO: 3242668 - RNA, 18 nt, Human
gcggggacagcuccuucu

SEQ ID NO: 3242669 - RNA, 18 nt, Human
gcgccuacaggagugagc

SEQ ID NO: 3242670 - RNA, 21 nt, Human
gcgccuacaggagugagcacu

SEQ ID NO: 3242671 - RNA, 20 nt, Human
gcgccuacaggagugagcac

SEQ ID NO: 3242672 - RNA, 22 nt, Human
gcgcuccgggacguggcaccuc

SEQ ID NO: 3242673 - RNA, 21 nt, Human
gcgccucaacucugcugaggg

SEQ ID NO: 3242674 - RNA, 22 nt, Human
gcgccucaacucugcugagggu

SEQ ID NO: 3242675 - RNA, 19 nt, Human
gcgcucccuugaccugcug

SEQ ID NO: 3242676 - RNA, 14 nt, Human
gcgcugccccuggc

SEQ ID NO: 3242677 - RNA, 23 nt, Human
gcgcucgaaguugaucuccccag

SEQ ID NO: 3242678 - RNA, 16 nt, Human
gccuggugguuuucaa

SEQ ID NO: 3242679 - RNA, 14 nt, Human
gccuggugguuuuc

SEQ ID NO: 3242680 - RNA, 18 nt, Human
gccuguaaucacagcuac

SEQ ID NO: 3242681 - RNA, 17 nt, Human
gccugguggcagcugcg

SEQ ID NO: 3242682 - RNA, 16 nt, Human
gccugguggcagcugc

SEQ ID NO: 3242683 - RNA, 15 nt, Human
gccugguggcagcug

SEQ ID NO: 3242684 - RNA, 14 nt, Human
gccugguggcagcu

SEQ ID NO: 3242685 - RNA, 20 nt, Human
gccuuagaagucacacagua

SEQ ID NO: 3242686 - RNA, 16 nt, Human
gccuuagaaccuuucu

SEQ ID NO: 3242687 - RNA, 21 nt, Human
gccuuauggaacacucugaga

SEQ ID NO: 3242688 - RNA, 22 nt, Human
gccuuauggaacacucugagac

SEQ ID NO: 3242689 - RNA, 23 nt, Human
gccuuauggaacacucugagacu

SEQ ID NO: 3242690 - RNA, 16 nt, Human
gccuuauguugaaaaa

SEQ ID NO: 3242691 - RNA, 17 nt, Human
gccuuauguugaaaaaa

SEQ ID NO: 3242692 - RNA, 20 nt, Human
gccuuauggaacacucugag

SEQ ID NO: 3242693 - RNA, 13 nt, Human
gccuucaaaucaa

SEQ ID NO: 3242694 - RNA, 18 nt, Human
gccuucggccuccauccu

SEQ ID NO: 3242695 - RNA, 21 nt, Human
gccuuccaggggugggacacc

SEQ ID NO: 3242696 - RNA, 13 nt, Human
gccuucagcucua

SEQ ID NO: 3242697 - RNA, 17 nt, Human
gccuugggcucugcuga

SEQ ID NO: 3242698 - RNA, 16 nt, Human
gccuugggcucugcug

SEQ ID NO: 3242699 - RNA, 15 nt, Human
gccuugggcucugcu

SEQ ID NO: 3242700 - RNA, 19 nt, Human
gccuugggauccaggcccc

SEQ ID NO: 3242701 - RNA, 14 nt, Human
gccuugggcucugc

SEQ ID NO: 3242702 - RNA, 22 nt, Human
gccuuuaucuaccaacuuucaa

SEQ ID NO: 3242703 - RNA, 21 nt, Human
gccuuuaucuaccaacuuuca

SEQ ID NO: 3242704 - RNA, 15 nt, Human
gccuuggggacaacc

SEQ ID NO: 3242705 - RNA, 22 nt, Human
gcgacagugagacucugucuca

SEQ ID NO: 3242706 - RNA, 18 nt, Human
gcgacaucucugacuuuc

SEQ ID NO: 3242707 - RNA, 21 nt, Human
gccuuuuguucauuucauccu

SEQ ID NO: 3242708 - RNA, 13 nt, Human
gccuuuggcuuca

SEQ ID NO: 3242709 - RNA, 18 nt, Human
gccuuucagcaggcagcc

SEQ ID NO: 3242710 - RNA, 17 nt, Human
gccuuucagcaggcagc

SEQ ID NO: 3242711 - RNA, 16 nt, Human
gccuuucagcaggcag

SEQ ID NO: 3242712 - RNA, 17 nt, Human
gccuuugggugcuguuu

SEQ ID NO: 3242713 - RNA, 22 nt, Human
gccuuugggugcuguuuugcca

SEQ ID NO: 3242714 - RNA, 11 nt, Human
gccuuuguaac

SEQ ID NO: 3242715 - RNA, 22 nt, Human
gccuuuguaaccacaacuuuca

SEQ ID NO: 3242716 - RNA, 14 nt, Human
gccccgcccaggcu

SEQ ID NO: 3242717 - RNA, 22 nt, Human
gccccgaggccuucucugaagg

SEQ ID NO: 3242718 - RNA, 23 nt, Human
gccccauucugccugcccaggcc

SEQ ID NO: 3242719 - RNA, 22 nt, Human
gccccauucugccugcccaggc

SEQ ID NO: 3242720 - RNA, 23 nt, Human
gccccgaggccuucucugaagga

SEQ ID NO: 3242721 - RNA, 15 nt, Human
gccccauucugccug

SEQ ID NO: 3242722 - RNA, 17 nt, Human
gccccgugggguuccuc

SEQ ID NO: 3242723 - RNA, 17 nt, Human
gccccgucucaggucug

SEQ ID NO: 3242724 - RNA, 14 nt, Human
gccccgucucaggu

SEQ ID NO: 3242725 - RNA, 13 nt, Human
gccccgucucagg

SEQ ID NO: 3242726 - RNA, 21 nt, Human
gccccgucuacagcuccccca

SEQ ID NO: 3242727 - RNA, 21 nt, Human
gccccgucccccucuggcucc

SEQ ID NO: 3242728 - RNA, 18 nt, Human
gccccgucuacagcuccc

SEQ ID NO: 3242729 - RNA, 17 nt, Human
gccccgucccccucugg

SEQ ID NO: 3242730 - RNA, 20 nt, Human
gccccugagaucucugcagg

SEQ ID NO: 3242731 - RNA, 11 nt, Human
gccccugagcc

SEQ ID NO: 3242732 - RNA, 13 nt, Human
gccccugcacaaa

SEQ ID NO: 3242733 - RNA, 15 nt, Human
gccccugagcccacu

SEQ ID NO: 3242734 - RNA, 14 nt, Human
gccccugagcccac

SEQ ID NO: 3242735 - RNA, 13 nt, Human
gccccugagccca

SEQ ID NO: 3242736 - RNA, 12 nt, Human
gccccugagccc

SEQ ID NO: 3242737 - RNA, 19 nt, Human
gccccugcacuccagccug

SEQ ID NO: 3242738 - RNA, 23 nt, Human
gccccuggcagccccuguucugg

SEQ ID NO: 3242739 - RNA, 16 nt, Human
gccccugagcccacug

SEQ ID NO: 3242740 - RNA, 17 nt, Human
gccccuucccccuccaa

SEQ ID NO: 3242741 - RNA, 19 nt, Human
gccccucagggucccuggu

SEQ ID NO: 3242742 - RNA, 21 nt, Human
gccccucagggucccuggugg

SEQ ID NO: 3242743 - RNA, 18 nt, Human
gccccucagggucccugg

SEQ ID NO: 3242744 - RNA, 15 nt, Human
gccccguucuguuug

SEQ ID NO: 3242745 - RNA, 22 nt, Human
gcccuccucccucccagcucca

SEQ ID NO: 3242746 - RNA, 20 nt, Human
gcccuccucccucccagcuc

SEQ ID NO: 3242747 - RNA, 18 nt, Human
gcccuccucccucccagc

SEQ ID NO: 3242748 - RNA, 19 nt, Human
gcccucugcccacucccug

SEQ ID NO: 3242749 - RNA, 22 nt, Human
gcccucugcccacucccugcaa

SEQ ID NO: 3242750 - RNA, 19 nt, Human
gcccgggcucugccuccca

SEQ ID NO: 3242751 - RNA, 20 nt, Human
gcccgggcucugccucccau

SEQ ID NO: 3242752 - RNA, 15 nt, Human
gcccucccugccccu

SEQ ID NO: 3242753 - RNA, 13 nt, Human
gcccgggcucugc

SEQ ID NO: 3242754 - RNA, 14 nt, Human
gcccgggcucugcc

SEQ ID NO: 3242755 - RNA, 15 nt, Human
gcccgggcucugccu

SEQ ID NO: 3242756 - RNA, 18 nt, Human
gcccgggcucugccuccc

SEQ ID NO: 3242757 - RNA, 12 nt, Human
gcccgggcucug

SEQ ID NO: 3242758 - RNA, 14 nt, Human
gcccggcuccaggc

SEQ ID NO: 3242759 - RNA, 13 nt, Human
gcccggcuccagg

SEQ ID NO: 3242760 - RNA, 12 nt, Human
gcccggcuccag

SEQ ID NO: 3242761 - RNA, 19 nt, Human
gccccuucugacccaugcu

SEQ ID NO: 3242762 - RNA, 18 nt, Human
gcccaugauauaacuuua

SEQ ID NO: 3242763 - RNA, 17 nt, Human
gcccaugagagcgcagc

SEQ ID NO: 3242764 - RNA, 19 nt, Human
gcccaugagagcgcagccc

SEQ ID NO: 3242765 - RNA, 20 nt, Human
gcccaugagagcgcagcccg

SEQ ID NO: 3242766 - RNA, 17 nt, Human
gccccagcuugggcaga

SEQ ID NO: 3242767 - RNA, 23 nt, Human
gccccagcgcugacgugucagga

SEQ ID NO: 3242768 - RNA, 14 nt, Human
gccccagcgcugac

SEQ ID NO: 3242769 - RNA, 17 nt, Human
gccccagugcccacagg

SEQ ID NO: 3242770 - RNA, 16 nt, Human
gccccagugcccacag

SEQ ID NO: 3242771 - RNA, 15 nt, Human
gccccagugcccaca

SEQ ID NO: 3242772 - RNA, 21 nt, Human
gccccauucugccugcccagg

SEQ ID NO: 3242773 - RNA, 20 nt, Human
gccccauucugccugcccag

SEQ ID NO: 3242774 - RNA, 18 nt, Human
gccccauucugccugccc

SEQ ID NO: 3242775 - RNA, 17 nt, Human
gccccauucugccugcc

SEQ ID NO: 3242776 - RNA, 23 nt, Human
gccccauccucuguacagagccc

SEQ ID NO: 3242777 - RNA, 15 nt, Human
gcccaggcuggcgug

SEQ ID NO: 3242778 - RNA, 14 nt, Human
gcccaggcuggcgu

SEQ ID NO: 3242779 - RNA, 16 nt, Human
gcccaggcuggcgugc

SEQ ID NO: 3242780 - RNA, 20 nt, Human
gcccagucuggaaugcagug

SEQ ID NO: 3242781 - RNA, 20 nt, Human
gcccagucccagcagccagc

SEQ ID NO: 3242782 - RNA, 19 nt, Human
gcccagucccagcagccag

SEQ ID NO: 3242783 - RNA, 18 nt, Human
gcccagucccagcagcca

SEQ ID NO: 3242784 - RNA, 22 nt, Human
gcccagucuggaaugcaguggu

SEQ ID NO: 3242785 - RNA, 14 nt, Human
gcccaguacauuua

SEQ ID NO: 3242786 - RNA, 19 nt, Human
gcccaguacauuuaaauuu

SEQ ID NO: 3242787 - RNA, 22 nt, Human
gcccaguacauuuaaauuuuuu

SEQ ID NO: 3242788 - RNA, 13 nt, Human
gcccagucccagc

SEQ ID NO: 3242789 - RNA, 12 nt, Human
gcccagucccag

SEQ ID NO: 3242790 - RNA, 17 nt, Human
gcccagucccagcagcc

SEQ ID NO: 3242791 - RNA, 16 nt, Human
gcccagucccagcagc

SEQ ID NO: 3242792 - RNA, 15 nt, Human
gcccagucccagcag

SEQ ID NO: 3242793 - RNA, 14 nt, Human
gcccagucccagca

SEQ ID NO: 3242794 - RNA, 12 nt, Human
gcccaggaaagg

SEQ ID NO: 3242795 - RNA, 15 nt, Human
gcccaggaaaggcuc

SEQ ID NO: 3242796 - RNA, 16 nt, Human
gcccaggaaaggcucc

SEQ ID NO: 3242797 - RNA, 18 nt, Human
gcccaggccuccuacagc

SEQ ID NO: 3242798 - RNA, 11 nt, Human
gcccaggcugg

SEQ ID NO: 3242799 - RNA, 13 nt, Human
gcccaggccuccu

SEQ ID NO: 3242800 - RNA, 23 nt, Human
gcccagcuuuucauugcugugac

SEQ ID NO: 3242801 - RNA, 17 nt, Human
gcccaggccugccuguu

SEQ ID NO: 3242802 - RNA, 23 nt, Human
gcccacccugcuuggcccagggg

SEQ ID NO: 3242803 - RNA, 22 nt, Human
gcccacccugcuuggcccaggg

SEQ ID NO: 3242804 - RNA, 21 nt, Human
gcccacccugcuuggcccagg

SEQ ID NO: 3242805 - RNA, 14 nt, Human
gccacucaggccca

SEQ ID NO: 3242806 - RNA, 22 nt, Human
gccacucaggcccaaagccucg

SEQ ID NO: 3242807 - RNA, 18 nt, Human
gccacuccagaccccugg

SEQ ID NO: 3242808 - RNA, 16 nt, Human
gccacuccagaccccu

SEQ ID NO: 3242809 - RNA, 19 nt, Human
gccacuccagaccccuggc

SEQ ID NO: 3242810 - RNA, 18 nt, Human
gccacugcaccgggccac

SEQ ID NO: 3242811 - RNA, 17 nt, Human
gccacugcaccgggcca

SEQ ID NO: 3242812 - RNA, 18 nt, Human
gccagagggagugacaga

SEQ ID NO: 3242813 - RNA, 17 nt, Human
gccagagggagugacag

SEQ ID NO: 3242814 - RNA, 12 nt, Human
gccagagacaca

SEQ ID NO: 3242815 - RNA, 15 nt, Human
gccagagacacaagc

SEQ ID NO: 3242816 - RNA, 22 nt, Human
gccacguucuuacuaguuuccc

SEQ ID NO: 3242817 - RNA, 14 nt, Human
gccacguuuucacc

SEQ ID NO: 3242818 - RNA, 16 nt, Human
gccacggccaggccag

SEQ ID NO: 3242819 - RNA, 21 nt, Human
gccacuauuguuagucucuug

SEQ ID NO: 3242820 - RNA, 20 nt, Human
gccacuauuguuagucucuu

SEQ ID NO: 3242821 - RNA, 15 nt, Human
gccacggccaggcca

SEQ ID NO: 3242822 - RNA, 14 nt, Human
gccacggccaggcc

SEQ ID NO: 3242823 - RNA, 12 nt, Human
gccaaaggaagc

SEQ ID NO: 3242824 - RNA, 15 nt, Human
gccaaaguacagaau

SEQ ID NO: 3242825 - RNA, 17 nt, Human
gccaaaguacagaauuu

SEQ ID NO: 3242826 - RNA, 19 nt, Human
gccaaauaaaguuaaaagu

SEQ ID NO: 3242827 - RNA, 14 nt, Human
gccagcugcuuggg

SEQ ID NO: 3242828 - RNA, 15 nt, Human
gccagcugcugagcc

SEQ ID NO: 3242829 - RNA, 20 nt, Human
gccagcugcugagccgcaga

SEQ ID NO: 3242830 - RNA, 19 nt, Human
gccagcugcugagccgcag

SEQ ID NO: 3242831 - RNA, 18 nt, Human
gccagcugcugagccgca

SEQ ID NO: 3242832 - RNA, 16 nt, Human
gccagcugcugagccg

SEQ ID NO: 3242833 - RNA, 15 nt, Human
gccagcugcuugggc

SEQ ID NO: 3242834 - RNA, 22 nt, Human
gccagcugcugagccgcagaga

SEQ ID NO: 3242835 - RNA, 14 nt, Human
gccagccuugacca

SEQ ID NO: 3242836 - RNA, 20 nt, Human
gccagccuugaccauucucc

SEQ ID NO: 3242837 - RNA, 21 nt, Human
gccagccuugaccauucucca

SEQ ID NO: 3242838 - RNA, 22 nt, Human
gccagccuugaccauucuccac

SEQ ID NO: 3242839 - RNA, 20 nt, Human
gccagccgagauagccaagg

SEQ ID NO: 3242840 - RNA, 12 nt, Human
gccagccuugac

SEQ ID NO: 3242841 - RNA, 16 nt, Human
gccagauucuuuccug

SEQ ID NO: 3242842 - RNA, 20 nt, Human
gccagagggagugacagagg

SEQ ID NO: 3242843 - RNA, 19 nt, Human
gccagagggagugacagag

SEQ ID NO: 3242844 - RNA, 17 nt, Human
gccagauucuuuccuga

SEQ ID NO: 3242845 - RNA, 15 nt, Human
gccagauguccuaau

SEQ ID NO: 3242846 - RNA, 14 nt, Human
gcccacaccuccug

SEQ ID NO: 3242847 - RNA, 15 nt, Human
gcccacaccuccugg

SEQ ID NO: 3242848 - RNA, 18 nt, Human
gcccacaccuccuggggc

SEQ ID NO: 3242849 - RNA, 15 nt, Human
gcccaaaugcuggcu

SEQ ID NO: 3242850 - RNA, 15 nt, Human
gcccaaagaugcagc

SEQ ID NO: 3242851 - RNA, 16 nt, Human
gcccaaagaugcagcc

SEQ ID NO: 3242852 - RNA, 18 nt, Human
gcccacaggaucagucug

SEQ ID NO: 3242853 - RNA, 13 nt, Human
gcccacaggauca

SEQ ID NO: 3242854 - RNA, 19 nt, Human
gcccacaggaucagucuga

SEQ ID NO: 3242855 - RNA, 15 nt, Human
gcccaccccucaaca

SEQ ID NO: 3242856 - RNA, 20 nt, Human
gcccacccugcuuggcccag

SEQ ID NO: 3242857 - RNA, 20 nt, Human
gcccacccgguucaguguuu

SEQ ID NO: 3242858 - RNA, 14 nt, Human
gccaugggacaggg

SEQ ID NO: 3242859 - RNA, 19 nt, Human
gccaugggacagggaggac

SEQ ID NO: 3242860 - RNA, 13 nt, Human
gccauggaggcag

SEQ ID NO: 3242861 - RNA, 22 nt, Human
gccauuuaaagcuuauuaaaac

SEQ ID NO: 3242862 - RNA, 17 nt, Human
gccauuucuuccacaag

SEQ ID NO: 3242863 - RNA, 11 nt, Human
gccauuucaug

SEQ ID NO: 3242864 - RNA, 14 nt, Human
gccauuucaugucc

SEQ ID NO: 3242865 - RNA, 20 nt, Human
gccauuucuuccacaagagc

SEQ ID NO: 3242866 - RNA, 22 nt, Human
gccauuucuuccacaagagccc

SEQ ID NO: 3242867 - RNA, 17 nt, Human
gccaucccagccccaau

SEQ ID NO: 3242868 - RNA, 14 nt, Human
gccauccagguuca

SEQ ID NO: 3242869 - RNA, 13 nt, Human
gccaucccagccc

SEQ ID NO: 3242870 - RNA, 14 nt, Human
gccaucccagcccc

SEQ ID NO: 3242871 - RNA, 15 nt, Human
gccaucccagcccca

SEQ ID NO: 3242872 - RNA, 16 nt, Human
gccaucccagccccaa

SEQ ID NO: 3242873 - RNA, 20 nt, Human
gccauccagguucagcuugu

SEQ ID NO: 3242874 - RNA, 19 nt, Human
gccauccagguucagcuug

SEQ ID NO: 3242875 - RNA, 15 nt, Human
gccaggugccuccug

SEQ ID NO: 3242876 - RNA, 16 nt, Human
gccaggugccuccuga

SEQ ID NO: 3242877 - RNA, 23 nt, Human
gccaggggaaaaucagccugcuc

SEQ ID NO: 3242878 - RNA, 21 nt, Human
gccaggggaaaaucagccugc

SEQ ID NO: 3242879 - RNA, 22 nt, Human
gccaggggaaaaucagccugcu

SEQ ID NO: 3242880 - RNA, 17 nt, Human
gccaggggaaaaucagc

SEQ ID NO: 3242881 - RNA, 19 nt, Human
gccaggaagccagcaggcu

SEQ ID NO: 3242882 - RNA, 17 nt, Human
gccaggaagccagcagg

SEQ ID NO: 3242883 - RNA, 18 nt, Human
gccaggaagccagcaggc

SEQ ID NO: 3242884 - RNA, 15 nt, Human
gccaggaagccagca

SEQ ID NO: 3242885 - RNA, 19 nt, Human
gcuguucagauuggacaua

SEQ ID NO: 3242886 - RNA, 21 nt, Human
gcuuccagugaggcucugccc

SEQ ID NO: 3242887 - RNA, 19 nt, Human
gcuuccagugaggcucugc

SEQ ID NO: 3242888 - RNA, 20 nt, Human
gcuuccagugaggcucugcc

SEQ ID NO: 3242889 - RNA, 16 nt, Human
gcuguucacagccaga

SEQ ID NO: 3242890 - RNA, 15 nt, Human
gcuguucacagccag

SEQ ID NO: 3242891 - RNA, 23 nt, Human
gcuguucacagccagacuggcac

SEQ ID NO: 3242892 - RNA, 18 nt, Human
gcuuccagugaggcucug

SEQ ID NO: 3242893 - RNA, 19 nt, Human
gcuucuggugaccuuccaa

SEQ ID NO: 3242894 - RNA, 16 nt, Human
gcuucugugcaccugg

SEQ ID NO: 3242895 - RNA, 17 nt, Human
gcuucugugcaccuggg

SEQ ID NO: 3242896 - RNA, 18 nt, Human
gcuucugugcaccugggc

SEQ ID NO: 3242897 - RNA, 22 nt, Human
gcuugaggguugggcugguguc

SEQ ID NO: 3242898 - RNA, 16 nt, Human
gcuucuguugcugccu

SEQ ID NO: 3242899 - RNA, 15 nt, Human
gcuucugugcccaga

SEQ ID NO: 3242900 - RNA, 19 nt, Human
gcuucugugcccagaauac

SEQ ID NO: 3242901 - RNA, 21 nt, Human
gcuucugugcccagaauacug

SEQ ID NO: 3242902 - RNA, 14 nt, Human
gcuugccaaaguac

SEQ ID NO: 3242903 - RNA, 21 nt, Human
gcuugccaaaguacagaauuu

SEQ ID NO: 3242904 - RNA, 22 nt, Human
gcuugccaaaguacagaauuug

SEQ ID NO: 3242905 - RNA, 18 nt, Human
gcuugcacucucuuggcu

SEQ ID NO: 3242906 - RNA, 22 nt, Human
gcuugcagagaugaggccgcca

SEQ ID NO: 3242907 - RNA, 14 nt, Human
gcuugcacucucuu

SEQ ID NO: 3242908 - RNA, 13 nt, Human
gcuugauuaaauc

SEQ ID NO: 3242909 - RNA, 17 nt, Human
gcuugccauuuuucaaa

SEQ ID NO: 3242910 - RNA, 18 nt, Human
gcuugccauuuuucaaaa

SEQ ID NO: 3242911 - RNA, 22 nt, Human
gcuugcccaguacauuuaaauu

SEQ ID NO: 3242912 - RNA, 23 nt, Human
gcuugcccaguacauuuaaauuu

SEQ ID NO: 3242913 - RNA, 17 nt, Human
gcuugcccuggugccuc

SEQ ID NO: 3242914 - RNA, 19 nt, Human
gcuugcccuggugccucac

SEQ ID NO: 3242915 - RNA, 13 nt, Human
gcuuggaggaagg

SEQ ID NO: 3242916 - RNA, 14 nt, Human
gcuuggaggaagga

SEQ ID NO: 3242917 - RNA, 15 nt, Human
gcuuggaggaaggaa

SEQ ID NO: 3242918 - RNA, 19 nt, Human
gcuuuacauacuuuaucaa

SEQ ID NO: 3242919 - RNA, 20 nt, Human
gcuuuaauuccaugaauguu

SEQ ID NO: 3242920 - RNA, 19 nt, Human
gcuuuaauuccaugaaugu

SEQ ID NO: 3242921 - RNA, 14 nt, Human
gcuuugggcugccc

SEQ ID NO: 3242922 - RNA, 12 nt, Human
gcuuggcccugg

SEQ ID NO: 3242923 - RNA, 14 nt, Human
gcuuggcccagggg

SEQ ID NO: 3242924 - RNA, 13 nt, Human
gcuuggcccaggg

SEQ ID NO: 3242925 - RNA, 17 nt, Human
gcuuggcccuggcagcc

SEQ ID NO: 3242926 - RNA, 15 nt, Human
gcuuggcccuggcag

SEQ ID NO: 3242927 - RNA, 14 nt, Human
gcuuggcccuggca

SEQ ID NO: 3242928 - RNA, 13 nt, Human
gcuuuaaucagaa

SEQ ID NO: 3242929 - RNA, 14 nt, Human
gcuuuuacuuaaac

SEQ ID NO: 3242930 - RNA, 22 nt, Human
gcuuuuacccuuuuucuugaau

SEQ ID NO: 3242931 - RNA, 17 nt, Human
gcuuuuacccuuuuucu

SEQ ID NO: 3242932 - RNA, 23 nt, Human
ggaaaaaauugcuuuugagagaa

SEQ ID NO: 3242933 - RNA, 12 nt, Human
gcuuuuagaaaa

SEQ ID NO: 3242934 - RNA, 13 nt, Human
gcuuuuagaaaag

SEQ ID NO: 3242935 - RNA, 17 nt, Human
gcuuuuaaaaaaaaaua

SEQ ID NO: 3242936 - RNA, 16 nt, Human
gcuuugggcugcccug

SEQ ID NO: 3242937 - RNA, 15 nt, Human
gcuuugggcugcccu

SEQ ID NO: 3242938 - RNA, 13 nt, Human
gcuuuuacccuuu

SEQ ID NO: 3242939 - RNA, 18 nt, Human
gcuuuuaaggaaaggcaa

SEQ ID NO: 3242940 - RNA, 16 nt, Human
gcuuuuaaaauuuuaa

SEQ ID NO: 3242941 - RNA, 14 nt, Human
gcuuuuaaaauuuu

SEQ ID NO: 3242942 - RNA, 12 nt, Human
gcuuuuaaaauu

SEQ ID NO: 3242943 - RNA, 20 nt, Human
gcuuuuaaaacuacuuagca

SEQ ID NO: 3242944 - RNA, 14 nt, Human
gcuuuuaaaacuac

SEQ ID NO: 3242945 - RNA, 15 nt, Human
ggaaaaauagccugc

SEQ ID NO: 3242946 - RNA, 22 nt, Human
ggaaaaccaagccguggcuucc

SEQ ID NO: 3242947 - RNA, 16 nt, Human
ggaaaaauaugugaag

SEQ ID NO: 3242948 - RNA, 13 nt, Human
ggaaaaauaugug

SEQ ID NO: 3242949 - RNA, 12 nt, Human
ggaaaaauaugu

SEQ ID NO: 3242950 - RNA, 22 nt, Human
ggaaaaaguauuaauucucuuu

SEQ ID NO: 3242951 - RNA, 21 nt, Human
ggaaaaccaagccguggcuuc

SEQ ID NO: 3242952 - RNA, 15 nt, Human
ggaaaacgauuuaau

SEQ ID NO: 3242953 - RNA, 14 nt, Human
ggaaaagaaaucua

SEQ ID NO: 3242954 - RNA, 13 nt, Human
ggaaaagaaaucu

SEQ ID NO: 3242955 - RNA, 14 nt, Human
ggaaaaacugauuu

SEQ ID NO: 3242956 - RNA, 13 nt, Human
ggaaaaauagccu

SEQ ID NO: 3242957 - RNA, 16 nt, Human
ggaagauaaguuggaa

SEQ ID NO: 3242958 - RNA, 18 nt, Human
ggaagauaaguuggaaac

SEQ ID NO: 3242959 - RNA, 13 nt, Human
ggaagagccuugc

SEQ ID NO: 3242960 - RNA, 13 nt, Human
ggaagcacaugcc

SEQ ID NO: 3242961 - RNA, 14 nt, Human
ggaagcacaugccu

SEQ ID NO: 3242962 - RNA, 15 nt, Human
ggaagcacaugccuc

SEQ ID NO: 3242963 - RNA, 17 nt, Human
ggaagcacaugccucuc

SEQ ID NO: 3242964 - RNA, 17 nt, Human
ggaagcacagcuucauu

SEQ ID NO: 3242965 - RNA, 21 nt, Human
ggaagcacaugccucucucag

SEQ ID NO: 3242966 - RNA, 22 nt, Human
ggaagcacaugccucucucagg

SEQ ID NO: 3242967 - RNA, 23 nt, Human
ggaagcacaugccucucucaggc

SEQ ID NO: 3242968 - RNA, 13 nt, Human
ggaagcagaagga

SEQ ID NO: 3242969 - RNA, 13 nt, Human
ggaagcagcuuuc

SEQ ID NO: 3242970 - RNA, 22 nt, Human
ggaagcagguuaaauguuuugu

SEQ ID NO: 3242971 - RNA, 14 nt, Human
ggaagcagugccca

SEQ ID NO: 3242972 - RNA, 16 nt, Human
ggaagcagugcccagg

SEQ ID NO: 3242973 - RNA, 15 nt, Human
ggaagcagugcccag

SEQ ID NO: 3242974 - RNA, 18 nt, Human
ggaagcagugcccaggug

SEQ ID NO: 3242975 - RNA, 15 nt, Human
ggaagccagcaggcu

SEQ ID NO: 3242976 - RNA, 16 nt, Human
ggaagccagcaggcuc

SEQ ID NO: 3242977 - RNA, 17 nt, Human
ggaagccagcaggcucu

SEQ ID NO: 3242978 - RNA, 18 nt, Human
ggaagccagcaggcucuc

SEQ ID NO: 3242979 - RNA, 13 nt, Human
ggaagccagcagg

SEQ ID NO: 3242980 - RNA, 14 nt, Human
ggaagccagcaggc

SEQ ID NO: 3242981 - RNA, 20 nt, Human
ggaacagacuggaagcacag

SEQ ID NO: 3242982 - RNA, 19 nt, Human
ggaacagacuggaagcaca

SEQ ID NO: 3242983 - RNA, 23 nt, Human
ggaacguagucggcacagccugg

SEQ ID NO: 3242984 - RNA, 23 nt, Human
ggaacuagacucccaagcuggac

SEQ ID NO: 3242985 - RNA, 20 nt, Human
ggaaaguggcaccugucugc

SEQ ID NO: 3242986 - RNA, 17 nt, Human
ggaacagacuggaagca

SEQ ID NO: 3242987 - RNA, 17 nt, Human
ggaaaucaaagugcuau

SEQ ID NO: 3242988 - RNA, 20 nt, Human
ggaaaucaaagugcuauuac

SEQ ID NO: 3242989 - RNA, 15 nt, Human
ggaaaagacuaagau

SEQ ID NO: 3242990 - RNA, 14 nt, Human
ggaaaauaaauuau

SEQ ID NO: 3242991 - RNA, 19 nt, Human
ggaaaauaggcuuuuuaau

SEQ ID NO: 3242992 - RNA, 21 nt, Human
ggaaaauaaaaaaagaaaaaa

SEQ ID NO: 3242993 - RNA, 20 nt, Human
ggaaaauaaaaaaagaaaaa

SEQ ID NO: 3242994 - RNA, 19 nt, Human
ggaaaauaaaaaaagaaaa

SEQ ID NO: 3242995 - RNA, 17 nt, Human
ggaaaauaaaaaaagaa

SEQ ID NO: 3242996 - RNA, 15 nt, Human
ggaaaaucagccugc

SEQ ID NO: 3242997 - RNA, 22 nt, Human
ggaaaguacauuuuuugaaaug

SEQ ID NO: 3242998 - RNA, 23 nt, Human
ggaaaguauucucuuuucaagaa

SEQ ID NO: 3242999 - RNA, 11 nt, Human
ggaaagucaga

SEQ ID NO: 3243000 - RNA, 18 nt, Human
ggaaagucagaaucagaa

SEQ ID NO: 3243001 - RNA, 21 nt, Human
ggaaaguacauuuuuugaaau

SEQ ID NO: 3243002 - RNA, 23 nt, Human
ggaaaguaagggaagcagaagga

SEQ ID NO: 3243003 - RNA, 20 nt, Human
gcugggacaugggaaagggg

SEQ ID NO: 3243004 - RNA, 16 nt, Human
gcugggacgcucugcu

SEQ ID NO: 3243005 - RNA, 12 nt, Human
gcuggcccugcc

SEQ ID NO: 3243006 - RNA, 17 nt, Human
gcuggccgggagccuga

SEQ ID NO: 3243007 - RNA, 20 nt, Human
gcugggacuacaggcaccca

SEQ ID NO: 3243008 - RNA, 19 nt, Human
gcugggacuacaggcaccc

SEQ ID NO: 3243009 - RNA, 18 nt, Human
gcugggacuacaggcacc

SEQ ID NO: 3243010 - RNA, 13 nt, Human
gcugggacuacag

SEQ ID NO: 3243011 - RNA, 19 nt, Human
gcugggacuacagguguga

SEQ ID NO: 3243012 - RNA, 17 nt, Human
gcugggacgcucugcug

SEQ ID NO: 3243013 - RNA, 21 nt, Human
gcuggaccuugaacuggguac

SEQ ID NO: 3243014 - RNA, 17 nt, Human
gcugcuugggcuucauc

SEQ ID NO: 3243015 - RNA, 18 nt, Human
gcuggaccuugaacuggg

SEQ ID NO: 3243016 - RNA, 16 nt, Human
gcuggaccuugaacug

SEQ ID NO: 3243017 - RNA, 16 nt, Human
gcugcgguccacccag

SEQ ID NO: 3243018 - RNA, 12 nt, Human
gcugcccuguga

SEQ ID NO: 3243019 - RNA, 14 nt, Human
gcugcccugugagu

SEQ ID NO: 3243020 - RNA, 23 nt, Human
gcugcccuggugcugccacacuu

SEQ ID NO: 3243021 - RNA, 17 nt, Human
gcugcccuuucugggca

SEQ ID NO: 3243022 - RNA, 19 nt, Human
gcugcccuggugcugccac

SEQ ID NO: 3243023 - RNA, 18 nt, Human
gcugcccuggugcugcca

SEQ ID NO: 3243024 - RNA, 11 nt, Human
gcugcccugug

SEQ ID NO: 3243025 - RNA, 22 nt, Human
gcugcccuggugcugccacacu

SEQ ID NO: 3243026 - RNA, 20 nt, Human
gcugcccuggugcugccaca

SEQ ID NO: 3243027 - RNA, 20 nt, Human
gcuagaggccauggaggcag

SEQ ID NO: 3243028 - RNA, 17 nt, Human
gcuagaggauuaguaag

SEQ ID NO: 3243029 - RNA, 24 nt, Human
gcuagaggccauggaggcaguagg

SEQ ID NO: 3243030 - RNA, 12 nt, Human
gcuagcaaauag

SEQ ID NO: 3243031 - RNA, 15 nt, Human
gcuagcacagcuccc

SEQ ID NO: 3243032 - RNA, 14 nt, Human
gcuagcacagcucc

SEQ ID NO: 3243033 - RNA, 16 nt, Human
gcuagcaaauaguaau

SEQ ID NO: 3243034 - RNA, 18 nt, Human
gcugcgguccacccagga

SEQ ID NO: 3243035 - RNA, 17 nt, Human
gcugcgguccacccagg

SEQ ID NO: 3243036 - RNA, 13 nt, Human
gcugcuucaagga

SEQ ID NO: 3243037 - RNA, 16 nt, Human
gcugcuugggcuucau

SEQ ID NO: 3243038 - RNA, 21 nt, Human
gcugcuucaaggauccugagc

SEQ ID NO: 3243039 - RNA, 22 nt, Human
gcugcuucaaggauccugagcc

SEQ ID NO: 3243040 - RNA, 23 nt, Human
gcugcuucaaggauccugagcca

SEQ ID NO: 3243041 - RNA, 20 nt, Human
gcugcuguguguggcuucug

SEQ ID NO: 3243042 - RNA, 15 nt, Human
gcugcuucauguuug

SEQ ID NO: 3243043 - RNA, 18 nt, Human
gcugggcuucaguggcag

SEQ ID NO: 3243044 - RNA, 15 nt, Human
gcuggggcagccucu

SEQ ID NO: 3243045 - RNA, 23 nt, Human
gcugggggaagaagcucucuccu

SEQ ID NO: 3243046 - RNA, 12 nt, Human
gcuggggccagu

SEQ ID NO: 3243047 - RNA, 19 nt, Human
gcuggucccacucagucca

SEQ ID NO: 3243048 - RNA, 15 nt, Human
gcuggucccacucag

SEQ ID NO: 3243049 - RNA, 20 nt, Human
gcugggggccucagugccac

SEQ ID NO: 3243050 - RNA, 19 nt, Human
gcugggggccucagugcca

SEQ ID NO: 3243051 - RNA, 19 nt, Human
gcugggggaugggccugag

SEQ ID NO: 3243052 - RNA, 18 nt, Human
gcugggggaugggccuga

SEQ ID NO: 3243053 - RNA, 21 nt, Human
gcugggaugauuggagggggg

SEQ ID NO: 3243054 - RNA, 16 nt, Human
gcugggagcucugcag

SEQ ID NO: 3243055 - RNA, 15 nt, Human
gcugggagcucugca

SEQ ID NO: 3243056 - RNA, 17 nt, Human
gcugggcuucaguggca

SEQ ID NO: 3243057 - RNA, 17 nt, Human
gcugggauuacaggcgu

SEQ ID NO: 3243058 - RNA, 18 nt, Human
gcugggauuacaggcgug

SEQ ID NO: 3243059 - RNA, 19 nt, Human
gcugggauuacaggcuccu

SEQ ID NO: 3243060 - RNA, 20 nt, Human
gcugggauuacaggcuccug

SEQ ID NO: 3243061 - RNA, 12 nt, Human
gcugggagagcc

SEQ ID NO: 3243062 - RNA, 13 nt, Human
gcugggagagccu

SEQ ID NO: 3243063 - RNA, 17 nt, Human
gcugggagagccuucca

SEQ ID NO: 3243064 - RNA, 18 nt, Human
gcugggagagccuuccag

SEQ ID NO: 3243065 - RNA, 19 nt, Human
gcugggagagccuuccagg

SEQ ID NO: 3243066 - RNA, 22 nt, Human
gcugggagagccuuccaggggu

SEQ ID NO: 3243067 - RNA, 14 nt, Human
gcugggacugggaa

SEQ ID NO: 3243068 - RNA, 22 nt, Human
gcugguucaggguuggccccug

SEQ ID NO: 3243069 - RNA, 16 nt, Human
gcugucaauuacagga

SEQ ID NO: 3243070 - RNA, 14 nt, Human
gcugucaaggcuca

SEQ ID NO: 3243071 - RNA, 21 nt, Human
gcugguuagagguucccuuug

SEQ ID NO: 3243072 - RNA, 15 nt, Human
gcugguucaggguug

SEQ ID NO: 3243073 - RNA, 14 nt, Human
gcuggucccacuca

SEQ ID NO: 3243074 - RNA, 20 nt, Human
gcuggucccacucaguccau

SEQ ID NO: 3243075 - RNA, 18 nt, Human
gcuggugucaccugaaga

SEQ ID NO: 3243076 - RNA, 16 nt, Human
gcuggugucaccugaa

SEQ ID NO: 3243077 - RNA, 17 nt, Human
gcugucaauuacaggaa

SEQ ID NO: 3243078 - RNA, 19 nt, Human
gcugucaauuacaggaagu

SEQ ID NO: 3243079 - RNA, 22 nt, Human
gcugucaauuacaggaaguacu

SEQ ID NO: 3243080 - RNA, 23 nt, Human
gcugucaauuacaggaaguacug

SEQ ID NO: 3243081 - RNA, 21 nt, Human
gcugucccuuacgugaguccu

SEQ ID NO: 3243082 - RNA, 19 nt, Human
gcugucccuuacgugaguc

SEQ ID NO: 3243083 - RNA, 17 nt, Human
gcugucuccauguuuga

SEQ ID NO: 3243084 - RNA, 23 nt, Human
gcugucuguuguauucauugugg

SEQ ID NO: 3243085 - RNA, 19 nt, Human
gcugucuggcacagccugc

SEQ ID NO: 3243086 - RNA, 15 nt, Human
gcugucuggcacagc

SEQ ID NO: 3243087 - RNA, 19 nt, Human
gcugucuuucuugcucccu

SEQ ID NO: 3243088 - RNA, 18 nt, Human
gcugucuuucuugcuccc

SEQ ID NO: 3243089 - RNA, 17 nt, Human
gcugucuuucuugcucc

SEQ ID NO: 3243090 - RNA, 16 nt, Human
gcugucuuucuugcuc

SEQ ID NO: 3243091 - RNA, 19 nt, Human
ggauccaggccccucccuc

SEQ ID NO: 3243092 - RNA, 19 nt, Human
ggcaacccccagccugcua

SEQ ID NO: 3243093 - RNA, 18 nt, Human
ggauccaggccccucccu

SEQ ID NO: 3243094 - RNA, 17 nt, Human
ggauccaggccccuccc

SEQ ID NO: 3243095 - RNA, 13 nt, Human
ggauccaggcccc

SEQ ID NO: 3243096 - RNA, 12 nt, Human
ggauccaggccc

SEQ ID NO: 3243097 - RNA, 21 nt, Human
ggaucagucugauucccaagc

SEQ ID NO: 3243098 - RNA, 16 nt, Human
ggaucaggcucccagg

SEQ ID NO: 3243099 - RNA, 18 nt, Human
ggaucaggcucccaggag

SEQ ID NO: 3243100 - RNA, 13 nt, Human
ggaucagcugagc

SEQ ID NO: 3243101 - RNA, 12 nt, Human
ggauccccuucc

SEQ ID NO: 3243102 - RNA, 18 nt, Human
ggcaacugcauuggcuuu

SEQ ID NO: 3243103 - RNA, 19 nt, Human
ggcaacugcauuggcuuug

SEQ ID NO: 3243104 - RNA, 15 nt, Human
ggcaaggcugucaau

SEQ ID NO: 3243105 - RNA, 23 nt, Human
ggcaacuugggaacuagacuccc

SEQ ID NO: 3243106 - RNA, 18 nt, Human
ggcaacuugggaacuaga

SEQ ID NO: 3243107 - RNA, 20 nt, Human
ggcagagcagagaccauccc

SEQ ID NO: 3243108 - RNA, 15 nt, Human
ggcagagcagagacc

SEQ ID NO: 3243109 - RNA, 16 nt, Human
ggcagagcagagacca

SEQ ID NO: 3243110 - RNA, 12 nt, Human
ggcagagcagag

SEQ ID NO: 3243111 - RNA, 16 nt, Human
ggcacccggccccugc

SEQ ID NO: 3243112 - RNA, 15 nt, Human
ggcacccggccccug

SEQ ID NO: 3243113 - RNA, 16 nt, Human
ggcaaggcugucaauu

SEQ ID NO: 3243114 - RNA, 20 nt, Human
ggcaaguuuuccauauuuuu

SEQ ID NO: 3243115 - RNA, 16 nt, Human
ggcaaggggaaucugg

SEQ ID NO: 3243116 - RNA, 22 nt, Human
ggcaauaaaagcccaggagccc

SEQ ID NO: 3243117 - RNA, 20 nt, Human
ggcaauaaaagcccaggagc

SEQ ID NO: 3243118 - RNA, 17 nt, Human
ggcaauaaaagcccagg

SEQ ID NO: 3243119 - RNA, 16 nt, Human
ggcaauaaaagcccag

SEQ ID NO: 3243120 - RNA, 16 nt, Human
ggcaaguuuucccuga

SEQ ID NO: 3243121 - RNA, 19 nt, Human
ggcagguccccagacucca

SEQ ID NO: 3243122 - RNA, 14 nt, Human
ggcagguccccaga

SEQ ID NO: 3243123 - RNA, 23 nt, Human
ggcaggucuugaacuccuggccu

SEQ ID NO: 3243124 - RNA, 13 nt, Human
ggcagguccaggg

SEQ ID NO: 3243125 - RNA, 14 nt, Human
ggcaggaaggcuga

SEQ ID NO: 3243126 - RNA, 19 nt, Human
ggcagcugcgguccaccca

SEQ ID NO: 3243127 - RNA, 21 nt, Human
ggcagcuugaggguugggcug

SEQ ID NO: 3243128 - RNA, 16 nt, Human
ggcagcucaccucucc

SEQ ID NO: 3243129 - RNA, 22 nt, Human
ggcagcucaccucucccuugga

SEQ ID NO: 3243130 - RNA, 18 nt, Human
ggcagcucaccucucccu

SEQ ID NO: 3243131 - RNA, 21 nt, Human
ggcagcucaccucucccuugg

SEQ ID NO: 3243132 - RNA, 19 nt, Human
ggcagcaccgccucuuccc

SEQ ID NO: 3243133 - RNA, 13 nt, Human
ggcagcacccagg

SEQ ID NO: 3243134 - RNA, 12 nt, Human
ggcagcaccgcc

SEQ ID NO: 3243135 - RNA, 19 nt, Human
ggcagaucucccacaugcc

SEQ ID NO: 3243136 - RNA, 13 nt, Human
ggcagaucuccca

SEQ ID NO: 3243137 - RNA, 18 nt, Human
ggcagaugcagcucuucc

SEQ ID NO: 3243138 - RNA, 15 nt, Human
ggcagaugcagcucu

SEQ ID NO: 3243139 - RNA, 21 nt, Human
ggcagaugcagcucuuccugg

SEQ ID NO: 3243140 - RNA, 20 nt, Human
ggcagaugcagcucuuccug

SEQ ID NO: 3243141 - RNA, 23 nt, Human
ggcagaguugaagacagagcuac

SEQ ID NO: 3243142 - RNA, 23 nt, Human
ggcagauacaggaaaagcugcug

SEQ ID NO: 3243143 - RNA, 21 nt, Human
ggcagaguugaagacagagcu

SEQ ID NO: 3243144 - RNA, 17 nt, Human
ggcagaggaaagcaaag

SEQ ID NO: 3243145 - RNA, 22 nt, Human
ggcagaggagaacuugcugccu

SEQ ID NO: 3243146 - RNA, 21 nt, Human
ggcagaggagaacuugcugcc

SEQ ID NO: 3243147 - RNA, 11 nt, Human
ggccaggcugg

SEQ ID NO: 3243148 - RNA, 16 nt, Human
ggccaggccagaggga

SEQ ID NO: 3243149 - RNA, 14 nt, Human
ggccaggccagagg

SEQ ID NO: 3243150 - RNA, 16 nt, Human
ggccacugugaagaga

SEQ ID NO: 3243151 - RNA, 14 nt, Human
ggccaggagccucc

SEQ ID NO: 3243152 - RNA, 16 nt, Human
ggccaggagccuccug

SEQ ID NO: 3243153 - RNA, 11 nt, Human
ggccacuguga

SEQ ID NO: 3243154 - RNA, 12 nt, Human
ggccacugaaga

SEQ ID NO: 3243155 - RNA, 14 nt, Human
ggccacugaagagg

SEQ ID NO: 3243156 - RNA, 15 nt, Human
ggccacugaagagga

SEQ ID NO: 3243157 - RNA, 17 nt, Human
ggccacugaagaggagg

SEQ ID NO: 3243158 - RNA, 19 nt, Human
ggccacugaagaggaggag

SEQ ID NO: 3243159 - RNA, 15 nt, Human
ggcagguuggugggg

SEQ ID NO: 3243160 - RNA, 23 nt, Human
ggcauguucucugaggacacuaa

SEQ ID NO: 3243161 - RNA, 15 nt, Human
ggcauuccccaggag

SEQ ID NO: 3243162 - RNA, 16 nt, Human
ggccacaagacccuug

SEQ ID NO: 3243163 - RNA, 17 nt, Human
ggccacaagacccuugu

SEQ ID NO: 3243164 - RNA, 16 nt, Human
ggccaccugcggugcu

SEQ ID NO: 3243165 - RNA, 22 nt, Human
ggccaccugcggugcuaucucc

SEQ ID NO: 3243166 - RNA, 16 nt, Human
ggccaaucagaagcua

SEQ ID NO: 3243167 - RNA, 17 nt, Human
ggccacacaagugcagu

SEQ ID NO: 3243168 - RNA, 21 nt, Human
ggccccugagaucucugcagg

SEQ ID NO: 3243169 - RNA, 17 nt, Human
ggccccugagaucucug

SEQ ID NO: 3243170 - RNA, 12 nt, Human
ggccccugccac

SEQ ID NO: 3243171 - RNA, 16 nt, Human
ggccccugccacccug

SEQ ID NO: 3243172 - RNA, 13 nt, Human
ggccccugccacc

SEQ ID NO: 3243173 - RNA, 19 nt, Human
ggccccugccagacccccu

SEQ ID NO: 3243174 - RNA, 17 nt, Human
ggccccugccagacccc

SEQ ID NO: 3243175 - RNA, 13 nt, Human
ggccccugcccgg

SEQ ID NO: 3243176 - RNA, 18 nt, Human
ggccccugccacccuggg

SEQ ID NO: 3243177 - RNA, 17 nt, Human
ggccccugccacccugg

SEQ ID NO: 3243178 - RNA, 16 nt, Human
ggccccucaggguccc

SEQ ID NO: 3243179 - RNA, 19 nt, Human
ggccccucagggucccugg

SEQ ID NO: 3243180 - RNA, 20 nt, Human
ggccccucagggucccuggu

SEQ ID NO: 3243181 - RNA, 21 nt, Human
ggccccucagggucccuggug

SEQ ID NO: 3243182 - RNA, 23 nt, Human
ggccccucccucuccagcaggcc

SEQ ID NO: 3243183 - RNA, 15 nt, Human
ggccccucccucucc

SEQ ID NO: 3243184 - RNA, 22 nt, Human
ggccaugggacagggaggacgc

SEQ ID NO: 3243185 - RNA, 13 nt, Human
ggccaugggccuc

SEQ ID NO: 3243186 - RNA, 16 nt, Human
ggccaggcugcucuug

SEQ ID NO: 3243187 - RNA, 15 nt, Human
ggccauggaggcagu

SEQ ID NO: 3243188 - RNA, 13 nt, Human
ggcccccacaugg

SEQ ID NO: 3243189 - RNA, 17 nt, Human
ggcccccugccugcccu

SEQ ID NO: 3243190 - RNA, 13 nt, Human
ggcccccugccug

SEQ ID NO: 3243191 - RNA, 12 nt, Human
ggcccccugccu

SEQ ID NO: 3243192 - RNA, 15 nt, Human
ggccccgucucaggu

SEQ ID NO: 3243193 - RNA, 19 nt, Human
ggccccgucucaggucuga

SEQ ID NO: 3243194 - RNA, 18 nt, Human
ggccccgucucaggucug

SEQ ID NO: 3243195 - RNA, 18 nt, Human
ggaccagcuuggcucagg

SEQ ID NO: 3243196 - RNA, 17 nt, Human
ggaccagcuuggcucag

SEQ ID NO: 3243197 - RNA, 20 nt, Human
ggaagccagcaggcucucag

SEQ ID NO: 3243198 - RNA, 13 nt, Human
ggaaggaggaaga

SEQ ID NO: 3243199 - RNA, 21 nt, Human
ggacccaguggcagggcacag

SEQ ID NO: 3243200 - RNA, 14 nt, Human
ggacccaguggcag

SEQ ID NO: 3243201 - RNA, 11 nt, Human
ggacccagugg

SEQ ID NO: 3243202 - RNA, 19 nt, Human
ggacccaguggcagggcac

SEQ ID NO: 3243203 - RNA, 18 nt, Human
ggacccaguggcagggca

SEQ ID NO: 3243204 - RNA, 17 nt, Human
ggacccaguggcagggc

SEQ ID NO: 3243205 - RNA, 16 nt, Human
ggacccaguggcaggg

SEQ ID NO: 3243206 - RNA, 12 nt, Human
ggacuccucugu

SEQ ID NO: 3243207 - RNA, 14 nt, Human
ggacuccucugucc

SEQ ID NO: 3243208 - RNA, 15 nt, Human
ggacuccucugucca

SEQ ID NO: 3243209 - RNA, 22 nt, Human
ggaccuucacucuaagauguua

SEQ ID NO: 3243210 - RNA, 21 nt, Human
ggaccuucacucuaagauguu

SEQ ID NO: 3243211 - RNA, 13 nt, Human
ggacucuaaaguc

SEQ ID NO: 3243212 - RNA, 21 nt, Human
ggacucuucagcacaaaagga

SEQ ID NO: 3243213 - RNA, 11 nt, Human
ggacucugccu

SEQ ID NO: 3243214 - RNA, 10 nt, Human
ggacugccac

SEQ ID NO: 3243215 - RNA, 17 nt, Human
ggacugccaccuccccu

SEQ ID NO: 3243216 - RNA, 15 nt, Human
ggacugccaccuccc

SEQ ID NO: 3243217 - RNA, 14 nt, Human
ggacugccaccucc

SEQ ID NO: 3243218 - RNA, 13 nt, Human
ggacugccaccuc

SEQ ID NO: 3243219 - RNA, 19 nt, Human
ggagcccugccucuccgcc

SEQ ID NO: 3243220 - RNA, 12 nt, Human
ggagcccugccu

SEQ ID NO: 3243221 - RNA, 20 nt, Human
ggagcaaaaucgaugcagug

SEQ ID NO: 3243222 - RNA, 22 nt, Human
ggagauuuuuuugagucaaaga

SEQ ID NO: 3243223 - RNA, 15 nt, Human
ggagaggggcacagg

SEQ ID NO: 3243224 - RNA, 24 nt, Human
ggagaugcugugccccuggccuug

SEQ ID NO: 3243225 - RNA, 23 nt, Human
ggagaugcugugccccuggccuu

SEQ ID NO: 3243226 - RNA, 15 nt, Human
ggagaugcugugccc

SEQ ID NO: 3243227 - RNA, 14 nt, Human
ggagaugcugugcc

SEQ ID NO: 3243228 - RNA, 17 nt, Human
ggagagcuagcagcagg

SEQ ID NO: 3243229 - RNA, 21 nt, Human
ggagagcuagcagcagggagg

SEQ ID NO: 3243230 - RNA, 21 nt, Human
ggagaccccuuggggagcagg

SEQ ID NO: 3243231 - RNA, 21 nt, Human
ggacugccagucccccugccc

SEQ ID NO: 3243232 - RNA, 23 nt, Human
ggacugccaccuccccuugccag

SEQ ID NO: 3243233 - RNA, 21 nt, Human
ggacugccaccuccccuugcc

SEQ ID NO: 3243234 - RNA, 13 nt, Human
ggauagaugugug

SEQ ID NO: 3243235 - RNA, 14 nt, Human
ggauagaugugugg

SEQ ID NO: 3243236 - RNA, 15 nt, Human
ggauagaugugugga

SEQ ID NO: 3243237 - RNA, 16 nt, Human
ggaucacagccucuga

SEQ ID NO: 3243238 - RNA, 21 nt, Human
ggagugacagaggcagcccca

SEQ ID NO: 3243239 - RNA, 19 nt, Human
ggagugacagaggcagccc

SEQ ID NO: 3243240 - RNA, 18 nt, Human
ggagugacagaggcagcc

SEQ ID NO: 3243241 - RNA, 17 nt, Human
ggagugacagaggcagc

SEQ ID NO: 3243242 - RNA, 21 nt, Human
ggagugaguugauagcacaga

SEQ ID NO: 3243243 - RNA, 14 nt, Human
ggagugagcugguu

SEQ ID NO: 3243244 - RNA, 12 nt, Human
ggagugagcugg

SEQ ID NO: 3243245 - RNA, 16 nt, Human
ggagugacagaggcag

SEQ ID NO: 3243246 - RNA, 11 nt, Human
ggagugacaga

SEQ ID NO: 3243247 - RNA, 20 nt, Human
ggagucccaccuuggcugca

SEQ ID NO: 3243248 - RNA, 17 nt, Human
ggagggcuccagacaca

SEQ ID NO: 3243249 - RNA, 14 nt, Human
ggagggcuccagac

SEQ ID NO: 3243250 - RNA, 15 nt, Human
ggagggcuccagaca

SEQ ID NO: 3243251 - RNA, 14 nt, Human
ggaggggagacuuu

SEQ ID NO: 3243252 - RNA, 16 nt, Human
ggaggggagacuuuga

SEQ ID NO: 3243253 - RNA, 20 nt, Human
ggaguccaggacaggagaug

SEQ ID NO: 3243254 - RNA, 16 nt, Human
ggagucauuucugauu

SEQ ID NO: 3243255 - RNA, 21 nt, Human
ggagucauuuuguguugaaga

SEQ ID NO: 3243256 - RNA, 12 nt, Human
ggagggauuugg

SEQ ID NO: 3243257 - RNA, 12 nt, Human
ggagggcuccag

SEQ ID NO: 3243258 - RNA, 13 nt, Human
ggagggcuccaga

SEQ ID NO: 3243259 - RNA, 13 nt, Human
ggagggacagucu

SEQ ID NO: 3243260 - RNA, 23 nt, Human
ggaggaucacuugaguccagaag

SEQ ID NO: 3243261 - RNA, 17 nt, Human
ggaggaucucuugagcc

SEQ ID NO: 3243262 - RNA, 21 nt, Human
ggaggaucucuugagccuggg

SEQ ID NO: 3243263 - RNA, 20 nt, Human
ggaggagggucuagaggccu

SEQ ID NO: 3243264 - RNA, 12 nt, Human
ggaggaggaggg

SEQ ID NO: 3243265 - RNA, 19 nt, Human
ggaggacgcucucuggccu

SEQ ID NO: 3243266 - RNA, 20 nt, Human
ggagcccugccucuccgccc

SEQ ID NO: 3243267 - RNA, 20 nt, Human
ggaggacgcucucuggccuu

SEQ ID NO: 3243268 - RNA, 21 nt, Human
ggaggacgcucucuggccuuc

SEQ ID NO: 3243269 - RNA, 21 nt, Human
ggagccgggcaaacuggccgc

SEQ ID NO: 3243270 - RNA, 23 nt, Human
ggugguucacucuuggagccugc

SEQ ID NO: 3243271 - RNA, 22 nt, Human
ggugguucacucuuggagccug

SEQ ID NO: 3243272 - RNA, 21 nt, Human
ggugguuauggagaggguguc

SEQ ID NO: 3243273 - RNA, 18 nt, Human
gguguaaucaugaaggag

SEQ ID NO: 3243274 - RNA, 17 nt, Human
ggugucaagagggucug

SEQ ID NO: 3243275 - RNA, 19 nt, Human
ggugucaagagggucugag

SEQ ID NO: 3243276 - RNA, 19 nt, Human
ggugucaccugaagacuca

SEQ ID NO: 3243277 - RNA, 16 nt, Human
ggugucccagaccccg

SEQ ID NO: 3243278 - RNA, 21 nt, Human
gguguccccaccaucugcugu

SEQ ID NO: 3243279 - RNA, 18 nt, Human
gguguccccaccaucugc

SEQ ID NO: 3243280 - RNA, 13 nt, Human
gguguccccacca

SEQ ID NO: 3243281 - RNA, 16 nt, Human
gguggugaccucugcc

SEQ ID NO: 3243282 - RNA, 15 nt, Human
gguggugaccucugc

SEQ ID NO: 3243283 - RNA, 14 nt, Human
gguggugaccucug

SEQ ID NO: 3243284 - RNA, 15 nt, Human
gguggguuaauuaaa

SEQ ID NO: 3243285 - RNA, 15 nt, Human
ggugggugaaaggaa

SEQ ID NO: 3243286 - RNA, 23 nt, Human
gguucacucuuggagccugcaga

SEQ ID NO: 3243287 - RNA, 21 nt, Human
gguucacucuuggagccugca

SEQ ID NO: 3243288 - RNA, 12 nt, Human
gguucuguaaaa

SEQ ID NO: 3243289 - RNA, 16 nt, Human
gguucuuucuuccucu

SEQ ID NO: 3243290 - RNA, 14 nt, Human
gguucuuucuuccu

SEQ ID NO: 3243291 - RNA, 13 nt, Human
gguugagguuuca

SEQ ID NO: 3243292 - RNA, 18 nt, Human
gguucuuucauuugcuuu

SEQ ID NO: 3243293 - RNA, 20 nt, Human
gguucacucuuggagccugc

SEQ ID NO: 3243294 - RNA, 19 nt, Human
gguucacucuuggagccug

SEQ ID NO: 3243295 - RNA, 16 nt, Human
gguucaccauugagac

SEQ ID NO: 3243296 - RNA, 19 nt, Human
gguucaagugauucucuug

SEQ ID NO: 3243297 - RNA, 17 nt, Human
gguucaaaccugugaag

SEQ ID NO: 3243298 - RNA, 23 nt, Human
gguuauuuugauguaaagauguu

SEQ ID NO: 3243299 - RNA, 18 nt, Human
gguuauuuaaaauguaaa

SEQ ID NO: 3243300 - RNA, 16 nt, Human
gguuauuuaaaaugua

SEQ ID NO: 3243301 - RNA, 12 nt, Human
gguuaaaaugga

SEQ ID NO: 3243302 - RNA, 14 nt, Human
gguuaaauguuuug

SEQ ID NO: 3243303 - RNA, 13 nt, Human
gguuaaauguuuu

SEQ ID NO: 3243304 - RNA, 16 nt, Human
gguuaaaaaaaaaagu

SEQ ID NO: 3243305 - RNA, 21 nt, Human
gguuacccaguuagcucucaa

SEQ ID NO: 3243306 - RNA, 21 nt, Human
gguuaacaaauaacaacuuuu

SEQ ID NO: 3243307 - RNA, 13 nt, Human
gguuaacaaauaa

SEQ ID NO: 3243308 - RNA, 17 nt, Human
gguuaggcauuguggga

SEQ ID NO: 3243309 - RNA, 14 nt, Human
gguuagauauagag

SEQ ID NO: 3243310 - RNA, 18 nt, Human
gguuaccgauuucaaagu

SEQ ID NO: 3243311 - RNA, 13 nt, Human
gguuauggagagg

SEQ ID NO: 3243312 - RNA, 15 nt, Human
gguuauagugcaaua

SEQ ID NO: 3243313 - RNA, 17 nt, Human
gguuauagugcaauaua

SEQ ID NO: 3243314 - RNA, 21 nt, Human
gguuaguggauggaaggggcu

SEQ ID NO: 3243315 - RNA, 22 nt, Human
gguuaguggauggaaggggcug

SEQ ID NO: 3243316 - RNA, 21 nt, Human
ggugaccuuccaagagccuga

SEQ ID NO: 3243317 - RNA, 20 nt, Human
ggugaccuuccaagagccug

SEQ ID NO: 3243318 - RNA, 19 nt, Human
ggugaccuuccaagagccu

SEQ ID NO: 3243319 - RNA, 21 nt, Human
ggugaccucugccugaaguca

SEQ ID NO: 3243320 - RNA, 22 nt, Human
ggugaccagcaccaucucuccu

SEQ ID NO: 3243321 - RNA, 14 nt, Human
ggucugacccacug

SEQ ID NO: 3243322 - RNA, 21 nt, Human
ggucugaguuguuaccccaag

SEQ ID NO: 3243323 - RNA, 21 nt, Human
ggugacagagugagacucugu

SEQ ID NO: 3243324 - RNA, 19 nt, Human
ggucucuagugcugugaaa

SEQ ID NO: 3243325 - RNA, 16 nt, Human
ggucucuagugcugug

SEQ ID NO: 3243326 - RNA, 19 nt, Human
ggucucggaucaggcuccc

SEQ ID NO: 3243327 - RNA, 18 nt, Human
ggucucagggugucccag

SEQ ID NO: 3243328 - RNA, 18 nt, Human
ggucucaugcuccuuaau

SEQ ID NO: 3243329 - RNA, 23 nt, Human
ggucucucacagacaggaccccu

SEQ ID NO: 3243330 - RNA, 21 nt, Human
ggucucucacagacaggaccc

SEQ ID NO: 3243331 - RNA, 17 nt, Human
ggucccaccccacacac

SEQ ID NO: 3243332 - RNA, 14 nt, Human
ggucccaccccaca

SEQ ID NO: 3243333 - RNA, 19 nt, Human
ggucagguugacaggaggu

SEQ ID NO: 3243334 - RNA, 23 nt, Human
ggucucacucugucgcccagucu

SEQ ID NO: 3243335 - RNA, 22 nt, Human
ggucucacucugucgcccaguc

SEQ ID NO: 3243336 - RNA, 16 nt, Human
ggucucacucugucgc

SEQ ID NO: 3243337 - RNA, 23 nt, Human
ggugcuacaaaaacacagcaagg

SEQ ID NO: 3243338 - RNA, 21 nt, Human
ggugcuacaaaaacacagcaa

SEQ ID NO: 3243339 - RNA, 16 nt, Human
ggugcuaucuccccca

SEQ ID NO: 3243340 - RNA, 17 nt, Human
ggugcuaucucccccag

SEQ ID NO: 3243341 - RNA, 19 nt, Human
ggugcuaucucccccagcc

SEQ ID NO: 3243342 - RNA, 20 nt, Human
ggugcuaucucccccagccc

SEQ ID NO: 3243343 - RNA, 16 nt, Human
ggugagaggggaacag

SEQ ID NO: 3243344 - RNA, 15 nt, Human
ggugagaagcagagg

SEQ ID NO: 3243345 - RNA, 19 nt, Human
ggugagcauuacaggcaag

SEQ ID NO: 3243346 - RNA, 23 nt, Human
gguggccucccaacucaccccag

SEQ ID NO: 3243347 - RNA, 22 nt, Human
gguggcgcuagaggccauggag

SEQ ID NO: 3243348 - RNA, 20 nt, Human
gguggcgugagccuguaguc

SEQ ID NO: 3243349 - RNA, 22 nt, Human
gguggccucccaacucacccca

SEQ ID NO: 3243350 - RNA, 23 nt, Human
gguggccacuccagaccccuggc

SEQ ID NO: 3243351 - RNA, 22 nt, Human
gguggccacuccagaccccugg

SEQ ID NO: 3243352 - RNA, 21 nt, Human
gguggccacuccagaccccug

SEQ ID NO: 3243353 - RNA, 20 nt, Human
gguggccacuccagaccccu

SEQ ID NO: 3243354 - RNA, 16 nt, Human
gguggcagugggagcu

SEQ ID NO: 3243355 - RNA, 21 nt, Human
gguggcaucauuccaggcccg

SEQ ID NO: 3243356 - RNA, 22 nt, Human
gguggcagugggagcugccugu

SEQ ID NO: 3243357 - RNA, 19 nt, Human
gguggcagugggagcugcc

SEQ ID NO: 3243358 - RNA, 15 nt, Human
ggugcugccauccag

SEQ ID NO: 3243359 - RNA, 18 nt, Human
ggugcugcaguauguugc

SEQ ID NO: 3243360 - RNA, 17 nt, Human
gggguggggaccucagg

SEQ ID NO: 3243361 - RNA, 22 nt, Human
gggguggcccgaaagggucucc

SEQ ID NO: 3243362 - RNA, 18 nt, Human
gggggagcacccugaggg

SEQ ID NO: 3243363 - RNA, 19 nt, Human
gggggagcacccugagggc

SEQ ID NO: 3243364 - RNA, 12 nt, Human
gggguggccucc

SEQ ID NO: 3243365 - RNA, 22 nt, Human
gggggaggugggauccuccagg

SEQ ID NO: 3243366 - RNA, 19 nt, Human
ggggcugaggugggaggau

SEQ ID NO: 3243367 - RNA, 12 nt, Human
ggggcugcaccg

SEQ ID NO: 3243368 - RNA, 21 nt, Human
ggggcugcaccggcuggccug

SEQ ID NO: 3243369 - RNA, 22 nt, Human
ggggcugcaccggcuggccugg

SEQ ID NO: 3243370 - RNA, 11 nt, Human
gggguuuuucu

SEQ ID NO: 3243371 - RNA, 17 nt, Human
ggguaagugagagaggg

SEQ ID NO: 3243372 - RNA, 14 nt, Human
gggucucacucugu

SEQ ID NO: 3243373 - RNA, 12 nt, Human
gggucucacucu

SEQ ID NO: 3243374 - RNA, 22 nt, Human
gggucucagggugucccagacc

SEQ ID NO: 3243375 - RNA, 21 nt, Human
gggucugaggaauccagaccc

SEQ ID NO: 3243376 - RNA, 12 nt, Human
gggucugaggaa

SEQ ID NO: 3243377 - RNA, 24 nt, Human
gggucucucacagacaggaccccu

SEQ ID NO: 3243378 - RNA, 17 nt, Human
gggucuccucaggacca

SEQ ID NO: 3243379 - RNA, 15 nt, Human
gggucucuagugcug

SEQ ID NO: 3243380 - RNA, 20 nt, Human
gggucucuagugcugugaaa

SEQ ID NO: 3243381 - RNA, 22 nt, Human
gggucucucacagacaggaccc

SEQ ID NO: 3243382 - RNA, 18 nt, Human
gggucucucacagacagg

SEQ ID NO: 3243383 - RNA, 15 nt, Human
ggggaaaagagauga

SEQ ID NO: 3243384 - RNA, 21 nt, Human
ggggaaaaucagccugcucca

SEQ ID NO: 3243385 - RNA, 15 nt, Human
ggggaggccaucugg

SEQ ID NO: 3243386 - RNA, 18 nt, Human
ggggaggggcugugggcg

SEQ ID NO: 3243387 - RNA, 11 nt, Human
gggccugggcc

SEQ ID NO: 3243388 - RNA, 15 nt, Human
gggccugggccuggc

SEQ ID NO: 3243389 - RNA, 22 nt, Human
gggcuuggggaccagagcugcc

SEQ ID NO: 3243390 - RNA, 17 nt, Human
gggcuuguaguucuuua

SEQ ID NO: 3243391 - RNA, 17 nt, Human
gggcuugucauagccag

SEQ ID NO: 3243392 - RNA, 13 nt, Human
gggcuuuaaaauu

SEQ ID NO: 3243393 - RNA, 17 nt, Human
ggggaaaaucagccugc

SEQ ID NO: 3243394 - RNA, 19 nt, Human
ggggaaaaucagccugcuc

SEQ ID NO: 3243395 - RNA, 16 nt, Human
ggggaaaaucagccug

SEQ ID NO: 3243396 - RNA, 21 nt, Human
gggcuuuccugugccagguga

SEQ ID NO: 3243397 - RNA, 17 nt, Human
gggcuuuccugugccag

SEQ ID NO: 3243398 - RNA, 16 nt, Human
ggggcaacccugguga

SEQ ID NO: 3243399 - RNA, 13 nt, Human
ggggcacagggag

SEQ ID NO: 3243400 - RNA, 17 nt, Human
ggggcugaggugggagg

SEQ ID NO: 3243401 - RNA, 21 nt, Human
ggggcucagcaaggccaccuc

SEQ ID NO: 3243402 - RNA, 20 nt, Human
ggggcucagcaaggccaccu

SEQ ID NO: 3243403 - RNA, 15 nt, Human
ggggcucagcaaggc

SEQ ID NO: 3243404 - RNA, 20 nt, Human
ggggcucccgccuccaaccc

SEQ ID NO: 3243405 - RNA, 14 nt, Human
ggggcucagcaagg

SEQ ID NO: 3243406 - RNA, 12 nt, Human
ggggcucagcaa

SEQ ID NO: 3243407 - RNA, 20 nt, Human
gggucuugguuccagccugc

SEQ ID NO: 3243408 - RNA, 11 nt, Human
gggucuuccua

SEQ ID NO: 3243409 - RNA, 22 nt, Human
gggucuugcaaaauuccugacg

SEQ ID NO: 3243410 - RNA, 18 nt, Human
gggucuugcaaaauuccu

SEQ ID NO: 3243411 - RNA, 19 nt, Human
gggugacagagcaagugag

SEQ ID NO: 3243412 - RNA, 17 nt, Human
gggugcagcaucuggaa

SEQ ID NO: 3243413 - RNA, 20 nt, Human
gggugcugcuaauucuuugc

SEQ ID NO: 3243414 - RNA, 18 nt, Human
gggugaguccuccagaac

SEQ ID NO: 3243415 - RNA, 15 nt, Human
gggugaccuccggcc

SEQ ID NO: 3243416 - RNA, 22 nt, Human
ggguucaagcgauucuucugcu

SEQ ID NO: 3243417 - RNA, 18 nt, Human
ggguuagacugccagcuc

SEQ ID NO: 3243418 - RNA, 23 nt, Human
ggguucaagcgauucuucugcuu

SEQ ID NO: 3243419 - RNA, 12 nt, Human
ggguucuaccca

SEQ ID NO: 3243420 - RNA, 20 nt, Human
ggguuccuuccucugagccu

SEQ ID NO: 3243421 - RNA, 21 nt, Human
ggguuccuuccucugagccuu

SEQ ID NO: 3243422 - RNA, 19 nt, Human
ggguuccuuccucugagcc

SEQ ID NO: 3243423 - RNA, 16 nt, Human
ggguucuuucuuccuc

SEQ ID NO: 3243424 - RNA, 17 nt, Human
ggguucuuucuuccucu

SEQ ID NO: 3243425 - RNA, 19 nt, Human
ggguucuuucuuccucugc

SEQ ID NO: 3243426 - RNA, 13 nt, Human
ggguuccuucugg

SEQ ID NO: 3243427 - RNA, 19 nt, Human
gguauuuggauaucuguua

SEQ ID NO: 3243428 - RNA, 23 nt, Human
gguagaaauaucugaaaauguau

SEQ ID NO: 3243429 - RNA, 22 nt, Human
gguagaagcccuucuaccuucc

SEQ ID NO: 3243430 - RNA, 18 nt, Human
gguagaaugaccuuguaa

SEQ ID NO: 3243431 - RNA, 23 nt, Human
gguagaacgccagggaccccaga

SEQ ID NO: 3243432 - RNA, 14 nt, Human
gguagaacgccagg

SEQ ID NO: 3243433 - RNA, 20 nt, Human
gguagaggugcaugccuaau

SEQ ID NO: 3243434 - RNA, 13 nt, Human
gguacccacugcu

SEQ ID NO: 3243435 - RNA, 11 nt, Human
gguacccacug

SEQ ID NO: 3243436 - RNA, 22 nt, Human
gguagaaauaucugaaaaugua

SEQ ID NO: 3243437 - RNA, 17 nt, Human
gguacuuguggacacag

SEQ ID NO: 3243438 - RNA, 16 nt, Human
gguacuuguggacaca

SEQ ID NO: 3243439 - RNA, 17 nt, Human
ggucagaagagagggug

SEQ ID NO: 3243440 - RNA, 15 nt, Human
ggucacuucuucugu

SEQ ID NO: 3243441 - RNA, 15 nt, Human
ggucccaccccacac

SEQ ID NO: 3243442 - RNA, 16 nt, Human
ggucccaccccacaca

SEQ ID NO: 3243443 - RNA, 17 nt, Human
ggucaggccgggcagag

SEQ ID NO: 3243444 - RNA, 21 nt, Human
ggucaccucacucagcaccac

SEQ ID NO: 3243445 - RNA, 19 nt, Human
ggucaccucacucagcacc

SEQ ID NO: 3243446 - RNA, 22 nt, Human
ggucaccucacucagcaccacu

SEQ ID NO: 3243447 - RNA, 18 nt, Human
ggucacaggacucugccu

SEQ ID NO: 3243448 - RNA, 16 nt, Human
ggucacaggacucugc

SEQ ID NO: 3243449 - RNA, 16 nt, Human
ggucaaaugcuagaaa

SEQ ID NO: 3243450 - RNA, 14 nt, Human
gggcauccaugggg

SEQ ID NO: 3243451 - RNA, 23 nt, Human
gggcauccauggggucucucaca

SEQ ID NO: 3243452 - RNA, 12 nt, Human
gggcaugacacg

SEQ ID NO: 3243453 - RNA, 18 nt, Human
gggcauucucucuccaag

SEQ ID NO: 3243454 - RNA, 13 nt, Human
gggcauucucucu

SEQ ID NO: 3243455 - RNA, 20 nt, Human
gggcauggccagguggccac

SEQ ID NO: 3243456 - RNA, 17 nt, Human
gggcauggccagguggc

SEQ ID NO: 3243457 - RNA, 15 nt, Human
gggcauggccaggug

SEQ ID NO: 3243458 - RNA, 23 nt, Human
gggccacagagaaaguacuucuc

SEQ ID NO: 3243459 - RNA, 16 nt, Human
gggccacagagaaagu

SEQ ID NO: 3243460 - RNA, 20 nt, Human
gggccaaaagcuucccuccc

SEQ ID NO: 3243461 - RNA, 17 nt, Human
gggcccagagagggugg

SEQ ID NO: 3243462 - RNA, 21 nt, Human
gggcccacccaagcaggaggc

SEQ ID NO: 3243463 - RNA, 13 nt, Human
gggccccugccag

SEQ ID NO: 3243464 - RNA, 23 nt, Human
gggcccccagcgagagucccugc

SEQ ID NO: 3243465 - RNA, 14 nt, Human
gggccccagaggcu

SEQ ID NO: 3243466 - RNA, 12 nt, Human
gggccccaccug

SEQ ID NO: 3243467 - RNA, 22 nt, Human
gggccccaccugcagcucccuc

SEQ ID NO: 3243468 - RNA, 15 nt, Human
gggcccaugggaggg

SEQ ID NO: 3243469 - RNA, 18 nt, Human
gggcccaugggagggagc

SEQ ID NO: 3243470 - RNA, 15 nt, Human
gggccuggcucccuc

SEQ ID NO: 3243471 - RNA, 17 nt, Human
gggccuggcucccucac

SEQ ID NO: 3243472 - RNA, 14 nt, Human
gggccuggccugag

SEQ ID NO: 3243473 - RNA, 18 nt, Human
gggccuggccugagcugg

SEQ ID NO: 3243474 - RNA, 17 nt, Human
gggccuggcucaggugg

SEQ ID NO: 3243475 - RNA, 13 nt, Human
gggccuggcuccc

SEQ ID NO: 3243476 - RNA, 12 nt, Human
gggcccugccca

SEQ ID NO: 3243477 - RNA, 21 nt, Human
gggcccugcagcucucaugcu

SEQ ID NO: 3243478 - RNA, 14 nt, Human
gggcccugcagcuc

SEQ ID NO: 3243479 - RNA, 13 nt, Human
gggcccugccucc

SEQ ID NO: 3243480 - RNA, 13 nt, Human
gggccuggccuga

SEQ ID NO: 3243481 - RNA, 12 nt, Human
gggccuggccug

SEQ ID NO: 3243482 - RNA, 13 nt, Human
gggauagaugugu

SEQ ID NO: 3243483 - RNA, 13 nt, Human
gggauagagagag

SEQ ID NO: 3243484 - RNA, 14 nt, Human
gggauagaugugug

SEQ ID NO: 3243485 - RNA, 15 nt, Human
gggauaggggcagag

SEQ ID NO: 3243486 - RNA, 21 nt, Human
gggauaugauuuaaaucagcc

SEQ ID NO: 3243487 - RNA, 15 nt, Human
gggauccuccaggug

SEQ ID NO: 3243488 - RNA, 16 nt, Human
gggauccuccaggugc

SEQ ID NO: 3243489 - RNA, 23 nt, Human
gggauccuggaguucugguuccu

SEQ ID NO: 3243490 - RNA, 18 nt, Human
gggcaacccuggugacca

SEQ ID NO: 3243491 - RNA, 20 nt, Human
gggcaacccccagccugcua

SEQ ID NO: 3243492 - RNA, 13 nt, Human
gggcaauggaaau

SEQ ID NO: 3243493 - RNA, 19 nt, Human
gggcaauauucucuguaca

SEQ ID NO: 3243494 - RNA, 16 nt, Human
gggcaauauucucugu

SEQ ID NO: 3243495 - RNA, 23 nt, Human
gggcaauauucucuguacauauu

SEQ ID NO: 3243496 - RNA, 20 nt, Human
gggcaauauucucuguacau

SEQ ID NO: 3243497 - RNA, 11 nt, Human
gggagugugua

SEQ ID NO: 3243498 - RNA, 21 nt, Human
gggagugugguuucuuuuuga

SEQ ID NO: 3243499 - RNA, 14 nt, Human
gggagugagcuggu

SEQ ID NO: 3243500 - RNA, 11 nt, Human
gggagugagcu

SEQ ID NO: 3243501 - RNA, 18 nt, Human
gggagugacagaggcagc

SEQ ID NO: 3243502 - RNA, 17 nt, Human
gggagugacagaggcag

SEQ ID NO: 3243503 - RNA, 10 nt, Human
gggacucugc

SEQ ID NO: 3243504 - RNA, 17 nt, Human
gggaggugggauccucc

SEQ ID NO: 3243505 - RNA, 16 nt, Human
gggaggugaccccagg

SEQ ID NO: 3243506 - RNA, 17 nt, Human
gggcagguugguggggg

SEQ ID NO: 3243507 - RNA, 11 nt, Human
gggcagagcag

SEQ ID NO: 3243508 - RNA, 11 nt, Human
gggcagagagg

SEQ ID NO: 3243509 - RNA, 20 nt, Human
gggcaggggaggccaucugg

SEQ ID NO: 3243510 - RNA, 19 nt, Human
gggcaggggaggccaucug

SEQ ID NO: 3243511 - RNA, 18 nt, Human
gggcagagaggcuguggu

SEQ ID NO: 3243512 - RNA, 14 nt, Human
gggcagagaggcug

SEQ ID NO: 3243513 - RNA, 14 nt, Human
gggcagagcacagc

SEQ ID NO: 3243514 - RNA, 18 nt, Human
gggcagaaggaagacuuc

SEQ ID NO: 3243515 - RNA, 14 nt, Human
gggcagaaggaaga

SEQ ID NO: 3243516 - RNA, 20 nt, Human
gggcacucagaagacacuga

SEQ ID NO: 3243517 - RNA, 19 nt, Human
gggcacgugguugaguggg

SEQ ID NO: 3243518 - RNA, 17 nt, Human
gggcacugcucucaccu

SEQ ID NO: 3243519 - RNA, 16 nt, Human
gggcacugcucucacc

SEQ ID NO: 3243520 - RNA, 16 nt, Human
gggcacugguggcccg

SEQ ID NO: 3243521 - RNA, 13 nt, Human
gggcacugguggc

SEQ ID NO: 3243522 - RNA, 23 nt, Human
gggcacaccgggcacucagaaga

SEQ ID NO: 3243523 - RNA, 17 nt, Human
gggcacaccuccuccca

SEQ ID NO: 3243524 - RNA, 15 nt, Human
gggcacaccuccucc

SEQ ID NO: 3243525 - RNA, 18 nt, Human
gggcacagaaaauggaag

SEQ ID NO: 3243526 - RNA, 16 nt, Human
gggcacacgcugcucu

SEQ ID NO: 3243527 - RNA, 13 nt, Human
gggcacacgcugc

SEQ ID NO: 3243528 - RNA, 22 nt, Human
gggcacacgcugcucugcccca

SEQ ID NO: 3243529 - RNA, 20 nt, Human
gggcacacgcugcucugccc

SEQ ID NO: 3243530 - RNA, 19 nt, Human
gggcacacgcugcucugcc

SEQ ID NO: 3243531 - RNA, 18 nt, Human
gggcacacgcugcucugc

SEQ ID NO: 3243532 - RNA, 20 nt, Human
gggcacagaaaauggaagac

SEQ ID NO: 3243533 - RNA, 21 nt, Human
gggcacagaaaauggaagaca

SEQ ID NO: 3243534 - RNA, 23 nt, Human
gggcacacgcugcucugccccag

SEQ ID NO: 3243535 - RNA, 13 nt, Human
gggcacagggccu

SEQ ID NO: 3243536 - RNA, 16 nt, Human
gggcacagggccuggc

SEQ ID NO: 3243537 - RNA, 14 nt, Human
gggcacagggccug

SEQ ID NO: 3243538 - RNA, 19 nt, Human
gggcacucagaagacacug

SEQ ID NO: 3243539 - RNA, 16 nt, Human
gggcacucagaagaca

SEQ ID NO: 3243540 - RNA, 14 nt, Human
gggcaccggggccu

SEQ ID NO: 3243541 - RNA, 13 nt, Human
gggcacagggucu

SEQ ID NO: 3243542 - RNA, 16 nt, Human
gggcacagggucucua

SEQ ID NO: 3243543 - RNA, 15 nt, Human
gggcacaggucaggc

SEQ ID NO: 3243544 - RNA, 13 nt, Human
gggcacaggucag

SEQ ID NO: 3243545 - RNA, 20 nt, Human
gggcacagggccuggcccau

SEQ ID NO: 3243546 - RNA, 18 nt, Human
gggcacagggccuggccc

SEQ ID NO: 3243547 - RNA, 17 nt, Human
gggcaccacaaaauaua

SEQ ID NO: 3243548 - RNA, 22 nt, Human
gggcaccacaaaauauacaaaa

SEQ ID NO: 3243549 - RNA, 15 nt, Human
ggcugcuuuccaaag

SEQ ID NO: 3243550 - RNA, 23 nt, Human
ggcugcuucaaggauccugagcc

SEQ ID NO: 3243551 - RNA, 21 nt, Human
ggcugcuucaaggauccugag

SEQ ID NO: 3243552 - RNA, 19 nt, Human
ggcugggagagccuuccag

SEQ ID NO: 3243553 - RNA, 14 nt, Human
ggcuggaaggagga

SEQ ID NO: 3243554 - RNA, 15 nt, Human
ggcuggaaggaggaa

SEQ ID NO: 3243555 - RNA, 16 nt, Human
ggcuggaaggaggaag

SEQ ID NO: 3243556 - RNA, 17 nt, Human
ggcuggaaggaggaaga

SEQ ID NO: 3243557 - RNA, 18 nt, Human
ggcugggagagccuucca

SEQ ID NO: 3243558 - RNA, 15 nt, Human
ggcugggcagaggaa

SEQ ID NO: 3243559 - RNA, 19 nt, Human
ggcugggcagaggaaagca

SEQ ID NO: 3243560 - RNA, 13 nt, Human
ggcugggcagagg

SEQ ID NO: 3243561 - RNA, 14 nt, Human
ggcugggcagagga

SEQ ID NO: 3243562 - RNA, 20 nt, Human
ggcugggagagccuuccagg

SEQ ID NO: 3243563 - RNA, 23 nt, Human
ggcugggagagccuuccaggggu

SEQ ID NO: 3243564 - RNA, 13 nt, Human
ggcugcugaaggc

SEQ ID NO: 3243565 - RNA, 18 nt, Human
ggcugcugaaggcucgag

SEQ ID NO: 3243566 - RNA, 15 nt, Human
ggcugcugaaggcuc

SEQ ID NO: 3243567 - RNA, 17 nt, Human
ggcugcugaaggcucga

SEQ ID NO: 3243568 - RNA, 14 nt, Human
ggcugcugaaggcu

SEQ ID NO: 3243569 - RNA, 13 nt, Human
ggcugcagggagu

SEQ ID NO: 3243570 - RNA, 12 nt, Human
ggcugcagggag

SEQ ID NO: 3243571 - RNA, 11 nt, Human
ggcugcuucaa

SEQ ID NO: 3243572 - RNA, 12 nt, Human
ggcugcuucaag

SEQ ID NO: 3243573 - RNA, 14 nt, Human
ggcugcuucaagga

SEQ ID NO: 3243574 - RNA, 22 nt, Human
ggcugcuucaaggauccugagc

SEQ ID NO: 3243575 - RNA, 14 nt, Human
ggcugcugugaagc

SEQ ID NO: 3243576 - RNA, 16 nt, Human
ggcugcagccaggcca

SEQ ID NO: 3243577 - RNA, 22 nt, Human
ggcugcagccaggccacuggcc

SEQ ID NO: 3243578 - RNA, 18 nt, Human
ggcugcaccggcuggccu

SEQ ID NO: 3243579 - RNA, 19 nt, Human
ggcugcaccggcuggccug

SEQ ID NO: 3243580 - RNA, 17 nt, Human
ggcugcaccggcuggcc

SEQ ID NO: 3243581 - RNA, 24 nt, Human
ggcugcaaaggguaucaggugcug

SEQ ID NO: 3243582 - RNA, 23 nt, Human
ggcugcaaaggguaucaggugcu

SEQ ID NO: 3243583 - RNA, 22 nt, Human
ggcugcaaaggguaucaggugc

SEQ ID NO: 3243584 - RNA, 18 nt, Human
ggcugcaaaggguaucag

SEQ ID NO: 3243585 - RNA, 22 nt, Human
ggcugagugcaggcccacccug

SEQ ID NO: 3243586 - RNA, 21 nt, Human
ggcugagugcaggcccacccu

SEQ ID NO: 3243587 - RNA, 20 nt, Human
ggcugagugcaggcccaccc

SEQ ID NO: 3243588 - RNA, 19 nt, Human
ggcugagugcaggcccacc

SEQ ID NO: 3243589 - RNA, 18 nt, Human
ggcugagugcaggcccac

SEQ ID NO: 3243590 - RNA, 17 nt, Human
ggcugaguagcucugcc

SEQ ID NO: 3243591 - RNA, 17 nt, Human
ggcugagugcaggccca

SEQ ID NO: 3243592 - RNA, 16 nt, Human
ggcugagugcaggccc

SEQ ID NO: 3243593 - RNA, 15 nt, Human
ggcugagugcaggcc

SEQ ID NO: 3243594 - RNA, 13 nt, Human
ggcugagugcagg

SEQ ID NO: 3243595 - RNA, 20 nt, Human
ggccccugccagacccccug

SEQ ID NO: 3243596 - RNA, 17 nt, Human
ggccccugcccggcugc

SEQ ID NO: 3243597 - RNA, 16 nt, Human
ggccccugcccggcug

SEQ ID NO: 3243598 - RNA, 17 nt, Human
ggcucugccucccauca

SEQ ID NO: 3243599 - RNA, 20 nt, Human
ggccccugcccggcugcgga

SEQ ID NO: 3243600 - RNA, 13 nt, Human
ggcugagguggga

SEQ ID NO: 3243601 - RNA, 15 nt, Human
ggcugaggugggagg

SEQ ID NO: 3243602 - RNA, 22 nt, Human
gggaaggcagggagggccuggg

SEQ ID NO: 3243603 - RNA, 14 nt, Human
gggaagggggcugg

SEQ ID NO: 3243604 - RNA, 16 nt, Human
gggaagggggcuggga

SEQ ID NO: 3243605 - RNA, 17 nt, Human
gggaagggggcugggac

SEQ ID NO: 3243606 - RNA, 18 nt, Human
gggaaggggggucagaag

SEQ ID NO: 3243607 - RNA, 11 nt, Human
gggaaugaggg

SEQ ID NO: 3243608 - RNA, 12 nt, Human
gggaaugagggg

SEQ ID NO: 3243609 - RNA, 13 nt, Human
gggaaugaggggg

SEQ ID NO: 3243610 - RNA, 20 nt, Human
gggaccccuggugguucacu

SEQ ID NO: 3243611 - RNA, 14 nt, Human
gggaccccugagcu

SEQ ID NO: 3243612 - RNA, 24 nt, Human
gggacccuccaaggccaggccuug

SEQ ID NO: 3243613 - RNA, 20 nt, Human
gggacccuccaaggccaggc

SEQ ID NO: 3243614 - RNA, 20 nt, Human
gggacaaguagccaccugag

SEQ ID NO: 3243615 - RNA, 20 nt, Human
gggacaaccuuggcuuggcc

SEQ ID NO: 3243616 - RNA, 15 nt, Human
gggacaaccuuggcu

SEQ ID NO: 3243617 - RNA, 17 nt, Human
gggaauuucuucaacuc

SEQ ID NO: 3243618 - RNA, 23 nt, Human
gggacaaggacuaggguccuggg

SEQ ID NO: 3243619 - RNA, 12 nt, Human
gggaccucaggc

SEQ ID NO: 3243620 - RNA, 13 nt, Human
gggaccucaggcc

SEQ ID NO: 3243621 - RNA, 15 nt, Human
gggaccucaggccug

SEQ ID NO: 3243622 - RNA, 17 nt, Human
gggacuacaggcaccca

SEQ ID NO: 3243623 - RNA, 19 nt, Human
ggcuuggggaccagagcug

SEQ ID NO: 3243624 - RNA, 21 nt, Human
ggcuuggggaccagagcugcc

SEQ ID NO: 3243625 - RNA, 13 nt, Human
ggcuuguaguucu

SEQ ID NO: 3243626 - RNA, 16 nt, Human
ggcuugucauagccag

SEQ ID NO: 3243627 - RNA, 16 nt, Human
ggcuuguaguucuuua

SEQ ID NO: 3243628 - RNA, 12 nt, Human
ggcuuuaaaauu

SEQ ID NO: 3243629 - RNA, 14 nt, Human
ggcuuuaaaauucu

SEQ ID NO: 3243630 - RNA, 20 nt, Human
ggcuuuacauacuuuaucaa

SEQ ID NO: 3243631 - RNA, 22 nt, Human
ggcuuuucacugcuggcugccu

SEQ ID NO: 3243632 - RNA, 19 nt, Human
ggcuuuucacugcuggcug

SEQ ID NO: 3243633 - RNA, 17 nt, Human
ggcuuuucacugcuggc

SEQ ID NO: 3243634 - RNA, 15 nt, Human
ggcuuuucacugcug

SEQ ID NO: 3243635 - RNA, 13 nt, Human
ggcuuuucacugc

SEQ ID NO: 3243636 - RNA, 19 nt, Human
ggcuuuccugugccaggug

SEQ ID NO: 3243637 - RNA, 14 nt, Human
ggcuuuucacugcu

SEQ ID NO: 3243638 - RNA, 23 nt, Human
ggcuuucaggagcuccauacaca

SEQ ID NO: 3243639 - RNA, 17 nt, Human
ggcuuuauuuuuuugaa

SEQ ID NO: 3243640 - RNA, 22 nt, Human
ggcuuuauuuuuuugaacucuu

SEQ ID NO: 3243641 - RNA, 15 nt, Human
ggcuuagucacugag

SEQ ID NO: 3243642 - RNA, 21 nt, Human
ggcuuagucacugagacagcc

SEQ ID NO: 3243643 - RNA, 14 nt, Human
ggcuuauaaaacag

SEQ ID NO: 3243644 - RNA, 16 nt, Human
ggcuuauauuugugua

SEQ ID NO: 3243645 - RNA, 17 nt, Human
ggcugggcuucaguggc

SEQ ID NO: 3243646 - RNA, 13 nt, Human
ggcugggcuucag

SEQ ID NO: 3243647 - RNA, 15 nt, Human
ggcuuaaaacaacac

SEQ ID NO: 3243648 - RNA, 12 nt, Human
ggcugggcuuca

SEQ ID NO: 3243649 - RNA, 17 nt, Human
ggcugggcucccuuccc

SEQ ID NO: 3243650 - RNA, 17 nt, Human
cccagugagcauccacg

SEQ ID NO: 3243651 - RNA, 21 nt, Human
gcugucuuuucuuugccaucu

SEQ ID NO: 3243652 - RNA, 17 nt, Human
ggagaaucacaggcugg

SEQ ID NO: 3243653 - RNA, 23 nt, Human
ggaugucauguccuccaggcugg

SEQ ID NO: 3243654 - RNA, 19 nt, Human
ggggcaggggaggccaucu

SEQ ID NO: 3243655 - RNA, 15 nt, Human
acauaccuggcccug

SEQ ID NO: 3243656 - RNA, 19 nt, Human
acagcaagucacuggccag

SEQ ID NO: 3243657 - RNA, 12 nt, Human
aggcccagcuga

SEQ ID NO: 3243658 - RNA, 18 nt, Human
agcucuucuccaggcugu

SEQ ID NO: 3243659 - RNA, 16 nt, Human
gauugcaacaggcugg

SEQ ID NO: 3243660 - RNA, 14 nt, Human
ggcaaacuggccgc

SEQ ID NO: 3243661 - RNA, 21 nt, Human
ggggccccgucucaggucuga

SEQ ID NO: 3243662 - RNA, 20 nt, Human
gccugugccuuuugccaucc

SEQ ID NO: 3243663 - RNA, 18 nt, Human
ggaggucugccaggcugu

SEQ ID NO: 3243664 - RNA, 14 nt, Human
guagcacaggcuga

SEQ ID NO: 3243665 - RNA, 15 nt, Human
guaggccucagguga

SEQ ID NO: 3243666 - RNA, 20 nt, Human
guagugccgcucuuggggac

SEQ ID NO: 3243667 - RNA, 17 nt, Human
ggguuagacugccagcu

SEQ ID NO: 3243668 - RNA, 16 nt, Human
gucacuaccuggcugc

SEQ ID NO: 3243669 - RNA, 14 nt, Human
gucgcccaggcugg

SEQ ID NO: 3243670 - RNA, 14 nt, Human
ggggacugccaccu

SEQ ID NO: 3243671 - RNA, 14 nt, Human
guugcccaggcugg

SEQ ID NO: 3243672 - RNA, 14 nt, Human
guuggccaggcugg

SEQ ID NO: 3243673 - RNA, 17 nt, Human
cguacucuuuggggcag

SEQ ID NO: 3243674 - RNA, 18 nt, Human
cgugaggcccguggggcc

SEQ ID NO: 3243675 - RNA, 15 nt, Human
gagaccccaggcugu

SEQ ID NO: 3243676 - RNA, 16 nt, Human
gaggagcccugccucu

SEQ ID NO: 3243677 - RNA, 12 nt, Human
gccccaggcugc

SEQ ID NO: 3243678 - RNA, 17 nt, Human
cuugguuccuggggcau

SEQ ID NO: 3243679 - RNA, 17 nt, Human
cucggaucaggcuccca

SEQ ID NO: 3243680 - RNA, 19 nt, Human
gcaggagucccugccauca

SEQ ID NO: 3243681 - RNA, 14 nt, Human
guuggccaggcugc

SEQ ID NO: 3243682 - RNA, 13 nt, Human
augcgcaggcugg

SEQ ID NO: 3243683 - RNA, 14 nt, Human
cuaggccuggggac

SEQ ID NO: 3243684 - RNA, 18 nt, Human
cuggucuuugagcuccca

SEQ ID NO: 3243685 - RNA, 13 nt, Human
cugggcugggcac

SEQ ID NO: 3243686 - RNA, 12 nt, Human
caggcuggggcc

SEQ ID NO: 3243687 - RNA, 19 nt, Human
cagagcucccucugcccca

SEQ ID NO: 3243688 - RNA, 16 nt, Human
cagcacguguggccug

SEQ ID NO: 3243689 - RNA, 21 nt, Human
ccagcaauacagugcucgcca

SEQ ID NO: 3243690 - RNA, 19 nt, Human
caggagaugcugugccccu

SEQ ID NO: 3243691 - RNA, 16 nt, Human
caugggucagugccca

SEQ ID NO: 3243692 - RNA, 17 nt, Human
cacgcugcucugcccca

SEQ ID NO: 3243693 - RNA, 22 nt, Human
aggcucccuccccauggggcag

SEQ ID NO: 3243694 - RNA, 19 nt, Rubella virus
gacuccggagggccccgcc

SEQ ID NO: 3243695 - RNA, 18 nt, Rubella virus
ccgcgccugucgccgccg

SEQ ID NO: 3243696 - RNA, 16 nt, Rubella virus
cgacccccugcugcgc

SEQ ID NO: 3243697 - RNA, 15 nt, Rubella virus
gugggggcucugccc

SEQ ID NO: 3243698 - RNA, 17 nt, Rubella virus
cggccccgauugggccu

SEQ ID NO: 3243699 - RNA, 14 nt, Rubella virus
gcugcgcacugccc

SEQ ID NO: 3243700 - RNA, 19 nt, Rubella virus
ggcacccaccgaggccugc

SEQ ID NO: 3243701 - RNA, 12 nt, Rubella virus
cgccugcgccac

SEQ ID NO: 3243702 - RNA, 14 nt, Rubella virus
cgccggcccccugc

SEQ ID NO: 3243703 - RNA, 18 nt, Rubella virus
gcuuucaccuaccucugc

SEQ ID NO: 3243704 - RNA, 15 nt, Rubella virus
caccgccgcccuccu

SEQ ID NO: 3243705 - RNA, 18 nt, Rubella virus
cgccauuugcgcccuccc

SEQ ID NO: 3243706 - RNA, 15 nt, Rubella virus
gagugggcugcugcc

SEQ ID NO: 3243707 - RNA, 15 nt, Rubella virus
agcgacgugcugccc

SEQ ID NO: 3243708 - RNA, 23 nt, Rubella virus
ccuggguacccgcagccccuugc

SEQ ID NO: 3243709 - RNA, 21 nt, Rubella virus
accgggcgugggggcucugcc

SEQ ID NO: 3243710 - RNA, 14 nt, Rubella virus
caccaaccugggca

SEQ ID NO: 3243711 - RNA, 22 nt, Rubella virus
cuccacgaccgccgccaccccc

SEQ ID NO: 3243712 - RNA, 16 nt, Rubella virus
gccgccacccccgcca

SEQ ID NO: 3243713 - RNA, 15 nt, Rubella virus
ccugcugcgcacugc

SEQ ID NO: 3243714 - RNA, 15 nt, Rubella virus
ucaaugacagcugcg

SEQ ID NO: 3243715 - RNA, 21 nt, Rubella virus
gaccugggcggagugggcugc

SEQ ID NO: 3243716 - RNA, 21 nt, Rubella virus
gcugcccauugguggcagcuc

SEQ ID NO: 3243717 - RNA, 15 nt, Rubella virus
augcgguggggccuu

SEQ ID NO: 3243718 - RNA, 22 nt, Rubella virus
gcagccguggcgcguggccugc

SEQ ID NO: 3243719 - RNA, 20 nt, Rubella virus
caacccuugcgggcccgagc

SEQ ID NO: 3243720 - RNA, 22 nt, Rubella virus
acacagcgacgcggccugcugg

SEQ ID NO: 3243721 - RNA, 21 nt, Rubella virus
gcccgcucacgucguccgcgc

SEQ ID NO: 3243722 - RNA, 23 nt, Rubella virus
ccacgcccacaccaccagcgacc

SEQ ID NO: 3243723 - RNA, 17 nt, Rubella virus
cgcccauccaggcgccc

SEQ ID NO: 3243724 - RNA, 21 nt, Rubella virus
cacucgcuggcuuacucgcuu

SEQ ID NO: 3243725 - RNA, 14 nt, Rubella virus
gacaccgaggcacc

SEQ ID NO: 3243726 - RNA, 14 nt, Rubella virus
ggcucuugcucgcc

SEQ ID NO: 3243727 - RNA, 12 nt, Rubella virus
gagcuggggcca

SEQ ID NO: 3243728 - RNA, 13 nt, Rubella virus
cgccgccgcggcg

SEQ ID NO: 3243729 - RNA, 18 nt, Rubella virus
cccgugcgccucgcuggc

SEQ ID NO: 3243730 - RNA, 14 nt, Rubella virus
cgacgcggccugcu

SEQ ID NO: 3243731 - RNA, 19 nt, Rubella virus
cgccgggcuccagccccgc

SEQ ID NO: 3243732 - RNA, 13 nt, Rubella virus
ccugucgccgccg

SEQ ID NO: 3243733 - RNA, 23 nt, Rubella virus
cgcagggacugguccagggcccc

SEQ ID NO: 3243734 - RNA, 20 nt, Rubella virus
ggguacaacccccccgccua

SEQ ID NO: 3243735 - RNA, 14 nt, Rubella virus
ccgaccgccgcccg

SEQ ID NO: 3243736 - RNA, 15 nt, Rubella virus
guggaaggccuugcc

SEQ ID NO: 3243737 - RNA, 17 nt, Rubella virus
cugccguuccucgggca

SEQ ID NO: 3243738 - RNA, 17 nt, Rubella virus
ggcauccaccgggcccc

SEQ ID NO: 3243739 - RNA, 21 nt, Rubella virus
ugcauuucaccaaccugggca

SEQ ID NO: 3243740 - RNA, 22 nt, Rubella virus
gacacagcgacgcggccugcug

SEQ ID NO: 3243741 - RNA, 16 nt, Rubella virus
cguccuuaccgcccgc

SEQ ID NO: 3243742 - RNA, 18 nt, Rubella virus
ucgccgccgcggcgccgc

SEQ ID NO: 3243743 - RNA, 14 nt, Rubella virus
ccggcgugguguau

SEQ ID NO: 3243744 - RNA, 15 nt, Rubella virus
gcggcuucuugucug

SEQ ID NO: 3243745 - RNA, 20 nt, Rubella virus
acacagcgacgcggccugcu

SEQ ID NO: 3243746 - RNA, 18 nt, Rubella virus
ccgggcgugggggcucug

SEQ ID NO: 3243747 - RNA, 18 nt, Rubella virus
gcugccguuccucgggca

SEQ ID NO: 3243748 - RNA, 17 nt, Rubella virus
gcgaaacccgcacuagg

SEQ ID NO: 3243749 - RNA, 20 nt, Rubella virus
cacggccccgauugggccuc

SEQ ID NO: 3243750 - RNA, 24 nt, Rubella virus
gucgccguuggcaccgcgcgcgcc

SEQ ID NO: 3243751 - RNA, 14 nt, Rubella virus
cagugcgguacccc

SEQ ID NO: 3243752 - RNA, 20 nt, Rubella virus
accucgaggccacuggagcc

SEQ ID NO: 3243753 - RNA, 19 nt, Rubella virus
ugacuccggagggccccgc

SEQ ID NO: 3243754 - RNA, 12 nt, Rubella virus
agaccugggcgg

SEQ ID NO: 3243755 - RNA, 22 nt, Rubella virus
ccgcccuaccaagucagcugcg

SEQ ID NO: 3243756 - RNA, 15 nt, Rubella virus
gaaacgccagcgacg

SEQ ID NO: 3243757 - RNA, 20 nt, Rubella virus
accaccagcgaccccuggca

SEQ ID NO: 3243758 - RNA, 19 nt, Rubella virus
gccagugcgcggccucgac

SEQ ID NO: 3243759 - RNA, 23 nt, Rubella virus
ggcggcugcuuugccccauggga

SEQ ID NO: 3243760 - RNA, 14 nt, Rubella virus
acacgccgcacgga

SEQ ID NO: 3243761 - RNA, 21 nt, Rubella virus
gcgcauccgcuucggugcccc

SEQ ID NO: 3243762 - RNA, 20 nt, Rubella virus
cggccaucauggcggcaccu

SEQ ID NO: 3243763 - RNA, 22 nt, Rubella virus
gacccgcucggcgcgccauccu

SEQ ID NO: 3243764 - RNA, 21 nt, Rubella virus
ucccagacuccggccccgaag

SEQ ID NO: 3243765 - RNA, 21 nt, Rubella virus
uacgcugccgcagccccccug

SEQ ID NO: 3243766 - RNA, 19 nt, Rubella virus
ccugauauuuauggugugc

SEQ ID NO: 3243767 - RNA, 15 nt, Rubella virus
cgccgccgcccucac

SEQ ID NO: 3243768 - RNA, 15 nt, Rubella virus
gacgacccccugcug

SEQ ID NO: 3243769 - RNA, 18 nt, Rubella virus
ugcaccggggugcgccac

SEQ ID NO: 3243770 - RNA, 16 nt, Rubella virus
acagagaccaggaccg

SEQ ID NO: 3243771 - RNA, 18 nt, Rubella virus
acuccacauacgcgcugg

SEQ ID NO: 3243772 - RNA, 15 nt, Rubella virus
cagcauuacggccac

SEQ ID NO: 3243773 - RNA, 16 nt, Rubella virus
accuccuacgcugccg

SEQ ID NO: 3243774 - RNA, 20 nt, Rubella virus
gcgcccccggcugcgccugg

SEQ ID NO: 3243775 - RNA, 21 nt, Rubella virus
ggcaccagggcacucaugucu

SEQ ID NO: 3243776 - RNA, 15 nt, Rubella virus
ucaccgccgcccucc

SEQ ID NO: 3243777 - RNA, 19 nt, Rubella virus
acgccucucaccaccgcgg

SEQ ID NO: 3243778 - RNA, 13 nt, Rubella virus
cuggcggcagcua

SEQ ID NO: 3243779 - RNA, 14 nt, Rubella virus
gcaccuguccccgu

SEQ ID NO: 3243780 - RNA, 17 nt, Rubella virus
gccccccaggccuuccu

SEQ ID NO: 3243781 - RNA, 15 nt, Rubella virus
gagggcuugggggcc

SEQ ID NO: 3243782 - RNA, 17 nt, Rubella virus
gccucgcuagugggccc

SEQ ID NO: 3243783 - RNA, 22 nt, Rubella virus
cgccuacccgguuuggcugcgc

SEQ ID NO: 3243784 - RNA, 19 nt, Rubella virus
caccgaggcacccaccgag

SEQ ID NO: 3243785 - RNA, 20 nt, Rubella virus
gccuuccccccugggaacug

SEQ ID NO: 3243786 - RNA, 19 nt, Rubella virus
cggccccgauugggccucc

SEQ ID NO: 3243787 - RNA, 23 nt, Rubella virus
gccugcgugaccucguggcuuug

SEQ ID NO: 3243788 - RNA, 14 nt, Rubella virus
gcgcacgggcagca

SEQ ID NO: 3243789 - RNA, 13 nt, Rubella virus
accaucagcugcc

SEQ ID NO: 3243790 - RNA, 17 nt, Rubella virus
cauccaggcgcccgcug

SEQ ID NO: 3243791 - RNA, 20 nt, Rubella virus
ugcuggucccguggguccug

SEQ ID NO: 3243792 - RNA, 18 nt, Rubella virus
caccgcgcgcgccgggcu

SEQ ID NO: 3243793 - RNA, 20 nt, Rubella virus
caggccuuccuugccgggcu

SEQ ID NO: 3243794 - RNA, 13 nt, Rubella virus
accgacugcugcg

SEQ ID NO: 3243795 - RNA, 12 nt, Rubella virus
ggagugggcugc

SEQ ID NO: 3243796 - RNA, 15 nt, Rubella virus
cugggugcgggccga

SEQ ID NO: 3243797 - RNA, 16 nt, Rubella virus
cggcugcgccuggucg

SEQ ID NO: 3243798 - RNA, 22 nt, Rubella virus
gccucuuacuucaacccuggcg

SEQ ID NO: 3243799 - RNA, 14 nt, Rubella virus
acccuugcgggccc

SEQ ID NO: 3243800 - RNA, 12 nt, Rubella virus
cgccccccccgg

SEQ ID NO: 3243801 - RNA, 17 nt, Rubella virus
cuggaccguacggccau

SEQ ID NO: 3243802 - RNA, 15 nt, Rubella virus
agugggcugcugccc

SEQ ID NO: 3243803 - RNA, 14 nt, Rubella virus
cgucaccgccgccc

SEQ ID NO: 3243804 - RNA, 17 nt, Rubella virus
cggagugggcugcugcc

SEQ ID NO: 3243805 - RNA, 20 nt, Rubella virus
aguacccgccuacccgguuu

SEQ ID NO: 3243806 - RNA, 22 nt, Rubella virus
ccgcagccccccugugcgcacg

SEQ ID NO: 3243807 - RNA, 12 nt, Rubella virus
ccuggcggcagc

SEQ ID NO: 3243808 - RNA, 22 nt, Rubella virus
gcgcauugagacccgcucggcg

SEQ ID NO: 3243809 - RNA, 13 nt, Rubella virus
acccccgcgcugg

SEQ ID NO: 3243810 - RNA, 17 nt, Rubella virus
cgcuagugggcccccgc

SEQ ID NO: 3243811 - RNA, 18 nt, Rubella virus
cucguggcuuuggagcga

SEQ ID NO: 3243812 - RNA, 13 nt, Rubella virus
cgccauccuuggc

SEQ ID NO: 3243813 - RNA, 18 nt, Rubella virus
cugccguuccucgggcac

SEQ ID NO: 3243814 - RNA, 22 nt, Rubella virus
uauggcacacacaccacugcug

SEQ ID NO: 3243815 - RNA, 14 nt, Rubella virus
uauggcggcaccuc

SEQ ID NO: 3243816 - RNA, 18 nt, Rubella virus
cuaccaagucagcugcgg

SEQ ID NO: 3243817 - RNA, 15 nt, Rubella virus
gcuccaaggcggcug

SEQ ID NO: 3243818 - RNA, 18 nt, Rubella virus
cuccacgacccugacacc

SEQ ID NO: 3243819 - RNA, 19 nt, Rubella virus
cugcaccggggugcgccac

SEQ ID NO: 3243820 - RNA, 11 nt, Rubella virus
cugccacgccg

SEQ ID NO: 3243821 - RNA, 21 nt, Rubella virus
ccuccccgguuugccaacgcc

SEQ ID NO: 3243822 - RNA, 17 nt, Rubella virus
gccgcgccugucgccgc

SEQ ID NO: 3243823 - RNA, 17 nt, Rubella virus
gacgaggacggccgcug

SEQ ID NO: 3243824 - RNA, 16 nt, Rubella virus
caccuucugggcuguc

SEQ ID NO: 3243825 - RNA, 14 nt, Rubella virus
gcaccagggcacuc

SEQ ID NO: 3243826 - RNA, 19 nt, Rubella virus
aggcacccaccgaggccug

SEQ ID NO: 3243827 - RNA, 21 nt, Rubella virus
ggagcccgaauugccacggcc

SEQ ID NO: 3243828 - RNA, 14 nt, Rubella virus
uggcgaggaccucg

SEQ ID NO: 3243829 - RNA, 23 nt, Rubella virus
gcaaaccgggcgugggggcucug

SEQ ID NO: 3243830 - RNA, 17 nt, Rubella virus
cccucccacucgcuggc

SEQ ID NO: 3243831 - RNA, 19 nt, Rubella virus
cucgaggccacuggagccu

SEQ ID NO: 3243832 - RNA, 19 nt, Rubella virus
cccucuggcucgccacagc

SEQ ID NO: 3243833 - RNA, 15 nt, Rubella virus
ggcgugggggcucug

SEQ ID NO: 3243834 - RNA, 13 nt, Rubella virus
cggggccguggcc

SEQ ID NO: 3243835 - RNA, 16 nt, Rubella virus
cacuagauccccgcac

SEQ ID NO: 3243836 - RNA, 15 nt, Rubella virus
ggccacuggagccug

SEQ ID NO: 3243837 - RNA, 19 nt, Rubella virus
uccagggccccgccccccc

SEQ ID NO: 3243838 - RNA, 18 nt, Rubella virus
cuggcaccgacugcugcg

SEQ ID NO: 3243839 - RNA, 20 nt, Rubella virus
gccucuuacuucaacccugg

SEQ ID NO: 3243840 - RNA, 22 nt, Rubella virus
ggccagcgcagggacuggucca

SEQ ID NO: 3243841 - RNA, 22 nt, Rubella virus
cgacccccugcugcgcacugcc

SEQ ID NO: 3243842 - RNA, 14 nt, Rubella virus
ugcgccucgcuggc

SEQ ID NO: 3243843 - RNA, 20 nt, Rubella virus
cugccgcagccccccugugc

SEQ ID NO: 3243844 - RNA, 13 nt, Rubella virus
auggugugccgcc

SEQ ID NO: 3243845 - RNA, 19 nt, Rubella virus
gcgcguacaaucaaccugc

SEQ ID NO: 3243846 - RNA, 16 nt, Rubella virus
gcgccugcgccacggc

SEQ ID NO: 3243847 - RNA, 19 nt, Rubella virus
cagcgaccccuggcaucca

SEQ ID NO: 3243848 - RNA, 10 nt, Rubella virus
aucagcugcc

SEQ ID NO: 3243849 - RNA, 19 nt, Rubella virus
cgcccgaccccggggaccu

SEQ ID NO: 3243850 - RNA, 23 nt, Rubella virus
gaggcuuucaccuaccucugcac

SEQ ID NO: 3243851 - RNA, 14 nt, Rubella virus
cuguccaccaccgc

SEQ ID NO: 3243852 - RNA, 21 nt, Rubella virus
cgcagggacugguccagggcc

SEQ ID NO: 3243853 - RNA, 19 nt, Rubella virus
cgggcgugggggcucugcc

SEQ ID NO: 3243854 - RNA, 19 nt, Rubella virus
gcugcgcuaugcggugggg

SEQ ID NO: 3243855 - RNA, 16 nt, Rubella virus
gcaccuucugggcugu

SEQ ID NO: 3243856 - RNA, 16 nt, Rubella virus
ccccaggccuuccuug

SEQ ID NO: 3243857 - RNA, 15 nt, Rubella virus
cggccacuggcucca

SEQ ID NO: 3243858 - RNA, 16 nt, Rubella virus
caacgucaccacugaa

SEQ ID NO: 3243859 - RNA, 14 nt, Rubella virus
aggcgagcgcaccu

SEQ ID NO: 3243860 - RNA, 14 nt, Rubella virus
uccccugacugcuc

SEQ ID NO: 3243861 - RNA, 19 nt, Rubella virus
cgcgaaacccgcacuaggc

SEQ ID NO: 3243862 - RNA, 17 nt, Rubella virus
cgacgacccccugcugc

SEQ ID NO: 3243863 - RNA, 20 nt, Rubella virus
cggccccgauugggccuccc

SEQ ID NO: 3243864 - RNA, 15 nt, Rubella virus
gugccgccgcgccug

SEQ ID NO: 3243865 - RNA, 21 nt, Rubella virus
aagcaccuguccccgugcgcc

SEQ ID NO: 3243866 - RNA, 19 nt, Rubella virus
gauccacgcccacaccacc

SEQ ID NO: 3243867 - RNA, 15 nt, Rubella virus
cuccucaacaccccc

SEQ ID NO: 3243868 - RNA, 14 nt, Rubella virus
ccaaccugggcacc

SEQ ID NO: 3243869 - RNA, 17 nt, Rubella virus
gccguuccucgggcacg

SEQ ID NO: 3243870 - RNA, 17 nt, Rubella virus
gcgcugacacccggugc

SEQ ID NO: 3243871 - RNA, 20 nt, Rubella virus
gacggccaucauggcggcac

SEQ ID NO: 3243872 - RNA, 14 nt, Rubella virus
cacacacaccacug

SEQ ID NO: 3243873 - RNA, 13 nt, Rubella virus
uucguccugcugg

SEQ ID NO: 3243874 - RNA, 19 nt, Rubella virus
gccugcgugaccucguggc

SEQ ID NO: 3243875 - RNA, 13 nt, Rubella virus
ccccaugggaccu

SEQ ID NO: 3243876 - RNA, 21 nt, Rubella virus
cgccccgagcuggggccaccg

SEQ ID NO: 3243877 - RNA, 13 nt, Rubella virus
cccccgccacugc

SEQ ID NO: 3243878 - RNA, 17 nt, Rubella virus
ggccugcuggggcuucc

SEQ ID NO: 3243879 - RNA, 13 nt, Rubella virus
uaccgcccgcccc

SEQ ID NO: 3243880 - RNA, 20 nt, Rubella virus
cggucgccguuggcaccgcg

SEQ ID NO: 3243881 - RNA, 22 nt, Rubella virus
cacgaccgccgccacccccgcc

SEQ ID NO: 3243882 - RNA, 22 nt, Rubella virus
uugccgggcucuugcucgccac

SEQ ID NO: 3243883 - RNA, 12 nt, Rubella virus
gacgugcugccc

SEQ ID NO: 3243884 - RNA, 14 nt, Rubella virus
ccccgcgcuggugg

SEQ ID NO: 3243885 - RNA, 18 nt, Rubella virus
cacccaccgaggccugcg

SEQ ID NO: 3243886 - RNA, 18 nt, Rubella virus
cccuaccaagucagcugc

SEQ ID NO: 3243887 - RNA, 11 nt, Rubella virus
ccagggccccg

SEQ ID NO: 3243888 - RNA, 19 nt, Rubella virus
cacagcgacgcggccugcu

SEQ ID NO: 3243889 - RNA, 21 nt, Rubella virus
gccacagcgaacgcgcugucu

SEQ ID NO: 3243890 - RNA, 20 nt, Rubella virus
agccccccugugcgcacggg

SEQ ID NO: 3243891 - RNA, 15 nt, Rubella virus
caaccugggcacccc

SEQ ID NO: 3243892 - RNA, 13 nt, Rubella virus
ggcgccgccgccg

SEQ ID NO: 3243893 - RNA, 16 nt, Rubella virus
ccggcagaccugggcg

SEQ ID NO: 3243894 - RNA, 12 nt, Rubella virus
cucucaccaccg

SEQ ID NO: 3243895 - RNA, 18 nt, Rubella virus
ggcuguccaccaccgccc

SEQ ID NO: 3243896 - RNA, 21 nt, Rubella virus
cagggguacaacccccccgcc

SEQ ID NO: 3243897 - RNA, 15 nt, Rubella virus
gcucacucugggcgc

SEQ ID NO: 3243898 - RNA, 17 nt, Rubella virus
caacccuugcgggcccg

SEQ ID NO: 3243899 - RNA, 14 nt, Rubella virus
ggagggccccgccg

SEQ ID NO: 3243900 - RNA, 14 nt, Rubella virus
acgcggccugcugg

SEQ ID NO: 3243901 - RNA, 13 nt, Rubella virus
uguugcuguauag

SEQ ID NO: 3243902 - RNA, 12 nt, Rubella virus
uccccccuggga

SEQ ID NO: 3243903 - RNA, 18 nt, Rubella virus
gcgcagcuggccucuuac

SEQ ID NO: 3243904 - RNA, 19 nt, Rubella virus
cggcccucuggcucgccac

SEQ ID NO: 3243905 - RNA, 20 nt, Rubella virus
ccucaaugacagcugcggcg

SEQ ID NO: 3243906 - RNA, 21 nt, Rubella virus
cugccgcagccccccugugcg

SEQ ID NO: 3243907 - RNA, 16 nt, Rubella virus
gacuccggagggcccc

SEQ ID NO: 3243908 - RNA, 18 nt, Rubella virus
auggcgaggaccucggcg

SEQ ID NO: 3243909 - RNA, 22 nt, Rubella virus
guugaucugcgggcuguccacc

SEQ ID NO: 3243910 - RNA, 22 nt, Rubella virus
ucgccgccgcggcgccgccgcc

SEQ ID NO: 3243911 - RNA, 14 nt, Rubella virus
ggccuuccccccug

SEQ ID NO: 3243912 - RNA, 20 nt, Rubella virus
cgccacugcgccggcccccu

SEQ ID NO: 3243913 - RNA, 12 nt, Rubella virus
acacccccccgc

SEQ ID NO: 3243914 - RNA, 14 nt, Rubella virus
cuguugcuguauag

SEQ ID NO: 3243915 - RNA, 22 nt, Rubella virus
cauuugcgagauccccacugau

SEQ ID NO: 3243916 - RNA, 19 nt, Rubella virus
ugcuacaaccugagcgacu

SEQ ID NO: 3243917 - RNA, 17 nt, Rubella virus
accaccaucagcugccg

SEQ ID NO: 3243918 - RNA, 19 nt, Rubella virus
gccccgagcuggggccacc

SEQ ID NO: 3243919 - RNA, 18 nt, Rubella virus
cgccgccgcggcgccgcc

SEQ ID NO: 3243920 - RNA, 19 nt, Rubella virus
acccccugcugcgcacugc

SEQ ID NO: 3243921 - RNA, 18 nt, Rubella virus
accggcaaucagcagucc

SEQ ID NO: 3243922 - RNA, 18 nt, Rubella virus
cgccccgagcuggggcca

SEQ ID NO: 3243923 - RNA, 15 nt, Rubella virus
gcuccagccccgcgc

SEQ ID NO: 3243924 - RNA, 22 nt, Rubella virus
ccguucugcaacacgccgcacg

SEQ ID NO: 3243925 - RNA, 17 nt, Rubella virus
augcccgaguggaucca

SEQ ID NO: 3243926 - RNA, 22 nt, Rubella virus
gcuucggugccccccaggccuu

SEQ ID NO: 3243927 - RNA, 12 nt, Rubella virus
cucaccaccgcg

SEQ ID NO: 3243928 - RNA, 22 nt, Rubella virus
ccugucgccgccgcggcgccgc

SEQ ID NO: 3243929 - RNA, 20 nt, Rubella virus
cauuugcgcccucccacucg

SEQ ID NO: 3243930 - RNA, 15 nt, Rubella virus
ggccucgggagcccg

SEQ ID NO: 3243931 - RNA, 15 nt, Rubella virus
ccagacuccggcccc

SEQ ID NO: 3243932 - RNA, 18 nt, Rubella virus
acguuagcgccaccccgc

SEQ ID NO: 3243933 - RNA, 14 nt, Rubella virus
cccgcacuaggcca

SEQ ID NO: 3243934 - RNA, 23 nt, Rubella virus
ggcugcgcuaugcgguggggccu

SEQ ID NO: 3243935 - RNA, 14 nt, Rubella virus
cuggcggcagcuac

SEQ ID NO: 3243936 - RNA, 14 nt, Rubella virus
gacgcggccugcug

SEQ ID NO: 3243937 - RNA, 15 nt, Rubella virus
ugcgcacgggcagca

SEQ ID NO: 3243938 - RNA, 17 nt, Rubella virus
cuugcuccccagccucg

SEQ ID NO: 3243939 - RNA, 22 nt, Rubella virus
gugcgagggcuugggggccugg

SEQ ID NO: 3243940 - RNA, 19 nt, Rubella virus
cugggcacccccccacucg

SEQ ID NO: 3243941 - RNA, 16 nt, Rubella virus
cgccuacuccucuggc

SEQ ID NO: 3243942 - RNA, 15 nt, Rubella virus
ucauggcggcaccuu

SEQ ID NO: 3243943 - RNA, 16 nt, Rubella virus
caucgcgggcgccgcc

SEQ ID NO: 3243944 - RNA, 13 nt, Rubella virus
gugcgcggccucg

SEQ ID NO: 3243945 - RNA, 14 nt, Rubella virus
guggcccugccacg

SEQ ID NO: 3243946 - RNA, 19 nt, Rubella virus
gcuccaaggcggcuggggu

SEQ ID NO: 3243947 - RNA, 18 nt, Rubella virus
agccucggcccucuggcu

SEQ ID NO: 3243948 - RNA, 17 nt, Rubella virus
cugguccagggccccgc

SEQ ID NO: 3243949 - RNA, 13 nt, Rubella virus
cggcugcgccugg

SEQ ID NO: 3243950 - RNA, 14 nt, Rubella virus
gccgcggcaaccgg

SEQ ID NO: 3243951 - RNA, 18 nt, Rubella virus
cggagugggcugcugccc

SEQ ID NO: 3243952 - RNA, 21 nt, Rubella virus
cgcacugccccuggacccggc

SEQ ID NO: 3243953 - RNA, 21 nt, Rubella virus
uagauccccgcaccuguugcu

SEQ ID NO: 3243954 - RNA, 23 nt, Rubella virus
acuccggagggccccgccgccgc

SEQ ID NO: 3243955 - RNA, 21 nt, Rubella virus
gcggcuugugggggccacgcc

SEQ ID NO: 3243956 - RNA, 14 nt, Rubella virus
ucaccacugaacac

SEQ ID NO: 3243957 - RNA, 20 nt, Rubella virus
agcgccucgcuagugggccc

SEQ ID NO: 3243958 - RNA, 22 nt, Rubella virus
ugcgguggggccuuccccccug

SEQ ID NO: 3243959 - RNA, 15 nt, Rubella virus
cggccugcuggggcu

SEQ ID NO: 3243960 - RNA, 20 nt, Rubella virus
uccccacugaugucucgugc

SEQ ID NO: 3243961 - RNA, 20 nt, Rubella virus
cagccccuugcgcgcgcauc

SEQ ID NO: 3243962 - RNA, 21 nt, Rubella virus
uacaaccugagcgacuggcac

SEQ ID NO: 3243963 - RNA, 13 nt, Rubella virus
ccgccgccacccc

SEQ ID NO: 3243964 - RNA, 15 nt, Rubella virus
ggcucuugcucgcca

SEQ ID NO: 3243965 - RNA, 21 nt, Rubella virus
ucaacccuggcggcagcuacu

SEQ ID NO: 3243966 - RNA, 21 nt, Rubella virus
gaccugcauuucaccaaccug

SEQ ID NO: 3243967 - RNA, 13 nt, Rubella virus
caguacccgccua

SEQ ID NO: 3243968 - RNA, 18 nt, Rubella virus
ggacggccgcugggaccc

SEQ ID NO: 3243969 - RNA, 14 nt, Rubella virus
cagggacuggucca

SEQ ID NO: 3243970 - RNA, 14 nt, Rubella virus
caccuaccucugca

SEQ ID NO: 3243971 - RNA, 17 nt, Rubella virus
gccacccccgccacugc

SEQ ID NO: 3243972 - RNA, 19 nt, Rubella virus
ggccccgauugggccuccc

SEQ ID NO: 3243973 - RNA, 13 nt, Rubella virus
ucgcgggcgccgc

SEQ ID NO: 3243974 - RNA, 12 nt, Rubella virus
cgcagccccccu

SEQ ID NO: 3243975 - RNA, 16 nt, Rubella virus
accccgacgccucuca

SEQ ID NO: 3243976 - RNA, 18 nt, Rubella virus
cgccacugcgccggcccc

SEQ ID NO: 3243977 - RNA, 15 nt, Rubella virus
cccgcaccuguugcu

SEQ ID NO: 3243978 - RNA, 16 nt, Rubella virus
cguggcgcguggccug

SEQ ID NO: 3243979 - RNA, 18 nt, Rubella virus
gcccauugguggcagcuc

SEQ ID NO: 3243980 - RNA, 15 nt, Rubella virus
ccuugccgggcucuu

SEQ ID NO: 3243981 - RNA, 18 nt, Rubella virus
gcgcugauauggcggcac

SEQ ID NO: 3243982 - RNA, 13 nt, Rubella virus
caccaccgcggcg

SEQ ID NO: 3243983 - RNA, 18 nt, Rubella virus
gugcaccuucugggcugu

SEQ ID NO: 3243984 - RNA, 12 nt, Rubella virus
cgacuugcuccc

SEQ ID NO: 3243985 - RNA, 16 nt, Rubella virus
cauccaggcgcccgcu

SEQ ID NO: 3243986 - RNA, 22 nt, Rubella virus
gccggccucaaugacagcugcg

SEQ ID NO: 3243987 - RNA, 17 nt, Rubella virus
ccgcgcgcgccgggcuc

SEQ ID NO: 3243988 - RNA, 13 nt, Rubella virus
gcgccccgagcug

SEQ ID NO: 3243989 - RNA, 12 nt, Rubella virus
cgccgcgccugu

SEQ ID NO: 3243990 - RNA, 15 nt, Rubella virus
gacgcggccugcugg

SEQ ID NO: 3243991 - RNA, 13 nt, Rubella virus
ccgguggggccuc

SEQ ID NO: 3243992 - RNA, 18 nt, Rubella virus
gacgcgcgacuugcuccc

SEQ ID NO: 3243993 - RNA, 15 nt, Rubella virus
auacgcgcuggaccg

SEQ ID NO: 3243994 - RNA, 19 nt, Rubella virus
cugcugcgcaugccagugc

SEQ ID NO: 3243995 - RNA, 23 nt, Rubella virus
gccccgagcuggggccaccgacc

SEQ ID NO: 3243996 - RNA, 19 nt, Rubella virus
gacacagcgacgcggccug

SEQ ID NO: 3243997 - RNA, 15 nt, Rubella virus
ggggccguggccagc

SEQ ID NO: 3243998 - RNA, 21 nt, Rubella virus
ccuccucaacacccccccgcc

SEQ ID NO: 3243999 - RNA, 21 nt, Rubella virus
ugcgcggccucgacggcgaca

SEQ ID NO: 3244000 - RNA, 14 nt, Rubella virus
cccgcaccuguugc

SEQ ID NO: 3244001 - RNA, 18 nt, Rubella virus
cgggcucuugcucgccac

SEQ ID NO: 3244002 - RNA, 21 nt, Rubella virus
uggcgaggaccucggcgccgu

SEQ ID NO: 3244003 - RNA, 14 nt, Rubella virus
cccgagcuggggcc

SEQ ID NO: 3244004 - RNA, 14 nt, Rubella virus
acugccccuggacc

SEQ ID NO: 3244005 - RNA, 18 nt, Rubella virus
cuugugggggccacgcca

SEQ ID NO: 3244006 - RNA, 13 nt, Rubella virus
ugccgcagccccc

SEQ ID NO: 3244007 - RNA, 16 nt, Rubella virus
gacggccgcugggacc

SEQ ID NO: 3244008 - RNA, 18 nt, Rubella virus
gcgugggggcucugcccc

SEQ ID NO: 3244009 - RNA, 23 nt, Rubella virus
gccucgcuagugggcccccgcgc

SEQ ID NO: 3244010 - RNA, 15 nt, Rubella virus
gcgcacgggcagcau

SEQ ID NO: 3244011 - RNA, 21 nt, Rubella virus
acugcgccggcccccugccac

SEQ ID NO: 3244012 - RNA, 16 nt, Rubella virus
aggccacuggagccug

SEQ ID NO: 3244013 - RNA, 16 nt, Rubella virus
cccaguacccgccuac

SEQ ID NO: 3244014 - RNA, 20 nt, Rubella virus
caccgcgcgcgccgggcucc

SEQ ID NO: 3244015 - RNA, 14 nt, Rubella virus
gggcuccagccccg

SEQ ID NO: 3244016 - RNA, 22 nt, Rubella virus
caguucgcccgguggcccugcc

SEQ ID NO: 3244017 - RNA, 13 nt, Rubella virus
aaugacagcugcg

SEQ ID NO: 3244018 - RNA, 22 nt, Rubella virus
cggcacgcgcuggcaccgacug

SEQ ID NO: 3244019 - RNA, 17 nt, Rubella virus
gcgugggggcucugccc

SEQ ID NO: 3244020 - RNA, 15 nt, Rubella virus
aacccgcacuaggcc

SEQ ID NO: 3244021 - RNA, 17 nt, Rubella virus
ugccccccaggccuucc

SEQ ID NO: 3244022 - RNA, 16 nt, Rubella virus
ucaccaaccugggcac

SEQ ID NO: 3244023 - RNA, 14 nt, Rubella virus
augcaaaccgggcg

SEQ ID NO: 3244024 - RNA, 19 nt, Rubella virus
acccgcacuaggccacuag

SEQ ID NO: 3244025 - RNA, 13 nt, Rubella virus
ccgaccgccgccc

SEQ ID NO: 3244026 - RNA, 16 nt, Rubella virus
cugagcgacuggcacc

SEQ ID NO: 3244027 - RNA, 18 nt, Rubella virus
gccacccccgccacugcg

SEQ ID NO: 3244028 - RNA, 19 nt, Rubella virus
cgugacuccggagggcccc

SEQ ID NO: 3244029 - RNA, 20 nt, Rubella virus
cacugcgccggcccccugcc

SEQ ID NO: 3244030 - RNA, 13 nt, Rubella virus
cgcaccuguugcu

SEQ ID NO: 3244031 - RNA, 14 nt, Rubella virus
cucacucugggcgc

SEQ ID NO: 3244032 - RNA, 21 nt, Rubella virus
gcuggaccguacggccaugcu

SEQ ID NO: 3244033 - RNA, 15 nt, Rubella virus
cuaccucugcacugc

SEQ ID NO: 3244034 - RNA, 14 nt, Rubella virus
cgcggccugcuggg

SEQ ID NO: 3244035 - RNA, 15 nt, Rubella virus
uggcaccgacugcug

SEQ ID NO: 3244036 - RNA, 13 nt, Rubella virus
gacagcgccccgc

SEQ ID NO: 3244037 - RNA, 17 nt, Rubella virus
ccuggucgacgccgacg

SEQ ID NO: 3244038 - RNA, 15 nt, Rubella virus
gcggcugcuuugccc

SEQ ID NO: 3244039 - RNA, 20 nt, Rubella virus
ccagccucggcccucuggcu

SEQ ID NO: 3244040 - RNA, 17 nt, Rubella virus
caucgcgggcgccgcca

SEQ ID NO: 3244041 - RNA, 15 nt, Rubella virus
aguucgucaccgccg

SEQ ID NO: 3244042 - RNA, 15 nt, Rubella virus
ccuucguccugcugg

SEQ ID NO: 3244043 - RNA, 17 nt, Rubella virus
gcguguucgcccuugcu

SEQ ID NO: 3244044 - RNA, 18 nt, Rubella virus
ggacugguccagggcccc

SEQ ID NO: 3244045 - RNA, 16 nt, Rubella virus
cguccagcacccucac

SEQ ID NO: 3244046 - RNA, 15 nt, Rubella virus
cuccaaggcggcugg

SEQ ID NO: 3244047 - RNA, 15 nt, Rubella virus
ugucgccgccgcggc

SEQ ID NO: 3244048 - RNA, 20 nt, Rubella virus
acgccagcgacgugcugccc

SEQ ID NO: 3244049 - RNA, 16 nt, Rubella virus
ggccccgccgccgccg

SEQ ID NO: 3244050 - RNA, 11 nt, Rubella virus
ccacaccaccg

SEQ ID NO: 3244051 - RNA, 22 nt, Rubella virus
ggagcacgaccgaccgccgccc

SEQ ID NO: 3244052 - RNA, 13 nt, Rubella virus
gcauuacggccac

SEQ ID NO: 3244053 - RNA, 20 nt, Rubella virus
cucgcggcuugugggggcca

SEQ ID NO: 3244054 - RNA, 23 nt, Rubella virus
cccagccucggcccucuggcucg

SEQ ID NO: 3244055 - RNA, 23 nt, Rubella virus
agcuggccucuuacuucaacccu

SEQ ID NO: 3244056 - RNA, 15 nt, Rubella virus
ccucgaggccacugg

SEQ ID NO: 3244057 - RNA, 23 nt, Rubella virus
ugccacggccccgauugggccuc

SEQ ID NO: 3244058 - RNA, 13 nt, Rubella virus
cgcguggccugcg

SEQ ID NO: 3244059 - RNA, 14 nt, Rubella virus
ucaccaaccugggc

SEQ ID NO: 3244060 - RNA, 15 nt, Rubella virus
ccgcaccuguugcug

SEQ ID NO: 3244061 - RNA, 17 nt, Rubella virus
ugugucggagacccggc

SEQ ID NO: 3244062 - RNA, 17 nt, Rubella virus
ucaauggcgaggaccuc

SEQ ID NO: 3244063 - RNA, 11 nt, Rubella virus
gaccugggcgg

SEQ ID NO: 3244064 - RNA, 20 nt, Rubella virus
cacauggacuucuggugugu

SEQ ID NO: 3244065 - RNA, 14 nt, Rubella virus
cggcgacagcgccc

SEQ ID NO: 3244066 - RNA, 16 nt, Rubella virus
gccagcgacgugcugc

SEQ ID NO: 3244067 - RNA, 19 nt, Rubella virus
ccggagggccccgccgccg

SEQ ID NO: 3244068 - RNA, 15 nt, Rubella virus
ugcgcacugccccug

SEQ ID NO: 3244069 - RNA, 13 nt, Rubella virus
ccccugccacgcc

SEQ ID NO: 3244070 - RNA, 15 nt, Rubella virus
gcuacguccagcacc

SEQ ID NO: 3244071 - RNA, 22 nt, Rubella virus
gccaccaccaccaucagcugcc

SEQ ID NO: 3244072 - RNA, 16 nt, Rubella virus
cagcucacucugggcg

SEQ ID NO: 3244073 - RNA, 17 nt, Rubella virus
ccgccacaacagccuca

SEQ ID NO: 3244074 - RNA, 24 nt, Rubella virus
gagggcuugggggccuggguaccc

SEQ ID NO: 3244075 - RNA, 18 nt, Rubella virus
gucggagacccggcagac

SEQ ID NO: 3244076 - RNA, 21 nt, Rubella virus
ugcccgaguggauccacgccc

SEQ ID NO: 3244077 - RNA, 19 nt, Rubella virus
gacccggcgaggugugggu

SEQ ID NO: 3244078 - RNA, 16 nt, Rubella virus
guggcgcguggccugc

SEQ ID NO: 3244079 - RNA, 16 nt, Rubella virus
ccucgaggccacugga

SEQ ID NO: 3244080 - RNA, 15 nt, Rubella virus
agccaucgcgggcgc

SEQ ID NO: 3244081 - RNA, 18 nt, Rubella virus
ccugcagggguacaaccc

SEQ ID NO: 3244082 - RNA, 18 nt, Rubella virus
accugagcgacuggcacc

SEQ ID NO: 3244083 - RNA, 13 nt, Rubella virus
caccuucugggcu

SEQ ID NO: 3244084 - RNA, 14 nt, Rubella virus
ccugcgcccgccuc

SEQ ID NO: 3244085 - RNA, 19 nt, Rubella virus
ccgagcuggggccaccgac

SEQ ID NO: 3244086 - RNA, 16 nt, Rubella virus
caccgaggcacccacc

SEQ ID NO: 3244087 - RNA, 15 nt, Rubella virus
cggcagaccugggcg

SEQ ID NO: 3244088 - RNA, 16 nt, Rubella virus
cccugcugcgcacugc

SEQ ID NO: 3244089 - RNA, 19 nt, Rubella virus
ugccgcagccccccugugc

SEQ ID NO: 3244090 - RNA, 13 nt, Rubella virus
ccuugccgggcuc

SEQ ID NO: 3244091 - RNA, 15 nt, Rubella virus
cuggcaccagggcac

SEQ ID NO: 3244092 - RNA, 23 nt, Rubella virus
gcgcccgccucuccacgacccug

SEQ ID NO: 3244093 - RNA, 22 nt, Rubella virus
cuggcggguacgcgcagcuggc

SEQ ID NO: 3244094 - RNA, 13 nt, Rubella virus
agacccgcucggc

SEQ ID NO: 3244095 - RNA, 16 nt, Rubella virus
gcauccaccgggcccc

SEQ ID NO: 3244096 - RNA, 13 nt, Rubella virus
gccugcuggggcu

SEQ ID NO: 3244097 - RNA, 13 nt, Rubella virus
ggcacgacggcca

SEQ ID NO: 3244098 - RNA, 17 nt, Rubella virus
gccggcccccugccacg

SEQ ID NO: 3244099 - RNA, 16 nt, Rubella virus
gccucaacccccgcgc

SEQ ID NO: 3244100 - RNA, 18 nt, Rubella virus
gccucaaugacagcugcg

SEQ ID NO: 3244101 - RNA, 16 nt, Rubella virus
gcugcgcacugccccu

SEQ ID NO: 3244102 - RNA, 16 nt, Rubella virus
gauccccgcaccuguu

SEQ ID NO: 3244103 - RNA, 22 nt, Rubella virus
ggccuggguacccgcagccccu

SEQ ID NO: 3244104 - RNA, 23 nt, Rubella virus
aguucgcccgguggcccugccac

SEQ ID NO: 3244105 - RNA, 19 nt, Rubella virus
cggcuggacuugccgcggc

SEQ ID NO: 3244106 - RNA, 13 nt, Rubella virus
gaccccggggacc

SEQ ID NO: 3244107 - RNA, 14 nt, Rubella virus
ccucucaccaccgc

SEQ ID NO: 3244108 - RNA, 14 nt, Rubella virus
cagccccccugugc

SEQ ID NO: 3244109 - RNA, 14 nt, Rubella virus
gguacgcgcagcug

SEQ ID NO: 3244110 - RNA, 15 nt, Rubella virus
uggcagcucacucug

SEQ ID NO: 3244111 - RNA, 18 nt, Rubella virus
gcggccuucguccugcug

SEQ ID NO: 3244112 - RNA, 13 nt, Rubella virus
aauugccacggcc

SEQ ID NO: 3244113 - RNA, 15 nt, Rubella virus
cgcugccgcagcccc

SEQ ID NO: 3244114 - RNA, 18 nt, Rubella virus
ccucggcccucuggcucg

SEQ ID NO: 3244115 - RNA, 15 nt, Rubella virus
cgcccccggcugcgc

SEQ ID NO: 3244116 - RNA, 14 nt, Rubella virus
uacggccaccacca

SEQ ID NO: 3244117 - RNA, 19 nt, Rubella virus
gacggcggcugcuuugccc

SEQ ID NO: 3244118 - RNA, 11 nt, Rubella virus
agagcgccccc

SEQ ID NO: 3244119 - RNA, 19 nt, Rubella virus
gcuggcaccgacugcugcg

SEQ ID NO: 3244120 - RNA, 14 nt, Rubella virus
ccugagcgacuggc

SEQ ID NO: 3244121 - RNA, 19 nt, Rubella virus
ccguggcgcguggccugcg

SEQ ID NO: 3244122 - RNA, 23 nt, Rubella virus
ccugcuggggcuuccccaccgac

SEQ ID NO: 3244123 - RNA, 19 nt, Rubella virus
ugcgcccucccacucgcug

SEQ ID NO: 3244124 - RNA, 15 nt, Rubella virus
acgcgcuggcaccga

SEQ ID NO: 3244125 - RNA, 18 nt, Rubella virus
caacgccauuccccugac

SEQ ID NO: 3244126 - RNA, 16 nt, Rubella virus
cuugaucacgcccucg

SEQ ID NO: 3244127 - RNA, 14 nt, Rubella virus
gccguuggcaccgc

SEQ ID NO: 3244128 - RNA, 13 nt, Rubella virus
cagggccccgccc

SEQ ID NO: 3244129 - RNA, 15 nt, Rubella virus
acaaucaaccugccg

SEQ ID NO: 3244130 - RNA, 15 nt, Rubella virus
ggaccucggcgccgu

SEQ ID NO: 3244131 - RNA, 18 nt, Rubella virus
auuucaccaaccugggca

SEQ ID NO: 3244132 - RNA, 17 nt, Rubella virus
cuggucccguggguccu

SEQ ID NO: 3244133 - RNA, 19 nt, Rubella virus
ccuggcauccaccgggccc

SEQ ID NO: 3244134 - RNA, 19 nt, Rubella virus
gcccgaauugccacggccc

SEQ ID NO: 3244135 - RNA, 23 nt, Rubella virus
ugcucgcggcuugugggggccac

SEQ ID NO: 3244136 - RNA, 19 nt, Rubella virus
gaccucggcgccguccccc

SEQ ID NO: 3244137 - RNA, 14 nt, Rubella virus
cgcacuaggccacu

SEQ ID NO: 3244138 - RNA, 14 nt, Rubella virus
acgcugccgcagcc

SEQ ID NO: 3244139 - RNA, 19 nt, Rubella virus
ugcuggggcuuccccaccg

SEQ ID NO: 3244140 - RNA, 20 nt, Rubella virus
ggacacagcgacgcggccug

SEQ ID NO: 3244141 - RNA, 21 nt, Rubella virus
aggcuuucaccuaccucugca

SEQ ID NO: 3244142 - RNA, 16 nt, Rubella virus
ggccacuggagccugc

SEQ ID NO: 3244143 - RNA, 14 nt, Rubella virus
ccgcacuaggccac

SEQ ID NO: 3244144 - RNA, 14 nt, Rubella virus
auacgcgcuggacc

SEQ ID NO: 3244145 - RNA, 21 nt, Rubella virus
uccccagccucggcccucugg

SEQ ID NO: 3244146 - RNA, 18 nt, Rubella virus
gcugcccggccacuggcu

SEQ ID NO: 3244147 - RNA, 19 nt, Rubella virus
caaugugcgugugaccggg

SEQ ID NO: 3244148 - RNA, 16 nt, Rubella virus
gcauccgcuucggugc

SEQ ID NO: 3244149 - RNA, 18 nt, Rubella virus
gcgugcaccuucugggcu

SEQ ID NO: 3244150 - RNA, 20 nt, Rubella virus
cacgacccugacaccgaggc

SEQ ID NO: 3244151 - RNA, 20 nt, Rubella virus
uugaaccugccuucggacac

SEQ ID NO: 3244152 - RNA, 16 nt, Rubella virus
agcucacucugggcgc

SEQ ID NO: 3244153 - RNA, 21 nt, Rubella virus
gcauugagacccgcucggcgc

SEQ ID NO: 3244154 - RNA, 17 nt, Rubella virus
gcacacacaccacugcu

SEQ ID NO: 3244155 - RNA, 22 nt, Rubella virus
ugcugugucggagacccggcag

SEQ ID NO: 3244156 - RNA, 16 nt, Rubella virus
gccaucauggcggcac

SEQ ID NO: 3244157 - RNA, 14 nt, Rubella virus
gcccgguggcccug

SEQ ID NO: 3244158 - RNA, 22 nt, Rubella virus
ggcaccgcgcgcgccgggcucc

SEQ ID NO: 3244159 - RNA, 16 nt, Rubella virus
ugccccuggacccggc

SEQ ID NO: 3244160 - RNA, 21 nt, Rubella virus
cacucgacgaggacggccgcu

SEQ ID NO: 3244161 - RNA, 22 nt, Rubella virus
cacaccaccagcgaccccuggc

SEQ ID NO: 3244162 - RNA, 16 nt, Rubella virus
ccacggcgcugacacc

SEQ ID NO: 3244163 - RNA, 22 nt, Rubella virus
uagauccccgcaccuguugcug

SEQ ID NO: 3244164 - RNA, 22 nt, Rubella virus
ggcaccuugcgcgucggccagc

SEQ ID NO: 3244165 - RNA, 16 nt, Rubella virus
uuucaccuaccucugc

SEQ ID NO: 3244166 - RNA, 13 nt, Rubella virus
cugacugcucgcg

SEQ ID NO: 3244167 - RNA, 15 nt, Rubella virus
agcucacucugggcg

SEQ ID NO: 3244168 - RNA, 15 nt, Rubella virus
caacccuggcggcag

SEQ ID NO: 3244169 - RNA, 15 nt, Rubella virus
gccccgagcuggggc

SEQ ID NO: 3244170 - RNA, 23 nt, Rubella virus
ugacuccggagggccccgccgcc

SEQ ID NO: 3244171 - RNA, 19 nt, Rubella virus
auuuauggugugccgccgc

SEQ ID NO: 3244172 - RNA, 13 nt, Rubella virus
accagggcacuca

SEQ ID NO: 3244173 - RNA, 18 nt, Rubella virus
gcucugccccgcgccccg

SEQ ID NO: 3244174 - RNA, 21 nt, Rubella virus
gcugggguugcuacaaccuga

SEQ ID NO: 3244175 - RNA, 16 nt, Rubella virus
gcccaguacccgccua

SEQ ID NO: 3244176 - RNA, 18 nt, Rubella virus
cugccccgcgccccgagc

SEQ ID NO: 3244177 - RNA, 11 nt, Rubella virus
cgcgcagcugg

SEQ ID NO: 3244178 - RNA, 14 nt, Rubella virus
acgaccgccgccac

SEQ ID NO: 3244179 - RNA, 15 nt, Rubella virus
cggccgcugggaccc

SEQ ID NO: 3244180 - RNA, 15 nt, Rubella virus
ugguggaaggccuug

SEQ ID NO: 3244181 - RNA, 13 nt, Rubella virus
gcgccugcgccac

SEQ ID NO: 3244182 - RNA, 18 nt, Rubella virus
agcguguucgcccuugcu

SEQ ID NO: 3244183 - RNA, 16 nt, Rubella virus
ggcgccguccccccug

SEQ ID NO: 3244184 - RNA, 22 nt, Rubella virus
accccuggcauccaccgggccc

SEQ ID NO: 3244185 - RNA, 16 nt, Rubella virus
ggcagcauuacggcca

SEQ ID NO: 3244186 - RNA, 16 nt, Rubella virus
cgccacucaagcaccu

SEQ ID NO: 3244187 - RNA, 14 nt, Rubella virus
ggccuuccuugccg

SEQ ID NO: 3244188 - RNA, 18 nt, Rubella virus
agcccgaauugccacggc

SEQ ID NO: 3244189 - RNA, 14 nt, Rubella virus
ugcgccugcgccac

SEQ ID NO: 3244190 - RNA, 21 nt, Rubella virus
uaccagugcgguacccccgcg

SEQ ID NO: 3244191 - RNA, 12 nt, Rubella virus
gugggggcucug

SEQ ID NO: 3244192 - RNA, 15 nt, Rubella virus
ugcaccuucugggcu

SEQ ID NO: 3244193 - RNA, 16 nt, Rubella virus
cgcguggccugcgccc

SEQ ID NO: 3244194 - RNA, 17 nt, Rubella virus
ggcggagugggcugcug

SEQ ID NO: 3244195 - RNA, 14 nt, Rubella virus
ccccggcugcgccu

SEQ ID NO: 3244196 - RNA, 21 nt, Rubella virus
cgcggccuucguccugcuggu

SEQ ID NO: 3244197 - RNA, 21 nt, Rubella virus
cacagcgacgcggccugcugg

SEQ ID NO: 3244198 - RNA, 19 nt, Rubella virus
ggguacaacccccccgccu

SEQ ID NO: 3244199 - RNA, 15 nt, Rubella virus
ggccgaugcgccugc

SEQ ID NO: 3244200 - RNA, 17 nt, Rubella virus
ggccaucauggcggcac

SEQ ID NO: 3244201 - RNA, 21 nt, Rubella virus
agauccccgcaccuguugcug

SEQ ID NO: 3244202 - RNA, 17 nt, Rubella virus
gacagcugcggcggcuu

SEQ ID NO: 3244203 - RNA, 13 nt, Rubella virus
cucacucugggcg

SEQ ID NO: 3244204 - RNA, 22 nt, Rubella virus
gcggcugggguugcuacaaccu

SEQ ID NO: 3244205 - RNA, 15 nt, Rubella virus
accaagucagcugcg

SEQ ID NO: 3244206 - RNA, 15 nt, Rubella virus
acuggcaccagggca

SEQ ID NO: 3244207 - RNA, 17 nt, Rubella virus
gucccgguggggccucg

SEQ ID NO: 3244208 - RNA, 16 nt, Rubella virus
cgacgcggccugcugg

SEQ ID NO: 3244209 - RNA, 13 nt, Rubella virus
auccaccgggccc

SEQ ID NO: 3244210 - RNA, 16 nt, Rubella virus
caacucuccguugccg

SEQ ID NO: 3244211 - RNA, 19 nt, Rubella virus
uccgcuucggugcccccca

SEQ ID NO: 3244212 - RNA, 21 nt, Rubella virus
ccugcugcgcacugccccugg

SEQ ID NO: 3244213 - RNA, 13 nt, Rubella virus
gaaggccuugccc

SEQ ID NO: 3244214 - RNA, 22 nt, Rubella virus
ugcugcccggccacuggcucca

SEQ ID NO: 3244215 - RNA, 10 nt, Rubella virus
uccaccaccg

SEQ ID NO: 3244216 - RNA, 13 nt, Rubella virus
acaacccccccgc

SEQ ID NO: 3244217 - RNA, 19 nt, Rubella virus
acgaccgaccgccgcccgc

SEQ ID NO: 3244218 - RNA, 17 nt, Rubella virus
gcuagcuacguccagca

SEQ ID NO: 3244219 - RNA, 21 nt, Rubella virus
cacguuagcgccaccccgcaa

SEQ ID NO: 3244220 - RNA, 20 nt, Rubella virus
acccuugcgggcccgagccg

SEQ ID NO: 3244221 - RNA, 19 nt, Rubella virus
ugcgccacggcgcugacac

SEQ ID NO: 3244222 - RNA, 17 nt, Rubella virus
gccaucauggcggcacc

SEQ ID NO: 3244223 - RNA, 16 nt, Rubella virus
ugagcgacuggcacca

SEQ ID NO: 3244224 - RNA, 13 nt, Rubella virus
gcccucaccgcgg

SEQ ID NO: 3244225 - RNA, 18 nt, Rubella virus
caauggcgaggaccucgg

SEQ ID NO: 3244226 - RNA, 16 nt, Rubella virus
gugcaccuucugggcu

SEQ ID NO: 3244227 - RNA, 16 nt, Rubella virus
gccgcggcgugcccgc

SEQ ID NO: 3244228 - RNA, 15 nt, Rubella virus
cccggcagaccuggg

SEQ ID NO: 3244229 - RNA, 21 nt, Rubella virus
cccugcgcucauguacaaccc

SEQ ID NO: 3244230 - RNA, 11 nt, Rubella virus
ccacaccacca

SEQ ID NO: 3244231 - RNA, 11 nt, Rubella virus
cguccugcugg

SEQ ID NO: 3244232 - RNA, 13 nt, Rubella virus
cagcgacgcggcc

SEQ ID NO: 3244233 - RNA, 15 nt, Rubella virus
ccacgaccgccgcca

SEQ ID NO: 3244234 - RNA, 13 nt, Rubella virus
aaacccgcacuag

SEQ ID NO: 3244235 - RNA, 19 nt, Rubella virus
gccuggguacccgcagccc

SEQ ID NO: 3244236 - RNA, 22 nt, Rubella virus
cugccacgcacguuagcgccac

SEQ ID NO: 3244237 - RNA, 22 nt, Rubella virus
ccugcgugaccucguggcuuug

SEQ ID NO: 3244238 - RNA, 20 nt, Rubella virus
acgccugucauaggcucuca

SEQ ID NO: 3244239 - RNA, 13 nt, Rubella virus
gccguggccagcg

SEQ ID NO: 3244240 - RNA, 17 nt, Rubella virus
cgggcccgagccgcccg

SEQ ID NO: 3244241 - RNA, 13 nt, Rubella virus
guccccccuggga

SEQ ID NO: 3244242 - RNA, 12 nt, Rubella virus
ugucgccgccgc

SEQ ID NO: 3244243 - RNA, 16 nt, Rubella virus
gcacuaggccacuaga

SEQ ID NO: 3244244 - RNA, 17 nt, Rubella virus
acgccgacgacccccug

SEQ ID NO: 3244245 - RNA, 16 nt, Rubella virus
acgacccccugcugcg

SEQ ID NO: 3244246 - RNA, 14 nt, Rubella virus
cuccacgacccuga

SEQ ID NO: 3244247 - RNA, 17 nt, Rubella virus
ccagccccgcgcugaua

SEQ ID NO: 3244248 - RNA, 17 nt, Rubella virus
accgcgcgcgccgggcu

SEQ ID NO: 3244249 - RNA, 15 nt, Rubella virus
cagcgacgugcugcc

SEQ ID NO: 3244250 - RNA, 15 nt, Rubella virus
cuccggagggccccg

SEQ ID NO: 3244251 - RNA, 17 nt, Rubella virus
accgaggcacccaccga

SEQ ID NO: 3244252 - RNA, 16 nt, Rubella virus
acccccugcugcgcac

SEQ ID NO: 3244253 - RNA, 22 nt, Rubella virus
uccccagccucggcccucuggc

SEQ ID NO: 3244254 - RNA, 13 nt, Rubella virus
ggcuccagccccg

SEQ ID NO: 3244255 - RNA, 16 nt, Rubella virus
ccgcgucggcggcacg

SEQ ID NO: 3244256 - RNA, 17 nt, Rubella virus
cagcauuacggccacca

SEQ ID NO: 3244257 - RNA, 16 nt, Rubella virus
cagacuccggccccga

SEQ ID NO: 3244258 - RNA, 17 nt, Rubella virus
gcuucuugucugggugc

SEQ ID NO: 3244259 - RNA, 14 nt, Rubella virus
uggugagccccaug

SEQ ID NO: 3244260 - RNA, 15 nt, Rubella virus
cguguucgcccuugc

SEQ ID NO: 3244261 - RNA, 16 nt, Rubella virus
cggcacgcgcuggcac

SEQ ID NO: 3244262 - RNA, 14 nt, Rubella virus
cgcugggacccugc

SEQ ID NO: 3244263 - RNA, 19 nt, Rubella virus
acccgguuuggcugcgcua

SEQ ID NO: 3244264 - RNA, 20 nt, Rubella virus
ugccuucggacacagcgacg

SEQ ID NO: 3244265 - RNA, 21 nt, Rubella virus
gccucuuacuucaacccuggc

SEQ ID NO: 3244266 - RNA, 14 nt, Rubella virus
ugggacgcgcgacu

SEQ ID NO: 3244267 - RNA, 17 nt, Rubella virus
gagaccaggaccgucug

SEQ ID NO: 3244268 - RNA, 17 nt, Rubella virus
uggugagccccauggga

SEQ ID NO: 3244269 - RNA, 17 nt, Rubella virus
gucgccgccgcggcgcc

SEQ ID NO: 3244270 - RNA, 21 nt, Rubella virus
cugcgcuaugcgguggggccu

SEQ ID NO: 3244271 - RNA, 20 nt, Rubella virus
ggcuccaaggcggcuggggu

SEQ ID NO: 3244272 - RNA, 15 nt, Rubella virus
gacccggcagaccug

SEQ ID NO: 3244273 - RNA, 23 nt, Rubella virus
cgaggcacccaccgaggccugcg

SEQ ID NO: 3244274 - RNA, 13 nt, Rubella virus
ccccgccacugcg

SEQ ID NO: 3244275 - RNA, 13 nt, Rubella virus
gcgcgcgugcacc

SEQ ID NO: 3244276 - RNA, 20 nt, Rubella virus
acuagauccccgcaccuguu

SEQ ID NO: 3244277 - RNA, 22 nt, Rubella virus
cugggcgccauuugcgcccucc

SEQ ID NO: 3244278 - RNA, 16 nt, Rubella virus
accaccaucagcugcc

SEQ ID NO: 3244279 - RNA, 16 nt, Rubella virus
uaccaagucagcugcg

SEQ ID NO: 3244280 - RNA, 22 nt, Rubella virus
ccauccuuggcgcauccgcuuc

SEQ ID NO: 3244281 - RNA, 19 nt, Rubella virus
ccacagcgaacgcgcuguc

SEQ ID NO: 3244282 - RNA, 17 nt, Rubella virus
cagcgacgcggccugcu

SEQ ID NO: 3244283 - RNA, 14 nt, Rubella virus
gggccccgccgccg

SEQ ID NO: 3244284 - RNA, 16 nt, Rubella virus
ccuaccucugcacugc

SEQ ID NO: 3244285 - RNA, 20 nt, Rubella virus
cgcauccgcuucggugcccc

SEQ ID NO: 3244286 - RNA, 16 nt, Rubella virus
acccgcacuaggccac

SEQ ID NO: 3244287 - RNA, 14 nt, Rubella virus
ggcccucuggcucg

SEQ ID NO: 3244288 - RNA, 14 nt, Rubella virus
accgcccgccccga

SEQ ID NO: 3244289 - RNA, 14 nt, Rubella virus
ggcgcguggccugc

SEQ ID NO: 3244290 - RNA, 14 nt, Rubella virus
cagugcgcggccuc

SEQ ID NO: 3244291 - RNA, 21 nt, Rubella virus
accuccuacgcugccgcagcc

SEQ ID NO: 3244292 - RNA, 15 nt, Rubella virus
cccgccacugcgccg

SEQ ID NO: 3244293 - RNA, 17 nt, Rubella virus
cggagggccccgccgcc

SEQ ID NO: 3244294 - RNA, 19 nt, Rubella virus
agcagucccgguggggccu

SEQ ID NO: 3244295 - RNA, 21 nt, Rubella virus
gcgccccgagcuggggccacc

SEQ ID NO: 3244296 - RNA, 17 nt, Rubella virus
cuccaaggcggcugggg

SEQ ID NO: 3244297 - RNA, 22 nt, Rubella virus
aggccacuagauccccgcaccu

SEQ ID NO: 3244298 - RNA, 22 nt, Rubella virus
cgaggccugcgugaccucgugg

SEQ ID NO: 3244299 - RNA, 13 nt, Rubella virus
caucgaccccgcc

SEQ ID NO: 3244300 - RNA, 18 nt, Rubella virus
acccggcagaccugggcg

SEQ ID NO: 3244301 - RNA, 20 nt, Rubella virus
cgccccgaagacggcuggac

SEQ ID NO: 3244302 - RNA, 14 nt, Rubella virus
auggcggcaccucc

SEQ ID NO: 3244303 - RNA, 22 nt, Rubella virus
acucgacgaggacggccgcugg

SEQ ID NO: 3244304 - RNA, 20 nt, Rubella virus
accugcauuucaccaaccug

SEQ ID NO: 3244305 - RNA, 12 nt, Rubella virus
gacggcgacagc

SEQ ID NO: 3244306 - RNA, 13 nt, Rubella virus
gcgucggcggcac

SEQ ID NO: 3244307 - RNA, 16 nt, Rubella virus
gcgguggggccuuccc

SEQ ID NO: 3244308 - RNA, 15 nt, Rubella virus
gccagcgcagggacu

SEQ ID NO: 3244309 - RNA, 15 nt, Rubella virus
ggcggcuucuugucu

SEQ ID NO: 3244310 - RNA, 16 nt, Rubella virus
cgggcacgacggccau

SEQ ID NO: 3244311 - RNA, 22 nt, Rubella virus
gcgcccgccucuccacgacccu

SEQ ID NO: 3244312 - RNA, 19 nt, Rubella virus
cgcggcuugugggggccac

SEQ ID NO: 3244313 - RNA, 17 nt, Rubella virus
cccugcugcgcacugcc

SEQ ID NO: 3244314 - RNA, 19 nt, Rubella virus
gacugguccagggccccgc

SEQ ID NO: 3244315 - RNA, 16 nt, Rubella virus
cgcagggacuggucca

SEQ ID NO: 3244316 - RNA, 14 nt, Rubella virus
cccggggaccuggu

SEQ ID NO: 3244317 - RNA, 18 nt, Rubella virus
gcugccgcagccccccug

SEQ ID NO: 3244318 - RNA, 19 nt, Rubella virus
cggccugcuggggcuuccc

SEQ ID NO: 3244319 - RNA, 19 nt, Rubella virus
gcccacaccaccagcgacc

SEQ ID NO: 3244320 - RNA, 21 nt, Rubella virus
cgcgccccgagcuggggccac

SEQ ID NO: 3244321 - RNA, 18 nt, Rubella virus
acugcaccggggugcgcc

SEQ ID NO: 3244322 - RNA, 20 nt, Rubella virus
uccgcuucggugccccccag

SEQ ID NO: 3244323 - RNA, 20 nt, Rubella virus
gccgugacuccggagggccc

SEQ ID NO: 3244324 - RNA, 17 nt, Rubella virus
cuacccgguuuggcugc

SEQ ID NO: 3244325 - RNA, 17 nt, Rubella virus
uucaccaaccugggcac

SEQ ID NO: 3244326 - RNA, 14 nt, Rubella virus
gccccgcgccccga

SEQ ID NO: 3244327 - RNA, 12 nt, Rubella virus
gcucugccccgc

SEQ ID NO: 3244328 - RNA, 17 nt, Rubella virus
ugcuccccagccucggc

SEQ ID NO: 3244329 - RNA, 19 nt, Rubella virus
gccgcugggacccugcgcu

SEQ ID NO: 3244330 - RNA, 22 nt, Rubella virus
cgugggggcucugccccgcgcc

SEQ ID NO: 3244331 - RNA, 22 nt, Rubella virus
caccgaggcacccaccgaggcc

SEQ ID NO: 3244332 - RNA, 18 nt, Rubella virus
acccaccgaggccugcgu

SEQ ID NO: 3244333 - RNA, 17 nt, Rubella virus
gcugcccggccacuggc

SEQ ID NO: 3244334 - RNA, 17 nt, Rubella virus
agcuacguccagcaccc

SEQ ID NO: 3244335 - RNA, 16 nt, Rubella virus
acggccaccaccacca

SEQ ID NO: 3244336 - RNA, 18 nt, Rubella virus
uccggagggccccgccgc

SEQ ID NO: 3244337 - RNA, 19 nt, Rubella virus
ccgccgcggcgccgccgcc

SEQ ID NO: 3244338 - RNA, 20 nt, Rubella virus
cacuagauccccgcaccugu

SEQ ID NO: 3244339 - RNA, 15 nt, Rubella virus
auccacgcccacacc

SEQ ID NO: 3244340 - RNA, 16 nt, Rubella virus
ccucaaugacagcugc

SEQ ID NO: 3244341 - RNA, 16 nt, Rubella virus
cuuccccccugggaac

SEQ ID NO: 3244342 - RNA, 19 nt, Rubella virus
gcacgcgcuggcaccgacu

SEQ ID NO: 3244343 - RNA, 22 nt, Rubella virus
cccgcccuaccaagucagcugc

SEQ ID NO: 3244344 - RNA, 20 nt, Rubella virus
cgcccgccucuccacgaccc

SEQ ID NO: 3244345 - RNA, 22 nt, Rubella virus
ccgcgcgaaacccgcacuaggc

SEQ ID NO: 3244346 - RNA, 20 nt, Rubella virus
gacuuccgcgucggcggcac

SEQ ID NO: 3244347 - RNA, 20 nt, Rubella virus
cgggccgaugcgccugcgcc

SEQ ID NO: 3244348 - RNA, 16 nt, Rubella virus
uugaucacgcccucgc

SEQ ID NO: 3244349 - RNA, 22 nt, Rubella virus
ggcggcaccuccuacgcugccg

SEQ ID NO: 3244350 - RNA, 22 nt, Rubella virus
guuccucgggcacgacggccau

SEQ ID NO: 3244351 - RNA, 18 nt, Rubella virus
ggcacccaccgaggccug

SEQ ID NO: 3244352 - RNA, 19 nt, Rubella virus
cgcgacuugcuccccagcc

SEQ ID NO: 3244353 - RNA, 21 nt, Rubella virus
cggccgcugggacccugcgcu

SEQ ID NO: 3244354 - RNA, 20 nt, Rubella virus
gcgugcccgcccauccaggc

SEQ ID NO: 3244355 - RNA, 15 nt, Rubella virus
acuugcuccccagcc

SEQ ID NO: 3244356 - RNA, 15 nt, Rubella virus
gccuacuccucuggc

SEQ ID NO: 3244357 - RNA, 20 nt, Rubella virus
gcgggcuguccaccaccgcc

SEQ ID NO: 3244358 - RNA, 20 nt, Rubella virus
ugucggagacccggcagacc

SEQ ID NO: 3244359 - RNA, 16 nt, Rubella virus
cauccaccgggccccu

SEQ ID NO: 3244360 - RNA, 13 nt, Rubella virus
cgacgugcugccc

SEQ ID NO: 3244361 - RNA, 21 nt, Rubella virus
guggcagcucacucugggcgc

SEQ ID NO: 3244362 - RNA, 14 nt, Rubella virus
ccaccaucagcugc

SEQ ID NO: 3244363 - RNA, 21 nt, Rubella virus
cugggcggagugggcugcugc

SEQ ID NO: 3244364 - RNA, 23 nt, Rubella virus
aaugcccgaguggauccacgccc

SEQ ID NO: 3244365 - RNA, 16 nt, Rubella virus
cccgcacuaggccacu

SEQ ID NO: 3244366 - RNA, 17 nt, Rubella virus
ccgaugcgccugcgcca

SEQ ID NO: 3244367 - RNA, 12 nt, Rubella virus
cgccgccacccc

SEQ ID NO: 3244368 - RNA, 20 nt, Rubella virus
agagcgcccccggcugcgcc

SEQ ID NO: 3244369 - RNA, 15 nt, Rubella virus
acugccccuggaccc

SEQ ID NO: 3244370 - RNA, 13 nt, Rubella virus
ggcgcguggccug

SEQ ID NO: 3244371 - RNA, 12 nt, Rubella virus
cgcugggacccu

SEQ ID NO: 3244372 - RNA, 15 nt, Rubella virus
agcauuacggccacc

SEQ ID NO: 3244373 - RNA, 16 nt, Rubella virus
cuucccccccacacca

SEQ ID NO: 3244374 - RNA, 18 nt, Rubella virus
ggcagcauuacggccacc

SEQ ID NO: 3244375 - RNA, 22 nt, Rubella virus
accugcauuucaccaaccuggg

SEQ ID NO: 3244376 - RNA, 16 nt, Rubella virus
gccccgccccccccgg

SEQ ID NO: 3244377 - RNA, 14 nt, Rubella virus
cucggcccucuggc

SEQ ID NO: 3244378 - RNA, 12 nt, Rubella virus
caggucccgccc

SEQ ID NO: 3244379 - RNA, 13 nt, Rubella virus
cgcagggacuggu

SEQ ID NO: 3244380 - RNA, 20 nt, Rubella virus
uggguacccgcagccccuug

SEQ ID NO: 3244381 - RNA, 19 nt, Rubella virus
ccgcugggacccugcgcuc

SEQ ID NO: 3244382 - RNA, 12 nt, Rubella virus
cuguugcuguau

SEQ ID NO: 3244383 - RNA, 12 nt, Rubella virus
guccagggcccc

SEQ ID NO: 3244384 - RNA, 15 nt, Rubella virus
caggcgcccgcugcc

SEQ ID NO: 3244385 - RNA, 17 nt, Rubella virus
gcucgcggcuugugggg

SEQ ID NO: 3244386 - RNA, 13 nt, Rubella virus
ucacucugggcgc

SEQ ID NO: 3244387 - RNA, 17 nt, Rubella virus
cugucaacgccuacucc

SEQ ID NO: 3244388 - RNA, 21 nt, Rubella virus
agcgccucgcuagugggcccc

SEQ ID NO: 3244389 - RNA, 15 nt, Rubella virus
cgccugcgccacggc

SEQ ID NO: 3244390 - RNA, 15 nt, Rubella virus
gcacugccccuggac

SEQ ID NO: 3244391 - RNA, 22 nt, Rubella virus
agcgcccccggcugcgccuggu

SEQ ID NO: 3244392 - RNA, 12 nt, Rubella virus
gaugucucgugc

SEQ ID NO: 3244393 - RNA, 22 nt, Rubella virus
ucgacgaggacggccgcuggga

SEQ ID NO: 3244394 - RNA, 20 nt, Rubella virus
cagcgacgugcugcccggcc

SEQ ID NO: 3244395 - RNA, 12 nt, Rubella virus
ugccgggcucuu

SEQ ID NO: 3244396 - RNA, 23 nt, Rubella virus
cgggagcccgaauugccacggcc

SEQ ID NO: 3244397 - RNA, 23 nt, Rubella virus
cgcucggcgcgccauccuuggcg

SEQ ID NO: 3244398 - RNA, 17 nt, Rubella virus
gacgacccccugcugcg

SEQ ID NO: 3244399 - RNA, 23 nt, Rubella virus
cagggguacaacccccccgccua

SEQ ID NO: 3244400 - RNA, 23 nt, Rubella virus
ucuggcggguacgcgcagcuggc

SEQ ID NO: 3244401 - RNA, 19 nt, Rubella virus
cguggccugcgcccgccuc

SEQ ID NO: 3244402 - RNA, 20 nt, Rubella virus
ccgcgccccgagcuggggcc

SEQ ID NO: 3244403 - RNA, 19 nt, Rubella virus
gcuucccccccacaccacc

SEQ ID NO: 3244404 - RNA, 16 nt, Rubella virus
gcgccgggcuccagcc

SEQ ID NO: 3244405 - RNA, 22 nt, Rubella virus
cugcuuugccccaugggaccuc

SEQ ID NO: 3244406 - RNA, 15 nt, Rubella virus
cagagcgcccccggc

SEQ ID NO: 3244407 - RNA, 19 nt, Rubella virus
cgugggggcucugccccgc

SEQ ID NO: 3244408 - RNA, 20 nt, Rubella virus
cucuggcggguacgcgcagc

SEQ ID NO: 3244409 - RNA, 16 nt, Rubella virus
ggcaccgcgcgcgccg

SEQ ID NO: 3244410 - RNA, 17 nt, Rubella virus
accagcgaccccuggca

SEQ ID NO: 3244411 - RNA, 20 nt, Rubella virus
gcgcaucuggaauggcacac

SEQ ID NO: 3244412 - RNA, 16 nt, Rubella virus
ggccugcgcccgccuc

SEQ ID NO: 3244413 - RNA, 19 nt, Rubella virus
cccgcaccuguugcuguau

SEQ ID NO: 3244414 - RNA, 18 nt, Rubella virus
cgccacucaagcaccugu

SEQ ID NO: 3244415 - RNA, 22 nt, Rubella virus
acgcgcuggcaccgacugcugc

SEQ ID NO: 3244416 - RNA, 14 nt, Rubella virus
agggguacaacccc

SEQ ID NO: 3244417 - RNA, 13 nt, Rubella virus
cgcgccgggcucc

SEQ ID NO: 3244418 - RNA, 21 nt, Rubella virus
cugucgccgccgcggcgccgc

SEQ ID NO: 3244419 - RNA, 13 nt, Rubella virus
gccccuuggggcu

SEQ ID NO: 3244420 - RNA, 19 nt, Rubella virus
cggcgcuauagcgccucgc

SEQ ID NO: 3244421 - RNA, 19 nt, Rubella virus
gcggcgcuauagcgccucg

SEQ ID NO: 3244422 - RNA, 13 nt, Rubella virus
cgccccgcuuccc

SEQ ID NO: 3244423 - RNA, 13 nt, Rubella virus
ggacacagcgacg

SEQ ID NO: 3244424 - RNA, 17 nt, Rubella virus
gacaguucgcccggugg

SEQ ID NO: 3244425 - RNA, 16 nt, Rubella virus
uccccgcaccuguugc

SEQ ID NO: 3244426 - RNA, 16 nt, Rubella virus
gagugggcugcugccc

SEQ ID NO: 3244427 - RNA, 20 nt, Rubella virus
cuugucugggugcgggccga

SEQ ID NO: 3244428 - RNA, 14 nt, Rubella virus
gcgggcuguccacc

SEQ ID NO: 3244429 - RNA, 15 nt, Rubella virus
cggugccccccaggc

SEQ ID NO: 3244430 - RNA, 18 nt, Rubella virus
ccccgugcgccucgcugg

SEQ ID NO: 3244431 - RNA, 16 nt, Rubella virus
uaccucugcacugcac

SEQ ID NO: 3244432 - RNA, 23 nt, Rubella virus
cgacggcgacagcgccccgcuuc

SEQ ID NO: 3244433 - RNA, 18 nt, Rubella virus
cggccccgauugggccuc

SEQ ID NO: 3244434 - RNA, 19 nt, Rubella virus
acucgacgaggacggccgc

SEQ ID NO: 3244435 - RNA, 17 nt, Rubella virus
cugugcgcacgggcagc

SEQ ID NO: 3244436 - RNA, 22 nt, Rubella virus
gccaacgccauuccccugacug

SEQ ID NO: 3244437 - RNA, 12 nt, Rubella virus
gccgcagccccc

SEQ ID NO: 3244438 - RNA, 12 nt, Rubella virus
aagucagcugcg

SEQ ID NO: 3244439 - RNA, 16 nt, Rubella virus
gcuugugggggccacg

SEQ ID NO: 3244440 - RNA, 22 nt, Rubella virus
acggccgcugggacccugcgcu

SEQ ID NO: 3244441 - RNA, 16 nt, Rubella virus
caggcgcccgcugccc

SEQ ID NO: 3244442 - RNA, 18 nt, Rubella virus
ccucgcuagugggccccc

SEQ ID NO: 3244443 - RNA, 16 nt, Rubella virus
ugcgggcccgagccgc

SEQ ID NO: 3244444 - RNA, 18 nt, Rubella virus
acgcccucgcggccuucg

SEQ ID NO: 3244445 - RNA, 15 nt, Rubella virus
acuucaacccuggcg

SEQ ID NO: 3244446 - RNA, 15 nt, Rubella virus
gcgcgucggccagca

SEQ ID NO: 3244447 - RNA, 21 nt, Rubella virus
caccgcccaguacccgccuac

SEQ ID NO: 3244448 - RNA, 22 nt, Rubella virus
gcugcuuugccccaugggaccu

SEQ ID NO: 3244449 - RNA, 16 nt, Rubella virus
cuugccgggcucuugc

SEQ ID NO: 3244450 - RNA, 17 nt, Rubella virus
ugcccggccacuggcuc

SEQ ID NO: 3244451 - RNA, 18 nt, Rubella virus
cccccugcugcgcacugc

SEQ ID NO: 3244452 - RNA, 17 nt, Rubella virus
ggcccucuggcucgcca

SEQ ID NO: 3244453 - RNA, 20 nt, Rubella virus
cggcgccgccgccgcccuca

SEQ ID NO: 3244454 - RNA, 13 nt, Rubella virus
accucggcgccgu

SEQ ID NO: 3244455 - RNA, 21 nt, Rubella virus
uggcauccaccgggccccuug

SEQ ID NO: 3244456 - RNA, 16 nt, Rubella virus
cugccccgcgccccga

SEQ ID NO: 3244457 - RNA, 18 nt, Rubella virus
gcaccuacgccgagcagg

SEQ ID NO: 3244458 - RNA, 21 nt, Rubella virus
ggccccgccccccccggagga

SEQ ID NO: 3244459 - RNA, 15 nt, Rubella virus
gcgaacuccacgacc

SEQ ID NO: 3244460 - RNA, 22 nt, Rubella virus
gcgcugguggaaggccuugccc

SEQ ID NO: 3244461 - RNA, 16 nt, Rubella virus
gccgcgccugucgccg

SEQ ID NO: 3244462 - RNA, 14 nt, Rubella virus
cgccauuugcgccc

SEQ ID NO: 3244463 - RNA, 15 nt, Rubella virus
gcugcgcacugcccc

SEQ ID NO: 3244464 - RNA, 18 nt, Rubella virus
gauuguggacggcggcug

SEQ ID NO: 3244465 - RNA, 16 nt, Rubella virus
agggcuugggggccug

SEQ ID NO: 3244466 - RNA, 12 nt, Rubella virus
gucccggugggg

SEQ ID NO: 3244467 - RNA, 15 nt, Rubella virus
acgcccacaccacca

SEQ ID NO: 3244468 - RNA, 14 nt, Rubella virus
acacccccccgccc

SEQ ID NO: 3244469 - RNA, 15 nt, Rubella virus
gcugcccggccacug

SEQ ID NO: 3244470 - RNA, 16 nt, Rubella virus
gcugauauggcggcac

SEQ ID NO: 3244471 - RNA, 20 nt, Rubella virus
cgccgcccuccucaacaccc

SEQ ID NO: 3244472 - RNA, 19 nt, Rubella virus
caggcgcccgcugccccga

SEQ ID NO: 3244473 - RNA, 13 nt, Rubella virus
agcgcccccggcu

SEQ ID NO: 3244474 - RNA, 18 nt, Rubella virus
uggguacccgcagccccu

SEQ ID NO: 3244475 - RNA, 13 nt, Rubella virus
ggccugcuggggc

SEQ ID NO: 3244476 - RNA, 16 nt, Rubella virus
ggcccucuggcucgcc

SEQ ID NO: 3244477 - RNA, 23 nt, Rubella virus
cgcccgcgaccccgacgccucuc

SEQ ID NO: 3244478 - RNA, 20 nt, Rubella virus
acgaccgccgccacccccgc

SEQ ID NO: 3244479 - RNA, 22 nt, Rubella virus
acggucgccguuggcaccgcgc

SEQ ID NO: 3244480 - RNA, 19 nt, Rubella virus
cccgcacuaggccacuaga

SEQ ID NO: 3244481 - RNA, 19 nt, Rubella virus
cauccaggcgcccgcugcc

SEQ ID NO: 3244482 - RNA, 15 nt, Rubella virus
ccugugcgcacgggc

SEQ ID NO: 3244483 - RNA, 13 nt, Rubella virus
ccgguggcccugc

SEQ ID NO: 3244484 - RNA, 23 nt, Rubella virus
ggccacuagauccccgcaccugu

SEQ ID NO: 3244485 - RNA, 22 nt, Rubella virus
ugcgcucauguacaacccuugc

SEQ ID NO: 3244486 - RNA, 14 nt, Rubella virus
ucgcgggcgccgcc

SEQ ID NO: 3244487 - RNA, 14 nt, Rubella virus
gcgccccgagcugg

SEQ ID NO: 3244488 - RNA, 12 nt, Rubella virus
cagggccccgcc

SEQ ID NO: 3244489 - RNA, 17 nt, Rubella virus
gccucuccacgacccug

SEQ ID NO: 3244490 - RNA, 21 nt, Rubella virus
gccccccugugcgcacgggca

SEQ ID NO: 3244491 - RNA, 22 nt, Rubella virus
ccggcgugguguauggcacaca

SEQ ID NO: 3244492 - RNA, 17 nt, Rubella virus
cgggccgaugcgccugc

SEQ ID NO: 3244493 - RNA, 16 nt, Rubella virus
accgcccaguacccgc

SEQ ID NO: 3244494 - RNA, 17 nt, Rubella virus
augcgguggggccuucc

SEQ ID NO: 3244495 - RNA, 19 nt, Rubella virus
cccgcgccccgagcugggg

SEQ ID NO: 3244496 - RNA, 23 nt, Rubella virus
gggacugguccagggccccgccc

SEQ ID NO: 3244497 - RNA, 16 nt, Rubella virus
gccucggcccucuggc

SEQ ID NO: 3244498 - RNA, 19 nt, Rubella virus
ccuugcgcgcgcaucugga

SEQ ID NO: 3244499 - RNA, 14 nt, Rubella virus
cgcacugccccugg

SEQ ID NO: 3244500 - RNA, 14 nt, Rubella virus
ugcuuugccccaug

SEQ ID NO: 3244501 - RNA, 17 nt, Rubella virus
cccggccacuggcucca

SEQ ID NO: 3244502 - RNA, 20 nt, Rubella virus
cguggccugcgcccgccucu

SEQ ID NO: 3244503 - RNA, 14 nt, Rubella virus
cggcccccugccac

SEQ ID NO: 3244504 - RNA, 20 nt, Rubella virus
uggcacacacaccacugcug

SEQ ID NO: 3244505 - RNA, 15 nt, Rubella virus
cccgaagacggcugg

SEQ ID NO: 3244506 - RNA, 17 nt, Rubella virus
aggcgcccgcugccccg

SEQ ID NO: 3244507 - RNA, 21 nt, Rubella virus
cgcugauauggcggcaccucc

SEQ ID NO: 3244508 - RNA, 15 nt, Rubella virus
ugcgccggcccccug

SEQ ID NO: 3244509 - RNA, 14 nt, Rubella virus
ggaccguacggcca

SEQ ID NO: 3244510 - RNA, 11 nt, Rubella virus
ggcggcagcua

SEQ ID NO: 3244511 - RNA, 22 nt, Rubella virus
gcauuucaccaaccugggcacc

SEQ ID NO: 3244512 - RNA, 13 nt, Rubella virus
gccgcccgcucac

SEQ ID NO: 3244513 - RNA, 20 nt, Rubella virus
accuaccucugcacugcacc

SEQ ID NO: 3244514 - RNA, 22 nt, Rubella virus
cacugcaccggggugcgccacu

SEQ ID NO: 3244515 - RNA, 18 nt, Rubella virus
gacggcgacagcgccccg

SEQ ID NO: 3244516 - RNA, 14 nt, Rubella virus
gucccgcccgaccc

SEQ ID NO: 3244517 - RNA, 14 nt, Rubella virus
gaccguacggccau

SEQ ID NO: 3244518 - RNA, 17 nt, Rubella virus
accuccuacgcugccgc

SEQ ID NO: 3244519 - RNA, 20 nt, Rubella virus
cuggggccaccgaccaaccc

SEQ ID NO: 3244520 - RNA, 20 nt, Rubella virus
cauccaggcgcccgcugccc

SEQ ID NO: 3244521 - RNA, 16 nt, Rubella virus
cgggcucuugcucgcc

SEQ ID NO: 3244522 - RNA, 17 nt, Rubella virus
gccugcgcccgccucuc

SEQ ID NO: 3244523 - RNA, 12 nt, Rubella virus
cggagacccggc

SEQ ID NO: 3244524 - RNA, 23 nt, Rubella virus
ccccugggaaguucgucaccgcc

SEQ ID NO: 3244525 - RNA, 13 nt, Rubella virus
cgguggggccucg

SEQ ID NO: 3244526 - RNA, 22 nt, Rubella virus
ucagcagucccgguggggccuc

SEQ ID NO: 3244527 - RNA, 17 nt, Rubella virus
gcugccguuccucgggc

SEQ ID NO: 3244528 - RNA, 22 nt, Rubella virus
cgcgaaacccgcacuaggccac

SEQ ID NO: 3244529 - RNA, 16 nt, Rubella virus
cacaccacugcugugu

SEQ ID NO: 3244530 - RNA, 17 nt, Rubella virus
cgcacguuagcgccacc

SEQ ID NO: 3244531 - RNA, 12 nt, Rubella virus
ccaccgggcccc

SEQ ID NO: 3244532 - RNA, 14 nt, Rubella virus
uucccccccacacc

SEQ ID NO: 3244533 - RNA, 15 nt, Rubella virus
cugcccggccacugg

SEQ ID NO: 3244534 - RNA, 15 nt, Rubella virus
gcguggccugcgccc

SEQ ID NO: 3244535 - RNA, 17 nt, Rubella virus
cgucaccgccgcccucc

SEQ ID NO: 3244536 - RNA, 16 nt, Rubella virus
gggcuugggggccugg

SEQ ID NO: 3244537 - RNA, 14 nt, Rubella virus
gaggacggccgcug

SEQ ID NO: 3244538 - RNA, 19 nt, Rubella virus
ucgcuagugggcccccgcg

SEQ ID NO: 3244539 - RNA, 13 nt, Rubella virus
agcuggggccacc

SEQ ID NO: 3244540 - RNA, 15 nt, Rubella virus
cagcagucccggugg

SEQ ID NO: 3244541 - RNA, 22 nt, Rubella virus
cgacuugcuccccagccucggc

SEQ ID NO: 3244542 - RNA, 18 nt, Rubella virus
acgccuacuccucuggcg

SEQ ID NO: 3244543 - RNA, 20 nt, Rubella virus
ggcgugggggcucugccccg

SEQ ID NO: 3244544 - RNA, 18 nt, Rubella virus
cgacgacccccugcugcg

SEQ ID NO: 3244545 - RNA, 23 nt, Rubella virus
accgcgcgggucaucgaccccgc

SEQ ID NO: 3244546 - RNA, 16 nt, Rubella virus
gguccagggccccgcc

SEQ ID NO: 3244547 - RNA, 14 nt, Rubella virus
gcgaucgcgcgacc

SEQ ID NO: 3244548 - RNA, 21 nt, Rubella virus
acuugcuccccagccucggcc

SEQ ID NO: 3244549 - RNA, 13 nt, Rubella virus
ucuggcucgccac

SEQ ID NO: 3244550 - RNA, 17 nt, Rubella virus
ccccgaagacggcugga

SEQ ID NO: 3244551 - RNA, 18 nt, Rubella virus
agggcuugggggccuggg

SEQ ID NO: 3244552 - RNA, 20 nt, Rubella virus
gacacagcgacgcggccugc

SEQ ID NO: 3244553 - RNA, 21 nt, Rubella virus
uccuuaccgcccgccccgaag

SEQ ID NO: 3244554 - RNA, 16 nt, Rubella virus
ugggccuccccgguuu

SEQ ID NO: 3244555 - RNA, 18 nt, Rubella virus
uccacauacgcgcuggac

SEQ ID NO: 3244556 - RNA, 23 nt, Rubella virus
gacuugcuccccagccucggccc

SEQ ID NO: 3244557 - RNA, 12 nt, Rubella virus
ccacucgcuggc

SEQ ID NO: 3244558 - RNA, 18 nt, Rubella virus
gccccgccgccgccgcgg

SEQ ID NO: 3244559 - RNA, 17 nt, Rubella virus
cucuggcucgccacagc

SEQ ID NO: 3244560 - RNA, 18 nt, Rubella virus
gcgcucauguacaacccu

SEQ ID NO: 3244561 - RNA, 17 nt, Rubella virus
aggcacccaccgaggcc

SEQ ID NO: 3244562 - RNA, 20 nt, Rubella virus
uggggccuuccccccuggga

SEQ ID NO: 3244563 - RNA, 14 nt, Rubella virus
gcgacgcggccugc

SEQ ID NO: 3244564 - RNA, 23 nt, Rubella virus
gccgugacuccggagggccccgc

SEQ ID NO: 3244565 - RNA, 16 nt, Rubella virus
gccacugcgccggccc

SEQ ID NO: 3244566 - RNA, 15 nt, Rubella virus
cugguguguggagca

SEQ ID NO: 3244567 - RNA, 18 nt, Rubella virus
gccgcugggacccugcgc

SEQ ID NO: 3244568 - RNA, 14 nt, Rubella virus
caccgacugcugcg

SEQ ID NO: 3244569 - RNA, 23 nt, Rubella virus
ggccccgaagccaucgcgggcgc

SEQ ID NO: 3244570 - RNA, 20 nt, Rubella virus
gggggaggcaauugccaucu

SEQ ID NO: 3244571 - RNA, 17 nt, Rubella virus
ccagugcgcggccucga

SEQ ID NO: 3244572 - RNA, 22 nt, Rubella virus
gucgccguuggcaccgcgcgcg

SEQ ID NO: 3244573 - RNA, 21 nt, Rubella virus
guaccacccuaccgcgugcga

SEQ ID NO: 3244574 - RNA, 18 nt, Rubella virus
gcgcugauauggcggcac

SEQ ID NO: 3244575 - RNA, 20 nt, Rubella virus
cucggcccucuggcucgcca

SEQ ID NO: 3244576 - RNA, 23 nt, Rubella virus
cugugcgcacgggcagcauuacg

SEQ ID NO: 3244577 - RNA, 17 nt, Rubella virus
gcagccccuugcgcgcg

SEQ ID NO: 3244578 - RNA, 15 nt, Rubella virus
uggcaccgcgcgcgc

SEQ ID NO: 3244579 - RNA, 18 nt, Rubella virus
uggcaccgacugcugcgc

SEQ ID NO: 3244580 - RNA, 21 nt, Rubella virus
uggcacacagcgcgcgugcac

SEQ ID NO: 3244581 - RNA, 20 nt, Rubella virus
ccaccaccaucagcugccgu

SEQ ID NO: 3244582 - RNA, 15 nt, Rubella virus
gagagcgaucgcgcg

SEQ ID NO: 3244583 - RNA, 20 nt, Rubella virus
gacggccaucauggcggcac

SEQ ID NO: 3244584 - RNA, 20 nt, Rubella virus
gacuuccgcgucggcggcac

SEQ ID NO: 3244585 - RNA, 15 nt, Rubella virus
gcggccucgacggcg

SEQ ID NO: 3244586 - RNA, 19 nt, Rubella virus
ucaauggcgaggaccucgg

SEQ ID NO: 3244587 - RNA, 14 nt, Rubella virus
uggacccggcgagg

SEQ ID NO: 3244588 - RNA, 13 nt, Rubella virus
ugccgcggcgugc

SEQ ID NO: 3244589 - RNA, 14 nt, Rubella virus
uccgcgucggcggc

SEQ ID NO: 3244590 - RNA, 20 nt, Rubella virus
ugcgcggccucgacggcgac

SEQ ID NO: 3244591 - RNA, 15 nt, Rubella virus
ugcgcgucggccagc

SEQ ID NO: 3244592 - RNA, 17 nt, Rubella virus
uggcgcguggccugcgc

SEQ ID NO: 3244593 - RNA, 15 nt, Rubella virus
uggggccucgggagc

SEQ ID NO: 3244594 - RNA, 16 nt, Rubella virus
ugggguaaaggcgagc

SEQ ID NO: 3244595 - RNA, 17 nt, Rubella virus
ugucgccgccgcggcgc

SEQ ID NO: 3244596 - RNA, 13 nt, Rubella virus
uguccccgugcgc

SEQ ID NO: 3244597 - RNA, 18 nt, Rubella virus
ugcgccuggucgacgccg

SEQ ID NO: 3244598 - RNA, 21 nt, Rubella virus
gugagccccaugggacgcgcg

SEQ ID NO: 3244599 - RNA, 18 nt, Rubella virus
cgcugucucuugaucacg

SEQ ID NO: 3244600 - RNA, 14 nt, Rubella virus
ccuuggcgcauccg

SEQ ID NO: 3244601 - RNA, 16 nt, Rubella virus
ccuccuacgcugccgc

SEQ ID NO: 3244602 - RNA, 16 nt, Rubella virus
cccguucugcaacacg

SEQ ID NO: 3244603 - RNA, 19 nt, Rubella virus
cccgagccgcccgcucacg

SEQ ID NO: 3244604 - RNA, 14 nt, Rubella virus
ccaugggaccucga

SEQ ID NO: 3244605 - RNA, 17 nt, Human
cucucuggccuucggcc

SEQ ID NO: 3244606 - RNA, 19 nt, Human
cucucuggccuucggccuc

SEQ ID NO: 3244607 - RNA, 21 nt, Human
cuccagugagacagcucugca

SEQ ID NO: 3244608 - RNA, 17 nt, Human
cugaaagaggaaugaag

SEQ ID NO: 3244609 - RNA, 13 nt, Human
cugaaagaggaau

SEQ ID NO: 3244610 - RNA, 23 nt, Human
cggagaagagcuguucacagcca

SEQ ID NO: 3244611 - RNA, 24 nt, Human
cggagaagagcuguucacagccag

SEQ ID NO: 3244612 - RNA, 15 nt, Human
cgguuuauauaagcu

SEQ ID NO: 3244613 - RNA, 13 nt, Human
cucaaaacugcac

SEQ ID NO: 3244614 - RNA, 17 nt, Human
cucaccccuugccauaa

SEQ ID NO: 3244615 - RNA, 19 nt, Human
cucagaaaacaaggaugaa

SEQ ID NO: 3244616 - RNA, 23 nt, Human
cucagaaaacaaggaugaauuaa

SEQ ID NO: 3244617 - RNA, 12 nt, Human
cucagaauauug

SEQ ID NO: 3244618 - RNA, 20 nt, Human
cccauauuuguacaccaaua

SEQ ID NO: 3244619 - RNA, 13 nt, Human
cccaacuccagaa

SEQ ID NO: 3244620 - RNA, 12 nt, Human
ccucggagaaga

SEQ ID NO: 3244621 - RNA, 14 nt, Human
ccucggagaagagc

SEQ ID NO: 3244622 - RNA, 16 nt, Human
ccucccuucucuucac

SEQ ID NO: 3244623 - RNA, 17 nt, Human
ccugucucuacuaaaaa

SEQ ID NO: 3244624 - RNA, 20 nt, Human
caauaaaauccauacauuug

SEQ ID NO: 3244625 - RNA, 23 nt, Human
caauaaaauccauacauuugugu

SEQ ID NO: 3244626 - RNA, 12 nt, Human
cacuccagccug

SEQ ID NO: 3244627 - RNA, 13 nt, Human
cacuccagccuga

SEQ ID NO: 3244628 - RNA, 23 nt, Human
cacuccagccugagcgacaguga

SEQ ID NO: 3244629 - RNA, 17 nt, Human
cagaacagugauuacca

SEQ ID NO: 3244630 - RNA, 12 nt, Human
cagaacagugau

SEQ ID NO: 3244631 - RNA, 11 nt, Human
cagaacaguga

SEQ ID NO: 3244632 - RNA, 16 nt, Human
cagaaaguuauugaua

SEQ ID NO: 3244633 - RNA, 11 nt, Human
cagaaaguuau

SEQ ID NO: 3244634 - RNA, 15 nt, Human
cacuuaaaaaugguu

SEQ ID NO: 3244635 - RNA, 22 nt, Human
cacuguuuugaaucucauaauu

SEQ ID NO: 3244636 - RNA, 18 nt, Human
auuaugaauuacauuugu

SEQ ID NO: 3244637 - RNA, 19 nt, Human
auuaugaauuacauuugua

SEQ ID NO: 3244638 - RNA, 20 nt, Human
auuaugaauuacauuuguau

SEQ ID NO: 3244639 - RNA, 14 nt, Human
auuguguugugaau

SEQ ID NO: 3244640 - RNA, 17 nt, Human
auuguguugugaauguu

SEQ ID NO: 3244641 - RNA, 16 nt, Human
auuuaauaaaugugcc

SEQ ID NO: 3244642 - RNA, 20 nt, Human
auuucauaccuaucaucuua

SEQ ID NO: 3244643 - RNA, 16 nt, Human
auuucauaugcuguau

SEQ ID NO: 3244644 - RNA, 20 nt, Human
auuucuaugaaauauuaugu

SEQ ID NO: 3244645 - RNA, 19 nt, Human
caagacccaaaaggcagaa

SEQ ID NO: 3244646 - RNA, 16 nt, Human
caagaugguucuagca

SEQ ID NO: 3244647 - RNA, 13 nt, Human
caagaugguucua

SEQ ID NO: 3244648 - RNA, 21 nt, Human
caaaucuuaacuugaaggagu

SEQ ID NO: 3244649 - RNA, 18 nt, Human
caaagggugaaaauuauu

SEQ ID NO: 3244650 - RNA, 21 nt, Human
auuuuauaucaauuuaaaaaa

SEQ ID NO: 3244651 - RNA, 12 nt, Human
auuuuauaucuu

SEQ ID NO: 3244652 - RNA, 16 nt, Human
auuuuauaucuuguag

SEQ ID NO: 3244653 - RNA, 14 nt, Human
auuuuauaucuugu

SEQ ID NO: 3244654 - RNA, 15 nt, Human
auuuuuauauuugaa

SEQ ID NO: 3244655 - RNA, 16 nt, Human
caaacagucucaggaa

SEQ ID NO: 3244656 - RNA, 17 nt, Human
caaacagucucaggaaa

SEQ ID NO: 3244657 - RNA, 15 nt, Human
caaacagucucagga

SEQ ID NO: 3244658 - RNA, 15 nt, Human
caaaccaaauaaaaa

SEQ ID NO: 3244659 - RNA, 14 nt, Human
caaaccaaauaaaa

SEQ ID NO: 3244660 - RNA, 22 nt, Human
caggaaaucaaauaugcaaagc

SEQ ID NO: 3244661 - RNA, 23 nt, Human
caggaaaucaaauaugcaaagca

SEQ ID NO: 3244662 - RNA, 20 nt, Human
caggaaagagaacuuccaga

SEQ ID NO: 3244663 - RNA, 17 nt, Human
cagcuccccucggagaa

SEQ ID NO: 3244664 - RNA, 18 nt, Human
cagcuccccucggagaag

SEQ ID NO: 3244665 - RNA, 16 nt, Human
cagcuccccucggaga

SEQ ID NO: 3244666 - RNA, 15 nt, Human
cagcccuucuuucca

SEQ ID NO: 3244667 - RNA, 19 nt, Human
cagcccuucuuuccacaga

SEQ ID NO: 3244668 - RNA, 19 nt, Human
cagccugagcgacagugag

SEQ ID NO: 3244669 - RNA, 18 nt, Human
cagccugagcgacaguga

SEQ ID NO: 3244670 - RNA, 20 nt, Human
cagcaguugaaaagacucca

SEQ ID NO: 3244671 - RNA, 21 nt, Human
cagcaguugaaaagacuccaa

SEQ ID NO: 3244672 - RNA, 17 nt, Human
cagcaguugaaaagacu

SEQ ID NO: 3244673 - RNA, 15 nt, Human
cagucucaggaaauc

SEQ ID NO: 3244674 - RNA, 18 nt, Human
cagggaggacgcucucug

SEQ ID NO: 3244675 - RNA, 17 nt, Human
cagggaggacgcucucu

SEQ ID NO: 3244676 - RNA, 18 nt, Human
ccacagaagcuccaggua

SEQ ID NO: 3244677 - RNA, 18 nt, Human
ccaccagucugacuguuu

SEQ ID NO: 3244678 - RNA, 16 nt, Human
ccacagaagcuccagg

SEQ ID NO: 3244679 - RNA, 21 nt, Human
cauuuggagacacaacuauuu

SEQ ID NO: 3244680 - RNA, 19 nt, Human
cauuguaaauaguauuuga

SEQ ID NO: 3244681 - RNA, 12 nt, Human
cauuaucucaaa

SEQ ID NO: 3244682 - RNA, 13 nt, Human
cauuaucucaaaa

SEQ ID NO: 3244683 - RNA, 13 nt, Human
cauaauuuauaca

SEQ ID NO: 3244684 - RNA, 20 nt, Human
cauaauuuauacaggucaua

SEQ ID NO: 3244685 - RNA, 16 nt, Human
gaacccaaguccaagc

SEQ ID NO: 3244686 - RNA, 17 nt, Human
gaacccaaguccaagca

SEQ ID NO: 3244687 - RNA, 17 nt, Human
gaacccgggaggcagag

SEQ ID NO: 3244688 - RNA, 23 nt, Human
gaaaauuauuuuguucauacaua

SEQ ID NO: 3244689 - RNA, 16 nt, Human
gaaaagacuccaaaga

SEQ ID NO: 3244690 - RNA, 17 nt, Human
gaaaagacuccaaagaa

SEQ ID NO: 3244691 - RNA, 14 nt, Human
gaaaagacuccaaa

SEQ ID NO: 3244692 - RNA, 22 nt, Human
gaaaauuauuuuguucauacau

SEQ ID NO: 3244693 - RNA, 21 nt, Human
gaaaauuauuuuguucauaca

SEQ ID NO: 3244694 - RNA, 20 nt, Human
gaaaauuauuuuguucauac

SEQ ID NO: 3244695 - RNA, 18 nt, Human
gaaagaaaaucaggcugg

SEQ ID NO: 3244696 - RNA, 16 nt, Human
cuuggucugugagaug

SEQ ID NO: 3244697 - RNA, 19 nt, Human
cuuggucugugagaugcua

SEQ ID NO: 3244698 - RNA, 13 nt, Human
cuucuaaguaaaa

SEQ ID NO: 3244699 - RNA, 17 nt, Human
cuucuaaguaaaaccac

SEQ ID NO: 3244700 - RNA, 21 nt, Human
cuucuaaguaaaaccacagca

SEQ ID NO: 3244701 - RNA, 20 nt, Human
cuucucacauuuauauuuuu

SEQ ID NO: 3244702 - RNA, 13 nt, Human
cuucucacauuua

SEQ ID NO: 3244703 - RNA, 13 nt, Human
cuguuauaaucuu

SEQ ID NO: 3244704 - RNA, 21 nt, Human
cuuaaaaaugguuuaaauggu

SEQ ID NO: 3244705 - RNA, 18 nt, Human
gcaauagucaaauugugu

SEQ ID NO: 3244706 - RNA, 15 nt, Human
gcagcuuauucacaa

SEQ ID NO: 3244707 - RNA, 22 nt, Human
gcaguugaaaagacuccaaaga

SEQ ID NO: 3244708 - RNA, 16 nt, Human
gcauuguaaaugugcu

SEQ ID NO: 3244709 - RNA, 18 nt, Human
gcauggcauauuuuucac

SEQ ID NO: 3244710 - RNA, 15 nt, Human
gagcgacagugagac

SEQ ID NO: 3244711 - RNA, 13 nt, Human
gagcgacagugag

SEQ ID NO: 3244712 - RNA, 20 nt, Human
gacagaaagcagaacaguga

SEQ ID NO: 3244713 - RNA, 21 nt, Human
gacagcccuucuuuccacaga

SEQ ID NO: 3244714 - RNA, 14 nt, Human
gacagaaagcagaa

SEQ ID NO: 3244715 - RNA, 17 nt, Human
gacgcucucuggccuuc

SEQ ID NO: 3244716 - RNA, 15 nt, Human
gacuauucaaacagu

SEQ ID NO: 3244717 - RNA, 16 nt, Human
gacuauucaaacaguc

SEQ ID NO: 3244718 - RNA, 14 nt, Human
ggcuccacuugguc

SEQ ID NO: 3244719 - RNA, 14 nt, Human
aaaaccacagcagu

SEQ ID NO: 3244720 - RNA, 17 nt, Human
aaaaaugguuuaaaugg

SEQ ID NO: 3244721 - RNA, 15 nt, Human
aaaacuucagacaua

SEQ ID NO: 3244722 - RNA, 21 nt, Human
aaaagauuuucagaaaauauu

SEQ ID NO: 3244723 - RNA, 14 nt, Human
aaaaauaacaauga

SEQ ID NO: 3244724 - RNA, 20 nt, Human
gggaacccaaguccaagcau

SEQ ID NO: 3244725 - RNA, 22 nt, Human
gggacagucaccucauggaauu

SEQ ID NO: 3244726 - RNA, 20 nt, Human
gggacagucaccucauggaa

SEQ ID NO: 3244727 - RNA, 21 nt, Human
gggacagucaccucauggaau

SEQ ID NO: 3244728 - RNA, 13 nt, Human
ggccuccauccug

SEQ ID NO: 3244729 - RNA, 15 nt, Human
ggccuccauccugag

SEQ ID NO: 3244730 - RNA, 14 nt, Human
ggccuccauccuga

SEQ ID NO: 3244731 - RNA, 21 nt, Human
ggcacaguuuucugagaaaga

SEQ ID NO: 3244732 - RNA, 14 nt, Human
aaauaaaaauauug

SEQ ID NO: 3244733 - RNA, 18 nt, Human
aaaguauguuagugcaaa

SEQ ID NO: 3244734 - RNA, 20 nt, Human
aaagguauuuuaaucaccaa

SEQ ID NO: 3244735 - RNA, 17 nt, Human
aaaguauguuagugcaa

SEQ ID NO: 3244736 - RNA, 23 nt, Human
aaaguucugcagauaaacaguag

SEQ ID NO: 3244737 - RNA, 22 nt, Human
aaauaauuuuuauauuugaaau

SEQ ID NO: 3244738 - RNA, 23 nt, Human
aaauaauuuuuauauuugaaaua

SEQ ID NO: 3244739 - RNA, 15 nt, Human
aaauacacacucaaa

SEQ ID NO: 3244740 - RNA, 21 nt, Human
aaauaauuuuuauauuugaaa

SEQ ID NO: 3244741 - RNA, 19 nt, Human
aaauacacacucaaaucaa

SEQ ID NO: 3244742 - RNA, 19 nt, Human
guaauagagcaaaauugau

SEQ ID NO: 3244743 - RNA, 20 nt, Human
guaauaggcguaacuaauuu

SEQ ID NO: 3244744 - RNA, 15 nt, Human
guaauaacugugaag

SEQ ID NO: 3244745 - RNA, 16 nt, Human
guaauaacugugaagu

SEQ ID NO: 3244746 - RNA, 22 nt, Human
guaauaacugugaaguuuacau

SEQ ID NO: 3244747 - RNA, 15 nt, Human
aaauccauacauuug

SEQ ID NO: 3244748 - RNA, 15 nt, Human
guacauuuggagaca

SEQ ID NO: 3244749 - RNA, 12 nt, Human
aaaucauuucug

SEQ ID NO: 3244750 - RNA, 19 nt, Human
aaaucauuucugcaucagc

SEQ ID NO: 3244751 - RNA, 21 nt, Human
aaaucauuucugcaucagcug

SEQ ID NO: 3244752 - RNA, 22 nt, Human
aaaucauuucugcaucagcugc

SEQ ID NO: 3244753 - RNA, 23 nt, Human
aaaucauuucugcaucagcugcu

SEQ ID NO: 3244754 - RNA, 11 nt, Human
aaaucauuucu

SEQ ID NO: 3244755 - RNA, 14 nt, Human
aaauauuauguguu

SEQ ID NO: 3244756 - RNA, 17 nt, Human
aaauauuauguuaaaac

SEQ ID NO: 3244757 - RNA, 15 nt, Human
aaauauuauguguuu

SEQ ID NO: 3244758 - RNA, 14 nt, Human
guacuuaacuauuc

SEQ ID NO: 3244759 - RNA, 21 nt, Human
guacuucaaauccuugaagau

SEQ ID NO: 3244760 - RNA, 22 nt, Human
guacuucaaauccuugaagauu

SEQ ID NO: 3244761 - RNA, 12 nt, Human
aaacacagcaag

SEQ ID NO: 3244762 - RNA, 14 nt, Human
aaacacagcaaggg

SEQ ID NO: 3244763 - RNA, 11 nt, Human
aaacacagcaa

SEQ ID NO: 3244764 - RNA, 15 nt, Human
aaacagucucaggaa

SEQ ID NO: 3244765 - RNA, 14 nt, Human
aaacaguagugaua

SEQ ID NO: 3244766 - RNA, 19 nt, Human
ggggaauugaggacacuga

SEQ ID NO: 3244767 - RNA, 15 nt, Human
aaacucguuaauuug

SEQ ID NO: 3244768 - RNA, 12 nt, Human
aaaccacagcag

SEQ ID NO: 3244769 - RNA, 15 nt, Human
aaagaggaaugaagu

SEQ ID NO: 3244770 - RNA, 15 nt, Human
aaagacuccaaagaa

SEQ ID NO: 3244771 - RNA, 21 nt, Human
aaagacuccaaagaaauguaa

SEQ ID NO: 3244772 - RNA, 14 nt, Human
aaagacuccaaaga

SEQ ID NO: 3244773 - RNA, 18 nt, Human
aaagacuauucaaacagu

SEQ ID NO: 3244774 - RNA, 19 nt, Human
aaagacuauucaaacaguc

SEQ ID NO: 3244775 - RNA, 17 nt, Human
aaagacuauucaaacag

SEQ ID NO: 3244776 - RNA, 22 nt, Human
aaagaccuuuggagcaaagcug

SEQ ID NO: 3244777 - RNA, 13 nt, Human
aaagacagugaaa

SEQ ID NO: 3244778 - RNA, 23 nt, Human
aaacuucagcgguuuauauaagc

SEQ ID NO: 3244779 - RNA, 19 nt, Human
aaacuucagacauagaauu

SEQ ID NO: 3244780 - RNA, 17 nt, Human
aaagcacugacuucuaa

SEQ ID NO: 3244781 - RNA, 21 nt, Human
aaagcacugacuucuaaguaa

SEQ ID NO: 3244782 - RNA, 17 nt, Human
aaagggugaaaauuauu

SEQ ID NO: 3244783 - RNA, 14 nt, Human
aaagguacuucaaa

SEQ ID NO: 3244784 - RNA, 22 nt, Human
ggugaaaauuauuuuguucaua

SEQ ID NO: 3244785 - RNA, 14 nt, Human
ggugaaaauuauuu

SEQ ID NO: 3244786 - RNA, 13 nt, Human
ggugaaaauuauu

SEQ ID NO: 3244787 - RNA, 13 nt, Human
ggagaaacuggaa

SEQ ID NO: 3244788 - RNA, 22 nt, Human
ggacucauuuuaaaaaauggaa

SEQ ID NO: 3244789 - RNA, 15 nt, Human
gccucuuagaugcag

SEQ ID NO: 3244790 - RNA, 21 nt, Human
gccuucggccuccauccugag

SEQ ID NO: 3244791 - RNA, 19 nt, Human
gccuucggccuccauccug

SEQ ID NO: 3244792 - RNA, 20 nt, Human
gccuucggccuccauccuga

SEQ ID NO: 3244793 - RNA, 15 nt, Human
gcuccacuuggucug

SEQ ID NO: 3244794 - RNA, 18 nt, Human
gcuccacuuggucuguga

SEQ ID NO: 3244795 - RNA, 21 nt, Human
gcuccccucggagaagagcug

SEQ ID NO: 3244796 - RNA, 18 nt, Human
gcuccccucggagaagag

SEQ ID NO: 3244797 - RNA, 15 nt, Human
gcuagaacucccuuu

SEQ ID NO: 3244798 - RNA, 14 nt, Human
gcuagaacucccuu

SEQ ID NO: 3244799 - RNA, 13 nt, Human
gcuagaacucccu

SEQ ID NO: 3244800 - RNA, 12 nt, Human
gcuagaacuccc

SEQ ID NO: 3244801 - RNA, 16 nt, Human
gcuagaacucccuuuc

SEQ ID NO: 3244802 - RNA, 15 nt, Human
aaugaaugaaugaau

SEQ ID NO: 3244803 - RNA, 20 nt, Human
aaugaauacuuuauaaagga

SEQ ID NO: 3244804 - RNA, 17 nt, Human
uaauguaauaacuguga

SEQ ID NO: 3244805 - RNA, 17 nt, Human
uaaucagugugucuaaa

SEQ ID NO: 3244806 - RNA, 18 nt, Human
uaaucagugugucuaaau

SEQ ID NO: 3244807 - RNA, 16 nt, Human
uacaaaaacacagcaa

SEQ ID NO: 3244808 - RNA, 17 nt, Human
uacaaaaacacagcaag

SEQ ID NO: 3244809 - RNA, 18 nt, Human
uacaaaaacacagcaagg

SEQ ID NO: 3244810 - RNA, 16 nt, Human
aaugguuuaaaugguc

SEQ ID NO: 3244811 - RNA, 19 nt, Human
uacauaaguaauucaagaa

SEQ ID NO: 3244812 - RNA, 15 nt, Human
uacauaaguaauuca

SEQ ID NO: 3244813 - RNA, 16 nt, Human
uacauaaguaauucaa

SEQ ID NO: 3244814 - RNA, 17 nt, Human
uacauaaguaauucaag

SEQ ID NO: 3244815 - RNA, 18 nt, Human
aauguugacaugggacau

SEQ ID NO: 3244816 - RNA, 22 nt, Human
aauuaaauuuugaguucuacau

SEQ ID NO: 3244817 - RNA, 23 nt, Human
uacauuguacgaagaguauuuuu

SEQ ID NO: 3244818 - RNA, 22 nt, Human
uacauuguacgaagaguauuuu

SEQ ID NO: 3244819 - RNA, 20 nt, Human
uacauuguacgaagaguauu

SEQ ID NO: 3244820 - RNA, 21 nt, Human
uacuucaaauccuugaagauu

SEQ ID NO: 3244821 - RNA, 18 nt, Human
uagaacucccuuucaaca

SEQ ID NO: 3244822 - RNA, 19 nt, Human
aauuuuuauauuugaaaua

SEQ ID NO: 3244823 - RNA, 19 nt, Human
aauuuuuucucuaggaaau

SEQ ID NO: 3244824 - RNA, 16 nt, Human
acaaaaacacagcaag

SEQ ID NO: 3244825 - RNA, 20 nt, Human
acaaaaaaauauauuuaaug

SEQ ID NO: 3244826 - RNA, 13 nt, Human
acaaaaaaauaua

SEQ ID NO: 3244827 - RNA, 17 nt, Human
acaaaaaaauauauuua

SEQ ID NO: 3244828 - RNA, 22 nt, Human
acaagaaaugaaagcagggacu

SEQ ID NO: 3244829 - RNA, 18 nt, Human
acaagcacuaaacaaaga

SEQ ID NO: 3244830 - RNA, 18 nt, Human
uagcaugucgucaaagcu

SEQ ID NO: 3244831 - RNA, 21 nt, Human
uagcaugucgucaaagcugaa

SEQ ID NO: 3244832 - RNA, 16 nt, Human
uagaugcaguucugaa

SEQ ID NO: 3244833 - RNA, 17 nt, Human
uagaugcaguucugaag

SEQ ID NO: 3244834 - RNA, 19 nt, Human
uagaugcaguucugaagaa

SEQ ID NO: 3244835 - RNA, 23 nt, Human
aauugugugaaagguacuucaaa

SEQ ID NO: 3244836 - RNA, 14 nt, Human
uacuucaaauccuu

SEQ ID NO: 3244837 - RNA, 19 nt, Human
uacuucaaauccuugaaga

SEQ ID NO: 3244838 - RNA, 20 nt, Human
aauuucucccagucauuuaa

SEQ ID NO: 3244839 - RNA, 19 nt, Human
aauuucucccagucauuua

SEQ ID NO: 3244840 - RNA, 15 nt, Human
aauucuugaaggaaa

SEQ ID NO: 3244841 - RNA, 16 nt, Human
aauucuugaaggaaaa

SEQ ID NO: 3244842 - RNA, 21 nt, Human
aauucuugaaggaaaaugaua

SEQ ID NO: 3244843 - RNA, 21 nt, Human
aauucuugccaaauauaaaua

SEQ ID NO: 3244844 - RNA, 19 nt, Human
aauugacccacaagaaaug

SEQ ID NO: 3244845 - RNA, 16 nt, Human
aauugacccacaagaa

SEQ ID NO: 3244846 - RNA, 13 nt, Human
aauugacccacaa

SEQ ID NO: 3244847 - RNA, 17 nt, Human
uauugucuagugaaacu

SEQ ID NO: 3244848 - RNA, 18 nt, Human
uauuuauuuuaauaaugu

SEQ ID NO: 3244849 - RNA, 14 nt, Human
uauuuauuuuaaua

SEQ ID NO: 3244850 - RNA, 16 nt, Human
uauuuauuuuaauaau

SEQ ID NO: 3244851 - RNA, 19 nt, Human
uauuuaaugauaaguaaau

SEQ ID NO: 3244852 - RNA, 23 nt, Human
acaguucggugagcuacaaaugc

SEQ ID NO: 3244853 - RNA, 22 nt, Human
acaguucggugagcuacaaaug

SEQ ID NO: 3244854 - RNA, 19 nt, Human
acaguucggugagcuacaa

SEQ ID NO: 3244855 - RNA, 21 nt, Human
acaguauggcagcuuuccuca

SEQ ID NO: 3244856 - RNA, 18 nt, Human
acagugagacucugucuc

SEQ ID NO: 3244857 - RNA, 14 nt, Human
acagugagacucug

SEQ ID NO: 3244858 - RNA, 21 nt, Human
acaguuaccucugccucagaa

SEQ ID NO: 3244859 - RNA, 13 nt, Human
acagucucaggaa

SEQ ID NO: 3244860 - RNA, 14 nt, Human
acagucucaggaaa

SEQ ID NO: 3244861 - RNA, 15 nt, Human
acagucucaggaaau

SEQ ID NO: 3244862 - RNA, 16 nt, Human
acagucucaggaaauc

SEQ ID NO: 3244863 - RNA, 17 nt, Human
acagucucaggaaauca

SEQ ID NO: 3244864 - RNA, 20 nt, Human
acagugaaagaaaauaacaa

SEQ ID NO: 3244865 - RNA, 15 nt, Human
uauuagaauaccaca

SEQ ID NO: 3244866 - RNA, 23 nt, Human
uauucauagcagcuuauucacaa

SEQ ID NO: 3244867 - RNA, 16 nt, Human
uauucaggagaguaga

SEQ ID NO: 3244868 - RNA, 12 nt, Human
uauuaaaacuca

SEQ ID NO: 3244869 - RNA, 14 nt, Human
uauauuuacaaaug

SEQ ID NO: 3244870 - RNA, 15 nt, Human
uauauuuacaaaugg

SEQ ID NO: 3244871 - RNA, 14 nt, Human
uaucuaguaugaaa

SEQ ID NO: 3244872 - RNA, 17 nt, Human
uaucuaguaugaaauua

SEQ ID NO: 3244873 - RNA, 16 nt, Human
uaucuaguaugaaauu

SEQ ID NO: 3244874 - RNA, 18 nt, Human
uaugagcuuccuucugug

SEQ ID NO: 3244875 - RNA, 21 nt, Human
uaugagcuuccuucugugaaa

SEQ ID NO: 3244876 - RNA, 16 nt, Human
uauggcuauaggugcu

SEQ ID NO: 3244877 - RNA, 17 nt, Human
uauggcuauaggugcua

SEQ ID NO: 3244878 - RNA, 22 nt, Human
acacaucagcuugcccuguuaa

SEQ ID NO: 3244879 - RNA, 21 nt, Human
uauaaaauaauuuuuauauuu

SEQ ID NO: 3244880 - RNA, 22 nt, Human
uauaaaauaauuuuuauauuug

SEQ ID NO: 3244881 - RNA, 22 nt, Human
uagugagcagucaggaaagaga

SEQ ID NO: 3244882 - RNA, 15 nt, Human
uaguuuuauaugcuu

SEQ ID NO: 3244883 - RNA, 16 nt, Human
uaguuuuauaugcuuc

SEQ ID NO: 3244884 - RNA, 12 nt, Human
uauaggaauuga

SEQ ID NO: 3244885 - RNA, 13 nt, Human
uauaggaauugac

SEQ ID NO: 3244886 - RNA, 14 nt, Human
uauaggaauugacc

SEQ ID NO: 3244887 - RNA, 21 nt, Human
uauaggugcuacaaaaacaca

SEQ ID NO: 3244888 - RNA, 20 nt, Human
uauaggugcuacaaaaacac

SEQ ID NO: 3244889 - RNA, 23 nt, Human
uauaggugcuacaaaaacacagc

SEQ ID NO: 3244890 - RNA, 16 nt, Human
uauauccuuucuaaca

SEQ ID NO: 3244891 - RNA, 21 nt, Human
uauacaggucauauuaauaua

SEQ ID NO: 3244892 - RNA, 14 nt, Human
uauaauuuugugaa

SEQ ID NO: 3244893 - RNA, 18 nt, Human
uauaacaaugcuguauuu

SEQ ID NO: 3244894 - RNA, 19 nt, Human
aagauguagaggagaaacu

SEQ ID NO: 3244895 - RNA, 13 nt, Human
aagcaaaauguga

SEQ ID NO: 3244896 - RNA, 22 nt, Human
aagauguagaggagaaacugga

SEQ ID NO: 3244897 - RNA, 19 nt, Human
aagcaaaauuuuuucucua

SEQ ID NO: 3244898 - RNA, 16 nt, Human
aagcaaguauuagaau

SEQ ID NO: 3244899 - RNA, 13 nt, Human
aagacuauucaaa

SEQ ID NO: 3244900 - RNA, 14 nt, Human
aagacuauucaaac

SEQ ID NO: 3244901 - RNA, 14 nt, Human
aagacuccaaagaa

SEQ ID NO: 3244902 - RNA, 16 nt, Human
aagacuccaaagaaau

SEQ ID NO: 3244903 - RNA, 17 nt, Human
aagacuccaaagaaaug

SEQ ID NO: 3244904 - RNA, 17 nt, Human
aagacugcauuauauuu

SEQ ID NO: 3244905 - RNA, 18 nt, Human
aagagcuguucacagcca

SEQ ID NO: 3244906 - RNA, 14 nt, Human
guggguagacacac

SEQ ID NO: 3244907 - RNA, 22 nt, Human
aagaagcaccaaucaugaauua

SEQ ID NO: 3244908 - RNA, 13 nt, Human
aagaaaauaucac

SEQ ID NO: 3244909 - RNA, 13 nt, Human
aagacccaaaagg

SEQ ID NO: 3244910 - RNA, 13 nt, Human
aagaauauuuuaa

SEQ ID NO: 3244911 - RNA, 13 nt, Human
gucuucacaacag

SEQ ID NO: 3244912 - RNA, 13 nt, Human
aacugaaaucaua

SEQ ID NO: 3244913 - RNA, 20 nt, Human
aacugaaaucauacuucuua

SEQ ID NO: 3244914 - RNA, 13 nt, Human
aacuauauuguuu

SEQ ID NO: 3244915 - RNA, 20 nt, Human
aacuaucucauuuccaagca

SEQ ID NO: 3244916 - RNA, 16 nt, Human
gugaagugaaugaaac

SEQ ID NO: 3244917 - RNA, 23 nt, Human
guccaugaagauguagaggagaa

SEQ ID NO: 3244918 - RNA, 19 nt, Human
aacagauuauuaccuuaca

SEQ ID NO: 3244919 - RNA, 19 nt, Human
aacagucucaggaaaucaa

SEQ ID NO: 3244920 - RNA, 14 nt, Human
aacagucucaggaa

SEQ ID NO: 3244921 - RNA, 17 nt, Human
aacagucucaggaaauc

SEQ ID NO: 3244922 - RNA, 16 nt, Human
aacauauauaacaaug

SEQ ID NO: 3244923 - RNA, 12 nt, Human
aacauaauuaaa

SEQ ID NO: 3244924 - RNA, 23 nt, Human
gucucaguccaugaagauguaga

SEQ ID NO: 3244925 - RNA, 12 nt, Human
aaccacagcagu

SEQ ID NO: 3244926 - RNA, 18 nt, Human
uaaaccucaaaaugucua

SEQ ID NO: 3244927 - RNA, 19 nt, Human
uaaaccucaaaaugucuaa

SEQ ID NO: 3244928 - RNA, 19 nt, Human
uaaaccaaggcuagaacca

SEQ ID NO: 3244929 - RNA, 15 nt, Human
aaguucauacauugu

SEQ ID NO: 3244930 - RNA, 13 nt, Human
aaguucauacauu

SEQ ID NO: 3244931 - RNA, 12 nt, Human
aaguucauacau

SEQ ID NO: 3244932 - RNA, 23 nt, Human
aaguuauugauaaguucauacau

SEQ ID NO: 3244933 - RNA, 22 nt, Human
aaguuauugauaaguucauaca

SEQ ID NO: 3244934 - RNA, 18 nt, Human
aaguuuacauuguaaaua

SEQ ID NO: 3244935 - RNA, 19 nt, Human
aaguuuacauuguaaauag

SEQ ID NO: 3244936 - RNA, 20 nt, Human
aaguuauugauaaguucaua

SEQ ID NO: 3244937 - RNA, 19 nt, Human
aaguuauugauaaguucau

SEQ ID NO: 3244938 - RNA, 22 nt, Human
aauaaaauccauacauuugugu

SEQ ID NO: 3244939 - RNA, 22 nt, Human
aauaaaaauauuguguugugaa

SEQ ID NO: 3244940 - RNA, 12 nt, Human
aauaaaaauaau

SEQ ID NO: 3244941 - RNA, 19 nt, Human
aauaauguuucaaacauau

SEQ ID NO: 3244942 - RNA, 12 nt, Human
aauaaaugugcc

SEQ ID NO: 3244943 - RNA, 21 nt, Human
aauaaaugugccuucauuuuu

SEQ ID NO: 3244944 - RNA, 15 nt, Human
aauaacaauaaaaga

SEQ ID NO: 3244945 - RNA, 15 nt, Human
aauaacgauaaaaga

SEQ ID NO: 3244946 - RNA, 14 nt, Human
aauacacacucaaa

SEQ ID NO: 3244947 - RNA, 18 nt, Human
uaaauaguauuugagagu

SEQ ID NO: 3244948 - RNA, 17 nt, Human
uaaaugauuucauucaa

SEQ ID NO: 3244949 - RNA, 15 nt, Human
uaaauguugacaugg

SEQ ID NO: 3244950 - RNA, 13 nt, Human
uaacaaugcugua

SEQ ID NO: 3244951 - RNA, 15 nt, Human
uaacaaugcuguauu

SEQ ID NO: 3244952 - RNA, 17 nt, Human
uaacaaugcuguauuuu

SEQ ID NO: 3244953 - RNA, 20 nt, Human
uaacaaaaaaauauauuuaa

SEQ ID NO: 3244954 - RNA, 23 nt, Human
uaacaaaaaaauauauuuaauga

SEQ ID NO: 3244955 - RNA, 16 nt, Human
uaaauuuugaguucua

SEQ ID NO: 3244956 - RNA, 14 nt, Human
uaaauuuuauaucu

SEQ ID NO: 3244957 - RNA, 23 nt, Human
guuuuuuuuuaaaaaagaaacau

SEQ ID NO: 3244958 - RNA, 22 nt, Human
guuuucugagaaagacuauuca

SEQ ID NO: 3244959 - RNA, 16 nt, Human
guuuucugagaaagac

SEQ ID NO: 3244960 - RNA, 17 nt, Human
guuuucugagaaagacu

SEQ ID NO: 3244961 - RNA, 23 nt, Human
aaguauguuagugcaaauuguca

SEQ ID NO: 3244962 - RNA, 21 nt, Human
aaguauguuagugcaaauugu

SEQ ID NO: 3244963 - RNA, 15 nt, Human
aaguauucuaaauuu

SEQ ID NO: 3244964 - RNA, 13 nt, Human
aaguauucuaaau

SEQ ID NO: 3244965 - RNA, 15 nt, Human
guuuucugagaaaga

SEQ ID NO: 3244966 - RNA, 15 nt, Human
guuuuauaauuuugu

SEQ ID NO: 3244967 - RNA, 22 nt, Human
guuuuauaauuuugugaagcaa

SEQ ID NO: 3244968 - RNA, 21 nt, Human
aagggugaugggaaagcauug

SEQ ID NO: 3244969 - RNA, 19 nt, Human
aagggugaugggaaagcau

SEQ ID NO: 3244970 - RNA, 15 nt, Human
aaguaaaaccacagc

SEQ ID NO: 3244971 - RNA, 16 nt, Human
aaguaaaaccacagca

SEQ ID NO: 3244972 - RNA, 14 nt, Human
aaguaaaaccacag

SEQ ID NO: 3244973 - RNA, 17 nt, Human
aaguaaaaccacagcag

SEQ ID NO: 3244974 - RNA, 18 nt, Human
aaguaaaaccacagcagu

SEQ ID NO: 3244975 - RNA, 16 nt, Human
aaggaaaaaauaacaa

SEQ ID NO: 3244976 - RNA, 14 nt, Human
aaggaucuucaucu

SEQ ID NO: 3244977 - RNA, 14 nt, Human
aaggaaaaugauac

SEQ ID NO: 3244978 - RNA, 12 nt, Human
aaggaaaaugau

SEQ ID NO: 3244979 - RNA, 22 nt, Human
acugaggggaggggagcauggg

SEQ ID NO: 3244980 - RNA, 17 nt, Human
acugaggggaggggagc

SEQ ID NO: 3244981 - RNA, 20 nt, Human
acugccuucucaacuccaaa

SEQ ID NO: 3244982 - RNA, 22 nt, Human
acugccuucucaacuccaaacu

SEQ ID NO: 3244983 - RNA, 21 nt, Human
acuggcacaguuuucugagaa

SEQ ID NO: 3244984 - RNA, 22 nt, Human
acuggcacaguuuucugagaaa

SEQ ID NO: 3244985 - RNA, 13 nt, Human
uccuucagccuga

SEQ ID NO: 3244986 - RNA, 13 nt, Human
acuaaaaauacaa

SEQ ID NO: 3244987 - RNA, 15 nt, Human
ucccagugaauucuu

SEQ ID NO: 3244988 - RNA, 20 nt, Human
uccucaaaacuucagacaua

SEQ ID NO: 3244989 - RNA, 21 nt, Human
acuccaaagaaauguaaggga

SEQ ID NO: 3244990 - RNA, 14 nt, Human
accagggacugagg

SEQ ID NO: 3244991 - RNA, 15 nt, Human
acccaaaaggcagaa

SEQ ID NO: 3244992 - RNA, 13 nt, Human
acccaaaaggcag

SEQ ID NO: 3244993 - RNA, 20 nt, Human
acccaaauguucaucaauga

SEQ ID NO: 3244994 - RNA, 18 nt, Human
acccaaaaggcagaagca

SEQ ID NO: 3244995 - RNA, 21 nt, Human
acccaaauguucaucaaugaa

SEQ ID NO: 3244996 - RNA, 11 nt, Human
accacagcagu

SEQ ID NO: 3244997 - RNA, 12 nt, Human
uauuucauuucu

SEQ ID NO: 3244998 - RNA, 18 nt, Human
accacuuguguuuugcaa

SEQ ID NO: 3244999 - RNA, 19 nt, Human
accacugcagaagacagua

SEQ ID NO: 3245000 - RNA, 14 nt, Human
accacugcagaaga

SEQ ID NO: 3245001 - RNA, 13 nt, Human
accacugcagaag

SEQ ID NO: 3245002 - RNA, 14 nt, Human
ucaccucauggaau

SEQ ID NO: 3245003 - RNA, 19 nt, Human
accacuuguguuuugcaag

SEQ ID NO: 3245004 - RNA, 23 nt, Human
accacuuguguuuugcaagccag

SEQ ID NO: 3245005 - RNA, 19 nt, Human
ucauauuaauauauuucca

SEQ ID NO: 3245006 - RNA, 22 nt, Human
ucaugaauuaguuuuauaugcu

SEQ ID NO: 3245007 - RNA, 21 nt, Human
ucaugaauuaguuuuauaugc

SEQ ID NO: 3245008 - RNA, 20 nt, Human
uccagccugagcgacaguga

SEQ ID NO: 3245009 - RNA, 21 nt, Human
uccagccugagcgacagugag

SEQ ID NO: 3245010 - RNA, 18 nt, Human
accuuuggagcaaagcug

SEQ ID NO: 3245011 - RNA, 15 nt, Human
ucucccagucauuua

SEQ ID NO: 3245012 - RNA, 22 nt, Human
acuuuuuauggcacuaguauuu

SEQ ID NO: 3245013 - RNA, 13 nt, Human
ucucuucuuuaaa

SEQ ID NO: 3245014 - RNA, 12 nt, Human
ucucuucuuuaa

SEQ ID NO: 3245015 - RNA, 17 nt, Human
ucucuggccuucggccu

SEQ ID NO: 3245016 - RNA, 16 nt, Human
ucucuggccuucggcc

SEQ ID NO: 3245017 - RNA, 13 nt, Human
ucucuggccuucg

SEQ ID NO: 3245018 - RNA, 13 nt, Human
agaaacuggaacu

SEQ ID NO: 3245019 - RNA, 14 nt, Human
agaaagaaaaucag

SEQ ID NO: 3245020 - RNA, 15 nt, Human
agaaacauuugguaa

SEQ ID NO: 3245021 - RNA, 16 nt, Human
agaaaacaaggaugaa

SEQ ID NO: 3245022 - RNA, 19 nt, Human
agaaaacaaggaugaauua

SEQ ID NO: 3245023 - RNA, 21 nt, Human
ucugagaaagacuauucaaac

SEQ ID NO: 3245024 - RNA, 22 nt, Human
ucugagaaagacuauucaaaca

SEQ ID NO: 3245025 - RNA, 23 nt, Human
ucugagaaagacuauucaaacag

SEQ ID NO: 3245026 - RNA, 19 nt, Human
agaaagacuauucaaacag

SEQ ID NO: 3245027 - RNA, 18 nt, Human
agaaagacuauucaaaca

SEQ ID NO: 3245028 - RNA, 20 nt, Human
agaaagacuauucaaacagu

SEQ ID NO: 3245029 - RNA, 14 nt, Human
ucugagaaagacua

SEQ ID NO: 3245030 - RNA, 15 nt, Human
ucugagaaagacuau

SEQ ID NO: 3245031 - RNA, 19 nt, Human
ucugagaaagacuauucaa

SEQ ID NO: 3245032 - RNA, 20 nt, Human
ucugagaaagacuauucaaa

SEQ ID NO: 3245033 - RNA, 21 nt, Human
ucugacuguuuccaucaaggg

SEQ ID NO: 3245034 - RNA, 14 nt, Human
agaacucccuuuca

SEQ ID NO: 3245035 - RNA, 21 nt, Human
agaagaacugaaaucauacuu

SEQ ID NO: 3245036 - RNA, 15 nt, Human
ucuucacaacagauu

SEQ ID NO: 3245037 - RNA, 18 nt, Human
ucuuaauuaaaagaauau

SEQ ID NO: 3245038 - RNA, 21 nt, Human
ucuuaauuaaaagaauauuuu

SEQ ID NO: 3245039 - RNA, 14 nt, Human
ucuuaauuaaaaga

SEQ ID NO: 3245040 - RNA, 18 nt, Human
ucuguuuuauaauuuugu

SEQ ID NO: 3245041 - RNA, 21 nt, Human
agacuauucaaacagucucag

SEQ ID NO: 3245042 - RNA, 18 nt, Human
agacuauucaaacagucu

SEQ ID NO: 3245043 - RNA, 20 nt, Human
agacuauucaaacagucuca

SEQ ID NO: 3245044 - RNA, 12 nt, Human
agacuccaaaga

SEQ ID NO: 3245045 - RNA, 13 nt, Human
agacuccaaagaa

SEQ ID NO: 3245046 - RNA, 14 nt, Human
agacuccaaagaaa

SEQ ID NO: 3245047 - RNA, 16 nt, Human
agacuauucaaacagu

SEQ ID NO: 3245048 - RNA, 16 nt, Human
agacuccaaagaaaug

SEQ ID NO: 3245049 - RNA, 19 nt, Human
agacuccaaagaaauguaa

SEQ ID NO: 3245050 - RNA, 21 nt, Human
ucuuuaaagggauggcaagau

SEQ ID NO: 3245051 - RNA, 17 nt, Human
ucuuuaaaauacacacu

SEQ ID NO: 3245052 - RNA, 18 nt, Human
agagacacacugaagaag

SEQ ID NO: 3245053 - RNA, 20 nt, Human
agagacacacugaagaagca

SEQ ID NO: 3245054 - RNA, 15 nt, Human
agagaaugagagaca

SEQ ID NO: 3245055 - RNA, 17 nt, Human
agagacacacugaagaa

SEQ ID NO: 3245056 - RNA, 14 nt, Human
agacuggcacaguu

SEQ ID NO: 3245057 - RNA, 15 nt, Human
agacuggcacaguuu

SEQ ID NO: 3245058 - RNA, 22 nt, Human
agagugaacaaauuuacagaga

SEQ ID NO: 3245059 - RNA, 14 nt, Human
agagugaacaaauu

SEQ ID NO: 3245060 - RNA, 19 nt, Human
agauaaucagugugucuaa

SEQ ID NO: 3245061 - RNA, 14 nt, Human
ugaagaagauggua

SEQ ID NO: 3245062 - RNA, 20 nt, Human
ugaagaagcaccaaucauga

SEQ ID NO: 3245063 - RNA, 22 nt, Human
ugaacuuguaaaggaauuuaaa

SEQ ID NO: 3245064 - RNA, 17 nt, Human
ugaagauguagaggaga

SEQ ID NO: 3245065 - RNA, 18 nt, Human
ugaagauguagaggagaa

SEQ ID NO: 3245066 - RNA, 16 nt, Human
agauugugccccugca

SEQ ID NO: 3245067 - RNA, 16 nt, Human
agauuuaccacuugug

SEQ ID NO: 3245068 - RNA, 17 nt, Human
agauuuucagaaaauau

SEQ ID NO: 3245069 - RNA, 12 nt, Human
agauuuucagaa

SEQ ID NO: 3245070 - RNA, 24 nt, Human
ugacuucuaaguaaaaccacagca

SEQ ID NO: 3245071 - RNA, 15 nt, Human
ugacuguuuccauca

SEQ ID NO: 3245072 - RNA, 22 nt, Human
agauguauguacuucaugcugu

SEQ ID NO: 3245073 - RNA, 22 nt, Human
agaugcuagaacucccuuucaa

SEQ ID NO: 3245074 - RNA, 23 nt, Human
agaugcuagaacucccuuucaac

SEQ ID NO: 3245075 - RNA, 19 nt, Human
agaugaugaugaucuuuaa

SEQ ID NO: 3245076 - RNA, 14 nt, Human
agauccuggaaauc

SEQ ID NO: 3245077 - RNA, 16 nt, Human
agcaccaaucaugaau

SEQ ID NO: 3245078 - RNA, 22 nt, Human
agcacagccucuuagaugcagu

SEQ ID NO: 3245079 - RNA, 20 nt, Human
ugagcgacagugagacucug

SEQ ID NO: 3245080 - RNA, 16 nt, Human
ugagcgacagugagac

SEQ ID NO: 3245081 - RNA, 14 nt, Human
ugagcgacagugag

SEQ ID NO: 3245082 - RNA, 13 nt, Human
ugagcgacaguga

SEQ ID NO: 3245083 - RNA, 14 nt, Human
agcagaacagugau

SEQ ID NO: 3245084 - RNA, 15 nt, Human
ugaggacacugauau

SEQ ID NO: 3245085 - RNA, 16 nt, Human
ugagcuacaaaugcau

SEQ ID NO: 3245086 - RNA, 14 nt, Human
ugagcuacaaaugc

SEQ ID NO: 3245087 - RNA, 13 nt, Human
ugagcuacaaaug

SEQ ID NO: 3245088 - RNA, 22 nt, Human
ugagguacugagagugaacaaa

SEQ ID NO: 3245089 - RNA, 17 nt, Human
ugagguacugagaguga

SEQ ID NO: 3245090 - RNA, 21 nt, Human
agcagauggaaugcuguguua

SEQ ID NO: 3245091 - RNA, 15 nt, Human
aguuuagcuggaaaa

SEQ ID NO: 3245092 - RNA, 19 nt, Human
uuaaaaaagaaacauuugg

SEQ ID NO: 3245093 - RNA, 15 nt, Human
aguuuacauuguaaa

SEQ ID NO: 3245094 - RNA, 17 nt, Human
aguuuacauuguaaaua

SEQ ID NO: 3245095 - RNA, 13 nt, Human
aguuuacauugua

SEQ ID NO: 3245096 - RNA, 20 nt, Human
aguuuaaauuguaauaggcg

SEQ ID NO: 3245097 - RNA, 17 nt, Human
aguuuaaauuguaauag

SEQ ID NO: 3245098 - RNA, 16 nt, Human
uuaaaaaauggaacau

SEQ ID NO: 3245099 - RNA, 22 nt, Human
uuaaaaucauuucugcaucagc

SEQ ID NO: 3245100 - RNA, 14 nt, Human
uuaaaaucauuucu

SEQ ID NO: 3245101 - RNA, 15 nt, Human
uuaaauuuugaguuc

SEQ ID NO: 3245102 - RNA, 20 nt, Human
uuaaauuuugaguucuacau

SEQ ID NO: 3245103 - RNA, 16 nt, Human
aguuuuauaugcuucu

SEQ ID NO: 3245104 - RNA, 14 nt, Human
uuaggguuaugauu

SEQ ID NO: 3245105 - RNA, 16 nt, Human
uuaggguuaugauuaa

SEQ ID NO: 3245106 - RNA, 14 nt, Human
uuagggagagaaga

SEQ ID NO: 3245107 - RNA, 15 nt, Human
uuagggagagaagau

SEQ ID NO: 3245108 - RNA, 14 nt, Human
auaaucuuucacag

SEQ ID NO: 3245109 - RNA, 19 nt, Human
auaauuuauacaggucaua

SEQ ID NO: 3245110 - RNA, 21 nt, Human
auaauuuauacaggucauauu

SEQ ID NO: 3245111 - RNA, 17 nt, Human
auaauucagaaggaucu

SEQ ID NO: 3245112 - RNA, 17 nt, Human
auacuauggaauuucuc

SEQ ID NO: 3245113 - RNA, 15 nt, Human
uuauauuugaaauau

SEQ ID NO: 3245114 - RNA, 19 nt, Human
uuauauuugaaauauugac

SEQ ID NO: 3245115 - RNA, 22 nt, Human
auaccacaggaaccacaagacu

SEQ ID NO: 3245116 - RNA, 23 nt, Human
auacgcaacauaauuaaauuuug

SEQ ID NO: 3245117 - RNA, 21 nt, Human
uuaugaauuacauuuguauaa

SEQ ID NO: 3245118 - RNA, 14 nt, Human
uuaugaauuacauu

SEQ ID NO: 3245119 - RNA, 16 nt, Human
uuaugaauuacauuug

SEQ ID NO: 3245120 - RNA, 17 nt, Human
uuaugaauuacauuugu

SEQ ID NO: 3245121 - RNA, 19 nt, Human
uuaugauuaaguaaugaua

SEQ ID NO: 3245122 - RNA, 16 nt, Human
auacucauuaggaugg

SEQ ID NO: 3245123 - RNA, 19 nt, Human
uuauguuaaaacugggaca

SEQ ID NO: 3245124 - RNA, 14 nt, Human
uuauuauauuuaca

SEQ ID NO: 3245125 - RNA, 15 nt, Human
uuauuauauuuacaa

SEQ ID NO: 3245126 - RNA, 17 nt, Human
auagaauuaacacauga

SEQ ID NO: 3245127 - RNA, 13 nt, Human
auagaaguaaaaa

SEQ ID NO: 3245128 - RNA, 21 nt, Human
auagaguguacuuaacuauuc

SEQ ID NO: 3245129 - RNA, 14 nt, Human
auagaguguacuua

SEQ ID NO: 3245130 - RNA, 19 nt, Human
auagaguguacuuaacuau

SEQ ID NO: 3245131 - RNA, 18 nt, Human
auagauaggucagugcaa

SEQ ID NO: 3245132 - RNA, 15 nt, Human
auagagcaaaauuga

SEQ ID NO: 3245133 - RNA, 17 nt, Human
auagagcaaaauugaug

SEQ ID NO: 3245134 - RNA, 21 nt, Human
auagagcaaaauugauguguu

SEQ ID NO: 3245135 - RNA, 22 nt, Human
auagagcaaaauugauguguuu

SEQ ID NO: 3245136 - RNA, 13 nt, Human
agucucaggaaau

SEQ ID NO: 3245137 - RNA, 22 nt, Human
ugucucaguccaugaagaugua

SEQ ID NO: 3245138 - RNA, 14 nt, Human
agucaggaaagaga

SEQ ID NO: 3245139 - RNA, 19 nt, Human
uguaagggaaacugccagc

SEQ ID NO: 3245140 - RNA, 13 nt, Human
uguaagggaaacu

SEQ ID NO: 3245141 - RNA, 18 nt, Human
uguaagggaaacugccag

SEQ ID NO: 3245142 - RNA, 14 nt, Human
agguugcagugagc

SEQ ID NO: 3245143 - RNA, 16 nt, Human
aguaaaaccacagcag

SEQ ID NO: 3245144 - RNA, 17 nt, Human
aguaaaaccacagcagu

SEQ ID NO: 3245145 - RNA, 19 nt, Human
aguaaaaccacagcaguug

SEQ ID NO: 3245146 - RNA, 15 nt, Human
aguaaaaccacagca

SEQ ID NO: 3245147 - RNA, 19 nt, Human
aguacauuuggagacacaa

SEQ ID NO: 3245148 - RNA, 15 nt, Human
aguaauucaagaaaa

SEQ ID NO: 3245149 - RNA, 19 nt, Human
aguaauucaagaaaacaac

SEQ ID NO: 3245150 - RNA, 12 nt, Human
aguaauuggaaa

SEQ ID NO: 3245151 - RNA, 13 nt, Human
aguaauuggaaag

SEQ ID NO: 3245152 - RNA, 17 nt, Human
uguaguguuggagaaga

SEQ ID NO: 3245153 - RNA, 18 nt, Human
uguaguguuggagaagaa

SEQ ID NO: 3245154 - RNA, 18 nt, Human
uguauauccuuucuaaca

SEQ ID NO: 3245155 - RNA, 16 nt, Human
uguaguguuggagaag

SEQ ID NO: 3245156 - RNA, 16 nt, Human
aguacauuuggagaca

SEQ ID NO: 3245157 - RNA, 23 nt, Human
agugaacaaauuuacagagacag

SEQ ID NO: 3245158 - RNA, 22 nt, Human
agugaacaaauuuacagagaca

SEQ ID NO: 3245159 - RNA, 21 nt, Human
agugaacaaauuuacagagac

SEQ ID NO: 3245160 - RNA, 20 nt, Human
agugaacaaauuuacagaga

SEQ ID NO: 3245161 - RNA, 16 nt, Human
agucuuucacauuuaa

SEQ ID NO: 3245162 - RNA, 22 nt, Human
agugcaaauugucacaggacag

SEQ ID NO: 3245163 - RNA, 23 nt, Human
aguguuggagaagaacugaaauc

SEQ ID NO: 3245164 - RNA, 22 nt, Human
uguugcccacagcuguaugauu

SEQ ID NO: 3245165 - RNA, 15 nt, Human
uguucuaagaaguga

SEQ ID NO: 3245166 - RNA, 18 nt, Human
uguuccuagugaaagagg

SEQ ID NO: 3245167 - RNA, 19 nt, Human
ugugucuaaauuugaaugu

SEQ ID NO: 3245168 - RNA, 22 nt, Human
ugugucuaaauuugaauguuaa

SEQ ID NO: 3245169 - RNA, 14 nt, Human
uguguaaaauguga

SEQ ID NO: 3245170 - RNA, 22 nt, Human
uguguuaaguauguguaaaaug

SEQ ID NO: 3245171 - RNA, 23 nt, Human
uguuaagcagauggaaugcugug

SEQ ID NO: 3245172 - RNA, 22 nt, Human
agggcuguuauaaucuuucaca

SEQ ID NO: 3245173 - RNA, 13 nt, Human
agggagagaagau

SEQ ID NO: 3245174 - RNA, 14 nt, Human
agggagagaagaua

SEQ ID NO: 3245175 - RNA, 23 nt, Human
agggacuucugucuucacaacag

SEQ ID NO: 3245176 - RNA, 19 nt, Human
ugggaggcugagaugggag

SEQ ID NO: 3245177 - RNA, 20 nt, Human
ugggaacccaaguccaagca

SEQ ID NO: 3245178 - RNA, 16 nt, Human
agggaaacugccagca

SEQ ID NO: 3245179 - RNA, 19 nt, Human
agggaaacugccagcaacg

SEQ ID NO: 3245180 - RNA, 21 nt, Human
agggaaacugccagcaacgca

SEQ ID NO: 3245181 - RNA, 23 nt, Human
agggaaacugccagcaacgcagg

SEQ ID NO: 3245182 - RNA, 14 nt, Human
agggaaacugccag

SEQ ID NO: 3245183 - RNA, 15 nt, Human
agggaaacugccagc

SEQ ID NO: 3245184 - RNA, 23 nt, Human
uggcuauaggugcuacaaaaaca

SEQ ID NO: 3245185 - RNA, 18 nt, Human
uggcuaagcaaaauguga

SEQ ID NO: 3245186 - RNA, 15 nt, Human
uggcuauaggugcua

SEQ ID NO: 3245187 - RNA, 19 nt, Human
uggcuauaggugcuacaaa

SEQ ID NO: 3245188 - RNA, 17 nt, Human
ugggaaagcauuguaaa

SEQ ID NO: 3245189 - RNA, 18 nt, Human
ugggaaagcauuguaaau

SEQ ID NO: 3245190 - RNA, 14 nt, Human
ugggaaagcauugu

SEQ ID NO: 3245191 - RNA, 16 nt, Human
ugggaaagcauuguaa

SEQ ID NO: 3245192 - RNA, 18 nt, Human
ugggaaacaaaaggauaa

SEQ ID NO: 3245193 - RNA, 14 nt, Human
uggagaagaacuga

SEQ ID NO: 3245194 - RNA, 16 nt, Human
uggagaagaacugaaa

SEQ ID NO: 3245195 - RNA, 21 nt, Human
uggagcucgugggacagucac

SEQ ID NO: 3245196 - RNA, 22 nt, Human
uggaauuucucccagucauuua

SEQ ID NO: 3245197 - RNA, 21 nt, Human
uggaacaagaugguucuagca

SEQ ID NO: 3245198 - RNA, 22 nt, Human
aggcuccacuuggucugugaga

SEQ ID NO: 3245199 - RNA, 21 nt, Human
aggcuccacuuggucugugag

SEQ ID NO: 3245200 - RNA, 17 nt, Human
aggcuccacuuggucug

SEQ ID NO: 3245201 - RNA, 11 nt, Human
aggcuccacuu

SEQ ID NO: 3245202 - RNA, 13 nt, Human
aggaaauauuuau

SEQ ID NO: 3245203 - RNA, 14 nt, Human
aggaaauauuuauu

SEQ ID NO: 3245204 - RNA, 18 nt, Human
aggaaauauuuauuuuaa

SEQ ID NO: 3245205 - RNA, 19 nt, Human
aggaauugacccacaagaa

SEQ ID NO: 3245206 - RNA, 20 nt, Human
agcuuauuaaaacucauuuu

SEQ ID NO: 3245207 - RNA, 15 nt, Human
agcuuauuaaaacuc

SEQ ID NO: 3245208 - RNA, 21 nt, Human
agcuuauugucuagugaaacu

SEQ ID NO: 3245209 - RNA, 14 nt, Human
ugcuaguaauugga

SEQ ID NO: 3245210 - RNA, 16 nt, Human
ugcuaguaauuggaaa

SEQ ID NO: 3245211 - RNA, 13 nt, Human
aggaaagagaacu

SEQ ID NO: 3245212 - RNA, 19 nt, Human
aggaaagagaacuuccaga

SEQ ID NO: 3245213 - RNA, 13 nt, Human
agcuggaaaagua

SEQ ID NO: 3245214 - RNA, 19 nt, Human
agcuacuaauuuuaaaaug

SEQ ID NO: 3245215 - RNA, 17 nt, Human
agcccuucuuuccacag

SEQ ID NO: 3245216 - RNA, 18 nt, Human
agcccuucuuuccacaga

SEQ ID NO: 3245217 - RNA, 19 nt, Human
agcccuucuuuccacagaa

SEQ ID NO: 3245218 - RNA, 14 nt, Human
ugcagugagccgag

SEQ ID NO: 3245219 - RNA, 18 nt, Human
agccugagcgacagugag

SEQ ID NO: 3245220 - RNA, 19 nt, Human
agccugcaauuucauaugc

SEQ ID NO: 3245221 - RNA, 21 nt, Human
agccugcaauuucauaugcug

SEQ ID NO: 3245222 - RNA, 19 nt, Human
auugacacuuaaaaauggu

SEQ ID NO: 3245223 - RNA, 17 nt, Human
auugacacuuaaaaaug

SEQ ID NO: 3245224 - RNA, 15 nt, Human
auugacacuuaaaaa

SEQ ID NO: 3245225 - RNA, 15 nt, Human
auucuagcuaaugua

SEQ ID NO: 3245226 - RNA, 18 nt, Human
auucuagcuaauguaaua

SEQ ID NO: 3245227 - RNA, 17 nt, Human
auuauauuuacaaaugg

SEQ ID NO: 3245228 - RNA, 15 nt, Human
auuauauuuauuacu

SEQ ID NO: 3245229 - RNA, 18 nt, Human
auuauauuuauuacugua

SEQ ID NO: 3245230 - RNA, 21 nt, Human
auuauguuaaaacugggacag

SEQ ID NO: 3245231 - RNA, 20 nt, Human
auuauuaccuuacagaaguu

SEQ ID NO: 3245232 - RNA, 19 nt, Human
auucaaacagucucaggaa

SEQ ID NO: 3245233 - RNA, 16 nt, Human
auucaaacagucucag

SEQ ID NO: 3245234 - RNA, 18 nt, Human
auucaaacagucucagga

SEQ ID NO: 3245235 - RNA, 19 nt, Human
auuauuuuguucauacaua

SEQ ID NO: 3245236 - RNA, 18 nt, Human
auuauuuuguucauacau

SEQ ID NO: 3245237 - RNA, 17 nt, Human
auuauuuuguucauaca

SEQ ID NO: 3245238 - RNA, 16 nt, Human
auuauuuuguucauac

SEQ ID NO: 3245239 - RNA, 15 nt, Human
auuauuuuguucaua

SEQ ID NO: 3245240 - RNA, 14 nt, Human
auucuaaauuuuau

SEQ ID NO: 3245241 - RNA, 18 nt, Human
auucagaaggaucuucau

SEQ ID NO: 3245242 - RNA, 24 nt, Human
auucagaaggaucuucaucugacu

SEQ ID NO: 3245243 - RNA, 14 nt, Human
auuuuccugaaaac

SEQ ID NO: 3245244 - RNA, 15 nt, Human
auuuucuauaauuua

SEQ ID NO: 3245245 - RNA, 14 nt, Human
auuuucuauaauuu

SEQ ID NO: 3245246 - RNA, 12 nt, Human
auuuuguucaua

SEQ ID NO: 3245247 - RNA, 18 nt, Human
auuuuguucauacauauu

SEQ ID NO: 3245248 - RNA, 16 nt, Human
auuuuguucauacaua

SEQ ID NO: 3245249 - RNA, 15 nt, Human
auuuuguucauacau

SEQ ID NO: 3245250 - RNA, 14 nt, Human
auuuuguucauaca

SEQ ID NO: 3245251 - RNA, 18 nt, Human
auuuuuuguuaaaugauu

SEQ ID NO: 3245252 - RNA, 20 nt, Human
auuuuuucucuaggaaauau

SEQ ID NO: 3245253 - RNA, 23 nt, Human
auuuuuucucuaggaaauauuua

SEQ ID NO: 3245254 - RNA, 21 nt, Human
auuuuuguuuucauuaucuca

SEQ ID NO: 3245255 - RNA, 22 nt, Human
auuuuugugauuuugugauuga

SEQ ID NO: 3245256 - RNA, 21 nt, Human
auuuuuguagcacugacagau

SEQ ID NO: 3245257 - RNA, 20 nt, Human
auuuuuguagcacugacaga

SEQ ID NO: 3245258 - RNA, 15 nt, Human
auuuuucuuauuuca

SEQ ID NO: 3245259 - RNA, 19 nt, Human
auuuuucuuauuucauuuc

SEQ ID NO: 3245260 - RNA, 20 nt, Human
auuuuucuuauuucauuucu

SEQ ID NO: 3245261 - RNA, 15 nt, Human
auuuuugacagaaua

SEQ ID NO: 3245262 - RNA, 14 nt, Human
auuuuugacagaau

SEQ ID NO: 3245263 - RNA, 13 nt, Human
auuuuugacagaa

SEQ ID NO: 3245264 - RNA, 12 nt, Human
auuuuugacaga

SEQ ID NO: 3245265 - RNA, 22 nt, Human
auuuuugacagaauauguuuca

SEQ ID NO: 3245266 - RNA, 15 nt, Human
auuuuuccaaaauaa

SEQ ID NO: 3245267 - RNA, 15 nt, Human
auuuuucacauaucu

SEQ ID NO: 3245268 - RNA, 21 nt, Human
auuuuucacauaucuaguaug

SEQ ID NO: 3245269 - RNA, 18 nt, Human
auuuuucacauaucuagu

SEQ ID NO: 3245270 - RNA, 13 nt, Human
auugucuagugaa

SEQ ID NO: 3245271 - RNA, 16 nt, Human
auuguacgaagaguau

SEQ ID NO: 3245272 - RNA, 19 nt, Human
auuggagcucgugggacag

SEQ ID NO: 3245273 - RNA, 19 nt, Human
auuggacaguaaaauccac

SEQ ID NO: 3245274 - RNA, 13 nt, Human
auugacuuuuuau

SEQ ID NO: 3245275 - RNA, 18 nt, Human
auugcuuuggucauauga

SEQ ID NO: 3245276 - RNA, 14 nt, Human
auugcuuuggucau

SEQ ID NO: 3245277 - RNA, 16 nt, Human
auuuuaaaagaaugau

SEQ ID NO: 3245278 - RNA, 23 nt, Human
auuuuaaaagaaugauuaugaau

SEQ ID NO: 3245279 - RNA, 19 nt, Human
auuuguaguguuggagaag

SEQ ID NO: 3245280 - RNA, 22 nt, Human
auuuguaguguuggagaagaac

SEQ ID NO: 3245281 - RNA, 14 nt, Human
auuuguauaaaaua

SEQ ID NO: 3245282 - RNA, 14 nt, Human
auuuauuuuaauaa

SEQ ID NO: 3245283 - RNA, 15 nt, Human
augaauuaaguuuuu

SEQ ID NO: 3245284 - RNA, 15 nt, Human
augaauuacauuugu

SEQ ID NO: 3245285 - RNA, 23 nt, Human
augaauggcuaagcaaaauguga

SEQ ID NO: 3245286 - RNA, 16 nt, Human
augaauuacauuugua

SEQ ID NO: 3245287 - RNA, 19 nt, Human
augaaauuauauaaguauu

SEQ ID NO: 3245288 - RNA, 21 nt, Human
augaaauuauauaaguauucu

SEQ ID NO: 3245289 - RNA, 18 nt, Human
uuggagacacaacuauuu

SEQ ID NO: 3245290 - RNA, 20 nt, Human
uuggagacacaacuauuuuu

SEQ ID NO: 3245291 - RNA, 18 nt, Human
aucuuguagcuuuaucaa

SEQ ID NO: 3245292 - RNA, 20 nt, Human
aucuuguagcuuuaucaaag

SEQ ID NO: 3245293 - RNA, 19 nt, Human
aucuuguagcuuuaucaaa

SEQ ID NO: 3245294 - RNA, 13 nt, Human
uugcaucaauuuu

SEQ ID NO: 3245295 - RNA, 22 nt, Human
uugcaagccagauuuuccugaa

SEQ ID NO: 3245296 - RNA, 19 nt, Human
aucuacacuccagugagac

SEQ ID NO: 3245297 - RNA, 18 nt, Human
aucuacacuccagugaga

SEQ ID NO: 3245298 - RNA, 20 nt, Human
uugacagaauauguuucaaa

SEQ ID NO: 3245299 - RNA, 17 nt, Human
uugacagaauauguuuc

SEQ ID NO: 3245300 - RNA, 14 nt, Human
auccauacauuugu

SEQ ID NO: 3245301 - RNA, 12 nt, Human
uucucuaggaaa

SEQ ID NO: 3245302 - RNA, 19 nt, Human
uugaacccgggaggcagag

SEQ ID NO: 3245303 - RNA, 18 nt, Human
uugaacccgggaggcaga

SEQ ID NO: 3245304 - RNA, 17 nt, Human
uugaaauuguauuacaa

SEQ ID NO: 3245305 - RNA, 14 nt, Human
aucaacagauaaau

SEQ ID NO: 3245306 - RNA, 20 nt, Human
auauuuuuuguuaaaugauu

SEQ ID NO: 3245307 - RNA, 18 nt, Human
auauuuuuuguuaaauga

SEQ ID NO: 3245308 - RNA, 12 nt, Human
auauuuuucaca

SEQ ID NO: 3245309 - RNA, 15 nt, Human
auauuuuucacauau

SEQ ID NO: 3245310 - RNA, 14 nt, Human
auauuuuucacaua

SEQ ID NO: 3245311 - RNA, 13 nt, Human
auauuuuucacau

SEQ ID NO: 3245312 - RNA, 19 nt, Human
uuccguagguuauuuucag

SEQ ID NO: 3245313 - RNA, 14 nt, Human
uucggccuccaucc

SEQ ID NO: 3245314 - RNA, 14 nt, Human
uucuagcauggcau

SEQ ID NO: 3245315 - RNA, 21 nt, Human
uucuagcauggcauauuuuuc

SEQ ID NO: 3245316 - RNA, 20 nt, Human
uucuagcauggcauauuuuu

SEQ ID NO: 3245317 - RNA, 18 nt, Human
uucuagcauggcauauuu

SEQ ID NO: 3245318 - RNA, 15 nt, Human
uucuagcauggcaua

SEQ ID NO: 3245319 - RNA, 22 nt, Human
uucuagcauggcauauuuuuca

SEQ ID NO: 3245320 - RNA, 17 nt, Human
uucuagcuaauguaaua

SEQ ID NO: 3245321 - RNA, 16 nt, Human
uucuaaguaaaaccac

SEQ ID NO: 3245322 - RNA, 15 nt, Human
uucuaaguaaaacca

SEQ ID NO: 3245323 - RNA, 13 nt, Human
uucuaagaaguga

SEQ ID NO: 3245324 - RNA, 23 nt, Human
uucuaagaagugaaaaucuacac

SEQ ID NO: 3245325 - RNA, 14 nt, Human
uucuaaauuuuaua

SEQ ID NO: 3245326 - RNA, 22 nt, Human
aucacuugucaauaaaauccau

SEQ ID NO: 3245327 - RNA, 17 nt, Human
aucaggguuaguauugu

SEQ ID NO: 3245328 - RNA, 15 nt, Human
augauaacuggaaac

SEQ ID NO: 3245329 - RNA, 17 nt, Human
augauaaguaaaugcua

SEQ ID NO: 3245330 - RNA, 20 nt, Human
uuguguuaaguauguguaaa

SEQ ID NO: 3245331 - RNA, 18 nt, Human
augauuaaguaaugauaa

SEQ ID NO: 3245332 - RNA, 14 nt, Human
augauuaaguaaug

SEQ ID NO: 3245333 - RNA, 17 nt, Human
augccauuuaaagcuua

SEQ ID NO: 3245334 - RNA, 21 nt, Human
augccauuuaaagcuuauuaa

SEQ ID NO: 3245335 - RNA, 13 nt, Human
augcaguucugaa

SEQ ID NO: 3245336 - RNA, 21 nt, Human
augcuagaacucccuuucaac

SEQ ID NO: 3245337 - RNA, 20 nt, Human
augcuagaacucccuuucaa

SEQ ID NO: 3245338 - RNA, 22 nt, Human
augcuagaacucccuuucaaca

SEQ ID NO: 3245339 - RNA, 19 nt, Human
augcuagaacucccuuuca

SEQ ID NO: 3245340 - RNA, 18 nt, Human
augcuagguuaauuccaa

SEQ ID NO: 3245341 - RNA, 21 nt, Human
uuuaucaaagggugaaaauua

SEQ ID NO: 3245342 - RNA, 16 nt, Human
uuucaaacauauauaa

SEQ ID NO: 3245343 - RNA, 19 nt, Human
auggcuaagcaaaauguga

SEQ ID NO: 3245344 - RNA, 23 nt, Human
auggcuauaggugcuacaaaaac

SEQ ID NO: 3245345 - RNA, 14 nt, Human
auggcacuaguauu

SEQ ID NO: 3245346 - RNA, 16 nt, Human
auggcacuaguauuuc

SEQ ID NO: 3245347 - RNA, 18 nt, Human
auggcauauuuuucacau

SEQ ID NO: 3245348 - RNA, 23 nt, Human
auggcauauuuuucacauaucua

SEQ ID NO: 3245349 - RNA, 22 nt, Human
auggcauauuuuucacauaucu

SEQ ID NO: 3245350 - RNA, 21 nt, Human
auggcauauuuuucacauauc

SEQ ID NO: 3245351 - RNA, 20 nt, Human
auggcauauuuuucacauau

SEQ ID NO: 3245352 - RNA, 14 nt, Human
uuucaaacuuugga

SEQ ID NO: 3245353 - RNA, 17 nt, Human
uuucucccagucauuua

SEQ ID NO: 3245354 - RNA, 18 nt, Human
uuucucccagucauuuaa

SEQ ID NO: 3245355 - RNA, 15 nt, Human
uuugaaauauugacu

SEQ ID NO: 3245356 - RNA, 21 nt, Human
augguucccuugaugaagaag

SEQ ID NO: 3245357 - RNA, 14 nt, Human
uuugcaagccagau

SEQ ID NO: 3245358 - RNA, 13 nt, Human
uuugcucauggaa

SEQ ID NO: 3245359 - RNA, 16 nt, Human
auguacuucaugcugu

SEQ ID NO: 3245360 - RNA, 13 nt, Human
auguagaggagaa

SEQ ID NO: 3245361 - RNA, 12 nt, Human
auguagaggaga

SEQ ID NO: 3245362 - RNA, 19 nt, Human
auguagaggagaaacugga

SEQ ID NO: 3245363 - RNA, 17 nt, Human
auguagaggagaaacug

SEQ ID NO: 3245364 - RNA, 22 nt, Human
uuugacagaauauguuucaaac

SEQ ID NO: 3245365 - RNA, 21 nt, Human
uuugacagaauauguuucaaa

SEQ ID NO: 3245366 - RNA, 17 nt, Human
auguccacugguucuuc

SEQ ID NO: 3245367 - RNA, 16 nt, Human
auguccacugguucuu

SEQ ID NO: 3245368 - RNA, 17 nt, Human
uuuguaguguuggagaa

SEQ ID NO: 3245369 - RNA, 19 nt, Human
uuuguaguguuggagaaga

SEQ ID NO: 3245370 - RNA, 21 nt, Human
uuuguaguguuggagaagaac

SEQ ID NO: 3245371 - RNA, 17 nt, Human
uuugugaagcaaaauuu

SEQ ID NO: 3245372 - RNA, 13 nt, Human
aaaaacacagcaa

SEQ ID NO: 3245373 - RNA, 18 nt, Human
aaaaacacagcaagggug

SEQ ID NO: 3245374 - RNA, 12 nt, Human
aaaaacacagca

SEQ ID NO: 3245375 - RNA, 18 nt, Human
auaaaggauuaaugucaa

SEQ ID NO: 3245376 - RNA, 14 nt, Human
auaaaaauauugug

SEQ ID NO: 3245377 - RNA, 17 nt, Human
auacacacucaaaucaa

SEQ ID NO: 3245378 - RNA, 18 nt, Human
auacacacucaaaucaag

SEQ ID NO: 3245379 - RNA, 23 nt, Human
auaauguuucaaacauauauaac

SEQ ID NO: 3245380 - RNA, 20 nt, Human
auaauuaaauuuugaguucu

SEQ ID NO: 3245381 - RNA, 18 nt, Human
auagcagcuuauucacaa

SEQ ID NO: 3245382 - RNA, 14 nt, Human
auaggugcuacaaa

SEQ ID NO: 3245383 - RNA, 15 nt, Human
auaggugcuacaaaa

SEQ ID NO: 3245384 - RNA, 21 nt, Human
auaggugcuacaaaaacacag

SEQ ID NO: 3245385 - RNA, 23 nt, Human
auaggugcuacaaaaacacagca

SEQ ID NO: 3245386 - RNA, 15 nt, Human
auagguuuaauaauu

SEQ ID NO: 3245387 - RNA, 20 nt, Human
auaguauuugagaguucuaa

SEQ ID NO: 3245388 - RNA, 21 nt, Human
auaguauuugagaguucuaaa

SEQ ID NO: 3245389 - RNA, 23 nt, Human
auaguauuugagaguucuaaauu

SEQ ID NO: 3245390 - RNA, 14 nt, Human
auagucaaauugug

SEQ ID NO: 3245391 - RNA, 20 nt, Human
auaugcuucuguuuuauaau

SEQ ID NO: 3245392 - RNA, 22 nt, Human
auaugcuucuguuuuauaauuu

SEQ ID NO: 3245393 - RNA, 22 nt, Human
auauuuauuacuguaagaaaau

SEQ ID NO: 3245394 - RNA, 13 nt, Human
auauuuauuuuaa

SEQ ID NO: 3245395 - RNA, 16 nt, Human
auauuauguuaaaacu

SEQ ID NO: 3245396 - RNA, 12 nt, Human
aguccuguaaug

SEQ ID NO: 3245397 - RNA, 23 nt, Human
agucaaauugugugaaagguacu

SEQ ID NO: 3245398 - RNA, 19 nt, Human
agucaaauugugugaaagg

SEQ ID NO: 3245399 - RNA, 16 nt, Human
aguaugaaauuauaua

SEQ ID NO: 3245400 - RNA, 14 nt, Human
aguaugaaauuaua

SEQ ID NO: 3245401 - RNA, 22 nt, Human
aguugaaaagacuccaaagaaa

SEQ ID NO: 3245402 - RNA, 23 nt, Human
aguugaaaaucuuauaauuuaaa

SEQ ID NO: 3245403 - RNA, 21 nt, Human
aguugaaaagacuccaaagaa

SEQ ID NO: 3245404 - RNA, 22 nt, Human
aguugaaaaucuuauaauuuaa

SEQ ID NO: 3245405 - RNA, 15 nt, Human
aguucauacauugua

SEQ ID NO: 3245406 - RNA, 11 nt, Human
aguucauacau

SEQ ID NO: 3245407 - RNA, 10 nt, Human
aguucauaca

SEQ ID NO: 3245408 - RNA, 17 nt, Human
agugucuuaauuaaaag

SEQ ID NO: 3245409 - RNA, 18 nt, Human
agugucuuaauuaaaaga

SEQ ID NO: 3245410 - RNA, 15 nt, Human
agugucuuaauuaaa

SEQ ID NO: 3245411 - RNA, 17 nt, Human
augcauagguuuagcag

SEQ ID NO: 3245412 - RNA, 21 nt, Human
augcauagguuuagcaguaua

SEQ ID NO: 3245413 - RNA, 19 nt, Human
auguaagggaaacugccag

SEQ ID NO: 3245414 - RNA, 14 nt, Human
auguaagggaaacu

SEQ ID NO: 3245415 - RNA, 16 nt, Human
auguaagggaaacugc

SEQ ID NO: 3245416 - RNA, 20 nt, Human
auguauucuagcuaauguaa

SEQ ID NO: 3245417 - RNA, 19 nt, Human
auguauucuagcuaaugua

SEQ ID NO: 3245418 - RNA, 18 nt, Human
augugggcagugauguca

SEQ ID NO: 3245419 - RNA, 17 nt, Human
auguucuaagaagugaa

SEQ ID NO: 3245420 - RNA, 13 nt, Human
auguuucaaacuu

SEQ ID NO: 3245421 - RNA, 12 nt, Human
auguuucaaacu

SEQ ID NO: 3245422 - RNA, 17 nt, Human
auguuucaaacuuugga

SEQ ID NO: 3245423 - RNA, 14 nt, Human
auguuucaaacuuu

SEQ ID NO: 3245424 - RNA, 21 nt, Human
auguuucaaacauauauaaca

SEQ ID NO: 3245425 - RNA, 22 nt, Human
aucagcugcugaaacaacaaau

SEQ ID NO: 3245426 - RNA, 23 nt, Human
aucagcugcugaaacaacaaaua

SEQ ID NO: 3245427 - RNA, 17 nt, Human
aucagcugcugaaacaa

SEQ ID NO: 3245428 - RNA, 17 nt, Human
auauuuauuuuaauaau

SEQ ID NO: 3245429 - RNA, 14 nt, Human
auauuuauuuuaau

SEQ ID NO: 3245430 - RNA, 15 nt, Human
auauuuauuuuaaua

SEQ ID NO: 3245431 - RNA, 21 nt, Human
aucagcugcugaaacaacaaa

SEQ ID NO: 3245432 - RNA, 23 nt, Human
aggugcuacaaaaacacagcaag

SEQ ID NO: 3245433 - RNA, 24 nt, Human
aggugcuacaaaaacacagcaagg

SEQ ID NO: 3245434 - RNA, 16 nt, Human
aggugcuacaaaaaca

SEQ ID NO: 3245435 - RNA, 18 nt, Human
aggugcuacaaaaacaca

SEQ ID NO: 3245436 - RNA, 19 nt, Human
aggugcuacaaaaacacag

SEQ ID NO: 3245437 - RNA, 20 nt, Human
aggugcuacaaaaacacagc

SEQ ID NO: 3245438 - RNA, 21 nt, Human
aggugcuacaaaaacacagca

SEQ ID NO: 3245439 - RNA, 22 nt, Human
aggugcuacaaaaacacagcaa

SEQ ID NO: 3245440 - RNA, 20 nt, Human
agguaaaagcaucacaugaa

SEQ ID NO: 3245441 - RNA, 15 nt, Human
aggcuagauguaugu

SEQ ID NO: 3245442 - RNA, 16 nt, Human
aggcuagauguaugua

SEQ ID NO: 3245443 - RNA, 21 nt, Human
aggcuagaaccaccugccuau

SEQ ID NO: 3245444 - RNA, 17 nt, Human
aggcuacugucagcucc

SEQ ID NO: 3245445 - RNA, 23 nt, Human
aggaugguucccuugaugaagaa

SEQ ID NO: 3245446 - RNA, 17 nt, Human
aggauguugaaaaaguu

SEQ ID NO: 3245447 - RNA, 22 nt, Human
agcuccccucggagaagagcug

SEQ ID NO: 3245448 - RNA, 17 nt, Human
agagaacuuccagaucc

SEQ ID NO: 3245449 - RNA, 21 nt, Human
agacugcauuauauuuauuac

SEQ ID NO: 3245450 - RNA, 13 nt, Human
agcaguugaaaag

SEQ ID NO: 3245451 - RNA, 16 nt, Human
agcaguugaaaagacu

SEQ ID NO: 3245452 - RNA, 18 nt, Human
agcacugacagauuucca

SEQ ID NO: 3245453 - RNA, 14 nt, Human
agcacugacagauu

SEQ ID NO: 3245454 - RNA, 13 nt, Human
agcacugacagau

SEQ ID NO: 3245455 - RNA, 21 nt, Human
acacgagcaggcuacugucag

SEQ ID NO: 3245456 - RNA, 14 nt, Human
acacgagcaggcua

SEQ ID NO: 3245457 - RNA, 19 nt, Human
acacgagcaggcuacuguc

SEQ ID NO: 3245458 - RNA, 21 nt, Human
acagcaguugaaaagacucca

SEQ ID NO: 3245459 - RNA, 22 nt, Human
acagcaguugaaaagacuccaa

SEQ ID NO: 3245460 - RNA, 23 nt, Human
acagcaguugaaaagacuccaaa

SEQ ID NO: 3245461 - RNA, 18 nt, Human
acagcaguugaaaagacu

SEQ ID NO: 3245462 - RNA, 20 nt, Human
accaaggcugauuaaaccaa

SEQ ID NO: 3245463 - RNA, 21 nt, Human
acauuuguauaaaauaauuuu

SEQ ID NO: 3245464 - RNA, 21 nt, Human
acccacaagaaaugaaagcag

SEQ ID NO: 3245465 - RNA, 17 nt, Human
acccacaagaaaugaaa

SEQ ID NO: 3245466 - RNA, 15 nt, Human
acccacaagaaauga

SEQ ID NO: 3245467 - RNA, 22 nt, Human
acuuuauuuucuauaauuuaaa

SEQ ID NO: 3245468 - RNA, 16 nt, Human
agaaaaucaggcuggc

SEQ ID NO: 3245469 - RNA, 14 nt, Human
agaaaauaacaaua

SEQ ID NO: 3245470 - RNA, 22 nt, Human
acuuuauacccagaaaguuauu

SEQ ID NO: 3245471 - RNA, 20 nt, Human
acuuuauacccagaaaguua

SEQ ID NO: 3245472 - RNA, 11 nt, Human
agaaaguuauu

SEQ ID NO: 3245473 - RNA, 23 nt, Human
agaaaguuauugauaaguucaua

SEQ ID NO: 3245474 - RNA, 21 nt, Human
acuuggucugugagaugcuag

SEQ ID NO: 3245475 - RNA, 21 nt, Human
acuucugucuucacaacagau

SEQ ID NO: 3245476 - RNA, 22 nt, Human
acuguaagaaaauaucacuugu

SEQ ID NO: 3245477 - RNA, 19 nt, Human
acuguaagaaaauaucacu

SEQ ID NO: 3245478 - RNA, 13 nt, Human
acuguaagaaaau

SEQ ID NO: 3245479 - RNA, 22 nt, Human
acugugaaguuuacauuguaaa

SEQ ID NO: 3245480 - RNA, 17 nt, Human
acucugucucaguccau

SEQ ID NO: 3245481 - RNA, 18 nt, Human
acucugucucaguccaug

SEQ ID NO: 3245482 - RNA, 20 nt, Human
acucugucucaguccaugaa

SEQ ID NO: 3245483 - RNA, 13 nt, Human
acugccagcaacg

SEQ ID NO: 3245484 - RNA, 17 nt, Human
acucuauguucuaagaa

SEQ ID NO: 3245485 - RNA, 21 nt, Human
acucauaaaaagccugcaauu

SEQ ID NO: 3245486 - RNA, 14 nt, Human
acucaaaucaagaa

SEQ ID NO: 3245487 - RNA, 19 nt, Human
acuaguauuucuaugaaau

SEQ ID NO: 3245488 - RNA, 20 nt, Human
acuaguauuucuaugaaaua

SEQ ID NO: 3245489 - RNA, 21 nt, Human
acuauucaaacagucucagga

SEQ ID NO: 3245490 - RNA, 18 nt, Human
acuauucaaacagucuca

SEQ ID NO: 3245491 - RNA, 22 nt, Human
acuauucaggagaguagaacag

SEQ ID NO: 3245492 - RNA, 19 nt, Human
acgcaggcccccaggugcc

SEQ ID NO: 3245493 - RNA, 22 nt, Human
acgcaggcccccaggugccagu

SEQ ID NO: 3245494 - RNA, 13 nt, Human
acuaagagagaau

SEQ ID NO: 3245495 - RNA, 16 nt, Human
aaaaucucaauauuuc

SEQ ID NO: 3245496 - RNA, 21 nt, Human
aaaauugauguguuuauuuau

SEQ ID NO: 3245497 - RNA, 12 nt, Human
aaaauugaugug

SEQ ID NO: 3245498 - RNA, 14 nt, Human
aaaauugauguguu

SEQ ID NO: 3245499 - RNA, 24 nt, Human
aaacacucaguuguucaauaauaa

SEQ ID NO: 3245500 - RNA, 16 nt, Human
aaaaagaaacauuugg

SEQ ID NO: 3245501 - RNA, 18 nt, Human
aaaaguucugcagauaaa

SEQ ID NO: 3245502 - RNA, 21 nt, Human
aaaaucuacacuccagugaga

SEQ ID NO: 3245503 - RNA, 17 nt, Human
aaaaucaguuguacagu

SEQ ID NO: 3245504 - RNA, 21 nt, Human
aaacugagaugugaacacauc

SEQ ID NO: 3245505 - RNA, 23 nt, Human
aaacugagaugugaacacaucag

SEQ ID NO: 3245506 - RNA, 15 nt, Human
aaaucaaauaugcaa

SEQ ID NO: 3245507 - RNA, 12 nt, Human
aaaucaaauaug

SEQ ID NO: 3245508 - RNA, 14 nt, Human
aaaucaaauaugca

SEQ ID NO: 3245509 - RNA, 20 nt, Human
aaauauuuauuuuaauaaug

SEQ ID NO: 3245510 - RNA, 13 nt, Human
aaauauuuauuuu

SEQ ID NO: 3245511 - RNA, 15 nt, Human
aaauauuuauuuuaa

SEQ ID NO: 3245512 - RNA, 14 nt, Human
aaaggcagaagcaa

SEQ ID NO: 3245513 - RNA, 20 nt, Human
aacugagaugugaacacauc

SEQ ID NO: 3245514 - RNA, 19 nt, Human
aacugacucuuaagaagac

SEQ ID NO: 3245515 - RNA, 20 nt, Human
aacugacucuuaagaagacu

SEQ ID NO: 3245516 - RNA, 15 nt, Human
aacugacucuuaaga

SEQ ID NO: 3245517 - RNA, 18 nt, Human
aacugacucuuaagaaga

SEQ ID NO: 3245518 - RNA, 21 nt, Human
aacuuuaugcuaagugaaaua

SEQ ID NO: 3245519 - RNA, 20 nt, Human
aacuuuaugcuaagugaaau

SEQ ID NO: 3245520 - RNA, 23 nt, Human
aacuuuauacccagaaaguuauu

SEQ ID NO: 3245521 - RNA, 22 nt, Human
aacuuuauacccagaaaguuau

SEQ ID NO: 3245522 - RNA, 18 nt, Human
aacaaauuuacagagaca

SEQ ID NO: 3245523 - RNA, 12 nt, Human
aacacaucagcu

SEQ ID NO: 3245524 - RNA, 16 nt, Human
aacacaucagcuugcc

SEQ ID NO: 3245525 - RNA, 19 nt, Human
aaauugacacuuaaaaaug

SEQ ID NO: 3245526 - RNA, 22 nt, Human
aaauguuguucucuucuuuaaa

SEQ ID NO: 3245527 - RNA, 17 nt, Human
aaaucuuauaauuuaaa

SEQ ID NO: 3245528 - RNA, 16 nt, Human
aacccgggaggcagag

SEQ ID NO: 3245529 - RNA, 22 nt, Human
aaccacuggaaaguuuaugguu

SEQ ID NO: 3245530 - RNA, 20 nt, Human
aagcagauggaaugcugugu

SEQ ID NO: 3245531 - RNA, 17 nt, Human
aagcagauggaaugcug

SEQ ID NO: 3245532 - RNA, 19 nt, Human
aagcagauggaaugcugug

SEQ ID NO: 3245533 - RNA, 20 nt, Human
aaggcagcucuaaaugucaa

SEQ ID NO: 3245534 - RNA, 23 nt, Human
aagggaaacugccagcaacgcag

SEQ ID NO: 3245535 - RNA, 16 nt, Human
aagggaaacugccagc

SEQ ID NO: 3245536 - RNA, 17 nt, Human
aagggaaacugccagca

SEQ ID NO: 3245537 - RNA, 18 nt, Human
aaguccaagcauuuagau

SEQ ID NO: 3245538 - RNA, 17 nt, Human
aaguccaagcauaccaa

SEQ ID NO: 3245539 - RNA, 21 nt, Human
aaguagggacuucugucuuca

SEQ ID NO: 3245540 - RNA, 21 nt, Human
aaugauuaugaauuacauuug

SEQ ID NO: 3245541 - RNA, 15 nt, Human
aaugauuaugaauua

SEQ ID NO: 3245542 - RNA, 15 nt, Human
aaucaagaaacuuaa

SEQ ID NO: 3245543 - RNA, 15 nt, Human
aaucaccaaaggcuc

SEQ ID NO: 3245544 - RNA, 15 nt, Human
aauauguuucaaacu

SEQ ID NO: 3245545 - RNA, 13 nt, Human
aauauguuucaaa

SEQ ID NO: 3245546 - RNA, 17 nt, Human
aauauguuucaaacuuu

SEQ ID NO: 3245547 - RNA, 16 nt, Human
aauauguuucaaacuu

SEQ ID NO: 3245548 - RNA, 23 nt, Human
aauguuucaaacauauauaacaa

SEQ ID NO: 3245549 - RNA, 21 nt, Human
aaugcuagguuaauuccaauu

SEQ ID NO: 3245550 - RNA, 18 nt, Human
aaugcuagguuaauucca

SEQ ID NO: 3245551 - RNA, 19 nt, Human
aaugcuagguuaauuccaa

SEQ ID NO: 3245552 - RNA, 22 nt, Human
caaugaaugaaugaauggcuaa

SEQ ID NO: 3245553 - RNA, 21 nt, Human
caauaucuuuuuuuuaauaaa

SEQ ID NO: 3245554 - RNA, 11 nt, Human
cacaacagauu

SEQ ID NO: 3245555 - RNA, 19 nt, Human
cacacucaaaucaagaaac

SEQ ID NO: 3245556 - RNA, 14 nt, Human
cacacugaagaagc

SEQ ID NO: 3245557 - RNA, 14 nt, Human
cacaacuauuuuuc

SEQ ID NO: 3245558 - RNA, 19 nt, Human
cacaacuauuuuuccaaaa

SEQ ID NO: 3245559 - RNA, 13 nt, Human
cacaacuauauug

SEQ ID NO: 3245560 - RNA, 22 nt, Human
cacagcaguugaaaagacucca

SEQ ID NO: 3245561 - RNA, 19 nt, Human
cacaggaaccacaagacug

SEQ ID NO: 3245562 - RNA, 20 nt, Human
cacaggaaccacaagacugc

SEQ ID NO: 3245563 - RNA, 14 nt, Human
cacaguuuucugag

SEQ ID NO: 3245564 - RNA, 23 nt, Human
cacauaucuaguaugaaauuaua

SEQ ID NO: 3245565 - RNA, 20 nt, Human
caaggaaaaaauaacaauga

SEQ ID NO: 3245566 - RNA, 17 nt, Human
caagcacuaaacaaaga

SEQ ID NO: 3245567 - RNA, 15 nt, Human
caaauuuacagagac

SEQ ID NO: 3245568 - RNA, 14 nt, Human
caaauuuacagaga

SEQ ID NO: 3245569 - RNA, 15 nt, Human
caaauugugugaaag

SEQ ID NO: 3245570 - RNA, 12 nt, Human
caacuuuauacc

SEQ ID NO: 3245571 - RNA, 18 nt, Human
caagaaaacaacuucaau

SEQ ID NO: 3245572 - RNA, 23 nt, Human
caaaaaaauauauuuaaugauaa

SEQ ID NO: 3245573 - RNA, 16 nt, Human
caaauaugcaaagcac

SEQ ID NO: 3245574 - RNA, 17 nt, Human
caaauaugcaaagcacu

SEQ ID NO: 3245575 - RNA, 18 nt, Human
caaauaugcaaagcacug

SEQ ID NO: 3245576 - RNA, 20 nt, Human
caaauguucaucaaugaaug

SEQ ID NO: 3245577 - RNA, 21 nt, Human
caaauguucaucaaugaauga

SEQ ID NO: 3245578 - RNA, 14 nt, Human
caaauaugcaaagc

SEQ ID NO: 3245579 - RNA, 14 nt, Human
cuaagagagaauga

SEQ ID NO: 3245580 - RNA, 15 nt, Human
cuaagagagaaugag

SEQ ID NO: 3245581 - RNA, 16 nt, Human
cuaagauaguaacaau

SEQ ID NO: 3245582 - RNA, 19 nt, Human
cuaaauugacacuuaaaaa

SEQ ID NO: 3245583 - RNA, 13 nt, Human
cuaaauuuuauau

SEQ ID NO: 3245584 - RNA, 16 nt, Human
cuaaauuuuauaucuu

SEQ ID NO: 3245585 - RNA, 15 nt, Human
cuaaauuuuauaucu

SEQ ID NO: 3245586 - RNA, 20 nt, Human
cuaaauuuuauaucuuguag

SEQ ID NO: 3245587 - RNA, 20 nt, Human
cgggaggcagagguugcagu

SEQ ID NO: 3245588 - RNA, 14 nt, Human
cuacacuaagagag

SEQ ID NO: 3245589 - RNA, 23 nt, Human
cuacacgagauacagaauuuuau

SEQ ID NO: 3245590 - RNA, 14 nt, Human
cuaaguaaaaccac

SEQ ID NO: 3245591 - RNA, 18 nt, Human
cuaaguaaaaccacagca

SEQ ID NO: 3245592 - RNA, 19 nt, Human
cuaaguaaaaccacagcag

SEQ ID NO: 3245593 - RNA, 21 nt, Human
cuaagcuucacuguaaaauaa

SEQ ID NO: 3245594 - RNA, 12 nt, Human
cuauaauuuaaa

SEQ ID NO: 3245595 - RNA, 18 nt, Human
cuaugaaauauuauguua

SEQ ID NO: 3245596 - RNA, 19 nt, Human
cuaugaaauauuauguuaa

SEQ ID NO: 3245597 - RNA, 21 nt, Human
cuauucaggagaguagaacag

SEQ ID NO: 3245598 - RNA, 14 nt, Human
cuaggaaauauuua

SEQ ID NO: 3245599 - RNA, 15 nt, Human
cuaggaaauauuuau

SEQ ID NO: 3245600 - RNA, 19 nt, Human
cuaggaaauauuuauuuua

SEQ ID NO: 3245601 - RNA, 20 nt, Human
cuaggaaauauuuauuuuaa

SEQ ID NO: 3245602 - RNA, 22 nt, Human
cuagcuaauguaauaacuguga

SEQ ID NO: 3245603 - RNA, 18 nt, Human
cuagaguuuagcuggaaa

SEQ ID NO: 3245604 - RNA, 19 nt, Human
cuagaguuuagcuggaaaa

SEQ ID NO: 3245605 - RNA, 22 nt, Human
cucaggaaaucaaauaugcaaa

SEQ ID NO: 3245606 - RNA, 14 nt, Human
cuccccucggagaa

SEQ ID NO: 3245607 - RNA, 17 nt, Human
cucauuuccaagcaagu

SEQ ID NO: 3245608 - RNA, 13 nt, Human
cucauuuccaagc

SEQ ID NO: 3245609 - RNA, 14 nt, Human
cucauuuccaagca

SEQ ID NO: 3245610 - RNA, 12 nt, Human
cucauuuccaag

SEQ ID NO: 3245611 - RNA, 17 nt, Human
ccugccccugagcccau

SEQ ID NO: 3245612 - RNA, 14 nt, Human
ccugaggcuccacu

SEQ ID NO: 3245613 - RNA, 13 nt, Human
ccugaggcuccac

SEQ ID NO: 3245614 - RNA, 15 nt, Human
ccuuggacucauuuu

SEQ ID NO: 3245615 - RNA, 18 nt, Human
ccuucggccuccauccug

SEQ ID NO: 3245616 - RNA, 17 nt, Human
ccuucggccuccauccu

SEQ ID NO: 3245617 - RNA, 16 nt, Human
ccuucggccuccaucc

SEQ ID NO: 3245618 - RNA, 23 nt, Human
cgaagaguauuuuugacagaaua

SEQ ID NO: 3245619 - RNA, 15 nt, Human
ccccucggagaagag

SEQ ID NO: 3245620 - RNA, 14 nt, Human
ccagacaucaacag

SEQ ID NO: 3245621 - RNA, 15 nt, Human
ccacugguucuucuu

SEQ ID NO: 3245622 - RNA, 19 nt, Human
ccagccugagcgacaguga

SEQ ID NO: 3245623 - RNA, 18 nt, Human
ccauccugaggcuccacu

SEQ ID NO: 3245624 - RNA, 20 nt, Human
ccauccugaggcuccacuug

SEQ ID NO: 3245625 - RNA, 16 nt, Human
ccauccugaggcucca

SEQ ID NO: 3245626 - RNA, 12 nt, Human
ccaggugccagu

SEQ ID NO: 3245627 - RNA, 23 nt, Human
ccagugaauucuugaaggaaaau

SEQ ID NO: 3245628 - RNA, 20 nt, Human
ccagguagaggguguguaag

SEQ ID NO: 3245629 - RNA, 22 nt, Human
cuggccuucggccuccauccug

SEQ ID NO: 3245630 - RNA, 23 nt, Human
cuggccuucggccuccauccuga

SEQ ID NO: 3245631 - RNA, 20 nt, Human
cuggcacaguuuucugagaa

SEQ ID NO: 3245632 - RNA, 21 nt, Human
cuggcacaguuuucugagaaa

SEQ ID NO: 3245633 - RNA, 22 nt, Human
cuggcacaguuuucugagaaag

SEQ ID NO: 3245634 - RNA, 16 nt, Human
cuggagcucugcccau

SEQ ID NO: 3245635 - RNA, 13 nt, Human
cuggagcucugcc

SEQ ID NO: 3245636 - RNA, 12 nt, Human
cuggagcucugc

SEQ ID NO: 3245637 - RNA, 18 nt, Human
cugcugaaacaacaaaua

SEQ ID NO: 3245638 - RNA, 22 nt, Human
cuguauuuuaaaagaaugauua

SEQ ID NO: 3245639 - RNA, 20 nt, Human
cuguauuuuaaaagaaugau

SEQ ID NO: 3245640 - RNA, 19 nt, Human
cuguauuuuaaaagaauga

SEQ ID NO: 3245641 - RNA, 20 nt, Human
cugucuacacuaagagagaa

SEQ ID NO: 3245642 - RNA, 23 nt, Human
cuguaaucacagcuacuugggag

SEQ ID NO: 3245643 - RNA, 22 nt, Human
cugggggggauuguaaaauggu

SEQ ID NO: 3245644 - RNA, 20 nt, Human
cuguuaaaagaugaaaauau

SEQ ID NO: 3245645 - RNA, 21 nt, Human
cuguuaaaagaugaaaauauu

SEQ ID NO: 3245646 - RNA, 23 nt, Human
cuguuaaaagaugaaaauauuug

SEQ ID NO: 3245647 - RNA, 20 nt, Human
cuugaacccgggaggcagag

SEQ ID NO: 3245648 - RNA, 14 nt, Human
cuucugugaaagua

SEQ ID NO: 3245649 - RNA, 18 nt, Human
cuucugucuucacaacag

SEQ ID NO: 3245650 - RNA, 21 nt, Human
cuucugucuucacaacagauu

SEQ ID NO: 3245651 - RNA, 22 nt, Human
cuucugucuucacaacagauua

SEQ ID NO: 3245652 - RNA, 14 nt, Human
cuuauuucauuucu

SEQ ID NO: 3245653 - RNA, 15 nt, Human
cuuauuucauuucuu

SEQ ID NO: 3245654 - RNA, 20 nt, Human
cuuagaugcaguucugaaga

SEQ ID NO: 3245655 - RNA, 22 nt, Human
cuuagaugcaguucugaagaag

SEQ ID NO: 3245656 - RNA, 14 nt, Human
gaaagcagggacuu

SEQ ID NO: 3245657 - RNA, 17 nt, Human
gaaagagaacuuccaga

SEQ ID NO: 3245658 - RNA, 20 nt, Human
gaaagaggcagcuugaaacu

SEQ ID NO: 3245659 - RNA, 21 nt, Human
gaaagaggaaugaaguacuca

SEQ ID NO: 3245660 - RNA, 17 nt, Human
gaaagcagaacagugau

SEQ ID NO: 3245661 - RNA, 14 nt, Human
gaaagcagaacagu

SEQ ID NO: 3245662 - RNA, 22 nt, Human
gaaagcagaacagugauuacca

SEQ ID NO: 3245663 - RNA, 23 nt, Human
gaaacucguuaauuuguaguguu

SEQ ID NO: 3245664 - RNA, 14 nt, Human
gaaacccugucucu

SEQ ID NO: 3245665 - RNA, 20 nt, Human
gaaaaugauacgcaacauaa

SEQ ID NO: 3245666 - RNA, 11 nt, Human
gaaacauuugg

SEQ ID NO: 3245667 - RNA, 16 nt, Human
gaaacacaacuauauu

SEQ ID NO: 3245668 - RNA, 22 nt, Human
gaaaaucuacacuccagugaga

SEQ ID NO: 3245669 - RNA, 18 nt, Human
gaaaauauuuguaucaca

SEQ ID NO: 3245670 - RNA, 21 nt, Human
gaaaauauuauguguuuccau

SEQ ID NO: 3245671 - RNA, 19 nt, Human
cuugaguuuaaauuguaau

SEQ ID NO: 3245672 - RNA, 23 nt, Human
cuugucaauaaaauccauacauu

SEQ ID NO: 3245673 - RNA, 22 nt, Human
cuuuaucaaagggugaaaauua

SEQ ID NO: 3245674 - RNA, 21 nt, Human
cuuuaucaaagggugaaaauu

SEQ ID NO: 3245675 - RNA, 16 nt, Human
cuuucugcuuguguua

SEQ ID NO: 3245676 - RNA, 19 nt, Human
gauguugaaaaaguucugc

SEQ ID NO: 3245677 - RNA, 20 nt, Human
gaugcuagaacucccuuuca

SEQ ID NO: 3245678 - RNA, 18 nt, Human
gaugcuagaacucccuuu

SEQ ID NO: 3245679 - RNA, 16 nt, Human
gcaaauugucacagga

SEQ ID NO: 3245680 - RNA, 21 nt, Human
gcaaagcugaugacaacuucc

SEQ ID NO: 3245681 - RNA, 14 nt, Human
gcaauuucauaugc

SEQ ID NO: 3245682 - RNA, 15 nt, Human
gcacugacuucuaag

SEQ ID NO: 3245683 - RNA, 18 nt, Human
gcacugacuucuaaguaa

SEQ ID NO: 3245684 - RNA, 23 nt, Human
gagugaacaaauuuacagagaca

SEQ ID NO: 3245685 - RNA, 18 nt, Human
gaguguacuuaacuauuc

SEQ ID NO: 3245686 - RNA, 20 nt, Human
gacauagaauuaacacauga

SEQ ID NO: 3245687 - RNA, 17 nt, Human
gacagggaggacgcucu

SEQ ID NO: 3245688 - RNA, 18 nt, Human
gacagggaggacgcucuc

SEQ ID NO: 3245689 - RNA, 15 nt, Human
gacccacaagaaaug

SEQ ID NO: 3245690 - RNA, 16 nt, Human
gacccaaaaggcagaa

SEQ ID NO: 3245691 - RNA, 20 nt, Human
gacccaaaaggcagaagcaa

SEQ ID NO: 3245692 - RNA, 18 nt, Human
gaccacugcagaagacag

SEQ ID NO: 3245693 - RNA, 21 nt, Human
gaccacugcagaagacaguau

SEQ ID NO: 3245694 - RNA, 16 nt, Human
gacaugggacauuugc

SEQ ID NO: 3245695 - RNA, 15 nt, Human
gacaagcucacagac

SEQ ID NO: 3245696 - RNA, 16 nt, Human
gacaaggaaaaaauaa

SEQ ID NO: 3245697 - RNA, 13 nt, Human
gacacaacuauuu

SEQ ID NO: 3245698 - RNA, 16 nt, Human
gaauuggagcucgugg

SEQ ID NO: 3245699 - RNA, 21 nt, Human
gaauugacccacaagaaauga

SEQ ID NO: 3245700 - RNA, 16 nt, Human
gaauugacccacaaga

SEQ ID NO: 3245701 - RNA, 18 nt, Human
gaauucuugaaggaaaau

SEQ ID NO: 3245702 - RNA, 15 nt, Human
gaauguuaagcagau

SEQ ID NO: 3245703 - RNA, 14 nt, Human
gaauguuaagcaga

SEQ ID NO: 3245704 - RNA, 14 nt, Human
gaaugcuguguuaa

SEQ ID NO: 3245705 - RNA, 13 nt, Human
gaaugcuguguua

SEQ ID NO: 3245706 - RNA, 19 nt, Human
gaaucucauaauuuauaca

SEQ ID NO: 3245707 - RNA, 18 nt, Human
gaaucucauaauuuauac

SEQ ID NO: 3245708 - RNA, 21 nt, Human
gacucauuuuaaaaaauggaa

SEQ ID NO: 3245709 - RNA, 11 nt, Human
gacuccaaaga

SEQ ID NO: 3245710 - RNA, 12 nt, Human
gacuccaaagaa

SEQ ID NO: 3245711 - RNA, 15 nt, Human
gacuccaaagaaaug

SEQ ID NO: 3245712 - RNA, 16 nt, Human
gacuccaaagaaaugu

SEQ ID NO: 3245713 - RNA, 14 nt, Human
gacugcauuauauu

SEQ ID NO: 3245714 - RNA, 16 nt, Human
gacugcauuauauuua

SEQ ID NO: 3245715 - RNA, 17 nt, Human
gacuucuaaguaaaacc

SEQ ID NO: 3245716 - RNA, 18 nt, Human
gacuucuaaguaaaacca

SEQ ID NO: 3245717 - RNA, 16 nt, Human
gacuucuaaguaaaac

SEQ ID NO: 3245718 - RNA, 19 nt, Human
gacuucuaaguaaaaccac

SEQ ID NO: 3245719 - RNA, 23 nt, Human
gacuucuaaguaaaaccacagca

SEQ ID NO: 3245720 - RNA, 24 nt, Human
gacuucuaaguaaaaccacagcag

SEQ ID NO: 3245721 - RNA, 20 nt, Human
gacuucugucuucacaacag

SEQ ID NO: 3245722 - RNA, 23 nt, Human
gacuucugucuucacaacagauu

SEQ ID NO: 3245723 - RNA, 17 nt, Human
gagaaugagagacacac

SEQ ID NO: 3245724 - RNA, 22 nt, Human
gagaacuuccagauccuggaaa

SEQ ID NO: 3245725 - RNA, 23 nt, Human
gagaacuuccagauccuggaaau

SEQ ID NO: 3245726 - RNA, 21 nt, Human
gagaaccuagggugauauuaa

SEQ ID NO: 3245727 - RNA, 22 nt, Human
gagaaccuagggugauauuaac

SEQ ID NO: 3245728 - RNA, 19 nt, Human
gagagacacacugaagaag

SEQ ID NO: 3245729 - RNA, 15 nt, Human
gagaguagaacagau

SEQ ID NO: 3245730 - RNA, 20 nt, Human
gagaaugagagacacacuga

SEQ ID NO: 3245731 - RNA, 20 nt, Human
gagacagcucugcauacuca

SEQ ID NO: 3245732 - RNA, 18 nt, Human
gagacagcucugcauacu

SEQ ID NO: 3245733 - RNA, 13 nt, Human
gagcaaagcugau

SEQ ID NO: 3245734 - RNA, 17 nt, Human
gccuaagugcagccccg

SEQ ID NO: 3245735 - RNA, 22 nt, Human
gccuauauuuuuuguuaaauga

SEQ ID NO: 3245736 - RNA, 15 nt, Human
gccugcaauuucaua

SEQ ID NO: 3245737 - RNA, 11 nt, Human
gcucucuggcc

SEQ ID NO: 3245738 - RNA, 13 nt, Human
gcucucuggccuu

SEQ ID NO: 3245739 - RNA, 12 nt, Human
gcucucuggccu

SEQ ID NO: 3245740 - RNA, 20 nt, Human
gcucucuggccuucggccuc

SEQ ID NO: 3245741 - RNA, 19 nt, Human
gcucucuggccuucggccu

SEQ ID NO: 3245742 - RNA, 15 nt, Human
gcucucuggccuucg

SEQ ID NO: 3245743 - RNA, 14 nt, Human
gcucucuggccuuc

SEQ ID NO: 3245744 - RNA, 17 nt, Human
gcuaagcaaaaugugau

SEQ ID NO: 3245745 - RNA, 14 nt, Human
gcuaagcauuccaa

SEQ ID NO: 3245746 - RNA, 14 nt, Human
ggcauggcugggaa

SEQ ID NO: 3245747 - RNA, 20 nt, Human
gcugucuacacuaagagaga

SEQ ID NO: 3245748 - RNA, 17 nt, Human
ggaaaucaaauaugcaa

SEQ ID NO: 3245749 - RNA, 16 nt, Human
ggaaaucaaauaugca

SEQ ID NO: 3245750 - RNA, 14 nt, Human
ggacgcucucuggc

SEQ ID NO: 3245751 - RNA, 13 nt, Human
ggacgcucucugg

SEQ ID NO: 3245752 - RNA, 19 nt, Human
ggagaaucacuugaacccg

SEQ ID NO: 3245753 - RNA, 15 nt, Human
ggagaaucacuugaa

SEQ ID NO: 3245754 - RNA, 23 nt, Human
ggaauuucucccagucauuuaau

SEQ ID NO: 3245755 - RNA, 16 nt, Human
ggaauuggagcucgug

SEQ ID NO: 3245756 - RNA, 22 nt, Human
ggaauuggagcucgugggacag

SEQ ID NO: 3245757 - RNA, 14 nt, Human
ggaaugcuguguua

SEQ ID NO: 3245758 - RNA, 20 nt, Human
ggaagugacgguuuaauggg

SEQ ID NO: 3245759 - RNA, 18 nt, Human
guaagggaaacugccagc

SEQ ID NO: 3245760 - RNA, 17 nt, Human
guaagggaaacugccag

SEQ ID NO: 3245761 - RNA, 15 nt, Human
guaaauaguauuuga

SEQ ID NO: 3245762 - RNA, 16 nt, Human
guaaauaguauuugag

SEQ ID NO: 3245763 - RNA, 17 nt, Human
guaaauaguauuugaga

SEQ ID NO: 3245764 - RNA, 14 nt, Human
guaaaaccacagca

SEQ ID NO: 3245765 - RNA, 15 nt, Human
guaaaaccacagcag

SEQ ID NO: 3245766 - RNA, 16 nt, Human
guaaaaccacagcagu

SEQ ID NO: 3245767 - RNA, 18 nt, Human
guaaaaccacagcaguug

SEQ ID NO: 3245768 - RNA, 23 nt, Human
guaaaaccacagcaguugaaaag

SEQ ID NO: 3245769 - RNA, 15 nt, Human
guaccgcaaugugac

SEQ ID NO: 3245770 - RNA, 15 nt, Human
guacuucaugcuguc

SEQ ID NO: 3245771 - RNA, 15 nt, Human
guacgaagaguauuu

SEQ ID NO: 3245772 - RNA, 15 nt, Human
guagaggagaaacug

SEQ ID NO: 3245773 - RNA, 23 nt, Human
guacuuuauuuucuauaauuuaa

SEQ ID NO: 3245774 - RNA, 23 nt, Human
guacacugccuucucaacuccaa

SEQ ID NO: 3245775 - RNA, 19 nt, Human
guaaugauaacuggaaacu

SEQ ID NO: 3245776 - RNA, 13 nt, Human
guaauucaagaaa

SEQ ID NO: 3245777 - RNA, 14 nt, Human
guaauucaagaaaa

SEQ ID NO: 3245778 - RNA, 15 nt, Human
guaauuggaaaggca

SEQ ID NO: 3245779 - RNA, 22 nt, Human
gguagacacacaugaaguccaa

SEQ ID NO: 3245780 - RNA, 15 nt, Human
gguagacacacauga

SEQ ID NO: 3245781 - RNA, 22 nt, Human
gguacuucaaauccuugaagau

SEQ ID NO: 3245782 - RNA, 19 nt, Human
ggugcuacaaaaacacagc

SEQ ID NO: 3245783 - RNA, 23 nt, Human
gucuacacuaagagagaaugaga

SEQ ID NO: 3245784 - RNA, 17 nt, Human
gucuacacuaagagaga

SEQ ID NO: 3245785 - RNA, 23 nt, Human
gucuaagauaguaacaaugaaga

SEQ ID NO: 3245786 - RNA, 16 nt, Human
guauuuuaaaagaaug

SEQ ID NO: 3245787 - RNA, 17 nt, Human
guauuuuaaaagaauga

SEQ ID NO: 3245788 - RNA, 14 nt, Human
gucaccucauggaa

SEQ ID NO: 3245789 - RNA, 15 nt, Human
gucaauaaaauccau

SEQ ID NO: 3245790 - RNA, 21 nt, Human
gucaauaaaauccauacauuu

SEQ ID NO: 3245791 - RNA, 22 nt, Human
guauuucuaugaaauauuaugu

SEQ ID NO: 3245792 - RNA, 17 nt, Human
guauuucuaugaaauau

SEQ ID NO: 3245793 - RNA, 19 nt, Human
guauuugagaguucuaaau

SEQ ID NO: 3245794 - RNA, 21 nt, Human
guauuugagaguucuaaauuu

SEQ ID NO: 3245795 - RNA, 15 nt, Human
gugaaaauuauuuug

SEQ ID NO: 3245796 - RNA, 12 nt, Human
gugaaaauuauu

SEQ ID NO: 3245797 - RNA, 19 nt, Human
gugaaagaaaauaacaaua

SEQ ID NO: 3245798 - RNA, 20 nt, Human
gugaaacucguuaauuugua

SEQ ID NO: 3245799 - RNA, 17 nt, Human
gugaaaguacauuugga

SEQ ID NO: 3245800 - RNA, 16 nt, Human
gugagcagucaggaaa

SEQ ID NO: 3245801 - RNA, 14 nt, Human
gugagcuacaaaug

SEQ ID NO: 3245802 - RNA, 18 nt, Human
gugcaaauugucacagga

SEQ ID NO: 3245803 - RNA, 20 nt, Human
ugcugggggggauuguaaaa

SEQ ID NO: 3245804 - RNA, 11 nt, Human
ugcuguguuaa

SEQ ID NO: 3245805 - RNA, 18 nt, Human
ugcuguguuaaauaaacc

SEQ ID NO: 3245806 - RNA, 17 nt, Human
ugcuagaacucccuuuc

SEQ ID NO: 3245807 - RNA, 15 nt, Human
ugcuagaacucccuu

SEQ ID NO: 3245808 - RNA, 14 nt, Human
ugcuagaacucccu

SEQ ID NO: 3245809 - RNA, 13 nt, Human
ugcuagaacuccc

SEQ ID NO: 3245810 - RNA, 13 nt, Human
ugcaucagcugcu

SEQ ID NO: 3245811 - RNA, 16 nt, Human
ugccacuaaauugaca

SEQ ID NO: 3245812 - RNA, 22 nt, Human
ugcaucaauuuuucuuauuuca

SEQ ID NO: 3245813 - RNA, 12 nt, Human
ugcaguucugaa

SEQ ID NO: 3245814 - RNA, 16 nt, Human
ugcauagguuuagcag

SEQ ID NO: 3245815 - RNA, 15 nt, Human
uggcacuaguauuuc

SEQ ID NO: 3245816 - RNA, 20 nt, Human
uggcaauagucaaauugugu

SEQ ID NO: 3245817 - RNA, 13 nt, Human
ugguauguuuuca

SEQ ID NO: 3245818 - RNA, 17 nt, Human
uggucacaggaaguaga

SEQ ID NO: 3245819 - RNA, 22 nt, Human
uggucacaggaaguagaggagg

SEQ ID NO: 3245820 - RNA, 19 nt, Human
ucuuuccacagaagcucca

SEQ ID NO: 3245821 - RNA, 12 nt, Human
ucuuugccaagu

SEQ ID NO: 3245822 - RNA, 17 nt, Human
ucuuucacauuuaaaua

SEQ ID NO: 3245823 - RNA, 15 nt, Human
ugaaagguacuucaa

SEQ ID NO: 3245824 - RNA, 16 nt, Human
ugaaagguacuucaaa

SEQ ID NO: 3245825 - RNA, 23 nt, Human
ugaaagcagggacuugaacccau

SEQ ID NO: 3245826 - RNA, 18 nt, Human
ugaaagaggaaugaagua

SEQ ID NO: 3245827 - RNA, 18 nt, Human
ugaaagaggcagcuugaa

SEQ ID NO: 3245828 - RNA, 22 nt, Human
ugaaacaacaaauaggaauugu

SEQ ID NO: 3245829 - RNA, 18 nt, Human
ugaaauauuauguuaaaa

SEQ ID NO: 3245830 - RNA, 16 nt, Human
ugaaauauugacuuuu

SEQ ID NO: 3245831 - RNA, 19 nt, Human
ugaaauggacuuuuguaca

SEQ ID NO: 3245832 - RNA, 11 nt, Human
ugaaguccaag

SEQ ID NO: 3245833 - RNA, 15 nt, Human
ugaauuacauuugua

SEQ ID NO: 3245834 - RNA, 16 nt, Human
ugaauuacauuuguau

SEQ ID NO: 3245835 - RNA, 18 nt, Human
ugaauuacauuuguauaa

SEQ ID NO: 3245836 - RNA, 14 nt, Human
ugaauuacauuugu

SEQ ID NO: 3245837 - RNA, 20 nt, Human
ugaaugaauggcuaagcaaa

SEQ ID NO: 3245838 - RNA, 18 nt, Human
ugacaugggacauuugcu

SEQ ID NO: 3245839 - RNA, 16 nt, Human
ugacaugggacauuug

SEQ ID NO: 3245840 - RNA, 17 nt, Human
ugacaugggacauuugc

SEQ ID NO: 3245841 - RNA, 20 nt, Human
ugaccacugcagaagacagu

SEQ ID NO: 3245842 - RNA, 18 nt, Human
ugaccacugcagaagaca

SEQ ID NO: 3245843 - RNA, 15 nt, Human
ugacaagcucacaga

SEQ ID NO: 3245844 - RNA, 20 nt, Human
ugacaagcucacagaccuuu

SEQ ID NO: 3245845 - RNA, 12 nt, Human
ugacaagcucac

SEQ ID NO: 3245846 - RNA, 16 nt, Human
ugacagaauauguuuc

SEQ ID NO: 3245847 - RNA, 24 nt, Human
ugaucagcuuauugucuagugaaa

SEQ ID NO: 3245848 - RNA, 17 nt, Human
ugaucagcuuauugucu

SEQ ID NO: 3245849 - RNA, 14 nt, Human
ugaucuuuaaaaua

SEQ ID NO: 3245850 - RNA, 17 nt, Human
ugaucuuuaaaauacac

SEQ ID NO: 3245851 - RNA, 20 nt, Human
ugaugcuacaggauuugaaa

SEQ ID NO: 3245852 - RNA, 15 nt, Human
ugauggugguauguu

SEQ ID NO: 3245853 - RNA, 21 nt, Human
ugauguauucuagcuaaugua

SEQ ID NO: 3245854 - RNA, 14 nt, Human
ugauguguuuauuu

SEQ ID NO: 3245855 - RNA, 18 nt, Human
ugauguguuuauuuauag

SEQ ID NO: 3245856 - RNA, 21 nt, Human
ugauuaugaauuacauuugua

SEQ ID NO: 3245857 - RNA, 22 nt, Human
ugauuaugaauuacauuuguau

SEQ ID NO: 3245858 - RNA, 16 nt, Human
ugauuaccagggacug

SEQ ID NO: 3245859 - RNA, 13 nt, Human
ugauuauauguca

SEQ ID NO: 3245860 - RNA, 17 nt, Human
ugauuaugaauuacauu

SEQ ID NO: 3245861 - RNA, 19 nt, Human
ugauuaugaauuacauuug

SEQ ID NO: 3245862 - RNA, 16 nt, Human
ugauaacuggaaacuu

SEQ ID NO: 3245863 - RNA, 22 nt, Human
ugaguucuacauaaguaauuca

SEQ ID NO: 3245864 - RNA, 20 nt, Human
ugaggcuccacuuggucugu

SEQ ID NO: 3245865 - RNA, 18 nt, Human
ugaggcuccacuuggucu

SEQ ID NO: 3245866 - RNA, 16 nt, Human
ugagagugaacaaauu

SEQ ID NO: 3245867 - RNA, 23 nt, Human
ugagacguuuuuggaagaguagu

SEQ ID NO: 3245868 - RNA, 13 nt, Human
ugagccccaaaag

SEQ ID NO: 3245869 - RNA, 12 nt, Human
uccauacauuug

SEQ ID NO: 3245870 - RNA, 19 nt, Human
uccagguagagggugugua

SEQ ID NO: 3245871 - RNA, 15 nt, Human
uccauacauuugugu

SEQ ID NO: 3245872 - RNA, 17 nt, Human
uccacuuggucugugag

SEQ ID NO: 3245873 - RNA, 21 nt, Human
uccacuuggucugugagaugc

SEQ ID NO: 3245874 - RNA, 23 nt, Human
uccacuuggucugugagaugcua

SEQ ID NO: 3245875 - RNA, 11 nt, Human
ucauagcagcu

SEQ ID NO: 3245876 - RNA, 17 nt, Human
ucaucaaugaaugaaug

SEQ ID NO: 3245877 - RNA, 16 nt, Human
ucauuaggauggcuag

SEQ ID NO: 3245878 - RNA, 12 nt, Human
uccaaagaaaug

SEQ ID NO: 3245879 - RNA, 14 nt, Human
uccaaagaaaugua

SEQ ID NO: 3245880 - RNA, 17 nt, Human
uccaaagaaauguaagg

SEQ ID NO: 3245881 - RNA, 16 nt, Human
uccaaaccaaauaaaa

SEQ ID NO: 3245882 - RNA, 22 nt, Human
uccaaaaagauuuucagaaaau

SEQ ID NO: 3245883 - RNA, 20 nt, Human
uccaaaaagauuuucagaaa

SEQ ID NO: 3245884 - RNA, 14 nt, Human
uccuagugaaagag

SEQ ID NO: 3245885 - RNA, 23 nt, Human
uccuagugaaagaggcagcuuga

SEQ ID NO: 3245886 - RNA, 20 nt, Human
uccugaggcuccacuugguc

SEQ ID NO: 3245887 - RNA, 19 nt, Human
uccugaggcuccacuuggu

SEQ ID NO: 3245888 - RNA, 17 nt, Human
uccugaggcuccacuug

SEQ ID NO: 3245889 - RNA, 17 nt, Human
uccugccccugagccca

SEQ ID NO: 3245890 - RNA, 18 nt, Human
uccugccccugagcccau

SEQ ID NO: 3245891 - RNA, 14 nt, Human
ucggagaagagcug

SEQ ID NO: 3245892 - RNA, 16 nt, Human
ucggagaagagcuguu

SEQ ID NO: 3245893 - RNA, 12 nt, Human
ucggagaagagc

SEQ ID NO: 3245894 - RNA, 18 nt, Human
ucuaugaaauauuauguu

SEQ ID NO: 3245895 - RNA, 23 nt, Human
ucucaguccaugaagauguagag

SEQ ID NO: 3245896 - RNA, 23 nt, Human
ucucauaauuuauacaggucaua

SEQ ID NO: 3245897 - RNA, 17 nt, Human
uauguucuaagaaguga

SEQ ID NO: 3245898 - RNA, 19 nt, Human
uauguuagugcaaauuguc

SEQ ID NO: 3245899 - RNA, 12 nt, Human
uauguuaaaacu

SEQ ID NO: 3245900 - RNA, 19 nt, Human
uauggaggcuuugcauaga

SEQ ID NO: 3245901 - RNA, 12 nt, Human
uauuauguguuu

SEQ ID NO: 3245902 - RNA, 16 nt, Human
uauuauguuaaaacug

SEQ ID NO: 3245903 - RNA, 17 nt, Human
uauuauauuuacaaaug

SEQ ID NO: 3245904 - RNA, 16 nt, Human
uauuguuuaaaaucau

SEQ ID NO: 3245905 - RNA, 17 nt, Human
uauuguuuaaaaucauu

SEQ ID NO: 3245906 - RNA, 15 nt, Human
uauuguuuaaaauca

SEQ ID NO: 3245907 - RNA, 23 nt, Human
uauugauaaguucauacauugua

SEQ ID NO: 3245908 - RNA, 16 nt, Human
uauugauaaguucaua

SEQ ID NO: 3245909 - RNA, 14 nt, Human
uauugauaaguuca

SEQ ID NO: 3245910 - RNA, 20 nt, Human
uauuguuuaaaaucauuucu

SEQ ID NO: 3245911 - RNA, 14 nt, Human
uauuuauuacugua

SEQ ID NO: 3245912 - RNA, 13 nt, Human
uauuuauuacugu

SEQ ID NO: 3245913 - RNA, 13 nt, Human
uauuucuaugaaa

SEQ ID NO: 3245914 - RNA, 14 nt, Human
uauuucuaugaaau

SEQ ID NO: 3245915 - RNA, 15 nt, Human
uauuucuaugaaaua

SEQ ID NO: 3245916 - RNA, 19 nt, Human
ucaacuccaaacugacucu

SEQ ID NO: 3245917 - RNA, 22 nt, Human
ucaacuccaaacugacucuuaa

SEQ ID NO: 3245918 - RNA, 22 nt, Human
ucaaacagucucaggaaaucaa

SEQ ID NO: 3245919 - RNA, 17 nt, Human
ucaaacauauauaacaa

SEQ ID NO: 3245920 - RNA, 18 nt, Human
ucaaauaugcaaagcacu

SEQ ID NO: 3245921 - RNA, 19 nt, Human
ucaaauaugcaaagcacug

SEQ ID NO: 3245922 - RNA, 16 nt, Human
ucaaauccuugaagau

SEQ ID NO: 3245923 - RNA, 15 nt, Human
ucaaauccuugaaga

SEQ ID NO: 3245924 - RNA, 16 nt, Human
ucaaauaugcaaagca

SEQ ID NO: 3245925 - RNA, 17 nt, Human
ucaaauaugcaaagcac

SEQ ID NO: 3245926 - RNA, 20 nt, Human
ucaaagagagaaaauaaaga

SEQ ID NO: 3245927 - RNA, 15 nt, Human
ucaaagagagaaaau

SEQ ID NO: 3245928 - RNA, 22 nt, Human
ucacaagacccaaaaggcagaa

SEQ ID NO: 3245929 - RNA, 18 nt, Human
ucacaagacccaaaaggc

SEQ ID NO: 3245930 - RNA, 12 nt, Human
ucacauuuaaau

SEQ ID NO: 3245931 - RNA, 13 nt, Human
uauaugcuucugu

SEQ ID NO: 3245932 - RNA, 13 nt, Human
uagucaaauugug

SEQ ID NO: 3245933 - RNA, 14 nt, Human
uagugcaaauuguc

SEQ ID NO: 3245934 - RNA, 15 nt, Human
uagugcaaauuguca

SEQ ID NO: 3245935 - RNA, 13 nt, Human
uaguaucaaaaga

SEQ ID NO: 3245936 - RNA, 18 nt, Human
uaguauuucuaugaaaua

SEQ ID NO: 3245937 - RNA, 19 nt, Human
uaguauuucuaugaaauau

SEQ ID NO: 3245938 - RNA, 13 nt, Human
uaguaugaaauua

SEQ ID NO: 3245939 - RNA, 23 nt, Human
uaguaugaaauuauauaaguauu

SEQ ID NO: 3245940 - RNA, 15 nt, Human
uaguaugaaauuaua

SEQ ID NO: 3245941 - RNA, 16 nt, Human
uaguauuucuaugaaa

SEQ ID NO: 3245942 - RNA, 16 nt, Human
uaggccaugggacagg

SEQ ID NO: 3245943 - RNA, 18 nt, Human
uaggccaugggacaggga

SEQ ID NO: 3245944 - RNA, 12 nt, Human
uaggaauugacc

SEQ ID NO: 3245945 - RNA, 16 nt, Human
uaggucagugcaaaua

SEQ ID NO: 3245946 - RNA, 17 nt, Human
uaugaauuacauuugua

SEQ ID NO: 3245947 - RNA, 23 nt, Human
uaugaauuacauuuguauaaaau

SEQ ID NO: 3245948 - RNA, 23 nt, Human
uaugacauaaaaacaacuuuaua

SEQ ID NO: 3245949 - RNA, 22 nt, Human
uaugacauaaaaacaacuuuau

SEQ ID NO: 3245950 - RNA, 19 nt, Human
uaugacauaaaaacaacuu

SEQ ID NO: 3245951 - RNA, 14 nt, Human
uauccuucagccug

SEQ ID NO: 3245952 - RNA, 15 nt, Human
uauccuucagccuga

SEQ ID NO: 3245953 - RNA, 17 nt, Human
uauccuuucuaacaaaa

SEQ ID NO: 3245954 - RNA, 15 nt, Human
uaugcuucuguuuua

SEQ ID NO: 3245955 - RNA, 16 nt, Human
uaugcuucuguuuuau

SEQ ID NO: 3245956 - RNA, 15 nt, Human
uaugcaaagcacuga

SEQ ID NO: 3245957 - RNA, 13 nt, Human
uaugcaaagcacu

SEQ ID NO: 3245958 - RNA, 14 nt, Human
uaugcaaagcacug

SEQ ID NO: 3245959 - RNA, 12 nt, Human
uaugcaaagcac

SEQ ID NO: 3245960 - RNA, 21 nt, Human
uaugauuaaguaaugauaacu

SEQ ID NO: 3245961 - RNA, 16 nt, Human
uaugauucccagccag

SEQ ID NO: 3245962 - RNA, 20 nt, Human
uuagaugcaguucugaagaa

SEQ ID NO: 3245963 - RNA, 21 nt, Human
uuagaugcaguucugaagaag

SEQ ID NO: 3245964 - RNA, 12 nt, Human
uuagcuggaaaa

SEQ ID NO: 3245965 - RNA, 13 nt, Human
uuagcuggaaaag

SEQ ID NO: 3245966 - RNA, 18 nt, Human
uuaggauguugaaaaagu

SEQ ID NO: 3245967 - RNA, 17 nt, Human
uuacuaguuucccuugc

SEQ ID NO: 3245968 - RNA, 14 nt, Human
uuaauauauuucca

SEQ ID NO: 3245969 - RNA, 13 nt, Human
uuaauauauuucc

SEQ ID NO: 3245970 - RNA, 21 nt, Human
uuaaugauaaguaaaugcuag

SEQ ID NO: 3245971 - RNA, 17 nt, Human
uuaaugauaaguaaaug

SEQ ID NO: 3245972 - RNA, 21 nt, Human
uuaagcagauggaaugcugug

SEQ ID NO: 3245973 - RNA, 21 nt, Human
uuaaaagaauauuuuaacuuc

SEQ ID NO: 3245974 - RNA, 22 nt, Human
uuaaaagaauauuuuaacuucc

SEQ ID NO: 3245975 - RNA, 19 nt, Human
uuaaaauacacacucaaau

SEQ ID NO: 3245976 - RNA, 15 nt, Human
uuaaaagaugaaaau

SEQ ID NO: 3245977 - RNA, 18 nt, Human
uuaaaagaugaaaauauu

SEQ ID NO: 3245978 - RNA, 21 nt, Human
uguuucaaacauauauaacaa

SEQ ID NO: 3245979 - RNA, 22 nt, Human
uguuucaaacauauauaacaau

SEQ ID NO: 3245980 - RNA, 19 nt, Human
uguuucaaacauauauaac

SEQ ID NO: 3245981 - RNA, 19 nt, Human
uuccagauccuggaaauca

SEQ ID NO: 3245982 - RNA, 13 nt, Human
uuccaaaauaauu

SEQ ID NO: 3245983 - RNA, 21 nt, Human
uuccaaaauaauuuuaagaaa

SEQ ID NO: 3245984 - RNA, 19 nt, Human
uucaugcauagguuuagca

SEQ ID NO: 3245985 - RNA, 12 nt, Human
uuccaaaauaau

SEQ ID NO: 3245986 - RNA, 22 nt, Human
uucggccuccauccugaggcuc

SEQ ID NO: 3245987 - RNA, 20 nt, Human
uuccuuggacucauuuuaaa

SEQ ID NO: 3245988 - RNA, 17 nt, Human
uuccuuggacucauuuu

SEQ ID NO: 3245989 - RNA, 20 nt, Human
uuccuucugugaaaguacau

SEQ ID NO: 3245990 - RNA, 17 nt, Human
uucccuugaugaagaag

SEQ ID NO: 3245991 - RNA, 15 nt, Human
uuauugucuagugaa

SEQ ID NO: 3245992 - RNA, 15 nt, Human
uuauuuuaauaaugu

SEQ ID NO: 3245993 - RNA, 16 nt, Human
uuauuuuaauaauguu

SEQ ID NO: 3245994 - RNA, 16 nt, Human
uucagacauagaauua

SEQ ID NO: 3245995 - RNA, 20 nt, Human
uucagacauagaauuaacac

SEQ ID NO: 3245996 - RNA, 17 nt, Human
uuauggcuauaggugcu

SEQ ID NO: 3245997 - RNA, 17 nt, Human
uuauuacuguaagaaaa

SEQ ID NO: 3245998 - RNA, 18 nt, Human
uuauuacuguaagaaaau

SEQ ID NO: 3245999 - RNA, 16 nt, Human
uuauuacuguaagaaa

SEQ ID NO: 3246000 - RNA, 20 nt, Human
uuauugauaaguucauacau

SEQ ID NO: 3246001 - RNA, 19 nt, Human
uuauugauaaguucauaca

SEQ ID NO: 3246002 - RNA, 15 nt, Human
uuauugauaaguuca

SEQ ID NO: 3246003 - RNA, 21 nt, Human
uuauggcacuaguauuucuau

SEQ ID NO: 3246004 - RNA, 19 nt, Human
uuuaaaauacacacucaaa

SEQ ID NO: 3246005 - RNA, 16 nt, Human
uuuaaaaucauuucug

SEQ ID NO: 3246006 - RNA, 14 nt, Human
uuuaaaagaaugau

SEQ ID NO: 3246007 - RNA, 17 nt, Human
uuuaaaagaaugauuau

SEQ ID NO: 3246008 - RNA, 12 nt, Human
uuuaaaaugucu

SEQ ID NO: 3246009 - RNA, 18 nt, Human
uuguuuaaaaucauuucu

SEQ ID NO: 3246010 - RNA, 17 nt, Human
uuguuuaaaaucauuuc

SEQ ID NO: 3246011 - RNA, 15 nt, Human
uuuauacaggucaua

SEQ ID NO: 3246012 - RNA, 19 nt, Human
uuuaauaauguuucaaaca

SEQ ID NO: 3246013 - RNA, 13 nt, Human
uuuaauaaaccau

SEQ ID NO: 3246014 - RNA, 14 nt, Human
uuuaauaauguuuc

SEQ ID NO: 3246015 - RNA, 15 nt, Human
uuuaauaauguuuca

SEQ ID NO: 3246016 - RNA, 13 nt, Human
uuuacagagacag

SEQ ID NO: 3246017 - RNA, 18 nt, Human
uuugguaaggggaauuga

SEQ ID NO: 3246018 - RNA, 21 nt, Human
uuugaaauuguauuacaaauc

SEQ ID NO: 3246019 - RNA, 14 nt, Human
uuugagaguucuaa

SEQ ID NO: 3246020 - RNA, 16 nt, Human
uuugagaguucuaaau

SEQ ID NO: 3246021 - RNA, 12 nt, Human
uuugaguucuac

SEQ ID NO: 3246022 - RNA, 13 nt, Human
uuugaguucuaca

SEQ ID NO: 3246023 - RNA, 12 nt, Human
uuucucuaggaa

SEQ ID NO: 3246024 - RNA, 15 nt, Human
uuucacauaucuagu

SEQ ID NO: 3246025 - RNA, 15 nt, Human
uugaggacacugaua

SEQ ID NO: 3246026 - RNA, 20 nt, Human
uugauaugccuuuucccaac

SEQ ID NO: 3246027 - RNA, 24 nt, Human
uucuaaguaaaaccacagcaguug

SEQ ID NO: 3246028 - RNA, 21 nt, Human
uucuaaguaaaaccacagcag

SEQ ID NO: 3246029 - RNA, 19 nt, Human
uucuuaggguuaugauuaa

SEQ ID NO: 3246030 - RNA, 18 nt, Human
uucuuuccacagaagcuc

SEQ ID NO: 3246031 - RNA, 21 nt, Human
uugaaaaucuuauaauuuaaa

SEQ ID NO: 3246032 - RNA, 14 nt, Human
uugaauguuaagca

SEQ ID NO: 3246033 - RNA, 17 nt, Human
uugaauguuaagcagau

SEQ ID NO: 3246034 - RNA, 15 nt, Human
uugucuagugaaacu

SEQ ID NO: 3246035 - RNA, 20 nt, Human
uuguaaaauggugugaccac

SEQ ID NO: 3246036 - RNA, 16 nt, Human
uuguaccgcaauguga

SEQ ID NO: 3246037 - RNA, 16 nt, Human
uuguacgaagaguauu

SEQ ID NO: 3246038 - RNA, 22 nt, Human
uuguagcacugacagauuucca

SEQ ID NO: 3246039 - RNA, 18 nt, Human
uuguagcacugacagauu

SEQ ID NO: 3246040 - RNA, 17 nt, Human
uuguagcacugacagau

SEQ ID NO: 3246041 - RNA, 16 nt, Human
uuguagcacugacaga

SEQ ID NO: 3246042 - RNA, 14 nt, Human
uuguagcacugaca

SEQ ID NO: 3246043 - RNA, 13 nt, Human
uuguaaaauggug

SEQ ID NO: 3246044 - RNA, 12 nt, Human
uuguaaaauggu

SEQ ID NO: 3246045 - RNA, 20 nt, Human
uugguaaggggaauugagga

SEQ ID NO: 3246046 - RNA, 16 nt, Human
uugcuaagcauuccaa

SEQ ID NO: 3246047 - RNA, 18 nt, Human
uugcuaagcauuccaacu

SEQ ID NO: 3246048 - RNA, 15 nt, Human
cugaaacaacaaaua

SEQ ID NO: 3246049 - RNA, 13 nt, Human
cugaaacuucccu

SEQ ID NO: 3246050 - RNA, 22 nt, Human
cucuuagaugcaguucugaaga

SEQ ID NO: 3246051 - RNA, 21 nt, Human
cucuuagaugcaguucugaag

SEQ ID NO: 3246052 - RNA, 14 nt, Human
cucguuaauuugua

SEQ ID NO: 3246053 - RNA, 19 nt, Human
cuccccaugauguuuagaa

SEQ ID NO: 3246054 - RNA, 23 nt, Human
cuccacuuggucugugagaugcu

SEQ ID NO: 3246055 - RNA, 22 nt, Human
cuccacuuggucugugagaugc

SEQ ID NO: 3246056 - RNA, 21 nt, Human
cuccacuuggucugugagaug

SEQ ID NO: 3246057 - RNA, 17 nt, Human
cuccacuuggucuguga

SEQ ID NO: 3246058 - RNA, 16 nt, Human
cuccacuuggucugug

SEQ ID NO: 3246059 - RNA, 15 nt, Human
cuccacuuggucugu

SEQ ID NO: 3246060 - RNA, 13 nt, Human
cuccacuuggucu

SEQ ID NO: 3246061 - RNA, 18 nt, Human
cgcaggcccccaggugcc

SEQ ID NO: 3246062 - RNA, 23 nt, Human
cgccacuguuuugaaucucauaa

SEQ ID NO: 3246063 - RNA, 23 nt, Human
cucaaaauaccaugccauuuaaa

SEQ ID NO: 3246064 - RNA, 17 nt, Human
cucaaaacugcacuguc

SEQ ID NO: 3246065 - RNA, 12 nt, Human
cuagaacucccu

SEQ ID NO: 3246066 - RNA, 18 nt, Human
cuacaugagguacugaga

SEQ ID NO: 3246067 - RNA, 20 nt, Human
cuacaugagguacugagagu

SEQ ID NO: 3246068 - RNA, 18 nt, Human
cuacaaaaacacagcaag

SEQ ID NO: 3246069 - RNA, 16 nt, Human
cuacaaaaacacagca

SEQ ID NO: 3246070 - RNA, 17 nt, Human
cuacaaaaacacagcaa

SEQ ID NO: 3246071 - RNA, 15 nt, Human
cuacaaaaacacagc

SEQ ID NO: 3246072 - RNA, 18 nt, Human
cuacauacuauggaauuu

SEQ ID NO: 3246073 - RNA, 20 nt, Human
cuaaguaaaaccacagcagu

SEQ ID NO: 3246074 - RNA, 22 nt, Human
cuaaguaaaaccacagcaguug

SEQ ID NO: 3246075 - RNA, 23 nt, Human
cuaaguaaaaccacagcaguuga

SEQ ID NO: 3246076 - RNA, 23 nt, Human
ccucauggaauuggagcucgugg

SEQ ID NO: 3246077 - RNA, 15 nt, Human
ccuguaaucacagcu

SEQ ID NO: 3246078 - RNA, 13 nt, Human
ccccugcacucca

SEQ ID NO: 3246079 - RNA, 18 nt, Human
ccccugcacuccagccug

SEQ ID NO: 3246080 - RNA, 13 nt, Human
ccauacauuugug

SEQ ID NO: 3246081 - RNA, 13 nt, Human
ccauuuaaagcuu

SEQ ID NO: 3246082 - RNA, 22 nt, Human
ccauuuaaagcuuauuaaaacu

SEQ ID NO: 3246083 - RNA, 14 nt, Human
caugauguuuagaa

SEQ ID NO: 3246084 - RNA, 19 nt, Human
cauauuaauauauuuccau

SEQ ID NO: 3246085 - RNA, 15 nt, Human
cauauuaauauauuu

SEQ ID NO: 3246086 - RNA, 14 nt, Human
cauauuaauauauu

SEQ ID NO: 3246087 - RNA, 23 nt, Human
cauaugcuguauauccuuucuaa

SEQ ID NO: 3246088 - RNA, 19 nt, Human
cauuuguauaaaauaauuu

SEQ ID NO: 3246089 - RNA, 20 nt, Human
cauuuguauaaaauaauuuu

SEQ ID NO: 3246090 - RNA, 17 nt, Human
cauuuguauaaaauaau

SEQ ID NO: 3246091 - RNA, 17 nt, Human
ccaaauguucaucaaug

SEQ ID NO: 3246092 - RNA, 12 nt, Human
ccacagcaguug

SEQ ID NO: 3246093 - RNA, 17 nt, Human
ccacagcaguugaaaag

SEQ ID NO: 3246094 - RNA, 18 nt, Human
ccacagcaguugaaaaga

SEQ ID NO: 3246095 - RNA, 23 nt, Human
ccacagcaguugaaaagacucca

SEQ ID NO: 3246096 - RNA, 21 nt, Human
cagcuccccucggagaagagc

SEQ ID NO: 3246097 - RNA, 22 nt, Human
cagcuccccucggagaagagcu

SEQ ID NO: 3246098 - RNA, 20 nt, Human
cagcuccccucggagaagag

SEQ ID NO: 3246099 - RNA, 20 nt, Human
cagcccuucuuuccacagaa

SEQ ID NO: 3246100 - RNA, 22 nt, Human
cagcaguugaaaagacuccaaa

SEQ ID NO: 3246101 - RNA, 12 nt, Human
cagauccuggaa

SEQ ID NO: 3246102 - RNA, 16 nt, Human
cagagguugcagugag

SEQ ID NO: 3246103 - RNA, 17 nt, Human
cagagguugcagugagc

SEQ ID NO: 3246104 - RNA, 15 nt, Human
cagucacauuccaag

SEQ ID NO: 3246105 - RNA, 16 nt, Human
cagucaccucauggaa

SEQ ID NO: 3246106 - RNA, 15 nt, Human
cagucaccucaugga

SEQ ID NO: 3246107 - RNA, 19 nt, Human
cagucaccucauggaauug

SEQ ID NO: 3246108 - RNA, 19 nt, Human
caggugccaguuauggcua

SEQ ID NO: 3246109 - RNA, 20 nt, Human
cagucugacuguuuccauca

SEQ ID NO: 3246110 - RNA, 14 nt, Human
caaguauuagaaua

SEQ ID NO: 3246111 - RNA, 20 nt, Human
caaguauuagaauaccacag

SEQ ID NO: 3246112 - RNA, 14 nt, Human
caaugcuguauuuu

SEQ ID NO: 3246113 - RNA, 23 nt, Human
caaugcuguauuuuaaaagaaug

SEQ ID NO: 3246114 - RNA, 12 nt, Human
caauauuucaga

SEQ ID NO: 3246115 - RNA, 20 nt, Human
caauauuucagauaaucaca

SEQ ID NO: 3246116 - RNA, 12 nt, Human
caauuuaaaaaa

SEQ ID NO: 3246117 - RNA, 23 nt, Human
cacaagacccaaaaggcagaagc

SEQ ID NO: 3246118 - RNA, 16 nt, Human
cacaagacugcacauc

SEQ ID NO: 3246119 - RNA, 23 nt, Human
caccucaaaauaccaugccauuu

SEQ ID NO: 3246120 - RNA, 21 nt, Human
caccuacaugagguacugaga

SEQ ID NO: 3246121 - RNA, 20 nt, Human
cacuuggucugugagaugcu

SEQ ID NO: 3246122 - RNA, 17 nt, Human
cacuuggucugugagau

SEQ ID NO: 3246123 - RNA, 13 nt, Human
cagaauauugcuu

SEQ ID NO: 3246124 - RNA, 20 nt, Human
cagaauauguuucaaacuuu

SEQ ID NO: 3246125 - RNA, 18 nt, Human
cagaauauguuucaaacu

SEQ ID NO: 3246126 - RNA, 17 nt, Human
cagaauauguuucaaac

SEQ ID NO: 3246127 - RNA, 15 nt, Human
cagaauauguuucaa

SEQ ID NO: 3246128 - RNA, 14 nt, Human
cagaauauguuuca

SEQ ID NO: 3246129 - RNA, 13 nt, Human
cagaauauguuuc

SEQ ID NO: 3246130 - RNA, 12 nt, Human
cagaauauguuu

SEQ ID NO: 3246131 - RNA, 19 nt, Human
caacccaaauguucaucaa

SEQ ID NO: 3246132 - RNA, 21 nt, Human
caacuaucucauuuccaagca

SEQ ID NO: 3246133 - RNA, 20 nt, Human
caacuauuuuuccaaaauaa

SEQ ID NO: 3246134 - RNA, 15 nt, Human
caaauccuugaagau

SEQ ID NO: 3246135 - RNA, 18 nt, Human
caaaaaaauauauuuaau

SEQ ID NO: 3246136 - RNA, 15 nt, Human
auuucuaugaaauau

SEQ ID NO: 3246137 - RNA, 18 nt, Human
auuucuaugaaauauuau

SEQ ID NO: 3246138 - RNA, 14 nt, Human
auuucuaugaaaua

SEQ ID NO: 3246139 - RNA, 19 nt, Human
auuuauacaggucauauua

SEQ ID NO: 3246140 - RNA, 22 nt, Human
auuuaaugauaaguaaaugcua

SEQ ID NO: 3246141 - RNA, 15 nt, Human
auuguuuaaaaucau

SEQ ID NO: 3246142 - RNA, 19 nt, Human
auuguuuaaaaucauuucu

SEQ ID NO: 3246143 - RNA, 14 nt, Human
auuguaaaugugcu

SEQ ID NO: 3246144 - RNA, 15 nt, Human
auuguaaaugugcuu

SEQ ID NO: 3246145 - RNA, 17 nt, Human
auuguaaaugugcuuuu

SEQ ID NO: 3246146 - RNA, 14 nt, Human
auuguaaauaguau

SEQ ID NO: 3246147 - RNA, 18 nt, Human
auucacaagacccaaaag

SEQ ID NO: 3246148 - RNA, 22 nt, Human
auucaagaaaacaacuucaaua

SEQ ID NO: 3246149 - RNA, 18 nt, Human
auuaaauuuugaguucua

SEQ ID NO: 3246150 - RNA, 18 nt, Human
auugacuuuuuauggcac

SEQ ID NO: 3246151 - RNA, 17 nt, Human
auucuugccaaauauaa

SEQ ID NO: 3246152 - RNA, 23 nt, Human
cuggaaaaguauguuagugcaaa

SEQ ID NO: 3246153 - RNA, 12 nt, Human
cuuaaaaauggu

SEQ ID NO: 3246154 - RNA, 20 nt, Human
cuuaaaaaugguuuaaaugg

SEQ ID NO: 3246155 - RNA, 13 nt, Human
cuuaaaaaugguu

SEQ ID NO: 3246156 - RNA, 23 nt, Human
cugugagaugcuagaacucccuu

SEQ ID NO: 3246157 - RNA, 21 nt, Human
cugugagaugcuagaacuccc

SEQ ID NO: 3246158 - RNA, 18 nt, Human
cugugaaguuuacauugu

SEQ ID NO: 3246159 - RNA, 23 nt, Human
cugugaaguuuacauuguaaaua

SEQ ID NO: 3246160 - RNA, 19 nt, Human
cuguuauaaucuuucacag

SEQ ID NO: 3246161 - RNA, 22 nt, Human
cuguucacagccagacuggcac

SEQ ID NO: 3246162 - RNA, 12 nt, Human
cuguucacagcc

SEQ ID NO: 3246163 - RNA, 19 nt, Human
cuguucacagccagacugg

SEQ ID NO: 3246164 - RNA, 20 nt, Human
cuguaagaaaauaucacuug

SEQ ID NO: 3246165 - RNA, 23 nt, Human
gaaacuucagcgguuuauauaag

SEQ ID NO: 3246166 - RNA, 17 nt, Human
gaaaugaaagcagggac

SEQ ID NO: 3246167 - RNA, 23 nt, Human
gaaaucaaauaugcaaagcacug

SEQ ID NO: 3246168 - RNA, 18 nt, Human
gaaaugaaagcagggacu

SEQ ID NO: 3246169 - RNA, 18 nt, Human
gaacaaauuuacagagac

SEQ ID NO: 3246170 - RNA, 17 nt, Human
gaacaaauuuacagaga

SEQ ID NO: 3246171 - RNA, 23 nt, Human
gaacaaauuuacagagacagaaa

SEQ ID NO: 3246172 - RNA, 16 nt, Human
gaacaagaugguucua

SEQ ID NO: 3246173 - RNA, 22 nt, Human
gaaauauuuauuuuaauaaugu

SEQ ID NO: 3246174 - RNA, 21 nt, Human
gaaaucaaauaugcaaagcac

SEQ ID NO: 3246175 - RNA, 16 nt, Human
gaaaucaaauaugcaa

SEQ ID NO: 3246176 - RNA, 19 nt, Human
gaaaucaaagagagaaaau

SEQ ID NO: 3246177 - RNA, 20 nt, Human
gaaaagacuccaaagaaaug

SEQ ID NO: 3246178 - RNA, 18 nt, Human
gaaaagacuccaaagaaa

SEQ ID NO: 3246179 - RNA, 21 nt, Human
gaaaagacuccaaagaaaugu

SEQ ID NO: 3246180 - RNA, 23 nt, Human
cuuggucucagugucaaugcagc

SEQ ID NO: 3246181 - RNA, 17 nt, Human
gacauuugcucauggaa

SEQ ID NO: 3246182 - RNA, 12 nt, Human
gacagcucugca

SEQ ID NO: 3246183 - RNA, 18 nt, Human
gacagucaccucauggaa

SEQ ID NO: 3246184 - RNA, 17 nt, Human
gacagucaccucaugga

SEQ ID NO: 3246185 - RNA, 14 nt, Human
gacgcucucuggcc

SEQ ID NO: 3246186 - RNA, 14 nt, Human
gaaugaauggcuaa

SEQ ID NO: 3246187 - RNA, 22 nt, Human
gaaugauuaugaauuacauuug

SEQ ID NO: 3246188 - RNA, 14 nt, Human
gaaugauuaugaau

SEQ ID NO: 3246189 - RNA, 15 nt, Human
gaaugaauggcuaag

SEQ ID NO: 3246190 - RNA, 15 nt, Human
gaauuaacacaugau

SEQ ID NO: 3246191 - RNA, 14 nt, Human
gaauuaacacauga

SEQ ID NO: 3246192 - RNA, 13 nt, Human
gaauuacauuugu

SEQ ID NO: 3246193 - RNA, 20 nt, Human
gaauuacauuuguauaaaau

SEQ ID NO: 3246194 - RNA, 15 nt, Human
gaauuacauuuguau

SEQ ID NO: 3246195 - RNA, 18 nt, Human
gaauuacauuuguauaaa

SEQ ID NO: 3246196 - RNA, 17 nt, Human
gagcuguucacagccag

SEQ ID NO: 3246197 - RNA, 20 nt, Human
gagcuguucacagccagacu

SEQ ID NO: 3246198 - RNA, 22 nt, Human
gagcuguucacagccagacugg

SEQ ID NO: 3246199 - RNA, 14 nt, Human
gagcagucaggaaa

SEQ ID NO: 3246200 - RNA, 12 nt, Human
gaggcuccacuu

SEQ ID NO: 3246201 - RNA, 15 nt, Human
gaggcuccacuuggu

SEQ ID NO: 3246202 - RNA, 17 nt, Human
gaggcuccacuuggucu

SEQ ID NO: 3246203 - RNA, 18 nt, Human
gaggcugagaugggagaa

SEQ ID NO: 3246204 - RNA, 14 nt, Human
gaggagaaacugga

SEQ ID NO: 3246205 - RNA, 12 nt, Human
gaggagaaacug

SEQ ID NO: 3246206 - RNA, 20 nt, Human
gaggacgcucucuggccuuc

SEQ ID NO: 3246207 - RNA, 21 nt, Human
gaggacgcucucuggccuucg

SEQ ID NO: 3246208 - RNA, 22 nt, Human
gacuuuuuauggcacuaguauu

SEQ ID NO: 3246209 - RNA, 21 nt, Human
gagauugugccccugcacucc

SEQ ID NO: 3246210 - RNA, 16 nt, Human
gagaugcuagaacucc

SEQ ID NO: 3246211 - RNA, 20 nt, Human
gagaugcuagaacucccuuu

SEQ ID NO: 3246212 - RNA, 13 nt, Human
gcagaacagugau

SEQ ID NO: 3246213 - RNA, 12 nt, Human
gcagaacaguga

SEQ ID NO: 3246214 - RNA, 22 nt, Human
gcagaacagugauuaccaggga

SEQ ID NO: 3246215 - RNA, 18 nt, Human
gcagaacagugauuacca

SEQ ID NO: 3246216 - RNA, 22 nt, Human
gcaguuguugcccacagcugua

SEQ ID NO: 3246217 - RNA, 23 nt, Human
ggaucuucaucugacuaugacau

SEQ ID NO: 3246218 - RNA, 22 nt, Human
ggaucuucaucugacuaugaca

SEQ ID NO: 3246219 - RNA, 15 nt, Human
ggauuguaaaauggu

SEQ ID NO: 3246220 - RNA, 23 nt, Human
aaaaagauuuucagaaaauauua

SEQ ID NO: 3246221 - RNA, 13 nt, Human
aaaaauacaaaaa

SEQ ID NO: 3246222 - RNA, 16 nt, Human
ggccuucggccuccau

SEQ ID NO: 3246223 - RNA, 18 nt, Human
ggccuucggccuccaucc

SEQ ID NO: 3246224 - RNA, 20 nt, Human
ggcuaagcuucacuguaaaa

SEQ ID NO: 3246225 - RNA, 18 nt, Human
aaaaugguuuaaaugguc

SEQ ID NO: 3246226 - RNA, 16 nt, Human
aaaaugguuuaaaugg

SEQ ID NO: 3246227 - RNA, 14 nt, Human
aaaauacacacuca

SEQ ID NO: 3246228 - RNA, 16 nt, Human
aaaauaauuuuuauau

SEQ ID NO: 3246229 - RNA, 17 nt, Human
aaaauaauuuuuauauu

SEQ ID NO: 3246230 - RNA, 11 nt, Human
aaaauaauuuu

SEQ ID NO: 3246231 - RNA, 17 nt, Human
aaaaucucaauauuuca

SEQ ID NO: 3246232 - RNA, 16 nt, Human
aaaauauauuuaauga

SEQ ID NO: 3246233 - RNA, 15 nt, Human
aaaauauauuuaaug

SEQ ID NO: 3246234 - RNA, 14 nt, Human
ggucagugcaaaua

SEQ ID NO: 3246235 - RNA, 21 nt, Human
aaacuucccuuucugcuugug

SEQ ID NO: 3246236 - RNA, 20 nt, Human
ggguuuuauuguuuaaaauc

SEQ ID NO: 3246237 - RNA, 21 nt, Human
aaauaccaugccauuuaaagc

SEQ ID NO: 3246238 - RNA, 22 nt, Human
aaauaucacuugucaauaaaau

SEQ ID NO: 3246239 - RNA, 15 nt, Human
aaauauauuuaauga

SEQ ID NO: 3246240 - RNA, 14 nt, Human
aaauauauuuaaug

SEQ ID NO: 3246241 - RNA, 18 nt, Human
aaauauaugcuaagucuu

SEQ ID NO: 3246242 - RNA, 13 nt, Human
aaauaugcaaagc

SEQ ID NO: 3246243 - RNA, 15 nt, Human
aaauaugcaaagcac

SEQ ID NO: 3246244 - RNA, 16 nt, Human
aaauaugcaaagcacu

SEQ ID NO: 3246245 - RNA, 17 nt, Human
aaauaugcaaagcacug

SEQ ID NO: 3246246 - RNA, 20 nt, Human
aaauauuguguugugaaugu

SEQ ID NO: 3246247 - RNA, 15 nt, Human
guaauagagcaaaau

SEQ ID NO: 3246248 - RNA, 19 nt, Human
aaacuuuaugcuaagugaa

SEQ ID NO: 3246249 - RNA, 12 nt, Human
aaacuuuaugcu

SEQ ID NO: 3246250 - RNA, 16 nt, Human
aaagcagaacagugau

SEQ ID NO: 3246251 - RNA, 17 nt, Human
aaagcagggacuugaac

SEQ ID NO: 3246252 - RNA, 20 nt, Human
aaagggauggcaagaugugg

SEQ ID NO: 3246253 - RNA, 20 nt, Human
aaagggcuguuauaaucuuu

SEQ ID NO: 3246254 - RNA, 22 nt, Human
aaagggcuguuauaaucuuuca

SEQ ID NO: 3246255 - RNA, 19 nt, Human
gguuuuauuguuuaaaauc

SEQ ID NO: 3246256 - RNA, 20 nt, Human
gguucuagcauggcauauuu

SEQ ID NO: 3246257 - RNA, 23 nt, Human
gccuucggccuccauccugaggc

SEQ ID NO: 3246258 - RNA, 22 nt, Human
gccucauguccacugguucuuc

SEQ ID NO: 3246259 - RNA, 12 nt, Human
gccuccauccug

SEQ ID NO: 3246260 - RNA, 14 nt, Human
gccuccauccugag

SEQ ID NO: 3246261 - RNA, 13 nt, Human
gccuccauccuga

SEQ ID NO: 3246262 - RNA, 12 nt, Human
gcauuuagaugu

SEQ ID NO: 3246263 - RNA, 19 nt, Human
gcauuuaggccaugggaca

SEQ ID NO: 3246264 - RNA, 13 nt, Human
gcauuuagaugua

SEQ ID NO: 3246265 - RNA, 11 nt, Human
gccccaaaagg

SEQ ID NO: 3246266 - RNA, 13 nt, Human
ggaaacugccagc

SEQ ID NO: 3246267 - RNA, 19 nt, Human
ggaaaucaggguuaguauu

SEQ ID NO: 3246268 - RNA, 21 nt, Human
ggacagucaccucauggaauu

SEQ ID NO: 3246269 - RNA, 17 nt, Human
ggacagucaccucaugg

SEQ ID NO: 3246270 - RNA, 18 nt, Human
ggacagucaccucaugga

SEQ ID NO: 3246271 - RNA, 21 nt, Human
gcuguauuuuaaaagaaugau

SEQ ID NO: 3246272 - RNA, 20 nt, Human
gcuguauuuuaaaagaauga

SEQ ID NO: 3246273 - RNA, 18 nt, Human
gcuguauuuuaaaagaau

SEQ ID NO: 3246274 - RNA, 13 nt, Human
gcugcugaaacaa

SEQ ID NO: 3246275 - RNA, 14 nt, Human
gucaggaaagagaa

SEQ ID NO: 3246276 - RNA, 13 nt, Human
gucaggaaagaga

SEQ ID NO: 3246277 - RNA, 15 nt, Human
gucacaggaaguaga

SEQ ID NO: 3246278 - RNA, 13 nt, Human
gucacaggaagua

SEQ ID NO: 3246279 - RNA, 21 nt, Human
gucaauuuuguuauguauauu

SEQ ID NO: 3246280 - RNA, 20 nt, Human
gucacaggaaguagaggagg

SEQ ID NO: 3246281 - RNA, 18 nt, Human
aaaugugccuucauuuuu

SEQ ID NO: 3246282 - RNA, 15 nt, Human
aaaugugcuuuuaaa

SEQ ID NO: 3246283 - RNA, 17 nt, Human
aaauuguauuacaaauc

SEQ ID NO: 3246284 - RNA, 17 nt, Human
aaauuccaagugauuga

SEQ ID NO: 3246285 - RNA, 19 nt, Human
guauucuagcuaauguaau

SEQ ID NO: 3246286 - RNA, 24 nt, Human
guauucuaaauuuuauaucuugua

SEQ ID NO: 3246287 - RNA, 21 nt, Human
guauucuaaauuuuauaucuu

SEQ ID NO: 3246288 - RNA, 13 nt, Human
aacagucucagga

SEQ ID NO: 3246289 - RNA, 14 nt, Human
aacauaaaauacaa

SEQ ID NO: 3246290 - RNA, 12 nt, Human
aacauauauaac

SEQ ID NO: 3246291 - RNA, 18 nt, Human
aacacagcaagggugaug

SEQ ID NO: 3246292 - RNA, 20 nt, Human
aacacagcaagggugauggg

SEQ ID NO: 3246293 - RNA, 17 nt, Human
aacacaacuauauuguu

SEQ ID NO: 3246294 - RNA, 22 nt, Human
guccaugaagauguagaggaga

SEQ ID NO: 3246295 - RNA, 21 nt, Human
aacucauuuuuguuuucauua

SEQ ID NO: 3246296 - RNA, 24 nt, Human
aacucauuuuuguuuucauuaucu

SEQ ID NO: 3246297 - RNA, 23 nt, Human
aacuauucaggagaguagaacag

SEQ ID NO: 3246298 - RNA, 14 nt, Human
gucuuaauuaaaag

SEQ ID NO: 3246299 - RNA, 19 nt, Human
gucuuauauauuguagaua

SEQ ID NO: 3246300 - RNA, 14 nt, Human
gugaaguuuacauu

SEQ ID NO: 3246301 - RNA, 23 nt, Human
aacuuccuuggacucauuuuaaa

SEQ ID NO: 3246302 - RNA, 22 nt, Human
aacuuccuuggacucauuuuaa

SEQ ID NO: 3246303 - RNA, 18 nt, Human
aacuucagcgguuuauau

SEQ ID NO: 3246304 - RNA, 13 nt, Human
aacuucagacaua

SEQ ID NO: 3246305 - RNA, 17 nt, Human
aacugugaaguuuacau

SEQ ID NO: 3246306 - RNA, 19 nt, Human
aacugugaaguuuacauug

SEQ ID NO: 3246307 - RNA, 16 nt, Human
gugauuaccagggacu

SEQ ID NO: 3246308 - RNA, 11 nt, Human
gugauuaccag

SEQ ID NO: 3246309 - RNA, 17 nt, Human
gugauuaccagggacug

SEQ ID NO: 3246310 - RNA, 11 nt, Human
aagaaacauuu

SEQ ID NO: 3246311 - RNA, 13 nt, Human
aagaaagaaaauc

SEQ ID NO: 3246312 - RNA, 14 nt, Human
aagaaagaaaauca

SEQ ID NO: 3246313 - RNA, 16 nt, Human
aagaaagaaaaucagg

SEQ ID NO: 3246314 - RNA, 14 nt, Human
aagaaaacaacuuc

SEQ ID NO: 3246315 - RNA, 18 nt, Human
gugcuaguaauuggaaag

SEQ ID NO: 3246316 - RNA, 21 nt, Human
gugcuacaaaaacacagcaag

SEQ ID NO: 3246317 - RNA, 22 nt, Human
gugcuacaaaaacacagcaagg

SEQ ID NO: 3246318 - RNA, 14 nt, Human
guuuaugauuccac

SEQ ID NO: 3246319 - RNA, 17 nt, Human
aagggcuguuauaaucu

SEQ ID NO: 3246320 - RNA, 17 nt, Human
aaggggaauugaggaca

SEQ ID NO: 3246321 - RNA, 15 nt, Human
aagggcuguuauaau

SEQ ID NO: 3246322 - RNA, 12 nt, Human
aaguaaaugcua

SEQ ID NO: 3246323 - RNA, 19 nt, Human
aaguaaugauaacuggaaa

SEQ ID NO: 3246324 - RNA, 19 nt, Human
aaguauguguaaaauguga

SEQ ID NO: 3246325 - RNA, 18 nt, Human
aaguauguuagugcaaau

SEQ ID NO: 3246326 - RNA, 19 nt, Human
aaguauguuagugcaaauu

SEQ ID NO: 3246327 - RNA, 18 nt, Human
aaguauguguaaaaugug

SEQ ID NO: 3246328 - RNA, 13 nt, Human
uaaaagaauauuu

SEQ ID NO: 3246329 - RNA, 21 nt, Human
uaaaauacacacucaaaucaa

SEQ ID NO: 3246330 - RNA, 22 nt, Human
uaaaauaauuuuuauauuugaa

SEQ ID NO: 3246331 - RNA, 20 nt, Human
uaaaauaauuuuuauauuug

SEQ ID NO: 3246332 - RNA, 14 nt, Human
uaaaaccacagcag

SEQ ID NO: 3246333 - RNA, 15 nt, Human
uaaaaccacagcagu

SEQ ID NO: 3246334 - RNA, 13 nt, Human
uaaaaccacagca

SEQ ID NO: 3246335 - RNA, 21 nt, Human
uaaaaauauuguguugugaau

SEQ ID NO: 3246336 - RNA, 14 nt, Human
uaaaaauauugugu

SEQ ID NO: 3246337 - RNA, 21 nt, Human
uaaaaaaaaaccugagcccca

SEQ ID NO: 3246338 - RNA, 19 nt, Human
uaaaaagccugcaauuuca

SEQ ID NO: 3246339 - RNA, 22 nt, Human
uaaaaagccugcaauuucauau

SEQ ID NO: 3246340 - RNA, 9 nt, Human
uaaaauggu

SEQ ID NO: 3246341 - RNA, 11 nt, Human
uaaaaugugaa

SEQ ID NO: 3246342 - RNA, 13 nt, Human
uaaaaugugaagu

SEQ ID NO: 3246343 - RNA, 19 nt, Human
aaggaaaaaauaacaauga

SEQ ID NO: 3246344 - RNA, 18 nt, Human
guucccuugaugaagaag

SEQ ID NO: 3246345 - RNA, 22 nt, Human
guucuagcauggcauauuuuuc

SEQ ID NO: 3246346 - RNA, 19 nt, Human
guucuagcauggcauauuu

SEQ ID NO: 3246347 - RNA, 19 nt, Human
guuaauuccaauuauauga

SEQ ID NO: 3246348 - RNA, 22 nt, Human
guuauugauaaguucauacauu

SEQ ID NO: 3246349 - RNA, 21 nt, Human
guuauugauaaguucauacau

SEQ ID NO: 3246350 - RNA, 18 nt, Human
guuauugauaaguucaua

SEQ ID NO: 3246351 - RNA, 17 nt, Human
guuauuauauuuacaaa

SEQ ID NO: 3246352 - RNA, 19 nt, Human
guuauuauauuuacaaaug

SEQ ID NO: 3246353 - RNA, 16 nt, Human
aagcacugacuucuaa

SEQ ID NO: 3246354 - RNA, 17 nt, Human
aagcacugacuucuaag

SEQ ID NO: 3246355 - RNA, 16 nt, Human
aagcacuaaacaaaga

SEQ ID NO: 3246356 - RNA, 19 nt, Human
aagcauuguaaaugugcuu

SEQ ID NO: 3246357 - RNA, 19 nt, Human
aagcacugacuucuaagua

SEQ ID NO: 3246358 - RNA, 20 nt, Human
aagcacugacuucuaaguaa

SEQ ID NO: 3246359 - RNA, 18 nt, Human
aagcauuguaaaugugcu

SEQ ID NO: 3246360 - RNA, 15 nt, Human
aagauagcagggcau

SEQ ID NO: 3246361 - RNA, 14 nt, Human
aagauagcagggca

SEQ ID NO: 3246362 - RNA, 15 nt, Human
guguaaaaugugaag

SEQ ID NO: 3246363 - RNA, 22 nt, Human
gugucuuaauuaaaagaauauu

SEQ ID NO: 3246364 - RNA, 17 nt, Human
aagcaacccaaauguuc

SEQ ID NO: 3246365 - RNA, 19 nt, Human
uauccaaaccaaauaaaaa

SEQ ID NO: 3246366 - RNA, 19 nt, Human
uauaauuuugugaagcaaa

SEQ ID NO: 3246367 - RNA, 15 nt, Human
uauauuguuugcuaa

SEQ ID NO: 3246368 - RNA, 19 nt, Human
uaugaaauuauauaaguau

SEQ ID NO: 3246369 - RNA, 21 nt, Human
uaugaaauauuauguuaaaac

SEQ ID NO: 3246370 - RNA, 20 nt, Human
acagauuuccauccuaguca

SEQ ID NO: 3246371 - RNA, 19 nt, Human
uaugccccauucaacaucu

SEQ ID NO: 3246372 - RNA, 15 nt, Human
uaugccccauucaac

SEQ ID NO: 3246373 - RNA, 16 nt, Human
uaugauuaaguaauga

SEQ ID NO: 3246374 - RNA, 20 nt, Human
uaugauuaaguaaugauaac

SEQ ID NO: 3246375 - RNA, 16 nt, Human
acagccucuuagaugc

SEQ ID NO: 3246376 - RNA, 21 nt, Human
acagggaggacgcucucuggc

SEQ ID NO: 3246377 - RNA, 20 nt, Human
acagggaggacgcucucugg

SEQ ID NO: 3246378 - RNA, 17 nt, Human
acagucaccucauggaa

SEQ ID NO: 3246379 - RNA, 18 nt, Human
acagucaccucauggaau

SEQ ID NO: 3246380 - RNA, 16 nt, Human
acagucaccucaugga

SEQ ID NO: 3246381 - RNA, 14 nt, Human
uauuacuguaagaa

SEQ ID NO: 3246382 - RNA, 15 nt, Human
uauucaaacagucuc

SEQ ID NO: 3246383 - RNA, 23 nt, Human
uauucaaacagucucaggaaauc

SEQ ID NO: 3246384 - RNA, 22 nt, Human
acaggaaccacaagacugcaca

SEQ ID NO: 3246385 - RNA, 17 nt, Human
acaggaaguagaggagg

SEQ ID NO: 3246386 - RNA, 16 nt, Human
uauuaaaacucauuuu

SEQ ID NO: 3246387 - RNA, 21 nt, Human
uauguuuucaggcuagaugua

SEQ ID NO: 3246388 - RNA, 17 nt, Human
uauguguaaaaugugaa

SEQ ID NO: 3246389 - RNA, 19 nt, Human
acaaauuuacagagacaga

SEQ ID NO: 3246390 - RNA, 18 nt, Human
acaaauuuacagagacag

SEQ ID NO: 3246391 - RNA, 20 nt, Human
acaagacccaaaaggcagaa

SEQ ID NO: 3246392 - RNA, 15 nt, Human
uagaugcaguucuga

SEQ ID NO: 3246393 - RNA, 22 nt, Human
uagcauggcauauuuuucacau

SEQ ID NO: 3246394 - RNA, 21 nt, Human
uagcauggcauauuuuucaca

SEQ ID NO: 3246395 - RNA, 22 nt, Human
uagaggagaaacuggaacucuc

SEQ ID NO: 3246396 - RNA, 19 nt, Human
uagaggagaaacuggaacu

SEQ ID NO: 3246397 - RNA, 22 nt, Human
uagagcaaaauugauguguuua

SEQ ID NO: 3246398 - RNA, 14 nt, Human
uagagcaaaauuga

SEQ ID NO: 3246399 - RNA, 21 nt, Human
uagagcaaaauugauguguuu

SEQ ID NO: 3246400 - RNA, 13 nt, Human
acaagacugcaca

SEQ ID NO: 3246401 - RNA, 14 nt, Human
acaagacugcacau

SEQ ID NO: 3246402 - RNA, 23 nt, Human
acaauacaucccuuaccugggaa

SEQ ID NO: 3246403 - RNA, 12 nt, Human
uagcuaauguaa

SEQ ID NO: 3246404 - RNA, 19 nt, Human
uagcuaauguaauaacugu

SEQ ID NO: 3246405 - RNA, 18 nt, Human
uaggaaauauuuauuuua

SEQ ID NO: 3246406 - RNA, 19 nt, Human
uaggaaauauuuauuuuaa

SEQ ID NO: 3246407 - RNA, 14 nt, Human
uagggagagaagau

SEQ ID NO: 3246408 - RNA, 15 nt, Human
uagggagagaagaua

SEQ ID NO: 3246409 - RNA, 18 nt, Human
uaggcaaccuuuauuuuu

SEQ ID NO: 3246410 - RNA, 17 nt, Human
uaguguuggagaagaac

SEQ ID NO: 3246411 - RNA, 23 nt, Human
uaguguuggagaagaacugaaau

SEQ ID NO: 3246412 - RNA, 22 nt, Human
uagugaaacucguuaauuugua

SEQ ID NO: 3246413 - RNA, 15 nt, Human
acacacucaaaucaa

SEQ ID NO: 3246414 - RNA, 18 nt, Human
acaaugcuguauuuuaaa

SEQ ID NO: 3246415 - RNA, 22 nt, Human
acaaugcuguauuuuaaaagaa

SEQ ID NO: 3246416 - RNA, 18 nt, Human
acacaugauccugcaauu

SEQ ID NO: 3246417 - RNA, 15 nt, Human
acacaucagcuugcc

SEQ ID NO: 3246418 - RNA, 15 nt, Human
acacaugaaguccaa

SEQ ID NO: 3246419 - RNA, 19 nt, Human
acacucaaaucaagaaacu

SEQ ID NO: 3246420 - RNA, 13 nt, Human
acacuaagagaga

SEQ ID NO: 3246421 - RNA, 18 nt, Human
acacucaaaucaagaaac

SEQ ID NO: 3246422 - RNA, 23 nt, Human
uacaggucauauuaauauauuuc

SEQ ID NO: 3246423 - RNA, 17 nt, Human
uacauuguaaauaguau

SEQ ID NO: 3246424 - RNA, 18 nt, Human
uaccaccagucugacugu

SEQ ID NO: 3246425 - RNA, 13 nt, Human
aauguuaagcaga

SEQ ID NO: 3246426 - RNA, 14 nt, Human
uacacuaagagaga

SEQ ID NO: 3246427 - RNA, 12 nt, Human
aaugcuguguua

SEQ ID NO: 3246428 - RNA, 16 nt, Human
aaugcuguauuuuaaa

SEQ ID NO: 3246429 - RNA, 13 nt, Human
aaugcuguguuaa

SEQ ID NO: 3246430 - RNA, 22 nt, Human
aauuccacuuauaggaauugac

SEQ ID NO: 3246431 - RNA, 18 nt, Human
aauuccaagugauugaaa

SEQ ID NO: 3246432 - RNA, 22 nt, Human
aauuauuuuguucauacauauu

SEQ ID NO: 3246433 - RNA, 21 nt, Human
aauuauuuuguucauacauau

SEQ ID NO: 3246434 - RNA, 20 nt, Human
aauuauuuuguucauacaua

SEQ ID NO: 3246435 - RNA, 19 nt, Human
aauuauuuuguucauacau

SEQ ID NO: 3246436 - RNA, 18 nt, Human
aauuauuuuguucauaca

SEQ ID NO: 3246437 - RNA, 16 nt, Human
aauuauuuuguucaua

SEQ ID NO: 3246438 - RNA, 19 nt, Human
uacauuguacgaagaguau

SEQ ID NO: 3246439 - RNA, 21 nt, Human
aauugacccacaagaaaugaa

SEQ ID NO: 3246440 - RNA, 22 nt, Human
aauugacccacaagaaaugaaa

SEQ ID NO: 3246441 - RNA, 14 nt, Human
aauugauguguuua

SEQ ID NO: 3246442 - RNA, 13 nt, Human
aauugauguguuu

SEQ ID NO: 3246443 - RNA, 14 nt, Human
uacuguaagaaaau

SEQ ID NO: 3246444 - RNA, 13 nt, Human
uacuguaagaaaa

SEQ ID NO: 3246445 - RNA, 13 nt, Human
uaaucuuucacag

SEQ ID NO: 3246446 - RNA, 16 nt, Human
aaucuuauaauuuaaa

SEQ ID NO: 3246447 - RNA, 12 nt, Human
uaauagagcaaa

SEQ ID NO: 3246448 - RNA, 21 nt, Human
uaauagagcaaaauugaugug

SEQ ID NO: 3246449 - RNA, 18 nt, Human
uaauguaauaacugugaa

SEQ ID NO: 3246450 - RNA, 22 nt, Human
aaugaauggcuaagcaaaaugu

SEQ ID NO: 3246451 - RNA, 19 nt, Human
aaugaaacacucaguuguu

SEQ ID NO: 3246452 - RNA, 12 nt, Human
aaucaugaauua

SEQ ID NO: 3246453 - RNA, 15 nt, Human
aaucaugaauuaguu

SEQ ID NO: 3246454 - RNA, 16 nt, Human
uaagcuuguauuccuu

SEQ ID NO: 3246455 - RNA, 19 nt, Human
uaaguaaaaccacagcagu

SEQ ID NO: 3246456 - RNA, 13 nt, Human
uaaguaaaugcua

SEQ ID NO: 3246457 - RNA, 14 nt, Human
uaaguucauacauu

SEQ ID NO: 3246458 - RNA, 16 nt, Human
uaaguauucuaaauuu

SEQ ID NO: 3246459 - RNA, 19 nt, Human
aaucuacacuccagugaga

SEQ ID NO: 3246460 - RNA, 19 nt, Human
aaucuuauaauuuaaaaua

SEQ ID NO: 3246461 - RNA, 21 nt, Human
uaagcaaaaugugauauguac

SEQ ID NO: 3246462 - RNA, 22 nt, Human
aaucaggguuaguauuguccag

SEQ ID NO: 3246463 - RNA, 16 nt, Human
aaucaggguuaguauu

SEQ ID NO: 3246464 - RNA, 21 nt, Human
aaucaggguuaguauugucca

SEQ ID NO: 3246465 - RNA, 21 nt, Human
aauaugccccauucaacaucu

SEQ ID NO: 3246466 - RNA, 24 nt, Human
aauaugccccauucaacaucuagu

SEQ ID NO: 3246467 - RNA, 15 nt, Human
aauauuuauuuuaau

SEQ ID NO: 3246468 - RNA, 19 nt, Human
aauauuuauuuuaauaaug

SEQ ID NO: 3246469 - RNA, 18 nt, Human
aauauuuauuuuaauaau

SEQ ID NO: 3246470 - RNA, 17 nt, Human
aauauuguguugugaau

SEQ ID NO: 3246471 - RNA, 22 nt, Human
aauaucacuugucaauaaaauc

SEQ ID NO: 3246472 - RNA, 20 nt, Human
aauaucacuugucaauaaaa

SEQ ID NO: 3246473 - RNA, 20 nt, Human
aauaguauuugagaguucua

SEQ ID NO: 3246474 - RNA, 22 nt, Human
aauaguauuugagaguucuaaa

SEQ ID NO: 3246475 - RNA, 16 nt, Human
aauagucaaauugugu

SEQ ID NO: 3246476 - RNA, 15 nt, Human
aauaguauuugagag

SEQ ID NO: 3246477 - RNA, 23 nt, Human
aauaguauuugagaguucuaaau

SEQ ID NO: 3246478 - RNA, 18 nt, Human
uaagaagugaaaaucuac

SEQ ID NO: 3246479 - RNA, 14 nt, Human
uccagugagacagc

SEQ ID NO: 3246480 - RNA, 18 nt, Human
uccagugagacagcucug

SEQ ID NO: 3246481 - RNA, 11 nt, Human
acgcucucugg

SEQ ID NO: 3246482 - RNA, 22 nt, Human
uccacugguucuucuuggucuc

SEQ ID NO: 3246483 - RNA, 20 nt, Human
accuuuuggucuggagggaa

SEQ ID NO: 3246484 - RNA, 19 nt, Human
accuugaaaacuuuaugcu

SEQ ID NO: 3246485 - RNA, 15 nt, Human
acuaucucauuucca

SEQ ID NO: 3246486 - RNA, 16 nt, Human
acuaucucauuuccaa

SEQ ID NO: 3246487 - RNA, 17 nt, Human
acuaucucauuuccaag

SEQ ID NO: 3246488 - RNA, 17 nt, Human
acuauauuguuugcuaa

SEQ ID NO: 3246489 - RNA, 22 nt, Human
acuauauuguuugcuaagcauu

SEQ ID NO: 3246490 - RNA, 15 nt, Human
acuaauuuuaaaaug

SEQ ID NO: 3246491 - RNA, 15 nt, Human
uccauccugaggcuc

SEQ ID NO: 3246492 - RNA, 12 nt, Human
uccauccugagg

SEQ ID NO: 3246493 - RNA, 11 nt, Human
uccauccugag

SEQ ID NO: 3246494 - RNA, 19 nt, Human
acuccagugagacagcucu

SEQ ID NO: 3246495 - RNA, 20 nt, Human
acucuuaagaagacugcauu

SEQ ID NO: 3246496 - RNA, 21 nt, Human
acucuuaagaagacugcauua

SEQ ID NO: 3246497 - RNA, 20 nt, Human
acugacucuuaagaagacug

SEQ ID NO: 3246498 - RNA, 17 nt, Human
acugacucuuaagaaga

SEQ ID NO: 3246499 - RNA, 18 nt, Human
acugacucuuaagaagac

SEQ ID NO: 3246500 - RNA, 13 nt, Human
acugacuucuaag

SEQ ID NO: 3246501 - RNA, 15 nt, Human
acugacuucuaagua

SEQ ID NO: 3246502 - RNA, 16 nt, Human
acugacuucuaaguaa

SEQ ID NO: 3246503 - RNA, 22 nt, Human
acugacuucuaaguaaaaccac

SEQ ID NO: 3246504 - RNA, 13 nt, Human
acugacucuuaag

SEQ ID NO: 3246505 - RNA, 14 nt, Human
acugacucuuaaga

SEQ ID NO: 3246506 - RNA, 15 nt, Human
acugacucuuaagaa

SEQ ID NO: 3246507 - RNA, 16 nt, Human
acugacucuuaagaag

SEQ ID NO: 3246508 - RNA, 18 nt, Human
acugagagugaacaaauu

SEQ ID NO: 3246509 - RNA, 17 nt, Human
acugagaugugaacaca

SEQ ID NO: 3246510 - RNA, 22 nt, Human
acugagaugugaacacaucagc

SEQ ID NO: 3246511 - RNA, 22 nt, Human
uccugaaaacccuugccaugug

SEQ ID NO: 3246512 - RNA, 16 nt, Human
uccuggaaaucagggu

SEQ ID NO: 3246513 - RNA, 18 nt, Human
ucaaauugugugaaaggu

SEQ ID NO: 3246514 - RNA, 15 nt, Human
ucaaauugugugaaa

SEQ ID NO: 3246515 - RNA, 21 nt, Human
acaugggacauuugcucaugg

SEQ ID NO: 3246516 - RNA, 15 nt, Human
acaugggacauuugc

SEQ ID NO: 3246517 - RNA, 20 nt, Human
acaugggacauuugcucaug

SEQ ID NO: 3246518 - RNA, 11 nt, Human
acaugggacau

SEQ ID NO: 3246519 - RNA, 14 nt, Human
acaugggacauuug

SEQ ID NO: 3246520 - RNA, 23 nt, Human
acaugagguacugagagugaaca

SEQ ID NO: 3246521 - RNA, 20 nt, Human
acaugagguacugagaguga

SEQ ID NO: 3246522 - RNA, 16 nt, Human
acaugagguacugaga

SEQ ID NO: 3246523 - RNA, 16 nt, Human
acaugaaguccaagca

SEQ ID NO: 3246524 - RNA, 22 nt, Human
ucaauaucuuuuuuuuaauaaa

SEQ ID NO: 3246525 - RNA, 18 nt, Human
ucaauauccaaaccaaau

SEQ ID NO: 3246526 - RNA, 19 nt, Human
ucaauauuucagauaauca

SEQ ID NO: 3246527 - RNA, 15 nt, Human
ucaauauuucagaua

SEQ ID NO: 3246528 - RNA, 23 nt, Human
ucaaugaaugaaugaauggcuaa

SEQ ID NO: 3246529 - RNA, 19 nt, Human
acauucuuccaaaaagauu

SEQ ID NO: 3246530 - RNA, 23 nt, Human
accaaaaaucucaauauuucaga

SEQ ID NO: 3246531 - RNA, 19 nt, Human
acauuguacgaagaguauu

SEQ ID NO: 3246532 - RNA, 23 nt, Human
ucacuugaacccgggaggcagag

SEQ ID NO: 3246533 - RNA, 14 nt, Human
accagucugacugu

SEQ ID NO: 3246534 - RNA, 12 nt, Human
ucaccucaugga

SEQ ID NO: 3246535 - RNA, 13 nt, Human
ucaccucauggaa

SEQ ID NO: 3246536 - RNA, 21 nt, Human
ucacaacagauuauuaccuua

SEQ ID NO: 3246537 - RNA, 16 nt, Human
ucaauucuugccaaau

SEQ ID NO: 3246538 - RNA, 22 nt, Human
ucauaaaaagccugcaauuuca

SEQ ID NO: 3246539 - RNA, 17 nt, Human
ucaguuuuugugaaaag

SEQ ID NO: 3246540 - RNA, 15 nt, Human
ucaguuuuugugaaa

SEQ ID NO: 3246541 - RNA, 17 nt, Human
acccgggaggcagaggu

SEQ ID NO: 3246542 - RNA, 15 nt, Human
acccgggaggcagag

SEQ ID NO: 3246543 - RNA, 14 nt, Human
accccugcuucuga

SEQ ID NO: 3246544 - RNA, 15 nt, Human
acuuuggaacaagau

SEQ ID NO: 3246545 - RNA, 12 nt, Human
ucucaggaaauc

SEQ ID NO: 3246546 - RNA, 14 nt, Human
ucucaggaaaucaa

SEQ ID NO: 3246547 - RNA, 21 nt, Human
ucucaggaaaucaaauaugca

SEQ ID NO: 3246548 - RNA, 23 nt, Human
ucucaggaaaucaaauaugcaaa

SEQ ID NO: 3246549 - RNA, 15 nt, Human
ucucauuuccaagca

SEQ ID NO: 3246550 - RNA, 15 nt, Human
acuugucaauaaaau

SEQ ID NO: 3246551 - RNA, 14 nt, Human
ucuaaguaaaacca

SEQ ID NO: 3246552 - RNA, 15 nt, Human
ucuaaguaaaaccac

SEQ ID NO: 3246553 - RNA, 19 nt, Human
ucuaaguaaaaccacagca

SEQ ID NO: 3246554 - RNA, 23 nt, Human
acuuaacuauucaggagaguaga

SEQ ID NO: 3246555 - RNA, 17 nt, Human
ucuaggaaauauuuauu

SEQ ID NO: 3246556 - RNA, 16 nt, Human
ucuaggaaauauuuau

SEQ ID NO: 3246557 - RNA, 23 nt, Human
ucuagcauggcauauuuuucaca

SEQ ID NO: 3246558 - RNA, 22 nt, Human
ucuagcauggcauauuuuucac

SEQ ID NO: 3246559 - RNA, 18 nt, Human
ucuagcauggcauauuuu

SEQ ID NO: 3246560 - RNA, 21 nt, Human
ucuagcauggcauauuuuuca

SEQ ID NO: 3246561 - RNA, 15 nt, Human
agaauuaacacauga

SEQ ID NO: 3246562 - RNA, 13 nt, Human
agaauauguuuca

SEQ ID NO: 3246563 - RNA, 18 nt, Human
agaauauguuucaaacuu

SEQ ID NO: 3246564 - RNA, 17 nt, Human
agaauauguuucaaacu

SEQ ID NO: 3246565 - RNA, 21 nt, Human
agaauauguuucaaacuuugg

SEQ ID NO: 3246566 - RNA, 19 nt, Human
agaauauguuucaaacuuu

SEQ ID NO: 3246567 - RNA, 14 nt, Human
ucugcuuguguuaa

SEQ ID NO: 3246568 - RNA, 12 nt, Human
agacacacauga

SEQ ID NO: 3246569 - RNA, 14 nt, Human
ucugugagaugcua

SEQ ID NO: 3246570 - RNA, 22 nt, Human
ucugugagaugcuagaacuccc

SEQ ID NO: 3246571 - RNA, 17 nt, Human
ucugugagaugcuagaa

SEQ ID NO: 3246572 - RNA, 23 nt, Human
ucugugagaugcuagaacucccu

SEQ ID NO: 3246573 - RNA, 16 nt, Human
ucugugaaaguacauu

SEQ ID NO: 3246574 - RNA, 14 nt, Human
agaaaugaaagcag

SEQ ID NO: 3246575 - RNA, 15 nt, Human
ucugcagauaaacag

SEQ ID NO: 3246576 - RNA, 18 nt, Human
ucugcagauaaacaguag

SEQ ID NO: 3246577 - RNA, 18 nt, Human
agaagaugguaccaccag

SEQ ID NO: 3246578 - RNA, 13 nt, Human
agaagaacugaaa

SEQ ID NO: 3246579 - RNA, 14 nt, Human
agaagaacugaaau

SEQ ID NO: 3246580 - RNA, 13 nt, Human
ugaacaaauuuac

SEQ ID NO: 3246581 - RNA, 18 nt, Human
ugaacccgggaggcagag

SEQ ID NO: 3246582 - RNA, 22 nt, Human
ugaacccauauuuguacaccaa

SEQ ID NO: 3246583 - RNA, 22 nt, Human
ugaagaagcaccaaucaugaau

SEQ ID NO: 3246584 - RNA, 18 nt, Human
agagcuguucacagccag

SEQ ID NO: 3246585 - RNA, 17 nt, Human
ugaagauuuaccacuug

SEQ ID NO: 3246586 - RNA, 20 nt, Human
ugaagauuuaccacuugugu

SEQ ID NO: 3246587 - RNA, 17 nt, Human
ugaaguacucauacaug

SEQ ID NO: 3246588 - RNA, 20 nt, Human
agacuggcacaguuuucuga

SEQ ID NO: 3246589 - RNA, 21 nt, Human
agacuggcacaguuuucugag

SEQ ID NO: 3246590 - RNA, 18 nt, Human
agacuggcacaguuuucu

SEQ ID NO: 3246591 - RNA, 23 nt, Human
agacuggcacaguuuucugagaa

SEQ ID NO: 3246592 - RNA, 22 nt, Human
agacuccaaagaaauguaaggg

SEQ ID NO: 3246593 - RNA, 16 nt, Human
agagacacacugaaga

SEQ ID NO: 3246594 - RNA, 14 nt, Human
agagacagaaagca

SEQ ID NO: 3246595 - RNA, 17 nt, Human
ugaaagaggaaugaagu

SEQ ID NO: 3246596 - RNA, 17 nt, Human
ugaaaauauuuguauca

SEQ ID NO: 3246597 - RNA, 21 nt, Human
ugaaaauauuuguaucacaaa

SEQ ID NO: 3246598 - RNA, 22 nt, Human
ugaaaauauuuguaucacaaau

SEQ ID NO: 3246599 - RNA, 20 nt, Human
ugaaaaucuuauaauuuaaa

SEQ ID NO: 3246600 - RNA, 22 nt, Human
ugaaacugagaugugaacacau

SEQ ID NO: 3246601 - RNA, 13 nt, Human
ugaaagaaaauaa

SEQ ID NO: 3246602 - RNA, 21 nt, Human
agauugugccccugcacucca

SEQ ID NO: 3246603 - RNA, 22 nt, Human
agaugugaacacaucagcuugc

SEQ ID NO: 3246604 - RNA, 17 nt, Human
agaugugaacacaucag

SEQ ID NO: 3246605 - RNA, 14 nt, Human
ugacuaugacauaa

SEQ ID NO: 3246606 - RNA, 13 nt, Human
agauccuggaaau

SEQ ID NO: 3246607 - RNA, 19 nt, Human
agaugcuagaacucccuuu

SEQ ID NO: 3246608 - RNA, 21 nt, Human
agaugcaguucugaagaagau

SEQ ID NO: 3246609 - RNA, 20 nt, Human
agaugcaguucugaagaaga

SEQ ID NO: 3246610 - RNA, 15 nt, Human
agaugcuagaacucc

SEQ ID NO: 3246611 - RNA, 21 nt, Human
agaugcuagaacucccuuuca

SEQ ID NO: 3246612 - RNA, 15 nt, Human
ugacacuuaaaaaug

SEQ ID NO: 3246613 - RNA, 16 nt, Human
agcaagggugauggga

SEQ ID NO: 3246614 - RNA, 20 nt, Human
agcaagggugaugggaaagc

SEQ ID NO: 3246615 - RNA, 22 nt, Human
agcaagggugaugggaaagcau

SEQ ID NO: 3246616 - RNA, 20 nt, Human
ugagacucugucucagucca

SEQ ID NO: 3246617 - RNA, 16 nt, Human
ugagagacacacugaa

SEQ ID NO: 3246618 - RNA, 17 nt, Human
ugagagacacacugaag

SEQ ID NO: 3246619 - RNA, 19 nt, Human
ugagagacacacugaagaa

SEQ ID NO: 3246620 - RNA, 20 nt, Human
ugagagacacacugaagaag

SEQ ID NO: 3246621 - RNA, 16 nt, Human
agauuuuccugaaaac

SEQ ID NO: 3246622 - RNA, 15 nt, Human
agauuuuccugaaaa

SEQ ID NO: 3246623 - RNA, 14 nt, Human
agauuuuccugaaa

SEQ ID NO: 3246624 - RNA, 18 nt, Human
ugagaugugaacacauca

SEQ ID NO: 3246625 - RNA, 19 nt, Human
ugagaugugaacacaucag

SEQ ID NO: 3246626 - RNA, 24 nt, Human
ugagaugugaacacaucagcuugc

SEQ ID NO: 3246627 - RNA, 20 nt, Human
ugagaugcuagaacucccuu

SEQ ID NO: 3246628 - RNA, 13 nt, Human
ugagaugugaaca

SEQ ID NO: 3246629 - RNA, 21 nt, Human
ugagagacacacugaagaagc

SEQ ID NO: 3246630 - RNA, 22 nt, Human
ugagagacacacugaagaagca

SEQ ID NO: 3246631 - RNA, 17 nt, Human
auguuuucaggcuagau

SEQ ID NO: 3246632 - RNA, 21 nt, Human
auguuuucaggcuagauguau

SEQ ID NO: 3246633 - RNA, 15 nt, Human
auguuuucaggcuag

SEQ ID NO: 3246634 - RNA, 15 nt, Human
uuuucugagaaagac

SEQ ID NO: 3246635 - RNA, 18 nt, Human
uuuucugagaaagacuau

SEQ ID NO: 3246636 - RNA, 14 nt, Human
uuuucucuaggaaa

SEQ ID NO: 3246637 - RNA, 18 nt, Human
auguucaucaaugaauga

SEQ ID NO: 3246638 - RNA, 13 nt, Human
auguuaagcagau

SEQ ID NO: 3246639 - RNA, 16 nt, Human
uuuuaauaauguuuca

SEQ ID NO: 3246640 - RNA, 19 nt, Human
augugcuaguaauuggaaa

SEQ ID NO: 3246641 - RNA, 12 nt, Human
uuuuaauaaugu

SEQ ID NO: 3246642 - RNA, 13 nt, Human
uuuuaauaauguu

SEQ ID NO: 3246643 - RNA, 14 nt, Human
uuuuaauaauguuu

SEQ ID NO: 3246644 - RNA, 12 nt, Human
auuaccagggac

SEQ ID NO: 3246645 - RNA, 16 nt, Human
auuacauuuguauaaa

SEQ ID NO: 3246646 - RNA, 17 nt, Human
auuacauuuguauaaaa

SEQ ID NO: 3246647 - RNA, 18 nt, Human
auuacauuuguauaaaau

SEQ ID NO: 3246648 - RNA, 19 nt, Human
uuuuugugaaaagcuccau

SEQ ID NO: 3246649 - RNA, 21 nt, Human
auuaaguaaugauaacuggaa

SEQ ID NO: 3246650 - RNA, 23 nt, Human
auuaaguaaugauaacuggaaac

SEQ ID NO: 3246651 - RNA, 20 nt, Human
auuauauaaguauucuaaau

SEQ ID NO: 3246652 - RNA, 17 nt, Human
auuauauaaguauucua

SEQ ID NO: 3246653 - RNA, 14 nt, Human
auuauauaaguauu

SEQ ID NO: 3246654 - RNA, 19 nt, Human
uuuuuauauuugaaauauu

SEQ ID NO: 3246655 - RNA, 17 nt, Human
uuuuuauauuugaaaua

SEQ ID NO: 3246656 - RNA, 17 nt, Human
uuuuguucauacauauu

SEQ ID NO: 3246657 - RNA, 14 nt, Human
uuuuguucauacau

SEQ ID NO: 3246658 - RNA, 14 nt, Human
uuuugaguucuaca

SEQ ID NO: 3246659 - RNA, 18 nt, Human
auuuuaaaagaaugauua

SEQ ID NO: 3246660 - RNA, 22 nt, Human
auuuuaaaagaaugauuaugaa

SEQ ID NO: 3246661 - RNA, 17 nt, Human
auuuuaaaagaaugauu

SEQ ID NO: 3246662 - RNA, 19 nt, Human
auuuguauaaaauaauuuu

SEQ ID NO: 3246663 - RNA, 15 nt, Human
auuuguauaaaauaa

SEQ ID NO: 3246664 - RNA, 18 nt, Human
auuuguauaaaauaauuu

SEQ ID NO: 3246665 - RNA, 22 nt, Human
auuuucaguuauuauauuuaca

SEQ ID NO: 3246666 - RNA, 14 nt, Human
auuuucagaaaaua

SEQ ID NO: 3246667 - RNA, 17 nt, Human
auuuucagaaaauauua

SEQ ID NO: 3246668 - RNA, 18 nt, Human
auugacccacaagaaaug

SEQ ID NO: 3246669 - RNA, 15 nt, Human
auuguauuacaaauc

SEQ ID NO: 3246670 - RNA, 13 nt, Human
auuuagauguaua

SEQ ID NO: 3246671 - RNA, 17 nt, Human
auuuauuuuaauaaugu

SEQ ID NO: 3246672 - RNA, 12 nt, Human
auuucauuucuu

SEQ ID NO: 3246673 - RNA, 19 nt, Human
auuuauuuuaauaauguuu

SEQ ID NO: 3246674 - RNA, 20 nt, Human
auuuauuuuaauaauguuuc

SEQ ID NO: 3246675 - RNA, 14 nt, Human
auuugaaauauuga

SEQ ID NO: 3246676 - RNA, 14 nt, Human
aucaauuuuucuua

SEQ ID NO: 3246677 - RNA, 13 nt, Human
aucaauuuaaaaa

SEQ ID NO: 3246678 - RNA, 21 nt, Human
aucaaggguacacugccuucu

SEQ ID NO: 3246679 - RNA, 16 nt, Human
aucaaggguacacugc

SEQ ID NO: 3246680 - RNA, 16 nt, Human
aucaaauaugcaaagc

SEQ ID NO: 3246681 - RNA, 17 nt, Human
aucaaauaugcaaagca

SEQ ID NO: 3246682 - RNA, 18 nt, Human
aucaaauaugcaaagcac

SEQ ID NO: 3246683 - RNA, 15 nt, Human
aucaaauaugcaaag

SEQ ID NO: 3246684 - RNA, 15 nt, Human
auauuuuuguagcac

SEQ ID NO: 3246685 - RNA, 23 nt, Human
auauuuuuguagcacugacagau

SEQ ID NO: 3246686 - RNA, 16 nt, Human
auauuuuuguagcacu

SEQ ID NO: 3246687 - RNA, 18 nt, Human
auauuuuucacauaucua

SEQ ID NO: 3246688 - RNA, 17 nt, Human
auauuuuucacauaucu

SEQ ID NO: 3246689 - RNA, 14 nt, Human
auauuguuugcuaa

SEQ ID NO: 3246690 - RNA, 13 nt, Human
auauuuacaaaug

SEQ ID NO: 3246691 - RNA, 12 nt, Human
auauuuaaugau

SEQ ID NO: 3246692 - RNA, 13 nt, Human
auauuuaaugaua

SEQ ID NO: 3246693 - RNA, 23 nt, Human
auauuuaaugauaaguaaaugcu

SEQ ID NO: 3246694 - RNA, 16 nt, Human
auauguuucaaacuuu

SEQ ID NO: 3246695 - RNA, 14 nt, Human
auauguuucaaacu

SEQ ID NO: 3246696 - RNA, 13 nt, Human
auauguuucaaac

SEQ ID NO: 3246697 - RNA, 17 nt, Human
uucccagugaauucuug

SEQ ID NO: 3246698 - RNA, 14 nt, Human
uucauuaucucaaa

SEQ ID NO: 3246699 - RNA, 23 nt, Human
auauguaccuaacgaaguauccu

SEQ ID NO: 3246700 - RNA, 13 nt, Human
auaugcaaagcac

SEQ ID NO: 3246701 - RNA, 14 nt, Human
auaugcaaagcacu

SEQ ID NO: 3246702 - RNA, 21 nt, Human
auaugagcuuccuucugugaa

SEQ ID NO: 3246703 - RNA, 22 nt, Human
auaugagcuuccuucugugaaa

SEQ ID NO: 3246704 - RNA, 15 nt, Human
uucaucaaugaauga

SEQ ID NO: 3246705 - RNA, 13 nt, Human
auauaugcuaagu

SEQ ID NO: 3246706 - RNA, 16 nt, Human
auauauuuaaugauaa

SEQ ID NO: 3246707 - RNA, 15 nt, Human
auauauuuaaugaua

SEQ ID NO: 3246708 - RNA, 17 nt, Human
uucagcgguuuauauaa

SEQ ID NO: 3246709 - RNA, 16 nt, Human
uucuguuuuauaauuu

SEQ ID NO: 3246710 - RNA, 17 nt, Human
uucuguuuuauaauuuu

SEQ ID NO: 3246711 - RNA, 14 nt, Human
uucugaagaagaug

SEQ ID NO: 3246712 - RNA, 23 nt, Human
aucacuugaacccgggaggcaga

SEQ ID NO: 3246713 - RNA, 23 nt, Human
aucagugugucuaaauuugaaug

SEQ ID NO: 3246714 - RNA, 20 nt, Human
aucagugugucuaaauuuga

SEQ ID NO: 3246715 - RNA, 17 nt, Human
uugacacuuaaaaaugg

SEQ ID NO: 3246716 - RNA, 17 nt, Human
uugaagggaaauuucag

SEQ ID NO: 3246717 - RNA, 17 nt, Human
uugaaggaaaaugauac

SEQ ID NO: 3246718 - RNA, 19 nt, Human
uugacacuuaaaaaugguu

SEQ ID NO: 3246719 - RNA, 14 nt, Human
uugagaguucuaaa

SEQ ID NO: 3246720 - RNA, 17 nt, Human
uugauaaguucauacau

SEQ ID NO: 3246721 - RNA, 16 nt, Human
uugauaaguucauaca

SEQ ID NO: 3246722 - RNA, 18 nt, Human
auccugaggcuccacuug

SEQ ID NO: 3246723 - RNA, 16 nt, Human
auccugaggcuccacu

SEQ ID NO: 3246724 - RNA, 13 nt, Human
auccugaggcucc

SEQ ID NO: 3246725 - RNA, 11 nt, Human
auccugaggcu

SEQ ID NO: 3246726 - RNA, 16 nt, Human
auccugcaauuccacu

SEQ ID NO: 3246727 - RNA, 22 nt, Human
auccugaggcuccacuuggucu

SEQ ID NO: 3246728 - RNA, 13 nt, Human
auccugccccuga

SEQ ID NO: 3246729 - RNA, 23 nt, Human
auggaauuggagcucgugggaca

SEQ ID NO: 3246730 - RNA, 22 nt, Human
uuucagaaaauauuauguguuu

SEQ ID NO: 3246731 - RNA, 16 nt, Human
uuuauuuuaauaaugu

SEQ ID NO: 3246732 - RNA, 16 nt, Human
auggaacauaaaauac

SEQ ID NO: 3246733 - RNA, 14 nt, Human
augcuguauuuuaa

SEQ ID NO: 3246734 - RNA, 23 nt, Human
augcugucuacacuaagagagaa

SEQ ID NO: 3246735 - RNA, 19 nt, Human
uuuauuacuguaagaaaau

SEQ ID NO: 3246736 - RNA, 19 nt, Human
augcuguauauccuuucua

SEQ ID NO: 3246737 - RNA, 17 nt, Human
uuuauaugcuucuguuu

SEQ ID NO: 3246738 - RNA, 16 nt, Human
uuuauuacuguaagaa

SEQ ID NO: 3246739 - RNA, 13 nt, Human
augcuaagugaaa

SEQ ID NO: 3246740 - RNA, 24 nt, Human
uuuaaagcuuauuaaaacucauuu

SEQ ID NO: 3246741 - RNA, 16 nt, Human
auggcuauaggugcua

SEQ ID NO: 3246742 - RNA, 19 nt, Human
auggcuauaggugcuacaa

SEQ ID NO: 3246743 - RNA, 21 nt, Human
auggcuauaggugcuacaaaa

SEQ ID NO: 3246744 - RNA, 22 nt, Human
augggacauuugcucauggaau

SEQ ID NO: 3246745 - RNA, 21 nt, Human
augggacauuugcucauggaa

SEQ ID NO: 3246746 - RNA, 17 nt, Human
auggaauuucucccagu

SEQ ID NO: 3246747 - RNA, 15 nt, Human
auggcuauaggugcu

SEQ ID NO: 3246748 - RNA, 13 nt, Human
uuucuaugaaaua

SEQ ID NO: 3246749 - RNA, 14 nt, Human
uuucuaugaaauau

SEQ ID NO: 3246750 - RNA, 20 nt, Human
uuucuaugaaauauuauguu

SEQ ID NO: 3246751 - RNA, 14 nt, Human
uuucugcaucagcu

SEQ ID NO: 3246752 - RNA, 14 nt, Human
uuugaaauauugac

SEQ ID NO: 3246753 - RNA, 17 nt, Human
augaauuacauuuguau

SEQ ID NO: 3246754 - RNA, 18 nt, Human
augaauuacauuuguaua

SEQ ID NO: 3246755 - RNA, 19 nt, Human
augaauuacauuuguauaa

SEQ ID NO: 3246756 - RNA, 23 nt, Human
augaauuaguuuuauaugcuucu

SEQ ID NO: 3246757 - RNA, 22 nt, Human
augaauuacauuuguauaaaau

SEQ ID NO: 3246758 - RNA, 21 nt, Human
augaauuaguuuuauaugcuu

SEQ ID NO: 3246759 - RNA, 19 nt, Human
uuguauaaaauaauuuuua

SEQ ID NO: 3246760 - RNA, 13 nt, Human
uuguauaaaauaa

SEQ ID NO: 3246761 - RNA, 23 nt, Human
uuguaguguuggagaagaacuga

SEQ ID NO: 3246762 - RNA, 21 nt, Human
augaaauauuauguuaaaacu

SEQ ID NO: 3246763 - RNA, 20 nt, Human
augaaauauuauguuaaaac

SEQ ID NO: 3246764 - RNA, 11 nt, Human
uugcucaugga

SEQ ID NO: 3246765 - RNA, 12 nt, Human
uugcucauggaa

SEQ ID NO: 3246766 - RNA, 20 nt, Human
uuuaaaaaagaaacauuugg

SEQ ID NO: 3246767 - RNA, 18 nt, Human
uugugaagcaaaauuuuu

SEQ ID NO: 3246768 - RNA, 23 nt, Human
augagagacacacugaagaagca

SEQ ID NO: 3246769 - RNA, 19 nt, Human
augacauaaaaacaacuuu

SEQ ID NO: 3246770 - RNA, 14 nt, Human
augauaacuggaaa

SEQ ID NO: 3246771 - RNA, 21 nt, Human
ugggaaagcauuguaaaugug

SEQ ID NO: 3246772 - RNA, 22 nt, Human
uggcacaguuuucugagaaaga

SEQ ID NO: 3246773 - RNA, 20 nt, Human
uggcacaguuuucugagaaa

SEQ ID NO: 3246774 - RNA, 18 nt, Human
uggacgagaaaacaauaa

SEQ ID NO: 3246775 - RNA, 23 nt, Human
ugcuguauuuuaaaagaaugauu

SEQ ID NO: 3246776 - RNA, 14 nt, Human
ugcuggagcucugc

SEQ ID NO: 3246777 - RNA, 13 nt, Human
ugcuggagcucug

SEQ ID NO: 3246778 - RNA, 23 nt, Human
aggacagcccuucuuuccacaga

SEQ ID NO: 3246779 - RNA, 14 nt, Human
aggacacugauaug

SEQ ID NO: 3246780 - RNA, 23 nt, Human
aggaauugacccacaagaaauga

SEQ ID NO: 3246781 - RNA, 11 nt, Human
aggaauuuaaa

SEQ ID NO: 3246782 - RNA, 17 nt, Human
ugcuuuuaaaaaaaaau

SEQ ID NO: 3246783 - RNA, 11 nt, Human
aggagaaacug

SEQ ID NO: 3246784 - RNA, 18 nt, Human
uggaauuggagcucgugg

SEQ ID NO: 3246785 - RNA, 18 nt, Human
agcccauggcacucuaug

SEQ ID NO: 3246786 - RNA, 20 nt, Human
agccucauguccacugguuc

SEQ ID NO: 3246787 - RNA, 15 nt, Human
ugcagaagacaguau

SEQ ID NO: 3246788 - RNA, 14 nt, Human
ugcagaagacagua

SEQ ID NO: 3246789 - RNA, 19 nt, Human
agccagacuggcacaguuu

SEQ ID NO: 3246790 - RNA, 18 nt, Human
ugauuaaguaaugauaac

SEQ ID NO: 3246791 - RNA, 23 nt, Human
ugauuaaguaaugauaacuggaa

SEQ ID NO: 3246792 - RNA, 16 nt, Human
ugauuaaguaaugaua

SEQ ID NO: 3246793 - RNA, 11 nt, Human
ugaugaagaag

SEQ ID NO: 3246794 - RNA, 14 nt, Human
ugaugggaaagcau

SEQ ID NO: 3246795 - RNA, 19 nt, Human
ugaugggaaagcauuguaa

SEQ ID NO: 3246796 - RNA, 16 nt, Human
ugccccauucaacauc

SEQ ID NO: 3246797 - RNA, 22 nt, Human
ugccauuuaaagcuuauuaaaa

SEQ ID NO: 3246798 - RNA, 19 nt, Human
agcuauggugucauaggcu

SEQ ID NO: 3246799 - RNA, 23 nt, Human
agcucugcccauccugccccuga

SEQ ID NO: 3246800 - RNA, 15 nt, Human
ugccucaccccuugc

SEQ ID NO: 3246801 - RNA, 18 nt, Human
ugccucagaaaacaagga

SEQ ID NO: 3246802 - RNA, 15 nt, Human
aguucugaagaagau

SEQ ID NO: 3246803 - RNA, 13 nt, Human
aguucugaagaag

SEQ ID NO: 3246804 - RNA, 14 nt, Human
aguucugaagaaga

SEQ ID NO: 3246805 - RNA, 21 nt, Human
aguugauaugccuuuucccaa

SEQ ID NO: 3246806 - RNA, 19 nt, Human
uguuugcuaagcauuccaa

SEQ ID NO: 3246807 - RNA, 15 nt, Human
uguuugcuaagcauu

SEQ ID NO: 3246808 - RNA, 13 nt, Human
uguuuuauaauuu

SEQ ID NO: 3246809 - RNA, 20 nt, Human
uguuuuauaauuuugugaag

SEQ ID NO: 3246810 - RNA, 20 nt, Human
uuaaaaaugguuuaaauggu

SEQ ID NO: 3246811 - RNA, 22 nt, Human
aguugcauagguuuaauaauuu

SEQ ID NO: 3246812 - RNA, 15 nt, Human
uuaaaaaagaaacau

SEQ ID NO: 3246813 - RNA, 18 nt, Human
uuaaaaaagaaacauuug

SEQ ID NO: 3246814 - RNA, 19 nt, Human
aguuauggcuauaggugcu

SEQ ID NO: 3246815 - RNA, 20 nt, Human
aguuauuauauuuacaaaug

SEQ ID NO: 3246816 - RNA, 23 nt, Human
aguuauugauaaguucauacauu

SEQ ID NO: 3246817 - RNA, 22 nt, Human
aguuauugauaaguucauacau

SEQ ID NO: 3246818 - RNA, 21 nt, Human
aguuauugauaaguucauaca

SEQ ID NO: 3246819 - RNA, 19 nt, Human
aguuauugauaaguucaua

SEQ ID NO: 3246820 - RNA, 17 nt, Human
aguuauugauaaguuca

SEQ ID NO: 3246821 - RNA, 20 nt, Human
aguucggugagcuacaaaug

SEQ ID NO: 3246822 - RNA, 15 nt, Human
aguucuaaauuuugu

SEQ ID NO: 3246823 - RNA, 14 nt, Human
auaaauaaaaauaa

SEQ ID NO: 3246824 - RNA, 12 nt, Human
aguuuucugaga

SEQ ID NO: 3246825 - RNA, 13 nt, Human
aguuuucugagaa

SEQ ID NO: 3246826 - RNA, 14 nt, Human
aguuuucugagaaa

SEQ ID NO: 3246827 - RNA, 17 nt, Human
aguuuucugagaaagac

SEQ ID NO: 3246828 - RNA, 16 nt, Human
auaaaccucaaaaugu

SEQ ID NO: 3246829 - RNA, 12 nt, Human
auaacuggaaac

SEQ ID NO: 3246830 - RNA, 19 nt, Human
auaaaugugccuucauuuu

SEQ ID NO: 3246831 - RNA, 12 nt, Human
auaacugugaag

SEQ ID NO: 3246832 - RNA, 21 nt, Human
auaaguucauacauuguacga

SEQ ID NO: 3246833 - RNA, 15 nt, Human
auaaguucauacauu

SEQ ID NO: 3246834 - RNA, 14 nt, Human
auaaguucauacau

SEQ ID NO: 3246835 - RNA, 13 nt, Human
auaaguucauaca

SEQ ID NO: 3246836 - RNA, 11 nt, Human
auaaguucaua

SEQ ID NO: 3246837 - RNA, 23 nt, Human
uuagaugcaguucugaagaagau

SEQ ID NO: 3246838 - RNA, 22 nt, Human
uuagaugcaguucugaagaaga

SEQ ID NO: 3246839 - RNA, 21 nt, Human
auaaucuuucacaggggacag

SEQ ID NO: 3246840 - RNA, 20 nt, Human
auaaucagugugucuaaauu

SEQ ID NO: 3246841 - RNA, 14 nt, Human
auaaugaauacuuu

SEQ ID NO: 3246842 - RNA, 22 nt, Human
auacaaaaaaaaaaaaaaauua

SEQ ID NO: 3246843 - RNA, 21 nt, Human
auaauuuuuauauuugaaaua

SEQ ID NO: 3246844 - RNA, 22 nt, Human
auaauuuuuauauuugaaauau

SEQ ID NO: 3246845 - RNA, 14 nt, Human
auaauuuuuauauu

SEQ ID NO: 3246846 - RNA, 16 nt, Human
auaauuuuuauauuug

SEQ ID NO: 3246847 - RNA, 19 nt, Human
auaauuuuuauauuugaaa

SEQ ID NO: 3246848 - RNA, 13 nt, Human
auaauuuugugaa

SEQ ID NO: 3246849 - RNA, 14 nt, Human
auaauuuugugaag

SEQ ID NO: 3246850 - RNA, 15 nt, Human
auaauuuugugaagc

SEQ ID NO: 3246851 - RNA, 20 nt, Human
auaauuuugugaagcaaaau

SEQ ID NO: 3246852 - RNA, 18 nt, Human
uuauauaagcuuguauuc

SEQ ID NO: 3246853 - RNA, 13 nt, Human
uuauauaaguauu

SEQ ID NO: 3246854 - RNA, 16 nt, Human
uuauauaaguauucua

SEQ ID NO: 3246855 - RNA, 14 nt, Human
uuauauaaguauuc

SEQ ID NO: 3246856 - RNA, 14 nt, Human
auaauuuuaagaaa

SEQ ID NO: 3246857 - RNA, 15 nt, Human
auaauuuuaagaaau

SEQ ID NO: 3246858 - RNA, 21 nt, Human
auaauuuuaagaaaucaaaga

SEQ ID NO: 3246859 - RNA, 23 nt, Human
uuauacccagaaaguuauugaua

SEQ ID NO: 3246860 - RNA, 19 nt, Human
uuauacccagaaaguuauu

SEQ ID NO: 3246861 - RNA, 18 nt, Human
uuauacccagaaaguuau

SEQ ID NO: 3246862 - RNA, 23 nt, Human
uuauagaguguacuuaacuauuc

SEQ ID NO: 3246863 - RNA, 21 nt, Human
auacaggucauauuaauauau

SEQ ID NO: 3246864 - RNA, 15 nt, Human
auacaggucauauua

SEQ ID NO: 3246865 - RNA, 21 nt, Human
auacaguucggugagcuacaa

SEQ ID NO: 3246866 - RNA, 19 nt, Human
auacauauuuuuguagcac

SEQ ID NO: 3246867 - RNA, 20 nt, Human
auacaucccuuaccugggaa

SEQ ID NO: 3246868 - RNA, 14 nt, Human
auacauuguacgaa

SEQ ID NO: 3246869 - RNA, 22 nt, Human
auacauuguacgaagaguauuu

SEQ ID NO: 3246870 - RNA, 21 nt, Human
auacauuguacgaagaguauu

SEQ ID NO: 3246871 - RNA, 22 nt, Human
uuaucaaagggugaaaauuauu

SEQ ID NO: 3246872 - RNA, 17 nt, Human
uguaagaaaauaucacu

SEQ ID NO: 3246873 - RNA, 18 nt, Human
uguaagaaaauaucacuu

SEQ ID NO: 3246874 - RNA, 15 nt, Human
uguacuuaacuauuc

SEQ ID NO: 3246875 - RNA, 23 nt, Human
uggugugaccacugcagaagaca

SEQ ID NO: 3246876 - RNA, 15 nt, Human
aggucagugcaaaua

SEQ ID NO: 3246877 - RNA, 20 nt, Human
aggguuuauguuuaggaugu

SEQ ID NO: 3246878 - RNA, 17 nt, Human
aggguuaugauuaagua

SEQ ID NO: 3246879 - RNA, 22 nt, Human
uggucugugagaugcuagaacu

SEQ ID NO: 3246880 - RNA, 22 nt, Human
ugguccaugggccauaugaaaa

SEQ ID NO: 3246881 - RNA, 21 nt, Human
agggugaugggaaagcauugu

SEQ ID NO: 3246882 - RNA, 22 nt, Human
agggugaugggaaagcauugua

SEQ ID NO: 3246883 - RNA, 15 nt, Human
agggugaaaauuauu

SEQ ID NO: 3246884 - RNA, 16 nt, Human
aggggaauugaggaca

SEQ ID NO: 3246885 - RNA, 20 nt, Human
agucacauuccaagccucau

SEQ ID NO: 3246886 - RNA, 15 nt, Human
aguauuguccagguc

SEQ ID NO: 3246887 - RNA, 16 nt, Human
aguauuguccaggucu

SEQ ID NO: 3246888 - RNA, 14 nt, Human
aguauguguaaaau

SEQ ID NO: 3246889 - RNA, 21 nt, Human
aguauuagaauaccacaggaa

SEQ ID NO: 3246890 - RNA, 18 nt, Human
aguauguuagugcaaauu

SEQ ID NO: 3246891 - RNA, 21 nt, Human
aguauguuagugcaaauuguc

SEQ ID NO: 3246892 - RNA, 22 nt, Human
uguauuacaaauccaaugaaau

SEQ ID NO: 3246893 - RNA, 20 nt, Human
ugucagcuccccucggagaa

SEQ ID NO: 3246894 - RNA, 21 nt, Human
ugucagcuccccucggagaag

SEQ ID NO: 3246895 - RNA, 23 nt, Human
ugucagcuccccucggagaagag

SEQ ID NO: 3246896 - RNA, 15 nt, Human
ugucuaagauaguaa

SEQ ID NO: 3246897 - RNA, 14 nt, Human
ugucuaagauagua

SEQ ID NO: 3246898 - RNA, 18 nt, Human
ugucuaaauuugaauguu

SEQ ID NO: 3246899 - RNA, 14 nt, Human
ugucuucacaacag

SEQ ID NO: 3246900 - RNA, 14 nt, Human
ugucuuaauuaaaa

SEQ ID NO: 3246901 - RNA, 12 nt, Human
ugucuuaauuaa

SEQ ID NO: 3246902 - RNA, 17 nt, Human
ugucucuacuaaaaaua

SEQ ID NO: 3246903 - RNA, 14 nt, Human
ugugaagcaaaauu

SEQ ID NO: 3246904 - RNA, 22 nt, Human
ugugagaugcuagaacucccuu

SEQ ID NO: 3246905 - RNA, 22 nt, Human
agugaaagaggcagcuugaaac

SEQ ID NO: 3246906 - RNA, 14 nt, Human
agugagacagcucu

SEQ ID NO: 3246907 - RNA, 16 nt, Human
agugaaagaggcagcu

SEQ ID NO: 3246908 - RNA, 17 nt, Human
agugaaagaaaauaaca

SEQ ID NO: 3246909 - RNA, 21 nt, Human
agugagcagucaggaaagaga

SEQ ID NO: 3246910 - RNA, 16 nt, Human
agugagccgagauugu

SEQ ID NO: 3246911 - RNA, 16 nt, Human
ugugauguauucuagc

SEQ ID NO: 3246912 - RNA, 12 nt, Human
aaaaacaacuuu

SEQ ID NO: 3246913 - RNA, 18 nt, Human
aaaacacagcaaggguga

SEQ ID NO: 3246914 - RNA, 12 nt, Human
aaaacacagcaa

SEQ ID NO: 3246915 - RNA, 13 nt, Human
aaaacacagcaag

SEQ ID NO: 3246916 - RNA, 17 nt, Human
aaaacaaggaugaauua

SEQ ID NO: 3246917 - RNA, 12 nt, Human
aaaacaacuuua

SEQ ID NO: 3246918 - RNA, 14 nt, Human
aaaacaaggaugaa

SEQ ID NO: 3246919 - RNA, 21 nt, Human
aaaauuauuuuguucauacau

SEQ ID NO: 3246920 - RNA, 13 nt, Human
aaagaugaaaaua

SEQ ID NO: 3246921 - RNA, 16 nt, Human
aaagaugaaaauauuu

SEQ ID NO: 3246922 - RNA, 17 nt, Human
aaagaugaaaauauuug

SEQ ID NO: 3246923 - RNA, 15 nt, Human
aaagaaauguaaggg

SEQ ID NO: 3246924 - RNA, 14 nt, Human
aaacugccagcaac

SEQ ID NO: 3246925 - RNA, 15 nt, Human
aaacugccagcaacg

SEQ ID NO: 3246926 - RNA, 17 nt, Human
aaacugacucuuaagaa

SEQ ID NO: 3246927 - RNA, 16 nt, Human
aaacugacucuuaaga

SEQ ID NO: 3246928 - RNA, 19 nt, Human
aaacugccagcaacgcagg

SEQ ID NO: 3246929 - RNA, 12 nt, Human
aaauaacaauga

SEQ ID NO: 3246930 - RNA, 18 nt, Human
aaaucaaauaugcaaagc

SEQ ID NO: 3246931 - RNA, 19 nt, Human
aaaucaaauaugcaaagca

SEQ ID NO: 3246932 - RNA, 16 nt, Human
aaaucaaauaugcaaa

SEQ ID NO: 3246933 - RNA, 14 nt, Human
aaauaguauuugag

SEQ ID NO: 3246934 - RNA, 13 nt, Human
aagaaauguaagg

SEQ ID NO: 3246935 - RNA, 14 nt, Human
aagaaauguaaggg

SEQ ID NO: 3246936 - RNA, 16 nt, Human
aacuuuggaacaagau

SEQ ID NO: 3246937 - RNA, 15 nt, Human
aacacgagcaggcua

SEQ ID NO: 3246938 - RNA, 21 nt, Human
aaauugauguguuuauuuaua

SEQ ID NO: 3246939 - RNA, 13 nt, Human
aagccagauuuuc

SEQ ID NO: 3246940 - RNA, 16 nt, Human
aagauuuaccacuugu

SEQ ID NO: 3246941 - RNA, 21 nt, Human
aauaauccuaaacauaugaau

SEQ ID NO: 3246942 - RNA, 13 nt, Human
aaucacaauacau

SEQ ID NO: 3246943 - RNA, 14 nt, Human
aauauuauguguuu

SEQ ID NO: 3246944 - RNA, 16 nt, Human
aauauuauguuaaaac

SEQ ID NO: 3246945 - RNA, 16 nt, Human
aaucucauaauuuaua

SEQ ID NO: 3246946 - RNA, 17 nt, Human
aaugauaacuggaaacu

SEQ ID NO: 3246947 - RNA, 21 nt, Human
aaugauaaguaaaugcuaggu

SEQ ID NO: 3246948 - RNA, 18 nt, Human
aaugauaaguaaaugcua

SEQ ID NO: 3246949 - RNA, 20 nt, Human
aaugauaacuggaaacuuca

SEQ ID NO: 3246950 - RNA, 13 nt, Human
aauccauacauuu

SEQ ID NO: 3246951 - RNA, 18 nt, Human
aaucucauaauuuauaca

SEQ ID NO: 3246952 - RNA, 14 nt, Human
aauuaaauuuugag

SEQ ID NO: 3246953 - RNA, 14 nt, Human
aauuaguuuuauau

SEQ ID NO: 3246954 - RNA, 17 nt, Human
aauuaguuuuauaugcu

SEQ ID NO: 3246955 - RNA, 20 nt, Human
aauuaguuuuauaugcuucu

SEQ ID NO: 3246956 - RNA, 19 nt, Human
acuuuauacccagaaaguu

SEQ ID NO: 3246957 - RNA, 23 nt, Human
agaaaauauuauguguuuccaua

SEQ ID NO: 3246958 - RNA, 12 nt, Human
acuggaacucuc

SEQ ID NO: 3246959 - RNA, 12 nt, Human
acuguuuugaau

SEQ ID NO: 3246960 - RNA, 13 nt, Human
acuuggucuguga

SEQ ID NO: 3246961 - RNA, 14 nt, Human
acuuggucugugag

SEQ ID NO: 3246962 - RNA, 15 nt, Human
acuuggucugugaga

SEQ ID NO: 3246963 - RNA, 18 nt, Human
acuuguaaaggaauuuaa

SEQ ID NO: 3246964 - RNA, 20 nt, Human
acuuguaaaggaauuuaaaa

SEQ ID NO: 3246965 - RNA, 19 nt, Human
acuuguaaaggaauuuaaa

SEQ ID NO: 3246966 - RNA, 13 nt, Human
acucccuuucaac

SEQ ID NO: 3246967 - RNA, 12 nt, Human
acucccuuucaa

SEQ ID NO: 3246968 - RNA, 14 nt, Human
acuagcuauggugu

SEQ ID NO: 3246969 - RNA, 15 nt, Human
acuaagagagaauga

SEQ ID NO: 3246970 - RNA, 16 nt, Human
acuaagagagaaugag

SEQ ID NO: 3246971 - RNA, 13 nt, Human
acagccagacugg

SEQ ID NO: 3246972 - RNA, 15 nt, Human
acagccagacuggca

SEQ ID NO: 3246973 - RNA, 16 nt, Human
acagccagacuggcac

SEQ ID NO: 3246974 - RNA, 15 nt, Human
acagcaguugaaaag

SEQ ID NO: 3246975 - RNA, 17 nt, Human
acagaauauguuucaaa

SEQ ID NO: 3246976 - RNA, 16 nt, Human
acagaauauguuucaa

SEQ ID NO: 3246977 - RNA, 21 nt, Human
acagaauauguuucaaacuuu

SEQ ID NO: 3246978 - RNA, 19 nt, Human
acagaauauguuucaaacu

SEQ ID NO: 3246979 - RNA, 20 nt, Human
acagcucugcauacucauua

SEQ ID NO: 3246980 - RNA, 19 nt, Human
acaggucauauuaauauau

SEQ ID NO: 3246981 - RNA, 13 nt, Human
acaacuauauugu

SEQ ID NO: 3246982 - RNA, 20 nt, Human
aauuuugaguucuacauaag

SEQ ID NO: 3246983 - RNA, 15 nt, Human
aauuuuauaucuugu

SEQ ID NO: 3246984 - RNA, 14 nt, Human
acaacuuuauaccc

SEQ ID NO: 3246985 - RNA, 13 nt, Human
acaacuuuauacc

SEQ ID NO: 3246986 - RNA, 18 nt, Human
acaacuucccagugaauu

SEQ ID NO: 3246987 - RNA, 17 nt, Human
acaacuucaauauccaa

SEQ ID NO: 3246988 - RNA, 16 nt, Human
acaacuauuuuuccaa

SEQ ID NO: 3246989 - RNA, 18 nt, Human
acauuugcucauggaauu

SEQ ID NO: 3246990 - RNA, 16 nt, Human
acauuugcucauggaa

SEQ ID NO: 3246991 - RNA, 13 nt, Human
acauguuacaaca

SEQ ID NO: 3246992 - RNA, 16 nt, Human
acccaaguccaagcau

SEQ ID NO: 3246993 - RNA, 21 nt, Human
agccgggcgugguggugagug

SEQ ID NO: 3246994 - RNA, 23 nt, Human
agcaguugaaaagacuccaaaga

SEQ ID NO: 3246995 - RNA, 21 nt, Human
agcaguugaaaagacuccaaa

SEQ ID NO: 3246996 - RNA, 14 nt, Human
agauguagaggaga

SEQ ID NO: 3246997 - RNA, 21 nt, Human
agaugggagaaucacuugaac

SEQ ID NO: 3246998 - RNA, 15 nt, Human
agccagauuuuccug

SEQ ID NO: 3246999 - RNA, 19 nt, Human
agccagauuuuccugaaaa

SEQ ID NO: 3247000 - RNA, 21 nt, Human
agauaggucagugcaaauacu

SEQ ID NO: 3247001 - RNA, 17 nt, Human
agacugcauuauauuua

SEQ ID NO: 3247002 - RNA, 14 nt, Human
agacacaacuauuu

SEQ ID NO: 3247003 - RNA, 18 nt, Human
agcuucacuguaaaauaa

SEQ ID NO: 3247004 - RNA, 19 nt, Human
agcuuccuucugugaaagu

SEQ ID NO: 3247005 - RNA, 14 nt, Human
aggauguugaaaaa

SEQ ID NO: 3247006 - RNA, 15 nt, Human
agguuaauuccaauu

SEQ ID NO: 3247007 - RNA, 22 nt, Human
agguuaauuccaauuauaugag

SEQ ID NO: 3247008 - RNA, 18 nt, Human
auauuuauuuuaauaaug

SEQ ID NO: 3247009 - RNA, 14 nt, Human
auauuuauuacugu

SEQ ID NO: 3247010 - RNA, 19 nt, Human
auauuuauuacuguaagaa

SEQ ID NO: 3247011 - RNA, 15 nt, Human
auaucaauuuaaaaa

SEQ ID NO: 3247012 - RNA, 18 nt, Human
auaucacuugucaauaaa

SEQ ID NO: 3247013 - RNA, 23 nt, Human
auaugcuucuguuuuauaauuuu

SEQ ID NO: 3247014 - RNA, 15 nt, Human
auauccuuucuaaca

SEQ ID NO: 3247015 - RNA, 16 nt, Human
auauccuuucuaacaa

SEQ ID NO: 3247016 - RNA, 19 nt, Human
auauaaguauucuaaauuu

SEQ ID NO: 3247017 - RNA, 22 nt, Human
auauaaguauucuaaauuuuau

SEQ ID NO: 3247018 - RNA, 14 nt, Human
auaauuacuauguc

SEQ ID NO: 3247019 - RNA, 15 nt, Human
agucaaauuguguga

SEQ ID NO: 3247020 - RNA, 17 nt, Human
agucaaauugugugaaa

SEQ ID NO: 3247021 - RNA, 13 nt, Human
agucaaauugugu

SEQ ID NO: 3247022 - RNA, 21 nt, Human
aguccaagcauuuagauguau

SEQ ID NO: 3247023 - RNA, 11 nt, Human
aguccaagcau

SEQ ID NO: 3247024 - RNA, 16 nt, Human
aguccaagcauuuaga

SEQ ID NO: 3247025 - RNA, 15 nt, Human
agugauuaccaggga

SEQ ID NO: 3247026 - RNA, 18 nt, Human
agugauuaccagggacug

SEQ ID NO: 3247027 - RNA, 21 nt, Human
agugucuuaauuaaaagaaua

SEQ ID NO: 3247028 - RNA, 18 nt, Human
aguuguaccgcaauguga

SEQ ID NO: 3247029 - RNA, 19 nt, Human
aguuguaccgcaaugugac

SEQ ID NO: 3247030 - RNA, 22 nt, Human
aucuuauaauuuaaaauaugcu

SEQ ID NO: 3247031 - RNA, 16 nt, Human
aucuuauaauuuaaaa

SEQ ID NO: 3247032 - RNA, 20 nt, Human
augaaacacucaguuguuca

SEQ ID NO: 3247033 - RNA, 14 nt, Human
augacucagaauau

SEQ ID NO: 3247034 - RNA, 13 nt, Human
auccuuucuaaca

SEQ ID NO: 3247035 - RNA, 20 nt, Human
auguaagggaaacugccagc

SEQ ID NO: 3247036 - RNA, 21 nt, Human
auguaagggaaacugccagca

SEQ ID NO: 3247037 - RNA, 22 nt, Human
auguaagggaaacugccagcaa

SEQ ID NO: 3247038 - RNA, 17 nt, Human
auguaauaacugugaag

SEQ ID NO: 3247039 - RNA, 16 nt, Human
cacaguuuucugagaa

SEQ ID NO: 3247040 - RNA, 17 nt, Human
cacaguuuucugagaaa

SEQ ID NO: 3247041 - RNA, 19 nt, Human
cacaguuuucugagaaaga

SEQ ID NO: 3247042 - RNA, 15 nt, Human
cacaguuuucugaga

SEQ ID NO: 3247043 - RNA, 19 nt, Human
caaauaugcaaagcacuga

SEQ ID NO: 3247044 - RNA, 21 nt, Human
caaauaugcaaagcacugacu

SEQ ID NO: 3247045 - RNA, 16 nt, Human
caaaauuuuuucucua

SEQ ID NO: 3247046 - RNA, 21 nt, Human
caaaauuuuuucucuaggaaa

SEQ ID NO: 3247047 - RNA, 22 nt, Human
caaaauugauguguuuauuuau

SEQ ID NO: 3247048 - RNA, 15 nt, Human
caaaauugauguguu

SEQ ID NO: 3247049 - RNA, 16 nt, Human
caaaauugauguguuu

SEQ ID NO: 3247050 - RNA, 19 nt, Human
caaagcugaugacaacuuc

SEQ ID NO: 3247051 - RNA, 15 nt, Human
caaaaacacagcaag

SEQ ID NO: 3247052 - RNA, 17 nt, Human
caaaaacacagcaaggg

SEQ ID NO: 3247053 - RNA, 13 nt, Human
caaaaacacagca

SEQ ID NO: 3247054 - RNA, 14 nt, Human
caaaaacacagcaa

SEQ ID NO: 3247055 - RNA, 13 nt, Human
auuuuccugaaaa

SEQ ID NO: 3247056 - RNA, 23 nt, Human
caaaacuucagacauagaauuaa

SEQ ID NO: 3247057 - RNA, 19 nt, Human
caaaaaucucaauauuuca

SEQ ID NO: 3247058 - RNA, 23 nt, Human
caauacaucccuuaccugggaaa

SEQ ID NO: 3247059 - RNA, 22 nt, Human
caaugugacuuaaugccacuaa

SEQ ID NO: 3247060 - RNA, 17 nt, Human
caaggcugauuaaacca

SEQ ID NO: 3247061 - RNA, 21 nt, Human
caagccagauuuuccugaaaa

SEQ ID NO: 3247062 - RNA, 15 nt, Human
caagaaaacaacuuc

SEQ ID NO: 3247063 - RNA, 20 nt, Human
caggucauauuaauauauuu

SEQ ID NO: 3247064 - RNA, 21 nt, Human
caggucauauuaauauauuuc

SEQ ID NO: 3247065 - RNA, 12 nt, Human
caguauggcagc

SEQ ID NO: 3247066 - RNA, 12 nt, Human
caguagugauag

SEQ ID NO: 3247067 - RNA, 13 nt, Human
caguccaugaaga

SEQ ID NO: 3247068 - RNA, 22 nt, Human
cagucaggaaagagaacuucca

SEQ ID NO: 3247069 - RNA, 15 nt, Human
cagucaggaaagaga

SEQ ID NO: 3247070 - RNA, 18 nt, Human
cagucaggaaagagaacu

SEQ ID NO: 3247071 - RNA, 17 nt, Human
cagugauuaccagggac

SEQ ID NO: 3247072 - RNA, 18 nt, Human
cagugauuaccagggacu

SEQ ID NO: 3247073 - RNA, 15 nt, Human
cagugagacagcucu

SEQ ID NO: 3247074 - RNA, 12 nt, Human
cagugaauucuu

SEQ ID NO: 3247075 - RNA, 20 nt, Human
cagugaaagaaaauaacaau

SEQ ID NO: 3247076 - RNA, 16 nt, Human
cagugaaagaaaauaa

SEQ ID NO: 3247077 - RNA, 14 nt, Human
caggcuacugucag

SEQ ID NO: 3247078 - RNA, 13 nt, Human
caggcuagaugua

SEQ ID NO: 3247079 - RNA, 19 nt, Human
caggcuagauguauguacu

SEQ ID NO: 3247080 - RNA, 11 nt, Human
caggcuacugu

SEQ ID NO: 3247081 - RNA, 18 nt, Human
cagggacaggauaagagg

SEQ ID NO: 3247082 - RNA, 17 nt, Human
cagggcauggcugggaa

SEQ ID NO: 3247083 - RNA, 11 nt, Human
caggggacagg

SEQ ID NO: 3247084 - RNA, 16 nt, Human
caggggacaggauggu

SEQ ID NO: 3247085 - RNA, 12 nt, Human
caggagaguaga

SEQ ID NO: 3247086 - RNA, 20 nt, Human
caggcccccaggugccaguu

SEQ ID NO: 3247087 - RNA, 14 nt, Human
caggcccccaggug

SEQ ID NO: 3247088 - RNA, 19 nt, Human
caggcccccaggugccagu

SEQ ID NO: 3247089 - RNA, 21 nt, Human
caggaugguucccuugaugaa

SEQ ID NO: 3247090 - RNA, 23 nt, Human
caggaugguucccuugaugaaga

SEQ ID NO: 3247091 - RNA, 16 nt, Human
caggauuuuaaucuuu

SEQ ID NO: 3247092 - RNA, 16 nt, Human
cagccuaguugaucag

SEQ ID NO: 3247093 - RNA, 19 nt, Human
cagcuacuugggaggcuga

SEQ ID NO: 3247094 - RNA, 20 nt, Human
cagcucugcauacucauuag

SEQ ID NO: 3247095 - RNA, 20 nt, Human
cagcugcugaaacaacaaau

SEQ ID NO: 3247096 - RNA, 21 nt, Human
cagcugcugaaacaacaaaua

SEQ ID NO: 3247097 - RNA, 18 nt, Human
cagcuguaugauucccag

SEQ ID NO: 3247098 - RNA, 18 nt, Human
cagcuugaaacugagaug

SEQ ID NO: 3247099 - RNA, 23 nt, Human
cagcuuuccucaaaacuucagac

SEQ ID NO: 3247100 - RNA, 18 nt, Human
caggaaccacaagacugc

SEQ ID NO: 3247101 - RNA, 15 nt, Human
caggaaguagaggag

SEQ ID NO: 3247102 - RNA, 16 nt, Human
caggaaguagaggagg

SEQ ID NO: 3247103 - RNA, 22 nt, Human
cagcaagggugaugggaaagca

SEQ ID NO: 3247104 - RNA, 23 nt, Human
cagcaagggugaugggaaagcau

SEQ ID NO: 3247105 - RNA, 19 nt, Human
cagcaagggugaugggaaa

SEQ ID NO: 3247106 - RNA, 14 nt, Human
cagauuuuccugaa

SEQ ID NO: 3247107 - RNA, 15 nt, Human
cagauuuuccugaaa

SEQ ID NO: 3247108 - RNA, 23 nt, Human
cagcaacgcaggcccccaggugc

SEQ ID NO: 3247109 - RNA, 16 nt, Human
cagauggaaugcugug

SEQ ID NO: 3247110 - RNA, 17 nt, Human
cagauggaaugcugugu

SEQ ID NO: 3247111 - RNA, 19 nt, Human
cagauggaaugcuguguua

SEQ ID NO: 3247112 - RNA, 21 nt, Human
cagauggaaugcuguguuaaa

SEQ ID NO: 3247113 - RNA, 14 nt, Human
cagauccuggaaau

SEQ ID NO: 3247114 - RNA, 13 nt, Human
cagauccuggaaa

SEQ ID NO: 3247115 - RNA, 14 nt, Human
cagauaaacaguag

SEQ ID NO: 3247116 - RNA, 23 nt, Human
cagauaaauaguuuaugauucca

SEQ ID NO: 3247117 - RNA, 14 nt, Human
cagauaaucagugu

SEQ ID NO: 3247118 - RNA, 14 nt, Human
cagauaaucacaau

SEQ ID NO: 3247119 - RNA, 23 nt, Human
cagaacagugauuaccagggacu

SEQ ID NO: 3247120 - RNA, 18 nt, Human
cagaacagugauuaccag

SEQ ID NO: 3247121 - RNA, 19 nt, Human
cagaaagcagaacagugau

SEQ ID NO: 3247122 - RNA, 18 nt, Human
cagaaagcagaacaguga

SEQ ID NO: 3247123 - RNA, 19 nt, Human
cagaaaauauuauguguuu

SEQ ID NO: 3247124 - RNA, 20 nt, Human
cagaagcaacccaaauguuc

SEQ ID NO: 3247125 - RNA, 19 nt, Human
cagaagcaacccaaauguu

SEQ ID NO: 3247126 - RNA, 17 nt, Human
cagaaggaucuucaucu

SEQ ID NO: 3247127 - RNA, 19 nt, Human
cagacauagaauuaacaca

SEQ ID NO: 3247128 - RNA, 17 nt, Human
cagacauagaauuaaca

SEQ ID NO: 3247129 - RNA, 11 nt, Human
caccucaugga

SEQ ID NO: 3247130 - RNA, 12 nt, Human
caccucauggaa

SEQ ID NO: 3247131 - RNA, 14 nt, Human
caccucauggaauu

SEQ ID NO: 3247132 - RNA, 21 nt, Human
cacugacuucuaaguaaaacc

SEQ ID NO: 3247133 - RNA, 14 nt, Human
cacugacuucuaag

SEQ ID NO: 3247134 - RNA, 15 nt, Human
cacugacuucuaagu

SEQ ID NO: 3247135 - RNA, 16 nt, Human
cacugacuucuaagua

SEQ ID NO: 3247136 - RNA, 20 nt, Human
cacugacuucuaaguaaaac

SEQ ID NO: 3247137 - RNA, 22 nt, Human
cacugacagauuuccauccuag

SEQ ID NO: 3247138 - RNA, 17 nt, Human
cacugacagauuuccau

SEQ ID NO: 3247139 - RNA, 11 nt, Human
cacugacagau

SEQ ID NO: 3247140 - RNA, 13 nt, Human
cacugacagauuu

SEQ ID NO: 3247141 - RNA, 20 nt, Human
cacugccuucucaacuccaa

SEQ ID NO: 3247142 - RNA, 19 nt, Human
cacuguggguagacacaca

SEQ ID NO: 3247143 - RNA, 22 nt, Human
cacuguggguagacacacauga

SEQ ID NO: 3247144 - RNA, 24 nt, Human
cacuguggguagacacacaugaag

SEQ ID NO: 3247145 - RNA, 14 nt, Human
cacugucaagauga

SEQ ID NO: 3247146 - RNA, 15 nt, Human
cacuuggucugugag

SEQ ID NO: 3247147 - RNA, 23 nt, Human
cacuugaacccgggaggcagagg

SEQ ID NO: 3247148 - RNA, 21 nt, Human
cacuugaacccgggaggcaga

SEQ ID NO: 3247149 - RNA, 20 nt, Human
cacuugaacccgggaggcag

SEQ ID NO: 3247150 - RNA, 16 nt, Human
cacucaaaucaagaaa

SEQ ID NO: 3247151 - RNA, 14 nt, Human
cacuaguauuucua

SEQ ID NO: 3247152 - RNA, 19 nt, Human
cacuaguauuucuaugaaa

SEQ ID NO: 3247153 - RNA, 17 nt, Human
cacuaagagagaaugag

SEQ ID NO: 3247154 - RNA, 21 nt, Human
cacuaaauugacacuuaaaaa

SEQ ID NO: 3247155 - RNA, 19 nt, Human
cacgagcaggcuacuguca

SEQ ID NO: 3247156 - RNA, 20 nt, Human
cacgagcaggcuacugucag

SEQ ID NO: 3247157 - RNA, 17 nt, Human
cacgagcaggcuacugu

SEQ ID NO: 3247158 - RNA, 22 nt, Human
cacgagcaggcuacugucagcu

SEQ ID NO: 3247159 - RNA, 13 nt, Human
cacuaaacaaaga

SEQ ID NO: 3247160 - RNA, 22 nt, Human
cacguucuuacuaguuucccuu

SEQ ID NO: 3247161 - RNA, 21 nt, Human
ggcagagguugcagugagccg

SEQ ID NO: 3247162 - RNA, 17 nt, Human
ggauuagggagagaaga

SEQ ID NO: 3247163 - RNA, 19 nt, Human
ggacgcucucuggccuucg

SEQ ID NO: 3247164 - RNA, 16 nt, Human
ggacgcucucuggccu

SEQ ID NO: 3247165 - RNA, 15 nt, Human
ggacgcucucuggcc

SEQ ID NO: 3247166 - RNA, 15 nt, Human
ggagaagagcuguuc

SEQ ID NO: 3247167 - RNA, 11 nt, Human
ggagaagaacu

SEQ ID NO: 3247168 - RNA, 14 nt, Human
ggagaagaacugaa

SEQ ID NO: 3247169 - RNA, 23 nt, Human
ggagaagagcuguucacagccag

SEQ ID NO: 3247170 - RNA, 20 nt, Human
ggacauuugcucauggaauu

SEQ ID NO: 3247171 - RNA, 16 nt, Human
ggacauuugcucaugg

SEQ ID NO: 3247172 - RNA, 17 nt, Human
ggacauuugcucaugga

SEQ ID NO: 3247173 - RNA, 19 nt, Human
ggaggggagcaugggaagu

SEQ ID NO: 3247174 - RNA, 16 nt, Human
ggaggacgcucucugg

SEQ ID NO: 3247175 - RNA, 21 nt, Human
gggacugaggggaggggagca

SEQ ID NO: 3247176 - RNA, 20 nt, Human
gggaggacgcucucuggccu

SEQ ID NO: 3247177 - RNA, 17 nt, Human
gggaggacgcucucugg

SEQ ID NO: 3247178 - RNA, 20 nt, Human
ggcuaguaucaaaagaaaga

SEQ ID NO: 3247179 - RNA, 23 nt, Human
ggcuauaggugcuacaaaaacac

SEQ ID NO: 3247180 - RNA, 16 nt, Human
ggcuccacuuggucug

SEQ ID NO: 3247181 - RNA, 21 nt, Human
gcuauaggugcuacaaaaaca

SEQ ID NO: 3247182 - RNA, 19 nt, Human
gcuauaggugcuacaaaaa

SEQ ID NO: 3247183 - RNA, 13 nt, Human
gcuagauguaugu

SEQ ID NO: 3247184 - RNA, 14 nt, Human
gcuagauguaugua

SEQ ID NO: 3247185 - RNA, 20 nt, Human
gcuccauuuuuagugaaaua

SEQ ID NO: 3247186 - RNA, 20 nt, Human
gccugagcgacagugagacu

SEQ ID NO: 3247187 - RNA, 17 nt, Human
gccugagcgacagugag

SEQ ID NO: 3247188 - RNA, 18 nt, Human
gccuuggggcugaugcag

SEQ ID NO: 3247189 - RNA, 21 nt, Human
gcuggaaaaguauguuagugc

SEQ ID NO: 3247190 - RNA, 23 nt, Human
gcuggaaaaguauguuagugcaa

SEQ ID NO: 3247191 - RNA, 21 nt, Human
gcugauuaaaccaaggcuaga

SEQ ID NO: 3247192 - RNA, 19 nt, Human
gcuucuguuuuauaauuuu

SEQ ID NO: 3247193 - RNA, 18 nt, Human
gcuugcccuguuaaaaga

SEQ ID NO: 3247194 - RNA, 12 nt, Human
gcuuguguuaag

SEQ ID NO: 3247195 - RNA, 18 nt, Human
gcuguguuaaauaaaccu

SEQ ID NO: 3247196 - RNA, 19 nt, Human
gcacuguggguagacacac

SEQ ID NO: 3247197 - RNA, 15 nt, Human
gcacagccucuuaga

SEQ ID NO: 3247198 - RNA, 18 nt, Human
gcagagguugcagugagc

SEQ ID NO: 3247199 - RNA, 23 nt, Human
gcagagguugcagugagccgaga

SEQ ID NO: 3247200 - RNA, 22 nt, Human
gcagauggaaugcuguguuaaa

SEQ ID NO: 3247201 - RNA, 12 nt, Human
gcaucagcugcu

SEQ ID NO: 3247202 - RNA, 23 nt, Human
gcaucagcugcugaaacaacaaa

SEQ ID NO: 3247203 - RNA, 22 nt, Human
gcaucagcugcugaaacaacaa

SEQ ID NO: 3247204 - RNA, 20 nt, Human
gcaucuagcaugucgucaaa

SEQ ID NO: 3247205 - RNA, 21 nt, Human
gcaguugaaaagacuccaaag

SEQ ID NO: 3247206 - RNA, 16 nt, Human
gcaguugaaaagacuc

SEQ ID NO: 3247207 - RNA, 19 nt, Human
gcaguugaaaagacuccaa

SEQ ID NO: 3247208 - RNA, 15 nt, Human
gcaguugaaaagacu

SEQ ID NO: 3247209 - RNA, 23 nt, Human
gccaugggacagggaggacgcuc

SEQ ID NO: 3247210 - RNA, 22 nt, Human
gccaugggacagggaggacgcu

SEQ ID NO: 3247211 - RNA, 15 nt, Human
gccagacuggcacag

SEQ ID NO: 3247212 - RNA, 18 nt, Human
gccagacuggcacaguuu

SEQ ID NO: 3247213 - RNA, 19 nt, Human
gccagacuggcacaguuuu

SEQ ID NO: 3247214 - RNA, 19 nt, Human
gaggcagagguugcaguga

SEQ ID NO: 3247215 - RNA, 13 nt, Human
gagcuacaaaugc

SEQ ID NO: 3247216 - RNA, 12 nt, Human
gagcuacaaaug

SEQ ID NO: 3247217 - RNA, 14 nt, Human
gagcuacaaaugca

SEQ ID NO: 3247218 - RNA, 19 nt, Human
gagugaacaaauuuacaga

SEQ ID NO: 3247219 - RNA, 22 nt, Human
gagugaacaaauuuacagagac

SEQ ID NO: 3247220 - RNA, 19 nt, Human
gagugucuuaauuaaaaga

SEQ ID NO: 3247221 - RNA, 21 nt, Human
gaguugaaaaucuuauaauuu

SEQ ID NO: 3247222 - RNA, 13 nt, Human
gauagcagggcau

SEQ ID NO: 3247223 - RNA, 21 nt, Human
gauaaucagugugucuaaauu

SEQ ID NO: 3247224 - RNA, 17 nt, Human
gaguauuuuugacagaa

SEQ ID NO: 3247225 - RNA, 16 nt, Human
gaguauuuuugacaga

SEQ ID NO: 3247226 - RNA, 14 nt, Human
gaguauuuuugaca

SEQ ID NO: 3247227 - RNA, 18 nt, Human
gaguauuuuugacagaau

SEQ ID NO: 3247228 - RNA, 16 nt, Human
gaugggaaagcauugu

SEQ ID NO: 3247229 - RNA, 22 nt, Human
gaugcuagaacucccuuucaac

SEQ ID NO: 3247230 - RNA, 18 nt, Human
gaugcaguucugaagaag

SEQ ID NO: 3247231 - RNA, 14 nt, Human
gaucuuuaaaauac

SEQ ID NO: 3247232 - RNA, 13 nt, Human
gaucuuuaaaaua

SEQ ID NO: 3247233 - RNA, 23 nt, Human
gaucuucaucugacuaugacaua

SEQ ID NO: 3247234 - RNA, 16 nt, Human
gaucuucaucugacua

SEQ ID NO: 3247235 - RNA, 13 nt, Human
gauugugccccug

SEQ ID NO: 3247236 - RNA, 12 nt, Human
cugagaaagacu

SEQ ID NO: 3247237 - RNA, 13 nt, Human
cugagaaagacua

SEQ ID NO: 3247238 - RNA, 15 nt, Human
cugagaaagacuauu

SEQ ID NO: 3247239 - RNA, 18 nt, Human
cugagaaagacuauucaa

SEQ ID NO: 3247240 - RNA, 16 nt, Human
cugagaugugaacaca

SEQ ID NO: 3247241 - RNA, 20 nt, Human
cugagaugugaacacaucag

SEQ ID NO: 3247242 - RNA, 19 nt, Human
cugagaaagacuauucaaa

SEQ ID NO: 3247243 - RNA, 20 nt, Human
cugagaaagacuauucaaac

SEQ ID NO: 3247244 - RNA, 21 nt, Human
cugagaugugaacacaucagc

SEQ ID NO: 3247245 - RNA, 16 nt, Human
cugagcaggauuuuaa

SEQ ID NO: 3247246 - RNA, 19 nt, Human
cucuuaagaagacugcauu

SEQ ID NO: 3247247 - RNA, 13 nt, Human
cucuuaagaagac

SEQ ID NO: 3247248 - RNA, 22 nt, Human
cucuggccuucggccuccaucc

SEQ ID NO: 3247249 - RNA, 19 nt, Human
cucuggccuucggccucca

SEQ ID NO: 3247250 - RNA, 21 nt, Human
cucuggccuucggccuccauc

SEQ ID NO: 3247251 - RNA, 21 nt, Human
cugaggcuccacuuggucugu

SEQ ID NO: 3247252 - RNA, 15 nt, Human
cugaggcuccacuug

SEQ ID NO: 3247253 - RNA, 20 nt, Human
cugcaucagcugcugaaaca

SEQ ID NO: 3247254 - RNA, 11 nt, Human
cuccauccuga

SEQ ID NO: 3247255 - RNA, 12 nt, Human
cuccauccugag

SEQ ID NO: 3247256 - RNA, 13 nt, Human
cuccaaagaaaug

SEQ ID NO: 3247257 - RNA, 12 nt, Human
cuccaaagaaau

SEQ ID NO: 3247258 - RNA, 21 nt, Human
cuccaaacugacucuuaagaa

SEQ ID NO: 3247259 - RNA, 21 nt, Human
cucauuuccaagcaaguauua

SEQ ID NO: 3247260 - RNA, 13 nt, Human
cuccauccugagg

SEQ ID NO: 3247261 - RNA, 18 nt, Human
cuagugaaagaggcagcu

SEQ ID NO: 3247262 - RNA, 19 nt, Human
cuagugaaagaggcagcuu

SEQ ID NO: 3247263 - RNA, 20 nt, Human
cuagugaaacucguuaauuu

SEQ ID NO: 3247264 - RNA, 21 nt, Human
cuagugagcagucaggaaaga

SEQ ID NO: 3247265 - RNA, 16 nt, Human
cuaguaauuggaaagg

SEQ ID NO: 3247266 - RNA, 18 nt, Human
cuauucaaacagucucag

SEQ ID NO: 3247267 - RNA, 16 nt, Human
cuauucaaacagucuc

SEQ ID NO: 3247268 - RNA, 23 nt, Human
cuauucaaacagucucaggaaau

SEQ ID NO: 3247269 - RNA, 20 nt, Human
cuauaggugcuacaaaaaca

SEQ ID NO: 3247270 - RNA, 21 nt, Human
cuauaggugcuacaaaaacac

SEQ ID NO: 3247271 - RNA, 22 nt, Human
cuauaggugcuacaaaaacaca

SEQ ID NO: 3247272 - RNA, 15 nt, Human
cuauaggugcuacaa

SEQ ID NO: 3247273 - RNA, 13 nt, Human
cuauaauuuaaau

SEQ ID NO: 3247274 - RNA, 13 nt, Human
cucacauuuauau

SEQ ID NO: 3247275 - RNA, 12 nt, Human
cucaaauuugga

SEQ ID NO: 3247276 - RNA, 22 nt, Human
gaaaacaauaacgauaaaagac

SEQ ID NO: 3247277 - RNA, 14 nt, Human
gaaaacaaggauga

SEQ ID NO: 3247278 - RNA, 20 nt, Human
gaaaaucuuauaauuuaaaa

SEQ ID NO: 3247279 - RNA, 19 nt, Human
gaaaauaacaauaaaagac

SEQ ID NO: 3247280 - RNA, 19 nt, Human
gaaaauaacgauaaaagac

SEQ ID NO: 3247281 - RNA, 18 nt, Human
gaaaaucuuauaauuuaa

SEQ ID NO: 3247282 - RNA, 19 nt, Human
gaaaaucuuauaauuuaaa

SEQ ID NO: 3247283 - RNA, 17 nt, Human
gaaaauauuauguguuu

SEQ ID NO: 3247284 - RNA, 12 nt, Human
gaaaauaucacu

SEQ ID NO: 3247285 - RNA, 18 nt, Human
cuuguaaaggaauuuaaa

SEQ ID NO: 3247286 - RNA, 19 nt, Human
cuuguaaaggaauuuaaaa

SEQ ID NO: 3247287 - RNA, 18 nt, Human
cuuuaaagggauggcaag

SEQ ID NO: 3247288 - RNA, 19 nt, Human
cuuguguuaaguaugugua

SEQ ID NO: 3247289 - RNA, 13 nt, Human
cuuuccacagaag

SEQ ID NO: 3247290 - RNA, 13 nt, Human
gaaauauuauguu

SEQ ID NO: 3247291 - RNA, 16 nt, Human
gaaauauuauguuaaa

SEQ ID NO: 3247292 - RNA, 18 nt, Human
gaaauuguauuacaaauc

SEQ ID NO: 3247293 - RNA, 22 nt, Human
gaacuuccagauccuggaaauc

SEQ ID NO: 3247294 - RNA, 14 nt, Human
gaacucccuuucaa

SEQ ID NO: 3247295 - RNA, 21 nt, Human
gaagaagcaccaaucaugaau

SEQ ID NO: 3247296 - RNA, 21 nt, Human
gaacuuguaaaggaauuuaaa

SEQ ID NO: 3247297 - RNA, 21 nt, Human
gaacuagaguuuagcuggaaa

SEQ ID NO: 3247298 - RNA, 22 nt, Human
gaacuagaguuuagcuggaaaa

SEQ ID NO: 3247299 - RNA, 21 nt, Human
gaagccuuggggcugaugcag

SEQ ID NO: 3247300 - RNA, 14 nt, Human
gaaggaaaaugaua

SEQ ID NO: 3247301 - RNA, 16 nt, Human
gaaguuuacauuguaa

SEQ ID NO: 3247302 - RNA, 17 nt, Human
gaaguuuacauuguaaa

SEQ ID NO: 3247303 - RNA, 14 nt, Human
gaauacuuuauaaa

SEQ ID NO: 3247304 - RNA, 20 nt, Human
gaauaauccuaaacauauga

SEQ ID NO: 3247305 - RNA, 20 nt, Human
cuuccuuggacucauuuuaa

SEQ ID NO: 3247306 - RNA, 20 nt, Human
cuucggccuccauccugagg

SEQ ID NO: 3247307 - RNA, 19 nt, Human
cuucggccuccauccugag

SEQ ID NO: 3247308 - RNA, 12 nt, Human
cuucacaacaga

SEQ ID NO: 3247309 - RNA, 14 nt, Human
cuucacaacagauu

SEQ ID NO: 3247310 - RNA, 17 nt, Human
cuucaaauccuugaaga

SEQ ID NO: 3247311 - RNA, 15 nt, Human
cuucagccugaaaga

SEQ ID NO: 3247312 - RNA, 15 nt, Human
cuguuuuauaauuuu

SEQ ID NO: 3247313 - RNA, 14 nt, Human
cuguuuuauaauuu

SEQ ID NO: 3247314 - RNA, 16 nt, Human
cuuaauuaaaagaaua

SEQ ID NO: 3247315 - RNA, 17 nt, Human
cuuaauuaaaagaauau

SEQ ID NO: 3247316 - RNA, 19 nt, Human
cuuaauuaaaagaauauuu

SEQ ID NO: 3247317 - RNA, 20 nt, Human
cuuaauuaaaagaauauuuu

SEQ ID NO: 3247318 - RNA, 23 nt, Human
cuuaagaagacugcauuauauuu

SEQ ID NO: 3247319 - RNA, 21 nt, Human
cuuaagaagacugcauuauau

SEQ ID NO: 3247320 - RNA, 18 nt, Human
cugucuucacaacagauu

SEQ ID NO: 3247321 - RNA, 18 nt, Human
cugugaaaguacauuugg

SEQ ID NO: 3247322 - RNA, 15 nt, Human
cuguuaaaagaugaa

SEQ ID NO: 3247323 - RNA, 16 nt, Human
cuguuaaaagaugaaa

SEQ ID NO: 3247324 - RNA, 19 nt, Human
cuguuaaaagaugaaaaua

SEQ ID NO: 3247325 - RNA, 13 nt, Human
cccacaagaaaug

SEQ ID NO: 3247326 - RNA, 20 nt, Human
cccacaagaaaugaaagcag

SEQ ID NO: 3247327 - RNA, 15 nt, Human
cccgugggguuccuc

SEQ ID NO: 3247328 - RNA, 16 nt, Human
ccgggcguggugguga

SEQ ID NO: 3247329 - RNA, 14 nt, Human
ccuccauccugagg

SEQ ID NO: 3247330 - RNA, 20 nt, Human
ccuucggccuccauccugag

SEQ ID NO: 3247331 - RNA, 19 nt, Human
ccuucggccuccauccuga

SEQ ID NO: 3247332 - RNA, 14 nt, Human
ccuucggccuccau

SEQ ID NO: 3247333 - RNA, 20 nt, Human
ccuugaaaacuuuaugcuaa

SEQ ID NO: 3247334 - RNA, 15 nt, Human
ccuucugugaaagua

SEQ ID NO: 3247335 - RNA, 19 nt, Human
ccuuggggcugaugcaguu

SEQ ID NO: 3247336 - RNA, 14 nt, Human
ccuugaugaagaag

SEQ ID NO: 3247337 - RNA, 20 nt, Human
ccuguuaaaagaugaaaaua

SEQ ID NO: 3247338 - RNA, 21 nt, Human
ccuguuaaaagaugaaaauau

SEQ ID NO: 3247339 - RNA, 18 nt, Human
cgagcaggcuacugucag

SEQ ID NO: 3247340 - RNA, 21 nt, Human
cgaagaguauuuuugacagaa

SEQ ID NO: 3247341 - RNA, 23 nt, Human
ccuggaaaucaggguuaguauug

SEQ ID NO: 3247342 - RNA, 19 nt, Human
ccugcaauuucauaugcug

SEQ ID NO: 3247343 - RNA, 11 nt, Human
ccugagcccca

SEQ ID NO: 3247344 - RNA, 19 nt, Human
ccaugggacagggaggacg

SEQ ID NO: 3247345 - RNA, 16 nt, Human
ccaugggacagggagg

SEQ ID NO: 3247346 - RNA, 14 nt, Human
ccaguuauggcuau

SEQ ID NO: 3247347 - RNA, 19 nt, Human
caugaagauguagaggaga

SEQ ID NO: 3247348 - RNA, 18 nt, Human
caugaagauguagaggag

SEQ ID NO: 3247349 - RNA, 19 nt, Human
caugagguacugagaguga

SEQ ID NO: 3247350 - RNA, 16 nt, Human
caugagguacugagag

SEQ ID NO: 3247351 - RNA, 17 nt, Human
caucugacuaugacaua

SEQ ID NO: 3247352 - RNA, 15 nt, Human
cauauauaacaaugc

SEQ ID NO: 3247353 - RNA, 15 nt, Human
cauaucuaguaugaa

SEQ ID NO: 3247354 - RNA, 18 nt, Human
cauaucuaguaugaaauu

SEQ ID NO: 3247355 - RNA, 17 nt, Human
cauaucuaguaugaaau

SEQ ID NO: 3247356 - RNA, 13 nt, Human
cauauauaacaau

SEQ ID NO: 3247357 - RNA, 16 nt, Human
cauagguuuaauaauu

SEQ ID NO: 3247358 - RNA, 21 nt, Human
cauaucuaguaugaaauuaua

SEQ ID NO: 3247359 - RNA, 18 nt, Human
caucccuuaccugggaaa

SEQ ID NO: 3247360 - RNA, 20 nt, Human
cauggaauuggagcucgugg

SEQ ID NO: 3247361 - RNA, 23 nt, Human
caugggacagggaggacgcucuc

SEQ ID NO: 3247362 - RNA, 19 nt, Human
cauggcauauuuuucacau

SEQ ID NO: 3247363 - RNA, 15 nt, Human
cauggcauauuuuuc

SEQ ID NO: 3247364 - RNA, 23 nt, Human
cauggcauauuuuucacauaucu

SEQ ID NO: 3247365 - RNA, 13 nt, Human
cauggcauauuuu

SEQ ID NO: 3247366 - RNA, 20 nt, Human
caugugcuaguaauuggaaa

SEQ ID NO: 3247367 - RNA, 21 nt, Human
cauuaaaaaaucaguuguaca

SEQ ID NO: 3247368 - RNA, 21 nt, Human
cauuguaaaugugcuuuuaaa

SEQ ID NO: 3247369 - RNA, 19 nt, Human
cauuguacgaagaguauuu

SEQ ID NO: 3247370 - RNA, 13 nt, Human
cauucuggaauaa

SEQ ID NO: 3247371 - RNA, 22 nt, Human
cauuccaacuaucucauuucca

SEQ ID NO: 3247372 - RNA, 23 nt, Human
uuuuuuaaaaaagaaacauuugg

SEQ ID NO: 3247373 - RNA, 11 nt, Human
uuuugacagaa

SEQ ID NO: 3247374 - RNA, 22 nt, Human
uuuugacagaauauguuucaaa

SEQ ID NO: 3247375 - RNA, 23 nt, Human
uuuugacagaauauguuucaaac

SEQ ID NO: 3247376 - RNA, 15 nt, Human
uuuccacagaagcuc

SEQ ID NO: 3247377 - RNA, 17 nt, Human
uuuguauaaaauaauuu

SEQ ID NO: 3247378 - RNA, 16 nt, Human
uuuguauaaaauaauu

SEQ ID NO: 3247379 - RNA, 18 nt, Human
uuuguauaaaauaauuuu

SEQ ID NO: 3247380 - RNA, 13 nt, Human
uuuucuuauuuca

SEQ ID NO: 3247381 - RNA, 22 nt, Human
uuuucagaaaauauuauguguu

SEQ ID NO: 3247382 - RNA, 16 nt, Human
uuuucacauaucuagu

SEQ ID NO: 3247383 - RNA, 23 nt, Human
uuuucagaaaauauuauguguuu

SEQ ID NO: 3247384 - RNA, 21 nt, Human
uuuuaaaguaacccuacaaaa

SEQ ID NO: 3247385 - RNA, 23 nt, Human
uuuuauaauuuugugaagcaaaa

SEQ ID NO: 3247386 - RNA, 21 nt, Human
uuuuauaauuuugugaagcaa

SEQ ID NO: 3247387 - RNA, 13 nt, Human
uuuuauauuugaa

SEQ ID NO: 3247388 - RNA, 18 nt, Human
uuuuauauuugaaauauu

SEQ ID NO: 3247389 - RNA, 23 nt, Human
uucaguuauuauauuuacaaaug

SEQ ID NO: 3247390 - RNA, 20 nt, Human
uucaucugacuaugacauaa

SEQ ID NO: 3247391 - RNA, 18 nt, Human
uuccagauccuggaaauc

SEQ ID NO: 3247392 - RNA, 21 nt, Human
uuccaaaaagauuuucagaaa

SEQ ID NO: 3247393 - RNA, 20 nt, Human
uucagauaaucacaauacau

SEQ ID NO: 3247394 - RNA, 17 nt, Human
uucaaauccuugaagau

SEQ ID NO: 3247395 - RNA, 14 nt, Human
uuauuuuguucaua

SEQ ID NO: 3247396 - RNA, 16 nt, Human
uucaauaauaaauauu

SEQ ID NO: 3247397 - RNA, 17 nt, Human
uuauuuuaauaauguuu

SEQ ID NO: 3247398 - RNA, 19 nt, Human
uuauuuuaauaauguuuca

SEQ ID NO: 3247399 - RNA, 20 nt, Human
uuauuuuaauaauguuucaa

SEQ ID NO: 3247400 - RNA, 11 nt, Human
uuauaaucuuu

SEQ ID NO: 3247401 - RNA, 12 nt, Human
uuauaauuuaaa

SEQ ID NO: 3247402 - RNA, 14 nt, Human
uuauaauuuuguga

SEQ ID NO: 3247403 - RNA, 15 nt, Human
uuauaauuuugugaa

SEQ ID NO: 3247404 - RNA, 14 nt, Human
uuauacaggucaua

SEQ ID NO: 3247405 - RNA, 18 nt, Human
uuauaauuuugugaagca

SEQ ID NO: 3247406 - RNA, 16 nt, Human
uuauaauuuugugaag

SEQ ID NO: 3247407 - RNA, 17 nt, Human
uuauaauuuugugaagc

SEQ ID NO: 3247408 - RNA, 22 nt, Human
uuauacaggucauauuaauaua

SEQ ID NO: 3247409 - RNA, 15 nt, Human
uuauaucuuguagcu

SEQ ID NO: 3247410 - RNA, 22 nt, Human
uuauaucuuguagcuuuaucaa

SEQ ID NO: 3247411 - RNA, 13 nt, Human
uuauauuugaaau

SEQ ID NO: 3247412 - RNA, 20 nt, Human
uuauauuuauuacuguaaga

SEQ ID NO: 3247413 - RNA, 12 nt, Human
uuauauuugaaa

SEQ ID NO: 3247414 - RNA, 16 nt, Human
uuauauuuacaaaugg

SEQ ID NO: 3247415 - RNA, 11 nt, Human
uuaucucaaaa

SEQ ID NO: 3247416 - RNA, 22 nt, Human
uuaugauuaaguaaugauaacu

SEQ ID NO: 3247417 - RNA, 18 nt, Human
uuauggcuauaggugcua

SEQ ID NO: 3247418 - RNA, 17 nt, Human
uucugucuucacaacag

SEQ ID NO: 3247419 - RNA, 18 nt, Human
uucugcuuguguuaagua

SEQ ID NO: 3247420 - RNA, 17 nt, Human
uucuuccaaaaagauuu

SEQ ID NO: 3247421 - RNA, 23 nt, Human
uugaaaagacuccaaagaaaugu

SEQ ID NO: 3247422 - RNA, 23 nt, Human
uugaugaagaaguugauaugccu

SEQ ID NO: 3247423 - RNA, 13 nt, Human
uugaugaagaagu

SEQ ID NO: 3247424 - RNA, 14 nt, Human
uugaugaagaaguu

SEQ ID NO: 3247425 - RNA, 17 nt, Human
uugacccacaagaaaug

SEQ ID NO: 3247426 - RNA, 14 nt, Human
uugacccacaagaa

SEQ ID NO: 3247427 - RNA, 14 nt, Human
uucuaugaaauauu

SEQ ID NO: 3247428 - RNA, 23 nt, Human
uucucuccucuccccaugauguu

SEQ ID NO: 3247429 - RNA, 15 nt, Human
uucugagaaagacua

SEQ ID NO: 3247430 - RNA, 16 nt, Human
uucugagaaagacuau

SEQ ID NO: 3247431 - RNA, 21 nt, Human
uucugagaaagacuauucaaa

SEQ ID NO: 3247432 - RNA, 15 nt, Human
uucuacauacuaugg

SEQ ID NO: 3247433 - RNA, 22 nt, Human
uucuacauaaguaauucaagaa

SEQ ID NO: 3247434 - RNA, 18 nt, Human
uucggugagcuacaaaug

SEQ ID NO: 3247435 - RNA, 14 nt, Human
uuguuuaaaaucau

SEQ ID NO: 3247436 - RNA, 18 nt, Human
uuguguuuugcaagccag

SEQ ID NO: 3247437 - RNA, 12 nt, Human
uugugccccugc

SEQ ID NO: 3247438 - RNA, 13 nt, Human
uuguguugugaau

SEQ ID NO: 3247439 - RNA, 16 nt, Human
uuggucugugagaugc

SEQ ID NO: 3247440 - RNA, 15 nt, Human
uuggucugugagaug

SEQ ID NO: 3247441 - RNA, 17 nt, Human
uuguaaauaguauuuga

SEQ ID NO: 3247442 - RNA, 23 nt, Human
uuguacgaagaguauuuuugaca

SEQ ID NO: 3247443 - RNA, 21 nt, Human
uuguacgaagaguauuuuuga

SEQ ID NO: 3247444 - RNA, 19 nt, Human
uuguacgaagaguauuuuu

SEQ ID NO: 3247445 - RNA, 20 nt, Human
uuuacauuguaaauaguauu

SEQ ID NO: 3247446 - RNA, 13 nt, Human
uuuaccacuugug

SEQ ID NO: 3247447 - RNA, 13 nt, Human
uuuaauaauguuu

SEQ ID NO: 3247448 - RNA, 19 nt, Human
uuuaacucuauaauguguu

SEQ ID NO: 3247449 - RNA, 22 nt, Human
uuuauaauuuugugaagcaaaa

SEQ ID NO: 3247450 - RNA, 17 nt, Human
uuuauggcacuaguauu

SEQ ID NO: 3247451 - RNA, 22 nt, Human
uuuauuguuuaaaaucauuucu

SEQ ID NO: 3247452 - RNA, 21 nt, Human
uuucagauaaucacaauacau

SEQ ID NO: 3247453 - RNA, 17 nt, Human
ugcuucuguuuuauaau

SEQ ID NO: 3247454 - RNA, 22 nt, Human
ugcuucuguuuuauaauuuugu

SEQ ID NO: 3247455 - RNA, 12 nt, Human
ugcuuguguuaa

SEQ ID NO: 3247456 - RNA, 15 nt, Human
ugcuuguguuaagua

SEQ ID NO: 3247457 - RNA, 17 nt, Human
uggagacacaacuauuu

SEQ ID NO: 3247458 - RNA, 21 nt, Human
uggcuugaguuuaaauuguaa

SEQ ID NO: 3247459 - RNA, 23 nt, Human
uggccuucggccuccauccugag

SEQ ID NO: 3247460 - RNA, 20 nt, Human
uggccuucggccuccauccu

SEQ ID NO: 3247461 - RNA, 22 nt, Human
uggccuucggccuccauccuga

SEQ ID NO: 3247462 - RNA, 14 nt, Human
uggguagacacaca

SEQ ID NO: 3247463 - RNA, 16 nt, Human
ugguucccuugaugaa

SEQ ID NO: 3247464 - RNA, 17 nt, Human
ugguucccuugaugaag

SEQ ID NO: 3247465 - RNA, 20 nt, Human
ugguucccuugaugaagaag

SEQ ID NO: 3247466 - RNA, 11 nt, Human
uguaaaauggu

SEQ ID NO: 3247467 - RNA, 12 nt, Human
uguaaaauggug

SEQ ID NO: 3247468 - RNA, 14 nt, Human
uguaauaacuguga

SEQ ID NO: 3247469 - RNA, 22 nt, Human
uguaauaacugugaaguuuaca

SEQ ID NO: 3247470 - RNA, 15 nt, Human
uguagcuuuaucaaa

SEQ ID NO: 3247471 - RNA, 14 nt, Human
uguagcuuuaucaa

SEQ ID NO: 3247472 - RNA, 13 nt, Human
uguauaaaauaau

SEQ ID NO: 3247473 - RNA, 14 nt, Human
uguauaaaauaauu

SEQ ID NO: 3247474 - RNA, 19 nt, Human
uguaguguuggagaagaac

SEQ ID NO: 3247475 - RNA, 20 nt, Human
uguaguguuggagaagaacu

SEQ ID NO: 3247476 - RNA, 21 nt, Human
uguaguguuggagaagaacug

SEQ ID NO: 3247477 - RNA, 18 nt, Human
uguauuuuaaaagaauga

SEQ ID NO: 3247478 - RNA, 19 nt, Human
uguauuuuaaaagaaugau

SEQ ID NO: 3247479 - RNA, 22 nt, Human
ugucuacacuaagagagaauga

SEQ ID NO: 3247480 - RNA, 17 nt, Human
ugucuacacuaagagag

SEQ ID NO: 3247481 - RNA, 20 nt, Human
ugagcagucaggaaagagaa

SEQ ID NO: 3247482 - RNA, 17 nt, Human
ugagcagucaggaaaga

SEQ ID NO: 3247483 - RNA, 15 nt, Human
ugagcagucaggaaa

SEQ ID NO: 3247484 - RNA, 16 nt, Human
ugagaugcuagaacuc

SEQ ID NO: 3247485 - RNA, 14 nt, Human
ugagaugcuagaac

SEQ ID NO: 3247486 - RNA, 12 nt, Human
ugagacagcucu

SEQ ID NO: 3247487 - RNA, 16 nt, Human
ugagacagcucugcau

SEQ ID NO: 3247488 - RNA, 14 nt, Human
ugagacagcucugc

SEQ ID NO: 3247489 - RNA, 16 nt, Human
ugagaaagacuauuca

SEQ ID NO: 3247490 - RNA, 17 nt, Human
ugagaaagacuauucaa

SEQ ID NO: 3247491 - RNA, 18 nt, Human
ugagaaagacuauucaaa

SEQ ID NO: 3247492 - RNA, 15 nt, Human
ugagaaagacuauuc

SEQ ID NO: 3247493 - RNA, 12 nt, Human
ugacucuuaaga

SEQ ID NO: 3247494 - RNA, 19 nt, Human
ucuugaaggaaaaugauac

SEQ ID NO: 3247495 - RNA, 24 nt, Human
ugauaguuguaccgcaaugugacu

SEQ ID NO: 3247496 - RNA, 14 nt, Human
ugauguauucuagc

SEQ ID NO: 3247497 - RNA, 20 nt, Human
ugauguauucuagcuaaugu

SEQ ID NO: 3247498 - RNA, 13 nt, Human
ugauguauucuag

SEQ ID NO: 3247499 - RNA, 23 nt, Human
ugaugcuacaggauuugaaauug

SEQ ID NO: 3247500 - RNA, 17 nt, Human
ugcagauaaacaguagu

SEQ ID NO: 3247501 - RNA, 19 nt, Human
ugcagauaaacaguaguga

SEQ ID NO: 3247502 - RNA, 17 nt, Human
ugcaugguuuagaaagc

SEQ ID NO: 3247503 - RNA, 21 nt, Human
ugcauuauauuuauuacugua

SEQ ID NO: 3247504 - RNA, 16 nt, Human
ugcacugucaagauga

SEQ ID NO: 3247505 - RNA, 14 nt, Human
ugcaauuucauaug

SEQ ID NO: 3247506 - RNA, 20 nt, Human
ugcaauuucauaugcuguau

SEQ ID NO: 3247507 - RNA, 15 nt, Human
ucccuugaugaagaa

SEQ ID NO: 3247508 - RNA, 16 nt, Human
ucccuugaugaagaag

SEQ ID NO: 3247509 - RNA, 20 nt, Human
uccugccuaagugcagcccc

SEQ ID NO: 3247510 - RNA, 17 nt, Human
uccuggcaauagucaaa

SEQ ID NO: 3247511 - RNA, 16 nt, Human
uccuuggacucauuuu

SEQ ID NO: 3247512 - RNA, 22 nt, Human
ucuagugagcagucaggaaaga

SEQ ID NO: 3247513 - RNA, 19 nt, Human
ucuagugagcagucaggaa

SEQ ID NO: 3247514 - RNA, 17 nt, Human
ucuaugaaauauuaugu

SEQ ID NO: 3247515 - RNA, 13 nt, Human
ucuaugaaauauu

SEQ ID NO: 3247516 - RNA, 14 nt, Human
ucuaugaaauauua

SEQ ID NO: 3247517 - RNA, 15 nt, Human
ucucaacuccaaacu

SEQ ID NO: 3247518 - RNA, 17 nt, Human
ucggccuccauccugag

SEQ ID NO: 3247519 - RNA, 18 nt, Human
ucggccuccauccugagg

SEQ ID NO: 3247520 - RNA, 21 nt, Human
ucguggaacaguuaccucugc

SEQ ID NO: 3247521 - RNA, 22 nt, Human
ucgugggacagucaccucaugg

SEQ ID NO: 3247522 - RNA, 13 nt, Human
ucguuaauuugua

SEQ ID NO: 3247523 - RNA, 23 nt, Human
ucucuggccuucggccuccaucc

SEQ ID NO: 3247524 - RNA, 19 nt, Human
ucucuaggaaauauuuauu

SEQ ID NO: 3247525 - RNA, 19 nt, Human
ucugcaucagcugcugaaa

SEQ ID NO: 3247526 - RNA, 21 nt, Human
ucugcaucagcugcugaaaca

SEQ ID NO: 3247527 - RNA, 14 nt, Human
ucugcaucagcugc

SEQ ID NO: 3247528 - RNA, 19 nt, Human
ucuucaucugacuaugaca

SEQ ID NO: 3247529 - RNA, 15 nt, Human
ucugucuucacaaca

SEQ ID NO: 3247530 - RNA, 18 nt, Human
ucuuaagaagacugcauu

SEQ ID NO: 3247531 - RNA, 12 nt, Human
ucuuaagaagac

SEQ ID NO: 3247532 - RNA, 18 nt, Human
ucuggccuucggccucca

SEQ ID NO: 3247533 - RNA, 17 nt, Human
ucuggccuucggccucc

SEQ ID NO: 3247534 - RNA, 10 nt, Human
ucuggccuuc

SEQ ID NO: 3247535 - RNA, 18 nt, Human
ucagcuccccucggagaa

SEQ ID NO: 3247536 - RNA, 17 nt, Human
ucagcuccccucggaga

SEQ ID NO: 3247537 - RNA, 13 nt, Human
ucaggcuagaugu

SEQ ID NO: 3247538 - RNA, 17 nt, Human
ucaggcuagauguaugu

SEQ ID NO: 3247539 - RNA, 16 nt, Human
uccacuuggucuguga

SEQ ID NO: 3247540 - RNA, 15 nt, Human
uccacuuggucugug

SEQ ID NO: 3247541 - RNA, 14 nt, Human
uccacuuggucugu

SEQ ID NO: 3247542 - RNA, 19 nt, Human
uccacagaagcuccaggua

SEQ ID NO: 3247543 - RNA, 15 nt, Human
uccaaaauaauuuua

SEQ ID NO: 3247544 - RNA, 19 nt, Human
uccaaaauaauuuuaagaa

SEQ ID NO: 3247545 - RNA, 12 nt, Human
ucauagcagcuu

SEQ ID NO: 3247546 - RNA, 18 nt, Human
ucauaccuaucaucuuaa

SEQ ID NO: 3247547 - RNA, 18 nt, Human
ucaucugacuaugacaua

SEQ ID NO: 3247548 - RNA, 17 nt, Human
ucaucugacuaugacau

SEQ ID NO: 3247549 - RNA, 13 nt, Human
ucauuuccaagca

SEQ ID NO: 3247550 - RNA, 16 nt, Human
ucauuuccaagcaagu

SEQ ID NO: 3247551 - RNA, 13 nt, Human
ucauuaucucaaa

SEQ ID NO: 3247552 - RNA, 19 nt, Human
ucauuaucucaaaacugca

SEQ ID NO: 3247553 - RNA, 20 nt, Human
ucauuaucucaaaacugcac

SEQ ID NO: 3247554 - RNA, 13 nt, Human
ucacaagacccaa

SEQ ID NO: 3247555 - RNA, 17 nt, Human
ucacaagacccaaaagg

SEQ ID NO: 3247556 - RNA, 16 nt, Human
ucacagucacauucca

SEQ ID NO: 3247557 - RNA, 14 nt, Human
ucaccaaggcugau

SEQ ID NO: 3247558 - RNA, 13 nt, Human
ucaaugcagcccc

SEQ ID NO: 3247559 - RNA, 21 nt, Human
ucaauaaaauccauacauuug

SEQ ID NO: 3247560 - RNA, 14 nt, Human
ucaauaaaauccau

SEQ ID NO: 3247561 - RNA, 14 nt, Human
ucaaauaugcaaag

SEQ ID NO: 3247562 - RNA, 20 nt, Human
ucaaaucaagaaacuuaagg

SEQ ID NO: 3247563 - RNA, 14 nt, Human
ucaaauugugugaa

SEQ ID NO: 3247564 - RNA, 13 nt, Human
uauguacuucaug

SEQ ID NO: 3247565 - RNA, 17 nt, Human
uauguacuucaugcugu

SEQ ID NO: 3247566 - RNA, 12 nt, Human
uauuaauauauu

SEQ ID NO: 3247567 - RNA, 16 nt, Human
uauguuucaaacuuug

SEQ ID NO: 3247568 - RNA, 15 nt, Human
uauguuucaaacuuu

SEQ ID NO: 3247569 - RNA, 13 nt, Human
uauguuucaaacu

SEQ ID NO: 3247570 - RNA, 14 nt, Human
uauuguguugugaa

SEQ ID NO: 3247571 - RNA, 16 nt, Human
uauuauucccauucua

SEQ ID NO: 3247572 - RNA, 14 nt, Human
uauucuaaauuuua

SEQ ID NO: 3247573 - RNA, 20 nt, Human
uauucuaaauuuuauaucuu

SEQ ID NO: 3247574 - RNA, 19 nt, Human
uauucuaaauuuuauaucu

SEQ ID NO: 3247575 - RNA, 15 nt, Human
uauucuaaauuuuau

SEQ ID NO: 3247576 - RNA, 19 nt, Human
uauucuagcuaauguaaua

SEQ ID NO: 3247577 - RNA, 20 nt, Human
cucuuagaugcaguucugaa

SEQ ID NO: 3247578 - RNA, 19 nt, Human
cucuauguucuaagaagug

SEQ ID NO: 3247579 - RNA, 12 nt, Human
cucucuggccuu

SEQ ID NO: 3247580 - RNA, 11 nt, Human
cucucuggccu

SEQ ID NO: 3247581 - RNA, 15 nt, Human
cucuuagaugcaguu

SEQ ID NO: 3247582 - RNA, 16 nt, Human
cgacagugagacucug

SEQ ID NO: 3247583 - RNA, 15 nt, Human
cgacagugagacucu

SEQ ID NO: 3247584 - RNA, 23 nt, Human
cuaguugaucagcuuauugucua

SEQ ID NO: 3247585 - RNA, 13 nt, Human
cuagaacucccuu

SEQ ID NO: 3247586 - RNA, 19 nt, Human
cuagaacucccuuucaaca

SEQ ID NO: 3247587 - RNA, 18 nt, Human
cuagaacucccuuucaac

SEQ ID NO: 3247588 - RNA, 17 nt, Human
cuagaacucccuuucaa

SEQ ID NO: 3247589 - RNA, 16 nt, Human
cuagaacucccuuuca

SEQ ID NO: 3247590 - RNA, 23 nt, Human
cuaagugaaauaagccagacauc

SEQ ID NO: 3247591 - RNA, 20 nt, Human
cuaagugaaauaagccagac

SEQ ID NO: 3247592 - RNA, 15 nt, Human
cuacaugagguacug

SEQ ID NO: 3247593 - RNA, 22 nt, Human
cuacauaaguaauucaagaaaa

SEQ ID NO: 3247594 - RNA, 23 nt, Human
cuacauaaguaauucaagaaaac

SEQ ID NO: 3247595 - RNA, 14 nt, Human
cuaacuggacuggu

SEQ ID NO: 3247596 - RNA, 15 nt, Human
ccucauguccacugg

SEQ ID NO: 3247597 - RNA, 20 nt, Human
ccucauguccacugguucuu

SEQ ID NO: 3247598 - RNA, 16 nt, Human
ccguagguuauuuuca

SEQ ID NO: 3247599 - RNA, 21 nt, Human
ccaguuauggcuauaggugcu

SEQ ID NO: 3247600 - RNA, 15 nt, Human
ccagauccuggaaau

SEQ ID NO: 3247601 - RNA, 23 nt, Human
cccgggaggcagagguugcagug

SEQ ID NO: 3247602 - RNA, 23 nt, Human
cccauuguggucacaggaaguag

SEQ ID NO: 3247603 - RNA, 22 nt, Human
cccauuguggucacaggaagua

SEQ ID NO: 3247604 - RNA, 15 nt, Human
cauuaggauggcuag

SEQ ID NO: 3247605 - RNA, 19 nt, Human
ccaaaaagauuuucagaaa

SEQ ID NO: 3247606 - RNA, 18 nt, Human
ccaaauguucaucaauga

SEQ ID NO: 3247607 - RNA, 17 nt, Human
cauagauucccugagca

SEQ ID NO: 3247608 - RNA, 18 nt, Human
cauagauucccugagcag

SEQ ID NO: 3247609 - RNA, 20 nt, Human
cauagcagcuuauucacaag

SEQ ID NO: 3247610 - RNA, 20 nt, Human
caucagcuugcccuguuaaa

SEQ ID NO: 3247611 - RNA, 17 nt, Human
caucagcugcugaaaca

SEQ ID NO: 3247612 - RNA, 18 nt, Human
caucagcugcugaaacaa

SEQ ID NO: 3247613 - RNA, 15 nt, Human
caucagcugcugaaa

SEQ ID NO: 3247614 - RNA, 13 nt, Human
caucagcugcuga

SEQ ID NO: 3247615 - RNA, 16 nt, Human
caugaauuaguuuuau

SEQ ID NO: 3247616 - RNA, 16 nt, Human
cagcuuauucacaaga

SEQ ID NO: 3247617 - RNA, 21 nt, Human
caggaaaucaaauaugcaaag

SEQ ID NO: 3247618 - RNA, 19 nt, Human
caggaaaucaaauaugcaa

SEQ ID NO: 3247619 - RNA, 23 nt, Human
caggacagcccuucuuuccacag

SEQ ID NO: 3247620 - RNA, 24 nt, Human
caggacagcccuucuuuccacaga

SEQ ID NO: 3247621 - RNA, 19 nt, Human
cagggaggacgcucucugg

SEQ ID NO: 3247622 - RNA, 22 nt, Human
cagggaggacgcucucuggccu

SEQ ID NO: 3247623 - RNA, 20 nt, Human
cagccagacuggcacaguuu

SEQ ID NO: 3247624 - RNA, 22 nt, Human
cagcacagccucuuagaugcag

SEQ ID NO: 3247625 - RNA, 23 nt, Human
cagccugagcgacagugagacuc

SEQ ID NO: 3247626 - RNA, 22 nt, Human
cagccugagcgacagugagacu

SEQ ID NO: 3247627 - RNA, 19 nt, Human
cagccccgugggguuccuc

SEQ ID NO: 3247628 - RNA, 20 nt, Human
caaagcacugacuucuaagu

SEQ ID NO: 3247629 - RNA, 22 nt, Human
caaagcacugacuucuaaguaa

SEQ ID NO: 3247630 - RNA, 15 nt, Human
caacacgagcaggcu

SEQ ID NO: 3247631 - RNA, 23 nt, Human
caacacgagcaggcuacugucag

SEQ ID NO: 3247632 - RNA, 20 nt, Human
caaaaaaaaaaaaaaauuag

SEQ ID NO: 3247633 - RNA, 21 nt, Human
caaaaggauaaugaauacuuu

SEQ ID NO: 3247634 - RNA, 15 nt, Human
caaaaggcagaagca

SEQ ID NO: 3247635 - RNA, 14 nt, Human
auuugcucauggaa

SEQ ID NO: 3247636 - RNA, 17 nt, Human
auuugcucauggaauug

SEQ ID NO: 3247637 - RNA, 19 nt, Human
auuuuauagcuacuaauuu

SEQ ID NO: 3247638 - RNA, 17 nt, Human
auuuuauagcuacuaau

SEQ ID NO: 3247639 - RNA, 19 nt, Human
auucacaagacccaaaagg

SEQ ID NO: 3247640 - RNA, 22 nt, Human
auuaugaauuacauuuguauaa

SEQ ID NO: 3247641 - RNA, 14 nt, Human
auuaugaauuacau

SEQ ID NO: 3247642 - RNA, 17 nt, Human
auuaugaauuacauuug

SEQ ID NO: 3247643 - RNA, 16 nt, Human
auuagggagagaagau

SEQ ID NO: 3247644 - RNA, 22 nt, Human
auucauagcagcuuauucacaa

SEQ ID NO: 3247645 - RNA, 19 nt, Human
auucauagcagcuuauuca

SEQ ID NO: 3247646 - RNA, 14 nt, Human
auuguaaaauggug

SEQ ID NO: 3247647 - RNA, 13 nt, Human
auuguaaaauggu

SEQ ID NO: 3247648 - RNA, 23 nt, Human
auuguaauaggcguaacuaauuu

SEQ ID NO: 3247649 - RNA, 15 nt, Human
auucuugaaggaaaa

SEQ ID NO: 3247650 - RNA, 18 nt, Human
auucuugaaggaaaauga

SEQ ID NO: 3247651 - RNA, 21 nt, Human
auugauaaguucauacauugu

SEQ ID NO: 3247652 - RNA, 22 nt, Human
auugauaaguucauacauugua

SEQ ID NO: 3247653 - RNA, 14 nt, Human
caaguccaagcaua

SEQ ID NO: 3247654 - RNA, 22 nt, Human
cacacaugaaguccaagcauuu

SEQ ID NO: 3247655 - RNA, 17 nt, Human
cacacaugaaguccaag

SEQ ID NO: 3247656 - RNA, 21 nt, Human
cacagccucuuagaugcaguu

SEQ ID NO: 3247657 - RNA, 17 nt, Human
cacagccucuuagaugc

SEQ ID NO: 3247658 - RNA, 18 nt, Human
cacaagacugcacaucaa

SEQ ID NO: 3247659 - RNA, 16 nt, Human
caaugcuguauuuuaa

SEQ ID NO: 3247660 - RNA, 17 nt, Human
caaugcuguauuuuaaa

SEQ ID NO: 3247661 - RNA, 15 nt, Human
caaugcuguauuuua

SEQ ID NO: 3247662 - RNA, 15 nt, Human
caauucuugccaaau

SEQ ID NO: 3247663 - RNA, 20 nt, Human
cacuagggcagggacaggau

SEQ ID NO: 3247664 - RNA, 21 nt, Human
cacuagggcagggacaggaua

SEQ ID NO: 3247665 - RNA, 22 nt, Human
cacugguucuucuuggucucag

SEQ ID NO: 3247666 - RNA, 16 nt, Human
cacuugucaauaaaau

SEQ ID NO: 3247667 - RNA, 19 nt, Human
cacuuguguuuugcaagcc

SEQ ID NO: 3247668 - RNA, 17 nt, Human
cacuuguguuuugcaag

SEQ ID NO: 3247669 - RNA, 22 nt, Human
cacuuguguuuugcaagccaga

SEQ ID NO: 3247670 - RNA, 21 nt, Human
cacugcagaagacaguauggc

SEQ ID NO: 3247671 - RNA, 17 nt, Human
ggcauauuuuucacaua

SEQ ID NO: 3247672 - RNA, 15 nt, Human
ggcauauuuuucaca

SEQ ID NO: 3247673 - RNA, 23 nt, Human
ggccuucggccuccauccugagg

SEQ ID NO: 3247674 - RNA, 22 nt, Human
ggccuucggccuccauccugag

SEQ ID NO: 3247675 - RNA, 12 nt, Human
ggauggcaagau

SEQ ID NO: 3247676 - RNA, 20 nt, Human
aaaguuauugauaaguucau

SEQ ID NO: 3247677 - RNA, 23 nt, Human
aaaguuauugauaaguucauaca

SEQ ID NO: 3247678 - RNA, 18 nt, Human
aaauaauuuuuauauuug

SEQ ID NO: 3247679 - RNA, 20 nt, Human
aaauaauuuuuauauuugaa

SEQ ID NO: 3247680 - RNA, 15 nt, Human
aaauaauuuuuauau

SEQ ID NO: 3247681 - RNA, 17 nt, Human
guaacaaugaagauaaa

SEQ ID NO: 3247682 - RNA, 12 nt, Human
guaaaaugugaa

SEQ ID NO: 3247683 - RNA, 19 nt, Human
guaaaaugugaagugaaug

SEQ ID NO: 3247684 - RNA, 20 nt, Human
guaaaaugugaagugaauga

SEQ ID NO: 3247685 - RNA, 22 nt, Human
guaaaaugugaagugaaugaaa

SEQ ID NO: 3247686 - RNA, 16 nt, Human
gguuuagaaagcuugc

SEQ ID NO: 3247687 - RNA, 16 nt, Human
ggugugaccacugcag

SEQ ID NO: 3247688 - RNA, 15 nt, Human
aaagacuauucaaac

SEQ ID NO: 3247689 - RNA, 13 nt, Human
aaagauuuucaga

SEQ ID NO: 3247690 - RNA, 24 nt, Human
ggucugugagaugcuagaacuccc

SEQ ID NO: 3247691 - RNA, 14 nt, Human
aaagacuauucaaa

SEQ ID NO: 3247692 - RNA, 19 nt, Human
aaaaguauguuagugcaaa

SEQ ID NO: 3247693 - RNA, 15 nt, Human
gggcgugguggugag

SEQ ID NO: 3247694 - RNA, 20 nt, Human
aaacagucucaggaaaucaa

SEQ ID NO: 3247695 - RNA, 22 nt, Human
aaaauuuuuucucuaggaaaua

SEQ ID NO: 3247696 - RNA, 15 nt, Human
aaaaugugauaugua

SEQ ID NO: 3247697 - RNA, 12 nt, Human
aaaaugugaagu

SEQ ID NO: 3247698 - RNA, 12 nt, Human
aaaaccacagca

SEQ ID NO: 3247699 - RNA, 22 nt, Human
aaaaauggaacauaaaauacaa

SEQ ID NO: 3247700 - RNA, 17 nt, Human
aaaagaugaaaauauuu

SEQ ID NO: 3247701 - RNA, 13 nt, Human
aaaacucauuuuu

SEQ ID NO: 3247702 - RNA, 13 nt, Human
aaaaccacagcag

SEQ ID NO: 3247703 - RNA, 19 nt, Human
gggacauuugcucauggaa

SEQ ID NO: 3247704 - RNA, 20 nt, Human
gggacauuugcucauggaau

SEQ ID NO: 3247705 - RNA, 21 nt, Human
gggacauuugcucauggaauu

SEQ ID NO: 3247706 - RNA, 13 nt, Human
aaaaauauauuua

SEQ ID NO: 3247707 - RNA, 15 nt, Human
aaaaauauauuuaau

SEQ ID NO: 3247708 - RNA, 19 nt, Human
aaaaauauauuuaaugaua

SEQ ID NO: 3247709 - RNA, 17 nt, Human
gggauuguaaaauggug

SEQ ID NO: 3247710 - RNA, 16 nt, Human
gggauuguaaaauggu

SEQ ID NO: 3247711 - RNA, 15 nt, Human
gcucugcccauccug

SEQ ID NO: 3247712 - RNA, 21 nt, Human
gcucugcccauccugccccug

SEQ ID NO: 3247713 - RNA, 16 nt, Human
gcugaaacaacaaaua

SEQ ID NO: 3247714 - RNA, 20 nt, Human
gcuccacuuggucugugaga

SEQ ID NO: 3247715 - RNA, 19 nt, Human
gcuccacuuggucugugag

SEQ ID NO: 3247716 - RNA, 12 nt, Human
gcuguauuuuaa

SEQ ID NO: 3247717 - RNA, 13 nt, Human
gcuguauuuuaaa

SEQ ID NO: 3247718 - RNA, 19 nt, Human
gcuuccuggcaauagucaa

SEQ ID NO: 3247719 - RNA, 22 nt, Human
gccaugugcuaguaauuggaaa

SEQ ID NO: 3247720 - RNA, 22 nt, Human
gccaguuauggcuauaggugcu

SEQ ID NO: 3247721 - RNA, 20 nt, Human
gccuccauccugaggcucca

SEQ ID NO: 3247722 - RNA, 16 nt, Human
gccuccauccugaggc

SEQ ID NO: 3247723 - RNA, 15 nt, Human
gccuccauccugagg

SEQ ID NO: 3247724 - RNA, 17 nt, Human
gcuacuugggaggcuga

SEQ ID NO: 3247725 - RNA, 15 nt, Human
gcuacugucagcucc

SEQ ID NO: 3247726 - RNA, 18 nt, Human
gcuacaaaaacacagcaa

SEQ ID NO: 3247727 - RNA, 19 nt, Human
gcuacaaaaacacagcaag

SEQ ID NO: 3247728 - RNA, 17 nt, Human
gcuacaaaaacacagca

SEQ ID NO: 3247729 - RNA, 17 nt, Human
gauuagggagagaagau

SEQ ID NO: 3247730 - RNA, 14 nt, Human
gaugugaacacauc

SEQ ID NO: 3247731 - RNA, 16 nt, Human
gaugugaacacaucag

SEQ ID NO: 3247732 - RNA, 14 nt, Human
gauuaccagggacu

SEQ ID NO: 3247733 - RNA, 20 nt, Human
gauauguaccuaacgaagua

SEQ ID NO: 3247734 - RNA, 16 nt, Human
gaguuuaaauuguaau

SEQ ID NO: 3247735 - RNA, 16 nt, Human
gaguuuagcuggaaaa

SEQ ID NO: 3247736 - RNA, 19 nt, Human
gcagggacuugaacccaua

SEQ ID NO: 3247737 - RNA, 12 nt, Human
gcacugacagau

SEQ ID NO: 3247738 - RNA, 17 nt, Human
gcacugacagauuucca

SEQ ID NO: 3247739 - RNA, 14 nt, Human
gcacaguuuucuga

SEQ ID NO: 3247740 - RNA, 17 nt, Human
gcacaguuuucugagaa

SEQ ID NO: 3247741 - RNA, 18 nt, Human
gcacaguuuucugagaaa

SEQ ID NO: 3247742 - RNA, 21 nt, Human
gagcaggcuacugucagcucc

SEQ ID NO: 3247743 - RNA, 22 nt, Human
gacuauucaaacagucucagga

SEQ ID NO: 3247744 - RNA, 13 nt, Human
gacuaugacauaa

SEQ ID NO: 3247745 - RNA, 17 nt, Human
gacucuuaagaagacug

SEQ ID NO: 3247746 - RNA, 15 nt, Human
gacucuuaagaagac

SEQ ID NO: 3247747 - RNA, 16 nt, Human
gacucuuaagaagacu

SEQ ID NO: 3247748 - RNA, 15 nt, Human
gagaaucacuugaac

SEQ ID NO: 3247749 - RNA, 14 nt, Human
gagaaucacuugaa

SEQ ID NO: 3247750 - RNA, 22 nt, Human
gagacguuuuuggaagaguagu

SEQ ID NO: 3247751 - RNA, 20 nt, Human
gaaugaauggcuaagcaaaa

SEQ ID NO: 3247752 - RNA, 20 nt, Human
gaaugagagacacacugaag

SEQ ID NO: 3247753 - RNA, 22 nt, Human
gaaugagagacacacugaagaa

SEQ ID NO: 3247754 - RNA, 23 nt, Human
gaaugagagacacacugaagaag

SEQ ID NO: 3247755 - RNA, 12 nt, Human
gacacacaugaa

SEQ ID NO: 3247756 - RNA, 13 nt, Human
gacacacugaaga

SEQ ID NO: 3247757 - RNA, 11 nt, Human
gaauuaguuuu

SEQ ID NO: 3247758 - RNA, 16 nt, Human
gacacuuaaaaauggu

SEQ ID NO: 3247759 - RNA, 16 nt, Human
gacagaauauguuuca

SEQ ID NO: 3247760 - RNA, 20 nt, Human
gacaguauggcagcuuuccu

SEQ ID NO: 3247761 - RNA, 17 nt, Human
gaaauauuuauuuuaau

SEQ ID NO: 3247762 - RNA, 16 nt, Human
gaaauauuuauuuuaa

SEQ ID NO: 3247763 - RNA, 19 nt, Human
gaaaucaaauaugcaaagc

SEQ ID NO: 3247764 - RNA, 20 nt, Human
gaaaucaaauaugcaaagca

SEQ ID NO: 3247765 - RNA, 18 nt, Human
gaaaucaaauaugcaaag

SEQ ID NO: 3247766 - RNA, 17 nt, Human
gaaaucaaauaugcaaa

SEQ ID NO: 3247767 - RNA, 18 nt, Human
gaaauauuuauuuuaaua

SEQ ID NO: 3247768 - RNA, 14 nt, Human
gaaagacuauucaa

SEQ ID NO: 3247769 - RNA, 15 nt, Human
gaaagacuauucaaa

SEQ ID NO: 3247770 - RNA, 21 nt, Human
gaaaacuuuaugcuaagugaa

SEQ ID NO: 3247771 - RNA, 12 nt, Human
cuugaugaagaa

SEQ ID NO: 3247772 - RNA, 13 nt, Human
cuugaugaagaag

SEQ ID NO: 3247773 - RNA, 22 nt, Human
cuucuaaguaaaaccacagcag

SEQ ID NO: 3247774 - RNA, 23 nt, Human
cuucuaaguaaaaccacagcagu

SEQ ID NO: 3247775 - RNA, 15 nt, Human
cuucacuguaaaaua

SEQ ID NO: 3247776 - RNA, 21 nt, Human
cuucaucugacuaugacauaa

SEQ ID NO: 3247777 - RNA, 19 nt, Human
cuucaucugacuaugacau

SEQ ID NO: 3247778 - RNA, 20 nt, Human
cuucaugcauagguuuagca

SEQ ID NO: 3247779 - RNA, 16 nt, Human
cugugagaugcuagaa

SEQ ID NO: 3247780 - RNA, 23 nt, Human
cugucagcuccccucggagaaga

SEQ ID NO: 3247781 - RNA, 21 nt, Human
cugucagcuccccucggagaa

SEQ ID NO: 3247782 - RNA, 21 nt, Human
cuggaaaucaggguuaguauu

SEQ ID NO: 3247783 - RNA, 13 nt, Human
uaggauguugaaa

SEQ ID NO: 3247784 - RNA, 13 nt, Human
acacaacuauauu

SEQ ID NO: 3247785 - RNA, 19 nt, Human
uagcacugacagauuucca

SEQ ID NO: 3247786 - RNA, 14 nt, Human
uagcacugacagau

SEQ ID NO: 3247787 - RNA, 14 nt, Human
uagaggguguguaa

SEQ ID NO: 3247788 - RNA, 18 nt, Human
acaaaaggauaaugaaua

SEQ ID NO: 3247789 - RNA, 14 nt, Human
acaaaaacacagca

SEQ ID NO: 3247790 - RNA, 15 nt, Human
acaaaaacacagcaa

SEQ ID NO: 3247791 - RNA, 13 nt, Human
acaaaaacacagc

SEQ ID NO: 3247792 - RNA, 15 nt, Human
uagaaacacaacuau

SEQ ID NO: 3247793 - RNA, 17 nt, Human
uagaacucccuuucaac

SEQ ID NO: 3247794 - RNA, 16 nt, Human
uagaacucccuuucaa

SEQ ID NO: 3247795 - RNA, 15 nt, Human
uagaacucccuuuca

SEQ ID NO: 3247796 - RNA, 17 nt, Human
aauuccaauuauaugag

SEQ ID NO: 3247797 - RNA, 13 nt, Human
uagacacacauga

SEQ ID NO: 3247798 - RNA, 16 nt, Human
aauuuggauugcuaau

SEQ ID NO: 3247799 - RNA, 14 nt, Human
acagcuguaugauu

SEQ ID NO: 3247800 - RNA, 19 nt, Human
acagcuguaugauucccag

SEQ ID NO: 3247801 - RNA, 20 nt, Human
acagcuguaugauucccagc

SEQ ID NO: 3247802 - RNA, 23 nt, Human
acagcuguaugauucccagccag

SEQ ID NO: 3247803 - RNA, 18 nt, Human
acagcaagggugauggga

SEQ ID NO: 3247804 - RNA, 13 nt, Human
acacucaaaucaa

SEQ ID NO: 3247805 - RNA, 19 nt, Human
acacuaagagagaaugaga

SEQ ID NO: 3247806 - RNA, 17 nt, Human
acacucaaaucaagaaa

SEQ ID NO: 3247807 - RNA, 16 nt, Human
uauacaggucauauua

SEQ ID NO: 3247808 - RNA, 15 nt, Human
uauacaggucauauu

SEQ ID NO: 3247809 - RNA, 19 nt, Human
uauaggaauugacccacaa

SEQ ID NO: 3247810 - RNA, 16 nt, Human
uauaggugcuacaaaa

SEQ ID NO: 3247811 - RNA, 16 nt, Human
acacucaguuguucaa

SEQ ID NO: 3247812 - RNA, 17 nt, Human
uauauccuuucuaacaa

SEQ ID NO: 3247813 - RNA, 20 nt, Human
uauauccuuucuaacaaaaa

SEQ ID NO: 3247814 - RNA, 19 nt, Human
acagaaagcagaacaguga

SEQ ID NO: 3247815 - RNA, 14 nt, Human
uaucacaaaucuua

SEQ ID NO: 3247816 - RNA, 16 nt, Human
uaucacaaaucuuaac

SEQ ID NO: 3247817 - RNA, 20 nt, Human
uaucacaaaucuuaacuuga

SEQ ID NO: 3247818 - RNA, 14 nt, Human
acagaccuuugaac

SEQ ID NO: 3247819 - RNA, 22 nt, Human
uaucaaagggugaaaauuauuu

SEQ ID NO: 3247820 - RNA, 19 nt, Human
uaucaaagggugaaaauua

SEQ ID NO: 3247821 - RNA, 18 nt, Human
uaucaaagggugaaaauu

SEQ ID NO: 3247822 - RNA, 16 nt, Human
uaaaugugcuuuuaaa

SEQ ID NO: 3247823 - RNA, 17 nt, Human
uaacaaugaagauaaaa

SEQ ID NO: 3247824 - RNA, 23 nt, Human
aauaccacaggaaccacaagacu

SEQ ID NO: 3247825 - RNA, 18 nt, Human
aauaccaugccauuuaaa

SEQ ID NO: 3247826 - RNA, 23 nt, Human
aauacaucccuuaccugggaaag

SEQ ID NO: 3247827 - RNA, 22 nt, Human
aauagagcaaaauugauguguu

SEQ ID NO: 3247828 - RNA, 20 nt, Human
aauagagcaaaauugaugug

SEQ ID NO: 3247829 - RNA, 21 nt, Human
uaacuuccuuggacucauuuu

SEQ ID NO: 3247830 - RNA, 13 nt, Human
uaagaagugaaaa

SEQ ID NO: 3247831 - RNA, 19 nt, Human
aauagucaaauugugugaa

SEQ ID NO: 3247832 - RNA, 14 nt, Human
aauauauuuaauga

SEQ ID NO: 3247833 - RNA, 20 nt, Human
uaacgauaaaagacagugaa

SEQ ID NO: 3247834 - RNA, 20 nt, Human
aauccucaguuuuugugaaa

SEQ ID NO: 3247835 - RNA, 14 nt, Human
aaucagugugucua

SEQ ID NO: 3247836 - RNA, 17 nt, Human
aaucagugugucuaaau

SEQ ID NO: 3247837 - RNA, 18 nt, Human
aaucagugugucuaaauu

SEQ ID NO: 3247838 - RNA, 22 nt, Human
aaucagugugucuaaauuugaa

SEQ ID NO: 3247839 - RNA, 18 nt, Human
uaaguuuuuuuuuaaaaa

SEQ ID NO: 3247840 - RNA, 13 nt, Human
uaaguaaaaccac

SEQ ID NO: 3247841 - RNA, 15 nt, Human
uaaguaaaaccacag

SEQ ID NO: 3247842 - RNA, 18 nt, Human
uaagguuaccuuuguucc

SEQ ID NO: 3247843 - RNA, 16 nt, Human
uaaguaaaaccacagc

SEQ ID NO: 3247844 - RNA, 17 nt, Human
uaaguaaaaccacagca

SEQ ID NO: 3247845 - RNA, 18 nt, Human
uaaguaaaaccacagcag

SEQ ID NO: 3247846 - RNA, 19 nt, Human
uaaguaaugauaacuggaa

SEQ ID NO: 3247847 - RNA, 16 nt, Human
uaaguaauucaagaaa

SEQ ID NO: 3247848 - RNA, 20 nt, Human
uaaguaaugauaacuggaaa

SEQ ID NO: 3247849 - RNA, 16 nt, Human
aaucagccuaguugau

SEQ ID NO: 3247850 - RNA, 14 nt, Human
uaagcaaaauguga

SEQ ID NO: 3247851 - RNA, 15 nt, Human
uaagcaaaaugugau

SEQ ID NO: 3247852 - RNA, 22 nt, Human
uaagcagauggaaugcuguguu

SEQ ID NO: 3247853 - RNA, 17 nt, Human
uaauuuuuauauuugaa

SEQ ID NO: 3247854 - RNA, 20 nt, Human
aaugcuguauuuuaaaagaa

SEQ ID NO: 3247855 - RNA, 21 nt, Human
aaugcuguauuuuaaaagaau

SEQ ID NO: 3247856 - RNA, 22 nt, Human
aaugcuguauuuuaaaagaaug

SEQ ID NO: 3247857 - RNA, 20 nt, Human
aauguaagggaaacugccag

SEQ ID NO: 3247858 - RNA, 17 nt, Human
uacagagacagaaagca

SEQ ID NO: 3247859 - RNA, 13 nt, Human
uacagaauuuuau

SEQ ID NO: 3247860 - RNA, 23 nt, Human
aaugauuaugaauuacauuugua

SEQ ID NO: 3247861 - RNA, 22 nt, Human
aaugagagacacacugaagaag

SEQ ID NO: 3247862 - RNA, 21 nt, Human
aaugagagacacacugaagaa

SEQ ID NO: 3247863 - RNA, 16 nt, Human
aaugauuucauucaau

SEQ ID NO: 3247864 - RNA, 16 nt, Human
uaauuuauacagguca

SEQ ID NO: 3247865 - RNA, 18 nt, Human
uaauuuuuauauuugaaa

SEQ ID NO: 3247866 - RNA, 19 nt, Human
uaauuuuuauauuugaaau

SEQ ID NO: 3247867 - RNA, 21 nt, Human
uaauuuuuauauuugaaauau

SEQ ID NO: 3247868 - RNA, 22 nt, Human
uaauuccguagguuauuuucag

SEQ ID NO: 3247869 - RNA, 20 nt, Human
aauguucaucaaugaaugaa

SEQ ID NO: 3247870 - RNA, 16 nt, Human
aauguucaucaaugaa

SEQ ID NO: 3247871 - RNA, 13 nt, Human
aauguucaucaau

SEQ ID NO: 3247872 - RNA, 19 nt, Human
uaccagggacugaggggag

SEQ ID NO: 3247873 - RNA, 16 nt, Human
uaccaugccauuuaaa

SEQ ID NO: 3247874 - RNA, 12 nt, Human
aauucaagaaaa

SEQ ID NO: 3247875 - RNA, 20 nt, Human
aauucaagaaaacaacuuca

SEQ ID NO: 3247876 - RNA, 15 nt, Human
aauucagaaggaucu

SEQ ID NO: 3247877 - RNA, 21 nt, Human
aauucagaaggaucuucaucu

SEQ ID NO: 3247878 - RNA, 14 nt, Human
aauuacauuuguau

SEQ ID NO: 3247879 - RNA, 13 nt, Human
aauuacauuugua

SEQ ID NO: 3247880 - RNA, 13 nt, Human
aaguauuagaaua

SEQ ID NO: 3247881 - RNA, 14 nt, Human
aaguaaugauaacu

SEQ ID NO: 3247882 - RNA, 22 nt, Human
aagucuuauauauuguagauaa

SEQ ID NO: 3247883 - RNA, 16 nt, Human
aagucuuucacauuua

SEQ ID NO: 3247884 - RNA, 16 nt, Human
uaaaagaauauuuuaa

SEQ ID NO: 3247885 - RNA, 23 nt, Human
uaaaagaauauuuuaacuuccuu

SEQ ID NO: 3247886 - RNA, 12 nt, Human
uaaaagaaugau

SEQ ID NO: 3247887 - RNA, 22 nt, Human
uaaaaauauuguguugugaaug

SEQ ID NO: 3247888 - RNA, 20 nt, Human
uaaaagacagugaaagaaaa

SEQ ID NO: 3247889 - RNA, 13 nt, Human
aaggauaaugaau

SEQ ID NO: 3247890 - RNA, 14 nt, Human
aagguacuucaaau

SEQ ID NO: 3247891 - RNA, 15 nt, Human
aagggugaaaauuau

SEQ ID NO: 3247892 - RNA, 16 nt, Human
aagggugaaaauuauu

SEQ ID NO: 3247893 - RNA, 13 nt, Human
aagguacuucaaa

SEQ ID NO: 3247894 - RNA, 12 nt, Human
guuucaaacuuu

SEQ ID NO: 3247895 - RNA, 20 nt, Human
guuauuauauuuacaaaugg

SEQ ID NO: 3247896 - RNA, 13 nt, Human
aagcuccagguag

SEQ ID NO: 3247897 - RNA, 14 nt, Human
aagcuccagguaga

SEQ ID NO: 3247898 - RNA, 20 nt, Human
aagcucacagaccuuugaac

SEQ ID NO: 3247899 - RNA, 17 nt, Human
aagccugcaauuucaua

SEQ ID NO: 3247900 - RNA, 22 nt, Human
aagccugcaauuucauaugcug

SEQ ID NO: 3247901 - RNA, 16 nt, Human
aagcauuuagauguau

SEQ ID NO: 3247902 - RNA, 13 nt, Human
aagcauuguaaau

SEQ ID NO: 3247903 - RNA, 13 nt, Human
aagaugaaaauau

SEQ ID NO: 3247904 - RNA, 14 nt, Human
aagaugaaaauauu

SEQ ID NO: 3247905 - RNA, 13 nt, Human
aagauguagagga

SEQ ID NO: 3247906 - RNA, 16 nt, Human
aagacugcacaucaaa

SEQ ID NO: 3247907 - RNA, 23 nt, Human
aagaccuugcuuaugauugcaga

SEQ ID NO: 3247908 - RNA, 21 nt, Human
aagaccuuuggagcaaagcug

SEQ ID NO: 3247909 - RNA, 23 nt, Human
aagaggaaugaaguacucauaca

SEQ ID NO: 3247910 - RNA, 17 nt, Human
guaguguuggagaagaa

SEQ ID NO: 3247911 - RNA, 20 nt, Human
guaguguuggagaagaacug

SEQ ID NO: 3247912 - RNA, 16 nt, Human
guauauuuuauaucaa

SEQ ID NO: 3247913 - RNA, 15 nt, Human
guauaaaauaauuuu

SEQ ID NO: 3247914 - RNA, 21 nt, Human
guauaaaauaauuuuuauauu

SEQ ID NO: 3247915 - RNA, 18 nt, Human
guauguacuucaugcugu

SEQ ID NO: 3247916 - RNA, 16 nt, Human
gucaaauugugugaaa

SEQ ID NO: 3247917 - RNA, 15 nt, Human
guauuuuugacagaa

SEQ ID NO: 3247918 - RNA, 12 nt, Human
guauuuuugaca

SEQ ID NO: 3247919 - RNA, 15 nt, Human
aacacagcaagggug

SEQ ID NO: 3247920 - RNA, 22 nt, Human
aacagugauuaccagggacuga

SEQ ID NO: 3247921 - RNA, 15 nt, Human
aacagugauuaccag

SEQ ID NO: 3247922 - RNA, 16 nt, Human
aacagauaaauaguuu

SEQ ID NO: 3247923 - RNA, 13 nt, Human
aacagauaaucag

SEQ ID NO: 3247924 - RNA, 17 nt, Human
aacaaugcuguauuuua

SEQ ID NO: 3247925 - RNA, 22 nt, Human
aacaaugcuguauuuuaaaaga

SEQ ID NO: 3247926 - RNA, 15 nt, Human
aacacaacuauauug

SEQ ID NO: 3247927 - RNA, 16 nt, Human
aacacaacuauauugu

SEQ ID NO: 3247928 - RNA, 12 nt, Human
aacaauaaaaga

SEQ ID NO: 3247929 - RNA, 14 nt, Human
aacaaugcuguauu

SEQ ID NO: 3247930 - RNA, 15 nt, Human
aacaaugcuguauuu

SEQ ID NO: 3247931 - RNA, 20 nt, Human
aaauuuuuucucuaggaaau

SEQ ID NO: 3247932 - RNA, 19 nt, Human
aacaagaugguucuagcau

SEQ ID NO: 3247933 - RNA, 21 nt, Human
gugagaugcuagaacucccuu

SEQ ID NO: 3247934 - RNA, 12 nt, Human
aacugaaaucau

SEQ ID NO: 3247935 - RNA, 19 nt, Human
aacugcacugucaagauga

SEQ ID NO: 3247936 - RNA, 19 nt, Human
aacuggacugguucaaaug

SEQ ID NO: 3247937 - RNA, 17 nt, Human
aacugggacaggggaga

SEQ ID NO: 3247938 - RNA, 17 nt, Human
gugaugggaaagcauug

SEQ ID NO: 3247939 - RNA, 21 nt, Human
aacuucagcgguuuauauaag

SEQ ID NO: 3247940 - RNA, 18 nt, Human
aacuucccagugaauucu

SEQ ID NO: 3247941 - RNA, 18 nt, Human
aacuuccagauccuggaa

SEQ ID NO: 3247942 - RNA, 21 nt, Human
aacuagaguuuagcuggaaaa

SEQ ID NO: 3247943 - RNA, 23 nt, Human
aacuaucucauuuccaagcaagu

SEQ ID NO: 3247944 - RNA, 18 nt, Human
aaccuugaaaacuuuaug

SEQ ID NO: 3247945 - RNA, 16 nt, Human
gucuuucacauuuaaa

SEQ ID NO: 3247946 - RNA, 20 nt, Human
aaccugagccccaaaaggua

SEQ ID NO: 3247947 - RNA, 18 nt, Human
aaccugagccccaaaagg

SEQ ID NO: 3247948 - RNA, 23 nt, Human
aacccaaauguucaucaaugaau

SEQ ID NO: 3247949 - RNA, 18 nt, Human
aacccaaguccaagcaua

SEQ ID NO: 3247950 - RNA, 14 nt, Human
agcaacgcaggccc

SEQ ID NO: 3247951 - RNA, 23 nt, Human
agcaacgcaggcccccaggugcc

SEQ ID NO: 3247952 - RNA, 15 nt, Human
agauucccugagcag

SEQ ID NO: 3247953 - RNA, 22 nt, Human
ugacuucuaaguaaaaccacag

SEQ ID NO: 3247954 - RNA, 23 nt, Human
ugacuucuaaguaaaaccacagc

SEQ ID NO: 3247955 - RNA, 15 nt, Human
ugacuucuaaguaaa

SEQ ID NO: 3247956 - RNA, 16 nt, Human
ugacacuuaaaaaugg

SEQ ID NO: 3247957 - RNA, 17 nt, Human
ugacacuuaaaaauggu

SEQ ID NO: 3247958 - RNA, 16 nt, Human
agaugcaguucugaag

SEQ ID NO: 3247959 - RNA, 18 nt, Human
agauggaaugcuguguua

SEQ ID NO: 3247960 - RNA, 13 nt, Human
agauggaaugcug

SEQ ID NO: 3247961 - RNA, 15 nt, Human
agauggaaugcugug

SEQ ID NO: 3247962 - RNA, 15 nt, Human
ugaauacuuuauaaa

SEQ ID NO: 3247963 - RNA, 18 nt, Human
agaguauuuuugacagaa

SEQ ID NO: 3247964 - RNA, 17 nt, Human
agaguauuuuugacaga

SEQ ID NO: 3247965 - RNA, 23 nt, Human
ugaaaguacauuuggagacacaa

SEQ ID NO: 3247966 - RNA, 14 nt, Human
ugaaaguacauuug

SEQ ID NO: 3247967 - RNA, 14 nt, Human
agaguauuuuugac

SEQ ID NO: 3247968 - RNA, 17 nt, Human
agaguuuagcuggaaaa

SEQ ID NO: 3247969 - RNA, 15 nt, Human
agaguauuuuugaca

SEQ ID NO: 3247970 - RNA, 20 nt, Human
agaguauuuuugacagaaua

SEQ ID NO: 3247971 - RNA, 22 nt, Human
ugaaaaagaccuuuggagcaaa

SEQ ID NO: 3247972 - RNA, 22 nt, Human
ugaaaaaguucugcagauaaac

SEQ ID NO: 3247973 - RNA, 20 nt, Human
ugaaaagcuccauuuuuagu

SEQ ID NO: 3247974 - RNA, 19 nt, Human
ugaaacucguuaauuugua

SEQ ID NO: 3247975 - RNA, 14 nt, Human
agagagaaaauaaa

SEQ ID NO: 3247976 - RNA, 20 nt, Human
agagcaaaauugauguguuu

SEQ ID NO: 3247977 - RNA, 14 nt, Human
agaaucacuugaac

SEQ ID NO: 3247978 - RNA, 21 nt, Human
agacauagaauuaacacauga

SEQ ID NO: 3247979 - RNA, 14 nt, Human
agacauagaauuaa

SEQ ID NO: 3247980 - RNA, 18 nt, Human
agacaucaacagauaaau

SEQ ID NO: 3247981 - RNA, 17 nt, Human
agacaucaacagauaaa

SEQ ID NO: 3247982 - RNA, 19 nt, Human
agacauucuuccaaaaaga

SEQ ID NO: 3247983 - RNA, 12 nt, Human
agacuauucaaa

SEQ ID NO: 3247984 - RNA, 14 nt, Human
agacuauucaaaca

SEQ ID NO: 3247985 - RNA, 15 nt, Human
agacuauucaaacag

SEQ ID NO: 3247986 - RNA, 15 nt, Human
ucuuuaacucauaaa

SEQ ID NO: 3247987 - RNA, 23 nt, Human
agaaagacuauucaaacagucuc

SEQ ID NO: 3247988 - RNA, 16 nt, Human
agaaagacuauucaaa

SEQ ID NO: 3247989 - RNA, 20 nt, Human
agaaagcagaacagugauua

SEQ ID NO: 3247990 - RNA, 18 nt, Human
agaaagcagaacagugau

SEQ ID NO: 3247991 - RNA, 17 nt, Human
agaaagcagaacaguga

SEQ ID NO: 3247992 - RNA, 16 nt, Human
agaaacacaacuauau

SEQ ID NO: 3247993 - RNA, 15 nt, Human
agaaacuggaacucu

SEQ ID NO: 3247994 - RNA, 20 nt, Human
ucugcccauccugccccuga

SEQ ID NO: 3247995 - RNA, 19 nt, Human
agaagcaccaaucaugaau

SEQ ID NO: 3247996 - RNA, 19 nt, Human
agaagcaacccaaauguuc

SEQ ID NO: 3247997 - RNA, 16 nt, Human
agaacucccuuucaac

SEQ ID NO: 3247998 - RNA, 15 nt, Human
agaacucccuuucaa

SEQ ID NO: 3247999 - RNA, 17 nt, Human
agaacucccuuucaaca

SEQ ID NO: 3248000 - RNA, 13 nt, Human
agaaguugauaug

SEQ ID NO: 3248001 - RNA, 16 nt, Human
agaaggaucuucaucu

SEQ ID NO: 3248002 - RNA, 14 nt, Human
agaagcuccaggua

SEQ ID NO: 3248003 - RNA, 23 nt, Human
acuugaacccgggaggcagaggu

SEQ ID NO: 3248004 - RNA, 21 nt, Human
acuugaacccgggaggcagag

SEQ ID NO: 3248005 - RNA, 18 nt, Human
acuucuaaguaaaaccac

SEQ ID NO: 3248006 - RNA, 19 nt, Human
acuucuaaguaaaaccaca

SEQ ID NO: 3248007 - RNA, 13 nt, Human
acuucuaaguaaa

SEQ ID NO: 3248008 - RNA, 14 nt, Human
acuucccuuucugc

SEQ ID NO: 3248009 - RNA, 22 nt, Human
acuucccuuucugcuuguguua

SEQ ID NO: 3248010 - RNA, 17 nt, Human
ucuagcauggcauauuu

SEQ ID NO: 3248011 - RNA, 17 nt, Human
acuucccagugaauucu

SEQ ID NO: 3248012 - RNA, 13 nt, Human
ucuauaauuuaaa

SEQ ID NO: 3248013 - RNA, 20 nt, Human
acuuccagauccuggaaauc

SEQ ID NO: 3248014 - RNA, 16 nt, Human
ucuacauacuauggaa

SEQ ID NO: 3248015 - RNA, 21 nt, Human
ucuaagauaguaacaaugaag

SEQ ID NO: 3248016 - RNA, 22 nt, Human
acugucagcuccccucggagaa

SEQ ID NO: 3248017 - RNA, 23 nt, Human
acugucagcuccccucggagaag

SEQ ID NO: 3248018 - RNA, 22 nt, Human
acugaagaagcaccaaucauga

SEQ ID NO: 3248019 - RNA, 12 nt, Human
acugaagaagca

SEQ ID NO: 3248020 - RNA, 20 nt, Human
acuagaguuuagcuggaaaa

SEQ ID NO: 3248021 - RNA, 13 nt, Human
acuauucaaacag

SEQ ID NO: 3248022 - RNA, 14 nt, Human
acuauucaaacagu

SEQ ID NO: 3248023 - RNA, 16 nt, Human
acuauucaaacagucu

SEQ ID NO: 3248024 - RNA, 22 nt, Human
acuaugacauaaaaacaacuuu

SEQ ID NO: 3248025 - RNA, 20 nt, Human
acucauuuuaaaaaauggaa

SEQ ID NO: 3248026 - RNA, 14 nt, Human
acucagaauauugc

SEQ ID NO: 3248027 - RNA, 14 nt, Human
acuccagaaaguga

SEQ ID NO: 3248028 - RNA, 17 nt, Human
uccucuccccaugaugu

SEQ ID NO: 3248029 - RNA, 21 nt, Human
uccugaaaacccuugccaugu

SEQ ID NO: 3248030 - RNA, 13 nt, Human
acugaaacuuccc

SEQ ID NO: 3248031 - RNA, 17 nt, Human
accugagccccaaaagg

SEQ ID NO: 3248032 - RNA, 12 nt, Human
accugagcccca

SEQ ID NO: 3248033 - RNA, 16 nt, Human
ucauaauaaguugcau

SEQ ID NO: 3248034 - RNA, 19 nt, Human
uccaaaaagauuuucagaa

SEQ ID NO: 3248035 - RNA, 16 nt, Human
acgcucucuggccuuc

SEQ ID NO: 3248036 - RNA, 15 nt, Human
acgcucucuggccuu

SEQ ID NO: 3248037 - RNA, 14 nt, Human
acgcucucuggccu

SEQ ID NO: 3248038 - RNA, 17 nt, Human
acgcucucuggccuucg

SEQ ID NO: 3248039 - RNA, 20 nt, Human
acgaagaguauuuuugacag

SEQ ID NO: 3248040 - RNA, 22 nt, Human
acgaagaguauuuuugacagaa

SEQ ID NO: 3248041 - RNA, 22 nt, Human
uccaugaagauguagaggagaa

SEQ ID NO: 3248042 - RNA, 16 nt, Human
acccaaauguucauca

SEQ ID NO: 3248043 - RNA, 23 nt, Human
ucaauauuucagauaaucacaau

SEQ ID NO: 3248044 - RNA, 17 nt, Human
acauuguaaauaguauu

SEQ ID NO: 3248045 - RNA, 19 nt, Human
acauuguaaauaguauuug

SEQ ID NO: 3248046 - RNA, 21 nt, Human
acauuguaaauaguauuugag

SEQ ID NO: 3248047 - RNA, 17 nt, Human
ucacagccagacuggca

SEQ ID NO: 3248048 - RNA, 23 nt, Human
ucacagccagacuggcacaguuu

SEQ ID NO: 3248049 - RNA, 16 nt, Human
ucacagaccuuugaac

SEQ ID NO: 3248050 - RNA, 13 nt, Human
ucaauuuaaaaaa

SEQ ID NO: 3248051 - RNA, 12 nt, Human
ucaauuuaaaaa

SEQ ID NO: 3248052 - RNA, 16 nt, Human
accacaagacugcaca

SEQ ID NO: 3248053 - RNA, 14 nt, Human
accaacacgagcag

SEQ ID NO: 3248054 - RNA, 19 nt, Human
accaacacgagcaggcuac

SEQ ID NO: 3248055 - RNA, 16 nt, Human
accaaauaaaaauauu

SEQ ID NO: 3248056 - RNA, 18 nt, Human
accaaauaaaaauauugu

SEQ ID NO: 3248057 - RNA, 20 nt, Human
ucaaacagucucaggaaauc

SEQ ID NO: 3248058 - RNA, 21 nt, Human
ucaaacagucucaggaaauca

SEQ ID NO: 3248059 - RNA, 13 nt, Human
ucaaacagucuca

SEQ ID NO: 3248060 - RNA, 15 nt, Human
uauuuuuguagcacu

SEQ ID NO: 3248061 - RNA, 22 nt, Human
uauuuuaauaauguuucaaaca

SEQ ID NO: 3248062 - RNA, 19 nt, Human
uauuuuaauaauguuucaa

SEQ ID NO: 3248063 - RNA, 16 nt, Human
uauuuuguucauacau

SEQ ID NO: 3248064 - RNA, 15 nt, Human
uauuuuguucauaca

SEQ ID NO: 3248065 - RNA, 13 nt, Human
uauuuuucacaua

SEQ ID NO: 3248066 - RNA, 12 nt, Human
uauuuuucacau

SEQ ID NO: 3248067 - RNA, 13 nt, Human
uauuuuuguagca

SEQ ID NO: 3248068 - RNA, 14 nt, Human
uauuuuaaaagaau

SEQ ID NO: 3248069 - RNA, 18 nt, Human
uauuuuaaaagaaugauu

SEQ ID NO: 3248070 - RNA, 14 nt, Human
uauguguaaaaugu

SEQ ID NO: 3248071 - RNA, 19 nt, Human
aguuuucugagaaagacua

SEQ ID NO: 3248072 - RNA, 18 nt, Human
aguuuucugagaaagacu

SEQ ID NO: 3248073 - RNA, 23 nt, Human
aguuuucugagaaagacuauuca

SEQ ID NO: 3248074 - RNA, 22 nt, Human
auaaaauaauuuuuauauuuga

SEQ ID NO: 3248075 - RNA, 12 nt, Human
auaaaauaauuu

SEQ ID NO: 3248076 - RNA, 14 nt, Human
uuaaguauguguaa

SEQ ID NO: 3248077 - RNA, 13 nt, Human
uguuucaaacaua

SEQ ID NO: 3248078 - RNA, 14 nt, Human
aguuuaaauuguaa

SEQ ID NO: 3248079 - RNA, 19 nt, Human
uuagaaacacaacuauauu

SEQ ID NO: 3248080 - RNA, 13 nt, Human
auaacugugaagu

SEQ ID NO: 3248081 - RNA, 22 nt, Human
auaacgauaaaagacagugaaa

SEQ ID NO: 3248082 - RNA, 13 nt, Human
auaaauaaaaaua

SEQ ID NO: 3248083 - RNA, 15 nt, Human
auaaauaguuuauga

SEQ ID NO: 3248084 - RNA, 18 nt, Human
auaaauauuuuugccaua

SEQ ID NO: 3248085 - RNA, 18 nt, Human
auaauccuaaacauauga

SEQ ID NO: 3248086 - RNA, 14 nt, Human
aguguuggagaaga

SEQ ID NO: 3248087 - RNA, 16 nt, Human
aguguuggagaagaac

SEQ ID NO: 3248088 - RNA, 17 nt, Human
aguguuggagaagaacu

SEQ ID NO: 3248089 - RNA, 18 nt, Human
aguguuggagaagaacug

SEQ ID NO: 3248090 - RNA, 19 nt, Human
aguucggugagcuacaaau

SEQ ID NO: 3248091 - RNA, 15 nt, Human
aguucuacauaagua

SEQ ID NO: 3248092 - RNA, 12 nt, Human
uguugugaaugu

SEQ ID NO: 3248093 - RNA, 13 nt, Human
uguugugaauguu

SEQ ID NO: 3248094 - RNA, 14 nt, Human
uguugugauguauu

SEQ ID NO: 3248095 - RNA, 20 nt, Human
uguugugauguauucuagcu

SEQ ID NO: 3248096 - RNA, 14 nt, Human
agugcaaauuguca

SEQ ID NO: 3248097 - RNA, 18 nt, Human
agugcaaauugucacagg

SEQ ID NO: 3248098 - RNA, 21 nt, Human
agugcaaauugucacaggaca

SEQ ID NO: 3248099 - RNA, 21 nt, Human
agugccuguaaucacagcuac

SEQ ID NO: 3248100 - RNA, 19 nt, Human
aguagauaggccaugggca

SEQ ID NO: 3248101 - RNA, 13 nt, Human
aguagaacagaua

SEQ ID NO: 3248102 - RNA, 19 nt, Human
aguagaacagauaaucagu

SEQ ID NO: 3248103 - RNA, 16 nt, Human
uguagaggagaaacug

SEQ ID NO: 3248104 - RNA, 18 nt, Human
uguagaggagaaacugga

SEQ ID NO: 3248105 - RNA, 16 nt, Human
agucaggaaagagaac

SEQ ID NO: 3248106 - RNA, 15 nt, Human
agucaggaaagagaa

SEQ ID NO: 3248107 - RNA, 20 nt, Human
ugucaaucagccuaguugau

SEQ ID NO: 3248108 - RNA, 21 nt, Human
ugucaauaaaauccauacauu

SEQ ID NO: 3248109 - RNA, 22 nt, Human
aguauuucuaugaaauauuaug

SEQ ID NO: 3248110 - RNA, 16 nt, Human
aguauuugagaguucu

SEQ ID NO: 3248111 - RNA, 13 nt, Human
aguauuucuauga

SEQ ID NO: 3248112 - RNA, 15 nt, Human
aguauuucuaugaaa

SEQ ID NO: 3248113 - RNA, 23 nt, Human
ugucauuugcuggagcucugccc

SEQ ID NO: 3248114 - RNA, 17 nt, Human
agggcagggacaggaua

SEQ ID NO: 3248115 - RNA, 23 nt, Human
agguacuucaaauccuugaagau

SEQ ID NO: 3248116 - RNA, 19 nt, Human
aggucauauuaauauauuu

SEQ ID NO: 3248117 - RNA, 18 nt, Human
aggucauauuaauauauu

SEQ ID NO: 3248118 - RNA, 16 nt, Human
aggucauauuaauaua

SEQ ID NO: 3248119 - RNA, 20 nt, Human
ugguaaggggaauugaggac

SEQ ID NO: 3248120 - RNA, 15 nt, Human
ugcuacaaaaacaca

SEQ ID NO: 3248121 - RNA, 16 nt, Human
ugcuacaaaaacacag

SEQ ID NO: 3248122 - RNA, 17 nt, Human
ugcuacaaaaacacagc

SEQ ID NO: 3248123 - RNA, 18 nt, Human
ugcuacaaaaacacagca

SEQ ID NO: 3248124 - RNA, 19 nt, Human
ugcuacaaaaacacagcaa

SEQ ID NO: 3248125 - RNA, 20 nt, Human
ugcuacaaaaacacagcaag

SEQ ID NO: 3248126 - RNA, 17 nt, Human
agcuugaaacugagaug

SEQ ID NO: 3248127 - RNA, 16 nt, Human
agcuguucacagccag

SEQ ID NO: 3248128 - RNA, 19 nt, Human
agcuguucacagccagacu

SEQ ID NO: 3248129 - RNA, 14 nt, Human
agcuguucacagcc

SEQ ID NO: 3248130 - RNA, 23 nt, Human
aggaaaucaaauaugcaaagcac

SEQ ID NO: 3248131 - RNA, 12 nt, Human
aggaaauauuua

SEQ ID NO: 3248132 - RNA, 14 nt, Human
ugcucauggaauug

SEQ ID NO: 3248133 - RNA, 11 nt, Human
ugcucauggaa

SEQ ID NO: 3248134 - RNA, 23 nt, Human
agcuuuaucaaagggugaaaauu

SEQ ID NO: 3248135 - RNA, 17 nt, Human
aggacacugauaugggu

SEQ ID NO: 3248136 - RNA, 13 nt, Human
ugcuguauuuuaa

SEQ ID NO: 3248137 - RNA, 21 nt, Human
ugcuguauuuuaaaagaauga

SEQ ID NO: 3248138 - RNA, 22 nt, Human
ugcuguauuuuaaaagaaugau

SEQ ID NO: 3248139 - RNA, 13 nt, Human
uggagaagaacug

SEQ ID NO: 3248140 - RNA, 13 nt, Human
uggaaaggcagcu

SEQ ID NO: 3248141 - RNA, 19 nt, Human
uggcacaguuuucugagaa

SEQ ID NO: 3248142 - RNA, 18 nt, Human
uggcacaguuuucugaga

SEQ ID NO: 3248143 - RNA, 17 nt, Human
uggcauauuuuucacau

SEQ ID NO: 3248144 - RNA, 16 nt, Human
uggcauauuuuucaca

SEQ ID NO: 3248145 - RNA, 20 nt, Human
agccuuggggcugaugcagu

SEQ ID NO: 3248146 - RNA, 18 nt, Human
agcuacuugggaggcuga

SEQ ID NO: 3248147 - RNA, 17 nt, Human
agcuacuugggaggcug

SEQ ID NO: 3248148 - RNA, 18 nt, Human
agccccgugggguuccuc

SEQ ID NO: 3248149 - RNA, 15 nt, Human
agccucauguccacu

SEQ ID NO: 3248150 - RNA, 22 nt, Human
agccugaaagaggaaugaagua

SEQ ID NO: 3248151 - RNA, 12 nt, Human
ugauuaaaccaa

SEQ ID NO: 3248152 - RNA, 14 nt, Human
ugauuaccagggac

SEQ ID NO: 3248153 - RNA, 14 nt, Human
ugaugaucuuuaaa

SEQ ID NO: 3248154 - RNA, 22 nt, Human
ugauguuuagaaacacaacuau

SEQ ID NO: 3248155 - RNA, 12 nt, Human
ugaugaagaagu

SEQ ID NO: 3248156 - RNA, 17 nt, Human
ugaugaagaaguugaua

SEQ ID NO: 3248157 - RNA, 14 nt, Human
agccagacuggcac

SEQ ID NO: 3248158 - RNA, 20 nt, Human
agcaugucgucaaagcugaa

SEQ ID NO: 3248159 - RNA, 17 nt, Human
agcaugucgucaaagcu

SEQ ID NO: 3248160 - RNA, 22 nt, Human
agcauggcauauuuuucacaua

SEQ ID NO: 3248161 - RNA, 21 nt, Human
agcauggcauauuuuucacau

SEQ ID NO: 3248162 - RNA, 19 nt, Human
agcauggcauauuuuucac

SEQ ID NO: 3248163 - RNA, 18 nt, Human
agcauggcauauuuuuca

SEQ ID NO: 3248164 - RNA, 17 nt, Human
agcauuguaaaugugcu

SEQ ID NO: 3248165 - RNA, 18 nt, Human
agcauuguaaaugugcuu

SEQ ID NO: 3248166 - RNA, 12 nt, Human
ugauaugggucu

SEQ ID NO: 3248167 - RNA, 22 nt, Human
ugaguaacugauuuguaacaag

SEQ ID NO: 3248168 - RNA, 23 nt, Human
agcauaaauguugacaugggaca

SEQ ID NO: 3248169 - RNA, 22 nt, Human
agcauaccaacacgagcaggcu

SEQ ID NO: 3248170 - RNA, 19 nt, Human
ugauacgcaacauaauuaa

SEQ ID NO: 3248171 - RNA, 12 nt, Human
uucccaaauuuc

SEQ ID NO: 3248172 - RNA, 18 nt, Human
uucccaacuccagaaagu

SEQ ID NO: 3248173 - RNA, 13 nt, Human
uucauaugcugua

SEQ ID NO: 3248174 - RNA, 19 nt, Human
uucauacauuguacgaaga

SEQ ID NO: 3248175 - RNA, 13 nt, Human
uucauacauugua

SEQ ID NO: 3248176 - RNA, 23 nt, Human
uucauacauauuuuuguagcacu

SEQ ID NO: 3248177 - RNA, 12 nt, Human
uucauacauauu

SEQ ID NO: 3248178 - RNA, 13 nt, Human
auauauuuaauga

SEQ ID NO: 3248179 - RNA, 17 nt, Human
auaucuaguaugaaauu

SEQ ID NO: 3248180 - RNA, 15 nt, Human
auaucuaguaugaaa

SEQ ID NO: 3248181 - RNA, 14 nt, Human
auaucuaguaugaa

SEQ ID NO: 3248182 - RNA, 13 nt, Human
auaucuuguagcu

SEQ ID NO: 3248183 - RNA, 23 nt, Human
uucacaagacccaaaaggcagaa

SEQ ID NO: 3248184 - RNA, 22 nt, Human
uucacaagacccaaaaggcaga

SEQ ID NO: 3248185 - RNA, 22 nt, Human
auaggaauugacccacaagaaa

SEQ ID NO: 3248186 - RNA, 17 nt, Human
auaggcguaacuaauuu

SEQ ID NO: 3248187 - RNA, 18 nt, Human
uucaaacagucucaggaa

SEQ ID NO: 3248188 - RNA, 17 nt, Human
uuauuuuguucauacau

SEQ ID NO: 3248189 - RNA, 16 nt, Human
uuauuuuguucauaca

SEQ ID NO: 3248190 - RNA, 21 nt, Human
uuauuuuguucauacauauuu

SEQ ID NO: 3248191 - RNA, 19 nt, Human
auauauaacaaugcuguau

SEQ ID NO: 3248192 - RNA, 17 nt, Human
auauaacaaugcuguau

SEQ ID NO: 3248193 - RNA, 20 nt, Human
auaguuguaccgcaauguga

SEQ ID NO: 3248194 - RNA, 13 nt, Human
auagucuuucagu

SEQ ID NO: 3248195 - RNA, 19 nt, Human
uugaaauauugacuuuuua

SEQ ID NO: 3248196 - RNA, 20 nt, Human
auccuagucacuaccuucau

SEQ ID NO: 3248197 - RNA, 20 nt, Human
aucaaauaugcaaagcacug

SEQ ID NO: 3248198 - RNA, 19 nt, Human
uucuaaguaaaaccacagc

SEQ ID NO: 3248199 - RNA, 20 nt, Human
uucuaaguaaaaccacagca

SEQ ID NO: 3248200 - RNA, 17 nt, Human
uucuaaguaaaaccaca

SEQ ID NO: 3248201 - RNA, 19 nt, Human
uucuaacaaaaaaauauau

SEQ ID NO: 3248202 - RNA, 20 nt, Human
uucuaacaaaaaaauauauu

SEQ ID NO: 3248203 - RNA, 14 nt, Human
uucuauaauuuaaa

SEQ ID NO: 3248204 - RNA, 13 nt, Human
uucuauaauuuaa

SEQ ID NO: 3248205 - RNA, 15 nt, Human
augcaguucugaaga

SEQ ID NO: 3248206 - RNA, 17 nt, Human
augcaguucugaagaag

SEQ ID NO: 3248207 - RNA, 17 nt, Human
augccacuaaauugaca

SEQ ID NO: 3248208 - RNA, 15 nt, Human
augccacuaaauuga

SEQ ID NO: 3248209 - RNA, 18 nt, Human
augcaguucugaagaaga

SEQ ID NO: 3248210 - RNA, 19 nt, Human
augcaguucugaagaagau

SEQ ID NO: 3248211 - RNA, 14 nt, Human
uuguuuucauuauc

SEQ ID NO: 3248212 - RNA, 23 nt, Human
uugugugaaagguacuucaaauc

SEQ ID NO: 3248213 - RNA, 20 nt, Human
augagagacacacugaagaa

SEQ ID NO: 3248214 - RNA, 21 nt, Human
augagagacacacugaagaag

SEQ ID NO: 3248215 - RNA, 15 nt, Human
augcaaagcacugac

SEQ ID NO: 3248216 - RNA, 22 nt, Human
augauuaugaauuacauuugua

SEQ ID NO: 3248217 - RNA, 12 nt, Human
augauucccagc

SEQ ID NO: 3248218 - RNA, 15 nt, Human
augcuagaacucccu

SEQ ID NO: 3248219 - RNA, 16 nt, Human
augcuagaacucccuu

SEQ ID NO: 3248220 - RNA, 22 nt, Human
augcugucuacacuaagagaga

SEQ ID NO: 3248221 - RNA, 20 nt, Human
uuuagcuggaaaaguauguu

SEQ ID NO: 3248222 - RNA, 22 nt, Human
uuuagcuggaaaaguauguuag

SEQ ID NO: 3248223 - RNA, 13 nt, Human
uuuauauaagcuu

SEQ ID NO: 3248224 - RNA, 20 nt, Human
auggcuaguaucaaaagaaa

SEQ ID NO: 3248225 - RNA, 16 nt, Human
auggaaugcuguguua

SEQ ID NO: 3248226 - RNA, 15 nt, Human
uuucauaugcuguau

SEQ ID NO: 3248227 - RNA, 13 nt, Human
augaaugaauggc

SEQ ID NO: 3248228 - RNA, 18 nt, Human
augaagauguagaggaga

SEQ ID NO: 3248229 - RNA, 18 nt, Human
augaaauauuauguuaaa

SEQ ID NO: 3248230 - RNA, 13 nt, Human
augaaauauuaug

SEQ ID NO: 3248231 - RNA, 17 nt, Human
augaaauauuauguuaa

SEQ ID NO: 3248232 - RNA, 15 nt, Human
augaaagcagggacu

SEQ ID NO: 3248233 - RNA, 13 nt, Human
aucuuuuucuaac

SEQ ID NO: 3248234 - RNA, 16 nt, Human
uuguauaaaauaauuu

SEQ ID NO: 3248235 - RNA, 15 nt, Human
uuguauaaaauaauu

SEQ ID NO: 3248236 - RNA, 16 nt, Human
uuguaucacaaaucuu

SEQ ID NO: 3248237 - RNA, 17 nt, Human
uuguauaaaauaauuuu

SEQ ID NO: 3248238 - RNA, 13 nt, Human
augagagacacac

SEQ ID NO: 3248239 - RNA, 14 nt, Human
augagagacacacu

SEQ ID NO: 3248240 - RNA, 17 nt, Human
augagagacacacugaa

SEQ ID NO: 3248241 - RNA, 19 nt, Human
augagagacacacugaaga

SEQ ID NO: 3248242 - RNA, 13 nt, Human
aucucaauauuuc

SEQ ID NO: 3248243 - RNA, 14 nt, Human
aucucauuuccaag

SEQ ID NO: 3248244 - RNA, 23 nt, Human
aucucauuuccaagcaaguauua

SEQ ID NO: 3248245 - RNA, 18 nt, Human
aucucauaauuuauacag

SEQ ID NO: 3248246 - RNA, 21 nt, Human
aucucauuuccaagcaaguau

SEQ ID NO: 3248247 - RNA, 17 nt, Human
aucucauaauuuauaca

SEQ ID NO: 3248248 - RNA, 18 nt, Human
uugauggugguauguuuu

SEQ ID NO: 3248249 - RNA, 19 nt, Human
uugauggugguauguuuuc

SEQ ID NO: 3248250 - RNA, 11 nt, Human
uugauguguuu

SEQ ID NO: 3248251 - RNA, 13 nt, Human
uugcccuguuaaa

SEQ ID NO: 3248252 - RNA, 15 nt, Human
auuacauuuguauaa

SEQ ID NO: 3248253 - RNA, 20 nt, Human
auuacauuuguauaaaauaa

SEQ ID NO: 3248254 - RNA, 13 nt, Human
auuacauuuguau

SEQ ID NO: 3248255 - RNA, 15 nt, Human
auuaauauauuucca

SEQ ID NO: 3248256 - RNA, 13 nt, Human
auuaaguaaugau

SEQ ID NO: 3248257 - RNA, 15 nt, Human
auuaaguaaugauaa

SEQ ID NO: 3248258 - RNA, 18 nt, Human
auuaucucaaaacugcac

SEQ ID NO: 3248259 - RNA, 23 nt, Human
auuaucucaaaacugcacuguca

SEQ ID NO: 3248260 - RNA, 15 nt, Human
auuauauuuacaaau

SEQ ID NO: 3248261 - RNA, 16 nt, Human
auuauauuuacaaaug

SEQ ID NO: 3248262 - RNA, 20 nt, Human
auuccacuuauaggaauuga

SEQ ID NO: 3248263 - RNA, 14 nt, Human
auucaaacagucuc

SEQ ID NO: 3248264 - RNA, 15 nt, Human
auucaaacagucuca

SEQ ID NO: 3248265 - RNA, 13 nt, Human
uuuuaaaaaagaa

SEQ ID NO: 3248266 - RNA, 14 nt, Human
uuuuaaaagaauga

SEQ ID NO: 3248267 - RNA, 11 nt, Human
uuuuaagaaau

SEQ ID NO: 3248268 - RNA, 19 nt, Human
uuuguagcacugacagauu

SEQ ID NO: 3248269 - RNA, 17 nt, Human
uuuguagcacugacaga

SEQ ID NO: 3248270 - RNA, 19 nt, Human
uuugcuaagcauuccaacu

SEQ ID NO: 3248271 - RNA, 11 nt, Human
uuugcucaugg

SEQ ID NO: 3248272 - RNA, 12 nt, Human
uuugcucaugga

SEQ ID NO: 3248273 - RNA, 19 nt, Human
auguucaucaaugaaugaa

SEQ ID NO: 3248274 - RNA, 15 nt, Human
auguugacaugggac

SEQ ID NO: 3248275 - RNA, 16 nt, Human
uuuucuauaauuuaaa

SEQ ID NO: 3248276 - RNA, 14 nt, Human
uuuuauaauuuugu

SEQ ID NO: 3248277 - RNA, 23 nt, Human
uuuuauggaggcuuugcauagau

SEQ ID NO: 3248278 - RNA, 19 nt, Human
uuuuauggcacuaguauuu

SEQ ID NO: 3248279 - RNA, 15 nt, Human
auuaaaagaauauuu

SEQ ID NO: 3248280 - RNA, 16 nt, Human
auuaaaagaauauuuu

SEQ ID NO: 3248281 - RNA, 20 nt, Human
auuaaaaaaucaguuguaca

SEQ ID NO: 3248282 - RNA, 18 nt, Human
auguuucaaacauauaua

SEQ ID NO: 3248283 - RNA, 15 nt, Human
auguugugauguauu

SEQ ID NO: 3248284 - RNA, 20 nt, Human
auuuauuacuguaagaaaau

SEQ ID NO: 3248285 - RNA, 22 nt, Human
auuuauuacuguaagaaaauau

SEQ ID NO: 3248286 - RNA, 18 nt, Human
auuuguaguguuggagaa

SEQ ID NO: 3248287 - RNA, 23 nt, Human
auuugguaaggggaauugaggac

SEQ ID NO: 3248288 - RNA, 20 nt, Human
auuuggagacacaacuauuu

SEQ ID NO: 3248289 - RNA, 21 nt, Human
auuuguauaaaauaauuuuua

SEQ ID NO: 3248290 - RNA, 15 nt, Human
auuuguaucacaaau

SEQ ID NO: 3248291 - RNA, 15 nt, Human
auuuuaauaauguuu

SEQ ID NO: 3248292 - RNA, 12 nt, Human
auuuuaauaaug

SEQ ID NO: 3248293 - RNA, 14 nt, Human
auuuuaauaauguu

SEQ ID NO: 3248294 - RNA, 14 nt, Human
auuguauuacaaau

SEQ ID NO: 3248295 - RNA, 13 nt, Human
auugugccccugc

SEQ ID NO: 3248296 - RNA, 21 nt, Human
auugcuaaucaccaaaggcuc

SEQ ID NO: 3248297 - RNA, 16 nt, Human
auuuacaaaugggaaa

SEQ ID NO: 3248298 - RNA, 19 nt, Human
auuuaaagcuuauuaaaac

SEQ ID NO: 3248299 - RNA, 20 nt, Human
auugacacuuaaaaaugguu

SEQ ID NO: 3248300 - RNA, 21 nt, Human
auugacccacaagaaaugaaa

SEQ ID NO: 3248301 - RNA, 17 nt, Human
auguuccuagugaaaga

SEQ ID NO: 3248302 - RNA, 15 nt, Human
auguuccuagugaaa

SEQ ID NO: 3248303 - RNA, 16 nt, Human
auguuccuagugaaag

SEQ ID NO: 3248304 - RNA, 15 nt, Human
auguguaaaauguga

SEQ ID NO: 3248305 - RNA, 21 nt, Human
augucaaucagccuaguugau

SEQ ID NO: 3248306 - RNA, 16 nt, Human
augucaaucagccuag

SEQ ID NO: 3248307 - RNA, 15 nt, Human
augugaacacaucag

SEQ ID NO: 3248308 - RNA, 16 nt, Human
augaucuuuaaaauac

SEQ ID NO: 3248309 - RNA, 18 nt, Human
augaugaucuuuaaaaua

SEQ ID NO: 3248310 - RNA, 21 nt, Human
augaugaucuuuaaaauacac

SEQ ID NO: 3248311 - RNA, 21 nt, Human
augaaguacucauacauguua

SEQ ID NO: 3248312 - RNA, 13 nt, Human
augaaguacucau

SEQ ID NO: 3248313 - RNA, 20 nt, Human
augaaguccaagcauuuaga

SEQ ID NO: 3248314 - RNA, 23 nt, Human
augaaguccaagcauuuagaugu

SEQ ID NO: 3248315 - RNA, 19 nt, Human
aucuaguaugaaauuauau

SEQ ID NO: 3248316 - RNA, 18 nt, Human
aucuaguaugaaauuaua

SEQ ID NO: 3248317 - RNA, 17 nt, Human
aucuaguaugaaauuau

SEQ ID NO: 3248318 - RNA, 16 nt, Human
aucuaguaugaaauua

SEQ ID NO: 3248319 - RNA, 15 nt, Human
aucuaguaugaaauu

SEQ ID NO: 3248320 - RNA, 14 nt, Human
aucuaguaugaaau

SEQ ID NO: 3248321 - RNA, 14 nt, Human
aucaaauaugcaaa

SEQ ID NO: 3248322 - RNA, 22 nt, Human
aucagcuugcccuguuaaaaga

SEQ ID NO: 3248323 - RNA, 13 nt, Human
aucagcuuauugu

SEQ ID NO: 3248324 - RNA, 17 nt, Human
aucaugaauuaguuuua

SEQ ID NO: 3248325 - RNA, 19 nt, Human
auccucaguuuuugugaaa

SEQ ID NO: 3248326 - RNA, 14 nt, Human
auaagccagacauc

SEQ ID NO: 3248327 - RNA, 22 nt, Human
auaagccagacaucaacagaua

SEQ ID NO: 3248328 - RNA, 21 nt, Human
auaagccagacaucaacagau

SEQ ID NO: 3248329 - RNA, 13 nt, Human
auaauguuucaaa

SEQ ID NO: 3248330 - RNA, 18 nt, Human
auaauguuucaaacauau

SEQ ID NO: 3248331 - RNA, 17 nt, Human
auacccagaaaguuauu

SEQ ID NO: 3248332 - RNA, 14 nt, Human
auaacaaugaaagu

SEQ ID NO: 3248333 - RNA, 15 nt, Human
auaacaaugcuguau

SEQ ID NO: 3248334 - RNA, 17 nt, Human
auaacaaugcuguauuu

SEQ ID NO: 3248335 - RNA, 21 nt, Human
auaacaaugcuguauuuuaaa

SEQ ID NO: 3248336 - RNA, 19 nt, Human
auaacaaugcuguauuuua

SEQ ID NO: 3248337 - RNA, 20 nt, Human
auaacaaugcuguauuuuaa

SEQ ID NO: 3248338 - RNA, 22 nt, Human
auaaaaagccugcaauuucaua

SEQ ID NO: 3248339 - RNA, 20 nt, Human
auaaaaagccugcaauuuca

SEQ ID NO: 3248340 - RNA, 15 nt, Human
auagcagcuuauuca

SEQ ID NO: 3248341 - RNA, 23 nt, Human
auauuucagauaaucacaauaca

SEQ ID NO: 3248342 - RNA, 14 nt, Human
auauuauguuaaaa

SEQ ID NO: 3248343 - RNA, 13 nt, Human
auauuauguguuu

SEQ ID NO: 3248344 - RNA, 17 nt, Human
auauuauguguuuccau

SEQ ID NO: 3248345 - RNA, 13 nt, Human
auauuauguuaaa

SEQ ID NO: 3248346 - RNA, 19 nt, Human
agugucaaugcagccccca

SEQ ID NO: 3248347 - RNA, 19 nt, Human
aguugaaaagacuccaaag

SEQ ID NO: 3248348 - RNA, 20 nt, Human
aguugaaaagacuccaaaga

SEQ ID NO: 3248349 - RNA, 14 nt, Human
aguugaaaagacuc

SEQ ID NO: 3248350 - RNA, 18 nt, Human
aguugaaaagacuccaaa

SEQ ID NO: 3248351 - RNA, 23 nt, Human
aguaaaugcuagguuaauuccaa

SEQ ID NO: 3248352 - RNA, 11 nt, Human
aguaaaugcua

SEQ ID NO: 3248353 - RNA, 22 nt, Human
aguaaaugcuagguuaauucca

SEQ ID NO: 3248354 - RNA, 19 nt, Human
aguaacaaugaagauaaaa

SEQ ID NO: 3248355 - RNA, 18 nt, Human
aguauuuuugacagaaua

SEQ ID NO: 3248356 - RNA, 17 nt, Human
aguauuuuugacagaau

SEQ ID NO: 3248357 - RNA, 16 nt, Human
aguauuuuugacagaa

SEQ ID NO: 3248358 - RNA, 13 nt, Human
aguauuuuugaca

SEQ ID NO: 3248359 - RNA, 20 nt, Human
agugaauucuugaaggaaaa

SEQ ID NO: 3248360 - RNA, 15 nt, Human
agggauuagggagag

SEQ ID NO: 3248361 - RNA, 21 nt, Human
aggccaugggcacugugggua

SEQ ID NO: 3248362 - RNA, 15 nt, Human
agggacugaggggag

SEQ ID NO: 3248363 - RNA, 13 nt, Human
aggaaguagagga

SEQ ID NO: 3248364 - RNA, 17 nt, Human
agcgacagugagacucu

SEQ ID NO: 3248365 - RNA, 23 nt, Human
agcuaauguaauaacugugaagu

SEQ ID NO: 3248366 - RNA, 20 nt, Human
agcugcugaaacaacaaaua

SEQ ID NO: 3248367 - RNA, 17 nt, Human
agcuccccucggagaag

SEQ ID NO: 3248368 - RNA, 19 nt, Human
agcuccccucggagaagag

SEQ ID NO: 3248369 - RNA, 20 nt, Human
agcuccccucggagaagagc

SEQ ID NO: 3248370 - RNA, 24 nt, Human
agcaaaauuuuuucucuaggaaau

SEQ ID NO: 3248371 - RNA, 23 nt, Human
agcaaaauuuuuucucuaggaaa

SEQ ID NO: 3248372 - RNA, 23 nt, Human
agcaaagcugaugacaacuuccc

SEQ ID NO: 3248373 - RNA, 21 nt, Human
agcaaagcugaugacaacuuc

SEQ ID NO: 3248374 - RNA, 16 nt, Human
agauguagaggagaaa

SEQ ID NO: 3248375 - RNA, 19 nt, Human
agauguagaggagaaacug

SEQ ID NO: 3248376 - RNA, 14 nt, Human
agaugguucuagca

SEQ ID NO: 3248377 - RNA, 22 nt, Human
agaagagcuguucacagccaga

SEQ ID NO: 3248378 - RNA, 21 nt, Human
agaagagcuguucacagccag

SEQ ID NO: 3248379 - RNA, 17 nt, Human
agaaugauuaugaauua

SEQ ID NO: 3248380 - RNA, 17 nt, Human
agaaugagagacacacu

SEQ ID NO: 3248381 - RNA, 22 nt, Human
agaaugagagacacacugaaga

SEQ ID NO: 3248382 - RNA, 21 nt, Human
agaagugaaaaucuacacucc

SEQ ID NO: 3248383 - RNA, 19 nt, Human
agacccaaaaggcagaagc

SEQ ID NO: 3248384 - RNA, 17 nt, Human
agacccaaaaggcagaa

SEQ ID NO: 3248385 - RNA, 18 nt, Human
agacucugucucagucca

SEQ ID NO: 3248386 - RNA, 13 nt, Human
agaggaaugaagu

SEQ ID NO: 3248387 - RNA, 19 nt, Human
aaagcauuguaaaugugcu

SEQ ID NO: 3248388 - RNA, 20 nt, Human
aaagcauuguaaaugugcuu

SEQ ID NO: 3248389 - RNA, 19 nt, Human
aaaggcagaagcaacccaa

SEQ ID NO: 3248390 - RNA, 20 nt, Human
aaauaaaaauauuguguugu

SEQ ID NO: 3248391 - RNA, 19 nt, Human
aaauaaaccucaaaauguc

SEQ ID NO: 3248392 - RNA, 13 nt, Human
aaagaaacauuug

SEQ ID NO: 3248393 - RNA, 21 nt, Human
aaacccugucucuacuaaaaa

SEQ ID NO: 3248394 - RNA, 17 nt, Human
aaaccucaaaaugucua

SEQ ID NO: 3248395 - RNA, 22 nt, Human
aaaccucaaaaugucuaagaua

SEQ ID NO: 3248396 - RNA, 20 nt, Human
aaaauuauuuuguucauaca

SEQ ID NO: 3248397 - RNA, 18 nt, Human
aaaauuauuuuguucaua

SEQ ID NO: 3248398 - RNA, 16 nt, Human
aaaauuauuuuguuca

SEQ ID NO: 3248399 - RNA, 19 nt, Human
aaaauccauacauuugugu

SEQ ID NO: 3248400 - RNA, 21 nt, Human
aaaaucauuucugcaucagcu

SEQ ID NO: 3248401 - RNA, 14 nt, Human
aaaucuuaacuuga

SEQ ID NO: 3248402 - RNA, 20 nt, Human
aaaugcuagguuaauuccaa

SEQ ID NO: 3248403 - RNA, 20 nt, Human
aaauguucaucaaugaauga

SEQ ID NO: 3248404 - RNA, 17 nt, Human
aaauguucaucaaugaa

SEQ ID NO: 3248405 - RNA, 22 nt, Human
aaauugacacuuaaaaaugguu

SEQ ID NO: 3248406 - RNA, 14 nt, Human
aaauugauguguuu

SEQ ID NO: 3248407 - RNA, 23 nt, Human
aacugagaugugaacacaucagc

SEQ ID NO: 3248408 - RNA, 12 nt, Human
aauaauguuuca

SEQ ID NO: 3248409 - RNA, 14 nt, Human
aauaauguuucaaa

SEQ ID NO: 3248410 - RNA, 17 nt, Human
aaguucugcagauaaac

SEQ ID NO: 3248411 - RNA, 22 nt, Human
aaguugauaugccuuuucccaa

SEQ ID NO: 3248412 - RNA, 10 nt, Human
aauaaaccau

SEQ ID NO: 3248413 - RNA, 17 nt, Human
aauaaaccucaaaaugu

SEQ ID NO: 3248414 - RNA, 14 nt, Human
aauaauaaauauuu

SEQ ID NO: 3248415 - RNA, 20 nt, Human
aauaaaccucaaaaugucua

SEQ ID NO: 3248416 - RNA, 15 nt, Human
aaucaaauaugcaaa

SEQ ID NO: 3248417 - RNA, 16 nt, Human
aaucaaauaugcaaag

SEQ ID NO: 3248418 - RNA, 22 nt, Human
aaucaaauaugcaaagcacuga

SEQ ID NO: 3248419 - RNA, 22 nt, Human
aaucauuucugcaucagcugcu

SEQ ID NO: 3248420 - RNA, 14 nt, Human
aaugauaacuggaa

SEQ ID NO: 3248421 - RNA, 15 nt, Human
aaugauaacuggaaa

SEQ ID NO: 3248422 - RNA, 16 nt, Human
aaugauaacuggaaac

SEQ ID NO: 3248423 - RNA, 14 nt, Human
aauccauacauuug

SEQ ID NO: 3248424 - RNA, 17 nt, Human
aauccauacauuugugu

SEQ ID NO: 3248425 - RNA, 16 nt, Human
aauccauacauuugug

SEQ ID NO: 3248426 - RNA, 15 nt, Human
aauccaaugaaauga

SEQ ID NO: 3248427 - RNA, 19 nt, Human
aagccagauuuuccugaaa

SEQ ID NO: 3248428 - RNA, 12 nt, Human
aaguagaggagg

SEQ ID NO: 3248429 - RNA, 14 nt, Human
aagggauggcaaga

SEQ ID NO: 3248430 - RNA, 17 nt, Human
aagggauggcaagaugu

SEQ ID NO: 3248431 - RNA, 15 nt, Human
aagcagggacuugaa

SEQ ID NO: 3248432 - RNA, 13 nt, Human
aagauuuucagaa

SEQ ID NO: 3248433 - RNA, 23 nt, Human
aagacagugaaagaaaauaacaa

SEQ ID NO: 3248434 - RNA, 21 nt, Human
aagacauucuuccaaaaagau

SEQ ID NO: 3248435 - RNA, 15 nt, Human
aagagaacuuccaga

SEQ ID NO: 3248436 - RNA, 19 nt, Human
acuucaaauccuugaagau

SEQ ID NO: 3248437 - RNA, 14 nt, Human
acuuaaaaaugguu

SEQ ID NO: 3248438 - RNA, 13 nt, Human
acuuaaaaauggu

SEQ ID NO: 3248439 - RNA, 22 nt, Human
acuucugucuucacaacagauu

SEQ ID NO: 3248440 - RNA, 19 nt, Human
acuucagcgguuuauauaa

SEQ ID NO: 3248441 - RNA, 20 nt, Human
acuucaaauccuugaagauu

SEQ ID NO: 3248442 - RNA, 17 nt, Human
acuucagcgguuuauau

SEQ ID NO: 3248443 - RNA, 18 nt, Human
acuucagcgguuuauaua

SEQ ID NO: 3248444 - RNA, 22 nt, Human
acuugggaggcugagaugggag

SEQ ID NO: 3248445 - RNA, 17 nt, Human
acuuuaugcuaagugaa

SEQ ID NO: 3248446 - RNA, 12 nt, Human
acuuuaugcuaa

SEQ ID NO: 3248447 - RNA, 15 nt, Human
acucugucucagucc

SEQ ID NO: 3248448 - RNA, 14 nt, Human
acucuuaagaagac

SEQ ID NO: 3248449 - RNA, 15 nt, Human
acucuuaagaagacu

SEQ ID NO: 3248450 - RNA, 19 nt, Human
acggacgaaccuugaaaac

SEQ ID NO: 3248451 - RNA, 18 nt, Human
acuaguauuucuaugaaa

SEQ ID NO: 3248452 - RNA, 17 nt, Human
accucugccucagaaaa

SEQ ID NO: 3248453 - RNA, 18 nt, Human
accucugccucagaaaac

SEQ ID NO: 3248454 - RNA, 13 nt, Human
acaagaaaugaaa

SEQ ID NO: 3248455 - RNA, 16 nt, Human
acaagaaaugaaagca

SEQ ID NO: 3248456 - RNA, 15 nt, Human
acaagaaaugaaagc

SEQ ID NO: 3248457 - RNA, 21 nt, Human
acaaggaugaauuaaguuuuu

SEQ ID NO: 3248458 - RNA, 18 nt, Human
aauuuugugaagcaaaau

SEQ ID NO: 3248459 - RNA, 13 nt, Human
aauuuugugaagc

SEQ ID NO: 3248460 - RNA, 17 nt, Human
aauuuugugaagcaaaa

SEQ ID NO: 3248461 - RNA, 16 nt, Human
acagaagcuccaggua

SEQ ID NO: 3248462 - RNA, 20 nt, Human
acagugauuaccagggacug

SEQ ID NO: 3248463 - RNA, 21 nt, Human
acagugauuaccagggacuga

SEQ ID NO: 3248464 - RNA, 20 nt, Human
acaucccuuaccugggaaag

SEQ ID NO: 3248465 - RNA, 15 nt, Human
acauaaguaauucaa

SEQ ID NO: 3248466 - RNA, 19 nt, Human
acauaauuaaauuuugagu

SEQ ID NO: 3248467 - RNA, 19 nt, Human
accaaggcugauuaaacca

SEQ ID NO: 3248468 - RNA, 22 nt, Human
caaaauuuuuucucuaggaaau

SEQ ID NO: 3248469 - RNA, 16 nt, Human
caaacugacucuuaag

SEQ ID NO: 3248470 - RNA, 17 nt, Human
caaacugacucuuaaga

SEQ ID NO: 3248471 - RNA, 21 nt, Human
caaacugacucuuaagaagac

SEQ ID NO: 3248472 - RNA, 14 nt, Human
caaaacugcacugu

SEQ ID NO: 3248473 - RNA, 17 nt, Human
caaaacugcacugucaa

SEQ ID NO: 3248474 - RNA, 18 nt, Human
caaaacugcacugucaag

SEQ ID NO: 3248475 - RNA, 18 nt, Human
caaaauaauuuuaagaaa

SEQ ID NO: 3248476 - RNA, 22 nt, Human
caaaauaauuuuaagaaaucaa

SEQ ID NO: 3248477 - RNA, 19 nt, Human
caagaaaugaaagcaggga

SEQ ID NO: 3248478 - RNA, 17 nt, Human
caagaaaugaaagcagg

SEQ ID NO: 3248479 - RNA, 15 nt, Human
caagaaaugaaagca

SEQ ID NO: 3248480 - RNA, 18 nt, Human
caaauguucaucaaugaa

SEQ ID NO: 3248481 - RNA, 14 nt, Human
caaauguucaucaa

SEQ ID NO: 3248482 - RNA, 13 nt, Human
caaauaugcaaag

SEQ ID NO: 3248483 - RNA, 12 nt, Human
caaauaugcaaa

SEQ ID NO: 3248484 - RNA, 16 nt, Human
caaauaaaaauauugu

SEQ ID NO: 3248485 - RNA, 18 nt, Human
caaauaaaaauauugugu

SEQ ID NO: 3248486 - RNA, 15 nt, Human
caaauaaaaauauug

SEQ ID NO: 3248487 - RNA, 16 nt, Human
caaagagagaaaauaa

SEQ ID NO: 3248488 - RNA, 19 nt, Human
caaagagagaaaauaaaga

SEQ ID NO: 3248489 - RNA, 18 nt, Human
cacaagaaaugaaagcag

SEQ ID NO: 3248490 - RNA, 20 nt, Human
cacaagaaaugaaagcaggg

SEQ ID NO: 3248491 - RNA, 22 nt, Human
caauuuuucuuauuucauuucu

SEQ ID NO: 3248492 - RNA, 17 nt, Human
cacagccagacuggcac

SEQ ID NO: 3248493 - RNA, 18 nt, Human
cacagccagacuggcaca

SEQ ID NO: 3248494 - RNA, 19 nt, Human
cacagcaguugaaaagacu

SEQ ID NO: 3248495 - RNA, 21 nt, Human
cacagcaguugaaaagacucc

SEQ ID NO: 3248496 - RNA, 13 nt, Human
cacacugaagaag

SEQ ID NO: 3248497 - RNA, 23 nt, Human
caagggugaugggaaagcauugu

SEQ ID NO: 3248498 - RNA, 21 nt, Human
caagggugaugggaaagcauu

SEQ ID NO: 3248499 - RNA, 17 nt, Human
caauagucaaauugugu

SEQ ID NO: 3248500 - RNA, 19 nt, Human
caauagucaaauuguguga

SEQ ID NO: 3248501 - RNA, 19 nt, Human
caauaauaaauauuuuugc

SEQ ID NO: 3248502 - RNA, 18 nt, Human
caaggaaaaaauaacaau

SEQ ID NO: 3248503 - RNA, 13 nt, Human
ccuaaacauauga

SEQ ID NO: 3248504 - RNA, 17 nt, Human
cccuucuuuccacagaa

SEQ ID NO: 3248505 - RNA, 13 nt, Human
ccuccauccugag

SEQ ID NO: 3248506 - RNA, 12 nt, Human
ccuccauccuga

SEQ ID NO: 3248507 - RNA, 14 nt, Human
ccccaggugccagu

SEQ ID NO: 3248508 - RNA, 23 nt, Human
ccauggcacucuauguucuaaga

SEQ ID NO: 3248509 - RNA, 15 nt, Human
ccauccugaggcucc

SEQ ID NO: 3248510 - RNA, 19 nt, Human
cauuuaaagcuuauuaaaa

SEQ ID NO: 3248511 - RNA, 12 nt, Human
cauuuccaagca

SEQ ID NO: 3248512 - RNA, 23 nt, Human
cauuucugcaucagcugcugaaa

SEQ ID NO: 3248513 - RNA, 16 nt, Human
cauuugcucauggaau

SEQ ID NO: 3248514 - RNA, 15 nt, Human
cauuugcucauggaa

SEQ ID NO: 3248515 - RNA, 14 nt, Human
cauuugcucaugga

SEQ ID NO: 3248516 - RNA, 17 nt, Human
ccaaagaaauguaaggg

SEQ ID NO: 3248517 - RNA, 14 nt, Human
ccaacacgagcagg

SEQ ID NO: 3248518 - RNA, 21 nt, Human
ccaacacgagcaggcuacugu

SEQ ID NO: 3248519 - RNA, 18 nt, Human
ccaaggcuagaaccaccu

SEQ ID NO: 3248520 - RNA, 22 nt, Human
ccacaagaaaugaaagcaggga

SEQ ID NO: 3248521 - RNA, 16 nt, Human
ccacaagaaaugaaag

SEQ ID NO: 3248522 - RNA, 20 nt, Human
ccaauauucauagcagcuua

SEQ ID NO: 3248523 - RNA, 19 nt, Human
ccaaggcugauuaaaccaa

SEQ ID NO: 3248524 - RNA, 23 nt, Human
caugcugucuacacuaagagaga

SEQ ID NO: 3248525 - RNA, 17 nt, Human
caugggacagggaggac

SEQ ID NO: 3248526 - RNA, 23 nt, Human
caguugaaaagacuccaaagaaa

SEQ ID NO: 3248527 - RNA, 21 nt, Human
caguugaaaagacuccaaaga

SEQ ID NO: 3248528 - RNA, 22 nt, Human
caguugaaaagacuccaaagaa

SEQ ID NO: 3248529 - RNA, 14 nt, Human
caguugaaaagacu

SEQ ID NO: 3248530 - RNA, 18 nt, Human
caguugaaaagacuccaa

SEQ ID NO: 3248531 - RNA, 14 nt, Human
caguuuucugagaa

SEQ ID NO: 3248532 - RNA, 15 nt, Human
caguuuucugagaaa

SEQ ID NO: 3248533 - RNA, 19 nt, Human
caguuuucugagaaagacu

SEQ ID NO: 3248534 - RNA, 20 nt, Human
caguuuucugagaaagacua

SEQ ID NO: 3248535 - RNA, 15 nt, Human
cauaaaaacaacuuu

SEQ ID NO: 3248536 - RNA, 23 nt, Human
cauaaaaagccugcaauuucaua

SEQ ID NO: 3248537 - RNA, 23 nt, Human
cauaaaaacaacuuuauacccag

SEQ ID NO: 3248538 - RNA, 21 nt, Human
cauaaaaacaacuuuauaccc

SEQ ID NO: 3248539 - RNA, 20 nt, Human
cauaaaaacaacuuuauacc

SEQ ID NO: 3248540 - RNA, 17 nt, Human
cauaaaaacaacuuuau

SEQ ID NO: 3248541 - RNA, 17 nt, Human
cauaccaacacgagcag

SEQ ID NO: 3248542 - RNA, 15 nt, Human
cauacauuguacgaa

SEQ ID NO: 3248543 - RNA, 19 nt, Human
cauacauauuuuuguagca

SEQ ID NO: 3248544 - RNA, 12 nt, Human
cauacauauuuu

SEQ ID NO: 3248545 - RNA, 11 nt, Human
cauacauauuu

SEQ ID NO: 3248546 - RNA, 16 nt, Human
cauaaguaauucaaga

SEQ ID NO: 3248547 - RNA, 17 nt, Human
cauaaguaauucaagaa

SEQ ID NO: 3248548 - RNA, 18 nt, Human
cauaaguaauucaagaaa

SEQ ID NO: 3248549 - RNA, 22 nt, Human
cauaaguaauucaagaaaacaa

SEQ ID NO: 3248550 - RNA, 12 nt, Human
caguucugaaga

SEQ ID NO: 3248551 - RNA, 13 nt, Human
caguucugaagaa

SEQ ID NO: 3248552 - RNA, 14 nt, Human
caguucugaagaag

SEQ ID NO: 3248553 - RNA, 22 nt, Human
caguucugaagaagaugguacc

SEQ ID NO: 3248554 - RNA, 15 nt, Human
caguucugaagaaga

SEQ ID NO: 3248555 - RNA, 16 nt, Human
caguucugaagaagau

SEQ ID NO: 3248556 - RNA, 22 nt, Human
caguucggugagcuacaaaugc

SEQ ID NO: 3248557 - RNA, 21 nt, Human
caguuaccucugccucagaaa

SEQ ID NO: 3248558 - RNA, 14 nt, Human
cagugucaaugcag

SEQ ID NO: 3248559 - RNA, 14 nt, Human
cagugugucuaaau

SEQ ID NO: 3248560 - RNA, 23 nt, Human
cagugugucuaaauuugaauguu

SEQ ID NO: 3248561 - RNA, 18 nt, Human
caucaaugaaugaaugaa

SEQ ID NO: 3248562 - RNA, 22 nt, Human
caucaagucuuucacauuuaaa

SEQ ID NO: 3248563 - RNA, 18 nt, Human
cauauuuuucacauaucu

SEQ ID NO: 3248564 - RNA, 21 nt, Human
cauauuuuucacauaucuagu

SEQ ID NO: 3248565 - RNA, 14 nt, Human
cauauuuuucacau

SEQ ID NO: 3248566 - RNA, 20 nt, Human
cauauauaacaaugcuguau

SEQ ID NO: 3248567 - RNA, 22 nt, Human
caucuagugagcagucaggaaa

SEQ ID NO: 3248568 - RNA, 14 nt, Human
caucuagugagcag

SEQ ID NO: 3248569 - RNA, 19 nt, Human
gccaugggcacugugggua

SEQ ID NO: 3248570 - RNA, 20 nt, Human
gccgggcgugguggugagug

SEQ ID NO: 3248571 - RNA, 13 nt, Human
gcuauaggugcua

SEQ ID NO: 3248572 - RNA, 18 nt, Human
gcuagaacucccuuucaa

SEQ ID NO: 3248573 - RNA, 19 nt, Human
gcuagaacucccuuucaac

SEQ ID NO: 3248574 - RNA, 12 nt, Human
gcgacagugaga

SEQ ID NO: 3248575 - RNA, 20 nt, Human
gcagccccgugggguuccuc

SEQ ID NO: 3248576 - RNA, 18 nt, Human
gcagauaaacaguaguga

SEQ ID NO: 3248577 - RNA, 15 nt, Human
gcaguucugaagaag

SEQ ID NO: 3248578 - RNA, 13 nt, Human
gcauagaaguaaa

SEQ ID NO: 3248579 - RNA, 14 nt, Human
gcaguucugaagaa

SEQ ID NO: 3248580 - RNA, 17 nt, Human
gcaguucugaagaagau

SEQ ID NO: 3248581 - RNA, 17 nt, Human
gcauagguuuaauaauu

SEQ ID NO: 3248582 - RNA, 20 nt, Human
gcauauuuuucacauaucua

SEQ ID NO: 3248583 - RNA, 19 nt, Human
gcauauuuuucacauaucu

SEQ ID NO: 3248584 - RNA, 16 nt, Human
gcauauuuuucacaua

SEQ ID NO: 3248585 - RNA, 15 nt, Human
gcauauuuuucacau

SEQ ID NO: 3248586 - RNA, 14 nt, Human
gcauauuuuucaca

SEQ ID NO: 3248587 - RNA, 13 nt, Human
gcagugaugucac

SEQ ID NO: 3248588 - RNA, 13 nt, Human
gcauuauauuuau

SEQ ID NO: 3248589 - RNA, 14 nt, Human
gcaagggugauggg

SEQ ID NO: 3248590 - RNA, 10 nt, Human
gcaagccaga

SEQ ID NO: 3248591 - RNA, 23 nt, Human
gcaaagcacugacuucuaaguaa

SEQ ID NO: 3248592 - RNA, 17 nt, Human
gcaaaauugauguguuu

SEQ ID NO: 3248593 - RNA, 15 nt, Human
gauuuuccugaaaac

SEQ ID NO: 3248594 - RNA, 21 nt, Human
gauggcuaguaucaaaagaaa

SEQ ID NO: 3248595 - RNA, 17 nt, Human
gaugacaacuucccagu

SEQ ID NO: 3248596 - RNA, 14 nt, Human
gaugaaaauauuug

SEQ ID NO: 3248597 - RNA, 22 nt, Human
gauaaauaguuuaugauuccac

SEQ ID NO: 3248598 - RNA, 12 nt, Human
gauaaguucaua

SEQ ID NO: 3248599 - RNA, 14 nt, Human
gauaaguucauaca

SEQ ID NO: 3248600 - RNA, 23 nt, Human
gauagauaggucagugcaaauac

SEQ ID NO: 3248601 - RNA, 17 nt, Human
gauaggucagugcaaau

SEQ ID NO: 3248602 - RNA, 14 nt, Human
gauagucuuucagu

SEQ ID NO: 3248603 - RNA, 15 nt, Human
gauaguaacaaugaa

SEQ ID NO: 3248604 - RNA, 22 nt, Human
gauagucuuucaguuaaggaga

SEQ ID NO: 3248605 - RNA, 16 nt, Human
gagcucgugggacagu

SEQ ID NO: 3248606 - RNA, 13 nt, Human
gagaaagacuauu

SEQ ID NO: 3248607 - RNA, 15 nt, Human
gagaaagacuauuca

SEQ ID NO: 3248608 - RNA, 17 nt, Human
gagaaagacuauucaaa

SEQ ID NO: 3248609 - RNA, 18 nt, Human
gagaaagacuauucaaac

SEQ ID NO: 3248610 - RNA, 18 nt, Human
gagacacacugaagaagc

SEQ ID NO: 3248611 - RNA, 15 nt, Human
gagaagagcuguuca

SEQ ID NO: 3248612 - RNA, 22 nt, Human
gagaagagcuguucacagccag

SEQ ID NO: 3248613 - RNA, 13 nt, Human
gagaagagcuguu

SEQ ID NO: 3248614 - RNA, 16 nt, Human
gagaagaacugaaauc

SEQ ID NO: 3248615 - RNA, 13 nt, Human
gagaagaacugaa

SEQ ID NO: 3248616 - RNA, 14 nt, Human
gagaagaacugaaa

SEQ ID NO: 3248617 - RNA, 21 nt, Human
gagaaugagagacacacugaa

SEQ ID NO: 3248618 - RNA, 13 nt, Human
gagacagcucugc

SEQ ID NO: 3248619 - RNA, 15 nt, Human
gagacagcucugcau

SEQ ID NO: 3248620 - RNA, 15 nt, Human
gagagugaacaaauu

SEQ ID NO: 3248621 - RNA, 19 nt, Human
gagagugaacaaauuuaca

SEQ ID NO: 3248622 - RNA, 17 nt, Human
gagauacagaauuuuau

SEQ ID NO: 3248623 - RNA, 17 nt, Human
gacaugggacauuugcu

SEQ ID NO: 3248624 - RNA, 22 nt, Human
gacaugggacauuugcucaugg

SEQ ID NO: 3248625 - RNA, 22 nt, Human
gacccacaagaaaugaaagcag

SEQ ID NO: 3248626 - RNA, 23 nt, Human
gaccugauuucugagcauuuaau

SEQ ID NO: 3248627 - RNA, 18 nt, Human
gacuccaaagaaauguaa

SEQ ID NO: 3248628 - RNA, 21 nt, Human
cuugcaugguuuagaaagcuu

SEQ ID NO: 3248629 - RNA, 13 nt, Human
cuucuuuccacag

SEQ ID NO: 3248630 - RNA, 19 nt, Human
cuucuuuccacagaagcuc

SEQ ID NO: 3248631 - RNA, 14 nt, Human
cuugaacccgggag

SEQ ID NO: 3248632 - RNA, 19 nt, Human
cuugaacccgggaggcaga

SEQ ID NO: 3248633 - RNA, 17 nt, Human
cuugccaaauauaaaua

SEQ ID NO: 3248634 - RNA, 16 nt, Human
cuuuggaacaagaugg

SEQ ID NO: 3248635 - RNA, 21 nt, Human
cuuuauuuucuauaauuuaaa

SEQ ID NO: 3248636 - RNA, 21 nt, Human
gaaagcuugcccuggugccuc

SEQ ID NO: 3248637 - RNA, 23 nt, Human
gaaaguuauugauaaguucauac

SEQ ID NO: 3248638 - RNA, 13 nt, Human
gaaagcagaacag

SEQ ID NO: 3248639 - RNA, 22 nt, Human
gaaagacuauucaaacagucuc

SEQ ID NO: 3248640 - RNA, 23 nt, Human
gaaagacuauucaaacagucuca

SEQ ID NO: 3248641 - RNA, 17 nt, Human
gaaagacuauucaaaca

SEQ ID NO: 3248642 - RNA, 19 nt, Human
gaaagacuauucaaacagu

SEQ ID NO: 3248643 - RNA, 13 nt, Human
gaaacugccagca

SEQ ID NO: 3248644 - RNA, 15 nt, Human
gaaacugccagcaac

SEQ ID NO: 3248645 - RNA, 22 nt, Human
gaaauguaagggaaacugccag

SEQ ID NO: 3248646 - RNA, 13 nt, Human
gaaauauuuauuu

SEQ ID NO: 3248647 - RNA, 15 nt, Human
gaaauauuuauuuua

SEQ ID NO: 3248648 - RNA, 24 nt, Human
gaacaguuaccucugccucagaaa

SEQ ID NO: 3248649 - RNA, 23 nt, Human
gaaauuauauaaguauucuaaau

SEQ ID NO: 3248650 - RNA, 17 nt, Human
gaaauuauauaaguauu

SEQ ID NO: 3248651 - RNA, 23 nt, Human
gaaguccaagcauuuagauguau

SEQ ID NO: 3248652 - RNA, 14 nt, Human
gaaccacaagacug

SEQ ID NO: 3248653 - RNA, 15 nt, Human
gaaccacaagacugc

SEQ ID NO: 3248654 - RNA, 16 nt, Human
gaacucccuuucaaca

SEQ ID NO: 3248655 - RNA, 15 nt, Human
gaacucccuuucaac

SEQ ID NO: 3248656 - RNA, 22 nt, Human
gaacuuguaaaggaauuuaaaa

SEQ ID NO: 3248657 - RNA, 15 nt, Human
gaagagcuguucaca

SEQ ID NO: 3248658 - RNA, 20 nt, Human
gaagagcuguucacagccag

SEQ ID NO: 3248659 - RNA, 13 nt, Human
gaagagcuguuca

SEQ ID NO: 3248660 - RNA, 23 nt, Human
gaagagcuguucacagccagacu

SEQ ID NO: 3248661 - RNA, 20 nt, Human
gaagaguauuuuugacagaa

SEQ ID NO: 3248662 - RNA, 12 nt, Human
cugcacugucaa

SEQ ID NO: 3248663 - RNA, 15 nt, Human
cuggccuucggccuc

SEQ ID NO: 3248664 - RNA, 21 nt, Human
cuggccuucggccuccauccu

SEQ ID NO: 3248665 - RNA, 18 nt, Human
cuggccuucggccuccau

SEQ ID NO: 3248666 - RNA, 17 nt, Human
cuggccuucggccucca

SEQ ID NO: 3248667 - RNA, 16 nt, Human
cuggccuucggccucc

SEQ ID NO: 3248668 - RNA, 18 nt, Human
cugucucuacuaaaaaua

SEQ ID NO: 3248669 - RNA, 13 nt, Human
cuguauuuuaaaa

SEQ ID NO: 3248670 - RNA, 16 nt, Human
cuguauuuuaaaagaa

SEQ ID NO: 3248671 - RNA, 15 nt, Human
cuguaugauucccag

SEQ ID NO: 3248672 - RNA, 16 nt, Human
cuccauccugaggcuc

SEQ ID NO: 3248673 - RNA, 14 nt, Human
cuccauccugaggc

SEQ ID NO: 3248674 - RNA, 18 nt, Human
cuccauccugaggcucca

SEQ ID NO: 3248675 - RNA, 17 nt, Human
cucuaggaaauauuuau

SEQ ID NO: 3248676 - RNA, 15 nt, Human
cucuaggaaauauuu

SEQ ID NO: 3248677 - RNA, 21 nt, Human
cucuccugauagucuuucagu

SEQ ID NO: 3248678 - RNA, 20 nt, Human
cugagcgacagugagacucu

SEQ ID NO: 3248679 - RNA, 16 nt, Human
cugagcgacagugaga

SEQ ID NO: 3248680 - RNA, 22 nt, Human
cugagaaagacuauucaaacag

SEQ ID NO: 3248681 - RNA, 23 nt, Human
cugagaaagacuauucaaacagu

SEQ ID NO: 3248682 - RNA, 13 nt, Human
cugacuucuaagu

SEQ ID NO: 3248683 - RNA, 15 nt, Human
cugacuucuaaguaa

SEQ ID NO: 3248684 - RNA, 16 nt, Human
cugacuucuaaguaaa

SEQ ID NO: 3248685 - RNA, 17 nt, Human
cugacucuuaagaagac

SEQ ID NO: 3248686 - RNA, 15 nt, Human
cugacuaugacauaa

SEQ ID NO: 3248687 - RNA, 15 nt, Human
cugacagauuuccau

SEQ ID NO: 3248688 - RNA, 11 nt, Human
cugacagauuu

SEQ ID NO: 3248689 - RNA, 12 nt, Human
cucuggccuucg

SEQ ID NO: 3248690 - RNA, 14 nt, Human
cugaagaagauggu

SEQ ID NO: 3248691 - RNA, 23 nt, Human
cugaagaagcaccaaucaugaau

SEQ ID NO: 3248692 - RNA, 22 nt, Human
cucuucuuuaaagggauggcaa

SEQ ID NO: 3248693 - RNA, 15 nt, Human
cgcucucuggccuuc

SEQ ID NO: 3248694 - RNA, 14 nt, Human
cgcucucuggccuu

SEQ ID NO: 3248695 - RNA, 12 nt, Human
cggccuccaucc

SEQ ID NO: 3248696 - RNA, 22 nt, Human
cggucggguuuuauuguuuaaa

SEQ ID NO: 3248697 - RNA, 17 nt, Human
cggugagcuacaaaugc

SEQ ID NO: 3248698 - RNA, 21 nt, Human
cggguuuuauuguuuaaaauc

SEQ ID NO: 3248699 - RNA, 23 nt, Human
cuaaauugacacuuaaaaauggu

SEQ ID NO: 3248700 - RNA, 23 nt, Human
cuaaauuugaauguuaagcagau

SEQ ID NO: 3248701 - RNA, 21 nt, Human
cuaugacauaaaaacaacuuu

SEQ ID NO: 3248702 - RNA, 17 nt, Human
cuaguaucaaaagaaag

SEQ ID NO: 3248703 - RNA, 15 nt, Human
cuaguaucaaaagaa

SEQ ID NO: 3248704 - RNA, 23 nt, Human
cuaguaucaaaagaaagaaaauc

SEQ ID NO: 3248705 - RNA, 16 nt, Human
cuaguaugaaauuaua

SEQ ID NO: 3248706 - RNA, 22 nt, Human
cuaguauuucuaugaaauauua

SEQ ID NO: 3248707 - RNA, 19 nt, Human
cuaguauuucuaugaaaua

SEQ ID NO: 3248708 - RNA, 20 nt, Human
cuaguauuucuaugaaauau

SEQ ID NO: 3248709 - RNA, 22 nt, Human
cuaggaaauauuuauuuuaaua

SEQ ID NO: 3248710 - RNA, 20 nt, Human
cuauauuuuuuguuaaauga

SEQ ID NO: 3248711 - RNA, 19 nt, Human
cuauauuguuugcuaagca

SEQ ID NO: 3248712 - RNA, 18 nt, Human
cuauauuguuugcuaagc

SEQ ID NO: 3248713 - RNA, 22 nt, Human
cuauauuuuuuguuaaaugauu

SEQ ID NO: 3248714 - RNA, 13 nt, Human
cuaugaaauauua

SEQ ID NO: 3248715 - RNA, 18 nt, Human
cuaugacauaaaaacaac

SEQ ID NO: 3248716 - RNA, 19 nt, Human
cuacuugggaggcugagau

SEQ ID NO: 3248717 - RNA, 18 nt, Human
cuacuugggaggcugaga

SEQ ID NO: 3248718 - RNA, 15 nt, Human
cuacuugggaggcug

SEQ ID NO: 3248719 - RNA, 14 nt, Human
cuaagcaaaaugug

SEQ ID NO: 3248720 - RNA, 18 nt, Human
cuaagcaaaaugugauau

SEQ ID NO: 3248721 - RNA, 15 nt, Human
cuaagcaaaauguga

SEQ ID NO: 3248722 - RNA, 17 nt, Human
cuacacuccagugagac

SEQ ID NO: 3248723 - RNA, 16 nt, Human
cuacacuccagugaga

SEQ ID NO: 3248724 - RNA, 19 nt, Human
cuaauguaauaacugugaa

SEQ ID NO: 3248725 - RNA, 19 nt, Human
uuuuucucuaggaaauauu

SEQ ID NO: 3248726 - RNA, 18 nt, Human
uuuuuaaaaaagaaacau

SEQ ID NO: 3248727 - RNA, 19 nt, Human
uuuuguagcacugacagau

SEQ ID NO: 3248728 - RNA, 18 nt, Human
uuuuguagcacugacaga

SEQ ID NO: 3248729 - RNA, 13 nt, Human
uuuuccugaaaac

SEQ ID NO: 3248730 - RNA, 14 nt, Human
uuuuccugaaaacc

SEQ ID NO: 3248731 - RNA, 18 nt, Human
uuuuggucuggagggaag

SEQ ID NO: 3248732 - RNA, 20 nt, Human
uuuugaaucucauaauuuau

SEQ ID NO: 3248733 - RNA, 22 nt, Human
uuuccucaaaacuucagacaua

SEQ ID NO: 3248734 - RNA, 13 nt, Human
uuucugagaaaga

SEQ ID NO: 3248735 - RNA, 17 nt, Human
uuucuuauuucauuucu

SEQ ID NO: 3248736 - RNA, 18 nt, Human
uuugaaucaucaagucuu

SEQ ID NO: 3248737 - RNA, 22 nt, Human
uuugaaucucauaauuuauaca

SEQ ID NO: 3248738 - RNA, 21 nt, Human
uuugaaucucauaauuuauac

SEQ ID NO: 3248739 - RNA, 20 nt, Human
uuugaaucucauaauuuaua

SEQ ID NO: 3248740 - RNA, 19 nt, Human
uuugaaucucauaauuuau

SEQ ID NO: 3248741 - RNA, 16 nt, Human
uuugaaucucauaauu

SEQ ID NO: 3248742 - RNA, 20 nt, Human
uuuuaauaauguuucaaaca

SEQ ID NO: 3248743 - RNA, 21 nt, Human
uuuuaaaagaaugauuaugaa

SEQ ID NO: 3248744 - RNA, 15 nt, Human
uuuuaaaagaaugau

SEQ ID NO: 3248745 - RNA, 13 nt, Human
uuuguauaaaaua

SEQ ID NO: 3248746 - RNA, 14 nt, Human
uuuguauaaaauaa

SEQ ID NO: 3248747 - RNA, 13 nt, Human
guauuuuaaucac

SEQ ID NO: 3248748 - RNA, 20 nt, Human
guauuuuaaaagaaugauua

SEQ ID NO: 3248749 - RNA, 18 nt, Human
guauuuuaaaagaaugau

SEQ ID NO: 3248750 - RNA, 15 nt, Human
gucaaugcagccccc

SEQ ID NO: 3248751 - RNA, 22 nt, Human
gucaauaaaauccauacauuug

SEQ ID NO: 3248752 - RNA, 23 nt, Human
gucaauaaaauccauacauuugu

SEQ ID NO: 3248753 - RNA, 19 nt, Human
gucagcuccccucggagaa

SEQ ID NO: 3248754 - RNA, 21 nt, Human
gucagcuccccucggagaaga

SEQ ID NO: 3248755 - RNA, 22 nt, Human
gucagcuccccucggagaagag

SEQ ID NO: 3248756 - RNA, 23 nt, Human
gucagcuccccucggagaagagc

SEQ ID NO: 3248757 - RNA, 17 nt, Human
guauguuagugcaaauu

SEQ ID NO: 3248758 - RNA, 23 nt, Human
guaugaaauuauauaaguauucu

SEQ ID NO: 3248759 - RNA, 13 nt, Human
guaugaaauuaua

SEQ ID NO: 3248760 - RNA, 18 nt, Human
gcuauaggugcuacaaaa

SEQ ID NO: 3248761 - RNA, 15 nt, Human
guagcacugacagau

SEQ ID NO: 3248762 - RNA, 14 nt, Human
guagcacugacaga

SEQ ID NO: 3248763 - RNA, 14 nt, Human
guaguguuggagaa

SEQ ID NO: 3248764 - RNA, 15 nt, Human
guaguguuggagaag

SEQ ID NO: 3248765 - RNA, 21 nt, Human
gugaacaaauuuacagagaca

SEQ ID NO: 3248766 - RNA, 13 nt, Human
gugaacacaucag

SEQ ID NO: 3248767 - RNA, 16 nt, Human
gugacaagcucacaga

SEQ ID NO: 3248768 - RNA, 22 nt, Human
gugaauucuugaaggaaaauga

SEQ ID NO: 3248769 - RNA, 18 nt, Human
gugaauucuugaaggaaa

SEQ ID NO: 3248770 - RNA, 23 nt, Human
gucugugagaugcuagaacuccc

SEQ ID NO: 3248771 - RNA, 22 nt, Human
gucugugagaugcuagaacucc

SEQ ID NO: 3248772 - RNA, 21 nt, Human
gucugugagaugcuagaacuc

SEQ ID NO: 3248773 - RNA, 17 nt, Human
gucugugagaugcuaga

SEQ ID NO: 3248774 - RNA, 16 nt, Human
gucugugagaugcuag

SEQ ID NO: 3248775 - RNA, 15 nt, Human
gucugugagaugcua

SEQ ID NO: 3248776 - RNA, 13 nt, Human
gucugacuguuuc

SEQ ID NO: 3248777 - RNA, 18 nt, Human
gucgucaaagcugaaaug

SEQ ID NO: 3248778 - RNA, 21 nt, Human
gucuaagauaguaacaaugaa

SEQ ID NO: 3248779 - RNA, 13 nt, Human
gucuaaauuugaa

SEQ ID NO: 3248780 - RNA, 23 nt, Human
gucggguuuuauuguuuaaaauc

SEQ ID NO: 3248781 - RNA, 23 nt, Human
guuaccucugccucagaaaacaa

SEQ ID NO: 3248782 - RNA, 18 nt, Human
guucaauaauaaauauuu

SEQ ID NO: 3248783 - RNA, 16 nt, Human
guucaucaaugaauga

SEQ ID NO: 3248784 - RNA, 20 nt, Human
guugauggugguauguuuuc

SEQ ID NO: 3248785 - RNA, 21 nt, Human
guugauggugguauguuuuca

SEQ ID NO: 3248786 - RNA, 17 nt, Human
guugaaaagacuccaaa

SEQ ID NO: 3248787 - RNA, 22 nt, Human
guugaaaagacuccaaagaaau

SEQ ID NO: 3248788 - RNA, 23 nt, Human
guugaaaagacuccaaagaaaug

SEQ ID NO: 3248789 - RNA, 12 nt, Human
guucugaagaag

SEQ ID NO: 3248790 - RNA, 13 nt, Human
guucugaagaaga

SEQ ID NO: 3248791 - RNA, 14 nt, Human
guucugaagaagau

SEQ ID NO: 3248792 - RNA, 15 nt, Human
guucugaagaagaug

SEQ ID NO: 3248793 - RNA, 20 nt, Human
guuaaaagaugaaaauauuu

SEQ ID NO: 3248794 - RNA, 14 nt, Human
guuaaaagaugaaa

SEQ ID NO: 3248795 - RNA, 16 nt, Human
guuaaaagaugaaaau

SEQ ID NO: 3248796 - RNA, 15 nt, Human
gugcuacaaaaacac

SEQ ID NO: 3248797 - RNA, 20 nt, Human
gugcuacaaaaacacagcaa

SEQ ID NO: 3248798 - RNA, 21 nt, Human
guguaaguagauaggccaugg

SEQ ID NO: 3248799 - RNA, 15 nt, Human
guguacuuaacuauu

SEQ ID NO: 3248800 - RNA, 23 nt, Human
uacugucagcuccccucggagaa

SEQ ID NO: 3248801 - RNA, 13 nt, Human
uacuuaacuauuc

SEQ ID NO: 3248802 - RNA, 23 nt, Human
uaccuuuguucccaaauuucaua

SEQ ID NO: 3248803 - RNA, 16 nt, Human
uaccuaucaucuuaag

SEQ ID NO: 3248804 - RNA, 22 nt, Human
uaccuaacgaaguauccuucag

SEQ ID NO: 3248805 - RNA, 14 nt, Human
uacccagaaaguua

SEQ ID NO: 3248806 - RNA, 16 nt, Human
uaauuuuuauauuuga

SEQ ID NO: 3248807 - RNA, 12 nt, Human
uaauuuuuauau

SEQ ID NO: 3248808 - RNA, 18 nt, Human
uaauuuugugaagcaaaa

SEQ ID NO: 3248809 - RNA, 13 nt, Human
uaauuuugugaag

SEQ ID NO: 3248810 - RNA, 17 nt, Human
uacacacucaaaucaag

SEQ ID NO: 3248811 - RNA, 16 nt, Human
uacacacucaaaucaa

SEQ ID NO: 3248812 - RNA, 14 nt, Human
uacacuccagugag

SEQ ID NO: 3248813 - RNA, 23 nt, Human
uacaguucggugagcuacaaaug

SEQ ID NO: 3248814 - RNA, 18 nt, Human
uagaauuaacacaugauc

SEQ ID NO: 3248815 - RNA, 16 nt, Human
uagaauuaacacauga

SEQ ID NO: 3248816 - RNA, 15 nt, Human
uagaauuaacacaug

SEQ ID NO: 3248817 - RNA, 23 nt, Human
uagaauaccacaggaaccacaag

SEQ ID NO: 3248818 - RNA, 14 nt, Human
uagauaggccaugg

SEQ ID NO: 3248819 - RNA, 15 nt, Human
uagcauggcauauuu

SEQ ID NO: 3248820 - RNA, 18 nt, Human
uagcauggcauauuuuuc

SEQ ID NO: 3248821 - RNA, 17 nt, Human
uagcauggcauauuuuu

SEQ ID NO: 3248822 - RNA, 20 nt, Human
uaggugcuacaaaaacacag

SEQ ID NO: 3248823 - RNA, 22 nt, Human
uaggugcuacaaaaacacagca

SEQ ID NO: 3248824 - RNA, 23 nt, Human
uaggugcuacaaaaacacagcaa

SEQ ID NO: 3248825 - RNA, 18 nt, Human
uaggugcuacaaaaacac

SEQ ID NO: 3248826 - RNA, 22 nt, Human
uagguuaauuccaauuauauga

SEQ ID NO: 3248827 - RNA, 17 nt, Human
uaguauuguccaggucu

SEQ ID NO: 3248828 - RNA, 13 nt, Human
uauauaacaaugc

SEQ ID NO: 3248829 - RNA, 17 nt, Human
uauauaacaaugcugua

SEQ ID NO: 3248830 - RNA, 19 nt, Human
uauauaacaaugcuguauu

SEQ ID NO: 3248831 - RNA, 14 nt, Human
uauaucuuguagcu

SEQ ID NO: 3248832 - RNA, 14 nt, Human
uaucaaaagaaaga

SEQ ID NO: 3248833 - RNA, 19 nt, Human
uauauuuuuuguuaaauga

SEQ ID NO: 3248834 - RNA, 21 nt, Human
uauauuuuuuguuaaaugauu

SEQ ID NO: 3248835 - RNA, 16 nt, Human
uauaugcuucuguuuu

SEQ ID NO: 3248836 - RNA, 14 nt, Human
uauaugcuucuguu

SEQ ID NO: 3248837 - RNA, 20 nt, Human
uauauuugaaauauugacuu

SEQ ID NO: 3248838 - RNA, 10 nt, Human
uaaaaucauu

SEQ ID NO: 3248839 - RNA, 13 nt, Human
uaaaaucauuucu

SEQ ID NO: 3248840 - RNA, 18 nt, Human
uaaaaucauuucugcauc

SEQ ID NO: 3248841 - RNA, 22 nt, Human
uaaaaucauuucugcaucagcu

SEQ ID NO: 3248842 - RNA, 15 nt, Human
uaaaauccauacauu

SEQ ID NO: 3248843 - RNA, 17 nt, Human
uaaaauccauacauuug

SEQ ID NO: 3248844 - RNA, 22 nt, Human
uaaaacaagcacuaaacaaaga

SEQ ID NO: 3248845 - RNA, 19 nt, Human
uaaaaaugguuuaaauggu

SEQ ID NO: 3248846 - RNA, 18 nt, Human
uaaaaaugguuuaaaugg

SEQ ID NO: 3248847 - RNA, 15 nt, Human
uaaaaaugguuuaaa

SEQ ID NO: 3248848 - RNA, 21 nt, Human
uaaaaagacauucuuccaaaa

SEQ ID NO: 3248849 - RNA, 13 nt, Human
uaaaaacaacuuu

SEQ ID NO: 3248850 - RNA, 19 nt, Human
uaaaaacaacuuuauaccc

SEQ ID NO: 3248851 - RNA, 18 nt, Human
uaaaaacaacuuuauacc

SEQ ID NO: 3248852 - RNA, 14 nt, Human
uaaaguguuugaaa

SEQ ID NO: 3248853 - RNA, 20 nt, Human
guuuauauaagcuuguauuc

SEQ ID NO: 3248854 - RNA, 20 nt, Human
guuuagcuggaaaaguaugu

SEQ ID NO: 3248855 - RNA, 21 nt, Human
guuuagcuggaaaaguauguu

SEQ ID NO: 3248856 - RNA, 17 nt, Human
guuuagaaagcuugccc

SEQ ID NO: 3248857 - RNA, 14 nt, Human
guugugaauguugu

SEQ ID NO: 3248858 - RNA, 17 nt, Human
uaaccaggggccaugaa

SEQ ID NO: 3248859 - RNA, 15 nt, Human
uaacuggaaacuuca

SEQ ID NO: 3248860 - RNA, 13 nt, Human
uaacugugaaguu

SEQ ID NO: 3248861 - RNA, 17 nt, Human
uaacugugaaguuuaca

SEQ ID NO: 3248862 - RNA, 18 nt, Human
uaacugugaaguuuacau

SEQ ID NO: 3248863 - RNA, 13 nt, Human
uaagagagaauga

SEQ ID NO: 3248864 - RNA, 14 nt, Human
uaagagagaaugag

SEQ ID NO: 3248865 - RNA, 21 nt, Human
uaagaaaauaucacuugucaa

SEQ ID NO: 3248866 - RNA, 19 nt, Human
uaagaaaucaaagagagaa

SEQ ID NO: 3248867 - RNA, 20 nt, Human
uaaauggcuuccuggcaaua

SEQ ID NO: 3248868 - RNA, 16 nt, Human
uaaaugugccuucauu

SEQ ID NO: 3248869 - RNA, 20 nt, Human
uaaauugacacuuaaaaaug

SEQ ID NO: 3248870 - RNA, 14 nt, Human
uaaauuugaauguu

SEQ ID NO: 3248871 - RNA, 22 nt, Human
uaaauuugaauguuaagcagau

SEQ ID NO: 3248872 - RNA, 22 nt, Human
uaauguuucaaacauauauaac

SEQ ID NO: 3248873 - RNA, 16 nt, Human
uaaugauaacuggaaa

SEQ ID NO: 3248874 - RNA, 17 nt, Human
uaaugauaacuggaaac

SEQ ID NO: 3248875 - RNA, 22 nt, Human
uaaugauaacuggaaacuucag

SEQ ID NO: 3248876 - RNA, 13 nt, Human
uaagugaaauaag

SEQ ID NO: 3248877 - RNA, 21 nt, Human
uaauaacugugaaguuuacau

SEQ ID NO: 3248878 - RNA, 15 nt, Human
uaauaacugugaagu

SEQ ID NO: 3248879 - RNA, 18 nt, Human
uuaaaauacacacucaaa

SEQ ID NO: 3248880 - RNA, 22 nt, Human
uuaaaaaaaaaccugagcccca

SEQ ID NO: 3248881 - RNA, 19 nt, Human
uguuuccauauuuuauagg

SEQ ID NO: 3248882 - RNA, 20 nt, Human
uuacauuuguauaaaauaau

SEQ ID NO: 3248883 - RNA, 12 nt, Human
uuacauuguaaa

SEQ ID NO: 3248884 - RNA, 13 nt, Human
uuacauuguaaau

SEQ ID NO: 3248885 - RNA, 16 nt, Human
uuaaugauaaguaaau

SEQ ID NO: 3248886 - RNA, 21 nt, Human
uguuaaaagaugaaaauauuu

SEQ ID NO: 3248887 - RNA, 23 nt, Human
uguucauacauauuuuuguagca

SEQ ID NO: 3248888 - RNA, 14 nt, Human
uguucauacauauu

SEQ ID NO: 3248889 - RNA, 12 nt, Human
uguucauacaua

SEQ ID NO: 3248890 - RNA, 21 nt, Human
ugugugaaagguacuucaaau

SEQ ID NO: 3248891 - RNA, 22 nt, Human
ugugugaaagguacuucaaauc

SEQ ID NO: 3248892 - RNA, 20 nt, Human
ugugugaaagguacuucaaa

SEQ ID NO: 3248893 - RNA, 13 nt, Human
uguguuuugcaag

SEQ ID NO: 3248894 - RNA, 19 nt, Human
uguguuuugcaagccagau

SEQ ID NO: 3248895 - RNA, 14 nt, Human
uguuggagaagaac

SEQ ID NO: 3248896 - RNA, 16 nt, Human
uguuggagaagaacug

SEQ ID NO: 3248897 - RNA, 17 nt, Human
uguuggagaagaacuga

SEQ ID NO: 3248898 - RNA, 19 nt, Human
uguuggagaagaacugaaa

SEQ ID NO: 3248899 - RNA, 17 nt, Human
uguuuaaaaucauuucu

SEQ ID NO: 3248900 - RNA, 18 nt, Human
uguuuaaaaucauuucug

SEQ ID NO: 3248901 - RNA, 14 nt, Human
uguuuaaaaucauu

SEQ ID NO: 3248902 - RNA, 20 nt, Human
uguugacaugggacauuugc

SEQ ID NO: 3248903 - RNA, 19 nt, Human
ugugcuaguaauuggaaag

SEQ ID NO: 3248904 - RNA, 21 nt, Human
ugugaauguugugauguauuc

SEQ ID NO: 3248905 - RNA, 18 nt, Human
ugugaagugaaugaaaca

SEQ ID NO: 3248906 - RNA, 15 nt, Human
uguaugauucccagc

SEQ ID NO: 3248907 - RNA, 16 nt, Human
uguaccgcaaugugac

SEQ ID NO: 3248908 - RNA, 15 nt, Human
uguaccgcaauguga

SEQ ID NO: 3248909 - RNA, 22 nt, Human
uguaguguuggagaagaacuga

SEQ ID NO: 3248910 - RNA, 17 nt, Human
uguagauaauacaguuc

SEQ ID NO: 3248911 - RNA, 14 nt, Human
uguacgaagaguau

SEQ ID NO: 3248912 - RNA, 22 nt, Human
uguacgaagaguauuuuugaca

SEQ ID NO: 3248913 - RNA, 17 nt, Human
ugcugaaacaacaaaua

SEQ ID NO: 3248914 - RNA, 15 nt, Human
ugcuaagcauuccaa

SEQ ID NO: 3248915 - RNA, 19 nt, Human
ugcuaagcauuccaacuau

SEQ ID NO: 3248916 - RNA, 15 nt, Human
ugccuucucaacucc

SEQ ID NO: 3248917 - RNA, 18 nt, Human
ugccuguaaucacagcua

SEQ ID NO: 3248918 - RNA, 19 nt, Human
ugcagugagccgagauugu

SEQ ID NO: 3248919 - RNA, 14 nt, Human
ugcaguucugaaga

SEQ ID NO: 3248920 - RNA, 15 nt, Human
ugcaguucugaagaa

SEQ ID NO: 3248921 - RNA, 16 nt, Human
ugcaguucugaagaag

SEQ ID NO: 3248922 - RNA, 17 nt, Human
ugcaguucugaagaaga

SEQ ID NO: 3248923 - RNA, 18 nt, Human
ugcaguucugaagaagau

SEQ ID NO: 3248924 - RNA, 19 nt, Human
ugcaguucugaagaagaug

SEQ ID NO: 3248925 - RNA, 22 nt, Human
ugcaguucugaagaagauggua

SEQ ID NO: 3248926 - RNA, 18 nt, Human
ugccaaauauaaauaaaa

SEQ ID NO: 3248927 - RNA, 17 nt, Human
ugccaaauauaaauaaa

SEQ ID NO: 3248928 - RNA, 22 nt, Human
ugccaaauauaaauaaaaauaa

SEQ ID NO: 3248929 - RNA, 19 nt, Human
ugccaaauauaaauaaaaa

SEQ ID NO: 3248930 - RNA, 20 nt, Human
ugccacuaaauugacacuua

SEQ ID NO: 3248931 - RNA, 16 nt, Human
uggcuuccuggcaaua

SEQ ID NO: 3248932 - RNA, 14 nt, Human
ugggaguacaaaag

SEQ ID NO: 3248933 - RNA, 21 nt, Human
ugguauguuuucaggcuagau

SEQ ID NO: 3248934 - RNA, 11 nt, Human
uggagggaagc

SEQ ID NO: 3248935 - RNA, 23 nt, Human
uggaaacuucagcgguuuauaua

SEQ ID NO: 3248936 - RNA, 20 nt, Human
uggaacauaaaauacaaugu

SEQ ID NO: 3248937 - RNA, 21 nt, Human
uggaacauaaaauacaauguu

SEQ ID NO: 3248938 - RNA, 22 nt, Human
uggaauaauccuaaacauauga

SEQ ID NO: 3248939 - RNA, 16 nt, Human
uggaaugcuguguuaa

SEQ ID NO: 3248940 - RNA, 21 nt, Human
uccugaggcuccacuuggucu

SEQ ID NO: 3248941 - RNA, 16 nt, Human
uccugaggcuccacuu

SEQ ID NO: 3248942 - RNA, 15 nt, Human
uccugaggcuccacu

SEQ ID NO: 3248943 - RNA, 12 nt, Human
ucuacuaaaaau

SEQ ID NO: 3248944 - RNA, 15 nt, Human
ucuacuaaaaauaca

SEQ ID NO: 3248945 - RNA, 19 nt, Human
ucuacuaaaaauacaaaaa

SEQ ID NO: 3248946 - RNA, 22 nt, Human
ucucauaauuuauacaggucau

SEQ ID NO: 3248947 - RNA, 16 nt, Human
ucucauaauuuauaca

SEQ ID NO: 3248948 - RNA, 16 nt, Human
ucggccuccauccuga

SEQ ID NO: 3248949 - RNA, 15 nt, Human
ucggccuccauccug

SEQ ID NO: 3248950 - RNA, 15 nt, Human
uccuugcaucaauuu

SEQ ID NO: 3248951 - RNA, 17 nt, Human
uccuugcaucaauuuuu

SEQ ID NO: 3248952 - RNA, 16 nt, Human
ucagcugcugaaacaa

SEQ ID NO: 3248953 - RNA, 22 nt, Human
ucaggagaguagaacagauaau

SEQ ID NO: 3248954 - RNA, 22 nt, Human
ucagcuccccucggagaagagc

SEQ ID NO: 3248955 - RNA, 21 nt, Human
ucagcuccccucggagaagag

SEQ ID NO: 3248956 - RNA, 18 nt, Human
ucaguccaugaagaugua

SEQ ID NO: 3248957 - RNA, 19 nt, Human
ucagugugucuaaauuuga

SEQ ID NO: 3248958 - RNA, 21 nt, Human
ucauggaauuggagcucgugg

SEQ ID NO: 3248959 - RNA, 19 nt, Human
ucauggaauuggagcucgu

SEQ ID NO: 3248960 - RNA, 20 nt, Human
uccaagcauuuagauguaua

SEQ ID NO: 3248961 - RNA, 14 nt, Human
ucugucucagucca

SEQ ID NO: 3248962 - RNA, 16 nt, Human
ucuucuuggucucagu

SEQ ID NO: 3248963 - RNA, 19 nt, Human
ucuugccaaauauaaauaa

SEQ ID NO: 3248964 - RNA, 18 nt, Human
ucuuguagcuuuaucaaa

SEQ ID NO: 3248965 - RNA, 22 nt, Human
ucuuaggguuaugauuaaguaa

SEQ ID NO: 3248966 - RNA, 14 nt, Human
ucuuauaauuuaaa

SEQ ID NO: 3248967 - RNA, 13 nt, Human
ucuuauaauuuaa

SEQ ID NO: 3248968 - RNA, 17 nt, Human
ucuuuccacagaagcuc

SEQ ID NO: 3248969 - RNA, 19 nt, Human
ugaaaauuauuuuguucau

SEQ ID NO: 3248970 - RNA, 23 nt, Human
ugaaaauuauuuuguucauacau

SEQ ID NO: 3248971 - RNA, 22 nt, Human
ugaaaauuauuuuguucauaca

SEQ ID NO: 3248972 - RNA, 23 nt, Human
ugaaacacucaguuguucaauaa

SEQ ID NO: 3248973 - RNA, 20 nt, Human
ugagaaagacuauucaaaca

SEQ ID NO: 3248974 - RNA, 20 nt, Human
ugagcaggauuuuaaucuuu

SEQ ID NO: 3248975 - RNA, 15 nt, Human
ugagcaggauuuuaa

SEQ ID NO: 3248976 - RNA, 13 nt, Human
ugacucuuaagaa

SEQ ID NO: 3248977 - RNA, 16 nt, Human
ugacucuuaagaagac

SEQ ID NO: 3248978 - RNA, 14 nt, Human
ugacucuuaagaag

SEQ ID NO: 3248979 - RNA, 15 nt, Human
ugacucuuaagaaga

SEQ ID NO: 3248980 - RNA, 14 nt, Human
ugaauuaaguuuuu

SEQ ID NO: 3248981 - RNA, 13 nt, Human
ugaauuacauuug

SEQ ID NO: 3248982 - RNA, 22 nt, Human
ugacaacuucccagugaauucu

SEQ ID NO: 3248983 - RNA, 22 nt, Human
ugacagaauauguuucaaacuu

SEQ ID NO: 3248984 - RNA, 21 nt, Human
ugacagaauauguuucaaacu

SEQ ID NO: 3248985 - RNA, 18 nt, Human
ugacagaauauguuucaa

SEQ ID NO: 3248986 - RNA, 17 nt, Human
ugaccacugcagaagac

SEQ ID NO: 3248987 - RNA, 16 nt, Human
ugaccacugcagaaga

SEQ ID NO: 3248988 - RNA, 23 nt, Human
ugacagaauauguuucaaacuuu

SEQ ID NO: 3248989 - RNA, 15 nt, Human
ugaaugaauggcuaa

SEQ ID NO: 3248990 - RNA, 20 nt, Human
ugaaucucauaauuuauaca

SEQ ID NO: 3248991 - RNA, 13 nt, Human
ugaaucucauaau

SEQ ID NO: 3248992 - RNA, 16 nt, Human
ugaaguuuacauugua

SEQ ID NO: 3248993 - RNA, 20 nt, Human
ugaaguuuacauuguaaaua

SEQ ID NO: 3248994 - RNA, 14 nt, Human
ugaaguuuacauug

SEQ ID NO: 3248995 - RNA, 15 nt, Human
ugaaggaaaaugaua

SEQ ID NO: 3248996 - RNA, 22 nt, Human
cucucuggccuucggccuccau

SEQ ID NO: 3248997 - RNA, 16 nt, Human
cucuccccaugauguu

SEQ ID NO: 3248998 - RNA, 15 nt, Human
cucuccccaugaugu

SEQ ID NO: 3248999 - RNA, 13 nt, Human
cucucuggccuuc

SEQ ID NO: 3249000 - RNA, 16 nt, Human
cucucuggccuucggc

SEQ ID NO: 3249001 - RNA, 14 nt, Human
cucucuggccuucg

SEQ ID NO: 3249002 - RNA, 18 nt, Human
cuaucucauuuccaagca

SEQ ID NO: 3249003 - RNA, 23 nt, Human
cuaugucauuugcuggagcucug

SEQ ID NO: 3249004 - RNA, 18 nt, Human
cuauguucuaagaaguga

SEQ ID NO: 3249005 - RNA, 16 nt, Human
cucaguccaugaagau

SEQ ID NO: 3249006 - RNA, 17 nt, Human
ccuucucuucacaguca

SEQ ID NO: 3249007 - RNA, 18 nt, Human
cgcucucuggccuucggc

SEQ ID NO: 3249008 - RNA, 12 nt, Human
ccuuuucccaac

SEQ ID NO: 3249009 - RNA, 20 nt, Human
cuacaaaaacacagcaaggg

SEQ ID NO: 3249010 - RNA, 20 nt, Human
cuaacgaaguauccuucagc

SEQ ID NO: 3249011 - RNA, 13 nt, Human
cccucggagaaga

SEQ ID NO: 3249012 - RNA, 14 nt, Human
cccugagcaggauu

SEQ ID NO: 3249013 - RNA, 20 nt, Human
ccuaacgaaguauccuucag

SEQ ID NO: 3249014 - RNA, 15 nt, Human
ccuaacgaaguaucc

SEQ ID NO: 3249015 - RNA, 18 nt, Human
ccaugggcacugugggua

SEQ ID NO: 3249016 - RNA, 22 nt, Human
ccauuguggucacaggaaguag

SEQ ID NO: 3249017 - RNA, 15 nt, Human
ccccauuguggucac

SEQ ID NO: 3249018 - RNA, 15 nt, Human
ccaggggccaugaau

SEQ ID NO: 3249019 - RNA, 12 nt, Human
ccacuuggucug

SEQ ID NO: 3249020 - RNA, 19 nt, Human
ccacuuggucugugagaug

SEQ ID NO: 3249021 - RNA, 17 nt, Human
ccacuuggucugugaga

SEQ ID NO: 3249022 - RNA, 16 nt, Human
ccacuuggucugugag

SEQ ID NO: 3249023 - RNA, 15 nt, Human
ccacuuggucuguga

SEQ ID NO: 3249024 - RNA, 22 nt, Human
ccacuuggucugugagaugcua

SEQ ID NO: 3249025 - RNA, 20 nt, Human
ccacuuggucugugagaugc

SEQ ID NO: 3249026 - RNA, 16 nt, Human
caggaaagagaacuuc

SEQ ID NO: 3249027 - RNA, 20 nt, Human
cagcuguaugauucccagcc

SEQ ID NO: 3249028 - RNA, 14 nt, Human
cagcuuauugucua

SEQ ID NO: 3249029 - RNA, 17 nt, Human
cagcuuauucacaagac

SEQ ID NO: 3249030 - RNA, 20 nt, Human
cagcuuauugucuagugaaa

SEQ ID NO: 3249031 - RNA, 19 nt, Human
cagcuguaugauucccagc

SEQ ID NO: 3249032 - RNA, 17 nt, Human
cagacuggcacaguuuu

SEQ ID NO: 3249033 - RNA, 18 nt, Human
cagacuggcacaguuuuc

SEQ ID NO: 3249034 - RNA, 22 nt, Human
cagacuggcacaguuuucugag

SEQ ID NO: 3249035 - RNA, 23 nt, Human
cagacuggcacaguuuucugaga

SEQ ID NO: 3249036 - RNA, 15 nt, Human
cagccagacuggcac

SEQ ID NO: 3249037 - RNA, 18 nt, Human
cagccagacuggcacagu

SEQ ID NO: 3249038 - RNA, 14 nt, Human
cagccagacuggca

SEQ ID NO: 3249039 - RNA, 21 nt, Human
ccaacuccagaaagugacaag

SEQ ID NO: 3249040 - RNA, 19 nt, Human
ccaauucgaacuuuuucca

SEQ ID NO: 3249041 - RNA, 22 nt, Human
ccaauuauaugagacguuuuug

SEQ ID NO: 3249042 - RNA, 14 nt, Human
cauuuguauaaaau

SEQ ID NO: 3249043 - RNA, 16 nt, Human
cauuuguauaaaauaa

SEQ ID NO: 3249044 - RNA, 14 nt, Human
ccaaaaggcagaag

SEQ ID NO: 3249045 - RNA, 19 nt, Human
cauuauauuuauuacugua

SEQ ID NO: 3249046 - RNA, 22 nt, Human
caguuauuauauuuacaaaugg

SEQ ID NO: 3249047 - RNA, 22 nt, Human
cagugauuaccagggacugagg

SEQ ID NO: 3249048 - RNA, 19 nt, Human
caguuauggcuauaggugc

SEQ ID NO: 3249049 - RNA, 20 nt, Human
caguuauggcuauaggugcu

SEQ ID NO: 3249050 - RNA, 13 nt, Human
caguuauggcuau

SEQ ID NO: 3249051 - RNA, 21 nt, Human
caguuauuauauuuacaaaug

SEQ ID NO: 3249052 - RNA, 17 nt, Human
caguuauuauauuuaca

SEQ ID NO: 3249053 - RNA, 19 nt, Human
cauagcagcuuauucacaa

SEQ ID NO: 3249054 - RNA, 23 nt, Human
caguuguucaauaauaaauauuu

SEQ ID NO: 3249055 - RNA, 19 nt, Human
cauccugaggcuccacuug

SEQ ID NO: 3249056 - RNA, 18 nt, Human
cauccugaggcuccacuu

SEQ ID NO: 3249057 - RNA, 22 nt, Human
auugaggacacugauauggguc

SEQ ID NO: 3249058 - RNA, 20 nt, Human
auuaaauuuugaguucuaca

SEQ ID NO: 3249059 - RNA, 16 nt, Human
auuucagcagcugcag

SEQ ID NO: 3249060 - RNA, 15 nt, Human
auugauaaguucaua

SEQ ID NO: 3249061 - RNA, 12 nt, Human
auugauaaguuc

SEQ ID NO: 3249062 - RNA, 19 nt, Human
auugauaaguucauacauu

SEQ ID NO: 3249063 - RNA, 18 nt, Human
auugauaaguucauacau

SEQ ID NO: 3249064 - RNA, 17 nt, Human
auugauaaguucauaca

SEQ ID NO: 3249065 - RNA, 16 nt, Human
auugauaaguucauac

SEQ ID NO: 3249066 - RNA, 19 nt, Human
auuuucuauaauuuaaaua

SEQ ID NO: 3249067 - RNA, 18 nt, Human
auuuucuauaauuuaaau

SEQ ID NO: 3249068 - RNA, 17 nt, Human
auuuucuauaauuuaaa

SEQ ID NO: 3249069 - RNA, 21 nt, Human
caaaagguauuuuaaucacca

SEQ ID NO: 3249070 - RNA, 17 nt, Human
caaacauauauaacaau

SEQ ID NO: 3249071 - RNA, 16 nt, Human
auuuuuauauuugaaa

SEQ ID NO: 3249072 - RNA, 19 nt, Human
auuuuuauauuugaaauau

SEQ ID NO: 3249073 - RNA, 17 nt, Human
caaucagccuaguugau

SEQ ID NO: 3249074 - RNA, 21 nt, Human
caauauuucagauaaucacaa

SEQ ID NO: 3249075 - RNA, 14 nt, Human
caagcaaguauuag

SEQ ID NO: 3249076 - RNA, 19 nt, Human
caacuauauuguuugcuaa

SEQ ID NO: 3249077 - RNA, 19 nt, Human
caacuaucucauuuccaag

SEQ ID NO: 3249078 - RNA, 15 nt, Human
caacuauuuuuccaa

SEQ ID NO: 3249079 - RNA, 12 nt, Human
caacuccagaaa

SEQ ID NO: 3249080 - RNA, 13 nt, Human
cacaucagcuugc

SEQ ID NO: 3249081 - RNA, 23 nt, Human
cacaucagcuugcccuguuaaaa

SEQ ID NO: 3249082 - RNA, 21 nt, Human
cacuccagugagacagcucug

SEQ ID NO: 3249083 - RNA, 16 nt, Human
cacuccagugagacag

SEQ ID NO: 3249084 - RNA, 11 nt, Human
cacugaagaag

SEQ ID NO: 3249085 - RNA, 23 nt, Human
cacugaagaagcaccaaucauga

SEQ ID NO: 3249086 - RNA, 19 nt, Human
ggaggcugagaugggagaa

SEQ ID NO: 3249087 - RNA, 15 nt, Human
ggaggcugagauggg

SEQ ID NO: 3249088 - RNA, 22 nt, Human
ggauguugaaaaaguucugcag

SEQ ID NO: 3249089 - RNA, 22 nt, Human
ggaugguucccuugaugaagaa

SEQ ID NO: 3249090 - RNA, 23 nt, Human
ggaugguucccuugaugaagaag

SEQ ID NO: 3249091 - RNA, 16 nt, Human
ggccuccauccugagg

SEQ ID NO: 3249092 - RNA, 20 nt, Human
aaaaagccugcaauuucaua

SEQ ID NO: 3249093 - RNA, 11 nt, Human
gggaggcagag

SEQ ID NO: 3249094 - RNA, 20 nt, Human
gggaggcagagguugcagug

SEQ ID NO: 3249095 - RNA, 22 nt, Human
aaaagcuccauuuuuagugaaa

SEQ ID NO: 3249096 - RNA, 21 nt, Human
aaaacuuuaugcuaagugaaa

SEQ ID NO: 3249097 - RNA, 19 nt, Human
aaaagccugcaauuucaua

SEQ ID NO: 3249098 - RNA, 21 nt, Human
aaaauaauuuuuauauuugaa

SEQ ID NO: 3249099 - RNA, 23 nt, Human
aaaauaauuuuuauauuugaaau

SEQ ID NO: 3249100 - RNA, 20 nt, Human
aaaauaauuuuuauauuuga

SEQ ID NO: 3249101 - RNA, 14 nt, Human
aaaauauauuuaau

SEQ ID NO: 3249102 - RNA, 18 nt, Human
aaagagaacuuccagauc

SEQ ID NO: 3249103 - RNA, 21 nt, Human
aaagacuauucaaacagucuc

SEQ ID NO: 3249104 - RNA, 13 nt, Human
aaagacuccaaag

SEQ ID NO: 3249105 - RNA, 23 nt, Human
aaagacuauucaaacagucucag

SEQ ID NO: 3249106 - RNA, 22 nt, Human
aaagacuauucaaacagucuca

SEQ ID NO: 3249107 - RNA, 15 nt, Human
aaagaggcagcuuga

SEQ ID NO: 3249108 - RNA, 20 nt, Human
aaagaggcagcuugaaacug

SEQ ID NO: 3249109 - RNA, 14 nt, Human
aaagauuuucagaa

SEQ ID NO: 3249110 - RNA, 15 nt, Human
aaagauuuucagaaa

SEQ ID NO: 3249111 - RNA, 16 nt, Human
aaagaaugauuaugaa

SEQ ID NO: 3249112 - RNA, 18 nt, Human
ggucauauuaauauauuu

SEQ ID NO: 3249113 - RNA, 21 nt, Human
ggucauauuaauauauuucca

SEQ ID NO: 3249114 - RNA, 13 nt, Human
aaagcuuauuaaa

SEQ ID NO: 3249115 - RNA, 13 nt, Human
aaaggaauuuaaa

SEQ ID NO: 3249116 - RNA, 14 nt, Human
ggucugugagaugc

SEQ ID NO: 3249117 - RNA, 21 nt, Human
aaagauuuucagaaaauauua

SEQ ID NO: 3249118 - RNA, 15 nt, Human
ggugccaguuauggc

SEQ ID NO: 3249119 - RNA, 16 nt, Human
aaaccacagcaguuga

SEQ ID NO: 3249120 - RNA, 15 nt, Human
aaaccacagcaguug

SEQ ID NO: 3249121 - RNA, 13 nt, Human
aaacauauauaac

SEQ ID NO: 3249122 - RNA, 16 nt, Human
aaacauauauaacaau

SEQ ID NO: 3249123 - RNA, 19 nt, Human
aaacauauauaacaaugcu

SEQ ID NO: 3249124 - RNA, 21 nt, Human
aaacauauauaacaaugcugu

SEQ ID NO: 3249125 - RNA, 14 nt, Human
aaacacaacuauau

SEQ ID NO: 3249126 - RNA, 20 nt, Human
aaacaagcacuaaacaaaga

SEQ ID NO: 3249127 - RNA, 17 nt, Human
aaacaaggaugaauuaa

SEQ ID NO: 3249128 - RNA, 19 nt, Human
aaacaacuucaauauccaa

SEQ ID NO: 3249129 - RNA, 19 nt, Human
aaaauuuuuucucuaggaa

SEQ ID NO: 3249130 - RNA, 14 nt, Human
aaaauauuaugugu

SEQ ID NO: 3249131 - RNA, 15 nt, Human
aaaauauuauguguu

SEQ ID NO: 3249132 - RNA, 21 nt, Human
aaaauauuauguguuuccaua

SEQ ID NO: 3249133 - RNA, 16 nt, Human
gcccccaggugccagu

SEQ ID NO: 3249134 - RNA, 14 nt, Human
gcccuguuaaaaga

SEQ ID NO: 3249135 - RNA, 17 nt, Human
gcccuguuaaaagauga

SEQ ID NO: 3249136 - RNA, 13 nt, Human
gcccuguuaaaag

SEQ ID NO: 3249137 - RNA, 16 nt, Human
gccauaugaaaaggcu

SEQ ID NO: 3249138 - RNA, 22 nt, Human
gccagacaucaacagauaaaua

SEQ ID NO: 3249139 - RNA, 19 nt, Human
gccagauuuuccugaaaac

SEQ ID NO: 3249140 - RNA, 21 nt, Human
gccacuguuuugaaucucaua

SEQ ID NO: 3249141 - RNA, 17 nt, Human
gcuggagcucugcccau

SEQ ID NO: 3249142 - RNA, 14 nt, Human
gcuggagcucugcc

SEQ ID NO: 3249143 - RNA, 22 nt, Human
gcuuccuucugugaaaguacau

SEQ ID NO: 3249144 - RNA, 16 nt, Human
gcuaguaucaaaagaa

SEQ ID NO: 3249145 - RNA, 21 nt, Human
gcuaguaauuggaaaggcagc

SEQ ID NO: 3249146 - RNA, 15 nt, Human
gcuccccucggagaa

SEQ ID NO: 3249147 - RNA, 14 nt, Human
gacacacugaagaa

SEQ ID NO: 3249148 - RNA, 15 nt, Human
gacacacugaagaag

SEQ ID NO: 3249149 - RNA, 16 nt, Human
gacacacugaagaagc

SEQ ID NO: 3249150 - RNA, 21 nt, Human
gacagaaagcagaacagugau

SEQ ID NO: 3249151 - RNA, 16 nt, Human
gacauuugcucaugga

SEQ ID NO: 3249152 - RNA, 21 nt, Human
gacagugagacucugucucag

SEQ ID NO: 3249153 - RNA, 14 nt, Human
gacagugaaagaaa

SEQ ID NO: 3249154 - RNA, 14 nt, Human
gacucuuaagaaga

SEQ ID NO: 3249155 - RNA, 18 nt, Human
gacucuuaagaagacugc

SEQ ID NO: 3249156 - RNA, 21 nt, Human
gacucuuaagaagacugcauu

SEQ ID NO: 3249157 - RNA, 16 nt, Human
gacgcucucuggccuu

SEQ ID NO: 3249158 - RNA, 15 nt, Human
gacgcucucuggccu

SEQ ID NO: 3249159 - RNA, 14 nt, Human
gaagcaaaauuuuu

SEQ ID NO: 3249160 - RNA, 23 nt, Human
gaagcaacccaaauguucaucaa

SEQ ID NO: 3249161 - RNA, 19 nt, Human
gaacccgggaggcagaggu

SEQ ID NO: 3249162 - RNA, 14 nt, Human
gaacugaaaucaua

SEQ ID NO: 3249163 - RNA, 13 nt, Human
gaacugaaaucau

SEQ ID NO: 3249164 - RNA, 22 nt, Human
gaauauugcuuuggucauauga

SEQ ID NO: 3249165 - RNA, 15 nt, Human
gaauauguuucaaac

SEQ ID NO: 3249166 - RNA, 14 nt, Human
gaauauguuucaaa

SEQ ID NO: 3249167 - RNA, 20 nt, Human
gaauauguuucaaacuuugg

SEQ ID NO: 3249168 - RNA, 15 nt, Human
gauuuaccacuugug

SEQ ID NO: 3249169 - RNA, 16 nt, Human
gauuuaccacuugugu

SEQ ID NO: 3249170 - RNA, 16 nt, Human
gaugaucuuuaaaaua

SEQ ID NO: 3249171 - RNA, 18 nt, Human
gauguagaggagaaacug

SEQ ID NO: 3249172 - RNA, 17 nt, Human
gauguagaggagaaacu

SEQ ID NO: 3249173 - RNA, 14 nt, Human
gaugguucuagcau

SEQ ID NO: 3249174 - RNA, 22 nt, Human
gaugguucccuugaugaagaag

SEQ ID NO: 3249175 - RNA, 20 nt, Human
gcacaguuuucugagaaaga

SEQ ID NO: 3249176 - RNA, 22 nt, Human
gcacaguuuucugagaaagacu

SEQ ID NO: 3249177 - RNA, 23 nt, Human
gcacaguuuucugagaaagacua

SEQ ID NO: 3249178 - RNA, 22 nt, Human
gcaauagucaaauugugugaaa

SEQ ID NO: 3249179 - RNA, 20 nt, Human
gcaaguauuagaauaccaca

SEQ ID NO: 3249180 - RNA, 15 nt, Human
gaggacgcucucugg

SEQ ID NO: 3249181 - RNA, 23 nt, Human
gaggcuccacuuggucugugaga

SEQ ID NO: 3249182 - RNA, 18 nt, Human
gaggcuccacuuggucug

SEQ ID NO: 3249183 - RNA, 19 nt, Human
gaggcuccacuuggucugu

SEQ ID NO: 3249184 - RNA, 15 nt, Human
cuucuguuuuauaau

SEQ ID NO: 3249185 - RNA, 20 nt, Human
cuucuguuuuauaauuuugu

SEQ ID NO: 3249186 - RNA, 20 nt, Human
cuuuaaagggauggcaagau

SEQ ID NO: 3249187 - RNA, 21 nt, Human
cuuugagugucuuaauuaaaa

SEQ ID NO: 3249188 - RNA, 11 nt, Human
cuucagacaua

SEQ ID NO: 3249189 - RNA, 12 nt, Human
cuucaucugacu

SEQ ID NO: 3249190 - RNA, 18 nt, Human
cuucaucugacuaugaca

SEQ ID NO: 3249191 - RNA, 23 nt, Human
cuucaugcugucuacacuaagag

SEQ ID NO: 3249192 - RNA, 10 nt, Human
cugggacagg

SEQ ID NO: 3249193 - RNA, 21 nt, Human
cuggugccucaccccuugcca

SEQ ID NO: 3249194 - RNA, 12 nt, Human
cuggugccucac

SEQ ID NO: 3249195 - RNA, 16 nt, Human
cugcacuccagccuga

SEQ ID NO: 3249196 - RNA, 20 nt, Human
cugcacuccagccugagcga

SEQ ID NO: 3249197 - RNA, 17 nt, Human
cugcacuccagccugag

SEQ ID NO: 3249198 - RNA, 21 nt, Human
aauaacaaugaaaguugauaa

SEQ ID NO: 3249199 - RNA, 13 nt, Human
aauaacugugaag

SEQ ID NO: 3249200 - RNA, 16 nt, Human
aauaauuuuuauauuu

SEQ ID NO: 3249201 - RNA, 17 nt, Human
aauaauuuuuauauuug

SEQ ID NO: 3249202 - RNA, 19 nt, Human
aauaauuuuuauauuugaa

SEQ ID NO: 3249203 - RNA, 21 nt, Human
aauaauuuuaagaaaucaaag

SEQ ID NO: 3249204 - RNA, 20 nt, Human
aauaacugugaaguuuacau

SEQ ID NO: 3249205 - RNA, 14 nt, Human
aauaacugugaagu

SEQ ID NO: 3249206 - RNA, 16 nt, Human
aauaacugugaaguuu

SEQ ID NO: 3249207 - RNA, 20 nt, Human
aauaauuuuuauauuugaaa

SEQ ID NO: 3249208 - RNA, 17 nt, Human
uaaauuuugaguucuac

SEQ ID NO: 3249209 - RNA, 19 nt, Human
aauaucuuuuuuuuaauaa

SEQ ID NO: 3249210 - RNA, 24 nt, Human
aauaugcaaagcacugacuucuaa

SEQ ID NO: 3249211 - RNA, 15 nt, Human
aauaugcaaagcacu

SEQ ID NO: 3249212 - RNA, 17 nt, Human
aauaugcaaagcacuga

SEQ ID NO: 3249213 - RNA, 14 nt, Human
aauauuucagauaa

SEQ ID NO: 3249214 - RNA, 15 nt, Human
aauauuucagauaau

SEQ ID NO: 3249215 - RNA, 20 nt, Human
aauauugcuuuggucauaug

SEQ ID NO: 3249216 - RNA, 18 nt, Human
aauauuguguugugaaug

SEQ ID NO: 3249217 - RNA, 18 nt, Human
aauaggcguaacuaauuu

SEQ ID NO: 3249218 - RNA, 20 nt, Human
uaaauuuugucuuuaacuca

SEQ ID NO: 3249219 - RNA, 18 nt, Human
uaaauuuugaguucuaca

SEQ ID NO: 3249220 - RNA, 19 nt, Human
uaaauuuugaguucuacau

SEQ ID NO: 3249221 - RNA, 12 nt, Human
aauaucacuugu

SEQ ID NO: 3249222 - RNA, 15 nt, Human
aauaucacuugucaa

SEQ ID NO: 3249223 - RNA, 15 nt, Human
aaucaucaagucuuu

SEQ ID NO: 3249224 - RNA, 23 nt, Human
aaucaugaauuaguuuuauaugc

SEQ ID NO: 3249225 - RNA, 19 nt, Human
aaucaugaauuaguuuuau

SEQ ID NO: 3249226 - RNA, 17 nt, Human
aaucaugaauuaguuuu

SEQ ID NO: 3249227 - RNA, 20 nt, Human
uaaguauguguaaaauguga

SEQ ID NO: 3249228 - RNA, 13 nt, Human
uaaguucauacau

SEQ ID NO: 3249229 - RNA, 12 nt, Human
uaaguucauaca

SEQ ID NO: 3249230 - RNA, 13 nt, Human
aauccuugaagau

SEQ ID NO: 3249231 - RNA, 14 nt, Human
aaucuuauaauuua

SEQ ID NO: 3249232 - RNA, 20 nt, Human
aaugacucagaauauugcuu

SEQ ID NO: 3249233 - RNA, 14 nt, Human
uaaugguguuuuaa

SEQ ID NO: 3249234 - RNA, 23 nt, Human
uaaucagugugucuaaauuugaa

SEQ ID NO: 3249235 - RNA, 11 nt, Human
aaugugauaug

SEQ ID NO: 3249236 - RNA, 18 nt, Human
uacauauuuuuguagcac

SEQ ID NO: 3249237 - RNA, 17 nt, Human
uacauauuuuuguagca

SEQ ID NO: 3249238 - RNA, 19 nt, Human
aauggacuuuuguacauag

SEQ ID NO: 3249239 - RNA, 18 nt, Human
uacacuaagagagaauga

SEQ ID NO: 3249240 - RNA, 19 nt, Human
uacacuaagagagaaugag

SEQ ID NO: 3249241 - RNA, 15 nt, Human
uacaaaaacacagca

SEQ ID NO: 3249242 - RNA, 21 nt, Human
uacaaaaaaaaaaaaaaauua

SEQ ID NO: 3249243 - RNA, 13 nt, Human
uacaaaaacacag

SEQ ID NO: 3249244 - RNA, 14 nt, Human
uacaaaaacacagc

SEQ ID NO: 3249245 - RNA, 13 nt, Human
uaauucaagaaaa

SEQ ID NO: 3249246 - RNA, 17 nt, Human
uaauuuauacaggucau

SEQ ID NO: 3249247 - RNA, 14 nt, Human
uacuaaaaauacaa

SEQ ID NO: 3249248 - RNA, 18 nt, Human
uacuaaaaauacaaaaaa

SEQ ID NO: 3249249 - RNA, 17 nt, Human
uacugagagugaacaaa

SEQ ID NO: 3249250 - RNA, 18 nt, Human
aauugaggacacugauau

SEQ ID NO: 3249251 - RNA, 16 nt, Human
uacuucaugcugucua

SEQ ID NO: 3249252 - RNA, 19 nt, Human
uacuucuuaggguuaugau

SEQ ID NO: 3249253 - RNA, 18 nt, Human
aauuuacagagacagaaa

SEQ ID NO: 3249254 - RNA, 17 nt, Human
aauuuacagagacagaa

SEQ ID NO: 3249255 - RNA, 17 nt, Human
aauuuauacaggucaua

SEQ ID NO: 3249256 - RNA, 16 nt, Human
aauuuauacaggucau

SEQ ID NO: 3249257 - RNA, 22 nt, Human
acaagcucacagaccuuugaac

SEQ ID NO: 3249258 - RNA, 17 nt, Human
acaagaugguucuagca

SEQ ID NO: 3249259 - RNA, 17 nt, Human
acaaauuuacagagaca

SEQ ID NO: 3249260 - RNA, 16 nt, Human
uagcuacuaauuuuaa

SEQ ID NO: 3249261 - RNA, 18 nt, Human
acaaugaagauaaaaaga

SEQ ID NO: 3249262 - RNA, 22 nt, Human
aauuuuuucucuaggaaauauu

SEQ ID NO: 3249263 - RNA, 21 nt, Human
aauuuuucuuauuucauuucu

SEQ ID NO: 3249264 - RNA, 21 nt, Human
uagaugcaguucugaagaaga

SEQ ID NO: 3249265 - RNA, 20 nt, Human
uagaugcaguucugaagaag

SEQ ID NO: 3249266 - RNA, 17 nt, Human
uagauaggccaugggca

SEQ ID NO: 3249267 - RNA, 22 nt, Human
uagauaggucagugcaaauacu

SEQ ID NO: 3249268 - RNA, 12 nt, Human
acacugaagaag

SEQ ID NO: 3249269 - RNA, 14 nt, Human
acacugaagaagca

SEQ ID NO: 3249270 - RNA, 14 nt, Human
acacuccagugaga

SEQ ID NO: 3249271 - RNA, 16 nt, Human
uauaaguauucuaaau

SEQ ID NO: 3249272 - RNA, 15 nt, Human
acacuuaaaaauggu

SEQ ID NO: 3249273 - RNA, 13 nt, Human
acacuuaaaaaug

SEQ ID NO: 3249274 - RNA, 15 nt, Human
uauauuuaaugauaa

SEQ ID NO: 3249275 - RNA, 12 nt, Human
uauauuuacaaa

SEQ ID NO: 3249276 - RNA, 19 nt, Human
uauauuuauuacuguaaga

SEQ ID NO: 3249277 - RNA, 15 nt, Human
uauauuuauuacugu

SEQ ID NO: 3249278 - RNA, 17 nt, Human
uaucucaaaacugcacu

SEQ ID NO: 3249279 - RNA, 20 nt, Human
acagcccuucuuuccacaga

SEQ ID NO: 3249280 - RNA, 21 nt, Human
acagcccuucuuuccacagaa

SEQ ID NO: 3249281 - RNA, 19 nt, Human
acagcccuucuuuccacag

SEQ ID NO: 3249282 - RNA, 16 nt, Human
uaucuuguagcuuuau

SEQ ID NO: 3249283 - RNA, 14 nt, Human
acagauaaucagug

SEQ ID NO: 3249284 - RNA, 20 nt, Human
acacacucaaaucaagaaac

SEQ ID NO: 3249285 - RNA, 13 nt, Human
acacacugaagaa

SEQ ID NO: 3249286 - RNA, 14 nt, Human
acaaugcuguauuu

SEQ ID NO: 3249287 - RNA, 17 nt, Human
acaaugcuguauuuuaa

SEQ ID NO: 3249288 - RNA, 14 nt, Human
acacaacuauauug

SEQ ID NO: 3249289 - RNA, 17 nt, Human
acacaacuauauuguuu

SEQ ID NO: 3249290 - RNA, 18 nt, Human
acacaacuauuuuuccaa

SEQ ID NO: 3249291 - RNA, 14 nt, Human
acacacugaagaag

SEQ ID NO: 3249292 - RNA, 14 nt, Human
uaguaauagagcaa

SEQ ID NO: 3249293 - RNA, 12 nt, Human
uaguguuggaga

SEQ ID NO: 3249294 - RNA, 16 nt, Human
uaguguuggagaagaa

SEQ ID NO: 3249295 - RNA, 20 nt, Human
uaguaauagagcaaaauuga

SEQ ID NO: 3249296 - RNA, 23 nt, Human
uauaaaauaauuuuuauauuuga

SEQ ID NO: 3249297 - RNA, 17 nt, Human
acacuaagagagaauga

SEQ ID NO: 3249298 - RNA, 14 nt, Human
acacuaagagagaa

SEQ ID NO: 3249299 - RNA, 18 nt, Human
acacuaagagagaaugag

SEQ ID NO: 3249300 - RNA, 23 nt, Human
aagcuuguauuccuuuuucucuc

SEQ ID NO: 3249301 - RNA, 18 nt, Human
aagcuuauuaaaacucau

SEQ ID NO: 3249302 - RNA, 14 nt, Human
guugacaugggaca

SEQ ID NO: 3249303 - RNA, 18 nt, Human
guugacaugggacauuug

SEQ ID NO: 3249304 - RNA, 13 nt, Human
guugacaugggac

SEQ ID NO: 3249305 - RNA, 18 nt, Human
guucuagcauggcauauu

SEQ ID NO: 3249306 - RNA, 9 nt, Human
guucauaca

SEQ ID NO: 3249307 - RNA, 23 nt, Human
guucauacauauuuuuguagcac

SEQ ID NO: 3249308 - RNA, 14 nt, Human
guucauacauauuu

SEQ ID NO: 3249309 - RNA, 13 nt, Human
guucauacauauu

SEQ ID NO: 3249310 - RNA, 10 nt, Human
guucauacau

SEQ ID NO: 3249311 - RNA, 14 nt, Human
guucauacauugua

SEQ ID NO: 3249312 - RNA, 11 nt, Human
guucauacauu

SEQ ID NO: 3249313 - RNA, 14 nt, Human
guuaaguaugugua

SEQ ID NO: 3249314 - RNA, 21 nt, Human
guuucaaacauauauaacaau

SEQ ID NO: 3249315 - RNA, 23 nt, Human
guuuucugagaaagacuauucaa

SEQ ID NO: 3249316 - RNA, 10 nt, Human
guuuaaaauc

SEQ ID NO: 3249317 - RNA, 16 nt, Human
guuuaaaaucauuucu

SEQ ID NO: 3249318 - RNA, 18 nt, Human
guuguaccgcaaugugac

SEQ ID NO: 3249319 - RNA, 22 nt, Human
aagaagugaaaaucuacacucc

SEQ ID NO: 3249320 - RNA, 16 nt, Human
aagaagugaaaaucua

SEQ ID NO: 3249321 - RNA, 18 nt, Human
aagaaugauuaugaauua

SEQ ID NO: 3249322 - RNA, 16 nt, Human
aagaaugauuaugaau

SEQ ID NO: 3249323 - RNA, 19 nt, Human
aagagcuguucacagccag

SEQ ID NO: 3249324 - RNA, 21 nt, Human
gugggacagucaccucaugga

SEQ ID NO: 3249325 - RNA, 21 nt, Human
gugugaccacugcagaagaca

SEQ ID NO: 3249326 - RNA, 13 nt, Human
guguuuauuuaua

SEQ ID NO: 3249327 - RNA, 18 nt, Human
guguuuccauauuuuaua

SEQ ID NO: 3249328 - RNA, 22 nt, Human
aaaugaaagcagggacuugaac

SEQ ID NO: 3249329 - RNA, 21 nt, Human
aaaugaaagcagggacuugaa

SEQ ID NO: 3249330 - RNA, 19 nt, Human
aaauggcuuccuggcaaua

SEQ ID NO: 3249331 - RNA, 18 nt, Human
aaauggcuuccuggcaau

SEQ ID NO: 3249332 - RNA, 14 nt, Human
aaaugcauuucuaa

SEQ ID NO: 3249333 - RNA, 14 nt, Human
aaauccuugaagau

SEQ ID NO: 3249334 - RNA, 19 nt, Human
aaaucuacacuccagugag

SEQ ID NO: 3249335 - RNA, 18 nt, Human
aaauccauacauuugugu

SEQ ID NO: 3249336 - RNA, 18 nt, Human
aaauuucagcagcugcag

SEQ ID NO: 3249337 - RNA, 17 nt, Human
aaauuucagcagcugca

SEQ ID NO: 3249338 - RNA, 16 nt, Human
guauuuuugacagaau

SEQ ID NO: 3249339 - RNA, 20 nt, Human
guauuuuugacagaauaugu

SEQ ID NO: 3249340 - RNA, 22 nt, Human
aaauuauuuuguucauacauau

SEQ ID NO: 3249341 - RNA, 21 nt, Human
aaauuauuuuguucauacaua

SEQ ID NO: 3249342 - RNA, 20 nt, Human
aaauuauuuuguucauacau

SEQ ID NO: 3249343 - RNA, 22 nt, Human
aaauuauauaaguauucuaaau

SEQ ID NO: 3249344 - RNA, 19 nt, Human
aaauuauuuuguucauaca

SEQ ID NO: 3249345 - RNA, 17 nt, Human
aaauuauuuuguucaua

SEQ ID NO: 3249346 - RNA, 18 nt, Human
aaauuauauaaguauucu

SEQ ID NO: 3249347 - RNA, 16 nt, Human
aaauuauauaaguauu

SEQ ID NO: 3249348 - RNA, 22 nt, Human
aaauguaagggaaacugccagc

SEQ ID NO: 3249349 - RNA, 16 nt, Human
aaauguaagggaaacu

SEQ ID NO: 3249350 - RNA, 14 nt, Human
guaugauucccagc

SEQ ID NO: 3249351 - RNA, 19 nt, Human
gucuuaauuaaaagaauau

SEQ ID NO: 3249352 - RNA, 21 nt, Human
gucuuaauuaaaagaauauuu

SEQ ID NO: 3249353 - RNA, 22 nt, Human
gucuuaauuaaaagaauauuuu

SEQ ID NO: 3249354 - RNA, 14 nt, Human
aacuccagaaagug

SEQ ID NO: 3249355 - RNA, 21 nt, Human
aacuccagaaagugacaagcu

SEQ ID NO: 3249356 - RNA, 15 nt, Human
gugaacacaucagcu

SEQ ID NO: 3249357 - RNA, 14 nt, Human
aacucccuuucaac

SEQ ID NO: 3249358 - RNA, 13 nt, Human
aacucccuuucaa

SEQ ID NO: 3249359 - RNA, 18 nt, Human
aacucguuaauuuguagu

SEQ ID NO: 3249360 - RNA, 13 nt, Human
aacccaaauguuc

SEQ ID NO: 3249361 - RNA, 18 nt, Human
aacccaaauguucaucaa

SEQ ID NO: 3249362 - RNA, 20 nt, Human
aacccauauuuguacaccaa

SEQ ID NO: 3249363 - RNA, 17 nt, Human
aaccuagggugauauua

SEQ ID NO: 3249364 - RNA, 20 nt, Human
aaccuagggugauauuaacc

SEQ ID NO: 3249365 - RNA, 17 nt, Human
aaccucaaaaugucuaa

SEQ ID NO: 3249366 - RNA, 22 nt, Human
aacaguagugauaguuguaccg

SEQ ID NO: 3249367 - RNA, 18 nt, Human
aacauuugguaaggggaa

SEQ ID NO: 3249368 - RNA, 21 nt, Human
aacaagccuccuuuuaaagua

SEQ ID NO: 3249369 - RNA, 15 nt, Human
aacaaggaugaauua

SEQ ID NO: 3249370 - RNA, 18 nt, Human
aacaaugaagauaaaaag

SEQ ID NO: 3249371 - RNA, 14 nt, Human
aacaaugaagauaa

SEQ ID NO: 3249372 - RNA, 24 nt, Human
guccaagcauaccaacacgagcag

SEQ ID NO: 3249373 - RNA, 21 nt, Human
guccaagcauuuagauguaua

SEQ ID NO: 3249374 - RNA, 15 nt, Human
agagacagaaagcag

SEQ ID NO: 3249375 - RNA, 24 nt, Human
agagacagaaagcagaacagugau

SEQ ID NO: 3249376 - RNA, 23 nt, Human
agacuauucaaacagucucagga

SEQ ID NO: 3249377 - RNA, 15 nt, Human
ucuuauuucauuucu

SEQ ID NO: 3249378 - RNA, 16 nt, Human
ucuuauuucauuucuu

SEQ ID NO: 3249379 - RNA, 23 nt, Human
ucuuagaugcaguucugaagaag

SEQ ID NO: 3249380 - RNA, 22 nt, Human
ucuuagaugcaguucugaagaa

SEQ ID NO: 3249381 - RNA, 17 nt, Human
agacacacugaagaagc

SEQ ID NO: 3249382 - RNA, 16 nt, Human
agacacacugaagaag

SEQ ID NO: 3249383 - RNA, 15 nt, Human
agacacacaugaagu

SEQ ID NO: 3249384 - RNA, 19 nt, Human
agacacaacuauuuuucca

SEQ ID NO: 3249385 - RNA, 20 nt, Human
agacacaacuauuuuuccaa

SEQ ID NO: 3249386 - RNA, 23 nt, Human
agaauuaacacaugauccugcaa

SEQ ID NO: 3249387 - RNA, 16 nt, Human
agaguuuagcuggaaa

SEQ ID NO: 3249388 - RNA, 17 nt, Human
ugacauaaaaacaacuu

SEQ ID NO: 3249389 - RNA, 20 nt, Human
ugacauaaaaacaacuuuau

SEQ ID NO: 3249390 - RNA, 18 nt, Human
ugacauaaaaacaacuuu

SEQ ID NO: 3249391 - RNA, 17 nt, Human
ugacccacaagaaauga

SEQ ID NO: 3249392 - RNA, 14 nt, Human
agaugcuagaacuc

SEQ ID NO: 3249393 - RNA, 18 nt, Human
agaugcaguucugaagaa

SEQ ID NO: 3249394 - RNA, 19 nt, Human
agaugcaguucugaagaag

SEQ ID NO: 3249395 - RNA, 17 nt, Human
agaugcaguucugaaga

SEQ ID NO: 3249396 - RNA, 14 nt, Human
agagcaaaauugau

SEQ ID NO: 3249397 - RNA, 23 nt, Human
ugaaauaagccagacaucaacag

SEQ ID NO: 3249398 - RNA, 20 nt, Human
ugaaauaagccagacaucaa

SEQ ID NO: 3249399 - RNA, 18 nt, Human
ugaaauaagccagacauc

SEQ ID NO: 3249400 - RNA, 17 nt, Human
ugaaauaagccagacau

SEQ ID NO: 3249401 - RNA, 14 nt, Human
ugaaauaagccaga

SEQ ID NO: 3249402 - RNA, 15 nt, Human
ugaaauuguauuaca

SEQ ID NO: 3249403 - RNA, 21 nt, Human
agagcuguucacagccagacu

SEQ ID NO: 3249404 - RNA, 19 nt, Human
agagcuguucacagccaga

SEQ ID NO: 3249405 - RNA, 18 nt, Human
ugaacaaauuuacagaga

SEQ ID NO: 3249406 - RNA, 20 nt, Human
ugaacaaauuuacagagaca

SEQ ID NO: 3249407 - RNA, 19 nt, Human
ugaacaaauuuacagagac

SEQ ID NO: 3249408 - RNA, 23 nt, Human
ugaacuagaguuuagcuggaaaa

SEQ ID NO: 3249409 - RNA, 15 nt, Human
agagguugcagugag

SEQ ID NO: 3249410 - RNA, 17 nt, Human
ucuaccaaaaaucucaa

SEQ ID NO: 3249411 - RNA, 22 nt, Human
ucuacauaaguaauucaagaaa

SEQ ID NO: 3249412 - RNA, 20 nt, Human
ucuaaagccauuguaguccu

SEQ ID NO: 3249413 - RNA, 21 nt, Human
ucuaaguaaaaccacagcagu

SEQ ID NO: 3249414 - RNA, 22 nt, Human
ucuaaguaaaaccacagcaguu

SEQ ID NO: 3249415 - RNA, 20 nt, Human
ucuaaguaaaaccacagcag

SEQ ID NO: 3249416 - RNA, 23 nt, Human
ucuaaguaaaaccacagcaguug

SEQ ID NO: 3249417 - RNA, 17 nt, Human
ucuacauaaguaauuca

SEQ ID NO: 3249418 - RNA, 20 nt, Human
ucuacauaaguaauucaaga

SEQ ID NO: 3249419 - RNA, 21 nt, Human
acugucagcuccccucggaga

SEQ ID NO: 3249420 - RNA, 18 nt, Human
acugggacaggggagaac

SEQ ID NO: 3249421 - RNA, 13 nt, Human
acuguggguagac

SEQ ID NO: 3249422 - RNA, 18 nt, Human
acuguggguagacacaca

SEQ ID NO: 3249423 - RNA, 22 nt, Human
ucggguuuuauuguuuaaaauc

SEQ ID NO: 3249424 - RNA, 13 nt, Human
acuggcacaguuu

SEQ ID NO: 3249425 - RNA, 19 nt, Human
acuggcacaguuuucugag

SEQ ID NO: 3249426 - RNA, 20 nt, Human
acuggcacaguuuucugaga

SEQ ID NO: 3249427 - RNA, 13 nt, Human
acugccuucucaa

SEQ ID NO: 3249428 - RNA, 19 nt, Human
acugccuucucaacuccaa

SEQ ID NO: 3249429 - RNA, 15 nt, Human
acugcauuauauuua

SEQ ID NO: 3249430 - RNA, 14 nt, Human
acugcauuauauuu

SEQ ID NO: 3249431 - RNA, 22 nt, Human
uccuuucuaacaaaaaaauaua

SEQ ID NO: 3249432 - RNA, 16 nt, Human
acuugucaauaaaauc

SEQ ID NO: 3249433 - RNA, 20 nt, Human
acuugaacccgggaggcaga

SEQ ID NO: 3249434 - RNA, 19 nt, Human
acuugaacccgggaggcag

SEQ ID NO: 3249435 - RNA, 21 nt, Human
acuugaacccauauuuguaca

SEQ ID NO: 3249436 - RNA, 21 nt, Human
acuucuaaguaaaaccacagc

SEQ ID NO: 3249437 - RNA, 23 nt, Human
acuucuaaguaaaaccacagcag

SEQ ID NO: 3249438 - RNA, 16 nt, Human
acuuguguuuugcaag

SEQ ID NO: 3249439 - RNA, 12 nt, Human
ucucuggccuuc

SEQ ID NO: 3249440 - RNA, 22 nt, Human
ucucuggccuucggccuccauc

SEQ ID NO: 3249441 - RNA, 21 nt, Human
ucucuggccuucggccuccau

SEQ ID NO: 3249442 - RNA, 23 nt, Human
agaaacuuaagguuaccuuuguu

SEQ ID NO: 3249443 - RNA, 12 nt, Human
ucugaagaagau

SEQ ID NO: 3249444 - RNA, 17 nt, Human
agaaaucaaagagagaa

SEQ ID NO: 3249445 - RNA, 14 nt, Human
ucugacuaugacau

SEQ ID NO: 3249446 - RNA, 16 nt, Human
ucugacuaugacauaa

SEQ ID NO: 3249447 - RNA, 14 nt, Human
ucccagucauuuaa

SEQ ID NO: 3249448 - RNA, 22 nt, Human
ucccagucauuuaauaaaugug

SEQ ID NO: 3249449 - RNA, 21 nt, Human
uccaugaagauguagaggaga

SEQ ID NO: 3249450 - RNA, 13 nt, Human
uccaugaagaugu

SEQ ID NO: 3249451 - RNA, 21 nt, Human
uccauccugaggcuccacuug

SEQ ID NO: 3249452 - RNA, 20 nt, Human
uccauccugaggcuccacuu

SEQ ID NO: 3249453 - RNA, 19 nt, Human
uccauccugaggcuccacu

SEQ ID NO: 3249454 - RNA, 17 nt, Human
uccccucggagaagagc

SEQ ID NO: 3249455 - RNA, 16 nt, Human
uccccucggagaagag

SEQ ID NO: 3249456 - RNA, 11 nt, Human
ucccugagcag

SEQ ID NO: 3249457 - RNA, 21 nt, Human
acuccaaacugacucuuaaga

SEQ ID NO: 3249458 - RNA, 19 nt, Human
ucccuuucugcuuguguua

SEQ ID NO: 3249459 - RNA, 14 nt, Human
acuccaaagaaaug

SEQ ID NO: 3249460 - RNA, 15 nt, Human
acuccaaagaaaugu

SEQ ID NO: 3249461 - RNA, 18 nt, Human
acuccaaagaaauguaag

SEQ ID NO: 3249462 - RNA, 18 nt, Human
acuccagaaagugacaag

SEQ ID NO: 3249463 - RNA, 16 nt, Human
ucaugaauuaguuuua

SEQ ID NO: 3249464 - RNA, 22 nt, Human
ucaggaaaucaaauaugcaaag

SEQ ID NO: 3249465 - RNA, 23 nt, Human
ucaggaaaucaaauaugcaaagc

SEQ ID NO: 3249466 - RNA, 21 nt, Human
accuagggugauauuaaccag

SEQ ID NO: 3249467 - RNA, 16 nt, Human
accuagggugauauua

SEQ ID NO: 3249468 - RNA, 16 nt, Human
accucaaaaugucuaa

SEQ ID NO: 3249469 - RNA, 19 nt, Human
accucaaaaugucuaagau

SEQ ID NO: 3249470 - RNA, 21 nt, Human
uccaacuaucucauuuccaag

SEQ ID NO: 3249471 - RNA, 19 nt, Human
acgagcaggcuacugucag

SEQ ID NO: 3249472 - RNA, 20 nt, Human
acgagcaggcuacugucagc

SEQ ID NO: 3249473 - RNA, 14 nt, Human
acgagaaaacaaua

SEQ ID NO: 3249474 - RNA, 17 nt, Human
ucacuaccuucaugcau

SEQ ID NO: 3249475 - RNA, 15 nt, Human
accaaucaugaauua

SEQ ID NO: 3249476 - RNA, 13 nt, Human
accaaucaugaau

SEQ ID NO: 3249477 - RNA, 20 nt, Human
ucaauuuuucuuauuucauu

SEQ ID NO: 3249478 - RNA, 23 nt, Human
ucaauuuuucuuauuucauuucu

SEQ ID NO: 3249479 - RNA, 15 nt, Human
ucaauucuugccaaa

SEQ ID NO: 3249480 - RNA, 14 nt, Human
ucacauaucuagua

SEQ ID NO: 3249481 - RNA, 22 nt, Human
ucacauaucuaguaugaaauua

SEQ ID NO: 3249482 - RNA, 21 nt, Human
ucacauaucuaguaugaaauu

SEQ ID NO: 3249483 - RNA, 17 nt, Human
ucacauaucuaguauga

SEQ ID NO: 3249484 - RNA, 20 nt, Human
ucaggaaaucaaauaugcaa

SEQ ID NO: 3249485 - RNA, 21 nt, Human
ucaggaaaucaaauaugcaaa

SEQ ID NO: 3249486 - RNA, 19 nt, Human
ucaggaaagagaacuucca

SEQ ID NO: 3249487 - RNA, 13 nt, Human
ucaggaaagagaa

SEQ ID NO: 3249488 - RNA, 23 nt, Human
accauuucuugagguaaaagcau

SEQ ID NO: 3249489 - RNA, 16 nt, Human
acaguuuucugagaaa

SEQ ID NO: 3249490 - RNA, 17 nt, Human
acaguuuucugagaaag

SEQ ID NO: 3249491 - RNA, 15 nt, Human
acaguuuucugagaa

SEQ ID NO: 3249492 - RNA, 18 nt, Human
acaguuuucugagaaaga

SEQ ID NO: 3249493 - RNA, 19 nt, Human
acaguuuucugagaaagac

SEQ ID NO: 3249494 - RNA, 20 nt, Human
acaguuuucugagaaagacu

SEQ ID NO: 3249495 - RNA, 21 nt, Human
acaguuuucugagaaagacua

SEQ ID NO: 3249496 - RNA, 21 nt, Human
acauaaaaacaacuuuauacc

SEQ ID NO: 3249497 - RNA, 19 nt, Human
acauaaaaacaacuuuaua

SEQ ID NO: 3249498 - RNA, 16 nt, Human
acauaaaaacaacuuu

SEQ ID NO: 3249499 - RNA, 13 nt, Human
uauuucauuucuu

SEQ ID NO: 3249500 - RNA, 21 nt, Human
uauuuccauuaaaaaaucagu

SEQ ID NO: 3249501 - RNA, 13 nt, Human
acaucaacagaua

SEQ ID NO: 3249502 - RNA, 19 nt, Human
acauauauaacaaugcugu

SEQ ID NO: 3249503 - RNA, 18 nt, Human
acauagaauuaacacaug

SEQ ID NO: 3249504 - RNA, 14 nt, Human
acauagaauuaaca

SEQ ID NO: 3249505 - RNA, 17 nt, Human
acauaucuaguaugaaa

SEQ ID NO: 3249506 - RNA, 23 nt, Human
acauaucuaguaugaaauuauau

SEQ ID NO: 3249507 - RNA, 22 nt, Human
acauaucuaguaugaaauuaua

SEQ ID NO: 3249508 - RNA, 20 nt, Human
acauaucuaguaugaaauua

SEQ ID NO: 3249509 - RNA, 17 nt, Human
ucaagaaaacaacuuca

SEQ ID NO: 3249510 - RNA, 22 nt, Human
ucaagaugaugaugaucuuuaa

SEQ ID NO: 3249511 - RNA, 19 nt, Human
acaugauccugcaauucca

SEQ ID NO: 3249512 - RNA, 14 nt, Human
ucaaagcugaaaug

SEQ ID NO: 3249513 - RNA, 17 nt, Human
ucaaagggugaaaauua

SEQ ID NO: 3249514 - RNA, 23 nt, Human
ucaaaauaccaugccauuuaaag

SEQ ID NO: 3249515 - RNA, 21 nt, Human
ucaaaauaugccccauucaac

SEQ ID NO: 3249516 - RNA, 21 nt, Human
ucaaaauaccaugccauuuaa

SEQ ID NO: 3249517 - RNA, 14 nt, Human
ucaaaaugucuaag

SEQ ID NO: 3249518 - RNA, 18 nt, Human
ucaaaagaaagaaaauca

SEQ ID NO: 3249519 - RNA, 13 nt, Human
ucaaaacugcacu

SEQ ID NO: 3249520 - RNA, 23 nt, Human
uauuuuugacagaauauguuuca

SEQ ID NO: 3249521 - RNA, 19 nt, Human
uauuuuugacagaauaugu

SEQ ID NO: 3249522 - RNA, 13 nt, Human
uauuuuugacaga

SEQ ID NO: 3249523 - RNA, 15 nt, Human
uauuuuugacagaau

SEQ ID NO: 3249524 - RNA, 14 nt, Human
uauuuuugacagaa

SEQ ID NO: 3249525 - RNA, 14 nt, Human
uguuccuagugaaa

SEQ ID NO: 3249526 - RNA, 14 nt, Human
agugugucuaaauu

SEQ ID NO: 3249527 - RNA, 12 nt, Human
uguuauaaucuu

SEQ ID NO: 3249528 - RNA, 15 nt, Human
uguuauaaucuuuca

SEQ ID NO: 3249529 - RNA, 17 nt, Human
aguguacuuaacuauuc

SEQ ID NO: 3249530 - RNA, 20 nt, Human
uguggucacaggaaguagag

SEQ ID NO: 3249531 - RNA, 13 nt, Human
uguguaaguagau

SEQ ID NO: 3249532 - RNA, 15 nt, Human
uguuaaguaugugua

SEQ ID NO: 3249533 - RNA, 16 nt, Human
uguuaaguauguguaa

SEQ ID NO: 3249534 - RNA, 19 nt, Human
uguguuaaguauguguaaa

SEQ ID NO: 3249535 - RNA, 16 nt, Human
agugaacaaauuuaca

SEQ ID NO: 3249536 - RNA, 15 nt, Human
agugaaagaaaauaa

SEQ ID NO: 3249537 - RNA, 14 nt, Human
ugugauguauucua

SEQ ID NO: 3249538 - RNA, 18 nt, Human
agucacuaccuucaugca

SEQ ID NO: 3249539 - RNA, 20 nt, Human
agugaaacucguuaauuugu

SEQ ID NO: 3249540 - RNA, 18 nt, Human
agucuuucacauuuaaau

SEQ ID NO: 3249541 - RNA, 16 nt, Human
agucucaggaaaucaa

SEQ ID NO: 3249542 - RNA, 22 nt, Human
agucucaggaaaucaaauaugc

SEQ ID NO: 3249543 - RNA, 19 nt, Human
ugugagaugcuagaacucc

SEQ ID NO: 3249544 - RNA, 15 nt, Human
ugugagaugcuagaa

SEQ ID NO: 3249545 - RNA, 18 nt, Human
auaaaauccauacauuug

SEQ ID NO: 3249546 - RNA, 19 nt, Human
auaaaauccauacauuugu

SEQ ID NO: 3249547 - RNA, 15 nt, Human
auaaaauaauuuuua

SEQ ID NO: 3249548 - RNA, 16 nt, Human
auaaaauaauuuuuau

SEQ ID NO: 3249549 - RNA, 21 nt, Human
auaaaauaauuuuuauauuug

SEQ ID NO: 3249550 - RNA, 18 nt, Human
uuaaguaaugauaacugg

SEQ ID NO: 3249551 - RNA, 20 nt, Human
uuaagaagacugcauuauau

SEQ ID NO: 3249552 - RNA, 22 nt, Human
uuaagaagacugcauuauauuu

SEQ ID NO: 3249553 - RNA, 17 nt, Human
uuaauuccaauuauaug

SEQ ID NO: 3249554 - RNA, 14 nt, Human
uuaccuuacagaag

SEQ ID NO: 3249555 - RNA, 12 nt, Human
uuaccugggaaa

SEQ ID NO: 3249556 - RNA, 15 nt, Human
uuacuguaagaaaau

SEQ ID NO: 3249557 - RNA, 16 nt, Human
aguuuagcuggaaaag

SEQ ID NO: 3249558 - RNA, 14 nt, Human
uguuuauuuauaga

SEQ ID NO: 3249559 - RNA, 24 nt, Human
uguuuauuuauagaguguacuuaa

SEQ ID NO: 3249560 - RNA, 19 nt, Human
uguuuucauuaucucaaaa

SEQ ID NO: 3249561 - RNA, 19 nt, Human
uguuuugaaucucauaauu

SEQ ID NO: 3249562 - RNA, 16 nt, Human
aguucugaagaagaug

SEQ ID NO: 3249563 - RNA, 14 nt, Human
uguuuugcaagcca

SEQ ID NO: 3249564 - RNA, 16 nt, Human
aguucugcagauaaac

SEQ ID NO: 3249565 - RNA, 21 nt, Human
aguucugcagauaaacaguag

SEQ ID NO: 3249566 - RNA, 13 nt, Human
agggaaauuucag

SEQ ID NO: 3249567 - RNA, 22 nt, Human
agggaggacgcucucuggccuu

SEQ ID NO: 3249568 - RNA, 21 nt, Human
agggaggacgcucucuggccu

SEQ ID NO: 3249569 - RNA, 23 nt, Human
agggaggacgcucucuggccuuc

SEQ ID NO: 3249570 - RNA, 18 nt, Human
aggggagcaugggaagug

SEQ ID NO: 3249571 - RNA, 16 nt, Human
uguaaaggaauuuaaa

SEQ ID NO: 3249572 - RNA, 16 nt, Human
uguaaauaguauuuga

SEQ ID NO: 3249573 - RNA, 17 nt, Human
agucaccucauggaauu

SEQ ID NO: 3249574 - RNA, 14 nt, Human
agucaccucaugga

SEQ ID NO: 3249575 - RNA, 15 nt, Human
agucaccucauggaa

SEQ ID NO: 3249576 - RNA, 18 nt, Human
aguauuucuaugaaauau

SEQ ID NO: 3249577 - RNA, 17 nt, Human
aguauuucuaugaaaua

SEQ ID NO: 3249578 - RNA, 16 nt, Human
aguauuucuaugaaau

SEQ ID NO: 3249579 - RNA, 18 nt, Human
aguauuagaauaccacag

SEQ ID NO: 3249580 - RNA, 16 nt, Human
aguaguaauagagcaa

SEQ ID NO: 3249581 - RNA, 22 nt, Human
uguauucuagcuaauguaauaa

SEQ ID NO: 3249582 - RNA, 13 nt, Human
uguauuacaaauc

SEQ ID NO: 3249583 - RNA, 20 nt, Human
uguauucuagcuaauguaau

SEQ ID NO: 3249584 - RNA, 15 nt, Human
uguaucacaaaucuu

SEQ ID NO: 3249585 - RNA, 18 nt, Human
uguaucacaaaucuuaac

SEQ ID NO: 3249586 - RNA, 15 nt, Human
uguaguguuggagaa

SEQ ID NO: 3249587 - RNA, 14 nt, Human
uguaguguuggaga

SEQ ID NO: 3249588 - RNA, 13 nt, Human
aguaauagagcaa

SEQ ID NO: 3249589 - RNA, 14 nt, Human
aguaauagagcaaa

SEQ ID NO: 3249590 - RNA, 13 nt, Human
aguaaugauaacu

SEQ ID NO: 3249591 - RNA, 17 nt, Human
aguaaugauaacuggaa

SEQ ID NO: 3249592 - RNA, 18 nt, Human
aguaaugauaacuggaaa

SEQ ID NO: 3249593 - RNA, 20 nt, Human
aguaaugauaacuggaaacu

SEQ ID NO: 3249594 - RNA, 20 nt, Human
aguaaaaccacagcaguuga

SEQ ID NO: 3249595 - RNA, 13 nt, Human
aguaaaauccaca

SEQ ID NO: 3249596 - RNA, 20 nt, Human
aggcauuuaggccaugggac

SEQ ID NO: 3249597 - RNA, 15 nt, Human
aggcagcuugaaacu

SEQ ID NO: 3249598 - RNA, 20 nt, Human
aggcagcucuaaaugucaau

SEQ ID NO: 3249599 - RNA, 14 nt, Human
uggagcucguggaa

SEQ ID NO: 3249600 - RNA, 17 nt, Human
uggagcucguggaacag

SEQ ID NO: 3249601 - RNA, 21 nt, Human
uggagcucguggaacaguuac

SEQ ID NO: 3249602 - RNA, 15 nt, Human
uggagcaaagcugau

SEQ ID NO: 3249603 - RNA, 15 nt, Human
aggcccccaggugcc

SEQ ID NO: 3249604 - RNA, 14 nt, Human
uggaguugaaaauc

SEQ ID NO: 3249605 - RNA, 20 nt, Human
aggacgcucucuggccuucg

SEQ ID NO: 3249606 - RNA, 19 nt, Human
aggacgcucucuggccuuc

SEQ ID NO: 3249607 - RNA, 17 nt, Human
aggacgcucucuggccu

SEQ ID NO: 3249608 - RNA, 16 nt, Human
aggacgcucucuggcc

SEQ ID NO: 3249609 - RNA, 14 nt, Human
aggacgcucucugg

SEQ ID NO: 3249610 - RNA, 13 nt, Human
aggacgcucucug

SEQ ID NO: 3249611 - RNA, 17 nt, Human
aggagaaacuggaacuc

SEQ ID NO: 3249612 - RNA, 19 nt, Human
aggagaaacuggaacucuc

SEQ ID NO: 3249613 - RNA, 18 nt, Human
aggagaaacuggaacucu

SEQ ID NO: 3249614 - RNA, 17 nt, Human
aggagaguagaacagau

SEQ ID NO: 3249615 - RNA, 20 nt, Human
agcuugcccuggugccucac

SEQ ID NO: 3249616 - RNA, 16 nt, Human
agcuugcccuguuaaa

SEQ ID NO: 3249617 - RNA, 18 nt, Human
agcuugcccuguuaaaag

SEQ ID NO: 3249618 - RNA, 19 nt, Human
agcuugcccuguuaaaaga

SEQ ID NO: 3249619 - RNA, 14 nt, Human
ugcuacaaaaacac

SEQ ID NO: 3249620 - RNA, 17 nt, Human
ugccuuuucccaacucc

SEQ ID NO: 3249621 - RNA, 19 nt, Human
ugccuuuucccaacuccag

SEQ ID NO: 3249622 - RNA, 21 nt, Human
aggaaaucaaauaugcaaagc

SEQ ID NO: 3249623 - RNA, 22 nt, Human
aggaaaucaaauaugcaaagca

SEQ ID NO: 3249624 - RNA, 20 nt, Human
aggaaaucaaauaugcaaag

SEQ ID NO: 3249625 - RNA, 19 nt, Human
aggaaaucaaauaugcaaa

SEQ ID NO: 3249626 - RNA, 20 nt, Human
ugcccuguuaaaagaugaaa

SEQ ID NO: 3249627 - RNA, 19 nt, Human
ugcccuguuaaaagaugaa

SEQ ID NO: 3249628 - RNA, 13 nt, Human
ugauuucauucaa

SEQ ID NO: 3249629 - RNA, 20 nt, Human
ugcaaagcacugacuucuaa

SEQ ID NO: 3249630 - RNA, 22 nt, Human
ugcaaagcacugacuucuaagu

SEQ ID NO: 3249631 - RNA, 18 nt, Human
ugcaaagcacugacuucu

SEQ ID NO: 3249632 - RNA, 15 nt, Human
ugcaagccagauuuu

SEQ ID NO: 3249633 - RNA, 21 nt, Human
ugcaagccagauuuuccugaa

SEQ ID NO: 3249634 - RNA, 17 nt, Human
ugcacuccagccugagc

SEQ ID NO: 3249635 - RNA, 22 nt, Human
ugcagaagacaguauggcagcu

SEQ ID NO: 3249636 - RNA, 15 nt, Human
ugcacuccagccuga

SEQ ID NO: 3249637 - RNA, 13 nt, Human
ugccauaauuacu

SEQ ID NO: 3249638 - RNA, 17 nt, Human
ugccaguuauggcuaua

SEQ ID NO: 3249639 - RNA, 19 nt, Human
agccugagcgacagugaga

SEQ ID NO: 3249640 - RNA, 13 nt, Human
ugcauacucauua

SEQ ID NO: 3249641 - RNA, 19 nt, Human
ugcauacucauuaggaugg

SEQ ID NO: 3249642 - RNA, 20 nt, Human
ugcauagauucccugagcag

SEQ ID NO: 3249643 - RNA, 19 nt, Human
agcauaccaacacgagcag

SEQ ID NO: 3249644 - RNA, 13 nt, Human
agcauaccaacac

SEQ ID NO: 3249645 - RNA, 19 nt, Human
agcagucaggaaagagaac

SEQ ID NO: 3249646 - RNA, 17 nt, Human
agcagucaggaaagaga

SEQ ID NO: 3249647 - RNA, 18 nt, Human
agcagucaggaaagagaa

SEQ ID NO: 3249648 - RNA, 18 nt, Human
ugagugucuuaauuaaaa

SEQ ID NO: 3249649 - RNA, 15 nt, Human
ugaguucuacauaag

SEQ ID NO: 3249650 - RNA, 20 nt, Human
ugaguucuacauaaguaauu

SEQ ID NO: 3249651 - RNA, 16 nt, Human
ugauaaguaaaugcua

SEQ ID NO: 3249652 - RNA, 12 nt, Human
ugauaaguaaau

SEQ ID NO: 3249653 - RNA, 19 nt, Human
ugauaaguucauacauugu

SEQ ID NO: 3249654 - RNA, 17 nt, Human
ugauaaguucauacauu

SEQ ID NO: 3249655 - RNA, 15 nt, Human
ugauaaguucauaca

SEQ ID NO: 3249656 - RNA, 13 nt, Human
ugauaaguucaua

SEQ ID NO: 3249657 - RNA, 16 nt, Human
agcaggcuacugucag

SEQ ID NO: 3249658 - RNA, 17 nt, Human
agcaggcuacugucagc

SEQ ID NO: 3249659 - RNA, 19 nt, Human
agcaggcuacugucagcuc

SEQ ID NO: 3249660 - RNA, 20 nt, Human
agcaggcuacugucagcucc

SEQ ID NO: 3249661 - RNA, 14 nt, Human
agcaggcuacuguc

SEQ ID NO: 3249662 - RNA, 19 nt, Human
agcagggcauggcugggaa

SEQ ID NO: 3249663 - RNA, 22 nt, Human
agcauuuagauguauagguuga

SEQ ID NO: 3249664 - RNA, 20 nt, Human
agcaucacaugaacuuguaa

SEQ ID NO: 3249665 - RNA, 17 nt, Human
ugaugaucuuuaaaaua

SEQ ID NO: 3249666 - RNA, 15 nt, Human
ugauuaaguaaugau

SEQ ID NO: 3249667 - RNA, 19 nt, Human
auugauguguuuauuuaua

SEQ ID NO: 3249668 - RNA, 12 nt, Human
auugauguguuu

SEQ ID NO: 3249669 - RNA, 17 nt, Human
auuguacgaagaguauu

SEQ ID NO: 3249670 - RNA, 16 nt, Human
auuggagcucguggaa

SEQ ID NO: 3249671 - RNA, 17 nt, Human
auuggagcucgugggac

SEQ ID NO: 3249672 - RNA, 13 nt, Human
auuugaauguuaa

SEQ ID NO: 3249673 - RNA, 18 nt, Human
auuugaauguuaagcaga

SEQ ID NO: 3249674 - RNA, 20 nt, Human
auuucuugagguaaaagcau

SEQ ID NO: 3249675 - RNA, 19 nt, Human
auuugaauguuaagcagau

SEQ ID NO: 3249676 - RNA, 21 nt, Human
auuuggagacacaacuauuuu

SEQ ID NO: 3249677 - RNA, 19 nt, Human
auuuauuacuguaagaaaa

SEQ ID NO: 3249678 - RNA, 21 nt, Human
auuuauuuuaauaauguuuca

SEQ ID NO: 3249679 - RNA, 17 nt, Human
auuuaaaaaaaaaccug

SEQ ID NO: 3249680 - RNA, 16 nt, Human
auuguaguccuguaau

SEQ ID NO: 3249681 - RNA, 15 nt, Human
auuuaccacuugugu

SEQ ID NO: 3249682 - RNA, 22 nt, Human
auuuaccacuuguguuuugcaa

SEQ ID NO: 3249683 - RNA, 15 nt, Human
auuacuguaagaaaa

SEQ ID NO: 3249684 - RNA, 16 nt, Human
auuacuguaagaaaau

SEQ ID NO: 3249685 - RNA, 14 nt, Human
uuuugugaagcaaa

SEQ ID NO: 3249686 - RNA, 15 nt, Human
uuuuguuuucauuau

SEQ ID NO: 3249687 - RNA, 15 nt, Human
uuuuugaagcuguau

SEQ ID NO: 3249688 - RNA, 13 nt, Human
uuuuugacagaau

SEQ ID NO: 3249689 - RNA, 12 nt, Human
uuuuugacagaa

SEQ ID NO: 3249690 - RNA, 21 nt, Human
uuuuuguagcacugacagauu

SEQ ID NO: 3249691 - RNA, 20 nt, Human
uuuuuguagcacugacagau

SEQ ID NO: 3249692 - RNA, 19 nt, Human
uuuuuguagcacugacaga

SEQ ID NO: 3249693 - RNA, 17 nt, Human
uuuuuguagcacugaca

SEQ ID NO: 3249694 - RNA, 20 nt, Human
auucaaacagucucaggaaa

SEQ ID NO: 3249695 - RNA, 22 nt, Human
auucaaacagucucaggaaauc

SEQ ID NO: 3249696 - RNA, 21 nt, Human
auuauuuuguucauacauauu

SEQ ID NO: 3249697 - RNA, 20 nt, Human
auuauauggcuugaguuuaa

SEQ ID NO: 3249698 - RNA, 17 nt, Human
auuccaagugauugaaa

SEQ ID NO: 3249699 - RNA, 21 nt, Human
auucaggagaguagaacagau

SEQ ID NO: 3249700 - RNA, 22 nt, Human
auucaggagaguagaacagaua

SEQ ID NO: 3249701 - RNA, 16 nt, Human
uuuucucuaggaaaua

SEQ ID NO: 3249702 - RNA, 20 nt, Human
uuuucaggcuagauguaugu

SEQ ID NO: 3249703 - RNA, 15 nt, Human
uuuuccaaaauaauu

SEQ ID NO: 3249704 - RNA, 22 nt, Human
uuuuauggcacuaguauuucua

SEQ ID NO: 3249705 - RNA, 20 nt, Human
augugcuaguaauuggaaag

SEQ ID NO: 3249706 - RNA, 21 nt, Human
augugcuaguaauuggaaagg

SEQ ID NO: 3249707 - RNA, 12 nt, Human
auguguuuccau

SEQ ID NO: 3249708 - RNA, 12 nt, Human
auguuaagcaga

SEQ ID NO: 3249709 - RNA, 20 nt, Human
uuugcuggagcucugcccau

SEQ ID NO: 3249710 - RNA, 20 nt, Human
uuugacagaauauguuucaa

SEQ ID NO: 3249711 - RNA, 19 nt, Human
uuugacagaauauguuuca

SEQ ID NO: 3249712 - RNA, 18 nt, Human
uuugacagaauauguuuc

SEQ ID NO: 3249713 - RNA, 13 nt, Human
uuugagaguucua

SEQ ID NO: 3249714 - RNA, 19 nt, Human
auguauauuuuauaucaau

SEQ ID NO: 3249715 - RNA, 23 nt, Human
augucgucaaagcugaaauggac

SEQ ID NO: 3249716 - RNA, 17 nt, Human
auagucaaauuguguga

SEQ ID NO: 3249717 - RNA, 18 nt, Human
auagucaaauugugugaa

SEQ ID NO: 3249718 - RNA, 14 nt, Human
auauauaacaaugc

SEQ ID NO: 3249719 - RNA, 17 nt, Human
auauauaacaaugcugu

SEQ ID NO: 3249720 - RNA, 18 nt, Human
auauauaacaaugcugua

SEQ ID NO: 3249721 - RNA, 12 nt, Human
auauaacaaugc

SEQ ID NO: 3249722 - RNA, 15 nt, Human
auauaacaaugcugu

SEQ ID NO: 3249723 - RNA, 17 nt, Human
auauaaguauucuaaau

SEQ ID NO: 3249724 - RNA, 19 nt, Human
auauaagcuuguauuccuu

SEQ ID NO: 3249725 - RNA, 21 nt, Human
uucagaaaauauuauguguuu

SEQ ID NO: 3249726 - RNA, 13 nt, Human
uucagaaaauauu

SEQ ID NO: 3249727 - RNA, 14 nt, Human
uucagaaaauauua

SEQ ID NO: 3249728 - RNA, 20 nt, Human
uucagaaaauauuauguguu

SEQ ID NO: 3249729 - RNA, 16 nt, Human
auaugcaaagcacuga

SEQ ID NO: 3249730 - RNA, 15 nt, Human
auaugcaaagcacug

SEQ ID NO: 3249731 - RNA, 23 nt, Human
auaugcaaagcacugacuucuaa

SEQ ID NO: 3249732 - RNA, 14 nt, Human
uucaaacauauaua

SEQ ID NO: 3249733 - RNA, 15 nt, Human
uucaaacauauauaa

SEQ ID NO: 3249734 - RNA, 16 nt, Human
uucaaacuuuggaaca

SEQ ID NO: 3249735 - RNA, 22 nt, Human
uucaagaaaacaacuucaauau

SEQ ID NO: 3249736 - RNA, 21 nt, Human
auaggaauugacccacaagaa

SEQ ID NO: 3249737 - RNA, 21 nt, Human
uucacauaucuaguaugaaau

SEQ ID NO: 3249738 - RNA, 20 nt, Human
uucacauaucuaguaugaaa

SEQ ID NO: 3249739 - RNA, 17 nt, Human
uuauuguuuaaaaucau

SEQ ID NO: 3249740 - RNA, 17 nt, Human
auagcuacuaauuuuaa

SEQ ID NO: 3249741 - RNA, 14 nt, Human
auagcuacuaauuu

SEQ ID NO: 3249742 - RNA, 18 nt, Human
auagcuacuaauuuuaaa

SEQ ID NO: 3249743 - RNA, 19 nt, Human
aucaauuuuucuuauuuca

SEQ ID NO: 3249744 - RNA, 17 nt, Human
auauguuucaaacuuug

SEQ ID NO: 3249745 - RNA, 13 nt, Human
auauuugaaauau

SEQ ID NO: 3249746 - RNA, 18 nt, Human
auauuguguugugaaugu

SEQ ID NO: 3249747 - RNA, 17 nt, Human
auauuguguugugaaug

SEQ ID NO: 3249748 - RNA, 12 nt, Human
auauuuuaacuu

SEQ ID NO: 3249749 - RNA, 22 nt, Human
auauuuguaucacaaaucuuaa

SEQ ID NO: 3249750 - RNA, 23 nt, Human
auauuugaaauauugacuuuuua

SEQ ID NO: 3249751 - RNA, 14 nt, Human
auauuugaaauauu

SEQ ID NO: 3249752 - RNA, 19 nt, Human
auauuugaaauauugacuu

SEQ ID NO: 3249753 - RNA, 12 nt, Human
uucugaagaaga

SEQ ID NO: 3249754 - RNA, 13 nt, Human
uucugaagaagau

SEQ ID NO: 3249755 - RNA, 23 nt, Human
uucugcaucagcugcugaaacaa

SEQ ID NO: 3249756 - RNA, 16 nt, Human
uucugcaucagcugcu

SEQ ID NO: 3249757 - RNA, 20 nt, Human
aucauuucugcaucagcugc

SEQ ID NO: 3249758 - RNA, 14 nt, Human
uucucaacuccaaa

SEQ ID NO: 3249759 - RNA, 18 nt, Human
uucucaacuccaaacuga

SEQ ID NO: 3249760 - RNA, 19 nt, Human
aucagugugucuaaauuug

SEQ ID NO: 3249761 - RNA, 19 nt, Human
aucucaaaacugcacuguc

SEQ ID NO: 3249762 - RNA, 20 nt, Human
aucucaaaacugcacuguca

SEQ ID NO: 3249763 - RNA, 15 nt, Human
aucucaaaacugcac

SEQ ID NO: 3249764 - RNA, 12 nt, Human
uugacuuuuuau

SEQ ID NO: 3249765 - RNA, 13 nt, Human
uugacaugggaca

SEQ ID NO: 3249766 - RNA, 20 nt, Human
uugauguguuuauuuauaga

SEQ ID NO: 3249767 - RNA, 17 nt, Human
aucugacuaugacauaa

SEQ ID NO: 3249768 - RNA, 14 nt, Human
aucugacuaugaca

SEQ ID NO: 3249769 - RNA, 18 nt, Human
augaacuuguaaaggaau

SEQ ID NO: 3249770 - RNA, 12 nt, Human
aucuuuaaaaua

SEQ ID NO: 3249771 - RNA, 15 nt, Human
aucuuuaaaauacac

SEQ ID NO: 3249772 - RNA, 15 nt, Human
uuggagaagaacuga

SEQ ID NO: 3249773 - RNA, 17 nt, Human
uuggagaagaacugaaa

SEQ ID NO: 3249774 - RNA, 22 nt, Human
uuggagaagaacugaaaucaua

SEQ ID NO: 3249775 - RNA, 15 nt, Human
aucuuauaauuuaaa

SEQ ID NO: 3249776 - RNA, 14 nt, Human
aucuuauaauuuaa

SEQ ID NO: 3249777 - RNA, 19 nt, Human
augcuguauuuuaaaagaa

SEQ ID NO: 3249778 - RNA, 22 nt, Human
augcuguauuuuaaaagaauga

SEQ ID NO: 3249779 - RNA, 23 nt, Human
augcuguauuuuaaaagaaugau

SEQ ID NO: 3249780 - RNA, 21 nt, Human
auggaaugcuguguuaaauaa

SEQ ID NO: 3249781 - RNA, 17 nt, Human
auggaaugcuguguuaa

SEQ ID NO: 3249782 - RNA, 17 nt, Human
uuucaaacauauauaac

SEQ ID NO: 3249783 - RNA, 22 nt, Human
uuucacauaucuaguaugaaau

SEQ ID NO: 3249784 - RNA, 21 nt, Human
uuucacauaucuaguaugaaa

SEQ ID NO: 3249785 - RNA, 19 nt, Human
uuucaaacauauauaacaa

SEQ ID NO: 3249786 - RNA, 19 nt, Human
uuuauaugcuucuguuuua

SEQ ID NO: 3249787 - RNA, 21 nt, Human
uuuauaugcuucuguuuuaua

SEQ ID NO: 3249788 - RNA, 14 nt, Human
augccuuuucccaa

SEQ ID NO: 3249789 - RNA, 20 nt, Human
augccuuuucccaacuccag

SEQ ID NO: 3249790 - RNA, 22 nt, Human
augccuuuucccaacuccagaa

SEQ ID NO: 3249791 - RNA, 18 nt, Human
augcuacaggauuugaaa

SEQ ID NO: 3249792 - RNA, 18 nt, Human
uuuaaauauaugcuaagu

SEQ ID NO: 3249793 - RNA, 21 nt, Human
uuuaaauauaugcuaagucuu

SEQ ID NO: 3249794 - RNA, 12 nt, Human
augcaaagcacu

SEQ ID NO: 3249795 - RNA, 13 nt, Human
augcaaagcacug

SEQ ID NO: 3249796 - RNA, 14 nt, Human
augcaaagcacuga

SEQ ID NO: 3249797 - RNA, 18 nt, Human
uuuaaaaaaauuccaagu

SEQ ID NO: 3249798 - RNA, 13 nt, Human
augauuucauuca

SEQ ID NO: 3249799 - RNA, 18 nt, Human
uuguucauacauauuuuu

SEQ ID NO: 3249800 - RNA, 16 nt, Human
uuguucauacauauuu

SEQ ID NO: 3249801 - RNA, 18 nt, Human
augagguacugagaguga

SEQ ID NO: 3249802 - RNA, 17 nt, Human
augagguacugagagug

SEQ ID NO: 3249803 - RNA, 15 nt, Human
augagguacugagag

SEQ ID NO: 3249804 - RNA, 17 nt, Human
uuguagcuuuaucaaag

SEQ ID NO: 3249805 - RNA, 16 nt, Human
uuguagcuuuaucaaa

SEQ ID NO: 3249806 - RNA, 20 nt, Human
uugucaauaaaauccauaca

SEQ ID NO: 3249807 - RNA, 20 nt, Human
uuguucaauaauaaauauuu

SEQ ID NO: 3249808 - RNA, 22 nt, Human
uuguucaauaauaaauauuuuu

SEQ ID NO: 3249809 - RNA, 19 nt, Human
uuguucaauaauaaauauu

SEQ ID NO: 3249810 - RNA, 13 nt, Human
uuguucauacaua

SEQ ID NO: 3249811 - RNA, 14 nt, Human
aucaaaagaaagaa

SEQ ID NO: 3249812 - RNA, 18 nt, Human
aucaaagagagaaaauaa

SEQ ID NO: 3249813 - RNA, 20 nt, Human
aucaaagggugaaaauuauu

SEQ ID NO: 3249814 - RNA, 12 nt, Human
auccuugaagau

SEQ ID NO: 3249815 - RNA, 21 nt, Human
aucaugaauuaguuuuauaug

SEQ ID NO: 3249816 - RNA, 23 nt, Human
auggcuuccuggcaauagucaaa

SEQ ID NO: 3249817 - RNA, 14 nt, Human
augggaaagcauug

SEQ ID NO: 3249818 - RNA, 20 nt, Human
augggaaagcauuguaaaug

SEQ ID NO: 3249819 - RNA, 15 nt, Human
augggacagggagga

SEQ ID NO: 3249820 - RNA, 20 nt, Human
augggacauuugcucaugga

SEQ ID NO: 3249821 - RNA, 21 nt, Human
augcuucuguuuuauaauuuu

SEQ ID NO: 3249822 - RNA, 20 nt, Human
aguuguucaauaauaaauau

SEQ ID NO: 3249823 - RNA, 22 nt, Human
auaaaaauauuguguugugaau

SEQ ID NO: 3249824 - RNA, 23 nt, Human
auaaaaauauuguguugugaaug

SEQ ID NO: 3249825 - RNA, 15 nt, Human
auaaaagacagugaa

SEQ ID NO: 3249826 - RNA, 16 nt, Human
auaaaagacagugaaa

SEQ ID NO: 3249827 - RNA, 20 nt, Human
auaaaaagacauucuuccaa

SEQ ID NO: 3249828 - RNA, 14 nt, Human
auaaaaacaacuuu

SEQ ID NO: 3249829 - RNA, 20 nt, Human
auacacacucaaaucaagaa

SEQ ID NO: 3249830 - RNA, 17 nt, Human
auaaguaauucaagaaa

SEQ ID NO: 3249831 - RNA, 15 nt, Human
auaaguaaaugcuag

SEQ ID NO: 3249832 - RNA, 13 nt, Human
aguacucauacau

SEQ ID NO: 3249833 - RNA, 13 nt, Human
agucauuuaauaa

SEQ ID NO: 3249834 - RNA, 19 nt, Human
agugaugucacuagggcag

SEQ ID NO: 3249835 - RNA, 13 nt, Human
agugauuaccagg

SEQ ID NO: 3249836 - RNA, 13 nt, Human
agugaaugaaaca

SEQ ID NO: 3249837 - RNA, 13 nt, Human
agcuacaaaugca

SEQ ID NO: 3249838 - RNA, 12 nt, Human
agcuacaaaugc

SEQ ID NO: 3249839 - RNA, 15 nt, Human
agcgacagugagacu

SEQ ID NO: 3249840 - RNA, 13 nt, Human
agcgacagugaga

SEQ ID NO: 3249841 - RNA, 14 nt, Human
agcuguaugauucc

SEQ ID NO: 3249842 - RNA, 14 nt, Human
agcugcugaaacaa

SEQ ID NO: 3249843 - RNA, 15 nt, Human
agcugcugaaacaac

SEQ ID NO: 3249844 - RNA, 16 nt, Human
agcugcugaaacaaca

SEQ ID NO: 3249845 - RNA, 18 nt, Human
aggaaaaaauaacaauga

SEQ ID NO: 3249846 - RNA, 17 nt, Human
agcuguaugauucccag

SEQ ID NO: 3249847 - RNA, 18 nt, Human
agcuguaugauucccagc

SEQ ID NO: 3249848 - RNA, 20 nt, Human
aggcagagguugcagugagc

SEQ ID NO: 3249849 - RNA, 23 nt, Human
aggccaugggcacuguggguaga

SEQ ID NO: 3249850 - RNA, 20 nt, Human
agggauuagggagagaagau

SEQ ID NO: 3249851 - RNA, 17 nt, Human
agggacaggauaagagg

SEQ ID NO: 3249852 - RNA, 17 nt, Human
aggcuagauguauguac

SEQ ID NO: 3249853 - RNA, 20 nt, Human
agauagauaggucagugcaa

SEQ ID NO: 3249854 - RNA, 13 nt, Human
agcaaaauugaug

SEQ ID NO: 3249855 - RNA, 19 nt, Human
agcaaaauugauguguuua

SEQ ID NO: 3249856 - RNA, 23 nt, Human
agcaaaauugauguguuuauuua

SEQ ID NO: 3249857 - RNA, 19 nt, Human
agcacugacuucuaaguaa

SEQ ID NO: 3249858 - RNA, 16 nt, Human
agcacugacuucuaag

SEQ ID NO: 3249859 - RNA, 17 nt, Human
agcacugacuucuaagu

SEQ ID NO: 3249860 - RNA, 22 nt, Human
agaacagugauuaccagggacu

SEQ ID NO: 3249861 - RNA, 19 nt, Human
agaacagauaaucagugug

SEQ ID NO: 3249862 - RNA, 18 nt, Human
agaagacugcauuauauu

SEQ ID NO: 3249863 - RNA, 21 nt, Human
agaagacugcauuauauuuau

SEQ ID NO: 3249864 - RNA, 13 nt, Human
agaagagcuguuc

SEQ ID NO: 3249865 - RNA, 20 nt, Human
agaagagcuguucacagcca

SEQ ID NO: 3249866 - RNA, 13 nt, Human
agaagauagcagg

SEQ ID NO: 3249867 - RNA, 19 nt, Human
agacaaggaaaaaauaaca

SEQ ID NO: 3249868 - RNA, 24 nt, Human
acaggaugguucccuugaugaaga

SEQ ID NO: 3249869 - RNA, 22 nt, Human
acaggaugguucccuugaugaa

SEQ ID NO: 3249870 - RNA, 19 nt, Human
acagugauuaccagggacu

SEQ ID NO: 3249871 - RNA, 15 nt, Human
acauuugcucaugga

SEQ ID NO: 3249872 - RNA, 14 nt, Human
acauuuguauaaaa

SEQ ID NO: 3249873 - RNA, 16 nt, Human
acauuuguauaaaaua

SEQ ID NO: 3249874 - RNA, 19 nt, Human
acauuuguauaaaauaauu

SEQ ID NO: 3249875 - RNA, 20 nt, Human
acauaaguaauucaagaaaa

SEQ ID NO: 3249876 - RNA, 21 nt, Human
acauaaguaauucaagaaaac

SEQ ID NO: 3249877 - RNA, 15 nt, Human
acaccaauauucaua

SEQ ID NO: 3249878 - RNA, 22 nt, Human
aauuucauaccuaucaucuuaa

SEQ ID NO: 3249879 - RNA, 11 nt, Human
aauuguaauag

SEQ ID NO: 3249880 - RNA, 16 nt, Human
aauuucauaugcugua

SEQ ID NO: 3249881 - RNA, 18 nt, Human
aauuucauaugcuguaua

SEQ ID NO: 3249882 - RNA, 15 nt, Human
aauuggagcucgugg

SEQ ID NO: 3249883 - RNA, 17 nt, Human
aauuauauaaguauucu

SEQ ID NO: 3249884 - RNA, 16 nt, Human
aauuauauaaguauuc

SEQ ID NO: 3249885 - RNA, 15 nt, Human
aauuauauaaguauu

SEQ ID NO: 3249886 - RNA, 14 nt, Human
acucccuuucaaca

SEQ ID NO: 3249887 - RNA, 14 nt, Human
acucguuaauuugu

SEQ ID NO: 3249888 - RNA, 19 nt, Human
acucguuaauuuguagugu

SEQ ID NO: 3249889 - RNA, 16 nt, Human
acugacagauuuccau

SEQ ID NO: 3249890 - RNA, 19 nt, Human
acugauaugggucuugaua

SEQ ID NO: 3249891 - RNA, 21 nt, Human
acuuaaaaaugguuuaaaugg

SEQ ID NO: 3249892 - RNA, 22 nt, Human
acuuaaaaaugguuuaaauggu

SEQ ID NO: 3249893 - RNA, 12 nt, Human
acuucagacaua

SEQ ID NO: 3249894 - RNA, 18 nt, Human
acuucaaauccuugaaga

SEQ ID NO: 3249895 - RNA, 17 nt, Human
acuucaaauccuugaag

SEQ ID NO: 3249896 - RNA, 21 nt, Human
acuucagacauagaauuaaca

SEQ ID NO: 3249897 - RNA, 17 nt, Human
acuguaaaauaauaacu

SEQ ID NO: 3249898 - RNA, 20 nt, Human
accucugccucagaaaacaa

SEQ ID NO: 3249899 - RNA, 21 nt, Human
acccugucucuacuaaaaaua

SEQ ID NO: 3249900 - RNA, 21 nt, Human
aagccuuggggcugaugcagu

SEQ ID NO: 3249901 - RNA, 20 nt, Human
aacgcaggcccccaggugcc

SEQ ID NO: 3249902 - RNA, 11 nt, Human
aagaacugaaa

SEQ ID NO: 3249903 - RNA, 12 nt, Human
aagaacugaaau

SEQ ID NO: 3249904 - RNA, 13 nt, Human
aagaacugaaauc

SEQ ID NO: 3249905 - RNA, 15 nt, Human
aagaacugaaaucau

SEQ ID NO: 3249906 - RNA, 15 nt, Human
aagaagacugcauua

SEQ ID NO: 3249907 - RNA, 21 nt, Human
aagacaaggaaaaaauaacaa

SEQ ID NO: 3249908 - RNA, 20 nt, Human
aagaagacugcauuauauuu

SEQ ID NO: 3249909 - RNA, 14 nt, Human
aagagagaaaauaa

SEQ ID NO: 3249910 - RNA, 16 nt, Human
aagaguaguaauagag

SEQ ID NO: 3249911 - RNA, 19 nt, Human
aagaguauuuuugacagaa

SEQ ID NO: 3249912 - RNA, 16 nt, Human
aaucucaauauuucag

SEQ ID NO: 3249913 - RNA, 19 nt, Human
aaacccuugccaugugcua

SEQ ID NO: 3249914 - RNA, 15 nt, Human
aaacugcacugucaa

SEQ ID NO: 3249915 - RNA, 15 nt, Human
aaagcauuguaaaug

SEQ ID NO: 3249916 - RNA, 17 nt, Human
aaagcauuguaaaugug

SEQ ID NO: 3249917 - RNA, 13 nt, Human
aaagccugcaauu

SEQ ID NO: 3249918 - RNA, 18 nt, Human
aaagccugcaauuucaua

SEQ ID NO: 3249919 - RNA, 11 nt, Human
aaaaucauuuc

SEQ ID NO: 3249920 - RNA, 12 nt, Human
aaaaucauuucu

SEQ ID NO: 3249921 - RNA, 10 nt, Human
aaaaucauuu

SEQ ID NO: 3249922 - RNA, 17 nt, Human
aaaagaaagaaaaucag

SEQ ID NO: 3249923 - RNA, 12 nt, Human
aaaagaauauuu

SEQ ID NO: 3249924 - RNA, 13 nt, Human
aaaagacuccaaa

SEQ ID NO: 3249925 - RNA, 11 nt, Human
aaaagaaugau

SEQ ID NO: 3249926 - RNA, 13 nt, Human
aaaagaauauuuu

SEQ ID NO: 3249927 - RNA, 20 nt, Human
aaaagacaaggaaaaaauaa

SEQ ID NO: 3249928 - RNA, 13 nt, Human
aaauguucaucaa

SEQ ID NO: 3249929 - RNA, 22 nt, Human
aaauguugacaugggacauuug

SEQ ID NO: 3249930 - RNA, 23 nt, Human
aaauguugacaugggacauuugc

SEQ ID NO: 3249931 - RNA, 21 nt, Human
aaauauuuauuuuaauaaugu

SEQ ID NO: 3249932 - RNA, 23 nt, Human
aaaucucaaauuuggauugcuaa

SEQ ID NO: 3249933 - RNA, 18 nt, Human
aaaucucaauauuucaga

SEQ ID NO: 3249934 - RNA, 20 nt, Human
cacaguuuucugagaaagac

SEQ ID NO: 3249935 - RNA, 16 nt, Human
cacaugaaguccaagc

SEQ ID NO: 3249936 - RNA, 17 nt, Human
cacaugaaguccaagca

SEQ ID NO: 3249937 - RNA, 20 nt, Human
cacaugaaguccaagcauuu

SEQ ID NO: 3249938 - RNA, 21 nt, Human
cacaguuuucugagaaagacu

SEQ ID NO: 3249939 - RNA, 22 nt, Human
cacaguuuucugagaaagacua

SEQ ID NO: 3249940 - RNA, 15 nt, Human
cacaggaaguagagg

SEQ ID NO: 3249941 - RNA, 23 nt, Human
cacaagaaaugaaagcagggacu

SEQ ID NO: 3249942 - RNA, 13 nt, Human
cacaagaaaugaa

SEQ ID NO: 3249943 - RNA, 21 nt, Human
cacaagaaaugaaagcaggga

SEQ ID NO: 3249944 - RNA, 15 nt, Human
cacaagaaaugaaag

SEQ ID NO: 3249945 - RNA, 23 nt, Human
caaauuuacagagacagaaagca

SEQ ID NO: 3249946 - RNA, 17 nt, Human
caaauuuacagagacag

SEQ ID NO: 3249947 - RNA, 16 nt, Human
caaauuuacagagaca

SEQ ID NO: 3249948 - RNA, 16 nt, Human
caagcauaccaacacg

SEQ ID NO: 3249949 - RNA, 21 nt, Human
caagcauaccaacacgagcag

SEQ ID NO: 3249950 - RNA, 16 nt, Human
caagcauuuagaugua

SEQ ID NO: 3249951 - RNA, 19 nt, Human
caagcauuuagauguauag

SEQ ID NO: 3249952 - RNA, 13 nt, Human
caagaaaugaaag

SEQ ID NO: 3249953 - RNA, 19 nt, Human
caagacugcacaucaaaau

SEQ ID NO: 3249954 - RNA, 16 nt, Human
auuuuaauaauguuuc

SEQ ID NO: 3249955 - RNA, 18 nt, Human
auuuuaauaauguuucaa

SEQ ID NO: 3249956 - RNA, 19 nt, Human
auuuuaauaauguuucaaa

SEQ ID NO: 3249957 - RNA, 14 nt, Human
caaagaaauguaag

SEQ ID NO: 3249958 - RNA, 22 nt, Human
ggcuugaguuuaaauuguaaua

SEQ ID NO: 3249959 - RNA, 14 nt, Human
gggaauugaggaca

SEQ ID NO: 3249960 - RNA, 21 nt, Human
ggugcuacaaaaacacagcaa

SEQ ID NO: 3249961 - RNA, 23 nt, Human
ggugcuacaaaaacacagcaagg

SEQ ID NO: 3249962 - RNA, 17 nt, Human
gguguuuuaaaaaaucu

SEQ ID NO: 3249963 - RNA, 21 nt, Human
ggaggacgcucucuggccuuc

SEQ ID NO: 3249964 - RNA, 20 nt, Human
ggaggacgcucucuggccuu

SEQ ID NO: 3249965 - RNA, 19 nt, Human
ggaggacgcucucuggccu

SEQ ID NO: 3249966 - RNA, 22 nt, Human
ggccaugggacagggaggacgc

SEQ ID NO: 3249967 - RNA, 22 nt, Human
gcuguauuuuaaaagaaugauu

SEQ ID NO: 3249968 - RNA, 18 nt, Human
gcuagauguauguacuuc

SEQ ID NO: 3249969 - RNA, 16 nt, Human
gcuagauguauguacu

SEQ ID NO: 3249970 - RNA, 17 nt, Human
ggaaauauuuauuuuaa

SEQ ID NO: 3249971 - RNA, 18 nt, Human
ggaaauauuuauuuuaau

SEQ ID NO: 3249972 - RNA, 12 nt, Human
ggaaauauuuau

SEQ ID NO: 3249973 - RNA, 13 nt, Human
ggaaauauuuauu

SEQ ID NO: 3249974 - RNA, 15 nt, Human
ggaaauauuuauuuu

SEQ ID NO: 3249975 - RNA, 17 nt, Human
gcuuuuaaaaaaaaaua

SEQ ID NO: 3249976 - RNA, 16 nt, Human
ggaaaaaauaacaaug

SEQ ID NO: 3249977 - RNA, 20 nt, Human
ggaaaaaauaacaaugaaag

SEQ ID NO: 3249978 - RNA, 14 nt, Human
gcuuuaucaaaggg

SEQ ID NO: 3249979 - RNA, 19 nt, Human
gcuugcccuggugccucac

SEQ ID NO: 3249980 - RNA, 17 nt, Human
gcuugcccuggugccuc

SEQ ID NO: 3249981 - RNA, 23 nt, Human
gcuguucacagccagacuggcac

SEQ ID NO: 3249982 - RNA, 15 nt, Human
gcuguucacagccag

SEQ ID NO: 3249983 - RNA, 16 nt, Human
gcuguucacagccaga

SEQ ID NO: 3249984 - RNA, 22 nt, Human
gccauuuaaagcuuauuaaaac

SEQ ID NO: 3249985 - RNA, 19 nt, Human
gccaugggacagggaggac

SEQ ID NO: 3249986 - RNA, 14 nt, Human
gccaugggacaggg

SEQ ID NO: 3249987 - RNA, 16 nt, Human
gcccacagcuguauga

SEQ ID NO: 3249988 - RNA, 22 nt, Human
gccacguucuuacuaguuuccc

SEQ ID NO: 3249989 - RNA, 19 nt, Human
gccccugcacuccagccug

SEQ ID NO: 3249990 - RNA, 17 nt, Human
gccccgugggguuccuc

SEQ ID NO: 3249991 - RNA, 22 nt, Human
gcgacagugagacucugucuca

SEQ ID NO: 3249992 - RNA, 18 nt, Human
gccuucggccuccauccu

SEQ ID NO: 3249993 - RNA, 18 nt, Human
gccuguaaucacagcuac

SEQ ID NO: 3249994 - RNA, 19 nt, Human
gcccuucuuuccacagaag

SEQ ID NO: 3249995 - RNA, 15 nt, Human
gcaggcuacugucag

SEQ ID NO: 3249996 - RNA, 18 nt, Human
gcauagauucccugagca

SEQ ID NO: 3249997 - RNA, 13 nt, Human
gcaguucugaaga

SEQ ID NO: 3249998 - RNA, 18 nt, Human
gcagauggaaugcugugu

SEQ ID NO: 3249999 - RNA, 14 nt, Human
gcagaagacaguau

SEQ ID NO: 3250000 - RNA, 15 nt, Human
gcacugucaagauga

SEQ ID NO: 3250001 - RNA, 18 nt, Human
gcacagccucuuagaugc

SEQ ID NO: 3250002 - RNA, 20 nt, Human
gcacagccucuuagaugcag

SEQ ID NO: 3250003 - RNA, 16 nt, Human
gaugcuagaacucccu

SEQ ID NO: 3250004 - RNA, 22 nt, Human
gauuaaguaaugauaacuggaa

SEQ ID NO: 3250005 - RNA, 14 nt, Human
gauuaaguaaugau

SEQ ID NO: 3250006 - RNA, 12 nt, Human
gcaagauguggg

SEQ ID NO: 3250007 - RNA, 16 nt, Human
gcaagaugugggcagu

SEQ ID NO: 3250008 - RNA, 13 nt, Human
gauccuggaaauc

SEQ ID NO: 3250009 - RNA, 14 nt, Human
gauccuggaaauca

SEQ ID NO: 3250010 - RNA, 23 nt, Human
gaucagcuuauugucuagugaaa

SEQ ID NO: 3250011 - RNA, 16 nt, Human
gauaaguucauacauu

SEQ ID NO: 3250012 - RNA, 22 nt, Human
gauaaauggcuuccuggcaaua

SEQ ID NO: 3250013 - RNA, 13 nt, Human
gauaaacaguagu

SEQ ID NO: 3250014 - RNA, 11 nt, Human
gaguucuacau

SEQ ID NO: 3250015 - RNA, 16 nt, Human
gaccacugcagaagac

SEQ ID NO: 3250016 - RNA, 19 nt, Human
gacccaaaaggcagaagca

SEQ ID NO: 3250017 - RNA, 18 nt, Human
gacccaaaaggcagaagc

SEQ ID NO: 3250018 - RNA, 23 nt, Human
gacaggaugguucccuugaugaa

SEQ ID NO: 3250019 - RNA, 14 nt, Human
gacaucaacagaua

SEQ ID NO: 3250020 - RNA, 17 nt, Human
gacauaaaaacaacuuu

SEQ ID NO: 3250021 - RNA, 18 nt, Human
gacuggcacaguuuucug

SEQ ID NO: 3250022 - RNA, 22 nt, Human
gacuggcacaguuuucugagaa

SEQ ID NO: 3250023 - RNA, 14 nt, Human
gacuggcacaguuu

SEQ ID NO: 3250024 - RNA, 24 nt, Human
gacugcauuauauuuauuacugua

SEQ ID NO: 3250025 - RNA, 16 nt, Human
gacugaggggagggga

SEQ ID NO: 3250026 - RNA, 15 nt, Human
gaacauaaaauacaa

SEQ ID NO: 3250027 - RNA, 20 nt, Human
gaacagugauuaccagggac

SEQ ID NO: 3250028 - RNA, 16 nt, Human
gaacagugauuaccag

SEQ ID NO: 3250029 - RNA, 18 nt, Human
gaacagauaaucagugug

SEQ ID NO: 3250030 - RNA, 16 nt, Human
gaaauuguauuacaaa

SEQ ID NO: 3250031 - RNA, 18 nt, Human
gaagauguagaggagaaa

SEQ ID NO: 3250032 - RNA, 17 nt, Human
gaagauguagaggagaa

SEQ ID NO: 3250033 - RNA, 19 nt, Human
gaagacugcauuauauuua

SEQ ID NO: 3250034 - RNA, 12 nt, Human
gaagaacugaaa

SEQ ID NO: 3250035 - RNA, 17 nt, Human
gaagacugcauuauauu

SEQ ID NO: 3250036 - RNA, 23 nt, Human
gaauucuugaaggaaaaugauac

SEQ ID NO: 3250037 - RNA, 16 nt, Human
gaauauuuuaacuucc

SEQ ID NO: 3250038 - RNA, 12 nt, Human
gaaguccaagca

SEQ ID NO: 3250039 - RNA, 22 nt, Human
gaaguccaagcauuuagaugua

SEQ ID NO: 3250040 - RNA, 16 nt, Human
gaaguauccuucagcc

SEQ ID NO: 3250041 - RNA, 14 nt, Human
gaaguauccuucag

SEQ ID NO: 3250042 - RNA, 16 nt, Human
cuuggacucauuuuaa

SEQ ID NO: 3250043 - RNA, 16 nt, Human
cuuggggcugaugcag

SEQ ID NO: 3250044 - RNA, 18 nt, Human
cuuggggcugaugcaguu

SEQ ID NO: 3250045 - RNA, 17 nt, Human
cuuguacuuuauuuucu

SEQ ID NO: 3250046 - RNA, 23 nt, Human
cuugcaucaauuuuucuuauuuc

SEQ ID NO: 3250047 - RNA, 14 nt, Human
cuugcccuguuaaa

SEQ ID NO: 3250048 - RNA, 18 nt, Human
cuugcccuggugccucac

SEQ ID NO: 3250049 - RNA, 22 nt, Human
cuugcccuguuaaaagaugaaa

SEQ ID NO: 3250050 - RNA, 20 nt, Human
cuugcuugauuguauggugg

SEQ ID NO: 3250051 - RNA, 14 nt, Human
gaaaaguauguuag

SEQ ID NO: 3250052 - RNA, 20 nt, Human
gaaaaguauguuagugcaaa

SEQ ID NO: 3250053 - RNA, 19 nt, Human
cuuuccucaaaacuucaga

SEQ ID NO: 3250054 - RNA, 19 nt, Human
cuuacuaguuucccuugca

SEQ ID NO: 3250055 - RNA, 19 nt, Human
cuuagaugcaguucugaag

SEQ ID NO: 3250056 - RNA, 19 nt, Human
cuuauaggaauugacccac

SEQ ID NO: 3250057 - RNA, 14 nt, Human
cuuauaauuuaaaa

SEQ ID NO: 3250058 - RNA, 21 nt, Human
cuuaggguuaugauuaaguaa

SEQ ID NO: 3250059 - RNA, 13 nt, Human
cuuauaauuuaaa

SEQ ID NO: 3250060 - RNA, 15 nt, Human
cuuaugauugcagau

SEQ ID NO: 3250061 - RNA, 19 nt, Human
cuguuuuauaauuuuguga

SEQ ID NO: 3250062 - RNA, 18 nt, Human
cuguuuugaaucucauaa

SEQ ID NO: 3250063 - RNA, 18 nt, Human
cuuaaugccacuaaauug

SEQ ID NO: 3250064 - RNA, 11 nt, Human
cuuaacuauuc

SEQ ID NO: 3250065 - RNA, 13 nt, Human
cuucccuuucugc

SEQ ID NO: 3250066 - RNA, 19 nt, Human
cuuccagauccuggaaauc

SEQ ID NO: 3250067 - RNA, 16 nt, Human
cuucagcgguuuauau

SEQ ID NO: 3250068 - RNA, 18 nt, Human
cuucagcgguuuauauaa

SEQ ID NO: 3250069 - RNA, 18 nt, Human
cuucggccuccauccuga

SEQ ID NO: 3250070 - RNA, 17 nt, Human
cuucggccuccauccug

SEQ ID NO: 3250071 - RNA, 19 nt, Human
cuuccuuggacucauuuua

SEQ ID NO: 3250072 - RNA, 23 nt, Human
cucugcauacucauuaggauggc

SEQ ID NO: 3250073 - RNA, 16 nt, Human
cucccuucucuucaca

SEQ ID NO: 3250074 - RNA, 12 nt, Human
cucccuuucaac

SEQ ID NO: 3250075 - RNA, 13 nt, Human
cucccuuucaaca

SEQ ID NO: 3250076 - RNA, 13 nt, Human
cucggagaagagc

SEQ ID NO: 3250077 - RNA, 20 nt, Human
cucggagaagagcuguucac

SEQ ID NO: 3250078 - RNA, 12 nt, Human
cucggagaagag

SEQ ID NO: 3250079 - RNA, 18 nt, Human
cucauuaggauggcuagu

SEQ ID NO: 3250080 - RNA, 17 nt, Human
cucauuaggauggcuag

SEQ ID NO: 3250081 - RNA, 15 nt, Human
cucauaauuuauaca

SEQ ID NO: 3250082 - RNA, 13 nt, Human
cucauaauuuaua

SEQ ID NO: 3250083 - RNA, 22 nt, Human
cucauaauuuauacaggucaua

SEQ ID NO: 3250084 - RNA, 21 nt, Human
cucauaaaaagccugcaauuu

SEQ ID NO: 3250085 - RNA, 20 nt, Human
cuccauccugaggcuccacu

SEQ ID NO: 3250086 - RNA, 21 nt, Human
cuccauccugaggcuccacuu

SEQ ID NO: 3250087 - RNA, 23 nt, Human
cuccauccugaggcuccacuugg

SEQ ID NO: 3250088 - RNA, 17 nt, Human
cucccagucauuuaaua

SEQ ID NO: 3250089 - RNA, 22 nt, Human
cugggaacccaaguccaagcau

SEQ ID NO: 3250090 - RNA, 23 nt, Human
cuggaauaauccuaaacauauga

SEQ ID NO: 3250091 - RNA, 13 nt, Human
cugcugaaacaac

SEQ ID NO: 3250092 - RNA, 16 nt, Human
cuggccaacgggguga

SEQ ID NO: 3250093 - RNA, 18 nt, Human
cuggcacaguuuucugag

SEQ ID NO: 3250094 - RNA, 19 nt, Human
cuggcacaguuuucugaga

SEQ ID NO: 3250095 - RNA, 13 nt, Human
cugcagaagacag

SEQ ID NO: 3250096 - RNA, 23 nt, Human
cugcagaagacaguauggcagcu

SEQ ID NO: 3250097 - RNA, 20 nt, Human
cugcaauuucauaugcugua

SEQ ID NO: 3250098 - RNA, 18 nt, Human
cugcaauuucauaugcug

SEQ ID NO: 3250099 - RNA, 13 nt, Human
cugauguuccuag

SEQ ID NO: 3250100 - RNA, 18 nt, Human
cugauguuccuagugaaa

SEQ ID NO: 3250101 - RNA, 20 nt, Human
cugauguuccuagugaaaga

SEQ ID NO: 3250102 - RNA, 21 nt, Human
cugauguuccuagugaaagag

SEQ ID NO: 3250103 - RNA, 15 nt, Human
cugccuaagugcagc

SEQ ID NO: 3250104 - RNA, 15 nt, Human
cugccagcaacgcag

SEQ ID NO: 3250105 - RNA, 12 nt, Human
ccuucagccuga

SEQ ID NO: 3250106 - RNA, 17 nt, Human
cggccuccauccugagg

SEQ ID NO: 3250107 - RNA, 16 nt, Human
cggccuccauccugag

SEQ ID NO: 3250108 - RNA, 14 nt, Human
cggccuccauccug

SEQ ID NO: 3250109 - RNA, 11 nt, Human
cgcaaugugac

SEQ ID NO: 3250110 - RNA, 23 nt, Human
ccucuuagaugcaguucugaaga

SEQ ID NO: 3250111 - RNA, 23 nt, Human
ccugaaagaggaaugaaguacuc

SEQ ID NO: 3250112 - RNA, 13 nt, Human
ccugaaagaggaa

SEQ ID NO: 3250113 - RNA, 18 nt, Human
ccugaaagaggaaugaag

SEQ ID NO: 3250114 - RNA, 20 nt, Human
ccugaggcuccacuuggucu

SEQ ID NO: 3250115 - RNA, 18 nt, Human
ccugaggcuccacuuggu

SEQ ID NO: 3250116 - RNA, 17 nt, Human
ccugaggcuccacuugg

SEQ ID NO: 3250117 - RNA, 20 nt, Human
ccucagaaaacaaggaugaa

SEQ ID NO: 3250118 - RNA, 22 nt, Human
ccgggaggcagagguugcagug

SEQ ID NO: 3250119 - RNA, 15 nt, Human
cccuugaugaagaag

SEQ ID NO: 3250120 - RNA, 16 nt, Human
cccuugaugaagaagu

SEQ ID NO: 3250121 - RNA, 17 nt, Human
cauuuaggccaugggac

SEQ ID NO: 3250122 - RNA, 20 nt, Human
cauuguacgaagaguauuuu

SEQ ID NO: 3250123 - RNA, 13 nt, Human
cauuugcucaugg

SEQ ID NO: 3250124 - RNA, 18 nt, Human
cauuugcucauggaauug

SEQ ID NO: 3250125 - RNA, 22 nt, Human
ccaaacugacucuuaagaagac

SEQ ID NO: 3250126 - RNA, 16 nt, Human
ccaaaggcucucuccu

SEQ ID NO: 3250127 - RNA, 23 nt, Human
ccaaauuucauaccuaucaucuu

SEQ ID NO: 3250128 - RNA, 22 nt, Human
ccaagcauaccaacacgagcag

SEQ ID NO: 3250129 - RNA, 17 nt, Human
ccaagcauuuagaugua

SEQ ID NO: 3250130 - RNA, 14 nt, Human
ccaagcaaguauua

SEQ ID NO: 3250131 - RNA, 16 nt, Human
ccaauauucauagcag

SEQ ID NO: 3250132 - RNA, 20 nt, Human
ccacaggaaccacaagacug

SEQ ID NO: 3250133 - RNA, 18 nt, Human
ccacugcagaagacagua

SEQ ID NO: 3250134 - RNA, 13 nt, Human
ccacugcagaaga

SEQ ID NO: 3250135 - RNA, 13 nt, Human
cccaggugccagu

SEQ ID NO: 3250136 - RNA, 13 nt, Human
ccaggugccaguu

SEQ ID NO: 3250137 - RNA, 17 nt, Human
ccaggugccaguuaugg

SEQ ID NO: 3250138 - RNA, 16 nt, Human
ccagugaauucuugaa

SEQ ID NO: 3250139 - RNA, 20 nt, Human
ccagugaauucuugaaggaa

SEQ ID NO: 3250140 - RNA, 13 nt, Human
cccaaaaggcaga

SEQ ID NO: 3250141 - RNA, 18 nt, Human
cccaaaaggcagaagcaa

SEQ ID NO: 3250142 - RNA, 16 nt, Human
ccaugauguuuagaaa

SEQ ID NO: 3250143 - RNA, 14 nt, Human
ccaugaagauguag

SEQ ID NO: 3250144 - RNA, 18 nt, Human
ccaucaaggguacacugc

SEQ ID NO: 3250145 - RNA, 14 nt, Human
ccauacauuugugu

SEQ ID NO: 3250146 - RNA, 12 nt, Human
uugaugaagaag

SEQ ID NO: 3250147 - RNA, 18 nt, Human
uugcauagauucccugag

SEQ ID NO: 3250148 - RNA, 14 nt, Human
uugaggacacugau

SEQ ID NO: 3250149 - RNA, 15 nt, Human
uucuuauuucauuuc

SEQ ID NO: 3250150 - RNA, 14 nt, Human
uucugagcauuuaa

SEQ ID NO: 3250151 - RNA, 23 nt, Human
uugaaacugagaugugaacacau

SEQ ID NO: 3250152 - RNA, 16 nt, Human
uugaaaagacuccaaa

SEQ ID NO: 3250153 - RNA, 18 nt, Human
uugaaaagacuccaaaga

SEQ ID NO: 3250154 - RNA, 22 nt, Human
uugaaaagacuccaaagaaaug

SEQ ID NO: 3250155 - RNA, 15 nt, Human
uugaaucucauaauu

SEQ ID NO: 3250156 - RNA, 21 nt, Human
uugaaucucauaauuuauaca

SEQ ID NO: 3250157 - RNA, 19 nt, Human
uuguaucacaaaucuuaac

SEQ ID NO: 3250158 - RNA, 14 nt, Human
uuguauuacaaauc

SEQ ID NO: 3250159 - RNA, 11 nt, Human
uuguaaaugug

SEQ ID NO: 3250160 - RNA, 14 nt, Human
uuguaaaugugcuu

SEQ ID NO: 3250161 - RNA, 18 nt, Human
uuguaaaugugcuuuuaa

SEQ ID NO: 3250162 - RNA, 16 nt, Human
uuguaaaggaauuuaa

SEQ ID NO: 3250163 - RNA, 12 nt, Human
uugggaggcuga

SEQ ID NO: 3250164 - RNA, 17 nt, Human
uucaucugacuaugaca

SEQ ID NO: 3250165 - RNA, 19 nt, Human
uuccacuuauaggaauuga

SEQ ID NO: 3250166 - RNA, 21 nt, Human
uuccauccuagucacuaccuu

SEQ ID NO: 3250167 - RNA, 21 nt, Human
uucuaugaaauauuauguuaa

SEQ ID NO: 3250168 - RNA, 12 nt, Human
uuccuagugaaa

SEQ ID NO: 3250169 - RNA, 18 nt, Human
uucccuugaugaagaagu

SEQ ID NO: 3250170 - RNA, 15 nt, Human
uucggccuccauccu

SEQ ID NO: 3250171 - RNA, 19 nt, Human
uucggccuccauccugagg

SEQ ID NO: 3250172 - RNA, 18 nt, Human
uucggccuccauccugag

SEQ ID NO: 3250173 - RNA, 17 nt, Human
uuccuucugugaaagua

SEQ ID NO: 3250174 - RNA, 16 nt, Human
uuuucagaaaauauua

SEQ ID NO: 3250175 - RNA, 13 nt, Human
uuuucacauaucu

SEQ ID NO: 3250176 - RNA, 15 nt, Human
uuuucagaaaauauu

SEQ ID NO: 3250177 - RNA, 20 nt, Human
uuuuauaucaauuuaaaaaa

SEQ ID NO: 3250178 - RNA, 15 nt, Human
uuuuauaugcuucug

SEQ ID NO: 3250179 - RNA, 20 nt, Human
uuuuauaugcuucuguuuua

SEQ ID NO: 3250180 - RNA, 10 nt, Human
uuuuauauuu

SEQ ID NO: 3250181 - RNA, 19 nt, Human
uuuguauaaaauaauuuuu

SEQ ID NO: 3250182 - RNA, 21 nt, Human
uuuguauaaaauaauuuuuau

SEQ ID NO: 3250183 - RNA, 16 nt, Human
uuuguucauacauauu

SEQ ID NO: 3250184 - RNA, 13 nt, Human
uuuguucauacau

SEQ ID NO: 3250185 - RNA, 21 nt, Human
uuugcauagauucccugagca

SEQ ID NO: 3250186 - RNA, 23 nt, Human
uuuggaacaagaugguucuagca

SEQ ID NO: 3250187 - RNA, 15 nt, Human
uuucagauaaucaca

SEQ ID NO: 3250188 - RNA, 15 nt, Human
uuucagcagcugcag

SEQ ID NO: 3250189 - RNA, 14 nt, Human
uuuccaaaauaauu

SEQ ID NO: 3250190 - RNA, 15 nt, Human
uuucugagaaagacu

SEQ ID NO: 3250191 - RNA, 22 nt, Human
uuucugagaaagacuauucaaa

SEQ ID NO: 3250192 - RNA, 21 nt, Human
uuucuaacaaaaaaauauauu

SEQ ID NO: 3250193 - RNA, 12 nt, Human
uuuagaaacaca

SEQ ID NO: 3250194 - RNA, 15 nt, Human
uuuacauuguaaaua

SEQ ID NO: 3250195 - RNA, 13 nt, Human
uuuacauuguaaa

SEQ ID NO: 3250196 - RNA, 20 nt, Human
uuuagaaacacaacuauauu

SEQ ID NO: 3250197 - RNA, 14 nt, Human
uguuagugcaaauu

SEQ ID NO: 3250198 - RNA, 16 nt, Human
uguucacagccagacu

SEQ ID NO: 3250199 - RNA, 13 nt, Human
uguguugugaaug

SEQ ID NO: 3250200 - RNA, 20 nt, Human
uguuggagaagaacugaaau

SEQ ID NO: 3250201 - RNA, 21 nt, Human
uguuggagaagaacugaaauc

SEQ ID NO: 3250202 - RNA, 13 nt, Human
uguuuaaaaucau

SEQ ID NO: 3250203 - RNA, 12 nt, Human
uguuuuaaaaaa

SEQ ID NO: 3250204 - RNA, 19 nt, Human
uuaaaagaaugauuaugaa

SEQ ID NO: 3250205 - RNA, 13 nt, Human
uuaaaagaaugau

SEQ ID NO: 3250206 - RNA, 20 nt, Human
uuaaagcuuauuaaaacuca

SEQ ID NO: 3250207 - RNA, 18 nt, Human
uuaauaauguuucaaaca

SEQ ID NO: 3250208 - RNA, 16 nt, Human
uuaauaauguuucaaa

SEQ ID NO: 3250209 - RNA, 22 nt, Human
uuaaugucaauucuugccaaau

SEQ ID NO: 3250210 - RNA, 21 nt, Human
uuaccacuuguguuuugcaag

SEQ ID NO: 3250211 - RNA, 14 nt, Human
uuacauuuguauaa

SEQ ID NO: 3250212 - RNA, 15 nt, Human
uuacauuuguauaaa

SEQ ID NO: 3250213 - RNA, 20 nt, Human
uuacagagacagaaagcaga

SEQ ID NO: 3250214 - RNA, 21 nt, Human
ugucucaguccaugaagaugu

SEQ ID NO: 3250215 - RNA, 20 nt, Human
ugugaaguuuacauuguaaa

SEQ ID NO: 3250216 - RNA, 14 nt, Human
ugugaaguuuacau

SEQ ID NO: 3250217 - RNA, 22 nt, Human
ugugaccacugcagaagacagu

SEQ ID NO: 3250218 - RNA, 15 nt, Human
uguaaucacagcuac

SEQ ID NO: 3250219 - RNA, 14 nt, Human
uguaaucacagcua

SEQ ID NO: 3250220 - RNA, 20 nt, Human
uguaaaaugugaagugaaug

SEQ ID NO: 3250221 - RNA, 16 nt, Human
uguaugauucccagcc

SEQ ID NO: 3250222 - RNA, 16 nt, Human
uguagcacugacagau

SEQ ID NO: 3250223 - RNA, 22 nt, Human
uguagcacugacagauuuccau

SEQ ID NO: 3250224 - RNA, 17 nt, Human
uguagcacugacagauu

SEQ ID NO: 3250225 - RNA, 17 nt, Human
ugccuucucaacuccaa

SEQ ID NO: 3250226 - RNA, 22 nt, Human
ugccuucucaacuccaaacuga

SEQ ID NO: 3250227 - RNA, 18 nt, Human
ugcuagaacucccuuuca

SEQ ID NO: 3250228 - RNA, 19 nt, Human
ugcuagaacucccuuucaa

SEQ ID NO: 3250229 - RNA, 21 nt, Human
ugcuagaacucccuuucaaca

SEQ ID NO: 3250230 - RNA, 20 nt, Human
ugcuagaacucccuuucaac

SEQ ID NO: 3250231 - RNA, 16 nt, Human
ugcuagguuaauucca

SEQ ID NO: 3250232 - RNA, 23 nt, Human
ugcuagguuaauuccaauuauau

SEQ ID NO: 3250233 - RNA, 19 nt, Human
ugcaucagcugcugaaaca

SEQ ID NO: 3250234 - RNA, 22 nt, Human
ugcaucagcugcugaaacaaca

SEQ ID NO: 3250235 - RNA, 15 nt, Human
ugcauuauauuuauu

SEQ ID NO: 3250236 - RNA, 14 nt, Human
ugcauuauauuuau

SEQ ID NO: 3250237 - RNA, 20 nt, Human
ugcauuauauuuauuacugu

SEQ ID NO: 3250238 - RNA, 13 nt, Human
ugaaguccaagca

SEQ ID NO: 3250239 - RNA, 15 nt, Human
ugcacaucaaaauau

SEQ ID NO: 3250240 - RNA, 16 nt, Human
ugcagauaaacaguag

SEQ ID NO: 3250241 - RNA, 14 nt, Human
ugcuucuguuuuau

SEQ ID NO: 3250242 - RNA, 14 nt, Human
uggaacucucgagc

SEQ ID NO: 3250243 - RNA, 22 nt, Human
uggaaaaguauguuagugcaaa

SEQ ID NO: 3250244 - RNA, 18 nt, Human
ugggacagucaccucaug

SEQ ID NO: 3250245 - RNA, 20 nt, Human
ugggacagucaccucaugga

SEQ ID NO: 3250246 - RNA, 21 nt, Human
ugggacagucaccucauggaa

SEQ ID NO: 3250247 - RNA, 14 nt, Human
ugggacagggagga

SEQ ID NO: 3250248 - RNA, 19 nt, Human
ugggacauuugcucaugga

SEQ ID NO: 3250249 - RNA, 20 nt, Human
ugggacauuugcucauggaa

SEQ ID NO: 3250250 - RNA, 18 nt, Human
uggccuucggccuccauc

SEQ ID NO: 3250251 - RNA, 17 nt, Human
uggccuucggccuccau

SEQ ID NO: 3250252 - RNA, 14 nt, Human
uggccuucggccuc

SEQ ID NO: 3250253 - RNA, 17 nt, Human
uggguagacacacauga

SEQ ID NO: 3250254 - RNA, 16 nt, Human
uggguagacacacaug

SEQ ID NO: 3250255 - RNA, 14 nt, Human
uaaaagaugaaaau

SEQ ID NO: 3250256 - RNA, 19 nt, Human
uaaaauccauacauuugug

SEQ ID NO: 3250257 - RNA, 18 nt, Human
uaaaauccauacauuugu

SEQ ID NO: 3250258 - RNA, 22 nt, Human
uaaauaaaccucaaaaugucua

SEQ ID NO: 3250259 - RNA, 18 nt, Human
uaaauauaugcuaagucu

SEQ ID NO: 3250260 - RNA, 17 nt, Human
uaaauaaaaauaauccu

SEQ ID NO: 3250261 - RNA, 14 nt, Human
uaaaggaauuuaaa

SEQ ID NO: 3250262 - RNA, 18 nt, Human
guuuucaggcuagaugua

SEQ ID NO: 3250263 - RNA, 16 nt, Human
guuuucauuaucucaa

SEQ ID NO: 3250264 - RNA, 16 nt, Human
uaaaaaagaaacauuu

SEQ ID NO: 3250265 - RNA, 20 nt, Human
guuuaggauguugaaaaagu

SEQ ID NO: 3250266 - RNA, 13 nt, Human
guuuagcaguaua

SEQ ID NO: 3250267 - RNA, 13 nt, Human
guuuagaaagcuu

SEQ ID NO: 3250268 - RNA, 23 nt, Human
uaaauugacacuuaaaaaugguu

SEQ ID NO: 3250269 - RNA, 19 nt, Human
uaacaaugcuguauuuuaa

SEQ ID NO: 3250270 - RNA, 23 nt, Human
uaagagggauuagggagagaaga

SEQ ID NO: 3250271 - RNA, 23 nt, Human
uaagagagaaugagagacacacu

SEQ ID NO: 3250272 - RNA, 21 nt, Human
uaagccagacaucaacagaua

SEQ ID NO: 3250273 - RNA, 20 nt, Human
uaagccagacaucaacagau

SEQ ID NO: 3250274 - RNA, 13 nt, Human
uaagccagacauc

SEQ ID NO: 3250275 - RNA, 20 nt, Human
uaagcauuccaacuaucuca

SEQ ID NO: 3250276 - RNA, 16 nt, Human
uaagcauuccaacuau

SEQ ID NO: 3250277 - RNA, 18 nt, Human
uaagcauuccaacuaucu

SEQ ID NO: 3250278 - RNA, 15 nt, Human
uaauaauguuucaaa

SEQ ID NO: 3250279 - RNA, 14 nt, Human
uaauaauguuucaa

SEQ ID NO: 3250280 - RNA, 19 nt, Human
uaauaaauauuuuugccau

SEQ ID NO: 3250281 - RNA, 19 nt, Human
uaaugccacuaaauugaca

SEQ ID NO: 3250282 - RNA, 19 nt, Human
uaaugauaaguaaaugcua

SEQ ID NO: 3250283 - RNA, 23 nt, Human
uaaugauaacuggaaacuucagc

SEQ ID NO: 3250284 - RNA, 14 nt, Human
uaauauauuuccau

SEQ ID NO: 3250285 - RNA, 22 nt, Human
uaauuggaaaggcagcucuaaa

SEQ ID NO: 3250286 - RNA, 20 nt, Human
uaauuuguaguguuggagaa

SEQ ID NO: 3250287 - RNA, 23 nt, Human
uaauuuguaguguuggagaagaa

SEQ ID NO: 3250288 - RNA, 13 nt, Human
uaauuuuaagaaa

SEQ ID NO: 3250289 - RNA, 15 nt, Human
uaauguuucaaacau

SEQ ID NO: 3250290 - RNA, 14 nt, Human
uaauguuucaaaca

SEQ ID NO: 3250291 - RNA, 20 nt, Human
uaauuaaaagaauauuuuaa

SEQ ID NO: 3250292 - RNA, 23 nt, Human
uaauuaaauuuugaguucuacau

SEQ ID NO: 3250293 - RNA, 19 nt, Human
uacugagagugaacaaauu

SEQ ID NO: 3250294 - RNA, 23 nt, Human
uacugauguuccuagugaaagag

SEQ ID NO: 3250295 - RNA, 23 nt, Human
uacgaagaguauuuuugacagaa

SEQ ID NO: 3250296 - RNA, 22 nt, Human
uacgaagaguauuuuugacaga

SEQ ID NO: 3250297 - RNA, 20 nt, Human
uacgaagaguauuuuugaca

SEQ ID NO: 3250298 - RNA, 17 nt, Human
uagaacagauaaucagu

SEQ ID NO: 3250299 - RNA, 23 nt, Human
uaccacaggaaccacaagacugc

SEQ ID NO: 3250300 - RNA, 20 nt, Human
uacaucccuuaccugggaaa

SEQ ID NO: 3250301 - RNA, 16 nt, Human
uaccaacacgagcagg

SEQ ID NO: 3250302 - RNA, 22 nt, Human
uaccaaaaaucucaauauuuca

SEQ ID NO: 3250303 - RNA, 22 nt, Human
uacaugagguacugagagugaa

SEQ ID NO: 3250304 - RNA, 21 nt, Human
uacaugagguacugagaguga

SEQ ID NO: 3250305 - RNA, 23 nt, Human
uacauuuggagacacaacuauuu

SEQ ID NO: 3250306 - RNA, 16 nt, Human
uacauuuguauaaaau

SEQ ID NO: 3250307 - RNA, 17 nt, Human
uacauuuguauaaaaua

SEQ ID NO: 3250308 - RNA, 11 nt, Human
uacauuugugu

SEQ ID NO: 3250309 - RNA, 14 nt, Human
uacaggauuugaaa

SEQ ID NO: 3250310 - RNA, 17 nt, Human
uagaguuuagcuggaaa

SEQ ID NO: 3250311 - RNA, 18 nt, Human
uagaguuuagcuggaaaa

SEQ ID NO: 3250312 - RNA, 20 nt, Human
uagcagggcauggcugggaa

SEQ ID NO: 3250313 - RNA, 16 nt, Human
uagauguauguacuuc

SEQ ID NO: 3250314 - RNA, 20 nt, Human
uagauguauguacuucaugc

SEQ ID NO: 3250315 - RNA, 13 nt, Human
uaggccaugggac

SEQ ID NO: 3250316 - RNA, 20 nt, Human
uaggaauugacccacaagaa

SEQ ID NO: 3250317 - RNA, 23 nt, Human
uaggaauugacccacaagaaaug

SEQ ID NO: 3250318 - RNA, 20 nt, Human
uauauuuauuacuguaagaa

SEQ ID NO: 3250319 - RNA, 23 nt, Human
uauauuuauuacuguaagaaaau

SEQ ID NO: 3250320 - RNA, 13 nt, Human
uauauuugaaaua

SEQ ID NO: 3250321 - RNA, 14 nt, Human
uauauuugaaauau

SEQ ID NO: 3250322 - RNA, 18 nt, Human
uauauaaguauucuaaau

SEQ ID NO: 3250323 - RNA, 21 nt, Human
uaguuguaccgcaaugugacu

SEQ ID NO: 3250324 - RNA, 14 nt, Human
uagucaaauugugu

SEQ ID NO: 3250325 - RNA, 18 nt, Human
uagucaaauugugugaaa

SEQ ID NO: 3250326 - RNA, 16 nt, Human
uauacccagaaaguua

SEQ ID NO: 3250327 - RNA, 21 nt, Human
uauaauucagaaggaucuuca

SEQ ID NO: 3250328 - RNA, 23 nt, Human
ucuggccuucggccuccauccug

SEQ ID NO: 3250329 - RNA, 22 nt, Human
ucuguuuuauaauuuugugaag

SEQ ID NO: 3250330 - RNA, 20 nt, Human
ucuguuuuauaauuuuguga

SEQ ID NO: 3250331 - RNA, 21 nt, Human
ugaaguccaagcauuuagaug

SEQ ID NO: 3250332 - RNA, 22 nt, Human
ugaaguccaagcauuuagaugu

SEQ ID NO: 3250333 - RNA, 14 nt, Human
ugaacacaucagcu

SEQ ID NO: 3250334 - RNA, 19 nt, Human
ugaaagcagggacuugaac

SEQ ID NO: 3250335 - RNA, 18 nt, Human
ugaaagcagggacuugaa

SEQ ID NO: 3250336 - RNA, 22 nt, Human
ugaaaagacuccaaagaaaugu

SEQ ID NO: 3250337 - RNA, 18 nt, Human
ugaaacccugucucuacu

SEQ ID NO: 3250338 - RNA, 15 nt, Human
ugaaaagacuccaaa

SEQ ID NO: 3250339 - RNA, 16 nt, Human
ugaaaagacuccaaag

SEQ ID NO: 3250340 - RNA, 17 nt, Human
ugaaaagacuccaaaga

SEQ ID NO: 3250341 - RNA, 19 nt, Human
ugaaaagacuccaaagaaa

SEQ ID NO: 3250342 - RNA, 19 nt, Human
ugaaaacuuuaugcuaagu

SEQ ID NO: 3250343 - RNA, 13 nt, Human
ucucuaggaaaua

SEQ ID NO: 3250344 - RNA, 21 nt, Human
ucucagugucaaugcagcccc

SEQ ID NO: 3250345 - RNA, 18 nt, Human
ucucuucacagucacauu

SEQ ID NO: 3250346 - RNA, 17 nt, Human
ucuacacuccagugaga

SEQ ID NO: 3250347 - RNA, 17 nt, Human
ucuacacuaagagagaa

SEQ ID NO: 3250348 - RNA, 13 nt, Human
ucuaaauuugaau

SEQ ID NO: 3250349 - RNA, 17 nt, Human
ucuaaauuugaauguua

SEQ ID NO: 3250350 - RNA, 19 nt, Human
ucuaacaaaaaaauauauu

SEQ ID NO: 3250351 - RNA, 22 nt, Human
ucuaaauuugaauguuaagcag

SEQ ID NO: 3250352 - RNA, 23 nt, Human
ucuaaauuugaauguuaagcaga

SEQ ID NO: 3250353 - RNA, 23 nt, Human
ucuaaauuuuauaucuuguagcu

SEQ ID NO: 3250354 - RNA, 18 nt, Human
ucuaaauuuuauaucuug

SEQ ID NO: 3250355 - RNA, 21 nt, Human
ucuacacuaagagagaaugag

SEQ ID NO: 3250356 - RNA, 17 nt, Human
ucucaaaacugcacugu

SEQ ID NO: 3250357 - RNA, 17 nt, Human
ucuaguaugaaauuaua

SEQ ID NO: 3250358 - RNA, 15 nt, Human
ucuaguaugaaauua

SEQ ID NO: 3250359 - RNA, 21 nt, Human
ucucaaauuuggauugcuaau

SEQ ID NO: 3250360 - RNA, 20 nt, Human
uccuucugugaaaguacauu

SEQ ID NO: 3250361 - RNA, 15 nt, Human
ucauaauuuauacag

SEQ ID NO: 3250362 - RNA, 16 nt, Human
ucauacauuguacgaa

SEQ ID NO: 3250363 - RNA, 15 nt, Human
ucauacauuguacga

SEQ ID NO: 3250364 - RNA, 13 nt, Human
ucauacauuguac

SEQ ID NO: 3250365 - RNA, 13 nt, Human
ucaguuguacagu

SEQ ID NO: 3250366 - RNA, 14 nt, Human
uccagauccuggaa

SEQ ID NO: 3250367 - RNA, 16 nt, Human
uccagauccuggaaau

SEQ ID NO: 3250368 - RNA, 17 nt, Human
uccagauccuggaaauc

SEQ ID NO: 3250369 - RNA, 13 nt, Human
uccacuuggucug

SEQ ID NO: 3250370 - RNA, 12 nt, Human
uccacuuggucu

SEQ ID NO: 3250371 - RNA, 14 nt, Human
uccaccuacaugag

SEQ ID NO: 3250372 - RNA, 23 nt, Human
uccaaacugacucuuaagaagac

SEQ ID NO: 3250373 - RNA, 16 nt, Human
ucauuucugcaucagc

SEQ ID NO: 3250374 - RNA, 22 nt, Human
ucauuucugcaucagcugcuga

SEQ ID NO: 3250375 - RNA, 14 nt, Human
ucauuucuuugagu

SEQ ID NO: 3250376 - RNA, 23 nt, Human
uccaagcauaccaacacgagcag

SEQ ID NO: 3250377 - RNA, 17 nt, Human
uccaagcauuuagaugu

SEQ ID NO: 3250378 - RNA, 16 nt, Human
ucccaaauuucauacc

SEQ ID NO: 3250379 - RNA, 20 nt, Human
uccaugggccauaugaaaag

SEQ ID NO: 3250380 - RNA, 23 nt, Human
ucacaggacagcccuucuuucca

SEQ ID NO: 3250381 - RNA, 19 nt, Human
ucacaggaaguagaggagg

SEQ ID NO: 3250382 - RNA, 14 nt, Human
ucacaggaaguaga

SEQ ID NO: 3250383 - RNA, 21 nt, Human
uauuucuaugaaauauuaugu

SEQ ID NO: 3250384 - RNA, 22 nt, Human
uauuucuaugaaauauuauguu

SEQ ID NO: 3250385 - RNA, 15 nt, Human
uauuugagaguucua

SEQ ID NO: 3250386 - RNA, 16 nt, Human
uauuugagaguucuaa

SEQ ID NO: 3250387 - RNA, 18 nt, Human
uauuugagaguucuaaau

SEQ ID NO: 3250388 - RNA, 19 nt, Human
uauuugagaguucuaaauu

SEQ ID NO: 3250389 - RNA, 19 nt, Human
uauuuuuguagcacugaca

SEQ ID NO: 3250390 - RNA, 19 nt, Human
ucagacauagaauuaacac

SEQ ID NO: 3250391 - RNA, 22 nt, Human
ucagacauagaauuaacacaug

SEQ ID NO: 3250392 - RNA, 17 nt, Human
ucacuugucaauaaaau

SEQ ID NO: 3250393 - RNA, 17 nt, Human
ucagaaaauauuaugug

SEQ ID NO: 3250394 - RNA, 19 nt, Human
ucagaaaauauuauguguu

SEQ ID NO: 3250395 - RNA, 20 nt, Human
ucagaaaauauuauguguuu

SEQ ID NO: 3250396 - RNA, 20 nt, Human
aaaaguauguuagugcaaau

SEQ ID NO: 3250397 - RNA, 22 nt, Human
acuuuauacccagaaaguuauu

SEQ ID NO: 3250398 - RNA, 17 nt, Human
cugagccgggccuuguc

SEQ ID NO: 3250399 - RNA, 18 nt, Human
cugccccugagcccugug

SEQ ID NO: 3250400 - RNA, 15 nt, Human
aucucauaauuuaua

SEQ ID NO: 3250401 - RNA, 14 nt, Human
acaagacugcacau

SEQ ID NO: 3250402 - RNA, 15 nt, Human
caggccuggccuugg

SEQ ID NO: 3250403 - RNA, 14 nt, Human
cagaccugccuuug

SEQ ID NO: 3250404 - RNA, 22 nt, Human
caauauuucagauaaucacaau

SEQ ID NO: 3250405 - RNA, 15 nt, SARS coronavirus
ugcuuaucauggcag

SEQ ID NO: 3250406 - RNA, 23 nt, SARS coronavirus
aacaaggcgauuagucaaauuca

SEQ ID NO: 3250407 - RNA, 13 nt, SARS coronavirus
agcuuguuuuccu

SEQ ID NO: 3250408 - RNA, 22 nt, SARS coronavirus
uccagaacaaacccaaggaaau

SEQ ID NO: 3250409 - RNA, 17 nt, SARS coronavirus
cuguacuacuaaaagaa

SEQ ID NO: 3250410 - RNA, 14 nt, SARS coronavirus
gaaagacagaauga

SEQ ID NO: 3250411 - RNA, 16 nt, SARS coronavirus
cacaauucaaagacaa

SEQ ID NO: 3250412 - RNA, 21 nt, SARS coronavirus
accgugcuacaacuuccucaa

SEQ ID NO: 3250413 - RNA, 16 nt, SARS coronavirus
uggcugacuuaucaug

SEQ ID NO: 3250414 - RNA, 19 nt, SARS coronavirus
ucaccaaacugcugcauuu

SEQ ID NO: 3250415 - RNA, 14 nt, SARS coronavirus
ccauuaaaugauua

SEQ ID NO: 3250416 - RNA, 17 nt, SARS coronavirus
uuacugcacagccagua

SEQ ID NO: 3250417 - RNA, 18 nt, SARS coronavirus
augcaguugcauaugcac

SEQ ID NO: 3250418 - RNA, 15 nt, SARS coronavirus
augaagcucagccuu

SEQ ID NO: 3250419 - RNA, 15 nt, SARS coronavirus
gagcucagccccaga

SEQ ID NO: 3250420 - RNA, 18 nt, SARS coronavirus
acccaaaauguucucuau

SEQ ID NO: 3250421 - RNA, 20 nt, SARS coronavirus
aaacgaacaugaaacuucuc

SEQ ID NO: 3250422 - RNA, 16 nt, SARS coronavirus
cuugaagauccuugua

SEQ ID NO: 3250423 - RNA, 21 nt, SARS coronavirus
ucaacugucaagauccagcug

SEQ ID NO: 3250424 - RNA, 20 nt, SARS coronavirus
augccuguuucuauggcuaa

SEQ ID NO: 3250425 - RNA, 24 nt, SARS coronavirus
cugcaaguacuguucaugcuacag

SEQ ID NO: 3250426 - RNA, 20 nt, SARS coronavirus
cacuaagaaaucugcugcug

SEQ ID NO: 3250427 - RNA, 12 nt, SARS coronavirus
cuugaagauccu

SEQ ID NO: 3250428 - RNA, 19 nt, SARS coronavirus
ccauuuuauucuaauguua

SEQ ID NO: 3250429 - RNA, 19 nt, SARS coronavirus
acuaagaaaucugcugcug

SEQ ID NO: 3250430 - RNA, 15 nt, SARS coronavirus
ucuuauuauuucuua

SEQ ID NO: 3250431 - RNA, 19 nt, SARS coronavirus
uucaauagugagacaauua

SEQ ID NO: 3250432 - RNA, 14 nt, SARS coronavirus
uuuuuaaugcuacu

SEQ ID NO: 3250433 - RNA, 15 nt, SARS coronavirus
aaaauuucuaauugu

SEQ ID NO: 3250434 - RNA, 18 nt, SARS coronavirus
ucacuaagaaaucugcug

SEQ ID NO: 3250435 - RNA, 16 nt, SARS coronavirus
uguucuuggacaauca

SEQ ID NO: 3250436 - RNA, 20 nt, SARS coronavirus
ccucgcgcuauugcugcuag

SEQ ID NO: 3250437 - RNA, 22 nt, SARS coronavirus
agacauuucaccuugcgcuuuu

SEQ ID NO: 3250438 - RNA, 20 nt, SARS coronavirus
uacuucuuuuucuugcuuuc

SEQ ID NO: 3250439 - RNA, 22 nt, SARS coronavirus
uuacaggcagacuucaaagccu

SEQ ID NO: 3250440 - RNA, 21 nt, SARS coronavirus
cuauuuuguuggcuauuuaaa

SEQ ID NO: 3250441 - RNA, 14 nt, SARS coronavirus
ucaacgcauguaga

SEQ ID NO: 3250442 - RNA, 21 nt, SARS coronavirus
cuacgcagagggaagcagagg

SEQ ID NO: 3250443 - RNA, 15 nt, SARS coronavirus
uuccauuuuauucua

SEQ ID NO: 3250444 - RNA, 13 nt, SARS coronavirus
gcuugauguggcu

SEQ ID NO: 3250445 - RNA, 21 nt, SARS coronavirus
aaggaacaacauugccaaaag

SEQ ID NO: 3250446 - RNA, 14 nt, SARS coronavirus
aguugccucaaggg

SEQ ID NO: 3250447 - RNA, 22 nt, SARS coronavirus
ugcugccuacacugcugcucua

SEQ ID NO: 3250448 - RNA, 18 nt, SARS coronavirus
cuaugucuuuaggugcug

SEQ ID NO: 3250449 - RNA, 20 nt, SARS coronavirus
cauggguuguguccuugcuu

SEQ ID NO: 3250450 - RNA, 11 nt, SARS coronavirus
cuauguuuaua

SEQ ID NO: 3250451 - RNA, 17 nt, SARS coronavirus
uuacauuugguggaccc

SEQ ID NO: 3250452 - RNA, 21 nt, SARS coronavirus
uaaaaauuuaaaugaaucacu

SEQ ID NO: 3250453 - RNA, 23 nt, SARS coronavirus
auugaaccagcuugagagcaaag

SEQ ID NO: 3250454 - RNA, 21 nt, SARS coronavirus
caacuacuuuguuugcuggca

SEQ ID NO: 3250455 - RNA, 17 nt, SARS coronavirus
gacagauugaaccagcu

SEQ ID NO: 3250456 - RNA, 20 nt, SARS coronavirus
ugguauuuauuuugcugcca

SEQ ID NO: 3250457 - RNA, 13 nt, SARS coronavirus
gugcuugcugcug

SEQ ID NO: 3250458 - RNA, 23 nt, SARS coronavirus
uggggcaaggccaaaacagcgcc

SEQ ID NO: 3250459 - RNA, 19 nt, SARS coronavirus
gauaguucaauugcuuacu

SEQ ID NO: 3250460 - RNA, 15 nt, SARS coronavirus
uuuugcuugugcuga

SEQ ID NO: 3250461 - RNA, 14 nt, SARS coronavirus
acugagggagccuu

SEQ ID NO: 3250462 - RNA, 18 nt, SARS coronavirus
acccagaaacaaacauuc

SEQ ID NO: 3250463 - RNA, 17 nt, SARS coronavirus
agcgccaggacaaacug

SEQ ID NO: 3250464 - RNA, 18 nt, SARS coronavirus
cucgaauggcuagcggag

SEQ ID NO: 3250465 - RNA, 20 nt, SARS coronavirus
cuaagaaaucugcugcugag

SEQ ID NO: 3250466 - RNA, 15 nt, SARS coronavirus
uuaaucaauguguaa

SEQ ID NO: 3250467 - RNA, 22 nt, SARS coronavirus
uucugcugauucaacucaggca

SEQ ID NO: 3250468 - RNA, 15 nt, SARS coronavirus
cuaaucuugcugcua

SEQ ID NO: 3250469 - RNA, 20 nt, SARS coronavirus
aacaacuccuggaacaaugg

SEQ ID NO: 3250470 - RNA, 18 nt, SARS coronavirus
gauguuucugauuucacu

SEQ ID NO: 3250471 - RNA, 17 nt, SARS coronavirus
augaguggagcuucugc

SEQ ID NO: 3250472 - RNA, 13 nt, SARS coronavirus
aaguguaauuaca

SEQ ID NO: 3250473 - RNA, 23 nt, SARS coronavirus
cugccaccgugcuacaacuuccu

SEQ ID NO: 3250474 - RNA, 15 nt, SARS coronavirus
acaaucacagaugcu

SEQ ID NO: 3250475 - RNA, 19 nt, SARS coronavirus
gcuuaucauggcagacaac

SEQ ID NO: 3250476 - RNA, 18 nt, SARS coronavirus
uauaccuacuaacuuuuc

SEQ ID NO: 3250477 - RNA, 22 nt, SARS coronavirus
accacauuuucaucgaggccac

SEQ ID NO: 3250478 - RNA, 18 nt, SARS coronavirus
cuugcuuuguugcaugac

SEQ ID NO: 3250479 - RNA, 23 nt, SARS coronavirus
cacauaaacgaacuuauggauuu

SEQ ID NO: 3250480 - RNA, 19 nt, SARS coronavirus
ugacgcauacaaaacauuc

SEQ ID NO: 3250481 - RNA, 18 nt, SARS coronavirus
acagccuuuucaccugcu

SEQ ID NO: 3250482 - RNA, 16 nt, SARS coronavirus
uucucauuguuuugac

SEQ ID NO: 3250483 - RNA, 22 nt, SARS coronavirus
ccaugaguggagcuucugcuga

SEQ ID NO: 3250484 - RNA, 15 nt, SARS coronavirus
ucaagucaaacaaau

SEQ ID NO: 3250485 - RNA, 18 nt, SARS coronavirus
gcaauucaccauuucacc

SEQ ID NO: 3250486 - RNA, 14 nt, SARS coronavirus
aauggcacuucuug

SEQ ID NO: 3250487 - RNA, 15 nt, SARS coronavirus
uauaucaagauguua

SEQ ID NO: 3250488 - RNA, 17 nt, SARS coronavirus
caaugugccucuccggg

SEQ ID NO: 3250489 - RNA, 15 nt, SARS coronavirus
uuuaacaagcuuguu

SEQ ID NO: 3250490 - RNA, 13 nt, SARS coronavirus
acugcugaacaag

SEQ ID NO: 3250491 - RNA, 15 nt, SARS coronavirus
uaagaagaauuauuc

SEQ ID NO: 3250492 - RNA, 10 nt, SARS coronavirus
cuugcugcug

SEQ ID NO: 3250493 - RNA, 21 nt, SARS coronavirus
uaauuucaggguuguucccuc

SEQ ID NO: 3250494 - RNA, 13 nt, SARS coronavirus
gucauacugcuga

SEQ ID NO: 3250495 - RNA, 17 nt, SARS coronavirus
ugccuacacugcugcuc

SEQ ID NO: 3250496 - RNA, 22 nt, SARS coronavirus
auagugguccagaugaccaaau

SEQ ID NO: 3250497 - RNA, 17 nt, SARS coronavirus
augaaggcaaagcauac

SEQ ID NO: 3250498 - RNA, 18 nt, SARS coronavirus
auguucaagcuccuaauu

SEQ ID NO: 3250499 - RNA, 15 nt, SARS coronavirus
uucacagcucucacu

SEQ ID NO: 3250500 - RNA, 17 nt, SARS coronavirus
gaugaccaaauuggcua

SEQ ID NO: 3250501 - RNA, 18 nt, SARS coronavirus
uaguauuuuuaauacuuu

SEQ ID NO: 3250502 - RNA, 21 nt, SARS coronavirus
uggugguuuuaauuuuucaca

SEQ ID NO: 3250503 - RNA, 23 nt, SARS coronavirus
uucucauuguuuugacuuguauu

SEQ ID NO: 3250504 - RNA, 12 nt, SARS coronavirus
gguauucuugcu

SEQ ID NO: 3250505 - RNA, 18 nt, SARS coronavirus
ggcacugauucagguuuu

SEQ ID NO: 3250506 - RNA, 15 nt, SARS coronavirus
cgcuccucaucacgu

SEQ ID NO: 3250507 - RNA, 19 nt, SARS coronavirus
ucaagaaauucaacuccug

SEQ ID NO: 3250508 - RNA, 18 nt, SARS coronavirus
ugguuuucacucgaaauc

SEQ ID NO: 3250509 - RNA, 20 nt, SARS coronavirus
gcacucucagguauugcugc

SEQ ID NO: 3250510 - RNA, 19 nt, SARS coronavirus
uuacagccuuuucaccugc

SEQ ID NO: 3250511 - RNA, 22 nt, SARS coronavirus
cugccaaaagagaucacugugg

SEQ ID NO: 3250512 - RNA, 13 nt, SARS coronavirus
gcuauugcugcua

SEQ ID NO: 3250513 - RNA, 17 nt, SARS coronavirus
caauuagcauuacuaca

SEQ ID NO: 3250514 - RNA, 23 nt, SARS coronavirus
ucaggcauaaacacucaugauga

SEQ ID NO: 3250515 - RNA, 20 nt, SARS coronavirus
gcuucugcugauucaacuca

SEQ ID NO: 3250516 - RNA, 14 nt, SARS coronavirus
uguuuauuuucuua

SEQ ID NO: 3250517 - RNA, 18 nt, SARS coronavirus
aacugguguuauugcuga

SEQ ID NO: 3250518 - RNA, 16 nt, SARS coronavirus
cacuaagaaaucugcu

SEQ ID NO: 3250519 - RNA, 19 nt, SARS coronavirus
uagcuacuucguugcuucc

SEQ ID NO: 3250520 - RNA, 19 nt, SARS coronavirus
agggaggacuugaaagagc

SEQ ID NO: 3250521 - RNA, 21 nt, SARS coronavirus
acauacgagggcaauucacca

SEQ ID NO: 3250522 - RNA, 17 nt, SARS coronavirus
agcucagccccagaugg

SEQ ID NO: 3250523 - RNA, 14 nt, SARS coronavirus
augauguucaagcu

SEQ ID NO: 3250524 - RNA, 16 nt, SARS coronavirus
acucaaagaagacuac

SEQ ID NO: 3250525 - RNA, 15 nt, SARS coronavirus
auaacaaugcugcca

SEQ ID NO: 3250526 - RNA, 15 nt, SARS coronavirus
cuuguauuucucuau

SEQ ID NO: 3250527 - RNA, 23 nt, SARS coronavirus
cuugaaagagccaccacauuuuc

SEQ ID NO: 3250528 - RNA, 16 nt, SARS coronavirus
uaaaggccaacaacaa

SEQ ID NO: 3250529 - RNA, 18 nt, SARS coronavirus
cgcagagggaagcagagg

SEQ ID NO: 3250530 - RNA, 17 nt, SARS coronavirus
ucucauuguugcugcuc

SEQ ID NO: 3250531 - RNA, 16 nt, SARS coronavirus
caauggggcaaggcca

SEQ ID NO: 3250532 - RNA, 17 nt, SARS coronavirus
aacugauuacaaacauu

SEQ ID NO: 3250533 - RNA, 21 nt, SARS coronavirus
cuuauguccuucccacaagca

SEQ ID NO: 3250534 - RNA, 12 nt, SARS coronavirus
gaagcucagccu

SEQ ID NO: 3250535 - RNA, 15 nt, SARS coronavirus
aacaaauuaaaaugu

SEQ ID NO: 3250536 - RNA, 17 nt, SARS coronavirus
guugaaugaucuuugcu

SEQ ID NO: 3250537 - RNA, 16 nt, SARS coronavirus
cucauuguugcugcuc

SEQ ID NO: 3250538 - RNA, 15 nt, SARS coronavirus
ugaacuuuuaaaugc

SEQ ID NO: 3250539 - RNA, 22 nt, SARS coronavirus
uucugucgucaacauucaaaaa

SEQ ID NO: 3250540 - RNA, 12 nt, SARS coronavirus
aacaagcacauu

SEQ ID NO: 3250541 - RNA, 13 nt, SARS coronavirus
guacaacgucacu

SEQ ID NO: 3250542 - RNA, 20 nt, SARS coronavirus
cuaauguuacuaucaacugu

SEQ ID NO: 3250543 - RNA, 13 nt, SARS coronavirus
cuggcagcaguag

SEQ ID NO: 3250544 - RNA, 19 nt, SARS coronavirus
cgauacauagucuacucuu

SEQ ID NO: 3250545 - RNA, 22 nt, SARS coronavirus
gacucugagccaguucucaagg

SEQ ID NO: 3250546 - RNA, 16 nt, SARS coronavirus
agucuacucuugugca

SEQ ID NO: 3250547 - RNA, 18 nt, SARS coronavirus
auucaacccagaaacaaa

SEQ ID NO: 3250548 - RNA, 23 nt, SARS coronavirus
ugcgagcuauaucacuaucagga

SEQ ID NO: 3250549 - RNA, 18 nt, SARS coronavirus
auaauaaguucaauagug

SEQ ID NO: 3250550 - RNA, 15 nt, SARS coronavirus
agaaugcucaagcau

SEQ ID NO: 3250551 - RNA, 13 nt, SARS coronavirus
auugcuuaucaug

SEQ ID NO: 3250552 - RNA, 13 nt, SARS coronavirus
caauguguaacau

SEQ ID NO: 3250553 - RNA, 13 nt, SARS coronavirus
ucuucugaaggag

SEQ ID NO: 3250554 - RNA, 20 nt, SARS coronavirus
aguuacccaaaauguucucu

SEQ ID NO: 3250555 - RNA, 20 nt, SARS coronavirus
aaggucaccaaacugcugca

SEQ ID NO: 3250556 - RNA, 12 nt, SARS coronavirus
ucacagaugcug

SEQ ID NO: 3250557 - RNA, 22 nt, SARS coronavirus
augaaaauuauucucuuccuga

SEQ ID NO: 3250558 - RNA, 23 nt, SARS coronavirus
cauuggaguuacccaaaauguuc

SEQ ID NO: 3250559 - RNA, 17 nt, SARS coronavirus
ucaugaaggcaaagcau

SEQ ID NO: 3250560 - RNA, 23 nt, SARS coronavirus
ugcacucucagguauugcugcug

SEQ ID NO: 3250561 - RNA, 23 nt, SARS coronavirus
cacuugcuuguuuugugcuugcu

SEQ ID NO: 3250562 - RNA, 14 nt, SARS coronavirus
ugaugaaaauggua

SEQ ID NO: 3250563 - RNA, 14 nt, SARS coronavirus
ugacucauucaaag

SEQ ID NO: 3250564 - RNA, 13 nt, SARS coronavirus
uuauuauuauucu

SEQ ID NO: 3250565 - RNA, 13 nt, SARS coronavirus
caaaaacaaaucg

SEQ ID NO: 3250566 - RNA, 13 nt, SARS coronavirus
auggguuucucua

SEQ ID NO: 3250567 - RNA, 21 nt, SARS coronavirus
gcucuugugguucuugcugca

SEQ ID NO: 3250568 - RNA, 16 nt, SARS coronavirus
ccaggaucuagaagaa

SEQ ID NO: 3250569 - RNA, 20 nt, SARS coronavirus
auggcacacuaugguucaaa

SEQ ID NO: 3250570 - RNA, 17 nt, SARS coronavirus
gacaacagauguuucau

SEQ ID NO: 3250571 - RNA, 21 nt, SARS coronavirus
agcguacuucuuuuucuugcu

SEQ ID NO: 3250572 - RNA, 16 nt, SARS coronavirus
uuuacuaccagcuuga

SEQ ID NO: 3250573 - RNA, 20 nt, SARS coronavirus
uaauacuuauagcacugcuu

SEQ ID NO: 3250574 - RNA, 13 nt, SARS coronavirus
ugccgcagagaca

SEQ ID NO: 3250575 - RNA, 13 nt, SARS coronavirus
acuacaauuugcc

SEQ ID NO: 3250576 - RNA, 18 nt, SARS coronavirus
cuacagcaauucaugcag

SEQ ID NO: 3250577 - RNA, 14 nt, SARS coronavirus
ucauuguugcugcu

SEQ ID NO: 3250578 - RNA, 13 nt, SARS coronavirus
cuaauaacaaugc

SEQ ID NO: 3250579 - RNA, 17 nt, SARS coronavirus
cauagauggcacacuau

SEQ ID NO: 3250580 - RNA, 24 nt, SARS coronavirus
augccuugauauauuuucuacaau

SEQ ID NO: 3250581 - RNA, 17 nt, SARS coronavirus
aguuugaugaggaugac

SEQ ID NO: 3250582 - RNA, 16 nt, SARS coronavirus
augugauuuuaauagc

SEQ ID NO: 3250583 - RNA, 14 nt, SARS coronavirus
aacauacuucaucu

SEQ ID NO: 3250584 - RNA, 14 nt, SARS coronavirus
caaaguuucuggua

SEQ ID NO: 3250585 - RNA, 18 nt, SARS coronavirus
ucagcauggcaaggagga

SEQ ID NO: 3250586 - RNA, 13 nt, SARS coronavirus
cagcccacuguga

SEQ ID NO: 3250587 - RNA, 15 nt, SARS coronavirus
agaaaucugcugcug

SEQ ID NO: 3250588 - RNA, 14 nt, SARS coronavirus
cccaggagaggaac

SEQ ID NO: 3250589 - RNA, 18 nt, SARS coronavirus
auacgagcauguaacuuu

SEQ ID NO: 3250590 - RNA, 20 nt, SARS coronavirus
uggaaugucacgcauuggca

SEQ ID NO: 3250591 - RNA, 15 nt, SARS coronavirus
uucaucuuguugacu

SEQ ID NO: 3250592 - RNA, 14 nt, SARS coronavirus
gauaugauugcugc

SEQ ID NO: 3250593 - RNA, 22 nt, SARS coronavirus
ugacucuucuuccugcggcuga

SEQ ID NO: 3250594 - RNA, 17 nt, SARS coronavirus
aaaccaacguagugccc

SEQ ID NO: 3250595 - RNA, 19 nt, SARS coronavirus
uauuuaaagccaacuacau

SEQ ID NO: 3250596 - RNA, 13 nt, SARS coronavirus
cuaccgaagagcu

SEQ ID NO: 3250597 - RNA, 14 nt, SARS coronavirus
auguagaauuauua

SEQ ID NO: 3250598 - RNA, 21 nt, SARS coronavirus
uguuucaucuuguugacuucc

SEQ ID NO: 3250599 - RNA, 16 nt, SARS coronavirus
aaguugcuguucuaua

SEQ ID NO: 3250600 - RNA, 18 nt, SARS coronavirus
aaauuaaauacagaccac

SEQ ID NO: 3250601 - RNA, 21 nt, SARS coronavirus
gugacaacagauguuucaucu

SEQ ID NO: 3250602 - RNA, 13 nt, SARS coronavirus
cugucaagaucca

SEQ ID NO: 3250603 - RNA, 12 nt, SARS coronavirus
gcucaauguggu

SEQ ID NO: 3250604 - RNA, 15 nt, SARS coronavirus
caauauugcuuugcu

SEQ ID NO: 3250605 - RNA, 16 nt, SARS coronavirus
auccuaauaacaaugc

SEQ ID NO: 3250606 - RNA, 22 nt, SARS coronavirus
ggccaaacugucacuaagaaau

SEQ ID NO: 3250607 - RNA, 14 nt, SARS coronavirus
cuacaacuuccuca

SEQ ID NO: 3250608 - RNA, 16 nt, SARS coronavirus
cuagagaucucauuug

SEQ ID NO: 3250609 - RNA, 22 nt, SARS coronavirus
ugaugaccacacaaggcagaug

SEQ ID NO: 3250610 - RNA, 18 nt, SARS coronavirus
uucaaacaugcacaccua

SEQ ID NO: 3250611 - RNA, 21 nt, SARS coronavirus
gaggacgcaauggggcaaggc

SEQ ID NO: 3250612 - RNA, 16 nt, SARS coronavirus
cuaacaaagaaggcau

SEQ ID NO: 3250613 - RNA, 17 nt, SARS coronavirus
aggcaucuaaaaagccu

SEQ ID NO: 3250614 - RNA, 22 nt, SARS coronavirus
ugcacuagcacacacuuugcuu

SEQ ID NO: 3250615 - RNA, 22 nt, SARS coronavirus
gcaucuaauaaaccucaugugc

SEQ ID NO: 3250616 - RNA, 17 nt, SARS coronavirus
gaacuugucauuggugc

SEQ ID NO: 3250617 - RNA, 19 nt, SARS coronavirus
ugagcaauauauuaaaugg

SEQ ID NO: 3250618 - RNA, 14 nt, SARS coronavirus
acauaaacgaacuu

SEQ ID NO: 3250619 - RNA, 18 nt, SARS coronavirus
aacaacauugccaaaagg

SEQ ID NO: 3250620 - RNA, 19 nt, SARS coronavirus
acaacgguacuauuaccgu

SEQ ID NO: 3250621 - RNA, 18 nt, SARS coronavirus
caccgaaguuuacuacca

SEQ ID NO: 3250622 - RNA, 14 nt, SARS coronavirus
ggcaaaaugaaaga

SEQ ID NO: 3250623 - RNA, 16 nt, SARS coronavirus
ucuucucgcuccucau

SEQ ID NO: 3250624 - RNA, 20 nt, SARS coronavirus
gucacuaagaaaucugcugc

SEQ ID NO: 3250625 - RNA, 22 nt, SARS coronavirus
uuaaggaugguauuuauuuugc

SEQ ID NO: 3250626 - RNA, 18 nt, SARS coronavirus
aauauauuaaauggccuu

SEQ ID NO: 3250627 - RNA, 15 nt, SARS coronavirus
gcuggcgcugcucuu

SEQ ID NO: 3250628 - RNA, 12 nt, SARS coronavirus
uuuaacauugcu

SEQ ID NO: 3250629 - RNA, 14 nt, SARS coronavirus
ugccaccucugcuc

SEQ ID NO: 3250630 - RNA, 11 nt, SARS coronavirus
caacuccugga

SEQ ID NO: 3250631 - RNA, 20 nt, SARS coronavirus
ugaugaaaaugguacaauca

SEQ ID NO: 3250632 - RNA, 19 nt, SARS coronavirus
acuauuauuauuauucugu

SEQ ID NO: 3250633 - RNA, 20 nt, SARS coronavirus
ccuacggcgcuaacaaagaa

SEQ ID NO: 3250634 - RNA, 17 nt, SARS coronavirus
gcaauuuacugcugcua

SEQ ID NO: 3250635 - RNA, 14 nt, SARS coronavirus
aaugauuaugguuu

SEQ ID NO: 3250636 - RNA, 17 nt, SARS coronavirus
acacucaugaugaccac

SEQ ID NO: 3250637 - RNA, 13 nt, SARS coronavirus
cauucuuuggaau

SEQ ID NO: 3250638 - RNA, 20 nt, SARS coronavirus
cacugcuggauggacauuug

SEQ ID NO: 3250639 - RNA, 13 nt, SARS coronavirus
cuccuggcagcag

SEQ ID NO: 3250640 - RNA, 13 nt, SARS coronavirus
ccuugcgcuuuug

SEQ ID NO: 3250641 - RNA, 15 nt, SARS coronavirus
gcuauaccuacuaac

SEQ ID NO: 3250642 - RNA, 21 nt, SARS coronavirus
cuaguuagugguacugccacu

SEQ ID NO: 3250643 - RNA, 20 nt, SARS coronavirus
auuauaaauauagguaucuu

SEQ ID NO: 3250644 - RNA, 13 nt, SARS coronavirus
auuguugcugcuc

SEQ ID NO: 3250645 - RNA, 13 nt, SARS coronavirus
cugauuacaaaca

SEQ ID NO: 3250646 - RNA, 17 nt, SARS coronavirus
caacaacaacaaggcca

SEQ ID NO: 3250647 - RNA, 12 nt, SARS coronavirus
gaaaauuauucu

SEQ ID NO: 3250648 - RNA, 23 nt, SARS coronavirus
gugcuugcugcugucuacagaau

SEQ ID NO: 3250649 - RNA, 23 nt, SARS coronavirus
gaugaagcucagccuuugccgca

SEQ ID NO: 3250650 - RNA, 18 nt, SARS coronavirus
auuugcaauuuacugcug

SEQ ID NO: 3250651 - RNA, 17 nt, SARS coronavirus
cucgcgcuauugcugcu

SEQ ID NO: 3250652 - RNA, 15 nt, SARS coronavirus
uaaugccuguuucua

SEQ ID NO: 3250653 - RNA, 23 nt, SARS coronavirus
caaauagcgccaggacaaacugg

SEQ ID NO: 3250654 - RNA, 14 nt, SARS coronavirus
uaaaaaggacaaaa

SEQ ID NO: 3250655 - RNA, 23 nt, SARS coronavirus
gucacuaagaaaucugcugcuga

SEQ ID NO: 3250656 - RNA, 22 nt, SARS coronavirus
ugauguuucuacagcaauucau

SEQ ID NO: 3250657 - RNA, 20 nt, SARS coronavirus
uuugcaauuuacugcugcua

SEQ ID NO: 3250658 - RNA, 17 nt, SARS coronavirus
ugugacucuucuuccug

SEQ ID NO: 3250659 - RNA, 13 nt, SARS coronavirus
auacacccaaaga

SEQ ID NO: 3250660 - RNA, 14 nt, SARS coronavirus
augguucaaacaug

SEQ ID NO: 3250661 - RNA, 15 nt, SARS coronavirus
cgcucaauaaaagau

SEQ ID NO: 3250662 - RNA, 21 nt, SARS coronavirus
gccacuuuuucucauuguugc

SEQ ID NO: 3250663 - RNA, 20 nt, SARS coronavirus
cuucuucaaagagauuucaa

SEQ ID NO: 3250664 - RNA, 18 nt, SARS coronavirus
acucaggcauaaacacuc

SEQ ID NO: 3250665 - RNA, 20 nt, SARS coronavirus
ugcuaauuugcuucuccaau

SEQ ID NO: 3250666 - RNA, 15 nt, SARS coronavirus
cucgcuccucaucac

SEQ ID NO: 3250667 - RNA, 13 nt, SARS coronavirus
uaauaacaaugcu

SEQ ID NO: 3250668 - RNA, 23 nt, SARS coronavirus
auggaccccaaucaaaccaacgu

SEQ ID NO: 3250669 - RNA, 22 nt, SARS coronavirus
cauuuggugcuggcgcugcucu

SEQ ID NO: 3250670 - RNA, 20 nt, SARS coronavirus
ucauuguuuugacuuguauu

SEQ ID NO: 3250671 - RNA, 19 nt, SARS coronavirus
cacuaagaaaucugcugcu

SEQ ID NO: 3250672 - RNA, 15 nt, SARS coronavirus
accaaaacuuuucau

SEQ ID NO: 3250673 - RNA, 18 nt, SARS coronavirus
uaaaaagccucgccaaaa

SEQ ID NO: 3250674 - RNA, 13 nt, SARS coronavirus
aacauucuucuca

SEQ ID NO: 3250675 - RNA, 20 nt, SARS coronavirus
aucugaaauauuagacauuu

SEQ ID NO: 3250676 - RNA, 14 nt, SARS coronavirus
gcgcuaacaaagaa

SEQ ID NO: 3250677 - RNA, 21 nt, SARS coronavirus
agagauuucaaccauuucaac

SEQ ID NO: 3250678 - RNA, 20 nt, SARS coronavirus
uguaacuuugaauuguguga

SEQ ID NO: 3250679 - RNA, 16 nt, SARS coronavirus
aagacguuguuaacca

SEQ ID NO: 3250680 - RNA, 20 nt, SARS coronavirus
ugcugccuacacugcugcuc

SEQ ID NO: 3250681 - RNA, 15 nt, SARS coronavirus
uaaugcuagggagag

SEQ ID NO: 3250682 - RNA, 23 nt, SARS coronavirus
cugcccucgcgcuauugcugcua

SEQ ID NO: 3250683 - RNA, 22 nt, SARS coronavirus
ucuacuggaaacaauguauucc

SEQ ID NO: 3250684 - RNA, 22 nt, SARS coronavirus
auuguggcuuauacuaugucuu

SEQ ID NO: 3250685 - RNA, 21 nt, SARS coronavirus
gcauuaaacacacuuguuaaa

SEQ ID NO: 3250686 - RNA, 14 nt, SARS coronavirus
uucucauuguugcu

SEQ ID NO: 3250687 - RNA, 18 nt, SARS coronavirus
cucgccacuuuuucucau

SEQ ID NO: 3250688 - RNA, 13 nt, SARS coronavirus
uccaaugucuaug

SEQ ID NO: 3250689 - RNA, 14 nt, SARS coronavirus
guuaaagacccacc

SEQ ID NO: 3250690 - RNA, 21 nt, SARS coronavirus
auuauuaacaauucuacuaau

SEQ ID NO: 3250691 - RNA, 18 nt, SARS coronavirus
ucaaauucaagaaucacu

SEQ ID NO: 3250692 - RNA, 12 nt, SARS coronavirus
acaaacauucuu

SEQ ID NO: 3250693 - RNA, 15 nt, SARS coronavirus
cugcuaaucuugcug

SEQ ID NO: 3250694 - RNA, 20 nt, SARS coronavirus
uggaagagcccuaaugugua

SEQ ID NO: 3250695 - RNA, 15 nt, SARS coronavirus
ugucuacagaauuaa

SEQ ID NO: 3250696 - RNA, 16 nt, SARS coronavirus
cuaagaaaucugcugc

SEQ ID NO: 3250697 - RNA, 17 nt, SARS coronavirus
auuauucuguuuggaac

SEQ ID NO: 3250698 - RNA, 21 nt, SARS coronavirus
cauuugcaauuuacugcugcu

SEQ ID NO: 3250699 - RNA, 15 nt, SARS coronavirus
aucuuagacauggca

SEQ ID NO: 3250700 - RNA, 14 nt, SARS coronavirus
ugaaacuucucauu

SEQ ID NO: 3250701 - RNA, 22 nt, SARS coronavirus
agggggguuuacuauccugaug

SEQ ID NO: 3250702 - RNA, 16 nt, SARS coronavirus
augaccaaauuggcua

SEQ ID NO: 3250703 - RNA, 15 nt, SARS coronavirus
uggcgacauuucagg

SEQ ID NO: 3250704 - RNA, 11 nt, SARS coronavirus
cuucucauugu

SEQ ID NO: 3250705 - RNA, 20 nt, SARS coronavirus
aaaauuauccacugaccuua

SEQ ID NO: 3250706 - RNA, 14 nt, SARS coronavirus
caauucaaagacaa

SEQ ID NO: 3250707 - RNA, 13 nt, SARS coronavirus
cuuugugcucuag

SEQ ID NO: 3250708 - RNA, 15 nt, SARS coronavirus
auaccuuuugcuaug

SEQ ID NO: 3250709 - RNA, 23 nt, SARS coronavirus
gucaccaaacugcugcauuuaga

SEQ ID NO: 3250710 - RNA, 15 nt, SARS coronavirus
auucucuuccugaca

SEQ ID NO: 3250711 - RNA, 17 nt, SARS coronavirus
acaaucaaaaagaguug

SEQ ID NO: 3250712 - RNA, 22 nt, SARS coronavirus
gugacggcaaaaugaaagagcu

SEQ ID NO: 3250713 - RNA, 15 nt, SARS coronavirus
cucauggaaagugaa

SEQ ID NO: 3250714 - RNA, 16 nt, SARS coronavirus
acuauaaauuaaauac

SEQ ID NO: 3250715 - RNA, 18 nt, SARS coronavirus
aacuaaucagggcugcug

SEQ ID NO: 3250716 - RNA, 15 nt, SARS coronavirus
auaucugaugccuuu

SEQ ID NO: 3250717 - RNA, 18 nt, SARS coronavirus
gcucggcuucauugcugg

SEQ ID NO: 3250718 - RNA, 22 nt, SARS coronavirus
cuaggaacuggcccagaagcuu

SEQ ID NO: 3250719 - RNA, 15 nt, SARS coronavirus
caucuuguugacuuc

SEQ ID NO: 3250720 - RNA, 18 nt, SARS coronavirus
ucacacuagccauccuua

SEQ ID NO: 3250721 - RNA, 14 nt, SARS coronavirus
cuuccuacauguca

SEQ ID NO: 3250722 - RNA, 18 nt, SARS coronavirus
aaugaucuuugcuucucc

SEQ ID NO: 3250723 - RNA, 16 nt, SARS coronavirus
cuucaaagagauuuca

SEQ ID NO: 3250724 - RNA, 13 nt, SARS coronavirus
uggcgcugcucuu

SEQ ID NO: 3250725 - RNA, 17 nt, SARS coronavirus
uuguuaccaucuauuca

SEQ ID NO: 3250726 - RNA, 19 nt, SARS coronavirus
gcuucuuaggagaaugaca

SEQ ID NO: 3250727 - RNA, 14 nt, SARS coronavirus
aggcauaaacacuc

SEQ ID NO: 3250728 - RNA, 19 nt, SARS coronavirus
aagaaccuuguaccaaagu

SEQ ID NO: 3250729 - RNA, 22 nt, SARS coronavirus
caaacugguguuauugcugauu

SEQ ID NO: 3250730 - RNA, 19 nt, SARS coronavirus
gguucaacaagagcucuac

SEQ ID NO: 3250731 - RNA, 17 nt, SARS coronavirus
cuguucaugcuacagca

SEQ ID NO: 3250732 - RNA, 15 nt, SARS coronavirus
acaaaugcuucaucu

SEQ ID NO: 3250733 - RNA, 12 nt, SARS coronavirus
cgacacuucuua

SEQ ID NO: 3250734 - RNA, 22 nt, SARS coronavirus
ucuugcugcuacuaaaaugucu

SEQ ID NO: 3250735 - RNA, 19 nt, SARS coronavirus
uuagaugaugaagaaccua

SEQ ID NO: 3250736 - RNA, 12 nt, SARS coronavirus
uccuggcagcag

SEQ ID NO: 3250737 - RNA, 23 nt, SARS coronavirus
ggcuucuacgcagagggaagcag

SEQ ID NO: 3250738 - RNA, 23 nt, SARS coronavirus
uccugcaaguacuguucaugcua

SEQ ID NO: 3250739 - RNA, 16 nt, SARS coronavirus
uaauucaagaaauuca

SEQ ID NO: 3250740 - RNA, 13 nt, SARS coronavirus
uauucucuuccug

SEQ ID NO: 3250741 - RNA, 15 nt, SARS coronavirus
uuggcauggaaguca

SEQ ID NO: 3250742 - RNA, 22 nt, SARS coronavirus
cugauguuucuacagcaauuca

SEQ ID NO: 3250743 - RNA, 20 nt, SARS coronavirus
ccagaacaaacccaaggaaa

SEQ ID NO: 3250744 - RNA, 18 nt, SARS coronavirus
auugaccgccucaaugag

SEQ ID NO: 3250745 - RNA, 21 nt, SARS coronavirus
ugauuucuccagacaacuuca

SEQ ID NO: 3250746 - RNA, 18 nt, SARS coronavirus
cggcaaaaugaaagagcu

SEQ ID NO: 3250747 - RNA, 23 nt, SARS coronavirus
gcuuguuuugugcuugcugcugu

SEQ ID NO: 3250748 - RNA, 13 nt, SARS coronavirus
cugauaauggacc

SEQ ID NO: 3250749 - RNA, 13 nt, SARS coronavirus
uaccuuuugcuau

SEQ ID NO: 3250750 - RNA, 14 nt, SARS coronavirus
uaguacagcgcugu

SEQ ID NO: 3250751 - RNA, 15 nt, SARS coronavirus
uugugcuugcugcug

SEQ ID NO: 3250752 - RNA, 16 nt, SARS coronavirus
aauuuacugcugcuau

SEQ ID NO: 3250753 - RNA, 12 nt, SARS coronavirus
uuguugcugcuc

SEQ ID NO: 3250754 - RNA, 17 nt, SARS coronavirus
cuacaucacgaacgcuu

SEQ ID NO: 3250755 - RNA, 20 nt, SARS coronavirus
ucuaugagaaccaaaaacaa

SEQ ID NO: 3250756 - RNA, 23 nt, SARS coronavirus
cuuuguaagcacaagaaagugag

SEQ ID NO: 3250757 - RNA, 20 nt, SARS coronavirus
cuaauuuuggugcaauuuca

SEQ ID NO: 3250758 - RNA, 19 nt, SARS coronavirus
gcaucuaauaaaccucaug

SEQ ID NO: 3250759 - RNA, 19 nt, SARS coronavirus
gacaauauugcuuugcuag

SEQ ID NO: 3250760 - RNA, 17 nt, SARS coronavirus
acagguacguuaauagu

SEQ ID NO: 3250761 - RNA, 15 nt, SARS coronavirus
agagauuucaaccau

SEQ ID NO: 3250762 - RNA, 23 nt, SARS coronavirus
uacucuaauaacaccauugcuau

SEQ ID NO: 3250763 - RNA, 12 nt, SARS coronavirus
agagcucagccc

SEQ ID NO: 3250764 - RNA, 13 nt, SARS coronavirus
accccaagguuua

SEQ ID NO: 3250765 - RNA, 19 nt, SARS coronavirus
uucgauaaugcauuuaauu

SEQ ID NO: 3250766 - RNA, 14 nt, SARS coronavirus
cuacacugcugcuc

SEQ ID NO: 3250767 - RNA, 22 nt, SARS coronavirus
gagccuugaauacacccaaaga

SEQ ID NO: 3250768 - RNA, 13 nt, SARS coronavirus
gaaaucugcugcu

SEQ ID NO: 3250769 - RNA, 22 nt, SARS coronavirus
uaguauuuuuaauacuuugcuu

SEQ ID NO: 3250770 - RNA, 15 nt, SARS coronavirus
uacuuauagcacugc

SEQ ID NO: 3250771 - RNA, 12 nt, SARS coronavirus
ugcuugcugcug

SEQ ID NO: 3250772 - RNA, 15 nt, SARS coronavirus
acaugaaaauuauuc

SEQ ID NO: 3250773 - RNA, 19 nt, SARS coronavirus
auuauccacugaccuuauu

SEQ ID NO: 3250774 - RNA, 21 nt, SARS coronavirus
augauuaugguuuuuacacca

SEQ ID NO: 3250775 - RNA, 15 nt, SARS coronavirus
aauaaagauggguuu

SEQ ID NO: 3250776 - RNA, 22 nt, SARS coronavirus
cuuuucuccacaaauaauuacu

SEQ ID NO: 3250777 - RNA, 14 nt, SARS coronavirus
ugccuacacugcug

SEQ ID NO: 3250778 - RNA, 19 nt, SARS coronavirus
uacauuuaugcucaaguau

SEQ ID NO: 3250779 - RNA, 13 nt, SARS coronavirus
ugaacucuucuga

SEQ ID NO: 3250780 - RNA, 22 nt, SARS coronavirus
gagccuaaaaaggacaaaaaga

SEQ ID NO: 3250781 - RNA, 15 nt, SARS coronavirus
uauuuugguuuucac

SEQ ID NO: 3250782 - RNA, 15 nt, SARS coronavirus
uacuaucaacuguca

SEQ ID NO: 3250783 - RNA, 14 nt, SARS coronavirus
uuaaacaacuccug

SEQ ID NO: 3250784 - RNA, 17 nt, SARS coronavirus
cuucuggucuaaacgaa

SEQ ID NO: 3250785 - RNA, 19 nt, SARS coronavirus
auuuuggugguuuuaauuu

SEQ ID NO: 3250786 - RNA, 18 nt, SARS coronavirus
cacagcucucacucagca

SEQ ID NO: 3250787 - RNA, 17 nt, SARS coronavirus
ugugcucuaggaaaggu

SEQ ID NO: 3250788 - RNA, 22 nt, SARS coronavirus
aaaugaaagagcucagccccag

SEQ ID NO: 3250789 - RNA, 16 nt, SARS coronavirus
cuguugauuguucuca

SEQ ID NO: 3250790 - RNA, 15 nt, SARS coronavirus
uuauuauucuguuug

SEQ ID NO: 3250791 - RNA, 21 nt, SARS coronavirus
uggucauucaacccagaaaca

SEQ ID NO: 3250792 - RNA, 22 nt, SARS coronavirus
gaaagagccaccacauuuucau

SEQ ID NO: 3250793 - RNA, 20 nt, SARS coronavirus
gcaagaucaguuucaccaaa

SEQ ID NO: 3250794 - RNA, 13 nt, SARS coronavirus
uuauucugaggau

SEQ ID NO: 3250795 - RNA, 14 nt, SARS coronavirus
ccacaaaacaguac

SEQ ID NO: 3250796 - RNA, 19 nt, SARS coronavirus
gccgcagagacaaaagaag

SEQ ID NO: 3250797 - RNA, 16 nt, SARS coronavirus
gcccucgcgcuauugc

SEQ ID NO: 3250798 - RNA, 12 nt, SARS coronavirus
cugcuuggcuuu

SEQ ID NO: 3250799 - RNA, 21 nt, SARS coronavirus
auuugcaauuuacugcugcua

SEQ ID NO: 3250800 - RNA, 21 nt, SARS coronavirus
ccacagagaaaucaaauguug

SEQ ID NO: 3250801 - RNA, 21 nt, SARS coronavirus
gaaggucaccaaacugcugca

SEQ ID NO: 3250802 - RNA, 14 nt, SARS coronavirus
ccuauuggagcugg

SEQ ID NO: 3250803 - RNA, 22 nt, SARS coronavirus
uacaauugucguuacugaaggu

SEQ ID NO: 3250804 - RNA, 13 nt, SARS coronavirus
acguacugccaca

SEQ ID NO: 3250805 - RNA, 14 nt, SARS coronavirus
cagcauggcaagga

SEQ ID NO: 3250806 - RNA, 23 nt, SARS coronavirus
ugccaaaaggcuucuacgcagag

SEQ ID NO: 3250807 - RNA, 21 nt, SARS coronavirus
auucaacccagaaacaaacau

SEQ ID NO: 3250808 - RNA, 21 nt, SARS coronavirus
ucuaugagggggguuuacuau

SEQ ID NO: 3250809 - RNA, 19 nt, SARS coronavirus
gugacaacagauguuucau

SEQ ID NO: 3250810 - RNA, 23 nt, SARS coronavirus
gucaagccucuucucgcuccuca

SEQ ID NO: 3250811 - RNA, 21 nt, SARS coronavirus
cauggaugauuucuccagaca

SEQ ID NO: 3250812 - RNA, 17 nt, SARS coronavirus
ucuccgggggacaauug

SEQ ID NO: 3250813 - RNA, 19 nt, SARS coronavirus
accuuuaagugcuauggcg

SEQ ID NO: 3250814 - RNA, 16 nt, SARS coronavirus
cucaggcauaaacacu

SEQ ID NO: 3250815 - RNA, 20 nt, SARS coronavirus
aaaauuccaugaguggagcu

SEQ ID NO: 3250816 - RNA, 20 nt, SARS coronavirus
caagggugcaugcucuugug

SEQ ID NO: 3250817 - RNA, 21 nt, SARS coronavirus
aauuuuagagccauucuuaca

SEQ ID NO: 3250818 - RNA, 16 nt, SARS coronavirus
aucuuggcgacauuuc

SEQ ID NO: 3250819 - RNA, 21 nt, SARS coronavirus
caccauuaagagaaagacaga

SEQ ID NO: 3250820 - RNA, 17 nt, SARS coronavirus
cgaacuuauguacucau

SEQ ID NO: 3250821 - RNA, 13 nt, SARS coronavirus
caauggacuuaca

SEQ ID NO: 3250822 - RNA, 18 nt, SARS coronavirus
uauucggaguuagaugau

SEQ ID NO: 3250823 - RNA, 23 nt, SARS coronavirus
aacugcccucgcgcuauugcugc

SEQ ID NO: 3250824 - RNA, 17 nt, SARS coronavirus
guccagaugaccaaauu

SEQ ID NO: 3250825 - RNA, 12 nt, SARS coronavirus
cgguacuauuac

SEQ ID NO: 3250826 - RNA, 23 nt, SARS coronavirus
aggaacuggcccagaagcuucac

SEQ ID NO: 3250827 - RNA, 14 nt, SARS coronavirus
cugauuacaaacau

SEQ ID NO: 3250828 - RNA, 19 nt, SARS coronavirus
uguucuuggacaaucaaaa

SEQ ID NO: 3250829 - RNA, 19 nt, SARS coronavirus
ugcuauuccuuguuuuaau

SEQ ID NO: 3250830 - RNA, 15 nt, SARS coronavirus
uucuuauuauuucuu

SEQ ID NO: 3250831 - RNA, 21 nt, SARS coronavirus
aggccaacaacaacaaggcca

SEQ ID NO: 3250832 - RNA, 16 nt, SARS coronavirus
ucuuugcuguuucuaa

SEQ ID NO: 3250833 - RNA, 15 nt, SARS coronavirus
auuucaaccauuuca

SEQ ID NO: 3250834 - RNA, 20 nt, SARS coronavirus
uugccucaagggugcaugcu

SEQ ID NO: 3250835 - RNA, 13 nt, SARS coronavirus
uucuguuuggaac

SEQ ID NO: 3250836 - RNA, 17 nt, SARS coronavirus
aaauauuagacauuuca

SEQ ID NO: 3250837 - RNA, 16 nt, SARS coronavirus
cuagggcgcugugaca

SEQ ID NO: 3250838 - RNA, 16 nt, SARS coronavirus
cucaaagaagacuacc

SEQ ID NO: 3250839 - RNA, 14 nt, SARS coronavirus
uaccuucaugaagg

SEQ ID NO: 3250840 - RNA, 12 nt, SARS coronavirus
uguuauugcuga

SEQ ID NO: 3250841 - RNA, 12 nt, SARS coronavirus
gcugguggugcg

SEQ ID NO: 3250842 - RNA, 18 nt, SARS coronavirus
ugcaauuuacugcugcua

SEQ ID NO: 3250843 - RNA, 14 nt, SARS coronavirus
cacugauguuucua

SEQ ID NO: 3250844 - RNA, 17 nt, SARS coronavirus
acaagccucacucccuu

SEQ ID NO: 3250845 - RNA, 23 nt, SARS coronavirus
gaacuugucauuggugcugugau

SEQ ID NO: 3250846 - RNA, 14 nt, SARS coronavirus
uggugaaacugccc

SEQ ID NO: 3250847 - RNA, 18 nt, SARS coronavirus
gccacuuuuucucauugu

SEQ ID NO: 3250848 - RNA, 19 nt, SARS coronavirus
ucacuaagaaaucugcugc

SEQ ID NO: 3250849 - RNA, 22 nt, SARS coronavirus
ucaauagugagacaauuauuua

SEQ ID NO: 3250850 - RNA, 22 nt, SARS coronavirus
caacacuagggguaauacuuau

SEQ ID NO: 3250851 - RNA, 13 nt, SARS coronavirus
ugauuacaaacau

SEQ ID NO: 3250852 - RNA, 14 nt, SARS coronavirus
uacaaaacauuccc

SEQ ID NO: 3250853 - RNA, 13 nt, SARS coronavirus
ucuauaucaagau

SEQ ID NO: 3250854 - RNA, 16 nt, SARS coronavirus
uaaacaacuccuggaa

SEQ ID NO: 3250855 - RNA, 15 nt, SARS coronavirus
acucaacauacuuca

SEQ ID NO: 3250856 - RNA, 15 nt, SARS coronavirus
caacuuccucaagga

SEQ ID NO: 3250857 - RNA, 14 nt, SARS coronavirus
accaauuuaacaag

SEQ ID NO: 3250858 - RNA, 17 nt, SARS coronavirus
ugcuaaucuugcugcua

SEQ ID NO: 3250859 - RNA, 13 nt, SARS coronavirus
cacacacuuugcu

SEQ ID NO: 3250860 - RNA, 22 nt, SARS coronavirus
gcacugauucagguuuugcugc

SEQ ID NO: 3250861 - RNA, 15 nt, SARS coronavirus
agaucaguuucacca

SEQ ID NO: 3250862 - RNA, 11 nt, SARS coronavirus
uucuccugcuc

SEQ ID NO: 3250863 - RNA, 20 nt, SARS coronavirus
gaggcaucuaaaaagccucg

SEQ ID NO: 3250864 - RNA, 18 nt, SARS coronavirus
uugcuuguuuugugcuug

SEQ ID NO: 3250865 - RNA, 16 nt, SARS coronavirus
cucaggauuuauuucu

SEQ ID NO: 3250866 - RNA, 12 nt, SARS coronavirus
gaaaaugcuaca

SEQ ID NO: 3250867 - RNA, 21 nt, SARS coronavirus
gaccccaagguuuacccaaua

SEQ ID NO: 3250868 - RNA, 20 nt, SARS coronavirus
uuugagagagacauaucuaa

SEQ ID NO: 3250869 - RNA, 21 nt, SARS coronavirus
uacuacagacaauacauuugu

SEQ ID NO: 3250870 - RNA, 21 nt, SARS coronavirus
acaacauugccaaaaggcuuc

SEQ ID NO: 3250871 - RNA, 23 nt, SARS coronavirus
aauacuuugcuucaccauuaaga

SEQ ID NO: 3250872 - RNA, 14 nt, SARS coronavirus
gugcguacugcugc

SEQ ID NO: 3250873 - RNA, 21 nt, SARS coronavirus
gcccucgcgcuauugcugcua

SEQ ID NO: 3250874 - RNA, 20 nt, SARS coronavirus
cauacugcugaacaagcaca

SEQ ID NO: 3250875 - RNA, 14 nt, SARS coronavirus
aaacgaacaugaaa

SEQ ID NO: 3250876 - RNA, 16 nt, SARS coronavirus
gauuucuccagacaac

SEQ ID NO: 3250877 - RNA, 22 nt, SARS coronavirus
guaacacaacaacuaaucaggg

SEQ ID NO: 3250878 - RNA, 17 nt, SARS coronavirus
gaggacuugaaagagcc

SEQ ID NO: 3250879 - RNA, 20 nt, SARS coronavirus
uggaagucacaccuucggga

SEQ ID NO: 3250880 - RNA, 17 nt, SARS coronavirus
uagugagacaauuauuu

SEQ ID NO: 3250881 - RNA, 16 nt, SARS coronavirus
ugaaugaucuuugcuu

SEQ ID NO: 3250882 - RNA, 14 nt, SARS coronavirus
ugcuccaagugccu

SEQ ID NO: 3250883 - RNA, 16 nt, SARS coronavirus
cucuaggaaagguuuu

SEQ ID NO: 3250884 - RNA, 22 nt, SARS coronavirus
uccuauuggagcuggcauuugu

SEQ ID NO: 3250885 - RNA, 16 nt, SARS coronavirus
uacaguguugccaccu

SEQ ID NO: 3250886 - RNA, 15 nt, SARS coronavirus
gacuugcucuuuaau

SEQ ID NO: 3250887 - RNA, 15 nt, SARS coronavirus
ucacuaagaaaucug

SEQ ID NO: 3250888 - RNA, 19 nt, SARS coronavirus
caugaguggagcuucugcu

SEQ ID NO: 3250889 - RNA, 13 nt, SARS coronavirus
gaacaacauugcc

SEQ ID NO: 3250890 - RNA, 20 nt, SARS coronavirus
acagccuuuucaccugcuca

SEQ ID NO: 3250891 - RNA, 14 nt, SARS coronavirus
caacaacaaggcca

SEQ ID NO: 3250892 - RNA, 19 nt, SARS coronavirus
cauuugguggacccacaga

SEQ ID NO: 3250893 - RNA, 21 nt, SARS coronavirus
uugccucaagggugcaugcuc

SEQ ID NO: 3250894 - RNA, 20 nt, SARS coronavirus
aggugcugauaguucaauug

SEQ ID NO: 3250895 - RNA, 16 nt, SARS coronavirus
aggacgcaauggggca

SEQ ID NO: 3250896 - RNA, 18 nt, SARS coronavirus
uucaagaaauucaacucc

SEQ ID NO: 3250897 - RNA, 14 nt, SARS coronavirus
cugccaaaagagau

SEQ ID NO: 3250898 - RNA, 14 nt, SARS coronavirus
agucuacacaaauu

SEQ ID NO: 3250899 - RNA, 14 nt, SARS coronavirus
ucuccagacaacuu

SEQ ID NO: 3250900 - RNA, 13 nt, SARS coronavirus
acaacaaggccaa

SEQ ID NO: 3250901 - RNA, 12 nt, SARS coronavirus
cguacugcugca

SEQ ID NO: 3250902 - RNA, 18 nt, SARS coronavirus
agugcgacauuccuauug

SEQ ID NO: 3250903 - RNA, 14 nt, SARS coronavirus
caaggccaaacugu

SEQ ID NO: 3250904 - RNA, 15 nt, SARS coronavirus
uaccaugaacaacaa

SEQ ID NO: 3250905 - RNA, 18 nt, SARS coronavirus
ugcacaccuaauguuacu

SEQ ID NO: 3250906 - RNA, 14 nt, SARS coronavirus
auacaaaacauucc

SEQ ID NO: 3250907 - RNA, 23 nt, SARS coronavirus
auucuguuuggaacuuuaacauu

SEQ ID NO: 3250908 - RNA, 15 nt, SARS coronavirus
ucgcuugauguuuca

SEQ ID NO: 3250909 - RNA, 12 nt, SARS coronavirus
uaauuacuacag

SEQ ID NO: 3250910 - RNA, 18 nt, SARS coronavirus
gcacaccuaauguuacua

SEQ ID NO: 3250911 - RNA, 17 nt, SARS coronavirus
ucgccacuuuuucucau

SEQ ID NO: 3250912 - RNA, 14 nt, SARS coronavirus
gguucacagcucuc

SEQ ID NO: 3250913 - RNA, 23 nt, SARS coronavirus
guuugcucguacccgcucaaugu

SEQ ID NO: 3250914 - RNA, 19 nt, SARS coronavirus
uucugaaggaguuccugau

SEQ ID NO: 3250915 - RNA, 19 nt, SARS coronavirus
ucauacaucaccagauguu

SEQ ID NO: 3250916 - RNA, 21 nt, SARS coronavirus
gacaaagauccacaauucaaa

SEQ ID NO: 3250917 - RNA, 22 nt, SARS coronavirus
auucaacccagaaacaaacauu

SEQ ID NO: 3250918 - RNA, 16 nt, SARS coronavirus
gugauauuaaugcuag

SEQ ID NO: 3250919 - RNA, 21 nt, SARS coronavirus
uguuauuggccauuaaaugau

SEQ ID NO: 3250920 - RNA, 21 nt, SARS coronavirus
augcuguugauuguucucaaa

SEQ ID NO: 3250921 - RNA, 15 nt, SARS coronavirus
ucaaagagauuucaa

SEQ ID NO: 3250922 - RNA, 20 nt, SARS coronavirus
ucuaauaacaccauugcuau

SEQ ID NO: 3250923 - RNA, 18 nt, SARS coronavirus
ccaagaccuaaucagaca

SEQ ID NO: 3250924 - RNA, 17 nt, SARS coronavirus
acugacaauaaccagaa

SEQ ID NO: 3250925 - RNA, 22 nt, SARS coronavirus
cuucugcuaaucuugcugcuac

SEQ ID NO: 3250926 - RNA, 17 nt, SARS coronavirus
augaaagagcucagccc

SEQ ID NO: 3250927 - RNA, 20 nt, SARS coronavirus
ugacggcaaaaugaaagagc

SEQ ID NO: 3250928 - RNA, 24 nt, SARS coronavirus
auuugcacuaacuugcacuagcac

SEQ ID NO: 3250929 - RNA, 15 nt, SARS coronavirus
uacuaaaaugucuga

SEQ ID NO: 3250930 - RNA, 15 nt, SARS coronavirus
cuugcugcugucuac

SEQ ID NO: 3250931 - RNA, 14 nt, SARS coronavirus
cucgcuccucauca

SEQ ID NO: 3250932 - RNA, 12 nt, SARS coronavirus
ccuaauguguaa

SEQ ID NO: 3250933 - RNA, 20 nt, SARS coronavirus
uuagacauuucaccuugcgc

SEQ ID NO: 3250934 - RNA, 15 nt, SARS coronavirus
ugagauguuggcuuu

SEQ ID NO: 3250935 - RNA, 22 nt, SARS coronavirus
uaacaacacaguuuaugauccu

SEQ ID NO: 3250936 - RNA, 15 nt, SARS coronavirus
gcugcaaguuugaug

SEQ ID NO: 3250937 - RNA, 22 nt, SARS coronavirus
aacuaacuauuauuauuauucu

SEQ ID NO: 3250938 - RNA, 12 nt, SARS coronavirus
uucaaacaugca

SEQ ID NO: 3250939 - RNA, 19 nt, SARS coronavirus
caauggggcaaggccaaaa

SEQ ID NO: 3250940 - RNA, 20 nt, SARS coronavirus
augguucaaacaugcacacc

SEQ ID NO: 3250941 - RNA, 15 nt, SARS coronavirus
uaugguucaaacaug

SEQ ID NO: 3250942 - RNA, 22 nt, SARS coronavirus
uguccuuuuggagagguuuuua

SEQ ID NO: 3250943 - RNA, 18 nt, SARS coronavirus
guugcuguucuauaucaa

SEQ ID NO: 3250944 - RNA, 19 nt, SARS coronavirus
ggagccuugaauacaccca

SEQ ID NO: 3250945 - RNA, 15 nt, SARS coronavirus
cacuagcacacacuu

SEQ ID NO: 3250946 - RNA, 17 nt, SARS coronavirus
auugacaaugcuucucc

SEQ ID NO: 3250947 - RNA, 16 nt, SARS coronavirus
cuuguaagguacaaca

SEQ ID NO: 3250948 - RNA, 14 nt, SARS coronavirus
auacacccaaagac

SEQ ID NO: 3250949 - RNA, 13 nt, SARS coronavirus
caauaaauuugca

SEQ ID NO: 3250950 - RNA, 17 nt, SARS coronavirus
uaauuguguugcugauu

SEQ ID NO: 3250951 - RNA, 21 nt, SARS coronavirus
uuauuuaagccucuaacuaag

SEQ ID NO: 3250952 - RNA, 14 nt, SARS coronavirus
aaaagaagcagccc

SEQ ID NO: 3250953 - RNA, 22 nt, SARS coronavirus
cgauaaugcauuuaauugcacu

SEQ ID NO: 3250954 - RNA, 18 nt, SARS coronavirus
uagauucccucgaggcca

SEQ ID NO: 3250955 - RNA, 17 nt, SARS coronavirus
cuucaaaauuccaugag

SEQ ID NO: 3250956 - RNA, 21 nt, SARS coronavirus
agggcuuccaguucauuugca

SEQ ID NO: 3250957 - RNA, 14 nt, SARS coronavirus
caagauccagcugg

SEQ ID NO: 3250958 - RNA, 17 nt, SARS coronavirus
gcggcagucaagccucu

SEQ ID NO: 3250959 - RNA, 21 nt, SARS coronavirus
cacucucagguauugcugcug

SEQ ID NO: 3250960 - RNA, 12 nt, SARS coronavirus
ccuuucugcuau

SEQ ID NO: 3250961 - RNA, 13 nt, SARS coronavirus
ugccuauucuaau

SEQ ID NO: 3250962 - RNA, 21 nt, SARS coronavirus
uccuaauuacacucaacauac

SEQ ID NO: 3250963 - RNA, 12 nt, SARS coronavirus
gaguacauaucu

SEQ ID NO: 3250964 - RNA, 14 nt, SARS coronavirus
uaagguacaacacu

SEQ ID NO: 3250965 - RNA, 24 nt, SARS coronavirus
guuacaaucuugcuuuguugcaug

SEQ ID NO: 3250966 - RNA, 17 nt, SARS coronavirus
gcacaccuaauguuacu

SEQ ID NO: 3250967 - RNA, 22 nt, SARS coronavirus
auucaacugacaauaaccagaa

SEQ ID NO: 3250968 - RNA, 21 nt, SARS coronavirus
ggaacauacgagggcaauuca

SEQ ID NO: 3250969 - RNA, 22 nt, SARS coronavirus
uuuaagugcuauggcguuucug

SEQ ID NO: 3250970 - RNA, 17 nt, SARS coronavirus
ccaagaccuaaucagac

SEQ ID NO: 3250971 - RNA, 22 nt, SARS coronavirus
uguuuuaauaaugcuuauuaua

SEQ ID NO: 3250972 - RNA, 20 nt, SARS coronavirus
ucaagcauuaaacacacuug

SEQ ID NO: 3250973 - RNA, 20 nt, SARS coronavirus
uaaccagaaugcucaagcau

SEQ ID NO: 3250974 - RNA, 14 nt, SARS coronavirus
caugaugaccacac

SEQ ID NO: 3250975 - RNA, 21 nt, SARS coronavirus
uuucaggauugcuauuuggaa

SEQ ID NO: 3250976 - RNA, 20 nt, SARS coronavirus
agacagauugaaccagcuug

SEQ ID NO: 3250977 - RNA, 16 nt, SARS coronavirus
cagagccuaaaaagga

SEQ ID NO: 3250978 - RNA, 12 nt, SARS coronavirus
acuuuucaauua

SEQ ID NO: 3250979 - RNA, 14 nt, SARS coronavirus
aaauuuuagagcca

SEQ ID NO: 3250980 - RNA, 17 nt, SARS coronavirus
cuacacugcugcucuag

SEQ ID NO: 3250981 - RNA, 14 nt, SARS coronavirus
acugaugaagcuca

SEQ ID NO: 3250982 - RNA, 17 nt, SARS coronavirus
acuuacgagaguuugug

SEQ ID NO: 3250983 - RNA, 12 nt, SARS coronavirus
aaaucaaauguu

SEQ ID NO: 3250984 - RNA, 16 nt, SARS coronavirus
aggaacuuagauuccc

SEQ ID NO: 3250985 - RNA, 13 nt, SARS coronavirus
auacaguuucuuu

SEQ ID NO: 3250986 - RNA, 18 nt, SARS coronavirus
ugcuuugcuaguacagua

SEQ ID NO: 3250987 - RNA, 19 nt, SARS coronavirus
gacgaguucguggugguga

SEQ ID NO: 3250988 - RNA, 21 nt, SARS coronavirus
caaauucaagaaucacuuaca

SEQ ID NO: 3250989 - RNA, 19 nt, SARS coronavirus
caggauugcuauuuggaau

SEQ ID NO: 3250990 - RNA, 13 nt, SARS coronavirus
ugcuaauuugcuu

SEQ ID NO: 3250991 - RNA, 14 nt, SARS coronavirus
aaucagacaaggaa

SEQ ID NO: 3250992 - RNA, 22 nt, SARS coronavirus
ugcuuguuuugugcuugcugcu

SEQ ID NO: 3250993 - RNA, 14 nt, SARS coronavirus
auuggaugacaaag

SEQ ID NO: 3250994 - RNA, 23 nt, SARS coronavirus
acucuuagaucaauuacugcaca

SEQ ID NO: 3250995 - RNA, 21 nt, SARS coronavirus
aggaacugauuacaaacauug

SEQ ID NO: 3250996 - RNA, 12 nt, SARS coronavirus
uuugaacuuuua

SEQ ID NO: 3250997 - RNA, 20 nt, SARS coronavirus
uauaaauuaaauacagacca

SEQ ID NO: 3250998 - RNA, 15 nt, SARS coronavirus
uugugcuaguuacca

SEQ ID NO: 3250999 - RNA, 13 nt, SARS coronavirus
ugcaguugccuca

SEQ ID NO: 3251000 - RNA, 19 nt, SARS coronavirus
ccgugcuacaacuuccuca

SEQ ID NO: 3251001 - RNA, 17 nt, SARS coronavirus
aucuugcugcuacuaaa

SEQ ID NO: 3251002 - RNA, 20 nt, SARS coronavirus
ccgugcuacaacuuccucaa

SEQ ID NO: 3251003 - RNA, 16 nt, SARS coronavirus
uaagaagaauuauucg

SEQ ID NO: 3251004 - RNA, 21 nt, SARS coronavirus
ccauccuuacugcgcuucgau

SEQ ID NO: 3251005 - RNA, 23 nt, SARS coronavirus
aggagauguugugagauucccua

SEQ ID NO: 3251006 - RNA, 17 nt, SARS coronavirus
uacuacaauuugccuau

SEQ ID NO: 3251007 - RNA, 14 nt, SARS coronavirus
uuacaaauuuuaga

SEQ ID NO: 3251008 - RNA, 20 nt, SARS coronavirus
uuguacauaauaaagcuugu

SEQ ID NO: 3251009 - RNA, 14 nt, SARS coronavirus
ugcacuagcacaca

SEQ ID NO: 3251010 - RNA, 19 nt, SARS coronavirus
ucauuggugcugugaucau

SEQ ID NO: 3251011 - RNA, 21 nt, SARS coronavirus
aaaccuugcaccccaccugcu

SEQ ID NO: 3251012 - RNA, 15 nt, SARS coronavirus
cucuugcugacaaua

SEQ ID NO: 3251013 - RNA, 13 nt, SARS coronavirus
uuuucaaccuuua

SEQ ID NO: 3251014 - RNA, 12 nt, SARS coronavirus
caaagaccacau

SEQ ID NO: 3251015 - RNA, 12 nt, SARS coronavirus
aggaacuucuuu

SEQ ID NO: 3251016 - RNA, 18 nt, SARS coronavirus
caagauguuaacugcacu

SEQ ID NO: 3251017 - RNA, 16 nt, SARS coronavirus
cuaagaggucuuuuau

SEQ ID NO: 3251018 - RNA, 22 nt, SARS coronavirus
auuauaaauugccagaugauuu

SEQ ID NO: 3251019 - RNA, 22 nt, SARS coronavirus
ugaccagaccgcucauggaaag

SEQ ID NO: 3251020 - RNA, 14 nt, SARS coronavirus
uuguugacuuccag

SEQ ID NO: 3251021 - RNA, 14 nt, SARS coronavirus
cauugauuguauuu

SEQ ID NO: 3251022 - RNA, 20 nt, SARS coronavirus
gguaauacuuauagcacugc

SEQ ID NO: 3251023 - RNA, 13 nt, SARS coronavirus
auauauuaaaugg

SEQ ID NO: 3251024 - RNA, 20 nt, SARS coronavirus
caccauuucacccucuugcu

SEQ ID NO: 3251025 - RNA, 19 nt, SARS coronavirus
gccagggcguuccaaucaa

SEQ ID NO: 3251026 - RNA, 18 nt, SARS coronavirus
uggggcaaggccaaaaca

SEQ ID NO: 3251027 - RNA, 20 nt, SARS coronavirus
augagauguuggcuuuguug

SEQ ID NO: 3251028 - RNA, 17 nt, SARS coronavirus
ccuggcagcaguagggg

SEQ ID NO: 3251029 - RNA, 15 nt, SARS coronavirus
caauuuacugcugcu

SEQ ID NO: 3251030 - RNA, 15 nt, SARS coronavirus
uugccaccucugcuc

SEQ ID NO: 3251031 - RNA, 15 nt, SARS coronavirus
aauucaacuccuggc

SEQ ID NO: 3251032 - RNA, 15 nt, SARS coronavirus
aagagauuucaacca

SEQ ID NO: 3251033 - RNA, 20 nt, SARS coronavirus
aaauuauucucuuccugaca

SEQ ID NO: 3251034 - RNA, 17 nt, SARS coronavirus
cagaugguacuucuauu

SEQ ID NO: 3251035 - RNA, 20 nt, SARS coronavirus
acucuuagaucaauuacugc

SEQ ID NO: 3251036 - RNA, 16 nt, SARS coronavirus
cuaaaaaggacaaaaa

SEQ ID NO: 3251037 - RNA, 23 nt, SARS coronavirus
ugcaugggagagaaaaaaaauuu

SEQ ID NO: 3251038 - RNA, 19 nt, SARS coronavirus
uggcuacuaccgaagagcu

SEQ ID NO: 3251039 - RNA, 17 nt, SARS coronavirus
aacgaacuuauggauuu

SEQ ID NO: 3251040 - RNA, 21 nt, SARS coronavirus
caagaccuaaucagacaagga

SEQ ID NO: 3251041 - RNA, 13 nt, SARS coronavirus
gguauugcugcug

SEQ ID NO: 3251042 - RNA, 23 nt, SARS coronavirus
augaaggucaccaaacugcugca

SEQ ID NO: 3251043 - RNA, 19 nt, SARS coronavirus
ccucgcgcuauugcugcua

SEQ ID NO: 3251044 - RNA, 13 nt, SARS coronavirus
uaacuaaacagca

SEQ ID NO: 3251045 - RNA, 13 nt, SARS coronavirus
cucugugcucuac

SEQ ID NO: 3251046 - RNA, 20 nt, SARS coronavirus
agccauucuuacagccuuuu

SEQ ID NO: 3251047 - RNA, 19 nt, SARS coronavirus
cuauuccuuguuuuaauaa

SEQ ID NO: 3251048 - RNA, 22 nt, SARS coronavirus
acguacuuguuguuuuaaauaa

SEQ ID NO: 3251049 - RNA, 19 nt, SARS coronavirus
ugacuuccagguuacaaua

SEQ ID NO: 3251050 - RNA, 18 nt, SARS coronavirus
augugcuaauuugcuucu

SEQ ID NO: 3251051 - RNA, 18 nt, SARS coronavirus
ucccaccaacagagccua

SEQ ID NO: 3251052 - RNA, 18 nt, SARS coronavirus
uugacuuguauuucucua

SEQ ID NO: 3251053 - RNA, 20 nt, SARS coronavirus
uggcuacuaccgaagagcua

SEQ ID NO: 3251054 - RNA, 16 nt, SARS coronavirus
cguacccgcucaaugu

SEQ ID NO: 3251055 - RNA, 22 nt, SARS coronavirus
guacgacuguacuacuaaaaga

SEQ ID NO: 3251056 - RNA, 12 nt, SARS coronavirus
auuauuaacaau

SEQ ID NO: 3251057 - RNA, 20 nt, SARS coronavirus
ucacuuuaauugacuucuau

SEQ ID NO: 3251058 - RNA, 19 nt, SARS coronavirus
uaccaaccuuacagaguug

SEQ ID NO: 3251059 - RNA, 13 nt, SARS coronavirus
caaucaacaccaa

SEQ ID NO: 3251060 - RNA, 20 nt, SARS coronavirus
ucauucguuucggaagaaac

SEQ ID NO: 3251061 - RNA, 16 nt, SARS coronavirus
ccuauuggagcuggca

SEQ ID NO: 3251062 - RNA, 19 nt, SARS coronavirus
cugaaguugcuguucuaua

SEQ ID NO: 3251063 - RNA, 19 nt, SARS coronavirus
uguuggaagugcaaaucca

SEQ ID NO: 3251064 - RNA, 15 nt, SARS coronavirus
uguuucugauuucac

SEQ ID NO: 3251065 - RNA, 18 nt, SARS coronavirus
gccuauuuuguuggcuau

SEQ ID NO: 3251066 - RNA, 18 nt, SARS coronavirus
acuucuauuaccuaggaa

SEQ ID NO: 3251067 - RNA, 17 nt, SARS coronavirus
aggcggcagucaagccu

SEQ ID NO: 3251068 - RNA, 13 nt, SARS coronavirus
ugaagcucagccu

SEQ ID NO: 3251069 - RNA, 15 nt, SARS coronavirus
gacgugguccagaac

SEQ ID NO: 3251070 - RNA, 15 nt, SARS coronavirus
gcuucuccugcaagu

SEQ ID NO: 3251071 - RNA, 17 nt, SARS coronavirus
augcaguugcauaugca

SEQ ID NO: 3251072 - RNA, 19 nt, SARS coronavirus
gaguugcuaauccagcaau

SEQ ID NO: 3251073 - RNA, 21 nt, SARS coronavirus
ugacaacccuuucuuugcugu

SEQ ID NO: 3251074 - RNA, 12 nt, SARS coronavirus
aaaaucuauugu

SEQ ID NO: 3251075 - RNA, 21 nt, SARS coronavirus
ucaaguaugaugaaaauggua

SEQ ID NO: 3251076 - RNA, 18 nt, SARS coronavirus
gacuuucaggauugcuau

SEQ ID NO: 3251077 - RNA, 17 nt, SARS coronavirus
cuugcuagucacacuag

SEQ ID NO: 3251078 - RNA, 23 nt, SARS coronavirus
cacugaugauaugauugcugccu

SEQ ID NO: 3251079 - RNA, 23 nt, SARS coronavirus
uuuaccagaccucuaauuucagg

SEQ ID NO: 3251080 - RNA, 20 nt, SARS coronavirus
aaaagacugaugaagcucag

SEQ ID NO: 3251081 - RNA, 13 nt, SARS coronavirus
cguuucugccacu

SEQ ID NO: 3251082 - RNA, 12 nt, SARS coronavirus
agagacaaaaga

SEQ ID NO: 3251083 - RNA, 21 nt, SARS coronavirus
uccaugaguggagcuucugcu

SEQ ID NO: 3251084 - RNA, 18 nt, SARS coronavirus
uugcuggacuaauugcca

SEQ ID NO: 3251085 - RNA, 18 nt, SARS coronavirus
agacauaucuaaugugcc

SEQ ID NO: 3251086 - RNA, 21 nt, SARS coronavirus
cgcauuggcauggaagucaca

SEQ ID NO: 3251087 - RNA, 13 nt, SARS coronavirus
acuaaauucccuu

SEQ ID NO: 3251088 - RNA, 18 nt, SARS coronavirus
guuaccaucuauucacau

SEQ ID NO: 3251089 - RNA, 20 nt, SARS coronavirus
auugugugcguacugcugca

SEQ ID NO: 3251090 - RNA, 16 nt, SARS coronavirus
ccugcucgaauggcua

SEQ ID NO: 3251091 - RNA, 18 nt, SARS coronavirus
uggugguuauucugagga

SEQ ID NO: 3251092 - RNA, 21 nt, SARS coronavirus
caagaaauucaacuccuggca

SEQ ID NO: 3251093 - RNA, 15 nt, SARS coronavirus
ucucauuguugcugc

SEQ ID NO: 3251094 - RNA, 20 nt, SARS coronavirus
ugucaagauccagcuggugg

SEQ ID NO: 3251095 - RNA, 13 nt, SARS coronavirus
cgcuauugcugcu

SEQ ID NO: 3251096 - RNA, 21 nt, SARS coronavirus
uuuaaggaugguauuuauuuu

SEQ ID NO: 3251097 - RNA, 21 nt, SARS coronavirus
acuaaucagggcugcugaaau

SEQ ID NO: 3251098 - RNA, 17 nt, SARS coronavirus
uaccuuuuaaggauggu

SEQ ID NO: 3251099 - RNA, 22 nt, SARS coronavirus
cgggggacaauugugaccagac

SEQ ID NO: 3251100 - RNA, 14 nt, SARS coronavirus
ugguaccuucauga

SEQ ID NO: 3251101 - RNA, 19 nt, SARS coronavirus
cucguacccgcucaaugug

SEQ ID NO: 3251102 - RNA, 20 nt, SARS coronavirus
auuacuacagaaguaaugcc

SEQ ID NO: 3251103 - RNA, 16 nt, SARS coronavirus
cucaugugcuugaaga

SEQ ID NO: 3251104 - RNA, 14 nt, SARS coronavirus
augaaacuucucau

SEQ ID NO: 3251105 - RNA, 14 nt, SARS coronavirus
ugcuuccuucaggc

SEQ ID NO: 3251106 - RNA, 15 nt, SARS coronavirus
cuugacucauucaaa

SEQ ID NO: 3251107 - RNA, 19 nt, SARS coronavirus
uggcuagcggaggugguga

SEQ ID NO: 3251108 - RNA, 15 nt, SARS coronavirus
ggugcaugcucuugu

SEQ ID NO: 3251109 - RNA, 22 nt, SARS coronavirus
aaggaacugauuacaaacauug

SEQ ID NO: 3251110 - RNA, 15 nt, SARS coronavirus
accagcuugagagca

SEQ ID NO: 3251111 - RNA, 20 nt, SARS coronavirus
uuacaccuggaacaaaugcu

SEQ ID NO: 3251112 - RNA, 16 nt, SARS coronavirus
aaagccucgccaaaaa

SEQ ID NO: 3251113 - RNA, 24 nt, SARS coronavirus
cuugcuuucgugguauucuugcua

SEQ ID NO: 3251114 - RNA, 12 nt, SARS coronavirus
cguugcauuucu

SEQ ID NO: 3251115 - RNA, 16 nt, SARS coronavirus
cugcaaguuugaugag

SEQ ID NO: 3251116 - RNA, 12 nt, SARS coronavirus
auacuucaucua

SEQ ID NO: 3251117 - RNA, 22 nt, SARS coronavirus
cuguuuuucagagcgcuaccaa

SEQ ID NO: 3251118 - RNA, 17 nt, SARS coronavirus
uucucauuguuuugacu

SEQ ID NO: 3251119 - RNA, 22 nt, SARS coronavirus
gcuuguuuugugcuugcugcug

SEQ ID NO: 3251120 - RNA, 18 nt, SARS coronavirus
ucaagucaaacaaaugua

SEQ ID NO: 3251121 - RNA, 19 nt, SARS coronavirus
cacucagguguuaaagacu

SEQ ID NO: 3251122 - RNA, 17 nt, SARS coronavirus
ggucaccaaacugcugc

SEQ ID NO: 3251123 - RNA, 16 nt, SARS coronavirus
accgcuacaagccuca

SEQ ID NO: 3251124 - RNA, 17 nt, SARS coronavirus
gcacacacuuugcuuuu

SEQ ID NO: 3251125 - RNA, 14 nt, SARS coronavirus
caauugcuuacucu

SEQ ID NO: 3251126 - RNA, 13 nt, SARS coronavirus
ugugacucuucuu

SEQ ID NO: 3251127 - RNA, 22 nt, SARS coronavirus
auuuaagccucuaacuaagaag

SEQ ID NO: 3251128 - RNA, 21 nt, SARS coronavirus
cuucaggcuguuugcucguac

SEQ ID NO: 3251129 - RNA, 19 nt, SARS coronavirus
gcugccuacacugcugcuc

SEQ ID NO: 3251130 - RNA, 15 nt, SARS coronavirus
aaacaaacauucuuc

SEQ ID NO: 3251131 - RNA, 22 nt, SARS coronavirus
ucacucauugaccuucaagaau

SEQ ID NO: 3251132 - RNA, 21 nt, SARS coronavirus
acaaguagguuuaguuaacuu

SEQ ID NO: 3251133 - RNA, 17 nt, SARS coronavirus
acugccacaaaacagua

SEQ ID NO: 3251134 - RNA, 16 nt, SARS coronavirus
uauugaggacuugcuc

SEQ ID NO: 3251135 - RNA, 20 nt, SARS coronavirus
ucaagaaucacuuacaacaa

SEQ ID NO: 3251136 - RNA, 19 nt, SARS coronavirus
gcugaacucaaaugcucug

SEQ ID NO: 3251137 - RNA, 20 nt, SARS coronavirus
uacaucaccagauguugauc

SEQ ID NO: 3251138 - RNA, 12 nt, SARS coronavirus
gaaaucagggcu

SEQ ID NO: 3251139 - RNA, 15 nt, SARS coronavirus
uuguugcugcucuag

SEQ ID NO: 3251140 - RNA, 14 nt, SARS coronavirus
uaaacaacuccugg

SEQ ID NO: 3251141 - RNA, 21 nt, SARS coronavirus
acguacugccacaaaacagua

SEQ ID NO: 3251142 - RNA, 20 nt, SARS coronavirus
uuacagaguuguaguacuuu

SEQ ID NO: 3251143 - RNA, 21 nt, SARS coronavirus
acuaugguucaaacaugcaca

SEQ ID NO: 3251144 - RNA, 18 nt, SARS coronavirus
cuugcuuguuuugugcuu

SEQ ID NO: 3251145 - RNA, 16 nt, SARS coronavirus
aguacuguucaugcua

SEQ ID NO: 3251146 - RNA, 17 nt, SARS coronavirus
uuucugauuucacugau

SEQ ID NO: 3251147 - RNA, 15 nt, SARS coronavirus
gucuaaacgaacaug

SEQ ID NO: 3251148 - RNA, 22 nt, SARS coronavirus
cacacgugaaguguucgcucaa

SEQ ID NO: 3251149 - RNA, 22 nt, SARS coronavirus
ugguaccuucaugaaggucacc

SEQ ID NO: 3251150 - RNA, 21 nt, SARS coronavirus
aacgaacaugaaaauuauucu

SEQ ID NO: 3251151 - RNA, 12 nt, SARS coronavirus
auaacaaugcug

SEQ ID NO: 3251152 - RNA, 23 nt, SARS coronavirus
cuugauauauuuucuacaaugca

SEQ ID NO: 3251153 - RNA, 14 nt, SARS coronavirus
acaauucuacuaau

SEQ ID NO: 3251154 - RNA, 11 nt, SARS coronavirus
gaaacaaacau

SEQ ID NO: 3251155 - RNA, 21 nt, SARS coronavirus
uagggaggacuugaaagagcc

SEQ ID NO: 3251156 - RNA, 17 nt, SARS coronavirus
gacaaguacuucaaaaa

SEQ ID NO: 3251157 - RNA, 18 nt, SARS coronavirus
uauggcguuucugccacu

SEQ ID NO: 3251158 - RNA, 18 nt, SARS coronavirus
auugugugcguacugcug

SEQ ID NO: 3251159 - RNA, 17 nt, SARS coronavirus
acgcauacaaaacauuc

SEQ ID NO: 3251160 - RNA, 17 nt, SARS coronavirus
aucuugacguuauaaua

SEQ ID NO: 3251161 - RNA, 21 nt, SARS coronavirus
ugaaggucaccaaacugcugc

SEQ ID NO: 3251162 - RNA, 12 nt, SARS coronavirus
cuucucaaugug

SEQ ID NO: 3251163 - RNA, 15 nt, SARS coronavirus
gccccccgcauuaca

SEQ ID NO: 3251164 - RNA, 21 nt, SARS coronavirus
ugccaccgugcuacaacuucc

SEQ ID NO: 3251165 - RNA, 21 nt, SARS coronavirus
ccuugcaccccaccugcucuu

SEQ ID NO: 3251166 - RNA, 17 nt, SARS coronavirus
cuagggcgcugugacau

SEQ ID NO: 3251167 - RNA, 17 nt, SARS coronavirus
ccgcagagacaaaagaa

SEQ ID NO: 3251168 - RNA, 23 nt, SARS coronavirus
cuucugguuuuaacacuuugaaa

SEQ ID NO: 3251169 - RNA, 18 nt, SARS coronavirus
ucuuccauuuuauucuaa

SEQ ID NO: 3251170 - RNA, 17 nt, SARS coronavirus
ugugucaauuuuaauuu

SEQ ID NO: 3251171 - RNA, 14 nt, SARS coronavirus
uauugauuaucauu

SEQ ID NO: 3251172 - RNA, 18 nt, SARS coronavirus
cugacuuaucauggagcc

SEQ ID NO: 3251173 - RNA, 21 nt, SARS coronavirus
ugcacuaacuugcacuagcac

SEQ ID NO: 3251174 - RNA, 15 nt, SARS coronavirus
caggaucuagaagaa

SEQ ID NO: 3251175 - RNA, 13 nt, SARS coronavirus
aagacuaccaaau

SEQ ID NO: 3251176 - RNA, 20 nt, SARS coronavirus
aagucagguaauuuuaaaca

SEQ ID NO: 3251177 - RNA, 17 nt, SARS coronavirus
agaacccauuacuuuau

SEQ ID NO: 3251178 - RNA, 12 nt, SARS coronavirus
augcuucaucug

SEQ ID NO: 3251179 - RNA, 23 nt, SARS coronavirus
acuacuuuguuugcuggcacaca

SEQ ID NO: 3251180 - RNA, 14 nt, SARS coronavirus
ucuuguggccagua

SEQ ID NO: 3251181 - RNA, 20 nt, SARS coronavirus
cuugcuagucacacuagcca

SEQ ID NO: 3251182 - RNA, 11 nt, SARS coronavirus
ggagaggaacu

SEQ ID NO: 3251183 - RNA, 20 nt, SARS coronavirus
gaaagguuuuaccuuuucau

SEQ ID NO: 3251184 - RNA, 20 nt, SARS coronavirus
acuaagaaaucugcugcuga

SEQ ID NO: 3251185 - RNA, 14 nt, SARS coronavirus
gcagauucuuuugu

SEQ ID NO: 3251186 - RNA, 16 nt, SARS coronavirus
auaauuacuacagaca

SEQ ID NO: 3251187 - RNA, 14 nt, SARS coronavirus
accaaacugcugca

SEQ ID NO: 3251188 - RNA, 20 nt, SARS coronavirus
aggacaaaaagaaaaagacu

SEQ ID NO: 3251189 - RNA, 15 nt, SARS coronavirus
caaacccaaggaaau

SEQ ID NO: 3251190 - RNA, 21 nt, SARS coronavirus
cuagccauccuuacugcgcuu

SEQ ID NO: 3251191 - RNA, 18 nt, SARS coronavirus
acagagccuaaaaaggac

SEQ ID NO: 3251192 - RNA, 13 nt, SARS coronavirus
cucagguauugcu

SEQ ID NO: 3251193 - RNA, 16 nt, SARS coronavirus
acauggcuauuucacc

SEQ ID NO: 3251194 - RNA, 12 nt, SARS coronavirus
uucaagaaauuc

SEQ ID NO: 3251195 - RNA, 18 nt, SARS coronavirus
cggagguacaaauugaca

SEQ ID NO: 3251196 - RNA, 20 nt, SARS coronavirus
cauugcuauaccuacuaacu

SEQ ID NO: 3251197 - RNA, 15 nt, SARS coronavirus
augaucuuugcuucu

SEQ ID NO: 3251198 - RNA, 23 nt, SARS coronavirus
agcugcaagacguuguuaaccag

SEQ ID NO: 3251199 - RNA, 18 nt, SARS coronavirus
guuuuuaaugcuacuaaa

SEQ ID NO: 3251200 - RNA, 18 nt, SARS coronavirus
aggccaacaacaacaagg

SEQ ID NO: 3251201 - RNA, 13 nt, SARS coronavirus
uccagaacaaacc

SEQ ID NO: 3251202 - RNA, 18 nt, SARS coronavirus
cagaggaacuucuuuucu

SEQ ID NO: 3251203 - RNA, 14 nt, SARS coronavirus
agcgccagcaauuu

SEQ ID NO: 3251204 - RNA, 20 nt, SARS coronavirus
gucacgcauuggcauggaag

SEQ ID NO: 3251205 - RNA, 12 nt, SARS coronavirus
aucauuaacaac

SEQ ID NO: 3251206 - RNA, 18 nt, SARS coronavirus
ggcaaaaugaaagagcuc

SEQ ID NO: 3251207 - RNA, 16 nt, SARS coronavirus
uggcccagaagcuuca

SEQ ID NO: 3251208 - RNA, 15 nt, SARS coronavirus
gcugcagguauggag

SEQ ID NO: 3251209 - RNA, 18 nt, SARS coronavirus
augucgacacuucuuaug

SEQ ID NO: 3251210 - RNA, 23 nt, SARS coronavirus
gcuucugucgucaacauucaaaa

SEQ ID NO: 3251211 - RNA, 19 nt, SARS coronavirus
uggaugauuucuccagaca

SEQ ID NO: 3251212 - RNA, 13 nt, SARS coronavirus
ucuucuuccugcg

SEQ ID NO: 3251213 - RNA, 19 nt, SARS coronavirus
auucgauaaugcauuuaau

SEQ ID NO: 3251214 - RNA, 23 nt, SARS coronavirus
aggaacaacauugccaaaaggcu

SEQ ID NO: 3251215 - RNA, 11 nt, SARS coronavirus
aagcucagccu

SEQ ID NO: 3251216 - RNA, 15 nt, SARS coronavirus
agcacaaguagguuu

SEQ ID NO: 3251217 - RNA, 13 nt, SARS coronavirus
uugcugaacucaa

SEQ ID NO: 3251218 - RNA, 21 nt, SARS coronavirus
gauugugugcguacugcugca

SEQ ID NO: 3251219 - RNA, 19 nt, SARS coronavirus
aaaauuauucucuuccuga

SEQ ID NO: 3251220 - RNA, 15 nt, SARS coronavirus
ugucgucaacauuca

SEQ ID NO: 3251221 - RNA, 23 nt, SARS coronavirus
ugaaagagccaccacauuuucau

SEQ ID NO: 3251222 - RNA, 19 nt, SARS coronavirus
auguuacuaucaacuguca

SEQ ID NO: 3251223 - RNA, 15 nt, SARS coronavirus
uaaaaauuuaaauga

SEQ ID NO: 3251224 - RNA, 22 nt, SARS coronavirus
auuaaauggccuugguauguuu

SEQ ID NO: 3251225 - RNA, 20 nt, SARS coronavirus
agcucucacucagcauggca

SEQ ID NO: 3251226 - RNA, 16 nt, SARS coronavirus
guucaugcuacagcaa

SEQ ID NO: 3251227 - RNA, 23 nt, SARS coronavirus
caaaaagaaaaagacugaugaag

SEQ ID NO: 3251228 - RNA, 15 nt, SARS coronavirus
ugcuggcacacacau

SEQ ID NO: 3251229 - RNA, 15 nt, SARS coronavirus
uuuucaucagacaag

SEQ ID NO: 3251230 - RNA, 14 nt, SARS coronavirus
gaaaucugcugcug

SEQ ID NO: 3251231 - RNA, 17 nt, SARS coronavirus
cagcucucacucagcau

SEQ ID NO: 3251232 - RNA, 19 nt, SARS coronavirus
auuucuaauuguguugcug

SEQ ID NO: 3251233 - RNA, 16 nt, SARS coronavirus
aaugugcaaauacaca

SEQ ID NO: 3251234 - RNA, 14 nt, SARS coronavirus
auuagacauuucac

SEQ ID NO: 3251235 - RNA, 20 nt, SARS coronavirus
acucagguguuaaagacuau

SEQ ID NO: 3251236 - RNA, 18 nt, SARS coronavirus
cagcugcagccuauuuug

SEQ ID NO: 3251237 - RNA, 18 nt, SARS coronavirus
acuuccucaaggaacaac

SEQ ID NO: 3251238 - RNA, 16 nt, SARS coronavirus
acgaacaugaaacuuc

SEQ ID NO: 3251239 - RNA, 17 nt, SARS coronavirus
uucacaucuuuugcuug

SEQ ID NO: 3251240 - RNA, 20 nt, SARS coronavirus
uguugucuuccuacauguca

SEQ ID NO: 3251241 - RNA, 13 nt, SARS coronavirus
uucucuuccugac

SEQ ID NO: 3251242 - RNA, 16 nt, SARS coronavirus
gcauuucaacaccaaa

SEQ ID NO: 3251243 - RNA, 19 nt, SARS coronavirus
uguaggcuugauguggcuu

SEQ ID NO: 3251244 - RNA, 19 nt, SARS coronavirus
acccaaggaaauuucgggg

SEQ ID NO: 3251245 - RNA, 18 nt, SARS coronavirus
ugacuucuauuugugcuu

SEQ ID NO: 3251246 - RNA, 17 nt, SARS coronavirus
uccauaaaacgaacaug

SEQ ID NO: 3251247 - RNA, 19 nt, SARS coronavirus
gcaguugccucaagggugc

SEQ ID NO: 3251248 - RNA, 13 nt, SARS coronavirus
cacugcugcucua

SEQ ID NO: 3251249 - RNA, 14 nt, SARS coronavirus
uggcauggaaguca

SEQ ID NO: 3251250 - RNA, 15 nt, SARS coronavirus
acccucuugcugaca

SEQ ID NO: 3251251 - RNA, 18 nt, SARS coronavirus
gcugccaccgugcuacaa

SEQ ID NO: 3251252 - RNA, 14 nt, SARS coronavirus
uaaaugauauccuu

SEQ ID NO: 3251253 - RNA, 22 nt, SARS coronavirus
uuaaugcuacuaaauucccuuc

SEQ ID NO: 3251254 - RNA, 19 nt, SARS coronavirus
gagcugccuauauggaaga

SEQ ID NO: 3251255 - RNA, 15 nt, SARS coronavirus
uggaaugucacgcau

SEQ ID NO: 3251256 - RNA, 18 nt, SARS coronavirus
ucaaauaccuuuugcuau

SEQ ID NO: 3251257 - RNA, 17 nt, SARS coronavirus
gcuugagucuacacaaa

SEQ ID NO: 3251258 - RNA, 23 nt, SARS coronavirus
guucauuugcaauuuacugcugc

SEQ ID NO: 3251259 - RNA, 14 nt, SARS coronavirus
auuuugguuuucac

SEQ ID NO: 3251260 - RNA, 14 nt, SARS coronavirus
caugacuaguuguu

SEQ ID NO: 3251261 - RNA, 17 nt, SARS coronavirus
uuucaucuuguugacuu

SEQ ID NO: 3251262 - RNA, 20 nt, SARS coronavirus
uggagagguuuuuaaugcua

SEQ ID NO: 3251263 - RNA, 13 nt, SARS coronavirus
auuuuaauagcuu

SEQ ID NO: 3251264 - RNA, 17 nt, SARS coronavirus
augugcaaauacacaca

SEQ ID NO: 3251265 - RNA, 17 nt, SARS coronavirus
uucccaccaacagagcc

SEQ ID NO: 3251266 - RNA, 12 nt, SARS coronavirus
ggcucuucagga

SEQ ID NO: 3251267 - RNA, 20 nt, SARS coronavirus
cauuggcuaccaaccuuaca

SEQ ID NO: 3251268 - RNA, 15 nt, SARS coronavirus
guaaugccuguuucu

SEQ ID NO: 3251269 - RNA, 16 nt, SARS coronavirus
accugccaaaagagau

SEQ ID NO: 3251270 - RNA, 21 nt, SARS coronavirus
cuacaugucacguaugugcca

SEQ ID NO: 3251271 - RNA, 22 nt, SARS coronavirus
ugcaguugcauaugcacuguag

SEQ ID NO: 3251272 - RNA, 22 nt, SARS coronavirus
ugacaauaaccagaauggagga

SEQ ID NO: 3251273 - RNA, 15 nt, SARS coronavirus
ugaugccuuuucgcu

SEQ ID NO: 3251274 - RNA, 14 nt, SARS coronavirus
ugcugucuacagaa

SEQ ID NO: 3251275 - RNA, 22 nt, SARS coronavirus
aaaacguacugccacaaaacag

SEQ ID NO: 3251276 - RNA, 14 nt, SARS coronavirus
gaugaagcucagcc

SEQ ID NO: 3251277 - RNA, 15 nt, SARS coronavirus
cuaagaaaucugcug

SEQ ID NO: 3251278 - RNA, 17 nt, SARS coronavirus
gugcaccacuuuugaug

SEQ ID NO: 3251279 - RNA, 18 nt, SARS coronavirus
cgcaauggggcaaggcca

SEQ ID NO: 3251280 - RNA, 17 nt, SARS coronavirus
acugauuacaaacauug

SEQ ID NO: 3251281 - RNA, 11 nt, SARS coronavirus
caacaaggcca

SEQ ID NO: 3251282 - RNA, 22 nt, SARS coronavirus
acucauugaccuucaagaauug

SEQ ID NO: 3251283 - RNA, 13 nt, SARS coronavirus
acccaaagaccac

SEQ ID NO: 3251284 - RNA, 21 nt, SARS coronavirus
cugcaaguacuguucaugcua

SEQ ID NO: 3251285 - RNA, 20 nt, SARS coronavirus
uuuucaaccuuuaagugcua

SEQ ID NO: 3251286 - RNA, 14 nt, SARS coronavirus
uccagaacaaaccc

SEQ ID NO: 3251287 - RNA, 22 nt, SARS coronavirus
aaacauucccaccaacagagcc

SEQ ID NO: 3251288 - RNA, 18 nt, SARS coronavirus
cugcaaguacuguucaug

SEQ ID NO: 3251289 - RNA, 23 nt, SARS coronavirus
aaacugguguuauugcugauuau

SEQ ID NO: 3251290 - RNA, 19 nt, SARS coronavirus
ugauguuucugauuucacu

SEQ ID NO: 3251291 - RNA, 16 nt, SARS coronavirus
ugacucugagccaguu

SEQ ID NO: 3251292 - RNA, 19 nt, SARS coronavirus
cugaaugugcuaauuugcu

SEQ ID NO: 3251293 - RNA, 16 nt, SARS coronavirus
ugagagagacauaucu

SEQ ID NO: 3251294 - RNA, 19 nt, SARS coronavirus
aguuucugguaaaggccaa

SEQ ID NO: 3251295 - RNA, 15 nt, SARS coronavirus
agagacaaaagaagc

SEQ ID NO: 3251296 - RNA, 23 nt, SARS coronavirus
cuccgggggacaauugugaccag

SEQ ID NO: 3251297 - RNA, 16 nt, SARS coronavirus
cuaauccagcaaugga

SEQ ID NO: 3251298 - RNA, 16 nt, SARS coronavirus
cugaugaagcucagcc

SEQ ID NO: 3251299 - RNA, 16 nt, SARS coronavirus
uaacuaaacagcacaa

SEQ ID NO: 3251300 - RNA, 18 nt, SARS coronavirus
acuguacuacuaaaagaa

SEQ ID NO: 3251301 - RNA, 13 nt, SARS coronavirus
uuccuauuccuag

SEQ ID NO: 3251302 - RNA, 22 nt, SARS coronavirus
cacucagcauggcaaggaggaa

SEQ ID NO: 3251303 - RNA, 18 nt, SARS coronavirus
cuugguauuaacauuaca

SEQ ID NO: 3251304 - RNA, 15 nt, SARS coronavirus
cgaacuaacuauuau

SEQ ID NO: 3251305 - RNA, 17 nt, SARS coronavirus
gccuugaauacacccaa

SEQ ID NO: 3251306 - RNA, 21 nt, SARS coronavirus
cucaagucaaacaaauguaca

SEQ ID NO: 3251307 - RNA, 17 nt, SARS coronavirus
cuuugaaaccuauuuuu

SEQ ID NO: 3251308 - RNA, 21 nt, SARS coronavirus
auuucuuccauuuuauucuaa

SEQ ID NO: 3251309 - RNA, 17 nt, SARS coronavirus
gaguuagaugaugaaga

SEQ ID NO: 3251310 - RNA, 17 nt, SARS coronavirus
uuucaucgaggccacgc

SEQ ID NO: 3251311 - RNA, 21 nt, SARS coronavirus
guuguuaaccagaaugcucaa

SEQ ID NO: 3251312 - RNA, 14 nt, SARS coronavirus
cgugguccagaaca

SEQ ID NO: 3251313 - RNA, 15 nt, SARS coronavirus
cuuagaucaauuacu

SEQ ID NO: 3251314 - RNA, 23 nt, SARS coronavirus
uaaaacgaacaugaaaauuauuc

SEQ ID NO: 3251315 - RNA, 13 nt, SARS coronavirus
cauucuucucaau

SEQ ID NO: 3251316 - RNA, 20 nt, SARS coronavirus
ucuggcucuuguggccagua

SEQ ID NO: 3251317 - RNA, 21 nt, SARS coronavirus
gagauguuggcuuuguuggaa

SEQ ID NO: 3251318 - RNA, 15 nt, SARS coronavirus
cagcaguaggggaaa

SEQ ID NO: 3251319 - RNA, 18 nt, SARS coronavirus
guaaaaauugacaaugcu

SEQ ID NO: 3251320 - RNA, 15 nt, SARS coronavirus
cgcauacaaaacauu

SEQ ID NO: 3251321 - RNA, 15 nt, SARS coronavirus
cuuggcgacauuuca

SEQ ID NO: 3251322 - RNA, 22 nt, SARS coronavirus
guugcaguugccucaagggugc

SEQ ID NO: 3251323 - RNA, 13 nt, SARS coronavirus
uucaucgaggcca

SEQ ID NO: 3251324 - RNA, 12 nt, SARS coronavirus
aaauucaagaau

SEQ ID NO: 3251325 - RNA, 15 nt, SARS coronavirus
cuacugaaugugcua

SEQ ID NO: 3251326 - RNA, 13 nt, SARS coronavirus
aucuauuguggcu

SEQ ID NO: 3251327 - RNA, 14 nt, SARS coronavirus
uaacaaugcugcca

SEQ ID NO: 3251328 - RNA, 21 nt, SARS coronavirus
ucaacgcauguagaauuauua

SEQ ID NO: 3251329 - RNA, 24 nt, SARS coronavirus
ugcuucaccauuaagagaaagaca

SEQ ID NO: 3251330 - RNA, 16 nt, SARS coronavirus
agaacaaacccaagga

SEQ ID NO: 3251331 - RNA, 14 nt, SARS coronavirus
augcauuuaauugc

SEQ ID NO: 3251332 - RNA, 20 nt, SARS coronavirus
aagaccuaaucagacaagga

SEQ ID NO: 3251333 - RNA, 20 nt, SARS coronavirus
gcuagcccuuuauaagggcu

SEQ ID NO: 3251334 - RNA, 14 nt, SARS coronavirus
uugcuauuuggaau

SEQ ID NO: 3251335 - RNA, 13 nt, SARS coronavirus
ucauuaacaacac

SEQ ID NO: 3251336 - RNA, 16 nt, SARS coronavirus
cuacuaacuuuucaau

SEQ ID NO: 3251337 - RNA, 16 nt, SARS coronavirus
cacgaacgcuuucuua

SEQ ID NO: 3251338 - RNA, 14 nt, SARS coronavirus
cuggucuaaacgaa

SEQ ID NO: 3251339 - RNA, 14 nt, SARS coronavirus
gcaaauugcacaau

SEQ ID NO: 3251340 - RNA, 15 nt, SARS coronavirus
aacagagccuaaaaa

SEQ ID NO: 3251341 - RNA, 14 nt, SARS coronavirus
augaagcucagccu

SEQ ID NO: 3251342 - RNA, 23 nt, SARS coronavirus
accagaaugcucaagcauuaaac

SEQ ID NO: 3251343 - RNA, 21 nt, SARS coronavirus
cuaaguugaaugaucuuugcu

SEQ ID NO: 3251344 - RNA, 18 nt, SARS coronavirus
cacauugacgcauacaaa

SEQ ID NO: 3251345 - RNA, 19 nt, SARS coronavirus
cgguacucgacauaccuau

SEQ ID NO: 3251346 - RNA, 15 nt, SARS coronavirus
ucauuguugcugcuc

SEQ ID NO: 3251347 - RNA, 16 nt, SARS coronavirus
cuuugaaauauuuugg

SEQ ID NO: 3251348 - RNA, 16 nt, SARS coronavirus
uggugacggcaaaaug

SEQ ID NO: 3251349 - RNA, 18 nt, SARS coronavirus
ucaucugaaguugcuguu

SEQ ID NO: 3251350 - RNA, 17 nt, SARS coronavirus
cuacagaaguaaugccu

SEQ ID NO: 3251351 - RNA, 14 nt, SARS coronavirus
agauggguuucucu

SEQ ID NO: 3251352 - RNA, 13 nt, SARS coronavirus
cugcucgaauggc

SEQ ID NO: 3251353 - RNA, 13 nt, SARS coronavirus
aaagagccaccac

SEQ ID NO: 3251354 - RNA, 11 nt, SARS coronavirus
gcuugcugcug

SEQ ID NO: 3251355 - RNA, 17 nt, SARS coronavirus
cugauguuucuacagca

SEQ ID NO: 3251356 - RNA, 18 nt, SARS coronavirus
uugcuucuccaaugucua

SEQ ID NO: 3251357 - RNA, 20 nt, SARS coronavirus
ucaauaaaagauggcagcua

SEQ ID NO: 3251358 - RNA, 17 nt, SARS coronavirus
acuucuauuugugcuuu

SEQ ID NO: 3251359 - RNA, 22 nt, SARS coronavirus
cuugagagcaaaguuucuggua

SEQ ID NO: 3251360 - RNA, 22 nt, SARS coronavirus
uaugaugaaaaugguacaauca

SEQ ID NO: 3251361 - RNA, 22 nt, SARS coronavirus
ucuaguuagugguacugccacu

SEQ ID NO: 3251362 - RNA, 13 nt, SARS coronavirus
cuugaaagagcca

SEQ ID NO: 3251363 - RNA, 13 nt, SARS coronavirus
agacaacuucaaa

SEQ ID NO: 3251364 - RNA, 12 nt, SARS coronavirus
uuuaaguugccu

SEQ ID NO: 3251365 - RNA, 20 nt, SARS coronavirus
ucccuaauauuacaaacuug

SEQ ID NO: 3251366 - RNA, 22 nt, SARS coronavirus
ucaacugacaauaaccagaaug

SEQ ID NO: 3251367 - RNA, 14 nt, SARS coronavirus
uaucauuaugagga

SEQ ID NO: 3251368 - RNA, 22 nt, SARS coronavirus
uuuaacucaggauuuauuucuu

SEQ ID NO: 3251369 - RNA, 16 nt, SARS coronavirus
cuacuaccgaagagcu

SEQ ID NO: 3251370 - RNA, 20 nt, SARS coronavirus
ugacguuauaauaaguucaa

SEQ ID NO: 3251371 - RNA, 16 nt, SARS coronavirus
ucaaggaacaacauug

SEQ ID NO: 3251372 - RNA, 12 nt, SARS coronavirus
aguaugaugaaa

SEQ ID NO: 3251373 - RNA, 19 nt, SARS coronavirus
aggucaccaaacugcugca

SEQ ID NO: 3251374 - RNA, 17 nt, SARS coronavirus
uauuggccauuaaauga

SEQ ID NO: 3251375 - RNA, 19 nt, SARS coronavirus
ucaagugugcuaaaugaua

SEQ ID NO: 3251376 - RNA, 13 nt, SARS coronavirus
guguaaaauuaau

SEQ ID NO: 3251377 - RNA, 14 nt, SARS coronavirus
ugaugaccacacaa

SEQ ID NO: 3251378 - RNA, 23 nt, SARS coronavirus
augacaaagauccacaauucaaa

SEQ ID NO: 3251379 - RNA, 18 nt, SARS coronavirus
ccgcauuacauuuggugg

SEQ ID NO: 3251380 - RNA, 14 nt, SARS coronavirus
ugauauuaaugcua

SEQ ID NO: 3251381 - RNA, 18 nt, SARS coronavirus
caagggugucaaauuaca

SEQ ID NO: 3251382 - RNA, 21 nt, SARS coronavirus
gcaaguacuguucaugcuaca

SEQ ID NO: 3251383 - RNA, 19 nt, SARS coronavirus
agagacaaaagaagcagcc

SEQ ID NO: 3251384 - RNA, 21 nt, SARS coronavirus
guuagauuauccauaaaacga

SEQ ID NO: 3251385 - RNA, 19 nt, SARS coronavirus
ggcuacuaccgaagagcua

SEQ ID NO: 3251386 - RNA, 13 nt, SARS coronavirus
acguuauaauaag

SEQ ID NO: 3251387 - RNA, 24 nt, SARS coronavirus
ccuuuaagugcuauggcguuucug

SEQ ID NO: 3251388 - RNA, 16 nt, SARS coronavirus
auucuuuggaauguca

SEQ ID NO: 3251389 - RNA, 20 nt, SARS coronavirus
uuugcuugucgcugcaggua

SEQ ID NO: 3251390 - RNA, 16 nt, SARS coronavirus
ugacucuucuuccugc

SEQ ID NO: 3251391 - RNA, 21 nt, SARS coronavirus
cuggaacaaaugcuucaucug

SEQ ID NO: 3251392 - RNA, 15 nt, SARS coronavirus
caccauuaagagaaa

SEQ ID NO: 3251393 - RNA, 19 nt, SARS coronavirus
uacacucaacauacuucau

SEQ ID NO: 3251394 - RNA, 16 nt, SARS coronavirus
cagaggcggcagucaa

SEQ ID NO: 3251395 - RNA, 18 nt, SARS coronavirus
uuggaaugucacgcauug

SEQ ID NO: 3251396 - RNA, 16 nt, SARS coronavirus
gacaaagauccacaau

SEQ ID NO: 3251397 - RNA, 24 nt, SARS coronavirus
aaggcaucguauggguugcaacug

SEQ ID NO: 3251398 - RNA, 21 nt, SARS coronavirus
aucagacacucuuuauuuaac

SEQ ID NO: 3251399 - RNA, 18 nt, SARS coronavirus
caaauugcacaauuugcu

SEQ ID NO: 3251400 - RNA, 11 nt, SARS coronavirus
aucugcugcug

SEQ ID NO: 3251401 - RNA, 16 nt, SARS coronavirus
ucaacuccuggcagca

SEQ ID NO: 3251402 - RNA, 20 nt, SARS coronavirus
uaaauuugcacuaacuugca

SEQ ID NO: 3251403 - RNA, 22 nt, SARS coronavirus
uauucuacuggaaacaauguau

SEQ ID NO: 3251404 - RNA, 12 nt, SARS coronavirus
acuuuuaaaugc

SEQ ID NO: 3251405 - RNA, 19 nt, SARS coronavirus
uaacuaugacuacuguaua

SEQ ID NO: 3251406 - RNA, 18 nt, SARS coronavirus
caagcuccuaauuacacu

SEQ ID NO: 3251407 - RNA, 16 nt, SARS coronavirus
auacuuauagcacugc

SEQ ID NO: 3251408 - RNA, 16 nt, SARS coronavirus
gcugcugaaaucaggg

SEQ ID NO: 3251409 - RNA, 14 nt, SARS coronavirus
cauuaacgcuucug

SEQ ID NO: 3251410 - RNA, 13 nt, SARS coronavirus
aaaucugcugcug

SEQ ID NO: 3251411 - RNA, 12 nt, SARS coronavirus
gccacugcugga

SEQ ID NO: 3251412 - RNA, 19 nt, SARS coronavirus
aaacaguacaacgucacuc

SEQ ID NO: 3251413 - RNA, 14 nt, SARS coronavirus
guuagauuauccau

SEQ ID NO: 3251414 - RNA, 20 nt, SARS coronavirus
accaacagagccuaaaaagg

SEQ ID NO: 3251415 - RNA, 15 nt, SARS coronavirus
aauaaauuugcacua

SEQ ID NO: 3251416 - RNA, 23 nt, SARS coronavirus
aauauuacaaacuuguguccuuu

SEQ ID NO: 3251417 - RNA, 14 nt, SARS coronavirus
ccgugauguuucug

SEQ ID NO: 3251418 - RNA, 23 nt, SARS coronavirus
ugccacaaaacaguacaacguca

SEQ ID NO: 3251419 - RNA, 23 nt, SARS coronavirus
ucagacaaggaacugauuacaaa

SEQ ID NO: 3251420 - RNA, 21 nt, SARS coronavirus
ccuaggaacuggcccagaagc

SEQ ID NO: 3251421 - RNA, 17 nt, SARS coronavirus
aacgucacucaagcauu

SEQ ID NO: 3251422 - RNA, 17 nt, SARS coronavirus
aaauugacaaugcuucu

SEQ ID NO: 3251423 - RNA, 22 nt, SARS coronavirus
cuugucauuggugcugugauca

SEQ ID NO: 3251424 - RNA, 23 nt, SARS coronavirus
gaccacacaaggcagaugggcua

SEQ ID NO: 3251425 - RNA, 21 nt, SARS coronavirus
agaucaguuucaccaaaacuu

SEQ ID NO: 3251426 - RNA, 23 nt, SARS coronavirus
auguaguucgugaucuaccuucu

SEQ ID NO: 3251427 - RNA, 13 nt, SARS coronavirus
agccuuucugcua

SEQ ID NO: 3251428 - RNA, 17 nt, SARS coronavirus
acaauauugcuuugcua

SEQ ID NO: 3251429 - RNA, 16 nt, SARS coronavirus
uuuggugguuuuaauu

SEQ ID NO: 3251430 - RNA, 15 nt, SARS coronavirus
cccucgaggccaggg

SEQ ID NO: 3251431 - RNA, 19 nt, SARS coronavirus
guugacuuccagguuacaa

SEQ ID NO: 3251432 - RNA, 18 nt, SARS coronavirus
ccuaaucagacaaggaac

SEQ ID NO: 3251433 - RNA, 15 nt, SARS coronavirus
uagggguaauacuua

SEQ ID NO: 3251434 - RNA, 16 nt, SARS coronavirus
ucagguauugcugcug

SEQ ID NO: 3251435 - RNA, 14 nt, SARS coronavirus
accuuauguccuuc

SEQ ID NO: 3251436 - RNA, 23 nt, SARS coronavirus
ggacuugaaagagccaccacauu

SEQ ID NO: 3251437 - RNA, 24 nt, SARS coronavirus
guucaagcuccuaauuacacucaa

SEQ ID NO: 3251438 - RNA, 15 nt, SARS coronavirus
uacuacagacaauac

SEQ ID NO: 3251439 - RNA, 13 nt, SARS coronavirus
ugugucaauuuua

SEQ ID NO: 3251440 - RNA, 12 nt, SARS coronavirus
acuuauagcacu

SEQ ID NO: 3251441 - RNA, 23 nt, SARS coronavirus
aauaaugcuagggagagcugccu

SEQ ID NO: 3251442 - RNA, 18 nt, SARS coronavirus
uugcugccuacacugcug

SEQ ID NO: 3251443 - RNA, 14 nt, SARS coronavirus
uaugguucaaacau

SEQ ID NO: 3251444 - RNA, 18 nt, SARS coronavirus
gaacaaacccaaggaaau

SEQ ID NO: 3251445 - RNA, 18 nt, SARS coronavirus
uggaaacuauaaauuaaa

SEQ ID NO: 3251446 - RNA, 14 nt, SARS coronavirus
uaaucuugcugcua

SEQ ID NO: 3251447 - RNA, 16 nt, SARS coronavirus
gauugcgauugcaaug

SEQ ID NO: 3251448 - RNA, 19 nt, SARS coronavirus
aguucgugaucuaccuucu

SEQ ID NO: 3251449 - RNA, 18 nt, SARS coronavirus
ugacagguuaauuacagg

SEQ ID NO: 3251450 - RNA, 21 nt, SARS coronavirus
auguauuccagacucaagcag

SEQ ID NO: 3251451 - RNA, 14 nt, SARS coronavirus
caacaaggccaaac

SEQ ID NO: 3251452 - RNA, 15 nt, SARS coronavirus
cgaggccacgcggag

SEQ ID NO: 3251453 - RNA, 20 nt, SARS coronavirus
uuccugacauugauuguauu

SEQ ID NO: 3251454 - RNA, 20 nt, SARS coronavirus
uuaccagaccucuaauuuca

SEQ ID NO: 3251455 - RNA, 21 nt, SARS coronavirus
ccucaugugcuugaagauccu

SEQ ID NO: 3251456 - RNA, 14 nt, SARS coronavirus
augaaagagcucag

SEQ ID NO: 3251457 - RNA, 16 nt, SARS coronavirus
gcaauuuacugcugcu

SEQ ID NO: 3251458 - RNA, 19 nt, SARS coronavirus
uauuccuagccuggauuau

SEQ ID NO: 3251459 - RNA, 16 nt, SARS coronavirus
ucaccaaacugcugca

SEQ ID NO: 3251460 - RNA, 17 nt, SARS coronavirus
auucucuuccugacauu

SEQ ID NO: 3251461 - RNA, 14 nt, SARS coronavirus
cagguauugcugcu

SEQ ID NO: 3251462 - RNA, 16 nt, SARS coronavirus
cuggaacaauggaacc

SEQ ID NO: 3251463 - RNA, 23 nt, SARS coronavirus
cagaguuguaguacuuucuuuug

SEQ ID NO: 3251464 - RNA, 12 nt, SARS coronavirus
gcuauugcugcu

SEQ ID NO: 3251465 - RNA, 14 nt, SARS coronavirus
acgucauacugcug

SEQ ID NO: 3251466 - RNA, 19 nt, SARS coronavirus
ugcuagagaucucauuugu

SEQ ID NO: 3251467 - RNA, 14 nt, SARS coronavirus
gaaguugcuguucu

SEQ ID NO: 3251468 - RNA, 21 nt, SARS coronavirus
ggcaaaaugaaagagcucagc

SEQ ID NO: 3251469 - RNA, 13 nt, SARS coronavirus
cacaucuuuugcu

SEQ ID NO: 3251470 - RNA, 13 nt, SARS coronavirus
guaguacuuucuu

SEQ ID NO: 3251471 - RNA, 15 nt, SARS coronavirus
uacagccuuuucacc

SEQ ID NO: 3251472 - RNA, 15 nt, SARS coronavirus
uaacugcacugaugu

SEQ ID NO: 3251473 - RNA, 13 nt, SARS coronavirus
ucuuaggagaaug

SEQ ID NO: 3251474 - RNA, 22 nt, SARS coronavirus
uuuguacauaauaaagcuuguu

SEQ ID NO: 3251475 - RNA, 18 nt, SARS coronavirus
cuuuugaugauguucaag

SEQ ID NO: 3251476 - RNA, 13 nt, SARS coronavirus
gcucaauaaaaga

SEQ ID NO: 3251477 - RNA, 15 nt, SARS coronavirus
ccuauuuuguuggcu

SEQ ID NO: 3251478 - RNA, 13 nt, SARS coronavirus
acaaauaauuacu

SEQ ID NO: 3251479 - RNA, 19 nt, SARS coronavirus
cucagccuuugccgcagag

SEQ ID NO: 3251480 - RNA, 17 nt, SARS coronavirus
gaaugaucuuugcuucu

SEQ ID NO: 3251481 - RNA, 16 nt, SARS coronavirus
cuaaucuugcugcuac

SEQ ID NO: 3251482 - RNA, 16 nt, SARS coronavirus
uaauaacaaugcugcc

SEQ ID NO: 3251483 - RNA, 19 nt, SARS coronavirus
cuacuucguugcuuccuuc

SEQ ID NO: 3251484 - RNA, 13 nt, SARS coronavirus
cuauugcugcuag

SEQ ID NO: 3251485 - RNA, 16 nt, SARS coronavirus
ucuccugcaaguacug

SEQ ID NO: 3251486 - RNA, 18 nt, SARS coronavirus
cgaaugugcaaauacaca

SEQ ID NO: 3251487 - RNA, 20 nt, SARS coronavirus
ugcuggacuaauugccaucg

SEQ ID NO: 3251488 - RNA, 20 nt, SARS coronavirus
guuuuaauaaugcuuauuau

SEQ ID NO: 3251489 - RNA, 22 nt, SARS coronavirus
acuuugcuucaccauuaagaga

SEQ ID NO: 3251490 - RNA, 13 nt, SARS coronavirus
uuuacugcugcua

SEQ ID NO: 3251491 - RNA, 22 nt, SARS coronavirus
auuucaaccauuucaacaauuu

SEQ ID NO: 3251492 - RNA, 12 nt, SARS coronavirus
ucgaggccaggg

SEQ ID NO: 3251493 - RNA, 16 nt, SARS coronavirus
gcugaacaagcacauu

SEQ ID NO: 3251494 - RNA, 23 nt, SARS coronavirus
caacagagccuaaaaaggacaaa

SEQ ID NO: 3251495 - RNA, 14 nt, SARS coronavirus
cuugaaagagccac

SEQ ID NO: 3251496 - RNA, 13 nt, SARS coronavirus
gacaaaggaauuu

SEQ ID NO: 3251497 - RNA, 13 nt, SARS coronavirus
cuaacuugcacua

SEQ ID NO: 3251498 - RNA, 18 nt, SARS coronavirus
caaucacagaugcuguug

SEQ ID NO: 3251499 - RNA, 17 nt, SARS coronavirus
cuaagaaaucugcugcu

SEQ ID NO: 3251500 - RNA, 15 nt, SARS coronavirus
ccaccucugcucacu

SEQ ID NO: 3251501 - RNA, 15 nt, SARS coronavirus
cagcccacugugacu

SEQ ID NO: 3251502 - RNA, 21 nt, SARS coronavirus
acgacaauauugcuuugcuag

SEQ ID NO: 3251503 - RNA, 23 nt, SARS coronavirus
uaggaacuggcccagaagcuuca

SEQ ID NO: 3251504 - RNA, 20 nt, SARS coronavirus
uggugacggcaaaaugaaag

SEQ ID NO: 3251505 - RNA, 15 nt, SARS coronavirus
uacuucguugcuucc

SEQ ID NO: 3251506 - RNA, 23 nt, SARS coronavirus
uccaugaguggagcuucugcuga

SEQ ID NO: 3251507 - RNA, 15 nt, SARS coronavirus
cuuuuucuugcuuuc

SEQ ID NO: 3251508 - RNA, 22 nt, SARS coronavirus
ugaugccuuuucgcuugauguu

SEQ ID NO: 3251509 - RNA, 18 nt, SARS coronavirus
ugcaacugagggagccuu

SEQ ID NO: 3251510 - RNA, 16 nt, SARS coronavirus
gcauguaacuuugaau

SEQ ID NO: 3251511 - RNA, 16 nt, SARS coronavirus
augucgacacuucuua

SEQ ID NO: 3251512 - RNA, 20 nt, SARS coronavirus
auugacgcauacaaaacauu

SEQ ID NO: 3251513 - RNA, 20 nt, SARS coronavirus
cauaacuaugacuacuguau

SEQ ID NO: 3251514 - RNA, 24 nt, SARS coronavirus
ugcugacgguacucgacauaccua

SEQ ID NO: 3251515 - RNA, 16 nt, SARS coronavirus
caagucaaacaaaugu

SEQ ID NO: 3251516 - RNA, 20 nt, SARS coronavirus
caaaaugaaagagcucagcc

SEQ ID NO: 3251517 - RNA, 18 nt, SARS coronavirus
auggaguuagauuaucca

SEQ ID NO: 3251518 - RNA, 22 nt, SARS coronavirus
aggucgcuaaaaauuuaaauga

SEQ ID NO: 3251519 - RNA, 18 nt, SARS coronavirus
uuaggagaaugacaaaaa

SEQ ID NO: 3251520 - RNA, 20 nt, SARS coronavirus
ugauuccguucgagauccua

SEQ ID NO: 3251521 - RNA, 16 nt, SARS coronavirus
acguagugccccccgc

SEQ ID NO: 3251522 - RNA, 16 nt, SARS coronavirus
cagaugguacuucuau

SEQ ID NO: 3251523 - RNA, 18 nt, SARS coronavirus
caguugcauaugcacugu

SEQ ID NO: 3251524 - RNA, 14 nt, SARS coronavirus
ugcucaaguaugau

SEQ ID NO: 3251525 - RNA, 22 nt, SARS coronavirus
cuuuaggugcugauaguucaau

SEQ ID NO: 3251526 - RNA, 14 nt, SARS coronavirus
ucaccaaacugcug

SEQ ID NO: 3251527 - RNA, 14 nt, SARS coronavirus
ugaacucuucugaa

SEQ ID NO: 3251528 - RNA, 16 nt, SARS coronavirus
uagugguacugccacu

SEQ ID NO: 3251529 - RNA, 18 nt, SARS coronavirus
uuuacaucuugcgagcua

SEQ ID NO: 3251530 - RNA, 14 nt, SARS coronavirus
cuuuucaucagaca

SEQ ID NO: 3251531 - RNA, 22 nt, SARS coronavirus
ugcccucgcgcuauugcugcua

SEQ ID NO: 3251532 - RNA, 22 nt, SARS coronavirus
gcugccuauauggaagagcccu

SEQ ID NO: 3251533 - RNA, 21 nt, SARS coronavirus
ucacagcucucacucagcaug

SEQ ID NO: 3251534 - RNA, 22 nt, SARS coronavirus
aaggacaaaaagaaaaagacug

SEQ ID NO: 3251535 - RNA, 14 nt, SARS coronavirus
aucucacauagcaa

SEQ ID NO: 3251536 - RNA, 15 nt, SARS coronavirus
uuguugcaguugccu

SEQ ID NO: 3251537 - RNA, 20 nt, SARS coronavirus
cugccaaaagagaucacugu

SEQ ID NO: 3251538 - RNA, 16 nt, SARS coronavirus
aaggaccugccaaaag

SEQ ID NO: 3251539 - RNA, 21 nt, SARS coronavirus
uuuaauagcuucuuaggagaa

SEQ ID NO: 3251540 - RNA, 22 nt, SARS coronavirus
agcucuaauuuuggugcaauuu

SEQ ID NO: 3251541 - RNA, 19 nt, SARS coronavirus
gacaauuauuuaagccucu

SEQ ID NO: 3251542 - RNA, 12 nt, SARS coronavirus
cucacucagcau

SEQ ID NO: 3251543 - RNA, 16 nt, SARS coronavirus
cugcagccuauuuugu

SEQ ID NO: 3251544 - RNA, 18 nt, SARS coronavirus
uaacugcacugauguuuc

SEQ ID NO: 3251545 - RNA, 20 nt, SARS coronavirus
cuguaguacagcgcugugca

SEQ ID NO: 3251546 - RNA, 21 nt, SARS coronavirus
cuugaauacacccaaagacca

SEQ ID NO: 3251547 - RNA, 12 nt, SARS coronavirus
uacauuacacau

SEQ ID NO: 3251548 - RNA, 12 nt, SARS coronavirus
ugaugaagcuca

SEQ ID NO: 3251549 - RNA, 20 nt, SARS coronavirus
cuugauauauuuucuacaau

SEQ ID NO: 3251550 - RNA, 13 nt, SARS coronavirus
auugggcaagcug

SEQ ID NO: 3251551 - RNA, 14 nt, SARS coronavirus
cuauccugaugaaa

SEQ ID NO: 3251552 - RNA, 14 nt, SARS coronavirus
gucauucaacccag

SEQ ID NO: 3251553 - RNA, 13 nt, SARS coronavirus
gcucaaugugguc

SEQ ID NO: 3251554 - RNA, 16 nt, SARS coronavirus
ucuagaagaaccuugu

SEQ ID NO: 3251555 - RNA, 14 nt, SARS coronavirus
cucacucagcaugg

SEQ ID NO: 3251556 - RNA, 14 nt, SARS coronavirus
uggaacaaaugcuu

SEQ ID NO: 3251557 - RNA, 15 nt, SARS coronavirus
gcuagggagagcugc

SEQ ID NO: 3251558 - RNA, 16 nt, SARS coronavirus
gcaagacguuguuaac

SEQ ID NO: 3251559 - RNA, 18 nt, SARS coronavirus
ugccuauauggaagagcc

SEQ ID NO: 3251560 - RNA, 18 nt, SARS coronavirus
ucuuggcgacauuucagg

SEQ ID NO: 3251561 - RNA, 16 nt, SARS coronavirus
cuugcgaauggccgga

SEQ ID NO: 3251562 - RNA, 15 nt, SARS coronavirus
uugagagagacauau

SEQ ID NO: 3251563 - RNA, 14 nt, SARS coronavirus
cauucuuacagccu

SEQ ID NO: 3251564 - RNA, 23 nt, SARS coronavirus
ggcaaaaugaaagagcucagccc

SEQ ID NO: 3251565 - RNA, 23 nt, SARS coronavirus
gcauuacauuugguggacccaca

SEQ ID NO: 3251566 - RNA, 14 nt, SARS coronavirus
ccccaccugcucuu

SEQ ID NO: 3251567 - RNA, 21 nt, SARS coronavirus
caugaaggucaccaaacugcu

SEQ ID NO: 3251568 - RNA, 21 nt, SARS coronavirus
cuaauaaaccucaugugcuug

SEQ ID NO: 3251569 - RNA, 19 nt, SARS coronavirus
agaaagugaguacgaacuu

SEQ ID NO: 3251570 - RNA, 16 nt, SARS coronavirus
gguucuugcugcaagu

SEQ ID NO: 3251571 - RNA, 14 nt, SARS coronavirus
aggguuucauacua

SEQ ID NO: 3251572 - RNA, 20 nt, SARS coronavirus
ucaagaaauucaacuccugg

SEQ ID NO: 3251573 - RNA, 20 nt, SARS coronavirus
cuaugucuuuaggugcugau

SEQ ID NO: 3251574 - RNA, 14 nt, SARS coronavirus
cuuauaggagcuga

SEQ ID NO: 3251575 - RNA, 14 nt, SARS coronavirus
cuauuuguuaccau

SEQ ID NO: 3251576 - RNA, 13 nt, SARS coronavirus
gcuugugcugacg

SEQ ID NO: 3251577 - RNA, 14 nt, SARS coronavirus
auuuacugcugcua

SEQ ID NO: 3251578 - RNA, 16 nt, SARS coronavirus
ugcuggacuaauugcc

SEQ ID NO: 3251579 - RNA, 22 nt, SARS coronavirus
uucaauagugagacaauuauuu

SEQ ID NO: 3251580 - RNA, 21 nt, SARS coronavirus
ugucacgcauuggcauggaag

SEQ ID NO: 3251581 - RNA, 18 nt, SARS coronavirus
ucuucaaagagauuucaa

SEQ ID NO: 3251582 - RNA, 12 nt, SARS coronavirus
aagaagaauuau

SEQ ID NO: 3251583 - RNA, 21 nt, SARS coronavirus
uuauccauaaaacgaacauga

SEQ ID NO: 3251584 - RNA, 16 nt, SARS coronavirus
cucucagguauugcug

SEQ ID NO: 3251585 - RNA, 21 nt, SARS coronavirus
guauugaaaaugcuacauucu

SEQ ID NO: 3251586 - RNA, 17 nt, SARS coronavirus
uagucaagggagaugau

SEQ ID NO: 3251587 - RNA, 18 nt, SARS coronavirus
acacaaggcagaugggcu

SEQ ID NO: 3251588 - RNA, 15 nt, SARS coronavirus
gacacugguauugaa

SEQ ID NO: 3251589 - RNA, 23 nt, SARS coronavirus
cuaugcaguugcauaugcacugu

SEQ ID NO: 3251590 - RNA, 14 nt, SARS coronavirus
ugagauuuuuuacu

SEQ ID NO: 3251591 - RNA, 20 nt, SARS coronavirus
ucucaaaauccacuugcuga

SEQ ID NO: 3251592 - RNA, 16 nt, SARS coronavirus
aucaacaccaauagug

SEQ ID NO: 3251593 - RNA, 20 nt, SARS coronavirus
ccacagcgccagcaauuugu

SEQ ID NO: 3251594 - RNA, 14 nt, SARS coronavirus
aauuggaugacaaa

SEQ ID NO: 3251595 - RNA, 16 nt, SARS coronavirus
cuaaucagggcugcug

SEQ ID NO: 3251596 - RNA, 20 nt, SARS coronavirus
gcauugggcaagcugcaaga

SEQ ID NO: 3251597 - RNA, 15 nt, SARS coronavirus
cauucuucucaaugu

SEQ ID NO: 3251598 - RNA, 17 nt, SARS coronavirus
aagagaucacuguggcu

SEQ ID NO: 3251599 - RNA, 13 nt, SARS coronavirus
ccaccucugcuca

SEQ ID NO: 3251600 - RNA, 17 nt, SARS coronavirus
uaccauacaguuucuuu

SEQ ID NO: 3251601 - RNA, 12 nt, SARS coronavirus
uguuaacugcac

SEQ ID NO: 3251602 - RNA, 13 nt, SARS coronavirus
ucacaccagcuug

SEQ ID NO: 3251603 - RNA, 13 nt, SARS coronavirus
uccaaucaacacc

SEQ ID NO: 3251604 - RNA, 21 nt, SARS coronavirus
aauagugguccagaugaccaa

SEQ ID NO: 3251605 - RNA, 15 nt, SARS coronavirus
uugcugauuauaauu

SEQ ID NO: 3251606 - RNA, 23 nt, SARS coronavirus
guuucaccaaaacuuuucaucag

SEQ ID NO: 3251607 - RNA, 18 nt, SARS coronavirus
gaaaaaaaauuucuaauu

SEQ ID NO: 3251608 - RNA, 16 nt, SARS coronavirus
uauaaauugccagaug

SEQ ID NO: 3251609 - RNA, 17 nt, SARS coronavirus
cuuagcucuaauuuugg

SEQ ID NO: 3251610 - RNA, 15 nt, SARS coronavirus
uggagcuucugcuga

SEQ ID NO: 3251611 - RNA, 12 nt, SARS coronavirus
uuuuauucuaau

SEQ ID NO: 3251612 - RNA, 17 nt, SARS coronavirus
uguuacaggguuucaua

SEQ ID NO: 3251613 - RNA, 18 nt, SARS coronavirus
gugcaagaucaguuucac

SEQ ID NO: 3251614 - RNA, 19 nt, SARS coronavirus
gacuacuguauaccauaua

SEQ ID NO: 3251615 - RNA, 15 nt, SARS coronavirus
aagaaaucugcugcu

SEQ ID NO: 3251616 - RNA, 13 nt, SARS coronavirus
cuggaacaaaugc

SEQ ID NO: 3251617 - RNA, 13 nt, SARS coronavirus
aauuaaaaugucu

SEQ ID NO: 3251618 - RNA, 16 nt, SARS coronavirus
auaauuauaaauugcc

SEQ ID NO: 3251619 - RNA, 16 nt, SARS coronavirus
ccagcuugagucuaca

SEQ ID NO: 3251620 - RNA, 18 nt, SARS coronavirus
uaauacuuugcuucacca

SEQ ID NO: 3251621 - RNA, 23 nt, SARS coronavirus
ucauuugcaauuuacugcugcua

SEQ ID NO: 3251622 - RNA, 14 nt, SARS coronavirus
agaucacuguggcu

SEQ ID NO: 3251623 - RNA, 20 nt, SARS coronavirus
ccaacuacauuuaugcucaa

SEQ ID NO: 3251624 - RNA, 20 nt, SARS coronavirus
uuacuacagacacugguauu

SEQ ID NO: 3251625 - RNA, 15 nt, SARS coronavirus
aaccauuucaacaau

SEQ ID NO: 3251626 - RNA, 23 nt, SARS coronavirus
gaaacaaacauucuucucaaugu

SEQ ID NO: 3251627 - RNA, 17 nt, SARS coronavirus
ucacguaugugccaucc

SEQ ID NO: 3251628 - RNA, 20 nt, SARS coronavirus
cugcugauucaacucaggca

SEQ ID NO: 3251629 - RNA, 16 nt, SARS coronavirus
aaauauuagacauuuc

SEQ ID NO: 3251630 - RNA, 11 nt, SARS coronavirus
ugaaagagcuc

SEQ ID NO: 3251631 - RNA, 15 nt, SARS coronavirus
acauuucaggcauua

SEQ ID NO: 3251632 - RNA, 14 nt, SARS coronavirus
aagaagcagcccac

SEQ ID NO: 3251633 - RNA, 12 nt, SARS coronavirus
caaauuacuaca

SEQ ID NO: 3251634 - RNA, 22 nt, SARS coronavirus
gcaaauugcacaauuugcucca

SEQ ID NO: 3251635 - RNA, 13 nt, SARS coronavirus
cgaacaaauuaaa

SEQ ID NO: 3251636 - RNA, 13 nt, SARS coronavirus
auucagguuuugc

SEQ ID NO: 3251637 - RNA, 21 nt, SARS coronavirus
agucaagggagaugauguaag

SEQ ID NO: 3251638 - RNA, 19 nt, SARS coronavirus
acacuaugguucaaacaug

SEQ ID NO: 3251639 - RNA, 12 nt, SARS coronavirus
gacuaccaaauu

SEQ ID NO: 3251640 - RNA, 17 nt, SARS coronavirus
gcugcuauuuguuacca

SEQ ID NO: 3251641 - RNA, 14 nt, SARS coronavirus
aaucugaacucuuc

SEQ ID NO: 3251642 - RNA, 19 nt, SARS coronavirus
cuucuucaaagagauuuca

SEQ ID NO: 3251643 - RNA, 12 nt, SARS coronavirus
ugaaaauuauuc

SEQ ID NO: 3251644 - RNA, 19 nt, SARS coronavirus
cucagcauggcaaggagga

SEQ ID NO: 3251645 - RNA, 14 nt, SARS coronavirus
cuuuaaucaaugug

SEQ ID NO: 3251646 - RNA, 23 nt, SARS coronavirus
aauaaaccucaugugcuugaaga

SEQ ID NO: 3251647 - RNA, 15 nt, SARS coronavirus
ugcucuacaacucaa

SEQ ID NO: 3251648 - RNA, 13 nt, SARS coronavirus
ucuucaaauaccu

SEQ ID NO: 3251649 - RNA, 20 nt, SARS coronavirus
gacugaugaagcucagccuu

SEQ ID NO: 3251650 - RNA, 21 nt, SARS coronavirus
ggaacauggcugacuuaucau

SEQ ID NO: 3251651 - RNA, 17 nt, SARS coronavirus
ucuaaaaagccucgcca

SEQ ID NO: 3251652 - RNA, 15 nt, SARS coronavirus
caagugccucugcau

SEQ ID NO: 3251653 - RNA, 15 nt, SARS coronavirus
uaauacuuugcuuca

SEQ ID NO: 3251654 - RNA, 18 nt, SARS coronavirus
caacgucauacugcugaa

SEQ ID NO: 3251655 - RNA, 12 nt, SARS coronavirus
ucuaauuucagg

SEQ ID NO: 3251656 - RNA, 16 nt, SARS coronavirus
ugaaagagcucagccc

SEQ ID NO: 3251657 - RNA, 17 nt, SARS coronavirus
ucuuagaucaauuacug

SEQ ID NO: 3251658 - RNA, 13 nt, SARS coronavirus
auuuauuuugcug

SEQ ID NO: 3251659 - RNA, 19 nt, SARS coronavirus
auugcgauugcaauggcuu

SEQ ID NO: 3251660 - RNA, 18 nt, SARS coronavirus
cagcaauuugucaugaag

SEQ ID NO: 3251661 - RNA, 17 nt, SARS coronavirus
ucggauggcuuguuauu

SEQ ID NO: 3251662 - RNA, 21 nt, SARS coronavirus
uaccagaccucuaauuucagg

SEQ ID NO: 3251663 - RNA, 22 nt, SARS coronavirus
gugccucugcauucuuuggaau

SEQ ID NO: 3251664 - RNA, 15 nt, SARS coronavirus
acgcauacaaaacau

SEQ ID NO: 3251665 - RNA, 18 nt, SARS coronavirus
auuccagacucaagcagg

SEQ ID NO: 3251666 - RNA, 16 nt, SARS coronavirus
gaggacuugaaagagc

SEQ ID NO: 3251667 - RNA, 15 nt, SARS coronavirus
uaaagccaacuacau

SEQ ID NO: 3251668 - RNA, 15 nt, SARS coronavirus
caaagaagacuacca

SEQ ID NO: 3251669 - RNA, 19 nt, SARS coronavirus
ggcaaaaugaaagagcuca

SEQ ID NO: 3251670 - RNA, 18 nt, SARS coronavirus
ugcuauccccaugugauu

SEQ ID NO: 3251671 - RNA, 12 nt, SARS coronavirus
ucggauggcuug

SEQ ID NO: 3251672 - RNA, 18 nt, SARS coronavirus
acacagaggaacuucuuu

SEQ ID NO: 3251673 - RNA, 15 nt, SARS coronavirus
caccaaacugcugca

SEQ ID NO: 3251674 - RNA, 15 nt, SARS coronavirus
acuacaauuugccua

SEQ ID NO: 3251675 - RNA, 22 nt, SARS coronavirus
cucacugaugauaugauugcug

SEQ ID NO: 3251676 - RNA, 22 nt, SARS coronavirus
cacaccuucgggaacauggcug

SEQ ID NO: 3251677 - RNA, 23 nt, SARS coronavirus
aaaaucauacaucaccagauguu

SEQ ID NO: 3251678 - RNA, 14 nt, SARS coronavirus
ugauuguauuuaca

SEQ ID NO: 3251679 - RNA, 21 nt, SARS coronavirus
caauuuggccgugauguuucu

SEQ ID NO: 3251680 - RNA, 17 nt, SARS coronavirus
gucaagccucuucucgc

SEQ ID NO: 3251681 - RNA, 13 nt, SARS coronavirus
ucugucuaugcau

SEQ ID NO: 3251682 - RNA, 20 nt, SARS coronavirus
augcuacuaaauucccuucu

SEQ ID NO: 3251683 - RNA, 15 nt, SARS coronavirus
caaauaauuacuaca

SEQ ID NO: 3251684 - RNA, 22 nt, SARS coronavirus
acugcacagccaguaaaaauug

SEQ ID NO: 3251685 - RNA, 17 nt, SARS coronavirus
acccgacgaguucgugg

SEQ ID NO: 3251686 - RNA, 15 nt, SARS coronavirus
auuucggggaccaag

SEQ ID NO: 3251687 - RNA, 17 nt, SARS coronavirus
cagcgccgaccccaagg

SEQ ID NO: 3251688 - RNA, 20 nt, SARS coronavirus
gcugugaucauucgugguca

SEQ ID NO: 3251689 - RNA, 18 nt, SARS coronavirus
uugcauaugcacuguagu

SEQ ID NO: 3251690 - RNA, 21 nt, SARS coronavirus
caauugcuuacucuaauaaca

SEQ ID NO: 3251691 - RNA, 13 nt, SARS coronavirus
cuaauauuacaaa

SEQ ID NO: 3251692 - RNA, 22 nt, SARS coronavirus
uucaacccagaaacaaacauuc

SEQ ID NO: 3251693 - RNA, 18 nt, SARS coronavirus
caagugugcuaaaugaua

SEQ ID NO: 3251694 - RNA, 17 nt, SARS coronavirus
uaacagugucacagaua

SEQ ID NO: 3251695 - RNA, 16 nt, SARS coronavirus
aauagcguacuucuuu

SEQ ID NO: 3251696 - RNA, 13 nt, SARS coronavirus
auuucuuccauuu

SEQ ID NO: 3251697 - RNA, 22 nt, SARS coronavirus
agucgaggcggagguacaaauu

SEQ ID NO: 3251698 - RNA, 21 nt, SARS coronavirus
caucacgaacgcuuucuuauu

SEQ ID NO: 3251699 - RNA, 12 nt, SARS coronavirus
acacucuuuauu

SEQ ID NO: 3251700 - RNA, 21 nt, SARS coronavirus
gacugaugaagcucagccuuu

SEQ ID NO: 3251701 - RNA, 18 nt, SARS coronavirus
uggguugcaacugaggga

SEQ ID NO: 3251702 - RNA, 11 nt, SARS coronavirus
ugaaacuucuc

SEQ ID NO: 3251703 - RNA, 22 nt, SARS coronavirus
ugcuuuuuagccuuucugcuau

SEQ ID NO: 3251704 - RNA, 15 nt, SARS coronavirus
uggcuauuucaccga

SEQ ID NO: 3251705 - RNA, 19 nt, SARS coronavirus
aauaaauuugcacuaacuu

SEQ ID NO: 3251706 - RNA, 17 nt, SARS coronavirus
gcguuccaaucaacacc

SEQ ID NO: 3251707 - RNA, 20 nt, SARS coronavirus
gcauucuuuggaaugucacg

SEQ ID NO: 3251708 - RNA, 19 nt, SARS coronavirus
uucuacgcagagggaagca

SEQ ID NO: 3251709 - RNA, 15 nt, SARS coronavirus
ucggggaccaagacc

SEQ ID NO: 3251710 - RNA, 20 nt, SARS coronavirus
gcuccaagugccucugcauu

SEQ ID NO: 3251711 - RNA, 17 nt, SARS coronavirus
uuuacccaauaauacug

SEQ ID NO: 3251712 - RNA, 15 nt, SARS coronavirus
auaaaacgaacauga

SEQ ID NO: 3251713 - RNA, 13 nt, SARS coronavirus
cuuauagcacugc

SEQ ID NO: 3251714 - RNA, 20 nt, SARS coronavirus
gagccaguucucaagggugu

SEQ ID NO: 3251715 - RNA, 14 nt, SARS coronavirus
ugccuauauggaag

SEQ ID NO: 3251716 - RNA, 15 nt, SARS coronavirus
auuugguggacccac

SEQ ID NO: 3251717 - RNA, 19 nt, SARS coronavirus
caaacugguguuauugcug

SEQ ID NO: 3251718 - RNA, 14 nt, SARS coronavirus
uacaacuuccucaa

SEQ ID NO: 3251719 - RNA, 12 nt, SARS coronavirus
caaacugcugca

SEQ ID NO: 3251720 - RNA, 15 nt, SARS coronavirus
uauuagacauuucac

SEQ ID NO: 3251721 - RNA, 19 nt, SARS coronavirus
uccaagugccucugcauuc

SEQ ID NO: 3251722 - RNA, 18 nt, SARS coronavirus
caaguaugaugaaaaugg

SEQ ID NO: 3251723 - RNA, 15 nt, SARS coronavirus
cuaauguuacuauca

SEQ ID NO: 3251724 - RNA, 14 nt, SARS coronavirus
uuuaacaagcuugu

SEQ ID NO: 3251725 - RNA, 14 nt, SARS coronavirus
auguuucuacagca

SEQ ID NO: 3251726 - RNA, 22 nt, SARS coronavirus
agauugacaaaggaauuuacca

SEQ ID NO: 3251727 - RNA, 20 nt, SARS coronavirus
cagcucucacucagcauggc

SEQ ID NO: 3251728 - RNA, 22 nt, SARS coronavirus
aaaaugaaagagcucagcccca

SEQ ID NO: 3251729 - RNA, 21 nt, SARS coronavirus
ucaugguuacaaucuugcuuu

SEQ ID NO: 3251730 - RNA, 22 nt, SARS coronavirus
cuuguaccaaagucuaaacgaa

SEQ ID NO: 3251731 - RNA, 23 nt, SARS coronavirus
ucaagccucuucucgcuccucau

SEQ ID NO: 3251732 - RNA, 16 nt, SARS coronavirus
uaccaaaauaauugcg

SEQ ID NO: 3251733 - RNA, 20 nt, SARS coronavirus
auugaugcuacuucaacugg

SEQ ID NO: 3251734 - RNA, 18 nt, SARS coronavirus
ucaacaccaaaacucaaa

SEQ ID NO: 3251735 - RNA, 21 nt, SARS coronavirus
uucaagaaucacuuacaacaa

SEQ ID NO: 3251736 - RNA, 16 nt, SARS coronavirus
cuuuaauugacuucua

SEQ ID NO: 3251737 - RNA, 13 nt, SARS coronavirus
uugcuuuugcuug

SEQ ID NO: 3251738 - RNA, 13 nt, SARS coronavirus
ugaaacuucucau

SEQ ID NO: 3251739 - RNA, 17 nt, SARS coronavirus
ccucuucucgcuccuca

SEQ ID NO: 3251740 - RNA, 13 nt, SARS coronavirus
uggggcaaggcca

SEQ ID NO: 3251741 - RNA, 13 nt, SARS coronavirus
cccagaaacaaac

SEQ ID NO: 3251742 - RNA, 16 nt, SARS coronavirus
guuuuaaauaaacgaa

SEQ ID NO: 3251743 - RNA, 19 nt, SARS coronavirus
aauugacagguuaauuaca

SEQ ID NO: 3251744 - RNA, 18 nt, SARS coronavirus
aucuugacguuauaauaa

SEQ ID NO: 3251745 - RNA, 23 nt, SARS coronavirus
aauuguuauuggccauuaaauga

SEQ ID NO: 3251746 - RNA, 15 nt, SARS coronavirus
acuugcacuagcaca

SEQ ID NO: 3251747 - RNA, 18 nt, SARS coronavirus
uucuaauuguguugcuga

SEQ ID NO: 3251748 - RNA, 22 nt, SARS coronavirus
cucacuuuaauugacuucuauu

SEQ ID NO: 3251749 - RNA, 21 nt, SARS coronavirus
uaagagaaagacagaaugaau

SEQ ID NO: 3251750 - RNA, 16 nt, SARS coronavirus
ugucguuacugaaggu

SEQ ID NO: 3251751 - RNA, 15 nt, SARS coronavirus
cacucagcauggcaa

SEQ ID NO: 3251752 - RNA, 13 nt, SARS coronavirus
auuuacugcugcu

SEQ ID NO: 3251753 - RNA, 21 nt, SARS coronavirus
ccacuuuuucucauuguugcu

SEQ ID NO: 3251754 - RNA, 16 nt, SARS coronavirus
cuacacugcugcucua

SEQ ID NO: 3251755 - RNA, 13 nt, SARS coronavirus
aggacaaaaagaa

SEQ ID NO: 3251756 - RNA, 23 nt, SARS coronavirus
cucaaugaggucgcuaaaaauuu

SEQ ID NO: 3251757 - RNA, 19 nt, SARS coronavirus
acauuuucaucgaggccac

SEQ ID NO: 3251758 - RNA, 15 nt, SARS coronavirus
auuuuggugcaauuu

SEQ ID NO: 3251759 - RNA, 22 nt, SARS coronavirus
uuugguuuucacucgaaaucca

SEQ ID NO: 3251760 - RNA, 20 nt, SARS coronavirus
gcugccuauauggaagagcc

SEQ ID NO: 3251761 - RNA, 22 nt, SARS coronavirus
gaauggcuagcggaggugguga

SEQ ID NO: 3251762 - RNA, 16 nt, SARS coronavirus
caugaaggucaccaaa

SEQ ID NO: 3251763 - RNA, 20 nt, SARS coronavirus
auuugcaauuuacugcugcu

SEQ ID NO: 3251764 - RNA, 17 nt, SARS coronavirus
ucgcgcuauugcugcua

SEQ ID NO: 3251765 - RNA, 15 nt, SARS coronavirus
aaagauggcagcuag

SEQ ID NO: 3251766 - RNA, 12 nt, SARS coronavirus
cuguggcuacau

SEQ ID NO: 3251767 - RNA, 17 nt, SARS coronavirus
gguacugccacugcugg

SEQ ID NO: 3251768 - RNA, 15 nt, SARS coronavirus
cuguuuggaacuuua

SEQ ID NO: 3251769 - RNA, 17 nt, SARS coronavirus
aaugaaagagcucagcc

SEQ ID NO: 3251770 - RNA, 18 nt, SARS coronavirus
uuuaccagaccucuaauu

SEQ ID NO: 3251771 - RNA, 20 nt, SARS coronavirus
ccuugcaccccaccugcucu

SEQ ID NO: 3251772 - RNA, 19 nt, SARS coronavirus
auuuuuaauacuuugcuuc

SEQ ID NO: 3251773 - RNA, 17 nt, SARS coronavirus
aggaacauacgagggca

SEQ ID NO: 3251774 - RNA, 22 nt, SARS coronavirus
uacaucaccagauguugaucuu

SEQ ID NO: 3251775 - RNA, 14 nt, SARS coronavirus
gaucacuguggcua

SEQ ID NO: 3251776 - RNA, 20 nt, SARS coronavirus
ggaggacuugaaagagccac

SEQ ID NO: 3251777 - RNA, 17 nt, SARS coronavirus
aaacgaacaugaaacuu

SEQ ID NO: 3251778 - RNA, 15 nt, SARS coronavirus
uuguaguacuuucuu

SEQ ID NO: 3251779 - RNA, 16 nt, SARS coronavirus
aauaaacgaacaaauu

SEQ ID NO: 3251780 - RNA, 14 nt, SARS coronavirus
aauauuacaaacuu

SEQ ID NO: 3251781 - RNA, 20 nt, SARS coronavirus
ugcccucgcgcuauugcugc

SEQ ID NO: 3251782 - RNA, 18 nt, SARS coronavirus
agauucccucgaggccag

SEQ ID NO: 3251783 - RNA, 19 nt, SARS coronavirus
caacaccaaaacucaaaga

SEQ ID NO: 3251784 - RNA, 15 nt, SARS coronavirus
aucaacugucaagau

SEQ ID NO: 3251785 - RNA, 16 nt, SARS coronavirus
ucaaauaccuuuugcu

SEQ ID NO: 3251786 - RNA, 18 nt, SARS coronavirus
acuucuuuuucuugcuuu

SEQ ID NO: 3251787 - RNA, 20 nt, SARS coronavirus
auaccuacuaacuuuucaau

SEQ ID NO: 3251788 - RNA, 20 nt, SARS coronavirus
cauuguuuugacuuguauuu

SEQ ID NO: 3251789 - RNA, 14 nt, SARS coronavirus
cgcuauugcugcua

SEQ ID NO: 3251790 - RNA, 15 nt, SARS coronavirus
uuauagcacugcuug

SEQ ID NO: 3251791 - RNA, 15 nt, SARS coronavirus
ggaacaacauugcca

SEQ ID NO: 3251792 - RNA, 17 nt, SARS coronavirus
caacuccuggcagcagu

SEQ ID NO: 3251793 - RNA, 18 nt, SARS coronavirus
cuuauggauuuguuuaug

SEQ ID NO: 3251794 - RNA, 14 nt, SARS coronavirus
gaacaaacccaagg

SEQ ID NO: 3251795 - RNA, 22 nt, SARS coronavirus
ucuaauuuuggugcaauuucaa

SEQ ID NO: 3251796 - RNA, 18 nt, SARS coronavirus
cacucgcugaugcuggcu

SEQ ID NO: 3251797 - RNA, 13 nt, SARS coronavirus
auggcacuucuug

SEQ ID NO: 3251798 - RNA, 17 nt, SARS coronavirus
uacauaucugaugccuu

SEQ ID NO: 3251799 - RNA, 15 nt, SARS coronavirus
augaccacacaaggc

SEQ ID NO: 3251800 - RNA, 20 nt, SARS coronavirus
gcaacgacaauauugcuuug

SEQ ID NO: 3251801 - RNA, 23 nt, SARS coronavirus
ucaagaaucacuuacaacaacau

SEQ ID NO: 3251802 - RNA, 21 nt, SARS coronavirus
aaaucgccaaccaauuuaaca

SEQ ID NO: 3251803 - RNA, 22 nt, SARS coronavirus
acucugagccaguucucaaggg

SEQ ID NO: 3251804 - RNA, 20 nt, SARS coronavirus
gaaugugcuaauuugcuucu

SEQ ID NO: 3251805 - RNA, 17 nt, SARS coronavirus
gcaauggggcaaggcca

SEQ ID NO: 3251806 - RNA, 20 nt, SARS coronavirus
caugaguggagcuucugcug

SEQ ID NO: 3251807 - RNA, 22 nt, SARS coronavirus
aagcagcccacugugacucuuc

SEQ ID NO: 3251808 - RNA, 14 nt, SARS coronavirus
gcuacaacuuccuc

SEQ ID NO: 3251809 - RNA, 17 nt, SARS coronavirus
cagguauggaggcgcaa

SEQ ID NO: 3251810 - RNA, 14 nt, SARS coronavirus
ucuugugcagaaug

SEQ ID NO: 3251811 - RNA, 15 nt, SARS coronavirus
caauggcuuguauug

SEQ ID NO: 3251812 - RNA, 17 nt, SARS coronavirus
aacaacuaaucagggcu

SEQ ID NO: 3251813 - RNA, 19 nt, SARS coronavirus
cacagauucaacugacaau

SEQ ID NO: 3251814 - RNA, 21 nt, SARS coronavirus
auagcuucuuaggagaaugac

SEQ ID NO: 3251815 - RNA, 15 nt, SARS coronavirus
ugaacucaaaugcuc

SEQ ID NO: 3251816 - RNA, 20 nt, SARS coronavirus
ccaccugcucuuaauuguua

SEQ ID NO: 3251817 - RNA, 22 nt, SARS coronavirus
ucaagccucuucucgcuccuca

SEQ ID NO: 3251818 - RNA, 21 nt, SARS coronavirus
cagaaguaaugccuguuucua

SEQ ID NO: 3251819 - RNA, 11 nt, SARS coronavirus
aagagaaagac

SEQ ID NO: 3251820 - RNA, 19 nt, SARS coronavirus
aaaauuauccacugaccuu

SEQ ID NO: 3251821 - RNA, 21 nt, SARS coronavirus
ucucacucagcauggcaagga

SEQ ID NO: 3251822 - RNA, 16 nt, SARS coronavirus
cuaaacgaacaugaaa

SEQ ID NO: 3251823 - RNA, 17 nt, SARS coronavirus
auaucuaaugugccuuu

SEQ ID NO: 3251824 - RNA, 19 nt, SARS coronavirus
ugauucagguuuugcugca

SEQ ID NO: 3251825 - RNA, 15 nt, SARS coronavirus
acgucacucaagcau

SEQ ID NO: 3251826 - RNA, 21 nt, SARS coronavirus
uaaacgaacuaacuauuauua

SEQ ID NO: 3251827 - RNA, 21 nt, SARS coronavirus
cugaugauaugauugcugccu

SEQ ID NO: 3251828 - RNA, 20 nt, SARS coronavirus
uucuacugaaugugcuaauu

SEQ ID NO: 3251829 - RNA, 17 nt, SARS coronavirus
accuucaugaaggucac

SEQ ID NO: 3251830 - RNA, 14 nt, SARS coronavirus
ucgauaaugcauuu

SEQ ID NO: 3251831 - RNA, 21 nt, SARS coronavirus
cuucugucgucaacauucaaa

SEQ ID NO: 3251832 - RNA, 21 nt, SARS coronavirus
cugguauugaaaaugcuacau

SEQ ID NO: 3251833 - RNA, 14 nt, SARS coronavirus
cauuguugcugcuc

SEQ ID NO: 3251834 - RNA, 21 nt, SARS coronavirus
acauuggccgcaaauugcaca

SEQ ID NO: 3251835 - RNA, 17 nt, SARS coronavirus
gccgacgacgacuacua

SEQ ID NO: 3251836 - RNA, 23 nt, SARS coronavirus
uuucugccacuaaguugaaugau

SEQ ID NO: 3251837 - RNA, 18 nt, SARS coronavirus
cacucagcauggcaagga

SEQ ID NO: 3251838 - RNA, 20 nt, SARS coronavirus
aacaaaucgccaaccaauuu

SEQ ID NO: 3251839 - RNA, 21 nt, SARS coronavirus
aauucuacuaauguuguuaua

SEQ ID NO: 3251840 - RNA, 19 nt, SARS coronavirus
ccuucgggaacauggcuga

SEQ ID NO: 3251841 - RNA, 17 nt, SARS coronavirus
acuaagaagaauuauuc

SEQ ID NO: 3251842 - RNA, 15 nt, SARS coronavirus
guggucauucaaccc

SEQ ID NO: 3251843 - RNA, 24 nt, SARS coronavirus
cucuggcucuuguggccaguaaca

SEQ ID NO: 3251844 - RNA, 13 nt, SARS coronavirus
ugacauggaugau

SEQ ID NO: 3251845 - RNA, 12 nt, SARS coronavirus
cuugaaagagcc

SEQ ID NO: 3251846 - RNA, 24 nt, SARS coronavirus
cuuacaguguugccaccucugcuc

SEQ ID NO: 3251847 - RNA, 18 nt, SARS coronavirus
cauugcuuaucauggcag

SEQ ID NO: 3251848 - RNA, 23 nt, SARS coronavirus
ucugauaauggaccccaaucaaa

SEQ ID NO: 3251849 - RNA, 14 nt, SARS coronavirus
agccaguucucaag

SEQ ID NO: 3251850 - RNA, 21 nt, SARS coronavirus
ucaugaaggucaccaaacugc

SEQ ID NO: 3251851 - RNA, 14 nt, SARS coronavirus
uugccuauucuaau

SEQ ID NO: 3251852 - RNA, 23 nt, SARS coronavirus
uauguacaucugcggagauucua

SEQ ID NO: 3251853 - RNA, 13 nt, SARS coronavirus
aguaauagguuuc

SEQ ID NO: 3251854 - RNA, 23 nt, SARS coronavirus
caaaaacguacugccacaaaaca

SEQ ID NO: 3251855 - RNA, 22 nt, SARS coronavirus
uuuacgauacauagucuacucu

SEQ ID NO: 3251856 - RNA, 14 nt, SARS coronavirus
cugagcuugacuca

SEQ ID NO: 3251857 - RNA, 13 nt, SARS coronavirus
cauagauggcaca

SEQ ID NO: 3251858 - RNA, 16 nt, SARS coronavirus
agugagacaauuauuu

SEQ ID NO: 3251859 - RNA, 19 nt, SARS coronavirus
ugaucuuggcgacauuuca

SEQ ID NO: 3251860 - RNA, 11 nt, SARS coronavirus
uagaauuauua

SEQ ID NO: 3251861 - RNA, 19 nt, SARS coronavirus
acaaacccaaggaaauuuc

SEQ ID NO: 3251862 - RNA, 12 nt, SARS coronavirus
ggcaaaaugaaa

SEQ ID NO: 3251863 - RNA, 22 nt, SARS coronavirus
gcccucgcgcuauugcugcuag

SEQ ID NO: 3251864 - RNA, 16 nt, SARS coronavirus
gaccuaaucagacaag

SEQ ID NO: 3251865 - RNA, 14 nt, SARS coronavirus
cuuuaauugacuuc

SEQ ID NO: 3251866 - RNA, 17 nt, SARS coronavirus
auucccuucugucuaug

SEQ ID NO: 3251867 - RNA, 16 nt, SARS coronavirus
cuacauuuaugcucaa

SEQ ID NO: 3251868 - RNA, 14 nt, SARS coronavirus
uccagacaacuuca

SEQ ID NO: 3251869 - RNA, 21 nt, SARS coronavirus
augguguugucuuccuacaug

SEQ ID NO: 3251870 - RNA, 15 nt, SARS coronavirus
cugauuacaaacauu

SEQ ID NO: 3251871 - RNA, 16 nt, SARS coronavirus
gguucaacaagagcuc

SEQ ID NO: 3251872 - RNA, 18 nt, SARS coronavirus
ucgccacuuuuucucauu

SEQ ID NO: 3251873 - RNA, 16 nt, SARS coronavirus
caauaaccagaaugga

SEQ ID NO: 3251874 - RNA, 16 nt, SARS coronavirus
ugaacuuuuaaaugca

SEQ ID NO: 3251875 - RNA, 12 nt, SARS coronavirus
auugcuuugcua

SEQ ID NO: 3251876 - RNA, 13 nt, SARS coronavirus
caaauaccuuuug

SEQ ID NO: 3251877 - RNA, 16 nt, SARS coronavirus
ggccauuaaaugauua

SEQ ID NO: 3251878 - RNA, 18 nt, SARS coronavirus
ugcuagggagagcugccu

SEQ ID NO: 3251879 - RNA, 19 nt, SARS coronavirus
uggauuauguuacuacaau

SEQ ID NO: 3251880 - RNA, 14 nt, SARS coronavirus
aggacuugcucuuu

SEQ ID NO: 3251881 - RNA, 19 nt, SARS coronavirus
aauagcuucuuaggagaau

SEQ ID NO: 3251882 - RNA, 14 nt, SARS coronavirus
cuaauguuguuaua

SEQ ID NO: 3251883 - RNA, 18 nt, SARS coronavirus
acaaacauucuucucaau

SEQ ID NO: 3251884 - RNA, 15 nt, SARS coronavirus
uaauuuuaauggacu

SEQ ID NO: 3251885 - RNA, 16 nt, SARS coronavirus
auacaguuucuuuauu

SEQ ID NO: 3251886 - RNA, 14 nt, SARS coronavirus
caauggcuuguauu

SEQ ID NO: 3251887 - RNA, 18 nt, SARS coronavirus
acagcucucacucagcau

SEQ ID NO: 3251888 - RNA, 22 nt, SARS coronavirus
aaagacaacgucauacugcuga

SEQ ID NO: 3251889 - RNA, 22 nt, SARS coronavirus
cuuacagccuuuucaccugcuc

SEQ ID NO: 3251890 - RNA, 23 nt, SARS coronavirus
uuaaauggccuugguauguuugg

SEQ ID NO: 3251891 - RNA, 13 nt, SARS coronavirus
gaugcuguugauu

SEQ ID NO: 3251892 - RNA, 19 nt, SARS coronavirus
gcccucgcgcuauugcugc

SEQ ID NO: 3251893 - RNA, 13 nt, SARS coronavirus
cagaaacaaacau

SEQ ID NO: 3251894 - RNA, 14 nt, SARS coronavirus
aaacuuguguccuu

SEQ ID NO: 3251895 - RNA, 22 nt, SARS coronavirus
ucaaggaacaacauugccaaaa

SEQ ID NO: 3251896 - RNA, 14 nt, SARS coronavirus
uacugccacugcug

SEQ ID NO: 3251897 - RNA, 17 nt, SARS coronavirus
uucccucgaggccaggg

SEQ ID NO: 3251898 - RNA, 17 nt, SARS coronavirus
ccaguucucaagggugu

SEQ ID NO: 3251899 - RNA, 22 nt, SARS coronavirus
aaacugcccucgcgcuauugcu

SEQ ID NO: 3251900 - RNA, 21 nt, SARS coronavirus
cagaauggaggacgcaauggg

SEQ ID NO: 3251901 - RNA, 20 nt, SARS coronavirus
cugcagguauggaggcgcaa

SEQ ID NO: 3251902 - RNA, 22 nt, SARS coronavirus
acugauguuucuacagcaauuc

SEQ ID NO: 3251903 - RNA, 20 nt, SARS coronavirus
aacauguuuauuuucuuauu

SEQ ID NO: 3251904 - RNA, 18 nt, SARS coronavirus
uucaaaaaucauacauca

SEQ ID NO: 3251905 - RNA, 23 nt, SARS coronavirus
cuacagacaauacauuugucuca

SEQ ID NO: 3251906 - RNA, 21 nt, SARS coronavirus
aauuauuaugagauguuggcu

SEQ ID NO: 3251907 - RNA, 22 nt, SARS coronavirus
cucacucccuuucggauggcuu

SEQ ID NO: 3251908 - RNA, 20 nt, SARS coronavirus
cuccugcaaguacuguucau

SEQ ID NO: 3251909 - RNA, 20 nt, SARS coronavirus
cccuuucuuugcuguuucua

SEQ ID NO: 3251910 - RNA, 15 nt, SARS coronavirus
aguuagaugaugaag

SEQ ID NO: 3251911 - RNA, 21 nt, SARS coronavirus
cucuaguuagugguacugcca

SEQ ID NO: 3251912 - RNA, 22 nt, SARS coronavirus
ggccaaaacagcgccgacccca

SEQ ID NO: 3251913 - RNA, 14 nt, SARS coronavirus
gucacucaagcauu

SEQ ID NO: 3251914 - RNA, 22 nt, SARS coronavirus
cuucuccaaugucuaugcagau

SEQ ID NO: 3251915 - RNA, 13 nt, SARS coronavirus
ugaaaauuauucu

SEQ ID NO: 3251916 - RNA, 16 nt, SARS coronavirus
auggguuguguccuug

SEQ ID NO: 3251917 - RNA, 14 nt, SARS coronavirus
ucaaauucaagaau

SEQ ID NO: 3251918 - RNA, 20 nt, SARS coronavirus
acgcaauggggcaaggccaa

SEQ ID NO: 3251919 - RNA, 12 nt, SARS coronavirus
uuacugcugcua

SEQ ID NO: 3251920 - RNA, 23 nt, SARS coronavirus
ugggagagaaaaaaaauuucuaa

SEQ ID NO: 3251921 - RNA, 15 nt, SARS coronavirus
uacacugcugcucua

SEQ ID NO: 3251922 - RNA, 15 nt, SARS coronavirus
ugcacaauuugcucc

SEQ ID NO: 3251923 - RNA, 14 nt, SARS coronavirus
acaugaaacuucuc

SEQ ID NO: 3251924 - RNA, 19 nt, SARS coronavirus
aucaauuacugcacagcca

SEQ ID NO: 3251925 - RNA, 19 nt, SARS coronavirus
uuauaauuauaaauugcca

SEQ ID NO: 3251926 - RNA, 18 nt, SARS coronavirus
cucuugugcagaaugaau

SEQ ID NO: 3251927 - RNA, 20 nt, SARS coronavirus
gacacucgcugaugcuggcu

SEQ ID NO: 3251928 - RNA, 14 nt, SARS coronavirus
auaauggaccccaa

SEQ ID NO: 3251929 - RNA, 21 nt, SARS coronavirus
uuguguuuaauggcacuucuu

SEQ ID NO: 3251930 - RNA, 17 nt, SARS coronavirus
guguugguaccuucaug

SEQ ID NO: 3251931 - RNA, 18 nt, SARS coronavirus
ugacaaugcuucuccugc

SEQ ID NO: 3251932 - RNA, 15 nt, SARS coronavirus
ugacguuauaauaag

SEQ ID NO: 3251933 - RNA, 22 nt, SARS coronavirus
aaagaagcagcccacugugacu

SEQ ID NO: 3251934 - RNA, 22 nt, SARS coronavirus
cccaugugauuuuaauagcuuc

SEQ ID NO: 3251935 - RNA, 12 nt, SARS coronavirus
cacugcugcucu

SEQ ID NO: 3251936 - RNA, 16 nt, SARS coronavirus
ggcgcuaacaaagaag

SEQ ID NO: 3251937 - RNA, 21 nt, SARS coronavirus
acacagaggaacuucuuuucu

SEQ ID NO: 3251938 - RNA, 19 nt, SARS coronavirus
cagcuugagucuacacaaa

SEQ ID NO: 3251939 - RNA, 19 nt, SARS coronavirus
uauuuauuuugcugccaca

SEQ ID NO: 3251940 - RNA, 19 nt, SARS coronavirus
ucaauuagcauuacuacag

SEQ ID NO: 3251941 - RNA, 18 nt, SARS coronavirus
uuugacuuguauuucucu

SEQ ID NO: 3251942 - RNA, 14 nt, SARS coronavirus
ccccaacuuugaaa

SEQ ID NO: 3251943 - RNA, 18 nt, SARS coronavirus
acuaagaaaucugcugcu

SEQ ID NO: 3251944 - RNA, 15 nt, SARS coronavirus
aaaaugucugagugu

SEQ ID NO: 3251945 - RNA, 23 nt, SARS coronavirus
aaaugauuaugguuuuuacacca

SEQ ID NO: 3251946 - RNA, 14 nt, SARS coronavirus
uacaggcagacuuc

SEQ ID NO: 3251947 - RNA, 16 nt, SARS coronavirus
agcauuaaacacacuu

SEQ ID NO: 3251948 - RNA, 12 nt, SARS coronavirus
ucaacaauuugg

SEQ ID NO: 3251949 - RNA, 17 nt, SARS coronavirus
ugaacucuucugaagga

SEQ ID NO: 3251950 - RNA, 20 nt, SARS coronavirus
ccagaagcuucacuucccua

SEQ ID NO: 3251951 - RNA, 20 nt, SARS coronavirus
cugaaauauuagacauuuca

SEQ ID NO: 3251952 - RNA, 16 nt, SARS coronavirus
acaaaagaagcagccc

SEQ ID NO: 3251953 - RNA, 21 nt, SARS coronavirus
cuaauuuuggugcaauuucaa

SEQ ID NO: 3251954 - RNA, 15 nt, SARS coronavirus
uauucgauaaugcau

SEQ ID NO: 3251955 - RNA, 19 nt, SARS coronavirus
auucccaccaacagagccu

SEQ ID NO: 3251956 - RNA, 23 nt, SARS coronavirus
uugaauacacccaaagaccacau

SEQ ID NO: 3251957 - RNA, 20 nt, SARS coronavirus
ucuccugcaaguacuguuca

SEQ ID NO: 3251958 - RNA, 13 nt, SARS coronavirus
ugcaucuaauaaa

SEQ ID NO: 3251959 - RNA, 15 nt, SARS coronavirus
cgaaguuuacuacca

SEQ ID NO: 3251960 - RNA, 18 nt, SARS coronavirus
cuggcagcaguaggggaa

SEQ ID NO: 3251961 - RNA, 21 nt, SARS coronavirus
ccauuaaauuggaugacaaag

SEQ ID NO: 3251962 - RNA, 20 nt, SARS coronavirus
gcuucuccaaugucuaugca

SEQ ID NO: 3251963 - RNA, 13 nt, SARS coronavirus
aaggccaaaacag

SEQ ID NO: 3251964 - RNA, 16 nt, SARS coronavirus
ggaugacaaagaucca

SEQ ID NO: 3251965 - RNA, 19 nt, SARS coronavirus
auguaaacguuuucgcaau

SEQ ID NO: 3251966 - RNA, 14 nt, SARS coronavirus
gcuugauguggcuu

SEQ ID NO: 3251967 - RNA, 18 nt, SARS coronavirus
uuaaauaaacgaacaaau

SEQ ID NO: 3251968 - RNA, 16 nt, SARS coronavirus
ucuauaucaagauguu

SEQ ID NO: 3251969 - RNA, 12 nt, SARS coronavirus
ugugcagaauga

SEQ ID NO: 3251970 - RNA, 20 nt, SARS coronavirus
ugacaaagauccacaauuca

SEQ ID NO: 3251971 - RNA, 14 nt, SARS coronavirus
ucaggauugcuauu

SEQ ID NO: 3251972 - RNA, 15 nt, SARS coronavirus
gcgcuauugcugcua

SEQ ID NO: 3251973 - RNA, 22 nt, SARS coronavirus
gaauacacccaaagaccacauu

SEQ ID NO: 3251974 - RNA, 18 nt, SARS coronavirus
gugcuaauuugcuucucc

SEQ ID NO: 3251975 - RNA, 15 nt, SARS coronavirus
ccagaaacaaacauu

SEQ ID NO: 3251976 - RNA, 13 nt, SARS coronavirus
cacgucagcugca

SEQ ID NO: 3251977 - RNA, 16 nt, SARS coronavirus
acugaugaagcucagc

SEQ ID NO: 3251978 - RNA, 15 nt, SARS coronavirus
aaacacucaugauga

SEQ ID NO: 3251979 - RNA, 21 nt, SARS coronavirus
cgggauugcgauugcaauggc

SEQ ID NO: 3251980 - RNA, 22 nt, SARS coronavirus
aguaaugccuguuucuauggcu

SEQ ID NO: 3251981 - RNA, 12 nt, SARS coronavirus
accucaugugcu

SEQ ID NO: 3251982 - RNA, 18 nt, SARS coronavirus
ugcaccccaccugcucuu

SEQ ID NO: 3251983 - RNA, 18 nt, SARS coronavirus
uuggaugacaaagaucca

SEQ ID NO: 3251984 - RNA, 19 nt, SARS coronavirus
ggagguacaaauugacagg

SEQ ID NO: 3251985 - RNA, 14 nt, SARS coronavirus
auuuugcugccaca

SEQ ID NO: 3251986 - RNA, 14 nt, SARS coronavirus
cuacuaacuuuuca

SEQ ID NO: 3251987 - RNA, 15 nt, SARS coronavirus
uaauugacuucuauu

SEQ ID NO: 3251988 - RNA, 17 nt, SARS coronavirus
cugaugaagcucagccu

SEQ ID NO: 3251989 - RNA, 21 nt, SARS coronavirus
gguuuauuacacagaggaacu

SEQ ID NO: 3251990 - RNA, 23 nt, SARS coronavirus
gacaaggaacugauuacaaacau

SEQ ID NO: 3251991 - RNA, 15 nt, SARS coronavirus
gccaguucucaaggg

SEQ ID NO: 3251992 - RNA, 19 nt, SARS coronavirus
auucuacugaaugugcuaa

SEQ ID NO: 3251993 - RNA, 21 nt, SARS coronavirus
ggcaucuaaaaagccucgcca

SEQ ID NO: 3251994 - RNA, 15 nt, SARS coronavirus
ucagcauggcaagga

SEQ ID NO: 3251995 - RNA, 19 nt, SARS coronavirus
guauuuuuaauacuuugcu

SEQ ID NO: 3251996 - RNA, 12 nt, SARS coronavirus
agccucuucucg

SEQ ID NO: 3251997 - RNA, 16 nt, SARS coronavirus
caacugucaagaucca

SEQ ID NO: 3251998 - RNA, 23 nt, SARS coronavirus
agaauuauuaugagauguuggcu

SEQ ID NO: 3251999 - RNA, 20 nt, SARS coronavirus
auagcgccaggacaaacugg

SEQ ID NO: 3252000 - RNA, 23 nt, SARS coronavirus
caugaaaauuauucucuuccuga

SEQ ID NO: 3252001 - RNA, 16 nt, SARS coronavirus
uguucuauaucaagau

SEQ ID NO: 3252002 - RNA, 16 nt, SARS coronavirus
aguacagcgcugugca

SEQ ID NO: 3252003 - RNA, 15 nt, SARS coronavirus
guugcauaugcacug

SEQ ID NO: 3252004 - RNA, 21 nt, SARS coronavirus
cagacaaggaacugauuacaa

SEQ ID NO: 3252005 - RNA, 15 nt, SARS coronavirus
aaaacgaacaugaaa

SEQ ID NO: 3252006 - RNA, 15 nt, SARS coronavirus
acaaaagaagcagcc

SEQ ID NO: 3252007 - RNA, 21 nt, SARS coronavirus
uggcuuugugcucuaggaaag

SEQ ID NO: 3252008 - RNA, 15 nt, SARS coronavirus
gugcguacugcugca

SEQ ID NO: 3252009 - RNA, 14 nt, SARS coronavirus
ucaaggaacaacau

SEQ ID NO: 3252010 - RNA, 15 nt, SARS coronavirus
cuacuaaaaugucug

SEQ ID NO: 3252011 - RNA, 22 nt, SARS coronavirus
ucuaaacgaacaugaaacuucu

SEQ ID NO: 3252012 - RNA, 21 nt, SARS coronavirus
gauugcugccuacacugcugc

SEQ ID NO: 3252013 - RNA, 18 nt, SARS coronavirus
gacaacgucauacugcug

SEQ ID NO: 3252014 - RNA, 20 nt, SARS coronavirus
gaagcagcccacugugacuc

SEQ ID NO: 3252015 - RNA, 16 nt, SARS coronavirus
cauaucugaugccuuu

SEQ ID NO: 3252016 - RNA, 20 nt, SARS coronavirus
cuucuuaggagaaugacaaa

SEQ ID NO: 3252017 - RNA, 18 nt, SARS coronavirus
caaacuuguguccuuuug

SEQ ID NO: 3252018 - RNA, 18 nt, SARS coronavirus
ccucuucucgcuccucau

SEQ ID NO: 3252019 - RNA, 15 nt, SARS coronavirus
cauuuggugcuggcg

SEQ ID NO: 3252020 - RNA, 20 nt, SARS coronavirus
uguugcaguugccucaaggg

SEQ ID NO: 3252021 - RNA, 20 nt, SARS coronavirus
ccuuugccgcagagacaaaa

SEQ ID NO: 3252022 - RNA, 23 nt, SARS coronavirus
cuugguuuauuacacagaggaac

SEQ ID NO: 3252023 - RNA, 15 nt, SARS coronavirus
cuagggcgcugugac

SEQ ID NO: 3252024 - RNA, 19 nt, SARS coronavirus
caccugcucaagacauuug

SEQ ID NO: 3252025 - RNA, 17 nt, SARS coronavirus
aacagcgccgaccccaa

SEQ ID NO: 3252026 - RNA, 16 nt, SARS coronavirus
ugcuacaacuuccuca

SEQ ID NO: 3252027 - RNA, 18 nt, SARS coronavirus
agagauauugauuaucau

SEQ ID NO: 3252028 - RNA, 17 nt, SARS coronavirus
accaaagucuaaacgaa

SEQ ID NO: 3252029 - RNA, 23 nt, SARS coronavirus
gacacucccuagggcgcugugac

SEQ ID NO: 3252030 - RNA, 19 nt, SARS coronavirus
cagagccuaaaaaggacaa

SEQ ID NO: 3252031 - RNA, 22 nt, SARS coronavirus
cacuagccauccuuacugcgcu

SEQ ID NO: 3252032 - RNA, 15 nt, SARS coronavirus
uugggcaagcugcaa

SEQ ID NO: 3252033 - RNA, 20 nt, SARS coronavirus
gccuuucuccccugauggca

SEQ ID NO: 3252034 - RNA, 21 nt, SARS coronavirus
cgucauacugcugaacaagca

SEQ ID NO: 3252035 - RNA, 21 nt, SARS coronavirus
aguacauaucugaugccuuuu

SEQ ID NO: 3252036 - RNA, 21 nt, SARS coronavirus
cuguaguacagcgcugugcau

SEQ ID NO: 3252037 - RNA, 23 nt, SARS coronavirus
ggcuucugcuaaucuugcugcua

SEQ ID NO: 3252038 - RNA, 12 nt, SARS coronavirus
gcauuucuugcu

SEQ ID NO: 3252039 - RNA, 19 nt, SARS coronavirus
cuagcacacacuuugcuuu

SEQ ID NO: 3252040 - RNA, 16 nt, SARS coronavirus
uguucccucaggagau

SEQ ID NO: 3252041 - RNA, 14 nt, SARS coronavirus
uggaugacaaagau

SEQ ID NO: 3252042 - RNA, 15 nt, SARS coronavirus
cugcucacugaugau

SEQ ID NO: 3252043 - RNA, 20 nt, SARS coronavirus
gaaaaugcuacauucuucau

SEQ ID NO: 3252044 - RNA, 18 nt, SARS coronavirus
auacugcugaacaagcac

SEQ ID NO: 3252045 - RNA, 15 nt, SARS coronavirus
gcgccgaccccaagg

SEQ ID NO: 3252046 - RNA, 17 nt, SARS coronavirus
agcacacacuuugcuuu

SEQ ID NO: 3252047 - RNA, 21 nt, SARS coronavirus
caauggggcaaggccaaaaca

SEQ ID NO: 3252048 - RNA, 18 nt, SARS coronavirus
aggccagggcguuccaau

SEQ ID NO: 3252049 - RNA, 19 nt, SARS coronavirus
acuaaaagaaccuugccca

SEQ ID NO: 3252050 - RNA, 13 nt, SARS coronavirus
cugcaaguacugu

SEQ ID NO: 3252051 - RNA, 16 nt, SARS coronavirus
acaauaaauuugcacu

SEQ ID NO: 3252052 - RNA, 17 nt, SARS coronavirus
ggggaaauucuccugcu

SEQ ID NO: 3252053 - RNA, 16 nt, SARS coronavirus
caauuuacugcugcua

SEQ ID NO: 3252054 - RNA, 17 nt, SARS coronavirus
uaagaaaucugcugcug

SEQ ID NO: 3252055 - RNA, 19 nt, SARS coronavirus
acauuugguggacccacag

SEQ ID NO: 3252056 - RNA, 20 nt, SARS coronavirus
uuucaagugugcuaaaugau

SEQ ID NO: 3252057 - RNA, 20 nt, SARS coronavirus
cuaaucuugcugcuacuaaa

SEQ ID NO: 3252058 - RNA, 17 nt, SARS coronavirus
aaccuuuaagugcuaug

SEQ ID NO: 3252059 - RNA, 13 nt, SARS coronavirus
uaaauuggaugac

SEQ ID NO: 3252060 - RNA, 23 nt, SARS coronavirus
gcguacuucuuuuucuugcuuuc

SEQ ID NO: 3252061 - RNA, 20 nt, SARS coronavirus
ucacagcucucacucagcau

SEQ ID NO: 3252062 - RNA, 22 nt, SARS coronavirus
uugcugcuacuaaaaugucuga

SEQ ID NO: 3252063 - RNA, 18 nt, SARS coronavirus
uuguaagguacaacacua

SEQ ID NO: 3252064 - RNA, 17 nt, SARS coronavirus
agaugaccaaauuggcu

SEQ ID NO: 3252065 - RNA, 17 nt, SARS coronavirus
cucacucagcauggcaa

SEQ ID NO: 3252066 - RNA, 19 nt, SARS coronavirus
gcuugagagcaaaguuucu

SEQ ID NO: 3252067 - RNA, 14 nt, SARS coronavirus
uuaucauggagcca

SEQ ID NO: 3252068 - RNA, 19 nt, SARS coronavirus
ugcaagaucaguuucacca

SEQ ID NO: 3252069 - RNA, 21 nt, SARS coronavirus
acuugucauuggugcugugau

SEQ ID NO: 3252070 - RNA, 19 nt, SARS coronavirus
aaauauuagacauuucacc

SEQ ID NO: 3252071 - RNA, 21 nt, SARS coronavirus
uuacaacaacaucaacugcau

SEQ ID NO: 3252072 - RNA, 17 nt, SARS coronavirus
uuaacauugcuuaucau

SEQ ID NO: 3252073 - RNA, 20 nt, SARS coronavirus
acuucucauuguuuugacuu

SEQ ID NO: 3252074 - RNA, 20 nt, SARS coronavirus
cucguacccgcucaaugugg

SEQ ID NO: 3252075 - RNA, 12 nt, SARS coronavirus
aagcucagccuu

SEQ ID NO: 3252076 - RNA, 23 nt, SARS coronavirus
acgaguucgugguggugacggca

SEQ ID NO: 3252077 - RNA, 20 nt, SARS coronavirus
uuauaaauauagguaucuua

SEQ ID NO: 3252078 - RNA, 13 nt, SARS coronavirus
gaccacauuggca

SEQ ID NO: 3252079 - RNA, 15 nt, SARS coronavirus
uccagaugaccaaau

SEQ ID NO: 3252080 - RNA, 13 nt, SARS coronavirus
aacaagcuuguua

SEQ ID NO: 3252081 - RNA, 17 nt, SARS coronavirus
acagagaaaucaaaugu

SEQ ID NO: 3252082 - RNA, 19 nt, SARS coronavirus
uguauuccagacucaagca

SEQ ID NO: 3252083 - RNA, 17 nt, SARS coronavirus
caagucaaacaaaugua

SEQ ID NO: 3252084 - RNA, 22 nt, SARS coronavirus
ugacgcauacaaaacauuccca

SEQ ID NO: 3252085 - RNA, 16 nt, SARS coronavirus
uuaaauaaacgaacaa

SEQ ID NO: 3252086 - RNA, 16 nt, SARS coronavirus
ucaucagacaagagga

SEQ ID NO: 3252087 - RNA, 18 nt, SARS coronavirus
ugacaauaaccagaaugg

SEQ ID NO: 3252088 - RNA, 15 nt, SARS coronavirus
augucgacacuucuu

SEQ ID NO: 3252089 - RNA, 21 nt, SARS coronavirus
guuuccuauuccuagccugga

SEQ ID NO: 3252090 - RNA, 16 nt, SARS coronavirus
aaagagccaccacauu

SEQ ID NO: 3252091 - RNA, 16 nt, SARS coronavirus
ucaaccuauagaugua

SEQ ID NO: 3252092 - RNA, 23 nt, SARS coronavirus
ccaugaguggagcuucugcugau

SEQ ID NO: 3252093 - RNA, 15 nt, SARS coronavirus
ucacaucuuuugcuu

SEQ ID NO: 3252094 - RNA, 13 nt, SARS coronavirus
aacuacuuuguuu

SEQ ID NO: 3252095 - RNA, 18 nt, SARS coronavirus
ccaauaugguagcuuuug

SEQ ID NO: 3252096 - RNA, 12 nt, SARS coronavirus
auuacaaacauu

SEQ ID NO: 3252097 - RNA, 19 nt, SARS coronavirus
gugcucuaggaaagguuuu

SEQ ID NO: 3252098 - RNA, 23 nt, SARS coronavirus
cuagcggagguggugaaacugcc

SEQ ID NO: 3252099 - RNA, 14 nt, SARS coronavirus
gcaauccuaauaac

SEQ ID NO: 3252100 - RNA, 15 nt, SARS coronavirus
uaagcacaagaaagu

SEQ ID NO: 3252101 - RNA, 15 nt, SARS coronavirus
augccuguuucuaug

SEQ ID NO: 3252102 - RNA, 14 nt, SARS coronavirus
aaggucaccaaacu

SEQ ID NO: 3252103 - RNA, 23 nt, SARS coronavirus
ccaucaggaacauacgagggcaa

SEQ ID NO: 3252104 - RNA, 20 nt, SARS coronavirus
ucauuguugcugcucuagua

SEQ ID NO: 3252105 - RNA, 12 nt, SARS coronavirus
ccgcagagacaa

SEQ ID NO: 3252106 - RNA, 14 nt, SARS coronavirus
ccuaaaaaggacaa

SEQ ID NO: 3252107 - RNA, 21 nt, SARS coronavirus
aguacuagccaaaaaucuauu

SEQ ID NO: 3252108 - RNA, 22 nt, SARS coronavirus
aagcauuaaacacacuuguuaa

SEQ ID NO: 3252109 - RNA, 23 nt, SARS coronavirus
cauagucuacucuugugcagaau

SEQ ID NO: 3252110 - RNA, 17 nt, SARS coronavirus
auuucuuccauuuuauu

SEQ ID NO: 3252111 - RNA, 22 nt, SARS coronavirus
auucuacuggaaacaauguauu

SEQ ID NO: 3252112 - RNA, 15 nt, SARS coronavirus
acaaagauccacaau

SEQ ID NO: 3252113 - RNA, 14 nt, SARS coronavirus
aauuuuaauuuuaa

SEQ ID NO: 3252114 - RNA, 23 nt, SARS coronavirus
accuuuuaaggaugguauuuauu

SEQ ID NO: 3252115 - RNA, 17 nt, SARS coronavirus
agagcugccuauaugga

SEQ ID NO: 3252116 - RNA, 22 nt, SARS coronavirus
aacauggcugacuuaucaugga

SEQ ID NO: 3252117 - RNA, 17 nt, SARS coronavirus
gcugugaucauucgugg

SEQ ID NO: 3252118 - RNA, 11 nt, SARS coronavirus
uuaauuguuau

SEQ ID NO: 3252119 - RNA, 20 nt, SARS coronavirus
cuuugcuucaccauuaagag

SEQ ID NO: 3252120 - RNA, 20 nt, SARS coronavirus
aagcugcaagacguuguuaa

SEQ ID NO: 3252121 - RNA, 17 nt, SARS coronavirus
aagucagguaauuuuaa

SEQ ID NO: 3252122 - RNA, 13 nt, SARS coronavirus
acacucaugauga

SEQ ID NO: 3252123 - RNA, 23 nt, SARS coronavirus
acauuggccgcaaauugcacaau

SEQ ID NO: 3252124 - RNA, 18 nt, Human
cugacccucaucuuucuu

SEQ ID NO: 3252125 - RNA, 23 nt, Human
cugaggaagagggacuguucuuu

SEQ ID NO: 3252126 - RNA, 18 nt, Human
cugaggaagagggacugu

SEQ ID NO: 3252127 - RNA, 15 nt, Human
cuaggguggggagag

SEQ ID NO: 3252128 - RNA, 13 nt, Human
cuaguucugccag

SEQ ID NO: 3252129 - RNA, 16 nt, Human
cuaguucugccaggag

SEQ ID NO: 3252130 - RNA, 15 nt, Human
cuaguucugccagga

SEQ ID NO: 3252131 - RNA, 14 nt, Human
cuaguucugccagg

SEQ ID NO: 3252132 - RNA, 15 nt, Human
cuaggcuaggguggg

SEQ ID NO: 3252133 - RNA, 21 nt, Human
ccugucucccuccucugcccg

SEQ ID NO: 3252134 - RNA, 18 nt, Human
ccuggugguggcucggga

SEQ ID NO: 3252135 - RNA, 21 nt, Human
ccuggugguggcucgggaggc

SEQ ID NO: 3252136 - RNA, 18 nt, Human
ccugacccucaucuuucu

SEQ ID NO: 3252137 - RNA, 19 nt, Human
ccugacccucaucuuucuu

SEQ ID NO: 3252138 - RNA, 20 nt, Human
ccugccaucauguuuacaga

SEQ ID NO: 3252139 - RNA, 18 nt, Human
ccugccaucauguuuaca

SEQ ID NO: 3252140 - RNA, 12 nt, Human
ccauucuuuccc

SEQ ID NO: 3252141 - RNA, 20 nt, Human
ccauucuuucccaacaccuc

SEQ ID NO: 3252142 - RNA, 14 nt, Human
ccauucuuucccaa

SEQ ID NO: 3252143 - RNA, 19 nt, Human
cauccauggggcugauugu

SEQ ID NO: 3252144 - RNA, 15 nt, Human
caggccugacucuca

SEQ ID NO: 3252145 - RNA, 18 nt, Human
cagucugagagaggccau

SEQ ID NO: 3252146 - RNA, 17 nt, Human
cagucugagagaggcca

SEQ ID NO: 3252147 - RNA, 14 nt, Human
cuuugaccuguugg

SEQ ID NO: 3252148 - RNA, 19 nt, Human
cuucuaguucugccaggag

SEQ ID NO: 3252149 - RNA, 16 nt, Human
cuucuaguucugccag

SEQ ID NO: 3252150 - RNA, 18 nt, Human
cuucuaguucugccagga

SEQ ID NO: 3252151 - RNA, 17 nt, Human
cuucuaguucugccagg

SEQ ID NO: 3252152 - RNA, 18 nt, Human
cugggaauaagugccagg

SEQ ID NO: 3252153 - RNA, 16 nt, Human
cuggggaugucucuca

SEQ ID NO: 3252154 - RNA, 16 nt, Human
cugugccuuuugccau

SEQ ID NO: 3252155 - RNA, 20 nt, Human
cugugccuugucacgccaga

SEQ ID NO: 3252156 - RNA, 15 nt, Human
cuuaggccagcacca

SEQ ID NO: 3252157 - RNA, 18 nt, Human
gcauuucccuuccuuccu

SEQ ID NO: 3252158 - RNA, 15 nt, Human
gacuauggagcugag

SEQ ID NO: 3252159 - RNA, 19 nt, Human
gacccucaucuuucuucca

SEQ ID NO: 3252160 - RNA, 15 nt, Human
gacccucaucuuucu

SEQ ID NO: 3252161 - RNA, 14 nt, Human
ggcucagagugggg

SEQ ID NO: 3252162 - RNA, 20 nt, Human
ggcucagaggguguccugca

SEQ ID NO: 3252163 - RNA, 22 nt, Human
gggacaccuaggcuaggguggg

SEQ ID NO: 3252164 - RNA, 15 nt, Human
ggcagggcugaggcc

SEQ ID NO: 3252165 - RNA, 15 nt, Human
ggcacuggggcaggg

SEQ ID NO: 3252166 - RNA, 22 nt, Human
ggugcuucuaguucugccagga

SEQ ID NO: 3252167 - RNA, 18 nt, Human
ggguggggagagacgggc

SEQ ID NO: 3252168 - RNA, 14 nt, Human
ggguggggagagac

SEQ ID NO: 3252169 - RNA, 13 nt, Human
ggguggggagaga

SEQ ID NO: 3252170 - RNA, 18 nt, Human
gggggcgcggcugggagg

SEQ ID NO: 3252171 - RNA, 17 nt, Human
ggggccgggggcagucu

SEQ ID NO: 3252172 - RNA, 15 nt, Human
guagagccagagguc

SEQ ID NO: 3252173 - RNA, 20 nt, Human
guaauuuaaaauugugaugu

SEQ ID NO: 3252174 - RNA, 19 nt, Human
guaauuuaaaauugugaug

SEQ ID NO: 3252175 - RNA, 23 nt, Human
guaauuuaaaauugugauguguc

SEQ ID NO: 3252176 - RNA, 17 nt, Human
gcuucuaguucugccag

SEQ ID NO: 3252177 - RNA, 16 nt, Human
gcuucuaguucugcca

SEQ ID NO: 3252178 - RNA, 20 nt, Human
ggaacugcugggcuuggcag

SEQ ID NO: 3252179 - RNA, 15 nt, Human
ggaacugcugggcuu

SEQ ID NO: 3252180 - RNA, 12 nt, Human
ggaagugugggu

SEQ ID NO: 3252181 - RNA, 22 nt, Human
ggaagugugggucugugugugu

SEQ ID NO: 3252182 - RNA, 21 nt, Human
ggaagugugggucugugugug

SEQ ID NO: 3252183 - RNA, 23 nt, Human
gccuccauccuacccccugugcc

SEQ ID NO: 3252184 - RNA, 19 nt, Human
gcucaggaaccgaggcagg

SEQ ID NO: 3252185 - RNA, 16 nt, Human
gcucaggaaccgaggc

SEQ ID NO: 3252186 - RNA, 21 nt, Human
gcucaggaaccgaggcaggga

SEQ ID NO: 3252187 - RNA, 20 nt, Human
gcucaggaaccgaggcaggg

SEQ ID NO: 3252188 - RNA, 22 nt, Human
gcuaauucuuugaccuguuggg

SEQ ID NO: 3252189 - RNA, 16 nt, Human
augugacucuuuccaa

SEQ ID NO: 3252190 - RNA, 12 nt, Human
augugacucuuu

SEQ ID NO: 3252191 - RNA, 21 nt, Human
augugacucuuuccaaccggc

SEQ ID NO: 3252192 - RNA, 16 nt, Human
augucaguauguggaa

SEQ ID NO: 3252193 - RNA, 16 nt, Human
augguucucaggccug

SEQ ID NO: 3252194 - RNA, 20 nt, Human
auggggauagauguguggac

SEQ ID NO: 3252195 - RNA, 16 nt, Human
aucaggccauuguccc

SEQ ID NO: 3252196 - RNA, 13 nt, Human
aucaggccauugu

SEQ ID NO: 3252197 - RNA, 16 nt, Human
auccuacccccugugc

SEQ ID NO: 3252198 - RNA, 14 nt, Human
auccuacccccugu

SEQ ID NO: 3252199 - RNA, 13 nt, Human
uucugccaggaga

SEQ ID NO: 3252200 - RNA, 19 nt, Human
auccauagcaccuccacau

SEQ ID NO: 3252201 - RNA, 20 nt, Human
uugcuaugagcuggggaugu

SEQ ID NO: 3252202 - RNA, 16 nt, Human
auuucccuuccuuccu

SEQ ID NO: 3252203 - RNA, 18 nt, Human
auuuguaaauuuauguga

SEQ ID NO: 3252204 - RNA, 19 nt, Human
auuuguaaauuuaugugau

SEQ ID NO: 3252205 - RNA, 12 nt, Human
auuuuucucaug

SEQ ID NO: 3252206 - RNA, 12 nt, Human
auuccagaggaa

SEQ ID NO: 3252207 - RNA, 19 nt, Human
agccugacccucaucuuuc

SEQ ID NO: 3252208 - RNA, 15 nt, Human
agcuggggaugucuc

SEQ ID NO: 3252209 - RNA, 17 nt, Human
ugccuugucacgccaga

SEQ ID NO: 3252210 - RNA, 19 nt, Human
ugccuugugaaggaauuau

SEQ ID NO: 3252211 - RNA, 20 nt, Human
aggcucagaggguguccugc

SEQ ID NO: 3252212 - RNA, 19 nt, Human
aggcucagaggguguccug

SEQ ID NO: 3252213 - RNA, 18 nt, Human
aggcucagaggguguccu

SEQ ID NO: 3252214 - RNA, 18 nt, Human
aggcgaagcguuguccuc

SEQ ID NO: 3252215 - RNA, 14 nt, Human
aggccauucuuucc

SEQ ID NO: 3252216 - RNA, 22 nt, Human
uggcacagccuggcuguggccu

SEQ ID NO: 3252217 - RNA, 20 nt, Human
uggcauccagagucccugcc

SEQ ID NO: 3252218 - RNA, 22 nt, Human
uggcauccagagucccugccug

SEQ ID NO: 3252219 - RNA, 21 nt, Human
uggcauccagagucccugccu

SEQ ID NO: 3252220 - RNA, 16 nt, Human
aggccugacucucagc

SEQ ID NO: 3252221 - RNA, 14 nt, Human
uggaaguguggguc

SEQ ID NO: 3252222 - RNA, 13 nt, Human
uggaagugugggu

SEQ ID NO: 3252223 - RNA, 17 nt, Human
uggcuguggcauccaga

SEQ ID NO: 3252224 - RNA, 20 nt, Human
uggcuguggccuaaccugcc

SEQ ID NO: 3252225 - RNA, 16 nt, Human
agugggguagguuggg

SEQ ID NO: 3252226 - RNA, 18 nt, Human
uguguguuguguguggga

SEQ ID NO: 3252227 - RNA, 9 nt, Human
aguguguaa

SEQ ID NO: 3252228 - RNA, 21 nt, Human
agugauuuuuaugccaccuga

SEQ ID NO: 3252229 - RNA, 20 nt, Human
agugauuuuuaugccaccug

SEQ ID NO: 3252230 - RNA, 16 nt, Human
agugauuuuuaugcca

SEQ ID NO: 3252231 - RNA, 14 nt, Human
agugaggaugucug

SEQ ID NO: 3252232 - RNA, 18 nt, Human
agugccaggauggaauga

SEQ ID NO: 3252233 - RNA, 20 nt, Human
uguagugauuuuuaugccac

SEQ ID NO: 3252234 - RNA, 16 nt, Human
aguccaucagccucca

SEQ ID NO: 3252235 - RNA, 14 nt, Human
aguauuugugggga

SEQ ID NO: 3252236 - RNA, 11 nt, Human
auagaugugug

SEQ ID NO: 3252237 - RNA, 13 nt, Human
auagaugugugga

SEQ ID NO: 3252238 - RNA, 12 nt, Human
auagaugugugg

SEQ ID NO: 3252239 - RNA, 14 nt, Human
auagauguguggac

SEQ ID NO: 3252240 - RNA, 19 nt, Human
auagaaggcuauggggaua

SEQ ID NO: 3252241 - RNA, 10 nt, Human
uuaugugugu

SEQ ID NO: 3252242 - RNA, 14 nt, Human
uuaugugugugugu

SEQ ID NO: 3252243 - RNA, 12 nt, Human
uuaugugugugu

SEQ ID NO: 3252244 - RNA, 18 nt, Human
auaaucacaacccuucag

SEQ ID NO: 3252245 - RNA, 22 nt, Human
ugagggugacuauggagcugag

SEQ ID NO: 3252246 - RNA, 17 nt, Human
ugaggaagagggacugu

SEQ ID NO: 3252247 - RNA, 14 nt, Human
agacuuaucaacau

SEQ ID NO: 3252248 - RNA, 11 nt, Human
ucuggcccuau

SEQ ID NO: 3252249 - RNA, 18 nt, Human
accugaauaaagaaugaa

SEQ ID NO: 3252250 - RNA, 22 nt, Human
ucaugauagaaggcuaugggga

SEQ ID NO: 3252251 - RNA, 18 nt, Human
accagagaaaaagggagg

SEQ ID NO: 3252252 - RNA, 20 nt, Human
accagagaaaaagggagggg

SEQ ID NO: 3252253 - RNA, 22 nt, Human
ucagauuugccuuauuggcagc

SEQ ID NO: 3252254 - RNA, 22 nt, Human
acccagcuaugguucucucgca

SEQ ID NO: 3252255 - RNA, 16 nt, Human
ucagccccgcguggaa

SEQ ID NO: 3252256 - RNA, 18 nt, Human
ucaggaaccgaggcaggg

SEQ ID NO: 3252257 - RNA, 17 nt, Human
ucaggaaccgaggcagg

SEQ ID NO: 3252258 - RNA, 15 nt, Human
ucaggccgaaggagg

SEQ ID NO: 3252259 - RNA, 16 nt, Human
acucaugugacucuuu

SEQ ID NO: 3252260 - RNA, 15 nt, Human
acucaugugacucuu

SEQ ID NO: 3252261 - RNA, 17 nt, Human
acucaugugacucuuuc

SEQ ID NO: 3252262 - RNA, 11 nt, Human
uccucagcccc

SEQ ID NO: 3252263 - RNA, 14 nt, Human
acuggggcaggggc

SEQ ID NO: 3252264 - RNA, 23 nt, Human
ucgagaucccaacacugccagca

SEQ ID NO: 3252265 - RNA, 22 nt, Human
ucgagaucccaacacugccagc

SEQ ID NO: 3252266 - RNA, 20 nt, Human
uccugcaccggggccugggc

SEQ ID NO: 3252267 - RNA, 21 nt, Human
uccugcaccggggccugggca

SEQ ID NO: 3252268 - RNA, 21 nt, Human
guugggagaaugucaguaugu

SEQ ID NO: 3252269 - RNA, 14 nt, Human
guugggagaauguc

SEQ ID NO: 3252270 - RNA, 12 nt, Human
guguuuaugugu

SEQ ID NO: 3252271 - RNA, 16 nt, Human
guguuuaugugugugu

SEQ ID NO: 3252272 - RNA, 20 nt, Human
guccugcaccggggccuggg

SEQ ID NO: 3252273 - RNA, 19 nt, Human
guccugcaccggggccugg

SEQ ID NO: 3252274 - RNA, 15 nt, Human
guccugcaccggggc

SEQ ID NO: 3252275 - RNA, 18 nt, Human
guggcacuggggcagggg

SEQ ID NO: 3252276 - RNA, 17 nt, Human
guggcacuggggcaggg

SEQ ID NO: 3252277 - RNA, 14 nt, Human
gugggggucugugu

SEQ ID NO: 3252278 - RNA, 16 nt, Human
gugggggucugugugu

SEQ ID NO: 3252279 - RNA, 15 nt, Human
gugggggucugugug

SEQ ID NO: 3252280 - RNA, 15 nt, Human
guguuguguguggga

SEQ ID NO: 3252281 - RNA, 14 nt, Human
guguguguaugugg

SEQ ID NO: 3252282 - RNA, 17 nt, Human
guguguguugugugugg

SEQ ID NO: 3252283 - RNA, 16 nt, Human
gugugugggagugugu

SEQ ID NO: 3252284 - RNA, 13 nt, Human
guguguguaugug

SEQ ID NO: 3252285 - RNA, 20 nt, Human
acaccuaggcuagggugggg

SEQ ID NO: 3252286 - RNA, 23 nt, Human
acaccuaggcuaggguggggaga

SEQ ID NO: 3252287 - RNA, 14 nt, Human
uaguucugccagga

SEQ ID NO: 3252288 - RNA, 13 nt, Human
uaguucugccagg

SEQ ID NO: 3252289 - RNA, 12 nt, Human
acagccuggcug

SEQ ID NO: 3252290 - RNA, 19 nt, Human
uauggggauagaugugugg

SEQ ID NO: 3252291 - RNA, 18 nt, Human
uauggggauagaugugug

SEQ ID NO: 3252292 - RNA, 17 nt, Human
uauggggauagaugugu

SEQ ID NO: 3252293 - RNA, 21 nt, Human
acagacacucccacuuggcau

SEQ ID NO: 3252294 - RNA, 23 nt, Human
uauguguguguguuguguguggg

SEQ ID NO: 3252295 - RNA, 11 nt, Human
uaugugugugu

SEQ ID NO: 3252296 - RNA, 22 nt, Human
uauguguguguguugugugugg

SEQ ID NO: 3252297 - RNA, 14 nt, Human
uauguguguguguu

SEQ ID NO: 3252298 - RNA, 22 nt, Human
aauucuuugaccuguugggagu

SEQ ID NO: 3252299 - RNA, 18 nt, Human
aauucuuugaccuguugg

SEQ ID NO: 3252300 - RNA, 15 nt, Human
aaugucaguaugugg

SEQ ID NO: 3252301 - RNA, 13 nt, Human
aaugucaguaugu

SEQ ID NO: 3252302 - RNA, 23 nt, Human
accugccgagaguccaucagccu

SEQ ID NO: 3252303 - RNA, 16 nt, Human
accugccgagagucca

SEQ ID NO: 3252304 - RNA, 12 nt, Human
acugccagcauu

SEQ ID NO: 3252305 - RNA, 13 nt, Human
acccccugugccu

SEQ ID NO: 3252306 - RNA, 14 nt, Human
agccgggagccuga

SEQ ID NO: 3252307 - RNA, 20 nt, Human
agaggacaguauuugugggg

SEQ ID NO: 3252308 - RNA, 22 nt, Human
agcuccuuaaggcucuuuugua

SEQ ID NO: 3252309 - RNA, 18 nt, Human
agcuccuuaaggcucuuu

SEQ ID NO: 3252310 - RNA, 14 nt, Human
agcugagcaggugu

SEQ ID NO: 3252311 - RNA, 17 nt, Human
agcugcuccccacguca

SEQ ID NO: 3252312 - RNA, 14 nt, Human
agcugcuccccacg

SEQ ID NO: 3252313 - RNA, 21 nt, Human
aggagucccugccaucauguu

SEQ ID NO: 3252314 - RNA, 17 nt, Human
aggggccgggggcaguc

SEQ ID NO: 3252315 - RNA, 14 nt, Human
aucagccugugcca

SEQ ID NO: 3252316 - RNA, 19 nt, Human
augagcuccuuaaggcucu

SEQ ID NO: 3252317 - RNA, 16 nt, Human
aguggcuggaucugug

SEQ ID NO: 3252318 - RNA, 18 nt, Human
aguucauaaauuuauggu

SEQ ID NO: 3252319 - RNA, 16 nt, Human
caccccgacuuuuguu

SEQ ID NO: 3252320 - RNA, 16 nt, Human
uuggcagcucuacucu

SEQ ID NO: 3252321 - RNA, 14 nt, Human
uuuaugccaccuga

SEQ ID NO: 3252322 - RNA, 20 nt, Human
uuuacagaggacaguauuug

SEQ ID NO: 3252323 - RNA, 18 nt, Human
uuguuuagaagaagugug

SEQ ID NO: 3252324 - RNA, 15 nt, Human
uuguuuagaagaagu

SEQ ID NO: 3252325 - RNA, 16 nt, Human
uuuaaaauugugaugu

SEQ ID NO: 3252326 - RNA, 16 nt, Human
uuaugccaccugaaua

SEQ ID NO: 3252327 - RNA, 13 nt, Human
uuaugccaccuga

SEQ ID NO: 3252328 - RNA, 19 nt, Human
uguuuagaagaaguguguc

SEQ ID NO: 3252329 - RNA, 16 nt, Human
uguuuagaagaagugu

SEQ ID NO: 3252330 - RNA, 12 nt, Human
uuaacucagucu

SEQ ID NO: 3252331 - RNA, 11 nt, Human
uuuguggggag

SEQ ID NO: 3252332 - RNA, 23 nt, Human
uaugagcuggggaugucucucau

SEQ ID NO: 3252333 - RNA, 16 nt, Human
uaggcuagggugggga

SEQ ID NO: 3252334 - RNA, 15 nt, Human
uaggcuagggugggg

SEQ ID NO: 3252335 - RNA, 23 nt, Human
uccugucucccuccucugcccgg

SEQ ID NO: 3252336 - RNA, 15 nt, Human
uccugucucccuccu

SEQ ID NO: 3252337 - RNA, 17 nt, Human
uccuacccccugugccu

SEQ ID NO: 3252338 - RNA, 16 nt, Human
uccuacccccugugcc

SEQ ID NO: 3252339 - RNA, 15 nt, Human
uccuacccccugugc

SEQ ID NO: 3252340 - RNA, 13 nt, Human
uccuacccccugu

SEQ ID NO: 3252341 - RNA, 14 nt, Human
uccaaacaggcuca

SEQ ID NO: 3252342 - RNA, 22 nt, Human
ucagucuuuaaucugagaggcc

SEQ ID NO: 3252343 - RNA, 18 nt, Human
uccagagucccugccugg

SEQ ID NO: 3252344 - RNA, 15 nt, Human
uccagagucccugcc

SEQ ID NO: 3252345 - RNA, 21 nt, Human
uccagagucccugccuggacc

SEQ ID NO: 3252346 - RNA, 20 nt, Human
uccagagucccugccuggac

SEQ ID NO: 3252347 - RNA, 19 nt, Human
uccagagucccugccugga

SEQ ID NO: 3252348 - RNA, 21 nt, Human
ugagcuccuuaaggcucuuuu

SEQ ID NO: 3252349 - RNA, 19 nt, Human
ugagcuccuuaaggcucuu

SEQ ID NO: 3252350 - RNA, 20 nt, Human
ugagcuggggaugucucuca

SEQ ID NO: 3252351 - RNA, 17 nt, Human
ugacauacauccaacau

SEQ ID NO: 3252352 - RNA, 18 nt, Human
ugggcaggagggaggugc

SEQ ID NO: 3252353 - RNA, 16 nt, Human
ugggcaggagggaggu

SEQ ID NO: 3252354 - RNA, 15 nt, Human
ugggcaggagggagg

SEQ ID NO: 3252355 - RNA, 13 nt, Human
ugggcaggaggga

SEQ ID NO: 3252356 - RNA, 22 nt, Human
ugggagugaggaugucugggcc

SEQ ID NO: 3252357 - RNA, 11 nt, Human
ugggagugugu

SEQ ID NO: 3252358 - RNA, 20 nt, Human
uggggaguuuaggguggggg

SEQ ID NO: 3252359 - RNA, 20 nt, Human
uggggauagauguguggaca

SEQ ID NO: 3252360 - RNA, 18 nt, Human
uggggauagaugugugga

SEQ ID NO: 3252361 - RNA, 17 nt, Human
uggggauagaugugugg

SEQ ID NO: 3252362 - RNA, 16 nt, Human
uggggauagaugugug

SEQ ID NO: 3252363 - RNA, 14 nt, Human
ugggggucugugug

SEQ ID NO: 3252364 - RNA, 19 nt, Human
uggaucugugaggggcucu

SEQ ID NO: 3252365 - RNA, 15 nt, Human
uggaucugugagggg

SEQ ID NO: 3252366 - RNA, 15 nt, Human
uggaccagccucucc

SEQ ID NO: 3252367 - RNA, 20 nt, Human
uggcuccauugguguugaca

SEQ ID NO: 3252368 - RNA, 20 nt, Human
gugauuuuuaugccaccuga

SEQ ID NO: 3252369 - RNA, 19 nt, Human
gugauuuuuaugccaccug

SEQ ID NO: 3252370 - RNA, 17 nt, Human
gugauuuuuaugccacc

SEQ ID NO: 3252371 - RNA, 16 nt, Human
gugauuuuuaugccac

SEQ ID NO: 3252372 - RNA, 15 nt, Human
gugaggaugucuggg

SEQ ID NO: 3252373 - RNA, 12 nt, Human
gugacucuuucc

SEQ ID NO: 3252374 - RNA, 19 nt, Human
gugccuugucacgccagac

SEQ ID NO: 3252375 - RNA, 20 nt, Human
gugcuucuaguucugccagg

SEQ ID NO: 3252376 - RNA, 22 nt, Human
gugcuucuaguucugccaggag

SEQ ID NO: 3252377 - RNA, 21 nt, Human
gugcuucuaguucugccagga

SEQ ID NO: 3252378 - RNA, 18 nt, Human
guggcucgggaggcgaag

SEQ ID NO: 3252379 - RNA, 16 nt, Human
guggcucgggaggcga

SEQ ID NO: 3252380 - RNA, 14 nt, Human
guggcauccagagu

SEQ ID NO: 3252381 - RNA, 20 nt, Human
gucccagaaugccuccugca

SEQ ID NO: 3252382 - RNA, 14 nt, Human
gucacgccagacuu

SEQ ID NO: 3252383 - RNA, 23 nt, Human
gucccugccuggaccagccucuc

SEQ ID NO: 3252384 - RNA, 22 nt, Human
gucccugccuggaccagccucu

SEQ ID NO: 3252385 - RNA, 14 nt, Human
gucccugccuggac

SEQ ID NO: 3252386 - RNA, 21 nt, Human
gucccugccuggaccagccuc

SEQ ID NO: 3252387 - RNA, 20 nt, Human
gucccugccuggaccagccu

SEQ ID NO: 3252388 - RNA, 12 nt, Human
guccucagcccc

SEQ ID NO: 3252389 - RNA, 13 nt, Human
ggggauagaugug

SEQ ID NO: 3252390 - RNA, 18 nt, Human
ggggaguuuagggugggg

SEQ ID NO: 3252391 - RNA, 14 nt, Human
gggcgcggcuggga

SEQ ID NO: 3252392 - RNA, 19 nt, Human
gguugggagaaugucagua

SEQ ID NO: 3252393 - RNA, 22 nt, Human
ggaaggaucccaugagcuccuu

SEQ ID NO: 3252394 - RNA, 23 nt, Human
ggaagggacaccaagccuuggcu

SEQ ID NO: 3252395 - RNA, 22 nt, Human
ggagaaugucaguauguggaag

SEQ ID NO: 3252396 - RNA, 22 nt, Human
gcuuuguggcacuggggcaggg

SEQ ID NO: 3252397 - RNA, 14 nt, Human
gcuuuguggcacug

SEQ ID NO: 3252398 - RNA, 20 nt, Human
ggccauucuuucccaacacc

SEQ ID NO: 3252399 - RNA, 17 nt, Human
ggauggaaugauggguc

SEQ ID NO: 3252400 - RNA, 12 nt, Human
ggcccugugccu

SEQ ID NO: 3252401 - RNA, 22 nt, Human
ggccuaaccugccgagagucca

SEQ ID NO: 3252402 - RNA, 21 nt, Human
ggccuaaccugccgagagucc

SEQ ID NO: 3252403 - RNA, 16 nt, Human
ggcuaggguggggaga

SEQ ID NO: 3252404 - RNA, 21 nt, Human
ggcuauggggauagaugugug

SEQ ID NO: 3252405 - RNA, 13 nt, Human
ggccugggcagga

SEQ ID NO: 3252406 - RNA, 14 nt, Human
ggccugggcaggag

SEQ ID NO: 3252407 - RNA, 16 nt, Human
ggcgcggcugggagga

SEQ ID NO: 3252408 - RNA, 21 nt, Human
gcucagaggguguccugcacc

SEQ ID NO: 3252409 - RNA, 17 nt, Human
gcuaugagcuggggaug

SEQ ID NO: 3252410 - RNA, 23 nt, Human
gcccuggugguggcucgggaggc

SEQ ID NO: 3252411 - RNA, 20 nt, Human
gagaucccaacacugccagc

SEQ ID NO: 3252412 - RNA, 19 nt, Human
gagaucccaacacugccag

SEQ ID NO: 3252413 - RNA, 18 nt, Human
gagaucccaacacugcca

SEQ ID NO: 3252414 - RNA, 17 nt, Human
gagaaugucaguaugug

SEQ ID NO: 3252415 - RNA, 13 nt, Human
gagagacgggccc

SEQ ID NO: 3252416 - RNA, 19 nt, Human
gaaugucaguauguggaag

SEQ ID NO: 3252417 - RNA, 13 nt, Human
gaaugucaguaug

SEQ ID NO: 3252418 - RNA, 18 nt, Human
gaaugucaguauguggaa

SEQ ID NO: 3252419 - RNA, 16 nt, Human
gaaugucaguaugugg

SEQ ID NO: 3252420 - RNA, 14 nt, Human
gaccagccucucca

SEQ ID NO: 3252421 - RNA, 13 nt, Human
gaguguguaauuu

SEQ ID NO: 3252422 - RNA, 22 nt, Human
gauagauguguggacacauugg

SEQ ID NO: 3252423 - RNA, 14 nt, Human
gauagaugugugga

SEQ ID NO: 3252424 - RNA, 19 nt, Human
gagucccugccuggaccag

SEQ ID NO: 3252425 - RNA, 23 nt, Human
gagucccugccuggaccagccuc

SEQ ID NO: 3252426 - RNA, 21 nt, Human
gagucccugccuggaccagcc

SEQ ID NO: 3252427 - RNA, 13 nt, Human
gaggguguccugc

SEQ ID NO: 3252428 - RNA, 14 nt, Human
gagggggagagggc

SEQ ID NO: 3252429 - RNA, 14 nt, Human
gaggcagggaagga

SEQ ID NO: 3252430 - RNA, 21 nt, Human
gaggcgaagcguuguccucag

SEQ ID NO: 3252431 - RNA, 20 nt, Human
gaggcgaagcguuguccuca

SEQ ID NO: 3252432 - RNA, 22 nt, Human
gaggccucucauuccagaggaa

SEQ ID NO: 3252433 - RNA, 23 nt, Human
gcacuggggcaggggccgggggc

SEQ ID NO: 3252434 - RNA, 18 nt, Human
gcacuggggcaggggccg

SEQ ID NO: 3252435 - RNA, 15 nt, Human
gcacuggggcagggg

SEQ ID NO: 3252436 - RNA, 23 nt, Human
gauugcaggagucccugccauca

SEQ ID NO: 3252437 - RNA, 21 nt, Human
gaugggucaguuguaucagca

SEQ ID NO: 3252438 - RNA, 15 nt, Human
gaugggucaguugua

SEQ ID NO: 3252439 - RNA, 22 nt, Human
cuuucuuccaaacaggcucaga

SEQ ID NO: 3252440 - RNA, 13 nt, Human
cuugucacgccag

SEQ ID NO: 3252441 - RNA, 16 nt, Human
cuugucacgccagacu

SEQ ID NO: 3252442 - RNA, 14 nt, Human
cuuuguggcacugg

SEQ ID NO: 3252443 - RNA, 17 nt, Human
cuguguguuuaugugug

SEQ ID NO: 3252444 - RNA, 16 nt, Human
cuguguguuuaugugu

SEQ ID NO: 3252445 - RNA, 21 nt, Human
cuguguguguguauguggggg

SEQ ID NO: 3252446 - RNA, 19 nt, Human
cugugaggggcucucucau

SEQ ID NO: 3252447 - RNA, 21 nt, Human
cugucucccuccucugcccgg

SEQ ID NO: 3252448 - RNA, 11 nt, Human
cugcugggcuu

SEQ ID NO: 3252449 - RNA, 22 nt, Human
cugccgagaguccaucagccuc

SEQ ID NO: 3252450 - RNA, 23 nt, Human
cugccgagaguccaucagccucc

SEQ ID NO: 3252451 - RNA, 17 nt, Human
cuggagguuuguuuaga

SEQ ID NO: 3252452 - RNA, 12 nt, Human
cuggagguuugu

SEQ ID NO: 3252453 - RNA, 18 nt, Human
cuggaccagccucuccac

SEQ ID NO: 3252454 - RNA, 14 nt, Human
cuggaccagccucu

SEQ ID NO: 3252455 - RNA, 21 nt, Human
cuggccaguggcuggaucugu

SEQ ID NO: 3252456 - RNA, 15 nt, Human
cccacggcuccucga

SEQ ID NO: 3252457 - RNA, 15 nt, Human
cccacgucagcuggg

SEQ ID NO: 3252458 - RNA, 14 nt, Human
cccaacacugccag

SEQ ID NO: 3252459 - RNA, 16 nt, Human
cccaacacugccagca

SEQ ID NO: 3252460 - RNA, 15 nt, Human
cccaacacugccagc

SEQ ID NO: 3252461 - RNA, 14 nt, Human
ccccugugccuugu

SEQ ID NO: 3252462 - RNA, 22 nt, Human
cccaugagcuccuuaaggcucu

SEQ ID NO: 3252463 - RNA, 15 nt, Human
cccaugagcuccuua

SEQ ID NO: 3252464 - RNA, 14 nt, Human
cccaugagcuccuu

SEQ ID NO: 3252465 - RNA, 13 nt, Human
cccaugagcuccu

SEQ ID NO: 3252466 - RNA, 20 nt, Human
ccggggccugggcaggaggg

SEQ ID NO: 3252467 - RNA, 21 nt, Human
ccgggggcagucugagagagg

SEQ ID NO: 3252468 - RNA, 21 nt, Human
ccgagaguccaucagccucca

SEQ ID NO: 3252469 - RNA, 20 nt, Human
ccgagaguccaucagccucc

SEQ ID NO: 3252470 - RNA, 13 nt, Human
ccuaaccugccga

SEQ ID NO: 3252471 - RNA, 12 nt, Human
ccuaaccugccg

SEQ ID NO: 3252472 - RNA, 23 nt, Human
ccguggcuguggcauccagaguc

SEQ ID NO: 3252473 - RNA, 21 nt, Human
cgaagcguuguccucagcccc

SEQ ID NO: 3252474 - RNA, 17 nt, Human
cgaagcguuguccucag

SEQ ID NO: 3252475 - RNA, 16 nt, Human
cgaagcguuguccuca

SEQ ID NO: 3252476 - RNA, 15 nt, Human
cgaagcguuguccuc

SEQ ID NO: 3252477 - RNA, 14 nt, Human
ccuuugucccagaa

SEQ ID NO: 3252478 - RNA, 17 nt, Human
ccugugccuuuugccau

SEQ ID NO: 3252479 - RNA, 19 nt, Human
cgggacaccuaggcuaggg

SEQ ID NO: 3252480 - RNA, 18 nt, Human
cgggacaccuaggcuagg

SEQ ID NO: 3252481 - RNA, 16 nt, Human
cgcggcugggaggagg

SEQ ID NO: 3252482 - RNA, 12 nt, Human
cgcggcugggag

SEQ ID NO: 3252483 - RNA, 11 nt, Human
cgcggcuggga

SEQ ID NO: 3252484 - RNA, 15 nt, Human
ccugcaccggggccu

SEQ ID NO: 3252485 - RNA, 17 nt, Human
ccugcaccggggccugg

SEQ ID NO: 3252486 - RNA, 19 nt, Human
ccugaagagaagggcaggg

SEQ ID NO: 3252487 - RNA, 14 nt, Human
ccugccgagagucc

SEQ ID NO: 3252488 - RNA, 23 nt, Human
ccugccgagaguccaucagccuc

SEQ ID NO: 3252489 - RNA, 22 nt, Human
ccugccgagaguccaucagccu

SEQ ID NO: 3252490 - RNA, 16 nt, Human
cuccacucaugugacu

SEQ ID NO: 3252491 - RNA, 22 nt, Human
cuccacucaugugacucuuucc

SEQ ID NO: 3252492 - RNA, 20 nt, Human
cuccccacgucagcugggac

SEQ ID NO: 3252493 - RNA, 17 nt, Human
cucaggaaccgaggcag

SEQ ID NO: 3252494 - RNA, 19 nt, Human
cucaggaaccgaggcaggg

SEQ ID NO: 3252495 - RNA, 18 nt, Human
cucaggaaccgaggcagg

SEQ ID NO: 3252496 - RNA, 16 nt, Human
cucagaggguguccug

SEQ ID NO: 3252497 - RNA, 17 nt, Human
cucagccccgcguggaa

SEQ ID NO: 3252498 - RNA, 22 nt, Human
cuacucuggagguuuguuuaga

SEQ ID NO: 3252499 - RNA, 21 nt, Human
cuauggggauagaugugugga

SEQ ID NO: 3252500 - RNA, 20 nt, Human
cuauggggauagaugugugg

SEQ ID NO: 3252501 - RNA, 19 nt, Human
cuauggggauagaugugug

SEQ ID NO: 3252502 - RNA, 22 nt, Human
cugagagaggccauucuuuccc

SEQ ID NO: 3252503 - RNA, 21 nt, Human
cugagagaggccauucuuucc

SEQ ID NO: 3252504 - RNA, 14 nt, Human
cugagagaggccau

SEQ ID NO: 3252505 - RNA, 13 nt, Human
cugagagaggcca

SEQ ID NO: 3252506 - RNA, 12 nt, Human
cugagaggccac

SEQ ID NO: 3252507 - RNA, 15 nt, Human
cucgugucuggcaca

SEQ ID NO: 3252508 - RNA, 14 nt, Human
cucaugugacucuu

SEQ ID NO: 3252509 - RNA, 18 nt, Human
cucaugugacucuuucca

SEQ ID NO: 3252510 - RNA, 22 nt, Human
cuaauucuuugaccuguuggga

SEQ ID NO: 3252511 - RNA, 21 nt, Human
cuaauucuuugaccuguuggg

SEQ ID NO: 3252512 - RNA, 19 nt, Human
auucuuugaccuguuggga

SEQ ID NO: 3252513 - RNA, 18 nt, Human
caacaccucuuggggagu

SEQ ID NO: 3252514 - RNA, 13 nt, Human
cacuggggcaggg

SEQ ID NO: 3252515 - RNA, 15 nt, Human
cacuggggcaggggc

SEQ ID NO: 3252516 - RNA, 18 nt, Human
cagggcugaggccucuca

SEQ ID NO: 3252517 - RNA, 16 nt, Human
cagggcugaggccucu

SEQ ID NO: 3252518 - RNA, 17 nt, Human
cagaggguguccugcac

SEQ ID NO: 3252519 - RNA, 23 nt, Human
cuggcccuaugcuuccggccucc

SEQ ID NO: 3252520 - RNA, 14 nt, Human
cuuuugucccagaa

SEQ ID NO: 3252521 - RNA, 17 nt, Human
cuucuaccucuuggcug

SEQ ID NO: 3252522 - RNA, 19 nt, Human
cuuccucuccugucucccu

SEQ ID NO: 3252523 - RNA, 15 nt, Human
cuuccucuccugucu

SEQ ID NO: 3252524 - RNA, 20 nt, Human
gacccucaucuuucuuccaa

SEQ ID NO: 3252525 - RNA, 22 nt, Human
gaggacaguauuuguggggagg

SEQ ID NO: 3252526 - RNA, 16 nt, Human
gagacgggcccuggug

SEQ ID NO: 3252527 - RNA, 13 nt, Human
gauggaaugaugg

SEQ ID NO: 3252528 - RNA, 19 nt, Human
gaucccaacacugccagca

SEQ ID NO: 3252529 - RNA, 18 nt, Human
gaucccaacacugccagc

SEQ ID NO: 3252530 - RNA, 17 nt, Human
gaucccaacacugccag

SEQ ID NO: 3252531 - RNA, 21 nt, Human
gcauccagagucccugccugg

SEQ ID NO: 3252532 - RNA, 23 nt, Human
gcauccagagucccugccuggac

SEQ ID NO: 3252533 - RNA, 22 nt, Human
gcauccagagucccugccugga

SEQ ID NO: 3252534 - RNA, 17 nt, Human
gcaucggggagccggga

SEQ ID NO: 3252535 - RNA, 12 nt, Human
ggcaggggccgg

SEQ ID NO: 3252536 - RNA, 14 nt, Human
ggcaggagggaggu

SEQ ID NO: 3252537 - RNA, 22 nt, Human
ggcaucggggagccgggagccu

SEQ ID NO: 3252538 - RNA, 18 nt, Human
ggcauccagagucccugc

SEQ ID NO: 3252539 - RNA, 16 nt, Human
ggcauccagagucccu

SEQ ID NO: 3252540 - RNA, 23 nt, Human
ggcaucggggagccgggagccug

SEQ ID NO: 3252541 - RNA, 14 nt, Human
ggagggggagaggg

SEQ ID NO: 3252542 - RNA, 22 nt, Human
ggaguguguaauuuaaaauugu

SEQ ID NO: 3252543 - RNA, 11 nt, Human
ggaguguguaa

SEQ ID NO: 3252544 - RNA, 22 nt, Human
gguggggggggggcgcggcugg

SEQ ID NO: 3252545 - RNA, 22 nt, Human
gguuuguuuagaagaagugugu

SEQ ID NO: 3252546 - RNA, 21 nt, Human
ggguguccugcaccggggccu

SEQ ID NO: 3252547 - RNA, 17 nt, Human
ggguguccugcaccggg

SEQ ID NO: 3252548 - RNA, 16 nt, Human
gguaggaacugcuggg

SEQ ID NO: 3252549 - RNA, 18 nt, Human
gguaggaacugcugggcu

SEQ ID NO: 3252550 - RNA, 22 nt, Human
gggggcagucugagagaggcca

SEQ ID NO: 3252551 - RNA, 18 nt, Human
gggucauucauggccugg

SEQ ID NO: 3252552 - RNA, 21 nt, Human
gggucaucuguaccucugccu

SEQ ID NO: 3252553 - RNA, 19 nt, Human
gcucagaggguguccugca

SEQ ID NO: 3252554 - RNA, 18 nt, Human
gcucagaggguguccugc

SEQ ID NO: 3252555 - RNA, 18 nt, Human
gcuaggguggggagagac

SEQ ID NO: 3252556 - RNA, 17 nt, Human
gcuaggguggggagaga

SEQ ID NO: 3252557 - RNA, 21 nt, Human
gcguggaacucgugucuggca

SEQ ID NO: 3252558 - RNA, 12 nt, Human
gccauucuuucc

SEQ ID NO: 3252559 - RNA, 19 nt, Human
gccauucuuucccaacacc

SEQ ID NO: 3252560 - RNA, 22 nt, Human
gcuuuuccucaaagggagagag

SEQ ID NO: 3252561 - RNA, 19 nt, Human
ggacaguauuuguggggag

SEQ ID NO: 3252562 - RNA, 18 nt, Human
ggacaguauuugugggga

SEQ ID NO: 3252563 - RNA, 16 nt, Human
ggacaccuaggcuagg

SEQ ID NO: 3252564 - RNA, 16 nt, Human
ggacaccccgacuuuu

SEQ ID NO: 3252565 - RNA, 20 nt, Human
gcugggaauaagugccagga

SEQ ID NO: 3252566 - RNA, 11 nt, Human
ugugauguguc

SEQ ID NO: 3252567 - RNA, 13 nt, Human
agucccugccugg

SEQ ID NO: 3252568 - RNA, 14 nt, Human
aguccaucagccuc

SEQ ID NO: 3252569 - RNA, 13 nt, Human
aguccaucagccu

SEQ ID NO: 3252570 - RNA, 22 nt, Human
uguauccauccauggggcugau

SEQ ID NO: 3252571 - RNA, 22 nt, Human
uguaugugggggucuguguguu

SEQ ID NO: 3252572 - RNA, 21 nt, Human
uguaugugggggucugugugu

SEQ ID NO: 3252573 - RNA, 20 nt, Human
uguaugugggggucugugug

SEQ ID NO: 3252574 - RNA, 23 nt, Human
ugggaauaagugccaggauggaa

SEQ ID NO: 3252575 - RNA, 13 nt, Human
ugggucugugugu

SEQ ID NO: 3252576 - RNA, 15 nt, Human
ugggucugugugugu

SEQ ID NO: 3252577 - RNA, 14 nt, Human
uuaucaacauuugu

SEQ ID NO: 3252578 - RNA, 18 nt, Human
uguugggagugaggaugu

SEQ ID NO: 3252579 - RNA, 14 nt, Human
agcugccugugccu

SEQ ID NO: 3252580 - RNA, 22 nt, Human
uggaccagccucuccacucaug

SEQ ID NO: 3252581 - RNA, 16 nt, Human
uggaccagccucucca

SEQ ID NO: 3252582 - RNA, 13 nt, Human
ugcuccccacguc

SEQ ID NO: 3252583 - RNA, 18 nt, Human
ugcuauuguagagccaga

SEQ ID NO: 3252584 - RNA, 22 nt, Human
ugcuauuguagagccagagguc

SEQ ID NO: 3252585 - RNA, 22 nt, Human
uggaccuuuccugaggaagagg

SEQ ID NO: 3252586 - RNA, 15 nt, Human
aggccauucuuuccc

SEQ ID NO: 3252587 - RNA, 21 nt, Human
aggccucucauuccagaggaa

SEQ ID NO: 3252588 - RNA, 19 nt, Human
aggccauucuuucccaaca

SEQ ID NO: 3252589 - RNA, 18 nt, Human
aggccauucuuucccaac

SEQ ID NO: 3252590 - RNA, 17 nt, Human
aggccauucuuucccaa

SEQ ID NO: 3252591 - RNA, 15 nt, Human
uggccaguggcugga

SEQ ID NO: 3252592 - RNA, 14 nt, Human
uggccaguggcugg

SEQ ID NO: 3252593 - RNA, 16 nt, Human
uggccaguggcuggau

SEQ ID NO: 3252594 - RNA, 22 nt, Human
uggcugccuugugaaggaauua

SEQ ID NO: 3252595 - RNA, 22 nt, Human
uuguccucagccccgcguggaa

SEQ ID NO: 3252596 - RNA, 18 nt, Human
uugucccugaagagaagg

SEQ ID NO: 3252597 - RNA, 20 nt, Human
uugucacgccagacuuccca

SEQ ID NO: 3252598 - RNA, 13 nt, Human
uugucacgccaga

SEQ ID NO: 3252599 - RNA, 16 nt, Human
uugugugugggagugu

SEQ ID NO: 3252600 - RNA, 13 nt, Human
uugugugugggag

SEQ ID NO: 3252601 - RNA, 10 nt, Human
uugugugugg

SEQ ID NO: 3252602 - RNA, 16 nt, Human
aucggggagccgggag

SEQ ID NO: 3252603 - RNA, 18 nt, Human
aucggggagccgggagcc

SEQ ID NO: 3252604 - RNA, 20 nt, Human
aucauuaucagccugugcca

SEQ ID NO: 3252605 - RNA, 20 nt, Human
auccauggggcugauuguau

SEQ ID NO: 3252606 - RNA, 16 nt, Human
uucagauuugccuuau

SEQ ID NO: 3252607 - RNA, 20 nt, Human
auuucccuuccuuccucucc

SEQ ID NO: 3252608 - RNA, 12 nt, Human
auugguguugac

SEQ ID NO: 3252609 - RNA, 15 nt, Human
auugugauguguccu

SEQ ID NO: 3252610 - RNA, 14 nt, Human
auugugaugugucc

SEQ ID NO: 3252611 - RNA, 13 nt, Human
auugugauguguc

SEQ ID NO: 3252612 - RNA, 16 nt, Human
uuuuguuuaccagaga

SEQ ID NO: 3252613 - RNA, 10 nt, Human
augugugugu

SEQ ID NO: 3252614 - RNA, 13 nt, Human
auguggaagugug

SEQ ID NO: 3252615 - RNA, 16 nt, Human
auguggaagugugggu

SEQ ID NO: 3252616 - RNA, 15 nt, Human
auguggaaguguggg

SEQ ID NO: 3252617 - RNA, 23 nt, Human
auguggaagugugggucugugug

SEQ ID NO: 3252618 - RNA, 22 nt, Human
auguggaagugugggucugugu

SEQ ID NO: 3252619 - RNA, 13 nt, Human
ugagagaggccau

SEQ ID NO: 3252620 - RNA, 14 nt, Human
agaagaaguguguc

SEQ ID NO: 3252621 - RNA, 14 nt, Human
ucuaguucugccag

SEQ ID NO: 3252622 - RNA, 17 nt, Human
ucuaguucugccaggag

SEQ ID NO: 3252623 - RNA, 16 nt, Human
ucuaguucugccagga

SEQ ID NO: 3252624 - RNA, 15 nt, Human
ucuaguucugccagg

SEQ ID NO: 3252625 - RNA, 17 nt, Human
ucagauuugccuuauug

SEQ ID NO: 3252626 - RNA, 12 nt, Human
ucaguaugugga

SEQ ID NO: 3252627 - RNA, 14 nt, Human
ucaguauguggaag

SEQ ID NO: 3252628 - RNA, 13 nt, Human
accgaggcaggga

SEQ ID NO: 3252629 - RNA, 16 nt, Human
ucauaaauuuaugguu

SEQ ID NO: 3252630 - RNA, 17 nt, Human
ucaugugacucuuucca

SEQ ID NO: 3252631 - RNA, 14 nt, Human
ucaugugacucuuu

SEQ ID NO: 3252632 - RNA, 19 nt, Human
ucaugugacucuuuccaac

SEQ ID NO: 3252633 - RNA, 18 nt, Human
ucaugugacucuuuccaa

SEQ ID NO: 3252634 - RNA, 17 nt, Human
ucauguuuacagaggac

SEQ ID NO: 3252635 - RNA, 17 nt, Human
accuaggcuaggguggg

SEQ ID NO: 3252636 - RNA, 12 nt, Human
accuaggcuagg

SEQ ID NO: 3252637 - RNA, 23 nt, Human
ucacagcaagucacuggccagug

SEQ ID NO: 3252638 - RNA, 19 nt, Human
uccugcaccggggccuggg

SEQ ID NO: 3252639 - RNA, 18 nt, Human
uccugcaccggggccugg

SEQ ID NO: 3252640 - RNA, 21 nt, Human
acucuggagguuuguuuagaa

SEQ ID NO: 3252641 - RNA, 22 nt, Human
uaacuuaaaagaacauguauau

SEQ ID NO: 3252642 - RNA, 16 nt, Human
acaccucuuggggagu

SEQ ID NO: 3252643 - RNA, 16 nt, Human
uauguggaaguguggg

SEQ ID NO: 3252644 - RNA, 12 nt, Human
uauguggaagug

SEQ ID NO: 3252645 - RNA, 20 nt, Human
uauggggauagaugugugga

SEQ ID NO: 3252646 - RNA, 21 nt, Human
guguaugugggggucugugug

SEQ ID NO: 3252647 - RNA, 13 nt, Human
guguauguggggg

SEQ ID NO: 3252648 - RNA, 16 nt, Human
uaaaauugugaugugu

SEQ ID NO: 3252649 - RNA, 15 nt, Human
uaaaauugugaugug

SEQ ID NO: 3252650 - RNA, 18 nt, Human
aagugugggucugugugu

SEQ ID NO: 3252651 - RNA, 17 nt, Human
aagugugggucugugug

SEQ ID NO: 3252652 - RNA, 10 nt, Human
aagugugggu

SEQ ID NO: 3252653 - RNA, 20 nt, Human
aagugugggucugugugugu

SEQ ID NO: 3252654 - RNA, 21 nt, Human
aagucacuggccaguggcugg

SEQ ID NO: 3252655 - RNA, 19 nt, Human
aagaagugugucacccuua

SEQ ID NO: 3252656 - RNA, 10 nt, Human
gugauguguc

SEQ ID NO: 3252657 - RNA, 15 nt, Human
guccaucagccucca

SEQ ID NO: 3252658 - RNA, 22 nt, Human
gucccgggacaccuaggcuagg

SEQ ID NO: 3252659 - RNA, 18 nt, Human
augugggggucugugugu

SEQ ID NO: 3252660 - RNA, 17 nt, Human
augugggggucugugug

SEQ ID NO: 3252661 - RNA, 16 nt, Human
augugggggucugugu

SEQ ID NO: 3252662 - RNA, 23 nt, Human
aguuguaucagcacguguggccu

SEQ ID NO: 3252663 - RNA, 20 nt, Human
aguuguaucagcacgugugg

SEQ ID NO: 3252664 - RNA, 23 nt, Human
aggugcuucuaguucugccagga

SEQ ID NO: 3252665 - RNA, 22 nt, Human
aggugcuucuaguucugccagg

SEQ ID NO: 3252666 - RNA, 21 nt, Human
aggugcuucuaguucugccag

SEQ ID NO: 3252667 - RNA, 19 nt, Human
aggcuauggggauagaugu

SEQ ID NO: 3252668 - RNA, 22 nt, Human
aggcuauggggauagaugugug

SEQ ID NO: 3252669 - RNA, 21 nt, Human
aggcuauggggauagaugugu

SEQ ID NO: 3252670 - RNA, 14 nt, Human
agacgggcccuggu

SEQ ID NO: 3252671 - RNA, 16 nt, Human
agaggguguccugcac

SEQ ID NO: 3252672 - RNA, 13 nt, Human
agccagaggucug

SEQ ID NO: 3252673 - RNA, 15 nt, Human
accccgacuuuuguu

SEQ ID NO: 3252674 - RNA, 12 nt, Human
accccgacuuuu

SEQ ID NO: 3252675 - RNA, 15 nt, Human
acagguuagcugcuc

SEQ ID NO: 3252676 - RNA, 11 nt, Human
acacugccagc

SEQ ID NO: 3252677 - RNA, 22 nt, Human
acgccagacuucccacggcucc

SEQ ID NO: 3252678 - RNA, 16 nt, Human
acgccagacuucccac

SEQ ID NO: 3252679 - RNA, 13 nt, Human
acucagucuuuaa

SEQ ID NO: 3252680 - RNA, 22 nt, Human
aaugucaguauguggaagugug

SEQ ID NO: 3252681 - RNA, 16 nt, Human
aaugucaguaugugga

SEQ ID NO: 3252682 - RNA, 17 nt, Human
aauaagugccaggaugg

SEQ ID NO: 3252683 - RNA, 12 nt, Human
caacacugccag

SEQ ID NO: 3252684 - RNA, 14 nt, Human
caacacugccagca

SEQ ID NO: 3252685 - RNA, 13 nt, Human
caacacugccagc

SEQ ID NO: 3252686 - RNA, 22 nt, Human
caaccggcuuuguggcacuggg

SEQ ID NO: 3252687 - RNA, 13 nt, Human
caaccggcuuugu

SEQ ID NO: 3252688 - RNA, 12 nt, Human
uauucccaugag

SEQ ID NO: 3252689 - RNA, 14 nt, Human
ucauuccagaggaa

SEQ ID NO: 3252690 - RNA, 19 nt, Human
ucagaggguguccugcacc

SEQ ID NO: 3252691 - RNA, 15 nt, Human
ucugccaggagacag

SEQ ID NO: 3252692 - RNA, 21 nt, Human
ucgugucuggcacagccuggc

SEQ ID NO: 3252693 - RNA, 14 nt, Human
ucgugucuggcaca

SEQ ID NO: 3252694 - RNA, 19 nt, Human
ucccuuccuuccucuccug

SEQ ID NO: 3252695 - RNA, 16 nt, Human
ucccuuccuuccucuc

SEQ ID NO: 3252696 - RNA, 13 nt, Human
ucccugccuggac

SEQ ID NO: 3252697 - RNA, 21 nt, Human
ucccgggacaccuaggcuagg

SEQ ID NO: 3252698 - RNA, 16 nt, Human
ucccuccucugcccgg

SEQ ID NO: 3252699 - RNA, 18 nt, Human
ugauuuuuaugccaccug

SEQ ID NO: 3252700 - RNA, 21 nt, Human
ugcauuauauuuguaaauuua

SEQ ID NO: 3252701 - RNA, 22 nt, Human
ugccaucauguuuacagaggac

SEQ ID NO: 3252702 - RNA, 17 nt, Human
ugcccgggagcucagga

SEQ ID NO: 3252703 - RNA, 18 nt, Human
ugcccgggagcucaggaa

SEQ ID NO: 3252704 - RNA, 17 nt, Human
ugaguuggcugggaaua

SEQ ID NO: 3252705 - RNA, 16 nt, Human
ugaguuggcugggaau

SEQ ID NO: 3252706 - RNA, 14 nt, Human
ugaguuggcuggga

SEQ ID NO: 3252707 - RNA, 21 nt, Human
ugacccucaucuuucuuccaa

SEQ ID NO: 3252708 - RNA, 18 nt, Human
uguccugcaccggggccu

SEQ ID NO: 3252709 - RNA, 13 nt, Human
uguccucagcccc

SEQ ID NO: 3252710 - RNA, 17 nt, Human
uguaaauuuaugugaug

SEQ ID NO: 3252711 - RNA, 16 nt, Human
uggccuaaccugccga

SEQ ID NO: 3252712 - RNA, 23 nt, Human
uggccuaaccugccgagagucca

SEQ ID NO: 3252713 - RNA, 17 nt, Human
ugggaggagggcaggca

SEQ ID NO: 3252714 - RNA, 14 nt, Human
ugggaggagggcag

SEQ ID NO: 3252715 - RNA, 13 nt, Human
ugggaguguguaa

SEQ ID NO: 3252716 - RNA, 18 nt, Human
ugggaggagggcaggcau

SEQ ID NO: 3252717 - RNA, 19 nt, Human
uuuccaaccggcuuugugg

SEQ ID NO: 3252718 - RNA, 21 nt, Human
uuccugaggaagagggacugu

SEQ ID NO: 3252719 - RNA, 21 nt, Human
uuuuauuuuucucaugaugag

SEQ ID NO: 3252720 - RNA, 13 nt, Human
cauuccagaggaa

SEQ ID NO: 3252721 - RNA, 14 nt, Human
cauuccagaggaag

SEQ ID NO: 3252722 - RNA, 12 nt, Human
cauucuuuccca

SEQ ID NO: 3252723 - RNA, 14 nt, Human
cauucuuucccaac

SEQ ID NO: 3252724 - RNA, 14 nt, Human
caugugacucuuuc

SEQ ID NO: 3252725 - RNA, 17 nt, Human
caugugacucuuuccaa

SEQ ID NO: 3252726 - RNA, 16 nt, Human
caugugacucuuucca

SEQ ID NO: 3252727 - RNA, 17 nt, Human
cauccagagucccugcc

SEQ ID NO: 3252728 - RNA, 13 nt, Human
cauccagaguccc

SEQ ID NO: 3252729 - RNA, 20 nt, Human
cauccagagucccugccugg

SEQ ID NO: 3252730 - RNA, 18 nt, Human
cauccagagucccugccu

SEQ ID NO: 3252731 - RNA, 13 nt, Human
caucauguuuaca

SEQ ID NO: 3252732 - RNA, 21 nt, Human
caucauguuuacagaggacag

SEQ ID NO: 3252733 - RNA, 19 nt, Human
caucauguuuacagaggac

SEQ ID NO: 3252734 - RNA, 15 nt, Human
cauccuacccccugu

SEQ ID NO: 3252735 - RNA, 18 nt, Human
cauccuacccccugugcc

SEQ ID NO: 3252736 - RNA, 23 nt, Human
caugagcuccuuaaggcucuuuu

SEQ ID NO: 3252737 - RNA, 19 nt, Human
caugaguuggcugggaaua

SEQ ID NO: 3252738 - RNA, 13 nt, Human
ccaggagacaggu

SEQ ID NO: 3252739 - RNA, 17 nt, Human
ccauccuacccccugug

SEQ ID NO: 3252740 - RNA, 18 nt, Human
ccauccuacccccugugc

SEQ ID NO: 3252741 - RNA, 21 nt, Human
ccagcauuucccuuccuuccu

SEQ ID NO: 3252742 - RNA, 16 nt, Human
ccagcauuucccuucc

SEQ ID NO: 3252743 - RNA, 20 nt, Human
ccaccugaauaaagaaugaa

SEQ ID NO: 3252744 - RNA, 22 nt, Human
ccacucaugugacucuuuccaa

SEQ ID NO: 3252745 - RNA, 19 nt, Human
ccacucaugugacucuuuc

SEQ ID NO: 3252746 - RNA, 19 nt, Human
ccugaggaagagggacugu

SEQ ID NO: 3252747 - RNA, 12 nt, Human
ccugggcaggag

SEQ ID NO: 3252748 - RNA, 14 nt, Human
ccugggcaggaggg

SEQ ID NO: 3252749 - RNA, 22 nt, Human
cgagaucccaacacugccagca

SEQ ID NO: 3252750 - RNA, 13 nt, Human
cgagaucccaaca

SEQ ID NO: 3252751 - RNA, 21 nt, Human
cgagaucccaacacugccagc

SEQ ID NO: 3252752 - RNA, 15 nt, Human
cgagaucccaacacu

SEQ ID NO: 3252753 - RNA, 13 nt, Human
ccuuaaggcucuu

SEQ ID NO: 3252754 - RNA, 18 nt, Human
ccuuaaggcucuuuugua

SEQ ID NO: 3252755 - RNA, 16 nt, Human
ccuuaaggcucuuuug

SEQ ID NO: 3252756 - RNA, 18 nt, Human
ccuugucacgccagacuu

SEQ ID NO: 3252757 - RNA, 15 nt, Human
ccuugucacgccaga

SEQ ID NO: 3252758 - RNA, 18 nt, Human
ccucucauuccagaggaa

SEQ ID NO: 3252759 - RNA, 18 nt, Human
ccucuccacucaugugac

SEQ ID NO: 3252760 - RNA, 22 nt, Human
ccgggucaucuguaccucugcc

SEQ ID NO: 3252761 - RNA, 19 nt, Human
ccgggacaccuaggcuagg

SEQ ID NO: 3252762 - RNA, 20 nt, Human
ccgggacaccuaggcuaggg

SEQ ID NO: 3252763 - RNA, 15 nt, Human
ccgaggcagggaagg

SEQ ID NO: 3252764 - RNA, 16 nt, Human
ccuaggcuaggguggg

SEQ ID NO: 3252765 - RNA, 14 nt, Human
cuguguguguguau

SEQ ID NO: 3252766 - RNA, 16 nt, Human
cuguguguguguaugu

SEQ ID NO: 3252767 - RNA, 15 nt, Human
cuguguguguguaug

SEQ ID NO: 3252768 - RNA, 20 nt, Human
cuguguguuuaugugugugu

SEQ ID NO: 3252769 - RNA, 18 nt, Human
cuguguguuuaugugugu

SEQ ID NO: 3252770 - RNA, 20 nt, Human
cuguguguguguaugugggg

SEQ ID NO: 3252771 - RNA, 18 nt, Human
cuguguguguguaugugg

SEQ ID NO: 3252772 - RNA, 18 nt, Human
cuguggccuaaccugccg

SEQ ID NO: 3252773 - RNA, 22 nt, Human
cuggugguggcucgggaggcga

SEQ ID NO: 3252774 - RNA, 14 nt, Human
cuggugguggcucg

SEQ ID NO: 3252775 - RNA, 15 nt, Human
cuuaaggcucuuuug

SEQ ID NO: 3252776 - RNA, 19 nt, Human
cuuccaaacaggcucagag

SEQ ID NO: 3252777 - RNA, 20 nt, Human
gaauaagugccaggauggaa

SEQ ID NO: 3252778 - RNA, 17 nt, Human
gaauaaagaaugaaugg

SEQ ID NO: 3252779 - RNA, 14 nt, Human
gaaugccuccugca

SEQ ID NO: 3252780 - RNA, 19 nt, Human
gaaggaucccaugagcucc

SEQ ID NO: 3252781 - RNA, 13 nt, Human
gaacuauuagagc

SEQ ID NO: 3252782 - RNA, 17 nt, Human
cuuucccaacaccucuu

SEQ ID NO: 3252783 - RNA, 13 nt, Human
cuuucccaacacc

SEQ ID NO: 3252784 - RNA, 14 nt, Human
cuauuguagagcca

SEQ ID NO: 3252785 - RNA, 13 nt, Human
cucgagaucccaa

SEQ ID NO: 3252786 - RNA, 23 nt, Human
cucgagaucccaacacugccagc

SEQ ID NO: 3252787 - RNA, 22 nt, Human
cucgagaucccaacacugccag

SEQ ID NO: 3252788 - RNA, 21 nt, Human
cucgagaucccaacacugcca

SEQ ID NO: 3252789 - RNA, 17 nt, Human
cugccuggaccagccuc

SEQ ID NO: 3252790 - RNA, 13 nt, Human
cugauuguauuua

SEQ ID NO: 3252791 - RNA, 20 nt, Human
cucugcccgggagcucagga

SEQ ID NO: 3252792 - RNA, 14 nt, Human
cucugcccgggagc

SEQ ID NO: 3252793 - RNA, 12 nt, Human
cugagcaggugu

SEQ ID NO: 3252794 - RNA, 21 nt, Human
gauguguccugauaagcugag

SEQ ID NO: 3252795 - RNA, 20 nt, Human
gauggcaaagaaggagagca

SEQ ID NO: 3252796 - RNA, 14 nt, Human
gagucccugccauc

SEQ ID NO: 3252797 - RNA, 15 nt, Human
gagucccugccugga

SEQ ID NO: 3252798 - RNA, 14 nt, Human
gagucccugccugg

SEQ ID NO: 3252799 - RNA, 16 nt, Human
gagucccugccuggac

SEQ ID NO: 3252800 - RNA, 22 nt, Human
gagguuuguuuagaagaagugu

SEQ ID NO: 3252801 - RNA, 22 nt, Human
gagcucaggaaccgaggcaggg

SEQ ID NO: 3252802 - RNA, 23 nt, Human
gagcucaggaaccgaggcaggga

SEQ ID NO: 3252803 - RNA, 15 nt, Human
gaggaugucugggcc

SEQ ID NO: 3252804 - RNA, 15 nt, Human
gaggagggcaggcau

SEQ ID NO: 3252805 - RNA, 14 nt, Human
gaggagggcaggca

SEQ ID NO: 3252806 - RNA, 13 nt, Human
gaggagggcaggc

SEQ ID NO: 3252807 - RNA, 21 nt, Human
gccagacuucccacggcuccu

SEQ ID NO: 3252808 - RNA, 16 nt, Human
gccaccugaauaaaga

SEQ ID NO: 3252809 - RNA, 15 nt, Human
gccacgauugcagga

SEQ ID NO: 3252810 - RNA, 23 nt, Human
gcaggcaucggggagccgggagc

SEQ ID NO: 3252811 - RNA, 22 nt, Human
gcaggcaucggggagccgggag

SEQ ID NO: 3252812 - RNA, 21 nt, Human
gcaggcaucggggagccggga

SEQ ID NO: 3252813 - RNA, 20 nt, Human
gcuguggccuaaccugccga

SEQ ID NO: 3252814 - RNA, 19 nt, Human
gcuguggccuaaccugccg

SEQ ID NO: 3252815 - RNA, 14 nt, Human
gcuggggaugucuc

SEQ ID NO: 3252816 - RNA, 21 nt, Human
gcugggaggagggcaggcauc

SEQ ID NO: 3252817 - RNA, 22 nt, Human
gcugggcuuggcagcccggguc

SEQ ID NO: 3252818 - RNA, 14 nt, Human
gcugauuguauuua

SEQ ID NO: 3252819 - RNA, 17 nt, Human
gccuugucacgccagac

SEQ ID NO: 3252820 - RNA, 16 nt, Human
gccuugucacgccaga

SEQ ID NO: 3252821 - RNA, 15 nt, Human
gccuugucacgccag

SEQ ID NO: 3252822 - RNA, 17 nt, Human
gcgaagcguuguccuca

SEQ ID NO: 3252823 - RNA, 16 nt, Human
gccuggaccagccucu

SEQ ID NO: 3252824 - RNA, 17 nt, Human
gccuggaccagccucuc

SEQ ID NO: 3252825 - RNA, 16 nt, Human
gccugggcaggaggga

SEQ ID NO: 3252826 - RNA, 21 nt, Human
gcuccuuaaggcucuuuugua

SEQ ID NO: 3252827 - RNA, 17 nt, Human
gcuccuuaaggcucuuu

SEQ ID NO: 3252828 - RNA, 15 nt, Human
gcuccuuaaggcucu

SEQ ID NO: 3252829 - RNA, 20 nt, Human
ggccucucauuccagaggaa

SEQ ID NO: 3252830 - RNA, 16 nt, Human
ggccuaaccugccgag

SEQ ID NO: 3252831 - RNA, 15 nt, Human
ggccuaaccugccga

SEQ ID NO: 3252832 - RNA, 19 nt, Human
ggccugggcaggagggagg

SEQ ID NO: 3252833 - RNA, 17 nt, Human
ggccugggcaggaggga

SEQ ID NO: 3252834 - RNA, 15 nt, Human
ggccugggcaggagg

SEQ ID NO: 3252835 - RNA, 16 nt, Human
ggccugacucucagca

SEQ ID NO: 3252836 - RNA, 12 nt, Human
gggaggagggca

SEQ ID NO: 3252837 - RNA, 16 nt, Human
gggaggagggcaggca

SEQ ID NO: 3252838 - RNA, 23 nt, Human
gggagcucaggaaccgaggcagg

SEQ ID NO: 3252839 - RNA, 22 nt, Human
gggagcucaggaaccgaggcag

SEQ ID NO: 3252840 - RNA, 12 nt, Human
gggagcucagga

SEQ ID NO: 3252841 - RNA, 13 nt, Human
gggagccgggagc

SEQ ID NO: 3252842 - RNA, 14 nt, Human
gggacaccuaggcu

SEQ ID NO: 3252843 - RNA, 20 nt, Human
gggacaccaagccuuggcuc

SEQ ID NO: 3252844 - RNA, 23 nt, Human
ggcuguggcauccagagucccug

SEQ ID NO: 3252845 - RNA, 21 nt, Human
ggcuguggcauccagaguccc

SEQ ID NO: 3252846 - RNA, 13 nt, Human
ggcugggaggagg

SEQ ID NO: 3252847 - RNA, 21 nt, Human
ggcugggaggagggcaggcau

SEQ ID NO: 3252848 - RNA, 20 nt, Human
ggcugggaggagggcaggca

SEQ ID NO: 3252849 - RNA, 14 nt, Human
ggagggcaggcauc

SEQ ID NO: 3252850 - RNA, 21 nt, Human
ggagcucaggaaccgaggcag

SEQ ID NO: 3252851 - RNA, 12 nt, Human
ggaccagccucu

SEQ ID NO: 3252852 - RNA, 19 nt, Human
ggagacagguuagcugcuc

SEQ ID NO: 3252853 - RNA, 19 nt, Human
cacguguggccuguucuuc

SEQ ID NO: 3252854 - RNA, 22 nt, Human
cacggcuccucgagaucccaac

SEQ ID NO: 3252855 - RNA, 20 nt, Human
cacggcuccucgagauccca

SEQ ID NO: 3252856 - RNA, 22 nt, Human
cacucaugugacucuuuccaac

SEQ ID NO: 3252857 - RNA, 16 nt, Human
cacucaugugacucuu

SEQ ID NO: 3252858 - RNA, 22 nt, Human
caccggggccugggcaggaggg

SEQ ID NO: 3252859 - RNA, 21 nt, Human
caccggggccugggcaggagg

SEQ ID NO: 3252860 - RNA, 14 nt, Human
caccggggccuggg

SEQ ID NO: 3252861 - RNA, 22 nt, Human
cagacuucccacggcuccucga

SEQ ID NO: 3252862 - RNA, 12 nt, Human
cagacuucccac

SEQ ID NO: 3252863 - RNA, 12 nt, Human
cagagaaaaagg

SEQ ID NO: 3252864 - RNA, 18 nt, Human
cagagaaaaagggagggg

SEQ ID NO: 3252865 - RNA, 17 nt, Human
cagagaaaaagggaggg

SEQ ID NO: 3252866 - RNA, 14 nt, Human
cagagucccugccu

SEQ ID NO: 3252867 - RNA, 18 nt, Human
cagagucccugccuggac

SEQ ID NO: 3252868 - RNA, 22 nt, Human
cagaggacaguauuugugggga

SEQ ID NO: 3252869 - RNA, 15 nt, Human
cagcauuucccuucc

SEQ ID NO: 3252870 - RNA, 18 nt, Human
caggaaccgaggcaggga

SEQ ID NO: 3252871 - RNA, 17 nt, Human
caggaaccgaggcaggg

SEQ ID NO: 3252872 - RNA, 15 nt, Human
caggaaccgaggcag

SEQ ID NO: 3252873 - RNA, 23 nt, Human
cagccuggcuguggccuaaccug

SEQ ID NO: 3252874 - RNA, 23 nt, Human
cagccucuccacucaugugacuc

SEQ ID NO: 3252875 - RNA, 21 nt, Human
cagccuccauccuacccccug

SEQ ID NO: 3252876 - RNA, 18 nt, Human
cagccuccauccuacccc

SEQ ID NO: 3252877 - RNA, 21 nt, Human
caggcaucggggagccgggag

SEQ ID NO: 3252878 - RNA, 20 nt, Human
caggcaucggggagccggga

SEQ ID NO: 3252879 - RNA, 23 nt, Human
caggagacagguuagcugcuccc

SEQ ID NO: 3252880 - RNA, 14 nt, Human
caggagucccugcc

SEQ ID NO: 3252881 - RNA, 21 nt, Human
caggagucccugccaucaugu

SEQ ID NO: 3252882 - RNA, 15 nt, Human
caggagucccugcca

SEQ ID NO: 3252883 - RNA, 18 nt, Human
cagggaaggaucccauga

SEQ ID NO: 3252884 - RNA, 13 nt, Human
cagggaaggaucc

SEQ ID NO: 3252885 - RNA, 11 nt, Human
caggcucagag

SEQ ID NO: 3252886 - RNA, 15 nt, Human
caggcucagagggug

SEQ ID NO: 3252887 - RNA, 22 nt, Human
cagucuuuaaucugagaggcca

SEQ ID NO: 3252888 - RNA, 12 nt, Human
caguauguggaa

SEQ ID NO: 3252889 - RNA, 12 nt, Human
cagguguucuuc

SEQ ID NO: 3252890 - RNA, 13 nt, Human
cucccuccucugc

SEQ ID NO: 3252891 - RNA, 14 nt, Human
cucccuccucugcc

SEQ ID NO: 3252892 - RNA, 16 nt, Human
cucaucuuucuuccaa

SEQ ID NO: 3252893 - RNA, 12 nt, Human
cuaaccugccga

SEQ ID NO: 3252894 - RNA, 21 nt, Human
cuaaccugccgagaguccauc

SEQ ID NO: 3252895 - RNA, 19 nt, Human
cuaaccugccgagagucca

SEQ ID NO: 3252896 - RNA, 21 nt, Human
cgugucuggcacagccuggcu

SEQ ID NO: 3252897 - RNA, 13 nt, Human
cgugucuggcaca

SEQ ID NO: 3252898 - RNA, 14 nt, Human
cgugucuggcacag

SEQ ID NO: 3252899 - RNA, 23 nt, Human
cggcuccucgagaucccaacacu

SEQ ID NO: 3252900 - RNA, 14 nt, Human
ccccgacuuuuguu

SEQ ID NO: 3252901 - RNA, 14 nt, Human
cccgggagcucagg

SEQ ID NO: 3252902 - RNA, 16 nt, Human
ccagagucccugccug

SEQ ID NO: 3252903 - RNA, 22 nt, Human
ccagagucccugccuggaccag

SEQ ID NO: 3252904 - RNA, 19 nt, Human
ccagagucccugccuggac

SEQ ID NO: 3252905 - RNA, 18 nt, Human
ccagagucccugccugga

SEQ ID NO: 3252906 - RNA, 17 nt, Human
ccagagucccugccugg

SEQ ID NO: 3252907 - RNA, 24 nt, Human
cccugugccuuggugugcuguauc

SEQ ID NO: 3252908 - RNA, 15 nt, Human
cccugugccuuguca

SEQ ID NO: 3252909 - RNA, 22 nt, Human
cccugugccuugucacgccaga

SEQ ID NO: 3252910 - RNA, 20 nt, Human
cccugugccuugucacgcca

SEQ ID NO: 3252911 - RNA, 14 nt, Human
ccugacucucagca

SEQ ID NO: 3252912 - RNA, 22 nt, Human
ccugacccucaucuuucuucca

SEQ ID NO: 3252913 - RNA, 22 nt, Human
cacugccagcauuucccuuccu

SEQ ID NO: 3252914 - RNA, 18 nt, Human
cacugccagcauuucccu

SEQ ID NO: 3252915 - RNA, 19 nt, Human
cacuggggcaggggccggg

SEQ ID NO: 3252916 - RNA, 13 nt, Human
auucuuucccaac

SEQ ID NO: 3252917 - RNA, 19 nt, Human
auucuuucccaacaccucu

SEQ ID NO: 3252918 - RNA, 16 nt, Human
auucuuucccaacacc

SEQ ID NO: 3252919 - RNA, 22 nt, Human
auuuguggggagggauuugggg

SEQ ID NO: 3252920 - RNA, 20 nt, Human
auuugcuaugagcuggggau

SEQ ID NO: 3252921 - RNA, 16 nt, Human
auuugcuaugagcugg

SEQ ID NO: 3252922 - RNA, 15 nt, Human
caaacaggcucagag

SEQ ID NO: 3252923 - RNA, 14 nt, Human
caaacaggcucaga

SEQ ID NO: 3252924 - RNA, 24 nt, Human
cagccccgcguggaacucgugucu

SEQ ID NO: 3252925 - RNA, 24 nt, Human
cagccucuccacucaugugacucu

SEQ ID NO: 3252926 - RNA, 23 nt, Human
cagaucauuaucagccugugcca

SEQ ID NO: 3252927 - RNA, 15 nt, Human
caguauuugugggga

SEQ ID NO: 3252928 - RNA, 17 nt, Human
ggcccugugccuuggug

SEQ ID NO: 3252929 - RNA, 22 nt, Human
ggcauccagagucccugccugg

SEQ ID NO: 3252930 - RNA, 19 nt, Human
ggccaguggcuggaucugu

SEQ ID NO: 3252931 - RNA, 22 nt, Human
ggcgaagcguuguccucagccc

SEQ ID NO: 3252932 - RNA, 13 nt, Human
ggcacagccuggc

SEQ ID NO: 3252933 - RNA, 12 nt, Human
ggcacagccugg

SEQ ID NO: 3252934 - RNA, 14 nt, Human
aaaagggaggggga

SEQ ID NO: 3252935 - RNA, 19 nt, Human
gggagaaugucaguaugug

SEQ ID NO: 3252936 - RNA, 22 nt, Human
gggagaaugucaguauguggaa

SEQ ID NO: 3252937 - RNA, 14 nt, Human
gggaugucucucau

SEQ ID NO: 3252938 - RNA, 18 nt, Human
gggcucagagugggguag

SEQ ID NO: 3252939 - RNA, 22 nt, Human
gggcccuggugguggcucggga

SEQ ID NO: 3252940 - RNA, 23 nt, Human
ggguguccugcaccggggccugg

SEQ ID NO: 3252941 - RNA, 17 nt, Human
ggucuguguguguguau

SEQ ID NO: 3252942 - RNA, 11 nt, Human
ggucugugugu

SEQ ID NO: 3252943 - RNA, 21 nt, Human
ggugcuucuaguucugccagg

SEQ ID NO: 3252944 - RNA, 21 nt, Human
ggucuguguguguguaugugg

SEQ ID NO: 3252945 - RNA, 20 nt, Human
ggucuguguguguguaugug

SEQ ID NO: 3252946 - RNA, 21 nt, Human
gguggggagagacgggcccug

SEQ ID NO: 3252947 - RNA, 17 nt, Human
guaaauuuaugugaugg

SEQ ID NO: 3252948 - RNA, 16 nt, Human
guaaauuuaugugaug

SEQ ID NO: 3252949 - RNA, 22 nt, Human
gcugcuccccacgucagcuggg

SEQ ID NO: 3252950 - RNA, 13 nt, Human
gcugcuccccacg

SEQ ID NO: 3252951 - RNA, 14 nt, Human
gcugaggccucuca

SEQ ID NO: 3252952 - RNA, 18 nt, Human
gcuccucgagaucccaac

SEQ ID NO: 3252953 - RNA, 14 nt, Human
ggaacugcugggcu

SEQ ID NO: 3252954 - RNA, 20 nt, Human
gcuguagacauuugcuauga

SEQ ID NO: 3252955 - RNA, 19 nt, Human
gcuuuccucaucaggccau

SEQ ID NO: 3252956 - RNA, 14 nt, Human
gccaggauggaaug

SEQ ID NO: 3252957 - RNA, 23 nt, Human
gccaguggcuggaucugugaggg

SEQ ID NO: 3252958 - RNA, 14 nt, Human
gccaguggcuggau

SEQ ID NO: 3252959 - RNA, 14 nt, Human
gcggcugggaggag

SEQ ID NO: 3252960 - RNA, 13 nt, Human
gcggcugggagga

SEQ ID NO: 3252961 - RNA, 22 nt, Human
gcggcugggaggagggcaggca

SEQ ID NO: 3252962 - RNA, 19 nt, Human
gcggcugggaggagggcag

SEQ ID NO: 3252963 - RNA, 18 nt, Human
gcggcugggaggagggca

SEQ ID NO: 3252964 - RNA, 17 nt, Human
gcggcugggaggagggc

SEQ ID NO: 3252965 - RNA, 16 nt, Human
gaucccaacacugcca

SEQ ID NO: 3252966 - RNA, 12 nt, Human
gaucccaacacu

SEQ ID NO: 3252967 - RNA, 16 nt, Human
gaguccaucagccucc

SEQ ID NO: 3252968 - RNA, 15 nt, Human
gaguccaucagccuc

SEQ ID NO: 3252969 - RNA, 14 nt, Human
gaguccaucagccu

SEQ ID NO: 3252970 - RNA, 13 nt, Human
gaguccaucagcc

SEQ ID NO: 3252971 - RNA, 18 nt, Human
gagugaggaugucugggc

SEQ ID NO: 3252972 - RNA, 15 nt, Human
gaguuuagggugggg

SEQ ID NO: 3252973 - RNA, 14 nt, Human
gaguuuaggguggg

SEQ ID NO: 3252974 - RNA, 13 nt, Human
gaguuggcuggga

SEQ ID NO: 3252975 - RNA, 19 nt, Human
gcaccggggccugggcagg

SEQ ID NO: 3252976 - RNA, 20 nt, Human
gcaccggggccugggcagga

SEQ ID NO: 3252977 - RNA, 19 nt, Human
gagcuggggaugucucuca

SEQ ID NO: 3252978 - RNA, 19 nt, Human
gaagggcagggcugaggcc

SEQ ID NO: 3252979 - RNA, 15 nt, Human
gaaggcuauggggau

SEQ ID NO: 3252980 - RNA, 18 nt, Human
gaagugugggucugugug

SEQ ID NO: 3252981 - RNA, 17 nt, Human
gaagugugggucugugu

SEQ ID NO: 3252982 - RNA, 19 nt, Human
gaagugugggucugugugu

SEQ ID NO: 3252983 - RNA, 15 nt, Human
gacaguauuuguggg

SEQ ID NO: 3252984 - RNA, 16 nt, Human
gacagguuagcugcuc

SEQ ID NO: 3252985 - RNA, 18 nt, Human
cuuauuggcagcucuacu

SEQ ID NO: 3252986 - RNA, 22 nt, Human
cuggggaugucucucaugacca

SEQ ID NO: 3252987 - RNA, 17 nt, Human
cuggggaugucucucau

SEQ ID NO: 3252988 - RNA, 22 nt, Human
cugccaucauguuuacagagga

SEQ ID NO: 3252989 - RNA, 17 nt, Human
cugccaucauguuuaca

SEQ ID NO: 3252990 - RNA, 23 nt, Human
cugccaucauguuuacagaggac

SEQ ID NO: 3252991 - RNA, 23 nt, Human
auugcaggagucccugccaucau

SEQ ID NO: 3252992 - RNA, 20 nt, Human
auuuaaaauugugauguguc

SEQ ID NO: 3252993 - RNA, 19 nt, Human
auuuaaaauugugaugugu

SEQ ID NO: 3252994 - RNA, 19 nt, Human
auguuuacagaggacagua

SEQ ID NO: 3252995 - RNA, 17 nt, Human
auguuuacagaggacag

SEQ ID NO: 3252996 - RNA, 15 nt, Human
auguuuacagaggac

SEQ ID NO: 3252997 - RNA, 19 nt, Human
uuugcuaugagcuggggau

SEQ ID NO: 3252998 - RNA, 14 nt, Human
augucaguaugugg

SEQ ID NO: 3252999 - RNA, 13 nt, Human
augucaguaugug

SEQ ID NO: 3253000 - RNA, 17 nt, Human
uuuguaaauuuauguga

SEQ ID NO: 3253001 - RNA, 20 nt, Human
aucugagaggccacagugca

SEQ ID NO: 3253002 - RNA, 16 nt, Human
aucuguaccucugccu

SEQ ID NO: 3253003 - RNA, 21 nt, Human
auggaaugaugggucaguugu

SEQ ID NO: 3253004 - RNA, 16 nt, Human
auggccugggggaugu

SEQ ID NO: 3253005 - RNA, 12 nt, Human
uuuaugugaugg

SEQ ID NO: 3253006 - RNA, 13 nt, Human
uuuaugugugugu

SEQ ID NO: 3253007 - RNA, 11 nt, Human
uuuaugugugu

SEQ ID NO: 3253008 - RNA, 15 nt, Human
uucuaguucugccag

SEQ ID NO: 3253009 - RNA, 24 nt, Human
ugauaagcagucauccucagauca

SEQ ID NO: 3253010 - RNA, 18 nt, Human
ugaguucauaaauuuaug

SEQ ID NO: 3253011 - RNA, 21 nt, Human
ugauagaaggcuauggggaua

SEQ ID NO: 3253012 - RNA, 17 nt, Human
agcauuucccuuccuuc

SEQ ID NO: 3253013 - RNA, 18 nt, Human
agccugacccucaucuuu

SEQ ID NO: 3253014 - RNA, 20 nt, Human
agcucaggaaccgaggcagg

SEQ ID NO: 3253015 - RNA, 22 nt, Human
agcucaggaaccgaggcaggga

SEQ ID NO: 3253016 - RNA, 21 nt, Human
agcucaggaaccgaggcaggg

SEQ ID NO: 3253017 - RNA, 23 nt, Human
uggccaguggcuggaucugugag

SEQ ID NO: 3253018 - RNA, 21 nt, Human
uggccuguucuucuauggguu

SEQ ID NO: 3253019 - RNA, 19 nt, Human
aggacaguauuugugggga

SEQ ID NO: 3253020 - RNA, 12 nt, Human
aggacaguauuu

SEQ ID NO: 3253021 - RNA, 19 nt, Human
aggaucccaugagcuccuu

SEQ ID NO: 3253022 - RNA, 23 nt, Human
ugcuguauccauccauggggcug

SEQ ID NO: 3253023 - RNA, 15 nt, Human
ugcuguagacauuug

SEQ ID NO: 3253024 - RNA, 21 nt, Human
agcugggacaccccgacuuuu

SEQ ID NO: 3253025 - RNA, 20 nt, Human
ugguaggaacugcugggcuu

SEQ ID NO: 3253026 - RNA, 13 nt, Human
ugguaggaacugc

SEQ ID NO: 3253027 - RNA, 12 nt, Human
ugggucugugug

SEQ ID NO: 3253028 - RNA, 16 nt, Human
agggggagagggcugc

SEQ ID NO: 3253029 - RNA, 15 nt, Human
agggggagagggcug

SEQ ID NO: 3253030 - RNA, 19 nt, Human
uggggaguuuagggugggg

SEQ ID NO: 3253031 - RNA, 18 nt, Human
uggggaguuuaggguggg

SEQ ID NO: 3253032 - RNA, 15 nt, Human
ugggguagguuggga

SEQ ID NO: 3253033 - RNA, 21 nt, Human
ugggguagguugggagaaugu

SEQ ID NO: 3253034 - RNA, 14 nt, Human
uggggcugauugua

SEQ ID NO: 3253035 - RNA, 22 nt, Human
ugucaguauguggaaguguggg

SEQ ID NO: 3253036 - RNA, 18 nt, Human
ugucaguauguggaagug

SEQ ID NO: 3253037 - RNA, 20 nt, Human
ugucaguauguggaagugug

SEQ ID NO: 3253038 - RNA, 19 nt, Human
ugucaguauguggaagugu

SEQ ID NO: 3253039 - RNA, 19 nt, Human
aguauguggaagugugggu

SEQ ID NO: 3253040 - RNA, 17 nt, Human
aguauguggaagugugg

SEQ ID NO: 3253041 - RNA, 15 nt, Human
aguauguggaagugu

SEQ ID NO: 3253042 - RNA, 23 nt, Human
agucccugccuggaccagccucu

SEQ ID NO: 3253043 - RNA, 22 nt, Human
agucccugccuggaccagccuc

SEQ ID NO: 3253044 - RNA, 14 nt, Human
agucccugccugga

SEQ ID NO: 3253045 - RNA, 21 nt, Human
agucccugccuggaccagccu

SEQ ID NO: 3253046 - RNA, 15 nt, Human
agucccugccuggac

SEQ ID NO: 3253047 - RNA, 22 nt, Human
uguaauuuaaaauugugaugug

SEQ ID NO: 3253048 - RNA, 21 nt, Human
uguaauuuaaaauugugaugu

SEQ ID NO: 3253049 - RNA, 20 nt, Human
uguaauuuaaaauugugaug

SEQ ID NO: 3253050 - RNA, 18 nt, Human
uguaauuuaaaauuguga

SEQ ID NO: 3253051 - RNA, 17 nt, Human
uguaauuuaaaauugug

SEQ ID NO: 3253052 - RNA, 23 nt, Human
agguugggagaaugucaguaugu

SEQ ID NO: 3253053 - RNA, 13 nt, Human
uguguguguguau

SEQ ID NO: 3253054 - RNA, 16 nt, Human
uguguguguguaugug

SEQ ID NO: 3253055 - RNA, 19 nt, Human
uguggcacuggggcagggg

SEQ ID NO: 3253056 - RNA, 16 nt, Human
uguugugugugggagu

SEQ ID NO: 3253057 - RNA, 15 nt, Human
uguugugugugggag

SEQ ID NO: 3253058 - RNA, 14 nt, Human
uguuguguguggga

SEQ ID NO: 3253059 - RNA, 23 nt, Human
agugugggucuguguguguguau

SEQ ID NO: 3253060 - RNA, 19 nt, Human
agugugggucugugugugu

SEQ ID NO: 3253061 - RNA, 15 nt, Human
agugugggucugugu

SEQ ID NO: 3253062 - RNA, 17 nt, Human
agugugggucugugugu

SEQ ID NO: 3253063 - RNA, 16 nt, Human
agugugggucugugug

SEQ ID NO: 3253064 - RNA, 16 nt, Human
uuagccuuugucccag

SEQ ID NO: 3253065 - RNA, 20 nt, Human
uaugugggggucuguguguu

SEQ ID NO: 3253066 - RNA, 19 nt, Human
uaugugggggucugugugu

SEQ ID NO: 3253067 - RNA, 18 nt, Human
uaugugggggucugugug

SEQ ID NO: 3253068 - RNA, 16 nt, Human
ucaguauguggaagug

SEQ ID NO: 3253069 - RNA, 20 nt, Human
uccauccuacccccugugcc

SEQ ID NO: 3253070 - RNA, 16 nt, Human
uccauccuacccccug

SEQ ID NO: 3253071 - RNA, 22 nt, Human
uccucugcccgggagcucagga

SEQ ID NO: 3253072 - RNA, 16 nt, Human
uccucugcccgggagc

SEQ ID NO: 3253073 - RNA, 13 nt, Human
uccucuccugucu

SEQ ID NO: 3253074 - RNA, 23 nt, Human
acucgugucuggcacagccuggc

SEQ ID NO: 3253075 - RNA, 22 nt, Human
acucgugucuggcacagccugg

SEQ ID NO: 3253076 - RNA, 16 nt, Human
acuggggcaggggccg

SEQ ID NO: 3253077 - RNA, 20 nt, Human
ucggggagccgggagccuga

SEQ ID NO: 3253078 - RNA, 15 nt, Human
ucuaccucuuggcug

SEQ ID NO: 3253079 - RNA, 23 nt, Human
acuugucccgggacaccuaggcu

SEQ ID NO: 3253080 - RNA, 22 nt, Human
ucuggcacagccuggcuguggc

SEQ ID NO: 3253081 - RNA, 23 nt, Human
ucuuggggaguuuaggguggggg

SEQ ID NO: 3253082 - RNA, 22 nt, Human
ucuuggggaguuuagggugggg

SEQ ID NO: 3253083 - RNA, 17 nt, Human
agagacgggcccuggug

SEQ ID NO: 3253084 - RNA, 22 nt, Human
agagggacuguucuuuuguccc

SEQ ID NO: 3253085 - RNA, 19 nt, Human
gucucccuccucugcccgg

SEQ ID NO: 3253086 - RNA, 19 nt, Human
gucuggcacagccuggcug

SEQ ID NO: 3253087 - RNA, 17 nt, Human
gucuggcacagccuggc

SEQ ID NO: 3253088 - RNA, 17 nt, Human
gucaguauguggaagug

SEQ ID NO: 3253089 - RNA, 21 nt, Human
gucaguauguggaaguguggg

SEQ ID NO: 3253090 - RNA, 13 nt, Human
gucaguuguauca

SEQ ID NO: 3253091 - RNA, 15 nt, Human
aaauuuaugugaugg

SEQ ID NO: 3253092 - RNA, 12 nt, Human
aaauuuauguga

SEQ ID NO: 3253093 - RNA, 12 nt, Human
aaauugugaugu

SEQ ID NO: 3253094 - RNA, 15 nt, Human
aaauugugauguguc

SEQ ID NO: 3253095 - RNA, 22 nt, Human
guggccuaaccugccgagaguc

SEQ ID NO: 3253096 - RNA, 21 nt, Human
guggccuaaccugccgagagu

SEQ ID NO: 3253097 - RNA, 15 nt, Human
guguguauguggggg

SEQ ID NO: 3253098 - RNA, 13 nt, Human
guguguauguggg

SEQ ID NO: 3253099 - RNA, 20 nt, Human
gugugucacccuuaggccag

SEQ ID NO: 3253100 - RNA, 14 nt, Human
gugugggucugugu

SEQ ID NO: 3253101 - RNA, 12 nt, Human
guguguaugugg

SEQ ID NO: 3253102 - RNA, 19 nt, Human
gugggguagguugggagaa

SEQ ID NO: 3253103 - RNA, 14 nt, Human
aaggcucuuuugua

SEQ ID NO: 3253104 - RNA, 15 nt, Human
uacccccugugccuu

SEQ ID NO: 3253105 - RNA, 13 nt, Human
uaccucuuggcug

SEQ ID NO: 3253106 - RNA, 19 nt, Human
uaccagagaaaaagggagg

SEQ ID NO: 3253107 - RNA, 20 nt, Human
uaauuuaaaauugugaugug

SEQ ID NO: 3253108 - RNA, 19 nt, Human
uaauuuaaaauugugaugu

SEQ ID NO: 3253109 - RNA, 14 nt, Human
uaucagcacgugug

SEQ ID NO: 3253110 - RNA, 21 nt, Human
uaugguaggaacugcugggcu

SEQ ID NO: 3253111 - RNA, 20 nt, Human
uaugccaccugaauaaagaa

SEQ ID NO: 3253112 - RNA, 21 nt, Human
uagacauuugcuaugagcugg

SEQ ID NO: 3253113 - RNA, 16 nt, Human
aauuccacacccucac

SEQ ID NO: 3253114 - RNA, 14 nt, Human
uagaagaagugugu

SEQ ID NO: 3253115 - RNA, 14 nt, Human
accaucucuuuacc

SEQ ID NO: 3253116 - RNA, 23 nt, Human
acagaggacaguauuugugggga

SEQ ID NO: 3253117 - RNA, 11 nt, Human
aauugugaugu

SEQ ID NO: 3253118 - RNA, 15 nt, Human
aauugugaugugucc

SEQ ID NO: 3253119 - RNA, 14 nt, Human
aauugugauguguc

SEQ ID NO: 3253120 - RNA, 19 nt, Human
accggggccugggcaggag

SEQ ID NO: 3253121 - RNA, 18 nt, Human
aagagaagggcagggcug

SEQ ID NO: 3253122 - RNA, 13 nt, Human
aagggagggggag

SEQ ID NO: 3253123 - RNA, 10 nt, Human
agagggcugc

SEQ ID NO: 3253124 - RNA, 23 nt, Human
agagaggccauucuuucccaaca

SEQ ID NO: 3253125 - RNA, 17 nt, Human
agcuccuuaaggcucuu

SEQ ID NO: 3253126 - RNA, 16 nt, Human
agcuccuuaaggcucu

SEQ ID NO: 3253127 - RNA, 19 nt, Human
agcuaauucuuugaccugu

SEQ ID NO: 3253128 - RNA, 16 nt, Human
aggaacugcugggcuu

SEQ ID NO: 3253129 - RNA, 16 nt, Human
aggaaccgaggcaggg

SEQ ID NO: 3253130 - RNA, 22 nt, Human
aggaacugcugggcuuggcagc

SEQ ID NO: 3253131 - RNA, 23 nt, Human
agucugagagaggccauucuuuc

SEQ ID NO: 3253132 - RNA, 16 nt, Human
agucugagagaggcca

SEQ ID NO: 3253133 - RNA, 19 nt, Human
auccagagucccugccugg

SEQ ID NO: 3253134 - RNA, 21 nt, Human
auccagagucccugccuggac

SEQ ID NO: 3253135 - RNA, 20 nt, Human
auccagagucccugccugga

SEQ ID NO: 3253136 - RNA, 16 nt, Human
augaugggucaguugu

SEQ ID NO: 3253137 - RNA, 17 nt, Human
caagccuuggcucuacc

SEQ ID NO: 3253138 - RNA, 22 nt, Human
ugaagagaagggcagggcugag

SEQ ID NO: 3253139 - RNA, 20 nt, Human
ugaagagaagggcagggcug

SEQ ID NO: 3253140 - RNA, 19 nt, Human
ugacucuuuccaaccggcu

SEQ ID NO: 3253141 - RNA, 13 nt, Human
ugacucuuuccaa

SEQ ID NO: 3253142 - RNA, 16 nt, Human
ugacucuuuccaaccg

SEQ ID NO: 3253143 - RNA, 14 nt, Human
ugacucuuuccaac

SEQ ID NO: 3253144 - RNA, 19 nt, Human
ucuuuccaaccggcuuugu

SEQ ID NO: 3253145 - RNA, 11 nt, Human
ucugugugugu

SEQ ID NO: 3253146 - RNA, 22 nt, Human
ucuucauuaccucagugagaag

SEQ ID NO: 3253147 - RNA, 15 nt, Human
ucccaacacugccag

SEQ ID NO: 3253148 - RNA, 14 nt, Human
ucccaacacugcca

SEQ ID NO: 3253149 - RNA, 16 nt, Human
ucccaacacugccagc

SEQ ID NO: 3253150 - RNA, 17 nt, Human
ucaucuuucuuccaaac

SEQ ID NO: 3253151 - RNA, 14 nt, Human
ucaucuuucuucca

SEQ ID NO: 3253152 - RNA, 12 nt, Human
ucaucuuucuuc

SEQ ID NO: 3253153 - RNA, 23 nt, Human
ucagccuccauccuacccccugu

SEQ ID NO: 3253154 - RNA, 20 nt, Human
ucagaucauuaucagccugu

SEQ ID NO: 3253155 - RNA, 19 nt, Human
uccugucccucauccauag

SEQ ID NO: 3253156 - RNA, 23 nt, Human
uccucgagaucccaacacugcca

SEQ ID NO: 3253157 - RNA, 16 nt, Human
uccucgagaucccaac

SEQ ID NO: 3253158 - RNA, 23 nt, Human
ucccaugagcuccuuaaggcucu

SEQ ID NO: 3253159 - RNA, 20 nt, Human
uggaaugaugggucaguugu

SEQ ID NO: 3253160 - RNA, 18 nt, Human
uggaacucgugucuggca

SEQ ID NO: 3253161 - RNA, 11 nt, Human
ugggggaugua

SEQ ID NO: 3253162 - RNA, 15 nt, Human
ugggggucugugugu

SEQ ID NO: 3253163 - RNA, 18 nt, Human
ugggggucuguguguuua

SEQ ID NO: 3253164 - RNA, 21 nt, Human
ugggagugaggaugucugggc

SEQ ID NO: 3253165 - RNA, 21 nt, Human
ugggacaccccgacuuuuguu

SEQ ID NO: 3253166 - RNA, 18 nt, Human
ugccaggauggaaugaug

SEQ ID NO: 3253167 - RNA, 12 nt, Human
ugcaccggggcc

SEQ ID NO: 3253168 - RNA, 22 nt, Human
ugcaccggggccugggcaggag

SEQ ID NO: 3253169 - RNA, 16 nt, Human
ugcaccggggccuggg

SEQ ID NO: 3253170 - RNA, 14 nt, Human
uguaccucugccuc

SEQ ID NO: 3253171 - RNA, 22 nt, Human
ugucacccuuaggccagcacca

SEQ ID NO: 3253172 - RNA, 21 nt, Human
uguccucagccccgcguggaa

SEQ ID NO: 3253173 - RNA, 17 nt, Human
ugucuggcacagccugg

SEQ ID NO: 3253174 - RNA, 16 nt, Human
ugugccuuuugccauc

SEQ ID NO: 3253175 - RNA, 17 nt, Human
ugugccuuggugugcug

SEQ ID NO: 3253176 - RNA, 17 nt, Human
ugugccuugucacgcca

SEQ ID NO: 3253177 - RNA, 20 nt, Human
ugugccuugucacgccagac

SEQ ID NO: 3253178 - RNA, 19 nt, Human
ugugccuugucacgccaga

SEQ ID NO: 3253179 - RNA, 18 nt, Human
uguguaauuuaaaauugu

SEQ ID NO: 3253180 - RNA, 11 nt, Human
uguguaauuua

SEQ ID NO: 3253181 - RNA, 23 nt, Human
uguguaauuuaaaauugugaugu

SEQ ID NO: 3253182 - RNA, 22 nt, Human
uguguaauuuaaaauugugaug

SEQ ID NO: 3253183 - RNA, 19 nt, Human
uguguaauuuaaaauugug

SEQ ID NO: 3253184 - RNA, 15 nt, Human
uguggccuaaccugc

SEQ ID NO: 3253185 - RNA, 15 nt, Human
uguggaagugugggu

SEQ ID NO: 3253186 - RNA, 15 nt, Human
ugugggaguguguaa

SEQ ID NO: 3253187 - RNA, 14 nt, Human
ugugggagugugua

SEQ ID NO: 3253188 - RNA, 16 nt, Human
uguucuuuugucccag

SEQ ID NO: 3253189 - RNA, 16 nt, Human
ugugugggagugugua

SEQ ID NO: 3253190 - RNA, 12 nt, Human
uguguauguggg

SEQ ID NO: 3253191 - RNA, 11 nt, Human
uguguaugugg

SEQ ID NO: 3253192 - RNA, 15 nt, Human
ugugugggagugugu

SEQ ID NO: 3253193 - RNA, 14 nt, Human
ugugugggagugug

SEQ ID NO: 3253194 - RNA, 22 nt, Human
uaagugccaggauggaaugaug

SEQ ID NO: 3253195 - RNA, 13 nt, Human
uaaauuuauguga

SEQ ID NO: 3253196 - RNA, 22 nt, Human
guugugugugggaguguguaau

SEQ ID NO: 3253197 - RNA, 16 nt, Human
guugugugugggagug

SEQ ID NO: 3253198 - RNA, 14 nt, Human
guugugugugggag

SEQ ID NO: 3253199 - RNA, 13 nt, Human
guuguguguggga

SEQ ID NO: 3253200 - RNA, 12 nt, Human
guuguguguggg

SEQ ID NO: 3253201 - RNA, 23 nt, Human
guuguccucagccccgcguggaa

SEQ ID NO: 3253202 - RNA, 17 nt, Human
guuguccucagccccgc

SEQ ID NO: 3253203 - RNA, 16 nt, Human
guuuagaagaagugug

SEQ ID NO: 3253204 - RNA, 20 nt, Human
uauauuuguaaauuuaugug

SEQ ID NO: 3253205 - RNA, 22 nt, Human
uauaaacaugcuugcauuauau

SEQ ID NO: 3253206 - RNA, 20 nt, Human
guguaauuuaaaauugugau

SEQ ID NO: 3253207 - RNA, 23 nt, Human
guguaauuuaaaauugugaugug

SEQ ID NO: 3253208 - RNA, 22 nt, Human
guguaauuuaaaauugugaugu

SEQ ID NO: 3253209 - RNA, 17 nt, Human
guggcuggaucugugag

SEQ ID NO: 3253210 - RNA, 21 nt, Human
guggggagagacgggcccugg

SEQ ID NO: 3253211 - RNA, 17 nt, Human
guguguuguguguggga

SEQ ID NO: 3253212 - RNA, 14 nt, Human
guguguugugugug

SEQ ID NO: 3253213 - RNA, 12 nt, Human
guguguugugug

SEQ ID NO: 3253214 - RNA, 15 nt, Human
guguguuuaugugug

SEQ ID NO: 3253215 - RNA, 14 nt, Human
guguguuuaugugu

SEQ ID NO: 3253216 - RNA, 16 nt, Human
guguguuuaugugugu

SEQ ID NO: 3253217 - RNA, 17 nt, Human
gugugggaguguguaau

SEQ ID NO: 3253218 - RNA, 17 nt, Human
gugucuggcacagccug

SEQ ID NO: 3253219 - RNA, 21 nt, Human
guguccugcaccggggccugg

SEQ ID NO: 3253220 - RNA, 12 nt, Human
guucugccagga

SEQ ID NO: 3253221 - RNA, 14 nt, Human
guucugccaggaga

SEQ ID NO: 3253222 - RNA, 13 nt, Human
guucugccaggag

SEQ ID NO: 3253223 - RNA, 13 nt, Human
gucccugccugga

SEQ ID NO: 3253224 - RNA, 18 nt, Human
gucugagagaggccauuc

SEQ ID NO: 3253225 - RNA, 15 nt, Human
gucugagagaggcca

SEQ ID NO: 3253226 - RNA, 14 nt, Human
gucugagagaggcc

SEQ ID NO: 3253227 - RNA, 13 nt, Human
gucugagagaggc

SEQ ID NO: 3253228 - RNA, 22 nt, Human
gucuguguguuuaugugugugu

SEQ ID NO: 3253229 - RNA, 21 nt, Human
gucuguguguuuaugugugug

SEQ ID NO: 3253230 - RNA, 11 nt, Human
gucuguguguu

SEQ ID NO: 3253231 - RNA, 20 nt, Human
gucuguguguguguaugugg

SEQ ID NO: 3253232 - RNA, 16 nt, Human
gucuguguguguguau

SEQ ID NO: 3253233 - RNA, 12 nt, Human
gucugugugugu

SEQ ID NO: 3253234 - RNA, 11 nt, Human
gucugugugug

SEQ ID NO: 3253235 - RNA, 21 nt, Human
gugacuauggagcugagcagg

SEQ ID NO: 3253236 - RNA, 21 nt, Human
gugccaggauggaaugauggg

SEQ ID NO: 3253237 - RNA, 14 nt, Human
gugccuuuugccau

SEQ ID NO: 3253238 - RNA, 21 nt, Human
gugauuuuuaugccaccugaa

SEQ ID NO: 3253239 - RNA, 19 nt, Human
guagugauuuuuaugccac

SEQ ID NO: 3253240 - RNA, 14 nt, Human
guagguugggagaa

SEQ ID NO: 3253241 - RNA, 22 nt, Human
gucagcugggacaccccgacuu

SEQ ID NO: 3253242 - RNA, 16 nt, Human
gucccugaagagaagg

SEQ ID NO: 3253243 - RNA, 14 nt, Human
cuacccccugugcc

SEQ ID NO: 3253244 - RNA, 13 nt, Human
cuacccccugugc

SEQ ID NO: 3253245 - RNA, 16 nt, Human
cguuguccucagcccc

SEQ ID NO: 3253246 - RNA, 23 nt, Human
cguggcuguggcauccagagucc

SEQ ID NO: 3253247 - RNA, 15 nt, Human
cgggucaucuguacc

SEQ ID NO: 3253248 - RNA, 22 nt, Human
cgggucaucuguaccucugccu

SEQ ID NO: 3253249 - RNA, 19 nt, Human
cggggccugggcaggaggg

SEQ ID NO: 3253250 - RNA, 17 nt, Human
cggggccugggcaggag

SEQ ID NO: 3253251 - RNA, 17 nt, Human
cgggggcagucugagag

SEQ ID NO: 3253252 - RNA, 21 nt, Human
cgggggcagucugagagaggc

SEQ ID NO: 3253253 - RNA, 18 nt, Human
cgggggcagucugagaga

SEQ ID NO: 3253254 - RNA, 17 nt, Human
cgggagccugacccuca

SEQ ID NO: 3253255 - RNA, 12 nt, Human
cggcugggagga

SEQ ID NO: 3253256 - RNA, 23 nt, Human
cucuuggggaguuuagggugggg

SEQ ID NO: 3253257 - RNA, 21 nt, Human
cucuuggggaguuuagggugg

SEQ ID NO: 3253258 - RNA, 18 nt, Human
cucuccugucucccuccu

SEQ ID NO: 3253259 - RNA, 17 nt, Human
cucuccugucucccucc

SEQ ID NO: 3253260 - RNA, 15 nt, Human
cucuccugucucccu

SEQ ID NO: 3253261 - RNA, 22 nt, Human
cucuccacucaugugacucuuu

SEQ ID NO: 3253262 - RNA, 21 nt, Human
cucuccacucaugugacucuu

SEQ ID NO: 3253263 - RNA, 23 nt, Human
cuccauccuacccccugugccuu

SEQ ID NO: 3253264 - RNA, 22 nt, Human
cuccauccuacccccugugccu

SEQ ID NO: 3253265 - RNA, 20 nt, Human
cuccauccuacccccugugc

SEQ ID NO: 3253266 - RNA, 18 nt, Human
cuccauccuacccccugu

SEQ ID NO: 3253267 - RNA, 17 nt, Human
cuccucgagaucccaac

SEQ ID NO: 3253268 - RNA, 24 nt, Human
cuccucgagaucccaacacugcca

SEQ ID NO: 3253269 - RNA, 21 nt, Human
cuccucgagaucccaacacug

SEQ ID NO: 3253270 - RNA, 14 nt, Human
cuguaccucugccu

SEQ ID NO: 3253271 - RNA, 23 nt, Human
cuggcacagccuggcuguggccu

SEQ ID NO: 3253272 - RNA, 15 nt, Human
cuggcacagccuggc

SEQ ID NO: 3253273 - RNA, 21 nt, Human
cuggcacagccuggcuguggc

SEQ ID NO: 3253274 - RNA, 16 nt, Human
cuggcacagccuggcu

SEQ ID NO: 3253275 - RNA, 18 nt, Human
cuggcuguggccuaaccu

SEQ ID NO: 3253276 - RNA, 19 nt, Human
cugggaggagggcaggcau

SEQ ID NO: 3253277 - RNA, 19 nt, Human
cugcccgggagcucaggaa

SEQ ID NO: 3253278 - RNA, 18 nt, Human
cugcccgggagcucagga

SEQ ID NO: 3253279 - RNA, 11 nt, Human
cugccaggaga

SEQ ID NO: 3253280 - RNA, 13 nt, Human
gaagaaguguguc

SEQ ID NO: 3253281 - RNA, 21 nt, Human
gaaggaucccaugagcuccuu

SEQ ID NO: 3253282 - RNA, 13 nt, Human
cuuucuuccaaac

SEQ ID NO: 3253283 - RNA, 19 nt, Human
cuuucuuccaaacaggcuc

SEQ ID NO: 3253284 - RNA, 12 nt, Human
cuuuggacuugu

SEQ ID NO: 3253285 - RNA, 18 nt, Human
cuugucacgccagacuuc

SEQ ID NO: 3253286 - RNA, 23 nt, Human
cuugucacgccagacuucccacg

SEQ ID NO: 3253287 - RNA, 21 nt, Human
cuuggggaguuuagggugggg

SEQ ID NO: 3253288 - RNA, 20 nt, Human
cuuggggaguuuaggguggg

SEQ ID NO: 3253289 - RNA, 17 nt, Human
gaccuuuccugaggaag

SEQ ID NO: 3253290 - RNA, 20 nt, Human
gacaccuaggcuaggguggg

SEQ ID NO: 3253291 - RNA, 16 nt, Human
gacaccuaggcuaggg

SEQ ID NO: 3253292 - RNA, 15 nt, Human
gacaccuaggcuagg

SEQ ID NO: 3253293 - RNA, 21 nt, Human
gagagaggccauucuuuccca

SEQ ID NO: 3253294 - RNA, 13 nt, Human
gagagaggccauu

SEQ ID NO: 3253295 - RNA, 22 nt, Human
gagaagccagcuuuccucauca

SEQ ID NO: 3253296 - RNA, 18 nt, Human
gacuugucccgggacacc

SEQ ID NO: 3253297 - RNA, 20 nt, Human
gagcuccuuaaggcucuuuu

SEQ ID NO: 3253298 - RNA, 20 nt, Human
gagcucaggaaccgaggcag

SEQ ID NO: 3253299 - RNA, 21 nt, Human
gagcucaggaaccgaggcagg

SEQ ID NO: 3253300 - RNA, 21 nt, Human
gagccugacccucaucuuucu

SEQ ID NO: 3253301 - RNA, 17 nt, Human
gaucccaugagcuccuu

SEQ ID NO: 3253302 - RNA, 15 nt, Human
gaucccaugagcucc

SEQ ID NO: 3253303 - RNA, 14 nt, Human
gaucauuaucagcc

SEQ ID NO: 3253304 - RNA, 13 nt, Human
gauagaugugugg

SEQ ID NO: 3253305 - RNA, 21 nt, Human
gaucugugaggggcucucuca

SEQ ID NO: 3253306 - RNA, 20 nt, Human
gauuuggggcucagaguggg

SEQ ID NO: 3253307 - RNA, 18 nt, Human
gcauuauauuuguaaauu

SEQ ID NO: 3253308 - RNA, 20 nt, Human
gcaggggccgggggcagucu

SEQ ID NO: 3253309 - RNA, 19 nt, Human
gcaggggccgggggcaguc

SEQ ID NO: 3253310 - RNA, 18 nt, Human
gcgcggcugggaggaggg

SEQ ID NO: 3253311 - RNA, 12 nt, Human
gcgcggcuggga

SEQ ID NO: 3253312 - RNA, 18 nt, Human
gccuuuggacuugucccg

SEQ ID NO: 3253313 - RNA, 19 nt, Human
gccucucauuccagaggaa

SEQ ID NO: 3253314 - RNA, 17 nt, Human
gccugacccucaucuuu

SEQ ID NO: 3253315 - RNA, 20 nt, Human
gccucucauuccagaggaag

SEQ ID NO: 3253316 - RNA, 21 nt, Human
gccucuccacucaugugacuc

SEQ ID NO: 3253317 - RNA, 24 nt, Human
gccucuccacucaugugacucuuu

SEQ ID NO: 3253318 - RNA, 21 nt, Human
gccaucauguuuacagaggac

SEQ ID NO: 3253319 - RNA, 17 nt, Human
gccaucauguuuacaga

SEQ ID NO: 3253320 - RNA, 15 nt, Human
gcccgggagcucagg

SEQ ID NO: 3253321 - RNA, 19 nt, Human
gcccgggagcucaggaacc

SEQ ID NO: 3253322 - RNA, 17 nt, Human
gcccgggagcucaggaa

SEQ ID NO: 3253323 - RNA, 19 nt, Human
cauccuacccccugugccu

SEQ ID NO: 3253324 - RNA, 21 nt, Human
cauccagagucccugccugga

SEQ ID NO: 3253325 - RNA, 16 nt, Human
caguggcuggaucugu

SEQ ID NO: 3253326 - RNA, 20 nt, Human
caguggcuggaucugugagg

SEQ ID NO: 3253327 - RNA, 18 nt, Human
caguggcuggaucuguga

SEQ ID NO: 3253328 - RNA, 18 nt, Human
cauaaucacaacccuuca

SEQ ID NO: 3253329 - RNA, 15 nt, Human
cauaccuggcccugu

SEQ ID NO: 3253330 - RNA, 19 nt, Human
cauggggcugauuguauuu

SEQ ID NO: 3253331 - RNA, 22 nt, Human
cauuaccucagugagaagccag

SEQ ID NO: 3253332 - RNA, 21 nt, Human
cauuaccucagugagaagcca

SEQ ID NO: 3253333 - RNA, 22 nt, Human
ccaucauguuuacagaggacag

SEQ ID NO: 3253334 - RNA, 20 nt, Human
ccaucauguuuacagaggac

SEQ ID NO: 3253335 - RNA, 18 nt, Human
cccagaaugccuccugca

SEQ ID NO: 3253336 - RNA, 21 nt, Human
cccagcuaugguucucucgca

SEQ ID NO: 3253337 - RNA, 14 nt, Human
cccucaucuuucuu

SEQ ID NO: 3253338 - RNA, 20 nt, Human
cccugccaucauguuuacag

SEQ ID NO: 3253339 - RNA, 18 nt, Human
cccugccuggaccagccu

SEQ ID NO: 3253340 - RNA, 13 nt, Human
cccugccuggacc

SEQ ID NO: 3253341 - RNA, 12 nt, Human
cccugccuggac

SEQ ID NO: 3253342 - RNA, 23 nt, Human
ccuccauccuacccccugugccu

SEQ ID NO: 3253343 - RNA, 22 nt, Human
ccuccauccuacccccugugcc

SEQ ID NO: 3253344 - RNA, 17 nt, Human
ccuccauccuacccccu

SEQ ID NO: 3253345 - RNA, 16 nt, Human
ccggcuuuguggcacu

SEQ ID NO: 3253346 - RNA, 19 nt, Human
ccggcuuuguggcacuggg

SEQ ID NO: 3253347 - RNA, 17 nt, Human
ccggcuuuguggcacug

SEQ ID NO: 3253348 - RNA, 15 nt, Human
ccgggagcucaggaa

SEQ ID NO: 3253349 - RNA, 13 nt, Human
ccgggagcucagg

SEQ ID NO: 3253350 - RNA, 15 nt, Human
ccggggccugggcag

SEQ ID NO: 3253351 - RNA, 19 nt, Human
ccggggccugggcaggagg

SEQ ID NO: 3253352 - RNA, 18 nt, Human
ccucagccccgcguggaa

SEQ ID NO: 3253353 - RNA, 14 nt, Human
aacaggcucagagg

SEQ ID NO: 3253354 - RNA, 14 nt, Human
acccucaucuuucu

SEQ ID NO: 3253355 - RNA, 13 nt, Human
acccucaucuuuc

SEQ ID NO: 3253356 - RNA, 19 nt, Human
acccucaucuuucuuccaa

SEQ ID NO: 3253357 - RNA, 16 nt, Human
acccucaucuuucuuc

SEQ ID NO: 3253358 - RNA, 13 nt, Human
accggggccuggg

SEQ ID NO: 3253359 - RNA, 22 nt, Human
agagaggccauucuuucccaac

SEQ ID NO: 3253360 - RNA, 12 nt, Human
agagaggccauu

SEQ ID NO: 3253361 - RNA, 13 nt, Human
agcaucucccagu

SEQ ID NO: 3253362 - RNA, 19 nt, Human
agagugggguagguuggga

SEQ ID NO: 3253363 - RNA, 19 nt, Human
aggcuaggguggggagaga

SEQ ID NO: 3253364 - RNA, 16 nt, Human
aggcuaggguggggag

SEQ ID NO: 3253365 - RNA, 15 nt, Human
aggcuagggugggga

SEQ ID NO: 3253366 - RNA, 14 nt, Human
aggcuagggugggg

SEQ ID NO: 3253367 - RNA, 22 nt, Human
agggauuuggggcucagagugg

SEQ ID NO: 3253368 - RNA, 19 nt, Human
aggcaucggggagccggga

SEQ ID NO: 3253369 - RNA, 15 nt, Human
aggagggcaggcauc

SEQ ID NO: 3253370 - RNA, 13 nt, Human
aggagggcaggca

SEQ ID NO: 3253371 - RNA, 15 nt, Human
aggagggaggugcuu

SEQ ID NO: 3253372 - RNA, 20 nt, Human
aggagacagguuagcugcuc

SEQ ID NO: 3253373 - RNA, 13 nt, Human
aggaugucugggc

SEQ ID NO: 3253374 - RNA, 16 nt, Human
cuccugucucccuccu

SEQ ID NO: 3253375 - RNA, 24 nt, Human
cuccucugcccgggagcucaggaa

SEQ ID NO: 3253376 - RNA, 22 nt, Human
cuccucugcccgggagcucagg

SEQ ID NO: 3253377 - RNA, 23 nt, Human
cucaugauagaaggcuaugggga

SEQ ID NO: 3253378 - RNA, 23 nt, Human
cucaggccgaaggaggagucagg

SEQ ID NO: 3253379 - RNA, 20 nt, Human
cucaggccugacucucagca

SEQ ID NO: 3253380 - RNA, 18 nt, Human
ccagagaaaaagggaggg

SEQ ID NO: 3253381 - RNA, 23 nt, Human
ccagacuucccacggcuccucga

SEQ ID NO: 3253382 - RNA, 22 nt, Human
cccccugugccuugucacgcca

SEQ ID NO: 3253383 - RNA, 21 nt, Human
ccccgcguggaacucgugucu

SEQ ID NO: 3253384 - RNA, 13 nt, Human
ccauugguguuga

SEQ ID NO: 3253385 - RNA, 21 nt, Human
ccaugagcuccuuaaggcucu

SEQ ID NO: 3253386 - RNA, 12 nt, Human
ccaugagcuccu

SEQ ID NO: 3253387 - RNA, 22 nt, Human
ccucugcccgggagcucaggaa

SEQ ID NO: 3253388 - RNA, 21 nt, Human
ccucugcccgggagcucagga

SEQ ID NO: 3253389 - RNA, 15 nt, Human
ccucuuggcugccuu

SEQ ID NO: 3253390 - RNA, 22 nt, Human
ccucuuggggaguuuagggugg

SEQ ID NO: 3253391 - RNA, 23 nt, Human
ccucuuggggaguuuaggguggg

SEQ ID NO: 3253392 - RNA, 12 nt, Human
ccugccuggacc

SEQ ID NO: 3253393 - RNA, 19 nt, Human
ccugccuggaccagccucu

SEQ ID NO: 3253394 - RNA, 17 nt, Human
caccuaggcuagggugg

SEQ ID NO: 3253395 - RNA, 19 nt, Human
caccuaggcuagggugggg

SEQ ID NO: 3253396 - RNA, 18 nt, Human
caccuaggcuaggguggg

SEQ ID NO: 3253397 - RNA, 17 nt, Human
auuuuuaugccaccuga

SEQ ID NO: 3253398 - RNA, 17 nt, Human
auucauggccuggggga

SEQ ID NO: 3253399 - RNA, 17 nt, Human
caucuguaccucugccu

SEQ ID NO: 3253400 - RNA, 17 nt, Human
cagcacguguggccugu

SEQ ID NO: 3253401 - RNA, 17 nt, Human
ggagagacgggcccugg

SEQ ID NO: 3253402 - RNA, 15 nt, Human
ggagagacgggcccu

SEQ ID NO: 3253403 - RNA, 23 nt, Human
ggcaggcaucggggagccgggag

SEQ ID NO: 3253404 - RNA, 13 nt, Human
ggaugucugggcc

SEQ ID NO: 3253405 - RNA, 18 nt, Human
ggccagcaccaucucuuu

SEQ ID NO: 3253406 - RNA, 20 nt, Human
ggcuccucgagaucccaaca

SEQ ID NO: 3253407 - RNA, 17 nt, Human
ggcuggaucugugaggg

SEQ ID NO: 3253408 - RNA, 15 nt, Human
aaaaagggaggggga

SEQ ID NO: 3253409 - RNA, 14 nt, Human
gggagggggagagg

SEQ ID NO: 3253410 - RNA, 16 nt, Human
aaaauugugauguguc

SEQ ID NO: 3253411 - RNA, 23 nt, Human
ggggucuguguguuuaugugugu

SEQ ID NO: 3253412 - RNA, 15 nt, Human
ggggccugggcagga

SEQ ID NO: 3253413 - RNA, 12 nt, Human
ggggccugggca

SEQ ID NO: 3253414 - RNA, 19 nt, Human
gcuauggggauagaugugu

SEQ ID NO: 3253415 - RNA, 21 nt, Human
gcuauggggauagaugugugg

SEQ ID NO: 3253416 - RNA, 15 nt, Human
gaaccgaggcaggga

SEQ ID NO: 3253417 - RNA, 12 nt, Human
gaaccgaggcag

SEQ ID NO: 3253418 - RNA, 20 nt, Human
gaacugcugggcuuggcagc

SEQ ID NO: 3253419 - RNA, 17 nt, Human
gaacugcugggcuuggc

SEQ ID NO: 3253420 - RNA, 24 nt, Human
gaagugugggucugugugugugua

SEQ ID NO: 3253421 - RNA, 21 nt, Human
gaagugugggucugugugugu

SEQ ID NO: 3253422 - RNA, 16 nt, Human
gcaccggggccugggc

SEQ ID NO: 3253423 - RNA, 14 nt, Human
gcaccggggccugg

SEQ ID NO: 3253424 - RNA, 18 nt, Human
gagucagggagagcugaa

SEQ ID NO: 3253425 - RNA, 17 nt, Human
gaguccaucagccucca

SEQ ID NO: 3253426 - RNA, 23 nt, Human
gaggugcuucuaguucugccagg

SEQ ID NO: 3253427 - RNA, 22 nt, Human
gaggugcuucuaguucugccag

SEQ ID NO: 3253428 - RNA, 16 nt, Human
gagggcugccuuugga

SEQ ID NO: 3253429 - RNA, 9 nt, Human
gagggcugc

SEQ ID NO: 3253430 - RNA, 14 nt, Human
cuggaucugugagg

SEQ ID NO: 3253431 - RNA, 13 nt, Human
cuggcccugugcc

SEQ ID NO: 3253432 - RNA, 13 nt, Human
cugggcaggaggg

SEQ ID NO: 3253433 - RNA, 16 nt, Human
cugcaccggggccugg

SEQ ID NO: 3253434 - RNA, 14 nt, Human
cugcaccggggccu

SEQ ID NO: 3253435 - RNA, 19 nt, Human
cugcaccggggccugggca

SEQ ID NO: 3253436 - RNA, 18 nt, Human
cugcaccggggccugggc

SEQ ID NO: 3253437 - RNA, 12 nt, Human
uugugauguguc

SEQ ID NO: 3253438 - RNA, 18 nt, Human
augaguuggcugggaaua

SEQ ID NO: 3253439 - RNA, 22 nt, Human
aucugugaggggcucucucaug

SEQ ID NO: 3253440 - RNA, 21 nt, Human
aucugugaggggcucucucau

SEQ ID NO: 3253441 - RNA, 16 nt, Human
uuggacuugucccggg

SEQ ID NO: 3253442 - RNA, 19 nt, Human
uuguaaauuuaugugaugg

SEQ ID NO: 3253443 - RNA, 23 nt, Human
aucauguuuacagaggacaguau

SEQ ID NO: 3253444 - RNA, 18 nt, Human
aucauguuuacagaggac

SEQ ID NO: 3253445 - RNA, 17 nt, Human
uucuaguucugccagga

SEQ ID NO: 3253446 - RNA, 16 nt, Human
uucuaguucugccagg

SEQ ID NO: 3253447 - RNA, 17 nt, Human
aucccaacacugccagc

SEQ ID NO: 3253448 - RNA, 16 nt, Human
aucccaacacugccag

SEQ ID NO: 3253449 - RNA, 15 nt, Human
aucccaacacugcca

SEQ ID NO: 3253450 - RNA, 11 nt, Human
aucccaacacu

SEQ ID NO: 3253451 - RNA, 12 nt, Human
uucugccaggag

SEQ ID NO: 3253452 - RNA, 20 nt, Human
auauuuguaaauuuauguga

SEQ ID NO: 3253453 - RNA, 18 nt, Human
uuuguaagguuuuuguag

SEQ ID NO: 3253454 - RNA, 15 nt, Human
uuuguagugauuuuu

SEQ ID NO: 3253455 - RNA, 22 nt, Human
uuuguagugauuuuuaugccac

SEQ ID NO: 3253456 - RNA, 23 nt, Human
uuugaccuguugggagugaggau

SEQ ID NO: 3253457 - RNA, 19 nt, Human
uuucccuuccuuccucucc

SEQ ID NO: 3253458 - RNA, 17 nt, Human
auguauauaaacaugcu

SEQ ID NO: 3253459 - RNA, 23 nt, Human
auguguguguguuguguguggga

SEQ ID NO: 3253460 - RNA, 22 nt, Human
auguguguguguuguguguggg

SEQ ID NO: 3253461 - RNA, 18 nt, Human
auguguguguguugugug

SEQ ID NO: 3253462 - RNA, 15 nt, Human
auuuaaaauugugau

SEQ ID NO: 3253463 - RNA, 18 nt, Human
auuguagagccagagguc

SEQ ID NO: 3253464 - RNA, 17 nt, Human
auuguagagccagaggu

SEQ ID NO: 3253465 - RNA, 15 nt, Human
ugaugggucaguugu

SEQ ID NO: 3253466 - RNA, 16 nt, Human
agccucuccacucaug

SEQ ID NO: 3253467 - RNA, 23 nt, Human
agccccgcguggaacucgugucu

SEQ ID NO: 3253468 - RNA, 22 nt, Human
ugccgagaguccaucagccucc

SEQ ID NO: 3253469 - RNA, 16 nt, Human
ugccaucauguuuaca

SEQ ID NO: 3253470 - RNA, 16 nt, Human
ugcuaugagcugggga

SEQ ID NO: 3253471 - RNA, 20 nt, Human
ugcuaugagcuggggauguc

SEQ ID NO: 3253472 - RNA, 19 nt, Human
ugcuaugagcuggggaugu

SEQ ID NO: 3253473 - RNA, 22 nt, Human
ugcuaugagcuggggaugucuc

SEQ ID NO: 3253474 - RNA, 15 nt, Human
ugccuugucacgcca

SEQ ID NO: 3253475 - RNA, 16 nt, Human
ugccuuggugugcugu

SEQ ID NO: 3253476 - RNA, 19 nt, Human
agguuuuuguagugauuuu

SEQ ID NO: 3253477 - RNA, 23 nt, Human
agguuuguuuagaagaagugugu

SEQ ID NO: 3253478 - RNA, 21 nt, Human
uguagugauuuuuaugccacc

SEQ ID NO: 3253479 - RNA, 12 nt, Human
uguauguggggg

SEQ ID NO: 3253480 - RNA, 21 nt, Human
aggguggggggggggcgcggc

SEQ ID NO: 3253481 - RNA, 14 nt, Human
uggggagggauuug

SEQ ID NO: 3253482 - RNA, 13 nt, Human
uggggagagacgg

SEQ ID NO: 3253483 - RNA, 22 nt, Human
uggggagggauuuggggcucag

SEQ ID NO: 3253484 - RNA, 15 nt, Human
uggggcucagagugg

SEQ ID NO: 3253485 - RNA, 22 nt, Human
ugggagaaugucaguaugugga

SEQ ID NO: 3253486 - RNA, 20 nt, Human
ugggagaaugucaguaugug

SEQ ID NO: 3253487 - RNA, 19 nt, Human
ugggagaaugucaguaugu

SEQ ID NO: 3253488 - RNA, 22 nt, Human
agggaaggaucccaugagcucc

SEQ ID NO: 3253489 - RNA, 15 nt, Human
agggaaggaucccau

SEQ ID NO: 3253490 - RNA, 23 nt, Human
agggaaggaucccaugagcuccu

SEQ ID NO: 3253491 - RNA, 12 nt, Human
aguucugccagg

SEQ ID NO: 3253492 - RNA, 20 nt, Human
aguucugccaggagacaggu

SEQ ID NO: 3253493 - RNA, 14 nt, Human
aguucugccaggag

SEQ ID NO: 3253494 - RNA, 13 nt, Human
aguucugccagga

SEQ ID NO: 3253495 - RNA, 13 nt, Human
uguuuaugugugu

SEQ ID NO: 3253496 - RNA, 16 nt, Human
uguuuaugugugugug

SEQ ID NO: 3253497 - RNA, 14 nt, Human
aguuuagggugggg

SEQ ID NO: 3253498 - RNA, 13 nt, Human
aguuuaggguggg

SEQ ID NO: 3253499 - RNA, 12 nt, Human
aguuuagggugg

SEQ ID NO: 3253500 - RNA, 18 nt, Human
uuaaaauugugauguguc

SEQ ID NO: 3253501 - RNA, 13 nt, Human
uuaaaauugugau

SEQ ID NO: 3253502 - RNA, 15 nt, Human
uuagaagaagugugu

SEQ ID NO: 3253503 - RNA, 14 nt, Human
uuagaagaagugug

SEQ ID NO: 3253504 - RNA, 16 nt, Human
uuagaagaaguguguc

SEQ ID NO: 3253505 - RNA, 17 nt, Human
ugugacucuuuccaacc

SEQ ID NO: 3253506 - RNA, 15 nt, Human
ugugacucuuuccaa

SEQ ID NO: 3253507 - RNA, 14 nt, Human
ugugacucuuucca

SEQ ID NO: 3253508 - RNA, 12 nt, Human
ugugacucuuuc

SEQ ID NO: 3253509 - RNA, 16 nt, Human
uguggcauccagaguc

SEQ ID NO: 3253510 - RNA, 21 nt, Human
uguggcauccagagucccugc

SEQ ID NO: 3253511 - RNA, 19 nt, Human
uguggcauccagagucccu

SEQ ID NO: 3253512 - RNA, 14 nt, Human
uguguguguaugug

SEQ ID NO: 3253513 - RNA, 20 nt, Human
ugugugugggaguguguaau

SEQ ID NO: 3253514 - RNA, 12 nt, Human
ugugugugggag

SEQ ID NO: 3253515 - RNA, 20 nt, Human
ugugggucugugugugugua

SEQ ID NO: 3253516 - RNA, 16 nt, Human
uauuuguaaauuuaug

SEQ ID NO: 3253517 - RNA, 22 nt, Human
uauuuguaaauuuaugugaugg

SEQ ID NO: 3253518 - RNA, 17 nt, Human
uauuuguaaauuuaugu

SEQ ID NO: 3253519 - RNA, 21 nt, Human
uccacucaugugacucuuucc

SEQ ID NO: 3253520 - RNA, 14 nt, Human
uccacucaugugac

SEQ ID NO: 3253521 - RNA, 21 nt, Human
uccaaccggcuuuguggcacu

SEQ ID NO: 3253522 - RNA, 19 nt, Human
acucaugugacucuuucca

SEQ ID NO: 3253523 - RNA, 18 nt, Human
acucaugugacucuuucc

SEQ ID NO: 3253524 - RNA, 20 nt, Human
ucugagagaggccauucuuu

SEQ ID NO: 3253525 - RNA, 14 nt, Human
ucugagagaggcca

SEQ ID NO: 3253526 - RNA, 16 nt, Human
ucucauuccagaggaa

SEQ ID NO: 3253527 - RNA, 17 nt, Human
ucgagaucccaacacug

SEQ ID NO: 3253528 - RNA, 21 nt, Human
ucgagaucccaacacugccag

SEQ ID NO: 3253529 - RNA, 18 nt, Human
ucgagaucccaacacugc

SEQ ID NO: 3253530 - RNA, 23 nt, Human
acuggccaguggcuggaucugug

SEQ ID NO: 3253531 - RNA, 21 nt, Human
agaggccauucuuucccaaca

SEQ ID NO: 3253532 - RNA, 20 nt, Human
agaucccaacacugccagca

SEQ ID NO: 3253533 - RNA, 19 nt, Human
agaucccaacacugccagc

SEQ ID NO: 3253534 - RNA, 18 nt, Human
agaucccaacacugccag

SEQ ID NO: 3253535 - RNA, 17 nt, Human
agagucccugccuggac

SEQ ID NO: 3253536 - RNA, 14 nt, Human
agagucccugccug

SEQ ID NO: 3253537 - RNA, 23 nt, Human
agaguccaucagccuccauccua

SEQ ID NO: 3253538 - RNA, 19 nt, Human
agaaugucaguauguggaa

SEQ ID NO: 3253539 - RNA, 17 nt, Human
agaaugucaguaugugg

SEQ ID NO: 3253540 - RNA, 13 nt, Human
agaaugucaguau

SEQ ID NO: 3253541 - RNA, 16 nt, Human
agaaugucaguaugug

SEQ ID NO: 3253542 - RNA, 15 nt, Human
agaaugucaguaugu

SEQ ID NO: 3253543 - RNA, 21 nt, Human
agacauuugcuaugagcuggg

SEQ ID NO: 3253544 - RNA, 19 nt, Human
agacuucccacggcuccuc

SEQ ID NO: 3253545 - RNA, 13 nt, Human
ucuuucuuccaaa

SEQ ID NO: 3253546 - RNA, 22 nt, Human
aacacugccagcauuucccuuc

SEQ ID NO: 3253547 - RNA, 12 nt, Human
aacacugccagc

SEQ ID NO: 3253548 - RNA, 16 nt, Human
gucucccuccucugcc

SEQ ID NO: 3253549 - RNA, 12 nt, Human
gucucccuccuc

SEQ ID NO: 3253550 - RNA, 19 nt, Human
aacucgugucuggcacagc

SEQ ID NO: 3253551 - RNA, 15 nt, Human
guauguggaagugug

SEQ ID NO: 3253552 - RNA, 17 nt, Human
guauguggaaguguggg

SEQ ID NO: 3253553 - RNA, 16 nt, Human
guauguggaagugugg

SEQ ID NO: 3253554 - RNA, 20 nt, Human
guaugugggggucugugugu

SEQ ID NO: 3253555 - RNA, 19 nt, Human
guaugugggggucugugug

SEQ ID NO: 3253556 - RNA, 21 nt, Human
guauguggaagugugggucug

SEQ ID NO: 3253557 - RNA, 18 nt, Human
guauguggaagugugggu

SEQ ID NO: 3253558 - RNA, 16 nt, Human
guaggaacugcugggc

SEQ ID NO: 3253559 - RNA, 14 nt, Human
guguguaauuuaaa

SEQ ID NO: 3253560 - RNA, 14 nt, Human
gugggaguguguaa

SEQ ID NO: 3253561 - RNA, 13 nt, Human
gugggagugugua

SEQ ID NO: 3253562 - RNA, 14 nt, Human
gugguggcucggga

SEQ ID NO: 3253563 - RNA, 16 nt, Human
gugggucugugugugu

SEQ ID NO: 3253564 - RNA, 13 nt, Human
gugggucugugug

SEQ ID NO: 3253565 - RNA, 23 nt, Human
guggggggggggcgcggcuggga

SEQ ID NO: 3253566 - RNA, 14 nt, Human
guggcacuggggca

SEQ ID NO: 3253567 - RNA, 22 nt, Human
guggaagugugggucugugugu

SEQ ID NO: 3253568 - RNA, 21 nt, Human
guggaagugugggucugugug

SEQ ID NO: 3253569 - RNA, 20 nt, Human
guggaagugugggucugugu

SEQ ID NO: 3253570 - RNA, 19 nt, Human
guggaagugugggucugug

SEQ ID NO: 3253571 - RNA, 15 nt, Human
guggaaguguggguc

SEQ ID NO: 3253572 - RNA, 14 nt, Human
guggaagugugggu

SEQ ID NO: 3253573 - RNA, 23 nt, Human
gugcuauuguagagccagagguc

SEQ ID NO: 3253574 - RNA, 18 nt, Human
guuguaucagcacgugug

SEQ ID NO: 3253575 - RNA, 16 nt, Human
guuuaugugugugugu

SEQ ID NO: 3253576 - RNA, 13 nt, Human
guuuaugugugug

SEQ ID NO: 3253577 - RNA, 23 nt, Human
aaggcuauggggauagaugugug

SEQ ID NO: 3253578 - RNA, 16 nt, Human
guuuucuuaacuuaaa

SEQ ID NO: 3253579 - RNA, 17 nt, Human
acaccccgacuuuuguu

SEQ ID NO: 3253580 - RNA, 14 nt, Human
aauuuaugugaugg

SEQ ID NO: 3253581 - RNA, 16 nt, Human
uaauuuaaaauuguga

SEQ ID NO: 3253582 - RNA, 15 nt, Human
uaauuuaaaauugug

SEQ ID NO: 3253583 - RNA, 18 nt, Human
uacagaggacaguauuug

SEQ ID NO: 3253584 - RNA, 14 nt, Human
uacagaggacagua

SEQ ID NO: 3253585 - RNA, 18 nt, Human
ucacgccagacuucccac

SEQ ID NO: 3253586 - RNA, 16 nt, Human
uccuuaaggcucuuuu

SEQ ID NO: 3253587 - RNA, 19 nt, Human
uccuuaaggcucuuuugua

SEQ ID NO: 3253588 - RNA, 18 nt, Human
ucucccuccucugcccgg

SEQ ID NO: 3253589 - RNA, 19 nt, Human
ucuuuuguaagguuuuugu

SEQ ID NO: 3253590 - RNA, 20 nt, Human
ucuguguguuuaugugugug

SEQ ID NO: 3253591 - RNA, 19 nt, Human
ucuguguguuuaugugugu

SEQ ID NO: 3253592 - RNA, 22 nt, Human
ucuguguguguguauguggggg

SEQ ID NO: 3253593 - RNA, 16 nt, Human
ucuguguguuuaugug

SEQ ID NO: 3253594 - RNA, 15 nt, Human
ucuguguguuuaugu

SEQ ID NO: 3253595 - RNA, 13 nt, Human
ucugugugugugu

SEQ ID NO: 3253596 - RNA, 21 nt, Human
ucuguguguguguaugugggg

SEQ ID NO: 3253597 - RNA, 19 nt, Human
ucuguguguguguaugugg

SEQ ID NO: 3253598 - RNA, 18 nt, Human
ucuguguguguguaugug

SEQ ID NO: 3253599 - RNA, 15 nt, Human
ucuguguguguguau

SEQ ID NO: 3253600 - RNA, 13 nt, Human
uaggcuagggugg

SEQ ID NO: 3253601 - RNA, 21 nt, Human
uagugauuuuuaugccaccug

SEQ ID NO: 3253602 - RNA, 20 nt, Human
uagugauuuuuaugccaccu

SEQ ID NO: 3253603 - RNA, 22 nt, Human
uagugauuuuuaugccaccuga

SEQ ID NO: 3253604 - RNA, 15 nt, Human
uaucagcacgugugg

SEQ ID NO: 3253605 - RNA, 18 nt, Human
uaggaacugcugggcuug

SEQ ID NO: 3253606 - RNA, 15 nt, Human
uaggaacugcugggc

SEQ ID NO: 3253607 - RNA, 11 nt, Human
uagaugugugg

SEQ ID NO: 3253608 - RNA, 19 nt, Human
uaauucuuugaccuguugg

SEQ ID NO: 3253609 - RNA, 16 nt, Human
uggggcaggggccggg

SEQ ID NO: 3253610 - RNA, 18 nt, Human
uggggcaggggccggggg

SEQ ID NO: 3253611 - RNA, 23 nt, Human
uggaagugugggucugugugugu

SEQ ID NO: 3253612 - RNA, 20 nt, Human
uggaagugugggucugugug

SEQ ID NO: 3253613 - RNA, 21 nt, Human
uggaagugugggucugugugu

SEQ ID NO: 3253614 - RNA, 20 nt, Human
ugcuucuaguucugccagga

SEQ ID NO: 3253615 - RNA, 19 nt, Human
ugcuucuaguucugccagg

SEQ ID NO: 3253616 - RNA, 18 nt, Human
ugcuucuaguucugccag

SEQ ID NO: 3253617 - RNA, 14 nt, Human
ugucacgccagacu

SEQ ID NO: 3253618 - RNA, 16 nt, Human
uguaaauuuaugugau

SEQ ID NO: 3253619 - RNA, 15 nt, Human
uguaaauuuauguga

SEQ ID NO: 3253620 - RNA, 18 nt, Human
ugugaggggcucucucau

SEQ ID NO: 3253621 - RNA, 16 nt, Human
ugugggucugugugug

SEQ ID NO: 3253622 - RNA, 14 nt, Human
ugugggucugugug

SEQ ID NO: 3253623 - RNA, 16 nt, Human
ugugggggucugugug

SEQ ID NO: 3253624 - RNA, 15 nt, Human
uuacagaggacagua

SEQ ID NO: 3253625 - RNA, 21 nt, Human
uguuuacagaggacaguauuu

SEQ ID NO: 3253626 - RNA, 14 nt, Human
uguuuacagaggac

SEQ ID NO: 3253627 - RNA, 23 nt, Human
uguguugugugugggagugugua

SEQ ID NO: 3253628 - RNA, 14 nt, Human
uguguugugugugg

SEQ ID NO: 3253629 - RNA, 13 nt, Human
uguguuuaugugu

SEQ ID NO: 3253630 - RNA, 15 nt, Human
uguguuuaugugugu

SEQ ID NO: 3253631 - RNA, 11 nt, Human
uguguguaugu

SEQ ID NO: 3253632 - RNA, 13 nt, Human
uguguaugugggg

SEQ ID NO: 3253633 - RNA, 14 nt, Human
uguguauguggggg

SEQ ID NO: 3253634 - RNA, 23 nt, Human
uguguaugugggggucugugugu

SEQ ID NO: 3253635 - RNA, 17 nt, Human
uuuagaagaaguguguc

SEQ ID NO: 3253636 - RNA, 19 nt, Human
uuuagaagaagugugucac

SEQ ID NO: 3253637 - RNA, 13 nt, Human
ccaucagccucca

SEQ ID NO: 3253638 - RNA, 13 nt, Human
cccaacaccucuu

SEQ ID NO: 3253639 - RNA, 21 nt, Human
ccacgucagcugggacacccc

SEQ ID NO: 3253640 - RNA, 20 nt, Human
ccacacagacuugggcaggg

SEQ ID NO: 3253641 - RNA, 16 nt, Human
ccacacccucacugcu

SEQ ID NO: 3253642 - RNA, 19 nt, Human
ccaagccuuggcucuaccc

SEQ ID NO: 3253643 - RNA, 13 nt, Human
ccaacacugccag

SEQ ID NO: 3253644 - RNA, 16 nt, Human
ccaacacugccagcau

SEQ ID NO: 3253645 - RNA, 15 nt, Human
ccaacacugccagca

SEQ ID NO: 3253646 - RNA, 14 nt, Human
ccaacacugccagc

SEQ ID NO: 3253647 - RNA, 16 nt, Human
ccaaacaggcucagag

SEQ ID NO: 3253648 - RNA, 19 nt, Human
cauugucccugaagagaag

SEQ ID NO: 3253649 - RNA, 22 nt, Human
ccgacuuuuguuuaccagagaa

SEQ ID NO: 3253650 - RNA, 15 nt, Human
ccuccucugcccggg

SEQ ID NO: 3253651 - RNA, 14 nt, Human
ccuccucugcccgg

SEQ ID NO: 3253652 - RNA, 23 nt, Human
ccucuccacucaugugacucuuu

SEQ ID NO: 3253653 - RNA, 23 nt, Human
cgauugcaggagucccugccauc

SEQ ID NO: 3253654 - RNA, 21 nt, Human
cgauugcaggagucccugcca

SEQ ID NO: 3253655 - RNA, 23 nt, Human
cggcugggaggagggcaggcauc

SEQ ID NO: 3253656 - RNA, 18 nt, Human
cggcugggaggagggcag

SEQ ID NO: 3253657 - RNA, 22 nt, Human
cggcugggaggagggcaggcau

SEQ ID NO: 3253658 - RNA, 16 nt, Human
cgggagcucaggaacc

SEQ ID NO: 3253659 - RNA, 19 nt, Human
cgucagcugggacaccccg

SEQ ID NO: 3253660 - RNA, 14 nt, Human
ccuggaccagccuc

SEQ ID NO: 3253661 - RNA, 16 nt, Human
ccuggaccagccucuc

SEQ ID NO: 3253662 - RNA, 15 nt, Human
ccuggaccagccucu

SEQ ID NO: 3253663 - RNA, 20 nt, Human
cugccagcauuucccuuccu

SEQ ID NO: 3253664 - RNA, 16 nt, Human
cugccaggagacaggu

SEQ ID NO: 3253665 - RNA, 14 nt, Human
cuggcacagccugg

SEQ ID NO: 3253666 - RNA, 12 nt, Human
cuggaccagccu

SEQ ID NO: 3253667 - RNA, 17 nt, Human
cuccauugguguugaca

SEQ ID NO: 3253668 - RNA, 15 nt, Human
cucauuccagaggaa

SEQ ID NO: 3253669 - RNA, 17 nt, Human
cucauuccagaggaagg

SEQ ID NO: 3253670 - RNA, 13 nt, Human
cuccuuaaggcuc

SEQ ID NO: 3253671 - RNA, 22 nt, Human
cuccuuaaggcucuuuuguaag

SEQ ID NO: 3253672 - RNA, 19 nt, Human
cucuccacucaugugacuc

SEQ ID NO: 3253673 - RNA, 21 nt, Human
cugaagagaagggcagggcug

SEQ ID NO: 3253674 - RNA, 14 nt, Human
cuuccuuccucucc

SEQ ID NO: 3253675 - RNA, 20 nt, Human
gaagcguuguccucagcccc

SEQ ID NO: 3253676 - RNA, 19 nt, Human
gaagcguuguccucagccc

SEQ ID NO: 3253677 - RNA, 13 nt, Human
gaagcguuguccu

SEQ ID NO: 3253678 - RNA, 17 nt, Human
gaagagaagggcagggc

SEQ ID NO: 3253679 - RNA, 18 nt, Human
gacuucccacggcuccuc

SEQ ID NO: 3253680 - RNA, 22 nt, Human
gaguguguaauuuaaaauugug

SEQ ID NO: 3253681 - RNA, 21 nt, Human
gaguguguaauuuaaaauugu

SEQ ID NO: 3253682 - RNA, 19 nt, Human
gcacagccuggcuguggcc

SEQ ID NO: 3253683 - RNA, 12 nt, Human
gcacagccuggc

SEQ ID NO: 3253684 - RNA, 15 nt, Human
gcaggagggaggugc

SEQ ID NO: 3253685 - RNA, 21 nt, Human
gccgagaguccaucagccucc

SEQ ID NO: 3253686 - RNA, 19 nt, Human
gccgggagccugacccuca

SEQ ID NO: 3253687 - RNA, 14 nt, Human
gccgggagccugac

SEQ ID NO: 3253688 - RNA, 13 nt, Human
gccgggagccuga

SEQ ID NO: 3253689 - RNA, 17 nt, Human
gccuaaccugccgagag

SEQ ID NO: 3253690 - RNA, 13 nt, Human
gccccgcguggaa

SEQ ID NO: 3253691 - RNA, 18 nt, Human
gcuucuaguucugccagg

SEQ ID NO: 3253692 - RNA, 21 nt, Human
gcuucuaguucugccaggaga

SEQ ID NO: 3253693 - RNA, 20 nt, Human
gcuucuaguucugccaggag

SEQ ID NO: 3253694 - RNA, 19 nt, Human
gcuucuaguucugccagga

SEQ ID NO: 3253695 - RNA, 20 nt, Human
ggaaccgaggcagggaagga

SEQ ID NO: 3253696 - RNA, 16 nt, Human
ggaaccgaggcaggga

SEQ ID NO: 3253697 - RNA, 15 nt, Human
ggaaccgaggcaggg

SEQ ID NO: 3253698 - RNA, 17 nt, Human
ggaacucgugucuggca

SEQ ID NO: 3253699 - RNA, 20 nt, Human
gcugccuuuggacuuguccc

SEQ ID NO: 3253700 - RNA, 15 nt, Human
gcugccuuuggacuu

SEQ ID NO: 3253701 - RNA, 13 nt, Human
gcuggaucuguga

SEQ ID NO: 3253702 - RNA, 23 nt, Human
gcugggacaccccgacuuuuguu

SEQ ID NO: 3253703 - RNA, 19 nt, Human
gcugggaggagggcaggca

SEQ ID NO: 3253704 - RNA, 17 nt, Human
gcugggaggagggcagg

SEQ ID NO: 3253705 - RNA, 20 nt, Human
ggcagucugagagaggccau

SEQ ID NO: 3253706 - RNA, 20 nt, Human
ggaucccaugagcuccuuaa

SEQ ID NO: 3253707 - RNA, 17 nt, Human
ggaucccaugagcuccu

SEQ ID NO: 3253708 - RNA, 16 nt, Human
ggagccgggagccuga

SEQ ID NO: 3253709 - RNA, 20 nt, Human
ggaggagggcaggcaucggg

SEQ ID NO: 3253710 - RNA, 15 nt, Human
ggaggagggcaggca

SEQ ID NO: 3253711 - RNA, 14 nt, Human
ggaggagggcaggc

SEQ ID NO: 3253712 - RNA, 13 nt, Human
ggagggcaggcau

SEQ ID NO: 3253713 - RNA, 12 nt, Human
ggagggauuugg

SEQ ID NO: 3253714 - RNA, 15 nt, Human
ggauagaugugugga

SEQ ID NO: 3253715 - RNA, 14 nt, Human
ggauagaugugugg

SEQ ID NO: 3253716 - RNA, 13 nt, Human
ggauagaugugug

SEQ ID NO: 3253717 - RNA, 17 nt, Human
ggaaggaucccaugagc

SEQ ID NO: 3253718 - RNA, 21 nt, Human
gguguccugcaccggggccug

SEQ ID NO: 3253719 - RNA, 15 nt, Human
ggugguggcucggga

SEQ ID NO: 3253720 - RNA, 15 nt, Human
ggggcagucugagag

SEQ ID NO: 3253721 - RNA, 18 nt, Human
ggggcagucugagagagg

SEQ ID NO: 3253722 - RNA, 19 nt, Human
ggggcagucugagagaggc

SEQ ID NO: 3253723 - RNA, 16 nt, Human
ggggcgcggcugggag

SEQ ID NO: 3253724 - RNA, 15 nt, Human
ggggcgcggcuggga

SEQ ID NO: 3253725 - RNA, 17 nt, Human
gggccugggcaggaggg

SEQ ID NO: 3253726 - RNA, 16 nt, Human
gggccugggcaggagg

SEQ ID NO: 3253727 - RNA, 15 nt, Human
gggggagagggcugc

SEQ ID NO: 3253728 - RNA, 15 nt, Human
gggaaggaucccaug

SEQ ID NO: 3253729 - RNA, 17 nt, Human
gggcagucugagagagg

SEQ ID NO: 3253730 - RNA, 19 nt, Human
gggcagucugagagaggcc

SEQ ID NO: 3253731 - RNA, 18 nt, Human
gggcagucugagagaggc

SEQ ID NO: 3253732 - RNA, 23 nt, Human
gggaggugcuucuaguucugcca

SEQ ID NO: 3253733 - RNA, 11 nt, Human
gggagugugua

SEQ ID NO: 3253734 - RNA, 16 nt, Human
gggaguuuaggguggg

SEQ ID NO: 3253735 - RNA, 14 nt, Human
gggauagaugugug

SEQ ID NO: 3253736 - RNA, 13 nt, Human
gggauagaugugu

SEQ ID NO: 3253737 - RNA, 12 nt, Human
gggccugggcag

SEQ ID NO: 3253738 - RNA, 15 nt, Human
gggccugggcaggag

SEQ ID NO: 3253739 - RNA, 13 nt, Human
gggccugggcagg

SEQ ID NO: 3253740 - RNA, 21 nt, Human
gggcagucugagagaggccau

SEQ ID NO: 3253741 - RNA, 20 nt, Human
gggcagucugagagaggcca

SEQ ID NO: 3253742 - RNA, 17 nt, Human
uuggacaaccucauuuu

SEQ ID NO: 3253743 - RNA, 13 nt, Human
ugccaucauguuu

SEQ ID NO: 3253744 - RNA, 18 nt, Human
aaggaauuauucccauga

SEQ ID NO: 3253745 - RNA, 21 nt, Human
uuggcagcccgggucaucugu

SEQ ID NO: 3253746 - RNA, 16 nt, Human
auagcaccuccacaua

SEQ ID NO: 3253747 - RNA, 17 nt, Human
aauaagugccaggaugg

SEQ ID NO: 3253748 - RNA, 16 nt, Human
aaugucaguaugugga

SEQ ID NO: 3253749 - RNA, 22 nt, Human
aaugucaguauguggaagugug

SEQ ID NO: 3253750 - RNA, 13 nt, Human
acucagucuuuaa

SEQ ID NO: 3253751 - RNA, 16 nt, Human
acgccagacuucccac

SEQ ID NO: 3253752 - RNA, 22 nt, Human
acgccagacuucccacggcucc

SEQ ID NO: 3253753 - RNA, 11 nt, Human
acacugccagc

SEQ ID NO: 3253754 - RNA, 15 nt, Human
acagguuagcugcuc

SEQ ID NO: 3253755 - RNA, 12 nt, Human
accccgacuuuu

SEQ ID NO: 3253756 - RNA, 15 nt, Human
accccgacuuuuguu

SEQ ID NO: 3253757 - RNA, 13 nt, Human
agccagaggucug

SEQ ID NO: 3253758 - RNA, 16 nt, Human
agaggguguccugcac

SEQ ID NO: 3253759 - RNA, 14 nt, Human
agacgggcccuggu

SEQ ID NO: 3253760 - RNA, 21 nt, Human
aggcuauggggauagaugugu

SEQ ID NO: 3253761 - RNA, 22 nt, Human
aggcuauggggauagaugugug

SEQ ID NO: 3253762 - RNA, 19 nt, Human
aggcuauggggauagaugu

SEQ ID NO: 3253763 - RNA, 21 nt, Human
aggugcuucuaguucugccag

SEQ ID NO: 3253764 - RNA, 22 nt, Human
aggugcuucuaguucugccagg

SEQ ID NO: 3253765 - RNA, 23 nt, Human
aggugcuucuaguucugccagga

SEQ ID NO: 3253766 - RNA, 20 nt, Human
aguuguaucagcacgugugg

SEQ ID NO: 3253767 - RNA, 23 nt, Human
aguuguaucagcacguguggccu

SEQ ID NO: 3253768 - RNA, 16 nt, Human
augugggggucugugu

SEQ ID NO: 3253769 - RNA, 17 nt, Human
augugggggucugugug

SEQ ID NO: 3253770 - RNA, 18 nt, Human
augugggggucugugugu

SEQ ID NO: 3253771 - RNA, 22 nt, Human
gucccgggacaccuaggcuagg

SEQ ID NO: 3253772 - RNA, 15 nt, Human
guccaucagccucca

SEQ ID NO: 3253773 - RNA, 10 nt, Human
gugauguguc

SEQ ID NO: 3253774 - RNA, 19 nt, Human
aagaagugugucacccuua

SEQ ID NO: 3253775 - RNA, 21 nt, Human
aagucacuggccaguggcugg

SEQ ID NO: 3253776 - RNA, 20 nt, Human
aagugugggucugugugugu

SEQ ID NO: 3253777 - RNA, 10 nt, Human
aagugugggu

SEQ ID NO: 3253778 - RNA, 17 nt, Human
aagugugggucugugug

SEQ ID NO: 3253779 - RNA, 18 nt, Human
aagugugggucugugugu

SEQ ID NO: 3253780 - RNA, 15 nt, Human
uaaaauugugaugug

SEQ ID NO: 3253781 - RNA, 16 nt, Human
uaaaauugugaugugu

SEQ ID NO: 3253782 - RNA, 13 nt, Human
guguauguggggg

SEQ ID NO: 3253783 - RNA, 21 nt, Human
guguaugugggggucugugug

SEQ ID NO: 3253784 - RNA, 20 nt, Human
uauggggauagaugugugga

SEQ ID NO: 3253785 - RNA, 19 nt, Human
uauggggauagaugugugg

SEQ ID NO: 3253786 - RNA, 12 nt, Human
uauguggaagug

SEQ ID NO: 3253787 - RNA, 16 nt, Human
uauguggaaguguggg

SEQ ID NO: 3253788 - RNA, 16 nt, Human
acaccucuuggggagu

SEQ ID NO: 3253789 - RNA, 22 nt, Human
uaacuuaaaagaacauguauau

SEQ ID NO: 3253790 - RNA, 21 nt, Human
acucuggagguuuguuuagaa

SEQ ID NO: 3253791 - RNA, 18 nt, Human
uccugcaccggggccugg

SEQ ID NO: 3253792 - RNA, 23 nt, Human
ucacagcaagucacuggccagug

SEQ ID NO: 3253793 - RNA, 12 nt, Human
accuaggcuagg

SEQ ID NO: 3253794 - RNA, 17 nt, Human
accuaggcuaggguggg

SEQ ID NO: 3253795 - RNA, 17 nt, Human
ucauguuuacagaggac

SEQ ID NO: 3253796 - RNA, 18 nt, Human
ucaugugacucuuuccaa

SEQ ID NO: 3253797 - RNA, 19 nt, Human
ucaugugacucuuuccaac

SEQ ID NO: 3253798 - RNA, 14 nt, Human
ucaugugacucuuu

SEQ ID NO: 3253799 - RNA, 17 nt, Human
ucaugugacucuuucca

SEQ ID NO: 3253800 - RNA, 16 nt, Human
ucauaaauuuaugguu

SEQ ID NO: 3253801 - RNA, 13 nt, Human
accgaggcaggga

SEQ ID NO: 3253802 - RNA, 14 nt, Human
ucaguauguggaag

SEQ ID NO: 3253803 - RNA, 12 nt, Human
ucaguaugugga

SEQ ID NO: 3253804 - RNA, 17 nt, Human
ucagauuugccuuauug

SEQ ID NO: 3253805 - RNA, 15 nt, Human
ucuaguucugccagg

SEQ ID NO: 3253806 - RNA, 16 nt, Human
ucuaguucugccagga

SEQ ID NO: 3253807 - RNA, 17 nt, Human
ucuaguucugccaggag

SEQ ID NO: 3253808 - RNA, 14 nt, Human
ucuaguucugccag

SEQ ID NO: 3253809 - RNA, 14 nt, Human
agaagaaguguguc

SEQ ID NO: 3253810 - RNA, 13 nt, Human
ugagagaggccau

SEQ ID NO: 3253811 - RNA, 22 nt, Human
auguggaagugugggucugugu

SEQ ID NO: 3253812 - RNA, 23 nt, Human
auguggaagugugggucugugug

SEQ ID NO: 3253813 - RNA, 15 nt, Human
auguggaaguguggg

SEQ ID NO: 3253814 - RNA, 16 nt, Human
auguggaagugugggu

SEQ ID NO: 3253815 - RNA, 13 nt, Human
auguggaagugug

SEQ ID NO: 3253816 - RNA, 10 nt, Human
augugugugu

SEQ ID NO: 3253817 - RNA, 16 nt, Human
uuuuguuuaccagaga

SEQ ID NO: 3253818 - RNA, 13 nt, Human
auugugauguguc

SEQ ID NO: 3253819 - RNA, 14 nt, Human
auugugaugugucc

SEQ ID NO: 3253820 - RNA, 15 nt, Human
auugugauguguccu

SEQ ID NO: 3253821 - RNA, 12 nt, Human
auugguguugac

SEQ ID NO: 3253822 - RNA, 20 nt, Human
auuucccuuccuuccucucc

SEQ ID NO: 3253823 - RNA, 16 nt, Human
uucagauuugccuuau

SEQ ID NO: 3253824 - RNA, 20 nt, Human
auccauggggcugauuguau

SEQ ID NO: 3253825 - RNA, 20 nt, Human
aucauuaucagccugugcca

SEQ ID NO: 3253826 - RNA, 18 nt, Human
aucggggagccgggagcc

SEQ ID NO: 3253827 - RNA, 16 nt, Human
aucggggagccgggag

SEQ ID NO: 3253828 - RNA, 10 nt, Human
uugugugugg

SEQ ID NO: 3253829 - RNA, 13 nt, Human
uugugugugggag

SEQ ID NO: 3253830 - RNA, 16 nt, Human
uugugugugggagugu

SEQ ID NO: 3253831 - RNA, 13 nt, Human
uugucacgccaga

SEQ ID NO: 3253832 - RNA, 20 nt, Human
uugucacgccagacuuccca

SEQ ID NO: 3253833 - RNA, 18 nt, Human
uugucccugaagagaagg

SEQ ID NO: 3253834 - RNA, 22 nt, Human
uuguccucagccccgcguggaa

SEQ ID NO: 3253835 - RNA, 22 nt, Human
uggcugccuugugaaggaauua

SEQ ID NO: 3253836 - RNA, 16 nt, Human
uggccaguggcuggau

SEQ ID NO: 3253837 - RNA, 14 nt, Human
uggccaguggcugg

SEQ ID NO: 3253838 - RNA, 15 nt, Human
uggccaguggcugga

SEQ ID NO: 3253839 - RNA, 17 nt, Human
aggccauucuuucccaa

SEQ ID NO: 3253840 - RNA, 18 nt, Human
aggccauucuuucccaac

SEQ ID NO: 3253841 - RNA, 19 nt, Human
aggccauucuuucccaaca

SEQ ID NO: 3253842 - RNA, 21 nt, Human
aggccucucauuccagaggaa

SEQ ID NO: 3253843 - RNA, 15 nt, Human
aggccauucuuuccc

SEQ ID NO: 3253844 - RNA, 22 nt, Human
uggaccuuuccugaggaagagg

SEQ ID NO: 3253845 - RNA, 22 nt, Human
ugcuauuguagagccagagguc

SEQ ID NO: 3253846 - RNA, 18 nt, Human
ugcuauuguagagccaga

SEQ ID NO: 3253847 - RNA, 13 nt, Human
ugcuccccacguc

SEQ ID NO: 3253848 - RNA, 16 nt, Human
uggaccagccucucca

SEQ ID NO: 3253849 - RNA, 22 nt, Human
uggaccagccucuccacucaug

SEQ ID NO: 3253850 - RNA, 14 nt, Human
agcugccugugccu

SEQ ID NO: 3253851 - RNA, 18 nt, Human
uguugggagugaggaugu

SEQ ID NO: 3253852 - RNA, 14 nt, Human
uuaucaacauuugu

SEQ ID NO: 3253853 - RNA, 15 nt, Human
ugggucugugugugu

SEQ ID NO: 3253854 - RNA, 13 nt, Human
ugggucugugugu

SEQ ID NO: 3253855 - RNA, 23 nt, Human
ugggaauaagugccaggauggaa

SEQ ID NO: 3253856 - RNA, 20 nt, Human
uguaugugggggucugugug

SEQ ID NO: 3253857 - RNA, 21 nt, Human
uguaugugggggucugugugu

SEQ ID NO: 3253858 - RNA, 22 nt, Human
uguaugugggggucuguguguu

SEQ ID NO: 3253859 - RNA, 22 nt, Human
uguauccauccauggggcugau

SEQ ID NO: 3253860 - RNA, 13 nt, Human
aguccaucagccu

SEQ ID NO: 3253861 - RNA, 14 nt, Human
aguccaucagccuc

SEQ ID NO: 3253862 - RNA, 13 nt, Human
agucccugccugg

SEQ ID NO: 3253863 - RNA, 11 nt, Human
ugugauguguc

SEQ ID NO: 3253864 - RNA, 20 nt, Human
gcugggaauaagugccagga

SEQ ID NO: 3253865 - RNA, 16 nt, Human
ggacaccccgacuuuu

SEQ ID NO: 3253866 - RNA, 16 nt, Human
ggacaccuaggcuagg

SEQ ID NO: 3253867 - RNA, 18 nt, Human
ggacaguauuugugggga

SEQ ID NO: 3253868 - RNA, 19 nt, Human
ggacaguauuuguggggag

SEQ ID NO: 3253869 - RNA, 22 nt, Human
gcuuuuccucaaagggagagag

SEQ ID NO: 3253870 - RNA, 19 nt, Human
gccauucuuucccaacacc

SEQ ID NO: 3253871 - RNA, 12 nt, Human
gccauucuuucc

SEQ ID NO: 3253872 - RNA, 21 nt, Human
gcguggaacucgugucuggca

SEQ ID NO: 3253873 - RNA, 17 nt, Human
gcuaggguggggagaga

SEQ ID NO: 3253874 - RNA, 18 nt, Human
gcuaggguggggagagac

SEQ ID NO: 3253875 - RNA, 18 nt, Human
gcucagaggguguccugc

SEQ ID NO: 3253876 - RNA, 19 nt, Human
gcucagaggguguccugca

SEQ ID NO: 3253877 - RNA, 21 nt, Human
gggucaucuguaccucugccu

SEQ ID NO: 3253878 - RNA, 18 nt, Human
gggucauucauggccugg

SEQ ID NO: 3253879 - RNA, 22 nt, Human
gggggcagucugagagaggcca

SEQ ID NO: 3253880 - RNA, 18 nt, Human
gguaggaacugcugggcu

SEQ ID NO: 3253881 - RNA, 16 nt, Human
gguaggaacugcuggg

SEQ ID NO: 3253882 - RNA, 17 nt, Human
ggguguccugcaccggg

SEQ ID NO: 3253883 - RNA, 21 nt, Human
ggguguccugcaccggggccu

SEQ ID NO: 3253884 - RNA, 22 nt, Human
gguuuguuuagaagaagugugu

SEQ ID NO: 3253885 - RNA, 22 nt, Human
gguggggggggggcgcggcugg

SEQ ID NO: 3253886 - RNA, 11 nt, Human
ggaguguguaa

SEQ ID NO: 3253887 - RNA, 22 nt, Human
ggaguguguaauuuaaaauugu

SEQ ID NO: 3253888 - RNA, 14 nt, Human
ggagggggagaggg

SEQ ID NO: 3253889 - RNA, 23 nt, Human
ggcaucggggagccgggagccug

SEQ ID NO: 3253890 - RNA, 16 nt, Human
ggcauccagagucccu

SEQ ID NO: 3253891 - RNA, 22 nt, Human
ggcaucggggagccgggagccu

SEQ ID NO: 3253892 - RNA, 14 nt, Human
ggcaggagggaggu

SEQ ID NO: 3253893 - RNA, 12 nt, Human
ggcaggggccgg

SEQ ID NO: 3253894 - RNA, 17 nt, Human
gcaucggggagccggga

SEQ ID NO: 3253895 - RNA, 22 nt, Human
gcauccagagucccugccugga

SEQ ID NO: 3253896 - RNA, 23 nt, Human
gcauccagagucccugccuggac

SEQ ID NO: 3253897 - RNA, 21 nt, Human
gcauccagagucccugccugg

SEQ ID NO: 3253898 - RNA, 17 nt, Human
gaucccaacacugccag

SEQ ID NO: 3253899 - RNA, 18 nt, Human
gaucccaacacugccagc

SEQ ID NO: 3253900 - RNA, 19 nt, Human
gaucccaacacugccagca

SEQ ID NO: 3253901 - RNA, 13 nt, Human
gauggaaugaugg

SEQ ID NO: 3253902 - RNA, 16 nt, Human
gagacgggcccuggug

SEQ ID NO: 3253903 - RNA, 22 nt, Human
gaggacaguauuuguggggagg

SEQ ID NO: 3253904 - RNA, 20 nt, Human
gacccucaucuuucuuccaa

SEQ ID NO: 3253905 - RNA, 15 nt, Human
cuuccucuccugucu

SEQ ID NO: 3253906 - RNA, 17 nt, Human
cuucuaccucuuggcug

SEQ ID NO: 3253907 - RNA, 14 nt, Human
cuuuugucccagaa

SEQ ID NO: 3253908 - RNA, 23 nt, Human
cuggcccuaugcuuccggccucc

SEQ ID NO: 3253909 - RNA, 17 nt, Human
cagaggguguccugcac

SEQ ID NO: 3253910 - RNA, 16 nt, Human
cagggcugaggccucu

SEQ ID NO: 3253911 - RNA, 18 nt, Human
cagggcugaggccucuca

SEQ ID NO: 3253912 - RNA, 15 nt, Human
cacuggggcaggggc

SEQ ID NO: 3253913 - RNA, 13 nt, Human
cacuggggcaggg

SEQ ID NO: 3253914 - RNA, 18 nt, Human
caacaccucuuggggagu

SEQ ID NO: 3253915 - RNA, 19 nt, Human
auucuuugaccuguuggga

SEQ ID NO: 3253916 - RNA, 21 nt, Human
cuaauucuuugaccuguuggg

SEQ ID NO: 3253917 - RNA, 22 nt, Human
cuaauucuuugaccuguuggga

SEQ ID NO: 3253918 - RNA, 18 nt, Human
cucaugugacucuuucca

SEQ ID NO: 3253919 - RNA, 14 nt, Human
cucaugugacucuu

SEQ ID NO: 3253920 - RNA, 15 nt, Human
cucgugucuggcaca

SEQ ID NO: 3253921 - RNA, 12 nt, Human
cugagaggccac

SEQ ID NO: 3253922 - RNA, 13 nt, Human
cugagagaggcca

SEQ ID NO: 3253923 - RNA, 14 nt, Human
cugagagaggccau

SEQ ID NO: 3253924 - RNA, 21 nt, Human
cugagagaggccauucuuucc

SEQ ID NO: 3253925 - RNA, 22 nt, Human
cugagagaggccauucuuuccc

SEQ ID NO: 3253926 - RNA, 13 nt, Human
caaccggcuuugu

SEQ ID NO: 3253927 - RNA, 22 nt, Human
caaccggcuuuguggcacuggg

SEQ ID NO: 3253928 - RNA, 13 nt, Human
caacacugccagc

SEQ ID NO: 3253929 - RNA, 14 nt, Human
caacacugccagca

SEQ ID NO: 3253930 - RNA, 12 nt, Human
caacacugccag

SEQ ID NO: 3253931 - RNA, 12 nt, Human
cagguguucuuc

SEQ ID NO: 3253932 - RNA, 12 nt, Human
caguauguggaa

SEQ ID NO: 3253933 - RNA, 22 nt, Human
cagucuuuaaucugagaggcca

SEQ ID NO: 3253934 - RNA, 15 nt, Human
caggcucagagggug

SEQ ID NO: 3253935 - RNA, 11 nt, Human
caggcucagag

SEQ ID NO: 3253936 - RNA, 13 nt, Human
cagggaaggaucc

SEQ ID NO: 3253937 - RNA, 18 nt, Human
cagggaaggaucccauga

SEQ ID NO: 3253938 - RNA, 15 nt, Human
caggagucccugcca

SEQ ID NO: 3253939 - RNA, 21 nt, Human
caggagucccugccaucaugu

SEQ ID NO: 3253940 - RNA, 14 nt, Human
caggagucccugcc

SEQ ID NO: 3253941 - RNA, 23 nt, Human
caggagacagguuagcugcuccc

SEQ ID NO: 3253942 - RNA, 20 nt, Human
caggcaucggggagccggga

SEQ ID NO: 3253943 - RNA, 21 nt, Human
caggcaucggggagccgggag

SEQ ID NO: 3253944 - RNA, 18 nt, Human
cagccuccauccuacccc

SEQ ID NO: 3253945 - RNA, 21 nt, Human
cagccuccauccuacccccug

SEQ ID NO: 3253946 - RNA, 23 nt, Human
cagccucuccacucaugugacuc

SEQ ID NO: 3253947 - RNA, 23 nt, Human
cagccuggcuguggccuaaccug

SEQ ID NO: 3253948 - RNA, 15 nt, Human
caggaaccgaggcag

SEQ ID NO: 3253949 - RNA, 17 nt, Human
caggaaccgaggcaggg

SEQ ID NO: 3253950 - RNA, 18 nt, Human
caggaaccgaggcaggga

SEQ ID NO: 3253951 - RNA, 15 nt, Human
cagcauuucccuucc

SEQ ID NO: 3253952 - RNA, 22 nt, Human
cagaggacaguauuugugggga

SEQ ID NO: 3253953 - RNA, 18 nt, Human
cagagucccugccuggac

SEQ ID NO: 3253954 - RNA, 14 nt, Human
cagagucccugccu

SEQ ID NO: 3253955 - RNA, 17 nt, Human
cagagaaaaagggaggg

SEQ ID NO: 3253956 - RNA, 18 nt, Human
cagagaaaaagggagggg

SEQ ID NO: 3253957 - RNA, 12 nt, Human
cagagaaaaagg

SEQ ID NO: 3253958 - RNA, 12 nt, Human
cagacuucccac

SEQ ID NO: 3253959 - RNA, 22 nt, Human
cagacuucccacggcuccucga

SEQ ID NO: 3253960 - RNA, 14 nt, Human
caccggggccuggg

SEQ ID NO: 3253961 - RNA, 21 nt, Human
caccggggccugggcaggagg

SEQ ID NO: 3253962 - RNA, 22 nt, Human
caccggggccugggcaggaggg

SEQ ID NO: 3253963 - RNA, 16 nt, Human
cacucaugugacucuu

SEQ ID NO: 3253964 - RNA, 22 nt, Human
cacucaugugacucuuuccaac

SEQ ID NO: 3253965 - RNA, 20 nt, Human
cacggcuccucgagauccca

SEQ ID NO: 3253966 - RNA, 22 nt, Human
cacggcuccucgagaucccaac

SEQ ID NO: 3253967 - RNA, 19 nt, Human
cacguguggccuguucuuc

SEQ ID NO: 3253968 - RNA, 19 nt, Human
ggagacagguuagcugcuc

SEQ ID NO: 3253969 - RNA, 12 nt, Human
ggaccagccucu

SEQ ID NO: 3253970 - RNA, 21 nt, Human
ggagcucaggaaccgaggcag

SEQ ID NO: 3253971 - RNA, 14 nt, Human
ggagggcaggcauc

SEQ ID NO: 3253972 - RNA, 20 nt, Human
ggcugggaggagggcaggca

SEQ ID NO: 3253973 - RNA, 21 nt, Human
ggcugggaggagggcaggcau

SEQ ID NO: 3253974 - RNA, 13 nt, Human
ggcugggaggagg

SEQ ID NO: 3253975 - RNA, 21 nt, Human
ggcuguggcauccagaguccc

SEQ ID NO: 3253976 - RNA, 23 nt, Human
ggcuguggcauccagagucccug

SEQ ID NO: 3253977 - RNA, 20 nt, Human
gggacaccaagccuuggcuc

SEQ ID NO: 3253978 - RNA, 14 nt, Human
gggacaccuaggcu

SEQ ID NO: 3253979 - RNA, 13 nt, Human
gggagccgggagc

SEQ ID NO: 3253980 - RNA, 12 nt, Human
gggagcucagga

SEQ ID NO: 3253981 - RNA, 22 nt, Human
gggagcucaggaaccgaggcag

SEQ ID NO: 3253982 - RNA, 23 nt, Human
gggagcucaggaaccgaggcagg

SEQ ID NO: 3253983 - RNA, 16 nt, Human
gggaggagggcaggca

SEQ ID NO: 3253984 - RNA, 12 nt, Human
gggaggagggca

SEQ ID NO: 3253985 - RNA, 16 nt, Human
ggccugacucucagca

SEQ ID NO: 3253986 - RNA, 15 nt, Human
ggccugggcaggagg

SEQ ID NO: 3253987 - RNA, 17 nt, Human
ggccugggcaggaggga

SEQ ID NO: 3253988 - RNA, 19 nt, Human
ggccugggcaggagggagg

SEQ ID NO: 3253989 - RNA, 15 nt, Human
ggccuaaccugccga

SEQ ID NO: 3253990 - RNA, 16 nt, Human
ggccuaaccugccgag

SEQ ID NO: 3253991 - RNA, 20 nt, Human
ggccucucauuccagaggaa

SEQ ID NO: 3253992 - RNA, 15 nt, Human
gcuccuuaaggcucu

SEQ ID NO: 3253993 - RNA, 17 nt, Human
gcuccuuaaggcucuuu

SEQ ID NO: 3253994 - RNA, 21 nt, Human
gcuccuuaaggcucuuuugua

SEQ ID NO: 3253995 - RNA, 16 nt, Human
gccugggcaggaggga

SEQ ID NO: 3253996 - RNA, 17 nt, Human
gccuggaccagccucuc

SEQ ID NO: 3253997 - RNA, 16 nt, Human
gccuggaccagccucu

SEQ ID NO: 3253998 - RNA, 17 nt, Human
gcgaagcguuguccuca

SEQ ID NO: 3253999 - RNA, 15 nt, Human
gccuugucacgccag

SEQ ID NO: 3254000 - RNA, 16 nt, Human
gccuugucacgccaga

SEQ ID NO: 3254001 - RNA, 17 nt, Human
gccuugucacgccagac

SEQ ID NO: 3254002 - RNA, 14 nt, Human
gcugauuguauuua

SEQ ID NO: 3254003 - RNA, 22 nt, Human
gcugggcuuggcagcccggguc

SEQ ID NO: 3254004 - RNA, 21 nt, Human
gcugggaggagggcaggcauc

SEQ ID NO: 3254005 - RNA, 19 nt, Human
gcugggaggagggcaggca

SEQ ID NO: 3254006 - RNA, 14 nt, Human
gcuggggaugucuc

SEQ ID NO: 3254007 - RNA, 19 nt, Human
gcuguggccuaaccugccg

SEQ ID NO: 3254008 - RNA, 20 nt, Human
gcuguggccuaaccugccga

SEQ ID NO: 3254009 - RNA, 21 nt, Human
gcaggcaucggggagccggga

SEQ ID NO: 3254010 - RNA, 22 nt, Human
gcaggcaucggggagccgggag

SEQ ID NO: 3254011 - RNA, 23 nt, Human
gcaggcaucggggagccgggagc

SEQ ID NO: 3254012 - RNA, 15 nt, Human
gccacgauugcagga

SEQ ID NO: 3254013 - RNA, 16 nt, Human
gccaccugaauaaaga

SEQ ID NO: 3254014 - RNA, 13 nt, Human
gaggagggcaggc

SEQ ID NO: 3254015 - RNA, 14 nt, Human
gaggagggcaggca

SEQ ID NO: 3254016 - RNA, 15 nt, Human
gaggagggcaggcau

SEQ ID NO: 3254017 - RNA, 15 nt, Human
gaggaugucugggcc

SEQ ID NO: 3254018 - RNA, 23 nt, Human
gagcucaggaaccgaggcaggga

SEQ ID NO: 3254019 - RNA, 22 nt, Human
gagcucaggaaccgaggcaggg

SEQ ID NO: 3254020 - RNA, 22 nt, Human
gagguuuguuuagaagaagugu

SEQ ID NO: 3254021 - RNA, 16 nt, Human
gagucccugccuggac

SEQ ID NO: 3254022 - RNA, 14 nt, Human
gagucccugccugg

SEQ ID NO: 3254023 - RNA, 15 nt, Human
gagucccugccugga

SEQ ID NO: 3254024 - RNA, 14 nt, Human
gagucccugccauc

SEQ ID NO: 3254025 - RNA, 20 nt, Human
gauggcaaagaaggagagca

SEQ ID NO: 3254026 - RNA, 21 nt, Human
gauguguccugauaagcugag

SEQ ID NO: 3254027 - RNA, 12 nt, Human
cugagcaggugu

SEQ ID NO: 3254028 - RNA, 14 nt, Human
cucugcccgggagc

SEQ ID NO: 3254029 - RNA, 20 nt, Human
cucugcccgggagcucagga

SEQ ID NO: 3254030 - RNA, 13 nt, Human
cugauuguauuua

SEQ ID NO: 3254031 - RNA, 17 nt, Human
cugccuggaccagccuc

SEQ ID NO: 3254032 - RNA, 21 nt, Human
cucgagaucccaacacugcca

SEQ ID NO: 3254033 - RNA, 22 nt, Human
cucgagaucccaacacugccag

SEQ ID NO: 3254034 - RNA, 23 nt, Human
cucgagaucccaacacugccagc

SEQ ID NO: 3254035 - RNA, 13 nt, Human
cucgagaucccaa

SEQ ID NO: 3254036 - RNA, 14 nt, Human
cuauuguagagcca

SEQ ID NO: 3254037 - RNA, 13 nt, Human
cuuucccaacacc

SEQ ID NO: 3254038 - RNA, 17 nt, Human
cuuucccaacaccucuu

SEQ ID NO: 3254039 - RNA, 13 nt, Human
gaacuauuagagc

SEQ ID NO: 3254040 - RNA, 19 nt, Human
gaaggaucccaugagcucc

SEQ ID NO: 3254041 - RNA, 14 nt, Human
gaaugccuccugca

SEQ ID NO: 3254042 - RNA, 17 nt, Human
gaauaaagaaugaaugg

SEQ ID NO: 3254043 - RNA, 20 nt, Human
gaauaagugccaggauggaa

SEQ ID NO: 3254044 - RNA, 19 nt, Human
cuuccaaacaggcucagag

SEQ ID NO: 3254045 - RNA, 15 nt, Human
cuuaaggcucuuuug

SEQ ID NO: 3254046 - RNA, 14 nt, Human
cuggugguggcucg

SEQ ID NO: 3254047 - RNA, 22 nt, Human
cuggugguggcucgggaggcga

SEQ ID NO: 3254048 - RNA, 18 nt, Human
cuguggccuaaccugccg

SEQ ID NO: 3254049 - RNA, 18 nt, Human
cuguguguguguaugugg

SEQ ID NO: 3254050 - RNA, 20 nt, Human
cuguguguguguaugugggg

SEQ ID NO: 3254051 - RNA, 18 nt, Human
cuguguguuuaugugugu

SEQ ID NO: 3254052 - RNA, 20 nt, Human
cuguguguuuaugugugugu

SEQ ID NO: 3254053 - RNA, 15 nt, Human
cuguguguguguaug

SEQ ID NO: 3254054 - RNA, 16 nt, Human
cuguguguguguaugu

SEQ ID NO: 3254055 - RNA, 14 nt, Human
cuguguguguguau

SEQ ID NO: 3254056 - RNA, 16 nt, Human
ccuaggcuaggguggg

SEQ ID NO: 3254057 - RNA, 15 nt, Human
ccgaggcagggaagg

SEQ ID NO: 3254058 - RNA, 20 nt, Human
ccgggacaccuaggcuaggg

SEQ ID NO: 3254059 - RNA, 19 nt, Human
ccgggacaccuaggcuagg

SEQ ID NO: 3254060 - RNA, 22 nt, Human
ccgggucaucuguaccucugcc

SEQ ID NO: 3254061 - RNA, 18 nt, Human
ccucuccacucaugugac

SEQ ID NO: 3254062 - RNA, 18 nt, Human
ccucucauuccagaggaa

SEQ ID NO: 3254063 - RNA, 15 nt, Human
ccuugucacgccaga

SEQ ID NO: 3254064 - RNA, 18 nt, Human
ccuugucacgccagacuu

SEQ ID NO: 3254065 - RNA, 16 nt, Human
ccuuaaggcucuuuug

SEQ ID NO: 3254066 - RNA, 18 nt, Human
ccuuaaggcucuuuugua

SEQ ID NO: 3254067 - RNA, 13 nt, Human
ccuuaaggcucuu

SEQ ID NO: 3254068 - RNA, 15 nt, Human
cgagaucccaacacu

SEQ ID NO: 3254069 - RNA, 21 nt, Human
cgagaucccaacacugccagc

SEQ ID NO: 3254070 - RNA, 13 nt, Human
cgagaucccaaca

SEQ ID NO: 3254071 - RNA, 22 nt, Human
cgagaucccaacacugccagca

SEQ ID NO: 3254072 - RNA, 14 nt, Human
ccugggcaggaggg

SEQ ID NO: 3254073 - RNA, 12 nt, Human
ccugggcaggag

SEQ ID NO: 3254074 - RNA, 19 nt, Human
ccugaggaagagggacugu

SEQ ID NO: 3254075 - RNA, 19 nt, Human
ccacucaugugacucuuuc

SEQ ID NO: 3254076 - RNA, 22 nt, Human
ccacucaugugacucuuuccaa

SEQ ID NO: 3254077 - RNA, 20 nt, Human
ccaccugaauaaagaaugaa

SEQ ID NO: 3254078 - RNA, 16 nt, Human
ccagcauuucccuucc

SEQ ID NO: 3254079 - RNA, 21 nt, Human
ccagcauuucccuuccuuccu

SEQ ID NO: 3254080 - RNA, 18 nt, Human
ccauccuacccccugugc

SEQ ID NO: 3254081 - RNA, 17 nt, Human
ccauccuacccccugug

SEQ ID NO: 3254082 - RNA, 13 nt, Human
ccaggagacaggu

SEQ ID NO: 3254083 - RNA, 19 nt, Human
caugaguuggcugggaaua

SEQ ID NO: 3254084 - RNA, 23 nt, Human
caugagcuccuuaaggcucuuuu

SEQ ID NO: 3254085 - RNA, 18 nt, Human
cauccuacccccugugcc

SEQ ID NO: 3254086 - RNA, 15 nt, Human
cauccuacccccugu

SEQ ID NO: 3254087 - RNA, 19 nt, Human
caucauguuuacagaggac

SEQ ID NO: 3254088 - RNA, 21 nt, Human
caucauguuuacagaggacag

SEQ ID NO: 3254089 - RNA, 13 nt, Human
caucauguuuaca

SEQ ID NO: 3254090 - RNA, 18 nt, Human
cauccagagucccugccu

SEQ ID NO: 3254091 - RNA, 20 nt, Human
cauccagagucccugccugg

SEQ ID NO: 3254092 - RNA, 13 nt, Human
cauccagaguccc

SEQ ID NO: 3254093 - RNA, 17 nt, Human
cauccagagucccugcc

SEQ ID NO: 3254094 - RNA, 16 nt, Human
caugugacucuuucca

SEQ ID NO: 3254095 - RNA, 17 nt, Human
caugugacucuuuccaa

SEQ ID NO: 3254096 - RNA, 14 nt, Human
caugugacucuuuc

SEQ ID NO: 3254097 - RNA, 14 nt, Human
cauucuuucccaac

SEQ ID NO: 3254098 - RNA, 12 nt, Human
cauucuuuccca

SEQ ID NO: 3254099 - RNA, 14 nt, Human
cauuccagaggaag

SEQ ID NO: 3254100 - RNA, 13 nt, Human
cauuccagaggaa

SEQ ID NO: 3254101 - RNA, 21 nt, Human
uuuuauuuuucucaugaugag

SEQ ID NO: 3254102 - RNA, 21 nt, Human
uuccugaggaagagggacugu

SEQ ID NO: 3254103 - RNA, 19 nt, Human
uuuccaaccggcuuugugg

SEQ ID NO: 3254104 - RNA, 18 nt, Human
ugggaggagggcaggcau

SEQ ID NO: 3254105 - RNA, 13 nt, Human
ugggaguguguaa

SEQ ID NO: 3254106 - RNA, 14 nt, Human
ugggaggagggcag

SEQ ID NO: 3254107 - RNA, 17 nt, Human
ugggaggagggcaggca

SEQ ID NO: 3254108 - RNA, 23 nt, Human
uggccuaaccugccgagagucca

SEQ ID NO: 3254109 - RNA, 16 nt, Human
uggccuaaccugccga

SEQ ID NO: 3254110 - RNA, 17 nt, Human
uguaaauuuaugugaug

SEQ ID NO: 3254111 - RNA, 13 nt, Human
uguccucagcccc

SEQ ID NO: 3254112 - RNA, 18 nt, Human
uguccugcaccggggccu

SEQ ID NO: 3254113 - RNA, 21 nt, Human
ugacccucaucuuucuuccaa

SEQ ID NO: 3254114 - RNA, 14 nt, Human
ugaguuggcuggga

SEQ ID NO: 3254115 - RNA, 16 nt, Human
ugaguuggcugggaau

SEQ ID NO: 3254116 - RNA, 17 nt, Human
ugaguuggcugggaaua

SEQ ID NO: 3254117 - RNA, 18 nt, Human
ugcccgggagcucaggaa

SEQ ID NO: 3254118 - RNA, 17 nt, Human
ugcccgggagcucagga

SEQ ID NO: 3254119 - RNA, 22 nt, Human
ugccaucauguuuacagaggac

SEQ ID NO: 3254120 - RNA, 21 nt, Human
ugcauuauauuuguaaauuua

SEQ ID NO: 3254121 - RNA, 18 nt, Human
ugauuuuuaugccaccug

SEQ ID NO: 3254122 - RNA, 16 nt, Human
ucccuccucugcccgg

SEQ ID NO: 3254123 - RNA, 21 nt, Human
ucccgggacaccuaggcuagg

SEQ ID NO: 3254124 - RNA, 13 nt, Human
ucccugccuggac

SEQ ID NO: 3254125 - RNA, 16 nt, Human
ucccuuccuuccucuc

SEQ ID NO: 3254126 - RNA, 19 nt, Human
ucccuuccuuccucuccug

SEQ ID NO: 3254127 - RNA, 14 nt, Human
ucgugucuggcaca

SEQ ID NO: 3254128 - RNA, 21 nt, Human
ucgugucuggcacagccuggc

SEQ ID NO: 3254129 - RNA, 15 nt, Human
ucugccaggagacag

SEQ ID NO: 3254130 - RNA, 19 nt, Human
ucagaggguguccugcacc

SEQ ID NO: 3254131 - RNA, 14 nt, Human
ucauuccagaggaa

SEQ ID NO: 3254132 - RNA, 12 nt, Human
uauucccaugag

SEQ ID NO: 3254133 - RNA, 16 nt, Human
caccccgacuuuuguu

SEQ ID NO: 3254134 - RNA, 18 nt, Human
aguucauaaauuuauggu

SEQ ID NO: 3254135 - RNA, 16 nt, Human
aguggcuggaucugug

SEQ ID NO: 3254136 - RNA, 19 nt, Human
augagcuccuuaaggcucu

SEQ ID NO: 3254137 - RNA, 14 nt, Human
aucagccugugcca

SEQ ID NO: 3254138 - RNA, 17 nt, Human
aggggccgggggcaguc

SEQ ID NO: 3254139 - RNA, 21 nt, Human
aggagucccugccaucauguu

SEQ ID NO: 3254140 - RNA, 14 nt, Human
agcugcuccccacg

SEQ ID NO: 3254141 - RNA, 17 nt, Human
agcugcuccccacguca

SEQ ID NO: 3254142 - RNA, 14 nt, Human
agcugagcaggugu

SEQ ID NO: 3254143 - RNA, 18 nt, Human
agcuccuuaaggcucuuu

SEQ ID NO: 3254144 - RNA, 22 nt, Human
agcuccuuaaggcucuuuugua

SEQ ID NO: 3254145 - RNA, 20 nt, Human
agaggacaguauuugugggg

SEQ ID NO: 3254146 - RNA, 14 nt, Human
agccgggagccuga

SEQ ID NO: 3254147 - RNA, 13 nt, Human
acccccugugccu

SEQ ID NO: 3254148 - RNA, 12 nt, Human
acugccagcauu

SEQ ID NO: 3254149 - RNA, 16 nt, Human
accugccgagagucca

SEQ ID NO: 3254150 - RNA, 23 nt, Human
accugccgagaguccaucagccu

SEQ ID NO: 3254151 - RNA, 13 nt, Human
aaugucaguaugu

SEQ ID NO: 3254152 - RNA, 15 nt, Human
aaugucaguaugugg

SEQ ID NO: 3254153 - RNA, 18 nt, Human
aauucuuugaccuguugg

SEQ ID NO: 3254154 - RNA, 22 nt, Human
aauucuuugaccuguugggagu

SEQ ID NO: 3254155 - RNA, 14 nt, Human
uauguguguguguu

SEQ ID NO: 3254156 - RNA, 22 nt, Human
uauguguguguguugugugugg

SEQ ID NO: 3254157 - RNA, 11 nt, Human
uaugugugugu

SEQ ID NO: 3254158 - RNA, 21 nt, Human
acagacacucccacuuggcau

SEQ ID NO: 3254159 - RNA, 17 nt, Human
uauggggauagaugugu

SEQ ID NO: 3254160 - RNA, 18 nt, Human
uauggggauagaugugug

SEQ ID NO: 3254161 - RNA, 12 nt, Human
acagccuggcug

SEQ ID NO: 3254162 - RNA, 13 nt, Human
uaguucugccagg

SEQ ID NO: 3254163 - RNA, 14 nt, Human
uaguucugccagga

SEQ ID NO: 3254164 - RNA, 23 nt, Human
acaccuaggcuaggguggggaga

SEQ ID NO: 3254165 - RNA, 20 nt, Human
acaccuaggcuagggugggg

SEQ ID NO: 3254166 - RNA, 13 nt, Human
guguguguaugug

SEQ ID NO: 3254167 - RNA, 16 nt, Human
gugugugggagugugu

SEQ ID NO: 3254168 - RNA, 17 nt, Human
guguguguugugugugg

SEQ ID NO: 3254169 - RNA, 14 nt, Human
guguguguaugugg

SEQ ID NO: 3254170 - RNA, 15 nt, Human
guguuguguguggga

SEQ ID NO: 3254171 - RNA, 15 nt, Human
gugggggucugugug

SEQ ID NO: 3254172 - RNA, 16 nt, Human
gugggggucugugugu

SEQ ID NO: 3254173 - RNA, 14 nt, Human
gugggggucugugu

SEQ ID NO: 3254174 - RNA, 17 nt, Human
guggcacuggggcaggg

SEQ ID NO: 3254175 - RNA, 18 nt, Human
guggcacuggggcagggg

SEQ ID NO: 3254176 - RNA, 15 nt, Human
guccugcaccggggc

SEQ ID NO: 3254177 - RNA, 19 nt, Human
guccugcaccggggccugg

SEQ ID NO: 3254178 - RNA, 20 nt, Human
guccugcaccggggccuggg

SEQ ID NO: 3254179 - RNA, 16 nt, Human
guguuuaugugugugu

SEQ ID NO: 3254180 - RNA, 12 nt, Human
guguuuaugugu

SEQ ID NO: 3254181 - RNA, 14 nt, Human
guugggagaauguc

SEQ ID NO: 3254182 - RNA, 21 nt, Human
guugggagaaugucaguaugu

SEQ ID NO: 3254183 - RNA, 21 nt, Human
uccugcaccggggccugggca

SEQ ID NO: 3254184 - RNA, 20 nt, Human
uccugcaccggggccugggc

SEQ ID NO: 3254185 - RNA, 19 nt, Human
uccugcaccggggccuggg

SEQ ID NO: 3254186 - RNA, 22 nt, Human
ucgagaucccaacacugccagc

SEQ ID NO: 3254187 - RNA, 23 nt, Human
ucgagaucccaacacugccagca

SEQ ID NO: 3254188 - RNA, 14 nt, Human
acuggggcaggggc

SEQ ID NO: 3254189 - RNA, 11 nt, Human
uccucagcccc

SEQ ID NO: 3254190 - RNA, 17 nt, Human
acucaugugacucuuuc

SEQ ID NO: 3254191 - RNA, 15 nt, Human
acucaugugacucuu

SEQ ID NO: 3254192 - RNA, 16 nt, Human
acucaugugacucuuu

SEQ ID NO: 3254193 - RNA, 15 nt, Human
ucaggccgaaggagg

SEQ ID NO: 3254194 - RNA, 17 nt, Human
ucaggaaccgaggcagg

SEQ ID NO: 3254195 - RNA, 18 nt, Human
ucaggaaccgaggcaggg

SEQ ID NO: 3254196 - RNA, 16 nt, Human
ucagccccgcguggaa

SEQ ID NO: 3254197 - RNA, 22 nt, Human
acccagcuaugguucucucgca

SEQ ID NO: 3254198 - RNA, 22 nt, Human
ucagauuugccuuauuggcagc

SEQ ID NO: 3254199 - RNA, 20 nt, Human
accagagaaaaagggagggg

SEQ ID NO: 3254200 - RNA, 18 nt, Human
accagagaaaaagggagg

SEQ ID NO: 3254201 - RNA, 22 nt, Human
ucaugauagaaggcuaugggga

SEQ ID NO: 3254202 - RNA, 18 nt, Human
accugaauaaagaaugaa

SEQ ID NO: 3254203 - RNA, 11 nt, Human
ucuggcccuau

SEQ ID NO: 3254204 - RNA, 14 nt, Human
agacuuaucaacau

SEQ ID NO: 3254205 - RNA, 17 nt, Human
ugaggaagagggacugu

SEQ ID NO: 3254206 - RNA, 22 nt, Human
ugagggugacuauggagcugag

SEQ ID NO: 3254207 - RNA, 18 nt, Human
auaaucacaacccuucag

SEQ ID NO: 3254208 - RNA, 12 nt, Human
uuaugugugugu

SEQ ID NO: 3254209 - RNA, 14 nt, Human
uuaugugugugugu

SEQ ID NO: 3254210 - RNA, 10 nt, Human
uuaugugugu

SEQ ID NO: 3254211 - RNA, 19 nt, Human
auagaaggcuauggggaua

SEQ ID NO: 3254212 - RNA, 14 nt, Human
auagauguguggac

SEQ ID NO: 3254213 - RNA, 12 nt, Human
auagaugugugg

SEQ ID NO: 3254214 - RNA, 13 nt, Human
auagaugugugga

SEQ ID NO: 3254215 - RNA, 11 nt, Human
auagaugugug

SEQ ID NO: 3254216 - RNA, 14 nt, Human
aguauuugugggga

SEQ ID NO: 3254217 - RNA, 16 nt, Human
aguccaucagccucca

SEQ ID NO: 3254218 - RNA, 20 nt, Human
uguagugauuuuuaugccac

SEQ ID NO: 3254219 - RNA, 18 nt, Human
agugccaggauggaauga

SEQ ID NO: 3254220 - RNA, 14 nt, Human
agugaggaugucug

SEQ ID NO: 3254221 - RNA, 16 nt, Human
agugauuuuuaugcca

SEQ ID NO: 3254222 - RNA, 20 nt, Human
agugauuuuuaugccaccug

SEQ ID NO: 3254223 - RNA, 21 nt, Human
agugauuuuuaugccaccuga

SEQ ID NO: 3254224 - RNA, 9 nt, Human
aguguguaa

SEQ ID NO: 3254225 - RNA, 18 nt, Human
uguguguuguguguggga

SEQ ID NO: 3254226 - RNA, 16 nt, Human
agugggguagguuggg

SEQ ID NO: 3254227 - RNA, 20 nt, Human
uggcuguggccuaaccugcc

SEQ ID NO: 3254228 - RNA, 17 nt, Human
uggcuguggcauccaga

SEQ ID NO: 3254229 - RNA, 13 nt, Human
uggaagugugggu

SEQ ID NO: 3254230 - RNA, 14 nt, Human
uggaaguguggguc

SEQ ID NO: 3254231 - RNA, 16 nt, Human
aggccugacucucagc

SEQ ID NO: 3254232 - RNA, 21 nt, Human
uggcauccagagucccugccu

SEQ ID NO: 3254233 - RNA, 22 nt, Human
uggcauccagagucccugccug

SEQ ID NO: 3254234 - RNA, 20 nt, Human
uggcauccagagucccugcc

SEQ ID NO: 3254235 - RNA, 22 nt, Human
uggcacagccuggcuguggccu

SEQ ID NO: 3254236 - RNA, 14 nt, Human
aggccauucuuucc

SEQ ID NO: 3254237 - RNA, 18 nt, Human
aggcgaagcguuguccuc

SEQ ID NO: 3254238 - RNA, 18 nt, Human
aggcucagaggguguccu

SEQ ID NO: 3254239 - RNA, 19 nt, Human
aggcucagaggguguccug

SEQ ID NO: 3254240 - RNA, 20 nt, Human
aggcucagaggguguccugc

SEQ ID NO: 3254241 - RNA, 19 nt, Human
ugccuugugaaggaauuau

SEQ ID NO: 3254242 - RNA, 17 nt, Human
ugccuugucacgccaga

SEQ ID NO: 3254243 - RNA, 15 nt, Human
agcuggggaugucuc

SEQ ID NO: 3254244 - RNA, 19 nt, Human
agccugacccucaucuuuc

SEQ ID NO: 3254245 - RNA, 18 nt, Human
agccugacccucaucuuu

SEQ ID NO: 3254246 - RNA, 12 nt, Human
auuccagaggaa

SEQ ID NO: 3254247 - RNA, 12 nt, Human
auuuuucucaug

SEQ ID NO: 3254248 - RNA, 19 nt, Human
auuuguaaauuuaugugau

SEQ ID NO: 3254249 - RNA, 18 nt, Human
auuuguaaauuuauguga

SEQ ID NO: 3254250 - RNA, 16 nt, Human
auuucccuuccuuccu

SEQ ID NO: 3254251 - RNA, 20 nt, Human
uugcuaugagcuggggaugu

SEQ ID NO: 3254252 - RNA, 19 nt, Human
auccauagcaccuccacau

SEQ ID NO: 3254253 - RNA, 13 nt, Human
uucugccaggaga

SEQ ID NO: 3254254 - RNA, 14 nt, Human
auccuacccccugu

SEQ ID NO: 3254255 - RNA, 16 nt, Human
auccuacccccugugc

SEQ ID NO: 3254256 - RNA, 13 nt, Human
aucaggccauugu

SEQ ID NO: 3254257 - RNA, 16 nt, Human
aucaggccauuguccc

SEQ ID NO: 3254258 - RNA, 20 nt, Human
auggggauagauguguggac

SEQ ID NO: 3254259 - RNA, 16 nt, Human
augguucucaggccug

SEQ ID NO: 3254260 - RNA, 16 nt, Human
augucaguauguggaa

SEQ ID NO: 3254261 - RNA, 21 nt, Human
augugacucuuuccaaccggc

SEQ ID NO: 3254262 - RNA, 12 nt, Human
augugacucuuu

SEQ ID NO: 3254263 - RNA, 16 nt, Human
augugacucuuuccaa

SEQ ID NO: 3254264 - RNA, 22 nt, Human
gcuaauucuuugaccuguuggg

SEQ ID NO: 3254265 - RNA, 20 nt, Human
gcucaggaaccgaggcaggg

SEQ ID NO: 3254266 - RNA, 21 nt, Human
gcucaggaaccgaggcaggga

SEQ ID NO: 3254267 - RNA, 16 nt, Human
gcucaggaaccgaggc

SEQ ID NO: 3254268 - RNA, 19 nt, Human
gcucaggaaccgaggcagg

SEQ ID NO: 3254269 - RNA, 23 nt, Human
gccuccauccuacccccugugcc

SEQ ID NO: 3254270 - RNA, 21 nt, Human
ggaagugugggucugugugug

SEQ ID NO: 3254271 - RNA, 22 nt, Human
ggaagugugggucugugugugu

SEQ ID NO: 3254272 - RNA, 12 nt, Human
ggaagugugggu

SEQ ID NO: 3254273 - RNA, 15 nt, Human
ggaacugcugggcuu

SEQ ID NO: 3254274 - RNA, 20 nt, Human
ggaacugcugggcuuggcag

SEQ ID NO: 3254275 - RNA, 16 nt, Human
gcuucuaguucugcca

SEQ ID NO: 3254276 - RNA, 17 nt, Human
gcuucuaguucugccag

SEQ ID NO: 3254277 - RNA, 23 nt, Human
guaauuuaaaauugugauguguc

SEQ ID NO: 3254278 - RNA, 19 nt, Human
guaauuuaaaauugugaug

SEQ ID NO: 3254279 - RNA, 20 nt, Human
guaauuuaaaauugugaugu

SEQ ID NO: 3254280 - RNA, 15 nt, Human
guagagccagagguc

SEQ ID NO: 3254281 - RNA, 17 nt, Human
ggggccgggggcagucu

SEQ ID NO: 3254282 - RNA, 18 nt, Human
gggggcgcggcugggagg

SEQ ID NO: 3254283 - RNA, 13 nt, Human
ggguggggagaga

SEQ ID NO: 3254284 - RNA, 14 nt, Human
ggguggggagagac

SEQ ID NO: 3254285 - RNA, 18 nt, Human
ggguggggagagacgggc

SEQ ID NO: 3254286 - RNA, 22 nt, Human
ggugcuucuaguucugccagga

SEQ ID NO: 3254287 - RNA, 15 nt, Human
ggcacuggggcaggg

SEQ ID NO: 3254288 - RNA, 15 nt, Human
ggcagggcugaggcc

SEQ ID NO: 3254289 - RNA, 22 nt, Human
gggacaccuaggcuaggguggg

SEQ ID NO: 3254290 - RNA, 20 nt, Human
ggcucagaggguguccugca

SEQ ID NO: 3254291 - RNA, 14 nt, Human
ggcucagagugggg

SEQ ID NO: 3254292 - RNA, 15 nt, Human
gacccucaucuuucu

SEQ ID NO: 3254293 - RNA, 19 nt, Human
gacccucaucuuucuucca

SEQ ID NO: 3254294 - RNA, 15 nt, Human
gacuauggagcugag

SEQ ID NO: 3254295 - RNA, 18 nt, Human
gcauuucccuuccuuccu

SEQ ID NO: 3254296 - RNA, 15 nt, Human
cuuaggccagcacca

SEQ ID NO: 3254297 - RNA, 20 nt, Human
cugugccuugucacgccaga

SEQ ID NO: 3254298 - RNA, 16 nt, Human
cugugccuuuugccau

SEQ ID NO: 3254299 - RNA, 16 nt, Human
cuggggaugucucuca

SEQ ID NO: 3254300 - RNA, 18 nt, Human
cugggaauaagugccagg

SEQ ID NO: 3254301 - RNA, 17 nt, Human
cuucuaguucugccagg

SEQ ID NO: 3254302 - RNA, 18 nt, Human
cuucuaguucugccagga

SEQ ID NO: 3254303 - RNA, 16 nt, Human
cuucuaguucugccag

SEQ ID NO: 3254304 - RNA, 19 nt, Human
cuucuaguucugccaggag

SEQ ID NO: 3254305 - RNA, 19 nt, Human
cuuccucuccugucucccu

SEQ ID NO: 3254306 - RNA, 14 nt, Human
cuuugaccuguugg

SEQ ID NO: 3254307 - RNA, 17 nt, Human
cagucugagagaggcca

SEQ ID NO: 3254308 - RNA, 18 nt, Human
cagucugagagaggccau

SEQ ID NO: 3254309 - RNA, 15 nt, Human
caggccugacucuca

SEQ ID NO: 3254310 - RNA, 19 nt, Human
cauccauggggcugauugu

SEQ ID NO: 3254311 - RNA, 14 nt, Human
ccauucuuucccaa

SEQ ID NO: 3254312 - RNA, 20 nt, Human
ccauucuuucccaacaccuc

SEQ ID NO: 3254313 - RNA, 12 nt, Human
ccauucuuuccc

SEQ ID NO: 3254314 - RNA, 18 nt, Human
ccugccaucauguuuaca

SEQ ID NO: 3254315 - RNA, 20 nt, Human
ccugccaucauguuuacaga

SEQ ID NO: 3254316 - RNA, 19 nt, Human
ccugacccucaucuuucuu

SEQ ID NO: 3254317 - RNA, 18 nt, Human
ccugacccucaucuuucu

SEQ ID NO: 3254318 - RNA, 21 nt, Human
ccuggugguggcucgggaggc

SEQ ID NO: 3254319 - RNA, 18 nt, Human
ccuggugguggcucggga

SEQ ID NO: 3254320 - RNA, 21 nt, Human
ccugucucccuccucugcccg

SEQ ID NO: 3254321 - RNA, 15 nt, Human
cuaggcuaggguggg

SEQ ID NO: 3254322 - RNA, 14 nt, Human
cuaguucugccagg

SEQ ID NO: 3254323 - RNA, 15 nt, Human
cuaguucugccagga

SEQ ID NO: 3254324 - RNA, 16 nt, Human
cuaguucugccaggag

SEQ ID NO: 3254325 - RNA, 13 nt, Human
cuaguucugccag

SEQ ID NO: 3254326 - RNA, 15 nt, Human
cuaggguggggagag

SEQ ID NO: 3254327 - RNA, 18 nt, Human
cugaggaagagggacugu

SEQ ID NO: 3254328 - RNA, 23 nt, Human
cugaggaagagggacuguucuuu

SEQ ID NO: 3254329 - RNA, 18 nt, Human
cugacccucaucuuucuu

SEQ ID NO: 3254330 - RNA, 19 nt, Human
cuauggggauagaugugug

SEQ ID NO: 3254331 - RNA, 20 nt, Human
cuauggggauagaugugugg

SEQ ID NO: 3254332 - RNA, 21 nt, Human
cuauggggauagaugugugga

SEQ ID NO: 3254333 - RNA, 22 nt, Human
cuacucuggagguuuguuuaga

SEQ ID NO: 3254334 - RNA, 17 nt, Human
cucagccccgcguggaa

SEQ ID NO: 3254335 - RNA, 16 nt, Human
cucagaggguguccug

SEQ ID NO: 3254336 - RNA, 18 nt, Human
cucaggaaccgaggcagg

SEQ ID NO: 3254337 - RNA, 19 nt, Human
cucaggaaccgaggcaggg

SEQ ID NO: 3254338 - RNA, 17 nt, Human
cucaggaaccgaggcag

SEQ ID NO: 3254339 - RNA, 20 nt, Human
cuccccacgucagcugggac

SEQ ID NO: 3254340 - RNA, 22 nt, Human
cuccacucaugugacucuuucc

SEQ ID NO: 3254341 - RNA, 16 nt, Human
cuccacucaugugacu

SEQ ID NO: 3254342 - RNA, 22 nt, Human
ccugccgagaguccaucagccu

SEQ ID NO: 3254343 - RNA, 23 nt, Human
ccugccgagaguccaucagccuc

SEQ ID NO: 3254344 - RNA, 14 nt, Human
ccugccgagagucc

SEQ ID NO: 3254345 - RNA, 19 nt, Human
ccugaagagaagggcaggg

SEQ ID NO: 3254346 - RNA, 17 nt, Human
ccugcaccggggccugg

SEQ ID NO: 3254347 - RNA, 15 nt, Human
ccugcaccggggccu

SEQ ID NO: 3254348 - RNA, 11 nt, Human
cgcggcuggga

SEQ ID NO: 3254349 - RNA, 12 nt, Human
cgcggcugggag

SEQ ID NO: 3254350 - RNA, 16 nt, Human
cgcggcugggaggagg

SEQ ID NO: 3254351 - RNA, 18 nt, Human
cgggacaccuaggcuagg

SEQ ID NO: 3254352 - RNA, 19 nt, Human
cgggacaccuaggcuaggg

SEQ ID NO: 3254353 - RNA, 17 nt, Human
ccugugccuuuugccau

SEQ ID NO: 3254354 - RNA, 14 nt, Human
ccuuugucccagaa

SEQ ID NO: 3254355 - RNA, 15 nt, Human
cgaagcguuguccuc

SEQ ID NO: 3254356 - RNA, 16 nt, Human
cgaagcguuguccuca

SEQ ID NO: 3254357 - RNA, 17 nt, Human
cgaagcguuguccucag

SEQ ID NO: 3254358 - RNA, 21 nt, Human
cgaagcguuguccucagcccc

SEQ ID NO: 3254359 - RNA, 23 nt, Human
ccguggcuguggcauccagaguc

SEQ ID NO: 3254360 - RNA, 12 nt, Human
ccuaaccugccg

SEQ ID NO: 3254361 - RNA, 13 nt, Human
ccuaaccugccga

SEQ ID NO: 3254362 - RNA, 20 nt, Human
ccgagaguccaucagccucc

SEQ ID NO: 3254363 - RNA, 21 nt, Human
ccgagaguccaucagccucca

SEQ ID NO: 3254364 - RNA, 21 nt, Human
ccgggggcagucugagagagg

SEQ ID NO: 3254365 - RNA, 20 nt, Human
ccggggccugggcaggaggg

SEQ ID NO: 3254366 - RNA, 19 nt, Human
ccggggccugggcaggagg

SEQ ID NO: 3254367 - RNA, 13 nt, Human
cccaugagcuccu

SEQ ID NO: 3254368 - RNA, 14 nt, Human
cccaugagcuccuu

SEQ ID NO: 3254369 - RNA, 15 nt, Human
cccaugagcuccuua

SEQ ID NO: 3254370 - RNA, 22 nt, Human
cccaugagcuccuuaaggcucu

SEQ ID NO: 3254371 - RNA, 14 nt, Human
ccccugugccuugu

SEQ ID NO: 3254372 - RNA, 15 nt, Human
cccaacacugccagc

SEQ ID NO: 3254373 - RNA, 16 nt, Human
cccaacacugccagca

SEQ ID NO: 3254374 - RNA, 14 nt, Human
cccaacacugccag

SEQ ID NO: 3254375 - RNA, 15 nt, Human
cccacgucagcuggg

SEQ ID NO: 3254376 - RNA, 15 nt, Human
cccacggcuccucga

SEQ ID NO: 3254377 - RNA, 21 nt, Human
cuggccaguggcuggaucugu

SEQ ID NO: 3254378 - RNA, 14 nt, Human
cuggaccagccucu

SEQ ID NO: 3254379 - RNA, 18 nt, Human
cuggaccagccucuccac

SEQ ID NO: 3254380 - RNA, 12 nt, Human
cuggagguuugu

SEQ ID NO: 3254381 - RNA, 17 nt, Human
cuggagguuuguuuaga

SEQ ID NO: 3254382 - RNA, 23 nt, Human
cugccgagaguccaucagccucc

SEQ ID NO: 3254383 - RNA, 22 nt, Human
cugccgagaguccaucagccuc

SEQ ID NO: 3254384 - RNA, 11 nt, Human
cugcugggcuu

SEQ ID NO: 3254385 - RNA, 21 nt, Human
cugucucccuccucugcccgg

SEQ ID NO: 3254386 - RNA, 19 nt, Human
cugugaggggcucucucau

SEQ ID NO: 3254387 - RNA, 21 nt, Human
cuguguguguguauguggggg

SEQ ID NO: 3254388 - RNA, 16 nt, Human
cuguguguuuaugugu

SEQ ID NO: 3254389 - RNA, 17 nt, Human
cuguguguuuaugugug

SEQ ID NO: 3254390 - RNA, 14 nt, Human
cuuuguggcacugg

SEQ ID NO: 3254391 - RNA, 16 nt, Human
cuugucacgccagacu

SEQ ID NO: 3254392 - RNA, 13 nt, Human
cuugucacgccag

SEQ ID NO: 3254393 - RNA, 22 nt, Human
cuuucuuccaaacaggcucaga

SEQ ID NO: 3254394 - RNA, 15 nt, Human
gaugggucaguugua

SEQ ID NO: 3254395 - RNA, 21 nt, Human
gaugggucaguuguaucagca

SEQ ID NO: 3254396 - RNA, 23 nt, Human
gauugcaggagucccugccauca

SEQ ID NO: 3254397 - RNA, 15 nt, Human
gcacuggggcagggg

SEQ ID NO: 3254398 - RNA, 18 nt, Human
gcacuggggcaggggccg

SEQ ID NO: 3254399 - RNA, 23 nt, Human
gcacuggggcaggggccgggggc

SEQ ID NO: 3254400 - RNA, 22 nt, Human
gaggccucucauuccagaggaa

SEQ ID NO: 3254401 - RNA, 20 nt, Human
gaggcgaagcguuguccuca

SEQ ID NO: 3254402 - RNA, 21 nt, Human
gaggcgaagcguuguccucag

SEQ ID NO: 3254403 - RNA, 14 nt, Human
gaggcagggaagga

SEQ ID NO: 3254404 - RNA, 14 nt, Human
gagggggagagggc

SEQ ID NO: 3254405 - RNA, 13 nt, Human
gaggguguccugc

SEQ ID NO: 3254406 - RNA, 21 nt, Human
gagucccugccuggaccagcc

SEQ ID NO: 3254407 - RNA, 23 nt, Human
gagucccugccuggaccagccuc

SEQ ID NO: 3254408 - RNA, 19 nt, Human
gagucccugccuggaccag

SEQ ID NO: 3254409 - RNA, 14 nt, Human
gauagaugugugga

SEQ ID NO: 3254410 - RNA, 22 nt, Human
gauagauguguggacacauugg

SEQ ID NO: 3254411 - RNA, 13 nt, Human
gauagaugugugg

SEQ ID NO: 3254412 - RNA, 13 nt, Human
gaguguguaauuu

SEQ ID NO: 3254413 - RNA, 14 nt, Human
gaccagccucucca

SEQ ID NO: 3254414 - RNA, 16 nt, Human
gaaugucaguaugugg

SEQ ID NO: 3254415 - RNA, 18 nt, Human
gaaugucaguauguggaa

SEQ ID NO: 3254416 - RNA, 13 nt, Human
gaaugucaguaug

SEQ ID NO: 3254417 - RNA, 19 nt, Human
gaaugucaguauguggaag

SEQ ID NO: 3254418 - RNA, 13 nt, Human
gagagacgggccc

SEQ ID NO: 3254419 - RNA, 17 nt, Human
gagaaugucaguaugug

SEQ ID NO: 3254420 - RNA, 18 nt, Human
gagaucccaacacugcca

SEQ ID NO: 3254421 - RNA, 19 nt, Human
gagaucccaacacugccag

SEQ ID NO: 3254422 - RNA, 20 nt, Human
gagaucccaacacugccagc

SEQ ID NO: 3254423 - RNA, 23 nt, Human
gcccuggugguggcucgggaggc

SEQ ID NO: 3254424 - RNA, 17 nt, Human
gcuaugagcuggggaug

SEQ ID NO: 3254425 - RNA, 21 nt, Human
gcucagaggguguccugcacc

SEQ ID NO: 3254426 - RNA, 16 nt, Human
ggcgcggcugggagga

SEQ ID NO: 3254427 - RNA, 14 nt, Human
ggccugggcaggag

SEQ ID NO: 3254428 - RNA, 13 nt, Human
ggccugggcagga

SEQ ID NO: 3254429 - RNA, 21 nt, Human
ggcuauggggauagaugugug

SEQ ID NO: 3254430 - RNA, 16 nt, Human
ggcuaggguggggaga

SEQ ID NO: 3254431 - RNA, 21 nt, Human
ggccuaaccugccgagagucc

SEQ ID NO: 3254432 - RNA, 22 nt, Human
ggccuaaccugccgagagucca

SEQ ID NO: 3254433 - RNA, 12 nt, Human
ggcccugugccu

SEQ ID NO: 3254434 - RNA, 17 nt, Human
ggauggaaugauggguc

SEQ ID NO: 3254435 - RNA, 20 nt, Human
ggccauucuuucccaacacc

SEQ ID NO: 3254436 - RNA, 14 nt, Human
gcuuuguggcacug

SEQ ID NO: 3254437 - RNA, 22 nt, Human
gcuuuguggcacuggggcaggg

SEQ ID NO: 3254438 - RNA, 22 nt, Human
ggagaaugucaguauguggaag

SEQ ID NO: 3254439 - RNA, 23 nt, Human
ggaagggacaccaagccuuggcu

SEQ ID NO: 3254440 - RNA, 22 nt, Human
ggaaggaucccaugagcuccuu

SEQ ID NO: 3254441 - RNA, 19 nt, Human
gguugggagaaugucagua

SEQ ID NO: 3254442 - RNA, 14 nt, Human
gggcgcggcuggga

SEQ ID NO: 3254443 - RNA, 18 nt, Human
ggggaguuuagggugggg

SEQ ID NO: 3254444 - RNA, 13 nt, Human
ggggauagaugug

SEQ ID NO: 3254445 - RNA, 23 nt, Human
ggggucuguguguuuaugugugu

SEQ ID NO: 3254446 - RNA, 12 nt, Human
guccucagcccc

SEQ ID NO: 3254447 - RNA, 20 nt, Human
gucccugccuggaccagccu

SEQ ID NO: 3254448 - RNA, 21 nt, Human
gucccugccuggaccagccuc

SEQ ID NO: 3254449 - RNA, 14 nt, Human
gucccugccuggac

SEQ ID NO: 3254450 - RNA, 22 nt, Human
gucccugccuggaccagccucu

SEQ ID NO: 3254451 - RNA, 23 nt, Human
gucccugccuggaccagccucuc

SEQ ID NO: 3254452 - RNA, 14 nt, Human
gucacgccagacuu

SEQ ID NO: 3254453 - RNA, 20 nt, Human
gucccagaaugccuccugca

SEQ ID NO: 3254454 - RNA, 14 nt, Human
guggcauccagagu

SEQ ID NO: 3254455 - RNA, 16 nt, Human
guggcucgggaggcga

SEQ ID NO: 3254456 - RNA, 18 nt, Human
guggcucgggaggcgaag

SEQ ID NO: 3254457 - RNA, 21 nt, Human
gugcuucuaguucugccagga

SEQ ID NO: 3254458 - RNA, 22 nt, Human
gugcuucuaguucugccaggag

SEQ ID NO: 3254459 - RNA, 20 nt, Human
gugcuucuaguucugccagg

SEQ ID NO: 3254460 - RNA, 19 nt, Human
gugccuugucacgccagac

SEQ ID NO: 3254461 - RNA, 12 nt, Human
gugacucuuucc

SEQ ID NO: 3254462 - RNA, 15 nt, Human
gugaggaugucuggg

SEQ ID NO: 3254463 - RNA, 16 nt, Human
gugauuuuuaugccac

SEQ ID NO: 3254464 - RNA, 17 nt, Human
gugauuuuuaugccacc

SEQ ID NO: 3254465 - RNA, 19 nt, Human
gugauuuuuaugccaccug

SEQ ID NO: 3254466 - RNA, 20 nt, Human
gugauuuuuaugccaccuga

SEQ ID NO: 3254467 - RNA, 20 nt, Human
uggcuccauugguguugaca

SEQ ID NO: 3254468 - RNA, 15 nt, Human
uggaccagccucucc

SEQ ID NO: 3254469 - RNA, 15 nt, Human
uggaucugugagggg

SEQ ID NO: 3254470 - RNA, 19 nt, Human
uggaucugugaggggcucu

SEQ ID NO: 3254471 - RNA, 14 nt, Human
ugggggucugugug

SEQ ID NO: 3254472 - RNA, 16 nt, Human
uggggauagaugugug

SEQ ID NO: 3254473 - RNA, 17 nt, Human
uggggauagaugugugg

SEQ ID NO: 3254474 - RNA, 18 nt, Human
uggggauagaugugugga

SEQ ID NO: 3254475 - RNA, 20 nt, Human
uggggauagauguguggaca

SEQ ID NO: 3254476 - RNA, 20 nt, Human
uggggaguuuaggguggggg

SEQ ID NO: 3254477 - RNA, 11 nt, Human
ugggagugugu

SEQ ID NO: 3254478 - RNA, 22 nt, Human
ugggagugaggaugucugggcc

SEQ ID NO: 3254479 - RNA, 13 nt, Human
ugggcaggaggga

SEQ ID NO: 3254480 - RNA, 15 nt, Human
ugggcaggagggagg

SEQ ID NO: 3254481 - RNA, 16 nt, Human
ugggcaggagggaggu

SEQ ID NO: 3254482 - RNA, 18 nt, Human
ugggcaggagggaggugc

SEQ ID NO: 3254483 - RNA, 17 nt, Human
ugacauacauccaacau

SEQ ID NO: 3254484 - RNA, 20 nt, Human
ugagcuggggaugucucuca

SEQ ID NO: 3254485 - RNA, 19 nt, Human
ugagcuccuuaaggcucuu

SEQ ID NO: 3254486 - RNA, 21 nt, Human
ugagcuccuuaaggcucuuuu

SEQ ID NO: 3254487 - RNA, 19 nt, Human
uccagagucccugccugga

SEQ ID NO: 3254488 - RNA, 20 nt, Human
uccagagucccugccuggac

SEQ ID NO: 3254489 - RNA, 21 nt, Human
uccagagucccugccuggacc

SEQ ID NO: 3254490 - RNA, 15 nt, Human
uccagagucccugcc

SEQ ID NO: 3254491 - RNA, 18 nt, Human
uccagagucccugccugg

SEQ ID NO: 3254492 - RNA, 22 nt, Human
ucagucuuuaaucugagaggcc

SEQ ID NO: 3254493 - RNA, 14 nt, Human
uccaaacaggcuca

SEQ ID NO: 3254494 - RNA, 13 nt, Human
uccuacccccugu

SEQ ID NO: 3254495 - RNA, 15 nt, Human
uccuacccccugugc

SEQ ID NO: 3254496 - RNA, 16 nt, Human
uccuacccccugugcc

SEQ ID NO: 3254497 - RNA, 17 nt, Human
uccuacccccugugccu

SEQ ID NO: 3254498 - RNA, 15 nt, Human
uccugucucccuccu

SEQ ID NO: 3254499 - RNA, 23 nt, Human
uccugucucccuccucugcccgg

SEQ ID NO: 3254500 - RNA, 15 nt, Human
uaggcuagggugggg

SEQ ID NO: 3254501 - RNA, 16 nt, Human
uaggcuagggugggga

SEQ ID NO: 3254502 - RNA, 23 nt, Human
uaugagcuggggaugucucucau

SEQ ID NO: 3254503 - RNA, 23 nt, Human
uauguguguguguuguguguggg

SEQ ID NO: 3254504 - RNA, 11 nt, Human
uuuguggggag

SEQ ID NO: 3254505 - RNA, 12 nt, Human
uuaacucagucu

SEQ ID NO: 3254506 - RNA, 16 nt, Human
uguuuagaagaagugu

SEQ ID NO: 3254507 - RNA, 19 nt, Human
uguuuagaagaaguguguc

SEQ ID NO: 3254508 - RNA, 13 nt, Human
uuaugccaccuga

SEQ ID NO: 3254509 - RNA, 16 nt, Human
uuaugccaccugaaua

SEQ ID NO: 3254510 - RNA, 16 nt, Human
uuuaaaauugugaugu

SEQ ID NO: 3254511 - RNA, 15 nt, Human
uuguuuagaagaagu

SEQ ID NO: 3254512 - RNA, 18 nt, Human
uuguuuagaagaagugug

SEQ ID NO: 3254513 - RNA, 20 nt, Human
uuuacagaggacaguauuug

SEQ ID NO: 3254514 - RNA, 14 nt, Human
uuuaugccaccuga

SEQ ID NO: 3254515 - RNA, 16 nt, Human
uuggcagcucuacucu

SEQ ID NO: 3254516 - RNA, 23 nt, Human
cugccaucauguuuacagaggac

SEQ ID NO: 3254517 - RNA, 17 nt, Human
cugccaucauguuuaca

SEQ ID NO: 3254518 - RNA, 22 nt, Human
cugccaucauguuuacagagga

SEQ ID NO: 3254519 - RNA, 17 nt, Human
cuggggaugucucucau

SEQ ID NO: 3254520 - RNA, 22 nt, Human
cuggggaugucucucaugacca

SEQ ID NO: 3254521 - RNA, 18 nt, Human
cuuauuggcagcucuacu

SEQ ID NO: 3254522 - RNA, 16 nt, Human
gacagguuagcugcuc

SEQ ID NO: 3254523 - RNA, 15 nt, Human
gacaguauuuguggg

SEQ ID NO: 3254524 - RNA, 19 nt, Human
gaagugugggucugugugu

SEQ ID NO: 3254525 - RNA, 17 nt, Human
gaagugugggucugugu

SEQ ID NO: 3254526 - RNA, 18 nt, Human
gaagugugggucugugug

SEQ ID NO: 3254527 - RNA, 15 nt, Human
gaaggcuauggggau

SEQ ID NO: 3254528 - RNA, 19 nt, Human
gaagggcagggcugaggcc

SEQ ID NO: 3254529 - RNA, 19 nt, Human
gagcuggggaugucucuca

SEQ ID NO: 3254530 - RNA, 20 nt, Human
gcaccggggccugggcagga

SEQ ID NO: 3254531 - RNA, 19 nt, Human
gcaccggggccugggcagg

SEQ ID NO: 3254532 - RNA, 13 nt, Human
gaguuggcuggga

SEQ ID NO: 3254533 - RNA, 14 nt, Human
gaguuuaggguggg

SEQ ID NO: 3254534 - RNA, 15 nt, Human
gaguuuagggugggg

SEQ ID NO: 3254535 - RNA, 18 nt, Human
gagugaggaugucugggc

SEQ ID NO: 3254536 - RNA, 13 nt, Human
gaguccaucagcc

SEQ ID NO: 3254537 - RNA, 14 nt, Human
gaguccaucagccu

SEQ ID NO: 3254538 - RNA, 15 nt, Human
gaguccaucagccuc

SEQ ID NO: 3254539 - RNA, 16 nt, Human
gaguccaucagccucc

SEQ ID NO: 3254540 - RNA, 12 nt, Human
gaucccaacacu

SEQ ID NO: 3254541 - RNA, 16 nt, Human
gaucccaacacugcca

SEQ ID NO: 3254542 - RNA, 17 nt, Human
gcggcugggaggagggc

SEQ ID NO: 3254543 - RNA, 18 nt, Human
gcggcugggaggagggca

SEQ ID NO: 3254544 - RNA, 19 nt, Human
gcggcugggaggagggcag

SEQ ID NO: 3254545 - RNA, 22 nt, Human
gcggcugggaggagggcaggca

SEQ ID NO: 3254546 - RNA, 13 nt, Human
gcggcugggagga

SEQ ID NO: 3254547 - RNA, 14 nt, Human
gcggcugggaggag

SEQ ID NO: 3254548 - RNA, 14 nt, Human
gccaguggcuggau

SEQ ID NO: 3254549 - RNA, 23 nt, Human
gccaguggcuggaucugugaggg

SEQ ID NO: 3254550 - RNA, 14 nt, Human
gccaggauggaaug

SEQ ID NO: 3254551 - RNA, 19 nt, Human
gcuuuccucaucaggccau

SEQ ID NO: 3254552 - RNA, 20 nt, Human
gcuguagacauuugcuauga

SEQ ID NO: 3254553 - RNA, 14 nt, Human
ggaacugcugggcu

SEQ ID NO: 3254554 - RNA, 18 nt, Human
gcuccucgagaucccaac

SEQ ID NO: 3254555 - RNA, 14 nt, Human
gcugaggccucuca

SEQ ID NO: 3254556 - RNA, 13 nt, Human
gcugcuccccacg

SEQ ID NO: 3254557 - RNA, 22 nt, Human
gcugcuccccacgucagcuggg

SEQ ID NO: 3254558 - RNA, 16 nt, Human
guaaauuuaugugaug

SEQ ID NO: 3254559 - RNA, 17 nt, Human
guaaauuuaugugaugg

SEQ ID NO: 3254560 - RNA, 21 nt, Human
gguggggagagacgggcccug

SEQ ID NO: 3254561 - RNA, 20 nt, Human
ggucuguguguguguaugug

SEQ ID NO: 3254562 - RNA, 21 nt, Human
ggucuguguguguguaugugg

SEQ ID NO: 3254563 - RNA, 21 nt, Human
ggugcuucuaguucugccagg

SEQ ID NO: 3254564 - RNA, 11 nt, Human
ggucugugugu

SEQ ID NO: 3254565 - RNA, 17 nt, Human
ggucuguguguguguau

SEQ ID NO: 3254566 - RNA, 23 nt, Human
ggguguccugcaccggggccugg

SEQ ID NO: 3254567 - RNA, 22 nt, Human
gggcccuggugguggcucggga

SEQ ID NO: 3254568 - RNA, 18 nt, Human
gggcucagagugggguag

SEQ ID NO: 3254569 - RNA, 14 nt, Human
gggaugucucucau

SEQ ID NO: 3254570 - RNA, 22 nt, Human
gggagaaugucaguauguggaa

SEQ ID NO: 3254571 - RNA, 19 nt, Human
gggagaaugucaguaugug

SEQ ID NO: 3254572 - RNA, 14 nt, Human
aaaagggaggggga

SEQ ID NO: 3254573 - RNA, 12 nt, Human
ggcacagccugg

SEQ ID NO: 3254574 - RNA, 13 nt, Human
ggcacagccuggc

SEQ ID NO: 3254575 - RNA, 22 nt, Human
ggcgaagcguuguccucagccc

SEQ ID NO: 3254576 - RNA, 19 nt, Human
ggccaguggcuggaucugu

SEQ ID NO: 3254577 - RNA, 22 nt, Human
ggcauccagagucccugccugg

SEQ ID NO: 3254578 - RNA, 18 nt, Human
ggcauccagagucccugc

SEQ ID NO: 3254579 - RNA, 17 nt, Human
ggcccugugccuuggug

SEQ ID NO: 3254580 - RNA, 15 nt, Human
caguauuugugggga

SEQ ID NO: 3254581 - RNA, 23 nt, Human
cagaucauuaucagccugugcca

SEQ ID NO: 3254582 - RNA, 24 nt, Human
cagccucuccacucaugugacucu

SEQ ID NO: 3254583 - RNA, 24 nt, Human
cagccccgcguggaacucgugucu

SEQ ID NO: 3254584 - RNA, 14 nt, Human
caaacaggcucaga

SEQ ID NO: 3254585 - RNA, 15 nt, Human
caaacaggcucagag

SEQ ID NO: 3254586 - RNA, 16 nt, Human
auuugcuaugagcugg

SEQ ID NO: 3254587 - RNA, 20 nt, Human
auuugcuaugagcuggggau

SEQ ID NO: 3254588 - RNA, 22 nt, Human
auuuguggggagggauuugggg

SEQ ID NO: 3254589 - RNA, 16 nt, Human
auucuuucccaacacc

SEQ ID NO: 3254590 - RNA, 19 nt, Human
auucuuucccaacaccucu

SEQ ID NO: 3254591 - RNA, 13 nt, Human
auucuuucccaac

SEQ ID NO: 3254592 - RNA, 19 nt, Human
cacuggggcaggggccggg

SEQ ID NO: 3254593 - RNA, 18 nt, Human
cacugccagcauuucccu

SEQ ID NO: 3254594 - RNA, 22 nt, Human
cacugccagcauuucccuuccu

SEQ ID NO: 3254595 - RNA, 22 nt, Human
ccugacccucaucuuucuucca

SEQ ID NO: 3254596 - RNA, 14 nt, Human
ccugacucucagca

SEQ ID NO: 3254597 - RNA, 20 nt, Human
cccugugccuugucacgcca

SEQ ID NO: 3254598 - RNA, 22 nt, Human
cccugugccuugucacgccaga

SEQ ID NO: 3254599 - RNA, 15 nt, Human
cccugugccuuguca

SEQ ID NO: 3254600 - RNA, 24 nt, Human
cccugugccuuggugugcuguauc

SEQ ID NO: 3254601 - RNA, 17 nt, Human
ccagagucccugccugg

SEQ ID NO: 3254602 - RNA, 18 nt, Human
ccagagucccugccugga

SEQ ID NO: 3254603 - RNA, 19 nt, Human
ccagagucccugccuggac

SEQ ID NO: 3254604 - RNA, 22 nt, Human
ccagagucccugccuggaccag

SEQ ID NO: 3254605 - RNA, 16 nt, Human
ccagagucccugccug

SEQ ID NO: 3254606 - RNA, 14 nt, Human
cccgggagcucagg

SEQ ID NO: 3254607 - RNA, 14 nt, Human
ccccgacuuuuguu

SEQ ID NO: 3254608 - RNA, 23 nt, Human
cggcuccucgagaucccaacacu

SEQ ID NO: 3254609 - RNA, 14 nt, Human
cgugucuggcacag

SEQ ID NO: 3254610 - RNA, 13 nt, Human
cgugucuggcaca

SEQ ID NO: 3254611 - RNA, 21 nt, Human
cgugucuggcacagccuggcu

SEQ ID NO: 3254612 - RNA, 19 nt, Human
cuaaccugccgagagucca

SEQ ID NO: 3254613 - RNA, 21 nt, Human
cuaaccugccgagaguccauc

SEQ ID NO: 3254614 - RNA, 12 nt, Human
cuaaccugccga

SEQ ID NO: 3254615 - RNA, 16 nt, Human
cucaucuuucuuccaa

SEQ ID NO: 3254616 - RNA, 14 nt, Human
cucccuccucugcc

SEQ ID NO: 3254617 - RNA, 13 nt, Human
cucccuccucugc

SEQ ID NO: 3254618 - RNA, 14 nt, Human
uagaagaagugugu

SEQ ID NO: 3254619 - RNA, 16 nt, Human
aauuccacacccucac

SEQ ID NO: 3254620 - RNA, 21 nt, Human
uagacauuugcuaugagcugg

SEQ ID NO: 3254621 - RNA, 20 nt, Human
uaugccaccugaauaaagaa

SEQ ID NO: 3254622 - RNA, 21 nt, Human
uaugguaggaacugcugggcu

SEQ ID NO: 3254623 - RNA, 14 nt, Human
uaucagcacgugug

SEQ ID NO: 3254624 - RNA, 19 nt, Human
uaauuuaaaauugugaugu

SEQ ID NO: 3254625 - RNA, 20 nt, Human
uaauuuaaaauugugaugug

SEQ ID NO: 3254626 - RNA, 19 nt, Human
uaccagagaaaaagggagg

SEQ ID NO: 3254627 - RNA, 13 nt, Human
uaccucuuggcug

SEQ ID NO: 3254628 - RNA, 15 nt, Human
uacccccugugccuu

SEQ ID NO: 3254629 - RNA, 14 nt, Human
aaggcucuuuugua

SEQ ID NO: 3254630 - RNA, 19 nt, Human
gugggguagguugggagaa

SEQ ID NO: 3254631 - RNA, 12 nt, Human
guguguaugugg

SEQ ID NO: 3254632 - RNA, 14 nt, Human
gugugggucugugu

SEQ ID NO: 3254633 - RNA, 20 nt, Human
gugugucacccuuaggccag

SEQ ID NO: 3254634 - RNA, 13 nt, Human
guguguauguggg

SEQ ID NO: 3254635 - RNA, 15 nt, Human
guguguauguggggg

SEQ ID NO: 3254636 - RNA, 21 nt, Human
guggccuaaccugccgagagu

SEQ ID NO: 3254637 - RNA, 22 nt, Human
guggccuaaccugccgagaguc

SEQ ID NO: 3254638 - RNA, 15 nt, Human
aaauugugauguguc

SEQ ID NO: 3254639 - RNA, 12 nt, Human
aaauugugaugu

SEQ ID NO: 3254640 - RNA, 12 nt, Human
aaauuuauguga

SEQ ID NO: 3254641 - RNA, 15 nt, Human
aaauuuaugugaugg

SEQ ID NO: 3254642 - RNA, 13 nt, Human
gucaguuguauca

SEQ ID NO: 3254643 - RNA, 21 nt, Human
gucaguauguggaaguguggg

SEQ ID NO: 3254644 - RNA, 17 nt, Human
gucaguauguggaagug

SEQ ID NO: 3254645 - RNA, 17 nt, Human
gucuggcacagccuggc

SEQ ID NO: 3254646 - RNA, 19 nt, Human
gucuggcacagccuggcug

SEQ ID NO: 3254647 - RNA, 19 nt, Human
gucucccuccucugcccgg

SEQ ID NO: 3254648 - RNA, 22 nt, Human
agagggacuguucuuuuguccc

SEQ ID NO: 3254649 - RNA, 17 nt, Human
agagacgggcccuggug

SEQ ID NO: 3254650 - RNA, 22 nt, Human
ucuuggggaguuuagggugggg

SEQ ID NO: 3254651 - RNA, 23 nt, Human
ucuuggggaguuuaggguggggg

SEQ ID NO: 3254652 - RNA, 22 nt, Human
ucuggcacagccuggcuguggc

SEQ ID NO: 3254653 - RNA, 23 nt, Human
acuugucccgggacaccuaggcu

SEQ ID NO: 3254654 - RNA, 15 nt, Human
ucuaccucuuggcug

SEQ ID NO: 3254655 - RNA, 20 nt, Human
ucggggagccgggagccuga

SEQ ID NO: 3254656 - RNA, 16 nt, Human
acuggggcaggggccg

SEQ ID NO: 3254657 - RNA, 22 nt, Human
acucgugucuggcacagccugg

SEQ ID NO: 3254658 - RNA, 23 nt, Human
acucgugucuggcacagccuggc

SEQ ID NO: 3254659 - RNA, 13 nt, Human
uccucuccugucu

SEQ ID NO: 3254660 - RNA, 16 nt, Human
uccucugcccgggagc

SEQ ID NO: 3254661 - RNA, 22 nt, Human
uccucugcccgggagcucagga

SEQ ID NO: 3254662 - RNA, 16 nt, Human
uccauccuacccccug

SEQ ID NO: 3254663 - RNA, 20 nt, Human
uccauccuacccccugugcc

SEQ ID NO: 3254664 - RNA, 16 nt, Human
ucaguauguggaagug

SEQ ID NO: 3254665 - RNA, 18 nt, Human
uaugugggggucugugug

SEQ ID NO: 3254666 - RNA, 19 nt, Human
uaugugggggucugugugu

SEQ ID NO: 3254667 - RNA, 20 nt, Human
uaugugggggucuguguguu

SEQ ID NO: 3254668 - RNA, 16 nt, Human
uuagccuuugucccag

SEQ ID NO: 3254669 - RNA, 16 nt, Human
agugugggucugugug

SEQ ID NO: 3254670 - RNA, 17 nt, Human
agugugggucugugugu

SEQ ID NO: 3254671 - RNA, 15 nt, Human
agugugggucugugu

SEQ ID NO: 3254672 - RNA, 19 nt, Human
agugugggucugugugugu

SEQ ID NO: 3254673 - RNA, 23 nt, Human
agugugggucuguguguguguau

SEQ ID NO: 3254674 - RNA, 14 nt, Human
uguuguguguggga

SEQ ID NO: 3254675 - RNA, 15 nt, Human
uguugugugugggag

SEQ ID NO: 3254676 - RNA, 16 nt, Human
uguugugugugggagu

SEQ ID NO: 3254677 - RNA, 19 nt, Human
uguggcacuggggcagggg

SEQ ID NO: 3254678 - RNA, 16 nt, Human
uguguguguguaugug

SEQ ID NO: 3254679 - RNA, 13 nt, Human
uguguguguguau

SEQ ID NO: 3254680 - RNA, 23 nt, Human
agguugggagaaugucaguaugu

SEQ ID NO: 3254681 - RNA, 17 nt, Human
uguaauuuaaaauugug

SEQ ID NO: 3254682 - RNA, 18 nt, Human
uguaauuuaaaauuguga

SEQ ID NO: 3254683 - RNA, 20 nt, Human
uguaauuuaaaauugugaug

SEQ ID NO: 3254684 - RNA, 21 nt, Human
uguaauuuaaaauugugaugu

SEQ ID NO: 3254685 - RNA, 22 nt, Human
uguaauuuaaaauugugaugug

SEQ ID NO: 3254686 - RNA, 15 nt, Human
agucccugccuggac

SEQ ID NO: 3254687 - RNA, 21 nt, Human
agucccugccuggaccagccu

SEQ ID NO: 3254688 - RNA, 14 nt, Human
agucccugccugga

SEQ ID NO: 3254689 - RNA, 22 nt, Human
agucccugccuggaccagccuc

SEQ ID NO: 3254690 - RNA, 23 nt, Human
agucccugccuggaccagccucu

SEQ ID NO: 3254691 - RNA, 15 nt, Human
aguauguggaagugu

SEQ ID NO: 3254692 - RNA, 17 nt, Human
aguauguggaagugugg

SEQ ID NO: 3254693 - RNA, 19 nt, Human
aguauguggaagugugggu

SEQ ID NO: 3254694 - RNA, 19 nt, Human
ugucaguauguggaagugu

SEQ ID NO: 3254695 - RNA, 20 nt, Human
ugucaguauguggaagugug

SEQ ID NO: 3254696 - RNA, 18 nt, Human
ugucaguauguggaagug

SEQ ID NO: 3254697 - RNA, 22 nt, Human
ugucaguauguggaaguguggg

SEQ ID NO: 3254698 - RNA, 14 nt, Human
uggggcugauugua

SEQ ID NO: 3254699 - RNA, 21 nt, Human
ugggguagguugggagaaugu

SEQ ID NO: 3254700 - RNA, 15 nt, Human
ugggguagguuggga

SEQ ID NO: 3254701 - RNA, 18 nt, Human
uggggaguuuaggguggg

SEQ ID NO: 3254702 - RNA, 19 nt, Human
uggggaguuuagggugggg

SEQ ID NO: 3254703 - RNA, 15 nt, Human
agggggagagggcug

SEQ ID NO: 3254704 - RNA, 16 nt, Human
agggggagagggcugc

SEQ ID NO: 3254705 - RNA, 12 nt, Human
ugggucugugug

SEQ ID NO: 3254706 - RNA, 13 nt, Human
ugguaggaacugc

SEQ ID NO: 3254707 - RNA, 20 nt, Human
ugguaggaacugcugggcuu

SEQ ID NO: 3254708 - RNA, 21 nt, Human
agcugggacaccccgacuuuu

SEQ ID NO: 3254709 - RNA, 15 nt, Human
ugcuguagacauuug

SEQ ID NO: 3254710 - RNA, 23 nt, Human
ugcuguauccauccauggggcug

SEQ ID NO: 3254711 - RNA, 19 nt, Human
aggaucccaugagcuccuu

SEQ ID NO: 3254712 - RNA, 12 nt, Human
aggacaguauuu

SEQ ID NO: 3254713 - RNA, 19 nt, Human
aggacaguauuugugggga

SEQ ID NO: 3254714 - RNA, 21 nt, Human
uggccuguucuucuauggguu

SEQ ID NO: 3254715 - RNA, 23 nt, Human
uggccaguggcuggaucugugag

SEQ ID NO: 3254716 - RNA, 21 nt, Human
agcucaggaaccgaggcaggg

SEQ ID NO: 3254717 - RNA, 22 nt, Human
agcucaggaaccgaggcaggga

SEQ ID NO: 3254718 - RNA, 20 nt, Human
agcucaggaaccgaggcagg

SEQ ID NO: 3254719 - RNA, 17 nt, Human
agcauuucccuuccuuc

SEQ ID NO: 3254720 - RNA, 21 nt, Human
ugauagaaggcuauggggaua

SEQ ID NO: 3254721 - RNA, 18 nt, Human
ugaguucauaaauuuaug

SEQ ID NO: 3254722 - RNA, 24 nt, Human
ugauaagcagucauccucagauca

SEQ ID NO: 3254723 - RNA, 15 nt, Human
uucuaguucugccag

SEQ ID NO: 3254724 - RNA, 11 nt, Human
uuuaugugugu

SEQ ID NO: 3254725 - RNA, 13 nt, Human
uuuaugugugugu

SEQ ID NO: 3254726 - RNA, 12 nt, Human
uuuaugugaugg

SEQ ID NO: 3254727 - RNA, 16 nt, Human
auggccugggggaugu

SEQ ID NO: 3254728 - RNA, 21 nt, Human
auggaaugaugggucaguugu

SEQ ID NO: 3254729 - RNA, 16 nt, Human
aucuguaccucugccu

SEQ ID NO: 3254730 - RNA, 20 nt, Human
aucugagaggccacagugca

SEQ ID NO: 3254731 - RNA, 17 nt, Human
uuuguaaauuuauguga

SEQ ID NO: 3254732 - RNA, 13 nt, Human
augucaguaugug

SEQ ID NO: 3254733 - RNA, 14 nt, Human
augucaguaugugg

SEQ ID NO: 3254734 - RNA, 19 nt, Human
uuugcuaugagcuggggau

SEQ ID NO: 3254735 - RNA, 15 nt, Human
auguuuacagaggac

SEQ ID NO: 3254736 - RNA, 17 nt, Human
auguuuacagaggacag

SEQ ID NO: 3254737 - RNA, 19 nt, Human
auguuuacagaggacagua

SEQ ID NO: 3254738 - RNA, 19 nt, Human
auuuaaaauugugaugugu

SEQ ID NO: 3254739 - RNA, 20 nt, Human
auuuaaaauugugauguguc

SEQ ID NO: 3254740 - RNA, 23 nt, Human
auugcaggagucccugccaucau

SEQ ID NO: 3254741 - RNA, 16 nt, Human
augaugggucaguugu

SEQ ID NO: 3254742 - RNA, 20 nt, Human
auccagagucccugccugga

SEQ ID NO: 3254743 - RNA, 21 nt, Human
auccagagucccugccuggac

SEQ ID NO: 3254744 - RNA, 19 nt, Human
auccagagucccugccugg

SEQ ID NO: 3254745 - RNA, 16 nt, Human
agucugagagaggcca

SEQ ID NO: 3254746 - RNA, 23 nt, Human
agucugagagaggccauucuuuc

SEQ ID NO: 3254747 - RNA, 22 nt, Human
aggaacugcugggcuuggcagc

SEQ ID NO: 3254748 - RNA, 16 nt, Human
aggaaccgaggcaggg

SEQ ID NO: 3254749 - RNA, 16 nt, Human
aggaacugcugggcuu

SEQ ID NO: 3254750 - RNA, 19 nt, Human
agcuaauucuuugaccugu

SEQ ID NO: 3254751 - RNA, 16 nt, Human
agcuccuuaaggcucu

SEQ ID NO: 3254752 - RNA, 17 nt, Human
agcuccuuaaggcucuu

SEQ ID NO: 3254753 - RNA, 23 nt, Human
agagaggccauucuuucccaaca

SEQ ID NO: 3254754 - RNA, 10 nt, Human
agagggcugc

SEQ ID NO: 3254755 - RNA, 13 nt, Human
aagggagggggag

SEQ ID NO: 3254756 - RNA, 18 nt, Human
aagagaagggcagggcug

SEQ ID NO: 3254757 - RNA, 19 nt, Human
accggggccugggcaggag

SEQ ID NO: 3254758 - RNA, 14 nt, Human
aauugugauguguc

SEQ ID NO: 3254759 - RNA, 15 nt, Human
aauugugaugugucc

SEQ ID NO: 3254760 - RNA, 11 nt, Human
aauugugaugu

SEQ ID NO: 3254761 - RNA, 23 nt, Human
acagaggacaguauuugugggga

SEQ ID NO: 3254762 - RNA, 14 nt, Human
accaucucuuuacc

SEQ ID NO: 3254763 - RNA, 17 nt, Human
caagccuuggcucuacc

SEQ ID NO: 3254764 - RNA, 18 nt, Human
ccucagccccgcguggaa

SEQ ID NO: 3254765 - RNA, 15 nt, Human
ccggggccugggcag

SEQ ID NO: 3254766 - RNA, 13 nt, Human
ccgggagcucagg

SEQ ID NO: 3254767 - RNA, 15 nt, Human
ccgggagcucaggaa

SEQ ID NO: 3254768 - RNA, 17 nt, Human
ccggcuuuguggcacug

SEQ ID NO: 3254769 - RNA, 19 nt, Human
ccggcuuuguggcacuggg

SEQ ID NO: 3254770 - RNA, 16 nt, Human
ccggcuuuguggcacu

SEQ ID NO: 3254771 - RNA, 17 nt, Human
ccuccauccuacccccu

SEQ ID NO: 3254772 - RNA, 22 nt, Human
ccuccauccuacccccugugcc

SEQ ID NO: 3254773 - RNA, 23 nt, Human
ccuccauccuacccccugugccu

SEQ ID NO: 3254774 - RNA, 12 nt, Human
cccugccuggac

SEQ ID NO: 3254775 - RNA, 13 nt, Human
cccugccuggacc

SEQ ID NO: 3254776 - RNA, 18 nt, Human
cccugccuggaccagccu

SEQ ID NO: 3254777 - RNA, 20 nt, Human
cccugccaucauguuuacag

SEQ ID NO: 3254778 - RNA, 14 nt, Human
cccucaucuuucuu

SEQ ID NO: 3254779 - RNA, 21 nt, Human
cccagcuaugguucucucgca

SEQ ID NO: 3254780 - RNA, 18 nt, Human
cccagaaugccuccugca

SEQ ID NO: 3254781 - RNA, 20 nt, Human
ccaucauguuuacagaggac

SEQ ID NO: 3254782 - RNA, 22 nt, Human
ccaucauguuuacagaggacag

SEQ ID NO: 3254783 - RNA, 21 nt, Human
cauuaccucagugagaagcca

SEQ ID NO: 3254784 - RNA, 22 nt, Human
cauuaccucagugagaagccag

SEQ ID NO: 3254785 - RNA, 19 nt, Human
cauggggcugauuguauuu

SEQ ID NO: 3254786 - RNA, 15 nt, Human
cauaccuggcccugu

SEQ ID NO: 3254787 - RNA, 18 nt, Human
cauaaucacaacccuuca

SEQ ID NO: 3254788 - RNA, 18 nt, Human
caguggcuggaucuguga

SEQ ID NO: 3254789 - RNA, 20 nt, Human
caguggcuggaucugugagg

SEQ ID NO: 3254790 - RNA, 16 nt, Human
caguggcuggaucugu

SEQ ID NO: 3254791 - RNA, 21 nt, Human
cauccagagucccugccugga

SEQ ID NO: 3254792 - RNA, 19 nt, Human
cauccuacccccugugccu

SEQ ID NO: 3254793 - RNA, 17 nt, Human
gcccgggagcucaggaa

SEQ ID NO: 3254794 - RNA, 19 nt, Human
gcccgggagcucaggaacc

SEQ ID NO: 3254795 - RNA, 15 nt, Human
gcccgggagcucagg

SEQ ID NO: 3254796 - RNA, 17 nt, Human
gccaucauguuuacaga

SEQ ID NO: 3254797 - RNA, 21 nt, Human
gccaucauguuuacagaggac

SEQ ID NO: 3254798 - RNA, 24 nt, Human
gccucuccacucaugugacucuuu

SEQ ID NO: 3254799 - RNA, 21 nt, Human
gccucuccacucaugugacuc

SEQ ID NO: 3254800 - RNA, 20 nt, Human
gccucucauuccagaggaag

SEQ ID NO: 3254801 - RNA, 17 nt, Human
gccugacccucaucuuu

SEQ ID NO: 3254802 - RNA, 19 nt, Human
gccucucauuccagaggaa

SEQ ID NO: 3254803 - RNA, 18 nt, Human
gccuuuggacuugucccg

SEQ ID NO: 3254804 - RNA, 12 nt, Human
gcgcggcuggga

SEQ ID NO: 3254805 - RNA, 18 nt, Human
gcgcggcugggaggaggg

SEQ ID NO: 3254806 - RNA, 19 nt, Human
gcaggggccgggggcaguc

SEQ ID NO: 3254807 - RNA, 20 nt, Human
gcaggggccgggggcagucu

SEQ ID NO: 3254808 - RNA, 18 nt, Human
gcauuauauuuguaaauu

SEQ ID NO: 3254809 - RNA, 20 nt, Human
gauuuggggcucagaguggg

SEQ ID NO: 3254810 - RNA, 21 nt, Human
gaucugugaggggcucucuca

SEQ ID NO: 3254811 - RNA, 14 nt, Human
gaucauuaucagcc

SEQ ID NO: 3254812 - RNA, 15 nt, Human
gaucccaugagcucc

SEQ ID NO: 3254813 - RNA, 17 nt, Human
gaucccaugagcuccuu

SEQ ID NO: 3254814 - RNA, 21 nt, Human
gagccugacccucaucuuucu

SEQ ID NO: 3254815 - RNA, 21 nt, Human
gagcucaggaaccgaggcagg

SEQ ID NO: 3254816 - RNA, 20 nt, Human
gagcucaggaaccgaggcag

SEQ ID NO: 3254817 - RNA, 20 nt, Human
gagcuccuuaaggcucuuuu

SEQ ID NO: 3254818 - RNA, 18 nt, Human
gacuugucccgggacacc

SEQ ID NO: 3254819 - RNA, 22 nt, Human
gagaagccagcuuuccucauca

SEQ ID NO: 3254820 - RNA, 13 nt, Human
gagagaggccauu

SEQ ID NO: 3254821 - RNA, 21 nt, Human
gagagaggccauucuuuccca

SEQ ID NO: 3254822 - RNA, 15 nt, Human
gacaccuaggcuagg

SEQ ID NO: 3254823 - RNA, 16 nt, Human
gacaccuaggcuaggg

SEQ ID NO: 3254824 - RNA, 20 nt, Human
gacaccuaggcuaggguggg

SEQ ID NO: 3254825 - RNA, 17 nt, Human
gaccuuuccugaggaag

SEQ ID NO: 3254826 - RNA, 20 nt, Human
cuuggggaguuuaggguggg

SEQ ID NO: 3254827 - RNA, 21 nt, Human
cuuggggaguuuagggugggg

SEQ ID NO: 3254828 - RNA, 23 nt, Human
cuugucacgccagacuucccacg

SEQ ID NO: 3254829 - RNA, 18 nt, Human
cuugucacgccagacuuc

SEQ ID NO: 3254830 - RNA, 12 nt, Human
cuuuggacuugu

SEQ ID NO: 3254831 - RNA, 19 nt, Human
cuuucuuccaaacaggcuc

SEQ ID NO: 3254832 - RNA, 13 nt, Human
cuuucuuccaaac

SEQ ID NO: 3254833 - RNA, 21 nt, Human
gaaggaucccaugagcuccuu

SEQ ID NO: 3254834 - RNA, 13 nt, Human
gaagaaguguguc

SEQ ID NO: 3254835 - RNA, 11 nt, Human
cugccaggaga

SEQ ID NO: 3254836 - RNA, 18 nt, Human
cugcccgggagcucagga

SEQ ID NO: 3254837 - RNA, 19 nt, Human
cugcccgggagcucaggaa

SEQ ID NO: 3254838 - RNA, 19 nt, Human
cugggaggagggcaggcau

SEQ ID NO: 3254839 - RNA, 18 nt, Human
cuggcuguggccuaaccu

SEQ ID NO: 3254840 - RNA, 16 nt, Human
cuggcacagccuggcu

SEQ ID NO: 3254841 - RNA, 21 nt, Human
cuggcacagccuggcuguggc

SEQ ID NO: 3254842 - RNA, 15 nt, Human
cuggcacagccuggc

SEQ ID NO: 3254843 - RNA, 23 nt, Human
cuggcacagccuggcuguggccu

SEQ ID NO: 3254844 - RNA, 14 nt, Human
cuguaccucugccu

SEQ ID NO: 3254845 - RNA, 21 nt, Human
cuccucgagaucccaacacug

SEQ ID NO: 3254846 - RNA, 24 nt, Human
cuccucgagaucccaacacugcca

SEQ ID NO: 3254847 - RNA, 17 nt, Human
cuccucgagaucccaac

SEQ ID NO: 3254848 - RNA, 18 nt, Human
cuccauccuacccccugu

SEQ ID NO: 3254849 - RNA, 20 nt, Human
cuccauccuacccccugugc

SEQ ID NO: 3254850 - RNA, 22 nt, Human
cuccauccuacccccugugccu

SEQ ID NO: 3254851 - RNA, 23 nt, Human
cuccauccuacccccugugccuu

SEQ ID NO: 3254852 - RNA, 21 nt, Human
cucuccacucaugugacucuu

SEQ ID NO: 3254853 - RNA, 19 nt, Human
cucuccacucaugugacuc

SEQ ID NO: 3254854 - RNA, 22 nt, Human
cucuccacucaugugacucuuu

SEQ ID NO: 3254855 - RNA, 15 nt, Human
cucuccugucucccu

SEQ ID NO: 3254856 - RNA, 17 nt, Human
cucuccugucucccucc

SEQ ID NO: 3254857 - RNA, 18 nt, Human
cucuccugucucccuccu

SEQ ID NO: 3254858 - RNA, 21 nt, Human
cucuuggggaguuuagggugg

SEQ ID NO: 3254859 - RNA, 23 nt, Human
cucuuggggaguuuagggugggg

SEQ ID NO: 3254860 - RNA, 12 nt, Human
cggcugggagga

SEQ ID NO: 3254861 - RNA, 17 nt, Human
cgggagccugacccuca

SEQ ID NO: 3254862 - RNA, 18 nt, Human
cgggggcagucugagaga

SEQ ID NO: 3254863 - RNA, 21 nt, Human
cgggggcagucugagagaggc

SEQ ID NO: 3254864 - RNA, 17 nt, Human
cgggggcagucugagag

SEQ ID NO: 3254865 - RNA, 17 nt, Human
cggggccugggcaggag

SEQ ID NO: 3254866 - RNA, 19 nt, Human
cggggccugggcaggaggg

SEQ ID NO: 3254867 - RNA, 22 nt, Human
cgggucaucuguaccucugccu

SEQ ID NO: 3254868 - RNA, 15 nt, Human
cgggucaucuguacc

SEQ ID NO: 3254869 - RNA, 23 nt, Human
cguggcuguggcauccagagucc

SEQ ID NO: 3254870 - RNA, 16 nt, Human
cguuguccucagcccc

SEQ ID NO: 3254871 - RNA, 13 nt, Human
cuacccccugugc

SEQ ID NO: 3254872 - RNA, 14 nt, Human
cuacccccugugcc

SEQ ID NO: 3254873 - RNA, 16 nt, Human
gucccugaagagaagg

SEQ ID NO: 3254874 - RNA, 22 nt, Human
gucagcugggacaccccgacuu

SEQ ID NO: 3254875 - RNA, 14 nt, Human
guagguugggagaa

SEQ ID NO: 3254876 - RNA, 19 nt, Human
guagugauuuuuaugccac

SEQ ID NO: 3254877 - RNA, 21 nt, Human
gugauuuuuaugccaccugaa

SEQ ID NO: 3254878 - RNA, 14 nt, Human
gugccuuuugccau

SEQ ID NO: 3254879 - RNA, 21 nt, Human
gugccaggauggaaugauggg

SEQ ID NO: 3254880 - RNA, 21 nt, Human
gugacuauggagcugagcagg

SEQ ID NO: 3254881 - RNA, 11 nt, Human
gucugugugug

SEQ ID NO: 3254882 - RNA, 12 nt, Human
gucugugugugu

SEQ ID NO: 3254883 - RNA, 16 nt, Human
gucuguguguguguau

SEQ ID NO: 3254884 - RNA, 20 nt, Human
gucuguguguguguaugugg

SEQ ID NO: 3254885 - RNA, 11 nt, Human
gucuguguguu

SEQ ID NO: 3254886 - RNA, 21 nt, Human
gucuguguguuuaugugugug

SEQ ID NO: 3254887 - RNA, 22 nt, Human
gucuguguguuuaugugugugu

SEQ ID NO: 3254888 - RNA, 13 nt, Human
gucugagagaggc

SEQ ID NO: 3254889 - RNA, 14 nt, Human
gucugagagaggcc

SEQ ID NO: 3254890 - RNA, 15 nt, Human
gucugagagaggcca

SEQ ID NO: 3254891 - RNA, 18 nt, Human
gucugagagaggccauuc

SEQ ID NO: 3254892 - RNA, 13 nt, Human
gucccugccugga

SEQ ID NO: 3254893 - RNA, 13 nt, Human
guucugccaggag

SEQ ID NO: 3254894 - RNA, 14 nt, Human
guucugccaggaga

SEQ ID NO: 3254895 - RNA, 12 nt, Human
guucugccagga

SEQ ID NO: 3254896 - RNA, 21 nt, Human
guguccugcaccggggccugg

SEQ ID NO: 3254897 - RNA, 17 nt, Human
gugucuggcacagccug

SEQ ID NO: 3254898 - RNA, 17 nt, Human
gugugggaguguguaau

SEQ ID NO: 3254899 - RNA, 16 nt, Human
guguguuuaugugugu

SEQ ID NO: 3254900 - RNA, 14 nt, Human
guguguuuaugugu

SEQ ID NO: 3254901 - RNA, 15 nt, Human
guguguuuaugugug

SEQ ID NO: 3254902 - RNA, 12 nt, Human
guguguugugug

SEQ ID NO: 3254903 - RNA, 14 nt, Human
guguguugugugug

SEQ ID NO: 3254904 - RNA, 17 nt, Human
guguguuguguguggga

SEQ ID NO: 3254905 - RNA, 21 nt, Human
guggggagagacgggcccugg

SEQ ID NO: 3254906 - RNA, 17 nt, Human
guggcuggaucugugag

SEQ ID NO: 3254907 - RNA, 22 nt, Human
guguaauuuaaaauugugaugu

SEQ ID NO: 3254908 - RNA, 23 nt, Human
guguaauuuaaaauugugaugug

SEQ ID NO: 3254909 - RNA, 20 nt, Human
guguaauuuaaaauugugau

SEQ ID NO: 3254910 - RNA, 22 nt, Human
uauaaacaugcuugcauuauau

SEQ ID NO: 3254911 - RNA, 20 nt, Human
uauauuuguaaauuuaugug

SEQ ID NO: 3254912 - RNA, 16 nt, Human
guuuagaagaagugug

SEQ ID NO: 3254913 - RNA, 17 nt, Human
guuguccucagccccgc

SEQ ID NO: 3254914 - RNA, 23 nt, Human
guuguccucagccccgcguggaa

SEQ ID NO: 3254915 - RNA, 12 nt, Human
guuguguguggg

SEQ ID NO: 3254916 - RNA, 13 nt, Human
guuguguguggga

SEQ ID NO: 3254917 - RNA, 14 nt, Human
guugugugugggag

SEQ ID NO: 3254918 - RNA, 16 nt, Human
guugugugugggagug

SEQ ID NO: 3254919 - RNA, 22 nt, Human
guugugugugggaguguguaau

SEQ ID NO: 3254920 - RNA, 13 nt, Human
uaaauuuauguga

SEQ ID NO: 3254921 - RNA, 22 nt, Human
uaagugccaggauggaaugaug

SEQ ID NO: 3254922 - RNA, 14 nt, Human
ugugugggagugug

SEQ ID NO: 3254923 - RNA, 15 nt, Human
ugugugggagugugu

SEQ ID NO: 3254924 - RNA, 11 nt, Human
uguguaugugg

SEQ ID NO: 3254925 - RNA, 12 nt, Human
uguguauguggg

SEQ ID NO: 3254926 - RNA, 16 nt, Human
ugugugggagugugua

SEQ ID NO: 3254927 - RNA, 16 nt, Human
uguucuuuugucccag

SEQ ID NO: 3254928 - RNA, 14 nt, Human
ugugggagugugua

SEQ ID NO: 3254929 - RNA, 15 nt, Human
ugugggaguguguaa

SEQ ID NO: 3254930 - RNA, 15 nt, Human
uguggaagugugggu

SEQ ID NO: 3254931 - RNA, 15 nt, Human
uguggccuaaccugc

SEQ ID NO: 3254932 - RNA, 19 nt, Human
uguguaauuuaaaauugug

SEQ ID NO: 3254933 - RNA, 22 nt, Human
uguguaauuuaaaauugugaug

SEQ ID NO: 3254934 - RNA, 23 nt, Human
uguguaauuuaaaauugugaugu

SEQ ID NO: 3254935 - RNA, 11 nt, Human
uguguaauuua

SEQ ID NO: 3254936 - RNA, 18 nt, Human
uguguaauuuaaaauugu

SEQ ID NO: 3254937 - RNA, 19 nt, Human
ugugccuugucacgccaga

SEQ ID NO: 3254938 - RNA, 20 nt, Human
ugugccuugucacgccagac

SEQ ID NO: 3254939 - RNA, 17 nt, Human
ugugccuugucacgcca

SEQ ID NO: 3254940 - RNA, 17 nt, Human
ugugccuuggugugcug

SEQ ID NO: 3254941 - RNA, 16 nt, Human
ugugccuuuugccauc

SEQ ID NO: 3254942 - RNA, 17 nt, Human
ugucuggcacagccugg

SEQ ID NO: 3254943 - RNA, 21 nt, Human
uguccucagccccgcguggaa

SEQ ID NO: 3254944 - RNA, 22 nt, Human
ugucacccuuaggccagcacca

SEQ ID NO: 3254945 - RNA, 14 nt, Human
uguaccucugccuc

SEQ ID NO: 3254946 - RNA, 16 nt, Human
ugcaccggggccuggg

SEQ ID NO: 3254947 - RNA, 22 nt, Human
ugcaccggggccugggcaggag

SEQ ID NO: 3254948 - RNA, 12 nt, Human
ugcaccggggcc

SEQ ID NO: 3254949 - RNA, 18 nt, Human
ugccaggauggaaugaug

SEQ ID NO: 3254950 - RNA, 21 nt, Human
ugggacaccccgacuuuuguu

SEQ ID NO: 3254951 - RNA, 21 nt, Human
ugggagugaggaugucugggc

SEQ ID NO: 3254952 - RNA, 18 nt, Human
ugggggucuguguguuua

SEQ ID NO: 3254953 - RNA, 15 nt, Human
ugggggucugugugu

SEQ ID NO: 3254954 - RNA, 11 nt, Human
ugggggaugua

SEQ ID NO: 3254955 - RNA, 18 nt, Human
uggaacucgugucuggca

SEQ ID NO: 3254956 - RNA, 20 nt, Human
uggaaugaugggucaguugu

SEQ ID NO: 3254957 - RNA, 23 nt, Human
ucccaugagcuccuuaaggcucu

SEQ ID NO: 3254958 - RNA, 16 nt, Human
uccucgagaucccaac

SEQ ID NO: 3254959 - RNA, 23 nt, Human
uccucgagaucccaacacugcca

SEQ ID NO: 3254960 - RNA, 19 nt, Human
uccugucccucauccauag

SEQ ID NO: 3254961 - RNA, 20 nt, Human
ucagaucauuaucagccugu

SEQ ID NO: 3254962 - RNA, 23 nt, Human
ucagccuccauccuacccccugu

SEQ ID NO: 3254963 - RNA, 12 nt, Human
ucaucuuucuuc

SEQ ID NO: 3254964 - RNA, 14 nt, Human
ucaucuuucuucca

SEQ ID NO: 3254965 - RNA, 17 nt, Human
ucaucuuucuuccaaac

SEQ ID NO: 3254966 - RNA, 16 nt, Human
ucccaacacugccagc

SEQ ID NO: 3254967 - RNA, 14 nt, Human
ucccaacacugcca

SEQ ID NO: 3254968 - RNA, 15 nt, Human
ucccaacacugccag

SEQ ID NO: 3254969 - RNA, 22 nt, Human
ucuucauuaccucagugagaag

SEQ ID NO: 3254970 - RNA, 11 nt, Human
ucugugugugu

SEQ ID NO: 3254971 - RNA, 19 nt, Human
ucuuuccaaccggcuuugu

SEQ ID NO: 3254972 - RNA, 14 nt, Human
ugacucuuuccaac

SEQ ID NO: 3254973 - RNA, 16 nt, Human
ugacucuuuccaaccg

SEQ ID NO: 3254974 - RNA, 13 nt, Human
ugacucuuuccaa

SEQ ID NO: 3254975 - RNA, 19 nt, Human
ugacucuuuccaaccggcu

SEQ ID NO: 3254976 - RNA, 20 nt, Human
ugaagagaagggcagggcug

SEQ ID NO: 3254977 - RNA, 22 nt, Human
ugaagagaagggcagggcugag

SEQ ID NO: 3254978 - RNA, 13 nt, Human
aggaugucugggc

SEQ ID NO: 3254979 - RNA, 20 nt, Human
aggagacagguuagcugcuc

SEQ ID NO: 3254980 - RNA, 15 nt, Human
aggagggaggugcuu

SEQ ID NO: 3254981 - RNA, 13 nt, Human
aggagggcaggca

SEQ ID NO: 3254982 - RNA, 15 nt, Human
aggagggcaggcauc

SEQ ID NO: 3254983 - RNA, 19 nt, Human
aggcaucggggagccggga

SEQ ID NO: 3254984 - RNA, 22 nt, Human
agggauuuggggcucagagugg

SEQ ID NO: 3254985 - RNA, 14 nt, Human
aggcuagggugggg

SEQ ID NO: 3254986 - RNA, 15 nt, Human
aggcuagggugggga

SEQ ID NO: 3254987 - RNA, 16 nt, Human
aggcuaggguggggag

SEQ ID NO: 3254988 - RNA, 19 nt, Human
aggcuaggguggggagaga

SEQ ID NO: 3254989 - RNA, 19 nt, Human
agagugggguagguuggga

SEQ ID NO: 3254990 - RNA, 13 nt, Human
agcaucucccagu

SEQ ID NO: 3254991 - RNA, 12 nt, Human
agagaggccauu

SEQ ID NO: 3254992 - RNA, 22 nt, Human
agagaggccauucuuucccaac

SEQ ID NO: 3254993 - RNA, 13 nt, Human
accggggccuggg

SEQ ID NO: 3254994 - RNA, 16 nt, Human
acccucaucuuucuuc

SEQ ID NO: 3254995 - RNA, 19 nt, Human
acccucaucuuucuuccaa

SEQ ID NO: 3254996 - RNA, 13 nt, Human
acccucaucuuuc

SEQ ID NO: 3254997 - RNA, 14 nt, Human
acccucaucuuucu

SEQ ID NO: 3254998 - RNA, 14 nt, Human
aacaggcucagagg

SEQ ID NO: 3254999 - RNA, 14 nt, Human
uacagaggacagua

SEQ ID NO: 3255000 - RNA, 18 nt, Human
uacagaggacaguauuug

SEQ ID NO: 3255001 - RNA, 15 nt, Human
uaauuuaaaauugug

SEQ ID NO: 3255002 - RNA, 16 nt, Human
uaauuuaaaauuguga

SEQ ID NO: 3255003 - RNA, 14 nt, Human
aauuuaugugaugg

SEQ ID NO: 3255004 - RNA, 17 nt, Human
acaccccgacuuuuguu

SEQ ID NO: 3255005 - RNA, 16 nt, Human
guuuucuuaacuuaaa

SEQ ID NO: 3255006 - RNA, 23 nt, Human
aaggcuauggggauagaugugug

SEQ ID NO: 3255007 - RNA, 13 nt, Human
guuuaugugugug

SEQ ID NO: 3255008 - RNA, 16 nt, Human
guuuaugugugugugu

SEQ ID NO: 3255009 - RNA, 18 nt, Human
guuguaucagcacgugug

SEQ ID NO: 3255010 - RNA, 23 nt, Human
gugcuauuguagagccagagguc

SEQ ID NO: 3255011 - RNA, 14 nt, Human
guggaagugugggu

SEQ ID NO: 3255012 - RNA, 15 nt, Human
guggaaguguggguc

SEQ ID NO: 3255013 - RNA, 19 nt, Human
guggaagugugggucugug

SEQ ID NO: 3255014 - RNA, 20 nt, Human
guggaagugugggucugugu

SEQ ID NO: 3255015 - RNA, 21 nt, Human
guggaagugugggucugugug

SEQ ID NO: 3255016 - RNA, 22 nt, Human
guggaagugugggucugugugu

SEQ ID NO: 3255017 - RNA, 14 nt, Human
guggcacuggggca

SEQ ID NO: 3255018 - RNA, 23 nt, Human
guggggggggggcgcggcuggga

SEQ ID NO: 3255019 - RNA, 13 nt, Human
gugggucugugug

SEQ ID NO: 3255020 - RNA, 16 nt, Human
gugggucugugugugu

SEQ ID NO: 3255021 - RNA, 14 nt, Human
gugguggcucggga

SEQ ID NO: 3255022 - RNA, 13 nt, Human
gugggagugugua

SEQ ID NO: 3255023 - RNA, 14 nt, Human
gugggaguguguaa

SEQ ID NO: 3255024 - RNA, 14 nt, Human
guguguaauuuaaa

SEQ ID NO: 3255025 - RNA, 16 nt, Human
guaggaacugcugggc

SEQ ID NO: 3255026 - RNA, 18 nt, Human
guauguggaagugugggu

SEQ ID NO: 3255027 - RNA, 21 nt, Human
guauguggaagugugggucug

SEQ ID NO: 3255028 - RNA, 19 nt, Human
guaugugggggucugugug

SEQ ID NO: 3255029 - RNA, 20 nt, Human
guaugugggggucugugugu

SEQ ID NO: 3255030 - RNA, 16 nt, Human
guauguggaagugugg

SEQ ID NO: 3255031 - RNA, 17 nt, Human
guauguggaaguguggg

SEQ ID NO: 3255032 - RNA, 15 nt, Human
guauguggaagugug

SEQ ID NO: 3255033 - RNA, 19 nt, Human
aacucgugucuggcacagc

SEQ ID NO: 3255034 - RNA, 12 nt, Human
gucucccuccuc

SEQ ID NO: 3255035 - RNA, 16 nt, Human
gucucccuccucugcc

SEQ ID NO: 3255036 - RNA, 12 nt, Human
aacacugccagc

SEQ ID NO: 3255037 - RNA, 22 nt, Human
aacacugccagcauuucccuuc

SEQ ID NO: 3255038 - RNA, 13 nt, Human
ucuuucuuccaaa

SEQ ID NO: 3255039 - RNA, 19 nt, Human
agacuucccacggcuccuc

SEQ ID NO: 3255040 - RNA, 21 nt, Human
agacauuugcuaugagcuggg

SEQ ID NO: 3255041 - RNA, 15 nt, Human
agaaugucaguaugu

SEQ ID NO: 3255042 - RNA, 16 nt, Human
agaaugucaguaugug

SEQ ID NO: 3255043 - RNA, 13 nt, Human
agaaugucaguau

SEQ ID NO: 3255044 - RNA, 17 nt, Human
agaaugucaguaugugg

SEQ ID NO: 3255045 - RNA, 19 nt, Human
agaaugucaguauguggaa

SEQ ID NO: 3255046 - RNA, 23 nt, Human
agaguccaucagccuccauccua

SEQ ID NO: 3255047 - RNA, 14 nt, Human
agagucccugccug

SEQ ID NO: 3255048 - RNA, 17 nt, Human
agagucccugccuggac

SEQ ID NO: 3255049 - RNA, 18 nt, Human
agaucccaacacugccag

SEQ ID NO: 3255050 - RNA, 19 nt, Human
agaucccaacacugccagc

SEQ ID NO: 3255051 - RNA, 20 nt, Human
agaucccaacacugccagca

SEQ ID NO: 3255052 - RNA, 21 nt, Human
agaggccauucuuucccaaca

SEQ ID NO: 3255053 - RNA, 23 nt, Human
acuggccaguggcuggaucugug

SEQ ID NO: 3255054 - RNA, 18 nt, Human
ucgagaucccaacacugc

SEQ ID NO: 3255055 - RNA, 21 nt, Human
ucgagaucccaacacugccag

SEQ ID NO: 3255056 - RNA, 17 nt, Human
ucgagaucccaacacug

SEQ ID NO: 3255057 - RNA, 16 nt, Human
ucucauuccagaggaa

SEQ ID NO: 3255058 - RNA, 14 nt, Human
ucugagagaggcca

SEQ ID NO: 3255059 - RNA, 20 nt, Human
ucugagagaggccauucuuu

SEQ ID NO: 3255060 - RNA, 18 nt, Human
acucaugugacucuuucc

SEQ ID NO: 3255061 - RNA, 19 nt, Human
acucaugugacucuuucca

SEQ ID NO: 3255062 - RNA, 21 nt, Human
uccaaccggcuuuguggcacu

SEQ ID NO: 3255063 - RNA, 14 nt, Human
uccacucaugugac

SEQ ID NO: 3255064 - RNA, 21 nt, Human
uccacucaugugacucuuucc

SEQ ID NO: 3255065 - RNA, 17 nt, Human
uauuuguaaauuuaugu

SEQ ID NO: 3255066 - RNA, 22 nt, Human
uauuuguaaauuuaugugaugg

SEQ ID NO: 3255067 - RNA, 16 nt, Human
uauuuguaaauuuaug

SEQ ID NO: 3255068 - RNA, 20 nt, Human
ugugggucugugugugugua

SEQ ID NO: 3255069 - RNA, 12 nt, Human
ugugugugggag

SEQ ID NO: 3255070 - RNA, 20 nt, Human
ugugugugggaguguguaau

SEQ ID NO: 3255071 - RNA, 14 nt, Human
uguguguguaugug

SEQ ID NO: 3255072 - RNA, 19 nt, Human
uguggcauccagagucccu

SEQ ID NO: 3255073 - RNA, 21 nt, Human
uguggcauccagagucccugc

SEQ ID NO: 3255074 - RNA, 16 nt, Human
uguggcauccagaguc

SEQ ID NO: 3255075 - RNA, 12 nt, Human
ugugacucuuuc

SEQ ID NO: 3255076 - RNA, 14 nt, Human
ugugacucuuucca

SEQ ID NO: 3255077 - RNA, 15 nt, Human
ugugacucuuuccaa

SEQ ID NO: 3255078 - RNA, 17 nt, Human
ugugacucuuuccaacc

SEQ ID NO: 3255079 - RNA, 16 nt, Human
uuagaagaaguguguc

SEQ ID NO: 3255080 - RNA, 14 nt, Human
uuagaagaagugug

SEQ ID NO: 3255081 - RNA, 15 nt, Human
uuagaagaagugugu

SEQ ID NO: 3255082 - RNA, 13 nt, Human
uuaaaauugugau

SEQ ID NO: 3255083 - RNA, 18 nt, Human
uuaaaauugugauguguc

SEQ ID NO: 3255084 - RNA, 12 nt, Human
aguuuagggugg

SEQ ID NO: 3255085 - RNA, 13 nt, Human
aguuuaggguggg

SEQ ID NO: 3255086 - RNA, 14 nt, Human
aguuuagggugggg

SEQ ID NO: 3255087 - RNA, 16 nt, Human
uguuuaugugugugug

SEQ ID NO: 3255088 - RNA, 13 nt, Human
uguuuaugugugu

SEQ ID NO: 3255089 - RNA, 13 nt, Human
aguucugccagga

SEQ ID NO: 3255090 - RNA, 14 nt, Human
aguucugccaggag

SEQ ID NO: 3255091 - RNA, 20 nt, Human
aguucugccaggagacaggu

SEQ ID NO: 3255092 - RNA, 12 nt, Human
aguucugccagg

SEQ ID NO: 3255093 - RNA, 23 nt, Human
agggaaggaucccaugagcuccu

SEQ ID NO: 3255094 - RNA, 15 nt, Human
agggaaggaucccau

SEQ ID NO: 3255095 - RNA, 22 nt, Human
agggaaggaucccaugagcucc

SEQ ID NO: 3255096 - RNA, 19 nt, Human
ugggagaaugucaguaugu

SEQ ID NO: 3255097 - RNA, 20 nt, Human
ugggagaaugucaguaugug

SEQ ID NO: 3255098 - RNA, 22 nt, Human
ugggagaaugucaguaugugga

SEQ ID NO: 3255099 - RNA, 15 nt, Human
uggggcucagagugg

SEQ ID NO: 3255100 - RNA, 22 nt, Human
uggggagggauuuggggcucag

SEQ ID NO: 3255101 - RNA, 13 nt, Human
uggggagagacgg

SEQ ID NO: 3255102 - RNA, 14 nt, Human
uggggagggauuug

SEQ ID NO: 3255103 - RNA, 21 nt, Human
aggguggggggggggcgcggc

SEQ ID NO: 3255104 - RNA, 12 nt, Human
uguauguggggg

SEQ ID NO: 3255105 - RNA, 21 nt, Human
uguagugauuuuuaugccacc

SEQ ID NO: 3255106 - RNA, 23 nt, Human
agguuuguuuagaagaagugugu

SEQ ID NO: 3255107 - RNA, 19 nt, Human
agguuuuuguagugauuuu

SEQ ID NO: 3255108 - RNA, 16 nt, Human
ugccuuggugugcugu

SEQ ID NO: 3255109 - RNA, 15 nt, Human
ugccuugucacgcca

SEQ ID NO: 3255110 - RNA, 22 nt, Human
ugcuaugagcuggggaugucuc

SEQ ID NO: 3255111 - RNA, 19 nt, Human
ugcuaugagcuggggaugu

SEQ ID NO: 3255112 - RNA, 20 nt, Human
ugcuaugagcuggggauguc

SEQ ID NO: 3255113 - RNA, 16 nt, Human
ugcuaugagcugggga

SEQ ID NO: 3255114 - RNA, 16 nt, Human
ugccaucauguuuaca

SEQ ID NO: 3255115 - RNA, 22 nt, Human
ugccgagaguccaucagccucc

SEQ ID NO: 3255116 - RNA, 23 nt, Human
agccccgcguggaacucgugucu

SEQ ID NO: 3255117 - RNA, 16 nt, Human
agccucuccacucaug

SEQ ID NO: 3255118 - RNA, 15 nt, Human
ugaugggucaguugu

SEQ ID NO: 3255119 - RNA, 17 nt, Human
auuguagagccagaggu

SEQ ID NO: 3255120 - RNA, 18 nt, Human
auuguagagccagagguc

SEQ ID NO: 3255121 - RNA, 15 nt, Human
auuuaaaauugugau

SEQ ID NO: 3255122 - RNA, 18 nt, Human
auguguguguguugugug

SEQ ID NO: 3255123 - RNA, 22 nt, Human
auguguguguguuguguguggg

SEQ ID NO: 3255124 - RNA, 23 nt, Human
auguguguguguuguguguggga

SEQ ID NO: 3255125 - RNA, 17 nt, Human
auguauauaaacaugcu

SEQ ID NO: 3255126 - RNA, 19 nt, Human
uuucccuuccuuccucucc

SEQ ID NO: 3255127 - RNA, 23 nt, Human
uuugaccuguugggagugaggau

SEQ ID NO: 3255128 - RNA, 22 nt, Human
uuuguagugauuuuuaugccac

SEQ ID NO: 3255129 - RNA, 15 nt, Human
uuuguagugauuuuu

SEQ ID NO: 3255130 - RNA, 18 nt, Human
uuuguaagguuuuuguag

SEQ ID NO: 3255131 - RNA, 20 nt, Human
auauuuguaaauuuauguga

SEQ ID NO: 3255132 - RNA, 12 nt, Human
uucugccaggag

SEQ ID NO: 3255133 - RNA, 11 nt, Human
aucccaacacu

SEQ ID NO: 3255134 - RNA, 15 nt, Human
aucccaacacugcca

SEQ ID NO: 3255135 - RNA, 16 nt, Human
aucccaacacugccag

SEQ ID NO: 3255136 - RNA, 17 nt, Human
aucccaacacugccagc

SEQ ID NO: 3255137 - RNA, 16 nt, Human
uucuaguucugccagg

SEQ ID NO: 3255138 - RNA, 17 nt, Human
uucuaguucugccagga

SEQ ID NO: 3255139 - RNA, 18 nt, Human
aucauguuuacagaggac

SEQ ID NO: 3255140 - RNA, 23 nt, Human
aucauguuuacagaggacaguau

SEQ ID NO: 3255141 - RNA, 19 nt, Human
uuguaaauuuaugugaugg

SEQ ID NO: 3255142 - RNA, 16 nt, Human
uuggacuugucccggg

SEQ ID NO: 3255143 - RNA, 21 nt, Human
aucugugaggggcucucucau

SEQ ID NO: 3255144 - RNA, 22 nt, Human
aucugugaggggcucucucaug

SEQ ID NO: 3255145 - RNA, 18 nt, Human
augaguuggcugggaaua

SEQ ID NO: 3255146 - RNA, 12 nt, Human
uugugauguguc

SEQ ID NO: 3255147 - RNA, 18 nt, Human
cugcaccggggccugggc

SEQ ID NO: 3255148 - RNA, 19 nt, Human
cugcaccggggccugggca

SEQ ID NO: 3255149 - RNA, 14 nt, Human
cugcaccggggccu

SEQ ID NO: 3255150 - RNA, 16 nt, Human
cugcaccggggccugg

SEQ ID NO: 3255151 - RNA, 13 nt, Human
cugggcaggaggg

SEQ ID NO: 3255152 - RNA, 13 nt, Human
cuggcccugugcc

SEQ ID NO: 3255153 - RNA, 14 nt, Human
cuggaucugugagg

SEQ ID NO: 3255154 - RNA, 9 nt, Human
gagggcugc

SEQ ID NO: 3255155 - RNA, 16 nt, Human
gagggcugccuuugga

SEQ ID NO: 3255156 - RNA, 22 nt, Human
gaggugcuucuaguucugccag

SEQ ID NO: 3255157 - RNA, 23 nt, Human
gaggugcuucuaguucugccagg

SEQ ID NO: 3255158 - RNA, 17 nt, Human
gaguccaucagccucca

SEQ ID NO: 3255159 - RNA, 18 nt, Human
gagucagggagagcugaa

SEQ ID NO: 3255160 - RNA, 14 nt, Human
gcaccggggccugg

SEQ ID NO: 3255161 - RNA, 16 nt, Human
gcaccggggccugggc

SEQ ID NO: 3255162 - RNA, 21 nt, Human
gaagugugggucugugugugu

SEQ ID NO: 3255163 - RNA, 24 nt, Human
gaagugugggucugugugugugua

SEQ ID NO: 3255164 - RNA, 17 nt, Human
gaacugcugggcuuggc

SEQ ID NO: 3255165 - RNA, 20 nt, Human
gaacugcugggcuuggcagc

SEQ ID NO: 3255166 - RNA, 12 nt, Human
gaaccgaggcag

SEQ ID NO: 3255167 - RNA, 15 nt, Human
gaaccgaggcaggga

SEQ ID NO: 3255168 - RNA, 21 nt, Human
gcuauggggauagaugugugg

SEQ ID NO: 3255169 - RNA, 19 nt, Human
gcuauggggauagaugugu

SEQ ID NO: 3255170 - RNA, 12 nt, Human
ggggccugggca

SEQ ID NO: 3255171 - RNA, 15 nt, Human
ggggccugggcagga

SEQ ID NO: 3255172 - RNA, 16 nt, Human
aaaauugugauguguc

SEQ ID NO: 3255173 - RNA, 14 nt, Human
gggagggggagagg

SEQ ID NO: 3255174 - RNA, 15 nt, Human
aaaaagggaggggga

SEQ ID NO: 3255175 - RNA, 17 nt, Human
ggcuggaucugugaggg

SEQ ID NO: 3255176 - RNA, 20 nt, Human
ggcuccucgagaucccaaca

SEQ ID NO: 3255177 - RNA, 18 nt, Human
ggccagcaccaucucuuu

SEQ ID NO: 3255178 - RNA, 13 nt, Human
ggaugucugggcc

SEQ ID NO: 3255179 - RNA, 23 nt, Human
ggcaggcaucggggagccgggag

SEQ ID NO: 3255180 - RNA, 15 nt, Human
ggagagacgggcccu

SEQ ID NO: 3255181 - RNA, 17 nt, Human
ggagagacgggcccugg

SEQ ID NO: 3255182 - RNA, 17 nt, Human
cagcacguguggccugu

SEQ ID NO: 3255183 - RNA, 17 nt, Human
caucuguaccucugccu

SEQ ID NO: 3255184 - RNA, 17 nt, Human
auucauggccuggggga

SEQ ID NO: 3255185 - RNA, 17 nt, Human
auuuuuaugccaccuga

SEQ ID NO: 3255186 - RNA, 18 nt, Human
caccuaggcuaggguggg

SEQ ID NO: 3255187 - RNA, 19 nt, Human
caccuaggcuagggugggg

SEQ ID NO: 3255188 - RNA, 17 nt, Human
caccuaggcuagggugg

SEQ ID NO: 3255189 - RNA, 19 nt, Human
ccugccuggaccagccucu

SEQ ID NO: 3255190 - RNA, 12 nt, Human
ccugccuggacc

SEQ ID NO: 3255191 - RNA, 23 nt, Human
ccucuuggggaguuuaggguggg

SEQ ID NO: 3255192 - RNA, 22 nt, Human
ccucuuggggaguuuagggugg

SEQ ID NO: 3255193 - RNA, 15 nt, Human
ccucuuggcugccuu

SEQ ID NO: 3255194 - RNA, 21 nt, Human
ccucugcccgggagcucagga

SEQ ID NO: 3255195 - RNA, 22 nt, Human
ccucugcccgggagcucaggaa

SEQ ID NO: 3255196 - RNA, 12 nt, Human
ccaugagcuccu

SEQ ID NO: 3255197 - RNA, 21 nt, Human
ccaugagcuccuuaaggcucu

SEQ ID NO: 3255198 - RNA, 13 nt, Human
ccauugguguuga

SEQ ID NO: 3255199 - RNA, 21 nt, Human
ccccgcguggaacucgugucu

SEQ ID NO: 3255200 - RNA, 22 nt, Human
cccccugugccuugucacgcca

SEQ ID NO: 3255201 - RNA, 23 nt, Human
ccagacuucccacggcuccucga

SEQ ID NO: 3255202 - RNA, 18 nt, Human
ccagagaaaaagggaggg

SEQ ID NO: 3255203 - RNA, 20 nt, Human
cucaggccugacucucagca

SEQ ID NO: 3255204 - RNA, 23 nt, Human
cucaggccgaaggaggagucagg

SEQ ID NO: 3255205 - RNA, 23 nt, Human
cucaugauagaaggcuaugggga

SEQ ID NO: 3255206 - RNA, 22 nt, Human
cuccucugcccgggagcucagg

SEQ ID NO: 3255207 - RNA, 24 nt, Human
cuccucugcccgggagcucaggaa

SEQ ID NO: 3255208 - RNA, 16 nt, Human
cuccugucucccuccu

SEQ ID NO: 3255209 - RNA, 20 nt, Human
gggcagucugagagaggcca

SEQ ID NO: 3255210 - RNA, 21 nt, Human
gggcagucugagagaggccau

SEQ ID NO: 3255211 - RNA, 13 nt, Human
gggccugggcagg

SEQ ID NO: 3255212 - RNA, 15 nt, Human
gggccugggcaggag

SEQ ID NO: 3255213 - RNA, 12 nt, Human
gggccugggcag

SEQ ID NO: 3255214 - RNA, 13 nt, Human
gggauagaugugu

SEQ ID NO: 3255215 - RNA, 14 nt, Human
gggauagaugugug

SEQ ID NO: 3255216 - RNA, 16 nt, Human
gggaguuuaggguggg

SEQ ID NO: 3255217 - RNA, 11 nt, Human
gggagugugua

SEQ ID NO: 3255218 - RNA, 23 nt, Human
gggaggugcuucuaguucugcca

SEQ ID NO: 3255219 - RNA, 18 nt, Human
gggcagucugagagaggc

SEQ ID NO: 3255220 - RNA, 19 nt, Human
gggcagucugagagaggcc

SEQ ID NO: 3255221 - RNA, 17 nt, Human
gggcagucugagagagg

SEQ ID NO: 3255222 - RNA, 15 nt, Human
gggaaggaucccaug

SEQ ID NO: 3255223 - RNA, 15 nt, Human
gggggagagggcugc

SEQ ID NO: 3255224 - RNA, 16 nt, Human
gggccugggcaggagg

SEQ ID NO: 3255225 - RNA, 17 nt, Human
gggccugggcaggaggg

SEQ ID NO: 3255226 - RNA, 15 nt, Human
ggggcgcggcuggga

SEQ ID NO: 3255227 - RNA, 16 nt, Human
ggggcgcggcugggag

SEQ ID NO: 3255228 - RNA, 19 nt, Human
ggggcagucugagagaggc

SEQ ID NO: 3255229 - RNA, 18 nt, Human
ggggcagucugagagagg

SEQ ID NO: 3255230 - RNA, 15 nt, Human
ggggcagucugagag

SEQ ID NO: 3255231 - RNA, 15 nt, Human
ggugguggcucggga

SEQ ID NO: 3255232 - RNA, 21 nt, Human
gguguccugcaccggggccug

SEQ ID NO: 3255233 - RNA, 17 nt, Human
ggaaggaucccaugagc

SEQ ID NO: 3255234 - RNA, 13 nt, Human
ggauagaugugug

SEQ ID NO: 3255235 - RNA, 14 nt, Human
ggauagaugugugg

SEQ ID NO: 3255236 - RNA, 15 nt, Human
ggauagaugugugga

SEQ ID NO: 3255237 - RNA, 12 nt, Human
ggagggauuugg

SEQ ID NO: 3255238 - RNA, 13 nt, Human
ggagggcaggcau

SEQ ID NO: 3255239 - RNA, 14 nt, Human
ggaggagggcaggc

SEQ ID NO: 3255240 - RNA, 15 nt, Human
ggaggagggcaggca

SEQ ID NO: 3255241 - RNA, 20 nt, Human
ggaggagggcaggcaucggg

SEQ ID NO: 3255242 - RNA, 16 nt, Human
ggagccgggagccuga

SEQ ID NO: 3255243 - RNA, 17 nt, Human
ggaucccaugagcuccu

SEQ ID NO: 3255244 - RNA, 20 nt, Human
ggaucccaugagcuccuuaa

SEQ ID NO: 3255245 - RNA, 20 nt, Human
ggcagucugagagaggccau

SEQ ID NO: 3255246 - RNA, 17 nt, Human
gcugggaggagggcagg

SEQ ID NO: 3255247 - RNA, 23 nt, Human
gcugggacaccccgacuuuuguu

SEQ ID NO: 3255248 - RNA, 13 nt, Human
gcuggaucuguga

SEQ ID NO: 3255249 - RNA, 15 nt, Human
gcugccuuuggacuu

SEQ ID NO: 3255250 - RNA, 20 nt, Human
gcugccuuuggacuuguccc

SEQ ID NO: 3255251 - RNA, 17 nt, Human
ggaacucgugucuggca

SEQ ID NO: 3255252 - RNA, 15 nt, Human
ggaaccgaggcaggg

SEQ ID NO: 3255253 - RNA, 16 nt, Human
ggaaccgaggcaggga

SEQ ID NO: 3255254 - RNA, 20 nt, Human
ggaaccgaggcagggaagga

SEQ ID NO: 3255255 - RNA, 19 nt, Human
gcuucuaguucugccagga

SEQ ID NO: 3255256 - RNA, 20 nt, Human
gcuucuaguucugccaggag

SEQ ID NO: 3255257 - RNA, 21 nt, Human
gcuucuaguucugccaggaga

SEQ ID NO: 3255258 - RNA, 18 nt, Human
gcuucuaguucugccagg

SEQ ID NO: 3255259 - RNA, 13 nt, Human
gccccgcguggaa

SEQ ID NO: 3255260 - RNA, 21 nt, Human
gccagacuucccacggcuccu

SEQ ID NO: 3255261 - RNA, 17 nt, Human
gccuaaccugccgagag

SEQ ID NO: 3255262 - RNA, 13 nt, Human
gccgggagccuga

SEQ ID NO: 3255263 - RNA, 14 nt, Human
gccgggagccugac

SEQ ID NO: 3255264 - RNA, 19 nt, Human
gccgggagccugacccuca

SEQ ID NO: 3255265 - RNA, 21 nt, Human
gccgagaguccaucagccucc

SEQ ID NO: 3255266 - RNA, 15 nt, Human
gcaggagggaggugc

SEQ ID NO: 3255267 - RNA, 12 nt, Human
gcacagccuggc

SEQ ID NO: 3255268 - RNA, 19 nt, Human
gcacagccuggcuguggcc

SEQ ID NO: 3255269 - RNA, 21 nt, Human
gaguguguaauuuaaaauugu

SEQ ID NO: 3255270 - RNA, 22 nt, Human
gaguguguaauuuaaaauugug

SEQ ID NO: 3255271 - RNA, 18 nt, Human
gacuucccacggcuccuc

SEQ ID NO: 3255272 - RNA, 17 nt, Human
gaagagaagggcagggc

SEQ ID NO: 3255273 - RNA, 13 nt, Human
gaagcguuguccu

SEQ ID NO: 3255274 - RNA, 19 nt, Human
gaagcguuguccucagccc

SEQ ID NO: 3255275 - RNA, 20 nt, Human
gaagcguuguccucagcccc

SEQ ID NO: 3255276 - RNA, 14 nt, Human
cuuccuuccucucc

SEQ ID NO: 3255277 - RNA, 21 nt, Human
cugaagagaagggcagggcug

SEQ ID NO: 3255278 - RNA, 22 nt, Human
cuccuuaaggcucuuuuguaag

SEQ ID NO: 3255279 - RNA, 13 nt, Human
cuccuuaaggcuc

SEQ ID NO: 3255280 - RNA, 17 nt, Human
cucauuccagaggaagg

SEQ ID NO: 3255281 - RNA, 15 nt, Human
cucauuccagaggaa

SEQ ID NO: 3255282 - RNA, 17 nt, Human
cuccauugguguugaca

SEQ ID NO: 3255283 - RNA, 12 nt, Human
cuggaccagccu

SEQ ID NO: 3255284 - RNA, 14 nt, Human
cuggcacagccugg

SEQ ID NO: 3255285 - RNA, 16 nt, Human
cugccaggagacaggu

SEQ ID NO: 3255286 - RNA, 20 nt, Human
cugccagcauuucccuuccu

SEQ ID NO: 3255287 - RNA, 15 nt, Human
ccuggaccagccucu

SEQ ID NO: 3255288 - RNA, 16 nt, Human
ccuggaccagccucuc

SEQ ID NO: 3255289 - RNA, 14 nt, Human
ccuggaccagccuc

SEQ ID NO: 3255290 - RNA, 19 nt, Human
cgucagcugggacaccccg

SEQ ID NO: 3255291 - RNA, 16 nt, Human
cgggagcucaggaacc

SEQ ID NO: 3255292 - RNA, 22 nt, Human
cggcugggaggagggcaggcau

SEQ ID NO: 3255293 - RNA, 18 nt, Human
cggcugggaggagggcag

SEQ ID NO: 3255294 - RNA, 23 nt, Human
cggcugggaggagggcaggcauc

SEQ ID NO: 3255295 - RNA, 21 nt, Human
cgauugcaggagucccugcca

SEQ ID NO: 3255296 - RNA, 23 nt, Human
cgauugcaggagucccugccauc

SEQ ID NO: 3255297 - RNA, 23 nt, Human
ccucuccacucaugugacucuuu

SEQ ID NO: 3255298 - RNA, 14 nt, Human
ccuccucugcccgg

SEQ ID NO: 3255299 - RNA, 15 nt, Human
ccuccucugcccggg

SEQ ID NO: 3255300 - RNA, 22 nt, Human
ccgacuuuuguuuaccagagaa

SEQ ID NO: 3255301 - RNA, 19 nt, Human
cauugucccugaagagaag

SEQ ID NO: 3255302 - RNA, 16 nt, Human
ccaaacaggcucagag

SEQ ID NO: 3255303 - RNA, 14 nt, Human
ccaacacugccagc

SEQ ID NO: 3255304 - RNA, 15 nt, Human
ccaacacugccagca

SEQ ID NO: 3255305 - RNA, 16 nt, Human
ccaacacugccagcau

SEQ ID NO: 3255306 - RNA, 13 nt, Human
ccaacacugccag

SEQ ID NO: 3255307 - RNA, 19 nt, Human
ccaagccuuggcucuaccc

SEQ ID NO: 3255308 - RNA, 16 nt, Human
ccacacccucacugcu

SEQ ID NO: 3255309 - RNA, 20 nt, Human
ccacacagacuugggcaggg

SEQ ID NO: 3255310 - RNA, 21 nt, Human
ccacgucagcugggacacccc

SEQ ID NO: 3255311 - RNA, 13 nt, Human
cccaacaccucuu

SEQ ID NO: 3255312 - RNA, 13 nt, Human
ccaucagccucca

SEQ ID NO: 3255313 - RNA, 19 nt, Human
uuuagaagaagugugucac

SEQ ID NO: 3255314 - RNA, 17 nt, Human
uuuagaagaaguguguc

SEQ ID NO: 3255315 - RNA, 23 nt, Human
uguguaugugggggucugugugu

SEQ ID NO: 3255316 - RNA, 14 nt, Human
uguguauguggggg

SEQ ID NO: 3255317 - RNA, 13 nt, Human
uguguaugugggg

SEQ ID NO: 3255318 - RNA, 11 nt, Human
uguguguaugu

SEQ ID NO: 3255319 - RNA, 15 nt, Human
uguguuuaugugugu

SEQ ID NO: 3255320 - RNA, 13 nt, Human
uguguuuaugugu

SEQ ID NO: 3255321 - RNA, 14 nt, Human
uguguugugugugg

SEQ ID NO: 3255322 - RNA, 23 nt, Human
uguguugugugugggagugugua

SEQ ID NO: 3255323 - RNA, 14 nt, Human
uguuuacagaggac

SEQ ID NO: 3255324 - RNA, 21 nt, Human
uguuuacagaggacaguauuu

SEQ ID NO: 3255325 - RNA, 15 nt, Human
uuacagaggacagua

SEQ ID NO: 3255326 - RNA, 16 nt, Human
ugugggggucugugug

SEQ ID NO: 3255327 - RNA, 14 nt, Human
ugugggucugugug

SEQ ID NO: 3255328 - RNA, 16 nt, Human
ugugggucugugugug

SEQ ID NO: 3255329 - RNA, 18 nt, Human
ugugaggggcucucucau

SEQ ID NO: 3255330 - RNA, 15 nt, Human
uguaaauuuauguga

SEQ ID NO: 3255331 - RNA, 16 nt, Human
uguaaauuuaugugau

SEQ ID NO: 3255332 - RNA, 14 nt, Human
ugucacgccagacu

SEQ ID NO: 3255333 - RNA, 18 nt, Human
ugcuucuaguucugccag

SEQ ID NO: 3255334 - RNA, 19 nt, Human
ugcuucuaguucugccagg

SEQ ID NO: 3255335 - RNA, 20 nt, Human
ugcuucuaguucugccagga

SEQ ID NO: 3255336 - RNA, 21 nt, Human
uggaagugugggucugugugu

SEQ ID NO: 3255337 - RNA, 20 nt, Human
uggaagugugggucugugug

SEQ ID NO: 3255338 - RNA, 23 nt, Human
uggaagugugggucugugugugu

SEQ ID NO: 3255339 - RNA, 18 nt, Human
uggggcaggggccggggg

SEQ ID NO: 3255340 - RNA, 16 nt, Human
uggggcaggggccggg

SEQ ID NO: 3255341 - RNA, 19 nt, Human
uaauucuuugaccuguugg

SEQ ID NO: 3255342 - RNA, 11 nt, Human
uagaugugugg

SEQ ID NO: 3255343 - RNA, 15 nt, Human
uaggaacugcugggc

SEQ ID NO: 3255344 - RNA, 18 nt, Human
uaggaacugcugggcuug

SEQ ID NO: 3255345 - RNA, 15 nt, Human
uaucagcacgugugg

SEQ ID NO: 3255346 - RNA, 22 nt, Human
uagugauuuuuaugccaccuga

SEQ ID NO: 3255347 - RNA, 20 nt, Human
uagugauuuuuaugccaccu

SEQ ID NO: 3255348 - RNA, 21 nt, Human
uagugauuuuuaugccaccug

SEQ ID NO: 3255349 - RNA, 13 nt, Human
uaggcuagggugg

SEQ ID NO: 3255350 - RNA, 15 nt, Human
ucuguguguguguau

SEQ ID NO: 3255351 - RNA, 18 nt, Human
ucuguguguguguaugug

SEQ ID NO: 3255352 - RNA, 19 nt, Human
ucuguguguguguaugugg

SEQ ID NO: 3255353 - RNA, 21 nt, Human
ucuguguguguguaugugggg

SEQ ID NO: 3255354 - RNA, 13 nt, Human
ucugugugugugu

SEQ ID NO: 3255355 - RNA, 15 nt, Human
ucuguguguuuaugu

SEQ ID NO: 3255356 - RNA, 16 nt, Human
ucuguguguuuaugug

SEQ ID NO: 3255357 - RNA, 22 nt, Human
ucuguguguguguauguggggg

SEQ ID NO: 3255358 - RNA, 19 nt, Human
ucuguguguuuaugugugu

SEQ ID NO: 3255359 - RNA, 20 nt, Human
ucuguguguuuaugugugug

SEQ ID NO: 3255360 - RNA, 19 nt, Human
ucuuuuguaagguuuuugu

SEQ ID NO: 3255361 - RNA, 18 nt, Human
ucucccuccucugcccgg

SEQ ID NO: 3255362 - RNA, 19 nt, Human
uccuuaaggcucuuuugua

SEQ ID NO: 3255363 - RNA, 16 nt, Human
uccuuaaggcucuuuu

SEQ ID NO: 3255364 - RNA, 18 nt, Human
ucacgccagacuucccac

SEQ ID NO: 3255365 - RNA, 17 nt, Sin Nombre virus
ccagauuauauucacau

SEQ ID NO: 3255366 - RNA, 23 nt, Sin Nombre virus
acuaaucaggguuuauugcacua

SEQ ID NO: 3255367 - RNA, 20 nt, Sin Nombre virus
aauuuuuauuuuuauacaag

SEQ ID NO: 3255368 - RNA, 16 nt, Sin Nombre virus
uuguuaaguuguauua

SEQ ID NO: 3255369 - RNA, 23 nt, Sin Nombre virus
acuaacacugugacucuguaaag

SEQ ID NO: 3255370 - RNA, 16 nt, Sin Nombre virus
aaccaugacuuguucu

SEQ ID NO: 3255371 - RNA, 17 nt, Sin Nombre virus
acaacaaucuaccucau

SEQ ID NO: 3255372 - RNA, 15 nt, Sin Nombre virus
aguguuauuguagua

SEQ ID NO: 3255373 - RNA, 20 nt, Sin Nombre virus
guaaauucuugauugcuuuu

SEQ ID NO: 3255374 - RNA, 20 nt, Sin Nombre virus
cuuuauuccaaaccaugacu

SEQ ID NO: 3255375 - RNA, 16 nt, Sin Nombre virus
gcucuguucucggagc

SEQ ID NO: 3255376 - RNA, 18 nt, Sin Nombre virus
caucauuaaucaggguuu

SEQ ID NO: 3255377 - RNA, 14 nt, Sin Nombre virus
aauaguacaugaca

SEQ ID NO: 3255378 - RNA, 14 nt, Sin Nombre virus
auuaagucauaugu

SEQ ID NO: 3255379 - RNA, 19 nt, Sin Nombre virus
uuaaaucuuguuaaguuug

SEQ ID NO: 3255380 - RNA, 17 nt, Sin Nombre virus
ggcacuaaucaggguuu

SEQ ID NO: 3255381 - RNA, 16 nt, Sin Nombre virus
cuuauuacgaggcuuu

SEQ ID NO: 3255382 - RNA, 17 nt, Sin Nombre virus
auauguauguucuuaua

SEQ ID NO: 3255383 - RNA, 18 nt, Sin Nombre virus
acaaaacuaccucauuau

SEQ ID NO: 3255384 - RNA, 19 nt, Sin Nombre virus
aguauuaagucauauguau

SEQ ID NO: 3255385 - RNA, 22 nt, Sin Nombre virus
cauuaaucaggguuuauaaaau

SEQ ID NO: 3255386 - RNA, 20 nt, Sin Nombre virus
acuuguucucucuacugcuc

SEQ ID NO: 3255387 - RNA, 19 nt, Sin Nombre virus
uuauauucacaucuguaua

SEQ ID NO: 3255388 - RNA, 17 nt, Sin Nombre virus
ugauaguauuaagucau

SEQ ID NO: 3255389 - RNA, 15 nt, Sin Nombre virus
uauaaguaaauucuu

SEQ ID NO: 3255390 - RNA, 21 nt, Sin Nombre virus
cucuacugcucuguucucgga

SEQ ID NO: 3255391 - RNA, 19 nt, Sin Nombre virus
cugcucuguucucggagca

SEQ ID NO: 3255392 - RNA, 20 nt, Sin Nombre virus
acugcucuguucucggagca

SEQ ID NO: 3255393 - RNA, 13 nt, Sin Nombre virus
ucuacugcucugu

SEQ ID NO: 3255394 - RNA, 23 nt, Sin Nombre virus
gcucuguucucggagcauacuac

SEQ ID NO: 3255395 - RNA, 15 nt, Sin Nombre virus
uccaaaccaugacuu

SEQ ID NO: 3255396 - RNA, 22 nt, Sin Nombre virus
caugacuuguucucucuacugc

SEQ ID NO: 3255397 - RNA, 21 nt, Sin Nombre virus
auuauauucacaucuguauau

SEQ ID NO: 3255398 - RNA, 17 nt, Sin Nombre virus
uucgguaagucuguuaa

SEQ ID NO: 3255399 - RNA, 18 nt, Sin Nombre virus
aauaagauuuauauacau

SEQ ID NO: 3255400 - RNA, 17 nt, Sin Nombre virus
aguauuguauuauguau

SEQ ID NO: 3255401 - RNA, 14 nt, Sin Nombre virus
ugugacucuguaaa

SEQ ID NO: 3255402 - RNA, 17 nt, Sin Nombre virus
ugugagcaagaguauga

SEQ ID NO: 3255403 - RNA, 23 nt, Sin Nombre virus
uuaucuguuuaaugcuaagucua

SEQ ID NO: 3255404 - RNA, 21 nt, Sin Nombre virus
agauuauauucacaucuguau

SEQ ID NO: 3255405 - RNA, 10 nt, Sin Nombre virus
uacugcucug

SEQ ID NO: 3255406 - RNA, 16 nt, Sin Nombre virus
auuuuaucaacucauu

SEQ ID NO: 3255407 - RNA, 18 nt, Sin Nombre virus
ucuauauuguuuaguguu

SEQ ID NO: 3255408 - RNA, 23 nt, Sin Nombre virus
acuaggguggguucaagggccaa

SEQ ID NO: 3255409 - RNA, 14 nt, Sin Nombre virus
ggcacuaaucaggg

SEQ ID NO: 3255410 - RNA, 15 nt, Sin Nombre virus
ccaaaccaugacuug

SEQ ID NO: 3255411 - RNA, 16 nt, Sin Nombre virus
aaaccaugacuuguuc

SEQ ID NO: 3255412 - RNA, 19 nt, Sin Nombre virus
aauugauuucuucauuaca

SEQ ID NO: 3255413 - RNA, 22 nt, Sin Nombre virus
uuuauuccaaaccaugacuugu

SEQ ID NO: 3255414 - RNA, 17 nt, Sin Nombre virus
aucuugauaguauuaag

SEQ ID NO: 3255415 - RNA, 20 nt, Sin Nombre virus
cacuaggguggguucaaggg

SEQ ID NO: 3255416 - RNA, 14 nt, Sin Nombre virus
uacugcucuguucu

SEQ ID NO: 3255417 - RNA, 15 nt, Sin Nombre virus
uauuccaaaccauga

SEQ ID NO: 3255418 - RNA, 14 nt, Sin Nombre virus
uaaaucuuguuaag

SEQ ID NO: 3255419 - RNA, 17 nt, Sin Nombre virus
acuuguucucucuacug

SEQ ID NO: 3255420 - RNA, 23 nt, Sin Nombre virus
gacuuguucucucuacugcucug

SEQ ID NO: 3255421 - RNA, 13 nt, Sin Nombre virus
aucaacucauuau

SEQ ID NO: 3255422 - RNA, 20 nt, Sin Nombre virus
cucuguucucggagcauacu

SEQ ID NO: 3255423 - RNA, 14 nt, Sin Nombre virus
augacuuguucucu

SEQ ID NO: 3255424 - RNA, 16 nt, Sin Nombre virus
guuaaguuuuguuaag

SEQ ID NO: 3255425 - RNA, 16 nt, Sin Nombre virus
aacaaucuaccucauu

SEQ ID NO: 3255426 - RNA, 22 nt, Sin Nombre virus
ucuuuauuccaaaccaugacuu

SEQ ID NO: 3255427 - RNA, 12 nt, Sin Nombre virus
cauuaacagcua

SEQ ID NO: 3255428 - RNA, 17 nt, Sin Nombre virus
uauuaaguuuuguuaag

SEQ ID NO: 3255429 - RNA, 22 nt, Sin Nombre virus
uauucacaucuguauauaugga

SEQ ID NO: 3255430 - RNA, 18 nt, Sin Nombre virus
caucuguauauauggaug

SEQ ID NO: 3255431 - RNA, 15 nt, Sin Nombre virus
aaugcuaagucuaua

SEQ ID NO: 3255432 - RNA, 13 nt, Sin Nombre virus
accaugacuuguu

SEQ ID NO: 3255433 - RNA, 23 nt, Sin Nombre virus
ccaaaccaugacuuguucucucu

SEQ ID NO: 3255434 - RNA, 18 nt, Sin Nombre virus
uuaagcuuauuaaaucuu

SEQ ID NO: 3255435 - RNA, 15 nt, Sin Nombre virus
uaagucuguuaaaug

SEQ ID NO: 3255436 - RNA, 13 nt, Sin Nombre virus
uauauauggaugu

SEQ ID NO: 3255437 - RNA, 14 nt, Sin Nombre virus
cccuauuaccucaa

SEQ ID NO: 3255438 - RNA, 15 nt, Sin Nombre virus
acugcucuguucucg

SEQ ID NO: 3255439 - RNA, 14 nt, Sin Nombre virus
caauuauaucacag

SEQ ID NO: 3255440 - RNA, 12 nt, Sin Nombre virus
cucggagcauac

SEQ ID NO: 3255441 - RNA, 16 nt, Sin Nombre virus
aauuuuuauuuuuaua

SEQ ID NO: 3255442 - RNA, 21 nt, Sin Nombre virus
agcuaaaaaaaacaaauccuu

SEQ ID NO: 3255443 - RNA, 14 nt, Sin Nombre virus
caaaacuaccucau

SEQ ID NO: 3255444 - RNA, 14 nt, Sin Nombre virus
agcuuauuaaaucu

SEQ ID NO: 3255445 - RNA, 21 nt, Sin Nombre virus
guucaagggccaauuauauca

SEQ ID NO: 3255446 - RNA, 10 nt, Sin Nombre virus
cauuaacagc

SEQ ID NO: 3255447 - RNA, 15 nt, Sin Nombre virus
auuaaguuuuguuaa

SEQ ID NO: 3255448 - RNA, 15 nt, Sin Nombre virus
gacuuguucucucua

SEQ ID NO: 3255449 - RNA, 21 nt, Sin Nombre virus
auuacgaggcuuuuguuccug

SEQ ID NO: 3255450 - RNA, 13 nt, Sin Nombre virus
ucucuacugcucu

SEQ ID NO: 3255451 - RNA, 13 nt, Sin Nombre virus
uuuauaaaauuuu

SEQ ID NO: 3255452 - RNA, 20 nt, Sin Nombre virus
uauaucaauaacauuuguau

SEQ ID NO: 3255453 - RNA, 21 nt, Sin Nombre virus
acuuguucucucuacugcucu

SEQ ID NO: 3255454 - RNA, 17 nt, Sin Nombre virus
acauuuguauauuccca

SEQ ID NO: 3255455 - RNA, 22 nt, Sin Nombre virus
cauagauuuauuuuauauacau

SEQ ID NO: 3255456 - RNA, 13 nt, Sin Nombre virus
ugcuuuucaagga

SEQ ID NO: 3255457 - RNA, 13 nt, Sin Nombre virus
uauauuggaagau

SEQ ID NO: 3255458 - RNA, 14 nt, Sin Nombre virus
uuguauuaaguuuu

SEQ ID NO: 3255459 - RNA, 18 nt, Sin Nombre virus
aaccaugacuuguucucu

SEQ ID NO: 3255460 - RNA, 17 nt, Sin Nombre virus
uauuaaaucuuguuaag

SEQ ID NO: 3255461 - RNA, 20 nt, Sin Nombre virus
auucccauaaccgaaauauu

SEQ ID NO: 3255462 - RNA, 21 nt, Sin Nombre virus
auuaaccguucaaacuggaac

SEQ ID NO: 3255463 - RNA, 17 nt, Sin Nombre virus
uuucauuauauguaugu

SEQ ID NO: 3255464 - RNA, 16 nt, Sin Nombre virus
aucccuauauuggaag

SEQ ID NO: 3255465 - RNA, 15 nt, Sin Nombre virus
ucuuuauuccaaacc

SEQ ID NO: 3255466 - RNA, 13 nt, Sin Nombre virus
augcuaagucuau

SEQ ID NO: 3255467 - RNA, 20 nt, Sin Nombre virus
uaacuaacccauuaacagcu

SEQ ID NO: 3255468 - RNA, 16 nt, Sin Nombre virus
uaagucuguuaaaugu

SEQ ID NO: 3255469 - RNA, 23 nt, Sin Nombre virus
acuuguucucucuacugcucugu

SEQ ID NO: 3255470 - RNA, 16 nt, Sin Nombre virus
gaggcuuuuguuccug

SEQ ID NO: 3255471 - RNA, 15 nt, Sin Nombre virus
guuuuguuaaguugu

SEQ ID NO: 3255472 - RNA, 22 nt, Sin Nombre virus
uguaugggggguguuuaguguu

SEQ ID NO: 3255473 - RNA, 14 nt, Sin Nombre virus
uaguguuaagucau

SEQ ID NO: 3255474 - RNA, 21 nt, Sin Nombre virus
uguauauauggauguaaauuu

SEQ ID NO: 3255475 - RNA, 16 nt, Sin Nombre virus
caacaaucuaccucau

SEQ ID NO: 3255476 - RNA, 17 nt, Sin Nombre virus
cuuaacaccuauauaau

SEQ ID NO: 3255477 - RNA, 16 nt, Sin Nombre virus
uuguaguauuguauua

SEQ ID NO: 3255478 - RNA, 19 nt, Sin Nombre virus
uauauaaucccauuugcuu

SEQ ID NO: 3255479 - RNA, 17 nt, Sin Nombre virus
acugugacucuguaaag

SEQ ID NO: 3255480 - RNA, 22 nt, Sin Nombre virus
acuuguucucucuacugcucug

SEQ ID NO: 3255481 - RNA, 15 nt, Sin Nombre virus
auuaaaucuuguuaa

SEQ ID NO: 3255482 - RNA, 20 nt, Sin Nombre virus
uguuaaauguaguuaaucuu

SEQ ID NO: 3255483 - RNA, 17 nt, Sin Nombre virus
gcucuguucucggagca

SEQ ID NO: 3255484 - RNA, 12 nt, Sin Nombre virus
cugcucuguucu

SEQ ID NO: 3255485 - RNA, 17 nt, Sin Nombre virus
ugacuuguucucucuac

SEQ ID NO: 3255486 - RNA, 13 nt, Sin Nombre virus
acugcucuguucu

SEQ ID NO: 3255487 - RNA, 23 nt, Sin Nombre virus
uuucuuuauuccaaaccaugacu

SEQ ID NO: 3255488 - RNA, 16 nt, Sin Nombre virus
guuucgguaagucugu

SEQ ID NO: 3255489 - RNA, 23 nt, Sin Nombre virus
aauuauaucacaggguauauaau

SEQ ID NO: 3255490 - RNA, 13 nt, Sin Nombre virus
auguauguucuua

SEQ ID NO: 3255491 - RNA, 12 nt, Sin Nombre virus
cuauuaccucaa

SEQ ID NO: 3255492 - RNA, 18 nt, Sin Nombre virus
auauucacaucuguauau

SEQ ID NO: 3255493 - RNA, 19 nt, Sin Nombre virus
gacacuaaugcuugcuuug

SEQ ID NO: 3255494 - RNA, 19 nt, Sin Nombre virus
cucucaucauuaaucaggg

SEQ ID NO: 3255495 - RNA, 14 nt, Sin Nombre virus
acaacauuauuuca

SEQ ID NO: 3255496 - RNA, 21 nt, Sin Nombre virus
aucaacuuauauucagggcau

SEQ ID NO: 3255497 - RNA, 23 nt, Sin Nombre virus
caugacuuguucucucuacugcu

SEQ ID NO: 3255498 - RNA, 15 nt, Sin Nombre virus
uucucucuacugcuc

SEQ ID NO: 3255499 - RNA, 14 nt, Sin Nombre virus
cucuacugcucugu

SEQ ID NO: 3255500 - RNA, 20 nt, Sin Nombre virus
gcuuauuaaaucuuguuaag

SEQ ID NO: 3255501 - RNA, 24 nt, Sin Nombre virus
cauaaccgaaauauuuauacuaau

SEQ ID NO: 3255502 - RNA, 16 nt, Sin Nombre virus
auaucaauaacauuug

SEQ ID NO: 3255503 - RNA, 19 nt, Sin Nombre virus
aaucaaaauaagauuuaua

SEQ ID NO: 3255504 - RNA, 21 nt, Sin Nombre virus
uguuaaguuucgguaagucug

SEQ ID NO: 3255505 - RNA, 14 nt, Sin Nombre virus
aaucaggguuuaua

SEQ ID NO: 3255506 - RNA, 23 nt, Sin Nombre virus
aucuugauaguauuaagucauau

SEQ ID NO: 3255507 - RNA, 20 nt, Sin Nombre virus
auuuuuauuuuuauacaagu

SEQ ID NO: 3255508 - RNA, 15 nt, Sin Nombre virus
auuccaaaccaugac

SEQ ID NO: 3255509 - RNA, 18 nt, Sin Nombre virus
guaaucaacuuauauuca

SEQ ID NO: 3255510 - RNA, 17 nt, Sin Nombre virus
aacaaaacuaccucauu

SEQ ID NO: 3255511 - RNA, 21 nt, Sin Nombre virus
cuauauuguuuaguguuauug

SEQ ID NO: 3255512 - RNA, 19 nt, Sin Nombre virus
uuaaguuguauuaaguuuu

SEQ ID NO: 3255513 - RNA, 12 nt, Sin Nombre virus
caaaccaugacu

SEQ ID NO: 3255514 - RNA, 15 nt, Sin Nombre virus
uaagcuuauuaaauc

SEQ ID NO: 3255515 - RNA, 21 nt, Sin Nombre virus
uacugcucuguucucggagca

SEQ ID NO: 3255516 - RNA, 18 nt, Sin Nombre virus
uuuucuuuauuccaaacc

SEQ ID NO: 3255517 - RNA, 13 nt, Sin Nombre virus
gcuuuuguuccug

SEQ ID NO: 3255518 - RNA, 22 nt, Sin Nombre virus
caggucuaucccuauauuggaa

SEQ ID NO: 3255519 - RNA, 15 nt, Sin Nombre virus
ccguucaaacuggaa

SEQ ID NO: 3255520 - RNA, 16 nt, Sin Nombre virus
acaaauccuuaacacc

SEQ ID NO: 3255521 - RNA, 21 nt, Sin Nombre virus
uuguuaaguuuguuaaguuuu

SEQ ID NO: 3255522 - RNA, 21 nt, Sin Nombre virus
uuccaaaccaugacuuguucu

SEQ ID NO: 3255523 - RNA, 14 nt, Sin Nombre virus
ucucuacugcucug

SEQ ID NO: 3255524 - RNA, 20 nt, Sin Nombre virus
uuuuguuaaguuguauuaag

SEQ ID NO: 3255525 - RNA, 22 nt, Sin Nombre virus
caauuuucuuuauuccaaacca

SEQ ID NO: 3255526 - RNA, 15 nt, Sin Nombre virus
auuaaguuuuguuaa

SEQ ID NO: 3255527 - RNA, 18 nt, Sin Nombre virus
acauagauuuauuuuaua

SEQ ID NO: 3255528 - RNA, 19 nt, Sin Nombre virus
aaucaaaauaagauuuaua

SEQ ID NO: 3255529 - RNA, 11 nt, Sin Nombre virus
aaguuuguuaa

SEQ ID NO: 3255530 - RNA, 20 nt, Sin Nombre virus
auauaaucccauuugcuuau

SEQ ID NO: 3255531 - RNA, 19 nt, Human
cucucuggccuucggccuc

SEQ ID NO: 3255532 - RNA, 17 nt, Human
cucucuggccuucggcc

SEQ ID NO: 3255533 - RNA, 21 nt, Human
cuccagugagacagcucugca

SEQ ID NO: 3255534 - RNA, 23 nt, Human
cugaggaagagggacuguucuuu

SEQ ID NO: 3255535 - RNA, 18 nt, Human
cugaggaagagggacugu

SEQ ID NO: 3255536 - RNA, 13 nt, Human
cugaaagaggaau

SEQ ID NO: 3255537 - RNA, 17 nt, Human
cugaaagaggaaugaag

SEQ ID NO: 3255538 - RNA, 17 nt, Human
cucaccccuugccauaa

SEQ ID NO: 3255539 - RNA, 17 nt, Human
ccugucucuacuaaaaa

SEQ ID NO: 3255540 - RNA, 20 nt, Human
ccugccaucauguuuacaga

SEQ ID NO: 3255541 - RNA, 18 nt, Human
ccugccaucauguuuaca

SEQ ID NO: 3255542 - RNA, 16 nt, Human
ccucccuucucuucac

SEQ ID NO: 3255543 - RNA, 20 nt, Human
cccauauuuguacaccaaua

SEQ ID NO: 3255544 - RNA, 19 nt, Human
cauccauggggcugauugu

SEQ ID NO: 3255545 - RNA, 15 nt, Human
caggccugacucuca

SEQ ID NO: 3255546 - RNA, 17 nt, Human
cagggaggacgcucucu

SEQ ID NO: 3255547 - RNA, 18 nt, Human
cagggaggacgcucucug

SEQ ID NO: 3255548 - RNA, 18 nt, Human
cagccugagcgacaguga

SEQ ID NO: 3255549 - RNA, 19 nt, Human
cagccugagcgacagugag

SEQ ID NO: 3255550 - RNA, 21 nt, Human
auuuuauaucaauuuaaaaaa

SEQ ID NO: 3255551 - RNA, 19 nt, Human
caagacccaaaaggcagaa

SEQ ID NO: 3255552 - RNA, 15 nt, Human
cacuuaaaaaugguu

SEQ ID NO: 3255553 - RNA, 11 nt, Human
cagaacaguga

SEQ ID NO: 3255554 - RNA, 12 nt, Human
cagaacagugau

SEQ ID NO: 3255555 - RNA, 17 nt, Human
cagaacagugauuacca

SEQ ID NO: 3255556 - RNA, 23 nt, Human
cacuccagccugagcgacaguga

SEQ ID NO: 3255557 - RNA, 13 nt, Human
cacuccagccuga

SEQ ID NO: 3255558 - RNA, 12 nt, Human
cacuccagccug

SEQ ID NO: 3255559 - RNA, 20 nt, Human
gccuucggccuccauccuga

SEQ ID NO: 3255560 - RNA, 19 nt, Human
gccuucggccuccauccug

SEQ ID NO: 3255561 - RNA, 21 nt, Human
gccuucggccuccauccugag

SEQ ID NO: 3255562 - RNA, 22 nt, Human
gcuaauucuuugaccuguuggg

SEQ ID NO: 3255563 - RNA, 16 nt, Human
gcuagaacucccuuuc

SEQ ID NO: 3255564 - RNA, 12 nt, Human
gcuagaacuccc

SEQ ID NO: 3255565 - RNA, 13 nt, Human
gcuagaacucccu

SEQ ID NO: 3255566 - RNA, 14 nt, Human
gcuagaacucccuu

SEQ ID NO: 3255567 - RNA, 15 nt, Human
gcuagaacucccuuu

SEQ ID NO: 3255568 - RNA, 21 nt, Human
gcucugcccauccugccccug

SEQ ID NO: 3255569 - RNA, 15 nt, Human
gcuccacuuggucug

SEQ ID NO: 3255570 - RNA, 18 nt, Human
gcuccacuuggucuguga

SEQ ID NO: 3255571 - RNA, 13 nt, Human
ggagaaacuggaa

SEQ ID NO: 3255572 - RNA, 20 nt, Human
ggaacugcugggcuuggcag

SEQ ID NO: 3255573 - RNA, 15 nt, Human
ggaacugcugggcuu

SEQ ID NO: 3255574 - RNA, 12 nt, Human
ggaagugugggu

SEQ ID NO: 3255575 - RNA, 22 nt, Human
ggaagugugggucugugugugu

SEQ ID NO: 3255576 - RNA, 21 nt, Human
ggaagugugggucugugugug

SEQ ID NO: 3255577 - RNA, 14 nt, Human
ggccuccauccuga

SEQ ID NO: 3255578 - RNA, 15 nt, Human
ggccuccauccugag

SEQ ID NO: 3255579 - RNA, 13 nt, Human
ggccuccauccug

SEQ ID NO: 3255580 - RNA, 15 nt, Human
ggcagggcugaggcc

SEQ ID NO: 3255581 - RNA, 14 nt, Human
ggcucagagugggg

SEQ ID NO: 3255582 - RNA, 14 nt, Human
ggcuccacuugguc

SEQ ID NO: 3255583 - RNA, 15 nt, Human
aaaacuucagacaua

SEQ ID NO: 3255584 - RNA, 17 nt, Human
aaaaaugguuuaaaugg

SEQ ID NO: 3255585 - RNA, 19 nt, Human
aaacuucagacauagaauu

SEQ ID NO: 3255586 - RNA, 15 nt, Human
aaagaggaaugaagu

SEQ ID NO: 3255587 - RNA, 14 nt, Human
aaacaguagugaua

SEQ ID NO: 3255588 - RNA, 15 nt, Human
guagagccagagguc

SEQ ID NO: 3255589 - RNA, 20 nt, Human
guaauuuaaaauugugaugu

SEQ ID NO: 3255590 - RNA, 19 nt, Human
guaauuuaaaauugugaug

SEQ ID NO: 3255591 - RNA, 23 nt, Human
guaauuuaaaauugugauguguc

SEQ ID NO: 3255592 - RNA, 23 nt, Human
aaaguucugcagauaaacaguag

SEQ ID NO: 3255593 - RNA, 20 nt, Human
aaagguauuuuaaucaccaa

SEQ ID NO: 3255594 - RNA, 13 nt, Human
gagcgacagugag

SEQ ID NO: 3255595 - RNA, 15 nt, Human
gagcgacagugagac

SEQ ID NO: 3255596 - RNA, 14 nt, Human
gacagaaagcagaa

SEQ ID NO: 3255597 - RNA, 20 nt, Human
gacagaaagcagaacaguga

SEQ ID NO: 3255598 - RNA, 17 nt, Human
gacgcucucuggccuuc

SEQ ID NO: 3255599 - RNA, 15 nt, Human
gacuauggagcugag

SEQ ID NO: 3255600 - RNA, 15 nt, Human
gcagcuuauucacaa

SEQ ID NO: 3255601 - RNA, 21 nt, Human
cuuaaaaaugguuuaaauggu

SEQ ID NO: 3255602 - RNA, 15 nt, Human
cuuaggccagcacca

SEQ ID NO: 3255603 - RNA, 16 nt, Human
cugugccuuuugccau

SEQ ID NO: 3255604 - RNA, 18 nt, Human
cugggaauaagugccagg

SEQ ID NO: 3255605 - RNA, 16 nt, Human
cuggggaugucucuca

SEQ ID NO: 3255606 - RNA, 17 nt, Human
gaacccgggaggcagag

SEQ ID NO: 3255607 - RNA, 18 nt, Human
gaaagaaaaucaggcugg

SEQ ID NO: 3255608 - RNA, 14 nt, Human
cuuugaccuguugg

SEQ ID NO: 3255609 - RNA, 19 nt, Human
cuuggucugugagaugcua

SEQ ID NO: 3255610 - RNA, 16 nt, Human
cuuggucugugagaug

SEQ ID NO: 3255611 - RNA, 16 nt, Human
augucaguauguggaa

SEQ ID NO: 3255612 - RNA, 16 nt, Human
auguccacugguucuu

SEQ ID NO: 3255613 - RNA, 17 nt, Human
auguccacugguucuuc

SEQ ID NO: 3255614 - RNA, 17 nt, Human
auguagaggagaaacug

SEQ ID NO: 3255615 - RNA, 19 nt, Human
auguagaggagaaacugga

SEQ ID NO: 3255616 - RNA, 12 nt, Human
auguagaggaga

SEQ ID NO: 3255617 - RNA, 13 nt, Human
auguagaggagaa

SEQ ID NO: 3255618 - RNA, 16 nt, Human
augguucucaggccug

SEQ ID NO: 3255619 - RNA, 20 nt, Human
auggggauagauguguggac

SEQ ID NO: 3255620 - RNA, 19 nt, Human
auggcuaagcaaaauguga

SEQ ID NO: 3255621 - RNA, 19 nt, Human
augcuagaacucccuuuca

SEQ ID NO: 3255622 - RNA, 22 nt, Human
augcuagaacucccuuucaaca

SEQ ID NO: 3255623 - RNA, 20 nt, Human
augcuagaacucccuuucaa

SEQ ID NO: 3255624 - RNA, 21 nt, Human
augcuagaacucccuuucaac

SEQ ID NO: 3255625 - RNA, 16 nt, Human
aucaggccauuguccc

SEQ ID NO: 3255626 - RNA, 13 nt, Human
aucaggccauugu

SEQ ID NO: 3255627 - RNA, 23 nt, Human
uucuaagaagugaaaaucuacac

SEQ ID NO: 3255628 - RNA, 13 nt, Human
uucuaagaaguga

SEQ ID NO: 3255629 - RNA, 14 nt, Human
uucggccuccaucc

SEQ ID NO: 3255630 - RNA, 18 nt, Human
auauuuuuuguuaaauga

SEQ ID NO: 3255631 - RNA, 20 nt, Human
auauuuuuuguuaaaugauu

SEQ ID NO: 3255632 - RNA, 14 nt, Human
aucaacagauaaau

SEQ ID NO: 3255633 - RNA, 18 nt, Human
uugaacccgggaggcaga

SEQ ID NO: 3255634 - RNA, 19 nt, Human
uugaacccgggaggcagag

SEQ ID NO: 3255635 - RNA, 19 nt, Human
auccauagcaccuccacau

SEQ ID NO: 3255636 - RNA, 20 nt, Human
uugcuaugagcuggggaugu

SEQ ID NO: 3255637 - RNA, 23 nt, Human
augaauggcuaagcaaaauguga

SEQ ID NO: 3255638 - RNA, 19 nt, Human
uugacacuuaaaaaugguu

SEQ ID NO: 3255639 - RNA, 18 nt, Human
aucuacacuccagugaga

SEQ ID NO: 3255640 - RNA, 19 nt, Human
aucuacacuccagugagac

SEQ ID NO: 3255641 - RNA, 18 nt, Human
auuuguaaauuuauguga

SEQ ID NO: 3255642 - RNA, 19 nt, Human
auuuguaaauuuaugugau

SEQ ID NO: 3255643 - RNA, 12 nt, Human
auuuuucucaug

SEQ ID NO: 3255644 - RNA, 18 nt, Human
auuuuuuguuaaaugauu

SEQ ID NO: 3255645 - RNA, 12 nt, Human
auuccagaggaa

SEQ ID NO: 3255646 - RNA, 15 nt, Human
auugacacuuaaaaa

SEQ ID NO: 3255647 - RNA, 17 nt, Human
auugacacuuaaaaaug

SEQ ID NO: 3255648 - RNA, 19 nt, Human
auugacacuuaaaaauggu

SEQ ID NO: 3255649 - RNA, 18 nt, Human
agccugagcgacagugag

SEQ ID NO: 3255650 - RNA, 14 nt, Human
ugcagugagccgag

SEQ ID NO: 3255651 - RNA, 15 nt, Human
agcuggggaugucuc

SEQ ID NO: 3255652 - RNA, 19 nt, Human
ugccuugugaaggaauuau

SEQ ID NO: 3255653 - RNA, 19 nt, Human
aggaauugacccacaagaa

SEQ ID NO: 3255654 - RNA, 11 nt, Human
aggcuccacuu

SEQ ID NO: 3255655 - RNA, 17 nt, Human
aggcuccacuuggucug

SEQ ID NO: 3255656 - RNA, 21 nt, Human
aggcuccacuuggucugugag

SEQ ID NO: 3255657 - RNA, 22 nt, Human
aggcuccacuuggucugugaga

SEQ ID NO: 3255658 - RNA, 16 nt, Human
aggccugacucucagc

SEQ ID NO: 3255659 - RNA, 14 nt, Human
uggaaguguggguc

SEQ ID NO: 3255660 - RNA, 13 nt, Human
uggaagugugggu

SEQ ID NO: 3255661 - RNA, 18 nt, Human
uggcuaagcaaaauguga

SEQ ID NO: 3255662 - RNA, 19 nt, Human
ugggaggcugagaugggag

SEQ ID NO: 3255663 - RNA, 16 nt, Human
agugggguagguuggg

SEQ ID NO: 3255664 - RNA, 18 nt, Human
uguguguuguguguggga

SEQ ID NO: 3255665 - RNA, 9 nt, Human
aguguguaa

SEQ ID NO: 3255666 - RNA, 15 nt, Human
uguucuaagaaguga

SEQ ID NO: 3255667 - RNA, 14 nt, Human
agugaggaugucug

SEQ ID NO: 3255668 - RNA, 18 nt, Human
agugccaggauggaauga

SEQ ID NO: 3255669 - RNA, 20 nt, Human
agugaacaaauuuacagaga

SEQ ID NO: 3255670 - RNA, 21 nt, Human
agugaacaaauuuacagagac

SEQ ID NO: 3255671 - RNA, 22 nt, Human
agugaacaaauuuacagagaca

SEQ ID NO: 3255672 - RNA, 23 nt, Human
agugaacaaauuuacagagacag

SEQ ID NO: 3255673 - RNA, 16 nt, Human
agugagccgagauugu

SEQ ID NO: 3255674 - RNA, 14 nt, Human
agguugcagugagc

SEQ ID NO: 3255675 - RNA, 22 nt, Human
ugucucaguccaugaagaugua

SEQ ID NO: 3255676 - RNA, 14 nt, Human
aguauuugugggga

SEQ ID NO: 3255677 - RNA, 11 nt, Human
auagaugugug

SEQ ID NO: 3255678 - RNA, 13 nt, Human
auagaugugugga

SEQ ID NO: 3255679 - RNA, 12 nt, Human
auagaugugugg

SEQ ID NO: 3255680 - RNA, 14 nt, Human
auagauguguggac

SEQ ID NO: 3255681 - RNA, 19 nt, Human
auagaaggcuauggggaua

SEQ ID NO: 3255682 - RNA, 17 nt, Human
auagaauuaacacauga

SEQ ID NO: 3255683 - RNA, 16 nt, Human
auacucauuaggaugg

SEQ ID NO: 3255684 - RNA, 10 nt, Human
uuaugugugu

SEQ ID NO: 3255685 - RNA, 14 nt, Human
uuaugugugugugu

SEQ ID NO: 3255686 - RNA, 12 nt, Human
uuaugugugugu

SEQ ID NO: 3255687 - RNA, 18 nt, Human
auaaucacaacccuucag

SEQ ID NO: 3255688 - RNA, 22 nt, Human
ugagggugacuauggagcugag

SEQ ID NO: 3255689 - RNA, 17 nt, Human
ugagguacugagaguga

SEQ ID NO: 3255690 - RNA, 22 nt, Human
ugagguacugagagugaacaaa

SEQ ID NO: 3255691 - RNA, 17 nt, Human
ugaggaagagggacugu

SEQ ID NO: 3255692 - RNA, 14 nt, Human
agcagaacagugau

SEQ ID NO: 3255693 - RNA, 13 nt, Human
ugagcgacaguga

SEQ ID NO: 3255694 - RNA, 14 nt, Human
ugagcgacagugag

SEQ ID NO: 3255695 - RNA, 16 nt, Human
ugagcgacagugagac

SEQ ID NO: 3255696 - RNA, 20 nt, Human
ugagcgacagugagacucug

SEQ ID NO: 3255697 - RNA, 23 nt, Human
agaugcuagaacucccuuucaac

SEQ ID NO: 3255698 - RNA, 22 nt, Human
agaugcuagaacucccuuucaa

SEQ ID NO: 3255699 - RNA, 16 nt, Human
agauugugccccugca

SEQ ID NO: 3255700 - RNA, 18 nt, Human
ugaagauguagaggagaa

SEQ ID NO: 3255701 - RNA, 17 nt, Human
ugaagauguagaggaga

SEQ ID NO: 3255702 - RNA, 14 nt, Human
agagugaacaaauu

SEQ ID NO: 3255703 - RNA, 22 nt, Human
agagugaacaaauuuacagaga

SEQ ID NO: 3255704 - RNA, 14 nt, Human
agacuuaucaacau

SEQ ID NO: 3255705 - RNA, 11 nt, Human
ucuggcccuau

SEQ ID NO: 3255706 - RNA, 14 nt, Human
agaacucccuuuca

SEQ ID NO: 3255707 - RNA, 14 nt, Human
agaaagaaaaucag

SEQ ID NO: 3255708 - RNA, 13 nt, Human
agaaacuggaacu

SEQ ID NO: 3255709 - RNA, 13 nt, Human
ucucuggccuucg

SEQ ID NO: 3255710 - RNA, 16 nt, Human
ucucuggccuucggcc

SEQ ID NO: 3255711 - RNA, 17 nt, Human
ucucuggccuucggccu

SEQ ID NO: 3255712 - RNA, 21 nt, Human
uccagccugagcgacagugag

SEQ ID NO: 3255713 - RNA, 20 nt, Human
uccagccugagcgacaguga

SEQ ID NO: 3255714 - RNA, 22 nt, Human
ucaugauagaaggcuaugggga

SEQ ID NO: 3255715 - RNA, 13 nt, Human
accacugcagaag

SEQ ID NO: 3255716 - RNA, 14 nt, Human
accacugcagaaga

SEQ ID NO: 3255717 - RNA, 19 nt, Human
accacugcagaagacagua

SEQ ID NO: 3255718 - RNA, 21 nt, Human
acccaaauguucaucaaugaa

SEQ ID NO: 3255719 - RNA, 18 nt, Human
acccaaaaggcagaagca

SEQ ID NO: 3255720 - RNA, 20 nt, Human
acccaaauguucaucaauga

SEQ ID NO: 3255721 - RNA, 13 nt, Human
acccaaaaggcag

SEQ ID NO: 3255722 - RNA, 15 nt, Human
acccaaaaggcagaa

SEQ ID NO: 3255723 - RNA, 14 nt, Human
accagggacugagg

SEQ ID NO: 3255724 - RNA, 22 nt, Human
ucagauuugccuuauuggcagc

SEQ ID NO: 3255725 - RNA, 22 nt, Human
acccagcuaugguucucucgca

SEQ ID NO: 3255726 - RNA, 15 nt, Human
ucaggccgaaggagg

SEQ ID NO: 3255727 - RNA, 20 nt, Human
uccucaaaacuucagacaua

SEQ ID NO: 3255728 - RNA, 13 nt, Human
acuaaaaauacaa

SEQ ID NO: 3255729 - RNA, 13 nt, Human
uccuucagccuga

SEQ ID NO: 3255730 - RNA, 17 nt, Human
acugaggggaggggagc

SEQ ID NO: 3255731 - RNA, 22 nt, Human
acugaggggaggggagcauggg

SEQ ID NO: 3255732 - RNA, 21 nt, Human
guugggagaaugucaguaugu

SEQ ID NO: 3255733 - RNA, 14 nt, Human
guugggagaauguc

SEQ ID NO: 3255734 - RNA, 12 nt, Human
guguuuaugugu

SEQ ID NO: 3255735 - RNA, 16 nt, Human
guguuuaugugugugu

SEQ ID NO: 3255736 - RNA, 17 nt, Human
uaaaugauuucauucaa

SEQ ID NO: 3255737 - RNA, 19 nt, Human
uaaaccaaggcuagaacca

SEQ ID NO: 3255738 - RNA, 23 nt, Human
guccaugaagauguagaggagaa

SEQ ID NO: 3255739 - RNA, 13 nt, Human
aagacccaaaagg

SEQ ID NO: 3255740 - RNA, 14 nt, Human
gugggggucugugu

SEQ ID NO: 3255741 - RNA, 16 nt, Human
gugggggucugugugu

SEQ ID NO: 3255742 - RNA, 15 nt, Human
gugggggucugugug

SEQ ID NO: 3255743 - RNA, 15 nt, Human
guguuguguguggga

SEQ ID NO: 3255744 - RNA, 14 nt, Human
guguguguaugugg

SEQ ID NO: 3255745 - RNA, 17 nt, Human
guguguguugugugugg

SEQ ID NO: 3255746 - RNA, 16 nt, Human
gugugugggagugugu

SEQ ID NO: 3255747 - RNA, 13 nt, Human
guguguguaugug

SEQ ID NO: 3255748 - RNA, 22 nt, Human
aagauguagaggagaaacugga

SEQ ID NO: 3255749 - RNA, 13 nt, Human
aagcaaaauguga

SEQ ID NO: 3255750 - RNA, 19 nt, Human
aagauguagaggagaaacu

SEQ ID NO: 3255751 - RNA, 14 nt, Human
uauaggaauugacc

SEQ ID NO: 3255752 - RNA, 13 nt, Human
uauaggaauugac

SEQ ID NO: 3255753 - RNA, 12 nt, Human
uauaggaauuga

SEQ ID NO: 3255754 - RNA, 18 nt, Human
uauggggauagaugugug

SEQ ID NO: 3255755 - RNA, 17 nt, Human
uauggggauagaugugu

SEQ ID NO: 3255756 - RNA, 21 nt, Human
acagacacucccacuuggcau

SEQ ID NO: 3255757 - RNA, 11 nt, Human
uaugugugugu

SEQ ID NO: 3255758 - RNA, 22 nt, Human
uauguguguguguugugugugg

SEQ ID NO: 3255759 - RNA, 14 nt, Human
uauguguguguguu

SEQ ID NO: 3255760 - RNA, 23 nt, Human
uauucauagcagcuuauucacaa

SEQ ID NO: 3255761 - RNA, 14 nt, Human
acagugagacucug

SEQ ID NO: 3255762 - RNA, 18 nt, Human
acagugagacucugucuc

SEQ ID NO: 3255763 - RNA, 21 nt, Human
acaguauggcagcuuuccuca

SEQ ID NO: 3255764 - RNA, 22 nt, Human
aauucuuugaccuguugggagu

SEQ ID NO: 3255765 - RNA, 18 nt, Human
aauucuuugaccuguugg

SEQ ID NO: 3255766 - RNA, 13 nt, Human
aauugacccacaa

SEQ ID NO: 3255767 - RNA, 16 nt, Human
aauugacccacaagaa

SEQ ID NO: 3255768 - RNA, 19 nt, Human
aauugacccacaagaaaug

SEQ ID NO: 3255769 - RNA, 22 nt, Human
acaagaaaugaaagcagggacu

SEQ ID NO: 3255770 - RNA, 18 nt, Human
uagaacucccuuucaaca

SEQ ID NO: 3255771 - RNA, 16 nt, Human
aaugguuuaaaugguc

SEQ ID NO: 3255772 - RNA, 15 nt, Human
aaugaaugaaugaau

SEQ ID NO: 3255773 - RNA, 15 nt, Human
aaugucaguaugugg

SEQ ID NO: 3255774 - RNA, 13 nt, Human
aaugucaguaugu

SEQ ID NO: 3255775 - RNA, 16 nt, Human
aacccgggaggcagag

SEQ ID NO: 3255776 - RNA, 19 nt, Human
aaauugacacuuaaaaaug

SEQ ID NO: 3255777 - RNA, 18 nt, Human
aacaaauuuacagagaca

SEQ ID NO: 3255778 - RNA, 20 nt, Human
aacuuuaugcuaagugaaau

SEQ ID NO: 3255779 - RNA, 21 nt, Human
aacuuuaugcuaagugaaaua

SEQ ID NO: 3255780 - RNA, 14 nt, Human
aaaggcagaagcaa

SEQ ID NO: 3255781 - RNA, 21 nt, Human
aaaaucuacacuccagugaga

SEQ ID NO: 3255782 - RNA, 18 nt, Human
aaaaguucugcagauaaa

SEQ ID NO: 3255783 - RNA, 17 nt, Human
acucuauguucuaagaa

SEQ ID NO: 3255784 - RNA, 20 nt, Human
acucugucucaguccaugaa

SEQ ID NO: 3255785 - RNA, 18 nt, Human
acucugucucaguccaug

SEQ ID NO: 3255786 - RNA, 17 nt, Human
acucugucucaguccau

SEQ ID NO: 3255787 - RNA, 21 nt, Human
acuuggucugugagaugcuag

SEQ ID NO: 3255788 - RNA, 16 nt, Human
agaaaaucaggcuggc

SEQ ID NO: 3255789 - RNA, 15 nt, Human
acccacaagaaauga

SEQ ID NO: 3255790 - RNA, 17 nt, Human
acccacaagaaaugaaa

SEQ ID NO: 3255791 - RNA, 21 nt, Human
acccacaagaaaugaaagcag

SEQ ID NO: 3255792 - RNA, 20 nt, Human
accaaggcugauuaaaccaa

SEQ ID NO: 3255793 - RNA, 20 nt, Human
agaggacaguauuugugggg

SEQ ID NO: 3255794 - RNA, 14 nt, Human
agcugagcaggugu

SEQ ID NO: 3255795 - RNA, 21 nt, Human
aggagucccugccaucauguu

SEQ ID NO: 3255796 - RNA, 17 nt, Human
aggauguugaaaaaguu

SEQ ID NO: 3255797 - RNA, 21 nt, Human
aggcuagaaccaccugccuau

SEQ ID NO: 3255798 - RNA, 14 nt, Human
aucagccugugcca

SEQ ID NO: 3255799 - RNA, 17 nt, Human
auguucuaagaagugaa

SEQ ID NO: 3255800 - RNA, 16 nt, Human
aguggcuggaucugug

SEQ ID NO: 3255801 - RNA, 18 nt, Human
aguucauaaauuuauggu

SEQ ID NO: 3255802 - RNA, 18 nt, Human
auagcagcuuauucacaa

SEQ ID NO: 3255803 - RNA, 21 nt, Human
caaauguucaucaaugaauga

SEQ ID NO: 3255804 - RNA, 20 nt, Human
caaauguucaucaaugaaug

SEQ ID NO: 3255805 - RNA, 14 nt, Human
caaauuuacagaga

SEQ ID NO: 3255806 - RNA, 15 nt, Human
caaauuuacagagac

SEQ ID NO: 3255807 - RNA, 21 nt, Human
caauaucuuuuuuuuaauaaa

SEQ ID NO: 3255808 - RNA, 22 nt, Human
caaugaaugaaugaauggcuaa

SEQ ID NO: 3255809 - RNA, 16 nt, Human
uuggcagcucuacucu

SEQ ID NO: 3255810 - RNA, 12 nt, Human
uuguaaaauggu

SEQ ID NO: 3255811 - RNA, 13 nt, Human
uuguaaaauggug

SEQ ID NO: 3255812 - RNA, 16 nt, Human
uuguaccgcaauguga

SEQ ID NO: 3255813 - RNA, 20 nt, Human
uuguaaaauggugugaccac

SEQ ID NO: 3255814 - RNA, 20 nt, Human
uuuacagaggacaguauuug

SEQ ID NO: 3255815 - RNA, 13 nt, Human
uuuacagagacag

SEQ ID NO: 3255816 - RNA, 13 nt, Human
uuuaauaaaccau

SEQ ID NO: 3255817 - RNA, 18 nt, Human
uuguuuagaagaagugug

SEQ ID NO: 3255818 - RNA, 15 nt, Human
uuguuuagaagaagu

SEQ ID NO: 3255819 - RNA, 16 nt, Human
uuuaaaauugugaugu

SEQ ID NO: 3255820 - RNA, 20 nt, Human
uucagacauagaauuaacac

SEQ ID NO: 3255821 - RNA, 16 nt, Human
uucagacauagaauua

SEQ ID NO: 3255822 - RNA, 22 nt, Human
uucggccuccauccugaggcuc

SEQ ID NO: 3255823 - RNA, 19 nt, Human
uguuuagaagaaguguguc

SEQ ID NO: 3255824 - RNA, 16 nt, Human
uguuuagaagaagugu

SEQ ID NO: 3255825 - RNA, 12 nt, Human
uuaacucagucu

SEQ ID NO: 3255826 - RNA, 17 nt, Human
uuacuaguuucccuugc

SEQ ID NO: 3255827 - RNA, 18 nt, Human
uuaggauguugaaaaagu

SEQ ID NO: 3255828 - RNA, 11 nt, Human
uuuguggggag

SEQ ID NO: 3255829 - RNA, 23 nt, Human
uauguguguguguuguguguggg

SEQ ID NO: 3255830 - RNA, 17 nt, Human
uauguucuaagaaguga

SEQ ID NO: 3255831 - RNA, 18 nt, Human
ucacaagacccaaaaggc

SEQ ID NO: 3255832 - RNA, 22 nt, Human
ucacaagacccaaaaggcagaa

SEQ ID NO: 3255833 - RNA, 23 nt, Human
uaugagcuggggaugucucucau

SEQ ID NO: 3255834 - RNA, 15 nt, Human
uauccuucagccuga

SEQ ID NO: 3255835 - RNA, 14 nt, Human
uauccuucagccug

SEQ ID NO: 3255836 - RNA, 12 nt, Human
uaggaauugacc

SEQ ID NO: 3255837 - RNA, 18 nt, Human
uaggccaugggacaggga

SEQ ID NO: 3255838 - RNA, 16 nt, Human
uaggccaugggacagg

SEQ ID NO: 3255839 - RNA, 13 nt, Human
uaguaucaaaaga

SEQ ID NO: 3255840 - RNA, 18 nt, Human
uccugccccugagcccau

SEQ ID NO: 3255841 - RNA, 17 nt, Human
uccugccccugagccca

SEQ ID NO: 3255842 - RNA, 17 nt, Human
uccugaggcuccacuug

SEQ ID NO: 3255843 - RNA, 19 nt, Human
uccugaggcuccacuuggu

SEQ ID NO: 3255844 - RNA, 20 nt, Human
uccugaggcuccacuugguc

SEQ ID NO: 3255845 - RNA, 23 nt, Human
ucucaguccaugaagauguagag

SEQ ID NO: 3255846 - RNA, 16 nt, Human
ucauuaggauggcuag

SEQ ID NO: 3255847 - RNA, 17 nt, Human
ucaucaaugaaugaaug

SEQ ID NO: 3255848 - RNA, 11 nt, Human
ucauagcagcu

SEQ ID NO: 3255849 - RNA, 22 nt, Human
ucagucuuuaaucugagaggcc

SEQ ID NO: 3255850 - RNA, 23 nt, Human
uccacuuggucugugagaugcua

SEQ ID NO: 3255851 - RNA, 21 nt, Human
uccacuuggucugugagaugc

SEQ ID NO: 3255852 - RNA, 17 nt, Human
uccacuuggucugugag

SEQ ID NO: 3255853 - RNA, 13 nt, Human
ugagccccaaaag

SEQ ID NO: 3255854 - RNA, 16 nt, Human
ugagagugaacaaauu

SEQ ID NO: 3255855 - RNA, 20 nt, Human
ugagcuggggaugucucuca

SEQ ID NO: 3255856 - RNA, 18 nt, Human
ugaggcuccacuuggucu

SEQ ID NO: 3255857 - RNA, 20 nt, Human
ugaggcuccacuuggucugu

SEQ ID NO: 3255858 - RNA, 16 nt, Human
ugauuaccagggacug

SEQ ID NO: 3255859 - RNA, 17 nt, Human
ugacauacauccaacau

SEQ ID NO: 3255860 - RNA, 18 nt, Human
ugaccacugcagaagaca

SEQ ID NO: 3255861 - RNA, 20 nt, Human
ugaccacugcagaagacagu

SEQ ID NO: 3255862 - RNA, 20 nt, Human
ugaaugaauggcuaagcaaa

SEQ ID NO: 3255863 - RNA, 18 nt, Human
ugaaagaggaaugaagua

SEQ ID NO: 3255864 - RNA, 23 nt, Human
ugaaagcagggacuugaacccau

SEQ ID NO: 3255865 - RNA, 22 nt, Human
ugggagugaggaugucugggcc

SEQ ID NO: 3255866 - RNA, 11 nt, Human
ugggagugugu

SEQ ID NO: 3255867 - RNA, 20 nt, Human
uggggauagauguguggaca

SEQ ID NO: 3255868 - RNA, 18 nt, Human
uggggauagaugugugga

SEQ ID NO: 3255869 - RNA, 17 nt, Human
uggggauagaugugugg

SEQ ID NO: 3255870 - RNA, 16 nt, Human
uggggauagaugugug

SEQ ID NO: 3255871 - RNA, 14 nt, Human
ugggggucugugug

SEQ ID NO: 3255872 - RNA, 22 nt, Human
uggucacaggaaguagaggagg

SEQ ID NO: 3255873 - RNA, 17 nt, Human
uggucacaggaaguaga

SEQ ID NO: 3255874 - RNA, 19 nt, Human
uggaucugugaggggcucu

SEQ ID NO: 3255875 - RNA, 15 nt, Human
uggaucugugagggg

SEQ ID NO: 3255876 - RNA, 20 nt, Human
uggcuccauugguguugaca

SEQ ID NO: 3255877 - RNA, 16 nt, Human
ugccacuaaauugaca

SEQ ID NO: 3255878 - RNA, 13 nt, Human
ugcuagaacuccc

SEQ ID NO: 3255879 - RNA, 14 nt, Human
ugcuagaacucccu

SEQ ID NO: 3255880 - RNA, 15 nt, Human
ugcuagaacucccuu

SEQ ID NO: 3255881 - RNA, 17 nt, Human
ugcuagaacucccuuuc

SEQ ID NO: 3255882 - RNA, 20 nt, Human
ugcugggggggauuguaaaa

SEQ ID NO: 3255883 - RNA, 15 nt, Human
gugaggaugucuggg

SEQ ID NO: 3255884 - RNA, 20 nt, Human
gucccagaaugccuccugca

SEQ ID NO: 3255885 - RNA, 23 nt, Human
ggggucuguguguuuaugugugu

SEQ ID NO: 3255886 - RNA, 13 nt, Human
ggggauagaugug

SEQ ID NO: 3255887 - RNA, 19 nt, Human
gguugggagaaugucagua

SEQ ID NO: 3255888 - RNA, 15 nt, Human
guagaggagaaacug

SEQ ID NO: 3255889 - RNA, 15 nt, Human
guaccgcaaugugac

SEQ ID NO: 3255890 - RNA, 23 nt, Human
ggaagggacaccaagccuuggcu

SEQ ID NO: 3255891 - RNA, 20 nt, Human
ggaagugacgguuuaauggg

SEQ ID NO: 3255892 - RNA, 22 nt, Human
ggagaaugucaguauguggaag

SEQ ID NO: 3255893 - RNA, 15 nt, Human
ggagaaucacuugaa

SEQ ID NO: 3255894 - RNA, 19 nt, Human
ggagaaucacuugaacccg

SEQ ID NO: 3255895 - RNA, 13 nt, Human
ggacgcucucugg

SEQ ID NO: 3255896 - RNA, 14 nt, Human
ggacgcucucuggc

SEQ ID NO: 3255897 - RNA, 17 nt, Human
ggauggaaugauggguc

SEQ ID NO: 3255898 - RNA, 12 nt, Human
ggcccugugccu

SEQ ID NO: 3255899 - RNA, 21 nt, Human
ggcuauggggauagaugugug

SEQ ID NO: 3255900 - RNA, 17 nt, Human
gcuaugagcuggggaug

SEQ ID NO: 3255901 - RNA, 17 nt, Human
gcuaagcaaaaugugau

SEQ ID NO: 3255902 - RNA, 14 nt, Human
gcucucuggccuuc

SEQ ID NO: 3255903 - RNA, 15 nt, Human
gcucucuggccuucg

SEQ ID NO: 3255904 - RNA, 19 nt, Human
gcucucuggccuucggccu

SEQ ID NO: 3255905 - RNA, 20 nt, Human
gcucucuggccuucggccuc

SEQ ID NO: 3255906 - RNA, 12 nt, Human
gcucucuggccu

SEQ ID NO: 3255907 - RNA, 13 nt, Human
gcucucuggccuu

SEQ ID NO: 3255908 - RNA, 11 nt, Human
gcucucuggcc

SEQ ID NO: 3255909 - RNA, 22 nt, Human
gccuauauuuuuuguuaaauga

SEQ ID NO: 3255910 - RNA, 17 nt, Human
gccuaagugcagccccg

SEQ ID NO: 3255911 - RNA, 17 nt, Human
gagaaugucaguaugug

SEQ ID NO: 3255912 - RNA, 18 nt, Human
gagacagcucugcauacu

SEQ ID NO: 3255913 - RNA, 20 nt, Human
gagacagcucugcauacuca

SEQ ID NO: 3255914 - RNA, 19 nt, Human
gaaugucaguauguggaag

SEQ ID NO: 3255915 - RNA, 13 nt, Human
gaaugucaguaug

SEQ ID NO: 3255916 - RNA, 18 nt, Human
gaaugucaguauguggaa

SEQ ID NO: 3255917 - RNA, 16 nt, Human
gaaugucaguaugugg

SEQ ID NO: 3255918 - RNA, 16 nt, Human
gaauugacccacaaga

SEQ ID NO: 3255919 - RNA, 21 nt, Human
gaauugacccacaagaaauga

SEQ ID NO: 3255920 - RNA, 21 nt, Human
gaccacugcagaagacaguau

SEQ ID NO: 3255921 - RNA, 18 nt, Human
gaccacugcagaagacag

SEQ ID NO: 3255922 - RNA, 20 nt, Human
gacccaaaaggcagaagcaa

SEQ ID NO: 3255923 - RNA, 16 nt, Human
gacccaaaaggcagaa

SEQ ID NO: 3255924 - RNA, 15 nt, Human
gacccacaagaaaug

SEQ ID NO: 3255925 - RNA, 18 nt, Human
gacagggaggacgcucuc

SEQ ID NO: 3255926 - RNA, 17 nt, Human
gacagggaggacgcucu

SEQ ID NO: 3255927 - RNA, 20 nt, Human
gacauagaauuaacacauga

SEQ ID NO: 3255928 - RNA, 13 nt, Human
gaguguguaauuu

SEQ ID NO: 3255929 - RNA, 13 nt, Human
gauagaugugugg

SEQ ID NO: 3255930 - RNA, 22 nt, Human
gauagauguguggacacauugg

SEQ ID NO: 3255931 - RNA, 14 nt, Human
gauagaugugugga

SEQ ID NO: 3255932 - RNA, 23 nt, Human
gagugaacaaauuuacagagaca

SEQ ID NO: 3255933 - RNA, 22 nt, Human
gaggccucucauuccagaggaa

SEQ ID NO: 3255934 - RNA, 23 nt, Human
gauugcaggagucccugccauca

SEQ ID NO: 3255935 - RNA, 21 nt, Human
gaugggucaguuguaucagca

SEQ ID NO: 3255936 - RNA, 15 nt, Human
gaugggucaguugua

SEQ ID NO: 3255937 - RNA, 18 nt, Human
gaugcuagaacucccuuu

SEQ ID NO: 3255938 - RNA, 20 nt, Human
gaugcuagaacucccuuuca

SEQ ID NO: 3255939 - RNA, 19 nt, Human
gauguugaaaaaguucugc

SEQ ID NO: 3255940 - RNA, 22 nt, Human
gaaaaucuacacuccagugaga

SEQ ID NO: 3255941 - RNA, 14 nt, Human
gaaacccugucucu

SEQ ID NO: 3255942 - RNA, 22 nt, Human
gaaagcagaacagugauuacca

SEQ ID NO: 3255943 - RNA, 14 nt, Human
gaaagcagaacagu

SEQ ID NO: 3255944 - RNA, 17 nt, Human
gaaagcagaacagugau

SEQ ID NO: 3255945 - RNA, 21 nt, Human
gaaagaggaaugaaguacuca

SEQ ID NO: 3255946 - RNA, 14 nt, Human
gaaagcagggacuu

SEQ ID NO: 3255947 - RNA, 20 nt, Human
cuugaacccgggaggcagag

SEQ ID NO: 3255948 - RNA, 17 nt, Human
cuguguguuuaugugug

SEQ ID NO: 3255949 - RNA, 16 nt, Human
cuguguguuuaugugu

SEQ ID NO: 3255950 - RNA, 21 nt, Human
cuguguguguguauguggggg

SEQ ID NO: 3255951 - RNA, 19 nt, Human
cugugaggggcucucucau

SEQ ID NO: 3255952 - RNA, 22 nt, Human
cugggggggauuguaaaauggu

SEQ ID NO: 3255953 - RNA, 23 nt, Human
cuguaaucacagcuacuugggag

SEQ ID NO: 3255954 - RNA, 11 nt, Human
cugcugggcuu

SEQ ID NO: 3255955 - RNA, 17 nt, Human
cuggagguuuguuuaga

SEQ ID NO: 3255956 - RNA, 12 nt, Human
cuggagguuugu

SEQ ID NO: 3255957 - RNA, 12 nt, Human
cuggagcucugc

SEQ ID NO: 3255958 - RNA, 13 nt, Human
cuggagcucugcc

SEQ ID NO: 3255959 - RNA, 16 nt, Human
cuggagcucugcccau

SEQ ID NO: 3255960 - RNA, 21 nt, Human
cuggccaguggcuggaucugu

SEQ ID NO: 3255961 - RNA, 23 nt, Human
cuggccuucggccuccauccuga

SEQ ID NO: 3255962 - RNA, 21 nt, Human
cuggccuucggccuccauccu

SEQ ID NO: 3255963 - RNA, 22 nt, Human
cuggccuucggccuccauccug

SEQ ID NO: 3255964 - RNA, 16 nt, Human
ccauccugaggcucca

SEQ ID NO: 3255965 - RNA, 20 nt, Human
ccauccugaggcuccacuug

SEQ ID NO: 3255966 - RNA, 18 nt, Human
ccauccugaggcuccacu

SEQ ID NO: 3255967 - RNA, 19 nt, Human
ccagccugagcgacaguga

SEQ ID NO: 3255968 - RNA, 15 nt, Human
ccacugguucuucuu

SEQ ID NO: 3255969 - RNA, 14 nt, Human
ccagacaucaacag

SEQ ID NO: 3255970 - RNA, 14 nt, Human
ccuuugucccagaa

SEQ ID NO: 3255971 - RNA, 17 nt, Human
ccugugccuuuugccau

SEQ ID NO: 3255972 - RNA, 16 nt, Human
ccuucggccuccaucc

SEQ ID NO: 3255973 - RNA, 17 nt, Human
ccuucggccuccauccu

SEQ ID NO: 3255974 - RNA, 18 nt, Human
ccuucggccuccauccug

SEQ ID NO: 3255975 - RNA, 13 nt, Human
ccugaggcuccac

SEQ ID NO: 3255976 - RNA, 14 nt, Human
ccugaggcuccacu

SEQ ID NO: 3255977 - RNA, 19 nt, Human
ccugaagagaagggcaggg

SEQ ID NO: 3255978 - RNA, 17 nt, Human
ccugccccugagcccau

SEQ ID NO: 3255979 - RNA, 22 nt, Human
cuacucuggagguuuguuuaga

SEQ ID NO: 3255980 - RNA, 21 nt, Human
cuauggggauagaugugugga

SEQ ID NO: 3255981 - RNA, 20 nt, Human
cuauggggauagaugugugg

SEQ ID NO: 3255982 - RNA, 19 nt, Human
cuauggggauagaugugug

SEQ ID NO: 3255983 - RNA, 20 nt, Human
cgggaggcagagguugcagu

SEQ ID NO: 3255984 - RNA, 19 nt, Human
cuaaauugacacuuaaaaa

SEQ ID NO: 3255985 - RNA, 13 nt, Human
cuccacuuggucu

SEQ ID NO: 3255986 - RNA, 15 nt, Human
cuccacuuggucugu

SEQ ID NO: 3255987 - RNA, 16 nt, Human
cuccacuuggucugug

SEQ ID NO: 3255988 - RNA, 17 nt, Human
cuccacuuggucuguga

SEQ ID NO: 3255989 - RNA, 21 nt, Human
cuccacuuggucugugagaug

SEQ ID NO: 3255990 - RNA, 22 nt, Human
cuccacuuggucugugagaugc

SEQ ID NO: 3255991 - RNA, 23 nt, Human
cuccacuuggucugugagaugcu

SEQ ID NO: 3255992 - RNA, 12 nt, Human
cugagaggccac

SEQ ID NO: 3255993 - RNA, 22 nt, Human
cuaauucuuugaccuguuggga

SEQ ID NO: 3255994 - RNA, 21 nt, Human
cuaauucuuugaccuguuggg

SEQ ID NO: 3255995 - RNA, 20 nt, Human
cuacaugagguacugagagu

SEQ ID NO: 3255996 - RNA, 18 nt, Human
cuacaugagguacugaga

SEQ ID NO: 3255997 - RNA, 12 nt, Human
cuagaacucccu

SEQ ID NO: 3255998 - RNA, 18 nt, Human
ccccugcacuccagccug

SEQ ID NO: 3255999 - RNA, 13 nt, Human
ccccugcacucca

SEQ ID NO: 3256000 - RNA, 15 nt, Human
ccuguaaucacagcu

SEQ ID NO: 3256001 - RNA, 19 nt, Human
auucuuugaccuguuggga

SEQ ID NO: 3256002 - RNA, 18 nt, Human
auucacaagacccaaaag

SEQ ID NO: 3256003 - RNA, 19 nt, Human
caacccaaauguucaucaa

SEQ ID NO: 3256004 - RNA, 17 nt, Human
cacuuggucugugagau

SEQ ID NO: 3256005 - RNA, 20 nt, Human
cacuuggucugugagaugcu

SEQ ID NO: 3256006 - RNA, 21 nt, Human
caccuacaugagguacugaga

SEQ ID NO: 3256007 - RNA, 23 nt, Human
cacaagacccaaaaggcagaagc

SEQ ID NO: 3256008 - RNA, 12 nt, Human
caauuuaaaaaa

SEQ ID NO: 3256009 - RNA, 18 nt, Human
cagggcugaggccucuca

SEQ ID NO: 3256010 - RNA, 16 nt, Human
cagggcugaggccucu

SEQ ID NO: 3256011 - RNA, 15 nt, Human
cagucacauuccaag

SEQ ID NO: 3256012 - RNA, 17 nt, Human
cagagguugcagugagc

SEQ ID NO: 3256013 - RNA, 16 nt, Human
cagagguugcagugag

SEQ ID NO: 3256014 - RNA, 17 nt, Human
ccaaauguucaucaaug

SEQ ID NO: 3256015 - RNA, 20 nt, Human
gcugggaauaagugccagga

SEQ ID NO: 3256016 - RNA, 19 nt, Human
ggacaguauuuguggggag

SEQ ID NO: 3256017 - RNA, 18 nt, Human
ggacaguauuugugggga

SEQ ID NO: 3256018 - RNA, 22 nt, Human
gcuuuuccucaaagggagagag

SEQ ID NO: 3256019 - RNA, 23 nt, Human
gccuucggccuccauccugaggc

SEQ ID NO: 3256020 - RNA, 19 nt, Human
gcauuuaggccaugggaca

SEQ ID NO: 3256021 - RNA, 11 nt, Human
gccccaaaagg

SEQ ID NO: 3256022 - RNA, 22 nt, Human
gccucauguccacugguucuuc

SEQ ID NO: 3256023 - RNA, 13 nt, Human
gccuccauccuga

SEQ ID NO: 3256024 - RNA, 14 nt, Human
gccuccauccugag

SEQ ID NO: 3256025 - RNA, 12 nt, Human
gccuccauccug

SEQ ID NO: 3256026 - RNA, 18 nt, Human
ggccuucggccuccaucc

SEQ ID NO: 3256027 - RNA, 16 nt, Human
ggccuucggccuccau

SEQ ID NO: 3256028 - RNA, 13 nt, Human
aaaaauacaaaaa

SEQ ID NO: 3256029 - RNA, 22 nt, Human
ggaguguguaauuuaaaauugu

SEQ ID NO: 3256030 - RNA, 11 nt, Human
ggaguguguaa

SEQ ID NO: 3256031 - RNA, 15 nt, Human
ggauuguaaaauggu

SEQ ID NO: 3256032 - RNA, 22 nt, Human
gguuuguuuagaagaagugugu

SEQ ID NO: 3256033 - RNA, 17 nt, Human
aaagcagggacuugaac

SEQ ID NO: 3256034 - RNA, 16 nt, Human
aaagcagaacagugau

SEQ ID NO: 3256035 - RNA, 12 nt, Human
aaacuuuaugcu

SEQ ID NO: 3256036 - RNA, 19 nt, Human
aaacuuuaugcuaagugaa

SEQ ID NO: 3256037 - RNA, 16 nt, Human
gguaggaacugcuggg

SEQ ID NO: 3256038 - RNA, 18 nt, Human
gguaggaacugcugggcu

SEQ ID NO: 3256039 - RNA, 18 nt, Human
gggucauucauggccugg

SEQ ID NO: 3256040 - RNA, 21 nt, Human
gggucaucuguaccucugccu

SEQ ID NO: 3256041 - RNA, 16 nt, Human
aaaaugguuuaaaugg

SEQ ID NO: 3256042 - RNA, 18 nt, Human
aaaaugguuuaaaugguc

SEQ ID NO: 3256043 - RNA, 12 nt, Human
gcagaacaguga

SEQ ID NO: 3256044 - RNA, 13 nt, Human
gcagaacagugau

SEQ ID NO: 3256045 - RNA, 18 nt, Human
gcagaacagugauuacca

SEQ ID NO: 3256046 - RNA, 22 nt, Human
gcagaacagugauuaccaggga

SEQ ID NO: 3256047 - RNA, 13 nt, Human
gauggaaugaugg

SEQ ID NO: 3256048 - RNA, 12 nt, Human
gacagcucugca

SEQ ID NO: 3256049 - RNA, 14 nt, Human
gacgcucucuggcc

SEQ ID NO: 3256050 - RNA, 14 nt, Human
gaaugaauggcuaa

SEQ ID NO: 3256051 - RNA, 14 nt, Human
gaauuaacacauga

SEQ ID NO: 3256052 - RNA, 15 nt, Human
gaauuaacacaugau

SEQ ID NO: 3256053 - RNA, 15 nt, Human
gaaugaauggcuaag

SEQ ID NO: 3256054 - RNA, 22 nt, Human
gaggacaguauuuguggggagg

SEQ ID NO: 3256055 - RNA, 21 nt, Human
gaggacgcucucuggccuucg

SEQ ID NO: 3256056 - RNA, 20 nt, Human
gaggacgcucucuggccuuc

SEQ ID NO: 3256057 - RNA, 12 nt, Human
gaggagaaacug

SEQ ID NO: 3256058 - RNA, 14 nt, Human
gaggagaaacugga

SEQ ID NO: 3256059 - RNA, 18 nt, Human
gaggcugagaugggagaa

SEQ ID NO: 3256060 - RNA, 17 nt, Human
gaggcuccacuuggucu

SEQ ID NO: 3256061 - RNA, 15 nt, Human
gaggcuccacuuggu

SEQ ID NO: 3256062 - RNA, 12 nt, Human
gaggcuccacuu

SEQ ID NO: 3256063 - RNA, 21 nt, Human
gagauugugccccugcacucc

SEQ ID NO: 3256064 - RNA, 20 nt, Human
gagaugcuagaacucccuuu

SEQ ID NO: 3256065 - RNA, 16 nt, Human
gagaugcuagaacucc

SEQ ID NO: 3256066 - RNA, 23 nt, Human
cuuggucucagugucaaugcagc

SEQ ID NO: 3256067 - RNA, 17 nt, Human
cuucuaccucuuggcug

SEQ ID NO: 3256068 - RNA, 14 nt, Human
cuuuugucccagaa

SEQ ID NO: 3256069 - RNA, 23 nt, Human
gaacaaauuuacagagacagaaa

SEQ ID NO: 3256070 - RNA, 17 nt, Human
gaacaaauuuacagaga

SEQ ID NO: 3256071 - RNA, 18 nt, Human
gaacaaauuuacagagac

SEQ ID NO: 3256072 - RNA, 18 nt, Human
gaaaugaaagcagggacu

SEQ ID NO: 3256073 - RNA, 17 nt, Human
gaaaugaaagcagggac

SEQ ID NO: 3256074 - RNA, 13 nt, Human
cuuaaaaaugguu

SEQ ID NO: 3256075 - RNA, 20 nt, Human
cuuaaaaaugguuuaaaugg

SEQ ID NO: 3256076 - RNA, 12 nt, Human
cuuaaaaauggu

SEQ ID NO: 3256077 - RNA, 21 nt, Human
cugugagaugcuagaacuccc

SEQ ID NO: 3256078 - RNA, 23 nt, Human
cugugagaugcuagaacucccuu

SEQ ID NO: 3256079 - RNA, 23 nt, Human
cuggcccuaugcuuccggccucc

SEQ ID NO: 3256080 - RNA, 11 nt, Human
ugugauguguc

SEQ ID NO: 3256081 - RNA, 14 nt, Human
agugagacagcucu

SEQ ID NO: 3256082 - RNA, 22 nt, Human
ugugagaugcuagaacucccuu

SEQ ID NO: 3256083 - RNA, 17 nt, Human
ugucucuacuaaaaaua

SEQ ID NO: 3256084 - RNA, 22 nt, Human
uguauccauccauggggcugau

SEQ ID NO: 3256085 - RNA, 22 nt, Human
uguaugugggggucuguguguu

SEQ ID NO: 3256086 - RNA, 21 nt, Human
uguaugugggggucugugugu

SEQ ID NO: 3256087 - RNA, 20 nt, Human
uguaugugggggucugugug

SEQ ID NO: 3256088 - RNA, 20 nt, Human
agucacauuccaagccucau

SEQ ID NO: 3256089 - RNA, 23 nt, Human
ugggaauaagugccaggauggaa

SEQ ID NO: 3256090 - RNA, 13 nt, Human
ugggucugugugu

SEQ ID NO: 3256091 - RNA, 15 nt, Human
ugggucugugugugu

SEQ ID NO: 3256092 - RNA, 22 nt, Human
uggucugugagaugcuagaacu

SEQ ID NO: 3256093 - RNA, 20 nt, Human
aggguuuauguuuaggaugu

SEQ ID NO: 3256094 - RNA, 23 nt, Human
uggugugaccacugcagaagaca

SEQ ID NO: 3256095 - RNA, 14 nt, Human
uuaucaacauuugu

SEQ ID NO: 3256096 - RNA, 22 nt, Human
auacaaaaaaaaaaaaaaauua

SEQ ID NO: 3256097 - RNA, 18 nt, Human
uguugggagugaggaugu

SEQ ID NO: 3256098 - RNA, 20 nt, Human
uuaaaaaugguuuaaauggu

SEQ ID NO: 3256099 - RNA, 14 nt, Human
agcugccugugccu

SEQ ID NO: 3256100 - RNA, 15 nt, Human
ugccucaccccuugc

SEQ ID NO: 3256101 - RNA, 23 nt, Human
agcucugcccauccugccccuga

SEQ ID NO: 3256102 - RNA, 14 nt, Human
ugcagaagacagua

SEQ ID NO: 3256103 - RNA, 15 nt, Human
ugcagaagacaguau

SEQ ID NO: 3256104 - RNA, 20 nt, Human
agccucauguccacugguuc

SEQ ID NO: 3256105 - RNA, 18 nt, Human
agcccauggcacucuaug

SEQ ID NO: 3256106 - RNA, 11 nt, Human
aggagaaacug

SEQ ID NO: 3256107 - RNA, 18 nt, Human
ugcuauuguagagccaga

SEQ ID NO: 3256108 - RNA, 22 nt, Human
ugcuauuguagagccagagguc

SEQ ID NO: 3256109 - RNA, 23 nt, Human
aggaauugacccacaagaaauga

SEQ ID NO: 3256110 - RNA, 13 nt, Human
ugcuggagcucug

SEQ ID NO: 3256111 - RNA, 14 nt, Human
ugcuggagcucugc

SEQ ID NO: 3256112 - RNA, 22 nt, Human
uggaccuuuccugaggaagagg

SEQ ID NO: 3256113 - RNA, 21 nt, Human
aggccucucauuccagaggaa

SEQ ID NO: 3256114 - RNA, 15 nt, Human
uggccaguggcugga

SEQ ID NO: 3256115 - RNA, 14 nt, Human
uggccaguggcugg

SEQ ID NO: 3256116 - RNA, 16 nt, Human
uggccaguggcuggau

SEQ ID NO: 3256117 - RNA, 22 nt, Human
uggcugccuugugaaggaauua

SEQ ID NO: 3256118 - RNA, 18 nt, Human
uugucccugaagagaagg

SEQ ID NO: 3256119 - RNA, 16 nt, Human
uugugugugggagugu

SEQ ID NO: 3256120 - RNA, 13 nt, Human
uugugugugggag

SEQ ID NO: 3256121 - RNA, 10 nt, Human
uugugugugg

SEQ ID NO: 3256122 - RNA, 13 nt, Human
augcuaagugaaa

SEQ ID NO: 3256123 - RNA, 13 nt, Human
auccugccccuga

SEQ ID NO: 3256124 - RNA, 22 nt, Human
auccugaggcuccacuuggucu

SEQ ID NO: 3256125 - RNA, 16 nt, Human
auccugcaauuccacu

SEQ ID NO: 3256126 - RNA, 11 nt, Human
auccugaggcu

SEQ ID NO: 3256127 - RNA, 13 nt, Human
auccugaggcucc

SEQ ID NO: 3256128 - RNA, 16 nt, Human
auccugaggcuccacu

SEQ ID NO: 3256129 - RNA, 18 nt, Human
auccugaggcuccacuug

SEQ ID NO: 3256130 - RNA, 17 nt, Human
uugacacuuaaaaaugg

SEQ ID NO: 3256131 - RNA, 20 nt, Human
aucauuaucagccugugcca

SEQ ID NO: 3256132 - RNA, 23 nt, Human
aucacuugaacccgggaggcaga

SEQ ID NO: 3256133 - RNA, 20 nt, Human
auccauggggcugauuguau

SEQ ID NO: 3256134 - RNA, 16 nt, Human
uucagauuugccuuau

SEQ ID NO: 3256135 - RNA, 15 nt, Human
uucaucaaugaauga

SEQ ID NO: 3256136 - RNA, 23 nt, Human
auauguaccuaacgaaguauccu

SEQ ID NO: 3256137 - RNA, 13 nt, Human
aucaauuuaaaaa

SEQ ID NO: 3256138 - RNA, 12 nt, Human
auugguguugac

SEQ ID NO: 3256139 - RNA, 15 nt, Human
auugugauguguccu

SEQ ID NO: 3256140 - RNA, 14 nt, Human
auugugaugugucc

SEQ ID NO: 3256141 - RNA, 13 nt, Human
auugugauguguc

SEQ ID NO: 3256142 - RNA, 18 nt, Human
auugacccacaagaaaug

SEQ ID NO: 3256143 - RNA, 12 nt, Human
auuaccagggac

SEQ ID NO: 3256144 - RNA, 10 nt, Human
augugugugu

SEQ ID NO: 3256145 - RNA, 13 nt, Human
auguggaagugug

SEQ ID NO: 3256146 - RNA, 16 nt, Human
auguggaagugugggu

SEQ ID NO: 3256147 - RNA, 15 nt, Human
auguggaaguguggg

SEQ ID NO: 3256148 - RNA, 23 nt, Human
auguggaagugugggucugugug

SEQ ID NO: 3256149 - RNA, 22 nt, Human
auguggaagugugggucugugu

SEQ ID NO: 3256150 - RNA, 20 nt, Human
ugagaugcuagaacucccuu

SEQ ID NO: 3256151 - RNA, 20 nt, Human
ugagacucugucucagucca

SEQ ID NO: 3256152 - RNA, 15 nt, Human
ugacacuuaaaaaug

SEQ ID NO: 3256153 - RNA, 21 nt, Human
agaugcuagaacucccuuuca

SEQ ID NO: 3256154 - RNA, 15 nt, Human
agaugcuagaacucc

SEQ ID NO: 3256155 - RNA, 19 nt, Human
agaugcuagaacucccuuu

SEQ ID NO: 3256156 - RNA, 21 nt, Human
agauugugccccugcacucca

SEQ ID NO: 3256157 - RNA, 17 nt, Human
ugaaagaggaaugaagu

SEQ ID NO: 3256158 - RNA, 14 nt, Human
agagacagaaagca

SEQ ID NO: 3256159 - RNA, 17 nt, Human
ugaaguacucauacaug

SEQ ID NO: 3256160 - RNA, 22 nt, Human
ugaacccauauuuguacaccaa

SEQ ID NO: 3256161 - RNA, 18 nt, Human
ugaacccgggaggcagag

SEQ ID NO: 3256162 - RNA, 13 nt, Human
ugaacaaauuuac

SEQ ID NO: 3256163 - RNA, 14 nt, Human
agaagaaguguguc

SEQ ID NO: 3256164 - RNA, 18 nt, Human
ucugcagauaaacaguag

SEQ ID NO: 3256165 - RNA, 15 nt, Human
ucugcagauaaacag

SEQ ID NO: 3256166 - RNA, 14 nt, Human
agaaaugaaagcag

SEQ ID NO: 3256167 - RNA, 23 nt, Human
ucugugagaugcuagaacucccu

SEQ ID NO: 3256168 - RNA, 17 nt, Human
ucugugagaugcuagaa

SEQ ID NO: 3256169 - RNA, 22 nt, Human
ucugugagaugcuagaacuccc

SEQ ID NO: 3256170 - RNA, 14 nt, Human
ucugugagaugcua

SEQ ID NO: 3256171 - RNA, 15 nt, Human
agaauuaacacauga

SEQ ID NO: 3256172 - RNA, 17 nt, Human
ucagauuugccuuauug

SEQ ID NO: 3256173 - RNA, 15 nt, Human
acccgggaggcagag

SEQ ID NO: 3256174 - RNA, 17 nt, Human
acccgggaggcagaggu

SEQ ID NO: 3256175 - RNA, 12 nt, Human
ucaguaugugga

SEQ ID NO: 3256176 - RNA, 14 nt, Human
ucaguauguggaag

SEQ ID NO: 3256177 - RNA, 16 nt, Human
ucauaaauuuaugguu

SEQ ID NO: 3256178 - RNA, 17 nt, Human
ucauguuuacagaggac

SEQ ID NO: 3256179 - RNA, 23 nt, Human
ucacagcaagucacuggccagug

SEQ ID NO: 3256180 - RNA, 23 nt, Human
ucacuugaacccgggaggcagag

SEQ ID NO: 3256181 - RNA, 23 nt, Human
ucaaugaaugaaugaauggcuaa

SEQ ID NO: 3256182 - RNA, 22 nt, Human
ucaauaucuuuuuuuuaauaaa

SEQ ID NO: 3256183 - RNA, 16 nt, Human
acaugagguacugaga

SEQ ID NO: 3256184 - RNA, 20 nt, Human
acaugagguacugagaguga

SEQ ID NO: 3256185 - RNA, 23 nt, Human
acaugagguacugagagugaaca

SEQ ID NO: 3256186 - RNA, 18 nt, Human
acugagagugaacaaauu

SEQ ID NO: 3256187 - RNA, 21 nt, Human
acucuggagguuuguuuagaa

SEQ ID NO: 3256188 - RNA, 19 nt, Human
acuccagugagacagcucu

SEQ ID NO: 3256189 - RNA, 11 nt, Human
uccauccugag

SEQ ID NO: 3256190 - RNA, 12 nt, Human
uccauccugagg

SEQ ID NO: 3256191 - RNA, 15 nt, Human
uccauccugaggcuc

SEQ ID NO: 3256192 - RNA, 19 nt, Human
accuugaaaacuuuaugcu

SEQ ID NO: 3256193 - RNA, 22 nt, Human
uccacugguucuucuuggucuc

SEQ ID NO: 3256194 - RNA, 11 nt, Human
acgcucucugg

SEQ ID NO: 3256195 - RNA, 18 nt, Human
uccagugagacagcucug

SEQ ID NO: 3256196 - RNA, 14 nt, Human
uccagugagacagc

SEQ ID NO: 3256197 - RNA, 22 nt, Human
uaacuuaaaagaacauguauau

SEQ ID NO: 3256198 - RNA, 18 nt, Human
uaagaagugaaaaucuac

SEQ ID NO: 3256199 - RNA, 21 nt, Human
uaagcaaaaugugauauguac

SEQ ID NO: 3256200 - RNA, 19 nt, Human
aaucuacacuccagugaga

SEQ ID NO: 3256201 - RNA, 22 nt, Human
aaugaauggcuaagcaaaaugu

SEQ ID NO: 3256202 - RNA, 22 nt, Human
aauugacccacaagaaaugaaa

SEQ ID NO: 3256203 - RNA, 21 nt, Human
aauugacccacaagaaaugaa

SEQ ID NO: 3256204 - RNA, 22 nt, Human
aauuccacuuauaggaauugac

SEQ ID NO: 3256205 - RNA, 18 nt, Human
acacaugauccugcaauu

SEQ ID NO: 3256206 - RNA, 19 nt, Human
uagaggagaaacuggaacu

SEQ ID NO: 3256207 - RNA, 22 nt, Human
uagaggagaaacuggaacucuc

SEQ ID NO: 3256208 - RNA, 20 nt, Human
acaagacccaaaaggcagaa

SEQ ID NO: 3256209 - RNA, 18 nt, Human
acaaauuuacagagacag

SEQ ID NO: 3256210 - RNA, 19 nt, Human
acaaauuuacagagacaga

SEQ ID NO: 3256211 - RNA, 16 nt, Human
uauguggaaguguggg

SEQ ID NO: 3256212 - RNA, 12 nt, Human
uauguggaagug

SEQ ID NO: 3256213 - RNA, 17 nt, Human
acaggaaguagaggagg

SEQ ID NO: 3256214 - RNA, 20 nt, Human
acagggaggacgcucucugg

SEQ ID NO: 3256215 - RNA, 21 nt, Human
acagggaggacgcucucuggc

SEQ ID NO: 3256216 - RNA, 19 nt, Human
uauggggauagaugugugg

SEQ ID NO: 3256217 - RNA, 20 nt, Human
uauggggauagaugugugga

SEQ ID NO: 3256218 - RNA, 21 nt, Human
guguaugugggggucugugug

SEQ ID NO: 3256219 - RNA, 13 nt, Human
guguauguggggg

SEQ ID NO: 3256220 - RNA, 17 nt, Human
aagcaacccaaauguuc

SEQ ID NO: 3256221 - RNA, 16 nt, Human
uaaaauugugaugugu

SEQ ID NO: 3256222 - RNA, 15 nt, Human
uaaaauugugaugug

SEQ ID NO: 3256223 - RNA, 9 nt, Human
uaaaauggu

SEQ ID NO: 3256224 - RNA, 18 nt, Human
aagugugggucugugugu

SEQ ID NO: 3256225 - RNA, 17 nt, Human
aagugugggucugugug

SEQ ID NO: 3256226 - RNA, 10 nt, Human
aagugugggu

SEQ ID NO: 3256227 - RNA, 20 nt, Human
aagugugggucugugugugu

SEQ ID NO: 3256228 - RNA, 21 nt, Human
uaaaaaaaaaccugagcccca

SEQ ID NO: 3256229 - RNA, 21 nt, Human
aagucacuggccaguggcugg

SEQ ID NO: 3256230 - RNA, 14 nt, Human
guuuaugauuccac

SEQ ID NO: 3256231 - RNA, 19 nt, Human
aagaagugugucacccuua

SEQ ID NO: 3256232 - RNA, 16 nt, Human
aagaaagaaaaucagg

SEQ ID NO: 3256233 - RNA, 14 nt, Human
aagaaagaaaauca

SEQ ID NO: 3256234 - RNA, 13 nt, Human
aagaaagaaaauc

SEQ ID NO: 3256235 - RNA, 10 nt, Human
gugauguguc

SEQ ID NO: 3256236 - RNA, 17 nt, Human
gugauuaccagggacug

SEQ ID NO: 3256237 - RNA, 11 nt, Human
gugauuaccag

SEQ ID NO: 3256238 - RNA, 16 nt, Human
gugauuaccagggacu

SEQ ID NO: 3256239 - RNA, 13 nt, Human
aacuucagacaua

SEQ ID NO: 3256240 - RNA, 14 nt, Human
aacucccuuucaac

SEQ ID NO: 3256241 - RNA, 22 nt, Human
guccaugaagauguagaggaga

SEQ ID NO: 3256242 - RNA, 20 nt, Human
gucacaggaaguagaggagg

SEQ ID NO: 3256243 - RNA, 21 nt, Human
gucaauuuuguuauguauauu

SEQ ID NO: 3256244 - RNA, 13 nt, Human
gucacaggaagua

SEQ ID NO: 3256245 - RNA, 15 nt, Human
gucacaggaaguaga

SEQ ID NO: 3256246 - RNA, 18 nt, Human
augugggggucugugugu

SEQ ID NO: 3256247 - RNA, 17 nt, Human
augugggggucugugug

SEQ ID NO: 3256248 - RNA, 16 nt, Human
augugggggucugugu

SEQ ID NO: 3256249 - RNA, 23 nt, Human
aguuguaucagcacguguggccu

SEQ ID NO: 3256250 - RNA, 20 nt, Human
aguuguaucagcacgugugg

SEQ ID NO: 3256251 - RNA, 19 nt, Human
aguuguaccgcaaugugac

SEQ ID NO: 3256252 - RNA, 18 nt, Human
aguuguaccgcaauguga

SEQ ID NO: 3256253 - RNA, 18 nt, Human
agugauuaccagggacug

SEQ ID NO: 3256254 - RNA, 15 nt, Human
agugauuaccaggga

SEQ ID NO: 3256255 - RNA, 14 nt, Human
auaauuacuauguc

SEQ ID NO: 3256256 - RNA, 15 nt, Human
auaucaauuuaaaaa

SEQ ID NO: 3256257 - RNA, 19 nt, Human
aggcuauggggauagaugu

SEQ ID NO: 3256258 - RNA, 22 nt, Human
aggcuauggggauagaugugug

SEQ ID NO: 3256259 - RNA, 21 nt, Human
aggcuauggggauagaugugu

SEQ ID NO: 3256260 - RNA, 14 nt, Human
aggauguugaaaaa

SEQ ID NO: 3256261 - RNA, 13 nt, Human
agccagaggucug

SEQ ID NO: 3256262 - RNA, 21 nt, Human
agaugggagaaucacuugaac

SEQ ID NO: 3256263 - RNA, 14 nt, Human
agauguagaggaga

SEQ ID NO: 3256264 - RNA, 21 nt, Human
agccgggcgugguggugagug

SEQ ID NO: 3256265 - RNA, 13 nt, Human
acauguuacaaca

SEQ ID NO: 3256266 - RNA, 20 nt, Human
acagcucugcauacucauua

SEQ ID NO: 3256267 - RNA, 13 nt, Human
acucagucuuuaa

SEQ ID NO: 3256268 - RNA, 12 nt, Human
acucccuuucaa

SEQ ID NO: 3256269 - RNA, 15 nt, Human
acuuggucugugaga

SEQ ID NO: 3256270 - RNA, 14 nt, Human
acuuggucugugag

SEQ ID NO: 3256271 - RNA, 13 nt, Human
acuuggucuguga

SEQ ID NO: 3256272 - RNA, 12 nt, Human
acuggaacucuc

SEQ ID NO: 3256273 - RNA, 22 nt, Human
aaugucaguauguggaagugug

SEQ ID NO: 3256274 - RNA, 16 nt, Human
aaugucaguaugugga

SEQ ID NO: 3256275 - RNA, 17 nt, Human
aauaagugccaggaugg

SEQ ID NO: 3256276 - RNA, 17 nt, Human
caaggcugauuaaacca

SEQ ID NO: 3256277 - RNA, 22 nt, Human
caaugugacuuaaugccacuaa

SEQ ID NO: 3256278 - RNA, 23 nt, Human
caaaacuucagacauagaauuaa

SEQ ID NO: 3256279 - RNA, 12 nt, Human
uauucccaugag

SEQ ID NO: 3256280 - RNA, 13 nt, Human
ucaaugcagcccc

SEQ ID NO: 3256281 - RNA, 14 nt, Human
ucaccaaggcugau

SEQ ID NO: 3256282 - RNA, 16 nt, Human
ucacagucacauucca

SEQ ID NO: 3256283 - RNA, 17 nt, Human
ucacaagacccaaaagg

SEQ ID NO: 3256284 - RNA, 13 nt, Human
ucacaagacccaa

SEQ ID NO: 3256285 - RNA, 14 nt, Human
ucauuccagaggaa

SEQ ID NO: 3256286 - RNA, 12 nt, Human
ucauagcagcuu

SEQ ID NO: 3256287 - RNA, 14 nt, Human
uccacuuggucugu

SEQ ID NO: 3256288 - RNA, 15 nt, Human
uccacuuggucugug

SEQ ID NO: 3256289 - RNA, 16 nt, Human
uccacuuggucuguga

SEQ ID NO: 3256290 - RNA, 10 nt, Human
ucuggccuuc

SEQ ID NO: 3256291 - RNA, 17 nt, Human
ucuggccuucggccucc

SEQ ID NO: 3256292 - RNA, 18 nt, Human
ucuggccuucggccucca

SEQ ID NO: 3256293 - RNA, 23 nt, Human
ucucuggccuucggccuccaucc

SEQ ID NO: 3256294 - RNA, 18 nt, Human
ucggccuccauccugagg

SEQ ID NO: 3256295 - RNA, 17 nt, Human
ucggccuccauccugag

SEQ ID NO: 3256296 - RNA, 20 nt, Human
uccugccuaagugcagcccc

SEQ ID NO: 3256297 - RNA, 21 nt, Human
ugcauuauauuuguaaauuua

SEQ ID NO: 3256298 - RNA, 17 nt, Human
ugcaugguuuagaaagc

SEQ ID NO: 3256299 - RNA, 19 nt, Human
ugcagauaaacaguaguga

SEQ ID NO: 3256300 - RNA, 17 nt, Human
ugcagauaaacaguagu

SEQ ID NO: 3256301 - RNA, 22 nt, Human
ugccaucauguuuacagaggac

SEQ ID NO: 3256302 - RNA, 16 nt, Human
ugccaucauguuuaca

SEQ ID NO: 3256303 - RNA, 17 nt, Human
ugaguuggcugggaaua

SEQ ID NO: 3256304 - RNA, 16 nt, Human
ugaguuggcugggaau

SEQ ID NO: 3256305 - RNA, 14 nt, Human
ugaguuggcuggga

SEQ ID NO: 3256306 - RNA, 24 nt, Human
ugauaguuguaccgcaaugugacu

SEQ ID NO: 3256307 - RNA, 14 nt, Human
ugagacagcucugc

SEQ ID NO: 3256308 - RNA, 16 nt, Human
ugagacagcucugcau

SEQ ID NO: 3256309 - RNA, 12 nt, Human
ugagacagcucu

SEQ ID NO: 3256310 - RNA, 14 nt, Human
ugagaugcuagaac

SEQ ID NO: 3256311 - RNA, 16 nt, Human
ugagaugcuagaacuc

SEQ ID NO: 3256312 - RNA, 17 nt, Human
uguaaauuuaugugaug

SEQ ID NO: 3256313 - RNA, 12 nt, Human
uguaaaauggug

SEQ ID NO: 3256314 - RNA, 11 nt, Human
uguaaaauggu

SEQ ID NO: 3256315 - RNA, 22 nt, Human
uggccuucggccuccauccuga

SEQ ID NO: 3256316 - RNA, 20 nt, Human
uggccuucggccuccauccu

SEQ ID NO: 3256317 - RNA, 23 nt, Human
uggccuucggccuccauccugag

SEQ ID NO: 3256318 - RNA, 13 nt, Human
ugggaguguguaa

SEQ ID NO: 3256319 - RNA, 15 nt, Human
uuggucugugagaug

SEQ ID NO: 3256320 - RNA, 16 nt, Human
uuggucugugagaugc

SEQ ID NO: 3256321 - RNA, 12 nt, Human
uugugccccugc

SEQ ID NO: 3256322 - RNA, 21 nt, Human
uuccugaggaagagggacugu

SEQ ID NO: 3256323 - RNA, 14 nt, Human
uugacccacaagaa

SEQ ID NO: 3256324 - RNA, 17 nt, Human
uugacccacaagaaaug

SEQ ID NO: 3256325 - RNA, 21 nt, Human
uuuuauuuuucucaugaugag

SEQ ID NO: 3256326 - RNA, 13 nt, Human
cauuccagaggaa

SEQ ID NO: 3256327 - RNA, 14 nt, Human
cauuccagaggaag

SEQ ID NO: 3256328 - RNA, 23 nt, Human
caugggacagggaggacgcucuc

SEQ ID NO: 3256329 - RNA, 13 nt, Human
caucauguuuaca

SEQ ID NO: 3256330 - RNA, 21 nt, Human
caucauguuuacagaggacag

SEQ ID NO: 3256331 - RNA, 19 nt, Human
caucauguuuacagaggac

SEQ ID NO: 3256332 - RNA, 16 nt, Human
caugagguacugagag

SEQ ID NO: 3256333 - RNA, 19 nt, Human
caugaguuggcugggaaua

SEQ ID NO: 3256334 - RNA, 19 nt, Human
caugagguacugagaguga

SEQ ID NO: 3256335 - RNA, 18 nt, Human
caugaagauguagaggag

SEQ ID NO: 3256336 - RNA, 19 nt, Human
caugaagauguagaggaga

SEQ ID NO: 3256337 - RNA, 16 nt, Human
ccaugggacagggagg

SEQ ID NO: 3256338 - RNA, 19 nt, Human
ccaugggacagggaggacg

SEQ ID NO: 3256339 - RNA, 19 nt, Human
ccugaggaagagggacugu

SEQ ID NO: 3256340 - RNA, 11 nt, Human
ccugagcccca

SEQ ID NO: 3256341 - RNA, 20 nt, Human
ccuugaaaacuuuaugcuaa

SEQ ID NO: 3256342 - RNA, 14 nt, Human
ccuucggccuccau

SEQ ID NO: 3256343 - RNA, 19 nt, Human
ccuucggccuccauccuga

SEQ ID NO: 3256344 - RNA, 20 nt, Human
ccuucggccuccauccugag

SEQ ID NO: 3256345 - RNA, 18 nt, Human
ccucucauuccagaggaa

SEQ ID NO: 3256346 - RNA, 14 nt, Human
ccuccauccugagg

SEQ ID NO: 3256347 - RNA, 22 nt, Human
ccgggucaucuguaccucugcc

SEQ ID NO: 3256348 - RNA, 16 nt, Human
ccgggcguggugguga

SEQ ID NO: 3256349 - RNA, 15 nt, Human
cccgugggguuccuc

SEQ ID NO: 3256350 - RNA, 20 nt, Human
cccacaagaaaugaaagcag

SEQ ID NO: 3256351 - RNA, 13 nt, Human
cccacaagaaaug

SEQ ID NO: 3256352 - RNA, 14 nt, Human
cuguguguguguau

SEQ ID NO: 3256353 - RNA, 16 nt, Human
cuguguguguguaugu

SEQ ID NO: 3256354 - RNA, 15 nt, Human
cuguguguguguaug

SEQ ID NO: 3256355 - RNA, 20 nt, Human
cuguguguuuaugugugugu

SEQ ID NO: 3256356 - RNA, 18 nt, Human
cuguguguuuaugugugu

SEQ ID NO: 3256357 - RNA, 20 nt, Human
cuguguguguguaugugggg

SEQ ID NO: 3256358 - RNA, 18 nt, Human
cuguguguguguaugugg

SEQ ID NO: 3256359 - RNA, 15 nt, Human
cuucagccugaaaga

SEQ ID NO: 3256360 - RNA, 19 nt, Human
cuucggccuccauccugag

SEQ ID NO: 3256361 - RNA, 20 nt, Human
cuucggccuccauccugagg

SEQ ID NO: 3256362 - RNA, 20 nt, Human
gaauaagugccaggauggaa

SEQ ID NO: 3256363 - RNA, 14 nt, Human
gaaugccuccugca

SEQ ID NO: 3256364 - RNA, 13 nt, Human
gaacuauuagagc

SEQ ID NO: 3256365 - RNA, 14 nt, Human
gaacucccuuucaa

SEQ ID NO: 3256366 - RNA, 14 nt, Human
cuauuguagagcca

SEQ ID NO: 3256367 - RNA, 13 nt, Human
cuccauccugagg

SEQ ID NO: 3256368 - RNA, 12 nt, Human
cuccauccugag

SEQ ID NO: 3256369 - RNA, 11 nt, Human
cuccauccuga

SEQ ID NO: 3256370 - RNA, 13 nt, Human
cugauuguauuua

SEQ ID NO: 3256371 - RNA, 15 nt, Human
cugaggcuccacuug

SEQ ID NO: 3256372 - RNA, 21 nt, Human
cugaggcuccacuuggucugu

SEQ ID NO: 3256373 - RNA, 21 nt, Human
cucuggccuucggccuccauc

SEQ ID NO: 3256374 - RNA, 19 nt, Human
cucuggccuucggccucca

SEQ ID NO: 3256375 - RNA, 22 nt, Human
cucuggccuucggccuccaucc

SEQ ID NO: 3256376 - RNA, 12 nt, Human
cugagcaggugu

SEQ ID NO: 3256377 - RNA, 21 nt, Human
gauguguccugauaagcugag

SEQ ID NO: 3256378 - RNA, 13 nt, Human
gauugugccccug

SEQ ID NO: 3256379 - RNA, 20 nt, Human
gauggcaaagaaggagagca

SEQ ID NO: 3256380 - RNA, 22 nt, Human
gaugcuagaacucccuuucaac

SEQ ID NO: 3256381 - RNA, 14 nt, Human
gagucccugccauc

SEQ ID NO: 3256382 - RNA, 22 nt, Human
gagguuuguuuagaagaagugu

SEQ ID NO: 3256383 - RNA, 22 nt, Human
gagugaacaaauuuacagagac

SEQ ID NO: 3256384 - RNA, 19 nt, Human
gagugaacaaauuuacaga

SEQ ID NO: 3256385 - RNA, 15 nt, Human
gaggaugucugggcc

SEQ ID NO: 3256386 - RNA, 19 nt, Human
gaggcagagguugcaguga

SEQ ID NO: 3256387 - RNA, 15 nt, Human
gccacgauugcagga

SEQ ID NO: 3256388 - RNA, 22 nt, Human
gccaugggacagggaggacgcu

SEQ ID NO: 3256389 - RNA, 23 nt, Human
gccaugggacagggaggacgcuc

SEQ ID NO: 3256390 - RNA, 23 nt, Human
gcagagguugcagugagccgaga

SEQ ID NO: 3256391 - RNA, 18 nt, Human
gcagagguugcagugagc

SEQ ID NO: 3256392 - RNA, 14 nt, Human
gcuggggaugucuc

SEQ ID NO: 3256393 - RNA, 22 nt, Human
gcugggcuuggcagcccggguc

SEQ ID NO: 3256394 - RNA, 14 nt, Human
gcugauuguauuua

SEQ ID NO: 3256395 - RNA, 21 nt, Human
gcugauuaaaccaaggcuaga

SEQ ID NO: 3256396 - RNA, 17 nt, Human
gccugagcgacagugag

SEQ ID NO: 3256397 - RNA, 20 nt, Human
gccugagcgacagugagacu

SEQ ID NO: 3256398 - RNA, 20 nt, Human
ggccucucauuccagaggaa

SEQ ID NO: 3256399 - RNA, 16 nt, Human
ggccugacucucagca

SEQ ID NO: 3256400 - RNA, 16 nt, Human
ggcuccacuuggucug

SEQ ID NO: 3256401 - RNA, 20 nt, Human
ggcuaguaucaaaagaaaga

SEQ ID NO: 3256402 - RNA, 17 nt, Human
gggaggacgcucucugg

SEQ ID NO: 3256403 - RNA, 20 nt, Human
gggaggacgcucucuggccu

SEQ ID NO: 3256404 - RNA, 20 nt, Human
gggacaccaagccuuggcuc

SEQ ID NO: 3256405 - RNA, 21 nt, Human
gggacugaggggaggggagca

SEQ ID NO: 3256406 - RNA, 16 nt, Human
ggaggacgcucucugg

SEQ ID NO: 3256407 - RNA, 19 nt, Human
ggaggggagcaugggaagu

SEQ ID NO: 3256408 - RNA, 15 nt, Human
ggacgcucucuggcc

SEQ ID NO: 3256409 - RNA, 16 nt, Human
ggacgcucucuggccu

SEQ ID NO: 3256410 - RNA, 19 nt, Human
ggacgcucucuggccuucg

SEQ ID NO: 3256411 - RNA, 21 nt, Human
ggcagagguugcagugagccg

SEQ ID NO: 3256412 - RNA, 19 nt, Human
cacguguggccuguucuuc

SEQ ID NO: 3256413 - RNA, 22 nt, Human
cacguucuuacuaguuucccuu

SEQ ID NO: 3256414 - RNA, 21 nt, Human
cacuaaauugacacuuaaaaa

SEQ ID NO: 3256415 - RNA, 20 nt, Human
cacuugaacccgggaggcag

SEQ ID NO: 3256416 - RNA, 21 nt, Human
cacuugaacccgggaggcaga

SEQ ID NO: 3256417 - RNA, 23 nt, Human
cacuugaacccgggaggcagagg

SEQ ID NO: 3256418 - RNA, 15 nt, Human
cacuuggucugugag

SEQ ID NO: 3256419 - RNA, 17 nt, Human
cagacauagaauuaaca

SEQ ID NO: 3256420 - RNA, 19 nt, Human
cagacauagaauuaacaca

SEQ ID NO: 3256421 - RNA, 19 nt, Human
cagaagcaacccaaauguu

SEQ ID NO: 3256422 - RNA, 20 nt, Human
cagaagcaacccaaauguuc

SEQ ID NO: 3256423 - RNA, 18 nt, Human
cagaaagcagaacaguga

SEQ ID NO: 3256424 - RNA, 19 nt, Human
cagaaagcagaacagugau

SEQ ID NO: 3256425 - RNA, 18 nt, Human
cagaacagugauuaccag

SEQ ID NO: 3256426 - RNA, 23 nt, Human
cagaacagugauuaccagggacu

SEQ ID NO: 3256427 - RNA, 23 nt, Human
cagauaaauaguuuaugauucca

SEQ ID NO: 3256428 - RNA, 14 nt, Human
cagauaaacaguag

SEQ ID NO: 3256429 - RNA, 22 nt, Human
cagaggacaguauuugugggga

SEQ ID NO: 3256430 - RNA, 16 nt, Human
caggaaguagaggagg

SEQ ID NO: 3256431 - RNA, 15 nt, Human
caggaaguagaggag

SEQ ID NO: 3256432 - RNA, 23 nt, Human
cagcuuuccucaaaacuucagac

SEQ ID NO: 3256433 - RNA, 20 nt, Human
cagcucugcauacucauuag

SEQ ID NO: 3256434 - RNA, 19 nt, Human
cagcuacuugggaggcuga

SEQ ID NO: 3256435 - RNA, 14 nt, Human
caggagucccugcc

SEQ ID NO: 3256436 - RNA, 21 nt, Human
caggagucccugccaucaugu

SEQ ID NO: 3256437 - RNA, 15 nt, Human
caggagucccugcca

SEQ ID NO: 3256438 - RNA, 22 nt, Human
cagucuuuaaucugagaggcca

SEQ ID NO: 3256439 - RNA, 15 nt, Human
cagugagacagcucu

SEQ ID NO: 3256440 - RNA, 18 nt, Human
cagugauuaccagggacu

SEQ ID NO: 3256441 - RNA, 17 nt, Human
cagugauuaccagggac

SEQ ID NO: 3256442 - RNA, 12 nt, Human
caguauguggaa

SEQ ID NO: 3256443 - RNA, 13 nt, Human
caguccaugaaga

SEQ ID NO: 3256444 - RNA, 12 nt, Human
caguagugauag

SEQ ID NO: 3256445 - RNA, 12 nt, Human
caguauggcagc

SEQ ID NO: 3256446 - RNA, 12 nt, Human
cagguguucuuc

SEQ ID NO: 3256447 - RNA, 16 nt, Human
cugugagaugcuagaa

SEQ ID NO: 3256448 - RNA, 22 nt, Human
cuggggaugucucucaugacca

SEQ ID NO: 3256449 - RNA, 17 nt, Human
cuggggaugucucucau

SEQ ID NO: 3256450 - RNA, 22 nt, Human
cugccaucauguuuacagagga

SEQ ID NO: 3256451 - RNA, 17 nt, Human
cugccaucauguuuaca

SEQ ID NO: 3256452 - RNA, 23 nt, Human
cugccaucauguuuacagaggac

SEQ ID NO: 3256453 - RNA, 21 nt, Human
gaaaacuuuaugcuaagugaa

SEQ ID NO: 3256454 - RNA, 18 nt, Human
cuuauuggcagcucuacu

SEQ ID NO: 3256455 - RNA, 15 nt, Human
gacaguauuuguggg

SEQ ID NO: 3256456 - RNA, 20 nt, Human
gacaguauggcagcuuuccu

SEQ ID NO: 3256457 - RNA, 16 nt, Human
gacacuuaaaaauggu

SEQ ID NO: 3256458 - RNA, 19 nt, Human
gaagggcagggcugaggcc

SEQ ID NO: 3256459 - RNA, 15 nt, Human
gaaggcuauggggau

SEQ ID NO: 3256460 - RNA, 18 nt, Human
gaagugugggucugugug

SEQ ID NO: 3256461 - RNA, 17 nt, Human
gaagugugggucugugu

SEQ ID NO: 3256462 - RNA, 20 nt, Human
gaaugaauggcuaagcaaaa

SEQ ID NO: 3256463 - RNA, 14 nt, Human
gagaaucacuugaa

SEQ ID NO: 3256464 - RNA, 15 nt, Human
gagaaucacuugaac

SEQ ID NO: 3256465 - RNA, 19 nt, Human
gagcuggggaugucucuca

SEQ ID NO: 3256466 - RNA, 19 nt, Human
gcagggacuugaacccaua

SEQ ID NO: 3256467 - RNA, 20 nt, Human
gauauguaccuaacgaagua

SEQ ID NO: 3256468 - RNA, 18 nt, Human
gagugaggaugucugggc

SEQ ID NO: 3256469 - RNA, 13 nt, Human
gaguuggcuggga

SEQ ID NO: 3256470 - RNA, 14 nt, Human
gauuaccagggacu

SEQ ID NO: 3256471 - RNA, 15 nt, Human
gccuccauccugagg

SEQ ID NO: 3256472 - RNA, 16 nt, Human
gccuccauccugaggc

SEQ ID NO: 3256473 - RNA, 20 nt, Human
gccuccauccugaggcucca

SEQ ID NO: 3256474 - RNA, 17 nt, Human
gcuacuugggaggcuga

SEQ ID NO: 3256475 - RNA, 14 nt, Human
gccaggauggaaug

SEQ ID NO: 3256476 - RNA, 23 nt, Human
gccaguggcuggaucugugaggg

SEQ ID NO: 3256477 - RNA, 14 nt, Human
gccaguggcuggau

SEQ ID NO: 3256478 - RNA, 14 nt, Human
gcugaggccucuca

SEQ ID NO: 3256479 - RNA, 15 nt, Human
gcucugcccauccug

SEQ ID NO: 3256480 - RNA, 20 nt, Human
gcuccacuuggucugugaga

SEQ ID NO: 3256481 - RNA, 19 nt, Human
gcuccacuuggucugugag

SEQ ID NO: 3256482 - RNA, 14 nt, Human
ggaacugcugggcu

SEQ ID NO: 3256483 - RNA, 20 nt, Human
gcuguagacauuugcuauga

SEQ ID NO: 3256484 - RNA, 19 nt, Human
gcuuuccucaucaggccau

SEQ ID NO: 3256485 - RNA, 19 nt, Human
ggccaguggcuggaucugu

SEQ ID NO: 3256486 - RNA, 18 nt, Human
ggccagcaccaucucuuu

SEQ ID NO: 3256487 - RNA, 17 nt, Human
ggcccugugccuuggug

SEQ ID NO: 3256488 - RNA, 22 nt, Human
ggccuucggccuccauccugag

SEQ ID NO: 3256489 - RNA, 23 nt, Human
ggccuucggccuccauccugagg

SEQ ID NO: 3256490 - RNA, 16 nt, Human
gggauuguaaaauggu

SEQ ID NO: 3256491 - RNA, 19 nt, Human
gggagaaugucaguaugug

SEQ ID NO: 3256492 - RNA, 22 nt, Human
gggagaaugucaguauguggaa

SEQ ID NO: 3256493 - RNA, 14 nt, Human
gggaugucucucau

SEQ ID NO: 3256494 - RNA, 18 nt, Human
gggcucagagugggguag

SEQ ID NO: 3256495 - RNA, 15 nt, Human
aaaaugugauaugua

SEQ ID NO: 3256496 - RNA, 15 nt, Human
gggcgugguggugag

SEQ ID NO: 3256497 - RNA, 17 nt, Human
ggucuguguguguguau

SEQ ID NO: 3256498 - RNA, 11 nt, Human
ggucugugugu

SEQ ID NO: 3256499 - RNA, 24 nt, Human
ggucugugagaugcuagaacuccc

SEQ ID NO: 3256500 - RNA, 21 nt, Human
ggucuguguguguguaugugg

SEQ ID NO: 3256501 - RNA, 20 nt, Human
ggucuguguguguguaugug

SEQ ID NO: 3256502 - RNA, 16 nt, Human
ggugugaccacugcag

SEQ ID NO: 3256503 - RNA, 16 nt, Human
gguuuagaaagcuugc

SEQ ID NO: 3256504 - RNA, 17 nt, Human
guaaauuuaugugaugg

SEQ ID NO: 3256505 - RNA, 16 nt, Human
guaaauuuaugugaug

SEQ ID NO: 3256506 - RNA, 11 nt, Human
cucucuggccu

SEQ ID NO: 3256507 - RNA, 12 nt, Human
cucucuggccuu

SEQ ID NO: 3256508 - RNA, 19 nt, Human
cucuauguucuaagaagug

SEQ ID NO: 3256509 - RNA, 15 nt, Human
cuacaugagguacug

SEQ ID NO: 3256510 - RNA, 20 nt, Human
cuaagugaaauaagccagac

SEQ ID NO: 3256511 - RNA, 23 nt, Human
cuaagugaaauaagccagacauc

SEQ ID NO: 3256512 - RNA, 16 nt, Human
cuagaacucccuuuca

SEQ ID NO: 3256513 - RNA, 17 nt, Human
cuagaacucccuuucaa

SEQ ID NO: 3256514 - RNA, 18 nt, Human
cuagaacucccuuucaac

SEQ ID NO: 3256515 - RNA, 19 nt, Human
cuagaacucccuuucaaca

SEQ ID NO: 3256516 - RNA, 13 nt, Human
cuagaacucccuu

SEQ ID NO: 3256517 - RNA, 15 nt, Human
cgacagugagacucu

SEQ ID NO: 3256518 - RNA, 16 nt, Human
cgacagugagacucug

SEQ ID NO: 3256519 - RNA, 22 nt, Human
cccauuguggucacaggaagua

SEQ ID NO: 3256520 - RNA, 23 nt, Human
cccauuguggucacaggaaguag

SEQ ID NO: 3256521 - RNA, 23 nt, Human
cccgggaggcagagguugcagug

SEQ ID NO: 3256522 - RNA, 24 nt, Human
cccugugccuuggugugcuguauc

SEQ ID NO: 3256523 - RNA, 20 nt, Human
ccucauguccacugguucuu

SEQ ID NO: 3256524 - RNA, 15 nt, Human
ccucauguccacugg

SEQ ID NO: 3256525 - RNA, 14 nt, Human
ccugacucucagca

SEQ ID NO: 3256526 - RNA, 21 nt, Human
cacugcagaagacaguauggc

SEQ ID NO: 3256527 - RNA, 22 nt, Human
cacugguucuucuuggucucag

SEQ ID NO: 3256528 - RNA, 13 nt, Human
auuguaaaauggu

SEQ ID NO: 3256529 - RNA, 14 nt, Human
auuguaaaauggug

SEQ ID NO: 3256530 - RNA, 19 nt, Human
auucauagcagcuuauuca

SEQ ID NO: 3256531 - RNA, 22 nt, Human
auucauagcagcuuauucacaa

SEQ ID NO: 3256532 - RNA, 19 nt, Human
auucacaagacccaaaagg

SEQ ID NO: 3256533 - RNA, 22 nt, Human
auuuguggggagggauuugggg

SEQ ID NO: 3256534 - RNA, 20 nt, Human
auuugcuaugagcuggggau

SEQ ID NO: 3256535 - RNA, 16 nt, Human
auuugcuaugagcugg

SEQ ID NO: 3256536 - RNA, 15 nt, Human
caaaaggcagaagca

SEQ ID NO: 3256537 - RNA, 20 nt, Human
caaaaaaaaaaaaaaauuag

SEQ ID NO: 3256538 - RNA, 19 nt, Human
cagccccgugggguuccuc

SEQ ID NO: 3256539 - RNA, 22 nt, Human
cagccugagcgacagugagacu

SEQ ID NO: 3256540 - RNA, 23 nt, Human
cagccugagcgacagugagacuc

SEQ ID NO: 3256541 - RNA, 23 nt, Human
cagaucauuaucagccugugcca

SEQ ID NO: 3256542 - RNA, 15 nt, Human
caguauuugugggga

SEQ ID NO: 3256543 - RNA, 22 nt, Human
cagggaggacgcucucuggccu

SEQ ID NO: 3256544 - RNA, 19 nt, Human
cagggaggacgcucucugg

SEQ ID NO: 3256545 - RNA, 16 nt, Human
cagcuuauucacaaga

SEQ ID NO: 3256546 - RNA, 20 nt, Human
cauagcagcuuauucacaag

SEQ ID NO: 3256547 - RNA, 18 nt, Human
ccaaauguucaucaauga

SEQ ID NO: 3256548 - RNA, 15 nt, Human
cauuaggauggcuag

SEQ ID NO: 3256549 - RNA, 23 nt, Human
auugcaggagucccugccaucau

SEQ ID NO: 3256550 - RNA, 21 nt, Human
auugacccacaagaaaugaaa

SEQ ID NO: 3256551 - RNA, 20 nt, Human
auugacacuuaaaaaugguu

SEQ ID NO: 3256552 - RNA, 20 nt, Human
auuuaaaauugugauguguc

SEQ ID NO: 3256553 - RNA, 19 nt, Human
auuuaaaauugugaugugu

SEQ ID NO: 3256554 - RNA, 13 nt, Human
auugugccccugc

SEQ ID NO: 3256555 - RNA, 19 nt, Human
auguuuacagaggacagua

SEQ ID NO: 3256556 - RNA, 17 nt, Human
auguuuacagaggacag

SEQ ID NO: 3256557 - RNA, 15 nt, Human
auguuuacagaggac

SEQ ID NO: 3256558 - RNA, 19 nt, Human
auguucaucaaugaaugaa

SEQ ID NO: 3256559 - RNA, 18 nt, Human
auguucaucaaugaauga

SEQ ID NO: 3256560 - RNA, 19 nt, Human
uuugcuaugagcuggggau

SEQ ID NO: 3256561 - RNA, 14 nt, Human
augucaguaugugg

SEQ ID NO: 3256562 - RNA, 13 nt, Human
augucaguaugug

SEQ ID NO: 3256563 - RNA, 17 nt, Human
uuuguaaauuuauguga

SEQ ID NO: 3256564 - RNA, 20 nt, Human
auuccacuuauaggaauuga

SEQ ID NO: 3256565 - RNA, 20 nt, Human
aucugagaggccacagugca

SEQ ID NO: 3256566 - RNA, 16 nt, Human
aucuguaccucugccu

SEQ ID NO: 3256567 - RNA, 15 nt, Human
augaaagcagggacu

SEQ ID NO: 3256568 - RNA, 18 nt, Human
augaagauguagaggaga

SEQ ID NO: 3256569 - RNA, 13 nt, Human
augaaugaauggc

SEQ ID NO: 3256570 - RNA, 21 nt, Human
auggaaugaugggucaguugu

SEQ ID NO: 3256571 - RNA, 16 nt, Human
auggccugggggaugu

SEQ ID NO: 3256572 - RNA, 20 nt, Human
auggcuaguaucaaaagaaa

SEQ ID NO: 3256573 - RNA, 12 nt, Human
uuuaugugaugg

SEQ ID NO: 3256574 - RNA, 13 nt, Human
uuuaugugugugu

SEQ ID NO: 3256575 - RNA, 11 nt, Human
uuuaugugugu

SEQ ID NO: 3256576 - RNA, 16 nt, Human
augcuagaacucccuu

SEQ ID NO: 3256577 - RNA, 15 nt, Human
augcuagaacucccu

SEQ ID NO: 3256578 - RNA, 15 nt, Human
augccacuaaauuga

SEQ ID NO: 3256579 - RNA, 17 nt, Human
augccacuaaauugaca

SEQ ID NO: 3256580 - RNA, 20 nt, Human
auaguuguaccgcaauguga

SEQ ID NO: 3256581 - RNA, 22 nt, Human
auaggaauugacccacaagaaa

SEQ ID NO: 3256582 - RNA, 22 nt, Human
uucacaagacccaaaaggcaga

SEQ ID NO: 3256583 - RNA, 23 nt, Human
uucacaagacccaaaaggcagaa

SEQ ID NO: 3256584 - RNA, 24 nt, Human
ugauaagcagucauccucagauca

SEQ ID NO: 3256585 - RNA, 18 nt, Human
ugaguucauaaauuuaug

SEQ ID NO: 3256586 - RNA, 21 nt, Human
ugauagaaggcuauggggaua

SEQ ID NO: 3256587 - RNA, 14 nt, Human
ugauuaccagggac

SEQ ID NO: 3256588 - RNA, 12 nt, Human
ugauuaaaccaa

SEQ ID NO: 3256589 - RNA, 17 nt, Human
agcuacuugggaggcug

SEQ ID NO: 3256590 - RNA, 18 nt, Human
agcuacuugggaggcuga

SEQ ID NO: 3256591 - RNA, 22 nt, Human
agccugaaagaggaaugaagua

SEQ ID NO: 3256592 - RNA, 15 nt, Human
agccucauguccacu

SEQ ID NO: 3256593 - RNA, 18 nt, Human
agccccgugggguuccuc

SEQ ID NO: 3256594 - RNA, 23 nt, Human
uggccaguggcuggaucugugag

SEQ ID NO: 3256595 - RNA, 21 nt, Human
uggccuguucuucuauggguu

SEQ ID NO: 3256596 - RNA, 19 nt, Human
aggacaguauuugugggga

SEQ ID NO: 3256597 - RNA, 12 nt, Human
aggacaguauuu

SEQ ID NO: 3256598 - RNA, 23 nt, Human
ugcuguauccauccauggggcug

SEQ ID NO: 3256599 - RNA, 15 nt, Human
ugcuguagacauuug

SEQ ID NO: 3256600 - RNA, 20 nt, Human
ugguaggaacugcugggcuu

SEQ ID NO: 3256601 - RNA, 13 nt, Human
ugguaggaacugc

SEQ ID NO: 3256602 - RNA, 12 nt, Human
ugggucugugug

SEQ ID NO: 3256603 - RNA, 15 nt, Human
ugggguagguuggga

SEQ ID NO: 3256604 - RNA, 21 nt, Human
ugggguagguugggagaaugu

SEQ ID NO: 3256605 - RNA, 14 nt, Human
uggggcugauugua

SEQ ID NO: 3256606 - RNA, 22 nt, Human
ugucaguauguggaaguguggg

SEQ ID NO: 3256607 - RNA, 23 nt, Human
ugucauuugcuggagcucugccc

SEQ ID NO: 3256608 - RNA, 18 nt, Human
ugucaguauguggaagug

SEQ ID NO: 3256609 - RNA, 20 nt, Human
ugucaguauguggaagugug

SEQ ID NO: 3256610 - RNA, 19 nt, Human
ugucaguauguggaagugu

SEQ ID NO: 3256611 - RNA, 19 nt, Human
aguauguggaagugugggu

SEQ ID NO: 3256612 - RNA, 17 nt, Human
aguauguggaagugugg

SEQ ID NO: 3256613 - RNA, 15 nt, Human
aguauguggaagugu

SEQ ID NO: 3256614 - RNA, 22 nt, Human
uguaauuuaaaauugugaugug

SEQ ID NO: 3256615 - RNA, 21 nt, Human
uguaauuuaaaauugugaugu

SEQ ID NO: 3256616 - RNA, 18 nt, Human
uguagaggagaaacugga

SEQ ID NO: 3256617 - RNA, 16 nt, Human
uguagaggagaaacug

SEQ ID NO: 3256618 - RNA, 20 nt, Human
uguaauuuaaaauugugaug

SEQ ID NO: 3256619 - RNA, 18 nt, Human
uguaauuuaaaauuguga

SEQ ID NO: 3256620 - RNA, 17 nt, Human
uguaauuuaaaauugug

SEQ ID NO: 3256621 - RNA, 23 nt, Human
agguugggagaaugucaguaugu

SEQ ID NO: 3256622 - RNA, 13 nt, Human
uguguguguguau

SEQ ID NO: 3256623 - RNA, 16 nt, Human
uguguguguguaugug

SEQ ID NO: 3256624 - RNA, 21 nt, Human
agugccuguaaucacagcuac

SEQ ID NO: 3256625 - RNA, 16 nt, Human
uguugugugugggagu

SEQ ID NO: 3256626 - RNA, 15 nt, Human
uguugugugugggag

SEQ ID NO: 3256627 - RNA, 14 nt, Human
uguuguguguggga

SEQ ID NO: 3256628 - RNA, 23 nt, Human
agugugggucuguguguguguau

SEQ ID NO: 3256629 - RNA, 19 nt, Human
agugugggucugugugugu

SEQ ID NO: 3256630 - RNA, 15 nt, Human
agugugggucugugu

SEQ ID NO: 3256631 - RNA, 17 nt, Human
agugugggucugugugu

SEQ ID NO: 3256632 - RNA, 16 nt, Human
agugugggucugugug

SEQ ID NO: 3256633 - RNA, 16 nt, Human
uuagccuuugucccag

SEQ ID NO: 3256634 - RNA, 15 nt, Human
auaaauaguuuauga

SEQ ID NO: 3256635 - RNA, 20 nt, Human
uaugugggggucuguguguu

SEQ ID NO: 3256636 - RNA, 19 nt, Human
uaugugggggucugugugu

SEQ ID NO: 3256637 - RNA, 18 nt, Human
uaugugggggucugugug

SEQ ID NO: 3256638 - RNA, 12 nt, Human
ucaauuuaaaaa

SEQ ID NO: 3256639 - RNA, 13 nt, Human
ucaauuuaaaaaa

SEQ ID NO: 3256640 - RNA, 16 nt, Human
ucaguauguggaagug

SEQ ID NO: 3256641 - RNA, 16 nt, Human
acccaaauguucauca

SEQ ID NO: 3256642 - RNA, 22 nt, Human
uccaugaagauguagaggagaa

SEQ ID NO: 3256643 - RNA, 17 nt, Human
acgcucucuggccuucg

SEQ ID NO: 3256644 - RNA, 14 nt, Human
acgcucucuggccu

SEQ ID NO: 3256645 - RNA, 15 nt, Human
acgcucucuggccuu

SEQ ID NO: 3256646 - RNA, 16 nt, Human
acgcucucuggccuuc

SEQ ID NO: 3256647 - RNA, 12 nt, Human
accugagcccca

SEQ ID NO: 3256648 - RNA, 17 nt, Human
accugagccccaaaagg

SEQ ID NO: 3256649 - RNA, 15 nt, Human
ucuaccucuuggcug

SEQ ID NO: 3256650 - RNA, 21 nt, Human
acuugaacccgggaggcagag

SEQ ID NO: 3256651 - RNA, 23 nt, Human
acuugaacccgggaggcagaggu

SEQ ID NO: 3256652 - RNA, 17 nt, Human
agaacucccuuucaaca

SEQ ID NO: 3256653 - RNA, 15 nt, Human
agaacucccuuucaa

SEQ ID NO: 3256654 - RNA, 16 nt, Human
agaacucccuuucaac

SEQ ID NO: 3256655 - RNA, 19 nt, Human
agaagcaacccaaauguuc

SEQ ID NO: 3256656 - RNA, 20 nt, Human
ucugcccauccugccccuga

SEQ ID NO: 3256657 - RNA, 15 nt, Human
agaaacuggaacucu

SEQ ID NO: 3256658 - RNA, 17 nt, Human
agaaagcagaacaguga

SEQ ID NO: 3256659 - RNA, 18 nt, Human
agaaagcagaacagugau

SEQ ID NO: 3256660 - RNA, 20 nt, Human
agaaagcagaacagugauua

SEQ ID NO: 3256661 - RNA, 17 nt, Human
agacaucaacagauaaa

SEQ ID NO: 3256662 - RNA, 18 nt, Human
agacaucaacagauaaau

SEQ ID NO: 3256663 - RNA, 14 nt, Human
agacauagaauuaa

SEQ ID NO: 3256664 - RNA, 21 nt, Human
agacauagaauuaacacauga

SEQ ID NO: 3256665 - RNA, 14 nt, Human
agaaucacuugaac

SEQ ID NO: 3256666 - RNA, 22 nt, Human
ugaaaaaguucugcagauaaac

SEQ ID NO: 3256667 - RNA, 22 nt, Human
agagggacuguucuuuuguccc

SEQ ID NO: 3256668 - RNA, 17 nt, Human
ugacacuuaaaaauggu

SEQ ID NO: 3256669 - RNA, 16 nt, Human
ugacacuuaaaaaugg

SEQ ID NO: 3256670 - RNA, 23 nt, Human
aacccaaauguucaucaaugaau

SEQ ID NO: 3256671 - RNA, 18 nt, Human
aaccugagccccaaaagg

SEQ ID NO: 3256672 - RNA, 20 nt, Human
aaccugagccccaaaaggua

SEQ ID NO: 3256673 - RNA, 18 nt, Human
aaccuugaaaacuuuaug

SEQ ID NO: 3256674 - RNA, 21 nt, Human
gugagaugcuagaacucccuu

SEQ ID NO: 3256675 - RNA, 17 nt, Human
gucaguauguggaagug

SEQ ID NO: 3256676 - RNA, 21 nt, Human
gucaguauguggaaguguggg

SEQ ID NO: 3256677 - RNA, 13 nt, Human
gucaguuguauca

SEQ ID NO: 3256678 - RNA, 16 nt, Human
aacagauaaauaguuu

SEQ ID NO: 3256679 - RNA, 15 nt, Human
aacagugauuaccag

SEQ ID NO: 3256680 - RNA, 22 nt, Human
aacagugauuaccagggacuga

SEQ ID NO: 3256681 - RNA, 15 nt, Human
aaauuuaugugaugg

SEQ ID NO: 3256682 - RNA, 12 nt, Human
aaauuuauguga

SEQ ID NO: 3256683 - RNA, 12 nt, Human
aaauugugaugu

SEQ ID NO: 3256684 - RNA, 15 nt, Human
aaauugugauguguc

SEQ ID NO: 3256685 - RNA, 16 nt, Human
guauauuuuauaucaa

SEQ ID NO: 3256686 - RNA, 23 nt, Human
aagaggaaugaaguacucauaca

SEQ ID NO: 3256687 - RNA, 15 nt, Human
guguguauguggggg

SEQ ID NO: 3256688 - RNA, 13 nt, Human
guguguauguggg

SEQ ID NO: 3256689 - RNA, 20 nt, Human
gugugucacccuuaggccag

SEQ ID NO: 3256690 - RNA, 14 nt, Human
gugugggucugugu

SEQ ID NO: 3256691 - RNA, 12 nt, Human
guguguaugugg

SEQ ID NO: 3256692 - RNA, 13 nt, Human
aagauguagagga

SEQ ID NO: 3256693 - RNA, 19 nt, Human
gugggguagguugggagaa

SEQ ID NO: 3256694 - RNA, 13 nt, Human
uaccucuuggcug

SEQ ID NO: 3256695 - RNA, 19 nt, Human
uaccagggacugaggggag

SEQ ID NO: 3256696 - RNA, 13 nt, Human
aauguucaucaau

SEQ ID NO: 3256697 - RNA, 16 nt, Human
aauguucaucaaugaa

SEQ ID NO: 3256698 - RNA, 20 nt, Human
aauguucaucaaugaaugaa

SEQ ID NO: 3256699 - RNA, 20 nt, Human
uaauuuaaaauugugaugug

SEQ ID NO: 3256700 - RNA, 19 nt, Human
uaauuuaaaauugugaugu

SEQ ID NO: 3256701 - RNA, 16 nt, Human
aaugauuucauucaau

SEQ ID NO: 3256702 - RNA, 17 nt, Human
uacagagacagaaagca

SEQ ID NO: 3256703 - RNA, 15 nt, Human
uaagcaaaaugugau

SEQ ID NO: 3256704 - RNA, 14 nt, Human
uaagcaaaauguga

SEQ ID NO: 3256705 - RNA, 13 nt, Human
uaagaagugaaaa

SEQ ID NO: 3256706 - RNA, 14 nt, Human
uaucagcacgugug

SEQ ID NO: 3256707 - RNA, 19 nt, Human
acagaaagcagaacaguga

SEQ ID NO: 3256708 - RNA, 19 nt, Human
uauaggaauugacccacaa

SEQ ID NO: 3256709 - RNA, 21 nt, Human
uaugguaggaacugcugggcu

SEQ ID NO: 3256710 - RNA, 21 nt, Human
uagacauuugcuaugagcugg

SEQ ID NO: 3256711 - RNA, 16 nt, Human
aauuccacacccucac

SEQ ID NO: 3256712 - RNA, 14 nt, Human
uagaagaagugugu

SEQ ID NO: 3256713 - RNA, 15 nt, Human
uagaacucccuuuca

SEQ ID NO: 3256714 - RNA, 16 nt, Human
uagaacucccuuucaa

SEQ ID NO: 3256715 - RNA, 17 nt, Human
uagaacucccuuucaac

SEQ ID NO: 3256716 - RNA, 13 nt, Human
uaggauguugaaa

SEQ ID NO: 3256717 - RNA, 14 nt, Human
accaucucuuuacc

SEQ ID NO: 3256718 - RNA, 19 nt, Human
accaaggcugauuaaacca

SEQ ID NO: 3256719 - RNA, 21 nt, Human
acagugauuaccagggacuga

SEQ ID NO: 3256720 - RNA, 20 nt, Human
acagugauuaccagggacug

SEQ ID NO: 3256721 - RNA, 23 nt, Human
acagaggacaguauuugugggga

SEQ ID NO: 3256722 - RNA, 11 nt, Human
aauugugaugu

SEQ ID NO: 3256723 - RNA, 15 nt, Human
aauugugaugugucc

SEQ ID NO: 3256724 - RNA, 14 nt, Human
aauugugauguguc

SEQ ID NO: 3256725 - RNA, 15 nt, Human
acaagaaaugaaagc

SEQ ID NO: 3256726 - RNA, 16 nt, Human
acaagaaaugaaagca

SEQ ID NO: 3256727 - RNA, 13 nt, Human
acaagaaaugaaa

SEQ ID NO: 3256728 - RNA, 19 nt, Human
acggacgaaccuugaaaac

SEQ ID NO: 3256729 - RNA, 15 nt, Human
acucugucucagucc

SEQ ID NO: 3256730 - RNA, 12 nt, Human
acuuuaugcuaa

SEQ ID NO: 3256731 - RNA, 17 nt, Human
acuuuaugcuaagugaa

SEQ ID NO: 3256732 - RNA, 22 nt, Human
acuugggaggcugagaugggag

SEQ ID NO: 3256733 - RNA, 13 nt, Human
acuuaaaaauggu

SEQ ID NO: 3256734 - RNA, 14 nt, Human
acuuaaaaaugguu

SEQ ID NO: 3256735 - RNA, 18 nt, Human
aagagaagggcagggcug

SEQ ID NO: 3256736 - RNA, 15 nt, Human
aagcagggacuugaa

SEQ ID NO: 3256737 - RNA, 12 nt, Human
aaguagaggagg

SEQ ID NO: 3256738 - RNA, 10 nt, Human
aauaaaccau

SEQ ID NO: 3256739 - RNA, 17 nt, Human
aaguucugcagauaaac

SEQ ID NO: 3256740 - RNA, 22 nt, Human
aaauugacacuuaaaaaugguu

SEQ ID NO: 3256741 - RNA, 17 nt, Human
aaauguucaucaaugaa

SEQ ID NO: 3256742 - RNA, 20 nt, Human
aaauguucaucaaugaauga

SEQ ID NO: 3256743 - RNA, 21 nt, Human
aaacccugucucuacuaaaaa

SEQ ID NO: 3256744 - RNA, 19 nt, Human
aaaggcagaagcaacccaa

SEQ ID NO: 3256745 - RNA, 13 nt, Human
agaggaaugaagu

SEQ ID NO: 3256746 - RNA, 18 nt, Human
agacucugucucagucca

SEQ ID NO: 3256747 - RNA, 17 nt, Human
agacccaaaaggcagaa

SEQ ID NO: 3256748 - RNA, 19 nt, Human
agacccaaaaggcagaagc

SEQ ID NO: 3256749 - RNA, 21 nt, Human
agaagugaaaaucuacacucc

SEQ ID NO: 3256750 - RNA, 19 nt, Human
agauguagaggagaaacug

SEQ ID NO: 3256751 - RNA, 16 nt, Human
agauguagaggagaaa

SEQ ID NO: 3256752 - RNA, 19 nt, Human
agcuaauucuuugaccugu

SEQ ID NO: 3256753 - RNA, 17 nt, Human
agcgacagugagacucu

SEQ ID NO: 3256754 - RNA, 16 nt, Human
aggaacugcugggcuu

SEQ ID NO: 3256755 - RNA, 22 nt, Human
aggaacugcugggcuuggcagc

SEQ ID NO: 3256756 - RNA, 13 nt, Human
aggaaguagagga

SEQ ID NO: 3256757 - RNA, 15 nt, Human
agggacugaggggag

SEQ ID NO: 3256758 - RNA, 19 nt, Human
agugucaaugcagccccca

SEQ ID NO: 3256759 - RNA, 15 nt, Human
auagcagcuuauuca

SEQ ID NO: 3256760 - RNA, 21 nt, Human
auaagccagacaucaacagau

SEQ ID NO: 3256761 - RNA, 22 nt, Human
auaagccagacaucaacagaua

SEQ ID NO: 3256762 - RNA, 14 nt, Human
auaagccagacauc

SEQ ID NO: 3256763 - RNA, 13 nt, Human
augaaguacucau

SEQ ID NO: 3256764 - RNA, 21 nt, Human
augaaguacucauacauguua

SEQ ID NO: 3256765 - RNA, 16 nt, Human
augaugggucaguugu

SEQ ID NO: 3256766 - RNA, 17 nt, Human
caagccuuggcucuacc

SEQ ID NO: 3256767 - RNA, 20 nt, Human
cacaagaaaugaaagcaggg

SEQ ID NO: 3256768 - RNA, 18 nt, Human
cacaagaaaugaaagcag

SEQ ID NO: 3256769 - RNA, 14 nt, Human
caaauguucaucaa

SEQ ID NO: 3256770 - RNA, 18 nt, Human
caaauguucaucaaugaa

SEQ ID NO: 3256771 - RNA, 15 nt, Human
caagaaaugaaagca

SEQ ID NO: 3256772 - RNA, 17 nt, Human
caagaaaugaaagcagg

SEQ ID NO: 3256773 - RNA, 19 nt, Human
caagaaaugaaagcaggga

SEQ ID NO: 3256774 - RNA, 22 nt, Human
ugaagagaagggcagggcugag

SEQ ID NO: 3256775 - RNA, 20 nt, Human
ugaagagaagggcagggcug

SEQ ID NO: 3256776 - RNA, 15 nt, Human
ugaaugaauggcuaa

SEQ ID NO: 3256777 - RNA, 16 nt, Human
ugaccacugcagaaga

SEQ ID NO: 3256778 - RNA, 17 nt, Human
ugaccacugcagaagac

SEQ ID NO: 3256779 - RNA, 11 nt, Human
ucugugugugu

SEQ ID NO: 3256780 - RNA, 22 nt, Human
ucuucauuaccucagugagaag

SEQ ID NO: 3256781 - RNA, 16 nt, Human
ucuucuuggucucagu

SEQ ID NO: 3256782 - RNA, 14 nt, Human
ucugucucagucca

SEQ ID NO: 3256783 - RNA, 18 nt, Human
ucaguccaugaagaugua

SEQ ID NO: 3256784 - RNA, 20 nt, Human
ucagaucauuaucagccugu

SEQ ID NO: 3256785 - RNA, 19 nt, Human
uccugucccucauccauag

SEQ ID NO: 3256786 - RNA, 15 nt, Human
ucggccuccauccug

SEQ ID NO: 3256787 - RNA, 16 nt, Human
ucggccuccauccuga

SEQ ID NO: 3256788 - RNA, 19 nt, Human
ucuacuaaaaauacaaaaa

SEQ ID NO: 3256789 - RNA, 15 nt, Human
ucuacuaaaaauaca

SEQ ID NO: 3256790 - RNA, 12 nt, Human
ucuacuaaaaau

SEQ ID NO: 3256791 - RNA, 15 nt, Human
uccugaggcuccacu

SEQ ID NO: 3256792 - RNA, 16 nt, Human
uccugaggcuccacuu

SEQ ID NO: 3256793 - RNA, 21 nt, Human
uccugaggcuccacuuggucu

SEQ ID NO: 3256794 - RNA, 20 nt, Human
uggaaugaugggucaguugu

SEQ ID NO: 3256795 - RNA, 11 nt, Human
ugggggaugua

SEQ ID NO: 3256796 - RNA, 15 nt, Human
ugggggucugugugu

SEQ ID NO: 3256797 - RNA, 18 nt, Human
ugggggucuguguguuua

SEQ ID NO: 3256798 - RNA, 21 nt, Human
ugggagugaggaugucugggc

SEQ ID NO: 3256799 - RNA, 18 nt, Human
ugccaggauggaaugaug

SEQ ID NO: 3256800 - RNA, 20 nt, Human
ugccacuaaauugacacuua

SEQ ID NO: 3256801 - RNA, 19 nt, Human
ugcagugagccgagauugu

SEQ ID NO: 3256802 - RNA, 18 nt, Human
ugccuguaaucacagcua

SEQ ID NO: 3256803 - RNA, 14 nt, Human
uguaccucugccuc

SEQ ID NO: 3256804 - RNA, 15 nt, Human
uguaccgcaauguga

SEQ ID NO: 3256805 - RNA, 16 nt, Human
uguaccgcaaugugac

SEQ ID NO: 3256806 - RNA, 22 nt, Human
ugucacccuuaggccagcacca

SEQ ID NO: 3256807 - RNA, 16 nt, Human
ugugccuuuugccauc

SEQ ID NO: 3256808 - RNA, 17 nt, Human
ugugccuuggugugcug

SEQ ID NO: 3256809 - RNA, 18 nt, Human
uguguaauuuaaaauugu

SEQ ID NO: 3256810 - RNA, 11 nt, Human
uguguaauuua

SEQ ID NO: 3256811 - RNA, 23 nt, Human
uguguaauuuaaaauugugaugu

SEQ ID NO: 3256812 - RNA, 22 nt, Human
uguguaauuuaaaauugugaug

SEQ ID NO: 3256813 - RNA, 19 nt, Human
uguguaauuuaaaauugug

SEQ ID NO: 3256814 - RNA, 15 nt, Human
uguggaagugugggu

SEQ ID NO: 3256815 - RNA, 15 nt, Human
ugugggaguguguaa

SEQ ID NO: 3256816 - RNA, 14 nt, Human
ugugggagugugua

SEQ ID NO: 3256817 - RNA, 16 nt, Human
uguucuuuugucccag

SEQ ID NO: 3256818 - RNA, 16 nt, Human
ugugugggagugugua

SEQ ID NO: 3256819 - RNA, 12 nt, Human
uguguauguggg

SEQ ID NO: 3256820 - RNA, 11 nt, Human
uguguaugugg

SEQ ID NO: 3256821 - RNA, 15 nt, Human
ugugugggagugugu

SEQ ID NO: 3256822 - RNA, 14 nt, Human
ugugugggagugug

SEQ ID NO: 3256823 - RNA, 22 nt, Human
uuaaaaaaaaaccugagcccca

SEQ ID NO: 3256824 - RNA, 22 nt, Human
uaagugccaggauggaaugaug

SEQ ID NO: 3256825 - RNA, 13 nt, Human
uaagugaaauaag

SEQ ID NO: 3256826 - RNA, 13 nt, Human
uaaauuuauguga

SEQ ID NO: 3256827 - RNA, 20 nt, Human
uaaauugacacuuaaaaaug

SEQ ID NO: 3256828 - RNA, 22 nt, Human
guugugugugggaguguguaau

SEQ ID NO: 3256829 - RNA, 16 nt, Human
guugugugugggagug

SEQ ID NO: 3256830 - RNA, 14 nt, Human
guugugugugggag

SEQ ID NO: 3256831 - RNA, 13 nt, Human
guuguguguggga

SEQ ID NO: 3256832 - RNA, 12 nt, Human
guuguguguggg

SEQ ID NO: 3256833 - RNA, 16 nt, Human
guuuagaagaagugug

SEQ ID NO: 3256834 - RNA, 17 nt, Human
guuuagaaagcuugccc

SEQ ID NO: 3256835 - RNA, 15 nt, Human
uaaaaaugguuuaaa

SEQ ID NO: 3256836 - RNA, 18 nt, Human
uaaaaaugguuuaaaugg

SEQ ID NO: 3256837 - RNA, 19 nt, Human
uaaaaaugguuuaaauggu

SEQ ID NO: 3256838 - RNA, 20 nt, Human
uauauuuguaaauuuaugug

SEQ ID NO: 3256839 - RNA, 21 nt, Human
uauauuuuuuguuaaaugauu

SEQ ID NO: 3256840 - RNA, 19 nt, Human
uauauuuuuuguuaaauga

SEQ ID NO: 3256841 - RNA, 14 nt, Human
uaucaaaagaaaga

SEQ ID NO: 3256842 - RNA, 22 nt, Human
uauaaacaugcuugcauuauau

SEQ ID NO: 3256843 - RNA, 15 nt, Human
uagaauuaacacaug

SEQ ID NO: 3256844 - RNA, 16 nt, Human
uagaauuaacacauga

SEQ ID NO: 3256845 - RNA, 18 nt, Human
uagaauuaacacaugauc

SEQ ID NO: 3256846 - RNA, 14 nt, Human
uacacuccagugag

SEQ ID NO: 3256847 - RNA, 22 nt, Human
uaccuaacgaaguauccuucag

SEQ ID NO: 3256848 - RNA, 20 nt, Human
guguaauuuaaaauugugau

SEQ ID NO: 3256849 - RNA, 23 nt, Human
guguaauuuaaaauugugaugug

SEQ ID NO: 3256850 - RNA, 22 nt, Human
guguaauuuaaaauugugaugu

SEQ ID NO: 3256851 - RNA, 17 nt, Human
guggcuggaucugugag

SEQ ID NO: 3256852 - RNA, 17 nt, Human
guguguuguguguggga

SEQ ID NO: 3256853 - RNA, 14 nt, Human
guguguugugugug

SEQ ID NO: 3256854 - RNA, 12 nt, Human
guguguugugug

SEQ ID NO: 3256855 - RNA, 15 nt, Human
guguguuuaugugug

SEQ ID NO: 3256856 - RNA, 14 nt, Human
guguguuuaugugu

SEQ ID NO: 3256857 - RNA, 16 nt, Human
guguguuuaugugugu

SEQ ID NO: 3256858 - RNA, 17 nt, Human
gugugggaguguguaau

SEQ ID NO: 3256859 - RNA, 16 nt, Human
guucaucaaugaauga

SEQ ID NO: 3256860 - RNA, 15 nt, Human
gucugugagaugcua

SEQ ID NO: 3256861 - RNA, 16 nt, Human
gucugugagaugcuag

SEQ ID NO: 3256862 - RNA, 17 nt, Human
gucugugagaugcuaga

SEQ ID NO: 3256863 - RNA, 21 nt, Human
gucugugagaugcuagaacuc

SEQ ID NO: 3256864 - RNA, 22 nt, Human
gucugugagaugcuagaacucc

SEQ ID NO: 3256865 - RNA, 23 nt, Human
gucugugagaugcuagaacuccc

SEQ ID NO: 3256866 - RNA, 22 nt, Human
gucuguguguuuaugugugugu

SEQ ID NO: 3256867 - RNA, 21 nt, Human
gucuguguguuuaugugugug

SEQ ID NO: 3256868 - RNA, 11 nt, Human
gucuguguguu

SEQ ID NO: 3256869 - RNA, 20 nt, Human
gucuguguguguguaugugg

SEQ ID NO: 3256870 - RNA, 16 nt, Human
gucuguguguguguau

SEQ ID NO: 3256871 - RNA, 12 nt, Human
gucugugugugu

SEQ ID NO: 3256872 - RNA, 11 nt, Human
gucugugugug

SEQ ID NO: 3256873 - RNA, 21 nt, Human
gugacuauggagcugagcagg

SEQ ID NO: 3256874 - RNA, 21 nt, Human
gugaacaaauuuacagagaca

SEQ ID NO: 3256875 - RNA, 21 nt, Human
gugccaggauggaaugauggg

SEQ ID NO: 3256876 - RNA, 14 nt, Human
gugccuuuugccau

SEQ ID NO: 3256877 - RNA, 14 nt, Human
guagguugggagaa

SEQ ID NO: 3256878 - RNA, 16 nt, Human
gucccugaagagaagg

SEQ ID NO: 3256879 - RNA, 15 nt, Human
gucaaugcagccccc

SEQ ID NO: 3256880 - RNA, 13 nt, Human
guauuuuaaucac

SEQ ID NO: 3256881 - RNA, 22 nt, Human
uuuccucaaaacuucagacaua

SEQ ID NO: 3256882 - RNA, 16 nt, Human
cuacacuccagugaga

SEQ ID NO: 3256883 - RNA, 17 nt, Human
cuacacuccagugagac

SEQ ID NO: 3256884 - RNA, 15 nt, Human
cuaagcaaaauguga

SEQ ID NO: 3256885 - RNA, 18 nt, Human
cuaagcaaaaugugauau

SEQ ID NO: 3256886 - RNA, 14 nt, Human
cuaagcaaaaugug

SEQ ID NO: 3256887 - RNA, 15 nt, Human
cuacuugggaggcug

SEQ ID NO: 3256888 - RNA, 18 nt, Human
cuacuugggaggcugaga

SEQ ID NO: 3256889 - RNA, 19 nt, Human
cuacuugggaggcugagau

SEQ ID NO: 3256890 - RNA, 22 nt, Human
cuauauuuuuuguuaaaugauu

SEQ ID NO: 3256891 - RNA, 20 nt, Human
cuauauuuuuuguuaaauga

SEQ ID NO: 3256892 - RNA, 23 nt, Human
cuaguaucaaaagaaagaaaauc

SEQ ID NO: 3256893 - RNA, 15 nt, Human
cuaguaucaaaagaa

SEQ ID NO: 3256894 - RNA, 17 nt, Human
cuaguaucaaaagaaag

SEQ ID NO: 3256895 - RNA, 23 nt, Human
cuaaauugacacuuaaaaauggu

SEQ ID NO: 3256896 - RNA, 15 nt, Human
cgggucaucuguacc

SEQ ID NO: 3256897 - RNA, 22 nt, Human
cgggucaucuguaccucugccu

SEQ ID NO: 3256898 - RNA, 12 nt, Human
cggccuccaucc

SEQ ID NO: 3256899 - RNA, 14 nt, Human
cgcucucuggccuu

SEQ ID NO: 3256900 - RNA, 15 nt, Human
cgcucucuggccuuc

SEQ ID NO: 3256901 - RNA, 12 nt, Human
cucuggccuucg

SEQ ID NO: 3256902 - RNA, 16 nt, Human
cugagcgacagugaga

SEQ ID NO: 3256903 - RNA, 20 nt, Human
cugagcgacagugagacucu

SEQ ID NO: 3256904 - RNA, 18 nt, Human
cuccauccugaggcucca

SEQ ID NO: 3256905 - RNA, 14 nt, Human
cuccauccugaggc

SEQ ID NO: 3256906 - RNA, 16 nt, Human
cuccauccugaggcuc

SEQ ID NO: 3256907 - RNA, 14 nt, Human
cuguaccucugccu

SEQ ID NO: 3256908 - RNA, 18 nt, Human
cugucucuacuaaaaaua

SEQ ID NO: 3256909 - RNA, 16 nt, Human
cuggccuucggccucc

SEQ ID NO: 3256910 - RNA, 17 nt, Human
cuggccuucggccucca

SEQ ID NO: 3256911 - RNA, 18 nt, Human
cuggccuucggccuccau

SEQ ID NO: 3256912 - RNA, 15 nt, Human
cuggccuucggccuc

SEQ ID NO: 3256913 - RNA, 13 nt, Human
gaagaaguguguc

SEQ ID NO: 3256914 - RNA, 15 nt, Human
gaacucccuuucaac

SEQ ID NO: 3256915 - RNA, 16 nt, Human
gaacucccuuucaaca

SEQ ID NO: 3256916 - RNA, 13 nt, Human
gaaagcagaacag

SEQ ID NO: 3256917 - RNA, 21 nt, Human
gaaagcuugcccuggugccuc

SEQ ID NO: 3256918 - RNA, 19 nt, Human
cuugaacccgggaggcaga

SEQ ID NO: 3256919 - RNA, 14 nt, Human
cuugaacccgggag

SEQ ID NO: 3256920 - RNA, 21 nt, Human
cuugcaugguuuagaaagcuu

SEQ ID NO: 3256921 - RNA, 17 nt, Human
gaccuuuccugaggaag

SEQ ID NO: 3256922 - RNA, 22 nt, Human
gacccacaagaaaugaaagcag

SEQ ID NO: 3256923 - RNA, 19 nt, Human
gagagugaacaaauuuaca

SEQ ID NO: 3256924 - RNA, 15 nt, Human
gagagugaacaaauu

SEQ ID NO: 3256925 - RNA, 15 nt, Human
gagacagcucugcau

SEQ ID NO: 3256926 - RNA, 13 nt, Human
gagacagcucugc

SEQ ID NO: 3256927 - RNA, 22 nt, Human
gagaagccagcuuuccucauca

SEQ ID NO: 3256928 - RNA, 14 nt, Human
gaucauuaucagcc

SEQ ID NO: 3256929 - RNA, 22 nt, Human
gauaaauaguuuaugauuccac

SEQ ID NO: 3256930 - RNA, 21 nt, Human
gaucugugaggggcucucuca

SEQ ID NO: 3256931 - RNA, 21 nt, Human
gauggcuaguaucaaaagaaa

SEQ ID NO: 3256932 - RNA, 20 nt, Human
gauuuggggcucagaguggg

SEQ ID NO: 3256933 - RNA, 18 nt, Human
gcauuauauuuguaaauu

SEQ ID NO: 3256934 - RNA, 18 nt, Human
gcagauaaacaguaguga

SEQ ID NO: 3256935 - RNA, 20 nt, Human
gcagccccgugggguuccuc

SEQ ID NO: 3256936 - RNA, 12 nt, Human
gcgacagugaga

SEQ ID NO: 3256937 - RNA, 19 nt, Human
gcuagaacucccuuucaac

SEQ ID NO: 3256938 - RNA, 18 nt, Human
gcuagaacucccuuucaa

SEQ ID NO: 3256939 - RNA, 19 nt, Human
gccucucauuccagaggaa

SEQ ID NO: 3256940 - RNA, 20 nt, Human
gccucucauuccagaggaag

SEQ ID NO: 3256941 - RNA, 20 nt, Human
gccgggcgugguggugagug

SEQ ID NO: 3256942 - RNA, 21 nt, Human
gccaucauguuuacagaggac

SEQ ID NO: 3256943 - RNA, 17 nt, Human
gccaucauguuuacaga

SEQ ID NO: 3256944 - RNA, 18 nt, Human
caucaaugaaugaaugaa

SEQ ID NO: 3256945 - RNA, 16 nt, Human
caguggcuggaucugu

SEQ ID NO: 3256946 - RNA, 20 nt, Human
caguggcuggaucugugagg

SEQ ID NO: 3256947 - RNA, 18 nt, Human
caguggcuggaucuguga

SEQ ID NO: 3256948 - RNA, 14 nt, Human
cagugucaaugcag

SEQ ID NO: 3256949 - RNA, 18 nt, Human
cauaaucacaacccuuca

SEQ ID NO: 3256950 - RNA, 15 nt, Human
cauaccuggcccugu

SEQ ID NO: 3256951 - RNA, 19 nt, Human
cauggggcugauuguauuu

SEQ ID NO: 3256952 - RNA, 17 nt, Human
caugggacagggaggac

SEQ ID NO: 3256953 - RNA, 22 nt, Human
cauuaccucagugagaagccag

SEQ ID NO: 3256954 - RNA, 21 nt, Human
cauuaccucagugagaagcca

SEQ ID NO: 3256955 - RNA, 19 nt, Human
ccaaggcugauuaaaccaa

SEQ ID NO: 3256956 - RNA, 20 nt, Human
ccaauauucauagcagcuua

SEQ ID NO: 3256957 - RNA, 16 nt, Human
ccacaagaaaugaaag

SEQ ID NO: 3256958 - RNA, 22 nt, Human
ccacaagaaaugaaagcaggga

SEQ ID NO: 3256959 - RNA, 18 nt, Human
ccaaggcuagaaccaccu

SEQ ID NO: 3256960 - RNA, 22 nt, Human
ccaucauguuuacagaggacag

SEQ ID NO: 3256961 - RNA, 20 nt, Human
ccaucauguuuacagaggac

SEQ ID NO: 3256962 - RNA, 15 nt, Human
ccauccugaggcucc

SEQ ID NO: 3256963 - RNA, 18 nt, Human
cccagaaugccuccugca

SEQ ID NO: 3256964 - RNA, 23 nt, Human
ccauggcacucuauguucuaaga

SEQ ID NO: 3256965 - RNA, 21 nt, Human
cccagcuaugguucucucgca

SEQ ID NO: 3256966 - RNA, 20 nt, Human
cccugccaucauguuuacag

SEQ ID NO: 3256967 - RNA, 12 nt, Human
ccuccauccuga

SEQ ID NO: 3256968 - RNA, 13 nt, Human
ccuccauccugag

SEQ ID NO: 3256969 - RNA, 13 nt, Human
aaauguucaucaa

SEQ ID NO: 3256970 - RNA, 17 nt, Human
aaaagaaagaaaaucag

SEQ ID NO: 3256971 - RNA, 21 nt, Human
acccugucucuacuaaaaaua

SEQ ID NO: 3256972 - RNA, 21 nt, Human
acuucagacauagaauuaaca

SEQ ID NO: 3256973 - RNA, 12 nt, Human
acuucagacaua

SEQ ID NO: 3256974 - RNA, 22 nt, Human
acuuaaaaaugguuuaaauggu

SEQ ID NO: 3256975 - RNA, 21 nt, Human
acuuaaaaaugguuuaaaugg

SEQ ID NO: 3256976 - RNA, 14 nt, Human
acucccuuucaaca

SEQ ID NO: 3256977 - RNA, 13 nt, Human
acucccuuucaac

SEQ ID NO: 3256978 - RNA, 15 nt, Human
acaccaauauucaua

SEQ ID NO: 3256979 - RNA, 19 nt, Human
acagugauuaccagggacu

SEQ ID NO: 3256980 - RNA, 22 nt, Human
agaacagugauuaccagggacu

SEQ ID NO: 3256981 - RNA, 13 nt, Human
agcaucucccagu

SEQ ID NO: 3256982 - RNA, 19 nt, Human
agagugggguagguuggga

SEQ ID NO: 3256983 - RNA, 22 nt, Human
agggauuuggggcucagagugg

SEQ ID NO: 3256984 - RNA, 20 nt, Human
aggcagagguugcagugagc

SEQ ID NO: 3256985 - RNA, 13 nt, Human
aggaugucugggc

SEQ ID NO: 3256986 - RNA, 13 nt, Human
agcgacagugaga

SEQ ID NO: 3256987 - RNA, 15 nt, Human
agcgacagugagacu

SEQ ID NO: 3256988 - RNA, 13 nt, Human
agugauuaccagg

SEQ ID NO: 3256989 - RNA, 13 nt, Human
aguacucauacau

SEQ ID NO: 3256990 - RNA, 15 nt, Human
augggacagggagga

SEQ ID NO: 3256991 - RNA, 14 nt, Human
aucaaaagaaagaa

SEQ ID NO: 3256992 - RNA, 11 nt, Human
cuucagacaua

SEQ ID NO: 3256993 - RNA, 17 nt, Human
cugcacuccagccugag

SEQ ID NO: 3256994 - RNA, 20 nt, Human
cugcacuccagccugagcga

SEQ ID NO: 3256995 - RNA, 16 nt, Human
cugcacuccagccuga

SEQ ID NO: 3256996 - RNA, 13 nt, Human
cuggcccugugcc

SEQ ID NO: 3256997 - RNA, 12 nt, Human
cuggugccucac

SEQ ID NO: 3256998 - RNA, 21 nt, Human
cuggugccucaccccuugcca

SEQ ID NO: 3256999 - RNA, 14 nt, Human
cuggaucugugagg

SEQ ID NO: 3257000 - RNA, 18 nt, Human
gagucagggagagcugaa

SEQ ID NO: 3257001 - RNA, 19 nt, Human
gaggcuccacuuggucugu

SEQ ID NO: 3257002 - RNA, 18 nt, Human
gaggcuccacuuggucug

SEQ ID NO: 3257003 - RNA, 23 nt, Human
gaggcuccacuuggucugugaga

SEQ ID NO: 3257004 - RNA, 15 nt, Human
gaggacgcucucugg

SEQ ID NO: 3257005 - RNA, 17 nt, Human
gauguagaggagaaacu

SEQ ID NO: 3257006 - RNA, 18 nt, Human
gauguagaggagaaacug

SEQ ID NO: 3257007 - RNA, 16 nt, Human
gacgcucucuggccuu

SEQ ID NO: 3257008 - RNA, 15 nt, Human
gacgcucucuggccu

SEQ ID NO: 3257009 - RNA, 21 nt, Human
gacagugagacucugucucag

SEQ ID NO: 3257010 - RNA, 21 nt, Human
gacagaaagcagaacagugau

SEQ ID NO: 3257011 - RNA, 19 nt, Human
gaacccgggaggcagaggu

SEQ ID NO: 3257012 - RNA, 20 nt, Human
gaacugcugggcuuggcagc

SEQ ID NO: 3257013 - RNA, 17 nt, Human
gaacugcugggcuuggc

SEQ ID NO: 3257014 - RNA, 23 nt, Human
gaagcaacccaaauguucaucaa

SEQ ID NO: 3257015 - RNA, 24 nt, Human
gaagugugggucugugugugugua

SEQ ID NO: 3257016 - RNA, 21 nt, Human
gaagugugggucugugugugu

SEQ ID NO: 3257017 - RNA, 19 nt, Human
gaagugugggucugugugu

SEQ ID NO: 3257018 - RNA, 22 nt, Human
gccagacaucaacagauaaaua

SEQ ID NO: 3257019 - RNA, 19 nt, Human
gcuauggggauagaugugu

SEQ ID NO: 3257020 - RNA, 21 nt, Human
gcuauggggauagaugugugg

SEQ ID NO: 3257021 - RNA, 16 nt, Human
gcuaguaucaaaagaa

SEQ ID NO: 3257022 - RNA, 14 nt, Human
gcuggagcucugcc

SEQ ID NO: 3257023 - RNA, 17 nt, Human
gcuggagcucugcccau

SEQ ID NO: 3257024 - RNA, 16 nt, Human
ggccuccauccugagg

SEQ ID NO: 3257025 - RNA, 13 nt, Human
ggaugucugggcc

SEQ ID NO: 3257026 - RNA, 22 nt, Human
ggauguugaaaaaguucugcag

SEQ ID NO: 3257027 - RNA, 15 nt, Human
ggaggcugagauggg

SEQ ID NO: 3257028 - RNA, 19 nt, Human
ggaggcugagaugggagaa

SEQ ID NO: 3257029 - RNA, 17 nt, Human
ggcuggaucugugaggg

SEQ ID NO: 3257030 - RNA, 17 nt, Human
gggauuguaaaauggug

SEQ ID NO: 3257031 - RNA, 21 nt, Human
aaaacuuuaugcuaagugaaa

SEQ ID NO: 3257032 - RNA, 20 nt, Human
gggaggcagagguugcagug

SEQ ID NO: 3257033 - RNA, 11 nt, Human
gggaggcagag

SEQ ID NO: 3257034 - RNA, 16 nt, Human
aaaauugugauguguc

SEQ ID NO: 3257035 - RNA, 14 nt, Human
ggucugugagaugc

SEQ ID NO: 3257036 - RNA, 22 nt, Human
cucucuggccuucggccuccau

SEQ ID NO: 3257037 - RNA, 14 nt, Human
cucucuggccuucg

SEQ ID NO: 3257038 - RNA, 16 nt, Human
cucucuggccuucggc

SEQ ID NO: 3257039 - RNA, 13 nt, Human
cucucuggccuuc

SEQ ID NO: 3257040 - RNA, 23 nt, Human
cucaugauagaaggcuaugggga

SEQ ID NO: 3257041 - RNA, 16 nt, Human
cucaguccaugaagau

SEQ ID NO: 3257042 - RNA, 23 nt, Human
cucaggccgaaggaggagucagg

SEQ ID NO: 3257043 - RNA, 20 nt, Human
cucaggccugacucucagca

SEQ ID NO: 3257044 - RNA, 18 nt, Human
cuauguucuaagaaguga

SEQ ID NO: 3257045 - RNA, 23 nt, Human
cuaugucauuugcuggagcucug

SEQ ID NO: 3257046 - RNA, 20 nt, Human
cuaacgaaguauccuucagc

SEQ ID NO: 3257047 - RNA, 18 nt, Human
cgcucucuggccuucggc

SEQ ID NO: 3257048 - RNA, 17 nt, Human
ccuucucuucacaguca

SEQ ID NO: 3257049 - RNA, 20 nt, Human
ccacuuggucugugagaugc

SEQ ID NO: 3257050 - RNA, 22 nt, Human
ccacuuggucugugagaugcua

SEQ ID NO: 3257051 - RNA, 15 nt, Human
ccacuuggucuguga

SEQ ID NO: 3257052 - RNA, 16 nt, Human
ccacuuggucugugag

SEQ ID NO: 3257053 - RNA, 17 nt, Human
ccacuuggucugugaga

SEQ ID NO: 3257054 - RNA, 19 nt, Human
ccacuuggucugugagaug

SEQ ID NO: 3257055 - RNA, 12 nt, Human
ccacuuggucug

SEQ ID NO: 3257056 - RNA, 15 nt, Human
ccccauuguggucac

SEQ ID NO: 3257057 - RNA, 13 nt, Human
ccauugguguuga

SEQ ID NO: 3257058 - RNA, 22 nt, Human
ccauuguggucacaggaaguag

SEQ ID NO: 3257059 - RNA, 15 nt, Human
ccucuuggcugccuu

SEQ ID NO: 3257060 - RNA, 15 nt, Human
ccuaacgaaguaucc

SEQ ID NO: 3257061 - RNA, 20 nt, Human
ccuaacgaaguauccuucag

SEQ ID NO: 3257062 - RNA, 16 nt, Human
cacuccagugagacag

SEQ ID NO: 3257063 - RNA, 21 nt, Human
cacuccagugagacagcucug

SEQ ID NO: 3257064 - RNA, 21 nt, Human
caaaagguauuuuaaucacca

SEQ ID NO: 3257065 - RNA, 17 nt, Human
auucauggccuggggga

SEQ ID NO: 3257066 - RNA, 17 nt, Human
caucuguaccucugccu

SEQ ID NO: 3257067 - RNA, 18 nt, Human
cauccugaggcuccacuu

SEQ ID NO: 3257068 - RNA, 19 nt, Human
cauccugaggcuccacuug

SEQ ID NO: 3257069 - RNA, 19 nt, Human
cauagcagcuuauucacaa

SEQ ID NO: 3257070 - RNA, 22 nt, Human
cagugauuaccagggacugagg

SEQ ID NO: 3257071 - RNA, 14 nt, Human
ccaaaaggcagaag

SEQ ID NO: 3257072 - RNA, 17 nt, Human
cagcacguguggccugu

SEQ ID NO: 3257073 - RNA, 17 nt, Human
cagcuuauucacaagac

SEQ ID NO: 3257074 - RNA, 12 nt, Human
uugugauguguc

SEQ ID NO: 3257075 - RNA, 18 nt, Human
augaguuggcugggaaua

SEQ ID NO: 3257076 - RNA, 15 nt, Human
augagguacugagag

SEQ ID NO: 3257077 - RNA, 17 nt, Human
augagguacugagagug

SEQ ID NO: 3257078 - RNA, 18 nt, Human
augagguacugagaguga

SEQ ID NO: 3257079 - RNA, 13 nt, Human
augauuucauuca

SEQ ID NO: 3257080 - RNA, 22 nt, Human
aucugugaggggcucucucaug

SEQ ID NO: 3257081 - RNA, 21 nt, Human
aucugugaggggcucucucau

SEQ ID NO: 3257082 - RNA, 19 nt, Human
uuguaaauuuaugugaugg

SEQ ID NO: 3257083 - RNA, 23 nt, Human
aucauguuuacagaggacaguau

SEQ ID NO: 3257084 - RNA, 18 nt, Human
aucauguuuacagaggac

SEQ ID NO: 3257085 - RNA, 20 nt, Human
auauuuguaaauuuauguga

SEQ ID NO: 3257086 - RNA, 21 nt, Human
auaggaauugacccacaagaa

SEQ ID NO: 3257087 - RNA, 19 nt, Human
auguauauuuuauaucaau

SEQ ID NO: 3257088 - RNA, 23 nt, Human
uuugaccuguugggagugaggau

SEQ ID NO: 3257089 - RNA, 17 nt, Human
auguauauaaacaugcu

SEQ ID NO: 3257090 - RNA, 20 nt, Human
uuugcuggagcucugcccau

SEQ ID NO: 3257091 - RNA, 23 nt, Human
auguguguguguuguguguggga

SEQ ID NO: 3257092 - RNA, 22 nt, Human
auguguguguguuguguguggg

SEQ ID NO: 3257093 - RNA, 18 nt, Human
auguguguguguugugug

SEQ ID NO: 3257094 - RNA, 15 nt, Human
auuuaaaauugugau

SEQ ID NO: 3257095 - RNA, 18 nt, Human
auuguagagccagagguc

SEQ ID NO: 3257096 - RNA, 17 nt, Human
auuguagagccagaggu

SEQ ID NO: 3257097 - RNA, 17 nt, Human
auuuaaaaaaaaaccug

SEQ ID NO: 3257098 - RNA, 15 nt, Human
ugaugggucaguugu

SEQ ID NO: 3257099 - RNA, 19 nt, Human
ugcauacucauuaggaugg

SEQ ID NO: 3257100 - RNA, 13 nt, Human
ugcauacucauua

SEQ ID NO: 3257101 - RNA, 19 nt, Human
agccugagcgacagugaga

SEQ ID NO: 3257102 - RNA, 13 nt, Human
ugccauaauuacu

SEQ ID NO: 3257103 - RNA, 15 nt, Human
ugcacuccagccuga

SEQ ID NO: 3257104 - RNA, 22 nt, Human
ugcagaagacaguauggcagcu

SEQ ID NO: 3257105 - RNA, 17 nt, Human
ugcacuccagccugagc

SEQ ID NO: 3257106 - RNA, 13 nt, Human
ugauuucauucaa

SEQ ID NO: 3257107 - RNA, 16 nt, Human
ugcuaugagcugggga

SEQ ID NO: 3257108 - RNA, 20 nt, Human
ugcuaugagcuggggauguc

SEQ ID NO: 3257109 - RNA, 19 nt, Human
ugcuaugagcuggggaugu

SEQ ID NO: 3257110 - RNA, 22 nt, Human
ugcuaugagcuggggaugucuc

SEQ ID NO: 3257111 - RNA, 16 nt, Human
ugccuuggugugcugu

SEQ ID NO: 3257112 - RNA, 20 nt, Human
agcuugcccuggugccucac

SEQ ID NO: 3257113 - RNA, 18 nt, Human
aggagaaacuggaacucu

SEQ ID NO: 3257114 - RNA, 19 nt, Human
aggagaaacuggaacucuc

SEQ ID NO: 3257115 - RNA, 17 nt, Human
aggagaaacuggaacuc

SEQ ID NO: 3257116 - RNA, 13 nt, Human
aggacgcucucug

SEQ ID NO: 3257117 - RNA, 14 nt, Human
aggacgcucucugg

SEQ ID NO: 3257118 - RNA, 16 nt, Human
aggacgcucucuggcc

SEQ ID NO: 3257119 - RNA, 17 nt, Human
aggacgcucucuggccu

SEQ ID NO: 3257120 - RNA, 19 nt, Human
aggacgcucucuggccuuc

SEQ ID NO: 3257121 - RNA, 20 nt, Human
aggacgcucucuggccuucg

SEQ ID NO: 3257122 - RNA, 20 nt, Human
aggcauuuaggccaugggac

SEQ ID NO: 3257123 - RNA, 23 nt, Human
agguuuguuuagaagaagugugu

SEQ ID NO: 3257124 - RNA, 12 nt, Human
uguauguggggg

SEQ ID NO: 3257125 - RNA, 18 nt, Human
aggggagcaugggaagug

SEQ ID NO: 3257126 - RNA, 14 nt, Human
uggggagggauuug

SEQ ID NO: 3257127 - RNA, 22 nt, Human
uggggagggauuuggggcucag

SEQ ID NO: 3257128 - RNA, 15 nt, Human
uggggcucagagugg

SEQ ID NO: 3257129 - RNA, 22 nt, Human
ugggagaaugucaguaugugga

SEQ ID NO: 3257130 - RNA, 20 nt, Human
ugggagaaugucaguaugug

SEQ ID NO: 3257131 - RNA, 19 nt, Human
ugggagaaugucaguaugu

SEQ ID NO: 3257132 - RNA, 23 nt, Human
agggaggacgcucucuggccuuc

SEQ ID NO: 3257133 - RNA, 21 nt, Human
agggaggacgcucucuggccu

SEQ ID NO: 3257134 - RNA, 22 nt, Human
agggaggacgcucucuggccuu

SEQ ID NO: 3257135 - RNA, 21 nt, Human
aguucugcagauaaacaguag

SEQ ID NO: 3257136 - RNA, 16 nt, Human
aguucugcagauaaac

SEQ ID NO: 3257137 - RNA, 13 nt, Human
uguuuaugugugu

SEQ ID NO: 3257138 - RNA, 16 nt, Human
uguuuaugugugugug

SEQ ID NO: 3257139 - RNA, 18 nt, Human
uuaaaauugugauguguc

SEQ ID NO: 3257140 - RNA, 13 nt, Human
uuaaaauugugau

SEQ ID NO: 3257141 - RNA, 15 nt, Human
uuagaagaagugugu

SEQ ID NO: 3257142 - RNA, 14 nt, Human
uuagaagaagugug

SEQ ID NO: 3257143 - RNA, 16 nt, Human
uuagaagaaguguguc

SEQ ID NO: 3257144 - RNA, 15 nt, Human
ugugagaugcuagaa

SEQ ID NO: 3257145 - RNA, 19 nt, Human
ugugagaugcuagaacucc

SEQ ID NO: 3257146 - RNA, 16 nt, Human
agugaacaaauuuaca

SEQ ID NO: 3257147 - RNA, 14 nt, Human
uguguguguaugug

SEQ ID NO: 3257148 - RNA, 20 nt, Human
ugugugugggaguguguaau

SEQ ID NO: 3257149 - RNA, 12 nt, Human
ugugugugggag

SEQ ID NO: 3257150 - RNA, 20 nt, Human
ugugggucugugugugugua

SEQ ID NO: 3257151 - RNA, 20 nt, Human
uguggucacaggaaguagag

SEQ ID NO: 3257152 - RNA, 16 nt, Human
uauuuguaaauuuaug

SEQ ID NO: 3257153 - RNA, 22 nt, Human
uauuuguaaauuuaugugaugg

SEQ ID NO: 3257154 - RNA, 17 nt, Human
uauuuguaaauuuaugu

SEQ ID NO: 3257155 - RNA, 18 nt, Human
ucaaaagaaagaaaauca

SEQ ID NO: 3257156 - RNA, 19 nt, Human
acaugauccugcaauucca

SEQ ID NO: 3257157 - RNA, 14 nt, Human
acauagaauuaaca

SEQ ID NO: 3257158 - RNA, 18 nt, Human
acauagaauuaacacaug

SEQ ID NO: 3257159 - RNA, 13 nt, Human
acaucaacagaua

SEQ ID NO: 3257160 - RNA, 19 nt, Human
uccauccugaggcuccacu

SEQ ID NO: 3257161 - RNA, 20 nt, Human
uccauccugaggcuccacuu

SEQ ID NO: 3257162 - RNA, 21 nt, Human
uccauccugaggcuccacuug

SEQ ID NO: 3257163 - RNA, 13 nt, Human
uccaugaagaugu

SEQ ID NO: 3257164 - RNA, 21 nt, Human
uccaugaagauguagaggaga

SEQ ID NO: 3257165 - RNA, 21 nt, Human
ucucuggccuucggccuccau

SEQ ID NO: 3257166 - RNA, 22 nt, Human
ucucuggccuucggccuccauc

SEQ ID NO: 3257167 - RNA, 12 nt, Human
ucucuggccuuc

SEQ ID NO: 3257168 - RNA, 16 nt, Human
ucucauuccagaggaa

SEQ ID NO: 3257169 - RNA, 21 nt, Human
acuugaacccauauuuguaca

SEQ ID NO: 3257170 - RNA, 19 nt, Human
acuugaacccgggaggcag

SEQ ID NO: 3257171 - RNA, 20 nt, Human
acuugaacccgggaggcaga

SEQ ID NO: 3257172 - RNA, 23 nt, Human
acuggccaguggcuggaucugug

SEQ ID NO: 3257173 - RNA, 15 nt, Human
agagguugcagugag

SEQ ID NO: 3257174 - RNA, 19 nt, Human
ugaacaaauuuacagagac

SEQ ID NO: 3257175 - RNA, 20 nt, Human
ugaacaaauuuacagagaca

SEQ ID NO: 3257176 - RNA, 18 nt, Human
ugaacaaauuuacagaga

SEQ ID NO: 3257177 - RNA, 14 nt, Human
ugaaauaagccaga

SEQ ID NO: 3257178 - RNA, 17 nt, Human
ugaaauaagccagacau

SEQ ID NO: 3257179 - RNA, 18 nt, Human
ugaaauaagccagacauc

SEQ ID NO: 3257180 - RNA, 20 nt, Human
ugaaauaagccagacaucaa

SEQ ID NO: 3257181 - RNA, 23 nt, Human
ugaaauaagccagacaucaacag

SEQ ID NO: 3257182 - RNA, 14 nt, Human
agaugcuagaacuc

SEQ ID NO: 3257183 - RNA, 17 nt, Human
ugacccacaagaaauga

SEQ ID NO: 3257184 - RNA, 19 nt, Human
agaaugucaguauguggaa

SEQ ID NO: 3257185 - RNA, 17 nt, Human
agaaugucaguaugugg

SEQ ID NO: 3257186 - RNA, 23 nt, Human
agaauuaacacaugauccugcaa

SEQ ID NO: 3257187 - RNA, 13 nt, Human
agaaugucaguau

SEQ ID NO: 3257188 - RNA, 16 nt, Human
agaaugucaguaugug

SEQ ID NO: 3257189 - RNA, 15 nt, Human
agaaugucaguaugu

SEQ ID NO: 3257190 - RNA, 21 nt, Human
agacauuugcuaugagcuggg

SEQ ID NO: 3257191 - RNA, 24 nt, Human
agagacagaaagcagaacagugau

SEQ ID NO: 3257192 - RNA, 15 nt, Human
agagacagaaagcag

SEQ ID NO: 3257193 - RNA, 22 nt, Human
aacaguagugauaguuguaccg

SEQ ID NO: 3257194 - RNA, 23 nt, Human
gucucaguccaugaagauguaga

SEQ ID NO: 3257195 - RNA, 20 nt, Human
aacccauauuuguacaccaa

SEQ ID NO: 3257196 - RNA, 18 nt, Human
aacccaaauguucaucaa

SEQ ID NO: 3257197 - RNA, 13 nt, Human
aacccaaauguuc

SEQ ID NO: 3257198 - RNA, 13 nt, Human
aacucccuuucaa

SEQ ID NO: 3257199 - RNA, 15 nt, Human
guauguggaagugug

SEQ ID NO: 3257200 - RNA, 17 nt, Human
guauguggaaguguggg

SEQ ID NO: 3257201 - RNA, 16 nt, Human
guauguggaagugugg

SEQ ID NO: 3257202 - RNA, 20 nt, Human
guaugugggggucugugugu

SEQ ID NO: 3257203 - RNA, 19 nt, Human
guaugugggggucugugug

SEQ ID NO: 3257204 - RNA, 21 nt, Human
guauguggaagugugggucug

SEQ ID NO: 3257205 - RNA, 18 nt, Human
guauguggaagugugggu

SEQ ID NO: 3257206 - RNA, 16 nt, Human
guaggaacugcugggc

SEQ ID NO: 3257207 - RNA, 19 nt, Human
aaaucuacacuccagugag

SEQ ID NO: 3257208 - RNA, 21 nt, Human
aaaugaaagcagggacuugaa

SEQ ID NO: 3257209 - RNA, 22 nt, Human
aaaugaaagcagggacuugaac

SEQ ID NO: 3257210 - RNA, 14 nt, Human
guguguaauuuaaa

SEQ ID NO: 3257211 - RNA, 21 nt, Human
gugugaccacugcagaagaca

SEQ ID NO: 3257212 - RNA, 14 nt, Human
gugggaguguguaa

SEQ ID NO: 3257213 - RNA, 13 nt, Human
gugggagugugua

SEQ ID NO: 3257214 - RNA, 16 nt, Human
gugggucugugugugu

SEQ ID NO: 3257215 - RNA, 13 nt, Human
gugggucugugug

SEQ ID NO: 3257216 - RNA, 22 nt, Human
guggaagugugggucugugugu

SEQ ID NO: 3257217 - RNA, 21 nt, Human
guggaagugugggucugugug

SEQ ID NO: 3257218 - RNA, 20 nt, Human
guggaagugugggucugugu

SEQ ID NO: 3257219 - RNA, 19 nt, Human
guggaagugugggucugug

SEQ ID NO: 3257220 - RNA, 15 nt, Human
guggaaguguggguc

SEQ ID NO: 3257221 - RNA, 14 nt, Human
guggaagugugggu

SEQ ID NO: 3257222 - RNA, 23 nt, Human
gugcuauuguagagccagagguc

SEQ ID NO: 3257223 - RNA, 16 nt, Human
aagaagugaaaaucua

SEQ ID NO: 3257224 - RNA, 22 nt, Human
aagaagugaaaaucuacacucc

SEQ ID NO: 3257225 - RNA, 18 nt, Human
guuguaucagcacgugug

SEQ ID NO: 3257226 - RNA, 18 nt, Human
guuguaccgcaaugugac

SEQ ID NO: 3257227 - RNA, 16 nt, Human
guuuaugugugugugu

SEQ ID NO: 3257228 - RNA, 13 nt, Human
guuuaugugugug

SEQ ID NO: 3257229 - RNA, 23 nt, Human
aaggcuauggggauagaugugug

SEQ ID NO: 3257230 - RNA, 16 nt, Human
guuuucuuaacuuaaa

SEQ ID NO: 3257231 - RNA, 13 nt, Human
acacuuaaaaaug

SEQ ID NO: 3257232 - RNA, 15 nt, Human
acacuuaaaaauggu

SEQ ID NO: 3257233 - RNA, 14 nt, Human
acacuccagugaga

SEQ ID NO: 3257234 - RNA, 14 nt, Human
aauuuaugugaugg

SEQ ID NO: 3257235 - RNA, 17 nt, Human
aauuuacagagacagaa

SEQ ID NO: 3257236 - RNA, 18 nt, Human
aauuuacagagacagaaa

SEQ ID NO: 3257237 - RNA, 17 nt, Human
uacugagagugaacaaa

SEQ ID NO: 3257238 - RNA, 18 nt, Human
uacuaaaaauacaaaaaa

SEQ ID NO: 3257239 - RNA, 14 nt, Human
uacuaaaaauacaa

SEQ ID NO: 3257240 - RNA, 17 nt, Human
acaaauuuacagagaca

SEQ ID NO: 3257241 - RNA, 16 nt, Human
uaauuuaaaauuguga

SEQ ID NO: 3257242 - RNA, 15 nt, Human
uaauuuaaaauugug

SEQ ID NO: 3257243 - RNA, 21 nt, Human
uacaaaaaaaaaaaaaaauua

SEQ ID NO: 3257244 - RNA, 18 nt, Human
uacagaggacaguauuug

SEQ ID NO: 3257245 - RNA, 14 nt, Human
uacagaggacagua

SEQ ID NO: 3257246 - RNA, 11 nt, Human
aaugugauaug

SEQ ID NO: 3257247 - RNA, 19 nt, Human
aauaucuuuuuuuuaauaa

SEQ ID NO: 3257248 - RNA, 13 nt, Human
caagaaaugaaag

SEQ ID NO: 3257249 - RNA, 16 nt, Human
caaauuuacagagaca

SEQ ID NO: 3257250 - RNA, 17 nt, Human
caaauuuacagagacag

SEQ ID NO: 3257251 - RNA, 23 nt, Human
caaauuuacagagacagaaagca

SEQ ID NO: 3257252 - RNA, 15 nt, Human
cacaagaaaugaaag

SEQ ID NO: 3257253 - RNA, 21 nt, Human
cacaagaaaugaaagcaggga

SEQ ID NO: 3257254 - RNA, 13 nt, Human
cacaagaaaugaa

SEQ ID NO: 3257255 - RNA, 23 nt, Human
cacaagaaaugaaagcagggacu

SEQ ID NO: 3257256 - RNA, 15 nt, Human
cacaggaaguagagg

SEQ ID NO: 3257257 - RNA, 22 nt, Human
ucagacauagaauuaacacaug

SEQ ID NO: 3257258 - RNA, 19 nt, Human
ucagacauagaauuaacac

SEQ ID NO: 3257259 - RNA, 14 nt, Human
ucacaggaaguaga

SEQ ID NO: 3257260 - RNA, 19 nt, Human
ucacaggaaguagaggagg

SEQ ID NO: 3257261 - RNA, 14 nt, Human
uccaccuacaugag

SEQ ID NO: 3257262 - RNA, 12 nt, Human
uccacuuggucu

SEQ ID NO: 3257263 - RNA, 13 nt, Human
uccacuuggucug

SEQ ID NO: 3257264 - RNA, 17 nt, Human
ucuacacuccagugaga

SEQ ID NO: 3257265 - RNA, 21 nt, Human
ucucagugucaaugcagcccc

SEQ ID NO: 3257266 - RNA, 18 nt, Human
ucucuucacagucacauu

SEQ ID NO: 3257267 - RNA, 19 nt, Human
ugaaaacuuuaugcuaagu

SEQ ID NO: 3257268 - RNA, 18 nt, Human
ugaaacccugucucuacu

SEQ ID NO: 3257269 - RNA, 18 nt, Human
ugaaagcagggacuugaa

SEQ ID NO: 3257270 - RNA, 19 nt, Human
ugaaagcagggacuugaac

SEQ ID NO: 3257271 - RNA, 20 nt, Human
ucuguguguuuaugugugug

SEQ ID NO: 3257272 - RNA, 19 nt, Human
ucuguguguuuaugugugu

SEQ ID NO: 3257273 - RNA, 22 nt, Human
ucuguguguguguauguggggg

SEQ ID NO: 3257274 - RNA, 16 nt, Human
ucuguguguuuaugug

SEQ ID NO: 3257275 - RNA, 15 nt, Human
ucuguguguuuaugu

SEQ ID NO: 3257276 - RNA, 13 nt, Human
ucugugugugugu

SEQ ID NO: 3257277 - RNA, 21 nt, Human
ucuguguguguguaugugggg

SEQ ID NO: 3257278 - RNA, 19 nt, Human
ucuguguguguguaugugg

SEQ ID NO: 3257279 - RNA, 18 nt, Human
ucuguguguguguaugug

SEQ ID NO: 3257280 - RNA, 15 nt, Human
ucuguguguguguau

SEQ ID NO: 3257281 - RNA, 23 nt, Human
ucuggccuucggccuccauccug

SEQ ID NO: 3257282 - RNA, 21 nt, Human
uaguuguaccgcaaugugacu

SEQ ID NO: 3257283 - RNA, 15 nt, Human
uaucagcacgugugg

SEQ ID NO: 3257284 - RNA, 18 nt, Human
uaggaacugcugggcuug

SEQ ID NO: 3257285 - RNA, 15 nt, Human
uaggaacugcugggc

SEQ ID NO: 3257286 - RNA, 23 nt, Human
uaggaauugacccacaagaaaug

SEQ ID NO: 3257287 - RNA, 20 nt, Human
uaggaauugacccacaagaa

SEQ ID NO: 3257288 - RNA, 13 nt, Human
uaggccaugggac

SEQ ID NO: 3257289 - RNA, 11 nt, Human
uagaugugugg

SEQ ID NO: 3257290 - RNA, 21 nt, Human
uacaugagguacugagaguga

SEQ ID NO: 3257291 - RNA, 22 nt, Human
uacaugagguacugagagugaa

SEQ ID NO: 3257292 - RNA, 19 nt, Human
uacugagagugaacaaauu

SEQ ID NO: 3257293 - RNA, 19 nt, Human
uaauucuuugaccuguugg

SEQ ID NO: 3257294 - RNA, 19 nt, Human
uaaugccacuaaauugaca

SEQ ID NO: 3257295 - RNA, 13 nt, Human
uaagccagacauc

SEQ ID NO: 3257296 - RNA, 20 nt, Human
uaagccagacaucaacagau

SEQ ID NO: 3257297 - RNA, 21 nt, Human
uaagccagacaucaacagaua

SEQ ID NO: 3257298 - RNA, 23 nt, Human
uaaauugacacuuaaaaaugguu

SEQ ID NO: 3257299 - RNA, 13 nt, Human
guuuagaaagcuu

SEQ ID NO: 3257300 - RNA, 20 nt, Human
guuuaggauguugaaaaagu

SEQ ID NO: 3257301 - RNA, 14 nt, Human
uggccuucggccuc

SEQ ID NO: 3257302 - RNA, 17 nt, Human
uggccuucggccuccau

SEQ ID NO: 3257303 - RNA, 18 nt, Human
uggccuucggccuccauc

SEQ ID NO: 3257304 - RNA, 14 nt, Human
ugggacagggagga

SEQ ID NO: 3257305 - RNA, 23 nt, Human
uggaagugugggucugugugugu

SEQ ID NO: 3257306 - RNA, 20 nt, Human
uggaagugugggucugugug

SEQ ID NO: 3257307 - RNA, 21 nt, Human
uggaagugugggucugugugu

SEQ ID NO: 3257308 - RNA, 14 nt, Human
uggaacucucgagc

SEQ ID NO: 3257309 - RNA, 16 nt, Human
ugcagauaaacaguag

SEQ ID NO: 3257310 - RNA, 20 nt, Human
ugcuagaacucccuuucaac

SEQ ID NO: 3257311 - RNA, 21 nt, Human
ugcuagaacucccuuucaaca

SEQ ID NO: 3257312 - RNA, 19 nt, Human
ugcuagaacucccuuucaa

SEQ ID NO: 3257313 - RNA, 18 nt, Human
ugcuagaacucccuuuca

SEQ ID NO: 3257314 - RNA, 16 nt, Human
uguaaauuuaugugau

SEQ ID NO: 3257315 - RNA, 15 nt, Human
uguaaauuuauguga

SEQ ID NO: 3257316 - RNA, 14 nt, Human
uguaaucacagcua

SEQ ID NO: 3257317 - RNA, 15 nt, Human
uguaaucacagcuac

SEQ ID NO: 3257318 - RNA, 18 nt, Human
ugugaggggcucucucau

SEQ ID NO: 3257319 - RNA, 22 nt, Human
ugugaccacugcagaagacagu

SEQ ID NO: 3257320 - RNA, 21 nt, Human
ugucucaguccaugaagaugu

SEQ ID NO: 3257321 - RNA, 16 nt, Human
ugugggucugugugug

SEQ ID NO: 3257322 - RNA, 14 nt, Human
ugugggucugugug

SEQ ID NO: 3257323 - RNA, 16 nt, Human
ugugggggucugugug

SEQ ID NO: 3257324 - RNA, 15 nt, Human
uuacagaggacagua

SEQ ID NO: 3257325 - RNA, 20 nt, Human
uuacagagacagaaagcaga

SEQ ID NO: 3257326 - RNA, 21 nt, Human
uguuuacagaggacaguauuu

SEQ ID NO: 3257327 - RNA, 14 nt, Human
uguuuacagaggac

SEQ ID NO: 3257328 - RNA, 23 nt, Human
uguguugugugugggagugugua

SEQ ID NO: 3257329 - RNA, 14 nt, Human
uguguugugugugg

SEQ ID NO: 3257330 - RNA, 13 nt, Human
uguguuuaugugu

SEQ ID NO: 3257331 - RNA, 15 nt, Human
uguguuuaugugugu

SEQ ID NO: 3257332 - RNA, 11 nt, Human
uguguguaugu

SEQ ID NO: 3257333 - RNA, 13 nt, Human
uguguaugugggg

SEQ ID NO: 3257334 - RNA, 14 nt, Human
uguguauguggggg

SEQ ID NO: 3257335 - RNA, 23 nt, Human
uguguaugugggggucugugugu

SEQ ID NO: 3257336 - RNA, 17 nt, Human
uuuagaagaaguguguc

SEQ ID NO: 3257337 - RNA, 19 nt, Human
uuuagaagaagugugucac

SEQ ID NO: 3257338 - RNA, 20 nt, Human
uuuuauaucaauuuaaaaaa

SEQ ID NO: 3257339 - RNA, 18 nt, Human
uucggccuccauccugag

SEQ ID NO: 3257340 - RNA, 19 nt, Human
uucggccuccauccugagg

SEQ ID NO: 3257341 - RNA, 15 nt, Human
uucggccuccauccu

SEQ ID NO: 3257342 - RNA, 19 nt, Human
uuccacuuauaggaauuga

SEQ ID NO: 3257343 - RNA, 12 nt, Human
uugggaggcuga

SEQ ID NO: 3257344 - RNA, 14 nt, Human
ccaugaagauguag

SEQ ID NO: 3257345 - RNA, 18 nt, Human
cccaaaaggcagaagcaa

SEQ ID NO: 3257346 - RNA, 13 nt, Human
cccaaaaggcaga

SEQ ID NO: 3257347 - RNA, 13 nt, Human
ccacugcagaaga

SEQ ID NO: 3257348 - RNA, 18 nt, Human
ccacugcagaagacagua

SEQ ID NO: 3257349 - RNA, 20 nt, Human
ccacacagacuugggcaggg

SEQ ID NO: 3257350 - RNA, 16 nt, Human
ccacacccucacugcu

SEQ ID NO: 3257351 - RNA, 16 nt, Human
ccaauauucauagcag

SEQ ID NO: 3257352 - RNA, 19 nt, Human
ccaagccuuggcucuaccc

SEQ ID NO: 3257353 - RNA, 19 nt, Human
cauugucccugaagagaag

SEQ ID NO: 3257354 - RNA, 17 nt, Human
cauuuaggccaugggac

SEQ ID NO: 3257355 - RNA, 22 nt, Human
ccgggaggcagagguugcagug

SEQ ID NO: 3257356 - RNA, 17 nt, Human
ccugaggcuccacuugg

SEQ ID NO: 3257357 - RNA, 18 nt, Human
ccugaggcuccacuuggu

SEQ ID NO: 3257358 - RNA, 20 nt, Human
ccugaggcuccacuuggucu

SEQ ID NO: 3257359 - RNA, 18 nt, Human
ccugaaagaggaaugaag

SEQ ID NO: 3257360 - RNA, 13 nt, Human
ccugaaagaggaa

SEQ ID NO: 3257361 - RNA, 23 nt, Human
ccugaaagaggaaugaaguacuc

SEQ ID NO: 3257362 - RNA, 23 nt, Human
cgauugcaggagucccugccauc

SEQ ID NO: 3257363 - RNA, 11 nt, Human
cgcaaugugac

SEQ ID NO: 3257364 - RNA, 21 nt, Human
cgauugcaggagucccugcca

SEQ ID NO: 3257365 - RNA, 14 nt, Human
cggccuccauccug

SEQ ID NO: 3257366 - RNA, 16 nt, Human
cggccuccauccugag

SEQ ID NO: 3257367 - RNA, 17 nt, Human
cggccuccauccugagg

SEQ ID NO: 3257368 - RNA, 12 nt, Human
ccuucagccuga

SEQ ID NO: 3257369 - RNA, 15 nt, Human
cugccuaagugcagc

SEQ ID NO: 3257370 - RNA, 23 nt, Human
cugcagaagacaguauggcagcu

SEQ ID NO: 3257371 - RNA, 13 nt, Human
cugcagaagacag

SEQ ID NO: 3257372 - RNA, 16 nt, Human
cuggccaacgggguga

SEQ ID NO: 3257373 - RNA, 17 nt, Human
cuccauugguguugaca

SEQ ID NO: 3257374 - RNA, 23 nt, Human
cuccauccugaggcuccacuugg

SEQ ID NO: 3257375 - RNA, 21 nt, Human
cuccauccugaggcuccacuu

SEQ ID NO: 3257376 - RNA, 20 nt, Human
cuccauccugaggcuccacu

SEQ ID NO: 3257377 - RNA, 15 nt, Human
cucauuccagaggaa

SEQ ID NO: 3257378 - RNA, 17 nt, Human
cucauuccagaggaagg

SEQ ID NO: 3257379 - RNA, 17 nt, Human
cucauuaggauggcuag

SEQ ID NO: 3257380 - RNA, 18 nt, Human
cucauuaggauggcuagu

SEQ ID NO: 3257381 - RNA, 13 nt, Human
cucccuuucaaca

SEQ ID NO: 3257382 - RNA, 12 nt, Human
cucccuuucaac

SEQ ID NO: 3257383 - RNA, 16 nt, Human
cucccuucucuucaca

SEQ ID NO: 3257384 - RNA, 21 nt, Human
cugaagagaagggcagggcug

SEQ ID NO: 3257385 - RNA, 23 nt, Human
cucugcauacucauuaggauggc

SEQ ID NO: 3257386 - RNA, 17 nt, Human
cuucggccuccauccug

SEQ ID NO: 3257387 - RNA, 18 nt, Human
cuucggccuccauccuga

SEQ ID NO: 3257388 - RNA, 18 nt, Human
cuuaaugccacuaaauug

SEQ ID NO: 3257389 - RNA, 19 nt, Human
cuuauaggaauugacccac

SEQ ID NO: 3257390 - RNA, 19 nt, Human
cuuacuaguuucccuugca

SEQ ID NO: 3257391 - RNA, 19 nt, Human
cuuuccucaaaacuucaga

SEQ ID NO: 3257392 - RNA, 18 nt, Human
cuugcccuggugccucac

SEQ ID NO: 3257393 - RNA, 14 nt, Human
gaaguauccuucag

SEQ ID NO: 3257394 - RNA, 16 nt, Human
gaaguauccuucagcc

SEQ ID NO: 3257395 - RNA, 17 nt, Human
gaagagaagggcagggc

SEQ ID NO: 3257396 - RNA, 17 nt, Human
gaagauguagaggagaa

SEQ ID NO: 3257397 - RNA, 18 nt, Human
gaagauguagaggagaaa

SEQ ID NO: 3257398 - RNA, 16 nt, Human
gaacagugauuaccag

SEQ ID NO: 3257399 - RNA, 20 nt, Human
gaacagugauuaccagggac

SEQ ID NO: 3257400 - RNA, 16 nt, Human
gacugaggggagggga

SEQ ID NO: 3257401 - RNA, 14 nt, Human
gacaucaacagaua

SEQ ID NO: 3257402 - RNA, 18 nt, Human
gacccaaaaggcagaagc

SEQ ID NO: 3257403 - RNA, 19 nt, Human
gacccaaaaggcagaagca

SEQ ID NO: 3257404 - RNA, 16 nt, Human
gaccacugcagaagac

SEQ ID NO: 3257405 - RNA, 22 nt, Human
gaguguguaauuuaaaauugug

SEQ ID NO: 3257406 - RNA, 21 nt, Human
gaguguguaauuuaaaauugu

SEQ ID NO: 3257407 - RNA, 13 nt, Human
gauaaacaguagu

SEQ ID NO: 3257408 - RNA, 16 nt, Human
gaugcuagaacucccu

SEQ ID NO: 3257409 - RNA, 14 nt, Human
gcagaagacaguau

SEQ ID NO: 3257410 - RNA, 18 nt, Human
gccuguaaucacagcuac

SEQ ID NO: 3257411 - RNA, 18 nt, Human
gccuucggccuccauccu

SEQ ID NO: 3257412 - RNA, 22 nt, Human
gcgacagugagacucugucuca

SEQ ID NO: 3257413 - RNA, 22 nt, Human
gccacguucuuacuaguuuccc

SEQ ID NO: 3257414 - RNA, 14 nt, Human
gccaugggacaggg

SEQ ID NO: 3257415 - RNA, 19 nt, Human
gccaugggacagggaggac

SEQ ID NO: 3257416 - RNA, 17 nt, Human
gccccgugggguuccuc

SEQ ID NO: 3257417 - RNA, 19 nt, Human
gccccugcacuccagccug

SEQ ID NO: 3257418 - RNA, 17 nt, Human
gcuugcccuggugccuc

SEQ ID NO: 3257419 - RNA, 19 nt, Human
gcuugcccuggugccucac

SEQ ID NO: 3257420 - RNA, 13 nt, Human
gcuggaucuguga

SEQ ID NO: 3257421 - RNA, 22 nt, Human
ggccaugggacagggaggacgc

SEQ ID NO: 3257422 - RNA, 19 nt, Human
ggaggacgcucucuggccu

SEQ ID NO: 3257423 - RNA, 20 nt, Human
ggaggacgcucucuggccuu

SEQ ID NO: 3257424 - RNA, 21 nt, Human
ggaggacgcucucuggccuuc

SEQ ID NO: 3257425 - RNA, 12 nt, Human
ggagggauuugg

SEQ ID NO: 3257426 - RNA, 15 nt, Human
ggauagaugugugga

SEQ ID NO: 3257427 - RNA, 14 nt, Human
ggauagaugugugg

SEQ ID NO: 3257428 - RNA, 13 nt, Human
ggauagaugugug

SEQ ID NO: 3257429 - RNA, 11 nt, Human
gggagugugua

SEQ ID NO: 3257430 - RNA, 14 nt, Human
gggauagaugugug

SEQ ID NO: 3257431 - RNA, 13 nt, Human
gggauagaugugu

SEQ ID NO: 3257432 - RNA, 17 nt, Human
aagugacgguuuaaugg

SEQ ID NO: 3257433 - RNA, 20 nt, Human
aauuccacacccucacugcu

SEQ ID NO: 3257434 - RNA, 11 nt, Human
uuguuaaauga

SEQ ID NO: 3257435 - RNA, 14 nt, Human
aaugguuuaaaugg

SEQ ID NO: 3257436 - RNA, 17 nt, Human
auguauauaaacaugcu

SEQ ID NO: 3257437 - RNA, 22 nt, Human
augucucucaugaccaaaugcu

SEQ ID NO: 3257438 - RNA, 13 nt, Tula virus
gcucuuuucucgg

SEQ ID NO: 3257439 - RNA, 22 nt, Tula virus
uaagcugggguagguaaguuua

SEQ ID NO: 3257440 - RNA, 17 nt, Tula virus
uuauaucaaacugaacu

SEQ ID NO: 3257441 - RNA, 13 nt, Tula virus
uaugaauuugaag

SEQ ID NO: 3257442 - RNA, 12 nt, Tula virus
uuaaacauuucu

SEQ ID NO: 3257443 - RNA, 22 nt, Tula virus
cacucagguaaucugcugcucu

SEQ ID NO: 3257444 - RNA, 18 nt, Tula virus
acugagcuaucaucucug

SEQ ID NO: 3257445 - RNA, 13 nt, Tula virus
uacaauucacaca

SEQ ID NO: 3257446 - RNA, 19 nt, Tula virus
guacacuuauauauaugca

SEQ ID NO: 3257447 - RNA, 23 nt, Tula virus
cuuuacuacuacucuaccucaua

SEQ ID NO: 3257448 - RNA, 13 nt, Tula virus
cuucaucucuauu

SEQ ID NO: 3257449 - RNA, 15 nt, Tula virus
acaccaaugcaugau

SEQ ID NO: 3257450 - RNA, 22 nt, Tula virus
auagcccucauacuacuuccaa

SEQ ID NO: 3257451 - RNA, 12 nt, Tula virus
uaaaauuguaag

SEQ ID NO: 3257452 - RNA, 22 nt, Tula virus
ucuuuucucggagcauacuacu

SEQ ID NO: 3257453 - RNA, 19 nt, Tula virus
ucacuaguguaaguucauu

SEQ ID NO: 3257454 - RNA, 16 nt, Tula virus
augauuacaauucaca

SEQ ID NO: 3257455 - RNA, 12 nt, Tula virus
cugcucuguaug

SEQ ID NO: 3257456 - RNA, 19 nt, Tula virus
augauuacaauucacacau

SEQ ID NO: 3257457 - RNA, 16 nt, Tula virus
auuuguugcucuuuuc

SEQ ID NO: 3257458 - RNA, 22 nt, Tula virus
uuguaaguccuuguuuggugua

SEQ ID NO: 3257459 - RNA, 16 nt, Tula virus
auugcacuacagcuug

SEQ ID NO: 3257460 - RNA, 13 nt, Tula virus
guacgauuccacu

SEQ ID NO: 3257461 - RNA, 18 nt, Tula virus
ucauaucgaucauuccug

SEQ ID NO: 3257462 - RNA, 23 nt, Tula virus
caccaaugcaugauuacaauuca

SEQ ID NO: 3257463 - RNA, 16 nt, Tula virus
gcacauccaaugauau

SEQ ID NO: 3257464 - RNA, 13 nt, Tula virus
ucugcugcucugu

SEQ ID NO: 3257465 - RNA, 15 nt, Tula virus
uuaaguuuaaaauug

SEQ ID NO: 3257466 - RNA, 12 nt, Tula virus
cccaauaaugug

SEQ ID NO: 3257467 - RNA, 18 nt, Tula virus
cuauuuguugcucuuuuc

SEQ ID NO: 3257468 - RNA, 18 nt, Tula virus
acuauuuguugcucuuuu

SEQ ID NO: 3257469 - RNA, 18 nt, Tula virus
uguuuauaucaaacugaa

SEQ ID NO: 3257470 - RNA, 17 nt, Tula virus
auuuguugcucuuuucu

SEQ ID NO: 3257471 - RNA, 17 nt, Tula virus
cacugauuggguugggu

SEQ ID NO: 3257472 - RNA, 16 nt, Tula virus
uggacuuuuguuccug

SEQ ID NO: 3257473 - RNA, 19 nt, Tula virus
acaauucacacauacacug

SEQ ID NO: 3257474 - RNA, 14 nt, Tula virus
uuauauauaugcac

SEQ ID NO: 3257475 - RNA, 23 nt, Tula virus
gcuaucaucucugucucuuuucu

SEQ ID NO: 3257476 - RNA, 14 nt, Tula virus
uuccuuaaugcaua

SEQ ID NO: 3257477 - RNA, 22 nt, Tula virus
acucagguaaucugcugcucug

SEQ ID NO: 3257478 - RNA, 14 nt, Tula virus
acaaaauucacacc

SEQ ID NO: 3257479 - RNA, 19 nt, Tula virus
uacgauuccacuaccucag

SEQ ID NO: 3257480 - RNA, 19 nt, Tula virus
uaucaaacugaacuguaua

SEQ ID NO: 3257481 - RNA, 15 nt, Tula virus
aguguaaguucauua

SEQ ID NO: 3257482 - RNA, 22 nt, Tula virus
auaacuuuuuauuauuccuuaa

SEQ ID NO: 3257483 - RNA, 13 nt, Tula virus
guugauuauugca

SEQ ID NO: 3257484 - RNA, 14 nt, Tula virus
uuuucuucaucucu

SEQ ID NO: 3257485 - RNA, 23 nt, Tula virus
ugugaaacugagcuaucaucucu

SEQ ID NO: 3257486 - RNA, 14 nt, Tula virus
cuauauuaacagua

SEQ ID NO: 3257487 - RNA, 13 nt, Tula virus
acaguauguguuu

SEQ ID NO: 3257488 - RNA, 11 nt, Tula virus
cggagcauacu

SEQ ID NO: 3257489 - RNA, 18 nt, Tula virus
aacuaccacuuuacuacu

SEQ ID NO: 3257490 - RNA, 15 nt, Tula virus
auguacuuauaccuu

SEQ ID NO: 3257491 - RNA, 16 nt, Tula virus
gcucuuuucucggagc

SEQ ID NO: 3257492 - RNA, 14 nt, Tula virus
aaaacuaccacuuu

SEQ ID NO: 3257493 - RNA, 20 nt, Tula virus
augcaugauuacaauucaca

SEQ ID NO: 3257494 - RNA, 15 nt, Tula virus
uaccacuuuacuacu

SEQ ID NO: 3257495 - RNA, 15 nt, Tula virus
gcacauccaaugaua

SEQ ID NO: 3257496 - RNA, 14 nt, Tula virus
auaucaaacugaac

SEQ ID NO: 3257497 - RNA, 18 nt, Tula virus
aucugcugcucuguaugu

SEQ ID NO: 3257498 - RNA, 22 nt, Tula virus
gcacaaaauucacaccaaugca

SEQ ID NO: 3257499 - RNA, 14 nt, Tula virus
caaacugaacugua

SEQ ID NO: 3257500 - RNA, 14 nt, Tula virus
ucuguauguuuauu

SEQ ID NO: 3257501 - RNA, 16 nt, Tula virus
aucucuauuuaaacau

SEQ ID NO: 3257502 - RNA, 19 nt, Tula virus
uauaucuuauauuacuaau

SEQ ID NO: 3257503 - RNA, 23 nt, Tula virus
acugagcuaucaucucugucucu

SEQ ID NO: 3257504 - RNA, 21 nt, Tula virus
ugauuacaauucacacauaca

SEQ ID NO: 3257505 - RNA, 22 nt, Tula virus
ugggucaaaucaaacacauaua

SEQ ID NO: 3257506 - RNA, 11 nt, Tula virus
aaaucaaacac

SEQ ID NO: 3257507 - RNA, 15 nt, Tula virus
auguguuuauaucaa

SEQ ID NO: 3257508 - RNA, 16 nt, Tula virus
acuacuacucuaccuc

SEQ ID NO: 3257509 - RNA, 15 nt, Tula virus
caguauguguuuaua

SEQ ID NO: 3257510 - RNA, 19 nt, Tula virus
uugggcacaaaauucacac

SEQ ID NO: 3257511 - RNA, 13 nt, Tula virus
uuacaauucacac

SEQ ID NO: 3257512 - RNA, 21 nt, Tula virus
auuccuggacuuuuguuccug

SEQ ID NO: 3257513 - RNA, 18 nt, Tula virus
cucagacaguuguuuucu

SEQ ID NO: 3257514 - RNA, 18 nt, Tula virus
ucgaucauuccuggacuu

SEQ ID NO: 3257515 - RNA, 13 nt, Tula virus
guugcucuuuucu

SEQ ID NO: 3257516 - RNA, 23 nt, Tula virus
cuauuuguugcucuuuucucgga

SEQ ID NO: 3257517 - RNA, 18 nt, Tula virus
uguugcucuuuucucgga

SEQ ID NO: 3257518 - RNA, 22 nt, Tula virus
cuuauauuacuaaucuccuaua

SEQ ID NO: 3257519 - RNA, 17 nt, Tula virus
ugagcuaucaucucugu

SEQ ID NO: 3257520 - RNA, 19 nt, Tula virus
guugggcacaaaauucaca

SEQ ID NO: 3257521 - RNA, 19 nt, Tula virus
guauuaugucacuagugua

SEQ ID NO: 3257522 - RNA, 14 nt, Tula virus
uauaagcuggggua

SEQ ID NO: 3257523 - RNA, 18 nt, Tula virus
acacacgcacauccaaug

SEQ ID NO: 3257524 - RNA, 13 nt, Tula virus
aaugcauauguac

SEQ ID NO: 3257525 - RNA, 12 nt, Tula virus
cucggagcauac

SEQ ID NO: 3257526 - RNA, 16 nt, Tula virus
uacuauuuguugcucu

SEQ ID NO: 3257527 - RNA, 21 nt, Tula virus
cuuaaugcauauguacuuaua

SEQ ID NO: 3257528 - RNA, 13 nt, Tula virus
uugauuauugcac

SEQ ID NO: 3257529 - RNA, 21 nt, Tula virus
uucaucucuauuuaaacauuu

SEQ ID NO: 3257530 - RNA, 14 nt, Tula virus
ucaucucuauuuaa

SEQ ID NO: 3257531 - RNA, 22 nt, Tula virus
cuuuuuauuauuccuuaaugca

SEQ ID NO: 3257532 - RNA, 13 nt, Tula virus
acuuuuguuccug

SEQ ID NO: 3257533 - RNA, 13 nt, Tula virus
cuauuuguugcuc

SEQ ID NO: 3257534 - RNA, 16 nt, Tula virus
caaaucaaacacauau

SEQ ID NO: 3257535 - RNA, 22 nt, Tula virus
acuguauagcccucauacuacu

SEQ ID NO: 3257536 - RNA, 15 nt, Tula virus
acauuucuaccuccg

SEQ ID NO: 3257537 - RNA, 14 nt, Tula virus
acugaacuguauag

SEQ ID NO: 3257538 - RNA, 20 nt, Tula virus
augaauuugaaggguugggc

SEQ ID NO: 3257539 - RNA, 22 nt, Tula virus
uguuuucuugauugcuuuucaa

SEQ ID NO: 3257540 - RNA, 15 nt, Tula virus
uaucgaucauuccug

SEQ ID NO: 3257541 - RNA, 19 nt, Tula virus
aguccuuguuugguguaaa

SEQ ID NO: 3257542 - RNA, 17 nt, Tula virus
uacuaaucguaagguag

SEQ ID NO: 3257543 - RNA, 13 nt, Tula virus
uuuguuaaguuua

SEQ ID NO: 3257544 - RNA, 15 nt, Tula virus
uuuguuaaguuuaaa

SEQ ID NO: 3257545 - RNA, 14 nt, Tula virus
caauucacacauac

SEQ ID NO: 3257546 - RNA, 18 nt, Tula virus
gucucuuuucuucaucuc

SEQ ID NO: 3257547 - RNA, 12 nt, Tula virus
ugcucuuuucuc

SEQ ID NO: 3257548 - RNA, 16 nt, Tula virus
uucuucaucucuauuu

SEQ ID NO: 3257549 - RNA, 19 nt, Tula virus
uuguugcucuuuucucgga

SEQ ID NO: 3257550 - RNA, 15 nt, Uukuniemi virus
cucaauugcagugaa

SEQ ID NO: 3257551 - RNA, 16 nt, Uukuniemi virus
agaguuggauggacag

SEQ ID NO: 3257552 - RNA, 15 nt, Uukuniemi virus
aggugauccagugcu

SEQ ID NO: 3257553 - RNA, 14 nt, Uukuniemi virus
uuuaauucggccaa

SEQ ID NO: 3257554 - RNA, 13 nt, Uukuniemi virus
ucaaacaugaagu

SEQ ID NO: 3257555 - RNA, 16 nt, Uukuniemi virus
ccaaacuacagugauc

SEQ ID NO: 3257556 - RNA, 14 nt, Uukuniemi virus
agugcuccucaagg

SEQ ID NO: 3257557 - RNA, 23 nt, Uukuniemi virus
aacgcuuagguucauaguugcaa

SEQ ID NO: 3257558 - RNA, 21 nt, Uukuniemi virus
cugcaauggucccccuuguga

SEQ ID NO: 3257559 - RNA, 17 nt, Uukuniemi virus
ugugacuagucuuuucu

SEQ ID NO: 3257560 - RNA, 21 nt, Uukuniemi virus
uggacaguaagguucuuccga

SEQ ID NO: 3257561 - RNA, 23 nt, Uukuniemi virus
caucccauaacgcuuagguucau

SEQ ID NO: 3257562 - RNA, 22 nt, Uukuniemi virus
cagugauccuacgacuggccaa

SEQ ID NO: 3257563 - RNA, 14 nt, Uukuniemi virus
agcacucucaaagg

SEQ ID NO: 3257564 - RNA, 12 nt, Uukuniemi virus
uagucuuuucug

SEQ ID NO: 3257565 - RNA, 16 nt, Uukuniemi virus
gauucugcccagugac

SEQ ID NO: 3257566 - RNA, 14 nt, Uukuniemi virus
gcaaggugcuugcu

SEQ ID NO: 3257567 - RNA, 18 nt, Uukuniemi virus
uucaccagauucugccca

SEQ ID NO: 3257568 - RNA, 17 nt, Uukuniemi virus
gaaguucaugugcuucu

SEQ ID NO: 3257569 - RNA, 18 nt, Uukuniemi virus
agcacucucaaaggugau

SEQ ID NO: 3257570 - RNA, 22 nt, Uukuniemi virus
ucgcucccuagcacucucaaag

SEQ ID NO: 3257571 - RNA, 21 nt, Uukuniemi virus
aaagggcuucggcccaaacua

SEQ ID NO: 3257572 - RNA, 21 nt, Uukuniemi virus
caauccuuggugaauguggug

SEQ ID NO: 3257573 - RNA, 20 nt, Uukuniemi virus
cucccuagcacucucaaagg

SEQ ID NO: 3257574 - RNA, 19 nt, Uukuniemi virus
cucaaaggugauccagugc

SEQ ID NO: 3257575 - RNA, 11 nt, Uukuniemi virus
auccagugcuc

SEQ ID NO: 3257576 - RNA, 21 nt, Uukuniemi virus
gaaccuuuucucugcaauggu

SEQ ID NO: 3257577 - RNA, 15 nt, Uukuniemi virus
cccaaacuacaguga

SEQ ID NO: 3257578 - RNA, 22 nt, Uukuniemi virus
caagaauguggagaaggcacag

SEQ ID NO: 3257579 - RNA, 19 nt, Uukuniemi virus
acuggccaauccuugguga

SEQ ID NO: 3257580 - RNA, 14 nt, Uukuniemi virus
aaguucaugugcuu

SEQ ID NO: 3257581 - RNA, 19 nt, Uukuniemi virus
ugauccuacgacuggccaa

SEQ ID NO: 3257582 - RNA, 14 nt, Uukuniemi virus
uaauucggccaaau

SEQ ID NO: 3257583 - RNA, 23 nt, Uukuniemi virus
acucucaaaggugauccagugcu

SEQ ID NO: 3257584 - RNA, 22 nt, Uukuniemi virus
caaacaugaaguucaugugcuu

SEQ ID NO: 3257585 - RNA, 13 nt, Uukuniemi virus
acaguaagguucu

SEQ ID NO: 3257586 - RNA, 20 nt, Uukuniemi virus
uaaaagggcuucggcccaaa

SEQ ID NO: 3257587 - RNA, 16 nt, Uukuniemi virus
ugauccagugcuccuc

SEQ ID NO: 3257588 - RNA, 16 nt, Uukuniemi virus
ugcaaggugcuugcuc

SEQ ID NO: 3257589 - RNA, 21 nt, Uukuniemi virus
acagauccuucaccagauucu

SEQ ID NO: 3257590 - RNA, 17 nt, Uukuniemi virus
cucaauugcagugaaga

SEQ ID NO: 3257591 - RNA, 14 nt, Uukuniemi virus
cucaauugcaguga

SEQ ID NO: 3257592 - RNA, 19 nt, Uukuniemi virus
agugcuccucaagguugac

SEQ ID NO: 3257593 - RNA, 14 nt, Uukuniemi virus
aacaugaaguucau

SEQ ID NO: 3257594 - RNA, 21 nt, Uukuniemi virus
accagauucugcccagugacc

SEQ ID NO: 3257595 - RNA, 13 nt, Uukuniemi virus
ugcccagugaccu

SEQ ID NO: 3257596 - RNA, 14 nt, Uukuniemi virus
cagauucugcccag

SEQ ID NO: 3257597 - RNA, 13 nt, Uukuniemi virus
agaaccuuuucuc

SEQ ID NO: 3257598 - RNA, 17 nt, Uukuniemi virus
uccagugcuccucaagg

SEQ ID NO: 3257599 - RNA, 21 nt, Uukuniemi virus
ugcagugaagaaccuuuucuc

SEQ ID NO: 3257600 - RNA, 14 nt, Uukuniemi virus
ucugcaaugguccc

SEQ ID NO: 3257601 - RNA, 21 nt, Uukuniemi virus
cucuaauuggacucuaaaagg

SEQ ID NO: 3257602 - RNA, 16 nt, Uukuniemi virus
uccagcagucgcuccc

SEQ ID NO: 3257603 - RNA, 15 nt, Uukuniemi virus
ccaaacuacagugau

SEQ ID NO: 3257604 - RNA, 13 nt, Uukuniemi virus
cuagucuuuucug

SEQ ID NO: 3257605 - RNA, 15 nt, Uukuniemi virus
ugauccagugcuccu

SEQ ID NO: 3257606 - RNA, 15 nt, Uukuniemi virus
aguugcaaggugcuu

SEQ ID NO: 3257607 - RNA, 11 nt, Uukuniemi virus
auucaaacaug

SEQ ID NO: 3257608 - RNA, 12 nt, Uukuniemi virus
ucugcccaguga

SEQ ID NO: 3257609 - RNA, 13 nt, Uukuniemi virus
aguugcaaggugc

SEQ ID NO: 3257610 - RNA, 14 nt, Uukuniemi virus
augugcuucuucuu

SEQ ID NO: 3257611 - RNA, 16 nt, Uukuniemi virus
caaacaugaaguucau

SEQ ID NO: 3257612 - RNA, 22 nt, Uukuniemi virus
aggugcuugcucaauugcagug

SEQ ID NO: 3257613 - RNA, 18 nt, Vaccinia virus
uauuaauguauuauuaua

SEQ ID NO: 3257614 - RNA, 20 nt, Vaccinia virus
ucauuuaacacuauacucau

SEQ ID NO: 3257615 - RNA, 21 nt, Vaccinia virus
agcaacuaaucaauagcuuaa

SEQ ID NO: 3257616 - RNA, 15 nt, Vaccinia virus
aaaauuuaaagaaug

SEQ ID NO: 3257617 - RNA, 19 nt, Vaccinia virus
uuuauaaacuuaacccauu

SEQ ID NO: 3257618 - RNA, 12 nt, Vaccinia virus
cauaaacaaauu

SEQ ID NO: 3257619 - RNA, 18 nt, Vaccinia virus
agacuaugugguuaaaug

SEQ ID NO: 3257620 - RNA, 14 nt, Vaccinia virus
cauuaacuauuuuu

SEQ ID NO: 3257621 - RNA, 15 nt, Vaccinia virus
uauaauaaauacuuu

SEQ ID NO: 3257622 - RNA, 16 nt, Vaccinia virus
ucauucucuagaagau

SEQ ID NO: 3257623 - RNA, 16 nt, Vaccinia virus
caacaaguuggaugau

SEQ ID NO: 3257624 - RNA, 21 nt, Vaccinia virus
augugucuacauaaauaugca

SEQ ID NO: 3257625 - RNA, 16 nt, Vaccinia virus
auaguggauuaauaua

SEQ ID NO: 3257626 - RNA, 19 nt, Vaccinia virus
acgauuaguucuuuaaaga

SEQ ID NO: 3257627 - RNA, 22 nt, Vaccinia virus
caacaacgaaccaaaaugaauu

SEQ ID NO: 3257628 - RNA, 17 nt, Vaccinia virus
ucaccaguauguauucc

SEQ ID NO: 3257629 - RNA, 19 nt, Vaccinia virus
ccgucaagagaguuaucug

SEQ ID NO: 3257630 - RNA, 19 nt, Vaccinia virus
uaguauuauucauuuucua

SEQ ID NO: 3257631 - RNA, 20 nt, Vaccinia virus
gaaacuuuuuagaauaucua

SEQ ID NO: 3257632 - RNA, 20 nt, Vaccinia virus
augaucaucuauuguuauau

SEQ ID NO: 3257633 - RNA, 17 nt, Vaccinia virus
gguggauggagucccag

SEQ ID NO: 3257634 - RNA, 15 nt, Vaccinia virus
aacaauaugcaaaua

SEQ ID NO: 3257635 - RNA, 16 nt, Vaccinia virus
acaaaguccaaugauu

SEQ ID NO: 3257636 - RNA, 14 nt, Vaccinia virus
aguaagaauaagac

SEQ ID NO: 3257637 - RNA, 18 nt, Vaccinia virus
augccucagguucaucga

SEQ ID NO: 3257638 - RNA, 23 nt, Vaccinia virus
aucucuuuagaauguuaucgaug

SEQ ID NO: 3257639 - RNA, 21 nt, Vaccinia virus
gaacuuacugacaaaguuaag

SEQ ID NO: 3257640 - RNA, 21 nt, Vaccinia virus
uuccuuuacgugauaaaucau

SEQ ID NO: 3257641 - RNA, 16 nt, Vaccinia virus
cuuaaucauaucacau

SEQ ID NO: 3257642 - RNA, 16 nt, Vaccinia virus
auagucuccagaaauc

SEQ ID NO: 3257643 - RNA, 16 nt, Vaccinia virus
aauguauacaaaugua

SEQ ID NO: 3257644 - RNA, 21 nt, Vaccinia virus
uaaaaacucuaacauguguuu

SEQ ID NO: 3257645 - RNA, 17 nt, Vaccinia virus
aucuauguaaucauaug

SEQ ID NO: 3257646 - RNA, 17 nt, Vaccinia virus
cguguaacaaaguauua

SEQ ID NO: 3257647 - RNA, 19 nt, Vaccinia virus
cuuaacaugagacauaaau

SEQ ID NO: 3257648 - RNA, 16 nt, Vaccinia virus
ucaggugccccgacuc

SEQ ID NO: 3257649 - RNA, 15 nt, Vaccinia virus
cacauauuaaugcag

SEQ ID NO: 3257650 - RNA, 17 nt, Vaccinia virus
uauaucaucauuuugau

SEQ ID NO: 3257651 - RNA, 15 nt, Vaccinia virus
cauuccuuauacaau

SEQ ID NO: 3257652 - RNA, 12 nt, Vaccinia virus
aaaaaaucuuca

SEQ ID NO: 3257653 - RNA, 16 nt, Vaccinia virus
ugcuuuagugaaauuu

SEQ ID NO: 3257654 - RNA, 16 nt, Vaccinia virus
auuucacaacuuuacu

SEQ ID NO: 3257655 - RNA, 22 nt, Vaccinia virus
uauuaacaguucguuugaugau

SEQ ID NO: 3257656 - RNA, 15 nt, Vaccinia virus
acagguucucaauau

SEQ ID NO: 3257657 - RNA, 12 nt, Vaccinia virus
ucaggaaaugua

SEQ ID NO: 3257658 - RNA, 20 nt, Vaccinia virus
aagaguuaaugaauaucauu

SEQ ID NO: 3257659 - RNA, 14 nt, Vaccinia virus
auuauauacugaac

SEQ ID NO: 3257660 - RNA, 19 nt, Vaccinia virus
caaucguuccaugaugggu

SEQ ID NO: 3257661 - RNA, 14 nt, Vaccinia virus
ucuucaucaaacag

SEQ ID NO: 3257662 - RNA, 16 nt, Vaccinia virus
cacaaagaaagcugua

SEQ ID NO: 3257663 - RNA, 16 nt, Vaccinia virus
agucuagguucacaau

SEQ ID NO: 3257664 - RNA, 19 nt, Vaccinia virus
aaacguuuggaaacuauac

SEQ ID NO: 3257665 - RNA, 15 nt, Vaccinia virus
aguaaguaugauauc

SEQ ID NO: 3257666 - RNA, 16 nt, Vaccinia virus
acaguucuuuucuagc

SEQ ID NO: 3257667 - RNA, 14 nt, Vaccinia virus
ccaucauuucucaa

SEQ ID NO: 3257668 - RNA, 16 nt, Vaccinia virus
auuacuuuaauaguug

SEQ ID NO: 3257669 - RNA, 20 nt, Vaccinia virus
guuccaauauguaucaaaga

SEQ ID NO: 3257670 - RNA, 19 nt, Vaccinia virus
uaauauuaaaaauaagaau

SEQ ID NO: 3257671 - RNA, 22 nt, Vaccinia virus
caaguauuguuuugauaacgau

SEQ ID NO: 3257672 - RNA, 23 nt, Vaccinia virus
aauauuaugaaugagagauaccu

SEQ ID NO: 3257673 - RNA, 19 nt, Vaccinia virus
cgauaaugugguuacucuu

SEQ ID NO: 3257674 - RNA, 19 nt, Vaccinia virus
gacuauagacauaauacua

SEQ ID NO: 3257675 - RNA, 16 nt, Vaccinia virus
acgauuauuauaaaau

SEQ ID NO: 3257676 - RNA, 12 nt, Vaccinia virus
ugacuguuuucu

SEQ ID NO: 3257677 - RNA, 18 nt, Vaccinia virus
uuuaaaaaaaaaauacuu

SEQ ID NO: 3257678 - RNA, 15 nt, Vaccinia virus
cauuaaauguuucau

SEQ ID NO: 3257679 - RNA, 23 nt, Vaccinia virus
caaucaaugauagacuagaagaa

SEQ ID NO: 3257680 - RNA, 22 nt, Vaccinia virus
agaauugauaauauaaauauga

SEQ ID NO: 3257681 - RNA, 13 nt, Vaccinia virus
caacacuauguua

SEQ ID NO: 3257682 - RNA, 15 nt, Vaccinia virus
uucugauuuuaacga

SEQ ID NO: 3257683 - RNA, 22 nt, Vaccinia virus
uaauacuuauucauauuuuagu

SEQ ID NO: 3257684 - RNA, 14 nt, Vaccinia virus
gaugagacauaucc

SEQ ID NO: 3257685 - RNA, 23 nt, Vaccinia virus
gaaauaccauaaauauauuucua

SEQ ID NO: 3257686 - RNA, 20 nt, Vaccinia virus
aaagcauuaauacaguuaug

SEQ ID NO: 3257687 - RNA, 18 nt, Vaccinia virus
auaaaaaauauucuucau

SEQ ID NO: 3257688 - RNA, 22 nt, Vaccinia virus
caaaucagacguuguaaauuau

SEQ ID NO: 3257689 - RNA, 22 nt, Vaccinia virus
gauagucguucucguucagaau

SEQ ID NO: 3257690 - RNA, 20 nt, Vaccinia virus
ugaguauugguauuacuaua

SEQ ID NO: 3257691 - RNA, 14 nt, Vaccinia virus
ucuacaaagucucu

SEQ ID NO: 3257692 - RNA, 15 nt, Vaccinia virus
aaauaaaaucuauau

SEQ ID NO: 3257693 - RNA, 22 nt, Vaccinia virus
gauaaaagaugcauauauuaga

SEQ ID NO: 3257694 - RNA, 16 nt, Vaccinia virus
acuauggcaauaauug

SEQ ID NO: 3257695 - RNA, 11 nt, Vaccinia virus
ccaaaaugaaa

SEQ ID NO: 3257696 - RNA, 14 nt, Vaccinia virus
caugaugagauguu

SEQ ID NO: 3257697 - RNA, 15 nt, Vaccinia virus
auuaacugaggauga

SEQ ID NO: 3257698 - RNA, 10 nt, Vaccinia virus
cauuugagaa

SEQ ID NO: 3257699 - RNA, 21 nt, Vaccinia virus
agaaaucauguuauaguguuu

SEQ ID NO: 3257700 - RNA, 19 nt, Vaccinia virus
ccgguuugcaaaacaaaaa

SEQ ID NO: 3257701 - RNA, 15 nt, Vaccinia virus
auaauacgaauauau

SEQ ID NO: 3257702 - RNA, 15 nt, Vaccinia virus
uauaaucguuaaauu

SEQ ID NO: 3257703 - RNA, 13 nt, Vaccinia virus
gauuauuuccugc

SEQ ID NO: 3257704 - RNA, 12 nt, Vaccinia virus
aaagauauuguu

SEQ ID NO: 3257705 - RNA, 21 nt, Vaccinia virus
uacaaacuauagaaauuauuu

SEQ ID NO: 3257706 - RNA, 14 nt, Vaccinia virus
auacaaauuuuacu

SEQ ID NO: 3257707 - RNA, 16 nt, Vaccinia virus
uacuuuauuacuccau

SEQ ID NO: 3257708 - RNA, 18 nt, Vaccinia virus
uaauauuucuauuucuau

SEQ ID NO: 3257709 - RNA, 15 nt, Vaccinia virus
uauaagauuaucaaa

SEQ ID NO: 3257710 - RNA, 16 nt, Vaccinia virus
aagucauaugugguau

SEQ ID NO: 3257711 - RNA, 13 nt, Vaccinia virus
auuaguuucuuga

SEQ ID NO: 3257712 - RNA, 19 nt, Vaccinia virus
uccguuuauuauuauacau

SEQ ID NO: 3257713 - RNA, 20 nt, Vaccinia virus
ccucaaacucgauauauuua

SEQ ID NO: 3257714 - RNA, 21 nt, Vaccinia virus
acuaguauaaaaucuguaucg

SEQ ID NO: 3257715 - RNA, 19 nt, Vaccinia virus
uaaaucuguauaucuuucc

SEQ ID NO: 3257716 - RNA, 19 nt, Vaccinia virus
auuggauaguuuuuuugaa

SEQ ID NO: 3257717 - RNA, 16 nt, Vaccinia virus
uuauaguuaacauuuu

SEQ ID NO: 3257718 - RNA, 18 nt, Vaccinia virus
aucacuaucgcccaggag

SEQ ID NO: 3257719 - RNA, 21 nt, Vaccinia virus
aguauauauaaguuauugcau

SEQ ID NO: 3257720 - RNA, 19 nt, Vaccinia virus
uuuuauggcaaacuuuacu

SEQ ID NO: 3257721 - RNA, 20 nt, Vaccinia virus
agauaugugauaaaaaucgu

SEQ ID NO: 3257722 - RNA, 17 nt, Vaccinia virus
gacagcgugaauaaugu

SEQ ID NO: 3257723 - RNA, 19 nt, Vaccinia virus
gacucauaagaaagagaau

SEQ ID NO: 3257724 - RNA, 17 nt, Vaccinia virus
uccuccuguagauaugu

SEQ ID NO: 3257725 - RNA, 15 nt, Vaccinia virus
aacaucuuaaaaauu

SEQ ID NO: 3257726 - RNA, 18 nt, Vaccinia virus
ugaugaguuguacaucuu

SEQ ID NO: 3257727 - RNA, 22 nt, Vaccinia virus
aauagacaaacuguaaguaugu

SEQ ID NO: 3257728 - RNA, 22 nt, Vaccinia virus
gcauccccuuucaauaguucuc

SEQ ID NO: 3257729 - RNA, 16 nt, Vaccinia virus
ucaucggaucuguaaa

SEQ ID NO: 3257730 - RNA, 11 nt, Vaccinia virus
ucacagucugu

SEQ ID NO: 3257731 - RNA, 12 nt, Vaccinia virus
auucaagagaau

SEQ ID NO: 3257732 - RNA, 22 nt, Vaccinia virus
uuugauauacuaagcaaguaca

SEQ ID NO: 3257733 - RNA, 19 nt, Vaccinia virus
guuuaaauucuuuaauauc

SEQ ID NO: 3257734 - RNA, 18 nt, Vaccinia virus
aagacuaucggacucuuc

SEQ ID NO: 3257735 - RNA, 15 nt, Vaccinia virus
augcaaucaacaagu

SEQ ID NO: 3257736 - RNA, 20 nt, Vaccinia virus
uaguuuuuauagauucuuua

SEQ ID NO: 3257737 - RNA, 15 nt, Vaccinia virus
aauacgaauuaugca

SEQ ID NO: 3257738 - RNA, 11 nt, Vaccinia virus
uuguagucuuu

SEQ ID NO: 3257739 - RNA, 14 nt, Vaccinia virus
uacuacguacugua

SEQ ID NO: 3257740 - RNA, 17 nt, Vaccinia virus
aucaucaccuaucuugu

SEQ ID NO: 3257741 - RNA, 15 nt, Vaccinia virus
aucguuuaaaguaaa

SEQ ID NO: 3257742 - RNA, 20 nt, Vaccinia virus
uaaauguggcuacaaacuuu

SEQ ID NO: 3257743 - RNA, 20 nt, Vaccinia virus
auccuuuaccaccaaauaaa

SEQ ID NO: 3257744 - RNA, 20 nt, Vaccinia virus
augaaauaucuuaaggagaa

SEQ ID NO: 3257745 - RNA, 18 nt, Vaccinia virus
guaagacuugacuagauc

SEQ ID NO: 3257746 - RNA, 15 nt, Vaccinia virus
uaaaaauaauuauua

SEQ ID NO: 3257747 - RNA, 17 nt, Vaccinia virus
ucuuaaaagguuucaua

SEQ ID NO: 3257748 - RNA, 21 nt, Vaccinia virus
ugauaucaaacggauauugcc

SEQ ID NO: 3257749 - RNA, 16 nt, Vaccinia virus
aaggagauauugaaac

SEQ ID NO: 3257750 - RNA, 20 nt, Vaccinia virus
cuacauggacucauuaaaac

SEQ ID NO: 3257751 - RNA, 19 nt, Vaccinia virus
caguuaaagaaaaauacuc

SEQ ID NO: 3257752 - RNA, 18 nt, Vaccinia virus
aacuauaucuauguugau

SEQ ID NO: 3257753 - RNA, 21 nt, Vaccinia virus
gauugaaauuauauucuuuuu

SEQ ID NO: 3257754 - RNA, 22 nt, Vaccinia virus
ccaauaauguauagacaauuau

SEQ ID NO: 3257755 - RNA, 12 nt, Vaccinia virus
gauuuuugucca

SEQ ID NO: 3257756 - RNA, 14 nt, Vaccinia virus
gucuaacaucucuc

SEQ ID NO: 3257757 - RNA, 20 nt, Vaccinia virus
uuauuagcccaaucuguaaa

SEQ ID NO: 3257758 - RNA, 14 nt, Vaccinia virus
ucuaagauguugua

SEQ ID NO: 3257759 - RNA, 19 nt, Vaccinia virus
aauggaugaggaagugaua

SEQ ID NO: 3257760 - RNA, 22 nt, Vaccinia virus
cucaugagaauggaaaggaaac

SEQ ID NO: 3257761 - RNA, 12 nt, Vaccinia virus
aauguuaccaua

SEQ ID NO: 3257762 - RNA, 14 nt, Vaccinia virus
acugaaucauauau

SEQ ID NO: 3257763 - RNA, 14 nt, Vaccinia virus
augguuacauuuau

SEQ ID NO: 3257764 - RNA, 20 nt, Vaccinia virus
acggcaaaccaaaaacauuu

SEQ ID NO: 3257765 - RNA, 13 nt, Vaccinia virus
uuaaaaaaauuaa

SEQ ID NO: 3257766 - RNA, 13 nt, Vaccinia virus
aguuaaaaugaua

SEQ ID NO: 3257767 - RNA, 16 nt, Vaccinia virus
agauucucuaugagac

SEQ ID NO: 3257768 - RNA, 16 nt, Vaccinia virus
acuaacgaaauuaaua

SEQ ID NO: 3257769 - RNA, 16 nt, Vaccinia virus
ucuaaagagauuuaga

SEQ ID NO: 3257770 - RNA, 12 nt, Vaccinia virus
uguaauaucuua

SEQ ID NO: 3257771 - RNA, 16 nt, Vaccinia virus
auaggauacuuuguaa

SEQ ID NO: 3257772 - RNA, 18 nt, Vaccinia virus
acacauauugaugugucu

SEQ ID NO: 3257773 - RNA, 21 nt, Vaccinia virus
uuugauaggaucuauaaugua

SEQ ID NO: 3257774 - RNA, 23 nt, Vaccinia virus
cuauagaagagcgacagacaucu

SEQ ID NO: 3257775 - RNA, 19 nt, Vaccinia virus
auacuaguagcuucacaaa

SEQ ID NO: 3257776 - RNA, 14 nt, Vaccinia virus
cagaagcaauaaau

SEQ ID NO: 3257777 - RNA, 16 nt, Vaccinia virus
gaauccgcuacauauu

SEQ ID NO: 3257778 - RNA, 17 nt, Vaccinia virus
aaacuaguucugagaaa

SEQ ID NO: 3257779 - RNA, 16 nt, Vaccinia virus
cguaaacgcagauauu

SEQ ID NO: 3257780 - RNA, 22 nt, Vaccinia virus
uaugguauugauaaaauuaaug

SEQ ID NO: 3257781 - RNA, 16 nt, Vaccinia virus
uuaacuagauuauaca

SEQ ID NO: 3257782 - RNA, 16 nt, Vaccinia virus
auuaaacuuuaaugau

SEQ ID NO: 3257783 - RNA, 18 nt, Vaccinia virus
ucacaauuaaaucauuga

SEQ ID NO: 3257784 - RNA, 12 nt, Vaccinia virus
agcugaaaugag

SEQ ID NO: 3257785 - RNA, 11 nt, Vaccinia virus
acuauuucauu

SEQ ID NO: 3257786 - RNA, 13 nt, Vaccinia virus
auaauaucuauau

SEQ ID NO: 3257787 - RNA, 17 nt, Vaccinia virus
uuaacuuccacauuaau

SEQ ID NO: 3257788 - RNA, 19 nt, Vaccinia virus
aucuuuggagaaucgucua

SEQ ID NO: 3257789 - RNA, 20 nt, Vaccinia virus
acuaaugcaucuauuucauc

SEQ ID NO: 3257790 - RNA, 19 nt, Vaccinia virus
aagauugucauguggauua

SEQ ID NO: 3257791 - RNA, 16 nt, Vaccinia virus
augucuguagaaaaaa

SEQ ID NO: 3257792 - RNA, 18 nt, Vaccinia virus
acgacucuugagacuuua

SEQ ID NO: 3257793 - RNA, 12 nt, Vaccinia virus
uuaaagauauca

SEQ ID NO: 3257794 - RNA, 23 nt, Vaccinia virus
agaauaucuaucgacucuagaug

SEQ ID NO: 3257795 - RNA, 22 nt, Vaccinia virus
auguucgugguguuaugaaaca

SEQ ID NO: 3257796 - RNA, 22 nt, Vaccinia virus
gaugucugaaacguauucucuu

SEQ ID NO: 3257797 - RNA, 15 nt, Vaccinia virus
uaacauaaaaacuua

SEQ ID NO: 3257798 - RNA, 18 nt, Vaccinia virus
agaacucuuuaaacgaua

SEQ ID NO: 3257799 - RNA, 22 nt, Vaccinia virus
acuguuaguauaacgugaaugu

SEQ ID NO: 3257800 - RNA, 21 nt, Vaccinia virus
auuuguaauaauccuaucuaa

SEQ ID NO: 3257801 - RNA, 23 nt, Vaccinia virus
aucuaacaaaaauuaugaaauaa

SEQ ID NO: 3257802 - RNA, 19 nt, Vaccinia virus
ucuaguauccauuuuacau

SEQ ID NO: 3257803 - RNA, 19 nt, Vaccinia virus
uuaauuuguacauucuuaa

SEQ ID NO: 3257804 - RNA, 22 nt, Vaccinia virus
acucuaucauggcaauaacaca

SEQ ID NO: 3257805 - RNA, 19 nt, Vaccinia virus
ugucuacauaaauaugcaa

SEQ ID NO: 3257806 - RNA, 15 nt, Vaccinia virus
auauuacaaauacuu

SEQ ID NO: 3257807 - RNA, 14 nt, Vaccinia virus
aaaguuaagaucug

SEQ ID NO: 3257808 - RNA, 17 nt, Vaccinia virus
acccuuccagauaaugu

SEQ ID NO: 3257809 - RNA, 20 nt, Vaccinia virus
ccaugucaauugaguuuaua

SEQ ID NO: 3257810 - RNA, 19 nt, Vaccinia virus
aguuaaaacuuguaagaag

SEQ ID NO: 3257811 - RNA, 21 nt, Vaccinia virus
gcuaacgaugagauucaucgu

SEQ ID NO: 3257812 - RNA, 22 nt, Vaccinia virus
uccaggaucguuucuacaaaau

SEQ ID NO: 3257813 - RNA, 19 nt, Vaccinia virus
acacauuaaacaaaaaucu

SEQ ID NO: 3257814 - RNA, 13 nt, Vaccinia virus
augcaccauccga

SEQ ID NO: 3257815 - RNA, 16 nt, Vaccinia virus
gucggaggauguguua

SEQ ID NO: 3257816 - RNA, 19 nt, Vaccinia virus
aucaagagugauuuaagaa

SEQ ID NO: 3257817 - RNA, 13 nt, Vaccinia virus
auccuaacaauga

SEQ ID NO: 3257818 - RNA, 21 nt, Vaccinia virus
agcauauuccuaaauacaucu

SEQ ID NO: 3257819 - RNA, 21 nt, Vaccinia virus
caaauuccggaauagauguau

SEQ ID NO: 3257820 - RNA, 12 nt, Vaccinia virus
caauuaaaugua

SEQ ID NO: 3257821 - RNA, 19 nt, Vaccinia virus
uggaaugacgaauccuguu

SEQ ID NO: 3257822 - RNA, 18 nt, Vaccinia virus
cuauugauugaguacugu

SEQ ID NO: 3257823 - RNA, 16 nt, Vaccinia virus
aaacuaaacuuauuua

SEQ ID NO: 3257824 - RNA, 19 nt, Vaccinia virus
auauuguugauaauacaac

SEQ ID NO: 3257825 - RNA, 17 nt, Vaccinia virus
uaguauaacacacaugu

SEQ ID NO: 3257826 - RNA, 14 nt, Vaccinia virus
uuucgaauaaguuu

SEQ ID NO: 3257827 - RNA, 21 nt, Vaccinia virus
aaauagcucuuaguaugggaa

SEQ ID NO: 3257828 - RNA, 18 nt, Vaccinia virus
aagaccaauuaacgauga

SEQ ID NO: 3257829 - RNA, 18 nt, Vaccinia virus
cuacuaccgaugauguaa

SEQ ID NO: 3257830 - RNA, 18 nt, Vaccinia virus
aacagaaacguuuagaga

SEQ ID NO: 3257831 - RNA, 18 nt, Vaccinia virus
aguauucucggauacucu

SEQ ID NO: 3257832 - RNA, 12 nt, Vaccinia virus
auuaauacuuuu

SEQ ID NO: 3257833 - RNA, 22 nt, Vaccinia virus
ggagaguauccucuaugaagaa

SEQ ID NO: 3257834 - RNA, 14 nt, Vaccinia virus
gucaacaaaaaugu

SEQ ID NO: 3257835 - RNA, 19 nt, Vaccinia virus
aucuccaucgaugauacau

SEQ ID NO: 3257836 - RNA, 15 nt, Vaccinia virus
uagaacaauguguga

SEQ ID NO: 3257837 - RNA, 15 nt, Vaccinia virus
auuuuauacuagagu

SEQ ID NO: 3257838 - RNA, 16 nt, Vaccinia virus
auuacggagugugaaa

SEQ ID NO: 3257839 - RNA, 19 nt, Vaccinia virus
uagaaugugauaauuauuu

SEQ ID NO: 3257840 - RNA, 15 nt, Vaccinia virus
uuauguaacuguaaa

SEQ ID NO: 3257841 - RNA, 18 nt, Vaccinia virus
uauccaacgauuuuuagu

SEQ ID NO: 3257842 - RNA, 15 nt, Vaccinia virus
uggaggcucaacaag

SEQ ID NO: 3257843 - RNA, 23 nt, Vaccinia virus
augcggugccauucaugaaaaug

SEQ ID NO: 3257844 - RNA, 23 nt, Vaccinia virus
cuaaaaaauagcgcugaaaauaa

SEQ ID NO: 3257845 - RNA, 12 nt, Vaccinia virus
gaacuaauaaag

SEQ ID NO: 3257846 - RNA, 15 nt, Vaccinia virus
cagucugaacgcauu

SEQ ID NO: 3257847 - RNA, 23 nt, Vaccinia virus
aauaagaucguccguaacaaagu

SEQ ID NO: 3257848 - RNA, 19 nt, Vaccinia virus
uaauauucguauuuugcau

SEQ ID NO: 3257849 - RNA, 16 nt, Vaccinia virus
augacauggaaauauc

SEQ ID NO: 3257850 - RNA, 14 nt, Vaccinia virus
uaucgaauuucuac

SEQ ID NO: 3257851 - RNA, 18 nt, Vaccinia virus
gacguuagaaucaagaau

SEQ ID NO: 3257852 - RNA, 22 nt, Vaccinia virus
ucucucaaucacuacaucuuua

SEQ ID NO: 3257853 - RNA, 22 nt, Vaccinia virus
uugaaccaguccauggaaaaga

SEQ ID NO: 3257854 - RNA, 19 nt, Vaccinia virus
aaaguaauauucauaugua

SEQ ID NO: 3257855 - RNA, 15 nt, Vaccinia virus
aaaaugcuagaauua

SEQ ID NO: 3257856 - RNA, 19 nt, Vaccinia virus
cuaucaaaauauguagaaa

SEQ ID NO: 3257857 - RNA, 20 nt, Vaccinia virus
gaauaaaguuggaaguuuaa

SEQ ID NO: 3257858 - RNA, 20 nt, Vaccinia virus
uaauaaagacuucuuucuca

SEQ ID NO: 3257859 - RNA, 17 nt, Vaccinia virus
uuucuaccuuuucaauu

SEQ ID NO: 3257860 - RNA, 17 nt, Vaccinia virus
uguauggcguuuacuau

SEQ ID NO: 3257861 - RNA, 19 nt, Vaccinia virus
cuauuaucuccguuauaga

SEQ ID NO: 3257862 - RNA, 22 nt, Vaccinia virus
auagauauuaauuaucacauau

SEQ ID NO: 3257863 - RNA, 22 nt, Vaccinia virus
uaguuguauacugagaauugac

SEQ ID NO: 3257864 - RNA, 20 nt, Vaccinia virus
uaaacuuuauccauaucucu

SEQ ID NO: 3257865 - RNA, 14 nt, Vaccinia virus
auaaguaaaugaaa

SEQ ID NO: 3257866 - RNA, 23 nt, Vaccinia virus
acccuuccuuaaacgugaaugau

SEQ ID NO: 3257867 - RNA, 23 nt, Vaccinia virus
ccaguauggaagaggauuuucua

SEQ ID NO: 3257868 - RNA, 16 nt, Vaccinia virus
aaucgauuuuguaaua

SEQ ID NO: 3257869 - RNA, 23 nt, Vaccinia virus
agauaugguaaaauuaaauagua

SEQ ID NO: 3257870 - RNA, 21 nt, Vaccinia virus
aaauguauaacaaauacagaa

SEQ ID NO: 3257871 - RNA, 16 nt, Vaccinia virus
auugaacgguaucuuc

SEQ ID NO: 3257872 - RNA, 19 nt, Vaccinia virus
uaguaugucgauauacuua

SEQ ID NO: 3257873 - RNA, 12 nt, Vaccinia virus
uuaguuaacaua

SEQ ID NO: 3257874 - RNA, 14 nt, Vaccinia virus
agaaggaaacuucu

SEQ ID NO: 3257875 - RNA, 13 nt, Vaccinia virus
caaacaauguaua

SEQ ID NO: 3257876 - RNA, 17 nt, Vaccinia virus
guaauaagaauaaaaug

SEQ ID NO: 3257877 - RNA, 22 nt, Vaccinia virus
auucuaugucgucuacuggaug

SEQ ID NO: 3257878 - RNA, 12 nt, Vaccinia virus
uaacgaaaauau

SEQ ID NO: 3257879 - RNA, 15 nt, Vaccinia virus
acagaacaauauauu

SEQ ID NO: 3257880 - RNA, 15 nt, Vaccinia virus
aacaaacaucucacc

SEQ ID NO: 3257881 - RNA, 19 nt, Vaccinia virus
uaguucuuugaacaucuug

SEQ ID NO: 3257882 - RNA, 22 nt, Vaccinia virus
aaacuuuagaagaauaucucaa

SEQ ID NO: 3257883 - RNA, 16 nt, Vaccinia virus
uuauaacuuauugucu

SEQ ID NO: 3257884 - RNA, 20 nt, Vaccinia virus
ucauacgauaugccuccaga

SEQ ID NO: 3257885 - RNA, 17 nt, Vaccinia virus
augagcauuaguauuuc

SEQ ID NO: 3257886 - RNA, 20 nt, Vaccinia virus
gacaaacgcugauagaugau

SEQ ID NO: 3257887 - RNA, 13 nt, Vaccinia virus
agauuaaaaaugg

SEQ ID NO: 3257888 - RNA, 20 nt, Vaccinia virus
uacuaaaagaucaaccaaaa

SEQ ID NO: 3257889 - RNA, 22 nt, Vaccinia virus
aaucaagauucauuuuuaaaau

SEQ ID NO: 3257890 - RNA, 14 nt, Vaccinia virus
ucagaaucaaauau

SEQ ID NO: 3257891 - RNA, 13 nt, Vaccinia virus
acuuuaucuaaau

SEQ ID NO: 3257892 - RNA, 16 nt, Vaccinia virus
uuagccguuguuugag

SEQ ID NO: 3257893 - RNA, 22 nt, Vaccinia virus
auaaaucuacucagauuauucu

SEQ ID NO: 3257894 - RNA, 22 nt, Vaccinia virus
aaaagacaaauauauguggugu

SEQ ID NO: 3257895 - RNA, 13 nt, Vaccinia virus
uggaaaaaugaug

SEQ ID NO: 3257896 - RNA, 15 nt, Vaccinia virus
auuucaaaauuauuu

SEQ ID NO: 3257897 - RNA, 22 nt, Vaccinia virus
auaaauaggaguuagaauaaua

SEQ ID NO: 3257898 - RNA, 21 nt, Vaccinia virus
uaacucuuucgaauacuuauu

SEQ ID NO: 3257899 - RNA, 14 nt, Vaccinia virus
gauuaguaaauuca

SEQ ID NO: 3257900 - RNA, 20 nt, Vaccinia virus
ucaugaauacguuuaauguu

SEQ ID NO: 3257901 - RNA, 21 nt, Vaccinia virus
ucuacaaaaaggacauguaua

SEQ ID NO: 3257902 - RNA, 22 nt, Vaccinia virus
ucuaaaguuaagagauuuagaa

SEQ ID NO: 3257903 - RNA, 15 nt, Vaccinia virus
aagauaaaagaauuc

SEQ ID NO: 3257904 - RNA, 20 nt, Vaccinia virus
acacuauucuuaaauuucau

SEQ ID NO: 3257905 - RNA, 13 nt, Vaccinia virus
uauuuccauaaua

SEQ ID NO: 3257906 - RNA, 13 nt, Vaccinia virus
aagauuguucucu

SEQ ID NO: 3257907 - RNA, 12 nt, Vaccinia virus
aaauaaaguuau

SEQ ID NO: 3257908 - RNA, 17 nt, Vaccinia virus
uuagaugguuucuuuuu

SEQ ID NO: 3257909 - RNA, 13 nt, Vaccinia virus
aagaaaacucguc

SEQ ID NO: 3257910 - RNA, 19 nt, Vaccinia virus
cuauaaaaagaguuucaaa

SEQ ID NO: 3257911 - RNA, 12 nt, Vaccinia virus
aauauuaggaau

SEQ ID NO: 3257912 - RNA, 13 nt, Vaccinia virus
cgugguagauguu

SEQ ID NO: 3257913 - RNA, 13 nt, Vaccinia virus
uccuuccaaugau

SEQ ID NO: 3257914 - RNA, 14 nt, Vaccinia virus
cggauaaaaguuuu

SEQ ID NO: 3257915 - RNA, 15 nt, Vaccinia virus
uagcgugaaggauau

SEQ ID NO: 3257916 - RNA, 17 nt, Vaccinia virus
aguuaucccacuagaga

SEQ ID NO: 3257917 - RNA, 18 nt, Vaccinia virus
ugaaaacuuuaaauacuu

SEQ ID NO: 3257918 - RNA, 22 nt, Vaccinia virus
ucuauaggugaugcugguucug

SEQ ID NO: 3257919 - RNA, 20 nt, Vaccinia virus
aacuccguguuuaugaugcc

SEQ ID NO: 3257920 - RNA, 13 nt, Vaccinia virus
acaugcuguauac

SEQ ID NO: 3257921 - RNA, 14 nt, Vaccinia virus
aggagcauacagua

SEQ ID NO: 3257922 - RNA, 17 nt, Vaccinia virus
gaauaguaguagcucua

SEQ ID NO: 3257923 - RNA, 16 nt, Vaccinia virus
gagauaaucuauauca

SEQ ID NO: 3257924 - RNA, 18 nt, Vaccinia virus
cucuuuaacgaaauuaaa

SEQ ID NO: 3257925 - RNA, 20 nt, Vaccinia virus
cauaaugcagauuuauugaa

SEQ ID NO: 3257926 - RNA, 18 nt, Vaccinia virus
augcagauuuauugaaaa

SEQ ID NO: 3257927 - RNA, 15 nt, Vaccinia virus
aauuugauaaagaua

SEQ ID NO: 3257928 - RNA, 18 nt, Vaccinia virus
ucaguaacuauguucauu

SEQ ID NO: 3257929 - RNA, 18 nt, Vaccinia virus
uauucuguucuauucaaa

SEQ ID NO: 3257930 - RNA, 18 nt, Vaccinia virus
cagaaggcgguaauagaa

SEQ ID NO: 3257931 - RNA, 24 nt, Vaccinia virus
agaucgcuuucugguaacaugaua

SEQ ID NO: 3257932 - RNA, 16 nt, Vaccinia virus
augguacaaaaaagaa

SEQ ID NO: 3257933 - RNA, 19 nt, Vaccinia virus
acaaacuuuuccuuuucca

SEQ ID NO: 3257934 - RNA, 14 nt, Vaccinia virus
aauaguuuaucaua

SEQ ID NO: 3257935 - RNA, 18 nt, Vaccinia virus
auugauaaaauuaaugag

SEQ ID NO: 3257936 - RNA, 15 nt, Vaccinia virus
acuuggaaacaucuc

SEQ ID NO: 3257937 - RNA, 17 nt, Vaccinia virus
cguauauagaugucaau

SEQ ID NO: 3257938 - RNA, 14 nt, Vaccinia virus
uucccauucuaaug

SEQ ID NO: 3257939 - RNA, 16 nt, Vaccinia virus
guuaagccugaauuua

SEQ ID NO: 3257940 - RNA, 15 nt, Vaccinia virus
cuauacaagucgucu

SEQ ID NO: 3257941 - RNA, 16 nt, Vaccinia virus
uccauuauuaauaaga

SEQ ID NO: 3257942 - RNA, 13 nt, Vaccinia virus
cauucaaauguug

SEQ ID NO: 3257943 - RNA, 20 nt, Vaccinia virus
gaauauagaucgaaaaauau

SEQ ID NO: 3257944 - RNA, 21 nt, Vaccinia virus
cuguacacauaguguuacaaa

SEQ ID NO: 3257945 - RNA, 22 nt, Vaccinia virus
aacauacuauuguuuauuaucu

SEQ ID NO: 3257946 - RNA, 14 nt, Vaccinia virus
acauccgaaaaagu

SEQ ID NO: 3257947 - RNA, 14 nt, Vaccinia virus
uucaagauuaucuu

SEQ ID NO: 3257948 - RNA, 14 nt, Vaccinia virus
uguaaaauaucuuc

SEQ ID NO: 3257949 - RNA, 23 nt, Vaccinia virus
uauauucaguaaccaaauacaua

SEQ ID NO: 3257950 - RNA, 18 nt, Vaccinia virus
gaaggaggaacaguuuua

SEQ ID NO: 3257951 - RNA, 21 nt, Vaccinia virus
cuagaccgaugaccauuuaaa

SEQ ID NO: 3257952 - RNA, 14 nt, Vaccinia virus
caaauaauaaacua

SEQ ID NO: 3257953 - RNA, 23 nt, Vaccinia virus
cggcauuucuuuuuaaugauaua

SEQ ID NO: 3257954 - RNA, 14 nt, Vaccinia virus
auuauuauguugau

SEQ ID NO: 3257955 - RNA, 13 nt, Vaccinia virus
ugauugaacgauu

SEQ ID NO: 3257956 - RNA, 13 nt, Vaccinia virus
agauaaacuaaau

SEQ ID NO: 3257957 - RNA, 12 nt, Vaccinia virus
aauaaauacuuu

SEQ ID NO: 3257958 - RNA, 14 nt, Vaccinia virus
uggagaucauuaaa

SEQ ID NO: 3257959 - RNA, 17 nt, Vaccinia virus
uagaucauuugaaauua

SEQ ID NO: 3257960 - RNA, 16 nt, Vaccinia virus
acaaugacugauauau

SEQ ID NO: 3257961 - RNA, 18 nt, Vaccinia virus
uaucuacgauccaucaaa

SEQ ID NO: 3257962 - RNA, 16 nt, Vaccinia virus
gcuaucgcauaaucug

SEQ ID NO: 3257963 - RNA, 14 nt, Vaccinia virus
aggcgucaaagaua

SEQ ID NO: 3257964 - RNA, 19 nt, Vaccinia virus
uuugaauauacuuuuaauu

SEQ ID NO: 3257965 - RNA, 15 nt, Vaccinia virus
agcauuuuuauaauu

SEQ ID NO: 3257966 - RNA, 13 nt, Vaccinia virus
agaaauaaaaauu

SEQ ID NO: 3257967 - RNA, 12 nt, Vaccinia virus
uuucauacauau

SEQ ID NO: 3257968 - RNA, 17 nt, Vaccinia virus
aacuucucuaaaugagu

SEQ ID NO: 3257969 - RNA, 14 nt, Vaccinia virus
uaauugacaucuau

SEQ ID NO: 3257970 - RNA, 17 nt, Vaccinia virus
uaguauacccaaagaga

SEQ ID NO: 3257971 - RNA, 23 nt, Vaccinia virus
uacuaaaaaauguagaaauugaa

SEQ ID NO: 3257972 - RNA, 20 nt, Vaccinia virus
aaguuucugaaauaagauua

SEQ ID NO: 3257973 - RNA, 18 nt, Vaccinia virus
uaagagacgggaaaauag

SEQ ID NO: 3257974 - RNA, 16 nt, Vaccinia virus
uauaaacucucaacau

SEQ ID NO: 3257975 - RNA, 16 nt, Vaccinia virus
aacaacaccaugagau

SEQ ID NO: 3257976 - RNA, 16 nt, Vaccinia virus
uuuaaccuauacauga

SEQ ID NO: 3257977 - RNA, 22 nt, Vaccinia virus
uaaauguuuaaacaucaaacau

SEQ ID NO: 3257978 - RNA, 14 nt, Vaccinia virus
uguaggaaaaagau

SEQ ID NO: 3257979 - RNA, 22 nt, Vaccinia virus
uuauugguauuucuuacauaaa

SEQ ID NO: 3257980 - RNA, 21 nt, Vaccinia virus
cguagcaaaaguaagcauuuc

SEQ ID NO: 3257981 - RNA, 22 nt, Vaccinia virus
auucuaccuuuuuauuuucuaa

SEQ ID NO: 3257982 - RNA, 12 nt, Vaccinia virus
auaaacuagaga

SEQ ID NO: 3257983 - RNA, 14 nt, Vaccinia virus
cauagccaauggau

SEQ ID NO: 3257984 - RNA, 20 nt, Vaccinia virus
ccgcaauaacaugguaacug

SEQ ID NO: 3257985 - RNA, 19 nt, Vaccinia virus
aaaugaaccucuggaauua

SEQ ID NO: 3257986 - RNA, 20 nt, Vaccinia virus
uccacaccgccucuagauau

SEQ ID NO: 3257987 - RNA, 23 nt, Vaccinia virus
gugauccuauaaacaugaauuua

SEQ ID NO: 3257988 - RNA, 21 nt, Vaccinia virus
auauaucuacuucuuccacug

SEQ ID NO: 3257989 - RNA, 21 nt, Vaccinia virus
aguuuuauuauaaguuaaaau

SEQ ID NO: 3257990 - RNA, 16 nt, Vaccinia virus
auauguauuuuaauaa

SEQ ID NO: 3257991 - RNA, 15 nt, Vaccinia virus
ucguuaaaaaguuuu

SEQ ID NO: 3257992 - RNA, 19 nt, Vaccinia virus
uuuauugucguacuuuaua

SEQ ID NO: 3257993 - RNA, 14 nt, Vaccinia virus
gaaaaauauaaugu

SEQ ID NO: 3257994 - RNA, 21 nt, Vaccinia virus
uagauuucgaaaauacuaaau

SEQ ID NO: 3257995 - RNA, 13 nt, Vaccinia virus
cgcauaaacauua

SEQ ID NO: 3257996 - RNA, 18 nt, Vaccinia virus
aauuaauaguuuugauau

SEQ ID NO: 3257997 - RNA, 12 nt, Vaccinia virus
agaaauaaagua

SEQ ID NO: 3257998 - RNA, 13 nt, Vaccinia virus
uauacuucuccaa

SEQ ID NO: 3257999 - RNA, 23 nt, Vaccinia virus
aaugaauuaauuaagauauuguu

SEQ ID NO: 3258000 - RNA, 22 nt, Vaccinia virus
acauaguuugggaaaagaaauc

SEQ ID NO: 3258001 - RNA, 23 nt, Vaccinia virus
auaagaugacuguagaacucaug

SEQ ID NO: 3258002 - RNA, 14 nt, Vaccinia virus
auuuagauuaucaa

SEQ ID NO: 3258003 - RNA, 15 nt, Vaccinia virus
auuguacgaacgaag

SEQ ID NO: 3258004 - RNA, 17 nt, Vaccinia virus
gaaacgauaucaugaac

SEQ ID NO: 3258005 - RNA, 17 nt, Vaccinia virus
gaucacuguagugcuau

SEQ ID NO: 3258006 - RNA, 14 nt, Vaccinia virus
uauauucuaucaua

SEQ ID NO: 3258007 - RNA, 13 nt, Vaccinia virus
accaaacauucuu

SEQ ID NO: 3258008 - RNA, 22 nt, Vaccinia virus
auaauuucuguaaauucaugau

SEQ ID NO: 3258009 - RNA, 13 nt, Vaccinia virus
guccauuuucugu

SEQ ID NO: 3258010 - RNA, 16 nt, Vaccinia virus
auuugagaguuuuaua

SEQ ID NO: 3258011 - RNA, 17 nt, Vaccinia virus
aaauguugauagcugaa

SEQ ID NO: 3258012 - RNA, 16 nt, Vaccinia virus
caaauaaguauuauca

SEQ ID NO: 3258013 - RNA, 20 nt, Vaccinia virus
cagaaggaggaacaguuuua

SEQ ID NO: 3258014 - RNA, 19 nt, Vaccinia virus
aauuguauuauugauacaa

SEQ ID NO: 3258015 - RNA, 21 nt, Vaccinia virus
gaugcuauguuuauagauguu

SEQ ID NO: 3258016 - RNA, 16 nt, Vaccinia virus
cuauacgaugaauaca

SEQ ID NO: 3258017 - RNA, 19 nt, Vaccinia virus
gcagaaaugcaauuaaaaa

SEQ ID NO: 3258018 - RNA, 19 nt, Vaccinia virus
gaaauuuggguacugugaa

SEQ ID NO: 3258019 - RNA, 14 nt, Vaccinia virus
ccuguucaaauuua

SEQ ID NO: 3258020 - RNA, 22 nt, Vaccinia virus
ccaagauccucucuuaaaugaa

SEQ ID NO: 3258021 - RNA, 20 nt, Vaccinia virus
ugcauugacuuuguuaguga

SEQ ID NO: 3258022 - RNA, 15 nt, Vaccinia virus
aacguaaaauacaua

SEQ ID NO: 3258023 - RNA, 13 nt, Vaccinia virus
uauaaaaacuuuu

SEQ ID NO: 3258024 - RNA, 17 nt, Vaccinia virus
gaauuaguuagauauau

SEQ ID NO: 3258025 - RNA, 16 nt, Vaccinia virus
auacuaugaugucuag

SEQ ID NO: 3258026 - RNA, 18 nt, Vaccinia virus
ccauguugucuauuucca

SEQ ID NO: 3258027 - RNA, 16 nt, Vaccinia virus
aucucccauaaucuug

SEQ ID NO: 3258028 - RNA, 15 nt, Vaccinia virus
auuccuauucauuuu

SEQ ID NO: 3258029 - RNA, 16 nt, Vaccinia virus
auuaucuacaguguau

SEQ ID NO: 3258030 - RNA, 18 nt, Vaccinia virus
ucuaauccuccuauuaca

SEQ ID NO: 3258031 - RNA, 17 nt, Vaccinia virus
uucuauuuuuaauauag

SEQ ID NO: 3258032 - RNA, 12 nt, Vaccinia virus
aaauauauuguu

SEQ ID NO: 3258033 - RNA, 13 nt, Vaccinia virus
aucacaaaucaca

SEQ ID NO: 3258034 - RNA, 20 nt, Vaccinia virus
uccauguugucuauuuccaa

SEQ ID NO: 3258035 - RNA, 23 nt, Vaccinia virus
cuuuuagagguucccaauuccaa

SEQ ID NO: 3258036 - RNA, 14 nt, Vaccinia virus
uccaaguuucuauu

SEQ ID NO: 3258037 - RNA, 14 nt, Vaccinia virus
auaccaaucauuua

SEQ ID NO: 3258038 - RNA, 13 nt, Vaccinia virus
auuacuacugaag

SEQ ID NO: 3258039 - RNA, 16 nt, Vaccinia virus
gcggcaucuaaauuaa

SEQ ID NO: 3258040 - RNA, 20 nt, Vaccinia virus
agcuuucacuuaaacuguau

SEQ ID NO: 3258041 - RNA, 15 nt, Vaccinia virus
uacaaaauguuugac

SEQ ID NO: 3258042 - RNA, 22 nt, Vaccinia virus
aucaccauggacauaaagauag

SEQ ID NO: 3258043 - RNA, 24 nt, Vaccinia virus
uagaaucagcgucguuuaacacaa

SEQ ID NO: 3258044 - RNA, 14 nt, Vaccinia virus
auaauaucagaugu

SEQ ID NO: 3258045 - RNA, 23 nt, Vaccinia virus
uuuuuagccggaauaacaucauc

SEQ ID NO: 3258046 - RNA, 15 nt, Vaccinia virus
auacuuuuucuagaa

SEQ ID NO: 3258047 - RNA, 15 nt, Vaccinia virus
guaucauuuaaacau

SEQ ID NO: 3258048 - RNA, 14 nt, Vaccinia virus
uuagugaaacauuc

SEQ ID NO: 3258049 - RNA, 22 nt, Vaccinia virus
aagaguuucaaaaauauucauu

SEQ ID NO: 3258050 - RNA, 19 nt, Vaccinia virus
aauacuauuacagaaguuu

SEQ ID NO: 3258051 - RNA, 18 nt, Vaccinia virus
cucucucacuacacuuuu

SEQ ID NO: 3258052 - RNA, 12 nt, Vaccinia virus
ugccacaaauga

SEQ ID NO: 3258053 - RNA, 13 nt, Vaccinia virus
agaaauauauacu

SEQ ID NO: 3258054 - RNA, 14 nt, Vaccinia virus
uguuauuaucuguu

SEQ ID NO: 3258055 - RNA, 12 nt, Vaccinia virus
gaguaguuuaug

SEQ ID NO: 3258056 - RNA, 14 nt, Vaccinia virus
agaaugaaacagua

SEQ ID NO: 3258057 - RNA, 19 nt, Vaccinia virus
uagaaauaucuaggacaau

SEQ ID NO: 3258058 - RNA, 23 nt, Vaccinia virus
auuucuccaaagaauauaucuaa

SEQ ID NO: 3258059 - RNA, 14 nt, Vaccinia virus
aaagaaguauacua

SEQ ID NO: 3258060 - RNA, 19 nt, Vaccinia virus
uaagaccuaccucucuuaa

SEQ ID NO: 3258061 - RNA, 21 nt, Vaccinia virus
acgauaaaaauaauauuguuu

SEQ ID NO: 3258062 - RNA, 21 nt, Vaccinia virus
aauaauaucccacauuaucau

SEQ ID NO: 3258063 - RNA, 16 nt, Vaccinia virus
agcauucaaauccgaa

SEQ ID NO: 3258064 - RNA, 19 nt, Vaccinia virus
uaauauuucacaugaugua

SEQ ID NO: 3258065 - RNA, 14 nt, Vaccinia virus
guagauacauggcu

SEQ ID NO: 3258066 - RNA, 17 nt, Vaccinia virus
ccaaucauugauaucuu

SEQ ID NO: 3258067 - RNA, 16 nt, Vaccinia virus
gaaaaacacauaucua

SEQ ID NO: 3258068 - RNA, 15 nt, Vaccinia virus
auauuuuuuaauagu

SEQ ID NO: 3258069 - RNA, 21 nt, Vaccinia virus
agauaccucaccgaguuaaaa

SEQ ID NO: 3258070 - RNA, 12 nt, Vaccinia virus
caaucuaucuau

SEQ ID NO: 3258071 - RNA, 18 nt, Vaccinia virus
uaacaaauuuccuaaaua

SEQ ID NO: 3258072 - RNA, 18 nt, Vaccinia virus
uacucauuuaacagaugu

SEQ ID NO: 3258073 - RNA, 22 nt, Vaccinia virus
auaucaucuuuucacuaaauaa

SEQ ID NO: 3258074 - RNA, 13 nt, Vaccinia virus
uaccuuaaucaug

SEQ ID NO: 3258075 - RNA, 15 nt, Vaccinia virus
uuauuagauuuggua

SEQ ID NO: 3258076 - RNA, 17 nt, Vaccinia virus
cacgaauauuacuaauu

SEQ ID NO: 3258077 - RNA, 14 nt, Vaccinia virus
uggacaacauuaau

SEQ ID NO: 3258078 - RNA, 21 nt, Vaccinia virus
auucugguuuaaaaacacaca

SEQ ID NO: 3258079 - RNA, 21 nt, Vaccinia virus
aguaugaagaccuauuaauaa

SEQ ID NO: 3258080 - RNA, 21 nt, Vaccinia virus
auaugcucauauauuuauaga

SEQ ID NO: 3258081 - RNA, 20 nt, Vaccinia virus
aaaaauuagaucaaagaaua

SEQ ID NO: 3258082 - RNA, 16 nt, Vaccinia virus
uuuagaguauuucuca

SEQ ID NO: 3258083 - RNA, 22 nt, Vaccinia virus
aaugacuucguaaaaaauaaua

SEQ ID NO: 3258084 - RNA, 14 nt, Vaccinia virus
aaaucaauccacua

SEQ ID NO: 3258085 - RNA, 15 nt, Vaccinia virus
uggccaagaaaauag

SEQ ID NO: 3258086 - RNA, 23 nt, Vaccinia virus
agaucuucucuccuuucaaacuu

SEQ ID NO: 3258087 - RNA, 22 nt, Vaccinia virus
aucauauuccggcguaugaauu

SEQ ID NO: 3258088 - RNA, 16 nt, Vaccinia virus
gcuuagaaauaaacga

SEQ ID NO: 3258089 - RNA, 18 nt, Vaccinia virus
aauucauagcugagaaua

SEQ ID NO: 3258090 - RNA, 20 nt, Vaccinia virus
aacucucguauagucauaga

SEQ ID NO: 3258091 - RNA, 13 nt, Vaccinia virus
acuuguuaauagu

SEQ ID NO: 3258092 - RNA, 16 nt, Vaccinia virus
auuuucacaaauacua

SEQ ID NO: 3258093 - RNA, 13 nt, Vaccinia virus
gauuuucuagauc

SEQ ID NO: 3258094 - RNA, 17 nt, Vaccinia virus
uuucauggaacaauaaa

SEQ ID NO: 3258095 - RNA, 18 nt, Vaccinia virus
cagaaaugacuccaugaa

SEQ ID NO: 3258096 - RNA, 18 nt, Vaccinia virus
uccaucguugcaauaaua

SEQ ID NO: 3258097 - RNA, 19 nt, Vaccinia virus
accaauuguuuuuguacau

SEQ ID NO: 3258098 - RNA, 18 nt, Vaccinia virus
aauugguagaguuuuaua

SEQ ID NO: 3258099 - RNA, 18 nt, Vaccinia virus
aauuugggucuaggagau

SEQ ID NO: 3258100 - RNA, 23 nt, Vaccinia virus
ugaugaaucuucauuaucugaua

SEQ ID NO: 3258101 - RNA, 20 nt, Vaccinia virus
aaauaaaaagguagauguuc

SEQ ID NO: 3258102 - RNA, 19 nt, Vaccinia virus
aucacagucuguuuuggua

SEQ ID NO: 3258103 - RNA, 19 nt, Vaccinia virus
aacuaacaaacuauacaag

SEQ ID NO: 3258104 - RNA, 13 nt, Vaccinia virus
agaauuguaacuu

SEQ ID NO: 3258105 - RNA, 18 nt, Vaccinia virus
ugguauauccaaaccauc

SEQ ID NO: 3258106 - RNA, 13 nt, Vaccinia virus
ccauuuaaaguua

SEQ ID NO: 3258107 - RNA, 16 nt, Vaccinia virus
caugaaggagauuuag

SEQ ID NO: 3258108 - RNA, 18 nt, Vaccinia virus
uuuguccuuaagacuaua

SEQ ID NO: 3258109 - RNA, 18 nt, Vaccinia virus
auugaacacuguucacau

SEQ ID NO: 3258110 - RNA, 20 nt, Vaccinia virus
uuagauauauagaauuagua

SEQ ID NO: 3258111 - RNA, 14 nt, Vaccinia virus
uuaucgcauacuag

SEQ ID NO: 3258112 - RNA, 20 nt, Vaccinia virus
aaucaaccaccgaugaugcg

SEQ ID NO: 3258113 - RNA, 18 nt, Vaccinia virus
uacugggauaagauuucc

SEQ ID NO: 3258114 - RNA, 21 nt, Vaccinia virus
cuauaaaauuguauauucaga

SEQ ID NO: 3258115 - RNA, 18 nt, Vaccinia virus
uuccaacauaauaaaagu

SEQ ID NO: 3258116 - RNA, 18 nt, Vaccinia virus
guuuccaguuauaaaaca

SEQ ID NO: 3258117 - RNA, 14 nt, Vaccinia virus
aaucugaagaaagu

SEQ ID NO: 3258118 - RNA, 16 nt, Vaccinia virus
agaagucgucaagcau

SEQ ID NO: 3258119 - RNA, 21 nt, Vaccinia virus
ucagaaagaguuuccacaugu

SEQ ID NO: 3258120 - RNA, 16 nt, Vaccinia virus
uuuacagaucuaguau

SEQ ID NO: 3258121 - RNA, 22 nt, Vaccinia virus
ugaugaaguugagaaugauaug

SEQ ID NO: 3258122 - RNA, 17 nt, Vaccinia virus
auuucaucguuuuguau

SEQ ID NO: 3258123 - RNA, 18 nt, Vaccinia virus
uacguguaaucagucucu

SEQ ID NO: 3258124 - RNA, 21 nt, Vaccinia virus
caucagaauaaaucaauaucu

SEQ ID NO: 3258125 - RNA, 23 nt, Vaccinia virus
uuccuagauauguaaaauaaucc

SEQ ID NO: 3258126 - RNA, 14 nt, Vaccinia virus
auauaguaccuaga

SEQ ID NO: 3258127 - RNA, 14 nt, Vaccinia virus
guuucuacuaacuu

SEQ ID NO: 3258128 - RNA, 20 nt, Vaccinia virus
caacuuauccauuuauacau

SEQ ID NO: 3258129 - RNA, 20 nt, Vaccinia virus
aucuaccucuccaaaaagaa

SEQ ID NO: 3258130 - RNA, 16 nt, Vaccinia virus
uacuagaauaaagcag

SEQ ID NO: 3258131 - RNA, 13 nt, Vaccinia virus
aguuauauauacu

SEQ ID NO: 3258132 - RNA, 14 nt, Vaccinia virus
gaagaauuucuguu

SEQ ID NO: 3258133 - RNA, 17 nt, Vaccinia virus
auccuguuucuacuaac

SEQ ID NO: 3258134 - RNA, 12 nt, Vaccinia virus
cuaauauacaau

SEQ ID NO: 3258135 - RNA, 18 nt, Vaccinia virus
uaaacuacucgaacagau

SEQ ID NO: 3258136 - RNA, 24 nt, Vaccinia virus
uuaauaauugcggguaucacuguu

SEQ ID NO: 3258137 - RNA, 21 nt, Vaccinia virus
augucucuuuuucagaaauua

SEQ ID NO: 3258138 - RNA, 14 nt, Vaccinia virus
ugacuaaaaugcug

SEQ ID NO: 3258139 - RNA, 16 nt, Vaccinia virus
cuuuagaagaauaucu

SEQ ID NO: 3258140 - RNA, 18 nt, Vaccinia virus
uuauaccaugucauuaac

SEQ ID NO: 3258141 - RNA, 13 nt, Vaccinia virus
ucaacuucaucau

SEQ ID NO: 3258142 - RNA, 17 nt, Vaccinia virus
cugggguaaaguaagua

SEQ ID NO: 3258143 - RNA, 12 nt, Vaccinia virus
acaauuacaaau

SEQ ID NO: 3258144 - RNA, 15 nt, Vaccinia virus
uauccugcucugaua

SEQ ID NO: 3258145 - RNA, 12 nt, Vaccinia virus
cuaaaaaacuaa

SEQ ID NO: 3258146 - RNA, 14 nt, Vaccinia virus
aaguguguagauau

SEQ ID NO: 3258147 - RNA, 23 nt, Vaccinia virus
aauacuuccaucaacauuguuuc

SEQ ID NO: 3258148 - RNA, 18 nt, Vaccinia virus
guacaugggaaaugaaau

SEQ ID NO: 3258149 - RNA, 14 nt, Vaccinia virus
ucgauauuagauuu

SEQ ID NO: 3258150 - RNA, 15 nt, Vaccinia virus
auuuaguauuaaaug

SEQ ID NO: 3258151 - RNA, 14 nt, Vaccinia virus
aguacuaucauaau

SEQ ID NO: 3258152 - RNA, 16 nt, Vaccinia virus
uauucggcauuucuaa

SEQ ID NO: 3258153 - RNA, 18 nt, Vaccinia virus
uuagauaacggacaacaa

SEQ ID NO: 3258154 - RNA, 13 nt, Vaccinia virus
aaagucaucucuu

SEQ ID NO: 3258155 - RNA, 20 nt, Vaccinia virus
ggucauauuauagauuuaau

SEQ ID NO: 3258156 - RNA, 19 nt, Vaccinia virus
ugacgucguucuacauaaa

SEQ ID NO: 3258157 - RNA, 13 nt, Vaccinia virus
uuaaauucuuuaa

SEQ ID NO: 3258158 - RNA, 15 nt, Vaccinia virus
aauauaguuaauagu

SEQ ID NO: 3258159 - RNA, 21 nt, Vaccinia virus
uuugcucuauaaacugaauau

SEQ ID NO: 3258160 - RNA, 16 nt, Vaccinia virus
guuucucauguggauc

SEQ ID NO: 3258161 - RNA, 16 nt, Vaccinia virus
aucuuagcgaacugaa

SEQ ID NO: 3258162 - RNA, 15 nt, Vaccinia virus
ucgcuaaaauuuuca

SEQ ID NO: 3258163 - RNA, 17 nt, Vaccinia virus
ccauuuauccagucuga

SEQ ID NO: 3258164 - RNA, 21 nt, Vaccinia virus
agauguuagaaaaaaugaugc

SEQ ID NO: 3258165 - RNA, 22 nt, Vaccinia virus
uuaauucuagacuauuuggaca

SEQ ID NO: 3258166 - RNA, 15 nt, Vaccinia virus
uaguauaaauaguua

SEQ ID NO: 3258167 - RNA, 16 nt, Vaccinia virus
uaagucuguggaggau

SEQ ID NO: 3258168 - RNA, 19 nt, Vaccinia virus
uaucucucugauacaauca

SEQ ID NO: 3258169 - RNA, 12 nt, Vaccinia virus
uaucaaaucuuu

SEQ ID NO: 3258170 - RNA, 16 nt, Vaccinia virus
uaugauaagauacaua

SEQ ID NO: 3258171 - RNA, 20 nt, Vaccinia virus
uauuuucuauuuuuuaaauu

SEQ ID NO: 3258172 - RNA, 15 nt, Vaccinia virus
uagucgguauuucau

SEQ ID NO: 3258173 - RNA, 14 nt, Vaccinia virus
ugaauguauucacu

SEQ ID NO: 3258174 - RNA, 20 nt, Vaccinia virus
uauagcauuguuauguauuu

SEQ ID NO: 3258175 - RNA, 18 nt, Vaccinia virus
uuuacuuuuucaucuuua

SEQ ID NO: 3258176 - RNA, 22 nt, Vaccinia virus
aucagagccaauaauaauagau

SEQ ID NO: 3258177 - RNA, 14 nt, Vaccinia virus
aauccauaccgucc

SEQ ID NO: 3258178 - RNA, 19 nt, Vaccinia virus
aguuaagagauuuagaaaa

SEQ ID NO: 3258179 - RNA, 22 nt, Vaccinia virus
ucuucaaaguuucugaaauaag

SEQ ID NO: 3258180 - RNA, 22 nt, Vaccinia virus
gacaucgacgccuuagaaauaa

SEQ ID NO: 3258181 - RNA, 20 nt, Vaccinia virus
auaaaacuugucuguauaug

SEQ ID NO: 3258182 - RNA, 20 nt, Vaccinia virus
cgacgauaacgaaguauuua

SEQ ID NO: 3258183 - RNA, 15 nt, Vaccinia virus
uuguagaacguggau

SEQ ID NO: 3258184 - RNA, 16 nt, Vaccinia virus
aaaauucguuagaaua

SEQ ID NO: 3258185 - RNA, 14 nt, Vaccinia virus
acaaaaaaugaauu

SEQ ID NO: 3258186 - RNA, 21 nt, Vaccinia virus
aaaagaaaaacagaacaauau

SEQ ID NO: 3258187 - RNA, 15 nt, Vaccinia virus
agaaccaaaugauua

SEQ ID NO: 3258188 - RNA, 12 nt, Vaccinia virus
agaagaacauau

SEQ ID NO: 3258189 - RNA, 16 nt, Vaccinia virus
acaauuauuauauaau

SEQ ID NO: 3258190 - RNA, 14 nt, Vaccinia virus
aucugauagaaaga

SEQ ID NO: 3258191 - RNA, 13 nt, Vaccinia virus
aauuauuuaacuu

SEQ ID NO: 3258192 - RNA, 23 nt, Vaccinia virus
ucuugauuaccuggcucauugau

SEQ ID NO: 3258193 - RNA, 22 nt, Vaccinia virus
aacaauuuuguauuauucugaa

SEQ ID NO: 3258194 - RNA, 15 nt, Vaccinia virus
agucucuugguuuua

SEQ ID NO: 3258195 - RNA, 15 nt, Vaccinia virus
auaacaaucguauau

SEQ ID NO: 3258196 - RNA, 14 nt, Vaccinia virus
uccaauuaaaugua

SEQ ID NO: 3258197 - RNA, 23 nt, Vaccinia virus
aucacugccgaguuuaaaacuuc

SEQ ID NO: 3258198 - RNA, 13 nt, Vaccinia virus
aaugcucaguaaa

SEQ ID NO: 3258199 - RNA, 12 nt, Vaccinia virus
uucguguuugac

SEQ ID NO: 3258200 - RNA, 16 nt, Vaccinia virus
guauuacuauaauagg

SEQ ID NO: 3258201 - RNA, 12 nt, Vaccinia virus
gcaaaauaauua

SEQ ID NO: 3258202 - RNA, 13 nt, Vaccinia virus
aucaauaaauagu

SEQ ID NO: 3258203 - RNA, 13 nt, Vaccinia virus
acucuuaauuaug

SEQ ID NO: 3258204 - RNA, 17 nt, Vaccinia virus
gauagacgcaaauuaga

SEQ ID NO: 3258205 - RNA, 20 nt, Vaccinia virus
uauuucuccacuacauaucc

SEQ ID NO: 3258206 - RNA, 18 nt, Vaccinia virus
uauuauugucauaaacau

SEQ ID NO: 3258207 - RNA, 15 nt, Vaccinia virus
accaaggacuuugua

SEQ ID NO: 3258208 - RNA, 19 nt, Vaccinia virus
ugguagauuuucaauuaug

SEQ ID NO: 3258209 - RNA, 15 nt, Vaccinia virus
uugucuagaauauca

SEQ ID NO: 3258210 - RNA, 21 nt, Vaccinia virus
acgcuauaaaaagaguuucaa

SEQ ID NO: 3258211 - RNA, 21 nt, Vaccinia virus
auuaguuagauauauagaauu

SEQ ID NO: 3258212 - RNA, 21 nt, Vaccinia virus
gcauccuauucgaauaaugag

SEQ ID NO: 3258213 - RNA, 16 nt, Vaccinia virus
uacuaucuuuaacaua

SEQ ID NO: 3258214 - RNA, 22 nt, Vaccinia virus
ggucaaccccuaagucuuuuua

SEQ ID NO: 3258215 - RNA, 18 nt, Vaccinia virus
uuacgaauauauaaaaga

SEQ ID NO: 3258216 - RNA, 13 nt, Vaccinia virus
uacuuuucuaaau

SEQ ID NO: 3258217 - RNA, 15 nt, Vaccinia virus
aauugcaguaucuau

SEQ ID NO: 3258218 - RNA, 23 nt, Vaccinia virus
auuaaaaacaaacuuuuuauccu

SEQ ID NO: 3258219 - RNA, 19 nt, Vaccinia virus
gaaaaaugcuagaauuaga

SEQ ID NO: 3258220 - RNA, 14 nt, Vaccinia virus
aauaauuauuagaa

SEQ ID NO: 3258221 - RNA, 19 nt, Vaccinia virus
guagucaguagacaucuga

SEQ ID NO: 3258222 - RNA, 15 nt, Vaccinia virus
uuauaacucuagaau

SEQ ID NO: 3258223 - RNA, 16 nt, Vaccinia virus
cauugauugcauaauu

SEQ ID NO: 3258224 - RNA, 21 nt, Vaccinia virus
auacuuuguaaucuagacaua

SEQ ID NO: 3258225 - RNA, 16 nt, Vaccinia virus
aguacaucuacuauau

SEQ ID NO: 3258226 - RNA, 13 nt, Vaccinia virus
uguacauguaguu

SEQ ID NO: 3258227 - RNA, 13 nt, Vaccinia virus
aaucuguacuucu

SEQ ID NO: 3258228 - RNA, 15 nt, Vaccinia virus
caucuaccaauucau

SEQ ID NO: 3258229 - RNA, 23 nt, Vaccinia virus
aucgaauaacgaacauaacuuua

SEQ ID NO: 3258230 - RNA, 14 nt, Vaccinia virus
aauuuauuucuaaa

SEQ ID NO: 3258231 - RNA, 15 nt, Vaccinia virus
aacaauaguuauuac

SEQ ID NO: 3258232 - RNA, 15 nt, Vaccinia virus
uauuaagauuaucua

SEQ ID NO: 3258233 - RNA, 20 nt, Vaccinia virus
aacaaaaugugauauagaaa

SEQ ID NO: 3258234 - RNA, 18 nt, Vaccinia virus
guuucauguuuauaaaaa

SEQ ID NO: 3258235 - RNA, 22 nt, Vaccinia virus
cauauucauuaggauuaucaaa

SEQ ID NO: 3258236 - RNA, 21 nt, Vaccinia virus
aaacauugacggauaaaacaa

SEQ ID NO: 3258237 - RNA, 12 nt, Vaccinia virus
aaggucagaaaa

SEQ ID NO: 3258238 - RNA, 23 nt, Vaccinia virus
caacuucaucaugaguuaaauau

SEQ ID NO: 3258239 - RNA, 16 nt, Vaccinia virus
aucggacgcagaaauu

SEQ ID NO: 3258240 - RNA, 23 nt, Vaccinia virus
aaaaaugcuagaauuagaaaagu

SEQ ID NO: 3258241 - RNA, 23 nt, Vaccinia virus
auaucuucuaugaaaggagagaa

SEQ ID NO: 3258242 - RNA, 21 nt, Vaccinia virus
cucauaagaugauaaaaagug

SEQ ID NO: 3258243 - RNA, 14 nt, Vaccinia virus
aaugggagcuuaaa

SEQ ID NO: 3258244 - RNA, 18 nt, Vaccinia virus
caucuaucaaacaaaauu

SEQ ID NO: 3258245 - RNA, 13 nt, Vaccinia virus
aacauaaaaauau

SEQ ID NO: 3258246 - RNA, 21 nt, Vaccinia virus
auguggucuguuguauaugau

SEQ ID NO: 3258247 - RNA, 18 nt, Vaccinia virus
cuggucuaaaauuuccau

SEQ ID NO: 3258248 - RNA, 18 nt, Vaccinia virus
auaaaguaugaacaaaga

SEQ ID NO: 3258249 - RNA, 15 nt, Vaccinia virus
ucauuuggagaguau

SEQ ID NO: 3258250 - RNA, 12 nt, Vaccinia virus
ugaaaauacguu

SEQ ID NO: 3258251 - RNA, 12 nt, Vaccinia virus
uuaaaauacuuu

SEQ ID NO: 3258252 - RNA, 17 nt, Vaccinia virus
auagaaugaagaaugcc

SEQ ID NO: 3258253 - RNA, 19 nt, Vaccinia virus
acaauguauacaaauguac

SEQ ID NO: 3258254 - RNA, 21 nt, Vaccinia virus
gaugaaaaauuuuuagagguu

SEQ ID NO: 3258255 - RNA, 15 nt, Vaccinia virus
uaaagacaaacaaug

SEQ ID NO: 3258256 - RNA, 16 nt, Vaccinia virus
guguagcuguuggaac

SEQ ID NO: 3258257 - RNA, 18 nt, Vaccinia virus
ccaaagagaaaacaaaac

SEQ ID NO: 3258258 - RNA, 15 nt, Vaccinia virus
uauuaauaauuacuu

SEQ ID NO: 3258259 - RNA, 17 nt, Vaccinia virus
gaaaauacuaaaucaga

SEQ ID NO: 3258260 - RNA, 22 nt, Vaccinia virus
agcgcuuaaucucaaaauaugu

SEQ ID NO: 3258261 - RNA, 20 nt, Vaccinia virus
uuauuaaauauuuuuggaca

SEQ ID NO: 3258262 - RNA, 21 nt, Vaccinia virus
cagucuaugauagcaauuacu

SEQ ID NO: 3258263 - RNA, 17 nt, Vaccinia virus
aauacgaaaauccaugc

SEQ ID NO: 3258264 - RNA, 23 nt, Vaccinia virus
aucuucucuccuguuaauaacuc

SEQ ID NO: 3258265 - RNA, 23 nt, Vaccinia virus
aauaguuuguuuuggaaauagau

SEQ ID NO: 3258266 - RNA, 21 nt, Vaccinia virus
ugaaccaaacauucuuucaaa

SEQ ID NO: 3258267 - RNA, 16 nt, Vaccinia virus
uuaucaaaucuuuaau

SEQ ID NO: 3258268 - RNA, 22 nt, Vaccinia virus
uuuggcuaaacuauauaauucu

SEQ ID NO: 3258269 - RNA, 23 nt, Vaccinia virus
aaguaaauaauaaaacaauaaau

SEQ ID NO: 3258270 - RNA, 19 nt, Vaccinia virus
agcuucuccuccuauuugu

SEQ ID NO: 3258271 - RNA, 22 nt, Vaccinia virus
uaaauguuuuacaacuaucaua

SEQ ID NO: 3258272 - RNA, 18 nt, Vaccinia virus
caugaacacgaugauaua

SEQ ID NO: 3258273 - RNA, 20 nt, Vaccinia virus
aguaacagucugaacgcauu

SEQ ID NO: 3258274 - RNA, 21 nt, Vaccinia virus
ucuuuaccauaacuguauaaa

SEQ ID NO: 3258275 - RNA, 12 nt, Vaccinia virus
aucuauauuaac

SEQ ID NO: 3258276 - RNA, 15 nt, Vaccinia virus
guuauauuuuuuucu

SEQ ID NO: 3258277 - RNA, 16 nt, Vaccinia virus
ucguucaaauuuuuaa

SEQ ID NO: 3258278 - RNA, 14 nt, Vaccinia virus
auauacaugugcaa

SEQ ID NO: 3258279 - RNA, 21 nt, Vaccinia virus
agaucuuuucucaaagauguu

SEQ ID NO: 3258280 - RNA, 14 nt, Vaccinia virus
auuucauccaauuu

SEQ ID NO: 3258281 - RNA, 20 nt, Vaccinia virus
agaauucacaccuagagaca

SEQ ID NO: 3258282 - RNA, 15 nt, Vaccinia virus
guauccauaaacaau

SEQ ID NO: 3258283 - RNA, 20 nt, Vaccinia virus
uagaaaaaauagaacuuauc

SEQ ID NO: 3258284 - RNA, 17 nt, Vaccinia virus
cgagauacagaaaagcu

SEQ ID NO: 3258285 - RNA, 20 nt, Vaccinia virus
ggauugguggauauauacgu

SEQ ID NO: 3258286 - RNA, 18 nt, Vaccinia virus
agauugguacgaaauaua

SEQ ID NO: 3258287 - RNA, 22 nt, Vaccinia virus
uccaauuuuucagauuuuugaa

SEQ ID NO: 3258288 - RNA, 12 nt, Vaccinia virus
aacuuuaaauac

SEQ ID NO: 3258289 - RNA, 17 nt, Vaccinia virus
auucuuaugagaauaga

SEQ ID NO: 3258290 - RNA, 21 nt, Vaccinia virus
gacuccaucaucgaucuaaua

SEQ ID NO: 3258291 - RNA, 16 nt, Vaccinia virus
aaucauauuuagaaaa

SEQ ID NO: 3258292 - RNA, 17 nt, Vaccinia virus
uaauuuuuuuauuacau

SEQ ID NO: 3258293 - RNA, 16 nt, Vaccinia virus
uguagccgauaaacaa

SEQ ID NO: 3258294 - RNA, 18 nt, Vaccinia virus
ucaaaaucuuaauaucuu

SEQ ID NO: 3258295 - RNA, 16 nt, Vaccinia virus
ucauguguagaugcua

SEQ ID NO: 3258296 - RNA, 16 nt, Vaccinia virus
cugauagcaguuucaa

SEQ ID NO: 3258297 - RNA, 16 nt, Vaccinia virus
gcacugguuuaguuca

SEQ ID NO: 3258298 - RNA, 23 nt, Vaccinia virus
auguuggauuaaucuuuaccaua

SEQ ID NO: 3258299 - RNA, 17 nt, Vaccinia virus
gaugaucugaauuauau

SEQ ID NO: 3258300 - RNA, 14 nt, Vaccinia virus
uacucaaauagcac

SEQ ID NO: 3258301 - RNA, 15 nt, Vaccinia virus
cagaauguacacuau

SEQ ID NO: 3258302 - RNA, 18 nt, Vaccinia virus
uacugagccaacaaauau

SEQ ID NO: 3258303 - RNA, 16 nt, Vaccinia virus
uuugucauuaacuuua

SEQ ID NO: 3258304 - RNA, 20 nt, Vaccinia virus
uaaaucaugacguaaaugua

SEQ ID NO: 3258305 - RNA, 16 nt, Vaccinia virus
uuauuucucuauuaca

SEQ ID NO: 3258306 - RNA, 20 nt, Vaccinia virus
gaauauaaaauaacuacagu

SEQ ID NO: 3258307 - RNA, 17 nt, Vaccinia virus
guagaauuuuuuaaaaa

SEQ ID NO: 3258308 - RNA, 20 nt, Vaccinia virus
guaaaaaaaccuauaaugau

SEQ ID NO: 3258309 - RNA, 18 nt, Vaccinia virus
auucuggcggcuagaaug

SEQ ID NO: 3258310 - RNA, 16 nt, Vaccinia virus
agaauggaaaggaaac

SEQ ID NO: 3258311 - RNA, 14 nt, Vaccinia virus
uuaucuaucuuaaa

SEQ ID NO: 3258312 - RNA, 19 nt, Vaccinia virus
uacaucaugaaaugaugau

SEQ ID NO: 3258313 - RNA, 18 nt, Vaccinia virus
ucuagacagauagaugau

SEQ ID NO: 3258314 - RNA, 21 nt, Vaccinia virus
uucaaaguuucugaaauaaga

SEQ ID NO: 3258315 - RNA, 13 nt, Vaccinia virus
uacuaucuuuaau

SEQ ID NO: 3258316 - RNA, 22 nt, Vaccinia virus
gaaaaagaauuuuuauaaauuu

SEQ ID NO: 3258317 - RNA, 15 nt, Vaccinia virus
agauauguuuauuca

SEQ ID NO: 3258318 - RNA, 21 nt, Vaccinia virus
ucguaacaaaacuauuucaga

SEQ ID NO: 3258319 - RNA, 16 nt, Vaccinia virus
aucguuuaaaauacua

SEQ ID NO: 3258320 - RNA, 18 nt, Vaccinia virus
uaucucagugcaaagauu

SEQ ID NO: 3258321 - RNA, 16 nt, Vaccinia virus
auuagauauuaaugag

SEQ ID NO: 3258322 - RNA, 17 nt, Vaccinia virus
aucagacguuguaaauu

SEQ ID NO: 3258323 - RNA, 22 nt, Vaccinia virus
aauguucaugacauccauuaca

SEQ ID NO: 3258324 - RNA, 15 nt, Vaccinia virus
uuaauguauaucuuu

SEQ ID NO: 3258325 - RNA, 14 nt, Vaccinia virus
auguuauugucaca

SEQ ID NO: 3258326 - RNA, 13 nt, Vaccinia virus
gcuuacuacuaac

SEQ ID NO: 3258327 - RNA, 16 nt, Vaccinia virus
ucguuuuucuuaagaa

SEQ ID NO: 3258328 - RNA, 16 nt, Vaccinia virus
ugaauacaauaauuca

SEQ ID NO: 3258329 - RNA, 16 nt, Vaccinia virus
cacuuacagaaaagau

SEQ ID NO: 3258330 - RNA, 21 nt, Vaccinia virus
uaauguaaucucuaaauucau

SEQ ID NO: 3258331 - RNA, 15 nt, Vaccinia virus
agaauauaaaaaauu

SEQ ID NO: 3258332 - RNA, 15 nt, Vaccinia virus
uuaaaaauaugugcu

SEQ ID NO: 3258333 - RNA, 15 nt, Vaccinia virus
aauuaaaaccaagua

SEQ ID NO: 3258334 - RNA, 15 nt, Vaccinia virus
ugcauguuucauaac

SEQ ID NO: 3258335 - RNA, 17 nt, Vaccinia virus
gaacaaguaucaaaaga

SEQ ID NO: 3258336 - RNA, 22 nt, Vaccinia virus
augauucuccggccacuauuau

SEQ ID NO: 3258337 - RNA, 19 nt, Vaccinia virus
acacguguagaauaucuac

SEQ ID NO: 3258338 - RNA, 20 nt, Vaccinia virus
guacauucugcaauauuguu

SEQ ID NO: 3258339 - RNA, 19 nt, Vaccinia virus
uagaaaaacuauaucuaug

SEQ ID NO: 3258340 - RNA, 13 nt, Vaccinia virus
agaauauauguau

SEQ ID NO: 3258341 - RNA, 18 nt, Vaccinia virus
gugucuuuaaucauguac

SEQ ID NO: 3258342 - RNA, 18 nt, Vaccinia virus
acgcauuauauaguuuuu

SEQ ID NO: 3258343 - RNA, 16 nt, Vaccinia virus
agaauuucuacauaau

SEQ ID NO: 3258344 - RNA, 24 nt, Vaccinia virus
guuaauaucuauauauguauuuua

SEQ ID NO: 3258345 - RNA, 22 nt, Vaccinia virus
gaaacaauguuucuuacauauu

SEQ ID NO: 3258346 - RNA, 20 nt, Vaccinia virus
gucauugaaggauaaacucg

SEQ ID NO: 3258347 - RNA, 14 nt, Vaccinia virus
uuauuuuuggaaga

SEQ ID NO: 3258348 - RNA, 14 nt, Vaccinia virus
agacuuguauucaa

SEQ ID NO: 3258349 - RNA, 15 nt, Vaccinia virus
aaacaauguauacaa

SEQ ID NO: 3258350 - RNA, 13 nt, Vaccinia virus
ucguuuucaucuu

SEQ ID NO: 3258351 - RNA, 19 nt, Vaccinia virus
ucuauacugucuguaacuc

SEQ ID NO: 3258352 - RNA, 23 nt, Vaccinia virus
acuuuacaaacgauguacugaag

SEQ ID NO: 3258353 - RNA, 14 nt, Vaccinia virus
uguuuucaucauuu

SEQ ID NO: 3258354 - RNA, 16 nt, Vaccinia virus
agaacuaccaauaugu

SEQ ID NO: 3258355 - RNA, 19 nt, Vaccinia virus
ucauaugacuaaaaugcug

SEQ ID NO: 3258356 - RNA, 12 nt, Vaccinia virus
guauaacauucu

SEQ ID NO: 3258357 - RNA, 19 nt, Vaccinia virus
uacucggccgacauaaugu

SEQ ID NO: 3258358 - RNA, 13 nt, Vaccinia virus
aaguuguuaaaaa

SEQ ID NO: 3258359 - RNA, 23 nt, Vaccinia virus
uuuauuauauucaguaaccaaau

SEQ ID NO: 3258360 - RNA, 13 nt, Vaccinia virus
gacucauaaucuc

SEQ ID NO: 3258361 - RNA, 17 nt, Vaccinia virus
uacaaaauguugauaau

SEQ ID NO: 3258362 - RNA, 16 nt, Vaccinia virus
guucaccuucuauaga

SEQ ID NO: 3258363 - RNA, 22 nt, Vaccinia virus
ucauuccaucauuuaagaaggc

SEQ ID NO: 3258364 - RNA, 19 nt, Vaccinia virus
ccauggacucauaaucucu

SEQ ID NO: 3258365 - RNA, 17 nt, Vaccinia virus
ucuauaaacauaaguau

SEQ ID NO: 3258366 - RNA, 14 nt, Vaccinia virus
acauuccuaugaug

SEQ ID NO: 3258367 - RNA, 14 nt, Vaccinia virus
aaacuaaacuuauu

SEQ ID NO: 3258368 - RNA, 18 nt, Vaccinia virus
acugcguucaagucauaa

SEQ ID NO: 3258369 - RNA, 18 nt, Vaccinia virus
uagaaggaaaaucaucau

SEQ ID NO: 3258370 - RNA, 19 nt, Vaccinia virus
uaauaauuuuuuaaauccu

SEQ ID NO: 3258371 - RNA, 19 nt, Vaccinia virus
auguuuaaacaucaaacau

SEQ ID NO: 3258372 - RNA, 17 nt, Vaccinia virus
auuaugccguuaucauu

SEQ ID NO: 3258373 - RNA, 19 nt, Vaccinia virus
aagcaugacggcaugauaa

SEQ ID NO: 3258374 - RNA, 21 nt, Vaccinia virus
aucuuuuuauuaguaggcauc

SEQ ID NO: 3258375 - RNA, 21 nt, Vaccinia virus
auacuaucuuuaauagaacuc

SEQ ID NO: 3258376 - RNA, 16 nt, Vaccinia virus
augcaucuauuucauc

SEQ ID NO: 3258377 - RNA, 17 nt, Vaccinia virus
uugucaaauauugcucg

SEQ ID NO: 3258378 - RNA, 14 nt, Vaccinia virus
uauauaagacguau

SEQ ID NO: 3258379 - RNA, 14 nt, Vaccinia virus
auaauaaucaaaau

SEQ ID NO: 3258380 - RNA, 18 nt, Vaccinia virus
cgaugaccauuuaaaaac

SEQ ID NO: 3258381 - RNA, 13 nt, Vaccinia virus
cagauuuuaauau

SEQ ID NO: 3258382 - RNA, 13 nt, Vaccinia virus
gauguuguaauau

SEQ ID NO: 3258383 - RNA, 16 nt, Vaccinia virus
ugaugcugguucugga

SEQ ID NO: 3258384 - RNA, 17 nt, Vaccinia virus
aauuaaucauauacaac

SEQ ID NO: 3258385 - RNA, 20 nt, Vaccinia virus
uuuuaucgauucaucuaauu

SEQ ID NO: 3258386 - RNA, 13 nt, Vaccinia virus
uaugauucuguaa

SEQ ID NO: 3258387 - RNA, 17 nt, Vaccinia virus
auucucuauuaaauacc

SEQ ID NO: 3258388 - RNA, 22 nt, Vaccinia virus
guuccugguauauagauaaaga

SEQ ID NO: 3258389 - RNA, 23 nt, Vaccinia virus
uaucuaaauuucuaguacuugua

SEQ ID NO: 3258390 - RNA, 19 nt, Vaccinia virus
uauucuuaaaagguuucau

SEQ ID NO: 3258391 - RNA, 14 nt, Vaccinia virus
uacauuguuucaua

SEQ ID NO: 3258392 - RNA, 22 nt, Vaccinia virus
ucuagacuugauuuaaaaccga

SEQ ID NO: 3258393 - RNA, 12 nt, Vaccinia virus
guugauauuaac

SEQ ID NO: 3258394 - RNA, 14 nt, Vaccinia virus
uuaaaaauacgguu

SEQ ID NO: 3258395 - RNA, 14 nt, Vaccinia virus
auaucucaacgaug

SEQ ID NO: 3258396 - RNA, 17 nt, Vaccinia virus
cuucucaucucuuucag

SEQ ID NO: 3258397 - RNA, 20 nt, Vaccinia virus
caucuucuuugauuaaugau

SEQ ID NO: 3258398 - RNA, 23 nt, Vaccinia virus
uacaguaaguacaucaucuggaa

SEQ ID NO: 3258399 - RNA, 20 nt, Vaccinia virus
auaauaugcaccugaaacau

SEQ ID NO: 3258400 - RNA, 18 nt, Vaccinia virus
gcaaaucuaguaaaucaa

SEQ ID NO: 3258401 - RNA, 16 nt, Vaccinia virus
auguugcaugaaauaa

SEQ ID NO: 3258402 - RNA, 15 nt, Vaccinia virus
auuaaacuaauucau

SEQ ID NO: 3258403 - RNA, 21 nt, Vaccinia virus
cagaaucgcaacgcuaaaaga

SEQ ID NO: 3258404 - RNA, 17 nt, Vaccinia virus
gaaaacauuauauccuc

SEQ ID NO: 3258405 - RNA, 20 nt, Vaccinia virus
uuaaauuucaguuuauguuu

SEQ ID NO: 3258406 - RNA, 13 nt, Vaccinia virus
uuugauuucaauu

SEQ ID NO: 3258407 - RNA, 15 nt, Vaccinia virus
guagaugugauuuuu

SEQ ID NO: 3258408 - RNA, 22 nt, Vaccinia virus
auuucacagaaacacuagcauu

SEQ ID NO: 3258409 - RNA, 21 nt, Vaccinia virus
uaauuucacaacuuuacuguu

SEQ ID NO: 3258410 - RNA, 19 nt, Vaccinia virus
gaucaacggauaaucugaa

SEQ ID NO: 3258411 - RNA, 18 nt, Vaccinia virus
cuauaucgcuaaaauuuu

SEQ ID NO: 3258412 - RNA, 20 nt, Vaccinia virus
aaccagguaggcaguuuuau

SEQ ID NO: 3258413 - RNA, 16 nt, Vaccinia virus
aauauauguugauaau

SEQ ID NO: 3258414 - RNA, 22 nt, Vaccinia virus
aaugcgcgaaccaaaaugugau

SEQ ID NO: 3258415 - RNA, 20 nt, Vaccinia virus
auugcuuauauuuucaucua

SEQ ID NO: 3258416 - RNA, 14 nt, Vaccinia virus
agaacuaacacaac

SEQ ID NO: 3258417 - RNA, 19 nt, Vaccinia virus
uuauaaacggguguaaaca

SEQ ID NO: 3258418 - RNA, 22 nt, Vaccinia virus
cgaacacuaacgcgcaugauuu

SEQ ID NO: 3258419 - RNA, 17 nt, Vaccinia virus
ucaaaauauguuauguu

SEQ ID NO: 3258420 - RNA, 16 nt, Vaccinia virus
aguuuguuuucauuau

SEQ ID NO: 3258421 - RNA, 14 nt, Vaccinia virus
gccaagauagcuuc

SEQ ID NO: 3258422 - RNA, 18 nt, Vaccinia virus
gcuuucaagaauaaacga

SEQ ID NO: 3258423 - RNA, 23 nt, Vaccinia virus
uauauaaaaucucguuacauguu

SEQ ID NO: 3258424 - RNA, 15 nt, Vaccinia virus
aauucuuaucaauaa

SEQ ID NO: 3258425 - RNA, 20 nt, Vaccinia virus
cuuaaaauuuaaaaugauau

SEQ ID NO: 3258426 - RNA, 18 nt, Vaccinia virus
cagauuuuugaaugaaug

SEQ ID NO: 3258427 - RNA, 14 nt, Vaccinia virus
ugauuauuuacuau

SEQ ID NO: 3258428 - RNA, 14 nt, Vaccinia virus
acauugauuaaauu

SEQ ID NO: 3258429 - RNA, 17 nt, Vaccinia virus
ucaaaaaguaagauauu

SEQ ID NO: 3258430 - RNA, 14 nt, Vaccinia virus
uauguauucagaau

SEQ ID NO: 3258431 - RNA, 21 nt, Vaccinia virus
uacaaugauaaugauacagua

SEQ ID NO: 3258432 - RNA, 22 nt, Vaccinia virus
guacacagcauguuauaacuaa

SEQ ID NO: 3258433 - RNA, 20 nt, Vaccinia virus
uugagaugucucauuagaau

SEQ ID NO: 3258434 - RNA, 16 nt, Vaccinia virus
auccuucuagaauuag

SEQ ID NO: 3258435 - RNA, 19 nt, Vaccinia virus
aucaugacaaaauuaaaaa

SEQ ID NO: 3258436 - RNA, 17 nt, Vaccinia virus
auauguauuuucuuucc

SEQ ID NO: 3258437 - RNA, 17 nt, Vaccinia virus
aucuugauuuauagaug

SEQ ID NO: 3258438 - RNA, 19 nt, Vaccinia virus
auuauucuauuucgaauuu

SEQ ID NO: 3258439 - RNA, 13 nt, Vaccinia virus
ucuaucuuugcau

SEQ ID NO: 3258440 - RNA, 19 nt, Vaccinia virus
uaucuccaguauuuacauu

SEQ ID NO: 3258441 - RNA, 23 nt, Vaccinia virus
aaugcacuguucaagaauuuaua

SEQ ID NO: 3258442 - RNA, 19 nt, Vaccinia virus
guugcugcucguauaaucu

SEQ ID NO: 3258443 - RNA, 20 nt, Vaccinia virus
auaaaacguggaaagaaucu

SEQ ID NO: 3258444 - RNA, 17 nt, Vaccinia virus
gaugccaucauagauau

SEQ ID NO: 3258445 - RNA, 22 nt, Vaccinia virus
gauaaaacguggaaagaaucua

SEQ ID NO: 3258446 - RNA, 17 nt, Vaccinia virus
auguauggcuucaagau

SEQ ID NO: 3258447 - RNA, 14 nt, Vaccinia virus
aauucuuuaauauc

SEQ ID NO: 3258448 - RNA, 17 nt, Vaccinia virus
aacaucucaaugucuuu

SEQ ID NO: 3258449 - RNA, 18 nt, Vaccinia virus
aguaugauacaauacuua

SEQ ID NO: 3258450 - RNA, 16 nt, Vaccinia virus
aacacuggcuagaaaa

SEQ ID NO: 3258451 - RNA, 14 nt, Vaccinia virus
gaaacuaucuuuuu

SEQ ID NO: 3258452 - RNA, 15 nt, Vaccinia virus
uguauugcacauguu

SEQ ID NO: 3258453 - RNA, 23 nt, Vaccinia virus
uaagaaagugaguuacgaagaua

SEQ ID NO: 3258454 - RNA, 17 nt, Vaccinia virus
auuacaaauaaagcgga

SEQ ID NO: 3258455 - RNA, 15 nt, Vaccinia virus
guaugucuuauguau

SEQ ID NO: 3258456 - RNA, 17 nt, Vaccinia virus
gaacauaaaacuaauau

SEQ ID NO: 3258457 - RNA, 19 nt, Vaccinia virus
auuaaauuuuuuuauuaau

SEQ ID NO: 3258458 - RNA, 13 nt, Vaccinia virus
uuugacuagauaa

SEQ ID NO: 3258459 - RNA, 16 nt, Vaccinia virus
auguuuuaaauaucaa

SEQ ID NO: 3258460 - RNA, 17 nt, Vaccinia virus
gguacauagauuaucca

SEQ ID NO: 3258461 - RNA, 15 nt, Vaccinia virus
uaaauugaaagcgag

SEQ ID NO: 3258462 - RNA, 18 nt, Vaccinia virus
uaucgccggucaucauaa

SEQ ID NO: 3258463 - RNA, 13 nt, Vaccinia virus
auucuaauggaug

SEQ ID NO: 3258464 - RNA, 13 nt, Vaccinia virus
auuaacuauuuug

SEQ ID NO: 3258465 - RNA, 16 nt, Vaccinia virus
uauuguuuugaagaaa

SEQ ID NO: 3258466 - RNA, 18 nt, Vaccinia virus
acuuucgaauaaguuugc

SEQ ID NO: 3258467 - RNA, 17 nt, Vaccinia virus
ugaguauaucagaucau

SEQ ID NO: 3258468 - RNA, 17 nt, Vaccinia virus
auuagauuuaauagcau

SEQ ID NO: 3258469 - RNA, 16 nt, Vaccinia virus
uggauccuaacaauga

SEQ ID NO: 3258470 - RNA, 21 nt, Vaccinia virus
cuaaacccgacuuaguuauau

SEQ ID NO: 3258471 - RNA, 22 nt, Vaccinia virus
uucagauauaaaaaucuguuuu

SEQ ID NO: 3258472 - RNA, 16 nt, Vaccinia virus
gguuaacaucuuauaa

SEQ ID NO: 3258473 - RNA, 15 nt, Vaccinia virus
cuaacuuuaaacaag

SEQ ID NO: 3258474 - RNA, 15 nt, Vaccinia virus
acauaaauaugcaaa

SEQ ID NO: 3258475 - RNA, 12 nt, Vaccinia virus
gcgguguauuua

SEQ ID NO: 3258476 - RNA, 14 nt, Vaccinia virus
auaaucauucuuaa

SEQ ID NO: 3258477 - RNA, 22 nt, Vaccinia virus
auuacaaguuaagucacacuaa

SEQ ID NO: 3258478 - RNA, 17 nt, Vaccinia virus
ucauuaauaauuucuag

SEQ ID NO: 3258479 - RNA, 18 nt, Vaccinia virus
auuuuaugguauuaauaa

SEQ ID NO: 3258480 - RNA, 14 nt, Vaccinia virus
gugcuauuagaauu

SEQ ID NO: 3258481 - RNA, 12 nt, Vaccinia virus
aaaaguaaauga

SEQ ID NO: 3258482 - RNA, 23 nt, Vaccinia virus
auguuuaauacuuauucauauuu

SEQ ID NO: 3258483 - RNA, 15 nt, Vaccinia virus
auauucuaaaauggu

SEQ ID NO: 3258484 - RNA, 15 nt, Vaccinia virus
uaaagaccgaauaca

SEQ ID NO: 3258485 - RNA, 21 nt, Vaccinia virus
cacauccuuuauuuuaucuau

SEQ ID NO: 3258486 - RNA, 19 nt, Vaccinia virus
uuuccuaguauucgucaaa

SEQ ID NO: 3258487 - RNA, 22 nt, Vaccinia virus
auucauaauaagauaaauccau

SEQ ID NO: 3258488 - RNA, 16 nt, Vaccinia virus
uuucgaagaucuucuu

SEQ ID NO: 3258489 - RNA, 18 nt, Vaccinia virus
aaacuacgucaagacucu

SEQ ID NO: 3258490 - RNA, 21 nt, Vaccinia virus
uucuaccuuacccauaaacaa

SEQ ID NO: 3258491 - RNA, 17 nt, Vaccinia virus
uguuuagaaaaaugcua

SEQ ID NO: 3258492 - RNA, 15 nt, Vaccinia virus
aaaauaauaugauua

SEQ ID NO: 3258493 - RNA, 18 nt, Vaccinia virus
agacgaauacauauaccg

SEQ ID NO: 3258494 - RNA, 21 nt, Vaccinia virus
cucauuaauuaaccauuccaa

SEQ ID NO: 3258495 - RNA, 21 nt, Vaccinia virus
ccauuuuaugcgauguuuaua

SEQ ID NO: 3258496 - RNA, 22 nt, Vaccinia virus
ucuaaccuuucccauugaucau

SEQ ID NO: 3258497 - RNA, 22 nt, Vaccinia virus
uuaacacuauacucauauuaau

SEQ ID NO: 3258498 - RNA, 19 nt, Vaccinia virus
aacuaaaugguauacacau

SEQ ID NO: 3258499 - RNA, 17 nt, Vaccinia virus
uaaaaaaaaugacuugu

SEQ ID NO: 3258500 - RNA, 16 nt, Vaccinia virus
auaucaucgacaaaga

SEQ ID NO: 3258501 - RNA, 23 nt, Vaccinia virus
aaugaugccucugccuuuuuaua

SEQ ID NO: 3258502 - RNA, 13 nt, Vaccinia virus
uguaaauaucuuu

SEQ ID NO: 3258503 - RNA, 18 nt, Vaccinia virus
gaaaacuuuaaauacuua

SEQ ID NO: 3258504 - RNA, 17 nt, Vaccinia virus
guuuucuagauggaaau

SEQ ID NO: 3258505 - RNA, 13 nt, Vaccinia virus
cuuaaugcauuuu

SEQ ID NO: 3258506 - RNA, 16 nt, Vaccinia virus
agcauccaguaugaau

SEQ ID NO: 3258507 - RNA, 21 nt, Vaccinia virus
ugcaacgaauuauuagucugu

SEQ ID NO: 3258508 - RNA, 17 nt, Vaccinia virus
aucuaucuuaaaaacua

SEQ ID NO: 3258509 - RNA, 19 nt, Vaccinia virus
uauacgaaauauuauacau

SEQ ID NO: 3258510 - RNA, 17 nt, Vaccinia virus
aguaugaagaaaaaugu

SEQ ID NO: 3258511 - RNA, 23 nt, Vaccinia virus
aauacuccucauuacguuucauu

SEQ ID NO: 3258512 - RNA, 22 nt, Vaccinia virus
uuauaggcucuaaccauuuuca

SEQ ID NO: 3258513 - RNA, 15 nt, Vaccinia virus
acucucaaaaugcug

SEQ ID NO: 3258514 - RNA, 21 nt, Vaccinia virus
caucuuggggaaauauggaag

SEQ ID NO: 3258515 - RNA, 17 nt, Vaccinia virus
auugugcuuaauuauuu

SEQ ID NO: 3258516 - RNA, 14 nt, Vaccinia virus
cgauuucuacauau

SEQ ID NO: 3258517 - RNA, 18 nt, Vaccinia virus
agauuauggagcaaacau

SEQ ID NO: 3258518 - RNA, 18 nt, Vaccinia virus
aaaauauuuauuagaaca

SEQ ID NO: 3258519 - RNA, 22 nt, Vaccinia virus
aaauuuuuugagguaaucuucu

SEQ ID NO: 3258520 - RNA, 17 nt, Vaccinia virus
uaauaagugguauucca

SEQ ID NO: 3258521 - RNA, 14 nt, Vaccinia virus
gaaacacuagcauu

SEQ ID NO: 3258522 - RNA, 20 nt, Vaccinia virus
guuaggauuugguaaaucau

SEQ ID NO: 3258523 - RNA, 21 nt, Vaccinia virus
aucuguacuauguguuaaaaa

SEQ ID NO: 3258524 - RNA, 19 nt, Vaccinia virus
aagaauaugugacaaaguc

SEQ ID NO: 3258525 - RNA, 12 nt, Vaccinia virus
uaucucaaugag

SEQ ID NO: 3258526 - RNA, 15 nt, Vaccinia virus
guucagaauauguua

SEQ ID NO: 3258527 - RNA, 16 nt, Vaccinia virus
uuaaugacaaacauuu

SEQ ID NO: 3258528 - RNA, 18 nt, Vaccinia virus
acagaguuuucagaagau

SEQ ID NO: 3258529 - RNA, 15 nt, Vaccinia virus
auacacauuuucaaa

SEQ ID NO: 3258530 - RNA, 21 nt, Vaccinia virus
acaacaacgaaccaaaaugaa

SEQ ID NO: 3258531 - RNA, 16 nt, Vaccinia virus
guucuuugaacaucuu

SEQ ID NO: 3258532 - RNA, 21 nt, Vaccinia virus
caucaucguuacaauaaaaaa

SEQ ID NO: 3258533 - RNA, 16 nt, Vaccinia virus
uauaucuuauaucuua

SEQ ID NO: 3258534 - RNA, 21 nt, Vaccinia virus
uugacauuaaucuauuagaau

SEQ ID NO: 3258535 - RNA, 22 nt, Vaccinia virus
acuauuccuagcaucagcaaaa

SEQ ID NO: 3258536 - RNA, 14 nt, Vaccinia virus
auguaaagaaggag

SEQ ID NO: 3258537 - RNA, 21 nt, Vaccinia virus
accuaaucccgcauuuauaca

SEQ ID NO: 3258538 - RNA, 15 nt, Vaccinia virus
cauaauuacauuuag

SEQ ID NO: 3258539 - RNA, 17 nt, Vaccinia virus
gcgaguguuacaacauc

SEQ ID NO: 3258540 - RNA, 15 nt, Vaccinia virus
ucauaugauuucagu

SEQ ID NO: 3258541 - RNA, 20 nt, Vaccinia virus
cuauaaaacgauuaaacaau

SEQ ID NO: 3258542 - RNA, 12 nt, Vaccinia virus
aaauauuucauu

SEQ ID NO: 3258543 - RNA, 13 nt, Vaccinia virus
acuuucucuaaau

SEQ ID NO: 3258544 - RNA, 14 nt, Vaccinia virus
ugaugaauuuaccu

SEQ ID NO: 3258545 - RNA, 20 nt, Vaccinia virus
cuguauuguuaauagauaua

SEQ ID NO: 3258546 - RNA, 18 nt, Vaccinia virus
aucgauuauauucuaaga

SEQ ID NO: 3258547 - RNA, 14 nt, Vaccinia virus
cuauagauaaugac

SEQ ID NO: 3258548 - RNA, 16 nt, Vaccinia virus
auacaugaacaugucg

SEQ ID NO: 3258549 - RNA, 19 nt, Vaccinia virus
cauuuuccagaugauaugu

SEQ ID NO: 3258550 - RNA, 15 nt, Vaccinia virus
ucuccaccaaacaua

SEQ ID NO: 3258551 - RNA, 20 nt, Vaccinia virus
cgaaaaaaaagcuauuauca

SEQ ID NO: 3258552 - RNA, 23 nt, Vaccinia virus
auacuuucgguucuuuaaaagaa

SEQ ID NO: 3258553 - RNA, 19 nt, Vaccinia virus
ugucuagaauggcaaaucu

SEQ ID NO: 3258554 - RNA, 12 nt, Vaccinia virus
uagauacaaaau

SEQ ID NO: 3258555 - RNA, 14 nt, Vaccinia virus
cgaguuuaauaacc

SEQ ID NO: 3258556 - RNA, 16 nt, Vaccinia virus
uuaauccuucuagaau

SEQ ID NO: 3258557 - RNA, 19 nt, Vaccinia virus
acguaaauacaaaacagag

SEQ ID NO: 3258558 - RNA, 19 nt, Vaccinia virus
guauucauuuaucacaaaa

SEQ ID NO: 3258559 - RNA, 14 nt, Vaccinia virus
aucgauaauuauuu

SEQ ID NO: 3258560 - RNA, 18 nt, Vaccinia virus
acauacgagaaaguggau

SEQ ID NO: 3258561 - RNA, 14 nt, Vaccinia virus
uagagaacauaaug

SEQ ID NO: 3258562 - RNA, 13 nt, Vaccinia virus
acauuuauaucca

SEQ ID NO: 3258563 - RNA, 14 nt, Vaccinia virus
uauaaauggaugaa

SEQ ID NO: 3258564 - RNA, 20 nt, Vaccinia virus
caucuauauugcuacauaau

SEQ ID NO: 3258565 - RNA, 20 nt, Vaccinia virus
uugauaguauaccaacuaua

SEQ ID NO: 3258566 - RNA, 22 nt, Vaccinia virus
cagaaauggaagaguuaaugaa

SEQ ID NO: 3258567 - RNA, 21 nt, Vaccinia virus
uauaaagucugucaaaucauc

SEQ ID NO: 3258568 - RNA, 23 nt, Vaccinia virus
agcacgaucgugguuaacaauau

SEQ ID NO: 3258569 - RNA, 15 nt, Vaccinia virus
aggaucgacuccaua

SEQ ID NO: 3258570 - RNA, 20 nt, Vaccinia virus
auaauuauuucaauauacua

SEQ ID NO: 3258571 - RNA, 16 nt, Vaccinia virus
cuacucauagaaaggu

SEQ ID NO: 3258572 - RNA, 16 nt, Vaccinia virus
cggauagcaguauuuc

SEQ ID NO: 3258573 - RNA, 16 nt, Vaccinia virus
agaacagaauaaacaa

SEQ ID NO: 3258574 - RNA, 18 nt, Vaccinia virus
augauaacuucaggaaau

SEQ ID NO: 3258575 - RNA, 14 nt, Vaccinia virus
ucuauaaaauacua

SEQ ID NO: 3258576 - RNA, 14 nt, Vaccinia virus
cugucaauaagaca

SEQ ID NO: 3258577 - RNA, 14 nt, Vaccinia virus
cagaccucucuuaa

SEQ ID NO: 3258578 - RNA, 22 nt, Vaccinia virus
ugcuuuuaucaggauaaauaca

SEQ ID NO: 3258579 - RNA, 20 nt, Vaccinia virus
aaauaacaccguuacacgaa

SEQ ID NO: 3258580 - RNA, 18 nt, Vaccinia virus
ucaacaauaugcaaauag

SEQ ID NO: 3258581 - RNA, 22 nt, Vaccinia virus
auaacuuuuuaccucauaugaa

SEQ ID NO: 3258582 - RNA, 17 nt, Vaccinia virus
acguaucucgucuaaau

SEQ ID NO: 3258583 - RNA, 14 nt, Vaccinia virus
uccguuuacuacaa

SEQ ID NO: 3258584 - RNA, 20 nt, Vaccinia virus
ucauugacagcgguagaugu

SEQ ID NO: 3258585 - RNA, 17 nt, Vaccinia virus
acuacacuuuuuaucau

SEQ ID NO: 3258586 - RNA, 21 nt, Vaccinia virus
auauagagaucgaaaaaagag

SEQ ID NO: 3258587 - RNA, 12 nt, Vaccinia virus
auauuauacaaa

SEQ ID NO: 3258588 - RNA, 19 nt, Vaccinia virus
aucaaagauuaauacauua

SEQ ID NO: 3258589 - RNA, 14 nt, Vaccinia virus
uagacauaauacua

SEQ ID NO: 3258590 - RNA, 19 nt, Vaccinia virus
uccuuaucuucauagaaua

SEQ ID NO: 3258591 - RNA, 21 nt, Vaccinia virus
auugcauuuugauaguuuauc

SEQ ID NO: 3258592 - RNA, 22 nt, Vaccinia virus
caaagaacagaauaaacaaaau

SEQ ID NO: 3258593 - RNA, 19 nt, Vaccinia virus
ucuuggauaaaagcaucca

SEQ ID NO: 3258594 - RNA, 23 nt, Vaccinia virus
ugacgauagcuuuacucugaaaa

SEQ ID NO: 3258595 - RNA, 23 nt, Vaccinia virus
gaauaagugguuugauauuucau

SEQ ID NO: 3258596 - RNA, 21 nt, Vaccinia virus
uguauuaguuaaauauuaaaa

SEQ ID NO: 3258597 - RNA, 18 nt, Vaccinia virus
agaauuuuuauacauuau

SEQ ID NO: 3258598 - RNA, 21 nt, Vaccinia virus
auaguucguguacuagucaua

SEQ ID NO: 3258599 - RNA, 16 nt, Vaccinia virus
auagaucucucauuau

SEQ ID NO: 3258600 - RNA, 13 nt, Vaccinia virus
aaaaaaauuaaua

SEQ ID NO: 3258601 - RNA, 14 nt, Vaccinia virus
aaguuucugaaaua

SEQ ID NO: 3258602 - RNA, 18 nt, Vaccinia virus
auuaguaaaacuagcauu

SEQ ID NO: 3258603 - RNA, 17 nt, Vaccinia virus
agcacuguggaugugac

SEQ ID NO: 3258604 - RNA, 22 nt, Vaccinia virus
aguaauaaaacaaaaaaaagaa

SEQ ID NO: 3258605 - RNA, 15 nt, Vaccinia virus
auuauccaugauaga

SEQ ID NO: 3258606 - RNA, 15 nt, Vaccinia virus
accagucaagucaau

SEQ ID NO: 3258607 - RNA, 23 nt, Vaccinia virus
uauagagcccacguuuaaacauu

SEQ ID NO: 3258608 - RNA, 22 nt, Vaccinia virus
guuagaugguaaaauacaaaau

SEQ ID NO: 3258609 - RNA, 16 nt, Vaccinia virus
uuaauccauuauuuca

SEQ ID NO: 3258610 - RNA, 21 nt, Vaccinia virus
guauaauacggacuucauaau

SEQ ID NO: 3258611 - RNA, 16 nt, Vaccinia virus
auacauaauuuuguaa

SEQ ID NO: 3258612 - RNA, 17 nt, Vaccinia virus
auaauagagugugguau

SEQ ID NO: 3258613 - RNA, 15 nt, Vaccinia virus
aauauauuaagaaau

SEQ ID NO: 3258614 - RNA, 21 nt, Vaccinia virus
aaaaauguaaaauauuuuucu

SEQ ID NO: 3258615 - RNA, 16 nt, Vaccinia virus
cauacuaauagaugua

SEQ ID NO: 3258616 - RNA, 15 nt, Vaccinia virus
auaugcuacauguaa

SEQ ID NO: 3258617 - RNA, 14 nt, Vaccinia virus
ucuuuauacaauga

SEQ ID NO: 3258618 - RNA, 19 nt, Vaccinia virus
guucugauuuuaucuuuua

SEQ ID NO: 3258619 - RNA, 21 nt, Vaccinia virus
gcuauucuggugcuaauuauu

SEQ ID NO: 3258620 - RNA, 16 nt, Vaccinia virus
uaaagauauuguuaca

SEQ ID NO: 3258621 - RNA, 23 nt, Vaccinia virus
auguacgauccaaacaauguuuc

SEQ ID NO: 3258622 - RNA, 23 nt, Vaccinia virus
aauaucauaacuuaguucuuuua

SEQ ID NO: 3258623 - RNA, 20 nt, Vaccinia virus
acuaugccaagcguaugcug

SEQ ID NO: 3258624 - RNA, 15 nt, Vaccinia virus
acuuucgguuucaua

SEQ ID NO: 3258625 - RNA, 13 nt, Vaccinia virus
uuauuuuuggaau

SEQ ID NO: 3258626 - RNA, 19 nt, Vaccinia virus
auguucgugguguuaugaa

SEQ ID NO: 3258627 - RNA, 17 nt, Vaccinia virus
auacgcauguagaaugu

SEQ ID NO: 3258628 - RNA, 15 nt, Vaccinia virus
ccaaaggauguuuaa

SEQ ID NO: 3258629 - RNA, 23 nt, Vaccinia virus
uacucuaugaauggauacuugua

SEQ ID NO: 3258630 - RNA, 19 nt, Vaccinia virus
ugaaaaauuuuccacaucu

SEQ ID NO: 3258631 - RNA, 16 nt, Vaccinia virus
augcaccugaaacauc

SEQ ID NO: 3258632 - RNA, 18 nt, Vaccinia virus
uaacaauuuauuuuguau

SEQ ID NO: 3258633 - RNA, 13 nt, Vaccinia virus
cagacuguuuaug

SEQ ID NO: 3258634 - RNA, 14 nt, Vaccinia virus
aucguuuucaucuu

SEQ ID NO: 3258635 - RNA, 17 nt, Vaccinia virus
aucuguacuucuguaca

SEQ ID NO: 3258636 - RNA, 17 nt, Vaccinia virus
auauuuacauauuuacu

SEQ ID NO: 3258637 - RNA, 17 nt, Vaccinia virus
aaauuauaaaauuauau

SEQ ID NO: 3258638 - RNA, 18 nt, Vaccinia virus
uaugaccgguuuaauguu

SEQ ID NO: 3258639 - RNA, 20 nt, Vaccinia virus
aggacuuucuucaaagaaaa

SEQ ID NO: 3258640 - RNA, 13 nt, Vaccinia virus
cgaauaaauagau

SEQ ID NO: 3258641 - RNA, 21 nt, Vaccinia virus
acaccaucuucauaauaaaua

SEQ ID NO: 3258642 - RNA, 21 nt, Vaccinia virus
uaccagcauuaguaacagcuu

SEQ ID NO: 3258643 - RNA, 12 nt, Vaccinia virus
auauauguugau

SEQ ID NO: 3258644 - RNA, 21 nt, Vaccinia virus
caaucauaaaaaaaauacaug

SEQ ID NO: 3258645 - RNA, 18 nt, Vaccinia virus
auucaaggaaagaauaaa

SEQ ID NO: 3258646 - RNA, 13 nt, Vaccinia virus
auaacauucuuaa

SEQ ID NO: 3258647 - RNA, 22 nt, Vaccinia virus
cuguauccgucaaucuaauauu

SEQ ID NO: 3258648 - RNA, 19 nt, Vaccinia virus
cuuuaauaacaaagaaaga

SEQ ID NO: 3258649 - RNA, 13 nt, Vaccinia virus
aaagagacuacaa

SEQ ID NO: 3258650 - RNA, 19 nt, Vaccinia virus
aguaaucauauaaauguuu

SEQ ID NO: 3258651 - RNA, 22 nt, Vaccinia virus
gaaaauaaauccaaaauaacua

SEQ ID NO: 3258652 - RNA, 20 nt, Vaccinia virus
caguuaccaaagagaaaaca

SEQ ID NO: 3258653 - RNA, 16 nt, Vaccinia virus
aguaaagucaggacug

SEQ ID NO: 3258654 - RNA, 22 nt, Vaccinia virus
cgucuaaaacaauaaaugcauu

SEQ ID NO: 3258655 - RNA, 19 nt, Vaccinia virus
uuaaaucgccgaaugaaca

SEQ ID NO: 3258656 - RNA, 17 nt, Vaccinia virus
uuaauaaauguuuugau

SEQ ID NO: 3258657 - RNA, 21 nt, Vaccinia virus
auuuugauauuacuuauaaua

SEQ ID NO: 3258658 - RNA, 23 nt, Vaccinia virus
ugauuaucuucuugagacauaac

SEQ ID NO: 3258659 - RNA, 13 nt, Vaccinia virus
uauauaucuggag

SEQ ID NO: 3258660 - RNA, 20 nt, Vaccinia virus
gcuaaguauacgaucuuuua

SEQ ID NO: 3258661 - RNA, 14 nt, Vaccinia virus
aaauauauacauau

SEQ ID NO: 3258662 - RNA, 10 nt, Vaccinia virus
cuaaauuaau

SEQ ID NO: 3258663 - RNA, 13 nt, Vaccinia virus
auuuguuaaaaga

SEQ ID NO: 3258664 - RNA, 14 nt, Vaccinia virus
augacuuaugaaua

SEQ ID NO: 3258665 - RNA, 23 nt, Vaccinia virus
uugauaauaucuauauaugaucu

SEQ ID NO: 3258666 - RNA, 18 nt, Vaccinia virus
caacaaaauucagauucu

SEQ ID NO: 3258667 - RNA, 16 nt, Vaccinia virus
uguuauuguauacugu

SEQ ID NO: 3258668 - RNA, 15 nt, Vaccinia virus
uagaugagaacagaa

SEQ ID NO: 3258669 - RNA, 13 nt, Vaccinia virus
uaugauucaaugu

SEQ ID NO: 3258670 - RNA, 14 nt, Vaccinia virus
ugcucuuucggugg

SEQ ID NO: 3258671 - RNA, 19 nt, Vaccinia virus
cauaacuugagagcaucca

SEQ ID NO: 3258672 - RNA, 15 nt, Vaccinia virus
uauaaagacaaacaa

SEQ ID NO: 3258673 - RNA, 20 nt, Vaccinia virus
acaucggcugccaaaguuau

SEQ ID NO: 3258674 - RNA, 23 nt, Vaccinia virus
cacaugauccauuuauaguuaua

SEQ ID NO: 3258675 - RNA, 16 nt, Vaccinia virus
auuauaagauuaaaug

SEQ ID NO: 3258676 - RNA, 20 nt, Vaccinia virus
auuguuuugaagaaaugaua

SEQ ID NO: 3258677 - RNA, 14 nt, Vaccinia virus
aaugaucauccaga

SEQ ID NO: 3258678 - RNA, 16 nt, Vaccinia virus
ucuuccauuuaaauau

SEQ ID NO: 3258679 - RNA, 13 nt, Vaccinia virus
uaaauaucauaau

SEQ ID NO: 3258680 - RNA, 15 nt, Vaccinia virus
ccaaaaauauccaua

SEQ ID NO: 3258681 - RNA, 17 nt, Vaccinia virus
accggcaagaaagugaa

SEQ ID NO: 3258682 - RNA, 22 nt, Vaccinia virus
augcgccggcagucacaucugu

SEQ ID NO: 3258683 - RNA, 19 nt, Vaccinia virus
cugauagcaauucauguac

SEQ ID NO: 3258684 - RNA, 21 nt, Vaccinia virus
agauauuuggcuaaacuauau

SEQ ID NO: 3258685 - RNA, 20 nt, Vaccinia virus
cuaucguuacuaguaaaaug

SEQ ID NO: 3258686 - RNA, 17 nt, Vaccinia virus
acauccgccuuaaaugu

SEQ ID NO: 3258687 - RNA, 15 nt, Vaccinia virus
acaggcuauuuacaa

SEQ ID NO: 3258688 - RNA, 18 nt, Vaccinia virus
acuauaaaauaaaaugag

SEQ ID NO: 3258689 - RNA, 14 nt, Vaccinia virus
uacuagaguacuua

SEQ ID NO: 3258690 - RNA, 13 nt, Vaccinia virus
aaucuguauuuca

SEQ ID NO: 3258691 - RNA, 17 nt, Vaccinia virus
uagauauccuuuuucau

SEQ ID NO: 3258692 - RNA, 17 nt, Vaccinia virus
aaacaauacagugauug

SEQ ID NO: 3258693 - RNA, 19 nt, Vaccinia virus
gauugcauagugaauauau

SEQ ID NO: 3258694 - RNA, 17 nt, Vaccinia virus
gauuauuagaucuuuuc

SEQ ID NO: 3258695 - RNA, 17 nt, Vaccinia virus
augaauuagagaauuac

SEQ ID NO: 3258696 - RNA, 23 nt, Vaccinia virus
aggauauuagcgaauauaucaaa

SEQ ID NO: 3258697 - RNA, 20 nt, Vaccinia virus
aggcaauagcgacauaaaca

SEQ ID NO: 3258698 - RNA, 23 nt, Vaccinia virus
caauuucauacgcuccucuuuug

SEQ ID NO: 3258699 - RNA, 14 nt, Vaccinia virus
guuagucauauuac

SEQ ID NO: 3258700 - RNA, 21 nt, Vaccinia virus
uguuuaccagcuccaugacuu

SEQ ID NO: 3258701 - RNA, 13 nt, Vaccinia virus
uugaaaauuauuu

SEQ ID NO: 3258702 - RNA, 13 nt, Vaccinia virus
guauauacauaga

SEQ ID NO: 3258703 - RNA, 12 nt, Vaccinia virus
aucuggaaaauc

SEQ ID NO: 3258704 - RNA, 13 nt, Vaccinia virus
auauuauuacaca

SEQ ID NO: 3258705 - RNA, 17 nt, Vaccinia virus
ggagacauccauugaua

SEQ ID NO: 3258706 - RNA, 17 nt, Vaccinia virus
uaaauguagacaaauau

SEQ ID NO: 3258707 - RNA, 24 nt, Vaccinia virus
cgcguuuugacgacguguacaaaa

SEQ ID NO: 3258708 - RNA, 16 nt, Vaccinia virus
uuguucauuggaugag

SEQ ID NO: 3258709 - RNA, 14 nt, Vaccinia virus
aauaucuaauggau

SEQ ID NO: 3258710 - RNA, 17 nt, Vaccinia virus
aagaaguuccaugaugu

SEQ ID NO: 3258711 - RNA, 17 nt, Vaccinia virus
ucauuacagaaacugua

SEQ ID NO: 3258712 - RNA, 21 nt, Vaccinia virus
aauaccauaaauauauuucua

SEQ ID NO: 3258713 - RNA, 13 nt, Vaccinia virus
guaauuaaugaaa

SEQ ID NO: 3258714 - RNA, 13 nt, Vaccinia virus
aauccaaauauga

SEQ ID NO: 3258715 - RNA, 19 nt, Vaccinia virus
gauaccuuuguuauuuauu

SEQ ID NO: 3258716 - RNA, 14 nt, Vaccinia virus
acuuguauaauaag

SEQ ID NO: 3258717 - RNA, 20 nt, Vaccinia virus
uuagacaagcggguaaauga

SEQ ID NO: 3258718 - RNA, 23 nt, Vaccinia virus
cugguuuucuauaaauaaaagac

SEQ ID NO: 3258719 - RNA, 15 nt, Vaccinia virus
acaagaucuuuguuu

SEQ ID NO: 3258720 - RNA, 15 nt, Vaccinia virus
uaauagauuaaugau

SEQ ID NO: 3258721 - RNA, 14 nt, Vaccinia virus
auaagauuaucaaa

SEQ ID NO: 3258722 - RNA, 19 nt, Vaccinia virus
agaagauggagagucacua

SEQ ID NO: 3258723 - RNA, 14 nt, Vaccinia virus
uaaaugacaaguau

SEQ ID NO: 3258724 - RNA, 12 nt, Vaccinia virus
uuaaaaugugua

SEQ ID NO: 3258725 - RNA, 14 nt, Vaccinia virus
uguacuucuguaca

SEQ ID NO: 3258726 - RNA, 13 nt, Vaccinia virus
aaugauaacuaga

SEQ ID NO: 3258727 - RNA, 13 nt, Vaccinia virus
uucaucauauuca

SEQ ID NO: 3258728 - RNA, 17 nt, Vaccinia virus
acucauaaauaaaaaug

SEQ ID NO: 3258729 - RNA, 18 nt, Vaccinia virus
uccacugucacuggaaag

SEQ ID NO: 3258730 - RNA, 19 nt, Vaccinia virus
auguaacccuuuuuaucga

SEQ ID NO: 3258731 - RNA, 19 nt, Vaccinia virus
uaccauuaaagaauucuua

SEQ ID NO: 3258732 - RNA, 19 nt, Vaccinia virus
uuauuucagaaauuauucg

SEQ ID NO: 3258733 - RNA, 18 nt, Vaccinia virus
aucggaugauauuaaugu

SEQ ID NO: 3258734 - RNA, 23 nt, Vaccinia virus
agggauaggaguaggaaugccac

SEQ ID NO: 3258735 - RNA, 16 nt, Vaccinia virus
aauuucagaagaaaac

SEQ ID NO: 3258736 - RNA, 22 nt, Vaccinia virus
agaugaaaaauuuuccacaucu

SEQ ID NO: 3258737 - RNA, 18 nt, Vaccinia virus
auuugccauauauggaua

SEQ ID NO: 3258738 - RNA, 15 nt, Vaccinia virus
uuucccauacuaauu

SEQ ID NO: 3258739 - RNA, 13 nt, Vaccinia virus
agaaucaaaggau

SEQ ID NO: 3258740 - RNA, 15 nt, Vaccinia virus
aaaacaauacaguga

SEQ ID NO: 3258741 - RNA, 21 nt, Vaccinia virus
uaaugauugcccauagaguau

SEQ ID NO: 3258742 - RNA, 20 nt, Vaccinia virus
aauuucuagaacaucaucuc

SEQ ID NO: 3258743 - RNA, 23 nt, Vaccinia virus
ccaucugguucaggaaagacagc

SEQ ID NO: 3258744 - RNA, 18 nt, Vaccinia virus
cuauaucaucuacauaau

SEQ ID NO: 3258745 - RNA, 17 nt, Vaccinia virus
aauuuauuucagaaauu

SEQ ID NO: 3258746 - RNA, 12 nt, Vaccinia virus
uugguuguauug

SEQ ID NO: 3258747 - RNA, 22 nt, Vaccinia virus
ucuuacauauuuuuuucuuauu

SEQ ID NO: 3258748 - RNA, 14 nt, Vaccinia virus
uuuaaaaaguuauc

SEQ ID NO: 3258749 - RNA, 11 nt, Vaccinia virus
cucuagauaug

SEQ ID NO: 3258750 - RNA, 13 nt, Vaccinia virus
cucaaauagcacc

SEQ ID NO: 3258751 - RNA, 19 nt, Vaccinia virus
agauacgugauuaauacau

SEQ ID NO: 3258752 - RNA, 21 nt, Vaccinia virus
cuuauaaaacuauauuuggaa

SEQ ID NO: 3258753 - RNA, 23 nt, Vaccinia virus
gacuuaugucacgaugauggaau

SEQ ID NO: 3258754 - RNA, 22 nt, Vaccinia virus
auuaacuuccacauuaauacag

SEQ ID NO: 3258755 - RNA, 18 nt, Vaccinia virus
ucauuauaacucuagaau

SEQ ID NO: 3258756 - RNA, 13 nt, Vaccinia virus
uuacuuuuggaau

SEQ ID NO: 3258757 - RNA, 13 nt, Vaccinia virus
caaagauauggaa

SEQ ID NO: 3258758 - RNA, 12 nt, Vaccinia virus
gauaauuuccau

SEQ ID NO: 3258759 - RNA, 22 nt, Vaccinia virus
aaauaauagggauaaaguucau

SEQ ID NO: 3258760 - RNA, 18 nt, Vaccinia virus
uaucaaauugcauaccua

SEQ ID NO: 3258761 - RNA, 20 nt, Vaccinia virus
auuuuacuaaauaauggcug

SEQ ID NO: 3258762 - RNA, 17 nt, Vaccinia virus
gaaagaacugauugcag

SEQ ID NO: 3258763 - RNA, 15 nt, Vaccinia virus
aggauaaagaugucu

SEQ ID NO: 3258764 - RNA, 15 nt, Vaccinia virus
uaaaaauaaacauug

SEQ ID NO: 3258765 - RNA, 21 nt, Vaccinia virus
aguauggaagaggauuuucua

SEQ ID NO: 3258766 - RNA, 12 nt, Vaccinia virus
uaauaaauuaga

SEQ ID NO: 3258767 - RNA, 13 nt, Vaccinia virus
agagaauacgcau

SEQ ID NO: 3258768 - RNA, 22 nt, Vaccinia virus
gauuuuauuuaguguagauaug

SEQ ID NO: 3258769 - RNA, 17 nt, Vaccinia virus
gccuuauauagcacuuu

SEQ ID NO: 3258770 - RNA, 18 nt, Vaccinia virus
ggauauugcaugauagaa

SEQ ID NO: 3258771 - RNA, 20 nt, Vaccinia virus
auaauggugcuuguaucgaa

SEQ ID NO: 3258772 - RNA, 11 nt, Vaccinia virus
aguaauguuua

SEQ ID NO: 3258773 - RNA, 14 nt, Vaccinia virus
uauuguuugagaac

SEQ ID NO: 3258774 - RNA, 14 nt, Vaccinia virus
cuucuuauuuagau

SEQ ID NO: 3258775 - RNA, 14 nt, Vaccinia virus
acauggaacucaug

SEQ ID NO: 3258776 - RNA, 22 nt, Vaccinia virus
cauaauacucccacaaauacug

SEQ ID NO: 3258777 - RNA, 21 nt, Vaccinia virus
cagacaaauggucaaugauau

SEQ ID NO: 3258778 - RNA, 17 nt, Vaccinia virus
acaacauacuauuguuu

SEQ ID NO: 3258779 - RNA, 20 nt, Vaccinia virus
cauaagcuugacuacauuug

SEQ ID NO: 3258780 - RNA, 21 nt, Vaccinia virus
aaguauucuccagaugaaugg

SEQ ID NO: 3258781 - RNA, 15 nt, Vaccinia virus
gcuguugaaucuuua

SEQ ID NO: 3258782 - RNA, 18 nt, Vaccinia virus
uuccgguuugcaaaacaa

SEQ ID NO: 3258783 - RNA, 21 nt, Vaccinia virus
gcuaauuuuuguaaauaacua

SEQ ID NO: 3258784 - RNA, 23 nt, Vaccinia virus
aaaugacuaauuuuguagcauua

SEQ ID NO: 3258785 - RNA, 18 nt, Vaccinia virus
gaauauaaaaaauuuaua

SEQ ID NO: 3258786 - RNA, 16 nt, Vaccinia virus
aauauuuauuagaaca

SEQ ID NO: 3258787 - RNA, 17 nt, Vaccinia virus
auaauaauccagaaugu

SEQ ID NO: 3258788 - RNA, 16 nt, Vaccinia virus
cacaauauauguugau

SEQ ID NO: 3258789 - RNA, 15 nt, Vaccinia virus
cauaacauauuuuga

SEQ ID NO: 3258790 - RNA, 21 nt, Vaccinia virus
auuaaaugcaauaacaaagau

SEQ ID NO: 3258791 - RNA, 23 nt, Vaccinia virus
gcacuacuguuaagaaugauuac

SEQ ID NO: 3258792 - RNA, 22 nt, Vaccinia virus
aauauggacacgcggcuguaaa

SEQ ID NO: 3258793 - RNA, 22 nt, Vaccinia virus
uaucuuuaacuaagucaaugau

SEQ ID NO: 3258794 - RNA, 16 nt, Vaccinia virus
cagaaagacgaauaca

SEQ ID NO: 3258795 - RNA, 19 nt, Vaccinia virus
uacucucuauaacaaauau

SEQ ID NO: 3258796 - RNA, 15 nt, Vaccinia virus
uguuugaaaacagaa

SEQ ID NO: 3258797 - RNA, 17 nt, Vaccinia virus
ugacgucagccauagca

SEQ ID NO: 3258798 - RNA, 19 nt, Vaccinia virus
auaucggauuauuaacaua

SEQ ID NO: 3258799 - RNA, 23 nt, Vaccinia virus
uuaaagagacuacaauauauucu

SEQ ID NO: 3258800 - RNA, 18 nt, Vaccinia virus
uuggacaaaucuggaaaa

SEQ ID NO: 3258801 - RNA, 19 nt, Vaccinia virus
aaacgauuuaauuacagag

SEQ ID NO: 3258802 - RNA, 18 nt, Vaccinia virus
aaaacuugauaauuaaua

SEQ ID NO: 3258803 - RNA, 20 nt, Vaccinia virus
auuauggaaaucaacauaau

SEQ ID NO: 3258804 - RNA, 13 nt, Vaccinia virus
gauaauaauacac

SEQ ID NO: 3258805 - RNA, 21 nt, Vaccinia virus
aagauagcggaagauacgacu

SEQ ID NO: 3258806 - RNA, 18 nt, Vaccinia virus
caauacacacaauagaca

SEQ ID NO: 3258807 - RNA, 11 nt, Vaccinia virus
aaccaaacauu

SEQ ID NO: 3258808 - RNA, 22 nt, Vaccinia virus
agacacauaugguuucuaaauc

SEQ ID NO: 3258809 - RNA, 21 nt, Vaccinia virus
uacauagcaucuucacaaauu

SEQ ID NO: 3258810 - RNA, 22 nt, Vaccinia virus
acauuguuauugaucaaacauu

SEQ ID NO: 3258811 - RNA, 14 nt, Vaccinia virus
uacuaucaauauua

SEQ ID NO: 3258812 - RNA, 15 nt, Vaccinia virus
aucuucuuaaucucu

SEQ ID NO: 3258813 - RNA, 15 nt, Vaccinia virus
uauuuuuuuuaucua

SEQ ID NO: 3258814 - RNA, 18 nt, Vaccinia virus
auaucugagcuaucuaga

SEQ ID NO: 3258815 - RNA, 12 nt, Vaccinia virus
uaagcauugucu

SEQ ID NO: 3258816 - RNA, 20 nt, Vaccinia virus
uaugaccggcaaucaugaau

SEQ ID NO: 3258817 - RNA, 18 nt, Vaccinia virus
aagaauguauauacaugu

SEQ ID NO: 3258818 - RNA, 20 nt, Vaccinia virus
guuuuagagacuuugaagcu

SEQ ID NO: 3258819 - RNA, 15 nt, Vaccinia virus
cuauaaacaugaauu

SEQ ID NO: 3258820 - RNA, 17 nt, Vaccinia virus
auacugguuaaaauccu

SEQ ID NO: 3258821 - RNA, 18 nt, Vaccinia virus
guucucuuugauaaaagu

SEQ ID NO: 3258822 - RNA, 21 nt, Vaccinia virus
auaugaaaaacaugucucucu

SEQ ID NO: 3258823 - RNA, 17 nt, Vaccinia virus
aauuuacaaaacuggua

SEQ ID NO: 3258824 - RNA, 20 nt, Vaccinia virus
aaauuaucuaucuacaucau

SEQ ID NO: 3258825 - RNA, 18 nt, Vaccinia virus
gcauuuuuugguuucuuu

SEQ ID NO: 3258826 - RNA, 14 nt, Vaccinia virus
aauauauacaguag

SEQ ID NO: 3258827 - RNA, 21 nt, Vaccinia virus
gauuaaguauuguuuuuucau

SEQ ID NO: 3258828 - RNA, 16 nt, Vaccinia virus
ucucauaauaaauuuu

SEQ ID NO: 3258829 - RNA, 21 nt, Vaccinia virus
aaugauuuagaaaugaaguua

SEQ ID NO: 3258830 - RNA, 19 nt, Vaccinia virus
aucauuuuugcaucauuua

SEQ ID NO: 3258831 - RNA, 23 nt, Vaccinia virus
caaguuaucgucuguauuaaugu

SEQ ID NO: 3258832 - RNA, 21 nt, Vaccinia virus
uuauuaaauccuuguuugaua

SEQ ID NO: 3258833 - RNA, 12 nt, Vaccinia virus
cuagauccucau

SEQ ID NO: 3258834 - RNA, 21 nt, Vaccinia virus
uuuaacuucauccguuuccuu

SEQ ID NO: 3258835 - RNA, 21 nt, Vaccinia virus
auauuaacgaguuccauuuau

SEQ ID NO: 3258836 - RNA, 14 nt, Vaccinia virus
aguagaaaauaaua

SEQ ID NO: 3258837 - RNA, 17 nt, Vaccinia virus
agaaauucuuguucaau

SEQ ID NO: 3258838 - RNA, 17 nt, Vaccinia virus
aaaauauaguagaauuu

SEQ ID NO: 3258839 - RNA, 20 nt, Vaccinia virus
ucgucaacaaguuggaugau

SEQ ID NO: 3258840 - RNA, 19 nt, Vaccinia virus
ucuugaagccauacauucg

SEQ ID NO: 3258841 - RNA, 13 nt, Vaccinia virus
uauuaaucuuuuu

SEQ ID NO: 3258842 - RNA, 13 nt, Vaccinia virus
auuaaaucaauau

SEQ ID NO: 3258843 - RNA, 15 nt, Vaccinia virus
auguguuaaaaagaa

SEQ ID NO: 3258844 - RNA, 19 nt, Vaccinia virus
acaacauggagcuaaucua

SEQ ID NO: 3258845 - RNA, 18 nt, Vaccinia virus
aauauaguaauaagauuu

SEQ ID NO: 3258846 - RNA, 21 nt, Vaccinia virus
cuauuuagaucauuaacucua

SEQ ID NO: 3258847 - RNA, 19 nt, Vaccinia virus
gccgguugccgcaaauaga

SEQ ID NO: 3258848 - RNA, 14 nt, Vaccinia virus
aagauauaaaugac

SEQ ID NO: 3258849 - RNA, 13 nt, Vaccinia virus
auauaaugauaua

SEQ ID NO: 3258850 - RNA, 13 nt, Vaccinia virus
uauuaauguauua

SEQ ID NO: 3258851 - RNA, 15 nt, Vaccinia virus
uguauguuugggaga

SEQ ID NO: 3258852 - RNA, 23 nt, Vaccinia virus
gauacuccguauccuauuccaca

SEQ ID NO: 3258853 - RNA, 13 nt, Vaccinia virus
cgugaaauaaagu

SEQ ID NO: 3258854 - RNA, 18 nt, Vaccinia virus
uagaaugcucuuaaauaa

SEQ ID NO: 3258855 - RNA, 18 nt, Vaccinia virus
uuauaucuauuuuauuca

SEQ ID NO: 3258856 - RNA, 17 nt, Vaccinia virus
aacaauuucuauuuccu

SEQ ID NO: 3258857 - RNA, 14 nt, Vaccinia virus
aucuauuuuaaaua

SEQ ID NO: 3258858 - RNA, 15 nt, Vaccinia virus
ucauaauaucuuuaa

SEQ ID NO: 3258859 - RNA, 20 nt, Vaccinia virus
gaauuggaacuaguauuuau

SEQ ID NO: 3258860 - RNA, 17 nt, Vaccinia virus
acgagaagccauuuuau

SEQ ID NO: 3258861 - RNA, 18 nt, Vaccinia virus
gaauaauguuucuauguu

SEQ ID NO: 3258862 - RNA, 12 nt, Vaccinia virus
uaauucauuaau

SEQ ID NO: 3258863 - RNA, 21 nt, Vaccinia virus
uuauacggcuacaauuucaua

SEQ ID NO: 3258864 - RNA, 17 nt, Vaccinia virus
auaucaacaucugaugc

SEQ ID NO: 3258865 - RNA, 13 nt, Vaccinia virus
aauucaucaucug

SEQ ID NO: 3258866 - RNA, 16 nt, Vaccinia virus
uauaacuucuaaucuu

SEQ ID NO: 3258867 - RNA, 17 nt, Vaccinia virus
accaaaaaaucguauau

SEQ ID NO: 3258868 - RNA, 22 nt, Vaccinia virus
aauacucuauaaggucagaaaa

SEQ ID NO: 3258869 - RNA, 21 nt, Vaccinia virus
uaccucucggcgaaauaguua

SEQ ID NO: 3258870 - RNA, 16 nt, Vaccinia virus
aucacuacaauaauua

SEQ ID NO: 3258871 - RNA, 19 nt, Vaccinia virus
gucacauacacuagugaua

SEQ ID NO: 3258872 - RNA, 14 nt, Vaccinia virus
uuaauaauaauuca

SEQ ID NO: 3258873 - RNA, 14 nt, Vaccinia virus
caaagagaaaacaa

SEQ ID NO: 3258874 - RNA, 13 nt, Vaccinia virus
acucauaaaauac

SEQ ID NO: 3258875 - RNA, 21 nt, Vaccinia virus
aaucugauaaauauacaauag

SEQ ID NO: 3258876 - RNA, 14 nt, Vaccinia virus
aauaaaaauguuuu

SEQ ID NO: 3258877 - RNA, 16 nt, Vaccinia virus
cauuaauagaaugaag

SEQ ID NO: 3258878 - RNA, 18 nt, Vaccinia virus
aacaugucucuaaaugug

SEQ ID NO: 3258879 - RNA, 22 nt, Vaccinia virus
uuaaagauggaguauaaucuuu

SEQ ID NO: 3258880 - RNA, 16 nt, Vaccinia virus
uaagaaaaauagagag

SEQ ID NO: 3258881 - RNA, 20 nt, Vaccinia virus
uucuagaacuauaaaaacag

SEQ ID NO: 3258882 - RNA, 18 nt, Vaccinia virus
uuguaucaugacauucaa

SEQ ID NO: 3258883 - RNA, 16 nt, Vaccinia virus
cucaaccauagauaua

SEQ ID NO: 3258884 - RNA, 15 nt, Vaccinia virus
ucucaauaguuucau

SEQ ID NO: 3258885 - RNA, 20 nt, Vaccinia virus
uguaaaaacaaauuuguaca

SEQ ID NO: 3258886 - RNA, 13 nt, Vaccinia virus
auuaauaauaauu

SEQ ID NO: 3258887 - RNA, 13 nt, Vaccinia virus
aauacuaaauuga

SEQ ID NO: 3258888 - RNA, 15 nt, Vaccinia virus
acaaaaauacauaaa

SEQ ID NO: 3258889 - RNA, 17 nt, Vaccinia virus
auuggaacuaguauuua

SEQ ID NO: 3258890 - RNA, 16 nt, Vaccinia virus
accaacgguauaugaa

SEQ ID NO: 3258891 - RNA, 14 nt, Vaccinia virus
agauguaaauauau

SEQ ID NO: 3258892 - RNA, 19 nt, Vaccinia virus
cuauaaaacgauuaaacaa

SEQ ID NO: 3258893 - RNA, 23 nt, Vaccinia virus
cacaaauaguaaaugagagaucu

SEQ ID NO: 3258894 - RNA, 18 nt, Vaccinia virus
aaguuuucccauacuaau

SEQ ID NO: 3258895 - RNA, 17 nt, Vaccinia virus
guucugggaauagaaac

SEQ ID NO: 3258896 - RNA, 14 nt, Vaccinia virus
guuuauagauguuc

SEQ ID NO: 3258897 - RNA, 19 nt, Vaccinia virus
agaacgguagaaacuauac

SEQ ID NO: 3258898 - RNA, 23 nt, Vaccinia virus
cauuaguuaaugaaaauaacucu

SEQ ID NO: 3258899 - RNA, 14 nt, Vaccinia virus
cauauagauuacaa

SEQ ID NO: 3258900 - RNA, 17 nt, Vaccinia virus
aauauucagaguccucu

SEQ ID NO: 3258901 - RNA, 17 nt, Vaccinia virus
guuagugaugaauaucu

SEQ ID NO: 3258902 - RNA, 17 nt, Vaccinia virus
auaaaauguuaauacau

SEQ ID NO: 3258903 - RNA, 12 nt, Vaccinia virus
aaggcagaaaug

SEQ ID NO: 3258904 - RNA, 13 nt, Vaccinia virus
auaucuuaaauaa

SEQ ID NO: 3258905 - RNA, 13 nt, Vaccinia virus
aguuacuuaaaug

SEQ ID NO: 3258906 - RNA, 21 nt, Vaccinia virus
uuaaacaaauaaguauuauca

SEQ ID NO: 3258907 - RNA, 14 nt, Vaccinia virus
uaauaauuauauca

SEQ ID NO: 3258908 - RNA, 16 nt, Vaccinia virus
uucgauagauauucuu

SEQ ID NO: 3258909 - RNA, 23 nt, Vaccinia virus
acuucauccguuuccuuaugaag

SEQ ID NO: 3258910 - RNA, 18 nt, Vaccinia virus
auaacucguuuuucuuaa

SEQ ID NO: 3258911 - RNA, 22 nt, Vaccinia virus
aacuccuccuaggauauuugua

SEQ ID NO: 3258912 - RNA, 20 nt, Vaccinia virus
guuugaaaaucgucuuuuau

SEQ ID NO: 3258913 - RNA, 13 nt, Vaccinia virus
aucgaaaucuuaa

SEQ ID NO: 3258914 - RNA, 14 nt, Vaccinia virus
agacuugugggaaa

SEQ ID NO: 3258915 - RNA, 21 nt, Vaccinia virus
ccugguagacggaauguuuua

SEQ ID NO: 3258916 - RNA, 13 nt, Vaccinia virus
agaauaugucucu

SEQ ID NO: 3258917 - RNA, 21 nt, Vaccinia virus
auuuuacuacauaguuaucua

SEQ ID NO: 3258918 - RNA, 17 nt, Vaccinia virus
auacuaucuauaaacau

SEQ ID NO: 3258919 - RNA, 23 nt, Vaccinia virus
aagacaacgaauacaaacgccau

SEQ ID NO: 3258920 - RNA, 15 nt, Vaccinia virus
aacaucuaacuauau

SEQ ID NO: 3258921 - RNA, 22 nt, Vaccinia virus
uuuuugugggaagcgauucaaa

SEQ ID NO: 3258922 - RNA, 23 nt, Vaccinia virus
uauuaauaacaguuauauaucua

SEQ ID NO: 3258923 - RNA, 19 nt, Vaccinia virus
auauugguacgugucuaua

SEQ ID NO: 3258924 - RNA, 16 nt, Vaccinia virus
uguaucagacgauaau

SEQ ID NO: 3258925 - RNA, 15 nt, Vaccinia virus
ugaauaucuacaaau

SEQ ID NO: 3258926 - RNA, 17 nt, Vaccinia virus
auuggucagaaauauug

SEQ ID NO: 3258927 - RNA, 12 nt, Vaccinia virus
ccaguauaacac

SEQ ID NO: 3258928 - RNA, 13 nt, Vaccinia virus
agucaauaucuuu

SEQ ID NO: 3258929 - RNA, 23 nt, Vaccinia virus
aacagacuauuuaucagaacacu

SEQ ID NO: 3258930 - RNA, 19 nt, Vaccinia virus
acuauaucgacauauuuca

SEQ ID NO: 3258931 - RNA, 21 nt, Vaccinia virus
caauuguauuauugauacaau

SEQ ID NO: 3258932 - RNA, 14 nt, Vaccinia virus
uaauuauauuuaca

SEQ ID NO: 3258933 - RNA, 15 nt, Vaccinia virus
acaaacgaagaaaga

SEQ ID NO: 3258934 - RNA, 19 nt, Vaccinia virus
aaaugucacuauuaaagau

SEQ ID NO: 3258935 - RNA, 14 nt, Vaccinia virus
cgcagaaaauaucu

SEQ ID NO: 3258936 - RNA, 16 nt, Vaccinia virus
uguaaaagcauauguu

SEQ ID NO: 3258937 - RNA, 17 nt, Vaccinia virus
augaucaagaaggaaau

SEQ ID NO: 3258938 - RNA, 21 nt, Vaccinia virus
cuaucaaccgcauaauacaau

SEQ ID NO: 3258939 - RNA, 13 nt, Vaccinia virus
caaaaauaaugac

SEQ ID NO: 3258940 - RNA, 14 nt, Vaccinia virus
cacguuuaaacauu

SEQ ID NO: 3258941 - RNA, 10 nt, Vaccinia virus
aaaagucaac

SEQ ID NO: 3258942 - RNA, 13 nt, Vaccinia virus
aauccugaauaua

SEQ ID NO: 3258943 - RNA, 18 nt, Vaccinia virus
uuuacuuucgguuucaua

SEQ ID NO: 3258944 - RNA, 15 nt, Vaccinia virus
caugauuaguauuuu

SEQ ID NO: 3258945 - RNA, 14 nt, Vaccinia virus
ugaacuauuucuug

SEQ ID NO: 3258946 - RNA, 18 nt, Vaccinia virus
cagauuuugauauucuau

SEQ ID NO: 3258947 - RNA, 16 nt, Vaccinia virus
cuauuggcaauuguag

SEQ ID NO: 3258948 - RNA, 17 nt, Vaccinia virus
gcaauagcugauuauuu

SEQ ID NO: 3258949 - RNA, 22 nt, Vaccinia virus
auugcuguuaguauaauuauug

SEQ ID NO: 3258950 - RNA, 15 nt, Vaccinia virus
aucuagguugccaaa

SEQ ID NO: 3258951 - RNA, 13 nt, Vaccinia virus
aaacacauaucca

SEQ ID NO: 3258952 - RNA, 19 nt, Vaccinia virus
uuaaucuuggaaauuauuu

SEQ ID NO: 3258953 - RNA, 18 nt, Vaccinia virus
aacguacaaauggauaaa

SEQ ID NO: 3258954 - RNA, 17 nt, Vaccinia virus
aguaauuuguucaaaau

SEQ ID NO: 3258955 - RNA, 17 nt, Vaccinia virus
uaucuaacaaauuuccu

SEQ ID NO: 3258956 - RNA, 16 nt, Vaccinia virus
aacaauguauacaaau

SEQ ID NO: 3258957 - RNA, 19 nt, Vaccinia virus
uagaggaucuauuagaugu

SEQ ID NO: 3258958 - RNA, 18 nt, Vaccinia virus
gaauaaucguuauuauca

SEQ ID NO: 3258959 - RNA, 16 nt, Vaccinia virus
uauccauuuagcaaaa

SEQ ID NO: 3258960 - RNA, 17 nt, Vaccinia virus
uuagaagagucauuaaa

SEQ ID NO: 3258961 - RNA, 19 nt, Vaccinia virus
ucaauucguucgaugagua

SEQ ID NO: 3258962 - RNA, 19 nt, Vaccinia virus
aagguuagcgcucagaaua

SEQ ID NO: 3258963 - RNA, 20 nt, Vaccinia virus
aucagcauccacucauauag

SEQ ID NO: 3258964 - RNA, 23 nt, Vaccinia virus
uaaacauauagggaaucauauau

SEQ ID NO: 3258965 - RNA, 16 nt, Vaccinia virus
uauauccucggaugau

SEQ ID NO: 3258966 - RNA, 15 nt, Vaccinia virus
ugauauuacuuauaa

SEQ ID NO: 3258967 - RNA, 15 nt, Vaccinia virus
aauaguuuauaacau

SEQ ID NO: 3258968 - RNA, 13 nt, Vaccinia virus
acgauuacuacau

SEQ ID NO: 3258969 - RNA, 20 nt, Vaccinia virus
ugauauguguaagaacucuc

SEQ ID NO: 3258970 - RNA, 18 nt, Vaccinia virus
agcgacggggaugaugaa

SEQ ID NO: 3258971 - RNA, 14 nt, Vaccinia virus
aucuugugcauuuu

SEQ ID NO: 3258972 - RNA, 22 nt, Vaccinia virus
uuccaugggacuauauaauuuu

SEQ ID NO: 3258973 - RNA, 17 nt, Vaccinia virus
gacgcauuuaauagaga

SEQ ID NO: 3258974 - RNA, 15 nt, Vaccinia virus
augaaucuaaaagaa

SEQ ID NO: 3258975 - RNA, 19 nt, Vaccinia virus
uagaacugcuaauggaugu

SEQ ID NO: 3258976 - RNA, 19 nt, Vaccinia virus
gauaucuuuacuaagaaag

SEQ ID NO: 3258977 - RNA, 23 nt, Vaccinia virus
ccaauaugucuguacaaauguua

SEQ ID NO: 3258978 - RNA, 21 nt, Vaccinia virus
auguguuuacaguaguaauga

SEQ ID NO: 3258979 - RNA, 15 nt, Vaccinia virus
acaaguuuucauauu

SEQ ID NO: 3258980 - RNA, 23 nt, Vaccinia virus
gaccgauuaucgaguuuaaauca

SEQ ID NO: 3258981 - RNA, 13 nt, Vaccinia virus
uauucuacuauca

SEQ ID NO: 3258982 - RNA, 18 nt, Vaccinia virus
auacuuuaaagcaaaaug

SEQ ID NO: 3258983 - RNA, 16 nt, Vaccinia virus
ggaaacuuucuagaac

SEQ ID NO: 3258984 - RNA, 23 nt, Vaccinia virus
uaguauuuaacaagagaagagau

SEQ ID NO: 3258985 - RNA, 16 nt, Vaccinia virus
auauugucacaugucu

SEQ ID NO: 3258986 - RNA, 21 nt, Vaccinia virus
aauacacuuacagaaaagaua

SEQ ID NO: 3258987 - RNA, 15 nt, Vaccinia virus
ggccguuuguuuccu

SEQ ID NO: 3258988 - RNA, 15 nt, Vaccinia virus
aucuaaugaaugaag

SEQ ID NO: 3258989 - RNA, 19 nt, Vaccinia virus
uuuaaacaaaaaaguuauc

SEQ ID NO: 3258990 - RNA, 13 nt, Vaccinia virus
ucuucaaauuccg

SEQ ID NO: 3258991 - RNA, 18 nt, Vaccinia virus
agcuaauccugauauuaa

SEQ ID NO: 3258992 - RNA, 15 nt, Vaccinia virus
caacaaauauaaaau

SEQ ID NO: 3258993 - RNA, 15 nt, Vaccinia virus
cauaggauacucuau

SEQ ID NO: 3258994 - RNA, 22 nt, Vaccinia virus
aauuaaaauaacaccauuuagu

SEQ ID NO: 3258995 - RNA, 14 nt, Vaccinia virus
ucauguagauaguu

SEQ ID NO: 3258996 - RNA, 13 nt, Vaccinia virus
agacauaauacua

SEQ ID NO: 3258997 - RNA, 22 nt, Vaccinia virus
gauucacguuauauaacuauca

SEQ ID NO: 3258998 - RNA, 17 nt, Vaccinia virus
ucuacuguuccuaauau

SEQ ID NO: 3258999 - RNA, 18 nt, Vaccinia virus
gacuuguuaguuaaaaug

SEQ ID NO: 3259000 - RNA, 18 nt, Vaccinia virus
ucauucgcggaacuacau

SEQ ID NO: 3259001 - RNA, 19 nt, Vaccinia virus
guuccuguagauaauaacu

SEQ ID NO: 3259002 - RNA, 15 nt, Vaccinia virus
cuuaaugucuguauc

SEQ ID NO: 3259003 - RNA, 17 nt, Vaccinia virus
cuuaaaaacuauaccau

SEQ ID NO: 3259004 - RNA, 23 nt, Vaccinia virus
uauucggagcgcgcaauuuuuaa

SEQ ID NO: 3259005 - RNA, 14 nt, Vaccinia virus
aucuacacaaauag

SEQ ID NO: 3259006 - RNA, 22 nt, Vaccinia virus
uagcaucuuuccaaucaauaau

SEQ ID NO: 3259007 - RNA, 16 nt, Vaccinia virus
agcucuuaguauggga

SEQ ID NO: 3259008 - RNA, 23 nt, Vaccinia virus
caacaaguguguagauaucuuua

SEQ ID NO: 3259009 - RNA, 16 nt, Vaccinia virus
uacccaaaucugaaaa

SEQ ID NO: 3259010 - RNA, 22 nt, Vaccinia virus
aucaagacguggcaaacaaugu

SEQ ID NO: 3259011 - RNA, 21 nt, Vaccinia virus
uuuccggagauagauuuccaa

SEQ ID NO: 3259012 - RNA, 21 nt, Vaccinia virus
aaaccaacgaggaggaauauc

SEQ ID NO: 3259013 - RNA, 19 nt, Vaccinia virus
caugauucacguuauauaa

SEQ ID NO: 3259014 - RNA, 13 nt, Vaccinia virus
acaaauucuauau

SEQ ID NO: 3259015 - RNA, 12 nt, Vaccinia virus
ucucuuaguguu

SEQ ID NO: 3259016 - RNA, 17 nt, Vaccinia virus
guacuccucccauaaua

SEQ ID NO: 3259017 - RNA, 17 nt, Vaccinia virus
cugacugaauacauccu

SEQ ID NO: 3259018 - RNA, 15 nt, Vaccinia virus
ucaauagacauccaa

SEQ ID NO: 3259019 - RNA, 14 nt, Vaccinia virus
aauggaugucauga

SEQ ID NO: 3259020 - RNA, 14 nt, Vaccinia virus
ugauaaauauacaa

SEQ ID NO: 3259021 - RNA, 13 nt, Vaccinia virus
aucuccucuauuu

SEQ ID NO: 3259022 - RNA, 17 nt, Vaccinia virus
aaaugauagaaauauau

SEQ ID NO: 3259023 - RNA, 17 nt, Vaccinia virus
auacucuauugagaaaa

SEQ ID NO: 3259024 - RNA, 17 nt, Vaccinia virus
uuucaauuuauuguaaa

SEQ ID NO: 3259025 - RNA, 23 nt, Vaccinia virus
auuaaaucauugacugcuagaga

SEQ ID NO: 3259026 - RNA, 12 nt, Vaccinia virus
ucauuagaauau

SEQ ID NO: 3259027 - RNA, 22 nt, Vaccinia virus
aaucguacucauuauuggaaaa

SEQ ID NO: 3259028 - RNA, 15 nt, Vaccinia virus
caacauauacacauu

SEQ ID NO: 3259029 - RNA, 18 nt, Vaccinia virus
cagaagaauaugaugauu

SEQ ID NO: 3259030 - RNA, 20 nt, Vaccinia virus
aaugcuaauauauucuuaca

SEQ ID NO: 3259031 - RNA, 14 nt, Vaccinia virus
ccccauauaauuuu

SEQ ID NO: 3259032 - RNA, 20 nt, Vaccinia virus
uauacagcuggagauuauca

SEQ ID NO: 3259033 - RNA, 21 nt, Vaccinia virus
ggauugguuucuaaauucaug

SEQ ID NO: 3259034 - RNA, 23 nt, Vaccinia virus
acuuuuugguaggacaaagugaa

SEQ ID NO: 3259035 - RNA, 18 nt, Vaccinia virus
cuggaagcaaaaaaucug

SEQ ID NO: 3259036 - RNA, 19 nt, Vaccinia virus
gcgcuauagaguagacauu

SEQ ID NO: 3259037 - RNA, 17 nt, Vaccinia virus
uucagucagacaauguc

SEQ ID NO: 3259038 - RNA, 20 nt, Vaccinia virus
auacaaauaugucuuuguua

SEQ ID NO: 3259039 - RNA, 15 nt, Vaccinia virus
cuauuuuuacaguac

SEQ ID NO: 3259040 - RNA, 16 nt, Vaccinia virus
agaauaucuaauggau

SEQ ID NO: 3259041 - RNA, 19 nt, Vaccinia virus
caaagauuuaaauccuaau

SEQ ID NO: 3259042 - RNA, 12 nt, Vaccinia virus
uauuaaaacuga

SEQ ID NO: 3259043 - RNA, 17 nt, Vaccinia virus
guuagaaguuuuaaaaa

SEQ ID NO: 3259044 - RNA, 12 nt, Vaccinia virus
aaacauuacaaa

SEQ ID NO: 3259045 - RNA, 17 nt, Vaccinia virus
ucuucuauuuuaucauu

SEQ ID NO: 3259046 - RNA, 23 nt, Vaccinia virus
ugcacguaaccauucuaaacaau

SEQ ID NO: 3259047 - RNA, 20 nt, Vaccinia virus
gcauguauuuuuuucugaau

SEQ ID NO: 3259048 - RNA, 14 nt, Vaccinia virus
guaaaauaaucaua

SEQ ID NO: 3259049 - RNA, 14 nt, Vaccinia virus
aaagagaauuauau

SEQ ID NO: 3259050 - RNA, 23 nt, Vaccinia virus
uuuagaaaacucucuauuucuua

SEQ ID NO: 3259051 - RNA, 18 nt, Vaccinia virus
agaacuaauguauauucu

SEQ ID NO: 3259052 - RNA, 18 nt, Vaccinia virus
aagauggaguauaaucuu

SEQ ID NO: 3259053 - RNA, 18 nt, Vaccinia virus
uaaacaagcuaucucuug

SEQ ID NO: 3259054 - RNA, 16 nt, Vaccinia virus
acguaguuauguagag

SEQ ID NO: 3259055 - RNA, 16 nt, Vaccinia virus
uuuaguugucuaguau

SEQ ID NO: 3259056 - RNA, 16 nt, Vaccinia virus
uaagaaaguuaagaau

SEQ ID NO: 3259057 - RNA, 17 nt, Vaccinia virus
aauaagugugaugauug

SEQ ID NO: 3259058 - RNA, 22 nt, Vaccinia virus
auauccaaaauuuuguaugaag

SEQ ID NO: 3259059 - RNA, 18 nt, Vaccinia virus
aaccagaaguuuuauccu

SEQ ID NO: 3259060 - RNA, 18 nt, Vaccinia virus
ucuuaugcauguuucaua

SEQ ID NO: 3259061 - RNA, 19 nt, Vaccinia virus
cucggauuugaagaaauca

SEQ ID NO: 3259062 - RNA, 19 nt, Vaccinia virus
accaacgggucaugugaca

SEQ ID NO: 3259063 - RNA, 16 nt, Vaccinia virus
gagcuauuaaacuguu

SEQ ID NO: 3259064 - RNA, 22 nt, Vaccinia virus
agaugaguccaugacuugguau

SEQ ID NO: 3259065 - RNA, 16 nt, Vaccinia virus
aauuaguuuuucuuua

SEQ ID NO: 3259066 - RNA, 17 nt, Vaccinia virus
uauaaauggaugaagca

SEQ ID NO: 3259067 - RNA, 17 nt, Vaccinia virus
agccauagcaauacuuc

SEQ ID NO: 3259068 - RNA, 15 nt, Vaccinia virus
augugauaauuauuu

SEQ ID NO: 3259069 - RNA, 22 nt, Vaccinia virus
augacaucgccuacaaaugaca

SEQ ID NO: 3259070 - RNA, 15 nt, Vaccinia virus
aaaacugcugugaau

SEQ ID NO: 3259071 - RNA, 15 nt, Vaccinia virus
uauauauuugaaaau

SEQ ID NO: 3259072 - RNA, 21 nt, Vaccinia virus
gaauauuccucuaacagauau

SEQ ID NO: 3259073 - RNA, 16 nt, Vaccinia virus
aaaucuagagguagaa

SEQ ID NO: 3259074 - RNA, 17 nt, Vaccinia virus
cagugacuguaucacac

SEQ ID NO: 3259075 - RNA, 12 nt, Vaccinia virus
augaaaaugaug

SEQ ID NO: 3259076 - RNA, 17 nt, Vaccinia virus
gcugguaaaguaaauca

SEQ ID NO: 3259077 - RNA, 15 nt, Vaccinia virus
aaguacgauguuauu

SEQ ID NO: 3259078 - RNA, 13 nt, Vaccinia virus
auuaauaauuaau

SEQ ID NO: 3259079 - RNA, 16 nt, Vaccinia virus
aauuagaaauucccaa

SEQ ID NO: 3259080 - RNA, 17 nt, Vaccinia virus
uggcauaguagaauaau

SEQ ID NO: 3259081 - RNA, 20 nt, Vaccinia virus
uuaauaagauuuuuaucauu

SEQ ID NO: 3259082 - RNA, 23 nt, Vaccinia virus
acaauauuuuucguuuacaaaau

SEQ ID NO: 3259083 - RNA, 13 nt, Vaccinia virus
auugauagauuac

SEQ ID NO: 3259084 - RNA, 17 nt, Vaccinia virus
aauaaauuuuuccaaga

SEQ ID NO: 3259085 - RNA, 15 nt, Vaccinia virus
cauguugucuauuuc

SEQ ID NO: 3259086 - RNA, 14 nt, Vaccinia virus
uacaucuugacauu

SEQ ID NO: 3259087 - RNA, 19 nt, Vaccinia virus
acuaaaggcaacaaagaaa

SEQ ID NO: 3259088 - RNA, 15 nt, Vaccinia virus
aucaauauuauucau

SEQ ID NO: 3259089 - RNA, 20 nt, Vaccinia virus
guaucuaauuuccugauuua

SEQ ID NO: 3259090 - RNA, 21 nt, Vaccinia virus
auuccuuauucacacaaaaag

SEQ ID NO: 3259091 - RNA, 15 nt, Vaccinia virus
acgaaauagcuauau

SEQ ID NO: 3259092 - RNA, 13 nt, Vaccinia virus
gcuauuacuuauu

SEQ ID NO: 3259093 - RNA, 13 nt, Vaccinia virus
auaauuucuguaa

SEQ ID NO: 3259094 - RNA, 21 nt, Vaccinia virus
ggaauuaaucuaguagaaaag

SEQ ID NO: 3259095 - RNA, 20 nt, Vaccinia virus
acgauaguuuguuucuggaa

SEQ ID NO: 3259096 - RNA, 14 nt, Vaccinia virus
auaucgauaauaga

SEQ ID NO: 3259097 - RNA, 17 nt, Vaccinia virus
aguuaaaaguuaaugag

SEQ ID NO: 3259098 - RNA, 22 nt, Vaccinia virus
auaaauagcuuuacuucuauau

SEQ ID NO: 3259099 - RNA, 20 nt, Vaccinia virus
acucuguuguuuuucuuaua

SEQ ID NO: 3259100 - RNA, 20 nt, Vaccinia virus
cguggagaucauuaaauguu

SEQ ID NO: 3259101 - RNA, 18 nt, Vaccinia virus
acaaucugucgaaaaagu

SEQ ID NO: 3259102 - RNA, 19 nt, Vaccinia virus
uucauagcugagaauaucu

SEQ ID NO: 3259103 - RNA, 15 nt, Vaccinia virus
guucuuuuagaaaau

SEQ ID NO: 3259104 - RNA, 16 nt, Vaccinia virus
uuaguucuuuuagaaa

SEQ ID NO: 3259105 - RNA, 18 nt, Vaccinia virus
auucauggaguuagaaaa

SEQ ID NO: 3259106 - RNA, 13 nt, Vaccinia virus
guauuugauuuug

SEQ ID NO: 3259107 - RNA, 20 nt, Vaccinia virus
ccaccagugguuuuauuuua

SEQ ID NO: 3259108 - RNA, 12 nt, Vaccinia virus
aaucacaaacau

SEQ ID NO: 3259109 - RNA, 20 nt, Vaccinia virus
cauacuaggagccaucauuu

SEQ ID NO: 3259110 - RNA, 17 nt, Vaccinia virus
cagaugcgccauauuua

SEQ ID NO: 3259111 - RNA, 15 nt, Vaccinia virus
uaggagaacuuauag

SEQ ID NO: 3259112 - RNA, 15 nt, Vaccinia virus
cgaaaucuuaaauac

SEQ ID NO: 3259113 - RNA, 15 nt, Vaccinia virus
cccacguuuaaacau

SEQ ID NO: 3259114 - RNA, 23 nt, Vaccinia virus
auuuucgaaacucguaaaaagau

SEQ ID NO: 3259115 - RNA, 19 nt, Vaccinia virus
guaucuaauauagauuuua

SEQ ID NO: 3259116 - RNA, 18 nt, Vaccinia virus
uaauaaucuugauuguac

SEQ ID NO: 3259117 - RNA, 16 nt, Vaccinia virus
aaacuauuuaguuaug

SEQ ID NO: 3259118 - RNA, 19 nt, Vaccinia virus
aggaugaguacauuucaca

SEQ ID NO: 3259119 - RNA, 14 nt, Vaccinia virus
guuuguuuuggaaa

SEQ ID NO: 3259120 - RNA, 19 nt, Vaccinia virus
cuuauaauuaauguccaag

SEQ ID NO: 3259121 - RNA, 19 nt, Vaccinia virus
ucgcaacauuaacaucuug

SEQ ID NO: 3259122 - RNA, 18 nt, Vaccinia virus
uaugacucugauuucuug

SEQ ID NO: 3259123 - RNA, 14 nt, Vaccinia virus
aucucuuuagaaug

SEQ ID NO: 3259124 - RNA, 15 nt, Vaccinia virus
auaaugauagaauua

SEQ ID NO: 3259125 - RNA, 14 nt, Vaccinia virus
uacaucaagagagc

SEQ ID NO: 3259126 - RNA, 16 nt, Vaccinia virus
uaucaucauuaucauu

SEQ ID NO: 3259127 - RNA, 21 nt, Vaccinia virus
accauccuuuaaaaaaaauga

SEQ ID NO: 3259128 - RNA, 18 nt, Vaccinia virus
augcacaaagaagaauuc

SEQ ID NO: 3259129 - RNA, 15 nt, Vaccinia virus
acuauuauaacaaga

SEQ ID NO: 3259130 - RNA, 13 nt, Vaccinia virus
aaguauaauucuu

SEQ ID NO: 3259131 - RNA, 18 nt, Vaccinia virus
agacguggcaaacaaugu

SEQ ID NO: 3259132 - RNA, 22 nt, Vaccinia virus
guaucgcgauuaguguauacac

SEQ ID NO: 3259133 - RNA, 13 nt, Vaccinia virus
acauguuaguaga

SEQ ID NO: 3259134 - RNA, 21 nt, Vaccinia virus
auauucuuaaaagguuucaua

SEQ ID NO: 3259135 - RNA, 18 nt, Vaccinia virus
cuaugaaaggagagaaug

SEQ ID NO: 3259136 - RNA, 15 nt, Vaccinia virus
guuaaaaauuuagau

SEQ ID NO: 3259137 - RNA, 17 nt, Vaccinia virus
auaacaugguaacugga

SEQ ID NO: 3259138 - RNA, 21 nt, Vaccinia virus
acacacuuaccuucaacagua

SEQ ID NO: 3259139 - RNA, 20 nt, Vaccinia virus
cuaauaaacauuccacauuc

SEQ ID NO: 3259140 - RNA, 14 nt, Vaccinia virus
cuuccaguucugga

SEQ ID NO: 3259141 - RNA, 20 nt, Vaccinia virus
uucucaucuauguaaucaua

SEQ ID NO: 3259142 - RNA, 19 nt, Vaccinia virus
aucagucgagauacagaaa

SEQ ID NO: 3259143 - RNA, 22 nt, Vaccinia virus
aguauuuuuguguuaaaacaau

SEQ ID NO: 3259144 - RNA, 12 nt, Vaccinia virus
aaacuagcaaac

SEQ ID NO: 3259145 - RNA, 19 nt, Vaccinia virus
aucuuauauacacauaauu

SEQ ID NO: 3259146 - RNA, 12 nt, Vaccinia virus
auggaugauaua

SEQ ID NO: 3259147 - RNA, 16 nt, Vaccinia virus
ugucuacauaaaucua

SEQ ID NO: 3259148 - RNA, 19 nt, Vaccinia virus
agauucauguuaacacucu

SEQ ID NO: 3259149 - RNA, 21 nt, Vaccinia virus
cauuuccaaaucuaacuucua

SEQ ID NO: 3259150 - RNA, 13 nt, Vaccinia virus
auuacuauaaaug

SEQ ID NO: 3259151 - RNA, 22 nt, Vaccinia virus
ucugucauauguauaaaugaag

SEQ ID NO: 3259152 - RNA, 19 nt, Vaccinia virus
ucuauaguuuguuuucauu

SEQ ID NO: 3259153 - RNA, 21 nt, Vaccinia virus
ugaauggaucaccguguuuau

SEQ ID NO: 3259154 - RNA, 15 nt, Vaccinia virus
aacuuauucuugaua

SEQ ID NO: 3259155 - RNA, 13 nt, Vaccinia virus
gaugaugugaauu

SEQ ID NO: 3259156 - RNA, 12 nt, Vaccinia virus
auauccaaaauu

SEQ ID NO: 3259157 - RNA, 15 nt, Vaccinia virus
caauuaaaucaauau

SEQ ID NO: 3259158 - RNA, 14 nt, Vaccinia virus
auuaauaaauccgu

SEQ ID NO: 3259159 - RNA, 14 nt, Vaccinia virus
uuguucuuggaugu

SEQ ID NO: 3259160 - RNA, 15 nt, Vaccinia virus
agauuccuuuucuac

SEQ ID NO: 3259161 - RNA, 14 nt, Vaccinia virus
uagauaaauuuauc

SEQ ID NO: 3259162 - RNA, 14 nt, Vaccinia virus
aaauauuuacuaau

SEQ ID NO: 3259163 - RNA, 16 nt, Vaccinia virus
auccuguucuaucaac

SEQ ID NO: 3259164 - RNA, 16 nt, Vaccinia virus
agaccauuuaauacga

SEQ ID NO: 3259165 - RNA, 14 nt, Vaccinia virus
gaagaagaugaugg

SEQ ID NO: 3259166 - RNA, 19 nt, Vaccinia virus
auagaacaaaauacauaau

SEQ ID NO: 3259167 - RNA, 14 nt, Vaccinia virus
aaacuacuggaaua

SEQ ID NO: 3259168 - RNA, 14 nt, Vaccinia virus
ccaacaguaugaaa

SEQ ID NO: 3259169 - RNA, 14 nt, Vaccinia virus
cauaaaacaucauu

SEQ ID NO: 3259170 - RNA, 23 nt, Vaccinia virus
acuagauuaauuuuugugggaag

SEQ ID NO: 3259171 - RNA, 21 nt, Vaccinia virus
auauauucgcauauauuccca

SEQ ID NO: 3259172 - RNA, 15 nt, Vaccinia virus
aauaucuuuauaaga

SEQ ID NO: 3259173 - RNA, 13 nt, Vaccinia virus
ucacuucucuuca

SEQ ID NO: 3259174 - RNA, 20 nt, Vaccinia virus
gauaagaagaggacaaaguu

SEQ ID NO: 3259175 - RNA, 12 nt, Vaccinia virus
uuuuccaugaua

SEQ ID NO: 3259176 - RNA, 14 nt, Vaccinia virus
uuuauccaaaaaga

SEQ ID NO: 3259177 - RNA, 23 nt, Vaccinia virus
auaugguuuuuggccaaaaugau

SEQ ID NO: 3259178 - RNA, 18 nt, Vaccinia virus
guauuucuggugauaaau

SEQ ID NO: 3259179 - RNA, 12 nt, Vaccinia virus
aagguuguaaau

SEQ ID NO: 3259180 - RNA, 23 nt, Vaccinia virus
caauacuaauucaaauuguuaaa

SEQ ID NO: 3259181 - RNA, 13 nt, Vaccinia virus
auuaaacauaaau

SEQ ID NO: 3259182 - RNA, 23 nt, Vaccinia virus
aaauguuaauuuugaaacuaugu

SEQ ID NO: 3259183 - RNA, 14 nt, Vaccinia virus
gcuuauauuuucau

SEQ ID NO: 3259184 - RNA, 21 nt, Vaccinia virus
acaguuacgguuguacauuau

SEQ ID NO: 3259185 - RNA, 13 nt, Vaccinia virus
aauauuaaaacuu

SEQ ID NO: 3259186 - RNA, 21 nt, Vaccinia virus
uagagaggcugcugaaaauaa

SEQ ID NO: 3259187 - RNA, 18 nt, Vaccinia virus
ugccuuuuuauacauguu

SEQ ID NO: 3259188 - RNA, 20 nt, Vaccinia virus
gauucauccuuaaauguuuu

SEQ ID NO: 3259189 - RNA, 21 nt, Vaccinia virus
cauagauauuaauuaucacau

SEQ ID NO: 3259190 - RNA, 19 nt, Vaccinia virus
cauaucuauaggaaaggau

SEQ ID NO: 3259191 - RNA, 14 nt, Vaccinia virus
cuucaucaucuguu

SEQ ID NO: 3259192 - RNA, 23 nt, Vaccinia virus
auguguuuuagaauauauauacg

SEQ ID NO: 3259193 - RNA, 18 nt, Vaccinia virus
acaaaugguucaaagacu

SEQ ID NO: 3259194 - RNA, 21 nt, Vaccinia virus
aucugauagaaagaauaagaa

SEQ ID NO: 3259195 - RNA, 14 nt, Vaccinia virus
guaaaauauucuuu

SEQ ID NO: 3259196 - RNA, 15 nt, Vaccinia virus
ugaaauugagaagau

SEQ ID NO: 3259197 - RNA, 23 nt, Vaccinia virus
ucuaguuuuauuuuuuuguacgu

SEQ ID NO: 3259198 - RNA, 22 nt, Vaccinia virus
auucucauugcuuauauuuuca

SEQ ID NO: 3259199 - RNA, 21 nt, Vaccinia virus
uaccuaauacuaaauacauua

SEQ ID NO: 3259200 - RNA, 23 nt, Vaccinia virus
auuuggaaaacgucaacguguau

SEQ ID NO: 3259201 - RNA, 22 nt, Vaccinia virus
acauuugggccauuauaccucu

SEQ ID NO: 3259202 - RNA, 18 nt, Vaccinia virus
auauuagugaugaauuga

SEQ ID NO: 3259203 - RNA, 17 nt, Vaccinia virus
aaauuugaaagaacuac

SEQ ID NO: 3259204 - RNA, 23 nt, Vaccinia virus
cuaauauucccaaacauacaucu

SEQ ID NO: 3259205 - RNA, 21 nt, Vaccinia virus
ucaucacauaucgccacaaaa

SEQ ID NO: 3259206 - RNA, 15 nt, Vaccinia virus
aauguaguaaauaua

SEQ ID NO: 3259207 - RNA, 13 nt, Vaccinia virus
uuuuguauucaau

SEQ ID NO: 3259208 - RNA, 22 nt, Vaccinia virus
uauccaaggacaaggaugaaaa

SEQ ID NO: 3259209 - RNA, 14 nt, Vaccinia virus
auuccuugaauaac

SEQ ID NO: 3259210 - RNA, 14 nt, Vaccinia virus
aauuuuuauuucuc

SEQ ID NO: 3259211 - RNA, 15 nt, Vaccinia virus
aaauuagaaagauua

SEQ ID NO: 3259212 - RNA, 18 nt, Vaccinia virus
auuaauuuccacaucgau

SEQ ID NO: 3259213 - RNA, 15 nt, Vaccinia virus
uucuauacauagaug

SEQ ID NO: 3259214 - RNA, 19 nt, Vaccinia virus
ucuaaacaagcgauuuaga

SEQ ID NO: 3259215 - RNA, 18 nt, Vaccinia virus
auguguaaaaaguuuuaa

SEQ ID NO: 3259216 - RNA, 13 nt, Vaccinia virus
agucuuacacauu

SEQ ID NO: 3259217 - RNA, 23 nt, Vaccinia virus
caagaauccgaucccacuucugu

SEQ ID NO: 3259218 - RNA, 16 nt, Vaccinia virus
auuguuagcuguuuuc

SEQ ID NO: 3259219 - RNA, 12 nt, Vaccinia virus
ccacaucaucua

SEQ ID NO: 3259220 - RNA, 22 nt, Vaccinia virus
auauauugcuuacuagauguug

SEQ ID NO: 3259221 - RNA, 15 nt, Vaccinia virus
aaaaccaaggacuuu

SEQ ID NO: 3259222 - RNA, 15 nt, Vaccinia virus
cuuuugugaaaagau

SEQ ID NO: 3259223 - RNA, 20 nt, Vaccinia virus
ccgaucuaaaaaaaacuauc

SEQ ID NO: 3259224 - RNA, 18 nt, Vaccinia virus
uugaucaugcuguaauca

SEQ ID NO: 3259225 - RNA, 19 nt, Vaccinia virus
uauagcauucuuggaugaa

SEQ ID NO: 3259226 - RNA, 17 nt, Vaccinia virus
agaaccacgaaacuaau

SEQ ID NO: 3259227 - RNA, 22 nt, Vaccinia virus
augaaauagcguucgucaacau

SEQ ID NO: 3259228 - RNA, 21 nt, Vaccinia virus
uuauguucgguauaaaaauua

SEQ ID NO: 3259229 - RNA, 19 nt, Vaccinia virus
uuaaacuaauucauuuuca

SEQ ID NO: 3259230 - RNA, 12 nt, Vaccinia virus
gccaacaaauau

SEQ ID NO: 3259231 - RNA, 11 nt, Vaccinia virus
guauaaacucc

SEQ ID NO: 3259232 - RNA, 14 nt, Vaccinia virus
cuauagacauaaua

SEQ ID NO: 3259233 - RNA, 16 nt, Vaccinia virus
ugauagaauagaugcu

SEQ ID NO: 3259234 - RNA, 18 nt, Vaccinia virus
auagaguauuaaauauua

SEQ ID NO: 3259235 - RNA, 19 nt, Vaccinia virus
aagagcuacgugagacuua

SEQ ID NO: 3259236 - RNA, 14 nt, Vaccinia virus
agaaaaaaauggaa

SEQ ID NO: 3259237 - RNA, 14 nt, Vaccinia virus
auaucaucaaacaa

SEQ ID NO: 3259238 - RNA, 17 nt, Vaccinia virus
aggcucaguauguaaac

SEQ ID NO: 3259239 - RNA, 16 nt, Vaccinia virus
gaagaucauacagaca

SEQ ID NO: 3259240 - RNA, 22 nt, Vaccinia virus
guacgugucaaagguauaugau

SEQ ID NO: 3259241 - RNA, 23 nt, Vaccinia virus
uuuaaggaggcuuccuuuucuaa

SEQ ID NO: 3259242 - RNA, 22 nt, Vaccinia virus
cuaaagcacaacgagagauauu

SEQ ID NO: 3259243 - RNA, 14 nt, Vaccinia virus
cuuugauaaaaguu

SEQ ID NO: 3259244 - RNA, 13 nt, Vaccinia virus
agcauauaacuaa

SEQ ID NO: 3259245 - RNA, 16 nt, Vaccinia virus
uuccugugacaaaaau

SEQ ID NO: 3259246 - RNA, 15 nt, Vaccinia virus
acuuucgguucuuua

SEQ ID NO: 3259247 - RNA, 18 nt, Vaccinia virus
uaguucuaucaugcuucc

SEQ ID NO: 3259248 - RNA, 23 nt, Vaccinia virus
aauguuuuugaaacuagaaucgu

SEQ ID NO: 3259249 - RNA, 23 nt, Vaccinia virus
uacuuacggcuacggcauuagau

SEQ ID NO: 3259250 - RNA, 13 nt, Vaccinia virus
uuauuuaacaauu

SEQ ID NO: 3259251 - RNA, 12 nt, Vaccinia virus
auuauaauguau

SEQ ID NO: 3259252 - RNA, 21 nt, Vaccinia virus
ccaacggcggacguaguucua

SEQ ID NO: 3259253 - RNA, 20 nt, Vaccinia virus
auauuaucgagauuuaauaa

SEQ ID NO: 3259254 - RNA, 17 nt, Vaccinia virus
aacacucgacacaauau

SEQ ID NO: 3259255 - RNA, 17 nt, Vaccinia virus
gcaucauaaaaaugagu

SEQ ID NO: 3259256 - RNA, 12 nt, Vaccinia virus
aauguaaagaua

SEQ ID NO: 3259257 - RNA, 16 nt, Vaccinia virus
uaggagaguaaugggu

SEQ ID NO: 3259258 - RNA, 16 nt, Vaccinia virus
ucgauuuucuacagau

SEQ ID NO: 3259259 - RNA, 22 nt, Vaccinia virus
agacaugauaauauuaaagaua

SEQ ID NO: 3259260 - RNA, 20 nt, Vaccinia virus
auuaucgaggauaucucaaa

SEQ ID NO: 3259261 - RNA, 21 nt, Vaccinia virus
agcuucaucuauaucuagauu

SEQ ID NO: 3259262 - RNA, 14 nt, Vaccinia virus
auacacaucaaaau

SEQ ID NO: 3259263 - RNA, 14 nt, Vaccinia virus
auaaacaucaacau

SEQ ID NO: 3259264 - RNA, 11 nt, Vaccinia virus
guaaguuuauu

SEQ ID NO: 3259265 - RNA, 14 nt, Vaccinia virus
caagauuauuacgu

SEQ ID NO: 3259266 - RNA, 17 nt, Vaccinia virus
guaaaagucaaauuaga

SEQ ID NO: 3259267 - RNA, 16 nt, Vaccinia virus
caacauuggaauaaua

SEQ ID NO: 3259268 - RNA, 13 nt, Vaccinia virus
uuaaucauguaca

SEQ ID NO: 3259269 - RNA, 15 nt, Vaccinia virus
gaaaaauauaaugua

SEQ ID NO: 3259270 - RNA, 15 nt, Vaccinia virus
gaaaauuauaaugaa

SEQ ID NO: 3259271 - RNA, 23 nt, Vaccinia virus
auguuugcggaagucaaauacga

SEQ ID NO: 3259272 - RNA, 13 nt, Vaccinia virus
caaaaauauucua

SEQ ID NO: 3259273 - RNA, 23 nt, Vaccinia virus
aaauaaaauauaaaauauuggaa

SEQ ID NO: 3259274 - RNA, 15 nt, Vaccinia virus
uuccgccaaauuuuc

SEQ ID NO: 3259275 - RNA, 21 nt, Vaccinia virus
acuucagguuucuuagcuugu

SEQ ID NO: 3259276 - RNA, 20 nt, Vaccinia virus
auuuacuaaucgauuuugca

SEQ ID NO: 3259277 - RNA, 17 nt, Vaccinia virus
caaacaauguauacaaa

SEQ ID NO: 3259278 - RNA, 11 nt, Vaccinia virus
gauacaaauaa

SEQ ID NO: 3259279 - RNA, 20 nt, Vaccinia virus
auuaccagaagguguuguaa

SEQ ID NO: 3259280 - RNA, 23 nt, Vaccinia virus
auagaagcguauaaccuguauac

SEQ ID NO: 3259281 - RNA, 13 nt, Vaccinia virus
ucaaauuaagcau

SEQ ID NO: 3259282 - RNA, 13 nt, Vaccinia virus
agcaaaaaaccau

SEQ ID NO: 3259283 - RNA, 21 nt, Vaccinia virus
gauuacaucucugaacuauau

SEQ ID NO: 3259284 - RNA, 20 nt, Vaccinia virus
acauuagaccguuuaauaga

SEQ ID NO: 3259285 - RNA, 15 nt, Vaccinia virus
uaauuacuaaaucug

SEQ ID NO: 3259286 - RNA, 11 nt, Vaccinia virus
acauaaauguc

SEQ ID NO: 3259287 - RNA, 21 nt, Vaccinia virus
aucauauaucugaagauauac

SEQ ID NO: 3259288 - RNA, 13 nt, Vaccinia virus
gacauauuucauu

SEQ ID NO: 3259289 - RNA, 18 nt, Vaccinia virus
uuguaaaguuaaaauugu

SEQ ID NO: 3259290 - RNA, 20 nt, Vaccinia virus
cgucgucaaaauauuuacua

SEQ ID NO: 3259291 - RNA, 15 nt, Vaccinia virus
uaggcguaaauuaug

SEQ ID NO: 3259292 - RNA, 15 nt, Vaccinia virus
uaauauaucaaacau

SEQ ID NO: 3259293 - RNA, 18 nt, Vaccinia virus
uauaaucaucguaacugc

SEQ ID NO: 3259294 - RNA, 19 nt, Vaccinia virus
auuaaacguggauaaaaug

SEQ ID NO: 3259295 - RNA, 21 nt, Vaccinia virus
caauagcuuaacggauacuug

SEQ ID NO: 3259296 - RNA, 18 nt, Vaccinia virus
cauaauccuuguaaugau

SEQ ID NO: 3259297 - RNA, 19 nt, Vaccinia virus
agauuugccauauauggau

SEQ ID NO: 3259298 - RNA, 13 nt, Vaccinia virus
aaucagaaauugg

SEQ ID NO: 3259299 - RNA, 18 nt, Vaccinia virus
uauuuugcaauuucuuca

SEQ ID NO: 3259300 - RNA, 19 nt, Vaccinia virus
gcaaaaauauauuagacaa

SEQ ID NO: 3259301 - RNA, 19 nt, Vaccinia virus
ugauagagguaaacuucua

SEQ ID NO: 3259302 - RNA, 16 nt, Vaccinia virus
uagauccaacauuaau

SEQ ID NO: 3259303 - RNA, 22 nt, Vaccinia virus
ugaauuugauuauuuugaagac

SEQ ID NO: 3259304 - RNA, 20 nt, Vaccinia virus
gagauccugcauagaaauau

SEQ ID NO: 3259305 - RNA, 23 nt, Vaccinia virus
auuaauauuacuguuaauaacug

SEQ ID NO: 3259306 - RNA, 16 nt, Vaccinia virus
aaauuuagauacaucu

SEQ ID NO: 3259307 - RNA, 14 nt, Vaccinia virus
ggacccauagagaa

SEQ ID NO: 3259308 - RNA, 14 nt, Vaccinia virus
ucauauauuuuugg

SEQ ID NO: 3259309 - RNA, 16 nt, Vaccinia virus
acauacguauaaucug

SEQ ID NO: 3259310 - RNA, 17 nt, Vaccinia virus
agguguguuuuuuacca

SEQ ID NO: 3259311 - RNA, 17 nt, Vaccinia virus
cgcauguuuuaaugcau

SEQ ID NO: 3259312 - RNA, 14 nt, Vaccinia virus
auaauccagauuuu

SEQ ID NO: 3259313 - RNA, 14 nt, Vaccinia virus
caaagaaauuaaua

SEQ ID NO: 3259314 - RNA, 15 nt, Vaccinia virus
gcaauaguauaauua

SEQ ID NO: 3259315 - RNA, 19 nt, Vaccinia virus
guuaauuuaucacauauca

SEQ ID NO: 3259316 - RNA, 20 nt, Vaccinia virus
caaauauaucaauaguagua

SEQ ID NO: 3259317 - RNA, 16 nt, Vaccinia virus
auuaaaggauguacuc

SEQ ID NO: 3259318 - RNA, 22 nt, Vaccinia virus
uucugacaauauuuaguuuauu

SEQ ID NO: 3259319 - RNA, 15 nt, Vaccinia virus
uauaaauguagacuc

SEQ ID NO: 3259320 - RNA, 14 nt, Vaccinia virus
auaaaaauaauauu

SEQ ID NO: 3259321 - RNA, 14 nt, Vaccinia virus
aaaauauaauguac

SEQ ID NO: 3259322 - RNA, 23 nt, Vaccinia virus
gaggauaguugauuuauuacuua

SEQ ID NO: 3259323 - RNA, 22 nt, Vaccinia virus
cauucuucggauccaaaugcug

SEQ ID NO: 3259324 - RNA, 15 nt, Vaccinia virus
aaaaugauagaaaua

SEQ ID NO: 3259325 - RNA, 17 nt, Vaccinia virus
ccauggauggaaacauu

SEQ ID NO: 3259326 - RNA, 19 nt, Vaccinia virus
aggacuuuguagaaauauu

SEQ ID NO: 3259327 - RNA, 17 nt, Vaccinia virus
acaaacagucuaaacaa

SEQ ID NO: 3259328 - RNA, 20 nt, Vaccinia virus
agauaaaccguuuauguauu

SEQ ID NO: 3259329 - RNA, 16 nt, Vaccinia virus
accccauauaauuuua

SEQ ID NO: 3259330 - RNA, 22 nt, Vaccinia virus
aaacagucagcuggucuaaaau

SEQ ID NO: 3259331 - RNA, 23 nt, Vaccinia virus
aucaaaacauauagauagacgag

SEQ ID NO: 3259332 - RNA, 16 nt, Vaccinia virus
uuaacaaaguuauuca

SEQ ID NO: 3259333 - RNA, 18 nt, Vaccinia virus
acucucuauuucuuaaug

SEQ ID NO: 3259334 - RNA, 14 nt, Vaccinia virus
cguauauguuucua

SEQ ID NO: 3259335 - RNA, 17 nt, Vaccinia virus
agaaaauucuauauauu

SEQ ID NO: 3259336 - RNA, 22 nt, Vaccinia virus
acauugaucuauuauuuaauga

SEQ ID NO: 3259337 - RNA, 14 nt, Vaccinia virus
cuaauaauaauuau

SEQ ID NO: 3259338 - RNA, 22 nt, Vaccinia virus
gauuaguaugaagauaaacacu

SEQ ID NO: 3259339 - RNA, 15 nt, Vaccinia virus
auccauaucguauau

SEQ ID NO: 3259340 - RNA, 12 nt, Vaccinia virus
caucugucauau

SEQ ID NO: 3259341 - RNA, 17 nt, Vaccinia virus
guuuacaacacuuuucu

SEQ ID NO: 3259342 - RNA, 14 nt, Vaccinia virus
aaugaaaauggaua

SEQ ID NO: 3259343 - RNA, 17 nt, Vaccinia virus
uuucuagccccugcgga

SEQ ID NO: 3259344 - RNA, 21 nt, Vaccinia virus
acuuacagauggauaaaacuu

SEQ ID NO: 3259345 - RNA, 19 nt, Vaccinia virus
uucacaagaugaauucagu

SEQ ID NO: 3259346 - RNA, 23 nt, Vaccinia virus
uaucaaaacauauagauagacga

SEQ ID NO: 3259347 - RNA, 17 nt, Vaccinia virus
uugauaucuuuagauau

SEQ ID NO: 3259348 - RNA, 17 nt, Vaccinia virus
cauacauacuaucuuua

SEQ ID NO: 3259349 - RNA, 13 nt, Vaccinia virus
caccgaugaugga

SEQ ID NO: 3259350 - RNA, 16 nt, Vaccinia virus
uuccaucaaacuguau

SEQ ID NO: 3259351 - RNA, 14 nt, Vaccinia virus
aaaaaaagaauaua

SEQ ID NO: 3259352 - RNA, 18 nt, Vaccinia virus
uguaaaaguaaaaaagaa

SEQ ID NO: 3259353 - RNA, 13 nt, Vaccinia virus
cagaauaaaucaa

SEQ ID NO: 3259354 - RNA, 18 nt, Vaccinia virus
cauaucaauuuguacauc

SEQ ID NO: 3259355 - RNA, 18 nt, Vaccinia virus
ucaccugccauaaauaaa

SEQ ID NO: 3259356 - RNA, 18 nt, Vaccinia virus
aaaaacauaauagcuccc

SEQ ID NO: 3259357 - RNA, 17 nt, Vaccinia virus
uacaucgucucaucugu

SEQ ID NO: 3259358 - RNA, 22 nt, Vaccinia virus
aaugaguaagacaauaggaaau

SEQ ID NO: 3259359 - RNA, 15 nt, Vaccinia virus
caaacaugacauuuu

SEQ ID NO: 3259360 - RNA, 15 nt, Vaccinia virus
uauuaaugaugaaag

SEQ ID NO: 3259361 - RNA, 18 nt, Vaccinia virus
aauacugcaauaauuuuc

SEQ ID NO: 3259362 - RNA, 18 nt, Vaccinia virus
ucugaaauaagauuagua

SEQ ID NO: 3259363 - RNA, 17 nt, Vaccinia virus
guuucaaaaauauucau

SEQ ID NO: 3259364 - RNA, 15 nt, Vaccinia virus
uguauucucuuacaa

SEQ ID NO: 3259365 - RNA, 17 nt, Vaccinia virus
guuauggcacucuuauu

SEQ ID NO: 3259366 - RNA, 19 nt, Vaccinia virus
uaauaucggucuuauucuu

SEQ ID NO: 3259367 - RNA, 19 nt, Vaccinia virus
uagaaaauaauauagauuu

SEQ ID NO: 3259368 - RNA, 19 nt, Vaccinia virus
cguuuacaaacugaauaau

SEQ ID NO: 3259369 - RNA, 18 nt, Vaccinia virus
cacgguaauaaaauguua

SEQ ID NO: 3259370 - RNA, 22 nt, Vaccinia virus
cgaauuuacucgcauuucuaau

SEQ ID NO: 3259371 - RNA, 21 nt, Vaccinia virus
aacggagaauaucuauacaua

SEQ ID NO: 3259372 - RNA, 20 nt, Vaccinia virus
cuaagcaauagguaauaacu

SEQ ID NO: 3259373 - RNA, 17 nt, Vaccinia virus
auaauguagaagaucau

SEQ ID NO: 3259374 - RNA, 22 nt, Vaccinia virus
cguuuaauaaacugaguguaaa

SEQ ID NO: 3259375 - RNA, 19 nt, Vaccinia virus
auaguauucucagaguuga

SEQ ID NO: 3259376 - RNA, 23 nt, Vaccinia virus
agaaauaagagacuuaaacaacg

SEQ ID NO: 3259377 - RNA, 21 nt, Vaccinia virus
gauuagaaaauauaaauuaau

SEQ ID NO: 3259378 - RNA, 20 nt, Vaccinia virus
uuagaaggauuggucuuaaa

SEQ ID NO: 3259379 - RNA, 16 nt, Vaccinia virus
aaaccaucgucugaau

SEQ ID NO: 3259380 - RNA, 20 nt, Vaccinia virus
augaaaucgcuuaauagaca

SEQ ID NO: 3259381 - RNA, 17 nt, Vaccinia virus
aaugaaucccaaacauu

SEQ ID NO: 3259382 - RNA, 11 nt, Vaccinia virus
cuguauauacu

SEQ ID NO: 3259383 - RNA, 13 nt, Vaccinia virus
aaaauauaauuua

SEQ ID NO: 3259384 - RNA, 17 nt, Vaccinia virus
ugugcuuaauguuucca

SEQ ID NO: 3259385 - RNA, 22 nt, Vaccinia virus
caaaugaaacaggacauuauca

SEQ ID NO: 3259386 - RNA, 17 nt, Vaccinia virus
uguguuuacaguaguaa

SEQ ID NO: 3259387 - RNA, 17 nt, Vaccinia virus
uaggauacucuaugaau

SEQ ID NO: 3259388 - RNA, 16 nt, Vaccinia virus
agaacgaauguuguag

SEQ ID NO: 3259389 - RNA, 14 nt, Vaccinia virus
agaauaaaaugauu

SEQ ID NO: 3259390 - RNA, 14 nt, Vaccinia virus
augaauaaagaaaa

SEQ ID NO: 3259391 - RNA, 22 nt, Vaccinia virus
caauaaauagcuuuacuucuau

SEQ ID NO: 3259392 - RNA, 20 nt, Vaccinia virus
uaguacgcgaaauaauauua

SEQ ID NO: 3259393 - RNA, 13 nt, Vaccinia virus
gauuaagauugcu

SEQ ID NO: 3259394 - RNA, 18 nt, Vaccinia virus
cucauauuaucaggaaca

SEQ ID NO: 3259395 - RNA, 15 nt, Vaccinia virus
aucgacaucgagaac

SEQ ID NO: 3259396 - RNA, 14 nt, Vaccinia virus
auauuagauuuacu

SEQ ID NO: 3259397 - RNA, 14 nt, Vaccinia virus
acauucuaggaaug

SEQ ID NO: 3259398 - RNA, 14 nt, Vaccinia virus
guuauauaauuauc

SEQ ID NO: 3259399 - RNA, 13 nt, Vaccinia virus
aaaauacuacugu

SEQ ID NO: 3259400 - RNA, 22 nt, Vaccinia virus
auucccccugccauuuuagaga

SEQ ID NO: 3259401 - RNA, 22 nt, Vaccinia virus
gauaauaaaaucacuaguauca

SEQ ID NO: 3259402 - RNA, 21 nt, Vaccinia virus
aguuauacgucauuucaucug

SEQ ID NO: 3259403 - RNA, 19 nt, Vaccinia virus
gaacuaauccacauaugau

SEQ ID NO: 3259404 - RNA, 13 nt, Vaccinia virus
guacuuaaugaag

SEQ ID NO: 3259405 - RNA, 22 nt, Vaccinia virus
agcuaugaacuuguuuaaugac

SEQ ID NO: 3259406 - RNA, 20 nt, Vaccinia virus
uaguuuccuuuuuauaaaau

SEQ ID NO: 3259407 - RNA, 20 nt, Vaccinia virus
uagacgagggguuagauggu

SEQ ID NO: 3259408 - RNA, 16 nt, Vaccinia virus
uguuauauauugucua

SEQ ID NO: 3259409 - RNA, 12 nt, Vaccinia virus
uuuaguuucuuc

SEQ ID NO: 3259410 - RNA, 19 nt, Vaccinia virus
ucucuaaauaccucauaaa

SEQ ID NO: 3259411 - RNA, 20 nt, Vaccinia virus
aguacacuccguuuaauaaa

SEQ ID NO: 3259412 - RNA, 17 nt, Vaccinia virus
auuuacuuuuucauaau

SEQ ID NO: 3259413 - RNA, 19 nt, Vaccinia virus
cguuuuuaaguucuggaau

SEQ ID NO: 3259414 - RNA, 11 nt, Vaccinia virus
cuauaaauguc

SEQ ID NO: 3259415 - RNA, 15 nt, Vaccinia virus
aacuauagacaaaau

SEQ ID NO: 3259416 - RNA, 19 nt, Vaccinia virus
agauauuccgacaaaggau

SEQ ID NO: 3259417 - RNA, 20 nt, Vaccinia virus
uacgucucagaauucuaaau

SEQ ID NO: 3259418 - RNA, 21 nt, Vaccinia virus
augaauuugauaagacuuuga

SEQ ID NO: 3259419 - RNA, 16 nt, Vaccinia virus
cauauagaucaaucau

SEQ ID NO: 3259420 - RNA, 15 nt, Vaccinia virus
uccaauuuuauucua

SEQ ID NO: 3259421 - RNA, 16 nt, Vaccinia virus
augauugggaaccagu

SEQ ID NO: 3259422 - RNA, 20 nt, Vaccinia virus
ugguauccuggcgaauauua

SEQ ID NO: 3259423 - RNA, 14 nt, Vaccinia virus
auccuauacucuga

SEQ ID NO: 3259424 - RNA, 22 nt, Vaccinia virus
cuugaggagaucuaaacaaucu

SEQ ID NO: 3259425 - RNA, 17 nt, Vaccinia virus
agugccacaaaacagaa

SEQ ID NO: 3259426 - RNA, 18 nt, Vaccinia virus
ugauacccgcaauuauua

SEQ ID NO: 3259427 - RNA, 12 nt, Vaccinia virus
agauaaauggaa

SEQ ID NO: 3259428 - RNA, 18 nt, Vaccinia virus
gugacggauauacaaaac

SEQ ID NO: 3259429 - RNA, 14 nt, Vaccinia virus
augagacgauguau

SEQ ID NO: 3259430 - RNA, 13 nt, Vaccinia virus
acacgaugaugau

SEQ ID NO: 3259431 - RNA, 17 nt, Vaccinia virus
auaugccuccagaaguu

SEQ ID NO: 3259432 - RNA, 15 nt, Vaccinia virus
auacauuuuucuaug

SEQ ID NO: 3259433 - RNA, 16 nt, Vaccinia virus
auucuugguaauuaau

SEQ ID NO: 3259434 - RNA, 16 nt, Vaccinia virus
gaaugcccgcauauau

SEQ ID NO: 3259435 - RNA, 17 nt, Vaccinia virus
cguaagcgcuauacaaa

SEQ ID NO: 3259436 - RNA, 19 nt, Vaccinia virus
aguacccucaauuaguuua

SEQ ID NO: 3259437 - RNA, 14 nt, Vaccinia virus
gguaaguucauuau

SEQ ID NO: 3259438 - RNA, 17 nt, Vaccinia virus
uaguaaaguuagaugug

SEQ ID NO: 3259439 - RNA, 18 nt, Vaccinia virus
cugcuugggaauuuuuua

SEQ ID NO: 3259440 - RNA, 17 nt, Vaccinia virus
auuuaaggcuuuaaaau

SEQ ID NO: 3259441 - RNA, 15 nt, Vaccinia virus
auuaaaaauaaaguu

SEQ ID NO: 3259442 - RNA, 17 nt, Vaccinia virus
ccaaacugcaaauguag

SEQ ID NO: 3259443 - RNA, 16 nt, Vaccinia virus
ccuacacccgaagaga

SEQ ID NO: 3259444 - RNA, 17 nt, Vaccinia virus
guaaaucauuaucuaca

SEQ ID NO: 3259445 - RNA, 14 nt, Vaccinia virus
uaagcaacaugucu

SEQ ID NO: 3259446 - RNA, 21 nt, Vaccinia virus
auuaugcauucguuuaaagau

SEQ ID NO: 3259447 - RNA, 21 nt, Vaccinia virus
gaguagugaugguuuucuaaa

SEQ ID NO: 3259448 - RNA, 19 nt, Vaccinia virus
uucauaaauaaaaacuugg

SEQ ID NO: 3259449 - RNA, 15 nt, Vaccinia virus
auaaaugacaaguau

SEQ ID NO: 3259450 - RNA, 18 nt, Vaccinia virus
uauuggaccgaauuacag

SEQ ID NO: 3259451 - RNA, 21 nt, Vaccinia virus
uugguaauauggauacuaauu

SEQ ID NO: 3259452 - RNA, 14 nt, Vaccinia virus
gaguauauauuaag

SEQ ID NO: 3259453 - RNA, 22 nt, Vaccinia virus
aaguuccagaaaauguagaauu

SEQ ID NO: 3259454 - RNA, 22 nt, Vaccinia virus
agcaucuugaauagaaacgaua

SEQ ID NO: 3259455 - RNA, 15 nt, Vaccinia virus
uuuuaaagguaucua

SEQ ID NO: 3259456 - RNA, 16 nt, Vaccinia virus
uacaccgcuauguuua

SEQ ID NO: 3259457 - RNA, 15 nt, Vaccinia virus
ucucugguuugcuac

SEQ ID NO: 3259458 - RNA, 21 nt, Vaccinia virus
uaacaaaaauuaugaaauaac

SEQ ID NO: 3259459 - RNA, 18 nt, Vaccinia virus
uauggagaaccaaucauu

SEQ ID NO: 3259460 - RNA, 21 nt, Vaccinia virus
ugacuuuuuuuguaccuuugu

SEQ ID NO: 3259461 - RNA, 22 nt, Vaccinia virus
acucuaaacaauuggacaaauu

SEQ ID NO: 3259462 - RNA, 22 nt, Vaccinia virus
accauauuuucuggaaguggau

SEQ ID NO: 3259463 - RNA, 18 nt, Vaccinia virus
guaugucccaauauuaau

SEQ ID NO: 3259464 - RNA, 15 nt, Vaccinia virus
gcaagaaaauuuaua

SEQ ID NO: 3259465 - RNA, 20 nt, Vaccinia virus
caauguggagauuuaaucug

SEQ ID NO: 3259466 - RNA, 20 nt, Vaccinia virus
caaacucagaaccaaaugau

SEQ ID NO: 3259467 - RNA, 15 nt, Vaccinia virus
cuaacacauuucaac

SEQ ID NO: 3259468 - RNA, 15 nt, Vaccinia virus
aucacaaagaaagcu

SEQ ID NO: 3259469 - RNA, 21 nt, Vaccinia virus
gucuguaacucugauaaucuc

SEQ ID NO: 3259470 - RNA, 15 nt, Vaccinia virus
gcuaguuauuaaaca

SEQ ID NO: 3259471 - RNA, 18 nt, Vaccinia virus
gauaauaauuaauaucua

SEQ ID NO: 3259472 - RNA, 16 nt, Vaccinia virus
cuaaaucucuuuagaa

SEQ ID NO: 3259473 - RNA, 12 nt, Vaccinia virus
uuuuauaaacau

SEQ ID NO: 3259474 - RNA, 19 nt, Vaccinia virus
uaacgagugaucaaaucau

SEQ ID NO: 3259475 - RNA, 16 nt, Vaccinia virus
acuucaauaaaugauu

SEQ ID NO: 3259476 - RNA, 20 nt, Vaccinia virus
acauccgaaauacaaaaugu

SEQ ID NO: 3259477 - RNA, 21 nt, Vaccinia virus
gaugauagugacuauuucauu

SEQ ID NO: 3259478 - RNA, 15 nt, Vaccinia virus
uaauaagauuucuau

SEQ ID NO: 3259479 - RNA, 14 nt, Vaccinia virus
uccauaaauuuaua

SEQ ID NO: 3259480 - RNA, 21 nt, Vaccinia virus
acauaauccagcuagugaaua

SEQ ID NO: 3259481 - RNA, 21 nt, Vaccinia virus
cacaaagaauuuuagacacua

SEQ ID NO: 3259482 - RNA, 20 nt, Vaccinia virus
auaaacucagauaauagcaa

SEQ ID NO: 3259483 - RNA, 15 nt, Vaccinia virus
cauauaaaaaaugau

SEQ ID NO: 3259484 - RNA, 19 nt, Vaccinia virus
gauuucuaucccgaaagaa

SEQ ID NO: 3259485 - RNA, 14 nt, Vaccinia virus
agcauuguuauuag

SEQ ID NO: 3259486 - RNA, 17 nt, Vaccinia virus
gacacuaguuaagaaca

SEQ ID NO: 3259487 - RNA, 15 nt, Vaccinia virus
ugaauauauaugaca

SEQ ID NO: 3259488 - RNA, 16 nt, Vaccinia virus
cauugcuuauauuuuc

SEQ ID NO: 3259489 - RNA, 18 nt, Vaccinia virus
accaauaauaguagaauu

SEQ ID NO: 3259490 - RNA, 19 nt, Vaccinia virus
aaugaaggauuugaaucau

SEQ ID NO: 3259491 - RNA, 20 nt, Vaccinia virus
ucauauguauaaaugaagua

SEQ ID NO: 3259492 - RNA, 17 nt, Vaccinia virus
uaacagcucuauuauau

SEQ ID NO: 3259493 - RNA, 14 nt, Vaccinia virus
cugcaauauauauu

SEQ ID NO: 3259494 - RNA, 22 nt, Vaccinia virus
gauuaguauauuccuuauucac

SEQ ID NO: 3259495 - RNA, 11 nt, Vaccinia virus
uauucucuuuc

SEQ ID NO: 3259496 - RNA, 17 nt, Vaccinia virus
uuaaaguacguaaaucu

SEQ ID NO: 3259497 - RNA, 20 nt, Vaccinia virus
auuauugcgacguucauaga

SEQ ID NO: 3259498 - RNA, 14 nt, Vaccinia virus
agaauuucuguuca

SEQ ID NO: 3259499 - RNA, 23 nt, Vaccinia virus
uguuacucaguugaacagaugau

SEQ ID NO: 3259500 - RNA, 20 nt, Vaccinia virus
uauuuaccgaacaggcauuu

SEQ ID NO: 3259501 - RNA, 14 nt, Vaccinia virus
uggaaaucguaaua

SEQ ID NO: 3259502 - RNA, 18 nt, Vaccinia virus
uuccacagauaauauuag

SEQ ID NO: 3259503 - RNA, 20 nt, Vaccinia virus
ccaaagucaucaaucaucau

SEQ ID NO: 3259504 - RNA, 18 nt, Vaccinia virus
aauuaaucuaguagaaaa

SEQ ID NO: 3259505 - RNA, 14 nt, Vaccinia virus
aaugauuuagaaau

SEQ ID NO: 3259506 - RNA, 16 nt, Vaccinia virus
uuucuaucgaauguag

SEQ ID NO: 3259507 - RNA, 14 nt, Vaccinia virus
ucgugaauaauguu

SEQ ID NO: 3259508 - RNA, 19 nt, Vaccinia virus
aauacacgauuuaauccau

SEQ ID NO: 3259509 - RNA, 23 nt, Vaccinia virus
uuaagcuguucaaaauauagcau

SEQ ID NO: 3259510 - RNA, 20 nt, Vaccinia virus
aaucauucucuucuaucuuu

SEQ ID NO: 3259511 - RNA, 15 nt, Vaccinia virus
acuaacacauuucaa

SEQ ID NO: 3259512 - RNA, 21 nt, Vaccinia virus
auacugucuguaacucugaua

SEQ ID NO: 3259513 - RNA, 17 nt, Vaccinia virus
aaucucugguucuaguu

SEQ ID NO: 3259514 - RNA, 22 nt, Vaccinia virus
gauaagagacguguuauuacau

SEQ ID NO: 3259515 - RNA, 18 nt, Vaccinia virus
augucauuuuuuuauccg

SEQ ID NO: 3259516 - RNA, 18 nt, Vaccinia virus
augauauaucuaguguuu

SEQ ID NO: 3259517 - RNA, 21 nt, Vaccinia virus
ugauauauccagauuacuaac

SEQ ID NO: 3259518 - RNA, 15 nt, Vaccinia virus
auggccgaugaaugg

SEQ ID NO: 3259519 - RNA, 13 nt, Vaccinia virus
uuauccaauacag

SEQ ID NO: 3259520 - RNA, 19 nt, Vaccinia virus
auuguugucugaaauacga

SEQ ID NO: 3259521 - RNA, 21 nt, Vaccinia virus
aauacaagagaaugaaauaua

SEQ ID NO: 3259522 - RNA, 13 nt, Vaccinia virus
gccacgcuacuaa

SEQ ID NO: 3259523 - RNA, 17 nt, Vaccinia virus
uggaugaggaagugaua

SEQ ID NO: 3259524 - RNA, 20 nt, Vaccinia virus
auaaaaucauuugagaaauu

SEQ ID NO: 3259525 - RNA, 15 nt, Vaccinia virus
aacagaaaaaacaau

SEQ ID NO: 3259526 - RNA, 16 nt, Vaccinia virus
acaaaagaguuaaguu

SEQ ID NO: 3259527 - RNA, 16 nt, Vaccinia virus
aaucuuugucaaauau

SEQ ID NO: 3259528 - RNA, 22 nt, Vaccinia virus
aaaccauguugugaaagaguuu

SEQ ID NO: 3259529 - RNA, 16 nt, Vaccinia virus
uucuauaauaaacuuu

SEQ ID NO: 3259530 - RNA, 15 nt, Vaccinia virus
aucauuuccaaaucu

SEQ ID NO: 3259531 - RNA, 22 nt, Vaccinia virus
ucuccgcaauacauuucucaaa

SEQ ID NO: 3259532 - RNA, 15 nt, Vaccinia virus
ucauaacguccagaa

SEQ ID NO: 3259533 - RNA, 17 nt, Vaccinia virus
auaugucuguacaaaug

SEQ ID NO: 3259534 - RNA, 16 nt, Vaccinia virus
augguauuaagaauuc

SEQ ID NO: 3259535 - RNA, 13 nt, Vaccinia virus
uucauuaaucuuu

SEQ ID NO: 3259536 - RNA, 13 nt, Vaccinia virus
cuuugauggauuc

SEQ ID NO: 3259537 - RNA, 14 nt, Vaccinia virus
aaacauaaaauaac

SEQ ID NO: 3259538 - RNA, 22 nt, Vaccinia virus
aaauauaguagaauuucauuuu

SEQ ID NO: 3259539 - RNA, 18 nt, Vaccinia virus
acguauauaacauuguuu

SEQ ID NO: 3259540 - RNA, 20 nt, Vaccinia virus
aauccagucuuuaaugaauu

SEQ ID NO: 3259541 - RNA, 18 nt, Vaccinia virus
auacaucucuggaaauag

SEQ ID NO: 3259542 - RNA, 20 nt, Vaccinia virus
gaacaucauuuccaaaucua

SEQ ID NO: 3259543 - RNA, 17 nt, Vaccinia virus
uaaacacauagaaauaa

SEQ ID NO: 3259544 - RNA, 13 nt, Vaccinia virus
aaauccaaacauu

SEQ ID NO: 3259545 - RNA, 17 nt, Vaccinia virus
caaaguguccuccuauu

SEQ ID NO: 3259546 - RNA, 21 nt, Vaccinia virus
ugaugguagucaauugauguu

SEQ ID NO: 3259547 - RNA, 17 nt, Vaccinia virus
gcgguaaacauucaugu

SEQ ID NO: 3259548 - RNA, 17 nt, Vaccinia virus
aaacuuuuuagaauauc

SEQ ID NO: 3259549 - RNA, 22 nt, Vaccinia virus
uuaucuuguuucgguggcugau

SEQ ID NO: 3259550 - RNA, 23 nt, Vaccinia virus
auaugcccgguaguugcgauaua

SEQ ID NO: 3259551 - RNA, 12 nt, Vaccinia virus
auucaaaaauug

SEQ ID NO: 3259552 - RNA, 13 nt, Vaccinia virus
aaaucaacucaua

SEQ ID NO: 3259553 - RNA, 16 nt, Vaccinia virus
augguuucugugacua

SEQ ID NO: 3259554 - RNA, 17 nt, Vaccinia virus
ccagaaugaaaaacucu

SEQ ID NO: 3259555 - RNA, 22 nt, Vaccinia virus
aucaaaauaucucccggaauug

SEQ ID NO: 3259556 - RNA, 16 nt, Vaccinia virus
accagcggcuacuaaa

SEQ ID NO: 3259557 - RNA, 16 nt, Vaccinia virus
augcuauuagaaaugg

SEQ ID NO: 3259558 - RNA, 23 nt, Vaccinia virus
cccguauagaaguucaaagguua

SEQ ID NO: 3259559 - RNA, 17 nt, Vaccinia virus
ccaucugguucaggaaa

SEQ ID NO: 3259560 - RNA, 18 nt, Vaccinia virus
gugcuucggauucaucca

SEQ ID NO: 3259561 - RNA, 15 nt, Vaccinia virus
auuucgaaaauacua

SEQ ID NO: 3259562 - RNA, 14 nt, Vaccinia virus
auuuuaguuuuggc

SEQ ID NO: 3259563 - RNA, 17 nt, Vaccinia virus
uucuauggcguacaaag

SEQ ID NO: 3259564 - RNA, 22 nt, Vaccinia virus
uaaguauuuggcuagucaagau

SEQ ID NO: 3259565 - RNA, 15 nt, Vaccinia virus
uacguauauuuagau

SEQ ID NO: 3259566 - RNA, 19 nt, Vaccinia virus
aaugagaugcauaaaacuu

SEQ ID NO: 3259567 - RNA, 18 nt, Vaccinia virus
auccuuuaagaucaacau

SEQ ID NO: 3259568 - RNA, 19 nt, Vaccinia virus
aaagcaauugacuaauaaa

SEQ ID NO: 3259569 - RNA, 12 nt, Vaccinia virus
acuaagaaaguu

SEQ ID NO: 3259570 - RNA, 15 nt, Vaccinia virus
aacuauuuuaccguu

SEQ ID NO: 3259571 - RNA, 13 nt, Vaccinia virus
uguaguuuucaca

SEQ ID NO: 3259572 - RNA, 18 nt, Vaccinia virus
cugaucuucuuuugucgu

SEQ ID NO: 3259573 - RNA, 19 nt, Vaccinia virus
uauuaaaugcgucaaucau

SEQ ID NO: 3259574 - RNA, 16 nt, Vaccinia virus
aucauuaaaaaaauua

SEQ ID NO: 3259575 - RNA, 15 nt, Vaccinia virus
agcauuguuauguau

SEQ ID NO: 3259576 - RNA, 18 nt, Vaccinia virus
auaucagacagcauggug

SEQ ID NO: 3259577 - RNA, 16 nt, Vaccinia virus
caaagauggcugaaau

SEQ ID NO: 3259578 - RNA, 22 nt, Vaccinia virus
uuuauucgguaagacaaucauu

SEQ ID NO: 3259579 - RNA, 21 nt, Vaccinia virus
accccauauaauguagacaug

SEQ ID NO: 3259580 - RNA, 12 nt, Vaccinia virus
aaacgauuaaac

SEQ ID NO: 3259581 - RNA, 23 nt, Vaccinia virus
auucauaaaacauaaucaaggau

SEQ ID NO: 3259582 - RNA, 14 nt, Vaccinia virus
uggucauagaaaau

SEQ ID NO: 3259583 - RNA, 22 nt, Vaccinia virus
uauauagauaauucuaauugcu

SEQ ID NO: 3259584 - RNA, 20 nt, Vaccinia virus
gugcuuguaucgaaaaacuu

SEQ ID NO: 3259585 - RNA, 23 nt, Vaccinia virus
agaugaugauacguauauacacu

SEQ ID NO: 3259586 - RNA, 15 nt, Vaccinia virus
guaauaccauguuua

SEQ ID NO: 3259587 - RNA, 13 nt, Vaccinia virus
ucaaaagaaaucu

SEQ ID NO: 3259588 - RNA, 17 nt, Vaccinia virus
acuaaaaaauguagaaa

SEQ ID NO: 3259589 - RNA, 14 nt, Vaccinia virus
cuuaauuauuuugc

SEQ ID NO: 3259590 - RNA, 14 nt, Vaccinia virus
uauugcuacauaau

SEQ ID NO: 3259591 - RNA, 15 nt, Vaccinia virus
auucuaauacauaau

SEQ ID NO: 3259592 - RNA, 14 nt, Vaccinia virus
ucaauaucaucaaa

SEQ ID NO: 3259593 - RNA, 18 nt, Vaccinia virus
uagaacagauuuaacaau

SEQ ID NO: 3259594 - RNA, 14 nt, Vaccinia virus
uuaaauucuuuaau

SEQ ID NO: 3259595 - RNA, 15 nt, Vaccinia virus
cacgaaauaucucau

SEQ ID NO: 3259596 - RNA, 19 nt, Vaccinia virus
aguacuguucaaacaugau

SEQ ID NO: 3259597 - RNA, 22 nt, Vaccinia virus
uaauaucagaccguacauacau

SEQ ID NO: 3259598 - RNA, 17 nt, Vaccinia virus
uguuuucaucaagauuu

SEQ ID NO: 3259599 - RNA, 19 nt, Vaccinia virus
aagaccgaauacauaacag

SEQ ID NO: 3259600 - RNA, 14 nt, Vaccinia virus
agagacaaacuauu

SEQ ID NO: 3259601 - RNA, 17 nt, Vaccinia virus
aguacaagaaauauuuc

SEQ ID NO: 3259602 - RNA, 23 nt, Vaccinia virus
gaccgacgauaauauaaacaucu

SEQ ID NO: 3259603 - RNA, 18 nt, Vaccinia virus
cagagcucaucuaaaaaa

SEQ ID NO: 3259604 - RNA, 14 nt, Vaccinia virus
acuggcgaaauggu

SEQ ID NO: 3259605 - RNA, 16 nt, Vaccinia virus
uagaugaggauagcaa

SEQ ID NO: 3259606 - RNA, 15 nt, Vaccinia virus
acgaaagaaaaagaa

SEQ ID NO: 3259607 - RNA, 20 nt, Vaccinia virus
gaaaucauggcgauguuuua

SEQ ID NO: 3259608 - RNA, 22 nt, Vaccinia virus
ucuaggagguggauauuucuga

SEQ ID NO: 3259609 - RNA, 19 nt, Vaccinia virus
ccucaaucauguacuagcu

SEQ ID NO: 3259610 - RNA, 14 nt, Vaccinia virus
aacuuaaacaaaau

SEQ ID NO: 3259611 - RNA, 13 nt, Vaccinia virus
auuuuauugcuaa

SEQ ID NO: 3259612 - RNA, 17 nt, Vaccinia virus
aauucaucuucuauaua

SEQ ID NO: 3259613 - RNA, 21 nt, Vaccinia virus
cauaugguacgauguuguaaa

SEQ ID NO: 3259614 - RNA, 22 nt, Vaccinia virus
ucauuugcucggcaguaaucaa

SEQ ID NO: 3259615 - RNA, 20 nt, Vaccinia virus
aauacauguaacaaaguuuc

SEQ ID NO: 3259616 - RNA, 17 nt, Vaccinia virus
gacucuaccugaugaau

SEQ ID NO: 3259617 - RNA, 14 nt, Vaccinia virus
guauauaguuuaua

SEQ ID NO: 3259618 - RNA, 21 nt, Vaccinia virus
auucaagcaaaaacaaaaaac

SEQ ID NO: 3259619 - RNA, 15 nt, Vaccinia virus
aguaaagaaaagaua

SEQ ID NO: 3259620 - RNA, 14 nt, Vaccinia virus
aaauuugucauuua

SEQ ID NO: 3259621 - RNA, 15 nt, Vaccinia virus
aaauuaucaaauguu

SEQ ID NO: 3259622 - RNA, 21 nt, Vaccinia virus
uaacgauuuccaugucuacau

SEQ ID NO: 3259623 - RNA, 13 nt, Vaccinia virus
uggauauaugaua

SEQ ID NO: 3259624 - RNA, 18 nt, Vaccinia virus
aagaaguuauagaaugua

SEQ ID NO: 3259625 - RNA, 13 nt, Vaccinia virus
ucaguuacaaaac

SEQ ID NO: 3259626 - RNA, 20 nt, Vaccinia virus
agaugccaagauaucuauau

SEQ ID NO: 3259627 - RNA, 15 nt, Vaccinia virus
uguucaacaaacuaa

SEQ ID NO: 3259628 - RNA, 12 nt, Vaccinia virus
cuucuaucuugu

SEQ ID NO: 3259629 - RNA, 20 nt, Vaccinia virus
augaugaaacacaagaucaa

SEQ ID NO: 3259630 - RNA, 23 nt, Vaccinia virus
uuauuccgguacugguuuagaua

SEQ ID NO: 3259631 - RNA, 18 nt, Vaccinia virus
auaucugaguaugaugau

SEQ ID NO: 3259632 - RNA, 14 nt, Vaccinia virus
uguaauaguuucca

SEQ ID NO: 3259633 - RNA, 20 nt, Vaccinia virus
cagaaauugguauaaauguu

SEQ ID NO: 3259634 - RNA, 12 nt, Vaccinia virus
gcugaaaugaga

SEQ ID NO: 3259635 - RNA, 17 nt, Vaccinia virus
guacaauaaauagcuuu

SEQ ID NO: 3259636 - RNA, 19 nt, Vaccinia virus
acaaaugcgccaaaguuau

SEQ ID NO: 3259637 - RNA, 12 nt, Vaccinia virus
gcaauguaaugg

SEQ ID NO: 3259638 - RNA, 20 nt, Vaccinia virus
uuuuguuggagaacuugaua

SEQ ID NO: 3259639 - RNA, 14 nt, Vaccinia virus
uagauaaaauacug

SEQ ID NO: 3259640 - RNA, 23 nt, Vaccinia virus
uaguuauuagugauaaaauagua

SEQ ID NO: 3259641 - RNA, 20 nt, Vaccinia virus
uggauaccgcacuagguaca

SEQ ID NO: 3259642 - RNA, 13 nt, Vaccinia virus
aucauaauauuaa

SEQ ID NO: 3259643 - RNA, 13 nt, Vaccinia virus
guaaaaaauguac

SEQ ID NO: 3259644 - RNA, 16 nt, Vaccinia virus
caaauagauaagaaua

SEQ ID NO: 3259645 - RNA, 22 nt, Vaccinia virus
uaauuugaccugauuacauuuu

SEQ ID NO: 3259646 - RNA, 18 nt, Vaccinia virus
aaguacagauuuuagaaa

SEQ ID NO: 3259647 - RNA, 15 nt, Vaccinia virus
ugaguaaugaaaucc

SEQ ID NO: 3259648 - RNA, 14 nt, Vaccinia virus
ccauaucaacaucu

SEQ ID NO: 3259649 - RNA, 19 nt, Vaccinia virus
auaucacauaguguuuuau

SEQ ID NO: 3259650 - RNA, 19 nt, Vaccinia virus
cauauaggaaacuauaaag

SEQ ID NO: 3259651 - RNA, 18 nt, Vaccinia virus
aagugaaggauugauaac

SEQ ID NO: 3259652 - RNA, 21 nt, Vaccinia virus
uaucgcauuuucuaacgugau

SEQ ID NO: 3259653 - RNA, 20 nt, Vaccinia virus
auaggauacucuaugaaugg

SEQ ID NO: 3259654 - RNA, 12 nt, Vaccinia virus
acacaagaucug

SEQ ID NO: 3259655 - RNA, 12 nt, Vaccinia virus
aaguaaacuucg

SEQ ID NO: 3259656 - RNA, 14 nt, Vaccinia virus
aacuguuaaauguu

SEQ ID NO: 3259657 - RNA, 24 nt, Vaccinia virus
auacaucaagagagcagaaauuac

SEQ ID NO: 3259658 - RNA, 15 nt, Vaccinia virus
uauacaauuaucauu

SEQ ID NO: 3259659 - RNA, 17 nt, Vaccinia virus
uagucauagacaaugcu

SEQ ID NO: 3259660 - RNA, 14 nt, Vaccinia virus
agacuuuguagaaa

SEQ ID NO: 3259661 - RNA, 19 nt, Vaccinia virus
cugucuucaaugaacucau

SEQ ID NO: 3259662 - RNA, 17 nt, Vaccinia virus
auuauccggauucauuu

SEQ ID NO: 3259663 - RNA, 16 nt, Vaccinia virus
aggaaguauaucugag

SEQ ID NO: 3259664 - RNA, 15 nt, Vaccinia virus
uuacucuaaaucgcu

SEQ ID NO: 3259665 - RNA, 18 nt, Vaccinia virus
cagauauggucaaaucaa

SEQ ID NO: 3259666 - RNA, 18 nt, Vaccinia virus
uauaggaaacuauaaagu

SEQ ID NO: 3259667 - RNA, 18 nt, Vaccinia virus
uugauccguaauaacauu

SEQ ID NO: 3259668 - RNA, 16 nt, Vaccinia virus
cuucucaucuauguaa

SEQ ID NO: 3259669 - RNA, 23 nt, Vaccinia virus
uugccaccuauagcaucaauaau

SEQ ID NO: 3259670 - RNA, 16 nt, Vaccinia virus
aucacaggagcaaugu

SEQ ID NO: 3259671 - RNA, 16 nt, Vaccinia virus
auagauuuugaauauu

SEQ ID NO: 3259672 - RNA, 17 nt, Vaccinia virus
uccaucagaauguuucc

SEQ ID NO: 3259673 - RNA, 21 nt, Vaccinia virus
ugaagaagagguaagauaucu

SEQ ID NO: 3259674 - RNA, 14 nt, Vaccinia virus
auuuagcaaaauua

SEQ ID NO: 3259675 - RNA, 19 nt, Vaccinia virus
cacuaguuaagaacauguc

SEQ ID NO: 3259676 - RNA, 17 nt, Vaccinia virus
ucgaggacuuggauguu

SEQ ID NO: 3259677 - RNA, 18 nt, Vaccinia virus
ugauuuucguaacagaua

SEQ ID NO: 3259678 - RNA, 18 nt, Vaccinia virus
gcuugauaauuagauaua

SEQ ID NO: 3259679 - RNA, 18 nt, Vaccinia virus
guuaaagaucuuaagaaa

SEQ ID NO: 3259680 - RNA, 22 nt, Vaccinia virus
auauuuuucuauguuaggaaua

SEQ ID NO: 3259681 - RNA, 15 nt, Vaccinia virus
cauuagguuaaauga

SEQ ID NO: 3259682 - RNA, 16 nt, Vaccinia virus
uagaguuuuauucuca

SEQ ID NO: 3259683 - RNA, 19 nt, Vaccinia virus
auaugauccaugcauagau

SEQ ID NO: 3259684 - RNA, 20 nt, Vaccinia virus
agaaaacucguuauuaacua

SEQ ID NO: 3259685 - RNA, 12 nt, Vaccinia virus
aggauucuuaau

SEQ ID NO: 3259686 - RNA, 22 nt, Vaccinia virus
uaacaguaucauuuaaacauuu

SEQ ID NO: 3259687 - RNA, 13 nt, Vaccinia virus
acaucuaguucuu

SEQ ID NO: 3259688 - RNA, 18 nt, Vaccinia virus
cuugaucucaucauucca

SEQ ID NO: 3259689 - RNA, 15 nt, Vaccinia virus
uaucauccaauauua

SEQ ID NO: 3259690 - RNA, 11 nt, Vaccinia virus
ucguuaaugaa

SEQ ID NO: 3259691 - RNA, 22 nt, Vaccinia virus
uaauaggagcuagaagaacuuc

SEQ ID NO: 3259692 - RNA, 23 nt, Vaccinia virus
acuaugaauccgaugaucucacu

SEQ ID NO: 3259693 - RNA, 23 nt, Vaccinia virus
aaaguuuuuccaauuauauggua

SEQ ID NO: 3259694 - RNA, 19 nt, Vaccinia virus
agauuuuuagcguauuauc

SEQ ID NO: 3259695 - RNA, 21 nt, Vaccinia virus
ucuaugagacgauauauagua

SEQ ID NO: 3259696 - RNA, 20 nt, Vaccinia virus
agaaaacuagauacaaaauu

SEQ ID NO: 3259697 - RNA, 15 nt, Vaccinia virus
acaauguagaaauua

SEQ ID NO: 3259698 - RNA, 21 nt, Vaccinia virus
agcuaaugaugcggauauugu

SEQ ID NO: 3259699 - RNA, 15 nt, Vaccinia virus
acaaaaaaaagaaua

SEQ ID NO: 3259700 - RNA, 17 nt, Vaccinia virus
gaucuaaagauaaucuu

SEQ ID NO: 3259701 - RNA, 13 nt, Vaccinia virus
caaaaacgauauu

SEQ ID NO: 3259702 - RNA, 20 nt, Vaccinia virus
acuaauguauacauuuucca

SEQ ID NO: 3259703 - RNA, 14 nt, Vaccinia virus
acuaucuuuaacau

SEQ ID NO: 3259704 - RNA, 17 nt, Vaccinia virus
uaaccaugaaagaaaga

SEQ ID NO: 3259705 - RNA, 22 nt, Vaccinia virus
uguucagauacuauaccguugu

SEQ ID NO: 3259706 - RNA, 19 nt, Vaccinia virus
aaaguuacaacuggucaua

SEQ ID NO: 3259707 - RNA, 13 nt, Vaccinia virus
uaaucguguauaa

SEQ ID NO: 3259708 - RNA, 17 nt, Vaccinia virus
gaacagguuauccagaa

SEQ ID NO: 3259709 - RNA, 21 nt, Vaccinia virus
auauaaggccaaaacaaaauu

SEQ ID NO: 3259710 - RNA, 12 nt, Vaccinia virus
uaccuuaaugua

SEQ ID NO: 3259711 - RNA, 19 nt, Vaccinia virus
uuucucucauguauaauaa

SEQ ID NO: 3259712 - RNA, 21 nt, Vaccinia virus
uagucuuagcugaccugaguu

SEQ ID NO: 3259713 - RNA, 14 nt, Vaccinia virus
ccaaauguuggaaa

SEQ ID NO: 3259714 - RNA, 15 nt, Vaccinia virus
uagaagaucauacag

SEQ ID NO: 3259715 - RNA, 14 nt, Vaccinia virus
uugccaaugauguc

SEQ ID NO: 3259716 - RNA, 15 nt, Vaccinia virus
uggugcuaauuauuc

SEQ ID NO: 3259717 - RNA, 15 nt, Vaccinia virus
uacuacuucauuaau

SEQ ID NO: 3259718 - RNA, 23 nt, Vaccinia virus
guccauuuaaaguacagauuuua

SEQ ID NO: 3259719 - RNA, 20 nt, Vaccinia virus
aaauacauaugacaaacauu

SEQ ID NO: 3259720 - RNA, 14 nt, Vaccinia virus
cacagaacaguaaa

SEQ ID NO: 3259721 - RNA, 22 nt, Vaccinia virus
aaaguuaggguucuuguuccau

SEQ ID NO: 3259722 - RNA, 21 nt, Vaccinia virus
gaaaauaccauccaagucaau

SEQ ID NO: 3259723 - RNA, 20 nt, Vaccinia virus
ucacaaagauggcugaaauc

SEQ ID NO: 3259724 - RNA, 14 nt, Vaccinia virus
uuauacaaaguuuu

SEQ ID NO: 3259725 - RNA, 17 nt, Vaccinia virus
cuaggaguguuggauuu

SEQ ID NO: 3259726 - RNA, 17 nt, Vaccinia virus
uaauaguuuaucauacu

SEQ ID NO: 3259727 - RNA, 16 nt, Vaccinia virus
ucaaauaggagauauu

SEQ ID NO: 3259728 - RNA, 14 nt, Vaccinia virus
augaauuaauuaag

SEQ ID NO: 3259729 - RNA, 19 nt, Vaccinia virus
auauuucuccacuacauau

SEQ ID NO: 3259730 - RNA, 14 nt, Vaccinia virus
aauaaucauacaau

SEQ ID NO: 3259731 - RNA, 17 nt, Vaccinia virus
gaccaucguuugucaua

SEQ ID NO: 3259732 - RNA, 13 nt, Vaccinia virus
aucuaaucaucaa

SEQ ID NO: 3259733 - RNA, 22 nt, Vaccinia virus
agcguagaaguuguaaaugaca

SEQ ID NO: 3259734 - RNA, 20 nt, Vaccinia virus
aaaccaggugaguguagaaa

SEQ ID NO: 3259735 - RNA, 23 nt, Vaccinia virus
uaguaagccaauuccaauuguug

SEQ ID NO: 3259736 - RNA, 24 nt, Vaccinia virus
ugcuauguuuauagauguucacau

SEQ ID NO: 3259737 - RNA, 15 nt, Vaccinia virus
aaccgauaauaaugu

SEQ ID NO: 3259738 - RNA, 23 nt, Vaccinia virus
guuauauguaacauugaguaaau

SEQ ID NO: 3259739 - RNA, 23 nt, Vaccinia virus
guuaugaaucuggauugccuaaa

SEQ ID NO: 3259740 - RNA, 19 nt, Vaccinia virus
ugguacaaaaaauaucaug

SEQ ID NO: 3259741 - RNA, 17 nt, Vaccinia virus
acuaauggaguauucca

SEQ ID NO: 3259742 - RNA, 19 nt, Vaccinia virus
uguuugcugcguguauaac

SEQ ID NO: 3259743 - RNA, 15 nt, Vaccinia virus
uucauuacuacugua

SEQ ID NO: 3259744 - RNA, 18 nt, Vaccinia virus
agaaauauguuaacaaua

SEQ ID NO: 3259745 - RNA, 13 nt, Vaccinia virus
auccuauaaacau

SEQ ID NO: 3259746 - RNA, 17 nt, Vaccinia virus
acguuacuacguucaga

SEQ ID NO: 3259747 - RNA, 21 nt, Vaccinia virus
ucagauuaaauccaucucaga

SEQ ID NO: 3259748 - RNA, 20 nt, Vaccinia virus
acugcagagggaaaaugcua

SEQ ID NO: 3259749 - RNA, 15 nt, Vaccinia virus
aaaaccguuaaaaug

SEQ ID NO: 3259750 - RNA, 21 nt, Vaccinia virus
auuaacucagaagauuauuau

SEQ ID NO: 3259751 - RNA, 16 nt, Vaccinia virus
accauuaucuuuguuu

SEQ ID NO: 3259752 - RNA, 14 nt, Vaccinia virus
uugacaucuaguau

SEQ ID NO: 3259753 - RNA, 19 nt, Vaccinia virus
aauauuagaguuaggcaau

SEQ ID NO: 3259754 - RNA, 12 nt, Vaccinia virus
aaugaaaauaua

SEQ ID NO: 3259755 - RNA, 20 nt, Vaccinia virus
accauauauccaauaaagcu

SEQ ID NO: 3259756 - RNA, 17 nt, Vaccinia virus
auuggauuggauacacu

SEQ ID NO: 3259757 - RNA, 22 nt, Vaccinia virus
ggaucgcaagaauuuauuucua

SEQ ID NO: 3259758 - RNA, 12 nt, Vaccinia virus
cuauuuggauuu

SEQ ID NO: 3259759 - RNA, 14 nt, Vaccinia virus
aaauuaagauacaa

SEQ ID NO: 3259760 - RNA, 21 nt, Vaccinia virus
uaguaauaaugauucaacaau

SEQ ID NO: 3259761 - RNA, 16 nt, Vaccinia virus
gaaagugcaaaugagg

SEQ ID NO: 3259762 - RNA, 20 nt, Vaccinia virus
cugaauaaucguuauuauca

SEQ ID NO: 3259763 - RNA, 22 nt, Vaccinia virus
aagugaacaauaauuaauucuu

SEQ ID NO: 3259764 - RNA, 14 nt, Vaccinia virus
gaauuguaacuuga

SEQ ID NO: 3259765 - RNA, 15 nt, Vaccinia virus
auccuaauucacaau

SEQ ID NO: 3259766 - RNA, 21 nt, Vaccinia virus
ucucaaaugaauaaguuuauu

SEQ ID NO: 3259767 - RNA, 14 nt, Vaccinia virus
uaaauucuguuuaa

SEQ ID NO: 3259768 - RNA, 17 nt, Vaccinia virus
aauaacuuguuagauaa

SEQ ID NO: 3259769 - RNA, 16 nt, Vaccinia virus
aaauacaaaacagaga

SEQ ID NO: 3259770 - RNA, 23 nt, Vaccinia virus
gacucucaguaagaguuaugaau

SEQ ID NO: 3259771 - RNA, 21 nt, Vaccinia virus
uuauugggccaguauacuguu

SEQ ID NO: 3259772 - RNA, 20 nt, Vaccinia virus
aauguucuuaacuacauuca

SEQ ID NO: 3259773 - RNA, 15 nt, Vaccinia virus
uuaauuuauuauuga

SEQ ID NO: 3259774 - RNA, 17 nt, Vaccinia virus
uagcugagaauaucuuu

SEQ ID NO: 3259775 - RNA, 15 nt, Vaccinia virus
aaaguuucacaugaa

SEQ ID NO: 3259776 - RNA, 23 nt, Vaccinia virus
aaggaggaucuuuacccauccaa

SEQ ID NO: 3259777 - RNA, 15 nt, Vaccinia virus
caauauuaaugcauu

SEQ ID NO: 3259778 - RNA, 21 nt, Vaccinia virus
gaaaauuagaucugauaauau

SEQ ID NO: 3259779 - RNA, 15 nt, Vaccinia virus
acaaucgauaauaua

SEQ ID NO: 3259780 - RNA, 22 nt, Vaccinia virus
cucuaacaacaacgaaccaaaa

SEQ ID NO: 3259781 - RNA, 20 nt, Vaccinia virus
cccaaucuuguuauaaacac

SEQ ID NO: 3259782 - RNA, 17 nt, Vaccinia virus
ucuaccguuguuaaaua

SEQ ID NO: 3259783 - RNA, 20 nt, Vaccinia virus
ugaaauccguagaaacaucu

SEQ ID NO: 3259784 - RNA, 21 nt, Vaccinia virus
uucuacuacuucauuaaucuu

SEQ ID NO: 3259785 - RNA, 13 nt, Vaccinia virus
acaggcauauuag

SEQ ID NO: 3259786 - RNA, 15 nt, Vaccinia virus
uagauguguauacau

SEQ ID NO: 3259787 - RNA, 18 nt, Vaccinia virus
agauuuuggugaaauuau

SEQ ID NO: 3259788 - RNA, 14 nt, Vaccinia virus
aucgauagacacug

SEQ ID NO: 3259789 - RNA, 12 nt, Vaccinia virus
ucuauaggaaag

SEQ ID NO: 3259790 - RNA, 20 nt, Vaccinia virus
agauaauugugguaauacac

SEQ ID NO: 3259791 - RNA, 22 nt, Vaccinia virus
aauaguuucauaauuguuagcu

SEQ ID NO: 3259792 - RNA, 22 nt, Vaccinia virus
uauaguuaauaguguacuacaa

SEQ ID NO: 3259793 - RNA, 16 nt, Vaccinia virus
uagaauuugaucuauu

SEQ ID NO: 3259794 - RNA, 14 nt, Vaccinia virus
ucauucuauuaaug

SEQ ID NO: 3259795 - RNA, 19 nt, Vaccinia virus
ccuugaaaaugaauacagu

SEQ ID NO: 3259796 - RNA, 17 nt, Vaccinia virus
uuccauugauaaagaag

SEQ ID NO: 3259797 - RNA, 19 nt, Vaccinia virus
ucuagauacuagaguagua

SEQ ID NO: 3259798 - RNA, 13 nt, Vaccinia virus
auaauuauuucca

SEQ ID NO: 3259799 - RNA, 22 nt, Vaccinia virus
guguauuuaaguugguagauuu

SEQ ID NO: 3259800 - RNA, 20 nt, Vaccinia virus
uguaaaggauaugauauguu

SEQ ID NO: 3259801 - RNA, 13 nt, Vaccinia virus
auaacuaaauguc

SEQ ID NO: 3259802 - RNA, 18 nt, Vaccinia virus
cuaacgccgaucucugaa

SEQ ID NO: 3259803 - RNA, 14 nt, Vaccinia virus
ugcaacaucuggag

SEQ ID NO: 3259804 - RNA, 19 nt, Vaccinia virus
cauauuuagaaaaaagauu

SEQ ID NO: 3259805 - RNA, 15 nt, Vaccinia virus
gucuauguauguacg

SEQ ID NO: 3259806 - RNA, 17 nt, Vaccinia virus
gcuauuaaaauauuuua

SEQ ID NO: 3259807 - RNA, 13 nt, Vaccinia virus
agaauuaagauua

SEQ ID NO: 3259808 - RNA, 17 nt, Vaccinia virus
aacuaaacagucuauca

SEQ ID NO: 3259809 - RNA, 15 nt, Vaccinia virus
auauaaauaugagca

SEQ ID NO: 3259810 - RNA, 23 nt, Vaccinia virus
cuugcacuuaaagucuacauugu

SEQ ID NO: 3259811 - RNA, 19 nt, Vaccinia virus
gcaauauaucaucuuuuca

SEQ ID NO: 3259812 - RNA, 13 nt, Vaccinia virus
cuaauaaacauuc

SEQ ID NO: 3259813 - RNA, 13 nt, Vaccinia virus
augauacauguau

SEQ ID NO: 3259814 - RNA, 19 nt, Vaccinia virus
uauuaaucaagucaauuau

SEQ ID NO: 3259815 - RNA, 13 nt, Vaccinia virus
uauggaaucugua

SEQ ID NO: 3259816 - RNA, 23 nt, Vaccinia virus
uuaugauauaaggaaacagcuuu

SEQ ID NO: 3259817 - RNA, 18 nt, Vaccinia virus
uagccuguuuuaacaucu

SEQ ID NO: 3259818 - RNA, 14 nt, Vaccinia virus
auaucucuaauaga

SEQ ID NO: 3259819 - RNA, 14 nt, Vaccinia virus
uauaguauuaacuu

SEQ ID NO: 3259820 - RNA, 17 nt, Vaccinia virus
ugaauguucucaagaac

SEQ ID NO: 3259821 - RNA, 15 nt, Vaccinia virus
uaacuguuaucucuu

SEQ ID NO: 3259822 - RNA, 17 nt, Vaccinia virus
ucaacaaguguguagau

SEQ ID NO: 3259823 - RNA, 14 nt, Vaccinia virus
gaauauguauauca

SEQ ID NO: 3259824 - RNA, 11 nt, Vaccinia virus
cuauaguucuc

SEQ ID NO: 3259825 - RNA, 16 nt, Vaccinia virus
agacaaauauacuuua

SEQ ID NO: 3259826 - RNA, 20 nt, Vaccinia virus
guuuuccaaccggacucauu

SEQ ID NO: 3259827 - RNA, 21 nt, Vaccinia virus
ccaaaucaguaacuauguuca

SEQ ID NO: 3259828 - RNA, 14 nt, Vaccinia virus
auauacagucuuaa

SEQ ID NO: 3259829 - RNA, 20 nt, Vaccinia virus
agccugaagcucaucuuguu

SEQ ID NO: 3259830 - RNA, 20 nt, Vaccinia virus
uagaaaucaacuuauucuug

SEQ ID NO: 3259831 - RNA, 20 nt, Vaccinia virus
caauacauguuuuauaaaau

SEQ ID NO: 3259832 - RNA, 18 nt, Vaccinia virus
auuuuauucuagaauuga

SEQ ID NO: 3259833 - RNA, 19 nt, Vaccinia virus
uagaugcauauauuucauu

SEQ ID NO: 3259834 - RNA, 21 nt, Vaccinia virus
uggaaucagaagaugauucca

SEQ ID NO: 3259835 - RNA, 21 nt, Vaccinia virus
uucuaucaacgauucuagaau

SEQ ID NO: 3259836 - RNA, 14 nt, Vaccinia virus
acgaauauaaauca

SEQ ID NO: 3259837 - RNA, 20 nt, Vaccinia virus
cuauauuuguuccuguagau

SEQ ID NO: 3259838 - RNA, 22 nt, Vaccinia virus
caucuguaggauaucuauuuuu

SEQ ID NO: 3259839 - RNA, 16 nt, Vaccinia virus
uaugcauguuucauaa

SEQ ID NO: 3259840 - RNA, 11 nt, Vaccinia virus
uaauauuugcu

SEQ ID NO: 3259841 - RNA, 20 nt, Vaccinia virus
acauuuuccauuauuaauaa

SEQ ID NO: 3259842 - RNA, 14 nt, Vaccinia virus
aaacuuuaauaaca

SEQ ID NO: 3259843 - RNA, 23 nt, Vaccinia virus
cuucgauauuagauuuuguauua

SEQ ID NO: 3259844 - RNA, 19 nt, Vaccinia virus
cuuuaguuuauacuauuac

SEQ ID NO: 3259845 - RNA, 16 nt, Vaccinia virus
uagacauuuuuagaga

SEQ ID NO: 3259846 - RNA, 22 nt, Vaccinia virus
aauauggagagguguauuucca

SEQ ID NO: 3259847 - RNA, 20 nt, Vaccinia virus
aaaacauuauaauaauauaa

SEQ ID NO: 3259848 - RNA, 18 nt, Vaccinia virus
ugucccuucaagaagaua

SEQ ID NO: 3259849 - RNA, 14 nt, Vaccinia virus
auuuaauacuuuac

SEQ ID NO: 3259850 - RNA, 20 nt, Vaccinia virus
acaaguaucaaaagauuaaa

SEQ ID NO: 3259851 - RNA, 17 nt, Vaccinia virus
uaauuuuaucaagacau

SEQ ID NO: 3259852 - RNA, 20 nt, Vaccinia virus
auauuauuuuuauguuuuau

SEQ ID NO: 3259853 - RNA, 20 nt, Vaccinia virus
uauaguucaaauuaagcauu

SEQ ID NO: 3259854 - RNA, 20 nt, Vaccinia virus
aaauaggguuguguauaauu

SEQ ID NO: 3259855 - RNA, 12 nt, Vaccinia virus
caauaaaugauu

SEQ ID NO: 3259856 - RNA, 12 nt, Vaccinia virus
cuuaaaauguaa

SEQ ID NO: 3259857 - RNA, 15 nt, Vaccinia virus
cucucucugccaaaa

SEQ ID NO: 3259858 - RNA, 15 nt, Vaccinia virus
agucauaaaaggaua

SEQ ID NO: 3259859 - RNA, 22 nt, Vaccinia virus
uguacgauguaguaguaacugu

SEQ ID NO: 3259860 - RNA, 14 nt, Vaccinia virus
auugaucaaacauu

SEQ ID NO: 3259861 - RNA, 17 nt, Vaccinia virus
ggaaacuuuuguuuugu

SEQ ID NO: 3259862 - RNA, 21 nt, Vaccinia virus
cagcaauagaucggaugauuu

SEQ ID NO: 3259863 - RNA, 22 nt, Vaccinia virus
guuucaaagcaauuguauuauu

SEQ ID NO: 3259864 - RNA, 22 nt, Vaccinia virus
uauaacuaucaauauuaacagu

SEQ ID NO: 3259865 - RNA, 18 nt, Vaccinia virus
agauaugccagaacuauu

SEQ ID NO: 3259866 - RNA, 17 nt, Vaccinia virus
auugagcggaccaucug

SEQ ID NO: 3259867 - RNA, 11 nt, Vaccinia virus
aaauacagaua

SEQ ID NO: 3259868 - RNA, 22 nt, Vaccinia virus
cuuuugauuugcuuugaaugau

SEQ ID NO: 3259869 - RNA, 23 nt, Vaccinia virus
uaaccuuggcugucucauucaau

SEQ ID NO: 3259870 - RNA, 21 nt, Vaccinia virus
aaccauucauuaauuucugau

SEQ ID NO: 3259871 - RNA, 17 nt, Vaccinia virus
augaaacguuuggaaac

SEQ ID NO: 3259872 - RNA, 21 nt, Vaccinia virus
caucgguacggguauucauuu

SEQ ID NO: 3259873 - RNA, 22 nt, Vaccinia virus
aaguaucuaguuagcaauuuuc

SEQ ID NO: 3259874 - RNA, 13 nt, Vaccinia virus
auacgaagacuau

SEQ ID NO: 3259875 - RNA, 14 nt, Vaccinia virus
auauaauaauacac

SEQ ID NO: 3259876 - RNA, 13 nt, Vaccinia virus
aaacuaaauaacg

SEQ ID NO: 3259877 - RNA, 15 nt, Vaccinia virus
ucuuguucaauggau

SEQ ID NO: 3259878 - RNA, 15 nt, Vaccinia virus
gguacaacauuccaa

SEQ ID NO: 3259879 - RNA, 18 nt, Vaccinia virus
ucugauuugaacaaugca

SEQ ID NO: 3259880 - RNA, 21 nt, Vaccinia virus
uaucuuuuagagguucccaau

SEQ ID NO: 3259881 - RNA, 18 nt, Vaccinia virus
cauuacagaaacuguaaa

SEQ ID NO: 3259882 - RNA, 10 nt, Vaccinia virus
guuacaaaag

SEQ ID NO: 3259883 - RNA, 17 nt, Vaccinia virus
aaucauugggaaacauu

SEQ ID NO: 3259884 - RNA, 18 nt, Vaccinia virus
uauggaucuauucaagau

SEQ ID NO: 3259885 - RNA, 14 nt, Vaccinia virus
gucaaucaaagaga

SEQ ID NO: 3259886 - RNA, 19 nt, Vaccinia virus
uuuaaucucgaaauucaga

SEQ ID NO: 3259887 - RNA, 20 nt, Vaccinia virus
aggauucgauuuugauguau

SEQ ID NO: 3259888 - RNA, 14 nt, Vaccinia virus
uauuacuaaacauu

SEQ ID NO: 3259889 - RNA, 22 nt, Vaccinia virus
aauaguauacgcagaaaagaua

SEQ ID NO: 3259890 - RNA, 14 nt, Vaccinia virus
aauacuguauuaug

SEQ ID NO: 3259891 - RNA, 15 nt, Vaccinia virus
acuacguugaagauc

SEQ ID NO: 3259892 - RNA, 23 nt, Vaccinia virus
ccaaaaauuuuuaaaguauaucu

SEQ ID NO: 3259893 - RNA, 18 nt, Vaccinia virus
aucuuguucagaaauaua

SEQ ID NO: 3259894 - RNA, 20 nt, Vaccinia virus
uaguacuacaauuuguauuu

SEQ ID NO: 3259895 - RNA, 19 nt, Vaccinia virus
agauggaagggucaaacuu

SEQ ID NO: 3259896 - RNA, 15 nt, Vaccinia virus
agaacggagaauugu

SEQ ID NO: 3259897 - RNA, 22 nt, Vaccinia virus
auuaaucaaaugguaaauacug

SEQ ID NO: 3259898 - RNA, 15 nt, Vaccinia virus
ucuaauauuaauauu

SEQ ID NO: 3259899 - RNA, 14 nt, Vaccinia virus
uauaaucaaagauu

SEQ ID NO: 3259900 - RNA, 16 nt, Vaccinia virus
ucaaauuagauuucga

SEQ ID NO: 3259901 - RNA, 20 nt, Vaccinia virus
aauuugggaggcuuaaagug

SEQ ID NO: 3259902 - RNA, 19 nt, Vaccinia virus
acacgauuuaauccaucug

SEQ ID NO: 3259903 - RNA, 19 nt, Vaccinia virus
agaacauacauuuguaaaa

SEQ ID NO: 3259904 - RNA, 16 nt, Vaccinia virus
ugaaucuaacaaagag

SEQ ID NO: 3259905 - RNA, 20 nt, Vaccinia virus
aaguagaugguauuucugaa

SEQ ID NO: 3259906 - RNA, 14 nt, Vaccinia virus
uauccucagacucu

SEQ ID NO: 3259907 - RNA, 17 nt, Vaccinia virus
uuagauaauugugguaa

SEQ ID NO: 3259908 - RNA, 16 nt, Vaccinia virus
cuuuuuuccaaacugc

SEQ ID NO: 3259909 - RNA, 18 nt, Vaccinia virus
aacuucauccguuuccuu

SEQ ID NO: 3259910 - RNA, 19 nt, Vaccinia virus
guguauuaaauagaauauu

SEQ ID NO: 3259911 - RNA, 14 nt, Vaccinia virus
uuuaagcuaguuau

SEQ ID NO: 3259912 - RNA, 20 nt, Vaccinia virus
ucaugccauuaagaaacuag

SEQ ID NO: 3259913 - RNA, 13 nt, Vaccinia virus
ucuuauagaugua

SEQ ID NO: 3259914 - RNA, 12 nt, Vaccinia virus
accgauuucaca

SEQ ID NO: 3259915 - RNA, 18 nt, Vaccinia virus
aaauacaugggaaaugau

SEQ ID NO: 3259916 - RNA, 21 nt, Vaccinia virus
uuaguccugcguuagauguua

SEQ ID NO: 3259917 - RNA, 19 nt, Vaccinia virus
gcauuaacuagauuaauuu

SEQ ID NO: 3259918 - RNA, 22 nt, Vaccinia virus
auuugugccgcauacagaucaa

SEQ ID NO: 3259919 - RNA, 20 nt, Vaccinia virus
aguuuaauauccucagucau

SEQ ID NO: 3259920 - RNA, 14 nt, Vaccinia virus
uaaagucugucaaa

SEQ ID NO: 3259921 - RNA, 17 nt, Vaccinia virus
uaucuaccucuccaaaa

SEQ ID NO: 3259922 - RNA, 22 nt, Vaccinia virus
auguuaaauguagacaaauaua

SEQ ID NO: 3259923 - RNA, 16 nt, Vaccinia virus
agauuuauaauacuuu

SEQ ID NO: 3259924 - RNA, 20 nt, Vaccinia virus
accaaaaugaaaauacuuua

SEQ ID NO: 3259925 - RNA, 15 nt, Vaccinia virus
guuuuguuggagaac

SEQ ID NO: 3259926 - RNA, 23 nt, Vaccinia virus
aauauccacuauugcaacuauaa

SEQ ID NO: 3259927 - RNA, 21 nt, Vaccinia virus
aagauguuuucugucagaaaa

SEQ ID NO: 3259928 - RNA, 22 nt, Vaccinia virus
uaaucaaauuugguguuguuaa

SEQ ID NO: 3259929 - RNA, 18 nt, Vaccinia virus
uguuuccaugacauauua

SEQ ID NO: 3259930 - RNA, 18 nt, Vaccinia virus
auauaguguauaauaaag

SEQ ID NO: 3259931 - RNA, 12 nt, Vaccinia virus
cauuccaaagau

SEQ ID NO: 3259932 - RNA, 17 nt, Vaccinia virus
ucuauugccauuaguuu

SEQ ID NO: 3259933 - RNA, 21 nt, Vaccinia virus
auaguuuccaccgaaagacua

SEQ ID NO: 3259934 - RNA, 16 nt, Vaccinia virus
aucuccaguauuuaca

SEQ ID NO: 3259935 - RNA, 20 nt, Vaccinia virus
acugcaaaacucaaauguua

SEQ ID NO: 3259936 - RNA, 16 nt, Vaccinia virus
aucauccaguuuucca

SEQ ID NO: 3259937 - RNA, 15 nt, Vaccinia virus
uaagaagucauaugu

SEQ ID NO: 3259938 - RNA, 15 nt, Vaccinia virus
acgaauauuacuaau

SEQ ID NO: 3259939 - RNA, 16 nt, Vaccinia virus
agagauuguuaaauua

SEQ ID NO: 3259940 - RNA, 13 nt, Vaccinia virus
uauaaaaugacau

SEQ ID NO: 3259941 - RNA, 15 nt, Vaccinia virus
aaauaucaauuauau

SEQ ID NO: 3259942 - RNA, 23 nt, Vaccinia virus
ccaguacucgggucuaacaucuc

SEQ ID NO: 3259943 - RNA, 14 nt, Vaccinia virus
accuucuucauuuc

SEQ ID NO: 3259944 - RNA, 15 nt, Vaccinia virus
aucgaaaucauuuau

SEQ ID NO: 3259945 - RNA, 15 nt, Vaccinia virus
caaaucuaacuucua

SEQ ID NO: 3259946 - RNA, 18 nt, Vaccinia virus
aauaguccguguaaucca

SEQ ID NO: 3259947 - RNA, 20 nt, Vaccinia virus
acauaagaugucuaugaaua

SEQ ID NO: 3259948 - RNA, 23 nt, Vaccinia virus
gcaucauacgaaaauagauucua

SEQ ID NO: 3259949 - RNA, 19 nt, Vaccinia virus
agagauaggucuaaugcau

SEQ ID NO: 3259950 - RNA, 23 nt, Vaccinia virus
uauaaacuuuauccauaucucua

SEQ ID NO: 3259951 - RNA, 21 nt, Vaccinia virus
gacauacuguauguaaacaau

SEQ ID NO: 3259952 - RNA, 14 nt, Vaccinia virus
uaaacuuuaaugau

SEQ ID NO: 3259953 - RNA, 23 nt, Vaccinia virus
ggugccgcagcaagcauacagac

SEQ ID NO: 3259954 - RNA, 21 nt, Vaccinia virus
agaaaauaacagauauuacaa

SEQ ID NO: 3259955 - RNA, 19 nt, Vaccinia virus
gaauauacuaaucaauaau

SEQ ID NO: 3259956 - RNA, 15 nt, Vaccinia virus
gagacggauacuguc

SEQ ID NO: 3259957 - RNA, 22 nt, Vaccinia virus
ugauaauauuaaaagauggaua

SEQ ID NO: 3259958 - RNA, 21 nt, Vaccinia virus
acucaagcagaaacuuagauu

SEQ ID NO: 3259959 - RNA, 11 nt, Vaccinia virus
uagaauuuaua

SEQ ID NO: 3259960 - RNA, 16 nt, Vaccinia virus
auagauaaucaaaauu

SEQ ID NO: 3259961 - RNA, 18 nt, Vaccinia virus
ggcuagucaagaugauga

SEQ ID NO: 3259962 - RNA, 13 nt, Vaccinia virus
acacaucaaaaua

SEQ ID NO: 3259963 - RNA, 15 nt, Vaccinia virus
guuuuauaacgaagu

SEQ ID NO: 3259964 - RNA, 17 nt, Vaccinia virus
ccacugucacuggaaag

SEQ ID NO: 3259965 - RNA, 17 nt, Vaccinia virus
augguaaauaaauacuu

SEQ ID NO: 3259966 - RNA, 22 nt, Vaccinia virus
auaaaaauaguaucaacaauca

SEQ ID NO: 3259967 - RNA, 17 nt, Vaccinia virus
cuugauacuauccagua

SEQ ID NO: 3259968 - RNA, 17 nt, Vaccinia virus
acauuguuuauggugau

SEQ ID NO: 3259969 - RNA, 20 nt, Vaccinia virus
caucggaaaaaaaucuuuuu

SEQ ID NO: 3259970 - RNA, 21 nt, Vaccinia virus
aauuaguagaaucaaaggaua

SEQ ID NO: 3259971 - RNA, 13 nt, Vaccinia virus
aauauccucaaua

SEQ ID NO: 3259972 - RNA, 14 nt, Vaccinia virus
aauuggaacacaag

SEQ ID NO: 3259973 - RNA, 15 nt, Vaccinia virus
uuggucgauguaaaa

SEQ ID NO: 3259974 - RNA, 12 nt, Vaccinia virus
uaacacaaccaa

SEQ ID NO: 3259975 - RNA, 16 nt, Vaccinia virus
uaucaauaccuuuucu

SEQ ID NO: 3259976 - RNA, 15 nt, Vaccinia virus
auaugauagaaauga

SEQ ID NO: 3259977 - RNA, 15 nt, Vaccinia virus
gaucaacagaaauau

SEQ ID NO: 3259978 - RNA, 17 nt, Vaccinia virus
ggauuacaagaaauaug

SEQ ID NO: 3259979 - RNA, 19 nt, Vaccinia virus
uaugauuuuuaaucaagau

SEQ ID NO: 3259980 - RNA, 18 nt, Vaccinia virus
acugagaaguuauuaucu

SEQ ID NO: 3259981 - RNA, 20 nt, Vaccinia virus
acuaaacacacauuauucag

SEQ ID NO: 3259982 - RNA, 22 nt, Vaccinia virus
cguguauuaaauagaauauuua

SEQ ID NO: 3259983 - RNA, 13 nt, Vaccinia virus
uucgaaaauacua

SEQ ID NO: 3259984 - RNA, 14 nt, Vaccinia virus
uagccaccauaaug

SEQ ID NO: 3259985 - RNA, 19 nt, Vaccinia virus
cauuaggaaauguuucuga

SEQ ID NO: 3259986 - RNA, 23 nt, Vaccinia virus
agacgcuauggcacgaaauaucu

SEQ ID NO: 3259987 - RNA, 21 nt, Vaccinia virus
auccagcuagugaauauauau

SEQ ID NO: 3259988 - RNA, 13 nt, Vaccinia virus
cucuuucuccuuc

SEQ ID NO: 3259989 - RNA, 17 nt, Vaccinia virus
gucaucuuauguuuuua

SEQ ID NO: 3259990 - RNA, 15 nt, Vaccinia virus
auccaugauagaaag

SEQ ID NO: 3259991 - RNA, 20 nt, Vaccinia virus
uuacaaaugaguucugugua

SEQ ID NO: 3259992 - RNA, 16 nt, Vaccinia virus
agauuccuauuuacaa

SEQ ID NO: 3259993 - RNA, 23 nt, Vaccinia virus
ucuuuaauaucgacaauuucaua

SEQ ID NO: 3259994 - RNA, 14 nt, Vaccinia virus
auacuucaaaauuu

SEQ ID NO: 3259995 - RNA, 19 nt, Vaccinia virus
ucuauguugacauguauau

SEQ ID NO: 3259996 - RNA, 19 nt, Vaccinia virus
uccauaaauuuauaauguu

SEQ ID NO: 3259997 - RNA, 18 nt, Vaccinia virus
uagguuuaguaucucaau

SEQ ID NO: 3259998 - RNA, 18 nt, Vaccinia virus
aacaguuacuguuaguau

SEQ ID NO: 3259999 - RNA, 23 nt, Vaccinia virus
uuaacgucuaccgaaacaucguu

SEQ ID NO: 3260000 - RNA, 21 nt, Vaccinia virus
auggaaacggaacagaaacua

SEQ ID NO: 3260001 - RNA, 14 nt, Vaccinia virus
aauauauugaucau

SEQ ID NO: 3260002 - RNA, 14 nt, Vaccinia virus
uugcuaacgguauu

SEQ ID NO: 3260003 - RNA, 16 nt, Vaccinia virus
gaauuguuucuuuuag

SEQ ID NO: 3260004 - RNA, 19 nt, Vaccinia virus
guuuaauacuuauucauau

SEQ ID NO: 3260005 - RNA, 18 nt, Vaccinia virus
cuagagcaucaauguccu

SEQ ID NO: 3260006 - RNA, 19 nt, Vaccinia virus
uauauaucuaucuauuaca

SEQ ID NO: 3260007 - RNA, 18 nt, Vaccinia virus
agcggggucgaucuugug

SEQ ID NO: 3260008 - RNA, 17 nt, Vaccinia virus
uauaaaaccaaggacuu

SEQ ID NO: 3260009 - RNA, 19 nt, Vaccinia virus
ugacguacaaaaaaauaaa

SEQ ID NO: 3260010 - RNA, 20 nt, Vaccinia virus
aguuucaucgauaaaggaua

SEQ ID NO: 3260011 - RNA, 15 nt, Vaccinia virus
aucuauauauguauu

SEQ ID NO: 3260012 - RNA, 16 nt, Vaccinia virus
acuaaucucauuguuu

SEQ ID NO: 3260013 - RNA, 16 nt, Vaccinia virus
gccuguacuuggauuu

SEQ ID NO: 3260014 - RNA, 23 nt, Vaccinia virus
uugaggcagcaaauacugaacca

SEQ ID NO: 3260015 - RNA, 13 nt, Vaccinia virus
acaguuucuguaa

SEQ ID NO: 3260016 - RNA, 18 nt, Vaccinia virus
gauacauuguaugaugau

SEQ ID NO: 3260017 - RNA, 20 nt, Vaccinia virus
caccagaauagcuauggauu

SEQ ID NO: 3260018 - RNA, 15 nt, Vaccinia virus
accaaauuaaugaau

SEQ ID NO: 3260019 - RNA, 12 nt, Vaccinia virus
auuuauaaugag

SEQ ID NO: 3260020 - RNA, 13 nt, Vaccinia virus
uugcaauugguaa

SEQ ID NO: 3260021 - RNA, 15 nt, Vaccinia virus
uauuuaacucaugau

SEQ ID NO: 3260022 - RNA, 17 nt, Vaccinia virus
uaguuaucuaucuuaaa

SEQ ID NO: 3260023 - RNA, 20 nt, Vaccinia virus
aauauagaucgaaaaauaua

SEQ ID NO: 3260024 - RNA, 19 nt, Vaccinia virus
cauuuauaaagacaaacaa

SEQ ID NO: 3260025 - RNA, 19 nt, Vaccinia virus
uauuacgcuuaccaucaaa

SEQ ID NO: 3260026 - RNA, 21 nt, Vaccinia virus
ggaaaagucaaagucguuuaa

SEQ ID NO: 3260027 - RNA, 23 nt, Vaccinia virus
caauauagucuguguuccauaau

SEQ ID NO: 3260028 - RNA, 12 nt, Vaccinia virus
uaauccaaauau

SEQ ID NO: 3260029 - RNA, 23 nt, Vaccinia virus
gaauagccgccggaaacuuucua

SEQ ID NO: 3260030 - RNA, 13 nt, Vaccinia virus
augaucuguuuau

SEQ ID NO: 3260031 - RNA, 22 nt, Vaccinia virus
cacaaauggauguuaauguauu

SEQ ID NO: 3260032 - RNA, 21 nt, Vaccinia virus
aaauagcgauugguguuguaa

SEQ ID NO: 3260033 - RNA, 21 nt, Vaccinia virus
acaucucuggaaauagaauuc

SEQ ID NO: 3260034 - RNA, 23 nt, Vaccinia virus
gcaaacaacaacaaaauaauaau

SEQ ID NO: 3260035 - RNA, 12 nt, Vaccinia virus
gucuuacacauu

SEQ ID NO: 3260036 - RNA, 21 nt, Vaccinia virus
ccaaacucagaaccaaaugau

SEQ ID NO: 3260037 - RNA, 11 nt, Vaccinia virus
guauuuggauu

SEQ ID NO: 3260038 - RNA, 18 nt, Vaccinia virus
augaucaggaaaguuuau

SEQ ID NO: 3260039 - RNA, 15 nt, Vaccinia virus
cgccgcguucucugu

SEQ ID NO: 3260040 - RNA, 19 nt, Vaccinia virus
cuagaaaacgaaaacaucc

SEQ ID NO: 3260041 - RNA, 22 nt, Vaccinia virus
uccaccgacucauuauuuccca

SEQ ID NO: 3260042 - RNA, 21 nt, Vaccinia virus
ucuuuacaguuucuguaauga

SEQ ID NO: 3260043 - RNA, 21 nt, Vaccinia virus
aauaugauuuggccaaaugua

SEQ ID NO: 3260044 - RNA, 24 nt, Vaccinia virus
acuauaggugcguuguauacacau

SEQ ID NO: 3260045 - RNA, 18 nt, Vaccinia virus
uguaauuuagaauacguu

SEQ ID NO: 3260046 - RNA, 12 nt, Vaccinia virus
guucaaauuaag

SEQ ID NO: 3260047 - RNA, 19 nt, Vaccinia virus
aaccugaucuggaaaauaa

SEQ ID NO: 3260048 - RNA, 15 nt, Vaccinia virus
cgaaucuaugauauu

SEQ ID NO: 3260049 - RNA, 18 nt, Vaccinia virus
ugcgccgacgaggaugaa

SEQ ID NO: 3260050 - RNA, 21 nt, Vaccinia virus
cauucacugcagcauuuugag

SEQ ID NO: 3260051 - RNA, 14 nt, Vaccinia virus
cuaacuuuaaacaa

SEQ ID NO: 3260052 - RNA, 23 nt, Vaccinia virus
aucaacuaccuaaggaauauuca

SEQ ID NO: 3260053 - RNA, 23 nt, Vaccinia virus
uauuaagccgccauuaauuacuu

SEQ ID NO: 3260054 - RNA, 22 nt, Vaccinia virus
auauuaauacacauaaugaagu

SEQ ID NO: 3260055 - RNA, 14 nt, Vaccinia virus
auaauuauuuccag

SEQ ID NO: 3260056 - RNA, 15 nt, Vaccinia virus
caugucaacaaaaau

SEQ ID NO: 3260057 - RNA, 15 nt, Vaccinia virus
uucauuaauaucuuu

SEQ ID NO: 3260058 - RNA, 17 nt, Vaccinia virus
uguaugucucaauacua

SEQ ID NO: 3260059 - RNA, 23 nt, Vaccinia virus
aguugacacguuuauuucauaua

SEQ ID NO: 3260060 - RNA, 14 nt, Vaccinia virus
agagaugaaaaauu

SEQ ID NO: 3260061 - RNA, 14 nt, Vaccinia virus
aauuauauguagaa

SEQ ID NO: 3260062 - RNA, 16 nt, Vaccinia virus
auuucuaagagaauga

SEQ ID NO: 3260063 - RNA, 17 nt, Vaccinia virus
aaaaauuuaaagaaugu

SEQ ID NO: 3260064 - RNA, 15 nt, Vaccinia virus
aauucaucuucuaua

SEQ ID NO: 3260065 - RNA, 17 nt, Vaccinia virus
gucuuccuuauguagag

SEQ ID NO: 3260066 - RNA, 13 nt, Vaccinia virus
augaagaaagaaa

SEQ ID NO: 3260067 - RNA, 20 nt, Vaccinia virus
aaauccaugcaaaaaaaugu

SEQ ID NO: 3260068 - RNA, 22 nt, Vaccinia virus
guauccuauuccacauuuuguu

SEQ ID NO: 3260069 - RNA, 19 nt, Vaccinia virus
uuuuccaucuauguagaau

SEQ ID NO: 3260070 - RNA, 14 nt, Vaccinia virus
aauuguuucuuuua

SEQ ID NO: 3260071 - RNA, 11 nt, Vaccinia virus
ugaaauuauuc

SEQ ID NO: 3260072 - RNA, 12 nt, Vaccinia virus
uauuagaauuaa

SEQ ID NO: 3260073 - RNA, 15 nt, Vaccinia virus
aagaguauacagaag

SEQ ID NO: 3260074 - RNA, 21 nt, Vaccinia virus
cauuacuaacuuuaucacaau

SEQ ID NO: 3260075 - RNA, 15 nt, Vaccinia virus
ccguuuaauuuccua

SEQ ID NO: 3260076 - RNA, 19 nt, Vaccinia virus
uagcacauccaucaaagaa

SEQ ID NO: 3260077 - RNA, 13 nt, Vaccinia virus
auuaauuguuaaa

SEQ ID NO: 3260078 - RNA, 12 nt, Vaccinia virus
ucauuaaauguu

SEQ ID NO: 3260079 - RNA, 15 nt, Vaccinia virus
aaucacuauagaaaa

SEQ ID NO: 3260080 - RNA, 21 nt, Vaccinia virus
aaaaauuuuaagcgaugauau

SEQ ID NO: 3260081 - RNA, 16 nt, Vaccinia virus
uaacugcuguguguau

SEQ ID NO: 3260082 - RNA, 19 nt, Vaccinia virus
acggauaucuaauauuaau

SEQ ID NO: 3260083 - RNA, 15 nt, Vaccinia virus
gaaaaaaauucaguu

SEQ ID NO: 3260084 - RNA, 20 nt, Vaccinia virus
aaauaacauauagauuuuau

SEQ ID NO: 3260085 - RNA, 19 nt, Vaccinia virus
uaaaaagaugauauaucua

SEQ ID NO: 3260086 - RNA, 13 nt, Vaccinia virus
uaccuacacuauu

SEQ ID NO: 3260087 - RNA, 18 nt, Vaccinia virus
auaguauuaaugauugcc

SEQ ID NO: 3260088 - RNA, 19 nt, Vaccinia virus
caaauagagauaaaacaag

SEQ ID NO: 3260089 - RNA, 22 nt, Vaccinia virus
ucaaucguuuaaaguaaacuuc

SEQ ID NO: 3260090 - RNA, 22 nt, Vaccinia virus
uauaauguucgccauuuauaua

SEQ ID NO: 3260091 - RNA, 16 nt, Vaccinia virus
uuugguauauacauag

SEQ ID NO: 3260092 - RNA, 21 nt, Vaccinia virus
uguucauaauugcuuuucuaa

SEQ ID NO: 3260093 - RNA, 16 nt, Vaccinia virus
cugaaaagaaaguauc

SEQ ID NO: 3260094 - RNA, 23 nt, Vaccinia virus
uaguaauuuauauuuuuacggua

SEQ ID NO: 3260095 - RNA, 18 nt, Vaccinia virus
aaugcacacaguauuauc

SEQ ID NO: 3260096 - RNA, 15 nt, Vaccinia virus
uauucaguuuauaga

SEQ ID NO: 3260097 - RNA, 16 nt, Vaccinia virus
accauagaagauguua

SEQ ID NO: 3260098 - RNA, 16 nt, Vaccinia virus
aaagaggaucguacau

SEQ ID NO: 3260099 - RNA, 18 nt, Vaccinia virus
gaagcaaugaaaucacuu

SEQ ID NO: 3260100 - RNA, 18 nt, Vaccinia virus
cauauagaugcagaagua

SEQ ID NO: 3260101 - RNA, 18 nt, Vaccinia virus
uaguugauuuauuacuua

SEQ ID NO: 3260102 - RNA, 13 nt, Vaccinia virus
ccauaauaguuua

SEQ ID NO: 3260103 - RNA, 16 nt, Vaccinia virus
cucaucggaucuguaa

SEQ ID NO: 3260104 - RNA, 17 nt, Vaccinia virus
ucucugacauucagaaa

SEQ ID NO: 3260105 - RNA, 15 nt, Vaccinia virus
uguuuuuguuuucau

SEQ ID NO: 3260106 - RNA, 13 nt, Vaccinia virus
uuacaucauuaag

SEQ ID NO: 3260107 - RNA, 14 nt, Vaccinia virus
caaaucaacucaua

SEQ ID NO: 3260108 - RNA, 18 nt, Vaccinia virus
agauauagaagauaaaca

SEQ ID NO: 3260109 - RNA, 21 nt, Vaccinia virus
agaauuauaccgauagauaau

SEQ ID NO: 3260110 - RNA, 14 nt, Vaccinia virus
auaauugcuuuucu

SEQ ID NO: 3260111 - RNA, 20 nt, Vaccinia virus
auauauggauaaugcuguau

SEQ ID NO: 3260112 - RNA, 15 nt, Vaccinia virus
guuauuaucaucauu

SEQ ID NO: 3260113 - RNA, 18 nt, Vaccinia virus
agauaucagagaacuucu

SEQ ID NO: 3260114 - RNA, 18 nt, Vaccinia virus
uuuaaacacucuuucuga

SEQ ID NO: 3260115 - RNA, 22 nt, Vaccinia virus
auacuguauauacuauuauaga

SEQ ID NO: 3260116 - RNA, 14 nt, Vaccinia virus
aguggauucuucua

SEQ ID NO: 3260117 - RNA, 18 nt, Vaccinia virus
uguuguaaggauccuggu

SEQ ID NO: 3260118 - RNA, 15 nt, Vaccinia virus
ugaaugcugaugaac

SEQ ID NO: 3260119 - RNA, 11 nt, Vaccinia virus
uccuguuucau

SEQ ID NO: 3260120 - RNA, 23 nt, Vaccinia virus
uucuccuggagggauaguauaau

SEQ ID NO: 3260121 - RNA, 14 nt, Vaccinia virus
cacuguuaaaguua

SEQ ID NO: 3260122 - RNA, 14 nt, Vaccinia virus
aucaacuacauaau

SEQ ID NO: 3260123 - RNA, 16 nt, Vaccinia virus
aggggagguaaauaua

SEQ ID NO: 3260124 - RNA, 15 nt, Vaccinia virus
uuacguuaauacuaa

SEQ ID NO: 3260125 - RNA, 17 nt, Vaccinia virus
cugacauucagaaagag

SEQ ID NO: 3260126 - RNA, 15 nt, Vaccinia virus
acauucuuauaacau

SEQ ID NO: 3260127 - RNA, 20 nt, Vaccinia virus
uaagucuuacaauguucgaa

SEQ ID NO: 3260128 - RNA, 15 nt, Vaccinia virus
auacauaucaauauc

SEQ ID NO: 3260129 - RNA, 22 nt, Vaccinia virus
cugaaaauuggaguuagguauu

SEQ ID NO: 3260130 - RNA, 19 nt, Vaccinia virus
caguaaccaaauacauauu

SEQ ID NO: 3260131 - RNA, 17 nt, Vaccinia virus
agcuuacaauaaacucc

SEQ ID NO: 3260132 - RNA, 16 nt, Vaccinia virus
ucuuacauucuauaga

SEQ ID NO: 3260133 - RNA, 16 nt, Vaccinia virus
acuauuuggauagaca

SEQ ID NO: 3260134 - RNA, 16 nt, Vaccinia virus
ucaucuucuauauaag

SEQ ID NO: 3260135 - RNA, 15 nt, Vaccinia virus
aauuacagacagcaa

SEQ ID NO: 3260136 - RNA, 16 nt, Vaccinia virus
uauauucgaauucaaa

SEQ ID NO: 3260137 - RNA, 19 nt, Vaccinia virus
auaucgguaccguuaaaga

SEQ ID NO: 3260138 - RNA, 16 nt, Vaccinia virus
uacucguuaguuugga

SEQ ID NO: 3260139 - RNA, 16 nt, Vaccinia virus
aauacugaugcauuuu

SEQ ID NO: 3260140 - RNA, 15 nt, Vaccinia virus
auauuaaugucguau

SEQ ID NO: 3260141 - RNA, 17 nt, Vaccinia virus
aucaaugaguaagacuu

SEQ ID NO: 3260142 - RNA, 19 nt, Vaccinia virus
ucacgauguaggaauauag

SEQ ID NO: 3260143 - RNA, 11 nt, Vaccinia virus
guuuuuacaga

SEQ ID NO: 3260144 - RNA, 13 nt, Vaccinia virus
cuguucuauuuug

SEQ ID NO: 3260145 - RNA, 22 nt, Vaccinia virus
ugcuuaauacaccguuaacaau

SEQ ID NO: 3260146 - RNA, 16 nt, Vaccinia virus
aauauaccauuaaaaa

SEQ ID NO: 3260147 - RNA, 13 nt, Vaccinia virus
uaaagauaaacau

SEQ ID NO: 3260148 - RNA, 14 nt, Vaccinia virus
ucugacauaaacau

SEQ ID NO: 3260149 - RNA, 13 nt, Vaccinia virus
aaguuauagaaug

SEQ ID NO: 3260150 - RNA, 22 nt, Vaccinia virus
uuaacgauuggaaaucauuaac

SEQ ID NO: 3260151 - RNA, 21 nt, Vaccinia virus
auacauaccugauuagaauuc

SEQ ID NO: 3260152 - RNA, 20 nt, Vaccinia virus
guauccauuuuauaucacua

SEQ ID NO: 3260153 - RNA, 12 nt, Vaccinia virus
uauaauaucuuu

SEQ ID NO: 3260154 - RNA, 12 nt, Vaccinia virus
auauauuuguau

SEQ ID NO: 3260155 - RNA, 13 nt, Vaccinia virus
cuauguuuauaga

SEQ ID NO: 3260156 - RNA, 17 nt, Vaccinia virus
auuuguucaagauagau

SEQ ID NO: 3260157 - RNA, 16 nt, Vaccinia virus
aaagcgcuauagagua

SEQ ID NO: 3260158 - RNA, 19 nt, Vaccinia virus
caauuuauacggauuucua

SEQ ID NO: 3260159 - RNA, 13 nt, Vaccinia virus
gauuguguuauau

SEQ ID NO: 3260160 - RNA, 17 nt, Vaccinia virus
uaaagaaaugucuacau

SEQ ID NO: 3260161 - RNA, 22 nt, Vaccinia virus
caaacgugaguauuuuacucau

SEQ ID NO: 3260162 - RNA, 18 nt, Vaccinia virus
ucgggacgcguauauguu

SEQ ID NO: 3260163 - RNA, 15 nt, Vaccinia virus
aguuuguuuuggaaa

SEQ ID NO: 3260164 - RNA, 14 nt, Vaccinia virus
caaaucacugaaaa

SEQ ID NO: 3260165 - RNA, 14 nt, Vaccinia virus
aaugcagaaaugau

SEQ ID NO: 3260166 - RNA, 13 nt, Vaccinia virus
cauagcaauacuu

SEQ ID NO: 3260167 - RNA, 18 nt, Vaccinia virus
uaucaccguuaaugaggu

SEQ ID NO: 3260168 - RNA, 13 nt, Vaccinia virus
gauaauuauccau

SEQ ID NO: 3260169 - RNA, 13 nt, Vaccinia virus
auacuauauguau

SEQ ID NO: 3260170 - RNA, 20 nt, Vaccinia virus
uaucauuuugauuaauuguu

SEQ ID NO: 3260171 - RNA, 19 nt, Vaccinia virus
ucaaaguccggauguauua

SEQ ID NO: 3260172 - RNA, 22 nt, Vaccinia virus
ucagaauaggaugaauauagua

SEQ ID NO: 3260173 - RNA, 18 nt, Vaccinia virus
augcgauucaaaaaagaa

SEQ ID NO: 3260174 - RNA, 20 nt, Vaccinia virus
uauacggcuacaauuucaua

SEQ ID NO: 3260175 - RNA, 14 nt, Vaccinia virus
augaauaaguguga

SEQ ID NO: 3260176 - RNA, 17 nt, Vaccinia virus
auuaaauguuugaucaa

SEQ ID NO: 3260177 - RNA, 19 nt, Vaccinia virus
auugauaucgcauagaaau

SEQ ID NO: 3260178 - RNA, 16 nt, Vaccinia virus
auagauauaauuuuau

SEQ ID NO: 3260179 - RNA, 19 nt, Vaccinia virus
acaaauucuauauauguuu

SEQ ID NO: 3260180 - RNA, 15 nt, Vaccinia virus
uaacagauacauaaa

SEQ ID NO: 3260181 - RNA, 22 nt, Vaccinia virus
cauuuauggguaucaaaaacuu

SEQ ID NO: 3260182 - RNA, 16 nt, Vaccinia virus
ugauagagacaaacua

SEQ ID NO: 3260183 - RNA, 14 nt, Vaccinia virus
aucaugaaaugaug

SEQ ID NO: 3260184 - RNA, 18 nt, Vaccinia virus
cauaguuuuuacacauag

SEQ ID NO: 3260185 - RNA, 16 nt, Vaccinia virus
uagucaaucaaagaga

SEQ ID NO: 3260186 - RNA, 12 nt, Vaccinia virus
auuuugaggaaa

SEQ ID NO: 3260187 - RNA, 20 nt, Vaccinia virus
acuauaguacaccuagagaa

SEQ ID NO: 3260188 - RNA, 15 nt, Vaccinia virus
aauauaauaaauaua

SEQ ID NO: 3260189 - RNA, 10 nt, Vaccinia virus
agauauuaau

SEQ ID NO: 3260190 - RNA, 18 nt, Vaccinia virus
guaauauggaauaguguu

SEQ ID NO: 3260191 - RNA, 13 nt, Vaccinia virus
cauguauccacuu

SEQ ID NO: 3260192 - RNA, 23 nt, Vaccinia virus
aauauuguuuuucacuuuuuaua

SEQ ID NO: 3260193 - RNA, 14 nt, Vaccinia virus
aaagacaaauauau

SEQ ID NO: 3260194 - RNA, 13 nt, Vaccinia virus
uuaaaaauuuuca

SEQ ID NO: 3260195 - RNA, 14 nt, Vaccinia virus
auauuagaaauaca

SEQ ID NO: 3260196 - RNA, 21 nt, Vaccinia virus
acagauguaaauauauuuaca

SEQ ID NO: 3260197 - RNA, 15 nt, Vaccinia virus
agauugaaauuauau

SEQ ID NO: 3260198 - RNA, 13 nt, Vaccinia virus
ucaagucaaugau

SEQ ID NO: 3260199 - RNA, 16 nt, Vaccinia virus
uagaaguuguaaauga

SEQ ID NO: 3260200 - RNA, 18 nt, Vaccinia virus
auaacugguucaaaauua

SEQ ID NO: 3260201 - RNA, 20 nt, Vaccinia virus
aauaguuuuuuuguuuccuu

SEQ ID NO: 3260202 - RNA, 19 nt, Vaccinia virus
agcucauaugauuucagua

SEQ ID NO: 3260203 - RNA, 20 nt, Vaccinia virus
ucauuguccagauugaacau

SEQ ID NO: 3260204 - RNA, 17 nt, Vaccinia virus
auaaacaugucuauugu

SEQ ID NO: 3260205 - RNA, 20 nt, Vaccinia virus
cauaaacuuucuagacaucu

SEQ ID NO: 3260206 - RNA, 20 nt, Vaccinia virus
auagaugcaagguauaaccu

SEQ ID NO: 3260207 - RNA, 13 nt, Vaccinia virus
uguuuaauacuua

SEQ ID NO: 3260208 - RNA, 20 nt, Vaccinia virus
aaucuuuguucuaaaaacug

SEQ ID NO: 3260209 - RNA, 22 nt, Vaccinia virus
uggucaauagcgauaugugauu

SEQ ID NO: 3260210 - RNA, 13 nt, Vaccinia virus
ucagacaacaucu

SEQ ID NO: 3260211 - RNA, 19 nt, Vaccinia virus
auuaugauacucuuauaga

SEQ ID NO: 3260212 - RNA, 20 nt, Vaccinia virus
gaaauguuauauauaaaaga

SEQ ID NO: 3260213 - RNA, 17 nt, Vaccinia virus
augacaacucaaacauc

SEQ ID NO: 3260214 - RNA, 16 nt, Vaccinia virus
ccaaagucgauaacga

SEQ ID NO: 3260215 - RNA, 23 nt, Vaccinia virus
ugagaaaagguucuaucaacaau

SEQ ID NO: 3260216 - RNA, 20 nt, Vaccinia virus
auggauuuaucauaucaugg

SEQ ID NO: 3260217 - RNA, 21 nt, Vaccinia virus
cuaacaaaaauuaugaaauaa

SEQ ID NO: 3260218 - RNA, 18 nt, Vaccinia virus
auauuuacaguuacuaaa

SEQ ID NO: 3260219 - RNA, 14 nt, Vaccinia virus
cuauaaacugaaua

SEQ ID NO: 3260220 - RNA, 18 nt, Vaccinia virus
aaauaccuuuaacuauau

SEQ ID NO: 3260221 - RNA, 22 nt, Vaccinia virus
uuggcauuuaacagauucacaa

SEQ ID NO: 3260222 - RNA, 18 nt, Vaccinia virus
uauuaacgcaccuauaaa

SEQ ID NO: 3260223 - RNA, 16 nt, Vaccinia virus
auuaagcaacaugucu

SEQ ID NO: 3260224 - RNA, 20 nt, Vaccinia virus
uaaaaucucagauugugcau

SEQ ID NO: 3260225 - RNA, 23 nt, Vaccinia virus
cgaagugcguguaacaaaguauu

SEQ ID NO: 3260226 - RNA, 16 nt, Vaccinia virus
aacaucucucauaaga

SEQ ID NO: 3260227 - RNA, 19 nt, Vaccinia virus
cacuuaaugguauaaugau

SEQ ID NO: 3260228 - RNA, 20 nt, Vaccinia virus
aaaauauuaaaccucuuucu

SEQ ID NO: 3260229 - RNA, 18 nt, Vaccinia virus
uucauuagauaacagugu

SEQ ID NO: 3260230 - RNA, 21 nt, Vaccinia virus
aaaagacgcuuguuaauaagu

SEQ ID NO: 3260231 - RNA, 17 nt, Vaccinia virus
auaauaaaaguuaucca

SEQ ID NO: 3260232 - RNA, 23 nt, Vaccinia virus
uuauagcguacaauacauguaca

SEQ ID NO: 3260233 - RNA, 18 nt, Vaccinia virus
uuccugaaggaaaugaac

SEQ ID NO: 3260234 - RNA, 16 nt, Vaccinia virus
gaaauaauuuuuaguu

SEQ ID NO: 3260235 - RNA, 19 nt, Vaccinia virus
gaaaaauuauaauguuucc

SEQ ID NO: 3260236 - RNA, 17 nt, Vaccinia virus
acgauacuaugcauauu

SEQ ID NO: 3260237 - RNA, 16 nt, Vaccinia virus
uuaacacucucugcca

SEQ ID NO: 3260238 - RNA, 22 nt, Vaccinia virus
acaaguuauacgucauuucauc

SEQ ID NO: 3260239 - RNA, 18 nt, Vaccinia virus
aacaacaaauaaaaaggu

SEQ ID NO: 3260240 - RNA, 21 nt, Vaccinia virus
agcguacagauacgaugauga

SEQ ID NO: 3260241 - RNA, 16 nt, Vaccinia virus
uauuccaaucauugau

SEQ ID NO: 3260242 - RNA, 23 nt, Vaccinia virus
caugaaaccacugucuaaaugua

SEQ ID NO: 3260243 - RNA, 17 nt, Vaccinia virus
acugcugugaauacagc

SEQ ID NO: 3260244 - RNA, 16 nt, Vaccinia virus
ugggucuaguuuucag

SEQ ID NO: 3260245 - RNA, 17 nt, Vaccinia virus
acacuaauauuaugaug

SEQ ID NO: 3260246 - RNA, 20 nt, Vaccinia virus
agagaggcugcugaaaauaa

SEQ ID NO: 3260247 - RNA, 14 nt, Vaccinia virus
gacgauuucugaau

SEQ ID NO: 3260248 - RNA, 13 nt, Vaccinia virus
aaaugauuuugua

SEQ ID NO: 3260249 - RNA, 16 nt, Vaccinia virus
agaauacugaucuucu

SEQ ID NO: 3260250 - RNA, 14 nt, Vaccinia virus
uuaaauuauuauua

SEQ ID NO: 3260251 - RNA, 23 nt, Vaccinia virus
uaucaucgauaguauaauuauau

SEQ ID NO: 3260252 - RNA, 14 nt, Vaccinia virus
acuuuauauuuccu

SEQ ID NO: 3260253 - RNA, 16 nt, Vaccinia virus
uaguauaccaugaccu

SEQ ID NO: 3260254 - RNA, 11 nt, Vaccinia virus
uuccaaacauu

SEQ ID NO: 3260255 - RNA, 13 nt, Vaccinia virus
uucaaaauuauuu

SEQ ID NO: 3260256 - RNA, 21 nt, Vaccinia virus
auaucgguaccguuaaagaug

SEQ ID NO: 3260257 - RNA, 24 nt, Vaccinia virus
auauucuuaaaagguuucauauuu

SEQ ID NO: 3260258 - RNA, 20 nt, Vaccinia virus
uaccagauauuauacaaaau

SEQ ID NO: 3260259 - RNA, 16 nt, Vaccinia virus
auggaguacuauuuua

SEQ ID NO: 3260260 - RNA, 11 nt, Vaccinia virus
cgaaugauaua

SEQ ID NO: 3260261 - RNA, 21 nt, Vaccinia virus
uagaucgucuaaaagaauugc

SEQ ID NO: 3260262 - RNA, 20 nt, Vaccinia virus
aucuaguuguggaaauacuu

SEQ ID NO: 3260263 - RNA, 23 nt, Vaccinia virus
aucaacgaguucaaauaugaaau

SEQ ID NO: 3260264 - RNA, 22 nt, Vaccinia virus
auccguuacaauuuguuaaaaa

SEQ ID NO: 3260265 - RNA, 15 nt, Vaccinia virus
acuuuuuauacuaau

SEQ ID NO: 3260266 - RNA, 21 nt, Vaccinia virus
auauagaaccugaucuggaaa

SEQ ID NO: 3260267 - RNA, 18 nt, Vaccinia virus
ucguguauaacaucuuug

SEQ ID NO: 3260268 - RNA, 17 nt, Vaccinia virus
aaaugguaaauacugua

SEQ ID NO: 3260269 - RNA, 16 nt, Vaccinia virus
gagguauauaucauga

SEQ ID NO: 3260270 - RNA, 23 nt, Vaccinia virus
auuauaugggguuacucuaaauc

SEQ ID NO: 3260271 - RNA, 22 nt, Vaccinia virus
uauuacaauuugcauguugcau

SEQ ID NO: 3260272 - RNA, 14 nt, Vaccinia virus
augauucaaauccu

SEQ ID NO: 3260273 - RNA, 22 nt, Vaccinia virus
uuaaauaacccgaguauugaaa

SEQ ID NO: 3260274 - RNA, 20 nt, Vaccinia virus
aguaucaacaaucaacuaau

SEQ ID NO: 3260275 - RNA, 17 nt, Vaccinia virus
ccaauuacaaaaacuac

SEQ ID NO: 3260276 - RNA, 16 nt, Vaccinia virus
ggaaccucgagaaugu

SEQ ID NO: 3260277 - RNA, 23 nt, Vaccinia virus
gaaugccacgguuccaaguauau

SEQ ID NO: 3260278 - RNA, 22 nt, Vaccinia virus
accauaacuguauaaaauggag

SEQ ID NO: 3260279 - RNA, 15 nt, Vaccinia virus
gaauagauuacucau

SEQ ID NO: 3260280 - RNA, 17 nt, Vaccinia virus
agaaugugauaagaucg

SEQ ID NO: 3260281 - RNA, 14 nt, Vaccinia virus
accgaccuguauac

SEQ ID NO: 3260282 - RNA, 13 nt, Vaccinia virus
cuaacguauucua

SEQ ID NO: 3260283 - RNA, 23 nt, Vaccinia virus
agugugaauaugaucuucaucua

SEQ ID NO: 3260284 - RNA, 21 nt, Vaccinia virus
cuuaucacgugcaaggcauuu

SEQ ID NO: 3260285 - RNA, 14 nt, Vaccinia virus
uuacuuaaaugccu

SEQ ID NO: 3260286 - RNA, 17 nt, Vaccinia virus
ccuuuuccuuaucuuca

SEQ ID NO: 3260287 - RNA, 23 nt, Vaccinia virus
uguauucagaauuaauagauaua

SEQ ID NO: 3260288 - RNA, 20 nt, Vaccinia virus
aguaaagauuucaaagaugu

SEQ ID NO: 3260289 - RNA, 16 nt, Vaccinia virus
uacugcuggaaaauaa

SEQ ID NO: 3260290 - RNA, 13 nt, Vaccinia virus
cuuauuaacauuu

SEQ ID NO: 3260291 - RNA, 22 nt, Vaccinia virus
guaaaccgauaguguauaaaga

SEQ ID NO: 3260292 - RNA, 23 nt, Vaccinia virus
ugguacguaaccgaaucuuccca

SEQ ID NO: 3260293 - RNA, 19 nt, Vaccinia virus
acuuuaaauacuuaacaga

SEQ ID NO: 3260294 - RNA, 21 nt, Vaccinia virus
aauaauuuugaagcauuggaa

SEQ ID NO: 3260295 - RNA, 15 nt, Vaccinia virus
uuuccuuccaaugau

SEQ ID NO: 3260296 - RNA, 14 nt, Vaccinia virus
uaacuuaauuuauu

SEQ ID NO: 3260297 - RNA, 14 nt, Vaccinia virus
uaucauaauuaaau

SEQ ID NO: 3260298 - RNA, 14 nt, Vaccinia virus
uucagaauuucuac

SEQ ID NO: 3260299 - RNA, 18 nt, Vaccinia virus
auuuaaggacuuaacaau

SEQ ID NO: 3260300 - RNA, 15 nt, Vaccinia virus
ucuguaaauaguuuu

SEQ ID NO: 3260301 - RNA, 15 nt, Vaccinia virus
uaccuuuaaaauaua

SEQ ID NO: 3260302 - RNA, 21 nt, Vaccinia virus
uuacauauuucgacaaaaaga

SEQ ID NO: 3260303 - RNA, 16 nt, Vaccinia virus
auggaucuauucaaga

SEQ ID NO: 3260304 - RNA, 19 nt, Vaccinia virus
aauauuauauaaacauuug

SEQ ID NO: 3260305 - RNA, 17 nt, Vaccinia virus
auaguagaguaaacauu

SEQ ID NO: 3260306 - RNA, 21 nt, Vaccinia virus
uugcagacaaacgaagaaaga

SEQ ID NO: 3260307 - RNA, 16 nt, Vaccinia virus
agcgcuuccuaaauaa

SEQ ID NO: 3260308 - RNA, 19 nt, Vaccinia virus
auacuauuaauuguaaaug

SEQ ID NO: 3260309 - RNA, 14 nt, Vaccinia virus
uugcucguaaaaga

SEQ ID NO: 3260310 - RNA, 20 nt, Vaccinia virus
aucuuuuucuacgucaaaau

SEQ ID NO: 3260311 - RNA, 21 nt, Vaccinia virus
gccauugcugccacucauaau

SEQ ID NO: 3260312 - RNA, 16 nt, Vaccinia virus
gauaacacauuuucau

SEQ ID NO: 3260313 - RNA, 13 nt, Vaccinia virus
aaagauaacuauu

SEQ ID NO: 3260314 - RNA, 17 nt, Vaccinia virus
aguuaauauuauugggu

SEQ ID NO: 3260315 - RNA, 15 nt, Vaccinia virus
gaaaaaguaaaugau

SEQ ID NO: 3260316 - RNA, 12 nt, Vaccinia virus
ucacuucagaaa

SEQ ID NO: 3260317 - RNA, 19 nt, Vaccinia virus
uacaucgguaucuagaucu

SEQ ID NO: 3260318 - RNA, 17 nt, Vaccinia virus
caucacuauauguucca

SEQ ID NO: 3260319 - RNA, 19 nt, Vaccinia virus
aacucuuucgaauacuuau

SEQ ID NO: 3260320 - RNA, 17 nt, Vaccinia virus
ugauuaguauuuucuau

SEQ ID NO: 3260321 - RNA, 23 nt, Vaccinia virus
auuuccaucucuaucuaauacag

SEQ ID NO: 3260322 - RNA, 11 nt, Vaccinia virus
uaaauuucaau

SEQ ID NO: 3260323 - RNA, 18 nt, Vaccinia virus
ugaagaaauaauuucuac

SEQ ID NO: 3260324 - RNA, 13 nt, Vaccinia virus
uucuuaauaaucg

SEQ ID NO: 3260325 - RNA, 17 nt, Vaccinia virus
aaauaaucggagaaugu

SEQ ID NO: 3260326 - RNA, 23 nt, Vaccinia virus
uagcuaugaacuuguuuaaugac

SEQ ID NO: 3260327 - RNA, 17 nt, Vaccinia virus
uauaacauuaauaucaa

SEQ ID NO: 3260328 - RNA, 19 nt, Vaccinia virus
ugaugcauucgacucaaca

SEQ ID NO: 3260329 - RNA, 13 nt, Vaccinia virus
aaucuauaauauc

SEQ ID NO: 3260330 - RNA, 13 nt, Vaccinia virus
gcaaauucuaguc

SEQ ID NO: 3260331 - RNA, 20 nt, Vaccinia virus
gauaucaguagaugcacaau

SEQ ID NO: 3260332 - RNA, 13 nt, Vaccinia virus
ucagaaauuauuc

SEQ ID NO: 3260333 - RNA, 14 nt, Vaccinia virus
uggagaucuagaaa

SEQ ID NO: 3260334 - RNA, 17 nt, Vaccinia virus
acuuuaacguauaaaug

SEQ ID NO: 3260335 - RNA, 17 nt, Vaccinia virus
uuuuaacgauaguaaac

SEQ ID NO: 3260336 - RNA, 15 nt, Vaccinia virus
agcgaaggagaccac

SEQ ID NO: 3260337 - RNA, 22 nt, Vaccinia virus
auuaacuccgaggcacauacau

SEQ ID NO: 3260338 - RNA, 23 nt, Vaccinia virus
cucuuuugaugauaaauuuccaa

SEQ ID NO: 3260339 - RNA, 13 nt, Vaccinia virus
uuauaaaaacuuu

SEQ ID NO: 3260340 - RNA, 13 nt, Vaccinia virus
aacuacuugcaua

SEQ ID NO: 3260341 - RNA, 16 nt, Vaccinia virus
aagucuuacaauguuc

SEQ ID NO: 3260342 - RNA, 18 nt, Vaccinia virus
cauucuugguuguggaua

SEQ ID NO: 3260343 - RNA, 21 nt, Vaccinia virus
ucguuccgccaaauuuucauu

SEQ ID NO: 3260344 - RNA, 22 nt, Vaccinia virus
aaucuccgcaauacauuucuca

SEQ ID NO: 3260345 - RNA, 19 nt, Vaccinia virus
guuuccuggauaaaccaca

SEQ ID NO: 3260346 - RNA, 17 nt, Vaccinia virus
ggaauaugacuauuuuc

SEQ ID NO: 3260347 - RNA, 17 nt, Vaccinia virus
agauguuaaaugaauua

SEQ ID NO: 3260348 - RNA, 20 nt, Vaccinia virus
uccuuaagauguuugagaau

SEQ ID NO: 3260349 - RNA, 18 nt, Vaccinia virus
caccacacgacaaugaac

SEQ ID NO: 3260350 - RNA, 16 nt, Vaccinia virus
uagcggguauccccgu

SEQ ID NO: 3260351 - RNA, 16 nt, Vaccinia virus
gugaauauauauguua

SEQ ID NO: 3260352 - RNA, 14 nt, Vaccinia virus
aagacggggauuuc

SEQ ID NO: 3260353 - RNA, 15 nt, Vaccinia virus
gauaacaaauuaaag

SEQ ID NO: 3260354 - RNA, 21 nt, Vaccinia virus
guuuacaaacugaauaauauc

SEQ ID NO: 3260355 - RNA, 24 nt, Vaccinia virus
aucugacauaaacauaucaaaaga

SEQ ID NO: 3260356 - RNA, 14 nt, Vaccinia virus
auauuagaaucuac

SEQ ID NO: 3260357 - RNA, 20 nt, Vaccinia virus
aauaggguaucuaauuuccu

SEQ ID NO: 3260358 - RNA, 18 nt, Vaccinia virus
uuaucaaaacauauagau

SEQ ID NO: 3260359 - RNA, 17 nt, Vaccinia virus
uacuaggagaauuauuu

SEQ ID NO: 3260360 - RNA, 16 nt, Vaccinia virus
acgcaguuuuucuuau

SEQ ID NO: 3260361 - RNA, 20 nt, Vaccinia virus
ggauuugguaagacuauuac

SEQ ID NO: 3260362 - RNA, 18 nt, Vaccinia virus
acaaaagugaauauauau

SEQ ID NO: 3260363 - RNA, 18 nt, Vaccinia virus
cucuaucauggcaauaac

SEQ ID NO: 3260364 - RNA, 19 nt, Vaccinia virus
aauauuauucuuugauucg

SEQ ID NO: 3260365 - RNA, 11 nt, Vaccinia virus
aaucuagcauu

SEQ ID NO: 3260366 - RNA, 14 nt, Vaccinia virus
auaggugaaaagau

SEQ ID NO: 3260367 - RNA, 12 nt, Vaccinia virus
guauuuggaaag

SEQ ID NO: 3260368 - RNA, 17 nt, Vaccinia virus
aauuauagaacgaagua

SEQ ID NO: 3260369 - RNA, 14 nt, Vaccinia virus
aaaguucaacauga

SEQ ID NO: 3260370 - RNA, 19 nt, Vaccinia virus
aauuccggauacaugaaca

SEQ ID NO: 3260371 - RNA, 22 nt, Vaccinia virus
uuguugagaugcugcuccugga

SEQ ID NO: 3260372 - RNA, 12 nt, Vaccinia virus
uucuuaagaaau

SEQ ID NO: 3260373 - RNA, 15 nt, Vaccinia virus
cauaauccucaucug

SEQ ID NO: 3260374 - RNA, 17 nt, Vaccinia virus
ucgcgauuaguguauac

SEQ ID NO: 3260375 - RNA, 17 nt, Vaccinia virus
uucauucguaaaucuuu

SEQ ID NO: 3260376 - RNA, 19 nt, Vaccinia virus
uccaucgaugauacaugua

SEQ ID NO: 3260377 - RNA, 15 nt, Vaccinia virus
cgauuuuaucaucuu

SEQ ID NO: 3260378 - RNA, 19 nt, Vaccinia virus
uuaagauuuuaaauguaua

SEQ ID NO: 3260379 - RNA, 18 nt, Vaccinia virus
aaaacugcguuguaucau

SEQ ID NO: 3260380 - RNA, 15 nt, Vaccinia virus
aacuaauaugauccu

SEQ ID NO: 3260381 - RNA, 21 nt, Vaccinia virus
aacaucuuuguaaacagauau

SEQ ID NO: 3260382 - RNA, 17 nt, Vaccinia virus
aaauauauuuucauuua

SEQ ID NO: 3260383 - RNA, 16 nt, Vaccinia virus
uguuuaccacaaugua

SEQ ID NO: 3260384 - RNA, 21 nt, Vaccinia virus
ugauauacaaugcucaguaaa

SEQ ID NO: 3260385 - RNA, 17 nt, Vaccinia virus
aauauuucauuagaugu

SEQ ID NO: 3260386 - RNA, 13 nt, Vaccinia virus
uauauguuuucau

SEQ ID NO: 3260387 - RNA, 17 nt, Vaccinia virus
caauuauguaucaauau

SEQ ID NO: 3260388 - RNA, 18 nt, Vaccinia virus
auagcuauucuucuuuaa

SEQ ID NO: 3260389 - RNA, 21 nt, Vaccinia virus
guucuaaugugauucucugaa

SEQ ID NO: 3260390 - RNA, 18 nt, Vaccinia virus
guucauaagucuaauaga

SEQ ID NO: 3260391 - RNA, 22 nt, Vaccinia virus
aaugaguuauuaagcaauauau

SEQ ID NO: 3260392 - RNA, 23 nt, Vaccinia virus
guaaaaguacagaauuaauuaga

SEQ ID NO: 3260393 - RNA, 17 nt, Vaccinia virus
aaugcucaguaaaugua

SEQ ID NO: 3260394 - RNA, 23 nt, Vaccinia virus
uaacagcaauaguauaauuauau

SEQ ID NO: 3260395 - RNA, 22 nt, Vaccinia virus
aauauaaaagaauauguauauc

SEQ ID NO: 3260396 - RNA, 17 nt, Vaccinia virus
auaacaggcuaaaaugu

SEQ ID NO: 3260397 - RNA, 20 nt, Vaccinia virus
guacuccucccauaauacuu

SEQ ID NO: 3260398 - RNA, 17 nt, Vaccinia virus
auaucauaaucuaaaau

SEQ ID NO: 3260399 - RNA, 18 nt, Vaccinia virus
auuuaacucaugaugaag

SEQ ID NO: 3260400 - RNA, 20 nt, Vaccinia virus
auuuaaggcuuuaaaauuga

SEQ ID NO: 3260401 - RNA, 16 nt, Vaccinia virus
cuaggauccuuuagaa

SEQ ID NO: 3260402 - RNA, 22 nt, Vaccinia virus
agauuuauuugauaaucauguu

SEQ ID NO: 3260403 - RNA, 16 nt, Vaccinia virus
auucuauuaaugucua

SEQ ID NO: 3260404 - RNA, 17 nt, Vaccinia virus
uaauucucauuaaaugg

SEQ ID NO: 3260405 - RNA, 20 nt, Vaccinia virus
uguauaauaagaugcaaaca

SEQ ID NO: 3260406 - RNA, 15 nt, Vaccinia virus
auacuguauauacua

SEQ ID NO: 3260407 - RNA, 17 nt, Vaccinia virus
ugucuuagaacaacauu

SEQ ID NO: 3260408 - RNA, 14 nt, Vaccinia virus
accgagggaaaauc

SEQ ID NO: 3260409 - RNA, 22 nt, Vaccinia virus
aucucuauaauaucuaguuuuu

SEQ ID NO: 3260410 - RNA, 16 nt, Vaccinia virus
uugugcuuaauuauuu

SEQ ID NO: 3260411 - RNA, 12 nt, Vaccinia virus
uccauuaaugug

SEQ ID NO: 3260412 - RNA, 23 nt, Vaccinia virus
aauaacucucgugcuucagaaaa

SEQ ID NO: 3260413 - RNA, 18 nt, Vaccinia virus
aaauacauaauuuuguaa

SEQ ID NO: 3260414 - RNA, 22 nt, Vaccinia virus
acguuugguaauggcaauguau

SEQ ID NO: 3260415 - RNA, 16 nt, Vaccinia virus
agugcuacuuuaagau

SEQ ID NO: 3260416 - RNA, 23 nt, Vaccinia virus
auauuaacgcguuuuaugaauga

SEQ ID NO: 3260417 - RNA, 15 nt, Vaccinia virus
agaaaauuuaauaaa

SEQ ID NO: 3260418 - RNA, 21 nt, Vaccinia virus
uaagaaucgcgauucuaaaac

SEQ ID NO: 3260419 - RNA, 14 nt, Vaccinia virus
aucuggcucucucu

SEQ ID NO: 3260420 - RNA, 16 nt, Vaccinia virus
agaugucuuauuaaaa

SEQ ID NO: 3260421 - RNA, 14 nt, Vaccinia virus
agaaucucaugaau

SEQ ID NO: 3260422 - RNA, 15 nt, Vaccinia virus
caguauauaucauuu

SEQ ID NO: 3260423 - RNA, 15 nt, Vaccinia virus
auuaaacagaaaugg

SEQ ID NO: 3260424 - RNA, 20 nt, Vaccinia virus
agcugaaucugauaaauaua

SEQ ID NO: 3260425 - RNA, 17 nt, Vaccinia virus
aaauauggaagcgaaug

SEQ ID NO: 3260426 - RNA, 22 nt, Vaccinia virus
aguauaaacgccauaauacuca

SEQ ID NO: 3260427 - RNA, 16 nt, Vaccinia virus
auaucaucuacauaau

SEQ ID NO: 3260428 - RNA, 13 nt, Vaccinia virus
auauuauuaauaa

SEQ ID NO: 3260429 - RNA, 22 nt, Vaccinia virus
cguugcgaagaaaaaaauggaa

SEQ ID NO: 3260430 - RNA, 21 nt, Vaccinia virus
uguuucuacuccauaauacuc

SEQ ID NO: 3260431 - RNA, 13 nt, Vaccinia virus
cuucuagauaucc

SEQ ID NO: 3260432 - RNA, 20 nt, Vaccinia virus
auuuuuaacagcaacacauu

SEQ ID NO: 3260433 - RNA, 15 nt, Vaccinia virus
agaucuaauuuuguu

SEQ ID NO: 3260434 - RNA, 14 nt, Vaccinia virus
uauaauauacucuu

SEQ ID NO: 3260435 - RNA, 17 nt, Vaccinia virus
aaaauauguaauaauca

SEQ ID NO: 3260436 - RNA, 18 nt, Vaccinia virus
uacaucuaguucuuugaa

SEQ ID NO: 3260437 - RNA, 18 nt, Vaccinia virus
aucuauggaauuaccacu

SEQ ID NO: 3260438 - RNA, 15 nt, Vaccinia virus
auccaagaaaaaguc

SEQ ID NO: 3260439 - RNA, 15 nt, Vaccinia virus
cuagagauaaaaucu

SEQ ID NO: 3260440 - RNA, 21 nt, Vaccinia virus
agaugccaagauaucuauaua

SEQ ID NO: 3260441 - RNA, 14 nt, Vaccinia virus
agcggcuacuaaaa

SEQ ID NO: 3260442 - RNA, 22 nt, Vaccinia virus
uuaaucuuggcuccauacugua

SEQ ID NO: 3260443 - RNA, 17 nt, Vaccinia virus
cauccuacuaugcaauu

SEQ ID NO: 3260444 - RNA, 19 nt, Vaccinia virus
gcgguuuaauaaauguuuu

SEQ ID NO: 3260445 - RNA, 19 nt, Vaccinia virus
guaauaccauguuuaagau

SEQ ID NO: 3260446 - RNA, 18 nt, Vaccinia virus
agaaauacuaaaaaaugu

SEQ ID NO: 3260447 - RNA, 20 nt, Vaccinia virus
auauagauagcguauaucuc

SEQ ID NO: 3260448 - RNA, 11 nt, Vaccinia virus
aauacagaaug

SEQ ID NO: 3260449 - RNA, 23 nt, Vaccinia virus
aaaaagaguuucaaaaauauuca

SEQ ID NO: 3260450 - RNA, 13 nt, Vaccinia virus
ugacgauauuucu

SEQ ID NO: 3260451 - RNA, 20 nt, Vaccinia virus
auuagauggagaguauauuu

SEQ ID NO: 3260452 - RNA, 16 nt, Vaccinia virus
gauuguugccguaaau

SEQ ID NO: 3260453 - RNA, 20 nt, Vaccinia virus
agcuauuaucaaauacugua

SEQ ID NO: 3260454 - RNA, 20 nt, Vaccinia virus
augcucgcaacauuaacauc

SEQ ID NO: 3260455 - RNA, 11 nt, Vaccinia virus
gauaacuguau

SEQ ID NO: 3260456 - RNA, 22 nt, Vaccinia virus
agacggcaauggauggauuaua

SEQ ID NO: 3260457 - RNA, 17 nt, Vaccinia virus
agaucauuugaaauuau

SEQ ID NO: 3260458 - RNA, 16 nt, Vaccinia virus
cuaaguccuauucucg

SEQ ID NO: 3260459 - RNA, 11 nt, Vaccinia virus
ugauagaaaau

SEQ ID NO: 3260460 - RNA, 13 nt, Vaccinia virus
uacaaaagcaauu

SEQ ID NO: 3260461 - RNA, 12 nt, Vaccinia virus
auauuuaaacaa

SEQ ID NO: 3260462 - RNA, 22 nt, Vaccinia virus
cguuucauaaagagaucaggaa

SEQ ID NO: 3260463 - RNA, 16 nt, Vaccinia virus
uccacauuaauacagc

SEQ ID NO: 3260464 - RNA, 16 nt, Vaccinia virus
gacaauacuguauuau

SEQ ID NO: 3260465 - RNA, 14 nt, Vaccinia virus
gauuuuuccaaagu

SEQ ID NO: 3260466 - RNA, 19 nt, Vaccinia virus
auucagaguccucuaauug

SEQ ID NO: 3260467 - RNA, 21 nt, Vaccinia virus
agcuauguuaucaugaaaugu

SEQ ID NO: 3260468 - RNA, 17 nt, Vaccinia virus
caaugaacuaauauuua

SEQ ID NO: 3260469 - RNA, 16 nt, Vaccinia virus
cguugacgcuguaaaa

SEQ ID NO: 3260470 - RNA, 16 nt, Vaccinia virus
auagauggaguaagua

SEQ ID NO: 3260471 - RNA, 16 nt, Vaccinia virus
auucaccgaucaaaug

SEQ ID NO: 3260472 - RNA, 16 nt, Vaccinia virus
acuuuucauuaauagg

SEQ ID NO: 3260473 - RNA, 23 nt, Vaccinia virus
guucuuauaauuguaacauccuu

SEQ ID NO: 3260474 - RNA, 14 nt, Vaccinia virus
uugaugaauuauua

SEQ ID NO: 3260475 - RNA, 15 nt, Vaccinia virus
uuauauaauuuuugg

SEQ ID NO: 3260476 - RNA, 21 nt, Vaccinia virus
auuauagcuucuggacauaau

SEQ ID NO: 3260477 - RNA, 14 nt, Vaccinia virus
gccauuauuagaaa

SEQ ID NO: 3260478 - RNA, 14 nt, Vaccinia virus
uaugaguucuucuu

SEQ ID NO: 3260479 - RNA, 20 nt, Vaccinia virus
agcuccaugacuuaugaaua

SEQ ID NO: 3260480 - RNA, 15 nt, Vaccinia virus
ucguacuauauacaa

SEQ ID NO: 3260481 - RNA, 19 nt, Vaccinia virus
gauuaaaaauaaaguuauc

SEQ ID NO: 3260482 - RNA, 18 nt, Vaccinia virus
auuuaucauauuucucca

SEQ ID NO: 3260483 - RNA, 18 nt, Vaccinia virus
uuguaucaguuucagaau

SEQ ID NO: 3260484 - RNA, 16 nt, Vaccinia virus
aguuuucuuucaaaau

SEQ ID NO: 3260485 - RNA, 21 nt, Vaccinia virus
guuguuacuccauuauauauu

SEQ ID NO: 3260486 - RNA, 17 nt, Vaccinia virus
acuaaacacacauuauu

SEQ ID NO: 3260487 - RNA, 16 nt, Vaccinia virus
agaacaacgaaauuau

SEQ ID NO: 3260488 - RNA, 14 nt, Vaccinia virus
aaaaguaaauacug

SEQ ID NO: 3260489 - RNA, 19 nt, Vaccinia virus
uauauacacucuauuucaa

SEQ ID NO: 3260490 - RNA, 19 nt, Vaccinia virus
uugcguggagaucauuaaa

SEQ ID NO: 3260491 - RNA, 12 nt, Vaccinia virus
aacuuuuuggua

SEQ ID NO: 3260492 - RNA, 20 nt, Vaccinia virus
agcgagaaauaaucauaaau

SEQ ID NO: 3260493 - RNA, 19 nt, Vaccinia virus
aucaauucuggauuauccc

SEQ ID NO: 3260494 - RNA, 16 nt, Vaccinia virus
acuuguauaauuuccc

SEQ ID NO: 3260495 - RNA, 17 nt, Vaccinia virus
agcaguuaccaaagaga

SEQ ID NO: 3260496 - RNA, 12 nt, Vaccinia virus
aaaaggaaaaua

SEQ ID NO: 3260497 - RNA, 15 nt, Vaccinia virus
gaucuaaaaauuaaa

SEQ ID NO: 3260498 - RNA, 22 nt, Vaccinia virus
acucgcauuucuaauacaugac

SEQ ID NO: 3260499 - RNA, 17 nt, Vaccinia virus
aggcauguugauggaaa

SEQ ID NO: 3260500 - RNA, 17 nt, Vaccinia virus
aacaauauauacgagua

SEQ ID NO: 3260501 - RNA, 13 nt, Vaccinia virus
uggagaugaaugc

SEQ ID NO: 3260502 - RNA, 22 nt, Vaccinia virus
uuaugaaaccauacuaauagau

SEQ ID NO: 3260503 - RNA, 17 nt, Vaccinia virus
ugacauuuauucaucau

SEQ ID NO: 3260504 - RNA, 19 nt, Vaccinia virus
uucauaggauacucuauga

SEQ ID NO: 3260505 - RNA, 20 nt, Vaccinia virus
aucgaagugacacucuauau

SEQ ID NO: 3260506 - RNA, 22 nt, Vaccinia virus
uauggagcgaguguuacaacau

SEQ ID NO: 3260507 - RNA, 17 nt, Vaccinia virus
cuuaacuuguaauaauu

SEQ ID NO: 3260508 - RNA, 13 nt, Vaccinia virus
guuacguauauau

SEQ ID NO: 3260509 - RNA, 19 nt, Vaccinia virus
uaaaaugguaaacuuuugc

SEQ ID NO: 3260510 - RNA, 17 nt, Vaccinia virus
auaaucgcuuuguuguu

SEQ ID NO: 3260511 - RNA, 21 nt, Vaccinia virus
acuaaauauucauaacuaauu

SEQ ID NO: 3260512 - RNA, 13 nt, Vaccinia virus
uuaucuguagacg

SEQ ID NO: 3260513 - RNA, 16 nt, Vaccinia virus
auauccuuuuguauaa

SEQ ID NO: 3260514 - RNA, 12 nt, Vaccinia virus
aaacaauguuuc

SEQ ID NO: 3260515 - RNA, 13 nt, Vaccinia virus
gaucuguauuaua

SEQ ID NO: 3260516 - RNA, 13 nt, Vaccinia virus
uccuguaauaucu

SEQ ID NO: 3260517 - RNA, 20 nt, Vaccinia virus
ccuacacuauuauaugauua

SEQ ID NO: 3260518 - RNA, 21 nt, Vaccinia virus
aucggacucuucuaucauuau

SEQ ID NO: 3260519 - RNA, 22 nt, Vaccinia virus
acgagauuauuauuaacaaagu

SEQ ID NO: 3260520 - RNA, 13 nt, Vaccinia virus
agugcuucuucuu

SEQ ID NO: 3260521 - RNA, 16 nt, Vaccinia virus
aaagauuaauacauua

SEQ ID NO: 3260522 - RNA, 18 nt, Vaccinia virus
gugacauaauuacauaua

SEQ ID NO: 3260523 - RNA, 21 nt, Vaccinia virus
auuaucaagauucugauguau

SEQ ID NO: 3260524 - RNA, 21 nt, Vaccinia virus
uaacaaguugaccaauucauu

SEQ ID NO: 3260525 - RNA, 17 nt, Vaccinia virus
caacuuuaggaucucua

SEQ ID NO: 3260526 - RNA, 14 nt, Vaccinia virus
uaaaaauaugugcu

SEQ ID NO: 3260527 - RNA, 16 nt, Vaccinia virus
aucaaucgauaacaag

SEQ ID NO: 3260528 - RNA, 20 nt, Vaccinia virus
uaucuacgauuuuuacaaaa

SEQ ID NO: 3260529 - RNA, 14 nt, Vaccinia virus
uauaaaacuuauga

SEQ ID NO: 3260530 - RNA, 17 nt, Vaccinia virus
aggagcaccagaaguau

SEQ ID NO: 3260531 - RNA, 15 nt, Vaccinia virus
agagcagcacaaacu

SEQ ID NO: 3260532 - RNA, 12 nt, Vaccinia virus
auucaguuuaua

SEQ ID NO: 3260533 - RNA, 16 nt, Vaccinia virus
cuauuaucuguuuaua

SEQ ID NO: 3260534 - RNA, 23 nt, Vaccinia virus
aguuguggaaauacuuccaucaa

SEQ ID NO: 3260535 - RNA, 15 nt, Vaccinia virus
cuauaucuaacaucu

SEQ ID NO: 3260536 - RNA, 23 nt, Vaccinia virus
ucaucuggaauugucacuacuaa

SEQ ID NO: 3260537 - RNA, 16 nt, Vaccinia virus
aguuuauuauccacua

SEQ ID NO: 3260538 - RNA, 19 nt, Vaccinia virus
uuaacaucucuucauuaau

SEQ ID NO: 3260539 - RNA, 22 nt, Vaccinia virus
augcuaguuaauaguaaaugaa

SEQ ID NO: 3260540 - RNA, 18 nt, Vaccinia virus
acauccgccuuaaaugua

SEQ ID NO: 3260541 - RNA, 19 nt, Vaccinia virus
uguaaccgauaauaauguu

SEQ ID NO: 3260542 - RNA, 13 nt, Vaccinia virus
aacggcuaucacu

SEQ ID NO: 3260543 - RNA, 13 nt, Vaccinia virus
aucgacuauuuua

SEQ ID NO: 3260544 - RNA, 16 nt, Vaccinia virus
guugauuacucuuuuu

SEQ ID NO: 3260545 - RNA, 19 nt, Vaccinia virus
uaugacgacuucaaucaaa

SEQ ID NO: 3260546 - RNA, 21 nt, Vaccinia virus
auucauucacuaucaaucgau

SEQ ID NO: 3260547 - RNA, 18 nt, Vaccinia virus
aauaaucguuauuaucau

SEQ ID NO: 3260548 - RNA, 17 nt, Vaccinia virus
caaugaaaugguacaau

SEQ ID NO: 3260549 - RNA, 14 nt, Vaccinia virus
aucaauaacaaugu

SEQ ID NO: 3260550 - RNA, 23 nt, Vaccinia virus
ugauauacagucuuaaauaguua

SEQ ID NO: 3260551 - RNA, 17 nt, Vaccinia virus
uugacaaaaucuuuaau

SEQ ID NO: 3260552 - RNA, 14 nt, Vaccinia virus
cuguucaacaaacu

SEQ ID NO: 3260553 - RNA, 23 nt, Vaccinia virus
cauucuauuaaugucuacucuau

SEQ ID NO: 3260554 - RNA, 23 nt, Vaccinia virus
uuaacaaaugguucaaagacuag

SEQ ID NO: 3260555 - RNA, 21 nt, Vaccinia virus
cugcggauauaaagucaucgu

SEQ ID NO: 3260556 - RNA, 18 nt, Vaccinia virus
ugucaaagguauaugaua

SEQ ID NO: 3260557 - RNA, 14 nt, Vaccinia virus
ucuauaauaucaga

SEQ ID NO: 3260558 - RNA, 21 nt, Vaccinia virus
aacucgccggcgcaucaguau

SEQ ID NO: 3260559 - RNA, 17 nt, Vaccinia virus
acaauagcgcuuaaucu

SEQ ID NO: 3260560 - RNA, 13 nt, Vaccinia virus
gugauauaaauaa

SEQ ID NO: 3260561 - RNA, 20 nt, Vaccinia virus
aguauuugagaaauauguau

SEQ ID NO: 3260562 - RNA, 21 nt, Vaccinia virus
uuaaaggaguaugucaugaau

SEQ ID NO: 3260563 - RNA, 15 nt, Vaccinia virus
guaguuguugguaac

SEQ ID NO: 3260564 - RNA, 20 nt, Vaccinia virus
guacacuuuuuaauucucua

SEQ ID NO: 3260565 - RNA, 18 nt, Vaccinia virus
aucucuuaauccaaauau

SEQ ID NO: 3260566 - RNA, 15 nt, Vaccinia virus
agaauuguaaaauua

SEQ ID NO: 3260567 - RNA, 21 nt, Vaccinia virus
agaauccuaacuauucaucca

SEQ ID NO: 3260568 - RNA, 18 nt, Vaccinia virus
uauacucuuauuaucaaa

SEQ ID NO: 3260569 - RNA, 15 nt, Vaccinia virus
ucaauucuucuacau

SEQ ID NO: 3260570 - RNA, 11 nt, Vaccinia virus
aaguuaauagc

SEQ ID NO: 3260571 - RNA, 19 nt, Vaccinia virus
gacauuuggaauguuauau

SEQ ID NO: 3260572 - RNA, 17 nt, Vaccinia virus
uuguacuaucuagagau

SEQ ID NO: 3260573 - RNA, 21 nt, Vaccinia virus
cucuaguaaagucaggacuga

SEQ ID NO: 3260574 - RNA, 23 nt, Vaccinia virus
uaagacuaaugcuugaaaaugga

SEQ ID NO: 3260575 - RNA, 23 nt, Vaccinia virus
ugcuauaucucuuccguuuauua

SEQ ID NO: 3260576 - RNA, 15 nt, Vaccinia virus
uaaaucauuaucuac

SEQ ID NO: 3260577 - RNA, 22 nt, Vaccinia virus
auuugauacgauauuuguugga

SEQ ID NO: 3260578 - RNA, 14 nt, Vaccinia virus
cuugaagaugauuu

SEQ ID NO: 3260579 - RNA, 19 nt, Vaccinia virus
uugauuuaaagucuagagu

SEQ ID NO: 3260580 - RNA, 24 nt, Vaccinia virus
aaaggggugagaauguuccagagu

SEQ ID NO: 3260581 - RNA, 15 nt, Vaccinia virus
auaaugauacaguac

SEQ ID NO: 3260582 - RNA, 20 nt, Vaccinia virus
uaauauuuuauuacaaucau

SEQ ID NO: 3260583 - RNA, 19 nt, Vaccinia virus
ucuacuuacuggaaaauag

SEQ ID NO: 3260584 - RNA, 12 nt, Vaccinia virus
uuauuucugaau

SEQ ID NO: 3260585 - RNA, 14 nt, Vaccinia virus
auauuucuggaaug

SEQ ID NO: 3260586 - RNA, 14 nt, Vaccinia virus
ccguagaaauacua

SEQ ID NO: 3260587 - RNA, 23 nt, Vaccinia virus
acauuguuacgucuccaauaaau

SEQ ID NO: 3260588 - RNA, 15 nt, Vaccinia virus
gaugguauuucugaa

SEQ ID NO: 3260589 - RNA, 17 nt, Vaccinia virus
gaguauuaaauauuaau

SEQ ID NO: 3260590 - RNA, 14 nt, Vaccinia virus
aaaguaauaaucuu

SEQ ID NO: 3260591 - RNA, 19 nt, Vaccinia virus
uacagauugcacuauacau

SEQ ID NO: 3260592 - RNA, 20 nt, Vaccinia virus
auuuguuuuguuuauuaaca

SEQ ID NO: 3260593 - RNA, 15 nt, Vaccinia virus
uaauggaugucauga

SEQ ID NO: 3260594 - RNA, 14 nt, Vaccinia virus
acaucaaaauaaua

SEQ ID NO: 3260595 - RNA, 16 nt, Vaccinia virus
cauaguaaauucuguu

SEQ ID NO: 3260596 - RNA, 14 nt, Vaccinia virus
cagaaguaaugaag

SEQ ID NO: 3260597 - RNA, 16 nt, Vaccinia virus
aauaugauuaacaagu

SEQ ID NO: 3260598 - RNA, 20 nt, Vaccinia virus
ucgaaugccauagaauaaau

SEQ ID NO: 3260599 - RNA, 16 nt, Vaccinia virus
ucaucgauaguauaau

SEQ ID NO: 3260600 - RNA, 17 nt, Vaccinia virus
aucugcuauaauuaaga

SEQ ID NO: 3260601 - RNA, 16 nt, Vaccinia virus
acuuuaauaacaaaga

SEQ ID NO: 3260602 - RNA, 14 nt, Vaccinia virus
uuaaugaaacauuu

SEQ ID NO: 3260603 - RNA, 12 nt, Vaccinia virus
uagagaugaugc

SEQ ID NO: 3260604 - RNA, 15 nt, Vaccinia virus
gaccgaauacauaac

SEQ ID NO: 3260605 - RNA, 22 nt, Vaccinia virus
uuaauccgggugaaauuauucc

SEQ ID NO: 3260606 - RNA, 20 nt, Vaccinia virus
auuuuauccaaaaagaauga

SEQ ID NO: 3260607 - RNA, 16 nt, Vaccinia virus
auacgauggugaaaga

SEQ ID NO: 3260608 - RNA, 20 nt, Vaccinia virus
agaaaguggauaaaacaaua

SEQ ID NO: 3260609 - RNA, 14 nt, Vaccinia virus
agacuaugauugac

SEQ ID NO: 3260610 - RNA, 23 nt, Vaccinia virus
aagaaaugguaaauaaauacuuu

SEQ ID NO: 3260611 - RNA, 18 nt, Vaccinia virus
guucucaauauuacuuuu

SEQ ID NO: 3260612 - RNA, 22 nt, Vaccinia virus
gcuaacacguaauuauaauaau

SEQ ID NO: 3260613 - RNA, 22 nt, Vaccinia virus
augugagcaaagauuguucucu

SEQ ID NO: 3260614 - RNA, 14 nt, Vaccinia virus
uggaccaauuuauu

SEQ ID NO: 3260615 - RNA, 22 nt, Vaccinia virus
aguauuaaccaugaaagaaaga

SEQ ID NO: 3260616 - RNA, 21 nt, Vaccinia virus
agcucucguauucaguuucau

SEQ ID NO: 3260617 - RNA, 16 nt, Vaccinia virus
caauauagcaacagua

SEQ ID NO: 3260618 - RNA, 13 nt, Vaccinia virus
guaaauacauuga

SEQ ID NO: 3260619 - RNA, 18 nt, Vaccinia virus
auuuugguuuacauguaa

SEQ ID NO: 3260620 - RNA, 22 nt, Vaccinia virus
ucaugccuuuccuggaauauca

SEQ ID NO: 3260621 - RNA, 12 nt, Vaccinia virus
caugauagauuu

SEQ ID NO: 3260622 - RNA, 15 nt, Vaccinia virus
ccauuaaucacugau

SEQ ID NO: 3260623 - RNA, 18 nt, Vaccinia virus
uaauaaacauuccacauu

SEQ ID NO: 3260624 - RNA, 14 nt, Vaccinia virus
aaauugauaaugag

SEQ ID NO: 3260625 - RNA, 15 nt, Vaccinia virus
cagaaacuguaaaga

SEQ ID NO: 3260626 - RNA, 14 nt, Vaccinia virus
uguacagaaaucau

SEQ ID NO: 3260627 - RNA, 16 nt, Vaccinia virus
agauugauuauuuccu

SEQ ID NO: 3260628 - RNA, 12 nt, Vaccinia virus
aucuguauucuc

SEQ ID NO: 3260629 - RNA, 22 nt, Vaccinia virus
acaaaauaauaauggaaguacu

SEQ ID NO: 3260630 - RNA, 20 nt, Vaccinia virus
aaucaucaauccuucagaua

SEQ ID NO: 3260631 - RNA, 23 nt, Vaccinia virus
aaucauuaucgauacuaauuaca

SEQ ID NO: 3260632 - RNA, 17 nt, Vaccinia virus
aucuacuacauuagaca

SEQ ID NO: 3260633 - RNA, 15 nt, Vaccinia virus
cuaucagaaucaguu

SEQ ID NO: 3260634 - RNA, 15 nt, Vaccinia virus
cuagacuugauuuaa

SEQ ID NO: 3260635 - RNA, 17 nt, Vaccinia virus
uuucauucgucaaggau

SEQ ID NO: 3260636 - RNA, 18 nt, Vaccinia virus
cuacuucgguuagauguu

SEQ ID NO: 3260637 - RNA, 17 nt, Vaccinia virus
uaaaaucagcagacuuu

SEQ ID NO: 3260638 - RNA, 23 nt, Vaccinia virus
uuaauuauuguauuuauuauuua

SEQ ID NO: 3260639 - RNA, 17 nt, Vaccinia virus
aguaguuuaugauaaag

SEQ ID NO: 3260640 - RNA, 12 nt, Vaccinia virus
aagcuauguaaa

SEQ ID NO: 3260641 - RNA, 23 nt, Vaccinia virus
cggauaguauucaagucaaagaa

SEQ ID NO: 3260642 - RNA, 17 nt, Vaccinia virus
uauuaacccaagcagca

SEQ ID NO: 3260643 - RNA, 19 nt, Vaccinia virus
cauuaaacgauuugaugag

SEQ ID NO: 3260644 - RNA, 21 nt, Vaccinia virus
uucccugauuaguauuuucua

SEQ ID NO: 3260645 - RNA, 15 nt, Vaccinia virus
uuauccuaucaugua

SEQ ID NO: 3260646 - RNA, 13 nt, Vaccinia virus
uguuucaaagcaa

SEQ ID NO: 3260647 - RNA, 22 nt, Vaccinia virus
agaaaaaaauauuaucgauauu

SEQ ID NO: 3260648 - RNA, 14 nt, Vaccinia virus
ucauuaauuucuga

SEQ ID NO: 3260649 - RNA, 19 nt, Vaccinia virus
ucauguauuugagaguuuu

SEQ ID NO: 3260650 - RNA, 17 nt, Vaccinia virus
uaugucaaaaauuguag

SEQ ID NO: 3260651 - RNA, 19 nt, Vaccinia virus
uccaggccguuuguuuccu

SEQ ID NO: 3260652 - RNA, 21 nt, Vaccinia virus
cuguagugucaguacuauuag

SEQ ID NO: 3260653 - RNA, 16 nt, Vaccinia virus
caugggugacauaauu

SEQ ID NO: 3260654 - RNA, 14 nt, Vaccinia virus
acccuauaguuuua

SEQ ID NO: 3260655 - RNA, 16 nt, Vaccinia virus
auuugguaagacuauu

SEQ ID NO: 3260656 - RNA, 20 nt, Vaccinia virus
agaauaaaacucuacuauau

SEQ ID NO: 3260657 - RNA, 17 nt, Vaccinia virus
aaggacuuuguagaaau

SEQ ID NO: 3260658 - RNA, 13 nt, Vaccinia virus
gcuucauccuuua

SEQ ID NO: 3260659 - RNA, 17 nt, Vaccinia virus
cuuuuuauccuuuagau

SEQ ID NO: 3260660 - RNA, 20 nt, Vaccinia virus
gaaucugaaaacguauaaau

SEQ ID NO: 3260661 - RNA, 16 nt, Vaccinia virus
aaaacagauaaugaua

SEQ ID NO: 3260662 - RNA, 14 nt, Vaccinia virus
aucccauuguaaag

SEQ ID NO: 3260663 - RNA, 16 nt, Vaccinia virus
aucuucgucuauuaca

SEQ ID NO: 3260664 - RNA, 19 nt, Vaccinia virus
ucgucaaaauauuuacuaa

SEQ ID NO: 3260665 - RNA, 16 nt, Vaccinia virus
cauaaguauguuugac

SEQ ID NO: 3260666 - RNA, 16 nt, Vaccinia virus
ucuaagauuauuuuaa

SEQ ID NO: 3260667 - RNA, 13 nt, Vaccinia virus
uauaaaaucacuu

SEQ ID NO: 3260668 - RNA, 23 nt, Vaccinia virus
aaaaucaggguuaucaaaguguu

SEQ ID NO: 3260669 - RNA, 21 nt, Vaccinia virus
ugcgcgaaccaaaaugugaua

SEQ ID NO: 3260670 - RNA, 12 nt, Vaccinia virus
uuaaacaucuuu

SEQ ID NO: 3260671 - RNA, 12 nt, Vaccinia virus
uuauacaucuua

SEQ ID NO: 3260672 - RNA, 23 nt, Vaccinia virus
aauguuauaguuuucuaaaaugu

SEQ ID NO: 3260673 - RNA, 13 nt, Vaccinia virus
ugacgcuguaaaa

SEQ ID NO: 3260674 - RNA, 14 nt, Vaccinia virus
uaauauucuaaaac

SEQ ID NO: 3260675 - RNA, 17 nt, Vaccinia virus
caugaaaugaugauaua

SEQ ID NO: 3260676 - RNA, 14 nt, Vaccinia virus
ucuugcucaaauaa

SEQ ID NO: 3260677 - RNA, 15 nt, Vaccinia virus
acaucuuuccuacau

SEQ ID NO: 3260678 - RNA, 20 nt, Vaccinia virus
uacauggaugauauagauau

SEQ ID NO: 3260679 - RNA, 19 nt, Vaccinia virus
acaauggccgucuauguau

SEQ ID NO: 3260680 - RNA, 13 nt, Vaccinia virus
aguguaaagacaa

SEQ ID NO: 3260681 - RNA, 13 nt, Vaccinia virus
aaaauauguagaa

SEQ ID NO: 3260682 - RNA, 13 nt, Vaccinia virus
auaaaauguugau

SEQ ID NO: 3260683 - RNA, 21 nt, Vaccinia virus
cauguucauuggcuguggaau

SEQ ID NO: 3260684 - RNA, 13 nt, Vaccinia virus
aagauuguacacu

SEQ ID NO: 3260685 - RNA, 18 nt, Vaccinia virus
ucuugauuacaaaaccaa

SEQ ID NO: 3260686 - RNA, 22 nt, Vaccinia virus
aaauuaauuuaccaucguguau

SEQ ID NO: 3260687 - RNA, 18 nt, Vaccinia virus
caaugucgaauaacugua

SEQ ID NO: 3260688 - RNA, 20 nt, Vaccinia virus
uuauggaucuauucaagaug

SEQ ID NO: 3260689 - RNA, 15 nt, Vaccinia virus
aaauccaauagugaa

SEQ ID NO: 3260690 - RNA, 16 nt, Vaccinia virus
aguuugaauaguuugu

SEQ ID NO: 3260691 - RNA, 18 nt, Vaccinia virus
agaucuucguuaaaaagu

SEQ ID NO: 3260692 - RNA, 18 nt, Vaccinia virus
uaauccuuuuuauuuauu

SEQ ID NO: 3260693 - RNA, 17 nt, Vaccinia virus
auugcauagugaauaua

SEQ ID NO: 3260694 - RNA, 16 nt, Vaccinia virus
ugaucaaaaagagauu

SEQ ID NO: 3260695 - RNA, 22 nt, Vaccinia virus
agcuuuuguucacaaaaauaca

SEQ ID NO: 3260696 - RNA, 18 nt, Vaccinia virus
uagaaaaugauucacaau

SEQ ID NO: 3260697 - RNA, 14 nt, Vaccinia virus
gaauaaauuauuau

SEQ ID NO: 3260698 - RNA, 19 nt, Vaccinia virus
auuucuguauaucuauaau

SEQ ID NO: 3260699 - RNA, 14 nt, Vaccinia virus
ucucagaauucuaa

SEQ ID NO: 3260700 - RNA, 16 nt, Vaccinia virus
augauaaguccaucau

SEQ ID NO: 3260701 - RNA, 19 nt, Vaccinia virus
acuuuaaagcaaaaugguu

SEQ ID NO: 3260702 - RNA, 19 nt, Vaccinia virus
agauauuuggcuaaacuau

SEQ ID NO: 3260703 - RNA, 11 nt, Vaccinia virus
gauguauauau

SEQ ID NO: 3260704 - RNA, 20 nt, Vaccinia virus
aucauggauuuuauauagau

SEQ ID NO: 3260705 - RNA, 22 nt, Vaccinia virus
gaauauauagguaauacauaua

SEQ ID NO: 3260706 - RNA, 22 nt, Vaccinia virus
gccguauggaccauuauuuuua

SEQ ID NO: 3260707 - RNA, 15 nt, Vaccinia virus
acuaaucaauaauca

SEQ ID NO: 3260708 - RNA, 18 nt, Vaccinia virus
uguagacaaauauacuuu

SEQ ID NO: 3260709 - RNA, 14 nt, Vaccinia virus
uauaaauauguucc

SEQ ID NO: 3260710 - RNA, 15 nt, Vaccinia virus
cggagauaagacuag

SEQ ID NO: 3260711 - RNA, 21 nt, Vaccinia virus
uagggagaguauaaaacauua

SEQ ID NO: 3260712 - RNA, 15 nt, Vaccinia virus
uugaucuauguaguu

SEQ ID NO: 3260713 - RNA, 16 nt, Vaccinia virus
uaucgcauauuuauau

SEQ ID NO: 3260714 - RNA, 17 nt, Vaccinia virus
ucauaauauuaaucauc

SEQ ID NO: 3260715 - RNA, 13 nt, Vaccinia virus
cguagaaguugaa

SEQ ID NO: 3260716 - RNA, 19 nt, Vaccinia virus
ucuaaugugauucucugaa

SEQ ID NO: 3260717 - RNA, 17 nt, Vaccinia virus
auaaauacaccaaauau

SEQ ID NO: 3260718 - RNA, 23 nt, Vaccinia virus
auuuucagcguggauuucucaua

SEQ ID NO: 3260719 - RNA, 23 nt, Vaccinia virus
uauacccauacugaauggaugaa

SEQ ID NO: 3260720 - RNA, 16 nt, Vaccinia virus
ugauauguguaagaac

SEQ ID NO: 3260721 - RNA, 15 nt, Vaccinia virus
cuuaguaaacagucc

SEQ ID NO: 3260722 - RNA, 15 nt, Vaccinia virus
aucugaauaaaacau

SEQ ID NO: 3260723 - RNA, 12 nt, Vaccinia virus
uuacaaaucuag

SEQ ID NO: 3260724 - RNA, 20 nt, Vaccinia virus
ugaaugcugaugaacagguu

SEQ ID NO: 3260725 - RNA, 19 nt, Vaccinia virus
acacguuuauuucauauaa

SEQ ID NO: 3260726 - RNA, 18 nt, Vaccinia virus
agauauagauuugcauuu

SEQ ID NO: 3260727 - RNA, 19 nt, Vaccinia virus
acaauuaucauuuugauua

SEQ ID NO: 3260728 - RNA, 14 nt, Vaccinia virus
acaacacuaucuga

SEQ ID NO: 3260729 - RNA, 22 nt, Vaccinia virus
uuaucuauaucaucuacauaau

SEQ ID NO: 3260730 - RNA, 15 nt, Vaccinia virus
ucucugacauucaga

SEQ ID NO: 3260731 - RNA, 14 nt, Vaccinia virus
aaaucguguugugu

SEQ ID NO: 3260732 - RNA, 18 nt, Vaccinia virus
cuguuuuaacaucuuuuu

SEQ ID NO: 3260733 - RNA, 17 nt, Vaccinia virus
uaacaguuuuacuauau

SEQ ID NO: 3260734 - RNA, 15 nt, Vaccinia virus
cucuucucugcauuu

SEQ ID NO: 3260735 - RNA, 17 nt, Vaccinia virus
auuuagucuuacacauu

SEQ ID NO: 3260736 - RNA, 19 nt, Vaccinia virus
cucagaauucuaaaugaug

SEQ ID NO: 3260737 - RNA, 20 nt, Vaccinia virus
gcagguacuauaauauuaaa

SEQ ID NO: 3260738 - RNA, 15 nt, Vaccinia virus
guucauuuauaaucu

SEQ ID NO: 3260739 - RNA, 20 nt, Vaccinia virus
uacugauaacaaaauauuag

SEQ ID NO: 3260740 - RNA, 21 nt, Vaccinia virus
uuagauuaugaggaugcuguu

SEQ ID NO: 3260741 - RNA, 20 nt, Vaccinia virus
uuacaucgacgagauuauua

SEQ ID NO: 3260742 - RNA, 13 nt, Vaccinia virus
guguuauuuuuua

SEQ ID NO: 3260743 - RNA, 22 nt, Vaccinia virus
agaauucuuaguuaauggagaa

SEQ ID NO: 3260744 - RNA, 16 nt, Vaccinia virus
auugcauuuuguuaua

SEQ ID NO: 3260745 - RNA, 18 nt, Vaccinia virus
ugacaccagaaaacgacg

SEQ ID NO: 3260746 - RNA, 15 nt, Vaccinia virus
ccaaguuaaauuuua

SEQ ID NO: 3260747 - RNA, 12 nt, Vaccinia virus
aaacaaaaaacu

SEQ ID NO: 3260748 - RNA, 19 nt, Vaccinia virus
gcucuaccgcaguuagcca

SEQ ID NO: 3260749 - RNA, 18 nt, Vaccinia virus
gacauggcuucuuccaua

SEQ ID NO: 3260750 - RNA, 16 nt, Vaccinia virus
acgaguugacauaucg

SEQ ID NO: 3260751 - RNA, 15 nt, Vaccinia virus
aauuucgaaaauaua

SEQ ID NO: 3260752 - RNA, 13 nt, Vaccinia virus
aaaagcuuaaaau

SEQ ID NO: 3260753 - RNA, 21 nt, Vaccinia virus
caauaaacuccguagagaaau

SEQ ID NO: 3260754 - RNA, 17 nt, Vaccinia virus
auuucguuaaaacauuc

SEQ ID NO: 3260755 - RNA, 15 nt, Vaccinia virus
ccuugauuauguuuu

SEQ ID NO: 3260756 - RNA, 21 nt, Vaccinia virus
ucaugcauuuguuaguuauuc

SEQ ID NO: 3260757 - RNA, 12 nt, Vaccinia virus
uaaauuguguag

SEQ ID NO: 3260758 - RNA, 17 nt, Vaccinia virus
aggaagaauaucauauu

SEQ ID NO: 3260759 - RNA, 20 nt, Vaccinia virus
agauaauuuuaccagaauac

SEQ ID NO: 3260760 - RNA, 17 nt, Vaccinia virus
uacaauacgauaaacau

SEQ ID NO: 3260761 - RNA, 18 nt, Vaccinia virus
augguaucauuacaugcu

SEQ ID NO: 3260762 - RNA, 16 nt, Vaccinia virus
ucuguuaauuuuacua

SEQ ID NO: 3260763 - RNA, 17 nt, Vaccinia virus
aucuaucaaacaaaauu

SEQ ID NO: 3260764 - RNA, 13 nt, Vaccinia virus
auauuaucaaaau

SEQ ID NO: 3260765 - RNA, 21 nt, Vaccinia virus
uuggucagaaauauuguauug

SEQ ID NO: 3260766 - RNA, 19 nt, Vaccinia virus
aucuauaauuugauccaug

SEQ ID NO: 3260767 - RNA, 15 nt, Vaccinia virus
gacuacgaaacugau

SEQ ID NO: 3260768 - RNA, 22 nt, Vaccinia virus
ucuucgcccucaauuucccaaa

SEQ ID NO: 3260769 - RNA, 16 nt, Vaccinia virus
uauucauauucuuaaa

SEQ ID NO: 3260770 - RNA, 19 nt, Vaccinia virus
agcaucagcaaaacaguua

SEQ ID NO: 3260771 - RNA, 22 nt, Vaccinia virus
acgcagaaaagauaccacgagu

SEQ ID NO: 3260772 - RNA, 17 nt, Vaccinia virus
guuauaaaugaaauugu

SEQ ID NO: 3260773 - RNA, 13 nt, Vaccinia virus
acauauaaaugua

SEQ ID NO: 3260774 - RNA, 19 nt, Vaccinia virus
caauugucuguaaaccaca

SEQ ID NO: 3260775 - RNA, 14 nt, Vaccinia virus
ugucucuguuuuua

SEQ ID NO: 3260776 - RNA, 19 nt, Vaccinia virus
uacaucccgguuaaacauu

SEQ ID NO: 3260777 - RNA, 17 nt, Vaccinia virus
auuaaucuuuucuguac

SEQ ID NO: 3260778 - RNA, 22 nt, Vaccinia virus
cagaagauagcaaagagaugau

SEQ ID NO: 3260779 - RNA, 17 nt, Vaccinia virus
auuaaaccuaaauaauu

SEQ ID NO: 3260780 - RNA, 14 nt, Vaccinia virus
aaaagaucauacaa

SEQ ID NO: 3260781 - RNA, 13 nt, Vaccinia virus
aauucaucuucua

SEQ ID NO: 3260782 - RNA, 13 nt, Vaccinia virus
aucaauuaaauaa

SEQ ID NO: 3260783 - RNA, 16 nt, Vaccinia virus
guauacgcagaaaaga

SEQ ID NO: 3260784 - RNA, 20 nt, Vaccinia virus
aacuguagagggucaacaau

SEQ ID NO: 3260785 - RNA, 17 nt, Vaccinia virus
aucucuauguuucaguu

SEQ ID NO: 3260786 - RNA, 22 nt, Vaccinia virus
auuauauagauaauucuaauug

SEQ ID NO: 3260787 - RNA, 14 nt, Vaccinia virus
uacuguucaaacau

SEQ ID NO: 3260788 - RNA, 15 nt, Vaccinia virus
cuuaacuuguaauaa

SEQ ID NO: 3260789 - RNA, 16 nt, Vaccinia virus
ucucuauaacaaauau

SEQ ID NO: 3260790 - RNA, 19 nt, Vaccinia virus
ggcuccucucucaggcucu

SEQ ID NO: 3260791 - RNA, 16 nt, Vaccinia virus
uucgucgaauaaugua

SEQ ID NO: 3260792 - RNA, 14 nt, Vaccinia virus
ugauuauuagauuu

SEQ ID NO: 3260793 - RNA, 14 nt, Vaccinia virus
acagccucauauau

SEQ ID NO: 3260794 - RNA, 21 nt, Vaccinia virus
aaaaaucugauagaaagaaua

SEQ ID NO: 3260795 - RNA, 15 nt, Vaccinia virus
uccaaguucuauagu

SEQ ID NO: 3260796 - RNA, 20 nt, Vaccinia virus
gaucuagcaaaggaaauugu

SEQ ID NO: 3260797 - RNA, 18 nt, Vaccinia virus
ucuauuaagaguaacagc

SEQ ID NO: 3260798 - RNA, 21 nt, Vaccinia virus
uuuugaaggauuggacaaauc

SEQ ID NO: 3260799 - RNA, 18 nt, Vaccinia virus
cguuaguaacgccauuau

SEQ ID NO: 3260800 - RNA, 17 nt, Vaccinia virus
gaaguuguauacuauca

SEQ ID NO: 3260801 - RNA, 16 nt, Vaccinia virus
aaaguuaauauuuucu

SEQ ID NO: 3260802 - RNA, 20 nt, Vaccinia virus
cuauaaugaugauacucuca

SEQ ID NO: 3260803 - RNA, 13 nt, Vaccinia virus
guucauaaucauc

SEQ ID NO: 3260804 - RNA, 15 nt, Vaccinia virus
cggauggaugauaua

SEQ ID NO: 3260805 - RNA, 22 nt, Vaccinia virus
ucugaaauaacguauuuaaaca

SEQ ID NO: 3260806 - RNA, 15 nt, Vaccinia virus
aauauuguagcauua

SEQ ID NO: 3260807 - RNA, 22 nt, Vaccinia virus
ggacgacauauuaaucuuuuua

SEQ ID NO: 3260808 - RNA, 18 nt, Vaccinia virus
ugauucacguuauauaac

SEQ ID NO: 3260809 - RNA, 18 nt, Vaccinia virus
ucaaaguuucugaaauaa

SEQ ID NO: 3260810 - RNA, 16 nt, Vaccinia virus
aauccauaaauaaagu

SEQ ID NO: 3260811 - RNA, 17 nt, Vaccinia virus
ugacaucgcauuuauau

SEQ ID NO: 3260812 - RNA, 13 nt, Vaccinia virus
uugcuuuucuaau

SEQ ID NO: 3260813 - RNA, 21 nt, Vaccinia virus
uuuuagauaaaaaauuauaua

SEQ ID NO: 3260814 - RNA, 14 nt, Vaccinia virus
ugguggaugauguc

SEQ ID NO: 3260815 - RNA, 11 nt, Vaccinia virus
gcauacuaucg

SEQ ID NO: 3260816 - RNA, 23 nt, Vaccinia virus
guucgugccaauugaguaacauu

SEQ ID NO: 3260817 - RNA, 14 nt, Vaccinia virus
cucugaaucucugu

SEQ ID NO: 3260818 - RNA, 21 nt, Vaccinia virus
uucuggaauaggauaauaauu

SEQ ID NO: 3260819 - RNA, 16 nt, Vaccinia virus
aaaaacucuaacaugu

SEQ ID NO: 3260820 - RNA, 22 nt, Vaccinia virus
aaaacaaggacgcguuaauaaa

SEQ ID NO: 3260821 - RNA, 16 nt, Vaccinia virus
gauacguaauaaucuu

SEQ ID NO: 3260822 - RNA, 22 nt, Vaccinia virus
ccaucaaaagcauuaauacagu

SEQ ID NO: 3260823 - RNA, 13 nt, Vaccinia virus
cauguuaaaaaug

SEQ ID NO: 3260824 - RNA, 15 nt, Vaccinia virus
agacacgcauguguu

SEQ ID NO: 3260825 - RNA, 15 nt, Vaccinia virus
uauuagguuaucauc

SEQ ID NO: 3260826 - RNA, 14 nt, Vaccinia virus
aaucgcuuaauaga

SEQ ID NO: 3260827 - RNA, 12 nt, Vaccinia virus
gcuguaaacaag

SEQ ID NO: 3260828 - RNA, 17 nt, Vaccinia virus
cauaaaaacuuauacau

SEQ ID NO: 3260829 - RNA, 14 nt, Vaccinia virus
acuuagauuaaauu

SEQ ID NO: 3260830 - RNA, 21 nt, Vaccinia virus
guuagcaacgugauucaucaa

SEQ ID NO: 3260831 - RNA, 17 nt, Vaccinia virus
agaucuaauaaauggag

SEQ ID NO: 3260832 - RNA, 18 nt, Vaccinia virus
agcuuccagauuuaaaaa

SEQ ID NO: 3260833 - RNA, 14 nt, Vaccinia virus
cugaugaaacauuu

SEQ ID NO: 3260834 - RNA, 17 nt, Vaccinia virus
auuaaaucuuucauuuc

SEQ ID NO: 3260835 - RNA, 16 nt, Vaccinia virus
uuucagaggaauacag

SEQ ID NO: 3260836 - RNA, 20 nt, Vaccinia virus
ugaucauuggcaaaauccua

SEQ ID NO: 3260837 - RNA, 14 nt, Vaccinia virus
ucuuucucucuuug

SEQ ID NO: 3260838 - RNA, 12 nt, Vaccinia virus
agcaaaaaauga

SEQ ID NO: 3260839 - RNA, 22 nt, Vaccinia virus
uacuaauaggucuaaaaaccaa

SEQ ID NO: 3260840 - RNA, 15 nt, Vaccinia virus
gaauaugguaugauu

SEQ ID NO: 3260841 - RNA, 21 nt, Vaccinia virus
aaucagacucugguauuuaua

SEQ ID NO: 3260842 - RNA, 23 nt, Vaccinia virus
uucgagauuaaaugcaauaacaa

SEQ ID NO: 3260843 - RNA, 21 nt, Vaccinia virus
aucugaugagaucaauagaca

SEQ ID NO: 3260844 - RNA, 22 nt, Vaccinia virus
auaacaaccucuuuaauagccg

SEQ ID NO: 3260845 - RNA, 18 nt, Vaccinia virus
aguuaaagaaaaauacuc

SEQ ID NO: 3260846 - RNA, 18 nt, Vaccinia virus
aaagcaauacgauuuaug

SEQ ID NO: 3260847 - RNA, 20 nt, Vaccinia virus
uguguauacgcuaacgguau

SEQ ID NO: 3260848 - RNA, 17 nt, Vaccinia virus
guaaguuuaaaaaagac

SEQ ID NO: 3260849 - RNA, 14 nt, Vaccinia virus
auucauuaauucua

SEQ ID NO: 3260850 - RNA, 16 nt, Vaccinia virus
cucauuaaaacuucua

SEQ ID NO: 3260851 - RNA, 13 nt, Vaccinia virus
auauuugaaaauc

SEQ ID NO: 3260852 - RNA, 13 nt, Vaccinia virus
gcaucugauuuuu

SEQ ID NO: 3260853 - RNA, 19 nt, Vaccinia virus
uccuuaaauguuuucucug

SEQ ID NO: 3260854 - RNA, 17 nt, Vaccinia virus
caauggauggauacaau

SEQ ID NO: 3260855 - RNA, 17 nt, Vaccinia virus
acaaaaucuagacucua

SEQ ID NO: 3260856 - RNA, 14 nt, Vaccinia virus
aguaaaaucuauca

SEQ ID NO: 3260857 - RNA, 21 nt, Vaccinia virus
aucuauaacaugcuaaaccuu

SEQ ID NO: 3260858 - RNA, 20 nt, Vaccinia virus
uaaauguaucgugucucauu

SEQ ID NO: 3260859 - RNA, 17 nt, Vaccinia virus
gauuuaucuaguuuauc

SEQ ID NO: 3260860 - RNA, 14 nt, Vaccinia virus
gaugccucuuuuag

SEQ ID NO: 3260861 - RNA, 18 nt, Vaccinia virus
auagaugugagcuacugu

SEQ ID NO: 3260862 - RNA, 16 nt, Vaccinia virus
caaaaugaaaauacuu

SEQ ID NO: 3260863 - RNA, 12 nt, Vaccinia virus
aauaaaauggau

SEQ ID NO: 3260864 - RNA, 12 nt, Vaccinia virus
agaaaaaugauu

SEQ ID NO: 3260865 - RNA, 13 nt, Vaccinia virus
uaacggacaacaa

SEQ ID NO: 3260866 - RNA, 14 nt, Vaccinia virus
cuuucaagaauaaa

SEQ ID NO: 3260867 - RNA, 14 nt, Vaccinia virus
accaugaaagaaag

SEQ ID NO: 3260868 - RNA, 12 nt, Vaccinia virus
cugcuauuucug

SEQ ID NO: 3260869 - RNA, 14 nt, Vaccinia virus
uaccagaucuuaau

SEQ ID NO: 3260870 - RNA, 17 nt, Vaccinia virus
uguuauuacgaaucauu

SEQ ID NO: 3260871 - RNA, 13 nt, Vaccinia virus
uucuacauuuuca

SEQ ID NO: 3260872 - RNA, 19 nt, Vaccinia virus
acuuaucgcauagagacua

SEQ ID NO: 3260873 - RNA, 14 nt, Vaccinia virus
gccuguucauaaau

SEQ ID NO: 3260874 - RNA, 21 nt, Vaccinia virus
aaccauccguuaucgaagaau

SEQ ID NO: 3260875 - RNA, 22 nt, Vaccinia virus
aauaugggauaacgaauccaau

SEQ ID NO: 3260876 - RNA, 19 nt, Vaccinia virus
guuauucucggaugcuaaa

SEQ ID NO: 3260877 - RNA, 15 nt, Vaccinia virus
guauguaguagauau

SEQ ID NO: 3260878 - RNA, 13 nt, Vaccinia virus
ucuauucaucuga

SEQ ID NO: 3260879 - RNA, 21 nt, Vaccinia virus
augaaaauacuuuaguaauua

SEQ ID NO: 3260880 - RNA, 17 nt, Vaccinia virus
aauaugauuagaaguua

SEQ ID NO: 3260881 - RNA, 21 nt, Vaccinia virus
uauaauguuuccucuuucaua

SEQ ID NO: 3260882 - RNA, 12 nt, Vaccinia virus
uuacuaauagaa

SEQ ID NO: 3260883 - RNA, 22 nt, Vaccinia virus
ugaaucaaauguaacuauucaa

SEQ ID NO: 3260884 - RNA, 18 nt, Vaccinia virus
gaaacaucucuucuaguu

SEQ ID NO: 3260885 - RNA, 17 nt, Vaccinia virus
aaucauauacaacucuu

SEQ ID NO: 3260886 - RNA, 18 nt, Vaccinia virus
agaacgaugucaaaauau

SEQ ID NO: 3260887 - RNA, 14 nt, Vaccinia virus
uuuuaauauaaacg

SEQ ID NO: 3260888 - RNA, 16 nt, Vaccinia virus
cgauuagagauacaau

SEQ ID NO: 3260889 - RNA, 22 nt, Vaccinia virus
uguuuaauacuuauucauauuu

SEQ ID NO: 3260890 - RNA, 20 nt, Vaccinia virus
guaauaaucuugauuguaca

SEQ ID NO: 3260891 - RNA, 15 nt, Vaccinia virus
agauagaaacuauag

SEQ ID NO: 3260892 - RNA, 15 nt, Vaccinia virus
uauuuuaccguuugu

SEQ ID NO: 3260893 - RNA, 18 nt, Vaccinia virus
caauggauacugcaucug

SEQ ID NO: 3260894 - RNA, 17 nt, Vaccinia virus
ucggaguaucaucuauu

SEQ ID NO: 3260895 - RNA, 20 nt, Vaccinia virus
ggaucuccaucauccacaug

SEQ ID NO: 3260896 - RNA, 13 nt, Vaccinia virus
caagaccaaacac

SEQ ID NO: 3260897 - RNA, 13 nt, Vaccinia virus
ggauucaaaaaga

SEQ ID NO: 3260898 - RNA, 21 nt, Vaccinia virus
ucucugauguuuguuuucgau

SEQ ID NO: 3260899 - RNA, 15 nt, Vaccinia virus
auaauuauagaucag

SEQ ID NO: 3260900 - RNA, 11 nt, Vaccinia virus
uuuauuucuag

SEQ ID NO: 3260901 - RNA, 18 nt, Vaccinia virus
guaaaaugaaauaucuua

SEQ ID NO: 3260902 - RNA, 20 nt, Vaccinia virus
uaucugaguauaguguucau

SEQ ID NO: 3260903 - RNA, 16 nt, Vaccinia virus
uacuuuaaagaaguag

SEQ ID NO: 3260904 - RNA, 18 nt, Vaccinia virus
acuaugggaucaugcauu

SEQ ID NO: 3260905 - RNA, 19 nt, Vaccinia virus
auuggcaaaucuuaucauu

SEQ ID NO: 3260906 - RNA, 13 nt, Vaccinia virus
gcucgauaaucaa

SEQ ID NO: 3260907 - RNA, 24 nt, Vaccinia virus
acuauagaagaacucaagcagaaa

SEQ ID NO: 3260908 - RNA, 19 nt, Vaccinia virus
caacaaguuggaugauauu

SEQ ID NO: 3260909 - RNA, 13 nt, Vaccinia virus
uaaacauuccaca

SEQ ID NO: 3260910 - RNA, 13 nt, Vaccinia virus
ugaccaacucauc

SEQ ID NO: 3260911 - RNA, 20 nt, Vaccinia virus
uugguauaaauguuguaauu

SEQ ID NO: 3260912 - RNA, 18 nt, Vaccinia virus
guuaccucguuuauucag

SEQ ID NO: 3260913 - RNA, 23 nt, Vaccinia virus
gauuucuaucccgaaagaacuga

SEQ ID NO: 3260914 - RNA, 17 nt, Vaccinia virus
uuaaacuguuuauuaau

SEQ ID NO: 3260915 - RNA, 20 nt, Vaccinia virus
auuuucaagagauaguuuuc

SEQ ID NO: 3260916 - RNA, 24 nt, Vaccinia virus
aguaaugaagaaaaguauuaccuc

SEQ ID NO: 3260917 - RNA, 12 nt, Vaccinia virus
cuaaauuagaac

SEQ ID NO: 3260918 - RNA, 14 nt, Vaccinia virus
guuuaaaaauggug

SEQ ID NO: 3260919 - RNA, 16 nt, Vaccinia virus
cuauuuguauaauaau

SEQ ID NO: 3260920 - RNA, 14 nt, Vaccinia virus
uucguaaaauguag

SEQ ID NO: 3260921 - RNA, 23 nt, Vaccinia virus
auauaauggauuugcaccacuuu

SEQ ID NO: 3260922 - RNA, 21 nt, Vaccinia virus
aguauacaucaugaaaugaug

SEQ ID NO: 3260923 - RNA, 16 nt, Vaccinia virus
cuucagacaacaucuc

SEQ ID NO: 3260924 - RNA, 16 nt, Vaccinia virus
uuacguuaauacuaag

SEQ ID NO: 3260925 - RNA, 13 nt, Vaccinia virus
agaguucauuuau

SEQ ID NO: 3260926 - RNA, 14 nt, Vaccinia virus
guauaaagauguua

SEQ ID NO: 3260927 - RNA, 14 nt, Vaccinia virus
ugguauaucaacau

SEQ ID NO: 3260928 - RNA, 13 nt, Vaccinia virus
ugauuuacucauu

SEQ ID NO: 3260929 - RNA, 13 nt, Vaccinia virus
aguguuugauucu

SEQ ID NO: 3260930 - RNA, 16 nt, Vaccinia virus
uaaaaucugaucuugu

SEQ ID NO: 3260931 - RNA, 14 nt, Vaccinia virus
ucagagagauuucg

SEQ ID NO: 3260932 - RNA, 14 nt, Vaccinia virus
uaauaagaauaaag

SEQ ID NO: 3260933 - RNA, 22 nt, Vaccinia virus
uaaaauagacaauggaauucau

SEQ ID NO: 3260934 - RNA, 19 nt, Vaccinia virus
gaauauaaccacuacauca

SEQ ID NO: 3260935 - RNA, 14 nt, Vaccinia virus
guuaaagaucuuaa

SEQ ID NO: 3260936 - RNA, 12 nt, Vaccinia virus
aauuuagaauga

SEQ ID NO: 3260937 - RNA, 14 nt, Vaccinia virus
caagguuagaugua

SEQ ID NO: 3260938 - RNA, 23 nt, Vaccinia virus
caaauaucggaauaaguagacau

SEQ ID NO: 3260939 - RNA, 23 nt, Vaccinia virus
guugaucucaagccgucuuuucu

SEQ ID NO: 3260940 - RNA, 15 nt, Vaccinia virus
uuauauaaauauguu

SEQ ID NO: 3260941 - RNA, 15 nt, Vaccinia virus
aaauaaaauaaugau

SEQ ID NO: 3260942 - RNA, 15 nt, Vaccinia virus
auucguaguuuuuac

SEQ ID NO: 3260943 - RNA, 17 nt, Vaccinia virus
uggacgauuuugugaua

SEQ ID NO: 3260944 - RNA, 20 nt, Vaccinia virus
augaaaacuuuaaauacuua

SEQ ID NO: 3260945 - RNA, 17 nt, Vaccinia virus
cuguaccaaagucauca

SEQ ID NO: 3260946 - RNA, 23 nt, Vaccinia virus
cuuucugauggucucauaaaaaa

SEQ ID NO: 3260947 - RNA, 16 nt, Vaccinia virus
ugauuauaguuucuau

SEQ ID NO: 3260948 - RNA, 15 nt, Vaccinia virus
guucaaaaccuuuga

SEQ ID NO: 3260949 - RNA, 18 nt, Vaccinia virus
gacgaaauauuagaaaaa

SEQ ID NO: 3260950 - RNA, 21 nt, Vaccinia virus
agaauagcguuuacauauucu

SEQ ID NO: 3260951 - RNA, 14 nt, Vaccinia virus
aaguuauagaaugu

SEQ ID NO: 3260952 - RNA, 23 nt, Vaccinia virus
guuuuuuaauuccauaucuuuua

SEQ ID NO: 3260953 - RNA, 11 nt, Vaccinia virus
ggaaaaagcuc

SEQ ID NO: 3260954 - RNA, 12 nt, Vaccinia virus
auuauucauuuu

SEQ ID NO: 3260955 - RNA, 15 nt, Vaccinia virus
gguauauguuuacca

SEQ ID NO: 3260956 - RNA, 14 nt, Vaccinia virus
ggaaauggaagaaa

SEQ ID NO: 3260957 - RNA, 23 nt, Vaccinia virus
caguauugggacaacuuaaucug

SEQ ID NO: 3260958 - RNA, 16 nt, Vaccinia virus
agaccacacggagaac

SEQ ID NO: 3260959 - RNA, 14 nt, Vaccinia virus
aaugaguauuuaua

SEQ ID NO: 3260960 - RNA, 17 nt, Vaccinia virus
uucugguguaauauucu

SEQ ID NO: 3260961 - RNA, 22 nt, Vaccinia virus
uuaagagauccgauaaacauug

SEQ ID NO: 3260962 - RNA, 14 nt, Vaccinia virus
agcauugaaaauac

SEQ ID NO: 3260963 - RNA, 23 nt, Vaccinia virus
uaggaaaacccgcacacauaaac

SEQ ID NO: 3260964 - RNA, 21 nt, Vaccinia virus
uugaugacgucaaacaauguu

SEQ ID NO: 3260965 - RNA, 18 nt, Vaccinia virus
agaacuaacaaacuauac

SEQ ID NO: 3260966 - RNA, 18 nt, Vaccinia virus
ucacacuacugaaaaaag

SEQ ID NO: 3260967 - RNA, 13 nt, Vaccinia virus
ucuuaaaagguuu

SEQ ID NO: 3260968 - RNA, 20 nt, Vaccinia virus
cucuauuucuuaaugaauuu

SEQ ID NO: 3260969 - RNA, 13 nt, Vaccinia virus
guauauuauucau

SEQ ID NO: 3260970 - RNA, 15 nt, Vaccinia virus
ccagauauauaucuu

SEQ ID NO: 3260971 - RNA, 24 nt, Vaccinia virus
auucaaaauggcaauuauacuaga

SEQ ID NO: 3260972 - RNA, 16 nt, Vaccinia virus
auaguagaguaaacau

SEQ ID NO: 3260973 - RNA, 17 nt, Vaccinia virus
uagugauuccauugaua

SEQ ID NO: 3260974 - RNA, 17 nt, Vaccinia virus
aauagaaaaaacaugug

SEQ ID NO: 3260975 - RNA, 22 nt, Vaccinia virus
uuuaugaaugaugauauauaac

SEQ ID NO: 3260976 - RNA, 18 nt, Vaccinia virus
acucaacggaaaacauuu

SEQ ID NO: 3260977 - RNA, 15 nt, Vaccinia virus
uccagugcauuucua

SEQ ID NO: 3260978 - RNA, 16 nt, Vaccinia virus
gcugauuaacuuccac

SEQ ID NO: 3260979 - RNA, 15 nt, Vaccinia virus
aauuauacaagagau

SEQ ID NO: 3260980 - RNA, 23 nt, Vaccinia virus
ucuauccuuuuccggaagcaaug

SEQ ID NO: 3260981 - RNA, 20 nt, Vaccinia virus
aauuacuuaaagauagaaau

SEQ ID NO: 3260982 - RNA, 17 nt, Vaccinia virus
uaugcauccaaaguauu

SEQ ID NO: 3260983 - RNA, 19 nt, Vaccinia virus
uacagaaggcaaacgcuau

SEQ ID NO: 3260984 - RNA, 16 nt, Vaccinia virus
uagaguagacauuaau

SEQ ID NO: 3260985 - RNA, 20 nt, Vaccinia virus
auaaaucaagaucauaauua

SEQ ID NO: 3260986 - RNA, 23 nt, Vaccinia virus
uagccagacaaauggucaaugau

SEQ ID NO: 3260987 - RNA, 15 nt, Vaccinia virus
auagauucuugguaa

SEQ ID NO: 3260988 - RNA, 19 nt, Vaccinia virus
uguauugauuacaguguau

SEQ ID NO: 3260989 - RNA, 15 nt, Vaccinia virus
ucuuuaauacagaug

SEQ ID NO: 3260990 - RNA, 14 nt, Vaccinia virus
aguuauuaaugaug

SEQ ID NO: 3260991 - RNA, 17 nt, Vaccinia virus
uuuucuuaugcauguuu

SEQ ID NO: 3260992 - RNA, 17 nt, Vaccinia virus
guauuguucuaaagcca

SEQ ID NO: 3260993 - RNA, 23 nt, Vaccinia virus
aauauggagagguguauuuccau

SEQ ID NO: 3260994 - RNA, 18 nt, Vaccinia virus
auagaauuuagaaauaua

SEQ ID NO: 3260995 - RNA, 18 nt, Vaccinia virus
uuagacuguuuguagaau

SEQ ID NO: 3260996 - RNA, 16 nt, Vaccinia virus
caagauuccuuuucua

SEQ ID NO: 3260997 - RNA, 17 nt, Vaccinia virus
auuagugauagaacguu

SEQ ID NO: 3260998 - RNA, 19 nt, Vaccinia virus
gugagaacuuguuaaagaa

SEQ ID NO: 3260999 - RNA, 23 nt, Vaccinia virus
guacuguucaaacaugaugagau

SEQ ID NO: 3261000 - RNA, 12 nt, Vaccinia virus
gacuuuguuaau

SEQ ID NO: 3261001 - RNA, 18 nt, Vaccinia virus
uaaaaaaacauuauucua

SEQ ID NO: 3261002 - RNA, 17 nt, Vaccinia virus
aacugauucaauacgaa

SEQ ID NO: 3261003 - RNA, 16 nt, Vaccinia virus
ugaaaugauaacuguu

SEQ ID NO: 3261004 - RNA, 14 nt, Vaccinia virus
acucucaaaaugcu

SEQ ID NO: 3261005 - RNA, 13 nt, Vaccinia virus
ugcaccagaauua

SEQ ID NO: 3261006 - RNA, 13 nt, Vaccinia virus
guccgcuuuagua

SEQ ID NO: 3261007 - RNA, 16 nt, Vaccinia virus
uagauauaacuucugg

SEQ ID NO: 3261008 - RNA, 13 nt, Vaccinia virus
aucacuaacaaua

SEQ ID NO: 3261009 - RNA, 15 nt, Vaccinia virus
cuacacuaaaaugau

SEQ ID NO: 3261010 - RNA, 21 nt, Vaccinia virus
ccuccaccgaugauggaguaa

SEQ ID NO: 3261011 - RNA, 18 nt, Vaccinia virus
ucaauccuuugauuauca

SEQ ID NO: 3261012 - RNA, 21 nt, Vaccinia virus
auuauuggguaaguuuaaaaa

SEQ ID NO: 3261013 - RNA, 19 nt, Vaccinia virus
uauagauaacauaguuugg

SEQ ID NO: 3261014 - RNA, 13 nt, Vaccinia virus
guauuagauaaau

SEQ ID NO: 3261015 - RNA, 19 nt, Vaccinia virus
gugaauaugaucuucaucu

SEQ ID NO: 3261016 - RNA, 16 nt, Vaccinia virus
cauaaaaaaauauauu

SEQ ID NO: 3261017 - RNA, 15 nt, Vaccinia virus
aaucugauaaauaua

SEQ ID NO: 3261018 - RNA, 19 nt, Vaccinia virus
auaacauguuaauuuccga

SEQ ID NO: 3261019 - RNA, 19 nt, Vaccinia virus
cagucaagucaaugauauu

SEQ ID NO: 3261020 - RNA, 14 nt, Vaccinia virus
ucacagucuguuuu

SEQ ID NO: 3261021 - RNA, 22 nt, Vaccinia virus
aaucccuacauauuuuagaaca

SEQ ID NO: 3261022 - RNA, 20 nt, Vaccinia virus
auuuuggagagccuuaacga

SEQ ID NO: 3261023 - RNA, 16 nt, Vaccinia virus
uaauauaaacaucuug

SEQ ID NO: 3261024 - RNA, 12 nt, Vaccinia virus
acaucuuccuuc

SEQ ID NO: 3261025 - RNA, 20 nt, Vaccinia virus
auuuaugauauauacacuuu

SEQ ID NO: 3261026 - RNA, 16 nt, Vaccinia virus
aguaaaaauaacuaga

SEQ ID NO: 3261027 - RNA, 14 nt, Vaccinia virus
ucaaaagaaaucuu

SEQ ID NO: 3261028 - RNA, 17 nt, Vaccinia virus
aauucuaugaugaaaca

SEQ ID NO: 3261029 - RNA, 23 nt, Vaccinia virus
agaaaauuagaucugauaauauu

SEQ ID NO: 3261030 - RNA, 12 nt, Vaccinia virus
aagaagaaguua

SEQ ID NO: 3261031 - RNA, 11 nt, Vaccinia virus
ugaagaaauga

SEQ ID NO: 3261032 - RNA, 21 nt, Vaccinia virus
aaugguauacacaucaaaaua

SEQ ID NO: 3261033 - RNA, 13 nt, Vaccinia virus
aaaucuaacuucu

SEQ ID NO: 3261034 - RNA, 17 nt, Vaccinia virus
ugaaugggaauuucuau

SEQ ID NO: 3261035 - RNA, 21 nt, Vaccinia virus
uuacaauguagaaauuagaaa

SEQ ID NO: 3261036 - RNA, 21 nt, Vaccinia virus
accugccauaaauaaaugcuu

SEQ ID NO: 3261037 - RNA, 18 nt, Vaccinia virus
uuacauaguugauaaaaa

SEQ ID NO: 3261038 - RNA, 14 nt, Vaccinia virus
uuauauuauuuaca

SEQ ID NO: 3261039 - RNA, 14 nt, Vaccinia virus
gcuuuccuaaagaa

SEQ ID NO: 3261040 - RNA, 15 nt, Vaccinia virus
agugguauaucuugu

SEQ ID NO: 3261041 - RNA, 20 nt, Vaccinia virus
uuaauauaugcucuagauau

SEQ ID NO: 3261042 - RNA, 16 nt, Vaccinia virus
caagauuuuuaaacaa

SEQ ID NO: 3261043 - RNA, 18 nt, Vaccinia virus
acaauccuagaacgaaua

SEQ ID NO: 3261044 - RNA, 22 nt, Vaccinia virus
uaguaaacuugacuaaaucuua

SEQ ID NO: 3261045 - RNA, 13 nt, Vaccinia virus
aauucaaauagau

SEQ ID NO: 3261046 - RNA, 16 nt, Vaccinia virus
auauauuaagaaguuc

SEQ ID NO: 3261047 - RNA, 23 nt, Vaccinia virus
acuuccucauuaagauugucaug

SEQ ID NO: 3261048 - RNA, 14 nt, Vaccinia virus
agucauuauauacu

SEQ ID NO: 3261049 - RNA, 14 nt, Vaccinia virus
auggcaacgacuau

SEQ ID NO: 3261050 - RNA, 14 nt, Vaccinia virus
caaagcaucgauuu

SEQ ID NO: 3261051 - RNA, 20 nt, Vaccinia virus
cuaaaaaauagcgcugaaaa

SEQ ID NO: 3261052 - RNA, 20 nt, Vaccinia virus
auucaagauuuuauuaucga

SEQ ID NO: 3261053 - RNA, 19 nt, Vaccinia virus
agaaacgauaccaucuucu

SEQ ID NO: 3261054 - RNA, 23 nt, Vaccinia virus
ugcacaauccaaacuuuuucaca

SEQ ID NO: 3261055 - RNA, 15 nt, Vaccinia virus
uccaauguauuuaug

SEQ ID NO: 3261056 - RNA, 14 nt, Vaccinia virus
ucaauuuguacauc

SEQ ID NO: 3261057 - RNA, 23 nt, Vaccinia virus
uuuaagacugcugaauguaucuu

SEQ ID NO: 3261058 - RNA, 21 nt, Vaccinia virus
auaucaacaacguggaauugu

SEQ ID NO: 3261059 - RNA, 19 nt, Vaccinia virus
uaugugaauaugguaugau

SEQ ID NO: 3261060 - RNA, 14 nt, Vaccinia virus
uacaauaacuacau

SEQ ID NO: 3261061 - RNA, 22 nt, Vaccinia virus
ccauuuaucauggaaaagaauu

SEQ ID NO: 3261062 - RNA, 16 nt, Vaccinia virus
aaaaguccucgaauua

SEQ ID NO: 3261063 - RNA, 14 nt, Vaccinia virus
acacaaaaagaaag

SEQ ID NO: 3261064 - RNA, 17 nt, Vaccinia virus
uauuaacgaguuccauu

SEQ ID NO: 3261065 - RNA, 13 nt, Vaccinia virus
ggccaaaaugaua

SEQ ID NO: 3261066 - RNA, 15 nt, Vaccinia virus
aauccuuugauuauc

SEQ ID NO: 3261067 - RNA, 21 nt, Vaccinia virus
auuuaaaugaaucccaaacau

SEQ ID NO: 3261068 - RNA, 14 nt, Vaccinia virus
cgaaugaauguuuu

SEQ ID NO: 3261069 - RNA, 20 nt, Vaccinia virus
cguggcaaacaauguauaca

SEQ ID NO: 3261070 - RNA, 18 nt, Vaccinia virus
uaagcuuuuuaaaaucau

SEQ ID NO: 3261071 - RNA, 20 nt, Vaccinia virus
uacguaauagaacgugucau

SEQ ID NO: 3261072 - RNA, 23 nt, Vaccinia virus
auggauuaguuagacugaaugcu

SEQ ID NO: 3261073 - RNA, 17 nt, Vaccinia virus
uugauaaagauagauga

SEQ ID NO: 3261074 - RNA, 18 nt, Vaccinia virus
cauuagguuaaaugauuu

SEQ ID NO: 3261075 - RNA, 13 nt, Vaccinia virus
agacuuuguagaa

SEQ ID NO: 3261076 - RNA, 21 nt, Vaccinia virus
auaaagaaguuauagaaugua

SEQ ID NO: 3261077 - RNA, 15 nt, Vaccinia virus
agauuacucauguaa

SEQ ID NO: 3261078 - RNA, 15 nt, Vaccinia virus
cauggucuagaugua

SEQ ID NO: 3261079 - RNA, 23 nt, Vaccinia virus
aguucucuuuucauguucgaaaa

SEQ ID NO: 3261080 - RNA, 19 nt, Vaccinia virus
aauaaaaguggaagucauu

SEQ ID NO: 3261081 - RNA, 12 nt, Vaccinia virus
aauguucauaau

SEQ ID NO: 3261082 - RNA, 14 nt, Vaccinia virus
cuagcgacucuguu

SEQ ID NO: 3261083 - RNA, 20 nt, Vaccinia virus
auugcacuauacauuuugaa

SEQ ID NO: 3261084 - RNA, 16 nt, Vaccinia virus
aauuuuuguuuccguu

SEQ ID NO: 3261085 - RNA, 12 nt, Vaccinia virus
acauuuacauau

SEQ ID NO: 3261086 - RNA, 12 nt, Vaccinia virus
uuauaacuaaac

SEQ ID NO: 3261087 - RNA, 17 nt, Vaccinia virus
ugcaacaucuggagaau

SEQ ID NO: 3261088 - RNA, 13 nt, Vaccinia virus
uaugcgauagcaa

SEQ ID NO: 3261089 - RNA, 12 nt, Vaccinia virus
aacaaacagcaa

SEQ ID NO: 3261090 - RNA, 19 nt, Vaccinia virus
uaagacuuauucucuacau

SEQ ID NO: 3261091 - RNA, 11 nt, Vaccinia virus
cuuuuaauuuu

SEQ ID NO: 3261092 - RNA, 15 nt, Vaccinia virus
uagacauuaauagaa

SEQ ID NO: 3261093 - RNA, 22 nt, Vaccinia virus
auaguuaccacgugcuguacca

SEQ ID NO: 3261094 - RNA, 17 nt, Vaccinia virus
cagacacagacgauauu

SEQ ID NO: 3261095 - RNA, 14 nt, Vaccinia virus
uuucaaagaaugag

SEQ ID NO: 3261096 - RNA, 17 nt, Vaccinia virus
ucacaaguaugaagaaa

SEQ ID NO: 3261097 - RNA, 17 nt, Vaccinia virus
acaacuaccaauuguuu

SEQ ID NO: 3261098 - RNA, 13 nt, Vaccinia virus
uauagaauugucu

SEQ ID NO: 3261099 - RNA, 19 nt, Vaccinia virus
ugagcauaaacauaauaaa

SEQ ID NO: 3261100 - RNA, 17 nt, Vaccinia virus
aucgacuauuuuaaaua

SEQ ID NO: 3261101 - RNA, 23 nt, Vaccinia virus
gauucguccuuaaccaacugauu

SEQ ID NO: 3261102 - RNA, 13 nt, Vaccinia virus
auucucuauuuug

SEQ ID NO: 3261103 - RNA, 15 nt, Vaccinia virus
aaggggugagaaugu

SEQ ID NO: 3261104 - RNA, 20 nt, Vaccinia virus
aauagaaucuauuuuaauga

SEQ ID NO: 3261105 - RNA, 19 nt, Vaccinia virus
ccaauuacugauaauguag

SEQ ID NO: 3261106 - RNA, 14 nt, Vaccinia virus
auggaugcagaaua

SEQ ID NO: 3261107 - RNA, 13 nt, Vaccinia virus
gacaaauuauucu

SEQ ID NO: 3261108 - RNA, 20 nt, Vaccinia virus
caacaaguguguagauaucu

SEQ ID NO: 3261109 - RNA, 21 nt, Vaccinia virus
cuauuuauugacauuaaucua

SEQ ID NO: 3261110 - RNA, 13 nt, Vaccinia virus
aauuaauaaugau

SEQ ID NO: 3261111 - RNA, 17 nt, Vaccinia virus
aaauuccgcuacuaaua

SEQ ID NO: 3261112 - RNA, 20 nt, Vaccinia virus
aacgaacgaggugugaaugu

SEQ ID NO: 3261113 - RNA, 18 nt, Vaccinia virus
ugacgcaguaacauauau

SEQ ID NO: 3261114 - RNA, 18 nt, Vaccinia virus
aauguuaucgaugaugua

SEQ ID NO: 3261115 - RNA, 18 nt, Vaccinia virus
auacucccacaaauacug

SEQ ID NO: 3261116 - RNA, 20 nt, Vaccinia virus
agaagauguuagaaaaaaug

SEQ ID NO: 3261117 - RNA, 23 nt, Vaccinia virus
uaaucuauuuuaccucuucugau

SEQ ID NO: 3261118 - RNA, 18 nt, Vaccinia virus
auaccaacauuaaaaugu

SEQ ID NO: 3261119 - RNA, 22 nt, Vaccinia virus
acugauaaaguagauuaugaag

SEQ ID NO: 3261120 - RNA, 22 nt, Vaccinia virus
ucgagagacuuuguagaaacaa

SEQ ID NO: 3261121 - RNA, 17 nt, Vaccinia virus
aaaguauauauaaguua

SEQ ID NO: 3261122 - RNA, 17 nt, Vaccinia virus
aacauauaauuauaaga

SEQ ID NO: 3261123 - RNA, 16 nt, Vaccinia virus
cauauguuuaaacgac

SEQ ID NO: 3261124 - RNA, 18 nt, Vaccinia virus
caaacaggaaagaaguau

SEQ ID NO: 3261125 - RNA, 16 nt, Vaccinia virus
uacgaacaauaucuua

SEQ ID NO: 3261126 - RNA, 15 nt, Vaccinia virus
cacaaccaaauacuu

SEQ ID NO: 3261127 - RNA, 16 nt, Vaccinia virus
aucaacagauagcuug

SEQ ID NO: 3261128 - RNA, 13 nt, Vaccinia virus
uaugaauaucuuc

SEQ ID NO: 3261129 - RNA, 15 nt, Vaccinia virus
auuauagauuuucca

SEQ ID NO: 3261130 - RNA, 18 nt, Vaccinia virus
ccuguaguuuuaacugga

SEQ ID NO: 3261131 - RNA, 22 nt, Vaccinia virus
caauggauaccuugcuauuuuu

SEQ ID NO: 3261132 - RNA, 22 nt, Vaccinia virus
aacacgauuauuauaaaauaac

SEQ ID NO: 3261133 - RNA, 17 nt, Vaccinia virus
uuaaauuauuuaguuuu

SEQ ID NO: 3261134 - RNA, 17 nt, Vaccinia virus
uggaaacuauaauuuug

SEQ ID NO: 3261135 - RNA, 19 nt, Vaccinia virus
uauuaagaaguuccaugau

SEQ ID NO: 3261136 - RNA, 19 nt, Vaccinia virus
uauuaaaguacguaaaucu

SEQ ID NO: 3261137 - RNA, 17 nt, Vaccinia virus
gaaacuguaaagaacag

SEQ ID NO: 3261138 - RNA, 20 nt, Vaccinia virus
ugauaucgacggaagaaguu

SEQ ID NO: 3261139 - RNA, 15 nt, Vaccinia virus
uacuagauguuguaa

SEQ ID NO: 3261140 - RNA, 12 nt, Vaccinia virus
acagacuuuaac

SEQ ID NO: 3261141 - RNA, 17 nt, Vaccinia virus
ucccauauauuccauga

SEQ ID NO: 3261142 - RNA, 17 nt, Vaccinia virus
aaaugacuaauuuugua

SEQ ID NO: 3261143 - RNA, 19 nt, Vaccinia virus
uuauaaugaggauaauaag

SEQ ID NO: 3261144 - RNA, 18 nt, Vaccinia virus
caaagaggguauauccau

SEQ ID NO: 3261145 - RNA, 22 nt, Vaccinia virus
ucacucgguggauacaauaaau

SEQ ID NO: 3261146 - RNA, 23 nt, Vaccinia virus
aaaacagaauaugagaaugaaua

SEQ ID NO: 3261147 - RNA, 24 nt, Vaccinia virus
auuaucaacguaacuauauuccaa

SEQ ID NO: 3261148 - RNA, 20 nt, Vaccinia virus
gucuguaacucugauaaucu

SEQ ID NO: 3261149 - RNA, 16 nt, Vaccinia virus
uaguuuaucauacuua

SEQ ID NO: 3261150 - RNA, 23 nt, Vaccinia virus
agaaacacugaagcuaacgauga

SEQ ID NO: 3261151 - RNA, 17 nt, Vaccinia virus
aauaacuaguauaaaau

SEQ ID NO: 3261152 - RNA, 20 nt, Vaccinia virus
uggcauagacuuauacugug

SEQ ID NO: 3261153 - RNA, 18 nt, Vaccinia virus
accaauaaaaauaaacua

SEQ ID NO: 3261154 - RNA, 22 nt, Vaccinia virus
auagcugaaucugauaaauaua

SEQ ID NO: 3261155 - RNA, 22 nt, Vaccinia virus
aaauuaacagauaaaaagacuu

SEQ ID NO: 3261156 - RNA, 12 nt, Vaccinia virus
agaauauacucu

SEQ ID NO: 3261157 - RNA, 15 nt, Vaccinia virus
uagccacaauuauug

SEQ ID NO: 3261158 - RNA, 15 nt, Vaccinia virus
augugaguauuggau

SEQ ID NO: 3261159 - RNA, 14 nt, Vaccinia virus
uaaaacauuugcau

SEQ ID NO: 3261160 - RNA, 22 nt, Vaccinia virus
uauaaucuuuuucaucuuguga

SEQ ID NO: 3261161 - RNA, 15 nt, Vaccinia virus
acauaaaaaaaaugu

SEQ ID NO: 3261162 - RNA, 14 nt, Vaccinia virus
ucucaucuaucaaa

SEQ ID NO: 3261163 - RNA, 15 nt, Vaccinia virus
uaucuaacucguaaa

SEQ ID NO: 3261164 - RNA, 19 nt, Vaccinia virus
uuuguagcucucccagauu

SEQ ID NO: 3261165 - RNA, 21 nt, Vaccinia virus
augaaaugauucucucaacau

SEQ ID NO: 3261166 - RNA, 21 nt, Vaccinia virus
ucuauaaacgucguauguaga

SEQ ID NO: 3261167 - RNA, 13 nt, Vaccinia virus
uaaacauggauuu

SEQ ID NO: 3261168 - RNA, 20 nt, Vaccinia virus
cugauaaguucuuuauacag

SEQ ID NO: 3261169 - RNA, 13 nt, Vaccinia virus
cuacaauauuuca

SEQ ID NO: 3261170 - RNA, 19 nt, Vaccinia virus
cauuauuacauagauguau

SEQ ID NO: 3261171 - RNA, 19 nt, Vaccinia virus
acggugcugaccuggaaaa

SEQ ID NO: 3261172 - RNA, 23 nt, Vaccinia virus
uaaaucuaaaauugauggaugag

SEQ ID NO: 3261173 - RNA, 15 nt, Vaccinia virus
auugauagugaauga

SEQ ID NO: 3261174 - RNA, 16 nt, Vaccinia virus
cuagcgauuaugaaaa

SEQ ID NO: 3261175 - RNA, 18 nt, Vaccinia virus
gucaucuccagaggaaau

SEQ ID NO: 3261176 - RNA, 21 nt, Vaccinia virus
aucagucuccaguuaauauau

SEQ ID NO: 3261177 - RNA, 16 nt, Vaccinia virus
aauaccucauaaaacg

SEQ ID NO: 3261178 - RNA, 13 nt, Vaccinia virus
uaaauauuucauu

SEQ ID NO: 3261179 - RNA, 17 nt, Vaccinia virus
cgucucaucuguuuaag

SEQ ID NO: 3261180 - RNA, 19 nt, Vaccinia virus
aauaugguaauuuagagaa

SEQ ID NO: 3261181 - RNA, 17 nt, Vaccinia virus
ccaauucguauaaauau

SEQ ID NO: 3261182 - RNA, 20 nt, Vaccinia virus
uaauuuaugaggugaacgau

SEQ ID NO: 3261183 - RNA, 18 nt, Vaccinia virus
guacaggacguaacuaua

SEQ ID NO: 3261184 - RNA, 14 nt, Vaccinia virus
uauuccauuaaauu

SEQ ID NO: 3261185 - RNA, 17 nt, Vaccinia virus
ugcacguuuacauaucu

SEQ ID NO: 3261186 - RNA, 14 nt, Vaccinia virus
auuaucaaaaagaa

SEQ ID NO: 3261187 - RNA, 16 nt, Vaccinia virus
auaaucaauaauauau

SEQ ID NO: 3261188 - RNA, 15 nt, Vaccinia virus
ucacuaauaaauugg

SEQ ID NO: 3261189 - RNA, 20 nt, Vaccinia virus
cuucaugaacauaaucaguu

SEQ ID NO: 3261190 - RNA, 23 nt, Vaccinia virus
auuucucuaccacaggagaaugg

SEQ ID NO: 3261191 - RNA, 23 nt, Vaccinia virus
uguagauaauaacuaaaaaucaa

SEQ ID NO: 3261192 - RNA, 22 nt, Vaccinia virus
acuaagugaacgaaagguauac

SEQ ID NO: 3261193 - RNA, 18 nt, Vaccinia virus
gcuaaaucguauauguua

SEQ ID NO: 3261194 - RNA, 12 nt, Vaccinia virus
uauaauguuucc

SEQ ID NO: 3261195 - RNA, 14 nt, Vaccinia virus
uaaacguacauuuu

SEQ ID NO: 3261196 - RNA, 18 nt, Vaccinia virus
uugagaugcugcuccugg

SEQ ID NO: 3261197 - RNA, 16 nt, Vaccinia virus
agcuuccagauuuaaa

SEQ ID NO: 3261198 - RNA, 16 nt, Vaccinia virus
guuaacauuuuauuau

SEQ ID NO: 3261199 - RNA, 12 nt, Vaccinia virus
uuaauauguaca

SEQ ID NO: 3261200 - RNA, 23 nt, Vaccinia virus
agauaucauaaaugaaauagaua

SEQ ID NO: 3261201 - RNA, 19 nt, Vaccinia virus
aagucauacuagaauaaag

SEQ ID NO: 3261202 - RNA, 20 nt, Vaccinia virus
aacucgucuccccaaacauu

SEQ ID NO: 3261203 - RNA, 15 nt, Vaccinia virus
uucccaaauaguuuu

SEQ ID NO: 3261204 - RNA, 15 nt, Vaccinia virus
auaacuguuuaaaaa

SEQ ID NO: 3261205 - RNA, 15 nt, Vaccinia virus
auagcaguauuuccc

SEQ ID NO: 3261206 - RNA, 19 nt, Vaccinia virus
uuuagacagugguuucaug

SEQ ID NO: 3261207 - RNA, 22 nt, Vaccinia virus
gauauugucccacggaagugaa

SEQ ID NO: 3261208 - RNA, 21 nt, Vaccinia virus
uuaaugccgauuuaauacguu

SEQ ID NO: 3261209 - RNA, 19 nt, Vaccinia virus
auccuccggaguauuaaug

SEQ ID NO: 3261210 - RNA, 23 nt, Vaccinia virus
auacucuaugaauggauacuugu

SEQ ID NO: 3261211 - RNA, 18 nt, Vaccinia virus
ucgugaaauaggaauaau

SEQ ID NO: 3261212 - RNA, 14 nt, Vaccinia virus
auacgaaaauagau

SEQ ID NO: 3261213 - RNA, 15 nt, Vaccinia virus
aaaguuaguacagaa

SEQ ID NO: 3261214 - RNA, 14 nt, Vaccinia virus
ugguuuaauuauuu

SEQ ID NO: 3261215 - RNA, 22 nt, Vaccinia virus
uauaaucaguagcguguuuuaa

SEQ ID NO: 3261216 - RNA, 19 nt, Vaccinia virus
uccaaguucuauaguuucu

SEQ ID NO: 3261217 - RNA, 19 nt, Vaccinia virus
aaaucuaguucugcauugu

SEQ ID NO: 3261218 - RNA, 19 nt, Vaccinia virus
aacauugauuuuaaaauua

SEQ ID NO: 3261219 - RNA, 23 nt, Vaccinia virus
agaaucagcgucguuuaacacaa

SEQ ID NO: 3261220 - RNA, 16 nt, Vaccinia virus
guacauuaauaaauga

SEQ ID NO: 3261221 - RNA, 16 nt, Vaccinia virus
gucucuauaaaaauga

SEQ ID NO: 3261222 - RNA, 18 nt, Vaccinia virus
uauuauggaaaucaacau

SEQ ID NO: 3261223 - RNA, 18 nt, Vaccinia virus
aaauuauggcguuuguau

SEQ ID NO: 3261224 - RNA, 22 nt, Vaccinia virus
uuuuacccucaaucauguacua

SEQ ID NO: 3261225 - RNA, 18 nt, Vaccinia virus
ggauuaauauauguuaua

SEQ ID NO: 3261226 - RNA, 17 nt, Vaccinia virus
uuaauuaagauauuguu

SEQ ID NO: 3261227 - RNA, 14 nt, Vaccinia virus
aauggcugaauggc

SEQ ID NO: 3261228 - RNA, 15 nt, Vaccinia virus
cucaauuaguuuauu

SEQ ID NO: 3261229 - RNA, 15 nt, Vaccinia virus
aaaaagauuuuguua

SEQ ID NO: 3261230 - RNA, 17 nt, Vaccinia virus
guuucgauauaaucauc

SEQ ID NO: 3261231 - RNA, 12 nt, Vaccinia virus
cuaauuucugaa

SEQ ID NO: 3261232 - RNA, 18 nt, Vaccinia virus
acagaucuaguauaauua

SEQ ID NO: 3261233 - RNA, 19 nt, Vaccinia virus
ugaugguuuucuaaauaga

SEQ ID NO: 3261234 - RNA, 16 nt, Vaccinia virus
acaaaaguuaauaauu

SEQ ID NO: 3261235 - RNA, 11 nt, Vaccinia virus
aauacaaaauc

SEQ ID NO: 3261236 - RNA, 14 nt, Vaccinia virus
uauaucuucuucug

SEQ ID NO: 3261237 - RNA, 19 nt, Vaccinia virus
uggaaacaauucauaauua

SEQ ID NO: 3261238 - RNA, 15 nt, Vaccinia virus
gaggauguuaaacaa

SEQ ID NO: 3261239 - RNA, 13 nt, Vaccinia virus
agaaaaaaauauu

SEQ ID NO: 3261240 - RNA, 14 nt, Vaccinia virus
cgguuuuccaucau

SEQ ID NO: 3261241 - RNA, 22 nt, Vaccinia virus
auccucuauccgacuagaauua

SEQ ID NO: 3261242 - RNA, 22 nt, Vaccinia virus
gcauucuucauucuauuaaugu

SEQ ID NO: 3261243 - RNA, 15 nt, Vaccinia virus
agaucaagaaacauu

SEQ ID NO: 3261244 - RNA, 18 nt, Vaccinia virus
aaguaggauuauguaaca

SEQ ID NO: 3261245 - RNA, 18 nt, Vaccinia virus
aaaauuauugauauguau

SEQ ID NO: 3261246 - RNA, 23 nt, Vaccinia virus
auugguugcgucaagaacuacua

SEQ ID NO: 3261247 - RNA, 20 nt, Vaccinia virus
ugauuuuucuucauuuauca

SEQ ID NO: 3261248 - RNA, 22 nt, Vaccinia virus
aaucauuucgacauuaauuccu

SEQ ID NO: 3261249 - RNA, 14 nt, Vaccinia virus
uccauaauccucua

SEQ ID NO: 3261250 - RNA, 18 nt, Vaccinia virus
uuaaaaauaguauuauca

SEQ ID NO: 3261251 - RNA, 16 nt, Vaccinia virus
gaugauuaaaauuaac

SEQ ID NO: 3261252 - RNA, 17 nt, Vaccinia virus
gucuuuaaguauauacg

SEQ ID NO: 3261253 - RNA, 19 nt, Vaccinia virus
auucuggugcuaauuauuc

SEQ ID NO: 3261254 - RNA, 15 nt, Vaccinia virus
uagauaauucuaauu

SEQ ID NO: 3261255 - RNA, 21 nt, Vaccinia virus
uaacacucgcuccauauucca

SEQ ID NO: 3261256 - RNA, 17 nt, Vaccinia virus
auucuaccauagcaaau

SEQ ID NO: 3261257 - RNA, 12 nt, Vaccinia virus
ucugauuccacc

SEQ ID NO: 3261258 - RNA, 15 nt, Vaccinia virus
auauacagacucuau

SEQ ID NO: 3261259 - RNA, 12 nt, Vaccinia virus
uucuguuuucaa

SEQ ID NO: 3261260 - RNA, 19 nt, Vaccinia virus
auagaagauagauaugcca

SEQ ID NO: 3261261 - RNA, 17 nt, Vaccinia virus
ccauauauccaauaaag

SEQ ID NO: 3261262 - RNA, 14 nt, Vaccinia virus
auaauuuagauaau

SEQ ID NO: 3261263 - RNA, 15 nt, Vaccinia virus
uaacgcauuaaugag

SEQ ID NO: 3261264 - RNA, 18 nt, Vaccinia virus
gaaaucaaaucucuauca

SEQ ID NO: 3261265 - RNA, 23 nt, Vaccinia virus
auuuugaaaggcgguauauguau

SEQ ID NO: 3261266 - RNA, 19 nt, Vaccinia virus
uacagauguuacaaaugua

SEQ ID NO: 3261267 - RNA, 23 nt, Vaccinia virus
gguagauguuuggagaaaugaga

SEQ ID NO: 3261268 - RNA, 17 nt, Vaccinia virus
gcauuaguaucaugaac

SEQ ID NO: 3261269 - RNA, 23 nt, Vaccinia virus
uacugagaauugacgaaacaaug

SEQ ID NO: 3261270 - RNA, 11 nt, Vaccinia virus
cucuauuuugg

SEQ ID NO: 3261271 - RNA, 15 nt, Vaccinia virus
aagauuccuaaauua

SEQ ID NO: 3261272 - RNA, 16 nt, Vaccinia virus
ugacacuaucuucugu

SEQ ID NO: 3261273 - RNA, 16 nt, Vaccinia virus
uugguauuucuuacau

SEQ ID NO: 3261274 - RNA, 20 nt, Vaccinia virus
acgaaauaucucaucaagaa

SEQ ID NO: 3261275 - RNA, 14 nt, Vaccinia virus
aauaaaauuaucau

SEQ ID NO: 3261276 - RNA, 21 nt, Vaccinia virus
guauuucucuacaauauuaau

SEQ ID NO: 3261277 - RNA, 14 nt, Vaccinia virus
cugcuauaauuaag

SEQ ID NO: 3261278 - RNA, 17 nt, Vaccinia virus
uggaauggaaugcuguu

SEQ ID NO: 3261279 - RNA, 23 nt, Vaccinia virus
cuuuaaacuuuggcauauacaag

SEQ ID NO: 3261280 - RNA, 19 nt, Vaccinia virus
guauacucccuugcaucau

SEQ ID NO: 3261281 - RNA, 16 nt, Vaccinia virus
uaguaucuaaaacuac

SEQ ID NO: 3261282 - RNA, 15 nt, Vaccinia virus
cauuaauuauaacgg

SEQ ID NO: 3261283 - RNA, 21 nt, Vaccinia virus
cagauauuccgacaaaggauu

SEQ ID NO: 3261284 - RNA, 16 nt, Vaccinia virus
ucugugacuaugaauu

SEQ ID NO: 3261285 - RNA, 16 nt, Vaccinia virus
ccaauauuuuauauaa

SEQ ID NO: 3261286 - RNA, 13 nt, Vaccinia virus
gugcaaaugaggu

SEQ ID NO: 3261287 - RNA, 17 nt, Vaccinia virus
uagaaaguaauggauua

SEQ ID NO: 3261288 - RNA, 19 nt, Vaccinia virus
acgauggcaagaaauggau

SEQ ID NO: 3261289 - RNA, 22 nt, Vaccinia virus
gauuuuuuuaucccauguuuca

SEQ ID NO: 3261290 - RNA, 15 nt, Vaccinia virus
aucuagcaaaaauuc

SEQ ID NO: 3261291 - RNA, 20 nt, Vaccinia virus
cuacucuauagcgcuuuagu

SEQ ID NO: 3261292 - RNA, 21 nt, Vaccinia virus
aaagaagaagaucauacaguc

SEQ ID NO: 3261293 - RNA, 15 nt, Vaccinia virus
uucauuacuauauau

SEQ ID NO: 3261294 - RNA, 17 nt, Vaccinia virus
ugacauaauuacauaua

SEQ ID NO: 3261295 - RNA, 22 nt, Vaccinia virus
cagaagauuauuauggaaauca

SEQ ID NO: 3261296 - RNA, 15 nt, Vaccinia virus
uagauguaaugguaa

SEQ ID NO: 3261297 - RNA, 20 nt, Vaccinia virus
aucucuucuaguuucacuag

SEQ ID NO: 3261298 - RNA, 22 nt, Vaccinia virus
cauaccgucccaaaacauggau

SEQ ID NO: 3261299 - RNA, 19 nt, Vaccinia virus
guuagauaacucugcucca

SEQ ID NO: 3261300 - RNA, 20 nt, Vaccinia virus
cugauuaaugagaucuucua

SEQ ID NO: 3261301 - RNA, 16 nt, Vaccinia virus
ugaaaauuaugauaca

SEQ ID NO: 3261302 - RNA, 16 nt, Vaccinia virus
uccuaacuuuaaacaa

SEQ ID NO: 3261303 - RNA, 16 nt, Vaccinia virus
uauuauguuuaucaca

SEQ ID NO: 3261304 - RNA, 24 nt, Vaccinia virus
uacugauaauguagaagaucauac

SEQ ID NO: 3261305 - RNA, 13 nt, Vaccinia virus
gucgauacaaaau

SEQ ID NO: 3261306 - RNA, 15 nt, Vaccinia virus
ucuguuaguuuccuu

SEQ ID NO: 3261307 - RNA, 15 nt, Vaccinia virus
uacggaagaagaaaa

SEQ ID NO: 3261308 - RNA, 15 nt, Vaccinia virus
aucuuacucaaaaua

SEQ ID NO: 3261309 - RNA, 16 nt, Vaccinia virus
aaacacguuagaguuu

SEQ ID NO: 3261310 - RNA, 15 nt, Vaccinia virus
cuauauaucuguauu

SEQ ID NO: 3261311 - RNA, 22 nt, Vaccinia virus
auuagguaaaguaggacauaau

SEQ ID NO: 3261312 - RNA, 19 nt, Vaccinia virus
uauuguucuauauuauaua

SEQ ID NO: 3261313 - RNA, 20 nt, Vaccinia virus
cuauugaucaaguaugcaau

SEQ ID NO: 3261314 - RNA, 13 nt, Vaccinia virus
aaaagacaugaua

SEQ ID NO: 3261315 - RNA, 23 nt, Vaccinia virus
auuuauauccuauauacgaaaaa

SEQ ID NO: 3261316 - RNA, 14 nt, Vaccinia virus
cuuaacaaaaauug

SEQ ID NO: 3261317 - RNA, 21 nt, Vaccinia virus
gaauauggggaaaauauucua

SEQ ID NO: 3261318 - RNA, 16 nt, Vaccinia virus
gaaaugagaaacuguu

SEQ ID NO: 3261319 - RNA, 23 nt, Vaccinia virus
ucacaugauguagugauagauau

SEQ ID NO: 3261320 - RNA, 17 nt, Vaccinia virus
gaauguuuuacucugga

SEQ ID NO: 3261321 - RNA, 19 nt, Vaccinia virus
uacacaucuaucaagugau

SEQ ID NO: 3261322 - RNA, 19 nt, Vaccinia virus
auaguuugggaaaagaaau

SEQ ID NO: 3261323 - RNA, 18 nt, Vaccinia virus
accaguaccagaucuuaa

SEQ ID NO: 3261324 - RNA, 16 nt, Vaccinia virus
caaucucguuuaauau

SEQ ID NO: 3261325 - RNA, 19 nt, Vaccinia virus
uauuucuucgcuuuauaua

SEQ ID NO: 3261326 - RNA, 21 nt, Vaccinia virus
cuauuccaucaaacuguauag

SEQ ID NO: 3261327 - RNA, 19 nt, Vaccinia virus
aaaaacuguuuaacaaggu

SEQ ID NO: 3261328 - RNA, 12 nt, Vaccinia virus
aaagcauauucc

SEQ ID NO: 3261329 - RNA, 20 nt, Vaccinia virus
cuaccaacgauaagauauca

SEQ ID NO: 3261330 - RNA, 18 nt, Vaccinia virus
uauugcgacguucauaga

SEQ ID NO: 3261331 - RNA, 18 nt, Vaccinia virus
auauucucuauuuuggug

SEQ ID NO: 3261332 - RNA, 16 nt, Vaccinia virus
ucuaaaaaauccuuaa

SEQ ID NO: 3261333 - RNA, 23 nt, Vaccinia virus
guauccacuuuaauaauaucaua

SEQ ID NO: 3261334 - RNA, 20 nt, Vaccinia virus
cuaacaauaacuagaucauc

SEQ ID NO: 3261335 - RNA, 18 nt, Vaccinia virus
augugcuaaaaaguuuuc

SEQ ID NO: 3261336 - RNA, 19 nt, Vaccinia virus
uauaagcucuauuguuuga

SEQ ID NO: 3261337 - RNA, 21 nt, Vaccinia virus
cauuauuacuaccaucauuau

SEQ ID NO: 3261338 - RNA, 18 nt, Vaccinia virus
uccgaggauaguaaaaua

SEQ ID NO: 3261339 - RNA, 13 nt, Vaccinia virus
gaauauaguuaua

SEQ ID NO: 3261340 - RNA, 12 nt, Vaccinia virus
acuauuaaaacu

SEQ ID NO: 3261341 - RNA, 18 nt, Vaccinia virus
acgggcgcuguaauuaau

SEQ ID NO: 3261342 - RNA, 18 nt, Vaccinia virus
aguaggauauauuaaagu

SEQ ID NO: 3261343 - RNA, 13 nt, Vaccinia virus
auaaaaagaaugu

SEQ ID NO: 3261344 - RNA, 15 nt, Vaccinia virus
uuuuuguuuaaccac

SEQ ID NO: 3261345 - RNA, 17 nt, Vaccinia virus
caacuugacaaaucuua

SEQ ID NO: 3261346 - RNA, 14 nt, Vaccinia virus
uacuuacuuuagaa

SEQ ID NO: 3261347 - RNA, 14 nt, Vaccinia virus
uauuaauucuguaa

SEQ ID NO: 3261348 - RNA, 22 nt, Vaccinia virus
uuaugaaaaaguaaaugaugaa

SEQ ID NO: 3261349 - RNA, 18 nt, Vaccinia virus
ucaagacguggcaaacaa

SEQ ID NO: 3261350 - RNA, 14 nt, Vaccinia virus
ucuaugauaguuuu

SEQ ID NO: 3261351 - RNA, 12 nt, Vaccinia virus
aaccaguauuug

SEQ ID NO: 3261352 - RNA, 16 nt, Vaccinia virus
auuuuuggauuacaag

SEQ ID NO: 3261353 - RNA, 23 nt, Vaccinia virus
cgacuaguucccgcauuaaauaa

SEQ ID NO: 3261354 - RNA, 20 nt, Vaccinia virus
aggauaaaaucguuuauccu

SEQ ID NO: 3261355 - RNA, 22 nt, Vaccinia virus
ccaguaaaugacgcguuuccua

SEQ ID NO: 3261356 - RNA, 16 nt, Vaccinia virus
acugcaauaaaacauu

SEQ ID NO: 3261357 - RNA, 12 nt, Vaccinia virus
aauauuuagaaa

SEQ ID NO: 3261358 - RNA, 16 nt, Vaccinia virus
auacuuccaucaacau

SEQ ID NO: 3261359 - RNA, 20 nt, Vaccinia virus
auaacguuaucguuuucuac

SEQ ID NO: 3261360 - RNA, 18 nt, Vaccinia virus
cucugccaagauagcuuc

SEQ ID NO: 3261361 - RNA, 23 nt, Vaccinia virus
aauauuguaacaauuuauuuugu

SEQ ID NO: 3261362 - RNA, 13 nt, Vaccinia virus
uucugcaauaucu

SEQ ID NO: 3261363 - RNA, 19 nt, Vaccinia virus
aaaugaugcugguuauuau

SEQ ID NO: 3261364 - RNA, 14 nt, Vaccinia virus
caauaucaguaucu

SEQ ID NO: 3261365 - RNA, 16 nt, Vaccinia virus
acaaaaauuaugaaau

SEQ ID NO: 3261366 - RNA, 19 nt, Vaccinia virus
ucacaccagaugucauuau

SEQ ID NO: 3261367 - RNA, 14 nt, Vaccinia virus
augaugaaauguau

SEQ ID NO: 3261368 - RNA, 17 nt, Vaccinia virus
ugauagccguagaucuu

SEQ ID NO: 3261369 - RNA, 18 nt, Vaccinia virus
uauucuugcucaauagau

SEQ ID NO: 3261370 - RNA, 17 nt, Vaccinia virus
cacccguagaaauacua

SEQ ID NO: 3261371 - RNA, 22 nt, Vaccinia virus
uccauaggcaguccagaaauau

SEQ ID NO: 3261372 - RNA, 21 nt, Vaccinia virus
acaucaacuaccuaaggaaua

SEQ ID NO: 3261373 - RNA, 13 nt, Vaccinia virus
ucgucucucuuag

SEQ ID NO: 3261374 - RNA, 15 nt, Vaccinia virus
aaauauucuacauau

SEQ ID NO: 3261375 - RNA, 17 nt, Vaccinia virus
uagaacaaaauacauaa

SEQ ID NO: 3261376 - RNA, 17 nt, Vaccinia virus
cuagaucgucaguagua

SEQ ID NO: 3261377 - RNA, 17 nt, Vaccinia virus
ucaagccggcuauauau

SEQ ID NO: 3261378 - RNA, 21 nt, Vaccinia virus
cauugauaaagaaguuauaga

SEQ ID NO: 3261379 - RNA, 23 nt, Vaccinia virus
uuuagaucauuaacucuagaaau

SEQ ID NO: 3261380 - RNA, 14 nt, Vaccinia virus
acgcuuguuaauaa

SEQ ID NO: 3261381 - RNA, 14 nt, Vaccinia virus
aacguauaaaugac

SEQ ID NO: 3261382 - RNA, 17 nt, Vaccinia virus
acuucugcaucuauaug

SEQ ID NO: 3261383 - RNA, 18 nt, Vaccinia virus
cuguauccucaaacaucc

SEQ ID NO: 3261384 - RNA, 21 nt, Vaccinia virus
auucauccuguugucuaaauc

SEQ ID NO: 3261385 - RNA, 15 nt, Vaccinia virus
gaaaacauuguguuu

SEQ ID NO: 3261386 - RNA, 19 nt, Vaccinia virus
guaucucgucuaaauuaga

SEQ ID NO: 3261387 - RNA, 15 nt, Vaccinia virus
agagacggaaauagu

SEQ ID NO: 3261388 - RNA, 17 nt, Vaccinia virus
uauucaagucaaagaaa

SEQ ID NO: 3261389 - RNA, 17 nt, Vaccinia virus
gcuaaaauuuucaucaa

SEQ ID NO: 3261390 - RNA, 20 nt, Vaccinia virus
cuauagcaucaauaauuguu

SEQ ID NO: 3261391 - RNA, 14 nt, Vaccinia virus
cauaugguacguaa

SEQ ID NO: 3261392 - RNA, 14 nt, Vaccinia virus
cagaacaauauauu

SEQ ID NO: 3261393 - RNA, 15 nt, Vaccinia virus
caauuauguaucaau

SEQ ID NO: 3261394 - RNA, 16 nt, Vaccinia virus
agauacaauauuuaca

SEQ ID NO: 3261395 - RNA, 21 nt, Vaccinia virus
ucaauagcaguuuauuaucca

SEQ ID NO: 3261396 - RNA, 17 nt, Vaccinia virus
ucgaauuucuacaaaag

SEQ ID NO: 3261397 - RNA, 18 nt, Vaccinia virus
uauggccauagaggaugu

SEQ ID NO: 3261398 - RNA, 16 nt, Vaccinia virus
ucaacggaaaacauuu

SEQ ID NO: 3261399 - RNA, 18 nt, Vaccinia virus
acgagugaagaaauaauu

SEQ ID NO: 3261400 - RNA, 20 nt, Vaccinia virus
auguuucuguuuucaaacac

SEQ ID NO: 3261401 - RNA, 21 nt, Vaccinia virus
caaaaggaagaaggacaacau

SEQ ID NO: 3261402 - RNA, 17 nt, Vaccinia virus
agauauuaguaaaagau

SEQ ID NO: 3261403 - RNA, 19 nt, Vaccinia virus
aucuuaacacucucugcca

SEQ ID NO: 3261404 - RNA, 15 nt, Vaccinia virus
acuauucauggaaau

SEQ ID NO: 3261405 - RNA, 18 nt, Vaccinia virus
guucauaaucucaucauc

SEQ ID NO: 3261406 - RNA, 18 nt, Vaccinia virus
auauuacugaauuaauaa

SEQ ID NO: 3261407 - RNA, 18 nt, Vaccinia virus
uuaaauuuuucaucuguu

SEQ ID NO: 3261408 - RNA, 18 nt, Vaccinia virus
aacucucguauagucaua

SEQ ID NO: 3261409 - RNA, 19 nt, Vaccinia virus
cauaauacuaucuauguua

SEQ ID NO: 3261410 - RNA, 13 nt, Vaccinia virus
acauucagaaaga

SEQ ID NO: 3261411 - RNA, 14 nt, Vaccinia virus
augauuaucaaaug

SEQ ID NO: 3261412 - RNA, 15 nt, Vaccinia virus
gucuuaauagacaca

SEQ ID NO: 3261413 - RNA, 16 nt, Vaccinia virus
uagacuugauuauucu

SEQ ID NO: 3261414 - RNA, 19 nt, Vaccinia virus
ccuuuuccucagacaucua

SEQ ID NO: 3261415 - RNA, 20 nt, Vaccinia virus
cauagaacugccauauguug

SEQ ID NO: 3261416 - RNA, 17 nt, Vaccinia virus
cagaaauauguuaacaa

SEQ ID NO: 3261417 - RNA, 23 nt, Vaccinia virus
cucguaaauugggauaaaaauua

SEQ ID NO: 3261418 - RNA, 20 nt, Vaccinia virus
agucccauuggauaguuuuu

SEQ ID NO: 3261419 - RNA, 18 nt, Vaccinia virus
aguaugaagauaaacacu

SEQ ID NO: 3261420 - RNA, 17 nt, Vaccinia virus
uucgaguuuaucaaaac

SEQ ID NO: 3261421 - RNA, 17 nt, Vaccinia virus
ucauuaauaguauacac

SEQ ID NO: 3261422 - RNA, 19 nt, Vaccinia virus
aaugaacauaguaagaaau

SEQ ID NO: 3261423 - RNA, 21 nt, Vaccinia virus
uauccggagacgucaucuguu

SEQ ID NO: 3261424 - RNA, 14 nt, Vaccinia virus
uaucacagucuguu

SEQ ID NO: 3261425 - RNA, 23 nt, Vaccinia virus
acuaucagaaucaguuacauguu

SEQ ID NO: 3261426 - RNA, 13 nt, Vaccinia virus
caguagucauugu

SEQ ID NO: 3261427 - RNA, 14 nt, Vaccinia virus
uacgacuguuacgu

SEQ ID NO: 3261428 - RNA, 19 nt, Vaccinia virus
gccaaauguucaauaucua

SEQ ID NO: 3261429 - RNA, 14 nt, Vaccinia virus
gcuaaaaaauuagu

SEQ ID NO: 3261430 - RNA, 13 nt, Vaccinia virus
ugaaauuaaucau

SEQ ID NO: 3261431 - RNA, 22 nt, Vaccinia virus
auauacgaaauaaaauagacaa

SEQ ID NO: 3261432 - RNA, 17 nt, Vaccinia virus
auacuaguauagucacu

SEQ ID NO: 3261433 - RNA, 20 nt, Vaccinia virus
gacuuugucaacuuuguaaa

SEQ ID NO: 3261434 - RNA, 19 nt, Vaccinia virus
agaauuaaugggaacuauu

SEQ ID NO: 3261435 - RNA, 13 nt, Vaccinia virus
agaucauuaaaug

SEQ ID NO: 3261436 - RNA, 22 nt, Vaccinia virus
auauuaucgugccgaaauucgu

SEQ ID NO: 3261437 - RNA, 16 nt, Vaccinia virus
uacuaguuuucuaagu

SEQ ID NO: 3261438 - RNA, 18 nt, Vaccinia virus
auuaucgagauuuaauaa

SEQ ID NO: 3261439 - RNA, 14 nt, Vaccinia virus
ucuaucauagauuu

SEQ ID NO: 3261440 - RNA, 15 nt, Vaccinia virus
ucuauuagaugugua

SEQ ID NO: 3261441 - RNA, 15 nt, Vaccinia virus
ccaaugcuucucugu

SEQ ID NO: 3261442 - RNA, 14 nt, Vaccinia virus
ucauucucuucuau

SEQ ID NO: 3261443 - RNA, 12 nt, Vaccinia virus
ugcuaaauacua

SEQ ID NO: 3261444 - RNA, 16 nt, Vaccinia virus
acccauggaaaaauag

SEQ ID NO: 3261445 - RNA, 16 nt, Vaccinia virus
aguauggagacauuga

SEQ ID NO: 3261446 - RNA, 22 nt, Vaccinia virus
cagaugucauaauauuggauug

SEQ ID NO: 3261447 - RNA, 21 nt, Vaccinia virus
uagguguuccggagaaucagu

SEQ ID NO: 3261448 - RNA, 23 nt, Vaccinia virus
auuuugaugauaauguuaccaua

SEQ ID NO: 3261449 - RNA, 16 nt, Vaccinia virus
cagaaggaaacuucuu

SEQ ID NO: 3261450 - RNA, 17 nt, Vaccinia virus
cgaauauaaaugauuuc

SEQ ID NO: 3261451 - RNA, 13 nt, Vaccinia virus
gucgucaaaauau

SEQ ID NO: 3261452 - RNA, 22 nt, Vaccinia virus
uuaguuucugguuuucuauaaa

SEQ ID NO: 3261453 - RNA, 16 nt, Vaccinia virus
gaaucgauaacucuau

SEQ ID NO: 3261454 - RNA, 16 nt, Vaccinia virus
aacuuuuagaaauaua

SEQ ID NO: 3261455 - RNA, 22 nt, Vaccinia virus
uuguacaucuugacauuuucuu

SEQ ID NO: 3261456 - RNA, 12 nt, Vaccinia virus
aaaaauuauccu

SEQ ID NO: 3261457 - RNA, 13 nt, Vaccinia virus
aauauuuuucuau

SEQ ID NO: 3261458 - RNA, 20 nt, Vaccinia virus
uuagauaaauggaauacuaa

SEQ ID NO: 3261459 - RNA, 23 nt, Vaccinia virus
uuuaaaaaaaaaauacuuauucu

SEQ ID NO: 3261460 - RNA, 18 nt, Vaccinia virus
uuuuuuagauguaguauc

SEQ ID NO: 3261461 - RNA, 18 nt, Vaccinia virus
caaauucugcaauaucuu

SEQ ID NO: 3261462 - RNA, 17 nt, Vaccinia virus
ucaugccuuuccuggaa

SEQ ID NO: 3261463 - RNA, 18 nt, Vaccinia virus
uaaaucuguuucuaaaga

SEQ ID NO: 3261464 - RNA, 22 nt, Vaccinia virus
ccuauguuuccccuauaaucuu

SEQ ID NO: 3261465 - RNA, 19 nt, Vaccinia virus
ugcaauggauaauuuccau

SEQ ID NO: 3261466 - RNA, 14 nt, Vaccinia virus
aauuuucaagagau

SEQ ID NO: 3261467 - RNA, 14 nt, Vaccinia virus
uaguauguuauaua

SEQ ID NO: 3261468 - RNA, 22 nt, Vaccinia virus
aaaaucuucaagagugcauuga

SEQ ID NO: 3261469 - RNA, 22 nt, Vaccinia virus
aaauggauaauauccauauuga

SEQ ID NO: 3261470 - RNA, 19 nt, Vaccinia virus
ugauauuacuuauaauaac

SEQ ID NO: 3261471 - RNA, 18 nt, Vaccinia virus
ugcacaaagaagaauucu

SEQ ID NO: 3261472 - RNA, 12 nt, Vaccinia virus
uauuuuacacau

SEQ ID NO: 3261473 - RNA, 18 nt, Vaccinia virus
uauaaaacuacuacaaug

SEQ ID NO: 3261474 - RNA, 23 nt, Vaccinia virus
agcauccuauucgaauaaugagu

SEQ ID NO: 3261475 - RNA, 16 nt, Vaccinia virus
auaaagaguccuauau

SEQ ID NO: 3261476 - RNA, 15 nt, Vaccinia virus
auaaaacuuuauuau

SEQ ID NO: 3261477 - RNA, 21 nt, Vaccinia virus
aaacucguacuaaucucuucu

SEQ ID NO: 3261478 - RNA, 22 nt, Vaccinia virus
ucauauaaauguuuaacguuuu

SEQ ID NO: 3261479 - RNA, 15 nt, Vaccinia virus
aauuauucuaucaau

SEQ ID NO: 3261480 - RNA, 19 nt, Vaccinia virus
uagucuaguaucuaaacau

SEQ ID NO: 3261481 - RNA, 13 nt, Vaccinia virus
uuuguauguacca

SEQ ID NO: 3261482 - RNA, 18 nt, Vaccinia virus
uaugaaacgaacacuauu

SEQ ID NO: 3261483 - RNA, 16 nt, Vaccinia virus
uauacagcguuacauu

SEQ ID NO: 3261484 - RNA, 14 nt, Vaccinia virus
auugcuguaaacaa

SEQ ID NO: 3261485 - RNA, 16 nt, Vaccinia virus
auaucugaguaugaug

SEQ ID NO: 3261486 - RNA, 20 nt, Vaccinia virus
auacguuuauauucuuuuaa

SEQ ID NO: 3261487 - RNA, 17 nt, Vaccinia virus
aucuaggaguaauuaag

SEQ ID NO: 3261488 - RNA, 14 nt, Vaccinia virus
aacuacaaaaaugc

SEQ ID NO: 3261489 - RNA, 16 nt, Vaccinia virus
uaaaucaacagaaguu

SEQ ID NO: 3261490 - RNA, 23 nt, Vaccinia virus
aacuaacguccaucauuacagaa

SEQ ID NO: 3261491 - RNA, 12 nt, Vaccinia virus
caaauacucuaa

SEQ ID NO: 3261492 - RNA, 19 nt, Vaccinia virus
cuguauauacuuagauaua

SEQ ID NO: 3261493 - RNA, 19 nt, Vaccinia virus
cuacgaaacugauacaauc

SEQ ID NO: 3261494 - RNA, 17 nt, Vaccinia virus
auaauagggagaaauga

SEQ ID NO: 3261495 - RNA, 17 nt, Vaccinia virus
acauauuuauauaauua

SEQ ID NO: 3261496 - RNA, 15 nt, Vaccinia virus
aauauauaaacucuu

SEQ ID NO: 3261497 - RNA, 23 nt, Vaccinia virus
agauauaaaugacaaguauaaug

SEQ ID NO: 3261498 - RNA, 16 nt, Vaccinia virus
agcucuuugaaguuuu

SEQ ID NO: 3261499 - RNA, 14 nt, Vaccinia virus
ucgagcgugauguu

SEQ ID NO: 3261500 - RNA, 15 nt, Vaccinia virus
acuuauguaugugca

SEQ ID NO: 3261501 - RNA, 23 nt, Vaccinia virus
gaaugacaucgcauuuauaucuu

SEQ ID NO: 3261502 - RNA, 15 nt, Vaccinia virus
auauucaacauguuu

SEQ ID NO: 3261503 - RNA, 21 nt, Vaccinia virus
aacuaucguuggaaaauggug

SEQ ID NO: 3261504 - RNA, 14 nt, Vaccinia virus
ucaacaucuuugau

SEQ ID NO: 3261505 - RNA, 20 nt, Vaccinia virus
ucuagauacuagaguaguau

SEQ ID NO: 3261506 - RNA, 14 nt, Vaccinia virus
uagacuuacuaaag

SEQ ID NO: 3261507 - RNA, 18 nt, Vaccinia virus
cuguuuucucaucacuua

SEQ ID NO: 3261508 - RNA, 15 nt, Vaccinia virus
auguaguaguaacug

SEQ ID NO: 3261509 - RNA, 19 nt, Vaccinia virus
uuuccaucaucgucuuauu

SEQ ID NO: 3261510 - RNA, 15 nt, Vaccinia virus
gcuaauaucuaaaua

SEQ ID NO: 3261511 - RNA, 22 nt, Vaccinia virus
gauauauauuguacgauaaugu

SEQ ID NO: 3261512 - RNA, 14 nt, Vaccinia virus
agauucugauguau

SEQ ID NO: 3261513 - RNA, 23 nt, Vaccinia virus
cauucgacuuaguauacaaaaaa

SEQ ID NO: 3261514 - RNA, 12 nt, Vaccinia virus
auuuuuucauuu

SEQ ID NO: 3261515 - RNA, 16 nt, Vaccinia virus
gaauaagugugaugau

SEQ ID NO: 3261516 - RNA, 22 nt, Vaccinia virus
agacgaggagauuuagaaaugu

SEQ ID NO: 3261517 - RNA, 12 nt, Vaccinia virus
auuauuaauaag

SEQ ID NO: 3261518 - RNA, 14 nt, Vaccinia virus
caaaaucuuaauau

SEQ ID NO: 3261519 - RNA, 22 nt, Vaccinia virus
uauauaagacacagaaauacua

SEQ ID NO: 3261520 - RNA, 18 nt, Vaccinia virus
acauauuggguacuaguu

SEQ ID NO: 3261521 - RNA, 15 nt, Vaccinia virus
aguacaucuaucacc

SEQ ID NO: 3261522 - RNA, 17 nt, Vaccinia virus
agagacgucauacucuu

SEQ ID NO: 3261523 - RNA, 18 nt, Vaccinia virus
aaaaugugggagaaucua

SEQ ID NO: 3261524 - RNA, 15 nt, Vaccinia virus
cuuuauaacugaacu

SEQ ID NO: 3261525 - RNA, 16 nt, Vaccinia virus
augaaagaaagaagac

SEQ ID NO: 3261526 - RNA, 20 nt, Vaccinia virus
gacguuggcacaugaugaau

SEQ ID NO: 3261527 - RNA, 18 nt, Vaccinia virus
agauaaacuuuauguauu

SEQ ID NO: 3261528 - RNA, 15 nt, Vaccinia virus
auaauaaauugguaa

SEQ ID NO: 3261529 - RNA, 16 nt, Vaccinia virus
caucaaaaaacaacug

SEQ ID NO: 3261530 - RNA, 17 nt, Vaccinia virus
augaauggaugcuagaa

SEQ ID NO: 3261531 - RNA, 20 nt, Vaccinia virus
uuguucuauguaucuaaaau

SEQ ID NO: 3261532 - RNA, 19 nt, Vaccinia virus
ucuacgauuuuuacaaaag

SEQ ID NO: 3261533 - RNA, 13 nt, Vaccinia virus
uacuccguuuuau

SEQ ID NO: 3261534 - RNA, 14 nt, Vaccinia virus
auuacuaaacauuu

SEQ ID NO: 3261535 - RNA, 16 nt, Vaccinia virus
ucuaucuuuagaguau

SEQ ID NO: 3261536 - RNA, 22 nt, Vaccinia virus
uaucagucgaggacuuggaugu

SEQ ID NO: 3261537 - RNA, 17 nt, Vaccinia virus
gaucuggaaaauaaucu

SEQ ID NO: 3261538 - RNA, 15 nt, Vaccinia virus
auauauauacaguga

SEQ ID NO: 3261539 - RNA, 21 nt, Vaccinia virus
ugaaaacuaaaugguauacac

SEQ ID NO: 3261540 - RNA, 22 nt, Vaccinia virus
aacaccguuacacgaagagaua

SEQ ID NO: 3261541 - RNA, 20 nt, Vaccinia virus
ugagcucauaugauuucagu

SEQ ID NO: 3261542 - RNA, 16 nt, Vaccinia virus
accucuccaaaaagaa

SEQ ID NO: 3261543 - RNA, 20 nt, Vaccinia virus
aaaagaauguaucaagaaua

SEQ ID NO: 3261544 - RNA, 23 nt, Vaccinia virus
uauaaugacaucuaugauuuuac

SEQ ID NO: 3261545 - RNA, 22 nt, Vaccinia virus
caaggcuuugauaucuaaauau

SEQ ID NO: 3261546 - RNA, 12 nt, Vaccinia virus
ucggcucaaaga

SEQ ID NO: 3261547 - RNA, 22 nt, Vaccinia virus
acguaucaccaacggaaauggu

SEQ ID NO: 3261548 - RNA, 17 nt, Vaccinia virus
uuguauccauacuguau

SEQ ID NO: 3261549 - RNA, 21 nt, Vaccinia virus
aacuguccacuguucuagaca

SEQ ID NO: 3261550 - RNA, 21 nt, Vaccinia virus
ugacgaaguaacgucauuaaa

SEQ ID NO: 3261551 - RNA, 22 nt, Vaccinia virus
agcaucauguccauuuaacuaa

SEQ ID NO: 3261552 - RNA, 20 nt, Vaccinia virus
auaacaugaacgauaaacaa

SEQ ID NO: 3261553 - RNA, 13 nt, Vaccinia virus
aagauauagcacc

SEQ ID NO: 3261554 - RNA, 19 nt, Vaccinia virus
cuauuaagaguaacagcug

SEQ ID NO: 3261555 - RNA, 12 nt, Vaccinia virus
uucauuacuaua

SEQ ID NO: 3261556 - RNA, 15 nt, Vaccinia virus
uaggaccacuagcaa

SEQ ID NO: 3261557 - RNA, 20 nt, Vaccinia virus
acuaaucucuucuuuaacag

SEQ ID NO: 3261558 - RNA, 18 nt, Vaccinia virus
agacagcgugaauaaugu

SEQ ID NO: 3261559 - RNA, 13 nt, Vaccinia virus
aaucucacaauau

SEQ ID NO: 3261560 - RNA, 18 nt, Vaccinia virus
aacuguggauacucugua

SEQ ID NO: 3261561 - RNA, 12 nt, Vaccinia virus
ucauuagauguu

SEQ ID NO: 3261562 - RNA, 15 nt, Vaccinia virus
cuuuaaccuauacau

SEQ ID NO: 3261563 - RNA, 19 nt, Vaccinia virus
aauaucuuuauucauucca

SEQ ID NO: 3261564 - RNA, 19 nt, Vaccinia virus
uccgcaauacauuucucaa

SEQ ID NO: 3261565 - RNA, 13 nt, Vaccinia virus
cauauuuugcaau

SEQ ID NO: 3261566 - RNA, 17 nt, Vaccinia virus
ucucguauacucugccc

SEQ ID NO: 3261567 - RNA, 13 nt, Vaccinia virus
uuaaauucaucau

SEQ ID NO: 3261568 - RNA, 21 nt, Vaccinia virus
ugccaauaugucaucuaugga

SEQ ID NO: 3261569 - RNA, 21 nt, Vaccinia virus
augucaaaggaugaaagaaag

SEQ ID NO: 3261570 - RNA, 14 nt, Vaccinia virus
acuuaaaaaaugaa

SEQ ID NO: 3261571 - RNA, 17 nt, Vaccinia virus
uauaaacucgcuuaaua

SEQ ID NO: 3261572 - RNA, 18 nt, Vaccinia virus
aacuacugauaacaaaau

SEQ ID NO: 3261573 - RNA, 17 nt, Vaccinia virus
uuuauccuauuauguaa

SEQ ID NO: 3261574 - RNA, 20 nt, Vaccinia virus
aguaguucugcgcaaugcau

SEQ ID NO: 3261575 - RNA, 17 nt, Vaccinia virus
gcuugcauguauuaaag

SEQ ID NO: 3261576 - RNA, 15 nt, Vaccinia virus
uuagucuuacacauu

SEQ ID NO: 3261577 - RNA, 11 nt, Vaccinia virus
aauaaggaaaa

SEQ ID NO: 3261578 - RNA, 23 nt, Vaccinia virus
cuucagacagccaaucaaaaaga

SEQ ID NO: 3261579 - RNA, 24 nt, Vaccinia virus
uuuuguggauuaguguacucucuu

SEQ ID NO: 3261580 - RNA, 22 nt, Vaccinia virus
aaugacaucgaagauuguccaa

SEQ ID NO: 3261581 - RNA, 20 nt, Vaccinia virus
auaaaaccaugaaauauauu

SEQ ID NO: 3261582 - RNA, 17 nt, Vaccinia virus
aagucauuugaauccau

SEQ ID NO: 3261583 - RNA, 21 nt, Vaccinia virus
aacaggucgcuauauccacca

SEQ ID NO: 3261584 - RNA, 16 nt, Vaccinia virus
gaauugcaauuuugau

SEQ ID NO: 3261585 - RNA, 14 nt, Vaccinia virus
uagaggagaaguaa

SEQ ID NO: 3261586 - RNA, 23 nt, Vaccinia virus
auaacaucuuucaucaucugaca

SEQ ID NO: 3261587 - RNA, 13 nt, Vaccinia virus
auacaauccauga

SEQ ID NO: 3261588 - RNA, 13 nt, Vaccinia virus
uacauuucacaga

SEQ ID NO: 3261589 - RNA, 21 nt, Vaccinia virus
gcaguacuacuagguagaaga

SEQ ID NO: 3261590 - RNA, 10 nt, Vaccinia virus
guaaauuaac

SEQ ID NO: 3261591 - RNA, 19 nt, Vaccinia virus
uggacgacgguaagaauga

SEQ ID NO: 3261592 - RNA, 21 nt, Vaccinia virus
aaaccaaaucuugauuacaaa

SEQ ID NO: 3261593 - RNA, 22 nt, Vaccinia virus
aggcaacaaguauacaauuuug

SEQ ID NO: 3261594 - RNA, 14 nt, Vaccinia virus
uaauauaaacaucu

SEQ ID NO: 3261595 - RNA, 17 nt, Vaccinia virus
ucaauagauugguaaau

SEQ ID NO: 3261596 - RNA, 14 nt, Vaccinia virus
agauuauaacuuau

SEQ ID NO: 3261597 - RNA, 16 nt, Vaccinia virus
ucuuaaucauauucuu

SEQ ID NO: 3261598 - RNA, 14 nt, Vaccinia virus
cuuacuaucuuuuu

SEQ ID NO: 3261599 - RNA, 18 nt, Vaccinia virus
ugacaucauacuagauaa

SEQ ID NO: 3261600 - RNA, 18 nt, Vaccinia virus
uagcguacaaaauuaucg

SEQ ID NO: 3261601 - RNA, 18 nt, Vaccinia virus
uucauauuaaacauacug

SEQ ID NO: 3261602 - RNA, 17 nt, Vaccinia virus
ucuuucuucuacuauau

SEQ ID NO: 3261603 - RNA, 18 nt, Vaccinia virus
aaucgauaacucuauuca

SEQ ID NO: 3261604 - RNA, 18 nt, Vaccinia virus
acaugcuacaaaauaugu

SEQ ID NO: 3261605 - RNA, 21 nt, Vaccinia virus
uauacuuuuagaugacacauu

SEQ ID NO: 3261606 - RNA, 16 nt, Vaccinia virus
acaccuagagaacuua

SEQ ID NO: 3261607 - RNA, 15 nt, Vaccinia virus
uuaaaguauaucuua

SEQ ID NO: 3261608 - RNA, 21 nt, Vaccinia virus
cgaauuauuucuuuguuuaua

SEQ ID NO: 3261609 - RNA, 23 nt, Vaccinia virus
gcaauagucagacuguaguucua

SEQ ID NO: 3261610 - RNA, 20 nt, Vaccinia virus
ccgauauagauauuaaacaa

SEQ ID NO: 3261611 - RNA, 22 nt, Vaccinia virus
uccaaggauguaauuaaauguu

SEQ ID NO: 3261612 - RNA, 16 nt, Vaccinia virus
auaaucagaauauaca

SEQ ID NO: 3261613 - RNA, 22 nt, Vaccinia virus
ucaagccggcuauauauucugc

SEQ ID NO: 3261614 - RNA, 22 nt, Vaccinia virus
agacacaucugccauagauuua

SEQ ID NO: 3261615 - RNA, 23 nt, Vaccinia virus
ugugauacgauuaugacacuauu

SEQ ID NO: 3261616 - RNA, 20 nt, Vaccinia virus
aaugaugaugaugaaaugga

SEQ ID NO: 3261617 - RNA, 13 nt, Vaccinia virus
cuauaauaaugaa

SEQ ID NO: 3261618 - RNA, 22 nt, Vaccinia virus
aagauauccagaguuuagauua

SEQ ID NO: 3261619 - RNA, 19 nt, Vaccinia virus
guuccguguguaauaaccu

SEQ ID NO: 3261620 - RNA, 13 nt, Vaccinia virus
uauuaaaaaaugu

SEQ ID NO: 3261621 - RNA, 20 nt, Vaccinia virus
agaucuacuggcgaaauggu

SEQ ID NO: 3261622 - RNA, 21 nt, Vaccinia virus
aauaugucaucuauggaauua

SEQ ID NO: 3261623 - RNA, 21 nt, Vaccinia virus
ucuaucaaaaguuaauuucua

SEQ ID NO: 3261624 - RNA, 19 nt, Vaccinia virus
uuuauuaagaaaauucaga

SEQ ID NO: 3261625 - RNA, 17 nt, Vaccinia virus
uaguuauuacuuuucuc

SEQ ID NO: 3261626 - RNA, 16 nt, Vaccinia virus
ucaaucacuacaucuu

SEQ ID NO: 3261627 - RNA, 16 nt, Vaccinia virus
cauacacuacaguaag

SEQ ID NO: 3261628 - RNA, 13 nt, Vaccinia virus
uguuuucaucauu

SEQ ID NO: 3261629 - RNA, 12 nt, Vaccinia virus
gaguuuaaaacu

SEQ ID NO: 3261630 - RNA, 21 nt, Vaccinia virus
uauccgacgacguuacucaaa

SEQ ID NO: 3261631 - RNA, 22 nt, Vaccinia virus
cuuuuagaagugauucuuugau

SEQ ID NO: 3261632 - RNA, 12 nt, Vaccinia virus
ugugauggauuu

SEQ ID NO: 3261633 - RNA, 23 nt, Vaccinia virus
caauaacuucacuauugaucaag

SEQ ID NO: 3261634 - RNA, 14 nt, Vaccinia virus
aagucaucaaucau

SEQ ID NO: 3261635 - RNA, 18 nt, Vaccinia virus
auaaccggcgcugucaug

SEQ ID NO: 3261636 - RNA, 11 nt, Vaccinia virus
gacaaauguag

SEQ ID NO: 3261637 - RNA, 19 nt, Vaccinia virus
ucuaagagaaugagaguag

SEQ ID NO: 3261638 - RNA, 12 nt, Vaccinia virus
caucuaucaucu

SEQ ID NO: 3261639 - RNA, 22 nt, Vaccinia virus
cauaaaaacucauuacauaguu

SEQ ID NO: 3261640 - RNA, 19 nt, Vaccinia virus
gaacuauaaaacuacuaca

SEQ ID NO: 3261641 - RNA, 23 nt, Vaccinia virus
accauuuuuuuuaaaaaaaauag

SEQ ID NO: 3261642 - RNA, 22 nt, Vaccinia virus
accuauggauacgguacacgua

SEQ ID NO: 3261643 - RNA, 14 nt, Vaccinia virus
uccuguuaauaacu

SEQ ID NO: 3261644 - RNA, 13 nt, Vaccinia virus
ugaauuuacagaa

SEQ ID NO: 3261645 - RNA, 22 nt, Vaccinia virus
agucauaaacuugggauguaaa

SEQ ID NO: 3261646 - RNA, 17 nt, Vaccinia virus
auaauaugacucaugau

SEQ ID NO: 3261647 - RNA, 18 nt, Vaccinia virus
guauaauaacuaaauguc

SEQ ID NO: 3261648 - RNA, 21 nt, Vaccinia virus
auauauuguuucauaauugcu

SEQ ID NO: 3261649 - RNA, 19 nt, Vaccinia virus
cugaauguaucuuccacau

SEQ ID NO: 3261650 - RNA, 14 nt, Vaccinia virus
ucgaauaauguaua

SEQ ID NO: 3261651 - RNA, 16 nt, Vaccinia virus
ccaagacgaacaaaau

SEQ ID NO: 3261652 - RNA, 16 nt, Vaccinia virus
cgguguguagaaagug

SEQ ID NO: 3261653 - RNA, 14 nt, Vaccinia virus
auuguaacaguauu

SEQ ID NO: 3261654 - RNA, 18 nt, Vaccinia virus
aaaugaaucccaaacauu

SEQ ID NO: 3261655 - RNA, 13 nt, Vaccinia virus
acugucuauacaa

SEQ ID NO: 3261656 - RNA, 13 nt, Vaccinia virus
ucuaucucaaaau

SEQ ID NO: 3261657 - RNA, 17 nt, Vaccinia virus
caucagcugaaaaacua

SEQ ID NO: 3261658 - RNA, 20 nt, Vaccinia virus
auacuuuuaauuaacaaaag

SEQ ID NO: 3261659 - RNA, 17 nt, Vaccinia virus
agaaggaguguuuucuu

SEQ ID NO: 3261660 - RNA, 13 nt, Vaccinia virus
aaauugcaaaaua

SEQ ID NO: 3261661 - RNA, 22 nt, Vaccinia virus
ucuuaagacacauuucuucauu

SEQ ID NO: 3261662 - RNA, 21 nt, Vaccinia virus
aucugugguauucuugucauu

SEQ ID NO: 3261663 - RNA, 19 nt, Vaccinia virus
auaagacuuuacuuuucua

SEQ ID NO: 3261664 - RNA, 19 nt, Vaccinia virus
uuaaaauacuaaauugaac

SEQ ID NO: 3261665 - RNA, 13 nt, Vaccinia virus
cuuaauuuugugc

SEQ ID NO: 3261666 - RNA, 15 nt, Vaccinia virus
acgauacaucuguuu

SEQ ID NO: 3261667 - RNA, 13 nt, Vaccinia virus
caauaaguaguau

SEQ ID NO: 3261668 - RNA, 21 nt, Vaccinia virus
cuuaaaauuuaaaaugauauu

SEQ ID NO: 3261669 - RNA, 14 nt, Vaccinia virus
acauaaguauaaag

SEQ ID NO: 3261670 - RNA, 17 nt, Vaccinia virus
uaccauuuuaaaaucau

SEQ ID NO: 3261671 - RNA, 18 nt, Vaccinia virus
aaauaauccugaauauau

SEQ ID NO: 3261672 - RNA, 18 nt, Vaccinia virus
cacuuuuuuauaaagaug

SEQ ID NO: 3261673 - RNA, 17 nt, Vaccinia virus
uaaaauguccacagaua

SEQ ID NO: 3261674 - RNA, 14 nt, Vaccinia virus
uuacuacauuauua

SEQ ID NO: 3261675 - RNA, 16 nt, Vaccinia virus
agcagacuagaaauaa

SEQ ID NO: 3261676 - RNA, 18 nt, Vaccinia virus
uuacauguaauacauuuu

SEQ ID NO: 3261677 - RNA, 14 nt, Vaccinia virus
aguaugcaauauau

SEQ ID NO: 3261678 - RNA, 16 nt, Vaccinia virus
uaaauauuuuaaaauu

SEQ ID NO: 3261679 - RNA, 22 nt, Vaccinia virus
ucuucgccgcgacuuucuacau

SEQ ID NO: 3261680 - RNA, 18 nt, Vaccinia virus
gcauuacaguucuuuucu

SEQ ID NO: 3261681 - RNA, 21 nt, Vaccinia virus
gauucuugauagagaugagau

SEQ ID NO: 3261682 - RNA, 14 nt, Vaccinia virus
uaaagaagacgcua

SEQ ID NO: 3261683 - RNA, 12 nt, Vaccinia virus
uucuuacaauua

SEQ ID NO: 3261684 - RNA, 21 nt, Vaccinia virus
aggcauaaaaauaaaaauaua

SEQ ID NO: 3261685 - RNA, 23 nt, Vaccinia virus
cauauacugaugauaauaaugaa

SEQ ID NO: 3261686 - RNA, 21 nt, Vaccinia virus
auauuccgacaugcaaaaaug

SEQ ID NO: 3261687 - RNA, 18 nt, Vaccinia virus
aauaaucuaguaaaacuu

SEQ ID NO: 3261688 - RNA, 22 nt, Vaccinia virus
uauuaauacaggaucuagcaaa

SEQ ID NO: 3261689 - RNA, 18 nt, Vaccinia virus
auaaacggguguaaacaa

SEQ ID NO: 3261690 - RNA, 18 nt, Vaccinia virus
uugaaccggaagaauuga

SEQ ID NO: 3261691 - RNA, 19 nt, Vaccinia virus
auguauuguuuaguuacuc

SEQ ID NO: 3261692 - RNA, 16 nt, Vaccinia virus
cuaaucucuucuuuaa

SEQ ID NO: 3261693 - RNA, 21 nt, Vaccinia virus
aguuugauuaguauaacuaga

SEQ ID NO: 3261694 - RNA, 15 nt, Vaccinia virus
gaaauggugauuuug

SEQ ID NO: 3261695 - RNA, 19 nt, Vaccinia virus
auuaauacacauaaugaag

SEQ ID NO: 3261696 - RNA, 13 nt, Vaccinia virus
caauggccaucug

SEQ ID NO: 3261697 - RNA, 19 nt, Vaccinia virus
caugauggucauguuuauu

SEQ ID NO: 3261698 - RNA, 19 nt, Vaccinia virus
agucagaaccuauuaacga

SEQ ID NO: 3261699 - RNA, 20 nt, Vaccinia virus
aguacuaauaaggaacuaga

SEQ ID NO: 3261700 - RNA, 19 nt, Vaccinia virus
uucucaaaagaucaaggaa

SEQ ID NO: 3261701 - RNA, 14 nt, Vaccinia virus
aaacaucauauaca

SEQ ID NO: 3261702 - RNA, 18 nt, Vaccinia virus
uaccacuuauuacuccau

SEQ ID NO: 3261703 - RNA, 18 nt, Vaccinia virus
uucaccaaacaacuuuua

SEQ ID NO: 3261704 - RNA, 19 nt, Vaccinia virus
uacuucuuuacgguaucua

SEQ ID NO: 3261705 - RNA, 14 nt, Vaccinia virus
uuuguguugugcau

SEQ ID NO: 3261706 - RNA, 21 nt, Vaccinia virus
aauaguuuugauauuaguaaa

SEQ ID NO: 3261707 - RNA, 23 nt, Vaccinia virus
gagagucaauguuuuugaaacua

SEQ ID NO: 3261708 - RNA, 19 nt, Vaccinia virus
acuguuauuacuacugaag

SEQ ID NO: 3261709 - RNA, 15 nt, Vaccinia virus
ucaaauaacaaacaa

SEQ ID NO: 3261710 - RNA, 14 nt, Vaccinia virus
accuaagggauuuu

SEQ ID NO: 3261711 - RNA, 17 nt, Vaccinia virus
acaaucuguauuucauu

SEQ ID NO: 3261712 - RNA, 13 nt, Vaccinia virus
caaaaaauacaau

SEQ ID NO: 3261713 - RNA, 18 nt, Vaccinia virus
uacaaaauaauagauaua

SEQ ID NO: 3261714 - RNA, 20 nt, Vaccinia virus
uagaucugagaauggaugau

SEQ ID NO: 3261715 - RNA, 18 nt, Vaccinia virus
agauuaccuauucacuua

SEQ ID NO: 3261716 - RNA, 13 nt, Vaccinia virus
ugugaucuucucg

SEQ ID NO: 3261717 - RNA, 19 nt, Vaccinia virus
aauauuuaacucaugauga

SEQ ID NO: 3261718 - RNA, 17 nt, Vaccinia virus
aacauaauuuucuaaua

SEQ ID NO: 3261719 - RNA, 21 nt, Vaccinia virus
uaauguuauauguaacauuga

SEQ ID NO: 3261720 - RNA, 21 nt, Vaccinia virus
gaaugcucggcaauaacuaau

SEQ ID NO: 3261721 - RNA, 15 nt, Vaccinia virus
caacaaaaaaugaau

SEQ ID NO: 3261722 - RNA, 13 nt, Vaccinia virus
ucuggaauuaaaa

SEQ ID NO: 3261723 - RNA, 22 nt, Vaccinia virus
acuucauaauuuaauaauguag

SEQ ID NO: 3261724 - RNA, 18 nt, Vaccinia virus
acaaagcacucaauaaau

SEQ ID NO: 3261725 - RNA, 12 nt, Vaccinia virus
gugucacauaua

SEQ ID NO: 3261726 - RNA, 13 nt, Vaccinia virus
aauuaauucuuua

SEQ ID NO: 3261727 - RNA, 18 nt, Vaccinia virus
gaggacuuggauguuugu

SEQ ID NO: 3261728 - RNA, 11 nt, Vaccinia virus
aucauuaacga

SEQ ID NO: 3261729 - RNA, 22 nt, Vaccinia virus
uucuacuaugcacauuauucua

SEQ ID NO: 3261730 - RNA, 20 nt, Vaccinia virus
ucuaugagaucgucguacau

SEQ ID NO: 3261731 - RNA, 21 nt, Vaccinia virus
aagaaauauaaaacuacuguc

SEQ ID NO: 3261732 - RNA, 17 nt, Vaccinia virus
acgcuagcgacucuguu

SEQ ID NO: 3261733 - RNA, 17 nt, Vaccinia virus
uuagaauagucucuuua

SEQ ID NO: 3261734 - RNA, 18 nt, Vaccinia virus
auuggaaaucauuaacgg

SEQ ID NO: 3261735 - RNA, 22 nt, Vaccinia virus
uuguugauggaucugugaugca

SEQ ID NO: 3261736 - RNA, 23 nt, Vaccinia virus
uccgaaaaaguugacuauguuca

SEQ ID NO: 3261737 - RNA, 14 nt, Vaccinia virus
caaguauccaucau

SEQ ID NO: 3261738 - RNA, 13 nt, Vaccinia virus
auguccuggugau

SEQ ID NO: 3261739 - RNA, 19 nt, Vaccinia virus
acaacuuaaugaagaucua

SEQ ID NO: 3261740 - RNA, 14 nt, Vaccinia virus
gaaauauaccgaua

SEQ ID NO: 3261741 - RNA, 19 nt, Vaccinia virus
ucacuguguguaagaagau

SEQ ID NO: 3261742 - RNA, 23 nt, Vaccinia virus
gugacuauuucauucucugaaaa

SEQ ID NO: 3261743 - RNA, 14 nt, Vaccinia virus
aauacuuuaguaau

SEQ ID NO: 3261744 - RNA, 17 nt, Vaccinia virus
ggucccuauuguuacag

SEQ ID NO: 3261745 - RNA, 15 nt, Vaccinia virus
auaaugaucauauag

SEQ ID NO: 3261746 - RNA, 14 nt, Vaccinia virus
ggucgaugucaaua

SEQ ID NO: 3261747 - RNA, 21 nt, Vaccinia virus
guuuauaaaaauguucuuuuu

SEQ ID NO: 3261748 - RNA, 21 nt, Vaccinia virus
uacgaaaacgaaaucuguaau

SEQ ID NO: 3261749 - RNA, 17 nt, Vaccinia virus
aguaucuucuuuaucua

SEQ ID NO: 3261750 - RNA, 14 nt, Vaccinia virus
guucuuaauagucu

SEQ ID NO: 3261751 - RNA, 14 nt, Vaccinia virus
gaaauauauacaua

SEQ ID NO: 3261752 - RNA, 15 nt, Vaccinia virus
gcaaucaugauuuua

SEQ ID NO: 3261753 - RNA, 15 nt, Vaccinia virus
ucacauccaccaaug

SEQ ID NO: 3261754 - RNA, 16 nt, Vaccinia virus
aacauggauacagaua

SEQ ID NO: 3261755 - RNA, 21 nt, Vaccinia virus
agcauccguauaaaaaucgau

SEQ ID NO: 3261756 - RNA, 17 nt, Vaccinia virus
cuuccgucgaugucuac

SEQ ID NO: 3261757 - RNA, 21 nt, Vaccinia virus
uuucuuaaucaguccaucauu

SEQ ID NO: 3261758 - RNA, 14 nt, Vaccinia virus
auuuccaugucuac

SEQ ID NO: 3261759 - RNA, 19 nt, Vaccinia virus
ugucaacaaaaaugugaua

SEQ ID NO: 3261760 - RNA, 16 nt, Vaccinia virus
gacuucuaacaaacau

SEQ ID NO: 3261761 - RNA, 14 nt, Vaccinia virus
aagcgguuaaauca

SEQ ID NO: 3261762 - RNA, 12 nt, Vaccinia virus
ucaauagaagau

SEQ ID NO: 3261763 - RNA, 23 nt, Vaccinia virus
aauacgucuugcacguaaucuau

SEQ ID NO: 3261764 - RNA, 16 nt, Vaccinia virus
uuacaucuaguucuuu

SEQ ID NO: 3261765 - RNA, 20 nt, Vaccinia virus
uagaugauaauuuauacaaa

SEQ ID NO: 3261766 - RNA, 18 nt, Vaccinia virus
gcaaaguaacgauaauca

SEQ ID NO: 3261767 - RNA, 20 nt, Vaccinia virus
uaaaucuaacauugauuuua

SEQ ID NO: 3261768 - RNA, 15 nt, Vaccinia virus
cuacauucucauuaa

SEQ ID NO: 3261769 - RNA, 20 nt, Vaccinia virus
uggaagaaauugaacuccuc

SEQ ID NO: 3261770 - RNA, 18 nt, Vaccinia virus
uacgaaccgggaaagaga

SEQ ID NO: 3261771 - RNA, 14 nt, Vaccinia virus
cacuauucauguaa

SEQ ID NO: 3261772 - RNA, 23 nt, Vaccinia virus
aucaaguuuguaggaaaggacaa

SEQ ID NO: 3261773 - RNA, 17 nt, Vaccinia virus
augauacucucaaccau

SEQ ID NO: 3261774 - RNA, 23 nt, Vaccinia virus
aguauugguaauauauaaacucu

SEQ ID NO: 3261775 - RNA, 22 nt, Vaccinia virus
aaauaaucucuuaguguuggaa

SEQ ID NO: 3261776 - RNA, 16 nt, Vaccinia virus
aacaaggcuuugauau

SEQ ID NO: 3261777 - RNA, 12 nt, Vaccinia virus
aaacaacucuuc

SEQ ID NO: 3261778 - RNA, 17 nt, Vaccinia virus
uaauauaaaaauacuua

SEQ ID NO: 3261779 - RNA, 16 nt, Vaccinia virus
agauaauaacagagua

SEQ ID NO: 3261780 - RNA, 23 nt, Vaccinia virus
ucaucaucaacaauccaauaaua

SEQ ID NO: 3261781 - RNA, 16 nt, Vaccinia virus
ucuaaaccuucuuauu

SEQ ID NO: 3261782 - RNA, 15 nt, Vaccinia virus
uaagaguaacagcug

SEQ ID NO: 3261783 - RNA, 19 nt, Vaccinia virus
acaauuuuuuuauaauaau

SEQ ID NO: 3261784 - RNA, 16 nt, Vaccinia virus
cuaaaauauuuucuag

SEQ ID NO: 3261785 - RNA, 19 nt, Vaccinia virus
gaaugacaucgcauuuaua

SEQ ID NO: 3261786 - RNA, 18 nt, Vaccinia virus
gauuccagccacuuggga

SEQ ID NO: 3261787 - RNA, 14 nt, Vaccinia virus
auccguauccauga

SEQ ID NO: 3261788 - RNA, 12 nt, Vaccinia virus
uagccuguuuua

SEQ ID NO: 3261789 - RNA, 15 nt, Vaccinia virus
uuaaugauacaaaaa

SEQ ID NO: 3261790 - RNA, 17 nt, Vaccinia virus
uacaaucagauauaucu

SEQ ID NO: 3261791 - RNA, 17 nt, Vaccinia virus
aguuaauggagaaauac

SEQ ID NO: 3261792 - RNA, 21 nt, Vaccinia virus
aagugccacaaaacagaaaua

SEQ ID NO: 3261793 - RNA, 18 nt, Vaccinia virus
caauuuguauuauccaau

SEQ ID NO: 3261794 - RNA, 18 nt, Vaccinia virus
uaauagcgucuacauuga

SEQ ID NO: 3261795 - RNA, 13 nt, Vaccinia virus
ugccauagauucu

SEQ ID NO: 3261796 - RNA, 18 nt, Vaccinia virus
aucagaaaggauagagca

SEQ ID NO: 3261797 - RNA, 18 nt, Vaccinia virus
uguaacccacguaacauu

SEQ ID NO: 3261798 - RNA, 18 nt, Vaccinia virus
cugaaauaaccacaucug

SEQ ID NO: 3261799 - RNA, 13 nt, Vaccinia virus
aacauuaaaaugu

SEQ ID NO: 3261800 - RNA, 15 nt, Vaccinia virus
augaguaaaacggaa

SEQ ID NO: 3261801 - RNA, 17 nt, Vaccinia virus
uaguggaucucaaugac

SEQ ID NO: 3261802 - RNA, 21 nt, Vaccinia virus
uagguauugaccucucagaau

SEQ ID NO: 3261803 - RNA, 14 nt, Vaccinia virus
auucucauuaaaug

SEQ ID NO: 3261804 - RNA, 19 nt, Vaccinia virus
agcauuuuggaaacauaaa

SEQ ID NO: 3261805 - RNA, 17 nt, Vaccinia virus
agaggcagucggauugg

SEQ ID NO: 3261806 - RNA, 19 nt, Vaccinia virus
uucucuuugguaacugcuu

SEQ ID NO: 3261807 - RNA, 23 nt, Vaccinia virus
aaugaaaauauaaauaguuuuua

SEQ ID NO: 3261808 - RNA, 18 nt, Vaccinia virus
auuaaaggcuuuaaaagu

SEQ ID NO: 3261809 - RNA, 14 nt, Vaccinia virus
agucucucuccaua

SEQ ID NO: 3261810 - RNA, 16 nt, Vaccinia virus
uccuuccaacauaaua

SEQ ID NO: 3261811 - RNA, 21 nt, Vaccinia virus
aaugauauccgcgaacgauau

SEQ ID NO: 3261812 - RNA, 18 nt, Vaccinia virus
auguagagguaaaaagac

SEQ ID NO: 3261813 - RNA, 21 nt, Vaccinia virus
uguuuaacaaagauauuacca

SEQ ID NO: 3261814 - RNA, 22 nt, Vaccinia virus
agacauuagaccguuuaauaga

SEQ ID NO: 3261815 - RNA, 20 nt, Vaccinia virus
ucgcauuguacgauguagua

SEQ ID NO: 3261816 - RNA, 20 nt, Vaccinia virus
cuacgaaaacgaaaucugua

SEQ ID NO: 3261817 - RNA, 14 nt, Vaccinia virus
auacucuaaucuuu

SEQ ID NO: 3261818 - RNA, 17 nt, Vaccinia virus
auacuuuucuaauucua

SEQ ID NO: 3261819 - RNA, 18 nt, Vaccinia virus
aaauuauuuuuacuaaua

SEQ ID NO: 3261820 - RNA, 14 nt, Vaccinia virus
agaaaaaacaaugu

SEQ ID NO: 3261821 - RNA, 18 nt, Vaccinia virus
uucaucggcuuuaacaau

SEQ ID NO: 3261822 - RNA, 22 nt, Vaccinia virus
aggaaucuauuaaagauuguuu

SEQ ID NO: 3261823 - RNA, 15 nt, Vaccinia virus
cuguucauaaauaaa

SEQ ID NO: 3261824 - RNA, 16 nt, Vaccinia virus
aaugccuuauucucug

SEQ ID NO: 3261825 - RNA, 20 nt, Vaccinia virus
aucuauauuguuuaauauau

SEQ ID NO: 3261826 - RNA, 16 nt, Vaccinia virus
gagaauguaauucuuu

SEQ ID NO: 3261827 - RNA, 14 nt, Vaccinia virus
augaaauuauucac

SEQ ID NO: 3261828 - RNA, 16 nt, Vaccinia virus
caagacuaacacacaa

SEQ ID NO: 3261829 - RNA, 15 nt, Vaccinia virus
agacaacgaauacaa

SEQ ID NO: 3261830 - RNA, 13 nt, Vaccinia virus
gcauacauagaag

SEQ ID NO: 3261831 - RNA, 15 nt, Vaccinia virus
aaugauaauaggaau

SEQ ID NO: 3261832 - RNA, 19 nt, Vaccinia virus
auguuauugucacacuaau

SEQ ID NO: 3261833 - RNA, 19 nt, Vaccinia virus
auuaaaaaacauauauaau

SEQ ID NO: 3261834 - RNA, 16 nt, Vaccinia virus
gaacacauuaaacaaa

SEQ ID NO: 3261835 - RNA, 20 nt, Vaccinia virus
uacaucaucgaacuucugau

SEQ ID NO: 3261836 - RNA, 14 nt, Vaccinia virus
aucgucguacaugg

SEQ ID NO: 3261837 - RNA, 23 nt, Vaccinia virus
guuaaaacauucaaauguuguua

SEQ ID NO: 3261838 - RNA, 19 nt, Vaccinia virus
agagaucaacgaaaaggaa

SEQ ID NO: 3261839 - RNA, 14 nt, Vaccinia virus
guaauauauaaacu

SEQ ID NO: 3261840 - RNA, 22 nt, Vaccinia virus
uuaaaggauggugaaauuauug

SEQ ID NO: 3261841 - RNA, 14 nt, Vaccinia virus
aacauuaauacaga

SEQ ID NO: 3261842 - RNA, 14 nt, Vaccinia virus
auaacuuuaguaaa

SEQ ID NO: 3261843 - RNA, 17 nt, Vaccinia virus
gaaguaggauuauguaa

SEQ ID NO: 3261844 - RNA, 14 nt, Vaccinia virus
auggucauguuuau

SEQ ID NO: 3261845 - RNA, 14 nt, Vaccinia virus
acaguuauauaucu

SEQ ID NO: 3261846 - RNA, 16 nt, Vaccinia virus
auaucgguaguuguau

SEQ ID NO: 3261847 - RNA, 19 nt, Vaccinia virus
aauuauuagcaaaaauaua

SEQ ID NO: 3261848 - RNA, 20 nt, Vaccinia virus
guaucgauaguguaguuauu

SEQ ID NO: 3261849 - RNA, 22 nt, Vaccinia virus
aucuaaccaagacggauaagaa

SEQ ID NO: 3261850 - RNA, 17 nt, Vaccinia virus
uggagcgaguguuacaa

SEQ ID NO: 3261851 - RNA, 12 nt, Vaccinia virus
ccucaucuucua

SEQ ID NO: 3261852 - RNA, 14 nt, Vaccinia virus
auccugauauuaau

SEQ ID NO: 3261853 - RNA, 13 nt, Vaccinia virus
agaaauuaauaaa

SEQ ID NO: 3261854 - RNA, 16 nt, Vaccinia virus
cgaguuuaaaacuucu

SEQ ID NO: 3261855 - RNA, 16 nt, Vaccinia virus
uaauacauauuauuca

SEQ ID NO: 3261856 - RNA, 11 nt, Vaccinia virus
uccucauuaac

SEQ ID NO: 3261857 - RNA, 21 nt, Vaccinia virus
guuagauccaacauuaaucaa

SEQ ID NO: 3261858 - RNA, 14 nt, Vaccinia virus
acuuuaaauacuua

SEQ ID NO: 3261859 - RNA, 18 nt, Vaccinia virus
cgaauauaucaaaacuac

SEQ ID NO: 3261860 - RNA, 17 nt, Vaccinia virus
uauagaucuuagacauu

SEQ ID NO: 3261861 - RNA, 23 nt, Vaccinia virus
guuaauauagacaauucuuuugu

SEQ ID NO: 3261862 - RNA, 21 nt, Vaccinia virus
gauauacccgaagauauacac

SEQ ID NO: 3261863 - RNA, 23 nt, Vaccinia virus
auuggcaaaaacggauauggaug

SEQ ID NO: 3261864 - RNA, 14 nt, Vaccinia virus
uugcuuuucuaauc

SEQ ID NO: 3261865 - RNA, 14 nt, Vaccinia virus
uuuagauauaucua

SEQ ID NO: 3261866 - RNA, 16 nt, Vaccinia virus
ccaaacugcauucgug

SEQ ID NO: 3261867 - RNA, 19 nt, Vaccinia virus
uauucauaaaacauaauca

SEQ ID NO: 3261868 - RNA, 17 nt, Vaccinia virus
ccggugagaacaugaga

SEQ ID NO: 3261869 - RNA, 20 nt, Vaccinia virus
uggcuuuguagauuuggaua

SEQ ID NO: 3261870 - RNA, 21 nt, Vaccinia virus
augauucuaaccuagaauuac

SEQ ID NO: 3261871 - RNA, 20 nt, Vaccinia virus
agugcggagucaacaaugaa

SEQ ID NO: 3261872 - RNA, 21 nt, Vaccinia virus
auuuugauauugugaauggua

SEQ ID NO: 3261873 - RNA, 15 nt, Vaccinia virus
ugcauuuuguuauau

SEQ ID NO: 3261874 - RNA, 18 nt, Vaccinia virus
aacucuuucgaauacuua

SEQ ID NO: 3261875 - RNA, 10 nt, Vaccinia virus
auuaauuaaa

SEQ ID NO: 3261876 - RNA, 15 nt, Vaccinia virus
gcugccaaaguuauu

SEQ ID NO: 3261877 - RNA, 15 nt, Vaccinia virus
cagucacagacacug

SEQ ID NO: 3261878 - RNA, 20 nt, Vaccinia virus
ucaaggacaguuaaaacuau

SEQ ID NO: 3261879 - RNA, 19 nt, Vaccinia virus
uaaaugcaauaacaaagau

SEQ ID NO: 3261880 - RNA, 19 nt, Vaccinia virus
gauauuguugauaauacaa

SEQ ID NO: 3261881 - RNA, 13 nt, Vaccinia virus
uaguuuuucugga

SEQ ID NO: 3261882 - RNA, 15 nt, Vaccinia virus
acuauuuuauaccuu

SEQ ID NO: 3261883 - RNA, 15 nt, Vaccinia virus
uuaguugucuaguau

SEQ ID NO: 3261884 - RNA, 22 nt, Vaccinia virus
ucucugaauauagaacaucauu

SEQ ID NO: 3261885 - RNA, 23 nt, Vaccinia virus
agaaaauaucuucuccuguaaua

SEQ ID NO: 3261886 - RNA, 20 nt, Vaccinia virus
caaauuuauuccauauuuua

SEQ ID NO: 3261887 - RNA, 22 nt, Vaccinia virus
guuagauauuuagcaauugcau

SEQ ID NO: 3261888 - RNA, 17 nt, Vaccinia virus
uacuauuuuuuacauua

SEQ ID NO: 3261889 - RNA, 23 nt, Vaccinia virus
acuuuauuacuccauuaaauaau

SEQ ID NO: 3261890 - RNA, 12 nt, Vaccinia virus
aucuauaaaagu

SEQ ID NO: 3261891 - RNA, 14 nt, Vaccinia virus
aauuuaaagaaugu

SEQ ID NO: 3261892 - RNA, 21 nt, Vaccinia virus
auuaauaaaaauacaauccuu

SEQ ID NO: 3261893 - RNA, 11 nt, Vaccinia virus
caguuugagaa

SEQ ID NO: 3261894 - RNA, 20 nt, Vaccinia virus
uggucaaccccuaagucuuu

SEQ ID NO: 3261895 - RNA, 14 nt, Vaccinia virus
acaucauauacaag

SEQ ID NO: 3261896 - RNA, 14 nt, Vaccinia virus
uuguauuuaucuaa

SEQ ID NO: 3261897 - RNA, 13 nt, Vaccinia virus
uugaucaacuaua

SEQ ID NO: 3261898 - RNA, 18 nt, Vaccinia virus
ucauuuucuauuuaaaau

SEQ ID NO: 3261899 - RNA, 18 nt, Vaccinia virus
uauugauaaaauuaauga

SEQ ID NO: 3261900 - RNA, 19 nt, Vaccinia virus
uaaugguagcaauaugcua

SEQ ID NO: 3261901 - RNA, 11 nt, Vaccinia virus
uuuccauccac

SEQ ID NO: 3261902 - RNA, 20 nt, Vaccinia virus
ugauuauccuaaucaggaau

SEQ ID NO: 3261903 - RNA, 22 nt, Vaccinia virus
acuguugaaguacuuaaugaag

SEQ ID NO: 3261904 - RNA, 17 nt, Vaccinia virus
aacauucugauuuaaga

SEQ ID NO: 3261905 - RNA, 12 nt, Vaccinia virus
cuuacaauaaac

SEQ ID NO: 3261906 - RNA, 23 nt, Vaccinia virus
uuaccacaauguauaauauaaga

SEQ ID NO: 3261907 - RNA, 16 nt, Vaccinia virus
cuuacaaauauucaca

SEQ ID NO: 3261908 - RNA, 23 nt, Vaccinia virus
ccuguacuauaccauuaucuaua

SEQ ID NO: 3261909 - RNA, 16 nt, Vaccinia virus
cuggaaaaauacuuuu

SEQ ID NO: 3261910 - RNA, 14 nt, Vaccinia virus
uuucuucauaugau

SEQ ID NO: 3261911 - RNA, 16 nt, Vaccinia virus
aguuccuuaugaugac

SEQ ID NO: 3261912 - RNA, 17 nt, Vaccinia virus
gcuaucaaaauauguag

SEQ ID NO: 3261913 - RNA, 18 nt, Vaccinia virus
caaucuaagaaauuuaaa

SEQ ID NO: 3261914 - RNA, 16 nt, Vaccinia virus
acaaaucacugaaaau

SEQ ID NO: 3261915 - RNA, 16 nt, Vaccinia virus
uguagaacguaaauua

SEQ ID NO: 3261916 - RNA, 20 nt, Vaccinia virus
uaguuuccuuaacaaaucua

SEQ ID NO: 3261917 - RNA, 16 nt, Vaccinia virus
uaauagauauaucucu

SEQ ID NO: 3261918 - RNA, 13 nt, Vaccinia virus
auuuaucauauau

SEQ ID NO: 3261919 - RNA, 11 nt, Vaccinia virus
aguucaguuuu

SEQ ID NO: 3261920 - RNA, 13 nt, Vaccinia virus
uacggaauuauug

SEQ ID NO: 3261921 - RNA, 17 nt, Vaccinia virus
augacauucucugacau

SEQ ID NO: 3261922 - RNA, 15 nt, Vaccinia virus
acgguaauaaaaugu

SEQ ID NO: 3261923 - RNA, 14 nt, Vaccinia virus
aaucauagaacugc

SEQ ID NO: 3261924 - RNA, 21 nt, Vaccinia virus
auuauacgcauaaauuguaaa

SEQ ID NO: 3261925 - RNA, 20 nt, Vaccinia virus
ucuucaguucuaucuucuaa

SEQ ID NO: 3261926 - RNA, 20 nt, Vaccinia virus
guagcaaagaaauuaauaga

SEQ ID NO: 3261927 - RNA, 22 nt, Vaccinia virus
ugauguaagauccaaacgagga

SEQ ID NO: 3261928 - RNA, 22 nt, Vaccinia virus
aauuuuuugagguaaucuucuu

SEQ ID NO: 3261929 - RNA, 19 nt, Vaccinia virus
guaaaagaucuauaauguc

SEQ ID NO: 3261930 - RNA, 22 nt, Vaccinia virus
uggaaacuauguuuuuuauuag

SEQ ID NO: 3261931 - RNA, 16 nt, Vaccinia virus
ucuuuccauaguacau

SEQ ID NO: 3261932 - RNA, 15 nt, Vaccinia virus
caguuuuaguauuuu

SEQ ID NO: 3261933 - RNA, 20 nt, Vaccinia virus
aauaaaugcgauacagacau

SEQ ID NO: 3261934 - RNA, 22 nt, Vaccinia virus
agaacugauugcaguguucauc

SEQ ID NO: 3261935 - RNA, 21 nt, Vaccinia virus
agaccaagcuucguuguagaa

SEQ ID NO: 3261936 - RNA, 14 nt, Vaccinia virus
ugcugaagcaauaa

SEQ ID NO: 3261937 - RNA, 11 nt, Vaccinia virus
ugguauauaca

SEQ ID NO: 3261938 - RNA, 22 nt, Vaccinia virus
gcguucagauugggaucuuuuc

SEQ ID NO: 3261939 - RNA, 14 nt, Vaccinia virus
gaugauaauuuaua

SEQ ID NO: 3261940 - RNA, 14 nt, Vaccinia virus
aacauaaaaacugu

SEQ ID NO: 3261941 - RNA, 16 nt, Vaccinia virus
aauuaacaauaucaau

SEQ ID NO: 3261942 - RNA, 16 nt, Vaccinia virus
ucucuaacuacuauug

SEQ ID NO: 3261943 - RNA, 16 nt, Vaccinia virus
gguaacgcgucuuuaa

SEQ ID NO: 3261944 - RNA, 19 nt, Vaccinia virus
uauaagaauuuuuauacau

SEQ ID NO: 3261945 - RNA, 15 nt, Vaccinia virus
cugacucauggauuc

SEQ ID NO: 3261946 - RNA, 18 nt, Vaccinia virus
caguaggucuuggugaag

SEQ ID NO: 3261947 - RNA, 20 nt, Vaccinia virus
uaugauccucucucauugau

SEQ ID NO: 3261948 - RNA, 18 nt, Vaccinia virus
acaauacgauaaacauug

SEQ ID NO: 3261949 - RNA, 22 nt, Vaccinia virus
cuuauucuuuguauuuuggcau

SEQ ID NO: 3261950 - RNA, 13 nt, Vaccinia virus
uauauacgaguau

SEQ ID NO: 3261951 - RNA, 20 nt, Vaccinia virus
aacucagucaauauauuaag

SEQ ID NO: 3261952 - RNA, 17 nt, Vaccinia virus
augaaguugagaaugau

SEQ ID NO: 3261953 - RNA, 15 nt, Vaccinia virus
uguaguauaucuaca

SEQ ID NO: 3261954 - RNA, 23 nt, Vaccinia virus
aaaucauuauauaguguugcuau

SEQ ID NO: 3261955 - RNA, 22 nt, Vaccinia virus
auaaaauuuaagagaaugauua

SEQ ID NO: 3261956 - RNA, 23 nt, Vaccinia virus
acucuaaacaauuggacaaauuc

SEQ ID NO: 3261957 - RNA, 19 nt, Vaccinia virus
acuauauuaacaucuaaac

SEQ ID NO: 3261958 - RNA, 20 nt, Vaccinia virus
cguauaucucuauuaaaugc

SEQ ID NO: 3261959 - RNA, 19 nt, Vaccinia virus
ucuauuugccaauauguca

SEQ ID NO: 3261960 - RNA, 17 nt, Vaccinia virus
uauuagagugucaauau

SEQ ID NO: 3261961 - RNA, 17 nt, Vaccinia virus
uaacauaaaaacucauu

SEQ ID NO: 3261962 - RNA, 15 nt, Vaccinia virus
ucuuuacccauccaa

SEQ ID NO: 3261963 - RNA, 15 nt, Vaccinia virus
cuaaacaauguuaug

SEQ ID NO: 3261964 - RNA, 16 nt, Vaccinia virus
uauccaauacagaaug

SEQ ID NO: 3261965 - RNA, 19 nt, Vaccinia virus
uuacccaugcaacugaacg

SEQ ID NO: 3261966 - RNA, 12 nt, Vaccinia virus
uaaagauauucu

SEQ ID NO: 3261967 - RNA, 14 nt, Vaccinia virus
uaacucuguuuuau

SEQ ID NO: 3261968 - RNA, 21 nt, Vaccinia virus
auaugccggagaguaaacauu

SEQ ID NO: 3261969 - RNA, 13 nt, Vaccinia virus
caagauauauaca

SEQ ID NO: 3261970 - RNA, 16 nt, Vaccinia virus
acuaguauauguggaa

SEQ ID NO: 3261971 - RNA, 20 nt, Vaccinia virus
cuacauccauguuuaucuau

SEQ ID NO: 3261972 - RNA, 14 nt, Vaccinia virus
guuuaauacuuauu

SEQ ID NO: 3261973 - RNA, 14 nt, Vaccinia virus
ucuagauauccaga

SEQ ID NO: 3261974 - RNA, 16 nt, Vaccinia virus
agcuuuacucugaaaa

SEQ ID NO: 3261975 - RNA, 16 nt, Vaccinia virus
cuauuaagaguaacag

SEQ ID NO: 3261976 - RNA, 20 nt, Vaccinia virus
ucgagaugaacauucaucug

SEQ ID NO: 3261977 - RNA, 21 nt, Vaccinia virus
auuugaacagagccuguaaca

SEQ ID NO: 3261978 - RNA, 17 nt, Vaccinia virus
augccggacaauagcac

SEQ ID NO: 3261979 - RNA, 17 nt, Vaccinia virus
auaucaucaucugaaau

SEQ ID NO: 3261980 - RNA, 13 nt, Vaccinia virus
cagggaaauuaaa

SEQ ID NO: 3261981 - RNA, 15 nt, Vaccinia virus
auaaguaaaugaaaa

SEQ ID NO: 3261982 - RNA, 20 nt, Vaccinia virus
uauugacuucguuuaucuug

SEQ ID NO: 3261983 - RNA, 18 nt, Vaccinia virus
cugcaaauguaguauuua

SEQ ID NO: 3261984 - RNA, 18 nt, Vaccinia virus
aaucacucaauaucuaga

SEQ ID NO: 3261985 - RNA, 22 nt, Vaccinia virus
cauaaauaacucuaauagcacg

SEQ ID NO: 3261986 - RNA, 13 nt, Vaccinia virus
acgugauagcucc

SEQ ID NO: 3261987 - RNA, 21 nt, Vaccinia virus
uucuacagugauaguuucauu

SEQ ID NO: 3261988 - RNA, 21 nt, Vaccinia virus
accguauccauaaacaauauu

SEQ ID NO: 3261989 - RNA, 22 nt, Vaccinia virus
uauauugauuuucguaacagau

SEQ ID NO: 3261990 - RNA, 23 nt, Vaccinia virus
ugguauucuugucauugaaggau

SEQ ID NO: 3261991 - RNA, 23 nt, Vaccinia virus
aauaagagcagcacaaacucauu

SEQ ID NO: 3261992 - RNA, 20 nt, Vaccinia virus
ccuugggaguaguuuaugau

SEQ ID NO: 3261993 - RNA, 23 nt, Vaccinia virus
gcuucuuaaaucagaauguuaca

SEQ ID NO: 3261994 - RNA, 17 nt, Vaccinia virus
uuaaaggauauuaugca

SEQ ID NO: 3261995 - RNA, 21 nt, Vaccinia virus
cauaauuguuagcuguuuuca

SEQ ID NO: 3261996 - RNA, 11 nt, Vaccinia virus
aaguuguacag

SEQ ID NO: 3261997 - RNA, 11 nt, Vaccinia virus
aauuuguacau

SEQ ID NO: 3261998 - RNA, 22 nt, Vaccinia virus
agugaugauaacacauauucau

SEQ ID NO: 3261999 - RNA, 17 nt, Vaccinia virus
cauuggugcuauccauu

SEQ ID NO: 3262000 - RNA, 16 nt, Vaccinia virus
aauuaugcaaucaaug

SEQ ID NO: 3262001 - RNA, 21 nt, Vaccinia virus
augaauuacuaaaauauacaa

SEQ ID NO: 3262002 - RNA, 14 nt, Vaccinia virus
ucaccgauagagaa

SEQ ID NO: 3262003 - RNA, 18 nt, Vaccinia virus
uaguuguggaaauacuuc

SEQ ID NO: 3262004 - RNA, 22 nt, Vaccinia virus
aggaaauauccucacaacuuaa

SEQ ID NO: 3262005 - RNA, 15 nt, Vaccinia virus
uuaauacaaguagua

SEQ ID NO: 3262006 - RNA, 19 nt, Vaccinia virus
uauuuacaucuaauuuacu

SEQ ID NO: 3262007 - RNA, 17 nt, Vaccinia virus
acaaacuguaaguaugu

SEQ ID NO: 3262008 - RNA, 18 nt, Vaccinia virus
acaugguucuccaugaau

SEQ ID NO: 3262009 - RNA, 17 nt, Vaccinia virus
aucucauucaaauccau

SEQ ID NO: 3262010 - RNA, 14 nt, Vaccinia virus
auuucaacaaacug

SEQ ID NO: 3262011 - RNA, 23 nt, Vaccinia virus
gcgucuguuuuauacauuuuuua

SEQ ID NO: 3262012 - RNA, 16 nt, Vaccinia virus
gaauuauuuacaaaau

SEQ ID NO: 3262013 - RNA, 17 nt, Vaccinia virus
augacgaauacauuuau

SEQ ID NO: 3262014 - RNA, 22 nt, Vaccinia virus
ugauaaauauacaauagaugca

SEQ ID NO: 3262015 - RNA, 15 nt, Vaccinia virus
aacaucagaaaaugu

SEQ ID NO: 3262016 - RNA, 20 nt, Vaccinia virus
aagugugaugauuguacacu

SEQ ID NO: 3262017 - RNA, 18 nt, Vaccinia virus
gcugaacacauuaaacaa

SEQ ID NO: 3262018 - RNA, 20 nt, Vaccinia virus
gaaauaaucauaaauuauuu

SEQ ID NO: 3262019 - RNA, 15 nt, Vaccinia virus
gaaaucuguaaucua

SEQ ID NO: 3262020 - RNA, 18 nt, Vaccinia virus
caaaaucguuaagaaguu

SEQ ID NO: 3262021 - RNA, 19 nt, Vaccinia virus
aauucacaccuagagacaa

SEQ ID NO: 3262022 - RNA, 16 nt, Vaccinia virus
auaaagauauaaauga

SEQ ID NO: 3262023 - RNA, 15 nt, Vaccinia virus
aaugcgccaaaguua

SEQ ID NO: 3262024 - RNA, 20 nt, Vaccinia virus
gucaaucuuauucaagcaaa

SEQ ID NO: 3262025 - RNA, 15 nt, Vaccinia virus
cuauuaauaauuacu

SEQ ID NO: 3262026 - RNA, 18 nt, Vaccinia virus
cuuuacaguuucuguaau

SEQ ID NO: 3262027 - RNA, 19 nt, Vaccinia virus
agacccuaauuauguagau

SEQ ID NO: 3262028 - RNA, 19 nt, Vaccinia virus
agcggauaaugauagaauu

SEQ ID NO: 3262029 - RNA, 12 nt, Vaccinia virus
ucauugauuuua

SEQ ID NO: 3262030 - RNA, 16 nt, Vaccinia virus
ucagaguuacaucaaa

SEQ ID NO: 3262031 - RNA, 15 nt, Vaccinia virus
agaauggaaauauau

SEQ ID NO: 3262032 - RNA, 19 nt, Vaccinia virus
cgugguaucuucuccauaa

SEQ ID NO: 3262033 - RNA, 23 nt, Vaccinia virus
uagcaagauuuuuaaacaacaau

SEQ ID NO: 3262034 - RNA, 23 nt, Vaccinia virus
uagauaguuuuuuugagccauau

SEQ ID NO: 3262035 - RNA, 16 nt, Vaccinia virus
augaugguacauauau

SEQ ID NO: 3262036 - RNA, 16 nt, Vaccinia virus
auuagagguaaugaug

SEQ ID NO: 3262037 - RNA, 19 nt, Vaccinia virus
ugcuuacaugcauacuuga

SEQ ID NO: 3262038 - RNA, 23 nt, Vaccinia virus
acgaauauaaaucauauuuagaa

SEQ ID NO: 3262039 - RNA, 21 nt, Vaccinia virus
ugauaaguucuuuauacaguu

SEQ ID NO: 3262040 - RNA, 14 nt, Vaccinia virus
uaguaauacaugua

SEQ ID NO: 3262041 - RNA, 21 nt, Vaccinia virus
cauuaaggcguugaugcaauu

SEQ ID NO: 3262042 - RNA, 19 nt, Vaccinia virus
cugcagccauuuuuaugau

SEQ ID NO: 3262043 - RNA, 13 nt, Vaccinia virus
gaaucuucccaua

SEQ ID NO: 3262044 - RNA, 17 nt, Vaccinia virus
augaguacuuguacaca

SEQ ID NO: 3262045 - RNA, 23 nt, Vaccinia virus
auuaauuucuaaaggagcaaaug

SEQ ID NO: 3262046 - RNA, 11 nt, Vaccinia virus
gaaucagcauc

SEQ ID NO: 3262047 - RNA, 17 nt, Vaccinia virus
uauaagauuaucaaaau

SEQ ID NO: 3262048 - RNA, 14 nt, Vaccinia virus
guagaaauuuuucu

SEQ ID NO: 3262049 - RNA, 20 nt, Vaccinia virus
uaauaaauuuucucuugaaa

SEQ ID NO: 3262050 - RNA, 11 nt, Vaccinia virus
caaaaagcaua

SEQ ID NO: 3262051 - RNA, 11 nt, Vaccinia virus
cgguuguacau

SEQ ID NO: 3262052 - RNA, 23 nt, Vaccinia virus
acucuacacguguccacauccuu

SEQ ID NO: 3262053 - RNA, 22 nt, Vaccinia virus
acuuuaggaucucuauugccaa

SEQ ID NO: 3262054 - RNA, 20 nt, Vaccinia virus
auauccagauggaguggaag

SEQ ID NO: 3262055 - RNA, 13 nt, Vaccinia virus
augaauaaagaaa

SEQ ID NO: 3262056 - RNA, 18 nt, Vaccinia virus
uaacauaaaaauaucauu

SEQ ID NO: 3262057 - RNA, 16 nt, Vaccinia virus
aguuaaaacuuuauca

SEQ ID NO: 3262058 - RNA, 20 nt, Vaccinia virus
agauaucgccuuuauuucca

SEQ ID NO: 3262059 - RNA, 17 nt, Vaccinia virus
uggaaugcguuccuugu

SEQ ID NO: 3262060 - RNA, 12 nt, Vaccinia virus
uaccaucauuau

SEQ ID NO: 3262061 - RNA, 18 nt, Vaccinia virus
gucuaccauuguuucgua

SEQ ID NO: 3262062 - RNA, 14 nt, Vaccinia virus
aaaagaaaauuugu

SEQ ID NO: 3262063 - RNA, 19 nt, Vaccinia virus
aauaacuauguuuuaaaaa

SEQ ID NO: 3262064 - RNA, 19 nt, Vaccinia virus
ucguacgauccaaauuccg

SEQ ID NO: 3262065 - RNA, 21 nt, Vaccinia virus
cauggcaacggauuuaauuuu

SEQ ID NO: 3262066 - RNA, 21 nt, Vaccinia virus
caucugacaaacgaugccuuu

SEQ ID NO: 3262067 - RNA, 12 nt, Vaccinia virus
uaaguauccauu

SEQ ID NO: 3262068 - RNA, 15 nt, Vaccinia virus
uuccagaucuguaug

SEQ ID NO: 3262069 - RNA, 14 nt, Vaccinia virus
gcgcuaguagauuu

SEQ ID NO: 3262070 - RNA, 15 nt, Vaccinia virus
uagauaaaauacuga

SEQ ID NO: 3262071 - RNA, 17 nt, Vaccinia virus
uacauugaauauaaaau

SEQ ID NO: 3262072 - RNA, 15 nt, Vaccinia virus
acaguaguaaugaag

SEQ ID NO: 3262073 - RNA, 22 nt, Vaccinia virus
aauauuuuucuauguuaggaau

SEQ ID NO: 3262074 - RNA, 12 nt, Vaccinia virus
ccaauuaaaugu

SEQ ID NO: 3262075 - RNA, 14 nt, Vaccinia virus
aauucauuccuaua

SEQ ID NO: 3262076 - RNA, 17 nt, Vaccinia virus
caacagugauaugugua

SEQ ID NO: 3262077 - RNA, 14 nt, Vaccinia virus
auuuuaacacuaau

SEQ ID NO: 3262078 - RNA, 12 nt, Vaccinia virus
gaaucaaaaagu

SEQ ID NO: 3262079 - RNA, 17 nt, Vaccinia virus
gcaauagguaauaacua

SEQ ID NO: 3262080 - RNA, 23 nt, Vaccinia virus
aauuauucauucuagaacuauaa

SEQ ID NO: 3262081 - RNA, 20 nt, Vaccinia virus
agauuuauugaaaaugugua

SEQ ID NO: 3262082 - RNA, 20 nt, Vaccinia virus
aauaucuaauggauaaacug

SEQ ID NO: 3262083 - RNA, 14 nt, Vaccinia virus
ucaauaaggaauua

SEQ ID NO: 3262084 - RNA, 12 nt, Vaccinia virus
uccuacaaccau

SEQ ID NO: 3262085 - RNA, 19 nt, Vaccinia virus
auacuaaaucuccuucaug

SEQ ID NO: 3262086 - RNA, 12 nt, Vaccinia virus
aacaauuacaaa

SEQ ID NO: 3262087 - RNA, 19 nt, Vaccinia virus
ccagaguguucgaaugcca

SEQ ID NO: 3262088 - RNA, 16 nt, Vaccinia virus
cugguucaaaauuaau

SEQ ID NO: 3262089 - RNA, 15 nt, Vaccinia virus
uaaaucaauaucucu

SEQ ID NO: 3262090 - RNA, 19 nt, Vaccinia virus
ggaucugacucggacucug

SEQ ID NO: 3262091 - RNA, 15 nt, Vaccinia virus
acguuuaauaauaau

SEQ ID NO: 3262092 - RNA, 12 nt, Vaccinia virus
uaucuucauaga

SEQ ID NO: 3262093 - RNA, 17 nt, Vaccinia virus
ugucugauuuuucuuca

SEQ ID NO: 3262094 - RNA, 15 nt, Vaccinia virus
auacuacuaaugaca

SEQ ID NO: 3262095 - RNA, 12 nt, Vaccinia virus
cauauaaauguc

SEQ ID NO: 3262096 - RNA, 20 nt, Vaccinia virus
auaaaccauuagauaaaguu

SEQ ID NO: 3262097 - RNA, 16 nt, Vaccinia virus
uccgucaccaaaaaag

SEQ ID NO: 3262098 - RNA, 18 nt, Vaccinia virus
ccuaaauaaauaugugua

SEQ ID NO: 3262099 - RNA, 14 nt, Vaccinia virus
aacuaacuauugaa

SEQ ID NO: 3262100 - RNA, 15 nt, Vaccinia virus
aauacuuuacgcuau

SEQ ID NO: 3262101 - RNA, 14 nt, Vaccinia virus
uagccaucguuaau

SEQ ID NO: 3262102 - RNA, 22 nt, Vaccinia virus
aaacauucuuuauuaaguguuu

SEQ ID NO: 3262103 - RNA, 18 nt, Vaccinia virus
auuccguauauagcacaa

SEQ ID NO: 3262104 - RNA, 20 nt, Vaccinia virus
uuaaaauaaaaaauauucuu

SEQ ID NO: 3262105 - RNA, 17 nt, Vaccinia virus
acuaauuguuaaccauu

SEQ ID NO: 3262106 - RNA, 23 nt, Vaccinia virus
uucguaacuggcggauuauucau

SEQ ID NO: 3262107 - RNA, 23 nt, Vaccinia virus
gacauucccacaguguugccauu

SEQ ID NO: 3262108 - RNA, 23 nt, Vaccinia virus
ugucuaaugaugaacacaaaugg

SEQ ID NO: 3262109 - RNA, 13 nt, Vaccinia virus
agaccaaacaaua

SEQ ID NO: 3262110 - RNA, 23 nt, Vaccinia virus
acuugaaauaaucggagaauguu

SEQ ID NO: 3262111 - RNA, 13 nt, Vaccinia virus
cuuaguaacucua

SEQ ID NO: 3262112 - RNA, 15 nt, Vaccinia virus
auccgauaaacauug

SEQ ID NO: 3262113 - RNA, 12 nt, Vaccinia virus
ccaaaacaaaau

SEQ ID NO: 3262114 - RNA, 14 nt, Vaccinia virus
ucuucuucuacauu

SEQ ID NO: 3262115 - RNA, 16 nt, Vaccinia virus
agcagcguauucauug

SEQ ID NO: 3262116 - RNA, 13 nt, Vaccinia virus
guaauccauaauc

SEQ ID NO: 3262117 - RNA, 22 nt, Vaccinia virus
guuucucaucuuuuacuugauu

SEQ ID NO: 3262118 - RNA, 19 nt, Vaccinia virus
ugaauaaucagauuuaccc

SEQ ID NO: 3262119 - RNA, 21 nt, Vaccinia virus
ucuuaacuacauucacaaaaa

SEQ ID NO: 3262120 - RNA, 16 nt, Vaccinia virus
agauuguaucaguuuc

SEQ ID NO: 3262121 - RNA, 14 nt, Vaccinia virus
aaugcuugaaaaug

SEQ ID NO: 3262122 - RNA, 13 nt, Vaccinia virus
aacuaucaaacaa

SEQ ID NO: 3262123 - RNA, 22 nt, Vaccinia virus
auuauagguaacauaaaaacug

SEQ ID NO: 3262124 - RNA, 13 nt, Vaccinia virus
auuuggaaaagaa

SEQ ID NO: 3262125 - RNA, 20 nt, Vaccinia virus
aucaauaaaugugagaaguu

SEQ ID NO: 3262126 - RNA, 19 nt, Vaccinia virus
agauagcguauaucucuau

SEQ ID NO: 3262127 - RNA, 16 nt, Vaccinia virus
auuuauguuuuaaaua

SEQ ID NO: 3262128 - RNA, 21 nt, Vaccinia virus
caucauacuagauaaaucguu

SEQ ID NO: 3262129 - RNA, 18 nt, Vaccinia virus
acuaacgcaacuauauag

SEQ ID NO: 3262130 - RNA, 12 nt, Vaccinia virus
guaaagaaggag

SEQ ID NO: 3262131 - RNA, 19 nt, Vaccinia virus
uuauauugaugaugucgaa

SEQ ID NO: 3262132 - RNA, 21 nt, Vaccinia virus
aucuauaugaccgauaagaga

SEQ ID NO: 3262133 - RNA, 14 nt, Vaccinia virus
auaauccugugcau

SEQ ID NO: 3262134 - RNA, 21 nt, Vaccinia virus
agcaagacuaacacacaaugu

SEQ ID NO: 3262135 - RNA, 18 nt, Vaccinia virus
aaacuuauuuagaauauc

SEQ ID NO: 3262136 - RNA, 21 nt, Vaccinia virus
gacucgcguuuagaggaguga

SEQ ID NO: 3262137 - RNA, 16 nt, Vaccinia virus
auaaugucaugucuag

SEQ ID NO: 3262138 - RNA, 16 nt, Vaccinia virus
uuagaaggaguguuuu

SEQ ID NO: 3262139 - RNA, 21 nt, Vaccinia virus
ugguauaaaguauuuggcuau

SEQ ID NO: 3262140 - RNA, 15 nt, Vaccinia virus
gugcgcugaggucgg

SEQ ID NO: 3262141 - RNA, 12 nt, Vaccinia virus
ccgauuaaacau

SEQ ID NO: 3262142 - RNA, 14 nt, Vaccinia virus
aucauaaagaacag

SEQ ID NO: 3262143 - RNA, 14 nt, Vaccinia virus
uuuucauguaucga

SEQ ID NO: 3262144 - RNA, 23 nt, Vaccinia virus
cuuaaugaagaucuauuuccaga

SEQ ID NO: 3262145 - RNA, 15 nt, Vaccinia virus
uuaauuaauguaacu

SEQ ID NO: 3262146 - RNA, 21 nt, Vaccinia virus
uaucacaacaucuauaaaagu

SEQ ID NO: 3262147 - RNA, 21 nt, Vaccinia virus
auacaucgguaaauaaaacua

SEQ ID NO: 3262148 - RNA, 17 nt, Vaccinia virus
aguucuuuuaugucaag

SEQ ID NO: 3262149 - RNA, 18 nt, Vaccinia virus
auagauaugccagaacua

SEQ ID NO: 3262150 - RNA, 21 nt, Vaccinia virus
caauuuuguauuauucugaau

SEQ ID NO: 3262151 - RNA, 12 nt, Vaccinia virus
aauaaaucaugg

SEQ ID NO: 3262152 - RNA, 19 nt, Vaccinia virus
cuagacguuuauucucaaa

SEQ ID NO: 3262153 - RNA, 14 nt, Vaccinia virus
aauaguucuguaau

SEQ ID NO: 3262154 - RNA, 16 nt, Vaccinia virus
auaacauuuuuuguaa

SEQ ID NO: 3262155 - RNA, 11 nt, Vaccinia virus
aucuaauuaau

SEQ ID NO: 3262156 - RNA, 22 nt, Vaccinia virus
uagagcccacguuuaaacauuc

SEQ ID NO: 3262157 - RNA, 17 nt, Vaccinia virus
cauaguccucguguggu

SEQ ID NO: 3262158 - RNA, 20 nt, Vaccinia virus
aauuagagacuuuauaacag

SEQ ID NO: 3262159 - RNA, 23 nt, Vaccinia virus
acucauuucauuauaauaguuua

SEQ ID NO: 3262160 - RNA, 15 nt, Vaccinia virus
ucuuaacuacauuca

SEQ ID NO: 3262161 - RNA, 12 nt, Vaccinia virus
ccaauacauguu

SEQ ID NO: 3262162 - RNA, 20 nt, Vaccinia virus
uuccacauuaauacagccua

SEQ ID NO: 3262163 - RNA, 18 nt, Vaccinia virus
uauaacaugcuaaaccuu

SEQ ID NO: 3262164 - RNA, 17 nt, Vaccinia virus
acgaaagcaaagaauga

SEQ ID NO: 3262165 - RNA, 17 nt, Vaccinia virus
aguaccgauucuagaua

SEQ ID NO: 3262166 - RNA, 21 nt, Vaccinia virus
caaacaauguuugacugaaua

SEQ ID NO: 3262167 - RNA, 22 nt, Vaccinia virus
gauuaccucuaguuucagaauu

SEQ ID NO: 3262168 - RNA, 19 nt, Vaccinia virus
caaaaauauaauagcuaau

SEQ ID NO: 3262169 - RNA, 20 nt, Vaccinia virus
auauuaacgaguuccauuua

SEQ ID NO: 3262170 - RNA, 15 nt, Vaccinia virus
aauaucuaggacaau

SEQ ID NO: 3262171 - RNA, 18 nt, Vaccinia virus
uucuaucgauaauugucu

SEQ ID NO: 3262172 - RNA, 22 nt, Vaccinia virus
uuagagaacauacauuuguaaa

SEQ ID NO: 3262173 - RNA, 16 nt, Vaccinia virus
aacggaacauauuuau

SEQ ID NO: 3262174 - RNA, 12 nt, Vaccinia virus
aauauagaauau

SEQ ID NO: 3262175 - RNA, 17 nt, Vaccinia virus
uaucaaccacauaucug

SEQ ID NO: 3262176 - RNA, 13 nt, Vaccinia virus
cgagcaagagaau

SEQ ID NO: 3262177 - RNA, 17 nt, Vaccinia virus
uaacauggauacagaua

SEQ ID NO: 3262178 - RNA, 19 nt, Vaccinia virus
uacuaguuuuacuaucaua

SEQ ID NO: 3262179 - RNA, 22 nt, Vaccinia virus
auuaacuacuugaaauucucca

SEQ ID NO: 3262180 - RNA, 17 nt, Vaccinia virus
ugauauauauuuucacu

SEQ ID NO: 3262181 - RNA, 14 nt, Vaccinia virus
aauguccacaaaug

SEQ ID NO: 3262182 - RNA, 22 nt, Vaccinia virus
acggagucauaacuauuuuacc

SEQ ID NO: 3262183 - RNA, 17 nt, Vaccinia virus
uguagaaucagcaucca

SEQ ID NO: 3262184 - RNA, 22 nt, Vaccinia virus
auuuacggaacuucuaaaacug

SEQ ID NO: 3262185 - RNA, 12 nt, Vaccinia virus
cauucuuggaug

SEQ ID NO: 3262186 - RNA, 18 nt, Vaccinia virus
aguuucacaugaauuugu

SEQ ID NO: 3262187 - RNA, 19 nt, Vaccinia virus
uuccugauuauuuacuaua

SEQ ID NO: 3262188 - RNA, 19 nt, Vaccinia virus
aacaaucacaagaacagag

SEQ ID NO: 3262189 - RNA, 21 nt, Vaccinia virus
gguauuuauaaacuuuaucca

SEQ ID NO: 3262190 - RNA, 17 nt, Vaccinia virus
acagaaacaucauauac

SEQ ID NO: 3262191 - RNA, 18 nt, Vaccinia virus
auuaucaaaauuaacaga

SEQ ID NO: 3262192 - RNA, 16 nt, Vaccinia virus
acaaaaagaaagaaua

SEQ ID NO: 3262193 - RNA, 17 nt, Vaccinia virus
ccaauuaccaacuagaa

SEQ ID NO: 3262194 - RNA, 15 nt, Vaccinia virus
aagauaucugguucu

SEQ ID NO: 3262195 - RNA, 23 nt, Vaccinia virus
caaacaucacucuucgaaaagaa

SEQ ID NO: 3262196 - RNA, 20 nt, Vaccinia virus
aucuuauguuuuuaagagau

SEQ ID NO: 3262197 - RNA, 20 nt, Vaccinia virus
uaacaaaaucaggaaaaaag

SEQ ID NO: 3262198 - RNA, 16 nt, Vaccinia virus
gccuucgaauaaauaa

SEQ ID NO: 3262199 - RNA, 18 nt, Vaccinia virus
guaauaaauaugauuuug

SEQ ID NO: 3262200 - RNA, 18 nt, Vaccinia virus
auuuuggugaaauuauua

SEQ ID NO: 3262201 - RNA, 17 nt, Vaccinia virus
cuugacuacauucucau

SEQ ID NO: 3262202 - RNA, 12 nt, Vaccinia virus
cuucauuauuuu

SEQ ID NO: 3262203 - RNA, 19 nt, Vaccinia virus
acauugcuuuaaaauggac

SEQ ID NO: 3262204 - RNA, 15 nt, Vaccinia virus
aauuauguuuuuaua

SEQ ID NO: 3262205 - RNA, 22 nt, Vaccinia virus
acgcaauagucagacuguaguu

SEQ ID NO: 3262206 - RNA, 19 nt, Vaccinia virus
auaaaacgaauuauagaca

SEQ ID NO: 3262207 - RNA, 19 nt, Vaccinia virus
ucaacacuacccaauaaau

SEQ ID NO: 3262208 - RNA, 17 nt, Vaccinia virus
ugcaaacuuaacagcuc

SEQ ID NO: 3262209 - RNA, 19 nt, Vaccinia virus
agcgcugaaaauaaagaua

SEQ ID NO: 3262210 - RNA, 22 nt, Vaccinia virus
aguuacucuuggucuaauacug

SEQ ID NO: 3262211 - RNA, 13 nt, Vaccinia virus
aaucagaaaacuu

SEQ ID NO: 3262212 - RNA, 15 nt, Vaccinia virus
ugaaugaaucagaua

SEQ ID NO: 3262213 - RNA, 19 nt, Vaccinia virus
ucgauuuaccguuacuaau

SEQ ID NO: 3262214 - RNA, 13 nt, Vaccinia virus
agauaauuuuacc

SEQ ID NO: 3262215 - RNA, 14 nt, Vaccinia virus
cauugucuuauaga

SEQ ID NO: 3262216 - RNA, 17 nt, Vaccinia virus
cuauuuuaccagcauua

SEQ ID NO: 3262217 - RNA, 18 nt, Vaccinia virus
uuaacgaguuaaaaaaga

SEQ ID NO: 3262218 - RNA, 20 nt, Vaccinia virus
gcacuacuguuaagaaugau

SEQ ID NO: 3262219 - RNA, 18 nt, Vaccinia virus
aucagaaucauacaauga

SEQ ID NO: 3262220 - RNA, 19 nt, Vaccinia virus
uuugagagaucauuucuau

SEQ ID NO: 3262221 - RNA, 16 nt, Vaccinia virus
aacauuuccuacuacu

SEQ ID NO: 3262222 - RNA, 16 nt, Vaccinia virus
cuuauguaugugcauu

SEQ ID NO: 3262223 - RNA, 13 nt, Vaccinia virus
acguaaugaagau

SEQ ID NO: 3262224 - RNA, 19 nt, Vaccinia virus
auaaaugauucaaccauga

SEQ ID NO: 3262225 - RNA, 13 nt, Vaccinia virus
auguccgaagaga

SEQ ID NO: 3262226 - RNA, 13 nt, Vaccinia virus
auaauauaaacau

SEQ ID NO: 3262227 - RNA, 15 nt, Vaccinia virus
aacuaaauuaacaau

SEQ ID NO: 3262228 - RNA, 16 nt, Vaccinia virus
auaugagaaugaauau

SEQ ID NO: 3262229 - RNA, 13 nt, Vaccinia virus
auauauuaaacaa

SEQ ID NO: 3262230 - RNA, 15 nt, Vaccinia virus
cuuugucggaagaau

SEQ ID NO: 3262231 - RNA, 19 nt, Vaccinia virus
auuacuaucuuuaacauaa

SEQ ID NO: 3262232 - RNA, 19 nt, Vaccinia virus
ugaaaaaaaacuagucguu

SEQ ID NO: 3262233 - RNA, 19 nt, Vaccinia virus
cgaauaauucuaauaaacu

SEQ ID NO: 3262234 - RNA, 20 nt, Vaccinia virus
cagauacaguuaauaucuau

SEQ ID NO: 3262235 - RNA, 15 nt, Vaccinia virus
auucuuauucuuauu

SEQ ID NO: 3262236 - RNA, 18 nt, Vaccinia virus
cucaaaugaauaaguuua

SEQ ID NO: 3262237 - RNA, 19 nt, Vaccinia virus
gauuuuuuuccaugauauc

SEQ ID NO: 3262238 - RNA, 20 nt, Vaccinia virus
guauaauucuuuauaacuga

SEQ ID NO: 3262239 - RNA, 20 nt, Vaccinia virus
auucucugacauucagaaag

SEQ ID NO: 3262240 - RNA, 22 nt, Vaccinia virus
acguugauggacagaugauaca

SEQ ID NO: 3262241 - RNA, 15 nt, Vaccinia virus
gaacauaaacaaauu

SEQ ID NO: 3262242 - RNA, 16 nt, Vaccinia virus
acauucagaaagacga

SEQ ID NO: 3262243 - RNA, 19 nt, Vaccinia virus
uaauacaucucuggaaaua

SEQ ID NO: 3262244 - RNA, 18 nt, Vaccinia virus
agauguauuugauauacu

SEQ ID NO: 3262245 - RNA, 17 nt, Vaccinia virus
aaauacgaaaacgauau

SEQ ID NO: 3262246 - RNA, 21 nt, Vaccinia virus
acucaauaucuagacuuucug

SEQ ID NO: 3262247 - RNA, 20 nt, Vaccinia virus
auuuauccagucugagaaaa

SEQ ID NO: 3262248 - RNA, 22 nt, Vaccinia virus
agauauagcaccaucuauucca

SEQ ID NO: 3262249 - RNA, 20 nt, Vaccinia virus
cuuuauccauaucucuagau

SEQ ID NO: 3262250 - RNA, 15 nt, Vaccinia virus
aaagauauuccaaga

SEQ ID NO: 3262251 - RNA, 14 nt, Vaccinia virus
ucuauuguuuggaa

SEQ ID NO: 3262252 - RNA, 22 nt, Vaccinia virus
uuaaaauaaaaaauauucuuca

SEQ ID NO: 3262253 - RNA, 18 nt, Vaccinia virus
acgauuucugaauuauuu

SEQ ID NO: 3262254 - RNA, 23 nt, Vaccinia virus
ugagauuuguuuuguuaaacaau

SEQ ID NO: 3262255 - RNA, 15 nt, Vaccinia virus
augauauguugugau

SEQ ID NO: 3262256 - RNA, 18 nt, Vaccinia virus
ugugaagguuuagauguc

SEQ ID NO: 3262257 - RNA, 22 nt, Vaccinia virus
uauuuaagaguggauucuucua

SEQ ID NO: 3262258 - RNA, 14 nt, Vaccinia virus
aaucauuuaaucca

SEQ ID NO: 3262259 - RNA, 19 nt, Vaccinia virus
gaauguucucaagaacuac

SEQ ID NO: 3262260 - RNA, 17 nt, Vaccinia virus
cuguaucccgucaacga

SEQ ID NO: 3262261 - RNA, 15 nt, Vaccinia virus
ugguuucuaaaucua

SEQ ID NO: 3262262 - RNA, 12 nt, Vaccinia virus
cugcagcauuuu

SEQ ID NO: 3262263 - RNA, 20 nt, Vaccinia virus
auagacggcuucuagaaguu

SEQ ID NO: 3262264 - RNA, 21 nt, Vaccinia virus
aaaaguuccagaaaauguaga

SEQ ID NO: 3262265 - RNA, 14 nt, Vaccinia virus
uaguuuuaagaaag

SEQ ID NO: 3262266 - RNA, 19 nt, Vaccinia virus
uacucuauaaaauacuaau

SEQ ID NO: 3262267 - RNA, 18 nt, Vaccinia virus
gauaaacgugauaaaagu

SEQ ID NO: 3262268 - RNA, 20 nt, Vaccinia virus
aucaaucuagcauuucuagc

SEQ ID NO: 3262269 - RNA, 17 nt, Vaccinia virus
aauuaugauagaaauua

SEQ ID NO: 3262270 - RNA, 18 nt, Vaccinia virus
aggagaauccgaaauauu

SEQ ID NO: 3262271 - RNA, 13 nt, Vaccinia virus
aaugaaaauggau

SEQ ID NO: 3262272 - RNA, 21 nt, Vaccinia virus
ucaacaaucguuaauaaaucu

SEQ ID NO: 3262273 - RNA, 12 nt, Vaccinia virus
auucagacacuu

SEQ ID NO: 3262274 - RNA, 17 nt, Vaccinia virus
cugauaauuuagauaau

SEQ ID NO: 3262275 - RNA, 23 nt, Vaccinia virus
auaguguuuaacaaagauauuac

SEQ ID NO: 3262276 - RNA, 12 nt, Vaccinia virus
gaucaaguaaag

SEQ ID NO: 3262277 - RNA, 18 nt, Vaccinia virus
caaaggaugaaagaaagc

SEQ ID NO: 3262278 - RNA, 14 nt, Vaccinia virus
acaaggaaacuaau

SEQ ID NO: 3262279 - RNA, 15 nt, Vaccinia virus
augucaggaaauauu

SEQ ID NO: 3262280 - RNA, 13 nt, Vaccinia virus
acucauuguuuac

SEQ ID NO: 3262281 - RNA, 16 nt, Vaccinia virus
acacuguguauuguuu

SEQ ID NO: 3262282 - RNA, 16 nt, Vaccinia virus
cauaauagaauguauu

SEQ ID NO: 3262283 - RNA, 13 nt, Vaccinia virus
cugcuauauuguu

SEQ ID NO: 3262284 - RNA, 22 nt, Vaccinia virus
aaguugcgaugaaauaggagau

SEQ ID NO: 3262285 - RNA, 16 nt, Vaccinia virus
cugcugcguuaaacau

SEQ ID NO: 3262286 - RNA, 21 nt, Vaccinia virus
auauuuuucguuuacaaaauc

SEQ ID NO: 3262287 - RNA, 14 nt, Vaccinia virus
uuggaagaaucuca

SEQ ID NO: 3262288 - RNA, 18 nt, Vaccinia virus
uuauagacaaauuauuca

SEQ ID NO: 3262289 - RNA, 11 nt, Vaccinia virus
guaacaaacug

SEQ ID NO: 3262290 - RNA, 16 nt, Vaccinia virus
acuaauucuuucucau

SEQ ID NO: 3262291 - RNA, 22 nt, Vaccinia virus
cagacaauaagagcagcacaaa

SEQ ID NO: 3262292 - RNA, 15 nt, Vaccinia virus
aacuaugucaaaaau

SEQ ID NO: 3262293 - RNA, 13 nt, Vaccinia virus
caugaacauaauc

SEQ ID NO: 3262294 - RNA, 19 nt, Vaccinia virus
auaauuguaacauccuucu

SEQ ID NO: 3262295 - RNA, 22 nt, Vaccinia virus
gaagagauuccugacuuugcau

SEQ ID NO: 3262296 - RNA, 19 nt, Vaccinia virus
caaacuuccauggaaaaac

SEQ ID NO: 3262297 - RNA, 18 nt, Vaccinia virus
ucuaaaccuucuuauucu

SEQ ID NO: 3262298 - RNA, 15 nt, Vaccinia virus
gugguagauauauag

SEQ ID NO: 3262299 - RNA, 14 nt, Vaccinia virus
gaacaucuuccaua

SEQ ID NO: 3262300 - RNA, 21 nt, Vaccinia virus
gaauauacugauuagaaauaa

SEQ ID NO: 3262301 - RNA, 13 nt, Vaccinia virus
cggaauagaugua

SEQ ID NO: 3262302 - RNA, 18 nt, Vaccinia virus
uuagaaacuucaaagauu

SEQ ID NO: 3262303 - RNA, 12 nt, Vaccinia virus
uguuucauauuu

SEQ ID NO: 3262304 - RNA, 15 nt, Vaccinia virus
guauaaucuggugga

SEQ ID NO: 3262305 - RNA, 20 nt, Vaccinia virus
uugaugauaucuacaucguu

SEQ ID NO: 3262306 - RNA, 17 nt, Vaccinia virus
aagugcuuaaauauuuc

SEQ ID NO: 3262307 - RNA, 19 nt, Vaccinia virus
auguucgguauaaaaauua

SEQ ID NO: 3262308 - RNA, 23 nt, Vaccinia virus
auaaaguccgacuauuguucuau

SEQ ID NO: 3262309 - RNA, 20 nt, Vaccinia virus
acuuuuacagaucuaguaua

SEQ ID NO: 3262310 - RNA, 19 nt, Vaccinia virus
auacuuuguaaucuagaca

SEQ ID NO: 3262311 - RNA, 23 nt, Vaccinia virus
ucauaaacucauccuaucuggag

SEQ ID NO: 3262312 - RNA, 16 nt, Vaccinia virus
uugauacggcuauucu

SEQ ID NO: 3262313 - RNA, 22 nt, Vaccinia virus
guaccagcauuuguaauaaucc

SEQ ID NO: 3262314 - RNA, 21 nt, Vaccinia virus
gugccguguuucaaauauucu

SEQ ID NO: 3262315 - RNA, 20 nt, Vaccinia virus
aaguaaaagaucuauaaugu

SEQ ID NO: 3262316 - RNA, 15 nt, Vaccinia virus
cagaaggaaacuucu

SEQ ID NO: 3262317 - RNA, 14 nt, Vaccinia virus
aagauaaucuucuc

SEQ ID NO: 3262318 - RNA, 21 nt, Vaccinia virus
guucuaguuccgcauuaaaug

SEQ ID NO: 3262319 - RNA, 21 nt, Vaccinia virus
ugaugcguuccauuuguguau

SEQ ID NO: 3262320 - RNA, 13 nt, Vaccinia virus
acauuuuaaaaua

SEQ ID NO: 3262321 - RNA, 15 nt, Vaccinia virus
auagccaaaagacua

SEQ ID NO: 3262322 - RNA, 14 nt, Vaccinia virus
cccaagauuucauc

SEQ ID NO: 3262323 - RNA, 20 nt, Vaccinia virus
ucaacagaaucaguauauau

SEQ ID NO: 3262324 - RNA, 22 nt, Vaccinia virus
uguauuaaagauauuguuacac

SEQ ID NO: 3262325 - RNA, 14 nt, Vaccinia virus
auuugaacuuaacu

SEQ ID NO: 3262326 - RNA, 15 nt, Vaccinia virus
aauaacuaugauauc

SEQ ID NO: 3262327 - RNA, 15 nt, Vaccinia virus
guguauuuccaucau

SEQ ID NO: 3262328 - RNA, 16 nt, Vaccinia virus
auuuucaauuauaaua

SEQ ID NO: 3262329 - RNA, 23 nt, Vaccinia virus
uuauuuuaaaccuaaagauguua

SEQ ID NO: 3262330 - RNA, 21 nt, Vaccinia virus
uucuacaauuacguaaugaag

SEQ ID NO: 3262331 - RNA, 14 nt, Vaccinia virus
ccagugcauuucua

SEQ ID NO: 3262332 - RNA, 22 nt, Vaccinia virus
agauuguuuaagaagagaauua

SEQ ID NO: 3262333 - RNA, 13 nt, Vaccinia virus
gcaaagagaugau

SEQ ID NO: 3262334 - RNA, 16 nt, Vaccinia virus
auaaaaaaagcaaugu

SEQ ID NO: 3262335 - RNA, 19 nt, Vaccinia virus
aucucauuaagcuaauaga

SEQ ID NO: 3262336 - RNA, 21 nt, Vaccinia virus
auuggaauaagcgucuucucg

SEQ ID NO: 3262337 - RNA, 13 nt, Vaccinia virus
aucccaaacauug

SEQ ID NO: 3262338 - RNA, 20 nt, Vaccinia virus
aucuuagacauuuuuagaga

SEQ ID NO: 3262339 - RNA, 14 nt, Vaccinia virus
uugauaauaaauca

SEQ ID NO: 3262340 - RNA, 18 nt, Vaccinia virus
auuaucgagcgugauguu

SEQ ID NO: 3262341 - RNA, 15 nt, Vaccinia virus
gauagagaacauaua

SEQ ID NO: 3262342 - RNA, 22 nt, Vaccinia virus
auuaauauaguuauuaaugaug

SEQ ID NO: 3262343 - RNA, 19 nt, Vaccinia virus
guuaaauuuuacaaaucua

SEQ ID NO: 3262344 - RNA, 13 nt, Vaccinia virus
uacugcaauaaaa

SEQ ID NO: 3262345 - RNA, 15 nt, Vaccinia virus
agcuccaucaguuuu

SEQ ID NO: 3262346 - RNA, 20 nt, Vaccinia virus
auuuuuauauacauuacuga

SEQ ID NO: 3262347 - RNA, 12 nt, Vaccinia virus
auuacaaacaug

SEQ ID NO: 3262348 - RNA, 18 nt, Vaccinia virus
uaguaccaaauucuucua

SEQ ID NO: 3262349 - RNA, 15 nt, Vaccinia virus
uaucgauaauuauuu

SEQ ID NO: 3262350 - RNA, 19 nt, Vaccinia virus
auuuuucuauguuaggaau

SEQ ID NO: 3262351 - RNA, 13 nt, Vaccinia virus
aaaauuguagaac

SEQ ID NO: 3262352 - RNA, 19 nt, Vaccinia virus
caaaauacauaauuuugua

SEQ ID NO: 3262353 - RNA, 13 nt, Vaccinia virus
aaauauuugugua

SEQ ID NO: 3262354 - RNA, 19 nt, Vaccinia virus
auauaccgccuuucaaaau

SEQ ID NO: 3262355 - RNA, 15 nt, Vaccinia virus
uuaauagaacucuuu

SEQ ID NO: 3262356 - RNA, 16 nt, Vaccinia virus
aaaucauuguguuuau

SEQ ID NO: 3262357 - RNA, 20 nt, Vaccinia virus
uaugaugcaaagauguuuaa

SEQ ID NO: 3262358 - RNA, 16 nt, Vaccinia virus
aaaccuaaagauguua

SEQ ID NO: 3262359 - RNA, 22 nt, Vaccinia virus
aaucauuccucauaagaugaua

SEQ ID NO: 3262360 - RNA, 18 nt, Vaccinia virus
cuagaauacucauuuucu

SEQ ID NO: 3262361 - RNA, 15 nt, Vaccinia virus
acuaucauaauuaaa

SEQ ID NO: 3262362 - RNA, 21 nt, Vaccinia virus
guagaucuuaucuauccagau

SEQ ID NO: 3262363 - RNA, 16 nt, Vaccinia virus
guaaaucacauaucua

SEQ ID NO: 3262364 - RNA, 23 nt, Vaccinia virus
agaaacugacuugauaaaaaugg

SEQ ID NO: 3262365 - RNA, 20 nt, Vaccinia virus
uauucucccaccguuauaua

SEQ ID NO: 3262366 - RNA, 19 nt, Vaccinia virus
guauccagguagacauaga

SEQ ID NO: 3262367 - RNA, 22 nt, Vaccinia virus
auagguuacuagauuaaaaaug

SEQ ID NO: 3262368 - RNA, 11 nt, Vaccinia virus
uauauaucuuu

SEQ ID NO: 3262369 - RNA, 21 nt, Vaccinia virus
accgacgauaauauaaacauc

SEQ ID NO: 3262370 - RNA, 24 nt, Vaccinia virus
agauucgaugguuugucaucguau

SEQ ID NO: 3262371 - RNA, 14 nt, Vaccinia virus
agaccauauacuga

SEQ ID NO: 3262372 - RNA, 14 nt, Vaccinia virus
cauauucuacucuu

SEQ ID NO: 3262373 - RNA, 21 nt, Vaccinia virus
ucauauauauacugagaaguu

SEQ ID NO: 3262374 - RNA, 17 nt, Vaccinia virus
augaaauuuaaguaaca

SEQ ID NO: 3262375 - RNA, 11 nt, Vaccinia virus
aauaaaacaau

SEQ ID NO: 3262376 - RNA, 19 nt, Vaccinia virus
aauagauaaugaacauaua

SEQ ID NO: 3262377 - RNA, 20 nt, Vaccinia virus
ccagaugaaugggugucaca

SEQ ID NO: 3262378 - RNA, 19 nt, Vaccinia virus
ucugaaaauccacuaacaa

SEQ ID NO: 3262379 - RNA, 14 nt, Vaccinia virus
aucuucguuaaaaa

SEQ ID NO: 3262380 - RNA, 14 nt, Vaccinia virus
aguacgguaauaga

SEQ ID NO: 3262381 - RNA, 19 nt, Vaccinia virus
cuuccaccacauccaucaa

SEQ ID NO: 3262382 - RNA, 20 nt, Vaccinia virus
guuauuuggcaguacucauu

SEQ ID NO: 3262383 - RNA, 15 nt, Vaccinia virus
agacgacguauuaua

SEQ ID NO: 3262384 - RNA, 17 nt, Vaccinia virus
cuuauuccacaauacga

SEQ ID NO: 3262385 - RNA, 15 nt, Vaccinia virus
aaggauaugauaugu

SEQ ID NO: 3262386 - RNA, 14 nt, Vaccinia virus
uguugugaaagagu

SEQ ID NO: 3262387 - RNA, 19 nt, Vaccinia virus
auaauucuuuauaacugaa

SEQ ID NO: 3262388 - RNA, 22 nt, Vaccinia virus
uaccaaagacuuugaaauauag

SEQ ID NO: 3262389 - RNA, 18 nt, Vaccinia virus
cuuuguagaaaaaaauuc

SEQ ID NO: 3262390 - RNA, 15 nt, Vaccinia virus
ucauuguuaugaauc

SEQ ID NO: 3262391 - RNA, 15 nt, Vaccinia virus
auaagacuaaugcuu

SEQ ID NO: 3262392 - RNA, 17 nt, Vaccinia virus
aaugauaucuuagaaua

SEQ ID NO: 3262393 - RNA, 16 nt, Vaccinia virus
cuuuguguugugcauu

SEQ ID NO: 3262394 - RNA, 13 nt, Vaccinia virus
aaauuuucaauua

SEQ ID NO: 3262395 - RNA, 20 nt, Vaccinia virus
aucaacgaguucaaauauga

SEQ ID NO: 3262396 - RNA, 22 nt, Vaccinia virus
uagaauguugagcuaauuuuug

SEQ ID NO: 3262397 - RNA, 17 nt, Vaccinia virus
cuagauauuaguauuuu

SEQ ID NO: 3262398 - RNA, 21 nt, Vaccinia virus
uaugaauccgaugaucucacu

SEQ ID NO: 3262399 - RNA, 20 nt, Vaccinia virus
gccucaucuucuauauccug

SEQ ID NO: 3262400 - RNA, 18 nt, Vaccinia virus
uuauaucuaaaaauuaga

SEQ ID NO: 3262401 - RNA, 17 nt, Vaccinia virus
uauacggcagcagcuuc

SEQ ID NO: 3262402 - RNA, 22 nt, Vaccinia virus
caucaaaaauaaguaaaaagug

SEQ ID NO: 3262403 - RNA, 13 nt, Vaccinia virus
uauacccaaagag

SEQ ID NO: 3262404 - RNA, 13 nt, Vaccinia virus
acaagucuaauaa

SEQ ID NO: 3262405 - RNA, 18 nt, Vaccinia virus
auaaaaaguaauauucau

SEQ ID NO: 3262406 - RNA, 13 nt, Vaccinia virus
ccaaacuuuuuca

SEQ ID NO: 3262407 - RNA, 19 nt, Vaccinia virus
uacuuucaaugagauaaau

SEQ ID NO: 3262408 - RNA, 16 nt, Vaccinia virus
cgaauauauaaaagac

SEQ ID NO: 3262409 - RNA, 20 nt, Vaccinia virus
gccacaaaacagaaauaugu

SEQ ID NO: 3262410 - RNA, 17 nt, Vaccinia virus
accauugauugcauaau

SEQ ID NO: 3262411 - RNA, 17 nt, Vaccinia virus
aucuuuacgaauuacuu

SEQ ID NO: 3262412 - RNA, 18 nt, Vaccinia virus
uuaaauccaaacaucacu

SEQ ID NO: 3262413 - RNA, 22 nt, Vaccinia virus
agauucuuccuccaaacaguua

SEQ ID NO: 3262414 - RNA, 19 nt, Vaccinia virus
uaguuuuaacauuauuaua

SEQ ID NO: 3262415 - RNA, 19 nt, Vaccinia virus
agucucgugaguaauucca

SEQ ID NO: 3262416 - RNA, 14 nt, Vaccinia virus
aauuauaauguuuc

SEQ ID NO: 3262417 - RNA, 14 nt, Vaccinia virus
aaugugucaagaau

SEQ ID NO: 3262418 - RNA, 20 nt, Vaccinia virus
ucuauccauuguuucacauu

SEQ ID NO: 3262419 - RNA, 13 nt, Vaccinia virus
aucaaaaaauuac

SEQ ID NO: 3262420 - RNA, 15 nt, Vaccinia virus
aauguaggagaguua

SEQ ID NO: 3262421 - RNA, 20 nt, Vaccinia virus
aacaaucaucgcauauagua

SEQ ID NO: 3262422 - RNA, 19 nt, Vaccinia virus
aaacuuaaucuuauuagaa

SEQ ID NO: 3262423 - RNA, 20 nt, Vaccinia virus
cuaguauagaucaaauacuu

SEQ ID NO: 3262424 - RNA, 18 nt, Vaccinia virus
aucuccaucgaugauaca

SEQ ID NO: 3262425 - RNA, 15 nt, Vaccinia virus
ucugcggauuuauaa

SEQ ID NO: 3262426 - RNA, 15 nt, Vaccinia virus
acuguggauguaaua

SEQ ID NO: 3262427 - RNA, 18 nt, Vaccinia virus
gagaaguaauaaaacgaa

SEQ ID NO: 3262428 - RNA, 13 nt, Vaccinia virus
guguaaaguuaaa

SEQ ID NO: 3262429 - RNA, 22 nt, Vaccinia virus
cgauaauugucucauauguuuu

SEQ ID NO: 3262430 - RNA, 18 nt, Vaccinia virus
guuaaaauaucaugguua

SEQ ID NO: 3262431 - RNA, 17 nt, Vaccinia virus
uuauccgcuaaaaauuu

SEQ ID NO: 3262432 - RNA, 19 nt, Vaccinia virus
uguccauaggauacuuugu

SEQ ID NO: 3262433 - RNA, 20 nt, Vaccinia virus
uacagagacuuuaucuaaau

SEQ ID NO: 3262434 - RNA, 15 nt, Vaccinia virus
agaaaugacuccaug

SEQ ID NO: 3262435 - RNA, 17 nt, Vaccinia virus
acauaauuauucuauca

SEQ ID NO: 3262436 - RNA, 15 nt, Vaccinia virus
auuggcaaauuauuu

SEQ ID NO: 3262437 - RNA, 12 nt, Vaccinia virus
cagacugaaagu

SEQ ID NO: 3262438 - RNA, 18 nt, Vaccinia virus
guccaauaugaucaugug

SEQ ID NO: 3262439 - RNA, 18 nt, Vaccinia virus
cuguaucauccaguuuuc

SEQ ID NO: 3262440 - RNA, 15 nt, Vaccinia virus
caucaaucaucauuu

SEQ ID NO: 3262441 - RNA, 18 nt, Vaccinia virus
auuauuaaguauaauaga

SEQ ID NO: 3262442 - RNA, 16 nt, Vaccinia virus
acuaauuaaagacuua

SEQ ID NO: 3262443 - RNA, 13 nt, Vaccinia virus
uuagauuauucuc

SEQ ID NO: 3262444 - RNA, 19 nt, Vaccinia virus
gaagucguguacguaauau

SEQ ID NO: 3262445 - RNA, 12 nt, Vaccinia virus
gauauuuucuau

SEQ ID NO: 3262446 - RNA, 16 nt, Vaccinia virus
accaccucucuggaag

SEQ ID NO: 3262447 - RNA, 18 nt, Vaccinia virus
gaugccaucauagauaua

SEQ ID NO: 3262448 - RNA, 19 nt, Vaccinia virus
aucaaaugguacaaaaaag

SEQ ID NO: 3262449 - RNA, 17 nt, Vaccinia virus
auacuguguaaagaaau

SEQ ID NO: 3262450 - RNA, 18 nt, Vaccinia virus
gaugaauuaauuaauguu

SEQ ID NO: 3262451 - RNA, 22 nt, Vaccinia virus
gaucauuuugauauugugaaug

SEQ ID NO: 3262452 - RNA, 14 nt, Vaccinia virus
uaagccaaacucau

SEQ ID NO: 3262453 - RNA, 18 nt, Vaccinia virus
ugagaauggaaaggaaac

SEQ ID NO: 3262454 - RNA, 22 nt, Vaccinia virus
ucaaacucuaaugaccacaucu

SEQ ID NO: 3262455 - RNA, 22 nt, Vaccinia virus
aggauauuuguucgacuuugug

SEQ ID NO: 3262456 - RNA, 15 nt, Vaccinia virus
ucagagaacuucugc

SEQ ID NO: 3262457 - RNA, 15 nt, Vaccinia virus
uuaucauggagugau

SEQ ID NO: 3262458 - RNA, 17 nt, Vaccinia virus
gcaauucgcuaaacaau

SEQ ID NO: 3262459 - RNA, 17 nt, Vaccinia virus
ccacugaugagauguua

SEQ ID NO: 3262460 - RNA, 18 nt, Vaccinia virus
caauaagcuuuagauauu

SEQ ID NO: 3262461 - RNA, 21 nt, Vaccinia virus
caucgauucccauaugauguu

SEQ ID NO: 3262462 - RNA, 14 nt, Vaccinia virus
aaacuugacauuua

SEQ ID NO: 3262463 - RNA, 21 nt, Vaccinia virus
aacuuaccacguaaaacuuaa

SEQ ID NO: 3262464 - RNA, 17 nt, Vaccinia virus
aguaauaaaacaaaaaa

SEQ ID NO: 3262465 - RNA, 19 nt, Vaccinia virus
uccuauaccgaguacugua

SEQ ID NO: 3262466 - RNA, 22 nt, Vaccinia virus
ugguuucgacucauuauaaugu

SEQ ID NO: 3262467 - RNA, 20 nt, Vaccinia virus
aauguuuaaacaucaaacau

SEQ ID NO: 3262468 - RNA, 14 nt, Vaccinia virus
aauaucuuaaauaa

SEQ ID NO: 3262469 - RNA, 13 nt, Vaccinia virus
agcggaugaaaaa

SEQ ID NO: 3262470 - RNA, 20 nt, Vaccinia virus
uuccaaugauauauuuucca

SEQ ID NO: 3262471 - RNA, 17 nt, Vaccinia virus
auacuuauucugauucu

SEQ ID NO: 3262472 - RNA, 20 nt, Vaccinia virus
aguauuuacaauguagaaau

SEQ ID NO: 3262473 - RNA, 12 nt, Vaccinia virus
ucuacuuuuguc

SEQ ID NO: 3262474 - RNA, 12 nt, Vaccinia virus
uagaaauacuua

SEQ ID NO: 3262475 - RNA, 13 nt, Vaccinia virus
auaaucaaaauug

SEQ ID NO: 3262476 - RNA, 13 nt, Vaccinia virus
gcguuaauguuug

SEQ ID NO: 3262477 - RNA, 17 nt, Vaccinia virus
uuuuaaaguuaaucaua

SEQ ID NO: 3262478 - RNA, 22 nt, Vaccinia virus
ucuucucgcuaguuuacuaugu

SEQ ID NO: 3262479 - RNA, 15 nt, Vaccinia virus
auaagccaaagcauu

SEQ ID NO: 3262480 - RNA, 15 nt, Vaccinia virus
uaugcaaucaauggu

SEQ ID NO: 3262481 - RNA, 22 nt, Vaccinia virus
gauuguccggcauaucauguag

SEQ ID NO: 3262482 - RNA, 13 nt, Vaccinia virus
ucauuuguuucca

SEQ ID NO: 3262483 - RNA, 23 nt, Vaccinia virus
uguuugaaaacagaaacaucaua

SEQ ID NO: 3262484 - RNA, 15 nt, Vaccinia virus
aaacauugauuaaau

SEQ ID NO: 3262485 - RNA, 21 nt, Vaccinia virus
guucgugccaauugaguaaca

SEQ ID NO: 3262486 - RNA, 18 nt, Vaccinia virus
aucuauccauaugcaucu

SEQ ID NO: 3262487 - RNA, 18 nt, Vaccinia virus
acauuaugagaauaugac

SEQ ID NO: 3262488 - RNA, 16 nt, Vaccinia virus
uaagagccagauuucg

SEQ ID NO: 3262489 - RNA, 11 nt, Vaccinia virus
cauuauuggaa

SEQ ID NO: 3262490 - RNA, 13 nt, Vaccinia virus
aguuuuauuggga

SEQ ID NO: 3262491 - RNA, 17 nt, Vaccinia virus
agaacacacuuuucuca

SEQ ID NO: 3262492 - RNA, 13 nt, Vaccinia virus
aaccaaauacaua

SEQ ID NO: 3262493 - RNA, 16 nt, Vaccinia virus
caauuccuuuuugccu

SEQ ID NO: 3262494 - RNA, 22 nt, Vaccinia virus
cucuaagaacuuauuaaugaau

SEQ ID NO: 3262495 - RNA, 17 nt, Vaccinia virus
ugauucauucacuauca

SEQ ID NO: 3262496 - RNA, 14 nt, Vaccinia virus
uagauggucucauu

SEQ ID NO: 3262497 - RNA, 18 nt, Vaccinia virus
agaacggagaauaucuau

SEQ ID NO: 3262498 - RNA, 20 nt, Vaccinia virus
gcgugaacaacuuacagaug

SEQ ID NO: 3262499 - RNA, 21 nt, Vaccinia virus
auugaaacugaggcuguugaa

SEQ ID NO: 3262500 - RNA, 13 nt, Vaccinia virus
uucuuguguaauu

SEQ ID NO: 3262501 - RNA, 15 nt, Vaccinia virus
auucuuuuauuaaug

SEQ ID NO: 3262502 - RNA, 14 nt, Vaccinia virus
aauguaguaaauau

SEQ ID NO: 3262503 - RNA, 13 nt, Vaccinia virus
uaguggacaacau

SEQ ID NO: 3262504 - RNA, 14 nt, Vaccinia virus
acuauaucaguuuu

SEQ ID NO: 3262505 - RNA, 13 nt, Vaccinia virus
cggaacaauaaac

SEQ ID NO: 3262506 - RNA, 16 nt, Vaccinia virus
uacaaccaaauucuug

SEQ ID NO: 3262507 - RNA, 19 nt, Vaccinia virus
aucauugauugagaagaag

SEQ ID NO: 3262508 - RNA, 21 nt, Vaccinia virus
cauaaaaauaaaaauauaauu

SEQ ID NO: 3262509 - RNA, 17 nt, Vaccinia virus
guaugaauaaucuucau

SEQ ID NO: 3262510 - RNA, 13 nt, Vaccinia virus
uagauauagagau

SEQ ID NO: 3262511 - RNA, 22 nt, Vaccinia virus
gguggcugauuaggcuguaguc

SEQ ID NO: 3262512 - RNA, 15 nt, Vaccinia virus
uagaucacaaaucac

SEQ ID NO: 3262513 - RNA, 19 nt, Vaccinia virus
aucacaagaaguuagaaag

SEQ ID NO: 3262514 - RNA, 22 nt, Vaccinia virus
augaucauuuugauauugugaa

SEQ ID NO: 3262515 - RNA, 13 nt, Vaccinia virus
cucaaacauccuc

SEQ ID NO: 3262516 - RNA, 22 nt, Vaccinia virus
gguuucgaagaucuucuuauuu

SEQ ID NO: 3262517 - RNA, 19 nt, Vaccinia virus
aauuacuaaaauauacaaa

SEQ ID NO: 3262518 - RNA, 22 nt, Vaccinia virus
guguauauuuuuucauuuuuua

SEQ ID NO: 3262519 - RNA, 23 nt, Vaccinia virus
acgcacuagagaguuuaucagaa

SEQ ID NO: 3262520 - RNA, 16 nt, Vaccinia virus
aguuuaucauacuuag

SEQ ID NO: 3262521 - RNA, 16 nt, Vaccinia virus
aauuacacauuuccaa

SEQ ID NO: 3262522 - RNA, 22 nt, Vaccinia virus
gauugacgcauuuaauagagau

SEQ ID NO: 3262523 - RNA, 12 nt, Vaccinia virus
uuugauucuauu

SEQ ID NO: 3262524 - RNA, 13 nt, Vaccinia virus
uuauuacauguuu

SEQ ID NO: 3262525 - RNA, 12 nt, Vaccinia virus
uaucuauacaua

SEQ ID NO: 3262526 - RNA, 21 nt, Vaccinia virus
acaagauuuuuagcguauuau

SEQ ID NO: 3262527 - RNA, 14 nt, Vaccinia virus
gaacagaugauaua

SEQ ID NO: 3262528 - RNA, 17 nt, Vaccinia virus
uaaucaauacaaaacau

SEQ ID NO: 3262529 - RNA, 20 nt, Vaccinia virus
acuucuuccaguucuggaua

SEQ ID NO: 3262530 - RNA, 21 nt, Vaccinia virus
acaaaaagauuucagaaucua

SEQ ID NO: 3262531 - RNA, 22 nt, Vaccinia virus
uaauaaccuacgcguauuauca

SEQ ID NO: 3262532 - RNA, 17 nt, Vaccinia virus
auucaagauuuuauuau

SEQ ID NO: 3262533 - RNA, 16 nt, Vaccinia virus
aacaggaugaauccau

SEQ ID NO: 3262534 - RNA, 12 nt, Vaccinia virus
uccagaauguac

SEQ ID NO: 3262535 - RNA, 17 nt, Vaccinia virus
uauacugagaaguuauu

SEQ ID NO: 3262536 - RNA, 16 nt, Vaccinia virus
cauaaauuauuucauu

SEQ ID NO: 3262537 - RNA, 23 nt, Vaccinia virus
aaccaauuacugauaauguagaa

SEQ ID NO: 3262538 - RNA, 16 nt, Vaccinia virus
aaccaugagugugaaa

SEQ ID NO: 3262539 - RNA, 20 nt, Vaccinia virus
aguuguggaagacuguacaa

SEQ ID NO: 3262540 - RNA, 17 nt, Vaccinia virus
uagauccuaauucacaa

SEQ ID NO: 3262541 - RNA, 22 nt, Vaccinia virus
uuaugauuagucacgacugaaa

SEQ ID NO: 3262542 - RNA, 16 nt, Vaccinia virus
uaacauugacugaaua

SEQ ID NO: 3262543 - RNA, 19 nt, Vaccinia virus
aaacguggauaaaaugcau

SEQ ID NO: 3262544 - RNA, 18 nt, Vaccinia virus
acguaaauacaaaacaga

SEQ ID NO: 3262545 - RNA, 18 nt, Vaccinia virus
aggaccguauuagaaugu

SEQ ID NO: 3262546 - RNA, 17 nt, Vaccinia virus
aacgacuuauaauuaau

SEQ ID NO: 3262547 - RNA, 15 nt, Vaccinia virus
agaugcucaauggau

SEQ ID NO: 3262548 - RNA, 14 nt, Vaccinia virus
ugauugaaaaugaa

SEQ ID NO: 3262549 - RNA, 21 nt, Vaccinia virus
gucaucgaaaugguagauaua

SEQ ID NO: 3262550 - RNA, 20 nt, Vaccinia virus
uagauaucaaauccaaugga

SEQ ID NO: 3262551 - RNA, 22 nt, Vaccinia virus
uucaugguaaggucuuagauau

SEQ ID NO: 3262552 - RNA, 22 nt, Vaccinia virus
uucgaugccggacaauagcaca

SEQ ID NO: 3262553 - RNA, 21 nt, Vaccinia virus
ugacgacaauaacaaaaucac

SEQ ID NO: 3262554 - RNA, 15 nt, Vaccinia virus
uaauaauucauggaa

SEQ ID NO: 3262555 - RNA, 22 nt, Vaccinia virus
agaucaauggugugauguugau

SEQ ID NO: 3262556 - RNA, 15 nt, Vaccinia virus
gauggauauauuaaa

SEQ ID NO: 3262557 - RNA, 16 nt, Vaccinia virus
uagauuauaauccuua

SEQ ID NO: 3262558 - RNA, 22 nt, Vaccinia virus
agagguucccaauuccaaagau

SEQ ID NO: 3262559 - RNA, 12 nt, Vaccinia virus
aauuuauuucua

SEQ ID NO: 3262560 - RNA, 20 nt, Vaccinia virus
cucaagauuuuaaaaaacug

SEQ ID NO: 3262561 - RNA, 18 nt, Vaccinia virus
cuaaugugauucucugaa

SEQ ID NO: 3262562 - RNA, 20 nt, Vaccinia virus
gauaaugauauauuaaacaa

SEQ ID NO: 3262563 - RNA, 16 nt, Vaccinia virus
gguuuuauuuuauccu

SEQ ID NO: 3262564 - RNA, 21 nt, Vaccinia virus
guauugacaauacuguauuau

SEQ ID NO: 3262565 - RNA, 15 nt, Vaccinia virus
gauucaacauuuaua

SEQ ID NO: 3262566 - RNA, 23 nt, Vaccinia virus
uauggacgacgguaagaaugaag

SEQ ID NO: 3262567 - RNA, 16 nt, Vaccinia virus
acgacuuauaauuaau

SEQ ID NO: 3262568 - RNA, 22 nt, Vaccinia virus
aaaacuauuacuaggagaauua

SEQ ID NO: 3262569 - RNA, 14 nt, Vaccinia virus
caauuuuaaaugau

SEQ ID NO: 3262570 - RNA, 18 nt, Vaccinia virus
aagucauagaaaaauaua

SEQ ID NO: 3262571 - RNA, 22 nt, Vaccinia virus
uaccacgcaauuauauaaugua

SEQ ID NO: 3262572 - RNA, 19 nt, Vaccinia virus
auuggcacgaacaaaagga

SEQ ID NO: 3262573 - RNA, 16 nt, Vaccinia virus
acaauaaugagaaugu

SEQ ID NO: 3262574 - RNA, 22 nt, Vaccinia virus
uuaucguuuaagaauaauacag

SEQ ID NO: 3262575 - RNA, 16 nt, Vaccinia virus
cugcuaauaaauaaug

SEQ ID NO: 3262576 - RNA, 18 nt, Vaccinia virus
aaucaugaauuuacagaa

SEQ ID NO: 3262577 - RNA, 18 nt, Vaccinia virus
uaacgaauuauauagucu

SEQ ID NO: 3262578 - RNA, 21 nt, Vaccinia virus
aauugaucaagaguaacuauu

SEQ ID NO: 3262579 - RNA, 18 nt, Vaccinia virus
uaguaguacacagcaugu

SEQ ID NO: 3262580 - RNA, 14 nt, Vaccinia virus
uuuuaguuuaucaa

SEQ ID NO: 3262581 - RNA, 19 nt, Vaccinia virus
uaauuacaaguauuauuga

SEQ ID NO: 3262582 - RNA, 19 nt, Vaccinia virus
auauaucacccauccauuu

SEQ ID NO: 3262583 - RNA, 19 nt, Vaccinia virus
acccgcauacuuuaacaaa

SEQ ID NO: 3262584 - RNA, 16 nt, Vaccinia virus
ucuagcuuucacuuaa

SEQ ID NO: 3262585 - RNA, 21 nt, Vaccinia virus
accaucucauaaaauaguucu

SEQ ID NO: 3262586 - RNA, 16 nt, Vaccinia virus
gucuguuuuauacauu

SEQ ID NO: 3262587 - RNA, 19 nt, Vaccinia virus
gcauucuaccguuguuaaa

SEQ ID NO: 3262588 - RNA, 15 nt, Vaccinia virus
auauguuauaauaga

SEQ ID NO: 3262589 - RNA, 22 nt, Vaccinia virus
gugaaaauuacauacuuaaaaa

SEQ ID NO: 3262590 - RNA, 12 nt, Vaccinia virus
uaagaauuauuu

SEQ ID NO: 3262591 - RNA, 12 nt, Vaccinia virus
uaauggaguaau

SEQ ID NO: 3262592 - RNA, 19 nt, Vaccinia virus
aacuauuuugucucuguuu

SEQ ID NO: 3262593 - RNA, 22 nt, Vaccinia virus
auaucuuaaauaacucauuuau

SEQ ID NO: 3262594 - RNA, 14 nt, Vaccinia virus
uauccucaaacauc

SEQ ID NO: 3262595 - RNA, 18 nt, Vaccinia virus
cgagucaaagcauaauac

SEQ ID NO: 3262596 - RNA, 20 nt, Vaccinia virus
uucuuacauaaaugaaaaga

SEQ ID NO: 3262597 - RNA, 16 nt, Vaccinia virus
uguacuaucuagagau

SEQ ID NO: 3262598 - RNA, 14 nt, Vaccinia virus
gaauauuaaacaau

SEQ ID NO: 3262599 - RNA, 13 nt, Vaccinia virus
ugaaccaaacauu

SEQ ID NO: 3262600 - RNA, 19 nt, Vaccinia virus
agcauauuccauuaaugac

SEQ ID NO: 3262601 - RNA, 13 nt, Vaccinia virus
cuuaucgacaucu

SEQ ID NO: 3262602 - RNA, 23 nt, Vaccinia virus
aaagucguuuauaucacauugua

SEQ ID NO: 3262603 - RNA, 18 nt, Vaccinia virus
acaacaggaugaauccau

SEQ ID NO: 3262604 - RNA, 16 nt, Vaccinia virus
uaaagacuuaagacuu

SEQ ID NO: 3262605 - RNA, 20 nt, Vaccinia virus
cguucgcgacaguauguggu

SEQ ID NO: 3262606 - RNA, 15 nt, Vaccinia virus
agaucauuaaauguu

SEQ ID NO: 3262607 - RNA, 15 nt, Vaccinia virus
aaaauaguucuguaa

SEQ ID NO: 3262608 - RNA, 23 nt, Vaccinia virus
auguuuauuuuuuucauauuaaa

SEQ ID NO: 3262609 - RNA, 16 nt, Vaccinia virus
aagacaaucauuuacu

SEQ ID NO: 3262610 - RNA, 16 nt, Vaccinia virus
gaauuuauuucuaauu

SEQ ID NO: 3262611 - RNA, 22 nt, Vaccinia virus
auaccguucgaugauauaguac

SEQ ID NO: 3262612 - RNA, 17 nt, Vaccinia virus
cauguuuauaaaaaugu

SEQ ID NO: 3262613 - RNA, 16 nt, Vaccinia virus
ucaagacccauccagu

SEQ ID NO: 3262614 - RNA, 16 nt, Vaccinia virus
gguucgauauaaagga

SEQ ID NO: 3262615 - RNA, 17 nt, Vaccinia virus
uucaucagaaaugacuc

SEQ ID NO: 3262616 - RNA, 20 nt, Vaccinia virus
cuuaauacaccguuaacaau

SEQ ID NO: 3262617 - RNA, 22 nt, Vaccinia virus
uuuuguaauaagaauaaaaugc

SEQ ID NO: 3262618 - RNA, 19 nt, Vaccinia virus
cauuuauaacggucaauau

SEQ ID NO: 3262619 - RNA, 16 nt, Vaccinia virus
uaaacgaaaacuauau

SEQ ID NO: 3262620 - RNA, 23 nt, Vaccinia virus
cugaagcguguuauauauacaag

SEQ ID NO: 3262621 - RNA, 22 nt, Vaccinia virus
auuuacagauuuaguuguuuaa

SEQ ID NO: 3262622 - RNA, 20 nt, Vaccinia virus
ugaagauauuauuaaaucau

SEQ ID NO: 3262623 - RNA, 15 nt, Vaccinia virus
uaaaaugguaaacuu

SEQ ID NO: 3262624 - RNA, 19 nt, Vaccinia virus
agaaucauaaagaacagua

SEQ ID NO: 3262625 - RNA, 16 nt, Vaccinia virus
guagaacaauguguga

SEQ ID NO: 3262626 - RNA, 23 nt, Vaccinia virus
aguacguacuaugccaaaugaau

SEQ ID NO: 3262627 - RNA, 14 nt, Vaccinia virus
cuugagaauaucca

SEQ ID NO: 3262628 - RNA, 23 nt, Vaccinia virus
uaaguaguuaugagggaaaagau

SEQ ID NO: 3262629 - RNA, 17 nt, Vaccinia virus
aaaauuccgcuacuaau

SEQ ID NO: 3262630 - RNA, 17 nt, Vaccinia virus
ggaaugacauacauacu

SEQ ID NO: 3262631 - RNA, 17 nt, Vaccinia virus
uaccaucaacuacugua

SEQ ID NO: 3262632 - RNA, 20 nt, Vaccinia virus
auaguuaucuaucuuaaaaa

SEQ ID NO: 3262633 - RNA, 21 nt, Vaccinia virus
uuuuuauaaaaugacaucguu

SEQ ID NO: 3262634 - RNA, 15 nt, Vaccinia virus
agauauccagaguuu

SEQ ID NO: 3262635 - RNA, 15 nt, Vaccinia virus
auauagcuuauucca

SEQ ID NO: 3262636 - RNA, 19 nt, Vaccinia virus
gacuguagaacucaugaau

SEQ ID NO: 3262637 - RNA, 14 nt, Vaccinia virus
acuuguuagauaga

SEQ ID NO: 3262638 - RNA, 16 nt, Vaccinia virus
gagagaauguauucau

SEQ ID NO: 3262639 - RNA, 22 nt, Vaccinia virus
uauaaccuaaaacccauguaua

SEQ ID NO: 3262640 - RNA, 12 nt, Vaccinia virus
aacaagcaauug

SEQ ID NO: 3262641 - RNA, 19 nt, Vaccinia virus
gaaaauacaaguauagaua

SEQ ID NO: 3262642 - RNA, 18 nt, Vaccinia virus
agaauccacaacagacga

SEQ ID NO: 3262643 - RNA, 16 nt, Vaccinia virus
gaaaauacguucuauu

SEQ ID NO: 3262644 - RNA, 14 nt, Vaccinia virus
augccaaaaucaua

SEQ ID NO: 3262645 - RNA, 16 nt, Vaccinia virus
uauuagagguaaugau

SEQ ID NO: 3262646 - RNA, 14 nt, Vaccinia virus
agcggcaucuaaau

SEQ ID NO: 3262647 - RNA, 15 nt, Vaccinia virus
ucuucgaaaagaaac

SEQ ID NO: 3262648 - RNA, 15 nt, Vaccinia virus
uaggauaauacaucc

SEQ ID NO: 3262649 - RNA, 21 nt, Vaccinia virus
aaaaccaguauuuguagcaag

SEQ ID NO: 3262650 - RNA, 18 nt, Vaccinia virus
aauaugaguaaugaaauc

SEQ ID NO: 3262651 - RNA, 15 nt, Vaccinia virus
caaauggucaaugau

SEQ ID NO: 3262652 - RNA, 19 nt, Vaccinia virus
uaaggacauuggauaugug

SEQ ID NO: 3262653 - RNA, 16 nt, Vaccinia virus
acaauccaaaaaauga

SEQ ID NO: 3262654 - RNA, 15 nt, Vaccinia virus
aucuuuaguaaacau

SEQ ID NO: 3262655 - RNA, 17 nt, Vaccinia virus
gaauaacgaacauaacu

SEQ ID NO: 3262656 - RNA, 15 nt, Vaccinia virus
gacucugguauuuau

SEQ ID NO: 3262657 - RNA, 13 nt, Vaccinia virus
guccaaaaugaug

SEQ ID NO: 3262658 - RNA, 15 nt, Vaccinia virus
ugauuucaauuuauu

SEQ ID NO: 3262659 - RNA, 22 nt, Vaccinia virus
uaaguguagcaaauaaaaucua

SEQ ID NO: 3262660 - RNA, 16 nt, Vaccinia virus
accauuagauaaucua

SEQ ID NO: 3262661 - RNA, 17 nt, Vaccinia virus
acaaguuuucauauuau

SEQ ID NO: 3262662 - RNA, 18 nt, Vaccinia virus
auacucaugccuaguaau

SEQ ID NO: 3262663 - RNA, 21 nt, Vaccinia virus
aagucucguucguaaauaaua

SEQ ID NO: 3262664 - RNA, 19 nt, Vaccinia virus
uacauguuucccaauuugu

SEQ ID NO: 3262665 - RNA, 19 nt, Vaccinia virus
uccauuauuuauuuacaga

SEQ ID NO: 3262666 - RNA, 14 nt, Vaccinia virus
gaauacucccaaac

SEQ ID NO: 3262667 - RNA, 15 nt, Vaccinia virus
aguaucaaaucuucu

SEQ ID NO: 3262668 - RNA, 19 nt, Vaccinia virus
cgcggaaaaaacauaauag

SEQ ID NO: 3262669 - RNA, 23 nt, Vaccinia virus
uauauugcauggaaucauagaug

SEQ ID NO: 3262670 - RNA, 15 nt, Vaccinia virus
agauaaccaaaaagu

SEQ ID NO: 3262671 - RNA, 20 nt, Vaccinia virus
uguaucauuuagcgauucaa

SEQ ID NO: 3262672 - RNA, 18 nt, Vaccinia virus
gauaguaauuucacgaau

SEQ ID NO: 3262673 - RNA, 20 nt, Vaccinia virus
aaauauagguuacuagauua

SEQ ID NO: 3262674 - RNA, 21 nt, Vaccinia virus
acaaaaaaugaauuaauaaua

SEQ ID NO: 3262675 - RNA, 16 nt, Vaccinia virus
uggaaaggaaauuaug

SEQ ID NO: 3262676 - RNA, 22 nt, Vaccinia virus
auaccauauccuccuguagaua

SEQ ID NO: 3262677 - RNA, 14 nt, Vaccinia virus
auuauauguagaag

SEQ ID NO: 3262678 - RNA, 20 nt, Vaccinia virus
uauaaacguauacuguagau

SEQ ID NO: 3262679 - RNA, 22 nt, Vaccinia virus
caacaauuuuguauuauucuga

SEQ ID NO: 3262680 - RNA, 23 nt, Vaccinia virus
acuuuuaacuaucgcaucaaaag

SEQ ID NO: 3262681 - RNA, 18 nt, Vaccinia virus
gaauuuguuguuucuauu

SEQ ID NO: 3262682 - RNA, 14 nt, Vaccinia virus
auaaucauguugau

SEQ ID NO: 3262683 - RNA, 18 nt, Vaccinia virus
acuccagaacaucuucca

SEQ ID NO: 3262684 - RNA, 19 nt, Vaccinia virus
aauaauaauuuaacaaucu

SEQ ID NO: 3262685 - RNA, 14 nt, Vaccinia virus
ucuagauauuagua

SEQ ID NO: 3262686 - RNA, 10 nt, Vaccinia virus
uaucucuuuc

SEQ ID NO: 3262687 - RNA, 22 nt, Vaccinia virus
accucuuauuggucagaaauau

SEQ ID NO: 3262688 - RNA, 15 nt, Vaccinia virus
auuugcacacauaau

SEQ ID NO: 3262689 - RNA, 22 nt, Vaccinia virus
uaccaacaugucugauauuuug

SEQ ID NO: 3262690 - RNA, 22 nt, Vaccinia virus
agaaauggauuaucggaaauac

SEQ ID NO: 3262691 - RNA, 13 nt, Vaccinia virus
auuucgacaaaaa

SEQ ID NO: 3262692 - RNA, 13 nt, Vaccinia virus
cuauauuguauuc

SEQ ID NO: 3262693 - RNA, 14 nt, Vaccinia virus
gaguugacauaucg

SEQ ID NO: 3262694 - RNA, 13 nt, Vaccinia virus
cucuauuguuuga

SEQ ID NO: 3262695 - RNA, 17 nt, Vaccinia virus
aaugaaauucuuguuua

SEQ ID NO: 3262696 - RNA, 20 nt, Vaccinia virus
aaguuucauagauagauaau

SEQ ID NO: 3262697 - RNA, 20 nt, Vaccinia virus
acucugggucauauuauaga

SEQ ID NO: 3262698 - RNA, 15 nt, Vaccinia virus
uuaguaggcaucuuu

SEQ ID NO: 3262699 - RNA, 16 nt, Vaccinia virus
auuuuagucauugcaa

SEQ ID NO: 3262700 - RNA, 17 nt, Vaccinia virus
gagauacuaacacauuu

SEQ ID NO: 3262701 - RNA, 13 nt, Vaccinia virus
auucaucaauaau

SEQ ID NO: 3262702 - RNA, 16 nt, Vaccinia virus
uaaaacgauuaaacaa

SEQ ID NO: 3262703 - RNA, 21 nt, Vaccinia virus
aguuucucaugucucuauaua

SEQ ID NO: 3262704 - RNA, 23 nt, Vaccinia virus
uuuggucccgauaccauuaaaga

SEQ ID NO: 3262705 - RNA, 21 nt, Vaccinia virus
uacuugacaaaaauugucacu

SEQ ID NO: 3262706 - RNA, 14 nt, Vaccinia virus
auccaagucaauau

SEQ ID NO: 3262707 - RNA, 18 nt, Vaccinia virus
auauuccaguucauauuu

SEQ ID NO: 3262708 - RNA, 15 nt, Vaccinia virus
acaauagauagucua

SEQ ID NO: 3262709 - RNA, 15 nt, Vaccinia virus
ucauucaagauaagc

SEQ ID NO: 3262710 - RNA, 21 nt, Vaccinia virus
acgagaauggcguuugauaua

SEQ ID NO: 3262711 - RNA, 16 nt, Vaccinia virus
uaaaaauguuaauuua

SEQ ID NO: 3262712 - RNA, 23 nt, Vaccinia virus
gauaaggaguagcagauuuccua

SEQ ID NO: 3262713 - RNA, 15 nt, Vaccinia virus
gaagauuauauucua

SEQ ID NO: 3262714 - RNA, 23 nt, Vaccinia virus
acaucgguacggguauucauuua

SEQ ID NO: 3262715 - RNA, 13 nt, Vaccinia virus
aguauguaacaga

SEQ ID NO: 3262716 - RNA, 14 nt, Vaccinia virus
ucaucaauguagug

SEQ ID NO: 3262717 - RNA, 20 nt, Vaccinia virus
caugcaaagcucuaaaucca

SEQ ID NO: 3262718 - RNA, 13 nt, Vaccinia virus
ugacguaaaugua

SEQ ID NO: 3262719 - RNA, 18 nt, Vaccinia virus
uacuaauaggucuaaaaa

SEQ ID NO: 3262720 - RNA, 20 nt, Vaccinia virus
uuucguuaaaacauucaaau

SEQ ID NO: 3262721 - RNA, 17 nt, Vaccinia virus
ugacagaccagaccuag

SEQ ID NO: 3262722 - RNA, 17 nt, Vaccinia virus
uguucgauauucucauu

SEQ ID NO: 3262723 - RNA, 14 nt, Vaccinia virus
uaucauuaaaucua

SEQ ID NO: 3262724 - RNA, 19 nt, Vaccinia virus
uuuuaacaccuccacaguu

SEQ ID NO: 3262725 - RNA, 15 nt, Vaccinia virus
aaguucaccaaacaa

SEQ ID NO: 3262726 - RNA, 22 nt, Vaccinia virus
uauacauguuagagaauauuca

SEQ ID NO: 3262727 - RNA, 19 nt, Vaccinia virus
uuagauaugugauuuacag

SEQ ID NO: 3262728 - RNA, 22 nt, Vaccinia virus
cuauuuguaauauuuagacaua

SEQ ID NO: 3262729 - RNA, 17 nt, Vaccinia virus
aaaagauucgguuuuau

SEQ ID NO: 3262730 - RNA, 14 nt, Vaccinia virus
aaucuuuaauguaa

SEQ ID NO: 3262731 - RNA, 15 nt, Vaccinia virus
auuaaucaagucaau

SEQ ID NO: 3262732 - RNA, 21 nt, Vaccinia virus
uuuaauuacagaguuuucaga

SEQ ID NO: 3262733 - RNA, 13 nt, Vaccinia virus
aggaacaaauauu

SEQ ID NO: 3262734 - RNA, 13 nt, Vaccinia virus
agagaaauauauu

SEQ ID NO: 3262735 - RNA, 16 nt, Vaccinia virus
gaauuuuaguuauuac

SEQ ID NO: 3262736 - RNA, 16 nt, Vaccinia virus
agugauaugaacauau

SEQ ID NO: 3262737 - RNA, 13 nt, Vaccinia virus
aaauuacuuaaag

SEQ ID NO: 3262738 - RNA, 20 nt, Vaccinia virus
auguaugcaauucacuguau

SEQ ID NO: 3262739 - RNA, 19 nt, Vaccinia virus
ucaaagggaccuaaaucua

SEQ ID NO: 3262740 - RNA, 23 nt, Vaccinia virus
aacgauugguauucguacaggua

SEQ ID NO: 3262741 - RNA, 19 nt, Vaccinia virus
gacgaucuuguuauaauua

SEQ ID NO: 3262742 - RNA, 15 nt, Vaccinia virus
ucucuaauuaugaaa

SEQ ID NO: 3262743 - RNA, 11 nt, Vaccinia virus
caaacauuuaa

SEQ ID NO: 3262744 - RNA, 16 nt, Vaccinia virus
uagauuuccaaagaua

SEQ ID NO: 3262745 - RNA, 19 nt, Vaccinia virus
guacaaaaaauaucauguu

SEQ ID NO: 3262746 - RNA, 15 nt, Vaccinia virus
aaugcuaauauuaaa

SEQ ID NO: 3262747 - RNA, 13 nt, Vaccinia virus
aauuauuagaaua

SEQ ID NO: 3262748 - RNA, 14 nt, Vaccinia virus
aauacguuagagaa

SEQ ID NO: 3262749 - RNA, 16 nt, Vaccinia virus
aauaucagaaaggaua

SEQ ID NO: 3262750 - RNA, 17 nt, Vaccinia virus
aaagaacggagaauugu

SEQ ID NO: 3262751 - RNA, 22 nt, Vaccinia virus
ugaucucgccguagcuaccaug

SEQ ID NO: 3262752 - RNA, 14 nt, Vaccinia virus
cacaacaauaacag

SEQ ID NO: 3262753 - RNA, 16 nt, Vaccinia virus
auuuguacacaucuau

SEQ ID NO: 3262754 - RNA, 16 nt, Vaccinia virus
acuuaagacuuaaaac

SEQ ID NO: 3262755 - RNA, 14 nt, Vaccinia virus
auaaaauaucuuaa

SEQ ID NO: 3262756 - RNA, 17 nt, Vaccinia virus
uauaaacucucaacauu

SEQ ID NO: 3262757 - RNA, 15 nt, Vaccinia virus
auauauuagaaauac

SEQ ID NO: 3262758 - RNA, 14 nt, Vaccinia virus
acuuauuaaugaau

SEQ ID NO: 3262759 - RNA, 21 nt, Vaccinia virus
auguauuaacuuuguucauuu

SEQ ID NO: 3262760 - RNA, 19 nt, Vaccinia virus
gauuugucacaauaugaau

SEQ ID NO: 3262761 - RNA, 20 nt, Vaccinia virus
aucaaacuguauagguaugu

SEQ ID NO: 3262762 - RNA, 21 nt, Vaccinia virus
uuaaccuuauuuuuauguucg

SEQ ID NO: 3262763 - RNA, 14 nt, Vaccinia virus
aaaauuuagaauga

SEQ ID NO: 3262764 - RNA, 21 nt, Vaccinia virus
auaauucuauucuaguauuac

SEQ ID NO: 3262765 - RNA, 23 nt, Vaccinia virus
uagaucuuuacacaaauaauuac

SEQ ID NO: 3262766 - RNA, 20 nt, Vaccinia virus
aucaaacgcugaaguaauua

SEQ ID NO: 3262767 - RNA, 16 nt, Vaccinia virus
agucugucuguagaua

SEQ ID NO: 3262768 - RNA, 23 nt, Vaccinia virus
cauuaauaggaaaagguggauuu

SEQ ID NO: 3262769 - RNA, 18 nt, Vaccinia virus
gcguacacaaucaaucau

SEQ ID NO: 3262770 - RNA, 14 nt, Vaccinia virus
ucuuuuuuuccaaa

SEQ ID NO: 3262771 - RNA, 18 nt, Vaccinia virus
uaggagacgcccaaaaua

SEQ ID NO: 3262772 - RNA, 20 nt, Vaccinia virus
ucaacaaguaggauuuuucc

SEQ ID NO: 3262773 - RNA, 19 nt, Vaccinia virus
uucuggaacauuaaaugua

SEQ ID NO: 3262774 - RNA, 19 nt, Vaccinia virus
agauuucagaaucuagauu

SEQ ID NO: 3262775 - RNA, 19 nt, Vaccinia virus
aucaaggacaguuaaaacu

SEQ ID NO: 3262776 - RNA, 21 nt, Vaccinia virus
aaccguuauuuauagcagaua

SEQ ID NO: 3262777 - RNA, 16 nt, Vaccinia virus
gauagcaaagagauga

SEQ ID NO: 3262778 - RNA, 19 nt, Vaccinia virus
aguaacuauugacuuaaua

SEQ ID NO: 3262779 - RNA, 17 nt, Vaccinia virus
ccugccauuuuagagau

SEQ ID NO: 3262780 - RNA, 18 nt, Vaccinia virus
auuaaaugaugaaacuaa

SEQ ID NO: 3262781 - RNA, 20 nt, Vaccinia virus
cauauaauagacauaaugac

SEQ ID NO: 3262782 - RNA, 17 nt, Vaccinia virus
uuccaugcuacuaguau

SEQ ID NO: 3262783 - RNA, 17 nt, Vaccinia virus
aagauuguacagaaauc

SEQ ID NO: 3262784 - RNA, 14 nt, Vaccinia virus
agaauauacuacaa

SEQ ID NO: 3262785 - RNA, 23 nt, Vaccinia virus
aucaaugauagacuagaagaaag

SEQ ID NO: 3262786 - RNA, 19 nt, Vaccinia virus
uacuuuuucaucuuuacau

SEQ ID NO: 3262787 - RNA, 13 nt, Vaccinia virus
cauucacaaaaag

SEQ ID NO: 3262788 - RNA, 15 nt, Vaccinia virus
gccauuaauuacuuu

SEQ ID NO: 3262789 - RNA, 19 nt, Vaccinia virus
auuuuacucauuuuuuaua

SEQ ID NO: 3262790 - RNA, 22 nt, Vaccinia virus
auucuaugaugaaacacaagau

SEQ ID NO: 3262791 - RNA, 16 nt, Vaccinia virus
uuaaugcuacagauau

SEQ ID NO: 3262792 - RNA, 15 nt, Vaccinia virus
uuuugcgcuauuaaa

SEQ ID NO: 3262793 - RNA, 19 nt, Vaccinia virus
gucuacaaccgcuacauaa

SEQ ID NO: 3262794 - RNA, 13 nt, Vaccinia virus
cuaaaaaugccac

SEQ ID NO: 3262795 - RNA, 13 nt, Vaccinia virus
gguuguaucucau

SEQ ID NO: 3262796 - RNA, 17 nt, Vaccinia virus
auaacuuuuucaauauc

SEQ ID NO: 3262797 - RNA, 22 nt, Vaccinia virus
accagucucgcguucaagauua

SEQ ID NO: 3262798 - RNA, 19 nt, Vaccinia virus
ugauauuucauauacuauu

SEQ ID NO: 3262799 - RNA, 13 nt, Vaccinia virus
auaaguaguaaua

SEQ ID NO: 3262800 - RNA, 20 nt, Vaccinia virus
auagaauaaauauccuugga

SEQ ID NO: 3262801 - RNA, 22 nt, Vaccinia virus
uaucucaucgcaguauauauca

SEQ ID NO: 3262802 - RNA, 17 nt, Vaccinia virus
aauaugauuuuuaaaaa

SEQ ID NO: 3262803 - RNA, 14 nt, Vaccinia virus
aagauuguuuaaga

SEQ ID NO: 3262804 - RNA, 21 nt, Vaccinia virus
gcguauaaugaaucuaaacuu

SEQ ID NO: 3262805 - RNA, 15 nt, Vaccinia virus
auuaucugaaauggu

SEQ ID NO: 3262806 - RNA, 20 nt, Vaccinia virus
cuaauuuuguagcauuagua

SEQ ID NO: 3262807 - RNA, 13 nt, Vaccinia virus
agauacguauuag

SEQ ID NO: 3262808 - RNA, 23 nt, Vaccinia virus
acuguagaugguucuuuaauagu

SEQ ID NO: 3262809 - RNA, 16 nt, Vaccinia virus
aucauaauaugagaug

SEQ ID NO: 3262810 - RNA, 12 nt, Vaccinia virus
guuaauuuuacu

SEQ ID NO: 3262811 - RNA, 16 nt, Vaccinia virus
ccaaacaauguuucua

SEQ ID NO: 3262812 - RNA, 13 nt, Vaccinia virus
uacuuuacauaua

SEQ ID NO: 3262813 - RNA, 16 nt, Vaccinia virus
uaagagaucaaagcau

SEQ ID NO: 3262814 - RNA, 18 nt, Vaccinia virus
gauauaaaaaucuguuuu

SEQ ID NO: 3262815 - RNA, 22 nt, Vaccinia virus
cuagauacccaaucucucucaa

SEQ ID NO: 3262816 - RNA, 12 nt, Vaccinia virus
aaacugaauaua

SEQ ID NO: 3262817 - RNA, 15 nt, Vaccinia virus
cagaggaguuauuua

SEQ ID NO: 3262818 - RNA, 23 nt, Vaccinia virus
auagguguaaaucuaggaauuac

SEQ ID NO: 3262819 - RNA, 18 nt, Vaccinia virus
uagucaaucuuauucaag

SEQ ID NO: 3262820 - RNA, 15 nt, Vaccinia virus
ucacuauagaaaaug

SEQ ID NO: 3262821 - RNA, 18 nt, Vaccinia virus
auuuagauacaucuauau

SEQ ID NO: 3262822 - RNA, 21 nt, Vaccinia virus
cagcauagacuuugccacaac

SEQ ID NO: 3262823 - RNA, 20 nt, Vaccinia virus
aaaggaagaauaucauauua

SEQ ID NO: 3262824 - RNA, 17 nt, Vaccinia virus
gcguguuuuauuaauca

SEQ ID NO: 3262825 - RNA, 22 nt, Vaccinia virus
caauaucuaugacucugauuuc

SEQ ID NO: 3262826 - RNA, 18 nt, Vaccinia virus
acaaacgcuacuauauau

SEQ ID NO: 3262827 - RNA, 15 nt, Vaccinia virus
uaagaggaugaucug

SEQ ID NO: 3262828 - RNA, 20 nt, Vaccinia virus
uucaguaaccaaauacauau

SEQ ID NO: 3262829 - RNA, 19 nt, Vaccinia virus
uaaucaugaaaucaaggau

SEQ ID NO: 3262830 - RNA, 20 nt, Vaccinia virus
aaccauauaaaaacaauagu

SEQ ID NO: 3262831 - RNA, 17 nt, Vaccinia virus
uaaaucaucgauuuuca

SEQ ID NO: 3262832 - RNA, 15 nt, Vaccinia virus
ucaaugugaauguau

SEQ ID NO: 3262833 - RNA, 19 nt, Vaccinia virus
aucauuacuaacuuuauca

SEQ ID NO: 3262834 - RNA, 16 nt, Vaccinia virus
augugcuaaaaucacu

SEQ ID NO: 3262835 - RNA, 22 nt, Vaccinia virus
cuuuacaguuucuguaaugaug

SEQ ID NO: 3262836 - RNA, 14 nt, Vaccinia virus
ucuacuauucuauu

SEQ ID NO: 3262837 - RNA, 23 nt, Vaccinia virus
aaucuaguuguggaaauacuucc

SEQ ID NO: 3262838 - RNA, 15 nt, Vaccinia virus
aaaagccccaauuua

SEQ ID NO: 3262839 - RNA, 22 nt, Vaccinia virus
auuuccacauuagaugguaaau

SEQ ID NO: 3262840 - RNA, 14 nt, Vaccinia virus
cuaacucuguuuua

SEQ ID NO: 3262841 - RNA, 17 nt, Vaccinia virus
acacucgacacaauauu

SEQ ID NO: 3262842 - RNA, 23 nt, Vaccinia virus
uaaauguauuuuuuaugauauac

SEQ ID NO: 3262843 - RNA, 19 nt, Vaccinia virus
cuacuacguucucuuugau

SEQ ID NO: 3262844 - RNA, 14 nt, Vaccinia virus
aucuaucuuaaaaa

SEQ ID NO: 3262845 - RNA, 17 nt, Vaccinia virus
auuaaguguuauaagau

SEQ ID NO: 3262846 - RNA, 22 nt, Vaccinia virus
aacaagcaucaugaauacagua

SEQ ID NO: 3262847 - RNA, 21 nt, Vaccinia virus
uauuuccuguuccguuaacau

SEQ ID NO: 3262848 - RNA, 13 nt, Vaccinia virus
uucugaugaaaca

SEQ ID NO: 3262849 - RNA, 16 nt, Vaccinia virus
ugaagccauugaaaac

SEQ ID NO: 3262850 - RNA, 16 nt, Vaccinia virus
cagugacggauauaca

SEQ ID NO: 3262851 - RNA, 20 nt, Vaccinia virus
auaauuuuaccagaauacua

SEQ ID NO: 3262852 - RNA, 17 nt, Vaccinia virus
uggaucaucgugugaua

SEQ ID NO: 3262853 - RNA, 12 nt, Vaccinia virus
aaauaauccaac

SEQ ID NO: 3262854 - RNA, 23 nt, Vaccinia virus
aaguuuauuaguguuuagauaau

SEQ ID NO: 3262855 - RNA, 15 nt, Vaccinia virus
agucgguauuucauc

SEQ ID NO: 3262856 - RNA, 16 nt, Vaccinia virus
agauaaaguuuauaca

SEQ ID NO: 3262857 - RNA, 15 nt, Vaccinia virus
ugaugcaaagauguu

SEQ ID NO: 3262858 - RNA, 15 nt, Vaccinia virus
gaauuccucugaaaa

SEQ ID NO: 3262859 - RNA, 17 nt, Vaccinia virus
guuauacagauguauua

SEQ ID NO: 3262860 - RNA, 17 nt, Vaccinia virus
aaaguauuuuaauacau

SEQ ID NO: 3262861 - RNA, 12 nt, Vaccinia virus
uuauaucuuuuu

SEQ ID NO: 3262862 - RNA, 21 nt, Vaccinia virus
auuacuauaaauggagaaugu

SEQ ID NO: 3262863 - RNA, 14 nt, Vaccinia virus
acggagauauuaaa

SEQ ID NO: 3262864 - RNA, 20 nt, Vaccinia virus
cauucuacguccuauggaug

SEQ ID NO: 3262865 - RNA, 23 nt, Vaccinia virus
auaugccgugggaugaugucaaa

SEQ ID NO: 3262866 - RNA, 19 nt, Vaccinia virus
ucugaaguaguuucuaaua

SEQ ID NO: 3262867 - RNA, 22 nt, Vaccinia virus
aauacauuuaaauucaucaucu

SEQ ID NO: 3262868 - RNA, 17 nt, Vaccinia virus
agguaucuugccaugga

SEQ ID NO: 3262869 - RNA, 12 nt, Vaccinia virus
ugucaacaaugu

SEQ ID NO: 3262870 - RNA, 13 nt, Vaccinia virus
aguacauuucaca

SEQ ID NO: 3262871 - RNA, 18 nt, Vaccinia virus
guauucggcauuucuaaa

SEQ ID NO: 3262872 - RNA, 22 nt, Vaccinia virus
uacuauauuaacaucuaaacau

SEQ ID NO: 3262873 - RNA, 14 nt, Vaccinia virus
caaaaguccaugau

SEQ ID NO: 3262874 - RNA, 16 nt, Vaccinia virus
ccauucuaauacuuua

SEQ ID NO: 3262875 - RNA, 15 nt, Vaccinia virus
augaguguagaugcu

SEQ ID NO: 3262876 - RNA, 13 nt, Vaccinia virus
uacugaauuauua

SEQ ID NO: 3262877 - RNA, 18 nt, Vaccinia virus
cuagugcucaaacaaaau

SEQ ID NO: 3262878 - RNA, 18 nt, Vaccinia virus
aaguauccauuuagcaaa

SEQ ID NO: 3262879 - RNA, 22 nt, Vaccinia virus
guuacguggaucgucacaauga

SEQ ID NO: 3262880 - RNA, 12 nt, Vaccinia virus
ccacaaaacaga

SEQ ID NO: 3262881 - RNA, 15 nt, Vaccinia virus
gacaccauagagaua

SEQ ID NO: 3262882 - RNA, 22 nt, Vaccinia virus
uaacauaaaaacuuauacaucc

SEQ ID NO: 3262883 - RNA, 19 nt, Vaccinia virus
uauagagcacuauuucuaa

SEQ ID NO: 3262884 - RNA, 12 nt, Vaccinia virus
auucuaaugaug

SEQ ID NO: 3262885 - RNA, 18 nt, Vaccinia virus
cggaauuauuggcuuuca

SEQ ID NO: 3262886 - RNA, 13 nt, Vaccinia virus
uucaggaacauaa

SEQ ID NO: 3262887 - RNA, 15 nt, Vaccinia virus
agcuucguauacucu

SEQ ID NO: 3262888 - RNA, 14 nt, Vaccinia virus
aacuuuuaaauaca

SEQ ID NO: 3262889 - RNA, 21 nt, Vaccinia virus
agauacguaguuauguagagg

SEQ ID NO: 3262890 - RNA, 21 nt, Vaccinia virus
auuauaguucuuaacaucuau

SEQ ID NO: 3262891 - RNA, 13 nt, Vaccinia virus
aaaaaagaacuaa

SEQ ID NO: 3262892 - RNA, 13 nt, Vaccinia virus
uuuaauauuucga

SEQ ID NO: 3262893 - RNA, 18 nt, Vaccinia virus
aauauuggaaaacuuuaa

SEQ ID NO: 3262894 - RNA, 21 nt, Vaccinia virus
gaacucaagucgaauauaaau

SEQ ID NO: 3262895 - RNA, 14 nt, Vaccinia virus
uuugacgacaacca

SEQ ID NO: 3262896 - RNA, 20 nt, Vaccinia virus
agcaucauacgaaaauagau

SEQ ID NO: 3262897 - RNA, 16 nt, Vaccinia virus
gcauuccaaucuuaaa

SEQ ID NO: 3262898 - RNA, 23 nt, Vaccinia virus
gacgauuucugaauuauuucaua

SEQ ID NO: 3262899 - RNA, 14 nt, Vaccinia virus
aucuaauuucugaa

SEQ ID NO: 3262900 - RNA, 14 nt, Vaccinia virus
ccaguuuaucccua

SEQ ID NO: 3262901 - RNA, 20 nt, Vaccinia virus
agauucuggaggagauggau

SEQ ID NO: 3262902 - RNA, 14 nt, Vaccinia virus
uuaagaucuaauau

SEQ ID NO: 3262903 - RNA, 19 nt, Vaccinia virus
caauaaaugcauuaguuua

SEQ ID NO: 3262904 - RNA, 17 nt, Vaccinia virus
gaucaacaaaagaauac

SEQ ID NO: 3262905 - RNA, 13 nt, Vaccinia virus
cuaaaaaauguag

SEQ ID NO: 3262906 - RNA, 14 nt, Vaccinia virus
uauucaaaauauga

SEQ ID NO: 3262907 - RNA, 23 nt, Vaccinia virus
aagaaauacuaaaaaauguagaa

SEQ ID NO: 3262908 - RNA, 23 nt, Vaccinia virus
uauuauuaggaucuacguucaua

SEQ ID NO: 3262909 - RNA, 15 nt, Vaccinia virus
acguucauagaauuu

SEQ ID NO: 3262910 - RNA, 18 nt, Vaccinia virus
aauaugcuaguuaauagu

SEQ ID NO: 3262911 - RNA, 13 nt, Vaccinia virus
gaugugguaauau

SEQ ID NO: 3262912 - RNA, 17 nt, Vaccinia virus
uugagauggauucacug

SEQ ID NO: 3262913 - RNA, 20 nt, Vaccinia virus
uucuuauugagagacgucau

SEQ ID NO: 3262914 - RNA, 17 nt, Vaccinia virus
auguauaccauugacuc

SEQ ID NO: 3262915 - RNA, 18 nt, Vaccinia virus
ugggaauauauuuggauu

SEQ ID NO: 3262916 - RNA, 14 nt, Vaccinia virus
gugacguacaaaaa

SEQ ID NO: 3262917 - RNA, 15 nt, Vaccinia virus
ugcuuauauuuucau

SEQ ID NO: 3262918 - RNA, 17 nt, Vaccinia virus
aaauccuccaucacuuc

SEQ ID NO: 3262919 - RNA, 14 nt, Vaccinia virus
uaacaauguuucca

SEQ ID NO: 3262920 - RNA, 11 nt, Vaccinia virus
agacacaucug

SEQ ID NO: 3262921 - RNA, 19 nt, Vaccinia virus
gcaaugagucgucaauccu

SEQ ID NO: 3262922 - RNA, 17 nt, Vaccinia virus
gaucguaaaucuguuuc

SEQ ID NO: 3262923 - RNA, 21 nt, Vaccinia virus
cgaaagaacugauugcagugu

SEQ ID NO: 3262924 - RNA, 14 nt, Vaccinia virus
ccaucguuaauuau

SEQ ID NO: 3262925 - RNA, 19 nt, Vaccinia virus
gaaaauuauaaugaauauu

SEQ ID NO: 3262926 - RNA, 12 nt, Vaccinia virus
aucuuugaaaau

SEQ ID NO: 3262927 - RNA, 18 nt, Vaccinia virus
uuauaaaguuuagucucu

SEQ ID NO: 3262928 - RNA, 20 nt, Vaccinia virus
uauggauuaccauggaugac

SEQ ID NO: 3262929 - RNA, 18 nt, Vaccinia virus
ugucuaugaauaugauuu

SEQ ID NO: 3262930 - RNA, 16 nt, Vaccinia virus
uaucugugaauacuuu

SEQ ID NO: 3262931 - RNA, 19 nt, Vaccinia virus
aggauuaacagguucucaa

SEQ ID NO: 3262932 - RNA, 14 nt, Vaccinia virus
auguaucaaagaua

SEQ ID NO: 3262933 - RNA, 18 nt, Vaccinia virus
ucucuaucuguuuccauu

SEQ ID NO: 3262934 - RNA, 16 nt, Vaccinia virus
uaauauauaaacucuu

SEQ ID NO: 3262935 - RNA, 21 nt, Vaccinia virus
aaauuggucuguguuacauau

SEQ ID NO: 3262936 - RNA, 14 nt, Vaccinia virus
cuuuagaguauuuc

SEQ ID NO: 3262937 - RNA, 18 nt, Vaccinia virus
aaacgauuauuucugaau

SEQ ID NO: 3262938 - RNA, 14 nt, Vaccinia virus
ucuuauagauguau

SEQ ID NO: 3262939 - RNA, 19 nt, Vaccinia virus
auacguuucuauuuucuau

SEQ ID NO: 3262940 - RNA, 15 nt, Vaccinia virus
acacgacaaugaaca

SEQ ID NO: 3262941 - RNA, 13 nt, Vaccinia virus
cucuauuaaauac

SEQ ID NO: 3262942 - RNA, 16 nt, Vaccinia virus
uaaacacauuauuaau

SEQ ID NO: 3262943 - RNA, 20 nt, Vaccinia virus
uauuaacuuuguucauuuau

SEQ ID NO: 3262944 - RNA, 16 nt, Vaccinia virus
auguuccaacucuguc

SEQ ID NO: 3262945 - RNA, 13 nt, Vaccinia virus
augcaaaauaaua

SEQ ID NO: 3262946 - RNA, 13 nt, Vaccinia virus
agaucccacauca

SEQ ID NO: 3262947 - RNA, 19 nt, Vaccinia virus
uugauacuuuuucuagaaa

SEQ ID NO: 3262948 - RNA, 16 nt, Vaccinia virus
aauguuaauuuugaaa

SEQ ID NO: 3262949 - RNA, 23 nt, Vaccinia virus
uuuuacacaaggcauuguuucua

SEQ ID NO: 3262950 - RNA, 17 nt, Vaccinia virus
aacaauugucuguaaac

SEQ ID NO: 3262951 - RNA, 17 nt, Vaccinia virus
uuuaacuagucuucucu

SEQ ID NO: 3262952 - RNA, 13 nt, Vaccinia virus
ucucauguucuua

SEQ ID NO: 3262953 - RNA, 20 nt, Vaccinia virus
aauaaauguccacuauacau

SEQ ID NO: 3262954 - RNA, 21 nt, Vaccinia virus
auuucuuuuugggaaaaauug

SEQ ID NO: 3262955 - RNA, 14 nt, Vaccinia virus
uauccaccuuauuu

SEQ ID NO: 3262956 - RNA, 19 nt, Vaccinia virus
uaucaauagcaguuuauua

SEQ ID NO: 3262957 - RNA, 20 nt, Vaccinia virus
acgaaauugcaaaauaugcu

SEQ ID NO: 3262958 - RNA, 23 nt, Vaccinia virus
guaaaccagcggcuacuaaaaga

SEQ ID NO: 3262959 - RNA, 17 nt, Vaccinia virus
acuauuacuaggagaau

SEQ ID NO: 3262960 - RNA, 22 nt, Vaccinia virus
auucagaauuucuacauaauua

SEQ ID NO: 3262961 - RNA, 13 nt, Vaccinia virus
guaaauaguuuua

SEQ ID NO: 3262962 - RNA, 15 nt, Vaccinia virus
cauaauauuaucaaa

SEQ ID NO: 3262963 - RNA, 14 nt, Vaccinia virus
guuuucaucuuuua

SEQ ID NO: 3262964 - RNA, 21 nt, Vaccinia virus
uaaaauugauucuaugaaaac

SEQ ID NO: 3262965 - RNA, 20 nt, Vaccinia virus
uauaauucuuuauaacugaa

SEQ ID NO: 3262966 - RNA, 11 nt, Vaccinia virus
aauaaaaauua

SEQ ID NO: 3262967 - RNA, 16 nt, Vaccinia virus
acuacuuuguuaauaa

SEQ ID NO: 3262968 - RNA, 19 nt, Vaccinia virus
aaauuugauuguauacuuu

SEQ ID NO: 3262969 - RNA, 16 nt, Vaccinia virus
auacuaaagaaacugu

SEQ ID NO: 3262970 - RNA, 18 nt, Vaccinia virus
cguauaucucauuaagcu

SEQ ID NO: 3262971 - RNA, 19 nt, Vaccinia virus
agaaagaaaauaucuauau

SEQ ID NO: 3262972 - RNA, 22 nt, Vaccinia virus
uagagauuuugaaaauuaugua

SEQ ID NO: 3262973 - RNA, 21 nt, Vaccinia virus
caaaauacucaggaagauauu

SEQ ID NO: 3262974 - RNA, 16 nt, Vaccinia virus
ugcaaauguaguauuu

SEQ ID NO: 3262975 - RNA, 19 nt, Vaccinia virus
aacugcuuuucuggauggc

SEQ ID NO: 3262976 - RNA, 15 nt, Vaccinia virus
uuaucccuauauuca

SEQ ID NO: 3262977 - RNA, 17 nt, Vaccinia virus
auaguuguuccuagaua

SEQ ID NO: 3262978 - RNA, 20 nt, Vaccinia virus
gaucuauguaguuuuaaaac

SEQ ID NO: 3262979 - RNA, 13 nt, Vaccinia virus
uauauguaacauu

SEQ ID NO: 3262980 - RNA, 14 nt, Vaccinia virus
gucuguaaaccaca

SEQ ID NO: 3262981 - RNA, 13 nt, Vaccinia virus
ugaauugcauaca

SEQ ID NO: 3262982 - RNA, 13 nt, Vaccinia virus
cguaguaacucua

SEQ ID NO: 3262983 - RNA, 14 nt, Vaccinia virus
gcaaaaauauucua

SEQ ID NO: 3262984 - RNA, 20 nt, Vaccinia virus
gauacaaucagauauaucua

SEQ ID NO: 3262985 - RNA, 23 nt, Vaccinia virus
uauaaucucauucgaacauacga

SEQ ID NO: 3262986 - RNA, 18 nt, Vaccinia virus
aaugauaaaaucaaacuu

SEQ ID NO: 3262987 - RNA, 20 nt, Vaccinia virus
guaacgcguggaaaaagcuc

SEQ ID NO: 3262988 - RNA, 15 nt, Vaccinia virus
uacaugacaauaaag

SEQ ID NO: 3262989 - RNA, 20 nt, Vaccinia virus
cuuuccguacaacauacugu

SEQ ID NO: 3262990 - RNA, 16 nt, Vaccinia virus
auucauagcuguauuu

SEQ ID NO: 3262991 - RNA, 23 nt, Vaccinia virus
caccgagggaaaaucuaaaguug

SEQ ID NO: 3262992 - RNA, 15 nt, Vaccinia virus
uaguauaacgugaau

SEQ ID NO: 3262993 - RNA, 19 nt, Vaccinia virus
cagguugcagcauagacuu

SEQ ID NO: 3262994 - RNA, 12 nt, Vaccinia virus
gaguaguacaag

SEQ ID NO: 3262995 - RNA, 23 nt, Vaccinia virus
acaucuaguauugauaaauggaa

SEQ ID NO: 3262996 - RNA, 13 nt, Vaccinia virus
aaugauaaagaua

SEQ ID NO: 3262997 - RNA, 19 nt, Vaccinia virus
agcaacaugucucuaaaug

SEQ ID NO: 3262998 - RNA, 17 nt, Vaccinia virus
uuuuaaauauuguauua

SEQ ID NO: 3262999 - RNA, 15 nt, Vaccinia virus
auuaggauuaucaaa

SEQ ID NO: 3263000 - RNA, 13 nt, Vaccinia virus
uugauucuagcau

SEQ ID NO: 3263001 - RNA, 23 nt, Vaccinia virus
aaaucauccguuguuauauaccg

SEQ ID NO: 3263002 - RNA, 17 nt, Vaccinia virus
agaaagugcaaaugagg

SEQ ID NO: 3263003 - RNA, 16 nt, Vaccinia virus
auuauuaauaagaaug

SEQ ID NO: 3263004 - RNA, 15 nt, Vaccinia virus
caguccacuguauaa

SEQ ID NO: 3263005 - RNA, 20 nt, Vaccinia virus
agaaaaaucauuaaaaagau

SEQ ID NO: 3263006 - RNA, 15 nt, Vaccinia virus
gaagacugaagagga

SEQ ID NO: 3263007 - RNA, 17 nt, Vaccinia virus
auucggagacuguauau

SEQ ID NO: 3263008 - RNA, 16 nt, Vaccinia virus
ugucuaucucuguaaa

SEQ ID NO: 3263009 - RNA, 17 nt, Vaccinia virus
aacuuaaacaaaauaca

SEQ ID NO: 3263010 - RNA, 23 nt, Vaccinia virus
cuaauguuuccggagauagauuu

SEQ ID NO: 3263011 - RNA, 19 nt, Vaccinia virus
uaucuggcucucucugcca

SEQ ID NO: 3263012 - RNA, 18 nt, Vaccinia virus
cauguguuucccaaacaa

SEQ ID NO: 3263013 - RNA, 22 nt, Vaccinia virus
ucucauuaaaugguuagagagu

SEQ ID NO: 3263014 - RNA, 12 nt, Vaccinia virus
acaaaagguauu

SEQ ID NO: 3263015 - RNA, 11 nt, Vaccinia virus
gauugauuuuu

SEQ ID NO: 3263016 - RNA, 22 nt, Vaccinia virus
gcauguagaagacaauaaagau

SEQ ID NO: 3263017 - RNA, 17 nt, Vaccinia virus
uuacaaauauucacaag

SEQ ID NO: 3263018 - RNA, 17 nt, Vaccinia virus
aauucaaauagauguuc

SEQ ID NO: 3263019 - RNA, 16 nt, Vaccinia virus
gaguugauuguaaaua

SEQ ID NO: 3263020 - RNA, 17 nt, Vaccinia virus
cuauuuuacuaaauaau

SEQ ID NO: 3263021 - RNA, 12 nt, Vaccinia virus
ggucagaaauau

SEQ ID NO: 3263022 - RNA, 20 nt, Vaccinia virus
aaaccaucggagaaggaaua

SEQ ID NO: 3263023 - RNA, 20 nt, Vaccinia virus
uguucccgucaauagagcaa

SEQ ID NO: 3263024 - RNA, 19 nt, Vaccinia virus
agaaacugacuugauaaaa

SEQ ID NO: 3263025 - RNA, 20 nt, Vaccinia virus
auuuuacaacuuuuaacaag

SEQ ID NO: 3263026 - RNA, 21 nt, Vaccinia virus
uuugauuaguauaacuagauu

SEQ ID NO: 3263027 - RNA, 17 nt, Vaccinia virus
uucagaggaauacagac

SEQ ID NO: 3263028 - RNA, 23 nt, Vaccinia virus
ucuuaguaacucuaguaaaauaa

SEQ ID NO: 3263029 - RNA, 18 nt, Vaccinia virus
uaaaauuaaauaguagua

SEQ ID NO: 3263030 - RNA, 16 nt, Vaccinia virus
aagacaauauuaucau

SEQ ID NO: 3263031 - RNA, 11 nt, Vaccinia virus
uaucuguaaaa

SEQ ID NO: 3263032 - RNA, 17 nt, Vaccinia virus
uuacauaucuacguucu

SEQ ID NO: 3263033 - RNA, 20 nt, Vaccinia virus
cacacgaggacuauguuugg

SEQ ID NO: 3263034 - RNA, 21 nt, Vaccinia virus
auuagcgagguauuuauucau

SEQ ID NO: 3263035 - RNA, 16 nt, Vaccinia virus
auccuacuguauacuu

SEQ ID NO: 3263036 - RNA, 18 nt, Vaccinia virus
cagaauauauaagacaca

SEQ ID NO: 3263037 - RNA, 18 nt, Vaccinia virus
agauaaugcgguuuauca

SEQ ID NO: 3263038 - RNA, 18 nt, Vaccinia virus
agauccaacauuaaucaa

SEQ ID NO: 3263039 - RNA, 17 nt, Vaccinia virus
gaaaauaaucuaguaaa

SEQ ID NO: 3263040 - RNA, 14 nt, Vaccinia virus
cuauaauaaugaau

SEQ ID NO: 3263041 - RNA, 16 nt, Vaccinia virus
ucaaagucguuuauau

SEQ ID NO: 3263042 - RNA, 22 nt, Vaccinia virus
uaguugacacguuuauuucaua

SEQ ID NO: 3263043 - RNA, 15 nt, Vaccinia virus
acuuuaagcuaaaau

SEQ ID NO: 3263044 - RNA, 14 nt, Vaccinia virus
aagaguuaaugaau

SEQ ID NO: 3263045 - RNA, 20 nt, Vaccinia virus
cauugauugccauaauaauu

SEQ ID NO: 3263046 - RNA, 11 nt, Vaccinia virus
gcauaauacaa

SEQ ID NO: 3263047 - RNA, 21 nt, Vaccinia virus
ucugaaauaacauauagauuu

SEQ ID NO: 3263048 - RNA, 15 nt, Vaccinia virus
ucguaaaaaaguuuu

SEQ ID NO: 3263049 - RNA, 14 nt, Vaccinia virus
agaaagaaauuugu

SEQ ID NO: 3263050 - RNA, 16 nt, Vaccinia virus
agagaccgauaccuau

SEQ ID NO: 3263051 - RNA, 20 nt, Vaccinia virus
auaucucauucaaauccaua

SEQ ID NO: 3263052 - RNA, 17 nt, Vaccinia virus
cgccauuuauccagucu

SEQ ID NO: 3263053 - RNA, 16 nt, Vaccinia virus
cugaugauauuagaac

SEQ ID NO: 3263054 - RNA, 21 nt, Vaccinia virus
cuaaaacuggagagacugauu

SEQ ID NO: 3263055 - RNA, 17 nt, Vaccinia virus
gauaaaauuaaugagau

SEQ ID NO: 3263056 - RNA, 18 nt, Vaccinia virus
acuauucaacgcagaggu

SEQ ID NO: 3263057 - RNA, 14 nt, Vaccinia virus
aguauagaaauugu

SEQ ID NO: 3263058 - RNA, 18 nt, Vaccinia virus
aucuacguucauauguau

SEQ ID NO: 3263059 - RNA, 22 nt, Vaccinia virus
cagugguuuuauuuuauccuug

SEQ ID NO: 3263060 - RNA, 13 nt, Vaccinia virus
ucagcuuuaguuu

SEQ ID NO: 3263061 - RNA, 21 nt, Vaccinia virus
auauaaugauauauauuuuca

SEQ ID NO: 3263062 - RNA, 18 nt, Vaccinia virus
aaauauuuaacucaugau

SEQ ID NO: 3263063 - RNA, 21 nt, Vaccinia virus
auuaaacuaauucauuuucaa

SEQ ID NO: 3263064 - RNA, 19 nt, Vaccinia virus
gaggaaaucguauaaauac

SEQ ID NO: 3263065 - RNA, 13 nt, Vaccinia virus
aaguaucaaaucu

SEQ ID NO: 3263066 - RNA, 20 nt, Vaccinia virus
auuguacgguagaauugaua

SEQ ID NO: 3263067 - RNA, 12 nt, Vaccinia virus
caaaauuacaau

SEQ ID NO: 3263068 - RNA, 18 nt, Vaccinia virus
agaagugaguauacuugu

SEQ ID NO: 3263069 - RNA, 15 nt, Vaccinia virus
ugucugacugaauac

SEQ ID NO: 3263070 - RNA, 17 nt, Vaccinia virus
uaaaaugauauuucauu

SEQ ID NO: 3263071 - RNA, 17 nt, Vaccinia virus
uuauacauccuguucua

SEQ ID NO: 3263072 - RNA, 12 nt, Vaccinia virus
ccuuuauuucca

SEQ ID NO: 3263073 - RNA, 13 nt, Vaccinia virus
gaagauagauaug

SEQ ID NO: 3263074 - RNA, 19 nt, Vaccinia virus
uuacaacgccaucaugaau

SEQ ID NO: 3263075 - RNA, 18 nt, Vaccinia virus
ucaauauauuaagaaguu

SEQ ID NO: 3263076 - RNA, 18 nt, Vaccinia virus
uagaugcuacuucaucua

SEQ ID NO: 3263077 - RNA, 13 nt, Vaccinia virus
aucaauaaugacg

SEQ ID NO: 3263078 - RNA, 20 nt, Vaccinia virus
ucaauggauaccuugcuauu

SEQ ID NO: 3263079 - RNA, 15 nt, Vaccinia virus
aaauacgaacuuuau

SEQ ID NO: 3263080 - RNA, 15 nt, Vaccinia virus
auagaucaaauacuu

SEQ ID NO: 3263081 - RNA, 12 nt, Vaccinia virus
augaaaauacuu

SEQ ID NO: 3263082 - RNA, 22 nt, Vaccinia virus
aguuuccuguaaauuuucuaua

SEQ ID NO: 3263083 - RNA, 15 nt, Vaccinia virus
uuuucacuaaauaag

SEQ ID NO: 3263084 - RNA, 13 nt, Vaccinia virus
cacugcagcauuu

SEQ ID NO: 3263085 - RNA, 14 nt, Vaccinia virus
agauaacaguguaa

SEQ ID NO: 3263086 - RNA, 18 nt, Vaccinia virus
acauauggaauauaucua

SEQ ID NO: 3263087 - RNA, 21 nt, Vaccinia virus
agcauugcguguuuuagugau

SEQ ID NO: 3263088 - RNA, 20 nt, Vaccinia virus
caaguaggauuuuuccaaag

SEQ ID NO: 3263089 - RNA, 13 nt, Vaccinia virus
uaacgucauuaaa

SEQ ID NO: 3263090 - RNA, 15 nt, Vaccinia virus
auugacgaugucaau

SEQ ID NO: 3263091 - RNA, 22 nt, Vaccinia virus
gauauacgcuaucuauauccug

SEQ ID NO: 3263092 - RNA, 20 nt, Vaccinia virus
uauucucguuaaacagcauu

SEQ ID NO: 3263093 - RNA, 22 nt, Vaccinia virus
guuuaaaaacacacaguuugau

SEQ ID NO: 3263094 - RNA, 19 nt, Vaccinia virus
aucucuuucagaacugaug

SEQ ID NO: 3263095 - RNA, 16 nt, Vaccinia virus
uucuaagguagaaucu

SEQ ID NO: 3263096 - RNA, 22 nt, Vaccinia virus
cucuagguaacaaacaaacucu

SEQ ID NO: 3263097 - RNA, 14 nt, Vaccinia virus
ucacuaacuaaugu

SEQ ID NO: 3263098 - RNA, 17 nt, Vaccinia virus
aaugaguucuguguaga

SEQ ID NO: 3263099 - RNA, 12 nt, Vaccinia virus
aacgauucuaga

SEQ ID NO: 3263100 - RNA, 21 nt, Vaccinia virus
uuuaccgacacccguuucaug

SEQ ID NO: 3263101 - RNA, 17 nt, Vaccinia virus
accuuuaacuucuggaa

SEQ ID NO: 3263102 - RNA, 21 nt, Vaccinia virus
uauuagauuugguaaaaugaa

SEQ ID NO: 3263103 - RNA, 21 nt, Vaccinia virus
agaaauaagagacuuaaacaa

SEQ ID NO: 3263104 - RNA, 16 nt, Vaccinia virus
auaaauacaauaauua

SEQ ID NO: 3263105 - RNA, 23 nt, Vaccinia virus
guacuuguauguguuauaaauau

SEQ ID NO: 3263106 - RNA, 17 nt, Vaccinia virus
aagaaaaaugauuaucu

SEQ ID NO: 3263107 - RNA, 12 nt, Vaccinia virus
aguauaguuuua

SEQ ID NO: 3263108 - RNA, 15 nt, Vaccinia virus
auaaaacucauauag

SEQ ID NO: 3263109 - RNA, 11 nt, Vaccinia virus
aaguauaacga

SEQ ID NO: 3263110 - RNA, 17 nt, Vaccinia virus
cauaaauauauuucuaa

SEQ ID NO: 3263111 - RNA, 21 nt, Vaccinia virus
auuauccaugauagaaagaaa

SEQ ID NO: 3263112 - RNA, 14 nt, Vaccinia virus
gagugguaaacaac

SEQ ID NO: 3263113 - RNA, 19 nt, Vaccinia virus
aaggccaaagaaaugagua

SEQ ID NO: 3263114 - RNA, 16 nt, Vaccinia virus
cucguuaaacagcauu

SEQ ID NO: 3263115 - RNA, 17 nt, Vaccinia virus
acuaucugacauaaaca

SEQ ID NO: 3263116 - RNA, 14 nt, Vaccinia virus
gaauccuauacucu

SEQ ID NO: 3263117 - RNA, 18 nt, Vaccinia virus
auucuucgcccucaauuu

SEQ ID NO: 3263118 - RNA, 22 nt, Vaccinia virus
uacucuccgaguguaaauauua

SEQ ID NO: 3263119 - RNA, 16 nt, Vaccinia virus
aaguuuuuauucucuu

SEQ ID NO: 3263120 - RNA, 18 nt, Vaccinia virus
uaaucuaguagaaaagau

SEQ ID NO: 3263121 - RNA, 22 nt, Vaccinia virus
guaauaucugacuuauuuccua

SEQ ID NO: 3263122 - RNA, 17 nt, Vaccinia virus
auauaacuucugguaaa

SEQ ID NO: 3263123 - RNA, 14 nt, Vaccinia virus
accuucuacauaua

SEQ ID NO: 3263124 - RNA, 14 nt, Vaccinia virus
auaauuguuuugaa

SEQ ID NO: 3263125 - RNA, 20 nt, Vaccinia virus
cuaaaauauuuuuuauucuc

SEQ ID NO: 3263126 - RNA, 13 nt, Vaccinia virus
gccucuagauauc

SEQ ID NO: 3263127 - RNA, 13 nt, Vaccinia virus
auucaaaaaagaa

SEQ ID NO: 3263128 - RNA, 17 nt, Vaccinia virus
aucuggauuucagauau

SEQ ID NO: 3263129 - RNA, 12 nt, Vaccinia virus
caacuuaaacaa

SEQ ID NO: 3263130 - RNA, 21 nt, Vaccinia virus
uaucauaaaagauacaaauau

SEQ ID NO: 3263131 - RNA, 19 nt, Vaccinia virus
agccugugaaugcaaucaa

SEQ ID NO: 3263132 - RNA, 17 nt, Vaccinia virus
guacauuaauaaaugaa

SEQ ID NO: 3263133 - RNA, 17 nt, Vaccinia virus
uccuccaguaaaugacg

SEQ ID NO: 3263134 - RNA, 16 nt, Vaccinia virus
gacaauaggaaaucua

SEQ ID NO: 3263135 - RNA, 16 nt, Vaccinia virus
aaacacgcuacacaac

SEQ ID NO: 3263136 - RNA, 14 nt, Vaccinia virus
cacuagaaaccacg

SEQ ID NO: 3263137 - RNA, 23 nt, Vaccinia virus
ugcuucguuuaaauaauauauca

SEQ ID NO: 3263138 - RNA, 12 nt, Vaccinia virus
augcuugaaaau

SEQ ID NO: 3263139 - RNA, 21 nt, Vaccinia virus
acaaaauucaaggaaagaaua

SEQ ID NO: 3263140 - RNA, 18 nt, Vaccinia virus
aguaauucagacacuucu

SEQ ID NO: 3263141 - RNA, 22 nt, Vaccinia virus
aaauaaaacagggauucguuua

SEQ ID NO: 3263142 - RNA, 19 nt, Vaccinia virus
cuuuauuuccacauuagau

SEQ ID NO: 3263143 - RNA, 16 nt, Vaccinia virus
uaucacagucuguuuu

SEQ ID NO: 3263144 - RNA, 22 nt, Vaccinia virus
auuaagcaacaugucucuaaau

SEQ ID NO: 3263145 - RNA, 16 nt, Vaccinia virus
uauguguauuaucaga

SEQ ID NO: 3263146 - RNA, 18 nt, Vaccinia virus
ugcuaaacuuuauguacu

SEQ ID NO: 3263147 - RNA, 21 nt, Vaccinia virus
uuagacaacaagguaccuaua

SEQ ID NO: 3263148 - RNA, 23 nt, Vaccinia virus
uaaaauaacucuguagacgauac

SEQ ID NO: 3263149 - RNA, 17 nt, Vaccinia virus
uguagauggauguagca

SEQ ID NO: 3263150 - RNA, 22 nt, Vaccinia virus
auacugucuaauccuaagaaaa

SEQ ID NO: 3263151 - RNA, 14 nt, Vaccinia virus
ucuaucaaagccuu

SEQ ID NO: 3263152 - RNA, 16 nt, Vaccinia virus
agacuuuaucuagauc

SEQ ID NO: 3263153 - RNA, 22 nt, Vaccinia virus
aaucauugauacauuuaaaagu

SEQ ID NO: 3263154 - RNA, 20 nt, Vaccinia virus
cugaaaaagauaucagagaa

SEQ ID NO: 3263155 - RNA, 15 nt, Vaccinia virus
uuguccggcauauca

SEQ ID NO: 3263156 - RNA, 13 nt, Vaccinia virus
ucauauucucaua

SEQ ID NO: 3263157 - RNA, 17 nt, Vaccinia virus
uccagguuuuuuaucuc

SEQ ID NO: 3263158 - RNA, 12 nt, Vaccinia virus
cucuuuaauagc

SEQ ID NO: 3263159 - RNA, 19 nt, Vaccinia virus
cgugcacccaacguauuua

SEQ ID NO: 3263160 - RNA, 21 nt, Vaccinia virus
gcaaccaccgcaugauaauau

SEQ ID NO: 3263161 - RNA, 22 nt, Vaccinia virus
ucucacugaauacgaggaugau

SEQ ID NO: 3263162 - RNA, 20 nt, Vaccinia virus
aauccuuggccuuugauucg

SEQ ID NO: 3263163 - RNA, 23 nt, Vaccinia virus
ugcuuuccuuguugaugaaggau

SEQ ID NO: 3263164 - RNA, 21 nt, Vaccinia virus
cgugcacuuuuuuauaaagau

SEQ ID NO: 3263165 - RNA, 20 nt, Vaccinia virus
aggaauuaaucuaguagaaa

SEQ ID NO: 3263166 - RNA, 12 nt, Vaccinia virus
cauaaaacauca

SEQ ID NO: 3263167 - RNA, 22 nt, Vaccinia virus
uacaaacuuuuccuuuuccaca

SEQ ID NO: 3263168 - RNA, 15 nt, Vaccinia virus
auuucucuaucgaug

SEQ ID NO: 3263169 - RNA, 21 nt, Vaccinia virus
ugagauacguaguuauguaga

SEQ ID NO: 3263170 - RNA, 16 nt, Vaccinia virus
gaauuacauagaugau

SEQ ID NO: 3263171 - RNA, 21 nt, Vaccinia virus
gcaucaacaauuacaaaugag

SEQ ID NO: 3263172 - RNA, 18 nt, Vaccinia virus
uaguauaugaacaaacgu

SEQ ID NO: 3263173 - RNA, 18 nt, Vaccinia virus
ucauaugugguauucacu

SEQ ID NO: 3263174 - RNA, 20 nt, Vaccinia virus
aauauuuuucguuuacaaaa

SEQ ID NO: 3263175 - RNA, 23 nt, Vaccinia virus
uucuugauagagaugagaugcuc

SEQ ID NO: 3263176 - RNA, 12 nt, Vaccinia virus
aauuaucaaaug

SEQ ID NO: 3263177 - RNA, 20 nt, Vaccinia virus
aaacagacgacaacauguaa

SEQ ID NO: 3263178 - RNA, 19 nt, Vaccinia virus
gaauaagaguguaguauca

SEQ ID NO: 3263179 - RNA, 17 nt, Vaccinia virus
ucauaauuacauuuaga

SEQ ID NO: 3263180 - RNA, 19 nt, Vaccinia virus
ccuuaaauguuuucucugu

SEQ ID NO: 3263181 - RNA, 18 nt, Vaccinia virus
augucguuauucugaaac

SEQ ID NO: 3263182 - RNA, 16 nt, Vaccinia virus
aauguuagugaugaau

SEQ ID NO: 3263183 - RNA, 19 nt, Vaccinia virus
aucaacagaaucaguauau

SEQ ID NO: 3263184 - RNA, 17 nt, Vaccinia virus
aucgugcagguuaaaua

SEQ ID NO: 3263185 - RNA, 15 nt, Vaccinia virus
ugcuguuguacauac

SEQ ID NO: 3263186 - RNA, 15 nt, Vaccinia virus
ggaguaaauauacaa

SEQ ID NO: 3263187 - RNA, 13 nt, Vaccinia virus
gauugauuagaaa

SEQ ID NO: 3263188 - RNA, 15 nt, Vaccinia virus
auggaauuggagaaa

SEQ ID NO: 3263189 - RNA, 12 nt, Vaccinia virus
aaugaaauucuu

SEQ ID NO: 3263190 - RNA, 22 nt, Vaccinia virus
uacagauguuacaaauguagaa

SEQ ID NO: 3263191 - RNA, 15 nt, Vaccinia virus
auuauauaguguugc

SEQ ID NO: 3263192 - RNA, 17 nt, Vaccinia virus
auugauuagaaaauaua

SEQ ID NO: 3263193 - RNA, 12 nt, Vaccinia virus
aaauauguguau

SEQ ID NO: 3263194 - RNA, 13 nt, Vaccinia virus
uauacuacaauug

SEQ ID NO: 3263195 - RNA, 12 nt, Vaccinia virus
acauuuaaugau

SEQ ID NO: 3263196 - RNA, 14 nt, Vaccinia virus
cuucuguuaauuuu

SEQ ID NO: 3263197 - RNA, 18 nt, Vaccinia virus
gaucuccaucgaugauac

SEQ ID NO: 3263198 - RNA, 19 nt, Vaccinia virus
auauuaucucaacaaaauu

SEQ ID NO: 3263199 - RNA, 20 nt, Vaccinia virus
agauuguuguauagaaauuu

SEQ ID NO: 3263200 - RNA, 14 nt, Vaccinia virus
augacaaaauuaaa

SEQ ID NO: 3263201 - RNA, 18 nt, Vaccinia virus
uaguagaguuuuauucuc

SEQ ID NO: 3263202 - RNA, 20 nt, Vaccinia virus
gauucauuuuauuuguuaaa

SEQ ID NO: 3263203 - RNA, 14 nt, Vaccinia virus
ucucugauagaaug

SEQ ID NO: 3263204 - RNA, 17 nt, Vaccinia virus
uuaucaaaauuuggaaa

SEQ ID NO: 3263205 - RNA, 22 nt, Vaccinia virus
aguauucguuuucuaauucuuu

SEQ ID NO: 3263206 - RNA, 14 nt, Vaccinia virus
aaggaaaaugaaca

SEQ ID NO: 3263207 - RNA, 15 nt, Vaccinia virus
acaggaaagaaguau

SEQ ID NO: 3263208 - RNA, 20 nt, Vaccinia virus
auucuauaaucaaugagaca

SEQ ID NO: 3263209 - RNA, 18 nt, Vaccinia virus
gaugucgaugguauguau

SEQ ID NO: 3263210 - RNA, 16 nt, Vaccinia virus
aauuagaauuacaaaa

SEQ ID NO: 3263211 - RNA, 17 nt, Vaccinia virus
gcaucugguacaauaaa

SEQ ID NO: 3263212 - RNA, 17 nt, Vaccinia virus
agaugcugcuccuggau

SEQ ID NO: 3263213 - RNA, 17 nt, Vaccinia virus
gaccaagacacauaugg

SEQ ID NO: 3263214 - RNA, 15 nt, Vaccinia virus
aacuaagucuagaau

SEQ ID NO: 3263215 - RNA, 21 nt, Vaccinia virus
uugauguaguacuuugaugau

SEQ ID NO: 3263216 - RNA, 12 nt, Vaccinia virus
auguaaaugaua

SEQ ID NO: 3263217 - RNA, 14 nt, Vaccinia virus
auaauaacaucgau

SEQ ID NO: 3263218 - RNA, 16 nt, Vaccinia virus
guauacacaaaaagaa

SEQ ID NO: 3263219 - RNA, 18 nt, Vaccinia virus
aacguuuuaaaaaaagau

SEQ ID NO: 3263220 - RNA, 13 nt, Vaccinia virus
auaguaucaaacu

SEQ ID NO: 3263221 - RNA, 12 nt, Vaccinia virus
aaacuauacgaa

SEQ ID NO: 3263222 - RNA, 19 nt, Vaccinia virus
augauauacagucuuaaau

SEQ ID NO: 3263223 - RNA, 17 nt, Vaccinia virus
aucauccauuaauauaa

SEQ ID NO: 3263224 - RNA, 17 nt, Vaccinia virus
aacaaccaaaaaaauau

SEQ ID NO: 3263225 - RNA, 20 nt, Vaccinia virus
uauacaaugaacuaauauga

SEQ ID NO: 3263226 - RNA, 13 nt, Vaccinia virus
uacaguucuuggc

SEQ ID NO: 3263227 - RNA, 16 nt, Vaccinia virus
uaucuuguacguauau

SEQ ID NO: 3263228 - RNA, 16 nt, Vaccinia virus
acaagucauuacuaau

SEQ ID NO: 3263229 - RNA, 15 nt, Vaccinia virus
aaaacacaaauaugg

SEQ ID NO: 3263230 - RNA, 22 nt, Vaccinia virus
aggaaauuaugagaaugagauu

SEQ ID NO: 3263231 - RNA, 19 nt, Vaccinia virus
gccuccacuagaagagaau

SEQ ID NO: 3263232 - RNA, 18 nt, Vaccinia virus
aacaauagucuuguaaag

SEQ ID NO: 3263233 - RNA, 22 nt, Vaccinia virus
auucgucuuucugaaugucgaa

SEQ ID NO: 3263234 - RNA, 22 nt, Vaccinia virus
uaugauauaauucguggauaau

SEQ ID NO: 3263235 - RNA, 14 nt, Vaccinia virus
cgaaagauguuauu

SEQ ID NO: 3263236 - RNA, 16 nt, Vaccinia virus
gucaugaacauuaaac

SEQ ID NO: 3263237 - RNA, 22 nt, Vaccinia virus
cucgauaacacauuuucaucua

SEQ ID NO: 3263238 - RNA, 15 nt, Vaccinia virus
ucugauaaucucuaa

SEQ ID NO: 3263239 - RNA, 18 nt, Vaccinia virus
agauuuucaauuauguau

SEQ ID NO: 3263240 - RNA, 15 nt, Vaccinia virus
acaauauggaaaaac

SEQ ID NO: 3263241 - RNA, 17 nt, Vaccinia virus
cuaugucucuuauuaga

SEQ ID NO: 3263242 - RNA, 18 nt, Vaccinia virus
agaaaaggauguauuauu

SEQ ID NO: 3263243 - RNA, 12 nt, Vaccinia virus
uuacaugugauc

SEQ ID NO: 3263244 - RNA, 19 nt, Vaccinia virus
ugaauuuauaucuaagaua

SEQ ID NO: 3263245 - RNA, 23 nt, Vaccinia virus
auucugauuggucaaugugaaug

SEQ ID NO: 3263246 - RNA, 16 nt, Vaccinia virus
uuagugaaaucuuuaa

SEQ ID NO: 3263247 - RNA, 19 nt, Vaccinia virus
acuccaugauaaauuauuu

SEQ ID NO: 3263248 - RNA, 22 nt, Vaccinia virus
agaaaucauauaugauauuccu

SEQ ID NO: 3263249 - RNA, 17 nt, Vaccinia virus
ucauuaaaaaaauuaac

SEQ ID NO: 3263250 - RNA, 14 nt, Vaccinia virus
gugaucaucuucau

SEQ ID NO: 3263251 - RNA, 19 nt, Vaccinia virus
ugaaucauauauguauuca

SEQ ID NO: 3263252 - RNA, 13 nt, Vaccinia virus
ucugcucuuaaac

SEQ ID NO: 3263253 - RNA, 23 nt, Vaccinia virus
uucuaugaaaggagagaauguau

SEQ ID NO: 3263254 - RNA, 22 nt, Vaccinia virus
aaacugauuuuagcagaauaua

SEQ ID NO: 3263255 - RNA, 15 nt, Vaccinia virus
cgauuaaacuuuaau

SEQ ID NO: 3263256 - RNA, 21 nt, Vaccinia virus
gacuucuggcgguugccauag

SEQ ID NO: 3263257 - RNA, 14 nt, Vaccinia virus
gcuugauauuaaag

SEQ ID NO: 3263258 - RNA, 23 nt, Vaccinia virus
acauauggaauauaucuauaauu

SEQ ID NO: 3263259 - RNA, 15 nt, Vaccinia virus
uguccuuuacaucau

SEQ ID NO: 3263260 - RNA, 21 nt, Vaccinia virus
acaauagauggauaauggaag

SEQ ID NO: 3263261 - RNA, 13 nt, Vaccinia virus
aaaauuauaacua

SEQ ID NO: 3263262 - RNA, 14 nt, Vaccinia virus
ggauggacacauuc

SEQ ID NO: 3263263 - RNA, 20 nt, Vaccinia virus
aaucaccaaauuuuacaaaa

SEQ ID NO: 3263264 - RNA, 15 nt, Vaccinia virus
uguuuaacuuuuguu

SEQ ID NO: 3263265 - RNA, 14 nt, Vaccinia virus
aucauaaguuuaua

SEQ ID NO: 3263266 - RNA, 19 nt, Vaccinia virus
aucagaccguacauacaua

SEQ ID NO: 3263267 - RNA, 17 nt, Vaccinia virus
uuauucauauucuuaaa

SEQ ID NO: 3263268 - RNA, 21 nt, Vaccinia virus
uguuuaucuauacuauuaaaa

SEQ ID NO: 3263269 - RNA, 20 nt, Vaccinia virus
auaaacaugucuauuguuaa

SEQ ID NO: 3263270 - RNA, 23 nt, Vaccinia virus
ccauauuuuguuauuauauuaau

SEQ ID NO: 3263271 - RNA, 17 nt, Vaccinia virus
aaaaauccuuaaugaua

SEQ ID NO: 3263272 - RNA, 19 nt, Vaccinia virus
cguuuuaaauuuuguauuc

SEQ ID NO: 3263273 - RNA, 13 nt, Vaccinia virus
aguaaucaacaau

SEQ ID NO: 3263274 - RNA, 19 nt, Vaccinia virus
auuaucaugagauguguau

SEQ ID NO: 3263275 - RNA, 16 nt, Vaccinia virus
acuuaaugaaaaaugu

SEQ ID NO: 3263276 - RNA, 15 nt, Vaccinia virus
uaaauaaauaugugu

SEQ ID NO: 3263277 - RNA, 19 nt, Vaccinia virus
aauaguuacauacaaacug

SEQ ID NO: 3263278 - RNA, 15 nt, Vaccinia virus
ucucauuuucuuuaa

SEQ ID NO: 3263279 - RNA, 14 nt, Vaccinia virus
acaagucuaauaau

SEQ ID NO: 3263280 - RNA, 15 nt, Vaccinia virus
aauacuuaaaaugua

SEQ ID NO: 3263281 - RNA, 16 nt, Vaccinia virus
uccggagaucuaaaga

SEQ ID NO: 3263282 - RNA, 15 nt, Vaccinia virus
accugauuagaauuc

SEQ ID NO: 3263283 - RNA, 17 nt, Vaccinia virus
agcaucaauaauuguuu

SEQ ID NO: 3263284 - RNA, 20 nt, Vaccinia virus
auacauuaucaaaaagaacg

SEQ ID NO: 3263285 - RNA, 20 nt, Vaccinia virus
gauaauacauuuucuuacaa

SEQ ID NO: 3263286 - RNA, 20 nt, Vaccinia virus
accgauaucacuucagaaau

SEQ ID NO: 3263287 - RNA, 15 nt, Vaccinia virus
cagaaauuauauacg

SEQ ID NO: 3263288 - RNA, 21 nt, Vaccinia virus
agaacagaauaaacaaaauaa

SEQ ID NO: 3263289 - RNA, 17 nt, Vaccinia virus
uuaaacauacaucuguu

SEQ ID NO: 3263290 - RNA, 14 nt, Vaccinia virus
uaauuaucuaaaua

SEQ ID NO: 3263291 - RNA, 16 nt, Vaccinia virus
uaagaugcaaacauua

SEQ ID NO: 3263292 - RNA, 15 nt, Vaccinia virus
uaauaguuuaucaua

SEQ ID NO: 3263293 - RNA, 22 nt, Vaccinia virus
uauucugacgucguucuacaua

SEQ ID NO: 3263294 - RNA, 21 nt, Vaccinia virus
ucuauuacaccaccuccuaua

SEQ ID NO: 3263295 - RNA, 18 nt, Vaccinia virus
aucaaccgcauaauacaa

SEQ ID NO: 3263296 - RNA, 14 nt, Vaccinia virus
aauaaucuucauua

SEQ ID NO: 3263297 - RNA, 19 nt, Vaccinia virus
uaaucuacaaaacaaucau

SEQ ID NO: 3263298 - RNA, 24 nt, Vaccinia virus
ucauauugaacgguaucuucuuaa

SEQ ID NO: 3263299 - RNA, 18 nt, Vaccinia virus
aggagauuuagaaauguu

SEQ ID NO: 3263300 - RNA, 17 nt, Vaccinia virus
ugauauuggauauauca

SEQ ID NO: 3263301 - RNA, 13 nt, Vaccinia virus
augaacaaagaaa

SEQ ID NO: 3263302 - RNA, 20 nt, Vaccinia virus
ucuaaauagaauucucuuca

SEQ ID NO: 3263303 - RNA, 16 nt, Vaccinia virus
auucuaucguaucugu

SEQ ID NO: 3263304 - RNA, 16 nt, Vaccinia virus
gcuagaauuagaaaag

SEQ ID NO: 3263305 - RNA, 20 nt, Vaccinia virus
agacaccuuuucaauguuua

SEQ ID NO: 3263306 - RNA, 14 nt, Vaccinia virus
gucaagaugaugaa

SEQ ID NO: 3263307 - RNA, 15 nt, Vaccinia virus
uuuaugcuucguaaa

SEQ ID NO: 3263308 - RNA, 12 nt, Vaccinia virus
ucuuacaauguu

SEQ ID NO: 3263309 - RNA, 16 nt, Vaccinia virus
aucaaacaacugaaaa

SEQ ID NO: 3263310 - RNA, 18 nt, Vaccinia virus
auuuaauuggacagauau

SEQ ID NO: 3263311 - RNA, 20 nt, Vaccinia virus
gaaauguuuuucgauuacaa

SEQ ID NO: 3263312 - RNA, 17 nt, Vaccinia virus
cuauucuaucuccagua

SEQ ID NO: 3263313 - RNA, 19 nt, Vaccinia virus
guaacauccucaugauuua

SEQ ID NO: 3263314 - RNA, 14 nt, Vaccinia virus
agaaaagagaaauu

SEQ ID NO: 3263315 - RNA, 14 nt, Vaccinia virus
aauauaaaaauaua

SEQ ID NO: 3263316 - RNA, 14 nt, Vaccinia virus
aaagauagaaauga

SEQ ID NO: 3263317 - RNA, 15 nt, Vaccinia virus
agcuaauaccaauuu

SEQ ID NO: 3263318 - RNA, 23 nt, Vaccinia virus
uguuaaaugaucggaucuaaaau

SEQ ID NO: 3263319 - RNA, 20 nt, Vaccinia virus
aguuagcaauuucaaaauag

SEQ ID NO: 3263320 - RNA, 22 nt, Vaccinia virus
uuuaagagaucaaagcaucaaa

SEQ ID NO: 3263321 - RNA, 15 nt, Vaccinia virus
auaaauaucauauau

SEQ ID NO: 3263322 - RNA, 11 nt, Vaccinia virus
guuaucuuuug

SEQ ID NO: 3263323 - RNA, 15 nt, Vaccinia virus
acaaaaaagaacuaa

SEQ ID NO: 3263324 - RNA, 16 nt, Vaccinia virus
auacugucaacuauag

SEQ ID NO: 3263325 - RNA, 21 nt, Vaccinia virus
agacauuguugaauucuguga

SEQ ID NO: 3263326 - RNA, 16 nt, Vaccinia virus
uuuguauaacgucuuu

SEQ ID NO: 3263327 - RNA, 16 nt, Vaccinia virus
aauuuuaagaaauggu

SEQ ID NO: 3263328 - RNA, 19 nt, Vaccinia virus
agaaucaauugagaugucu

SEQ ID NO: 3263329 - RNA, 15 nt, Vaccinia virus
cugacuuauuuccua

SEQ ID NO: 3263330 - RNA, 15 nt, Vaccinia virus
cugaauuauuucaua

SEQ ID NO: 3263331 - RNA, 14 nt, Vaccinia virus
uaucuaccagagau

SEQ ID NO: 3263332 - RNA, 20 nt, Vaccinia virus
auuaaagauuguuuaagaag

SEQ ID NO: 3263333 - RNA, 18 nt, Vaccinia virus
aaucaacagaaguuaaua

SEQ ID NO: 3263334 - RNA, 22 nt, Vaccinia virus
accucagacugguagagaauga

SEQ ID NO: 3263335 - RNA, 15 nt, Vaccinia virus
aggaauuaauuauuc

SEQ ID NO: 3263336 - RNA, 15 nt, Vaccinia virus
gaaagcgugauuuua

SEQ ID NO: 3263337 - RNA, 22 nt, Vaccinia virus
cguagaaaguaucuuauauaca

SEQ ID NO: 3263338 - RNA, 15 nt, Vaccinia virus
acuacaauauuucau

SEQ ID NO: 3263339 - RNA, 20 nt, Vaccinia virus
caaauggucaaugauaugau

SEQ ID NO: 3263340 - RNA, 20 nt, Vaccinia virus
auuuuuaguuacagaaguga

SEQ ID NO: 3263341 - RNA, 18 nt, Vaccinia virus
ucuaucuuuaguaguguu

SEQ ID NO: 3263342 - RNA, 15 nt, Vaccinia virus
auucugguuuaaaaa

SEQ ID NO: 3263343 - RNA, 11 nt, Vaccinia virus
ugaaucucugu

SEQ ID NO: 3263344 - RNA, 19 nt, Vaccinia virus
uaauagcguuaacuaucaa

SEQ ID NO: 3263345 - RNA, 24 nt, Vaccinia virus
gacaggcagaacacgucaugcaau

SEQ ID NO: 3263346 - RNA, 21 nt, Vaccinia virus
gaaauauuauacaugcugaca

SEQ ID NO: 3263347 - RNA, 13 nt, Vaccinia virus
uucugaauuauuu

SEQ ID NO: 3263348 - RNA, 18 nt, Vaccinia virus
caucuauagaaacauauu

SEQ ID NO: 3263349 - RNA, 18 nt, Vaccinia virus
cuagcauccccuuucaau

SEQ ID NO: 3263350 - RNA, 16 nt, Vaccinia virus
uguaccggacacuaua

SEQ ID NO: 3263351 - RNA, 16 nt, Vaccinia virus
accguuguuaaauacu

SEQ ID NO: 3263352 - RNA, 15 nt, Vaccinia virus
gcggacuuuaaacag

SEQ ID NO: 3263353 - RNA, 23 nt, Vaccinia virus
uauaaaaacauuuuauuucuaga

SEQ ID NO: 3263354 - RNA, 21 nt, Vaccinia virus
acaauacugcgacuuuguuaa

SEQ ID NO: 3263355 - RNA, 15 nt, Vaccinia virus
gaaagauuaaaucau

SEQ ID NO: 3263356 - RNA, 23 nt, Vaccinia virus
auccuguaauauuuuuaguuuuu

SEQ ID NO: 3263357 - RNA, 22 nt, Vaccinia virus
uaauaucagaggaguuauuuac

SEQ ID NO: 3263358 - RNA, 17 nt, Vaccinia virus
auuuuaucuuuuagagg

SEQ ID NO: 3263359 - RNA, 15 nt, Vaccinia virus
aaucguauaaauacg

SEQ ID NO: 3263360 - RNA, 21 nt, Vaccinia virus
caucauacgaaaauagauucu

SEQ ID NO: 3263361 - RNA, 17 nt, Vaccinia virus
gaugagaacagaagcgu

SEQ ID NO: 3263362 - RNA, 22 nt, Vaccinia virus
auaauaucggucuuauucuuaa

SEQ ID NO: 3263363 - RNA, 21 nt, Vaccinia virus
uaguaauuauaaaaccaagga

SEQ ID NO: 3263364 - RNA, 18 nt, Vaccinia virus
caguuucuagugacaaaa

SEQ ID NO: 3263365 - RNA, 16 nt, Vaccinia virus
cugguaacaugauauc

SEQ ID NO: 3263366 - RNA, 11 nt, Vaccinia virus
uagagauuuca

SEQ ID NO: 3263367 - RNA, 16 nt, Vaccinia virus
aaguuucucaugauaa

SEQ ID NO: 3263368 - RNA, 14 nt, Vaccinia virus
acaaaaauacauaa

SEQ ID NO: 3263369 - RNA, 20 nt, Vaccinia virus
auaaauuaggagauaaucua

SEQ ID NO: 3263370 - RNA, 23 nt, Vaccinia virus
aguuaaaauuuuaagauuuuaaa

SEQ ID NO: 3263371 - RNA, 15 nt, Vaccinia virus
auggaagaaacagaa

SEQ ID NO: 3263372 - RNA, 22 nt, Vaccinia virus
cuggucuaaaauuuccaucucu

SEQ ID NO: 3263373 - RNA, 23 nt, Vaccinia virus
guuucccaaugaaaugguacaau

SEQ ID NO: 3263374 - RNA, 17 nt, Vaccinia virus
aacuguaauuugauucu

SEQ ID NO: 3263375 - RNA, 20 nt, Vaccinia virus
agauccugcauagaaauauc

SEQ ID NO: 3263376 - RNA, 18 nt, Vaccinia virus
aguauaugauaauauuaa

SEQ ID NO: 3263377 - RNA, 12 nt, Vaccinia virus
guucugauuuua

SEQ ID NO: 3263378 - RNA, 20 nt, Vaccinia virus
ucauuuauaaucuauuagaa

SEQ ID NO: 3263379 - RNA, 14 nt, Vaccinia virus
gaaauguuaaaacu

SEQ ID NO: 3263380 - RNA, 14 nt, Vaccinia virus
aaaaacaugucucu

SEQ ID NO: 3263381 - RNA, 20 nt, Vaccinia virus
aauauucacaagaugaauuc

SEQ ID NO: 3263382 - RNA, 21 nt, Vaccinia virus
ugauacguacaaugauaauga

SEQ ID NO: 3263383 - RNA, 22 nt, Vaccinia virus
ggaccacauccuucuucaucaa

SEQ ID NO: 3263384 - RNA, 15 nt, Vaccinia virus
accaaauuaucauca

SEQ ID NO: 3263385 - RNA, 12 nt, Vaccinia virus
uguauuaaauag

SEQ ID NO: 3263386 - RNA, 17 nt, Vaccinia virus
aauucauuaauauguac

SEQ ID NO: 3263387 - RNA, 18 nt, Vaccinia virus
gauauuagaacugcuaau

SEQ ID NO: 3263388 - RNA, 18 nt, Vaccinia virus
cgaaauaaauaaugaauu

SEQ ID NO: 3263389 - RNA, 19 nt, Vaccinia virus
acuuuaaccuauacaugau

SEQ ID NO: 3263390 - RNA, 14 nt, Vaccinia virus
caauuuuuuguucu

SEQ ID NO: 3263391 - RNA, 17 nt, Vaccinia virus
guacaaaaaagaacuaa

SEQ ID NO: 3263392 - RNA, 10 nt, Vaccinia virus
ugguaaaaua

SEQ ID NO: 3263393 - RNA, 12 nt, Vaccinia virus
aaaguuaaaagu

SEQ ID NO: 3263394 - RNA, 19 nt, Vaccinia virus
auuuugcauuagauuuacu

SEQ ID NO: 3263395 - RNA, 14 nt, Vaccinia virus
uuuauuuuauucua

SEQ ID NO: 3263396 - RNA, 21 nt, Vaccinia virus
ugaaacuaugucaaaaauugu

SEQ ID NO: 3263397 - RNA, 17 nt, Vaccinia virus
agagacgggaaaauagu

SEQ ID NO: 3263398 - RNA, 13 nt, Vaccinia virus
uaugauucuaaua

SEQ ID NO: 3263399 - RNA, 15 nt, Vaccinia virus
uacauauucuaauga

SEQ ID NO: 3263400 - RNA, 18 nt, Vaccinia virus
ucaacauguuuaauauau

SEQ ID NO: 3263401 - RNA, 15 nt, Vaccinia virus
uuuggcuaaacuaua

SEQ ID NO: 3263402 - RNA, 15 nt, Vaccinia virus
aguuuggauuaauaa

SEQ ID NO: 3263403 - RNA, 21 nt, Vaccinia virus
ucaauagaauaugucucuuaa

SEQ ID NO: 3263404 - RNA, 17 nt, Vaccinia virus
uaucauagaguaucuua

SEQ ID NO: 3263405 - RNA, 14 nt, Vaccinia virus
aauauaucuuauau

SEQ ID NO: 3263406 - RNA, 12 nt, Vaccinia virus
guacauacuaga

SEQ ID NO: 3263407 - RNA, 18 nt, Vaccinia virus
auauuaucaccuauugcc

SEQ ID NO: 3263408 - RNA, 15 nt, Vaccinia virus
aaguuuguaggaaag

SEQ ID NO: 3263409 - RNA, 16 nt, Vaccinia virus
aucugggaauaaaaua

SEQ ID NO: 3263410 - RNA, 17 nt, Vaccinia virus
uagauuuauaauacuuu

SEQ ID NO: 3263411 - RNA, 15 nt, Vaccinia virus
uaucugugaauacuu

SEQ ID NO: 3263412 - RNA, 19 nt, Vaccinia virus
gaguuagauauuaauaaca

SEQ ID NO: 3263413 - RNA, 14 nt, Vaccinia virus
caguaacauauauu

SEQ ID NO: 3263414 - RNA, 16 nt, Vaccinia virus
uagugaugguuuucua

SEQ ID NO: 3263415 - RNA, 17 nt, Vaccinia virus
auccgauacuuguaaga

SEQ ID NO: 3263416 - RNA, 20 nt, Vaccinia virus
aaucuucaguuuuugauauc

SEQ ID NO: 3263417 - RNA, 20 nt, Vaccinia virus
ugcacgacuacuuuguuaau

SEQ ID NO: 3263418 - RNA, 21 nt, Vaccinia virus
aguacuuugaugauuuuucca

SEQ ID NO: 3263419 - RNA, 18 nt, Vaccinia virus
auuauuaaucauuaacuu

SEQ ID NO: 3263420 - RNA, 17 nt, Vaccinia virus
uuuagacgguugagaaa

SEQ ID NO: 3263421 - RNA, 20 nt, Vaccinia virus
cguuagccaccacuucucua

SEQ ID NO: 3263422 - RNA, 18 nt, Vaccinia virus
auucgacucaacauaaau

SEQ ID NO: 3263423 - RNA, 23 nt, Vaccinia virus
aucuauuagaagcugacaaaauu

SEQ ID NO: 3263424 - RNA, 17 nt, Vaccinia virus
aagcguguuauauauac

SEQ ID NO: 3263425 - RNA, 12 nt, Vaccinia virus
gagaauguuucc

SEQ ID NO: 3263426 - RNA, 19 nt, Vaccinia virus
auugguuuaugauguauaa

SEQ ID NO: 3263427 - RNA, 18 nt, Vaccinia virus
uuauacgguucugucauu

SEQ ID NO: 3263428 - RNA, 19 nt, Vaccinia virus
aauauucauuaauucuaua

SEQ ID NO: 3263429 - RNA, 13 nt, Vaccinia virus
auauaaaaaauuu

SEQ ID NO: 3263430 - RNA, 13 nt, Vaccinia virus
aauuuaaaauaua

SEQ ID NO: 3263431 - RNA, 21 nt, Vaccinia virus
cgagaauguugggauccagag

SEQ ID NO: 3263432 - RNA, 22 nt, Vaccinia virus
uauauugagaguguauccuuga

SEQ ID NO: 3263433 - RNA, 23 nt, Vaccinia virus
uuaaacagaaauauaugagaugu

SEQ ID NO: 3263434 - RNA, 14 nt, Vaccinia virus
auuucuuaauguaa

SEQ ID NO: 3263435 - RNA, 23 nt, Vaccinia virus
ggaguacccacugaugagauguu

SEQ ID NO: 3263436 - RNA, 23 nt, Vaccinia virus
cuguauuaaagauauuguuacac

SEQ ID NO: 3263437 - RNA, 15 nt, Vaccinia virus
auaagaugcaaacau

SEQ ID NO: 3263438 - RNA, 18 nt, Vaccinia virus
uauuauccaauuauuaua

SEQ ID NO: 3263439 - RNA, 22 nt, Vaccinia virus
aagaagaaauacuaaaaaaugu

SEQ ID NO: 3263440 - RNA, 23 nt, Vaccinia virus
augccuauaaaguaauaaucuuc

SEQ ID NO: 3263441 - RNA, 19 nt, Vaccinia virus
ucuuauuggucagaaauau

SEQ ID NO: 3263442 - RNA, 19 nt, Vaccinia virus
uagacacgacuaaacauuu

SEQ ID NO: 3263443 - RNA, 18 nt, Vaccinia virus
acgucauaaaaauguuua

SEQ ID NO: 3263444 - RNA, 20 nt, Vaccinia virus
ugaugaaguucgaugauguc

SEQ ID NO: 3263445 - RNA, 21 nt, Vaccinia virus
auaauccuaucuaagauguug

SEQ ID NO: 3263446 - RNA, 15 nt, Vaccinia virus
aacacucuuucugaa

SEQ ID NO: 3263447 - RNA, 19 nt, Vaccinia virus
uauguaccgcguuaucauc

SEQ ID NO: 3263448 - RNA, 13 nt, Vaccinia virus
agaucuaaauaca

SEQ ID NO: 3263449 - RNA, 16 nt, Vaccinia virus
ugaauggauacuaguu

SEQ ID NO: 3263450 - RNA, 18 nt, Vaccinia virus
uucugucgauauagcuuu

SEQ ID NO: 3263451 - RNA, 16 nt, Vaccinia virus
uaauccagucuuuaau

SEQ ID NO: 3263452 - RNA, 18 nt, Vaccinia virus
uuauguaaaacaaacuug

SEQ ID NO: 3263453 - RNA, 16 nt, Vaccinia virus
aauguagauaaucauu

SEQ ID NO: 3263454 - RNA, 20 nt, Vaccinia virus
uaauucuuuauaacugaacu

SEQ ID NO: 3263455 - RNA, 13 nt, Vaccinia virus
uaacacauauuca

SEQ ID NO: 3263456 - RNA, 15 nt, Vaccinia virus
ugguuuauauuacca

SEQ ID NO: 3263457 - RNA, 13 nt, Vaccinia virus
gaacuaauaugau

SEQ ID NO: 3263458 - RNA, 17 nt, Vaccinia virus
ugaauauaaaauaacua

SEQ ID NO: 3263459 - RNA, 23 nt, Vaccinia virus
acacuguucacauccuuccaaga

SEQ ID NO: 3263460 - RNA, 15 nt, Vaccinia virus
agacuguuuguagaa

SEQ ID NO: 3263461 - RNA, 16 nt, Vaccinia virus
uacauauuauacagua

SEQ ID NO: 3263462 - RNA, 17 nt, Vaccinia virus
uaacgguacucuagaau

SEQ ID NO: 3263463 - RNA, 18 nt, Vaccinia virus
caucaucgugacauaagu

SEQ ID NO: 3263464 - RNA, 17 nt, Vaccinia virus
ucgauugugauuguauu

SEQ ID NO: 3263465 - RNA, 18 nt, Vaccinia virus
caugggucauagaauuua

SEQ ID NO: 3263466 - RNA, 20 nt, Vaccinia virus
uaaucaaauuugguguuguu

SEQ ID NO: 3263467 - RNA, 21 nt, Vaccinia virus
aaauuuuacccgccuucgaau

SEQ ID NO: 3263468 - RNA, 17 nt, Vaccinia virus
uaaugacaauaauuaug

SEQ ID NO: 3263469 - RNA, 13 nt, Vaccinia virus
aaaauaaaguuau

SEQ ID NO: 3263470 - RNA, 13 nt, Vaccinia virus
caucaauauaaau

SEQ ID NO: 3263471 - RNA, 12 nt, Vaccinia virus
auaugacauaau

SEQ ID NO: 3263472 - RNA, 19 nt, Vaccinia virus
uuaaacuucgcaauauuca

SEQ ID NO: 3263473 - RNA, 20 nt, Vaccinia virus
auucgcaaacuauucuaaua

SEQ ID NO: 3263474 - RNA, 20 nt, Vaccinia virus
ucguauuuuuguuagaguau

SEQ ID NO: 3263475 - RNA, 14 nt, Vaccinia virus
aaucuaagaaauuu

SEQ ID NO: 3263476 - RNA, 16 nt, Vaccinia virus
auauaguucaaauuaa

SEQ ID NO: 3263477 - RNA, 22 nt, Vaccinia virus
uugguuguggaucuucuacaau

SEQ ID NO: 3263478 - RNA, 23 nt, Vaccinia virus
cuacaguaggcauaccauuagau

SEQ ID NO: 3263479 - RNA, 14 nt, Vaccinia virus
uaguuauuaaugau

SEQ ID NO: 3263480 - RNA, 19 nt, Vaccinia virus
aguaacacguuuuuuagau

SEQ ID NO: 3263481 - RNA, 21 nt, Vaccinia virus
auauuuguuccuguagauaau

SEQ ID NO: 3263482 - RNA, 19 nt, Vaccinia virus
aguaugaaguugaacuaau

SEQ ID NO: 3263483 - RNA, 13 nt, Vaccinia virus
auagaauaaauua

SEQ ID NO: 3263484 - RNA, 13 nt, Vaccinia virus
auaucuuauucca

SEQ ID NO: 3263485 - RNA, 14 nt, Vaccinia virus
uguacauuauuaca

SEQ ID NO: 3263486 - RNA, 15 nt, Vaccinia virus
gugagaagucuuuuu

SEQ ID NO: 3263487 - RNA, 17 nt, Vaccinia virus
uaacgaggauaaacuau

SEQ ID NO: 3263488 - RNA, 17 nt, Vaccinia virus
auuauccaucuaacaaa

SEQ ID NO: 3263489 - RNA, 16 nt, Vaccinia virus
augggucauagaauuu

SEQ ID NO: 3263490 - RNA, 23 nt, Vaccinia virus
guauucucagaguugacgaauau

SEQ ID NO: 3263491 - RNA, 19 nt, Vaccinia virus
auuaaauagaauauuuaac

SEQ ID NO: 3263492 - RNA, 18 nt, Vaccinia virus
aaugcuagaauuagaaaa

SEQ ID NO: 3263493 - RNA, 23 nt, Vaccinia virus
uuaguuucuauaucuacaucuau

SEQ ID NO: 3263494 - RNA, 22 nt, Vaccinia virus
guauauaucauuuguacauugu

SEQ ID NO: 3263495 - RNA, 13 nt, Vaccinia virus
gaaaaacacauuu

SEQ ID NO: 3263496 - RNA, 15 nt, Vaccinia virus
uagauuuuggauaau

SEQ ID NO: 3263497 - RNA, 22 nt, Vaccinia virus
uuauuucaaagacuaacuuaua

SEQ ID NO: 3263498 - RNA, 15 nt, Vaccinia virus
uguuacaacaucacg

SEQ ID NO: 3263499 - RNA, 16 nt, Vaccinia virus
uaguaaggcuuuagaa

SEQ ID NO: 3263500 - RNA, 21 nt, Vaccinia virus
cauuauaugggguuacucuaa

SEQ ID NO: 3263501 - RNA, 14 nt, Vaccinia virus
gaaugaauaugaau

SEQ ID NO: 3263502 - RNA, 22 nt, Vaccinia virus
aauucuuaguuauauauacucu

SEQ ID NO: 3263503 - RNA, 19 nt, Vaccinia virus
auuuaucgcuaacaugcau

SEQ ID NO: 3263504 - RNA, 16 nt, Vaccinia virus
ucgguucuuuaaaaga

SEQ ID NO: 3263505 - RNA, 18 nt, Vaccinia virus
gacucauuauuucccaaa

SEQ ID NO: 3263506 - RNA, 21 nt, Vaccinia virus
agaaauccaaauaaaauggau

SEQ ID NO: 3263507 - RNA, 14 nt, Vaccinia virus
cugauaagauaucu

SEQ ID NO: 3263508 - RNA, 22 nt, Vaccinia virus
guaaaauggccaagaaaauaga

SEQ ID NO: 3263509 - RNA, 19 nt, Vaccinia virus
auuacauccggcaaaaaua

SEQ ID NO: 3263510 - RNA, 21 nt, Vaccinia virus
auaucuuguuuagaaaaaugc

SEQ ID NO: 3263511 - RNA, 21 nt, Vaccinia virus
gaucauagaacagaccaaaua

SEQ ID NO: 3263512 - RNA, 19 nt, Vaccinia virus
augaacaaacgugggaaga

SEQ ID NO: 3263513 - RNA, 12 nt, Vaccinia virus
auuaaaaaagau

SEQ ID NO: 3263514 - RNA, 14 nt, Vaccinia virus
ucuccagaaaucug

SEQ ID NO: 3263515 - RNA, 16 nt, Vaccinia virus
auaccucuacacuauu

SEQ ID NO: 3263516 - RNA, 17 nt, Vaccinia virus
agucauagaaaaauaua

SEQ ID NO: 3263517 - RNA, 22 nt, Vaccinia virus
cuuuaacgcccuuguauguuuu

SEQ ID NO: 3263518 - RNA, 15 nt, Vaccinia virus
aaugcaaucaaugau

SEQ ID NO: 3263519 - RNA, 20 nt, Vaccinia virus
auugauuauuucaaagacua

SEQ ID NO: 3263520 - RNA, 23 nt, Vaccinia virus
uguauaugauguuucuguuuuca

SEQ ID NO: 3263521 - RNA, 12 nt, Vaccinia virus
aacuuaaaauau

SEQ ID NO: 3263522 - RNA, 19 nt, Vaccinia virus
aucuauacugcagaauaga

SEQ ID NO: 3263523 - RNA, 24 nt, Vaccinia virus
uugucuuuaaguauauacgauaag

SEQ ID NO: 3263524 - RNA, 19 nt, Vaccinia virus
aauauacgucguucuuauc

SEQ ID NO: 3263525 - RNA, 13 nt, Vaccinia virus
agaauaaaguaau

SEQ ID NO: 3263526 - RNA, 17 nt, Vaccinia virus
cucagugaauccaucuc

SEQ ID NO: 3263527 - RNA, 19 nt, Vaccinia virus
uugcuauccauuauucuuu

SEQ ID NO: 3263528 - RNA, 17 nt, Vaccinia virus
uuaucguuuucaucuuu

SEQ ID NO: 3263529 - RNA, 13 nt, Vaccinia virus
uaauagaacucuu

SEQ ID NO: 3263530 - RNA, 22 nt, Vaccinia virus
guagauaagaaugugauaagau

SEQ ID NO: 3263531 - RNA, 18 nt, Vaccinia virus
uacaacuggucauagaaa

SEQ ID NO: 3263532 - RNA, 21 nt, Vaccinia virus
uauauagagccaagacgaaca

SEQ ID NO: 3263533 - RNA, 23 nt, Vaccinia virus
uauagauggaggggauuggcauu

SEQ ID NO: 3263534 - RNA, 16 nt, Vaccinia virus
aggucagaaaaaauuu

SEQ ID NO: 3263535 - RNA, 20 nt, Vaccinia virus
uauaaacaucuugauacuuu

SEQ ID NO: 3263536 - RNA, 12 nt, Vaccinia virus
augguauauaca

SEQ ID NO: 3263537 - RNA, 18 nt, Vaccinia virus
guuauauuauuagauauc

SEQ ID NO: 3263538 - RNA, 18 nt, Vaccinia virus
guugauaaaauguugaua

SEQ ID NO: 3263539 - RNA, 18 nt, Vaccinia virus
agauggcguauuuaagag

SEQ ID NO: 3263540 - RNA, 13 nt, Vaccinia virus
aauuuuagauaau

SEQ ID NO: 3263541 - RNA, 13 nt, Vaccinia virus
auauauagaauua

SEQ ID NO: 3263542 - RNA, 15 nt, Vaccinia virus
uaaugauagaauuau

SEQ ID NO: 3263543 - RNA, 13 nt, Vaccinia virus
uaaaguuaucaug

SEQ ID NO: 3263544 - RNA, 17 nt, Vaccinia virus
uccauauuuuagaauau

SEQ ID NO: 3263545 - RNA, 21 nt, Vaccinia virus
uauuaucaggaacauuaucaa

SEQ ID NO: 3263546 - RNA, 18 nt, Vaccinia virus
gauagauuuaucuuuccu

SEQ ID NO: 3263547 - RNA, 15 nt, Vaccinia virus
auaacauugauguau

SEQ ID NO: 3263548 - RNA, 19 nt, Vaccinia virus
uuauuuagauacagaugua

SEQ ID NO: 3263549 - RNA, 23 nt, Vaccinia virus
gcuuaaaggaagaauaucauauu

SEQ ID NO: 3263550 - RNA, 17 nt, Vaccinia virus
gucgcacuauagaugca

SEQ ID NO: 3263551 - RNA, 19 nt, Vaccinia virus
acaacuuuuaaauacaaau

SEQ ID NO: 3263552 - RNA, 23 nt, Vaccinia virus
ucuagcuuauugaguggaaaguu

SEQ ID NO: 3263553 - RNA, 20 nt, Vaccinia virus
aucuuauucugguuuaaaaa

SEQ ID NO: 3263554 - RNA, 13 nt, Vaccinia virus
uuucuguaaugau

SEQ ID NO: 3263555 - RNA, 15 nt, Vaccinia virus
guuauaguagauauc

SEQ ID NO: 3263556 - RNA, 21 nt, Vaccinia virus
auuauucuuugauucgaauuu

SEQ ID NO: 3263557 - RNA, 19 nt, Vaccinia virus
agacacgaauaugacuaga

SEQ ID NO: 3263558 - RNA, 17 nt, Vaccinia virus
auucuguaaaaaaauua

SEQ ID NO: 3263559 - RNA, 15 nt, Vaccinia virus
agccugaaaaagaua

SEQ ID NO: 3263560 - RNA, 12 nt, Vaccinia virus
uaucacauauca

SEQ ID NO: 3263561 - RNA, 22 nt, Vaccinia virus
agacaaaacuauuccaauguuu

SEQ ID NO: 3263562 - RNA, 14 nt, Vaccinia virus
aauccaaucuaaga

SEQ ID NO: 3263563 - RNA, 17 nt, Vaccinia virus
cuaccguuguuaaauac

SEQ ID NO: 3263564 - RNA, 21 nt, Vaccinia virus
cgaaugccauagaauaaauau

SEQ ID NO: 3263565 - RNA, 17 nt, Vaccinia virus
auggagucauuucugau

SEQ ID NO: 3263566 - RNA, 16 nt, Vaccinia virus
gaaccaauuacugaua

SEQ ID NO: 3263567 - RNA, 19 nt, Vaccinia virus
aggaucuagcaaaggaaau

SEQ ID NO: 3263568 - RNA, 12 nt, Vaccinia virus
aauaaauaugug

SEQ ID NO: 3263569 - RNA, 15 nt, Vaccinia virus
ucuacgaagaaaguu

SEQ ID NO: 3263570 - RNA, 17 nt, Vaccinia virus
ccaacucauuuaaauau

SEQ ID NO: 3263571 - RNA, 15 nt, Vaccinia virus
uuagucagauuauua

SEQ ID NO: 3263572 - RNA, 18 nt, Vaccinia virus
uaacauguuacagaauau

SEQ ID NO: 3263573 - RNA, 21 nt, Vaccinia virus
gagcuaaacacauuagauauu

SEQ ID NO: 3263574 - RNA, 23 nt, Vaccinia virus
uagacauaccggaucuacguucu

SEQ ID NO: 3263575 - RNA, 22 nt, Vaccinia virus
cuauaaacgaugguuuaauuug

SEQ ID NO: 3263576 - RNA, 15 nt, Vaccinia virus
ucaaauuagauuucg

SEQ ID NO: 3263577 - RNA, 13 nt, Vaccinia virus
guuacaaauguag

SEQ ID NO: 3263578 - RNA, 20 nt, Vaccinia virus
uugcuuugguuuaauuauuu

SEQ ID NO: 3263579 - RNA, 17 nt, Vaccinia virus
guuuauggaucuauuca

SEQ ID NO: 3263580 - RNA, 17 nt, Vaccinia virus
gaauauaaauuauauau

SEQ ID NO: 3263581 - RNA, 14 nt, Vaccinia virus
acuaauaauaauua

SEQ ID NO: 3263582 - RNA, 13 nt, Vaccinia virus
uuguacauuauua

SEQ ID NO: 3263583 - RNA, 14 nt, Vaccinia virus
aucgauacgcauuu

SEQ ID NO: 3263584 - RNA, 15 nt, Vaccinia virus
agauggauaaaacuu

SEQ ID NO: 3263585 - RNA, 23 nt, Vaccinia virus
auucucuuacaaauauucacaag

SEQ ID NO: 3263586 - RNA, 16 nt, Vaccinia virus
auguuuccgagaaaua

SEQ ID NO: 3263587 - RNA, 11 nt, Vaccinia virus
ucacaauaaaa

SEQ ID NO: 3263588 - RNA, 17 nt, Vaccinia virus
aguuuuaaaaauacuua

SEQ ID NO: 3263589 - RNA, 19 nt, Vaccinia virus
agucauggcgacuaaauua

SEQ ID NO: 3263590 - RNA, 19 nt, Vaccinia virus
uguaauggaugucaugaac

SEQ ID NO: 3263591 - RNA, 12 nt, Vaccinia virus
cacuaucuucug

SEQ ID NO: 3263592 - RNA, 20 nt, Vaccinia virus
caaaaccaacacuuaucaau

SEQ ID NO: 3263593 - RNA, 19 nt, Vaccinia virus
cuuuucaauguuuaauuuu

SEQ ID NO: 3263594 - RNA, 23 nt, Vaccinia virus
auagagguguuuuauuauguuua

SEQ ID NO: 3263595 - RNA, 17 nt, Vaccinia virus
ucguauguagaaauuuu

SEQ ID NO: 3263596 - RNA, 18 nt, Vaccinia virus
guuuaaagauuucuuuuu

SEQ ID NO: 3263597 - RNA, 12 nt, Vaccinia virus
ucucaauacuaa

SEQ ID NO: 3263598 - RNA, 18 nt, Vaccinia virus
augcuauaccuaauacua

SEQ ID NO: 3263599 - RNA, 22 nt, Vaccinia virus
gccauuuguagucuuucaacau

SEQ ID NO: 3263600 - RNA, 17 nt, Vaccinia virus
uaauucuucuacugcau

SEQ ID NO: 3263601 - RNA, 23 nt, Vaccinia virus
aaggaugcaaacuuacagaaaca

SEQ ID NO: 3263602 - RNA, 15 nt, Vaccinia virus
ucaguaucuucagac

SEQ ID NO: 3263603 - RNA, 16 nt, Vaccinia virus
auacucuauucgaaaa

SEQ ID NO: 3263604 - RNA, 14 nt, Vaccinia virus
ucuugcuacaaaau

SEQ ID NO: 3263605 - RNA, 15 nt, Vaccinia virus
uaauuaaucuaaaau

SEQ ID NO: 3263606 - RNA, 14 nt, Vaccinia virus
uccauaaacugaua

SEQ ID NO: 3263607 - RNA, 16 nt, Vaccinia virus
uucccauguacgacga

SEQ ID NO: 3263608 - RNA, 19 nt, Vaccinia virus
gcuguuccucuguaaauaa

SEQ ID NO: 3263609 - RNA, 17 nt, Vaccinia virus
agaauauccucuagaga

SEQ ID NO: 3263610 - RNA, 12 nt, Vaccinia virus
aucauguagaaa

SEQ ID NO: 3263611 - RNA, 13 nt, Vaccinia virus
aacagaaaaaaca

SEQ ID NO: 3263612 - RNA, 16 nt, Vaccinia virus
auaaaaauaacaauua

SEQ ID NO: 3263613 - RNA, 22 nt, Vaccinia virus
agaugauuuggcuauuaaacag

SEQ ID NO: 3263614 - RNA, 17 nt, Vaccinia virus
aucucuuuuuuaacuaa

SEQ ID NO: 3263615 - RNA, 17 nt, Vaccinia virus
auucuauggaugaugcu

SEQ ID NO: 3263616 - RNA, 21 nt, Vaccinia virus
aagacgaggagauuuagaaau

SEQ ID NO: 3263617 - RNA, 19 nt, Vaccinia virus
aaagcugggggauguucug

SEQ ID NO: 3263618 - RNA, 16 nt, Vaccinia virus
aguauguuugacuuua

SEQ ID NO: 3263619 - RNA, 14 nt, Vaccinia virus
cucaucuuucccaa

SEQ ID NO: 3263620 - RNA, 22 nt, Vaccinia virus
cauuuauuggagacguaacaau

SEQ ID NO: 3263621 - RNA, 15 nt, Vaccinia virus
cguuuaaacagaauu

SEQ ID NO: 3263622 - RNA, 17 nt, Vaccinia virus
aaggacaguuaaaacua

SEQ ID NO: 3263623 - RNA, 13 nt, Vaccinia virus
uaauauaauauua

SEQ ID NO: 3263624 - RNA, 22 nt, Vaccinia virus
auacguacugucuauaaugaca

SEQ ID NO: 3263625 - RNA, 22 nt, Vaccinia virus
aauaaauggagaauaauuggaa

SEQ ID NO: 3263626 - RNA, 23 nt, Vaccinia virus
aaguuagaagagucauuaaaaua

SEQ ID NO: 3263627 - RNA, 19 nt, Vaccinia virus
auaaaggaauaaaauauga

SEQ ID NO: 3263628 - RNA, 23 nt, Vaccinia virus
uauuacaaaauauuuugagacuc

SEQ ID NO: 3263629 - RNA, 22 nt, Vaccinia virus
aaccucacuguuaaaaauaugu

SEQ ID NO: 3263630 - RNA, 21 nt, Vaccinia virus
agaauuuaccagauaucuucu

SEQ ID NO: 3263631 - RNA, 21 nt, Vaccinia virus
gucgucguuuuuugaucuuua

SEQ ID NO: 3263632 - RNA, 19 nt, Vaccinia virus
auuuacauucuuuuugcug

SEQ ID NO: 3263633 - RNA, 15 nt, Vaccinia virus
ccuucguuguuucua

SEQ ID NO: 3263634 - RNA, 18 nt, Vaccinia virus
uuaaugaauaucauuaac

SEQ ID NO: 3263635 - RNA, 16 nt, Vaccinia virus
uaaagaauaucuuugg

SEQ ID NO: 3263636 - RNA, 19 nt, Vaccinia virus
caauaguuucauaauuguu

SEQ ID NO: 3263637 - RNA, 13 nt, Vaccinia virus
uaacaaauuaaag

SEQ ID NO: 3263638 - RNA, 21 nt, Vaccinia virus
augguacguaaccgaaucuuc

SEQ ID NO: 3263639 - RNA, 18 nt, Vaccinia virus
gauucgguuuuauacugu

SEQ ID NO: 3263640 - RNA, 21 nt, Vaccinia virus
agacaauugacaaaauucaca

SEQ ID NO: 3263641 - RNA, 21 nt, Vaccinia virus
acguaacuauauuccaaauua

SEQ ID NO: 3263642 - RNA, 15 nt, Vaccinia virus
caacauguuuaauau

SEQ ID NO: 3263643 - RNA, 19 nt, Vaccinia virus
auuguagcuauuuaaaugg

SEQ ID NO: 3263644 - RNA, 15 nt, Vaccinia virus
auuuuaucuuuuacu

SEQ ID NO: 3263645 - RNA, 17 nt, Vaccinia virus
cgcaucaggauauaaag

SEQ ID NO: 3263646 - RNA, 20 nt, Vaccinia virus
aggacaaagugaaacaauca

SEQ ID NO: 3263647 - RNA, 15 nt, Vaccinia virus
ccugauuauuuacua

SEQ ID NO: 3263648 - RNA, 19 nt, Vaccinia virus
aaaaacugcguuguaucau

SEQ ID NO: 3263649 - RNA, 15 nt, Vaccinia virus
ucuauaagguuucuu

SEQ ID NO: 3263650 - RNA, 14 nt, Vaccinia virus
cauuacuaaaaaaa

SEQ ID NO: 3263651 - RNA, 14 nt, Vaccinia virus
acaucuaaaaaugu

SEQ ID NO: 3263652 - RNA, 15 nt, Vaccinia virus
cuuccaguucuggau

SEQ ID NO: 3263653 - RNA, 17 nt, Vaccinia virus
aacaugugugaaaauau

SEQ ID NO: 3263654 - RNA, 23 nt, Vaccinia virus
uaaacggcaaaccaaaaacauuu

SEQ ID NO: 3263655 - RNA, 20 nt, Vaccinia virus
uagauguuaaaaaaacaucg

SEQ ID NO: 3263656 - RNA, 13 nt, Vaccinia virus
auuggaauuauuu

SEQ ID NO: 3263657 - RNA, 16 nt, Vaccinia virus
aaucuauucccuugau

SEQ ID NO: 3263658 - RNA, 14 nt, Vaccinia virus
acagaaguuuugaa

SEQ ID NO: 3263659 - RNA, 17 nt, Vaccinia virus
uacguaauaaaaguaau

SEQ ID NO: 3263660 - RNA, 16 nt, Vaccinia virus
aauaucaguaucuucu

SEQ ID NO: 3263661 - RNA, 19 nt, Vaccinia virus
aaguauagcuaaugaugcg

SEQ ID NO: 3263662 - RNA, 19 nt, Vaccinia virus
ggcuugcauguauuaaaga

SEQ ID NO: 3263663 - RNA, 19 nt, Vaccinia virus
uacgcauguuuuaaugcau

SEQ ID NO: 3263664 - RNA, 16 nt, Vaccinia virus
ucuucggauauucuaa

SEQ ID NO: 3263665 - RNA, 13 nt, Vaccinia virus
cauauuacauaau

SEQ ID NO: 3263666 - RNA, 20 nt, Vaccinia virus
agcauagcgauagaucuuaa

SEQ ID NO: 3263667 - RNA, 12 nt, Vaccinia virus
uuccucauuaag

SEQ ID NO: 3263668 - RNA, 12 nt, Vaccinia virus
uaucguuuucau

SEQ ID NO: 3263669 - RNA, 17 nt, Vaccinia virus
aucagcuuuaguuuaua

SEQ ID NO: 3263670 - RNA, 23 nt, Vaccinia virus
agcauuucugucgauauagcuuu

SEQ ID NO: 3263671 - RNA, 19 nt, Vaccinia virus
ggcuacggcagauauaccu

SEQ ID NO: 3263672 - RNA, 12 nt, Vaccinia virus
auuuuagaauuu

SEQ ID NO: 3263673 - RNA, 22 nt, Vaccinia virus
agaaggguucgauuaucuguau

SEQ ID NO: 3263674 - RNA, 19 nt, Vaccinia virus
uaaagcauauuccauuaau

SEQ ID NO: 3263675 - RNA, 18 nt, Vaccinia virus
cagaaacuguaaagaaca

SEQ ID NO: 3263676 - RNA, 18 nt, Vaccinia virus
ucauaauguaaucucuaa

SEQ ID NO: 3263677 - RNA, 17 nt, Vaccinia virus
cuucuauaaaaauggau

SEQ ID NO: 3263678 - RNA, 13 nt, Vaccinia virus
augcuaaagcaaa

SEQ ID NO: 3263679 - RNA, 17 nt, Vaccinia virus
uuccaccgacucauuau

SEQ ID NO: 3263680 - RNA, 18 nt, Vaccinia virus
aauaucuccucaaggaau

SEQ ID NO: 3263681 - RNA, 14 nt, Vaccinia virus
uucaucauccauga

SEQ ID NO: 3263682 - RNA, 19 nt, Vaccinia virus
uaaauuauuuaauggagua

SEQ ID NO: 3263683 - RNA, 16 nt, Vaccinia virus
aauuauaagaaauaua

SEQ ID NO: 3263684 - RNA, 18 nt, Vaccinia virus
aucuauauacgauccacg

SEQ ID NO: 3263685 - RNA, 14 nt, Vaccinia virus
acauguuuaauaua

SEQ ID NO: 3263686 - RNA, 20 nt, Vaccinia virus
auccguguuaaaaaaaauua

SEQ ID NO: 3263687 - RNA, 17 nt, Vaccinia virus
ugguuguggaucuucua

SEQ ID NO: 3263688 - RNA, 14 nt, Vaccinia virus
auugacagauagau

SEQ ID NO: 3263689 - RNA, 22 nt, Vaccinia virus
acucaugaaucuaaaagaauug

SEQ ID NO: 3263690 - RNA, 14 nt, Vaccinia virus
caaacaauguuucu

SEQ ID NO: 3263691 - RNA, 21 nt, Vaccinia virus
uaguucuuuuagaaaauucua

SEQ ID NO: 3263692 - RNA, 16 nt, Vaccinia virus
uaacauucugauuuaa

SEQ ID NO: 3263693 - RNA, 15 nt, Vaccinia virus
uuaauauuagaguua

SEQ ID NO: 3263694 - RNA, 21 nt, Vaccinia virus
ugaggaaugauugccuucauc

SEQ ID NO: 3263695 - RNA, 14 nt, Vaccinia virus
auauagaugucaau

SEQ ID NO: 3263696 - RNA, 15 nt, Vaccinia virus
ucucaauacaaccaa

SEQ ID NO: 3263697 - RNA, 23 nt, Vaccinia virus
aauaauggcuguuuguauaauag

SEQ ID NO: 3263698 - RNA, 23 nt, Vaccinia virus
uguuuaacauucuuuuuuggaga

SEQ ID NO: 3263699 - RNA, 23 nt, Vaccinia virus
acucgauaacacauuuucaucua

SEQ ID NO: 3263700 - RNA, 17 nt, Vaccinia virus
uguuuauacaagauuga

SEQ ID NO: 3263701 - RNA, 22 nt, Vaccinia virus
uauauaauuuuuggacaaaugu

SEQ ID NO: 3263702 - RNA, 20 nt, Vaccinia virus
augaugugagagagaaauac

SEQ ID NO: 3263703 - RNA, 13 nt, Vaccinia virus
uugcuaauuauuu

SEQ ID NO: 3263704 - RNA, 19 nt, Vaccinia virus
aaucaccauccuuuaaaaa

SEQ ID NO: 3263705 - RNA, 15 nt, Vaccinia virus
uagcaauauguguaa

SEQ ID NO: 3263706 - RNA, 20 nt, Vaccinia virus
gauucaucaacauuugcugu

SEQ ID NO: 3263707 - RNA, 12 nt, Vaccinia virus
aauguauaacag

SEQ ID NO: 3263708 - RNA, 23 nt, Vaccinia virus
uguaucaaagacauuaauacuuu

SEQ ID NO: 3263709 - RNA, 22 nt, Vaccinia virus
aaugcagaucuaauaaauggag

SEQ ID NO: 3263710 - RNA, 16 nt, Vaccinia virus
ugacgcuuucaagaau

SEQ ID NO: 3263711 - RNA, 19 nt, Vaccinia virus
aguagaaaauaauauagau

SEQ ID NO: 3263712 - RNA, 12 nt, Vaccinia virus
gaaugucaugau

SEQ ID NO: 3263713 - RNA, 15 nt, Vaccinia virus
acauauuauacagua

SEQ ID NO: 3263714 - RNA, 15 nt, Vaccinia virus
auuggcuuuucuuua

SEQ ID NO: 3263715 - RNA, 17 nt, Vaccinia virus
cugauagaaagaauaag

SEQ ID NO: 3263716 - RNA, 13 nt, Vaccinia virus
uaucauuaaugau

SEQ ID NO: 3263717 - RNA, 14 nt, Vaccinia virus
uacguaucuauaau

SEQ ID NO: 3263718 - RNA, 14 nt, Vaccinia virus
guuauaaucaaaga

SEQ ID NO: 3263719 - RNA, 18 nt, Vaccinia virus
auaauagauuuaucuagu

SEQ ID NO: 3263720 - RNA, 12 nt, Vaccinia virus
aucaauagcuua

SEQ ID NO: 3263721 - RNA, 16 nt, Vaccinia virus
aaucuugauuacaaaa

SEQ ID NO: 3263722 - RNA, 18 nt, Vaccinia virus
caugcucuauuuugucau

SEQ ID NO: 3263723 - RNA, 15 nt, Vaccinia virus
cacguuuauuucaua

SEQ ID NO: 3263724 - RNA, 12 nt, Vaccinia virus
aggaaacuauaa

SEQ ID NO: 3263725 - RNA, 15 nt, Vaccinia virus
aaagacaaacaaugg

SEQ ID NO: 3263726 - RNA, 16 nt, Vaccinia virus
uuggaaucaauuacag

SEQ ID NO: 3263727 - RNA, 17 nt, Vaccinia virus
guaaauguuuuuaucau

SEQ ID NO: 3263728 - RNA, 22 nt, Vaccinia virus
aauguauuaguuaaauauuaaa

SEQ ID NO: 3263729 - RNA, 12 nt, Vaccinia virus
aaacaaaaaugc

SEQ ID NO: 3263730 - RNA, 17 nt, Vaccinia virus
uccacguucuacaaaag

SEQ ID NO: 3263731 - RNA, 23 nt, Vaccinia virus
acuagauaaacuaucaguaaguu

SEQ ID NO: 3263732 - RNA, 22 nt, Vaccinia virus
guaauagaauacgaugauauua

SEQ ID NO: 3263733 - RNA, 14 nt, Vaccinia virus
aaguacagaauuaa

SEQ ID NO: 3263734 - RNA, 12 nt, Vaccinia virus
cauuuaucacaa

SEQ ID NO: 3263735 - RNA, 19 nt, Vaccinia virus
aacuuguguucuaaaugga

SEQ ID NO: 3263736 - RNA, 21 nt, Vaccinia virus
uauuuggauuuggaaaagaaa

SEQ ID NO: 3263737 - RNA, 17 nt, Vaccinia virus
auaucagacgauccaca

SEQ ID NO: 3263738 - RNA, 23 nt, Vaccinia virus
cugauguaacccacguaacauug

SEQ ID NO: 3263739 - RNA, 20 nt, Vaccinia virus
uuuaccggcaucauaaacac

SEQ ID NO: 3263740 - RNA, 15 nt, Vaccinia virus
uaaacgauauucuug

SEQ ID NO: 3263741 - RNA, 15 nt, Vaccinia virus
uaaucuuuaauguaa

SEQ ID NO: 3263742 - RNA, 16 nt, Vaccinia virus
uaucggaggaauuaag

SEQ ID NO: 3263743 - RNA, 21 nt, Vaccinia virus
cguaaaccguuuaauaauauu

SEQ ID NO: 3263744 - RNA, 22 nt, Vaccinia virus
gaaaauguacuucgaugagauu

SEQ ID NO: 3263745 - RNA, 17 nt, Vaccinia virus
agacucaucaacgauga

SEQ ID NO: 3263746 - RNA, 21 nt, Vaccinia virus
uguuauacacggucuagagca

SEQ ID NO: 3263747 - RNA, 23 nt, Vaccinia virus
ggaaaagaauuuaccagauaucu

SEQ ID NO: 3263748 - RNA, 16 nt, Vaccinia virus
gacuacgaaacugaua

SEQ ID NO: 3263749 - RNA, 16 nt, Vaccinia virus
cucucuauuucuuaau

SEQ ID NO: 3263750 - RNA, 18 nt, Vaccinia virus
ccaauaaacuauuucuaa

SEQ ID NO: 3263751 - RNA, 16 nt, Vaccinia virus
auagagaugagaugcu

SEQ ID NO: 3263752 - RNA, 18 nt, Vaccinia virus
agaucuaugauaucuucu

SEQ ID NO: 3263753 - RNA, 14 nt, Vaccinia virus
gaagaaauaaaggc

SEQ ID NO: 3263754 - RNA, 21 nt, Vaccinia virus
uggagaucauuaaauguuuca

SEQ ID NO: 3263755 - RNA, 19 nt, Vaccinia virus
cacuaaucguaauauucua

SEQ ID NO: 3263756 - RNA, 14 nt, Vaccinia virus
aggaaauaucaauu

SEQ ID NO: 3263757 - RNA, 15 nt, Vaccinia virus
ucaucgugacauaag

SEQ ID NO: 3263758 - RNA, 17 nt, Vaccinia virus
auguauguuuaaacacu

SEQ ID NO: 3263759 - RNA, 16 nt, Vaccinia virus
auaucguucucuaaau

SEQ ID NO: 3263760 - RNA, 18 nt, Vaccinia virus
auuaucaucaaaaaacaa

SEQ ID NO: 3263761 - RNA, 19 nt, Vaccinia virus
caaaacguccucuauacau

SEQ ID NO: 3263762 - RNA, 13 nt, Vaccinia virus
uaucuauacauac

SEQ ID NO: 3263763 - RNA, 15 nt, Vaccinia virus
aguaacgcaauacaa

SEQ ID NO: 3263764 - RNA, 21 nt, Vaccinia virus
uaaaguaugaacaaagaaaug

SEQ ID NO: 3263765 - RNA, 17 nt, Vaccinia virus
acauaacagguagaauu

SEQ ID NO: 3263766 - RNA, 15 nt, Vaccinia virus
cgugauguuguaaca

SEQ ID NO: 3263767 - RNA, 15 nt, Vaccinia virus
guaggauauauuaaa

SEQ ID NO: 3263768 - RNA, 20 nt, Vaccinia virus
ugacauuuuccuuguaucca

SEQ ID NO: 3263769 - RNA, 20 nt, Vaccinia virus
auaugauguuucuguuuuca

SEQ ID NO: 3263770 - RNA, 18 nt, Vaccinia virus
auuuuagcagugaaauaa

SEQ ID NO: 3263771 - RNA, 21 nt, Vaccinia virus
auugguucauacaugaaauga

SEQ ID NO: 3263772 - RNA, 20 nt, Vaccinia virus
cuauaaaaagauuauacaaa

SEQ ID NO: 3263773 - RNA, 14 nt, Vaccinia virus
gaauagauaauaau

SEQ ID NO: 3263774 - RNA, 22 nt, Vaccinia virus
ucucaaagauguuaugguugaa

SEQ ID NO: 3263775 - RNA, 15 nt, Vaccinia virus
uguuaauacaucaau

SEQ ID NO: 3263776 - RNA, 17 nt, Vaccinia virus
auauccagugcauuucu

SEQ ID NO: 3263777 - RNA, 17 nt, Vaccinia virus
agcacauccaucaaaga

SEQ ID NO: 3263778 - RNA, 15 nt, Vaccinia virus
aaagaaguuauagaa

SEQ ID NO: 3263779 - RNA, 16 nt, Vaccinia virus
uuguauuauucugaau

SEQ ID NO: 3263780 - RNA, 19 nt, Vaccinia virus
augguucccauaaguuugg

SEQ ID NO: 3263781 - RNA, 13 nt, Vaccinia virus
ucucuaguuuuau

SEQ ID NO: 3263782 - RNA, 19 nt, Vaccinia virus
ugguuguagcgguuggaua

SEQ ID NO: 3263783 - RNA, 15 nt, Vaccinia virus
guuaaugaacaaauc

SEQ ID NO: 3263784 - RNA, 13 nt, Vaccinia virus
aucaacuauccuc

SEQ ID NO: 3263785 - RNA, 19 nt, Vaccinia virus
uugccaucacucucauaau

SEQ ID NO: 3263786 - RNA, 13 nt, Vaccinia virus
uaaaugaaaagau

SEQ ID NO: 3263787 - RNA, 13 nt, Vaccinia virus
auguggaauuaug

SEQ ID NO: 3263788 - RNA, 22 nt, Vaccinia virus
aaucuuuagacgguugagaaaa

SEQ ID NO: 3263789 - RNA, 16 nt, Vaccinia virus
aggauacucuaugaau

SEQ ID NO: 3263790 - RNA, 18 nt, Vaccinia virus
uccaucagaauguuuccc

SEQ ID NO: 3263791 - RNA, 13 nt, Vaccinia virus
aaucauugauaca

SEQ ID NO: 3263792 - RNA, 16 nt, Vaccinia virus
ucaacauaaauaauuc

SEQ ID NO: 3263793 - RNA, 18 nt, Vaccinia virus
aggauaccgaagaauuaa

SEQ ID NO: 3263794 - RNA, 20 nt, Vaccinia virus
aaaguuuucuuucaaaauag

SEQ ID NO: 3263795 - RNA, 17 nt, Vaccinia virus
caggauacuaugcuauu

SEQ ID NO: 3263796 - RNA, 22 nt, Vaccinia virus
aucguuuaaaauacuaaauuga

SEQ ID NO: 3263797 - RNA, 14 nt, Vaccinia virus
uaguuuguuuucau

SEQ ID NO: 3263798 - RNA, 17 nt, Vaccinia virus
auccucgcuuuguguau

SEQ ID NO: 3263799 - RNA, 15 nt, Vaccinia virus
ucucuucaacaucuu

SEQ ID NO: 3263800 - RNA, 16 nt, Vaccinia virus
aacuuggggagaauga

SEQ ID NO: 3263801 - RNA, 22 nt, Vaccinia virus
aaaaguuuuccaucuauguaga

SEQ ID NO: 3263802 - RNA, 18 nt, Vaccinia virus
auaacacaaaaugugaac

SEQ ID NO: 3263803 - RNA, 18 nt, Vaccinia virus
cuuuaacuuuauacuuuu

SEQ ID NO: 3263804 - RNA, 18 nt, Vaccinia virus
gcguaaaagucaaauuag

SEQ ID NO: 3263805 - RNA, 20 nt, Vaccinia virus
augcuguuuuuuacuuugug

SEQ ID NO: 3263806 - RNA, 13 nt, Vaccinia virus
aucauauauaaug

SEQ ID NO: 3263807 - RNA, 14 nt, Vaccinia virus
agauuuuacuaacu

SEQ ID NO: 3263808 - RNA, 14 nt, Vaccinia virus
caaccggauuuaaa

SEQ ID NO: 3263809 - RNA, 22 nt, Vaccinia virus
cauaucuauccauaugcaucuu

SEQ ID NO: 3263810 - RNA, 11 nt, Vaccinia virus
aacaaaacaau

SEQ ID NO: 3263811 - RNA, 14 nt, Vaccinia virus
uuuuuaaaaucauu

SEQ ID NO: 3263812 - RNA, 18 nt, Vaccinia virus
aaaaauguuaauuuugaa

SEQ ID NO: 3263813 - RNA, 12 nt, Vaccinia virus
aauaguuucaua

SEQ ID NO: 3263814 - RNA, 14 nt, Vaccinia virus
gaaauggauaauau

SEQ ID NO: 3263815 - RNA, 17 nt, Vaccinia virus
cacaaugauaacaucca

SEQ ID NO: 3263816 - RNA, 14 nt, Vaccinia virus
gauuccaacagcug

SEQ ID NO: 3263817 - RNA, 14 nt, Vaccinia virus
acaauuuuguauua

SEQ ID NO: 3263818 - RNA, 20 nt, Vaccinia virus
ucgaaaucgcgacuccggaa

SEQ ID NO: 3263819 - RNA, 23 nt, Vaccinia virus
auacauaugguacgauguuguaa

SEQ ID NO: 3263820 - RNA, 19 nt, Vaccinia virus
uaguagauuuuuaagcugu

SEQ ID NO: 3263821 - RNA, 14 nt, Vaccinia virus
cguaaauacauguc

SEQ ID NO: 3263822 - RNA, 17 nt, Vaccinia virus
auuagcguauugagaag

SEQ ID NO: 3263823 - RNA, 22 nt, Vaccinia virus
ucauccgauaaacuccaauaaa

SEQ ID NO: 3263824 - RNA, 13 nt, Vaccinia virus
gcgcuaucuuuca

SEQ ID NO: 3263825 - RNA, 16 nt, Vaccinia virus
ugaucaggaaaguuua

SEQ ID NO: 3263826 - RNA, 14 nt, Vaccinia virus
auaggaucaucuau

SEQ ID NO: 3263827 - RNA, 15 nt, Vaccinia virus
aauguauuaagauua

SEQ ID NO: 3263828 - RNA, 19 nt, Vaccinia virus
auaguacuacaauuuguau

SEQ ID NO: 3263829 - RNA, 15 nt, Vaccinia virus
uaaauaaauaauguu

SEQ ID NO: 3263830 - RNA, 14 nt, Vaccinia virus
gaaaaaaauaucua

SEQ ID NO: 3263831 - RNA, 23 nt, Vaccinia virus
auuacgaaucauuaaaaaaauua

SEQ ID NO: 3263832 - RNA, 18 nt, Vaccinia virus
aaggacagaaaaaugcua

SEQ ID NO: 3263833 - RNA, 16 nt, Vaccinia virus
aagcaauaaauacaga

SEQ ID NO: 3263834 - RNA, 20 nt, Vaccinia virus
acuuagucuguacaaaaguu

SEQ ID NO: 3263835 - RNA, 17 nt, Vaccinia virus
cgacaaaaagauauaaa

SEQ ID NO: 3263836 - RNA, 13 nt, Vaccinia virus
cuaauucuuuaau

SEQ ID NO: 3263837 - RNA, 23 nt, Vaccinia virus
caaacugcguuaauguauucucu

SEQ ID NO: 3263838 - RNA, 16 nt, Vaccinia virus
agaaccaguaacauau

SEQ ID NO: 3263839 - RNA, 16 nt, Vaccinia virus
aaaaucugauagaaag

SEQ ID NO: 3263840 - RNA, 18 nt, Vaccinia virus
acuaauuuuuauuaauga

SEQ ID NO: 3263841 - RNA, 21 nt, Vaccinia virus
aaauuggaaggauauacaaag

SEQ ID NO: 3263842 - RNA, 18 nt, Vaccinia virus
uagucguuuauuaucuug

SEQ ID NO: 3263843 - RNA, 22 nt, Vaccinia virus
caaaacguaaucauagaugaau

SEQ ID NO: 3263844 - RNA, 21 nt, Vaccinia virus
aucaacguagaaaaaauagaa

SEQ ID NO: 3263845 - RNA, 14 nt, Vaccinia virus
uaucaaauacugua

SEQ ID NO: 3263846 - RNA, 22 nt, Vaccinia virus
cugcuggaaaauaaaucacuga

SEQ ID NO: 3263847 - RNA, 14 nt, Vaccinia virus
uaagcaagaaagau

SEQ ID NO: 3263848 - RNA, 17 nt, Vaccinia virus
acuauugccaucgaaug

SEQ ID NO: 3263849 - RNA, 20 nt, Vaccinia virus
auuuacuaaagucaucaaug

SEQ ID NO: 3263850 - RNA, 14 nt, Vaccinia virus
acauuuuauuucua

SEQ ID NO: 3263851 - RNA, 20 nt, Vaccinia virus
uaacaucuuuguaaacagau

SEQ ID NO: 3263852 - RNA, 19 nt, Vaccinia virus
aaauguauaaaaaacuaau

SEQ ID NO: 3263853 - RNA, 14 nt, Vaccinia virus
aaaaaucuuuguuc

SEQ ID NO: 3263854 - RNA, 15 nt, Vaccinia virus
uaacaucacuaauau

SEQ ID NO: 3263855 - RNA, 14 nt, Vaccinia virus
gaucaacaaaagaa

SEQ ID NO: 3263856 - RNA, 19 nt, Vaccinia virus
agguuuuuuaaaacagaug

SEQ ID NO: 3263857 - RNA, 20 nt, Vaccinia virus
aaacucuguuguauaucuac

SEQ ID NO: 3263858 - RNA, 15 nt, Vaccinia virus
cauagaugaaauacu

SEQ ID NO: 3263859 - RNA, 21 nt, Vaccinia virus
uuauuggcguuggaaaaauua

SEQ ID NO: 3263860 - RNA, 17 nt, Vaccinia virus
auaauauccgaauauau

SEQ ID NO: 3263861 - RNA, 15 nt, Vaccinia virus
caaaauacaauuguu

SEQ ID NO: 3263862 - RNA, 18 nt, Vaccinia virus
aaauucggacuuggauuc

SEQ ID NO: 3263863 - RNA, 16 nt, Vaccinia virus
uagaugcgucuagaag

SEQ ID NO: 3263864 - RNA, 20 nt, Vaccinia virus
aucaaaugguaaauacugua

SEQ ID NO: 3263865 - RNA, 17 nt, Vaccinia virus
agaaacaucauauacaa

SEQ ID NO: 3263866 - RNA, 13 nt, Vaccinia virus
uauuccuaccaaa

SEQ ID NO: 3263867 - RNA, 14 nt, Vaccinia virus
aacgaaauuauacu

SEQ ID NO: 3263868 - RNA, 20 nt, Vaccinia virus
uagaaauucaucaauaucca

SEQ ID NO: 3263869 - RNA, 20 nt, Vaccinia virus
aucugaaauaacauauagau

SEQ ID NO: 3263870 - RNA, 14 nt, Vaccinia virus
cacgaacaucuuuc

SEQ ID NO: 3263871 - RNA, 13 nt, Vaccinia virus
auguauaaaugaa

SEQ ID NO: 3263872 - RNA, 20 nt, Vaccinia virus
auauacgaaauaaaauagac

SEQ ID NO: 3263873 - RNA, 20 nt, Vaccinia virus
aucuauuaaacagaaauggu

SEQ ID NO: 3263874 - RNA, 20 nt, Vaccinia virus
uauugcuuuccuuuaucauu

SEQ ID NO: 3263875 - RNA, 19 nt, Vaccinia virus
ugucucuuaacuauuuccg

SEQ ID NO: 3263876 - RNA, 19 nt, Vaccinia virus
aguuuaucaauaacuacau

SEQ ID NO: 3263877 - RNA, 15 nt, Vaccinia virus
aagguaagaguuaug

SEQ ID NO: 3263878 - RNA, 22 nt, Vaccinia virus
auguuacagaauauaaauuaua

SEQ ID NO: 3263879 - RNA, 16 nt, Vaccinia virus
uauaugccacguuuau

SEQ ID NO: 3263880 - RNA, 19 nt, Vaccinia virus
ucuucguacgauccaaauu

SEQ ID NO: 3263881 - RNA, 20 nt, Vaccinia virus
uaacguauucgauacauuuu

SEQ ID NO: 3263882 - RNA, 18 nt, Vaccinia virus
agaacuuacgauacaucu

SEQ ID NO: 3263883 - RNA, 13 nt, Vaccinia virus
uaauuucacgaau

SEQ ID NO: 3263884 - RNA, 19 nt, Vaccinia virus
aaguauauaauaaauacuu

SEQ ID NO: 3263885 - RNA, 19 nt, Vaccinia virus
agaucaucaaaauauguuu

SEQ ID NO: 3263886 - RNA, 24 nt, Vaccinia virus
caucugccauaauccuauucuuga

SEQ ID NO: 3263887 - RNA, 18 nt, Vaccinia virus
ugaacugagauauauaca

SEQ ID NO: 3263888 - RNA, 23 nt, Vaccinia virus
ggucgucgauaacaaauuaaaga

SEQ ID NO: 3263889 - RNA, 16 nt, Vaccinia virus
ucuuauccauuucgaa

SEQ ID NO: 3263890 - RNA, 13 nt, Vaccinia virus
auauacuauauag

SEQ ID NO: 3263891 - RNA, 22 nt, Vaccinia virus
uauuaucauacugucaacuaua

SEQ ID NO: 3263892 - RNA, 21 nt, Vaccinia virus
agcauacgccaaauaucucaa

SEQ ID NO: 3263893 - RNA, 20 nt, Vaccinia virus
uggauggauuauaauugaug

SEQ ID NO: 3263894 - RNA, 22 nt, Vaccinia virus
guauacucugcccuuuauuaca

SEQ ID NO: 3263895 - RNA, 15 nt, Vaccinia virus
agaauuuucauggau

SEQ ID NO: 3263896 - RNA, 14 nt, Vaccinia virus
auuuauuaaauacu

SEQ ID NO: 3263897 - RNA, 15 nt, Vaccinia virus
ucaaaauauguaaua

SEQ ID NO: 3263898 - RNA, 18 nt, Vaccinia virus
acgauauuuguuggauuc

SEQ ID NO: 3263899 - RNA, 16 nt, Vaccinia virus
uguuuuauguuuauua

SEQ ID NO: 3263900 - RNA, 16 nt, Vaccinia virus
caaccuacacuauuau

SEQ ID NO: 3263901 - RNA, 18 nt, Vaccinia virus
caccaucuucauaauaaa

SEQ ID NO: 3263902 - RNA, 20 nt, Vaccinia virus
cuauaaaaaaaauaauaauu

SEQ ID NO: 3263903 - RNA, 15 nt, Vaccinia virus
aauuacuaaaauaua

SEQ ID NO: 3263904 - RNA, 20 nt, Vaccinia virus
uagauaaaaaggaaucuauu

SEQ ID NO: 3263905 - RNA, 15 nt, Vaccinia virus
gaaaguaaauaauau

SEQ ID NO: 3263906 - RNA, 16 nt, Vaccinia virus
aacacacacugagaaa

SEQ ID NO: 3263907 - RNA, 16 nt, Vaccinia virus
agguaguaaaaaauaa

SEQ ID NO: 3263908 - RNA, 12 nt, Vaccinia virus
acaauauuucau

SEQ ID NO: 3263909 - RNA, 15 nt, Vaccinia virus
cugaaagagaugaga

SEQ ID NO: 3263910 - RNA, 21 nt, Vaccinia virus
cauucaugggugcugaauaau

SEQ ID NO: 3263911 - RNA, 17 nt, Vaccinia virus
aaauaccauaaauauau

SEQ ID NO: 3263912 - RNA, 22 nt, Vaccinia virus
agucucaaucuuauuuaacuaa

SEQ ID NO: 3263913 - RNA, 22 nt, Vaccinia virus
auaauguuguccauuguaguau

SEQ ID NO: 3263914 - RNA, 15 nt, Vaccinia virus
auucauuuagaaugg

SEQ ID NO: 3263915 - RNA, 20 nt, Vaccinia virus
uacuaaaucuguauaucuuu

SEQ ID NO: 3263916 - RNA, 21 nt, Vaccinia virus
augaauaucugcaauauauau

SEQ ID NO: 3263917 - RNA, 17 nt, Vaccinia virus
agaacgaugucaaaaua

SEQ ID NO: 3263918 - RNA, 16 nt, Vaccinia virus
uaacugcuuuucugga

SEQ ID NO: 3263919 - RNA, 23 nt, Vaccinia virus
caagauccucucuuaaaugaauc

SEQ ID NO: 3263920 - RNA, 21 nt, Vaccinia virus
uauuaacgugaaacguaguau

SEQ ID NO: 3263921 - RNA, 23 nt, Vaccinia virus
ucaccgauaaacgucauuucucu

SEQ ID NO: 3263922 - RNA, 12 nt, Vaccinia virus
uaaguguuuaua

SEQ ID NO: 3263923 - RNA, 22 nt, Vaccinia virus
gaguaguaaacgcguacauaac

SEQ ID NO: 3263924 - RNA, 19 nt, Vaccinia virus
aucgacauggcuucuucca

SEQ ID NO: 3263925 - RNA, 19 nt, Vaccinia virus
uacuguugaguaaaucagu

SEQ ID NO: 3263926 - RNA, 17 nt, Vaccinia virus
gcgucauuguaaaggaa

SEQ ID NO: 3263927 - RNA, 23 nt, Vaccinia virus
uauaucacaacaucuauaaaagu

SEQ ID NO: 3263928 - RNA, 13 nt, Vaccinia virus
uaucgugucucau

SEQ ID NO: 3263929 - RNA, 17 nt, Vaccinia virus
cgaugaguguagaugcu

SEQ ID NO: 3263930 - RNA, 17 nt, Vaccinia virus
caaaaguaagcauuucc

SEQ ID NO: 3263931 - RNA, 18 nt, Vaccinia virus
ucuauauacuauauagua

SEQ ID NO: 3263932 - RNA, 15 nt, Vaccinia virus
ucauccaugguuuua

SEQ ID NO: 3263933 - RNA, 13 nt, Vaccinia virus
aacaaguuuuuau

SEQ ID NO: 3263934 - RNA, 19 nt, Vaccinia virus
uuaguaucuagcucuguaa

SEQ ID NO: 3263935 - RNA, 19 nt, Vaccinia virus
gcaauggcucuaacaacaa

SEQ ID NO: 3263936 - RNA, 17 nt, Vaccinia virus
uagagauacaauauuua

SEQ ID NO: 3263937 - RNA, 12 nt, Vaccinia virus
uagauaacucuc

SEQ ID NO: 3263938 - RNA, 19 nt, Vaccinia virus
ugauacucuuauagaugua

SEQ ID NO: 3263939 - RNA, 17 nt, Vaccinia virus
aacucgguaaaaaaauu

SEQ ID NO: 3263940 - RNA, 13 nt, Vaccinia virus
cuauuaaaguauc

SEQ ID NO: 3263941 - RNA, 13 nt, Vaccinia virus
uuucucauaauaa

SEQ ID NO: 3263942 - RNA, 14 nt, Vaccinia virus
uaguuuauuauaua

SEQ ID NO: 3263943 - RNA, 22 nt, Vaccinia virus
aauaccauaaauauauuucuaa

SEQ ID NO: 3263944 - RNA, 17 nt, Vaccinia virus
uuacaaaauucauuaac

SEQ ID NO: 3263945 - RNA, 23 nt, Vaccinia virus
uaaaugaaguacuguucaaacau

SEQ ID NO: 3263946 - RNA, 18 nt, Vaccinia virus
gcaguuacaagauuuuua

SEQ ID NO: 3263947 - RNA, 14 nt, Vaccinia virus
uguauaauuuggua

SEQ ID NO: 3263948 - RNA, 16 nt, Vaccinia virus
acauacaauuaaauca

SEQ ID NO: 3263949 - RNA, 15 nt, Vaccinia virus
uuaaaaacaaacuuu

SEQ ID NO: 3263950 - RNA, 21 nt, Vaccinia virus
ggaaucaauuacagauuucuc

SEQ ID NO: 3263951 - RNA, 20 nt, Vaccinia virus
ucaucaacuagacguuuauu

SEQ ID NO: 3263952 - RNA, 14 nt, Vaccinia virus
aguaaaguaaacaa

SEQ ID NO: 3263953 - RNA, 21 nt, Vaccinia virus
aaacuugguauuuuuugguuc

SEQ ID NO: 3263954 - RNA, 17 nt, Vaccinia virus
guuuacaguaguaauga

SEQ ID NO: 3263955 - RNA, 14 nt, Vaccinia virus
auccaucaaaaaug

SEQ ID NO: 3263956 - RNA, 13 nt, Vaccinia virus
uaugaaaauagca

SEQ ID NO: 3263957 - RNA, 18 nt, Vaccinia virus
cuuaccuucaacaguaua

SEQ ID NO: 3263958 - RNA, 16 nt, Vaccinia virus
auugguauaaauguug

SEQ ID NO: 3263959 - RNA, 17 nt, Vaccinia virus
gugaaaugguacaaaaa

SEQ ID NO: 3263960 - RNA, 15 nt, Vaccinia virus
ucuuuuuuguaccau

SEQ ID NO: 3263961 - RNA, 15 nt, Vaccinia virus
acaguuuuacuauau

SEQ ID NO: 3263962 - RNA, 22 nt, Vaccinia virus
auguugcaugaaauaauaugca

SEQ ID NO: 3263963 - RNA, 23 nt, Vaccinia virus
gacacgcucuuaggagauuaaag

SEQ ID NO: 3263964 - RNA, 22 nt, Vaccinia virus
aaguuuuaucucuuucucucuu

SEQ ID NO: 3263965 - RNA, 21 nt, Vaccinia virus
auaucuaauggauaaacugaa

SEQ ID NO: 3263966 - RNA, 16 nt, Vaccinia virus
auaaaggcagaaaugc

SEQ ID NO: 3263967 - RNA, 15 nt, Vaccinia virus
auuuucuuuauaaaa

SEQ ID NO: 3263968 - RNA, 22 nt, Vaccinia virus
gcuuccaggcuaucaaauggau

SEQ ID NO: 3263969 - RNA, 22 nt, Vaccinia virus
acuaaacuaugugaugucuugg

SEQ ID NO: 3263970 - RNA, 19 nt, Vaccinia virus
uauucugaaacaguaugau

SEQ ID NO: 3263971 - RNA, 13 nt, Vaccinia virus
aaugacaaacauu

SEQ ID NO: 3263972 - RNA, 13 nt, Vaccinia virus
cauguacaugaau

SEQ ID NO: 3263973 - RNA, 18 nt, Vaccinia virus
ugauacaaaaacgaaaua

SEQ ID NO: 3263974 - RNA, 16 nt, Vaccinia virus
aacuuuccucagagau

SEQ ID NO: 3263975 - RNA, 16 nt, Vaccinia virus
aaacucgcuuaauauc

SEQ ID NO: 3263976 - RNA, 22 nt, Vaccinia virus
aaucuguacuauguguuaaaaa

SEQ ID NO: 3263977 - RNA, 21 nt, Vaccinia virus
augaauccaucguacaagcca

SEQ ID NO: 3263978 - RNA, 15 nt, Vaccinia virus
cuaacauuguuaauu

SEQ ID NO: 3263979 - RNA, 18 nt, Vaccinia virus
acgauagucuguuaauaa

SEQ ID NO: 3263980 - RNA, 17 nt, Vaccinia virus
gauacaauggaugauau

SEQ ID NO: 3263981 - RNA, 20 nt, Vaccinia virus
auauuuuuauucagcauuac

SEQ ID NO: 3263982 - RNA, 22 nt, Vaccinia virus
uucaccaucauacucauauaau

SEQ ID NO: 3263983 - RNA, 16 nt, Vaccinia virus
auuaugaaaaaguaaa

SEQ ID NO: 3263984 - RNA, 14 nt, Vaccinia virus
cuccuuucaaacuu

SEQ ID NO: 3263985 - RNA, 12 nt, Vaccinia virus
gcuguucaaaau

SEQ ID NO: 3263986 - RNA, 17 nt, Vaccinia virus
auugauuauuucaaaga

SEQ ID NO: 3263987 - RNA, 18 nt, Vaccinia virus
aauagucuuguaaagaua

SEQ ID NO: 3263988 - RNA, 20 nt, Vaccinia virus
agugucaauuuuaaaugaug

SEQ ID NO: 3263989 - RNA, 21 nt, Vaccinia virus
acuucuacgaagaaaguuagu

SEQ ID NO: 3263990 - RNA, 12 nt, Vaccinia virus
uccucaauaacg

SEQ ID NO: 3263991 - RNA, 18 nt, Vaccinia virus
auauagugaaacaaaaua

SEQ ID NO: 3263992 - RNA, 20 nt, Vaccinia virus
uaaccauauauccaauaaag

SEQ ID NO: 3263993 - RNA, 15 nt, Vaccinia virus
agaugagaacucuau

SEQ ID NO: 3263994 - RNA, 13 nt, Vaccinia virus
uugcaucaguucu

SEQ ID NO: 3263995 - RNA, 18 nt, Vaccinia virus
uagauuucgaaaauacua

SEQ ID NO: 3263996 - RNA, 19 nt, Vaccinia virus
aaacaguuacuguuaguau

SEQ ID NO: 3263997 - RNA, 12 nt, Vaccinia virus
aaaaaauuccca

SEQ ID NO: 3263998 - RNA, 20 nt, Vaccinia virus
acacaacgcgucuagacuuc

SEQ ID NO: 3263999 - RNA, 16 nt, Vaccinia virus
acaugacauuuuccuu

SEQ ID NO: 3264000 - RNA, 19 nt, Vaccinia virus
uccauaguacauaguuguu

SEQ ID NO: 3264001 - RNA, 20 nt, Vaccinia virus
uguaauagugaaauuacauu

SEQ ID NO: 3264002 - RNA, 21 nt, Vaccinia virus
aauccauugauaauuucuugu

SEQ ID NO: 3264003 - RNA, 13 nt, Vaccinia virus
uaugauaugugau

SEQ ID NO: 3264004 - RNA, 12 nt, Vaccinia virus
cgagacuauuau

SEQ ID NO: 3264005 - RNA, 12 nt, Vaccinia virus
uauauuuccagc

SEQ ID NO: 3264006 - RNA, 22 nt, Vaccinia virus
caauuauauguguguagacaau

SEQ ID NO: 3264007 - RNA, 14 nt, Vaccinia virus
aacuauuucuaaga

SEQ ID NO: 3264008 - RNA, 19 nt, Vaccinia virus
uggcuagauucaacauuua

SEQ ID NO: 3264009 - RNA, 23 nt, Vaccinia virus
uuuucuguacucagauucaguuu

SEQ ID NO: 3264010 - RNA, 22 nt, Vaccinia virus
auuucugaaccaguuaauguau

SEQ ID NO: 3264011 - RNA, 18 nt, Vaccinia virus
cauuuauaacguacaaau

SEQ ID NO: 3264012 - RNA, 19 nt, Vaccinia virus
uguuuaacaaaguuauuca

SEQ ID NO: 3264013 - RNA, 14 nt, Vaccinia virus
uaaaagauggauau

SEQ ID NO: 3264014 - RNA, 18 nt, Vaccinia virus
auaccacauacaaaacua

SEQ ID NO: 3264015 - RNA, 19 nt, Vaccinia virus
auaacguuuuuauuuguaa

SEQ ID NO: 3264016 - RNA, 12 nt, Vaccinia virus
auauauguuuau

SEQ ID NO: 3264017 - RNA, 11 nt, Vaccinia virus
uuaaaaaauuu

SEQ ID NO: 3264018 - RNA, 21 nt, Vaccinia virus
ucuagccucgguaaucuguac

SEQ ID NO: 3264019 - RNA, 19 nt, Vaccinia virus
caggaucuccaacaaauuu

SEQ ID NO: 3264020 - RNA, 23 nt, Vaccinia virus
acucuuacaacgccaucaugaau

SEQ ID NO: 3264021 - RNA, 14 nt, Vaccinia virus
acgguauaugaaua

SEQ ID NO: 3264022 - RNA, 20 nt, Vaccinia virus
uaaguuuaugagcuuuuaua

SEQ ID NO: 3264023 - RNA, 15 nt, Vaccinia virus
gaguuacuuaaaugc

SEQ ID NO: 3264024 - RNA, 19 nt, Vaccinia virus
gccauuaguuuucaugaaa

SEQ ID NO: 3264025 - RNA, 13 nt, Vaccinia virus
uaauuauuuccag

SEQ ID NO: 3264026 - RNA, 21 nt, Vaccinia virus
ugacaauauuauuaugaagac

SEQ ID NO: 3264027 - RNA, 24 nt, Vaccinia virus
acauagaugugguaauaucugacu

SEQ ID NO: 3264028 - RNA, 18 nt, Vaccinia virus
uagaugucgaagacuuac

SEQ ID NO: 3264029 - RNA, 19 nt, Vaccinia virus
auuauagcaauauguguaa

SEQ ID NO: 3264030 - RNA, 19 nt, Vaccinia virus
acgacucuccauacgauga

SEQ ID NO: 3264031 - RNA, 16 nt, Vaccinia virus
aauaggugaugaugca

SEQ ID NO: 3264032 - RNA, 17 nt, Vaccinia virus
cuggaggagauggauua

SEQ ID NO: 3264033 - RNA, 17 nt, Vaccinia virus
cuaugacuucaucaucu

SEQ ID NO: 3264034 - RNA, 17 nt, Vaccinia virus
agucacgaauaacgaua

SEQ ID NO: 3264035 - RNA, 14 nt, Vaccinia virus
aauguuaauuuaua

SEQ ID NO: 3264036 - RNA, 17 nt, Vaccinia virus
gaauauaaaaaaaugau

SEQ ID NO: 3264037 - RNA, 14 nt, Vaccinia virus
auacauugaauauu

SEQ ID NO: 3264038 - RNA, 12 nt, Vaccinia virus
ccauuuaaauau

SEQ ID NO: 3264039 - RNA, 13 nt, Vaccinia virus
aaucugaucuugu

SEQ ID NO: 3264040 - RNA, 22 nt, Vaccinia virus
aaagaauuuuuucguguuccaa

SEQ ID NO: 3264041 - RNA, 17 nt, Vaccinia virus
guucaaaacuuaaucuc

SEQ ID NO: 3264042 - RNA, 19 nt, Vaccinia virus
acuguacccacuaugaaua

SEQ ID NO: 3264043 - RNA, 13 nt, Vaccinia virus
uuuauccaaugau

SEQ ID NO: 3264044 - RNA, 14 nt, Vaccinia virus
cauaaacugauacg

SEQ ID NO: 3264045 - RNA, 20 nt, Vaccinia virus
uuuaucucgaggauacguaa

SEQ ID NO: 3264046 - RNA, 20 nt, Vaccinia virus
cauuaauacagccuauuuuc

SEQ ID NO: 3264047 - RNA, 20 nt, Vaccinia virus
gaagauuuaacuagauuaua

SEQ ID NO: 3264048 - RNA, 16 nt, Vaccinia virus
aaaaccucaucgaaga

SEQ ID NO: 3264049 - RNA, 19 nt, Vaccinia virus
cuuugaaaauguuacugaa

SEQ ID NO: 3264050 - RNA, 14 nt, Vaccinia virus
ugaugugaauuuag

SEQ ID NO: 3264051 - RNA, 13 nt, Vaccinia virus
ucaguaucuucag

SEQ ID NO: 3264052 - RNA, 21 nt, Vaccinia virus
aguccuauauauuugaaaauc

SEQ ID NO: 3264053 - RNA, 15 nt, Vaccinia virus
uacuuaugacaaagu

SEQ ID NO: 3264054 - RNA, 17 nt, Vaccinia virus
guuucaucaauagaaga

SEQ ID NO: 3264055 - RNA, 22 nt, Vaccinia virus
ugagaucccacaucauuucaac

SEQ ID NO: 3264056 - RNA, 14 nt, Vaccinia virus
auaauauuaaauau

SEQ ID NO: 3264057 - RNA, 15 nt, Vaccinia virus
uaguauaucaaagau

SEQ ID NO: 3264058 - RNA, 14 nt, Vaccinia virus
cuauauuauguuuu

SEQ ID NO: 3264059 - RNA, 21 nt, Vaccinia virus
auauuuuuuuaguaauguuua

SEQ ID NO: 3264060 - RNA, 23 nt, Vaccinia virus
aauuucucucaucuguaggauau

SEQ ID NO: 3264061 - RNA, 13 nt, Vaccinia virus
gaaaaauauuaaa

SEQ ID NO: 3264062 - RNA, 13 nt, Vaccinia virus
cuuguugacaaaa

SEQ ID NO: 3264063 - RNA, 17 nt, Vaccinia virus
auauuguucuuaauaga

SEQ ID NO: 3264064 - RNA, 16 nt, Vaccinia virus
gaagauguuagaaaaa

SEQ ID NO: 3264065 - RNA, 15 nt, Vaccinia virus
aauauguguauuauc

SEQ ID NO: 3264066 - RNA, 13 nt, Vaccinia virus
uaacaaaauuaaa

SEQ ID NO: 3264067 - RNA, 13 nt, Vaccinia virus
aaugcauuuuaua

SEQ ID NO: 3264068 - RNA, 13 nt, Vaccinia virus
aggauuuucuaga

SEQ ID NO: 3264069 - RNA, 23 nt, Vaccinia virus
uucaagagauaguuuucaucaga

SEQ ID NO: 3264070 - RNA, 19 nt, Vaccinia virus
uaauaauauuuugaaucuu

SEQ ID NO: 3264071 - RNA, 18 nt, Vaccinia virus
aguuacauguuuaaauaa

SEQ ID NO: 3264072 - RNA, 15 nt, Vaccinia virus
agaauacgccaagga

SEQ ID NO: 3264073 - RNA, 21 nt, Vaccinia virus
aauaaaaucacuaguaucaau

SEQ ID NO: 3264074 - RNA, 17 nt, Vaccinia virus
ccaugcacguaaacauu

SEQ ID NO: 3264075 - RNA, 14 nt, Vaccinia virus
gaauucaguaauau

SEQ ID NO: 3264076 - RNA, 21 nt, Vaccinia virus
guguacuagucauaauaucuu

SEQ ID NO: 3264077 - RNA, 19 nt, Vaccinia virus
cuuaacuuacaaaauguaa

SEQ ID NO: 3264078 - RNA, 22 nt, Vaccinia virus
uacacuccucagauuuauacau

SEQ ID NO: 3264079 - RNA, 17 nt, Vaccinia virus
uagaacuuaucaaagaa

SEQ ID NO: 3264080 - RNA, 22 nt, Vaccinia virus
caauugugauuuaguguaguau

SEQ ID NO: 3264081 - RNA, 18 nt, Vaccinia virus
aacuccguagagaaauau

SEQ ID NO: 3264082 - RNA, 10 nt, Vaccinia virus
guuguauuua

SEQ ID NO: 3264083 - RNA, 20 nt, Vaccinia virus
gacacauucuuuagaacuuc

SEQ ID NO: 3264084 - RNA, 21 nt, Vaccinia virus
aaugaugaugaugaaauggau

SEQ ID NO: 3264085 - RNA, 16 nt, Vaccinia virus
acucacgcaauuauua

SEQ ID NO: 3264086 - RNA, 17 nt, Vaccinia virus
agauuaagauuaaacau

SEQ ID NO: 3264087 - RNA, 17 nt, Vaccinia virus
ucuuuaauagugucauu

SEQ ID NO: 3264088 - RNA, 15 nt, Vaccinia virus
uauaugccuguacuu

SEQ ID NO: 3264089 - RNA, 13 nt, Vaccinia virus
aaaacaauaaaua

SEQ ID NO: 3264090 - RNA, 19 nt, Vaccinia virus
uauguaaucauuguccaga

SEQ ID NO: 3264091 - RNA, 20 nt, Vaccinia virus
aagcguguaaacgaaaacua

SEQ ID NO: 3264092 - RNA, 16 nt, Vaccinia virus
uagauuuuaucuaauu

SEQ ID NO: 3264093 - RNA, 22 nt, Vaccinia virus
auauagcggaugaaaaauuugu

SEQ ID NO: 3264094 - RNA, 17 nt, Vaccinia virus
caccgauggugucacau

SEQ ID NO: 3264095 - RNA, 22 nt, Vaccinia virus
uaaggacauuggauauguggaa

SEQ ID NO: 3264096 - RNA, 22 nt, Vaccinia virus
aacuauuuccggcuguuguaua

SEQ ID NO: 3264097 - RNA, 11 nt, Vaccinia virus
ccguguuuauu

SEQ ID NO: 3264098 - RNA, 20 nt, Vaccinia virus
guaccagaaggaacauacga

SEQ ID NO: 3264099 - RNA, 22 nt, Vaccinia virus
aggaccacuagcaaaagauaaa

SEQ ID NO: 3264100 - RNA, 17 nt, Vaccinia virus
uauauuuucucaacaag

SEQ ID NO: 3264101 - RNA, 16 nt, Vaccinia virus
uuuaacgccuuccauu

SEQ ID NO: 3264102 - RNA, 13 nt, Vaccinia virus
gucaauugauucu

SEQ ID NO: 3264103 - RNA, 17 nt, Vaccinia virus
cauuacuaauacucaau

SEQ ID NO: 3264104 - RNA, 14 nt, Vaccinia virus
ugauuagaaaauau

SEQ ID NO: 3264105 - RNA, 12 nt, Vaccinia virus
ucuuuuaaauau

SEQ ID NO: 3264106 - RNA, 20 nt, Vaccinia virus
acaauacugcgacuuuguua

SEQ ID NO: 3264107 - RNA, 13 nt, Vaccinia virus
gucaaugauuuca

SEQ ID NO: 3264108 - RNA, 13 nt, Vaccinia virus
gcucauaaacuca

SEQ ID NO: 3264109 - RNA, 22 nt, Vaccinia virus
aaguuacaaacaacuaggaaau

SEQ ID NO: 3264110 - RNA, 11 nt, Vaccinia virus
cagucaugaaa

SEQ ID NO: 3264111 - RNA, 15 nt, Vaccinia virus
uaauauaaacaucuu

SEQ ID NO: 3264112 - RNA, 16 nt, Vaccinia virus
uuucagaaucuagauu

SEQ ID NO: 3264113 - RNA, 19 nt, Vaccinia virus
aauuacuuugacaaaugua

SEQ ID NO: 3264114 - RNA, 20 nt, Vaccinia virus
uauacacguuagauuauucu

SEQ ID NO: 3264115 - RNA, 12 nt, Vaccinia virus
auacuaguuuuc

SEQ ID NO: 3264116 - RNA, 15 nt, Vaccinia virus
ugauaccaugaaauu

SEQ ID NO: 3264117 - RNA, 16 nt, Vaccinia virus
ucuucugucaauugau

SEQ ID NO: 3264118 - RNA, 13 nt, Vaccinia virus
acuaucuguaaaa

SEQ ID NO: 3264119 - RNA, 12 nt, Vaccinia virus
aucaucugaaaa

SEQ ID NO: 3264120 - RNA, 21 nt, Vaccinia virus
uauugaagaagaugacaaucu

SEQ ID NO: 3264121 - RNA, 17 nt, Vaccinia virus
uguauucuuuuuaagau

SEQ ID NO: 3264122 - RNA, 19 nt, Vaccinia virus
gacuugucaaaucuauaua

SEQ ID NO: 3264123 - RNA, 19 nt, Vaccinia virus
aaagcaagaccaaacaccg

SEQ ID NO: 3264124 - RNA, 13 nt, Vaccinia virus
cuuacaaaguuuu

SEQ ID NO: 3264125 - RNA, 16 nt, Vaccinia virus
ccuugagaauauccau

SEQ ID NO: 3264126 - RNA, 21 nt, Vaccinia virus
uaaucuaaaauaguucuguaa

SEQ ID NO: 3264127 - RNA, 22 nt, Vaccinia virus
uauuaaacaaggacauuguaaa

SEQ ID NO: 3264128 - RNA, 20 nt, Vaccinia virus
uaagaugcaaacauuaugua

SEQ ID NO: 3264129 - RNA, 17 nt, Vaccinia virus
aaauacuuaacagagga

SEQ ID NO: 3264130 - RNA, 12 nt, Vaccinia virus
uugauugccaua

SEQ ID NO: 3264131 - RNA, 14 nt, Vaccinia virus
auaaagaugauaua

SEQ ID NO: 3264132 - RNA, 20 nt, Vaccinia virus
auaaccggcaagaaagugaa

SEQ ID NO: 3264133 - RNA, 17 nt, Vaccinia virus
ugagcaaagauuguucu

SEQ ID NO: 3264134 - RNA, 16 nt, Vaccinia virus
ucaucauuuuuucacc

SEQ ID NO: 3264135 - RNA, 22 nt, Vaccinia virus
uuuucuacugaugcauguauuu

SEQ ID NO: 3264136 - RNA, 17 nt, Vaccinia virus
uccaucauuucauuaau

SEQ ID NO: 3264137 - RNA, 23 nt, Vaccinia virus
aucauuugacgauauuucuggaa

SEQ ID NO: 3264138 - RNA, 11 nt, Vaccinia virus
augucauauag

SEQ ID NO: 3264139 - RNA, 16 nt, Vaccinia virus
uaauaugacucaugau

SEQ ID NO: 3264140 - RNA, 23 nt, Vaccinia virus
augcaaacuuacagaaacaauga

SEQ ID NO: 3264141 - RNA, 17 nt, Vaccinia virus
agaugauaauuuauaca

SEQ ID NO: 3264142 - RNA, 17 nt, Vaccinia virus
agucaauguuuuugaaa

SEQ ID NO: 3264143 - RNA, 18 nt, Vaccinia virus
ugauucauucacuaucaa

SEQ ID NO: 3264144 - RNA, 20 nt, Vaccinia virus
aaucuuggcauauugaucau

SEQ ID NO: 3264145 - RNA, 19 nt, Vaccinia virus
aauauauuauuaguuuaua

SEQ ID NO: 3264146 - RNA, 19 nt, Vaccinia virus
auuuguucguaugucauaa

SEQ ID NO: 3264147 - RNA, 22 nt, Vaccinia virus
aaacucuuuagcgguauaauua

SEQ ID NO: 3264148 - RNA, 19 nt, Vaccinia virus
ucagacgaguguaaacacu

SEQ ID NO: 3264149 - RNA, 15 nt, Vaccinia virus
augacucucaaauua

SEQ ID NO: 3264150 - RNA, 20 nt, Vaccinia virus
ucgauuacauuuaugggaua

SEQ ID NO: 3264151 - RNA, 17 nt, Vaccinia virus
ccuagucauauguuuaa

SEQ ID NO: 3264152 - RNA, 16 nt, Vaccinia virus
uauucaucaucaauau

SEQ ID NO: 3264153 - RNA, 20 nt, Vaccinia virus
guaaaaaaauuauacuguaa

SEQ ID NO: 3264154 - RNA, 20 nt, Vaccinia virus
aaaauucuuaaaauaauuua

SEQ ID NO: 3264155 - RNA, 13 nt, Vaccinia virus
acagauaaugaua

SEQ ID NO: 3264156 - RNA, 21 nt, Vaccinia virus
cauaaacgauugcugcuguuc

SEQ ID NO: 3264157 - RNA, 18 nt, Vaccinia virus
agaauguuccuaauguau

SEQ ID NO: 3264158 - RNA, 12 nt, Vaccinia virus
auaaaucauauu

SEQ ID NO: 3264159 - RNA, 17 nt, Vaccinia virus
auaugaaaaaacauuau

SEQ ID NO: 3264160 - RNA, 11 nt, Vaccinia virus
cuauagaaaau

SEQ ID NO: 3264161 - RNA, 18 nt, Vaccinia virus
auuauuacauagauguau

SEQ ID NO: 3264162 - RNA, 13 nt, Vaccinia virus
caacgagauaucu

SEQ ID NO: 3264163 - RNA, 16 nt, Vaccinia virus
gcugaaugaucuuuuu

SEQ ID NO: 3264164 - RNA, 18 nt, Vaccinia virus
auggaucaccguguuuau

SEQ ID NO: 3264165 - RNA, 13 nt, Vaccinia virus
gaaauauucuguu

SEQ ID NO: 3264166 - RNA, 14 nt, Vaccinia virus
uaaauuuuaucaug

SEQ ID NO: 3264167 - RNA, 16 nt, Vaccinia virus
gaacucuuugauuuug

SEQ ID NO: 3264168 - RNA, 19 nt, Vaccinia virus
aauuacugauaauguagaa

SEQ ID NO: 3264169 - RNA, 19 nt, Vaccinia virus
ugaugucguuauucugaaa

SEQ ID NO: 3264170 - RNA, 17 nt, Vaccinia virus
agucauguuaaaaauga

SEQ ID NO: 3264171 - RNA, 23 nt, Vaccinia virus
cagauuguugccguaaauccugc

SEQ ID NO: 3264172 - RNA, 16 nt, Vaccinia virus
gcauacuuuguaaucu

SEQ ID NO: 3264173 - RNA, 15 nt, Vaccinia virus
ucuaucgacaucaga

SEQ ID NO: 3264174 - RNA, 16 nt, Vaccinia virus
agucaagucaaugaua

SEQ ID NO: 3264175 - RNA, 21 nt, Vaccinia virus
caauaugucuguacaaauguu

SEQ ID NO: 3264176 - RNA, 14 nt, Vaccinia virus
acauuaauagaaug

SEQ ID NO: 3264177 - RNA, 16 nt, Vaccinia virus
uaauagaaugaagaau

SEQ ID NO: 3264178 - RNA, 15 nt, Vaccinia virus
auuauguaaaacaaa

SEQ ID NO: 3264179 - RNA, 20 nt, Vaccinia virus
uggaagagucuucaacgaua

SEQ ID NO: 3264180 - RNA, 23 nt, Vaccinia virus
uauaggauggcgacgguaacugc

SEQ ID NO: 3264181 - RNA, 21 nt, Vaccinia virus
aaauuccaaauuuuuuucauu

SEQ ID NO: 3264182 - RNA, 20 nt, Vaccinia virus
uaacaccuauaagauuauca

SEQ ID NO: 3264183 - RNA, 18 nt, Vaccinia virus
aacguucacguaaauaca

SEQ ID NO: 3264184 - RNA, 18 nt, Vaccinia virus
aaucuaggaauuacauaa

SEQ ID NO: 3264185 - RNA, 21 nt, Vaccinia virus
cugaagauuguugaaauugua

SEQ ID NO: 3264186 - RNA, 18 nt, Vaccinia virus
aguuuauaucaauaagaa

SEQ ID NO: 3264187 - RNA, 20 nt, Vaccinia virus
auaaaaguuccagaaaaugu

SEQ ID NO: 3264188 - RNA, 17 nt, Vaccinia virus
aauguuugacugaauau

SEQ ID NO: 3264189 - RNA, 17 nt, Vaccinia virus
agucauuucugaugaaa

SEQ ID NO: 3264190 - RNA, 19 nt, Vaccinia virus
auaacuucuagauguagaa

SEQ ID NO: 3264191 - RNA, 20 nt, Vaccinia virus
ucucgaaagacguuguacaa

SEQ ID NO: 3264192 - RNA, 18 nt, Vaccinia virus
uauaaaugaaguacuguu

SEQ ID NO: 3264193 - RNA, 14 nt, Vaccinia virus
ucacuguuguacau

SEQ ID NO: 3264194 - RNA, 17 nt, Vaccinia virus
auccuuuagauggugau

SEQ ID NO: 3264195 - RNA, 15 nt, Vaccinia virus
augcagaaguaauga

SEQ ID NO: 3264196 - RNA, 13 nt, Vaccinia virus
auucuaaauggau

SEQ ID NO: 3264197 - RNA, 22 nt, Vaccinia virus
uacauauaccgccuuucaaaau

SEQ ID NO: 3264198 - RNA, 12 nt, Vaccinia virus
aauacuguaaua

SEQ ID NO: 3264199 - RNA, 17 nt, Vaccinia virus
gaaagcgugauuuuaau

SEQ ID NO: 3264200 - RNA, 16 nt, Vaccinia virus
acugguuaaaauccuc

SEQ ID NO: 3264201 - RNA, 22 nt, Vaccinia virus
gaaauauaaaaccaacuaauau

SEQ ID NO: 3264202 - RNA, 22 nt, Vaccinia virus
uaacuuugauagcaaggaugaa

SEQ ID NO: 3264203 - RNA, 16 nt, Vaccinia virus
uauuuguauuuaucua

SEQ ID NO: 3264204 - RNA, 23 nt, Vaccinia virus
guuuccacaucaaccaaguaaug

SEQ ID NO: 3264205 - RNA, 12 nt, Vaccinia virus
uggaaucacaaa

SEQ ID NO: 3264206 - RNA, 13 nt, Vaccinia virus
guuaguaaucaua

SEQ ID NO: 3264207 - RNA, 15 nt, Vaccinia virus
ugaauggauuuauca

SEQ ID NO: 3264208 - RNA, 17 nt, Vaccinia virus
gggaaauauggaagaaa

SEQ ID NO: 3264209 - RNA, 19 nt, Vaccinia virus
uaauagcuccauaaacuga

SEQ ID NO: 3264210 - RNA, 15 nt, Vaccinia virus
ucgauacauuuugca

SEQ ID NO: 3264211 - RNA, 22 nt, Vaccinia virus
ugauuuuaacgacgacauauua

SEQ ID NO: 3264212 - RNA, 17 nt, Vaccinia virus
auaaaauuaaugagauu

SEQ ID NO: 3264213 - RNA, 14 nt, Vaccinia virus
guuuaauacauuga

SEQ ID NO: 3264214 - RNA, 17 nt, Vaccinia virus
aaccuaacucagucaau

SEQ ID NO: 3264215 - RNA, 13 nt, Vaccinia virus
auauaguuauaga

SEQ ID NO: 3264216 - RNA, 13 nt, Vaccinia virus
acagauuaauagu

SEQ ID NO: 3264217 - RNA, 14 nt, Vaccinia virus
aauucguuagaaua

SEQ ID NO: 3264218 - RNA, 20 nt, Vaccinia virus
gaaucauuuaucauaacuac

SEQ ID NO: 3264219 - RNA, 23 nt, Vaccinia virus
aguauguuaguggacuugucaaa

SEQ ID NO: 3264220 - RNA, 16 nt, Vaccinia virus
gauacagauacagaua

SEQ ID NO: 3264221 - RNA, 14 nt, Vaccinia virus
auuauuuaauggag

SEQ ID NO: 3264222 - RNA, 14 nt, Vaccinia virus
auugaacaauagau

SEQ ID NO: 3264223 - RNA, 15 nt, Vaccinia virus
acgaugauauggaug

SEQ ID NO: 3264224 - RNA, 15 nt, Vaccinia virus
gauauauaucuuuuc

SEQ ID NO: 3264225 - RNA, 16 nt, Vaccinia virus
auuugauauaaugaau

SEQ ID NO: 3264226 - RNA, 20 nt, Vaccinia virus
ucguacaguagagauauuug

SEQ ID NO: 3264227 - RNA, 17 nt, Vaccinia virus
gcauaggaacauuucug

SEQ ID NO: 3264228 - RNA, 13 nt, Vaccinia virus
aacauuugcauua

SEQ ID NO: 3264229 - RNA, 17 nt, Vaccinia virus
uguauucaacaugcuuu

SEQ ID NO: 3264230 - RNA, 16 nt, Vaccinia virus
ucucggacauuucagc

SEQ ID NO: 3264231 - RNA, 14 nt, Vaccinia virus
cuagauauguauuu

SEQ ID NO: 3264232 - RNA, 15 nt, Vaccinia virus
gcuuuucucuuuuaa

SEQ ID NO: 3264233 - RNA, 23 nt, Vaccinia virus
auaucuaggagguggauauuucu

SEQ ID NO: 3264234 - RNA, 15 nt, Vaccinia virus
guuagauguuaaaaa

SEQ ID NO: 3264235 - RNA, 19 nt, Vaccinia virus
ucguacauaaguuguacag

SEQ ID NO: 3264236 - RNA, 15 nt, Vaccinia virus
auccucuaaaggcug

SEQ ID NO: 3264237 - RNA, 20 nt, Vaccinia virus
cauuucugcauuacaaagaa

SEQ ID NO: 3264238 - RNA, 19 nt, Vaccinia virus
gaauuggaauaccaaauau

SEQ ID NO: 3264239 - RNA, 17 nt, Vaccinia virus
aggauuguauaaauuac

SEQ ID NO: 3264240 - RNA, 18 nt, Vaccinia virus
acauuagauacaauggau

SEQ ID NO: 3264241 - RNA, 12 nt, Vaccinia virus
ucuacuaucaaa

SEQ ID NO: 3264242 - RNA, 19 nt, Vaccinia virus
aauguuagagacggaaaua

SEQ ID NO: 3264243 - RNA, 21 nt, Vaccinia virus
guuaauuucacaacuuuacug

SEQ ID NO: 3264244 - RNA, 15 nt, Vaccinia virus
auagaaacuauagau

SEQ ID NO: 3264245 - RNA, 13 nt, Vaccinia virus
aucuauguagaau

SEQ ID NO: 3264246 - RNA, 19 nt, Vaccinia virus
gacucuauaucuauuucug

SEQ ID NO: 3264247 - RNA, 21 nt, Vaccinia virus
uaauaaaaguggaagucauuu

SEQ ID NO: 3264248 - RNA, 12 nt, Vaccinia virus
ucauuuguacau

SEQ ID NO: 3264249 - RNA, 13 nt, Vaccinia virus
aagauuaguaaau

SEQ ID NO: 3264250 - RNA, 19 nt, Vaccinia virus
acguauauuuagauguuuu

SEQ ID NO: 3264251 - RNA, 14 nt, Vaccinia virus
gaugucuauguacg

SEQ ID NO: 3264252 - RNA, 12 nt, Vaccinia virus
cguauacucuac

SEQ ID NO: 3264253 - RNA, 16 nt, Vaccinia virus
caagagauauauugga

SEQ ID NO: 3264254 - RNA, 21 nt, Vaccinia virus
aucucaaaauagguacucugu

SEQ ID NO: 3264255 - RNA, 21 nt, Vaccinia virus
uauuguuuggguaaaacagau

SEQ ID NO: 3264256 - RNA, 17 nt, Vaccinia virus
cgaauauaaaucauauu

SEQ ID NO: 3264257 - RNA, 15 nt, Vaccinia virus
uauaauacaggauua

SEQ ID NO: 3264258 - RNA, 16 nt, Vaccinia virus
uauuccuguuaucauc

SEQ ID NO: 3264259 - RNA, 18 nt, Vaccinia virus
cauaaauacacuuuuaua

SEQ ID NO: 3264260 - RNA, 20 nt, Vaccinia virus
aagucacaaagcaagaccaa

SEQ ID NO: 3264261 - RNA, 19 nt, Vaccinia virus
uuacaauguagaaauuaga

SEQ ID NO: 3264262 - RNA, 20 nt, Vaccinia virus
gauauauaguaaugaagaga

SEQ ID NO: 3264263 - RNA, 16 nt, Vaccinia virus
aacuugcaaaaaagac

SEQ ID NO: 3264264 - RNA, 15 nt, Vaccinia virus
gaugauauagaucuu

SEQ ID NO: 3264265 - RNA, 22 nt, Vaccinia virus
agaauauaacgugguaucuucu

SEQ ID NO: 3264266 - RNA, 19 nt, Vaccinia virus
acugcugcguuaaacauuc

SEQ ID NO: 3264267 - RNA, 17 nt, Vaccinia virus
cuauaaugacaauaaaa

SEQ ID NO: 3264268 - RNA, 12 nt, Vaccinia virus
aaggacaaaguu

SEQ ID NO: 3264269 - RNA, 15 nt, Vaccinia virus
uucaagauuaucuuu

SEQ ID NO: 3264270 - RNA, 17 nt, Vaccinia virus
uuaaaugaugaaacuaa

SEQ ID NO: 3264271 - RNA, 21 nt, Vaccinia virus
guuauuacuaaggauguauua

SEQ ID NO: 3264272 - RNA, 19 nt, Vaccinia virus
aggaaugauugccuucauc

SEQ ID NO: 3264273 - RNA, 14 nt, Vaccinia virus
aucaagaguaacua

SEQ ID NO: 3264274 - RNA, 20 nt, Vaccinia virus
aauccaauugauugacuauc

SEQ ID NO: 3264275 - RNA, 16 nt, Vaccinia virus
gaaauagauccuucaa

SEQ ID NO: 3264276 - RNA, 20 nt, Vaccinia virus
uuaaacgaauaaaagauauu

SEQ ID NO: 3264277 - RNA, 14 nt, Vaccinia virus
cuuuaaucuauauu

SEQ ID NO: 3264278 - RNA, 14 nt, Vaccinia virus
aagcaauaaauaca

SEQ ID NO: 3264279 - RNA, 11 nt, Vaccinia virus
ucauuucaguu

SEQ ID NO: 3264280 - RNA, 20 nt, Vaccinia virus
uaucagucacgauguaggaa

SEQ ID NO: 3264281 - RNA, 12 nt, Vaccinia virus
aaaaauaaacaa

SEQ ID NO: 3264282 - RNA, 17 nt, Vaccinia virus
uaaauucaaccaugaau

SEQ ID NO: 3264283 - RNA, 14 nt, Vaccinia virus
aacaaaaaaguuau

SEQ ID NO: 3264284 - RNA, 22 nt, Vaccinia virus
uaucguauauuaaguugggaga

SEQ ID NO: 3264285 - RNA, 15 nt, Vaccinia virus
auauuaaugcauuua

SEQ ID NO: 3264286 - RNA, 24 nt, Vaccinia virus
ucaaagagaacguaguagauuguu

SEQ ID NO: 3264287 - RNA, 22 nt, Vaccinia virus
cuauacagcgaauagauucaga

SEQ ID NO: 3264288 - RNA, 22 nt, Vaccinia virus
aggaauuggaauccaauuguuu

SEQ ID NO: 3264289 - RNA, 15 nt, Vaccinia virus
cuggauauauuuugc

SEQ ID NO: 3264290 - RNA, 15 nt, Vaccinia virus
gcaauuauauaaugu

SEQ ID NO: 3264291 - RNA, 19 nt, Vaccinia virus
cgauauuaaccuaaaagag

SEQ ID NO: 3264292 - RNA, 13 nt, Vaccinia virus
aucaugaugauuu

SEQ ID NO: 3264293 - RNA, 13 nt, Vaccinia virus
aguuuuucuggaa

SEQ ID NO: 3264294 - RNA, 19 nt, Vaccinia virus
caaaacaacauauacacau

SEQ ID NO: 3264295 - RNA, 19 nt, Vaccinia virus
gaaucuagauuccaaucau

SEQ ID NO: 3264296 - RNA, 13 nt, Vaccinia virus
uguuuuuaucauc

SEQ ID NO: 3264297 - RNA, 13 nt, Vaccinia virus
gcaaaaauaauau

SEQ ID NO: 3264298 - RNA, 16 nt, Vaccinia virus
caaucacuacaauaau

SEQ ID NO: 3264299 - RNA, 21 nt, Vaccinia virus
aaaguuucugaaauaagauua

SEQ ID NO: 3264300 - RNA, 17 nt, Vaccinia virus
gcuucuuuaauuuuuua

SEQ ID NO: 3264301 - RNA, 18 nt, Vaccinia virus
aacgcuacuauauauuau

SEQ ID NO: 3264302 - RNA, 18 nt, Vaccinia virus
agaaucagaaucauacaa

SEQ ID NO: 3264303 - RNA, 22 nt, Vaccinia virus
aauugcauacacuacaagacaa

SEQ ID NO: 3264304 - RNA, 13 nt, Vaccinia virus
agaugcuauguau

SEQ ID NO: 3264305 - RNA, 17 nt, Vaccinia virus
aggacguaauacaugca

SEQ ID NO: 3264306 - RNA, 14 nt, Vaccinia virus
auccaagauacuua

SEQ ID NO: 3264307 - RNA, 17 nt, Vaccinia virus
gaauuaauguaaucauu

SEQ ID NO: 3264308 - RNA, 14 nt, Vaccinia virus
ucaaugaagaguau

SEQ ID NO: 3264309 - RNA, 14 nt, Vaccinia virus
aucuucaugccuuu

SEQ ID NO: 3264310 - RNA, 21 nt, Vaccinia virus
accauaucgccguaauguaag

SEQ ID NO: 3264311 - RNA, 10 nt, Vaccinia virus
acuaaacaaa

SEQ ID NO: 3264312 - RNA, 22 nt, Vaccinia virus
aucaauaagaaaguuaagaauu

SEQ ID NO: 3264313 - RNA, 12 nt, Vaccinia virus
aauauuaaacaa

SEQ ID NO: 3264314 - RNA, 17 nt, Vaccinia virus
uaguuucugguuuucua

SEQ ID NO: 3264315 - RNA, 17 nt, Vaccinia virus
uauaucauuuguuuuaa

SEQ ID NO: 3264316 - RNA, 15 nt, Vaccinia virus
uuaaaauuauuaaac

SEQ ID NO: 3264317 - RNA, 22 nt, Vaccinia virus
uauaugcaguuuuaagauguca

SEQ ID NO: 3264318 - RNA, 20 nt, Vaccinia virus
gcauuagaugaaaaauggaa

SEQ ID NO: 3264319 - RNA, 12 nt, Vaccinia virus
aauauucagagu

SEQ ID NO: 3264320 - RNA, 17 nt, Vaccinia virus
auuuguucaaacuuugu

SEQ ID NO: 3264321 - RNA, 13 nt, Vaccinia virus
guucguucuggga

SEQ ID NO: 3264322 - RNA, 16 nt, Vaccinia virus
uucuagaucaagaaac

SEQ ID NO: 3264323 - RNA, 16 nt, Vaccinia virus
auuucaaauauauuua

SEQ ID NO: 3264324 - RNA, 16 nt, Vaccinia virus
aagaugauauaaguua

SEQ ID NO: 3264325 - RNA, 15 nt, Vaccinia virus
acaauuacacuacau

SEQ ID NO: 3264326 - RNA, 19 nt, Vaccinia virus
gguagcuuccagauuuaaa

SEQ ID NO: 3264327 - RNA, 17 nt, Vaccinia virus
auggaagaguuaaugaa

SEQ ID NO: 3264328 - RNA, 19 nt, Vaccinia virus
acauccuuccaagaagaag

SEQ ID NO: 3264329 - RNA, 22 nt, Vaccinia virus
auguauccguaaaguaauuucc

SEQ ID NO: 3264330 - RNA, 14 nt, Vaccinia virus
auuacuauuuguaa

SEQ ID NO: 3264331 - RNA, 15 nt, Vaccinia virus
cuuacauaaaugucu

SEQ ID NO: 3264332 - RNA, 19 nt, Vaccinia virus
uguguagaaaguguuacau

SEQ ID NO: 3264333 - RNA, 23 nt, Vaccinia virus
ucgcaauauucaucaauuuagau

SEQ ID NO: 3264334 - RNA, 16 nt, Vaccinia virus
uucauaaaguugcugg

SEQ ID NO: 3264335 - RNA, 20 nt, Vaccinia virus
uuauacgcauaaauuguaaa

SEQ ID NO: 3264336 - RNA, 15 nt, Vaccinia virus
aaguauuuauacaaa

SEQ ID NO: 3264337 - RNA, 13 nt, Vaccinia virus
guuuccuguaaau

SEQ ID NO: 3264338 - RNA, 16 nt, Vaccinia virus
acaaucucuauaucua

SEQ ID NO: 3264339 - RNA, 14 nt, Vaccinia virus
ucuccgauaucuaa

SEQ ID NO: 3264340 - RNA, 19 nt, Vaccinia virus
uguaauuggaguaacuguu

SEQ ID NO: 3264341 - RNA, 16 nt, Vaccinia virus
ugauaacacauauuca

SEQ ID NO: 3264342 - RNA, 17 nt, Vaccinia virus
aaucucaucaucgaaga

SEQ ID NO: 3264343 - RNA, 20 nt, Vaccinia virus
uacaauauuuaaaagacuua

SEQ ID NO: 3264344 - RNA, 14 nt, Vaccinia virus
gaacagauaguuua

SEQ ID NO: 3264345 - RNA, 23 nt, Vaccinia virus
cauaugaugaacuaauaaaggaa

SEQ ID NO: 3264346 - RNA, 17 nt, Vaccinia virus
uauaguagaauuucauu

SEQ ID NO: 3264347 - RNA, 23 nt, Vaccinia virus
uuuaauauccaaucuuauuacuu

SEQ ID NO: 3264348 - RNA, 19 nt, Vaccinia virus
gauaacaauagucuuguaa

SEQ ID NO: 3264349 - RNA, 20 nt, Vaccinia virus
uuacguggagaaaucauguu

SEQ ID NO: 3264350 - RNA, 20 nt, Vaccinia virus
uuauaaaaaaaucauuucga

SEQ ID NO: 3264351 - RNA, 15 nt, Vaccinia virus
auuaaugagaucuuc

SEQ ID NO: 3264352 - RNA, 22 nt, Vaccinia virus
auauuaacgcguuuuaugaaug

SEQ ID NO: 3264353 - RNA, 17 nt, Vaccinia virus
gcaaccguuagauguag

SEQ ID NO: 3264354 - RNA, 12 nt, Vaccinia virus
ucguuacaaaag

SEQ ID NO: 3264355 - RNA, 16 nt, Vaccinia virus
ccacuucggauccaua

SEQ ID NO: 3264356 - RNA, 23 nt, Vaccinia virus
cguaaaccauuuuucagaaagua

SEQ ID NO: 3264357 - RNA, 20 nt, Vaccinia virus
caugucccuauuauaaucau

SEQ ID NO: 3264358 - RNA, 22 nt, Vaccinia virus
uauacagcuggagauuaucauc

SEQ ID NO: 3264359 - RNA, 20 nt, Vaccinia virus
ucauccguuuccuuaugaag

SEQ ID NO: 3264360 - RNA, 21 nt, Vaccinia virus
uauuuaucucuucauuauaua

SEQ ID NO: 3264361 - RNA, 16 nt, Vaccinia virus
caaaauauguaacaau

SEQ ID NO: 3264362 - RNA, 15 nt, Vaccinia virus
aauuauaaaauuaua

SEQ ID NO: 3264363 - RNA, 21 nt, Vaccinia virus
ugcugaccuggaaaaauacuu

SEQ ID NO: 3264364 - RNA, 15 nt, Vaccinia virus
guucucguucguaau

SEQ ID NO: 3264365 - RNA, 18 nt, Vaccinia virus
guagaucacguuaaauca

SEQ ID NO: 3264366 - RNA, 19 nt, Vaccinia virus
aucgauccaugagaaauac

SEQ ID NO: 3264367 - RNA, 16 nt, Vaccinia virus
aauaaguguagcaaau

SEQ ID NO: 3264368 - RNA, 12 nt, Vaccinia virus
ugacaauaauua

SEQ ID NO: 3264369 - RNA, 16 nt, Vaccinia virus
ugacguauuggaugau

SEQ ID NO: 3264370 - RNA, 21 nt, Vaccinia virus
uucagaaagacgaauacauau

SEQ ID NO: 3264371 - RNA, 22 nt, Vaccinia virus
guugaugaggcacauaauaucu

SEQ ID NO: 3264372 - RNA, 16 nt, Vaccinia virus
uuugacuuacauaaau

SEQ ID NO: 3264373 - RNA, 15 nt, Vaccinia virus
augauuaucaaacac

SEQ ID NO: 3264374 - RNA, 20 nt, Vaccinia virus
aaugcuucagaauuagaaca

SEQ ID NO: 3264375 - RNA, 14 nt, Vaccinia virus
uugacaaauuauuc

SEQ ID NO: 3264376 - RNA, 15 nt, Vaccinia virus
uggauguacauguau

SEQ ID NO: 3264377 - RNA, 21 nt, Vaccinia virus
ucuauaaacgaugguuuaauu

SEQ ID NO: 3264378 - RNA, 13 nt, Vaccinia virus
aaaauauguauaa

SEQ ID NO: 3264379 - RNA, 13 nt, Vaccinia virus
uuccauaaacagu

SEQ ID NO: 3264380 - RNA, 21 nt, Vaccinia virus
gauuaaaaauaaaguuaucau

SEQ ID NO: 3264381 - RNA, 13 nt, Vaccinia virus
aguaaaugaaugc

SEQ ID NO: 3264382 - RNA, 15 nt, Vaccinia virus
augauaaacuaacua

SEQ ID NO: 3264383 - RNA, 18 nt, Vaccinia virus
gucuaguaaguagaaauu

SEQ ID NO: 3264384 - RNA, 19 nt, Vaccinia virus
cucuccuagguuucucuau

SEQ ID NO: 3264385 - RNA, 21 nt, Vaccinia virus
augauauugcgcauaauuucc

SEQ ID NO: 3264386 - RNA, 13 nt, Vaccinia virus
uuucccauacuaa

SEQ ID NO: 3264387 - RNA, 15 nt, Vaccinia virus
gaaaucauauaugau

SEQ ID NO: 3264388 - RNA, 17 nt, Vaccinia virus
cagaaccuauuaacgau

SEQ ID NO: 3264389 - RNA, 13 nt, Vaccinia virus
uguaucaaagaua

SEQ ID NO: 3264390 - RNA, 18 nt, Vaccinia virus
auuaggaaaaguauucug

SEQ ID NO: 3264391 - RNA, 19 nt, Vaccinia virus
aaaucuaacagauacaaau

SEQ ID NO: 3264392 - RNA, 17 nt, Vaccinia virus
uguauaacaaauacaga

SEQ ID NO: 3264393 - RNA, 19 nt, Vaccinia virus
acuguugccaaugauguca

SEQ ID NO: 3264394 - RNA, 12 nt, Vaccinia virus
cgaauaaaagau

SEQ ID NO: 3264395 - RNA, 14 nt, Vaccinia virus
guaucucaauauga

SEQ ID NO: 3264396 - RNA, 22 nt, Vaccinia virus
cuaauagauguauuugauauac

SEQ ID NO: 3264397 - RNA, 18 nt, Vaccinia virus
aguauuuauacuacuaau

SEQ ID NO: 3264398 - RNA, 23 nt, Vaccinia virus
auucuucuuuaaacgauuuucca

SEQ ID NO: 3264399 - RNA, 18 nt, Vaccinia virus
uuuaaugacgaauucaua

SEQ ID NO: 3264400 - RNA, 19 nt, Vaccinia virus
cauugacggauaaaacaaa

SEQ ID NO: 3264401 - RNA, 15 nt, Vaccinia virus
cauuaccucaugaac

SEQ ID NO: 3264402 - RNA, 15 nt, Vaccinia virus
aucucuaacuacuau

SEQ ID NO: 3264403 - RNA, 20 nt, Vaccinia virus
uaguuaauggagaaauacuu

SEQ ID NO: 3264404 - RNA, 17 nt, Vaccinia virus
aauugaccguguaauau

SEQ ID NO: 3264405 - RNA, 20 nt, Vaccinia virus
uaacaggggaaugaacagca

SEQ ID NO: 3264406 - RNA, 22 nt, Vaccinia virus
uuagaaaaaaugaugcugguua

SEQ ID NO: 3264407 - RNA, 12 nt, Vaccinia virus
cuucgcaauaau

SEQ ID NO: 3264408 - RNA, 17 nt, Vaccinia virus
aguacuacuagguagaa

SEQ ID NO: 3264409 - RNA, 12 nt, Vaccinia virus
gccaaaaugaua

SEQ ID NO: 3264410 - RNA, 22 nt, Vaccinia virus
guguuccggagaaucaguaaag

SEQ ID NO: 3264411 - RNA, 19 nt, Vaccinia virus
acaaauuaaacucuggaau

SEQ ID NO: 3264412 - RNA, 15 nt, Vaccinia virus
auccguagaaauaug

SEQ ID NO: 3264413 - RNA, 19 nt, Vaccinia virus
uuaucagugucguaaauua

SEQ ID NO: 3264414 - RNA, 22 nt, Vaccinia virus
auuguccauaggauacuuugua

SEQ ID NO: 3264415 - RNA, 21 nt, Vaccinia virus
auuugucuuccuuaacuauau

SEQ ID NO: 3264416 - RNA, 14 nt, Vaccinia virus
cuaguagaaaagau

SEQ ID NO: 3264417 - RNA, 13 nt, Vaccinia virus
cuggaucuggaaa

SEQ ID NO: 3264418 - RNA, 14 nt, Vaccinia virus
guuuaauauugcac

SEQ ID NO: 3264419 - RNA, 21 nt, Vaccinia virus
aauguuaagcauauccugaau

SEQ ID NO: 3264420 - RNA, 17 nt, Vaccinia virus
aggcaaaagaugucaag

SEQ ID NO: 3264421 - RNA, 15 nt, Vaccinia virus
aaucuaguaaaacuu

SEQ ID NO: 3264422 - RNA, 18 nt, Vaccinia virus
augccuuaggauauguaa

SEQ ID NO: 3264423 - RNA, 18 nt, Vaccinia virus
gaaucgauuuuguaauau

SEQ ID NO: 3264424 - RNA, 18 nt, Vaccinia virus
uauggagcgaguguuaca

SEQ ID NO: 3264425 - RNA, 13 nt, Vaccinia virus
agacauaaauaaa

SEQ ID NO: 3264426 - RNA, 22 nt, Vaccinia virus
auguguguccggaguuagaaag

SEQ ID NO: 3264427 - RNA, 22 nt, Vaccinia virus
acagacuguuauaaucaaagau

SEQ ID NO: 3264428 - RNA, 15 nt, Vaccinia virus
gauagccaacuauac

SEQ ID NO: 3264429 - RNA, 22 nt, Vaccinia virus
uuaauuuccggaucuacauuuu

SEQ ID NO: 3264430 - RNA, 18 nt, Vaccinia virus
auucucauuaauuaacca

SEQ ID NO: 3264431 - RNA, 20 nt, Vaccinia virus
acagguagaauuuauaaaca

SEQ ID NO: 3264432 - RNA, 20 nt, Vaccinia virus
caugacuuaugaauacuaau

SEQ ID NO: 3264433 - RNA, 11 nt, Vaccinia virus
cguugaugaau

SEQ ID NO: 3264434 - RNA, 23 nt, Vaccinia virus
caaaauuaacagauaaaaagacu

SEQ ID NO: 3264435 - RNA, 12 nt, Vaccinia virus
gauguauccaca

SEQ ID NO: 3264436 - RNA, 16 nt, Vaccinia virus
guauacuugucaucau

SEQ ID NO: 3264437 - RNA, 13 nt, Vaccinia virus
uggauguagauuu

SEQ ID NO: 3264438 - RNA, 17 nt, Vaccinia virus
gguaugauuuuugucca

SEQ ID NO: 3264439 - RNA, 15 nt, Vaccinia virus
acaaugauaaugaua

SEQ ID NO: 3264440 - RNA, 20 nt, Vaccinia virus
uuuuaggauaugcuuucaua

SEQ ID NO: 3264441 - RNA, 19 nt, Vaccinia virus
guggucaauuacaaauaaa

SEQ ID NO: 3264442 - RNA, 21 nt, Vaccinia virus
auagauggcacuguucuauga

SEQ ID NO: 3264443 - RNA, 13 nt, Vaccinia virus
auauauuagaaau

SEQ ID NO: 3264444 - RNA, 16 nt, Vaccinia virus
cuccuuuaaaauuaau

SEQ ID NO: 3264445 - RNA, 19 nt, Vaccinia virus
aucaaaaucguauaaaguu

SEQ ID NO: 3264446 - RNA, 17 nt, Vaccinia virus
gaugacuccaucuuuua

SEQ ID NO: 3264447 - RNA, 20 nt, Vaccinia virus
uaacaugcgguucaaaauag

SEQ ID NO: 3264448 - RNA, 17 nt, Vaccinia virus
uuauugauaaagaucua

SEQ ID NO: 3264449 - RNA, 20 nt, Vaccinia virus
caacagacgagacuccggaa

SEQ ID NO: 3264450 - RNA, 21 nt, Vaccinia virus
uggaaauacuuccaucaacau

SEQ ID NO: 3264451 - RNA, 21 nt, Vaccinia virus
agauacagauguuacaaaugu

SEQ ID NO: 3264452 - RNA, 17 nt, Vaccinia virus
cgucucugccauggaug

SEQ ID NO: 3264453 - RNA, 16 nt, Vaccinia virus
agauauaucuacuucu

SEQ ID NO: 3264454 - RNA, 17 nt, Vaccinia virus
gcagucggauuggaaca

SEQ ID NO: 3264455 - RNA, 15 nt, Vaccinia virus
cgcccaaaauagacg

SEQ ID NO: 3264456 - RNA, 19 nt, Vaccinia virus
aaaaugugucaagaaucua

SEQ ID NO: 3264457 - RNA, 16 nt, Vaccinia virus
acacuacccaauaaau

SEQ ID NO: 3264458 - RNA, 15 nt, Vaccinia virus
gccagaucuucuucu

SEQ ID NO: 3264459 - RNA, 16 nt, Vaccinia virus
gaacagauaguuuauu

SEQ ID NO: 3264460 - RNA, 14 nt, Vaccinia virus
uuaauaauguagua

SEQ ID NO: 3264461 - RNA, 21 nt, Vaccinia virus
aagccauuguugucugaaaua

SEQ ID NO: 3264462 - RNA, 13 nt, Vaccinia virus
aucuauuagaaaa

SEQ ID NO: 3264463 - RNA, 18 nt, Vaccinia virus
augagaucuucuauuuua

SEQ ID NO: 3264464 - RNA, 21 nt, Vaccinia virus
cgucuaccgaaacaucguuua

SEQ ID NO: 3264465 - RNA, 16 nt, Vaccinia virus
agcaucauaaaaauga

SEQ ID NO: 3264466 - RNA, 23 nt, Vaccinia virus
aaugaacaucgggaauauagaau

SEQ ID NO: 3264467 - RNA, 18 nt, Vaccinia virus
ugucccaucagcauguag

SEQ ID NO: 3264468 - RNA, 16 nt, Vaccinia virus
aaucuaaaagaauugg

SEQ ID NO: 3264469 - RNA, 23 nt, Vaccinia virus
aaaaaguauacguccuguggugu

SEQ ID NO: 3264470 - RNA, 15 nt, Vaccinia virus
cuaaucuuuaauaga

SEQ ID NO: 3264471 - RNA, 20 nt, Vaccinia virus
auuagaaaaaguguauucau

SEQ ID NO: 3264472 - RNA, 21 nt, Vaccinia virus
uuaaagauauuguuacaccac

SEQ ID NO: 3264473 - RNA, 16 nt, Vaccinia virus
accaauacuuuuguua

SEQ ID NO: 3264474 - RNA, 16 nt, Vaccinia virus
agugguauaucuuguu

SEQ ID NO: 3264475 - RNA, 22 nt, Vaccinia virus
ccgccuuaaauguaucuuuacu

SEQ ID NO: 3264476 - RNA, 21 nt, Vaccinia virus
auauuuuugauggguaagcca

SEQ ID NO: 3264477 - RNA, 18 nt, Vaccinia virus
ucuagaucucuagaauau

SEQ ID NO: 3264478 - RNA, 19 nt, Vaccinia virus
agaucugaauuaaauaugu

SEQ ID NO: 3264479 - RNA, 16 nt, Vaccinia virus
uauacuugucaucauu

SEQ ID NO: 3264480 - RNA, 22 nt, Vaccinia virus
agacguucacgacacuggaaaa

SEQ ID NO: 3264481 - RNA, 15 nt, Vaccinia virus
gaucuucuacaauau

SEQ ID NO: 3264482 - RNA, 20 nt, Vaccinia virus
aucgugcacccaacguauuu

SEQ ID NO: 3264483 - RNA, 13 nt, Vaccinia virus
aaguucuggaaua

SEQ ID NO: 3264484 - RNA, 16 nt, Vaccinia virus
gccacauuuaguuaac

SEQ ID NO: 3264485 - RNA, 12 nt, Vaccinia virus
aacaguauuauu

SEQ ID NO: 3264486 - RNA, 17 nt, Vaccinia virus
uauuauucauuuucuau

SEQ ID NO: 3264487 - RNA, 23 nt, Vaccinia virus
aaucuuuuuauuaguaggcaucu

SEQ ID NO: 3264488 - RNA, 16 nt, Vaccinia virus
aaaagauacguacugu

SEQ ID NO: 3264489 - RNA, 14 nt, Vaccinia virus
gaaacaauguuucu

SEQ ID NO: 3264490 - RNA, 16 nt, Vaccinia virus
agaagauuaaacauau

SEQ ID NO: 3264491 - RNA, 18 nt, Vaccinia virus
aucaugucuaaugaugaa

SEQ ID NO: 3264492 - RNA, 20 nt, Vaccinia virus
uccgagauaauuucuccaga

SEQ ID NO: 3264493 - RNA, 14 nt, Vaccinia virus
cuaagagaugaaaa

SEQ ID NO: 3264494 - RNA, 16 nt, Vaccinia virus
uauauuuucauuuaaa

SEQ ID NO: 3264495 - RNA, 16 nt, Vaccinia virus
uaacgaugaaaaccag

SEQ ID NO: 3264496 - RNA, 12 nt, Vaccinia virus
aacgaacuagag

SEQ ID NO: 3264497 - RNA, 21 nt, Vaccinia virus
uaaccaaaaugaaaauacuuu

SEQ ID NO: 3264498 - RNA, 18 nt, Vaccinia virus
agcauucgcuaaaaaauu

SEQ ID NO: 3264499 - RNA, 15 nt, Vaccinia virus
acgcgucuuuaacuc

SEQ ID NO: 3264500 - RNA, 22 nt, Vaccinia virus
augauuuggcuagauucaacau

SEQ ID NO: 3264501 - RNA, 13 nt, Vaccinia virus
auaagauuuccaa

SEQ ID NO: 3264502 - RNA, 14 nt, Vaccinia virus
uaaaugauaucuua

SEQ ID NO: 3264503 - RNA, 16 nt, Vaccinia virus
uuaccaacucuuuaau

SEQ ID NO: 3264504 - RNA, 19 nt, Vaccinia virus
gauucuucacaagugaaau

SEQ ID NO: 3264505 - RNA, 16 nt, Vaccinia virus
auaacauuaauaucaa

SEQ ID NO: 3264506 - RNA, 19 nt, Vaccinia virus
uaugacgcaguaacauaua

SEQ ID NO: 3264507 - RNA, 22 nt, Vaccinia virus
uguguuaucagccgcuacagaa

SEQ ID NO: 3264508 - RNA, 18 nt, Vaccinia virus
gugguguaacaauaucuu

SEQ ID NO: 3264509 - RNA, 22 nt, Vaccinia virus
aacaccuugugcauuauguaaa

SEQ ID NO: 3264510 - RNA, 21 nt, Vaccinia virus
agaguaaccccauauaaugua

SEQ ID NO: 3264511 - RNA, 17 nt, Vaccinia virus
auaaccuagaaaauaua

SEQ ID NO: 3264512 - RNA, 17 nt, Vaccinia virus
uucaguuucucaucuuu

SEQ ID NO: 3264513 - RNA, 14 nt, Vaccinia virus
ucuuagcgaaugau

SEQ ID NO: 3264514 - RNA, 14 nt, Vaccinia virus
ugugucuacauaaa

SEQ ID NO: 3264515 - RNA, 18 nt, Vaccinia virus
auugggauaaaaauuaug

SEQ ID NO: 3264516 - RNA, 12 nt, Vaccinia virus
uugcguauacau

SEQ ID NO: 3264517 - RNA, 23 nt, Vaccinia virus
acuaugucaguaguauacaucau

SEQ ID NO: 3264518 - RNA, 18 nt, Vaccinia virus
uucaucggcauauuauua

SEQ ID NO: 3264519 - RNA, 15 nt, Vaccinia virus
uuaaggggaaaaagc

SEQ ID NO: 3264520 - RNA, 22 nt, Vaccinia virus
ggauucauuaauaucuuuauaa

SEQ ID NO: 3264521 - RNA, 16 nt, Vaccinia virus
gaaaauaacaaaucua

SEQ ID NO: 3264522 - RNA, 18 nt, Vaccinia virus
uuuaaaucccaauucaga

SEQ ID NO: 3264523 - RNA, 17 nt, Vaccinia virus
acauuuccgaaugaaug

SEQ ID NO: 3264524 - RNA, 13 nt, Vaccinia virus
caagaauaaacga

SEQ ID NO: 3264525 - RNA, 18 nt, Vaccinia virus
uaaauguuuucucuguaa

SEQ ID NO: 3264526 - RNA, 17 nt, Vaccinia virus
augguaaaauuaaauag

SEQ ID NO: 3264527 - RNA, 21 nt, Vaccinia virus
auauguuuuaauauuuacaag

SEQ ID NO: 3264528 - RNA, 15 nt, Vaccinia virus
gaucuaauuuuucau

SEQ ID NO: 3264529 - RNA, 23 nt, Vaccinia virus
cuguuguauaugaucauuuugau

SEQ ID NO: 3264530 - RNA, 13 nt, Vaccinia virus
aaaauacauaaag

SEQ ID NO: 3264531 - RNA, 21 nt, Vaccinia virus
aucaacgaguucaaauaugaa

SEQ ID NO: 3264532 - RNA, 15 nt, Vaccinia virus
aacucguaaaaagau

SEQ ID NO: 3264533 - RNA, 13 nt, Vaccinia virus
augaucuuaauuu

SEQ ID NO: 3264534 - RNA, 20 nt, Vaccinia virus
acagcacuguggaugugaca

SEQ ID NO: 3264535 - RNA, 20 nt, Vaccinia virus
aacucucuucuauaaaaaug

SEQ ID NO: 3264536 - RNA, 14 nt, Vaccinia virus
aggcauuaacuaga

SEQ ID NO: 3264537 - RNA, 19 nt, Vaccinia virus
uuagaguaguaucauuaaa

SEQ ID NO: 3264538 - RNA, 23 nt, Vaccinia virus
aaaucuuucauuucuuccuggua

SEQ ID NO: 3264539 - RNA, 20 nt, Vaccinia virus
agaaaugaaguuaugacauu

SEQ ID NO: 3264540 - RNA, 22 nt, Vaccinia virus
uccguguaauccauaauccagu

SEQ ID NO: 3264541 - RNA, 17 nt, Vaccinia virus
cuuuugcggacauuuuc

SEQ ID NO: 3264542 - RNA, 19 nt, Vaccinia virus
uuuacccacuauaaaauaa

SEQ ID NO: 3264543 - RNA, 23 nt, Vaccinia virus
gcaguacuacuagguagaagaau

SEQ ID NO: 3264544 - RNA, 14 nt, Vaccinia virus
aaagacuucuuucu

SEQ ID NO: 3264545 - RNA, 21 nt, Vaccinia virus
auauaguucgucauuuaauaa

SEQ ID NO: 3264546 - RNA, 15 nt, Vaccinia virus
auguuagaacuguag

SEQ ID NO: 3264547 - RNA, 15 nt, Vaccinia virus
uagcgacauaaacau

SEQ ID NO: 3264548 - RNA, 19 nt, Vaccinia virus
aaucaaggaacuaaauaga

SEQ ID NO: 3264549 - RNA, 15 nt, Vaccinia virus
gagauuuaguuuauc

SEQ ID NO: 3264550 - RNA, 13 nt, Vaccinia virus
aaccauaaauaca

SEQ ID NO: 3264551 - RNA, 20 nt, Vaccinia virus
uuacugaggggaaaaucaau

SEQ ID NO: 3264552 - RNA, 16 nt, Vaccinia virus
gccaauugucuuucuc

SEQ ID NO: 3264553 - RNA, 18 nt, Vaccinia virus
uuaacgcaccuauaaaga

SEQ ID NO: 3264554 - RNA, 21 nt, Vaccinia virus
caucugauaauuuagauaauu

SEQ ID NO: 3264555 - RNA, 16 nt, Vaccinia virus
agaacacacuuuucuc

SEQ ID NO: 3264556 - RNA, 13 nt, Vaccinia virus
uacggccauccag

SEQ ID NO: 3264557 - RNA, 16 nt, Vaccinia virus
gauauauaucauaaau

SEQ ID NO: 3264558 - RNA, 15 nt, Vaccinia virus
aacuaauauuaggaa

SEQ ID NO: 3264559 - RNA, 12 nt, Vaccinia virus
augauaaaugau

SEQ ID NO: 3264560 - RNA, 16 nt, Vaccinia virus
acaaccucauacuacu

SEQ ID NO: 3264561 - RNA, 13 nt, Vaccinia virus
auaagaacuauau

SEQ ID NO: 3264562 - RNA, 12 nt, Vaccinia virus
uucuguacaaag

SEQ ID NO: 3264563 - RNA, 16 nt, Vaccinia virus
gcaaacuuaacagcuc

SEQ ID NO: 3264564 - RNA, 22 nt, Vaccinia virus
gauucugauaacauaaaaauau

SEQ ID NO: 3264565 - RNA, 19 nt, Vaccinia virus
ccguacaacauacuguuua

SEQ ID NO: 3264566 - RNA, 19 nt, Vaccinia virus
cagagguuaauauagaagc

SEQ ID NO: 3264567 - RNA, 12 nt, Vaccinia virus
aauuauauaaau

SEQ ID NO: 3264568 - RNA, 22 nt, Vaccinia virus
uauacaaggcggauguugugaa

SEQ ID NO: 3264569 - RNA, 16 nt, Vaccinia virus
auuaucaaagucacaa

SEQ ID NO: 3264570 - RNA, 18 nt, Vaccinia virus
auauauuugaaaaucguu

SEQ ID NO: 3264571 - RNA, 14 nt, Vaccinia virus
auugauuuuggaaa

SEQ ID NO: 3264572 - RNA, 16 nt, Vaccinia virus
uaauugaguaaaugaa

SEQ ID NO: 3264573 - RNA, 19 nt, Vaccinia virus
auacaugucuuagauguuc

SEQ ID NO: 3264574 - RNA, 23 nt, Vaccinia virus
aaaaauacaugggaaaugauauc

SEQ ID NO: 3264575 - RNA, 21 nt, Vaccinia virus
aauaugcggaaccucgagaau

SEQ ID NO: 3264576 - RNA, 15 nt, Vaccinia virus
uggaagauauuucca

SEQ ID NO: 3264577 - RNA, 18 nt, Vaccinia virus
cuaugucaaaaauuguag

SEQ ID NO: 3264578 - RNA, 22 nt, Vaccinia virus
auugucugacauaagaugucua

SEQ ID NO: 3264579 - RNA, 14 nt, Vaccinia virus
uucaucaaacauua

SEQ ID NO: 3264580 - RNA, 12 nt, Vaccinia virus
uggauuuggauu

SEQ ID NO: 3264581 - RNA, 13 nt, Vaccinia virus
uauaaauuuuaga

SEQ ID NO: 3264582 - RNA, 20 nt, Vaccinia virus
aucccuucucgcaaauucua

SEQ ID NO: 3264583 - RNA, 15 nt, Vaccinia virus
cgguaacaaauguuc

SEQ ID NO: 3264584 - RNA, 19 nt, Vaccinia virus
auaucgaacaaauuccaag

SEQ ID NO: 3264585 - RNA, 17 nt, Vaccinia virus
auagacuuucucuaaau

SEQ ID NO: 3264586 - RNA, 20 nt, Vaccinia virus
uaauagaucaacagaaauau

SEQ ID NO: 3264587 - RNA, 23 nt, Vaccinia virus
uauaauuuuauugagauuucuga

SEQ ID NO: 3264588 - RNA, 16 nt, Vaccinia virus
aaauagauagaaucua

SEQ ID NO: 3264589 - RNA, 16 nt, Vaccinia virus
aaggcgguauauguau

SEQ ID NO: 3264590 - RNA, 14 nt, Vaccinia virus
uuggauauguggaa

SEQ ID NO: 3264591 - RNA, 19 nt, Vaccinia virus
aaauaauacgaauauauca

SEQ ID NO: 3264592 - RNA, 19 nt, Vaccinia virus
agcuucaucuauaucuaga

SEQ ID NO: 3264593 - RNA, 23 nt, Vaccinia virus
uaaucauauuuagacugauguau

SEQ ID NO: 3264594 - RNA, 19 nt, Vaccinia virus
gaaaucuaucuuauauaca

SEQ ID NO: 3264595 - RNA, 16 nt, Vaccinia virus
agaaaauccuguaaua

SEQ ID NO: 3264596 - RNA, 15 nt, Vaccinia virus
caucuggauuucaga

SEQ ID NO: 3264597 - RNA, 18 nt, Vaccinia virus
gaaaguauagcuaaugau

SEQ ID NO: 3264598 - RNA, 18 nt, Vaccinia virus
aaaucuuuaauugucuug

SEQ ID NO: 3264599 - RNA, 21 nt, Vaccinia virus
ccagaacauugaugagacaau

SEQ ID NO: 3264600 - RNA, 14 nt, Vaccinia virus
auaugacaaacauu

SEQ ID NO: 3264601 - RNA, 14 nt, Vaccinia virus
gacaauauuuaguu

SEQ ID NO: 3264602 - RNA, 17 nt, Vaccinia virus
gaacgaggagacuauau

SEQ ID NO: 3264603 - RNA, 17 nt, Vaccinia virus
acaaagauggcugaaau

SEQ ID NO: 3264604 - RNA, 16 nt, Vaccinia virus
caguucguuugaugau

SEQ ID NO: 3264605 - RNA, 20 nt, Vaccinia virus
aauuaaaaaggaaaauacua

SEQ ID NO: 3264606 - RNA, 16 nt, Vaccinia virus
aucuacacauguauuu

SEQ ID NO: 3264607 - RNA, 14 nt, Vaccinia virus
cuucuacaauaucu

SEQ ID NO: 3264608 - RNA, 17 nt, Vaccinia virus
acuuccaauaaaauuac

SEQ ID NO: 3264609 - RNA, 14 nt, Vaccinia virus
gauauauuuuucau

SEQ ID NO: 3264610 - RNA, 18 nt, Vaccinia virus
cuaguuuucuaaguucua

SEQ ID NO: 3264611 - RNA, 17 nt, Vaccinia virus
aauagauaucaugaaga

SEQ ID NO: 3264612 - RNA, 15 nt, Vaccinia virus
uauccucaaacaucc

SEQ ID NO: 3264613 - RNA, 16 nt, Vaccinia virus
ugaugucaucuuccag

SEQ ID NO: 3264614 - RNA, 15 nt, Vaccinia virus
ucauuaaaauaugug

SEQ ID NO: 3264615 - RNA, 22 nt, Vaccinia virus
ucauaacuugagagcauccagu

SEQ ID NO: 3264616 - RNA, 19 nt, Vaccinia virus
ggauaaucagaauauacac

SEQ ID NO: 3264617 - RNA, 18 nt, Vaccinia virus
cucauauaacuucuagau

SEQ ID NO: 3264618 - RNA, 15 nt, Vaccinia virus
caugggacuauauaa

SEQ ID NO: 3264619 - RNA, 16 nt, Vaccinia virus
gauaacaaauuaaaga

SEQ ID NO: 3264620 - RNA, 13 nt, Vaccinia virus
aguauaaaaauua

SEQ ID NO: 3264621 - RNA, 19 nt, Vaccinia virus
gucacuacguaauaaaagu

SEQ ID NO: 3264622 - RNA, 21 nt, Vaccinia virus
agcgaugauauguuaaauaua

SEQ ID NO: 3264623 - RNA, 12 nt, Vaccinia virus
cauuuuuaggau

SEQ ID NO: 3264624 - RNA, 23 nt, Vaccinia virus
aaaauacauaugacaaacauugu

SEQ ID NO: 3264625 - RNA, 21 nt, Vaccinia virus
caauuuuucagauuuuugaau

SEQ ID NO: 3264626 - RNA, 15 nt, Vaccinia virus
caaggauacacucuc

SEQ ID NO: 3264627 - RNA, 14 nt, Vaccinia virus
uaguuuauaucuuu

SEQ ID NO: 3264628 - RNA, 19 nt, Vaccinia virus
uuugucuuccuuaacuaua

SEQ ID NO: 3264629 - RNA, 13 nt, Vaccinia virus
acacauauccacg

SEQ ID NO: 3264630 - RNA, 22 nt, Vaccinia virus
gucaguaguauacaucaugaaa

SEQ ID NO: 3264631 - RNA, 15 nt, Vaccinia virus
auucugaaacaguau

SEQ ID NO: 3264632 - RNA, 22 nt, Vaccinia virus
gauaguauaccaacuauauuac

SEQ ID NO: 3264633 - RNA, 21 nt, Vaccinia virus
aguauuaaauauuaauaagaa

SEQ ID NO: 3264634 - RNA, 14 nt, Vaccinia virus
aaagaaaucuuaug

SEQ ID NO: 3264635 - RNA, 14 nt, Vaccinia virus
aguggaguaauuua

SEQ ID NO: 3264636 - RNA, 21 nt, Vaccinia virus
aauaauaaccagaaaguuacg

SEQ ID NO: 3264637 - RNA, 16 nt, Vaccinia virus
cuacaucuaugucuuu

SEQ ID NO: 3264638 - RNA, 16 nt, Vaccinia virus
agauccucucuucaac

SEQ ID NO: 3264639 - RNA, 22 nt, Vaccinia virus
agauuucuuuuugggaaaaauu

SEQ ID NO: 3264640 - RNA, 15 nt, Vaccinia virus
cuacucguuuggaau

SEQ ID NO: 3264641 - RNA, 22 nt, Vaccinia virus
aggggaaaaauuauaauguuuc

SEQ ID NO: 3264642 - RNA, 21 nt, Vaccinia virus
ugcuuucugauaguauagaua

SEQ ID NO: 3264643 - RNA, 13 nt, Vaccinia virus
cauaaaacauaau

SEQ ID NO: 3264644 - RNA, 14 nt, Vaccinia virus
acugaguaaaugug

SEQ ID NO: 3264645 - RNA, 23 nt, Vaccinia virus
aauaacucauuuauauauuaaaa

SEQ ID NO: 3264646 - RNA, 21 nt, Vaccinia virus
cauuauggauaaucuauuuac

SEQ ID NO: 3264647 - RNA, 17 nt, Vaccinia virus
agcaaugcuauaccuaa

SEQ ID NO: 3264648 - RNA, 16 nt, Vaccinia virus
aaauaaguaaaaagug

SEQ ID NO: 3264649 - RNA, 16 nt, Vaccinia virus
aaauuuuuaauccaaa

SEQ ID NO: 3264650 - RNA, 16 nt, Vaccinia virus
aaaucuaguuguggaa

SEQ ID NO: 3264651 - RNA, 22 nt, Vaccinia virus
uaaaugaucggaucuaaaaucc

SEQ ID NO: 3264652 - RNA, 13 nt, Vaccinia virus
ugauaaauuauuu

SEQ ID NO: 3264653 - RNA, 20 nt, Vaccinia virus
uuugaaauaucuuaugauga

SEQ ID NO: 3264654 - RNA, 16 nt, Vaccinia virus
auacacaugauugaca

SEQ ID NO: 3264655 - RNA, 13 nt, Vaccinia virus
augucuacauaaa

SEQ ID NO: 3264656 - RNA, 17 nt, Vaccinia virus
ucauuauuauguugaua

SEQ ID NO: 3264657 - RNA, 15 nt, Vaccinia virus
acgacguuuacaucg

SEQ ID NO: 3264658 - RNA, 13 nt, Vaccinia virus
ucaaauagauguu

SEQ ID NO: 3264659 - RNA, 19 nt, Vaccinia virus
acuucaaaguuguuaaaaa

SEQ ID NO: 3264660 - RNA, 15 nt, Vaccinia virus
uagauugacgacuuu

SEQ ID NO: 3264661 - RNA, 18 nt, Vaccinia virus
gaaucacguguuaaacaa

SEQ ID NO: 3264662 - RNA, 15 nt, Vaccinia virus
uccucaggauucuaa

SEQ ID NO: 3264663 - RNA, 16 nt, Vaccinia virus
ucuuuccguacaacau

SEQ ID NO: 3264664 - RNA, 14 nt, Vaccinia virus
ugaaaauaacucuc

SEQ ID NO: 3264665 - RNA, 21 nt, Vaccinia virus
acuguaucaaccggauuuaaa

SEQ ID NO: 3264666 - RNA, 14 nt, Vaccinia virus
acuauauguuccag

SEQ ID NO: 3264667 - RNA, 15 nt, Vaccinia virus
gauaguauuauucau

SEQ ID NO: 3264668 - RNA, 20 nt, Vaccinia virus
uugauaucgcauagaaauac

SEQ ID NO: 3264669 - RNA, 23 nt, Vaccinia virus
cuaaaauaguucuguaauauguc

SEQ ID NO: 3264670 - RNA, 15 nt, Vaccinia virus
auuuucucuugaaaa

SEQ ID NO: 3264671 - RNA, 16 nt, Vaccinia virus
cuggauaauauauacg

SEQ ID NO: 3264672 - RNA, 19 nt, Vaccinia virus
guaauguccaaaucuaguu

SEQ ID NO: 3264673 - RNA, 15 nt, Vaccinia virus
aauagauuuuucaua

SEQ ID NO: 3264674 - RNA, 16 nt, Vaccinia virus
augaucuccacgcaau

SEQ ID NO: 3264675 - RNA, 17 nt, Vaccinia virus
cucuuccgucaccaaaa

SEQ ID NO: 3264676 - RNA, 19 nt, Vaccinia virus
acaaucaucuuggagcaac

SEQ ID NO: 3264677 - RNA, 16 nt, Vaccinia virus
auuagacgaugugaga

SEQ ID NO: 3264678 - RNA, 15 nt, Vaccinia virus
aucuguaaaaguugu

SEQ ID NO: 3264679 - RNA, 16 nt, Vaccinia virus
aauaauauaacucguu

SEQ ID NO: 3264680 - RNA, 20 nt, Vaccinia virus
ucgcaagaauuuauuucuaa

SEQ ID NO: 3264681 - RNA, 15 nt, Vaccinia virus
auaauuauuagaaua

SEQ ID NO: 3264682 - RNA, 18 nt, Vaccinia virus
gauagcauuaauacagua

SEQ ID NO: 3264683 - RNA, 16 nt, Vaccinia virus
guaucuacgauuuuua

SEQ ID NO: 3264684 - RNA, 17 nt, Vaccinia virus
uagaguccauuuaaagu

SEQ ID NO: 3264685 - RNA, 15 nt, Vaccinia virus
gauaacuguuuaaaa

SEQ ID NO: 3264686 - RNA, 13 nt, Vaccinia virus
auucguaaaucuu

SEQ ID NO: 3264687 - RNA, 19 nt, Vaccinia virus
cauauacuauuuauaagau

SEQ ID NO: 3264688 - RNA, 10 nt, Vaccinia virus
cgauauuaau

SEQ ID NO: 3264689 - RNA, 17 nt, Vaccinia virus
ugauguaagucuuacaa

SEQ ID NO: 3264690 - RNA, 14 nt, Vaccinia virus
uuucaucuagauac

SEQ ID NO: 3264691 - RNA, 20 nt, Vaccinia virus
auuaaacaagugauacguaa

SEQ ID NO: 3264692 - RNA, 16 nt, Vaccinia virus
aauaaaucacuuuuua

SEQ ID NO: 3264693 - RNA, 15 nt, Vaccinia virus
acuaugcuauuugca

SEQ ID NO: 3264694 - RNA, 19 nt, Vaccinia virus
gauacaaaaucuaaacaaa

SEQ ID NO: 3264695 - RNA, 17 nt, Vaccinia virus
guaaaaaguuuauuaau

SEQ ID NO: 3264696 - RNA, 17 nt, Vaccinia virus
auaguuuuuuaauucca

SEQ ID NO: 3264697 - RNA, 17 nt, Vaccinia virus
caguccagaaauauuua

SEQ ID NO: 3264698 - RNA, 13 nt, Vaccinia virus
guuaaauuauuau

SEQ ID NO: 3264699 - RNA, 19 nt, Vaccinia virus
ucuuccauguccaauauga

SEQ ID NO: 3264700 - RNA, 15 nt, Vaccinia virus
uuucuuuuuaaugau

SEQ ID NO: 3264701 - RNA, 20 nt, Vaccinia virus
aaaucuaguaucguaucauu

SEQ ID NO: 3264702 - RNA, 19 nt, Vaccinia virus
uauaaaaaaacauuauucu

SEQ ID NO: 3264703 - RNA, 18 nt, Vaccinia virus
agcaaaucuaguaaauca

SEQ ID NO: 3264704 - RNA, 15 nt, Vaccinia virus
cauauugaucauuua

SEQ ID NO: 3264705 - RNA, 21 nt, Vaccinia virus
acauuuucacaaauacuacaa

SEQ ID NO: 3264706 - RNA, 17 nt, Vaccinia virus
uuaauagauauauuaau

SEQ ID NO: 3264707 - RNA, 23 nt, Vaccinia virus
gacguagucgaacguuaguucca

SEQ ID NO: 3264708 - RNA, 16 nt, Vaccinia virus
auaauaggguaucuaa

SEQ ID NO: 3264709 - RNA, 17 nt, Vaccinia virus
gauauccauagauggag

SEQ ID NO: 3264710 - RNA, 15 nt, Vaccinia virus
uauucuauuuuacua

SEQ ID NO: 3264711 - RNA, 19 nt, Vaccinia virus
acuccugguaauacugaug

SEQ ID NO: 3264712 - RNA, 17 nt, Vaccinia virus
uauuucaggaacaggau

SEQ ID NO: 3264713 - RNA, 13 nt, Vaccinia virus
auauaaaaacauu

SEQ ID NO: 3264714 - RNA, 23 nt, Vaccinia virus
cugagauuuguuuuguuaaacaa

SEQ ID NO: 3264715 - RNA, 20 nt, Vaccinia virus
auuccuaccaaacaaaauuu

SEQ ID NO: 3264716 - RNA, 19 nt, Vaccinia virus
augauauauuaaacaagga

SEQ ID NO: 3264717 - RNA, 15 nt, Vaccinia virus
aaacaaaauuuuacu

SEQ ID NO: 3264718 - RNA, 21 nt, Vaccinia virus
gacaauauuuaguuuauucau

SEQ ID NO: 3264719 - RNA, 15 nt, Vaccinia virus
guguccauaauccuc

SEQ ID NO: 3264720 - RNA, 15 nt, Vaccinia virus
uauacuaucgaugau

SEQ ID NO: 3264721 - RNA, 22 nt, Vaccinia virus
agaugcuaguguaccaauaugu

SEQ ID NO: 3264722 - RNA, 11 nt, Vaccinia virus
aauauuucauu

SEQ ID NO: 3264723 - RNA, 13 nt, Vaccinia virus
gauauuaaacaag

SEQ ID NO: 3264724 - RNA, 20 nt, Vaccinia virus
cauacucguuaguuuggaau

SEQ ID NO: 3264725 - RNA, 21 nt, Vaccinia virus
aggcauguugauggaaaaauu

SEQ ID NO: 3264726 - RNA, 18 nt, Vaccinia virus
aagugacaacaaaaaaug

SEQ ID NO: 3264727 - RNA, 19 nt, Vaccinia virus
acaaaaucaacuacauaau

SEQ ID NO: 3264728 - RNA, 17 nt, Vaccinia virus
uaauaguguacuacaaa

SEQ ID NO: 3264729 - RNA, 19 nt, Vaccinia virus
cugauuaacuuccacauua

SEQ ID NO: 3264730 - RNA, 12 nt, Vaccinia virus
guuaucucagaa

SEQ ID NO: 3264731 - RNA, 18 nt, Vaccinia virus
uauuacagaaguuuugaa

SEQ ID NO: 3264732 - RNA, 15 nt, Vaccinia virus
aucugaauuaaauau

SEQ ID NO: 3264733 - RNA, 12 nt, Vaccinia virus
uuuaucuauacu

SEQ ID NO: 3264734 - RNA, 23 nt, Vaccinia virus
aauuuaguuacugcuauacagau

SEQ ID NO: 3264735 - RNA, 15 nt, Vaccinia virus
cgaaaaaugaugaag

SEQ ID NO: 3264736 - RNA, 18 nt, Vaccinia virus
aagucgacaaccaaacgu

SEQ ID NO: 3264737 - RNA, 19 nt, Vaccinia virus
aauaauucauguauuucga

SEQ ID NO: 3264738 - RNA, 13 nt, Vaccinia virus
aucuaaugaauga

SEQ ID NO: 3264739 - RNA, 17 nt, Vaccinia virus
acgccaauacauguuuu

SEQ ID NO: 3264740 - RNA, 14 nt, Vaccinia virus
uuauuuuugaagau

SEQ ID NO: 3264741 - RNA, 20 nt, Vaccinia virus
auugauaguaccaaauucuu

SEQ ID NO: 3264742 - RNA, 12 nt, Vaccinia virus
agugauuuuaca

SEQ ID NO: 3264743 - RNA, 23 nt, Vaccinia virus
cauuucuaauacaugacaauaaa

SEQ ID NO: 3264744 - RNA, 14 nt, Vaccinia virus
uucccaaauaauca

SEQ ID NO: 3264745 - RNA, 14 nt, Vaccinia virus
aacuuuaaauacuu

SEQ ID NO: 3264746 - RNA, 20 nt, Vaccinia virus
uuuguccacguucuuuaauu

SEQ ID NO: 3264747 - RNA, 13 nt, Vaccinia virus
aauucuaaaugau

SEQ ID NO: 3264748 - RNA, 13 nt, Vaccinia virus
cuuggaaguuuua

SEQ ID NO: 3264749 - RNA, 14 nt, Vaccinia virus
gcugguaaaguaaa

SEQ ID NO: 3264750 - RNA, 17 nt, Vaccinia virus
aauuagugaucaguuua

SEQ ID NO: 3264751 - RNA, 20 nt, Vaccinia virus
guggauacaaugaguauuua

SEQ ID NO: 3264752 - RNA, 18 nt, Vaccinia virus
acuccauuaaauaauuua

SEQ ID NO: 3264753 - RNA, 15 nt, Vaccinia virus
acaauaucauaaaca

SEQ ID NO: 3264754 - RNA, 15 nt, Vaccinia virus
cauuaggaaauguuu

SEQ ID NO: 3264755 - RNA, 13 nt, Vaccinia virus
aaucaaaaaauaa

SEQ ID NO: 3264756 - RNA, 19 nt, Vaccinia virus
acgauaccaucuucuggaa

SEQ ID NO: 3264757 - RNA, 20 nt, Vaccinia virus
gacgucaauggcaaaaauau

SEQ ID NO: 3264758 - RNA, 15 nt, Vaccinia virus
caguauuauuaauau

SEQ ID NO: 3264759 - RNA, 17 nt, Vaccinia virus
acaucccgguuaaacau

SEQ ID NO: 3264760 - RNA, 14 nt, Vaccinia virus
cuuuaauagauaua

SEQ ID NO: 3264761 - RNA, 15 nt, Vaccinia virus
acagaaacuguaaag

SEQ ID NO: 3264762 - RNA, 14 nt, Vaccinia virus
uaaauccagaaguu

SEQ ID NO: 3264763 - RNA, 18 nt, Vaccinia virus
ggauaaaacaaaaaugcu

SEQ ID NO: 3264764 - RNA, 15 nt, Vaccinia virus
uauacauaaacugau

SEQ ID NO: 3264765 - RNA, 19 nt, Vaccinia virus
auaaucaucgaauacuucg

SEQ ID NO: 3264766 - RNA, 15 nt, Vaccinia virus
auccuucuagaauua

SEQ ID NO: 3264767 - RNA, 18 nt, Vaccinia virus
uacauacgaauaacaaaa

SEQ ID NO: 3264768 - RNA, 20 nt, Vaccinia virus
aucuaaagauaaucuucucu

SEQ ID NO: 3264769 - RNA, 12 nt, Vaccinia virus
aucaaacacaag

SEQ ID NO: 3264770 - RNA, 21 nt, Vaccinia virus
aucugacucggacucuguaau

SEQ ID NO: 3264771 - RNA, 21 nt, Vaccinia virus
acuuuacgcuauuaaucuuua

SEQ ID NO: 3264772 - RNA, 15 nt, Vaccinia virus
uaaaauuacuuaaag

SEQ ID NO: 3264773 - RNA, 16 nt, Vaccinia virus
gaucauaucuacuaau

SEQ ID NO: 3264774 - RNA, 19 nt, Vaccinia virus
gauacuaauuguagcuauu

SEQ ID NO: 3264775 - RNA, 21 nt, Vaccinia virus
cuuuguaaagaaauuauuuuc

SEQ ID NO: 3264776 - RNA, 20 nt, Vaccinia virus
agaauauauagguaauacau

SEQ ID NO: 3264777 - RNA, 15 nt, Vaccinia virus
uauuccauuaaugac

SEQ ID NO: 3264778 - RNA, 19 nt, Vaccinia virus
ggagaucauuaaauguuuc

SEQ ID NO: 3264779 - RNA, 15 nt, Vaccinia virus
aaucguauaucuucu

SEQ ID NO: 3264780 - RNA, 13 nt, Vaccinia virus
auaagaaacaauu

SEQ ID NO: 3264781 - RNA, 21 nt, Vaccinia virus
uuucuacaauaacuacauauu

SEQ ID NO: 3264782 - RNA, 15 nt, Vaccinia virus
aauugucuuucucuu

SEQ ID NO: 3264783 - RNA, 15 nt, Vaccinia virus
acuaucuuuaauaga

SEQ ID NO: 3264784 - RNA, 18 nt, Vaccinia virus
uaaaucuauuauauuuua

SEQ ID NO: 3264785 - RNA, 21 nt, Vaccinia virus
acgauauuaucgacuaugaau

SEQ ID NO: 3264786 - RNA, 18 nt, Vaccinia virus
auguuuucugucagaaaa

SEQ ID NO: 3264787 - RNA, 21 nt, Vaccinia virus
cuauauacaacgaaacaucua

SEQ ID NO: 3264788 - RNA, 19 nt, Vaccinia virus
auugaaaauacuaauuguu

SEQ ID NO: 3264789 - RNA, 13 nt, Vaccinia virus
gaugguacuuaug

SEQ ID NO: 3264790 - RNA, 16 nt, Vaccinia virus
cagcgugaauaaugua

SEQ ID NO: 3264791 - RNA, 19 nt, Vaccinia virus
auucucuuaauuauaacga

SEQ ID NO: 3264792 - RNA, 17 nt, Vaccinia virus
agacgccugauauguag

SEQ ID NO: 3264793 - RNA, 24 nt, Vaccinia virus
ugaacauauaguucgucauuuaau

SEQ ID NO: 3264794 - RNA, 11 nt, Vaccinia virus
gaaagaauaaa

SEQ ID NO: 3264795 - RNA, 19 nt, Vaccinia virus
agcaauaguauaauuauau

SEQ ID NO: 3264796 - RNA, 16 nt, Vaccinia virus
ggaucuccuauuucuu

SEQ ID NO: 3264797 - RNA, 18 nt, Vaccinia virus
aaacgauauucuugaaau

SEQ ID NO: 3264798 - RNA, 15 nt, Vaccinia virus
auauuaucaccuauu

SEQ ID NO: 3264799 - RNA, 23 nt, Vaccinia virus
auaucaugaugauuugguuguau

SEQ ID NO: 3264800 - RNA, 16 nt, Vaccinia virus
agaaaacuagauacaa

SEQ ID NO: 3264801 - RNA, 17 nt, Vaccinia virus
auacaagcgagugcuuc

SEQ ID NO: 3264802 - RNA, 19 nt, Vaccinia virus
auaaauaucauuaauauau

SEQ ID NO: 3264803 - RNA, 13 nt, Vaccinia virus
acaauuacguaau

SEQ ID NO: 3264804 - RNA, 18 nt, Vaccinia virus
caauucagaaaucaaucu

SEQ ID NO: 3264805 - RNA, 22 nt, Vaccinia virus
uucaauggauacugcaucuguu

SEQ ID NO: 3264806 - RNA, 16 nt, Vaccinia virus
agauguguauguuugu

SEQ ID NO: 3264807 - RNA, 18 nt, Vaccinia virus
agauuagcuucgauguuu

SEQ ID NO: 3264808 - RNA, 22 nt, Vaccinia virus
caaauguuaaacauuaauugau

SEQ ID NO: 3264809 - RNA, 22 nt, Vaccinia virus
acagaaacuguaaagaacagug

SEQ ID NO: 3264810 - RNA, 16 nt, Vaccinia virus
uacuaaagcaaaggua

SEQ ID NO: 3264811 - RNA, 12 nt, Vaccinia virus
ccuaucucugac

SEQ ID NO: 3264812 - RNA, 21 nt, Vaccinia virus
aucuauuaaacagaaauggug

SEQ ID NO: 3264813 - RNA, 14 nt, Vaccinia virus
agaugaucauagau

SEQ ID NO: 3264814 - RNA, 13 nt, Vaccinia virus
augauaauaggaa

SEQ ID NO: 3264815 - RNA, 23 nt, Vaccinia virus
auuaaagagauaguuuuuuucau

SEQ ID NO: 3264816 - RNA, 24 nt, Vaccinia virus
cauccaugagauugaaugccauuu

SEQ ID NO: 3264817 - RNA, 14 nt, Vaccinia virus
aauaucauaaucua

SEQ ID NO: 3264818 - RNA, 14 nt, Vaccinia virus
uuccaaucauugau

SEQ ID NO: 3264819 - RNA, 17 nt, Vaccinia virus
uacguuucuauuuucua

SEQ ID NO: 3264820 - RNA, 16 nt, Vaccinia virus
aauaaaugcuugauau

SEQ ID NO: 3264821 - RNA, 19 nt, Vaccinia virus
acaucugcguuaucaauaa

SEQ ID NO: 3264822 - RNA, 16 nt, Vaccinia virus
cuaauucaaauuguua

SEQ ID NO: 3264823 - RNA, 13 nt, Vaccinia virus
acugauacuaucg

SEQ ID NO: 3264824 - RNA, 16 nt, Vaccinia virus
aaagaaguuguaucau

SEQ ID NO: 3264825 - RNA, 18 nt, Vaccinia virus
gacuuaagacuuaaaacu

SEQ ID NO: 3264826 - RNA, 14 nt, Vaccinia virus
auucguagaaagua

SEQ ID NO: 3264827 - RNA, 19 nt, Vaccinia virus
aguuuaucccuauauucaa

SEQ ID NO: 3264828 - RNA, 17 nt, Vaccinia virus
cuaaauaaauaugugua

SEQ ID NO: 3264829 - RNA, 14 nt, Vaccinia virus
auaaauuauaucua

SEQ ID NO: 3264830 - RNA, 16 nt, Vaccinia virus
aucuuaccaucuucuu

SEQ ID NO: 3264831 - RNA, 19 nt, Vaccinia virus
guuagaacgguuauagcau

SEQ ID NO: 3264832 - RNA, 13 nt, Vaccinia virus
cauuguaaagccc

SEQ ID NO: 3264833 - RNA, 14 nt, Vaccinia virus
aauugauucuauga

SEQ ID NO: 3264834 - RNA, 20 nt, Vaccinia virus
ugauacggcgaugguuuuua

SEQ ID NO: 3264835 - RNA, 20 nt, Vaccinia virus
uacgguuccaccgacucauu

SEQ ID NO: 3264836 - RNA, 13 nt, Vaccinia virus
auaucguuaaaga

SEQ ID NO: 3264837 - RNA, 12 nt, Vaccinia virus
ugagagcaucca

SEQ ID NO: 3264838 - RNA, 18 nt, Vaccinia virus
uauugagaagcauuuagu

SEQ ID NO: 3264839 - RNA, 17 nt, Vaccinia virus
cugauagcaguuucaau

SEQ ID NO: 3264840 - RNA, 16 nt, Vaccinia virus
agccaauccuaacucu

SEQ ID NO: 3264841 - RNA, 15 nt, Vaccinia virus
auagaucaagagaac

SEQ ID NO: 3264842 - RNA, 20 nt, Vaccinia virus
ucuucggcgguuuucaugga

SEQ ID NO: 3264843 - RNA, 21 nt, Vaccinia virus
ccuaacgaugauauguuuuca

SEQ ID NO: 3264844 - RNA, 21 nt, Vaccinia virus
auaaacagucuccuaauauaa

SEQ ID NO: 3264845 - RNA, 17 nt, Vaccinia virus
acauuauuaaucagaau

SEQ ID NO: 3264846 - RNA, 20 nt, Vaccinia virus
aucacagaauucuucaauaa

SEQ ID NO: 3264847 - RNA, 19 nt, Vaccinia virus
uuauuacuuaaguuguaaa

SEQ ID NO: 3264848 - RNA, 14 nt, Vaccinia virus
cuguucaucguuua

SEQ ID NO: 3264849 - RNA, 19 nt, Vaccinia virus
uguauacaucgguaaauaa

SEQ ID NO: 3264850 - RNA, 13 nt, Vaccinia virus
aaaggauauuaug

SEQ ID NO: 3264851 - RNA, 23 nt, Vaccinia virus
agaauacgaugauauuaaaauua

SEQ ID NO: 3264852 - RNA, 14 nt, Vaccinia virus
uaaugcuacagaua

SEQ ID NO: 3264853 - RNA, 15 nt, Vaccinia virus
uauguaucaaagaua

SEQ ID NO: 3264854 - RNA, 17 nt, Vaccinia virus
ucagccauagcaucagc

SEQ ID NO: 3264855 - RNA, 23 nt, Vaccinia virus
aguacgaugcaaugaguaagaca

SEQ ID NO: 3264856 - RNA, 19 nt, Vaccinia virus
augcauucguuuaaagaua

SEQ ID NO: 3264857 - RNA, 14 nt, Vaccinia virus
augacacuguguau

SEQ ID NO: 3264858 - RNA, 21 nt, Vaccinia virus
uaucuuauguauauguuugua

SEQ ID NO: 3264859 - RNA, 13 nt, Vaccinia virus
uagaacaacucuc

SEQ ID NO: 3264860 - RNA, 19 nt, Vaccinia virus
aucuguuaccauaauuccu

SEQ ID NO: 3264861 - RNA, 15 nt, Vaccinia virus
aaggcacuaugucca

SEQ ID NO: 3264862 - RNA, 21 nt, Vaccinia virus
cauacgugccagcuauguuua

SEQ ID NO: 3264863 - RNA, 23 nt, Vaccinia virus
cagauuacgagccagaucuucuu

SEQ ID NO: 3264864 - RNA, 14 nt, Vaccinia virus
ugcuaaaauaccua

SEQ ID NO: 3264865 - RNA, 19 nt, Vaccinia virus
agaauaucuauacauaccu

SEQ ID NO: 3264866 - RNA, 14 nt, Vaccinia virus
agcaaugaaaucac

SEQ ID NO: 3264867 - RNA, 21 nt, Vaccinia virus
auuauuuugugcaaauagaug

SEQ ID NO: 3264868 - RNA, 12 nt, Vaccinia virus
auucuuucaaag

SEQ ID NO: 3264869 - RNA, 18 nt, Vaccinia virus
cucuucaacaucuuugau

SEQ ID NO: 3264870 - RNA, 17 nt, Vaccinia virus
agauuauggagcaaaca

SEQ ID NO: 3264871 - RNA, 16 nt, Vaccinia virus
cgugcguaauauuguu

SEQ ID NO: 3264872 - RNA, 14 nt, Vaccinia virus
gcuaauauauugau

SEQ ID NO: 3264873 - RNA, 20 nt, Vaccinia virus
aaaccaacguaggucuaaau

SEQ ID NO: 3264874 - RNA, 16 nt, Vaccinia virus
acaaaagguauuacaa

SEQ ID NO: 3264875 - RNA, 19 nt, Vaccinia virus
aguauuuuaauacauguau

SEQ ID NO: 3264876 - RNA, 17 nt, Vaccinia virus
guucuuaacaucuauua

SEQ ID NO: 3264877 - RNA, 16 nt, Vaccinia virus
acuuugauagcaagga

SEQ ID NO: 3264878 - RNA, 17 nt, Vaccinia virus
guuaaucccaacaauga

SEQ ID NO: 3264879 - RNA, 15 nt, Vaccinia virus
guacauggaugauau

SEQ ID NO: 3264880 - RNA, 23 nt, Vaccinia virus
auugaugugucuguuuauacaau

SEQ ID NO: 3264881 - RNA, 22 nt, Vaccinia virus
cucuauuuugucauuaacuuua

SEQ ID NO: 3264882 - RNA, 14 nt, Vaccinia virus
uagucuucaauaau

SEQ ID NO: 3264883 - RNA, 12 nt, Vaccinia virus
caaaaagagagu

SEQ ID NO: 3264884 - RNA, 15 nt, Vaccinia virus
aaaacgauauuagaa

SEQ ID NO: 3264885 - RNA, 18 nt, Vaccinia virus
gaaauauauuaagaaauc

SEQ ID NO: 3264886 - RNA, 19 nt, Vaccinia virus
caaauuauuucuucugaau

SEQ ID NO: 3264887 - RNA, 13 nt, Vaccinia virus
uugauuacucuuu

SEQ ID NO: 3264888 - RNA, 16 nt, Vaccinia virus
caugucgucuauuuuc

SEQ ID NO: 3264889 - RNA, 14 nt, Vaccinia virus
ccaccguauccaua

SEQ ID NO: 3264890 - RNA, 21 nt, Vaccinia virus
uuagaucauuaacucuagaaa

SEQ ID NO: 3264891 - RNA, 18 nt, Vaccinia virus
uacuuuuaguucuuuuag

SEQ ID NO: 3264892 - RNA, 22 nt, Vaccinia virus
uagaaagaaauuuguaaucauc

SEQ ID NO: 3264893 - RNA, 15 nt, Vaccinia virus
aaacgaaaacuauau

SEQ ID NO: 3264894 - RNA, 22 nt, Vaccinia virus
acagacaugguaucaacagaua

SEQ ID NO: 3264895 - RNA, 20 nt, Vaccinia virus
caucuaguccuuuaauucca

SEQ ID NO: 3264896 - RNA, 13 nt, Vaccinia virus
uaauaacaaguau

SEQ ID NO: 3264897 - RNA, 23 nt, Vaccinia virus
ucuucucaaaagaucaaggaaau

SEQ ID NO: 3264898 - RNA, 15 nt, Vaccinia virus
uuucuagaacaucau

SEQ ID NO: 3264899 - RNA, 15 nt, Vaccinia virus
guuaauaauaaucuc

SEQ ID NO: 3264900 - RNA, 22 nt, Vaccinia virus
uacaauaauucagauaauguaa

SEQ ID NO: 3264901 - RNA, 17 nt, Vaccinia virus
ccaugcagcauuuccua

SEQ ID NO: 3264902 - RNA, 18 nt, Vaccinia virus
ucuuaacacucucugcca

SEQ ID NO: 3264903 - RNA, 15 nt, Vaccinia virus
uaucuucuuuaucua

SEQ ID NO: 3264904 - RNA, 17 nt, Vaccinia virus
gcagucuaacauuuuua

SEQ ID NO: 3264905 - RNA, 19 nt, Vaccinia virus
ucgguucuuuaaaagaaac

SEQ ID NO: 3264906 - RNA, 14 nt, Vaccinia virus
uaguucauacacca

SEQ ID NO: 3264907 - RNA, 15 nt, Vaccinia virus
gaauguguacuaucu

SEQ ID NO: 3264908 - RNA, 22 nt, Vaccinia virus
caaagaauccgacaucaaaugg

SEQ ID NO: 3264909 - RNA, 21 nt, Vaccinia virus
acauuaacucucucauuuucu

SEQ ID NO: 3264910 - RNA, 20 nt, Vaccinia virus
auggaagaguuaaugaauau

SEQ ID NO: 3264911 - RNA, 14 nt, Vaccinia virus
aucaagaucauaau

SEQ ID NO: 3264912 - RNA, 13 nt, Vaccinia virus
guuauuauacaug

SEQ ID NO: 3264913 - RNA, 14 nt, Vaccinia virus
aucucuuaacaaaa

SEQ ID NO: 3264914 - RNA, 14 nt, Vaccinia virus
auauaaaaaaauga

SEQ ID NO: 3264915 - RNA, 22 nt, Vaccinia virus
ucagaucguauagccuauccaa

SEQ ID NO: 3264916 - RNA, 14 nt, Vaccinia virus
accuuuuucagaga

SEQ ID NO: 3264917 - RNA, 11 nt, Vaccinia virus
uuuauacuguu

SEQ ID NO: 3264918 - RNA, 13 nt, Vaccinia virus
caacauuccaaag

SEQ ID NO: 3264919 - RNA, 22 nt, Vaccinia virus
acucuaagaacuuauuaaugaa

SEQ ID NO: 3264920 - RNA, 19 nt, Vaccinia virus
ugcuauuaagguuaaggau

SEQ ID NO: 3264921 - RNA, 21 nt, Vaccinia virus
gcauauuccuaaauacaucua

SEQ ID NO: 3264922 - RNA, 13 nt, Vaccinia virus
aaguaaugguaug

SEQ ID NO: 3264923 - RNA, 23 nt, Vaccinia virus
cucaaauguaguguuggauaucu

SEQ ID NO: 3264924 - RNA, 15 nt, Vaccinia virus
acgcauccauccaaa

SEQ ID NO: 3264925 - RNA, 20 nt, Vaccinia virus
uauccuugauuauguuuuau

SEQ ID NO: 3264926 - RNA, 22 nt, Vaccinia virus
aguagauacauaucaauaucau

SEQ ID NO: 3264927 - RNA, 17 nt, Vaccinia virus
ccaucucuauguuucag

SEQ ID NO: 3264928 - RNA, 13 nt, Vaccinia virus
auaguagaauuaa

SEQ ID NO: 3264929 - RNA, 21 nt, Vaccinia virus
caaaaucguuccgccaaauuu

SEQ ID NO: 3264930 - RNA, 13 nt, Vaccinia virus
uuaaaaauuuaga

SEQ ID NO: 3264931 - RNA, 14 nt, Vaccinia virus
acaucgaaaaugaa

SEQ ID NO: 3264932 - RNA, 15 nt, Vaccinia virus
gucacgaauauaaga

SEQ ID NO: 3264933 - RNA, 19 nt, Vaccinia virus
aauuugauccauguucaua

SEQ ID NO: 3264934 - RNA, 15 nt, Vaccinia virus
cuacgaaacuuugau

SEQ ID NO: 3264935 - RNA, 23 nt, Vaccinia virus
uauuaacgcaccuauaaagacuu

SEQ ID NO: 3264936 - RNA, 18 nt, Vaccinia virus
aaucuuauuaacuguuuc

SEQ ID NO: 3264937 - RNA, 21 nt, Vaccinia virus
gaaauggaagaguuaaugaau

SEQ ID NO: 3264938 - RNA, 12 nt, Vaccinia virus
caguaaauguuc

SEQ ID NO: 3264939 - RNA, 20 nt, Vaccinia virus
acuguuuuccugaaggaaau

SEQ ID NO: 3264940 - RNA, 20 nt, Vaccinia virus
aaauagcguucgucaacaua

SEQ ID NO: 3264941 - RNA, 14 nt, Vaccinia virus
auaucguguucauu

SEQ ID NO: 3264942 - RNA, 21 nt, Vaccinia virus
gcacuauacauuuugaaacua

SEQ ID NO: 3264943 - RNA, 17 nt, Vaccinia virus
uaauccuaagaaaacuc

SEQ ID NO: 3264944 - RNA, 15 nt, Vaccinia virus
uuccaaauuauucuu

SEQ ID NO: 3264945 - RNA, 18 nt, Vaccinia virus
agaagucauacuagaaua

SEQ ID NO: 3264946 - RNA, 12 nt, Vaccinia virus
auuagaauguau

SEQ ID NO: 3264947 - RNA, 15 nt, Vaccinia virus
uaaauaauuauuuca

SEQ ID NO: 3264948 - RNA, 14 nt, Vaccinia virus
auuggucagaaaua

SEQ ID NO: 3264949 - RNA, 20 nt, Vaccinia virus
cacuuaaaucgauauaacag

SEQ ID NO: 3264950 - RNA, 13 nt, Vaccinia virus
acaacauauaauu

SEQ ID NO: 3264951 - RNA, 19 nt, Vaccinia virus
aucuugacugucuaucucu

SEQ ID NO: 3264952 - RNA, 15 nt, Vaccinia virus
aauuaauauguauga

SEQ ID NO: 3264953 - RNA, 18 nt, Vaccinia virus
ucaacgauucuagaauau

SEQ ID NO: 3264954 - RNA, 23 nt, Vaccinia virus
aaaguuaauauuuucuaugagcu

SEQ ID NO: 3264955 - RNA, 14 nt, Vaccinia virus
cucaauaguuucau

SEQ ID NO: 3264956 - RNA, 14 nt, Vaccinia virus
ggaauuguauuuuc

SEQ ID NO: 3264957 - RNA, 22 nt, Vaccinia virus
gauuaauaauucauggaaauuu

SEQ ID NO: 3264958 - RNA, 20 nt, Vaccinia virus
cuauauauaccuuuccagua

SEQ ID NO: 3264959 - RNA, 13 nt, Vaccinia virus
aauacaggaucua

SEQ ID NO: 3264960 - RNA, 21 nt, Vaccinia virus
aucuucaagagugcauugacu

SEQ ID NO: 3264961 - RNA, 22 nt, Vaccinia virus
auaacauucuaggaauguuguu

SEQ ID NO: 3264962 - RNA, 19 nt, Vaccinia virus
aucgaguugauaucuaucg

SEQ ID NO: 3264963 - RNA, 16 nt, Vaccinia virus
gguuaugauuuauaca

SEQ ID NO: 3264964 - RNA, 12 nt, Vaccinia virus
ucuauguaucua

SEQ ID NO: 3264965 - RNA, 16 nt, Vaccinia virus
uucauccguuuccuua

SEQ ID NO: 3264966 - RNA, 19 nt, Vaccinia virus
uuuaaacagagaaaucagu

SEQ ID NO: 3264967 - RNA, 21 nt, Vaccinia virus
cagacauugucugacugaaua

SEQ ID NO: 3264968 - RNA, 20 nt, Vaccinia virus
guucauacaugaaaugaucu

SEQ ID NO: 3264969 - RNA, 20 nt, Vaccinia virus
cauuguaugguuuuaaauau

SEQ ID NO: 3264970 - RNA, 22 nt, Vaccinia virus
gauuagcacgccggaaaaauaa

SEQ ID NO: 3264971 - RNA, 18 nt, Vaccinia virus
ccaucuaucaaacaaaau

SEQ ID NO: 3264972 - RNA, 15 nt, Vaccinia virus
auaccaguuuggaaa

SEQ ID NO: 3264973 - RNA, 22 nt, Vaccinia virus
caugauguacagauuucggaau

SEQ ID NO: 3264974 - RNA, 17 nt, Vaccinia virus
uaaucagauucuuauau

SEQ ID NO: 3264975 - RNA, 19 nt, Vaccinia virus
acuaucuuuuuaggaaugu

SEQ ID NO: 3264976 - RNA, 15 nt, Vaccinia virus
gaaauugauaaugag

SEQ ID NO: 3264977 - RNA, 16 nt, Vaccinia virus
acuaacuaauguuucu

SEQ ID NO: 3264978 - RNA, 15 nt, Vaccinia virus
auaaagaaaauaugg

SEQ ID NO: 3264979 - RNA, 19 nt, Vaccinia virus
uucauccguuuccuuauga

SEQ ID NO: 3264980 - RNA, 22 nt, Vaccinia virus
aacugacguauuggaugaugca

SEQ ID NO: 3264981 - RNA, 22 nt, Vaccinia virus
auguucuuaaucaauguacaua

SEQ ID NO: 3264982 - RNA, 17 nt, Vaccinia virus
cgggauaaaauaauaca

SEQ ID NO: 3264983 - RNA, 21 nt, Vaccinia virus
aauuacagaguuuucagaaga

SEQ ID NO: 3264984 - RNA, 20 nt, Vaccinia virus
ucuauuaguaugguuucaua

SEQ ID NO: 3264985 - RNA, 21 nt, Vaccinia virus
uacaucgucucaucuguuuaa

SEQ ID NO: 3264986 - RNA, 22 nt, Vaccinia virus
aaauaaucccgcaauucauuuu

SEQ ID NO: 3264987 - RNA, 18 nt, Vaccinia virus
gacauacguauauuucua

SEQ ID NO: 3264988 - RNA, 16 nt, Vaccinia virus
ucuaaacgauuuagua

SEQ ID NO: 3264989 - RNA, 20 nt, Vaccinia virus
cuaaacacacauuauucaga

SEQ ID NO: 3264990 - RNA, 14 nt, Vaccinia virus
uggccaaccuuugu

SEQ ID NO: 3264991 - RNA, 13 nt, Vaccinia virus
ccauagaggaugu

SEQ ID NO: 3264992 - RNA, 22 nt, Vaccinia virus
cagaauagccgauauagauauu

SEQ ID NO: 3264993 - RNA, 14 nt, Vaccinia virus
auguauuagacaaa

SEQ ID NO: 3264994 - RNA, 22 nt, Vaccinia virus
aacguaguuaugauaaaugauu

SEQ ID NO: 3264995 - RNA, 15 nt, Vaccinia virus
uuaaucuuuaaaauu

SEQ ID NO: 3264996 - RNA, 20 nt, Vaccinia virus
cuacaaauuuggauauucua

SEQ ID NO: 3264997 - RNA, 19 nt, Vaccinia virus
aucugaauaaaacaucgau

SEQ ID NO: 3264998 - RNA, 14 nt, Vaccinia virus
ucuaaauacaaaau

SEQ ID NO: 3264999 - RNA, 14 nt, Vaccinia virus
cauuuauaucauuu

SEQ ID NO: 3265000 - RNA, 21 nt, Vaccinia virus
aucaauguccugcuauacuuc

SEQ ID NO: 3265001 - RNA, 13 nt, Vaccinia virus
ucuuauucuuauu

SEQ ID NO: 3265002 - RNA, 20 nt, Vaccinia virus
ucgaugaaauaucugauguu

SEQ ID NO: 3265003 - RNA, 14 nt, Vaccinia virus
uaucaauaacuaca

SEQ ID NO: 3265004 - RNA, 17 nt, Vaccinia virus
aacagaaaaaacaaugu

SEQ ID NO: 3265005 - RNA, 15 nt, Vaccinia virus
cgaugauuauauguu

SEQ ID NO: 3265006 - RNA, 20 nt, Vaccinia virus
auaggucuucgucuacagua

SEQ ID NO: 3265007 - RNA, 17 nt, Vaccinia virus
guauaauauuuaaacaa

SEQ ID NO: 3265008 - RNA, 20 nt, Vaccinia virus
guauagauccuccaguaaau

SEQ ID NO: 3265009 - RNA, 13 nt, Vaccinia virus
uuaacuauuuugu

SEQ ID NO: 3265010 - RNA, 19 nt, Vaccinia virus
auacauaauucuucuguua

SEQ ID NO: 3265011 - RNA, 14 nt, Vaccinia virus
ugaaacgaacacua

SEQ ID NO: 3265012 - RNA, 17 nt, Vaccinia virus
guacggucugauauuau

SEQ ID NO: 3265013 - RNA, 16 nt, Vaccinia virus
guuacaccaaaaaaga

SEQ ID NO: 3265014 - RNA, 20 nt, Vaccinia virus
aacugaguguaaaacucuau

SEQ ID NO: 3265015 - RNA, 20 nt, Vaccinia virus
caaguaucaaaagauuaaag

SEQ ID NO: 3265016 - RNA, 16 nt, Vaccinia virus
aauguaaagguuuaua

SEQ ID NO: 3265017 - RNA, 15 nt, Vaccinia virus
auaagauuaguaaca

SEQ ID NO: 3265018 - RNA, 18 nt, Vaccinia virus
uaauuguuuacuguauau

SEQ ID NO: 3265019 - RNA, 16 nt, Vaccinia virus
uucaaaauagcuaucu

SEQ ID NO: 3265020 - RNA, 16 nt, Vaccinia virus
acguuuaaacauucuu

SEQ ID NO: 3265021 - RNA, 14 nt, Vaccinia virus
uuccaagaaacuaa

SEQ ID NO: 3265022 - RNA, 12 nt, Vaccinia virus
aaugguagaugu

SEQ ID NO: 3265023 - RNA, 14 nt, Vaccinia virus
uucagaaauuauuc

SEQ ID NO: 3265024 - RNA, 16 nt, Vaccinia virus
acagaugccagauuac

SEQ ID NO: 3265025 - RNA, 18 nt, Vaccinia virus
aucaaaucauugauacau

SEQ ID NO: 3265026 - RNA, 21 nt, Vaccinia virus
aggauuaaaaauaaaguuauc

SEQ ID NO: 3265027 - RNA, 16 nt, Vaccinia virus
auuuaguauuaaauga

SEQ ID NO: 3265028 - RNA, 17 nt, Vaccinia virus
cuuuaagagagguauaa

SEQ ID NO: 3265029 - RNA, 19 nt, Vaccinia virus
ccacuaccggucucaguga

SEQ ID NO: 3265030 - RNA, 23 nt, Vaccinia virus
uaacuugcgggguuaauuucaca

SEQ ID NO: 3265031 - RNA, 16 nt, Vaccinia virus
agauaaagaguucuaa

SEQ ID NO: 3265032 - RNA, 19 nt, Vaccinia virus
aaguucauuaucugaaaua

SEQ ID NO: 3265033 - RNA, 20 nt, Vaccinia virus
auggaacaauaaaagagaau

SEQ ID NO: 3265034 - RNA, 20 nt, Vaccinia virus
uaaugggucguauugguauu

SEQ ID NO: 3265035 - RNA, 19 nt, Vaccinia virus
cuauaacauuaauaucaaa

SEQ ID NO: 3265036 - RNA, 15 nt, Vaccinia virus
uacuuaaaaaaugaa

SEQ ID NO: 3265037 - RNA, 22 nt, Vaccinia virus
accuauaugcccuauuaucaua

SEQ ID NO: 3265038 - RNA, 15 nt, Vaccinia virus
uaugaggaaugauug

SEQ ID NO: 3265039 - RNA, 14 nt, Vaccinia virus
caucauuaucauuu

SEQ ID NO: 3265040 - RNA, 12 nt, Vaccinia virus
cauauaaaugua

SEQ ID NO: 3265041 - RNA, 13 nt, Vaccinia virus
uugccguaaaucc

SEQ ID NO: 3265042 - RNA, 22 nt, Vaccinia virus
aaauagcgcugaaaauaaagau

SEQ ID NO: 3265043 - RNA, 17 nt, Vaccinia virus
agauagagacuccaaac

SEQ ID NO: 3265044 - RNA, 14 nt, Vaccinia virus
uuaaaguuaaucau

SEQ ID NO: 3265045 - RNA, 20 nt, Vaccinia virus
caacaguuacuccaauuaca

SEQ ID NO: 3265046 - RNA, 19 nt, Vaccinia virus
auuuauuuaguauuaaaug

SEQ ID NO: 3265047 - RNA, 17 nt, Vaccinia virus
acaucucaaugucuuua

SEQ ID NO: 3265048 - RNA, 17 nt, Vaccinia virus
uuaacaucuauuaauca

SEQ ID NO: 3265049 - RNA, 22 nt, Vaccinia virus
gaauaauaugacucaugaucua

SEQ ID NO: 3265050 - RNA, 16 nt, Vaccinia virus
ucagaauauacaccua

SEQ ID NO: 3265051 - RNA, 17 nt, Vaccinia virus
auuaccauagaagaugu

SEQ ID NO: 3265052 - RNA, 22 nt, Vaccinia virus
auuugcgugguuguuuaucaca

SEQ ID NO: 3265053 - RNA, 20 nt, Vaccinia virus
aaauauuuagaaauugaaau

SEQ ID NO: 3265054 - RNA, 11 nt, Vaccinia virus
ucccugaauac

SEQ ID NO: 3265055 - RNA, 14 nt, Vaccinia virus
uguuaaacaaauaa

SEQ ID NO: 3265056 - RNA, 16 nt, Vaccinia virus
aacaaguuaaugagau

SEQ ID NO: 3265057 - RNA, 21 nt, Vaccinia virus
ucaaaaaacaauuuauucaga

SEQ ID NO: 3265058 - RNA, 20 nt, Vaccinia virus
uaucuuauauacacauaauu

SEQ ID NO: 3265059 - RNA, 21 nt, Vaccinia virus
uugauaagacacgguagauca

SEQ ID NO: 3265060 - RNA, 15 nt, Vaccinia virus
uuaguauaauuauug

SEQ ID NO: 3265061 - RNA, 17 nt, Vaccinia virus
aucauccaauaguacau

SEQ ID NO: 3265062 - RNA, 15 nt, Vaccinia virus
aauuaguaacuguua

SEQ ID NO: 3265063 - RNA, 13 nt, Vaccinia virus
aagaauucuuaug

SEQ ID NO: 3265064 - RNA, 19 nt, Vaccinia virus
aucucuauaucuaugguug

SEQ ID NO: 3265065 - RNA, 11 nt, Vaccinia virus
cauuaugaauu

SEQ ID NO: 3265066 - RNA, 13 nt, Vaccinia virus
aucagaucauauu

SEQ ID NO: 3265067 - RNA, 18 nt, Vaccinia virus
uaauaacgaguacauucu

SEQ ID NO: 3265068 - RNA, 22 nt, Vaccinia virus
uaugucauaaacuguaaaugau

SEQ ID NO: 3265069 - RNA, 17 nt, Vaccinia virus
caucgcaguauauauca

SEQ ID NO: 3265070 - RNA, 17 nt, Vaccinia virus
gaauauguuauaauaga

SEQ ID NO: 3265071 - RNA, 20 nt, Vaccinia virus
ccucgacugauguggaauca

SEQ ID NO: 3265072 - RNA, 13 nt, Vaccinia virus
augcugugauaua

SEQ ID NO: 3265073 - RNA, 21 nt, Vaccinia virus
auacacgcuaaaauaacuagu

SEQ ID NO: 3265074 - RNA, 17 nt, Vaccinia virus
auaaauaucaucaauau

SEQ ID NO: 3265075 - RNA, 14 nt, Vaccinia virus
uuaauggaaacuau

SEQ ID NO: 3265076 - RNA, 17 nt, Vaccinia virus
auaaauaauaaauacaa

SEQ ID NO: 3265077 - RNA, 20 nt, Vaccinia virus
ucuggaaugacgaauccugu

SEQ ID NO: 3265078 - RNA, 17 nt, Vaccinia virus
auuuugugcaaauagau

SEQ ID NO: 3265079 - RNA, 15 nt, Vaccinia virus
cauuaauaacauccu

SEQ ID NO: 3265080 - RNA, 19 nt, Vaccinia virus
augagauguuaaaugaauu

SEQ ID NO: 3265081 - RNA, 12 nt, Vaccinia virus
caaaaaauaaua

SEQ ID NO: 3265082 - RNA, 18 nt, Vaccinia virus
aguacagaauuaauuaga

SEQ ID NO: 3265083 - RNA, 16 nt, Vaccinia virus
ucaaaauauguuaugu

SEQ ID NO: 3265084 - RNA, 16 nt, Vaccinia virus
acuguccaaaaugaug

SEQ ID NO: 3265085 - RNA, 22 nt, Vaccinia virus
uaucuacgauuuuuacaaaagu

SEQ ID NO: 3265086 - RNA, 17 nt, Vaccinia virus
uugaugucguuauucug

SEQ ID NO: 3265087 - RNA, 15 nt, Vaccinia virus
gcguaauguuagccc

SEQ ID NO: 3265088 - RNA, 13 nt, Vaccinia virus
ccguuaaaguaug

SEQ ID NO: 3265089 - RNA, 16 nt, Vaccinia virus
cuaaggaguaaaauag

SEQ ID NO: 3265090 - RNA, 14 nt, Vaccinia virus
auuuauuucuucuu

SEQ ID NO: 3265091 - RNA, 19 nt, Vaccinia virus
uuccugacgucuagaguuu

SEQ ID NO: 3265092 - RNA, 13 nt, Vaccinia virus
aucauuucuauaa

SEQ ID NO: 3265093 - RNA, 16 nt, Vaccinia virus
uccucggccauuuuaa

SEQ ID NO: 3265094 - RNA, 13 nt, Vaccinia virus
cuaaaauaauguc

SEQ ID NO: 3265095 - RNA, 18 nt, Vaccinia virus
uauugaaaauguguauaa

SEQ ID NO: 3265096 - RNA, 14 nt, Vaccinia virus
uuucauggauguag

SEQ ID NO: 3265097 - RNA, 15 nt, Vaccinia virus
uccaugucuacauua

SEQ ID NO: 3265098 - RNA, 21 nt, Vaccinia virus
acuugacuaaaucuuaauagu

SEQ ID NO: 3265099 - RNA, 22 nt, Vaccinia virus
gaauacgacgaccauaucaauu

SEQ ID NO: 3265100 - RNA, 15 nt, Vaccinia virus
uggauucuguuacaa

SEQ ID NO: 3265101 - RNA, 17 nt, Vaccinia virus
cucucauaauaaauuuu

SEQ ID NO: 3265102 - RNA, 16 nt, Vaccinia virus
auacgauaagauaugu

SEQ ID NO: 3265103 - RNA, 15 nt, Vaccinia virus
cagaguugauuguaa

SEQ ID NO: 3265104 - RNA, 21 nt, Vaccinia virus
auguaaguaguuuaucaacau

SEQ ID NO: 3265105 - RNA, 21 nt, Vaccinia virus
ugucuuuaaguauauacgaua

SEQ ID NO: 3265106 - RNA, 20 nt, Vaccinia virus
aagaaugcuguuaugugcau

SEQ ID NO: 3265107 - RNA, 20 nt, Vaccinia virus
acuauuauacucuguauuag

SEQ ID NO: 3265108 - RNA, 22 nt, Vaccinia virus
auuccauauagauauaauuuua

SEQ ID NO: 3265109 - RNA, 13 nt, Vaccinia virus
agacauuaauaga

SEQ ID NO: 3265110 - RNA, 22 nt, Vaccinia virus
uaaucauaaauuauuucauuau

SEQ ID NO: 3265111 - RNA, 12 nt, Vaccinia virus
uaaaauuuccau

SEQ ID NO: 3265112 - RNA, 13 nt, Vaccinia virus
cgauauacauaaa

SEQ ID NO: 3265113 - RNA, 14 nt, Vaccinia virus
ccucuucaauuaga

SEQ ID NO: 3265114 - RNA, 14 nt, Vaccinia virus
uuuacaaaacuggu

SEQ ID NO: 3265115 - RNA, 17 nt, Vaccinia virus
ccaauaauccaucaucu

SEQ ID NO: 3265116 - RNA, 19 nt, Vaccinia virus
ucugugguaaguaccgaua

SEQ ID NO: 3265117 - RNA, 18 nt, Vaccinia virus
gaacgagaacgacuaucu

SEQ ID NO: 3265118 - RNA, 12 nt, Vaccinia virus
uuacaauuauug

SEQ ID NO: 3265119 - RNA, 20 nt, Vaccinia virus
auaucagauaaguaugaaga

SEQ ID NO: 3265120 - RNA, 22 nt, Vaccinia virus
gaaacauccaucgauacauaua

SEQ ID NO: 3265121 - RNA, 18 nt, Vaccinia virus
uauucauaauccagaguu

SEQ ID NO: 3265122 - RNA, 13 nt, Vaccinia virus
cgcauaucaugaa

SEQ ID NO: 3265123 - RNA, 16 nt, Vaccinia virus
agagccaucuguaaaa

SEQ ID NO: 3265124 - RNA, 22 nt, Vaccinia virus
acaucguauaucgucuuuguua

SEQ ID NO: 3265125 - RNA, 16 nt, Vaccinia virus
uauaguuuuaaacuga

SEQ ID NO: 3265126 - RNA, 14 nt, Vaccinia virus
uuuaguauaaacag

SEQ ID NO: 3265127 - RNA, 19 nt, Vaccinia virus
uauuuuaaaguuaaucaua

SEQ ID NO: 3265128 - RNA, 17 nt, Vaccinia virus
aacuguguuucagguau

SEQ ID NO: 3265129 - RNA, 19 nt, Vaccinia virus
agaugcuauaucaaaauau

SEQ ID NO: 3265130 - RNA, 18 nt, Vaccinia virus
cagacgugacguguauag

SEQ ID NO: 3265131 - RNA, 11 nt, Vaccinia virus
cgcauacuuug

SEQ ID NO: 3265132 - RNA, 20 nt, Vaccinia virus
guauacacaaaaagaaagaa

SEQ ID NO: 3265133 - RNA, 19 nt, Vaccinia virus
uucuaaaaugguaaacuuu

SEQ ID NO: 3265134 - RNA, 18 nt, Vaccinia virus
uaugucuguacaaauguu

SEQ ID NO: 3265135 - RNA, 16 nt, Vaccinia virus
gauacuaucaaaauau

SEQ ID NO: 3265136 - RNA, 14 nt, Vaccinia virus
caaaauccaaauuu

SEQ ID NO: 3265137 - RNA, 16 nt, Vaccinia virus
ugauauacuaagcaag

SEQ ID NO: 3265138 - RNA, 17 nt, Vaccinia virus
uaguuugauugucucau

SEQ ID NO: 3265139 - RNA, 14 nt, Vaccinia virus
cuauuucguccaua

SEQ ID NO: 3265140 - RNA, 14 nt, Vaccinia virus
caaauuccaaauuu

SEQ ID NO: 3265141 - RNA, 19 nt, Vaccinia virus
uuuacaacacuuuucuauu

SEQ ID NO: 3265142 - RNA, 16 nt, Vaccinia virus
gauaaagauauaugau

SEQ ID NO: 3265143 - RNA, 16 nt, Vaccinia virus
aaaauacgaauaauca

SEQ ID NO: 3265144 - RNA, 19 nt, Vaccinia virus
ugacucgcaacaauuguag

SEQ ID NO: 3265145 - RNA, 12 nt, Vaccinia virus
uguaccuauuaa

SEQ ID NO: 3265146 - RNA, 21 nt, Vaccinia virus
uagaaaccacggaucguaaua

SEQ ID NO: 3265147 - RNA, 16 nt, Vaccinia virus
auuuauaauauacucu

SEQ ID NO: 3265148 - RNA, 17 nt, Vaccinia virus
caaaucauuguguuuau

SEQ ID NO: 3265149 - RNA, 21 nt, Vaccinia virus
ugacaugaugucguuaaauuu

SEQ ID NO: 3265150 - RNA, 16 nt, Vaccinia virus
uggaguaccaguuuca

SEQ ID NO: 3265151 - RNA, 13 nt, Vaccinia virus
guauacucugccc

SEQ ID NO: 3265152 - RNA, 13 nt, Vaccinia virus
agucauuaacaaa

SEQ ID NO: 3265153 - RNA, 22 nt, Vaccinia virus
uacuguuuacggagacaaaauu

SEQ ID NO: 3265154 - RNA, 20 nt, Vaccinia virus
caaauuaagcauuuuggaaa

SEQ ID NO: 3265155 - RNA, 20 nt, Vaccinia virus
ugaagagaagggaauuauug

SEQ ID NO: 3265156 - RNA, 22 nt, Vaccinia virus
cagaaagaggaucguacaucca

SEQ ID NO: 3265157 - RNA, 15 nt, Vaccinia virus
guaaaucauuaucua

SEQ ID NO: 3265158 - RNA, 20 nt, Vaccinia virus
guaaaauaaucauacaaucu

SEQ ID NO: 3265159 - RNA, 19 nt, Vaccinia virus
cauaguggacaacauuaau

SEQ ID NO: 3265160 - RNA, 15 nt, Vaccinia virus
aagguauacgaaugu

SEQ ID NO: 3265161 - RNA, 14 nt, Vaccinia virus
uagacgauaugaca

SEQ ID NO: 3265162 - RNA, 13 nt, Vaccinia virus
uguuuuucacuuu

SEQ ID NO: 3265163 - RNA, 16 nt, Vaccinia virus
uuaucuauuucaaaaa

SEQ ID NO: 3265164 - RNA, 15 nt, Vaccinia virus
uagucagacuguagu

SEQ ID NO: 3265165 - RNA, 15 nt, Vaccinia virus
uuuuagcagucuaac

SEQ ID NO: 3265166 - RNA, 16 nt, Vaccinia virus
gaaccuucuacauaua

SEQ ID NO: 3265167 - RNA, 21 nt, Vaccinia virus
gccuuaauccuagaugaugau

SEQ ID NO: 3265168 - RNA, 12 nt, Vaccinia virus
cuucuaaaacug

SEQ ID NO: 3265169 - RNA, 18 nt, Vaccinia virus
ucaaaauuguaacaacaa

SEQ ID NO: 3265170 - RNA, 11 nt, Vaccinia virus
caauuaaugau

SEQ ID NO: 3265171 - RNA, 17 nt, Vaccinia virus
ucaaaaaauaaauuaga

SEQ ID NO: 3265172 - RNA, 19 nt, Vaccinia virus
uauugguccauuaucagua

SEQ ID NO: 3265173 - RNA, 17 nt, Vaccinia virus
uauaaaauagaaaauaa

SEQ ID NO: 3265174 - RNA, 18 nt, Vaccinia virus
auugcuaccguaaauaua

SEQ ID NO: 3265175 - RNA, 20 nt, Vaccinia virus
ugauauauaauuuacagcua

SEQ ID NO: 3265176 - RNA, 13 nt, Vaccinia virus
caugauaaacgaa

SEQ ID NO: 3265177 - RNA, 17 nt, Vaccinia virus
uuuauguuaaaucaauu

SEQ ID NO: 3265178 - RNA, 21 nt, Vaccinia virus
uuaucagugucguaaauuacg

SEQ ID NO: 3265179 - RNA, 18 nt, Vaccinia virus
agaauacgccaaggaaag

SEQ ID NO: 3265180 - RNA, 16 nt, Vaccinia virus
uugcgauauacauaaa

SEQ ID NO: 3265181 - RNA, 20 nt, Vaccinia virus
caccuauagcaucaauaauu

SEQ ID NO: 3265182 - RNA, 12 nt, Vaccinia virus
uuuaccacaaag

SEQ ID NO: 3265183 - RNA, 15 nt, Vaccinia virus
aauaccauaaauaua

SEQ ID NO: 3265184 - RNA, 20 nt, Vaccinia virus
uguauauacuaacucucuaa

SEQ ID NO: 3265185 - RNA, 23 nt, Vaccinia virus
auauucuauaacuugagacuuga

SEQ ID NO: 3265186 - RNA, 14 nt, Vaccinia virus
uugacgacguguac

SEQ ID NO: 3265187 - RNA, 20 nt, Vaccinia virus
agacacuaacucuguuuuau

SEQ ID NO: 3265188 - RNA, 20 nt, Vaccinia virus
auagaaaacucguuauuaac

SEQ ID NO: 3265189 - RNA, 13 nt, Vaccinia virus
uauuuuacucauu

SEQ ID NO: 3265190 - RNA, 20 nt, Vaccinia virus
cuuaaaaaguucgaguuucu

SEQ ID NO: 3265191 - RNA, 15 nt, Vaccinia virus
uucuacuuacuuauu

SEQ ID NO: 3265192 - RNA, 21 nt, Vaccinia virus
guucauuaaaaacaaacuuuu

SEQ ID NO: 3265193 - RNA, 14 nt, Vaccinia virus
uagaugaauuauua

SEQ ID NO: 3265194 - RNA, 16 nt, Vaccinia virus
uugcgaaaugcucuaa

SEQ ID NO: 3265195 - RNA, 16 nt, Vaccinia virus
uaaaaaggaaauacuu

SEQ ID NO: 3265196 - RNA, 16 nt, Vaccinia virus
uauuaaaauucuuaaa

SEQ ID NO: 3265197 - RNA, 19 nt, Vaccinia virus
cauaaacuguaaaugauuu

SEQ ID NO: 3265198 - RNA, 14 nt, Vaccinia virus
ucaauauagaucuu

SEQ ID NO: 3265199 - RNA, 15 nt, Vaccinia virus
cacucucgaaaucac

SEQ ID NO: 3265200 - RNA, 16 nt, Vaccinia virus
auaauuuagauacuuu

SEQ ID NO: 3265201 - RNA, 13 nt, Vaccinia virus
cuaauacucuggg

SEQ ID NO: 3265202 - RNA, 15 nt, Vaccinia virus
uauuaucaaauacug

SEQ ID NO: 3265203 - RNA, 17 nt, Vaccinia virus
uugguagauuuucaauu

SEQ ID NO: 3265204 - RNA, 11 nt, Vaccinia virus
auauucuguau

SEQ ID NO: 3265205 - RNA, 15 nt, Vaccinia virus
auuucguuuaucauu

SEQ ID NO: 3265206 - RNA, 14 nt, Vaccinia virus
uauuaagauuaacu

SEQ ID NO: 3265207 - RNA, 17 nt, Vaccinia virus
acaacaucuaacuauau

SEQ ID NO: 3265208 - RNA, 15 nt, Vaccinia virus
accuaugauaaagga

SEQ ID NO: 3265209 - RNA, 18 nt, Vaccinia virus
agaugccaagauaucuau

SEQ ID NO: 3265210 - RNA, 17 nt, Vaccinia virus
ucuuuauauucuauaau

SEQ ID NO: 3265211 - RNA, 17 nt, Vaccinia virus
gauacuauccaguaaac

SEQ ID NO: 3265212 - RNA, 14 nt, Vaccinia virus
uaauaguauccauu

SEQ ID NO: 3265213 - RNA, 14 nt, Vaccinia virus
aaaaauuuaaagaa

SEQ ID NO: 3265214 - RNA, 13 nt, Vaccinia virus
uggaacaauaaaa

SEQ ID NO: 3265215 - RNA, 16 nt, Vaccinia virus
auuucagaacauagaa

SEQ ID NO: 3265216 - RNA, 22 nt, Vaccinia virus
aucaucuuaugaggaaugauug

SEQ ID NO: 3265217 - RNA, 18 nt, Vaccinia virus
uuaaaucaagucuagaau

SEQ ID NO: 3265218 - RNA, 16 nt, Vaccinia virus
gaauaauccuauauca

SEQ ID NO: 3265219 - RNA, 20 nt, Vaccinia virus
ucaucaccuaucuugugcau

SEQ ID NO: 3265220 - RNA, 18 nt, Vaccinia virus
uuaauaaaaauacaaucc

SEQ ID NO: 3265221 - RNA, 13 nt, Vaccinia virus
ucauaaaaaccau

SEQ ID NO: 3265222 - RNA, 19 nt, Vaccinia virus
uaucagaccguacauacau

SEQ ID NO: 3265223 - RNA, 15 nt, Vaccinia virus
auuguuaaauuauua

SEQ ID NO: 3265224 - RNA, 20 nt, Vaccinia virus
ugucguguuccuguuuccua

SEQ ID NO: 3265225 - RNA, 15 nt, Vaccinia virus
uuuaugauacguaca

SEQ ID NO: 3265226 - RNA, 15 nt, Vaccinia virus
cguauuagaauguau

SEQ ID NO: 3265227 - RNA, 17 nt, Vaccinia virus
ucuggaacaauuacaga

SEQ ID NO: 3265228 - RNA, 23 nt, Vaccinia virus
augauuuucugggacuauuggaa

SEQ ID NO: 3265229 - RNA, 15 nt, Vaccinia virus
aucauacucauauaa

SEQ ID NO: 3265230 - RNA, 15 nt, Vaccinia virus
cauuuucuaucuuua

SEQ ID NO: 3265231 - RNA, 13 nt, Vaccinia virus
uaacuucugauuu

SEQ ID NO: 3265232 - RNA, 18 nt, Vaccinia virus
uauuucuauauuugacuc

SEQ ID NO: 3265233 - RNA, 14 nt, Vaccinia virus
agcucaucuaaaaa

SEQ ID NO: 3265234 - RNA, 16 nt, Vaccinia virus
acaaauauaaaaugac

SEQ ID NO: 3265235 - RNA, 13 nt, Vaccinia virus
auagauagaacua

SEQ ID NO: 3265236 - RNA, 16 nt, Vaccinia virus
auaauacucuguuguu

SEQ ID NO: 3265237 - RNA, 14 nt, Vaccinia virus
auaauagacauaau

SEQ ID NO: 3265238 - RNA, 15 nt, Vaccinia virus
uaaucaaggauacac

SEQ ID NO: 3265239 - RNA, 21 nt, Vaccinia virus
uaggcauaccauuagauaauc

SEQ ID NO: 3265240 - RNA, 22 nt, Vaccinia virus
uuacaucaccucuaacaucauc

SEQ ID NO: 3265241 - RNA, 14 nt, Vaccinia virus
caguaguucauuau

SEQ ID NO: 3265242 - RNA, 14 nt, Vaccinia virus
cuuccaagaagaag

SEQ ID NO: 3265243 - RNA, 16 nt, Vaccinia virus
aguagauuuuauucca

SEQ ID NO: 3265244 - RNA, 18 nt, Vaccinia virus
uaauuuucauauauugag

SEQ ID NO: 3265245 - RNA, 19 nt, Vaccinia virus
ugacuagacugauuucucu

SEQ ID NO: 3265246 - RNA, 19 nt, Vaccinia virus
guuacaucaguuauaaaaa

SEQ ID NO: 3265247 - RNA, 17 nt, Vaccinia virus
uaguacucauuaucauu

SEQ ID NO: 3265248 - RNA, 16 nt, Vaccinia virus
augugaguauuggauu

SEQ ID NO: 3265249 - RNA, 18 nt, Vaccinia virus
cguuuaaaguaaacuucg

SEQ ID NO: 3265250 - RNA, 15 nt, Vaccinia virus
uuuuacgaauaaacg

SEQ ID NO: 3265251 - RNA, 22 nt, Vaccinia virus
auuaccaggguucuuguuauau

SEQ ID NO: 3265252 - RNA, 16 nt, Vaccinia virus
acacuauucuuaaauu

SEQ ID NO: 3265253 - RNA, 18 nt, Vaccinia virus
acuauguuuuuuauuaga

SEQ ID NO: 3265254 - RNA, 15 nt, Vaccinia virus
aaagacaucauauau

SEQ ID NO: 3265255 - RNA, 16 nt, Vaccinia virus
uuguauauuucuucuu

SEQ ID NO: 3265256 - RNA, 22 nt, Vaccinia virus
ugucucgaggcuaaaacacauu

SEQ ID NO: 3265257 - RNA, 22 nt, Vaccinia virus
gaccuauuaauaauuacuuauc

SEQ ID NO: 3265258 - RNA, 13 nt, Vaccinia virus
uacugcaaaacuc

SEQ ID NO: 3265259 - RNA, 15 nt, Vaccinia virus
acccgcgucuguuuu

SEQ ID NO: 3265260 - RNA, 16 nt, Vaccinia virus
ccuugcguuucucuga

SEQ ID NO: 3265261 - RNA, 11 nt, Vaccinia virus
aaggauaaaga

SEQ ID NO: 3265262 - RNA, 23 nt, Vaccinia virus
ucaaccaaccgaauggaguaaaa

SEQ ID NO: 3265263 - RNA, 17 nt, Vaccinia virus
cugaaacaguaugauuu

SEQ ID NO: 3265264 - RNA, 17 nt, Vaccinia virus
aagauauuguuaaauaa

SEQ ID NO: 3265265 - RNA, 15 nt, Vaccinia virus
auuuggaaaagaaaa

SEQ ID NO: 3265266 - RNA, 18 nt, Vaccinia virus
acauccgaaaaaguugac

SEQ ID NO: 3265267 - RNA, 18 nt, Vaccinia virus
uccaucuguggaaaauaa

SEQ ID NO: 3265268 - RNA, 15 nt, Vaccinia virus
agagaacaaauaaua

SEQ ID NO: 3265269 - RNA, 13 nt, Vaccinia virus
auuaaucauauac

SEQ ID NO: 3265270 - RNA, 13 nt, Vaccinia virus
ucaucuacauaau

SEQ ID NO: 3265271 - RNA, 20 nt, Vaccinia virus
uuaucacauaucacauuaau

SEQ ID NO: 3265272 - RNA, 12 nt, Vaccinia virus
uugucuagauaa

SEQ ID NO: 3265273 - RNA, 14 nt, Vaccinia virus
aacaauuguagaua

SEQ ID NO: 3265274 - RNA, 22 nt, Vaccinia virus
aaucuuuguuggaucagucucu

SEQ ID NO: 3265275 - RNA, 17 nt, Vaccinia virus
uuuuuacaaacaucacu

SEQ ID NO: 3265276 - RNA, 21 nt, Vaccinia virus
uaccauggacggagacaaauu

SEQ ID NO: 3265277 - RNA, 15 nt, Vaccinia virus
agucaagaugaugaa

SEQ ID NO: 3265278 - RNA, 17 nt, Vaccinia virus
caaaucauugauacauu

SEQ ID NO: 3265279 - RNA, 14 nt, Vaccinia virus
uaucuauguuuuua

SEQ ID NO: 3265280 - RNA, 13 nt, Vaccinia virus
cuauauuaauagg

SEQ ID NO: 3265281 - RNA, 14 nt, Vaccinia virus
aacuauauaaugaa

SEQ ID NO: 3265282 - RNA, 16 nt, Vaccinia virus
ccuaaagccguaauug

SEQ ID NO: 3265283 - RNA, 18 nt, Vaccinia virus
aacuuuuucacaaaacua

SEQ ID NO: 3265284 - RNA, 15 nt, Vaccinia virus
cauuguauuaugaug

SEQ ID NO: 3265285 - RNA, 14 nt, Vaccinia virus
cgaacguggaaggu

SEQ ID NO: 3265286 - RNA, 17 nt, Vaccinia virus
auauccgcuauuacaag

SEQ ID NO: 3265287 - RNA, 19 nt, Vaccinia virus
ccaucuaauaaauaucaua

SEQ ID NO: 3265288 - RNA, 19 nt, Vaccinia virus
aaacuugauaauuaauaau

SEQ ID NO: 3265289 - RNA, 20 nt, Vaccinia virus
gauauaguauauuccaguuc

SEQ ID NO: 3265290 - RNA, 15 nt, Vaccinia virus
aaauagauagaacua

SEQ ID NO: 3265291 - RNA, 14 nt, Vaccinia virus
uacuucauaaaaga

SEQ ID NO: 3265292 - RNA, 22 nt, Vaccinia virus
uugccuccggagucauaaaagg

SEQ ID NO: 3265293 - RNA, 17 nt, Vaccinia virus
caugaaacguuuggaaa

SEQ ID NO: 3265294 - RNA, 14 nt, Vaccinia virus
aacaaugaaguuau

SEQ ID NO: 3265295 - RNA, 14 nt, Vaccinia virus
aauuuugaagcauu

SEQ ID NO: 3265296 - RNA, 15 nt, Vaccinia virus
uuuuauuacauguuu

SEQ ID NO: 3265297 - RNA, 20 nt, Vaccinia virus
aucagcaucuugaauagaaa

SEQ ID NO: 3265298 - RNA, 16 nt, Vaccinia virus
uaugaagauaaacacu

SEQ ID NO: 3265299 - RNA, 16 nt, Vaccinia virus
uuugauacccugauau

SEQ ID NO: 3265300 - RNA, 23 nt, Vaccinia virus
aauauccaaguauuuuaauucua

SEQ ID NO: 3265301 - RNA, 16 nt, Vaccinia virus
uaugaugccgguaaau

SEQ ID NO: 3265302 - RNA, 15 nt, Vaccinia virus
uuccaauagaugucu

SEQ ID NO: 3265303 - RNA, 15 nt, Vaccinia virus
gcaacaaguauacaa

SEQ ID NO: 3265304 - RNA, 20 nt, Vaccinia virus
guuuuacguuauuaaucauc

SEQ ID NO: 3265305 - RNA, 23 nt, Vaccinia virus
aaguuuuucacccauaaauaaua

SEQ ID NO: 3265306 - RNA, 13 nt, Vaccinia virus
agucaacacuaug

SEQ ID NO: 3265307 - RNA, 19 nt, Vaccinia virus
aacuauagagaacaaauaa

SEQ ID NO: 3265308 - RNA, 15 nt, Vaccinia virus
uuauagaagauauca

SEQ ID NO: 3265309 - RNA, 22 nt, Vaccinia virus
uaaugccuuacucgguguauau

SEQ ID NO: 3265310 - RNA, 21 nt, Vaccinia virus
uauagaucagucaacggaaaa

SEQ ID NO: 3265311 - RNA, 18 nt, Vaccinia virus
aguaauggcggaaaacuu

SEQ ID NO: 3265312 - RNA, 16 nt, Vaccinia virus
aacucucaaaaugcug

SEQ ID NO: 3265313 - RNA, 22 nt, Vaccinia virus
agauaugguguagcauauguuu

SEQ ID NO: 3265314 - RNA, 17 nt, Vaccinia virus
caguuuauuauccacua

SEQ ID NO: 3265315 - RNA, 15 nt, Vaccinia virus
aaucgguaacagucc

SEQ ID NO: 3265316 - RNA, 14 nt, Vaccinia virus
ccaaugaaauggua

SEQ ID NO: 3265317 - RNA, 14 nt, Vaccinia virus
ugccaaagauuucu

SEQ ID NO: 3265318 - RNA, 14 nt, Vaccinia virus
aauccauugauaau

SEQ ID NO: 3265319 - RNA, 17 nt, Vaccinia virus
cuaugguauugauaaaa

SEQ ID NO: 3265320 - RNA, 14 nt, Vaccinia virus
uccauuuuacauua

SEQ ID NO: 3265321 - RNA, 21 nt, Vaccinia virus
auauggcgcgcguucaacauu

SEQ ID NO: 3265322 - RNA, 22 nt, Vaccinia virus
uaaucccgcauuuauacauauu

SEQ ID NO: 3265323 - RNA, 19 nt, Vaccinia virus
aguaguuuaacuagucuuc

SEQ ID NO: 3265324 - RNA, 18 nt, Vaccinia virus
guuguuaaaguuaauauu

SEQ ID NO: 3265325 - RNA, 20 nt, Vaccinia virus
agucguucucguucagaauc

SEQ ID NO: 3265326 - RNA, 16 nt, Vaccinia virus
uaaaauuccuacucau

SEQ ID NO: 3265327 - RNA, 15 nt, Vaccinia virus
uacguucagauuuca

SEQ ID NO: 3265328 - RNA, 22 nt, Vaccinia virus
agacagccaaucaaaaagauua

SEQ ID NO: 3265329 - RNA, 15 nt, Vaccinia virus
ucuucuauucuagaa

SEQ ID NO: 3265330 - RNA, 18 nt, Vaccinia virus
acuauuugucuuaauaga

SEQ ID NO: 3265331 - RNA, 11 nt, Vaccinia virus
ccguucucuga

SEQ ID NO: 3265332 - RNA, 12 nt, Vaccinia virus
uuccuuguguag

SEQ ID NO: 3265333 - RNA, 21 nt, Vaccinia virus
guacauuagccggacaaauau

SEQ ID NO: 3265334 - RNA, 12 nt, Vaccinia virus
gauuauuuucau

SEQ ID NO: 3265335 - RNA, 17 nt, Vaccinia virus
cgaaaauugcuauuuca

SEQ ID NO: 3265336 - RNA, 18 nt, Vaccinia virus
auaagagaggauaaaacg

SEQ ID NO: 3265337 - RNA, 13 nt, Vaccinia virus
auguaagucuuac

SEQ ID NO: 3265338 - RNA, 23 nt, Vaccinia virus
agauaauagggagaaaugacauu

SEQ ID NO: 3265339 - RNA, 16 nt, Vaccinia virus
guuguuccuagauaug

SEQ ID NO: 3265340 - RNA, 19 nt, Vaccinia virus
auauuuacauauuuacugg

SEQ ID NO: 3265341 - RNA, 16 nt, Vaccinia virus
auuuguuguucauaag

SEQ ID NO: 3265342 - RNA, 20 nt, Vaccinia virus
aaaugucuagcgauauuucu

SEQ ID NO: 3265343 - RNA, 17 nt, Vaccinia virus
gcauaguuuuucauaau

SEQ ID NO: 3265344 - RNA, 15 nt, Vaccinia virus
acaauauuaguaugu

SEQ ID NO: 3265345 - RNA, 15 nt, Vaccinia virus
uuaaccuaacuaaaa

SEQ ID NO: 3265346 - RNA, 16 nt, Vaccinia virus
aucaucaacaauccaa

SEQ ID NO: 3265347 - RNA, 12 nt, Vaccinia virus
ucaaagaaaaag

SEQ ID NO: 3265348 - RNA, 18 nt, Vaccinia virus
auucguauaaauauccuu

SEQ ID NO: 3265349 - RNA, 19 nt, Vaccinia virus
uacuaagcaaguacaugga

SEQ ID NO: 3265350 - RNA, 22 nt, Vaccinia virus
gcuuuugcgaucaauaaaugga

SEQ ID NO: 3265351 - RNA, 16 nt, Vaccinia virus
aaguaucaaaucgaua

SEQ ID NO: 3265352 - RNA, 17 nt, Vaccinia virus
aauauucauauccuugu

SEQ ID NO: 3265353 - RNA, 21 nt, Vaccinia virus
caacuaauguaugauauaauu

SEQ ID NO: 3265354 - RNA, 20 nt, Vaccinia virus
acaauguuugucauauguau

SEQ ID NO: 3265355 - RNA, 21 nt, Vaccinia virus
auccuuuuguuggaaaaauga

SEQ ID NO: 3265356 - RNA, 16 nt, Vaccinia virus
acuacaucuuuaagau

SEQ ID NO: 3265357 - RNA, 17 nt, Vaccinia virus
uacuguuuagaugauau

SEQ ID NO: 3265358 - RNA, 15 nt, Vaccinia virus
uaguuuuacuaucau

SEQ ID NO: 3265359 - RNA, 15 nt, Vaccinia virus
uauuaguguuuagau

SEQ ID NO: 3265360 - RNA, 15 nt, Vaccinia virus
auauuaauaggagau

SEQ ID NO: 3265361 - RNA, 19 nt, Vaccinia virus
auuaauguccaagucuuga

SEQ ID NO: 3265362 - RNA, 16 nt, Vaccinia virus
augucaggaaauguau

SEQ ID NO: 3265363 - RNA, 21 nt, Vaccinia virus
uauucuggugcuaauuauucc

SEQ ID NO: 3265364 - RNA, 20 nt, Vaccinia virus
aacaugucuucuauucuaga

SEQ ID NO: 3265365 - RNA, 22 nt, Vaccinia virus
uaacgccuauacuauguuauau

SEQ ID NO: 3265366 - RNA, 15 nt, Vaccinia virus
cuaaauucgauaucu

SEQ ID NO: 3265367 - RNA, 21 nt, Vaccinia virus
aagugaucucgagaaauaaua

SEQ ID NO: 3265368 - RNA, 12 nt, Vaccinia virus
uguuauauguaa

SEQ ID NO: 3265369 - RNA, 16 nt, Vaccinia virus
ugucucauauguuuua

SEQ ID NO: 3265370 - RNA, 22 nt, Vaccinia virus
aaaccuuugacuaguuguagaa

SEQ ID NO: 3265371 - RNA, 23 nt, Vaccinia virus
guccaugacuugguauuuggaaa

SEQ ID NO: 3265372 - RNA, 22 nt, Vaccinia virus
acaauaucauaaacaaacuaau

SEQ ID NO: 3265373 - RNA, 14 nt, Vaccinia virus
ucuuuaucucuuag

SEQ ID NO: 3265374 - RNA, 17 nt, Vaccinia virus
uuacauauuuacuggua

SEQ ID NO: 3265375 - RNA, 13 nt, Vaccinia virus
uguguuuacagua

SEQ ID NO: 3265376 - RNA, 12 nt, Vaccinia virus
aauaucauuaag

SEQ ID NO: 3265377 - RNA, 17 nt, Vaccinia virus
cucguaagauaaaguuu

SEQ ID NO: 3265378 - RNA, 13 nt, Vaccinia virus
uaauaugaguaau

SEQ ID NO: 3265379 - RNA, 18 nt, Vaccinia virus
ccaaucaccuuauaugau

SEQ ID NO: 3265380 - RNA, 21 nt, Vaccinia virus
auacauagucgugaucaacau

SEQ ID NO: 3265381 - RNA, 17 nt, Vaccinia virus
acaugucucucucaaau

SEQ ID NO: 3265382 - RNA, 12 nt, Vaccinia virus
uauaacaaccaa

SEQ ID NO: 3265383 - RNA, 21 nt, Vaccinia virus
acuaucaaucgauaacaagau

SEQ ID NO: 3265384 - RNA, 12 nt, Vaccinia virus
aggauaauacau

SEQ ID NO: 3265385 - RNA, 19 nt, Vaccinia virus
ugacauacauacuaucuuu

SEQ ID NO: 3265386 - RNA, 21 nt, Vaccinia virus
ccauaucuaaagcuauguuua

SEQ ID NO: 3265387 - RNA, 15 nt, Vaccinia virus
aauguacucaugaaa

SEQ ID NO: 3265388 - RNA, 13 nt, Vaccinia virus
cauuuagacagug

SEQ ID NO: 3265389 - RNA, 17 nt, Vaccinia virus
auagccaucguuaauua

SEQ ID NO: 3265390 - RNA, 16 nt, Vaccinia virus
acaccgccucuagaua

SEQ ID NO: 3265391 - RNA, 15 nt, Vaccinia virus
ugugcuuaauuauuu

SEQ ID NO: 3265392 - RNA, 19 nt, Vaccinia virus
acaacgaaccaaaaugaau

SEQ ID NO: 3265393 - RNA, 21 nt, Vaccinia virus
uuaccaucuucuuugauuaau

SEQ ID NO: 3265394 - RNA, 22 nt, Vaccinia virus
ucguugacaucuaguauugaua

SEQ ID NO: 3265395 - RNA, 18 nt, Vaccinia virus
agacgauuaguaauauau

SEQ ID NO: 3265396 - RNA, 12 nt, Vaccinia virus
aacaauguuucu

SEQ ID NO: 3265397 - RNA, 14 nt, Vaccinia virus
auuucauuaauagu

SEQ ID NO: 3265398 - RNA, 22 nt, Vaccinia virus
ugaaugaaggauuugaaucauc

SEQ ID NO: 3265399 - RNA, 24 nt, Vaccinia virus
aaacugguaauccacauaguugua

SEQ ID NO: 3265400 - RNA, 15 nt, Vaccinia virus
uaauauccaaucuua

SEQ ID NO: 3265401 - RNA, 13 nt, Vaccinia virus
aucguuugucaua

SEQ ID NO: 3265402 - RNA, 16 nt, Vaccinia virus
gugcaucgucuauucu

SEQ ID NO: 3265403 - RNA, 19 nt, Vaccinia virus
uauaucgacauacuacuua

SEQ ID NO: 3265404 - RNA, 18 nt, Vaccinia virus
acaaccgcuuagaaauaa

SEQ ID NO: 3265405 - RNA, 22 nt, Vaccinia virus
cguaccaacucauuuaaauauc

SEQ ID NO: 3265406 - RNA, 18 nt, Vaccinia virus
uuuucauuagcaugaauc

SEQ ID NO: 3265407 - RNA, 19 nt, Vaccinia virus
cucucugaaucucugugga

SEQ ID NO: 3265408 - RNA, 15 nt, Vaccinia virus
cauuuugauauugug

SEQ ID NO: 3265409 - RNA, 22 nt, Vaccinia virus
acauauaucugauaguauucca

SEQ ID NO: 3265410 - RNA, 15 nt, Vaccinia virus
cgaucaaaugauauc

SEQ ID NO: 3265411 - RNA, 19 nt, Vaccinia virus
ucucguauucaguuucauc

SEQ ID NO: 3265412 - RNA, 23 nt, Vaccinia virus
auuuguuuuguuaaacaauagau

SEQ ID NO: 3265413 - RNA, 15 nt, Vaccinia virus
uuuagacguagaaaa

SEQ ID NO: 3265414 - RNA, 16 nt, Vaccinia virus
ucuauguugacaugua

SEQ ID NO: 3265415 - RNA, 17 nt, Vaccinia virus
cauucuaauguucauaa

SEQ ID NO: 3265416 - RNA, 13 nt, Vaccinia virus
augaauugauucu

SEQ ID NO: 3265417 - RNA, 16 nt, Vaccinia virus
ugucaauugauucuua

SEQ ID NO: 3265418 - RNA, 21 nt, Vaccinia virus
cugccguauauaggagaaaaa

SEQ ID NO: 3265419 - RNA, 14 nt, Vaccinia virus
ugucauuuguauuu

SEQ ID NO: 3265420 - RNA, 13 nt, Vaccinia virus
aguucuuuucuag

SEQ ID NO: 3265421 - RNA, 16 nt, Vaccinia virus
gagauuuaaucuguaa

SEQ ID NO: 3265422 - RNA, 13 nt, Vaccinia virus
aauuagagaauua

SEQ ID NO: 3265423 - RNA, 18 nt, Vaccinia virus
cauaaaggaauauacaaa

SEQ ID NO: 3265424 - RNA, 20 nt, Vaccinia virus
uucuuaacuacguuaucauc

SEQ ID NO: 3265425 - RNA, 22 nt, Vaccinia virus
agaagcacucguuauuaauaca

SEQ ID NO: 3265426 - RNA, 21 nt, Vaccinia virus
uuuacauggcucguaccaaca

SEQ ID NO: 3265427 - RNA, 17 nt, Vaccinia virus
gaaucgguucaaaaauu

SEQ ID NO: 3265428 - RNA, 20 nt, Vaccinia virus
gguauaucuggaaagaaauc

SEQ ID NO: 3265429 - RNA, 17 nt, Vaccinia virus
aucuaacaccaaaaaua

SEQ ID NO: 3265430 - RNA, 21 nt, Vaccinia virus
aacuuggaaacaucucuucua

SEQ ID NO: 3265431 - RNA, 15 nt, Vaccinia virus
aacaugagacugacu

SEQ ID NO: 3265432 - RNA, 14 nt, Vaccinia virus
aauaacucuagacg

SEQ ID NO: 3265433 - RNA, 17 nt, Vaccinia virus
uuauacagaguauguaa

SEQ ID NO: 3265434 - RNA, 22 nt, Vaccinia virus
uuaacguaucgcauuaauacug

SEQ ID NO: 3265435 - RNA, 20 nt, Vaccinia virus
ugucaguaguauacaucaug

SEQ ID NO: 3265436 - RNA, 15 nt, Vaccinia virus
uaaccuuaucauuau

SEQ ID NO: 3265437 - RNA, 15 nt, Vaccinia virus
auugaguggaaaguu

SEQ ID NO: 3265438 - RNA, 12 nt, Vaccinia virus
agccaauacuuu

SEQ ID NO: 3265439 - RNA, 17 nt, Vaccinia virus
auaguauaauuauaugu

SEQ ID NO: 3265440 - RNA, 13 nt, Vaccinia virus
aucaaaaaguaag

SEQ ID NO: 3265441 - RNA, 22 nt, Vaccinia virus
cgacucuguuggauauggguuu

SEQ ID NO: 3265442 - RNA, 15 nt, Vaccinia virus
guuuaucaauaacua

SEQ ID NO: 3265443 - RNA, 17 nt, Vaccinia virus
aaguuauuguacuaucg

SEQ ID NO: 3265444 - RNA, 15 nt, Vaccinia virus
uacuaucuuuaacau

SEQ ID NO: 3265445 - RNA, 14 nt, Vaccinia virus
acuagaauaaagca

SEQ ID NO: 3265446 - RNA, 21 nt, Vaccinia virus
agauauuuuaugggaaaaacg

SEQ ID NO: 3265447 - RNA, 22 nt, Vaccinia virus
aaaguaguucaacauaauauua

SEQ ID NO: 3265448 - RNA, 22 nt, Vaccinia virus
ucuaacaaaaauuaugaaauaa

SEQ ID NO: 3265449 - RNA, 17 nt, Vaccinia virus
caaguaguaauagugau

SEQ ID NO: 3265450 - RNA, 16 nt, Vaccinia virus
ucauccguuguuauau

SEQ ID NO: 3265451 - RNA, 21 nt, Vaccinia virus
gaauaaggaauauacuaauca

SEQ ID NO: 3265452 - RNA, 22 nt, Vaccinia virus
uuaaacuguaucgaucauucuu

SEQ ID NO: 3265453 - RNA, 22 nt, Vaccinia virus
gaaucguauaaugucccuucaa

SEQ ID NO: 3265454 - RNA, 19 nt, Vaccinia virus
gaauuuauuucuaaaucua

SEQ ID NO: 3265455 - RNA, 15 nt, Vaccinia virus
auuauagauguguau

SEQ ID NO: 3265456 - RNA, 17 nt, Vaccinia virus
acauucagaaagaguuu

SEQ ID NO: 3265457 - RNA, 20 nt, Vaccinia virus
uugucgcuuauauugaugau

SEQ ID NO: 3265458 - RNA, 15 nt, Vaccinia virus
uaauucuccugaaaa

SEQ ID NO: 3265459 - RNA, 20 nt, Vaccinia virus
ucauguaaccuacuagaaug

SEQ ID NO: 3265460 - RNA, 19 nt, Vaccinia virus
uuaucaaguguauuaguca

SEQ ID NO: 3265461 - RNA, 23 nt, Vaccinia virus
cuauaccauauccuccuguagau

SEQ ID NO: 3265462 - RNA, 14 nt, Vaccinia virus
aguaugucaugaau

SEQ ID NO: 3265463 - RNA, 19 nt, Vaccinia virus
ucuggacauaauucaucua

SEQ ID NO: 3265464 - RNA, 18 nt, Vaccinia virus
gauauauuguuucauaau

SEQ ID NO: 3265465 - RNA, 15 nt, Vaccinia virus
uuaauucucucaggu

SEQ ID NO: 3265466 - RNA, 15 nt, Vaccinia virus
uaugcgagacauaua

SEQ ID NO: 3265467 - RNA, 18 nt, Vaccinia virus
aguuguuccuagauaugu

SEQ ID NO: 3265468 - RNA, 19 nt, Vaccinia virus
agaauuaauaauaucucua

SEQ ID NO: 3265469 - RNA, 21 nt, Vaccinia virus
guauucacuauaucaguuuua

SEQ ID NO: 3265470 - RNA, 15 nt, Vaccinia virus
agguuuaguaucuca

SEQ ID NO: 3265471 - RNA, 17 nt, Vaccinia virus
uagucuuaaauggagau

SEQ ID NO: 3265472 - RNA, 17 nt, Vaccinia virus
uaugcgucgaauuaaau

SEQ ID NO: 3265473 - RNA, 13 nt, Vaccinia virus
agauaaucuauau

SEQ ID NO: 3265474 - RNA, 20 nt, Vaccinia virus
guuccucuguaaauaaaucu

SEQ ID NO: 3265475 - RNA, 20 nt, Vaccinia virus
auauuauuacacauaaacau

SEQ ID NO: 3265476 - RNA, 12 nt, Vaccinia virus
cguauauguuuc

SEQ ID NO: 3265477 - RNA, 14 nt, Vaccinia virus
uuggcaaaaacgga

SEQ ID NO: 3265478 - RNA, 15 nt, Vaccinia virus
gauuaucguuuucau

SEQ ID NO: 3265479 - RNA, 14 nt, Vaccinia virus
auaacgauauauau

SEQ ID NO: 3265480 - RNA, 20 nt, Vaccinia virus
gaauuugaucuauugcccua

SEQ ID NO: 3265481 - RNA, 20 nt, Vaccinia virus
aagugaguauacuugucauc

SEQ ID NO: 3265482 - RNA, 18 nt, Vaccinia virus
uacuaacguauaauucuu

SEQ ID NO: 3265483 - RNA, 15 nt, Vaccinia virus
uucucguuuccaaaa

SEQ ID NO: 3265484 - RNA, 19 nt, Vaccinia virus
acgauuuccaugucuacau

SEQ ID NO: 3265485 - RNA, 12 nt, Vaccinia virus
ucgauauacaaa

SEQ ID NO: 3265486 - RNA, 17 nt, Vaccinia virus
auaaccuccugaaaaug

SEQ ID NO: 3265487 - RNA, 18 nt, Vaccinia virus
uuguaauaaaaagggaaa

SEQ ID NO: 3265488 - RNA, 17 nt, Vaccinia virus
accaccaaauaaaauuc

SEQ ID NO: 3265489 - RNA, 17 nt, Vaccinia virus
uguaugucuuauguaua

SEQ ID NO: 3265490 - RNA, 13 nt, Vaccinia virus
uaauaguaaauga

SEQ ID NO: 3265491 - RNA, 16 nt, Vaccinia virus
uuuuaauguauaacag

SEQ ID NO: 3265492 - RNA, 22 nt, Vaccinia virus
uauuuuacauggauuuaucaua

SEQ ID NO: 3265493 - RNA, 16 nt, Vaccinia virus
acuauuacuaugaauc

SEQ ID NO: 3265494 - RNA, 14 nt, Vaccinia virus
auuacaaaagaaac

SEQ ID NO: 3265495 - RNA, 18 nt, Vaccinia virus
agugauauaaaacuaucu

SEQ ID NO: 3265496 - RNA, 22 nt, Vaccinia virus
uuaaaucuaacgagaauauguu

SEQ ID NO: 3265497 - RNA, 14 nt, Vaccinia virus
auuucgacaaaaag

SEQ ID NO: 3265498 - RNA, 21 nt, Vaccinia virus
gaguaacuguugguaguucuu

SEQ ID NO: 3265499 - RNA, 12 nt, Vaccinia virus
acgauaucacau

SEQ ID NO: 3265500 - RNA, 14 nt, Vaccinia virus
aucucaacaaaauu

SEQ ID NO: 3265501 - RNA, 21 nt, Vaccinia virus
uuugauauuacuaaacacaca

SEQ ID NO: 3265502 - RNA, 12 nt, Vaccinia virus
aagaagaaguag

SEQ ID NO: 3265503 - RNA, 19 nt, Vaccinia virus
ccguaauguaaguaguuua

SEQ ID NO: 3265504 - RNA, 21 nt, Vaccinia virus
guaaucgucguagggagagaa

SEQ ID NO: 3265505 - RNA, 21 nt, Vaccinia virus
gaauauguuauaauagagaua

SEQ ID NO: 3265506 - RNA, 20 nt, Vaccinia virus
uaguauagaucaaauacuug

SEQ ID NO: 3265507 - RNA, 21 nt, Vaccinia virus
cgaugguuuuuauauguguuu

SEQ ID NO: 3265508 - RNA, 23 nt, Vaccinia virus
aauagguguaaaucuaggaauua

SEQ ID NO: 3265509 - RNA, 12 nt, Vaccinia virus
caauauuacuuu

SEQ ID NO: 3265510 - RNA, 15 nt, Vaccinia virus
uucaauauacuaguu

SEQ ID NO: 3265511 - RNA, 21 nt, Vaccinia virus
auaucauugaaugagauacua

SEQ ID NO: 3265512 - RNA, 16 nt, Vaccinia virus
uauaggagaaaaacaa

SEQ ID NO: 3265513 - RNA, 18 nt, Vaccinia virus
auuauuagauuuaauagc

SEQ ID NO: 3265514 - RNA, 14 nt, Vaccinia virus
uauacacauuuuca

SEQ ID NO: 3265515 - RNA, 20 nt, Vaccinia virus
gucucgucaaugucuauagu

SEQ ID NO: 3265516 - RNA, 13 nt, Vaccinia virus
ccuaauauaacag

SEQ ID NO: 3265517 - RNA, 20 nt, Vaccinia virus
uauuaucaaaauuuggaaac

SEQ ID NO: 3265518 - RNA, 15 nt, Vaccinia virus
caauaacauaacucu

SEQ ID NO: 3265519 - RNA, 14 nt, Vaccinia virus
uuaaucauuaacuu

SEQ ID NO: 3265520 - RNA, 14 nt, Vaccinia virus
uauaaaauauucua

SEQ ID NO: 3265521 - RNA, 14 nt, Vaccinia virus
uucucugaauauag

SEQ ID NO: 3265522 - RNA, 18 nt, Vaccinia virus
auucauaacgucauugau

SEQ ID NO: 3265523 - RNA, 16 nt, Vaccinia virus
uaucuauacuauuaaa

SEQ ID NO: 3265524 - RNA, 19 nt, Vaccinia virus
augagagugauaucauauu

SEQ ID NO: 3265525 - RNA, 20 nt, Vaccinia virus
auauucaguaaccaaauaca

SEQ ID NO: 3265526 - RNA, 13 nt, Vaccinia virus
auaguaaaaucua

SEQ ID NO: 3265527 - RNA, 22 nt, Vaccinia virus
auaugcaaauagagcaauuacu

SEQ ID NO: 3265528 - RNA, 22 nt, Vaccinia virus
uuuaaacuguccuauaaccucu

SEQ ID NO: 3265529 - RNA, 19 nt, Vaccinia virus
uguugugaaugacaucauc

SEQ ID NO: 3265530 - RNA, 22 nt, Vaccinia virus
agaggaaacauggggauugaaa

SEQ ID NO: 3265531 - RNA, 20 nt, Vaccinia virus
uucucucaucuaucaaaagu

SEQ ID NO: 3265532 - RNA, 14 nt, Vaccinia virus
ucacagauucuauu

SEQ ID NO: 3265533 - RNA, 18 nt, Vaccinia virus
uuguucuuccaauugcaa

SEQ ID NO: 3265534 - RNA, 23 nt, Vaccinia virus
aucaaacucuaaugaccacaucu

SEQ ID NO: 3265535 - RNA, 15 nt, Vaccinia virus
auuacaaagaagaac

SEQ ID NO: 3265536 - RNA, 18 nt, Vaccinia virus
cauaucauacaugauauu

SEQ ID NO: 3265537 - RNA, 18 nt, Vaccinia virus
uauuuaucaauucuucua

SEQ ID NO: 3265538 - RNA, 12 nt, Vaccinia virus
aaucuaccaguc

SEQ ID NO: 3265539 - RNA, 17 nt, Vaccinia virus
agaaugcauaaauuugu

SEQ ID NO: 3265540 - RNA, 15 nt, Vaccinia virus
auggugaaauuauug

SEQ ID NO: 3265541 - RNA, 12 nt, Vaccinia virus
gcuaacaucaua

SEQ ID NO: 3265542 - RNA, 13 nt, Vaccinia virus
gaucaucugaaaa

SEQ ID NO: 3265543 - RNA, 17 nt, Vaccinia virus
acauuuacauauuucga

SEQ ID NO: 3265544 - RNA, 21 nt, Vaccinia virus
uauaacucguuuuuauaugug

SEQ ID NO: 3265545 - RNA, 18 nt, Vaccinia virus
caacauaauauuaaacac

SEQ ID NO: 3265546 - RNA, 20 nt, Vaccinia virus
agaugguaaaauacaaaaua

SEQ ID NO: 3265547 - RNA, 14 nt, Vaccinia virus
gaauaucauauuac

SEQ ID NO: 3265548 - RNA, 21 nt, Vaccinia virus
cuuuaucucuuaguaaguuua

SEQ ID NO: 3265549 - RNA, 13 nt, Vaccinia virus
aucuuucauuucu

SEQ ID NO: 3265550 - RNA, 14 nt, Vaccinia virus
uugaaaauuauuuu

SEQ ID NO: 3265551 - RNA, 21 nt, Vaccinia virus
ugacaaaaucaacuacauaau

SEQ ID NO: 3265552 - RNA, 20 nt, Vaccinia virus
auuaguuaguguaauguuaa

SEQ ID NO: 3265553 - RNA, 20 nt, Vaccinia virus
uaauaauuuaguucauggaa

SEQ ID NO: 3265554 - RNA, 13 nt, Vaccinia virus
augguaaaaagac

SEQ ID NO: 3265555 - RNA, 13 nt, Vaccinia virus
ugaaauaacucuu

SEQ ID NO: 3265556 - RNA, 13 nt, Vaccinia virus
uuaucauaaaagu

SEQ ID NO: 3265557 - RNA, 22 nt, Vaccinia virus
caaaauuuuacuuuuaguucuu

SEQ ID NO: 3265558 - RNA, 19 nt, Vaccinia virus
uauaaaacuacuacaauga

SEQ ID NO: 3265559 - RNA, 17 nt, Vaccinia virus
cacgauacuaugcauau

SEQ ID NO: 3265560 - RNA, 16 nt, Vaccinia virus
auuaauguauuauuau

SEQ ID NO: 3265561 - RNA, 19 nt, Vaccinia virus
agaauuaaaucuaacgaga

SEQ ID NO: 3265562 - RNA, 18 nt, Vaccinia virus
agucguuuauuaucuugu

SEQ ID NO: 3265563 - RNA, 22 nt, Vaccinia virus
uaaucaaaaucuuaauaucuuc

SEQ ID NO: 3265564 - RNA, 20 nt, Vaccinia virus
auguacgauccaaacaaugu

SEQ ID NO: 3265565 - RNA, 21 nt, Vaccinia virus
ugauauaggggucuucauaac

SEQ ID NO: 3265566 - RNA, 15 nt, Vaccinia virus
aaacuaauucauuuu

SEQ ID NO: 3265567 - RNA, 21 nt, Vaccinia virus
gaucagguaaaacaauaaucg

SEQ ID NO: 3265568 - RNA, 23 nt, Vaccinia virus
ugauaucuauaauaggguaucua

SEQ ID NO: 3265569 - RNA, 15 nt, Vaccinia virus
auauucccaaacaua

SEQ ID NO: 3265570 - RNA, 17 nt, Vaccinia virus
aggauauauuaaagucu

SEQ ID NO: 3265571 - RNA, 11 nt, Vaccinia virus
agcaaaaaacc

SEQ ID NO: 3265572 - RNA, 17 nt, Vaccinia virus
auccuaacuuuaaacaa

SEQ ID NO: 3265573 - RNA, 20 nt, Vaccinia virus
gcagcaucgcgacuauucua

SEQ ID NO: 3265574 - RNA, 13 nt, Vaccinia virus
caauuccaaagau

SEQ ID NO: 3265575 - RNA, 13 nt, Vaccinia virus
aggagaaguaaua

SEQ ID NO: 3265576 - RNA, 15 nt, Vaccinia virus
gaauccuauacucug

SEQ ID NO: 3265577 - RNA, 16 nt, Vaccinia virus
auaaucguauacuuca

SEQ ID NO: 3265578 - RNA, 14 nt, Vaccinia virus
aaacgacauacugu

SEQ ID NO: 3265579 - RNA, 17 nt, Vaccinia virus
aauagaaacguacuacu

SEQ ID NO: 3265580 - RNA, 16 nt, Vaccinia virus
aaaauauguauaacgu

SEQ ID NO: 3265581 - RNA, 23 nt, Vaccinia virus
auaagcuauaauaauaaauguau

SEQ ID NO: 3265582 - RNA, 22 nt, Vaccinia virus
acauaaucguagauucauguua

SEQ ID NO: 3265583 - RNA, 22 nt, Vaccinia virus
uuacaaacugaauaauaucaga

SEQ ID NO: 3265584 - RNA, 17 nt, Vaccinia virus
cuauaauaauaaaugua

SEQ ID NO: 3265585 - RNA, 20 nt, Vaccinia virus
uaagaaugacuccuauguuu

SEQ ID NO: 3265586 - RNA, 23 nt, Vaccinia virus
aauaauaccguuugauauaccau

SEQ ID NO: 3265587 - RNA, 12 nt, Vaccinia virus
uucaucagauau

SEQ ID NO: 3265588 - RNA, 21 nt, Vaccinia virus
caggauuccuauucauuuuga

SEQ ID NO: 3265589 - RNA, 13 nt, Vaccinia virus
gauguauauauca

SEQ ID NO: 3265590 - RNA, 20 nt, Vaccinia virus
aauuuuuaacgauuuacugu

SEQ ID NO: 3265591 - RNA, 16 nt, Vaccinia virus
cgauuuuuagauuuca

SEQ ID NO: 3265592 - RNA, 18 nt, Vaccinia virus
auucuccguuaguguuug

SEQ ID NO: 3265593 - RNA, 14 nt, Vaccinia virus
ucaucauuaaacau

SEQ ID NO: 3265594 - RNA, 12 nt, Vaccinia virus
uauauauucucu

SEQ ID NO: 3265595 - RNA, 13 nt, Vaccinia virus
gcggauacaaaac

SEQ ID NO: 3265596 - RNA, 18 nt, Vaccinia virus
gaaaauucauauacugau

SEQ ID NO: 3265597 - RNA, 20 nt, Vaccinia virus
gauauagaaaucggaaauuu

SEQ ID NO: 3265598 - RNA, 14 nt, Vaccinia virus
auaaugauauauau

SEQ ID NO: 3265599 - RNA, 18 nt, Vaccinia virus
aaaauaaacacauagaaa

SEQ ID NO: 3265600 - RNA, 17 nt, Vaccinia virus
acaaagauaaaaaccac

SEQ ID NO: 3265601 - RNA, 20 nt, Vaccinia virus
uuaguaaaaaauuuauuucu

SEQ ID NO: 3265602 - RNA, 23 nt, Vaccinia virus
ucaucgaacuucugaucauuaau

SEQ ID NO: 3265603 - RNA, 12 nt, Vaccinia virus
uuauuuauguca

SEQ ID NO: 3265604 - RNA, 18 nt, Vaccinia virus
aaauuguaagguuguaaa

SEQ ID NO: 3265605 - RNA, 14 nt, Vaccinia virus
uauuuaauaucaaa

SEQ ID NO: 3265606 - RNA, 16 nt, Vaccinia virus
aaauaaaauacauuua

SEQ ID NO: 3265607 - RNA, 21 nt, Vaccinia virus
auaauuuaacauuuuggcaaa

SEQ ID NO: 3265608 - RNA, 21 nt, Vaccinia virus
acgauuuuuagugaaacauuc

SEQ ID NO: 3265609 - RNA, 22 nt, Vaccinia virus
uccaauaaauuaucaaauacuu

SEQ ID NO: 3265610 - RNA, 21 nt, Vaccinia virus
caaacaauccaaaaaaugaaa

SEQ ID NO: 3265611 - RNA, 22 nt, Vaccinia virus
cuguuaccauaauuccuuugau

SEQ ID NO: 3265612 - RNA, 15 nt, Vaccinia virus
acuugcaaaaaagac

SEQ ID NO: 3265613 - RNA, 17 nt, Vaccinia virus
aaauuuuuuuucaguua

SEQ ID NO: 3265614 - RNA, 14 nt, Vaccinia virus
ucuauacguuucua

SEQ ID NO: 3265615 - RNA, 19 nt, Vaccinia virus
uuagaugagaaauuauucc

SEQ ID NO: 3265616 - RNA, 16 nt, Vaccinia virus
auacaagaguggaaac

SEQ ID NO: 3265617 - RNA, 13 nt, Vaccinia virus
cuaacuauauacc

SEQ ID NO: 3265618 - RNA, 23 nt, Vaccinia virus
cguguauuuuugacguaaaugug

SEQ ID NO: 3265619 - RNA, 20 nt, Vaccinia virus
ucuuugaccaacgauuuaga

SEQ ID NO: 3265620 - RNA, 16 nt, Vaccinia virus
uaacaucuugauuaau

SEQ ID NO: 3265621 - RNA, 14 nt, Vaccinia virus
uauuacaaccaaug

SEQ ID NO: 3265622 - RNA, 22 nt, Vaccinia virus
uagauccuucaauaacuuauag

SEQ ID NO: 3265623 - RNA, 17 nt, Vaccinia virus
cgagaauaugauagaaa

SEQ ID NO: 3265624 - RNA, 20 nt, Vaccinia virus
augaaaaacucugauaacua

SEQ ID NO: 3265625 - RNA, 19 nt, Vaccinia virus
auuuuaauucuagacuauu

SEQ ID NO: 3265626 - RNA, 12 nt, Vaccinia virus
cauuuaaaguua

SEQ ID NO: 3265627 - RNA, 14 nt, Vaccinia virus
aucuagacauagau

SEQ ID NO: 3265628 - RNA, 15 nt, Vaccinia virus
uauacaaguguagau

SEQ ID NO: 3265629 - RNA, 21 nt, Vaccinia virus
auguugggauauugcaugaua

SEQ ID NO: 3265630 - RNA, 22 nt, Vaccinia virus
uucuugacugucgcuaauaucu

SEQ ID NO: 3265631 - RNA, 21 nt, Vaccinia virus
ugcugcaacaauucagacucc

SEQ ID NO: 3265632 - RNA, 22 nt, Vaccinia virus
caaucauuccucauaagaugau

SEQ ID NO: 3265633 - RNA, 15 nt, Vaccinia virus
uuucuuuaacaaauu

SEQ ID NO: 3265634 - RNA, 13 nt, Vaccinia virus
acacucuauuuca

SEQ ID NO: 3265635 - RNA, 22 nt, Vaccinia virus
uaaaaauuuuuuagauguagua

SEQ ID NO: 3265636 - RNA, 14 nt, Vaccinia virus
uuucguacaucucu

SEQ ID NO: 3265637 - RNA, 22 nt, Vaccinia virus
aaguuuucuuucaaaauagcua

SEQ ID NO: 3265638 - RNA, 16 nt, Vaccinia virus
auuauucaguaugaag

SEQ ID NO: 3265639 - RNA, 12 nt, Vaccinia virus
auaaaugggaac

SEQ ID NO: 3265640 - RNA, 17 nt, Vaccinia virus
ucauuauaacucuagaa

SEQ ID NO: 3265641 - RNA, 12 nt, Vaccinia virus
uuuuucaugauu

SEQ ID NO: 3265642 - RNA, 17 nt, Vaccinia virus
uacaucggauacgacau

SEQ ID NO: 3265643 - RNA, 15 nt, Vaccinia virus
uucuuaagacacauu

SEQ ID NO: 3265644 - RNA, 17 nt, Vaccinia virus
auaaacucacauuucaa

SEQ ID NO: 3265645 - RNA, 13 nt, Vaccinia virus
aaauaagagacuu

SEQ ID NO: 3265646 - RNA, 18 nt, Vaccinia virus
cauaaacugaucacuaau

SEQ ID NO: 3265647 - RNA, 14 nt, Vaccinia virus
uaaaacaaacuugu

SEQ ID NO: 3265648 - RNA, 11 nt, Vaccinia virus
acuuuaaugau

SEQ ID NO: 3265649 - RNA, 14 nt, Vaccinia virus
uauuauuaaucauu

SEQ ID NO: 3265650 - RNA, 21 nt, Vaccinia virus
aagauauuaucggguuuaaga

SEQ ID NO: 3265651 - RNA, 14 nt, Vaccinia virus
guauuaguaggaaa

SEQ ID NO: 3265652 - RNA, 14 nt, Vaccinia virus
gaauaaauauccuu

SEQ ID NO: 3265653 - RNA, 15 nt, Vaccinia virus
uaugauggauacaug

SEQ ID NO: 3265654 - RNA, 12 nt, Vaccinia virus
guuuaucuuuuu

SEQ ID NO: 3265655 - RNA, 21 nt, Vaccinia virus
gacucgcaaaaaauacaauau

SEQ ID NO: 3265656 - RNA, 18 nt, Vaccinia virus
agguugauguagaagaag

SEQ ID NO: 3265657 - RNA, 19 nt, Vaccinia virus
uaugucuuccguuggauau

SEQ ID NO: 3265658 - RNA, 20 nt, Vaccinia virus
aguaaucauauaaauguuua

SEQ ID NO: 3265659 - RNA, 17 nt, Vaccinia virus
uagaaagaaaauaucua

SEQ ID NO: 3265660 - RNA, 13 nt, Vaccinia virus
uuucaaauaccag

SEQ ID NO: 3265661 - RNA, 14 nt, Vaccinia virus
guaagcauuuccuu

SEQ ID NO: 3265662 - RNA, 20 nt, Vaccinia virus
auaacgaauccaauguuaug

SEQ ID NO: 3265663 - RNA, 16 nt, Vaccinia virus
acucauaaaauacaag

SEQ ID NO: 3265664 - RNA, 18 nt, Vaccinia virus
ucuguuaccauaauuccu

SEQ ID NO: 3265665 - RNA, 18 nt, Vaccinia virus
guaaccaaauacauauua

SEQ ID NO: 3265666 - RNA, 12 nt, Vaccinia virus
uuaucauuauua

SEQ ID NO: 3265667 - RNA, 20 nt, Vaccinia virus
augguucgcucaaaaauaua

SEQ ID NO: 3265668 - RNA, 18 nt, Vaccinia virus
agaacaucauuuccaaau

SEQ ID NO: 3265669 - RNA, 22 nt, Vaccinia virus
cuaucaaauucggaucguaaau

SEQ ID NO: 3265670 - RNA, 16 nt, Vaccinia virus
gaaugacgaauccugu

SEQ ID NO: 3265671 - RNA, 23 nt, Vaccinia virus
cagaauccgcugauggaaacaca

SEQ ID NO: 3265672 - RNA, 22 nt, Vaccinia virus
uauauuuucacuuuaucucauu

SEQ ID NO: 3265673 - RNA, 15 nt, Vaccinia virus
auuaauacagacgau

SEQ ID NO: 3265674 - RNA, 16 nt, Vaccinia virus
uaaauuuucuauacau

SEQ ID NO: 3265675 - RNA, 16 nt, Vaccinia virus
uagaagaauucuugga

SEQ ID NO: 3265676 - RNA, 15 nt, Vaccinia virus
uuuaucuauucauaa

SEQ ID NO: 3265677 - RNA, 18 nt, Vaccinia virus
cucuacucauuucauuau

SEQ ID NO: 3265678 - RNA, 12 nt, Vaccinia virus
aaguaugauaca

SEQ ID NO: 3265679 - RNA, 14 nt, Vaccinia virus
gaauauacaaguau

SEQ ID NO: 3265680 - RNA, 14 nt, Vaccinia virus
uucauaucauucuu

SEQ ID NO: 3265681 - RNA, 17 nt, Vaccinia virus
agacaaacgcugauaga

SEQ ID NO: 3265682 - RNA, 16 nt, Vaccinia virus
acguuuauucucaaau

SEQ ID NO: 3265683 - RNA, 17 nt, Vaccinia virus
gauaaaacgauaaaaga

SEQ ID NO: 3265684 - RNA, 21 nt, Vaccinia virus
uacuauauccggcaauauuua

SEQ ID NO: 3265685 - RNA, 21 nt, Vaccinia virus
cacugucuggcaauaaaugau

SEQ ID NO: 3265686 - RNA, 17 nt, Vaccinia virus
agaaguuauagaaugua

SEQ ID NO: 3265687 - RNA, 22 nt, Vaccinia virus
auccuaaugcauguuauagaug

SEQ ID NO: 3265688 - RNA, 17 nt, Vaccinia virus
gauaacuagaaucagaa

SEQ ID NO: 3265689 - RNA, 21 nt, Vaccinia virus
aauuauucacaauaucaguau

SEQ ID NO: 3265690 - RNA, 22 nt, Vaccinia virus
ccaccaauagaaguuuucccaa

SEQ ID NO: 3265691 - RNA, 16 nt, Vaccinia virus
auucgauaagauagau

SEQ ID NO: 3265692 - RNA, 15 nt, Vaccinia virus
aauacaaaaucaucu

SEQ ID NO: 3265693 - RNA, 14 nt, Vaccinia virus
auuuucuaacguga

SEQ ID NO: 3265694 - RNA, 12 nt, Vaccinia virus
cauauguuuauu

SEQ ID NO: 3265695 - RNA, 23 nt, Vaccinia virus
auucaaccacucucgauacauua

SEQ ID NO: 3265696 - RNA, 20 nt, Vaccinia virus
gacauuguauuaugaugaau

SEQ ID NO: 3265697 - RNA, 15 nt, Vaccinia virus
aguacuuguacacau

SEQ ID NO: 3265698 - RNA, 23 nt, Vaccinia virus
cuaugguauugauaaaauuaaug

SEQ ID NO: 3265699 - RNA, 16 nt, Vaccinia virus
gaaaucaacauaauau

SEQ ID NO: 3265700 - RNA, 15 nt, Vaccinia virus
aaugccacaaaugaa

SEQ ID NO: 3265701 - RNA, 15 nt, Vaccinia virus
accaacggaaauggu

SEQ ID NO: 3265702 - RNA, 20 nt, Vaccinia virus
aucuuguuauaauuauaaua

SEQ ID NO: 3265703 - RNA, 23 nt, Vaccinia virus
uuuaaauauuauauaaacauuug

SEQ ID NO: 3265704 - RNA, 13 nt, Vaccinia virus
caacagaaaauau

SEQ ID NO: 3265705 - RNA, 17 nt, Vaccinia virus
aaugauuuagaaaugaa

SEQ ID NO: 3265706 - RNA, 14 nt, Vaccinia virus
auuagagaagcacu

SEQ ID NO: 3265707 - RNA, 12 nt, Vaccinia virus
acuauugccauc

SEQ ID NO: 3265708 - RNA, 17 nt, Vaccinia virus
aucgucgauacaaaaug

SEQ ID NO: 3265709 - RNA, 22 nt, Vaccinia virus
cacauuauacuuuuuuuuggaa

SEQ ID NO: 3265710 - RNA, 16 nt, Vaccinia virus
gucguccaauauuuua

SEQ ID NO: 3265711 - RNA, 17 nt, Vaccinia virus
guagcaaagaaauuaau

SEQ ID NO: 3265712 - RNA, 22 nt, Vaccinia virus
gacuaauaaauuagauauuaau

SEQ ID NO: 3265713 - RNA, 16 nt, Vaccinia virus
uaaaaaauauucuuca

SEQ ID NO: 3265714 - RNA, 21 nt, Vaccinia virus
auuaaaacuaccaauaagaag

SEQ ID NO: 3265715 - RNA, 24 nt, Vaccinia virus
agaacugccauauguuggagauac

SEQ ID NO: 3265716 - RNA, 22 nt, Vaccinia virus
aucaauaacgcaaucaugauuu

SEQ ID NO: 3265717 - RNA, 17 nt, Vaccinia virus
uguauauauauuucuua

SEQ ID NO: 3265718 - RNA, 14 nt, Vaccinia virus
gccagaucuucuuc

SEQ ID NO: 3265719 - RNA, 14 nt, Vaccinia virus
uagguaacauaaaa

SEQ ID NO: 3265720 - RNA, 20 nt, Vaccinia virus
aaccaugcuacaaucauuau

SEQ ID NO: 3265721 - RNA, 15 nt, Vaccinia virus
uuguuccuguagaua

SEQ ID NO: 3265722 - RNA, 14 nt, Vaccinia virus
aaugauauauuaaa

SEQ ID NO: 3265723 - RNA, 16 nt, Vaccinia virus
accguuugauauacca

SEQ ID NO: 3265724 - RNA, 18 nt, Vaccinia virus
accacucgaaaaaguaau

SEQ ID NO: 3265725 - RNA, 14 nt, Vaccinia virus
uucuuguuaucaga

SEQ ID NO: 3265726 - RNA, 21 nt, Vaccinia virus
uaccuaucuucgauauaaaau

SEQ ID NO: 3265727 - RNA, 17 nt, Vaccinia virus
aucaccacuuucauauu

SEQ ID NO: 3265728 - RNA, 21 nt, Vaccinia virus
agaugccauaucauacaugau

SEQ ID NO: 3265729 - RNA, 22 nt, Vaccinia virus
agcagauuaguaugaagauaaa

SEQ ID NO: 3265730 - RNA, 15 nt, Vaccinia virus
uaaaauuuaaaauga

SEQ ID NO: 3265731 - RNA, 15 nt, Vaccinia virus
acgcaauaucucaau

SEQ ID NO: 3265732 - RNA, 14 nt, Vaccinia virus
gaauuauagacacu

SEQ ID NO: 3265733 - RNA, 13 nt, Vaccinia virus
gguauaauaacuu

SEQ ID NO: 3265734 - RNA, 20 nt, Vaccinia virus
caaauuauggcguuuguauu

SEQ ID NO: 3265735 - RNA, 21 nt, Vaccinia virus
acauggaaauagguuuuguuc

SEQ ID NO: 3265736 - RNA, 17 nt, Vaccinia virus
caaaauagguacucugu

SEQ ID NO: 3265737 - RNA, 14 nt, Vaccinia virus
uauaaacaaaaaua

SEQ ID NO: 3265738 - RNA, 20 nt, Vaccinia virus
uaaauaucauaaucuaaaau

SEQ ID NO: 3265739 - RNA, 14 nt, Vaccinia virus
cucuuucuccuuuc

SEQ ID NO: 3265740 - RNA, 15 nt, Vaccinia virus
ucuagccauaucuaa

SEQ ID NO: 3265741 - RNA, 20 nt, Vaccinia virus
uacagagauguacagcuucc

SEQ ID NO: 3265742 - RNA, 18 nt, Vaccinia virus
cauucaaauguuguuaaa

SEQ ID NO: 3265743 - RNA, 18 nt, Vaccinia virus
uccacguucuuuaauuuu

SEQ ID NO: 3265744 - RNA, 21 nt, Vaccinia virus
cuacugggauaagauuuccaa

SEQ ID NO: 3265745 - RNA, 18 nt, Vaccinia virus
uaauaaaaaaauuauuua

SEQ ID NO: 3265746 - RNA, 18 nt, Vaccinia virus
uuggaaucacaaacauua

SEQ ID NO: 3265747 - RNA, 21 nt, Vaccinia virus
caguacuacuagguagaagaa

SEQ ID NO: 3265748 - RNA, 13 nt, Vaccinia virus
cuaauguuguaaa

SEQ ID NO: 3265749 - RNA, 19 nt, Vaccinia virus
aauaauggauaguauaaau

SEQ ID NO: 3265750 - RNA, 14 nt, Vaccinia virus
ucgaauaaugagua

SEQ ID NO: 3265751 - RNA, 18 nt, Vaccinia virus
acaauaaauagcuuuacu

SEQ ID NO: 3265752 - RNA, 16 nt, Vaccinia virus
aauuguauuauuuccc

SEQ ID NO: 3265753 - RNA, 22 nt, Vaccinia virus
aaaagauggaggauaugguggu

SEQ ID NO: 3265754 - RNA, 16 nt, Vaccinia virus
uagagauuauaucuuu

SEQ ID NO: 3265755 - RNA, 13 nt, Vaccinia virus
uauuguuaauaga

SEQ ID NO: 3265756 - RNA, 13 nt, Vaccinia virus
uuaaaucauuaaa

SEQ ID NO: 3265757 - RNA, 16 nt, Vaccinia virus
uuaauuaguaacuguu

SEQ ID NO: 3265758 - RNA, 11 nt, Vaccinia virus
cgauagaaaaa

SEQ ID NO: 3265759 - RNA, 16 nt, Vaccinia virus
cuaauuguuuaaauaa

SEQ ID NO: 3265760 - RNA, 14 nt, Vaccinia virus
auauaauaacaaga

SEQ ID NO: 3265761 - RNA, 19 nt, Vaccinia virus
cgccuuuauuuccacauua

SEQ ID NO: 3265762 - RNA, 18 nt, Vaccinia virus
accacuuauuacuccauc

SEQ ID NO: 3265763 - RNA, 16 nt, Vaccinia virus
cuacaauauauucuca

SEQ ID NO: 3265764 - RNA, 21 nt, Vaccinia virus
uaaauuauaaaaaaagcaaug

SEQ ID NO: 3265765 - RNA, 15 nt, Vaccinia virus
uguaguuauugaacu

SEQ ID NO: 3265766 - RNA, 18 nt, Vaccinia virus
aauagcuuuacuucuaua

SEQ ID NO: 3265767 - RNA, 17 nt, Vaccinia virus
ucacaugucuaaacuuc

SEQ ID NO: 3265768 - RNA, 23 nt, Vaccinia virus
acuaugcgucgaaguaaaaauug

SEQ ID NO: 3265769 - RNA, 14 nt, Vaccinia virus
auaaacaauauuaa

SEQ ID NO: 3265770 - RNA, 19 nt, Vaccinia virus
uucagcgguaaagauaucu

SEQ ID NO: 3265771 - RNA, 17 nt, Vaccinia virus
guacauuauuacauaga

SEQ ID NO: 3265772 - RNA, 22 nt, Vaccinia virus
auauggaaaaguucaacaugau

SEQ ID NO: 3265773 - RNA, 14 nt, Vaccinia virus
auugguauaaaugu

SEQ ID NO: 3265774 - RNA, 20 nt, Vaccinia virus
uauucauuaggauuaucaaa

SEQ ID NO: 3265775 - RNA, 22 nt, Vaccinia virus
uauucaaugauccauuaucaua

SEQ ID NO: 3265776 - RNA, 15 nt, Vaccinia virus
aaacuuuuuagaaau

SEQ ID NO: 3265777 - RNA, 17 nt, Vaccinia virus
aaaguauucuuauguau

SEQ ID NO: 3265778 - RNA, 23 nt, Vaccinia virus
uuaaaugaauccaucuuauccuu

SEQ ID NO: 3265779 - RNA, 17 nt, Vaccinia virus
acauaucuaaaugaaua

SEQ ID NO: 3265780 - RNA, 18 nt, Vaccinia virus
gaacuaauccacauauga

SEQ ID NO: 3265781 - RNA, 20 nt, Vaccinia virus
auaucaaacaauccaaaaaa

SEQ ID NO: 3265782 - RNA, 13 nt, Vaccinia virus
uagacauuuacca

SEQ ID NO: 3265783 - RNA, 22 nt, Vaccinia virus
aaacuucaaucuguuaagauua

SEQ ID NO: 3265784 - RNA, 17 nt, Vaccinia virus
gaugcauauauuucauu

SEQ ID NO: 3265785 - RNA, 14 nt, Vaccinia virus
gaccaguauugaug

SEQ ID NO: 3265786 - RNA, 12 nt, Vaccinia virus
uuuccuagauac

SEQ ID NO: 3265787 - RNA, 19 nt, Vaccinia virus
cauaacgaaaauaucacag

SEQ ID NO: 3265788 - RNA, 20 nt, Vaccinia virus
uuuugguggagguguaacug

SEQ ID NO: 3265789 - RNA, 12 nt, Vaccinia virus
ucugaauuauuu

SEQ ID NO: 3265790 - RNA, 17 nt, Vaccinia virus
uuacgcaaaacauuaua

SEQ ID NO: 3265791 - RNA, 18 nt, Vaccinia virus
guauaauauuuaaacaau

SEQ ID NO: 3265792 - RNA, 19 nt, Vaccinia virus
uauugguuacccuugucau

SEQ ID NO: 3265793 - RNA, 20 nt, Vaccinia virus
gagacgguagaauaagugua

SEQ ID NO: 3265794 - RNA, 22 nt, Vaccinia virus
aaagauucuauaauaaugaaug

SEQ ID NO: 3265795 - RNA, 21 nt, Vaccinia virus
ggggaaaaauuauaauguuuc

SEQ ID NO: 3265796 - RNA, 17 nt, Vaccinia virus
uuauaaaggagacuugu

SEQ ID NO: 3265797 - RNA, 21 nt, Vaccinia virus
acgauaaugugguuacucuuc

SEQ ID NO: 3265798 - RNA, 13 nt, Vaccinia virus
aaguugaucucaa

SEQ ID NO: 3265799 - RNA, 16 nt, Vaccinia virus
uaaagcaaaaugguug

SEQ ID NO: 3265800 - RNA, 24 nt, Vaccinia virus
aauaaauguuuugauuucaauuua

SEQ ID NO: 3265801 - RNA, 18 nt, Vaccinia virus
auacuuugucggauuauc

SEQ ID NO: 3265802 - RNA, 16 nt, Vaccinia virus
ucauuguaaauuuaua

SEQ ID NO: 3265803 - RNA, 16 nt, Vaccinia virus
gauuauuuacuauaau

SEQ ID NO: 3265804 - RNA, 22 nt, Vaccinia virus
ugaaccguauuacucuacagua

SEQ ID NO: 3265805 - RNA, 13 nt, Vaccinia virus
aaagcaaaauggu

SEQ ID NO: 3265806 - RNA, 19 nt, Vaccinia virus
aguuacauacaaacugaaa

SEQ ID NO: 3265807 - RNA, 18 nt, Vaccinia virus
ugaaacaggacauuauca

SEQ ID NO: 3265808 - RNA, 15 nt, Vaccinia virus
aguaauuuuuuauca

SEQ ID NO: 3265809 - RNA, 22 nt, Vaccinia virus
aaauguuugaucaauaacaaug

SEQ ID NO: 3265810 - RNA, 19 nt, Vaccinia virus
agucucgcguucaagauua

SEQ ID NO: 3265811 - RNA, 21 nt, Vaccinia virus
aacuuuuguuuuguuucugau

SEQ ID NO: 3265812 - RNA, 21 nt, Vaccinia virus
cauaguguuuuauauuccaaa

SEQ ID NO: 3265813 - RNA, 17 nt, Vaccinia virus
gucaauuuuaaaugaug

SEQ ID NO: 3265814 - RNA, 18 nt, Vaccinia virus
gcauauaacaacaaauaa

SEQ ID NO: 3265815 - RNA, 17 nt, Vaccinia virus
uucgcuaaaaaauuagu

SEQ ID NO: 3265816 - RNA, 13 nt, Vaccinia virus
gaacuaccaauau

SEQ ID NO: 3265817 - RNA, 14 nt, Vaccinia virus
uaugauauauacac

SEQ ID NO: 3265818 - RNA, 19 nt, Vaccinia virus
acaauuauuauauaauucu

SEQ ID NO: 3265819 - RNA, 13 nt, Vaccinia virus
ucgcagaugauga

SEQ ID NO: 3265820 - RNA, 17 nt, Vaccinia virus
aauguguauaaaauaua

SEQ ID NO: 3265821 - RNA, 23 nt, Vaccinia virus
acaauggucgauuauagaaaugc

SEQ ID NO: 3265822 - RNA, 18 nt, Vaccinia virus
uagauauuaguaaauuaa

SEQ ID NO: 3265823 - RNA, 14 nt, Vaccinia virus
uaugaaugaugaua

SEQ ID NO: 3265824 - RNA, 22 nt, Vaccinia virus
ugguuccacaauucauuuccau

SEQ ID NO: 3265825 - RNA, 21 nt, Vaccinia virus
cugauaagauaucuucucaaa

SEQ ID NO: 3265826 - RNA, 13 nt, Vaccinia virus
aacuuaacagcuc

SEQ ID NO: 3265827 - RNA, 13 nt, Vaccinia virus
caauguccaaauc

SEQ ID NO: 3265828 - RNA, 14 nt, Vaccinia virus
ggaucauccuuuaa

SEQ ID NO: 3265829 - RNA, 15 nt, Vaccinia virus
ucauucguaaaucuu

SEQ ID NO: 3265830 - RNA, 14 nt, Vaccinia virus
auuuauuugaugaa

SEQ ID NO: 3265831 - RNA, 16 nt, Vaccinia virus
uagugaugaauaucug

SEQ ID NO: 3265832 - RNA, 14 nt, Vaccinia virus
uccaauuacaaaaa

SEQ ID NO: 3265833 - RNA, 22 nt, Vaccinia virus
gcgguuaaaauaguuuauaaca

SEQ ID NO: 3265834 - RNA, 18 nt, Vaccinia virus
aaagggauauauauugua

SEQ ID NO: 3265835 - RNA, 16 nt, Vaccinia virus
aucgcauagaaauaca

SEQ ID NO: 3265836 - RNA, 14 nt, Vaccinia virus
aggagaacaaagaa

SEQ ID NO: 3265837 - RNA, 16 nt, Vaccinia virus
auuaaaucauugacug

SEQ ID NO: 3265838 - RNA, 15 nt, Vaccinia virus
aacuaugucaguagu

SEQ ID NO: 3265839 - RNA, 15 nt, Vaccinia virus
uaauaauaauucauc

SEQ ID NO: 3265840 - RNA, 17 nt, Vaccinia virus
gcccucaauuucccaaa

SEQ ID NO: 3265841 - RNA, 17 nt, Vaccinia virus
uuaaaaaaaaauacuuu

SEQ ID NO: 3265842 - RNA, 14 nt, Vaccinia virus
acaucguuuaauaa

SEQ ID NO: 3265843 - RNA, 19 nt, Vaccinia virus
aauacugcaauaauuuuca

SEQ ID NO: 3265844 - RNA, 22 nt, Vaccinia virus
aucagaccguacauacauagac

SEQ ID NO: 3265845 - RNA, 16 nt, Vaccinia virus
aucugaaacauacgau

SEQ ID NO: 3265846 - RNA, 16 nt, Vaccinia virus
gaugaugucauucaca

SEQ ID NO: 3265847 - RNA, 16 nt, Vaccinia virus
uuaacagauucacaaa

SEQ ID NO: 3265848 - RNA, 16 nt, Vaccinia virus
auaguaucuauauacg

SEQ ID NO: 3265849 - RNA, 13 nt, Vaccinia virus
uucgaagauauca

SEQ ID NO: 3265850 - RNA, 23 nt, Vaccinia virus
aacacacacugagaaacagcaua

SEQ ID NO: 3265851 - RNA, 20 nt, Vaccinia virus
cauuccaagucacugugugu

SEQ ID NO: 3265852 - RNA, 16 nt, Vaccinia virus
aauagguuguaauauc

SEQ ID NO: 3265853 - RNA, 23 nt, Vaccinia virus
gucgcuucgcgaauuuagaaaau

SEQ ID NO: 3265854 - RNA, 21 nt, Vaccinia virus
caaacccuugaucuccucuau

SEQ ID NO: 3265855 - RNA, 20 nt, Vaccinia virus
uaaucguaagcgcuauacaa

SEQ ID NO: 3265856 - RNA, 14 nt, Vaccinia virus
cauaaguauauaau

SEQ ID NO: 3265857 - RNA, 22 nt, Vaccinia virus
uccauuauauauuccuugaaua

SEQ ID NO: 3265858 - RNA, 16 nt, Vaccinia virus
uagucauaauaucuuu

SEQ ID NO: 3265859 - RNA, 16 nt, Vaccinia virus
aucuauauauguauuu

SEQ ID NO: 3265860 - RNA, 18 nt, Vaccinia virus
cuuaauauugccauaauu

SEQ ID NO: 3265861 - RNA, 15 nt, Vaccinia virus
uauaauucuuuggua

SEQ ID NO: 3265862 - RNA, 16 nt, Vaccinia virus
cagaauucuaaaugau

SEQ ID NO: 3265863 - RNA, 14 nt, Vaccinia virus
auucuuuuuaagau

SEQ ID NO: 3265864 - RNA, 23 nt, Vaccinia virus
uaguauucaagucaaagaaauac

SEQ ID NO: 3265865 - RNA, 18 nt, Vaccinia virus
aucuauugacuauaacuc

SEQ ID NO: 3265866 - RNA, 14 nt, Vaccinia virus
auguuauccaacau

SEQ ID NO: 3265867 - RNA, 16 nt, Vaccinia virus
acggaaaaaugcaugu

SEQ ID NO: 3265868 - RNA, 16 nt, Vaccinia virus
uuccacauuaauacag

SEQ ID NO: 3265869 - RNA, 24 nt, Vaccinia virus
uguaacgcgucuguuuuauacauu

SEQ ID NO: 3265870 - RNA, 14 nt, Vaccinia virus
aaacucuuuucaaa

SEQ ID NO: 3265871 - RNA, 16 nt, Vaccinia virus
augaauuaauuaaugu

SEQ ID NO: 3265872 - RNA, 16 nt, Vaccinia virus
cauagucuucaauaau

SEQ ID NO: 3265873 - RNA, 13 nt, Vaccinia virus
ucauaaagaacag

SEQ ID NO: 3265874 - RNA, 21 nt, Vaccinia virus
aucuauuuuauucaagagaau

SEQ ID NO: 3265875 - RNA, 20 nt, Vaccinia virus
uaaacaaucugucgaaaaag

SEQ ID NO: 3265876 - RNA, 23 nt, Vaccinia virus
caaauuuuacuacauaguuaucu

SEQ ID NO: 3265877 - RNA, 14 nt, Vaccinia virus
uucccauaaguuug

SEQ ID NO: 3265878 - RNA, 13 nt, Vaccinia virus
auucguaguuuuu

SEQ ID NO: 3265879 - RNA, 20 nt, Vaccinia virus
uaguuguucagcuguagaac

SEQ ID NO: 3265880 - RNA, 11 nt, Vaccinia virus
aucaaacauua

SEQ ID NO: 3265881 - RNA, 19 nt, Vaccinia virus
uucacucguuucauaaaga

SEQ ID NO: 3265882 - RNA, 18 nt, Vaccinia virus
guccuaaucucuuaacaa

SEQ ID NO: 3265883 - RNA, 17 nt, Vaccinia virus
aguccuaaauuuucuaa

SEQ ID NO: 3265884 - RNA, 22 nt, Vaccinia virus
aaauaaaauauaaaauauugga

SEQ ID NO: 3265885 - RNA, 15 nt, Vaccinia virus
auauaugauauacca

SEQ ID NO: 3265886 - RNA, 20 nt, Vaccinia virus
aauuagucuauuauccaaga

SEQ ID NO: 3265887 - RNA, 19 nt, Vaccinia virus
ucuauaauaucuuauucug

SEQ ID NO: 3265888 - RNA, 17 nt, Vaccinia virus
auaugcuaguuaauagu

SEQ ID NO: 3265889 - RNA, 17 nt, Vaccinia virus
cucaucguauauuuuga

SEQ ID NO: 3265890 - RNA, 17 nt, Vaccinia virus
augauuuuacugcaaua

SEQ ID NO: 3265891 - RNA, 21 nt, Vaccinia virus
augaugauacucucaaccauu

SEQ ID NO: 3265892 - RNA, 18 nt, Vaccinia virus
acauaggauuaaaaauaa

SEQ ID NO: 3265893 - RNA, 18 nt, Vaccinia virus
aucgugguuaacaauaug

SEQ ID NO: 3265894 - RNA, 18 nt, Vaccinia virus
auuccauuaucugaaaug

SEQ ID NO: 3265895 - RNA, 17 nt, Vaccinia virus
ggauuucucauagaccu

SEQ ID NO: 3265896 - RNA, 16 nt, Vaccinia virus
ucuuuuucccagcauu

SEQ ID NO: 3265897 - RNA, 16 nt, Vaccinia virus
uacuauauguauucuu

SEQ ID NO: 3265898 - RNA, 20 nt, Vaccinia virus
uaauagcuccauaaacugau

SEQ ID NO: 3265899 - RNA, 23 nt, Vaccinia virus
gagcuaauuuuuguaaauaacua

SEQ ID NO: 3265900 - RNA, 14 nt, Vaccinia virus
gugcauaucuuuuu

SEQ ID NO: 3265901 - RNA, 18 nt, Vaccinia virus
gcaucgcuucguuuacau

SEQ ID NO: 3265902 - RNA, 21 nt, Vaccinia virus
aauccaucuguauuaaagaua

SEQ ID NO: 3265903 - RNA, 21 nt, Vaccinia virus
gaagauuauuauggaaaucaa

SEQ ID NO: 3265904 - RNA, 13 nt, Vaccinia virus
gauauuacuuaua

SEQ ID NO: 3265905 - RNA, 22 nt, Vaccinia virus
auuaacgauaucuugcaaaaua

SEQ ID NO: 3265906 - RNA, 20 nt, Vaccinia virus
augcaaacuaucuaaaugua

SEQ ID NO: 3265907 - RNA, 15 nt, Vaccinia virus
ccuccuacagauuuu

SEQ ID NO: 3265908 - RNA, 17 nt, Vaccinia virus
uacguuuacacaauugu

SEQ ID NO: 3265909 - RNA, 21 nt, Vaccinia virus
uaggaaauugguuuaugaugu

SEQ ID NO: 3265910 - RNA, 18 nt, Vaccinia virus
aacagacgacaacaugua

SEQ ID NO: 3265911 - RNA, 14 nt, Vaccinia virus
cagacaaugcuuua

SEQ ID NO: 3265912 - RNA, 14 nt, Vaccinia virus
cacggaagaacuac

SEQ ID NO: 3265913 - RNA, 18 nt, Vaccinia virus
ucucccauaaucuuggua

SEQ ID NO: 3265914 - RNA, 15 nt, Vaccinia virus
agacguauaagucua

SEQ ID NO: 3265915 - RNA, 15 nt, Vaccinia virus
cgucagcugcucuag

SEQ ID NO: 3265916 - RNA, 21 nt, Vaccinia virus
uuacuggugcuccuguagcau

SEQ ID NO: 3265917 - RNA, 22 nt, Vaccinia virus
aaaaauacaugggaaaugauau

SEQ ID NO: 3265918 - RNA, 14 nt, Vaccinia virus
cuucuacauuuuca

SEQ ID NO: 3265919 - RNA, 18 nt, Vaccinia virus
auuauucuacuaucaaag

SEQ ID NO: 3265920 - RNA, 17 nt, Vaccinia virus
aauauacgauuaguaau

SEQ ID NO: 3265921 - RNA, 14 nt, Vaccinia virus
cggaucuucuuaau

SEQ ID NO: 3265922 - RNA, 19 nt, Vaccinia virus
caaguaucuuguuccuaau

SEQ ID NO: 3265923 - RNA, 14 nt, Vaccinia virus
aauuauuucuaaua

SEQ ID NO: 3265924 - RNA, 17 nt, Vaccinia virus
uaaaacuuuauuaucca

SEQ ID NO: 3265925 - RNA, 19 nt, Vaccinia virus
aagucgaauauaaaugauu

SEQ ID NO: 3265926 - RNA, 19 nt, Vaccinia virus
auuaaucuaguagaaaaga

SEQ ID NO: 3265927 - RNA, 18 nt, Vaccinia virus
caagauucguagaagcau

SEQ ID NO: 3265928 - RNA, 19 nt, Vaccinia virus
aucuccacuuuugcuuuac

SEQ ID NO: 3265929 - RNA, 22 nt, Vaccinia virus
cuccagacuuuauaauuucauc

SEQ ID NO: 3265930 - RNA, 20 nt, Vaccinia virus
uauagaggaauaucaucaaa

SEQ ID NO: 3265931 - RNA, 17 nt, Vaccinia virus
aauaucuuuaauccaau

SEQ ID NO: 3265932 - RNA, 16 nt, Vaccinia virus
uagguauguccucugc

SEQ ID NO: 3265933 - RNA, 14 nt, Vaccinia virus
uuuaguguagauau

SEQ ID NO: 3265934 - RNA, 13 nt, Vaccinia virus
cuauacuauguua

SEQ ID NO: 3265935 - RNA, 18 nt, Vaccinia virus
cuagacuugauuauucua

SEQ ID NO: 3265936 - RNA, 17 nt, Vaccinia virus
auaacuaucagaguuac

SEQ ID NO: 3265937 - RNA, 16 nt, Vaccinia virus
auuggauggacacauu

SEQ ID NO: 3265938 - RNA, 20 nt, Vaccinia virus
acacacugagaaacagcaua

SEQ ID NO: 3265939 - RNA, 17 nt, Vaccinia virus
uuugagaauauauacag

SEQ ID NO: 3265940 - RNA, 17 nt, Vaccinia virus
gacuauaaaauauucua

SEQ ID NO: 3265941 - RNA, 24 nt, Vaccinia virus
aagaagauuaucaagauguguaug

SEQ ID NO: 3265942 - RNA, 21 nt, Vaccinia virus
caauaacuaauggcaaaugua

SEQ ID NO: 3265943 - RNA, 19 nt, Vaccinia virus
caaauucauuauuaaacag

SEQ ID NO: 3265944 - RNA, 18 nt, Vaccinia virus
gcaaaacuauuauuuuaa

SEQ ID NO: 3265945 - RNA, 23 nt, Vaccinia virus
agugaauugauugcuguuauuaa

SEQ ID NO: 3265946 - RNA, 16 nt, Vaccinia virus
uagcagcacaaaucaa

SEQ ID NO: 3265947 - RNA, 14 nt, Vaccinia virus
ucuucuauuucuaa

SEQ ID NO: 3265948 - RNA, 14 nt, Vaccinia virus
uuuggaucuaguau

SEQ ID NO: 3265949 - RNA, 18 nt, Vaccinia virus
uauucuauccaaggacaa

SEQ ID NO: 3265950 - RNA, 19 nt, Vaccinia virus
caauuuugauguauaacaa

SEQ ID NO: 3265951 - RNA, 19 nt, Vaccinia virus
uguaaaaaaauuauacugu

SEQ ID NO: 3265952 - RNA, 23 nt, Vaccinia virus
acggguuguauuguuauuuuaca

SEQ ID NO: 3265953 - RNA, 21 nt, Vaccinia virus
gaaacuuaaaauauaaugaua

SEQ ID NO: 3265954 - RNA, 17 nt, Vaccinia virus
ucgcauauaacaacaaa

SEQ ID NO: 3265955 - RNA, 16 nt, Vaccinia virus
cucccaccaaauuaau

SEQ ID NO: 3265956 - RNA, 17 nt, Vaccinia virus
uuagauacaauggauga

SEQ ID NO: 3265957 - RNA, 17 nt, Vaccinia virus
uugauacauacauuaau

SEQ ID NO: 3265958 - RNA, 15 nt, Vaccinia virus
aguguagauaugaua

SEQ ID NO: 3265959 - RNA, 18 nt, Vaccinia virus
gauccugcauagaaauau

SEQ ID NO: 3265960 - RNA, 24 nt, Vaccinia virus
caacaugauuauucuacuaucaaa

SEQ ID NO: 3265961 - RNA, 15 nt, Vaccinia virus
uaccgauuuaucauc

SEQ ID NO: 3265962 - RNA, 13 nt, Vaccinia virus
guaauauucuagu

SEQ ID NO: 3265963 - RNA, 23 nt, Vaccinia virus
ugaacgcugcccaccucauacau

SEQ ID NO: 3265964 - RNA, 20 nt, Vaccinia virus
caucugggaauaaaauacua

SEQ ID NO: 3265965 - RNA, 16 nt, Vaccinia virus
acuagacuauuaauaa

SEQ ID NO: 3265966 - RNA, 22 nt, Vaccinia virus
agccauguugauaaacuacuua

SEQ ID NO: 3265967 - RNA, 13 nt, Vaccinia virus
cuuuacuuuucua

SEQ ID NO: 3265968 - RNA, 14 nt, Vaccinia virus
cagaagauaaugaa

SEQ ID NO: 3265969 - RNA, 14 nt, Vaccinia virus
gaaauccuauuuua

SEQ ID NO: 3265970 - RNA, 15 nt, Vaccinia virus
gaaauauauacuuca

SEQ ID NO: 3265971 - RNA, 23 nt, Vaccinia virus
gaugucaucuucgucuauuucua

SEQ ID NO: 3265972 - RNA, 21 nt, Vaccinia virus
cuguagauaaacuaggauuua

SEQ ID NO: 3265973 - RNA, 21 nt, Vaccinia virus
ucacuguuguacauacaggua

SEQ ID NO: 3265974 - RNA, 19 nt, Vaccinia virus
aucgucuucacaaagaaug

SEQ ID NO: 3265975 - RNA, 19 nt, Vaccinia virus
uauagcuauucuucuuuaa

SEQ ID NO: 3265976 - RNA, 15 nt, Vaccinia virus
ucauaauuaauacaa

SEQ ID NO: 3265977 - RNA, 11 nt, Vaccinia virus
auauucuuucu

SEQ ID NO: 3265978 - RNA, 22 nt, Vaccinia virus
auacauuuugcauuagauuuac

SEQ ID NO: 3265979 - RNA, 19 nt, Vaccinia virus
ugguaaguucauuaucuga

SEQ ID NO: 3265980 - RNA, 20 nt, Vaccinia virus
auauauuccuugaauaaccu

SEQ ID NO: 3265981 - RNA, 23 nt, Vaccinia virus
uguacuucuuccaguucuggaua

SEQ ID NO: 3265982 - RNA, 16 nt, Vaccinia virus
aggcaguuaaggauaa

SEQ ID NO: 3265983 - RNA, 17 nt, Vaccinia virus
ugcuuccgaucccaaau

SEQ ID NO: 3265984 - RNA, 12 nt, Vaccinia virus
aucaaaaaauua

SEQ ID NO: 3265985 - RNA, 21 nt, Vaccinia virus
agaauuucuacauaauuauau

SEQ ID NO: 3265986 - RNA, 23 nt, Vaccinia virus
uccacucucgauaaaucuacuca

SEQ ID NO: 3265987 - RNA, 21 nt, Vaccinia virus
aauagaggagccauuaaaugu

SEQ ID NO: 3265988 - RNA, 16 nt, Vaccinia virus
uacuaaagucaucaau

SEQ ID NO: 3265989 - RNA, 21 nt, Vaccinia virus
uuaacaauauauuauuaguuu

SEQ ID NO: 3265990 - RNA, 15 nt, Vaccinia virus
acuaauacaucugaa

SEQ ID NO: 3265991 - RNA, 13 nt, Vaccinia virus
cagaugucauuau

SEQ ID NO: 3265992 - RNA, 15 nt, Vaccinia virus
aguagauuuaauagu

SEQ ID NO: 3265993 - RNA, 15 nt, Vaccinia virus
gacaaugaauugcau

SEQ ID NO: 3265994 - RNA, 23 nt, Vaccinia virus
aaacagauauaguuuuucuggaa

SEQ ID NO: 3265995 - RNA, 20 nt, Vaccinia virus
uacuaaggccacuacucaaa

SEQ ID NO: 3265996 - RNA, 19 nt, Vaccinia virus
cuauuuucgcuccaaaugu

SEQ ID NO: 3265997 - RNA, 22 nt, Vaccinia virus
acuuuuggaaucguucaaaacc

SEQ ID NO: 3265998 - RNA, 21 nt, Vaccinia virus
ggauucauccuuaaauguuuu

SEQ ID NO: 3265999 - RNA, 21 nt, Vaccinia virus
auuucauagacuuuaucuaga

SEQ ID NO: 3266000 - RNA, 21 nt, Vaccinia virus
uacuguauugauuacagugua

SEQ ID NO: 3266001 - RNA, 17 nt, Vaccinia virus
aauuaauaauauaaaau

SEQ ID NO: 3266002 - RNA, 17 nt, Vaccinia virus
aacaucaacacuuauau

SEQ ID NO: 3266003 - RNA, 15 nt, Vaccinia virus
acgauucaggaaucg

SEQ ID NO: 3266004 - RNA, 19 nt, Vaccinia virus
uaugccgugggaugauguc

SEQ ID NO: 3266005 - RNA, 21 nt, Vaccinia virus
gcuucuaucuuguuuagauuu

SEQ ID NO: 3266006 - RNA, 18 nt, Vaccinia virus
aacuuaaaagaauuacuu

SEQ ID NO: 3266007 - RNA, 21 nt, Vaccinia virus
cgaugacucuaccugaugaau

SEQ ID NO: 3266008 - RNA, 16 nt, Vaccinia virus
cuagaugaugauuuuc

SEQ ID NO: 3266009 - RNA, 12 nt, Vaccinia virus
cucacuucucuu

SEQ ID NO: 3266010 - RNA, 21 nt, Vaccinia virus
gcacguaucuaaaguauuucu

SEQ ID NO: 3266011 - RNA, 14 nt, Vaccinia virus
auaucauuaaugau

SEQ ID NO: 3266012 - RNA, 19 nt, Vaccinia virus
acaauuagacguaaguucu

SEQ ID NO: 3266013 - RNA, 17 nt, Vaccinia virus
uaauauccaaucuuauu

SEQ ID NO: 3266014 - RNA, 16 nt, Vaccinia virus
guucagaggaugaaau

SEQ ID NO: 3266015 - RNA, 17 nt, Vaccinia virus
uauaauagucaauagau

SEQ ID NO: 3266016 - RNA, 16 nt, Vaccinia virus
auauuauauaaacauu

SEQ ID NO: 3266017 - RNA, 23 nt, Vaccinia virus
ucaaaaagauuagacauaucaga

SEQ ID NO: 3266018 - RNA, 22 nt, Vaccinia virus
uguucuaucaacgauucuagaa

SEQ ID NO: 3266019 - RNA, 18 nt, Vaccinia virus
ucuauuaaaaauccaagu

SEQ ID NO: 3266020 - RNA, 15 nt, Vaccinia virus
uauccgcgacaaauu

SEQ ID NO: 3266021 - RNA, 18 nt, Vaccinia virus
aauagaucaacagaaaua

SEQ ID NO: 3266022 - RNA, 12 nt, Vaccinia virus
cauacuacuuau

SEQ ID NO: 3266023 - RNA, 18 nt, Vaccinia virus
augccauacucagaauua

SEQ ID NO: 3266024 - RNA, 15 nt, Vaccinia virus
agauuaaaugcaaua

SEQ ID NO: 3266025 - RNA, 20 nt, Vaccinia virus
acuaauucuuucucaucaac

SEQ ID NO: 3266026 - RNA, 17 nt, Vaccinia virus
ugaauuugauaagacuu

SEQ ID NO: 3266027 - RNA, 18 nt, Vaccinia virus
cuguauaucuauaauauu

SEQ ID NO: 3266028 - RNA, 21 nt, Vaccinia virus
uaagacacagaaauacuauau

SEQ ID NO: 3266029 - RNA, 17 nt, Vaccinia virus
acaauuauuauauaauu

SEQ ID NO: 3266030 - RNA, 17 nt, Vaccinia virus
augaccauuaaaauaaa

SEQ ID NO: 3266031 - RNA, 20 nt, Vaccinia virus
acauuaguagggauagaaug

SEQ ID NO: 3266032 - RNA, 12 nt, Vaccinia virus
aacuuacaaaau

SEQ ID NO: 3266033 - RNA, 12 nt, Vaccinia virus
uuauuacauucu

SEQ ID NO: 3266034 - RNA, 22 nt, Vaccinia virus
ucuuccuuaacuauauauuugu

SEQ ID NO: 3266035 - RNA, 14 nt, Vaccinia virus
ucagcgcauaauaa

SEQ ID NO: 3266036 - RNA, 18 nt, Vaccinia virus
uguugugcuguuguacau

SEQ ID NO: 3266037 - RNA, 22 nt, Vaccinia virus
uuauaucauccaauauuauuga

SEQ ID NO: 3266038 - RNA, 22 nt, Vaccinia virus
ucucacuaacuaauguuucuuu

SEQ ID NO: 3266039 - RNA, 22 nt, Vaccinia virus
aggaauaaaauaugaaauaagu

SEQ ID NO: 3266040 - RNA, 23 nt, Vaccinia virus
ugcauacaauacuagucuagaaa

SEQ ID NO: 3266041 - RNA, 20 nt, Vaccinia virus
uaacuuaaaagaauuacuua

SEQ ID NO: 3266042 - RNA, 18 nt, Vaccinia virus
guuagcuguuuucaucaa

SEQ ID NO: 3266043 - RNA, 23 nt, Vaccinia virus
ugugggaagcgauucaaaaggac

SEQ ID NO: 3266044 - RNA, 16 nt, Vaccinia virus
caaugauagacuagaa

SEQ ID NO: 3266045 - RNA, 16 nt, Vaccinia virus
aaaauuaguagaauca

SEQ ID NO: 3266046 - RNA, 22 nt, Vaccinia virus
agaaaauaauccugaauauauu

SEQ ID NO: 3266047 - RNA, 21 nt, Vaccinia virus
agacauaucgguaaaaugcau

SEQ ID NO: 3266048 - RNA, 21 nt, Vaccinia virus
cucugaauauagaacaucauu

SEQ ID NO: 3266049 - RNA, 20 nt, Vaccinia virus
ucugauaauccagucuuuaa

SEQ ID NO: 3266050 - RNA, 21 nt, Vaccinia virus
uaguaaacuugacuaaaucuu

SEQ ID NO: 3266051 - RNA, 15 nt, Vaccinia virus
uauucacuuaacagu

SEQ ID NO: 3266052 - RNA, 20 nt, Vaccinia virus
auuauaugguagauuguuaa

SEQ ID NO: 3266053 - RNA, 17 nt, Vaccinia virus
ggacacgauauagagag

SEQ ID NO: 3266054 - RNA, 19 nt, Vaccinia virus
uauguuuuuacagagacuu

SEQ ID NO: 3266055 - RNA, 15 nt, Vaccinia virus
agacauaagaaauuu

SEQ ID NO: 3266056 - RNA, 19 nt, Vaccinia virus
uauacgaaauaaauauuca

SEQ ID NO: 3266057 - RNA, 19 nt, Vaccinia virus
aacccuuacaacuacagua

SEQ ID NO: 3266058 - RNA, 11 nt, Vaccinia virus
auuaauuauug

SEQ ID NO: 3266059 - RNA, 16 nt, Vaccinia virus
caaagucaucaaucau

SEQ ID NO: 3266060 - RNA, 15 nt, Vaccinia virus
auguuuaaugauacg

SEQ ID NO: 3266061 - RNA, 20 nt, Vaccinia virus
ccgaucaaagaauuaaugau

SEQ ID NO: 3266062 - RNA, 15 nt, Vaccinia virus
uuuauacuucuaaug

SEQ ID NO: 3266063 - RNA, 14 nt, Vaccinia virus
aguuucuguaauga

SEQ ID NO: 3266064 - RNA, 16 nt, Vaccinia virus
ugauuguacacuucua

SEQ ID NO: 3266065 - RNA, 16 nt, Vaccinia virus
gaccuauuaauaauua

SEQ ID NO: 3266066 - RNA, 14 nt, Vaccinia virus
ccaaauuaaugaau

SEQ ID NO: 3266067 - RNA, 24 nt, Vaccinia virus
aucuuuguuggaucagucucuaag

SEQ ID NO: 3266068 - RNA, 21 nt, Vaccinia virus
uaauguauucucuuacaaaua

SEQ ID NO: 3266069 - RNA, 16 nt, Vaccinia virus
ggcaauuguagauaua

SEQ ID NO: 3266070 - RNA, 14 nt, Vaccinia virus
cuuguguuuggaag

SEQ ID NO: 3266071 - RNA, 19 nt, Vaccinia virus
uauaaaacgauuaaacaau

SEQ ID NO: 3266072 - RNA, 17 nt, Vaccinia virus
cuauauucuugauguag

SEQ ID NO: 3266073 - RNA, 16 nt, Vaccinia virus
uuaacuuuucauuaau

SEQ ID NO: 3266074 - RNA, 18 nt, Vaccinia virus
ucuucuuugauuaaugau

SEQ ID NO: 3266075 - RNA, 20 nt, Vaccinia virus
uuaccaucaaaagcauuaau

SEQ ID NO: 3266076 - RNA, 15 nt, Vaccinia virus
ugauacguauauaca

SEQ ID NO: 3266077 - RNA, 22 nt, Vaccinia virus
uucuagaauuagaauuacaaaa

SEQ ID NO: 3266078 - RNA, 21 nt, Vaccinia virus
auagaauucucuucauaucau

SEQ ID NO: 3266079 - RNA, 19 nt, Vaccinia virus
cguuaacgauaguaucaau

SEQ ID NO: 3266080 - RNA, 14 nt, Vaccinia virus
acauauuacaaaau

SEQ ID NO: 3266081 - RNA, 18 nt, Vaccinia virus
uucgcaaacuauucuaau

SEQ ID NO: 3266082 - RNA, 14 nt, Vaccinia virus
auguuaaaaaugac

SEQ ID NO: 3266083 - RNA, 19 nt, Vaccinia virus
uggauauguggaaaaguau

SEQ ID NO: 3266084 - RNA, 20 nt, Vaccinia virus
aacaaucguuaauaaaucug

SEQ ID NO: 3266085 - RNA, 14 nt, Vaccinia virus
aauguaauucuaaa

SEQ ID NO: 3266086 - RNA, 20 nt, Vaccinia virus
ggaaguagaaucauaaagaa

SEQ ID NO: 3266087 - RNA, 18 nt, Vaccinia virus
auguugaacauaaaacua

SEQ ID NO: 3266088 - RNA, 15 nt, Vaccinia virus
auuacguuucauuuu

SEQ ID NO: 3266089 - RNA, 17 nt, Vaccinia virus
aaugcuagaauuagaaa

SEQ ID NO: 3266090 - RNA, 17 nt, Vaccinia virus
gcuauaacuugcuucaa

SEQ ID NO: 3266091 - RNA, 20 nt, Vaccinia virus
guugcgcagagugaauaauu

SEQ ID NO: 3266092 - RNA, 19 nt, Vaccinia virus
uaauauuuugcaucauuca

SEQ ID NO: 3266093 - RNA, 14 nt, Vaccinia virus
uacuuguacacaua

SEQ ID NO: 3266094 - RNA, 20 nt, Vaccinia virus
uguucacauccaccaaugau

SEQ ID NO: 3266095 - RNA, 13 nt, Vaccinia virus
uugauuuuggaua

SEQ ID NO: 3266096 - RNA, 20 nt, Vaccinia virus
auggauaauauuuguaaugg

SEQ ID NO: 3266097 - RNA, 20 nt, Vaccinia virus
auguccggaaugaagagaag

SEQ ID NO: 3266098 - RNA, 15 nt, Vaccinia virus
gaucuaaaaaaaacu

SEQ ID NO: 3266099 - RNA, 23 nt, Vaccinia virus
aucugauaacuuuaaacauggau

SEQ ID NO: 3266100 - RNA, 15 nt, Vaccinia virus
aauaucuguuccuca

SEQ ID NO: 3266101 - RNA, 22 nt, Vaccinia virus
gcuaaagcuaucuauacuauca

SEQ ID NO: 3266102 - RNA, 13 nt, Vaccinia virus
uaaaagacuuauu

SEQ ID NO: 3266103 - RNA, 22 nt, Vaccinia virus
uuuuucauccuugcuaucaaag

SEQ ID NO: 3266104 - RNA, 14 nt, Vaccinia virus
ucauaauugcuauu

SEQ ID NO: 3266105 - RNA, 21 nt, Vaccinia virus
aguuauauuuucgucuaucca

SEQ ID NO: 3266106 - RNA, 13 nt, Vaccinia virus
gguacuauuucua

SEQ ID NO: 3266107 - RNA, 17 nt, Vaccinia virus
auauuuguauagauaau

SEQ ID NO: 3266108 - RNA, 18 nt, Vaccinia virus
aauauaaugauauacaau

SEQ ID NO: 3266109 - RNA, 16 nt, Vaccinia virus
uucuggacauagcuuu

SEQ ID NO: 3266110 - RNA, 15 nt, Vaccinia virus
aucugaugagaucaa

SEQ ID NO: 3266111 - RNA, 18 nt, Vaccinia virus
ugauauguauauuauuca

SEQ ID NO: 3266112 - RNA, 20 nt, Vaccinia virus
gaauauacaaaguuaguaca

SEQ ID NO: 3266113 - RNA, 14 nt, Vaccinia virus
auauaguaaugaag

SEQ ID NO: 3266114 - RNA, 13 nt, Vaccinia virus
auuaucaaaucuu

SEQ ID NO: 3266115 - RNA, 16 nt, Vaccinia virus
auuguuuuuuauuuuc

SEQ ID NO: 3266116 - RNA, 16 nt, Vaccinia virus
uucacuaaauaguuuu

SEQ ID NO: 3266117 - RNA, 19 nt, Vaccinia virus
aacacuuuggauacaaaau

SEQ ID NO: 3266118 - RNA, 17 nt, Vaccinia virus
gaugugucuacauaaau

SEQ ID NO: 3266119 - RNA, 23 nt, Vaccinia virus
auuucuuuucccucguucaucua

SEQ ID NO: 3266120 - RNA, 14 nt, Vaccinia virus
acgaaagcaaagaa

SEQ ID NO: 3266121 - RNA, 16 nt, Vaccinia virus
acacaaccagcaauaa

SEQ ID NO: 3266122 - RNA, 20 nt, Vaccinia virus
ugauaucgcauagaaauaca

SEQ ID NO: 3266123 - RNA, 16 nt, Vaccinia virus
aauggugguaaaacua

SEQ ID NO: 3266124 - RNA, 13 nt, Vaccinia virus
uuaauuuguacau

SEQ ID NO: 3266125 - RNA, 16 nt, Vaccinia virus
agcaaaauuauuaauu

SEQ ID NO: 3266126 - RNA, 14 nt, Vaccinia virus
aauuaaaaaagaua

SEQ ID NO: 3266127 - RNA, 23 nt, Vaccinia virus
aacagugagaggaucgacuccau

SEQ ID NO: 3266128 - RNA, 14 nt, Vaccinia virus
auuuagaaaugaag

SEQ ID NO: 3266129 - RNA, 23 nt, Vaccinia virus
guuaagaaucgcgauucuaaaac

SEQ ID NO: 3266130 - RNA, 14 nt, Vaccinia virus
aaugucaugauaca

SEQ ID NO: 3266131 - RNA, 22 nt, Vaccinia virus
aucuaaacauaagacuuauucu

SEQ ID NO: 3266132 - RNA, 17 nt, Vaccinia virus
aacuccggccauuugua

SEQ ID NO: 3266133 - RNA, 20 nt, Vaccinia virus
augacguaaccaagaaguuu

SEQ ID NO: 3266134 - RNA, 19 nt, Vaccinia virus
guucuucgcagaugaugau

SEQ ID NO: 3266135 - RNA, 15 nt, Vaccinia virus
gagaaauaauaagaa

SEQ ID NO: 3266136 - RNA, 22 nt, Vaccinia virus
uguuuugaggcagcaaauacug

SEQ ID NO: 3266137 - RNA, 13 nt, Vaccinia virus
auaagauaucuuc

SEQ ID NO: 3266138 - RNA, 22 nt, Vaccinia virus
auacgauaguuuguuucuggaa

SEQ ID NO: 3266139 - RNA, 13 nt, Vaccinia virus
caacuuauccauu

SEQ ID NO: 3266140 - RNA, 18 nt, Vaccinia virus
auauagccacaauuauug

SEQ ID NO: 3266141 - RNA, 13 nt, Vaccinia virus
agaaauauauauu

SEQ ID NO: 3266142 - RNA, 18 nt, Vaccinia virus
cauuauucuauuucgaau

SEQ ID NO: 3266143 - RNA, 13 nt, Vaccinia virus
aucuagagauugu

SEQ ID NO: 3266144 - RNA, 13 nt, Vaccinia virus
uagauuuuggaua

SEQ ID NO: 3266145 - RNA, 16 nt, Vaccinia virus
gauaucuauacuuacu

SEQ ID NO: 3266146 - RNA, 13 nt, Vaccinia virus
auuacuaugaauc

SEQ ID NO: 3266147 - RNA, 19 nt, Vaccinia virus
augaacuagacgauaaugu

SEQ ID NO: 3266148 - RNA, 13 nt, Vaccinia virus
ccagauaauaaca

SEQ ID NO: 3266149 - RNA, 14 nt, Vaccinia virus
auauguaucauaau

SEQ ID NO: 3266150 - RNA, 23 nt, Vaccinia virus
uuuguacagaacguaguaguuua

SEQ ID NO: 3266151 - RNA, 15 nt, Vaccinia virus
augagaacauaguau

SEQ ID NO: 3266152 - RNA, 17 nt, Vaccinia virus
auuaguggaagaaagau

SEQ ID NO: 3266153 - RNA, 14 nt, Vaccinia virus
guuccaacaucaua

SEQ ID NO: 3266154 - RNA, 23 nt, Vaccinia virus
aauaguuuguacugcaaaaauaa

SEQ ID NO: 3266155 - RNA, 14 nt, Vaccinia virus
uacauaaaacauca

SEQ ID NO: 3266156 - RNA, 17 nt, Vaccinia virus
cuucuuuuuauauccaa

SEQ ID NO: 3266157 - RNA, 17 nt, Vaccinia virus
auucuuacaguacacag

SEQ ID NO: 3266158 - RNA, 15 nt, Vaccinia virus
uacgauuuucuucuu

SEQ ID NO: 3266159 - RNA, 18 nt, Vaccinia virus
auauauuucuuagcuaga

SEQ ID NO: 3266160 - RNA, 23 nt, Vaccinia virus
gcguguuuuaaauccuuaauaua

SEQ ID NO: 3266161 - RNA, 13 nt, Vaccinia virus
uacauguuuucau

SEQ ID NO: 3266162 - RNA, 22 nt, Vaccinia virus
acuuuuucuagaaaaaaaauug

SEQ ID NO: 3266163 - RNA, 17 nt, Vaccinia virus
aggccaaaacaaaauuu

SEQ ID NO: 3266164 - RNA, 16 nt, Vaccinia virus
aauagucaauagauua

SEQ ID NO: 3266165 - RNA, 14 nt, Vaccinia virus
auaaaaguaauaaa

SEQ ID NO: 3266166 - RNA, 15 nt, Vaccinia virus
aaucuguaucgaaug

SEQ ID NO: 3266167 - RNA, 12 nt, Vaccinia virus
aucucaaaauag

SEQ ID NO: 3266168 - RNA, 16 nt, Vaccinia virus
gaacaauaaacaaaau

SEQ ID NO: 3266169 - RNA, 16 nt, Vaccinia virus
guugacauguauauau

SEQ ID NO: 3266170 - RNA, 21 nt, Vaccinia virus
acagugauacccgcaauuauu

SEQ ID NO: 3266171 - RNA, 17 nt, Vaccinia virus
accgauaaacuacuacu

SEQ ID NO: 3266172 - RNA, 16 nt, Vaccinia virus
aguuauuggauuaaaa

SEQ ID NO: 3266173 - RNA, 21 nt, Vaccinia virus
gcuaccaucccacucuagaga

SEQ ID NO: 3266174 - RNA, 21 nt, Vaccinia virus
uagacauaucgguaaaaugca

SEQ ID NO: 3266175 - RNA, 18 nt, Vaccinia virus
ucacuaugaaacaaaugu

SEQ ID NO: 3266176 - RNA, 21 nt, Vaccinia virus
agagaauugcugcaauauauu

SEQ ID NO: 3266177 - RNA, 20 nt, Vaccinia virus
cauaaauucaaccaugaauu

SEQ ID NO: 3266178 - RNA, 17 nt, Vaccinia virus
auuggguccuauugcuu

SEQ ID NO: 3266179 - RNA, 15 nt, Vaccinia virus
auauaguaaugaaga

SEQ ID NO: 3266180 - RNA, 23 nt, Vaccinia virus
uauuugcgaggaugacucucaaa

SEQ ID NO: 3266181 - RNA, 16 nt, Vaccinia virus
uaauuuuagaagcuau

SEQ ID NO: 3266182 - RNA, 15 nt, Vaccinia virus
guauuugaacagagc

SEQ ID NO: 3266183 - RNA, 13 nt, Vaccinia virus
uagaauacuaaag

SEQ ID NO: 3266184 - RNA, 18 nt, Vaccinia virus
uaucaucgacacaaauga

SEQ ID NO: 3266185 - RNA, 22 nt, Vaccinia virus
aaaaagauuaccguaugauaug

SEQ ID NO: 3266186 - RNA, 14 nt, Vaccinia virus
aucauaaaaaugag

SEQ ID NO: 3266187 - RNA, 15 nt, Vaccinia virus
guaucauauauuaaa

SEQ ID NO: 3266188 - RNA, 14 nt, Vaccinia virus
caaguauacaauuu

SEQ ID NO: 3266189 - RNA, 18 nt, Vaccinia virus
ucuaucuuuguagaguau

SEQ ID NO: 3266190 - RNA, 16 nt, Vaccinia virus
ucacuaacaauaacua

SEQ ID NO: 3266191 - RNA, 16 nt, Vaccinia virus
auagacaauuauguaa

SEQ ID NO: 3266192 - RNA, 14 nt, Vaccinia virus
uaaaucacauaucu

SEQ ID NO: 3266193 - RNA, 18 nt, Vaccinia virus
ucauaaauuuuuauuucu

SEQ ID NO: 3266194 - RNA, 15 nt, Vaccinia virus
uacuagcucucaagu

SEQ ID NO: 3266195 - RNA, 13 nt, Vaccinia virus
auguauacaaaug

SEQ ID NO: 3266196 - RNA, 19 nt, Vaccinia virus
uauuauugauccaaucaaa

SEQ ID NO: 3266197 - RNA, 21 nt, Vaccinia virus
aauaaauuuagugagaauaau

SEQ ID NO: 3266198 - RNA, 17 nt, Vaccinia virus
uuacaagaauauaaaaa

SEQ ID NO: 3266199 - RNA, 18 nt, Vaccinia virus
ucugcuccuuuuucuauu

SEQ ID NO: 3266200 - RNA, 22 nt, Vaccinia virus
aaaaugacaucguugcccggau

SEQ ID NO: 3266201 - RNA, 15 nt, Vaccinia virus
uguccauauuuucca

SEQ ID NO: 3266202 - RNA, 19 nt, Vaccinia virus
aaagaugcuauguauauau

SEQ ID NO: 3266203 - RNA, 14 nt, Vaccinia virus
uagaaauacaaaag

SEQ ID NO: 3266204 - RNA, 15 nt, Vaccinia virus
gagguagcaaaaaga

SEQ ID NO: 3266205 - RNA, 21 nt, Vaccinia virus
augauacgauacuauauguau

SEQ ID NO: 3266206 - RNA, 23 nt, Vaccinia virus
ucuaaauguggcuacaaacuuuu

SEQ ID NO: 3266207 - RNA, 12 nt, Vaccinia virus
uaucuucucaaa

SEQ ID NO: 3266208 - RNA, 12 nt, Vaccinia virus
cucucauuuucu

SEQ ID NO: 3266209 - RNA, 17 nt, Vaccinia virus
aaucuuaauaucuucgu

SEQ ID NO: 3266210 - RNA, 16 nt, Vaccinia virus
aguauugaaacuauau

SEQ ID NO: 3266211 - RNA, 20 nt, Vaccinia virus
cuaugcaaagaauuuggaau

SEQ ID NO: 3266212 - RNA, 13 nt, Vaccinia virus
auuacaacauaau

SEQ ID NO: 3266213 - RNA, 12 nt, Vaccinia virus
uagaauuuccaa

SEQ ID NO: 3266214 - RNA, 14 nt, Vaccinia virus
caccucauacauau

SEQ ID NO: 3266215 - RNA, 22 nt, Vaccinia virus
aguuaucugguaaguucauuau

SEQ ID NO: 3266216 - RNA, 19 nt, Vaccinia virus
aucacguguuaaacaaugg

SEQ ID NO: 3266217 - RNA, 18 nt, Vaccinia virus
aaugagauguuaaaugaa

SEQ ID NO: 3266218 - RNA, 14 nt, Vaccinia virus
uuaaagaauguaua

SEQ ID NO: 3266219 - RNA, 14 nt, Vaccinia virus
guuugguaaucauu

SEQ ID NO: 3266220 - RNA, 14 nt, Vaccinia virus
uagaacucuuuuca

SEQ ID NO: 3266221 - RNA, 21 nt, Vaccinia virus
auuuaauuuuguaguuaauuu

SEQ ID NO: 3266222 - RNA, 13 nt, Vaccinia virus
gaaaaaugauuau

SEQ ID NO: 3266223 - RNA, 16 nt, Vaccinia virus
uccugcguuagauguu

SEQ ID NO: 3266224 - RNA, 15 nt, Vaccinia virus
aaacauuuugcagaa

SEQ ID NO: 3266225 - RNA, 15 nt, Vaccinia virus
augccuauaaaguaa

SEQ ID NO: 3266226 - RNA, 22 nt, Vaccinia virus
agauuaaagacuuauagcuaga

SEQ ID NO: 3266227 - RNA, 22 nt, Vaccinia virus
aggagaugauagucauuugacu

SEQ ID NO: 3266228 - RNA, 19 nt, Vaccinia virus
aguuucauaucguaacuga

SEQ ID NO: 3266229 - RNA, 18 nt, Vaccinia virus
uuuguaaagcuauguaaa

SEQ ID NO: 3266230 - RNA, 19 nt, Vaccinia virus
auagagaacauauaaaugu

SEQ ID NO: 3266231 - RNA, 19 nt, Vaccinia virus
aaucacagcaguaguuuaa

SEQ ID NO: 3266232 - RNA, 23 nt, Vaccinia virus
uaaauccucuauuuauugacauu

SEQ ID NO: 3266233 - RNA, 20 nt, Vaccinia virus
gauccugcauagaaauaucu

SEQ ID NO: 3266234 - RNA, 22 nt, Vaccinia virus
gagcaauucccaagauuucauc

SEQ ID NO: 3266235 - RNA, 20 nt, Vaccinia virus
cauguaacacucgacacaau

SEQ ID NO: 3266236 - RNA, 15 nt, Vaccinia virus
ugucuguauauguaa

SEQ ID NO: 3266237 - RNA, 21 nt, Vaccinia virus
guaacuggaucuuuauuuuuc

SEQ ID NO: 3266238 - RNA, 19 nt, Vaccinia virus
accaccuccuauaucaaug

SEQ ID NO: 3266239 - RNA, 13 nt, Vaccinia virus
agcugaaaugaga

SEQ ID NO: 3266240 - RNA, 17 nt, Vaccinia virus
cauaacuucguuguccu

SEQ ID NO: 3266241 - RNA, 23 nt, Vaccinia virus
uuaacaaauucugcaauaucuuc

SEQ ID NO: 3266242 - RNA, 14 nt, Vaccinia virus
acgcagauagcuau

SEQ ID NO: 3266243 - RNA, 21 nt, Vaccinia virus
uagcuauucguaacaaaacua

SEQ ID NO: 3266244 - RNA, 19 nt, Vaccinia virus
uauguaaaacauuugcauu

SEQ ID NO: 3266245 - RNA, 14 nt, Vaccinia virus
auaugcucuagaua

SEQ ID NO: 3266246 - RNA, 21 nt, Vaccinia virus
uagaaacgauaccaucuucug

SEQ ID NO: 3266247 - RNA, 22 nt, Vaccinia virus
cuugauaaccuuggcugucuca

SEQ ID NO: 3266248 - RNA, 21 nt, Vaccinia virus
aguaugacauuguaaaagaca

SEQ ID NO: 3266249 - RNA, 14 nt, Vaccinia virus
auuuauagaugaag

SEQ ID NO: 3266250 - RNA, 15 nt, Vaccinia virus
acacauuuucaaaua

SEQ ID NO: 3266251 - RNA, 16 nt, Vaccinia virus
caaucgaugugucaaa

SEQ ID NO: 3266252 - RNA, 19 nt, Vaccinia virus
aaaaucaggguuaucaaag

SEQ ID NO: 3266253 - RNA, 13 nt, Vaccinia virus
ucguuuacaaaau

SEQ ID NO: 3266254 - RNA, 19 nt, Vaccinia virus
acggugagaagacaauauu

SEQ ID NO: 3266255 - RNA, 18 nt, Vaccinia virus
aucuacucauagaaaggu

SEQ ID NO: 3266256 - RNA, 18 nt, Vaccinia virus
auggcaaauguauagaac

SEQ ID NO: 3266257 - RNA, 15 nt, Vaccinia virus
gaugauagagauauu

SEQ ID NO: 3266258 - RNA, 14 nt, Vaccinia virus
auaagaauaaagua

SEQ ID NO: 3266259 - RNA, 22 nt, Vaccinia virus
auuuuauauuuuguaauaagaa

SEQ ID NO: 3266260 - RNA, 23 nt, Vaccinia virus
uaaguagagauucggguacugua

SEQ ID NO: 3266261 - RNA, 14 nt, Vaccinia virus
uacucauuaucauu

SEQ ID NO: 3266262 - RNA, 17 nt, Vaccinia virus
caguaguauuggauggg

SEQ ID NO: 3266263 - RNA, 20 nt, Vaccinia virus
aaaacuauaugucuguagaa

SEQ ID NO: 3266264 - RNA, 22 nt, Vaccinia virus
gacaaaggguaauauuuugcau

SEQ ID NO: 3266265 - RNA, 15 nt, Vaccinia virus
acgugcaaggcauuu

SEQ ID NO: 3266266 - RNA, 22 nt, Vaccinia virus
uauuuuaacaaagcaucgauuu

SEQ ID NO: 3266267 - RNA, 15 nt, Vaccinia virus
ucccucguucaucua

SEQ ID NO: 3266268 - RNA, 22 nt, Vaccinia virus
uugauucaaucuaucuagcaau

SEQ ID NO: 3266269 - RNA, 16 nt, Vaccinia virus
auuuaauuuuagauaa

SEQ ID NO: 3266270 - RNA, 20 nt, Vaccinia virus
cuuguuuuugcuaauuauuu

SEQ ID NO: 3266271 - RNA, 12 nt, Vaccinia virus
aguccagaaaua

SEQ ID NO: 3266272 - RNA, 20 nt, Vaccinia virus
gaaguuuaauaauacaauau

SEQ ID NO: 3266273 - RNA, 15 nt, Vaccinia virus
aauuuguucaaaaua

SEQ ID NO: 3266274 - RNA, 17 nt, Vaccinia virus
cuaucguaucugucaau

SEQ ID NO: 3266275 - RNA, 19 nt, Vaccinia virus
auuuauagucgcgcuuuac

SEQ ID NO: 3266276 - RNA, 15 nt, Vaccinia virus
uugaaaacuauuucu

SEQ ID NO: 3266277 - RNA, 22 nt, Vaccinia virus
gauagcuuuaguuagauugcau

SEQ ID NO: 3266278 - RNA, 13 nt, Vaccinia virus
gaaaaauauauca

SEQ ID NO: 3266279 - RNA, 16 nt, Vaccinia virus
cuauaauaucuuugaa

SEQ ID NO: 3266280 - RNA, 20 nt, Vaccinia virus
auucuagucuuaaccaaaaa

SEQ ID NO: 3266281 - RNA, 19 nt, Vaccinia virus
uauggacgcagauagcuau

SEQ ID NO: 3266282 - RNA, 15 nt, Vaccinia virus
auaaaauuaauaaua

SEQ ID NO: 3266283 - RNA, 17 nt, Vaccinia virus
ucuagauccucucuuca

SEQ ID NO: 3266284 - RNA, 20 nt, Vaccinia virus
uuaacauuuuggcaaauuga

SEQ ID NO: 3266285 - RNA, 22 nt, Vaccinia virus
gacaagagacguaaauauucua

SEQ ID NO: 3266286 - RNA, 14 nt, Vaccinia virus
uuucauguucgaaa

SEQ ID NO: 3266287 - RNA, 15 nt, Vaccinia virus
ugcaaguuauucucg

SEQ ID NO: 3266288 - RNA, 15 nt, Vaccinia virus
agaaauucauauccu

SEQ ID NO: 3266289 - RNA, 20 nt, Vaccinia virus
ucuuuguccauuauuucuau

SEQ ID NO: 3266290 - RNA, 14 nt, Vaccinia virus
auaaugauagaaua

SEQ ID NO: 3266291 - RNA, 18 nt, Vaccinia virus
cacguuuugauaaaucua

SEQ ID NO: 3266292 - RNA, 20 nt, Vaccinia virus
uauuaaaucucgauaauauc

SEQ ID NO: 3266293 - RNA, 19 nt, Vaccinia virus
auuaaauauagguauauuu

SEQ ID NO: 3266294 - RNA, 18 nt, Vaccinia virus
cuaucauuaccucaugaa

SEQ ID NO: 3266295 - RNA, 14 nt, Vaccinia virus
ugacauauuacaaa

SEQ ID NO: 3266296 - RNA, 14 nt, Vaccinia virus
aaucauauaugaua

SEQ ID NO: 3266297 - RNA, 21 nt, Vaccinia virus
aaguuaucucuaacaaaacua

SEQ ID NO: 3266298 - RNA, 18 nt, Vaccinia virus
uacccaaucucucucaaa

SEQ ID NO: 3266299 - RNA, 14 nt, Vaccinia virus
auaaacuaacacaa

SEQ ID NO: 3266300 - RNA, 16 nt, Vaccinia virus
auuacacauaaacauc

SEQ ID NO: 3266301 - RNA, 15 nt, Vaccinia virus
gaaagcgagaaauaa

SEQ ID NO: 3266302 - RNA, 15 nt, Vaccinia virus
uaacguuaaacauua

SEQ ID NO: 3266303 - RNA, 22 nt, Vaccinia virus
aaacacuguuguuagagauuuu

SEQ ID NO: 3266304 - RNA, 22 nt, Vaccinia virus
uauuauugauacaauuauuaua

SEQ ID NO: 3266305 - RNA, 23 nt, Vaccinia virus
gcauccacucauauagaagaugc

SEQ ID NO: 3266306 - RNA, 18 nt, Vaccinia virus
aaguuaauucagauacua

SEQ ID NO: 3266307 - RNA, 19 nt, Vaccinia virus
auguauacauuuuccauuu

SEQ ID NO: 3266308 - RNA, 21 nt, Vaccinia virus
cagauaauaaccuccugaaaa

SEQ ID NO: 3266309 - RNA, 23 nt, Vaccinia virus
gcaaagaacagaauaaacaaaau

SEQ ID NO: 3266310 - RNA, 17 nt, Vaccinia virus
cuaauacaaaaucaucu

SEQ ID NO: 3266311 - RNA, 22 nt, Vaccinia virus
caugucuaauggcgaacauguu

SEQ ID NO: 3266312 - RNA, 18 nt, Vaccinia virus
auauucucuauuaaauac

SEQ ID NO: 3266313 - RNA, 13 nt, Vaccinia virus
uguauacuguaug

SEQ ID NO: 3266314 - RNA, 22 nt, Vaccinia virus
aaauuacuccagccguagaaua

SEQ ID NO: 3266315 - RNA, 20 nt, Vaccinia virus
aagauuguguuauauaacgg

SEQ ID NO: 3266316 - RNA, 18 nt, Vaccinia virus
aaguaguaauaaugauuc

SEQ ID NO: 3266317 - RNA, 14 nt, Vaccinia virus
uaauaaaggaugug

SEQ ID NO: 3266318 - RNA, 20 nt, Vaccinia virus
auaaugauacgauacuauau

SEQ ID NO: 3266319 - RNA, 16 nt, Vaccinia virus
acuagauuauacaaug

SEQ ID NO: 3266320 - RNA, 17 nt, Vaccinia virus
cucuaaggauccagaag

SEQ ID NO: 3266321 - RNA, 15 nt, Vaccinia virus
aaguuuaaaaaagac

SEQ ID NO: 3266322 - RNA, 21 nt, Vaccinia virus
augucucgcauaaacauuacu

SEQ ID NO: 3266323 - RNA, 16 nt, Vaccinia virus
uaacaucuuucaucau

SEQ ID NO: 3266324 - RNA, 18 nt, Vaccinia virus
cgaaaaauauaguuccau

SEQ ID NO: 3266325 - RNA, 19 nt, Vaccinia virus
auguauuuuuuaugauaua

SEQ ID NO: 3266326 - RNA, 15 nt, Vaccinia virus
auaaacaucaacauu

SEQ ID NO: 3266327 - RNA, 17 nt, Vaccinia virus
gauaccguuacauuuga

SEQ ID NO: 3266328 - RNA, 19 nt, Vaccinia virus
aucacucucauaauguaaa

SEQ ID NO: 3266329 - RNA, 12 nt, Vaccinia virus
auaaaauagaca

SEQ ID NO: 3266330 - RNA, 20 nt, Vaccinia virus
uuagaauauccagugcauuu

SEQ ID NO: 3266331 - RNA, 17 nt, Vaccinia virus
aauguaaucauauaaau

SEQ ID NO: 3266332 - RNA, 17 nt, Vaccinia virus
auauacguguacuguau

SEQ ID NO: 3266333 - RNA, 13 nt, Vaccinia virus
uagauaauucuaa

SEQ ID NO: 3266334 - RNA, 18 nt, Vaccinia virus
caugacaaaauuaaaaaa

SEQ ID NO: 3266335 - RNA, 23 nt, Vaccinia virus
ugauauugugaaugguaaagaau

SEQ ID NO: 3266336 - RNA, 20 nt, Vaccinia virus
agaacagaauaaacaaaaua

SEQ ID NO: 3266337 - RNA, 16 nt, Vaccinia virus
uauagauccuccagua

SEQ ID NO: 3266338 - RNA, 10 nt, Vaccinia virus
acaaugaacu

SEQ ID NO: 3266339 - RNA, 16 nt, Vaccinia virus
uugaaauuauauucuu

SEQ ID NO: 3266340 - RNA, 19 nt, Vaccinia virus
acgauaaaagaugcauaua

SEQ ID NO: 3266341 - RNA, 18 nt, Vaccinia virus
guagcauuuucuuaacaa

SEQ ID NO: 3266342 - RNA, 14 nt, Vaccinia virus
cgucucaaucuuua

SEQ ID NO: 3266343 - RNA, 21 nt, Vaccinia virus
aaaacauuauucuauuucgaa

SEQ ID NO: 3266344 - RNA, 19 nt, Vaccinia virus
aaauauaaaaccaacuaau

SEQ ID NO: 3266345 - RNA, 15 nt, Vaccinia virus
uuagaugaauuauua

SEQ ID NO: 3266346 - RNA, 16 nt, Vaccinia virus
aacuucuagucuagaa

SEQ ID NO: 3266347 - RNA, 22 nt, Vaccinia virus
uuaagagauuuagaaaacauua

SEQ ID NO: 3266348 - RNA, 13 nt, Vaccinia virus
aaaaguuaaaacu

SEQ ID NO: 3266349 - RNA, 13 nt, Vaccinia virus
auggaguauauau

SEQ ID NO: 3266350 - RNA, 16 nt, Vaccinia virus
ccacguuuaaacauuc

SEQ ID NO: 3266351 - RNA, 19 nt, Vaccinia virus
aaaauuguugaucauauag

SEQ ID NO: 3266352 - RNA, 19 nt, Vaccinia virus
agagauuuaacuguucauc

SEQ ID NO: 3266353 - RNA, 13 nt, Vaccinia virus
uaacaauauggaa

SEQ ID NO: 3266354 - RNA, 19 nt, Vaccinia virus
cauuuucucuuucucucuu

SEQ ID NO: 3266355 - RNA, 15 nt, Vaccinia virus
uauauccaauaaagc

SEQ ID NO: 3266356 - RNA, 19 nt, Vaccinia virus
ucgcauuaauacuguuuuc

SEQ ID NO: 3266357 - RNA, 20 nt, Vaccinia virus
cuaaugccuuaggauaugua

SEQ ID NO: 3266358 - RNA, 16 nt, Vaccinia virus
ugauuccaaaauugaa

SEQ ID NO: 3266359 - RNA, 15 nt, Vaccinia virus
agaggcaaaagaugu

SEQ ID NO: 3266360 - RNA, 16 nt, Vaccinia virus
agcuauuuaaaugggu

SEQ ID NO: 3266361 - RNA, 20 nt, Vaccinia virus
auuaguaaggcuuuagaaac

SEQ ID NO: 3266362 - RNA, 14 nt, Vaccinia virus
uggaugaggaauga

SEQ ID NO: 3266363 - RNA, 14 nt, Vaccinia virus
aauugauucuuauu

SEQ ID NO: 3266364 - RNA, 22 nt, Vaccinia virus
auaguuuucucuauucugaaau

SEQ ID NO: 3266365 - RNA, 18 nt, Vaccinia virus
aaacgcucuacgaauauc

SEQ ID NO: 3266366 - RNA, 21 nt, Vaccinia virus
agcuccuacaggaauaucuuu

SEQ ID NO: 3266367 - RNA, 22 nt, Vaccinia virus
ccaugucugaaacgagacgcua

SEQ ID NO: 3266368 - RNA, 21 nt, Vaccinia virus
aacacccauuuauuguacaaa

SEQ ID NO: 3266369 - RNA, 15 nt, Vaccinia virus
ucagaacugaugcaa

SEQ ID NO: 3266370 - RNA, 17 nt, Vaccinia virus
uggaauauaucuauaau

SEQ ID NO: 3266371 - RNA, 17 nt, Vaccinia virus
ugucggcgacaugauua

SEQ ID NO: 3266372 - RNA, 22 nt, Vaccinia virus
cgucucugacgguaccauaaac

SEQ ID NO: 3266373 - RNA, 23 nt, Vaccinia virus
aagcacucguuauuaauacaagu

SEQ ID NO: 3266374 - RNA, 12 nt, Vaccinia virus
aaauauaaugau

SEQ ID NO: 3266375 - RNA, 17 nt, Vaccinia virus
uuuacugucuaccuaaa

SEQ ID NO: 3266376 - RNA, 12 nt, Vaccinia virus
acugagaaguua

SEQ ID NO: 3266377 - RNA, 16 nt, Vaccinia virus
cuuuuuaggaauguau

SEQ ID NO: 3266378 - RNA, 19 nt, Vaccinia virus
aucgaugaauaauacauuu

SEQ ID NO: 3266379 - RNA, 21 nt, Vaccinia virus
aucaauucuggauuaucccuc

SEQ ID NO: 3266380 - RNA, 14 nt, Vaccinia virus
gaaagaauaagaac

SEQ ID NO: 3266381 - RNA, 20 nt, Vaccinia virus
gucuaguaaguagaaauuau

SEQ ID NO: 3266382 - RNA, 23 nt, Vaccinia virus
augcaucuuaacacucucugcca

SEQ ID NO: 3266383 - RNA, 13 nt, Vaccinia virus
aucaugaaauaua

SEQ ID NO: 3266384 - RNA, 13 nt, Vaccinia virus
gagaguagauauc

SEQ ID NO: 3266385 - RNA, 20 nt, Vaccinia virus
aacgaccaucuuugaaaauu

SEQ ID NO: 3266386 - RNA, 21 nt, Vaccinia virus
auggauaauccgucuauuuua

SEQ ID NO: 3266387 - RNA, 16 nt, Vaccinia virus
agauguaaguaugaug

SEQ ID NO: 3266388 - RNA, 17 nt, Vaccinia virus
agacuuucgucaauuug

SEQ ID NO: 3266389 - RNA, 18 nt, Vaccinia virus
ucuguccaauuaaaugua

SEQ ID NO: 3266390 - RNA, 14 nt, Vaccinia virus
auacagucuuaaau

SEQ ID NO: 3266391 - RNA, 15 nt, Vaccinia virus
auagaugaagaucag

SEQ ID NO: 3266392 - RNA, 14 nt, Vaccinia virus
ucccaauaugugua

SEQ ID NO: 3266393 - RNA, 13 nt, Vaccinia virus
guccucaugauua

SEQ ID NO: 3266394 - RNA, 22 nt, Vaccinia virus
ucugagaaaaugucucucauaa

SEQ ID NO: 3266395 - RNA, 13 nt, Vaccinia virus
gacgguaucaugc

SEQ ID NO: 3266396 - RNA, 17 nt, Vaccinia virus
aauauuucgaugauaua

SEQ ID NO: 3266397 - RNA, 17 nt, Vaccinia virus
uuuaaaguaaacuucgu

SEQ ID NO: 3266398 - RNA, 17 nt, Vaccinia virus
agaauuuuuuaaaaagu

SEQ ID NO: 3266399 - RNA, 22 nt, Vaccinia virus
auugguaaauuccauagaauau

SEQ ID NO: 3266400 - RNA, 12 nt, Vaccinia virus
uucuacaucuuc

SEQ ID NO: 3266401 - RNA, 21 nt, Vaccinia virus
uugaucauauaguuauguaua

SEQ ID NO: 3266402 - RNA, 18 nt, Vaccinia virus
aauccaguaauaucaugu

SEQ ID NO: 3266403 - RNA, 13 nt, Vaccinia virus
aaauaauccugaa

SEQ ID NO: 3266404 - RNA, 15 nt, Vaccinia virus
uguagauaugugaua

SEQ ID NO: 3266405 - RNA, 16 nt, Vaccinia virus
acaauaguuagauaca

SEQ ID NO: 3266406 - RNA, 15 nt, Vaccinia virus
aacaggucauauucu

SEQ ID NO: 3266407 - RNA, 22 nt, Vaccinia virus
ugaauagcaaaaucuuuacuau

SEQ ID NO: 3266408 - RNA, 16 nt, Vaccinia virus
uuaauacuacauauuu

SEQ ID NO: 3266409 - RNA, 16 nt, Vaccinia virus
acaauguccaaaucua

SEQ ID NO: 3266410 - RNA, 17 nt, Vaccinia virus
gaaaacugguuaaaaca

SEQ ID NO: 3266411 - RNA, 12 nt, Vaccinia virus
ugaaaauacuuu

SEQ ID NO: 3266412 - RNA, 18 nt, Vaccinia virus
gaguuccauuacaaauau

SEQ ID NO: 3266413 - RNA, 18 nt, Vaccinia virus
ugucucagaaucaaauau

SEQ ID NO: 3266414 - RNA, 15 nt, Vaccinia virus
auccuagaugaugau

SEQ ID NO: 3266415 - RNA, 15 nt, Vaccinia virus
agucaaacauucaac

SEQ ID NO: 3266416 - RNA, 19 nt, Vaccinia virus
aauacauaauuuuguaaaa

SEQ ID NO: 3266417 - RNA, 12 nt, Vaccinia virus
aaaaaauauauu

SEQ ID NO: 3266418 - RNA, 11 nt, Vaccinia virus
aauaaauggau

SEQ ID NO: 3266419 - RNA, 14 nt, Vaccinia virus
gaaguaaugaagaa

SEQ ID NO: 3266420 - RNA, 23 nt, Vaccinia virus
uuucugaugaaacauuuaaugau

SEQ ID NO: 3266421 - RNA, 22 nt, Vaccinia virus
acaacgucaucgcuucaucuau

SEQ ID NO: 3266422 - RNA, 13 nt, Vaccinia virus
auaucaugaugau

SEQ ID NO: 3266423 - RNA, 18 nt, Vaccinia virus
cagauagauaaagucuug

SEQ ID NO: 3266424 - RNA, 16 nt, Vaccinia virus
aagauacaacaaauua

SEQ ID NO: 3266425 - RNA, 13 nt, Vaccinia virus
gagaauaauagau

SEQ ID NO: 3266426 - RNA, 16 nt, Vaccinia virus
agugucuauaaaugua

SEQ ID NO: 3266427 - RNA, 13 nt, Vaccinia virus
ugaucggaucuaa

SEQ ID NO: 3266428 - RNA, 18 nt, Vaccinia virus
cagauguaaauauauuua

SEQ ID NO: 3266429 - RNA, 15 nt, Vaccinia virus
accggucauauuaau

SEQ ID NO: 3266430 - RNA, 16 nt, Vaccinia virus
uagaaaauucuaaggu

SEQ ID NO: 3266431 - RNA, 23 nt, Vaccinia virus
uuauuccaaucauugauaucuuu

SEQ ID NO: 3266432 - RNA, 16 nt, Vaccinia virus
aauacgaauuaugcaa

SEQ ID NO: 3266433 - RNA, 20 nt, Vaccinia virus
agaguauccacuaaacuauu

SEQ ID NO: 3266434 - RNA, 17 nt, Vaccinia virus
uauuccuaguuuggauu

SEQ ID NO: 3266435 - RNA, 23 nt, Vaccinia virus
uaaacgccuuuagaaaaacuuua

SEQ ID NO: 3266436 - RNA, 23 nt, Vaccinia virus
guccggagaucuaaagauaaucu

SEQ ID NO: 3266437 - RNA, 17 nt, Vaccinia virus
uuaaucguacucauuau

SEQ ID NO: 3266438 - RNA, 14 nt, Vaccinia virus
uuaacuuacuuauu

SEQ ID NO: 3266439 - RNA, 17 nt, Vaccinia virus
auauucuguaguuguau

SEQ ID NO: 3266440 - RNA, 21 nt, Vaccinia virus
auugcguuuagcaucugauuu

SEQ ID NO: 3266441 - RNA, 14 nt, Vaccinia virus
uauuaaaucaugaa

SEQ ID NO: 3266442 - RNA, 19 nt, Vaccinia virus
auacauuaaguaaaguaaa

SEQ ID NO: 3266443 - RNA, 15 nt, Vaccinia virus
uguucuaucaacgau

SEQ ID NO: 3266444 - RNA, 17 nt, Vaccinia virus
uaaagacaacgaauaca

SEQ ID NO: 3266445 - RNA, 16 nt, Vaccinia virus
aucagcugaaaaacua

SEQ ID NO: 3266446 - RNA, 19 nt, Vaccinia virus
uggagaaucgucuaucuuu

SEQ ID NO: 3266447 - RNA, 16 nt, Vaccinia virus
agucauaucuagaaug

SEQ ID NO: 3266448 - RNA, 13 nt, Vaccinia virus
acaaauguagaag

SEQ ID NO: 3266449 - RNA, 18 nt, Vaccinia virus
acuucacucuauuaaaaa

SEQ ID NO: 3266450 - RNA, 20 nt, Vaccinia virus
guacuauuuuuuacauuacu

SEQ ID NO: 3266451 - RNA, 13 nt, Vaccinia virus
auuagauaaaguu

SEQ ID NO: 3266452 - RNA, 19 nt, Vaccinia virus
uguuauucuguucuauuca

SEQ ID NO: 3266453 - RNA, 14 nt, Vaccinia virus
aucguccauagcaa

SEQ ID NO: 3266454 - RNA, 21 nt, Vaccinia virus
uacaacuguuguaaauuauuu

SEQ ID NO: 3266455 - RNA, 23 nt, Vaccinia virus
gaagaacguguauuaaauagaau

SEQ ID NO: 3266456 - RNA, 22 nt, Vaccinia virus
aacuucuagucuagaaauaaua

SEQ ID NO: 3266457 - RNA, 21 nt, Vaccinia virus
auuugcaccacuuucuaucaa

SEQ ID NO: 3266458 - RNA, 11 nt, Vaccinia virus
ggaauauacaa

SEQ ID NO: 3266459 - RNA, 17 nt, Vaccinia virus
ugauauccgcuauuaca

SEQ ID NO: 3266460 - RNA, 10 nt, Vaccinia virus
ucucuauaga

SEQ ID NO: 3266461 - RNA, 14 nt, Vaccinia virus
agaugguaaacucu

SEQ ID NO: 3266462 - RNA, 17 nt, Vaccinia virus
uguuacaaauguagaag

SEQ ID NO: 3266463 - RNA, 16 nt, Vaccinia virus
gaaagagauaauagaa

SEQ ID NO: 3266464 - RNA, 21 nt, Vaccinia virus
augaacgcgauguuucuguaa

SEQ ID NO: 3266465 - RNA, 22 nt, Vaccinia virus
auuucuaucccgaaagaacuga

SEQ ID NO: 3266466 - RNA, 21 nt, Vaccinia virus
uuaagccauaacauaauuuuc

SEQ ID NO: 3266467 - RNA, 23 nt, Vaccinia virus
aacuacuccauuuuauuguggaa

SEQ ID NO: 3266468 - RNA, 22 nt, Vaccinia virus
cacuuagaacagauuuaacaau

SEQ ID NO: 3266469 - RNA, 18 nt, Vaccinia virus
acaauaggaaaucuaucu

SEQ ID NO: 3266470 - RNA, 15 nt, Vaccinia virus
gucugucucagaauc

SEQ ID NO: 3266471 - RNA, 13 nt, Vaccinia virus
aguaucaaacucu

SEQ ID NO: 3266472 - RNA, 15 nt, Vaccinia virus
aaucucuuaucaugu

SEQ ID NO: 3266473 - RNA, 17 nt, Vaccinia virus
aguuuuccguuagaaaa

SEQ ID NO: 3266474 - RNA, 19 nt, Vaccinia virus
aucaaccaccgaugaugcg

SEQ ID NO: 3266475 - RNA, 19 nt, Vaccinia virus
auuauccaugauagaaaga

SEQ ID NO: 3266476 - RNA, 16 nt, Vaccinia virus
aacauaaauaauucua

SEQ ID NO: 3266477 - RNA, 22 nt, Vaccinia virus
gauuaucguuuucaucuuuuau

SEQ ID NO: 3266478 - RNA, 11 nt, Vaccinia virus
cuuuuuaggaa

SEQ ID NO: 3266479 - RNA, 14 nt, Vaccinia virus
acaaaauacauaau

SEQ ID NO: 3266480 - RNA, 16 nt, Vaccinia virus
uaaagaaaagauaucc

SEQ ID NO: 3266481 - RNA, 22 nt, Vaccinia virus
augacacuaguuaagaacaugu

SEQ ID NO: 3266482 - RNA, 16 nt, Vaccinia virus
acaggauuauaaucuc

SEQ ID NO: 3266483 - RNA, 22 nt, Vaccinia virus
aucugugauuucguuagucaua

SEQ ID NO: 3266484 - RNA, 21 nt, Vaccinia virus
uacaaaaauauuuuuauucuc

SEQ ID NO: 3266485 - RNA, 16 nt, Vaccinia virus
acuacugaagaacuac

SEQ ID NO: 3266486 - RNA, 14 nt, Vaccinia virus
gauacgaugaugau

SEQ ID NO: 3266487 - RNA, 23 nt, Vaccinia virus
ucauaaguggacauauagaugca

SEQ ID NO: 3266488 - RNA, 16 nt, Vaccinia virus
ucacugcgauuguauu

SEQ ID NO: 3266489 - RNA, 20 nt, Vaccinia virus
ugacuaucuuuugaaaauau

SEQ ID NO: 3266490 - RNA, 13 nt, Vaccinia virus
cauuaacuuuaau

SEQ ID NO: 3266491 - RNA, 19 nt, Vaccinia virus
uugaauaggaguuugaaua

SEQ ID NO: 3266492 - RNA, 13 nt, Vaccinia virus
augucacuauuaa

SEQ ID NO: 3266493 - RNA, 15 nt, Vaccinia virus
uauaaccuuaucauu

SEQ ID NO: 3266494 - RNA, 19 nt, Vaccinia virus
uuuuagguacucaucuacu

SEQ ID NO: 3266495 - RNA, 22 nt, Vaccinia virus
uaucaauaagaaaguuaagaau

SEQ ID NO: 3266496 - RNA, 14 nt, Vaccinia virus
guaaauaauaauau

SEQ ID NO: 3266497 - RNA, 21 nt, Vaccinia virus
auaaacucacauuucaaauau

SEQ ID NO: 3266498 - RNA, 23 nt, Vaccinia virus
gucucauaccggacgacauauua

SEQ ID NO: 3266499 - RNA, 20 nt, Vaccinia virus
aaauauuucauuagauguua

SEQ ID NO: 3266500 - RNA, 18 nt, Vaccinia virus
gucaaugauaugauuuuu

SEQ ID NO: 3266501 - RNA, 13 nt, Vaccinia virus
auaaacuguaaau

SEQ ID NO: 3266502 - RNA, 20 nt, Vaccinia virus
ccguuuuaucgguuaccaua

SEQ ID NO: 3266503 - RNA, 21 nt, Vaccinia virus
augucgagaaacagaacuauu

SEQ ID NO: 3266504 - RNA, 21 nt, Vaccinia virus
uaaaaucagcagacuuuugaa

SEQ ID NO: 3266505 - RNA, 19 nt, Vaccinia virus
ccauagcuaucaagucuuu

SEQ ID NO: 3266506 - RNA, 17 nt, Vaccinia virus
uacaguaaaaauaacua

SEQ ID NO: 3266507 - RNA, 20 nt, Vaccinia virus
gcuaguuaauaguaaaugaa

SEQ ID NO: 3266508 - RNA, 18 nt, Vaccinia virus
acgccguaauaauuuccu

SEQ ID NO: 3266509 - RNA, 21 nt, Vaccinia virus
uauuguuuaauauauuauaua

SEQ ID NO: 3266510 - RNA, 23 nt, Vaccinia virus
uauuauuaaacguaguuaugaua

SEQ ID NO: 3266511 - RNA, 22 nt, Vaccinia virus
gcauccaaugaguaaaaucaaa

SEQ ID NO: 3266512 - RNA, 19 nt, Vaccinia virus
uagucgguuaauguuguau

SEQ ID NO: 3266513 - RNA, 14 nt, Vaccinia virus
caaacuuuacucuu

SEQ ID NO: 3266514 - RNA, 16 nt, Vaccinia virus
uuacauaauauauaca

SEQ ID NO: 3266515 - RNA, 19 nt, Vaccinia virus
accacgaaacaauauauau

SEQ ID NO: 3266516 - RNA, 14 nt, Vaccinia virus
uauggagcaaacau

SEQ ID NO: 3266517 - RNA, 15 nt, Vaccinia virus
uaaucguuauuauca

SEQ ID NO: 3266518 - RNA, 18 nt, Vaccinia virus
aaugcauuuuauaccgaa

SEQ ID NO: 3266519 - RNA, 17 nt, Vaccinia virus
gaauuaauuaauguuuu

SEQ ID NO: 3266520 - RNA, 16 nt, Vaccinia virus
guaucaugaacucuaa

SEQ ID NO: 3266521 - RNA, 14 nt, Vaccinia virus
auggucuauacaau

SEQ ID NO: 3266522 - RNA, 19 nt, Vaccinia virus
ucuuuuucuacgucaaaau

SEQ ID NO: 3266523 - RNA, 15 nt, Vaccinia virus
gcguuaauaaaaaca

SEQ ID NO: 3266524 - RNA, 17 nt, Vaccinia virus
uagauauuaguaaauua

SEQ ID NO: 3266525 - RNA, 14 nt, Vaccinia virus
aaguaaauacugaa

SEQ ID NO: 3266526 - RNA, 23 nt, Vaccinia virus
aauauaucuauaauuugauccau

SEQ ID NO: 3266527 - RNA, 12 nt, Vaccinia virus
guuuccauccau

SEQ ID NO: 3266528 - RNA, 16 nt, Vaccinia virus
auaaaucaaaauaugg

SEQ ID NO: 3266529 - RNA, 15 nt, Vaccinia virus
ugauuucuugaacau

SEQ ID NO: 3266530 - RNA, 19 nt, Vaccinia virus
guauaaauuuuagaaauaa

SEQ ID NO: 3266531 - RNA, 19 nt, Vaccinia virus
auaguuaccgcaaagaaac

SEQ ID NO: 3266532 - RNA, 10 nt, Vaccinia virus
ugguaaaaug

SEQ ID NO: 3266533 - RNA, 22 nt, Vaccinia virus
agaauuuuuucguguuccaaac

SEQ ID NO: 3266534 - RNA, 15 nt, Vaccinia virus
cguaucauuaaacau

SEQ ID NO: 3266535 - RNA, 14 nt, Vaccinia virus
agaauaauaugacu

SEQ ID NO: 3266536 - RNA, 15 nt, Vaccinia virus
aacgaauaaacaauu

SEQ ID NO: 3266537 - RNA, 16 nt, Vaccinia virus
aggaugacucucaaau

SEQ ID NO: 3266538 - RNA, 20 nt, Vaccinia virus
auuaguaggaaauuucuuga

SEQ ID NO: 3266539 - RNA, 16 nt, Vaccinia virus
uaauuguaacauccuu

SEQ ID NO: 3266540 - RNA, 12 nt, Vaccinia virus
auuaaacuaauu

SEQ ID NO: 3266541 - RNA, 22 nt, Vaccinia virus
uaaaauuaucuacacaaauaga

SEQ ID NO: 3266542 - RNA, 11 nt, Vaccinia virus
ucgaauacagu

SEQ ID NO: 3266543 - RNA, 22 nt, Vaccinia virus
aguauaccaugaccuucuucau

SEQ ID NO: 3266544 - RNA, 14 nt, Vaccinia virus
augaaaaaacauua

SEQ ID NO: 3266545 - RNA, 17 nt, Vaccinia virus
aauauaucccuuaaaaa

SEQ ID NO: 3266546 - RNA, 17 nt, Vaccinia virus
ucguuccgccaaauuuu

SEQ ID NO: 3266547 - RNA, 15 nt, Vaccinia virus
ucuauaucuucuuuu

SEQ ID NO: 3266548 - RNA, 20 nt, Vaccinia virus
aauucuacaacauuauuaua

SEQ ID NO: 3266549 - RNA, 20 nt, Vaccinia virus
uagagcccacguuuaaacau

SEQ ID NO: 3266550 - RNA, 20 nt, Vaccinia virus
gagcuaucuagacuacgaua

SEQ ID NO: 3266551 - RNA, 20 nt, Vaccinia virus
uuuuagccagagauaucaua

SEQ ID NO: 3266552 - RNA, 14 nt, Vaccinia virus
ccuagagaauuaau

SEQ ID NO: 3266553 - RNA, 23 nt, Vaccinia virus
gaaagcugggggauguucugguu

SEQ ID NO: 3266554 - RNA, 19 nt, Vaccinia virus
uauuacaaaauauuuugag

SEQ ID NO: 3266555 - RNA, 13 nt, Vaccinia virus
uaucaaaagacuu

SEQ ID NO: 3266556 - RNA, 22 nt, Vaccinia virus
aaaucuaucuuauauacacaua

SEQ ID NO: 3266557 - RNA, 12 nt, Vaccinia virus
aauuuuuagagg

SEQ ID NO: 3266558 - RNA, 21 nt, Vaccinia virus
uggauaacgguacucuagaau

SEQ ID NO: 3266559 - RNA, 16 nt, Vaccinia virus
gaaaagauauccagag

SEQ ID NO: 3266560 - RNA, 15 nt, Vaccinia virus
ugauauaaaacuauc

SEQ ID NO: 3266561 - RNA, 17 nt, Vaccinia virus
ugauauccgcgaacgau

SEQ ID NO: 3266562 - RNA, 15 nt, Vaccinia virus
aaguuucuauuucuu

SEQ ID NO: 3266563 - RNA, 13 nt, Vaccinia virus
gaauaucauugcu

SEQ ID NO: 3266564 - RNA, 21 nt, Vaccinia virus
accaugaaauugagaagauca

SEQ ID NO: 3266565 - RNA, 16 nt, Vaccinia virus
cuaggugcuauggaug

SEQ ID NO: 3266566 - RNA, 14 nt, Vaccinia virus
uaaaaguuaaugag

SEQ ID NO: 3266567 - RNA, 17 nt, Vaccinia virus
gauauaaaauagaaaau

SEQ ID NO: 3266568 - RNA, 21 nt, Vaccinia virus
aaucuaguaaaucaacugaua

SEQ ID NO: 3266569 - RNA, 16 nt, Vaccinia virus
aaucagaaucuaauga

SEQ ID NO: 3266570 - RNA, 22 nt, Vaccinia virus
auaguuguuguccguuaucuaa

SEQ ID NO: 3266571 - RNA, 23 nt, Vaccinia virus
auaguuaucuaucuuaaaaacua

SEQ ID NO: 3266572 - RNA, 21 nt, Vaccinia virus
ucauuuucggguuuaaauucu

SEQ ID NO: 3266573 - RNA, 17 nt, Vaccinia virus
uaaagccgguguaacau

SEQ ID NO: 3266574 - RNA, 12 nt, Vaccinia virus
aagguucuuaua

SEQ ID NO: 3266575 - RNA, 16 nt, Vaccinia virus
auccuuuguaaagaaa

SEQ ID NO: 3266576 - RNA, 23 nt, Vaccinia virus
ucauuuuccagaugauauguaug

SEQ ID NO: 3266577 - RNA, 15 nt, Vaccinia virus
cuucgauaaaaugac

SEQ ID NO: 3266578 - RNA, 19 nt, Vaccinia virus
ugcaucgugcuuuaacauc

SEQ ID NO: 3266579 - RNA, 14 nt, Vaccinia virus
augaguuaauguau

SEQ ID NO: 3266580 - RNA, 13 nt, Vaccinia virus
aaauaaaaugagu

SEQ ID NO: 3266581 - RNA, 15 nt, Vaccinia virus
ucacaugauguagug

SEQ ID NO: 3266582 - RNA, 16 nt, Vaccinia virus
aacacgauaggucaga

SEQ ID NO: 3266583 - RNA, 20 nt, Vaccinia virus
gagaucauuaaauguuucau

SEQ ID NO: 3266584 - RNA, 16 nt, Vaccinia virus
aaaucaguaacuaugu

SEQ ID NO: 3266585 - RNA, 16 nt, Vaccinia virus
acacaaggcauuguuu

SEQ ID NO: 3266586 - RNA, 19 nt, Vaccinia virus
auauaauccgcauauucca

SEQ ID NO: 3266587 - RNA, 12 nt, Vaccinia virus
agaggagaagua

SEQ ID NO: 3266588 - RNA, 20 nt, Vaccinia virus
uucuuaacuuacaaaaugua

SEQ ID NO: 3266589 - RNA, 14 nt, Vaccinia virus
caucuugacauuuu

SEQ ID NO: 3266590 - RNA, 20 nt, Vaccinia virus
uaggucuuguguuagaugau

SEQ ID NO: 3266591 - RNA, 13 nt, Vaccinia virus
uagaaaaaugcua

SEQ ID NO: 3266592 - RNA, 17 nt, Vaccinia virus
aaauauguuauguuuau

SEQ ID NO: 3266593 - RNA, 16 nt, Vaccinia virus
uuuuagaaauauacag

SEQ ID NO: 3266594 - RNA, 21 nt, Vaccinia virus
aucuauaauuugugaguuuuc

SEQ ID NO: 3266595 - RNA, 16 nt, Vaccinia virus
aaauauuuaacucaug

SEQ ID NO: 3266596 - RNA, 15 nt, Vaccinia virus
auuuuaagaaauggu

SEQ ID NO: 3266597 - RNA, 15 nt, Vaccinia virus
gaauauaaaccauau

SEQ ID NO: 3266598 - RNA, 15 nt, Vaccinia virus
aauaguguuagauaa

SEQ ID NO: 3266599 - RNA, 23 nt, Vaccinia virus
gcugaucuucaucuauaaaucaa

SEQ ID NO: 3266600 - RNA, 19 nt, Vaccinia virus
guauauucuagguacuuau

SEQ ID NO: 3266601 - RNA, 20 nt, Vaccinia virus
aaccucacuguuaaaaauau

SEQ ID NO: 3266602 - RNA, 22 nt, Vaccinia virus
uugauaggaucuauaauguagu

SEQ ID NO: 3266603 - RNA, 23 nt, Vaccinia virus
uagugccaucagaauaggaugaa

SEQ ID NO: 3266604 - RNA, 19 nt, Vaccinia virus
caaauuaagcauuuuggaa

SEQ ID NO: 3266605 - RNA, 22 nt, Vaccinia virus
aucuuggcuccauacuguacca

SEQ ID NO: 3266606 - RNA, 20 nt, Vaccinia virus
auacgcaucucuaacuacua

SEQ ID NO: 3266607 - RNA, 14 nt, Vaccinia virus
ugacuauugagacg

SEQ ID NO: 3266608 - RNA, 14 nt, Vaccinia virus
aaacauaaaaaaca

SEQ ID NO: 3266609 - RNA, 16 nt, Vaccinia virus
cauauucuaugaauuu

SEQ ID NO: 3266610 - RNA, 17 nt, Vaccinia virus
acuugcgggguuaauuu

SEQ ID NO: 3266611 - RNA, 18 nt, Vaccinia virus
aguaaaaucuaucauauu

SEQ ID NO: 3266612 - RNA, 22 nt, Vaccinia virus
caguaguugcgggaacaauauu

SEQ ID NO: 3266613 - RNA, 18 nt, Vaccinia virus
aagagacuacaauauauu

SEQ ID NO: 3266614 - RNA, 14 nt, Vaccinia virus
guuucuuacauauu

SEQ ID NO: 3266615 - RNA, 19 nt, Vaccinia virus
agaguaugacgucucucaa

SEQ ID NO: 3266616 - RNA, 18 nt, Vaccinia virus
uaauaucccacauuauca

SEQ ID NO: 3266617 - RNA, 13 nt, Vaccinia virus
agucaaaaagaua

SEQ ID NO: 3266618 - RNA, 19 nt, Vaccinia virus
aaauagcggacagcuauau

SEQ ID NO: 3266619 - RNA, 19 nt, Vaccinia virus
gcuauugaaacugacggau

SEQ ID NO: 3266620 - RNA, 19 nt, Vaccinia virus
ucucucaaucacuacaucu

SEQ ID NO: 3266621 - RNA, 19 nt, Vaccinia virus
cauuuacuuuuucauaauu

SEQ ID NO: 3266622 - RNA, 17 nt, Vaccinia virus
ugaaauaauuagaacua

SEQ ID NO: 3266623 - RNA, 22 nt, Vaccinia virus
uggcucuugaaaccaagguuuu

SEQ ID NO: 3266624 - RNA, 17 nt, Vaccinia virus
cuuucuagaacauacug

SEQ ID NO: 3266625 - RNA, 14 nt, Vaccinia virus
aaguauuuauaaaa

SEQ ID NO: 3266626 - RNA, 16 nt, Vaccinia virus
cuggaggagauggauu

SEQ ID NO: 3266627 - RNA, 15 nt, Vaccinia virus
caaaggaugaaagaa

SEQ ID NO: 3266628 - RNA, 14 nt, Vaccinia virus
aauugucuaucugu

SEQ ID NO: 3266629 - RNA, 16 nt, Vaccinia virus
gaauagugguauauaa

SEQ ID NO: 3266630 - RNA, 22 nt, Vaccinia virus
uauugaaugacguuuucucaua

SEQ ID NO: 3266631 - RNA, 19 nt, Vaccinia virus
gcauugauaaugucuauau

SEQ ID NO: 3266632 - RNA, 23 nt, Vaccinia virus
caaaucucugauccguauccaug

SEQ ID NO: 3266633 - RNA, 22 nt, Vaccinia virus
aacaauaguuuguacugcaaaa

SEQ ID NO: 3266634 - RNA, 12 nt, Vaccinia virus
ucagaucaaagu

SEQ ID NO: 3266635 - RNA, 20 nt, Vaccinia virus
auuaucgaguuuaaaucauu

SEQ ID NO: 3266636 - RNA, 20 nt, Vaccinia virus
acaauaauucagauaaugua

SEQ ID NO: 3266637 - RNA, 17 nt, Vaccinia virus
ucaaucacuacaucuuu

SEQ ID NO: 3266638 - RNA, 14 nt, Vaccinia virus
uagagguagcaaaa

SEQ ID NO: 3266639 - RNA, 14 nt, Vaccinia virus
ugauuauauagaua

SEQ ID NO: 3266640 - RNA, 19 nt, Vaccinia virus
uagauguaaguaugauguc

SEQ ID NO: 3266641 - RNA, 14 nt, Vaccinia virus
acguucauuaaaaa

SEQ ID NO: 3266642 - RNA, 18 nt, Vaccinia virus
auuugagagaucauuucu

SEQ ID NO: 3266643 - RNA, 19 nt, Vaccinia virus
gacgcauuuaauagagaua

SEQ ID NO: 3266644 - RNA, 16 nt, Vaccinia virus
aacacuauuaaaauau

SEQ ID NO: 3266645 - RNA, 17 nt, Vaccinia virus
ucuaauuaguuuuucuu

SEQ ID NO: 3266646 - RNA, 14 nt, Vaccinia virus
auccccuuucaaua

SEQ ID NO: 3266647 - RNA, 17 nt, Vaccinia virus
auuaaugcuacagauau

SEQ ID NO: 3266648 - RNA, 16 nt, Vaccinia virus
aucuaguuagcaauuu

SEQ ID NO: 3266649 - RNA, 17 nt, Vaccinia virus
augugauucucugaaaa

SEQ ID NO: 3266650 - RNA, 17 nt, Vaccinia virus
auuuacaccaaaaacuc

SEQ ID NO: 3266651 - RNA, 15 nt, Vaccinia virus
uacacauaauuauuc

SEQ ID NO: 3266652 - RNA, 19 nt, Vaccinia virus
gaaaugacuccaugaaaac

SEQ ID NO: 3266653 - RNA, 17 nt, Vaccinia virus
uaucuaugcuuacugua

SEQ ID NO: 3266654 - RNA, 13 nt, Vaccinia virus
uaccaaauauuag

SEQ ID NO: 3266655 - RNA, 13 nt, Vaccinia virus
gacguuaguucuu

SEQ ID NO: 3266656 - RNA, 18 nt, Vaccinia virus
auauuacuaauugauaga

SEQ ID NO: 3266657 - RNA, 17 nt, Vaccinia virus
aauaucuuuacgaauua

SEQ ID NO: 3266658 - RNA, 18 nt, Vaccinia virus
uaaaauaguucuguaaua

SEQ ID NO: 3266659 - RNA, 20 nt, Vaccinia virus
agagaagcacucguuauuaa

SEQ ID NO: 3266660 - RNA, 13 nt, Vaccinia virus
acauauaaauguc

SEQ ID NO: 3266661 - RNA, 18 nt, Vaccinia virus
acacccucagcuauaucu

SEQ ID NO: 3266662 - RNA, 24 nt, Vaccinia virus
uacauaaacauguccaauacguua

SEQ ID NO: 3266663 - RNA, 12 nt, Vaccinia virus
auuuauaaacau

SEQ ID NO: 3266664 - RNA, 19 nt, Vaccinia virus
uuuuugcaggaaguauauc

SEQ ID NO: 3266665 - RNA, 15 nt, Vaccinia virus
uaccucucuuaaaau

SEQ ID NO: 3266666 - RNA, 21 nt, Vaccinia virus
uuuguccauuauuucuauauu

SEQ ID NO: 3266667 - RNA, 16 nt, Vaccinia virus
uauaaaacuugucugu

SEQ ID NO: 3266668 - RNA, 15 nt, Vaccinia virus
uguaccuuauacguu

SEQ ID NO: 3266669 - RNA, 17 nt, Vaccinia virus
uuaaauccuuguuugau

SEQ ID NO: 3266670 - RNA, 15 nt, Vaccinia virus
uaauacuuaauucuu

SEQ ID NO: 3266671 - RNA, 16 nt, Vaccinia virus
uuagauaauuguggua

SEQ ID NO: 3266672 - RNA, 23 nt, Vaccinia virus
cuaguuuuauacacaucucuuca

SEQ ID NO: 3266673 - RNA, 14 nt, Vaccinia virus
ugucuaguuucgua

SEQ ID NO: 3266674 - RNA, 14 nt, Vaccinia virus
uauccaauguauuu

SEQ ID NO: 3266675 - RNA, 21 nt, Vaccinia virus
gauauucgaucccgauauccu

SEQ ID NO: 3266676 - RNA, 22 nt, Vaccinia virus
uauagauagcuuuagcuaauau

SEQ ID NO: 3266677 - RNA, 18 nt, Vaccinia virus
uaaauacuuuuuauuuac

SEQ ID NO: 3266678 - RNA, 16 nt, Vaccinia virus
cauaguaauacauauu

SEQ ID NO: 3266679 - RNA, 22 nt, Vaccinia virus
caaaauuggaaggauauacaaa

SEQ ID NO: 3266680 - RNA, 23 nt, Vaccinia virus
guuuuguuuucucuuugguaacu

SEQ ID NO: 3266681 - RNA, 18 nt, Vaccinia virus
aauccaauuguuugauau

SEQ ID NO: 3266682 - RNA, 18 nt, Vaccinia virus
aauaggaguuagaauaau

SEQ ID NO: 3266683 - RNA, 24 nt, Vaccinia virus
uccucagauuuauacauauucuaa

SEQ ID NO: 3266684 - RNA, 16 nt, Vaccinia virus
aaccaccgaugaugcg

SEQ ID NO: 3266685 - RNA, 18 nt, Vaccinia virus
aaauuagucauacguaau

SEQ ID NO: 3266686 - RNA, 15 nt, Vaccinia virus
augaauguuuucaau

SEQ ID NO: 3266687 - RNA, 19 nt, Vaccinia virus
gauguuuaaugauacgaua

SEQ ID NO: 3266688 - RNA, 13 nt, Vaccinia virus
auguaauacuuug

SEQ ID NO: 3266689 - RNA, 16 nt, Vaccinia virus
uacuaucguaaugggg

SEQ ID NO: 3266690 - RNA, 14 nt, Vaccinia virus
aaagguaagaguua

SEQ ID NO: 3266691 - RNA, 16 nt, Vaccinia virus
aacgggauauaugaau

SEQ ID NO: 3266692 - RNA, 14 nt, Vaccinia virus
gcuuuucucuuuua

SEQ ID NO: 3266693 - RNA, 14 nt, Vaccinia virus
gcauucaaauggau

SEQ ID NO: 3266694 - RNA, 23 nt, Vaccinia virus
uggaacuccuauuggaauuauuu

SEQ ID NO: 3266695 - RNA, 15 nt, Vaccinia virus
caauuaguuaauaau

SEQ ID NO: 3266696 - RNA, 12 nt, Vaccinia virus
auggagcguaaa

SEQ ID NO: 3266697 - RNA, 22 nt, Vaccinia virus
auaacuuuaccccaaucagaua

SEQ ID NO: 3266698 - RNA, 18 nt, Vaccinia virus
uacaauauucauauccuu

SEQ ID NO: 3266699 - RNA, 16 nt, Vaccinia virus
aaugaauuauuuacaa

SEQ ID NO: 3266700 - RNA, 15 nt, Vaccinia virus
uacgcgcacacaaua

SEQ ID NO: 3266701 - RNA, 15 nt, Vaccinia virus
aucuacuagaaagau

SEQ ID NO: 3266702 - RNA, 16 nt, Vaccinia virus
uacaauacacacaaua

SEQ ID NO: 3266703 - RNA, 16 nt, Vaccinia virus
cauccuuuauuaauaa

SEQ ID NO: 3266704 - RNA, 21 nt, Vaccinia virus
agauauaaaaugcguauucca

SEQ ID NO: 3266705 - RNA, 16 nt, Vaccinia virus
aguacuaucauaauua

SEQ ID NO: 3266706 - RNA, 17 nt, Vaccinia virus
uggauaauauauacguu

SEQ ID NO: 3266707 - RNA, 16 nt, Vaccinia virus
auaccaucuucuggaa

SEQ ID NO: 3266708 - RNA, 20 nt, Vaccinia virus
acacacaacgcgucuagacu

SEQ ID NO: 3266709 - RNA, 21 nt, Vaccinia virus
uauaugccacguuuauacauu

SEQ ID NO: 3266710 - RNA, 19 nt, Vaccinia virus
auccaauuguuugauauau

SEQ ID NO: 3266711 - RNA, 16 nt, Vaccinia virus
auauuacuguuaauaa

SEQ ID NO: 3266712 - RNA, 18 nt, Vaccinia virus
guuucuggauuauuuuua

SEQ ID NO: 3266713 - RNA, 20 nt, Vaccinia virus
ucaugacugauuuuuuaacu

SEQ ID NO: 3266714 - RNA, 20 nt, Vaccinia virus
gauaauauuauuuauaugau

SEQ ID NO: 3266715 - RNA, 12 nt, Vaccinia virus
ucuuaaccaaaa

SEQ ID NO: 3266716 - RNA, 17 nt, Vaccinia virus
ugacaucauacuagaua

SEQ ID NO: 3266717 - RNA, 22 nt, Vaccinia virus
auaaaaaguaauauucauaugu

SEQ ID NO: 3266718 - RNA, 21 nt, Vaccinia virus
gauaaaaauuuuuuagaugua

SEQ ID NO: 3266719 - RNA, 23 nt, Vaccinia virus
uaaacugcgccaaauuguggcau

SEQ ID NO: 3266720 - RNA, 18 nt, Vaccinia virus
aacauccuuuaaugguuu

SEQ ID NO: 3266721 - RNA, 17 nt, Vaccinia virus
auguuaccauacauuau

SEQ ID NO: 3266722 - RNA, 22 nt, Vaccinia virus
cuccgcuaggagcauacaguaa

SEQ ID NO: 3266723 - RNA, 15 nt, Vaccinia virus
aguaguucaacauaa

SEQ ID NO: 3266724 - RNA, 16 nt, Vaccinia virus
ucaucucuagauaugu

SEQ ID NO: 3266725 - RNA, 20 nt, Vaccinia virus
uacaucuacuauauuaacau

SEQ ID NO: 3266726 - RNA, 14 nt, Vaccinia virus
uauguuuguaaaau

SEQ ID NO: 3266727 - RNA, 18 nt, Vaccinia virus
agcaagauuuuuaaacaa

SEQ ID NO: 3266728 - RNA, 19 nt, Vaccinia virus
uuaugucauaaacuguaaa

SEQ ID NO: 3266729 - RNA, 18 nt, Vaccinia virus
ugcacaaucugagauuuu

SEQ ID NO: 3266730 - RNA, 16 nt, Vaccinia virus
agcuaucgucucugga

SEQ ID NO: 3266731 - RNA, 21 nt, Vaccinia virus
cguuguucuuccaauugcaau

SEQ ID NO: 3266732 - RNA, 21 nt, Vaccinia virus
ucuaaaguuaagagauuuaga

SEQ ID NO: 3266733 - RNA, 20 nt, Vaccinia virus
uuagaaauuggucuguguua

SEQ ID NO: 3266734 - RNA, 22 nt, Vaccinia virus
gauauuaacgcguuuuaugaau

SEQ ID NO: 3266735 - RNA, 22 nt, Vaccinia virus
ugaagaagugucuauaaaugua

SEQ ID NO: 3266736 - RNA, 19 nt, Vaccinia virus
acaaugcucaguaaaugua

SEQ ID NO: 3266737 - RNA, 20 nt, Vaccinia virus
ugauauagaaaagcauauca

SEQ ID NO: 3266738 - RNA, 12 nt, Vaccinia virus
auuaucuuuacc

SEQ ID NO: 3266739 - RNA, 16 nt, Vaccinia virus
cauggaggaugcauua

SEQ ID NO: 3266740 - RNA, 14 nt, Vaccinia virus
uuaaaguguaaaua

SEQ ID NO: 3266741 - RNA, 19 nt, Vaccinia virus
aucgacuugggucuucuca

SEQ ID NO: 3266742 - RNA, 21 nt, Vaccinia virus
aaaucaaucaaggaacuaaau

SEQ ID NO: 3266743 - RNA, 17 nt, Vaccinia virus
ucacuaacaauaacuag

SEQ ID NO: 3266744 - RNA, 23 nt, Vaccinia virus
ucauccguggauauuugauuuuu

SEQ ID NO: 3266745 - RNA, 21 nt, Vaccinia virus
acaaugacuuauaaaaauacu

SEQ ID NO: 3266746 - RNA, 21 nt, Vaccinia virus
uaggugccaccaauaaacuau

SEQ ID NO: 3266747 - RNA, 17 nt, Vaccinia virus
ucgaagauaucauccaa

SEQ ID NO: 3266748 - RNA, 22 nt, Vaccinia virus
uacaaaauguugauaauccuug

SEQ ID NO: 3266749 - RNA, 15 nt, Vaccinia virus
augagguguacagcg

SEQ ID NO: 3266750 - RNA, 15 nt, Vaccinia virus
gucgagguuuaaaaa

SEQ ID NO: 3266751 - RNA, 15 nt, Vaccinia virus
cccaacugcaaguga

SEQ ID NO: 3266752 - RNA, 16 nt, Vaccinia virus
uguuuuuucauuauuu

SEQ ID NO: 3266753 - RNA, 20 nt, Vaccinia virus
cguauaauucuuuauaacug

SEQ ID NO: 3266754 - RNA, 22 nt, Vaccinia virus
uaaacguuguuuacucauauag

SEQ ID NO: 3266755 - RNA, 15 nt, Vaccinia virus
ugucauuuauacguu

SEQ ID NO: 3266756 - RNA, 15 nt, Vaccinia virus
caugacguaaaugua

SEQ ID NO: 3266757 - RNA, 17 nt, Vaccinia virus
uaacacauuuucaucua

SEQ ID NO: 3266758 - RNA, 21 nt, Vaccinia virus
auagcguucgucaacauacua

SEQ ID NO: 3266759 - RNA, 14 nt, Vaccinia virus
agguguuguaacuu

SEQ ID NO: 3266760 - RNA, 23 nt, Vaccinia virus
auaucauuaaguucacuagaaua

SEQ ID NO: 3266761 - RNA, 18 nt, Vaccinia virus
uaacagcaauaguauaau

SEQ ID NO: 3266762 - RNA, 13 nt, Vaccinia virus
aacaguaaaagaa

SEQ ID NO: 3266763 - RNA, 22 nt, Vaccinia virus
caauaagcaguuuccuauucca

SEQ ID NO: 3266764 - RNA, 16 nt, Vaccinia virus
cuguuucgaaacuuua

SEQ ID NO: 3266765 - RNA, 13 nt, Vaccinia virus
ggauuaacagguu

SEQ ID NO: 3266766 - RNA, 17 nt, Vaccinia virus
uucaacaugauuauucu

SEQ ID NO: 3266767 - RNA, 15 nt, Vaccinia virus
caaaacgaguacuuu

SEQ ID NO: 3266768 - RNA, 18 nt, Vaccinia virus
uuaauaguuuacaccuuu

SEQ ID NO: 3266769 - RNA, 21 nt, Vaccinia virus
auaggauuaaaaauaaaguua

SEQ ID NO: 3266770 - RNA, 21 nt, Vaccinia virus
aagucucgcauguucagcaau

SEQ ID NO: 3266771 - RNA, 22 nt, Vaccinia virus
cgaacccguacccagaaauacc

SEQ ID NO: 3266772 - RNA, 22 nt, Vaccinia virus
acuauaguuagcacucuuccau

SEQ ID NO: 3266773 - RNA, 20 nt, Vaccinia virus
ugugauagucgauacguuau

SEQ ID NO: 3266774 - RNA, 16 nt, Vaccinia virus
auuaacgguaauacau

SEQ ID NO: 3266775 - RNA, 23 nt, Vaccinia virus
uaguuccucaggauucuaaugau

SEQ ID NO: 3266776 - RNA, 13 nt, Vaccinia virus
auaaaucauauaa

SEQ ID NO: 3266777 - RNA, 19 nt, Vaccinia virus
cuuaauuucagaagaaaac

SEQ ID NO: 3266778 - RNA, 17 nt, Vaccinia virus
auuaagcauuuuggaaa

SEQ ID NO: 3266779 - RNA, 23 nt, Vaccinia virus
aauaagaacuauaaaaaaaauaa

SEQ ID NO: 3266780 - RNA, 11 nt, Vaccinia virus
uuaaauuauua

SEQ ID NO: 3266781 - RNA, 17 nt, Vaccinia virus
auuauuaaucagaauac

SEQ ID NO: 3266782 - RNA, 13 nt, Vaccinia virus
uacaagaguggaa

SEQ ID NO: 3266783 - RNA, 16 nt, Vaccinia virus
aagucaucgucuacaa

SEQ ID NO: 3266784 - RNA, 15 nt, Vaccinia virus
guucauaaauaaaaa

SEQ ID NO: 3266785 - RNA, 22 nt, Vaccinia virus
cugaagaagagguaagauaucu

SEQ ID NO: 3266786 - RNA, 14 nt, Vaccinia virus
cauucuaucucaaa

SEQ ID NO: 3266787 - RNA, 17 nt, Vaccinia virus
uccauuuuguucaucuc

SEQ ID NO: 3266788 - RNA, 18 nt, Vaccinia virus
uauacaaguguagaugau

SEQ ID NO: 3266789 - RNA, 22 nt, Vaccinia virus
auauaaugggucccuagucaua

SEQ ID NO: 3266790 - RNA, 13 nt, Vaccinia virus
accaucaaaagca

SEQ ID NO: 3266791 - RNA, 23 nt, Vaccinia virus
uaucucgcauccauauguuugga

SEQ ID NO: 3266792 - RNA, 14 nt, Vaccinia virus
uuaauauuacuguu

SEQ ID NO: 3266793 - RNA, 21 nt, Vaccinia virus
accauauauuuggcaugguuu

SEQ ID NO: 3266794 - RNA, 14 nt, Vaccinia virus
uaaacgaacuauau

SEQ ID NO: 3266795 - RNA, 16 nt, Vaccinia virus
cugauagaaagaauaa

SEQ ID NO: 3266796 - RNA, 14 nt, Vaccinia virus
auaguguauacaau

SEQ ID NO: 3266797 - RNA, 22 nt, Vaccinia virus
auuucggaaucgcaaaccacca

SEQ ID NO: 3266798 - RNA, 18 nt, Vaccinia virus
aaaacuaucaaugauaug

SEQ ID NO: 3266799 - RNA, 15 nt, Vaccinia virus
gacacucuauaucua

SEQ ID NO: 3266800 - RNA, 16 nt, Vaccinia virus
uguuguguacauguag

SEQ ID NO: 3266801 - RNA, 14 nt, Vaccinia virus
uacaaaaucaucug

SEQ ID NO: 3266802 - RNA, 16 nt, Vaccinia virus
uagauaaaguagaugu

SEQ ID NO: 3266803 - RNA, 21 nt, Vaccinia virus
agaaucuuaguugguccaaau

SEQ ID NO: 3266804 - RNA, 19 nt, Vaccinia virus
uuaaaucauuacuaauacu

SEQ ID NO: 3266805 - RNA, 12 nt, Vaccinia virus
ucauguaaccaa

SEQ ID NO: 3266806 - RNA, 22 nt, Vaccinia virus
acagaagauagcaaagagauga

SEQ ID NO: 3266807 - RNA, 17 nt, Vaccinia virus
guacuuugaugauuuuu

SEQ ID NO: 3266808 - RNA, 21 nt, Vaccinia virus
cggauaaugauagacaagaua

SEQ ID NO: 3266809 - RNA, 12 nt, Vaccinia virus
uuauguuucuuu

SEQ ID NO: 3266810 - RNA, 21 nt, Vaccinia virus
cugaaauccguagaaacaucu

SEQ ID NO: 3266811 - RNA, 15 nt, Vaccinia virus
uaguaugguuucaua

SEQ ID NO: 3266812 - RNA, 15 nt, Vaccinia virus
aaaucuugauuacaa

SEQ ID NO: 3266813 - RNA, 18 nt, Vaccinia virus
uggaaaagauaacuauug

SEQ ID NO: 3266814 - RNA, 18 nt, Vaccinia virus
agauuucugacaauuacu

SEQ ID NO: 3266815 - RNA, 20 nt, Vaccinia virus
acuuaugucacgaugaugga

SEQ ID NO: 3266816 - RNA, 23 nt, Vaccinia virus
acuagacuauuaauaagacugau

SEQ ID NO: 3266817 - RNA, 21 nt, Vaccinia virus
auuuugucuuuaaguauauac

SEQ ID NO: 3266818 - RNA, 22 nt, Vaccinia virus
aauuaguuuuucuuuacacaau

SEQ ID NO: 3266819 - RNA, 18 nt, Vaccinia virus
gaaauuugaaagaacuac

SEQ ID NO: 3266820 - RNA, 24 nt, Vaccinia virus
gcucuggcuauucgagaugaacau

SEQ ID NO: 3266821 - RNA, 18 nt, Vaccinia virus
auuucguuucuuaaauau

SEQ ID NO: 3266822 - RNA, 13 nt, Vaccinia virus
agucacuauuuuu

SEQ ID NO: 3266823 - RNA, 14 nt, Vaccinia virus
uaaucgauuuugca

SEQ ID NO: 3266824 - RNA, 15 nt, Vaccinia virus
auaucaugaaauaua

SEQ ID NO: 3266825 - RNA, 20 nt, Vaccinia virus
ugucucgcauaaacauuacu

SEQ ID NO: 3266826 - RNA, 13 nt, Vaccinia virus
aguauuuuucuaa

SEQ ID NO: 3266827 - RNA, 14 nt, Vaccinia virus
aauuccauaucuuu

SEQ ID NO: 3266828 - RNA, 22 nt, Vaccinia virus
agugggaugaaauccuauuuua

SEQ ID NO: 3266829 - RNA, 20 nt, Vaccinia virus
aacaauaucuuuaauacaga

SEQ ID NO: 3266830 - RNA, 15 nt, Vaccinia virus
aaugaagauccaaga

SEQ ID NO: 3266831 - RNA, 19 nt, Vaccinia virus
aggauggaauuaucaucaa

SEQ ID NO: 3266832 - RNA, 15 nt, Vaccinia virus
cacuguggaugugac

SEQ ID NO: 3266833 - RNA, 20 nt, Vaccinia virus
uccaucaugaucugguuuug

SEQ ID NO: 3266834 - RNA, 19 nt, Vaccinia virus
aauacuuauuaauggcucu

SEQ ID NO: 3266835 - RNA, 22 nt, Vaccinia virus
uacucuucaaaguuucugaaau

SEQ ID NO: 3266836 - RNA, 16 nt, Vaccinia virus
agaaauaauaagaaua

SEQ ID NO: 3266837 - RNA, 19 nt, Vaccinia virus
auuauucagauacgucuau

SEQ ID NO: 3266838 - RNA, 19 nt, Vaccinia virus
cauauuuauucuauggaug

SEQ ID NO: 3266839 - RNA, 22 nt, Vaccinia virus
gucuagagcaucaauguccugc

SEQ ID NO: 3266840 - RNA, 20 nt, Vaccinia virus
auuuggcuauuaaacaguau

SEQ ID NO: 3266841 - RNA, 17 nt, Vaccinia virus
aucaggauauaaagaaa

SEQ ID NO: 3266842 - RNA, 22 nt, Vaccinia virus
acgaucuuguuguuuauuuuca

SEQ ID NO: 3266843 - RNA, 13 nt, Vaccinia virus
aguauuuaacaag

SEQ ID NO: 3266844 - RNA, 15 nt, Vaccinia virus
auuucauauaauaga

SEQ ID NO: 3266845 - RNA, 18 nt, Vaccinia virus
gaauuaauaauaucucua

SEQ ID NO: 3266846 - RNA, 15 nt, Vaccinia virus
gaauguaucaagaau

SEQ ID NO: 3266847 - RNA, 17 nt, Vaccinia virus
accuguaguuuuaacug

SEQ ID NO: 3266848 - RNA, 17 nt, Vaccinia virus
ucaaauuuuuucuuuaa

SEQ ID NO: 3266849 - RNA, 15 nt, Vaccinia virus
acucucaaauuauua

SEQ ID NO: 3266850 - RNA, 17 nt, Vaccinia virus
auuucauucucugaaaa

SEQ ID NO: 3266851 - RNA, 16 nt, Vaccinia virus
uauguauuuaauauca

SEQ ID NO: 3266852 - RNA, 22 nt, Vaccinia virus
uucaacauuuuauggaaacuau

SEQ ID NO: 3266853 - RNA, 22 nt, Vaccinia virus
aguagaaaauacaacggauauc

SEQ ID NO: 3266854 - RNA, 19 nt, Vaccinia virus
cgauaacgugaaauauauu

SEQ ID NO: 3266855 - RNA, 21 nt, Vaccinia virus
acauguaaugauuuaaaaugu

SEQ ID NO: 3266856 - RNA, 16 nt, Vaccinia virus
gauaagguaaagugua

SEQ ID NO: 3266857 - RNA, 16 nt, Vaccinia virus
cuagauggaaauauug

SEQ ID NO: 3266858 - RNA, 16 nt, Vaccinia virus
uuaaugcaucauuaau

SEQ ID NO: 3266859 - RNA, 19 nt, Vaccinia virus
uuaauuuuagaaauacuua

SEQ ID NO: 3266860 - RNA, 22 nt, Vaccinia virus
uaaauccaguaauaucaugucu

SEQ ID NO: 3266861 - RNA, 15 nt, Vaccinia virus
aucguuaagaauugu

SEQ ID NO: 3266862 - RNA, 23 nt, Vaccinia virus
cauuguguguuagucuugcuauc

SEQ ID NO: 3266863 - RNA, 23 nt, Vaccinia virus
caucgauugugauuguauuuccu

SEQ ID NO: 3266864 - RNA, 16 nt, Vaccinia virus
auagcaauauguguaa

SEQ ID NO: 3266865 - RNA, 22 nt, Vaccinia virus
guucuuuccguacaacauacug

SEQ ID NO: 3266866 - RNA, 12 nt, Vaccinia virus
caaagaaauacg

SEQ ID NO: 3266867 - RNA, 16 nt, Vaccinia virus
uucuuaugaaacuugg

SEQ ID NO: 3266868 - RNA, 13 nt, Vaccinia virus
augaaacauuuaa

SEQ ID NO: 3266869 - RNA, 14 nt, Vaccinia virus
uaguauaauuauug

SEQ ID NO: 3266870 - RNA, 17 nt, Vaccinia virus
cauccaagucaauaucu

SEQ ID NO: 3266871 - RNA, 13 nt, Vaccinia virus
aaaaauucccauu

SEQ ID NO: 3266872 - RNA, 20 nt, Vaccinia virus
guagcaagauuuuuaaacaa

SEQ ID NO: 3266873 - RNA, 16 nt, Vaccinia virus
acuugauaauuaauaa

SEQ ID NO: 3266874 - RNA, 23 nt, Vaccinia virus
ucuaccacagcagaaucccauga

SEQ ID NO: 3266875 - RNA, 23 nt, Vaccinia virus
auaaucuaguaaaacuuucuagu

SEQ ID NO: 3266876 - RNA, 18 nt, Vaccinia virus
ucauacuuguuaguaguu

SEQ ID NO: 3266877 - RNA, 21 nt, Vaccinia virus
guucuaacgccgaucucugaa

SEQ ID NO: 3266878 - RNA, 15 nt, Vaccinia virus
uuauucucuacgagu

SEQ ID NO: 3266879 - RNA, 23 nt, Vaccinia virus
gauggugccaccguaguguauau

SEQ ID NO: 3266880 - RNA, 20 nt, Vaccinia virus
gauguauaauuuuuuuaguu

SEQ ID NO: 3266881 - RNA, 21 nt, Vaccinia virus
aucaccuauugccagguacau

SEQ ID NO: 3266882 - RNA, 20 nt, Vaccinia virus
caucuauuguuauauaacaa

SEQ ID NO: 3266883 - RNA, 23 nt, Vaccinia virus
gacucuucgucuucccaaaaugu

SEQ ID NO: 3266884 - RNA, 13 nt, Vaccinia virus
cuggaaaaguugu

SEQ ID NO: 3266885 - RNA, 16 nt, Vaccinia virus
cacgaaaaaugaugaa

SEQ ID NO: 3266886 - RNA, 20 nt, Vaccinia virus
uaucuuuaguaguguuuccc

SEQ ID NO: 3266887 - RNA, 19 nt, Vaccinia virus
uauccucguuuuguuuucu

SEQ ID NO: 3266888 - RNA, 14 nt, Vaccinia virus
gauuaauaauucau

SEQ ID NO: 3266889 - RNA, 13 nt, Vaccinia virus
aucggcucaaaga

SEQ ID NO: 3266890 - RNA, 21 nt, Vaccinia virus
uauaaacaugaauuuauuucu

SEQ ID NO: 3266891 - RNA, 22 nt, Vaccinia virus
aaccauugucuccuagcaauua

SEQ ID NO: 3266892 - RNA, 15 nt, Vaccinia virus
agcuaagucuauuau

SEQ ID NO: 3266893 - RNA, 12 nt, Vaccinia virus
uaacaaacaucu

SEQ ID NO: 3266894 - RNA, 21 nt, Vaccinia virus
gcaguuuuauuuuaucuuuua

SEQ ID NO: 3266895 - RNA, 22 nt, Vaccinia virus
cacaagccauuguugucugaaa

SEQ ID NO: 3266896 - RNA, 15 nt, Vaccinia virus
uuguaauuaaauuuu

SEQ ID NO: 3266897 - RNA, 17 nt, Vaccinia virus
ucuacaggcuucucauc

SEQ ID NO: 3266898 - RNA, 17 nt, Vaccinia virus
acaagauuccuuuucua

SEQ ID NO: 3266899 - RNA, 17 nt, Vaccinia virus
aauagcugaugauagaa

SEQ ID NO: 3266900 - RNA, 14 nt, Vaccinia virus
cacgaugaugauuu

SEQ ID NO: 3266901 - RNA, 21 nt, Vaccinia virus
cuauauaucgucucauagaga

SEQ ID NO: 3266902 - RNA, 14 nt, Vaccinia virus
agauugaaugccau

SEQ ID NO: 3266903 - RNA, 20 nt, Vaccinia virus
uagugguuauauucucugga

SEQ ID NO: 3266904 - RNA, 20 nt, Vaccinia virus
auacauguauuaaaauacuu

SEQ ID NO: 3266905 - RNA, 16 nt, Vaccinia virus
ucuacacauguaugua

SEQ ID NO: 3266906 - RNA, 19 nt, Vaccinia virus
auagaaauaaaaauuauua

SEQ ID NO: 3266907 - RNA, 21 nt, Vaccinia virus
ggacaucgacgccuuagaaau

SEQ ID NO: 3266908 - RNA, 16 nt, Vaccinia virus
ccaagugcuuaaauau

SEQ ID NO: 3266909 - RNA, 18 nt, Vaccinia virus
cuuggauuuuuuguacau

SEQ ID NO: 3266910 - RNA, 14 nt, Vaccinia virus
uugagaaaacauuu

SEQ ID NO: 3266911 - RNA, 22 nt, Vaccinia virus
agaacgaugucaaaauaugagu

SEQ ID NO: 3266912 - RNA, 15 nt, Vaccinia virus
uaguuaaugaaacau

SEQ ID NO: 3266913 - RNA, 21 nt, Vaccinia virus
cuaguuaagaacaugucuucu

SEQ ID NO: 3266914 - RNA, 16 nt, Vaccinia virus
uuuggcaauaaaguuu

SEQ ID NO: 3266915 - RNA, 23 nt, Vaccinia virus
augaauggaugguuuauguagac

SEQ ID NO: 3266916 - RNA, 17 nt, Vaccinia virus
cauuucucaaaugaaua

SEQ ID NO: 3266917 - RNA, 12 nt, Vaccinia virus
aauaaauagcuu

SEQ ID NO: 3266918 - RNA, 19 nt, Vaccinia virus
acacuuuuguaaaauauua

SEQ ID NO: 3266919 - RNA, 21 nt, Vaccinia virus
uucuuagcgaaugaugcagac

SEQ ID NO: 3266920 - RNA, 17 nt, Vaccinia virus
ucuuuagcuucugaaau

SEQ ID NO: 3266921 - RNA, 16 nt, Vaccinia virus
uguauaacaaauacag

SEQ ID NO: 3266922 - RNA, 23 nt, Vaccinia virus
agaagauguuagaaaaaaugaug

SEQ ID NO: 3266923 - RNA, 19 nt, Vaccinia virus
agauauuuccauuuaucua

SEQ ID NO: 3266924 - RNA, 16 nt, Vaccinia virus
uaauuacauccuugga

SEQ ID NO: 3266925 - RNA, 22 nt, Vaccinia virus
ccaaaaaguguuuggcaauaaa

SEQ ID NO: 3266926 - RNA, 18 nt, Vaccinia virus
acugauuaauuauuugcc

SEQ ID NO: 3266927 - RNA, 15 nt, Vaccinia virus
uaucguaucugucaa

SEQ ID NO: 3266928 - RNA, 20 nt, Vaccinia virus
uguaucauaauauuaaucau

SEQ ID NO: 3266929 - RNA, 15 nt, Vaccinia virus
aacagugaguuuauc

SEQ ID NO: 3266930 - RNA, 22 nt, Vaccinia virus
uaaaguauuugauaaaucucuu

SEQ ID NO: 3266931 - RNA, 19 nt, Vaccinia virus
caugccgugguguaacaau

SEQ ID NO: 3266932 - RNA, 20 nt, Vaccinia virus
acgaaaguauagcuaaugau

SEQ ID NO: 3266933 - RNA, 20 nt, Vaccinia virus
gauacacucucaauauacua

SEQ ID NO: 3266934 - RNA, 12 nt, Vaccinia virus
ugauaaaccauc

SEQ ID NO: 3266935 - RNA, 20 nt, Vaccinia virus
acacucauaaauaaaaauga

SEQ ID NO: 3266936 - RNA, 16 nt, Vaccinia virus
auaguagaauuaaugu

SEQ ID NO: 3266937 - RNA, 16 nt, Vaccinia virus
auagauaaugauauau

SEQ ID NO: 3266938 - RNA, 21 nt, Vaccinia virus
uuucaauauugaaaauacuaa

SEQ ID NO: 3266939 - RNA, 14 nt, Vaccinia virus
aucuacgaauguau

SEQ ID NO: 3266940 - RNA, 19 nt, Vaccinia virus
caaugacauggaaauaucu

SEQ ID NO: 3266941 - RNA, 20 nt, Vaccinia virus
uuaaugucaggaaauguaua

SEQ ID NO: 3266942 - RNA, 16 nt, Vaccinia virus
accauauuuucuggaa

SEQ ID NO: 3266943 - RNA, 12 nt, Vaccinia virus
cauuugaugcac

SEQ ID NO: 3266944 - RNA, 16 nt, Vaccinia virus
gaagaugcgcauucca

SEQ ID NO: 3266945 - RNA, 23 nt, Vaccinia virus
cuauaauguaguaaauauaaaau

SEQ ID NO: 3266946 - RNA, 18 nt, Vaccinia virus
ucaaggaagaagaugcua

SEQ ID NO: 3266947 - RNA, 13 nt, Vaccinia virus
ugacaaaauuaaa

SEQ ID NO: 3266948 - RNA, 23 nt, Vaccinia virus
ugauagauacgcauuuucuggag

SEQ ID NO: 3266949 - RNA, 20 nt, Vaccinia virus
cuuugguaaugaaauuauuc

SEQ ID NO: 3266950 - RNA, 15 nt, Vaccinia virus
gaccuguugcacaau

SEQ ID NO: 3266951 - RNA, 13 nt, Vaccinia virus
caucaucuggaau

SEQ ID NO: 3266952 - RNA, 14 nt, Vaccinia virus
aaaauaguucugua

SEQ ID NO: 3266953 - RNA, 23 nt, Vaccinia virus
ccagaucuauugacuauaacucc

SEQ ID NO: 3266954 - RNA, 23 nt, Vaccinia virus
acuuuaagcuaaaauauuuucua

SEQ ID NO: 3266955 - RNA, 15 nt, Vaccinia virus
acaauaucaauaaau

SEQ ID NO: 3266956 - RNA, 18 nt, Vaccinia virus
ucucagaaucaaauauag

SEQ ID NO: 3266957 - RNA, 16 nt, Vaccinia virus
aaucggagaauguuuc

SEQ ID NO: 3266958 - RNA, 21 nt, Vaccinia virus
uguuucaucuaucauagauuu

SEQ ID NO: 3266959 - RNA, 13 nt, Vaccinia virus
aaugaauacagug

SEQ ID NO: 3266960 - RNA, 21 nt, Vaccinia virus
ccuuuggugaauccaucucua

SEQ ID NO: 3266961 - RNA, 14 nt, Vaccinia virus
aacuccuggauaac

SEQ ID NO: 3266962 - RNA, 15 nt, Vaccinia virus
aucuauauauaccuu

SEQ ID NO: 3266963 - RNA, 18 nt, Vaccinia virus
agacguggagaucuagaa

SEQ ID NO: 3266964 - RNA, 13 nt, Vaccinia virus
aaaauugcauuug

SEQ ID NO: 3266965 - RNA, 13 nt, Vaccinia virus
uuaccgcauuaau

SEQ ID NO: 3266966 - RNA, 14 nt, Vaccinia virus
ucgucuaaaguuua

SEQ ID NO: 3266967 - RNA, 17 nt, Vaccinia virus
aguauaccaaacauagu

SEQ ID NO: 3266968 - RNA, 22 nt, Vaccinia virus
auuacaagacuacaaagaaugu

SEQ ID NO: 3266969 - RNA, 16 nt, Vaccinia virus
uuuauaccuuguaauu

SEQ ID NO: 3266970 - RNA, 14 nt, Vaccinia virus
aaucagaguuuuua

SEQ ID NO: 3266971 - RNA, 11 nt, Vaccinia virus
cuguaaaugau

SEQ ID NO: 3266972 - RNA, 15 nt, Vaccinia virus
uuccuggagauaucc

SEQ ID NO: 3266973 - RNA, 17 nt, Vaccinia virus
aguacauggaugauaua

SEQ ID NO: 3266974 - RNA, 21 nt, Vaccinia virus
auauuuggaaucagacacaga

SEQ ID NO: 3266975 - RNA, 19 nt, Vaccinia virus
auaaaauuuuaauuaaugu

SEQ ID NO: 3266976 - RNA, 19 nt, Vaccinia virus
caauuguuugauauauaau

SEQ ID NO: 3266977 - RNA, 18 nt, Vaccinia virus
auguuuugauuucaauuu

SEQ ID NO: 3266978 - RNA, 19 nt, Vaccinia virus
ucuaugaucugucuuuuaa

SEQ ID NO: 3266979 - RNA, 15 nt, Vaccinia virus
augaaacaugcauaa

SEQ ID NO: 3266980 - RNA, 18 nt, Vaccinia virus
acuauaauauaaucuaga

SEQ ID NO: 3266981 - RNA, 17 nt, Vaccinia virus
auaucaugaagagaugu

SEQ ID NO: 3266982 - RNA, 17 nt, Vaccinia virus
uugauaggaucuauaau

SEQ ID NO: 3266983 - RNA, 20 nt, Vaccinia virus
aauccauucucucaaucacu

SEQ ID NO: 3266984 - RNA, 17 nt, Vaccinia virus
aaaucuauauuguuuaa

SEQ ID NO: 3266985 - RNA, 15 nt, Vaccinia virus
aguaccuacacuauu

SEQ ID NO: 3266986 - RNA, 17 nt, Vaccinia virus
aucaauuucaaaaagag

SEQ ID NO: 3266987 - RNA, 19 nt, Vaccinia virus
agaaucaaauauagauuuu

SEQ ID NO: 3266988 - RNA, 23 nt, Vaccinia virus
acuucuagcgcugauuuaacuaa

SEQ ID NO: 3266989 - RNA, 20 nt, Vaccinia virus
aagauaucuacuagaaagau

SEQ ID NO: 3266990 - RNA, 13 nt, Vaccinia virus
uaaauuuauucuc

SEQ ID NO: 3266991 - RNA, 21 nt, Vaccinia virus
gaaccaguaccagaucuuaau

SEQ ID NO: 3266992 - RNA, 21 nt, Vaccinia virus
aucaugaauggauuuaucauc

SEQ ID NO: 3266993 - RNA, 16 nt, Vaccinia virus
aguugauaauaauaca

SEQ ID NO: 3266994 - RNA, 14 nt, Vaccinia virus
uauguuucaaucau

SEQ ID NO: 3266995 - RNA, 14 nt, Vaccinia virus
cgugauagcucccg

SEQ ID NO: 3266996 - RNA, 12 nt, Vaccinia virus
auuuuuaucaua

SEQ ID NO: 3266997 - RNA, 20 nt, Vaccinia virus
aacgaguucaaauaugaaau

SEQ ID NO: 3266998 - RNA, 18 nt, Vaccinia virus
agagaacauauaaaugua

SEQ ID NO: 3266999 - RNA, 16 nt, Vaccinia virus
guacauaaguuguaca

SEQ ID NO: 3267000 - RNA, 13 nt, Vaccinia virus
aucaacaauuuug

SEQ ID NO: 3267001 - RNA, 18 nt, Vaccinia virus
gauauagaguauaaugau

SEQ ID NO: 3267002 - RNA, 18 nt, Vaccinia virus
cuaaaucgcuuguuuaga

SEQ ID NO: 3267003 - RNA, 14 nt, Vaccinia virus
gcuugaaaauggac

SEQ ID NO: 3267004 - RNA, 16 nt, Vaccinia virus
ccacuuugguaaaauc

SEQ ID NO: 3267005 - RNA, 15 nt, Vaccinia virus
acauaaauaauucua

SEQ ID NO: 3267006 - RNA, 14 nt, Vaccinia virus
uauuagucaauggu

SEQ ID NO: 3267007 - RNA, 15 nt, Vaccinia virus
caauaucguagaauu

SEQ ID NO: 3267008 - RNA, 19 nt, Vaccinia virus
guuaaaaaauuaaguguua

SEQ ID NO: 3267009 - RNA, 18 nt, Vaccinia virus
aauaguauacgcagaaaa

SEQ ID NO: 3267010 - RNA, 13 nt, Vaccinia virus
acguuaaacauua

SEQ ID NO: 3267011 - RNA, 17 nt, Vaccinia virus
caagacggauaagaaau

SEQ ID NO: 3267012 - RNA, 17 nt, Vaccinia virus
aucaauuuaucauauau

SEQ ID NO: 3267013 - RNA, 16 nt, Vaccinia virus
ucaauaguuucauaau

SEQ ID NO: 3267014 - RNA, 15 nt, Vaccinia virus
uauacaagauugaaa

SEQ ID NO: 3267015 - RNA, 17 nt, Vaccinia virus
uaaugcuuaaacuauca

SEQ ID NO: 3267016 - RNA, 12 nt, Vaccinia virus
aaauuuagauua

SEQ ID NO: 3267017 - RNA, 12 nt, Vaccinia virus
auuauuagaaau

SEQ ID NO: 3267018 - RNA, 22 nt, Vaccinia virus
guauuuuuuauggcaaacuuua

SEQ ID NO: 3267019 - RNA, 15 nt, Vaccinia virus
ugcgugacagcacag

SEQ ID NO: 3267020 - RNA, 22 nt, Vaccinia virus
gaauaucugucuuauauuuaua

SEQ ID NO: 3267021 - RNA, 16 nt, Vaccinia virus
ugauacguauauacac

SEQ ID NO: 3267022 - RNA, 17 nt, Vaccinia virus
auccggauauaauauau

SEQ ID NO: 3267023 - RNA, 13 nt, Vaccinia virus
uuacuauguaguu

SEQ ID NO: 3267024 - RNA, 17 nt, Vaccinia virus
acgauauauaguaauga

SEQ ID NO: 3267025 - RNA, 15 nt, Vaccinia virus
auuaauagaaugaag

SEQ ID NO: 3267026 - RNA, 17 nt, Vaccinia virus
uaguuguggaaauacuu

SEQ ID NO: 3267027 - RNA, 15 nt, Vaccinia virus
caaacuuaacagcuc

SEQ ID NO: 3267028 - RNA, 20 nt, Vaccinia virus
ugagaguuuuauauguagca

SEQ ID NO: 3267029 - RNA, 13 nt, Vaccinia virus
agcacagaacaca

SEQ ID NO: 3267030 - RNA, 21 nt, Vaccinia virus
ccauauaccauuaauuguuua

SEQ ID NO: 3267031 - RNA, 21 nt, Vaccinia virus
aaaugugucguaguuagcaag

SEQ ID NO: 3267032 - RNA, 17 nt, Vaccinia virus
aaagaauaauccuauau

SEQ ID NO: 3267033 - RNA, 22 nt, Vaccinia virus
gauuacagucuuuaugauucau

SEQ ID NO: 3267034 - RNA, 16 nt, Vaccinia virus
caucagacaaugcuuu

SEQ ID NO: 3267035 - RNA, 17 nt, Vaccinia virus
uagauuuguaucuccuu

SEQ ID NO: 3267036 - RNA, 19 nt, Vaccinia virus
auguucugauuuuaucuuu

SEQ ID NO: 3267037 - RNA, 15 nt, Vaccinia virus
uaugaagaugauguu

SEQ ID NO: 3267038 - RNA, 15 nt, Vaccinia virus
acuacuaacauggau

SEQ ID NO: 3267039 - RNA, 15 nt, Vaccinia virus
ccuggaaaaauacuu

SEQ ID NO: 3267040 - RNA, 16 nt, Vaccinia virus
cagguauacuguucag

SEQ ID NO: 3267041 - RNA, 21 nt, Vaccinia virus
auaaacuccguguuuaugaug

SEQ ID NO: 3267042 - RNA, 19 nt, Vaccinia virus
cuuuccaaucaauaauuuu

SEQ ID NO: 3267043 - RNA, 17 nt, Vaccinia virus
auuuguauccuuaucua

SEQ ID NO: 3267044 - RNA, 13 nt, Vaccinia virus
agcaguuuauuau

SEQ ID NO: 3267045 - RNA, 19 nt, Vaccinia virus
acucuagagacuaugauug

SEQ ID NO: 3267046 - RNA, 22 nt, Vaccinia virus
cccaauagaauaguauucucag

SEQ ID NO: 3267047 - RNA, 22 nt, Vaccinia virus
uagacaauacuuuuacggaaaa

SEQ ID NO: 3267048 - RNA, 20 nt, Vaccinia virus
guaaugauaaaaucaaucgu

SEQ ID NO: 3267049 - RNA, 14 nt, Vaccinia virus
cuaguuuguuuaua

SEQ ID NO: 3267050 - RNA, 18 nt, Vaccinia virus
guuacaauuuguuaaaaa

SEQ ID NO: 3267051 - RNA, 16 nt, Vaccinia virus
aucuuuugaaaauaua

SEQ ID NO: 3267052 - RNA, 14 nt, Vaccinia virus
cauaacgcauaauu

SEQ ID NO: 3267053 - RNA, 17 nt, Vaccinia virus
uauuggugcauuaauaa

SEQ ID NO: 3267054 - RNA, 12 nt, Vaccinia virus
cauauuaaacau

SEQ ID NO: 3267055 - RNA, 21 nt, Vaccinia virus
aaaucaaacacaagaucuucu

SEQ ID NO: 3267056 - RNA, 18 nt, Vaccinia virus
aaauuaugaaaaaaagau

SEQ ID NO: 3267057 - RNA, 17 nt, Vaccinia virus
guaaccaaauacauauu

SEQ ID NO: 3267058 - RNA, 23 nt, Vaccinia virus
cauucgcggaacuacauaguaaa

SEQ ID NO: 3267059 - RNA, 12 nt, Vaccinia virus
aauucuuucuca

SEQ ID NO: 3267060 - RNA, 16 nt, Vaccinia virus
uuagaauauauuuucu

SEQ ID NO: 3267061 - RNA, 19 nt, Vaccinia virus
ugcuugcuagacaccuuuu

SEQ ID NO: 3267062 - RNA, 16 nt, Vaccinia virus
uguuucuuacauauuu

SEQ ID NO: 3267063 - RNA, 15 nt, Vaccinia virus
auagcaucaauaauu

SEQ ID NO: 3267064 - RNA, 12 nt, Vaccinia virus
cuauaacuucua

SEQ ID NO: 3267065 - RNA, 20 nt, Vaccinia virus
cuaguucaccuucuauagau

SEQ ID NO: 3267066 - RNA, 22 nt, Vaccinia virus
auuuuauaacguuaguuaauaa

SEQ ID NO: 3267067 - RNA, 21 nt, Vaccinia virus
guucuaucuucuaaaaaaucu

SEQ ID NO: 3267068 - RNA, 19 nt, Vaccinia virus
ucuuuguccauuauuucua

SEQ ID NO: 3267069 - RNA, 23 nt, Vaccinia virus
cugaaauacgauucuauauaucu

SEQ ID NO: 3267070 - RNA, 14 nt, Vaccinia virus
ugcauguuugcucu

SEQ ID NO: 3267071 - RNA, 15 nt, Vaccinia virus
aucuaaaaucauaau

SEQ ID NO: 3267072 - RNA, 20 nt, Vaccinia virus
uacagauguuacaaauguag

SEQ ID NO: 3267073 - RNA, 20 nt, Vaccinia virus
uauacagugaacacacaaua

SEQ ID NO: 3267074 - RNA, 20 nt, Vaccinia virus
cuguaucaaccggauuuaaa

SEQ ID NO: 3267075 - RNA, 16 nt, Vaccinia virus
auuaaacauuguucau

SEQ ID NO: 3267076 - RNA, 15 nt, Vaccinia virus
acugauuaacaaaug

SEQ ID NO: 3267077 - RNA, 21 nt, Vaccinia virus
agacuauaccuagagcuauuu

SEQ ID NO: 3267078 - RNA, 24 nt, Vaccinia virus
ucucauaauguaaagauauucuaa

SEQ ID NO: 3267079 - RNA, 13 nt, Vaccinia virus
aucacuaaaauaa

SEQ ID NO: 3267080 - RNA, 17 nt, Vaccinia virus
augaugaaauggauaau

SEQ ID NO: 3267081 - RNA, 16 nt, Vaccinia virus
acuacugaaaaaagug

SEQ ID NO: 3267082 - RNA, 17 nt, Vaccinia virus
cucugauccguauccau

SEQ ID NO: 3267083 - RNA, 17 nt, Vaccinia virus
auccuauacucugaaag

SEQ ID NO: 3267084 - RNA, 19 nt, Vaccinia virus
caugaucaagagugauuua

SEQ ID NO: 3267085 - RNA, 20 nt, Vaccinia virus
ucaauguguguaacuccaga

SEQ ID NO: 3267086 - RNA, 21 nt, Vaccinia virus
acgcguuuuaugaaugaugau

SEQ ID NO: 3267087 - RNA, 14 nt, Vaccinia virus
uuaugagaauagau

SEQ ID NO: 3267088 - RNA, 16 nt, Vaccinia virus
auaacguuagccacca

SEQ ID NO: 3267089 - RNA, 13 nt, Vaccinia virus
auucuauacuuaa

SEQ ID NO: 3267090 - RNA, 16 nt, Vaccinia virus
augauccuauucuaaa

SEQ ID NO: 3267091 - RNA, 16 nt, Vaccinia virus
uuauauagauguagug

SEQ ID NO: 3267092 - RNA, 19 nt, Vaccinia virus
cucagcgauagcucuucua

SEQ ID NO: 3267093 - RNA, 17 nt, Vaccinia virus
cauguuuaucuauuuug

SEQ ID NO: 3267094 - RNA, 19 nt, Vaccinia virus
aucuauauugcuacauaau

SEQ ID NO: 3267095 - RNA, 12 nt, Vaccinia virus
uagaauaugucu

SEQ ID NO: 3267096 - RNA, 15 nt, Vaccinia virus
ugagcaauucccaag

SEQ ID NO: 3267097 - RNA, 23 nt, Vaccinia virus
agcguauaucucuauuaaaugcg

SEQ ID NO: 3267098 - RNA, 22 nt, Vaccinia virus
agaacaacgaaauuauacuaga

SEQ ID NO: 3267099 - RNA, 15 nt, Vaccinia virus
ugaaaaaaauacuua

SEQ ID NO: 3267100 - RNA, 18 nt, Vaccinia virus
aucugcacuaauuaacag

SEQ ID NO: 3267101 - RNA, 16 nt, Vaccinia virus
auaaaccauuguauaa

SEQ ID NO: 3267102 - RNA, 13 nt, Vaccinia virus
uucauucguaaau

SEQ ID NO: 3267103 - RNA, 14 nt, Vaccinia virus
uuaacguauaaaug

SEQ ID NO: 3267104 - RNA, 15 nt, Vaccinia virus
augauuuagaaauga

SEQ ID NO: 3267105 - RNA, 13 nt, Vaccinia virus
acacauauacgaa

SEQ ID NO: 3267106 - RNA, 17 nt, Vaccinia virus
auugacgauucgucucu

SEQ ID NO: 3267107 - RNA, 18 nt, Vaccinia virus
acaauuacguaaugaaga

SEQ ID NO: 3267108 - RNA, 15 nt, Vaccinia virus
gaaaaucaucaucua

SEQ ID NO: 3267109 - RNA, 16 nt, Vaccinia virus
cgaauaccauggauug

SEQ ID NO: 3267110 - RNA, 14 nt, Vaccinia virus
ugaauuugauaaga

SEQ ID NO: 3267111 - RNA, 18 nt, Vaccinia virus
acagauguuacaaaugua

SEQ ID NO: 3267112 - RNA, 14 nt, Vaccinia virus
aacuccucuagaug

SEQ ID NO: 3267113 - RNA, 19 nt, Vaccinia virus
auuuaucgguuuuggugaa

SEQ ID NO: 3267114 - RNA, 19 nt, Vaccinia virus
uagaugccauaucauacau

SEQ ID NO: 3267115 - RNA, 21 nt, Vaccinia virus
auuaugaaaaaguaaaugaug

SEQ ID NO: 3267116 - RNA, 17 nt, Vaccinia virus
auagagguaauacuuuu

SEQ ID NO: 3267117 - RNA, 12 nt, Vaccinia virus
aaaaauacuuac

SEQ ID NO: 3267118 - RNA, 22 nt, Vaccinia virus
uuagaucccggauacuggauau

SEQ ID NO: 3267119 - RNA, 19 nt, Vaccinia virus
uagagugagucuagaauuc

SEQ ID NO: 3267120 - RNA, 24 nt, Vaccinia virus
uuaaaggauggugaaauuauugca

SEQ ID NO: 3267121 - RNA, 13 nt, Vaccinia virus
agacgcuuauuau

SEQ ID NO: 3267122 - RNA, 19 nt, Vaccinia virus
guauaacauucuuaaacaa

SEQ ID NO: 3267123 - RNA, 13 nt, Vaccinia virus
gauacaauacuua

SEQ ID NO: 3267124 - RNA, 17 nt, Vaccinia virus
uugauucgcuucuuuaa

SEQ ID NO: 3267125 - RNA, 14 nt, Vaccinia virus
uaucauuuacuaga

SEQ ID NO: 3267126 - RNA, 18 nt, Vaccinia virus
agcgcauaauaaauuaua

SEQ ID NO: 3267127 - RNA, 12 nt, Vaccinia virus
auuuaaauccua

SEQ ID NO: 3267128 - RNA, 19 nt, Vaccinia virus
guaucgacgguaaauggaa

SEQ ID NO: 3267129 - RNA, 16 nt, Vaccinia virus
agguuaaauagaaugc

SEQ ID NO: 3267130 - RNA, 14 nt, Vaccinia virus
aauguuaacaaaaa

SEQ ID NO: 3267131 - RNA, 23 nt, Vaccinia virus
auauagagagcuucaucaauaga

SEQ ID NO: 3267132 - RNA, 15 nt, Vaccinia virus
aaguaaacaauuuua

SEQ ID NO: 3267133 - RNA, 21 nt, Vaccinia virus
uaauuuacaaaaauuuaaaau

SEQ ID NO: 3267134 - RNA, 19 nt, Vaccinia virus
ucacaacaucuauaaaagu

SEQ ID NO: 3267135 - RNA, 13 nt, Vaccinia virus
guuaaaauuccua

SEQ ID NO: 3267136 - RNA, 22 nt, Vaccinia virus
agaccaagcuucguuguagaaa

SEQ ID NO: 3267137 - RNA, 15 nt, Vaccinia virus
ucaguaucuucuuua

SEQ ID NO: 3267138 - RNA, 19 nt, Vaccinia virus
gaagaaugccuacauauca

SEQ ID NO: 3267139 - RNA, 20 nt, Vaccinia virus
ucuaauugggacauuauguu

SEQ ID NO: 3267140 - RNA, 19 nt, Vaccinia virus
gaaaaaaaagcuauuauca

SEQ ID NO: 3267141 - RNA, 21 nt, Vaccinia virus
uacgaauaucguucucuaaau

SEQ ID NO: 3267142 - RNA, 15 nt, Vaccinia virus
acaagaucuguaaau

SEQ ID NO: 3267143 - RNA, 14 nt, Vaccinia virus
uauucauucaaugu

SEQ ID NO: 3267144 - RNA, 21 nt, Vaccinia virus
uaaauauauuuacaauuauug

SEQ ID NO: 3267145 - RNA, 22 nt, Vaccinia virus
uauuguauuaauuaugaaaaac

SEQ ID NO: 3267146 - RNA, 20 nt, Vaccinia virus
cuaauuugauauaaugaauu

SEQ ID NO: 3267147 - RNA, 14 nt, Vaccinia virus
agaggccaucugga

SEQ ID NO: 3267148 - RNA, 19 nt, Vaccinia virus
uuccgaaguaguagucuuu

SEQ ID NO: 3267149 - RNA, 20 nt, Vaccinia virus
uaguauaucuacacauguau

SEQ ID NO: 3267150 - RNA, 14 nt, Vaccinia virus
guuaugagggaaaa

SEQ ID NO: 3267151 - RNA, 14 nt, Vaccinia virus
uacaugucuaaugu

SEQ ID NO: 3267152 - RNA, 14 nt, Vaccinia virus
ccaacaauuguuua

SEQ ID NO: 3267153 - RNA, 13 nt, Vaccinia virus
augucuacauuau

SEQ ID NO: 3267154 - RNA, 20 nt, Vaccinia virus
aacagaugguagaacaaugu

SEQ ID NO: 3267155 - RNA, 16 nt, Vaccinia virus
aguauuugauaaaaca

SEQ ID NO: 3267156 - RNA, 20 nt, Vaccinia virus
gaauccaucucuauguuuca

SEQ ID NO: 3267157 - RNA, 14 nt, Vaccinia virus
gcgaauuacucugu

SEQ ID NO: 3267158 - RNA, 20 nt, Vaccinia virus
auuuauugcggauagcagua

SEQ ID NO: 3267159 - RNA, 18 nt, Vaccinia virus
auuagucacgacugaaau

SEQ ID NO: 3267160 - RNA, 15 nt, Vaccinia virus
auggagcaaacauua

SEQ ID NO: 3267161 - RNA, 23 nt, Vaccinia virus
auauagaugcagaaguaaugaag

SEQ ID NO: 3267162 - RNA, 14 nt, Vaccinia virus
gaucauucuuuuag

SEQ ID NO: 3267163 - RNA, 18 nt, Vaccinia virus
aacgauaacacaaaaugu

SEQ ID NO: 3267164 - RNA, 21 nt, Vaccinia virus
ugauauuagccuuuacagaua

SEQ ID NO: 3267165 - RNA, 17 nt, Vaccinia virus
aacacugguaacuauau

SEQ ID NO: 3267166 - RNA, 15 nt, Vaccinia virus
aaagaucaaggaaau

SEQ ID NO: 3267167 - RNA, 15 nt, Vaccinia virus
cagguuauccagaag

SEQ ID NO: 3267168 - RNA, 18 nt, Vaccinia virus
gcaauuuguuaauaagau

SEQ ID NO: 3267169 - RNA, 19 nt, Vaccinia virus
uaaacuguuuauuaaugau

SEQ ID NO: 3267170 - RNA, 20 nt, Vaccinia virus
uauauuaucaaaauuuggaa

SEQ ID NO: 3267171 - RNA, 12 nt, Vaccinia virus
aucaguaucuuc

SEQ ID NO: 3267172 - RNA, 14 nt, Vaccinia virus
cucuauauuacaaa

SEQ ID NO: 3267173 - RNA, 22 nt, Vaccinia virus
uuaauaagaaugacuccuaugu

SEQ ID NO: 3267174 - RNA, 23 nt, Vaccinia virus
uaugcuuuuauuuuuggaaugau

SEQ ID NO: 3267175 - RNA, 21 nt, Vaccinia virus
ggacagauacuacuauuuguc

SEQ ID NO: 3267176 - RNA, 19 nt, Vaccinia virus
auuugucuucuuucuuuua

SEQ ID NO: 3267177 - RNA, 13 nt, Vaccinia virus
cugcaauaaaaca

SEQ ID NO: 3267178 - RNA, 18 nt, Vaccinia virus
acaaguaggauuuuucca

SEQ ID NO: 3267179 - RNA, 14 nt, Vaccinia virus
auauuuuuuucuau

SEQ ID NO: 3267180 - RNA, 13 nt, Vaccinia virus
auuacuacguaaa

SEQ ID NO: 3267181 - RNA, 13 nt, Vaccinia virus
aguuauuaaugau

SEQ ID NO: 3267182 - RNA, 14 nt, Vaccinia virus
aaucauuaaaugau

SEQ ID NO: 3267183 - RNA, 21 nt, Vaccinia virus
ucuaccagccuacauuuugcu

SEQ ID NO: 3267184 - RNA, 21 nt, Vaccinia virus
gcauaguaacucauaauugcu

SEQ ID NO: 3267185 - RNA, 17 nt, Vaccinia virus
aauuuuaauuaauguaa

SEQ ID NO: 3267186 - RNA, 16 nt, Vaccinia virus
aaauuuuuuucauuga

SEQ ID NO: 3267187 - RNA, 16 nt, Vaccinia virus
aguaacuauguaaaug

SEQ ID NO: 3267188 - RNA, 21 nt, Vaccinia virus
uuuuuauuacauguuuucaua

SEQ ID NO: 3267189 - RNA, 20 nt, Vaccinia virus
aauaacuauguuuuaaaaau

SEQ ID NO: 3267190 - RNA, 22 nt, Vaccinia virus
acauuguuuauggaugccacug

SEQ ID NO: 3267191 - RNA, 24 nt, Vaccinia virus
agauuaucuaguuagaacuaucau

SEQ ID NO: 3267192 - RNA, 23 nt, Vaccinia virus
uaauguagaagaucauacagaca

SEQ ID NO: 3267193 - RNA, 17 nt, Vaccinia virus
ugugaagguuuagaugu

SEQ ID NO: 3267194 - RNA, 18 nt, Vaccinia virus
augauucgucuacauguu

SEQ ID NO: 3267195 - RNA, 16 nt, Vaccinia virus
aagucacuaacugaua

SEQ ID NO: 3267196 - RNA, 23 nt, Vaccinia virus
ggagaauacaaagcguacagaua

SEQ ID NO: 3267197 - RNA, 22 nt, Vaccinia virus
ccaucugucauauuuagauuuu

SEQ ID NO: 3267198 - RNA, 19 nt, Vaccinia virus
guuuuacguuauuaaucau

SEQ ID NO: 3267199 - RNA, 13 nt, Vaccinia virus
uucuauuauuaca

SEQ ID NO: 3267200 - RNA, 15 nt, Vaccinia virus
auagcgaugauuauc

SEQ ID NO: 3267201 - RNA, 21 nt, Vaccinia virus
agaauauaaccacuacaucau

SEQ ID NO: 3267202 - RNA, 23 nt, Vaccinia virus
aaauauauuuacaauuauuggaa

SEQ ID NO: 3267203 - RNA, 13 nt, Vaccinia virus
aaucuaaugauga

SEQ ID NO: 3267204 - RNA, 20 nt, Vaccinia virus
uacuuguuaguaguuagaua

SEQ ID NO: 3267205 - RNA, 18 nt, Vaccinia virus
uaaauuacacauuuccaa

SEQ ID NO: 3267206 - RNA, 22 nt, Vaccinia virus
ugucuuagaaggaguguuuucu

SEQ ID NO: 3267207 - RNA, 14 nt, Vaccinia virus
acagaccaaauaua

SEQ ID NO: 3267208 - RNA, 17 nt, Vaccinia virus
agauuucugacaauuac

SEQ ID NO: 3267209 - RNA, 16 nt, Vaccinia virus
accaucuaucaaacaa

SEQ ID NO: 3267210 - RNA, 15 nt, Vaccinia virus
cagaauagagccaaa

SEQ ID NO: 3267211 - RNA, 12 nt, Vaccinia virus
uguaagaaauaa

SEQ ID NO: 3267212 - RNA, 19 nt, Vaccinia virus
uauucgucccuacuauaaa

SEQ ID NO: 3267213 - RNA, 19 nt, Vaccinia virus
auaauauuuuaauagauua

SEQ ID NO: 3267214 - RNA, 22 nt, Vaccinia virus
ucuugauuaccuuacucaugau

SEQ ID NO: 3267215 - RNA, 13 nt, Vaccinia virus
ucgucuacuauuc

SEQ ID NO: 3267216 - RNA, 15 nt, Vaccinia virus
agaaacagaacuauu

SEQ ID NO: 3267217 - RNA, 14 nt, Vaccinia virus
augaaaaaaaacac

SEQ ID NO: 3267218 - RNA, 14 nt, Vaccinia virus
cuggauauuacaaa

SEQ ID NO: 3267219 - RNA, 21 nt, Vaccinia virus
ugauaugauuaucguuuucau

SEQ ID NO: 3267220 - RNA, 13 nt, Vaccinia virus
auaaaaauacuua

SEQ ID NO: 3267221 - RNA, 21 nt, Vaccinia virus
cagaaauauaugagauguagu

SEQ ID NO: 3267222 - RNA, 17 nt, Vaccinia virus
ucuagaauaaguuucau

SEQ ID NO: 3267223 - RNA, 17 nt, Vaccinia virus
aucuaauggauaaacug

SEQ ID NO: 3267224 - RNA, 16 nt, Vaccinia virus
agaucuuaagaaaauu

SEQ ID NO: 3267225 - RNA, 18 nt, Vaccinia virus
acuagucgcguuaauagu

SEQ ID NO: 3267226 - RNA, 18 nt, Vaccinia virus
aguuaaugcgucuaaaac

SEQ ID NO: 3267227 - RNA, 14 nt, Vaccinia virus
aaauaauaauggaa

SEQ ID NO: 3267228 - RNA, 23 nt, Vaccinia virus
uuggaggcgaugaucuuaauuuu

SEQ ID NO: 3267229 - RNA, 11 nt, Vaccinia virus
aaauuuucuaa

SEQ ID NO: 3267230 - RNA, 17 nt, Vaccinia virus
uccuuaucuucauagaa

SEQ ID NO: 3267231 - RNA, 18 nt, Vaccinia virus
aaaugucaugauuaguau

SEQ ID NO: 3267232 - RNA, 19 nt, Vaccinia virus
auuaaacguacauuuucca

SEQ ID NO: 3267233 - RNA, 16 nt, Vaccinia virus
auacacauuuaauaaa

SEQ ID NO: 3267234 - RNA, 22 nt, Vaccinia virus
aaaaucuuuguucuaaaaacug

SEQ ID NO: 3267235 - RNA, 15 nt, Vaccinia virus
uuuauaaacaaaaau

SEQ ID NO: 3267236 - RNA, 17 nt, Vaccinia virus
auuucacgaaaaaugau

SEQ ID NO: 3267237 - RNA, 19 nt, Vaccinia virus
agauauacgcuaucuauau

SEQ ID NO: 3267238 - RNA, 23 nt, Vaccinia virus
gcuucaaucgcgcguuagaaauu

SEQ ID NO: 3267239 - RNA, 16 nt, Vaccinia virus
ugguaucaagaaguau

SEQ ID NO: 3267240 - RNA, 22 nt, Vaccinia virus
caacuucaucaugaguuaaaua

SEQ ID NO: 3267241 - RNA, 23 nt, Vaccinia virus
uacaaaauguugauaauccuuga

SEQ ID NO: 3267242 - RNA, 22 nt, Vaccinia virus
aucacacaagccauuguugucu

SEQ ID NO: 3267243 - RNA, 17 nt, Vaccinia virus
ucuugauacuauccagu

SEQ ID NO: 3267244 - RNA, 12 nt, Vaccinia virus
cuuuaacuucug

SEQ ID NO: 3267245 - RNA, 13 nt, Vaccinia virus
uuauuuuuggaag

SEQ ID NO: 3267246 - RNA, 17 nt, Vaccinia virus
guacccacugaugagau

SEQ ID NO: 3267247 - RNA, 15 nt, Vaccinia virus
gaauuaauguccuga

SEQ ID NO: 3267248 - RNA, 14 nt, Vaccinia virus
auaaacaugucuau

SEQ ID NO: 3267249 - RNA, 15 nt, Vaccinia virus
auggucauagagaac

SEQ ID NO: 3267250 - RNA, 18 nt, Vaccinia virus
uagaggaauaucaucaaa

SEQ ID NO: 3267251 - RNA, 14 nt, Vaccinia virus
aucauagaugaaug

SEQ ID NO: 3267252 - RNA, 16 nt, Vaccinia virus
uaagaguaacagcugc

SEQ ID NO: 3267253 - RNA, 23 nt, Vaccinia virus
uucuagcucccggauugaaaaca

SEQ ID NO: 3267254 - RNA, 17 nt, Vaccinia virus
gaagaauuaauaaacaa

SEQ ID NO: 3267255 - RNA, 15 nt, Vaccinia virus
auaguuauaucacac

SEQ ID NO: 3267256 - RNA, 23 nt, Vaccinia virus
gaugcuauccaucagaauguuuc

SEQ ID NO: 3267257 - RNA, 18 nt, Vaccinia virus
acguucacuaauaaauug

SEQ ID NO: 3267258 - RNA, 19 nt, Vaccinia virus
acaucagauguagcgaaga

SEQ ID NO: 3267259 - RNA, 19 nt, Vaccinia virus
aaguuuggguaaauaacua

SEQ ID NO: 3267260 - RNA, 16 nt, Vaccinia virus
uucaagcgaauuacuc

SEQ ID NO: 3267261 - RNA, 18 nt, Vaccinia virus
aaugagagcaaaaauaua

SEQ ID NO: 3267262 - RNA, 17 nt, Vaccinia virus
augacgagcgucauauu

SEQ ID NO: 3267263 - RNA, 20 nt, Vaccinia virus
auauacgaagggauuaaaaa

SEQ ID NO: 3267264 - RNA, 20 nt, Vaccinia virus
cacauauggaauauaucuau

SEQ ID NO: 3267265 - RNA, 12 nt, Vaccinia virus
aauacuaucuau

SEQ ID NO: 3267266 - RNA, 20 nt, Vaccinia virus
gcggagauaauaucagaaag

SEQ ID NO: 3267267 - RNA, 22 nt, Vaccinia virus
uuugaacaaugcacgaccuaua

SEQ ID NO: 3267268 - RNA, 18 nt, Vaccinia virus
gauuguuuaagaagagaa

SEQ ID NO: 3267269 - RNA, 19 nt, Vaccinia virus
uagaaacuauacgaaauaa

SEQ ID NO: 3267270 - RNA, 21 nt, Vaccinia virus
agacaaguauccguuugauau

SEQ ID NO: 3267271 - RNA, 14 nt, Vaccinia virus
uucauagucauuaa

SEQ ID NO: 3267272 - RNA, 20 nt, Vaccinia virus
ucuuuaauccaaucuaagaa

SEQ ID NO: 3267273 - RNA, 15 nt, Vaccinia virus
acagauguauuggau

SEQ ID NO: 3267274 - RNA, 21 nt, Vaccinia virus
uuacaaacgacauacuguaug

SEQ ID NO: 3267275 - RNA, 14 nt, Vaccinia virus
aucaauaaauggau

SEQ ID NO: 3267276 - RNA, 22 nt, Vaccinia virus
ucuuccguuuauuauuauacau

SEQ ID NO: 3267277 - RNA, 18 nt, Vaccinia virus
uaugcaaccguaucaaaa

SEQ ID NO: 3267278 - RNA, 15 nt, Vaccinia virus
gacagaaaaaugcua

SEQ ID NO: 3267279 - RNA, 16 nt, Vaccinia virus
guguauacuauuuuua

SEQ ID NO: 3267280 - RNA, 23 nt, Vaccinia virus
acuaaucgauuuugcauacucua

SEQ ID NO: 3267281 - RNA, 12 nt, Vaccinia virus
caaauauauuua

SEQ ID NO: 3267282 - RNA, 14 nt, Vaccinia virus
cacuuguaguucuu

SEQ ID NO: 3267283 - RNA, 19 nt, Vaccinia virus
ucucuaaguuaacacaugu

SEQ ID NO: 3267284 - RNA, 16 nt, Vaccinia virus
aaauagguacucuguu

SEQ ID NO: 3267285 - RNA, 14 nt, Vaccinia virus
auuauagacacuau

SEQ ID NO: 3267286 - RNA, 15 nt, Vaccinia virus
aauacacauaaugaa

SEQ ID NO: 3267287 - RNA, 14 nt, Vaccinia virus
ccauacauacaucu

SEQ ID NO: 3267288 - RNA, 23 nt, Vaccinia virus
accaauaucgauuacuaugaaua

SEQ ID NO: 3267289 - RNA, 16 nt, Vaccinia virus
aucaacaucuuaaaaa

SEQ ID NO: 3267290 - RNA, 19 nt, Vaccinia virus
cuggcuauuucaaaauaaa

SEQ ID NO: 3267291 - RNA, 13 nt, Vaccinia virus
auguuacagaaua

SEQ ID NO: 3267292 - RNA, 20 nt, Vaccinia virus
acaaagcacucaauaaauua

SEQ ID NO: 3267293 - RNA, 23 nt, Vaccinia virus
gacauguucgugguguuaugaaa

SEQ ID NO: 3267294 - RNA, 13 nt, Vaccinia virus
aucuuaaauacca

SEQ ID NO: 3267295 - RNA, 11 nt, Vaccinia virus
uuucaaagaug

SEQ ID NO: 3267296 - RNA, 15 nt, Vaccinia virus
gccaaaaugauagau

SEQ ID NO: 3267297 - RNA, 14 nt, Vaccinia virus
auuaauacauuauu

SEQ ID NO: 3267298 - RNA, 21 nt, Vaccinia virus
uuaaagaugacaauauuauua

SEQ ID NO: 3267299 - RNA, 17 nt, Vaccinia virus
agguaacauaaaaacug

SEQ ID NO: 3267300 - RNA, 22 nt, Vaccinia virus
cagucugaacaucaaucuuuuu

SEQ ID NO: 3267301 - RNA, 14 nt, Vaccinia virus
auuaccauggauga

SEQ ID NO: 3267302 - RNA, 14 nt, Vaccinia virus
acugacuuaauagu

SEQ ID NO: 3267303 - RNA, 18 nt, Vaccinia virus
cauacauuuguaaaagua

SEQ ID NO: 3267304 - RNA, 18 nt, Vaccinia virus
uuagaugagaaauuauuc

SEQ ID NO: 3267305 - RNA, 17 nt, Vaccinia virus
aacaaguuggaugauau

SEQ ID NO: 3267306 - RNA, 14 nt, Vaccinia virus
uaaaccauuuuuca

SEQ ID NO: 3267307 - RNA, 21 nt, Vaccinia virus
uguuuaaugaauuacuaaaau

SEQ ID NO: 3267308 - RNA, 19 nt, Vaccinia virus
caauccuucagauaaucug

SEQ ID NO: 3267309 - RNA, 20 nt, Vaccinia virus
agauacuuuauuacuccauu

SEQ ID NO: 3267310 - RNA, 15 nt, Vaccinia virus
uaucauaauuaaauu

SEQ ID NO: 3267311 - RNA, 15 nt, Vaccinia virus
gugaguuuuccuuaa

SEQ ID NO: 3267312 - RNA, 19 nt, Vaccinia virus
uaucacgugcaaggcauuu

SEQ ID NO: 3267313 - RNA, 20 nt, Vaccinia virus
aacuccggauagagaaauau

SEQ ID NO: 3267314 - RNA, 18 nt, Vaccinia virus
gucgacagaagaauauga

SEQ ID NO: 3267315 - RNA, 12 nt, Vaccinia virus
auagaucaaaua

SEQ ID NO: 3267316 - RNA, 18 nt, Vaccinia virus
ccaagaaacagucagcug

SEQ ID NO: 3267317 - RNA, 24 nt, Vaccinia virus
aggguccauuuucuguaaauagaa

SEQ ID NO: 3267318 - RNA, 14 nt, Vaccinia virus
ucuccccaaacauu

SEQ ID NO: 3267319 - RNA, 17 nt, Vaccinia virus
guuggaaaaaugaugaa

SEQ ID NO: 3267320 - RNA, 11 nt, Vaccinia virus
uauuauacaug

SEQ ID NO: 3267321 - RNA, 22 nt, Vaccinia virus
uuaauccaucguacaugguugg

SEQ ID NO: 3267322 - RNA, 22 nt, Vaccinia virus
agaaaaugucucucauaauaaa

SEQ ID NO: 3267323 - RNA, 19 nt, Vaccinia virus
aauagcuaacgcuaguaau

SEQ ID NO: 3267324 - RNA, 18 nt, Vaccinia virus
auaauuuuuggacaaaug

SEQ ID NO: 3267325 - RNA, 13 nt, Vaccinia virus
acaauuacaaaug

SEQ ID NO: 3267326 - RNA, 15 nt, Vaccinia virus
ccaguacaucuauca

SEQ ID NO: 3267327 - RNA, 13 nt, Vaccinia virus
agaguccauguau

SEQ ID NO: 3267328 - RNA, 14 nt, Vaccinia virus
cuuaauuauaacga

SEQ ID NO: 3267329 - RNA, 17 nt, Vaccinia virus
gaacguaaauuaguuca

SEQ ID NO: 3267330 - RNA, 15 nt, Vaccinia virus
ugcaucuauaugucc

SEQ ID NO: 3267331 - RNA, 22 nt, Vaccinia virus
uccauauguuuggagcaaauau

SEQ ID NO: 3267332 - RNA, 18 nt, Vaccinia virus
aaauacaaaauaauagau

SEQ ID NO: 3267333 - RNA, 22 nt, Vaccinia virus
uauaacacuuauguauuaacuu

SEQ ID NO: 3267334 - RNA, 13 nt, Vaccinia virus
cuauuuuaauagg

SEQ ID NO: 3267335 - RNA, 22 nt, Vaccinia virus
ccuuuugauaaauuucuucuug

SEQ ID NO: 3267336 - RNA, 23 nt, Vaccinia virus
ucuauuuguucugacaauauuua

SEQ ID NO: 3267337 - RNA, 15 nt, Vaccinia virus
acaucuauuaaucau

SEQ ID NO: 3267338 - RNA, 17 nt, Vaccinia virus
uauuagagauaccaaag

SEQ ID NO: 3267339 - RNA, 18 nt, Vaccinia virus
uacucuauucgaaaacuc

SEQ ID NO: 3267340 - RNA, 22 nt, Vaccinia virus
gacuaagucuacaaauagagau

SEQ ID NO: 3267341 - RNA, 17 nt, Vaccinia virus
auccaaacccuugaucu

SEQ ID NO: 3267342 - RNA, 16 nt, Vaccinia virus
ucgagcuaauuucuaa

SEQ ID NO: 3267343 - RNA, 19 nt, Vaccinia virus
uaagcgcuauacaaaucau

SEQ ID NO: 3267344 - RNA, 23 nt, Vaccinia virus
ugucuuaaaguuuauuaauuaau

SEQ ID NO: 3267345 - RNA, 16 nt, Vaccinia virus
uauagaaacauauucu

SEQ ID NO: 3267346 - RNA, 15 nt, Vaccinia virus
uccuguacuauacca

SEQ ID NO: 3267347 - RNA, 15 nt, Vaccinia virus
ucugugguggaugau

SEQ ID NO: 3267348 - RNA, 18 nt, Vaccinia virus
aaggugucgauuaccauu

SEQ ID NO: 3267349 - RNA, 21 nt, Vaccinia virus
uagaacuuacugacaaaguua

SEQ ID NO: 3267350 - RNA, 22 nt, Vaccinia virus
aauuauaguaagccaauuccaa

SEQ ID NO: 3267351 - RNA, 17 nt, Vaccinia virus
auuaacgguuauaaaau

SEQ ID NO: 3267352 - RNA, 14 nt, Vaccinia virus
aagcugacaaaauu

SEQ ID NO: 3267353 - RNA, 17 nt, Vaccinia virus
auuauucuuaaaugccu

SEQ ID NO: 3267354 - RNA, 19 nt, Vaccinia virus
uauaugcccuauuaucaua

SEQ ID NO: 3267355 - RNA, 21 nt, Vaccinia virus
gauaaaaaccacuuaucgcau

SEQ ID NO: 3267356 - RNA, 22 nt, Vaccinia virus
uaauaucaaacgguaacacauc

SEQ ID NO: 3267357 - RNA, 22 nt, Vaccinia virus
uuauccguauuuccauaauaag

SEQ ID NO: 3267358 - RNA, 15 nt, Vaccinia virus
auacuuaaaaaauga

SEQ ID NO: 3267359 - RNA, 15 nt, Vaccinia virus
caauucaugcucuau

SEQ ID NO: 3267360 - RNA, 16 nt, Vaccinia virus
uauuuacaaaauucau

SEQ ID NO: 3267361 - RNA, 16 nt, Vaccinia virus
auaccuuguaauuaaa

SEQ ID NO: 3267362 - RNA, 20 nt, Vaccinia virus
agauaccaacauuaaaaugu

SEQ ID NO: 3267363 - RNA, 21 nt, Vaccinia virus
ugauuauucuauaaguauaga

SEQ ID NO: 3267364 - RNA, 17 nt, Vaccinia virus
auagagauauuauuacu

SEQ ID NO: 3267365 - RNA, 14 nt, Vaccinia virus
uagaaugaagaaug

SEQ ID NO: 3267366 - RNA, 16 nt, Vaccinia virus
agauaaaaaauuauau

SEQ ID NO: 3267367 - RNA, 12 nt, Vaccinia virus
cuguaaacauuu

SEQ ID NO: 3267368 - RNA, 17 nt, Vaccinia virus
gaaauguguaauaauau

SEQ ID NO: 3267369 - RNA, 15 nt, Vaccinia virus
uaaugauauaucuug

SEQ ID NO: 3267370 - RNA, 23 nt, Vaccinia virus
uuuuacgccucuccuuccguaaa

SEQ ID NO: 3267371 - RNA, 15 nt, Vaccinia virus
aguaauuacauagau

SEQ ID NO: 3267372 - RNA, 16 nt, Vaccinia virus
uagauaugugauuuac

SEQ ID NO: 3267373 - RNA, 21 nt, Vaccinia virus
acaacuuuuaaauacaaauau

SEQ ID NO: 3267374 - RNA, 19 nt, Vaccinia virus
gugacuuugauaauaacau

SEQ ID NO: 3267375 - RNA, 18 nt, Vaccinia virus
gauucucuacucuagaua

SEQ ID NO: 3267376 - RNA, 16 nt, Vaccinia virus
ucgacaucacaaccua

SEQ ID NO: 3267377 - RNA, 15 nt, Vaccinia virus
uguaucaguuucgua

SEQ ID NO: 3267378 - RNA, 14 nt, Vaccinia virus
cucucuaauggaug

SEQ ID NO: 3267379 - RNA, 21 nt, Vaccinia virus
auaguugaucagaaugaaugu

SEQ ID NO: 3267380 - RNA, 23 nt, Vaccinia virus
uucaucguuuagaauaaaaugau

SEQ ID NO: 3267381 - RNA, 13 nt, Vaccinia virus
aaacgaacuauau

SEQ ID NO: 3267382 - RNA, 14 nt, Vaccinia virus
gauaauauuauuau

SEQ ID NO: 3267383 - RNA, 13 nt, Vaccinia virus
aguauuaucaaag

SEQ ID NO: 3267384 - RNA, 16 nt, Vaccinia virus
aauucaucucuagaua

SEQ ID NO: 3267385 - RNA, 15 nt, Vaccinia virus
uugcucucugaaucu

SEQ ID NO: 3267386 - RNA, 17 nt, Vaccinia virus
acagaauaugagaauga

SEQ ID NO: 3267387 - RNA, 20 nt, Vaccinia virus
uguauuauucugaauaguga

SEQ ID NO: 3267388 - RNA, 14 nt, Vaccinia virus
aucuauauauguau

SEQ ID NO: 3267389 - RNA, 15 nt, Vaccinia virus
uccuaguacacaaua

SEQ ID NO: 3267390 - RNA, 13 nt, Vaccinia virus
acaaaauacauaa

SEQ ID NO: 3267391 - RNA, 15 nt, Vaccinia virus
uaaaaauucacacau

SEQ ID NO: 3267392 - RNA, 21 nt, Vaccinia virus
caauguagaaauuagaaagau

SEQ ID NO: 3267393 - RNA, 15 nt, Vaccinia virus
aaaaauguuaauuua

SEQ ID NO: 3267394 - RNA, 17 nt, Vaccinia virus
caaaucuauauaccaua

SEQ ID NO: 3267395 - RNA, 19 nt, Vaccinia virus
uacaaucucguuuaauauu

SEQ ID NO: 3267396 - RNA, 14 nt, Vaccinia virus
auacuuaaaaaaug

SEQ ID NO: 3267397 - RNA, 16 nt, Vaccinia virus
uauuuuauuucaaaau

SEQ ID NO: 3267398 - RNA, 13 nt, Vaccinia virus
agaaauacuauau

SEQ ID NO: 3267399 - RNA, 17 nt, Vaccinia virus
cuauuagaauuuacaaa

SEQ ID NO: 3267400 - RNA, 16 nt, Vaccinia virus
gaauauauaaaagacg

SEQ ID NO: 3267401 - RNA, 14 nt, Vaccinia virus
aguauuuuaauaca

SEQ ID NO: 3267402 - RNA, 23 nt, Vaccinia virus
uguauauuauaaagauauguacg

SEQ ID NO: 3267403 - RNA, 19 nt, Vaccinia virus
ugacaucgacgcauuauau

SEQ ID NO: 3267404 - RNA, 17 nt, Vaccinia virus
auaagucuauuugaaau

SEQ ID NO: 3267405 - RNA, 19 nt, Vaccinia virus
agauguuacaaauguagaa

SEQ ID NO: 3267406 - RNA, 18 nt, Vaccinia virus
uuuguacgucacaucuuc

SEQ ID NO: 3267407 - RNA, 14 nt, Vaccinia virus
acauuuuuuguaaa

SEQ ID NO: 3267408 - RNA, 20 nt, Vaccinia virus
acuuacauggacacauucuu

SEQ ID NO: 3267409 - RNA, 17 nt, Vaccinia virus
uauaugaaguaaaguau

SEQ ID NO: 3267410 - RNA, 22 nt, Vaccinia virus
agaaaagcaguuaccaaagaga

SEQ ID NO: 3267411 - RNA, 17 nt, Vaccinia virus
cauuuaucauauauaau

SEQ ID NO: 3267412 - RNA, 13 nt, Vaccinia virus
augacauuuuccu

SEQ ID NO: 3267413 - RNA, 14 nt, Vaccinia virus
agcuggucuaaaau

SEQ ID NO: 3267414 - RNA, 18 nt, Vaccinia virus
uuucuuguuaucagauau

SEQ ID NO: 3267415 - RNA, 18 nt, Vaccinia virus
cgcauuccaaucuuaaac

SEQ ID NO: 3267416 - RNA, 16 nt, Vaccinia virus
uuguucuaaagccagu

SEQ ID NO: 3267417 - RNA, 14 nt, Vaccinia virus
uucaccaauaaaaa

SEQ ID NO: 3267418 - RNA, 20 nt, Vaccinia virus
auauuacauaccauuaauaa

SEQ ID NO: 3267419 - RNA, 13 nt, Vaccinia virus
uacauuguauaaa

SEQ ID NO: 3267420 - RNA, 17 nt, Vaccinia virus
accucuaucaucuacau

SEQ ID NO: 3267421 - RNA, 21 nt, Vaccinia virus
uaaagauauucuaaaauggua

SEQ ID NO: 3267422 - RNA, 24 nt, Vaccinia virus
auuaacgaguuccauuuauaucau

SEQ ID NO: 3267423 - RNA, 22 nt, Vaccinia virus
gauuaauuguuauuuuauucau

SEQ ID NO: 3267424 - RNA, 19 nt, Vaccinia virus
aacaugaauuuauuucuaa

SEQ ID NO: 3267425 - RNA, 12 nt, Vaccinia virus
auucaucaauau

SEQ ID NO: 3267426 - RNA, 15 nt, Vaccinia virus
aauugucacuuuguu

SEQ ID NO: 3267427 - RNA, 20 nt, Vaccinia virus
cauaacaccacgaacauguc

SEQ ID NO: 3267428 - RNA, 16 nt, Vaccinia virus
auggagagauuuaacu

SEQ ID NO: 3267429 - RNA, 15 nt, Vaccinia virus
uauguagagguguau

SEQ ID NO: 3267430 - RNA, 18 nt, Vaccinia virus
augauccuauucuaaaug

SEQ ID NO: 3267431 - RNA, 15 nt, Vaccinia virus
cguacuuaacaucua

SEQ ID NO: 3267432 - RNA, 14 nt, Vaccinia virus
cauuaaauguauuu

SEQ ID NO: 3267433 - RNA, 14 nt, Vaccinia virus
caggaauagaugua

SEQ ID NO: 3267434 - RNA, 12 nt, Vaccinia virus
aguauacauguu

SEQ ID NO: 3267435 - RNA, 18 nt, Vaccinia virus
guagaucgucuaaaagaa

SEQ ID NO: 3267436 - RNA, 14 nt, Vaccinia virus
ugguaauuaaauau

SEQ ID NO: 3267437 - RNA, 14 nt, Vaccinia virus
aagauguuagaaaa

SEQ ID NO: 3267438 - RNA, 18 nt, Vaccinia virus
gcucuguaaagcauauuc

SEQ ID NO: 3267439 - RNA, 11 nt, Vaccinia virus
gguuagauauu

SEQ ID NO: 3267440 - RNA, 21 nt, Vaccinia virus
cuaugcauauuauuaaucauu

SEQ ID NO: 3267441 - RNA, 18 nt, Vaccinia virus
aagaagagaauuaaaaga

SEQ ID NO: 3267442 - RNA, 20 nt, Vaccinia virus
acuggucauagaaaaugauu

SEQ ID NO: 3267443 - RNA, 16 nt, Vaccinia virus
acagaugauauaucca

SEQ ID NO: 3267444 - RNA, 17 nt, Vaccinia virus
uauauuaucauagaccu

SEQ ID NO: 3267445 - RNA, 21 nt, Vaccinia virus
ucauaaaauauuuuuauucuc

SEQ ID NO: 3267446 - RNA, 17 nt, Vaccinia virus
agaguagauauuaaugu

SEQ ID NO: 3267447 - RNA, 20 nt, Vaccinia virus
ugucuacacauccuuuugua

SEQ ID NO: 3267448 - RNA, 14 nt, Vaccinia virus
gacuacucuaggua

SEQ ID NO: 3267449 - RNA, 11 nt, Vaccinia virus
auaauuuuacc

SEQ ID NO: 3267450 - RNA, 21 nt, Vaccinia virus
agcuggauaucaguagaugca

SEQ ID NO: 3267451 - RNA, 21 nt, Vaccinia virus
uauauuucauucgucaaggau

SEQ ID NO: 3267452 - RNA, 13 nt, Vaccinia virus
aaucugaccaucc

SEQ ID NO: 3267453 - RNA, 18 nt, Vaccinia virus
auaacauucuaggaaugu

SEQ ID NO: 3267454 - RNA, 21 nt, Vaccinia virus
guauucuauaccaauauuauu

SEQ ID NO: 3267455 - RNA, 22 nt, Vaccinia virus
caugaaggagauuuaguauuua

SEQ ID NO: 3267456 - RNA, 11 nt, Vaccinia virus
aaauaaauguc

SEQ ID NO: 3267457 - RNA, 19 nt, Vaccinia virus
aaacgaguacuuuaaagaa

SEQ ID NO: 3267458 - RNA, 17 nt, Vaccinia virus
auauacgccaugauugu

SEQ ID NO: 3267459 - RNA, 18 nt, Vaccinia virus
acucuuccacuauugcca

SEQ ID NO: 3267460 - RNA, 15 nt, Vaccinia virus
uuuggcuuugugcau

SEQ ID NO: 3267461 - RNA, 21 nt, Vaccinia virus
uuuaauuuuuucuacagauau

SEQ ID NO: 3267462 - RNA, 13 nt, Vaccinia virus
aaaauauuaucua

SEQ ID NO: 3267463 - RNA, 19 nt, Vaccinia virus
caauuauucuaauggaugu

SEQ ID NO: 3267464 - RNA, 15 nt, Vaccinia virus
uugcuggauucacaa

SEQ ID NO: 3267465 - RNA, 15 nt, Vaccinia virus
aaucauuaaaugauu

SEQ ID NO: 3267466 - RNA, 14 nt, Vaccinia virus
cugaauaaaacauc

SEQ ID NO: 3267467 - RNA, 17 nt, Vaccinia virus
aauauaaaaaaaugauu

SEQ ID NO: 3267468 - RNA, 22 nt, Vaccinia virus
guagcaaauaaaaucuauauga

SEQ ID NO: 3267469 - RNA, 20 nt, Vaccinia virus
aacuuggggagaaugauaca

SEQ ID NO: 3267470 - RNA, 16 nt, Vaccinia virus
auucauuuucaauuau

SEQ ID NO: 3267471 - RNA, 15 nt, Vaccinia virus
aguuuuauaaacucg

SEQ ID NO: 3267472 - RNA, 22 nt, Vaccinia virus
auagaaguuaaacugugaaugu

SEQ ID NO: 3267473 - RNA, 20 nt, Vaccinia virus
cuuaaauguaucuuuacuag

SEQ ID NO: 3267474 - RNA, 17 nt, Vaccinia virus
acucagauuauucuuaa

SEQ ID NO: 3267475 - RNA, 13 nt, Vaccinia virus
ggaguuagaaaac

SEQ ID NO: 3267476 - RNA, 19 nt, Vaccinia virus
uuaguauauuccuuauuca

SEQ ID NO: 3267477 - RNA, 19 nt, Vaccinia virus
uacuaaauucgauaucuuu

SEQ ID NO: 3267478 - RNA, 16 nt, Vaccinia virus
cauaccgcaaauggaa

SEQ ID NO: 3267479 - RNA, 19 nt, Vaccinia virus
aacguucaccaaugucucu

SEQ ID NO: 3267480 - RNA, 13 nt, Vaccinia virus
gauguguauacau

SEQ ID NO: 3267481 - RNA, 18 nt, Vaccinia virus
acaauuuacauguucauu

SEQ ID NO: 3267482 - RNA, 20 nt, Vaccinia virus
aacuauaugucuguagaaaa

SEQ ID NO: 3267483 - RNA, 14 nt, Vaccinia virus
auaauuauaagacu

SEQ ID NO: 3267484 - RNA, 21 nt, Vaccinia virus
acuuucgaauaaguuugcaga

SEQ ID NO: 3267485 - RNA, 17 nt, Vaccinia virus
auaacacaaaaugugaa

SEQ ID NO: 3267486 - RNA, 16 nt, Vaccinia virus
auaugaucaaaaagag

SEQ ID NO: 3267487 - RNA, 15 nt, Vaccinia virus
agcguaucuauaauu

SEQ ID NO: 3267488 - RNA, 14 nt, Vaccinia virus
gagaaauuauuccu

SEQ ID NO: 3267489 - RNA, 13 nt, Vaccinia virus
agcagcgauuuug

SEQ ID NO: 3267490 - RNA, 19 nt, Vaccinia virus
uaacuauauaccuauuaau

SEQ ID NO: 3267491 - RNA, 16 nt, Vaccinia virus
guuacgauuuuaucau

SEQ ID NO: 3267492 - RNA, 19 nt, Vaccinia virus
uuacuuugaccacauccuu

SEQ ID NO: 3267493 - RNA, 22 nt, Vaccinia virus
uuguacacuucuauaguaucua

SEQ ID NO: 3267494 - RNA, 12 nt, Vaccinia virus
aguauuaaugau

SEQ ID NO: 3267495 - RNA, 14 nt, Vaccinia virus
acaugcagaagaac

SEQ ID NO: 3267496 - RNA, 19 nt, Vaccinia virus
aggagauacuaucaaaaua

SEQ ID NO: 3267497 - RNA, 16 nt, Vaccinia virus
auggcguacaaaggaa

SEQ ID NO: 3267498 - RNA, 18 nt, Vaccinia virus
uaaacugcgccaaauugu

SEQ ID NO: 3267499 - RNA, 14 nt, Vaccinia virus
acuauagacauaau

SEQ ID NO: 3267500 - RNA, 20 nt, Vaccinia virus
uggaagcugaacacauuaaa

SEQ ID NO: 3267501 - RNA, 19 nt, Vaccinia virus
gaaucagugaauaaauuca

SEQ ID NO: 3267502 - RNA, 19 nt, Vaccinia virus
uauguguguagacaaucau

SEQ ID NO: 3267503 - RNA, 18 nt, Vaccinia virus
auuauuuaauuuaauaca

SEQ ID NO: 3267504 - RNA, 18 nt, Vaccinia virus
cuaauuugauauaaugaa

SEQ ID NO: 3267505 - RNA, 12 nt, Vaccinia virus
cagacuacuuau

SEQ ID NO: 3267506 - RNA, 14 nt, Vaccinia virus
uuuuaaacacucuu

SEQ ID NO: 3267507 - RNA, 21 nt, Vaccinia virus
uuacugcugcguuaaacauuc

SEQ ID NO: 3267508 - RNA, 18 nt, Vaccinia virus
uaauccacuauauauucu

SEQ ID NO: 3267509 - RNA, 16 nt, Vaccinia virus
uaaaugaauucucauu

SEQ ID NO: 3267510 - RNA, 14 nt, Vaccinia virus
aauaacaauguuuc

SEQ ID NO: 3267511 - RNA, 14 nt, Vaccinia virus
ucguauaaaguuau

SEQ ID NO: 3267512 - RNA, 17 nt, Vaccinia virus
uacaucuuccuucuuau

SEQ ID NO: 3267513 - RNA, 15 nt, Vaccinia virus
uaugacuaaagcuau

SEQ ID NO: 3267514 - RNA, 12 nt, Vaccinia virus
uaaauucaagau

SEQ ID NO: 3267515 - RNA, 18 nt, Vaccinia virus
gauguaauuaaauguuug

SEQ ID NO: 3267516 - RNA, 14 nt, Vaccinia virus
auguugacauguau

SEQ ID NO: 3267517 - RNA, 17 nt, Vaccinia virus
agugaaucgacuauaga

SEQ ID NO: 3267518 - RNA, 23 nt, Vaccinia virus
uuuauuggagacguaacaaugua

SEQ ID NO: 3267519 - RNA, 13 nt, Vaccinia virus
aacauuaguucca

SEQ ID NO: 3267520 - RNA, 23 nt, Vaccinia virus
uaaaauacuuuccgaauaagucu

SEQ ID NO: 3267521 - RNA, 13 nt, Vaccinia virus
cuugugcauuuuc

SEQ ID NO: 3267522 - RNA, 20 nt, Vaccinia virus
ugucuagcauucuagagcau

SEQ ID NO: 3267523 - RNA, 21 nt, Vaccinia virus
auacucccuugcaucauauac

SEQ ID NO: 3267524 - RNA, 19 nt, Vaccinia virus
auuuuuaaccaauacuauu

SEQ ID NO: 3267525 - RNA, 16 nt, Vaccinia virus
auucuaugucuauuau

SEQ ID NO: 3267526 - RNA, 13 nt, Vaccinia virus
auguauguuuaaa

SEQ ID NO: 3267527 - RNA, 15 nt, Vaccinia virus
cuacugcaucacuga

SEQ ID NO: 3267528 - RNA, 15 nt, Vaccinia virus
aaaaaguuuuaacau

SEQ ID NO: 3267529 - RNA, 19 nt, Vaccinia virus
ucauauaucugcucuuaaa

SEQ ID NO: 3267530 - RNA, 16 nt, Vaccinia virus
cguaaaccauuuuuca

SEQ ID NO: 3267531 - RNA, 22 nt, Vaccinia virus
aucgauaguguaguuauugaac

SEQ ID NO: 3267532 - RNA, 13 nt, Vaccinia virus
agauuuucaauua

SEQ ID NO: 3267533 - RNA, 14 nt, Vaccinia virus
auuaguaacagcuu

SEQ ID NO: 3267534 - RNA, 14 nt, Vaccinia virus
auguauacaaaugu

SEQ ID NO: 3267535 - RNA, 15 nt, Vaccinia virus
aauacguuggucuau

SEQ ID NO: 3267536 - RNA, 16 nt, Vaccinia virus
cugaaauaaucaugua

SEQ ID NO: 3267537 - RNA, 16 nt, Vaccinia virus
auuguagauuguugac

SEQ ID NO: 3267538 - RNA, 21 nt, Vaccinia virus
uagauuuccucguccuaugga

SEQ ID NO: 3267539 - RNA, 16 nt, Vaccinia virus
auuuuggaaaaaauug

SEQ ID NO: 3267540 - RNA, 21 nt, Vaccinia virus
gguagauuuguucuauagagc

SEQ ID NO: 3267541 - RNA, 14 nt, Vaccinia virus
aauaauuaaugccc

SEQ ID NO: 3267542 - RNA, 16 nt, Vaccinia virus
uggagcaaacauuaac

SEQ ID NO: 3267543 - RNA, 23 nt, Vaccinia virus
ugccacaaaugaaaaaaauacuu

SEQ ID NO: 3267544 - RNA, 22 nt, Vaccinia virus
gauuggauaagaaaacauaucu

SEQ ID NO: 3267545 - RNA, 18 nt, Vaccinia virus
gugcaaggaaucaucuga

SEQ ID NO: 3267546 - RNA, 18 nt, Vaccinia virus
augguuuacccuagaaua

SEQ ID NO: 3267547 - RNA, 16 nt, Vaccinia virus
gcuaauauuaguacua

SEQ ID NO: 3267548 - RNA, 14 nt, Vaccinia virus
acgaugaaaaccag

SEQ ID NO: 3267549 - RNA, 12 nt, Vaccinia virus
auugacaaaauu

SEQ ID NO: 3267550 - RNA, 21 nt, Vaccinia virus
auacgaaccgggaaagagaag

SEQ ID NO: 3267551 - RNA, 17 nt, Vaccinia virus
auacgcuccuuaucaaa

SEQ ID NO: 3267552 - RNA, 22 nt, Vaccinia virus
acgauuuccaugucuacauuau

SEQ ID NO: 3267553 - RNA, 15 nt, Vaccinia virus
uuaacggcuauucaa

SEQ ID NO: 3267554 - RNA, 20 nt, Vaccinia virus
auauuguacgguagaauuga

SEQ ID NO: 3267555 - RNA, 16 nt, Vaccinia virus
aauugauaauauaaau

SEQ ID NO: 3267556 - RNA, 12 nt, Vaccinia virus
cguuagucauau

SEQ ID NO: 3267557 - RNA, 16 nt, Vaccinia virus
ucuacaagaauuuugg

SEQ ID NO: 3267558 - RNA, 11 nt, Vaccinia virus
aaucuggaaaa

SEQ ID NO: 3267559 - RNA, 22 nt, Vaccinia virus
caauugguuaugauaucaugua

SEQ ID NO: 3267560 - RNA, 23 nt, Vaccinia virus
cauaaauaauaaauacaauaauu

SEQ ID NO: 3267561 - RNA, 16 nt, Vaccinia virus
auaaaaccaguauuug

SEQ ID NO: 3267562 - RNA, 14 nt, Vaccinia virus
acaauucauuucca

SEQ ID NO: 3267563 - RNA, 16 nt, Vaccinia virus
uaaaaagguagauguu

SEQ ID NO: 3267564 - RNA, 20 nt, Vaccinia virus
guaccuggaauguaaagccc

SEQ ID NO: 3267565 - RNA, 19 nt, Vaccinia virus
auaauugaguaaaugaaug

SEQ ID NO: 3267566 - RNA, 16 nt, Vaccinia virus
ggugacaugugugaua

SEQ ID NO: 3267567 - RNA, 15 nt, Vaccinia virus
acuacccaucacauu

SEQ ID NO: 3267568 - RNA, 14 nt, Vaccinia virus
augguaaaagaaau

SEQ ID NO: 3267569 - RNA, 20 nt, Vaccinia virus
auaucacaggagcaauguuu

SEQ ID NO: 3267570 - RNA, 17 nt, Vaccinia virus
ucugaucuuaacuccuc

SEQ ID NO: 3267571 - RNA, 19 nt, Vaccinia virus
uccacaguuuuuaauuucu

SEQ ID NO: 3267572 - RNA, 13 nt, Vaccinia virus
agauugcauggug

SEQ ID NO: 3267573 - RNA, 16 nt, Vaccinia virus
uagacaacaggaugaa

SEQ ID NO: 3267574 - RNA, 23 nt, Vaccinia virus
caauaaaguuuuuaguaugacau

SEQ ID NO: 3267575 - RNA, 13 nt, Vaccinia virus
aguucuucuagaa

SEQ ID NO: 3267576 - RNA, 23 nt, Vaccinia virus
ugugucaaagguuaaaccuuuau

SEQ ID NO: 3267577 - RNA, 17 nt, Vaccinia virus
auaucacauuguauaua

SEQ ID NO: 3267578 - RNA, 21 nt, Vaccinia virus
agauuuaaggaaccagaauga

SEQ ID NO: 3267579 - RNA, 23 nt, Vaccinia virus
ugucuuggaaucaauuacagauu

SEQ ID NO: 3267580 - RNA, 15 nt, Vaccinia virus
aacauauuuuucuau

SEQ ID NO: 3267581 - RNA, 20 nt, Vaccinia virus
auauuaucuuuuuagacacg

SEQ ID NO: 3267582 - RNA, 18 nt, Vaccinia virus
guuaaacaauagauggau

SEQ ID NO: 3267583 - RNA, 18 nt, Vaccinia virus
uguaugauaaaauucuua

SEQ ID NO: 3267584 - RNA, 15 nt, Vaccinia virus
uauauuagagaagau

SEQ ID NO: 3267585 - RNA, 22 nt, Vaccinia virus
uuaaaggauaaaauauuaucca

SEQ ID NO: 3267586 - RNA, 22 nt, Vaccinia virus
uuggagaaacugcaacuggaaa

SEQ ID NO: 3267587 - RNA, 14 nt, Vaccinia virus
aauacauguacaaa

SEQ ID NO: 3267588 - RNA, 17 nt, Vaccinia virus
aauagcgcugaaaauaa

SEQ ID NO: 3267589 - RNA, 23 nt, Vaccinia virus
ugacuguagauauuauauagaua

SEQ ID NO: 3267590 - RNA, 14 nt, Vaccinia virus
aauaaucagaaauu

SEQ ID NO: 3267591 - RNA, 13 nt, Vaccinia virus
auauaguaauaag

SEQ ID NO: 3267592 - RNA, 18 nt, Vaccinia virus
guaaauauucuaaauuaa

SEQ ID NO: 3267593 - RNA, 16 nt, Vaccinia virus
uaaucauuguccagau

SEQ ID NO: 3267594 - RNA, 14 nt, Vaccinia virus
auaaaauuuaagag

SEQ ID NO: 3267595 - RNA, 15 nt, Vaccinia virus
ucuauuuaauacuuu

SEQ ID NO: 3267596 - RNA, 22 nt, Vaccinia virus
aaaauauuuuuauucucuuucu

SEQ ID NO: 3267597 - RNA, 23 nt, Vaccinia virus
uuugauagcuaacucgguaucua

SEQ ID NO: 3267598 - RNA, 17 nt, Vaccinia virus
agcaaucagaaaugaug

SEQ ID NO: 3267599 - RNA, 21 nt, Vaccinia virus
aguacugcuuuuuucgaaaug

SEQ ID NO: 3267600 - RNA, 17 nt, Vaccinia virus
agcauccaguaugaaua

SEQ ID NO: 3267601 - RNA, 23 nt, Vaccinia virus
uaguacuccucccauaauacuuu

SEQ ID NO: 3267602 - RNA, 21 nt, Vaccinia virus
aauaucgauguuuaacuuuug

SEQ ID NO: 3267603 - RNA, 19 nt, Vaccinia virus
cagugguuucauguuuaua

SEQ ID NO: 3267604 - RNA, 14 nt, Vaccinia virus
ccaauuguuugaua

SEQ ID NO: 3267605 - RNA, 20 nt, Vaccinia virus
caauuagauccaaagaagau

SEQ ID NO: 3267606 - RNA, 20 nt, Vaccinia virus
agacuuuaagcuaaaauauu

SEQ ID NO: 3267607 - RNA, 21 nt, Vaccinia virus
auaauuugaccugauuacauu

SEQ ID NO: 3267608 - RNA, 16 nt, Vaccinia virus
caaaaugauagauauu

SEQ ID NO: 3267609 - RNA, 18 nt, Vaccinia virus
auaucaauaagcauuaug

SEQ ID NO: 3267610 - RNA, 19 nt, Vaccinia virus
ggaguaaguagucuauuaa

SEQ ID NO: 3267611 - RNA, 13 nt, Vaccinia virus
aucuaccuuauuu

SEQ ID NO: 3267612 - RNA, 20 nt, Vaccinia virus
uuuucuauaaauaaaagaca

SEQ ID NO: 3267613 - RNA, 14 nt, Vaccinia virus
uaauccuagaugau

SEQ ID NO: 3267614 - RNA, 17 nt, Vaccinia virus
aaugauugcauagugaa

SEQ ID NO: 3267615 - RNA, 21 nt, Vaccinia virus
uuaaguucuggaauauuauua

SEQ ID NO: 3267616 - RNA, 19 nt, Vaccinia virus
auaugauaauauuaaaaga

SEQ ID NO: 3267617 - RNA, 18 nt, Vaccinia virus
acccauggagauacuuua

SEQ ID NO: 3267618 - RNA, 16 nt, Vaccinia virus
gaugcugcaugaugaa

SEQ ID NO: 3267619 - RNA, 20 nt, Vaccinia virus
acgacacuggaaaaugcgau

SEQ ID NO: 3267620 - RNA, 16 nt, Vaccinia virus
gcggccaucauauuau

SEQ ID NO: 3267621 - RNA, 16 nt, Vaccinia virus
uucuucagaauaauag

SEQ ID NO: 3267622 - RNA, 16 nt, Vaccinia virus
acaaaauacuauauau

SEQ ID NO: 3267623 - RNA, 13 nt, Vaccinia virus
gauagcaaaacaa

SEQ ID NO: 3267624 - RNA, 16 nt, Vaccinia virus
uggaaucaucuucuga

SEQ ID NO: 3267625 - RNA, 15 nt, Vaccinia virus
uguaaagaacaguga

SEQ ID NO: 3267626 - RNA, 15 nt, Vaccinia virus
uagaaaacagagaua

SEQ ID NO: 3267627 - RNA, 19 nt, Vaccinia virus
aaaauaaucauacaaucua

SEQ ID NO: 3267628 - RNA, 23 nt, Vaccinia virus
aaccaaggacuuuguagaaauau

SEQ ID NO: 3267629 - RNA, 14 nt, Vaccinia virus
auuuuuuuauucau

SEQ ID NO: 3267630 - RNA, 13 nt, Vaccinia virus
uggaaagauauca

SEQ ID NO: 3267631 - RNA, 17 nt, Vaccinia virus
auguuuuaaaaaucaca

SEQ ID NO: 3267632 - RNA, 14 nt, Vaccinia virus
auaaaaauacuuau

SEQ ID NO: 3267633 - RNA, 19 nt, Vaccinia virus
guuaacuuugauuauccua

SEQ ID NO: 3267634 - RNA, 14 nt, Vaccinia virus
gauauugaagauga

SEQ ID NO: 3267635 - RNA, 19 nt, Vaccinia virus
augucuaaaaacagaaaua

SEQ ID NO: 3267636 - RNA, 21 nt, Vaccinia virus
acaucaaagaacguaaaauac

SEQ ID NO: 3267637 - RNA, 14 nt, Vaccinia virus
caaaaaauuacuuu

SEQ ID NO: 3267638 - RNA, 15 nt, Vaccinia virus
uaaauguuuaacguu

SEQ ID NO: 3267639 - RNA, 18 nt, Vaccinia virus
aaucuguauaucuuucca

SEQ ID NO: 3267640 - RNA, 22 nt, Vaccinia virus
uuauuaaaguuuacaguuugaa

SEQ ID NO: 3267641 - RNA, 14 nt, Vaccinia virus
uaauugcuuuucua

SEQ ID NO: 3267642 - RNA, 16 nt, Vaccinia virus
uagcauaguuuuucau

SEQ ID NO: 3267643 - RNA, 22 nt, Vaccinia virus
ugauaguauuccaauaucugag

SEQ ID NO: 3267644 - RNA, 12 nt, Vaccinia virus
uaugaaugacuc

SEQ ID NO: 3267645 - RNA, 16 nt, Vaccinia virus
aauagaaaaaacaugu

SEQ ID NO: 3267646 - RNA, 17 nt, Vaccinia virus
ucuauuuuuuaaauuuu

SEQ ID NO: 3267647 - RNA, 14 nt, Vaccinia virus
auuuagcaaaauuc

SEQ ID NO: 3267648 - RNA, 22 nt, Vaccinia virus
uauuugagaaauauguauacau

SEQ ID NO: 3267649 - RNA, 18 nt, Vaccinia virus
aguguaccaauaugugaa

SEQ ID NO: 3267650 - RNA, 12 nt, Vaccinia virus
aaucauugauau

SEQ ID NO: 3267651 - RNA, 13 nt, Vaccinia virus
auccucuaugaag

SEQ ID NO: 3267652 - RNA, 17 nt, Vaccinia virus
acacacgaugaaaaugu

SEQ ID NO: 3267653 - RNA, 14 nt, Vaccinia virus
cgaaccagaaagug

SEQ ID NO: 3267654 - RNA, 16 nt, Vaccinia virus
uccuagguuucucuau

SEQ ID NO: 3267655 - RNA, 14 nt, Vaccinia virus
augauuuaugaauu

SEQ ID NO: 3267656 - RNA, 13 nt, Vaccinia virus
cauuagauacaau

SEQ ID NO: 3267657 - RNA, 23 nt, Vaccinia virus
ucaaacgaauaaacaauuucaca

SEQ ID NO: 3267658 - RNA, 17 nt, Vaccinia virus
gcuguaaacaaguuugg

SEQ ID NO: 3267659 - RNA, 19 nt, Vaccinia virus
aaaaagcucuauauuacaa

SEQ ID NO: 3267660 - RNA, 14 nt, Vaccinia virus
guaaacauaucaua

SEQ ID NO: 3267661 - RNA, 20 nt, Vaccinia virus
aauaucucaauaguuucaua

SEQ ID NO: 3267662 - RNA, 23 nt, Vaccinia virus
aguucuugcuccuccuugauucu

SEQ ID NO: 3267663 - RNA, 12 nt, Vaccinia virus
agaaauaugauu

SEQ ID NO: 3267664 - RNA, 22 nt, Vaccinia virus
aacacuaaaaaauaaacacaua

SEQ ID NO: 3267665 - RNA, 18 nt, Vaccinia virus
uuaaacgauuuauaaaaa

SEQ ID NO: 3267666 - RNA, 17 nt, Vaccinia virus
uauaucaucuacauaau

SEQ ID NO: 3267667 - RNA, 22 nt, Vaccinia virus
uaguuauggcacucuuauuaua

SEQ ID NO: 3267668 - RNA, 19 nt, Vaccinia virus
auuuauucaucaucaaaag

SEQ ID NO: 3267669 - RNA, 19 nt, Vaccinia virus
cugcagcaaaggcaauaag

SEQ ID NO: 3267670 - RNA, 22 nt, Vaccinia virus
uccauucucucaaucacuacau

SEQ ID NO: 3267671 - RNA, 12 nt, Vaccinia virus
acguaacaaugu

SEQ ID NO: 3267672 - RNA, 14 nt, Vaccinia virus
auacaaaaaaaugc

SEQ ID NO: 3267673 - RNA, 15 nt, Vaccinia virus
gaaaaguaugauggu

SEQ ID NO: 3267674 - RNA, 15 nt, Vaccinia virus
auacaaaauaauaga

SEQ ID NO: 3267675 - RNA, 17 nt, Vaccinia virus
cuaaugcauguuauaga

SEQ ID NO: 3267676 - RNA, 13 nt, Vaccinia virus
auaauuaguuuuu

SEQ ID NO: 3267677 - RNA, 23 nt, Vaccinia virus
auccaauuguuugauauauaauu

SEQ ID NO: 3267678 - RNA, 23 nt, Vaccinia virus
gauauaauucguggauaaucauu

SEQ ID NO: 3267679 - RNA, 15 nt, Vaccinia virus
aaagaaguccauuua

SEQ ID NO: 3267680 - RNA, 17 nt, Vaccinia virus
uaacacauuucaacaau

SEQ ID NO: 3267681 - RNA, 19 nt, Vaccinia virus
aggcuuugauaucuaaaua

SEQ ID NO: 3267682 - RNA, 14 nt, Vaccinia virus
aaccuagaaaauau

SEQ ID NO: 3267683 - RNA, 22 nt, Vaccinia virus
auuaucaugacaaaauuaaaaa

SEQ ID NO: 3267684 - RNA, 22 nt, Vaccinia virus
aaaauuauuaaacaauacucua

SEQ ID NO: 3267685 - RNA, 21 nt, Vaccinia virus
uauuaaagauuguuuaagaag

SEQ ID NO: 3267686 - RNA, 22 nt, Vaccinia virus
ugggauaaaaauuauguuuuua

SEQ ID NO: 3267687 - RNA, 15 nt, Vaccinia virus
gcaguuuuguucauu

SEQ ID NO: 3267688 - RNA, 12 nt, Vaccinia virus
gauauuauuaca

SEQ ID NO: 3267689 - RNA, 12 nt, Vaccinia virus
gucuagaaauaa

SEQ ID NO: 3267690 - RNA, 23 nt, Vaccinia virus
uguuuaaauaacccgaguauuga

SEQ ID NO: 3267691 - RNA, 13 nt, Vaccinia virus
guuuagagaaugc

SEQ ID NO: 3267692 - RNA, 19 nt, Vaccinia virus
uuauuuucuucuacguaca

SEQ ID NO: 3267693 - RNA, 23 nt, Vaccinia virus
aucuaguuagaacuaucauagau

SEQ ID NO: 3267694 - RNA, 19 nt, Vaccinia virus
gugggggacuggcugauga

SEQ ID NO: 3267695 - RNA, 15 nt, Vaccinia virus
ugccacgguuccaag

SEQ ID NO: 3267696 - RNA, 21 nt, Vaccinia virus
augaacacacgaugaaaaugu

SEQ ID NO: 3267697 - RNA, 16 nt, Vaccinia virus
caaacucuauuuuaaa

SEQ ID NO: 3267698 - RNA, 22 nt, Vaccinia virus
caaugucuauaguucucaucuu

SEQ ID NO: 3267699 - RNA, 17 nt, Vaccinia virus
gcuacauaauccagcua

SEQ ID NO: 3267700 - RNA, 16 nt, Vaccinia virus
guaccauuugauuuuc

SEQ ID NO: 3267701 - RNA, 17 nt, Vaccinia virus
acuaauuguuuaaauaa

SEQ ID NO: 3267702 - RNA, 13 nt, Vaccinia virus
guuaauuuuauca

SEQ ID NO: 3267703 - RNA, 20 nt, Vaccinia virus
aguuuaagauuguacacuuu

SEQ ID NO: 3267704 - RNA, 15 nt, Vaccinia virus
acucugaaaagaaag

SEQ ID NO: 3267705 - RNA, 18 nt, Vaccinia virus
cuagaaaacgaaaacauc

SEQ ID NO: 3267706 - RNA, 15 nt, Vaccinia virus
gauauauuaaacaag

SEQ ID NO: 3267707 - RNA, 21 nt, Vaccinia virus
ugaaucaaauguaacuauuca

SEQ ID NO: 3267708 - RNA, 21 nt, Vaccinia virus
acaauguuugacugaauauau

SEQ ID NO: 3267709 - RNA, 18 nt, Vaccinia virus
acuaacgauaacgugaaa

SEQ ID NO: 3267710 - RNA, 16 nt, Vaccinia virus
cauauaguuaaucuau

SEQ ID NO: 3267711 - RNA, 18 nt, Vaccinia virus
acuauaaauggagaaugu

SEQ ID NO: 3267712 - RNA, 15 nt, Vaccinia virus
cuauguugacaugua

SEQ ID NO: 3267713 - RNA, 13 nt, Vaccinia virus
uccucccauaaua

SEQ ID NO: 3267714 - RNA, 19 nt, Vaccinia virus
gauuauaauccuuauacau

SEQ ID NO: 3267715 - RNA, 19 nt, Vaccinia virus
aauacgaugauauuaaaau

SEQ ID NO: 3267716 - RNA, 15 nt, Vaccinia virus
caauauauauacagu

SEQ ID NO: 3267717 - RNA, 20 nt, Vaccinia virus
uauagcugaggguguuagaa

SEQ ID NO: 3267718 - RNA, 20 nt, Vaccinia virus
aucaauaauauaucuuauau

SEQ ID NO: 3267719 - RNA, 16 nt, Vaccinia virus
caaaaguuaauuucua

SEQ ID NO: 3267720 - RNA, 20 nt, Vaccinia virus
uacaaaggauccgacccuaa

SEQ ID NO: 3267721 - RNA, 22 nt, Vaccinia virus
accuagagacaaugaaaaaguu

SEQ ID NO: 3267722 - RNA, 22 nt, Vaccinia virus
gaaaggagagaauguauucauu

SEQ ID NO: 3267723 - RNA, 22 nt, Vaccinia virus
aucuuuguucuaaaaacuguau

SEQ ID NO: 3267724 - RNA, 13 nt, Vaccinia virus
ucauagaacagac

SEQ ID NO: 3267725 - RNA, 22 nt, Vaccinia virus
cacuauacauuuugaaacuaug

SEQ ID NO: 3267726 - RNA, 22 nt, Vaccinia virus
aucuaauuaguuuuucuuuaca

SEQ ID NO: 3267727 - RNA, 14 nt, Vaccinia virus
cauauuacauaaua

SEQ ID NO: 3267728 - RNA, 19 nt, Vaccinia virus
cgaagaugcuauccaucag

SEQ ID NO: 3267729 - RNA, 16 nt, Vaccinia virus
cugucuggcaauaaau

SEQ ID NO: 3267730 - RNA, 16 nt, Vaccinia virus
uuccuuuaucauuaau

SEQ ID NO: 3267731 - RNA, 22 nt, Vaccinia virus
uauaaaccgcuauugaaacuga

SEQ ID NO: 3267732 - RNA, 17 nt, Vaccinia virus
uuacauaaaugaaaaga

SEQ ID NO: 3267733 - RNA, 21 nt, Vaccinia virus
uuccaaauuuuuuucauugau

SEQ ID NO: 3267734 - RNA, 19 nt, Vaccinia virus
uauuuucaguuuuauuaua

SEQ ID NO: 3267735 - RNA, 16 nt, Vaccinia virus
aucuuuucucaaagau

SEQ ID NO: 3267736 - RNA, 18 nt, Vaccinia virus
gcaaauugucuauaucua

SEQ ID NO: 3267737 - RNA, 13 nt, Vaccinia virus
auucuagcaucga

SEQ ID NO: 3267738 - RNA, 17 nt, Vaccinia virus
aggagccgaaaacauug

SEQ ID NO: 3267739 - RNA, 22 nt, Vaccinia virus
auuccaguaucugaaguacuau

SEQ ID NO: 3267740 - RNA, 20 nt, Vaccinia virus
aauaugugcuaaaaucacug

SEQ ID NO: 3267741 - RNA, 13 nt, Vaccinia virus
aacauuaggaaau

SEQ ID NO: 3267742 - RNA, 23 nt, Vaccinia virus
cugcuggaaaauaaaucacugac

SEQ ID NO: 3267743 - RNA, 15 nt, Vaccinia virus
acauaauauauacag

SEQ ID NO: 3267744 - RNA, 14 nt, Vaccinia virus
agucauaaaaggau

SEQ ID NO: 3267745 - RNA, 16 nt, Vaccinia virus
acaauggaauacuuca

SEQ ID NO: 3267746 - RNA, 22 nt, Vaccinia virus
ugaaaauggacguagaacaaga

SEQ ID NO: 3267747 - RNA, 15 nt, Vaccinia virus
uuacgaaucauuaaa

SEQ ID NO: 3267748 - RNA, 21 nt, Vaccinia virus
guuucauggaacaauaaaaga

SEQ ID NO: 3267749 - RNA, 17 nt, Vaccinia virus
auugaugcaaauagcag

SEQ ID NO: 3267750 - RNA, 23 nt, Vaccinia virus
gauuggucuuaaaagauauuaau

SEQ ID NO: 3267751 - RNA, 18 nt, Vaccinia virus
ugaucacauuuagauaaa

SEQ ID NO: 3267752 - RNA, 19 nt, Vaccinia virus
cgauaugccuccagaaguu

SEQ ID NO: 3267753 - RNA, 22 nt, Vaccinia virus
cuaaaacuacguucgaugaauu

SEQ ID NO: 3267754 - RNA, 20 nt, Vaccinia virus
auauaccgccuuucaaaauu

SEQ ID NO: 3267755 - RNA, 22 nt, Vaccinia virus
aucauaaaaguuguaaaguaaa

SEQ ID NO: 3267756 - RNA, 17 nt, Vaccinia virus
uccgauuguuguguaca

SEQ ID NO: 3267757 - RNA, 19 nt, Vaccinia virus
auugacuaucuuuugaaaa

SEQ ID NO: 3267758 - RNA, 13 nt, Vaccinia virus
uuuacauuauuua

SEQ ID NO: 3267759 - RNA, 14 nt, Vaccinia virus
uagauuaaugcuua

SEQ ID NO: 3267760 - RNA, 17 nt, Vaccinia virus
aucacuaucuuugaaaa

SEQ ID NO: 3267761 - RNA, 23 nt, Vaccinia virus
ugacuuuuugguccauuuuucca

SEQ ID NO: 3267762 - RNA, 20 nt, Vaccinia virus
uguuauacagauguauuaca

SEQ ID NO: 3267763 - RNA, 21 nt, Vaccinia virus
uauaaucguguauaacaucuu

SEQ ID NO: 3267764 - RNA, 20 nt, Vaccinia virus
auuugguaaaucauuaucua

SEQ ID NO: 3267765 - RNA, 21 nt, Vaccinia virus
gcgccuuauauagcacuuuua

SEQ ID NO: 3267766 - RNA, 16 nt, Vaccinia virus
ucuauuauuacagagu

SEQ ID NO: 3267767 - RNA, 22 nt, Vaccinia virus
uauugcguacacaaucaaucau

SEQ ID NO: 3267768 - RNA, 21 nt, Vaccinia virus
aggauaccguuaaauauaacu

SEQ ID NO: 3267769 - RNA, 13 nt, Vaccinia virus
aagaguauuguac

SEQ ID NO: 3267770 - RNA, 16 nt, Vaccinia virus
caauacaacguaaaau

SEQ ID NO: 3267771 - RNA, 15 nt, Vaccinia virus
cauaauauuaaacac

SEQ ID NO: 3267772 - RNA, 13 nt, Vaccinia virus
ucaugaacauaau

SEQ ID NO: 3267773 - RNA, 23 nt, Vaccinia virus
acuucuaaugagcaaguagaaaa

SEQ ID NO: 3267774 - RNA, 14 nt, Vaccinia virus
uaguaguguuuccc

SEQ ID NO: 3267775 - RNA, 18 nt, Vaccinia virus
uucguuuaucuuggaaca

SEQ ID NO: 3267776 - RNA, 22 nt, Vaccinia virus
uuuaucguggaaaauauggaca

SEQ ID NO: 3267777 - RNA, 20 nt, Vaccinia virus
gcgauaaacggaauaauaau

SEQ ID NO: 3267778 - RNA, 20 nt, Vaccinia virus
caccgcaugcaccauccgau

SEQ ID NO: 3267779 - RNA, 13 nt, Vaccinia virus
uuaccagauaucu

SEQ ID NO: 3267780 - RNA, 15 nt, Vaccinia virus
gcguucauuggaaaa

SEQ ID NO: 3267781 - RNA, 16 nt, Vaccinia virus
aaugucaggaaaugua

SEQ ID NO: 3267782 - RNA, 15 nt, Vaccinia virus
ccgucacauacacua

SEQ ID NO: 3267783 - RNA, 23 nt, Vaccinia virus
aucaugauuggguagcaaauauu

SEQ ID NO: 3267784 - RNA, 19 nt, Vaccinia virus
agaucuauuuuaaaguuaa

SEQ ID NO: 3267785 - RNA, 17 nt, Vaccinia virus
acgaucuaauacaaaau

SEQ ID NO: 3267786 - RNA, 23 nt, Vaccinia virus
uuuugaagacgaugauucgucua

SEQ ID NO: 3267787 - RNA, 20 nt, Vaccinia virus
cuggugauuggguagaagua

SEQ ID NO: 3267788 - RNA, 13 nt, Vaccinia virus
uucuuguuauaua

SEQ ID NO: 3267789 - RNA, 20 nt, Vaccinia virus
aauucuucaauaaaaugaga

SEQ ID NO: 3267790 - RNA, 18 nt, Vaccinia virus
uauuuuuuuauacuucua

SEQ ID NO: 3267791 - RNA, 15 nt, Vaccinia virus
auaucuaauuucugu

SEQ ID NO: 3267792 - RNA, 21 nt, Vaccinia virus
caaguaugaagaaaaauguug

SEQ ID NO: 3267793 - RNA, 18 nt, Vaccinia virus
acaaauggauguuaaugu

SEQ ID NO: 3267794 - RNA, 20 nt, Vaccinia virus
auuuguauagauaauuacga

SEQ ID NO: 3267795 - RNA, 22 nt, Vaccinia virus
aucacaacaucguuuuugauau

SEQ ID NO: 3267796 - RNA, 17 nt, Vaccinia virus
uccgagucagauccaga

SEQ ID NO: 3267797 - RNA, 17 nt, Vaccinia virus
guaacuguaaauuucuc

SEQ ID NO: 3267798 - RNA, 19 nt, Vaccinia virus
cuagaauuagaauuacaaa

SEQ ID NO: 3267799 - RNA, 16 nt, Vaccinia virus
acagcuggagauuauc

SEQ ID NO: 3267800 - RNA, 17 nt, Vaccinia virus
aacaagaucuuugauau

SEQ ID NO: 3267801 - RNA, 14 nt, Vaccinia virus
uguugaaaaugaaa

SEQ ID NO: 3267802 - RNA, 21 nt, Vaccinia virus
auuaucuuuuuagacacguau

SEQ ID NO: 3267803 - RNA, 18 nt, Vaccinia virus
uuguauccauacuguaug

SEQ ID NO: 3267804 - RNA, 21 nt, Vaccinia virus
uaagacuuuacuuuucuaaau

SEQ ID NO: 3267805 - RNA, 16 nt, Vaccinia virus
uuccaaaaacauauga

SEQ ID NO: 3267806 - RNA, 20 nt, Vaccinia virus
uacaagcucgguuuuaacuu

SEQ ID NO: 3267807 - RNA, 15 nt, Vaccinia virus
acaacgaauguguac

SEQ ID NO: 3267808 - RNA, 16 nt, Vaccinia virus
ccuuaccaugcaauaa

SEQ ID NO: 3267809 - RNA, 22 nt, Vaccinia virus
acauugauuaaauuuuaauaua

SEQ ID NO: 3267810 - RNA, 14 nt, Vaccinia virus
gaauuugauacugu

SEQ ID NO: 3267811 - RNA, 22 nt, Vaccinia virus
cuaauguauuaguuaaauauua

SEQ ID NO: 3267812 - RNA, 23 nt, Vaccinia virus
uacuaccugcuguuguuuauuca

SEQ ID NO: 3267813 - RNA, 18 nt, Vaccinia virus
ggaaauuuaugaagaugu

SEQ ID NO: 3267814 - RNA, 15 nt, Vaccinia virus
uuuuccaaaguuuua

SEQ ID NO: 3267815 - RNA, 15 nt, Vaccinia virus
gacgauaauaauuua

SEQ ID NO: 3267816 - RNA, 19 nt, Vaccinia virus
uguaucaaacaguuuggua

SEQ ID NO: 3267817 - RNA, 14 nt, Vaccinia virus
auacacaaaaagaa

SEQ ID NO: 3267818 - RNA, 13 nt, Vaccinia virus
aacaucaaacaug

SEQ ID NO: 3267819 - RNA, 19 nt, Vaccinia virus
cgauucuauauauacucuu

SEQ ID NO: 3267820 - RNA, 18 nt, Vaccinia virus
acuauauguuccaguaau

SEQ ID NO: 3267821 - RNA, 16 nt, Vaccinia virus
ccaucugguuuaauau

SEQ ID NO: 3267822 - RNA, 15 nt, Vaccinia virus
guaugcaauauauca

SEQ ID NO: 3267823 - RNA, 19 nt, Vaccinia virus
gaacauagaacuaguucuc

SEQ ID NO: 3267824 - RNA, 22 nt, Vaccinia virus
aguauuucuguguauuaauaga

SEQ ID NO: 3267825 - RNA, 15 nt, Vaccinia virus
acuuggggagaauga

SEQ ID NO: 3267826 - RNA, 23 nt, Vaccinia virus
ugacgaugaaaaugaugguacau

SEQ ID NO: 3267827 - RNA, 16 nt, Vaccinia virus
gcuacucguuuggaau

SEQ ID NO: 3267828 - RNA, 16 nt, Vaccinia virus
cuacaaaagaaucugu

SEQ ID NO: 3267829 - RNA, 20 nt, Vaccinia virus
uagauacauuggccguaaua

SEQ ID NO: 3267830 - RNA, 14 nt, Vaccinia virus
aaaacaaugaacua

SEQ ID NO: 3267831 - RNA, 16 nt, Vaccinia virus
uggaauuaguuagaua

SEQ ID NO: 3267832 - RNA, 14 nt, Vaccinia virus
ucaaucuuauucaa

SEQ ID NO: 3267833 - RNA, 22 nt, Vaccinia virus
augaucucgauauuucaaucau

SEQ ID NO: 3267834 - RNA, 15 nt, Vaccinia virus
agauagaaaugaauu

SEQ ID NO: 3267835 - RNA, 14 nt, Vaccinia virus
caauguuagaguau

SEQ ID NO: 3267836 - RNA, 19 nt, Vaccinia virus
aaauacguucuauugugua

SEQ ID NO: 3267837 - RNA, 16 nt, Vaccinia virus
aauuccauauauuugu

SEQ ID NO: 3267838 - RNA, 18 nt, Vaccinia virus
auaugccuccagaaguug

SEQ ID NO: 3267839 - RNA, 22 nt, Vaccinia virus
auuuagauuaaauccagaaguu

SEQ ID NO: 3267840 - RNA, 14 nt, Vaccinia virus
ucuguuugaagaaa

SEQ ID NO: 3267841 - RNA, 17 nt, Vaccinia virus
gugauuauuuuuuggua

SEQ ID NO: 3267842 - RNA, 14 nt, Vaccinia virus
uuguacagaaauca

SEQ ID NO: 3267843 - RNA, 12 nt, Vaccinia virus
guacauaauaga

SEQ ID NO: 3267844 - RNA, 15 nt, Vaccinia virus
auuaugaaacaauau

SEQ ID NO: 3267845 - RNA, 15 nt, Vaccinia virus
uuaagaaaauuauua

SEQ ID NO: 3267846 - RNA, 20 nt, Vaccinia virus
aauucacuguauaaaaagaa

SEQ ID NO: 3267847 - RNA, 19 nt, Vaccinia virus
cugaucuuaacuccucuau

SEQ ID NO: 3267848 - RNA, 22 nt, Vaccinia virus
augugcuaaaaucacugaacau

SEQ ID NO: 3267849 - RNA, 22 nt, Vaccinia virus
uggggaaauauggaagaaaguu

SEQ ID NO: 3267850 - RNA, 15 nt, Vaccinia virus
caugguggcauuuug

SEQ ID NO: 3267851 - RNA, 17 nt, Vaccinia virus
aucaacauuguuucaaa

SEQ ID NO: 3267852 - RNA, 16 nt, Vaccinia virus
ugaauucucauuuugc

SEQ ID NO: 3267853 - RNA, 15 nt, Vaccinia virus
gugucgauucaucaa

SEQ ID NO: 3267854 - RNA, 20 nt, Vaccinia virus
uuauguugccuaaacaagau

SEQ ID NO: 3267855 - RNA, 14 nt, Vaccinia virus
uucuuuuuauucuc

SEQ ID NO: 3267856 - RNA, 22 nt, Vaccinia virus
acuacaguaguaauuaaugaaa

SEQ ID NO: 3267857 - RNA, 15 nt, Vaccinia virus
uuggaugaaccauug

SEQ ID NO: 3267858 - RNA, 20 nt, Vaccinia virus
aaucaccgcaagaacacacg

SEQ ID NO: 3267859 - RNA, 16 nt, Vaccinia virus
aaucacuauagaaaau

SEQ ID NO: 3267860 - RNA, 16 nt, Vaccinia virus
aaagcaauuauuacaa

SEQ ID NO: 3267861 - RNA, 16 nt, Vaccinia virus
uuaaaugccuuauucu

SEQ ID NO: 3267862 - RNA, 18 nt, Vaccinia virus
acaucaugaaaugaugau

SEQ ID NO: 3267863 - RNA, 15 nt, Vaccinia virus
uacuacuauuauuga

SEQ ID NO: 3267864 - RNA, 15 nt, Vaccinia virus
auacggaauaaacau

SEQ ID NO: 3267865 - RNA, 18 nt, Vaccinia virus
auuuuaccucuucugaua

SEQ ID NO: 3267866 - RNA, 20 nt, Vaccinia virus
uaagcaaguacauggaugau

SEQ ID NO: 3267867 - RNA, 21 nt, Vaccinia virus
gacuuacgucugcuaaaauac

SEQ ID NO: 3267868 - RNA, 16 nt, Vaccinia virus
caaucucuauaucuau

SEQ ID NO: 3267869 - RNA, 14 nt, Vaccinia virus
uuauagaauuuaga

SEQ ID NO: 3267870 - RNA, 18 nt, Vaccinia virus
acacgggauaaauuauuu

SEQ ID NO: 3267871 - RNA, 21 nt, Vaccinia virus
uuauaaccuuuuccuuaucuu

SEQ ID NO: 3267872 - RNA, 21 nt, Vaccinia virus
ucuuauaauuguaacauccuu

SEQ ID NO: 3267873 - RNA, 22 nt, Vaccinia virus
aauuaucguuccugguauauag

SEQ ID NO: 3267874 - RNA, 16 nt, Vaccinia virus
uuaucaucuaaucauc

SEQ ID NO: 3267875 - RNA, 22 nt, Vaccinia virus
gaacguaguaguaaguauuuau

SEQ ID NO: 3267876 - RNA, 21 nt, Vaccinia virus
aagugacauuauaauuuuacc

SEQ ID NO: 3267877 - RNA, 18 nt, Vaccinia virus
cauggccgaugaauggau

SEQ ID NO: 3267878 - RNA, 22 nt, Vaccinia virus
gaaauguccguuauauaaucua

SEQ ID NO: 3267879 - RNA, 17 nt, Vaccinia virus
auaguucuuaacaucua

SEQ ID NO: 3267880 - RNA, 13 nt, Vaccinia virus
gucuuucacuaau

SEQ ID NO: 3267881 - RNA, 18 nt, Vaccinia virus
aauagauguuaguacagu

SEQ ID NO: 3267882 - RNA, 20 nt, Vaccinia virus
uaacaugcauuugaaaagau

SEQ ID NO: 3267883 - RNA, 23 nt, Vaccinia virus
cuagauaaaaaggaaucuauuaa

SEQ ID NO: 3267884 - RNA, 22 nt, Vaccinia virus
gcaugcgacuaugauaucaugu

SEQ ID NO: 3267885 - RNA, 19 nt, Vaccinia virus
auacauuauuacuaaacau

SEQ ID NO: 3267886 - RNA, 23 nt, Vaccinia virus
aaaaugcccaacaggaucauuug

SEQ ID NO: 3267887 - RNA, 19 nt, Vaccinia virus
ccccaggaucuccaacaaa

SEQ ID NO: 3267888 - RNA, 16 nt, Vaccinia virus
auuucuucauaugaug

SEQ ID NO: 3267889 - RNA, 22 nt, Vaccinia virus
auauauuuuucauaaauacacu

SEQ ID NO: 3267890 - RNA, 19 nt, Vaccinia virus
agcaauagugauagauuuu

SEQ ID NO: 3267891 - RNA, 17 nt, Vaccinia virus
agaaugcauccaaugag

SEQ ID NO: 3267892 - RNA, 16 nt, Vaccinia virus
aauuauguagaugaua

SEQ ID NO: 3267893 - RNA, 13 nt, Vaccinia virus
guaccaucuuauu

SEQ ID NO: 3267894 - RNA, 17 nt, Vaccinia virus
auacuuuuaggaaauca

SEQ ID NO: 3267895 - RNA, 16 nt, Vaccinia virus
aauggauaauuuaaga

SEQ ID NO: 3267896 - RNA, 20 nt, Vaccinia virus
aaguauuugaacauguagau

SEQ ID NO: 3267897 - RNA, 14 nt, Vaccinia virus
aucuauguagaauc

SEQ ID NO: 3267898 - RNA, 15 nt, Vaccinia virus
uucaauaaaugauuc

SEQ ID NO: 3267899 - RNA, 14 nt, Vaccinia virus
aaaauauaaugaua

SEQ ID NO: 3267900 - RNA, 22 nt, Vaccinia virus
aucgaugaauaauacauuuaaa

SEQ ID NO: 3267901 - RNA, 22 nt, Vaccinia virus
auagagaauccuccgaauaauu

SEQ ID NO: 3267902 - RNA, 22 nt, Vaccinia virus
cagauugcauggugauuugucu

SEQ ID NO: 3267903 - RNA, 17 nt, Vaccinia virus
aucgaaaucuuaaauac

SEQ ID NO: 3267904 - RNA, 18 nt, Vaccinia virus
agcuuaaacagaugagac

SEQ ID NO: 3267905 - RNA, 19 nt, Vaccinia virus
auuacuaaaucuguauauc

SEQ ID NO: 3267906 - RNA, 13 nt, Vaccinia virus
cguauauauuguu

SEQ ID NO: 3267907 - RNA, 21 nt, Vaccinia virus
aauucgaggaagauguaaaga

SEQ ID NO: 3267908 - RNA, 17 nt, Vaccinia virus
guuaauaaguaaaugaa

SEQ ID NO: 3267909 - RNA, 13 nt, Vaccinia virus
uaggauuaacaua

SEQ ID NO: 3267910 - RNA, 23 nt, Vaccinia virus
auuaaggagauagcuucaucuau

SEQ ID NO: 3267911 - RNA, 20 nt, Vaccinia virus
aaguagaucaucugaaaauc

SEQ ID NO: 3267912 - RNA, 11 nt, Vaccinia virus
auuucauguac

SEQ ID NO: 3267913 - RNA, 18 nt, Vaccinia virus
cccaagcagcauccccgu

SEQ ID NO: 3267914 - RNA, 15 nt, Vaccinia virus
gugcaaggaaucauc

SEQ ID NO: 3267915 - RNA, 16 nt, Vaccinia virus
aaaguuaaucauauag

SEQ ID NO: 3267916 - RNA, 15 nt, Vaccinia virus
gacaugcaaaaaugc

SEQ ID NO: 3267917 - RNA, 13 nt, Vaccinia virus
aucacaaugacuu

SEQ ID NO: 3267918 - RNA, 19 nt, Vaccinia virus
cgauuuguuuaauuuuuag

SEQ ID NO: 3267919 - RNA, 21 nt, Vaccinia virus
augaaaacuuuaaauacuuaa

SEQ ID NO: 3267920 - RNA, 18 nt, Vaccinia virus
uucuaaaaaaauauuaac

SEQ ID NO: 3267921 - RNA, 19 nt, Vaccinia virus
ugguauuagaaucaaggau

SEQ ID NO: 3267922 - RNA, 22 nt, Vaccinia virus
aauuguuuuuguacauaauaga

SEQ ID NO: 3267923 - RNA, 21 nt, Vaccinia virus
ccguguucguuugaaugccac

SEQ ID NO: 3267924 - RNA, 17 nt, Vaccinia virus
auucgaaauuagaaagu

SEQ ID NO: 3267925 - RNA, 18 nt, Vaccinia virus
aagucauaucuagaauga

SEQ ID NO: 3267926 - RNA, 14 nt, Vaccinia virus
auugaucauuuaac

SEQ ID NO: 3267927 - RNA, 18 nt, Vaccinia virus
acggagccccaggaucuc

SEQ ID NO: 3267928 - RNA, 14 nt, Vaccinia virus
aacacauuaaacaa

SEQ ID NO: 3267929 - RNA, 12 nt, Vaccinia virus
aaucaucacugu

SEQ ID NO: 3267930 - RNA, 17 nt, Vaccinia virus
ucucucagguacagauu

SEQ ID NO: 3267931 - RNA, 22 nt, Vaccinia virus
auuaguucccaauggaucaaug

SEQ ID NO: 3267932 - RNA, 18 nt, Vaccinia virus
ucuguauuucauuguaaa

SEQ ID NO: 3267933 - RNA, 14 nt, Vaccinia virus
cgugguuguuuauc

SEQ ID NO: 3267934 - RNA, 18 nt, Vaccinia virus
aguauaaaacauuaaaug

SEQ ID NO: 3267935 - RNA, 14 nt, Vaccinia virus
auuauuaugaugau

SEQ ID NO: 3267936 - RNA, 18 nt, Vaccinia virus
uaguauuuauacuacuaa

SEQ ID NO: 3267937 - RNA, 16 nt, Vaccinia virus
cuauggccaaauguuc

SEQ ID NO: 3267938 - RNA, 17 nt, Vaccinia virus
aauggauuaucggaaau

SEQ ID NO: 3267939 - RNA, 20 nt, Vaccinia virus
cuaaauaauggcuguuugua

SEQ ID NO: 3267940 - RNA, 17 nt, Vaccinia virus
aauauccucagucaucu

SEQ ID NO: 3267941 - RNA, 23 nt, Vaccinia virus
caaccauuaacggaugaaaauaa

SEQ ID NO: 3267942 - RNA, 22 nt, Vaccinia virus
auauugauaauauuuuaauaga

SEQ ID NO: 3267943 - RNA, 20 nt, Vaccinia virus
caauacauuuuucuauguua

SEQ ID NO: 3267944 - RNA, 21 nt, Vaccinia virus
uacuagccuacugccuauuaa

SEQ ID NO: 3267945 - RNA, 15 nt, Vaccinia virus
gcggcuauagaaaag

SEQ ID NO: 3267946 - RNA, 18 nt, Vaccinia virus
aggcggauguugugaaug

SEQ ID NO: 3267947 - RNA, 19 nt, Vaccinia virus
uuacucauuuuuuauaaaa

SEQ ID NO: 3267948 - RNA, 17 nt, Vaccinia virus
gauacuauuuauuucua

SEQ ID NO: 3267949 - RNA, 20 nt, Vaccinia virus
auauacgaagaacaaugucc

SEQ ID NO: 3267950 - RNA, 14 nt, Vaccinia virus
uaaaaauuauguuu

SEQ ID NO: 3267951 - RNA, 16 nt, Vaccinia virus
accaaauuaaugaaua

SEQ ID NO: 3267952 - RNA, 20 nt, Vaccinia virus
agucugugguggaugauguc

SEQ ID NO: 3267953 - RNA, 16 nt, Vaccinia virus
cuuaauagacaaacug

SEQ ID NO: 3267954 - RNA, 13 nt, Vaccinia virus
uggcaaauuauuu

SEQ ID NO: 3267955 - RNA, 11 nt, Vaccinia virus
ugauugaagaa

SEQ ID NO: 3267956 - RNA, 23 nt, Vaccinia virus
cguauaaaaaucgauaaacugcg

SEQ ID NO: 3267957 - RNA, 15 nt, Vaccinia virus
caauaaaaaaaauug

SEQ ID NO: 3267958 - RNA, 17 nt, Vaccinia virus
uaacuggaucuuuauuu

SEQ ID NO: 3267959 - RNA, 15 nt, Vaccinia virus
cacaauguaugaaca

SEQ ID NO: 3267960 - RNA, 20 nt, Vaccinia virus
uucuuacauauuuuuuucuu

SEQ ID NO: 3267961 - RNA, 20 nt, Vaccinia virus
gguuaauguuguauuucauu

SEQ ID NO: 3267962 - RNA, 21 nt, Vaccinia virus
auggucauguuuauuucuagu

SEQ ID NO: 3267963 - RNA, 15 nt, Vaccinia virus
caaugagauaaauau

SEQ ID NO: 3267964 - RNA, 20 nt, Vaccinia virus
uacuaguggauguacaugua

SEQ ID NO: 3267965 - RNA, 22 nt, Vaccinia virus
auaauuguuuaagacugucaau

SEQ ID NO: 3267966 - RNA, 14 nt, Vaccinia virus
augcaaaaaugcua

SEQ ID NO: 3267967 - RNA, 14 nt, Vaccinia virus
aaaguaaaaaagaa

SEQ ID NO: 3267968 - RNA, 14 nt, Vaccinia virus
auguaaaaauguua

SEQ ID NO: 3267969 - RNA, 15 nt, Vaccinia virus
cuuaaauauuucuac

SEQ ID NO: 3267970 - RNA, 20 nt, Vaccinia virus
auaauagguggaacguauau

SEQ ID NO: 3267971 - RNA, 14 nt, Vaccinia virus
aauuuauuaaauac

SEQ ID NO: 3267972 - RNA, 14 nt, Vaccinia virus
acagauaaauggaa

SEQ ID NO: 3267973 - RNA, 15 nt, Vaccinia virus
uacuuugacaaaugu

SEQ ID NO: 3267974 - RNA, 15 nt, Vaccinia virus
uaucaauuauaugug

SEQ ID NO: 3267975 - RNA, 23 nt, Vaccinia virus
uaacaucuggccuguucauaaau

SEQ ID NO: 3267976 - RNA, 15 nt, Vaccinia virus
auaccguuaaauaua

SEQ ID NO: 3267977 - RNA, 19 nt, Vaccinia virus
uuacagaauuuguauccuu

SEQ ID NO: 3267978 - RNA, 16 nt, Vaccinia virus
agauaaucaaaauugu

SEQ ID NO: 3267979 - RNA, 23 nt, Vaccinia virus
auggauuuuuuuaaaaaggaaau

SEQ ID NO: 3267980 - RNA, 13 nt, Vaccinia virus
cguauauuucuau

SEQ ID NO: 3267981 - RNA, 17 nt, Vaccinia virus
uuugagguaaucuucuu

SEQ ID NO: 3267982 - RNA, 18 nt, Vaccinia virus
cgucucagaauucuaaau

SEQ ID NO: 3267983 - RNA, 21 nt, Vaccinia virus
uauuauguuaacggaaaguau

SEQ ID NO: 3267984 - RNA, 18 nt, Vaccinia virus
auaaaaacauuaacaaga

SEQ ID NO: 3267985 - RNA, 17 nt, Vaccinia virus
gauuugguaguauuuau

SEQ ID NO: 3267986 - RNA, 17 nt, Vaccinia virus
uuuguacgucacaucuu

SEQ ID NO: 3267987 - RNA, 19 nt, Vaccinia virus
uacugauaacaaaauauua

SEQ ID NO: 3267988 - RNA, 12 nt, Vaccinia virus
uuguucucuuag

SEQ ID NO: 3267989 - RNA, 22 nt, Vaccinia virus
aacaaaugcgccaaaguuauau

SEQ ID NO: 3267990 - RNA, 23 nt, Vaccinia virus
auauagauggcuuguaugucaaa

SEQ ID NO: 3267991 - RNA, 13 nt, Vaccinia virus
acugauuagaaau

SEQ ID NO: 3267992 - RNA, 21 nt, Vaccinia virus
guuuucccauagaacaucagu

SEQ ID NO: 3267993 - RNA, 17 nt, Vaccinia virus
ccuuaaauguaucuuua

SEQ ID NO: 3267994 - RNA, 18 nt, Vaccinia virus
cucaauaaaaaaauuaau

SEQ ID NO: 3267995 - RNA, 13 nt, Vaccinia virus
gucccuaauaacu

SEQ ID NO: 3267996 - RNA, 18 nt, Vaccinia virus
uuagacggcaacauagaa

SEQ ID NO: 3267997 - RNA, 20 nt, Vaccinia virus
uaucauuauaacucuagaau

SEQ ID NO: 3267998 - RNA, 17 nt, Vaccinia virus
agaucaacagaaauauu

SEQ ID NO: 3267999 - RNA, 16 nt, Vaccinia virus
acaccagcuuuuauca

SEQ ID NO: 3268000 - RNA, 13 nt, Vaccinia virus
uggaaucaauaau

SEQ ID NO: 3268001 - RNA, 17 nt, Vaccinia virus
caugauuccguauucug

SEQ ID NO: 3268002 - RNA, 15 nt, Vaccinia virus
cuauuuuaucauuuu

SEQ ID NO: 3268003 - RNA, 16 nt, Vaccinia virus
uaucugguucuaaaag

SEQ ID NO: 3268004 - RNA, 13 nt, Vaccinia virus
acuguucaggaau

SEQ ID NO: 3268005 - RNA, 18 nt, Vaccinia virus
uuaauauugcacaaagaa

SEQ ID NO: 3268006 - RNA, 12 nt, Vaccinia virus
uucauuccuaua

SEQ ID NO: 3268007 - RNA, 22 nt, Vaccinia virus
caaacauacaucuauaaauuug

SEQ ID NO: 3268008 - RNA, 21 nt, Vaccinia virus
uauuauuagauaaauuuauca

SEQ ID NO: 3268009 - RNA, 13 nt, Vaccinia virus
aauaauuuaucau

SEQ ID NO: 3268010 - RNA, 12 nt, Vaccinia virus
cuauuguuuauu

SEQ ID NO: 3268011 - RNA, 22 nt, Vaccinia virus
ucaauucguucgaugaguauau

SEQ ID NO: 3268012 - RNA, 20 nt, Vaccinia virus
aaaaauuuaaagaauguaua

SEQ ID NO: 3268013 - RNA, 21 nt, Vaccinia virus
uaacuauuuuuuauuacuuua

SEQ ID NO: 3268014 - RNA, 21 nt, Vaccinia virus
acccaaguuugagauuucaua

SEQ ID NO: 3268015 - RNA, 16 nt, Vaccinia virus
caaaaagauauaaaau

SEQ ID NO: 3268016 - RNA, 22 nt, Vaccinia virus
uggaaaagaauuuaccagauau

SEQ ID NO: 3268017 - RNA, 22 nt, Vaccinia virus
auggagucccagaccagaaaug

SEQ ID NO: 3268018 - RNA, 18 nt, Vaccinia virus
auuacucuccuagguuuc

SEQ ID NO: 3268019 - RNA, 16 nt, Vaccinia virus
accagccuacauuuug

SEQ ID NO: 3268020 - RNA, 17 nt, Vaccinia virus
gcuauguuaucaugaaa

SEQ ID NO: 3268021 - RNA, 13 nt, Vaccinia virus
uguuuccauccau

SEQ ID NO: 3268022 - RNA, 14 nt, Vaccinia virus
auaguaaaauauua

SEQ ID NO: 3268023 - RNA, 17 nt, Vaccinia virus
agacuacgaaacugaua

SEQ ID NO: 3268024 - RNA, 18 nt, Vaccinia virus
gguaaauguuuuuaucau

SEQ ID NO: 3268025 - RNA, 13 nt, Vaccinia virus
uaacuaaauguca

SEQ ID NO: 3268026 - RNA, 16 nt, Vaccinia virus
uaagauaguauauucu

SEQ ID NO: 3268027 - RNA, 14 nt, Vaccinia virus
aaauuguuaaauua

SEQ ID NO: 3268028 - RNA, 19 nt, Vaccinia virus
guaucuuaguauugaaaug

SEQ ID NO: 3268029 - RNA, 22 nt, Vaccinia virus
gcauccuucuaagauuauuuua

SEQ ID NO: 3268030 - RNA, 22 nt, Vaccinia virus
uucugacgucguucuacauaaa

SEQ ID NO: 3268031 - RNA, 20 nt, Vaccinia virus
cgaggaugaacucacuucuc

SEQ ID NO: 3268032 - RNA, 20 nt, Vaccinia virus
aaauugguauaaauguugua

SEQ ID NO: 3268033 - RNA, 16 nt, Vaccinia virus
gaaauaggaauaauua

SEQ ID NO: 3268034 - RNA, 15 nt, Vaccinia virus
auauuaaaauagcua

SEQ ID NO: 3268035 - RNA, 12 nt, Vaccinia virus
cuaauucuuucu

SEQ ID NO: 3268036 - RNA, 12 nt, Vaccinia virus
gcgaauauuaaa

SEQ ID NO: 3268037 - RNA, 18 nt, Vaccinia virus
uugaucaucguaauuaau

SEQ ID NO: 3268038 - RNA, 14 nt, Vaccinia virus
ccaguauucucgga

SEQ ID NO: 3268039 - RNA, 16 nt, Vaccinia virus
uaaauuuuuaacgauu

SEQ ID NO: 3268040 - RNA, 17 nt, Vaccinia virus
guuuauguacuaugcca

SEQ ID NO: 3268041 - RNA, 23 nt, Vaccinia virus
auuaucguuccugguauauagau

SEQ ID NO: 3268042 - RNA, 14 nt, Vaccinia virus
aggucuaugucucu

SEQ ID NO: 3268043 - RNA, 15 nt, Vaccinia virus
caaaacuauuucaga

SEQ ID NO: 3268044 - RNA, 18 nt, Vaccinia virus
auaauaucucuaauagau

SEQ ID NO: 3268045 - RNA, 20 nt, Vaccinia virus
auacagcuggagauuaucau

SEQ ID NO: 3268046 - RNA, 16 nt, Vaccinia virus
aguuucuauacugucu

SEQ ID NO: 3268047 - RNA, 18 nt, Vaccinia virus
caaaaggacguagacaau

SEQ ID NO: 3268048 - RNA, 16 nt, Vaccinia virus
acucuauucuucaaga

SEQ ID NO: 3268049 - RNA, 15 nt, Vaccinia virus
caaauggauaauuua

SEQ ID NO: 3268050 - RNA, 17 nt, Vaccinia virus
auuagaauagucucuuu

SEQ ID NO: 3268051 - RNA, 15 nt, Vaccinia virus
acugauucagaaaug

SEQ ID NO: 3268052 - RNA, 14 nt, Vaccinia virus
acguuuacguguau

SEQ ID NO: 3268053 - RNA, 18 nt, Vaccinia virus
cagaugccagauuacaaa

SEQ ID NO: 3268054 - RNA, 14 nt, Vaccinia virus
guguccauuuuuua

SEQ ID NO: 3268055 - RNA, 17 nt, Vaccinia virus
accggagauauagcuuc

SEQ ID NO: 3268056 - RNA, 14 nt, Vaccinia virus
aaaugguguaacuc

SEQ ID NO: 3268057 - RNA, 15 nt, Vaccinia virus
aauccaaacaucacu

SEQ ID NO: 3268058 - RNA, 13 nt, Vaccinia virus
uauuaaauaucug

SEQ ID NO: 3268059 - RNA, 16 nt, Vaccinia virus
gucuuacacauucgcu

SEQ ID NO: 3268060 - RNA, 13 nt, Vaccinia virus
aucaaggauuaua

SEQ ID NO: 3268061 - RNA, 15 nt, Vaccinia virus
agauacgucuauaca

SEQ ID NO: 3268062 - RNA, 11 nt, Vaccinia virus
ucgauacuuuu

SEQ ID NO: 3268063 - RNA, 21 nt, Vaccinia virus
gaugacaauauuauuaugaag

SEQ ID NO: 3268064 - RNA, 23 nt, Vaccinia virus
guacccuggauacgaaauaaauu

SEQ ID NO: 3268065 - RNA, 14 nt, Vaccinia virus
acuaaucaauaauc

SEQ ID NO: 3268066 - RNA, 16 nt, Vaccinia virus
agauguguauaauucu

SEQ ID NO: 3268067 - RNA, 16 nt, Vaccinia virus
aaacagaugguagaac

SEQ ID NO: 3268068 - RNA, 14 nt, Vaccinia virus
acaauaaaaauagu

SEQ ID NO: 3268069 - RNA, 16 nt, Vaccinia virus
cuaccgaauaaaguug

SEQ ID NO: 3268070 - RNA, 14 nt, Vaccinia virus
aauaugauagaaau

SEQ ID NO: 3268071 - RNA, 21 nt, Vaccinia virus
gcaucuuauuagaauauuaac

SEQ ID NO: 3268072 - RNA, 13 nt, Vaccinia virus
ugggugauggaua

SEQ ID NO: 3268073 - RNA, 13 nt, Vaccinia virus
acuaccuuaauaa

SEQ ID NO: 3268074 - RNA, 14 nt, Vaccinia virus
uugucauuaucuac

SEQ ID NO: 3268075 - RNA, 16 nt, Vaccinia virus
ugacuggaguguauau

SEQ ID NO: 3268076 - RNA, 15 nt, Vaccinia virus
caucgauaguauaau

SEQ ID NO: 3268077 - RNA, 16 nt, Vaccinia virus
aguaugaauaaucuuc

SEQ ID NO: 3268078 - RNA, 18 nt, Vaccinia virus
auaucauugucuaauaga

SEQ ID NO: 3268079 - RNA, 16 nt, Vaccinia virus
agaugacgaugauaug

SEQ ID NO: 3268080 - RNA, 13 nt, Vaccinia virus
uaaagauauuucu

SEQ ID NO: 3268081 - RNA, 19 nt, Vaccinia virus
uaaauauagguuacuagau

SEQ ID NO: 3268082 - RNA, 16 nt, Vaccinia virus
agggauuuuauaugau

SEQ ID NO: 3268083 - RNA, 21 nt, Vaccinia virus
cauggaaaagauaaaguuuua

SEQ ID NO: 3268084 - RNA, 14 nt, Vaccinia virus
aauauuuuuccauu

SEQ ID NO: 3268085 - RNA, 13 nt, Vaccinia virus
ccuagcuuuguua

SEQ ID NO: 3268086 - RNA, 15 nt, Vaccinia virus
acugcgaucugaaua

SEQ ID NO: 3268087 - RNA, 14 nt, Vaccinia virus
auguaaucauauaa

SEQ ID NO: 3268088 - RNA, 22 nt, Vaccinia virus
gacgauauuagaugauaauuua

SEQ ID NO: 3268089 - RNA, 12 nt, Vaccinia virus
guauugauaaau

SEQ ID NO: 3268090 - RNA, 22 nt, Vaccinia virus
aaguacuguucaaacaugauga

SEQ ID NO: 3268091 - RNA, 19 nt, Vaccinia virus
uaugaacuuucaaggacuu

SEQ ID NO: 3268092 - RNA, 16 nt, Vaccinia virus
gcauuucuaauacaug

SEQ ID NO: 3268093 - RNA, 23 nt, Vaccinia virus
aaauuaacagauaaaaagacuuu

SEQ ID NO: 3268094 - RNA, 22 nt, Vaccinia virus
accggacgacauauuaaucuuu

SEQ ID NO: 3268095 - RNA, 15 nt, Vaccinia virus
uaacuuggaaaagau

SEQ ID NO: 3268096 - RNA, 18 nt, Vaccinia virus
aggaaauuaugagaauga

SEQ ID NO: 3268097 - RNA, 18 nt, Vaccinia virus
ugaaacuaagucuagaau

SEQ ID NO: 3268098 - RNA, 17 nt, Vaccinia virus
uaaaaauaguauuauca

SEQ ID NO: 3268099 - RNA, 12 nt, Vaccinia virus
gauauuaguaca

SEQ ID NO: 3268100 - RNA, 11 nt, Vaccinia virus
cguuagaugua

SEQ ID NO: 3268101 - RNA, 16 nt, Vaccinia virus
ugauagagguaaacuu

SEQ ID NO: 3268102 - RNA, 20 nt, Vaccinia virus
cggggaucguguucuacaua

SEQ ID NO: 3268103 - RNA, 22 nt, Vaccinia virus
cucaaagagaauuauauauuua

SEQ ID NO: 3268104 - RNA, 23 nt, Vaccinia virus
uagcuuuguuagacuagauacua

SEQ ID NO: 3268105 - RNA, 18 nt, Vaccinia virus
aggaucuagcaaaggaaa

SEQ ID NO: 3268106 - RNA, 22 nt, Vaccinia virus
auacacauuuucaaauaauaaa

SEQ ID NO: 3268107 - RNA, 19 nt, Vaccinia virus
aauaugaguuggaguugau

SEQ ID NO: 3268108 - RNA, 17 nt, Vaccinia virus
gauacuaguaugauggu

SEQ ID NO: 3268109 - RNA, 14 nt, Vaccinia virus
agauaucuucucaa

SEQ ID NO: 3268110 - RNA, 19 nt, Vaccinia virus
uauaacguuaugaaacgaa

SEQ ID NO: 3268111 - RNA, 17 nt, Vaccinia virus
ugacgcaguaacauaua

SEQ ID NO: 3268112 - RNA, 17 nt, Vaccinia virus
uaauccaucaacaaugu

SEQ ID NO: 3268113 - RNA, 22 nt, Vaccinia virus
agaucugauaauauuaaaaagu

SEQ ID NO: 3268114 - RNA, 14 nt, Vaccinia virus
ccuuguuauccauu

SEQ ID NO: 3268115 - RNA, 20 nt, Vaccinia virus
cucuauuauagcuucuggac

SEQ ID NO: 3268116 - RNA, 14 nt, Vaccinia virus
ucgacaguguauac

SEQ ID NO: 3268117 - RNA, 13 nt, Vaccinia virus
uaguagauacaua

SEQ ID NO: 3268118 - RNA, 18 nt, Vaccinia virus
ugacaucuaguauugaua

SEQ ID NO: 3268119 - RNA, 11 nt, Vaccinia virus
uauauauacag

SEQ ID NO: 3268120 - RNA, 19 nt, Vaccinia virus
uuucaaagcaauuguauua

SEQ ID NO: 3268121 - RNA, 22 nt, Vaccinia virus
accaacguuaguaaucauauaa

SEQ ID NO: 3268122 - RNA, 16 nt, Vaccinia virus
aucccuacauauuuua

SEQ ID NO: 3268123 - RNA, 15 nt, Vaccinia virus
aauacuuaguuucca

SEQ ID NO: 3268124 - RNA, 15 nt, Vaccinia virus
acgcaacaaaugauu

SEQ ID NO: 3268125 - RNA, 19 nt, Vaccinia virus
acugcgauuguauuauccg

SEQ ID NO: 3268126 - RNA, 15 nt, Vaccinia virus
uaauaucuaaauauu

SEQ ID NO: 3268127 - RNA, 12 nt, Vaccinia virus
acaauauuuccg

SEQ ID NO: 3268128 - RNA, 22 nt, Vaccinia virus
cauuuccaaaucuaacuucuag

SEQ ID NO: 3268129 - RNA, 17 nt, Vaccinia virus
auuugacgcuuuucucu

SEQ ID NO: 3268130 - RNA, 15 nt, Vaccinia virus
guauauucucuaguu

SEQ ID NO: 3268131 - RNA, 22 nt, Vaccinia virus
cagacucugauuugaacaaugc

SEQ ID NO: 3268132 - RNA, 18 nt, Vaccinia virus
gaacuucugaucauuaau

SEQ ID NO: 3268133 - RNA, 15 nt, Vaccinia virus
guuaucuauuucaaa

SEQ ID NO: 3268134 - RNA, 13 nt, Vaccinia virus
aguuaauagcuuc

SEQ ID NO: 3268135 - RNA, 12 nt, Vaccinia virus
aaauugucuaua

SEQ ID NO: 3268136 - RNA, 19 nt, Vaccinia virus
gaagcacgcugcuaauaaa

SEQ ID NO: 3268137 - RNA, 15 nt, Vaccinia virus
aggcacaaugaauga

SEQ ID NO: 3268138 - RNA, 20 nt, Vaccinia virus
aauuucuuagucauagacaa

SEQ ID NO: 3268139 - RNA, 17 nt, Vaccinia virus
auucuugguuaaacuca

SEQ ID NO: 3268140 - RNA, 11 nt, Vaccinia virus
cuuuauccaua

SEQ ID NO: 3268141 - RNA, 15 nt, Vaccinia virus
aucuagacucuauau

SEQ ID NO: 3268142 - RNA, 20 nt, Vaccinia virus
uacaaaauuugcaucuacau

SEQ ID NO: 3268143 - RNA, 15 nt, Vaccinia virus
aauuuauaucuaaga

SEQ ID NO: 3268144 - RNA, 19 nt, Vaccinia virus
agaaaucauccguuguuau

SEQ ID NO: 3268145 - RNA, 12 nt, Vaccinia virus
guguauuuccau

SEQ ID NO: 3268146 - RNA, 18 nt, Vaccinia virus
acuguucccgucaauaga

SEQ ID NO: 3268147 - RNA, 16 nt, Vaccinia virus
ucuacugauaaaacug

SEQ ID NO: 3268148 - RNA, 15 nt, Vaccinia virus
aucauacuuagaauu

SEQ ID NO: 3268149 - RNA, 20 nt, Vaccinia virus
cgauauuauccgaagacaga

SEQ ID NO: 3268150 - RNA, 19 nt, Vaccinia virus
agauuauggagcaaacauu

SEQ ID NO: 3268151 - RNA, 13 nt, Vaccinia virus
uaaaacaauaaau

SEQ ID NO: 3268152 - RNA, 16 nt, Vaccinia virus
aauauuucuauuucua

SEQ ID NO: 3268153 - RNA, 17 nt, Vaccinia virus
uauuuccagaugaugau

SEQ ID NO: 3268154 - RNA, 19 nt, Vaccinia virus
auguaucaaagauauagau

SEQ ID NO: 3268155 - RNA, 18 nt, Vaccinia virus
gaucuaauggaauccaau

SEQ ID NO: 3268156 - RNA, 23 nt, Vaccinia virus
aguauucuucuugucaucuuguu

SEQ ID NO: 3268157 - RNA, 17 nt, Vaccinia virus
gcguacuucagguuucu

SEQ ID NO: 3268158 - RNA, 17 nt, Vaccinia virus
ccaauuuggauauagca

SEQ ID NO: 3268159 - RNA, 15 nt, Vaccinia virus
ucaauaugagcaaug

SEQ ID NO: 3268160 - RNA, 19 nt, Vaccinia virus
uauucgucgucgacuauca

SEQ ID NO: 3268161 - RNA, 13 nt, Vaccinia virus
auagaagauagau

SEQ ID NO: 3268162 - RNA, 18 nt, Vaccinia virus
agucauguuaaaaaugac

SEQ ID NO: 3268163 - RNA, 13 nt, Vaccinia virus
uuauagauguaca

SEQ ID NO: 3268164 - RNA, 13 nt, Vaccinia virus
cuauauauguuuu

SEQ ID NO: 3268165 - RNA, 15 nt, Vaccinia virus
caaauaacaaaaucc

SEQ ID NO: 3268166 - RNA, 19 nt, Vaccinia virus
guaaaaugaaauaucuuaa

SEQ ID NO: 3268167 - RNA, 18 nt, Vaccinia virus
aaauaacaguaucauuua

SEQ ID NO: 3268168 - RNA, 22 nt, Vaccinia virus
ugguauaucuggaaagaaaucu

SEQ ID NO: 3268169 - RNA, 23 nt, Vaccinia virus
agauaucucuggauauaucacaa

SEQ ID NO: 3268170 - RNA, 17 nt, Vaccinia virus
auuguuuuuguacauaa

SEQ ID NO: 3268171 - RNA, 19 nt, Vaccinia virus
uaguuacuacgaucucauc

SEQ ID NO: 3268172 - RNA, 21 nt, Vaccinia virus
gugucaaacuguguagcuaga

SEQ ID NO: 3268173 - RNA, 22 nt, Vaccinia virus
cuauuguuacaaaaguuaauaa

SEQ ID NO: 3268174 - RNA, 17 nt, Vaccinia virus
aaucacuuuaacuuuua

SEQ ID NO: 3268175 - RNA, 22 nt, Vaccinia virus
uauaucgcauauuuauaucgug

SEQ ID NO: 3268176 - RNA, 15 nt, Vaccinia virus
auaaguguugucaaa

SEQ ID NO: 3268177 - RNA, 17 nt, Vaccinia virus
agcaucagcaucuggcu

SEQ ID NO: 3268178 - RNA, 20 nt, Vaccinia virus
ucugaauuauauuuauuauu

SEQ ID NO: 3268179 - RNA, 13 nt, Vaccinia virus
uuacucaugauua

SEQ ID NO: 3268180 - RNA, 17 nt, Vaccinia virus
agauauauuauaauucu

SEQ ID NO: 3268181 - RNA, 12 nt, Vaccinia virus
aauauuuaacuc

SEQ ID NO: 3268182 - RNA, 13 nt, Vaccinia virus
aacagaacagaua

SEQ ID NO: 3268183 - RNA, 14 nt, Vaccinia virus
caaaauacauaauu

SEQ ID NO: 3268184 - RNA, 13 nt, Vaccinia virus
acacucucaauau

SEQ ID NO: 3268185 - RNA, 14 nt, Vaccinia virus
uauugaguggaaag

SEQ ID NO: 3268186 - RNA, 20 nt, Vaccinia virus
cauuagauauuauggcauug

SEQ ID NO: 3268187 - RNA, 14 nt, Vaccinia virus
cuauuguuuggaau

SEQ ID NO: 3268188 - RNA, 12 nt, Vaccinia virus
gcucuacaaaau

SEQ ID NO: 3268189 - RNA, 13 nt, Vaccinia virus
cauauauuucauu

SEQ ID NO: 3268190 - RNA, 22 nt, Vaccinia virus
aauacuaauaggucuaaaaacc

SEQ ID NO: 3268191 - RNA, 15 nt, Vaccinia virus
uguauauuuuuucau

SEQ ID NO: 3268192 - RNA, 12 nt, Vaccinia virus
gaacaguuuauu

SEQ ID NO: 3268193 - RNA, 13 nt, Vaccinia virus
ucaaagcaucaaa

SEQ ID NO: 3268194 - RNA, 14 nt, Vaccinia virus
agcuauuuaaaugg

SEQ ID NO: 3268195 - RNA, 22 nt, Vaccinia virus
aaaguagaugguauuucugaaa

SEQ ID NO: 3268196 - RNA, 17 nt, Vaccinia virus
ucacauccuuuauuuua

SEQ ID NO: 3268197 - RNA, 12 nt, Vaccinia virus
gcauccauccaa

SEQ ID NO: 3268198 - RNA, 15 nt, Vaccinia virus
aucggcuuuaacaau

SEQ ID NO: 3268199 - RNA, 19 nt, Vaccinia virus
uagcuaauauaaaaauaua

SEQ ID NO: 3268200 - RNA, 16 nt, Vaccinia virus
augauauuagaacugc

SEQ ID NO: 3268201 - RNA, 19 nt, Vaccinia virus
uagagauaccaaagacuuu

SEQ ID NO: 3268202 - RNA, 15 nt, Vaccinia virus
uguacaauaugaaca

SEQ ID NO: 3268203 - RNA, 15 nt, Vaccinia virus
gucaauugauucuua

SEQ ID NO: 3268204 - RNA, 15 nt, Vaccinia virus
uaccucuacacuauu

SEQ ID NO: 3268205 - RNA, 21 nt, Vaccinia virus
ccauaauggcgcuaucuuuca

SEQ ID NO: 3268206 - RNA, 12 nt, Vaccinia virus
uagcuaauauua

SEQ ID NO: 3268207 - RNA, 12 nt, Vaccinia virus
ucggaauuauuu

SEQ ID NO: 3268208 - RNA, 12 nt, Vaccinia virus
auacauauacca

SEQ ID NO: 3268209 - RNA, 22 nt, Vaccinia virus
aaugucuauaguucucaucuuu

SEQ ID NO: 3268210 - RNA, 16 nt, Vaccinia virus
auggucucacaaaaaa

SEQ ID NO: 3268211 - RNA, 14 nt, Vaccinia virus
gauacauaaacgaa

SEQ ID NO: 3268212 - RNA, 19 nt, Vaccinia virus
auguagaagguucauaugu

SEQ ID NO: 3268213 - RNA, 17 nt, Vaccinia virus
uaccaaccuacacuauu

SEQ ID NO: 3268214 - RNA, 14 nt, Vaccinia virus
auucucuacagaug

SEQ ID NO: 3268215 - RNA, 17 nt, Vaccinia virus
aaacgucguauguagaa

SEQ ID NO: 3268216 - RNA, 13 nt, Vaccinia virus
uuggugaauccau

SEQ ID NO: 3268217 - RNA, 16 nt, Vaccinia virus
acaauuucuauuuccu

SEQ ID NO: 3268218 - RNA, 20 nt, Vaccinia virus
acauaugguuucuaaaucua

SEQ ID NO: 3268219 - RNA, 17 nt, Vaccinia virus
aggaaauggaagauauu

SEQ ID NO: 3268220 - RNA, 13 nt, Vaccinia virus
uuccuuccaauga

SEQ ID NO: 3268221 - RNA, 19 nt, Vaccinia virus
aaauucaguugcuggaauu

SEQ ID NO: 3268222 - RNA, 15 nt, Vaccinia virus
caauacuaauucaaa

SEQ ID NO: 3268223 - RNA, 13 nt, Vaccinia virus
agaacuaacacaa

SEQ ID NO: 3268224 - RNA, 15 nt, Vaccinia virus
aauuacacauuucca

SEQ ID NO: 3268225 - RNA, 18 nt, Vaccinia virus
ugauuuuuccuaaaucua

SEQ ID NO: 3268226 - RNA, 11 nt, Vaccinia virus
cucuuucugaa

SEQ ID NO: 3268227 - RNA, 18 nt, Vaccinia virus
uuacuaccaucauuauua

SEQ ID NO: 3268228 - RNA, 13 nt, Vaccinia virus
cuaccugcuguug

SEQ ID NO: 3268229 - RNA, 11 nt, Vaccinia virus
cuagauacauu

SEQ ID NO: 3268230 - RNA, 15 nt, Vaccinia virus
cagauacagauacag

SEQ ID NO: 3268231 - RNA, 17 nt, Vaccinia virus
agcuauguuuacugcug

SEQ ID NO: 3268232 - RNA, 22 nt, Vaccinia virus
aaugagauuauuaaguauuuau

SEQ ID NO: 3268233 - RNA, 14 nt, Vaccinia virus
uaccgcacuuauau

SEQ ID NO: 3268234 - RNA, 23 nt, Vaccinia virus
gucuugaacucgcugaaugaucu

SEQ ID NO: 3268235 - RNA, 21 nt, Vaccinia virus
acuugauacgcucauuaauaa

SEQ ID NO: 3268236 - RNA, 15 nt, Vaccinia virus
auucuggacauagcu

SEQ ID NO: 3268237 - RNA, 20 nt, Vaccinia virus
aaauauaguagaauuucauu

SEQ ID NO: 3268238 - RNA, 23 nt, Vaccinia virus
ugaaccaguuaauguauaucuuu

SEQ ID NO: 3268239 - RNA, 14 nt, Vaccinia virus
gaucauuaaucauc

SEQ ID NO: 3268240 - RNA, 13 nt, Vaccinia virus
uagaauggaugaa

SEQ ID NO: 3268241 - RNA, 19 nt, Vaccinia virus
uauucgacuugguguuuga

SEQ ID NO: 3268242 - RNA, 22 nt, Vaccinia virus
aauuuuguuuuuuuacuuucua

SEQ ID NO: 3268243 - RNA, 17 nt, Vaccinia virus
uuuguaaauaacuaucu

SEQ ID NO: 3268244 - RNA, 16 nt, Vaccinia virus
ugcaauaacaaagauu

SEQ ID NO: 3268245 - RNA, 17 nt, Vaccinia virus
gcauaaacuaacacaag

SEQ ID NO: 3268246 - RNA, 15 nt, Vaccinia virus
guuaguacaguguua

SEQ ID NO: 3268247 - RNA, 19 nt, Vaccinia virus
auauauguuuucaucauuu

SEQ ID NO: 3268248 - RNA, 15 nt, Vaccinia virus
acuuuuucucauaau

SEQ ID NO: 3268249 - RNA, 18 nt, Vaccinia virus
gugguauuggauagaauu

SEQ ID NO: 3268250 - RNA, 18 nt, Vaccinia virus
cggucgaugucaauaaua

SEQ ID NO: 3268251 - RNA, 18 nt, Vaccinia virus
aaacaaguuuucauauua

SEQ ID NO: 3268252 - RNA, 17 nt, Vaccinia virus
uaaaaaaaaaauacuua

SEQ ID NO: 3268253 - RNA, 14 nt, Vaccinia virus
uugccauuaguuuu

SEQ ID NO: 3268254 - RNA, 15 nt, Vaccinia virus
acaaugcuaauauau

SEQ ID NO: 3268255 - RNA, 14 nt, Vaccinia virus
aauauuuaguauua

SEQ ID NO: 3268256 - RNA, 12 nt, Vaccinia virus
aacuuuugcaua

SEQ ID NO: 3268257 - RNA, 20 nt, Vaccinia virus
uuaucaagauguguauguuu

SEQ ID NO: 3268258 - RNA, 15 nt, Vaccinia virus
ccauaauuuucucuc

SEQ ID NO: 3268259 - RNA, 18 nt, Vaccinia virus
auacagacgauaacuuga

SEQ ID NO: 3268260 - RNA, 14 nt, Vaccinia virus
ugguaucaacagau

SEQ ID NO: 3268261 - RNA, 15 nt, Vaccinia virus
agaaagaagaaauac

SEQ ID NO: 3268262 - RNA, 12 nt, Vaccinia virus
acuauuugucua

SEQ ID NO: 3268263 - RNA, 13 nt, Vaccinia virus
gaauauuucuauu

SEQ ID NO: 3268264 - RNA, 14 nt, Vaccinia virus
acaacauuaauaca

SEQ ID NO: 3268265 - RNA, 15 nt, Vaccinia virus
aucuuguucagaaau

SEQ ID NO: 3268266 - RNA, 13 nt, Vaccinia virus
aacuuuaaauacu

SEQ ID NO: 3268267 - RNA, 22 nt, Vaccinia virus
guacauuuuccagauuaacaga

SEQ ID NO: 3268268 - RNA, 21 nt, Vaccinia virus
ugcggauaugauccaagaggg

SEQ ID NO: 3268269 - RNA, 16 nt, Vaccinia virus
acauuuuugaaauacc

SEQ ID NO: 3268270 - RNA, 22 nt, Vaccinia virus
ucuuuacccauccaauacuacu

SEQ ID NO: 3268271 - RNA, 18 nt, Vaccinia virus
gaaauauaguaauaagau

SEQ ID NO: 3268272 - RNA, 19 nt, Vaccinia virus
accaugucguuaacuauaa

SEQ ID NO: 3268273 - RNA, 18 nt, Vaccinia virus
cauggacauaguaauaca

SEQ ID NO: 3268274 - RNA, 16 nt, Vaccinia virus
ugaagcaaaauaugcu

SEQ ID NO: 3268275 - RNA, 14 nt, Vaccinia virus
auacucuauuaaug

SEQ ID NO: 3268276 - RNA, 18 nt, Vaccinia virus
accucuccuauaugaaua

SEQ ID NO: 3268277 - RNA, 14 nt, Vaccinia virus
ucuuuauucucuac

SEQ ID NO: 3268278 - RNA, 17 nt, Vaccinia virus
cugucaauagacaucca

SEQ ID NO: 3268279 - RNA, 13 nt, Vaccinia virus
gugcacugguguc

SEQ ID NO: 3268280 - RNA, 20 nt, Vaccinia virus
uuagaaaugaguucauuaaa

SEQ ID NO: 3268281 - RNA, 14 nt, Vaccinia virus
gacgcuacacuauc

SEQ ID NO: 3268282 - RNA, 13 nt, Vaccinia virus
uacagauguuaca

SEQ ID NO: 3268283 - RNA, 16 nt, Vaccinia virus
uauacaauuguuugua

SEQ ID NO: 3268284 - RNA, 17 nt, Vaccinia virus
gaauucauuugauguau

SEQ ID NO: 3268285 - RNA, 21 nt, Vaccinia virus
aguaaauagauaguuuuucca

SEQ ID NO: 3268286 - RNA, 12 nt, Vaccinia virus
auagaaucugug

SEQ ID NO: 3268287 - RNA, 11 nt, Vaccinia virus
uugucuagaau

SEQ ID NO: 3268288 - RNA, 22 nt, Vaccinia virus
auagaaacauauucuaugaauu

SEQ ID NO: 3268289 - RNA, 19 nt, Vaccinia virus
cuucagcggauccuguauu

SEQ ID NO: 3268290 - RNA, 18 nt, Vaccinia virus
uauacauucuucuguuaa

SEQ ID NO: 3268291 - RNA, 17 nt, Vaccinia virus
cuacaacagauauucca

SEQ ID NO: 3268292 - RNA, 12 nt, Vaccinia virus
uaauaauuguau

SEQ ID NO: 3268293 - RNA, 14 nt, Vaccinia virus
auaucgauguuuaa

SEQ ID NO: 3268294 - RNA, 15 nt, Vaccinia virus
aacccagauaauaac

SEQ ID NO: 3268295 - RNA, 16 nt, Vaccinia virus
aaauagagagcuauau

SEQ ID NO: 3268296 - RNA, 14 nt, Vaccinia virus
cuggcauuaucuau

SEQ ID NO: 3268297 - RNA, 24 nt, Vaccinia virus
ucaauaauuguggcuauauauuca

SEQ ID NO: 3268298 - RNA, 19 nt, Vaccinia virus
auaucgagaucuuuuguau

SEQ ID NO: 3268299 - RNA, 13 nt, Vaccinia virus
acauuaaauguau

SEQ ID NO: 3268300 - RNA, 18 nt, Vaccinia virus
gaacaugugugaaaauau

SEQ ID NO: 3268301 - RNA, 12 nt, Vaccinia virus
ugauagcaagga

SEQ ID NO: 3268302 - RNA, 14 nt, Vaccinia virus
uuagccauuuaauu

SEQ ID NO: 3268303 - RNA, 23 nt, Vaccinia virus
acgucuagaguuuauaucaauaa

SEQ ID NO: 3268304 - RNA, 24 nt, Vaccinia virus
aacaucgauucccauaugauguuu

SEQ ID NO: 3268305 - RNA, 20 nt, Vaccinia virus
cauaucaucauuguguaaac

SEQ ID NO: 3268306 - RNA, 19 nt, Vaccinia virus
acacuaauauuaugaugaa

SEQ ID NO: 3268307 - RNA, 14 nt, Vaccinia virus
uauuauaaacucac

SEQ ID NO: 3268308 - RNA, 22 nt, Vaccinia virus
uaucaaucaaaacagaauauga

SEQ ID NO: 3268309 - RNA, 14 nt, Vaccinia virus
cucauuauuuccca

SEQ ID NO: 3268310 - RNA, 21 nt, Vaccinia virus
auuggcaaauuauuucuucug

SEQ ID NO: 3268311 - RNA, 23 nt, Vaccinia virus
guauucauuguuuagaauacaag

SEQ ID NO: 3268312 - RNA, 15 nt, Vaccinia virus
gaaacgauguaguua

SEQ ID NO: 3268313 - RNA, 14 nt, Vaccinia virus
uucuggaucucacc

SEQ ID NO: 3268314 - RNA, 22 nt, Vaccinia virus
aaaagcuauuaucaaauacugu

SEQ ID NO: 3268315 - RNA, 18 nt, Vaccinia virus
gaauaucauuaacgauau

SEQ ID NO: 3268316 - RNA, 17 nt, Vaccinia virus
aaggauacuaaacauug

SEQ ID NO: 3268317 - RNA, 18 nt, Vaccinia virus
uuccauucggauucacaa

SEQ ID NO: 3268318 - RNA, 22 nt, Vaccinia virus
aaugauugcauagugaauauau

SEQ ID NO: 3268319 - RNA, 15 nt, Vaccinia virus
acgcuauuaaucuuu

SEQ ID NO: 3268320 - RNA, 21 nt, Vaccinia virus
uuauauuaacacauacauuuu

SEQ ID NO: 3268321 - RNA, 22 nt, Vaccinia virus
aguuugcggauaaugauagaca

SEQ ID NO: 3268322 - RNA, 16 nt, Vaccinia virus
auguagaauccaucag

SEQ ID NO: 3268323 - RNA, 14 nt, Vaccinia virus
auuuuuaaaaauuu

SEQ ID NO: 3268324 - RNA, 14 nt, Vaccinia virus
acaauuuacauguu

SEQ ID NO: 3268325 - RNA, 15 nt, Vaccinia virus
gcugcagcauauaac

SEQ ID NO: 3268326 - RNA, 14 nt, Vaccinia virus
agauuuagaaaugu

SEQ ID NO: 3268327 - RNA, 14 nt, Vaccinia virus
cuccaauacuaauu

SEQ ID NO: 3268328 - RNA, 20 nt, Vaccinia virus
auuacgaauauauaaaagac

SEQ ID NO: 3268329 - RNA, 15 nt, Vaccinia virus
auguauaaaguguau

SEQ ID NO: 3268330 - RNA, 19 nt, Vaccinia virus
aauacugaugcauuuucca

SEQ ID NO: 3268331 - RNA, 14 nt, Vaccinia virus
uaucucuugucuga

SEQ ID NO: 3268332 - RNA, 13 nt, Vaccinia virus
ugauauuuggauc

SEQ ID NO: 3268333 - RNA, 16 nt, Vaccinia virus
ucuacaagaugucaga

SEQ ID NO: 3268334 - RNA, 20 nt, Vaccinia virus
uggaauccaauuguuugaua

SEQ ID NO: 3268335 - RNA, 14 nt, Vaccinia virus
uuccuucuuauucu

SEQ ID NO: 3268336 - RNA, 15 nt, Vaccinia virus
gacauaucagaugau

SEQ ID NO: 3268337 - RNA, 22 nt, Vaccinia virus
augguaacgauaacacaaaaug

SEQ ID NO: 3268338 - RNA, 13 nt, Vaccinia virus
cggaaaguauuuc

SEQ ID NO: 3268339 - RNA, 16 nt, Vaccinia virus
cagaggaugaaauaga

SEQ ID NO: 3268340 - RNA, 22 nt, Vaccinia virus
uuugaaaauguuacugaagaau

SEQ ID NO: 3268341 - RNA, 21 nt, Vaccinia virus
augacuucguaaaaaauaaua

SEQ ID NO: 3268342 - RNA, 12 nt, Vaccinia virus
ucaaaauuauuu

SEQ ID NO: 3268343 - RNA, 13 nt, Vaccinia virus
auacuaucaaaau

SEQ ID NO: 3268344 - RNA, 17 nt, Vaccinia virus
aagauacuguuuagaga

SEQ ID NO: 3268345 - RNA, 14 nt, Vaccinia virus
gauugauaacugaa

SEQ ID NO: 3268346 - RNA, 22 nt, Vaccinia virus
ugguaacgucaucaucaacaau

SEQ ID NO: 3268347 - RNA, 19 nt, Vaccinia virus
auauaccuagcaaacgauu

SEQ ID NO: 3268348 - RNA, 14 nt, Vaccinia virus
aagauauuccaaga

SEQ ID NO: 3268349 - RNA, 17 nt, Vaccinia virus
uuuaacuuugaaauugu

SEQ ID NO: 3268350 - RNA, 15 nt, Vaccinia virus
uccaauagugaaacu

SEQ ID NO: 3268351 - RNA, 17 nt, Vaccinia virus
ugauaucgagaacagau

SEQ ID NO: 3268352 - RNA, 16 nt, Vaccinia virus
cugcaaauguaguauu

SEQ ID NO: 3268353 - RNA, 21 nt, Vaccinia virus
cauucuccgauaucuaauuuc

SEQ ID NO: 3268354 - RNA, 16 nt, Vaccinia virus
agauuauucuuaaaug

SEQ ID NO: 3268355 - RNA, 17 nt, Vaccinia virus
gacugaccaguauugau

SEQ ID NO: 3268356 - RNA, 23 nt, Vaccinia virus
auauacuaagcaaguacauggau

SEQ ID NO: 3268357 - RNA, 19 nt, Vaccinia virus
aaauuaaaggagcauguau

SEQ ID NO: 3268358 - RNA, 14 nt, Vaccinia virus
augaaacauuuaau

SEQ ID NO: 3268359 - RNA, 11 nt, Vaccinia virus
gacuuguuaau

SEQ ID NO: 3268360 - RNA, 14 nt, Vaccinia virus
uaauuguuaaacau

SEQ ID NO: 3268361 - RNA, 18 nt, Vaccinia virus
cugguacaggaguucagu

SEQ ID NO: 3268362 - RNA, 20 nt, Vaccinia virus
auauucgaaauuagaaagua

SEQ ID NO: 3268363 - RNA, 21 nt, Vaccinia virus
uacgagaaauuaauuauugua

SEQ ID NO: 3268364 - RNA, 13 nt, Vaccinia virus
aauuuuaacagau

SEQ ID NO: 3268365 - RNA, 17 nt, Vaccinia virus
uaauauccugaacagca

SEQ ID NO: 3268366 - RNA, 14 nt, Vaccinia virus
uauauaguaaugaa

SEQ ID NO: 3268367 - RNA, 14 nt, Vaccinia virus
caauaauauacaau

SEQ ID NO: 3268368 - RNA, 19 nt, Vaccinia virus
gcguuuuaugaaugaugau

SEQ ID NO: 3268369 - RNA, 20 nt, Vaccinia virus
ugcuaucaucacucuaaaau

SEQ ID NO: 3268370 - RNA, 15 nt, Vaccinia virus
agauuucgucuaaua

SEQ ID NO: 3268371 - RNA, 15 nt, Vaccinia virus
gaauacgauaauuau

SEQ ID NO: 3268372 - RNA, 20 nt, Vaccinia virus
caauaaugccgguauuggca

SEQ ID NO: 3268373 - RNA, 21 nt, Vaccinia virus
aaugaggucgcaaaaaaacug

SEQ ID NO: 3268374 - RNA, 16 nt, Vaccinia virus
uaacaaauuaaagaua

SEQ ID NO: 3268375 - RNA, 23 nt, Vaccinia virus
uuuauauauugcuuacuagaugu

SEQ ID NO: 3268376 - RNA, 15 nt, Vaccinia virus
aaucgauaacaagau

SEQ ID NO: 3268377 - RNA, 16 nt, Vaccinia virus
uuuagaagugauucuu

SEQ ID NO: 3268378 - RNA, 15 nt, Vaccinia virus
augcaauaacaaaga

SEQ ID NO: 3268379 - RNA, 17 nt, Vaccinia virus
gcucaguaauggauauu

SEQ ID NO: 3268380 - RNA, 21 nt, Vaccinia virus
cgauguggaaauuaaucugua

SEQ ID NO: 3268381 - RNA, 16 nt, Vaccinia virus
auauuaucguuuguaa

SEQ ID NO: 3268382 - RNA, 14 nt, Vaccinia virus
acaucaaaugaugu

SEQ ID NO: 3268383 - RNA, 10 nt, Vaccinia virus
cuaaauuaac

SEQ ID NO: 3268384 - RNA, 21 nt, Vaccinia virus
ugggacuauuggaauguguua

SEQ ID NO: 3268385 - RNA, 20 nt, Vaccinia virus
cugaguaccuacacuauuau

SEQ ID NO: 3268386 - RNA, 15 nt, Vaccinia virus
auuaguaaaaaauuu

SEQ ID NO: 3268387 - RNA, 16 nt, Vaccinia virus
gauagguuauugacau

SEQ ID NO: 3268388 - RNA, 18 nt, Vaccinia virus
uaaacaauuucacaaaug

SEQ ID NO: 3268389 - RNA, 19 nt, Vaccinia virus
aacacaagucuaauaaugu

SEQ ID NO: 3268390 - RNA, 15 nt, Vaccinia virus
aucaugguaugcaug

SEQ ID NO: 3268391 - RNA, 16 nt, Vaccinia virus
gcaaaaauaauaugau

SEQ ID NO: 3268392 - RNA, 16 nt, Vaccinia virus
ucguuugaugaucaua

SEQ ID NO: 3268393 - RNA, 12 nt, Vaccinia virus
accuccuucaug

SEQ ID NO: 3268394 - RNA, 21 nt, Vaccinia virus
uaggaaauuucaugcaacgaa

SEQ ID NO: 3268395 - RNA, 18 nt, Vaccinia virus
uuugguguaaaucuaauu

SEQ ID NO: 3268396 - RNA, 16 nt, Vaccinia virus
uuaguauaauuauuga

SEQ ID NO: 3268397 - RNA, 23 nt, Vaccinia virus
agauuuauugacggcuacucuaa

SEQ ID NO: 3268398 - RNA, 16 nt, Vaccinia virus
gacauaccaucuauca

SEQ ID NO: 3268399 - RNA, 12 nt, Vaccinia virus
gucacacgcucc

SEQ ID NO: 3268400 - RNA, 17 nt, Vaccinia virus
gaagagacggugugaga

SEQ ID NO: 3268401 - RNA, 16 nt, Vaccinia virus
acuucguuuaucuugg

SEQ ID NO: 3268402 - RNA, 21 nt, Vaccinia virus
uaccauuaauuguuuacugua

SEQ ID NO: 3268403 - RNA, 13 nt, Vaccinia virus
aauaauaaaugua

SEQ ID NO: 3268404 - RNA, 18 nt, Vaccinia virus
auauuuuuuuaguaaugu

SEQ ID NO: 3268405 - RNA, 14 nt, Vaccinia virus
aauauauugauaau

SEQ ID NO: 3268406 - RNA, 15 nt, Vaccinia virus
acucauuaaaacuuc

SEQ ID NO: 3268407 - RNA, 13 nt, Vaccinia virus
aaaauaaaaaacc

SEQ ID NO: 3268408 - RNA, 15 nt, Vaccinia virus
aucucauauuaaaaa

SEQ ID NO: 3268409 - RNA, 14 nt, Vaccinia virus
cauauauuacguaa

SEQ ID NO: 3268410 - RNA, 21 nt, Vaccinia virus
agaauaugauccguaacauau

SEQ ID NO: 3268411 - RNA, 16 nt, Vaccinia virus
aaguaauuaauuuuuc

SEQ ID NO: 3268412 - RNA, 18 nt, Vaccinia virus
uaauacaugacaauaaag

SEQ ID NO: 3268413 - RNA, 18 nt, Vaccinia virus
aaaauaaagauaaaaacg

SEQ ID NO: 3268414 - RNA, 22 nt, Vaccinia virus
auuuuacccucaaucauguacu

SEQ ID NO: 3268415 - RNA, 22 nt, Vaccinia virus
uagaacugccauauguuggaga

SEQ ID NO: 3268416 - RNA, 19 nt, Vaccinia virus
uuauagacaaauuauucau

SEQ ID NO: 3268417 - RNA, 15 nt, Vaccinia virus
aggaaacuaauauug

SEQ ID NO: 3268418 - RNA, 14 nt, Vaccinia virus
ugugacuguuuucu

SEQ ID NO: 3268419 - RNA, 17 nt, Vaccinia virus
uuaaauauuguauuaau

SEQ ID NO: 3268420 - RNA, 17 nt, Vaccinia virus
auccagacaacaaucgu

SEQ ID NO: 3268421 - RNA, 19 nt, Vaccinia virus
agacggagucauaacuauu

SEQ ID NO: 3268422 - RNA, 16 nt, Vaccinia virus
caacucuaaucacuuu

SEQ ID NO: 3268423 - RNA, 15 nt, Vaccinia virus
cauccaagucaauau

SEQ ID NO: 3268424 - RNA, 13 nt, Vaccinia virus
caucgaauacuuc

SEQ ID NO: 3268425 - RNA, 15 nt, Vaccinia virus
acgccgucuuuaucu

SEQ ID NO: 3268426 - RNA, 20 nt, Vaccinia virus
aauugguaacucauucuaua

SEQ ID NO: 3268427 - RNA, 13 nt, Vaccinia virus
agaacguaaauua

SEQ ID NO: 3268428 - RNA, 17 nt, Vaccinia virus
uuuguuauuguaguaua

SEQ ID NO: 3268429 - RNA, 15 nt, Vaccinia virus
agaauuuuagacacu

SEQ ID NO: 3268430 - RNA, 22 nt, Vaccinia virus
cuagugaguacggauuaaacau

SEQ ID NO: 3268431 - RNA, 19 nt, Vaccinia virus
agcuuucacucauaugaca

SEQ ID NO: 3268432 - RNA, 22 nt, Vaccinia virus
uauauucucuaguuacuacgau

SEQ ID NO: 3268433 - RNA, 22 nt, Vaccinia virus
agacugagauacgcaaagaauc

SEQ ID NO: 3268434 - RNA, 12 nt, Vaccinia virus
ugcaaggcauuu

SEQ ID NO: 3268435 - RNA, 19 nt, Vaccinia virus
uauaaaacuugucuguaua

SEQ ID NO: 3268436 - RNA, 11 nt, Vaccinia virus
uuuaacuuuuc

SEQ ID NO: 3268437 - RNA, 15 nt, Vaccinia virus
uggcaauguuucaua

SEQ ID NO: 3268438 - RNA, 20 nt, Vaccinia virus
aggcguaucugauacaggcg

SEQ ID NO: 3268439 - RNA, 16 nt, Vaccinia virus
acuuucaucuaauaag

SEQ ID NO: 3268440 - RNA, 17 nt, Vaccinia virus
uaacgucgguauuauau

SEQ ID NO: 3268441 - RNA, 12 nt, Vaccinia virus
gcugucauguau

SEQ ID NO: 3268442 - RNA, 19 nt, Vaccinia virus
aaucauuuuuuuaaaacug

SEQ ID NO: 3268443 - RNA, 22 nt, Vaccinia virus
guauaucaacaucuaccuuauu

SEQ ID NO: 3268444 - RNA, 16 nt, Vaccinia virus
uauaaaguguaugucu

SEQ ID NO: 3268445 - RNA, 15 nt, Vaccinia virus
cuauguuuuuaauga

SEQ ID NO: 3268446 - RNA, 20 nt, Vaccinia virus
cuaucuuuagcuucugaaau

SEQ ID NO: 3268447 - RNA, 17 nt, Vaccinia virus
guguccuuuuucauccu

SEQ ID NO: 3268448 - RNA, 17 nt, Vaccinia virus
aaaucaaaacauuuuca

SEQ ID NO: 3268449 - RNA, 22 nt, Vaccinia virus
gagaucuacuggcgaaauggua

SEQ ID NO: 3268450 - RNA, 14 nt, Vaccinia virus
guuuagaugucgaa

SEQ ID NO: 3268451 - RNA, 22 nt, Vaccinia virus
ccauggacuaagauaucugaaa

SEQ ID NO: 3268452 - RNA, 16 nt, Vaccinia virus
acaucacgcucgauaa

SEQ ID NO: 3268453 - RNA, 21 nt, Vaccinia virus
caucuagccucgguaaucugu

SEQ ID NO: 3268454 - RNA, 15 nt, Vaccinia virus
gcuccucucucaggc

SEQ ID NO: 3268455 - RNA, 21 nt, Vaccinia virus
ccaguagguguaggaguacau

SEQ ID NO: 3268456 - RNA, 22 nt, Vaccinia virus
uaauauuggcagcguuguuuau

SEQ ID NO: 3268457 - RNA, 14 nt, Vaccinia virus
auauuuuuaauagc

SEQ ID NO: 3268458 - RNA, 15 nt, Vaccinia virus
auauuauauaaacau

SEQ ID NO: 3268459 - RNA, 20 nt, Vaccinia virus
uguuuccaugacauauuaca

SEQ ID NO: 3268460 - RNA, 18 nt, Vaccinia virus
gucaugauuaguauuuua

SEQ ID NO: 3268461 - RNA, 21 nt, Vaccinia virus
aucuaacaucuugauuaauaa

SEQ ID NO: 3268462 - RNA, 15 nt, Vaccinia virus
uaaauccgagaauau

SEQ ID NO: 3268463 - RNA, 18 nt, Vaccinia virus
agauagauaaucaaaauu

SEQ ID NO: 3268464 - RNA, 11 nt, Vaccinia virus
aaauaucucau

SEQ ID NO: 3268465 - RNA, 15 nt, Vaccinia virus
auuuuaucaagacau

SEQ ID NO: 3268466 - RNA, 15 nt, Vaccinia virus
aaaugauaacuagau

SEQ ID NO: 3268467 - RNA, 15 nt, Vaccinia virus
guaccugguaagaua

SEQ ID NO: 3268468 - RNA, 16 nt, Vaccinia virus
gaaauauauuguuaaa

SEQ ID NO: 3268469 - RNA, 21 nt, Vaccinia virus
acauucuuaaccauauaucca

SEQ ID NO: 3268470 - RNA, 21 nt, Vaccinia virus
acgugauggauauauuaaagu

SEQ ID NO: 3268471 - RNA, 14 nt, Vaccinia virus
guaauauucuaguu

SEQ ID NO: 3268472 - RNA, 15 nt, Vaccinia virus
gaacaauuacagaca

SEQ ID NO: 3268473 - RNA, 13 nt, Vaccinia virus
cuagccucaucuu

SEQ ID NO: 3268474 - RNA, 17 nt, Vaccinia virus
gacuguuauaaaaaugc

SEQ ID NO: 3268475 - RNA, 24 nt, Vaccinia virus
auaacagaguaccaucaacacauu

SEQ ID NO: 3268476 - RNA, 15 nt, Vaccinia virus
ucgauugauuuggaa

SEQ ID NO: 3268477 - RNA, 21 nt, Vaccinia virus
aacauaauuacgacgagcaua

SEQ ID NO: 3268478 - RNA, 19 nt, Vaccinia virus
aguagccagacaaaugguc

SEQ ID NO: 3268479 - RNA, 21 nt, Vaccinia virus
auggaaacaaaugaaacagga

SEQ ID NO: 3268480 - RNA, 17 nt, Vaccinia virus
auugucugaugaagaau

SEQ ID NO: 3268481 - RNA, 14 nt, Vaccinia virus
gucauagaugaaau

SEQ ID NO: 3268482 - RNA, 21 nt, Vaccinia virus
uaagauaucuacuagaaagau

SEQ ID NO: 3268483 - RNA, 14 nt, Vaccinia virus
aaauaaaacuauag

SEQ ID NO: 3268484 - RNA, 15 nt, Vaccinia virus
gauaaaaucaaacuu

SEQ ID NO: 3268485 - RNA, 18 nt, Vaccinia virus
cucaucggaucuguaaaa

SEQ ID NO: 3268486 - RNA, 17 nt, Vaccinia virus
augauuuacaaaugguu

SEQ ID NO: 3268487 - RNA, 19 nt, Vaccinia virus
aauaguaauuuuuuaucau

SEQ ID NO: 3268488 - RNA, 19 nt, Vaccinia virus
aaucuagccauuauaaagu

SEQ ID NO: 3268489 - RNA, 22 nt, Vaccinia virus
uggagaauguuccuaauguaua

SEQ ID NO: 3268490 - RNA, 17 nt, Vaccinia virus
auacauaugacaaacau

SEQ ID NO: 3268491 - RNA, 20 nt, Vaccinia virus
uguaacugcuacuugggaua

SEQ ID NO: 3268492 - RNA, 18 nt, Vaccinia virus
aaacacugauucagaaau

SEQ ID NO: 3268493 - RNA, 21 nt, Vaccinia virus
auucaauuacuacaaaaauua

SEQ ID NO: 3268494 - RNA, 23 nt, Vaccinia virus
auuagacuuuucguauguaaugu

SEQ ID NO: 3268495 - RNA, 22 nt, Vaccinia virus
uuaucgaaugauauauuuuuca

SEQ ID NO: 3268496 - RNA, 20 nt, Vaccinia virus
uauauccaccaauagaaguu

SEQ ID NO: 3268497 - RNA, 20 nt, Vaccinia virus
aacaucuuuguaaacagaua

SEQ ID NO: 3268498 - RNA, 23 nt, Vaccinia virus
gauauauauggucuuaugaaaga

SEQ ID NO: 3268499 - RNA, 16 nt, Vaccinia virus
ucuaccggaguuauau

SEQ ID NO: 3268500 - RNA, 14 nt, Vaccinia virus
guauucaauuacua

SEQ ID NO: 3268501 - RNA, 14 nt, Vaccinia virus
cuaguucugagaaa

SEQ ID NO: 3268502 - RNA, 19 nt, Vaccinia virus
auaugugguguuacaguca

SEQ ID NO: 3268503 - RNA, 20 nt, Vaccinia virus
uagaagaucgucgucaaagu

SEQ ID NO: 3268504 - RNA, 11 nt, Vaccinia virus
auauuaauaga

SEQ ID NO: 3268505 - RNA, 14 nt, Vaccinia virus
aaaguuaagaauua

SEQ ID NO: 3268506 - RNA, 13 nt, Vaccinia virus
auucagaaaucaa

SEQ ID NO: 3268507 - RNA, 15 nt, Vaccinia virus
uuucuuguuaaugau

SEQ ID NO: 3268508 - RNA, 19 nt, Vaccinia virus
cuauagaccaaacugcaaa

SEQ ID NO: 3268509 - RNA, 18 nt, Vaccinia virus
aaugaaauaacauaggau

SEQ ID NO: 3268510 - RNA, 20 nt, Vaccinia virus
aauaugacacgauuaccaau

SEQ ID NO: 3268511 - RNA, 12 nt, Vaccinia virus
ucuucuaucaaa

SEQ ID NO: 3268512 - RNA, 22 nt, Vaccinia virus
cgggaacaauauuaguauguua

SEQ ID NO: 3268513 - RNA, 14 nt, Vaccinia virus
gacuguuauaaaaa

SEQ ID NO: 3268514 - RNA, 22 nt, Vaccinia virus
gauuggauacacuaaaauuaaa

SEQ ID NO: 3268515 - RNA, 14 nt, Vaccinia virus
uuacuucuuccaug

SEQ ID NO: 3268516 - RNA, 23 nt, Vaccinia virus
ucgagauggguccguucucugaa

SEQ ID NO: 3268517 - RNA, 19 nt, Vaccinia virus
auuaaaugauuguauuaac

SEQ ID NO: 3268518 - RNA, 15 nt, Vaccinia virus
agaaguuguaaauga

SEQ ID NO: 3268519 - RNA, 18 nt, Vaccinia virus
agcuaaagacucuaaaug

SEQ ID NO: 3268520 - RNA, 16 nt, Vaccinia virus
aaaugcgucaaucaua

SEQ ID NO: 3268521 - RNA, 19 nt, Vaccinia virus
aacuuagacggcaaguugu

SEQ ID NO: 3268522 - RNA, 13 nt, Vaccinia virus
gccagaaucaugg

SEQ ID NO: 3268523 - RNA, 17 nt, Vaccinia virus
agguuucauauuuauca

SEQ ID NO: 3268524 - RNA, 13 nt, Vaccinia virus
aaacaugugguau

SEQ ID NO: 3268525 - RNA, 13 nt, Vaccinia virus
gaaguuuuaaaaa

SEQ ID NO: 3268526 - RNA, 20 nt, Vaccinia virus
caaauucuuggauauaugau

SEQ ID NO: 3268527 - RNA, 21 nt, Vaccinia virus
aguaacuauguaaaugauaac

SEQ ID NO: 3268528 - RNA, 14 nt, Vaccinia virus
gagagcauucacag

SEQ ID NO: 3268529 - RNA, 14 nt, Vaccinia virus
aggcauaaaaugua

SEQ ID NO: 3268530 - RNA, 18 nt, Vaccinia virus
acagagccaucuguaaaa

SEQ ID NO: 3268531 - RNA, 11 nt, Vaccinia virus
uucucauuaaa

SEQ ID NO: 3268532 - RNA, 15 nt, Vaccinia virus
ucguauacucugccc

SEQ ID NO: 3268533 - RNA, 14 nt, Vaccinia virus
ucuguaaaaguugu

SEQ ID NO: 3268534 - RNA, 17 nt, Vaccinia virus
gauaaucuauggggaga

SEQ ID NO: 3268535 - RNA, 18 nt, Vaccinia virus
aaaagaauguauauacau

SEQ ID NO: 3268536 - RNA, 18 nt, Vaccinia virus
agcaguagcgagaaagca

SEQ ID NO: 3268537 - RNA, 13 nt, Vaccinia virus
uuacuugugguaa

SEQ ID NO: 3268538 - RNA, 13 nt, Vaccinia virus
auguauccguaaa

SEQ ID NO: 3268539 - RNA, 17 nt, Vaccinia virus
acauacguauauuucua

SEQ ID NO: 3268540 - RNA, 17 nt, Vaccinia virus
uuaaaacuguuuaagaa

SEQ ID NO: 3268541 - RNA, 12 nt, Vaccinia virus
auguuacaaaug

SEQ ID NO: 3268542 - RNA, 14 nt, Vaccinia virus
uuuguaauugacau

SEQ ID NO: 3268543 - RNA, 22 nt, Vaccinia virus
aaugaagaaugccuacauauca

SEQ ID NO: 3268544 - RNA, 18 nt, Vaccinia virus
aauuuuuucuacagauau

SEQ ID NO: 3268545 - RNA, 16 nt, Vaccinia virus
auuaaaaauaaaauac

SEQ ID NO: 3268546 - RNA, 16 nt, Vaccinia virus
uuauccacuucacauu

SEQ ID NO: 3268547 - RNA, 17 nt, Vaccinia virus
aguauggagacauugau

SEQ ID NO: 3268548 - RNA, 15 nt, Vaccinia virus
cugauaauguagaag

SEQ ID NO: 3268549 - RNA, 18 nt, Vaccinia virus
cguaucuauaaucaucug

SEQ ID NO: 3268550 - RNA, 18 nt, Vaccinia virus
guacauuaauaaaugaaa

SEQ ID NO: 3268551 - RNA, 19 nt, Vaccinia virus
uauuagauaaauuuaucaa

SEQ ID NO: 3268552 - RNA, 17 nt, Vaccinia virus
aauguauggcuucaaga

SEQ ID NO: 3268553 - RNA, 13 nt, Vaccinia virus
ucgauaauuauuu

SEQ ID NO: 3268554 - RNA, 15 nt, Vaccinia virus
gaugucaaugaagag

SEQ ID NO: 3268555 - RNA, 20 nt, Vaccinia virus
cuauaagauuaucaaaaucu

SEQ ID NO: 3268556 - RNA, 22 nt, Vaccinia virus
aucuaucuuuagcuucugaaau

SEQ ID NO: 3268557 - RNA, 15 nt, Vaccinia virus
uguuauauauaaaag

SEQ ID NO: 3268558 - RNA, 17 nt, Vaccinia virus
auaucggucuuauucuu

SEQ ID NO: 3268559 - RNA, 20 nt, Vaccinia virus
gauaucgagaucuuuuguau

SEQ ID NO: 3268560 - RNA, 21 nt, Vaccinia virus
aauaacuggcacaacaauaac

SEQ ID NO: 3268561 - RNA, 22 nt, Vaccinia virus
agaauuuuuauaaauuuuucca

SEQ ID NO: 3268562 - RNA, 15 nt, Vaccinia virus
guaauauucuaaaac

SEQ ID NO: 3268563 - RNA, 14 nt, Vaccinia virus
auacuccuuuguau

SEQ ID NO: 3268564 - RNA, 20 nt, Vaccinia virus
ucuaggagcaccagaaguau

SEQ ID NO: 3268565 - RNA, 21 nt, Vaccinia virus
aacagauauuacaaccaaugu

SEQ ID NO: 3268566 - RNA, 20 nt, Vaccinia virus
uaauuguuauuuuauucaua

SEQ ID NO: 3268567 - RNA, 22 nt, Vaccinia virus
auuacuaugaauaucuucuaug

SEQ ID NO: 3268568 - RNA, 14 nt, Vaccinia virus
aauauuuucuauga

SEQ ID NO: 3268569 - RNA, 17 nt, Vaccinia virus
uuccaaccuacuacuag

SEQ ID NO: 3268570 - RNA, 17 nt, Vaccinia virus
cuaaaauuuugaucauc

SEQ ID NO: 3268571 - RNA, 21 nt, Vaccinia virus
aauaacuagcuuaaacagaug

SEQ ID NO: 3268572 - RNA, 12 nt, Vaccinia virus
uacguaaaaaag

SEQ ID NO: 3268573 - RNA, 19 nt, Vaccinia virus
agauugaaugccauuuacg

SEQ ID NO: 3268574 - RNA, 13 nt, Vaccinia virus
auacuaaacauug

SEQ ID NO: 3268575 - RNA, 19 nt, Vaccinia virus
caauauauacgaguauaau

SEQ ID NO: 3268576 - RNA, 18 nt, Vaccinia virus
ggucuguguuacauaucu

SEQ ID NO: 3268577 - RNA, 16 nt, Vaccinia virus
ugggguuacucuaaau

SEQ ID NO: 3268578 - RNA, 13 nt, Vaccinia virus
cuacaacuaguga

SEQ ID NO: 3268579 - RNA, 21 nt, Vaccinia virus
guacaaaaaaauaaaacuaga

SEQ ID NO: 3268580 - RNA, 23 nt, Vaccinia virus
cgaggauaauauuagauuuacug

SEQ ID NO: 3268581 - RNA, 15 nt, Vaccinia virus
aaggaagaaggacaa

SEQ ID NO: 3268582 - RNA, 20 nt, Vaccinia virus
uaucuagauaacaacgacuu

SEQ ID NO: 3268583 - RNA, 14 nt, Vaccinia virus
ugacauuuuggauu

SEQ ID NO: 3268584 - RNA, 16 nt, Vaccinia virus
gaugaugcaacucuau

SEQ ID NO: 3268585 - RNA, 22 nt, Vaccinia virus
accaauuaucuuuggagaaucg

SEQ ID NO: 3268586 - RNA, 14 nt, Vaccinia virus
auaacauuguuuau

SEQ ID NO: 3268587 - RNA, 14 nt, Vaccinia virus
auuucauuguaaau

SEQ ID NO: 3268588 - RNA, 18 nt, Vaccinia virus
acaguaucugauaaucua

SEQ ID NO: 3268589 - RNA, 17 nt, Vaccinia virus
auagauauuuucuuucu

SEQ ID NO: 3268590 - RNA, 14 nt, Vaccinia virus
acuacaguuugaaa

SEQ ID NO: 3268591 - RNA, 16 nt, Vaccinia virus
auugcaacguauauag

SEQ ID NO: 3268592 - RNA, 12 nt, Vaccinia virus
uuaccuauucac

SEQ ID NO: 3268593 - RNA, 12 nt, Vaccinia virus
agagcaugaagg

SEQ ID NO: 3268594 - RNA, 19 nt, Vaccinia virus
caauaaauuagaauauauu

SEQ ID NO: 3268595 - RNA, 14 nt, Vaccinia virus
auauaagguuguau

SEQ ID NO: 3268596 - RNA, 23 nt, Vaccinia virus
uucuucaguaguaauaacagugc

SEQ ID NO: 3268597 - RNA, 19 nt, Vaccinia virus
uagauucauucguuauaga

SEQ ID NO: 3268598 - RNA, 14 nt, Vaccinia virus
cuuaaauguuuucu

SEQ ID NO: 3268599 - RNA, 19 nt, Vaccinia virus
uggauguacggcuuuacau

SEQ ID NO: 3268600 - RNA, 23 nt, Vaccinia virus
uacauucucauuaauuaaccauu

SEQ ID NO: 3268601 - RNA, 21 nt, Vaccinia virus
uggaugucaucaauguagaaa

SEQ ID NO: 3268602 - RNA, 21 nt, Vaccinia virus
ugauagguaucgaugaaggac

SEQ ID NO: 3268603 - RNA, 22 nt, Vaccinia virus
ugcauuaguaagugccacaaaa

SEQ ID NO: 3268604 - RNA, 19 nt, Vaccinia virus
caaccaucucauaaaauag

SEQ ID NO: 3268605 - RNA, 14 nt, Vaccinia virus
aauaguaaugauuc

SEQ ID NO: 3268606 - RNA, 11 nt, Vaccinia virus
aaaaaaugaua

SEQ ID NO: 3268607 - RNA, 21 nt, Vaccinia virus
auucuaccuuuuuauuuucua

SEQ ID NO: 3268608 - RNA, 19 nt, Vaccinia virus
acaaaucaucuuaugguuu

SEQ ID NO: 3268609 - RNA, 13 nt, Vaccinia virus
ucuagcauuucua

SEQ ID NO: 3268610 - RNA, 22 nt, Vaccinia virus
acaucuguuugagaauuaagau

SEQ ID NO: 3268611 - RNA, 23 nt, Vaccinia virus
ugugaaugguaaagaaugcuguu

SEQ ID NO: 3268612 - RNA, 15 nt, Vaccinia virus
auaacaauuaacaau

SEQ ID NO: 3268613 - RNA, 15 nt, Vaccinia virus
aauaaauuuuuccaa

SEQ ID NO: 3268614 - RNA, 12 nt, Vaccinia virus
uuguacaaaugg

SEQ ID NO: 3268615 - RNA, 17 nt, Vaccinia virus
uuauauaaaaacauuuu

SEQ ID NO: 3268616 - RNA, 15 nt, Vaccinia virus
gucuuuaucucuuag

SEQ ID NO: 3268617 - RNA, 15 nt, Vaccinia virus
ugacauuuuccuugu

SEQ ID NO: 3268618 - RNA, 18 nt, Vaccinia virus
uacgcuccuuaucaaaau

SEQ ID NO: 3268619 - RNA, 18 nt, Vaccinia virus
agauguuagaaaaaauga

SEQ ID NO: 3268620 - RNA, 14 nt, Vaccinia virus
gaauguguauucuc

SEQ ID NO: 3268621 - RNA, 16 nt, Vaccinia virus
agauaguaaauagaua

SEQ ID NO: 3268622 - RNA, 16 nt, Vaccinia virus
aaucuaauauuaagaa

SEQ ID NO: 3268623 - RNA, 15 nt, Vaccinia virus
uaggaucaguuauug

SEQ ID NO: 3268624 - RNA, 17 nt, Vaccinia virus
guaauuaaaauaaaaag

SEQ ID NO: 3268625 - RNA, 18 nt, Vaccinia virus
uaagguagaaucucuauu

SEQ ID NO: 3268626 - RNA, 18 nt, Vaccinia virus
uaacuacugauaacaaaa

SEQ ID NO: 3268627 - RNA, 23 nt, Vaccinia virus
auuucguugaaccggaagaauug

SEQ ID NO: 3268628 - RNA, 21 nt, Vaccinia virus
acugucacuggaaagaugaua

SEQ ID NO: 3268629 - RNA, 14 nt, Vaccinia virus
uauaggaauagucu

SEQ ID NO: 3268630 - RNA, 22 nt, Vaccinia virus
ucucuguuuaaugaauuacuaa

SEQ ID NO: 3268631 - RNA, 17 nt, Vaccinia virus
agaaaauacaacggaua

SEQ ID NO: 3268632 - RNA, 21 nt, Vaccinia virus
caauauagagauuagaggagg

SEQ ID NO: 3268633 - RNA, 13 nt, Vaccinia virus
aauagauaaaacg

SEQ ID NO: 3268634 - RNA, 19 nt, Vaccinia virus
uguauaaaccuuuuucaga

SEQ ID NO: 3268635 - RNA, 14 nt, Vaccinia virus
uacuuuuucucaua

SEQ ID NO: 3268636 - RNA, 16 nt, Vaccinia virus
uacauaauucuucugu

SEQ ID NO: 3268637 - RNA, 16 nt, Vaccinia virus
uuacaacaacauauga

SEQ ID NO: 3268638 - RNA, 22 nt, Vaccinia virus
uuaguaaaaaauuuauuucuaa

SEQ ID NO: 3268639 - RNA, 19 nt, Vaccinia virus
acuauuauuuauaacugau

SEQ ID NO: 3268640 - RNA, 18 nt, Vaccinia virus
caagaucgauagacacug

SEQ ID NO: 3268641 - RNA, 18 nt, Vaccinia virus
aucaagaauauccagauu

SEQ ID NO: 3268642 - RNA, 19 nt, Vaccinia virus
caauaaaauuaucaugaca

SEQ ID NO: 3268643 - RNA, 23 nt, Vaccinia virus
ucuagaauaucccaauagguguu

SEQ ID NO: 3268644 - RNA, 17 nt, Vaccinia virus
guacaaauguuaaacau

SEQ ID NO: 3268645 - RNA, 22 nt, Vaccinia virus
auuaacaacgaccgauaauaaa

SEQ ID NO: 3268646 - RNA, 17 nt, Vaccinia virus
aguuauccgaucuaaaa

SEQ ID NO: 3268647 - RNA, 12 nt, Vaccinia virus
auauuucugaag

SEQ ID NO: 3268648 - RNA, 15 nt, Vaccinia virus
aguaauaaaucaacu

SEQ ID NO: 3268649 - RNA, 21 nt, Vaccinia virus
uuucuaccaaccaagaauaac

SEQ ID NO: 3268650 - RNA, 13 nt, Vaccinia virus
aaaaguucauaau

SEQ ID NO: 3268651 - RNA, 18 nt, Vaccinia virus
uaaaaguuaaugagagca

SEQ ID NO: 3268652 - RNA, 12 nt, Vaccinia virus
auaauuuuacca

SEQ ID NO: 3268653 - RNA, 23 nt, Vaccinia virus
cuaucucuuucucuuucucucuu

SEQ ID NO: 3268654 - RNA, 13 nt, Vaccinia virus
cuuaccccuugau

SEQ ID NO: 3268655 - RNA, 14 nt, Vaccinia virus
auaugcuacaagau

SEQ ID NO: 3268656 - RNA, 13 nt, Vaccinia virus
acaaaaucuaaac

SEQ ID NO: 3268657 - RNA, 22 nt, Vaccinia virus
guauucuucgauaguccuuauu

SEQ ID NO: 3268658 - RNA, 18 nt, Vaccinia virus
gaauuaauuauucauaau

SEQ ID NO: 3268659 - RNA, 15 nt, Vaccinia virus
uccacaucaucuagu

SEQ ID NO: 3268660 - RNA, 17 nt, Vaccinia virus
gauacaucuauauugcu

SEQ ID NO: 3268661 - RNA, 22 nt, Vaccinia virus
aaaaugguguauuggaccuggu

SEQ ID NO: 3268662 - RNA, 16 nt, Vaccinia virus
auacauuucucaaaug

SEQ ID NO: 3268663 - RNA, 13 nt, Vaccinia virus
aaugguucuuucc

SEQ ID NO: 3268664 - RNA, 17 nt, Vaccinia virus
aaguuaaaauaucaugg

SEQ ID NO: 3268665 - RNA, 13 nt, Vaccinia virus
uaaaauaauacau

SEQ ID NO: 3268666 - RNA, 16 nt, Vaccinia virus
acgcaccucaaaugua

SEQ ID NO: 3268667 - RNA, 14 nt, Vaccinia virus
uuaauuacauccuu

SEQ ID NO: 3268668 - RNA, 16 nt, Vaccinia virus
caucaaaauauguuuc

SEQ ID NO: 3268669 - RNA, 20 nt, Vaccinia virus
uauaagaauuuuuauacauu

SEQ ID NO: 3268670 - RNA, 22 nt, Vaccinia virus
aauguagaaauugaaaauaaua

SEQ ID NO: 3268671 - RNA, 15 nt, Vaccinia virus
uaaaaagauaaacuu

SEQ ID NO: 3268672 - RNA, 15 nt, Vaccinia virus
aaugcagaaaugauu

SEQ ID NO: 3268673 - RNA, 21 nt, Vaccinia virus
cgauaacauguuaauuuccga

SEQ ID NO: 3268674 - RNA, 18 nt, Vaccinia virus
caaagagaccaaugaauu

SEQ ID NO: 3268675 - RNA, 21 nt, Vaccinia virus
aaacaacaaugccauuuuaca

SEQ ID NO: 3268676 - RNA, 16 nt, Vaccinia virus
aguuuuaaaaauacuu

SEQ ID NO: 3268677 - RNA, 20 nt, Vaccinia virus
ucugacuggguuguaauguu

SEQ ID NO: 3268678 - RNA, 22 nt, Vaccinia virus
uaauccuauucuugaucucauc

SEQ ID NO: 3268679 - RNA, 22 nt, Vaccinia virus
ucugacacccaaaaacaaccga

SEQ ID NO: 3268680 - RNA, 15 nt, Vaccinia virus
agauuucaaagaugu

SEQ ID NO: 3268681 - RNA, 15 nt, Vaccinia virus
aaugaugaaaggaua

SEQ ID NO: 3268682 - RNA, 21 nt, Vaccinia virus
agacaaacuguaaguauguuu

SEQ ID NO: 3268683 - RNA, 14 nt, Vaccinia virus
cagccuuuaauagg

SEQ ID NO: 3268684 - RNA, 20 nt, Vaccinia virus
caaacaguuugguauuagaa

SEQ ID NO: 3268685 - RNA, 17 nt, Vaccinia virus
uaacauugaguaaaucc

SEQ ID NO: 3268686 - RNA, 13 nt, Vaccinia virus
uaguaucuaaaac

SEQ ID NO: 3268687 - RNA, 15 nt, Vaccinia virus
acugauaccaugaaa

SEQ ID NO: 3268688 - RNA, 15 nt, Vaccinia virus
acgguaacuaaaugu

SEQ ID NO: 3268689 - RNA, 17 nt, Vaccinia virus
ucaaguaaagauuucaa

SEQ ID NO: 3268690 - RNA, 22 nt, Vaccinia virus
auaaucaaaauugucuaugaug

SEQ ID NO: 3268691 - RNA, 19 nt, Vaccinia virus
agauacuaucaaaauaucu

SEQ ID NO: 3268692 - RNA, 15 nt, Vaccinia virus
cguaguguauaacaa

SEQ ID NO: 3268693 - RNA, 13 nt, Vaccinia virus
uaggcacacaauc

SEQ ID NO: 3268694 - RNA, 21 nt, Vaccinia virus
uaagaguguaguaucauagau

SEQ ID NO: 3268695 - RNA, 14 nt, Vaccinia virus
gcucaguaaaugua

SEQ ID NO: 3268696 - RNA, 19 nt, Vaccinia virus
gauuaaaucguguauucau

SEQ ID NO: 3268697 - RNA, 18 nt, Vaccinia virus
aaucaacucuaaucacuu

SEQ ID NO: 3268698 - RNA, 21 nt, Vaccinia virus
guuuaaaguaaacuucguaaa

SEQ ID NO: 3268699 - RNA, 19 nt, Vaccinia virus
gauauccaaaauuuuguau

SEQ ID NO: 3268700 - RNA, 17 nt, Vaccinia virus
uacuauaauaguacuag

SEQ ID NO: 3268701 - RNA, 14 nt, Vaccinia virus
ucuuccuucuuauu

SEQ ID NO: 3268702 - RNA, 21 nt, Vaccinia virus
aucuuaggcauggacauacua

SEQ ID NO: 3268703 - RNA, 20 nt, Vaccinia virus
gaggaaguauaaaaauuaaa

SEQ ID NO: 3268704 - RNA, 20 nt, Vaccinia virus
acagcaacacauucaauauu

SEQ ID NO: 3268705 - RNA, 16 nt, Vaccinia virus
gcucaaacaaaaugug

SEQ ID NO: 3268706 - RNA, 20 nt, Vaccinia virus
uugaaacuaaacuuauuuag

SEQ ID NO: 3268707 - RNA, 14 nt, Vaccinia virus
gguagagaaugaua

SEQ ID NO: 3268708 - RNA, 19 nt, Vaccinia virus
auucuaugaauuuauaaaa

SEQ ID NO: 3268709 - RNA, 21 nt, Vaccinia virus
uauacgaaauaaaauagacaa

SEQ ID NO: 3268710 - RNA, 21 nt, Vaccinia virus
guuauauuauuagauauccug

SEQ ID NO: 3268711 - RNA, 14 nt, Vaccinia virus
acuccguagagaaa

SEQ ID NO: 3268712 - RNA, 15 nt, Vaccinia virus
agcaaaggaaauugu

SEQ ID NO: 3268713 - RNA, 13 nt, Vaccinia virus
ucugagaauggau

SEQ ID NO: 3268714 - RNA, 22 nt, Vaccinia virus
auauuauuauuuuucuugguaa

SEQ ID NO: 3268715 - RNA, 18 nt, Vaccinia virus
augaucaugugagaauac

SEQ ID NO: 3268716 - RNA, 19 nt, Vaccinia virus
gugccaaaaugauauacag

SEQ ID NO: 3268717 - RNA, 17 nt, Vaccinia virus
guuacguuuacauguga

SEQ ID NO: 3268718 - RNA, 18 nt, Vaccinia virus
uauaaucugaugaacaau

SEQ ID NO: 3268719 - RNA, 16 nt, Vaccinia virus
uauauuguuaaacuuu

SEQ ID NO: 3268720 - RNA, 16 nt, Vaccinia virus
cuauaucaaugccuuu

SEQ ID NO: 3268721 - RNA, 17 nt, Vaccinia virus
ugaacgcuauuaaacau

SEQ ID NO: 3268722 - RNA, 16 nt, Vaccinia virus
cuuaauucaucuucua

SEQ ID NO: 3268723 - RNA, 21 nt, Vaccinia virus
acuacaaugaacuaagagaaa

SEQ ID NO: 3268724 - RNA, 17 nt, Vaccinia virus
uauuaaaggaacuaaag

SEQ ID NO: 3268725 - RNA, 21 nt, Vaccinia virus
aauccaucucuauguuucagu

SEQ ID NO: 3268726 - RNA, 18 nt, Vaccinia virus
uaaauuauauauggauuu

SEQ ID NO: 3268727 - RNA, 19 nt, Vaccinia virus
agaacucuugaagaugauu

SEQ ID NO: 3268728 - RNA, 16 nt, Vaccinia virus
ucauagcugagaauau

SEQ ID NO: 3268729 - RNA, 12 nt, Vaccinia virus
uuuaacacuaua

SEQ ID NO: 3268730 - RNA, 21 nt, Vaccinia virus
ucauaugugcuaaaaaguuuu

SEQ ID NO: 3268731 - RNA, 21 nt, Vaccinia virus
gauuaauaguuuuauuugaag

SEQ ID NO: 3268732 - RNA, 14 nt, Vaccinia virus
gaauuuucauggau

SEQ ID NO: 3268733 - RNA, 15 nt, Vaccinia virus
aucacaaaaaaaacu

SEQ ID NO: 3268734 - RNA, 17 nt, Vaccinia virus
uuaucauuuugauuaau

SEQ ID NO: 3268735 - RNA, 23 nt, Vaccinia virus
gcucuacaugcgguaaagauauu

SEQ ID NO: 3268736 - RNA, 16 nt, Vaccinia virus
uaggauuuuuccaaag

SEQ ID NO: 3268737 - RNA, 18 nt, Vaccinia virus
auuucggcgccuauuuua

SEQ ID NO: 3268738 - RNA, 16 nt, Vaccinia virus
ugauauaguaauauua

SEQ ID NO: 3268739 - RNA, 15 nt, Vaccinia virus
gaacauauaaaugua

SEQ ID NO: 3268740 - RNA, 20 nt, Vaccinia virus
aucuucucuccuuucaaacu

SEQ ID NO: 3268741 - RNA, 16 nt, Vaccinia virus
caaagauaaaaaccac

SEQ ID NO: 3268742 - RNA, 14 nt, Vaccinia virus
aaaguaauucauua

SEQ ID NO: 3268743 - RNA, 21 nt, Vaccinia virus
ugauacaacaauauaugugca

SEQ ID NO: 3268744 - RNA, 16 nt, Vaccinia virus
aaguaguauaaaagua

SEQ ID NO: 3268745 - RNA, 13 nt, Vaccinia virus
cuggauauguuuu

SEQ ID NO: 3268746 - RNA, 23 nt, Vaccinia virus
uauuugcacacauaauccauucu

SEQ ID NO: 3268747 - RNA, 11 nt, Vaccinia virus
gcgcaugauuu

SEQ ID NO: 3268748 - RNA, 14 nt, Vaccinia virus
acgauauuagaauu

SEQ ID NO: 3268749 - RNA, 22 nt, Vaccinia virus
agaugucguuagaaucauuuau

SEQ ID NO: 3268750 - RNA, 15 nt, Vaccinia virus
aguugaguuuauccu

SEQ ID NO: 3268751 - RNA, 21 nt, Vaccinia virus
auuaaacauuguucaugauau

SEQ ID NO: 3268752 - RNA, 17 nt, Vaccinia virus
uuuuagauuuuagcaua

SEQ ID NO: 3268753 - RNA, 23 nt, Vaccinia virus
auacuaguagcuucacaaagaug

SEQ ID NO: 3268754 - RNA, 14 nt, Vaccinia virus
uagagacaaugaaa

SEQ ID NO: 3268755 - RNA, 13 nt, Vaccinia virus
uaucuguuuccau

SEQ ID NO: 3268756 - RNA, 23 nt, Vaccinia virus
auaucuuguuuagaaaaaugcua

SEQ ID NO: 3268757 - RNA, 12 nt, Vaccinia virus
uuagcaauuuuc

SEQ ID NO: 3268758 - RNA, 17 nt, Vaccinia virus
agcuauugcauaauaca

SEQ ID NO: 3268759 - RNA, 23 nt, Vaccinia virus
ugugcucuuccagaguugggaua

SEQ ID NO: 3268760 - RNA, 15 nt, Vaccinia virus
auaucuauaugauug

SEQ ID NO: 3268761 - RNA, 14 nt, Vaccinia virus
aaaagauuauacaa

SEQ ID NO: 3268762 - RNA, 20 nt, Vaccinia virus
cacaagauuuccaaucuuug

SEQ ID NO: 3268763 - RNA, 20 nt, Vaccinia virus
uauugcaaaucacucaauau

SEQ ID NO: 3268764 - RNA, 18 nt, Vaccinia virus
uguauaacagagccaucu

SEQ ID NO: 3268765 - RNA, 15 nt, Vaccinia virus
aacaaaguuauucau

SEQ ID NO: 3268766 - RNA, 13 nt, Vaccinia virus
ucaauagguagua

SEQ ID NO: 3268767 - RNA, 13 nt, Vaccinia virus
acuuuguuaauaa

SEQ ID NO: 3268768 - RNA, 18 nt, Vaccinia virus
auauucuuuuuuuauaga

SEQ ID NO: 3268769 - RNA, 21 nt, Vaccinia virus
acuauauaaaccgcuauugaa

SEQ ID NO: 3268770 - RNA, 16 nt, Vaccinia virus
aauauuauuaugaaga

SEQ ID NO: 3268771 - RNA, 19 nt, Vaccinia virus
auucguugaugaauuauua

SEQ ID NO: 3268772 - RNA, 16 nt, Vaccinia virus
cgacucauuauuuccc

SEQ ID NO: 3268773 - RNA, 15 nt, Vaccinia virus
acuauuauuauugaa

SEQ ID NO: 3268774 - RNA, 13 nt, Vaccinia virus
augagauguuauu

SEQ ID NO: 3268775 - RNA, 19 nt, Vaccinia virus
agaaaaaugauuaucuucu

SEQ ID NO: 3268776 - RNA, 17 nt, Vaccinia virus
auaauagcaacauauga

SEQ ID NO: 3268777 - RNA, 21 nt, Vaccinia virus
aauuauaauauaaaaauacuu

SEQ ID NO: 3268778 - RNA, 14 nt, Vaccinia virus
uacuaaaggaugag

SEQ ID NO: 3268779 - RNA, 19 nt, Vaccinia virus
gcaaaucacucaauaucua

SEQ ID NO: 3268780 - RNA, 13 nt, Vaccinia virus
aaccgaaaguaaa

SEQ ID NO: 3268781 - RNA, 23 nt, Vaccinia virus
agagauccacugucacuggaaag

SEQ ID NO: 3268782 - RNA, 20 nt, Vaccinia virus
ugcucaaacaaaaugugaua

SEQ ID NO: 3268783 - RNA, 17 nt, Vaccinia virus
aagugucgauuguaaua

SEQ ID NO: 3268784 - RNA, 22 nt, Vaccinia virus
aaaaauuuuaagcgaugauaug

SEQ ID NO: 3268785 - RNA, 22 nt, Vaccinia virus
ugauagugaaugaaucagauag

SEQ ID NO: 3268786 - RNA, 14 nt, Vaccinia virus
auauaaucuagaca

SEQ ID NO: 3268787 - RNA, 22 nt, Vaccinia virus
aauaccgacgcgccugaauauc

SEQ ID NO: 3268788 - RNA, 14 nt, Vaccinia virus
cuguaaucuauagg

SEQ ID NO: 3268789 - RNA, 18 nt, Vaccinia virus
uucagcggauccuguauu

SEQ ID NO: 3268790 - RNA, 15 nt, Vaccinia virus
aagaaguuauagaca

SEQ ID NO: 3268791 - RNA, 16 nt, Vaccinia virus
aaaaagaaagaauaua

SEQ ID NO: 3268792 - RNA, 23 nt, Vaccinia virus
aucaagucuuuauacaaugacau

SEQ ID NO: 3268793 - RNA, 21 nt, Vaccinia virus
uccuucuaaaguaaguaugau

SEQ ID NO: 3268794 - RNA, 14 nt, Vaccinia virus
acuuaaguuguaaa

SEQ ID NO: 3268795 - RNA, 19 nt, Vaccinia virus
ugacuaguccaaagacuua

SEQ ID NO: 3268796 - RNA, 12 nt, Vaccinia virus
cuaaaaacugua

SEQ ID NO: 3268797 - RNA, 13 nt, Vaccinia virus
cgcgucuguuuua

SEQ ID NO: 3268798 - RNA, 18 nt, Vaccinia virus
cggguaccuucacaucuc

SEQ ID NO: 3268799 - RNA, 21 nt, Vaccinia virus
acacuauugaacgauuuaucu

SEQ ID NO: 3268800 - RNA, 20 nt, Vaccinia virus
ucauggaaacaaaugaaaca

SEQ ID NO: 3268801 - RNA, 14 nt, Vaccinia virus
ucaaaauauguuau

SEQ ID NO: 3268802 - RNA, 22 nt, Vaccinia virus
aaauugucugaugaagaauuau

SEQ ID NO: 3268803 - RNA, 17 nt, Vaccinia virus
auacaauggaugauaug

SEQ ID NO: 3268804 - RNA, 18 nt, Vaccinia virus
uaacguucuaacaucauu

SEQ ID NO: 3268805 - RNA, 16 nt, Vaccinia virus
caauaucguuaaagau

SEQ ID NO: 3268806 - RNA, 13 nt, Vaccinia virus
uauacaauuauca

SEQ ID NO: 3268807 - RNA, 21 nt, Vaccinia virus
aaucauaguuuuuacacauag

SEQ ID NO: 3268808 - RNA, 17 nt, Vaccinia virus
agauagacgaggaaaca

SEQ ID NO: 3268809 - RNA, 14 nt, Vaccinia virus
augguaaaggauaa

SEQ ID NO: 3268810 - RNA, 15 nt, Vaccinia virus
aagacaauaaagaua

SEQ ID NO: 3268811 - RNA, 13 nt, Vaccinia virus
aucuagccauuau

SEQ ID NO: 3268812 - RNA, 16 nt, Vaccinia virus
auagauucagaauuuc

SEQ ID NO: 3268813 - RNA, 23 nt, Vaccinia virus
ucaacgaugaaaacuuuaaauac

SEQ ID NO: 3268814 - RNA, 21 nt, Vaccinia virus
aauuuuauucuagaauugaua

SEQ ID NO: 3268815 - RNA, 22 nt, Vaccinia virus
acaaugaaccguaauauaucua

SEQ ID NO: 3268816 - RNA, 16 nt, Vaccinia virus
augcaccgaacaucca

SEQ ID NO: 3268817 - RNA, 16 nt, Vaccinia virus
cuacuaauguauacau

SEQ ID NO: 3268818 - RNA, 16 nt, Vaccinia virus
aaggaauuaauuauuc

SEQ ID NO: 3268819 - RNA, 23 nt, Vaccinia virus
aucuucacaaauuauaucauugu

SEQ ID NO: 3268820 - RNA, 11 nt, Vaccinia virus
uuaauaucuuu

SEQ ID NO: 3268821 - RNA, 20 nt, Vaccinia virus
acuccuagagaauuaauauc

SEQ ID NO: 3268822 - RNA, 21 nt, Vaccinia virus
uuuauaucauuuguuuuaauu

SEQ ID NO: 3268823 - RNA, 14 nt, Vaccinia virus
caugcucuauuuug

SEQ ID NO: 3268824 - RNA, 14 nt, Vaccinia virus
auuauauaauguau

SEQ ID NO: 3268825 - RNA, 16 nt, Vaccinia virus
agcaagagaaucauca

SEQ ID NO: 3268826 - RNA, 16 nt, Vaccinia virus
cgacuuuguuaaugac

SEQ ID NO: 3268827 - RNA, 14 nt, Vaccinia virus
auucaguaaauaga

SEQ ID NO: 3268828 - RNA, 22 nt, Vaccinia virus
aguagagauucggguacuguau

SEQ ID NO: 3268829 - RNA, 22 nt, Vaccinia virus
uauccucagacucugauuugaa

SEQ ID NO: 3268830 - RNA, 22 nt, Vaccinia virus
ugcucuacaugcgguaaagaua

SEQ ID NO: 3268831 - RNA, 15 nt, Vaccinia virus
uaauaacuugaaaga

SEQ ID NO: 3268832 - RNA, 18 nt, Vaccinia virus
cauuuggucuauacaaau

SEQ ID NO: 3268833 - RNA, 23 nt, Vaccinia virus
aucuagacaccagcgucuacaug

SEQ ID NO: 3268834 - RNA, 18 nt, Vaccinia virus
uaucaaaaucuugucugc

SEQ ID NO: 3268835 - RNA, 14 nt, Vaccinia virus
aucuaaaaacaaua

SEQ ID NO: 3268836 - RNA, 21 nt, Vaccinia virus
augauaugauuuuuaaucaag

SEQ ID NO: 3268837 - RNA, 19 nt, Vaccinia virus
cucaaaagaucaaggaaau

SEQ ID NO: 3268838 - RNA, 14 nt, Vaccinia virus
acaucgacucauaa

SEQ ID NO: 3268839 - RNA, 21 nt, Vaccinia virus
uauuuauaaacuuuauccaua

SEQ ID NO: 3268840 - RNA, 19 nt, Vaccinia virus
aacuucuaaucuuguaaua

SEQ ID NO: 3268841 - RNA, 16 nt, Vaccinia virus
auauauuaaaaaaugu

SEQ ID NO: 3268842 - RNA, 21 nt, Vaccinia virus
uauaauuuacagcuauagcau

SEQ ID NO: 3268843 - RNA, 18 nt, Vaccinia virus
uauaggaccacuagcaaa

SEQ ID NO: 3268844 - RNA, 15 nt, Vaccinia virus
acucuacuaguucca

SEQ ID NO: 3268845 - RNA, 23 nt, Vaccinia virus
ccugguaagauaucuuuauauuc

SEQ ID NO: 3268846 - RNA, 16 nt, Vaccinia virus
uuucuauauagcuauu

SEQ ID NO: 3268847 - RNA, 16 nt, Vaccinia virus
agaaauuaucaaaugu

SEQ ID NO: 3268848 - RNA, 19 nt, Vaccinia virus
cacagaacaguaaauguuc

SEQ ID NO: 3268849 - RNA, 14 nt, Vaccinia virus
auuguacuuuguaa

SEQ ID NO: 3268850 - RNA, 22 nt, Vaccinia virus
aguauuaucaacguaacuauau

SEQ ID NO: 3268851 - RNA, 13 nt, Vaccinia virus
uacuuucuaauau

SEQ ID NO: 3268852 - RNA, 11 nt, Vaccinia virus
gccaaauguac

SEQ ID NO: 3268853 - RNA, 13 nt, Vaccinia virus
ucgaauaaaguau

SEQ ID NO: 3268854 - RNA, 13 nt, Vaccinia virus
aguauaucaaaua

SEQ ID NO: 3268855 - RNA, 12 nt, Vaccinia virus
auauaaagaaau

SEQ ID NO: 3268856 - RNA, 16 nt, Vaccinia virus
cgacgacaauaguguu

SEQ ID NO: 3268857 - RNA, 19 nt, Vaccinia virus
auuucaguuuauguuugua

SEQ ID NO: 3268858 - RNA, 22 nt, Vaccinia virus
aaauaaaccguuuaauauugau

SEQ ID NO: 3268859 - RNA, 23 nt, Vaccinia virus
aagaacguaaaauacauaugaca

SEQ ID NO: 3268860 - RNA, 13 nt, Vaccinia virus
auucuaaaugaug

SEQ ID NO: 3268861 - RNA, 21 nt, Vaccinia virus
aauaguacgacuuuaaaucca

SEQ ID NO: 3268862 - RNA, 23 nt, Vaccinia virus
agauuagucagaccauucuuggu

SEQ ID NO: 3268863 - RNA, 15 nt, Vaccinia virus
cucauuuucucuuuc

SEQ ID NO: 3268864 - RNA, 16 nt, Vaccinia virus
cuauaaaaauggauuu

SEQ ID NO: 3268865 - RNA, 21 nt, Vaccinia virus
acggggauuucguagaaguug

SEQ ID NO: 3268866 - RNA, 15 nt, Vaccinia virus
uaguuuguuucugga

SEQ ID NO: 3268867 - RNA, 13 nt, Vaccinia virus
aguuauaugaaua

SEQ ID NO: 3268868 - RNA, 18 nt, Vaccinia virus
cauuaaaucuauuauauu

SEQ ID NO: 3268869 - RNA, 19 nt, Vaccinia virus
gcagacuagaaauaacagg

SEQ ID NO: 3268870 - RNA, 17 nt, Vaccinia virus
cuacgaaaacgaaaucu

SEQ ID NO: 3268871 - RNA, 14 nt, Vaccinia virus
ggauagagaaauau

SEQ ID NO: 3268872 - RNA, 18 nt, Vaccinia virus
ugugacuguuuucucauc

SEQ ID NO: 3268873 - RNA, 17 nt, Vaccinia virus
auaaugucugacuagau

SEQ ID NO: 3268874 - RNA, 13 nt, Vaccinia virus
auccucaaacauc

SEQ ID NO: 3268875 - RNA, 20 nt, Vaccinia virus
aucuuauccuuggacaagau

SEQ ID NO: 3268876 - RNA, 16 nt, Vaccinia virus
cuuucuccuguaaaga

SEQ ID NO: 3268877 - RNA, 14 nt, Vaccinia virus
aauaauuuaacaau

SEQ ID NO: 3268878 - RNA, 19 nt, Vaccinia virus
gaaaucauguuauaguguu

SEQ ID NO: 3268879 - RNA, 21 nt, Vaccinia virus
gacugccacguuagaggauga

SEQ ID NO: 3268880 - RNA, 22 nt, Vaccinia virus
uugcugucgaagaggcaaaaga

SEQ ID NO: 3268881 - RNA, 19 nt, Vaccinia virus
acuuuaacguauaaaugac

SEQ ID NO: 3268882 - RNA, 23 nt, Vaccinia virus
guacauggaugauauagauauga

SEQ ID NO: 3268883 - RNA, 13 nt, Vaccinia virus
caaucuuuaaugu

SEQ ID NO: 3268884 - RNA, 12 nt, Vaccinia virus
gacaauaaucuc

SEQ ID NO: 3268885 - RNA, 23 nt, Vaccinia virus
acauguaucgacgguaaauggaa

SEQ ID NO: 3268886 - RNA, 15 nt, Vaccinia virus
aauuuacauguucau

SEQ ID NO: 3268887 - RNA, 16 nt, Vaccinia virus
uuaacuuucaucuaau

SEQ ID NO: 3268888 - RNA, 12 nt, Vaccinia virus
uuaauaugagua

SEQ ID NO: 3268889 - RNA, 17 nt, Vaccinia virus
aggaucuacauccucga

SEQ ID NO: 3268890 - RNA, 17 nt, Vaccinia virus
aacaacugaaaaaaauu

SEQ ID NO: 3268891 - RNA, 12 nt, Vaccinia virus
ucgacauauuaa

SEQ ID NO: 3268892 - RNA, 23 nt, Vaccinia virus
ucuuucgcagcauaaguaguaug

SEQ ID NO: 3268893 - RNA, 21 nt, Vaccinia virus
aucuguuccucaucugucaua

SEQ ID NO: 3268894 - RNA, 13 nt, Vaccinia virus
uagaaaauggauu

SEQ ID NO: 3268895 - RNA, 19 nt, Vaccinia virus
ucugaauuauuucauauau

SEQ ID NO: 3268896 - RNA, 16 nt, Vaccinia virus
ccaguggcuaagauac

SEQ ID NO: 3268897 - RNA, 16 nt, Vaccinia virus
acauacuaucuuuaau

SEQ ID NO: 3268898 - RNA, 14 nt, Vaccinia virus
acguucuuuaauuu

SEQ ID NO: 3268899 - RNA, 14 nt, Vaccinia virus
gacuauaacagaua

SEQ ID NO: 3268900 - RNA, 17 nt, Vaccinia virus
cuuugcaaauuguauau

SEQ ID NO: 3268901 - RNA, 21 nt, Vaccinia virus
uagacaaugcuaauauauucu

SEQ ID NO: 3268902 - RNA, 19 nt, Vaccinia virus
aucaaagucacaaagcaag

SEQ ID NO: 3268903 - RNA, 21 nt, Vaccinia virus
agaaauaacaggcuaaaaugu

SEQ ID NO: 3268904 - RNA, 24 nt, Vaccinia virus
auucucucaacaucuucaauggau

SEQ ID NO: 3268905 - RNA, 17 nt, Vaccinia virus
aaugcgauacagacauu

SEQ ID NO: 3268906 - RNA, 16 nt, Vaccinia virus
ucgcuauuucuauaga

SEQ ID NO: 3268907 - RNA, 16 nt, Vaccinia virus
uucuggauauguuuuu

SEQ ID NO: 3268908 - RNA, 21 nt, Vaccinia virus
uuuuucgcgggauacaucauc

SEQ ID NO: 3268909 - RNA, 14 nt, Vaccinia virus
auccaaaaaaugaa

SEQ ID NO: 3268910 - RNA, 16 nt, Vaccinia virus
ucuuuaucucuuagua

SEQ ID NO: 3268911 - RNA, 20 nt, Vaccinia virus
uuauaucaauaccaaagaag

SEQ ID NO: 3268912 - RNA, 19 nt, Vaccinia virus
agauagcuuuagcuaauau

SEQ ID NO: 3268913 - RNA, 22 nt, Vaccinia virus
ccauauguuuggagcaaauauc

SEQ ID NO: 3268914 - RNA, 20 nt, Vaccinia virus
ucuacuaggcugacacuaug

SEQ ID NO: 3268915 - RNA, 22 nt, Vaccinia virus
aaagaguugguaaaauaugaaa

SEQ ID NO: 3268916 - RNA, 21 nt, Vaccinia virus
ccgauauauuugcacacauaa

SEQ ID NO: 3268917 - RNA, 15 nt, Vaccinia virus
auuauacaaaaauuu

SEQ ID NO: 3268918 - RNA, 22 nt, Vaccinia virus
aguuuucuuucaaaauagcuau

SEQ ID NO: 3268919 - RNA, 11 nt, Vaccinia virus
gacaaauguaa

SEQ ID NO: 3268920 - RNA, 13 nt, Vaccinia virus
aaacaauguuaug

SEQ ID NO: 3268921 - RNA, 12 nt, Vaccinia virus
agaaauacuucu

SEQ ID NO: 3268922 - RNA, 21 nt, Vaccinia virus
accuaccucucuuaaaauggu

SEQ ID NO: 3268923 - RNA, 18 nt, Vaccinia virus
uaauuugguauauacaua

SEQ ID NO: 3268924 - RNA, 20 nt, Vaccinia virus
gacuaucaacaauuuuguau

SEQ ID NO: 3268925 - RNA, 16 nt, Vaccinia virus
auuuaagguacuagau

SEQ ID NO: 3268926 - RNA, 13 nt, Vaccinia virus
cucauuaacaucu

SEQ ID NO: 3268927 - RNA, 18 nt, Vaccinia virus
acgauguaguuagauaga

SEQ ID NO: 3268928 - RNA, 16 nt, Vaccinia virus
aauaauaguagaauua

SEQ ID NO: 3268929 - RNA, 18 nt, Vaccinia virus
auauuccaagaucaaaag

SEQ ID NO: 3268930 - RNA, 22 nt, Vaccinia virus
uuagacuguuuguagaaugcug

SEQ ID NO: 3268931 - RNA, 19 nt, Vaccinia virus
caauauugaaaauacuaau

SEQ ID NO: 3268932 - RNA, 21 nt, Vaccinia virus
uccauauuuucugguaguguu

SEQ ID NO: 3268933 - RNA, 16 nt, Vaccinia virus
aacagucgaacaaucu

SEQ ID NO: 3268934 - RNA, 14 nt, Vaccinia virus
uggugcauaucuuu

SEQ ID NO: 3268935 - RNA, 15 nt, Vaccinia virus
guugaaauagaaaau

SEQ ID NO: 3268936 - RNA, 17 nt, Vaccinia virus
uaaucucuccagaguau

SEQ ID NO: 3268937 - RNA, 14 nt, Vaccinia virus
uaaaugauuuucug

SEQ ID NO: 3268938 - RNA, 15 nt, Vaccinia virus
auauuccauuaauga

SEQ ID NO: 3268939 - RNA, 23 nt, Vaccinia virus
auagagccaagacgaacaaaauc

SEQ ID NO: 3268940 - RNA, 19 nt, Vaccinia virus
uguauagacaauuauguaa

SEQ ID NO: 3268941 - RNA, 19 nt, Vaccinia virus
auaaguaguaauaaugauu

SEQ ID NO: 3268942 - RNA, 19 nt, Vaccinia virus
uaacuaaaaauguaaaaua

SEQ ID NO: 3268943 - RNA, 17 nt, Vaccinia virus
uaacaugugucauuuau

SEQ ID NO: 3268944 - RNA, 14 nt, Vaccinia virus
gacuacuuauucua

SEQ ID NO: 3268945 - RNA, 15 nt, Vaccinia virus
uaaacaauuucacaa

SEQ ID NO: 3268946 - RNA, 19 nt, Vaccinia virus
aggauauaaguagauguuc

SEQ ID NO: 3268947 - RNA, 15 nt, Vaccinia virus
gcucaguaaauguau

SEQ ID NO: 3268948 - RNA, 21 nt, Vaccinia virus
uuaauaguagucaguagacau

SEQ ID NO: 3268949 - RNA, 21 nt, Vaccinia virus
uuaaaugccuuccaaaguuua

SEQ ID NO: 3268950 - RNA, 20 nt, Vaccinia virus
uuccguuaauaauacuauuu

SEQ ID NO: 3268951 - RNA, 16 nt, Vaccinia virus
cguggaaucaauaauu

SEQ ID NO: 3268952 - RNA, 13 nt, Vaccinia virus
ugaacauucaucu

SEQ ID NO: 3268953 - RNA, 17 nt, Vaccinia virus
ucggauccuuuguacag

SEQ ID NO: 3268954 - RNA, 14 nt, Vaccinia virus
gagacuuaaacaac

SEQ ID NO: 3268955 - RNA, 15 nt, Vaccinia virus
caucucuauguuuca

SEQ ID NO: 3268956 - RNA, 21 nt, Vaccinia virus
auaacaaguuuccuguaaauu

SEQ ID NO: 3268957 - RNA, 17 nt, Vaccinia virus
caaugcucaguaaaugu

SEQ ID NO: 3268958 - RNA, 14 nt, Vaccinia virus
auaauuuacagcua

SEQ ID NO: 3268959 - RNA, 16 nt, Vaccinia virus
uagcagccaauacuuu

SEQ ID NO: 3268960 - RNA, 17 nt, Vaccinia virus
aguaauaucaugucuaa

SEQ ID NO: 3268961 - RNA, 14 nt, Vaccinia virus
auugaaaauuauuu

SEQ ID NO: 3268962 - RNA, 20 nt, Vaccinia virus
gauaaaaaggaaucuauuaa

SEQ ID NO: 3268963 - RNA, 20 nt, Vaccinia virus
acauuagccggacaaauaua

SEQ ID NO: 3268964 - RNA, 18 nt, Vaccinia virus
uuccacgaacuucuaauu

SEQ ID NO: 3268965 - RNA, 16 nt, Vaccinia virus
auugccaacucucaaa

SEQ ID NO: 3268966 - RNA, 15 nt, Vaccinia virus
auaauggcuguuugu

SEQ ID NO: 3268967 - RNA, 19 nt, Vaccinia virus
caacuucuccuuauugauu

SEQ ID NO: 3268968 - RNA, 23 nt, Vaccinia virus
accggcuguggaguuauaugaau

SEQ ID NO: 3268969 - RNA, 13 nt, Vaccinia virus
ucuaugcuauaaa

SEQ ID NO: 3268970 - RNA, 13 nt, Vaccinia virus
cacucugucauau

SEQ ID NO: 3268971 - RNA, 14 nt, Vaccinia virus
uaaugaaauuauuc

SEQ ID NO: 3268972 - RNA, 12 nt, Vaccinia virus
gauauuguuaaa

SEQ ID NO: 3268973 - RNA, 22 nt, Vaccinia virus
ugauaugauuuuuaaucaagau

SEQ ID NO: 3268974 - RNA, 18 nt, Vaccinia virus
auaguuacauacaaacug

SEQ ID NO: 3268975 - RNA, 21 nt, Vaccinia virus
auauuuauacccgcuaugaag

SEQ ID NO: 3268976 - RNA, 13 nt, Vaccinia virus
uagguauguacca

SEQ ID NO: 3268977 - RNA, 16 nt, Vaccinia virus
guauaaaaauuaaaca

SEQ ID NO: 3268978 - RNA, 16 nt, Vaccinia virus
acuaugccaaaugaau

SEQ ID NO: 3268979 - RNA, 14 nt, Vaccinia virus
cucuacaaauaucu

SEQ ID NO: 3268980 - RNA, 20 nt, Vaccinia virus
cuuccacuguccaaaaugau

SEQ ID NO: 3268981 - RNA, 21 nt, Vaccinia virus
aaaauaucacaggagcaaugu

SEQ ID NO: 3268982 - RNA, 13 nt, Vaccinia virus
guagauaaucauu

SEQ ID NO: 3268983 - RNA, 18 nt, Vaccinia virus
uaaaaaaccuccuucaug

SEQ ID NO: 3268984 - RNA, 15 nt, Vaccinia virus
aucugucaaguuacu

SEQ ID NO: 3268985 - RNA, 17 nt, Vaccinia virus
aauuauuauuacugaau

SEQ ID NO: 3268986 - RNA, 15 nt, Vaccinia virus
accgggaaagagaag

SEQ ID NO: 3268987 - RNA, 19 nt, Vaccinia virus
acauuguccaauccaggac

SEQ ID NO: 3268988 - RNA, 18 nt, Vaccinia virus
uaucaucgguucaacgau

SEQ ID NO: 3268989 - RNA, 14 nt, Vaccinia virus
uuauuuuuuuggaa

SEQ ID NO: 3268990 - RNA, 23 nt, Vaccinia virus
aaucugagauuuuacguaucuau

SEQ ID NO: 3268991 - RNA, 17 nt, Vaccinia virus
uaucaacguaacuauau

SEQ ID NO: 3268992 - RNA, 18 nt, Vaccinia virus
uaacucaaagacaucaua

SEQ ID NO: 3268993 - RNA, 22 nt, Vaccinia virus
gcgauagugagagugauaauau

SEQ ID NO: 3268994 - RNA, 15 nt, Vaccinia virus
aaagcauuaauacag

SEQ ID NO: 3268995 - RNA, 16 nt, Vaccinia virus
caccggaauacuauuc

SEQ ID NO: 3268996 - RNA, 15 nt, Vaccinia virus
uaaaggaugauacau

SEQ ID NO: 3268997 - RNA, 17 nt, Vaccinia virus
aggcacauaauaucuuu

SEQ ID NO: 3268998 - RNA, 16 nt, Vaccinia virus
agaacuuauuaaugaa

SEQ ID NO: 3268999 - RNA, 18 nt, Vaccinia virus
uuauugucgagcauauua

SEQ ID NO: 3269000 - RNA, 20 nt, Vaccinia virus
uguuauuguaguauaugaua

SEQ ID NO: 3269001 - RNA, 17 nt, Vaccinia virus
auuuggaaaagaaaauu

SEQ ID NO: 3269002 - RNA, 17 nt, Vaccinia virus
aauccuuuuuuauaaaa

SEQ ID NO: 3269003 - RNA, 16 nt, Vaccinia virus
gcaucuuaauccuucu

SEQ ID NO: 3269004 - RNA, 22 nt, Vaccinia virus
uuuacuguauauacuuagauau

SEQ ID NO: 3269005 - RNA, 21 nt, Vaccinia virus
uuggagaugaucauagauuca

SEQ ID NO: 3269006 - RNA, 15 nt, Vaccinia virus
uucuaaguucuaaug

SEQ ID NO: 3269007 - RNA, 15 nt, Vaccinia virus
ugaaaucgucacaau

SEQ ID NO: 3269008 - RNA, 15 nt, Vaccinia virus
aaauaauuagaacua

SEQ ID NO: 3269009 - RNA, 20 nt, Vaccinia virus
cuuuaauugucuugaugaag

SEQ ID NO: 3269010 - RNA, 13 nt, Vaccinia virus
auaugacaaacau

SEQ ID NO: 3269011 - RNA, 22 nt, Vaccinia virus
auaguucguguacuagucauaa

SEQ ID NO: 3269012 - RNA, 13 nt, Vaccinia virus
auuucuguaaauu

SEQ ID NO: 3269013 - RNA, 15 nt, Vaccinia virus
ucuauaccaauauua

SEQ ID NO: 3269014 - RNA, 15 nt, Vaccinia virus
aauuuuuaguuuaua

SEQ ID NO: 3269015 - RNA, 15 nt, Vaccinia virus
aguaucauuaaaucu

SEQ ID NO: 3269016 - RNA, 15 nt, Vaccinia virus
aauugaauugaugau

SEQ ID NO: 3269017 - RNA, 18 nt, Vaccinia virus
aguauacuaucgucauuu

SEQ ID NO: 3269018 - RNA, 22 nt, Vaccinia virus
agaacuuaugaccgugauaaaa

SEQ ID NO: 3269019 - RNA, 12 nt, Vaccinia virus
aucauaaaaaug

SEQ ID NO: 3269020 - RNA, 18 nt, Vaccinia virus
aauagauguauuugauau

SEQ ID NO: 3269021 - RNA, 18 nt, Vaccinia virus
cauagaccuguaguuuua

SEQ ID NO: 3269022 - RNA, 15 nt, Vaccinia virus
aauucgagaaagaua

SEQ ID NO: 3269023 - RNA, 18 nt, Vaccinia virus
uucacauugaaacuaugu

SEQ ID NO: 3269024 - RNA, 12 nt, Vaccinia virus
cguauacucuau

SEQ ID NO: 3269025 - RNA, 16 nt, Vaccinia virus
uuggaaccggcugugg

SEQ ID NO: 3269026 - RNA, 16 nt, Vaccinia virus
cuauaguuuguuuuca

SEQ ID NO: 3269027 - RNA, 17 nt, Vaccinia virus
uuguuaagacaaucgua

SEQ ID NO: 3269028 - RNA, 16 nt, Vaccinia virus
aacgucauaaaaaugu

SEQ ID NO: 3269029 - RNA, 18 nt, Vaccinia virus
uuaaaugggucuaguuuu

SEQ ID NO: 3269030 - RNA, 13 nt, Vaccinia virus
uucuuuuaucaua

SEQ ID NO: 3269031 - RNA, 20 nt, Vaccinia virus
ugggaaaaacgaaauuaucg

SEQ ID NO: 3269032 - RNA, 22 nt, Vaccinia virus
uaaauguuuuuaucaucuugga

SEQ ID NO: 3269033 - RNA, 16 nt, Vaccinia virus
aguaaguauuuauaca

SEQ ID NO: 3269034 - RNA, 17 nt, Vaccinia virus
uuucguaccaacucauu

SEQ ID NO: 3269035 - RNA, 22 nt, Vaccinia virus
auacuuagauauauuguagaua

SEQ ID NO: 3269036 - RNA, 16 nt, Vaccinia virus
acaaagcacucaauaa

SEQ ID NO: 3269037 - RNA, 14 nt, Vaccinia virus
auacuuuuaggaaa

SEQ ID NO: 3269038 - RNA, 17 nt, Vaccinia virus
aauauacugauuagaaa

SEQ ID NO: 3269039 - RNA, 14 nt, Vaccinia virus
gucauccuucacuc

SEQ ID NO: 3269040 - RNA, 21 nt, Vaccinia virus
uauaaauaguuuuuauguaua

SEQ ID NO: 3269041 - RNA, 23 nt, Vaccinia virus
ucagaacuuccaauaaaauuacu

SEQ ID NO: 3269042 - RNA, 20 nt, Vaccinia virus
uuuauuaucuauagccaauu

SEQ ID NO: 3269043 - RNA, 22 nt, Vaccinia virus
auccuuuuguuggaaaaaugau

SEQ ID NO: 3269044 - RNA, 18 nt, Vaccinia virus
auaggugcguuguauaca

SEQ ID NO: 3269045 - RNA, 13 nt, Vaccinia virus
accucaaaaauuu

SEQ ID NO: 3269046 - RNA, 20 nt, Vaccinia virus
agcauccguaugcuacuaga

SEQ ID NO: 3269047 - RNA, 21 nt, Vaccinia virus
acauaacuacguaucucaaua

SEQ ID NO: 3269048 - RNA, 22 nt, Vaccinia virus
gauuucauuaucgguguauuuu

SEQ ID NO: 3269049 - RNA, 14 nt, Vaccinia virus
uaauguaaaaucau

SEQ ID NO: 3269050 - RNA, 19 nt, Vaccinia virus
caucuggcuauuauguuua

SEQ ID NO: 3269051 - RNA, 18 nt, Vaccinia virus
agcaauuaugaaacaaua

SEQ ID NO: 3269052 - RNA, 20 nt, Vaccinia virus
ucuuccugguauauuucuau

SEQ ID NO: 3269053 - RNA, 16 nt, Vaccinia virus
uaaucauauaaaucau

SEQ ID NO: 3269054 - RNA, 14 nt, Vaccinia virus
aucaaacauuuaau

SEQ ID NO: 3269055 - RNA, 15 nt, Vaccinia virus
guuaagcauauccug

SEQ ID NO: 3269056 - RNA, 20 nt, Vaccinia virus
uauauuuuccaugaaaucaa

SEQ ID NO: 3269057 - RNA, 21 nt, Vaccinia virus
guagaacaacgauuuaaucau

SEQ ID NO: 3269058 - RNA, 24 nt, Vaccinia virus
auaguauacacgcuaaaauaacua

SEQ ID NO: 3269059 - RNA, 16 nt, Vaccinia virus
auaauaaccagaaagu

SEQ ID NO: 3269060 - RNA, 20 nt, Vaccinia virus
acauaguguuuuauauucca

SEQ ID NO: 3269061 - RNA, 17 nt, Vaccinia virus
caguguacguauauuua

SEQ ID NO: 3269062 - RNA, 15 nt, Vaccinia virus
aacuuugauuauccu

SEQ ID NO: 3269063 - RNA, 16 nt, Vaccinia virus
uugauaucacauauuu

SEQ ID NO: 3269064 - RNA, 12 nt, Vaccinia virus
uggagaaauacu

SEQ ID NO: 3269065 - RNA, 15 nt, Vaccinia virus
uuacuuuuucaaaga

SEQ ID NO: 3269066 - RNA, 23 nt, Vaccinia virus
aagauaggggaguaguugaaauc

SEQ ID NO: 3269067 - RNA, 17 nt, Vaccinia virus
uuagauccaacauuaau

SEQ ID NO: 3269068 - RNA, 15 nt, Vaccinia virus
cuagaggagaaguaa

SEQ ID NO: 3269069 - RNA, 19 nt, Vaccinia virus
aguuccgcauuaaaugaug

SEQ ID NO: 3269070 - RNA, 21 nt, Vaccinia virus
aaauuuuugguucuucucuaa

SEQ ID NO: 3269071 - RNA, 20 nt, Vaccinia virus
ucauugguugcgucaagaac

SEQ ID NO: 3269072 - RNA, 16 nt, Vaccinia virus
ucagauauaaaaaucu

SEQ ID NO: 3269073 - RNA, 20 nt, Vaccinia virus
ugauaaagauauuuauccuu

SEQ ID NO: 3269074 - RNA, 15 nt, Vaccinia virus
aaggacauuguaaau

SEQ ID NO: 3269075 - RNA, 21 nt, Vaccinia virus
aaaauuauguuuuuauaucua

SEQ ID NO: 3269076 - RNA, 20 nt, Vaccinia virus
agguaagauaucuacuagaa

SEQ ID NO: 3269077 - RNA, 18 nt, Vaccinia virus
aucgugcagguuaaauag

SEQ ID NO: 3269078 - RNA, 20 nt, Vaccinia virus
cuuugcguaucucagucugu

SEQ ID NO: 3269079 - RNA, 16 nt, Vaccinia virus
augauucuaacgacau

SEQ ID NO: 3269080 - RNA, 18 nt, Vaccinia virus
aagacugcugaauguauc

SEQ ID NO: 3269081 - RNA, 19 nt, Vaccinia virus
gaacauucuccgauaucua

SEQ ID NO: 3269082 - RNA, 22 nt, Vaccinia virus
aaguuuuucacccauaaauaau

SEQ ID NO: 3269083 - RNA, 15 nt, Vaccinia virus
cuaucuauauguuuu

SEQ ID NO: 3269084 - RNA, 15 nt, Vaccinia virus
aaugauuuuggaaaa

SEQ ID NO: 3269085 - RNA, 17 nt, Vaccinia virus
uuuacgguaucuaauau

SEQ ID NO: 3269086 - RNA, 21 nt, Vaccinia virus
gaguacauuucacagaaacac

SEQ ID NO: 3269087 - RNA, 15 nt, Vaccinia virus
agcuguucaaaauau

SEQ ID NO: 3269088 - RNA, 15 nt, Vaccinia virus
acacaauuaacaaua

SEQ ID NO: 3269089 - RNA, 17 nt, Vaccinia virus
uuucgauuucuggauau

SEQ ID NO: 3269090 - RNA, 18 nt, Vaccinia virus
gaauucuucaauaaaaug

SEQ ID NO: 3269091 - RNA, 14 nt, Vaccinia virus
cuuggaaauuauuu

SEQ ID NO: 3269092 - RNA, 23 nt, Vaccinia virus
uuuaauaugaaaaaaauaaacau

SEQ ID NO: 3269093 - RNA, 20 nt, Vaccinia virus
auacauuauuacuaaacauu

SEQ ID NO: 3269094 - RNA, 15 nt, Vaccinia virus
ucucuauguuucagu

SEQ ID NO: 3269095 - RNA, 15 nt, Vaccinia virus
ccaucauccaagaaa

SEQ ID NO: 3269096 - RNA, 18 nt, Vaccinia virus
gaauacgaugauauuaaa

SEQ ID NO: 3269097 - RNA, 21 nt, Vaccinia virus
aauguauccggccaauugaua

SEQ ID NO: 3269098 - RNA, 13 nt, Vaccinia virus
aaaaacugauauu

SEQ ID NO: 3269099 - RNA, 21 nt, Vaccinia virus
acuccucuauuuaauacuuua

SEQ ID NO: 3269100 - RNA, 17 nt, Vaccinia virus
acucugggucauauuau

SEQ ID NO: 3269101 - RNA, 13 nt, Vaccinia virus
ccaaccuuuguug

SEQ ID NO: 3269102 - RNA, 19 nt, Vaccinia virus
acaauguccaaaucuauau

SEQ ID NO: 3269103 - RNA, 14 nt, Vaccinia virus
gagaugucugaaac

SEQ ID NO: 3269104 - RNA, 14 nt, Vaccinia virus
auauucugaauaua

SEQ ID NO: 3269105 - RNA, 19 nt, Vaccinia virus
ccuaauacaucucuggaaa

SEQ ID NO: 3269106 - RNA, 18 nt, Vaccinia virus
cuaguggauguacaugua

SEQ ID NO: 3269107 - RNA, 14 nt, Vaccinia virus
uacuuuuuacuaau

SEQ ID NO: 3269108 - RNA, 13 nt, Vaccinia virus
cggauaguuuaag

SEQ ID NO: 3269109 - RNA, 19 nt, Vaccinia virus
uuuuccagaucuauugacu

SEQ ID NO: 3269110 - RNA, 19 nt, Vaccinia virus
uauuauaaacucucaacau

SEQ ID NO: 3269111 - RNA, 22 nt, Vaccinia virus
uuagauuuauuuuuauaaaguu

SEQ ID NO: 3269112 - RNA, 17 nt, Vaccinia virus
gauacugguuugauaaa

SEQ ID NO: 3269113 - RNA, 15 nt, Vaccinia virus
aaaauggauuacuua

SEQ ID NO: 3269114 - RNA, 13 nt, Vaccinia virus
acuguuuaauagc

SEQ ID NO: 3269115 - RNA, 16 nt, Vaccinia virus
aacucuugaagaugau

SEQ ID NO: 3269116 - RNA, 18 nt, Vaccinia virus
uucuaguucucuuuugua

SEQ ID NO: 3269117 - RNA, 18 nt, Vaccinia virus
guucuuucgauuuggaaa

SEQ ID NO: 3269118 - RNA, 15 nt, Vaccinia virus
aaauauaauaacgau

SEQ ID NO: 3269119 - RNA, 22 nt, Vaccinia virus
cuaaauuuuguugauuacucuu

SEQ ID NO: 3269120 - RNA, 14 nt, Vaccinia virus
auacugagaauuga

SEQ ID NO: 3269121 - RNA, 14 nt, Vaccinia virus
ucaaaauauguaga

SEQ ID NO: 3269122 - RNA, 23 nt, Vaccinia virus
ugauuucgacggagaugaagaau

SEQ ID NO: 3269123 - RNA, 23 nt, Vaccinia virus
agaauauaaauuauauauggauu

SEQ ID NO: 3269124 - RNA, 23 nt, Vaccinia virus
aaugcuucucuguuuaaugaauu

SEQ ID NO: 3269125 - RNA, 14 nt, Vaccinia virus
acaauuuuaacaga

SEQ ID NO: 3269126 - RNA, 12 nt, Vaccinia virus
aauuaugauaca

SEQ ID NO: 3269127 - RNA, 17 nt, Vaccinia virus
aauauauugaucauaau

SEQ ID NO: 3269128 - RNA, 21 nt, Vaccinia virus
cuauauagcuauucuucuuua

SEQ ID NO: 3269129 - RNA, 21 nt, Vaccinia virus
auucugaauagugaaaaccuu

SEQ ID NO: 3269130 - RNA, 14 nt, Vaccinia virus
aaauauauacuuca

SEQ ID NO: 3269131 - RNA, 20 nt, Vaccinia virus
aacucuauaguuuguuuuca

SEQ ID NO: 3269132 - RNA, 20 nt, Vaccinia virus
uugauuaccacgucuggaua

SEQ ID NO: 3269133 - RNA, 23 nt, Vaccinia virus
cugacauaaacauaucaaaagaa

SEQ ID NO: 3269134 - RNA, 18 nt, Vaccinia virus
caucuacuuuugucauau

SEQ ID NO: 3269135 - RNA, 19 nt, Vaccinia virus
cuaacagcaauaguauaau

SEQ ID NO: 3269136 - RNA, 14 nt, Vaccinia virus
uuuaacuuuucauu

SEQ ID NO: 3269137 - RNA, 20 nt, Vaccinia virus
uccagccguagaauaucuaa

SEQ ID NO: 3269138 - RNA, 19 nt, Vaccinia virus
cagcacggugguagauaua

SEQ ID NO: 3269139 - RNA, 20 nt, Vaccinia virus
agaaucccauagggcuaaau

SEQ ID NO: 3269140 - RNA, 20 nt, Vaccinia virus
uaucaagauguaaaauacuu

SEQ ID NO: 3269141 - RNA, 13 nt, Vaccinia virus
auuuuagacacua

SEQ ID NO: 3269142 - RNA, 21 nt, Vaccinia virus
auuuaagugauauaaaacuau

SEQ ID NO: 3269143 - RNA, 15 nt, Vaccinia virus
gaauuuuuauacauu

SEQ ID NO: 3269144 - RNA, 14 nt, Vaccinia virus
aucguaaaucuguu

SEQ ID NO: 3269145 - RNA, 17 nt, Vaccinia virus
aacauuuuauaaauaua

SEQ ID NO: 3269146 - RNA, 13 nt, Vaccinia virus
cagaaaagauauu

SEQ ID NO: 3269147 - RNA, 17 nt, Vaccinia virus
aaaaugguaaacuuuug

SEQ ID NO: 3269148 - RNA, 22 nt, Vaccinia virus
agauuugguaaaaugaaauauc

SEQ ID NO: 3269149 - RNA, 18 nt, Vaccinia virus
aacaucaacugaaaaagu

SEQ ID NO: 3269150 - RNA, 16 nt, Vaccinia virus
acguaaccaagaaguu

SEQ ID NO: 3269151 - RNA, 12 nt, Vaccinia virus
uauugacaaaua

SEQ ID NO: 3269152 - RNA, 23 nt, Vaccinia virus
uuaaauuuagagauaauauccug

SEQ ID NO: 3269153 - RNA, 20 nt, Vaccinia virus
aaaucauuacuaauacucaa

SEQ ID NO: 3269154 - RNA, 18 nt, Vaccinia virus
uguccaugcggauacuuu

SEQ ID NO: 3269155 - RNA, 14 nt, Vaccinia virus
accauuaaaaauug

SEQ ID NO: 3269156 - RNA, 19 nt, Vaccinia virus
auaauugagauugauguaa

SEQ ID NO: 3269157 - RNA, 20 nt, Vaccinia virus
caucccauauauuccaugaa

SEQ ID NO: 3269158 - RNA, 15 nt, Vaccinia virus
auguuauaaaaucua

SEQ ID NO: 3269159 - RNA, 17 nt, Vaccinia virus
gacaacaaaaaaugaau

SEQ ID NO: 3269160 - RNA, 13 nt, Vaccinia virus
auuauuaauaaag

SEQ ID NO: 3269161 - RNA, 22 nt, Vaccinia virus
ucaaugucuuaauaagaagugu

SEQ ID NO: 3269162 - RNA, 16 nt, Vaccinia virus
auuacuccauuaaaua

SEQ ID NO: 3269163 - RNA, 20 nt, Vaccinia virus
uauagauggcuuguauguca

SEQ ID NO: 3269164 - RNA, 14 nt, Vaccinia virus
acaugggaaaugau

SEQ ID NO: 3269165 - RNA, 17 nt, Vaccinia virus
acuuuguggaugaugau

SEQ ID NO: 3269166 - RNA, 13 nt, Vaccinia virus
auaggaacauuuc

SEQ ID NO: 3269167 - RNA, 10 nt, Vaccinia virus
aacauauucu

SEQ ID NO: 3269168 - RNA, 18 nt, Vaccinia virus
auauaucccuuaaaaauu

SEQ ID NO: 3269169 - RNA, 16 nt, Vaccinia virus
cuuuucuaaauucaua

SEQ ID NO: 3269170 - RNA, 21 nt, Vaccinia virus
auuaacagguucucaauauua

SEQ ID NO: 3269171 - RNA, 19 nt, Vaccinia virus
auauccguuaaguuuguau

SEQ ID NO: 3269172 - RNA, 17 nt, Vaccinia virus
aaaauauauaaugaaua

SEQ ID NO: 3269173 - RNA, 15 nt, Vaccinia virus
augagcaaguagaaa

SEQ ID NO: 3269174 - RNA, 17 nt, Vaccinia virus
gauaucgagaucuuuug

SEQ ID NO: 3269175 - RNA, 14 nt, Vaccinia virus
cuauguuguuuaug

SEQ ID NO: 3269176 - RNA, 16 nt, Vaccinia virus
auuauuccuaauuaag

SEQ ID NO: 3269177 - RNA, 16 nt, Vaccinia virus
auaaacuuaacccauu

SEQ ID NO: 3269178 - RNA, 12 nt, Vaccinia virus
auuccaaagauc

SEQ ID NO: 3269179 - RNA, 23 nt, Vaccinia virus
acuucacauuuuaaauaaauguc

SEQ ID NO: 3269180 - RNA, 16 nt, Vaccinia virus
uuucacccauaaauaa

SEQ ID NO: 3269181 - RNA, 23 nt, Vaccinia virus
guuauugcuuugguuuaauuauu

SEQ ID NO: 3269182 - RNA, 17 nt, Vaccinia virus
uaguuuuuuuguuuccu

SEQ ID NO: 3269183 - RNA, 22 nt, Vaccinia virus
auccuaaagguaaauguaaauu

SEQ ID NO: 3269184 - RNA, 21 nt, Vaccinia virus
auuaucaaagucacaaagcaa

SEQ ID NO: 3269185 - RNA, 18 nt, Vaccinia virus
uuugauaaauuucuucuu

SEQ ID NO: 3269186 - RNA, 18 nt, Vaccinia virus
auaguuaccgcaaagaaa

SEQ ID NO: 3269187 - RNA, 21 nt, Vaccinia virus
auagaaucggacgucugauau

SEQ ID NO: 3269188 - RNA, 19 nt, Vaccinia virus
aauaauuguuuugaauuuc

SEQ ID NO: 3269189 - RNA, 23 nt, Vaccinia virus
acaugguuaaaguacauguacaa

SEQ ID NO: 3269190 - RNA, 21 nt, Vaccinia virus
aauguacuucgaugagauuga

SEQ ID NO: 3269191 - RNA, 22 nt, Vaccinia virus
gucuaucgccuuagauacuuuu

SEQ ID NO: 3269192 - RNA, 15 nt, Vaccinia virus
uucuuggauaaaagc

SEQ ID NO: 3269193 - RNA, 14 nt, Vaccinia virus
auaaugaacauagu

SEQ ID NO: 3269194 - RNA, 17 nt, Vaccinia virus
gcgaauaaauagauaua

SEQ ID NO: 3269195 - RNA, 12 nt, Vaccinia virus
uugaaacuuuuu

SEQ ID NO: 3269196 - RNA, 21 nt, Vaccinia virus
aagauuguuuaagaagagaau

SEQ ID NO: 3269197 - RNA, 15 nt, Vaccinia virus
aauaucaacaagucc

SEQ ID NO: 3269198 - RNA, 14 nt, Vaccinia virus
cgagauacagaaaa

SEQ ID NO: 3269199 - RNA, 13 nt, Vaccinia virus
aaaagaauugcuu

SEQ ID NO: 3269200 - RNA, 15 nt, Vaccinia virus
uacaugcuacaugug

SEQ ID NO: 3269201 - RNA, 19 nt, Vaccinia virus
auucacagacucucaagau

SEQ ID NO: 3269202 - RNA, 23 nt, Vaccinia virus
auauguggaaaugucauagaaag

SEQ ID NO: 3269203 - RNA, 16 nt, Vaccinia virus
uauacaauuuguggaa

SEQ ID NO: 3269204 - RNA, 18 nt, Vaccinia virus
uacuuauuaguaaaacua

SEQ ID NO: 3269205 - RNA, 15 nt, Vaccinia virus
cuuaugaggaaugau

SEQ ID NO: 3269206 - RNA, 23 nt, Vaccinia virus
cauuguuauugaucaaacauuua

SEQ ID NO: 3269207 - RNA, 11 nt, Vaccinia virus
ugauagauauu

SEQ ID NO: 3269208 - RNA, 22 nt, Vaccinia virus
acggaguuuauuuuauaugucu

SEQ ID NO: 3269209 - RNA, 20 nt, Vaccinia virus
cuaccuuacccauaaacaau

SEQ ID NO: 3269210 - RNA, 13 nt, Vaccinia virus
uaaauauaaacac

SEQ ID NO: 3269211 - RNA, 17 nt, Vaccinia virus
aacgauuuacuguggcu

SEQ ID NO: 3269212 - RNA, 21 nt, Vaccinia virus
aacgaguacaaguagaacuua

SEQ ID NO: 3269213 - RNA, 21 nt, Vaccinia virus
aacaucauuauuuuugaagau

SEQ ID NO: 3269214 - RNA, 16 nt, Vaccinia virus
acaacauuccaaagau

SEQ ID NO: 3269215 - RNA, 21 nt, Vaccinia virus
aacucauuuaaauaucauaau

SEQ ID NO: 3269216 - RNA, 19 nt, Vaccinia virus
cguucaacauuuuauggaa

SEQ ID NO: 3269217 - RNA, 17 nt, Vaccinia virus
uaucaugaauuagauau

SEQ ID NO: 3269218 - RNA, 17 nt, Vaccinia virus
ugacuuaugaauacuaa

SEQ ID NO: 3269219 - RNA, 17 nt, Vaccinia virus
cucuauucgaaaacucu

SEQ ID NO: 3269220 - RNA, 12 nt, Vaccinia virus
cucuaaaugagu

SEQ ID NO: 3269221 - RNA, 19 nt, Vaccinia virus
gcaaucacuacaauaauua

SEQ ID NO: 3269222 - RNA, 15 nt, Vaccinia virus
cuaaaaauguuaauu

SEQ ID NO: 3269223 - RNA, 20 nt, Vaccinia virus
aaacugaaucuaacaaagag

SEQ ID NO: 3269224 - RNA, 15 nt, Vaccinia virus
caggcucuauuuuca

SEQ ID NO: 3269225 - RNA, 16 nt, Vaccinia virus
gaauauaaaauaacua

SEQ ID NO: 3269226 - RNA, 17 nt, Vaccinia virus
guucugaaagagaugag

SEQ ID NO: 3269227 - RNA, 13 nt, Vaccinia virus
agaggauugaugg

SEQ ID NO: 3269228 - RNA, 14 nt, Vaccinia virus
agcaacaugucucu

SEQ ID NO: 3269229 - RNA, 15 nt, Vaccinia virus
guguuuuaguuuauc

SEQ ID NO: 3269230 - RNA, 12 nt, Vaccinia virus
uacaacuaguga

SEQ ID NO: 3269231 - RNA, 13 nt, Vaccinia virus
auauuacaaaauc

SEQ ID NO: 3269232 - RNA, 22 nt, Vaccinia virus
aacaucguaucuucaaaaaggu

SEQ ID NO: 3269233 - RNA, 15 nt, Vaccinia virus
uuuccauuuuuaauu

SEQ ID NO: 3269234 - RNA, 17 nt, Vaccinia virus
gaaaaguauaauucuuu

SEQ ID NO: 3269235 - RNA, 18 nt, Vaccinia virus
cacuaacgcgcaugauuu

SEQ ID NO: 3269236 - RNA, 22 nt, Vaccinia virus
uuauuaaaguacguaaaucuag

SEQ ID NO: 3269237 - RNA, 13 nt, Vaccinia virus
guacuauaauauu

SEQ ID NO: 3269238 - RNA, 22 nt, Vaccinia virus
uuauuacauguuuucauauuca

SEQ ID NO: 3269239 - RNA, 11 nt, Vaccinia virus
cucuaaaugag

SEQ ID NO: 3269240 - RNA, 16 nt, Vaccinia virus
gucaaucuaauauuaa

SEQ ID NO: 3269241 - RNA, 22 nt, Vaccinia virus
acuauaaaaaaaauaauaauua

SEQ ID NO: 3269242 - RNA, 20 nt, Vaccinia virus
uucauaacgcauaauuauua

SEQ ID NO: 3269243 - RNA, 16 nt, Vaccinia virus
ggauaaccuagaaaau

SEQ ID NO: 3269244 - RNA, 23 nt, Vaccinia virus
cuaaaggaugaguacauuucaca

SEQ ID NO: 3269245 - RNA, 17 nt, Vaccinia virus
agcucucguauucaguu

SEQ ID NO: 3269246 - RNA, 14 nt, Vaccinia virus
agauaaauuuauca

SEQ ID NO: 3269247 - RNA, 16 nt, Vaccinia virus
uauguaaaacaaacuu

SEQ ID NO: 3269248 - RNA, 17 nt, Vaccinia virus
cugauggagucuccuuc

SEQ ID NO: 3269249 - RNA, 15 nt, Vaccinia virus
cucaauucaggaaca

SEQ ID NO: 3269250 - RNA, 22 nt, Vaccinia virus
uuauaauauaaaaauacuuaug

SEQ ID NO: 3269251 - RNA, 17 nt, Vaccinia virus
uaauaugauuagaaguu

SEQ ID NO: 3269252 - RNA, 17 nt, Vaccinia virus
cuacaaauagagauaaa

SEQ ID NO: 3269253 - RNA, 23 nt, Vaccinia virus
auuacaaaucuagagguagaacu

SEQ ID NO: 3269254 - RNA, 18 nt, Vaccinia virus
agugugaauaugaucuuc

SEQ ID NO: 3269255 - RNA, 14 nt, Vaccinia virus
ugugauauaaacaa

SEQ ID NO: 3269256 - RNA, 22 nt, Vaccinia virus
acucucuucuauaaaaauggau

SEQ ID NO: 3269257 - RNA, 21 nt, Vaccinia virus
cgguuaauguuguauuucauu

SEQ ID NO: 3269258 - RNA, 18 nt, Vaccinia virus
uccguuuauccacaauua

SEQ ID NO: 3269259 - RNA, 17 nt, Vaccinia virus
aaacucaauuauacucu

SEQ ID NO: 3269260 - RNA, 17 nt, Vaccinia virus
ugacaacucaaacaucu

SEQ ID NO: 3269261 - RNA, 21 nt, Vaccinia virus
aaaugauaacuagauagaaag

SEQ ID NO: 3269262 - RNA, 21 nt, Vaccinia virus
aaugaagauaucauugauuga

SEQ ID NO: 3269263 - RNA, 21 nt, Vaccinia virus
aauuauuaauuuuagugaaau

SEQ ID NO: 3269264 - RNA, 17 nt, Vaccinia virus
aauaggugaugaugcaa

SEQ ID NO: 3269265 - RNA, 15 nt, Vaccinia virus
cagaggauugauggu

SEQ ID NO: 3269266 - RNA, 18 nt, Vaccinia virus
aaguacauggaugauaua

SEQ ID NO: 3269267 - RNA, 14 nt, Vaccinia virus
uuuagaaaaacuuu

SEQ ID NO: 3269268 - RNA, 19 nt, Vaccinia virus
uuacacuauuugucuuaau

SEQ ID NO: 3269269 - RNA, 18 nt, Vaccinia virus
aaaacauggauuugguaa

SEQ ID NO: 3269270 - RNA, 14 nt, Vaccinia virus
auuaaucuuuacca

SEQ ID NO: 3269271 - RNA, 15 nt, Vaccinia virus
cuauaucuauguuuu

SEQ ID NO: 3269272 - RNA, 17 nt, Vaccinia virus
aucguuucuacaaaauc

SEQ ID NO: 3269273 - RNA, 16 nt, Vaccinia virus
uuagauuuccuagauu

SEQ ID NO: 3269274 - RNA, 15 nt, Vaccinia virus
guaaacacauaucca

SEQ ID NO: 3269275 - RNA, 15 nt, Vaccinia virus
ugagaguagauauca

SEQ ID NO: 3269276 - RNA, 15 nt, Vaccinia virus
uauaauaucuuugaa

SEQ ID NO: 3269277 - RNA, 18 nt, Vaccinia virus
aagacaucauauauagaa

SEQ ID NO: 3269278 - RNA, 13 nt, Vaccinia virus
caaugauaaugau

SEQ ID NO: 3269279 - RNA, 22 nt, Vaccinia virus
aaaucuugucugcuuaauacac

SEQ ID NO: 3269280 - RNA, 20 nt, Vaccinia virus
uggauuaagcaauagugaua

SEQ ID NO: 3269281 - RNA, 17 nt, Vaccinia virus
uaaaaagauaaacuuua

SEQ ID NO: 3269282 - RNA, 14 nt, Vaccinia virus
gaaggaucuguaca

SEQ ID NO: 3269283 - RNA, 12 nt, Vaccinia virus
gcacuauuucua

SEQ ID NO: 3269284 - RNA, 17 nt, Vaccinia virus
cucuagauauguauuua

SEQ ID NO: 3269285 - RNA, 17 nt, Vaccinia virus
agagaagucgucaagca

SEQ ID NO: 3269286 - RNA, 23 nt, Vaccinia virus
aguaucaagauguaaaauacuua

SEQ ID NO: 3269287 - RNA, 21 nt, Vaccinia virus
uggaaaaaggauggaaagaua

SEQ ID NO: 3269288 - RNA, 17 nt, Vaccinia virus
aauucuuuauaacugaa

SEQ ID NO: 3269289 - RNA, 22 nt, Vaccinia virus
accauccuuuaaaaaaaaugau

SEQ ID NO: 3269290 - RNA, 16 nt, Vaccinia virus
gcaauuauauaaugua

SEQ ID NO: 3269291 - RNA, 14 nt, Vaccinia virus
uacauaacaucuuu

SEQ ID NO: 3269292 - RNA, 13 nt, Vaccinia virus
gaaacauacgaua

SEQ ID NO: 3269293 - RNA, 19 nt, Vaccinia virus
aaguuuauucgcuaccaua

SEQ ID NO: 3269294 - RNA, 19 nt, Vaccinia virus
auugauccuagaacuagau

SEQ ID NO: 3269295 - RNA, 17 nt, Vaccinia virus
cuuauucggaaaguauu

SEQ ID NO: 3269296 - RNA, 17 nt, Vaccinia virus
caaacugcauucguguu

SEQ ID NO: 3269297 - RNA, 11 nt, Vaccinia virus
auauggaugag

SEQ ID NO: 3269298 - RNA, 18 nt, Vaccinia virus
gcaaagaaauuaauagaa

SEQ ID NO: 3269299 - RNA, 20 nt, Vaccinia virus
ucugaaccaguuaauguaua

SEQ ID NO: 3269300 - RNA, 19 nt, Vaccinia virus
gaacguaaauuaguucaua

SEQ ID NO: 3269301 - RNA, 15 nt, Vaccinia virus
auaucauacaugaua

SEQ ID NO: 3269302 - RNA, 17 nt, Vaccinia virus
aaucuuuuucaucuugu

SEQ ID NO: 3269303 - RNA, 14 nt, Vaccinia virus
cguacauugugugu

SEQ ID NO: 3269304 - RNA, 22 nt, Vaccinia virus
auagcuacaguaaaaauaacua

SEQ ID NO: 3269305 - RNA, 23 nt, Vaccinia virus
auucucucaucuaucaaaaguua

SEQ ID NO: 3269306 - RNA, 17 nt, Vaccinia virus
ugucuuaaaguuuauua

SEQ ID NO: 3269307 - RNA, 15 nt, Vaccinia virus
aacuaaaaaaaauga

SEQ ID NO: 3269308 - RNA, 14 nt, Vaccinia virus
aaugaaugaauaua

SEQ ID NO: 3269309 - RNA, 12 nt, Vaccinia virus
gacccauagaga

SEQ ID NO: 3269310 - RNA, 15 nt, Vaccinia virus
uacauuuucuuacaa

SEQ ID NO: 3269311 - RNA, 20 nt, Vaccinia virus
acagguuuaaacuaauacua

SEQ ID NO: 3269312 - RNA, 23 nt, Vaccinia virus
uuaacuauuuugucucuguuuuu

SEQ ID NO: 3269313 - RNA, 22 nt, Vaccinia virus
auuaguaaggcuuuagaaacuu

SEQ ID NO: 3269314 - RNA, 23 nt, Vaccinia virus
gcgauaucuccauuaauaaugau

SEQ ID NO: 3269315 - RNA, 17 nt, Vaccinia virus
auugcauggugauuugu

SEQ ID NO: 3269316 - RNA, 23 nt, Vaccinia virus
guaauugacaucuauauauccuu

SEQ ID NO: 3269317 - RNA, 21 nt, Vaccinia virus
cauguugaacauaaaacuaau

SEQ ID NO: 3269318 - RNA, 15 nt, Vaccinia virus
uacccgcaauuauua

SEQ ID NO: 3269319 - RNA, 14 nt, Vaccinia virus
auaucaucuacaua

SEQ ID NO: 3269320 - RNA, 17 nt, Vaccinia virus
uauguugaaucuaaacu

SEQ ID NO: 3269321 - RNA, 20 nt, Vaccinia virus
auuucauuacccaaguuuga

SEQ ID NO: 3269322 - RNA, 13 nt, Vaccinia virus
ucguauguagaaa

SEQ ID NO: 3269323 - RNA, 12 nt, Vaccinia virus
ucgacuguuacu

SEQ ID NO: 3269324 - RNA, 14 nt, Vaccinia virus
auauaccauuaaaa

SEQ ID NO: 3269325 - RNA, 20 nt, Vaccinia virus
uuuuacagaucuaguauaau

SEQ ID NO: 3269326 - RNA, 21 nt, Vaccinia virus
auagauguauuugauauacua

SEQ ID NO: 3269327 - RNA, 18 nt, Vaccinia virus
ucauauacaacucuuuaa

SEQ ID NO: 3269328 - RNA, 18 nt, Vaccinia virus
aagagaauugucaaaauu

SEQ ID NO: 3269329 - RNA, 14 nt, Vaccinia virus
ucaggaacauaaac

SEQ ID NO: 3269330 - RNA, 13 nt, Vaccinia virus
gacuauaaaauau

SEQ ID NO: 3269331 - RNA, 13 nt, Vaccinia virus
auaauuuaggaau

SEQ ID NO: 3269332 - RNA, 13 nt, Vaccinia virus
agagucaauguuu

SEQ ID NO: 3269333 - RNA, 19 nt, Vaccinia virus
uucuaugcuauaaaugaau

SEQ ID NO: 3269334 - RNA, 17 nt, Vaccinia virus
aaugcuugaaaauggac

SEQ ID NO: 3269335 - RNA, 16 nt, Vaccinia virus
gaaugaaauauauaca

SEQ ID NO: 3269336 - RNA, 23 nt, Vaccinia virus
uuauugggugguaaacuagauaa

SEQ ID NO: 3269337 - RNA, 17 nt, Vaccinia virus
acgagcuauuaaacugu

SEQ ID NO: 3269338 - RNA, 20 nt, Vaccinia virus
gaugucacaauuuguauuau

SEQ ID NO: 3269339 - RNA, 21 nt, Vaccinia virus
auccgaaacaaucucagauau

SEQ ID NO: 3269340 - RNA, 18 nt, Vaccinia virus
auucuucacagacugaag

SEQ ID NO: 3269341 - RNA, 13 nt, Vaccinia virus
uaauaaagacuuc

SEQ ID NO: 3269342 - RNA, 18 nt, Vaccinia virus
ucauuacagaaacuguaa

SEQ ID NO: 3269343 - RNA, 21 nt, Vaccinia virus
auccucagucaucuugucuag

SEQ ID NO: 3269344 - RNA, 22 nt, Vaccinia virus
uuaaaagaauuacuuagucugu

SEQ ID NO: 3269345 - RNA, 19 nt, Vaccinia virus
ucaucuuguucagaaauau

SEQ ID NO: 3269346 - RNA, 14 nt, Vaccinia virus
aauguuaaacauua

SEQ ID NO: 3269347 - RNA, 23 nt, Vaccinia virus
auuuuuuuaaaaaaaaaauacuu

SEQ ID NO: 3269348 - RNA, 22 nt, Vaccinia virus
uuaauaaauccggaacuguaaa

SEQ ID NO: 3269349 - RNA, 12 nt, Vaccinia virus
aacguggauaaa

SEQ ID NO: 3269350 - RNA, 11 nt, Vaccinia virus
aaaaaaugauc

SEQ ID NO: 3269351 - RNA, 21 nt, Vaccinia virus
acgucaaaauuggaaggauau

SEQ ID NO: 3269352 - RNA, 11 nt, Vaccinia virus
uuuucuguaaa

SEQ ID NO: 3269353 - RNA, 22 nt, Vaccinia virus
uguuaucaugaaauguuugaua

SEQ ID NO: 3269354 - RNA, 18 nt, Vaccinia virus
aaagaaacugucaucuau

SEQ ID NO: 3269355 - RNA, 16 nt, Vaccinia virus
uaacgcauaauuauua

SEQ ID NO: 3269356 - RNA, 18 nt, Vaccinia virus
uaagucucucuccauaac

SEQ ID NO: 3269357 - RNA, 20 nt, Vaccinia virus
cauauguuuuaauauuuaca

SEQ ID NO: 3269358 - RNA, 16 nt, Vaccinia virus
uugauaucuuuagaua

SEQ ID NO: 3269359 - RNA, 20 nt, Vaccinia virus
uacagaaacuguaaagaaca

SEQ ID NO: 3269360 - RNA, 14 nt, Vaccinia virus
aacuuuauuagaua

SEQ ID NO: 3269361 - RNA, 13 nt, Vaccinia virus
gaauaauguuucu

SEQ ID NO: 3269362 - RNA, 21 nt, Vaccinia virus
caucagacguuccggaaagag

SEQ ID NO: 3269363 - RNA, 15 nt, Vaccinia virus
auuuuaauauagcug

SEQ ID NO: 3269364 - RNA, 13 nt, Vaccinia virus
aucugaucuuguu

SEQ ID NO: 3269365 - RNA, 21 nt, Vaccinia virus
uaauauaaaagaauauguaua

SEQ ID NO: 3269366 - RNA, 14 nt, Vaccinia virus
auagagaacauaau

SEQ ID NO: 3269367 - RNA, 19 nt, Vaccinia virus
ccagucuuugguaucgaua

SEQ ID NO: 3269368 - RNA, 13 nt, Vaccinia virus
gaagaagaugcua

SEQ ID NO: 3269369 - RNA, 16 nt, Vaccinia virus
auuaaucuuuucugua

SEQ ID NO: 3269370 - RNA, 15 nt, Vaccinia virus
aacucauuauagaua

SEQ ID NO: 3269371 - RNA, 18 nt, Vaccinia virus
aguagaccguuaaugaaa

SEQ ID NO: 3269372 - RNA, 14 nt, Vaccinia virus
auacagaagauuua

SEQ ID NO: 3269373 - RNA, 22 nt, Vaccinia virus
aaauugcgacacuauucaugua

SEQ ID NO: 3269374 - RNA, 22 nt, Vaccinia virus
uaucgcuaaaauuuucaucaaa

SEQ ID NO: 3269375 - RNA, 19 nt, Vaccinia virus
uacguauuucguaccugua

SEQ ID NO: 3269376 - RNA, 13 nt, Vaccinia virus
cauagucuucaau

SEQ ID NO: 3269377 - RNA, 20 nt, Vaccinia virus
ucuaauagaucugauuagua

SEQ ID NO: 3269378 - RNA, 14 nt, Vaccinia virus
uaguuuuuacacau

SEQ ID NO: 3269379 - RNA, 12 nt, Vaccinia virus
aauacuuaaaaa

SEQ ID NO: 3269380 - RNA, 22 nt, Vaccinia virus
auauuaggcacagucaaacauu

SEQ ID NO: 3269381 - RNA, 14 nt, Vaccinia virus
uuaaagauggagua

SEQ ID NO: 3269382 - RNA, 19 nt, Vaccinia virus
gauucugauaacauaaaaa

SEQ ID NO: 3269383 - RNA, 16 nt, Vaccinia virus
uaccauuaaucacuga

SEQ ID NO: 3269384 - RNA, 17 nt, Vaccinia virus
caacaucuauaaaagua

SEQ ID NO: 3269385 - RNA, 19 nt, Vaccinia virus
auauccuuugcauucuauu

SEQ ID NO: 3269386 - RNA, 14 nt, Vaccinia virus
cauauuauacagua

SEQ ID NO: 3269387 - RNA, 21 nt, Vaccinia virus
gauaauucgcgcaccaacaau

SEQ ID NO: 3269388 - RNA, 19 nt, Vaccinia virus
auccuucuauguugacaug

SEQ ID NO: 3269389 - RNA, 18 nt, Vaccinia virus
cauguaauacauuuugaa

SEQ ID NO: 3269390 - RNA, 21 nt, Vaccinia virus
uucugauauggaaucuguauu

SEQ ID NO: 3269391 - RNA, 19 nt, Vaccinia virus
auuaaaccauguugugaaa

SEQ ID NO: 3269392 - RNA, 16 nt, Vaccinia virus
uagagauaaaacaagu

SEQ ID NO: 3269393 - RNA, 18 nt, Vaccinia virus
uguacccuguuuaacaug

SEQ ID NO: 3269394 - RNA, 17 nt, Vaccinia virus
uccagaugcgagagaau

SEQ ID NO: 3269395 - RNA, 14 nt, Vaccinia virus
ucuagauagaguau

SEQ ID NO: 3269396 - RNA, 14 nt, Vaccinia virus
agcuucugaaauaa

SEQ ID NO: 3269397 - RNA, 20 nt, Vaccinia virus
guacgggcgcuguaauuaau

SEQ ID NO: 3269398 - RNA, 23 nt, Vaccinia virus
uggaagacagccgucucuacaua

SEQ ID NO: 3269399 - RNA, 13 nt, Vaccinia virus
aacauuaauugau

SEQ ID NO: 3269400 - RNA, 13 nt, Vaccinia virus
ucaucauuucuaa

SEQ ID NO: 3269401 - RNA, 15 nt, Vaccinia virus
aucauacaaugaauu

SEQ ID NO: 3269402 - RNA, 15 nt, Vaccinia virus
uaugguauucuucua

SEQ ID NO: 3269403 - RNA, 15 nt, Vaccinia virus
auucacguuauauaa

SEQ ID NO: 3269404 - RNA, 15 nt, Vaccinia virus
guuuguaaaauaucu

SEQ ID NO: 3269405 - RNA, 14 nt, Vaccinia virus
uauuuauuuaaaau

SEQ ID NO: 3269406 - RNA, 15 nt, Vaccinia virus
aucaauaucucaauu

SEQ ID NO: 3269407 - RNA, 20 nt, Vaccinia virus
uauaauaacgauuuguuuaa

SEQ ID NO: 3269408 - RNA, 22 nt, Vaccinia virus
ucuugccauggacuaagauauc

SEQ ID NO: 3269409 - RNA, 16 nt, Vaccinia virus
uaucaucuauuagaga

SEQ ID NO: 3269410 - RNA, 19 nt, Vaccinia virus
uuagauuuuuuacacuguu

SEQ ID NO: 3269411 - RNA, 12 nt, Vaccinia virus
auauaugcauua

SEQ ID NO: 3269412 - RNA, 13 nt, Vaccinia virus
aaauagagcaauu

SEQ ID NO: 3269413 - RNA, 18 nt, Vaccinia virus
aacauacuauuguuuauu

SEQ ID NO: 3269414 - RNA, 23 nt, Vaccinia virus
aaucagacugggaggaucacugu

SEQ ID NO: 3269415 - RNA, 19 nt, Vaccinia virus
gugaguacggauuaaacau

SEQ ID NO: 3269416 - RNA, 14 nt, Vaccinia virus
aucaugacaaaauu

SEQ ID NO: 3269417 - RNA, 18 nt, Vaccinia virus
ucucacaaaaaaaguuuu

SEQ ID NO: 3269418 - RNA, 16 nt, Vaccinia virus
aaaauagcgcugaaaa

SEQ ID NO: 3269419 - RNA, 21 nt, Vaccinia virus
cgagagaaugaauaacccugg

SEQ ID NO: 3269420 - RNA, 23 nt, Vaccinia virus
guauccacaaauaguaaaugaga

SEQ ID NO: 3269421 - RNA, 21 nt, Vaccinia virus
gauaccgaucacguucuaguu

SEQ ID NO: 3269422 - RNA, 19 nt, Vaccinia virus
aauuccagauguuguaaaa

SEQ ID NO: 3269423 - RNA, 22 nt, Vaccinia virus
agguuuugcaacauguuaaaau

SEQ ID NO: 3269424 - RNA, 20 nt, Vaccinia virus
uaaaaucaaucguuaucuaa

SEQ ID NO: 3269425 - RNA, 17 nt, Vaccinia virus
acagaaauauaugagau

SEQ ID NO: 3269426 - RNA, 13 nt, Vaccinia virus
agaggaagaagau

SEQ ID NO: 3269427 - RNA, 14 nt, Vaccinia virus
aaucagaaaugaug

SEQ ID NO: 3269428 - RNA, 17 nt, Vaccinia virus
agauacaaauuuuaaga

SEQ ID NO: 3269429 - RNA, 15 nt, Vaccinia virus
aauaugauuagaagu

SEQ ID NO: 3269430 - RNA, 15 nt, Vaccinia virus
ucuaacgguuucuuc

SEQ ID NO: 3269431 - RNA, 21 nt, Vaccinia virus
acauauaaaucuaaaauugau

SEQ ID NO: 3269432 - RNA, 14 nt, Vaccinia virus
uaauagauuucuag

SEQ ID NO: 3269433 - RNA, 17 nt, Vaccinia virus
uaauucagauacuacag

SEQ ID NO: 3269434 - RNA, 22 nt, Vaccinia virus
augcaaccguaucaaaaaauua

SEQ ID NO: 3269435 - RNA, 13 nt, Vaccinia virus
caaaucuggaaaa

SEQ ID NO: 3269436 - RNA, 20 nt, Vaccinia virus
cagcaauuucuuuauucucu

SEQ ID NO: 3269437 - RNA, 15 nt, Vaccinia virus
aauuauguaaaacau

SEQ ID NO: 3269438 - RNA, 16 nt, Vaccinia virus
cucaacauaaauaauu

SEQ ID NO: 3269439 - RNA, 21 nt, Vaccinia virus
gaaaaguucaacaugauuauu

SEQ ID NO: 3269440 - RNA, 13 nt, Vaccinia virus
auguaaaauacuu

SEQ ID NO: 3269441 - RNA, 13 nt, Vaccinia virus
aacaaaaauugau

SEQ ID NO: 3269442 - RNA, 13 nt, Vaccinia virus
auaguacauuccc

SEQ ID NO: 3269443 - RNA, 16 nt, Vaccinia virus
uaucuauguuaucauc

SEQ ID NO: 3269444 - RNA, 17 nt, Vaccinia virus
acuauauuguacuuuac

SEQ ID NO: 3269445 - RNA, 15 nt, Vaccinia virus
guucaucacauaugc

SEQ ID NO: 3269446 - RNA, 14 nt, Vaccinia virus
uaaaauauguaguc

SEQ ID NO: 3269447 - RNA, 12 nt, Vaccinia virus
cauaaaaguugu

SEQ ID NO: 3269448 - RNA, 22 nt, Vaccinia virus
uaguuucugguuuucuauaaau

SEQ ID NO: 3269449 - RNA, 13 nt, Vaccinia virus
auuaauaguuuug

SEQ ID NO: 3269450 - RNA, 21 nt, Vaccinia virus
gauauauaguaaugaagagag

SEQ ID NO: 3269451 - RNA, 22 nt, Vaccinia virus
aaguuugaaacgagugaagaaa

SEQ ID NO: 3269452 - RNA, 17 nt, Vaccinia virus
cuuuaaaagaaacugac

SEQ ID NO: 3269453 - RNA, 13 nt, Vaccinia virus
aaauaauauauca

SEQ ID NO: 3269454 - RNA, 17 nt, Vaccinia virus
auugaauuuauaucuaa

SEQ ID NO: 3269455 - RNA, 12 nt, Vaccinia virus
uaauuaauguaa

SEQ ID NO: 3269456 - RNA, 16 nt, Vaccinia virus
gccauggacuaagaua

SEQ ID NO: 3269457 - RNA, 14 nt, Vaccinia virus
aucucaauaugaua

SEQ ID NO: 3269458 - RNA, 21 nt, Vaccinia virus
uagacauaaaaacuaauauua

SEQ ID NO: 3269459 - RNA, 21 nt, Vaccinia virus
cuauagacauaauacuaucug

SEQ ID NO: 3269460 - RNA, 16 nt, Vaccinia virus
gaaaaauuuguagauu

SEQ ID NO: 3269461 - RNA, 16 nt, Vaccinia virus
auuauucuaucaauuu

SEQ ID NO: 3269462 - RNA, 23 nt, Vaccinia virus
gccauuuaguuauugaaauuaau

SEQ ID NO: 3269463 - RNA, 17 nt, Vaccinia virus
uauccuaucauguauuu

SEQ ID NO: 3269464 - RNA, 17 nt, Vaccinia virus
uagaaaaaaugaugcug

SEQ ID NO: 3269465 - RNA, 23 nt, Vaccinia virus
gucuuauucuuaaaaucuauucc

SEQ ID NO: 3269466 - RNA, 20 nt, Vaccinia virus
uucuaaaaaaauauuaacga

SEQ ID NO: 3269467 - RNA, 14 nt, Vaccinia virus
acgcauaauuauua

SEQ ID NO: 3269468 - RNA, 17 nt, Vaccinia virus
augcacguaaacauuau

SEQ ID NO: 3269469 - RNA, 19 nt, Vaccinia virus
uagaaauuaucaaauguug

SEQ ID NO: 3269470 - RNA, 19 nt, Vaccinia virus
cucucuauuucuuaaugaa

SEQ ID NO: 3269471 - RNA, 16 nt, Vaccinia virus
aaaaugugauauagaa

SEQ ID NO: 3269472 - RNA, 15 nt, Vaccinia virus
auccauauuucuuaa

SEQ ID NO: 3269473 - RNA, 17 nt, Vaccinia virus
aaucccgucucagaaag

SEQ ID NO: 3269474 - RNA, 20 nt, Vaccinia virus
caguugaauggauucguccu

SEQ ID NO: 3269475 - RNA, 16 nt, Vaccinia virus
uuuaauagauauacac

SEQ ID NO: 3269476 - RNA, 13 nt, Vaccinia virus
uggaugaaccauu

SEQ ID NO: 3269477 - RNA, 14 nt, Vaccinia virus
ugaacuuuaucuag

SEQ ID NO: 3269478 - RNA, 13 nt, Vaccinia virus
ugaaaaaacauua

SEQ ID NO: 3269479 - RNA, 18 nt, Vaccinia virus
aacuccaagauaccagua

SEQ ID NO: 3269480 - RNA, 23 nt, Vaccinia virus
acaacaacgaaccaaaaugaauu

SEQ ID NO: 3269481 - RNA, 22 nt, Vaccinia virus
acaaacauuuuuguugguguaa

SEQ ID NO: 3269482 - RNA, 15 nt, Vaccinia virus
guuuagauucuuuuu

SEQ ID NO: 3269483 - RNA, 15 nt, Vaccinia virus
caggauucuaaugau

SEQ ID NO: 3269484 - RNA, 14 nt, Vaccinia virus
gagggaaaagucau

SEQ ID NO: 3269485 - RNA, 18 nt, Vaccinia virus
acuaccucagacugguag

SEQ ID NO: 3269486 - RNA, 16 nt, Vaccinia virus
uaacaguaacuuguau

SEQ ID NO: 3269487 - RNA, 21 nt, Vaccinia virus
guuacucaguugaacagauga

SEQ ID NO: 3269488 - RNA, 23 nt, Vaccinia virus
auggaauauaauaaucuauuuua

SEQ ID NO: 3269489 - RNA, 17 nt, Vaccinia virus
cuauuacugacuuuaau

SEQ ID NO: 3269490 - RNA, 19 nt, Vaccinia virus
augacuuauaaaaauacua

SEQ ID NO: 3269491 - RNA, 20 nt, Vaccinia virus
acuaucuaaauguaauuaau

SEQ ID NO: 3269492 - RNA, 14 nt, Vaccinia virus
aggaucuagcaaag

SEQ ID NO: 3269493 - RNA, 22 nt, Vaccinia virus
cuauuccuggugcuauuuugau

SEQ ID NO: 3269494 - RNA, 16 nt, Vaccinia virus
aguaaugguauguauu

SEQ ID NO: 3269495 - RNA, 18 nt, Vaccinia virus
aagcagacuagaaauaac

SEQ ID NO: 3269496 - RNA, 16 nt, Vaccinia virus
gaauaucuuuauucau

SEQ ID NO: 3269497 - RNA, 17 nt, Vaccinia virus
agauuaguaaauucaag

SEQ ID NO: 3269498 - RNA, 17 nt, Vaccinia virus
ggaaaaaauuguugauc

SEQ ID NO: 3269499 - RNA, 17 nt, Vaccinia virus
auauuagauauuuuaug

SEQ ID NO: 3269500 - RNA, 18 nt, Vaccinia virus
ucgucuccccaaacauug

SEQ ID NO: 3269501 - RNA, 20 nt, Vaccinia virus
auauuacaaacuauagaaau

SEQ ID NO: 3269502 - RNA, 17 nt, Vaccinia virus
ugauaguaauucucgga

SEQ ID NO: 3269503 - RNA, 15 nt, Vaccinia virus
acuggaucguuuaaa

SEQ ID NO: 3269504 - RNA, 18 nt, Vaccinia virus
aggaacuggauauuacaa

SEQ ID NO: 3269505 - RNA, 13 nt, Vaccinia virus
aaauauguagaaa

SEQ ID NO: 3269506 - RNA, 13 nt, Vaccinia virus
aaauauaacuauu

SEQ ID NO: 3269507 - RNA, 19 nt, Vaccinia virus
auuauugguucauuggaau

SEQ ID NO: 3269508 - RNA, 16 nt, Vaccinia virus
gagaauggaugauucu

SEQ ID NO: 3269509 - RNA, 17 nt, Vaccinia virus
gauaauagauuaaugau

SEQ ID NO: 3269510 - RNA, 18 nt, Vaccinia virus
uaauccaaugauacuuuu

SEQ ID NO: 3269511 - RNA, 16 nt, Vaccinia virus
ucuaucuuuuauuuua

SEQ ID NO: 3269512 - RNA, 16 nt, Vaccinia virus
acuuuaucagauuaaa

SEQ ID NO: 3269513 - RNA, 16 nt, Vaccinia virus
aaaacuuuaauaacaa

SEQ ID NO: 3269514 - RNA, 14 nt, Vaccinia virus
ugaauuguuucuuu

SEQ ID NO: 3269515 - RNA, 18 nt, Vaccinia virus
gcucuuuugaugauaaau

SEQ ID NO: 3269516 - RNA, 13 nt, Vaccinia virus
ugcuaauauacaa

SEQ ID NO: 3269517 - RNA, 14 nt, Vaccinia virus
uguuaguuuccuua

SEQ ID NO: 3269518 - RNA, 15 nt, Vaccinia virus
agaugcaaacauuau

SEQ ID NO: 3269519 - RNA, 17 nt, Vaccinia virus
cauaguaacucauaauu

SEQ ID NO: 3269520 - RNA, 21 nt, Vaccinia virus
cagaagugugaauaugaucuu

SEQ ID NO: 3269521 - RNA, 21 nt, Vaccinia virus
auuaauacaggaucuagcaaa

SEQ ID NO: 3269522 - RNA, 23 nt, Vaccinia virus
ugaauuuauuucagaaauuauuc

SEQ ID NO: 3269523 - RNA, 15 nt, Vaccinia virus
ucaauaaaugauuca

SEQ ID NO: 3269524 - RNA, 15 nt, Vaccinia virus
aacuauuuuuaacuu

SEQ ID NO: 3269525 - RNA, 18 nt, Vaccinia virus
uagaaaauggauuuauug

SEQ ID NO: 3269526 - RNA, 17 nt, Vaccinia virus
guacuucuguacaaaau

SEQ ID NO: 3269527 - RNA, 16 nt, Vaccinia virus
gcauuaguaacagcuu

SEQ ID NO: 3269528 - RNA, 19 nt, Vaccinia virus
aaggauaaaauauuaucca

SEQ ID NO: 3269529 - RNA, 15 nt, Vaccinia virus
cuaaacuuauuuaga

SEQ ID NO: 3269530 - RNA, 23 nt, Vaccinia virus
augugggacaucaauacgccaau

SEQ ID NO: 3269531 - RNA, 13 nt, Vaccinia virus
gugcuaccaaagg

SEQ ID NO: 3269532 - RNA, 16 nt, Vaccinia virus
gaauaaucguuauuau

SEQ ID NO: 3269533 - RNA, 13 nt, Vaccinia virus
ugccaaaaugaua

SEQ ID NO: 3269534 - RNA, 20 nt, Vaccinia virus
ugggugugguuaaacgaaag

SEQ ID NO: 3269535 - RNA, 15 nt, Vaccinia virus
aaacuguuuauucca

SEQ ID NO: 3269536 - RNA, 13 nt, Vaccinia virus
uacaaacugaaaa

SEQ ID NO: 3269537 - RNA, 14 nt, Vaccinia virus
ucuuccuacuaucu

SEQ ID NO: 3269538 - RNA, 22 nt, Vaccinia virus
auaccacuuaaugacaaaauca

SEQ ID NO: 3269539 - RNA, 13 nt, Vaccinia virus
accacaacauuuc

SEQ ID NO: 3269540 - RNA, 15 nt, Vaccinia virus
cgauuauuucugaau

SEQ ID NO: 3269541 - RNA, 11 nt, Vaccinia virus
guuaaauuaau

SEQ ID NO: 3269542 - RNA, 22 nt, Vaccinia virus
aaaaauuauccuaucauguauu

SEQ ID NO: 3269543 - RNA, 16 nt, Vaccinia virus
cuaaaaagaauguaua

SEQ ID NO: 3269544 - RNA, 16 nt, Vaccinia virus
cgaauauaaaugauuu

SEQ ID NO: 3269545 - RNA, 14 nt, Vaccinia virus
auaagacuuuacuu

SEQ ID NO: 3269546 - RNA, 21 nt, Vaccinia virus
ugaaauagcguucgucaacau

SEQ ID NO: 3269547 - RNA, 13 nt, Vaccinia virus
ugaucuagucuuu

SEQ ID NO: 3269548 - RNA, 17 nt, Vaccinia virus
uaaacauugauuaaauu

SEQ ID NO: 3269549 - RNA, 23 nt, Vaccinia virus
auacucuccgaguguaaauauua

SEQ ID NO: 3269550 - RNA, 20 nt, Vaccinia virus
uuauuacacgcuauuaauca

SEQ ID NO: 3269551 - RNA, 23 nt, Vaccinia virus
ugaagaaccaguaacauaugaua

SEQ ID NO: 3269552 - RNA, 20 nt, Vaccinia virus
aauauuaguggaagaaagau

SEQ ID NO: 3269553 - RNA, 18 nt, Vaccinia virus
gaauauugauuuacuaaa

SEQ ID NO: 3269554 - RNA, 14 nt, Vaccinia virus
gaacugaugccuau

SEQ ID NO: 3269555 - RNA, 15 nt, Vaccinia virus
uucaauaucuauacu

SEQ ID NO: 3269556 - RNA, 22 nt, Vaccinia virus
uucacuuuuuauaauuuuacca

SEQ ID NO: 3269557 - RNA, 19 nt, Vaccinia virus
aacuuccguuuaaaaaugg

SEQ ID NO: 3269558 - RNA, 15 nt, Vaccinia virus
uuauagaguguggua

SEQ ID NO: 3269559 - RNA, 14 nt, Vaccinia virus
gaauuuagaaauau

SEQ ID NO: 3269560 - RNA, 15 nt, Vaccinia virus
uucuaauucucagag

SEQ ID NO: 3269561 - RNA, 19 nt, Vaccinia virus
agauagagaugagaugucu

SEQ ID NO: 3269562 - RNA, 15 nt, Vaccinia virus
ccaagugcuuaaaua

SEQ ID NO: 3269563 - RNA, 16 nt, Vaccinia virus
uauuccuguuaucaua

SEQ ID NO: 3269564 - RNA, 15 nt, Vaccinia virus
guaaaaaauauguua

SEQ ID NO: 3269565 - RNA, 16 nt, Vaccinia virus
acauuaaaaauuucca

SEQ ID NO: 3269566 - RNA, 21 nt, Vaccinia virus
uuaacgucuaccgaaacaucg

SEQ ID NO: 3269567 - RNA, 17 nt, Vaccinia virus
uuagacgcuuauuauua

SEQ ID NO: 3269568 - RNA, 18 nt, Vaccinia virus
ccuuucuccuguaaagaa

SEQ ID NO: 3269569 - RNA, 17 nt, Vaccinia virus
gcauaaauuguaaaaaa

SEQ ID NO: 3269570 - RNA, 16 nt, Vaccinia virus
auaaauauaauaacaa

SEQ ID NO: 3269571 - RNA, 14 nt, Vaccinia virus
aaauaauucauuuu

SEQ ID NO: 3269572 - RNA, 19 nt, Vaccinia virus
aggagguauauaucaugau

SEQ ID NO: 3269573 - RNA, 17 nt, Vaccinia virus
uuagcagaauauauaag

SEQ ID NO: 3269574 - RNA, 22 nt, Vaccinia virus
acucauuauuucccaaaauuug

SEQ ID NO: 3269575 - RNA, 18 nt, Vaccinia virus
uaugacucaugaucuauu

SEQ ID NO: 3269576 - RNA, 14 nt, Vaccinia virus
uauucaucaucaaa

SEQ ID NO: 3269577 - RNA, 21 nt, Vaccinia virus
uaucauuucuacauuguuuau

SEQ ID NO: 3269578 - RNA, 20 nt, Vaccinia virus
uaacguccaucauuacagaa

SEQ ID NO: 3269579 - RNA, 22 nt, Vaccinia virus
auuugaaacuccuagagaauua

SEQ ID NO: 3269580 - RNA, 19 nt, Vaccinia virus
aguaaagauuucaaagaug

SEQ ID NO: 3269581 - RNA, 13 nt, Vaccinia virus
uguuuuuguacau

SEQ ID NO: 3269582 - RNA, 15 nt, Vaccinia virus
aauuaucaaauacuu

SEQ ID NO: 3269583 - RNA, 14 nt, Vaccinia virus
ugauauuucauaua

SEQ ID NO: 3269584 - RNA, 11 nt, Vaccinia virus
ugacuuucaaa

SEQ ID NO: 3269585 - RNA, 16 nt, Vaccinia virus
agauuucaaagauguu

SEQ ID NO: 3269586 - RNA, 14 nt, Vaccinia virus
aaaaauuauacugu

SEQ ID NO: 3269587 - RNA, 20 nt, Vaccinia virus
caucgucgucuacuauucua

SEQ ID NO: 3269588 - RNA, 17 nt, Vaccinia virus
gcauauauuagaaauac

SEQ ID NO: 3269589 - RNA, 22 nt, Vaccinia virus
ucuaugaaaggagagaauguau

SEQ ID NO: 3269590 - RNA, 24 nt, Vaccinia virus
aaaaugaaaauacuuuaguaauua

SEQ ID NO: 3269591 - RNA, 20 nt, Vaccinia virus
agauaccacgaguaucaauu

SEQ ID NO: 3269592 - RNA, 23 nt, Vaccinia virus
ucaaacaaaaaagcucaauaaga

SEQ ID NO: 3269593 - RNA, 16 nt, Vaccinia virus
aauguagacaaauaua

SEQ ID NO: 3269594 - RNA, 14 nt, Vaccinia virus
aauagaugaauaua

SEQ ID NO: 3269595 - RNA, 14 nt, Vaccinia virus
gcauuuccaaagaa

SEQ ID NO: 3269596 - RNA, 14 nt, Vaccinia virus
auagauaacauagu

SEQ ID NO: 3269597 - RNA, 14 nt, Vaccinia virus
auacugaaccaucg

SEQ ID NO: 3269598 - RNA, 19 nt, Vaccinia virus
cuugucaaaucuauauacc

SEQ ID NO: 3269599 - RNA, 21 nt, Vaccinia virus
aagaaguauacuaucgucauu

SEQ ID NO: 3269600 - RNA, 19 nt, Vaccinia virus
auuauauaauguauaaaug

SEQ ID NO: 3269601 - RNA, 22 nt, Vaccinia virus
uuaguucaucgcuuucuagaau

SEQ ID NO: 3269602 - RNA, 14 nt, Vaccinia virus
uaccacauacaaaa

SEQ ID NO: 3269603 - RNA, 17 nt, Vaccinia virus
aacauuuuauuucuaga

SEQ ID NO: 3269604 - RNA, 17 nt, Vaccinia virus
uaauagcuccauaaacu

SEQ ID NO: 3269605 - RNA, 12 nt, Vaccinia virus
uuaaaauacuaa

SEQ ID NO: 3269606 - RNA, 16 nt, Vaccinia virus
ugauagauuuucuacu

SEQ ID NO: 3269607 - RNA, 13 nt, Vaccinia virus
cggauacgacauc

SEQ ID NO: 3269608 - RNA, 13 nt, Vaccinia virus
uacaauaaauguu

SEQ ID NO: 3269609 - RNA, 12 nt, Vaccinia virus
gacgcauuuaau

SEQ ID NO: 3269610 - RNA, 14 nt, Vaccinia virus
auuaaaaaggaaaa

SEQ ID NO: 3269611 - RNA, 12 nt, Vaccinia virus
gcagcauuuccu

SEQ ID NO: 3269612 - RNA, 15 nt, Vaccinia virus
acauauuuauauaau

SEQ ID NO: 3269613 - RNA, 20 nt, Vaccinia virus
ucagacucugauuugaacaa

SEQ ID NO: 3269614 - RNA, 20 nt, Vaccinia virus
acucuguagacuuuaauaga

SEQ ID NO: 3269615 - RNA, 12 nt, Vaccinia virus
ucguuaaauuuu

SEQ ID NO: 3269616 - RNA, 14 nt, Vaccinia virus
uacuauacgcaaug

SEQ ID NO: 3269617 - RNA, 15 nt, Vaccinia virus
aguuuauacuauuaa

SEQ ID NO: 3269618 - RNA, 14 nt, Vaccinia virus
guaauauucaucau

SEQ ID NO: 3269619 - RNA, 16 nt, Vaccinia virus
ugauauguuuucagcu

SEQ ID NO: 3269620 - RNA, 17 nt, Vaccinia virus
acaaaaaagcucaauaa

SEQ ID NO: 3269621 - RNA, 13 nt, Vaccinia virus
agauauauuggag

SEQ ID NO: 3269622 - RNA, 14 nt, Vaccinia virus
uauuucaaagacua

SEQ ID NO: 3269623 - RNA, 16 nt, Vaccinia virus
aaguugaccaauucau

SEQ ID NO: 3269624 - RNA, 15 nt, Vaccinia virus
cacauacaaaacuag

SEQ ID NO: 3269625 - RNA, 18 nt, Vaccinia virus
aguauuguuuaguauuuu

SEQ ID NO: 3269626 - RNA, 12 nt, Vaccinia virus
cucguucaucua

SEQ ID NO: 3269627 - RNA, 15 nt, Vaccinia virus
ugaagaaaaauguug

SEQ ID NO: 3269628 - RNA, 21 nt, Vaccinia virus
auaaaugucacgccauaacua

SEQ ID NO: 3269629 - RNA, 22 nt, Vaccinia virus
ggagauuauagcaauaugugua

SEQ ID NO: 3269630 - RNA, 21 nt, Vaccinia virus
uagcaucuuauuagaauauua

SEQ ID NO: 3269631 - RNA, 14 nt, Vaccinia virus
caguaguaaugaag

SEQ ID NO: 3269632 - RNA, 18 nt, Vaccinia virus
auaauuuuuuuaguuuuu

SEQ ID NO: 3269633 - RNA, 15 nt, Vaccinia virus
auuauauauggauuu

SEQ ID NO: 3269634 - RNA, 18 nt, Vaccinia virus
cagauuuaacaauuucua

SEQ ID NO: 3269635 - RNA, 15 nt, Vaccinia virus
auaacaaguaugaca

SEQ ID NO: 3269636 - RNA, 21 nt, Vaccinia virus
aggaucuacguucauauguau

SEQ ID NO: 3269637 - RNA, 13 nt, Vaccinia virus
acagauacagaug

SEQ ID NO: 3269638 - RNA, 19 nt, Vaccinia virus
aauucaccuucacaaaaua

SEQ ID NO: 3269639 - RNA, 15 nt, Vaccinia virus
uucugguuuaaaaac

SEQ ID NO: 3269640 - RNA, 15 nt, Vaccinia virus
agauuuuaaaaaacu

SEQ ID NO: 3269641 - RNA, 13 nt, Vaccinia virus
auaaauggaaaug

SEQ ID NO: 3269642 - RNA, 23 nt, Vaccinia virus
ugauucuccagccgaaacauauu

SEQ ID NO: 3269643 - RNA, 19 nt, Vaccinia virus
gaauaauccuauaucacuu

SEQ ID NO: 3269644 - RNA, 15 nt, Vaccinia virus
aaucucuauuugcca

SEQ ID NO: 3269645 - RNA, 12 nt, Vaccinia virus
aguuucuagaua

SEQ ID NO: 3269646 - RNA, 11 nt, Vaccinia virus
acauguaacug

SEQ ID NO: 3269647 - RNA, 14 nt, Vaccinia virus
uaauacauuuugaa

SEQ ID NO: 3269648 - RNA, 14 nt, Vaccinia virus
aaaagacuauacau

SEQ ID NO: 3269649 - RNA, 15 nt, Vaccinia virus
auagagaacauaaug

SEQ ID NO: 3269650 - RNA, 20 nt, Vaccinia virus
acuauuuuaaauagcauaga

SEQ ID NO: 3269651 - RNA, 12 nt, Vaccinia virus
aguuuauaagaa

SEQ ID NO: 3269652 - RNA, 14 nt, Vaccinia virus
auuacacaaauauu

SEQ ID NO: 3269653 - RNA, 15 nt, Vaccinia virus
gcaaugcauaaucga

SEQ ID NO: 3269654 - RNA, 15 nt, Vaccinia virus
uugcgauauacauaa

SEQ ID NO: 3269655 - RNA, 19 nt, Vaccinia virus
uaacaguccgguucuuaau

SEQ ID NO: 3269656 - RNA, 16 nt, Vaccinia virus
guacacaacacaauga

SEQ ID NO: 3269657 - RNA, 14 nt, Vaccinia virus
acggagacaaaauu

SEQ ID NO: 3269658 - RNA, 20 nt, Vaccinia virus
gauuaaaucguguauucauc

SEQ ID NO: 3269659 - RNA, 16 nt, Vaccinia virus
ugcuauccaucagaau

SEQ ID NO: 3269660 - RNA, 18 nt, Vaccinia virus
uguccgaugaucaaugac

SEQ ID NO: 3269661 - RNA, 20 nt, Vaccinia virus
aucuucucuccuguuaauaa

SEQ ID NO: 3269662 - RNA, 15 nt, Vaccinia virus
cuuuaaaagaaacug

SEQ ID NO: 3269663 - RNA, 23 nt, Vaccinia virus
cuuuggauuuucaccaguaugua

SEQ ID NO: 3269664 - RNA, 12 nt, Vaccinia virus
ucaauagaauau

SEQ ID NO: 3269665 - RNA, 16 nt, Vaccinia virus
cauggaaaagaauuua

SEQ ID NO: 3269666 - RNA, 12 nt, Vaccinia virus
aauaagaauaaa

SEQ ID NO: 3269667 - RNA, 20 nt, Vaccinia virus
caaaaauauuuuuauucucu

SEQ ID NO: 3269668 - RNA, 17 nt, Vaccinia virus
auaaacuccguguuuau

SEQ ID NO: 3269669 - RNA, 12 nt, Vaccinia virus
auaauuuaagag

SEQ ID NO: 3269670 - RNA, 22 nt, Vaccinia virus
cuauacgaaauaaauauucaga

SEQ ID NO: 3269671 - RNA, 20 nt, Vaccinia virus
guuguacaaauggagauauu

SEQ ID NO: 3269672 - RNA, 19 nt, Vaccinia virus
agcuauaauaauaaaugua

SEQ ID NO: 3269673 - RNA, 22 nt, Vaccinia virus
uuccuguuccguuaacaucucu

SEQ ID NO: 3269674 - RNA, 20 nt, Vaccinia virus
uauucuaccauagcaaaucu

SEQ ID NO: 3269675 - RNA, 19 nt, Vaccinia virus
guaucgauaauuauuucua

SEQ ID NO: 3269676 - RNA, 15 nt, Vaccinia virus
aacucuuugacauau

SEQ ID NO: 3269677 - RNA, 18 nt, Vaccinia virus
uagugaucaguuuaugua

SEQ ID NO: 3269678 - RNA, 17 nt, Vaccinia virus
cuggaaguggauauaca

SEQ ID NO: 3269679 - RNA, 18 nt, Vaccinia virus
auaauauauuagauauuu

SEQ ID NO: 3269680 - RNA, 17 nt, Vaccinia virus
uauaccaauauuauucu

SEQ ID NO: 3269681 - RNA, 23 nt, Vaccinia virus
uacucuagguaacaaacaaacuc

SEQ ID NO: 3269682 - RNA, 15 nt, Vaccinia virus
ggauaugucuagaac

SEQ ID NO: 3269683 - RNA, 17 nt, Vaccinia virus
augugacguacaaaaaa

SEQ ID NO: 3269684 - RNA, 13 nt, Vaccinia virus
uccuuaaaguaac

SEQ ID NO: 3269685 - RNA, 15 nt, Vaccinia virus
uaagauuaucaaaau

SEQ ID NO: 3269686 - RNA, 22 nt, Vaccinia virus
gauaauuucuccagaacauuga

SEQ ID NO: 3269687 - RNA, 14 nt, Vaccinia virus
gaauuucuauguca

SEQ ID NO: 3269688 - RNA, 17 nt, Vaccinia virus
aaaaaugaaaauaaaua

SEQ ID NO: 3269689 - RNA, 16 nt, Vaccinia virus
aucuguuuccuauaau

SEQ ID NO: 3269690 - RNA, 19 nt, Vaccinia virus
auuacggaauuauuggcuu

SEQ ID NO: 3269691 - RNA, 23 nt, Vaccinia virus
ucuuaguuaauggagaaauacuu

SEQ ID NO: 3269692 - RNA, 15 nt, Vaccinia virus
aucaggaaaaaagau

SEQ ID NO: 3269693 - RNA, 15 nt, Vaccinia virus
guuaauuucuauuca

SEQ ID NO: 3269694 - RNA, 15 nt, Vaccinia virus
acuuuuguuacuaau

SEQ ID NO: 3269695 - RNA, 22 nt, Vaccinia virus
agauacuguguaaagaaauggu

SEQ ID NO: 3269696 - RNA, 19 nt, Vaccinia virus
uaacgauaacgucauuaau

SEQ ID NO: 3269697 - RNA, 20 nt, Vaccinia virus
cauuaauauaugcucuagau

SEQ ID NO: 3269698 - RNA, 12 nt, Vaccinia virus
aaacauggagac

SEQ ID NO: 3269699 - RNA, 12 nt, Vaccinia virus
acucaugaugaa

SEQ ID NO: 3269700 - RNA, 18 nt, Vaccinia virus
gaaaaaguuccauaugau

SEQ ID NO: 3269701 - RNA, 19 nt, Vaccinia virus
aguauaaacacgaauacua

SEQ ID NO: 3269702 - RNA, 22 nt, Vaccinia virus
augcuauccaucagaauguuuc

SEQ ID NO: 3269703 - RNA, 20 nt, Vaccinia virus
uaacauuuuuuguaaaugua

SEQ ID NO: 3269704 - RNA, 13 nt, Vaccinia virus
caacuguuguaaa

SEQ ID NO: 3269705 - RNA, 17 nt, Vaccinia virus
uguuuaucuauacuauu

SEQ ID NO: 3269706 - RNA, 15 nt, Vaccinia virus
gagcaaguagaaaac

SEQ ID NO: 3269707 - RNA, 17 nt, Vaccinia virus
aucaauuaaauaauuaa

SEQ ID NO: 3269708 - RNA, 15 nt, Vaccinia virus
acuuccguuuaaaaa

SEQ ID NO: 3269709 - RNA, 22 nt, Vaccinia virus
aaucauuguccagauugaacau

SEQ ID NO: 3269710 - RNA, 18 nt, Vaccinia virus
aaguucauaacagauaca

SEQ ID NO: 3269711 - RNA, 21 nt, Vaccinia virus
aaacuaggaaucgguaacagu

SEQ ID NO: 3269712 - RNA, 18 nt, Vaccinia virus
gacggcguuaauaguaau

SEQ ID NO: 3269713 - RNA, 21 nt, Vaccinia virus
auauuccggcguaugaauuga

SEQ ID NO: 3269714 - RNA, 13 nt, Vaccinia virus
agaagaauaugau

SEQ ID NO: 3269715 - RNA, 19 nt, Vaccinia virus
auaaugacuguagauauua

SEQ ID NO: 3269716 - RNA, 15 nt, Vaccinia virus
agguagcaaaaagau

SEQ ID NO: 3269717 - RNA, 16 nt, Vaccinia virus
uaugauggguggauau

SEQ ID NO: 3269718 - RNA, 19 nt, Vaccinia virus
aauuauuuuuucuuaguaa

SEQ ID NO: 3269719 - RNA, 19 nt, Vaccinia virus
ucuauaugugcgagaauau

SEQ ID NO: 3269720 - RNA, 22 nt, Vaccinia virus
uuuuaacuaguguagaaaacag

SEQ ID NO: 3269721 - RNA, 20 nt, Vaccinia virus
cguguucguuugaaugccac

SEQ ID NO: 3269722 - RNA, 19 nt, Vaccinia virus
caaaaaagcucaauaagau

SEQ ID NO: 3269723 - RNA, 14 nt, Vaccinia virus
uaauuuuacuagau

SEQ ID NO: 3269724 - RNA, 14 nt, Vaccinia virus
guuacuaaauuaau

SEQ ID NO: 3269725 - RNA, 15 nt, Vaccinia virus
caccguaguguauau

SEQ ID NO: 3269726 - RNA, 19 nt, Vaccinia virus
aaauauuaucgauauugaa

SEQ ID NO: 3269727 - RNA, 18 nt, Vaccinia virus
aucaacgaguucaaauau

SEQ ID NO: 3269728 - RNA, 11 nt, Vaccinia virus
uuucuagauac

SEQ ID NO: 3269729 - RNA, 13 nt, Vaccinia virus
cauuuguaauaau

SEQ ID NO: 3269730 - RNA, 20 nt, Vaccinia virus
uacaucuaaauuuuuacuau

SEQ ID NO: 3269731 - RNA, 15 nt, Vaccinia virus
agucugagaaaaugu

SEQ ID NO: 3269732 - RNA, 21 nt, Vaccinia virus
uaaaucuacucagauuauucu

SEQ ID NO: 3269733 - RNA, 12 nt, Vaccinia virus
cuuuuagaaaag

SEQ ID NO: 3269734 - RNA, 18 nt, Vaccinia virus
uccaugauacaacuuugc

SEQ ID NO: 3269735 - RNA, 21 nt, Vaccinia virus
uaauaucagaccguacauaca

SEQ ID NO: 3269736 - RNA, 16 nt, Vaccinia virus
cgauacuaauuacaaa

SEQ ID NO: 3269737 - RNA, 19 nt, Vaccinia virus
cguuaucguuuucuacaau

SEQ ID NO: 3269738 - RNA, 16 nt, Vaccinia virus
ccuauucuaaauggau

SEQ ID NO: 3269739 - RNA, 14 nt, Vaccinia virus
aacauguagauuua

SEQ ID NO: 3269740 - RNA, 17 nt, Vaccinia virus
cauauauuagaaauaca

SEQ ID NO: 3269741 - RNA, 21 nt, Vaccinia virus
aacucauauaacuucuagaug

SEQ ID NO: 3269742 - RNA, 16 nt, Vaccinia virus
aaauagguuuuguucu

SEQ ID NO: 3269743 - RNA, 17 nt, Vaccinia virus
acauaauucaucuauua

SEQ ID NO: 3269744 - RNA, 12 nt, Vaccinia virus
uaagauacugug

SEQ ID NO: 3269745 - RNA, 23 nt, Vaccinia virus
auaauggcuguuuguauaauaga

SEQ ID NO: 3269746 - RNA, 13 nt, Vaccinia virus
uagaggucuaagu

SEQ ID NO: 3269747 - RNA, 14 nt, Vaccinia virus
cuuuagaaaaacuu

SEQ ID NO: 3269748 - RNA, 21 nt, Vaccinia virus
aaugauauuucauugacagau

SEQ ID NO: 3269749 - RNA, 14 nt, Vaccinia virus
caaacugcugaagu

SEQ ID NO: 3269750 - RNA, 13 nt, Vaccinia virus
gaggagaaguaau

SEQ ID NO: 3269751 - RNA, 18 nt, Vaccinia virus
gagcuguuccaauaaauu

SEQ ID NO: 3269752 - RNA, 22 nt, Vaccinia virus
uaauauaaccaccgauaaaucu

SEQ ID NO: 3269753 - RNA, 21 nt, Vaccinia virus
ucgacauuuggaauguuauau

SEQ ID NO: 3269754 - RNA, 17 nt, Vaccinia virus
aaaucguauaaaguuau

SEQ ID NO: 3269755 - RNA, 15 nt, Vaccinia virus
aaauggauauuucca

SEQ ID NO: 3269756 - RNA, 21 nt, Vaccinia virus
ucgguaucuagaucucuagaa

SEQ ID NO: 3269757 - RNA, 12 nt, Vaccinia virus
ucaauacaaaaa

SEQ ID NO: 3269758 - RNA, 19 nt, Vaccinia virus
gcuugauaagauaaaaucu

SEQ ID NO: 3269759 - RNA, 16 nt, Vaccinia virus
cagauacaguuaauau

SEQ ID NO: 3269760 - RNA, 18 nt, Vaccinia virus
ugaugaauaauuuagaua

SEQ ID NO: 3269761 - RNA, 14 nt, Vaccinia virus
acggugaauacaau

SEQ ID NO: 3269762 - RNA, 19 nt, Vaccinia virus
agaauguuccagaguguuu

SEQ ID NO: 3269763 - RNA, 14 nt, Vaccinia virus
auacuaauaugaca

SEQ ID NO: 3269764 - RNA, 14 nt, Vaccinia virus
uauacauuacugaa

SEQ ID NO: 3269765 - RNA, 23 nt, Vaccinia virus
cauccuaagaugauaaaaaacuu

SEQ ID NO: 3269766 - RNA, 11 nt, Vaccinia virus
aacauucucca

SEQ ID NO: 3269767 - RNA, 23 nt, Vaccinia virus
cuaccauggcuccguuuaauuug

SEQ ID NO: 3269768 - RNA, 17 nt, Vaccinia virus
ccagaucaaaacaaaau

SEQ ID NO: 3269769 - RNA, 20 nt, Vaccinia virus
uccaauugaaugucaugaua

SEQ ID NO: 3269770 - RNA, 14 nt, Vaccinia virus
uuaucaucauuaaa

SEQ ID NO: 3269771 - RNA, 16 nt, Vaccinia virus
caaguaugacauugua

SEQ ID NO: 3269772 - RNA, 15 nt, Vaccinia virus
uuuauaaaaacuuuu

SEQ ID NO: 3269773 - RNA, 22 nt, Vaccinia virus
gcggacauuaaacgauuugaug

SEQ ID NO: 3269774 - RNA, 19 nt, Vaccinia virus
gauaguauucaagucaaag

SEQ ID NO: 3269775 - RNA, 14 nt, Vaccinia virus
uauaaggucagaaa

SEQ ID NO: 3269776 - RNA, 14 nt, Vaccinia virus
guaaauuaguucau

SEQ ID NO: 3269777 - RNA, 21 nt, Vaccinia virus
aucugauaagauaucuucuca

SEQ ID NO: 3269778 - RNA, 23 nt, Vaccinia virus
caaaaggacguagacaauacuuu

SEQ ID NO: 3269779 - RNA, 15 nt, Vaccinia virus
uaaaguaauaaucuu

SEQ ID NO: 3269780 - RNA, 13 nt, Vaccinia virus
uucuacaauaacu

SEQ ID NO: 3269781 - RNA, 15 nt, Vaccinia virus
agaauuaacuaguau

SEQ ID NO: 3269782 - RNA, 15 nt, Vaccinia virus
auacauccuucuaug

SEQ ID NO: 3269783 - RNA, 15 nt, Vaccinia virus
aucgucacaaugaua

SEQ ID NO: 3269784 - RNA, 22 nt, Vaccinia virus
acauauaccgccuuucaaaauu

SEQ ID NO: 3269785 - RNA, 15 nt, Vaccinia virus
cagucauuccaucau

SEQ ID NO: 3269786 - RNA, 13 nt, Vaccinia virus
cuuaacuuuuucu

SEQ ID NO: 3269787 - RNA, 16 nt, Vaccinia virus
uuuaaaaaguuaucuu

SEQ ID NO: 3269788 - RNA, 18 nt, Vaccinia virus
uaccauuagauaaucuag

SEQ ID NO: 3269789 - RNA, 18 nt, Vaccinia virus
acuacuuacauggacaca

SEQ ID NO: 3269790 - RNA, 23 nt, Vaccinia virus
aucgcccaucuauuacaaacaug

SEQ ID NO: 3269791 - RNA, 23 nt, Vaccinia virus
uagaggagacauuagaaucauug

SEQ ID NO: 3269792 - RNA, 18 nt, Vaccinia virus
auauauuaucauagaccu

SEQ ID NO: 3269793 - RNA, 15 nt, Vaccinia virus
uccuauuucacgaaa

SEQ ID NO: 3269794 - RNA, 17 nt, Vaccinia virus
guuuagcuauucguaac

SEQ ID NO: 3269795 - RNA, 19 nt, Vaccinia virus
uacuuugucggauuaucua

SEQ ID NO: 3269796 - RNA, 19 nt, Vaccinia virus
uuauuagucugucuguaga

SEQ ID NO: 3269797 - RNA, 21 nt, Vaccinia virus
gucuaaauccaacuauagaca

SEQ ID NO: 3269798 - RNA, 17 nt, Vaccinia virus
acaauguuuccauccau

SEQ ID NO: 3269799 - RNA, 14 nt, Vaccinia virus
aguauucaagucaa

SEQ ID NO: 3269800 - RNA, 15 nt, Vaccinia virus
agugcacguuuacau

SEQ ID NO: 3269801 - RNA, 15 nt, Vaccinia virus
caaauaggagauauu

SEQ ID NO: 3269802 - RNA, 15 nt, Vaccinia virus
cuguuaauaacucua

SEQ ID NO: 3269803 - RNA, 16 nt, Vaccinia virus
guucuuacacauauca

SEQ ID NO: 3269804 - RNA, 21 nt, Vaccinia virus
cauuaccuccacgauacauuu

SEQ ID NO: 3269805 - RNA, 21 nt, Vaccinia virus
caauuuuacccucaaucaugu

SEQ ID NO: 3269806 - RNA, 21 nt, Vaccinia virus
uagauuaaugcuuaaacuauc

SEQ ID NO: 3269807 - RNA, 19 nt, Vaccinia virus
agucaucuugucuagaaug

SEQ ID NO: 3269808 - RNA, 12 nt, Vaccinia virus
gccaaaguuaua

SEQ ID NO: 3269809 - RNA, 18 nt, Vaccinia virus
acagaauguagauaauca

SEQ ID NO: 3269810 - RNA, 13 nt, Vaccinia virus
auacuagucuuag

SEQ ID NO: 3269811 - RNA, 16 nt, Vaccinia virus
aaaauacuauagacca

SEQ ID NO: 3269812 - RNA, 18 nt, Vaccinia virus
auauuaccaguuguggaa

SEQ ID NO: 3269813 - RNA, 21 nt, Vaccinia virus
uagauacucuaccauuucugc

SEQ ID NO: 3269814 - RNA, 11 nt, Vaccinia virus
aaaacauaaua

SEQ ID NO: 3269815 - RNA, 17 nt, Vaccinia virus
uaagucccgaugaaaua

SEQ ID NO: 3269816 - RNA, 19 nt, Vaccinia virus
aauauaucaaacauggaga

SEQ ID NO: 3269817 - RNA, 17 nt, Vaccinia virus
uaacaaaaauuaugaaa

SEQ ID NO: 3269818 - RNA, 14 nt, Vaccinia virus
gagauuuagaaaac

SEQ ID NO: 3269819 - RNA, 18 nt, Vaccinia virus
uaaucauaaauuauuuca

SEQ ID NO: 3269820 - RNA, 14 nt, Vaccinia virus
auuaauuguaaaug

SEQ ID NO: 3269821 - RNA, 19 nt, Vaccinia virus
uguaaauuaggagaaacaa

SEQ ID NO: 3269822 - RNA, 17 nt, Vaccinia virus
aaauauguaauaaucau

SEQ ID NO: 3269823 - RNA, 19 nt, Vaccinia virus
aaguggacauauagaugca

SEQ ID NO: 3269824 - RNA, 15 nt, Vaccinia virus
aacauaaguauauaa

SEQ ID NO: 3269825 - RNA, 14 nt, Vaccinia virus
auaaaauaauacau

SEQ ID NO: 3269826 - RNA, 19 nt, Vaccinia virus
caauuggcacgaacaaaag

SEQ ID NO: 3269827 - RNA, 14 nt, Vaccinia virus
ucaaauuuuuucuu

SEQ ID NO: 3269828 - RNA, 18 nt, Vaccinia virus
uuauuucaaaauuauuua

SEQ ID NO: 3269829 - RNA, 21 nt, Vaccinia virus
auaugauuucagauacuauau

SEQ ID NO: 3269830 - RNA, 21 nt, Vaccinia virus
auauaguuauuaaugaugaaa

SEQ ID NO: 3269831 - RNA, 15 nt, Vaccinia virus
auuuacccauggaaa

SEQ ID NO: 3269832 - RNA, 16 nt, Vaccinia virus
ugacaucuuguagaac

SEQ ID NO: 3269833 - RNA, 17 nt, Vaccinia virus
auuuauuucuauaccuu

SEQ ID NO: 3269834 - RNA, 17 nt, Vaccinia virus
uuguuguccguuaucua

SEQ ID NO: 3269835 - RNA, 22 nt, Vaccinia virus
auuaucgagcgugauguuguaa

SEQ ID NO: 3269836 - RNA, 16 nt, Vaccinia virus
uaacaauugucuguaa

SEQ ID NO: 3269837 - RNA, 15 nt, Vaccinia virus
acaauguauaauaua

SEQ ID NO: 3269838 - RNA, 20 nt, Vaccinia virus
uauaaaggaauaaaauauga

SEQ ID NO: 3269839 - RNA, 17 nt, Vaccinia virus
ugauuggguagaaguag

SEQ ID NO: 3269840 - RNA, 14 nt, Vaccinia virus
ugaaagaacuacau

SEQ ID NO: 3269841 - RNA, 17 nt, Vaccinia virus
uagaaacuucaaagauu

SEQ ID NO: 3269842 - RNA, 13 nt, Vaccinia virus
aauggcaaaugua

SEQ ID NO: 3269843 - RNA, 14 nt, Vaccinia virus
aagauauauacacu

SEQ ID NO: 3269844 - RNA, 22 nt, Vaccinia virus
uaaaacuggagagacugauuac

SEQ ID NO: 3269845 - RNA, 15 nt, Vaccinia virus
gagaucuaaauacaa

SEQ ID NO: 3269846 - RNA, 21 nt, Vaccinia virus
augaccaguuugcaauaugca

SEQ ID NO: 3269847 - RNA, 18 nt, Vaccinia virus
aauuaguucguuggaaaa

SEQ ID NO: 3269848 - RNA, 18 nt, Vaccinia virus
uacuauuuguaauauuua

SEQ ID NO: 3269849 - RNA, 17 nt, Vaccinia virus
auccuauaacuucuaau

SEQ ID NO: 3269850 - RNA, 13 nt, Vaccinia virus
agauaaugauaua

SEQ ID NO: 3269851 - RNA, 13 nt, Vaccinia virus
cguaaacuauuac

SEQ ID NO: 3269852 - RNA, 21 nt, Vaccinia virus
cuccuagguuucucuauaaac

SEQ ID NO: 3269853 - RNA, 17 nt, Vaccinia virus
auauucaagcgaauuac

SEQ ID NO: 3269854 - RNA, 18 nt, Vaccinia virus
gcaaagauguuuaaugau

SEQ ID NO: 3269855 - RNA, 16 nt, Vaccinia virus
cguguucuuguguaau

SEQ ID NO: 3269856 - RNA, 23 nt, Vaccinia virus
uagauaaugguagcaauaugcua

SEQ ID NO: 3269857 - RNA, 20 nt, Vaccinia virus
cauuaaguaaaguaaacaau

SEQ ID NO: 3269858 - RNA, 13 nt, Vaccinia virus
gcgccaaauugug

SEQ ID NO: 3269859 - RNA, 14 nt, Vaccinia virus
ugaaccaaacauuc

SEQ ID NO: 3269860 - RNA, 16 nt, Vaccinia virus
acuuacugacaaaguu

SEQ ID NO: 3269861 - RNA, 16 nt, Vaccinia virus
uaauuagguuguuuau

SEQ ID NO: 3269862 - RNA, 20 nt, Vaccinia virus
gaaaacauuuuuaucauguu

SEQ ID NO: 3269863 - RNA, 21 nt, Vaccinia virus
auagaugugguaauaucugac

SEQ ID NO: 3269864 - RNA, 20 nt, Vaccinia virus
auccuuauaaagaaugaaug

SEQ ID NO: 3269865 - RNA, 13 nt, Vaccinia virus
gauucuaucuuua

SEQ ID NO: 3269866 - RNA, 18 nt, Vaccinia virus
uaaacguauucaugacau

SEQ ID NO: 3269867 - RNA, 19 nt, Vaccinia virus
aaaccauuuuucagaaagu

SEQ ID NO: 3269868 - RNA, 15 nt, Vaccinia virus
gaagaaaacaaacau

SEQ ID NO: 3269869 - RNA, 21 nt, Vaccinia virus
aggucuauuaggccucagaau

SEQ ID NO: 3269870 - RNA, 18 nt, Vaccinia virus
aauucauagccaauggau

SEQ ID NO: 3269871 - RNA, 22 nt, Vaccinia virus
aaagcggauauaccuagcaaac

SEQ ID NO: 3269872 - RNA, 15 nt, Vaccinia virus
aaaauagaaaaaaca

SEQ ID NO: 3269873 - RNA, 18 nt, Vaccinia virus
uccaugauagaaagaaaa

SEQ ID NO: 3269874 - RNA, 15 nt, Vaccinia virus
auaucuuguucuaug

SEQ ID NO: 3269875 - RNA, 15 nt, Vaccinia virus
ucauucuagaacuau

SEQ ID NO: 3269876 - RNA, 13 nt, Vaccinia virus
aaaacucaaaugu

SEQ ID NO: 3269877 - RNA, 13 nt, Vaccinia virus
auuaucugaaaug

SEQ ID NO: 3269878 - RNA, 15 nt, Vaccinia virus
uguguaaaauaucag

SEQ ID NO: 3269879 - RNA, 22 nt, Vaccinia virus
gcuacacccacuagaaaccacg

SEQ ID NO: 3269880 - RNA, 20 nt, Vaccinia virus
uuuaugaugccgguaaaugu

SEQ ID NO: 3269881 - RNA, 18 nt, Vaccinia virus
gaguaguacaagaaauau

SEQ ID NO: 3269882 - RNA, 21 nt, Vaccinia virus
uggaguguauauuuaucucuu

SEQ ID NO: 3269883 - RNA, 16 nt, Vaccinia virus
auagauuuuucauauu

SEQ ID NO: 3269884 - RNA, 23 nt, Vaccinia virus
agcaaagggugguaucauggcag

SEQ ID NO: 3269885 - RNA, 22 nt, Vaccinia virus
gaaaauaaugacgcguacgaua

SEQ ID NO: 3269886 - RNA, 22 nt, Vaccinia virus
agaauucaagucaggaacuauu

SEQ ID NO: 3269887 - RNA, 13 nt, Vaccinia virus
gucaaagaaauac

SEQ ID NO: 3269888 - RNA, 22 nt, Vaccinia virus
ucuaaagaacggagaauaucua

SEQ ID NO: 3269889 - RNA, 20 nt, Vaccinia virus
auuaauuguuauuuuauuca

SEQ ID NO: 3269890 - RNA, 16 nt, Vaccinia virus
aaauacuuuauauucu

SEQ ID NO: 3269891 - RNA, 13 nt, Vaccinia virus
aauaccaauuuuu

SEQ ID NO: 3269892 - RNA, 15 nt, Vaccinia virus
cuuuacuaagaaagu

SEQ ID NO: 3269893 - RNA, 21 nt, Vaccinia virus
aauaaauuauuuguugugacu

SEQ ID NO: 3269894 - RNA, 16 nt, Vaccinia virus
uuacuuagucuguaca

SEQ ID NO: 3269895 - RNA, 19 nt, Vaccinia virus
ucuacuagacuauuaauaa

SEQ ID NO: 3269896 - RNA, 14 nt, Vaccinia virus
auuugauguuguag

SEQ ID NO: 3269897 - RNA, 18 nt, Vaccinia virus
guaugaccguuaacuaca

SEQ ID NO: 3269898 - RNA, 17 nt, Vaccinia virus
ugcggguaucacuguua

SEQ ID NO: 3269899 - RNA, 13 nt, Vaccinia virus
gauaguaaugcau

SEQ ID NO: 3269900 - RNA, 15 nt, Vaccinia virus
uugaucagaaugaau

SEQ ID NO: 3269901 - RNA, 15 nt, Vaccinia virus
cuggaggaguaagaa

SEQ ID NO: 3269902 - RNA, 15 nt, Vaccinia virus
uugugauucuagaau

SEQ ID NO: 3269903 - RNA, 21 nt, Vaccinia virus
uucucaaaagaucaaggaaau

SEQ ID NO: 3269904 - RNA, 14 nt, Vaccinia virus
uaaauguaaauuca

SEQ ID NO: 3269905 - RNA, 12 nt, Vaccinia virus
ucguuguagaaa

SEQ ID NO: 3269906 - RNA, 19 nt, Vaccinia virus
uauuuucuucuacguacau

SEQ ID NO: 3269907 - RNA, 20 nt, Vaccinia virus
caaggaaacuaauaccucua

SEQ ID NO: 3269908 - RNA, 15 nt, Vaccinia virus
cuuugcaauauugua

SEQ ID NO: 3269909 - RNA, 17 nt, Vaccinia virus
gauaacuauaaauggag

SEQ ID NO: 3269910 - RNA, 21 nt, Vaccinia virus
uauuuccacauugcuuuaaaa

SEQ ID NO: 3269911 - RNA, 15 nt, Vaccinia virus
ucuauaguucucauc

SEQ ID NO: 3269912 - RNA, 18 nt, Vaccinia virus
cagaauuucuacauaauu

SEQ ID NO: 3269913 - RNA, 24 nt, Vaccinia virus
accauuauucgccuguaucagaua

SEQ ID NO: 3269914 - RNA, 14 nt, Vaccinia virus
uguccugcauguag

SEQ ID NO: 3269915 - RNA, 21 nt, Vaccinia virus
uuaaauccucuauuuauugac

SEQ ID NO: 3269916 - RNA, 19 nt, Vaccinia virus
uaucgauaauuauuucuac

SEQ ID NO: 3269917 - RNA, 16 nt, Vaccinia virus
caggagauagauaucc

SEQ ID NO: 3269918 - RNA, 12 nt, Vaccinia virus
guucucuaaaug

SEQ ID NO: 3269919 - RNA, 19 nt, Vaccinia virus
auaagaugucuaugaauau

SEQ ID NO: 3269920 - RNA, 20 nt, Vaccinia virus
aacacugaagcuaacgauga

SEQ ID NO: 3269921 - RNA, 18 nt, Vaccinia virus
gcuauuagagguaaugau

SEQ ID NO: 3269922 - RNA, 20 nt, Vaccinia virus
gcauauuaaaguaaaaucua

SEQ ID NO: 3269923 - RNA, 23 nt, Vaccinia virus
gaaacguaauauccucaauaacg

SEQ ID NO: 3269924 - RNA, 15 nt, Vaccinia virus
guauuggauaaagga

SEQ ID NO: 3269925 - RNA, 18 nt, Vaccinia virus
acuccccgaagauuuguu

SEQ ID NO: 3269926 - RNA, 21 nt, Vaccinia virus
guauuaauacaugucuuagau

SEQ ID NO: 3269927 - RNA, 14 nt, Vaccinia virus
auaacuuuuucaau

SEQ ID NO: 3269928 - RNA, 14 nt, Vaccinia virus
uaaacuuuaacaau

SEQ ID NO: 3269929 - RNA, 15 nt, Vaccinia virus
uuaaucguauguaua

SEQ ID NO: 3269930 - RNA, 16 nt, Vaccinia virus
uaucugcggaagagac

SEQ ID NO: 3269931 - RNA, 18 nt, Vaccinia virus
caacaagagcagauaucu

SEQ ID NO: 3269932 - RNA, 17 nt, Vaccinia virus
gacgauuccaacaaacg

SEQ ID NO: 3269933 - RNA, 22 nt, Vaccinia virus
aaauaucuuaaggagaaugaaa

SEQ ID NO: 3269934 - RNA, 17 nt, Vaccinia virus
uuagauaaaugcgguaa

SEQ ID NO: 3269935 - RNA, 20 nt, Vaccinia virus
auaggauucuuaauaugaua

SEQ ID NO: 3269936 - RNA, 17 nt, Vaccinia virus
auacuaauucaaauugu

SEQ ID NO: 3269937 - RNA, 13 nt, Vaccinia virus
aacacuauuagaa

SEQ ID NO: 3269938 - RNA, 22 nt, Vaccinia virus
aagaugcaaacauuauguagua

SEQ ID NO: 3269939 - RNA, 20 nt, Vaccinia virus
aucacauuguauauaguuua

SEQ ID NO: 3269940 - RNA, 18 nt, Vaccinia virus
uagaauuuauaaacauca

SEQ ID NO: 3269941 - RNA, 12 nt, Vaccinia virus
aacuaaaaaugu

SEQ ID NO: 3269942 - RNA, 12 nt, Vaccinia virus
uucuaaaauagu

SEQ ID NO: 3269943 - RNA, 22 nt, Vaccinia virus
gucauaaaaauguuuaaaucaa

SEQ ID NO: 3269944 - RNA, 14 nt, Vaccinia virus
uauacauucuucug

SEQ ID NO: 3269945 - RNA, 20 nt, Vaccinia virus
uuaaggaauacaauacauac

SEQ ID NO: 3269946 - RNA, 21 nt, Vaccinia virus
aacauuauaauaaucaauaau

SEQ ID NO: 3269947 - RNA, 12 nt, Vaccinia virus
uuauuguaacag

SEQ ID NO: 3269948 - RNA, 15 nt, Vaccinia virus
uacgucaucaaaaau

SEQ ID NO: 3269949 - RNA, 14 nt, Vaccinia virus
auaauaauaaaugu

SEQ ID NO: 3269950 - RNA, 11 nt, Vaccinia virus
uuaguauacac

SEQ ID NO: 3269951 - RNA, 17 nt, Vaccinia virus
auuaugaugauacauuu

SEQ ID NO: 3269952 - RNA, 22 nt, Vaccinia virus
auaaucuucgucuauuacacca

SEQ ID NO: 3269953 - RNA, 19 nt, Vaccinia virus
ucgacuauuuuaaauagca

SEQ ID NO: 3269954 - RNA, 15 nt, Vaccinia virus
auaauuuaacauuuu

SEQ ID NO: 3269955 - RNA, 18 nt, Vaccinia virus
gcauaaacuauacuauga

SEQ ID NO: 3269956 - RNA, 15 nt, Vaccinia virus
guacaaauauguaca

SEQ ID NO: 3269957 - RNA, 21 nt, Vaccinia virus
aaauguauuuuuuaugauaua

SEQ ID NO: 3269958 - RNA, 20 nt, Vaccinia virus
aucaacggauaaucugaagu

SEQ ID NO: 3269959 - RNA, 18 nt, Vaccinia virus
ugugauagucgauacguu

SEQ ID NO: 3269960 - RNA, 16 nt, Vaccinia virus
augauauguuaaauau

SEQ ID NO: 3269961 - RNA, 20 nt, Vaccinia virus
ccgaauuuguuuuguuuauu

SEQ ID NO: 3269962 - RNA, 19 nt, Vaccinia virus
aucaaacauuuaauuacau

SEQ ID NO: 3269963 - RNA, 14 nt, Vaccinia virus
aaauagggauguuu

SEQ ID NO: 3269964 - RNA, 12 nt, Vaccinia virus
agaggaaauauc

SEQ ID NO: 3269965 - RNA, 15 nt, Vaccinia virus
uuuauuccaaucauu

SEQ ID NO: 3269966 - RNA, 19 nt, Vaccinia virus
ggcaauaacuaaaaaugua

SEQ ID NO: 3269967 - RNA, 14 nt, Vaccinia virus
auguuaucaaaccu

SEQ ID NO: 3269968 - RNA, 18 nt, Vaccinia virus
uaagauguuugagaauau

SEQ ID NO: 3269969 - RNA, 17 nt, Vaccinia virus
cagaggauaacuauuua

SEQ ID NO: 3269970 - RNA, 17 nt, Vaccinia virus
aguaucgaaaaaugcug

SEQ ID NO: 3269971 - RNA, 20 nt, Vaccinia virus
uacaaauguagaagauauca

SEQ ID NO: 3269972 - RNA, 20 nt, Vaccinia virus
ccaauauaguaguuaaauua

SEQ ID NO: 3269973 - RNA, 20 nt, Vaccinia virus
acaauauuaucaucuugaau

SEQ ID NO: 3269974 - RNA, 17 nt, Vaccinia virus
cgaguuuaaaacuucua

SEQ ID NO: 3269975 - RNA, 13 nt, Vaccinia virus
auguauaaaccuu

SEQ ID NO: 3269976 - RNA, 22 nt, Vaccinia virus
auauccuuuagaguauuucuca

SEQ ID NO: 3269977 - RNA, 13 nt, Vaccinia virus
uacuauaauauua

SEQ ID NO: 3269978 - RNA, 14 nt, Vaccinia virus
ugaaaauaaagaua

SEQ ID NO: 3269979 - RNA, 23 nt, Vaccinia virus
uucacagauagaucauuuugaac

SEQ ID NO: 3269980 - RNA, 17 nt, Vaccinia virus
caccaucggaugauauu

SEQ ID NO: 3269981 - RNA, 15 nt, Vaccinia virus
gaauuuauuaauaca

SEQ ID NO: 3269982 - RNA, 15 nt, Vaccinia virus
cauuuacaacucuau

SEQ ID NO: 3269983 - RNA, 14 nt, Vaccinia virus
ugaggauaaugcua

SEQ ID NO: 3269984 - RNA, 22 nt, Vaccinia virus
uuaaacuguuuguauaauaucu

SEQ ID NO: 3269985 - RNA, 18 nt, Vaccinia virus
acugaaugcuuucuugga

SEQ ID NO: 3269986 - RNA, 15 nt, Vaccinia virus
auauuguagcauuac

SEQ ID NO: 3269987 - RNA, 21 nt, Vaccinia virus
acaaaaauugucacuuuguua

SEQ ID NO: 3269988 - RNA, 16 nt, Vaccinia virus
gcugaggguguuagaa

SEQ ID NO: 3269989 - RNA, 16 nt, Vaccinia virus
gucaguaguauacauc

SEQ ID NO: 3269990 - RNA, 13 nt, Vaccinia virus
acacauuaacauc

SEQ ID NO: 3269991 - RNA, 15 nt, Vaccinia virus
uauauaguuuggauu

SEQ ID NO: 3269992 - RNA, 15 nt, Vaccinia virus
aauugaguaaaugaa

SEQ ID NO: 3269993 - RNA, 20 nt, Vaccinia virus
ucuuaaggagaaugaaacag

SEQ ID NO: 3269994 - RNA, 15 nt, Vaccinia virus
uuucuggcuaagaag

SEQ ID NO: 3269995 - RNA, 16 nt, Vaccinia virus
auuuuuagugaaacau

SEQ ID NO: 3269996 - RNA, 20 nt, Vaccinia virus
auaagaggcauaaucaaugu

SEQ ID NO: 3269997 - RNA, 19 nt, Vaccinia virus
ucuggaaugacgaauccug

SEQ ID NO: 3269998 - RNA, 21 nt, Vaccinia virus
uuuuuauaaaaacuuuuagaa

SEQ ID NO: 3269999 - RNA, 16 nt, Vaccinia virus
agaucaaaacaaaauu

SEQ ID NO: 3270000 - RNA, 19 nt, Vaccinia virus
acauuuuuuauaaauagau

SEQ ID NO: 3270001 - RNA, 15 nt, Vaccinia virus
aacaauguuugucau

SEQ ID NO: 3270002 - RNA, 20 nt, Vaccinia virus
acuuuaucaucuuauauaga

SEQ ID NO: 3270003 - RNA, 21 nt, Vaccinia virus
uugauauaucaguuaaugcgu

SEQ ID NO: 3270004 - RNA, 20 nt, Vaccinia virus
auccuaaagaguauggugaa

SEQ ID NO: 3270005 - RNA, 21 nt, Vaccinia virus
cuguacaaauguuaaacauua

SEQ ID NO: 3270006 - RNA, 13 nt, Vaccinia virus
agaccagaaaugc

SEQ ID NO: 3270007 - RNA, 13 nt, Vaccinia virus
auaauauaaucua

SEQ ID NO: 3270008 - RNA, 14 nt, Vaccinia virus
uacacaacacaaug

SEQ ID NO: 3270009 - RNA, 16 nt, Vaccinia virus
caucggaucuguaaaa

SEQ ID NO: 3270010 - RNA, 22 nt, Vaccinia virus
guugagugaaagguggaagauc

SEQ ID NO: 3270011 - RNA, 19 nt, Vaccinia virus
cuaguaaaucaacugauag

SEQ ID NO: 3270012 - RNA, 18 nt, Vaccinia virus
aacaauauaaauccagua

SEQ ID NO: 3270013 - RNA, 17 nt, Vaccinia virus
caggauaaggaauugua

SEQ ID NO: 3270014 - RNA, 21 nt, Vaccinia virus
ggaucuaaaauccauauuuuc

SEQ ID NO: 3270015 - RNA, 21 nt, Vaccinia virus
auuuuaagaaaugguguaacu

SEQ ID NO: 3270016 - RNA, 14 nt, Vaccinia virus
uaaacaaaauacuc

SEQ ID NO: 3270017 - RNA, 16 nt, Vaccinia virus
cuaaugaccacaucuu

SEQ ID NO: 3270018 - RNA, 13 nt, Vaccinia virus
aggacuuaacaau

SEQ ID NO: 3270019 - RNA, 20 nt, Vaccinia virus
auaauaguacgacuuuaaau

SEQ ID NO: 3270020 - RNA, 16 nt, Vaccinia virus
ucaaauuguccuauau

SEQ ID NO: 3270021 - RNA, 15 nt, Vaccinia virus
gauauuucuggaaug

SEQ ID NO: 3270022 - RNA, 19 nt, Vaccinia virus
uauaauaaacuuuaaugau

SEQ ID NO: 3270023 - RNA, 18 nt, Vaccinia virus
uguuaaaaauaugugcuc

SEQ ID NO: 3270024 - RNA, 15 nt, Vaccinia virus
aggaugaaaaaggac

SEQ ID NO: 3270025 - RNA, 18 nt, Vaccinia virus
aaagcaguuaccaaagag

SEQ ID NO: 3270026 - RNA, 14 nt, Vaccinia virus
acuuuaacaaucuc

SEQ ID NO: 3270027 - RNA, 20 nt, Vaccinia virus
cagaaaugacuccaugaaaa

SEQ ID NO: 3270028 - RNA, 15 nt, Vaccinia virus
cuauauuuaucacag

SEQ ID NO: 3270029 - RNA, 20 nt, Vaccinia virus
auaucagccgcacuagcauc

SEQ ID NO: 3270030 - RNA, 12 nt, Vaccinia virus
uaaauaaauguc

SEQ ID NO: 3270031 - RNA, 20 nt, Vaccinia virus
guuuucagaagauaauuauc

SEQ ID NO: 3270032 - RNA, 16 nt, Vaccinia virus
uaaaauaaaaugagua

SEQ ID NO: 3270033 - RNA, 19 nt, Vaccinia virus
auucauaugacuaaaaugc

SEQ ID NO: 3270034 - RNA, 16 nt, Vaccinia virus
acuaacaauaacuaga

SEQ ID NO: 3270035 - RNA, 18 nt, Vaccinia virus
auccuuguucagauacua

SEQ ID NO: 3270036 - RNA, 17 nt, Vaccinia virus
cucuggauauaucacaa

SEQ ID NO: 3270037 - RNA, 19 nt, Vaccinia virus
agauaucgacgguauguau

SEQ ID NO: 3270038 - RNA, 18 nt, Vaccinia virus
aagaccugacuagcaaau

SEQ ID NO: 3270039 - RNA, 18 nt, Vaccinia virus
guaacagcuuggacaauc

SEQ ID NO: 3270040 - RNA, 16 nt, Vaccinia virus
auagggaaucauauau

SEQ ID NO: 3270041 - RNA, 18 nt, Vaccinia virus
auaguuugggaaaagaaa

SEQ ID NO: 3270042 - RNA, 22 nt, Vaccinia virus
agucuccuucgauggucucaca

SEQ ID NO: 3270043 - RNA, 12 nt, Vaccinia virus
uaaauagaauau

SEQ ID NO: 3270044 - RNA, 21 nt, Vaccinia virus
uaacggaugaaaauaagaaaa

SEQ ID NO: 3270045 - RNA, 22 nt, Vaccinia virus
aacuuauaauccuuuuuauuua

SEQ ID NO: 3270046 - RNA, 14 nt, Vaccinia virus
auaaauuauuucau

SEQ ID NO: 3270047 - RNA, 14 nt, Vaccinia virus
ugaaacuaagucac

SEQ ID NO: 3270048 - RNA, 17 nt, Vaccinia virus
auuauucauaaauaacu

SEQ ID NO: 3270049 - RNA, 14 nt, Vaccinia virus
agaggcauaaucaa

SEQ ID NO: 3270050 - RNA, 23 nt, Vaccinia virus
uaacauuguuaauugaaaaggga

SEQ ID NO: 3270051 - RNA, 21 nt, Vaccinia virus
aaucuuaaacauauagggaau

SEQ ID NO: 3270052 - RNA, 13 nt, Vaccinia virus
uaugaaauuuaag

SEQ ID NO: 3270053 - RNA, 23 nt, Vaccinia virus
cugaacacgauguuuauggaguu

SEQ ID NO: 3270054 - RNA, 17 nt, Vaccinia virus
aggacaccacuaucuga

SEQ ID NO: 3270055 - RNA, 13 nt, Vaccinia virus
cucagaaacagaa

SEQ ID NO: 3270056 - RNA, 19 nt, Vaccinia virus
auuaacaaaagugaauaua

SEQ ID NO: 3270057 - RNA, 13 nt, Vaccinia virus
guaaagauaucua

SEQ ID NO: 3270058 - RNA, 13 nt, Vaccinia virus
gaaaagauaacua

SEQ ID NO: 3270059 - RNA, 16 nt, Vaccinia virus
aguuagaaaguauuuu

SEQ ID NO: 3270060 - RNA, 14 nt, Vaccinia virus
caacaaauuuggaa

SEQ ID NO: 3270061 - RNA, 21 nt, Vaccinia virus
augucuaauggcgaacauguu

SEQ ID NO: 3270062 - RNA, 18 nt, Vaccinia virus
aaauuaucaaauacuuca

SEQ ID NO: 3270063 - RNA, 15 nt, Vaccinia virus
auaggaccauacauu

SEQ ID NO: 3270064 - RNA, 22 nt, Vaccinia virus
cauccuuggauagagauugaga

SEQ ID NO: 3270065 - RNA, 17 nt, Vaccinia virus
aucucuccgaccauucc

SEQ ID NO: 3270066 - RNA, 14 nt, Vaccinia virus
aauagauggauaaa

SEQ ID NO: 3270067 - RNA, 14 nt, Vaccinia virus
ucucccuacgacga

SEQ ID NO: 3270068 - RNA, 17 nt, Vaccinia virus
uaaucuuguaauauuca

SEQ ID NO: 3270069 - RNA, 17 nt, Vaccinia virus
uaucgagaucuuuugua

SEQ ID NO: 3270070 - RNA, 13 nt, Vaccinia virus
auguaaaauaaua

SEQ ID NO: 3270071 - RNA, 16 nt, Vaccinia virus
uauaaaaauuaauauu

SEQ ID NO: 3270072 - RNA, 22 nt, Vaccinia virus
cuaauauucccaaacauacauc

SEQ ID NO: 3270073 - RNA, 21 nt, Vaccinia virus
uaguucuucaguaguaauaac

SEQ ID NO: 3270074 - RNA, 15 nt, Vaccinia virus
aaccagaaguuuuau

SEQ ID NO: 3270075 - RNA, 19 nt, Vaccinia virus
cuaauuuguaaaccaucuu

SEQ ID NO: 3270076 - RNA, 22 nt, Vaccinia virus
gaugccaauaagcuuuagauau

SEQ ID NO: 3270077 - RNA, 20 nt, Vaccinia virus
uaucagaagugugaauauga

SEQ ID NO: 3270078 - RNA, 17 nt, Vaccinia virus
gcaucaguaucuucaga

SEQ ID NO: 3270079 - RNA, 16 nt, Vaccinia virus
augauacguacaauga

SEQ ID NO: 3270080 - RNA, 14 nt, Vaccinia virus
auacucagaauuau

SEQ ID NO: 3270081 - RNA, 19 nt, Vaccinia virus
agauuaucaaaaucuuguc

SEQ ID NO: 3270082 - RNA, 17 nt, Vaccinia virus
uaguuuuucuuuacaca

SEQ ID NO: 3270083 - RNA, 21 nt, Vaccinia virus
uuaugacaaaguuuacauucu

SEQ ID NO: 3270084 - RNA, 21 nt, Vaccinia virus
gaauacaaucuguauuucauu

SEQ ID NO: 3270085 - RNA, 17 nt, Vaccinia virus
uuuucaauuauguauca

SEQ ID NO: 3270086 - RNA, 20 nt, Vaccinia virus
aauacuacgauuaacgauga

SEQ ID NO: 3270087 - RNA, 21 nt, Vaccinia virus
uaguaaguagaaauuaucaaa

SEQ ID NO: 3270088 - RNA, 15 nt, Vaccinia virus
caaaauggcaauuau

SEQ ID NO: 3270089 - RNA, 18 nt, Vaccinia virus
cucuauucgaaaacucua

SEQ ID NO: 3270090 - RNA, 20 nt, Vaccinia virus
aauggaugaagcauauuacu

SEQ ID NO: 3270091 - RNA, 21 nt, Vaccinia virus
uagaauucucuucauaucauu

SEQ ID NO: 3270092 - RNA, 18 nt, Vaccinia virus
auaauuauauaaauaugu

SEQ ID NO: 3270093 - RNA, 22 nt, Vaccinia virus
ugucaucuucgucuauuucuau

SEQ ID NO: 3270094 - RNA, 13 nt, Vaccinia virus
aucuuuuguucua

SEQ ID NO: 3270095 - RNA, 11 nt, Vaccinia virus
cauucaugaaa

SEQ ID NO: 3270096 - RNA, 14 nt, Vaccinia virus
auaugcucauauau

SEQ ID NO: 3270097 - RNA, 20 nt, Vaccinia virus
uccuugugcuuaauguuucc

SEQ ID NO: 3270098 - RNA, 16 nt, Vaccinia virus
aacaaguguguagaua

SEQ ID NO: 3270099 - RNA, 20 nt, Vaccinia virus
acgauccaaacaauguuucu

SEQ ID NO: 3270100 - RNA, 19 nt, Vaccinia virus
aacucuuucgcuauuucua

SEQ ID NO: 3270101 - RNA, 20 nt, Vaccinia virus
agaacuaucauagaugagaa

SEQ ID NO: 3270102 - RNA, 13 nt, Vaccinia virus
uuugauucgaauu

SEQ ID NO: 3270103 - RNA, 21 nt, Vaccinia virus
agaaccgucauucauuuagaa

SEQ ID NO: 3270104 - RNA, 12 nt, Vaccinia virus
ucuagaaugaag

SEQ ID NO: 3270105 - RNA, 20 nt, Vaccinia virus
ccuaauucucucaucuauca

SEQ ID NO: 3270106 - RNA, 17 nt, Vaccinia virus
aaauggauuuauuggau

SEQ ID NO: 3270107 - RNA, 22 nt, Vaccinia virus
uauuagaauuggaauaccaaau

SEQ ID NO: 3270108 - RNA, 19 nt, Vaccinia virus
auaugacggacauuccauu

SEQ ID NO: 3270109 - RNA, 12 nt, Vaccinia virus
uauaauauccuc

SEQ ID NO: 3270110 - RNA, 14 nt, Vaccinia virus
uaugcucuagauac

SEQ ID NO: 3270111 - RNA, 21 nt, Vaccinia virus
auguaaccuacuagaaugaua

SEQ ID NO: 3270112 - RNA, 21 nt, Vaccinia virus
aauuacgguugauucaaaaau

SEQ ID NO: 3270113 - RNA, 23 nt, Vaccinia virus
uuuuuaaaaauugccacauccuu

SEQ ID NO: 3270114 - RNA, 22 nt, Vaccinia virus
aaauggaggaggagacaaugac

SEQ ID NO: 3270115 - RNA, 16 nt, Vaccinia virus
uggaagcguauguucc

SEQ ID NO: 3270116 - RNA, 18 nt, Vaccinia virus
guaguauaugaacaaacg

SEQ ID NO: 3270117 - RNA, 16 nt, Vaccinia virus
aauaaacuauuucuaa

SEQ ID NO: 3270118 - RNA, 18 nt, Vaccinia virus
uaaaugcgugacuauaaa

SEQ ID NO: 3270119 - RNA, 23 nt, Vaccinia virus
uagaagucugaucuuaacuccuc

SEQ ID NO: 3270120 - RNA, 17 nt, Vaccinia virus
cauugauaucuuuagau

SEQ ID NO: 3270121 - RNA, 13 nt, Vaccinia virus
guauuguauauac

SEQ ID NO: 3270122 - RNA, 20 nt, Vaccinia virus
cuuaaaagauauuaauggag

SEQ ID NO: 3270123 - RNA, 19 nt, Vaccinia virus
aauuuuuuguucuacacau

SEQ ID NO: 3270124 - RNA, 16 nt, Vaccinia virus
aauaccucuacacuau

SEQ ID NO: 3270125 - RNA, 19 nt, Vaccinia virus
auaccacaccauuuuuuaa

SEQ ID NO: 3270126 - RNA, 13 nt, Vaccinia virus
caauucaucucua

SEQ ID NO: 3270127 - RNA, 23 nt, Vaccinia virus
aaaaggaauuuaccagugauuau

SEQ ID NO: 3270128 - RNA, 17 nt, Vaccinia virus
uccauaauuuucucucg

SEQ ID NO: 3270129 - RNA, 16 nt, Vaccinia virus
agaaucauugcuguaa

SEQ ID NO: 3270130 - RNA, 22 nt, Vaccinia virus
caacaauguugccucauacauc

SEQ ID NO: 3270131 - RNA, 18 nt, Vaccinia virus
cuaauuauuccuauuuca

SEQ ID NO: 3270132 - RNA, 12 nt, Vaccinia virus
caaauuauucua

SEQ ID NO: 3270133 - RNA, 14 nt, Vaccinia virus
ugaugccaauaagc

SEQ ID NO: 3270134 - RNA, 23 nt, Vaccinia virus
auuuuuagacauuagauaugcca

SEQ ID NO: 3270135 - RNA, 14 nt, Vaccinia virus
augcucuuaaauaa

SEQ ID NO: 3270136 - RNA, 16 nt, Vaccinia virus
gaggaugaugaagaag

SEQ ID NO: 3270137 - RNA, 17 nt, Vaccinia virus
uacuuauguaugugcau

SEQ ID NO: 3270138 - RNA, 17 nt, Vaccinia virus
cgaugugucuacauaaa

SEQ ID NO: 3270139 - RNA, 20 nt, Vaccinia virus
acauaguugaauaaauccuc

SEQ ID NO: 3270140 - RNA, 20 nt, Vaccinia virus
auaauguuaccauacauuau

SEQ ID NO: 3270141 - RNA, 21 nt, Vaccinia virus
auaaaucacuuuuuauacuaa

SEQ ID NO: 3270142 - RNA, 18 nt, Vaccinia virus
uaggcacagucaaacauu

SEQ ID NO: 3270143 - RNA, 15 nt, Vaccinia virus
cugauauauugcaaa

SEQ ID NO: 3270144 - RNA, 18 nt, Vaccinia virus
ccauaauccuauucuuga

SEQ ID NO: 3270145 - RNA, 20 nt, Vaccinia virus
auuuaacuagauuauacaau

SEQ ID NO: 3270146 - RNA, 19 nt, Vaccinia virus
auaagcuuugaauguuaua

SEQ ID NO: 3270147 - RNA, 18 nt, Vaccinia virus
auaaaaaaacauuauucu

SEQ ID NO: 3270148 - RNA, 16 nt, Vaccinia virus
uauuugacgcaucuua

SEQ ID NO: 3270149 - RNA, 22 nt, Vaccinia virus
ugcaaaauaugcucuagauacu

SEQ ID NO: 3270150 - RNA, 23 nt, Vaccinia virus
uggcugaaaucagagcucaucua

SEQ ID NO: 3270151 - RNA, 12 nt, Vaccinia virus
agauaaggaagu

SEQ ID NO: 3270152 - RNA, 18 nt, Vaccinia virus
ucuuaacuuacaaaaugu

SEQ ID NO: 3270153 - RNA, 13 nt, Vaccinia virus
auuguuacaaaag

SEQ ID NO: 3270154 - RNA, 12 nt, Vaccinia virus
agaaguuauuau

SEQ ID NO: 3270155 - RNA, 18 nt, Vaccinia virus
aaauucuaggcucaguau

SEQ ID NO: 3270156 - RNA, 22 nt, Vaccinia virus
uuaaaaaaaaaauacuuauucu

SEQ ID NO: 3270157 - RNA, 14 nt, Vaccinia virus
auuaauuuuagaaa

SEQ ID NO: 3270158 - RNA, 19 nt, Vaccinia virus
aauaggaguaauagaacug

SEQ ID NO: 3270159 - RNA, 20 nt, Vaccinia virus
cagcacagggagccacagaa

SEQ ID NO: 3270160 - RNA, 20 nt, Vaccinia virus
aacuccaauaaaaagaugau

SEQ ID NO: 3270161 - RNA, 20 nt, Vaccinia virus
aaaugcaagcaucuuguuaa

SEQ ID NO: 3270162 - RNA, 14 nt, Vaccinia virus
uaaaaauauguaua

SEQ ID NO: 3270163 - RNA, 13 nt, Vaccinia virus
uguaauuaaauuu

SEQ ID NO: 3270164 - RNA, 21 nt, Vaccinia virus
ucggauuauccuccguaagac

SEQ ID NO: 3270165 - RNA, 18 nt, Vaccinia virus
uagugcucaaacaaaaug

SEQ ID NO: 3270166 - RNA, 12 nt, Vaccinia virus
aacaucaagaau

SEQ ID NO: 3270167 - RNA, 14 nt, Vaccinia virus
uuugagagggaaaa

SEQ ID NO: 3270168 - RNA, 14 nt, Vaccinia virus
uaaauguauccauu

SEQ ID NO: 3270169 - RNA, 21 nt, Vaccinia virus
uaucaucuuaugaggaaugau

SEQ ID NO: 3270170 - RNA, 15 nt, Vaccinia virus
ucauauuauagauuu

SEQ ID NO: 3270171 - RNA, 17 nt, Vaccinia virus
uccaucucgcccaucuc

SEQ ID NO: 3270172 - RNA, 19 nt, Vaccinia virus
aacagcuaucaaaauaugu

SEQ ID NO: 3270173 - RNA, 20 nt, Vaccinia virus
uaagauuaucaaaaucuugu

SEQ ID NO: 3270174 - RNA, 13 nt, Vaccinia virus
auuuauuaaauac

SEQ ID NO: 3270175 - RNA, 22 nt, Vaccinia virus
aguaaaacuuucuaguuaucau

SEQ ID NO: 3270176 - RNA, 12 nt, Vaccinia virus
uauuucuaaaau

SEQ ID NO: 3270177 - RNA, 19 nt, Vaccinia virus
aucaaucgguguguagaaa

SEQ ID NO: 3270178 - RNA, 20 nt, Vaccinia virus
gaugaauuaauuaauguuuu

SEQ ID NO: 3270179 - RNA, 17 nt, Vaccinia virus
uaucaaacaauccaaaa

SEQ ID NO: 3270180 - RNA, 15 nt, Vaccinia virus
auauccguuaauagg

SEQ ID NO: 3270181 - RNA, 18 nt, Vaccinia virus
uauuuggcuagucaagau

SEQ ID NO: 3270182 - RNA, 22 nt, Vaccinia virus
caaucuaucacugauuaauuau

SEQ ID NO: 3270183 - RNA, 22 nt, Vaccinia virus
uguagaacucaugaaucuaaaa

SEQ ID NO: 3270184 - RNA, 16 nt, Vaccinia virus
agaagucugaucuuaa

SEQ ID NO: 3270185 - RNA, 19 nt, Vaccinia virus
uuauguauauguuuguaaa

SEQ ID NO: 3270186 - RNA, 16 nt, Vaccinia virus
cuccguuacacuguua

SEQ ID NO: 3270187 - RNA, 23 nt, Vaccinia virus
auaauaucagaccguacauacau

SEQ ID NO: 3270188 - RNA, 17 nt, Vaccinia virus
auaauuucccaaauaca

SEQ ID NO: 3270189 - RNA, 17 nt, Vaccinia virus
accaaaaacucauauaa

SEQ ID NO: 3270190 - RNA, 22 nt, Vaccinia virus
aguacacuuaguccaggaccua

SEQ ID NO: 3270191 - RNA, 20 nt, Vaccinia virus
uaacgguuauaaaauuuaua

SEQ ID NO: 3270192 - RNA, 17 nt, Vaccinia virus
uaucuauauguuuugau

SEQ ID NO: 3270193 - RNA, 18 nt, Vaccinia virus
uagaagacaauaaagaua

SEQ ID NO: 3270194 - RNA, 21 nt, Vaccinia virus
aucucuauccaaggauguaau

SEQ ID NO: 3270195 - RNA, 18 nt, Vaccinia virus
uauauuaacucagaagau

SEQ ID NO: 3270196 - RNA, 16 nt, Vaccinia virus
cauuuaucacaaaaaa

SEQ ID NO: 3270197 - RNA, 14 nt, Vaccinia virus
guaaaugaugaaau

SEQ ID NO: 3270198 - RNA, 18 nt, Vaccinia virus
auagcuuccuucaaucua

SEQ ID NO: 3270199 - RNA, 15 nt, Vaccinia virus
auuaguaugguuuca

SEQ ID NO: 3270200 - RNA, 19 nt, Vaccinia virus
guuuaucgccuacaucauc

SEQ ID NO: 3270201 - RNA, 16 nt, Vaccinia virus
ccaacggaaaugguag

SEQ ID NO: 3270202 - RNA, 15 nt, Vaccinia virus
auacauuucucaaau

SEQ ID NO: 3270203 - RNA, 18 nt, Vaccinia virus
aauuuauuaauacaggau

SEQ ID NO: 3270204 - RNA, 14 nt, Vaccinia virus
uagauaucauuaau

SEQ ID NO: 3270205 - RNA, 16 nt, Vaccinia virus
uaacuagucuucucug

SEQ ID NO: 3270206 - RNA, 21 nt, Vaccinia virus
gauaacauguuaauuuccgac

SEQ ID NO: 3270207 - RNA, 13 nt, Vaccinia virus
guaaaucuuuuca

SEQ ID NO: 3270208 - RNA, 14 nt, Vaccinia virus
auauguuguuguaa

SEQ ID NO: 3270209 - RNA, 17 nt, Vaccinia virus
ggcaugcaugugccugc

SEQ ID NO: 3270210 - RNA, 19 nt, Vaccinia virus
aguucauauuuauuagaua

SEQ ID NO: 3270211 - RNA, 16 nt, Vaccinia virus
uaugcucaugaacauu

SEQ ID NO: 3270212 - RNA, 20 nt, Vaccinia virus
aagaagugucuauaaaugua

SEQ ID NO: 3270213 - RNA, 18 nt, Vaccinia virus
uguauacaccaacaguau

SEQ ID NO: 3270214 - RNA, 18 nt, Vaccinia virus
auagugaaacaaaauaua

SEQ ID NO: 3270215 - RNA, 20 nt, Vaccinia virus
uaacacuacucacaauagaa

SEQ ID NO: 3270216 - RNA, 22 nt, Vaccinia virus
ugauuaaguauuguuuuuucau

SEQ ID NO: 3270217 - RNA, 15 nt, Vaccinia virus
cuagucauauguuua

SEQ ID NO: 3270218 - RNA, 21 nt, Vaccinia virus
aaaaauugaauugaugauaua

SEQ ID NO: 3270219 - RNA, 21 nt, Vaccinia virus
auugguguuccgauuuuagua

SEQ ID NO: 3270220 - RNA, 21 nt, Vaccinia virus
uaacucucucauuuucuuuaa

SEQ ID NO: 3270221 - RNA, 22 nt, Vaccinia virus
ucaucauuguguaaacuaaaua

SEQ ID NO: 3270222 - RNA, 16 nt, Vaccinia virus
aaauaggguuguguau

SEQ ID NO: 3270223 - RNA, 22 nt, Vaccinia virus
auuuuguagaugccauaucaua

SEQ ID NO: 3270224 - RNA, 15 nt, Vaccinia virus
acuaacauuguuaau

SEQ ID NO: 3270225 - RNA, 18 nt, Vaccinia virus
ucacuacggacacaaagu

SEQ ID NO: 3270226 - RNA, 19 nt, Vaccinia virus
aaggaguagcagauuuccu

SEQ ID NO: 3270227 - RNA, 12 nt, Vaccinia virus
acuaaaagacau

SEQ ID NO: 3270228 - RNA, 16 nt, Vaccinia virus
agacauaaaaacuaau

SEQ ID NO: 3270229 - RNA, 22 nt, Vaccinia virus
aaauauuucuacuacuucauua

SEQ ID NO: 3270230 - RNA, 20 nt, Vaccinia virus
agaacccauuagguuaaaug

SEQ ID NO: 3270231 - RNA, 17 nt, Vaccinia virus
aauaacauaggauuaaa

SEQ ID NO: 3270232 - RNA, 18 nt, Vaccinia virus
augaguaaaaucaaacac

SEQ ID NO: 3270233 - RNA, 23 nt, Vaccinia virus
uaaacuccacccauuacauauau

SEQ ID NO: 3270234 - RNA, 21 nt, Vaccinia virus
agaauggaaaggaaacuaucu

SEQ ID NO: 3270235 - RNA, 19 nt, Vaccinia virus
guugacauguauauaucca

SEQ ID NO: 3270236 - RNA, 18 nt, Vaccinia virus
uuacagaucuaguauaau

SEQ ID NO: 3270237 - RNA, 18 nt, Vaccinia virus
ucuaucagaguccaugua

SEQ ID NO: 3270238 - RNA, 12 nt, Vaccinia virus
cacauagaauaa

SEQ ID NO: 3270239 - RNA, 16 nt, Vaccinia virus
gcacaaugaaugauau

SEQ ID NO: 3270240 - RNA, 16 nt, Vaccinia virus
aaucuauuuuggucau

SEQ ID NO: 3270241 - RNA, 17 nt, Vaccinia virus
agauaguuuuuuucauu

SEQ ID NO: 3270242 - RNA, 20 nt, Vaccinia virus
uagaaguuuuaaaaauacuu

SEQ ID NO: 3270243 - RNA, 15 nt, Vaccinia virus
uugauaauauuauua

SEQ ID NO: 3270244 - RNA, 17 nt, Vaccinia virus
guaucgaaaaacuuuaa

SEQ ID NO: 3270245 - RNA, 14 nt, Vaccinia virus
aauauucuaaauua

SEQ ID NO: 3270246 - RNA, 16 nt, Vaccinia virus
acuucaaucaaacaaa

SEQ ID NO: 3270247 - RNA, 22 nt, Vaccinia virus
aguauccaucgcuucuaucuug

SEQ ID NO: 3270248 - RNA, 16 nt, Vaccinia virus
uaaacaaucuaguuuu

SEQ ID NO: 3270249 - RNA, 19 nt, Vaccinia virus
ugaguuccauuacaaauau

SEQ ID NO: 3270250 - RNA, 18 nt, Vaccinia virus
aaaacuuccucauuaaga

SEQ ID NO: 3270251 - RNA, 21 nt, Vaccinia virus
aaacuauuacuaggagaauua

SEQ ID NO: 3270252 - RNA, 19 nt, Vaccinia virus
aaucucguuacauguuauu

SEQ ID NO: 3270253 - RNA, 14 nt, Vaccinia virus
auaacauugcuagu

SEQ ID NO: 3270254 - RNA, 23 nt, Vaccinia virus
gauauauuugcacacauaaucca

SEQ ID NO: 3270255 - RNA, 23 nt, Vaccinia virus
augaauuaacgagauauaugcga

SEQ ID NO: 3270256 - RNA, 14 nt, Vaccinia virus
gauguacgaaagaa

SEQ ID NO: 3270257 - RNA, 18 nt, Vaccinia virus
uagaaauaaaaauuauua

SEQ ID NO: 3270258 - RNA, 20 nt, Vaccinia virus
caauaugucuguacaaaugu

SEQ ID NO: 3270259 - RNA, 20 nt, Vaccinia virus
uauaauccuuauacaucuga

SEQ ID NO: 3270260 - RNA, 23 nt, Vaccinia virus
caauuugcuucagcggauccugu

SEQ ID NO: 3270261 - RNA, 15 nt, Vaccinia virus
cuguaaacaaguuug

SEQ ID NO: 3270262 - RNA, 18 nt, Vaccinia virus
ugucaucaguuauguacg

SEQ ID NO: 3270263 - RNA, 18 nt, Vaccinia virus
auaauuugguauauacau

SEQ ID NO: 3270264 - RNA, 21 nt, Vaccinia virus
caucuguuuccuauaaucguu

SEQ ID NO: 3270265 - RNA, 15 nt, Vaccinia virus
gaaucauaaagaaca

SEQ ID NO: 3270266 - RNA, 22 nt, Vaccinia virus
ugaugugagagagaaauacuuc

SEQ ID NO: 3270267 - RNA, 11 nt, Vaccinia virus
acuacauaucc

SEQ ID NO: 3270268 - RNA, 19 nt, Vaccinia virus
auuacuuuuucaaagaaaa

SEQ ID NO: 3270269 - RNA, 18 nt, Vaccinia virus
augauaguggaucucaau

SEQ ID NO: 3270270 - RNA, 13 nt, Vaccinia virus
ucauuaucugaaa

SEQ ID NO: 3270271 - RNA, 16 nt, Vaccinia virus
uaugaaguacgauguu

SEQ ID NO: 3270272 - RNA, 14 nt, Vaccinia virus
gaaucauacaauga

SEQ ID NO: 3270273 - RNA, 22 nt, Vaccinia virus
uuuaaacaagacggauauacag

SEQ ID NO: 3270274 - RNA, 15 nt, Vaccinia virus
uuuuccauccuuugu

SEQ ID NO: 3270275 - RNA, 14 nt, Vaccinia virus
acucuaauuuauug

SEQ ID NO: 3270276 - RNA, 22 nt, Vaccinia virus
acuuugauagcaaggaugaaaa

SEQ ID NO: 3270277 - RNA, 17 nt, Vaccinia virus
auucagcugaaaugaga

SEQ ID NO: 3270278 - RNA, 14 nt, Vaccinia virus
guaucuuuacuaga

SEQ ID NO: 3270279 - RNA, 14 nt, Vaccinia virus
aacgugaauguaug

SEQ ID NO: 3270280 - RNA, 23 nt, Vaccinia virus
caaauaucuuuacgaauuacuuu

SEQ ID NO: 3270281 - RNA, 13 nt, Vaccinia virus
acagaugauauau

SEQ ID NO: 3270282 - RNA, 16 nt, Vaccinia virus
agaauaaucagaaauu

SEQ ID NO: 3270283 - RNA, 23 nt, Vaccinia virus
ucaaugugaauguauucacuuaa

SEQ ID NO: 3270284 - RNA, 22 nt, Vaccinia virus
uaacacguuuuuuagaucucau

SEQ ID NO: 3270285 - RNA, 18 nt, Vaccinia virus
acgaauuaggagaacuua

SEQ ID NO: 3270286 - RNA, 11 nt, Vaccinia virus
agaaaaacaac

SEQ ID NO: 3270287 - RNA, 15 nt, Vaccinia virus
ucauccaguugaaug

SEQ ID NO: 3270288 - RNA, 21 nt, Vaccinia virus
ucuuugaaaaguucuaugaaa

SEQ ID NO: 3270289 - RNA, 13 nt, Vaccinia virus
acuuucagucugu

SEQ ID NO: 3270290 - RNA, 21 nt, Vaccinia virus
ucgcuuucugguaacaugaua

SEQ ID NO: 3270291 - RNA, 23 nt, Vaccinia virus
aaauaggucuucgucuacaguag

SEQ ID NO: 3270292 - RNA, 17 nt, Vaccinia virus
aguggaagucauuugac

SEQ ID NO: 3270293 - RNA, 20 nt, Vaccinia virus
uagucuuuuuggucaucucu

SEQ ID NO: 3270294 - RNA, 20 nt, Vaccinia virus
aguuaauggagaaauacuua

SEQ ID NO: 3270295 - RNA, 21 nt, Vaccinia virus
gcguuaacuaucaaacaaacu

SEQ ID NO: 3270296 - RNA, 17 nt, Vaccinia virus
uuaaccaacugauuaau

SEQ ID NO: 3270297 - RNA, 22 nt, Vaccinia virus
acgucuuucacuaauugacuau

SEQ ID NO: 3270298 - RNA, 18 nt, Vaccinia virus
auuuccugauuuaaauag

SEQ ID NO: 3270299 - RNA, 18 nt, Vaccinia virus
cgauucuggcuauuucaa

SEQ ID NO: 3270300 - RNA, 16 nt, Vaccinia virus
aucgucuguauuaaug

SEQ ID NO: 3270301 - RNA, 20 nt, Vaccinia virus
cggaauugccaacucucaaa

SEQ ID NO: 3270302 - RNA, 13 nt, Vaccinia virus
uaaaagucaacau

SEQ ID NO: 3270303 - RNA, 19 nt, Vaccinia virus
uuugccaagguuagaugua

SEQ ID NO: 3270304 - RNA, 17 nt, Vaccinia virus
uaguuacuuuaauaacc

SEQ ID NO: 3270305 - RNA, 12 nt, Vaccinia virus
gcaagaaaugga

SEQ ID NO: 3270306 - RNA, 12 nt, Vaccinia virus
ggaaaaaugaug

SEQ ID NO: 3270307 - RNA, 11 nt, Vaccinia virus
uccucaucugu

SEQ ID NO: 3270308 - RNA, 23 nt, Vaccinia virus
uacuacugaguauaaauaauuca

SEQ ID NO: 3270309 - RNA, 16 nt, Vaccinia virus
gcuaaaaaauuaguag

SEQ ID NO: 3270310 - RNA, 20 nt, Vaccinia virus
aaaagacggaggauuuccau

SEQ ID NO: 3270311 - RNA, 15 nt, Vaccinia virus
uucaagagaauauuc

SEQ ID NO: 3270312 - RNA, 20 nt, Vaccinia virus
ggccuguucauaaauaaaaa

SEQ ID NO: 3270313 - RNA, 13 nt, Vaccinia virus
gcaagaaauggau

SEQ ID NO: 3270314 - RNA, 15 nt, Vaccinia virus
acauuauuacauaga

SEQ ID NO: 3270315 - RNA, 23 nt, Vaccinia virus
gauaagcuauaauaauaaaugua

SEQ ID NO: 3270316 - RNA, 17 nt, Vaccinia virus
uaaacauuguucaugau

SEQ ID NO: 3270317 - RNA, 21 nt, Vaccinia virus
aaaagguauuacaagaauaua

SEQ ID NO: 3270318 - RNA, 23 nt, Vaccinia virus
uuaaugcacacaguauuaucuac

SEQ ID NO: 3270319 - RNA, 18 nt, Vaccinia virus
guuauccccuuuauguaa

SEQ ID NO: 3270320 - RNA, 16 nt, Vaccinia virus
uagacauagauauucu

SEQ ID NO: 3270321 - RNA, 16 nt, Vaccinia virus
accagcacaacaucua

SEQ ID NO: 3270322 - RNA, 20 nt, Vaccinia virus
gaacauauuuauauaauuau

SEQ ID NO: 3270323 - RNA, 21 nt, Vaccinia virus
guaugugugugugguauagau

SEQ ID NO: 3270324 - RNA, 14 nt, Vaccinia virus
augcauguuucaua

SEQ ID NO: 3270325 - RNA, 21 nt, Vaccinia virus
aucaauaccaaagaaggaaga

SEQ ID NO: 3270326 - RNA, 16 nt, Vaccinia virus
ugugcaucuacugaua

SEQ ID NO: 3270327 - RNA, 16 nt, Vaccinia virus
auuguugucugaaaua

SEQ ID NO: 3270328 - RNA, 16 nt, Vaccinia virus
uucauauccuacugua

SEQ ID NO: 3270329 - RNA, 14 nt, Vaccinia virus
auucacaaauauga

SEQ ID NO: 3270330 - RNA, 18 nt, Vaccinia virus
acaacacgggauaaauua

SEQ ID NO: 3270331 - RNA, 23 nt, Vaccinia virus
auuucuggauauguuuuuaauaa

SEQ ID NO: 3270332 - RNA, 22 nt, Vaccinia virus
cuauguauucagaauuaauaga

SEQ ID NO: 3270333 - RNA, 18 nt, Vaccinia virus
guuagaaucauuuaucau

SEQ ID NO: 3270334 - RNA, 17 nt, Vaccinia virus
ccaaugaugucaggaaa

SEQ ID NO: 3270335 - RNA, 16 nt, Vaccinia virus
caucagacgcaauaac

SEQ ID NO: 3270336 - RNA, 15 nt, Vaccinia virus
aauauacgucguucu

SEQ ID NO: 3270337 - RNA, 13 nt, Vaccinia virus
auacucucaucuu

SEQ ID NO: 3270338 - RNA, 16 nt, Vaccinia virus
uauaaucugaugaaca

SEQ ID NO: 3270339 - RNA, 23 nt, Vaccinia virus
caagcuucguuguagaaacacug

SEQ ID NO: 3270340 - RNA, 23 nt, Vaccinia virus
uacaaaugacacugauaaaguag

SEQ ID NO: 3270341 - RNA, 14 nt, Vaccinia virus
auuauuuauaccuc

SEQ ID NO: 3270342 - RNA, 23 nt, Vaccinia virus
uaaacauuguuuguauucuccag

SEQ ID NO: 3270343 - RNA, 13 nt, Vaccinia virus
acugauucuggac

SEQ ID NO: 3270344 - RNA, 15 nt, Vaccinia virus
auggcaagaaaugga

SEQ ID NO: 3270345 - RNA, 23 nt, Vaccinia virus
augucuuauuaaaaaacauauau

SEQ ID NO: 3270346 - RNA, 16 nt, Vaccinia virus
uacaaucuguauuuca

SEQ ID NO: 3270347 - RNA, 13 nt, Vaccinia virus
gaaucugugaaug

SEQ ID NO: 3270348 - RNA, 14 nt, Vaccinia virus
uacaccggaucuau

SEQ ID NO: 3270349 - RNA, 20 nt, Vaccinia virus
gaaaacgagccaguaaucuu

SEQ ID NO: 3270350 - RNA, 15 nt, Vaccinia virus
aacuuaucaaaacau

SEQ ID NO: 3270351 - RNA, 16 nt, Vaccinia virus
augaagaauggaugau

SEQ ID NO: 3270352 - RNA, 15 nt, Vaccinia virus
ucauauccuacugua

SEQ ID NO: 3270353 - RNA, 22 nt, Vaccinia virus
agaacuggaccguauaucucau

SEQ ID NO: 3270354 - RNA, 19 nt, Vaccinia virus
auuuugauuccaaaauuga

SEQ ID NO: 3270355 - RNA, 15 nt, Vaccinia virus
guaaaucacauaucu

SEQ ID NO: 3270356 - RNA, 21 nt, Vaccinia virus
uaccacaauaaaaaaaauuga

SEQ ID NO: 3270357 - RNA, 22 nt, Vaccinia virus
ugauggaugagauauacagcua

SEQ ID NO: 3270358 - RNA, 13 nt, Vaccinia virus
aaucuuugucaaa

SEQ ID NO: 3270359 - RNA, 20 nt, Vaccinia virus
acuaaauuaacaauaucaau

SEQ ID NO: 3270360 - RNA, 17 nt, Vaccinia virus
aauuuaugaagauguua

SEQ ID NO: 3270361 - RNA, 19 nt, Vaccinia virus
gcagcauuuccuacauaua

SEQ ID NO: 3270362 - RNA, 20 nt, Vaccinia virus
aaaucauuaaaugauuguau

SEQ ID NO: 3270363 - RNA, 22 nt, Vaccinia virus
ucaucacugucaucaguuaugu

SEQ ID NO: 3270364 - RNA, 22 nt, Vaccinia virus
auuuaccaucccauauauucca

SEQ ID NO: 3270365 - RNA, 17 nt, Vaccinia virus
aaugauggguuuucuau

SEQ ID NO: 3270366 - RNA, 24 nt, Vaccinia virus
gauaaaaguuccagaaaauguaga

SEQ ID NO: 3270367 - RNA, 14 nt, Vaccinia virus
uaauugucuuagaa

SEQ ID NO: 3270368 - RNA, 12 nt, Vaccinia virus
uauuuucuucua

SEQ ID NO: 3270369 - RNA, 18 nt, Vaccinia virus
uaugcgaguaugaugcaa

SEQ ID NO: 3270370 - RNA, 14 nt, Vaccinia virus
uguacuucuuccag

SEQ ID NO: 3270371 - RNA, 19 nt, Vaccinia virus
auaagaagaggacaaaguu

SEQ ID NO: 3270372 - RNA, 18 nt, Vaccinia virus
aggcaguccagaaauauu

SEQ ID NO: 3270373 - RNA, 15 nt, Vaccinia virus
ugaaaaugaaaauau

SEQ ID NO: 3270374 - RNA, 16 nt, Vaccinia virus
ggugagaacaugagac

SEQ ID NO: 3270375 - RNA, 12 nt, Vaccinia virus
aacagauacaua

SEQ ID NO: 3270376 - RNA, 22 nt, Vaccinia virus
auaaacguucacguaaauacaa

SEQ ID NO: 3270377 - RNA, 20 nt, Vaccinia virus
acugccgaguuuaaaacuuc

SEQ ID NO: 3270378 - RNA, 15 nt, Vaccinia virus
aguauucuuauguau

SEQ ID NO: 3270379 - RNA, 12 nt, Vaccinia virus
cuaucuuuagag

SEQ ID NO: 3270380 - RNA, 15 nt, Vaccinia virus
ugaugucuauguacg

SEQ ID NO: 3270381 - RNA, 18 nt, Vaccinia virus
auauuguagauaagaaug

SEQ ID NO: 3270382 - RNA, 19 nt, Vaccinia virus
acuuuuauuuuuagaaagu

SEQ ID NO: 3270383 - RNA, 16 nt, Vaccinia virus
guagaaucauauugcu

SEQ ID NO: 3270384 - RNA, 13 nt, Vaccinia virus
uguauaaaaagaa

SEQ ID NO: 3270385 - RNA, 14 nt, Vaccinia virus
aaaaguaggaauua

SEQ ID NO: 3270386 - RNA, 21 nt, Vaccinia virus
cuaaaucuguauaucuuucca

SEQ ID NO: 3270387 - RNA, 23 nt, Vaccinia virus
auagauagugcuaaacgaauuac

SEQ ID NO: 3270388 - RNA, 17 nt, Vaccinia virus
caauaaaacauuuccua

SEQ ID NO: 3270389 - RNA, 15 nt, Vaccinia virus
auaaacuauuuuacc

SEQ ID NO: 3270390 - RNA, 13 nt, Vaccinia virus
agauaaacuuuau

SEQ ID NO: 3270391 - RNA, 11 nt, Vaccinia virus
guuuucaucag

SEQ ID NO: 3270392 - RNA, 19 nt, Vaccinia virus
cucaaucacuacaucuuua

SEQ ID NO: 3270393 - RNA, 12 nt, Vaccinia virus
agaagauuaaac

SEQ ID NO: 3270394 - RNA, 18 nt, Vaccinia virus
aguagaaauuccguugga

SEQ ID NO: 3270395 - RNA, 21 nt, Vaccinia virus
accgucgaguuacuuaaaugc

SEQ ID NO: 3270396 - RNA, 13 nt, Vaccinia virus
cuguuauuuugaa

SEQ ID NO: 3270397 - RNA, 19 nt, Vaccinia virus
uauauaaucagaguuuuua

SEQ ID NO: 3270398 - RNA, 17 nt, Vaccinia virus
uguaauuuuuguuuccg

SEQ ID NO: 3270399 - RNA, 16 nt, Vaccinia virus
uuaguuuuuggauaga

SEQ ID NO: 3270400 - RNA, 16 nt, Vaccinia virus
uuaucgucuacgaaca

SEQ ID NO: 3270401 - RNA, 16 nt, Vaccinia virus
auuuuucuucauuuau

SEQ ID NO: 3270402 - RNA, 23 nt, Vaccinia virus
uccacgauaaaauccuccuauca

SEQ ID NO: 3270403 - RNA, 14 nt, Vaccinia virus
aaaauaauuuccaa

SEQ ID NO: 3270404 - RNA, 13 nt, Vaccinia virus
auacgauaucuuc

SEQ ID NO: 3270405 - RNA, 23 nt, Vaccinia virus
uucaaccaugagugugaaacuaa

SEQ ID NO: 3270406 - RNA, 18 nt, Vaccinia virus
cuccacaguuuuuaauuu

SEQ ID NO: 3270407 - RNA, 20 nt, Vaccinia virus
agugcacucucuaccacaau

SEQ ID NO: 3270408 - RNA, 14 nt, Vaccinia virus
aaagugcaaaugag

SEQ ID NO: 3270409 - RNA, 19 nt, Vaccinia virus
aaaucauccguuguuauau

SEQ ID NO: 3270410 - RNA, 16 nt, Vaccinia virus
augucauauaggaaac

SEQ ID NO: 3270411 - RNA, 16 nt, Vaccinia virus
uaguuaauaaaaucua

SEQ ID NO: 3270412 - RNA, 17 nt, Vaccinia virus
acugauuaacaaauggu

SEQ ID NO: 3270413 - RNA, 20 nt, Vaccinia virus
aucaauaagcauuaugauuu

SEQ ID NO: 3270414 - RNA, 15 nt, Vaccinia virus
caauaagcuuuagau

SEQ ID NO: 3270415 - RNA, 13 nt, Vaccinia virus
cgucuaucaucua

SEQ ID NO: 3270416 - RNA, 16 nt, Vaccinia virus
aagacauaaaacucau

SEQ ID NO: 3270417 - RNA, 14 nt, Vaccinia virus
uacgagaaaaucaa

SEQ ID NO: 3270418 - RNA, 17 nt, Vaccinia virus
cauuuucacaaauacua

SEQ ID NO: 3270419 - RNA, 23 nt, Vaccinia virus
uuaacaucuaaaaaauccuuaau

SEQ ID NO: 3270420 - RNA, 16 nt, Vaccinia virus
ucaccuuaucaaaguc

SEQ ID NO: 3270421 - RNA, 13 nt, Vaccinia virus
uagacaaaacuau

SEQ ID NO: 3270422 - RNA, 14 nt, Vaccinia virus
agauaugauagaca

SEQ ID NO: 3270423 - RNA, 18 nt, Vaccinia virus
ucuuuuaguuuaucaaaa

SEQ ID NO: 3270424 - RNA, 20 nt, Vaccinia virus
agaaugcucuuaaauaaugu

SEQ ID NO: 3270425 - RNA, 17 nt, Vaccinia virus
auuauuaguugauguga

SEQ ID NO: 3270426 - RNA, 19 nt, Vaccinia virus
uguuaagaaugauuacuaa

SEQ ID NO: 3270427 - RNA, 19 nt, Vaccinia virus
aagcuauuaucaaauacug

SEQ ID NO: 3270428 - RNA, 17 nt, Vaccinia virus
uauucuaucaccagauu

SEQ ID NO: 3270429 - RNA, 18 nt, Vaccinia virus
auccuuuucuucagaaua

SEQ ID NO: 3270430 - RNA, 16 nt, Vaccinia virus
agcugaaaaacuaugu

SEQ ID NO: 3270431 - RNA, 23 nt, Vaccinia virus
uugacgcacccgcgucuguuuuu

SEQ ID NO: 3270432 - RNA, 19 nt, Vaccinia virus
gucaauuacaaauaaagcg

SEQ ID NO: 3270433 - RNA, 15 nt, Vaccinia virus
uggacauacuaauau

SEQ ID NO: 3270434 - RNA, 20 nt, Vaccinia virus
aaauuuccauuuuuaauuua

SEQ ID NO: 3270435 - RNA, 14 nt, Vaccinia virus
cgcugauuuaacua

SEQ ID NO: 3270436 - RNA, 15 nt, Vaccinia virus
auucuucgguaacuu

SEQ ID NO: 3270437 - RNA, 16 nt, Vaccinia virus
auguuauauauaccuu

SEQ ID NO: 3270438 - RNA, 15 nt, Vaccinia virus
agugaauccaucuca

SEQ ID NO: 3270439 - RNA, 21 nt, Vaccinia virus
cuuuacaucaucgaacuucug

SEQ ID NO: 3270440 - RNA, 22 nt, Vaccinia virus
uauauccuacacccgaagagau

SEQ ID NO: 3270441 - RNA, 16 nt, Vaccinia virus
cucuguaauaguuucc

SEQ ID NO: 3270442 - RNA, 13 nt, Vaccinia virus
aggacuauuagaa

SEQ ID NO: 3270443 - RNA, 13 nt, Vaccinia virus
aucuaaauauuua

SEQ ID NO: 3270444 - RNA, 17 nt, Vaccinia virus
gaugucaaugaagagua

SEQ ID NO: 3270445 - RNA, 18 nt, Vaccinia virus
aucccuaucuauaauauc

SEQ ID NO: 3270446 - RNA, 22 nt, Vaccinia virus
agauucucauuugauaaaaauu

SEQ ID NO: 3270447 - RNA, 17 nt, Vaccinia virus
aauauuguuaucguaau

SEQ ID NO: 3270448 - RNA, 15 nt, Vaccinia virus
aauguccaagucuug

SEQ ID NO: 3270449 - RNA, 21 nt, Vaccinia virus
uugagcuaauuuuuguaaaua

SEQ ID NO: 3270450 - RNA, 18 nt, Vaccinia virus
cuggcaggcacaugcaug

SEQ ID NO: 3270451 - RNA, 21 nt, Vaccinia virus
aauuuacucgcauuucuaaua

SEQ ID NO: 3270452 - RNA, 15 nt, Vaccinia virus
caguuaauauauuua

SEQ ID NO: 3270453 - RNA, 20 nt, Vaccinia virus
aaacuaacauuguuaauuga

SEQ ID NO: 3270454 - RNA, 12 nt, Vaccinia virus
aaaauagcaaag

SEQ ID NO: 3270455 - RNA, 17 nt, Vaccinia virus
uauauaacuaucaauau

SEQ ID NO: 3270456 - RNA, 19 nt, Vaccinia virus
uaaaagacaaauauaugug

SEQ ID NO: 3270457 - RNA, 19 nt, Vaccinia virus
aggaauacaauacauaccu

SEQ ID NO: 3270458 - RNA, 20 nt, Vaccinia virus
uuguuaggaaucuauucaaa

SEQ ID NO: 3270459 - RNA, 23 nt, Vaccinia virus
gucacuaacugauaccaugaaau

SEQ ID NO: 3270460 - RNA, 18 nt, Vaccinia virus
agaaaguggauaaaacaa

SEQ ID NO: 3270461 - RNA, 13 nt, Vaccinia virus
aaucuuuaccaua

SEQ ID NO: 3270462 - RNA, 17 nt, Vaccinia virus
agacuguuuauacaaga

SEQ ID NO: 3270463 - RNA, 18 nt, Vaccinia virus
guagacauagauauucua

SEQ ID NO: 3270464 - RNA, 17 nt, Vaccinia virus
gauacccugauauuaau

SEQ ID NO: 3270465 - RNA, 19 nt, Vaccinia virus
accaaacuuucagaagaaa

SEQ ID NO: 3270466 - RNA, 17 nt, Vaccinia virus
guguaucgacaucuuua

SEQ ID NO: 3270467 - RNA, 18 nt, Vaccinia virus
uaauauauugaucauaau

SEQ ID NO: 3270468 - RNA, 19 nt, Vaccinia virus
gaauaguuuguuuuggaaa

SEQ ID NO: 3270469 - RNA, 14 nt, Vaccinia virus
acauauuucauuug

SEQ ID NO: 3270470 - RNA, 12 nt, Vaccinia virus
agcaaagaauga

SEQ ID NO: 3270471 - RNA, 17 nt, Vaccinia virus
uagagagguacguguaa

SEQ ID NO: 3270472 - RNA, 21 nt, Vaccinia virus
auuucauuauaauaguuuauc

SEQ ID NO: 3270473 - RNA, 16 nt, Vaccinia virus
aucgauagacuuucuc

SEQ ID NO: 3270474 - RNA, 20 nt, Vaccinia virus
uaaagaagaagaucauacag

SEQ ID NO: 3270475 - RNA, 19 nt, Vaccinia virus
aauauauguugauaauauc

SEQ ID NO: 3270476 - RNA, 14 nt, Vaccinia virus
uucuggauuauuuu

SEQ ID NO: 3270477 - RNA, 15 nt, Vaccinia virus
cgauauguuaucuac

SEQ ID NO: 3270478 - RNA, 20 nt, Vaccinia virus
auauaccuguuuuuauuuca

SEQ ID NO: 3270479 - RNA, 14 nt, Vaccinia virus
auauaguagaugcu

SEQ ID NO: 3270480 - RNA, 11 nt, Vaccinia virus
auguauauaca

SEQ ID NO: 3270481 - RNA, 22 nt, Vaccinia virus
gcauguagaaugugauaauuau

SEQ ID NO: 3270482 - RNA, 15 nt, Vaccinia virus
auuaaauuuagagau

SEQ ID NO: 3270483 - RNA, 12 nt, Vaccinia virus
uaucucagucug

SEQ ID NO: 3270484 - RNA, 21 nt, Vaccinia virus
auugauugccauaauaauuac

SEQ ID NO: 3270485 - RNA, 21 nt, Vaccinia virus
aaugaguaauuaauugucuua

SEQ ID NO: 3270486 - RNA, 12 nt, Vaccinia virus
acaucaaaugau

SEQ ID NO: 3270487 - RNA, 18 nt, Vaccinia virus
aucuauccgcgacaaauu

SEQ ID NO: 3270488 - RNA, 14 nt, Vaccinia virus
uaaaaaaauuauuu

SEQ ID NO: 3270489 - RNA, 22 nt, Vaccinia virus
uuguuuacacggugacuguauc

SEQ ID NO: 3270490 - RNA, 19 nt, Vaccinia virus
agaaauugguucuuuacca

SEQ ID NO: 3270491 - RNA, 15 nt, Vaccinia virus
cacuuaaugacaaaa

SEQ ID NO: 3270492 - RNA, 13 nt, Vaccinia virus
agucauuguuuua

SEQ ID NO: 3270493 - RNA, 18 nt, Vaccinia virus
aauauugccauaauuuuc

SEQ ID NO: 3270494 - RNA, 17 nt, Vaccinia virus
uguuuaccagcuccaug

SEQ ID NO: 3270495 - RNA, 18 nt, Vaccinia virus
ucgguauaaaaauuauug

SEQ ID NO: 3270496 - RNA, 18 nt, Vaccinia virus
acauagaguuaagagaga

SEQ ID NO: 3270497 - RNA, 14 nt, Vaccinia virus
uguaugaaaugcuu

SEQ ID NO: 3270498 - RNA, 12 nt, Vaccinia virus
agggaaaaugaa

SEQ ID NO: 3270499 - RNA, 17 nt, Vaccinia virus
gauaaauuaaugaucua

SEQ ID NO: 3270500 - RNA, 17 nt, Vaccinia virus
auaaugauagacaagau

SEQ ID NO: 3270501 - RNA, 14 nt, Vaccinia virus
uuaauacauuauua

SEQ ID NO: 3270502 - RNA, 14 nt, Vaccinia virus
uuaaagguauuucu

SEQ ID NO: 3270503 - RNA, 19 nt, Vaccinia virus
auaaccucuccuauaugaa

SEQ ID NO: 3270504 - RNA, 19 nt, Vaccinia virus
aauauauuuuuuuaguaau

SEQ ID NO: 3270505 - RNA, 22 nt, Vaccinia virus
uaguauaccaugaccuucuuca

SEQ ID NO: 3270506 - RNA, 15 nt, Vaccinia virus
aauguaaagucuaua

SEQ ID NO: 3270507 - RNA, 16 nt, Vaccinia virus
uuacuuguauaauaag

SEQ ID NO: 3270508 - RNA, 13 nt, Vaccinia virus
cgaauaacaaaaa

SEQ ID NO: 3270509 - RNA, 20 nt, Vaccinia virus
ugcaugauguacagauuucg

SEQ ID NO: 3270510 - RNA, 17 nt, Vaccinia virus
cagagccaucuguaaaa

SEQ ID NO: 3270511 - RNA, 23 nt, Vaccinia virus
cuuuuaaauacaaauauaucaau

SEQ ID NO: 3270512 - RNA, 14 nt, Vaccinia virus
gugaaaaauauuaa

SEQ ID NO: 3270513 - RNA, 20 nt, Vaccinia virus
aagacgaggagauuuagaaa

SEQ ID NO: 3270514 - RNA, 20 nt, Vaccinia virus
cauacuuagaauuuuaggac

SEQ ID NO: 3270515 - RNA, 12 nt, Vaccinia virus
uauuucuuacau

SEQ ID NO: 3270516 - RNA, 21 nt, Vaccinia virus
acagucgaacaaucuuaaugu

SEQ ID NO: 3270517 - RNA, 21 nt, Vaccinia virus
aagaaugcuucagaauuagaa

SEQ ID NO: 3270518 - RNA, 23 nt, Vaccinia virus
agaaaagguucuaucaacaauau

SEQ ID NO: 3270519 - RNA, 12 nt, Vaccinia virus
aucauaguuuuu

SEQ ID NO: 3270520 - RNA, 18 nt, Vaccinia virus
uuauacagaguauguaaa

SEQ ID NO: 3270521 - RNA, 17 nt, Vaccinia virus
aaugaugucaggaaaua

SEQ ID NO: 3270522 - RNA, 21 nt, Vaccinia virus
cauuuaucacaaaaaaaacuu

SEQ ID NO: 3270523 - RNA, 14 nt, Vaccinia virus
aaauauauaaugaa

SEQ ID NO: 3270524 - RNA, 22 nt, Vaccinia virus
aaugauagacuagaagaaagua

SEQ ID NO: 3270525 - RNA, 19 nt, Vaccinia virus
uguuucacauuuacauauu

SEQ ID NO: 3270526 - RNA, 23 nt, Vaccinia virus
agaaauggaagaguuaaugaaua

SEQ ID NO: 3270527 - RNA, 14 nt, Vaccinia virus
cuauuucuuaauga

SEQ ID NO: 3270528 - RNA, 13 nt, Vaccinia virus
guucuaacaucau

SEQ ID NO: 3270529 - RNA, 13 nt, Vaccinia virus
guaaaaucuauca

SEQ ID NO: 3270530 - RNA, 13 nt, Vaccinia virus
uucuagaccaaaa

SEQ ID NO: 3270531 - RNA, 22 nt, Vaccinia virus
gaauaugugcuaaaaucacuga

SEQ ID NO: 3270532 - RNA, 23 nt, Vaccinia virus
agaaauuauuuuuacuaauagaa

SEQ ID NO: 3270533 - RNA, 22 nt, Vaccinia virus
ggaaaacuuuaauaacaaagaa

SEQ ID NO: 3270534 - RNA, 21 nt, Vaccinia virus
acaacgaggacaugauaacuu

SEQ ID NO: 3270535 - RNA, 18 nt, Vaccinia virus
cugguauuuauauaugca

SEQ ID NO: 3270536 - RNA, 14 nt, Vaccinia virus
uauauuucuaugau

SEQ ID NO: 3270537 - RNA, 15 nt, Vaccinia virus
gaugcuauguuuaua

SEQ ID NO: 3270538 - RNA, 18 nt, Vaccinia virus
gccgaugaauggaucacc

SEQ ID NO: 3270539 - RNA, 15 nt, Vaccinia virus
uaguaaaaauaauua

SEQ ID NO: 3270540 - RNA, 14 nt, Vaccinia virus
gcaauucauuuucg

SEQ ID NO: 3270541 - RNA, 20 nt, Vaccinia virus
auguagugauagauaugaua

SEQ ID NO: 3270542 - RNA, 17 nt, Vaccinia virus
uuagucgucucaaagag

SEQ ID NO: 3270543 - RNA, 20 nt, Vaccinia virus
ucacgaaaaaugaugaaggc

SEQ ID NO: 3270544 - RNA, 18 nt, Vaccinia virus
ucuuucuccgccuauuaa

SEQ ID NO: 3270545 - RNA, 21 nt, Vaccinia virus
uaauacauccccauuccagua

SEQ ID NO: 3270546 - RNA, 14 nt, Vaccinia virus
cauucauaaaaacc

SEQ ID NO: 3270547 - RNA, 18 nt, Vaccinia virus
cggcuauagaaaaguaua

SEQ ID NO: 3270548 - RNA, 16 nt, Vaccinia virus
ucaaacacgauauuca

SEQ ID NO: 3270549 - RNA, 17 nt, Vaccinia virus
aauacuuaaaaauggau

SEQ ID NO: 3270550 - RNA, 15 nt, Vaccinia virus
acauaucuaacaaug

SEQ ID NO: 3270551 - RNA, 13 nt, Vaccinia virus
uauuaauaaugau

SEQ ID NO: 3270552 - RNA, 13 nt, Vaccinia virus
auuuaauauagau

SEQ ID NO: 3270553 - RNA, 15 nt, Vaccinia virus
ccacuaucugauuca

SEQ ID NO: 3270554 - RNA, 14 nt, Vaccinia virus
aaacuuuuuagaaa

SEQ ID NO: 3270555 - RNA, 14 nt, Vaccinia virus
cucuuucuuuugau

SEQ ID NO: 3270556 - RNA, 17 nt, Vaccinia virus
aacaaccgcuuagaaau

SEQ ID NO: 3270557 - RNA, 17 nt, Vaccinia virus
auuuacuaucuguaaug

SEQ ID NO: 3270558 - RNA, 18 nt, Vaccinia virus
gcaucaggauauaaagaa

SEQ ID NO: 3270559 - RNA, 17 nt, Vaccinia virus
uuuaaaaacgaaucaga

SEQ ID NO: 3270560 - RNA, 15 nt, Vaccinia virus
uauucacaaauauga

SEQ ID NO: 3270561 - RNA, 22 nt, Vaccinia virus
ucucuuuuguagaacuuaacuu

SEQ ID NO: 3270562 - RNA, 14 nt, Vaccinia virus
ucguuaaaaaguuu

SEQ ID NO: 3270563 - RNA, 13 nt, Vaccinia virus
uuuacccuagaau

SEQ ID NO: 3270564 - RNA, 17 nt, Vaccinia virus
aggaguaggaaugccac

SEQ ID NO: 3270565 - RNA, 18 nt, Vaccinia virus
guaauacauauaaauguc

SEQ ID NO: 3270566 - RNA, 17 nt, Vaccinia virus
aauaucaaacaauccaa

SEQ ID NO: 3270567 - RNA, 22 nt, Vaccinia virus
auguuaauaacaucagaaaaug

SEQ ID NO: 3270568 - RNA, 14 nt, Vaccinia virus
acgaugauauguuu

SEQ ID NO: 3270569 - RNA, 21 nt, Vaccinia virus
uuuccaaaucaguaacuaugu

SEQ ID NO: 3270570 - RNA, 22 nt, Vaccinia virus
auugauugaaaaugaaaauaua

SEQ ID NO: 3270571 - RNA, 12 nt, Vaccinia virus
auuucuauuuuu

SEQ ID NO: 3270572 - RNA, 22 nt, Vaccinia virus
gucauacuccaucaauuucaaa

SEQ ID NO: 3270573 - RNA, 16 nt, Vaccinia virus
auaacucuucgucaaa

SEQ ID NO: 3270574 - RNA, 19 nt, Vaccinia virus
cuaagagaaaucuuuagac

SEQ ID NO: 3270575 - RNA, 16 nt, Vaccinia virus
ugguaaaguaaaucau

SEQ ID NO: 3270576 - RNA, 16 nt, Vaccinia virus
auauuuaccaaagcaa

SEQ ID NO: 3270577 - RNA, 19 nt, Vaccinia virus
ucacuguauaaaaagaaug

SEQ ID NO: 3270578 - RNA, 15 nt, Vaccinia virus
cuuaaacagaugaga

SEQ ID NO: 3270579 - RNA, 15 nt, Vaccinia virus
accauauacguguuu

SEQ ID NO: 3270580 - RNA, 22 nt, Vaccinia virus
uaagaacaugucuucuauucua

SEQ ID NO: 3270581 - RNA, 21 nt, Vaccinia virus
aaaaauuauacuguaacacaa

SEQ ID NO: 3270582 - RNA, 16 nt, Vaccinia virus
auccuaggauccuuua

SEQ ID NO: 3270583 - RNA, 19 nt, Vaccinia virus
cucauguaaccuacuagaa

SEQ ID NO: 3270584 - RNA, 12 nt, Vaccinia virus
aguauuuucuau

SEQ ID NO: 3270585 - RNA, 18 nt, Vaccinia virus
cuucauuaaucuuuucug

SEQ ID NO: 3270586 - RNA, 19 nt, Vaccinia virus
cauuuuauaaauauauaau

SEQ ID NO: 3270587 - RNA, 22 nt, Vaccinia virus
uuuccaagugucaaauuccaaa

SEQ ID NO: 3270588 - RNA, 21 nt, Vaccinia virus
agaagagucauuaaaauaugc

SEQ ID NO: 3270589 - RNA, 20 nt, Vaccinia virus
ucuauuucaucguuuuguau

SEQ ID NO: 3270590 - RNA, 21 nt, Vaccinia virus
uucuauaccaauauuauucuu

SEQ ID NO: 3270591 - RNA, 16 nt, Vaccinia virus
ucuacacuauugaacg

SEQ ID NO: 3270592 - RNA, 22 nt, Vaccinia virus
auaggaucuccgaaucugaaaa

SEQ ID NO: 3270593 - RNA, 17 nt, Vaccinia virus
uacuuaacaucuaaaaa

SEQ ID NO: 3270594 - RNA, 14 nt, Vaccinia virus
aaaauauagcauag

SEQ ID NO: 3270595 - RNA, 21 nt, Vaccinia virus
ucacuaacugauaccaugaaa

SEQ ID NO: 3270596 - RNA, 20 nt, Vaccinia virus
ccaauucgguuauaaaugaa

SEQ ID NO: 3270597 - RNA, 18 nt, Vaccinia virus
uaucaaauagcucaauau

SEQ ID NO: 3270598 - RNA, 21 nt, Vaccinia virus
aaaaugcuccgcauaacucua

SEQ ID NO: 3270599 - RNA, 20 nt, Vaccinia virus
uaaacuauuuuaccagcauu

SEQ ID NO: 3270600 - RNA, 15 nt, Vaccinia virus
uuaauagauuaacau

SEQ ID NO: 3270601 - RNA, 17 nt, Vaccinia virus
cacacauuuaugauaug

SEQ ID NO: 3270602 - RNA, 20 nt, Vaccinia virus
auuaucuaaguccuguugau

SEQ ID NO: 3270603 - RNA, 16 nt, Vaccinia virus
augcacuaacgagaaa

SEQ ID NO: 3270604 - RNA, 12 nt, Vaccinia virus
aaagauguuaug

SEQ ID NO: 3270605 - RNA, 18 nt, Vaccinia virus
guuuaucgccuacaucau

SEQ ID NO: 3270606 - RNA, 20 nt, Vaccinia virus
uagauuuuuuaaaggaugau

SEQ ID NO: 3270607 - RNA, 17 nt, Vaccinia virus
ccuaugauguguuuaga

SEQ ID NO: 3270608 - RNA, 22 nt, Vaccinia virus
cauccuucucuucccucuucua

SEQ ID NO: 3270609 - RNA, 18 nt, Vaccinia virus
ucguacuauaccacauac

SEQ ID NO: 3270610 - RNA, 18 nt, Vaccinia virus
augcuagugcucaaacaa

SEQ ID NO: 3270611 - RNA, 17 nt, Vaccinia virus
ucucucaucuaucaaaa

SEQ ID NO: 3270612 - RNA, 22 nt, Vaccinia virus
gucaacaaguuggaugauauua

SEQ ID NO: 3270613 - RNA, 18 nt, Vaccinia virus
aagguguuaaaauuagaa

SEQ ID NO: 3270614 - RNA, 20 nt, Vaccinia virus
auguuaucaugaaauguuug

SEQ ID NO: 3270615 - RNA, 15 nt, Vaccinia virus
auauuauuaaucauu

SEQ ID NO: 3270616 - RNA, 14 nt, Vaccinia virus
cuagucuucucuga

SEQ ID NO: 3270617 - RNA, 18 nt, Vaccinia virus
ucaguguagauaguaaau

SEQ ID NO: 3270618 - RNA, 20 nt, Vaccinia virus
acauuaucaaaaagaacgau

SEQ ID NO: 3270619 - RNA, 16 nt, Vaccinia virus
ucauauuaaacauacu

SEQ ID NO: 3270620 - RNA, 16 nt, Vaccinia virus
auauaggugcaaaaaa

SEQ ID NO: 3270621 - RNA, 17 nt, Vaccinia virus
auguauccacaucaaag

SEQ ID NO: 3270622 - RNA, 14 nt, Vaccinia virus
gaaucauuuuugca

SEQ ID NO: 3270623 - RNA, 22 nt, Vaccinia virus
ucucuuuuucagaaauuaguuu

SEQ ID NO: 3270624 - RNA, 19 nt, Vaccinia virus
aaucacuacaauaauuaca

SEQ ID NO: 3270625 - RNA, 21 nt, Vaccinia virus
cuuaauauuguauuguuuaua

SEQ ID NO: 3270626 - RNA, 17 nt, Vaccinia virus
ucagcauuacuugauau

SEQ ID NO: 3270627 - RNA, 16 nt, Vaccinia virus
uacucuaguaaaguca

SEQ ID NO: 3270628 - RNA, 19 nt, Vaccinia virus
ucagauuauuaaguauaau

SEQ ID NO: 3270629 - RNA, 20 nt, Vaccinia virus
acuuuguaacuaguuuuaua

SEQ ID NO: 3270630 - RNA, 20 nt, Vaccinia virus
uauauguaagauguuuagaa

SEQ ID NO: 3270631 - RNA, 17 nt, Vaccinia virus
agaaugcuucagaauua

SEQ ID NO: 3270632 - RNA, 16 nt, Vaccinia virus
uauccucguucuaauu

SEQ ID NO: 3270633 - RNA, 21 nt, Vaccinia virus
augucgagauauauggacgau

SEQ ID NO: 3270634 - RNA, 22 nt, Vaccinia virus
aacugauuuuagcagaauauau

SEQ ID NO: 3270635 - RNA, 16 nt, Vaccinia virus
caugaaaugaugauau

SEQ ID NO: 3270636 - RNA, 14 nt, Vaccinia virus
uaacaauuaaugau

SEQ ID NO: 3270637 - RNA, 17 nt, Vaccinia virus
gcacauccaucaaagaa

SEQ ID NO: 3270638 - RNA, 13 nt, Vaccinia virus
uaugagaaugaau

SEQ ID NO: 3270639 - RNA, 22 nt, Vaccinia virus
caauaugaucacaaagaaagcu

SEQ ID NO: 3270640 - RNA, 18 nt, Vaccinia virus
uaacaugcgguucaaaau

SEQ ID NO: 3270641 - RNA, 21 nt, Vaccinia virus
cuaaaggagcaaauguuaaug

SEQ ID NO: 3270642 - RNA, 21 nt, Vaccinia virus
aucuacugauaaaacuggaag

SEQ ID NO: 3270643 - RNA, 14 nt, Vaccinia virus
aaauauguaauaau

SEQ ID NO: 3270644 - RNA, 21 nt, Vaccinia virus
ccuguuucuacuaacuuuuug

SEQ ID NO: 3270645 - RNA, 22 nt, Vaccinia virus
agccaaucaaaaagauuagaca

SEQ ID NO: 3270646 - RNA, 15 nt, Vaccinia virus
guaucuuauauacac

SEQ ID NO: 3270647 - RNA, 21 nt, Vaccinia virus
ugaaaucacuucaauaaauga

SEQ ID NO: 3270648 - RNA, 16 nt, Vaccinia virus
uaauucauaagaauuu

SEQ ID NO: 3270649 - RNA, 22 nt, Vaccinia virus
aggacugaguaccgauaucacu

SEQ ID NO: 3270650 - RNA, 14 nt, Vaccinia virus
auuauuuuaaaccu

SEQ ID NO: 3270651 - RNA, 17 nt, Vaccinia virus
cuugauacgcucauuaa

SEQ ID NO: 3270652 - RNA, 21 nt, Vaccinia virus
accaauagaaguuuucccaaa

SEQ ID NO: 3270653 - RNA, 14 nt, Vaccinia virus
ccacaauacgcaug

SEQ ID NO: 3270654 - RNA, 17 nt, Vaccinia virus
acauuauucuauuucga

SEQ ID NO: 3270655 - RNA, 20 nt, Vaccinia virus
uaaauauuuuaaaauuuaua

SEQ ID NO: 3270656 - RNA, 19 nt, Vaccinia virus
aaucuaguacgcgaaauaa

SEQ ID NO: 3270657 - RNA, 19 nt, Vaccinia virus
uccaccaucugccauaauc

SEQ ID NO: 3270658 - RNA, 22 nt, Vaccinia virus
uauuaucaaagucacaaagcaa

SEQ ID NO: 3270659 - RNA, 14 nt, Vaccinia virus
auauucuguucuau

SEQ ID NO: 3270660 - RNA, 19 nt, Vaccinia virus
gauucaucaagguauauaa

SEQ ID NO: 3270661 - RNA, 17 nt, Vaccinia virus
acgcuagauauacaguc

SEQ ID NO: 3270662 - RNA, 19 nt, Vaccinia virus
agaugugauggaaaaauga

SEQ ID NO: 3270663 - RNA, 19 nt, Vaccinia virus
uuaaauuucaguuuauguu

SEQ ID NO: 3270664 - RNA, 19 nt, Vaccinia virus
uguaugcaaccguaucaaa

SEQ ID NO: 3270665 - RNA, 21 nt, Vaccinia virus
uaacuuucuucugcaaacuua

SEQ ID NO: 3270666 - RNA, 17 nt, Vaccinia virus
accacgaauuaaaaaag

SEQ ID NO: 3270667 - RNA, 11 nt, Vaccinia virus
cgaagcaaacg

SEQ ID NO: 3270668 - RNA, 14 nt, Vaccinia virus
ucuagaacuaacaa

SEQ ID NO: 3270669 - RNA, 13 nt, Vaccinia virus
aucauuaaaugau

SEQ ID NO: 3270670 - RNA, 16 nt, Vaccinia virus
auagagcaaaauaauu

SEQ ID NO: 3270671 - RNA, 20 nt, Vaccinia virus
uguucauuaauaguauacac

SEQ ID NO: 3270672 - RNA, 21 nt, Vaccinia virus
gagacguaacaauguagcgca

SEQ ID NO: 3270673 - RNA, 16 nt, Vaccinia virus
aacguguauuaaauag

SEQ ID NO: 3270674 - RNA, 14 nt, Vaccinia virus
guaaaaaauaauau

SEQ ID NO: 3270675 - RNA, 19 nt, Vaccinia virus
augaauggaucaccguguu

SEQ ID NO: 3270676 - RNA, 17 nt, Vaccinia virus
agauaccaacauuaaaa

SEQ ID NO: 3270677 - RNA, 19 nt, Vaccinia virus
cuuaacaguuccacaaauu

SEQ ID NO: 3270678 - RNA, 15 nt, Vaccinia virus
gcauccguauaaaaa

SEQ ID NO: 3270679 - RNA, 14 nt, Vaccinia virus
guuuucucuauucu

SEQ ID NO: 3270680 - RNA, 15 nt, Vaccinia virus
ucuauauauacucuu

SEQ ID NO: 3270681 - RNA, 14 nt, Vaccinia virus
auuauacuagaguu

SEQ ID NO: 3270682 - RNA, 21 nt, Vaccinia virus
cugauuuuuuaugauuuugug

SEQ ID NO: 3270683 - RNA, 15 nt, Vaccinia virus
auugaucaaacauuu

SEQ ID NO: 3270684 - RNA, 22 nt, Vaccinia virus
agcuauagcauuguuauguauu

SEQ ID NO: 3270685 - RNA, 14 nt, Vaccinia virus
gauaaaguuaucau

SEQ ID NO: 3270686 - RNA, 13 nt, Vaccinia virus
cucauuacauagu

SEQ ID NO: 3270687 - RNA, 16 nt, Vaccinia virus
uuccagaugucauaau

SEQ ID NO: 3270688 - RNA, 18 nt, Vaccinia virus
agaaguuuucccaaaaaa

SEQ ID NO: 3270689 - RNA, 13 nt, Vaccinia virus
gucucuuaaagga

SEQ ID NO: 3270690 - RNA, 17 nt, Vaccinia virus
auucuuguucaauggau

SEQ ID NO: 3270691 - RNA, 21 nt, Vaccinia virus
uuguaacaucgguacggguau

SEQ ID NO: 3270692 - RNA, 21 nt, Vaccinia virus
acaaauauaugcaaaauaaua

SEQ ID NO: 3270693 - RNA, 23 nt, Vaccinia virus
uguuuuaaauaucaaccgcaaau

SEQ ID NO: 3270694 - RNA, 17 nt, Vaccinia virus
uauaacuucuaaucuug

SEQ ID NO: 3270695 - RNA, 21 nt, Vaccinia virus
uguccuugcguuucucugaua

SEQ ID NO: 3270696 - RNA, 11 nt, Vaccinia virus
uuacaaacauc

SEQ ID NO: 3270697 - RNA, 22 nt, Vaccinia virus
auauaaaauagaaaauaacaga

SEQ ID NO: 3270698 - RNA, 11 nt, Vaccinia virus
uguauuuccau

SEQ ID NO: 3270699 - RNA, 13 nt, Vaccinia virus
accgaaagacuau

SEQ ID NO: 3270700 - RNA, 14 nt, Vaccinia virus
guaaaaaaauuaga

SEQ ID NO: 3270701 - RNA, 17 nt, Vaccinia virus
ucgcauagcauaguuuu

SEQ ID NO: 3270702 - RNA, 19 nt, Vaccinia virus
aaaugaucggaucuaaaau

SEQ ID NO: 3270703 - RNA, 17 nt, Vaccinia virus
acuguacgauacauaau

SEQ ID NO: 3270704 - RNA, 19 nt, Vaccinia virus
cagaggaacgucauauauu

SEQ ID NO: 3270705 - RNA, 16 nt, Vaccinia virus
ggaucuaguauuauug

SEQ ID NO: 3270706 - RNA, 23 nt, Vaccinia virus
uauuaacacuaaaaaauaaacac

SEQ ID NO: 3270707 - RNA, 21 nt, Vaccinia virus
guaaaauguugaugauaucua

SEQ ID NO: 3270708 - RNA, 18 nt, Vaccinia virus
gcugauuauuuauuucuu

SEQ ID NO: 3270709 - RNA, 17 nt, Vaccinia virus
uuaaccuaacuaaaaga

SEQ ID NO: 3270710 - RNA, 21 nt, Vaccinia virus
uguucauuaacgauaucuugc

SEQ ID NO: 3270711 - RNA, 17 nt, Vaccinia virus
aucuauuauugaugcaa

SEQ ID NO: 3270712 - RNA, 14 nt, Vaccinia virus
gaagaagaaaacaa

SEQ ID NO: 3270713 - RNA, 14 nt, Vaccinia virus
auuaaaaccuaauu

SEQ ID NO: 3270714 - RNA, 19 nt, Vaccinia virus
uaacucgguaucuacuuua

SEQ ID NO: 3270715 - RNA, 17 nt, Vaccinia virus
gaaaaugcagaaaugau

SEQ ID NO: 3270716 - RNA, 14 nt, Vaccinia virus
gucaggaaauguau

SEQ ID NO: 3270717 - RNA, 17 nt, Vaccinia virus
uuuaauuggacagauau

SEQ ID NO: 3270718 - RNA, 12 nt, Vaccinia virus
auaccaaaauuc

SEQ ID NO: 3270719 - RNA, 14 nt, Vaccinia virus
aauguagaaauuga

SEQ ID NO: 3270720 - RNA, 12 nt, Vaccinia virus
uaacaucauuau

SEQ ID NO: 3270721 - RNA, 20 nt, Vaccinia virus
uaguuuuuuuguuuccuugu

SEQ ID NO: 3270722 - RNA, 16 nt, Vaccinia virus
caugacguaaauguaa

SEQ ID NO: 3270723 - RNA, 14 nt, Vaccinia virus
auacuuaaaaaugg

SEQ ID NO: 3270724 - RNA, 20 nt, Vaccinia virus
aucacaagaaguuagaaagu

SEQ ID NO: 3270725 - RNA, 16 nt, Vaccinia virus
auagaauuuauaacau

SEQ ID NO: 3270726 - RNA, 22 nt, Vaccinia virus
uacgcaaauaccgaucaacaaa

SEQ ID NO: 3270727 - RNA, 17 nt, Vaccinia virus
auaaugacgauaacauu

SEQ ID NO: 3270728 - RNA, 15 nt, Vaccinia virus
auaucuauaggaaag

SEQ ID NO: 3270729 - RNA, 13 nt, Vaccinia virus
auuuaaaaugaua

SEQ ID NO: 3270730 - RNA, 15 nt, Vaccinia virus
uuaccucuacaaaua

SEQ ID NO: 3270731 - RNA, 19 nt, Vaccinia virus
uuauaucguguucauuaac

SEQ ID NO: 3270732 - RNA, 23 nt, Vaccinia virus
agacgacgacaauaguguucuaa

SEQ ID NO: 3270733 - RNA, 18 nt, Vaccinia virus
ugaugcaaauagcagaua

SEQ ID NO: 3270734 - RNA, 14 nt, Vaccinia virus
uuuagauuuauuuu

SEQ ID NO: 3270735 - RNA, 12 nt, Vaccinia virus
agauaaaacaag

SEQ ID NO: 3270736 - RNA, 13 nt, Vaccinia virus
guaauuaaauguu

SEQ ID NO: 3270737 - RNA, 19 nt, Vaccinia virus
aauguuugacugaauauau

SEQ ID NO: 3270738 - RNA, 19 nt, Vaccinia virus
uuauugauugaaaaugaaa

SEQ ID NO: 3270739 - RNA, 15 nt, Vaccinia virus
aauugcgaauguuuu

SEQ ID NO: 3270740 - RNA, 19 nt, Vaccinia virus
uucacaugauguagugaua

SEQ ID NO: 3270741 - RNA, 19 nt, Vaccinia virus
uucccaaauaaucauucau

SEQ ID NO: 3270742 - RNA, 17 nt, Vaccinia virus
agaaauauacagcaaug

SEQ ID NO: 3270743 - RNA, 18 nt, Vaccinia virus
gccuccacuagaagagaa

SEQ ID NO: 3270744 - RNA, 22 nt, Vaccinia virus
uaacuccaggccguuuguuucc

SEQ ID NO: 3270745 - RNA, 16 nt, Vaccinia virus
auuucaacgucuaaug

SEQ ID NO: 3270746 - RNA, 17 nt, Vaccinia virus
cugaauauagaacauca

SEQ ID NO: 3270747 - RNA, 19 nt, Vaccinia virus
agaaguaacgccauauuac

SEQ ID NO: 3270748 - RNA, 22 nt, Vaccinia virus
agauaucauaaaugaaauagau

SEQ ID NO: 3270749 - RNA, 20 nt, Vaccinia virus
auguuccauuuauaagaaau

SEQ ID NO: 3270750 - RNA, 19 nt, Vaccinia virus
uuuagaauauauguaugua

SEQ ID NO: 3270751 - RNA, 17 nt, Vaccinia virus
guagaacguaaauuagu

SEQ ID NO: 3270752 - RNA, 20 nt, Vaccinia virus
cuuuguggaugaugauaaaa

SEQ ID NO: 3270753 - RNA, 21 nt, Vaccinia virus
auaucuuagugcaaaaguaua

SEQ ID NO: 3270754 - RNA, 23 nt, Vaccinia virus
accucuuauuggucagaaauauu

SEQ ID NO: 3270755 - RNA, 17 nt, Vaccinia virus
auaacauucuuaaacaa

SEQ ID NO: 3270756 - RNA, 21 nt, Vaccinia virus
aguugggauaguauuuuucua

SEQ ID NO: 3270757 - RNA, 17 nt, Vaccinia virus
aaugcggauuuagaaaa

SEQ ID NO: 3270758 - RNA, 13 nt, Vaccinia virus
uauuuauacuacu

SEQ ID NO: 3270759 - RNA, 14 nt, Vaccinia virus
caucaaaaaacaac

SEQ ID NO: 3270760 - RNA, 14 nt, Vaccinia virus
ugcgaucugaauaa

SEQ ID NO: 3270761 - RNA, 16 nt, Vaccinia virus
agauacguauuagaua

SEQ ID NO: 3270762 - RNA, 15 nt, Vaccinia virus
aguuaucaaguuugu

SEQ ID NO: 3270763 - RNA, 20 nt, Vaccinia virus
auauugaugugucuguuuau

SEQ ID NO: 3270764 - RNA, 17 nt, Vaccinia virus
uuaucgauucaucuaau

SEQ ID NO: 3270765 - RNA, 15 nt, Vaccinia virus
cucauuaaaacuucu

SEQ ID NO: 3270766 - RNA, 19 nt, Vaccinia virus
uguacgauggauucauccu

SEQ ID NO: 3270767 - RNA, 18 nt, Vaccinia virus
uauuaaaauuauuucuaa

SEQ ID NO: 3270768 - RNA, 23 nt, Vaccinia virus
ucccaauuaccaacuagaagucu

SEQ ID NO: 3270769 - RNA, 15 nt, Vaccinia virus
aauucuuaugauaua

SEQ ID NO: 3270770 - RNA, 17 nt, Vaccinia virus
gacacuauuauuauuga

SEQ ID NO: 3270771 - RNA, 13 nt, Vaccinia virus
aaauagauguuag

SEQ ID NO: 3270772 - RNA, 12 nt, Vaccinia virus
aaaauuagaaag

SEQ ID NO: 3270773 - RNA, 22 nt, Vaccinia virus
agaacucucuucauuacuauau

SEQ ID NO: 3270774 - RNA, 16 nt, Vaccinia virus
aacaaacuauacaaga

SEQ ID NO: 3270775 - RNA, 15 nt, Vaccinia virus
aauuaaugagauugu

SEQ ID NO: 3270776 - RNA, 17 nt, Vaccinia virus
cauggauuuuauauaga

SEQ ID NO: 3270777 - RNA, 16 nt, Vaccinia virus
aacaguucuaccacca

SEQ ID NO: 3270778 - RNA, 13 nt, Vaccinia virus
acaaaaaaguuau

SEQ ID NO: 3270779 - RNA, 18 nt, Vaccinia virus
agaucaaccaaaaaggag

SEQ ID NO: 3270780 - RNA, 19 nt, Vaccinia virus
uacuaauuacuaaaucugu

SEQ ID NO: 3270781 - RNA, 20 nt, Vaccinia virus
cauuuucccaaauaucuuua

SEQ ID NO: 3270782 - RNA, 22 nt, Vaccinia virus
ucuacaaauagagauaaaacaa

SEQ ID NO: 3270783 - RNA, 22 nt, Vaccinia virus
uugaucucaucauuccauaauu

SEQ ID NO: 3270784 - RNA, 22 nt, Vaccinia virus
gaauacacuccucagauuuaua

SEQ ID NO: 3270785 - RNA, 20 nt, Vaccinia virus
ugaaaugauucucucaacau

SEQ ID NO: 3270786 - RNA, 14 nt, Vaccinia virus
acauuuuccauuua

SEQ ID NO: 3270787 - RNA, 20 nt, Vaccinia virus
gaucucgagaaauaauaaga

SEQ ID NO: 3270788 - RNA, 17 nt, Vaccinia virus
acuaauucauuuucaau

SEQ ID NO: 3270789 - RNA, 19 nt, Vaccinia virus
uaaguaauaaaucaacuau

SEQ ID NO: 3270790 - RNA, 17 nt, Vaccinia virus
aaacuuccguuuaaaaa

SEQ ID NO: 3270791 - RNA, 14 nt, Vaccinia virus
aauguuaaaacuac

SEQ ID NO: 3270792 - RNA, 18 nt, Vaccinia virus
auuuuugcaucauuuacg

SEQ ID NO: 3270793 - RNA, 17 nt, Vaccinia virus
uagaugucgaagacuua

SEQ ID NO: 3270794 - RNA, 19 nt, Vaccinia virus
guauacaccaacaguauga

SEQ ID NO: 3270795 - RNA, 21 nt, Vaccinia virus
ucuuugauuaaugauuuagaa

SEQ ID NO: 3270796 - RNA, 18 nt, Vaccinia virus
gauaauuucguuaaaaca

SEQ ID NO: 3270797 - RNA, 14 nt, Vaccinia virus
aguauaauauuuaa

SEQ ID NO: 3270798 - RNA, 17 nt, Vaccinia virus
agaaaaaaaauugaauu

SEQ ID NO: 3270799 - RNA, 19 nt, Vaccinia virus
aaacauuguucaugauaua

SEQ ID NO: 3270800 - RNA, 20 nt, Vaccinia virus
uuguuuaaccacugcaugau

SEQ ID NO: 3270801 - RNA, 15 nt, Vaccinia virus
augacauuuauucau

SEQ ID NO: 3270802 - RNA, 16 nt, Vaccinia virus
cuauaaauagaucucu

SEQ ID NO: 3270803 - RNA, 21 nt, Vaccinia virus
uaguaucaauaacgcaaucau

SEQ ID NO: 3270804 - RNA, 19 nt, Vaccinia virus
cagucuugaaacagcaucu

SEQ ID NO: 3270805 - RNA, 19 nt, Vaccinia virus
uaaucauauaaauguuuaa

SEQ ID NO: 3270806 - RNA, 20 nt, Vaccinia virus
aaacuagagaaacuuaguac

SEQ ID NO: 3270807 - RNA, 15 nt, Vaccinia virus
acuucauuaaucuuu

SEQ ID NO: 3270808 - RNA, 21 nt, Vaccinia virus
uacucagauucaguuucucau

SEQ ID NO: 3270809 - RNA, 15 nt, Vaccinia virus
gaagugguuaaucuu

SEQ ID NO: 3270810 - RNA, 16 nt, Vaccinia virus
cuaugauuaaaucguu

SEQ ID NO: 3270811 - RNA, 22 nt, Vaccinia virus
gacacucuauaucuagaaauaa

SEQ ID NO: 3270812 - RNA, 21 nt, Vaccinia virus
gcauuaauacuguuuucuuag

SEQ ID NO: 3270813 - RNA, 23 nt, Vaccinia virus
uaaucaaaauugucuaugauguc

SEQ ID NO: 3270814 - RNA, 21 nt, Vaccinia virus
ugauagacaagauauauacac

SEQ ID NO: 3270815 - RNA, 21 nt, Vaccinia virus
aaucgauaaaaccaugaaaua

SEQ ID NO: 3270816 - RNA, 14 nt, Vaccinia virus
uauggaaaaacuug

SEQ ID NO: 3270817 - RNA, 13 nt, Vaccinia virus
ucguagauuuuaa

SEQ ID NO: 3270818 - RNA, 22 nt, Vaccinia virus
auaacagcuuagauuuaacguu

SEQ ID NO: 3270819 - RNA, 15 nt, Vaccinia virus
ccaauacauguuuua

SEQ ID NO: 3270820 - RNA, 21 nt, Vaccinia virus
uguuaugaaaccauacuaaua

SEQ ID NO: 3270821 - RNA, 18 nt, Vaccinia virus
agguauacacaaaaagaa

SEQ ID NO: 3270822 - RNA, 20 nt, Vaccinia virus
augcggaaccucgagaaugu

SEQ ID NO: 3270823 - RNA, 13 nt, Vaccinia virus
uucauaacaguga

SEQ ID NO: 3270824 - RNA, 18 nt, Vaccinia virus
ggaacgugauaguuucuc

SEQ ID NO: 3270825 - RNA, 17 nt, Vaccinia virus
ucgccgucgcuagauaa

SEQ ID NO: 3270826 - RNA, 13 nt, Vaccinia virus
gcucuaucuuuua

SEQ ID NO: 3270827 - RNA, 12 nt, Vaccinia virus
acucuaaaauau

SEQ ID NO: 3270828 - RNA, 14 nt, Vaccinia virus
gcaaugaauaucua

SEQ ID NO: 3270829 - RNA, 23 nt, Vaccinia virus
ucuaccaaagaaagaguuugauu

SEQ ID NO: 3270830 - RNA, 16 nt, Vaccinia virus
ugugaugauuguacac

SEQ ID NO: 3270831 - RNA, 14 nt, Vaccinia virus
auacucuaugaaug

SEQ ID NO: 3270832 - RNA, 15 nt, Vaccinia virus
uauaacauuaauauu

SEQ ID NO: 3270833 - RNA, 15 nt, Vaccinia virus
guuuucgauacuuuu

SEQ ID NO: 3270834 - RNA, 13 nt, Vaccinia virus
auaacaaagaaag

SEQ ID NO: 3270835 - RNA, 20 nt, Vaccinia virus
acaagauuuccaaucuuuga

SEQ ID NO: 3270836 - RNA, 20 nt, Vaccinia virus
agauccucucuuaaaugaau

SEQ ID NO: 3270837 - RNA, 20 nt, Vaccinia virus
ucgauuccguccaagaugau

SEQ ID NO: 3270838 - RNA, 15 nt, Vaccinia virus
acaauaacuacauau

SEQ ID NO: 3270839 - RNA, 17 nt, Vaccinia virus
agaucauuaaauguuuc

SEQ ID NO: 3270840 - RNA, 14 nt, Vaccinia virus
auauucaucagaua

SEQ ID NO: 3270841 - RNA, 22 nt, Vaccinia virus
gaaaaaaaauugaauugaugau

SEQ ID NO: 3270842 - RNA, 15 nt, Vaccinia virus
uaucgauguggagau

SEQ ID NO: 3270843 - RNA, 15 nt, Vaccinia virus
aaaauggacguagaa

SEQ ID NO: 3270844 - RNA, 15 nt, Vaccinia virus
uaguuuaucaaaaau

SEQ ID NO: 3270845 - RNA, 19 nt, Vaccinia virus
gacagacuacguagacugu

SEQ ID NO: 3270846 - RNA, 20 nt, Vaccinia virus
uauaugaauaugauuucaga

SEQ ID NO: 3270847 - RNA, 13 nt, Vaccinia virus
uuuauuucuaauu

SEQ ID NO: 3270848 - RNA, 13 nt, Vaccinia virus
caucuaucaucuc

SEQ ID NO: 3270849 - RNA, 12 nt, Vaccinia virus
cuauaucuucuu

SEQ ID NO: 3270850 - RNA, 15 nt, Vaccinia virus
accaucccacucuag

SEQ ID NO: 3270851 - RNA, 13 nt, Vaccinia virus
uagaucggaugau

SEQ ID NO: 3270852 - RNA, 18 nt, Vaccinia virus
ucuugcacgcguacauuu

SEQ ID NO: 3270853 - RNA, 19 nt, Vaccinia virus
aucuauaauucuagcuaau

SEQ ID NO: 3270854 - RNA, 17 nt, Vaccinia virus
aacucuugcuacaaaau

SEQ ID NO: 3270855 - RNA, 18 nt, Vaccinia virus
aucgucuaaaagaauugc

SEQ ID NO: 3270856 - RNA, 16 nt, Vaccinia virus
cuagagacaaugaaaa

SEQ ID NO: 3270857 - RNA, 13 nt, Vaccinia virus
uuaaaucauuacu

SEQ ID NO: 3270858 - RNA, 21 nt, Vaccinia virus
cuaguacuuguauguguuaua

SEQ ID NO: 3270859 - RNA, 13 nt, Vaccinia virus
guauauguuucua

SEQ ID NO: 3270860 - RNA, 16 nt, Vaccinia virus
acauaccguuagauaa

SEQ ID NO: 3270861 - RNA, 13 nt, Vaccinia virus
acguuaacagaga

SEQ ID NO: 3270862 - RNA, 21 nt, Vaccinia virus
aguauacacgcuaaaauaacu

SEQ ID NO: 3270863 - RNA, 16 nt, Vaccinia virus
uauaggcgguguauuu

SEQ ID NO: 3270864 - RNA, 15 nt, Vaccinia virus
aaucuucuuauaaga

SEQ ID NO: 3270865 - RNA, 21 nt, Vaccinia virus
ggcaauaauugcgaauguuuu

SEQ ID NO: 3270866 - RNA, 18 nt, Vaccinia virus
auuaacuaucuguaaaag

SEQ ID NO: 3270867 - RNA, 17 nt, Vaccinia virus
gcuaaggaguuuaagaa

SEQ ID NO: 3270868 - RNA, 23 nt, Vaccinia virus
agauagaucacacauuaugaacu

SEQ ID NO: 3270869 - RNA, 20 nt, Vaccinia virus
caucgaugauacauuucauc

SEQ ID NO: 3270870 - RNA, 21 nt, Vaccinia virus
aauauagguauauuuauucca

SEQ ID NO: 3270871 - RNA, 20 nt, Vaccinia virus
ugaacuauuucuugaaugag

SEQ ID NO: 3270872 - RNA, 19 nt, Vaccinia virus
agcauacgaauuacaauaa

SEQ ID NO: 3270873 - RNA, 18 nt, Vaccinia virus
acaaauuuauuuauuaac

SEQ ID NO: 3270874 - RNA, 18 nt, Vaccinia virus
uuaaauuuuuuuauuaau

SEQ ID NO: 3270875 - RNA, 21 nt, Vaccinia virus
gcacaaucguuccaugauggg

SEQ ID NO: 3270876 - RNA, 17 nt, Vaccinia virus
uucauccauuuacaacu

SEQ ID NO: 3270877 - RNA, 20 nt, Vaccinia virus
auagauggauaauggaagau

SEQ ID NO: 3270878 - RNA, 12 nt, Vaccinia virus
cuucauuucuaa

SEQ ID NO: 3270879 - RNA, 15 nt, Vaccinia virus
uaucuuuaacauaag

SEQ ID NO: 3270880 - RNA, 21 nt, Vaccinia virus
agacaaucaucuuggagcaac

SEQ ID NO: 3270881 - RNA, 14 nt, Vaccinia virus
ucguuuucuacaau

SEQ ID NO: 3270882 - RNA, 17 nt, Vaccinia virus
aaucucuguuauuuccu

SEQ ID NO: 3270883 - RNA, 22 nt, Vaccinia virus
auaaucauuacuaacuuuauca

SEQ ID NO: 3270884 - RNA, 23 nt, Vaccinia virus
ugauucuagucccgaagaauuuc

SEQ ID NO: 3270885 - RNA, 13 nt, Vaccinia virus
uggaaaugucaua

SEQ ID NO: 3270886 - RNA, 14 nt, Vaccinia virus
aggagauauugaaa

SEQ ID NO: 3270887 - RNA, 19 nt, Vaccinia virus
gagaguagauaucauuaau

SEQ ID NO: 3270888 - RNA, 16 nt, Vaccinia virus
uuuacagauauauuca

SEQ ID NO: 3270889 - RNA, 19 nt, Vaccinia virus
auauccuccuuuaaaauua

SEQ ID NO: 3270890 - RNA, 13 nt, Vaccinia virus
uauuaaaacugac

SEQ ID NO: 3270891 - RNA, 13 nt, Vaccinia virus
caugaaagaaaga

SEQ ID NO: 3270892 - RNA, 21 nt, Vaccinia virus
aauuugcugacugcauguacu

SEQ ID NO: 3270893 - RNA, 22 nt, Vaccinia virus
ugccguuuauaggucuagccac

SEQ ID NO: 3270894 - RNA, 18 nt, Vaccinia virus
uacacaucagcaucuuga

SEQ ID NO: 3270895 - RNA, 20 nt, Vaccinia virus
uccuagcaucagcaaaacag

SEQ ID NO: 3270896 - RNA, 14 nt, Vaccinia virus
cgccuuuauuucca

SEQ ID NO: 3270897 - RNA, 18 nt, Vaccinia virus
uuuaccgaacaggcauuu

SEQ ID NO: 3270898 - RNA, 16 nt, Vaccinia virus
ccgaggaaacgaaaga

SEQ ID NO: 3270899 - RNA, 22 nt, Vaccinia virus
aauugauucuuauucacuauau

SEQ ID NO: 3270900 - RNA, 21 nt, Vaccinia virus
uagagcccacguuuaaacauu

SEQ ID NO: 3270901 - RNA, 17 nt, Vaccinia virus
auucuucauucugcaua

SEQ ID NO: 3270902 - RNA, 12 nt, Vaccinia virus
aauacuaauuca

SEQ ID NO: 3270903 - RNA, 21 nt, Vaccinia virus
aucuagcgucgacaucuauau

SEQ ID NO: 3270904 - RNA, 14 nt, Vaccinia virus
guauuaugaugaau

SEQ ID NO: 3270905 - RNA, 16 nt, Vaccinia virus
aacuuuaucacaauau

SEQ ID NO: 3270906 - RNA, 17 nt, Vaccinia virus
ucuauguuuuuagauuu

SEQ ID NO: 3270907 - RNA, 14 nt, Vaccinia virus
aaauuauccuauca

SEQ ID NO: 3270908 - RNA, 14 nt, Vaccinia virus
ugaaccauuauucg

SEQ ID NO: 3270909 - RNA, 19 nt, Vaccinia virus
acguucggagacaauaaag

SEQ ID NO: 3270910 - RNA, 17 nt, Vaccinia virus
aaaguucauaaucucau

SEQ ID NO: 3270911 - RNA, 21 nt, Vaccinia virus
acaagaaucauccaaguggau

SEQ ID NO: 3270912 - RNA, 23 nt, Vaccinia virus
uuuuucguuuacaaaaucaaaua

SEQ ID NO: 3270913 - RNA, 20 nt, Vaccinia virus
cuuccagauaauguucucuu

SEQ ID NO: 3270914 - RNA, 15 nt, Vaccinia virus
gaucauguagaaaac

SEQ ID NO: 3270915 - RNA, 22 nt, Vaccinia virus
ucacaaguaugaagaaaaaugu

SEQ ID NO: 3270916 - RNA, 12 nt, Vaccinia virus
accacaauaauc

SEQ ID NO: 3270917 - RNA, 18 nt, Vaccinia virus
uguucuuaacuacauuca

SEQ ID NO: 3270918 - RNA, 20 nt, Vaccinia virus
auaaaagucuauuuguuuau

SEQ ID NO: 3270919 - RNA, 19 nt, Vaccinia virus
aauuaucacauauuaaaaa

SEQ ID NO: 3270920 - RNA, 22 nt, Vaccinia virus
uaacaucuuuguaaacagauau

SEQ ID NO: 3270921 - RNA, 17 nt, Vaccinia virus
ccauauaucuguaucau

SEQ ID NO: 3270922 - RNA, 17 nt, Vaccinia virus
cauugggaaacauuaca

SEQ ID NO: 3270923 - RNA, 13 nt, Vaccinia virus
ccaaauaucuuua

SEQ ID NO: 3270924 - RNA, 13 nt, Vaccinia virus
agcaagaaagaua

SEQ ID NO: 3270925 - RNA, 13 nt, Vaccinia virus
aucuaauauaauu

SEQ ID NO: 3270926 - RNA, 19 nt, Vaccinia virus
aaggaauaaaauaugaaau

SEQ ID NO: 3270927 - RNA, 18 nt, Vaccinia virus
auauuaauacacauaaug

SEQ ID NO: 3270928 - RNA, 19 nt, Vaccinia virus
uacucuagauaaaaucacu

SEQ ID NO: 3270929 - RNA, 16 nt, Vaccinia virus
agacuguuuguagaau

SEQ ID NO: 3270930 - RNA, 22 nt, Vaccinia virus
ucguaauuggaaaaauaguguu

SEQ ID NO: 3270931 - RNA, 13 nt, Vaccinia virus
auuaugagaauga

SEQ ID NO: 3270932 - RNA, 16 nt, Vaccinia virus
cuguauuccaauuagu

SEQ ID NO: 3270933 - RNA, 13 nt, Vaccinia virus
auuaguuaaauau

SEQ ID NO: 3270934 - RNA, 21 nt, Vaccinia virus
cugccauggauggaaacauug

SEQ ID NO: 3270935 - RNA, 22 nt, Vaccinia virus
cauugaugucguuauucugaaa

SEQ ID NO: 3270936 - RNA, 21 nt, Vaccinia virus
augauuuuccuucuaaaguaa

SEQ ID NO: 3270937 - RNA, 20 nt, Vaccinia virus
gauaaauucguaauaaucug

SEQ ID NO: 3270938 - RNA, 20 nt, Vaccinia virus
uaauagcguuaacuaucaaa

SEQ ID NO: 3270939 - RNA, 15 nt, Vaccinia virus
uacccaauaaaaugu

SEQ ID NO: 3270940 - RNA, 17 nt, Vaccinia virus
guauccuugauuauguu

SEQ ID NO: 3270941 - RNA, 17 nt, Vaccinia virus
ucguaagauaaaguuua

SEQ ID NO: 3270942 - RNA, 13 nt, Vaccinia virus
gaauaaguuuauu

SEQ ID NO: 3270943 - RNA, 13 nt, Vaccinia virus
agucgucaagcau

SEQ ID NO: 3270944 - RNA, 11 nt, Vaccinia virus
gggaaaugaua

SEQ ID NO: 3270945 - RNA, 17 nt, Vaccinia virus
auaguuguuauaaagga

SEQ ID NO: 3270946 - RNA, 17 nt, Vaccinia virus
uaucaauauuaacaguu

SEQ ID NO: 3270947 - RNA, 13 nt, Vaccinia virus
cgauacuagauuu

SEQ ID NO: 3270948 - RNA, 20 nt, Vaccinia virus
cuaaagacucuaaaugguug

SEQ ID NO: 3270949 - RNA, 19 nt, Vaccinia virus
cuauuauuugcgaggauga

SEQ ID NO: 3270950 - RNA, 13 nt, Vaccinia virus
cacuuauuucaug

SEQ ID NO: 3270951 - RNA, 16 nt, Vaccinia virus
caaaaugcaagcaucu

SEQ ID NO: 3270952 - RNA, 22 nt, Vaccinia virus
ucaugucugguaauucauauag

SEQ ID NO: 3270953 - RNA, 15 nt, Vaccinia virus
ucaauagauuauaca

SEQ ID NO: 3270954 - RNA, 21 nt, Vaccinia virus
uacaucaugccauuaagaaac

SEQ ID NO: 3270955 - RNA, 20 nt, Vaccinia virus
agacaaucauuuacuaagga

SEQ ID NO: 3270956 - RNA, 14 nt, Vaccinia virus
auauuuccauuuau

SEQ ID NO: 3270957 - RNA, 17 nt, Vaccinia virus
uuucacuuuaucucauu

SEQ ID NO: 3270958 - RNA, 14 nt, Vaccinia virus
uguacaccauagca

SEQ ID NO: 3270959 - RNA, 20 nt, Vaccinia virus
agacuuuauaauuucaucua

SEQ ID NO: 3270960 - RNA, 14 nt, Vaccinia virus
auuacuacugaaga

SEQ ID NO: 3270961 - RNA, 14 nt, Vaccinia virus
aaauuauucguuua

SEQ ID NO: 3270962 - RNA, 15 nt, Vaccinia virus
uucagaaaauaaucc

SEQ ID NO: 3270963 - RNA, 18 nt, Vaccinia virus
ucuauaauaucuuauucu

SEQ ID NO: 3270964 - RNA, 12 nt, Vaccinia virus
cauaaacauguc

SEQ ID NO: 3270965 - RNA, 16 nt, Vaccinia virus
aaaaucauugggauuu

SEQ ID NO: 3270966 - RNA, 17 nt, Vaccinia virus
ugucuguccgaauguau

SEQ ID NO: 3270967 - RNA, 14 nt, Vaccinia virus
ucguuaucucagaa

SEQ ID NO: 3270968 - RNA, 14 nt, Vaccinia virus
uaggaguaucuauu

SEQ ID NO: 3270969 - RNA, 19 nt, Vaccinia virus
auuagugaugaauugaaaa

SEQ ID NO: 3270970 - RNA, 14 nt, Vaccinia virus
ccaugauaaauuau

SEQ ID NO: 3270971 - RNA, 14 nt, Vaccinia virus
uauaaaguguaugu

SEQ ID NO: 3270972 - RNA, 18 nt, Vaccinia virus
cgaugauauguuaaauau

SEQ ID NO: 3270973 - RNA, 18 nt, Vaccinia virus
aaucaaugauagacuaga

SEQ ID NO: 3270974 - RNA, 14 nt, Vaccinia virus
agauauagauguua

SEQ ID NO: 3270975 - RNA, 15 nt, Vaccinia virus
aaacuuuauuaucca

SEQ ID NO: 3270976 - RNA, 20 nt, Vaccinia virus
aguaaguauuuauaaaacuc

SEQ ID NO: 3270977 - RNA, 23 nt, Vaccinia virus
ucaucgacuguacgauacauaau

SEQ ID NO: 3270978 - RNA, 13 nt, Vaccinia virus
ugucuaaaucucu

SEQ ID NO: 3270979 - RNA, 21 nt, Vaccinia virus
uugguauuacuauauaguaua

SEQ ID NO: 3270980 - RNA, 15 nt, Vaccinia virus
uagauuuauuugaua

SEQ ID NO: 3270981 - RNA, 21 nt, Vaccinia virus
uguuuauacaauccaugauau

SEQ ID NO: 3270982 - RNA, 14 nt, Vaccinia virus
caauauuaucaucu

SEQ ID NO: 3270983 - RNA, 14 nt, Vaccinia virus
uaguguuacaaaac

SEQ ID NO: 3270984 - RNA, 22 nt, Vaccinia virus
acagugcaaccucuauuggaua

SEQ ID NO: 3270985 - RNA, 15 nt, Vaccinia virus
uccguucucugaaua

SEQ ID NO: 3270986 - RNA, 12 nt, Vaccinia virus
ccuguguuuaua

SEQ ID NO: 3270987 - RNA, 20 nt, Vaccinia virus
auacaaauuuuaagaaaugg

SEQ ID NO: 3270988 - RNA, 20 nt, Vaccinia virus
acgaacauuuauaucauuug

SEQ ID NO: 3270989 - RNA, 15 nt, Vaccinia virus
gcauuucuaauacau

SEQ ID NO: 3270990 - RNA, 15 nt, Vaccinia virus
uaacgaggacuuauu

SEQ ID NO: 3270991 - RNA, 16 nt, Vaccinia virus
ucaauaaucaaccauc

SEQ ID NO: 3270992 - RNA, 13 nt, Vaccinia virus
uacuuacaucauu

SEQ ID NO: 3270993 - RNA, 16 nt, Vaccinia virus
auuagcgaacauauau

SEQ ID NO: 3270994 - RNA, 15 nt, Vaccinia virus
aucauauauagaaug

SEQ ID NO: 3270995 - RNA, 22 nt, Vaccinia virus
caacuacggcguccgcuuuagu

SEQ ID NO: 3270996 - RNA, 21 nt, Vaccinia virus
acaauacagaagauagcaaag

SEQ ID NO: 3270997 - RNA, 19 nt, Vaccinia virus
ugacauuuuggauucuguu

SEQ ID NO: 3270998 - RNA, 17 nt, Vaccinia virus
acuaaugacaauaauua

SEQ ID NO: 3270999 - RNA, 18 nt, Vaccinia virus
uacgguugauucaaaaau

SEQ ID NO: 3271000 - RNA, 12 nt, Vaccinia virus
acuauauccaug

SEQ ID NO: 3271001 - RNA, 21 nt, Vaccinia virus
uauaugugcgagaauauccuc

SEQ ID NO: 3271002 - RNA, 23 nt, Vaccinia virus
agaagaauucaagucaggaacua

SEQ ID NO: 3271003 - RNA, 13 nt, Vaccinia virus
gaacgccauaaua

SEQ ID NO: 3271004 - RNA, 19 nt, Vaccinia virus
uagauugguacgaaauaua

SEQ ID NO: 3271005 - RNA, 12 nt, Vaccinia virus
gacgauauuaac

SEQ ID NO: 3271006 - RNA, 20 nt, Vaccinia virus
aagaacacacgaacaucuuu

SEQ ID NO: 3271007 - RNA, 20 nt, Vaccinia virus
aaagauucuauaauaaugaa

SEQ ID NO: 3271008 - RNA, 16 nt, Vaccinia virus
gucaauugaguuuaua

SEQ ID NO: 3271009 - RNA, 13 nt, Vaccinia virus
cuuaucaauaaca

SEQ ID NO: 3271010 - RNA, 15 nt, Vaccinia virus
uaaucgaguacacca

SEQ ID NO: 3271011 - RNA, 17 nt, Vaccinia virus
acaauacggaauaucua

SEQ ID NO: 3271012 - RNA, 21 nt, Vaccinia virus
auacuaccaaccuacacuauu

SEQ ID NO: 3271013 - RNA, 22 nt, Vaccinia virus
aagauaugguaaaauuaaauag

SEQ ID NO: 3271014 - RNA, 16 nt, Vaccinia virus
cguuagaucuauuuua

SEQ ID NO: 3271015 - RNA, 23 nt, Vaccinia virus
ugagaauccgcuacauauuauug

SEQ ID NO: 3271016 - RNA, 23 nt, Vaccinia virus
ugacuguauccacgcuagagaua

SEQ ID NO: 3271017 - RNA, 17 nt, Vaccinia virus
uuucuauuucuuucaug

SEQ ID NO: 3271018 - RNA, 19 nt, Vaccinia virus
auuucaacagacuguuuau

SEQ ID NO: 3271019 - RNA, 23 nt, Vaccinia virus
aagcaugugucacuaugauaaac

SEQ ID NO: 3271020 - RNA, 15 nt, Vaccinia virus
aaucuauuagaauug

SEQ ID NO: 3271021 - RNA, 18 nt, Vaccinia virus
acuucuaacaaacaucuc

SEQ ID NO: 3271022 - RNA, 17 nt, Vaccinia virus
auuaucccauuguaaag

SEQ ID NO: 3271023 - RNA, 17 nt, Vaccinia virus
cucuuucgcuauuucua

SEQ ID NO: 3271024 - RNA, 18 nt, Vaccinia virus
acauccuucucuucccuc

SEQ ID NO: 3271025 - RNA, 17 nt, Vaccinia virus
uauauguggaaauguca

SEQ ID NO: 3271026 - RNA, 12 nt, Vaccinia virus
auaccaaacaua

SEQ ID NO: 3271027 - RNA, 23 nt, Vaccinia virus
uuaaacaauaucacgaaaguaga

SEQ ID NO: 3271028 - RNA, 16 nt, Vaccinia virus
aguuggccauuaucga

SEQ ID NO: 3271029 - RNA, 17 nt, Vaccinia virus
aucgauacauauaugca

SEQ ID NO: 3271030 - RNA, 18 nt, Vaccinia virus
uauauaccgauuucacaa

SEQ ID NO: 3271031 - RNA, 18 nt, Vaccinia virus
ugauaaacacguuagagu

SEQ ID NO: 3271032 - RNA, 13 nt, Vaccinia virus
acugauucagaaa

SEQ ID NO: 3271033 - RNA, 18 nt, Vaccinia virus
uguuuacaguaguaauga

SEQ ID NO: 3271034 - RNA, 15 nt, Vaccinia virus
agacgaacaaaauca

SEQ ID NO: 3271035 - RNA, 19 nt, Vaccinia virus
guauggaauauaauaaucu

SEQ ID NO: 3271036 - RNA, 17 nt, Vaccinia virus
gugaauaugaucuucau

SEQ ID NO: 3271037 - RNA, 19 nt, Vaccinia virus
gaucuaauacaaaaucauc

SEQ ID NO: 3271038 - RNA, 17 nt, Vaccinia virus
uagauagaaacuuauac

SEQ ID NO: 3271039 - RNA, 18 nt, Vaccinia virus
caacaaguuggaugauau

SEQ ID NO: 3271040 - RNA, 16 nt, Vaccinia virus
aacaauuuugucagua

SEQ ID NO: 3271041 - RNA, 15 nt, Vaccinia virus
aauguucugucuugu

SEQ ID NO: 3271042 - RNA, 22 nt, Vaccinia virus
uacaauuuguggaauuaauauu

SEQ ID NO: 3271043 - RNA, 20 nt, Vaccinia virus
uuaguaucuagcucuguaaa

SEQ ID NO: 3271044 - RNA, 16 nt, Vaccinia virus
uuaaacgaauaaaaga

SEQ ID NO: 3271045 - RNA, 21 nt, Vaccinia virus
uaugagucaauugguagaguu

SEQ ID NO: 3271046 - RNA, 22 nt, Vaccinia virus
auccuuuauuaaaucaugaaug

SEQ ID NO: 3271047 - RNA, 13 nt, Vaccinia virus
auuaauuauucau

SEQ ID NO: 3271048 - RNA, 12 nt, Vaccinia virus
aucuaaaaaacu

SEQ ID NO: 3271049 - RNA, 13 nt, Vaccinia virus
uacaauauuuccg

SEQ ID NO: 3271050 - RNA, 18 nt, Vaccinia virus
gaauagugccaucagaau

SEQ ID NO: 3271051 - RNA, 13 nt, Vaccinia virus
uuacuaauggagu

SEQ ID NO: 3271052 - RNA, 20 nt, Vaccinia virus
cuguuuaucuauacuauuaa

SEQ ID NO: 3271053 - RNA, 11 nt, Vaccinia virus
agcauguagac

SEQ ID NO: 3271054 - RNA, 17 nt, Vaccinia virus
ucucauuaauuaaccau

SEQ ID NO: 3271055 - RNA, 22 nt, Vaccinia virus
auaccaguauaccucaaaaauu

SEQ ID NO: 3271056 - RNA, 19 nt, Vaccinia virus
gauaauuuuuuuauuacau

SEQ ID NO: 3271057 - RNA, 19 nt, Vaccinia virus
ccgaaagaacugauugcag

SEQ ID NO: 3271058 - RNA, 20 nt, Vaccinia virus
aagaguggaaacucacauau

SEQ ID NO: 3271059 - RNA, 18 nt, Vaccinia virus
auaaaaugacaaauacuc

SEQ ID NO: 3271060 - RNA, 23 nt, Vaccinia virus
aacaggaaacgcuguauauggaa

SEQ ID NO: 3271061 - RNA, 18 nt, Vaccinia virus
uaacgccgaucucugaau

SEQ ID NO: 3271062 - RNA, 23 nt, Vaccinia virus
caguuuuuaauuucuuugguaau

SEQ ID NO: 3271063 - RNA, 23 nt, Vaccinia virus
gaaugagaugcauaaaacuuuau

SEQ ID NO: 3271064 - RNA, 17 nt, Vaccinia virus
agagcuucguauacucu

SEQ ID NO: 3271065 - RNA, 20 nt, Vaccinia virus
aauauauacuucaauugaua

SEQ ID NO: 3271066 - RNA, 17 nt, Vaccinia virus
ccaaucuaagaaauuua

SEQ ID NO: 3271067 - RNA, 16 nt, Vaccinia virus
uauucccaaacauaca

SEQ ID NO: 3271068 - RNA, 14 nt, Vaccinia virus
ucuagauguagaag

SEQ ID NO: 3271069 - RNA, 21 nt, Vaccinia virus
caaguuguagacuuuuucaaa

SEQ ID NO: 3271070 - RNA, 13 nt, Vaccinia virus
ccaaaucugguaa

SEQ ID NO: 3271071 - RNA, 21 nt, Vaccinia virus
aaauuauucauucuagaacua

SEQ ID NO: 3271072 - RNA, 18 nt, Vaccinia virus
auguugcaugaaauaaua

SEQ ID NO: 3271073 - RNA, 17 nt, Vaccinia virus
uucuuauucuuauucuu

SEQ ID NO: 3271074 - RNA, 16 nt, Vaccinia virus
auuauuuuuacagcga

SEQ ID NO: 3271075 - RNA, 21 nt, Vaccinia virus
cuucgauagauauucuucaga

SEQ ID NO: 3271076 - RNA, 13 nt, Vaccinia virus
augucauuuguau

SEQ ID NO: 3271077 - RNA, 18 nt, Vaccinia virus
auggaccaaauuaucauc

SEQ ID NO: 3271078 - RNA, 14 nt, Vaccinia virus
auuaucaaauguug

SEQ ID NO: 3271079 - RNA, 17 nt, Vaccinia virus
uauuauccuugacuuga

SEQ ID NO: 3271080 - RNA, 19 nt, Vaccinia virus
acuucuccguucuuaauaa

SEQ ID NO: 3271081 - RNA, 22 nt, Vaccinia virus
agauguauuagacaaaacuauu

SEQ ID NO: 3271082 - RNA, 14 nt, Vaccinia virus
aaaaagaaugagua

SEQ ID NO: 3271083 - RNA, 18 nt, Vaccinia virus
uguauuauccaauacaga

SEQ ID NO: 3271084 - RNA, 16 nt, Vaccinia virus
aagucugucaaaucau

SEQ ID NO: 3271085 - RNA, 15 nt, Vaccinia virus
auccaaaauuuugua

SEQ ID NO: 3271086 - RNA, 20 nt, Vaccinia virus
ugaacuccgccguaguuucc

SEQ ID NO: 3271087 - RNA, 19 nt, Vaccinia virus
auaaaaaguauagguguau

SEQ ID NO: 3271088 - RNA, 22 nt, Vaccinia virus
acuggugaguuaauauucaugu

SEQ ID NO: 3271089 - RNA, 22 nt, Vaccinia virus
auauccguguuaaaaaaaauua

SEQ ID NO: 3271090 - RNA, 23 nt, Vaccinia virus
auauaauccgcauauuccauaua

SEQ ID NO: 3271091 - RNA, 17 nt, Vaccinia virus
uaaacaucuugauacuu

SEQ ID NO: 3271092 - RNA, 14 nt, Vaccinia virus
ugcgaucaauaaau

SEQ ID NO: 3271093 - RNA, 20 nt, Vaccinia virus
aauauaugcaaaauaauauc

SEQ ID NO: 3271094 - RNA, 15 nt, Vaccinia virus
cagaguguuucaaag

SEQ ID NO: 3271095 - RNA, 18 nt, Vaccinia virus
guaaaccgauuaaacguc

SEQ ID NO: 3271096 - RNA, 17 nt, Vaccinia virus
gauauauugauaauaau

SEQ ID NO: 3271097 - RNA, 21 nt, Vaccinia virus
cagaaauugguauaaauguug

SEQ ID NO: 3271098 - RNA, 17 nt, Vaccinia virus
guuaaacugugaauguc

SEQ ID NO: 3271099 - RNA, 22 nt, Vaccinia virus
cguaauaugcggucuaauuguc

SEQ ID NO: 3271100 - RNA, 15 nt, Vaccinia virus
auaauagcaacauau

SEQ ID NO: 3271101 - RNA, 13 nt, Vaccinia virus
cuauuaaacuguu

SEQ ID NO: 3271102 - RNA, 22 nt, Vaccinia virus
auuauacaccuuauaauaggug

SEQ ID NO: 3271103 - RNA, 18 nt, Vaccinia virus
uaaacucagauaauagca

SEQ ID NO: 3271104 - RNA, 16 nt, Vaccinia virus
gaugccgguacuuaug

SEQ ID NO: 3271105 - RNA, 21 nt, Vaccinia virus
uaguuuucucuauucugaaau

SEQ ID NO: 3271106 - RNA, 17 nt, Vaccinia virus
uuuuucaucuuuacaua

SEQ ID NO: 3271107 - RNA, 17 nt, Vaccinia virus
auuuuaguaauauggaa

SEQ ID NO: 3271108 - RNA, 18 nt, Vaccinia virus
caugaugagauguuuaua

SEQ ID NO: 3271109 - RNA, 21 nt, Vaccinia virus
aauccauaaauaaaguauaug

SEQ ID NO: 3271110 - RNA, 19 nt, Vaccinia virus
auaucuagacuuucuguua

SEQ ID NO: 3271111 - RNA, 18 nt, Vaccinia virus
uaaucuacgauauuauua

SEQ ID NO: 3271112 - RNA, 12 nt, Vaccinia virus
guaucuauuuua

SEQ ID NO: 3271113 - RNA, 12 nt, Vaccinia virus
uaauuacauguu

SEQ ID NO: 3271114 - RNA, 15 nt, Vaccinia virus
auaacaguuauauau

SEQ ID NO: 3271115 - RNA, 19 nt, Vaccinia virus
gacagaucuucguuaaaaa

SEQ ID NO: 3271116 - RNA, 17 nt, Vaccinia virus
guguuaucuuagauaua

SEQ ID NO: 3271117 - RNA, 19 nt, Vaccinia virus
acagaacuuaacaauaaau

SEQ ID NO: 3271118 - RNA, 15 nt, Vaccinia virus
aacuacgucaagacu

SEQ ID NO: 3271119 - RNA, 17 nt, Vaccinia virus
gguguaggaguacauac

SEQ ID NO: 3271120 - RNA, 21 nt, Vaccinia virus
cgauaaaauccuccuaucaau

SEQ ID NO: 3271121 - RNA, 18 nt, Vaccinia virus
uuugagagaucauuucua

SEQ ID NO: 3271122 - RNA, 19 nt, Vaccinia virus
aauuauuagaauaagagug

SEQ ID NO: 3271123 - RNA, 21 nt, Vaccinia virus
auucuggcuauuucaaaauaa

SEQ ID NO: 3271124 - RNA, 18 nt, Vaccinia virus
uagaaugaagauaucauu

SEQ ID NO: 3271125 - RNA, 13 nt, Vaccinia virus
uuaacaauuauca

SEQ ID NO: 3271126 - RNA, 20 nt, Vaccinia virus
aacuaucgauaguaaugcau

SEQ ID NO: 3271127 - RNA, 22 nt, Vaccinia virus
agaaaucccaccuuauuauauu

SEQ ID NO: 3271128 - RNA, 16 nt, Vaccinia virus
ucguuuaauacuacau

SEQ ID NO: 3271129 - RNA, 18 nt, Vaccinia virus
caauaucaguaucuucuu

SEQ ID NO: 3271130 - RNA, 17 nt, Vaccinia virus
auuacuaggagaauuau

SEQ ID NO: 3271131 - RNA, 17 nt, Vaccinia virus
augaggcguuuaucaua

SEQ ID NO: 3271132 - RNA, 12 nt, Vaccinia virus
aauauuagaaaa

SEQ ID NO: 3271133 - RNA, 12 nt, Vaccinia virus
aauuuuagaaau

SEQ ID NO: 3271134 - RNA, 12 nt, Vaccinia virus
aaagaucauauu

SEQ ID NO: 3271135 - RNA, 17 nt, Vaccinia virus
cgacucuacuaguucca

SEQ ID NO: 3271136 - RNA, 20 nt, Vaccinia virus
agccuuaagaaaacuagaua

SEQ ID NO: 3271137 - RNA, 19 nt, Vaccinia virus
auuuuuggauuacaagaaa

SEQ ID NO: 3271138 - RNA, 16 nt, Vaccinia virus
cuaaaauauacaaaca

SEQ ID NO: 3271139 - RNA, 22 nt, Vaccinia virus
uaagaaauccaaauaaaaugga

SEQ ID NO: 3271140 - RNA, 23 nt, Vaccinia virus
aacaaggcgauuauaaaguggaa

SEQ ID NO: 3271141 - RNA, 21 nt, Vaccinia virus
caauccguaacggaaauuaca

SEQ ID NO: 3271142 - RNA, 15 nt, Vaccinia virus
gaugauacuucacuc

SEQ ID NO: 3271143 - RNA, 16 nt, Vaccinia virus
caagaauauauguuua

SEQ ID NO: 3271144 - RNA, 13 nt, Vaccinia virus
acacguguagaau

SEQ ID NO: 3271145 - RNA, 20 nt, Vaccinia virus
cuaaagccgguguaacauuc

SEQ ID NO: 3271146 - RNA, 12 nt, Vaccinia virus
ugagacauaucc

SEQ ID NO: 3271147 - RNA, 21 nt, Vaccinia virus
ugauucaucaacauuugcugu

SEQ ID NO: 3271148 - RNA, 17 nt, Vaccinia virus
uuaaaacagaugauuca

SEQ ID NO: 3271149 - RNA, 16 nt, Vaccinia virus
accgugaccaauaagu

SEQ ID NO: 3271150 - RNA, 22 nt, Vaccinia virus
caagaaagugaaaaguucacau

SEQ ID NO: 3271151 - RNA, 12 nt, Vaccinia virus
cacauuaaacaa

SEQ ID NO: 3271152 - RNA, 22 nt, Vaccinia virus
ccuuauagaggauguuaaacaa

SEQ ID NO: 3271153 - RNA, 17 nt, Vaccinia virus
aauaaacaauuucacaa

SEQ ID NO: 3271154 - RNA, 15 nt, Vaccinia virus
gccgauaaacaaauc

SEQ ID NO: 3271155 - RNA, 15 nt, Vaccinia virus
agauauacuacuucu

SEQ ID NO: 3271156 - RNA, 12 nt, Vaccinia virus
uauuccaaucau

SEQ ID NO: 3271157 - RNA, 16 nt, Vaccinia virus
aguauaccaacuauau

SEQ ID NO: 3271158 - RNA, 17 nt, Vaccinia virus
aguauagaucaaaagaa

SEQ ID NO: 3271159 - RNA, 21 nt, Vaccinia virus
uuguacgaauccaauuuuuca

SEQ ID NO: 3271160 - RNA, 21 nt, Vaccinia virus
aucuauaaaacgauuaaacaa

SEQ ID NO: 3271161 - RNA, 15 nt, Vaccinia virus
uagauauagaacaau

SEQ ID NO: 3271162 - RNA, 20 nt, Vaccinia virus
uauuaauacaugucuuagau

SEQ ID NO: 3271163 - RNA, 21 nt, Vaccinia virus
uauuaacgguaauacauuuau

SEQ ID NO: 3271164 - RNA, 21 nt, Vaccinia virus
ucauuaucgguguauuuucca

SEQ ID NO: 3271165 - RNA, 14 nt, Vaccinia virus
aacauggaaguuau

SEQ ID NO: 3271166 - RNA, 17 nt, Vaccinia virus
auucauucaaugucucu

SEQ ID NO: 3271167 - RNA, 23 nt, Vaccinia virus
agucauuugacuagauaaacuau

SEQ ID NO: 3271168 - RNA, 14 nt, Vaccinia virus
uaugcgcaauauca

SEQ ID NO: 3271169 - RNA, 13 nt, Vaccinia virus
uauauagauguca

SEQ ID NO: 3271170 - RNA, 16 nt, Vaccinia virus
aggggaugaaucauug

SEQ ID NO: 3271171 - RNA, 14 nt, Vaccinia virus
uuggcuacauuuaa

SEQ ID NO: 3271172 - RNA, 19 nt, Vaccinia virus
aguuuccgccauuuaucca

SEQ ID NO: 3271173 - RNA, 14 nt, Vaccinia virus
acaaucguuaauaa

SEQ ID NO: 3271174 - RNA, 19 nt, Vaccinia virus
uuauucuguucuauucaaa

SEQ ID NO: 3271175 - RNA, 16 nt, Vaccinia virus
caacugucuauacaag

SEQ ID NO: 3271176 - RNA, 16 nt, Vaccinia virus
aucauguguaaaaagu

SEQ ID NO: 3271177 - RNA, 21 nt, Vaccinia virus
ucauauacguucgucaccaga

SEQ ID NO: 3271178 - RNA, 14 nt, Vaccinia virus
uuguaacuaguuuu

SEQ ID NO: 3271179 - RNA, 20 nt, Vaccinia virus
auuaucaaaauuuggaaacu

SEQ ID NO: 3271180 - RNA, 22 nt, Vaccinia virus
aauauaucaaucaaaacagaau

SEQ ID NO: 3271181 - RNA, 21 nt, Vaccinia virus
ucuaauugucggaauuauuuu

SEQ ID NO: 3271182 - RNA, 23 nt, Vaccinia virus
cauauuuucugguaguguuucua

SEQ ID NO: 3271183 - RNA, 17 nt, Vaccinia virus
uacaauaauuacaagua

SEQ ID NO: 3271184 - RNA, 15 nt, Vaccinia virus
uagauuuuguugaga

SEQ ID NO: 3271185 - RNA, 21 nt, Vaccinia virus
uucuccaccaaacauauucuu

SEQ ID NO: 3271186 - RNA, 19 nt, Vaccinia virus
uaaaacauaaucaaggaua

SEQ ID NO: 3271187 - RNA, 22 nt, Vaccinia virus
aguagauacauggcuaucgcaa

SEQ ID NO: 3271188 - RNA, 20 nt, Vaccinia virus
ugguaauuaaauauaucaug

SEQ ID NO: 3271189 - RNA, 23 nt, Vaccinia virus
gaacaagagauauauuggagcac

SEQ ID NO: 3271190 - RNA, 15 nt, Vaccinia virus
auaacauuguuuaug

SEQ ID NO: 3271191 - RNA, 19 nt, Vaccinia virus
acacauucuuuagaacuuc

SEQ ID NO: 3271192 - RNA, 17 nt, Vaccinia virus
uaaaaguaucaaaucuu

SEQ ID NO: 3271193 - RNA, 22 nt, Vaccinia virus
aucugauaaauauacaauagau

SEQ ID NO: 3271194 - RNA, 17 nt, Vaccinia virus
cgaagaagagaaagaca

SEQ ID NO: 3271195 - RNA, 23 nt, Vaccinia virus
uauagaggaauaucaucaaacaa

SEQ ID NO: 3271196 - RNA, 22 nt, Vaccinia virus
cggacuuauauagcuuauucca

SEQ ID NO: 3271197 - RNA, 21 nt, Vaccinia virus
uacauuggcuacggcagauau

SEQ ID NO: 3271198 - RNA, 13 nt, Vaccinia virus
gaauauaaaucau

SEQ ID NO: 3271199 - RNA, 12 nt, Vaccinia virus
cgauauacuuau

SEQ ID NO: 3271200 - RNA, 16 nt, Vaccinia virus
guuccauaauaguuua

SEQ ID NO: 3271201 - RNA, 13 nt, Vaccinia virus
ugucuauaucuuc

SEQ ID NO: 3271202 - RNA, 12 nt, Vaccinia virus
acaaguuuucau

SEQ ID NO: 3271203 - RNA, 22 nt, Vaccinia virus
ucuaucaaaaguuaauuucuau

SEQ ID NO: 3271204 - RNA, 13 nt, Vaccinia virus
cuaguuguuuaug

SEQ ID NO: 3271205 - RNA, 17 nt, Vaccinia virus
ugauggguguacaauca

SEQ ID NO: 3271206 - RNA, 22 nt, Vaccinia virus
aaagaguauggugaaugacucu

SEQ ID NO: 3271207 - RNA, 20 nt, Vaccinia virus
auaucggacgcagaaauugg

SEQ ID NO: 3271208 - RNA, 18 nt, Vaccinia virus
aauauccacucugucaua

SEQ ID NO: 3271209 - RNA, 16 nt, Vaccinia virus
uguuugguauacuguu

SEQ ID NO: 3271210 - RNA, 23 nt, Vaccinia virus
auuauagacuugauccauuuccu

SEQ ID NO: 3271211 - RNA, 22 nt, Vaccinia virus
gaagaugauuuugcuagagaua

SEQ ID NO: 3271212 - RNA, 18 nt, Vaccinia virus
aauguagaaauuagaaag

SEQ ID NO: 3271213 - RNA, 20 nt, Vaccinia virus
acaguuaacgaaagcaaaga

SEQ ID NO: 3271214 - RNA, 18 nt, Vaccinia virus
ugaauauagaacaucauu

SEQ ID NO: 3271215 - RNA, 17 nt, Vaccinia virus
uugguacagucuaguau

SEQ ID NO: 3271216 - RNA, 14 nt, Vaccinia virus
agagagugcacuau

SEQ ID NO: 3271217 - RNA, 15 nt, Vaccinia virus
auuccgccauuuaag

SEQ ID NO: 3271218 - RNA, 15 nt, Vaccinia virus
uugacaaauuauucu

SEQ ID NO: 3271219 - RNA, 15 nt, Vaccinia virus
uagaucaaauacuug

SEQ ID NO: 3271220 - RNA, 19 nt, Vaccinia virus
cucauaauguaaagauauu

SEQ ID NO: 3271221 - RNA, 21 nt, Vaccinia virus
auaaaaacgagaaugacauaa

SEQ ID NO: 3271222 - RNA, 19 nt, Vaccinia virus
cuuuauuauuauugacuuc

SEQ ID NO: 3271223 - RNA, 19 nt, Vaccinia virus
augcauguuagauaacgga

SEQ ID NO: 3271224 - RNA, 18 nt, Vaccinia virus
ugaguuacgaagauauca

SEQ ID NO: 3271225 - RNA, 18 nt, Vaccinia virus
cacauacauuuuuaacag

SEQ ID NO: 3271226 - RNA, 18 nt, Vaccinia virus
ucuuauauagauuucgaa

SEQ ID NO: 3271227 - RNA, 15 nt, Vaccinia virus
aucuaaauuaaauau

SEQ ID NO: 3271228 - RNA, 24 nt, Vaccinia virus
uaagagauuuagaaaacauuauau

SEQ ID NO: 3271229 - RNA, 19 nt, Vaccinia virus
auuguugccguaaauccug

SEQ ID NO: 3271230 - RNA, 23 nt, Vaccinia virus
uauucucuauuuugguggaggau

SEQ ID NO: 3271231 - RNA, 20 nt, Vaccinia virus
ccuucacaucucgcaauaau

SEQ ID NO: 3271232 - RNA, 17 nt, Vaccinia virus
ucauacuagaauaaagc

SEQ ID NO: 3271233 - RNA, 16 nt, Vaccinia virus
caucuacuuuaucuau

SEQ ID NO: 3271234 - RNA, 14 nt, Vaccinia virus
aagacauaaaacuc

SEQ ID NO: 3271235 - RNA, 18 nt, Vaccinia virus
cuaucaugucuauucucc

SEQ ID NO: 3271236 - RNA, 17 nt, Vaccinia virus
uuauauacacauaauua

SEQ ID NO: 3271237 - RNA, 13 nt, Vaccinia virus
auacuuuaacauc

SEQ ID NO: 3271238 - RNA, 14 nt, Vaccinia virus
uggugaaauuauug

SEQ ID NO: 3271239 - RNA, 19 nt, Vaccinia virus
aauaauaaacggaagagau

SEQ ID NO: 3271240 - RNA, 23 nt, Vaccinia virus
gugaugccaauaagcuuuagaua

SEQ ID NO: 3271241 - RNA, 17 nt, Vaccinia virus
gacauuuucacaaauac

SEQ ID NO: 3271242 - RNA, 19 nt, Vaccinia virus
cucuagaauauuuaauuug

SEQ ID NO: 3271243 - RNA, 19 nt, Vaccinia virus
auacgaauguaucaaacag

SEQ ID NO: 3271244 - RNA, 15 nt, Vaccinia virus
agacuuugaaauaua

SEQ ID NO: 3271245 - RNA, 16 nt, Vaccinia virus
auguuaaauguagaca

SEQ ID NO: 3271246 - RNA, 21 nt, Vaccinia virus
auauaagacacagaaauacua

SEQ ID NO: 3271247 - RNA, 20 nt, Vaccinia virus
uuaaacgauuugaugaguua

SEQ ID NO: 3271248 - RNA, 19 nt, Vaccinia virus
acccaaagagaccaaugaa

SEQ ID NO: 3271249 - RNA, 20 nt, Vaccinia virus
caacaucacgcucgauaauc

SEQ ID NO: 3271250 - RNA, 19 nt, Vaccinia virus
aacaaguuuggauuaucgu

SEQ ID NO: 3271251 - RNA, 17 nt, Vaccinia virus
auguagugacgauguau

SEQ ID NO: 3271252 - RNA, 12 nt, Vaccinia virus
guaacauaaaaa

SEQ ID NO: 3271253 - RNA, 15 nt, Vaccinia virus
cacuuggauauugua

SEQ ID NO: 3271254 - RNA, 15 nt, Vaccinia virus
uucauuacacaucuu

SEQ ID NO: 3271255 - RNA, 18 nt, Vaccinia virus
uucucguauacucugccc

SEQ ID NO: 3271256 - RNA, 15 nt, Vaccinia virus
aucauuuaaacauuu

SEQ ID NO: 3271257 - RNA, 17 nt, Vaccinia virus
aggagucgccaaaugua

SEQ ID NO: 3271258 - RNA, 18 nt, Vaccinia virus
aacuagaaucagaaucua

SEQ ID NO: 3271259 - RNA, 16 nt, Vaccinia virus
uugaacuccucuagau

SEQ ID NO: 3271260 - RNA, 19 nt, Vaccinia virus
aguauugacaauacuguau

SEQ ID NO: 3271261 - RNA, 20 nt, Vaccinia virus
uaucguauuggauucugaaa

SEQ ID NO: 3271262 - RNA, 15 nt, Vaccinia virus
auucauccuuaaaug

SEQ ID NO: 3271263 - RNA, 17 nt, Vaccinia virus
cggaaaugguagaugua

SEQ ID NO: 3271264 - RNA, 21 nt, Vaccinia virus
aucacgaguuuguaaagcuau

SEQ ID NO: 3271265 - RNA, 23 nt, Vaccinia virus
aaucgucuauaauaaugaauauu

SEQ ID NO: 3271266 - RNA, 13 nt, Vaccinia virus
guggacauuuaac

SEQ ID NO: 3271267 - RNA, 13 nt, Vaccinia virus
caaguauaaugac

SEQ ID NO: 3271268 - RNA, 13 nt, Vaccinia virus
uugaaugucauga

SEQ ID NO: 3271269 - RNA, 18 nt, Vaccinia virus
aauagaugauagaauauc

SEQ ID NO: 3271270 - RNA, 20 nt, Vaccinia virus
uguaaauuuuaucaugugua

SEQ ID NO: 3271271 - RNA, 21 nt, Vaccinia virus
ugaagaugugacguacaaaaa

SEQ ID NO: 3271272 - RNA, 23 nt, Vaccinia virus
uuuucaguuccccuacguaucua

SEQ ID NO: 3271273 - RNA, 17 nt, Vaccinia virus
accaaagacuuugaaau

SEQ ID NO: 3271274 - RNA, 17 nt, Vaccinia virus
ugguuaacaauauggaa

SEQ ID NO: 3271275 - RNA, 17 nt, Vaccinia virus
agucuccagaaaucugu

SEQ ID NO: 3271276 - RNA, 17 nt, Vaccinia virus
gucaaacgaauaaacaa

SEQ ID NO: 3271277 - RNA, 17 nt, Vaccinia virus
acuauugacuuaauagg

SEQ ID NO: 3271278 - RNA, 20 nt, Vaccinia virus
gggauuguccggcauaucau

SEQ ID NO: 3271279 - RNA, 16 nt, Vaccinia virus
ugauaacuucaggaaa

SEQ ID NO: 3271280 - RNA, 13 nt, Vaccinia virus
uaacuauauucca

SEQ ID NO: 3271281 - RNA, 15 nt, Vaccinia virus
gaucucgagaaauaa

SEQ ID NO: 3271282 - RNA, 22 nt, Vaccinia virus
agucuaucgccuuagauacuuu

SEQ ID NO: 3271283 - RNA, 21 nt, Vaccinia virus
acaauguuugucauauguauu

SEQ ID NO: 3271284 - RNA, 19 nt, Vaccinia virus
agaauugacgaaacaaugu

SEQ ID NO: 3271285 - RNA, 20 nt, Vaccinia virus
uuauaguguuuaacaaagau

SEQ ID NO: 3271286 - RNA, 21 nt, Vaccinia virus
auuuuaccaacucuuuaauaa

SEQ ID NO: 3271287 - RNA, 12 nt, Vaccinia virus
uauauagauguc

SEQ ID NO: 3271288 - RNA, 22 nt, Vaccinia virus
ucuauagaaacauauucuauga

SEQ ID NO: 3271289 - RNA, 19 nt, Vaccinia virus
acuagcucgagaaugaaua

SEQ ID NO: 3271290 - RNA, 21 nt, Vaccinia virus
uagcgaagaagagaaagacag

SEQ ID NO: 3271291 - RNA, 15 nt, Vaccinia virus
cucuauaaaaaugaa

SEQ ID NO: 3271292 - RNA, 14 nt, Vaccinia virus
auauacuuuucuaa

SEQ ID NO: 3271293 - RNA, 15 nt, Vaccinia virus
ugaggaaugagagug

SEQ ID NO: 3271294 - RNA, 16 nt, Vaccinia virus
gcacauguauaauaua

SEQ ID NO: 3271295 - RNA, 22 nt, Vaccinia virus
aaucaguuacaaaacguuuaua

SEQ ID NO: 3271296 - RNA, 14 nt, Vaccinia virus
auacgauaaacauu

SEQ ID NO: 3271297 - RNA, 16 nt, Vaccinia virus
aaagagaauuauauau

SEQ ID NO: 3271298 - RNA, 23 nt, Vaccinia virus
gcuauagcauuguuauguauuuc

SEQ ID NO: 3271299 - RNA, 18 nt, Vaccinia virus
uaacagauaaaaagacuu

SEQ ID NO: 3271300 - RNA, 14 nt, Vaccinia virus
aaaaaugaugaauu

SEQ ID NO: 3271301 - RNA, 15 nt, Vaccinia virus
gacuccuuucuaaua

SEQ ID NO: 3271302 - RNA, 17 nt, Vaccinia virus
cgauaacauucuaaaga

SEQ ID NO: 3271303 - RNA, 18 nt, Vaccinia virus
auaaugacaauaaaauua

SEQ ID NO: 3271304 - RNA, 21 nt, Vaccinia virus
cugcggacgcggaugcucagu

SEQ ID NO: 3271305 - RNA, 15 nt, Vaccinia virus
auucaugaaaaugua

SEQ ID NO: 3271306 - RNA, 13 nt, Vaccinia virus
uuaauauuucuau

SEQ ID NO: 3271307 - RNA, 15 nt, Vaccinia virus
auauuuacaguuacu

SEQ ID NO: 3271308 - RNA, 14 nt, Vaccinia virus
uaacuauauucuua

SEQ ID NO: 3271309 - RNA, 11 nt, Vaccinia virus
gaagaaauuga

SEQ ID NO: 3271310 - RNA, 13 nt, Vaccinia virus
auaugaugaaugg

SEQ ID NO: 3271311 - RNA, 13 nt, Vaccinia virus
acagauggauaaa

SEQ ID NO: 3271312 - RNA, 16 nt, Vaccinia virus
uccaacaauagcuuua

SEQ ID NO: 3271313 - RNA, 21 nt, Vaccinia virus
uauguuuauuagcguacacau

SEQ ID NO: 3271314 - RNA, 15 nt, Vaccinia virus
aauccacauaugaua

SEQ ID NO: 3271315 - RNA, 21 nt, Vaccinia virus
gaaagauucuauaauaaugaa

SEQ ID NO: 3271316 - RNA, 19 nt, Vaccinia virus
agaucuaauuuuucauuga

SEQ ID NO: 3271317 - RNA, 16 nt, Vaccinia virus
agaaaaauauaaugua

SEQ ID NO: 3271318 - RNA, 23 nt, Vaccinia virus
uaagagagauuagaguuuguaca

SEQ ID NO: 3271319 - RNA, 18 nt, Vaccinia virus
acucgaacagauaguuua

SEQ ID NO: 3271320 - RNA, 12 nt, Vaccinia virus
agacagauuaug

SEQ ID NO: 3271321 - RNA, 22 nt, Vaccinia virus
cugucuugaguuccauuacaaa

SEQ ID NO: 3271322 - RNA, 20 nt, Vaccinia virus
cauccuguggguuucucaua

SEQ ID NO: 3271323 - RNA, 17 nt, Vaccinia virus
aacgugaguauuuuacu

SEQ ID NO: 3271324 - RNA, 19 nt, Vaccinia virus
cuaauacaucucuggaaau

SEQ ID NO: 3271325 - RNA, 22 nt, Vaccinia virus
aaaagauucgguuuuauacugu

SEQ ID NO: 3271326 - RNA, 21 nt, Vaccinia virus
cgaaauaguuaauaauucugu

SEQ ID NO: 3271327 - RNA, 18 nt, Vaccinia virus
gcuccuacaggaauaucu

SEQ ID NO: 3271328 - RNA, 17 nt, Vaccinia virus
ccuauaaacaugaauuu

SEQ ID NO: 3271329 - RNA, 22 nt, Vaccinia virus
gaccacacggagaacagaugac

SEQ ID NO: 3271330 - RNA, 13 nt, Vaccinia virus
ucagauauuugcg

SEQ ID NO: 3271331 - RNA, 23 nt, Vaccinia virus
caauauucuauuacugcagaggg

SEQ ID NO: 3271332 - RNA, 18 nt, Vaccinia virus
agcacauguauaauauaa

SEQ ID NO: 3271333 - RNA, 19 nt, Vaccinia virus
cucaaaugggaaacaaucu

SEQ ID NO: 3271334 - RNA, 19 nt, Vaccinia virus
aaucuauccgcgacaaauu

SEQ ID NO: 3271335 - RNA, 17 nt, Vaccinia virus
agcuugauaauuagaua

SEQ ID NO: 3271336 - RNA, 13 nt, Vaccinia virus
uagucaaggaugu

SEQ ID NO: 3271337 - RNA, 13 nt, Vaccinia virus
aaauaaaguauau

SEQ ID NO: 3271338 - RNA, 17 nt, Vaccinia virus
gcacuacgcaauaugau

SEQ ID NO: 3271339 - RNA, 20 nt, Vaccinia virus
cagauccucccguuaaaacc

SEQ ID NO: 3271340 - RNA, 16 nt, Vaccinia virus
uaauugaacaaaguau

SEQ ID NO: 3271341 - RNA, 16 nt, Vaccinia virus
auaauaggauaagacu

SEQ ID NO: 3271342 - RNA, 22 nt, Vaccinia virus
cuuauauaccgccucaaacucu

SEQ ID NO: 3271343 - RNA, 19 nt, Vaccinia virus
aaagcggggucgaucuugu

SEQ ID NO: 3271344 - RNA, 13 nt, Vaccinia virus
guuuaauauccuc

SEQ ID NO: 3271345 - RNA, 20 nt, Vaccinia virus
uauguauuccuuuacgugau

SEQ ID NO: 3271346 - RNA, 13 nt, Vaccinia virus
aguuaauuuauca

SEQ ID NO: 3271347 - RNA, 20 nt, Vaccinia virus
uucaaugucucuuuuucaga

SEQ ID NO: 3271348 - RNA, 17 nt, Vaccinia virus
uuauuacuaaacauuuu

SEQ ID NO: 3271349 - RNA, 23 nt, Vaccinia virus
guaguuuaucgguuuuaaaucaa

SEQ ID NO: 3271350 - RNA, 14 nt, Vaccinia virus
agaaguuuuauccu

SEQ ID NO: 3271351 - RNA, 21 nt, Vaccinia virus
caaugauauauuuuccaugaa

SEQ ID NO: 3271352 - RNA, 18 nt, Vaccinia virus
uguuuaagaagagaauua

SEQ ID NO: 3271353 - RNA, 22 nt, Vaccinia virus
auaauacucggccgacauaaug

SEQ ID NO: 3271354 - RNA, 16 nt, Vaccinia virus
cuuaccuucaacagua

SEQ ID NO: 3271355 - RNA, 18 nt, Vaccinia virus
uaaauuuacgaauuaaga

SEQ ID NO: 3271356 - RNA, 20 nt, Vaccinia virus
ucaggaauccaaagagcuau

SEQ ID NO: 3271357 - RNA, 19 nt, Vaccinia virus
cuuugugaugucuaguuuc

SEQ ID NO: 3271358 - RNA, 11 nt, Vaccinia virus
uuaauuauuca

SEQ ID NO: 3271359 - RNA, 15 nt, Vaccinia virus
gccucaguugucaac

SEQ ID NO: 3271360 - RNA, 18 nt, Vaccinia virus
agaaauaaacgaguaugu

SEQ ID NO: 3271361 - RNA, 15 nt, Vaccinia virus
uaauuuuauugagau

SEQ ID NO: 3271362 - RNA, 15 nt, Vaccinia virus
ugcuuacuagauguu

SEQ ID NO: 3271363 - RNA, 18 nt, Vaccinia virus
uaucucauucaaauccau

SEQ ID NO: 3271364 - RNA, 18 nt, Vaccinia virus
ugaucggauaguauucaa

SEQ ID NO: 3271365 - RNA, 16 nt, Vaccinia virus
auauuacuuauaauaa

SEQ ID NO: 3271366 - RNA, 20 nt, Vaccinia virus
ccuuuuccuuaucuucauag

SEQ ID NO: 3271367 - RNA, 22 nt, Vaccinia virus
uagguuguuuauugauauacua

SEQ ID NO: 3271368 - RNA, 18 nt, Vaccinia virus
agcugugguguaaucuua

SEQ ID NO: 3271369 - RNA, 19 nt, Vaccinia virus
gcauaauccuuguaaugau

SEQ ID NO: 3271370 - RNA, 19 nt, Vaccinia virus
auguauuuuaauaaaucau

SEQ ID NO: 3271371 - RNA, 17 nt, Vaccinia virus
auuguagaaucagcauc

SEQ ID NO: 3271372 - RNA, 12 nt, Vaccinia virus
uucauuaauuuu

SEQ ID NO: 3271373 - RNA, 13 nt, Vaccinia virus
cagcauguauguu

SEQ ID NO: 3271374 - RNA, 16 nt, Vaccinia virus
agaaucuaaugaugac

SEQ ID NO: 3271375 - RNA, 12 nt, Vaccinia virus
aacaauauuaag

SEQ ID NO: 3271376 - RNA, 13 nt, Vaccinia virus
cagaauguuacag

SEQ ID NO: 3271377 - RNA, 16 nt, Vaccinia virus
aauucuauuagaucau

SEQ ID NO: 3271378 - RNA, 21 nt, Vaccinia virus
ccaauauaguaguuaaauuau

SEQ ID NO: 3271379 - RNA, 11 nt, Vaccinia virus
cuuucucucuu

SEQ ID NO: 3271380 - RNA, 17 nt, Vaccinia virus
ccuagauacuguauaua

SEQ ID NO: 3271381 - RNA, 22 nt, Vaccinia virus
gaugucauauaggaaacuauaa

SEQ ID NO: 3271382 - RNA, 21 nt, Vaccinia virus
uuaacaauugucuguaaacca

SEQ ID NO: 3271383 - RNA, 16 nt, Vaccinia virus
auuguuuuaacuauaa

SEQ ID NO: 3271384 - RNA, 22 nt, Vaccinia virus
uuaucacaaugaaauauuuugg

SEQ ID NO: 3271385 - RNA, 19 nt, Vaccinia virus
aagacaugauaauauuaaa

SEQ ID NO: 3271386 - RNA, 16 nt, Vaccinia virus
aauuauuauuaaauau

SEQ ID NO: 3271387 - RNA, 14 nt, Vaccinia virus
uauuuaaaugacuu

SEQ ID NO: 3271388 - RNA, 18 nt, Vaccinia virus
gaauauagaaauaaugau

SEQ ID NO: 3271389 - RNA, 22 nt, Vaccinia virus
uaucggacacaagaucuguaaa

SEQ ID NO: 3271390 - RNA, 14 nt, Vaccinia virus
uuagugaaaucuuu

SEQ ID NO: 3271391 - RNA, 16 nt, Vaccinia virus
ugccaaguacauaaau

SEQ ID NO: 3271392 - RNA, 14 nt, Vaccinia virus
uucaucuuggauga

SEQ ID NO: 3271393 - RNA, 18 nt, Vaccinia virus
aauauccagaguguuuca

SEQ ID NO: 3271394 - RNA, 14 nt, Vaccinia virus
uguuuuuuaucaua

SEQ ID NO: 3271395 - RNA, 21 nt, Vaccinia virus
uaugucguccgguaguauaau

SEQ ID NO: 3271396 - RNA, 15 nt, Vaccinia virus
uuccguaucuguauu

SEQ ID NO: 3271397 - RNA, 18 nt, Vaccinia virus
aaugcuucagaauuagaa

SEQ ID NO: 3271398 - RNA, 23 nt, Vaccinia virus
cggauauucuaacgaaaacugua

SEQ ID NO: 3271399 - RNA, 14 nt, Vaccinia virus
guaauacaugcaaa

SEQ ID NO: 3271400 - RNA, 15 nt, Vaccinia virus
agaauaaguuucaua

SEQ ID NO: 3271401 - RNA, 15 nt, Vaccinia virus
gaauuacucaugcau

SEQ ID NO: 3271402 - RNA, 14 nt, Vaccinia virus
acuaaauuaacaau

SEQ ID NO: 3271403 - RNA, 14 nt, Vaccinia virus
gcuauuuugacaua

SEQ ID NO: 3271404 - RNA, 20 nt, Vaccinia virus
auacauccguagaaauauga

SEQ ID NO: 3271405 - RNA, 16 nt, Vaccinia virus
cauuuuauuguggaau

SEQ ID NO: 3271406 - RNA, 15 nt, Vaccinia virus
gucaaucuuauucaa

SEQ ID NO: 3271407 - RNA, 15 nt, Vaccinia virus
agaauucagauguug

SEQ ID NO: 3271408 - RNA, 15 nt, Vaccinia virus
auaucuauauuucca

SEQ ID NO: 3271409 - RNA, 23 nt, Vaccinia virus
gucauauagucgagcaagagaau

SEQ ID NO: 3271410 - RNA, 17 nt, Vaccinia virus
auucgaaaacucuaaga

SEQ ID NO: 3271411 - RNA, 12 nt, Vaccinia virus
auacauauuuua

SEQ ID NO: 3271412 - RNA, 22 nt, Vaccinia virus
uauucuuaauucuuuaacaaaa

SEQ ID NO: 3271413 - RNA, 23 nt, Vaccinia virus
uccauuagccuuuccacuucugc

SEQ ID NO: 3271414 - RNA, 17 nt, Vaccinia virus
cgacucauaagaaagag

SEQ ID NO: 3271415 - RNA, 22 nt, Vaccinia virus
acaaacuguucucuuaugaauc

SEQ ID NO: 3271416 - RNA, 16 nt, Vaccinia virus
aauggauaauuuccau

SEQ ID NO: 3271417 - RNA, 17 nt, Vaccinia virus
augcaucgguaaauaua

SEQ ID NO: 3271418 - RNA, 14 nt, Vaccinia virus
acuacaauauuuca

SEQ ID NO: 3271419 - RNA, 19 nt, Vaccinia virus
uagcaacaguaguucuugc

SEQ ID NO: 3271420 - RNA, 15 nt, Vaccinia virus
cuauggccaaauguu

SEQ ID NO: 3271421 - RNA, 20 nt, Vaccinia virus
acauuauuaaauuaugaagu

SEQ ID NO: 3271422 - RNA, 22 nt, Vaccinia virus
ucuaaaugaugauauaccuguu

SEQ ID NO: 3271423 - RNA, 20 nt, Vaccinia virus
cuuccuaggauagcuuuagu

SEQ ID NO: 3271424 - RNA, 23 nt, Vaccinia virus
auaacaagagauuuauuguguau

SEQ ID NO: 3271425 - RNA, 22 nt, Vaccinia virus
uagaaucucuauuugccaauau

SEQ ID NO: 3271426 - RNA, 19 nt, Vaccinia virus
auaucuggaaagaaaucua

SEQ ID NO: 3271427 - RNA, 16 nt, Vaccinia virus
gacgaguguaaacacu

SEQ ID NO: 3271428 - RNA, 21 nt, Vaccinia virus
aggaaauaccauaaauauauu

SEQ ID NO: 3271429 - RNA, 12 nt, Vaccinia virus
aauaaaaacaag

SEQ ID NO: 3271430 - RNA, 14 nt, Vaccinia virus
uacuaauagaugua

SEQ ID NO: 3271431 - RNA, 17 nt, Vaccinia virus
aucuuuucacuaaauaa

SEQ ID NO: 3271432 - RNA, 18 nt, Vaccinia virus
uacgauuuucuucuuuga

SEQ ID NO: 3271433 - RNA, 18 nt, Vaccinia virus
aguaagacuugacuagau

SEQ ID NO: 3271434 - RNA, 20 nt, Vaccinia virus
ucaugauugccggucauaaa

SEQ ID NO: 3271435 - RNA, 20 nt, Vaccinia virus
gagcaaucagaaaugaugcu

SEQ ID NO: 3271436 - RNA, 19 nt, Vaccinia virus
aauuauucguuuacugaau

SEQ ID NO: 3271437 - RNA, 13 nt, Vaccinia virus
aucagauuaaaau

SEQ ID NO: 3271438 - RNA, 18 nt, Vaccinia virus
cuuaaccauauauccaau

SEQ ID NO: 3271439 - RNA, 16 nt, Vaccinia virus
guuaguucucuuuuca

SEQ ID NO: 3271440 - RNA, 13 nt, Vaccinia virus
auuguaaaugaua

SEQ ID NO: 3271441 - RNA, 17 nt, Vaccinia virus
uaaauuuaucaauaaau

SEQ ID NO: 3271442 - RNA, 17 nt, Vaccinia virus
aaucauuuuugcaucau

SEQ ID NO: 3271443 - RNA, 20 nt, Vaccinia virus
uggaaagauaucagauaagu

SEQ ID NO: 3271444 - RNA, 19 nt, Vaccinia virus
gacagaagaauaugaugau

SEQ ID NO: 3271445 - RNA, 15 nt, Vaccinia virus
accuauuuacuggug

SEQ ID NO: 3271446 - RNA, 22 nt, Vaccinia virus
auauaaauccguuaaaauaauu

SEQ ID NO: 3271447 - RNA, 16 nt, Vaccinia virus
auuucugguuagauaa

SEQ ID NO: 3271448 - RNA, 20 nt, Vaccinia virus
ucauaucacauaguguuuua

SEQ ID NO: 3271449 - RNA, 19 nt, Vaccinia virus
ggaaaaaguguugaagaua

SEQ ID NO: 3271450 - RNA, 19 nt, Vaccinia virus
agaauauuccucuaacaga

SEQ ID NO: 3271451 - RNA, 17 nt, Vaccinia virus
uaaaguacguaaaucua

SEQ ID NO: 3271452 - RNA, 23 nt, Vaccinia virus
aaauuuuguugauuacucuuuuu

SEQ ID NO: 3271453 - RNA, 16 nt, Vaccinia virus
uuacccuugucauuau

SEQ ID NO: 3271454 - RNA, 13 nt, Vaccinia virus
gaugaguauauau

SEQ ID NO: 3271455 - RNA, 14 nt, Vaccinia virus
auauaucaaacaug

SEQ ID NO: 3271456 - RNA, 18 nt, Vaccinia virus
ucaaucaaggaacuaaau

SEQ ID NO: 3271457 - RNA, 17 nt, Vaccinia virus
uaucuuccgucaaggau

SEQ ID NO: 3271458 - RNA, 18 nt, Vaccinia virus
agaguguucgaaugccaa

SEQ ID NO: 3271459 - RNA, 18 nt, Vaccinia virus
agugauagagguaaacuu

SEQ ID NO: 3271460 - RNA, 21 nt, Vaccinia virus
gauauuuuaguuuuggcagau

SEQ ID NO: 3271461 - RNA, 13 nt, Vaccinia virus
auaucgaugugga

SEQ ID NO: 3271462 - RNA, 15 nt, Vaccinia virus
uauauccuuuuguau

SEQ ID NO: 3271463 - RNA, 19 nt, Vaccinia virus
auacuuuuacggaaaaaug

SEQ ID NO: 3271464 - RNA, 15 nt, Vaccinia virus
aauguuauuacuugu

SEQ ID NO: 3271465 - RNA, 15 nt, Vaccinia virus
auagcaauguaaugg

SEQ ID NO: 3271466 - RNA, 20 nt, Vaccinia virus
cuccuacaggaauaucuuua

SEQ ID NO: 3271467 - RNA, 21 nt, Vaccinia virus
aaacuuuaauaacaaagaaag

SEQ ID NO: 3271468 - RNA, 16 nt, Vaccinia virus
uaaauagagaagguau

SEQ ID NO: 3271469 - RNA, 20 nt, Vaccinia virus
augaucugucuuauaugaag

SEQ ID NO: 3271470 - RNA, 16 nt, Vaccinia virus
uauauagcacaaaugu

SEQ ID NO: 3271471 - RNA, 20 nt, Vaccinia virus
uaauaucccacauuaucauc

SEQ ID NO: 3271472 - RNA, 14 nt, Vaccinia virus
uguuaaauuucagu

SEQ ID NO: 3271473 - RNA, 16 nt, Vaccinia virus
uauuacguauuauaua

SEQ ID NO: 3271474 - RNA, 16 nt, Vaccinia virus
cgcuuaauaucuucug

SEQ ID NO: 3271475 - RNA, 15 nt, Vaccinia virus
cuguaaagaacagug

SEQ ID NO: 3271476 - RNA, 13 nt, Vaccinia virus
gaaucacaaacau

SEQ ID NO: 3271477 - RNA, 17 nt, Vaccinia virus
gaucaggaauccaaaga

SEQ ID NO: 3271478 - RNA, 18 nt, Vaccinia virus
acauuaauacuuuaauga

SEQ ID NO: 3271479 - RNA, 12 nt, Vaccinia virus
caacucucaaaa

SEQ ID NO: 3271480 - RNA, 14 nt, Vaccinia virus
ccaaguuauugcuu

SEQ ID NO: 3271481 - RNA, 23 nt, Vaccinia virus
cauuauuuaccgaacaggcauuu

SEQ ID NO: 3271482 - RNA, 21 nt, Vaccinia virus
aaggucaauuacggcgaaaua

SEQ ID NO: 3271483 - RNA, 22 nt, Vaccinia virus
gaggaggaauaucugaugaugu

SEQ ID NO: 3271484 - RNA, 16 nt, Vaccinia virus
uauuaaaacuaucaau

SEQ ID NO: 3271485 - RNA, 13 nt, Vaccinia virus
uccacauccauga

SEQ ID NO: 3271486 - RNA, 17 nt, Vaccinia virus
auaucaucauuguguaa

SEQ ID NO: 3271487 - RNA, 17 nt, Vaccinia virus
cuuugguuuaauuauuu

SEQ ID NO: 3271488 - RNA, 19 nt, Vaccinia virus
ucaaauggauuccauggaa

SEQ ID NO: 3271489 - RNA, 19 nt, Vaccinia virus
auaacagagccaucuguaa

SEQ ID NO: 3271490 - RNA, 16 nt, Vaccinia virus
gcaacugguaauuaaa

SEQ ID NO: 3271491 - RNA, 14 nt, Vaccinia virus
auaaagaaugaaug

SEQ ID NO: 3271492 - RNA, 15 nt, Vaccinia virus
gacgaacguauugcu

SEQ ID NO: 3271493 - RNA, 20 nt, Vaccinia virus
auuuuuacagcgacacuauu

SEQ ID NO: 3271494 - RNA, 17 nt, Vaccinia virus
uguuaaaauauaaacag

SEQ ID NO: 3271495 - RNA, 18 nt, Vaccinia virus
uauaaauauauaaugggu

SEQ ID NO: 3271496 - RNA, 19 nt, Vaccinia virus
aaaaugcauguacagaauc

SEQ ID NO: 3271497 - RNA, 13 nt, Vaccinia virus
ucaaacaguuugg

SEQ ID NO: 3271498 - RNA, 20 nt, Vaccinia virus
uaaucguguauaacaucuuu

SEQ ID NO: 3271499 - RNA, 13 nt, Vaccinia virus
ucauauuaaacau

SEQ ID NO: 3271500 - RNA, 14 nt, Vaccinia virus
gcauuguuaagaca

SEQ ID NO: 3271501 - RNA, 14 nt, Vaccinia virus
uacguuuacaugug

SEQ ID NO: 3271502 - RNA, 18 nt, Vaccinia virus
aaucaucaauccuucaga

SEQ ID NO: 3271503 - RNA, 22 nt, Vaccinia virus
auagauaguagcuauaauauau

SEQ ID NO: 3271504 - RNA, 16 nt, Vaccinia virus
uaucuuaucgaaugau

SEQ ID NO: 3271505 - RNA, 21 nt, Vaccinia virus
aucuuuacccauccaauacua

SEQ ID NO: 3271506 - RNA, 17 nt, Vaccinia virus
ugcuauaccuaauacua

SEQ ID NO: 3271507 - RNA, 14 nt, Vaccinia virus
uaagucacacuaag

SEQ ID NO: 3271508 - RNA, 14 nt, Vaccinia virus
agaggauaacuauu

SEQ ID NO: 3271509 - RNA, 13 nt, Vaccinia virus
auaaacuguuuau

SEQ ID NO: 3271510 - RNA, 14 nt, Vaccinia virus
auaucuucucaaaa

SEQ ID NO: 3271511 - RNA, 17 nt, Vaccinia virus
gaucaacggauaaucug

SEQ ID NO: 3271512 - RNA, 15 nt, Vaccinia virus
ccaugaaagaaagaa

SEQ ID NO: 3271513 - RNA, 15 nt, Vaccinia virus
auuuuucuucauuua

SEQ ID NO: 3271514 - RNA, 17 nt, Vaccinia virus
cguuaaauauaacuggu

SEQ ID NO: 3271515 - RNA, 17 nt, Vaccinia virus
aauaucuagcaaaaauu

SEQ ID NO: 3271516 - RNA, 21 nt, Vaccinia virus
uaaaaaguuuuccaucuaugu

SEQ ID NO: 3271517 - RNA, 13 nt, Vaccinia virus
uacguauccucga

SEQ ID NO: 3271518 - RNA, 13 nt, Vaccinia virus
uaauuaaugucca

SEQ ID NO: 3271519 - RNA, 15 nt, Vaccinia virus
aauccuguuucuacu

SEQ ID NO: 3271520 - RNA, 13 nt, Vaccinia virus
uuaauguuugcuc

SEQ ID NO: 3271521 - RNA, 18 nt, Vaccinia virus
ccacaauuagguauuuua

SEQ ID NO: 3271522 - RNA, 11 nt, Vaccinia virus
uucauuucuaa

SEQ ID NO: 3271523 - RNA, 16 nt, Vaccinia virus
accagucuaggaauaa

SEQ ID NO: 3271524 - RNA, 15 nt, Vaccinia virus
auuaaacguauucau

SEQ ID NO: 3271525 - RNA, 13 nt, Vaccinia virus
ucauaagaacuau

SEQ ID NO: 3271526 - RNA, 17 nt, Vaccinia virus
ucauauguuguuguaau

SEQ ID NO: 3271527 - RNA, 12 nt, Vaccinia virus
guaauaauugcu

SEQ ID NO: 3271528 - RNA, 14 nt, Vaccinia virus
auguagcuauauag

SEQ ID NO: 3271529 - RNA, 22 nt, Vaccinia virus
guaaccagaauuguaaaauuag

SEQ ID NO: 3271530 - RNA, 20 nt, Vaccinia virus
auucaauuacuacaaaaauu

SEQ ID NO: 3271531 - RNA, 23 nt, Vaccinia virus
auuauauagauacagaacaucaa

SEQ ID NO: 3271532 - RNA, 17 nt, Vaccinia virus
uauaccugccuagaaau

SEQ ID NO: 3271533 - RNA, 15 nt, Vaccinia virus
ucuuuaacaaauucu

SEQ ID NO: 3271534 - RNA, 21 nt, Vaccinia virus
uucaucauauucaucaucaau

SEQ ID NO: 3271535 - RNA, 20 nt, Vaccinia virus
uucuuggauccuaacaauga

SEQ ID NO: 3271536 - RNA, 16 nt, Vaccinia virus
uacguaucauaucuuc

SEQ ID NO: 3271537 - RNA, 13 nt, Vaccinia virus
aaauuuucauuca

SEQ ID NO: 3271538 - RNA, 22 nt, Vaccinia virus
agguacauggucuagauguaaa

SEQ ID NO: 3271539 - RNA, 21 nt, Vaccinia virus
aaaaucguguuuguguaguuu

SEQ ID NO: 3271540 - RNA, 17 nt, Vaccinia virus
cuuauuuuuaaaaauug

SEQ ID NO: 3271541 - RNA, 12 nt, Vaccinia virus
uaguagaugcua

SEQ ID NO: 3271542 - RNA, 22 nt, Vaccinia virus
gaauauauugugacuccagaua

SEQ ID NO: 3271543 - RNA, 15 nt, Vaccinia virus
auuuugguguaaauc

SEQ ID NO: 3271544 - RNA, 18 nt, Vaccinia virus
uguauauuuaucucuuca

SEQ ID NO: 3271545 - RNA, 18 nt, Vaccinia virus
uauguuuuaugaauagau

SEQ ID NO: 3271546 - RNA, 21 nt, Vaccinia virus
auuuggcauaaagagauagau

SEQ ID NO: 3271547 - RNA, 23 nt, Vaccinia virus
agaaauuuuugguucuucucuaa

SEQ ID NO: 3271548 - RNA, 17 nt, Vaccinia virus
uacaagaaauauuucca

SEQ ID NO: 3271549 - RNA, 22 nt, Vaccinia virus
acgggaaaggaauuaauuauuc

SEQ ID NO: 3271550 - RNA, 12 nt, Vaccinia virus
auauaguaauga

SEQ ID NO: 3271551 - RNA, 19 nt, Vaccinia virus
gauacuagaguaguauauu

SEQ ID NO: 3271552 - RNA, 22 nt, Vaccinia virus
uguuaccauaucguauaacuug

SEQ ID NO: 3271553 - RNA, 16 nt, Vaccinia virus
aaagauggucuaaaau

SEQ ID NO: 3271554 - RNA, 15 nt, Vaccinia virus
uuaacuguucaucgu

SEQ ID NO: 3271555 - RNA, 19 nt, Vaccinia virus
uauuuauccguaaaaaugu

SEQ ID NO: 3271556 - RNA, 21 nt, Vaccinia virus
auagaucggcaaagcuauugu

SEQ ID NO: 3271557 - RNA, 17 nt, Vaccinia virus
aguugauuguaaauaca

SEQ ID NO: 3271558 - RNA, 23 nt, Vaccinia virus
cuuaauccuucuagaauuagaau

SEQ ID NO: 3271559 - RNA, 21 nt, Vaccinia virus
auuuugcucuauaaacugaau

SEQ ID NO: 3271560 - RNA, 13 nt, Vaccinia virus
aguaaguaucuua

SEQ ID NO: 3271561 - RNA, 22 nt, Vaccinia virus
auuauaucguauuugugcuaua

SEQ ID NO: 3271562 - RNA, 17 nt, Vaccinia virus
uagccaucguuaauuau

SEQ ID NO: 3271563 - RNA, 17 nt, Vaccinia virus
uaccaauacucaagacu

SEQ ID NO: 3271564 - RNA, 20 nt, Vaccinia virus
aauaaauguuuugauuucaa

SEQ ID NO: 3271565 - RNA, 18 nt, Vaccinia virus
aacuauauucuuagaaau

SEQ ID NO: 3271566 - RNA, 13 nt, Vaccinia virus
agaugaaaaaugg

SEQ ID NO: 3271567 - RNA, 14 nt, Vaccinia virus
acaacuaaacagua

SEQ ID NO: 3271568 - RNA, 23 nt, Vaccinia virus
cugaaacaaagaauugugcauua

SEQ ID NO: 3271569 - RNA, 15 nt, Vaccinia virus
uguuuguucauugga

SEQ ID NO: 3271570 - RNA, 22 nt, Vaccinia virus
auuuucuuacaauuaacgagaa

SEQ ID NO: 3271571 - RNA, 13 nt, Vaccinia virus
uacuacaauuugu

SEQ ID NO: 3271572 - RNA, 19 nt, Vaccinia virus
auuaucaaaagacaugaua

SEQ ID NO: 3271573 - RNA, 14 nt, Vaccinia virus
uuccauauagauau

SEQ ID NO: 3271574 - RNA, 17 nt, Vaccinia virus
agaaauacuaaaaaaug

SEQ ID NO: 3271575 - RNA, 22 nt, Vaccinia virus
uguaugugcauucuuuaugaca

SEQ ID NO: 3271576 - RNA, 20 nt, Vaccinia virus
aagucccucauagaaugaua

SEQ ID NO: 3271577 - RNA, 17 nt, Vaccinia virus
uaguaacugacuuaaua

SEQ ID NO: 3271578 - RNA, 21 nt, Vaccinia virus
cgaguaaauaacuauagaagu

SEQ ID NO: 3271579 - RNA, 23 nt, Vaccinia virus
gaucuccucuauuuguacuaucu

SEQ ID NO: 3271580 - RNA, 12 nt, Vaccinia virus
cgaaaauauauu

SEQ ID NO: 3271581 - RNA, 19 nt, Vaccinia virus
acauuuuccauuuauaaca

SEQ ID NO: 3271582 - RNA, 22 nt, Vaccinia virus
ucuugauuaauaaaauuuauaa

SEQ ID NO: 3271583 - RNA, 22 nt, Vaccinia virus
aaucaccaaauuuuacaaaaaa

SEQ ID NO: 3271584 - RNA, 19 nt, Vaccinia virus
caaucggauacagacacuc

SEQ ID NO: 3271585 - RNA, 15 nt, Vaccinia virus
uaauagcaucucguu

SEQ ID NO: 3271586 - RNA, 22 nt, Vaccinia virus
aaugacaauaaaauuaucauga

SEQ ID NO: 3271587 - RNA, 20 nt, Vaccinia virus
uguucacaaaaauacauaaa

SEQ ID NO: 3271588 - RNA, 22 nt, Vaccinia virus
aaauaauccugaauauauugau

SEQ ID NO: 3271589 - RNA, 11 nt, Vaccinia virus
uagacauagau

SEQ ID NO: 3271590 - RNA, 16 nt, Vaccinia virus
auggaauuggagaaac

SEQ ID NO: 3271591 - RNA, 18 nt, Vaccinia virus
gucaaacuuaauaaagga

SEQ ID NO: 3271592 - RNA, 12 nt, Vaccinia virus
uccaauguuuaa

SEQ ID NO: 3271593 - RNA, 18 nt, Vaccinia virus
ucuaaacaguauguugua

SEQ ID NO: 3271594 - RNA, 12 nt, Vaccinia virus
uuuauaaauuuu

SEQ ID NO: 3271595 - RNA, 16 nt, Vaccinia virus
ccaccaucuccuccaa

SEQ ID NO: 3271596 - RNA, 16 nt, Vaccinia virus
accauacuucuacaga

SEQ ID NO: 3271597 - RNA, 20 nt, Vaccinia virus
auaucuuuacuaagaaaguu

SEQ ID NO: 3271598 - RNA, 20 nt, Vaccinia virus
aauaaucauaaauuauuuca

SEQ ID NO: 3271599 - RNA, 23 nt, Vaccinia virus
uacuuccaucaacauuguuucaa

SEQ ID NO: 3271600 - RNA, 17 nt, Vaccinia virus
aucuaugcuuacuguau

SEQ ID NO: 3271601 - RNA, 15 nt, Vaccinia virus
aaugucccuucaaga

SEQ ID NO: 3271602 - RNA, 23 nt, Vaccinia virus
uacuacaauacgguuuaccgaaa

SEQ ID NO: 3271603 - RNA, 21 nt, Vaccinia virus
ugaucucaauggaaugcaaaa

SEQ ID NO: 3271604 - RNA, 13 nt, Vaccinia virus
gacagaaaaaugc

SEQ ID NO: 3271605 - RNA, 18 nt, Vaccinia virus
aaucuuuugugaaaagau

SEQ ID NO: 3271606 - RNA, 17 nt, Vaccinia virus
uaaaucagaauguuaca

SEQ ID NO: 3271607 - RNA, 20 nt, Vaccinia virus
aggcaauguauauuuaucca

SEQ ID NO: 3271608 - RNA, 15 nt, Vaccinia virus
uaauaauaaacggaa

SEQ ID NO: 3271609 - RNA, 17 nt, Vaccinia virus
ugcuaauacgaauauua

SEQ ID NO: 3271610 - RNA, 18 nt, Vaccinia virus
agugacuuuguagcucuc

SEQ ID NO: 3271611 - RNA, 14 nt, Vaccinia virus
cgugaaauaaaguc

SEQ ID NO: 3271612 - RNA, 16 nt, Vaccinia virus
uacuuucaugauuuca

SEQ ID NO: 3271613 - RNA, 22 nt, Vaccinia virus
cauagcaugcgacuaugauauc

SEQ ID NO: 3271614 - RNA, 13 nt, Vaccinia virus
gaaauauauuaag

SEQ ID NO: 3271615 - RNA, 15 nt, Vaccinia virus
accauuaaagaauuc

SEQ ID NO: 3271616 - RNA, 14 nt, Vaccinia virus
cuucguuuaaauaa

SEQ ID NO: 3271617 - RNA, 21 nt, Vaccinia virus
agaauaugucucuuaacuauu

SEQ ID NO: 3271618 - RNA, 20 nt, Vaccinia virus
ucaagccggcuauauauucu

SEQ ID NO: 3271619 - RNA, 14 nt, Vaccinia virus
aaucugaaaaugaa

SEQ ID NO: 3271620 - RNA, 14 nt, Vaccinia virus
augcagaaaugauu

SEQ ID NO: 3271621 - RNA, 21 nt, Vaccinia virus
cuacauaguuaucuaucuuaa

SEQ ID NO: 3271622 - RNA, 21 nt, Vaccinia virus
aauucauccguccuucagaca

SEQ ID NO: 3271623 - RNA, 21 nt, Vaccinia virus
uccuauauauuugaaaaucgu

SEQ ID NO: 3271624 - RNA, 18 nt, Vaccinia virus
agaucuaaauacaaaauc

SEQ ID NO: 3271625 - RNA, 18 nt, Vaccinia virus
ucucaacaaguucucaau

SEQ ID NO: 3271626 - RNA, 19 nt, Vaccinia virus
aaucaagggaaaaucugaa

SEQ ID NO: 3271627 - RNA, 15 nt, Vaccinia virus
augccggagaguaaa

SEQ ID NO: 3271628 - RNA, 16 nt, Vaccinia virus
uaacagauacauaaac

SEQ ID NO: 3271629 - RNA, 15 nt, Vaccinia virus
uauuaucucaacaaa

SEQ ID NO: 3271630 - RNA, 20 nt, Vaccinia virus
aaaugaucauacucauuuau

SEQ ID NO: 3271631 - RNA, 13 nt, Vaccinia virus
uauauaucaugau

SEQ ID NO: 3271632 - RNA, 22 nt, Vaccinia virus
aucauaguuuuuacacauagau

SEQ ID NO: 3271633 - RNA, 18 nt, Vaccinia virus
auuucacgaaaaaugaug

SEQ ID NO: 3271634 - RNA, 11 nt, Vaccinia virus
agcauauuaaa

SEQ ID NO: 3271635 - RNA, 15 nt, Vaccinia virus
gaaagucagaaucua

SEQ ID NO: 3271636 - RNA, 12 nt, Vaccinia virus
ucguagaaagua

SEQ ID NO: 3271637 - RNA, 19 nt, Vaccinia virus
augaaaggagagaauguau

SEQ ID NO: 3271638 - RNA, 16 nt, Vaccinia virus
aaauucguuagcaaaa

SEQ ID NO: 3271639 - RNA, 20 nt, Vaccinia virus
gaccgaugaccauuuaaaaa

SEQ ID NO: 3271640 - RNA, 18 nt, Vaccinia virus
auacgaagaaaaaguaaa

SEQ ID NO: 3271641 - RNA, 22 nt, Vaccinia virus
aucaaggauacacucucaauau

SEQ ID NO: 3271642 - RNA, 21 nt, Vaccinia virus
acauccgccuuguauaugaug

SEQ ID NO: 3271643 - RNA, 13 nt, Vaccinia virus
aguguucuaaauu

SEQ ID NO: 3271644 - RNA, 14 nt, Vaccinia virus
gauauagauaugau

SEQ ID NO: 3271645 - RNA, 14 nt, Vaccinia virus
uauauauuaucaua

SEQ ID NO: 3271646 - RNA, 18 nt, Vaccinia virus
aaaggacaggaauauuua

SEQ ID NO: 3271647 - RNA, 23 nt, Vaccinia virus
gccacaaaugaaaaaaauacuua

SEQ ID NO: 3271648 - RNA, 13 nt, Vaccinia virus
guacuauguguua

SEQ ID NO: 3271649 - RNA, 22 nt, Vaccinia virus
gacgucuagaguuuauaucaau

SEQ ID NO: 3271650 - RNA, 16 nt, Vaccinia virus
aauccgguaaauggaa

SEQ ID NO: 3271651 - RNA, 14 nt, Vaccinia virus
guauccacaaauag

SEQ ID NO: 3271652 - RNA, 16 nt, Vaccinia virus
cucucuuaauuucaga

SEQ ID NO: 3271653 - RNA, 14 nt, Vaccinia virus
ucucagguacagau

SEQ ID NO: 3271654 - RNA, 14 nt, Vaccinia virus
cuaaaggaugagua

SEQ ID NO: 3271655 - RNA, 22 nt, Vaccinia virus
acucagauaauagcaauauuag

SEQ ID NO: 3271656 - RNA, 23 nt, Vaccinia virus
auucgugacagauccaugucuga

SEQ ID NO: 3271657 - RNA, 18 nt, Vaccinia virus
gugaaaauuacauacuua

SEQ ID NO: 3271658 - RNA, 13 nt, Vaccinia virus
uaauaaugauuca

SEQ ID NO: 3271659 - RNA, 16 nt, Vaccinia virus
aacuucuaaucuugua

SEQ ID NO: 3271660 - RNA, 15 nt, Vaccinia virus
aaaauaaaaugagua

SEQ ID NO: 3271661 - RNA, 19 nt, Vaccinia virus
acguuucuauuuucuauuu

SEQ ID NO: 3271662 - RNA, 21 nt, Vaccinia virus
gcugaaguaauuaauuuuucu

SEQ ID NO: 3271663 - RNA, 12 nt, Vaccinia virus
aucaauuucaaa

SEQ ID NO: 3271664 - RNA, 21 nt, Vaccinia virus
auacaucuauuaguaugguuu

SEQ ID NO: 3271665 - RNA, 13 nt, Vaccinia virus
gaaggaauucuuu

SEQ ID NO: 3271666 - RNA, 14 nt, Vaccinia virus
aaaaacuaauauua

SEQ ID NO: 3271667 - RNA, 18 nt, Vaccinia virus
uaugguucgcucaaaaau

SEQ ID NO: 3271668 - RNA, 23 nt, Vaccinia virus
aauaguucucccuuuuuaaaggu

SEQ ID NO: 3271669 - RNA, 16 nt, Vaccinia virus
gcuugugauuuuuucu

SEQ ID NO: 3271670 - RNA, 21 nt, Vaccinia virus
gaaaacgucauucaauaagau

SEQ ID NO: 3271671 - RNA, 23 nt, Vaccinia virus
acacuccguuuaauaaacugagu

SEQ ID NO: 3271672 - RNA, 19 nt, Vaccinia virus
uuacuaucaauauuauuca

SEQ ID NO: 3271673 - RNA, 18 nt, Vaccinia virus
aaucauccuaagaugaua

SEQ ID NO: 3271674 - RNA, 16 nt, Vaccinia virus
aaugaauuuuuaaaau

SEQ ID NO: 3271675 - RNA, 17 nt, Vaccinia virus
ucauauaccauuucuag

SEQ ID NO: 3271676 - RNA, 15 nt, Vaccinia virus
auaucagacagcaug

SEQ ID NO: 3271677 - RNA, 14 nt, Vaccinia virus
agcuauuaaacugu

SEQ ID NO: 3271678 - RNA, 19 nt, Vaccinia virus
uauaauaacaaguaugaca

SEQ ID NO: 3271679 - RNA, 16 nt, Vaccinia virus
cuaguaucauuucuac

SEQ ID NO: 3271680 - RNA, 13 nt, Vaccinia virus
uggguuccauaac

SEQ ID NO: 3271681 - RNA, 17 nt, Vaccinia virus
acaagagauagaggagg

SEQ ID NO: 3271682 - RNA, 18 nt, Vaccinia virus
guaccaucgugauucuua

SEQ ID NO: 3271683 - RNA, 17 nt, Vaccinia virus
ucagacuacuuauucua

SEQ ID NO: 3271684 - RNA, 19 nt, Vaccinia virus
gcccucuauuagcauaaac

SEQ ID NO: 3271685 - RNA, 17 nt, Vaccinia virus
auugaauaggaguuuga

SEQ ID NO: 3271686 - RNA, 19 nt, Vaccinia virus
uaaagaauguauaaaccuu

SEQ ID NO: 3271687 - RNA, 20 nt, Vaccinia virus
ccuuccacauccaugagauu

SEQ ID NO: 3271688 - RNA, 17 nt, Vaccinia virus
uauaauauauuagauau

SEQ ID NO: 3271689 - RNA, 14 nt, Vaccinia virus
aucaucgauuuuca

SEQ ID NO: 3271690 - RNA, 16 nt, Vaccinia virus
ucgucuuuguuagcau

SEQ ID NO: 3271691 - RNA, 20 nt, Vaccinia virus
cagauacgaugaugauguag

SEQ ID NO: 3271692 - RNA, 20 nt, Vaccinia virus
auuugaucgauuacauuuau

SEQ ID NO: 3271693 - RNA, 16 nt, Vaccinia virus
aucuucgguaucuuga

SEQ ID NO: 3271694 - RNA, 15 nt, Vaccinia virus
auauugguuguuaaa

SEQ ID NO: 3271695 - RNA, 19 nt, Vaccinia virus
gaauuuuuaaaaucauuau

SEQ ID NO: 3271696 - RNA, 22 nt, Vaccinia virus
uuuacgcaaaacauuauaauaa

SEQ ID NO: 3271697 - RNA, 18 nt, Vaccinia virus
uaaaauauaaugauauac

SEQ ID NO: 3271698 - RNA, 15 nt, Vaccinia virus
uuuaaaacagaugau

SEQ ID NO: 3271699 - RNA, 15 nt, Vaccinia virus
agucauguuaaaaau

SEQ ID NO: 3271700 - RNA, 17 nt, Vaccinia virus
cuucccucuaucauguu

SEQ ID NO: 3271701 - RNA, 13 nt, Vaccinia virus
uacaauucuguac

SEQ ID NO: 3271702 - RNA, 16 nt, Vaccinia virus
guauaauucuuuauaa

SEQ ID NO: 3271703 - RNA, 20 nt, Vaccinia virus
uguaacauugaguaaauccu

SEQ ID NO: 3271704 - RNA, 14 nt, Vaccinia virus
uaguuuucuaaaau

SEQ ID NO: 3271705 - RNA, 21 nt, Vaccinia virus
gaauugacgaaacaauguuuc

SEQ ID NO: 3271706 - RNA, 18 nt, Vaccinia virus
agagugagucuagaauuc

SEQ ID NO: 3271707 - RNA, 21 nt, Vaccinia virus
uuugucuuagaacaacauuuu

SEQ ID NO: 3271708 - RNA, 20 nt, Vaccinia virus
aggugaugcugguucuggag

SEQ ID NO: 3271709 - RNA, 16 nt, Vaccinia virus
uaucuauaauaucuua

SEQ ID NO: 3271710 - RNA, 24 nt, Vaccinia virus
acugguaauccacauaguuguaaa

SEQ ID NO: 3271711 - RNA, 15 nt, Vaccinia virus
ucaagucaaagaaau

SEQ ID NO: 3271712 - RNA, 13 nt, Vaccinia virus
cagaaaaaacaau

SEQ ID NO: 3271713 - RNA, 17 nt, Vaccinia virus
gagagaacuaacacaac

SEQ ID NO: 3271714 - RNA, 19 nt, Vaccinia virus
gagaagaagcuaauacccu

SEQ ID NO: 3271715 - RNA, 12 nt, Vaccinia virus
auaucaauuagu

SEQ ID NO: 3271716 - RNA, 14 nt, Vaccinia virus
ucuaacaucaucau

SEQ ID NO: 3271717 - RNA, 16 nt, Vaccinia virus
uaacucauuuuuugaa

SEQ ID NO: 3271718 - RNA, 21 nt, Vaccinia virus
auuugagagaucauuucuaua

SEQ ID NO: 3271719 - RNA, 15 nt, Vaccinia virus
accacgaaacaauau

SEQ ID NO: 3271720 - RNA, 14 nt, Vaccinia virus
aguaauuauaagaa

SEQ ID NO: 3271721 - RNA, 20 nt, Vaccinia virus
gaauaaguuuauuagacacg

SEQ ID NO: 3271722 - RNA, 17 nt, Vaccinia virus
gauuauguuuuaugaau

SEQ ID NO: 3271723 - RNA, 22 nt, Vaccinia virus
acauucgauggucuaucuauca

SEQ ID NO: 3271724 - RNA, 14 nt, Vaccinia virus
auuuauuaucuugu

SEQ ID NO: 3271725 - RNA, 16 nt, Vaccinia virus
acagaacaguaaaugu

SEQ ID NO: 3271726 - RNA, 19 nt, Vaccinia virus
uugaugacgucaaacaaug

SEQ ID NO: 3271727 - RNA, 19 nt, Vaccinia virus
agucaauauauuaagaagu

SEQ ID NO: 3271728 - RNA, 20 nt, Vaccinia virus
cauaauuaaauuaucgacau

SEQ ID NO: 3271729 - RNA, 15 nt, Vaccinia virus
aaauauacagcaaug

SEQ ID NO: 3271730 - RNA, 19 nt, Vaccinia virus
uggaugaugucauucacaa

SEQ ID NO: 3271731 - RNA, 20 nt, Vaccinia virus
caagcaaaaacaaaaaacuu

SEQ ID NO: 3271732 - RNA, 17 nt, Vaccinia virus
agauugaucauguagaa

SEQ ID NO: 3271733 - RNA, 18 nt, Vaccinia virus
guauaacauucuuaaaca

SEQ ID NO: 3271734 - RNA, 16 nt, Vaccinia virus
augauccauuuauagu

SEQ ID NO: 3271735 - RNA, 22 nt, Vaccinia virus
aucuucauccaguagacgacau

SEQ ID NO: 3271736 - RNA, 20 nt, Vaccinia virus
gucaauaaggcguuuaaaaa

SEQ ID NO: 3271737 - RNA, 14 nt, Vaccinia virus
gccauuacaagaua

SEQ ID NO: 3271738 - RNA, 15 nt, Vaccinia virus
uaaauuaauuuacca

SEQ ID NO: 3271739 - RNA, 23 nt, Vaccinia virus
uccaaucuaagaaauuuaaaauu

SEQ ID NO: 3271740 - RNA, 14 nt, Vaccinia virus
cauuaaucacugau

SEQ ID NO: 3271741 - RNA, 15 nt, Vaccinia virus
aauaaucguuauuau

SEQ ID NO: 3271742 - RNA, 16 nt, Vaccinia virus
agauuuuguauuaccu

SEQ ID NO: 3271743 - RNA, 17 nt, Vaccinia virus
aaucgcgcguuagaaau

SEQ ID NO: 3271744 - RNA, 16 nt, Vaccinia virus
guauaauauuuaaaca

SEQ ID NO: 3271745 - RNA, 18 nt, Vaccinia virus
aacagaguagauauuaau

SEQ ID NO: 3271746 - RNA, 16 nt, Vaccinia virus
auaaaaacuuauacau

SEQ ID NO: 3271747 - RNA, 15 nt, Vaccinia virus
aauagcucaauauaa

SEQ ID NO: 3271748 - RNA, 13 nt, Vaccinia virus
uaucuuguuacaa

SEQ ID NO: 3271749 - RNA, 17 nt, Vaccinia virus
gaaaugaugaaggaaag

SEQ ID NO: 3271750 - RNA, 15 nt, Vaccinia virus
uuuguugagaugcug

SEQ ID NO: 3271751 - RNA, 20 nt, Vaccinia virus
agauccuuguucuauuccca

SEQ ID NO: 3271752 - RNA, 22 nt, Vaccinia virus
ucuaauccuccuauuacauaua

SEQ ID NO: 3271753 - RNA, 17 nt, Vaccinia virus
aauauuagguaaagaua

SEQ ID NO: 3271754 - RNA, 17 nt, Vaccinia virus
agucauacguaaugaag

SEQ ID NO: 3271755 - RNA, 17 nt, Vaccinia virus
auagcauuaauacagua

SEQ ID NO: 3271756 - RNA, 22 nt, Vaccinia virus
acguacccaucaauauaaauaa

SEQ ID NO: 3271757 - RNA, 19 nt, Vaccinia virus
uaucucaaaaaauaauaag

SEQ ID NO: 3271758 - RNA, 21 nt, Vaccinia virus
aucuuaacuccucuauuaaug

SEQ ID NO: 3271759 - RNA, 13 nt, Vaccinia virus
uuuuaacaucuuu

SEQ ID NO: 3271760 - RNA, 15 nt, Vaccinia virus
uauaacaaauacaga

SEQ ID NO: 3271761 - RNA, 13 nt, Vaccinia virus
uauuuuacuaaau

SEQ ID NO: 3271762 - RNA, 14 nt, Vaccinia virus
auuaaaauacuuuc

SEQ ID NO: 3271763 - RNA, 18 nt, Vaccinia virus
uuccauccacaauuauug

SEQ ID NO: 3271764 - RNA, 19 nt, Vaccinia virus
cuacaaaauguugauaauc

SEQ ID NO: 3271765 - RNA, 15 nt, Vaccinia virus
auauaucaugaugau

SEQ ID NO: 3271766 - RNA, 13 nt, Vaccinia virus
cucuauagauaau

SEQ ID NO: 3271767 - RNA, 15 nt, Vaccinia virus
aucguacuauauaca

SEQ ID NO: 3271768 - RNA, 18 nt, Vaccinia virus
gacaaaguccuaguugua

SEQ ID NO: 3271769 - RNA, 23 nt, Vaccinia virus
aaaggcggucacgucgucaaaau

SEQ ID NO: 3271770 - RNA, 16 nt, Vaccinia virus
agauacuguuuagaga

SEQ ID NO: 3271771 - RNA, 21 nt, Vaccinia virus
auugucucgucaaugucuaua

SEQ ID NO: 3271772 - RNA, 17 nt, Vaccinia virus
auuaauuaucacauauu

SEQ ID NO: 3271773 - RNA, 14 nt, Vaccinia virus
cuauguaaaugaua

SEQ ID NO: 3271774 - RNA, 22 nt, Vaccinia virus
cucuauaguuuguuuucauuau

SEQ ID NO: 3271775 - RNA, 18 nt, Vaccinia virus
gauccaucaaaaaacaac

SEQ ID NO: 3271776 - RNA, 23 nt, Vaccinia virus
uggauaaaaugcaugacgugaua

SEQ ID NO: 3271777 - RNA, 16 nt, Vaccinia virus
gaugauacauuucauc

SEQ ID NO: 3271778 - RNA, 16 nt, Vaccinia virus
uuguacgguacguuau

SEQ ID NO: 3271779 - RNA, 17 nt, Vaccinia virus
uaaacacacauuauuca

SEQ ID NO: 3271780 - RNA, 22 nt, Vaccinia virus
uuauuacuaaacuacgugaaca

SEQ ID NO: 3271781 - RNA, 22 nt, Vaccinia virus
cuucgaugagauugaucaugua

SEQ ID NO: 3271782 - RNA, 18 nt, Vaccinia virus
uuagaucucauaugugcu

SEQ ID NO: 3271783 - RNA, 13 nt, Vaccinia virus
ggucuaucuauua

SEQ ID NO: 3271784 - RNA, 18 nt, Vaccinia virus
guucuaaauuuagauagu

SEQ ID NO: 3271785 - RNA, 12 nt, Vaccinia virus
uauuuacaauua

SEQ ID NO: 3271786 - RNA, 16 nt, Vaccinia virus
auaaacauaaguauau

SEQ ID NO: 3271787 - RNA, 15 nt, Vaccinia virus
uccaugaucaagaag

SEQ ID NO: 3271788 - RNA, 15 nt, Vaccinia virus
uaauggaucuucuag

SEQ ID NO: 3271789 - RNA, 14 nt, Vaccinia virus
caaagcaaccagaa

SEQ ID NO: 3271790 - RNA, 22 nt, Vaccinia virus
uaaacaaucuaguuuugagaac

SEQ ID NO: 3271791 - RNA, 13 nt, Vaccinia virus
ucaucuauaaaug

SEQ ID NO: 3271792 - RNA, 21 nt, Vaccinia virus
gaugauccuuugagaagacaa

SEQ ID NO: 3271793 - RNA, 17 nt, Vaccinia virus
auagcaaaaucuuuacu

SEQ ID NO: 3271794 - RNA, 13 nt, Vaccinia virus
uaacaacuuauac

SEQ ID NO: 3271795 - RNA, 13 nt, Vaccinia virus
uuauuagaucuuu

SEQ ID NO: 3271796 - RNA, 15 nt, Vaccinia virus
ccuuacucaugauua

SEQ ID NO: 3271797 - RNA, 14 nt, Vaccinia virus
cauguauauaucca

SEQ ID NO: 3271798 - RNA, 15 nt, Vaccinia virus
gaagaagaaaacaaa

SEQ ID NO: 3271799 - RNA, 19 nt, Vaccinia virus
cucugauagcaguuucaau

SEQ ID NO: 3271800 - RNA, 16 nt, Vaccinia virus
ugcauaaucagauucu

SEQ ID NO: 3271801 - RNA, 21 nt, Vaccinia virus
cuaugaauaccauuaaacaau

SEQ ID NO: 3271802 - RNA, 14 nt, Vaccinia virus
gcuauuaaucuuua

SEQ ID NO: 3271803 - RNA, 12 nt, Vaccinia virus
uaauacagacga

SEQ ID NO: 3271804 - RNA, 19 nt, Vaccinia virus
uaauguuuaauuuaucaaa

SEQ ID NO: 3271805 - RNA, 13 nt, Vaccinia virus
guauguuugugaa

SEQ ID NO: 3271806 - RNA, 16 nt, Vaccinia virus
uauaaucguuaaauuu

SEQ ID NO: 3271807 - RNA, 15 nt, Vaccinia virus
guuagauauagaaga

SEQ ID NO: 3271808 - RNA, 20 nt, Vaccinia virus
ucaaucauccuaaagaguau

SEQ ID NO: 3271809 - RNA, 15 nt, Vaccinia virus
uagcagucuaacauu

SEQ ID NO: 3271810 - RNA, 17 nt, Vaccinia virus
gaacguauaguuugaua

SEQ ID NO: 3271811 - RNA, 14 nt, Vaccinia virus
uaucugacauaaac

SEQ ID NO: 3271812 - RNA, 15 nt, Vaccinia virus
auaagaguguaguau

SEQ ID NO: 3271813 - RNA, 20 nt, Vaccinia virus
aauguagauaaucauuuaau

SEQ ID NO: 3271814 - RNA, 20 nt, Vaccinia virus
aagaaucaaaagaaugauuc

SEQ ID NO: 3271815 - RNA, 15 nt, Vaccinia virus
ugaagaggaaacaug

SEQ ID NO: 3271816 - RNA, 15 nt, Vaccinia virus
acuauauuauguuuu

SEQ ID NO: 3271817 - RNA, 14 nt, Vaccinia virus
auaaaauaacaaua

SEQ ID NO: 3271818 - RNA, 17 nt, Vaccinia virus
aacgaaguauuuauacu

SEQ ID NO: 3271819 - RNA, 14 nt, Vaccinia virus
ucccaaauaucuuu

SEQ ID NO: 3271820 - RNA, 20 nt, Vaccinia virus
ucguggauaaucauucuuaa

SEQ ID NO: 3271821 - RNA, 13 nt, Vaccinia virus
gaaugaagagaag

SEQ ID NO: 3271822 - RNA, 18 nt, Vaccinia virus
auaauuuuaccagaauac

SEQ ID NO: 3271823 - RNA, 17 nt, Vaccinia virus
auaucuucuuuuuucca

SEQ ID NO: 3271824 - RNA, 14 nt, Vaccinia virus
auaaauucuagcau

SEQ ID NO: 3271825 - RNA, 14 nt, Vaccinia virus
aauacaaaauguua

SEQ ID NO: 3271826 - RNA, 14 nt, Vaccinia virus
uacgcuauuaaaau

SEQ ID NO: 3271827 - RNA, 15 nt, Vaccinia virus
uucugauuuuaucuu

SEQ ID NO: 3271828 - RNA, 16 nt, Vaccinia virus
uccauaggauacuuug

SEQ ID NO: 3271829 - RNA, 14 nt, Vaccinia virus
uucuagucuagaaa

SEQ ID NO: 3271830 - RNA, 22 nt, Vaccinia virus
augauggguguacaaucaagau

SEQ ID NO: 3271831 - RNA, 24 nt, Vaccinia virus
uuagaucugauacaccuguaauca

SEQ ID NO: 3271832 - RNA, 19 nt, Vaccinia virus
acuaaugcaucuauuucau

SEQ ID NO: 3271833 - RNA, 17 nt, Vaccinia virus
agaagugugaauaugau

SEQ ID NO: 3271834 - RNA, 20 nt, Vaccinia virus
aucgauccucacuucgaaga

SEQ ID NO: 3271835 - RNA, 20 nt, Vaccinia virus
ccaagaaaauagaaauucgu

SEQ ID NO: 3271836 - RNA, 22 nt, Vaccinia virus
auagcuuuacucugaaaagaaa

SEQ ID NO: 3271837 - RNA, 13 nt, Vaccinia virus
auuuaaacaaaaa

SEQ ID NO: 3271838 - RNA, 16 nt, Vaccinia virus
cauaaacaauauaaau

SEQ ID NO: 3271839 - RNA, 15 nt, Vaccinia virus
cauuccaguauucuc

SEQ ID NO: 3271840 - RNA, 16 nt, Vaccinia virus
auuaaaucauuaaaug

SEQ ID NO: 3271841 - RNA, 14 nt, Vaccinia virus
uauccaacauaugg

SEQ ID NO: 3271842 - RNA, 14 nt, Vaccinia virus
auaaugaucauaua

SEQ ID NO: 3271843 - RNA, 14 nt, Vaccinia virus
auuucuaauguuuc

SEQ ID NO: 3271844 - RNA, 16 nt, Vaccinia virus
uauucugauucuucua

SEQ ID NO: 3271845 - RNA, 15 nt, Vaccinia virus
aucuuccuucuuauu

SEQ ID NO: 3271846 - RNA, 18 nt, Vaccinia virus
ucccacaguguugccauu

SEQ ID NO: 3271847 - RNA, 14 nt, Vaccinia virus
uaaagguaaaugua

SEQ ID NO: 3271848 - RNA, 19 nt, Vaccinia virus
auauuaaaaaaaaauacuu

SEQ ID NO: 3271849 - RNA, 12 nt, Vaccinia virus
aaacaacugaaa

SEQ ID NO: 3271850 - RNA, 22 nt, Vaccinia virus
cauccgauaacauguuaauuuc

SEQ ID NO: 3271851 - RNA, 16 nt, Vaccinia virus
auauuagacaauacua

SEQ ID NO: 3271852 - RNA, 18 nt, Vaccinia virus
aaagaggcugguaacaac

SEQ ID NO: 3271853 - RNA, 16 nt, Vaccinia virus
uugaucuuauuauaca

SEQ ID NO: 3271854 - RNA, 17 nt, Vaccinia virus
ccuuauaaagaaugaau

SEQ ID NO: 3271855 - RNA, 17 nt, Vaccinia virus
ucggauaauauguaaaa

SEQ ID NO: 3271856 - RNA, 21 nt, Vaccinia virus
uugucguaaauacaugucuaa

SEQ ID NO: 3271857 - RNA, 16 nt, Vaccinia virus
gaucuuaccaucuucu

SEQ ID NO: 3271858 - RNA, 22 nt, Vaccinia virus
gcaaaaauaauaugauuagaag

SEQ ID NO: 3271859 - RNA, 22 nt, Vaccinia virus
uacuucuccaaucauauagaua

SEQ ID NO: 3271860 - RNA, 23 nt, Vaccinia virus
aauacacuuagguuuuuggaaaa

SEQ ID NO: 3271861 - RNA, 22 nt, Vaccinia virus
cuucuacaucuuccuucuuauu

SEQ ID NO: 3271862 - RNA, 21 nt, Vaccinia virus
aaauuauuuaauaaaguauau

SEQ ID NO: 3271863 - RNA, 13 nt, Vaccinia virus
gaucaaauacuug

SEQ ID NO: 3271864 - RNA, 13 nt, Vaccinia virus
gaguguagaaaac

SEQ ID NO: 3271865 - RNA, 20 nt, Vaccinia virus
auuacuaugaaucauaaaga

SEQ ID NO: 3271866 - RNA, 14 nt, Vaccinia virus
uagaccuguagccg

SEQ ID NO: 3271867 - RNA, 13 nt, Vaccinia virus
aauugucuagaua

SEQ ID NO: 3271868 - RNA, 13 nt, Vaccinia virus
guguguagauauc

SEQ ID NO: 3271869 - RNA, 19 nt, Vaccinia virus
agaugauucgauaaauaga

SEQ ID NO: 3271870 - RNA, 14 nt, Vaccinia virus
uauuaaccaugaaa

SEQ ID NO: 3271871 - RNA, 21 nt, Vaccinia virus
uguauaacaaucguauaucuu

SEQ ID NO: 3271872 - RNA, 13 nt, Vaccinia virus
aucguaaugaaca

SEQ ID NO: 3271873 - RNA, 15 nt, Vaccinia virus
agcacaucaaaugau

SEQ ID NO: 3271874 - RNA, 15 nt, Vaccinia virus
gugucugaaucgaua

SEQ ID NO: 3271875 - RNA, 15 nt, Vaccinia virus
aauuaauuugauaau

SEQ ID NO: 3271876 - RNA, 11 nt, Vaccinia virus
caaagaaagag

SEQ ID NO: 3271877 - RNA, 20 nt, Vaccinia virus
caaaaauuuuuuauuucagc

SEQ ID NO: 3271878 - RNA, 21 nt, Vaccinia virus
aacauuuguguuuguaucuua

SEQ ID NO: 3271879 - RNA, 14 nt, Vaccinia virus
uggaauuaacuauc

SEQ ID NO: 3271880 - RNA, 19 nt, Vaccinia virus
aauauaucuauaauuugau

SEQ ID NO: 3271881 - RNA, 20 nt, Vaccinia virus
ccguuauauaaucuacaaaa

SEQ ID NO: 3271882 - RNA, 20 nt, Vaccinia virus
cagcuacugcugauaaugau

SEQ ID NO: 3271883 - RNA, 22 nt, Vaccinia virus
agaaaggugugcacucugaauu

SEQ ID NO: 3271884 - RNA, 14 nt, Vaccinia virus
augaugauguagaa

SEQ ID NO: 3271885 - RNA, 16 nt, Vaccinia virus
cauuaaaaugauuauu

SEQ ID NO: 3271886 - RNA, 18 nt, Vaccinia virus
caauguacgccguguggu

SEQ ID NO: 3271887 - RNA, 20 nt, Vaccinia virus
uauaagauuaucaaaaucuu

SEQ ID NO: 3271888 - RNA, 18 nt, Vaccinia virus
agucgaacaaucuuaaug

SEQ ID NO: 3271889 - RNA, 15 nt, Vaccinia virus
cauacacuacaguaa

SEQ ID NO: 3271890 - RNA, 21 nt, Vaccinia virus
auaacuagcuuaaacagauga

SEQ ID NO: 3271891 - RNA, 15 nt, Vaccinia virus
aggacguaacuauaa

SEQ ID NO: 3271892 - RNA, 16 nt, Vaccinia virus
cuuucaugauuucauu

SEQ ID NO: 3271893 - RNA, 13 nt, Vaccinia virus
guguuauaauauu

SEQ ID NO: 3271894 - RNA, 13 nt, Vaccinia virus
uugguguaaaucu

SEQ ID NO: 3271895 - RNA, 20 nt, Vaccinia virus
cuggaaaauaaaucacugac

SEQ ID NO: 3271896 - RNA, 23 nt, Vaccinia virus
agacgucaauaucugauuauuau

SEQ ID NO: 3271897 - RNA, 16 nt, Vaccinia virus
ucuccuuuuguagaca

SEQ ID NO: 3271898 - RNA, 12 nt, Vaccinia virus
uucuuucaaaau

SEQ ID NO: 3271899 - RNA, 16 nt, Vaccinia virus
caucuuaguauaacac

SEQ ID NO: 3271900 - RNA, 21 nt, Vaccinia virus
uuuuccucagacaucuaaaaa

SEQ ID NO: 3271901 - RNA, 21 nt, Vaccinia virus
uucuaagaaaucuauaauauc

SEQ ID NO: 3271902 - RNA, 22 nt, Vaccinia virus
aaagugaucacgaguuuguaaa

SEQ ID NO: 3271903 - RNA, 14 nt, Vaccinia virus
uauuggcuuucaua

SEQ ID NO: 3271904 - RNA, 13 nt, Vaccinia virus
ggcucauugauua

SEQ ID NO: 3271905 - RNA, 13 nt, Vaccinia virus
aaugaauauuaaa

SEQ ID NO: 3271906 - RNA, 12 nt, Vaccinia virus
aauacugaauuc

SEQ ID NO: 3271907 - RNA, 22 nt, Vaccinia virus
aauaguuacgcaauaucucaau

SEQ ID NO: 3271908 - RNA, 16 nt, Vaccinia virus
uaauaaaauguuacaa

SEQ ID NO: 3271909 - RNA, 13 nt, Vaccinia virus
acaugguuaaagu

SEQ ID NO: 3271910 - RNA, 21 nt, Vaccinia virus
aaauguuacugaagaauauau

SEQ ID NO: 3271911 - RNA, 19 nt, Vaccinia virus
aucugauaacuuuaaacau

SEQ ID NO: 3271912 - RNA, 23 nt, Vaccinia virus
uugccacauccuuuauuaaauca

SEQ ID NO: 3271913 - RNA, 15 nt, Vaccinia virus
uaacuuugauagcaa

SEQ ID NO: 3271914 - RNA, 14 nt, Vaccinia virus
aggauacuuuguaa

SEQ ID NO: 3271915 - RNA, 22 nt, Vaccinia virus
uuuacgagcuauuaaacuguuu

SEQ ID NO: 3271916 - RNA, 15 nt, Vaccinia virus
ccaccucucuggaag

SEQ ID NO: 3271917 - RNA, 23 nt, Vaccinia virus
cuucagaauacaaucuguauuuc

SEQ ID NO: 3271918 - RNA, 18 nt, Vaccinia virus
caaagguacuauuucuac

SEQ ID NO: 3271919 - RNA, 19 nt, Vaccinia virus
ucguuuccucuguacacau

SEQ ID NO: 3271920 - RNA, 13 nt, Vaccinia virus
ucuaaaauguaua

SEQ ID NO: 3271921 - RNA, 18 nt, Vaccinia virus
gauaaaacgauaaaagau

SEQ ID NO: 3271922 - RNA, 23 nt, Vaccinia virus
aacaagugauacguaagaauaua

SEQ ID NO: 3271923 - RNA, 12 nt, Vaccinia virus
uucuaauacuau

SEQ ID NO: 3271924 - RNA, 23 nt, Vaccinia virus
gcauagaguuugcggauaaugau

SEQ ID NO: 3271925 - RNA, 13 nt, Vaccinia virus
uccagauauauau

SEQ ID NO: 3271926 - RNA, 18 nt, Vaccinia virus
uugagguaaucuucuuug

SEQ ID NO: 3271927 - RNA, 13 nt, Vaccinia virus
ugcaauaaaucua

SEQ ID NO: 3271928 - RNA, 19 nt, Vaccinia virus
guauuauucauuuucuauu

SEQ ID NO: 3271929 - RNA, 19 nt, Vaccinia virus
aaucaauguacauacaucg

SEQ ID NO: 3271930 - RNA, 23 nt, Vaccinia virus
auagagagaaagaagaaauacua

SEQ ID NO: 3271931 - RNA, 18 nt, Vaccinia virus
auuggaauaccaaauauu

SEQ ID NO: 3271932 - RNA, 19 nt, Vaccinia virus
auuuuaacgacgacauauu

SEQ ID NO: 3271933 - RNA, 21 nt, Vaccinia virus
auaauucauuaauauguacau

SEQ ID NO: 3271934 - RNA, 16 nt, Vaccinia virus
uauuugauauacuaag

SEQ ID NO: 3271935 - RNA, 13 nt, Vaccinia virus
auaaaaucuauau

SEQ ID NO: 3271936 - RNA, 20 nt, Vaccinia virus
caguuccccuacguaucuau

SEQ ID NO: 3271937 - RNA, 12 nt, Vaccinia virus
auuaaucaaaug

SEQ ID NO: 3271938 - RNA, 16 nt, Vaccinia virus
uuauuagaauaagagu

SEQ ID NO: 3271939 - RNA, 16 nt, Vaccinia virus
ccaacucauuuaaaua

SEQ ID NO: 3271940 - RNA, 17 nt, Vaccinia virus
aaagaaaauaucuauau

SEQ ID NO: 3271941 - RNA, 15 nt, Vaccinia virus
cuaucuuguuuagau

SEQ ID NO: 3271942 - RNA, 16 nt, Vaccinia virus
aauuaaucaaauggua

SEQ ID NO: 3271943 - RNA, 16 nt, Vaccinia virus
gauacacguauaaaaa

SEQ ID NO: 3271944 - RNA, 19 nt, Vaccinia virus
cuaauucuauauuguuaua

SEQ ID NO: 3271945 - RNA, 12 nt, Vaccinia virus
uaucuaaagcuu

SEQ ID NO: 3271946 - RNA, 15 nt, Vaccinia virus
acauauucaguugau

SEQ ID NO: 3271947 - RNA, 16 nt, Vaccinia virus
caaaaaguaagauauu

SEQ ID NO: 3271948 - RNA, 20 nt, Vaccinia virus
cuuuauacuauaauaguacu

SEQ ID NO: 3271949 - RNA, 14 nt, Vaccinia virus
ucuauagucagaau

SEQ ID NO: 3271950 - RNA, 13 nt, Vaccinia virus
acaucuguuugag

SEQ ID NO: 3271951 - RNA, 21 nt, Vaccinia virus
augucggucggcauucuauuu

SEQ ID NO: 3271952 - RNA, 21 nt, Vaccinia virus
cuaaguagaccguuaaugaaa

SEQ ID NO: 3271953 - RNA, 14 nt, Vaccinia virus
uuuguauucauaga

SEQ ID NO: 3271954 - RNA, 20 nt, Vaccinia virus
aauagugucauuaggaguua

SEQ ID NO: 3271955 - RNA, 14 nt, Vaccinia virus
uugcauuauagaau

SEQ ID NO: 3271956 - RNA, 15 nt, Vaccinia virus
aauauauugaucaua

SEQ ID NO: 3271957 - RNA, 17 nt, Vaccinia virus
uguuauaagauuacuua

SEQ ID NO: 3271958 - RNA, 21 nt, Vaccinia virus
uugauaguuguuccuagauau

SEQ ID NO: 3271959 - RNA, 12 nt, Vaccinia virus
gcagaugaugau

SEQ ID NO: 3271960 - RNA, 21 nt, Vaccinia virus
auuauugaagaugaugugaau

SEQ ID NO: 3271961 - RNA, 19 nt, Vaccinia virus
uaguugauagaacaaaaua

SEQ ID NO: 3271962 - RNA, 20 nt, Vaccinia virus
cgaugauucgucuacauguu

SEQ ID NO: 3271963 - RNA, 16 nt, Vaccinia virus
ucuguuuuauuaaccg

SEQ ID NO: 3271964 - RNA, 19 nt, Vaccinia virus
ugaauugaugaguuguaca

SEQ ID NO: 3271965 - RNA, 16 nt, Vaccinia virus
aauggcauacauagaa

SEQ ID NO: 3271966 - RNA, 17 nt, Vaccinia virus
uacuugaaauucuccag

SEQ ID NO: 3271967 - RNA, 19 nt, Vaccinia virus
aucuucguuaaaaaguuuu

SEQ ID NO: 3271968 - RNA, 21 nt, Vaccinia virus
auccaaguuaaaggauauuau

SEQ ID NO: 3271969 - RNA, 16 nt, Vaccinia virus
uauuggaauuauaaua

SEQ ID NO: 3271970 - RNA, 22 nt, Vaccinia virus
auugcaugguaaggaaguagaa

SEQ ID NO: 3271971 - RNA, 16 nt, Vaccinia virus
aacguuuuaaaaaaag

SEQ ID NO: 3271972 - RNA, 19 nt, Vaccinia virus
ucuguuccccucuaucauc

SEQ ID NO: 3271973 - RNA, 22 nt, Vaccinia virus
aaguuuuuccaauuauauggua

SEQ ID NO: 3271974 - RNA, 21 nt, Vaccinia virus
uauuuaacggcuauucaagau

SEQ ID NO: 3271975 - RNA, 21 nt, Vaccinia virus
auauguuaaauauaaaaaaug

SEQ ID NO: 3271976 - RNA, 14 nt, Vaccinia virus
aaacaauacucuau

SEQ ID NO: 3271977 - RNA, 14 nt, Vaccinia virus
cucuuggaauuaau

SEQ ID NO: 3271978 - RNA, 20 nt, Vaccinia virus
uuaauacuacauauuuuuca

SEQ ID NO: 3271979 - RNA, 15 nt, Vaccinia virus
aucuguauaauaaga

SEQ ID NO: 3271980 - RNA, 22 nt, Vaccinia virus
gaucaaggacuuuuauauccca

SEQ ID NO: 3271981 - RNA, 21 nt, Vaccinia virus
acgucaucgcuucaucuauca

SEQ ID NO: 3271982 - RNA, 15 nt, Vaccinia virus
uaauuaaauguuuga

SEQ ID NO: 3271983 - RNA, 20 nt, Vaccinia virus
aaaguauuuuaauacaugua

SEQ ID NO: 3271984 - RNA, 13 nt, Vaccinia virus
cgaauaacaaaau

SEQ ID NO: 3271985 - RNA, 22 nt, Vaccinia virus
acuuuuuuacccacuauaaaau

SEQ ID NO: 3271986 - RNA, 17 nt, Vaccinia virus
caagaucuuugauauac

SEQ ID NO: 3271987 - RNA, 15 nt, Vaccinia virus
auuacucaugcauuu

SEQ ID NO: 3271988 - RNA, 15 nt, Vaccinia virus
uaucuaaaaaucuua

SEQ ID NO: 3271989 - RNA, 14 nt, Vaccinia virus
acauucuuaaacaa

SEQ ID NO: 3271990 - RNA, 14 nt, Vaccinia virus
augcaaaaaaaugu

SEQ ID NO: 3271991 - RNA, 15 nt, Vaccinia virus
uauaaauauccuuaa

SEQ ID NO: 3271992 - RNA, 22 nt, Vaccinia virus
ugauaucuacaucguuuggauu

SEQ ID NO: 3271993 - RNA, 15 nt, Vaccinia virus
acaaaucuauaacau

SEQ ID NO: 3271994 - RNA, 21 nt, Vaccinia virus
auauauuuuccaugaaaucaa

SEQ ID NO: 3271995 - RNA, 15 nt, Vaccinia virus
uuagagaacauacau

SEQ ID NO: 3271996 - RNA, 13 nt, Vaccinia virus
uuaaauaauuaau

SEQ ID NO: 3271997 - RNA, 15 nt, Vaccinia virus
uggcggcuagaaugg

SEQ ID NO: 3271998 - RNA, 19 nt, Vaccinia virus
uuucagcguggauuucuca

SEQ ID NO: 3271999 - RNA, 18 nt, Vaccinia virus
aauguauuaguaggaaau

SEQ ID NO: 3272000 - RNA, 18 nt, Vaccinia virus
aacucacauuucaaauau

SEQ ID NO: 3272001 - RNA, 19 nt, Vaccinia virus
aaacuucguaaaauauucu

SEQ ID NO: 3272002 - RNA, 15 nt, Vaccinia virus
ggacagucuauuuuc

SEQ ID NO: 3272003 - RNA, 18 nt, Vaccinia virus
auuacguggagaaaucau

SEQ ID NO: 3272004 - RNA, 21 nt, Vaccinia virus
ccuaguacggcggauuuacua

SEQ ID NO: 3272005 - RNA, 15 nt, Vaccinia virus
aucuuguuuagaaaa

SEQ ID NO: 3272006 - RNA, 14 nt, Vaccinia virus
uuauacaaugaacu

SEQ ID NO: 3272007 - RNA, 21 nt, Vaccinia virus
auacaccaucaauagauaaaa

SEQ ID NO: 3272008 - RNA, 12 nt, Vaccinia virus
aaggaacuagaa

SEQ ID NO: 3272009 - RNA, 22 nt, Vaccinia virus
ucuaugacuaaagcuauuacaa

SEQ ID NO: 3272010 - RNA, 17 nt, Vaccinia virus
gaacuagacgauaaugu

SEQ ID NO: 3272011 - RNA, 21 nt, Vaccinia virus
caaaaaacuuuacgauagacu

SEQ ID NO: 3272012 - RNA, 16 nt, Vaccinia virus
ugacgggauacagauu

SEQ ID NO: 3272013 - RNA, 21 nt, Vaccinia virus
acugcagcaaaggcaauaagu

SEQ ID NO: 3272014 - RNA, 14 nt, Vaccinia virus
auuauuuaauaaag

SEQ ID NO: 3272015 - RNA, 22 nt, Vaccinia virus
uuauugauacccgucuguuuaa

SEQ ID NO: 3272016 - RNA, 16 nt, Vaccinia virus
auaauauaucaaacau

SEQ ID NO: 3272017 - RNA, 15 nt, Vaccinia virus
aucauaauuaaauua

SEQ ID NO: 3272018 - RNA, 20 nt, Vaccinia virus
ccacacgaggacuauguuug

SEQ ID NO: 3272019 - RNA, 21 nt, Vaccinia virus
auaacgaguacauucugcaau

SEQ ID NO: 3272020 - RNA, 18 nt, Vaccinia virus
uugaugaaguucgaugau

SEQ ID NO: 3272021 - RNA, 18 nt, Vaccinia virus
cguuggaccauuaauagg

SEQ ID NO: 3272022 - RNA, 14 nt, Vaccinia virus
auucagcugaaaug

SEQ ID NO: 3272023 - RNA, 13 nt, Vaccinia virus
gaucguuaaugaa

SEQ ID NO: 3272024 - RNA, 21 nt, Vaccinia virus
aaucaugugauuaugaauauu

SEQ ID NO: 3272025 - RNA, 20 nt, Vaccinia virus
uuucauucgaagacgcuaua

SEQ ID NO: 3272026 - RNA, 15 nt, Vaccinia virus
auaacauguuaauuu

SEQ ID NO: 3272027 - RNA, 20 nt, Vaccinia virus
aaauuauuaaacaauacucu

SEQ ID NO: 3272028 - RNA, 16 nt, Vaccinia virus
gacuugauuuaaaacc

SEQ ID NO: 3272029 - RNA, 20 nt, Vaccinia virus
ucaucaccagcacaacaucu

SEQ ID NO: 3272030 - RNA, 18 nt, Vaccinia virus
aaauaacauuuauuauca

SEQ ID NO: 3272031 - RNA, 14 nt, Vaccinia virus
acaucgucuagauc

SEQ ID NO: 3272032 - RNA, 20 nt, Vaccinia virus
guacacaauaucauaaacaa

SEQ ID NO: 3272033 - RNA, 12 nt, Vaccinia virus
agaaaugauauc

SEQ ID NO: 3272034 - RNA, 17 nt, Vaccinia virus
uaaaagacaaaucuugu

SEQ ID NO: 3272035 - RNA, 21 nt, Vaccinia virus
aaacguauauagaugucaaug

SEQ ID NO: 3272036 - RNA, 17 nt, Vaccinia virus
aauggaucuaguauuau

SEQ ID NO: 3272037 - RNA, 17 nt, Vaccinia virus
ggucacacguguagaau

SEQ ID NO: 3272038 - RNA, 16 nt, Vaccinia virus
auaucuaauuucugua

SEQ ID NO: 3272039 - RNA, 15 nt, Vaccinia virus
guaaaacauaaagga

SEQ ID NO: 3272040 - RNA, 19 nt, Vaccinia virus
agagacuuuauaacagaua

SEQ ID NO: 3272041 - RNA, 19 nt, Vaccinia virus
uuacauugcucguaaaaga

SEQ ID NO: 3272042 - RNA, 17 nt, Vaccinia virus
cauugaucuauuauuua

SEQ ID NO: 3272043 - RNA, 23 nt, Vaccinia virus
cuauaaagucugucaaaucaucu

SEQ ID NO: 3272044 - RNA, 18 nt, Vaccinia virus
gaauaaacaaaauaaugu

SEQ ID NO: 3272045 - RNA, 20 nt, Vaccinia virus
agaauauacucaauagaauu

SEQ ID NO: 3272046 - RNA, 22 nt, Vaccinia virus
auuaugacgucagccauagcau

SEQ ID NO: 3272047 - RNA, 16 nt, Vaccinia virus
aagcuucguuguagaa

SEQ ID NO: 3272048 - RNA, 13 nt, Vaccinia virus
uauugauuuacua

SEQ ID NO: 3272049 - RNA, 18 nt, Vaccinia virus
guacuguaaaaacaaauu

SEQ ID NO: 3272050 - RNA, 21 nt, Vaccinia virus
cuacuaaaagaucaaccaaaa

SEQ ID NO: 3272051 - RNA, 16 nt, Vaccinia virus
caaauaaaauucugau

SEQ ID NO: 3272052 - RNA, 18 nt, Vaccinia virus
auauaccuauuaauacau

SEQ ID NO: 3272053 - RNA, 20 nt, Vaccinia virus
cacaauagcgcuuaaucuca

SEQ ID NO: 3272054 - RNA, 15 nt, Vaccinia virus
aagaaauuaauaaag

SEQ ID NO: 3272055 - RNA, 14 nt, Vaccinia virus
ccuaaagguaaaug

SEQ ID NO: 3272056 - RNA, 14 nt, Vaccinia virus
acgaaucaagugau

SEQ ID NO: 3272057 - RNA, 17 nt, Vaccinia virus
cauuuauuggagacgua

SEQ ID NO: 3272058 - RNA, 16 nt, Vaccinia virus
aaacaaaauuagaaag

SEQ ID NO: 3272059 - RNA, 14 nt, Vaccinia virus
gaaaauauauucua

SEQ ID NO: 3272060 - RNA, 15 nt, Vaccinia virus
aacucgguuaacaug

SEQ ID NO: 3272061 - RNA, 15 nt, Vaccinia virus
auaaauuuauucucu

SEQ ID NO: 3272062 - RNA, 18 nt, Vaccinia virus
ugauaauuauaccaagga

SEQ ID NO: 3272063 - RNA, 20 nt, Vaccinia virus
cuauaucuauguuuuuagau

SEQ ID NO: 3272064 - RNA, 14 nt, Vaccinia virus
ggaguuauaugaau

SEQ ID NO: 3272065 - RNA, 20 nt, Vaccinia virus
guaacuccagaacaucuucc

SEQ ID NO: 3272066 - RNA, 13 nt, Vaccinia virus
uuaucauuuucca

SEQ ID NO: 3272067 - RNA, 17 nt, Vaccinia virus
uguaucgaaaaacuuua

SEQ ID NO: 3272068 - RNA, 12 nt, Vaccinia virus
auuaucaguaau

SEQ ID NO: 3272069 - RNA, 13 nt, Vaccinia virus
agaucaaaacaaa

SEQ ID NO: 3272070 - RNA, 18 nt, Vaccinia virus
uaucuaauuucuguauau

SEQ ID NO: 3272071 - RNA, 20 nt, Vaccinia virus
cuggaauagaaucuauuuua

SEQ ID NO: 3272072 - RNA, 13 nt, Vaccinia virus
ugaaauagaagau

SEQ ID NO: 3272073 - RNA, 12 nt, Vaccinia virus
ucguaaauacuc

SEQ ID NO: 3272074 - RNA, 15 nt, Vaccinia virus
aggauugauggugaa

SEQ ID NO: 3272075 - RNA, 18 nt, Vaccinia virus
caaauuuaccacuagaac

SEQ ID NO: 3272076 - RNA, 13 nt, Vaccinia virus
uagaaucaaagga

SEQ ID NO: 3272077 - RNA, 19 nt, Vaccinia virus
guaucgcauuaauacuguu

SEQ ID NO: 3272078 - RNA, 19 nt, Vaccinia virus
cuaucuaugcgguagauag

SEQ ID NO: 3272079 - RNA, 20 nt, Vaccinia virus
aucuaucagaguccauguau

SEQ ID NO: 3272080 - RNA, 14 nt, Vaccinia virus
gagauuaaaugcaa

SEQ ID NO: 3272081 - RNA, 15 nt, Vaccinia virus
aguauucaagucaaa

SEQ ID NO: 3272082 - RNA, 22 nt, Vaccinia virus
cagauugaauaggaguuugaau

SEQ ID NO: 3272083 - RNA, 21 nt, Vaccinia virus
caucaucaaaagacuuaugau

SEQ ID NO: 3272084 - RNA, 15 nt, Vaccinia virus
aacucuaaucaaaau

SEQ ID NO: 3272085 - RNA, 23 nt, Vaccinia virus
augauucauuuuuuaaguauuug

SEQ ID NO: 3272086 - RNA, 15 nt, Vaccinia virus
aacuucguaaaauau

SEQ ID NO: 3272087 - RNA, 15 nt, Vaccinia virus
aauugaaugucauga

SEQ ID NO: 3272088 - RNA, 15 nt, Vaccinia virus
cacgagaacuauuaa

SEQ ID NO: 3272089 - RNA, 22 nt, Vaccinia virus
guccuauaugcaugauagauuu

SEQ ID NO: 3272090 - RNA, 20 nt, Vaccinia virus
uuccaauaucugagcuaucu

SEQ ID NO: 3272091 - RNA, 13 nt, Vaccinia virus
ugugaguaguguu

SEQ ID NO: 3272092 - RNA, 20 nt, Vaccinia virus
agguaaaguaggacauaaua

SEQ ID NO: 3272093 - RNA, 13 nt, Vaccinia virus
uugauaauaaucc

SEQ ID NO: 3272094 - RNA, 16 nt, Vaccinia virus
auaauacaaaugacua

SEQ ID NO: 3272095 - RNA, 13 nt, Vaccinia virus
uguuaauguauua

SEQ ID NO: 3272096 - RNA, 18 nt, Vaccinia virus
acggcaugauaaaaugaa

SEQ ID NO: 3272097 - RNA, 18 nt, Vaccinia virus
gccaaacucauucacuuu

SEQ ID NO: 3272098 - RNA, 16 nt, Vaccinia virus
aucaaucauauuacau

SEQ ID NO: 3272099 - RNA, 15 nt, Vaccinia virus
ucuauguauuuagua

SEQ ID NO: 3272100 - RNA, 16 nt, Vaccinia virus
guaacacaauaaagga

SEQ ID NO: 3272101 - RNA, 12 nt, Vaccinia virus
gcucuagauauu

SEQ ID NO: 3272102 - RNA, 21 nt, Vaccinia virus
auucaucuacgcgauaauaga

SEQ ID NO: 3272103 - RNA, 23 nt, Vaccinia virus
ucaauacaaaacauaaaaaacaa

SEQ ID NO: 3272104 - RNA, 23 nt, Vaccinia virus
aaagcuauuaucaaauacuguac

SEQ ID NO: 3272105 - RNA, 16 nt, Vaccinia virus
uguggaucugaagaag

SEQ ID NO: 3272106 - RNA, 17 nt, Vaccinia virus
uuaucgauauugaagau

SEQ ID NO: 3272107 - RNA, 17 nt, Vaccinia virus
aaauuguccuauauaau

SEQ ID NO: 3272108 - RNA, 13 nt, Vaccinia virus
uaauauagaagau

SEQ ID NO: 3272109 - RNA, 17 nt, Vaccinia virus
aacacuuuccugauuua

SEQ ID NO: 3272110 - RNA, 20 nt, Vaccinia virus
cuagacuaacuaucucuuuc

SEQ ID NO: 3272111 - RNA, 18 nt, Vaccinia virus
cuuugauguggauacauc

SEQ ID NO: 3272112 - RNA, 16 nt, Vaccinia virus
caacuuuauuagauaa

SEQ ID NO: 3272113 - RNA, 13 nt, Vaccinia virus
auauauuguuuca

SEQ ID NO: 3272114 - RNA, 19 nt, Vaccinia virus
uuugaauuaguuuauaauu

SEQ ID NO: 3272115 - RNA, 14 nt, Vaccinia virus
acccgcaauuauua

SEQ ID NO: 3272116 - RNA, 14 nt, Vaccinia virus
ccaucuaacaaaaa

SEQ ID NO: 3272117 - RNA, 13 nt, Vaccinia virus
agaauguuuacca

SEQ ID NO: 3272118 - RNA, 20 nt, Vaccinia virus
cuagauagaguauuaaauau

SEQ ID NO: 3272119 - RNA, 16 nt, Vaccinia virus
cuguucuccguguggu

SEQ ID NO: 3272120 - RNA, 21 nt, Vaccinia virus
guuuggagacuaauucuuucu

SEQ ID NO: 3272121 - RNA, 15 nt, Vaccinia virus
aauguucucaagaac

SEQ ID NO: 3272122 - RNA, 15 nt, Vaccinia virus
guaaaccguuuuuaa

SEQ ID NO: 3272123 - RNA, 18 nt, Vaccinia virus
ucaaucaaacaaaaaagc

SEQ ID NO: 3272124 - RNA, 23 nt, Vaccinia virus
uaucaauaacgcaaucaugauuu

SEQ ID NO: 3272125 - RNA, 12 nt, Vaccinia virus
aauacaauaauu

SEQ ID NO: 3272126 - RNA, 23 nt, Vaccinia virus
caacauacuguuuagaugauauu

SEQ ID NO: 3272127 - RNA, 17 nt, Vaccinia virus
aucuaggaauuacauaa

SEQ ID NO: 3272128 - RNA, 19 nt, Vaccinia virus
agcauugaaaauacguucu

SEQ ID NO: 3272129 - RNA, 21 nt, Vaccinia virus
aaaacuugucuguauauguaa

SEQ ID NO: 3272130 - RNA, 22 nt, Vaccinia virus
uagagauaaaacaaguuuucau

SEQ ID NO: 3272131 - RNA, 21 nt, Vaccinia virus
uaauaacuagcuuaaacagau

SEQ ID NO: 3272132 - RNA, 17 nt, Vaccinia virus
auaucggaauaaguaga

SEQ ID NO: 3272133 - RNA, 22 nt, Vaccinia virus
guacacauauggaauauaucua

SEQ ID NO: 3272134 - RNA, 21 nt, Vaccinia virus
uuacuuuagaaggaaaaucau

SEQ ID NO: 3272135 - RNA, 23 nt, Vaccinia virus
agguguuccggagaaucaguaaa

SEQ ID NO: 3272136 - RNA, 15 nt, Vaccinia virus
guuuguuuuggaaau

SEQ ID NO: 3272137 - RNA, 23 nt, Vaccinia virus
ucuacaucuuccuucuuauucuu

SEQ ID NO: 3272138 - RNA, 17 nt, Vaccinia virus
gaagaagaugacaaucu

SEQ ID NO: 3272139 - RNA, 22 nt, Vaccinia virus
augucauaaacuguaaaugauu

SEQ ID NO: 3272140 - RNA, 17 nt, Vaccinia virus
uauauaauaaauacuuu

SEQ ID NO: 3272141 - RNA, 21 nt, Vaccinia virus
agaacguaaaauacauaugac

SEQ ID NO: 3272142 - RNA, 13 nt, Vaccinia virus
agauaauauaccg

SEQ ID NO: 3272143 - RNA, 14 nt, Vaccinia virus
cuauauauuuugau

SEQ ID NO: 3272144 - RNA, 16 nt, Vaccinia virus
agauguuuaaugauac

SEQ ID NO: 3272145 - RNA, 17 nt, Vaccinia virus
agacauaugauaaaacg

SEQ ID NO: 3272146 - RNA, 15 nt, Vaccinia virus
aaugucucucauaau

SEQ ID NO: 3272147 - RNA, 18 nt, Vaccinia virus
ugagaaugagauucaaaa

SEQ ID NO: 3272148 - RNA, 11 nt, Vaccinia virus
guauauacaug

SEQ ID NO: 3272149 - RNA, 12 nt, Vaccinia virus
aggaaaaguauu

SEQ ID NO: 3272150 - RNA, 21 nt, Vaccinia virus
gucgcuauaauucauauuaau

SEQ ID NO: 3272151 - RNA, 13 nt, Vaccinia virus
ugugauaugaaca

SEQ ID NO: 3272152 - RNA, 21 nt, Vaccinia virus
aacucugauuauugucuaaua

SEQ ID NO: 3272153 - RNA, 14 nt, Vaccinia virus
uaggaguaauagaa

SEQ ID NO: 3272154 - RNA, 11 nt, Vaccinia virus
ucccagcauua

SEQ ID NO: 3272155 - RNA, 16 nt, Vaccinia virus
aaggcauuuggucuau

SEQ ID NO: 3272156 - RNA, 12 nt, Vaccinia virus
ucugaauuauuc

SEQ ID NO: 3272157 - RNA, 17 nt, Vaccinia virus
uucaauugauaagacac

SEQ ID NO: 3272158 - RNA, 18 nt, Vaccinia virus
uacaauauauucucauag

SEQ ID NO: 3272159 - RNA, 13 nt, Vaccinia virus
auucauauagaac

SEQ ID NO: 3272160 - RNA, 18 nt, Vaccinia virus
caguauaccucaaaaauu

SEQ ID NO: 3272161 - RNA, 16 nt, Vaccinia virus
aguugucuaguauuua

SEQ ID NO: 3272162 - RNA, 15 nt, Vaccinia virus
cuauaaaaauggauu

SEQ ID NO: 3272163 - RNA, 17 nt, Vaccinia virus
augaauuccucugaaaa

SEQ ID NO: 3272164 - RNA, 11 nt, Vaccinia virus
agaaaacauuu

SEQ ID NO: 3272165 - RNA, 16 nt, Vaccinia virus
cgaaauacaaaauguu

SEQ ID NO: 3272166 - RNA, 18 nt, Vaccinia virus
cuacagguugcagcauag

SEQ ID NO: 3272167 - RNA, 17 nt, Vaccinia virus
cauaaacauguccaaua

SEQ ID NO: 3272168 - RNA, 20 nt, Vaccinia virus
aauguauaacaaauacagaa

SEQ ID NO: 3272169 - RNA, 20 nt, Vaccinia virus
agugauacccgcaauuauua

SEQ ID NO: 3272170 - RNA, 21 nt, Vaccinia virus
agucaugcuuauugauaaaga

SEQ ID NO: 3272171 - RNA, 15 nt, Vaccinia virus
auuaauacacauaau

SEQ ID NO: 3272172 - RNA, 20 nt, Vaccinia virus
aaguuucaaacuguugacuu

SEQ ID NO: 3272173 - RNA, 14 nt, Vaccinia virus
ucauauuuagauuu

SEQ ID NO: 3272174 - RNA, 20 nt, Vaccinia virus
auauuaaaaauucacacauu

SEQ ID NO: 3272175 - RNA, 17 nt, Vaccinia virus
aucaaaauagcaaagua

SEQ ID NO: 3272176 - RNA, 17 nt, Vaccinia virus
aguuaaaauuuuaagau

SEQ ID NO: 3272177 - RNA, 15 nt, Vaccinia virus
uuuuugacuuacaua

SEQ ID NO: 3272178 - RNA, 19 nt, Vaccinia virus
uagacuguuuguagaaugc

SEQ ID NO: 3272179 - RNA, 16 nt, Vaccinia virus
agcacaucaaaugaug

SEQ ID NO: 3272180 - RNA, 21 nt, Vaccinia virus
acaaucaagaagauagcuucu

SEQ ID NO: 3272181 - RNA, 16 nt, Vaccinia virus
aucucuuaacaaaaau

SEQ ID NO: 3272182 - RNA, 18 nt, Vaccinia virus
uuuaaucccuuuuucaga

SEQ ID NO: 3272183 - RNA, 16 nt, Vaccinia virus
uauguuuuaaauauca

SEQ ID NO: 3272184 - RNA, 15 nt, Vaccinia virus
agcauagaggaugaa

SEQ ID NO: 3272185 - RNA, 23 nt, Vaccinia virus
acaauauuuaguuuauucauaau

SEQ ID NO: 3272186 - RNA, 24 nt, Vaccinia virus
aguguuuagcguggcuagaauagu

SEQ ID NO: 3272187 - RNA, 19 nt, Vaccinia virus
aaaauuguaacaacaaugu

SEQ ID NO: 3272188 - RNA, 13 nt, Vaccinia virus
aagaggauuuucu

SEQ ID NO: 3272189 - RNA, 16 nt, Vaccinia virus
gaagaauggaugauau

SEQ ID NO: 3272190 - RNA, 15 nt, Vaccinia virus
acauauuaaaaauuc

SEQ ID NO: 3272191 - RNA, 14 nt, Vaccinia virus
acaaaucuggaaaa

SEQ ID NO: 3272192 - RNA, 14 nt, Vaccinia virus
agacuccugguaau

SEQ ID NO: 3272193 - RNA, 18 nt, Vaccinia virus
auuucucucauaaauaca

SEQ ID NO: 3272194 - RNA, 18 nt, Vaccinia virus
aaucaugacguaaaugua

SEQ ID NO: 3272195 - RNA, 13 nt, Vaccinia virus
aaagaugauauau

SEQ ID NO: 3272196 - RNA, 13 nt, Vaccinia virus
caauaaacaaaau

SEQ ID NO: 3272197 - RNA, 19 nt, Vaccinia virus
ugcuagacaccuuuucaau

SEQ ID NO: 3272198 - RNA, 22 nt, Vaccinia virus
augccuauuaggacagauacua

SEQ ID NO: 3272199 - RNA, 21 nt, Vaccinia virus
uagaauguuaucgaugaugua

SEQ ID NO: 3272200 - RNA, 16 nt, Vaccinia virus
ggaguaucuauuuuaa

SEQ ID NO: 3272201 - RNA, 15 nt, Vaccinia virus
uauuacaaccaaugu

SEQ ID NO: 3272202 - RNA, 22 nt, Vaccinia virus
acuuuuuguuuauauuaaauau

SEQ ID NO: 3272203 - RNA, 20 nt, Vaccinia virus
ucuccgcaauacauuucuca

SEQ ID NO: 3272204 - RNA, 21 nt, Vaccinia virus
uugcucggcgucaacgcugga

SEQ ID NO: 3272205 - RNA, 11 nt, Vaccinia virus
gcauagauaua

SEQ ID NO: 3272206 - RNA, 12 nt, Vaccinia virus
uuucaucaagau

SEQ ID NO: 3272207 - RNA, 13 nt, Vaccinia virus
cacuagaugauuu

SEQ ID NO: 3272208 - RNA, 19 nt, Vaccinia virus
auggacgaauuaggagaac

SEQ ID NO: 3272209 - RNA, 23 nt, Vaccinia virus
cuacaagacaaagauuuaucaga

SEQ ID NO: 3272210 - RNA, 17 nt, Vaccinia virus
aucggauacagacacuc

SEQ ID NO: 3272211 - RNA, 15 nt, Vaccinia virus
aucuguaaacauuug

SEQ ID NO: 3272212 - RNA, 18 nt, Vaccinia virus
cguguaaggcguaucuag

SEQ ID NO: 3272213 - RNA, 18 nt, Vaccinia virus
auaaucuaaaauaguucu

SEQ ID NO: 3272214 - RNA, 23 nt, Vaccinia virus
auaaaaauguucuuuuuguguga

SEQ ID NO: 3272215 - RNA, 15 nt, Vaccinia virus
uagcuguucaagaau

SEQ ID NO: 3272216 - RNA, 15 nt, Vaccinia virus
auuauaaugaauauu

SEQ ID NO: 3272217 - RNA, 15 nt, Vaccinia virus
cauuuuuuuaaaacu

SEQ ID NO: 3272218 - RNA, 19 nt, Vaccinia virus
uaguauauugagaguguau

SEQ ID NO: 3272219 - RNA, 20 nt, Vaccinia virus
cauaauguaaagauauucua

SEQ ID NO: 3272220 - RNA, 20 nt, Vaccinia virus
agccacuauagaguuucuaa

SEQ ID NO: 3272221 - RNA, 23 nt, Vaccinia virus
gcagauuguugccguaaauccug

SEQ ID NO: 3272222 - RNA, 20 nt, Vaccinia virus
acuguggaugugacagacug

SEQ ID NO: 3272223 - RNA, 23 nt, Vaccinia virus
ucgacucauaagaaagagaauag

SEQ ID NO: 3272224 - RNA, 18 nt, Vaccinia virus
auuaucucccauaaucuu

SEQ ID NO: 3272225 - RNA, 17 nt, Vaccinia virus
aagauuccauuaucuaa

SEQ ID NO: 3272226 - RNA, 22 nt, Vaccinia virus
uuaucgguaacaucuuuguaaa

SEQ ID NO: 3272227 - RNA, 23 nt, Vaccinia virus
aguguagugagagagcaugaagg

SEQ ID NO: 3272228 - RNA, 13 nt, Vaccinia virus
aguaaauaauaaa

SEQ ID NO: 3272229 - RNA, 14 nt, Vaccinia virus
uacauuucucaaau

SEQ ID NO: 3272230 - RNA, 21 nt, Vaccinia virus
auaacuauugauguuacacca

SEQ ID NO: 3272231 - RNA, 14 nt, Vaccinia virus
acgcauccauccaa

SEQ ID NO: 3272232 - RNA, 14 nt, Vaccinia virus
cuuuaauguaugaa

SEQ ID NO: 3272233 - RNA, 15 nt, Vaccinia virus
ucauuuuauaauugu

SEQ ID NO: 3272234 - RNA, 14 nt, Vaccinia virus
cacauaagccauaa

SEQ ID NO: 3272235 - RNA, 21 nt, Vaccinia virus
gaaaaaauauuuuauuaguuu

SEQ ID NO: 3272236 - RNA, 22 nt, Vaccinia virus
acuguaucgauuucuacauaua

SEQ ID NO: 3272237 - RNA, 21 nt, Vaccinia virus
auuuccaaucuuugacaauuu

SEQ ID NO: 3272238 - RNA, 15 nt, Vaccinia virus
aaugauaaugauaca

SEQ ID NO: 3272239 - RNA, 23 nt, Vaccinia virus
gauauaucaaaauuagacuggag

SEQ ID NO: 3272240 - RNA, 21 nt, Vaccinia virus
uacaauccuucguuaucucug

SEQ ID NO: 3272241 - RNA, 20 nt, Vaccinia virus
auacccaaucucucucaaau

SEQ ID NO: 3272242 - RNA, 20 nt, Vaccinia virus
acauacucuuaaaauuggau

SEQ ID NO: 3272243 - RNA, 23 nt, Vaccinia virus
augaucaagaaggaaaucaaauc

SEQ ID NO: 3272244 - RNA, 14 nt, Vaccinia virus
gucaauauucuguu

SEQ ID NO: 3272245 - RNA, 23 nt, Vaccinia virus
caacuauaucgacauauuucauu

SEQ ID NO: 3272246 - RNA, 19 nt, Vaccinia virus
gcuaugauaaucagaucau

SEQ ID NO: 3272247 - RNA, 16 nt, Vaccinia virus
caaacauuauguagua

SEQ ID NO: 3272248 - RNA, 14 nt, Vaccinia virus
acacuaucuuuauu

SEQ ID NO: 3272249 - RNA, 14 nt, Vaccinia virus
cugccauggaugga

SEQ ID NO: 3272250 - RNA, 20 nt, Vaccinia virus
acguaguuaaugaaacauuu

SEQ ID NO: 3272251 - RNA, 21 nt, Vaccinia virus
acacgaaagaaucaaaagaau

SEQ ID NO: 3272252 - RNA, 17 nt, Vaccinia virus
acaaucguauaucuucu

SEQ ID NO: 3272253 - RNA, 14 nt, Vaccinia virus
agcaaaauaauuaa

SEQ ID NO: 3272254 - RNA, 11 nt, Vaccinia virus
ugcauucaaau

SEQ ID NO: 3272255 - RNA, 17 nt, Vaccinia virus
uagaaucguccauagca

SEQ ID NO: 3272256 - RNA, 20 nt, Vaccinia virus
agucuuuaaugaauuaacga

SEQ ID NO: 3272257 - RNA, 14 nt, Vaccinia virus
cacuauaugcaguu

SEQ ID NO: 3272258 - RNA, 22 nt, Vaccinia virus
uauacauagauauuaauuauca

SEQ ID NO: 3272259 - RNA, 19 nt, Vaccinia virus
agauacuacagaaacuaau

SEQ ID NO: 3272260 - RNA, 19 nt, Vaccinia virus
uaacaauaucaauaaauuu

SEQ ID NO: 3272261 - RNA, 22 nt, Vaccinia virus
acugauuaaugagaucuucuau

SEQ ID NO: 3272262 - RNA, 14 nt, Vaccinia virus
auccacaauuauug

SEQ ID NO: 3272263 - RNA, 22 nt, Vaccinia virus
ucugaaauccguagaaacaucu

SEQ ID NO: 3272264 - RNA, 18 nt, Vaccinia virus
acuucuuggaaugauacu

SEQ ID NO: 3272265 - RNA, 20 nt, Vaccinia virus
gcuuagcuaauccugauauu

SEQ ID NO: 3272266 - RNA, 20 nt, Vaccinia virus
auuaaaucauuaaaugauug

SEQ ID NO: 3272267 - RNA, 20 nt, Vaccinia virus
uggaccaccgacuguaacau

SEQ ID NO: 3272268 - RNA, 22 nt, Vaccinia virus
aauaguuuacagauauuuucca

SEQ ID NO: 3272269 - RNA, 17 nt, Vaccinia virus
uugugggcaacugucua

SEQ ID NO: 3272270 - RNA, 17 nt, Vaccinia virus
ucgauaacuguagucuu

SEQ ID NO: 3272271 - RNA, 16 nt, Vaccinia virus
auucacaauaaaauuc

SEQ ID NO: 3272272 - RNA, 22 nt, Vaccinia virus
ccaaccgaauggaguaaaauaa

SEQ ID NO: 3272273 - RNA, 17 nt, Vaccinia virus
aaaaugcugaagcaaua

SEQ ID NO: 3272274 - RNA, 15 nt, Vaccinia virus
cuaauauuuuuagau

SEQ ID NO: 3272275 - RNA, 13 nt, Vaccinia virus
guuaaauguuuua

SEQ ID NO: 3272276 - RNA, 14 nt, Vaccinia virus
ucuuucguacaucu

SEQ ID NO: 3272277 - RNA, 12 nt, Vaccinia virus
auauauuguuaa

SEQ ID NO: 3272278 - RNA, 18 nt, Vaccinia virus
uauaccuuguaauuaaau

SEQ ID NO: 3272279 - RNA, 17 nt, Vaccinia virus
uaaauagagagauauca

SEQ ID NO: 3272280 - RNA, 20 nt, Vaccinia virus
acacguagcaugugaauaua

SEQ ID NO: 3272281 - RNA, 19 nt, Vaccinia virus
acaacgagagauauuuuca

SEQ ID NO: 3272282 - RNA, 17 nt, Vaccinia virus
uuaaacauggcauuaau

SEQ ID NO: 3272283 - RNA, 19 nt, Vaccinia virus
auauuaaaaauucacacau

SEQ ID NO: 3272284 - RNA, 19 nt, Vaccinia virus
ugagauaaauaucaucaau

SEQ ID NO: 3272285 - RNA, 14 nt, Vaccinia virus
auuuauauaugcau

SEQ ID NO: 3272286 - RNA, 14 nt, Vaccinia virus
gugcuuaauguuuc

SEQ ID NO: 3272287 - RNA, 13 nt, Vaccinia virus
gaaauauauuguu

SEQ ID NO: 3272288 - RNA, 18 nt, Vaccinia virus
aggggauuggcauuuaac

SEQ ID NO: 3272289 - RNA, 12 nt, Vaccinia virus
gaacuaauacau

SEQ ID NO: 3272290 - RNA, 14 nt, Vaccinia virus
agcggauaaugaua

SEQ ID NO: 3272291 - RNA, 19 nt, Vaccinia virus
aacauuauucuauuucgaa

SEQ ID NO: 3272292 - RNA, 16 nt, Vaccinia virus
caagucuggaaaacug

SEQ ID NO: 3272293 - RNA, 21 nt, Vaccinia virus
caaagaaacaucaaguagaaa

SEQ ID NO: 3272294 - RNA, 14 nt, Vaccinia virus
guauucaacaugcu

SEQ ID NO: 3272295 - RNA, 20 nt, Vaccinia virus
agauuagacauaucagauga

SEQ ID NO: 3272296 - RNA, 15 nt, Vaccinia virus
ugcuuaauguuucca

SEQ ID NO: 3272297 - RNA, 16 nt, Vaccinia virus
uauuguuuauuaucua

SEQ ID NO: 3272298 - RNA, 18 nt, Vaccinia virus
uguuaauaaguaaaugaa

SEQ ID NO: 3272299 - RNA, 16 nt, Vaccinia virus
ucuauacguuucuauu

SEQ ID NO: 3272300 - RNA, 23 nt, Vaccinia virus
aauacucauuuucuuuuggaaaa

SEQ ID NO: 3272301 - RNA, 16 nt, Vaccinia virus
augaauauaguaauua

SEQ ID NO: 3272302 - RNA, 22 nt, Vaccinia virus
gccuuauucucuggagaaaaga

SEQ ID NO: 3272303 - RNA, 22 nt, Vaccinia virus
ucauuaaauguuucaucagaaa

SEQ ID NO: 3272304 - RNA, 22 nt, Vaccinia virus
ucagaaagcugggggauguucu

SEQ ID NO: 3272305 - RNA, 16 nt, Vaccinia virus
aagcucuaaauccaaa

SEQ ID NO: 3272306 - RNA, 14 nt, Vaccinia virus
agcguaaaaguaaa

SEQ ID NO: 3272307 - RNA, 16 nt, Vaccinia virus
ugcucggcaauaacua

SEQ ID NO: 3272308 - RNA, 16 nt, Vaccinia virus
auucuagauacaagau

SEQ ID NO: 3272309 - RNA, 14 nt, Vaccinia virus
agaaugaauguuua

SEQ ID NO: 3272310 - RNA, 12 nt, Vaccinia virus
cgcauuaaugag

SEQ ID NO: 3272311 - RNA, 18 nt, Vaccinia virus
aacgacguagauaguaau

SEQ ID NO: 3272312 - RNA, 23 nt, Vaccinia virus
ucugaucuuaacuccucuauuaa

SEQ ID NO: 3272313 - RNA, 15 nt, Vaccinia virus
aaagcaucauacgaa

SEQ ID NO: 3272314 - RNA, 23 nt, Vaccinia virus
gucaaauuccaaauuuuuuucau

SEQ ID NO: 3272315 - RNA, 16 nt, Vaccinia virus
uguauuaaaauacuuu

SEQ ID NO: 3272316 - RNA, 19 nt, Vaccinia virus
cugucaauugauucuuauu

SEQ ID NO: 3272317 - RNA, 15 nt, Vaccinia virus
ucauuguuacauaaa

SEQ ID NO: 3272318 - RNA, 15 nt, Vaccinia virus
aagauguuuagaaaa

SEQ ID NO: 3272319 - RNA, 16 nt, Vaccinia virus
caaucuagcauuucua

SEQ ID NO: 3272320 - RNA, 18 nt, Vaccinia virus
agaauauguauaucaauu

SEQ ID NO: 3272321 - RNA, 18 nt, Vaccinia virus
uuggcacgaacaaaagga

SEQ ID NO: 3272322 - RNA, 21 nt, Vaccinia virus
auggaauuaucaucaaaaaac

SEQ ID NO: 3272323 - RNA, 15 nt, Vaccinia virus
gaaccauuacaaaua

SEQ ID NO: 3272324 - RNA, 15 nt, Vaccinia virus
aauaagaauaaaaug

SEQ ID NO: 3272325 - RNA, 22 nt, Vaccinia virus
uaaauguuuugauuucaauuua

SEQ ID NO: 3272326 - RNA, 16 nt, Vaccinia virus
uaaacucagauaauag

SEQ ID NO: 3272327 - RNA, 12 nt, Vaccinia virus
uaaaaauuauug

SEQ ID NO: 3272328 - RNA, 13 nt, Vaccinia virus
uguucacauccuu

SEQ ID NO: 3272329 - RNA, 21 nt, Vaccinia virus
agugcuauggaacaaaacaau

SEQ ID NO: 3272330 - RNA, 18 nt, Vaccinia virus
aucgauucccauaugaug

SEQ ID NO: 3272331 - RNA, 22 nt, Vaccinia virus
agacgacucgagccuuuauuau

SEQ ID NO: 3272332 - RNA, 15 nt, Vaccinia virus
agcaaucagaaauga

SEQ ID NO: 3272333 - RNA, 14 nt, Vaccinia virus
ccaguuauaaaaca

SEQ ID NO: 3272334 - RNA, 18 nt, Vaccinia virus
aaaaguuccagaaaaugu

SEQ ID NO: 3272335 - RNA, 24 nt, Vaccinia virus
auaacauuuauuaucaugaugaca

SEQ ID NO: 3272336 - RNA, 20 nt, Vaccinia virus
agguacuauaauauuaaaaa

SEQ ID NO: 3272337 - RNA, 22 nt, Vaccinia virus
ucaucugggaauaaaauacuac

SEQ ID NO: 3272338 - RNA, 13 nt, Vaccinia virus
ucccauugaucau

SEQ ID NO: 3272339 - RNA, 12 nt, Vaccinia virus
gcauaauacaau

SEQ ID NO: 3272340 - RNA, 14 nt, Vaccinia virus
ccacuuuugcuuua

SEQ ID NO: 3272341 - RNA, 22 nt, Vaccinia virus
aucuuaccauguccucaaauaa

SEQ ID NO: 3272342 - RNA, 18 nt, Vaccinia virus
auguuagaaaaaaugaug

SEQ ID NO: 3272343 - RNA, 18 nt, Vaccinia virus
uucauguuuauaaaaaug

SEQ ID NO: 3272344 - RNA, 14 nt, Vaccinia virus
uucgcaucguauuu

SEQ ID NO: 3272345 - RNA, 22 nt, Vaccinia virus
uaauuugauaauaaaucaaaau

SEQ ID NO: 3272346 - RNA, 20 nt, Vaccinia virus
ucuucgaaaagaaacagaua

SEQ ID NO: 3272347 - RNA, 15 nt, Vaccinia virus
uuauuacuuuuggaa

SEQ ID NO: 3272348 - RNA, 18 nt, Vaccinia virus
agaacaaaaucuaacaga

SEQ ID NO: 3272349 - RNA, 21 nt, Vaccinia virus
gacauuguaaaagacaaauau

SEQ ID NO: 3272350 - RNA, 18 nt, Vaccinia virus
caaacugcaaauguagua

SEQ ID NO: 3272351 - RNA, 17 nt, Vaccinia virus
aauuauucguuuacuga

SEQ ID NO: 3272352 - RNA, 18 nt, Vaccinia virus
uaaguacaucaucuggaa

SEQ ID NO: 3272353 - RNA, 17 nt, Vaccinia virus
acaaauggucaaugaua

SEQ ID NO: 3272354 - RNA, 15 nt, Vaccinia virus
auuaugaaacuauau

SEQ ID NO: 3272355 - RNA, 16 nt, Vaccinia virus
uaaccuccugaaaaug

SEQ ID NO: 3272356 - RNA, 20 nt, Vaccinia virus
auaauauagagguguuuuau

SEQ ID NO: 3272357 - RNA, 20 nt, Vaccinia virus
auucagacacuucuuaacga

SEQ ID NO: 3272358 - RNA, 13 nt, Vaccinia virus
ugaauguuuucaa

SEQ ID NO: 3272359 - RNA, 18 nt, Vaccinia virus
ggaauaaauuauuaucca

SEQ ID NO: 3272360 - RNA, 21 nt, Vaccinia virus
uuucgauucuggcuauuucaa

SEQ ID NO: 3272361 - RNA, 21 nt, Vaccinia virus
uaaauaguuuuuuuguuuccu

SEQ ID NO: 3272362 - RNA, 21 nt, Vaccinia virus
aucauccaccuguuuuaacau

SEQ ID NO: 3272363 - RNA, 22 nt, Vaccinia virus
guaaauagaaucguauaauguc

SEQ ID NO: 3272364 - RNA, 19 nt, Vaccinia virus
aaguggugccgucaaacaa

SEQ ID NO: 3272365 - RNA, 18 nt, Vaccinia virus
cauggaacaauaaaagag

SEQ ID NO: 3272366 - RNA, 19 nt, Vaccinia virus
augacuaucuauauauacc

SEQ ID NO: 3272367 - RNA, 18 nt, Vaccinia virus
caaugcucaguaaaugua

SEQ ID NO: 3272368 - RNA, 20 nt, Vaccinia virus
aaaucaagucuagaauauau

SEQ ID NO: 3272369 - RNA, 23 nt, Vaccinia virus
gugcauaaauuaagauacaacaa

SEQ ID NO: 3272370 - RNA, 17 nt, Vaccinia virus
aaaauucuaagguagaa

SEQ ID NO: 3272371 - RNA, 13 nt, Vaccinia virus
auaaauguuguaa

SEQ ID NO: 3272372 - RNA, 13 nt, Vaccinia virus
auaauuguuguau

SEQ ID NO: 3272373 - RNA, 20 nt, Vaccinia virus
gaaagacagccauagccaaa

SEQ ID NO: 3272374 - RNA, 12 nt, Vaccinia virus
cugcugaaaaua

SEQ ID NO: 3272375 - RNA, 21 nt, Vaccinia virus
acugucuggcaauaaaugaua

SEQ ID NO: 3272376 - RNA, 12 nt, Vaccinia virus
uuuuauuuaauu

SEQ ID NO: 3272377 - RNA, 20 nt, Vaccinia virus
acuguugaaguacuuaauga

SEQ ID NO: 3272378 - RNA, 15 nt, Vaccinia virus
ucaacaaaacucaaa

SEQ ID NO: 3272379 - RNA, 21 nt, Vaccinia virus
guaugucccaauauuaaugca

SEQ ID NO: 3272380 - RNA, 24 nt, Vaccinia virus
ccacuaauucucauuaaaugguua

SEQ ID NO: 3272381 - RNA, 22 nt, Vaccinia virus
caaaaguaguucaacauaauau

SEQ ID NO: 3272382 - RNA, 17 nt, Vaccinia virus
auaacuaaauuaacaau

SEQ ID NO: 3272383 - RNA, 18 nt, Vaccinia virus
acaucuaccuuauuuccc

SEQ ID NO: 3272384 - RNA, 19 nt, Vaccinia virus
ucaaauggauaauuuaaga

SEQ ID NO: 3272385 - RNA, 18 nt, Vaccinia virus
gaacgaagaucuuuucuc

SEQ ID NO: 3272386 - RNA, 17 nt, Vaccinia virus
agauaauauuagacaua

SEQ ID NO: 3272387 - RNA, 17 nt, Vaccinia virus
aacauuuauuaucauga

SEQ ID NO: 3272388 - RNA, 20 nt, Vaccinia virus
ucugcaaacuuaacagcucu

SEQ ID NO: 3272389 - RNA, 15 nt, Vaccinia virus
caguauaccaaacau

SEQ ID NO: 3272390 - RNA, 22 nt, Vaccinia virus
uaaugcaggguguauauuauua

SEQ ID NO: 3272391 - RNA, 15 nt, Vaccinia virus
cuaggauuuaaacaa

SEQ ID NO: 3272392 - RNA, 21 nt, Vaccinia virus
uuauauggaacacgauuauua

SEQ ID NO: 3272393 - RNA, 21 nt, Vaccinia virus
auauuaggcacagucaaacau

SEQ ID NO: 3272394 - RNA, 15 nt, Vaccinia virus
gaacuauauaaugaa

SEQ ID NO: 3272395 - RNA, 21 nt, Vaccinia virus
uugaauuaaugguguuccauu

SEQ ID NO: 3272396 - RNA, 14 nt, Vaccinia virus
uauaaauagauguu

SEQ ID NO: 3272397 - RNA, 21 nt, Vaccinia virus
aauauuguuuugcugucucaa

SEQ ID NO: 3272398 - RNA, 17 nt, Vaccinia virus
uuaauacguucauuaaa

SEQ ID NO: 3272399 - RNA, 18 nt, Vaccinia virus
ugaacauaaaacuaauau

SEQ ID NO: 3272400 - RNA, 16 nt, Vaccinia virus
gauguguuuagaaaau

SEQ ID NO: 3272401 - RNA, 14 nt, Vaccinia virus
gaucucauauuaaa

SEQ ID NO: 3272402 - RNA, 15 nt, Vaccinia virus
uuauaaucaaagauu

SEQ ID NO: 3272403 - RNA, 23 nt, Vaccinia virus
ucuaauaaguagaguccucauga

SEQ ID NO: 3272404 - RNA, 18 nt, Vaccinia virus
uagccgcgguaacuuuua

SEQ ID NO: 3272405 - RNA, 22 nt, Vaccinia virus
aauaguucaacaucuacuuuug

SEQ ID NO: 3272406 - RNA, 20 nt, Vaccinia virus
uagaugaaauacucuucaaa

SEQ ID NO: 3272407 - RNA, 21 nt, Vaccinia virus
gaauauuagguaaagauauuu

SEQ ID NO: 3272408 - RNA, 14 nt, Vaccinia virus
agauacaucuauau

SEQ ID NO: 3272409 - RNA, 17 nt, Vaccinia virus
uuuuaucgauucuaaug

SEQ ID NO: 3272410 - RNA, 18 nt, Vaccinia virus
cuaaaccuucuuauucua

SEQ ID NO: 3272411 - RNA, 22 nt, Vaccinia virus
cauuguccagauugaacauaca

SEQ ID NO: 3272412 - RNA, 19 nt, Vaccinia virus
auaccuuuaacuucuggaa

SEQ ID NO: 3272413 - RNA, 16 nt, Vaccinia virus
acgucaucaaaaauag

SEQ ID NO: 3272414 - RNA, 15 nt, Vaccinia virus
gcugacuagcauauu

SEQ ID NO: 3272415 - RNA, 14 nt, Vaccinia virus
agauucuaauggau

SEQ ID NO: 3272416 - RNA, 18 nt, Vaccinia virus
uaauauacaauuaucauu

SEQ ID NO: 3272417 - RNA, 19 nt, Vaccinia virus
aucuagaugcggugaucag

SEQ ID NO: 3272418 - RNA, 14 nt, Vaccinia virus
uuaacgauaucuug

SEQ ID NO: 3272419 - RNA, 19 nt, Vaccinia virus
aacaaggcgauuauaaagu

SEQ ID NO: 3272420 - RNA, 14 nt, Vaccinia virus
uaagaaugugauaa

SEQ ID NO: 3272421 - RNA, 22 nt, Vaccinia virus
uauaaaaacauuuuauuucuag

SEQ ID NO: 3272422 - RNA, 15 nt, Vaccinia virus
gauaaaauuaaugag

SEQ ID NO: 3272423 - RNA, 14 nt, Vaccinia virus
uaacaaauuuccua

SEQ ID NO: 3272424 - RNA, 22 nt, Vaccinia virus
cauagauccaguagauccuaau

SEQ ID NO: 3272425 - RNA, 20 nt, Vaccinia virus
gucuaaguauagaucaaaag

SEQ ID NO: 3272426 - RNA, 20 nt, Vaccinia virus
cuucuauuuuaucauuuucc

SEQ ID NO: 3272427 - RNA, 13 nt, Vaccinia virus
guaauuacuuauc

SEQ ID NO: 3272428 - RNA, 22 nt, Vaccinia virus
uagaaauaagagacuuaaacaa

SEQ ID NO: 3272429 - RNA, 12 nt, Vaccinia virus
uacuaucaaaau

SEQ ID NO: 3272430 - RNA, 22 nt, Vaccinia virus
uuaauuuuuaguuuauacuauu

SEQ ID NO: 3272431 - RNA, 24 nt, Vaccinia virus
caauugguagaguuuuauaacgaa

SEQ ID NO: 3272432 - RNA, 17 nt, Vaccinia virus
aauguuguuaaaugauc

SEQ ID NO: 3272433 - RNA, 14 nt, Vaccinia virus
uauguugacaugua

SEQ ID NO: 3272434 - RNA, 18 nt, Vaccinia virus
uauuguauccauacauac

SEQ ID NO: 3272435 - RNA, 13 nt, Vaccinia virus
cauuguaaauuua

SEQ ID NO: 3272436 - RNA, 15 nt, Vaccinia virus
uuuggauuuggaaaa

SEQ ID NO: 3272437 - RNA, 18 nt, Vaccinia virus
cgaagagacgauagauuu

SEQ ID NO: 3272438 - RNA, 15 nt, Vaccinia virus
cuucaauaacuuaua

SEQ ID NO: 3272439 - RNA, 16 nt, Vaccinia virus
cuucucuauuguuuag

SEQ ID NO: 3272440 - RNA, 13 nt, Vaccinia virus
gaaaaaugaugaa

SEQ ID NO: 3272441 - RNA, 15 nt, Vaccinia virus
uucgauauucucauu

SEQ ID NO: 3272442 - RNA, 23 nt, Vaccinia virus
cagggaacggcuaaaaguauuuu

SEQ ID NO: 3272443 - RNA, 14 nt, Vaccinia virus
auaccauuucuagu

SEQ ID NO: 3272444 - RNA, 16 nt, Vaccinia virus
aauauuuuuuauaaaa

SEQ ID NO: 3272445 - RNA, 16 nt, Vaccinia virus
aguuauuaagcaauau

SEQ ID NO: 3272446 - RNA, 23 nt, Vaccinia virus
uaucuaauuugauauaaugaauu

SEQ ID NO: 3272447 - RNA, 21 nt, Vaccinia virus
uauguccauuaaaguuaaauu

SEQ ID NO: 3272448 - RNA, 17 nt, Vaccinia virus
acuauaauaguacuaga

SEQ ID NO: 3272449 - RNA, 17 nt, Vaccinia virus
ccaauauagucuguguu

SEQ ID NO: 3272450 - RNA, 19 nt, Vaccinia virus
uauggaagaagaaauaaag

SEQ ID NO: 3272451 - RNA, 12 nt, Vaccinia virus
acguuuuaucca

SEQ ID NO: 3272452 - RNA, 15 nt, Vaccinia virus
gaagagauguuauau

SEQ ID NO: 3272453 - RNA, 18 nt, Vaccinia virus
aagaugauaaaaacauuu

SEQ ID NO: 3272454 - RNA, 14 nt, Vaccinia virus
gaagacuccuggua

SEQ ID NO: 3272455 - RNA, 16 nt, Vaccinia virus
uaaaaccaacuaauau

SEQ ID NO: 3272456 - RNA, 12 nt, Vaccinia virus
uguuuuaacauc

SEQ ID NO: 3272457 - RNA, 16 nt, Vaccinia virus
gauaagauaaaaucua

SEQ ID NO: 3272458 - RNA, 18 nt, Vaccinia virus
ucugacaauauuuaguuu

SEQ ID NO: 3272459 - RNA, 17 nt, Vaccinia virus
auaaugaugaccuauau

SEQ ID NO: 3272460 - RNA, 17 nt, Vaccinia virus
aacuacucgaacagaua

SEQ ID NO: 3272461 - RNA, 13 nt, Vaccinia virus
cuucuauuucuaa

SEQ ID NO: 3272462 - RNA, 22 nt, Vaccinia virus
agagcuaccgaaggagauacua

SEQ ID NO: 3272463 - RNA, 20 nt, Vaccinia virus
auacagaagauuuaacuaga

SEQ ID NO: 3272464 - RNA, 17 nt, Vaccinia virus
gaacaauuuuaaaucau

SEQ ID NO: 3272465 - RNA, 14 nt, Vaccinia virus
uacaucuacuauau

SEQ ID NO: 3272466 - RNA, 18 nt, Vaccinia virus
auaauuauaucacaacau

SEQ ID NO: 3272467 - RNA, 22 nt, Vaccinia virus
uauuucuucgcuuuauauacca

SEQ ID NO: 3272468 - RNA, 22 nt, Vaccinia virus
ugagauacuaacacauuucaac

SEQ ID NO: 3272469 - RNA, 19 nt, Vaccinia virus
guaauucgcgugauaaaau

SEQ ID NO: 3272470 - RNA, 19 nt, Vaccinia virus
auaauccggauguugugua

SEQ ID NO: 3272471 - RNA, 23 nt, Vaccinia virus
aauaauacaauauuuuucguuua

SEQ ID NO: 3272472 - RNA, 12 nt, Vaccinia virus
uaaucuauuuua

SEQ ID NO: 3272473 - RNA, 14 nt, Vaccinia virus
auuauguuuaaaga

SEQ ID NO: 3272474 - RNA, 16 nt, Vaccinia virus
uacgucuauacagaua

SEQ ID NO: 3272475 - RNA, 18 nt, Vaccinia virus
uugauuuuaaaauuaaaa

SEQ ID NO: 3272476 - RNA, 14 nt, Vaccinia virus
aggauaucucaaaa

SEQ ID NO: 3272477 - RNA, 23 nt, Vaccinia virus
ucuaaauaauaucuauuguuugg

SEQ ID NO: 3272478 - RNA, 21 nt, Vaccinia virus
uauuucuuucaugacugauuu

SEQ ID NO: 3272479 - RNA, 22 nt, Vaccinia virus
caauacugcgacuuuguuaaug

SEQ ID NO: 3272480 - RNA, 14 nt, Vaccinia virus
accuguauguacaa

SEQ ID NO: 3272481 - RNA, 17 nt, Vaccinia virus
cauaguuuuucauaauu

SEQ ID NO: 3272482 - RNA, 23 nt, Vaccinia virus
aacuuuauccauaucucuagaua

SEQ ID NO: 3272483 - RNA, 13 nt, Vaccinia virus
ugaugaauuaaug

SEQ ID NO: 3272484 - RNA, 19 nt, Vaccinia virus
acuggucauagaaaaugau

SEQ ID NO: 3272485 - RNA, 23 nt, Vaccinia virus
uauagauaaagaguccuauauau

SEQ ID NO: 3272486 - RNA, 14 nt, Vaccinia virus
cgacuaucguguuu

SEQ ID NO: 3272487 - RNA, 20 nt, Vaccinia virus
uuuccauggcccauucuauu

SEQ ID NO: 3272488 - RNA, 21 nt, Vaccinia virus
cuucuaaugagcaaguagaaa

SEQ ID NO: 3272489 - RNA, 15 nt, Vaccinia virus
auuaggaaauguuuc

SEQ ID NO: 3272490 - RNA, 20 nt, Vaccinia virus
auuaaagacuuaagacuuaa

SEQ ID NO: 3272491 - RNA, 22 nt, Vaccinia virus
gccccaggaucuccaacaaauu

SEQ ID NO: 3272492 - RNA, 14 nt, Vaccinia virus
uuaucuauuaucca

SEQ ID NO: 3272493 - RNA, 14 nt, Vaccinia virus
acaauccaauaaua

SEQ ID NO: 3272494 - RNA, 12 nt, Vaccinia virus
uauuuuaucauu

SEQ ID NO: 3272495 - RNA, 12 nt, Vaccinia virus
uuaauuaucuaa

SEQ ID NO: 3272496 - RNA, 21 nt, Vaccinia virus
ucuaucgaauguagcucugau

SEQ ID NO: 3272497 - RNA, 16 nt, Vaccinia virus
cucuaaacaaggaaac

SEQ ID NO: 3272498 - RNA, 14 nt, Vaccinia virus
uauauuguuucaua

SEQ ID NO: 3272499 - RNA, 13 nt, Vaccinia virus
aucacaaacauua

SEQ ID NO: 3272500 - RNA, 21 nt, Vaccinia virus
gaucuauuagaaaauucucuu

SEQ ID NO: 3272501 - RNA, 19 nt, Vaccinia virus
uaccuauuaauacaucgua

SEQ ID NO: 3272502 - RNA, 22 nt, Vaccinia virus
aaacacgucgaagguuaacauc

SEQ ID NO: 3272503 - RNA, 13 nt, Vaccinia virus
aauauuauuuccc

SEQ ID NO: 3272504 - RNA, 22 nt, Vaccinia virus
ugaagcauucuuuccagaacua

SEQ ID NO: 3272505 - RNA, 22 nt, Vaccinia virus
aauuaugaaaaaguaaaugaug

SEQ ID NO: 3272506 - RNA, 21 nt, Vaccinia virus
ucuaaaaauguuaauuuugaa

SEQ ID NO: 3272507 - RNA, 18 nt, Vaccinia virus
agacgauuccaacaaacg

SEQ ID NO: 3272508 - RNA, 18 nt, Vaccinia virus
ugcacuuaaagucuacau

SEQ ID NO: 3272509 - RNA, 13 nt, Vaccinia virus
agacuaacacaca

SEQ ID NO: 3272510 - RNA, 19 nt, Vaccinia virus
aauaaucccgcaauucauu

SEQ ID NO: 3272511 - RNA, 13 nt, Vaccinia virus
agaagcaacuuau

SEQ ID NO: 3272512 - RNA, 20 nt, Vaccinia virus
caauaaauguuuaaacauca

SEQ ID NO: 3272513 - RNA, 17 nt, Vaccinia virus
acuauauauagaaacuu

SEQ ID NO: 3272514 - RNA, 15 nt, Vaccinia virus
auuagauacauagau

SEQ ID NO: 3272515 - RNA, 15 nt, Vaccinia virus
caaauguuaaacauu

SEQ ID NO: 3272516 - RNA, 17 nt, Vaccinia virus
ucgauacauuaacucuc

SEQ ID NO: 3272517 - RNA, 15 nt, Vaccinia virus
ugauaguuucucauu

SEQ ID NO: 3272518 - RNA, 17 nt, Vaccinia virus
caguaguaauuaaugaa

SEQ ID NO: 3272519 - RNA, 22 nt, Vaccinia virus
acucauaaaauacaagagaaug

SEQ ID NO: 3272520 - RNA, 12 nt, Vaccinia virus
uuauuuaacaug

SEQ ID NO: 3272521 - RNA, 17 nt, Vaccinia virus
ucaauacggccauccag

SEQ ID NO: 3272522 - RNA, 15 nt, Vaccinia virus
uugauggaaaaauuc

SEQ ID NO: 3272523 - RNA, 15 nt, Vaccinia virus
auaguuucuauuuuu

SEQ ID NO: 3272524 - RNA, 13 nt, Vaccinia virus
auauuucauauac

SEQ ID NO: 3272525 - RNA, 15 nt, Vaccinia virus
ccaugaucuauaaag

SEQ ID NO: 3272526 - RNA, 22 nt, Vaccinia virus
aagaauaauccuauaucacuuc

SEQ ID NO: 3272527 - RNA, 17 nt, Vaccinia virus
uaugauaguuuuaacau

SEQ ID NO: 3272528 - RNA, 16 nt, Vaccinia virus
uaaaauuuauaacauu

SEQ ID NO: 3272529 - RNA, 14 nt, Vaccinia virus
uuagaaaguauuuu

SEQ ID NO: 3272530 - RNA, 19 nt, Vaccinia virus
ucaguguggguacaaauau

SEQ ID NO: 3272531 - RNA, 17 nt, Vaccinia virus
cguaucuauaaucaucu

SEQ ID NO: 3272532 - RNA, 16 nt, Vaccinia virus
aguauuccaauaucug

SEQ ID NO: 3272533 - RNA, 20 nt, Vaccinia virus
cacauuggugcuauccauuu

SEQ ID NO: 3272534 - RNA, 22 nt, Vaccinia virus
augcuugauaagauaaaaucua

SEQ ID NO: 3272535 - RNA, 23 nt, Vaccinia virus
guaaauaguuuuacguuauuaau

SEQ ID NO: 3272536 - RNA, 19 nt, Vaccinia virus
guaugucgauauacuuauc

SEQ ID NO: 3272537 - RNA, 14 nt, Vaccinia virus
auuaacuaucugua

SEQ ID NO: 3272538 - RNA, 21 nt, Vaccinia virus
auacaauaauucagauaaugu

SEQ ID NO: 3272539 - RNA, 24 nt, Vaccinia virus
auuaugacgucagccauagcauca

SEQ ID NO: 3272540 - RNA, 18 nt, Vaccinia virus
ucaucagauaagauuuua

SEQ ID NO: 3272541 - RNA, 16 nt, Vaccinia virus
cgucuacaaaaaacuu

SEQ ID NO: 3272542 - RNA, 20 nt, Vaccinia virus
cgagagacuuuguagaaaca

SEQ ID NO: 3272543 - RNA, 17 nt, Vaccinia virus
cggagaagaauugguaa

SEQ ID NO: 3272544 - RNA, 23 nt, Vaccinia virus
uucuucauuuauggguaucaaaa

SEQ ID NO: 3272545 - RNA, 19 nt, Vaccinia virus
uagugacggacuuaacaug

SEQ ID NO: 3272546 - RNA, 13 nt, Vaccinia virus
agagaaugauaua

SEQ ID NO: 3272547 - RNA, 20 nt, Vaccinia virus
ccagggaaauuaaagaagaa

SEQ ID NO: 3272548 - RNA, 14 nt, Vaccinia virus
acauuguuaauuga

SEQ ID NO: 3272549 - RNA, 17 nt, Vaccinia virus
agaaaugagaaacuguu

SEQ ID NO: 3272550 - RNA, 16 nt, Vaccinia virus
guguauuaauagauuu

SEQ ID NO: 3272551 - RNA, 20 nt, Vaccinia virus
aggucuaccgcauacgaaau

SEQ ID NO: 3272552 - RNA, 23 nt, Vaccinia virus
cuaauucacaauacgauuuagau

SEQ ID NO: 3272553 - RNA, 21 nt, Vaccinia virus
auauaccgccucaaacucuau

SEQ ID NO: 3272554 - RNA, 21 nt, Vaccinia virus
aauucuauccaagauacuuau

SEQ ID NO: 3272555 - RNA, 13 nt, Vaccinia virus
aaacaaaaaaaag

SEQ ID NO: 3272556 - RNA, 18 nt, Vaccinia virus
aaacucucuauuucuuaa

SEQ ID NO: 3272557 - RNA, 21 nt, Vaccinia virus
gauucuaacgacaucucucgc

SEQ ID NO: 3272558 - RNA, 12 nt, Vaccinia virus
cuaaacuagugg

SEQ ID NO: 3272559 - RNA, 15 nt, Vaccinia virus
agaucuaaauacaaa

SEQ ID NO: 3272560 - RNA, 23 nt, Vaccinia virus
guguauauuuaucucuucauuau

SEQ ID NO: 3272561 - RNA, 13 nt, Vaccinia virus
auaaaaauauauu

SEQ ID NO: 3272562 - RNA, 22 nt, Vaccinia virus
auuucuuuuuucuggcauaacu

SEQ ID NO: 3272563 - RNA, 23 nt, Vaccinia virus
uauuuuuaauagcugcucuuugu

SEQ ID NO: 3272564 - RNA, 15 nt, Vaccinia virus
cggaacaucaauuau

SEQ ID NO: 3272565 - RNA, 17 nt, Vaccinia virus
agugaaacaaucaagaa

SEQ ID NO: 3272566 - RNA, 14 nt, Vaccinia virus
uuugacuuacauaa

SEQ ID NO: 3272567 - RNA, 19 nt, Vaccinia virus
uguagaagguucauauguu

SEQ ID NO: 3272568 - RNA, 13 nt, Vaccinia virus
ucaaagauaauag

SEQ ID NO: 3272569 - RNA, 18 nt, Vaccinia virus
gcaauuagauccaaagaa

SEQ ID NO: 3272570 - RNA, 14 nt, Vaccinia virus
ucuuaucaauaaca

SEQ ID NO: 3272571 - RNA, 17 nt, Vaccinia virus
uaaccaccucucuggaa

SEQ ID NO: 3272572 - RNA, 18 nt, Vaccinia virus
caucuauaggugaugcug

SEQ ID NO: 3272573 - RNA, 20 nt, Vaccinia virus
uauuuucuggaaguggauau

SEQ ID NO: 3272574 - RNA, 15 nt, Vaccinia virus
cauuaauacaguaag

SEQ ID NO: 3272575 - RNA, 16 nt, Vaccinia virus
cuuggaaaagauaacu

SEQ ID NO: 3272576 - RNA, 16 nt, Vaccinia virus
uauaagauuguagaau

SEQ ID NO: 3272577 - RNA, 13 nt, Vaccinia virus
aagaagagaauua

SEQ ID NO: 3272578 - RNA, 23 nt, Vaccinia virus
aggauuuaaacaaaaaaguuauc

SEQ ID NO: 3272579 - RNA, 23 nt, Vaccinia virus
agaguucuuacacauaucacugu

SEQ ID NO: 3272580 - RNA, 20 nt, Vaccinia virus
gauguugauuaggucuuuua

SEQ ID NO: 3272581 - RNA, 23 nt, Vaccinia virus
aucugacucauggauucauuaau

SEQ ID NO: 3272582 - RNA, 18 nt, Vaccinia virus
aauuuucuauacauagau

SEQ ID NO: 3272583 - RNA, 16 nt, Vaccinia virus
uuuaauacuuauucau

SEQ ID NO: 3272584 - RNA, 19 nt, Vaccinia virus
auuacaaacuauagaaauu

SEQ ID NO: 3272585 - RNA, 18 nt, Vaccinia virus
acuuuacuuuucuaaauu

SEQ ID NO: 3272586 - RNA, 20 nt, Vaccinia virus
auaaacuaggauuuaaacaa

SEQ ID NO: 3272587 - RNA, 22 nt, Vaccinia virus
cauagguggagucuuuaucaau

SEQ ID NO: 3272588 - RNA, 22 nt, Vaccinia virus
ggcggauguugugaaugacauc

SEQ ID NO: 3272589 - RNA, 22 nt, Vaccinia virus
uuuguaaauaacuaucuauaaa

SEQ ID NO: 3272590 - RNA, 18 nt, Vaccinia virus
auccgggugaaauuauuc

SEQ ID NO: 3272591 - RNA, 12 nt, Vaccinia virus
uuuguacauuuu

SEQ ID NO: 3272592 - RNA, 21 nt, Vaccinia virus
cuacaaaagcaauuauuacaa

SEQ ID NO: 3272593 - RNA, 15 nt, Vaccinia virus
auugagaagaagcua

SEQ ID NO: 3272594 - RNA, 20 nt, Vaccinia virus
uuugguacguugauuucuag

SEQ ID NO: 3272595 - RNA, 15 nt, Vaccinia virus
auauaaccauuuucu

SEQ ID NO: 3272596 - RNA, 22 nt, Vaccinia virus
aaugaccaguuugcaauaugca

SEQ ID NO: 3272597 - RNA, 12 nt, Vaccinia virus
agagauuuuacu

SEQ ID NO: 3272598 - RNA, 14 nt, Vaccinia virus
ugaugcaugcgaua

SEQ ID NO: 3272599 - RNA, 23 nt, Vaccinia virus
gaacuauaaaaacagauaaugau

SEQ ID NO: 3272600 - RNA, 13 nt, Vaccinia virus
agcauuaauacag

SEQ ID NO: 3272601 - RNA, 15 nt, Vaccinia virus
gaguucauuaaaaua

SEQ ID NO: 3272602 - RNA, 12 nt, Vaccinia virus
auagauuugcau

SEQ ID NO: 3272603 - RNA, 13 nt, Vaccinia virus
acauuuuuaaaga

SEQ ID NO: 3272604 - RNA, 14 nt, Vaccinia virus
auucuuaucaauaa

SEQ ID NO: 3272605 - RNA, 16 nt, Vaccinia virus
agcaguuuauuaucca

SEQ ID NO: 3272606 - RNA, 17 nt, Vaccinia virus
agaucaucaaaauaugu

SEQ ID NO: 3272607 - RNA, 21 nt, Vaccinia virus
aaaauaccaucaucauagcau

SEQ ID NO: 3272608 - RNA, 15 nt, Vaccinia virus
gaauauauguuuaua

SEQ ID NO: 3272609 - RNA, 15 nt, Vaccinia virus
aagcccaaaaccaaa

SEQ ID NO: 3272610 - RNA, 19 nt, Vaccinia virus
uguauucgucuuucugaau

SEQ ID NO: 3272611 - RNA, 19 nt, Vaccinia virus
uaucuacauauuuaccaaa

SEQ ID NO: 3272612 - RNA, 15 nt, Vaccinia virus
agaauggaugauauu

SEQ ID NO: 3272613 - RNA, 13 nt, Vaccinia virus
auuaucaaaauuu

SEQ ID NO: 3272614 - RNA, 20 nt, Vaccinia virus
cgaaucaagugauucagaaa

SEQ ID NO: 3272615 - RNA, 13 nt, Vaccinia virus
ccugaccauccau

SEQ ID NO: 3272616 - RNA, 23 nt, Vaccinia virus
aaauugcgacacuauucauguaa

SEQ ID NO: 3272617 - RNA, 14 nt, Vaccinia virus
uuaauaucaaacaa

SEQ ID NO: 3272618 - RNA, 19 nt, Vaccinia virus
auuacuaccuucagaaauu

SEQ ID NO: 3272619 - RNA, 16 nt, Vaccinia virus
cucauaugauuucagu

SEQ ID NO: 3272620 - RNA, 22 nt, Vaccinia virus
guaaacauugacggauaaaaca

SEQ ID NO: 3272621 - RNA, 18 nt, Vaccinia virus
uuaacaucuauuaaucau

SEQ ID NO: 3272622 - RNA, 13 nt, Vaccinia virus
uaauaagauaaau

SEQ ID NO: 3272623 - RNA, 18 nt, Vaccinia virus
agaaucaauacaaaaauu

SEQ ID NO: 3272624 - RNA, 12 nt, Vaccinia virus
ugacgaagagac

SEQ ID NO: 3272625 - RNA, 21 nt, Vaccinia virus
augaagggaucguuaaugaac

SEQ ID NO: 3272626 - RNA, 16 nt, Vaccinia virus
agggcuaaaugucuag

SEQ ID NO: 3272627 - RNA, 20 nt, Vaccinia virus
guauuugagaaauauguaua

SEQ ID NO: 3272628 - RNA, 11 nt, Vaccinia virus
cucuagaaaaa

SEQ ID NO: 3272629 - RNA, 15 nt, Vaccinia virus
caagucauaaaucau

SEQ ID NO: 3272630 - RNA, 22 nt, Vaccinia virus
uaugaauggauacuuguaugau

SEQ ID NO: 3272631 - RNA, 15 nt, Vaccinia virus
auacuaguuuucuaa

SEQ ID NO: 3272632 - RNA, 19 nt, Vaccinia virus
aaugaucucaauuagaaua

SEQ ID NO: 3272633 - RNA, 17 nt, Vaccinia virus
uauauaucauuuguaca

SEQ ID NO: 3272634 - RNA, 13 nt, Vaccinia virus
ucuaucaauaacu

SEQ ID NO: 3272635 - RNA, 19 nt, Vaccinia virus
uuauguguuauaagguacu

SEQ ID NO: 3272636 - RNA, 23 nt, Vaccinia virus
ucuucuugagaucccacaucauu

SEQ ID NO: 3272637 - RNA, 14 nt, Vaccinia virus
acaucaaaaaauua

SEQ ID NO: 3272638 - RNA, 19 nt, Vaccinia virus
aguaaguacaucaucugga

SEQ ID NO: 3272639 - RNA, 21 nt, Vaccinia virus
gcugagaauaucuuuauucau

SEQ ID NO: 3272640 - RNA, 21 nt, Vaccinia virus
auccuguugucuaaaucucuu

SEQ ID NO: 3272641 - RNA, 14 nt, Vaccinia virus
auuaauuaaccauu

SEQ ID NO: 3272642 - RNA, 22 nt, Vaccinia virus
uuccaggaucuagauaauuaau

SEQ ID NO: 3272643 - RNA, 16 nt, Vaccinia virus
aaauagauagaacuac

SEQ ID NO: 3272644 - RNA, 18 nt, Vaccinia virus
aauucagcgguaaagaua

SEQ ID NO: 3272645 - RNA, 17 nt, Vaccinia virus
aucaguuuuguauucca

SEQ ID NO: 3272646 - RNA, 19 nt, Vaccinia virus
accauuagauaaaguugau

SEQ ID NO: 3272647 - RNA, 17 nt, Vaccinia virus
uuaccggucauauuaau

SEQ ID NO: 3272648 - RNA, 16 nt, Vaccinia virus
uacgcauuuucaaaau

SEQ ID NO: 3272649 - RNA, 13 nt, Vaccinia virus
uacuucuguacaa

SEQ ID NO: 3272650 - RNA, 14 nt, Vaccinia virus
cauuauucuauuuc

SEQ ID NO: 3272651 - RNA, 19 nt, Vaccinia virus
ucuugagugcgaauguaau

SEQ ID NO: 3272652 - RNA, 13 nt, Vaccinia virus
ucguguucuacau

SEQ ID NO: 3272653 - RNA, 16 nt, Vaccinia virus
gacuaugggaauauau

SEQ ID NO: 3272654 - RNA, 14 nt, Vaccinia virus
uuagacuuguauuc

SEQ ID NO: 3272655 - RNA, 21 nt, Vaccinia virus
gcucuuuguccauuauuucua

SEQ ID NO: 3272656 - RNA, 14 nt, Vaccinia virus
gugguguaaucuua

SEQ ID NO: 3272657 - RNA, 23 nt, Vaccinia virus
uaugcuauaaaugaauucucauu

SEQ ID NO: 3272658 - RNA, 16 nt, Vaccinia virus
aauugaaucuuaguaa

SEQ ID NO: 3272659 - RNA, 17 nt, Vaccinia virus
gcgaaccgauuaaacau

SEQ ID NO: 3272660 - RNA, 21 nt, Vaccinia virus
aaucacugcgauuguauuauc

SEQ ID NO: 3272661 - RNA, 20 nt, Vaccinia virus
uagacuguuuguagaaugcu

SEQ ID NO: 3272662 - RNA, 22 nt, Vaccinia virus
cguuaauaggagcuagaagaac

SEQ ID NO: 3272663 - RNA, 17 nt, Vaccinia virus
gaugauuagauggagag

SEQ ID NO: 3272664 - RNA, 20 nt, Vaccinia virus
acuuaguauacaaaaaaaug

SEQ ID NO: 3272665 - RNA, 20 nt, Vaccinia virus
auuccacgaacuucuaauug

SEQ ID NO: 3272666 - RNA, 13 nt, Vaccinia virus
acgucauuucauc

SEQ ID NO: 3272667 - RNA, 17 nt, Vaccinia virus
uauuuuaauacauguau

SEQ ID NO: 3272668 - RNA, 16 nt, Vaccinia virus
cauccaugcagcauuu

SEQ ID NO: 3272669 - RNA, 20 nt, Vaccinia virus
cucguuaaacgccuuuagaa

SEQ ID NO: 3272670 - RNA, 19 nt, Vaccinia virus
uagauccucauaaguguau

SEQ ID NO: 3272671 - RNA, 23 nt, Vaccinia virus
aucaaggacuuuuauaucccaca

SEQ ID NO: 3272672 - RNA, 17 nt, Vaccinia virus
uggucaauuacaaauaa

SEQ ID NO: 3272673 - RNA, 14 nt, Vaccinia virus
aggacguaauacau

SEQ ID NO: 3272674 - RNA, 21 nt, Vaccinia virus
ucuuugaccaacgauuuagaa

SEQ ID NO: 3272675 - RNA, 13 nt, Vaccinia virus
ugcuacgcaaaua

SEQ ID NO: 3272676 - RNA, 15 nt, Vaccinia virus
caauaguugauuuuu

SEQ ID NO: 3272677 - RNA, 18 nt, Vaccinia virus
ggauuuggucauaauaga

SEQ ID NO: 3272678 - RNA, 17 nt, Vaccinia virus
uaguuaugauaaaugau

SEQ ID NO: 3272679 - RNA, 21 nt, Vaccinia virus
gacaauaguuucuauacuguc

SEQ ID NO: 3272680 - RNA, 13 nt, Vaccinia virus
agguauuuauuca

SEQ ID NO: 3272681 - RNA, 17 nt, Vaccinia virus
caauuauugggccagua

SEQ ID NO: 3272682 - RNA, 15 nt, Vaccinia virus
gaaauaaauaaugaa

SEQ ID NO: 3272683 - RNA, 18 nt, Vaccinia virus
uuuagaugaauuauuauu

SEQ ID NO: 3272684 - RNA, 17 nt, Vaccinia virus
cauuuauaucuuuagcu

SEQ ID NO: 3272685 - RNA, 14 nt, Vaccinia virus
uaaauuuaucuauu

SEQ ID NO: 3272686 - RNA, 22 nt, Vaccinia virus
aguacccacugaugagauguua

SEQ ID NO: 3272687 - RNA, 15 nt, Vaccinia virus
aacuaguauaaaauc

SEQ ID NO: 3272688 - RNA, 16 nt, Vaccinia virus
cguccgguaguauaau

SEQ ID NO: 3272689 - RNA, 18 nt, Vaccinia virus
aucaacuuuauuagauaa

SEQ ID NO: 3272690 - RNA, 18 nt, Vaccinia virus
agaacauauaaauguaga

SEQ ID NO: 3272691 - RNA, 15 nt, Vaccinia virus
uacaauauuuacauu

SEQ ID NO: 3272692 - RNA, 19 nt, Vaccinia virus
aacaggguuuguugauucg

SEQ ID NO: 3272693 - RNA, 14 nt, Vaccinia virus
uauaaauucucgag

SEQ ID NO: 3272694 - RNA, 14 nt, Vaccinia virus
aucaaguagaaauu

SEQ ID NO: 3272695 - RNA, 16 nt, Vaccinia virus
auauuagauuuuguau

SEQ ID NO: 3272696 - RNA, 16 nt, Vaccinia virus
aaggaauugaugaagu

SEQ ID NO: 3272697 - RNA, 13 nt, Vaccinia virus
auauaucuauugu

SEQ ID NO: 3272698 - RNA, 15 nt, Vaccinia virus
cguaucuaaaguauu

SEQ ID NO: 3272699 - RNA, 15 nt, Vaccinia virus
auacuggagaacuua

SEQ ID NO: 3272700 - RNA, 13 nt, Vaccinia virus
uccaauagauguc

SEQ ID NO: 3272701 - RNA, 22 nt, Vaccinia virus
cauuagccacguucacuguaaa

SEQ ID NO: 3272702 - RNA, 14 nt, Vaccinia virus
uuuauagaauuuag

SEQ ID NO: 3272703 - RNA, 20 nt, Vaccinia virus
auacacaucaaaauaauaaa

SEQ ID NO: 3272704 - RNA, 16 nt, Vaccinia virus
aucuauccauaugcau

SEQ ID NO: 3272705 - RNA, 23 nt, Vaccinia virus
uuacuuugaaacaggauuuccaa

SEQ ID NO: 3272706 - RNA, 22 nt, Vaccinia virus
gcaaaacugaaaauauauugau

SEQ ID NO: 3272707 - RNA, 16 nt, Vaccinia virus
uagcauuaauacagua

SEQ ID NO: 3272708 - RNA, 15 nt, Vaccinia virus
aaagauggcugaaau

SEQ ID NO: 3272709 - RNA, 18 nt, Vaccinia virus
aaguauuguuuugauaac

SEQ ID NO: 3272710 - RNA, 15 nt, Vaccinia virus
uaauccuaagaaaac

SEQ ID NO: 3272711 - RNA, 16 nt, Vaccinia virus
caaaaauauuaaaccu

SEQ ID NO: 3272712 - RNA, 21 nt, Vaccinia virus
cucuaaaugagucuacugcua

SEQ ID NO: 3272713 - RNA, 12 nt, Vaccinia virus
uuuccauaauaa

SEQ ID NO: 3272714 - RNA, 15 nt, Vaccinia virus
uugauauauuauuua

SEQ ID NO: 3272715 - RNA, 20 nt, Vaccinia virus
uugauccuagaacuagauau

SEQ ID NO: 3272716 - RNA, 13 nt, Vaccinia virus
gauaauaaaucaa

SEQ ID NO: 3272717 - RNA, 14 nt, Vaccinia virus
aauaacuagaucau

SEQ ID NO: 3272718 - RNA, 23 nt, Vaccinia virus
aauagacauaagaaauuugccaa

SEQ ID NO: 3272719 - RNA, 17 nt, Vaccinia virus
auucguuagcaaaauua

SEQ ID NO: 3272720 - RNA, 18 nt, Vaccinia virus
auuccaauguuuaacaag

SEQ ID NO: 3272721 - RNA, 23 nt, Vaccinia virus
agucagcuggucuaaaauuucca

SEQ ID NO: 3272722 - RNA, 21 nt, Vaccinia virus
uaucuuguuuagaaaaaugcu

SEQ ID NO: 3272723 - RNA, 15 nt, Vaccinia virus
guccguuauauaauc

SEQ ID NO: 3272724 - RNA, 21 nt, Vaccinia virus
uucuacaugcuccaauugaau

SEQ ID NO: 3272725 - RNA, 14 nt, Vaccinia virus
auuuacaauuauug

SEQ ID NO: 3272726 - RNA, 15 nt, Vaccinia virus
uuauaaaaauguucu

SEQ ID NO: 3272727 - RNA, 21 nt, Vaccinia virus
aauugaauugcgauuauaaga

SEQ ID NO: 3272728 - RNA, 15 nt, Vaccinia virus
cuuauuauauuuccc

SEQ ID NO: 3272729 - RNA, 20 nt, Vaccinia virus
uaacaucaucaaaagacuua

SEQ ID NO: 3272730 - RNA, 21 nt, Vaccinia virus
acuagugauagcauuaauaca

SEQ ID NO: 3272731 - RNA, 15 nt, Vaccinia virus
ugguuauuuacuaac

SEQ ID NO: 3272732 - RNA, 18 nt, Vaccinia virus
aagauaucuauacuuacu

SEQ ID NO: 3272733 - RNA, 23 nt, Vaccinia virus
augaaagauacaacaaauuaaac

SEQ ID NO: 3272734 - RNA, 18 nt, Vaccinia virus
acuacugccauuaauauc

SEQ ID NO: 3272735 - RNA, 20 nt, Vaccinia virus
acuacauucucauuaauuaa

SEQ ID NO: 3272736 - RNA, 15 nt, Vaccinia virus
aguuauaaguuugaa

SEQ ID NO: 3272737 - RNA, 21 nt, Vaccinia virus
auaaucguuuaccacuuaaau

SEQ ID NO: 3272738 - RNA, 14 nt, Vaccinia virus
agagauaacuauaa

SEQ ID NO: 3272739 - RNA, 19 nt, Vaccinia virus
uguuuacaguaguaaugaa

SEQ ID NO: 3272740 - RNA, 19 nt, Vaccinia virus
uaacgaguuccauuuauau

SEQ ID NO: 3272741 - RNA, 12 nt, Vaccinia virus
uuauaacuaaca

SEQ ID NO: 3272742 - RNA, 15 nt, Vaccinia virus
guaaccgaaucuucc

SEQ ID NO: 3272743 - RNA, 17 nt, Vaccinia virus
cuuauuacuuuuggaau

SEQ ID NO: 3272744 - RNA, 19 nt, Vaccinia virus
agcauaaacauaauaaaca

SEQ ID NO: 3272745 - RNA, 15 nt, Vaccinia virus
aaagacgaauacaua

SEQ ID NO: 3272746 - RNA, 19 nt, Vaccinia virus
guauaauuuuuauguuuua

SEQ ID NO: 3272747 - RNA, 18 nt, Vaccinia virus
agacuacguagacuguuu

SEQ ID NO: 3272748 - RNA, 15 nt, Vaccinia virus
aauaauaagaauaaa

SEQ ID NO: 3272749 - RNA, 19 nt, Vaccinia virus
aacgagauaucuuguuaca

SEQ ID NO: 3272750 - RNA, 20 nt, Vaccinia virus
aaaaacauuaacaagaauca

SEQ ID NO: 3272751 - RNA, 15 nt, Vaccinia virus
aucaucauuguguaa

SEQ ID NO: 3272752 - RNA, 15 nt, Vaccinia virus
uauuccaauguuuaa

SEQ ID NO: 3272753 - RNA, 15 nt, Vaccinia virus
ucuugguaauacuua

SEQ ID NO: 3272754 - RNA, 14 nt, Vaccinia virus
ccauugaaaacuau

SEQ ID NO: 3272755 - RNA, 14 nt, Vaccinia virus
aggagauuaaagga

SEQ ID NO: 3272756 - RNA, 22 nt, Vaccinia virus
ugauuuuguagaugccauauca

SEQ ID NO: 3272757 - RNA, 22 nt, Vaccinia virus
uauaacuaaacacguuaguguu

SEQ ID NO: 3272758 - RNA, 19 nt, Vaccinia virus
agcuauugcauaauacaag

SEQ ID NO: 3272759 - RNA, 18 nt, Vaccinia virus
uucagcauuacuugauau

SEQ ID NO: 3272760 - RNA, 14 nt, Vaccinia virus
acauuuaugauaug

SEQ ID NO: 3272761 - RNA, 17 nt, Vaccinia virus
aaauaggguuguguaua

SEQ ID NO: 3272762 - RNA, 24 nt, Vaccinia virus
uauaauuuaggaaugauuaucaaa

SEQ ID NO: 3272763 - RNA, 19 nt, Vaccinia virus
gaucugaugguaauccaau

SEQ ID NO: 3272764 - RNA, 16 nt, Vaccinia virus
auagaagauaucacau

SEQ ID NO: 3272765 - RNA, 19 nt, Vaccinia virus
aguagauuguuggcuacau

SEQ ID NO: 3272766 - RNA, 19 nt, Vaccinia virus
augauauaggggucuucau

SEQ ID NO: 3272767 - RNA, 21 nt, Vaccinia virus
agauaaagaguccuauauauu

SEQ ID NO: 3272768 - RNA, 13 nt, Vaccinia virus
uaggugaugaugc

SEQ ID NO: 3272769 - RNA, 15 nt, Vaccinia virus
agcuccugguauaug

SEQ ID NO: 3272770 - RNA, 15 nt, Vaccinia virus
uagcuuucauaguua

SEQ ID NO: 3272771 - RNA, 13 nt, Vaccinia virus
uguuuauuuucaa

SEQ ID NO: 3272772 - RNA, 20 nt, Vaccinia virus
gaauacaaucuguauuucau

SEQ ID NO: 3272773 - RNA, 18 nt, Vaccinia virus
uucuagucuuaaccaaaa

SEQ ID NO: 3272774 - RNA, 19 nt, Vaccinia virus
aguaagugcaacaucugga

SEQ ID NO: 3272775 - RNA, 18 nt, Vaccinia virus
cuuuugcggacauuuucu

SEQ ID NO: 3272776 - RNA, 14 nt, Vaccinia virus
uugaacauuauuga

SEQ ID NO: 3272777 - RNA, 13 nt, Vaccinia virus
aauauaaauggua

SEQ ID NO: 3272778 - RNA, 21 nt, Vaccinia virus
auggcaucuauuuuaaauaca

SEQ ID NO: 3272779 - RNA, 13 nt, Vaccinia virus
cuaacacauuuca

SEQ ID NO: 3272780 - RNA, 16 nt, Vaccinia virus
aaagacuaugcaaaga

SEQ ID NO: 3272781 - RNA, 21 nt, Vaccinia virus
augauugacgcauuuaauaga

SEQ ID NO: 3272782 - RNA, 22 nt, Vaccinia virus
aaauauugaacuaguaguacgu

SEQ ID NO: 3272783 - RNA, 16 nt, Vaccinia virus
agaauacgcauguuuu

SEQ ID NO: 3272784 - RNA, 19 nt, Vaccinia virus
uaaagcccucuauuagcau

SEQ ID NO: 3272785 - RNA, 19 nt, Vaccinia virus
uucucauugcuuauauuuu

SEQ ID NO: 3272786 - RNA, 21 nt, Vaccinia virus
agauaaauccaucuuccagaa

SEQ ID NO: 3272787 - RNA, 10 nt, Vaccinia virus
uugaaagaga

SEQ ID NO: 3272788 - RNA, 16 nt, Vaccinia virus
acucuacguaucucgu

SEQ ID NO: 3272789 - RNA, 17 nt, Vaccinia virus
guaaaaucaaacacaag

SEQ ID NO: 3272790 - RNA, 20 nt, Vaccinia virus
auauaucaucgacaaagaca

SEQ ID NO: 3272791 - RNA, 21 nt, Vaccinia virus
aucaucgaucauguuaaguaa

SEQ ID NO: 3272792 - RNA, 15 nt, Vaccinia virus
caagaggauggaauu

SEQ ID NO: 3272793 - RNA, 23 nt, Vaccinia virus
guuguuacauuaguaaucuuuuu

SEQ ID NO: 3272794 - RNA, 17 nt, Vaccinia virus
acgauuaccaauacuuu

SEQ ID NO: 3272795 - RNA, 22 nt, Vaccinia virus
guuuauaauuacaacauaauag

SEQ ID NO: 3272796 - RNA, 15 nt, Vaccinia virus
cuuugaagagauauu

SEQ ID NO: 3272797 - RNA, 19 nt, Vaccinia virus
uuguuaacgggcucguaaa

SEQ ID NO: 3272798 - RNA, 17 nt, Vaccinia virus
auccagucuuuaaugaa

SEQ ID NO: 3272799 - RNA, 14 nt, Vaccinia virus
uuuauacuucuaau

SEQ ID NO: 3272800 - RNA, 15 nt, Vaccinia virus
auauuucauauacua

SEQ ID NO: 3272801 - RNA, 16 nt, Vaccinia virus
uccuuugauuaucauc

SEQ ID NO: 3272802 - RNA, 23 nt, Vaccinia virus
guucuauguaucuaaaauaaugu

SEQ ID NO: 3272803 - RNA, 20 nt, Vaccinia virus
uuugauuugcuuugaaugau

SEQ ID NO: 3272804 - RNA, 17 nt, Vaccinia virus
uucaggaacauaaacaa

SEQ ID NO: 3272805 - RNA, 19 nt, Vaccinia virus
agcauaucacgaacuauau

SEQ ID NO: 3272806 - RNA, 17 nt, Vaccinia virus
uaagaccgaaauuauca

SEQ ID NO: 3272807 - RNA, 23 nt, Vaccinia virus
uguuugauuucucuaucgaugca

SEQ ID NO: 3272808 - RNA, 23 nt, Vaccinia virus
uccuuuaaaauauauucuaauau

SEQ ID NO: 3272809 - RNA, 16 nt, Vaccinia virus
cuauguuucaguuuaa

SEQ ID NO: 3272810 - RNA, 14 nt, Vaccinia virus
uuacgauagacuuu

SEQ ID NO: 3272811 - RNA, 13 nt, Vaccinia virus
acuuccauggaaa

SEQ ID NO: 3272812 - RNA, 23 nt, Vaccinia virus
cugaaugucgaaccuaucuagua

SEQ ID NO: 3272813 - RNA, 19 nt, Vaccinia virus
uuuuuaaagguaucuaaug

SEQ ID NO: 3272814 - RNA, 17 nt, Vaccinia virus
aaaauguugaugauauc

SEQ ID NO: 3272815 - RNA, 23 nt, Vaccinia virus
uucuagaaaacgaaaacauccua

SEQ ID NO: 3272816 - RNA, 15 nt, Vaccinia virus
aucaucaucugaaau

SEQ ID NO: 3272817 - RNA, 21 nt, Vaccinia virus
guagacgagccuagaaaucaa

SEQ ID NO: 3272818 - RNA, 17 nt, Vaccinia virus
cuagaaugaagauauca

SEQ ID NO: 3272819 - RNA, 17 nt, Vaccinia virus
auuaaauauagguauau

SEQ ID NO: 3272820 - RNA, 17 nt, Vaccinia virus
cguauucugaugauauu

SEQ ID NO: 3272821 - RNA, 20 nt, Vaccinia virus
gcgaacugaaggaaucaggu

SEQ ID NO: 3272822 - RNA, 15 nt, Vaccinia virus
uuaaucauguacaug

SEQ ID NO: 3272823 - RNA, 16 nt, Vaccinia virus
uuucguacauuuuuaa

SEQ ID NO: 3272824 - RNA, 20 nt, Vaccinia virus
gauacuccuuuguauguacc

SEQ ID NO: 3272825 - RNA, 18 nt, Vaccinia virus
aguauaacgugaauguau

SEQ ID NO: 3272826 - RNA, 17 nt, Vaccinia virus
guaugaggcaacauugu

SEQ ID NO: 3272827 - RNA, 20 nt, Vaccinia virus
auuuuaauaggaucuauaug

SEQ ID NO: 3272828 - RNA, 14 nt, Vaccinia virus
uucaaaguuucuga

SEQ ID NO: 3272829 - RNA, 21 nt, Vaccinia virus
gauaacuuuuucaauaucgua

SEQ ID NO: 3272830 - RNA, 13 nt, Vaccinia virus
aacaaucaagaag

SEQ ID NO: 3272831 - RNA, 15 nt, Vaccinia virus
uauaucccuuaaaaa

SEQ ID NO: 3272832 - RNA, 14 nt, Vaccinia virus
gauuauaugauaua

SEQ ID NO: 3272833 - RNA, 14 nt, Vaccinia virus
auaauaauauauau

SEQ ID NO: 3272834 - RNA, 14 nt, Vaccinia virus
augaaaaaaaacua

SEQ ID NO: 3272835 - RNA, 16 nt, Vaccinia virus
aacuauuucagaacau

SEQ ID NO: 3272836 - RNA, 13 nt, Vaccinia virus
auuuaauagagau

SEQ ID NO: 3272837 - RNA, 19 nt, Vaccinia virus
agaguugauuguaaauaca

SEQ ID NO: 3272838 - RNA, 12 nt, Vaccinia virus
agaaugcuguua

SEQ ID NO: 3272839 - RNA, 16 nt, Vaccinia virus
aauauuuuuuagagaa

SEQ ID NO: 3272840 - RNA, 13 nt, Vaccinia virus
gaccaauaauaaa

SEQ ID NO: 3272841 - RNA, 13 nt, Vaccinia virus
auacaauaucuuc

SEQ ID NO: 3272842 - RNA, 18 nt, Vaccinia virus
aauuuauuugauaaagga

SEQ ID NO: 3272843 - RNA, 16 nt, Vaccinia virus
auucuauuauauuaac

SEQ ID NO: 3272844 - RNA, 17 nt, Vaccinia virus
augucggaguuaauagc

SEQ ID NO: 3272845 - RNA, 13 nt, Vaccinia virus
auauauugucuaa

SEQ ID NO: 3272846 - RNA, 18 nt, Vaccinia virus
gauaaacacucauauuau

SEQ ID NO: 3272847 - RNA, 19 nt, Vaccinia virus
agauaaacuaggauuuaaa

SEQ ID NO: 3272848 - RNA, 18 nt, Vaccinia virus
aguucccgcauuaaauaa

SEQ ID NO: 3272849 - RNA, 19 nt, Vaccinia virus
uguuccaacucgugugcuc

SEQ ID NO: 3272850 - RNA, 16 nt, Vaccinia virus
cuguuaucuaaugaau

SEQ ID NO: 3272851 - RNA, 15 nt, Vaccinia virus
auaaauacauuuaca

SEQ ID NO: 3272852 - RNA, 13 nt, Vaccinia virus
uauggaaaacuaa

SEQ ID NO: 3272853 - RNA, 15 nt, Vaccinia virus
cuaugguacaaguug

SEQ ID NO: 3272854 - RNA, 23 nt, Vaccinia virus
uauuaauccuuucuucuugagau

SEQ ID NO: 3272855 - RNA, 12 nt, Vaccinia virus
uguuuaagaaaa

SEQ ID NO: 3272856 - RNA, 23 nt, Vaccinia virus
guauaacaugacauuuauucauc

SEQ ID NO: 3272857 - RNA, 19 nt, Vaccinia virus
uauugccauaauuuucaua

SEQ ID NO: 3272858 - RNA, 22 nt, Vaccinia virus
gcaucaacaauuacaaaugagu

SEQ ID NO: 3272859 - RNA, 16 nt, Vaccinia virus
ucguuguccuuuacau

SEQ ID NO: 3272860 - RNA, 16 nt, Vaccinia virus
aacgaaaaauuaucgu

SEQ ID NO: 3272861 - RNA, 12 nt, Vaccinia virus
gucaauacugua

SEQ ID NO: 3272862 - RNA, 13 nt, Vaccinia virus
agaaacauauucu

SEQ ID NO: 3272863 - RNA, 17 nt, Vaccinia virus
cugcguuaucaauaaau

SEQ ID NO: 3272864 - RNA, 17 nt, Vaccinia virus
uagccuuaagaaaacua

SEQ ID NO: 3272865 - RNA, 19 nt, Vaccinia virus
aaaacuuaacucaacuguu

SEQ ID NO: 3272866 - RNA, 16 nt, Vaccinia virus
augauacauuaaguaa

SEQ ID NO: 3272867 - RNA, 23 nt, Vaccinia virus
aauuaucgacauagguauagaau

SEQ ID NO: 3272868 - RNA, 19 nt, Vaccinia virus
ugaaauagcucguuucuau

SEQ ID NO: 3272869 - RNA, 21 nt, Vaccinia virus
aacauuuauuaucaugaugac

SEQ ID NO: 3272870 - RNA, 12 nt, Vaccinia virus
cguuuauggauc

SEQ ID NO: 3272871 - RNA, 16 nt, Vaccinia virus
cuuuuguauucauaga

SEQ ID NO: 3272872 - RNA, 21 nt, Vaccinia virus
aacgugaaugaucuauuaucu

SEQ ID NO: 3272873 - RNA, 13 nt, Vaccinia virus
uucacaaaauacg

SEQ ID NO: 3272874 - RNA, 18 nt, Vaccinia virus
gauauccuaucuauuauu

SEQ ID NO: 3272875 - RNA, 16 nt, Vaccinia virus
ccuuuacaguggauaa

SEQ ID NO: 3272876 - RNA, 23 nt, Vaccinia virus
auacauugaauauaaaauaacua

SEQ ID NO: 3272877 - RNA, 13 nt, Vaccinia virus
guccguacuuauu

SEQ ID NO: 3272878 - RNA, 14 nt, Vaccinia virus
auuguuuuucacag

SEQ ID NO: 3272879 - RNA, 17 nt, Vaccinia virus
agguggcuaccgacaau

SEQ ID NO: 3272880 - RNA, 21 nt, Vaccinia virus
cauguugauaaacuacuuaca

SEQ ID NO: 3272881 - RNA, 16 nt, Vaccinia virus
cacguuaaaucaucua

SEQ ID NO: 3272882 - RNA, 22 nt, Vaccinia virus
agaaauggaaaucguaauacca

SEQ ID NO: 3272883 - RNA, 12 nt, Vaccinia virus
uauaauaucuua

SEQ ID NO: 3272884 - RNA, 16 nt, Vaccinia virus
auaaccuuuuccuuau

SEQ ID NO: 3272885 - RNA, 21 nt, Vaccinia virus
uauggauuuuuuuaaaaagga

SEQ ID NO: 3272886 - RNA, 15 nt, Vaccinia virus
aauuauuauuacuga

SEQ ID NO: 3272887 - RNA, 13 nt, Vaccinia virus
gcguauuuaagag

SEQ ID NO: 3272888 - RNA, 22 nt, Vaccinia virus
aucuaacagaaacguuuagaga

SEQ ID NO: 3272889 - RNA, 17 nt, Vaccinia virus
ggaugaguuaauguaua

SEQ ID NO: 3272890 - RNA, 15 nt, Vaccinia virus
uaacuucugauuuua

SEQ ID NO: 3272891 - RNA, 22 nt, Vaccinia virus
augauuuugaaccguauuacuc

SEQ ID NO: 3272892 - RNA, 23 nt, Vaccinia virus
auacacguuagauuauucucaaa

SEQ ID NO: 3272893 - RNA, 21 nt, Vaccinia virus
uguauuggauccuuugacuau

SEQ ID NO: 3272894 - RNA, 20 nt, Vaccinia virus
aauacaugggaaaugauauc

SEQ ID NO: 3272895 - RNA, 21 nt, Vaccinia virus
aaggacauuggauauguggaa

SEQ ID NO: 3272896 - RNA, 12 nt, Vaccinia virus
agcgaauuauuu

SEQ ID NO: 3272897 - RNA, 15 nt, Vaccinia virus
uuaucucccauaauc

SEQ ID NO: 3272898 - RNA, 12 nt, Vaccinia virus
acuuuuaaauac

SEQ ID NO: 3272899 - RNA, 20 nt, Vaccinia virus
ucacguuauauaacuaucaa

SEQ ID NO: 3272900 - RNA, 17 nt, Vaccinia virus
agacaauugacaaaauu

SEQ ID NO: 3272901 - RNA, 22 nt, Vaccinia virus
uaauagguuugaucguugucau

SEQ ID NO: 3272902 - RNA, 15 nt, Vaccinia virus
gaauauaauaaucua

SEQ ID NO: 3272903 - RNA, 16 nt, Vaccinia virus
aaaucauuaaaaagau

SEQ ID NO: 3272904 - RNA, 21 nt, Vaccinia virus
aauacuaaaaaauguagaaau

SEQ ID NO: 3272905 - RNA, 17 nt, Vaccinia virus
acauguguuuuagaaua

SEQ ID NO: 3272906 - RNA, 13 nt, Vaccinia virus
guaaugaagagaa

SEQ ID NO: 3272907 - RNA, 16 nt, Vaccinia virus
aaaauauuuauuagaa

SEQ ID NO: 3272908 - RNA, 20 nt, Vaccinia virus
cacgaaauaaaaaacauaau

SEQ ID NO: 3272909 - RNA, 12 nt, Vaccinia virus
caguuauuggau

SEQ ID NO: 3272910 - RNA, 17 nt, Vaccinia virus
cauagauguauauauca

SEQ ID NO: 3272911 - RNA, 21 nt, Vaccinia virus
cuaaagagauuuagacaacag

SEQ ID NO: 3272912 - RNA, 13 nt, Vaccinia virus
auucgacacuauu

SEQ ID NO: 3272913 - RNA, 20 nt, Vaccinia virus
uucucaaauccauagucuuc

SEQ ID NO: 3272914 - RNA, 23 nt, Vaccinia virus
uuauacauguuccagaugucaua

SEQ ID NO: 3272915 - RNA, 20 nt, Vaccinia virus
uaaacuacgugaacauaugg

SEQ ID NO: 3272916 - RNA, 14 nt, Vaccinia virus
agccgaaaacauug

SEQ ID NO: 3272917 - RNA, 12 nt, Vaccinia virus
guuaauaacauc

SEQ ID NO: 3272918 - RNA, 16 nt, Vaccinia virus
agaaauaucuauaauu

SEQ ID NO: 3272919 - RNA, 19 nt, Vaccinia virus
uaauacagauggauuaaau

SEQ ID NO: 3272920 - RNA, 21 nt, Vaccinia virus
caaauguagugaauaucucua

SEQ ID NO: 3272921 - RNA, 18 nt, Vaccinia virus
acuuacuaaagucaauaa

SEQ ID NO: 3272922 - RNA, 20 nt, Vaccinia virus
agugguauauaauccaucaa

SEQ ID NO: 3272923 - RNA, 12 nt, Vaccinia virus
uuuauucucaaa

SEQ ID NO: 3272924 - RNA, 22 nt, Vaccinia virus
uagaucuuccaaucuaucuauu

SEQ ID NO: 3272925 - RNA, 20 nt, Vaccinia virus
gucuauccauuguuucacau

SEQ ID NO: 3272926 - RNA, 23 nt, Vaccinia virus
aauaacuucgugaauaauguuuc

SEQ ID NO: 3272927 - RNA, 14 nt, Vaccinia virus
agcaaaaaaugaua

SEQ ID NO: 3272928 - RNA, 22 nt, Vaccinia virus
uuauccuuuagaugaauuauua

SEQ ID NO: 3272929 - RNA, 16 nt, Vaccinia virus
aacaauuuuuuguucu

SEQ ID NO: 3272930 - RNA, 19 nt, Vaccinia virus
uucauuagauaacagugua

SEQ ID NO: 3272931 - RNA, 13 nt, Vaccinia virus
gauaauaaacaaa

SEQ ID NO: 3272932 - RNA, 20 nt, Vaccinia virus
auaguauacgcagaaaagau

SEQ ID NO: 3272933 - RNA, 20 nt, Vaccinia virus
uacagauacagauguuacaa

SEQ ID NO: 3272934 - RNA, 23 nt, Vaccinia virus
cuuaacgaaagaaguuguaucau

SEQ ID NO: 3272935 - RNA, 19 nt, Vaccinia virus
uaauaucauagcaucuauu

SEQ ID NO: 3272936 - RNA, 16 nt, Vaccinia virus
cgauaauuauaaggcu

SEQ ID NO: 3272937 - RNA, 13 nt, Vaccinia virus
aacucuaucaugg

SEQ ID NO: 3272938 - RNA, 13 nt, Vaccinia virus
gauucacaaauau

SEQ ID NO: 3272939 - RNA, 15 nt, Vaccinia virus
augagaucuguauag

SEQ ID NO: 3272940 - RNA, 23 nt, Vaccinia virus
gaauggaaaccuuuaaucuauau

SEQ ID NO: 3272941 - RNA, 13 nt, Vaccinia virus
auauaucaaacau

SEQ ID NO: 3272942 - RNA, 21 nt, Vaccinia virus
cuguuuaaacgaggacuauaa

SEQ ID NO: 3272943 - RNA, 13 nt, Vaccinia virus
ucugaaauaauca

SEQ ID NO: 3272944 - RNA, 17 nt, Vaccinia virus
uuguauagaaacuguau

SEQ ID NO: 3272945 - RNA, 16 nt, Vaccinia virus
gcagguacuauaauau

SEQ ID NO: 3272946 - RNA, 20 nt, Vaccinia virus
auaaacauuuguguuuguau

SEQ ID NO: 3272947 - RNA, 13 nt, Vaccinia virus
auaaugauagaca

SEQ ID NO: 3272948 - RNA, 22 nt, Vaccinia virus
accaauaugucuguacaaaugu

SEQ ID NO: 3272949 - RNA, 18 nt, Vaccinia virus
aucugguagcaaagaaau

SEQ ID NO: 3272950 - RNA, 17 nt, Vaccinia virus
ugauaacuucaggaaau

SEQ ID NO: 3272951 - RNA, 14 nt, Vaccinia virus
acaauaacuucacu

SEQ ID NO: 3272952 - RNA, 15 nt, Vaccinia virus
uacccaccuguaaua

SEQ ID NO: 3272953 - RNA, 13 nt, Vaccinia virus
cguuucuauuuuc

SEQ ID NO: 3272954 - RNA, 21 nt, Vaccinia virus
aaauugucugaugaagaauua

SEQ ID NO: 3272955 - RNA, 13 nt, Vaccinia virus
uucaauauugaaa

SEQ ID NO: 3272956 - RNA, 23 nt, Vaccinia virus
aaaccuuugacuaguuguagaau

SEQ ID NO: 3272957 - RNA, 18 nt, Vaccinia virus
aauugucuacuaacauua

SEQ ID NO: 3272958 - RNA, 15 nt, Vaccinia virus
uggauggaaacauug

SEQ ID NO: 3272959 - RNA, 22 nt, Vaccinia virus
uggaagacagcgugaauaaugu

SEQ ID NO: 3272960 - RNA, 21 nt, Vaccinia virus
cauaaucaucacugucaucag

SEQ ID NO: 3272961 - RNA, 16 nt, Vaccinia virus
ucauuugcguacccaa

SEQ ID NO: 3272962 - RNA, 18 nt, Vaccinia virus
uaguaaccguuuuccauu

SEQ ID NO: 3272963 - RNA, 13 nt, Vaccinia virus
agagagaaauacu

SEQ ID NO: 3272964 - RNA, 18 nt, Vaccinia virus
aggguaucuaauuuccug

SEQ ID NO: 3272965 - RNA, 22 nt, Vaccinia virus
aaacaauuucacaaauggaugu

SEQ ID NO: 3272966 - RNA, 14 nt, Vaccinia virus
auccagaguguuuc

SEQ ID NO: 3272967 - RNA, 13 nt, Vaccinia virus
agauaaguuuaag

SEQ ID NO: 3272968 - RNA, 15 nt, Vaccinia virus
aaauaauuauuagaa

SEQ ID NO: 3272969 - RNA, 22 nt, Vaccinia virus
auuuucggguuuaaauucuuua

SEQ ID NO: 3272970 - RNA, 13 nt, Vaccinia virus
uuauagaauguau

SEQ ID NO: 3272971 - RNA, 23 nt, Vaccinia virus
cuaaaauuccuaacgaugauaug

SEQ ID NO: 3272972 - RNA, 12 nt, Vaccinia virus
guaucuacuaga

SEQ ID NO: 3272973 - RNA, 12 nt, Vaccinia virus
auuaacugucuu

SEQ ID NO: 3272974 - RNA, 19 nt, Vaccinia virus
auaacacaaccaaauacuu

SEQ ID NO: 3272975 - RNA, 19 nt, Vaccinia virus
gauauauuuuugauaauau

SEQ ID NO: 3272976 - RNA, 15 nt, Vaccinia virus
cgaauccuguuucua

SEQ ID NO: 3272977 - RNA, 17 nt, Vaccinia virus
cgucuauauaguauuuu

SEQ ID NO: 3272978 - RNA, 16 nt, Vaccinia virus
ucguugacaucuugaa

SEQ ID NO: 3272979 - RNA, 20 nt, Vaccinia virus
aacuaaccaacuaacuauau

SEQ ID NO: 3272980 - RNA, 23 nt, Vaccinia virus
accuucuauagaucugagaaugg

SEQ ID NO: 3272981 - RNA, 21 nt, Vaccinia virus
aagacguuguacaauaugaac

SEQ ID NO: 3272982 - RNA, 22 nt, Vaccinia virus
ugucuggaccaucguuugucau

SEQ ID NO: 3272983 - RNA, 23 nt, Vaccinia virus
guaagaacucucuucauuacuau

SEQ ID NO: 3272984 - RNA, 13 nt, Vaccinia virus
gaaucguauauau

SEQ ID NO: 3272985 - RNA, 18 nt, Vaccinia virus
uauucauagauugacuuu

SEQ ID NO: 3272986 - RNA, 15 nt, Vaccinia virus
cauuaguaacagcuu

SEQ ID NO: 3272987 - RNA, 23 nt, Vaccinia virus
uuauaugucucgcauaaacauua

SEQ ID NO: 3272988 - RNA, 22 nt, Vaccinia virus
accaauaucgauuacuaugaau

SEQ ID NO: 3272989 - RNA, 19 nt, Vaccinia virus
augaacauaguaagaaauu

SEQ ID NO: 3272990 - RNA, 17 nt, Vaccinia virus
ccuggaguauggaauac

SEQ ID NO: 3272991 - RNA, 17 nt, Vaccinia virus
uuuuacaauuucaucca

SEQ ID NO: 3272992 - RNA, 13 nt, Vaccinia virus
aagaccaauaaua

SEQ ID NO: 3272993 - RNA, 19 nt, Vaccinia virus
agaaacuugcaaaaaagac

SEQ ID NO: 3272994 - RNA, 18 nt, Vaccinia virus
acaugucaucgaaauggu

SEQ ID NO: 3272995 - RNA, 14 nt, Vaccinia virus
cuauaguuaauuga

SEQ ID NO: 3272996 - RNA, 18 nt, Vaccinia virus
cuuugaaguuuuuaagag

SEQ ID NO: 3272997 - RNA, 18 nt, Vaccinia virus
uauaauuauauguagaag

SEQ ID NO: 3272998 - RNA, 17 nt, Vaccinia virus
ggguuaaauuugaacaa

SEQ ID NO: 3272999 - RNA, 23 nt, Vaccinia virus
gaaacauauucuaugaauuuaua

SEQ ID NO: 3273000 - RNA, 15 nt, Vaccinia virus
agagcuauucuugga

SEQ ID NO: 3273001 - RNA, 22 nt, Vaccinia virus
gcaaacuuacagaaacaaugau

SEQ ID NO: 3273002 - RNA, 15 nt, Vaccinia virus
uuccaacucugucuu

SEQ ID NO: 3273003 - RNA, 18 nt, Vaccinia virus
auguuuccgagaaauaua

SEQ ID NO: 3273004 - RNA, 13 nt, Vaccinia virus
augauuuauaaug

SEQ ID NO: 3273005 - RNA, 14 nt, Vaccinia virus
auguuacaaaugua

SEQ ID NO: 3273006 - RNA, 14 nt, Vaccinia virus
aaugacauggaaau

SEQ ID NO: 3273007 - RNA, 15 nt, Vaccinia virus
caagauaagcaaacg

SEQ ID NO: 3273008 - RNA, 16 nt, Vaccinia virus
cuaccaguuauucucg

SEQ ID NO: 3273009 - RNA, 19 nt, Vaccinia virus
caagugacaacaaaaaaug

SEQ ID NO: 3273010 - RNA, 19 nt, Vaccinia virus
guuuuauuuuaucuuuuac

SEQ ID NO: 3273011 - RNA, 21 nt, Vaccinia virus
uucuacuaugcacauuauucu

SEQ ID NO: 3273012 - RNA, 14 nt, Vaccinia virus
auccaaucauauau

SEQ ID NO: 3273013 - RNA, 21 nt, Vaccinia virus
auuacauuuuuuauaaauaga

SEQ ID NO: 3273014 - RNA, 22 nt, Vaccinia virus
uccgaaauuagaaauucccaag

SEQ ID NO: 3273015 - RNA, 23 nt, Vaccinia virus
uuaaaauaguuuauaacauuaau

SEQ ID NO: 3273016 - RNA, 17 nt, Vaccinia virus
cuuuagaaauuguauuc

SEQ ID NO: 3273017 - RNA, 15 nt, Vaccinia virus
guuucucaucuuuua

SEQ ID NO: 3273018 - RNA, 14 nt, Vaccinia virus
guguauauaagacc

SEQ ID NO: 3273019 - RNA, 22 nt, Vaccinia virus
cuuauugaguggaaaguucaaa

SEQ ID NO: 3273020 - RNA, 13 nt, Vaccinia virus
uauggaagaaagu

SEQ ID NO: 3273021 - RNA, 16 nt, Vaccinia virus
guauuugaaaauggaa

SEQ ID NO: 3273022 - RNA, 12 nt, Vaccinia virus
uucaacaucuuu

SEQ ID NO: 3273023 - RNA, 11 nt, Vaccinia virus
ccguguuuaug

SEQ ID NO: 3273024 - RNA, 22 nt, Vaccinia virus
caaagauucuuccuccaaacag

SEQ ID NO: 3273025 - RNA, 14 nt, Vaccinia virus
aagaucaaggaaau

SEQ ID NO: 3273026 - RNA, 23 nt, Vaccinia virus
auaaauaaugaucguaaugaaca

SEQ ID NO: 3273027 - RNA, 17 nt, Vaccinia virus
gaauauggggaaaauau

SEQ ID NO: 3273028 - RNA, 21 nt, Vaccinia virus
auguuuuuagauuuuagcaua

SEQ ID NO: 3273029 - RNA, 19 nt, Vaccinia virus
agguuuauauauucaauau

SEQ ID NO: 3273030 - RNA, 17 nt, Vaccinia virus
uaaguaugaugucuaug

SEQ ID NO: 3273031 - RNA, 20 nt, Vaccinia virus
aagugugguguuuggucgau

SEQ ID NO: 3273032 - RNA, 21 nt, Vaccinia virus
aucuaccauaguuacagaauu

SEQ ID NO: 3273033 - RNA, 15 nt, Vaccinia virus
aaggaucuguacacg

SEQ ID NO: 3273034 - RNA, 14 nt, Vaccinia virus
cgugaauguauguu

SEQ ID NO: 3273035 - RNA, 15 nt, Vaccinia virus
cuguuuauuaaugau

SEQ ID NO: 3273036 - RNA, 13 nt, Vaccinia virus
agugaaacuaucu

SEQ ID NO: 3273037 - RNA, 16 nt, Vaccinia virus
aaguaaguauguugaa

SEQ ID NO: 3273038 - RNA, 18 nt, Vaccinia virus
cuaaucucuuaacaaaaa

SEQ ID NO: 3273039 - RNA, 15 nt, Vaccinia virus
ucugucauauuuaga

SEQ ID NO: 3273040 - RNA, 16 nt, Vaccinia virus
cauaguuuguaucaau

SEQ ID NO: 3273041 - RNA, 24 nt, Vaccinia virus
auccaaauuuuuuuuacaaacauc

SEQ ID NO: 3273042 - RNA, 12 nt, Vaccinia virus
aauuauauuguc

SEQ ID NO: 3273043 - RNA, 21 nt, Vaccinia virus
uaauagcuccccuguuuucau

SEQ ID NO: 3273044 - RNA, 17 nt, Vaccinia virus
uuaagagaauaauagau

SEQ ID NO: 3273045 - RNA, 16 nt, Vaccinia virus
uaccucuucugauauc

SEQ ID NO: 3273046 - RNA, 12 nt, Vaccinia virus
ucuguuuucacc

SEQ ID NO: 3273047 - RNA, 14 nt, Vaccinia virus
ucucaaguuacauu

SEQ ID NO: 3273048 - RNA, 15 nt, Vaccinia virus
ucaaacucgauauau

SEQ ID NO: 3273049 - RNA, 17 nt, Vaccinia virus
uaacaaccucuuuaaua

SEQ ID NO: 3273050 - RNA, 12 nt, Vaccinia virus
uuauaguuuuua

SEQ ID NO: 3273051 - RNA, 23 nt, Vaccinia virus
gaacaccacuuacguuaauacua

SEQ ID NO: 3273052 - RNA, 20 nt, Vaccinia virus
cuucauucguaaaucuuuuc

SEQ ID NO: 3273053 - RNA, 17 nt, Vaccinia virus
auagaggaagacacauu

SEQ ID NO: 3273054 - RNA, 18 nt, Vaccinia virus
ugggacuauauaauuuug

SEQ ID NO: 3273055 - RNA, 20 nt, Vaccinia virus
gauguauuagcaucuuauua

SEQ ID NO: 3273056 - RNA, 14 nt, Vaccinia virus
aguacuuguaugug

SEQ ID NO: 3273057 - RNA, 17 nt, Vaccinia virus
uucuauacguuucuauu

SEQ ID NO: 3273058 - RNA, 20 nt, Vaccinia virus
uuuuauauguguuugaucua

SEQ ID NO: 3273059 - RNA, 18 nt, Vaccinia virus
agauaguuuuaguuucca

SEQ ID NO: 3273060 - RNA, 23 nt, Vaccinia virus
uaaugacaucuaugauuuuacug

SEQ ID NO: 3273061 - RNA, 14 nt, Vaccinia virus
uaauacacacaaag

SEQ ID NO: 3273062 - RNA, 15 nt, Vaccinia virus
caaagagaaaacaaa

SEQ ID NO: 3273063 - RNA, 16 nt, Vaccinia virus
auuuaauuacauccuu

SEQ ID NO: 3273064 - RNA, 17 nt, Vaccinia virus
auaaauuauaaaaaaag

SEQ ID NO: 3273065 - RNA, 18 nt, Vaccinia virus
ggacgauauauuguuuca

SEQ ID NO: 3273066 - RNA, 15 nt, Vaccinia virus
ccauaagcaaacuga

SEQ ID NO: 3273067 - RNA, 23 nt, Vaccinia virus
ugacuuaacuuguaauaauugcu

SEQ ID NO: 3273068 - RNA, 19 nt, Vaccinia virus
guuuaccacaauguauaau

SEQ ID NO: 3273069 - RNA, 15 nt, Vaccinia virus
uucaaaaauuuagaa

SEQ ID NO: 3273070 - RNA, 17 nt, Vaccinia virus
accaggguuuauuucau

SEQ ID NO: 3273071 - RNA, 12 nt, Vaccinia virus
agaugucauuau

SEQ ID NO: 3273072 - RNA, 19 nt, Vaccinia virus
gugcacuuuuuuauaaaga

SEQ ID NO: 3273073 - RNA, 14 nt, Vaccinia virus
caaugaaugauaug

SEQ ID NO: 3273074 - RNA, 15 nt, Vaccinia virus
auauagaucaaucau

SEQ ID NO: 3273075 - RNA, 13 nt, Vaccinia virus
uauaaaaauacuu

SEQ ID NO: 3273076 - RNA, 22 nt, Vaccinia virus
caagagugauuuaagaacaucc

SEQ ID NO: 3273077 - RNA, 13 nt, Vaccinia virus
augaacaaauccu

SEQ ID NO: 3273078 - RNA, 21 nt, Vaccinia virus
gauauaauucguggauaauca

SEQ ID NO: 3273079 - RNA, 22 nt, Vaccinia virus
caguuauguuuaacuuugaaau

SEQ ID NO: 3273080 - RNA, 22 nt, Vaccinia virus
acagaauguagauaaucauuua

SEQ ID NO: 3273081 - RNA, 21 nt, Vaccinia virus
aacugcauccuucuaagauua

SEQ ID NO: 3273082 - RNA, 15 nt, Vaccinia virus
uuccaguauuuucca

SEQ ID NO: 3273083 - RNA, 21 nt, Vaccinia virus
aauaugguauggguucugaua

SEQ ID NO: 3273084 - RNA, 14 nt, Vaccinia virus
auuacacauuucca

SEQ ID NO: 3273085 - RNA, 17 nt, Vaccinia virus
agagaagggaauuauug

SEQ ID NO: 3273086 - RNA, 16 nt, Vaccinia virus
uuuauggaauaguuuu

SEQ ID NO: 3273087 - RNA, 19 nt, Vaccinia virus
agucagaggaacauuaaac

SEQ ID NO: 3273088 - RNA, 14 nt, Vaccinia virus
auuguuuagaauac

SEQ ID NO: 3273089 - RNA, 20 nt, Vaccinia virus
guguagaugcuacuucaucu

SEQ ID NO: 3273090 - RNA, 15 nt, Vaccinia virus
aacuuaaaagaauua

SEQ ID NO: 3273091 - RNA, 14 nt, Vaccinia virus
ucauaaguguauau

SEQ ID NO: 3273092 - RNA, 14 nt, Vaccinia virus
gucauguuggaaca

SEQ ID NO: 3273093 - RNA, 18 nt, Vaccinia virus
cggcuaucgacuuaauau

SEQ ID NO: 3273094 - RNA, 18 nt, Vaccinia virus
aaagauaauacauuuucu

SEQ ID NO: 3273095 - RNA, 19 nt, Vaccinia virus
uauuuuuccauucuguuuu

SEQ ID NO: 3273096 - RNA, 19 nt, Vaccinia virus
uacauccgauuaucaagau

SEQ ID NO: 3273097 - RNA, 18 nt, Vaccinia virus
ucucuauuucuuaaugaa

SEQ ID NO: 3273098 - RNA, 14 nt, Vaccinia virus
auguaguucguaaa

SEQ ID NO: 3273099 - RNA, 21 nt, Vaccinia virus
gaaauauaugagauguaguua

SEQ ID NO: 3273100 - RNA, 17 nt, Vaccinia virus
gaucauuuugauauugu

SEQ ID NO: 3273101 - RNA, 18 nt, Vaccinia virus
auaguuauuacuuuucuc

SEQ ID NO: 3273102 - RNA, 18 nt, Vaccinia virus
cauaaaacuaauauuuua

SEQ ID NO: 3273103 - RNA, 20 nt, Vaccinia virus
acaaucucagauaugggaaa

SEQ ID NO: 3273104 - RNA, 22 nt, Vaccinia virus
aucucuaacgagugaucaaauc

SEQ ID NO: 3273105 - RNA, 22 nt, Vaccinia virus
cuguaauaaaggugguaguauu

SEQ ID NO: 3273106 - RNA, 13 nt, Vaccinia virus
guguuuaaucuuc

SEQ ID NO: 3273107 - RNA, 14 nt, Vaccinia virus
agccuagaaaucaa

SEQ ID NO: 3273108 - RNA, 15 nt, Vaccinia virus
aguucuuuuagaaaa

SEQ ID NO: 3273109 - RNA, 19 nt, Vaccinia virus
auuuguuuuacucuauaaa

SEQ ID NO: 3273110 - RNA, 18 nt, Vaccinia virus
aucaggauauaaagaaaa

SEQ ID NO: 3273111 - RNA, 17 nt, Vaccinia virus
cgaagaacuaauaaacu

SEQ ID NO: 3273112 - RNA, 21 nt, Vaccinia virus
cacaacaucguuuuugauauu

SEQ ID NO: 3273113 - RNA, 18 nt, Vaccinia virus
gaaaugccugauaaagau

SEQ ID NO: 3273114 - RNA, 21 nt, Vaccinia virus
uaacgcaccuauaaagacuuu

SEQ ID NO: 3273115 - RNA, 17 nt, Vaccinia virus
aacaucaaaaaauuaua

SEQ ID NO: 3273116 - RNA, 12 nt, Vaccinia virus
auaucuuaacuu

SEQ ID NO: 3273117 - RNA, 15 nt, Vaccinia virus
uccgguugaugauga

SEQ ID NO: 3273118 - RNA, 23 nt, Vaccinia virus
agcuccuaauggagauuuucuau

SEQ ID NO: 3273119 - RNA, 18 nt, Vaccinia virus
acauuuuuuauaaauaga

SEQ ID NO: 3273120 - RNA, 20 nt, Vaccinia virus
uuaacagaguagauauuaau

SEQ ID NO: 3273121 - RNA, 14 nt, Vaccinia virus
gccugaaguuuauu

SEQ ID NO: 3273122 - RNA, 13 nt, Vaccinia virus
uguaagauacuug

SEQ ID NO: 3273123 - RNA, 21 nt, Vaccinia virus
cuuucaggguaucacaaaaau

SEQ ID NO: 3273124 - RNA, 12 nt, Vaccinia virus
aagaauaaagua

SEQ ID NO: 3273125 - RNA, 17 nt, Vaccinia virus
gaaacauggggauugaa

SEQ ID NO: 3273126 - RNA, 14 nt, Vaccinia virus
uauucauaauaaga

SEQ ID NO: 3273127 - RNA, 22 nt, Vaccinia virus
acaaugcuaauauauucuuaca

SEQ ID NO: 3273128 - RNA, 13 nt, Vaccinia virus
acuaaacacauua

SEQ ID NO: 3273129 - RNA, 18 nt, Vaccinia virus
gauaacuagauagaaaga

SEQ ID NO: 3273130 - RNA, 21 nt, Vaccinia virus
agaauauacucaauagaauuu

SEQ ID NO: 3273131 - RNA, 22 nt, Vaccinia virus
acgauuacaucaccucuaacau

SEQ ID NO: 3273132 - RNA, 22 nt, Vaccinia virus
aauauagcaucgauccaugaga

SEQ ID NO: 3273133 - RNA, 14 nt, Vaccinia virus
uauaaguagauguu

SEQ ID NO: 3273134 - RNA, 18 nt, Vaccinia virus
aggauguaauuaaauguu

SEQ ID NO: 3273135 - RNA, 22 nt, Vaccinia virus
aagaagugucuauaaauguaga

SEQ ID NO: 3273136 - RNA, 20 nt, Vaccinia virus
auacaaugcucaguaaaugu

SEQ ID NO: 3273137 - RNA, 16 nt, Vaccinia virus
gcauucuuggaugaau

SEQ ID NO: 3273138 - RNA, 17 nt, Vaccinia virus
uuagaaaauucucuuac

SEQ ID NO: 3273139 - RNA, 13 nt, Vaccinia virus
agauauacgcuau

SEQ ID NO: 3273140 - RNA, 21 nt, Vaccinia virus
gcuacaggucuaccuuuacaa

SEQ ID NO: 3273141 - RNA, 23 nt, Vaccinia virus
aucaguuuuguauuccaaauuaa

SEQ ID NO: 3273142 - RNA, 23 nt, Vaccinia virus
gaauagccgauauagauauuaaa

SEQ ID NO: 3273143 - RNA, 15 nt, Vaccinia virus
ggaaucuguauucuc

SEQ ID NO: 3273144 - RNA, 23 nt, Vaccinia virus
acgugucaacggcaguauuggga

SEQ ID NO: 3273145 - RNA, 19 nt, Vaccinia virus
uugaaacuaggauacauaa

SEQ ID NO: 3273146 - RNA, 16 nt, Vaccinia virus
auaauguuaccguguu

SEQ ID NO: 3273147 - RNA, 15 nt, Vaccinia virus
augaauacuaaugcc

SEQ ID NO: 3273148 - RNA, 20 nt, Vaccinia virus
uaaacugcgccaaauugugg

SEQ ID NO: 3273149 - RNA, 22 nt, Vaccinia virus
augauaauuuacacaguaacca

SEQ ID NO: 3273150 - RNA, 17 nt, Vaccinia virus
aaguuuuaaaaauacuu

SEQ ID NO: 3273151 - RNA, 17 nt, Vaccinia virus
cauacgaugaaaauggu

SEQ ID NO: 3273152 - RNA, 12 nt, Vaccinia virus
uuuauuauucuu

SEQ ID NO: 3273153 - RNA, 17 nt, Vaccinia virus
auuaucgacuaugaauc

SEQ ID NO: 3273154 - RNA, 21 nt, Vaccinia virus
auauuccgguuugcaaaacaa

SEQ ID NO: 3273155 - RNA, 19 nt, Vaccinia virus
accaauuacugauaaugua

SEQ ID NO: 3273156 - RNA, 17 nt, Vaccinia virus
gagaaaccgaugauuau

SEQ ID NO: 3273157 - RNA, 13 nt, Vaccinia virus
uagauaaacuauc

SEQ ID NO: 3273158 - RNA, 19 nt, Vaccinia virus
gugaaaauuacauacuuaa

SEQ ID NO: 3273159 - RNA, 17 nt, Vaccinia virus
uggucgauuauagaaau

SEQ ID NO: 3273160 - RNA, 14 nt, Vaccinia virus
augaagaaagaaaa

SEQ ID NO: 3273161 - RNA, 19 nt, Vaccinia virus
uacauauuuuagaacagaa

SEQ ID NO: 3273162 - RNA, 23 nt, Vaccinia virus
caauaguaguguaguuaauguaa

SEQ ID NO: 3273163 - RNA, 16 nt, Vaccinia virus
caguuagcuacucuag

SEQ ID NO: 3273164 - RNA, 17 nt, Vaccinia virus
auucucaaacuccuaau

SEQ ID NO: 3273165 - RNA, 15 nt, Vaccinia virus
gucuaucaauaacug

SEQ ID NO: 3273166 - RNA, 12 nt, Vaccinia virus
uuugaaacugaa

SEQ ID NO: 3273167 - RNA, 19 nt, Vaccinia virus
cagagaggccaucuggaag

SEQ ID NO: 3273168 - RNA, 22 nt, Vaccinia virus
uaagaaaguaauucagacacuu

SEQ ID NO: 3273169 - RNA, 18 nt, Vaccinia virus
acuaugcgauuauuuuca

SEQ ID NO: 3273170 - RNA, 20 nt, Vaccinia virus
caugaauccauucuaaugau

SEQ ID NO: 3273171 - RNA, 20 nt, Vaccinia virus
accaucggaugauauuaaug

SEQ ID NO: 3273172 - RNA, 16 nt, Vaccinia virus
ccauuaaaaauuguua

SEQ ID NO: 3273173 - RNA, 14 nt, Vaccinia virus
uaggaauaugugcu

SEQ ID NO: 3273174 - RNA, 18 nt, Vaccinia virus
acgaagaauggaaauaua

SEQ ID NO: 3273175 - RNA, 13 nt, Vaccinia virus
auauucuaugaug

SEQ ID NO: 3273176 - RNA, 22 nt, Vaccinia virus
gauauauuguuucauaauugcu

SEQ ID NO: 3273177 - RNA, 19 nt, Vaccinia virus
gaauauuucgauaaugaac

SEQ ID NO: 3273178 - RNA, 21 nt, Vaccinia virus
uacgcuauuaaucuuuaaaau

SEQ ID NO: 3273179 - RNA, 17 nt, Vaccinia virus
aaaacucuaagaacuua

SEQ ID NO: 3273180 - RNA, 17 nt, Vaccinia virus
uuaugauagaaauuagc

SEQ ID NO: 3273181 - RNA, 18 nt, Vaccinia virus
uauaaauagauguuagua

SEQ ID NO: 3273182 - RNA, 20 nt, Vaccinia virus
uucuuggauauagaauccaa

SEQ ID NO: 3273183 - RNA, 24 nt, Vaccinia virus
guguuaaaugguucgauauaaagg

SEQ ID NO: 3273184 - RNA, 16 nt, Vaccinia virus
auguauagaacaacga

SEQ ID NO: 3273185 - RNA, 19 nt, Vaccinia virus
uucuagaacuaacaaacua

SEQ ID NO: 3273186 - RNA, 14 nt, Vaccinia virus
uauauccaauguau

SEQ ID NO: 3273187 - RNA, 19 nt, Vaccinia virus
auacacguauaaaaaauau

SEQ ID NO: 3273188 - RNA, 19 nt, Vaccinia virus
aaguuuggcagcuagcaga

SEQ ID NO: 3273189 - RNA, 15 nt, Vaccinia virus
guucaaaaauuuaga

SEQ ID NO: 3273190 - RNA, 17 nt, Vaccinia virus
aaaucuaacagauacaa

SEQ ID NO: 3273191 - RNA, 20 nt, Vaccinia virus
agaacaaaaucuaacagaua

SEQ ID NO: 3273192 - RNA, 15 nt, Vaccinia virus
agaucgaaaaaagag

SEQ ID NO: 3273193 - RNA, 23 nt, Vaccinia virus
uuuuacauggauuuaucauauca

SEQ ID NO: 3273194 - RNA, 16 nt, Vaccinia virus
uauguaagacuugugg

SEQ ID NO: 3273195 - RNA, 23 nt, Vaccinia virus
uauuaacgcguuuuaugaaugau

SEQ ID NO: 3273196 - RNA, 24 nt, Vaccinia virus
uauauaaaguuggaauuugacuau

SEQ ID NO: 3273197 - RNA, 20 nt, Vaccinia virus
ugacuaguuguagaauuuga

SEQ ID NO: 3273198 - RNA, 15 nt, Vaccinia virus
uauguguuuacagua

SEQ ID NO: 3273199 - RNA, 17 nt, Vaccinia virus
auacuaagcaaguacau

SEQ ID NO: 3273200 - RNA, 22 nt, Vaccinia virus
aaaugucguggacacaacuauu

SEQ ID NO: 3273201 - RNA, 22 nt, Vaccinia virus
uggaaauaucugugaauacuuu

SEQ ID NO: 3273202 - RNA, 14 nt, Vaccinia virus
uuugguucuucucu

SEQ ID NO: 3273203 - RNA, 16 nt, Vaccinia virus
aaaacugaaaauauau

SEQ ID NO: 3273204 - RNA, 22 nt, Vaccinia virus
aucuguggaaaauaauacucug

SEQ ID NO: 3273205 - RNA, 18 nt, Vaccinia virus
gaauauuucgauaaugaa

SEQ ID NO: 3273206 - RNA, 14 nt, Vaccinia virus
gaauagacuuucug

SEQ ID NO: 3273207 - RNA, 14 nt, Vaccinia virus
uaacaaaauuaaag

SEQ ID NO: 3273208 - RNA, 18 nt, Vaccinia virus
acucuuggaauuaauagu

SEQ ID NO: 3273209 - RNA, 19 nt, Vaccinia virus
aguaauuauaagaaauaua

SEQ ID NO: 3273210 - RNA, 19 nt, Vaccinia virus
ucaaacggcgcagacguau

SEQ ID NO: 3273211 - RNA, 18 nt, Vaccinia virus
ugaaacuuggaaacaucu

SEQ ID NO: 3273212 - RNA, 19 nt, Vaccinia virus
auaagaacgggucauuuau

SEQ ID NO: 3273213 - RNA, 15 nt, Vaccinia virus
acaauguauacaaau

SEQ ID NO: 3273214 - RNA, 20 nt, Vaccinia virus
aauauagcaucgauccauga

SEQ ID NO: 3273215 - RNA, 14 nt, Vaccinia virus
uggaacauaagaua

SEQ ID NO: 3273216 - RNA, 20 nt, Vaccinia virus
uuucagcguggauuucucau

SEQ ID NO: 3273217 - RNA, 16 nt, Vaccinia virus
auauugauguuaauaa

SEQ ID NO: 3273218 - RNA, 11 nt, Vaccinia virus
augaguauuuu

SEQ ID NO: 3273219 - RNA, 14 nt, Vaccinia virus
uuggcaaauuauuu

SEQ ID NO: 3273220 - RNA, 15 nt, Vaccinia virus
cuaauacuaaauaca

SEQ ID NO: 3273221 - RNA, 23 nt, Vaccinia virus
uaccuaucaaggaacaaauauug

SEQ ID NO: 3273222 - RNA, 13 nt, Vaccinia virus
uagauguggaugu

SEQ ID NO: 3273223 - RNA, 13 nt, Vaccinia virus
agaaagauuaaau

SEQ ID NO: 3273224 - RNA, 13 nt, Vaccinia virus
gcgauugauuuug

SEQ ID NO: 3273225 - RNA, 14 nt, Vaccinia virus
cugauuaacaaaug

SEQ ID NO: 3273226 - RNA, 12 nt, Vaccinia virus
ugaauauacuuu

SEQ ID NO: 3273227 - RNA, 12 nt, Vaccinia virus
acaguuuuacua

SEQ ID NO: 3273228 - RNA, 16 nt, Vaccinia virus
ucuguguuacauaucu

SEQ ID NO: 3273229 - RNA, 18 nt, Vaccinia virus
auaaauuaucaaauacuu

SEQ ID NO: 3273230 - RNA, 19 nt, Vaccinia virus
uggacauaaagauagauau

SEQ ID NO: 3273231 - RNA, 13 nt, Vaccinia virus
guuuggaauaacu

SEQ ID NO: 3273232 - RNA, 20 nt, Vaccinia virus
uuuuauauccaauguauuua

SEQ ID NO: 3273233 - RNA, 15 nt, Vaccinia virus
cuaaaaaaaaugacu

SEQ ID NO: 3273234 - RNA, 23 nt, Vaccinia virus
cucccggagauguuucauaauag

SEQ ID NO: 3273235 - RNA, 20 nt, Vaccinia virus
augugaacagauaaaaggua

SEQ ID NO: 3273236 - RNA, 14 nt, Vaccinia virus
agauuaaaaauggu

SEQ ID NO: 3273237 - RNA, 22 nt, Vaccinia virus
uguuauguauuucauuguucau

SEQ ID NO: 3273238 - RNA, 14 nt, Vaccinia virus
ucaaauguaguguu

SEQ ID NO: 3273239 - RNA, 15 nt, Vaccinia virus
uaaguucauaaucau

SEQ ID NO: 3273240 - RNA, 23 nt, Vaccinia virus
ugcaaaaaacgccaauacauguu

SEQ ID NO: 3273241 - RNA, 19 nt, Vaccinia virus
aagacgguaacuaaauguu

SEQ ID NO: 3273242 - RNA, 12 nt, Vaccinia virus
aacauaaugccg

SEQ ID NO: 3273243 - RNA, 12 nt, Vaccinia virus
acauucaucaau

SEQ ID NO: 3273244 - RNA, 15 nt, Vaccinia virus
guccgaauguauggc

SEQ ID NO: 3273245 - RNA, 15 nt, Vaccinia virus
caucauuccauaauu

SEQ ID NO: 3273246 - RNA, 23 nt, Vaccinia virus
aauuaaggagauagcuucaucua

SEQ ID NO: 3273247 - RNA, 23 nt, Vaccinia virus
uucccaaugguuucaucaauaga

SEQ ID NO: 3273248 - RNA, 16 nt, Vaccinia virus
acuuuuaauuaacaaa

SEQ ID NO: 3273249 - RNA, 19 nt, Vaccinia virus
auaucuauuuuuuugucau

SEQ ID NO: 3273250 - RNA, 17 nt, Vaccinia virus
uguucguccgucaugau

SEQ ID NO: 3273251 - RNA, 14 nt, Vaccinia virus
aauuguacuuugua

SEQ ID NO: 3273252 - RNA, 14 nt, Vaccinia virus
aaacauucauguac

SEQ ID NO: 3273253 - RNA, 21 nt, Vaccinia virus
cggaucuucuuaauucaucuu

SEQ ID NO: 3273254 - RNA, 15 nt, Vaccinia virus
acaaaagcaauuauu

SEQ ID NO: 3273255 - RNA, 23 nt, Vaccinia virus
aaugccuuacucgguguauauaa

SEQ ID NO: 3273256 - RNA, 22 nt, Vaccinia virus
cgggaagauuagucagaccauu

SEQ ID NO: 3273257 - RNA, 19 nt, Vaccinia virus
aacugaggaugauugauua

SEQ ID NO: 3273258 - RNA, 15 nt, Vaccinia virus
ugaaauauaguaaua

SEQ ID NO: 3273259 - RNA, 15 nt, Vaccinia virus
uaucauuuaaacauu

SEQ ID NO: 3273260 - RNA, 19 nt, Vaccinia virus
uaguuacgauuuuaucauc

SEQ ID NO: 3273261 - RNA, 17 nt, Vaccinia virus
augaaacgaacacuauu

SEQ ID NO: 3273262 - RNA, 19 nt, Vaccinia virus
auccguuaaaauaauuaau

SEQ ID NO: 3273263 - RNA, 17 nt, Vaccinia virus
aaaaggucauaacaagu

SEQ ID NO: 3273264 - RNA, 22 nt, Vaccinia virus
agaauauauagguaauacauau

SEQ ID NO: 3273265 - RNA, 14 nt, Vaccinia virus
agaaaucaacuuau

SEQ ID NO: 3273266 - RNA, 14 nt, Vaccinia virus
uuacguuacacuuu

SEQ ID NO: 3273267 - RNA, 23 nt, Vaccinia virus
gucgcagcaugguaguucguaga

SEQ ID NO: 3273268 - RNA, 13 nt, Vaccinia virus
aacgaauuaucgu

SEQ ID NO: 3273269 - RNA, 20 nt, Vaccinia virus
uaucuauuuuaacaaagcau

SEQ ID NO: 3273270 - RNA, 19 nt, Vaccinia virus
uauuaaaacuaucaaugau

SEQ ID NO: 3273271 - RNA, 18 nt, Vaccinia virus
ucuuuaaaauuucauaga

SEQ ID NO: 3273272 - RNA, 13 nt, Vaccinia virus
auaccauguguau

SEQ ID NO: 3273273 - RNA, 20 nt, Vaccinia virus
gacacauaugcgaucagaua

SEQ ID NO: 3273274 - RNA, 17 nt, Vaccinia virus
gaaccagauaguuuaua

SEQ ID NO: 3273275 - RNA, 20 nt, Vaccinia virus
aauuccauaucuuuuagaaa

SEQ ID NO: 3273276 - RNA, 10 nt, Vaccinia virus
ggauuacuua

SEQ ID NO: 3273277 - RNA, 20 nt, Vaccinia virus
cguuuaaaguaaacuucgua

SEQ ID NO: 3273278 - RNA, 16 nt, Vaccinia virus
gaaaauagcagcugau

SEQ ID NO: 3273279 - RNA, 17 nt, Vaccinia virus
cauuuuuuuuaaaaaaa

SEQ ID NO: 3273280 - RNA, 21 nt, Vaccinia virus
aacauuuuuauaaacaugaaa

SEQ ID NO: 3273281 - RNA, 21 nt, Vaccinia virus
gauucgcaaacuauucuaaua

SEQ ID NO: 3273282 - RNA, 24 nt, Vaccinia virus
uauuccaugaauaagugugaugau

SEQ ID NO: 3273283 - RNA, 15 nt, Vaccinia virus
ugauccuuuuccaga

SEQ ID NO: 3273284 - RNA, 13 nt, Vaccinia virus
aacacuuuucuau

SEQ ID NO: 3273285 - RNA, 21 nt, Vaccinia virus
aggaccuuccaacuguggaua

SEQ ID NO: 3273286 - RNA, 20 nt, Vaccinia virus
ugacgcauuuaauagagaua

SEQ ID NO: 3273287 - RNA, 20 nt, Vaccinia virus
auauauuaauacacauaaug

SEQ ID NO: 3273288 - RNA, 21 nt, Vaccinia virus
ucuuuaguuuccgccauuuau

SEQ ID NO: 3273289 - RNA, 23 nt, Vaccinia virus
gccaauugauaguagauaaugag

SEQ ID NO: 3273290 - RNA, 17 nt, Vaccinia virus
auaauccuuauacaucu

SEQ ID NO: 3273291 - RNA, 15 nt, Vaccinia virus
uaugaugcaaagaug

SEQ ID NO: 3273292 - RNA, 22 nt, Vaccinia virus
caauuaacgaucuuuauaauau

SEQ ID NO: 3273293 - RNA, 14 nt, Vaccinia virus
auauucccaaacau

SEQ ID NO: 3273294 - RNA, 13 nt, Vaccinia virus
ugaugaauuauua

SEQ ID NO: 3273295 - RNA, 19 nt, Vaccinia virus
aacucauuuauauauuaaa

SEQ ID NO: 3273296 - RNA, 20 nt, Vaccinia virus
aucacucuucgaaaagaaac

SEQ ID NO: 3273297 - RNA, 16 nt, Vaccinia virus
aacaugcuuuucuaua

SEQ ID NO: 3273298 - RNA, 16 nt, Vaccinia virus
gauggacccauagaga

SEQ ID NO: 3273299 - RNA, 14 nt, Vaccinia virus
acgauauauuguuu

SEQ ID NO: 3273300 - RNA, 16 nt, Vaccinia virus
gauauauaucuuuuca

SEQ ID NO: 3273301 - RNA, 18 nt, Vaccinia virus
auaucuugcaaaauagua

SEQ ID NO: 3273302 - RNA, 14 nt, Vaccinia virus
gucaauuauacguu

SEQ ID NO: 3273303 - RNA, 15 nt, Vaccinia virus
agcucaauauaaaug

SEQ ID NO: 3273304 - RNA, 16 nt, Vaccinia virus
aucugaaaauaaauaa

SEQ ID NO: 3273305 - RNA, 18 nt, Vaccinia virus
aauguuucuuacauauuu

SEQ ID NO: 3273306 - RNA, 16 nt, Vaccinia virus
auuguuaaacauacau

SEQ ID NO: 3273307 - RNA, 15 nt, Vaccinia virus
uggaauaaauuauua

SEQ ID NO: 3273308 - RNA, 22 nt, Vaccinia virus
acaacaauguugccucauacau

SEQ ID NO: 3273309 - RNA, 14 nt, Vaccinia virus
ccuaucauguauuu

SEQ ID NO: 3273310 - RNA, 20 nt, Vaccinia virus
auguuaaauauaaaaaauga

SEQ ID NO: 3273311 - RNA, 17 nt, Vaccinia virus
auuuuuaaacuguuugu

SEQ ID NO: 3273312 - RNA, 23 nt, Vaccinia virus
guaaacauugacggauaaaacaa

SEQ ID NO: 3273313 - RNA, 21 nt, Vaccinia virus
gccauauuccacagauaauau

SEQ ID NO: 3273314 - RNA, 14 nt, Vaccinia virus
uuauucauaauaag

SEQ ID NO: 3273315 - RNA, 22 nt, Vaccinia virus
uaaaauuccuaacgaugauaug

SEQ ID NO: 3273316 - RNA, 14 nt, Vaccinia virus
auaaacacauagaa

SEQ ID NO: 3273317 - RNA, 17 nt, Vaccinia virus
caaguaaagauuucaaa

SEQ ID NO: 3273318 - RNA, 24 nt, Vaccinia virus
cuagucuuugugggcaacugucua

SEQ ID NO: 3273319 - RNA, 14 nt, Vaccinia virus
caugaauuuuuugc

SEQ ID NO: 3273320 - RNA, 20 nt, Vaccinia virus
uaaucaaaauugucuaugau

SEQ ID NO: 3273321 - RNA, 19 nt, Vaccinia virus
aacucacauuucaaauaua

SEQ ID NO: 3273322 - RNA, 23 nt, Vaccinia virus
uggaaugcaaaaccccauaguga

SEQ ID NO: 3273323 - RNA, 15 nt, Vaccinia virus
augcgauuggauaag

SEQ ID NO: 3273324 - RNA, 19 nt, Vaccinia virus
auuacacgcuauuaaucau

SEQ ID NO: 3273325 - RNA, 18 nt, Vaccinia virus
uaaagauagaaaugaauu

SEQ ID NO: 3273326 - RNA, 18 nt, Vaccinia virus
aaacauuuuauuucuaga

SEQ ID NO: 3273327 - RNA, 13 nt, Vaccinia virus
cagauguuguaaa

SEQ ID NO: 3273328 - RNA, 21 nt, Vaccinia virus
uaccgauuuaucaucauacac

SEQ ID NO: 3273329 - RNA, 12 nt, Vaccinia virus
cacucucugcca

SEQ ID NO: 3273330 - RNA, 13 nt, Vaccinia virus
aguauaauguaaa

SEQ ID NO: 3273331 - RNA, 22 nt, Vaccinia virus
aauccuauaccgaguacuguaa

SEQ ID NO: 3273332 - RNA, 18 nt, Vaccinia virus
agagcuauuuugacauac

SEQ ID NO: 3273333 - RNA, 17 nt, Vaccinia virus
auaguuccauuaucuaa

SEQ ID NO: 3273334 - RNA, 15 nt, Vaccinia virus
uugaucauguagaaa

SEQ ID NO: 3273335 - RNA, 16 nt, Vaccinia virus
auuaucaaauggaugc

SEQ ID NO: 3273336 - RNA, 23 nt, Vaccinia virus
acgucuuuucaccacagcacugu

SEQ ID NO: 3273337 - RNA, 23 nt, Vaccinia virus
aaguaugaucaacgaugauacuc

SEQ ID NO: 3273338 - RNA, 18 nt, Vaccinia virus
ugccacugaucaugauug

SEQ ID NO: 3273339 - RNA, 16 nt, Vaccinia virus
cugaaauaauuagaac

SEQ ID NO: 3273340 - RNA, 21 nt, Vaccinia virus
uaauagcaacauaugaagaac

SEQ ID NO: 3273341 - RNA, 18 nt, Vaccinia virus
auaauguaaaaucaugau

SEQ ID NO: 3273342 - RNA, 20 nt, Vaccinia virus
ucuuuguugaacguuucaaa

SEQ ID NO: 3273343 - RNA, 11 nt, Vaccinia virus
agaaugauaug

SEQ ID NO: 3273344 - RNA, 14 nt, Vaccinia virus
uuuccuauauuauu

SEQ ID NO: 3273345 - RNA, 12 nt, Vaccinia virus
uauuaauuaaac

SEQ ID NO: 3273346 - RNA, 15 nt, Vaccinia virus
ucgucuuucugaaug

SEQ ID NO: 3273347 - RNA, 18 nt, Vaccinia virus
auuuaagcagagaauguu

SEQ ID NO: 3273348 - RNA, 14 nt, Vaccinia virus
ugaauauuaaacaa

SEQ ID NO: 3273349 - RNA, 13 nt, Vaccinia virus
accacuucucuau

SEQ ID NO: 3273350 - RNA, 19 nt, Vaccinia virus
aguucaucgcuuucuagaa

SEQ ID NO: 3273351 - RNA, 17 nt, Vaccinia virus
guaagacgauuaaccaa

SEQ ID NO: 3273352 - RNA, 17 nt, Vaccinia virus
gguauacuaguagguaa

SEQ ID NO: 3273353 - RNA, 19 nt, Vaccinia virus
gauccuagaacuagauaua

SEQ ID NO: 3273354 - RNA, 12 nt, Vaccinia virus
aacaaaauacuc

SEQ ID NO: 3273355 - RNA, 11 nt, Vaccinia virus
auuguauauag

SEQ ID NO: 3273356 - RNA, 22 nt, Vaccinia virus
auuaguacaccgcuauguuuaa

SEQ ID NO: 3273357 - RNA, 14 nt, Vaccinia virus
aucgaaugauauau

SEQ ID NO: 3273358 - RNA, 21 nt, Vaccinia virus
aaucuaucuuaucgaaugaua

SEQ ID NO: 3273359 - RNA, 17 nt, Vaccinia virus
uaguauaauuauaugua

SEQ ID NO: 3273360 - RNA, 11 nt, Vaccinia virus
aaacuuuaucc

SEQ ID NO: 3273361 - RNA, 19 nt, Vaccinia virus
acuaauauuuuauuucaaa

SEQ ID NO: 3273362 - RNA, 22 nt, Vaccinia virus
aauauuacuaauugauagaccu

SEQ ID NO: 3273363 - RNA, 16 nt, Vaccinia virus
aaggauauacaaagca

SEQ ID NO: 3273364 - RNA, 14 nt, Vaccinia virus
ggauaaugauagaa

SEQ ID NO: 3273365 - RNA, 20 nt, Vaccinia virus
auagguuuuuuaaaacagau

SEQ ID NO: 3273366 - RNA, 12 nt, Vaccinia virus
aaucguauauaa

SEQ ID NO: 3273367 - RNA, 17 nt, Vaccinia virus
ugaugccgguaaauguu

SEQ ID NO: 3273368 - RNA, 15 nt, Vaccinia virus
accuauuaauaauua

SEQ ID NO: 3273369 - RNA, 14 nt, Vaccinia virus
aauagauaucauga

SEQ ID NO: 3273370 - RNA, 14 nt, Vaccinia virus
uuagagaaaaacaa

SEQ ID NO: 3273371 - RNA, 20 nt, Vaccinia virus
acugguguauauaauuauuu

SEQ ID NO: 3273372 - RNA, 19 nt, Vaccinia virus
aguauccauuuuacauuau

SEQ ID NO: 3273373 - RNA, 18 nt, Vaccinia virus
gcaucagacgcaauaaca

SEQ ID NO: 3273374 - RNA, 20 nt, Vaccinia virus
uauuuguacacaucuaucaa

SEQ ID NO: 3273375 - RNA, 21 nt, Vaccinia virus
uagacugaaugcuuucuugga

SEQ ID NO: 3273376 - RNA, 14 nt, Vaccinia virus
accauuauuaauaa

SEQ ID NO: 3273377 - RNA, 17 nt, Vaccinia virus
ccaaggaucuucuauca

SEQ ID NO: 3273378 - RNA, 23 nt, Vaccinia virus
ugauaaagauaaaagaauucaga

SEQ ID NO: 3273379 - RNA, 17 nt, Vaccinia virus
acagaauauaaauuaua

SEQ ID NO: 3273380 - RNA, 15 nt, Vaccinia virus
gcuaguauagaaauu

SEQ ID NO: 3273381 - RNA, 14 nt, Vaccinia virus
uuuggcucuucuau

SEQ ID NO: 3273382 - RNA, 14 nt, Vaccinia virus
aaacgaaagacugu

SEQ ID NO: 3273383 - RNA, 13 nt, Vaccinia virus
uaacacauuuuca

SEQ ID NO: 3273384 - RNA, 24 nt, Vaccinia virus
auuuaacgaaucauccauaaauua

SEQ ID NO: 3273385 - RNA, 20 nt, Vaccinia virus
auauagauuuuuuaaaggau

SEQ ID NO: 3273386 - RNA, 15 nt, Vaccinia virus
uauccaugaugguca

SEQ ID NO: 3273387 - RNA, 20 nt, Vaccinia virus
cuauuucauacuauuuugug

SEQ ID NO: 3273388 - RNA, 13 nt, Vaccinia virus
auauuacaaaaua

SEQ ID NO: 3273389 - RNA, 22 nt, Vaccinia virus
ucacucucauaauguaaagaua

SEQ ID NO: 3273390 - RNA, 21 nt, Vaccinia virus
cgaauauuagguaaagauauu

SEQ ID NO: 3273391 - RNA, 16 nt, Vaccinia virus
auauacauuacugaau

SEQ ID NO: 3273392 - RNA, 18 nt, Vaccinia virus
aacacguuagaguuuaua

SEQ ID NO: 3273393 - RNA, 21 nt, Vaccinia virus
aaaagacgucacuauuaccaa

SEQ ID NO: 3273394 - RNA, 15 nt, Vaccinia virus
ucugaguauaguguu

SEQ ID NO: 3273395 - RNA, 15 nt, Vaccinia virus
augacacuagaugau

SEQ ID NO: 3273396 - RNA, 18 nt, Vaccinia virus
uagaaguuguaaaugaca

SEQ ID NO: 3273397 - RNA, 19 nt, Vaccinia virus
accauaucgccguaaugua

SEQ ID NO: 3273398 - RNA, 22 nt, Vaccinia virus
gacaguaguugcgggaacaaua

SEQ ID NO: 3273399 - RNA, 19 nt, Vaccinia virus
agucauaucuagaaugaag

SEQ ID NO: 3273400 - RNA, 14 nt, Vaccinia virus
auuauuauuaauaa

SEQ ID NO: 3273401 - RNA, 20 nt, Vaccinia virus
uccggugcccagucuaaaag

SEQ ID NO: 3273402 - RNA, 18 nt, Vaccinia virus
cucuauccgacuagaauu

SEQ ID NO: 3273403 - RNA, 21 nt, Vaccinia virus
aaugacaucuaugauuuuacu

SEQ ID NO: 3273404 - RNA, 20 nt, Vaccinia virus
cauuaauaucuuuauaagag

SEQ ID NO: 3273405 - RNA, 14 nt, Vaccinia virus
auuuuguucaucuc

SEQ ID NO: 3273406 - RNA, 14 nt, Vaccinia virus
guuuaauaaauguu

SEQ ID NO: 3273407 - RNA, 18 nt, Vaccinia virus
uaauaugacucaugaucu

SEQ ID NO: 3273408 - RNA, 17 nt, Vaccinia virus
ucuauauagauggagua

SEQ ID NO: 3273409 - RNA, 15 nt, Vaccinia virus
uagaaacauauucua

SEQ ID NO: 3273410 - RNA, 24 nt, Vaccinia virus
uaauaguuuccaccgaaagacuau

SEQ ID NO: 3273411 - RNA, 21 nt, Vaccinia virus
gagucuuuaucaauaaacaau

SEQ ID NO: 3273412 - RNA, 19 nt, Vaccinia virus
auaaucugguggauacucu

SEQ ID NO: 3273413 - RNA, 12 nt, Vaccinia virus
uuguaaaugaca

SEQ ID NO: 3273414 - RNA, 12 nt, Vaccinia virus
gaugucaugaac

SEQ ID NO: 3273415 - RNA, 15 nt, Vaccinia virus
aguuccagaaaaugu

SEQ ID NO: 3273416 - RNA, 21 nt, Vaccinia virus
uguaaccgcguuaauguuugc

SEQ ID NO: 3273417 - RNA, 18 nt, Vaccinia virus
guauggagacauucauug

SEQ ID NO: 3273418 - RNA, 21 nt, Vaccinia virus
ugaacaagagauauauuggag

SEQ ID NO: 3273419 - RNA, 12 nt, Vaccinia virus
caucuacauaau

SEQ ID NO: 3273420 - RNA, 16 nt, Vaccinia virus
auaauggugcuuguau

SEQ ID NO: 3273421 - RNA, 13 nt, Vaccinia virus
gaauuaauaauau

SEQ ID NO: 3273422 - RNA, 17 nt, Vaccinia virus
guaacuacguucaucau

SEQ ID NO: 3273423 - RNA, 14 nt, Vaccinia virus
auguauuugauaua

SEQ ID NO: 3273424 - RNA, 23 nt, Vaccinia virus
uaccaauaugucuguacaaaugu

SEQ ID NO: 3273425 - RNA, 24 nt, Vaccinia virus
cauaaucuaaaauaguucuguaau

SEQ ID NO: 3273426 - RNA, 14 nt, Vaccinia virus
auucaaauguuguu

SEQ ID NO: 3273427 - RNA, 16 nt, Vaccinia virus
cuguaaguauguuuaa

SEQ ID NO: 3273428 - RNA, 23 nt, Vaccinia virus
acgaauaucguucucuaaauguc

SEQ ID NO: 3273429 - RNA, 18 nt, Vaccinia virus
gaaccuucuacauauaau

SEQ ID NO: 3273430 - RNA, 22 nt, Vaccinia virus
auuuggucauaauagaauguau

SEQ ID NO: 3273431 - RNA, 19 nt, Vaccinia virus
ugguuucuuucauuucagu

SEQ ID NO: 3273432 - RNA, 21 nt, Vaccinia virus
ucuuuaaacgauauucuugaa

SEQ ID NO: 3273433 - RNA, 20 nt, Vaccinia virus
gaaacucuguuguauaucua

SEQ ID NO: 3273434 - RNA, 16 nt, Vaccinia virus
aucaacaauuuuguau

SEQ ID NO: 3273435 - RNA, 13 nt, Vaccinia virus
aucaaauacuuca

SEQ ID NO: 3273436 - RNA, 17 nt, Vaccinia virus
gagaagaugguuaaaaa

SEQ ID NO: 3273437 - RNA, 20 nt, Vaccinia virus
uauaaucuucgucuauuaca

SEQ ID NO: 3273438 - RNA, 14 nt, Vaccinia virus
caaauauacuaacg

SEQ ID NO: 3273439 - RNA, 23 nt, Vaccinia virus
acuaacauacggcaaauauuuug

SEQ ID NO: 3273440 - RNA, 17 nt, Vaccinia virus
auccauggcagagacga

SEQ ID NO: 3273441 - RNA, 15 nt, Vaccinia virus
acauugauugccaua

SEQ ID NO: 3273442 - RNA, 20 nt, Vaccinia virus
auacauuuccgaaugaaugu

SEQ ID NO: 3273443 - RNA, 13 nt, Vaccinia virus
aaauugaaaauaa

SEQ ID NO: 3273444 - RNA, 16 nt, Vaccinia virus
gaacaacgucaacaac

SEQ ID NO: 3273445 - RNA, 14 nt, Vaccinia virus
agacuacaauauau

SEQ ID NO: 3273446 - RNA, 19 nt, Vaccinia virus
uugaugucuacacauccuu

SEQ ID NO: 3273447 - RNA, 20 nt, Vaccinia virus
gccagagauaauuucuguaa

SEQ ID NO: 3273448 - RNA, 17 nt, Vaccinia virus
cgcuacaauaacucuau

SEQ ID NO: 3273449 - RNA, 20 nt, Vaccinia virus
gccgauagucucauagucua

SEQ ID NO: 3273450 - RNA, 16 nt, Vaccinia virus
cauguucgaaaaagug

SEQ ID NO: 3273451 - RNA, 15 nt, Vaccinia virus
gacgucaaacaaugu

SEQ ID NO: 3273452 - RNA, 12 nt, Vaccinia virus
uuaaauauuucu

SEQ ID NO: 3273453 - RNA, 16 nt, Vaccinia virus
ugggauaaaaauuaug

SEQ ID NO: 3273454 - RNA, 19 nt, Vaccinia virus
acauuagccggacaaauau

SEQ ID NO: 3273455 - RNA, 18 nt, Vaccinia virus
cugcgacggagcauuuuc

SEQ ID NO: 3273456 - RNA, 21 nt, Vaccinia virus
auuuaauacguucauuaaaaa

SEQ ID NO: 3273457 - RNA, 14 nt, Vaccinia virus
gaaaucuaguucug

SEQ ID NO: 3273458 - RNA, 22 nt, Vaccinia virus
auaagaaugacuccuauguuuc

SEQ ID NO: 3273459 - RNA, 21 nt, Vaccinia virus
ccuuuguuauuuauuuuauuc

SEQ ID NO: 3273460 - RNA, 22 nt, Vaccinia virus
aagacauuccuaugaugaugca

SEQ ID NO: 3273461 - RNA, 23 nt, Vaccinia virus
aaaugguugaauccagcauguau

SEQ ID NO: 3273462 - RNA, 22 nt, Vaccinia virus
cauguguagaugcuacuucauc

SEQ ID NO: 3273463 - RNA, 20 nt, Vaccinia virus
ggcuacacacgguagaaaaa

SEQ ID NO: 3273464 - RNA, 20 nt, Vaccinia virus
auacuucaucaguguagaua

SEQ ID NO: 3273465 - RNA, 20 nt, Vaccinia virus
uuuagaaauguuauauauaa

SEQ ID NO: 3273466 - RNA, 21 nt, Vaccinia virus
uucaaggaugccauagauucu

SEQ ID NO: 3273467 - RNA, 13 nt, Vaccinia virus
ccuuguauccauu

SEQ ID NO: 3273468 - RNA, 16 nt, Vaccinia virus
gaacacauuuacgaua

SEQ ID NO: 3273469 - RNA, 14 nt, Vaccinia virus
auugacgacuuugg

SEQ ID NO: 3273470 - RNA, 14 nt, Vaccinia virus
guacccaaguuauu

SEQ ID NO: 3273471 - RNA, 21 nt, Vaccinia virus
agaaacaccuagaauacucau

SEQ ID NO: 3273472 - RNA, 21 nt, Vaccinia virus
auuaguauucuucuugucauc

SEQ ID NO: 3273473 - RNA, 18 nt, Vaccinia virus
uaucauuaauaaagacuu

SEQ ID NO: 3273474 - RNA, 23 nt, Vaccinia virus
ugaugauuagauggagaguauau

SEQ ID NO: 3273475 - RNA, 16 nt, Vaccinia virus
auacauauuuucagua

SEQ ID NO: 3273476 - RNA, 14 nt, Vaccinia virus
caggcucuauuuuc

SEQ ID NO: 3273477 - RNA, 14 nt, Vaccinia virus
acuaaauccgagaa

SEQ ID NO: 3273478 - RNA, 18 nt, Vaccinia virus
ucacaauacgauuuagau

SEQ ID NO: 3273479 - RNA, 23 nt, Vaccinia virus
uuaaaauauauuaucacuucagu

SEQ ID NO: 3273480 - RNA, 14 nt, Vaccinia virus
auaaacauaauaaa

SEQ ID NO: 3273481 - RNA, 23 nt, Vaccinia virus
uuaauuguuaaacauacaucugu

SEQ ID NO: 3273482 - RNA, 20 nt, Vaccinia virus
acuauauaccuauuaauaca

SEQ ID NO: 3273483 - RNA, 22 nt, Vaccinia virus
augucugauuuuucuucauuua

SEQ ID NO: 3273484 - RNA, 23 nt, Vaccinia virus
auauucuuguuauguuaauacau

SEQ ID NO: 3273485 - RNA, 16 nt, Vaccinia virus
cucccauaauacuuua

SEQ ID NO: 3273486 - RNA, 13 nt, Vaccinia virus
aauaguagaauua

SEQ ID NO: 3273487 - RNA, 20 nt, Vaccinia virus
uauaaagaugguaaacucuu

SEQ ID NO: 3273488 - RNA, 14 nt, Vaccinia virus
aucagauauuugcg

SEQ ID NO: 3273489 - RNA, 14 nt, Vaccinia virus
augaguuagauuac

SEQ ID NO: 3273490 - RNA, 18 nt, Vaccinia virus
acaacaaugucucgaaau

SEQ ID NO: 3273491 - RNA, 18 nt, Vaccinia virus
aucugauaauuuagauaa

SEQ ID NO: 3273492 - RNA, 15 nt, Vaccinia virus
uguuuaauuuucaca

SEQ ID NO: 3273493 - RNA, 13 nt, Vaccinia virus
auauauacaguag

SEQ ID NO: 3273494 - RNA, 14 nt, Vaccinia virus
aagcaagaaagaua

SEQ ID NO: 3273495 - RNA, 14 nt, Vaccinia virus
uaauuacuaaaucu

SEQ ID NO: 3273496 - RNA, 20 nt, Vaccinia virus
aauggacuccaauacgaaau

SEQ ID NO: 3273497 - RNA, 17 nt, Vaccinia virus
agucgagauacagaaaa

SEQ ID NO: 3273498 - RNA, 18 nt, Vaccinia virus
uaguggacuugucaaauc

SEQ ID NO: 3273499 - RNA, 16 nt, Vaccinia virus
gaacucgauacuaucg

SEQ ID NO: 3273500 - RNA, 21 nt, Vaccinia virus
aguaugaguaagauaguguuu

SEQ ID NO: 3273501 - RNA, 19 nt, Vaccinia virus
gucucuuccgcagauaaau

SEQ ID NO: 3273502 - RNA, 22 nt, Vaccinia virus
uaugagggaaaagauucucauu

SEQ ID NO: 3273503 - RNA, 13 nt, Vaccinia virus
ggaugccacugcu

SEQ ID NO: 3273504 - RNA, 18 nt, Vaccinia virus
ucuagucgcaucucuuaa

SEQ ID NO: 3273505 - RNA, 13 nt, Vaccinia virus
auggaaaggaaac

SEQ ID NO: 3273506 - RNA, 18 nt, Vaccinia virus
aacucuuuagucgagaua

SEQ ID NO: 3273507 - RNA, 20 nt, Vaccinia virus
uguaauacauuuugaacucu

SEQ ID NO: 3273508 - RNA, 21 nt, Vaccinia virus
auaccuuaccgccuucauaag

SEQ ID NO: 3273509 - RNA, 19 nt, Vaccinia virus
auguauucagucagacaau

SEQ ID NO: 3273510 - RNA, 20 nt, Vaccinia virus
aauauauaagacacagaaau

SEQ ID NO: 3273511 - RNA, 14 nt, Vaccinia virus
guagcguauuucuc

SEQ ID NO: 3273512 - RNA, 22 nt, Vaccinia virus
uuaauagauauauuaauacuuu

SEQ ID NO: 3273513 - RNA, 18 nt, Vaccinia virus
ccugauuaguauuuucua

SEQ ID NO: 3273514 - RNA, 17 nt, Vaccinia virus
gcuaauuugauaaagau

SEQ ID NO: 3273515 - RNA, 19 nt, Vaccinia virus
aacgucgguauuauauuau

SEQ ID NO: 3273516 - RNA, 15 nt, Vaccinia virus
aaauuugucauuuau

SEQ ID NO: 3273517 - RNA, 20 nt, Vaccinia virus
caaugauaaugauacaguac

SEQ ID NO: 3273518 - RNA, 19 nt, Vaccinia virus
cuauuaaugacacuaguua

SEQ ID NO: 3273519 - RNA, 21 nt, Vaccinia virus
uauaugguauagggagaguau

SEQ ID NO: 3273520 - RNA, 17 nt, Vaccinia virus
uuacuaauaucauuagu

SEQ ID NO: 3273521 - RNA, 18 nt, Vaccinia virus
auuuuccaaauacaucca

SEQ ID NO: 3273522 - RNA, 13 nt, Vaccinia virus
gucuuaauagaca

SEQ ID NO: 3273523 - RNA, 15 nt, Vaccinia virus
acaaaacagaaauau

SEQ ID NO: 3273524 - RNA, 16 nt, Vaccinia virus
agcucgugguauuaua

SEQ ID NO: 3273525 - RNA, 16 nt, Vaccinia virus
ugugaugccaauaagc

SEQ ID NO: 3273526 - RNA, 17 nt, Vaccinia virus
aucuauucauaaaacau

SEQ ID NO: 3273527 - RNA, 22 nt, Vaccinia virus
acaaauguuaaacauuaauuga

SEQ ID NO: 3273528 - RNA, 16 nt, Vaccinia virus
aaacuguuuaagaaaa

SEQ ID NO: 3273529 - RNA, 19 nt, Vaccinia virus
auuuugugauauuaauaua

SEQ ID NO: 3273530 - RNA, 12 nt, Vaccinia virus
gauuuucuggga

SEQ ID NO: 3273531 - RNA, 21 nt, Vaccinia virus
uacuuaaagauagaaaugaau

SEQ ID NO: 3273532 - RNA, 21 nt, Vaccinia virus
acguccugcaggguauuguuu

SEQ ID NO: 3273533 - RNA, 12 nt, Vaccinia virus
ucuguacaaaau

SEQ ID NO: 3273534 - RNA, 23 nt, Vaccinia virus
gcugaauguaucuuccacaucaa

SEQ ID NO: 3273535 - RNA, 12 nt, Vaccinia virus
caaaauguuuga

SEQ ID NO: 3273536 - RNA, 20 nt, Vaccinia virus
ucaguguccaucauuucauu

SEQ ID NO: 3273537 - RNA, 16 nt, Vaccinia virus
ucgauaacucuauuca

SEQ ID NO: 3273538 - RNA, 12 nt, Vaccinia virus
cgccauggaugg

SEQ ID NO: 3273539 - RNA, 12 nt, Vaccinia virus
uuuccaaagaua

SEQ ID NO: 3273540 - RNA, 21 nt, Vaccinia virus
uauagauccuccaguaaauga

SEQ ID NO: 3273541 - RNA, 15 nt, Vaccinia virus
cucuuaauuauaacg

SEQ ID NO: 3273542 - RNA, 16 nt, Vaccinia virus
aauucaggaacuauaa

SEQ ID NO: 3273543 - RNA, 21 nt, Vaccinia virus
uguagugucaauuuuaaauga

SEQ ID NO: 3273544 - RNA, 22 nt, Vaccinia virus
ugacaaaauuaaaaaagauaaa

SEQ ID NO: 3273545 - RNA, 21 nt, Vaccinia virus
uaugaccgguuuaauguuaua

SEQ ID NO: 3273546 - RNA, 11 nt, Vaccinia virus
gucuuuucuaa

SEQ ID NO: 3273547 - RNA, 23 nt, Vaccinia virus
auuuuuuuaaaaaggaaauacuu

SEQ ID NO: 3273548 - RNA, 15 nt, Vaccinia virus
uaucuauguuaucau

SEQ ID NO: 3273549 - RNA, 15 nt, Vaccinia virus
uaauacacacaaagu

SEQ ID NO: 3273550 - RNA, 15 nt, Vaccinia virus
ucuacagauggagua

SEQ ID NO: 3273551 - RNA, 13 nt, Vaccinia virus
cuauauagauauu

SEQ ID NO: 3273552 - RNA, 13 nt, Vaccinia virus
acugcugugaaua

SEQ ID NO: 3273553 - RNA, 16 nt, Vaccinia virus
ugcuaauauucccaaa

SEQ ID NO: 3273554 - RNA, 13 nt, Vaccinia virus
aucaauguagaaa

SEQ ID NO: 3273555 - RNA, 15 nt, Vaccinia virus
uccauuaauguggaa

SEQ ID NO: 3273556 - RNA, 15 nt, Vaccinia virus
aagguguuaaaauua

SEQ ID NO: 3273557 - RNA, 13 nt, Vaccinia virus
acgcgucuguuuu

SEQ ID NO: 3273558 - RNA, 24 nt, Vaccinia virus
auggauuuggucauaauagaaugu

SEQ ID NO: 3273559 - RNA, 16 nt, Vaccinia virus
aaucucucucaaauau

SEQ ID NO: 3273560 - RNA, 15 nt, Vaccinia virus
cacuaacgugauuau

SEQ ID NO: 3273561 - RNA, 21 nt, Vaccinia virus
uuuuaacgcgucugaauguau

SEQ ID NO: 3273562 - RNA, 13 nt, Vaccinia virus
ugaauuguuucuu

SEQ ID NO: 3273563 - RNA, 15 nt, Vaccinia virus
ggauaaaaucuuuug

SEQ ID NO: 3273564 - RNA, 22 nt, Vaccinia virus
uucaaugaacucaucgagauau

SEQ ID NO: 3273565 - RNA, 18 nt, Vaccinia virus
auaauaagaugcaaacau

SEQ ID NO: 3273566 - RNA, 12 nt, Vaccinia virus
aaugaauguuua

SEQ ID NO: 3273567 - RNA, 18 nt, Vaccinia virus
uaguucguguacuaguca

SEQ ID NO: 3273568 - RNA, 14 nt, Vaccinia virus
auuuuuuacaauuu

SEQ ID NO: 3273569 - RNA, 13 nt, Vaccinia virus
gucuaucuauaug

SEQ ID NO: 3273570 - RNA, 15 nt, Vaccinia virus
cacaugauugacaaa

SEQ ID NO: 3273571 - RNA, 18 nt, Vaccinia virus
uaacuggcggauuauuca

SEQ ID NO: 3273572 - RNA, 18 nt, Vaccinia virus
cauuuuuuauaaaaacuu

SEQ ID NO: 3273573 - RNA, 16 nt, Vaccinia virus
agcacaagauuuccaa

SEQ ID NO: 3273574 - RNA, 18 nt, Vaccinia virus
ucauccuuaaauguuuuc

SEQ ID NO: 3273575 - RNA, 23 nt, Vaccinia virus
cuaucgaaaauugcuauuucaga

SEQ ID NO: 3273576 - RNA, 18 nt, Vaccinia virus
aguuaaguuuuuuaagaa

SEQ ID NO: 3273577 - RNA, 22 nt, Vaccinia virus
ucuaucuccaguauuuacauua

SEQ ID NO: 3273578 - RNA, 23 nt, Vaccinia virus
auccacuaugaucaauucuggau

SEQ ID NO: 3273579 - RNA, 14 nt, Vaccinia virus
ucaucuaugugauu

SEQ ID NO: 3273580 - RNA, 20 nt, Vaccinia virus
accacacggagaacagauga

SEQ ID NO: 3273581 - RNA, 16 nt, Vaccinia virus
auacuguguaaagaaa

SEQ ID NO: 3273582 - RNA, 16 nt, Vaccinia virus
aucgccuuuauuucca

SEQ ID NO: 3273583 - RNA, 22 nt, Vaccinia virus
auauuuguuauuuuuucuguaa

SEQ ID NO: 3273584 - RNA, 18 nt, Vaccinia virus
acuaacucucuaauggau

SEQ ID NO: 3273585 - RNA, 15 nt, Vaccinia virus
guaacgcguggaaaa

SEQ ID NO: 3273586 - RNA, 13 nt, Vaccinia virus
gcauaagaaaaac

SEQ ID NO: 3273587 - RNA, 21 nt, Vaccinia virus
uuaaugacacuaguuaagaac

SEQ ID NO: 3273588 - RNA, 13 nt, Vaccinia virus
aguacuuaaugaa

SEQ ID NO: 3273589 - RNA, 20 nt, Vaccinia virus
cuugacauuuucuucuuucu

SEQ ID NO: 3273590 - RNA, 22 nt, Vaccinia virus
aaugacuacguuguuaugagug

SEQ ID NO: 3273591 - RNA, 22 nt, Vaccinia virus
ucuucuuauaagauuguagaau

SEQ ID NO: 3273592 - RNA, 12 nt, Vaccinia virus
uaauuuacuacu

SEQ ID NO: 3273593 - RNA, 22 nt, Vaccinia virus
uaacaugacauuuauucaucau

SEQ ID NO: 3273594 - RNA, 21 nt, Vaccinia virus
caacaaaagguauuacaagaa

SEQ ID NO: 3273595 - RNA, 21 nt, Vaccinia virus
uaaaguuagaugugucauacu

SEQ ID NO: 3273596 - RNA, 16 nt, Vaccinia virus
ugacaucgccuacaaa

SEQ ID NO: 3273597 - RNA, 22 nt, Vaccinia virus
aauaugcuaguuaauaguaaau

SEQ ID NO: 3273598 - RNA, 19 nt, Vaccinia virus
acuaucgcaucaaaaggau

SEQ ID NO: 3273599 - RNA, 21 nt, Vaccinia virus
acaguuacuccaauuacaaca

SEQ ID NO: 3273600 - RNA, 17 nt, Vaccinia virus
auacugaagucugauau

SEQ ID NO: 3273601 - RNA, 20 nt, Vaccinia virus
agauucagaauuucuacaua

SEQ ID NO: 3273602 - RNA, 18 nt, Vaccinia virus
aucgauugauagugaaug

SEQ ID NO: 3273603 - RNA, 18 nt, Vaccinia virus
cauuuuaggauaugcuuu

SEQ ID NO: 3273604 - RNA, 13 nt, Vaccinia virus
uccuauuaugaaa

SEQ ID NO: 3273605 - RNA, 22 nt, Vaccinia virus
uuauacgaaaaaaaucauuaaa

SEQ ID NO: 3273606 - RNA, 17 nt, Vaccinia virus
cuaacaugcauuugaaa

SEQ ID NO: 3273607 - RNA, 15 nt, Vaccinia virus
ucuugauuacaaaac

SEQ ID NO: 3273608 - RNA, 23 nt, Vaccinia virus
aacuaccaauaugucuguacaaa

SEQ ID NO: 3273609 - RNA, 21 nt, Vaccinia virus
auuacucuccuagguuucucu

SEQ ID NO: 3273610 - RNA, 15 nt, Vaccinia virus
uguuauaaguuuuua

SEQ ID NO: 3273611 - RNA, 13 nt, Vaccinia virus
acauaaacaaauu

SEQ ID NO: 3273612 - RNA, 16 nt, Vaccinia virus
acucauccuaucugga

SEQ ID NO: 3273613 - RNA, 13 nt, Vaccinia virus
auauauagaaugg

SEQ ID NO: 3273614 - RNA, 18 nt, Vaccinia virus
cagucaagucaaugauau

SEQ ID NO: 3273615 - RNA, 13 nt, Vaccinia virus
gcuguuauauauu

SEQ ID NO: 3273616 - RNA, 17 nt, Vaccinia virus
aaggaauauacaaaguu

SEQ ID NO: 3273617 - RNA, 13 nt, Vaccinia virus
agaagauuuaacu

SEQ ID NO: 3273618 - RNA, 15 nt, Vaccinia virus
uaguauucguuuucu

SEQ ID NO: 3273619 - RNA, 18 nt, Vaccinia virus
auacaaauccauuaaugu

SEQ ID NO: 3273620 - RNA, 15 nt, Vaccinia virus
guguauaacaucuuu

SEQ ID NO: 3273621 - RNA, 15 nt, Vaccinia virus
auauacauuguauaa

SEQ ID NO: 3273622 - RNA, 17 nt, Vaccinia virus
uaggcacagucaaacau

SEQ ID NO: 3273623 - RNA, 21 nt, Vaccinia virus
uaguugauagaacaaaauaca

SEQ ID NO: 3273624 - RNA, 17 nt, Vaccinia virus
uaauuccuuuuuaaauu

SEQ ID NO: 3273625 - RNA, 19 nt, Vaccinia virus
aacgauuuaauuacagagu

SEQ ID NO: 3273626 - RNA, 15 nt, Vaccinia virus
uggaguaguacaaga

SEQ ID NO: 3273627 - RNA, 19 nt, Vaccinia virus
aucaauguguguaacucca

SEQ ID NO: 3273628 - RNA, 20 nt, Vaccinia virus
cuugauacagccaaguaucu

SEQ ID NO: 3273629 - RNA, 20 nt, Vaccinia virus
uuccuauaaucguuaaauuu

SEQ ID NO: 3273630 - RNA, 18 nt, Vaccinia virus
uaacaucagaaaauguaa

SEQ ID NO: 3273631 - RNA, 13 nt, Vaccinia virus
ucugacauucaga

SEQ ID NO: 3273632 - RNA, 16 nt, Vaccinia virus
uaucucauuugagaau

SEQ ID NO: 3273633 - RNA, 22 nt, Vaccinia virus
auguuaauugggguauuaauaa

SEQ ID NO: 3273634 - RNA, 23 nt, Vaccinia virus
uuuugacaaagauggucuaaaau

SEQ ID NO: 3273635 - RNA, 22 nt, Vaccinia virus
gaauauuuaauuuggucauuau

SEQ ID NO: 3273636 - RNA, 17 nt, Vaccinia virus
aagcuguucaaaauaua

SEQ ID NO: 3273637 - RNA, 22 nt, Vaccinia virus
aagcguuggcaccggaauacua

SEQ ID NO: 3273638 - RNA, 19 nt, Vaccinia virus
uuagacgacguauuauaca

SEQ ID NO: 3273639 - RNA, 14 nt, Vaccinia virus
cacugauucagaaa

SEQ ID NO: 3273640 - RNA, 13 nt, Vaccinia virus
cuaugauauuguu

SEQ ID NO: 3273641 - RNA, 16 nt, Vaccinia virus
caaauuuuucaugaau

SEQ ID NO: 3273642 - RNA, 23 nt, Vaccinia virus
auuuuuauauuauuuacacaauu

SEQ ID NO: 3273643 - RNA, 20 nt, Vaccinia virus
caaaauguuugacauuagua

SEQ ID NO: 3273644 - RNA, 20 nt, Vaccinia virus
cauguggaucugaagaagag

SEQ ID NO: 3273645 - RNA, 12 nt, Vaccinia virus
aauuugaauauc

SEQ ID NO: 3273646 - RNA, 16 nt, Vaccinia virus
agaauacaaucuguau

SEQ ID NO: 3273647 - RNA, 22 nt, Vaccinia virus
auuuucuugugaccaacucauc

SEQ ID NO: 3273648 - RNA, 14 nt, Vaccinia virus
ccaucaaaagcauu

SEQ ID NO: 3273649 - RNA, 18 nt, Vaccinia virus
agcuguacaccauagcac

SEQ ID NO: 3273650 - RNA, 14 nt, Vaccinia virus
auaaaagaauaugu

SEQ ID NO: 3273651 - RNA, 21 nt, Vaccinia virus
uggcuucuuccauaguuagaa

SEQ ID NO: 3273652 - RNA, 15 nt, Vaccinia virus
uuaaauaucugugaa

SEQ ID NO: 3273653 - RNA, 18 nt, Vaccinia virus
aucucuagauauguauuu

SEQ ID NO: 3273654 - RNA, 15 nt, Vaccinia virus
auccuaucuaagaug

SEQ ID NO: 3273655 - RNA, 12 nt, Vaccinia virus
aaauauucauua

SEQ ID NO: 3273656 - RNA, 17 nt, Vaccinia virus
cuagauuccaaucauug

SEQ ID NO: 3273657 - RNA, 14 nt, Vaccinia virus
acgugauuuuauca

SEQ ID NO: 3273658 - RNA, 21 nt, Vaccinia virus
uuaauagauauaucucuuaau

SEQ ID NO: 3273659 - RNA, 16 nt, Vaccinia virus
cagguaggcaguuuua

SEQ ID NO: 3273660 - RNA, 17 nt, Vaccinia virus
aaguuucguacaaauac

SEQ ID NO: 3273661 - RNA, 20 nt, Vaccinia virus
gccauugaaaacuauuucuu

SEQ ID NO: 3273662 - RNA, 23 nt, Vaccinia virus
aucuuauauacacauaauuauuc

SEQ ID NO: 3273663 - RNA, 20 nt, Vaccinia virus
auagcguacaauacauguac

SEQ ID NO: 3273664 - RNA, 14 nt, Vaccinia virus
ucucuaguuuuauu

SEQ ID NO: 3273665 - RNA, 20 nt, Vaccinia virus
aguuugccuucuuuaguaga

SEQ ID NO: 3273666 - RNA, 22 nt, Vaccinia virus
cuaguccaaagacuuacaggaa

SEQ ID NO: 3273667 - RNA, 18 nt, Vaccinia virus
uucugcauuacaaagaag

SEQ ID NO: 3273668 - RNA, 12 nt, Vaccinia virus
uguuaauaacug

SEQ ID NO: 3273669 - RNA, 14 nt, Vaccinia virus
uaauaauuaaccaa

SEQ ID NO: 3273670 - RNA, 14 nt, Vaccinia virus
auacauuuuucuau

SEQ ID NO: 3273671 - RNA, 17 nt, Vaccinia virus
ucuaaucacuuuaacuu

SEQ ID NO: 3273672 - RNA, 20 nt, Vaccinia virus
auuggagauccgauccauga

SEQ ID NO: 3273673 - RNA, 20 nt, Vaccinia virus
auaauaacaaguaugacauu

SEQ ID NO: 3273674 - RNA, 12 nt, Vaccinia virus
uuaccaacaaua

SEQ ID NO: 3273675 - RNA, 19 nt, Vaccinia virus
auaguuacagaauuuguau

SEQ ID NO: 3273676 - RNA, 15 nt, Vaccinia virus
acguagaaaacggau

SEQ ID NO: 3273677 - RNA, 16 nt, Vaccinia virus
cuguaaaggaaucauu

SEQ ID NO: 3273678 - RNA, 11 nt, Vaccinia virus
ugcgauacauu

SEQ ID NO: 3273679 - RNA, 15 nt, Vaccinia virus
gaauuagucaaucuu

SEQ ID NO: 3273680 - RNA, 15 nt, Vaccinia virus
acuucaaaaacgaua

SEQ ID NO: 3273681 - RNA, 17 nt, Vaccinia virus
agaggcauaaucaaugu

SEQ ID NO: 3273682 - RNA, 21 nt, Vaccinia virus
cgaaacauccaucgauacaua

SEQ ID NO: 3273683 - RNA, 15 nt, Vaccinia virus
aauuacccauggaga

SEQ ID NO: 3273684 - RNA, 15 nt, Vaccinia virus
gauaucuaaauaugc

SEQ ID NO: 3273685 - RNA, 18 nt, Vaccinia virus
gauucuaucuuccuucga

SEQ ID NO: 3273686 - RNA, 22 nt, Vaccinia virus
gacuauuggaauguguuaaaaa

SEQ ID NO: 3273687 - RNA, 15 nt, Vaccinia virus
cuguugaaguacuua

SEQ ID NO: 3273688 - RNA, 18 nt, Vaccinia virus
gaauccauagaacaaaau

SEQ ID NO: 3273689 - RNA, 13 nt, Vaccinia virus
cugaguaaaugug

SEQ ID NO: 3273690 - RNA, 15 nt, Vaccinia virus
auaauaaaucaaaau

SEQ ID NO: 3273691 - RNA, 15 nt, Vaccinia virus
aacauuauguaguaa

SEQ ID NO: 3273692 - RNA, 19 nt, Vaccinia virus
augacgcauauucuacucu

SEQ ID NO: 3273693 - RNA, 15 nt, Vaccinia virus
gaguuagauauuaau

SEQ ID NO: 3273694 - RNA, 17 nt, Vaccinia virus
aaacuacugauguuauc

SEQ ID NO: 3273695 - RNA, 14 nt, Vaccinia virus
agauucaacauuua

SEQ ID NO: 3273696 - RNA, 15 nt, Vaccinia virus
aggauagagcaauaa

SEQ ID NO: 3273697 - RNA, 16 nt, Vaccinia virus
aucauugcuguaaaca

SEQ ID NO: 3273698 - RNA, 20 nt, Vaccinia virus
ggauguuguucgauugauuu

SEQ ID NO: 3273699 - RNA, 22 nt, Vaccinia virus
auguauuuugaggaaauugaua

SEQ ID NO: 3273700 - RNA, 21 nt, Vaccinia virus
gaucuagcaaaggaaauugug

SEQ ID NO: 3273701 - RNA, 17 nt, Vaccinia virus
gcuaaguaauaaaucaa

SEQ ID NO: 3273702 - RNA, 19 nt, Vaccinia virus
aaacuuguaagaaguaaau

SEQ ID NO: 3273703 - RNA, 14 nt, Vaccinia virus
cuauauaguucaaa

SEQ ID NO: 3273704 - RNA, 12 nt, Vaccinia virus
agcauguagaag

SEQ ID NO: 3273705 - RNA, 22 nt, Vaccinia virus
gacuaauuccuaguuucaucau

SEQ ID NO: 3273706 - RNA, 17 nt, Vaccinia virus
ugagucuauaucccauu

SEQ ID NO: 3273707 - RNA, 19 nt, Vaccinia virus
ucaauaacuggcacaacaa

SEQ ID NO: 3273708 - RNA, 12 nt, Vaccinia virus
aguuuauaucaa

SEQ ID NO: 3273709 - RNA, 14 nt, Vaccinia virus
cauuauaaaaagug

SEQ ID NO: 3273710 - RNA, 18 nt, Vaccinia virus
gacuccggaaccaauuac

SEQ ID NO: 3273711 - RNA, 14 nt, Vaccinia virus
auuuguugaugaag

SEQ ID NO: 3273712 - RNA, 17 nt, Vaccinia virus
aguuuggagaaauggag

SEQ ID NO: 3273713 - RNA, 19 nt, Vaccinia virus
cugaauuauuauuacugaa

SEQ ID NO: 3273714 - RNA, 23 nt, Vaccinia virus
gacauuaugcuaccgucaugaau

SEQ ID NO: 3273715 - RNA, 15 nt, Vaccinia virus
uaccuggaauguaaa

SEQ ID NO: 3273716 - RNA, 14 nt, Vaccinia virus
gaacucauguagca

SEQ ID NO: 3273717 - RNA, 22 nt, Vaccinia virus
auacauagucgugaucaacauu

SEQ ID NO: 3273718 - RNA, 21 nt, Vaccinia virus
uauuuuuuucuauguuauaua

SEQ ID NO: 3273719 - RNA, 15 nt, Vaccinia virus
guacgguaccuuugu

SEQ ID NO: 3273720 - RNA, 22 nt, Vaccinia virus
auucuacuaggcugacacuaug

SEQ ID NO: 3273721 - RNA, 10 nt, Vaccinia virus
aauaugaacc

SEQ ID NO: 3273722 - RNA, 22 nt, Vaccinia virus
acuacuaggagggaaaaugaag

SEQ ID NO: 3273723 - RNA, 13 nt, Vaccinia virus
ucguucaaauuuu

SEQ ID NO: 3273724 - RNA, 14 nt, Vaccinia virus
uuauuuaacucuuu

SEQ ID NO: 3273725 - RNA, 22 nt, Vaccinia virus
aaauguuugauaaaaauaugua

SEQ ID NO: 3273726 - RNA, 15 nt, Vaccinia virus
uaauaacaguuauau

SEQ ID NO: 3273727 - RNA, 17 nt, Vaccinia virus
uaucuacacaaauagaa

SEQ ID NO: 3273728 - RNA, 21 nt, Vaccinia virus
acagucugcggacuuuaaaca

SEQ ID NO: 3273729 - RNA, 22 nt, Vaccinia virus
cuauaguacacggaauaaugau

SEQ ID NO: 3273730 - RNA, 17 nt, Vaccinia virus
auuaauaauuaauaauu

SEQ ID NO: 3273731 - RNA, 22 nt, Vaccinia virus
uugggcggaucuguaaacauuu

SEQ ID NO: 3273732 - RNA, 20 nt, Vaccinia virus
uaaauuauuuaauaaaguau

SEQ ID NO: 3273733 - RNA, 16 nt, Vaccinia virus
guaucauaauauuaau

SEQ ID NO: 3273734 - RNA, 16 nt, Vaccinia virus
uagcgguaaguauaaa

SEQ ID NO: 3273735 - RNA, 17 nt, Vaccinia virus
acaaacaaacucuaaua

SEQ ID NO: 3273736 - RNA, 18 nt, Vaccinia virus
uaucaaggaacaaauauu

SEQ ID NO: 3273737 - RNA, 23 nt, Vaccinia virus
uuauacgaauaucguucucuaaa

SEQ ID NO: 3273738 - RNA, 20 nt, Vaccinia virus
cguuauuugagagaucauuu

SEQ ID NO: 3273739 - RNA, 15 nt, Vaccinia virus
cgacauucagaaaga

SEQ ID NO: 3273740 - RNA, 13 nt, Vaccinia virus
uauauuuuaucua

SEQ ID NO: 3273741 - RNA, 14 nt, Vaccinia virus
ucauuggaaaauau

SEQ ID NO: 3273742 - RNA, 18 nt, Vaccinia virus
ucuauucugaaauaauua

SEQ ID NO: 3273743 - RNA, 12 nt, Vaccinia virus
aauauaaaacua

SEQ ID NO: 3273744 - RNA, 13 nt, Vaccinia virus
uagucucuguaau

SEQ ID NO: 3273745 - RNA, 23 nt, Vaccinia virus
ugguguccuaguacacaauauca

SEQ ID NO: 3273746 - RNA, 16 nt, Vaccinia virus
uaauuauaagaaauau

SEQ ID NO: 3273747 - RNA, 14 nt, Vaccinia virus
guaaaaauaauuau

SEQ ID NO: 3273748 - RNA, 14 nt, Vaccinia virus
cuacaauuuguauu

SEQ ID NO: 3273749 - RNA, 19 nt, Vaccinia virus
uuagacagugguuucaugu

SEQ ID NO: 3273750 - RNA, 14 nt, Vaccinia virus
aucaagaaacauuu

SEQ ID NO: 3273751 - RNA, 12 nt, Vaccinia virus
aaauaacauuua

SEQ ID NO: 3273752 - RNA, 18 nt, Vaccinia virus
gauaugaacagacauugu

SEQ ID NO: 3273753 - RNA, 16 nt, Vaccinia virus
uacugcugauaaugau

SEQ ID NO: 3273754 - RNA, 13 nt, Vaccinia virus
cuuugauuaauga

SEQ ID NO: 3273755 - RNA, 13 nt, Vaccinia virus
aauugauucuuga

SEQ ID NO: 3273756 - RNA, 23 nt, Vaccinia virus
cugauauggaaucuguauucucg

SEQ ID NO: 3273757 - RNA, 19 nt, Vaccinia virus
uacgccuuuaaauccucua

SEQ ID NO: 3273758 - RNA, 18 nt, Vaccinia virus
uuaauuuggucauuauua

SEQ ID NO: 3273759 - RNA, 16 nt, Vaccinia virus
ugcagaagcaauaaau

SEQ ID NO: 3273760 - RNA, 15 nt, Vaccinia virus
gaauccgaaauuaga

SEQ ID NO: 3273761 - RNA, 19 nt, Vaccinia virus
uucaaaauuguaacaacaa

SEQ ID NO: 3273762 - RNA, 20 nt, Vaccinia virus
auuuuuagaaaguauccauc

SEQ ID NO: 3273763 - RNA, 11 nt, Vaccinia virus
uaaauuagaag

SEQ ID NO: 3273764 - RNA, 22 nt, Vaccinia virus
ucaucuuuaguaaacauaucau

SEQ ID NO: 3273765 - RNA, 13 nt, Vaccinia virus
gucucuaucuuua

SEQ ID NO: 3273766 - RNA, 19 nt, Vaccinia virus
uaauucuauuaauuguuaa

SEQ ID NO: 3273767 - RNA, 13 nt, Vaccinia virus
auauaguuauuaa

SEQ ID NO: 3273768 - RNA, 14 nt, Vaccinia virus
ugcuaauuauuccu

SEQ ID NO: 3273769 - RNA, 18 nt, Vaccinia virus
aaugcaauaacaaagauu

SEQ ID NO: 3273770 - RNA, 19 nt, Vaccinia virus
uaauagacuauauaaaccg

SEQ ID NO: 3273771 - RNA, 16 nt, Vaccinia virus
uuaauccacuauauau

SEQ ID NO: 3273772 - RNA, 19 nt, Vaccinia virus
aaacuuccauggaaaaacg

SEQ ID NO: 3273773 - RNA, 22 nt, Vaccinia virus
aucacgucagcggcaucuaaau

SEQ ID NO: 3273774 - RNA, 16 nt, Vaccinia virus
gagaaaaacaacgaga

SEQ ID NO: 3273775 - RNA, 21 nt, Vaccinia virus
acauaugaaccuucuacauau

SEQ ID NO: 3273776 - RNA, 15 nt, Vaccinia virus
ucagauauaucuauu

SEQ ID NO: 3273777 - RNA, 15 nt, Vaccinia virus
acaaucucuauaucu

SEQ ID NO: 3273778 - RNA, 13 nt, Vaccinia virus
uucuauuauuauu

SEQ ID NO: 3273779 - RNA, 14 nt, Vaccinia virus
guuaaagaaauuaa

SEQ ID NO: 3273780 - RNA, 12 nt, Vaccinia virus
ucccauguuuca

SEQ ID NO: 3273781 - RNA, 21 nt, Vaccinia virus
ucgauaccguauuguucuaaa

SEQ ID NO: 3273782 - RNA, 18 nt, Vaccinia virus
aggccaaagaaaugagua

SEQ ID NO: 3273783 - RNA, 18 nt, Vaccinia virus
guugucuaguauuuaaca

SEQ ID NO: 3273784 - RNA, 12 nt, Vaccinia virus
cucccuuuagau

SEQ ID NO: 3273785 - RNA, 16 nt, Vaccinia virus
aacaacucguuauuac

SEQ ID NO: 3273786 - RNA, 20 nt, Vaccinia virus
gacgaccuuuggauuuucac

SEQ ID NO: 3273787 - RNA, 21 nt, Vaccinia virus
ucucauaauaaacuagaguau

SEQ ID NO: 3273788 - RNA, 21 nt, Vaccinia virus
aacuacaucgguaucuagauc

SEQ ID NO: 3273789 - RNA, 16 nt, Vaccinia virus
cuuauucuuaaaaucu

SEQ ID NO: 3273790 - RNA, 20 nt, Vaccinia virus
uuacauuuuuuauaaauaga

SEQ ID NO: 3273791 - RNA, 20 nt, Vaccinia virus
auaugaaccuucuacauaua

SEQ ID NO: 3273792 - RNA, 23 nt, Vaccinia virus
ugacgaucuuguuauaauuauaa

SEQ ID NO: 3273793 - RNA, 17 nt, Vaccinia virus
auaggagcuagaagaac

SEQ ID NO: 3273794 - RNA, 21 nt, Vaccinia virus
uauggaugccaacguaguauc

SEQ ID NO: 3273795 - RNA, 15 nt, Vaccinia virus
caaauccauuaaugu

SEQ ID NO: 3273796 - RNA, 13 nt, Vaccinia virus
aaaauauaaauua

SEQ ID NO: 3273797 - RNA, 13 nt, Vaccinia virus
aguaguucauuau

SEQ ID NO: 3273798 - RNA, 14 nt, Vaccinia virus
aaauaucgauguuu

SEQ ID NO: 3273799 - RNA, 19 nt, Vaccinia virus
guuauacgucauuucaucu

SEQ ID NO: 3273800 - RNA, 22 nt, Vaccinia virus
auguucucguuuccaaaaaaug

SEQ ID NO: 3273801 - RNA, 15 nt, Vaccinia virus
aguuauuuacuuuga

SEQ ID NO: 3273802 - RNA, 19 nt, Vaccinia virus
auaauaacgauuuguuuaa

SEQ ID NO: 3273803 - RNA, 13 nt, Vaccinia virus
ccaagacacauau

SEQ ID NO: 3273804 - RNA, 18 nt, Vaccinia virus
ugacuuaacuuguaauaa

SEQ ID NO: 3273805 - RNA, 21 nt, Vaccinia virus
gccaacucucaaaaugcugau

SEQ ID NO: 3273806 - RNA, 14 nt, Vaccinia virus
uuaauccaaauaug

SEQ ID NO: 3273807 - RNA, 21 nt, Vaccinia virus
aucuuucccggagauaagacu

SEQ ID NO: 3273808 - RNA, 20 nt, Vaccinia virus
augaugccgguaaauguuuu

SEQ ID NO: 3273809 - RNA, 16 nt, Vaccinia virus
auccaauacagaaugu

SEQ ID NO: 3273810 - RNA, 20 nt, Vaccinia virus
cucgauacauuaacucucuc

SEQ ID NO: 3273811 - RNA, 14 nt, Vaccinia virus
aauuucauauuaau

SEQ ID NO: 3273812 - RNA, 15 nt, Vaccinia virus
acguacauuuuccau

SEQ ID NO: 3273813 - RNA, 15 nt, Vaccinia virus
cuauuaaagauggag

SEQ ID NO: 3273814 - RNA, 22 nt, Vaccinia virus
aacacaaauaguaauacaugua

SEQ ID NO: 3273815 - RNA, 15 nt, Vaccinia virus
gcauauuagaaucua

SEQ ID NO: 3273816 - RNA, 18 nt, Vaccinia virus
acacugcgaucugaauaa

SEQ ID NO: 3273817 - RNA, 18 nt, Vaccinia virus
uauccagauggaguggaa

SEQ ID NO: 3273818 - RNA, 11 nt, Vaccinia virus
acauuaaacag

SEQ ID NO: 3273819 - RNA, 22 nt, Vaccinia virus
cauaaaauuaucgaggauaucu

SEQ ID NO: 3273820 - RNA, 15 nt, Vaccinia virus
uguguaaaaaguuuu

SEQ ID NO: 3273821 - RNA, 14 nt, Vaccinia virus
uggauugaagguua

SEQ ID NO: 3273822 - RNA, 15 nt, Vaccinia virus
guagauaucuuuacu

SEQ ID NO: 3273823 - RNA, 19 nt, Vaccinia virus
ggaaaaucugaagaagaua

SEQ ID NO: 3273824 - RNA, 21 nt, Vaccinia virus
auauuguacgauguaauacua

SEQ ID NO: 3273825 - RNA, 22 nt, Vaccinia virus
cuaauacaucucuggaaauaga

SEQ ID NO: 3273826 - RNA, 19 nt, Vaccinia virus
auccagaauguacacuauu

SEQ ID NO: 3273827 - RNA, 16 nt, Vaccinia virus
uaacuuacaaaaugua

SEQ ID NO: 3273828 - RNA, 23 nt, Vaccinia virus
gcaauuuuauugcuaauaaugac

SEQ ID NO: 3273829 - RNA, 18 nt, Vaccinia virus
gauccauuuauaguuaua

SEQ ID NO: 3273830 - RNA, 12 nt, Vaccinia virus
uaccauacauua

SEQ ID NO: 3273831 - RNA, 14 nt, Vaccinia virus
uagagagauucauu

SEQ ID NO: 3273832 - RNA, 22 nt, Vaccinia virus
caaacagcaaggguucgucaaa

SEQ ID NO: 3273833 - RNA, 15 nt, Vaccinia virus
auacuucuccaacau

SEQ ID NO: 3273834 - RNA, 20 nt, Vaccinia virus
augaaaauuauaaugaauau

SEQ ID NO: 3273835 - RNA, 14 nt, Vaccinia virus
accauauacguguu

SEQ ID NO: 3273836 - RNA, 18 nt, Vaccinia virus
aggauuggucuuaaaaga

SEQ ID NO: 3273837 - RNA, 17 nt, Vaccinia virus
uucacuuuaauagauau

SEQ ID NO: 3273838 - RNA, 18 nt, Vaccinia virus
uuuaacaaaguuauucau

SEQ ID NO: 3273839 - RNA, 19 nt, Vaccinia virus
uaaaccauguugugaaaga

SEQ ID NO: 3273840 - RNA, 23 nt, Vaccinia virus
auuggagaaguaggaaacaggaa

SEQ ID NO: 3273841 - RNA, 18 nt, Vaccinia virus
gaagcugguaaaguaaau

SEQ ID NO: 3273842 - RNA, 24 nt, Vaccinia virus
uauauaccacuuaaugacaaaauc

SEQ ID NO: 3273843 - RNA, 15 nt, Vaccinia virus
caacuuaaacaaaau

SEQ ID NO: 3273844 - RNA, 19 nt, Vaccinia virus
acuccuagagaauuaauau

SEQ ID NO: 3273845 - RNA, 15 nt, Vaccinia virus
cuuucgauuuggaaa

SEQ ID NO: 3273846 - RNA, 22 nt, Vaccinia virus
auguccaaaucuaguuguggaa

SEQ ID NO: 3273847 - RNA, 17 nt, Vaccinia virus
acagaaacuagaggaga

SEQ ID NO: 3273848 - RNA, 13 nt, Vaccinia virus
ugaagauacuguu

SEQ ID NO: 3273849 - RNA, 16 nt, Vaccinia virus
uuucccagcauuaacu

SEQ ID NO: 3273850 - RNA, 13 nt, Vaccinia virus
caaaguuguuaaa

SEQ ID NO: 3273851 - RNA, 16 nt, Vaccinia virus
uuauacuaauaugaca

SEQ ID NO: 3273852 - RNA, 18 nt, Vaccinia virus
uuauacaggucauuacau

SEQ ID NO: 3273853 - RNA, 19 nt, Vaccinia virus
auucauagauugacuuuga

SEQ ID NO: 3273854 - RNA, 17 nt, Vaccinia virus
uagguuguaauaucaua

SEQ ID NO: 3273855 - RNA, 22 nt, Vaccinia virus
agaaaugguaaauaaauacuuu

SEQ ID NO: 3273856 - RNA, 21 nt, Vaccinia virus
uccaucaucgucuuauuucaa

SEQ ID NO: 3273857 - RNA, 15 nt, Vaccinia virus
aagaacaauguccaa

SEQ ID NO: 3273858 - RNA, 13 nt, Vaccinia virus
ugcuccaugauuu

SEQ ID NO: 3273859 - RNA, 23 nt, Vaccinia virus
aucguucucuaaaugucacaauc

SEQ ID NO: 3273860 - RNA, 19 nt, Vaccinia virus
aagccaauuccaauuguug

SEQ ID NO: 3273861 - RNA, 17 nt, Vaccinia virus
cauuagauaacagugua

SEQ ID NO: 3273862 - RNA, 23 nt, Vaccinia virus
ucucaugagaauggaaaggaaac

SEQ ID NO: 3273863 - RNA, 16 nt, Vaccinia virus
uauacuucauaaaaga

SEQ ID NO: 3273864 - RNA, 12 nt, Vaccinia virus
aauuaucaaaau

SEQ ID NO: 3273865 - RNA, 21 nt, Vaccinia virus
accauuauucgccuguaucag

SEQ ID NO: 3273866 - RNA, 22 nt, Vaccinia virus
uguuuugaauuucuuagucaua

SEQ ID NO: 3273867 - RNA, 15 nt, Vaccinia virus
auuccaucuacuaag

SEQ ID NO: 3273868 - RNA, 11 nt, Vaccinia virus
agaaaacauua

SEQ ID NO: 3273869 - RNA, 22 nt, Vaccinia virus
aggaaaucccaccgccuuucug

SEQ ID NO: 3273870 - RNA, 21 nt, Vaccinia virus
ucaacaauguuugucauaugu

SEQ ID NO: 3273871 - RNA, 15 nt, Vaccinia virus
cuucuggacauaauu

SEQ ID NO: 3273872 - RNA, 23 nt, Vaccinia virus
uuauuucagucgcugauuaauca

SEQ ID NO: 3273873 - RNA, 11 nt, Vaccinia virus
cuuugcuuucg

SEQ ID NO: 3273874 - RNA, 19 nt, Vaccinia virus
cuaccagccuacauuuugc

SEQ ID NO: 3273875 - RNA, 12 nt, Vaccinia virus
uuauguacuaag

SEQ ID NO: 3273876 - RNA, 16 nt, Vaccinia virus
caugaaucuaaaagaa

SEQ ID NO: 3273877 - RNA, 20 nt, Vaccinia virus
ugauauuucauugacagaua

SEQ ID NO: 3273878 - RNA, 15 nt, Vaccinia virus
uauauucuuacagua

SEQ ID NO: 3273879 - RNA, 12 nt, Vaccinia virus
gaaaaaauagcu

SEQ ID NO: 3273880 - RNA, 17 nt, Vaccinia virus
aacgauaccaucuucug

SEQ ID NO: 3273881 - RNA, 23 nt, Vaccinia virus
uacgucucagaauucuaaaugau

SEQ ID NO: 3273882 - RNA, 21 nt, Vaccinia virus
aauauacagacucuaucgugu

SEQ ID NO: 3273883 - RNA, 17 nt, Vaccinia virus
auguuugggagaauuaa

SEQ ID NO: 3273884 - RNA, 19 nt, Vaccinia virus
aguauaugggcgauauucu

SEQ ID NO: 3273885 - RNA, 16 nt, Vaccinia virus
cucuucaacaucuuug

SEQ ID NO: 3273886 - RNA, 15 nt, Vaccinia virus
uauuuagauacagau

SEQ ID NO: 3273887 - RNA, 16 nt, Vaccinia virus
cuaucuucaucauauu

SEQ ID NO: 3273888 - RNA, 21 nt, Vaccinia virus
auaccaguauaccucaaaaau

SEQ ID NO: 3273889 - RNA, 14 nt, Vaccinia virus
acaacaaaauaaua

SEQ ID NO: 3273890 - RNA, 22 nt, Vaccinia virus
cugguagagaaugauauagaaa

SEQ ID NO: 3273891 - RNA, 13 nt, Vaccinia virus
uaauauuguugau

SEQ ID NO: 3273892 - RNA, 18 nt, Vaccinia virus
uggaaauaucugugaaua

SEQ ID NO: 3273893 - RNA, 22 nt, Vaccinia virus
augauuuuccuucuaaaguaag

SEQ ID NO: 3273894 - RNA, 19 nt, Vaccinia virus
uuaugccguuaucauuaau

SEQ ID NO: 3273895 - RNA, 22 nt, Vaccinia virus
gaagaaggacaacaucuacuuu

SEQ ID NO: 3273896 - RNA, 16 nt, Vaccinia virus
uuguagauuuaucaua

SEQ ID NO: 3273897 - RNA, 13 nt, Vaccinia virus
uauaugcaucaaa

SEQ ID NO: 3273898 - RNA, 22 nt, Vaccinia virus
uaauucuuaucaauaacauauu

SEQ ID NO: 3273899 - RNA, 15 nt, Vaccinia virus
uguuaauacaucacu

SEQ ID NO: 3273900 - RNA, 16 nt, Vaccinia virus
aucaauaacuggcaca

SEQ ID NO: 3273901 - RNA, 15 nt, Vaccinia virus
aauuaugauagaaau

SEQ ID NO: 3273902 - RNA, 21 nt, Vaccinia virus
aaaugaugacuugauagaaua

SEQ ID NO: 3273903 - RNA, 12 nt, Vaccinia virus
uuauucucuuaa

SEQ ID NO: 3273904 - RNA, 14 nt, Vaccinia virus
uauuuugcaucauu

SEQ ID NO: 3273905 - RNA, 13 nt, Vaccinia virus
accaugaaauaua

SEQ ID NO: 3273906 - RNA, 20 nt, Vaccinia virus
gauggaaaguguaaagacaa

SEQ ID NO: 3273907 - RNA, 17 nt, Vaccinia virus
ucuuaccaucuucuuug

SEQ ID NO: 3273908 - RNA, 15 nt, Vaccinia virus
gaaucauaguuuuua

SEQ ID NO: 3273909 - RNA, 14 nt, Vaccinia virus
ucuacucuagauaa

SEQ ID NO: 3273910 - RNA, 14 nt, Vaccinia virus
gaacgauaaacaaa

SEQ ID NO: 3273911 - RNA, 18 nt, Vaccinia virus
cuaauuaaucuaaaaucu

SEQ ID NO: 3273912 - RNA, 15 nt, Vaccinia virus
auccuccuauuacau

SEQ ID NO: 3273913 - RNA, 22 nt, Vaccinia virus
cagauuuuugaaugaaugaaua

SEQ ID NO: 3273914 - RNA, 15 nt, Vaccinia virus
gauacccuacucgau

SEQ ID NO: 3273915 - RNA, 22 nt, Vaccinia virus
uuuaucuuuaacgauaccuaua

SEQ ID NO: 3273916 - RNA, 17 nt, Vaccinia virus
gaauuaggagaacuuau

SEQ ID NO: 3273917 - RNA, 22 nt, Vaccinia virus
auccuuucguaaauuauaauaa

SEQ ID NO: 3273918 - RNA, 17 nt, Vaccinia virus
uuaaauaacucauuuau

SEQ ID NO: 3273919 - RNA, 21 nt, Vaccinia virus
uucagaauacaaucuguauuu

SEQ ID NO: 3273920 - RNA, 16 nt, Vaccinia virus
acaucucgcaauaauc

SEQ ID NO: 3273921 - RNA, 17 nt, Vaccinia virus
ugacuccuauguuuccc

SEQ ID NO: 3273922 - RNA, 21 nt, Vaccinia virus
auugucgcacuauagaugcaa

SEQ ID NO: 3273923 - RNA, 19 nt, Vaccinia virus
aaacuauaauuuugugaaa

SEQ ID NO: 3273924 - RNA, 18 nt, Vaccinia virus
uuuauaauuuuaccaucu

SEQ ID NO: 3273925 - RNA, 21 nt, Vaccinia virus
acauuguuacgucuccaauaa

SEQ ID NO: 3273926 - RNA, 20 nt, Vaccinia virus
ugaaaaguucuaugaaaaac

SEQ ID NO: 3273927 - RNA, 23 nt, Vaccinia virus
gaaguauaucugaguaugaugau

SEQ ID NO: 3273928 - RNA, 17 nt, Vaccinia virus
aauacguucauuaaaaa

SEQ ID NO: 3273929 - RNA, 21 nt, Vaccinia virus
ucagagauuauugucuuauau

SEQ ID NO: 3273930 - RNA, 16 nt, Vaccinia virus
auacauaaagaaaugu

SEQ ID NO: 3273931 - RNA, 20 nt, Vaccinia virus
gacgcuauggcacgaaauau

SEQ ID NO: 3273932 - RNA, 16 nt, Vaccinia virus
guaggguuaaucgaac

SEQ ID NO: 3273933 - RNA, 16 nt, Vaccinia virus
uuccguaucuguauuu

SEQ ID NO: 3273934 - RNA, 18 nt, Vaccinia virus
gaugccgguaaauguuuu

SEQ ID NO: 3273935 - RNA, 16 nt, Vaccinia virus
cacuucuauaguaucu

SEQ ID NO: 3273936 - RNA, 16 nt, Vaccinia virus
auggaguauaaucuuu

SEQ ID NO: 3273937 - RNA, 18 nt, Vaccinia virus
uaguauaugauaauauua

SEQ ID NO: 3273938 - RNA, 14 nt, Vaccinia virus
augacguaaaugua

SEQ ID NO: 3273939 - RNA, 21 nt, Vaccinia virus
agucaucuuauguuuuuaaga

SEQ ID NO: 3273940 - RNA, 13 nt, Vaccinia virus
cuuuaucaagcac

SEQ ID NO: 3273941 - RNA, 15 nt, Vaccinia virus
acuagauacaaaauu

SEQ ID NO: 3273942 - RNA, 12 nt, Vaccinia virus
gaaggacaacau

SEQ ID NO: 3273943 - RNA, 19 nt, Vaccinia virus
ugucguguuccuguuuccu

SEQ ID NO: 3273944 - RNA, 23 nt, Vaccinia virus
uauacgguaucgcgauuagugua

SEQ ID NO: 3273945 - RNA, 18 nt, Vaccinia virus
uguucaaggcaacagaug

SEQ ID NO: 3273946 - RNA, 18 nt, Vaccinia virus
auggauuaaaucguguau

SEQ ID NO: 3273947 - RNA, 13 nt, Vaccinia virus
uagagauggauau

SEQ ID NO: 3273948 - RNA, 22 nt, Vaccinia virus
cuucgauauuagauuuuguauu

SEQ ID NO: 3273949 - RNA, 18 nt, Vaccinia virus
agacggauaagaaauaua

SEQ ID NO: 3273950 - RNA, 23 nt, Vaccinia virus
aucaacggaacauauuuauauaa

SEQ ID NO: 3273951 - RNA, 16 nt, Vaccinia virus
cugcauagaaauaucu

SEQ ID NO: 3273952 - RNA, 21 nt, Vaccinia virus
agagauaauauagagguguuu

SEQ ID NO: 3273953 - RNA, 20 nt, Vaccinia virus
auguuugcaucgugcuuuaa

SEQ ID NO: 3273954 - RNA, 22 nt, Vaccinia virus
augucacaauuuguauuaucca

SEQ ID NO: 3273955 - RNA, 19 nt, Vaccinia virus
cauucuaauauauguauuu

SEQ ID NO: 3273956 - RNA, 16 nt, Vaccinia virus
aaauaucuauaugauu

SEQ ID NO: 3273957 - RNA, 21 nt, Vaccinia virus
auuaguuuccuuuuuauaaaa

SEQ ID NO: 3273958 - RNA, 16 nt, Vaccinia virus
ucaaagauuaauacau

SEQ ID NO: 3273959 - RNA, 15 nt, Vaccinia virus
guauguuuaaacacu

SEQ ID NO: 3273960 - RNA, 21 nt, Vaccinia virus
aauuuccccauugauagaaaa

SEQ ID NO: 3273961 - RNA, 20 nt, Vaccinia virus
cauauuaaacuaauucauuu

SEQ ID NO: 3273962 - RNA, 21 nt, Vaccinia virus
caucgauuuuuagauuucauu

SEQ ID NO: 3273963 - RNA, 20 nt, Vaccinia virus
aauacuuaccccuugaucgu

SEQ ID NO: 3273964 - RNA, 19 nt, Vaccinia virus
cgaacacuauuagaauuaa

SEQ ID NO: 3273965 - RNA, 21 nt, Vaccinia virus
agaauagaugcuauuuauccg

SEQ ID NO: 3273966 - RNA, 17 nt, Vaccinia virus
auuaacagguucucaau

SEQ ID NO: 3273967 - RNA, 17 nt, Vaccinia virus
acaaccgcuacauaauc

SEQ ID NO: 3273968 - RNA, 16 nt, Vaccinia virus
auauaugguuguugau

SEQ ID NO: 3273969 - RNA, 13 nt, Vaccinia virus
gaauauuauaauu

SEQ ID NO: 3273970 - RNA, 17 nt, Vaccinia virus
ucaaccacucgaaaaag

SEQ ID NO: 3273971 - RNA, 18 nt, Vaccinia virus
ggauaccaguuuggaaac

SEQ ID NO: 3273972 - RNA, 18 nt, Vaccinia virus
uagauuuuggugaaauua

SEQ ID NO: 3273973 - RNA, 14 nt, Vaccinia virus
acuacguuuaauaa

SEQ ID NO: 3273974 - RNA, 11 nt, Vaccinia virus
uuuuuuggaau

SEQ ID NO: 3273975 - RNA, 22 nt, Vaccinia virus
uagaauuuauagacgacucauu

SEQ ID NO: 3273976 - RNA, 19 nt, Vaccinia virus
caugaguacuuguacacau

SEQ ID NO: 3273977 - RNA, 15 nt, Vaccinia virus
cgguacaacauucca

SEQ ID NO: 3273978 - RNA, 14 nt, Vaccinia virus
aauacaaaugacua

SEQ ID NO: 3273979 - RNA, 19 nt, Vaccinia virus
auaugcuuuuauuuuugga

SEQ ID NO: 3273980 - RNA, 13 nt, Vaccinia virus
agaaacaaaaagu

SEQ ID NO: 3273981 - RNA, 16 nt, Vaccinia virus
uuuguucuuguagaua

SEQ ID NO: 3273982 - RNA, 17 nt, Vaccinia virus
aacuauuccaauguuua

SEQ ID NO: 3273983 - RNA, 12 nt, Vaccinia virus
uggaaauacuuc

SEQ ID NO: 3273984 - RNA, 16 nt, Vaccinia virus
aauggcugcuucuaua

SEQ ID NO: 3273985 - RNA, 22 nt, Vaccinia virus
aggauggguuccauaacuaaau

SEQ ID NO: 3273986 - RNA, 22 nt, Vaccinia virus
gcacaacaucuaacuauaugau

SEQ ID NO: 3273987 - RNA, 13 nt, Vaccinia virus
aggcuaucaaaug

SEQ ID NO: 3273988 - RNA, 12 nt, Vaccinia virus
uuaaauauuaau

SEQ ID NO: 3273989 - RNA, 18 nt, Vaccinia virus
ccaugauggucauguuua

SEQ ID NO: 3273990 - RNA, 21 nt, Vaccinia virus
guaccgauucuagauacaaga

SEQ ID NO: 3273991 - RNA, 22 nt, Vaccinia virus
acacguguccacauccuuuauu

SEQ ID NO: 3273992 - RNA, 19 nt, Vaccinia virus
ucuacagauauuuuaguuu

SEQ ID NO: 3273993 - RNA, 13 nt, Vaccinia virus
agauuguacuucu

SEQ ID NO: 3273994 - RNA, 20 nt, Vaccinia virus
uuaacuugacuaaauauuca

SEQ ID NO: 3273995 - RNA, 14 nt, Vaccinia virus
ccaagauaucuaua

SEQ ID NO: 3273996 - RNA, 18 nt, Vaccinia virus
caaagauggcugaaauca

SEQ ID NO: 3273997 - RNA, 13 nt, Vaccinia virus
uuugaacaucuug

SEQ ID NO: 3273998 - RNA, 20 nt, Vaccinia virus
uacauguaaugauuuaaaau

SEQ ID NO: 3273999 - RNA, 14 nt, Vaccinia virus
aguuaauaaaaucu

SEQ ID NO: 3274000 - RNA, 14 nt, Vaccinia virus
uaugacaaacauug

SEQ ID NO: 3274001 - RNA, 17 nt, Vaccinia virus
aaguaucaaaucuucua

SEQ ID NO: 3274002 - RNA, 19 nt, Vaccinia virus
agauuauuauggaaaucaa

SEQ ID NO: 3274003 - RNA, 19 nt, Vaccinia virus
cgaacaauaucuuauucca

SEQ ID NO: 3274004 - RNA, 20 nt, Vaccinia virus
uacucuuggucuaauacuga

SEQ ID NO: 3274005 - RNA, 15 nt, Vaccinia virus
uacuauauauaaaau

SEQ ID NO: 3274006 - RNA, 18 nt, Vaccinia virus
augcaucgugaaaagaaa

SEQ ID NO: 3274007 - RNA, 19 nt, Vaccinia virus
auccacaacccauuaaaaa

SEQ ID NO: 3274008 - RNA, 14 nt, Vaccinia virus
aacgccuuuagaaa

SEQ ID NO: 3274009 - RNA, 19 nt, Vaccinia virus
guuaauuaugcaaauuuga

SEQ ID NO: 3274010 - RNA, 16 nt, Vaccinia virus
uaauuuauaauauacu

SEQ ID NO: 3274011 - RNA, 14 nt, Vaccinia virus
auucugcaauauug

SEQ ID NO: 3274012 - RNA, 14 nt, Vaccinia virus
uugaaacuaugucu

SEQ ID NO: 3274013 - RNA, 16 nt, Vaccinia virus
uacacgugcuucggau

SEQ ID NO: 3274014 - RNA, 12 nt, Vaccinia virus
aaugauucucuc

SEQ ID NO: 3274015 - RNA, 15 nt, Vaccinia virus
gucuuaaaguuuauu

SEQ ID NO: 3274016 - RNA, 23 nt, Vaccinia virus
guaucaauaauagcaacauauga

SEQ ID NO: 3274017 - RNA, 21 nt, Vaccinia virus
caaauauucacaagaugaauu

SEQ ID NO: 3274018 - RNA, 20 nt, Vaccinia virus
aaauuauuccuaauuaagaa

SEQ ID NO: 3274019 - RNA, 14 nt, Vaccinia virus
uguuugagaauuaa

SEQ ID NO: 3274020 - RNA, 21 nt, Vaccinia virus
auaaucuugauuguacaccca

SEQ ID NO: 3274021 - RNA, 14 nt, Vaccinia virus
aucgugugucuaua

SEQ ID NO: 3274022 - RNA, 17 nt, Vaccinia virus
caucggguguauucuca

SEQ ID NO: 3274023 - RNA, 11 nt, Vaccinia virus
uuauuaacauc

SEQ ID NO: 3274024 - RNA, 19 nt, Vaccinia virus
ucaaaggaugaaagaaagc

SEQ ID NO: 3274025 - RNA, 13 nt, Vaccinia virus
uaucaacaucuga

SEQ ID NO: 3274026 - RNA, 14 nt, Vaccinia virus
auuuaguuaacaua

SEQ ID NO: 3274027 - RNA, 12 nt, Vaccinia virus
ucauugauuuuu

SEQ ID NO: 3274028 - RNA, 22 nt, Vaccinia virus
auuuauuuuuguacauuaauaa

SEQ ID NO: 3274029 - RNA, 15 nt, Vaccinia virus
uggaaagaaaucuac

SEQ ID NO: 3274030 - RNA, 15 nt, Vaccinia virus
gucauuuguauuuua

SEQ ID NO: 3274031 - RNA, 13 nt, Vaccinia virus
auggaaaggaaau

SEQ ID NO: 3274032 - RNA, 22 nt, Vaccinia virus
guguauuaccccucauaguauu

SEQ ID NO: 3274033 - RNA, 23 nt, Vaccinia virus
aagagauuccugacuuugcauuc

SEQ ID NO: 3274034 - RNA, 13 nt, Vaccinia virus
ugagauucuccau

SEQ ID NO: 3274035 - RNA, 15 nt, Vaccinia virus
ucuuauauacacagu

SEQ ID NO: 3274036 - RNA, 23 nt, Vaccinia virus
aacagcuaucaaaauauguagaa

SEQ ID NO: 3274037 - RNA, 16 nt, Vaccinia virus
ugaaagcgagaaauaa

SEQ ID NO: 3274038 - RNA, 13 nt, Vaccinia virus
auccuauaacuuc

SEQ ID NO: 3274039 - RNA, 19 nt, Vaccinia virus
aaaaauauuuuuauucucu

SEQ ID NO: 3274040 - RNA, 13 nt, Vaccinia virus
uuuuucaugauug

SEQ ID NO: 3274041 - RNA, 17 nt, Vaccinia virus
auacaagaacaacuaga

SEQ ID NO: 3274042 - RNA, 19 nt, Vaccinia virus
aauuaauauguaugauuca

SEQ ID NO: 3274043 - RNA, 17 nt, Vaccinia virus
acuaauacucaauccuu

SEQ ID NO: 3274044 - RNA, 18 nt, Vaccinia virus
auauuucuauuucuauuu

SEQ ID NO: 3274045 - RNA, 20 nt, Vaccinia virus
aauguuguagguuaaaauua

SEQ ID NO: 3274046 - RNA, 21 nt, Vaccinia virus
aucagaaucauacaaugaauu

SEQ ID NO: 3274047 - RNA, 13 nt, Vaccinia virus
uagcaaaauuaac

SEQ ID NO: 3274048 - RNA, 13 nt, Vaccinia virus
aaaauuaguagaa

SEQ ID NO: 3274049 - RNA, 20 nt, Vaccinia virus
uguacuacaaacaggcgaug

SEQ ID NO: 3274050 - RNA, 22 nt, Vaccinia virus
aggacuaucuccgaauuuguuu

SEQ ID NO: 3274051 - RNA, 18 nt, Vaccinia virus
aaacugaaaauauauuga

SEQ ID NO: 3274052 - RNA, 17 nt, Vaccinia virus
ucguacuuuauaucgug

SEQ ID NO: 3274053 - RNA, 14 nt, Vaccinia virus
cacuauuauaacaa

SEQ ID NO: 3274054 - RNA, 16 nt, Vaccinia virus
acuccggauagagaaa

SEQ ID NO: 3274055 - RNA, 21 nt, Vaccinia virus
ucgaucaaaagacuauacauu

SEQ ID NO: 3274056 - RNA, 18 nt, Vaccinia virus
gaugagcauaaacauaau

SEQ ID NO: 3274057 - RNA, 16 nt, Vaccinia virus
uaaauacauuaucaug

SEQ ID NO: 3274058 - RNA, 14 nt, Vaccinia virus
cuucuaucuuuagu

SEQ ID NO: 3274059 - RNA, 15 nt, Vaccinia virus
agucgacagaagaau

SEQ ID NO: 3274060 - RNA, 14 nt, Vaccinia virus
auaaacucagauaa

SEQ ID NO: 3274061 - RNA, 12 nt, Vaccinia virus
caauaugauauc

SEQ ID NO: 3274062 - RNA, 15 nt, Vaccinia virus
uauaaauaacauuua

SEQ ID NO: 3274063 - RNA, 23 nt, Vaccinia virus
uaacagccuguucaaauuuauau

SEQ ID NO: 3274064 - RNA, 19 nt, Vaccinia virus
uccgaaacgauaucaugaa

SEQ ID NO: 3274065 - RNA, 16 nt, Vaccinia virus
acauaucuaacaaugg

SEQ ID NO: 3274066 - RNA, 21 nt, Vaccinia virus
acuaucaguaaguuuuauaga

SEQ ID NO: 3274067 - RNA, 16 nt, Vaccinia virus
guguggguacaaauau

SEQ ID NO: 3274068 - RNA, 14 nt, Vaccinia virus
aauucuaaaugaug

SEQ ID NO: 3274069 - RNA, 15 nt, Vaccinia virus
aauccaaaaaaugaa

SEQ ID NO: 3274070 - RNA, 18 nt, Vaccinia virus
gauaaucugaaaaugaaa

SEQ ID NO: 3274071 - RNA, 22 nt, Vaccinia virus
uuaguauaucaaauacaucuau

SEQ ID NO: 3274072 - RNA, 18 nt, Vaccinia virus
gauaaguuagaucagugu

SEQ ID NO: 3274073 - RNA, 13 nt, Vaccinia virus
ucaucuacaaaaa

SEQ ID NO: 3274074 - RNA, 22 nt, Vaccinia virus
uauucuaucuccaguauuuaca

SEQ ID NO: 3274075 - RNA, 23 nt, Vaccinia virus
auacuucauaaaagaaaauucua

SEQ ID NO: 3274076 - RNA, 16 nt, Vaccinia virus
aaaugcgauacagaca

SEQ ID NO: 3274077 - RNA, 12 nt, Vaccinia virus
acuacuggaaua

SEQ ID NO: 3274078 - RNA, 18 nt, Vaccinia virus
uuauaaugaauauuauua

SEQ ID NO: 3274079 - RNA, 18 nt, Vaccinia virus
guaugccauuuacuuaau

SEQ ID NO: 3274080 - RNA, 14 nt, Vaccinia virus
auaaaucuaucuuu

SEQ ID NO: 3274081 - RNA, 16 nt, Vaccinia virus
ucucaauauuuggauc

SEQ ID NO: 3274082 - RNA, 23 nt, Vaccinia virus
augcgauaguagaguaaacauuu

SEQ ID NO: 3274083 - RNA, 17 nt, Vaccinia virus
auuguauaguuaauaag

SEQ ID NO: 3274084 - RNA, 22 nt, Vaccinia virus
cucucgaaagacguuguacaau

SEQ ID NO: 3274085 - RNA, 18 nt, Vaccinia virus
uuaacaauugucuguaaa

SEQ ID NO: 3274086 - RNA, 22 nt, Vaccinia virus
guauuucguaccuguauguaca

SEQ ID NO: 3274087 - RNA, 19 nt, Vaccinia virus
aacauauucuaugaauuua

SEQ ID NO: 3274088 - RNA, 23 nt, Vaccinia virus
gauauuaucaugaauuagauaua

SEQ ID NO: 3274089 - RNA, 21 nt, Vaccinia virus
auuaugaaaauuauaaugaau

SEQ ID NO: 3274090 - RNA, 20 nt, Vaccinia virus
agacaugguaucaacagaua

SEQ ID NO: 3274091 - RNA, 18 nt, Vaccinia virus
auauaaaaacucuaacau

SEQ ID NO: 3274092 - RNA, 13 nt, Vaccinia virus
auacuaaagaaac

SEQ ID NO: 3274093 - RNA, 20 nt, Vaccinia virus
acguaaauacaaaacagaga

SEQ ID NO: 3274094 - RNA, 21 nt, Vaccinia virus
aucaucguuaggauuugguaa

SEQ ID NO: 3274095 - RNA, 15 nt, Vaccinia virus
cacauaauuauucua

SEQ ID NO: 3274096 - RNA, 16 nt, Vaccinia virus
uuaacaucacuaauau

SEQ ID NO: 3274097 - RNA, 13 nt, Vaccinia virus
cgcauuaaaugau

SEQ ID NO: 3274098 - RNA, 17 nt, Vaccinia virus
auuuguaggaaaaagau

SEQ ID NO: 3274099 - RNA, 20 nt, Vaccinia virus
acaaugaugccaucauagau

SEQ ID NO: 3274100 - RNA, 21 nt, Vaccinia virus
auacagaguauguaaaaaugu

SEQ ID NO: 3274101 - RNA, 11 nt, Vaccinia virus
auacuaucaaa

SEQ ID NO: 3274102 - RNA, 15 nt, Vaccinia virus
gucgucuauauuaac

SEQ ID NO: 3274103 - RNA, 21 nt, Vaccinia virus
guucaacuggagauuauagca

SEQ ID NO: 3274104 - RNA, 19 nt, Vaccinia virus
uuuugaauuguuucuuuua

SEQ ID NO: 3274105 - RNA, 16 nt, Vaccinia virus
aaaaugcagaaaugau

SEQ ID NO: 3274106 - RNA, 14 nt, Vaccinia virus
uccaaucaugugua

SEQ ID NO: 3274107 - RNA, 15 nt, Vaccinia virus
uauuauugacuucgu

SEQ ID NO: 3274108 - RNA, 17 nt, Vaccinia virus
auauucaacauguuuaa

SEQ ID NO: 3274109 - RNA, 15 nt, Vaccinia virus
uauuauuaugaugau

SEQ ID NO: 3274110 - RNA, 21 nt, Vaccinia virus
uaacaugacauuuauucauca

SEQ ID NO: 3274111 - RNA, 13 nt, Vaccinia virus
auggaaaaaugac

SEQ ID NO: 3274112 - RNA, 20 nt, Vaccinia virus
uaucuugaguacgaugacuu

SEQ ID NO: 3274113 - RNA, 19 nt, Vaccinia virus
aauaaagaaaaugcagaaa

SEQ ID NO: 3274114 - RNA, 19 nt, Vaccinia virus
gucuaaaccuucuuauucu

SEQ ID NO: 3274115 - RNA, 15 nt, Vaccinia virus
agaauccgaaauauu

SEQ ID NO: 3274116 - RNA, 21 nt, Vaccinia virus
cagaauucuaaaugaugauau

SEQ ID NO: 3274117 - RNA, 19 nt, Vaccinia virus
cacaacacaaugacuuaua

SEQ ID NO: 3274118 - RNA, 22 nt, Vaccinia virus
uuguuugguuagcauuauuaaa

SEQ ID NO: 3274119 - RNA, 18 nt, Vaccinia virus
ucauauucaucaucaaua

SEQ ID NO: 3274120 - RNA, 14 nt, Vaccinia virus
acucuuauuauaga

SEQ ID NO: 3274121 - RNA, 23 nt, Vaccinia virus
auugaugcaaauagcagauagau

SEQ ID NO: 3274122 - RNA, 22 nt, Vaccinia virus
ugguaguucuuccguggaauca

SEQ ID NO: 3274123 - RNA, 23 nt, Vaccinia virus
aaggcggauguugugaaugacau

SEQ ID NO: 3274124 - RNA, 13 nt, Vaccinia virus
augcaucaaacag

SEQ ID NO: 3274125 - RNA, 14 nt, Vaccinia virus
cgacucgacauuug

SEQ ID NO: 3274126 - RNA, 18 nt, Vaccinia virus
ucauccguggauauuuga

SEQ ID NO: 3274127 - RNA, 15 nt, Vaccinia virus
cgguguaauauuaau

SEQ ID NO: 3274128 - RNA, 15 nt, Vaccinia virus
uauuuuguuauuaua

SEQ ID NO: 3274129 - RNA, 17 nt, Vaccinia virus
agauauggucaaaucaa

SEQ ID NO: 3274130 - RNA, 15 nt, Vaccinia virus
acuucucuaucaaug

SEQ ID NO: 3274131 - RNA, 17 nt, Vaccinia virus
acacucuauaucuagaa

SEQ ID NO: 3274132 - RNA, 14 nt, Vaccinia virus
uuauuccacauaag

SEQ ID NO: 3274133 - RNA, 19 nt, Vaccinia virus
acaaucuuaaugucuguau

SEQ ID NO: 3274134 - RNA, 15 nt, Vaccinia virus
uagaagucaaggaua

SEQ ID NO: 3274135 - RNA, 16 nt, Vaccinia virus
uaugaucuugauuuau

SEQ ID NO: 3274136 - RNA, 16 nt, Vaccinia virus
acuaacuuuaucacaa

SEQ ID NO: 3274137 - RNA, 16 nt, Vaccinia virus
aucuaaacaauaccuc

SEQ ID NO: 3274138 - RNA, 19 nt, Vaccinia virus
aucuaaacgcguuagauaa

SEQ ID NO: 3274139 - RNA, 14 nt, Vaccinia virus
aaauuaauauuucu

SEQ ID NO: 3274140 - RNA, 22 nt, Vaccinia virus
uaaugauguauguuuaaacacu

SEQ ID NO: 3274141 - RNA, 21 nt, Vaccinia virus
ccagaaacuaguucugagaaa

SEQ ID NO: 3274142 - RNA, 13 nt, Vaccinia virus
ucguacauccagg

SEQ ID NO: 3274143 - RNA, 16 nt, Vaccinia virus
aacaaucaacuaaugu

SEQ ID NO: 3274144 - RNA, 14 nt, Vaccinia virus
agaccaauaauaaa

SEQ ID NO: 3274145 - RNA, 22 nt, Vaccinia virus
caugaacacgaugauauagaau

SEQ ID NO: 3274146 - RNA, 22 nt, Vaccinia virus
caucuauuccaaauaaucagaa

SEQ ID NO: 3274147 - RNA, 14 nt, Vaccinia virus
guaauaacauugcu

SEQ ID NO: 3274148 - RNA, 23 nt, Vaccinia virus
aagaaguagcuaauguuguaaac

SEQ ID NO: 3274149 - RNA, 23 nt, Vaccinia virus
agugaauauaucauuaggauuua

SEQ ID NO: 3274150 - RNA, 22 nt, Vaccinia virus
gucacugucuggcaauaaauga

SEQ ID NO: 3274151 - RNA, 17 nt, Vaccinia virus
gauaauauuuguaaugg

SEQ ID NO: 3274152 - RNA, 17 nt, Vaccinia virus
agugaauuccaccauga

SEQ ID NO: 3274153 - RNA, 15 nt, Vaccinia virus
uggaaagaugcuguu

SEQ ID NO: 3274154 - RNA, 19 nt, Vaccinia virus
guuaaaggauauuaugcau

SEQ ID NO: 3274155 - RNA, 16 nt, Vaccinia virus
aaacaucauugcucca

SEQ ID NO: 3274156 - RNA, 19 nt, Vaccinia virus
guuagaugauuauaaagga

SEQ ID NO: 3274157 - RNA, 20 nt, Vaccinia virus
acacuuuguccguaaaacau

SEQ ID NO: 3274158 - RNA, 18 nt, Vaccinia virus
aucaacagaaguuaauaa

SEQ ID NO: 3274159 - RNA, 18 nt, Vaccinia virus
ucaaaacauauaaaucua

SEQ ID NO: 3274160 - RNA, 18 nt, Vaccinia virus
uaccuuucuacaugaaau

SEQ ID NO: 3274161 - RNA, 19 nt, Vaccinia virus
aguuuucucuauucugaaa

SEQ ID NO: 3274162 - RNA, 18 nt, Vaccinia virus
ugaauucucauuuugcau

SEQ ID NO: 3274163 - RNA, 20 nt, Vaccinia virus
auugucuagauaaaauacug

SEQ ID NO: 3274164 - RNA, 18 nt, Vaccinia virus
cgauuguauaguuaauaa

SEQ ID NO: 3274165 - RNA, 12 nt, Vaccinia virus
aaauaucucauc

SEQ ID NO: 3274166 - RNA, 14 nt, Vaccinia virus
cguguacaaaaaug

SEQ ID NO: 3274167 - RNA, 18 nt, Vaccinia virus
uuguauagaaacuguaua

SEQ ID NO: 3274168 - RNA, 18 nt, Vaccinia virus
agagcuuuauuaacuucu

SEQ ID NO: 3274169 - RNA, 14 nt, Vaccinia virus
cauggugauacuug

SEQ ID NO: 3274170 - RNA, 16 nt, Vaccinia virus
aaauacaccaaauaua

SEQ ID NO: 3274171 - RNA, 18 nt, Vaccinia virus
aucauuaucauuuuguaa

SEQ ID NO: 3274172 - RNA, 16 nt, Vaccinia virus
cauuaauuucugauau

SEQ ID NO: 3274173 - RNA, 21 nt, Vaccinia virus
augauucacaauuuacauguu

SEQ ID NO: 3274174 - RNA, 19 nt, Vaccinia virus
auuaacaaauuuuaaacaa

SEQ ID NO: 3274175 - RNA, 11 nt, Vaccinia virus
acgauaaaaga

SEQ ID NO: 3274176 - RNA, 13 nt, Vaccinia virus
ucgugaauacuug

SEQ ID NO: 3274177 - RNA, 21 nt, Vaccinia virus
uacaaucaaaccuauaacauu

SEQ ID NO: 3274178 - RNA, 14 nt, Vaccinia virus
acacugauucagaa

SEQ ID NO: 3274179 - RNA, 22 nt, Vaccinia virus
uagcgucgacaucuauauacua

SEQ ID NO: 3274180 - RNA, 22 nt, Vaccinia virus
aaaacaaauuuguacaugaaga

SEQ ID NO: 3274181 - RNA, 22 nt, Vaccinia virus
uggcggaguaaguguugagcuc

SEQ ID NO: 3274182 - RNA, 16 nt, Vaccinia virus
uucuaucguaguguau

SEQ ID NO: 3274183 - RNA, 20 nt, Vaccinia virus
auuuuaaaauuauuaaacaa

SEQ ID NO: 3274184 - RNA, 12 nt, Vaccinia virus
gugggaugaugu

SEQ ID NO: 3274185 - RNA, 14 nt, Vaccinia virus
acauguuaaaugua

SEQ ID NO: 3274186 - RNA, 20 nt, Vaccinia virus
aucgauuuuuagauuucauu

SEQ ID NO: 3274187 - RNA, 19 nt, Vaccinia virus
accacugucuaaauguaau

SEQ ID NO: 3274188 - RNA, 19 nt, Vaccinia virus
uauaccuuguaauuaaauu

SEQ ID NO: 3274189 - RNA, 10 nt, Vaccinia virus
uauauucucu

SEQ ID NO: 3274190 - RNA, 15 nt, Vaccinia virus
ucgaauacaaauuuu

SEQ ID NO: 3274191 - RNA, 19 nt, Vaccinia virus
auguuucuuuaaaagucaa

SEQ ID NO: 3274192 - RNA, 18 nt, Vaccinia virus
aguauuagucauaaacuu

SEQ ID NO: 3274193 - RNA, 23 nt, Vaccinia virus
caacugauuaaugagaucuucua

SEQ ID NO: 3274194 - RNA, 22 nt, Vaccinia virus
gaaugcggugccauucaugaaa

SEQ ID NO: 3274195 - RNA, 19 nt, Vaccinia virus
uauugacuuaauaggcauc

SEQ ID NO: 3274196 - RNA, 19 nt, Vaccinia virus
cugucugcagccauuuuua

SEQ ID NO: 3274197 - RNA, 19 nt, Vaccinia virus
auucuuaagacacauuucu

SEQ ID NO: 3274198 - RNA, 15 nt, Vaccinia virus
agaauucuaaaugau

SEQ ID NO: 3274199 - RNA, 12 nt, Vaccinia virus
ucuauucaagau

SEQ ID NO: 3274200 - RNA, 19 nt, Vaccinia virus
acgaagaccuaauccauca

SEQ ID NO: 3274201 - RNA, 21 nt, Vaccinia virus
auucaaauguuguuaaaugau

SEQ ID NO: 3274202 - RNA, 17 nt, Vaccinia virus
uacaugauauuaucaug

SEQ ID NO: 3274203 - RNA, 14 nt, Vaccinia virus
cagaaauacuauau

SEQ ID NO: 3274204 - RNA, 14 nt, Vaccinia virus
uaucucuaacaaaa

SEQ ID NO: 3274205 - RNA, 16 nt, Vaccinia virus
auaauaaugaaugcag

SEQ ID NO: 3274206 - RNA, 15 nt, Vaccinia virus
agauacagauguaaa

SEQ ID NO: 3274207 - RNA, 14 nt, Vaccinia virus
uauugucgagcaua

SEQ ID NO: 3274208 - RNA, 22 nt, Vaccinia virus
auuucaacaauaaugagaaugu

SEQ ID NO: 3274209 - RNA, 12 nt, Vaccinia virus
uaauacuaaaua

SEQ ID NO: 3274210 - RNA, 15 nt, Vaccinia virus
ucucuaaaggaugac

SEQ ID NO: 3274211 - RNA, 20 nt, Vaccinia virus
uacucaguugaacagaugau

SEQ ID NO: 3274212 - RNA, 20 nt, Vaccinia virus
augagauuauuaaguauuua

SEQ ID NO: 3274213 - RNA, 16 nt, Vaccinia virus
acaaacuauagaaauu

SEQ ID NO: 3274214 - RNA, 21 nt, Vaccinia virus
uaauuaauucuuuauugucau

SEQ ID NO: 3274215 - RNA, 16 nt, Vaccinia virus
aguauuuuuaccuaau

SEQ ID NO: 3274216 - RNA, 20 nt, Vaccinia virus
uugagcaaucagaaaugaug

SEQ ID NO: 3274217 - RNA, 22 nt, Vaccinia virus
agauacaguuaauaucuauaua

SEQ ID NO: 3274218 - RNA, 15 nt, Vaccinia virus
cuuugcauucugaaa

SEQ ID NO: 3274219 - RNA, 13 nt, Vaccinia virus
uauaguagaugcu

SEQ ID NO: 3274220 - RNA, 16 nt, Vaccinia virus
aucuuuaaucuuacua

SEQ ID NO: 3274221 - RNA, 22 nt, Vaccinia virus
caaaagacuaugggaauauauu

SEQ ID NO: 3274222 - RNA, 20 nt, Vaccinia virus
ucauuuacuaaggaguaaaa

SEQ ID NO: 3274223 - RNA, 15 nt, Vaccinia virus
aacuuuguucauuua

SEQ ID NO: 3274224 - RNA, 15 nt, Vaccinia virus
agguauuaaguuugg

SEQ ID NO: 3274225 - RNA, 19 nt, Vaccinia virus
auuucucguaaaaguagaa

SEQ ID NO: 3274226 - RNA, 16 nt, Vaccinia virus
auacauaccgaaagca

SEQ ID NO: 3274227 - RNA, 19 nt, Vaccinia virus
aauaaacuaaacaaaacug

SEQ ID NO: 3274228 - RNA, 19 nt, Vaccinia virus
aaguuugagauuucauaau

SEQ ID NO: 3274229 - RNA, 18 nt, Vaccinia virus
ugcaaagaacagaauaaa

SEQ ID NO: 3274230 - RNA, 15 nt, Vaccinia virus
uauugagauuucuga

SEQ ID NO: 3274231 - RNA, 18 nt, Vaccinia virus
uagauuuuuaguuacaga

SEQ ID NO: 3274232 - RNA, 11 nt, Vaccinia virus
cauuuaaacau

SEQ ID NO: 3274233 - RNA, 13 nt, Vaccinia virus
caaggaucuucua

SEQ ID NO: 3274234 - RNA, 18 nt, Vaccinia virus
cugacuagcaaauccagc

SEQ ID NO: 3274235 - RNA, 21 nt, Vaccinia virus
guugaucagaaugaauguuua

SEQ ID NO: 3274236 - RNA, 17 nt, Vaccinia virus
auagucgaauacaguau

SEQ ID NO: 3274237 - RNA, 21 nt, Vaccinia virus
agucaacaaugaaaauggaua

SEQ ID NO: 3274238 - RNA, 21 nt, Vaccinia virus
aauugguuuaugauguauaau

SEQ ID NO: 3274239 - RNA, 22 nt, Vaccinia virus
uuaguucaaucuacgaauguau

SEQ ID NO: 3274240 - RNA, 22 nt, Vaccinia virus
cuaauuuauugcaugguaagga

SEQ ID NO: 3274241 - RNA, 14 nt, Vaccinia virus
agugguuaaucuua

SEQ ID NO: 3274242 - RNA, 16 nt, Vaccinia virus
cugaaaaugaaauugu

SEQ ID NO: 3274243 - RNA, 22 nt, Vaccinia virus
agaaauauguauacaugauauu

SEQ ID NO: 3274244 - RNA, 10 nt, Vaccinia virus
aaaauacuua

SEQ ID NO: 3274245 - RNA, 12 nt, Vaccinia virus
aauuuauuucuu

SEQ ID NO: 3274246 - RNA, 20 nt, Vaccinia virus
gcaaacacuuuccugauuua

SEQ ID NO: 3274247 - RNA, 14 nt, Vaccinia virus
uaacaauuaauuag

SEQ ID NO: 3274248 - RNA, 19 nt, Vaccinia virus
uauucuaccauagcaaauc

SEQ ID NO: 3274249 - RNA, 15 nt, Vaccinia virus
uuaauccuagaugau

SEQ ID NO: 3274250 - RNA, 20 nt, Vaccinia virus
aauauauaaguauaauccca

SEQ ID NO: 3274251 - RNA, 19 nt, Vaccinia virus
cucuuugacauauuuugag

SEQ ID NO: 3274252 - RNA, 20 nt, Vaccinia virus
caauggaaugcaaaacccca

SEQ ID NO: 3274253 - RNA, 22 nt, Vaccinia virus
aaucuuggcauauugaucauuu

SEQ ID NO: 3274254 - RNA, 19 nt, Vaccinia virus
uucccuggaguaugagagu

SEQ ID NO: 3274255 - RNA, 20 nt, Vaccinia virus
aucuauauuuaucacagucu

SEQ ID NO: 3274256 - RNA, 15 nt, Vaccinia virus
auuagcauccuuaua

SEQ ID NO: 3274257 - RNA, 17 nt, Vaccinia virus
aauauuucgauaaugaa

SEQ ID NO: 3274258 - RNA, 17 nt, Vaccinia virus
gaaauauaugagaugua

SEQ ID NO: 3274259 - RNA, 15 nt, Vaccinia virus
auucaaugucucuuu

SEQ ID NO: 3274260 - RNA, 12 nt, Vaccinia virus
uuaaucuuuucu

SEQ ID NO: 3274261 - RNA, 20 nt, Vaccinia virus
aguaauggguuauuguggau

SEQ ID NO: 3274262 - RNA, 22 nt, Vaccinia virus
agaauccgcugauggaaacaca

SEQ ID NO: 3274263 - RNA, 14 nt, Vaccinia virus
cauagacuuuaucu

SEQ ID NO: 3274264 - RNA, 11 nt, Vaccinia virus
aauagaaucug

SEQ ID NO: 3274265 - RNA, 18 nt, Vaccinia virus
auuaauaaaggaugugga

SEQ ID NO: 3274266 - RNA, 16 nt, Vaccinia virus
caauagcacaauuguu

SEQ ID NO: 3274267 - RNA, 14 nt, Vaccinia virus
acuuguaauaauug

SEQ ID NO: 3274268 - RNA, 19 nt, Vaccinia virus
aguaacgcguggaaaaagc

SEQ ID NO: 3274269 - RNA, 19 nt, Vaccinia virus
gcaucuauauaaucuuuuu

SEQ ID NO: 3274270 - RNA, 16 nt, Vaccinia virus
aacuaucgauaguaau

SEQ ID NO: 3274271 - RNA, 13 nt, Vaccinia virus
auaaauggagaau

SEQ ID NO: 3274272 - RNA, 15 nt, Vaccinia virus
uaagcuguucaaaau

SEQ ID NO: 3274273 - RNA, 20 nt, Vaccinia virus
acauuuuggcaaauugauua

SEQ ID NO: 3274274 - RNA, 15 nt, Vaccinia virus
agauuguuuucagug

SEQ ID NO: 3274275 - RNA, 22 nt, Vaccinia virus
uuuauuuaaggacuuaacaauu

SEQ ID NO: 3274276 - RNA, 21 nt, Vaccinia virus
aauuuuaagauuuuaaaugua

SEQ ID NO: 3274277 - RNA, 18 nt, Vaccinia virus
uucuggugcuaauuauuc

SEQ ID NO: 3274278 - RNA, 11 nt, Vaccinia virus
aaaacagauga

SEQ ID NO: 3274279 - RNA, 15 nt, Vaccinia virus
accgucauucauuua

SEQ ID NO: 3274280 - RNA, 15 nt, Vaccinia virus
ucaaaguauccucua

SEQ ID NO: 3274281 - RNA, 14 nt, Vaccinia virus
aaucuuuugugaaa

SEQ ID NO: 3274282 - RNA, 11 nt, Vaccinia virus
auggucucaca

SEQ ID NO: 3274283 - RNA, 13 nt, Vaccinia virus
ugacaauacugua

SEQ ID NO: 3274284 - RNA, 13 nt, Vaccinia virus
cuaguuguagaau

SEQ ID NO: 3274285 - RNA, 13 nt, Vaccinia virus
augucauggaaac

SEQ ID NO: 3274286 - RNA, 20 nt, Vaccinia virus
gaaauaaaggcagaaaugca

SEQ ID NO: 3274287 - RNA, 13 nt, Vaccinia virus
auaaccuuuuccu

SEQ ID NO: 3274288 - RNA, 16 nt, Vaccinia virus
agugaaaaguucacau

SEQ ID NO: 3274289 - RNA, 19 nt, Vaccinia virus
gauauuaucgacuaugaau

SEQ ID NO: 3274290 - RNA, 16 nt, Vaccinia virus
ugaucucguguguaca

SEQ ID NO: 3274291 - RNA, 19 nt, Vaccinia virus
uucguaggcacacaaucua

SEQ ID NO: 3274292 - RNA, 18 nt, Vaccinia virus
ucagucuucgaagcaugu

SEQ ID NO: 3274293 - RNA, 21 nt, Vaccinia virus
uucaugauuacggaauuauug

SEQ ID NO: 3274294 - RNA, 20 nt, Vaccinia virus
uagaaaauucaucuaaacaa

SEQ ID NO: 3274295 - RNA, 22 nt, Vaccinia virus
agauauuaucauuagucauguu

SEQ ID NO: 3274296 - RNA, 16 nt, Vaccinia virus
guauuauccaauacag

SEQ ID NO: 3274297 - RNA, 23 nt, Vaccinia virus
auauaguguugcuaucucuugcg

SEQ ID NO: 3274298 - RNA, 17 nt, Vaccinia virus
aucuuuaauagaacucu

SEQ ID NO: 3274299 - RNA, 18 nt, Vaccinia virus
uuucugaauuauuucaua

SEQ ID NO: 3274300 - RNA, 22 nt, Vaccinia virus
cagaauccauauuucuuaaugu

SEQ ID NO: 3274301 - RNA, 10 nt, Vaccinia virus
guaauguuua

SEQ ID NO: 3274302 - RNA, 21 nt, Vaccinia virus
cguauucugaugauauuagaa

SEQ ID NO: 3274303 - RNA, 21 nt, Vaccinia virus
aauuaucaaauacuucaaaau

SEQ ID NO: 3274304 - RNA, 23 nt, Vaccinia virus
aauaauauuugagaguauuggua

SEQ ID NO: 3274305 - RNA, 22 nt, Vaccinia virus
uaaaaucaucauuauaauaggu

SEQ ID NO: 3274306 - RNA, 14 nt, Vaccinia virus
aacaucaaaaaauu

SEQ ID NO: 3274307 - RNA, 22 nt, Vaccinia virus
auguauuauuauagauuuucca

SEQ ID NO: 3274308 - RNA, 14 nt, Vaccinia virus
aucaaaagaaaucu

SEQ ID NO: 3274309 - RNA, 16 nt, Vaccinia virus
gauguauuguuuaguu

SEQ ID NO: 3274310 - RNA, 15 nt, Vaccinia virus
auuugguaaaaugaa

SEQ ID NO: 3274311 - RNA, 19 nt, Vaccinia virus
caaaaagagagucaauguu

SEQ ID NO: 3274312 - RNA, 14 nt, Vaccinia virus
uguaacaaaguuuc

SEQ ID NO: 3274313 - RNA, 16 nt, Vaccinia virus
uauguuucuaaauuuu

SEQ ID NO: 3274314 - RNA, 15 nt, Vaccinia virus
auuaucgcguucaga

SEQ ID NO: 3274315 - RNA, 15 nt, Vaccinia virus
uauuacguuagcauu

SEQ ID NO: 3274316 - RNA, 17 nt, Vaccinia virus
aaucauuccucauaaga

SEQ ID NO: 3274317 - RNA, 16 nt, Vaccinia virus
agaauuuuuauaaauu

SEQ ID NO: 3274318 - RNA, 21 nt, Vaccinia virus
aacaaauucuuuguugaacgu

SEQ ID NO: 3274319 - RNA, 13 nt, Vaccinia virus
uagaaaaacuuua

SEQ ID NO: 3274320 - RNA, 12 nt, Vaccinia virus
caauuacugaua

SEQ ID NO: 3274321 - RNA, 13 nt, Vaccinia virus
uauugaaacugag

SEQ ID NO: 3274322 - RNA, 20 nt, Vaccinia virus
aaaccgaugauuauauguuc

SEQ ID NO: 3274323 - RNA, 17 nt, Vaccinia virus
gauauucguugaugaau

SEQ ID NO: 3274324 - RNA, 17 nt, Vaccinia virus
gauauaucaaaauuaga

SEQ ID NO: 3274325 - RNA, 21 nt, Vaccinia virus
uagaucccggauacuggauau

SEQ ID NO: 3274326 - RNA, 24 nt, Vaccinia virus
uauacaauuguuuguauucauuca

SEQ ID NO: 3274327 - RNA, 17 nt, Vaccinia virus
auaaacauuguuuguau

SEQ ID NO: 3274328 - RNA, 21 nt, Vaccinia virus
gcaauauaucaucuuuucacu

SEQ ID NO: 3274329 - RNA, 12 nt, Vaccinia virus
ugaaaauuggag

SEQ ID NO: 3274330 - RNA, 22 nt, Vaccinia virus
auccacuaugaucaauucugga

SEQ ID NO: 3274331 - RNA, 15 nt, Vaccinia virus
acuucucuaaaugag

SEQ ID NO: 3274332 - RNA, 15 nt, Vaccinia virus
cuauaauauauucua

SEQ ID NO: 3274333 - RNA, 16 nt, Vaccinia virus
gagaaagaagaaauac

SEQ ID NO: 3274334 - RNA, 14 nt, Vaccinia virus
agauucccaaauaa

SEQ ID NO: 3274335 - RNA, 16 nt, Vaccinia virus
acauauauuauuacau

SEQ ID NO: 3274336 - RNA, 18 nt, Vaccinia virus
acucuuucgcuauuucua

SEQ ID NO: 3274337 - RNA, 17 nt, Vaccinia virus
auuaucgacauucaugg

SEQ ID NO: 3274338 - RNA, 14 nt, Vaccinia virus
uacuaaucaauaau

SEQ ID NO: 3274339 - RNA, 23 nt, Vaccinia virus
gauaguuuuuuucauuacuaucu

SEQ ID NO: 3274340 - RNA, 19 nt, Vaccinia virus
guucagaggaugaaauaga

SEQ ID NO: 3274341 - RNA, 22 nt, Vaccinia virus
auaaacauaaguauauaauaaa

SEQ ID NO: 3274342 - RNA, 20 nt, Vaccinia virus
uaucauugauugagaagaag

SEQ ID NO: 3274343 - RNA, 19 nt, Vaccinia virus
uaauuucccaaauacacau

SEQ ID NO: 3274344 - RNA, 20 nt, Vaccinia virus
acacaguaaccaaaaugaaa

SEQ ID NO: 3274345 - RNA, 23 nt, Vaccinia virus
ucauuuaacagauguaguaguau

SEQ ID NO: 3274346 - RNA, 18 nt, Vaccinia virus
agaaauuuagcaacgaua

SEQ ID NO: 3274347 - RNA, 15 nt, Vaccinia virus
uaacugguucaaaau

SEQ ID NO: 3274348 - RNA, 17 nt, Vaccinia virus
uaaugcaggguguauau

SEQ ID NO: 3274349 - RNA, 19 nt, Vaccinia virus
caauugucuuucucuuuua

SEQ ID NO: 3274350 - RNA, 17 nt, Vaccinia virus
uuuguaccuuuguacau

SEQ ID NO: 3274351 - RNA, 18 nt, Vaccinia virus
gaauauuauuaugaugau

SEQ ID NO: 3274352 - RNA, 19 nt, Vaccinia virus
acagaggaacgucauauau

SEQ ID NO: 3274353 - RNA, 19 nt, Vaccinia virus
uaaacucagauaauagcaa

SEQ ID NO: 3274354 - RNA, 21 nt, Vaccinia virus
gucuagaauaucacauacuga

SEQ ID NO: 3274355 - RNA, 15 nt, Vaccinia virus
gcuacaaaauauguu

SEQ ID NO: 3274356 - RNA, 16 nt, Vaccinia virus
uauugaagaugaugug

SEQ ID NO: 3274357 - RNA, 14 nt, Vaccinia virus
ucgaugauguagug

SEQ ID NO: 3274358 - RNA, 19 nt, Vaccinia virus
cagaaucauacaaugaauu

SEQ ID NO: 3274359 - RNA, 20 nt, Vaccinia virus
cauauuaucaccuauugcca

SEQ ID NO: 3274360 - RNA, 13 nt, Vaccinia virus
aauugccaaagau

SEQ ID NO: 3274361 - RNA, 20 nt, Vaccinia virus
aacaucuugauacuuuuucu

SEQ ID NO: 3274362 - RNA, 19 nt, Vaccinia virus
aaugcaggaauuugaauau

SEQ ID NO: 3274363 - RNA, 17 nt, Vaccinia virus
auguugacauguauaua

SEQ ID NO: 3274364 - RNA, 14 nt, Vaccinia virus
uagaucucuagaau

SEQ ID NO: 3274365 - RNA, 21 nt, Vaccinia virus
uauaaguuguuaaaaaaagga

SEQ ID NO: 3274366 - RNA, 19 nt, Vaccinia virus
agaauccaucaguuguuaa

SEQ ID NO: 3274367 - RNA, 23 nt, Vaccinia virus
cuuccugguugguauugcgcuac

SEQ ID NO: 3274368 - RNA, 22 nt, Vaccinia virus
uagaaaacagagauaguaaaua

SEQ ID NO: 3274369 - RNA, 21 nt, Vaccinia virus
ugaguuccuuguuuuugcuaa

SEQ ID NO: 3274370 - RNA, 20 nt, Vaccinia virus
uacauauucuccauaauggu

SEQ ID NO: 3274371 - RNA, 17 nt, Vaccinia virus
auguccauuaaaguuaa

SEQ ID NO: 3274372 - RNA, 17 nt, Vaccinia virus
uacccauggaaaaauag

SEQ ID NO: 3274373 - RNA, 20 nt, Vaccinia virus
ucuacaguaauguccaaauc

SEQ ID NO: 3274374 - RNA, 18 nt, Vaccinia virus
gaugucaaagauuguaca

SEQ ID NO: 3274375 - RNA, 12 nt, Vaccinia virus
gaaaauaauaaa

SEQ ID NO: 3274376 - RNA, 16 nt, Vaccinia virus
acaaccgcuacauaau

SEQ ID NO: 3274377 - RNA, 17 nt, Vaccinia virus
uaaaaaguuuuaacaug

SEQ ID NO: 3274378 - RNA, 16 nt, Vaccinia virus
aacuaucguuggaaaa

SEQ ID NO: 3274379 - RNA, 14 nt, Vaccinia virus
uggaaugauacugu

SEQ ID NO: 3274380 - RNA, 21 nt, Vaccinia virus
aauacuuugguaguauacaag

SEQ ID NO: 3274381 - RNA, 20 nt, Vaccinia virus
agaguaguaucauuaaaucu

SEQ ID NO: 3274382 - RNA, 17 nt, Vaccinia virus
gaacuagauauauuaau

SEQ ID NO: 3274383 - RNA, 18 nt, Vaccinia virus
aucaacaauuacaaauga

SEQ ID NO: 3274384 - RNA, 15 nt, Vaccinia virus
caugucuuagauguu

SEQ ID NO: 3274385 - RNA, 19 nt, Vaccinia virus
uuaaacgauggauuuucca

SEQ ID NO: 3274386 - RNA, 22 nt, Vaccinia virus
gaacacgauuauuauaaaauaa

SEQ ID NO: 3274387 - RNA, 15 nt, Vaccinia virus
caaaagacuauacau

SEQ ID NO: 3274388 - RNA, 12 nt, Vaccinia virus
uggugaaagagu

SEQ ID NO: 3274389 - RNA, 24 nt, Vaccinia virus
uacugauaaagaagaagaucauac

SEQ ID NO: 3274390 - RNA, 20 nt, Vaccinia virus
uauccaacuugacaaaucuu

SEQ ID NO: 3274391 - RNA, 15 nt, Vaccinia virus
uuuucguguuccaaa

SEQ ID NO: 3274392 - RNA, 21 nt, Vaccinia virus
uaauccagaauguacacuauu

SEQ ID NO: 3274393 - RNA, 21 nt, Vaccinia virus
cauuuaaaguacagauuuuag

SEQ ID NO: 3274394 - RNA, 18 nt, Vaccinia virus
aaauguccguuauauaau

SEQ ID NO: 3274395 - RNA, 19 nt, Vaccinia virus
uaucuuuccauuuaucaug

SEQ ID NO: 3274396 - RNA, 16 nt, Vaccinia virus
augauugauuucgaau

SEQ ID NO: 3274397 - RNA, 14 nt, Vaccinia virus
aucaaagaauaugu

SEQ ID NO: 3274398 - RNA, 19 nt, Vaccinia virus
ugaacaauaauuaauucuu

SEQ ID NO: 3274399 - RNA, 22 nt, Vaccinia virus
uucuaugaaaggagagaaugua

SEQ ID NO: 3274400 - RNA, 23 nt, Vaccinia virus
uaagaucuggguauuucuuuucu

SEQ ID NO: 3274401 - RNA, 19 nt, Vaccinia virus
uaucgccggucaucauaag

SEQ ID NO: 3274402 - RNA, 16 nt, Vaccinia virus
cacauauuuuaaugaa

SEQ ID NO: 3274403 - RNA, 23 nt, Vaccinia virus
ugaauaucugcaauauauauuca

SEQ ID NO: 3274404 - RNA, 21 nt, Vaccinia virus
cucucagguacagauuuugaa

SEQ ID NO: 3274405 - RNA, 15 nt, Vaccinia virus
uacuaguuccaacau

SEQ ID NO: 3274406 - RNA, 18 nt, Vaccinia virus
cugucuuucgauguucau

SEQ ID NO: 3274407 - RNA, 16 nt, Vaccinia virus
gcuauaauauauucua

SEQ ID NO: 3274408 - RNA, 17 nt, Vaccinia virus
uccuuggaauugauaga

SEQ ID NO: 3274409 - RNA, 20 nt, Vaccinia virus
uuuaaauauuauauaaacau

SEQ ID NO: 3274410 - RNA, 18 nt, Vaccinia virus
auuuuacgaauaaacgaa

SEQ ID NO: 3274411 - RNA, 20 nt, Vaccinia virus
caauuguuuuuguacauaau

SEQ ID NO: 3274412 - RNA, 20 nt, Vaccinia virus
uaaaacuaucucgacuuauu

SEQ ID NO: 3274413 - RNA, 15 nt, Vaccinia virus
ugacauucaaagauc

SEQ ID NO: 3274414 - RNA, 14 nt, Vaccinia virus
agaaucaauacaaa

SEQ ID NO: 3274415 - RNA, 13 nt, Vaccinia virus
auguauauguuug

SEQ ID NO: 3274416 - RNA, 19 nt, Vaccinia virus
auuaauuuuugugggaagc

SEQ ID NO: 3274417 - RNA, 15 nt, Vaccinia virus
cgguguauuguauuu

SEQ ID NO: 3274418 - RNA, 20 nt, Vaccinia virus
uaauuucuguaaauucauga

SEQ ID NO: 3274419 - RNA, 13 nt, Vaccinia virus
aaaauuauguaaa

SEQ ID NO: 3274420 - RNA, 22 nt, Vaccinia virus
ucauaaaaaaauauauuauuuu

SEQ ID NO: 3274421 - RNA, 18 nt, Vaccinia virus
aagccuuaugcauccaaa

SEQ ID NO: 3274422 - RNA, 18 nt, Vaccinia virus
uuguaaagaaauuauuuu

SEQ ID NO: 3274423 - RNA, 15 nt, Vaccinia virus
cuacaguaaugucca

SEQ ID NO: 3274424 - RNA, 17 nt, Vaccinia virus
acaaauauacuuuauca

SEQ ID NO: 3274425 - RNA, 19 nt, Vaccinia virus
cauaaaucaucuugauacu

SEQ ID NO: 3274426 - RNA, 21 nt, Vaccinia virus
aauaucauuaacgauauccaa

SEQ ID NO: 3274427 - RNA, 16 nt, Vaccinia virus
uuagcguacacauuuu

SEQ ID NO: 3274428 - RNA, 20 nt, Vaccinia virus
caaucauuuauugacaauaa

SEQ ID NO: 3274429 - RNA, 16 nt, Vaccinia virus
uuucucaaagauguua

SEQ ID NO: 3274430 - RNA, 15 nt, Vaccinia virus
aaauuuaaaaugaua

SEQ ID NO: 3274431 - RNA, 19 nt, Vaccinia virus
gaccaaauauauuauuaau

SEQ ID NO: 3274432 - RNA, 15 nt, Vaccinia virus
ucaagaguggagaau

SEQ ID NO: 3274433 - RNA, 20 nt, Vaccinia virus
guugagcuaauuuuuguaaa

SEQ ID NO: 3274434 - RNA, 23 nt, Vaccinia virus
uacgcauuuucaaaauacauguc

SEQ ID NO: 3274435 - RNA, 14 nt, Vaccinia virus
auauuauuaaauca

SEQ ID NO: 3274436 - RNA, 21 nt, Vaccinia virus
gauacacuagacauuuuuuaa

SEQ ID NO: 3274437 - RNA, 15 nt, Vaccinia virus
agagugauaauauau

SEQ ID NO: 3274438 - RNA, 14 nt, Vaccinia virus
ugcaaagucuaaau

SEQ ID NO: 3274439 - RNA, 14 nt, Vaccinia virus
augaguauauguau

SEQ ID NO: 3274440 - RNA, 17 nt, Vaccinia virus
uucuucaauaaaaugag

SEQ ID NO: 3274441 - RNA, 20 nt, Vaccinia virus
uuaacaccuccacaguuuuu

SEQ ID NO: 3274442 - RNA, 14 nt, Vaccinia virus
cuaauauauucuua

SEQ ID NO: 3274443 - RNA, 19 nt, Vaccinia virus
guguccguauaccaacaug

SEQ ID NO: 3274444 - RNA, 13 nt, Vaccinia virus
uuuaauaaacuga

SEQ ID NO: 3274445 - RNA, 23 nt, Vaccinia virus
aauagcgcuuaaucucaaaauau

SEQ ID NO: 3274446 - RNA, 20 nt, Vaccinia virus
uacaguguaugguacuagau

SEQ ID NO: 3274447 - RNA, 16 nt, Vaccinia virus
aauacaaaaguucaua

SEQ ID NO: 3274448 - RNA, 19 nt, Vaccinia virus
uguaaaugauuuuguagau

SEQ ID NO: 3274449 - RNA, 13 nt, Vaccinia virus
agauuaucaaaau

SEQ ID NO: 3274450 - RNA, 12 nt, Vaccinia virus
cauuuaauuaca

SEQ ID NO: 3274451 - RNA, 11 nt, Vaccinia virus
ccaaaaugaau

SEQ ID NO: 3274452 - RNA, 21 nt, Vaccinia virus
uauaucauccauguacuugcu

SEQ ID NO: 3274453 - RNA, 21 nt, Vaccinia virus
auaaucuucucuccuguuaau

SEQ ID NO: 3274454 - RNA, 23 nt, Vaccinia virus
gacguugccagaaaauccuguaa

SEQ ID NO: 3274455 - RNA, 20 nt, Vaccinia virus
auccaucuguauuaaagaua

SEQ ID NO: 3274456 - RNA, 15 nt, Vaccinia virus
caaacauacaucuau

SEQ ID NO: 3274457 - RNA, 14 nt, Vaccinia virus
guaucauuaaacau

SEQ ID NO: 3274458 - RNA, 22 nt, Vaccinia virus
gauaacuacaauauuucaucau

SEQ ID NO: 3274459 - RNA, 18 nt, Vaccinia virus
auaaacuaacauuguuaa

SEQ ID NO: 3274460 - RNA, 19 nt, Vaccinia virus
uuucuacccauaaguuauc

SEQ ID NO: 3274461 - RNA, 18 nt, Vaccinia virus
aaguuacuuaaaaugguu

SEQ ID NO: 3274462 - RNA, 16 nt, Vaccinia virus
uacuauuuauuucuau

SEQ ID NO: 3274463 - RNA, 14 nt, Vaccinia virus
aauugucuguaaac

SEQ ID NO: 3274464 - RNA, 23 nt, Vaccinia virus
cauaaaaaaauauauuauuuuua

SEQ ID NO: 3274465 - RNA, 12 nt, Vaccinia virus
uauuacuuuagu

SEQ ID NO: 3274466 - RNA, 13 nt, Vaccinia virus
uuauuaauucucu

SEQ ID NO: 3274467 - RNA, 17 nt, Vaccinia virus
cugccauuuuagagauu

SEQ ID NO: 3274468 - RNA, 22 nt, Vaccinia virus
auaaacauaauaaacaaaauua

SEQ ID NO: 3274469 - RNA, 20 nt, Vaccinia virus
gauucaacaaugucgagaua

SEQ ID NO: 3274470 - RNA, 20 nt, Vaccinia virus
uauugauaaagaucuaaaaa

SEQ ID NO: 3274471 - RNA, 13 nt, Vaccinia virus
gggaaaagucaaa

SEQ ID NO: 3274472 - RNA, 14 nt, Vaccinia virus
caaugaauuaacuu

SEQ ID NO: 3274473 - RNA, 19 nt, Vaccinia virus
acaaucauccggauauucu

SEQ ID NO: 3274474 - RNA, 12 nt, Vaccinia virus
gaccguguuucu

SEQ ID NO: 3274475 - RNA, 14 nt, Vaccinia virus
ggacaccacuaucu

SEQ ID NO: 3274476 - RNA, 17 nt, Vaccinia virus
aaguuaagaagauaccu

SEQ ID NO: 3274477 - RNA, 14 nt, Vaccinia virus
auauucuuucuugu

SEQ ID NO: 3274478 - RNA, 18 nt, Vaccinia virus
cguuaauaguacuacaau

SEQ ID NO: 3274479 - RNA, 23 nt, Vaccinia virus
aguauacuaccuguuauauuucu

SEQ ID NO: 3274480 - RNA, 23 nt, Vaccinia virus
uauacagugaacacacaauaagc

SEQ ID NO: 3274481 - RNA, 16 nt, Vaccinia virus
cuuaucguugaagacu

SEQ ID NO: 3274482 - RNA, 20 nt, Vaccinia virus
auaaaaauguuuuuguuuaa

SEQ ID NO: 3274483 - RNA, 20 nt, Vaccinia virus
uuggauaggcugucugcugg

SEQ ID NO: 3274484 - RNA, 13 nt, Vaccinia virus
aaaagauacguac

SEQ ID NO: 3274485 - RNA, 21 nt, Vaccinia virus
cauacaugaaaugaucucuau

SEQ ID NO: 3274486 - RNA, 17 nt, Vaccinia virus
cuagaucaagaaacauu

SEQ ID NO: 3274487 - RNA, 17 nt, Vaccinia virus
auuuaauacguucauua

SEQ ID NO: 3274488 - RNA, 16 nt, Vaccinia virus
aaaguuaguacagaag

SEQ ID NO: 3274489 - RNA, 15 nt, Vaccinia virus
caucgaagagcauuu

SEQ ID NO: 3274490 - RNA, 16 nt, Vaccinia virus
uaaacuguuuguauaa

SEQ ID NO: 3274491 - RNA, 19 nt, Vaccinia virus
cagaaauggugauuuugag

SEQ ID NO: 3274492 - RNA, 14 nt, Vaccinia virus
agaauaucucuaac

SEQ ID NO: 3274493 - RNA, 20 nt, Vaccinia virus
aucuucaucuaccaaagaaa

SEQ ID NO: 3274494 - RNA, 21 nt, Vaccinia virus
aguuuucagaagauaauuauc

SEQ ID NO: 3274495 - RNA, 17 nt, Vaccinia virus
aucgcuaaucaaaacua

SEQ ID NO: 3274496 - RNA, 23 nt, Vaccinia virus
uuuaauuuuguuauaguagauau

SEQ ID NO: 3274497 - RNA, 19 nt, Vaccinia virus
uggaauagaugaaggaaua

SEQ ID NO: 3274498 - RNA, 18 nt, Vaccinia virus
acucauaagaaagagaau

SEQ ID NO: 3274499 - RNA, 16 nt, Vaccinia virus
acuaucugauaagaua

SEQ ID NO: 3274500 - RNA, 18 nt, Vaccinia virus
aaccugauuauauagaua

SEQ ID NO: 3274501 - RNA, 14 nt, Vaccinia virus
uacuaaaauuccua

SEQ ID NO: 3274502 - RNA, 21 nt, Vaccinia virus
aucuauuaaacgaauaaaaga

SEQ ID NO: 3274503 - RNA, 17 nt, Vaccinia virus
aggagaaggaaaaugaa

SEQ ID NO: 3274504 - RNA, 20 nt, Vaccinia virus
aaugcgaggaaauguauaau

SEQ ID NO: 3274505 - RNA, 19 nt, Vaccinia virus
gucuaucgccuuagauacu

SEQ ID NO: 3274506 - RNA, 20 nt, Vaccinia virus
guuucugucaacaauguuug

SEQ ID NO: 3274507 - RNA, 22 nt, Vaccinia virus
caucgagguaaccaccucucug

SEQ ID NO: 3274508 - RNA, 22 nt, Vaccinia virus
aauggcaauaacuaaaaaugua

SEQ ID NO: 3274509 - RNA, 18 nt, Vaccinia virus
uaucuucauagaauacua

SEQ ID NO: 3274510 - RNA, 18 nt, Vaccinia virus
ucucuuaguaaguuuauu

SEQ ID NO: 3274511 - RNA, 13 nt, Vaccinia virus
acauuauaauaau

SEQ ID NO: 3274512 - RNA, 23 nt, Vaccinia virus
acacaaguugauaaaauguugau

SEQ ID NO: 3274513 - RNA, 19 nt, Vaccinia virus
aguuaugagucaauuggua

SEQ ID NO: 3274514 - RNA, 21 nt, Vaccinia virus
cuuagacaagcggguaaauga

SEQ ID NO: 3274515 - RNA, 14 nt, Vaccinia virus
auuacaaaccuguc

SEQ ID NO: 3274516 - RNA, 14 nt, Vaccinia virus
uuguacaaauuccu

SEQ ID NO: 3274517 - RNA, 23 nt, Vaccinia virus
cuuuuuuuagagaugaaaaauuu

SEQ ID NO: 3274518 - RNA, 21 nt, Vaccinia virus
aucuuuauaagagcuacuaac

SEQ ID NO: 3274519 - RNA, 12 nt, Vaccinia virus
cugucugcuggc

SEQ ID NO: 3274520 - RNA, 17 nt, Vaccinia virus
auccuucagaauacaau

SEQ ID NO: 3274521 - RNA, 17 nt, Vaccinia virus
auuacaacaacauauga

SEQ ID NO: 3274522 - RNA, 17 nt, Vaccinia virus
aguucauaaaaauaaua

SEQ ID NO: 3274523 - RNA, 19 nt, Vaccinia virus
cuuaaaauauaaugauaua

SEQ ID NO: 3274524 - RNA, 12 nt, Vaccinia virus
caaaaugauaua

SEQ ID NO: 3274525 - RNA, 12 nt, Vaccinia virus
acugucuaaaug

SEQ ID NO: 3274526 - RNA, 21 nt, Vaccinia virus
gaacacacgaugaaaauguac

SEQ ID NO: 3274527 - RNA, 21 nt, Vaccinia virus
uucaucagauuauuuaacaau

SEQ ID NO: 3274528 - RNA, 13 nt, Vaccinia virus
auaauuuaauaau

SEQ ID NO: 3274529 - RNA, 22 nt, Vaccinia virus
uaaacauaaauauccauuggaa

SEQ ID NO: 3274530 - RNA, 23 nt, Vaccinia virus
uacucuauagucagaauuuucau

SEQ ID NO: 3274531 - RNA, 13 nt, Vaccinia virus
uagcuguuuucau

SEQ ID NO: 3274532 - RNA, 22 nt, Vaccinia virus
cauauugaugugucuguuuaua

SEQ ID NO: 3274533 - RNA, 13 nt, Vaccinia virus
aaaaaaauaaaua

SEQ ID NO: 3274534 - RNA, 22 nt, Vaccinia virus
cuguaaaaacaaauuuguacau

SEQ ID NO: 3274535 - RNA, 17 nt, Vaccinia virus
uguaucauauucaacau

SEQ ID NO: 3274536 - RNA, 14 nt, Vaccinia virus
uuaccaacacaaag

SEQ ID NO: 3274537 - RNA, 13 nt, Vaccinia virus
cauacuauguuuu

SEQ ID NO: 3274538 - RNA, 15 nt, Vaccinia virus
aguaucaugaacucu

SEQ ID NO: 3274539 - RNA, 9 nt, Vaccinia virus
cauuucagu

SEQ ID NO: 3274540 - RNA, 17 nt, Vaccinia virus
uuauggagcaaacauua

SEQ ID NO: 3274541 - RNA, 23 nt, Vaccinia virus
cuagauauguauuuaauaucaaa

SEQ ID NO: 3274542 - RNA, 18 nt, Vaccinia virus
gacaccuaaaaagaaugu

SEQ ID NO: 3274543 - RNA, 22 nt, Vaccinia virus
cggaguaaguguugagcucccu

SEQ ID NO: 3274544 - RNA, 18 nt, Vaccinia virus
aauacguuagguauguac

SEQ ID NO: 3274545 - RNA, 14 nt, Vaccinia virus
uuucuagacaucuu

SEQ ID NO: 3274546 - RNA, 16 nt, Vaccinia virus
uuacacauaaacaucg

SEQ ID NO: 3274547 - RNA, 21 nt, Vaccinia virus
ugaaacgugucacaacuuauc

SEQ ID NO: 3274548 - RNA, 13 nt, Vaccinia virus
aaaauauauucua

SEQ ID NO: 3274549 - RNA, 14 nt, Vaccinia virus
caugaccuucuuca

SEQ ID NO: 3274550 - RNA, 21 nt, Vaccinia virus
aaaucagauaucgauguuaua

SEQ ID NO: 3274551 - RNA, 19 nt, Vaccinia virus
gguaauagauuuuucauau

SEQ ID NO: 3274552 - RNA, 20 nt, Vaccinia virus
ugaaucgauaacucuauuca

SEQ ID NO: 3274553 - RNA, 16 nt, Vaccinia virus
guauaucuauauuaac

SEQ ID NO: 3274554 - RNA, 14 nt, Vaccinia virus
auuuuaucaaacau

SEQ ID NO: 3274555 - RNA, 23 nt, Vaccinia virus
ugacaucauacuagauaaaucgu

SEQ ID NO: 3274556 - RNA, 22 nt, Vaccinia virus
auacgaauaucguucucuaaau

SEQ ID NO: 3274557 - RNA, 16 nt, Vaccinia virus
guuauaaacgggugua

SEQ ID NO: 3274558 - RNA, 19 nt, Vaccinia virus
auauuugagaguauuggua

SEQ ID NO: 3274559 - RNA, 22 nt, Vaccinia virus
cucagauucaguuucucaucuu

SEQ ID NO: 3274560 - RNA, 17 nt, Vaccinia virus
ugagauguuuauauguu

SEQ ID NO: 3274561 - RNA, 20 nt, Vaccinia virus
auuauaaugaauauuauuau

SEQ ID NO: 3274562 - RNA, 14 nt, Vaccinia virus
uauuuuuuaugaua

SEQ ID NO: 3274563 - RNA, 22 nt, Vaccinia virus
cauuggaguugauaauaauaca

SEQ ID NO: 3274564 - RNA, 23 nt, Vaccinia virus
agaaaacucguuauuaacuaugu

SEQ ID NO: 3274565 - RNA, 18 nt, Vaccinia virus
agaauccaucaaaaaugu

SEQ ID NO: 3274566 - RNA, 18 nt, Vaccinia virus
aucugauaauauuaaaaa

SEQ ID NO: 3274567 - RNA, 12 nt, Vaccinia virus
ccucaaauguag

SEQ ID NO: 3274568 - RNA, 12 nt, Vaccinia virus
auuuaaacgaag

SEQ ID NO: 3274569 - RNA, 18 nt, Vaccinia virus
aauaugagaaugaauaug

SEQ ID NO: 3274570 - RNA, 14 nt, Vaccinia virus
auaacaguaucuga

SEQ ID NO: 3274571 - RNA, 15 nt, Vaccinia virus
acgucaucaaaaaua

SEQ ID NO: 3274572 - RNA, 19 nt, Vaccinia virus
gaguauuaaccaugaaaga

SEQ ID NO: 3274573 - RNA, 17 nt, Vaccinia virus
gaugagguaaaaaauaa

SEQ ID NO: 3274574 - RNA, 19 nt, Vaccinia virus
gucaacggaccccaacauc

SEQ ID NO: 3274575 - RNA, 15 nt, Vaccinia virus
aguauggaauacaua

SEQ ID NO: 3274576 - RNA, 22 nt, Vaccinia virus
agcauccccuuucaauaguucu

SEQ ID NO: 3274577 - RNA, 20 nt, Vaccinia virus
ucgugcagaggauaguuguu

SEQ ID NO: 3274578 - RNA, 18 nt, Vaccinia virus
gucggaaaucuuaaccaa

SEQ ID NO: 3274579 - RNA, 17 nt, Vaccinia virus
cgaauaaagugaacaau

SEQ ID NO: 3274580 - RNA, 16 nt, Vaccinia virus
uagauuucgaaaauac

SEQ ID NO: 3274581 - RNA, 17 nt, Vaccinia virus
ucaugagauguguauac

SEQ ID NO: 3274582 - RNA, 17 nt, Vaccinia virus
cacacacgauuaauuuu

SEQ ID NO: 3274583 - RNA, 21 nt, Vaccinia virus
aaauccuguaauauuuuuagu

SEQ ID NO: 3274584 - RNA, 17 nt, Vaccinia virus
ugaugauuauggagaac

SEQ ID NO: 3274585 - RNA, 18 nt, Vaccinia virus
agaacagaccaaauauau

SEQ ID NO: 3274586 - RNA, 22 nt, Vaccinia virus
aaauaggaguuagaauaauaau

SEQ ID NO: 3274587 - RNA, 18 nt, Vaccinia virus
cgaugaucaaugacgaua

SEQ ID NO: 3274588 - RNA, 20 nt, Vaccinia virus
accucuuauuggucagaaau

SEQ ID NO: 3274589 - RNA, 15 nt, Vaccinia virus
gaaauguauaaacua

SEQ ID NO: 3274590 - RNA, 23 nt, Vaccinia virus
caaauccuucauucauuagauaa

SEQ ID NO: 3274591 - RNA, 22 nt, Vaccinia virus
acauauuuuagaacagaaauac

SEQ ID NO: 3274592 - RNA, 15 nt, Vaccinia virus
uagaaugaagaaugc

SEQ ID NO: 3274593 - RNA, 21 nt, Vaccinia virus
auuacacuacauuuuuaucau

SEQ ID NO: 3274594 - RNA, 14 nt, Vaccinia virus
cugugaauacuuua

SEQ ID NO: 3274595 - RNA, 13 nt, Vaccinia virus
cugaugaaacauu

SEQ ID NO: 3274596 - RNA, 23 nt, Vaccinia virus
acguaucaccaacggaaauggua

SEQ ID NO: 3274597 - RNA, 16 nt, Vaccinia virus
accauuaauaggaaaa

SEQ ID NO: 3274598 - RNA, 15 nt, Vaccinia virus
guacaucuugacauu

SEQ ID NO: 3274599 - RNA, 17 nt, Vaccinia virus
acaaacaacuaggaaau

SEQ ID NO: 3274600 - RNA, 21 nt, Vaccinia virus
aucagcauguagacaaaauga

SEQ ID NO: 3274601 - RNA, 13 nt, Vaccinia virus
uuauuucuaaaau

SEQ ID NO: 3274602 - RNA, 13 nt, Vaccinia virus
aaucauuuaucau

SEQ ID NO: 3274603 - RNA, 18 nt, Vaccinia virus
guaauuauaguauaaugu

SEQ ID NO: 3274604 - RNA, 19 nt, Vaccinia virus
aauuuguccacguucuuua

SEQ ID NO: 3274605 - RNA, 23 nt, Vaccinia virus
caaauuuuuucuuuaauauuuua

SEQ ID NO: 3274606 - RNA, 23 nt, Vaccinia virus
uguuugucugagggguucgucua

SEQ ID NO: 3274607 - RNA, 21 nt, Vaccinia virus
auuuuaucgauucuaaugaau

SEQ ID NO: 3274608 - RNA, 22 nt, Vaccinia virus
gacgaguuucggcacauauuaa

SEQ ID NO: 3274609 - RNA, 15 nt, Vaccinia virus
caacggagauacauu

SEQ ID NO: 3274610 - RNA, 14 nt, Vaccinia virus
aaacugugaauguc

SEQ ID NO: 3274611 - RNA, 14 nt, Vaccinia virus
cugauuuauguuuu

SEQ ID NO: 3274612 - RNA, 22 nt, Vaccinia virus
cuaaucuaaacgcguuagauaa

SEQ ID NO: 3274613 - RNA, 13 nt, Vaccinia virus
auuuguucuugua

SEQ ID NO: 3274614 - RNA, 15 nt, Vaccinia virus
cuaaacaagcuaucu

SEQ ID NO: 3274615 - RNA, 19 nt, Vaccinia virus
uacaguaguaauuaaugaa

SEQ ID NO: 3274616 - RNA, 15 nt, Vaccinia virus
uaaaggaugaguaca

SEQ ID NO: 3274617 - RNA, 18 nt, Vaccinia virus
cuagacgauauagugaaa

SEQ ID NO: 3274618 - RNA, 12 nt, Vaccinia virus
agcauacucuau

SEQ ID NO: 3274619 - RNA, 21 nt, Vaccinia virus
augauaauaggaauggauaau

SEQ ID NO: 3274620 - RNA, 19 nt, Vaccinia virus
cuaauaugaggaaaaugau

SEQ ID NO: 3274621 - RNA, 14 nt, Vaccinia virus
aagaaauuaauaga

SEQ ID NO: 3274622 - RNA, 12 nt, Vaccinia virus
ucaccaauaaaa

SEQ ID NO: 3274623 - RNA, 17 nt, Vaccinia virus
auacagaaggaaacuuc

SEQ ID NO: 3274624 - RNA, 13 nt, Vaccinia virus
uuuuguacauaau

SEQ ID NO: 3274625 - RNA, 22 nt, Vaccinia virus
acauaaauaauucuagaggaga

SEQ ID NO: 3274626 - RNA, 22 nt, Vaccinia virus
cugguaacuauauucuuagaaa

SEQ ID NO: 3274627 - RNA, 13 nt, Vaccinia virus
acuuuuuacuaau

SEQ ID NO: 3274628 - RNA, 22 nt, Vaccinia virus
agacuacuuauucuauuuuacu

SEQ ID NO: 3274629 - RNA, 15 nt, Vaccinia virus
uaaauuuauaauguu

SEQ ID NO: 3274630 - RNA, 21 nt, Vaccinia virus
aaauaacgucuucuauguauu

SEQ ID NO: 3274631 - RNA, 23 nt, Vaccinia virus
aacuuuaaauaauuuacaaaaau

SEQ ID NO: 3274632 - RNA, 14 nt, Vaccinia virus
uaaaacagauuucu

SEQ ID NO: 3274633 - RNA, 14 nt, Vaccinia virus
uuauuguuugggua

SEQ ID NO: 3274634 - RNA, 14 nt, Vaccinia virus
aauuuccaucucua

SEQ ID NO: 3274635 - RNA, 10 nt, Vaccinia virus
acaucuaucu

SEQ ID NO: 3274636 - RNA, 20 nt, Vaccinia virus
auaugucucgcauaaacauu

SEQ ID NO: 3274637 - RNA, 21 nt, Vaccinia virus
cauguguuucccaaacaaaau

SEQ ID NO: 3274638 - RNA, 23 nt, Vaccinia virus
cuagauuaauuuuugugggaagc

SEQ ID NO: 3274639 - RNA, 13 nt, Vaccinia virus
uaucuucuaaaaa

SEQ ID NO: 3274640 - RNA, 22 nt, Vaccinia virus
uggaguugauucauaacgaaaa

SEQ ID NO: 3274641 - RNA, 18 nt, Vaccinia virus
uaaaucagaauguuacag

SEQ ID NO: 3274642 - RNA, 15 nt, Vaccinia virus
uuauguaaaacauuu

SEQ ID NO: 3274643 - RNA, 16 nt, Vaccinia virus
aaucucuaaagucacu

SEQ ID NO: 3274644 - RNA, 17 nt, Vaccinia virus
uaguauuugagaaauau

SEQ ID NO: 3274645 - RNA, 16 nt, Vaccinia virus
aaaauuuaagagaaug

SEQ ID NO: 3274646 - RNA, 12 nt, Vaccinia virus
ucaaauaugaaa

SEQ ID NO: 3274647 - RNA, 19 nt, Vaccinia virus
guauaacacacaugucuua

SEQ ID NO: 3274648 - RNA, 16 nt, Vaccinia virus
auauuucuauuucuau

SEQ ID NO: 3274649 - RNA, 18 nt, Vaccinia virus
auauugcaccagaauuaa

SEQ ID NO: 3274650 - RNA, 19 nt, Vaccinia virus
uaauauucccagaaaagau

SEQ ID NO: 3274651 - RNA, 12 nt, Vaccinia virus
auguaaaacaaa

SEQ ID NO: 3274652 - RNA, 18 nt, Vaccinia virus
uuuuagaaauguuauaua

SEQ ID NO: 3274653 - RNA, 15 nt, Vaccinia virus
aggacgguauaugua

SEQ ID NO: 3274654 - RNA, 21 nt, Vaccinia virus
auuaaguucuggcaauguuuc

SEQ ID NO: 3274655 - RNA, 21 nt, Vaccinia virus
caucaaccuuccgacuaaaga

SEQ ID NO: 3274656 - RNA, 19 nt, Vaccinia virus
aguuucuguaaugauggac

SEQ ID NO: 3274657 - RNA, 17 nt, Vaccinia virus
uacauucuuuuugcugu

SEQ ID NO: 3274658 - RNA, 17 nt, Vaccinia virus
guuauaagauuacuuau

SEQ ID NO: 3274659 - RNA, 22 nt, Vaccinia virus
gugcuauuagaauuuacaaaac

SEQ ID NO: 3274660 - RNA, 15 nt, Vaccinia virus
gccuuuuuauacaug

SEQ ID NO: 3274661 - RNA, 13 nt, Vaccinia virus
gcauuaauacagu

SEQ ID NO: 3274662 - RNA, 16 nt, Vaccinia virus
ugauuaauaugugaca

SEQ ID NO: 3274663 - RNA, 16 nt, Vaccinia virus
acauauucuaugaauu

SEQ ID NO: 3274664 - RNA, 17 nt, Vaccinia virus
gucuacuggaugaagau

SEQ ID NO: 3274665 - RNA, 15 nt, Vaccinia virus
acaccucuacauaac

SEQ ID NO: 3274666 - RNA, 22 nt, Vaccinia virus
uauauagcuauucuucuuuaaa

SEQ ID NO: 3274667 - RNA, 19 nt, Vaccinia virus
aaagacagcgacaucaaga

SEQ ID NO: 3274668 - RNA, 21 nt, Vaccinia virus
agcacuacgcaauaugaucac

SEQ ID NO: 3274669 - RNA, 18 nt, Vaccinia virus
cuuuuguggaauuuccca

SEQ ID NO: 3274670 - RNA, 14 nt, Vaccinia virus
aaaauuuugaucau

SEQ ID NO: 3274671 - RNA, 14 nt, Vaccinia virus
ugaaauaaagucau

SEQ ID NO: 3274672 - RNA, 18 nt, Vaccinia virus
cuauaaaauaaaaugagu

SEQ ID NO: 3274673 - RNA, 15 nt, Vaccinia virus
aaagguauacgaaug

SEQ ID NO: 3274674 - RNA, 12 nt, Vaccinia virus
uauauuauuaca

SEQ ID NO: 3274675 - RNA, 20 nt, Vaccinia virus
uguugugucaguuuauaaua

SEQ ID NO: 3274676 - RNA, 14 nt, Vaccinia virus
aucauaccuccauc

SEQ ID NO: 3274677 - RNA, 15 nt, Vaccinia virus
aguucauuaucugaa

SEQ ID NO: 3274678 - RNA, 13 nt, Vaccinia virus
auacaucuaaauu

SEQ ID NO: 3274679 - RNA, 17 nt, Vaccinia virus
uguaauugugacaucau

SEQ ID NO: 3274680 - RNA, 20 nt, Vaccinia virus
uaaaacugaaccuacuuuau

SEQ ID NO: 3274681 - RNA, 19 nt, Vaccinia virus
agacaauaacuaacaauua

SEQ ID NO: 3274682 - RNA, 11 nt, Vaccinia virus
aacugucuaua

SEQ ID NO: 3274683 - RNA, 20 nt, Vaccinia virus
aguauaucaaauacaucuau

SEQ ID NO: 3274684 - RNA, 22 nt, Vaccinia virus
guagaacaacgauuuaaucaua

SEQ ID NO: 3274685 - RNA, 21 nt, Vaccinia virus
gauugauuuggaauucuuuuu

SEQ ID NO: 3274686 - RNA, 14 nt, Vaccinia virus
auugaagaugaugu

SEQ ID NO: 3274687 - RNA, 18 nt, Vaccinia virus
cauuacuucuuccauguc

SEQ ID NO: 3274688 - RNA, 13 nt, Vaccinia virus
augaauuagagaa

SEQ ID NO: 3274689 - RNA, 13 nt, Vaccinia virus
gaaagauguuauu

SEQ ID NO: 3274690 - RNA, 18 nt, Vaccinia virus
cgacaucaaaugguacaa

SEQ ID NO: 3274691 - RNA, 17 nt, Vaccinia virus
ucccaauuccaaagauc

SEQ ID NO: 3274692 - RNA, 23 nt, Vaccinia virus
auacaaaaucaucugauaauuua

SEQ ID NO: 3274693 - RNA, 16 nt, Vaccinia virus
gaaacggugaauacaa

SEQ ID NO: 3274694 - RNA, 16 nt, Vaccinia virus
uacaucgucuagaucu

SEQ ID NO: 3274695 - RNA, 17 nt, Vaccinia virus
agacuuuacuuuucuaa

SEQ ID NO: 3274696 - RNA, 21 nt, Vaccinia virus
ucagccgcuacagaaacauau

SEQ ID NO: 3274697 - RNA, 18 nt, Vaccinia virus
uauuauccgaagacagau

SEQ ID NO: 3274698 - RNA, 14 nt, Vaccinia virus
aucucaucagacau

SEQ ID NO: 3274699 - RNA, 16 nt, Vaccinia virus
gcgaaccgauuaaaca

SEQ ID NO: 3274700 - RNA, 19 nt, Vaccinia virus
uaaaaacaaauuuguacau

SEQ ID NO: 3274701 - RNA, 12 nt, Vaccinia virus
caauaagaaagu

SEQ ID NO: 3274702 - RNA, 16 nt, Vaccinia virus
uguaaaaucaugauuc

SEQ ID NO: 3274703 - RNA, 20 nt, Vaccinia virus
ugaagcauuggaagcaacua

SEQ ID NO: 3274704 - RNA, 15 nt, Vaccinia virus
guuauuauaaacucu

SEQ ID NO: 3274705 - RNA, 18 nt, Vaccinia virus
gcuucuaucuuguuuaga

SEQ ID NO: 3274706 - RNA, 17 nt, Vaccinia virus
guaauuguauuauuucc

SEQ ID NO: 3274707 - RNA, 23 nt, Vaccinia virus
aaugauuacuaacgcaacuauau

SEQ ID NO: 3274708 - RNA, 13 nt, Vaccinia virus
caccuuugccuua

SEQ ID NO: 3274709 - RNA, 15 nt, Vaccinia virus
auccuauucuaaaug

SEQ ID NO: 3274710 - RNA, 16 nt, Vaccinia virus
guauuuauaaacuuua

SEQ ID NO: 3274711 - RNA, 15 nt, Vaccinia virus
gauugggugaggaaa

SEQ ID NO: 3274712 - RNA, 15 nt, Vaccinia virus
uaguuuacuuuucua

SEQ ID NO: 3274713 - RNA, 15 nt, Vaccinia virus
uugacaucuauauau

SEQ ID NO: 3274714 - RNA, 20 nt, Vaccinia virus
cucauagaccuguaguuuua

SEQ ID NO: 3274715 - RNA, 13 nt, Vaccinia virus
acauugagaaugu

SEQ ID NO: 3274716 - RNA, 15 nt, Vaccinia virus
aagcuuuuagaauau

SEQ ID NO: 3274717 - RNA, 16 nt, Vaccinia virus
aauacuuaacagagga

SEQ ID NO: 3274718 - RNA, 24 nt, Vaccinia virus
aauaauuacuuuacaaacgaugua

SEQ ID NO: 3274719 - RNA, 20 nt, Vaccinia virus
auaacaucagaaaauguaaa

SEQ ID NO: 3274720 - RNA, 12 nt, Vaccinia virus
agagaauauacu

SEQ ID NO: 3274721 - RNA, 22 nt, Vaccinia virus
auuauaucauugucuaauagau

SEQ ID NO: 3274722 - RNA, 18 nt, Vaccinia virus
uuucauccgaucauugau

SEQ ID NO: 3274723 - RNA, 18 nt, Vaccinia virus
auaaauugguaaauccua

SEQ ID NO: 3274724 - RNA, 20 nt, Vaccinia virus
acguucuacuauagaauuaa

SEQ ID NO: 3274725 - RNA, 15 nt, Vaccinia virus
aucugucaauagaca

SEQ ID NO: 3274726 - RNA, 15 nt, Vaccinia virus
gaaauuuguaaucau

SEQ ID NO: 3274727 - RNA, 20 nt, Vaccinia virus
uaaacgauuuuccaaaucag

SEQ ID NO: 3274728 - RNA, 17 nt, Vaccinia virus
guuuaauaauaauucau

SEQ ID NO: 3274729 - RNA, 22 nt, Vaccinia virus
guauaauagaccacgauaauau

SEQ ID NO: 3274730 - RNA, 20 nt, Vaccinia virus
aggggaacccaucaaagaua

SEQ ID NO: 3274731 - RNA, 14 nt, Vaccinia virus
auauuguuaaauaa

SEQ ID NO: 3274732 - RNA, 21 nt, Vaccinia virus
auuuccaaagauacacacauu

SEQ ID NO: 3274733 - RNA, 18 nt, Vaccinia virus
ccgaugauguaagucuua

SEQ ID NO: 3274734 - RNA, 16 nt, Vaccinia virus
gcuaauaaauaaugau

SEQ ID NO: 3274735 - RNA, 13 nt, Vaccinia virus
uaaugauaaauuu

SEQ ID NO: 3274736 - RNA, 13 nt, Vaccinia virus
uuccauuauuaau

SEQ ID NO: 3274737 - RNA, 17 nt, Vaccinia virus
uuuagacgcuuauuauu

SEQ ID NO: 3274738 - RNA, 22 nt, Vaccinia virus
uuauugcuagccucaucuucua

SEQ ID NO: 3274739 - RNA, 14 nt, Vaccinia virus
acuggagagacuga

SEQ ID NO: 3274740 - RNA, 12 nt, Vaccinia virus
ugguauauacau

SEQ ID NO: 3274741 - RNA, 22 nt, Vaccinia virus
caaauaucauaacuuaguucuu

SEQ ID NO: 3274742 - RNA, 15 nt, Vaccinia virus
ugaagcauuggaagc

SEQ ID NO: 3274743 - RNA, 22 nt, Vaccinia virus
auuaacuacugauaacaaaaua

SEQ ID NO: 3274744 - RNA, 14 nt, Vaccinia virus
guaaacacauaucc

SEQ ID NO: 3274745 - RNA, 22 nt, Vaccinia virus
acuacauaguuaucuaucuuaa

SEQ ID NO: 3274746 - RNA, 17 nt, Vaccinia virus
ugugcaucuacugauau

SEQ ID NO: 3274747 - RNA, 18 nt, Vaccinia virus
ucucauaaaaaaaguuuu

SEQ ID NO: 3274748 - RNA, 21 nt, Vaccinia virus
aagaucauacagucacagaca

SEQ ID NO: 3274749 - RNA, 15 nt, Vaccinia virus
uccaaucuuaaacau

SEQ ID NO: 3274750 - RNA, 15 nt, Vaccinia virus
gauaacuuuaaacau

SEQ ID NO: 3274751 - RNA, 20 nt, Vaccinia virus
agagcauauuucauuuccaa

SEQ ID NO: 3274752 - RNA, 15 nt, Vaccinia virus
uccauaauuuucucu

SEQ ID NO: 3274753 - RNA, 21 nt, Vaccinia virus
ucugacauaagaugucuauga

SEQ ID NO: 3274754 - RNA, 19 nt, Vaccinia virus
gguuaacucuuucuuuuga

SEQ ID NO: 3274755 - RNA, 13 nt, Vaccinia virus
cacagaaauacua

SEQ ID NO: 3274756 - RNA, 19 nt, Vaccinia virus
aauaucaguaucuucuuua

SEQ ID NO: 3274757 - RNA, 16 nt, Vaccinia virus
uauaauucuccugaaa

SEQ ID NO: 3274758 - RNA, 17 nt, Vaccinia virus
acagaauaaacaaaaua

SEQ ID NO: 3274759 - RNA, 13 nt, Vaccinia virus
uagcgacauaaac

SEQ ID NO: 3274760 - RNA, 17 nt, Vaccinia virus
auauuaguauguuauau

SEQ ID NO: 3274761 - RNA, 21 nt, Vaccinia virus
ccacaccgccucuagauaucg

SEQ ID NO: 3274762 - RNA, 21 nt, Vaccinia virus
cugacuacuaacgaaauuaau

SEQ ID NO: 3274763 - RNA, 18 nt, Vaccinia virus
gauaaauaggaucaucua

SEQ ID NO: 3274764 - RNA, 22 nt, Vaccinia virus
guagauuuucaauuauguauca

SEQ ID NO: 3274765 - RNA, 21 nt, Vaccinia virus
auuaucaagauguguauguuu

SEQ ID NO: 3274766 - RNA, 19 nt, Vaccinia virus
aggauaaaauauuauccaa

SEQ ID NO: 3274767 - RNA, 17 nt, Vaccinia virus
cauaagucuaauagacu

SEQ ID NO: 3274768 - RNA, 18 nt, Vaccinia virus
gcacauagcgaugauuau

SEQ ID NO: 3274769 - RNA, 13 nt, Vaccinia virus
caaugauaacaau

SEQ ID NO: 3274770 - RNA, 11 nt, Vaccinia virus
aaguaaaugaa

SEQ ID NO: 3274771 - RNA, 18 nt, Vaccinia virus
auccucagucaucuuguc

SEQ ID NO: 3274772 - RNA, 14 nt, Vaccinia virus
uuuucgaaauggua

SEQ ID NO: 3274773 - RNA, 15 nt, Vaccinia virus
aucaaaagaaugauu

SEQ ID NO: 3274774 - RNA, 18 nt, Vaccinia virus
auuagugacggaaaaucg

SEQ ID NO: 3274775 - RNA, 18 nt, Vaccinia virus
augauuaaaauuaacaag

SEQ ID NO: 3274776 - RNA, 21 nt, Vaccinia virus
cuauauaaagguccuauucca

SEQ ID NO: 3274777 - RNA, 23 nt, Vaccinia virus
cauucacuauuccgucacuggcu

SEQ ID NO: 3274778 - RNA, 14 nt, Vaccinia virus
auuuaucuauuuua

SEQ ID NO: 3274779 - RNA, 14 nt, Vaccinia virus
ucuuauauuuauaa

SEQ ID NO: 3274780 - RNA, 12 nt, Vaccinia virus
caucuaugauuu

SEQ ID NO: 3274781 - RNA, 20 nt, Vaccinia virus
ugaauaucuacaaauuggag

SEQ ID NO: 3274782 - RNA, 16 nt, Vaccinia virus
ucagcugaaaaacuau

SEQ ID NO: 3274783 - RNA, 14 nt, Vaccinia virus
auguauauaucacu

SEQ ID NO: 3274784 - RNA, 18 nt, Vaccinia virus
gcaaaacauuauaauaau

SEQ ID NO: 3274785 - RNA, 16 nt, Vaccinia virus
uaaauauccacucugu

SEQ ID NO: 3274786 - RNA, 22 nt, Vaccinia virus
auuuaggaaugauuaucaaaug

SEQ ID NO: 3274787 - RNA, 12 nt, Vaccinia virus
uaaucuuuucug

SEQ ID NO: 3274788 - RNA, 18 nt, Vaccinia virus
auuuggagcuuuaauagu

SEQ ID NO: 3274789 - RNA, 16 nt, Vaccinia virus
auaauacauuuaaauu

SEQ ID NO: 3274790 - RNA, 12 nt, Vaccinia virus
aaacuuacagaa

SEQ ID NO: 3274791 - RNA, 20 nt, Vaccinia virus
uuuguaccaacaaacuguuc

SEQ ID NO: 3274792 - RNA, 16 nt, Vaccinia virus
cgcgauaaauucguaa

SEQ ID NO: 3274793 - RNA, 16 nt, Vaccinia virus
cauuuucuuacaauua

SEQ ID NO: 3274794 - RNA, 24 nt, Vaccinia virus
caaauuguuaaauuaauaauggau

SEQ ID NO: 3274795 - RNA, 20 nt, Vaccinia virus
ucauauaacuucuagaugua

SEQ ID NO: 3274796 - RNA, 17 nt, Vaccinia virus
guugacgcuguaaaaga

SEQ ID NO: 3274797 - RNA, 16 nt, Vaccinia virus
ugaggauuuaaaacuc

SEQ ID NO: 3274798 - RNA, 13 nt, Vaccinia virus
uugccaaguuauc

SEQ ID NO: 3274799 - RNA, 20 nt, Vaccinia virus
uuaguauaacgugaauguau

SEQ ID NO: 3274800 - RNA, 18 nt, Vaccinia virus
acugauucagaaauggau

SEQ ID NO: 3274801 - RNA, 13 nt, Vaccinia virus
uuaaauauguucu

SEQ ID NO: 3274802 - RNA, 11 nt, Vaccinia virus
aaaaacuauac

SEQ ID NO: 3274803 - RNA, 14 nt, Vaccinia virus
ggagaauguuuccc

SEQ ID NO: 3274804 - RNA, 16 nt, Vaccinia virus
ucacucgugaagaagc

SEQ ID NO: 3274805 - RNA, 20 nt, Vaccinia virus
ucaucuuuuaccaacacaaa

SEQ ID NO: 3274806 - RNA, 17 nt, Vaccinia virus
uuaacuccucuauuaau

SEQ ID NO: 3274807 - RNA, 20 nt, Vaccinia virus
aagacuuagugacggacuua

SEQ ID NO: 3274808 - RNA, 16 nt, Vaccinia virus
guucuugaucuuauua

SEQ ID NO: 3274809 - RNA, 15 nt, Vaccinia virus
aaugcauuaaauaau

SEQ ID NO: 3274810 - RNA, 17 nt, Vaccinia virus
aagcgaauuacucuguc

SEQ ID NO: 3274811 - RNA, 18 nt, Vaccinia virus
agaaauagauaaugaaca

SEQ ID NO: 3274812 - RNA, 18 nt, Vaccinia virus
cuuacuaucuuuuucuca

SEQ ID NO: 3274813 - RNA, 15 nt, Vaccinia virus
ggucuaucaauaacu

SEQ ID NO: 3274814 - RNA, 16 nt, Vaccinia virus
uaauaauagaaaccau

SEQ ID NO: 3274815 - RNA, 14 nt, Vaccinia virus
guuguauagaaauu

SEQ ID NO: 3274816 - RNA, 19 nt, Vaccinia virus
uucgucuucccaaaauguu

SEQ ID NO: 3274817 - RNA, 21 nt, Vaccinia virus
augucuaaaaacagaaauagc

SEQ ID NO: 3274818 - RNA, 16 nt, Vaccinia virus
cuauaccauuaucuau

SEQ ID NO: 3274819 - RNA, 22 nt, Vaccinia virus
gaaacugacggaugauucuagu

SEQ ID NO: 3274820 - RNA, 14 nt, Vaccinia virus
gcuaaaauuuucau

SEQ ID NO: 3274821 - RNA, 17 nt, Vaccinia virus
uuuuaccaacacaaagg

SEQ ID NO: 3274822 - RNA, 23 nt, Vaccinia virus
auuuccauccgauuguuguguac

SEQ ID NO: 3274823 - RNA, 22 nt, Vaccinia virus
ucuuugaaacacgauuuaaaau

SEQ ID NO: 3274824 - RNA, 20 nt, Vaccinia virus
gaaacccccucauuuuuuaa

SEQ ID NO: 3274825 - RNA, 17 nt, Vaccinia virus
aauaacaggcuaaaaug

SEQ ID NO: 3274826 - RNA, 18 nt, Vaccinia virus
aaucuagauuccaaucau

SEQ ID NO: 3274827 - RNA, 12 nt, Vaccinia virus
auuguaaaugau

SEQ ID NO: 3274828 - RNA, 14 nt, Vaccinia virus
agcaauaaauacag

SEQ ID NO: 3274829 - RNA, 14 nt, Vaccinia virus
aauuauuauccaau

SEQ ID NO: 3274830 - RNA, 23 nt, Vaccinia virus
gucucaugucguaauaaauauga

SEQ ID NO: 3274831 - RNA, 19 nt, Vaccinia virus
gaacaucuuccauauccua

SEQ ID NO: 3274832 - RNA, 23 nt, Vaccinia virus
uuaucagaagauggauggaugaa

SEQ ID NO: 3274833 - RNA, 20 nt, Vaccinia virus
auaucuuauucugguuuaaa

SEQ ID NO: 3274834 - RNA, 12 nt, Vaccinia virus
uaggaaugccac

SEQ ID NO: 3274835 - RNA, 18 nt, Vaccinia virus
ugccauaaauaaaugcuu

SEQ ID NO: 3274836 - RNA, 17 nt, Vaccinia virus
ucuauuuugucauuaac

SEQ ID NO: 3274837 - RNA, 12 nt, Vaccinia virus
ucucaaaauaug

SEQ ID NO: 3274838 - RNA, 23 nt, Vaccinia virus
gaacauuucugcauuacaaagaa

SEQ ID NO: 3274839 - RNA, 12 nt, Vaccinia virus
aaucauguacau

SEQ ID NO: 3274840 - RNA, 16 nt, Vaccinia virus
aaguugauacaacaua

SEQ ID NO: 3274841 - RNA, 21 nt, Vaccinia virus
uuaaaaauaagaaugaaauaa

SEQ ID NO: 3274842 - RNA, 17 nt, Vaccinia virus
gaaccaguaacauauga

SEQ ID NO: 3274843 - RNA, 17 nt, Vaccinia virus
auacaaguguagaugau

SEQ ID NO: 3274844 - RNA, 22 nt, Vaccinia virus
aaacaagugauacguaagaaua

SEQ ID NO: 3274845 - RNA, 14 nt, Vaccinia virus
aacuuugaaauugu

SEQ ID NO: 3274846 - RNA, 23 nt, Vaccinia virus
gcugguaauaguuuacagauauu

SEQ ID NO: 3274847 - RNA, 17 nt, Vaccinia virus
auaauuguacuuuguaa

SEQ ID NO: 3274848 - RNA, 18 nt, Vaccinia virus
uuauuaucccauuguaaa

SEQ ID NO: 3274849 - RNA, 19 nt, Vaccinia virus
ugguccaaacugccacuga

SEQ ID NO: 3274850 - RNA, 18 nt, Vaccinia virus
ggaugaagcauauuacuc

SEQ ID NO: 3274851 - RNA, 22 nt, Vaccinia virus
uccucagcgauagcucuucuau

SEQ ID NO: 3274852 - RNA, 18 nt, Vaccinia virus
cuauagaaauuauuuuua

SEQ ID NO: 3274853 - RNA, 22 nt, Vaccinia virus
ggauucauccuguugucuaaau

SEQ ID NO: 3274854 - RNA, 14 nt, Vaccinia virus
acuagaguauauaa

SEQ ID NO: 3274855 - RNA, 18 nt, Vaccinia virus
uccucauuacguuucauu

SEQ ID NO: 3274856 - RNA, 15 nt, Vaccinia virus
uuaaugcaccgaaca

SEQ ID NO: 3274857 - RNA, 20 nt, Vaccinia virus
ugcauccaugcagcauuucc

SEQ ID NO: 3274858 - RNA, 16 nt, Vaccinia virus
cuucauuaaucuuuuc

SEQ ID NO: 3274859 - RNA, 14 nt, Vaccinia virus
aguauuaaauauua

SEQ ID NO: 3274860 - RNA, 12 nt, Vaccinia virus
aauuaugaugau

SEQ ID NO: 3274861 - RNA, 21 nt, Vaccinia virus
agaggaugaaauagauagaau

SEQ ID NO: 3274862 - RNA, 15 nt, Vaccinia virus
caaagcaucgauuug

SEQ ID NO: 3274863 - RNA, 16 nt, Vaccinia virus
auuuacuaucuguaau

SEQ ID NO: 3274864 - RNA, 17 nt, Vaccinia virus
auuauguuuuaugaaua

SEQ ID NO: 3274865 - RNA, 17 nt, Vaccinia virus
uaacaauaucaauaaau

SEQ ID NO: 3274866 - RNA, 22 nt, Vaccinia virus
ucaauuacacuauuugucuuaa

SEQ ID NO: 3274867 - RNA, 13 nt, Vaccinia virus
aauuuacagaaau

SEQ ID NO: 3274868 - RNA, 20 nt, Vaccinia virus
aucaugaaaugaugauauau

SEQ ID NO: 3274869 - RNA, 18 nt, Vaccinia virus
agauaaugguagcaauau

SEQ ID NO: 3274870 - RNA, 14 nt, Vaccinia virus
cgauucaaaguacu

SEQ ID NO: 3274871 - RNA, 16 nt, Vaccinia virus
aaaauauauaguauua

SEQ ID NO: 3274872 - RNA, 22 nt, Vaccinia virus
aucaacguaacuauauuccaaa

SEQ ID NO: 3274873 - RNA, 15 nt, Vaccinia virus
cuugaauucuuuuau

SEQ ID NO: 3274874 - RNA, 19 nt, Vaccinia virus
ucguuuauaucacauugua

SEQ ID NO: 3274875 - RNA, 12 nt, Vaccinia virus
aauacagcaucu

SEQ ID NO: 3274876 - RNA, 18 nt, Vaccinia virus
aauaucaucuaaacagua

SEQ ID NO: 3274877 - RNA, 14 nt, Vaccinia virus
cuaaggauccagaa

SEQ ID NO: 3274878 - RNA, 18 nt, Vaccinia virus
ucugaaauuggaugagua

SEQ ID NO: 3274879 - RNA, 15 nt, Vaccinia virus
agaaaacuagauaca

SEQ ID NO: 3274880 - RNA, 22 nt, Vaccinia virus
gacgcauuuaauagagauauac

SEQ ID NO: 3274881 - RNA, 17 nt, Vaccinia virus
gacagcuauguuaucau

SEQ ID NO: 3274882 - RNA, 17 nt, Vaccinia virus
gauucuaguaucuuuug

SEQ ID NO: 3274883 - RNA, 23 nt, Vaccinia virus
aucaauucuucuacauuaaaaau

SEQ ID NO: 3274884 - RNA, 16 nt, Vaccinia virus
ugaauauccagaugga

SEQ ID NO: 3274885 - RNA, 22 nt, Vaccinia virus
ucgauucuggcuauuucaaaau

SEQ ID NO: 3274886 - RNA, 17 nt, Vaccinia virus
auaaucagaaaacuuau

SEQ ID NO: 3274887 - RNA, 21 nt, Vaccinia virus
agagaagucgucaagcauauu

SEQ ID NO: 3274888 - RNA, 15 nt, Vaccinia virus
gauuaauuagauaua

SEQ ID NO: 3274889 - RNA, 15 nt, Vaccinia virus
caaaaugauauacag

SEQ ID NO: 3274890 - RNA, 19 nt, Vaccinia virus
aacucgcuuaauaucuucu

SEQ ID NO: 3274891 - RNA, 19 nt, Vaccinia virus
aguagcuauaauauauucu

SEQ ID NO: 3274892 - RNA, 12 nt, Vaccinia virus
ugaagaugaugu

SEQ ID NO: 3274893 - RNA, 15 nt, Vaccinia virus
auaaagaaaaaucua

SEQ ID NO: 3274894 - RNA, 22 nt, Vaccinia virus
auuaacgaucuuuauaauauau

SEQ ID NO: 3274895 - RNA, 15 nt, Vaccinia virus
gaugauauauauauu

SEQ ID NO: 3274896 - RNA, 15 nt, Vaccinia virus
ccuuuaaauccucua

SEQ ID NO: 3274897 - RNA, 21 nt, Vaccinia virus
aacaguuugguauuagaauca

SEQ ID NO: 3274898 - RNA, 18 nt, Vaccinia virus
uaucuaugcuuacuguau

SEQ ID NO: 3274899 - RNA, 13 nt, Vaccinia virus
auauuagaauuua

SEQ ID NO: 3274900 - RNA, 22 nt, Vaccinia virus
aaauggaagauauuuccauuua

SEQ ID NO: 3274901 - RNA, 17 nt, Vaccinia virus
accucuaguuucagaau

SEQ ID NO: 3274902 - RNA, 20 nt, Vaccinia virus
acaucuacuuuaucuauuca

SEQ ID NO: 3274903 - RNA, 21 nt, Vaccinia virus
ucaauauacuauucuugugau

SEQ ID NO: 3274904 - RNA, 13 nt, Vaccinia virus
aucuauucaaaau

SEQ ID NO: 3274905 - RNA, 23 nt, Vaccinia virus
aaaucaaacggauugguaacauu

SEQ ID NO: 3274906 - RNA, 20 nt, Vaccinia virus
aauaucuuuaauacagaugg

SEQ ID NO: 3274907 - RNA, 21 nt, Vaccinia virus
gaauucuuuuucgacuuuuug

SEQ ID NO: 3274908 - RNA, 22 nt, Vaccinia virus
gacaacaaggcuuugauaucua

SEQ ID NO: 3274909 - RNA, 13 nt, Vaccinia virus
uugcuaaaaucug

SEQ ID NO: 3274910 - RNA, 23 nt, Vaccinia virus
acagcuaucaaaauauguagaaa

SEQ ID NO: 3274911 - RNA, 19 nt, Vaccinia virus
cuaaaauauuuuuauucuc

SEQ ID NO: 3274912 - RNA, 14 nt, Vaccinia virus
agcuuaaacuacua

SEQ ID NO: 3274913 - RNA, 20 nt, Vaccinia virus
cauaaucaucacugucauca

SEQ ID NO: 3274914 - RNA, 18 nt, Vaccinia virus
uaaaaacauuuuauuucu

SEQ ID NO: 3274915 - RNA, 21 nt, Vaccinia virus
uagcuaaagauuugucacaau

SEQ ID NO: 3274916 - RNA, 23 nt, Vaccinia virus
uucuuacaguacacaguauugac

SEQ ID NO: 3274917 - RNA, 16 nt, Vaccinia virus
agauaugccaaaauca

SEQ ID NO: 3274918 - RNA, 15 nt, Vaccinia virus
aggccaaagaaauga

SEQ ID NO: 3274919 - RNA, 19 nt, Vaccinia virus
ucuacauaaucuacgauau

SEQ ID NO: 3274920 - RNA, 23 nt, Vaccinia virus
uguuuccuauaaucguuaaauuu

SEQ ID NO: 3274921 - RNA, 21 nt, Vaccinia virus
cauaacaucuuucaucaucug

SEQ ID NO: 3274922 - RNA, 21 nt, Vaccinia virus
aaauaauagguuguaauauca

SEQ ID NO: 3274923 - RNA, 22 nt, Vaccinia virus
auuacuccagccguagaauauc

SEQ ID NO: 3274924 - RNA, 16 nt, Vaccinia virus
uuuucauaaauacacu

SEQ ID NO: 3274925 - RNA, 14 nt, Vaccinia virus
ucauccuugcuauc

SEQ ID NO: 3274926 - RNA, 23 nt, Vaccinia virus
uuggaccaccgacuguaacauug

SEQ ID NO: 3274927 - RNA, 22 nt, Vaccinia virus
cacgaacgaaaccuacugugac

SEQ ID NO: 3274928 - RNA, 18 nt, Vaccinia virus
uaugagaucgucguacau

SEQ ID NO: 3274929 - RNA, 15 nt, Vaccinia virus
uuaacagauguagua

SEQ ID NO: 3274930 - RNA, 21 nt, Vaccinia virus
ugaaugggaauuucuauguca

SEQ ID NO: 3274931 - RNA, 13 nt, Vaccinia virus
ggcaaaagaauac

SEQ ID NO: 3274932 - RNA, 17 nt, Vaccinia virus
uacuggaugaagaugug

SEQ ID NO: 3274933 - RNA, 13 nt, Vaccinia virus
cguucuacauaaa

SEQ ID NO: 3274934 - RNA, 19 nt, Vaccinia virus
ucgaugucgauagccauau

SEQ ID NO: 3274935 - RNA, 13 nt, Vaccinia virus
uauuuuuuucaua

SEQ ID NO: 3274936 - RNA, 21 nt, Vaccinia virus
aauaucuaggacaauaguuuc

SEQ ID NO: 3274937 - RNA, 21 nt, Vaccinia virus
acagaguuagaaauagauaau

SEQ ID NO: 3274938 - RNA, 21 nt, Vaccinia virus
aacgugauuauuauugucaua

SEQ ID NO: 3274939 - RNA, 19 nt, Vaccinia virus
acuugaaagagauaauaga

SEQ ID NO: 3274940 - RNA, 22 nt, Vaccinia virus
aguaaccccauauaauguagac

SEQ ID NO: 3274941 - RNA, 19 nt, Vaccinia virus
auaucuacugauaaaacug

SEQ ID NO: 3274942 - RNA, 15 nt, Vaccinia virus
caaccgaaaucaugg

SEQ ID NO: 3274943 - RNA, 13 nt, Vaccinia virus
aauauacaaguau

SEQ ID NO: 3274944 - RNA, 17 nt, Vaccinia virus
acuguuaucuaaugaau

SEQ ID NO: 3274945 - RNA, 16 nt, Vaccinia virus
auagcuagaggaaaug

SEQ ID NO: 3274946 - RNA, 17 nt, Vaccinia virus
uacaaauauguacauua

SEQ ID NO: 3274947 - RNA, 16 nt, Vaccinia virus
uauacacgcuaaaaua

SEQ ID NO: 3274948 - RNA, 17 nt, Vaccinia virus
auuaauaugcucaugaa

SEQ ID NO: 3274949 - RNA, 16 nt, Vaccinia virus
gauguuaaacaaauaa

SEQ ID NO: 3274950 - RNA, 16 nt, Vaccinia virus
uaauauaaaagaauau

SEQ ID NO: 3274951 - RNA, 15 nt, Vaccinia virus
uguaauuuuaacaua

SEQ ID NO: 3274952 - RNA, 18 nt, Vaccinia virus
acuccauccguaaaaaug

SEQ ID NO: 3274953 - RNA, 20 nt, Vaccinia virus
aucauaaaaguuguaaagua

SEQ ID NO: 3274954 - RNA, 14 nt, Vaccinia virus
guauuccuacuuuu

SEQ ID NO: 3274955 - RNA, 14 nt, Vaccinia virus
auucgauauuacga

SEQ ID NO: 3274956 - RNA, 15 nt, Vaccinia virus
ucugucagaaaauac

SEQ ID NO: 3274957 - RNA, 14 nt, Vaccinia virus
gauacucuauuaau

SEQ ID NO: 3274958 - RNA, 23 nt, Vaccinia virus
cuggaauuaguuagauauauaga

SEQ ID NO: 3274959 - RNA, 18 nt, Vaccinia virus
caauauauguaaucauug

SEQ ID NO: 3274960 - RNA, 22 nt, Vaccinia virus
auaaaugcgauacagacauuaa

SEQ ID NO: 3274961 - RNA, 14 nt, Vaccinia virus
auauaucugauagu

SEQ ID NO: 3274962 - RNA, 17 nt, Vaccinia virus
gaucuaguuacaacuau

SEQ ID NO: 3274963 - RNA, 22 nt, Vaccinia virus
uucacaagaugaauucaguaau

SEQ ID NO: 3274964 - RNA, 19 nt, Vaccinia virus
uaaaacugcauauuauaca

SEQ ID NO: 3274965 - RNA, 19 nt, Vaccinia virus
uauauaauccaucaacaau

SEQ ID NO: 3274966 - RNA, 19 nt, Vaccinia virus
uauuagcgaauauaucaaa

SEQ ID NO: 3274967 - RNA, 17 nt, Vaccinia virus
uugcguuucacaaacac

SEQ ID NO: 3274968 - RNA, 14 nt, Vaccinia virus
uuaucacaauauag

SEQ ID NO: 3274969 - RNA, 15 nt, Vaccinia virus
aaauauguacauuau

SEQ ID NO: 3274970 - RNA, 17 nt, Vaccinia virus
acaaaauucagauucua

SEQ ID NO: 3274971 - RNA, 15 nt, Vaccinia virus
auuaucgacauaggu

SEQ ID NO: 3274972 - RNA, 19 nt, Vaccinia virus
aucggccuucuuuuuuaca

SEQ ID NO: 3274973 - RNA, 22 nt, Vaccinia virus
auauauacucugagauaaaaca

SEQ ID NO: 3274974 - RNA, 14 nt, Vaccinia virus
augaucuggaucau

SEQ ID NO: 3274975 - RNA, 15 nt, Vaccinia virus
gacgcugucaguuau

SEQ ID NO: 3274976 - RNA, 18 nt, Vaccinia virus
uucaaaguuucugaaaua

SEQ ID NO: 3274977 - RNA, 17 nt, Vaccinia virus
uagucagaccauucuug

SEQ ID NO: 3274978 - RNA, 15 nt, Vaccinia virus
uggauuaucggaaau

SEQ ID NO: 3274979 - RNA, 21 nt, Vaccinia virus
uacguuagguauguaccacau

SEQ ID NO: 3274980 - RNA, 22 nt, Vaccinia virus
aauacgauccaagguuagagaa

SEQ ID NO: 3274981 - RNA, 19 nt, Vaccinia virus
cguagaaguuguaaaugac

SEQ ID NO: 3274982 - RNA, 16 nt, Vaccinia virus
auccgacuagaauuag

SEQ ID NO: 3274983 - RNA, 17 nt, Vaccinia virus
ccauuuuaacaguuucu

SEQ ID NO: 3274984 - RNA, 23 nt, Vaccinia virus
auaaccuucuaccgaacacuaac

SEQ ID NO: 3274985 - RNA, 21 nt, Vaccinia virus
ucuaaacauaagacuuauucu

SEQ ID NO: 3274986 - RNA, 12 nt, Vaccinia virus
aguuuaacuagu

SEQ ID NO: 3274987 - RNA, 19 nt, Vaccinia virus
caccauauagaucaaucau

SEQ ID NO: 3274988 - RNA, 17 nt, Vaccinia virus
cuucgauauuagauuuu

SEQ ID NO: 3274989 - RNA, 12 nt, Vaccinia virus
auuccauggaag

SEQ ID NO: 3274990 - RNA, 18 nt, Vaccinia virus
agaaagcgcguaauacua

SEQ ID NO: 3274991 - RNA, 13 nt, Vaccinia virus
cauaacguccaga

SEQ ID NO: 3274992 - RNA, 14 nt, Vaccinia virus
auaaaauaaaauga

SEQ ID NO: 3274993 - RNA, 22 nt, Vaccinia virus
auaugguuucuaaaucuaucaa

SEQ ID NO: 3274994 - RNA, 19 nt, Vaccinia virus
aaguucuggcaauguuuca

SEQ ID NO: 3274995 - RNA, 14 nt, Vaccinia virus
cgguuuuaacuuua

SEQ ID NO: 3274996 - RNA, 21 nt, Vaccinia virus
auuauuuuucaccauauagau

SEQ ID NO: 3274997 - RNA, 19 nt, Vaccinia virus
aucccauucuaauacuuua

SEQ ID NO: 3274998 - RNA, 18 nt, Vaccinia virus
agauaugauaaaacuauu

SEQ ID NO: 3274999 - RNA, 13 nt, Vaccinia virus
aagaaaacaaaca

SEQ ID NO: 3275000 - RNA, 19 nt, Vaccinia virus
ucauugauugagaagaagc

SEQ ID NO: 3275001 - RNA, 22 nt, Vaccinia virus
acauuagcagauuaguaugaag

SEQ ID NO: 3275002 - RNA, 17 nt, Vaccinia virus
ugcuguuccucuguaaa

SEQ ID NO: 3275003 - RNA, 21 nt, Vaccinia virus
acugauucuggacauagcuuu

SEQ ID NO: 3275004 - RNA, 22 nt, Vaccinia virus
uauggauuuggucauaauagaa

SEQ ID NO: 3275005 - RNA, 20 nt, Vaccinia virus
auguauaauaauaaacggaa

SEQ ID NO: 3275006 - RNA, 20 nt, Vaccinia virus
cuaaaauauuuuuauucuca

SEQ ID NO: 3275007 - RNA, 22 nt, Vaccinia virus
auauacguugauagauuagcug

SEQ ID NO: 3275008 - RNA, 16 nt, Vaccinia virus
uuuaauuuccuaguau

SEQ ID NO: 3275009 - RNA, 13 nt, Vaccinia virus
aucagagaacuuc

SEQ ID NO: 3275010 - RNA, 22 nt, Vaccinia virus
uuuaaugauacgauacuagauu

SEQ ID NO: 3275011 - RNA, 14 nt, Vaccinia virus
auuauauuuauuau

SEQ ID NO: 3275012 - RNA, 16 nt, Vaccinia virus
acucauuuaacagaug

SEQ ID NO: 3275013 - RNA, 16 nt, Vaccinia virus
acaauugucuguaaac

SEQ ID NO: 3275014 - RNA, 21 nt, Vaccinia virus
aguccauccgauuaugagaca

SEQ ID NO: 3275015 - RNA, 22 nt, Vaccinia virus
uaugaugaccggcgauaucaua

SEQ ID NO: 3275016 - RNA, 23 nt, Vaccinia virus
uccgacaucaaaugguacaaaaa

SEQ ID NO: 3275017 - RNA, 21 nt, Vaccinia virus
uuauauacgaaauauuauaca

SEQ ID NO: 3275018 - RNA, 14 nt, Vaccinia virus
acuaauguuaauug

SEQ ID NO: 3275019 - RNA, 18 nt, Vaccinia virus
auaacuucuagauguaga

SEQ ID NO: 3275020 - RNA, 18 nt, Vaccinia virus
ccaaaucuauauuguuua

SEQ ID NO: 3275021 - RNA, 16 nt, Vaccinia virus
uaaacaugaauuuauu

SEQ ID NO: 3275022 - RNA, 19 nt, Vaccinia virus
auuuuuauucagcauuacu

SEQ ID NO: 3275023 - RNA, 19 nt, Vaccinia virus
augcaucuauauaaucuuu

SEQ ID NO: 3275024 - RNA, 17 nt, Vaccinia virus
aauuucuuuauucucua

SEQ ID NO: 3275025 - RNA, 15 nt, Vaccinia virus
augaaauaaguauga

SEQ ID NO: 3275026 - RNA, 17 nt, Vaccinia virus
uaauacacacaaaguau

SEQ ID NO: 3275027 - RNA, 17 nt, Vaccinia virus
agauuuaucauauuucu

SEQ ID NO: 3275028 - RNA, 16 nt, Vaccinia virus
aacaccacgaacaugu

SEQ ID NO: 3275029 - RNA, 18 nt, Vaccinia virus
auugcacaauccaaacuu

SEQ ID NO: 3275030 - RNA, 15 nt, Vaccinia virus
gagauguuucauaau

SEQ ID NO: 3275031 - RNA, 17 nt, Vaccinia virus
aguagaaauuaucaaau

SEQ ID NO: 3275032 - RNA, 13 nt, Vaccinia virus
augauaucgagaa

SEQ ID NO: 3275033 - RNA, 23 nt, Vaccinia virus
aguagacauuaauagaaugaaga

SEQ ID NO: 3275034 - RNA, 23 nt, Vaccinia virus
auauagcaucgauccaugagaaa

SEQ ID NO: 3275035 - RNA, 19 nt, Vaccinia virus
gccuauaaaguaauaaucu

SEQ ID NO: 3275036 - RNA, 14 nt, Vaccinia virus
cauuuauagcauuu

SEQ ID NO: 3275037 - RNA, 22 nt, Vaccinia virus
agcauucuuuccagaacuauau

SEQ ID NO: 3275038 - RNA, 20 nt, Vaccinia virus
ugauuagaaaauauaaauua

SEQ ID NO: 3275039 - RNA, 17 nt, Vaccinia virus
auuccuccauaauugca

SEQ ID NO: 3275040 - RNA, 18 nt, Vaccinia virus
cauuauuuuuauauuuuc

SEQ ID NO: 3275041 - RNA, 21 nt, Vaccinia virus
aucaaaauagcaaaguaacga

SEQ ID NO: 3275042 - RNA, 20 nt, Vaccinia virus
uucagauauaaaaaucuguu

SEQ ID NO: 3275043 - RNA, 23 nt, Vaccinia virus
ggaaacaucucuucuaguuucac

SEQ ID NO: 3275044 - RNA, 19 nt, Vaccinia virus
aucuagauuccaaucauug

SEQ ID NO: 3275045 - RNA, 16 nt, Vaccinia virus
cuauaucuaacaucuu

SEQ ID NO: 3275046 - RNA, 17 nt, Vaccinia virus
uuaaucuuagaaaucaa

SEQ ID NO: 3275047 - RNA, 12 nt, Vaccinia virus
cugguaauuuaa

SEQ ID NO: 3275048 - RNA, 21 nt, Vaccinia virus
uggaaucaucuucugauucca

SEQ ID NO: 3275049 - RNA, 21 nt, Vaccinia virus
auauuaaaaaaugucacuauu

SEQ ID NO: 3275050 - RNA, 15 nt, Vaccinia virus
aauuucauccauuua

SEQ ID NO: 3275051 - RNA, 17 nt, Vaccinia virus
aucgcuuaauagacaaa

SEQ ID NO: 3275052 - RNA, 22 nt, Vaccinia virus
uuaaacgaauuaaaauuauuua

SEQ ID NO: 3275053 - RNA, 23 nt, Vaccinia virus
cgauaacauucuaggaauguugu

SEQ ID NO: 3275054 - RNA, 22 nt, Vaccinia virus
aaaauauggaauuguauuuucu

SEQ ID NO: 3275055 - RNA, 19 nt, Vaccinia virus
agacggauaagaaauauau

SEQ ID NO: 3275056 - RNA, 23 nt, Vaccinia virus
uaccaaacuuucagaagaaaugg

SEQ ID NO: 3275057 - RNA, 17 nt, Vaccinia virus
ucgcccaucucauacau

SEQ ID NO: 3275058 - RNA, 19 nt, Vaccinia virus
agggaaauuaaagaagaag

SEQ ID NO: 3275059 - RNA, 14 nt, Vaccinia virus
ucucuaucaaugau

SEQ ID NO: 3275060 - RNA, 16 nt, Vaccinia virus
guuccggaucuauaga

SEQ ID NO: 3275061 - RNA, 21 nt, Vaccinia virus
auaaucccauucuaauacuuu

SEQ ID NO: 3275062 - RNA, 20 nt, Vaccinia virus
gugauucucugaaaauguaa

SEQ ID NO: 3275063 - RNA, 15 nt, Vaccinia virus
uuaaucuauuagaau

SEQ ID NO: 3275064 - RNA, 14 nt, Vaccinia virus
cauuucuacaaaaa

SEQ ID NO: 3275065 - RNA, 19 nt, Vaccinia virus
gaauaaauuaucaacgaau

SEQ ID NO: 3275066 - RNA, 22 nt, Vaccinia virus
aguacuccucccauaauacuuu

SEQ ID NO: 3275067 - RNA, 16 nt, Vaccinia virus
ugaucuaacuaagaua

SEQ ID NO: 3275068 - RNA, 20 nt, Vaccinia virus
acgaugaugauuuaugaauu

SEQ ID NO: 3275069 - RNA, 12 nt, Vaccinia virus
gcaucuauuuua

SEQ ID NO: 3275070 - RNA, 11 nt, Vaccinia virus
cuuuguagaaa

SEQ ID NO: 3275071 - RNA, 21 nt, Vaccinia virus
agauuaaaauuaacaaaauua

SEQ ID NO: 3275072 - RNA, 23 nt, Vaccinia virus
cuaacauugauuuuaaaauuaaa

SEQ ID NO: 3275073 - RNA, 21 nt, Vaccinia virus
uacuguauguugcuacaugua

SEQ ID NO: 3275074 - RNA, 19 nt, Vaccinia virus
uguaacccacguaacauug

SEQ ID NO: 3275075 - RNA, 13 nt, Vaccinia virus
cucuaguuucaga

SEQ ID NO: 3275076 - RNA, 18 nt, Vaccinia virus
ccuacaggaauaucuuua

SEQ ID NO: 3275077 - RNA, 19 nt, Vaccinia virus
uauaaaaguaauaaaacaa

SEQ ID NO: 3275078 - RNA, 15 nt, Vaccinia virus
uugcauccggaugau

SEQ ID NO: 3275079 - RNA, 15 nt, Vaccinia virus
ucacaaauacuacaa

SEQ ID NO: 3275080 - RNA, 15 nt, Vaccinia virus
cgauuauuauaaaau

SEQ ID NO: 3275081 - RNA, 14 nt, Vaccinia virus
gaguuaucaagaga

SEQ ID NO: 3275082 - RNA, 17 nt, Vaccinia virus
uaaucguuauuaucauc

SEQ ID NO: 3275083 - RNA, 16 nt, Vaccinia virus
aaucauggacuuuaua

SEQ ID NO: 3275084 - RNA, 19 nt, Vaccinia virus
cuaaaaacuguaucgauuu

SEQ ID NO: 3275085 - RNA, 16 nt, Vaccinia virus
auccaccacagacuga

SEQ ID NO: 3275086 - RNA, 15 nt, Vaccinia virus
gcauuaaaugaugaa

SEQ ID NO: 3275087 - RNA, 18 nt, Vaccinia virus
ucauucaaauccauaaau

SEQ ID NO: 3275088 - RNA, 16 nt, Vaccinia virus
aaucuauuagaauugg

SEQ ID NO: 3275089 - RNA, 20 nt, Vaccinia virus
uauaaacauuuguguuugua

SEQ ID NO: 3275090 - RNA, 13 nt, Vaccinia virus
uucaacaaacuaa

SEQ ID NO: 3275091 - RNA, 21 nt, Vaccinia virus
agcuaugcgauuggauaagaa

SEQ ID NO: 3275092 - RNA, 18 nt, Vaccinia virus
aaugauaaugauacagua

SEQ ID NO: 3275093 - RNA, 15 nt, Vaccinia virus
aaucagaacuuccaa

SEQ ID NO: 3275094 - RNA, 17 nt, Vaccinia virus
auuuuuauaguuuuuac

SEQ ID NO: 3275095 - RNA, 17 nt, Vaccinia virus
auauuccaagaucaaaa

SEQ ID NO: 3275096 - RNA, 17 nt, Vaccinia virus
auuaauagauauaucuc

SEQ ID NO: 3275097 - RNA, 22 nt, Vaccinia virus
acuaucugauaagauaucuucu

SEQ ID NO: 3275098 - RNA, 12 nt, Vaccinia virus
uuaaaauuauuu

SEQ ID NO: 3275099 - RNA, 17 nt, Vaccinia virus
agacuacaauauauucu

SEQ ID NO: 3275100 - RNA, 18 nt, Vaccinia virus
gaaaaaguaaaugaugaa

SEQ ID NO: 3275101 - RNA, 14 nt, Vaccinia virus
aauaauguuauuau

SEQ ID NO: 3275102 - RNA, 16 nt, Vaccinia virus
augaaaccauacuaau

SEQ ID NO: 3275103 - RNA, 22 nt, Vaccinia virus
aaaacauauaaaucuaaaauug

SEQ ID NO: 3275104 - RNA, 21 nt, Vaccinia virus
cgaggagauuuagaaauguug

SEQ ID NO: 3275105 - RNA, 14 nt, Vaccinia virus
auauaguuaauagu

SEQ ID NO: 3275106 - RNA, 17 nt, Vaccinia virus
cauguuuuaaugcauuc

SEQ ID NO: 3275107 - RNA, 14 nt, Vaccinia virus
uagauaaacgugau

SEQ ID NO: 3275108 - RNA, 16 nt, Vaccinia virus
aguuuggauuaucgua

SEQ ID NO: 3275109 - RNA, 18 nt, Vaccinia virus
caucagaaaugacuccau

SEQ ID NO: 3275110 - RNA, 18 nt, Vaccinia virus
aaaagaacuaacguccau

SEQ ID NO: 3275111 - RNA, 12 nt, Vaccinia virus
aucaaucauauu

SEQ ID NO: 3275112 - RNA, 20 nt, Vaccinia virus
gcuauccaucagaauguuuc

SEQ ID NO: 3275113 - RNA, 21 nt, Vaccinia virus
agccaagacgaacaaaaucaa

SEQ ID NO: 3275114 - RNA, 19 nt, Vaccinia virus
ugauugauuauuucaaaga

SEQ ID NO: 3275115 - RNA, 17 nt, Vaccinia virus
auuauuaaauuaugaag

SEQ ID NO: 3275116 - RNA, 17 nt, Vaccinia virus
uaacagaaaaaacaaug

SEQ ID NO: 3275117 - RNA, 20 nt, Vaccinia virus
uaaaugauuucgaucugucu

SEQ ID NO: 3275118 - RNA, 16 nt, Vaccinia virus
caaagaauuaaugaua

SEQ ID NO: 3275119 - RNA, 14 nt, Vaccinia virus
aauucguuagcaaa

SEQ ID NO: 3275120 - RNA, 22 nt, Vaccinia virus
uagcagcugauacgucauuaac

SEQ ID NO: 3275121 - RNA, 17 nt, Vaccinia virus
cacagauagaucauuuu

SEQ ID NO: 3275122 - RNA, 18 nt, Vaccinia virus
ugcgcuacauuguuacgu

SEQ ID NO: 3275123 - RNA, 18 nt, Vaccinia virus
ucucuauugccaaauuuu

SEQ ID NO: 3275124 - RNA, 19 nt, Vaccinia virus
cuauuuuuuuauacuucua

SEQ ID NO: 3275125 - RNA, 22 nt, Vaccinia virus
cauauaguauucuuguauucua

SEQ ID NO: 3275126 - RNA, 22 nt, Vaccinia virus
aaucauuaaaaaaauuaacuga

SEQ ID NO: 3275127 - RNA, 23 nt, Vaccinia virus
guuaaaugguucgauauaaagga

SEQ ID NO: 3275128 - RNA, 20 nt, Vaccinia virus
uaaacuauacuaugaugucu

SEQ ID NO: 3275129 - RNA, 12 nt, Vaccinia virus
uauuaagcaaua

SEQ ID NO: 3275130 - RNA, 16 nt, Vaccinia virus
uuaaaaugauuauucc

SEQ ID NO: 3275131 - RNA, 14 nt, Vaccinia virus
acuugauaauuaau

SEQ ID NO: 3275132 - RNA, 17 nt, Vaccinia virus
auauacacauuuaauaa

SEQ ID NO: 3275133 - RNA, 15 nt, Vaccinia virus
auagaugaaauacuc

SEQ ID NO: 3275134 - RNA, 13 nt, Vaccinia virus
uucacucauauga

SEQ ID NO: 3275135 - RNA, 22 nt, Vaccinia virus
agcaauuagugccguauacuuu

SEQ ID NO: 3275136 - RNA, 23 nt, Vaccinia virus
gacggcuacucuaacucguacuc

SEQ ID NO: 3275137 - RNA, 14 nt, Vaccinia virus
gaaagauguuauuu

SEQ ID NO: 3275138 - RNA, 21 nt, Vaccinia virus
uaaacaaacuaauaaacauuc

SEQ ID NO: 3275139 - RNA, 19 nt, Vaccinia virus
auaauacggacuucauaau

SEQ ID NO: 3275140 - RNA, 21 nt, Vaccinia virus
ucaauaagaugcaucgugaaa

SEQ ID NO: 3275141 - RNA, 12 nt, Vaccinia virus
auccaaacauua

SEQ ID NO: 3275142 - RNA, 14 nt, Vaccinia virus
aaagugaaaaucua

SEQ ID NO: 3275143 - RNA, 14 nt, Vaccinia virus
ucguccuuaaccaa

SEQ ID NO: 3275144 - RNA, 14 nt, Vaccinia virus
aggaacauaaacaa

SEQ ID NO: 3275145 - RNA, 14 nt, Vaccinia virus
cgauucaacaaaac

SEQ ID NO: 3275146 - RNA, 19 nt, Vaccinia virus
ucuucucuaagagcuacgu

SEQ ID NO: 3275147 - RNA, 23 nt, Vaccinia virus
aguuaaaauaucaugguuaucca

SEQ ID NO: 3275148 - RNA, 12 nt, Vaccinia virus
uaacuaaauguc

SEQ ID NO: 3275149 - RNA, 12 nt, Vaccinia virus
gguaaauguuuu

SEQ ID NO: 3275150 - RNA, 15 nt, Vaccinia virus
aauuacacuauuugu

SEQ ID NO: 3275151 - RNA, 14 nt, Vaccinia virus
cuucuuuuuuccaa

SEQ ID NO: 3275152 - RNA, 18 nt, Vaccinia virus
aggaauaaaauaugaaau

SEQ ID NO: 3275153 - RNA, 16 nt, Vaccinia virus
aaguacuauugucuaa

SEQ ID NO: 3275154 - RNA, 15 nt, Vaccinia virus
ucacguaaauacaaa

SEQ ID NO: 3275155 - RNA, 17 nt, Vaccinia virus
aguuucuagauacuaga

SEQ ID NO: 3275156 - RNA, 15 nt, Vaccinia virus
acuagaguuguuaaa

SEQ ID NO: 3275157 - RNA, 20 nt, Vaccinia virus
ucugauuagaagccacuaua

SEQ ID NO: 3275158 - RNA, 17 nt, Vaccinia virus
uggucauaauagaaugu

SEQ ID NO: 3275159 - RNA, 18 nt, Vaccinia virus
uacaacagugauaugugu

SEQ ID NO: 3275160 - RNA, 14 nt, Vaccinia virus
agaacaauaucucg

SEQ ID NO: 3275161 - RNA, 16 nt, Vaccinia virus
auaucuacuagaaaga

SEQ ID NO: 3275162 - RNA, 12 nt, Vaccinia virus
aagcaaaugaug

SEQ ID NO: 3275163 - RNA, 19 nt, Vaccinia virus
auuuugcaauuucuucaua

SEQ ID NO: 3275164 - RNA, 19 nt, Vaccinia virus
uucacuauaucuaagaaac

SEQ ID NO: 3275165 - RNA, 16 nt, Vaccinia virus
uuucguugguagauau

SEQ ID NO: 3275166 - RNA, 23 nt, Vaccinia virus
uagaggaaguauaaaaauuaaac

SEQ ID NO: 3275167 - RNA, 17 nt, Vaccinia virus
uauuaacuaucuguaaa

SEQ ID NO: 3275168 - RNA, 19 nt, Vaccinia virus
cugggccauguagaauaaa

SEQ ID NO: 3275169 - RNA, 17 nt, Vaccinia virus
aagauaugcuacaagau

SEQ ID NO: 3275170 - RNA, 20 nt, Vaccinia virus
agauauuauuaaaucaugac

SEQ ID NO: 3275171 - RNA, 16 nt, Vaccinia virus
auacauuugaguuacu

SEQ ID NO: 3275172 - RNA, 18 nt, Vaccinia virus
uuaauaggcaucauuuau

SEQ ID NO: 3275173 - RNA, 15 nt, Vaccinia virus
uagugaaacaaaaua

SEQ ID NO: 3275174 - RNA, 21 nt, Vaccinia virus
aucaguacguucuucauuuau

SEQ ID NO: 3275175 - RNA, 21 nt, Vaccinia virus
cuguuguuuauucaacaugua

SEQ ID NO: 3275176 - RNA, 14 nt, Vaccinia virus
ugaauacauuauca

SEQ ID NO: 3275177 - RNA, 14 nt, Vaccinia virus
gaauugacaaauaa

SEQ ID NO: 3275178 - RNA, 24 nt, Vaccinia virus
uuuauaaagaaauacauaucgcac

SEQ ID NO: 3275179 - RNA, 13 nt, Vaccinia virus
uuguauuauucug

SEQ ID NO: 3275180 - RNA, 15 nt, Vaccinia virus
gauuauuuuuauuau

SEQ ID NO: 3275181 - RNA, 21 nt, Vaccinia virus
uguuuuuaagcuguucaaaau

SEQ ID NO: 3275182 - RNA, 20 nt, Vaccinia virus
uaaguuuauaaauuccacaa

SEQ ID NO: 3275183 - RNA, 20 nt, Vaccinia virus
uacuuagucuguacaaaagu

SEQ ID NO: 3275184 - RNA, 17 nt, Vaccinia virus
uauauuaaaaaauguca

SEQ ID NO: 3275185 - RNA, 19 nt, Vaccinia virus
caacagaacagauaguuua

SEQ ID NO: 3275186 - RNA, 21 nt, Vaccinia virus
guucacaaaaauacauaaaga

SEQ ID NO: 3275187 - RNA, 22 nt, Vaccinia virus
aaauauauuuacaauuauugga

SEQ ID NO: 3275188 - RNA, 17 nt, Vaccinia virus
aaguuauagacaaauua

SEQ ID NO: 3275189 - RNA, 19 nt, Vaccinia virus
acugccgaguuuaaaacuu

SEQ ID NO: 3275190 - RNA, 20 nt, Vaccinia virus
cuuaugauauucauucuuua

SEQ ID NO: 3275191 - RNA, 17 nt, Vaccinia virus
auuuuauuucaaaauua

SEQ ID NO: 3275192 - RNA, 17 nt, Vaccinia virus
aaaaauacuuaaaaugu

SEQ ID NO: 3275193 - RNA, 23 nt, Vaccinia virus
aacaaaaucuaacagauacaaau

SEQ ID NO: 3275194 - RNA, 20 nt, Vaccinia virus
aauacaaggcacuaugucca

SEQ ID NO: 3275195 - RNA, 17 nt, Vaccinia virus
aauuucugguuagauaa

SEQ ID NO: 3275196 - RNA, 16 nt, Vaccinia virus
uaaugaacgaauuaug

SEQ ID NO: 3275197 - RNA, 21 nt, Vaccinia virus
uuuaucuuucccccuagauac

SEQ ID NO: 3275198 - RNA, 19 nt, Vaccinia virus
auuugggccauuauaccuc

SEQ ID NO: 3275199 - RNA, 13 nt, Vaccinia virus
uuuuuaguaugac

SEQ ID NO: 3275200 - RNA, 22 nt, Vaccinia virus
gacuuuaucuaaauuucuagua

SEQ ID NO: 3275201 - RNA, 19 nt, Vaccinia virus
caaaauauguuucaaucau

SEQ ID NO: 3275202 - RNA, 18 nt, Vaccinia virus
agcaucauaaaaaugagu

SEQ ID NO: 3275203 - RNA, 17 nt, Vaccinia virus
uuaauauguaugauuca

SEQ ID NO: 3275204 - RNA, 23 nt, Vaccinia virus
auguuuacugcugcguuaaacau

SEQ ID NO: 3275205 - RNA, 19 nt, Vaccinia virus
augugagagagaaauacuu

SEQ ID NO: 3275206 - RNA, 22 nt, Vaccinia virus
cagauaaucugaaaaugaaauu

SEQ ID NO: 3275207 - RNA, 21 nt, Vaccinia virus
ugucuacaaccgcuacauaau

SEQ ID NO: 3275208 - RNA, 22 nt, Vaccinia virus
guaaacauuaugccguuaucau

SEQ ID NO: 3275209 - RNA, 18 nt, Vaccinia virus
ugguuccacaauucauuu

SEQ ID NO: 3275210 - RNA, 16 nt, Vaccinia virus
aaugcuuuagugaaau

SEQ ID NO: 3275211 - RNA, 17 nt, Vaccinia virus
augagaaacuuaaagua

SEQ ID NO: 3275212 - RNA, 20 nt, Vaccinia virus
gaaauguugggauauugcau

SEQ ID NO: 3275213 - RNA, 22 nt, Vaccinia virus
caugucugauauuuugauguau

SEQ ID NO: 3275214 - RNA, 18 nt, Vaccinia virus
aaguucuggcaauguuuc

SEQ ID NO: 3275215 - RNA, 18 nt, Vaccinia virus
cuagaucuauagaaucaa

SEQ ID NO: 3275216 - RNA, 16 nt, Vaccinia virus
uuuguaauugugacau

SEQ ID NO: 3275217 - RNA, 18 nt, Vaccinia virus
augaauggauacuuguau

SEQ ID NO: 3275218 - RNA, 15 nt, Vaccinia virus
cuguuucuacuaacu

SEQ ID NO: 3275219 - RNA, 21 nt, Vaccinia virus
aggcuucucaucucuuucaga

SEQ ID NO: 3275220 - RNA, 13 nt, Vaccinia virus
uugcgacacuauu

SEQ ID NO: 3275221 - RNA, 13 nt, Vaccinia virus
ugauucuacagua

SEQ ID NO: 3275222 - RNA, 17 nt, Vaccinia virus
aacuucgugaauaaugu

SEQ ID NO: 3275223 - RNA, 17 nt, Vaccinia virus
uuugauauuacuaaaca

SEQ ID NO: 3275224 - RNA, 21 nt, Vaccinia virus
aaacuaucuuuuuaggaaugu

SEQ ID NO: 3275225 - RNA, 21 nt, Vaccinia virus
uauucguuguauucauucuaa

SEQ ID NO: 3275226 - RNA, 17 nt, Vaccinia virus
auaugcaaagucuaaau

SEQ ID NO: 3275227 - RNA, 16 nt, Vaccinia virus
agauaaugcuaaugua

SEQ ID NO: 3275228 - RNA, 18 nt, Vaccinia virus
cuuucuagaauaaguuuc

SEQ ID NO: 3275229 - RNA, 19 nt, Vaccinia virus
agauguuuagaaaauggau

SEQ ID NO: 3275230 - RNA, 16 nt, Vaccinia virus
auaaaauguuaauaca

SEQ ID NO: 3275231 - RNA, 16 nt, Vaccinia virus
uauauaauaaauacuu

SEQ ID NO: 3275232 - RNA, 13 nt, Vaccinia virus
cugaaguuucaua

SEQ ID NO: 3275233 - RNA, 16 nt, Vaccinia virus
aauaauucauggaaau

SEQ ID NO: 3275234 - RNA, 18 nt, Vaccinia virus
uauacuccgguugaugau

SEQ ID NO: 3275235 - RNA, 14 nt, Vaccinia virus
aguacuuucgcaag

SEQ ID NO: 3275236 - RNA, 19 nt, Vaccinia virus
uuauacagaagauuuaacu

SEQ ID NO: 3275237 - RNA, 18 nt, Vaccinia virus
cauccucgacugaugugg

SEQ ID NO: 3275238 - RNA, 21 nt, Vaccinia virus
caaaaaaaugugcacaguuuc

SEQ ID NO: 3275239 - RNA, 18 nt, Vaccinia virus
ucagaaaacccaaacacu

SEQ ID NO: 3275240 - RNA, 17 nt, Vaccinia virus
aaauaucauuaauauau

SEQ ID NO: 3275241 - RNA, 16 nt, Vaccinia virus
aauuaaauaguuuauu

SEQ ID NO: 3275242 - RNA, 20 nt, Vaccinia virus
acuaucaaccgcauaauaca

SEQ ID NO: 3275243 - RNA, 20 nt, Vaccinia virus
gauacagauuaauuuccaca

SEQ ID NO: 3275244 - RNA, 14 nt, Vaccinia virus
aaauuaauuauugu

SEQ ID NO: 3275245 - RNA, 13 nt, Vaccinia virus
aacauaugauauu

SEQ ID NO: 3275246 - RNA, 18 nt, Vaccinia virus
gaugucguuauucugaaa

SEQ ID NO: 3275247 - RNA, 23 nt, Vaccinia virus
aucugagauucuauaaucgcuuu

SEQ ID NO: 3275248 - RNA, 24 nt, Vaccinia virus
uaauaccaauugcggacuuacuau

SEQ ID NO: 3275249 - RNA, 11 nt, Vaccinia virus
aaaccaaaucu

SEQ ID NO: 3275250 - RNA, 17 nt, Vaccinia virus
uauacgaauguaucaaa

SEQ ID NO: 3275251 - RNA, 15 nt, Vaccinia virus
uaauccuguguuuau

SEQ ID NO: 3275252 - RNA, 13 nt, Vaccinia virus
auguauacuguau

SEQ ID NO: 3275253 - RNA, 15 nt, Vaccinia virus
auuuacgcgcacaca

SEQ ID NO: 3275254 - RNA, 18 nt, Vaccinia virus
agaaucaguuacauguuu

SEQ ID NO: 3275255 - RNA, 20 nt, Vaccinia virus
aacauccauuuauagaauuu

SEQ ID NO: 3275256 - RNA, 13 nt, Vaccinia virus
auuauuuaaugag

SEQ ID NO: 3275257 - RNA, 22 nt, Vaccinia virus
guauuuuuguuagaguauauaa

SEQ ID NO: 3275258 - RNA, 22 nt, Vaccinia virus
aagagauaaaagcauuuuaacu

SEQ ID NO: 3275259 - RNA, 13 nt, Vaccinia virus
aacucaaucccaa

SEQ ID NO: 3275260 - RNA, 22 nt, Vaccinia virus
gccugaguaguuggaagaaucu

SEQ ID NO: 3275261 - RNA, 20 nt, Vaccinia virus
caugugaauauaauaauaca

SEQ ID NO: 3275262 - RNA, 17 nt, Vaccinia virus
cuagaauuagaauuaca

SEQ ID NO: 3275263 - RNA, 17 nt, Vaccinia virus
aaacuucucuaaaugag

SEQ ID NO: 3275264 - RNA, 22 nt, Vaccinia virus
gcaauaauggaaucuagaucua

SEQ ID NO: 3275265 - RNA, 19 nt, Vaccinia virus
gauugugcaucuacugaua

SEQ ID NO: 3275266 - RNA, 15 nt, Vaccinia virus
gaucgucacaaugau

SEQ ID NO: 3275267 - RNA, 15 nt, Vaccinia virus
auaacuuacuuucca

SEQ ID NO: 3275268 - RNA, 14 nt, Vaccinia virus
uuguaguuaaaaac

SEQ ID NO: 3275269 - RNA, 18 nt, Vaccinia virus
cauggugauuuauggaua

SEQ ID NO: 3275270 - RNA, 18 nt, Vaccinia virus
auuauucauuuucuauuu

SEQ ID NO: 3275271 - RNA, 13 nt, Vaccinia virus
auucauuuucuau

SEQ ID NO: 3275272 - RNA, 16 nt, Vaccinia virus
auaauccagaauguac

SEQ ID NO: 3275273 - RNA, 18 nt, Vaccinia virus
caaucauugauaucuuua

SEQ ID NO: 3275274 - RNA, 15 nt, Vaccinia virus
agauaccaaacagaa

SEQ ID NO: 3275275 - RNA, 21 nt, Vaccinia virus
agcacucguuauuaauacaag

SEQ ID NO: 3275276 - RNA, 15 nt, Vaccinia virus
guaauuaauuaugau

SEQ ID NO: 3275277 - RNA, 18 nt, Vaccinia virus
acguaaugaaguuaauga

SEQ ID NO: 3275278 - RNA, 21 nt, Vaccinia virus
uaagaggcauaaucaauguug

SEQ ID NO: 3275279 - RNA, 14 nt, Vaccinia virus
uuaacaucacuaau

SEQ ID NO: 3275280 - RNA, 13 nt, Vaccinia virus
aaaacuacuacaa

SEQ ID NO: 3275281 - RNA, 12 nt, Vaccinia virus
uaaaacauaaag

SEQ ID NO: 3275282 - RNA, 15 nt, Vaccinia virus
uaacauuuauuauca

SEQ ID NO: 3275283 - RNA, 18 nt, Vaccinia virus
uacuaauuacaaaccugu

SEQ ID NO: 3275284 - RNA, 17 nt, Vaccinia virus
acuuuuauaauuauaga

SEQ ID NO: 3275285 - RNA, 17 nt, Vaccinia virus
uuguucuacacauguau

SEQ ID NO: 3275286 - RNA, 17 nt, Vaccinia virus
uggcauaggaacauuuc

SEQ ID NO: 3275287 - RNA, 17 nt, Vaccinia virus
aucuuucuccaauacua

SEQ ID NO: 3275288 - RNA, 14 nt, Vaccinia virus
aauaguguucuaaa

SEQ ID NO: 3275289 - RNA, 15 nt, Vaccinia virus
agugacaaaaugcua

SEQ ID NO: 3275290 - RNA, 14 nt, Vaccinia virus
auacauuaaguaaa

SEQ ID NO: 3275291 - RNA, 17 nt, Vaccinia virus
aacuauauaauucuauu

SEQ ID NO: 3275292 - RNA, 13 nt, Vaccinia virus
uauugagauuucu

SEQ ID NO: 3275293 - RNA, 20 nt, Vaccinia virus
gacauuauguuguuaaaaua

SEQ ID NO: 3275294 - RNA, 20 nt, Vaccinia virus
aacuucuggaaguuccaaac

SEQ ID NO: 3275295 - RNA, 18 nt, Vaccinia virus
accacacgacaaugaaca

SEQ ID NO: 3275296 - RNA, 13 nt, Vaccinia virus
ugaaacuaucuuu

SEQ ID NO: 3275297 - RNA, 18 nt, Vaccinia virus
cucaccauuucgacaucu

SEQ ID NO: 3275298 - RNA, 20 nt, Vaccinia virus
auauaccacuuaaugacaaa

SEQ ID NO: 3275299 - RNA, 18 nt, Vaccinia virus
acuauuccguaucuaucu

SEQ ID NO: 3275300 - RNA, 20 nt, Vaccinia virus
uccagauacagugauuuugg

SEQ ID NO: 3275301 - RNA, 18 nt, Vaccinia virus
uaucauaaauaaauaaug

SEQ ID NO: 3275302 - RNA, 15 nt, Vaccinia virus
gauauuagaacugcu

SEQ ID NO: 3275303 - RNA, 23 nt, Vaccinia virus
uuaaucauauacaacucuuuaau

SEQ ID NO: 3275304 - RNA, 17 nt, Vaccinia virus
gauucaacaaaacucaa

SEQ ID NO: 3275305 - RNA, 16 nt, Vaccinia virus
uagauaccguaguaua

SEQ ID NO: 3275306 - RNA, 13 nt, Vaccinia virus
cuaaaguauuucu

SEQ ID NO: 3275307 - RNA, 13 nt, Vaccinia virus
guguauucaucgu

SEQ ID NO: 3275308 - RNA, 13 nt, Vaccinia virus
gccacaaaugaaa

SEQ ID NO: 3275309 - RNA, 14 nt, Vaccinia virus
auuucuuacauaaa

SEQ ID NO: 3275310 - RNA, 14 nt, Vaccinia virus
auauucuaugacug

SEQ ID NO: 3275311 - RNA, 16 nt, Vaccinia virus
acuuuaaacagaaaua

SEQ ID NO: 3275312 - RNA, 23 nt, Vaccinia virus
uuuacccgccuucgaauaaauaa

SEQ ID NO: 3275313 - RNA, 13 nt, Vaccinia virus
aauauuaaaacua

SEQ ID NO: 3275314 - RNA, 12 nt, Vaccinia virus
aaacuaguagaa

SEQ ID NO: 3275315 - RNA, 15 nt, Vaccinia virus
auccaucaaaaaaca

SEQ ID NO: 3275316 - RNA, 14 nt, Vaccinia virus
agauguaaaaaaug

SEQ ID NO: 3275317 - RNA, 18 nt, Vaccinia virus
acuccgguugaugaugau

SEQ ID NO: 3275318 - RNA, 14 nt, Vaccinia virus
ucguauacuagaaa

SEQ ID NO: 3275319 - RNA, 21 nt, Vaccinia virus
agucaauugguagaguuuuau

SEQ ID NO: 3275320 - RNA, 19 nt, Vaccinia virus
aauccaaauaaaauggaua

SEQ ID NO: 3275321 - RNA, 14 nt, Vaccinia virus
accagcuccaugac

SEQ ID NO: 3275322 - RNA, 23 nt, Vaccinia virus
ugauuaacagaaaaaacaauguu

SEQ ID NO: 3275323 - RNA, 17 nt, Vaccinia virus
auuuuggcguuaucauu

SEQ ID NO: 3275324 - RNA, 16 nt, Vaccinia virus
uacacguaccagcauu

SEQ ID NO: 3275325 - RNA, 22 nt, Vaccinia virus
ccaugcaaacuaucuaaaugua

SEQ ID NO: 3275326 - RNA, 20 nt, Vaccinia virus
gcuauaauccgauauaugau

SEQ ID NO: 3275327 - RNA, 16 nt, Vaccinia virus
guuuucauacauaugg

SEQ ID NO: 3275328 - RNA, 16 nt, Vaccinia virus
caaacauucuuucaaa

SEQ ID NO: 3275329 - RNA, 18 nt, Vaccinia virus
auguagauaaaaaagaua

SEQ ID NO: 3275330 - RNA, 21 nt, Vaccinia virus
aauuauuccuaauuaagaaaa

SEQ ID NO: 3275331 - RNA, 21 nt, Vaccinia virus
uaccuagaacgaugucaaaau

SEQ ID NO: 3275332 - RNA, 16 nt, Vaccinia virus
aaacugcugugaauac

SEQ ID NO: 3275333 - RNA, 16 nt, Vaccinia virus
uuuaucgcacagauau

SEQ ID NO: 3275334 - RNA, 17 nt, Vaccinia virus
gaauacgcauguuuuaa

SEQ ID NO: 3275335 - RNA, 16 nt, Vaccinia virus
ugacgacgaugauuga

SEQ ID NO: 3275336 - RNA, 20 nt, Vaccinia virus
auaacgauggcaagaaaugg

SEQ ID NO: 3275337 - RNA, 19 nt, Vaccinia virus
agcugugaguauuaaugau

SEQ ID NO: 3275338 - RNA, 16 nt, Vaccinia virus
uauuuuaauacaugua

SEQ ID NO: 3275339 - RNA, 19 nt, Vaccinia virus
aucugaucuguucauauac

SEQ ID NO: 3275340 - RNA, 14 nt, Vaccinia virus
aaugauacagaaaa

SEQ ID NO: 3275341 - RNA, 22 nt, Vaccinia virus
caacaaacgaguuuauuaguuu

SEQ ID NO: 3275342 - RNA, 13 nt, Vaccinia virus
uuuuauacuucua

SEQ ID NO: 3275343 - RNA, 22 nt, Vaccinia virus
aguaggguuauuaacacuaaaa

SEQ ID NO: 3275344 - RNA, 18 nt, Vaccinia virus
uuaauauauuuaaacuag

SEQ ID NO: 3275345 - RNA, 23 nt, Vaccinia virus
gaauuauaccgauagauaauggu

SEQ ID NO: 3275346 - RNA, 19 nt, Vaccinia virus
aaaacugguuaaaacagua

SEQ ID NO: 3275347 - RNA, 17 nt, Vaccinia virus
uagugcgccuaaaucaa

SEQ ID NO: 3275348 - RNA, 14 nt, Vaccinia virus
agcaucuaguugau

SEQ ID NO: 3275349 - RNA, 16 nt, Vaccinia virus
uguagguaguaguaca

SEQ ID NO: 3275350 - RNA, 19 nt, Vaccinia virus
guugaugugacuguuuucu

SEQ ID NO: 3275351 - RNA, 15 nt, Vaccinia virus
uaauggaguuguaaa

SEQ ID NO: 3275352 - RNA, 15 nt, Vaccinia virus
auaauacuaucugga

SEQ ID NO: 3275353 - RNA, 14 nt, Vaccinia virus
uagauuguuuucag

SEQ ID NO: 3275354 - RNA, 13 nt, Vaccinia virus
uuauauaauguau

SEQ ID NO: 3275355 - RNA, 18 nt, Vaccinia virus
caucugucauauuuagau

SEQ ID NO: 3275356 - RNA, 15 nt, Vaccinia virus
cugccgaauuuagag

SEQ ID NO: 3275357 - RNA, 16 nt, Vaccinia virus
uauauuugcaacaauu

SEQ ID NO: 3275358 - RNA, 15 nt, Vaccinia virus
agaugauacaaauaa

SEQ ID NO: 3275359 - RNA, 16 nt, Vaccinia virus
uuacagauauuuucca

SEQ ID NO: 3275360 - RNA, 14 nt, Vaccinia virus
aauuaagauauugu

SEQ ID NO: 3275361 - RNA, 17 nt, Vaccinia virus
gauuaauuuuuuuucau

SEQ ID NO: 3275362 - RNA, 17 nt, Vaccinia virus
guauguauuacgaagaa

SEQ ID NO: 3275363 - RNA, 18 nt, Vaccinia virus
uuagucauugcaauauag

SEQ ID NO: 3275364 - RNA, 19 nt, Vaccinia virus
auaaagaccgaauacauaa

SEQ ID NO: 3275365 - RNA, 22 nt, Vaccinia virus
aguguacgaagcgguuuuacga

SEQ ID NO: 3275366 - RNA, 19 nt, Vaccinia virus
uaacuugaugucaggaacu

SEQ ID NO: 3275367 - RNA, 16 nt, Vaccinia virus
aauuaauuaauguuuu

SEQ ID NO: 3275368 - RNA, 13 nt, Vaccinia virus
auuacaaaaacua

SEQ ID NO: 3275369 - RNA, 12 nt, Vaccinia virus
aagaauggauga

SEQ ID NO: 3275370 - RNA, 14 nt, Vaccinia virus
ucuuucauuucagu

SEQ ID NO: 3275371 - RNA, 17 nt, Vaccinia virus
uauaaaucauauuuaga

SEQ ID NO: 3275372 - RNA, 15 nt, Vaccinia virus
caaauaaaauggaua

SEQ ID NO: 3275373 - RNA, 19 nt, Vaccinia virus
aauucaucguuacggagau

SEQ ID NO: 3275374 - RNA, 21 nt, Vaccinia virus
aacguuucccaaugaaauggu

SEQ ID NO: 3275375 - RNA, 14 nt, Vaccinia virus
aagaaauauuucca

SEQ ID NO: 3275376 - RNA, 22 nt, Vaccinia virus
uauacaugauaccguuuagcau

SEQ ID NO: 3275377 - RNA, 15 nt, Vaccinia virus
uaaaucguauauguu

SEQ ID NO: 3275378 - RNA, 17 nt, Vaccinia virus
cuaucagaguccaugua

SEQ ID NO: 3275379 - RNA, 19 nt, Vaccinia virus
aauucuuggauauaugaua

SEQ ID NO: 3275380 - RNA, 18 nt, Vaccinia virus
acacuuuggauacaaaau

SEQ ID NO: 3275381 - RNA, 16 nt, Vaccinia virus
gcaaaauaguaaugau

SEQ ID NO: 3275382 - RNA, 20 nt, Vaccinia virus
ugaucaugugagaauacuaa

SEQ ID NO: 3275383 - RNA, 21 nt, Vaccinia virus
uauggguccaucuaugagaaa

SEQ ID NO: 3275384 - RNA, 16 nt, Vaccinia virus
cuagacuauauuauca

SEQ ID NO: 3275385 - RNA, 14 nt, Vaccinia virus
auuucacguucagc

SEQ ID NO: 3275386 - RNA, 20 nt, Vaccinia virus
cauuuaugagugauaaguaa

SEQ ID NO: 3275387 - RNA, 21 nt, Vaccinia virus
uucuacaucuuccuucuuauu

SEQ ID NO: 3275388 - RNA, 14 nt, Vaccinia virus
gaaauaaaucagac

SEQ ID NO: 3275389 - RNA, 18 nt, Vaccinia virus
auauauguucgcuauugu

SEQ ID NO: 3275390 - RNA, 23 nt, Vaccinia virus
aauacugaucuucuuuugucgua

SEQ ID NO: 3275391 - RNA, 16 nt, Vaccinia virus
agaaugcauacugucu

SEQ ID NO: 3275392 - RNA, 14 nt, Vaccinia virus
aucauccauguacu

SEQ ID NO: 3275393 - RNA, 20 nt, Vaccinia virus
auuauguuuuaugaauagau

SEQ ID NO: 3275394 - RNA, 21 nt, Vaccinia virus
aauuaaaaccaaguacuacaa

SEQ ID NO: 3275395 - RNA, 12 nt, Vaccinia virus
aucauuucacaa

SEQ ID NO: 3275396 - RNA, 20 nt, Vaccinia virus
augcguccauguugucuauu

SEQ ID NO: 3275397 - RNA, 15 nt, Vaccinia virus
acuuaguacuaauaa

SEQ ID NO: 3275398 - RNA, 21 nt, Vaccinia virus
uguccagcguguccccaggac

SEQ ID NO: 3275399 - RNA, 21 nt, Vaccinia virus
guguacguauauuuagauguu

SEQ ID NO: 3275400 - RNA, 22 nt, Vaccinia virus
uaaacgacuauaaaauuauuga

SEQ ID NO: 3275401 - RNA, 19 nt, Vaccinia virus
auuagacguagcuuaucau

SEQ ID NO: 3275402 - RNA, 18 nt, Vaccinia virus
auuuuccauuauuaauaa

SEQ ID NO: 3275403 - RNA, 23 nt, Vaccinia virus
uuacacacuuuguccguaaaaca

SEQ ID NO: 3275404 - RNA, 14 nt, Vaccinia virus
aagauaauuaucca

SEQ ID NO: 3275405 - RNA, 20 nt, Vaccinia virus
uuaagcaacaugucucuaaa

SEQ ID NO: 3275406 - RNA, 19 nt, Vaccinia virus
uuuaggaaugauuaucaaa

SEQ ID NO: 3275407 - RNA, 20 nt, Vaccinia virus
ucgcuaauguauagauuguu

SEQ ID NO: 3275408 - RNA, 23 nt, Vaccinia virus
uguccauuguaguauaaaaauua

SEQ ID NO: 3275409 - RNA, 17 nt, Vaccinia virus
uacucaaucaauagcaa

SEQ ID NO: 3275410 - RNA, 19 nt, Vaccinia virus
guacggcgagcuauuuaau

SEQ ID NO: 3275411 - RNA, 12 nt, Vaccinia virus
aaaaauggaugu

SEQ ID NO: 3275412 - RNA, 15 nt, Vaccinia virus
ugcucggcaauaacu

SEQ ID NO: 3275413 - RNA, 15 nt, Vaccinia virus
cauuguuauguauuu

SEQ ID NO: 3275414 - RNA, 12 nt, Vaccinia virus
aaguaaauacug

SEQ ID NO: 3275415 - RNA, 19 nt, Vaccinia virus
auauuacuaaacacacauu

SEQ ID NO: 3275416 - RNA, 21 nt, Vaccinia virus
agaagcauacgccaaauaucu

SEQ ID NO: 3275417 - RNA, 16 nt, Vaccinia virus
acauuguuuauggaug

SEQ ID NO: 3275418 - RNA, 20 nt, Vaccinia virus
accggaagaauuaauaaaca

SEQ ID NO: 3275419 - RNA, 17 nt, Vaccinia virus
aucaggaauccaaagag

SEQ ID NO: 3275420 - RNA, 19 nt, Vaccinia virus
aauaauaucuauauuucca

SEQ ID NO: 3275421 - RNA, 14 nt, Vaccinia virus
cugauuaucuugag

SEQ ID NO: 3275422 - RNA, 18 nt, Vaccinia virus
aaauagguuuuguucuau

SEQ ID NO: 3275423 - RNA, 22 nt, Vaccinia virus
ucaugaugaaguugagaaugau

SEQ ID NO: 3275424 - RNA, 21 nt, Vaccinia virus
uccaauacuaauucaaauugu

SEQ ID NO: 3275425 - RNA, 15 nt, Vaccinia virus
guaucuauaaucauc

SEQ ID NO: 3275426 - RNA, 23 nt, Vaccinia virus
uaaauccaaaauaacuaaacauu

SEQ ID NO: 3275427 - RNA, 17 nt, Vaccinia virus
auguuugacugaauaua

SEQ ID NO: 3275428 - RNA, 22 nt, Vaccinia virus
uguauccacuuuaauaauauca

SEQ ID NO: 3275429 - RNA, 22 nt, Vaccinia virus
acauuguuaauugaaaagggau

SEQ ID NO: 3275430 - RNA, 14 nt, Vaccinia virus
auauuuugcagcca

SEQ ID NO: 3275431 - RNA, 15 nt, Vaccinia virus
auauuuagaaauuga

SEQ ID NO: 3275432 - RNA, 19 nt, Vaccinia virus
aaucucuaucaucacauau

SEQ ID NO: 3275433 - RNA, 13 nt, Vaccinia virus
aucacaagaaguu

SEQ ID NO: 3275434 - RNA, 13 nt, Vaccinia virus
acuuguuuaauga

SEQ ID NO: 3275435 - RNA, 23 nt, Vaccinia virus
ucuucaaaguuucugaaauaaga

SEQ ID NO: 3275436 - RNA, 11 nt, Vaccinia virus
auaaaacauua

SEQ ID NO: 3275437 - RNA, 17 nt, Vaccinia virus
auaaagacaaacaaugg

SEQ ID NO: 3275438 - RNA, 17 nt, Vaccinia virus
guuaauuaucuaaauaa

SEQ ID NO: 3275439 - RNA, 15 nt, Vaccinia virus
ccauuaagugacauu

SEQ ID NO: 3275440 - RNA, 14 nt, Vaccinia virus
cuaaaaaauguaga

SEQ ID NO: 3275441 - RNA, 17 nt, Vaccinia virus
aucauguccauuuaacu

SEQ ID NO: 3275442 - RNA, 13 nt, Vaccinia virus
gaacacuacagua

SEQ ID NO: 3275443 - RNA, 19 nt, Vaccinia virus
cuuaucgaagugacacucu

SEQ ID NO: 3275444 - RNA, 13 nt, Vaccinia virus
aaaauauuuuacu

SEQ ID NO: 3275445 - RNA, 17 nt, Vaccinia virus
auaaauccgaugucuug

SEQ ID NO: 3275446 - RNA, 18 nt, Vaccinia virus
aauacaugggaaaugaua

SEQ ID NO: 3275447 - RNA, 15 nt, Vaccinia virus
acaugauauucaugu

SEQ ID NO: 3275448 - RNA, 14 nt, Vaccinia virus
auuuacaaaaauuu

SEQ ID NO: 3275449 - RNA, 15 nt, Vaccinia virus
auauagaucaaacaa

SEQ ID NO: 3275450 - RNA, 23 nt, Vaccinia virus
agugguaggucauacuccaucaa

SEQ ID NO: 3275451 - RNA, 15 nt, Vaccinia virus
ugcaucuacaucauc

SEQ ID NO: 3275452 - RNA, 22 nt, Vaccinia virus
auguagaauuuuuuaaaaaguu

SEQ ID NO: 3275453 - RNA, 16 nt, Vaccinia virus
agacgagauaguuuuc

SEQ ID NO: 3275454 - RNA, 11 nt, Vaccinia virus
auaauacuuug

SEQ ID NO: 3275455 - RNA, 14 nt, Vaccinia virus
ucgacgacauuaag

SEQ ID NO: 3275456 - RNA, 21 nt, Vaccinia virus
aauacgaaaacgauauuauua

SEQ ID NO: 3275457 - RNA, 18 nt, Vaccinia virus
caaaaguucauaaucuca

SEQ ID NO: 3275458 - RNA, 19 nt, Vaccinia virus
gcuguggaguuauaugaau

SEQ ID NO: 3275459 - RNA, 20 nt, Vaccinia virus
uuccauacguuuauauucuu

SEQ ID NO: 3275460 - RNA, 21 nt, Vaccinia virus
guauuuccauaauaagguuua

SEQ ID NO: 3275461 - RNA, 12 nt, Vaccinia virus
aguuuuuaagag

SEQ ID NO: 3275462 - RNA, 19 nt, Vaccinia virus
uguuuggcaauaaaguuuu

SEQ ID NO: 3275463 - RNA, 15 nt, Vaccinia virus
aaucuuggaaauuau

SEQ ID NO: 3275464 - RNA, 15 nt, Vaccinia virus
cauaauacucaauac

SEQ ID NO: 3275465 - RNA, 22 nt, Vaccinia virus
acacuucuauaguaucuauaua

SEQ ID NO: 3275466 - RNA, 20 nt, Vaccinia virus
agaaacuauagauaaugaua

SEQ ID NO: 3275467 - RNA, 23 nt, Vaccinia virus
caaaauugucuaugaugucaucu

SEQ ID NO: 3275468 - RNA, 22 nt, Vaccinia virus
uacaagaaauauuuccauccga

SEQ ID NO: 3275469 - RNA, 23 nt, Vaccinia virus
guugauguauugucguagaaaac

SEQ ID NO: 3275470 - RNA, 17 nt, Vaccinia virus
uauacaugauauuauca

SEQ ID NO: 3275471 - RNA, 19 nt, Vaccinia virus
aaacuuuacgauagacuuu

SEQ ID NO: 3275472 - RNA, 17 nt, Vaccinia virus
acuaaauacauuaucau

SEQ ID NO: 3275473 - RNA, 16 nt, Vaccinia virus
auugaugacacuagau

SEQ ID NO: 3275474 - RNA, 21 nt, Vaccinia virus
agaguaaacggcugaacuugu

SEQ ID NO: 3275475 - RNA, 20 nt, Vaccinia virus
acucucuacccuaaacuuua

SEQ ID NO: 3275476 - RNA, 13 nt, Vaccinia virus
auuuauuaucaug

SEQ ID NO: 3275477 - RNA, 19 nt, Vaccinia virus
auuccaaugaacaagauua

SEQ ID NO: 3275478 - RNA, 15 nt, Vaccinia virus
guguuuuucaaaaca

SEQ ID NO: 3275479 - RNA, 18 nt, Vaccinia virus
gauauauuuuucauaaau

SEQ ID NO: 3275480 - RNA, 18 nt, Vaccinia virus
gugcucaagcuaaacaag

SEQ ID NO: 3275481 - RNA, 13 nt, Vaccinia virus
aauggaaauacuu

SEQ ID NO: 3275482 - RNA, 20 nt, Vaccinia virus
caaagauauagaacacauaa

SEQ ID NO: 3275483 - RNA, 17 nt, Vaccinia virus
gacaugcaauaaaucua

SEQ ID NO: 3275484 - RNA, 22 nt, Vaccinia virus
uguacgauggauucauccuguu

SEQ ID NO: 3275485 - RNA, 15 nt, Vaccinia virus
ugaagaugaugugaa

SEQ ID NO: 3275486 - RNA, 16 nt, Vaccinia virus
guauuaaguuuggaga

SEQ ID NO: 3275487 - RNA, 16 nt, Vaccinia virus
auaaaguuuauacaag

SEQ ID NO: 3275488 - RNA, 21 nt, Vaccinia virus
gauaacucucuucuauaaaaa

SEQ ID NO: 3275489 - RNA, 23 nt, Vaccinia virus
guccguuauauaaucuacaaaac

SEQ ID NO: 3275490 - RNA, 16 nt, Vaccinia virus
uauauauccuuuugua

SEQ ID NO: 3275491 - RNA, 21 nt, Vaccinia virus
auauucugccguguuuaaaga

SEQ ID NO: 3275492 - RNA, 12 nt, Vaccinia virus
acucuucuuauu

SEQ ID NO: 3275493 - RNA, 19 nt, Vaccinia virus
gcuauggcuucuuaaauca

SEQ ID NO: 3275494 - RNA, 15 nt, Vaccinia virus
aauccaauugauuga

SEQ ID NO: 3275495 - RNA, 18 nt, Vaccinia virus
uaacuccagaacaucuuc

SEQ ID NO: 3275496 - RNA, 16 nt, Vaccinia virus
gauugagauucucuau

SEQ ID NO: 3275497 - RNA, 22 nt, Vaccinia virus
uaggcuuccaaaaauuuuucau

SEQ ID NO: 3275498 - RNA, 14 nt, Vaccinia virus
uaaaauaaucucuu

SEQ ID NO: 3275499 - RNA, 20 nt, Vaccinia virus
aauacauauuguuuagcaaa

SEQ ID NO: 3275500 - RNA, 22 nt, Vaccinia virus
guugauggaaaaauucuuuucg

SEQ ID NO: 3275501 - RNA, 14 nt, Vaccinia virus
auaacuaaaaaugu

SEQ ID NO: 3275502 - RNA, 17 nt, Vaccinia virus
auagauuuuccauccac

SEQ ID NO: 3275503 - RNA, 20 nt, Vaccinia virus
aggcacagucaaacauucaa

SEQ ID NO: 3275504 - RNA, 17 nt, Vaccinia virus
uacaauuaucauuuuga

SEQ ID NO: 3275505 - RNA, 18 nt, Vaccinia virus
cauaguggacaacauuaa

SEQ ID NO: 3275506 - RNA, 19 nt, Vaccinia virus
agguauguaccacauacug

SEQ ID NO: 3275507 - RNA, 13 nt, Vaccinia virus
uaguuuacagaua

SEQ ID NO: 3275508 - RNA, 18 nt, Vaccinia virus
gaaaagcuuaaaauagcu

SEQ ID NO: 3275509 - RNA, 12 nt, Vaccinia virus
aaauagauguua

SEQ ID NO: 3275510 - RNA, 16 nt, Vaccinia virus
cuguacaaauguuaaa

SEQ ID NO: 3275511 - RNA, 13 nt, Vaccinia virus
cgcaccaacaauu

SEQ ID NO: 3275512 - RNA, 22 nt, Vaccinia virus
agaggaccguugggaauuuuau

SEQ ID NO: 3275513 - RNA, 23 nt, Vaccinia virus
uaacgagugaucaaaucauugau

SEQ ID NO: 3275514 - RNA, 19 nt, Vaccinia virus
aaaaagccccaauuuacaa

SEQ ID NO: 3275515 - RNA, 22 nt, Vaccinia virus
uaccaauaugucuguacaaaug

SEQ ID NO: 3275516 - RNA, 15 nt, Vaccinia virus
auaacgugaaauaua

SEQ ID NO: 3275517 - RNA, 16 nt, Vaccinia virus
auuguaguauaugaua

SEQ ID NO: 3275518 - RNA, 20 nt, Vaccinia virus
uuaguacccacgucuuuuca

SEQ ID NO: 3275519 - RNA, 23 nt, Vaccinia virus
cagagauccacugucacuggaaa

SEQ ID NO: 3275520 - RNA, 22 nt, Vaccinia virus
acuguacaaggaauugaugaag

SEQ ID NO: 3275521 - RNA, 18 nt, Vaccinia virus
ugccuauuaggacagaua

SEQ ID NO: 3275522 - RNA, 12 nt, Vaccinia virus
uauaaauuaaag

SEQ ID NO: 3275523 - RNA, 18 nt, Vaccinia virus
aaauguucuuaacuacau

SEQ ID NO: 3275524 - RNA, 22 nt, Vaccinia virus
uauuccaaucauugauaucuuu

SEQ ID NO: 3275525 - RNA, 13 nt, Vaccinia virus
gcuaaaauaccua

SEQ ID NO: 3275526 - RNA, 17 nt, Vaccinia virus
gacacguuuauuucaua

SEQ ID NO: 3275527 - RNA, 15 nt, Vaccinia virus
cgguaccuuugucca

SEQ ID NO: 3275528 - RNA, 22 nt, Vaccinia virus
cuacaucaguuuuguauuccaa

SEQ ID NO: 3275529 - RNA, 12 nt, Vaccinia virus
auggaaauacuu

SEQ ID NO: 3275530 - RNA, 19 nt, Vaccinia virus
auauucuaacgauaauaga

SEQ ID NO: 3275531 - RNA, 11 nt, Vaccinia virus
uuauuaucuaa

SEQ ID NO: 3275532 - RNA, 11 nt, Vaccinia virus
uucaauguuua

SEQ ID NO: 3275533 - RNA, 21 nt, Vaccinia virus
uauaaaguccgcacuacuguu

SEQ ID NO: 3275534 - RNA, 20 nt, Vaccinia virus
acaacuuaaucugaugaaua

SEQ ID NO: 3275535 - RNA, 16 nt, Vaccinia virus
auuguuaauugaaaag

SEQ ID NO: 3275536 - RNA, 21 nt, Vaccinia virus
uauuaugaugaacuuuaucua

SEQ ID NO: 3275537 - RNA, 18 nt, Vaccinia virus
uuauuccaucaugucaac

SEQ ID NO: 3275538 - RNA, 19 nt, Vaccinia virus
ucguuaaacgccuuuagaa

SEQ ID NO: 3275539 - RNA, 15 nt, Vaccinia virus
uuucuuggcaaaaga

SEQ ID NO: 3275540 - RNA, 15 nt, Vaccinia virus
aaaauucgacaauga

SEQ ID NO: 3275541 - RNA, 14 nt, Vaccinia virus
gccgaacuaaaaaa

SEQ ID NO: 3275542 - RNA, 18 nt, Vaccinia virus
cuccauaguggacaacau

SEQ ID NO: 3275543 - RNA, 16 nt, Vaccinia virus
auacgaggaugaugaa

SEQ ID NO: 3275544 - RNA, 17 nt, Vaccinia virus
agaauuuagaaauauau

SEQ ID NO: 3275545 - RNA, 15 nt, Vaccinia virus
agucaagucaaugau

SEQ ID NO: 3275546 - RNA, 23 nt, Vaccinia virus
uuuacgguauagccucuagauaa

SEQ ID NO: 3275547 - RNA, 20 nt, Vaccinia virus
acuacaguaguaauuaauga

SEQ ID NO: 3275548 - RNA, 16 nt, Vaccinia virus
gauagaugauccagau

SEQ ID NO: 3275549 - RNA, 14 nt, Vaccinia virus
auuucguuucuuaa

SEQ ID NO: 3275550 - RNA, 13 nt, Vaccinia virus
cacauagaauaaa

SEQ ID NO: 3275551 - RNA, 20 nt, Vaccinia virus
cauagguagagauacuuuca

SEQ ID NO: 3275552 - RNA, 22 nt, Vaccinia virus
aucaucugcacuaauuaacagu

SEQ ID NO: 3275553 - RNA, 18 nt, Vaccinia virus
aaaucaaaauccauauca

SEQ ID NO: 3275554 - RNA, 14 nt, Vaccinia virus
auuacccauggaga

SEQ ID NO: 3275555 - RNA, 22 nt, Vaccinia virus
auauguauucgucuuucugaau

SEQ ID NO: 3275556 - RNA, 18 nt, Vaccinia virus
uucuccguucuuaauaag

SEQ ID NO: 3275557 - RNA, 18 nt, Vaccinia virus
acaauaucaguaucuucu

SEQ ID NO: 3275558 - RNA, 22 nt, Vaccinia virus
acauuaugccguuaucauuaau

SEQ ID NO: 3275559 - RNA, 16 nt, Vaccinia virus
aaugaaucccaaacau

SEQ ID NO: 3275560 - RNA, 17 nt, Vaccinia virus
cucucaucuacaaaaac

SEQ ID NO: 3275561 - RNA, 17 nt, Vaccinia virus
aaauaaacauaacauau

SEQ ID NO: 3275562 - RNA, 17 nt, Vaccinia virus
aaauauucauaacuaau

SEQ ID NO: 3275563 - RNA, 21 nt, Vaccinia virus
uagauuucauucagaggaugu

SEQ ID NO: 3275564 - RNA, 14 nt, Vaccinia virus
acuuuguuaauaau

SEQ ID NO: 3275565 - RNA, 12 nt, Vaccinia virus
auacucugaaag

SEQ ID NO: 3275566 - RNA, 17 nt, Vaccinia virus
uacguauuauauaugua

SEQ ID NO: 3275567 - RNA, 21 nt, Vaccinia virus
ugacuauugcguguagaguau

SEQ ID NO: 3275568 - RNA, 14 nt, Vaccinia virus
uuuauuaaauacuc

SEQ ID NO: 3275569 - RNA, 14 nt, Vaccinia virus
caucugcucaacaa

SEQ ID NO: 3275570 - RNA, 13 nt, Vaccinia virus
aauuuuaagaaau

SEQ ID NO: 3275571 - RNA, 16 nt, Vaccinia virus
aaauucccauucuaau

SEQ ID NO: 3275572 - RNA, 14 nt, Vaccinia virus
caagcgaauuauuu

SEQ ID NO: 3275573 - RNA, 15 nt, Vaccinia virus
auuuugucauuaacu

SEQ ID NO: 3275574 - RNA, 22 nt, Vaccinia virus
uucccauauccagacaacaauc

SEQ ID NO: 3275575 - RNA, 14 nt, Vaccinia virus
auaucauacaugau

SEQ ID NO: 3275576 - RNA, 14 nt, Vaccinia virus
aucuugauuaauaa

SEQ ID NO: 3275577 - RNA, 23 nt, Vaccinia virus
uuuuauaugucucgcauaaacau

SEQ ID NO: 3275578 - RNA, 15 nt, Vaccinia virus
aguuuaauaauacaa

SEQ ID NO: 3275579 - RNA, 15 nt, Vaccinia virus
aggaaauaaaucaua

SEQ ID NO: 3275580 - RNA, 22 nt, Vaccinia virus
agagacccugcgcuuucucuau

SEQ ID NO: 3275581 - RNA, 21 nt, Vaccinia virus
auuuuucuaccuuuucaauuu

SEQ ID NO: 3275582 - RNA, 13 nt, Vaccinia virus
aguccgcauuaug

SEQ ID NO: 3275583 - RNA, 21 nt, Vaccinia virus
uccuuccaagaagaagacuua

SEQ ID NO: 3275584 - RNA, 18 nt, Vaccinia virus
ugucuacuccaaugacug

SEQ ID NO: 3275585 - RNA, 19 nt, Vaccinia virus
augaucaggaaaguuuauu

SEQ ID NO: 3275586 - RNA, 20 nt, Vaccinia virus
ucaucauaguuacgauuuua

SEQ ID NO: 3275587 - RNA, 16 nt, Vaccinia virus
aaccacggaucguaau

SEQ ID NO: 3275588 - RNA, 22 nt, Vaccinia virus
aaguuuuauagagauagacgaa

SEQ ID NO: 3275589 - RNA, 23 nt, Vaccinia virus
guaauacuuuucuucauuacuuc

SEQ ID NO: 3275590 - RNA, 11 nt, Vaccinia virus
caaaaaaccau

SEQ ID NO: 3275591 - RNA, 14 nt, Vaccinia virus
agacgcccaaaaua

SEQ ID NO: 3275592 - RNA, 16 nt, Vaccinia virus
ucguucgaccuaaaau

SEQ ID NO: 3275593 - RNA, 15 nt, Vaccinia virus
ggaacauuaaaugua

SEQ ID NO: 3275594 - RNA, 14 nt, Vaccinia virus
acgaaauauuagaa

SEQ ID NO: 3275595 - RNA, 13 nt, Vaccinia virus
uccaauguauuua

SEQ ID NO: 3275596 - RNA, 12 nt, Vaccinia virus
auguuaaauaua

SEQ ID NO: 3275597 - RNA, 14 nt, Vaccinia virus
uauaaagacaaaca

SEQ ID NO: 3275598 - RNA, 14 nt, Vaccinia virus
uaauaaaaacauua

SEQ ID NO: 3275599 - RNA, 22 nt, Vaccinia virus
ucuuccggagaccccauaaaua

SEQ ID NO: 3275600 - RNA, 19 nt, Vaccinia virus
ugaugucaaagauuguaca

SEQ ID NO: 3275601 - RNA, 20 nt, Vaccinia virus
auagcaaggaugaaaaagga

SEQ ID NO: 3275602 - RNA, 21 nt, Vaccinia virus
auucauuaggauuaucaaauc

SEQ ID NO: 3275603 - RNA, 15 nt, Vaccinia virus
aaaauugauggauga

SEQ ID NO: 3275604 - RNA, 12 nt, Vaccinia virus
ucauuuagaaug

SEQ ID NO: 3275605 - RNA, 17 nt, Vaccinia virus
ugcauucguuuaaagau

SEQ ID NO: 3275606 - RNA, 21 nt, Vaccinia virus
aaucucgucaguauugacaau

SEQ ID NO: 3275607 - RNA, 19 nt, Vaccinia virus
agcuagaggaaaugaaaga

SEQ ID NO: 3275608 - RNA, 22 nt, Vaccinia virus
guuacacgcauccuuauaaaga

SEQ ID NO: 3275609 - RNA, 13 nt, Vaccinia virus
caauagaaucugu

SEQ ID NO: 3275610 - RNA, 20 nt, Vaccinia virus
auacucccacaaauacugac

SEQ ID NO: 3275611 - RNA, 20 nt, Vaccinia virus
uucuaauggaugauguucua

SEQ ID NO: 3275612 - RNA, 18 nt, Vaccinia virus
augauagaaaugaugaag

SEQ ID NO: 3275613 - RNA, 22 nt, Vaccinia virus
auacuucauuucuaaaauagua

SEQ ID NO: 3275614 - RNA, 16 nt, Vaccinia virus
auggcauugauaaugu

SEQ ID NO: 3275615 - RNA, 19 nt, Vaccinia virus
agauauguuuagagaaugc

SEQ ID NO: 3275616 - RNA, 14 nt, Vaccinia virus
uauuaaaauuauuu

SEQ ID NO: 3275617 - RNA, 13 nt, Vaccinia virus
cucucaucuuuua

SEQ ID NO: 3275618 - RNA, 15 nt, Vaccinia virus
auuauguaucaauau

SEQ ID NO: 3275619 - RNA, 14 nt, Vaccinia virus
gaaauaauauuaaa

SEQ ID NO: 3275620 - RNA, 18 nt, Vaccinia virus
augaaaaugguaucacac

SEQ ID NO: 3275621 - RNA, 14 nt, Vaccinia virus
aaacuaauucuguc

SEQ ID NO: 3275622 - RNA, 21 nt, Vaccinia virus
ugacgcguuuccuacauaaca

SEQ ID NO: 3275623 - RNA, 15 nt, Vaccinia virus
auaguauucuuguau

SEQ ID NO: 3275624 - RNA, 17 nt, Vaccinia virus
auauagaagauaaacau

SEQ ID NO: 3275625 - RNA, 15 nt, Vaccinia virus
aaacgcguacauaac

SEQ ID NO: 3275626 - RNA, 18 nt, Vaccinia virus
cuuauuccauuaucugaa

SEQ ID NO: 3275627 - RNA, 17 nt, Vaccinia virus
uaguuguuuaauuuauu

SEQ ID NO: 3275628 - RNA, 14 nt, Vaccinia virus
gucagaauucucuc

SEQ ID NO: 3275629 - RNA, 15 nt, Vaccinia virus
auacauugaucuaug

SEQ ID NO: 3275630 - RNA, 17 nt, Vaccinia virus
cucgcuuuguguaucau

SEQ ID NO: 3275631 - RNA, 19 nt, Vaccinia virus
aauuucgaagcuagcgaua

SEQ ID NO: 3275632 - RNA, 15 nt, Vaccinia virus
aucuugauuuauaga

SEQ ID NO: 3275633 - RNA, 16 nt, Vaccinia virus
aucugaagaaaguaau

SEQ ID NO: 3275634 - RNA, 19 nt, Vaccinia virus
uuuuucuucauuuaucaua

SEQ ID NO: 3275635 - RNA, 17 nt, Vaccinia virus
auaauggcuguuuguau

SEQ ID NO: 3275636 - RNA, 21 nt, Vaccinia virus
aaauucccaaguagauauccu

SEQ ID NO: 3275637 - RNA, 14 nt, Vaccinia virus
ugaguguagaugcu

SEQ ID NO: 3275638 - RNA, 19 nt, Vaccinia virus
aguuuuguucauuaauagu

SEQ ID NO: 3275639 - RNA, 14 nt, Vaccinia virus
uuuagaauuuccaa

SEQ ID NO: 3275640 - RNA, 20 nt, Vaccinia virus
gauuuuccaaaucaguaacu

SEQ ID NO: 3275641 - RNA, 13 nt, Vaccinia virus
aauaaaacuguau

SEQ ID NO: 3275642 - RNA, 14 nt, Vaccinia virus
ucauauucauacac

SEQ ID NO: 3275643 - RNA, 15 nt, Vaccinia virus
caaaagguagcuaau

SEQ ID NO: 3275644 - RNA, 14 nt, Vaccinia virus
auguuuuacucugg

SEQ ID NO: 3275645 - RNA, 13 nt, Vaccinia virus
uugauuauuuuga

SEQ ID NO: 3275646 - RNA, 17 nt, Vaccinia virus
auaauaucuuuaaucca

SEQ ID NO: 3275647 - RNA, 14 nt, Vaccinia virus
auauuauuaugaag

SEQ ID NO: 3275648 - RNA, 23 nt, Vaccinia virus
auaguaccuagaacgaugucaaa

SEQ ID NO: 3275649 - RNA, 14 nt, Vaccinia virus
uuaucgacaucuug

SEQ ID NO: 3275650 - RNA, 13 nt, Vaccinia virus
gauauucuucaga

SEQ ID NO: 3275651 - RNA, 14 nt, Vaccinia virus
uuaaacauuguuca

SEQ ID NO: 3275652 - RNA, 17 nt, Vaccinia virus
gcuaugaaggaaagaca

SEQ ID NO: 3275653 - RNA, 19 nt, Vaccinia virus
gaacuaacuauuacuauga

SEQ ID NO: 3275654 - RNA, 14 nt, Vaccinia virus
auacauuguugcau

SEQ ID NO: 3275655 - RNA, 23 nt, Vaccinia virus
ccaaaaaguguuuggcaauaaag

SEQ ID NO: 3275656 - RNA, 23 nt, Vaccinia virus
aaacuaugucaaaaauuguagaa

SEQ ID NO: 3275657 - RNA, 15 nt, Vaccinia virus
cuaucuaaauguaau

SEQ ID NO: 3275658 - RNA, 19 nt, Vaccinia virus
acccuucuacgucaucaaa

SEQ ID NO: 3275659 - RNA, 13 nt, Vaccinia virus
uggccgacgucag

SEQ ID NO: 3275660 - RNA, 19 nt, Vaccinia virus
aguauaucuacacauguau

SEQ ID NO: 3275661 - RNA, 20 nt, Vaccinia virus
ucaaucggauacagacacuc

SEQ ID NO: 3275662 - RNA, 19 nt, Vaccinia virus
auauuugugaaaaauauua

SEQ ID NO: 3275663 - RNA, 15 nt, Vaccinia virus
aauuguuugagauau

SEQ ID NO: 3275664 - RNA, 10 nt, Vaccinia virus
auuuaaacau

SEQ ID NO: 3275665 - RNA, 13 nt, Vaccinia virus
uuagacuagauac

SEQ ID NO: 3275666 - RNA, 20 nt, Vaccinia virus
cgauacaaaaugugucaaga

SEQ ID NO: 3275667 - RNA, 14 nt, Vaccinia virus
cugaaaauaaagau

SEQ ID NO: 3275668 - RNA, 18 nt, Vaccinia virus
uggagaucauuaaauguu

SEQ ID NO: 3275669 - RNA, 14 nt, Vaccinia virus
gaaaauaaauacaa

SEQ ID NO: 3275670 - RNA, 15 nt, Vaccinia virus
uccuauacucugaaa

SEQ ID NO: 3275671 - RNA, 20 nt, Vaccinia virus
uccauuuaaggcuuuaaaau

SEQ ID NO: 3275672 - RNA, 23 nt, Vaccinia virus
uuaaugagcguaaacaauaaucg

SEQ ID NO: 3275673 - RNA, 11 nt, Vaccinia virus
aagaaaugaua

SEQ ID NO: 3275674 - RNA, 23 nt, Vaccinia virus
aaaugaugcugguuauuauacau

SEQ ID NO: 3275675 - RNA, 15 nt, Vaccinia virus
augcaucauuaauuu

SEQ ID NO: 3275676 - RNA, 20 nt, Vaccinia virus
auguaauggagaguuaccuc

SEQ ID NO: 3275677 - RNA, 15 nt, Vaccinia virus
gauaauuauuucuac

SEQ ID NO: 3275678 - RNA, 21 nt, Vaccinia virus
ugucuaaacgaccaucuuuga

SEQ ID NO: 3275679 - RNA, 20 nt, Vaccinia virus
gcaucuagucuuaaauggag

SEQ ID NO: 3275680 - RNA, 18 nt, Vaccinia virus
uaugauauuccuggagau

SEQ ID NO: 3275681 - RNA, 20 nt, Vaccinia virus
caaggaacuaaauagauuua

SEQ ID NO: 3275682 - RNA, 22 nt, Vaccinia virus
caaauaaaucacuaaauaauau

SEQ ID NO: 3275683 - RNA, 17 nt, Vaccinia virus
gauccaaacaauguuuc

SEQ ID NO: 3275684 - RNA, 24 nt, Vaccinia virus
aguacauagcaucuucacaaauua

SEQ ID NO: 3275685 - RNA, 19 nt, Vaccinia virus
aaguucuucgacaaaucgu

SEQ ID NO: 3275686 - RNA, 19 nt, Vaccinia virus
aucacuaugaaacaaaugu

SEQ ID NO: 3275687 - RNA, 17 nt, Vaccinia virus
guagauaaucauuuaau

SEQ ID NO: 3275688 - RNA, 16 nt, Vaccinia virus
uucacguaaauacaaa

SEQ ID NO: 3275689 - RNA, 19 nt, Vaccinia virus
cauaaacugaucacuaauu

SEQ ID NO: 3275690 - RNA, 17 nt, Vaccinia virus
caucugauaauuuagau

SEQ ID NO: 3275691 - RNA, 18 nt, Vaccinia virus
aaaauauacguguacugu

SEQ ID NO: 3275692 - RNA, 17 nt, Vaccinia virus
auaaauuugucauuuau

SEQ ID NO: 3275693 - RNA, 13 nt, Vaccinia virus
auuuuaucaaacu

SEQ ID NO: 3275694 - RNA, 21 nt, Vaccinia virus
aauguuucgaugaaauagaua

SEQ ID NO: 3275695 - RNA, 13 nt, Vaccinia virus
uagacguauaagu

SEQ ID NO: 3275696 - RNA, 13 nt, Vaccinia virus
aauguaacuauag

SEQ ID NO: 3275697 - RNA, 21 nt, Vaccinia virus
cuaucgaugauagcacuguua

SEQ ID NO: 3275698 - RNA, 20 nt, Vaccinia virus
agaauuggaauaccaaauau

SEQ ID NO: 3275699 - RNA, 21 nt, Vaccinia virus
acgaugauauuaaaauuauuu

SEQ ID NO: 3275700 - RNA, 18 nt, Vaccinia virus
gauaaaauccuccuauca

SEQ ID NO: 3275701 - RNA, 16 nt, Vaccinia virus
caucgucucaucuguu

SEQ ID NO: 3275702 - RNA, 18 nt, Vaccinia virus
uuugugaaaacagauaac

SEQ ID NO: 3275703 - RNA, 17 nt, Vaccinia virus
uaguguugcuaucucuu

SEQ ID NO: 3275704 - RNA, 15 nt, Vaccinia virus
guaaagauauuucuc

SEQ ID NO: 3275705 - RNA, 21 nt, Vaccinia virus
aucaucuacuccaugucuauu

SEQ ID NO: 3275706 - RNA, 17 nt, Vaccinia virus
cauucaaccauucauaa

SEQ ID NO: 3275707 - RNA, 12 nt, Vaccinia virus
uacaaaugacua

SEQ ID NO: 3275708 - RNA, 15 nt, Vaccinia virus
acaagaucaugaaca

SEQ ID NO: 3275709 - RNA, 18 nt, Vaccinia virus
cagauugaacauacaguu

SEQ ID NO: 3275710 - RNA, 13 nt, Vaccinia virus
aaaauaauaucua

SEQ ID NO: 3275711 - RNA, 17 nt, Vaccinia virus
caacauccuuuaauggu

SEQ ID NO: 3275712 - RNA, 13 nt, Vaccinia virus
auaaauauacaau

SEQ ID NO: 3275713 - RNA, 15 nt, Vaccinia virus
uaauauugauacaua

SEQ ID NO: 3275714 - RNA, 21 nt, Vaccinia virus
agcuguuccaauaaauuauuu

SEQ ID NO: 3275715 - RNA, 15 nt, Vaccinia virus
agcuaaaaaugccac

SEQ ID NO: 3275716 - RNA, 13 nt, Vaccinia virus
aguuaaauauuaa

SEQ ID NO: 3275717 - RNA, 18 nt, Vaccinia virus
auauaacuaucaauauua

SEQ ID NO: 3275718 - RNA, 12 nt, Vaccinia virus
gcuguaaaucac

SEQ ID NO: 3275719 - RNA, 17 nt, Vaccinia virus
guaauuaguuucugguu

SEQ ID NO: 3275720 - RNA, 17 nt, Vaccinia virus
ccacgaugauaaauauc

SEQ ID NO: 3275721 - RNA, 16 nt, Vaccinia virus
uaguuaccgcaaagaa

SEQ ID NO: 3275722 - RNA, 20 nt, Vaccinia virus
uagucaucacauuaacuauu

SEQ ID NO: 3275723 - RNA, 19 nt, Vaccinia virus
uaauaaugauucaacaaug

SEQ ID NO: 3275724 - RNA, 17 nt, Vaccinia virus
cuauaguuuuauugcuu

SEQ ID NO: 3275725 - RNA, 21 nt, Vaccinia virus
uaaaaaccaucgucugaaucc

SEQ ID NO: 3275726 - RNA, 16 nt, Vaccinia virus
guuccugaccauccau

SEQ ID NO: 3275727 - RNA, 22 nt, Vaccinia virus
ugccauaauuuucauauauuga

SEQ ID NO: 3275728 - RNA, 14 nt, Vaccinia virus
auacgauucuauau

SEQ ID NO: 3275729 - RNA, 19 nt, Vaccinia virus
uaauuuguaaaccaucuua

SEQ ID NO: 3275730 - RNA, 14 nt, Vaccinia virus
ucccacauuauuuu

SEQ ID NO: 3275731 - RNA, 23 nt, Vaccinia virus
aaaucuaucuuuagcuucugaaa

SEQ ID NO: 3275732 - RNA, 15 nt, Vaccinia virus
cuccucauauggauc

SEQ ID NO: 3275733 - RNA, 23 nt, Vaccinia virus
gauucauucacuaucaaucgaua

SEQ ID NO: 3275734 - RNA, 14 nt, Vaccinia virus
auuuccaucaaaug

SEQ ID NO: 3275735 - RNA, 14 nt, Vaccinia virus
gucacgaugaugga

SEQ ID NO: 3275736 - RNA, 23 nt, Vaccinia virus
auaugacgacuucaaucaaacaa

SEQ ID NO: 3275737 - RNA, 19 nt, Vaccinia virus
acuguagauauuauauaga

SEQ ID NO: 3275738 - RNA, 20 nt, Vaccinia virus
aacuuacgauacaucuguuu

SEQ ID NO: 3275739 - RNA, 19 nt, Vaccinia virus
ucaucacuuagaacagauu

SEQ ID NO: 3275740 - RNA, 16 nt, Vaccinia virus
agacgacaacauguaa

SEQ ID NO: 3275741 - RNA, 14 nt, Vaccinia virus
auuuuaaaaaacug

SEQ ID NO: 3275742 - RNA, 15 nt, Vaccinia virus
auaguggacaacauu

SEQ ID NO: 3275743 - RNA, 22 nt, Vaccinia virus
caacaucuuaagcguagaaguu

SEQ ID NO: 3275744 - RNA, 18 nt, Vaccinia virus
cuaaauucaugucuaaug

SEQ ID NO: 3275745 - RNA, 20 nt, Vaccinia virus
acauaaacugaucacuaauu

SEQ ID NO: 3275746 - RNA, 20 nt, Vaccinia virus
aaaauguucuuaauagucua

SEQ ID NO: 3275747 - RNA, 20 nt, Vaccinia virus
aaacuuccucauuaagauug

SEQ ID NO: 3275748 - RNA, 14 nt, Vaccinia virus
auugguaaauccua

SEQ ID NO: 3275749 - RNA, 19 nt, Vaccinia virus
agugaaauguugucauuau

SEQ ID NO: 3275750 - RNA, 15 nt, Vaccinia virus
aucacauauuaaaaa

SEQ ID NO: 3275751 - RNA, 19 nt, Vaccinia virus
ucguauuggauucugaaau

SEQ ID NO: 3275752 - RNA, 19 nt, Vaccinia virus
ggugucuccauguacauac

SEQ ID NO: 3275753 - RNA, 13 nt, Vaccinia virus
uauuauguuuauc

SEQ ID NO: 3275754 - RNA, 20 nt, Vaccinia virus
uacaaucguucgaacucguc

SEQ ID NO: 3275755 - RNA, 18 nt, Vaccinia virus
aauacucuucaaaguuuc

SEQ ID NO: 3275756 - RNA, 13 nt, Vaccinia virus
auguaaaacauuu

SEQ ID NO: 3275757 - RNA, 20 nt, Vaccinia virus
aucaugauuggguagcaaau

SEQ ID NO: 3275758 - RNA, 21 nt, Vaccinia virus
auguauuucauuguucaucca

SEQ ID NO: 3275759 - RNA, 18 nt, Vaccinia virus
aucucuauaauaucuagu

SEQ ID NO: 3275760 - RNA, 12 nt, Vaccinia virus
gauuaacagagu

SEQ ID NO: 3275761 - RNA, 22 nt, Vaccinia virus
cucccggauauuuuuuacaauu

SEQ ID NO: 3275762 - RNA, 17 nt, Vaccinia virus
aggauacucuaugaaug

SEQ ID NO: 3275763 - RNA, 19 nt, Vaccinia virus
agaacuauaaaaacagaua

SEQ ID NO: 3275764 - RNA, 20 nt, Vaccinia virus
auucaagcaaaaacaaaaaa

SEQ ID NO: 3275765 - RNA, 18 nt, Vaccinia virus
gguucccaauuccaaaga

SEQ ID NO: 3275766 - RNA, 17 nt, Vaccinia virus
caugcauucaaauggau

SEQ ID NO: 3275767 - RNA, 13 nt, Vaccinia virus
ucgucucaucugu

SEQ ID NO: 3275768 - RNA, 20 nt, Vaccinia virus
acugcugaauguaucuucca

SEQ ID NO: 3275769 - RNA, 17 nt, Vaccinia virus
auaugaaaaacaugucu

SEQ ID NO: 3275770 - RNA, 16 nt, Vaccinia virus
acaaugaaaauggaua

SEQ ID NO: 3275771 - RNA, 23 nt, Vaccinia virus
ucauaaacaagcccgucaauaau

SEQ ID NO: 3275772 - RNA, 17 nt, Vaccinia virus
cuauauauucugcuaua

SEQ ID NO: 3275773 - RNA, 16 nt, Vaccinia virus
ucaaguaaagauuuca

SEQ ID NO: 3275774 - RNA, 24 nt, Vaccinia virus
aaauccaaauugcgacacuauuca

SEQ ID NO: 3275775 - RNA, 13 nt, Vaccinia virus
auaaagauauaca

SEQ ID NO: 3275776 - RNA, 19 nt, Vaccinia virus
ugaaccguaauauaucuag

SEQ ID NO: 3275777 - RNA, 13 nt, Vaccinia virus
guauugguaauau

SEQ ID NO: 3275778 - RNA, 18 nt, Vaccinia virus
uagaacgaugucaaaaua

SEQ ID NO: 3275779 - RNA, 23 nt, Vaccinia virus
gaagaauggaaaccuuuaaucua

SEQ ID NO: 3275780 - RNA, 16 nt, Vaccinia virus
auucgcuaaaaaauua

SEQ ID NO: 3275781 - RNA, 22 nt, Vaccinia virus
gauaauaauguuauuauaucua

SEQ ID NO: 3275782 - RNA, 14 nt, Vaccinia virus
auuugaucaguuua

SEQ ID NO: 3275783 - RNA, 18 nt, Vaccinia virus
auucuuuuauuaauguca

SEQ ID NO: 3275784 - RNA, 13 nt, Vaccinia virus
augacucugauuu

SEQ ID NO: 3275785 - RNA, 15 nt, Vaccinia virus
cuguuguacauacag

SEQ ID NO: 3275786 - RNA, 14 nt, Vaccinia virus
caaauguuaaacau

SEQ ID NO: 3275787 - RNA, 19 nt, Vaccinia virus
caaaaguaagcauuuccuu

SEQ ID NO: 3275788 - RNA, 20 nt, Vaccinia virus
aucuaugguauuaagaauuc

SEQ ID NO: 3275789 - RNA, 14 nt, Vaccinia virus
cgcccuuguauguu

SEQ ID NO: 3275790 - RNA, 13 nt, Vaccinia virus
uaggaaaaagaua

SEQ ID NO: 3275791 - RNA, 16 nt, Vaccinia virus
uaauugggugaagaau

SEQ ID NO: 3275792 - RNA, 14 nt, Vaccinia virus
ucuuucaggaaagc

SEQ ID NO: 3275793 - RNA, 18 nt, Vaccinia virus
aggaaauugauaaugagu

SEQ ID NO: 3275794 - RNA, 19 nt, Vaccinia virus
auggaaaaguucaacauga

SEQ ID NO: 3275795 - RNA, 21 nt, Vaccinia virus
ccacguaaaacuuaaaauuua

SEQ ID NO: 3275796 - RNA, 16 nt, Vaccinia virus
gaaauacaaaauguua

SEQ ID NO: 3275797 - RNA, 20 nt, Vaccinia virus
uaaacucgcuuaauaucuuc

SEQ ID NO: 3275798 - RNA, 11 nt, Vaccinia virus
gaaauuagaaa

SEQ ID NO: 3275799 - RNA, 21 nt, Vaccinia virus
aaauacauaugacaaacauug

SEQ ID NO: 3275800 - RNA, 18 nt, Vaccinia virus
uaucaauccaacaaaugc

SEQ ID NO: 3275801 - RNA, 18 nt, Vaccinia virus
uagaaaaaacauguggua

SEQ ID NO: 3275802 - RNA, 15 nt, Vaccinia virus
gaauuugauacuguc

SEQ ID NO: 3275803 - RNA, 12 nt, Vaccinia virus
uccuggugauau

SEQ ID NO: 3275804 - RNA, 23 nt, Vaccinia virus
cuaauaacacuuccaguaucaau

SEQ ID NO: 3275805 - RNA, 16 nt, Vaccinia virus
augcaaagucuaaaua

SEQ ID NO: 3275806 - RNA, 18 nt, Vaccinia virus
aucuuuaauaucuagauu

SEQ ID NO: 3275807 - RNA, 22 nt, Vaccinia virus
acgagaauggcguuugauauau

SEQ ID NO: 3275808 - RNA, 23 nt, Vaccinia virus
agugauauagaucccaaaucuuc

SEQ ID NO: 3275809 - RNA, 18 nt, Vaccinia virus
ucgacguuucucaaaguc

SEQ ID NO: 3275810 - RNA, 14 nt, Vaccinia virus
guauacucuauucg

SEQ ID NO: 3275811 - RNA, 20 nt, Vaccinia virus
acauaaguauauaauaaaua

SEQ ID NO: 3275812 - RNA, 19 nt, Vaccinia virus
guguguugacuauaacaga

SEQ ID NO: 3275813 - RNA, 17 nt, Vaccinia virus
auguaaucgaaauaaua

SEQ ID NO: 3275814 - RNA, 17 nt, Vaccinia virus
cauucugcaauauuguu

SEQ ID NO: 3275815 - RNA, 22 nt, Vaccinia virus
ucuucuugagaucccacaucau

SEQ ID NO: 3275816 - RNA, 17 nt, Vaccinia virus
gaaauuagaaaguaaug

SEQ ID NO: 3275817 - RNA, 15 nt, Vaccinia virus
aguggaguugaagau

SEQ ID NO: 3275818 - RNA, 17 nt, Vaccinia virus
gcuaguacucuuaagag

SEQ ID NO: 3275819 - RNA, 22 nt, Vaccinia virus
guaaugaacagacuauuuauca

SEQ ID NO: 3275820 - RNA, 17 nt, Vaccinia virus
uuauugauaauuguaaa

SEQ ID NO: 3275821 - RNA, 17 nt, Vaccinia virus
uuauuacugaauuauua

SEQ ID NO: 3275822 - RNA, 20 nt, Vaccinia virus
acuuuauugccuguaauaau

SEQ ID NO: 3275823 - RNA, 23 nt, Vaccinia virus
agagaucuacuggcgaaauggua

SEQ ID NO: 3275824 - RNA, 17 nt, Vaccinia virus
ugcaaggaaucaucuga

SEQ ID NO: 3275825 - RNA, 21 nt, Vaccinia virus
aguaagacaauaggaaaucua

SEQ ID NO: 3275826 - RNA, 22 nt, Vaccinia virus
aauauauuuggauuuguggugu

SEQ ID NO: 3275827 - RNA, 20 nt, Vaccinia virus
agagucacgaauaacgauau

SEQ ID NO: 3275828 - RNA, 14 nt, Vaccinia virus
aaauacaaauauau

SEQ ID NO: 3275829 - RNA, 20 nt, Vaccinia virus
aaccaacgucauaaaaaugu

SEQ ID NO: 3275830 - RNA, 12 nt, Vaccinia virus
guagauauugcu

SEQ ID NO: 3275831 - RNA, 21 nt, Vaccinia virus
uuaaugcuacagauauuauca

SEQ ID NO: 3275832 - RNA, 13 nt, Vaccinia virus
gacgauauuucug

SEQ ID NO: 3275833 - RNA, 17 nt, Vaccinia virus
augaaaaaaaacacuga

SEQ ID NO: 3275834 - RNA, 15 nt, Vaccinia virus
uuaacaucuauuaau

SEQ ID NO: 3275835 - RNA, 18 nt, Vaccinia virus
uaaaccgauaguguauaa

SEQ ID NO: 3275836 - RNA, 14 nt, Vaccinia virus
ccucucuuaacaaa

SEQ ID NO: 3275837 - RNA, 15 nt, Vaccinia virus
aaccuauaaugucca

SEQ ID NO: 3275838 - RNA, 18 nt, Vaccinia virus
aauaacuaaaaauguaaa

SEQ ID NO: 3275839 - RNA, 13 nt, Vaccinia virus
uccuaucucugac

SEQ ID NO: 3275840 - RNA, 15 nt, Vaccinia virus
aagaaaacaaacauc

SEQ ID NO: 3275841 - RNA, 20 nt, Vaccinia virus
uaugaucaauucuggauuau

SEQ ID NO: 3275842 - RNA, 20 nt, Vaccinia virus
cuuuuagaagugauucuuug

SEQ ID NO: 3275843 - RNA, 21 nt, Vaccinia virus
accaccucucuggaagacagc

SEQ ID NO: 3275844 - RNA, 18 nt, Vaccinia virus
uguauguacggucugaua

SEQ ID NO: 3275845 - RNA, 21 nt, Vaccinia virus
gagauuuguuuuguuaaacaa

SEQ ID NO: 3275846 - RNA, 20 nt, Vaccinia virus
agaucuaaagauaaucuucu

SEQ ID NO: 3275847 - RNA, 19 nt, Vaccinia virus
auauaggaccacuagcaaa

SEQ ID NO: 3275848 - RNA, 15 nt, Vaccinia virus
aacuaguguagaaaa

SEQ ID NO: 3275849 - RNA, 15 nt, Vaccinia virus
cuucaagagaugucu

SEQ ID NO: 3275850 - RNA, 11 nt, Vaccinia virus
cucacauuuca

SEQ ID NO: 3275851 - RNA, 14 nt, Vaccinia virus
gauguuuguucauu

SEQ ID NO: 3275852 - RNA, 19 nt, Vaccinia virus
auucugcggcuauagaaaa

SEQ ID NO: 3275853 - RNA, 18 nt, Vaccinia virus
uacagauguuacaaaugu

SEQ ID NO: 3275854 - RNA, 18 nt, Vaccinia virus
caaaaauuuuuuauuuca

SEQ ID NO: 3275855 - RNA, 21 nt, Vaccinia virus
auucgcuuagcgucuucuaua

SEQ ID NO: 3275856 - RNA, 22 nt, Vaccinia virus
uauaauacuuaaaaauggaugu

SEQ ID NO: 3275857 - RNA, 14 nt, Vaccinia virus
ucaucauuaucauu

SEQ ID NO: 3275858 - RNA, 15 nt, Vaccinia virus
uuaaaauauuauuua

SEQ ID NO: 3275859 - RNA, 13 nt, Vaccinia virus
auuauacaugugu

SEQ ID NO: 3275860 - RNA, 22 nt, Vaccinia virus
uauaagauauccauaucaucau

SEQ ID NO: 3275861 - RNA, 14 nt, Vaccinia virus
ucaaauacuucaaa

SEQ ID NO: 3275862 - RNA, 18 nt, Vaccinia virus
cguuagaguuuauacacu

SEQ ID NO: 3275863 - RNA, 19 nt, Vaccinia virus
auugacgaaacaauguuuc

SEQ ID NO: 3275864 - RNA, 21 nt, Vaccinia virus
uagugugacuuaacuuguaau

SEQ ID NO: 3275865 - RNA, 23 nt, Vaccinia virus
ccuauccaauaauccaucaucug

SEQ ID NO: 3275866 - RNA, 12 nt, Vaccinia virus
uaugacgucucu

SEQ ID NO: 3275867 - RNA, 19 nt, Vaccinia virus
ugcccccauucuuaauaau

SEQ ID NO: 3275868 - RNA, 18 nt, Vaccinia virus
ucagaacacacuuuucuc

SEQ ID NO: 3275869 - RNA, 23 nt, Vaccinia virus
ucugaaauaacguauuuaaacaa

SEQ ID NO: 3275870 - RNA, 17 nt, Vaccinia virus
ugaaguuaugacauuca

SEQ ID NO: 3275871 - RNA, 13 nt, Vaccinia virus
uaucuacacaugu

SEQ ID NO: 3275872 - RNA, 18 nt, Vaccinia virus
uagcaccauuaucuuugu

SEQ ID NO: 3275873 - RNA, 17 nt, Vaccinia virus
ucaaguuaugaaaauag

SEQ ID NO: 3275874 - RNA, 16 nt, Vaccinia virus
aucucucauaagaaag

SEQ ID NO: 3275875 - RNA, 18 nt, Vaccinia virus
agacaaugcuaauauauu

SEQ ID NO: 3275876 - RNA, 14 nt, Vaccinia virus
uauaaccuuaacuu

SEQ ID NO: 3275877 - RNA, 16 nt, Vaccinia virus
uuauuuauauuuggua

SEQ ID NO: 3275878 - RNA, 18 nt, Vaccinia virus
uacuguaaacacauaucc

SEQ ID NO: 3275879 - RNA, 19 nt, Vaccinia virus
uagagauacuuucagucug

SEQ ID NO: 3275880 - RNA, 17 nt, Vaccinia virus
uagagauucgaugguuu

SEQ ID NO: 3275881 - RNA, 21 nt, Vaccinia virus
uauacaagaguggaaacucac

SEQ ID NO: 3275882 - RNA, 16 nt, Vaccinia virus
aaauguauaaaaaacu

SEQ ID NO: 3275883 - RNA, 14 nt, Vaccinia virus
cauuuauacacaau

SEQ ID NO: 3275884 - RNA, 20 nt, Vaccinia virus
gagauuggguuaauaaauac

SEQ ID NO: 3275885 - RNA, 22 nt, Vaccinia virus
gcuauauuccuguuaucaucau

SEQ ID NO: 3275886 - RNA, 15 nt, Vaccinia virus
caucguauacuaaca

SEQ ID NO: 3275887 - RNA, 14 nt, Vaccinia virus
aagauaaaguuuau

SEQ ID NO: 3275888 - RNA, 19 nt, Vaccinia virus
ugcaacggcgaaacaaaau

SEQ ID NO: 3275889 - RNA, 16 nt, Vaccinia virus
acucugaaaagaaagu

SEQ ID NO: 3275890 - RNA, 18 nt, Vaccinia virus
cgugguuguuuaucacaa

SEQ ID NO: 3275891 - RNA, 21 nt, Vaccinia virus
aacgauuugaucgauuacauu

SEQ ID NO: 3275892 - RNA, 21 nt, Vaccinia virus
agguuacguauagucuauaug

SEQ ID NO: 3275893 - RNA, 15 nt, Vaccinia virus
gaucuccaacaaauu

SEQ ID NO: 3275894 - RNA, 17 nt, Vaccinia virus
ucguacaaggauuucaa

SEQ ID NO: 3275895 - RNA, 19 nt, Vaccinia virus
guaagauuccuaaauuagu

SEQ ID NO: 3275896 - RNA, 12 nt, Vaccinia virus
acacuaagaugc

SEQ ID NO: 3275897 - RNA, 17 nt, Vaccinia virus
uuauccauuuauacauu

SEQ ID NO: 3275898 - RNA, 19 nt, Vaccinia virus
gcguucaagauuaucuuua

SEQ ID NO: 3275899 - RNA, 23 nt, Vaccinia virus
gauauuuucuuucuaucauggau

SEQ ID NO: 3275900 - RNA, 18 nt, Vaccinia virus
auuuaacauuuuggcaaa

SEQ ID NO: 3275901 - RNA, 13 nt, Vaccinia virus
caccaaacauauu

SEQ ID NO: 3275902 - RNA, 21 nt, Vaccinia virus
ucuaacuggugaguuaauauu

SEQ ID NO: 3275903 - RNA, 14 nt, Vaccinia virus
gacguguuauuaca

SEQ ID NO: 3275904 - RNA, 16 nt, Vaccinia virus
auacaaauuuuaagaa

SEQ ID NO: 3275905 - RNA, 13 nt, Vaccinia virus
uacuaaaaaaugu

SEQ ID NO: 3275906 - RNA, 20 nt, Vaccinia virus
uguuauuacuacugaagaac

SEQ ID NO: 3275907 - RNA, 17 nt, Vaccinia virus
auauaauuauacuaucg

SEQ ID NO: 3275908 - RNA, 12 nt, Vaccinia virus
aaaguuugagau

SEQ ID NO: 3275909 - RNA, 16 nt, Vaccinia virus
ucuucuacuauugcaa

SEQ ID NO: 3275910 - RNA, 12 nt, Vaccinia virus
auucaaauccuu

SEQ ID NO: 3275911 - RNA, 22 nt, Vaccinia virus
augauuuuacugcaauauguau

SEQ ID NO: 3275912 - RNA, 23 nt, Vaccinia virus
caauuauaugguagauuguuaac

SEQ ID NO: 3275913 - RNA, 20 nt, Vaccinia virus
aguuucuugagugcgaaugu

SEQ ID NO: 3275914 - RNA, 20 nt, Vaccinia virus
cuguaaacuaaguagagauu

SEQ ID NO: 3275915 - RNA, 21 nt, Vaccinia virus
uggaagaugcuauaucaaaau

SEQ ID NO: 3275916 - RNA, 14 nt, Vaccinia virus
auauuguuacacca

SEQ ID NO: 3275917 - RNA, 17 nt, Vaccinia virus
uguauuuauaaccuuuu

SEQ ID NO: 3275918 - RNA, 16 nt, Vaccinia virus
auuuuuaguuacagaa

SEQ ID NO: 3275919 - RNA, 16 nt, Vaccinia virus
auacuaccuguuauau

SEQ ID NO: 3275920 - RNA, 19 nt, Vaccinia virus
augaucgucuuuuguggaa

SEQ ID NO: 3275921 - RNA, 13 nt, Vaccinia virus
gagauuaaugcua

SEQ ID NO: 3275922 - RNA, 17 nt, Vaccinia virus
uaaauuaguucauacac

SEQ ID NO: 3275923 - RNA, 17 nt, Vaccinia virus
aguucauuauaaauucu

SEQ ID NO: 3275924 - RNA, 19 nt, Vaccinia virus
guaagaagauuauauucua

SEQ ID NO: 3275925 - RNA, 15 nt, Vaccinia virus
auuagaugagaaauu

SEQ ID NO: 3275926 - RNA, 15 nt, Vaccinia virus
gacauaguaauacau

SEQ ID NO: 3275927 - RNA, 13 nt, Vaccinia virus
caagaaugauauc

SEQ ID NO: 3275928 - RNA, 14 nt, Vaccinia virus
ucacuagaaacuag

SEQ ID NO: 3275929 - RNA, 23 nt, Vaccinia virus
uucuccaugaauuaauacauauu

SEQ ID NO: 3275930 - RNA, 14 nt, Vaccinia virus
uuuuaaggggaaaa

SEQ ID NO: 3275931 - RNA, 16 nt, Vaccinia virus
uggauuaaacauacua

SEQ ID NO: 3275932 - RNA, 23 nt, Vaccinia virus
cuacuaguauagaucaaauacuu

SEQ ID NO: 3275933 - RNA, 19 nt, Vaccinia virus
cuuuaucucauuugagaau

SEQ ID NO: 3275934 - RNA, 19 nt, Vaccinia virus
uacauggucucagaaguag

SEQ ID NO: 3275935 - RNA, 14 nt, Vaccinia virus
acuacuucauuaau

SEQ ID NO: 3275936 - RNA, 13 nt, Vaccinia virus
uaauaagaauaaa

SEQ ID NO: 3275937 - RNA, 21 nt, Vaccinia virus
uaucucacccucuuggaucau

SEQ ID NO: 3275938 - RNA, 23 nt, Vaccinia virus
auagaacacccguagaaauacua

SEQ ID NO: 3275939 - RNA, 14 nt, Vaccinia virus
ucagcgugauuuuc

SEQ ID NO: 3275940 - RNA, 23 nt, Vaccinia virus
gaacagcuaucaaaauauguaga

SEQ ID NO: 3275941 - RNA, 22 nt, Vaccinia virus
auagagcccacguuuaaacauu

SEQ ID NO: 3275942 - RNA, 23 nt, Vaccinia virus
aucuuuaacgauaccuauaccua

SEQ ID NO: 3275943 - RNA, 19 nt, Vaccinia virus
uucuuaucaauaacauauu

SEQ ID NO: 3275944 - RNA, 14 nt, Vaccinia virus
aaaaagaugauaua

SEQ ID NO: 3275945 - RNA, 20 nt, Vaccinia virus
ucuauuagaguauugcauuu

SEQ ID NO: 3275946 - RNA, 19 nt, Vaccinia virus
ucagaacgcucgucaauau

SEQ ID NO: 3275947 - RNA, 19 nt, Vaccinia virus
aacagagccaucuguaaaa

SEQ ID NO: 3275948 - RNA, 15 nt, Vaccinia virus
guaauggauaaugac

SEQ ID NO: 3275949 - RNA, 12 nt, Vaccinia virus
aguuucagaauu

SEQ ID NO: 3275950 - RNA, 23 nt, Vaccinia virus
ugauucgaauuuaguuucuucga

SEQ ID NO: 3275951 - RNA, 18 nt, Vaccinia virus
acagauggauuaaaucgu

SEQ ID NO: 3275952 - RNA, 22 nt, Vaccinia virus
aaaacugguuuaacuaauaaua

SEQ ID NO: 3275953 - RNA, 13 nt, Vaccinia virus
caucuauuccaaa

SEQ ID NO: 3275954 - RNA, 15 nt, Vaccinia virus
gauaauuauuuccag

SEQ ID NO: 3275955 - RNA, 13 nt, Vaccinia virus
gcaguuucaauau

SEQ ID NO: 3275956 - RNA, 21 nt, Vaccinia virus
aauauuuaguuuauucauaau

SEQ ID NO: 3275957 - RNA, 11 nt, Vaccinia virus
ggauacaaaaa

SEQ ID NO: 3275958 - RNA, 17 nt, Vaccinia virus
uauccuauauacgaaaa

SEQ ID NO: 3275959 - RNA, 22 nt, Vaccinia virus
aaucuaauaacuugaaagagau

SEQ ID NO: 3275960 - RNA, 17 nt, Vaccinia virus
ugauuacauuuuugaua

SEQ ID NO: 3275961 - RNA, 16 nt, Vaccinia virus
aucacauaugcaaaga

SEQ ID NO: 3275962 - RNA, 13 nt, Vaccinia virus
uguuuuauaaaau

SEQ ID NO: 3275963 - RNA, 22 nt, Vaccinia virus
ugaguaguuggaagaaucucau

SEQ ID NO: 3275964 - RNA, 16 nt, Vaccinia virus
uguauaaucaacucua

SEQ ID NO: 3275965 - RNA, 16 nt, Vaccinia virus
agaaugaagauaucau

SEQ ID NO: 3275966 - RNA, 13 nt, Vaccinia virus
agacguuguacaa

SEQ ID NO: 3275967 - RNA, 18 nt, Vaccinia virus
uaaauauugauguuaaua

SEQ ID NO: 3275968 - RNA, 15 nt, Vaccinia virus
uauuauuuaaacgaa

SEQ ID NO: 3275969 - RNA, 17 nt, Vaccinia virus
cuguacaccauagcacu

SEQ ID NO: 3275970 - RNA, 15 nt, Vaccinia virus
gcaaagaaugaugac

SEQ ID NO: 3275971 - RNA, 23 nt, Vaccinia virus
agacaagcggguaaaugauuauu

SEQ ID NO: 3275972 - RNA, 19 nt, Vaccinia virus
auuguauacugucuaaacg

SEQ ID NO: 3275973 - RNA, 13 nt, Vaccinia virus
uaauauuuugcau

SEQ ID NO: 3275974 - RNA, 17 nt, Vaccinia virus
ucuacuuuaucuauuca

SEQ ID NO: 3275975 - RNA, 13 nt, Vaccinia virus
ugaauaaggaaua

SEQ ID NO: 3275976 - RNA, 17 nt, Vaccinia virus
ucauuaaguucacuaga

SEQ ID NO: 3275977 - RNA, 15 nt, Vaccinia virus
aauaugugcucugcg

SEQ ID NO: 3275978 - RNA, 22 nt, Vaccinia virus
caagaauauacaaguauuauuu

SEQ ID NO: 3275979 - RNA, 19 nt, Vaccinia virus
uaauaucuauauuuccagc

SEQ ID NO: 3275980 - RNA, 13 nt, Vaccinia virus
caacaaugauaua

SEQ ID NO: 3275981 - RNA, 17 nt, Vaccinia virus
aaguuaguuauuuuacg

SEQ ID NO: 3275982 - RNA, 22 nt, Vaccinia virus
aucuaaacagacgacaacaugu

SEQ ID NO: 3275983 - RNA, 23 nt, Vaccinia virus
aucaagauguguauguuugugaa

SEQ ID NO: 3275984 - RNA, 13 nt, Vaccinia virus
aauauucuguucu

SEQ ID NO: 3275985 - RNA, 9 nt, Vaccinia virus
uuagaaaaa

SEQ ID NO: 3275986 - RNA, 14 nt, Vaccinia virus
ugcagaauauuucu

SEQ ID NO: 3275987 - RNA, 22 nt, Vaccinia virus
ucuugaggguuguguuaaauug

SEQ ID NO: 3275988 - RNA, 18 nt, Vaccinia virus
uugauauauaauuuacag

SEQ ID NO: 3275989 - RNA, 12 nt, Vaccinia virus
cauaacauaauu

SEQ ID NO: 3275990 - RNA, 21 nt, Vaccinia virus
agacugacuucuaacaaacau

SEQ ID NO: 3275991 - RNA, 16 nt, Vaccinia virus
auaaucaauacggcca

SEQ ID NO: 3275992 - RNA, 17 nt, Vaccinia virus
uggaugauauagaucuu

SEQ ID NO: 3275993 - RNA, 16 nt, Vaccinia virus
uuaaauuauuauuaau

SEQ ID NO: 3275994 - RNA, 17 nt, Vaccinia virus
caagaacuacaaaaguu

SEQ ID NO: 3275995 - RNA, 14 nt, Vaccinia virus
uacagauacagaua

SEQ ID NO: 3275996 - RNA, 21 nt, Vaccinia virus
uaaguuacagcgacacgguau

SEQ ID NO: 3275997 - RNA, 19 nt, Vaccinia virus
auuguaaaagacaaauaua

SEQ ID NO: 3275998 - RNA, 19 nt, Vaccinia virus
ucgucugugaaacaucacg

SEQ ID NO: 3275999 - RNA, 14 nt, Vaccinia virus
cuuaacuauuuccg

SEQ ID NO: 3276000 - RNA, 13 nt, Vaccinia virus
cuuuauuaucuau

SEQ ID NO: 3276001 - RNA, 22 nt, Vaccinia virus
ccagauggaguggaagacacug

SEQ ID NO: 3276002 - RNA, 23 nt, Vaccinia virus
ucguuccaagucauaucuagaau

SEQ ID NO: 3276003 - RNA, 14 nt, Vaccinia virus
uauaauguagacau

SEQ ID NO: 3276004 - RNA, 15 nt, Vaccinia virus
guacaacauacuguu

SEQ ID NO: 3276005 - RNA, 17 nt, Vaccinia virus
gaggcuaaaacacauuu

SEQ ID NO: 3276006 - RNA, 15 nt, Vaccinia virus
ucacucaauaucuag

SEQ ID NO: 3276007 - RNA, 19 nt, Vaccinia virus
gaaucuaccuauagaaaag

SEQ ID NO: 3276008 - RNA, 16 nt, Vaccinia virus
agcauauuagaaucua

SEQ ID NO: 3276009 - RNA, 22 nt, Vaccinia virus
ugcaucaacaauuacaaaugag

SEQ ID NO: 3276010 - RNA, 17 nt, Vaccinia virus
augacuuaugaauacua

SEQ ID NO: 3276011 - RNA, 15 nt, Vaccinia virus
ccaucucuauguuuc

SEQ ID NO: 3276012 - RNA, 17 nt, Vaccinia virus
cagcggcuauuaauaau

SEQ ID NO: 3276013 - RNA, 23 nt, Vaccinia virus
uaccaucuucuuugauuaaugau

SEQ ID NO: 3276014 - RNA, 22 nt, Vaccinia virus
cuaauugaucaagaguaacuau

SEQ ID NO: 3276015 - RNA, 23 nt, Vaccinia virus
agauauuauacaaaauacuauau

SEQ ID NO: 3276016 - RNA, 14 nt, Vaccinia virus
aagucauaaaucau

SEQ ID NO: 3276017 - RNA, 15 nt, Vaccinia virus
uuauuucuucugaau

SEQ ID NO: 3276018 - RNA, 23 nt, Vaccinia virus
aucauuucuauaauuuaggaaug

SEQ ID NO: 3276019 - RNA, 20 nt, Vaccinia virus
gaggaguuauugauauuaac

SEQ ID NO: 3276020 - RNA, 20 nt, Vaccinia virus
uaauuucguuaaaacauuca

SEQ ID NO: 3276021 - RNA, 16 nt, Vaccinia virus
caaacaauuuuaacag

SEQ ID NO: 3276022 - RNA, 14 nt, Vaccinia virus
auuaucaaaagaca

SEQ ID NO: 3276023 - RNA, 17 nt, Vaccinia virus
aauuuuuucguguucca

SEQ ID NO: 3276024 - RNA, 17 nt, Vaccinia virus
uuuuuaaaaucaucauu

SEQ ID NO: 3276025 - RNA, 18 nt, Vaccinia virus
guuagaaagcagauuaga

SEQ ID NO: 3276026 - RNA, 19 nt, Vaccinia virus
gauuccacggaagaacuac

SEQ ID NO: 3276027 - RNA, 15 nt, Vaccinia virus
uuaacguauaaauga

SEQ ID NO: 3276028 - RNA, 22 nt, Vaccinia virus
gucucauggccguguaugaaau

SEQ ID NO: 3276029 - RNA, 22 nt, Vaccinia virus
uaagaauaauuuugaagcauug

SEQ ID NO: 3276030 - RNA, 17 nt, Vaccinia virus
uagaacuuuuaauuuug

SEQ ID NO: 3276031 - RNA, 23 nt, Vaccinia virus
uuagcaucagucuccacacuauu

SEQ ID NO: 3276032 - RNA, 18 nt, Vaccinia virus
cguaagauaaaguuuaua

SEQ ID NO: 3276033 - RNA, 16 nt, Vaccinia virus
aauacacguuaauaca

SEQ ID NO: 3276034 - RNA, 20 nt, Vaccinia virus
aguaucuuuuguucuagaug

SEQ ID NO: 3276035 - RNA, 15 nt, Vaccinia virus
aguuggaaguuuaau

SEQ ID NO: 3276036 - RNA, 15 nt, Vaccinia virus
cucguuuaaacagaa

SEQ ID NO: 3276037 - RNA, 21 nt, Vaccinia virus
ugaagaauuuauauaaaucau

SEQ ID NO: 3276038 - RNA, 12 nt, Vaccinia virus
gaauauauuaau

SEQ ID NO: 3276039 - RNA, 16 nt, Vaccinia virus
uauacuaaucaauaau

SEQ ID NO: 3276040 - RNA, 13 nt, Vaccinia virus
uaauaucauauag

SEQ ID NO: 3276041 - RNA, 16 nt, Vaccinia virus
cguucuuugaugugga

SEQ ID NO: 3276042 - RNA, 23 nt, Vaccinia virus
uggaaaacuuuaauaacaaagaa

SEQ ID NO: 3276043 - RNA, 19 nt, Vaccinia virus
gaugaaggugggacuauau

SEQ ID NO: 3276044 - RNA, 19 nt, Vaccinia virus
uaacaaaaauuaugaaaua

SEQ ID NO: 3276045 - RNA, 21 nt, Vaccinia virus
uauccgcacaugcagaagaac

SEQ ID NO: 3276046 - RNA, 14 nt, Vaccinia virus
auggaaaguguaaa

SEQ ID NO: 3276047 - RNA, 13 nt, Vaccinia virus
aauggauccacug

SEQ ID NO: 3276048 - RNA, 21 nt, Vaccinia virus
uugucugacugaauacauccu

SEQ ID NO: 3276049 - RNA, 12 nt, Vaccinia virus
agcaaaaauaua

SEQ ID NO: 3276050 - RNA, 17 nt, Vaccinia virus
aucacuguagugcuaug

SEQ ID NO: 3276051 - RNA, 15 nt, Vaccinia virus
agccaauacuuuaac

SEQ ID NO: 3276052 - RNA, 20 nt, Vaccinia virus
uauaauacggacuucauaau

SEQ ID NO: 3276053 - RNA, 22 nt, Vaccinia virus
auaaccacaucuggaaggcuua

SEQ ID NO: 3276054 - RNA, 20 nt, Vaccinia virus
cuuaagaaaauuauuacuag

SEQ ID NO: 3276055 - RNA, 15 nt, Vaccinia virus
aauuagaaagugaua

SEQ ID NO: 3276056 - RNA, 16 nt, Vaccinia virus
caauuuagcugcauua

SEQ ID NO: 3276057 - RNA, 17 nt, Vaccinia virus
guauucugaugauauua

SEQ ID NO: 3276058 - RNA, 15 nt, Vaccinia virus
auuucacuacuaucu

SEQ ID NO: 3276059 - RNA, 23 nt, Vaccinia virus
aucgaucaaaagacuauacauuu

SEQ ID NO: 3276060 - RNA, 12 nt, Vaccinia virus
uugauuuuggaa

SEQ ID NO: 3276061 - RNA, 17 nt, Vaccinia virus
uaucaauccaacaaaug

SEQ ID NO: 3276062 - RNA, 22 nt, Vaccinia virus
uuuauuaaugucaggaaaugua

SEQ ID NO: 3276063 - RNA, 15 nt, Vaccinia virus
cuagacaauauucca

SEQ ID NO: 3276064 - RNA, 17 nt, Vaccinia virus
auuauuaaacaauacuc

SEQ ID NO: 3276065 - RNA, 14 nt, Vaccinia virus
acuaucuaaaugua

SEQ ID NO: 3276066 - RNA, 22 nt, Vaccinia virus
auauuuggcuaaacuauauaau

SEQ ID NO: 3276067 - RNA, 23 nt, Vaccinia virus
acaucuaaaaaauccuuaaugau

SEQ ID NO: 3276068 - RNA, 16 nt, Vaccinia virus
aauuuguucaaaauaa

SEQ ID NO: 3276069 - RNA, 22 nt, Vaccinia virus
gacacugaacacguuaacgaua

SEQ ID NO: 3276070 - RNA, 15 nt, Vaccinia virus
aaugacuccaugaaa

SEQ ID NO: 3276071 - RNA, 11 nt, Vaccinia virus
gauuaguucuu

SEQ ID NO: 3276072 - RNA, 23 nt, Vaccinia virus
aagaagaaauacuaaaaaaugua

SEQ ID NO: 3276073 - RNA, 20 nt, Vaccinia virus
aucuaaagaugaugcuauuu

SEQ ID NO: 3276074 - RNA, 13 nt, Vaccinia virus
auagaaaaugauu

SEQ ID NO: 3276075 - RNA, 19 nt, Vaccinia virus
uaaagauacaaauaugucu

SEQ ID NO: 3276076 - RNA, 13 nt, Vaccinia virus
guaauaaucuguu

SEQ ID NO: 3276077 - RNA, 20 nt, Vaccinia virus
augucuaaugaugaacacaa

SEQ ID NO: 3276078 - RNA, 12 nt, Vaccinia virus
gaauauugauuu

SEQ ID NO: 3276079 - RNA, 16 nt, Vaccinia virus
acuauuauuuguuaua

SEQ ID NO: 3276080 - RNA, 16 nt, Vaccinia virus
auuauccguauuucca

SEQ ID NO: 3276081 - RNA, 20 nt, Vaccinia virus
ucuuaguauugaaaugugua

SEQ ID NO: 3276082 - RNA, 19 nt, Vaccinia virus
guagacuuacuaaagucaa

SEQ ID NO: 3276083 - RNA, 23 nt, Vaccinia virus
auacuauaccguugugucuacaa

SEQ ID NO: 3276084 - RNA, 21 nt, Vaccinia virus
auagaaaauaacagauauuac

SEQ ID NO: 3276085 - RNA, 19 nt, Vaccinia virus
uguaaaaagauaaacuuua

SEQ ID NO: 3276086 - RNA, 22 nt, Vaccinia virus
aaauugauagagaguucauuua

SEQ ID NO: 3276087 - RNA, 16 nt, Vaccinia virus
agaggaguuauuuacu

SEQ ID NO: 3276088 - RNA, 17 nt, Vaccinia virus
aguuucugguuuucuau

SEQ ID NO: 3276089 - RNA, 15 nt, Vaccinia virus
augauaaugauacag

SEQ ID NO: 3276090 - RNA, 14 nt, Vaccinia virus
gccaacuauacauc

SEQ ID NO: 3276091 - RNA, 18 nt, Vaccinia virus
uaucucuauuaaaugcgu

SEQ ID NO: 3276092 - RNA, 13 nt, Vaccinia virus
cauaauaucuuua

SEQ ID NO: 3276093 - RNA, 23 nt, Vaccinia virus
gaugccgccaucguugauuacaa

SEQ ID NO: 3276094 - RNA, 13 nt, Vaccinia virus
uauuguuaucgua

SEQ ID NO: 3276095 - RNA, 12 nt, Vaccinia virus
ugucuacauaaa

SEQ ID NO: 3276096 - RNA, 15 nt, Vaccinia virus
ugucuauuaucuguu

SEQ ID NO: 3276097 - RNA, 14 nt, Vaccinia virus
uagaaaauggauuu

SEQ ID NO: 3276098 - RNA, 15 nt, Vaccinia virus
auccguuaaguuugu

SEQ ID NO: 3276099 - RNA, 16 nt, Vaccinia virus
agauaguuuucucuau

SEQ ID NO: 3276100 - RNA, 18 nt, Vaccinia virus
agacagugguuucauguu

SEQ ID NO: 3276101 - RNA, 17 nt, Vaccinia virus
auagcaaccaguguuug

SEQ ID NO: 3276102 - RNA, 15 nt, Vaccinia virus
aauuauuuuguaaga

SEQ ID NO: 3276103 - RNA, 14 nt, Vaccinia virus
augagggaaaagau

SEQ ID NO: 3276104 - RNA, 21 nt, Vaccinia virus
auauaacguaaccagaauugu

SEQ ID NO: 3276105 - RNA, 14 nt, Vaccinia virus
auccaaaguauuuu

SEQ ID NO: 3276106 - RNA, 11 nt, Vaccinia virus
aucaugucuaa

SEQ ID NO: 3276107 - RNA, 20 nt, Vaccinia virus
cauucucuucucugcauuua

SEQ ID NO: 3276108 - RNA, 16 nt, Vaccinia virus
agaaacggaggagaac

SEQ ID NO: 3276109 - RNA, 23 nt, Vaccinia virus
auauauuuucacuuuaucucauu

SEQ ID NO: 3276110 - RNA, 17 nt, Vaccinia virus
agaugcuggaagacaag

SEQ ID NO: 3276111 - RNA, 22 nt, Vaccinia virus
gucaaagguauaugauaaacua

SEQ ID NO: 3276112 - RNA, 20 nt, Vaccinia virus
caguuuuaagaugucauaau

SEQ ID NO: 3276113 - RNA, 18 nt, Vaccinia virus
uuugguaauggcaaugua

SEQ ID NO: 3276114 - RNA, 16 nt, Vaccinia virus
uaacacaaaaugugaa

SEQ ID NO: 3276115 - RNA, 22 nt, Vaccinia virus
auaguuagcgucaacuuucaua

SEQ ID NO: 3276116 - RNA, 14 nt, Vaccinia virus
uaaaacauuuccua

SEQ ID NO: 3276117 - RNA, 14 nt, Vaccinia virus
auauuauguuuuau

SEQ ID NO: 3276118 - RNA, 13 nt, Vaccinia virus
acuaacuauugaa

SEQ ID NO: 3276119 - RNA, 18 nt, Vaccinia virus
auacuccuucaugaacau

SEQ ID NO: 3276120 - RNA, 15 nt, Vaccinia virus
auugaugucuacaca

SEQ ID NO: 3276121 - RNA, 23 nt, Vaccinia virus
uguaaacagauaugguguagcau

SEQ ID NO: 3276122 - RNA, 12 nt, Vaccinia virus
aaagauuguaca

SEQ ID NO: 3276123 - RNA, 15 nt, Vaccinia virus
uaaauccuuguuuga

SEQ ID NO: 3276124 - RNA, 13 nt, Vaccinia virus
ugaugauaauguu

SEQ ID NO: 3276125 - RNA, 19 nt, Vaccinia virus
ugguuaaaaccuuugcaaa

SEQ ID NO: 3276126 - RNA, 15 nt, Vaccinia virus
uauggaugccacugc

SEQ ID NO: 3276127 - RNA, 13 nt, Vaccinia virus
uaaguuggaugaa

SEQ ID NO: 3276128 - RNA, 15 nt, Vaccinia virus
uuaguuccaacaauu

SEQ ID NO: 3276129 - RNA, 13 nt, Vaccinia virus
uaaauucauauaa

SEQ ID NO: 3276130 - RNA, 17 nt, Vaccinia virus
aucagauaaguaugaag

SEQ ID NO: 3276131 - RNA, 17 nt, Vaccinia virus
uuuguuaaaaauuuaga

SEQ ID NO: 3276132 - RNA, 17 nt, Vaccinia virus
uauuuaguuuauucaua

SEQ ID NO: 3276133 - RNA, 18 nt, Vaccinia virus
cauguauacuugacaaaa

SEQ ID NO: 3276134 - RNA, 14 nt, Vaccinia virus
aaucaagaaugaua

SEQ ID NO: 3276135 - RNA, 22 nt, Vaccinia virus
uuaguaagugccacaaaacaga

SEQ ID NO: 3276136 - RNA, 21 nt, Vaccinia virus
ugacggagcccaauuuuggug

SEQ ID NO: 3276137 - RNA, 21 nt, Vaccinia virus
acuagacguuuauucucaaau

SEQ ID NO: 3276138 - RNA, 15 nt, Vaccinia virus
ucuagauaaaaucac

SEQ ID NO: 3276139 - RNA, 21 nt, Vaccinia virus
caguaauagcuccauaaacug

SEQ ID NO: 3276140 - RNA, 23 nt, Vaccinia virus
gauuccauggaagcucuagagua

SEQ ID NO: 3276141 - RNA, 20 nt, Vaccinia virus
augcuccaauugaaugucau

SEQ ID NO: 3276142 - RNA, 17 nt, Vaccinia virus
uauucaagcaaaaacaa

SEQ ID NO: 3276143 - RNA, 19 nt, Vaccinia virus
auuuauaaccuuuuccuua

SEQ ID NO: 3276144 - RNA, 18 nt, Vaccinia virus
uaaacggcuuuuaaacag

SEQ ID NO: 3276145 - RNA, 16 nt, Vaccinia virus
ugauauauaauuuaca

SEQ ID NO: 3276146 - RNA, 16 nt, Vaccinia virus
aagauuacuacacuug

SEQ ID NO: 3276147 - RNA, 16 nt, Vaccinia virus
caaugagaguuccuga

SEQ ID NO: 3276148 - RNA, 21 nt, Vaccinia virus
gaacaucuugauuauaauaua

SEQ ID NO: 3276149 - RNA, 15 nt, Vaccinia virus
aacaggaaagaagua

SEQ ID NO: 3276150 - RNA, 15 nt, Vaccinia virus
uacacucuauuucaa

SEQ ID NO: 3276151 - RNA, 22 nt, Vaccinia virus
cuaaaauuccuaacgaugauau

SEQ ID NO: 3276152 - RNA, 13 nt, Vaccinia virus
uauuaauggauuu

SEQ ID NO: 3276153 - RNA, 16 nt, Vaccinia virus
ucucaauaguuucaua

SEQ ID NO: 3276154 - RNA, 16 nt, Vaccinia virus
agcuaagcaacuaaga

SEQ ID NO: 3276155 - RNA, 20 nt, Vaccinia virus
acaauuugggacaaugaauu

SEQ ID NO: 3276156 - RNA, 16 nt, Vaccinia virus
agacguacuccagaua

SEQ ID NO: 3276157 - RNA, 15 nt, Vaccinia virus
uacaaauauucacaa

SEQ ID NO: 3276158 - RNA, 17 nt, Vaccinia virus
auaacgaaaauaucaca

SEQ ID NO: 3276159 - RNA, 17 nt, Vaccinia virus
uguuaaauuuucuaaug

SEQ ID NO: 3276160 - RNA, 17 nt, Vaccinia virus
agacugguagagaauga

SEQ ID NO: 3276161 - RNA, 23 nt, Vaccinia virus
cgaagaaaaaaauggaaauacuu

SEQ ID NO: 3276162 - RNA, 20 nt, Vaccinia virus
aaagucguuuauaucacauu

SEQ ID NO: 3276163 - RNA, 18 nt, Vaccinia virus
uaucaauagcaguuuauu

SEQ ID NO: 3276164 - RNA, 19 nt, Vaccinia virus
aucauauuauaaagaugau

SEQ ID NO: 3276165 - RNA, 18 nt, Vaccinia virus
cgcaauuauauaauguau

SEQ ID NO: 3276166 - RNA, 20 nt, Vaccinia virus
uauuuuacauggauuuauca

SEQ ID NO: 3276167 - RNA, 20 nt, Vaccinia virus
acugacuucuaacaaacauc

SEQ ID NO: 3276168 - RNA, 16 nt, Vaccinia virus
aucuuuuuaggaaugu

SEQ ID NO: 3276169 - RNA, 21 nt, Vaccinia virus
uuccauuuauaucauccaaua

SEQ ID NO: 3276170 - RNA, 19 nt, Vaccinia virus
agaucuaauaaauggagaa

SEQ ID NO: 3276171 - RNA, 21 nt, Vaccinia virus
acugucucauacacuacagua

SEQ ID NO: 3276172 - RNA, 17 nt, Vaccinia virus
agauaucuauacuuacu

SEQ ID NO: 3276173 - RNA, 22 nt, Vaccinia virus
gccccgcuucuauuuacucccg

SEQ ID NO: 3276174 - RNA, 14 nt, Vaccinia virus
acuccuuuaauagg

SEQ ID NO: 3276175 - RNA, 20 nt, Vaccinia virus
auggauuaucggaaauacuu

SEQ ID NO: 3276176 - RNA, 19 nt, Vaccinia virus
cgaaugccaauguuaauuu

SEQ ID NO: 3276177 - RNA, 13 nt, Vaccinia virus
cuacuauagaauu

SEQ ID NO: 3276178 - RNA, 15 nt, Vaccinia virus
agauauauuauaauu

SEQ ID NO: 3276179 - RNA, 22 nt, Vaccinia virus
uagaugauagagguaauacuuu

SEQ ID NO: 3276180 - RNA, 18 nt, Vaccinia virus
ccggaguaauugauuaua

SEQ ID NO: 3276181 - RNA, 14 nt, Vaccinia virus
uaagucuauuugaa

SEQ ID NO: 3276182 - RNA, 18 nt, Vaccinia virus
aaguuucguacaaauaca

SEQ ID NO: 3276183 - RNA, 13 nt, Vaccinia virus
uauuaaauuuaga

SEQ ID NO: 3276184 - RNA, 13 nt, Vaccinia virus
cgauuuaugugac

SEQ ID NO: 3276185 - RNA, 14 nt, Vaccinia virus
uacugucuuuugug

SEQ ID NO: 3276186 - RNA, 18 nt, Vaccinia virus
cuucagaauacaaucugu

SEQ ID NO: 3276187 - RNA, 18 nt, Vaccinia virus
cguagauaauauuucuag

SEQ ID NO: 3276188 - RNA, 13 nt, Vaccinia virus
uacaauacaugua

SEQ ID NO: 3276189 - RNA, 21 nt, Vaccinia virus
uggcguguggauuugguaaga

SEQ ID NO: 3276190 - RNA, 14 nt, Vaccinia virus
aaguaccuggaaug

SEQ ID NO: 3276191 - RNA, 12 nt, Vaccinia virus
acuacaauaauu

SEQ ID NO: 3276192 - RNA, 18 nt, Vaccinia virus
uaguauccauuuuacauu

SEQ ID NO: 3276193 - RNA, 16 nt, Vaccinia virus
auuucaucugugguau

SEQ ID NO: 3276194 - RNA, 14 nt, Vaccinia virus
cauuaauacaguaa

SEQ ID NO: 3276195 - RNA, 21 nt, Vaccinia virus
gaacacgauuauuauaaaaua

SEQ ID NO: 3276196 - RNA, 14 nt, Vaccinia virus
ucauaaauuacaca

SEQ ID NO: 3276197 - RNA, 12 nt, Vaccinia virus
uacugcaauaau

SEQ ID NO: 3276198 - RNA, 13 nt, Vaccinia virus
auuuuuuugaaau

SEQ ID NO: 3276199 - RNA, 18 nt, Vaccinia virus
caauuuuaacagauguau

SEQ ID NO: 3276200 - RNA, 15 nt, Vaccinia virus
uucuagcgcugauuu

SEQ ID NO: 3276201 - RNA, 21 nt, Vaccinia virus
cgaucuuguuguuuauuuuca

SEQ ID NO: 3276202 - RNA, 23 nt, Vaccinia virus
uaaaauaaucauacaaucuagua

SEQ ID NO: 3276203 - RNA, 17 nt, Vaccinia virus
uacauggacucauuaaa

SEQ ID NO: 3276204 - RNA, 23 nt, Vaccinia virus
aaauuaaaaaauaacuuaauuua

SEQ ID NO: 3276205 - RNA, 16 nt, Vaccinia virus
gcaagacuaacacaca

SEQ ID NO: 3276206 - RNA, 18 nt, Vaccinia virus
aacgauuagcuacagagu

SEQ ID NO: 3276207 - RNA, 14 nt, Vaccinia virus
aaacugguaaucca

SEQ ID NO: 3276208 - RNA, 17 nt, Vaccinia virus
cgauucaaauaaaucac

SEQ ID NO: 3276209 - RNA, 17 nt, Vaccinia virus
aucuuauuuuuaacaaa

SEQ ID NO: 3276210 - RNA, 19 nt, Vaccinia virus
aguauuuuuacaaaaaugu

SEQ ID NO: 3276211 - RNA, 15 nt, Vaccinia virus
auucuagaccaaaaa

SEQ ID NO: 3276212 - RNA, 15 nt, Vaccinia virus
agucuccacacuauu

SEQ ID NO: 3276213 - RNA, 20 nt, Vaccinia virus
uggauagagauugagauucu

SEQ ID NO: 3276214 - RNA, 21 nt, Vaccinia virus
caaaggagaugauuuaucuau

SEQ ID NO: 3276215 - RNA, 22 nt, Vaccinia virus
cugguaauccacauaguuguaa

SEQ ID NO: 3276216 - RNA, 21 nt, Vaccinia virus
aucauaucuauaggaaaggau

SEQ ID NO: 3276217 - RNA, 13 nt, Vaccinia virus
acaaaauaaugua

SEQ ID NO: 3276218 - RNA, 18 nt, Vaccinia virus
auuauuaucuuuagaaau

SEQ ID NO: 3276219 - RNA, 16 nt, Vaccinia virus
auuacauuuuaucaga

SEQ ID NO: 3276220 - RNA, 20 nt, Vaccinia virus
uauugcgcaucgauaucuuu

SEQ ID NO: 3276221 - RNA, 19 nt, Vaccinia virus
uaaguucauuaucugaaau

SEQ ID NO: 3276222 - RNA, 17 nt, Vaccinia virus
gcauucuucauucuauu

SEQ ID NO: 3276223 - RNA, 19 nt, Vaccinia virus
guuccggaucuauagaaga

SEQ ID NO: 3276224 - RNA, 19 nt, Vaccinia virus
auaacauucuuaaacaaua

SEQ ID NO: 3276225 - RNA, 14 nt, Vaccinia virus
cagaucaaaacaaa

SEQ ID NO: 3276226 - RNA, 12 nt, Vaccinia virus
uucauuaauuuc

SEQ ID NO: 3276227 - RNA, 14 nt, Vaccinia virus
auaaaguguucauc

SEQ ID NO: 3276228 - RNA, 19 nt, Vaccinia virus
auaaacugcgccaaauugu

SEQ ID NO: 3276229 - RNA, 20 nt, Vaccinia virus
aagauaccaguauaccucaa

SEQ ID NO: 3276230 - RNA, 18 nt, Vaccinia virus
aauggcuguuuguauaau

SEQ ID NO: 3276231 - RNA, 20 nt, Vaccinia virus
acaagcgagugcuucuucuu

SEQ ID NO: 3276232 - RNA, 23 nt, Vaccinia virus
uuuuacgacacgcauuugaugca

SEQ ID NO: 3276233 - RNA, 22 nt, Vaccinia virus
acuuuaauccuguguuuauaga

SEQ ID NO: 3276234 - RNA, 19 nt, Vaccinia virus
augccuuuccuggaauauc

SEQ ID NO: 3276235 - RNA, 20 nt, Vaccinia virus
acaggaccguauuagaaugu

SEQ ID NO: 3276236 - RNA, 21 nt, Vaccinia virus
ucuuccagcauccguuucuaa

SEQ ID NO: 3276237 - RNA, 17 nt, Vaccinia virus
ugguaaugaaauuauuc

SEQ ID NO: 3276238 - RNA, 19 nt, Vaccinia virus
guaucaaaaaauuacuuuu

SEQ ID NO: 3276239 - RNA, 15 nt, Vaccinia virus
augugagcaaagauu

SEQ ID NO: 3276240 - RNA, 14 nt, Vaccinia virus
gucgauaacaaauu

SEQ ID NO: 3276241 - RNA, 16 nt, Vaccinia virus
aaaaccguuaaaaugu

SEQ ID NO: 3276242 - RNA, 19 nt, Vaccinia virus
uauuaguugaugugacugu

SEQ ID NO: 3276243 - RNA, 20 nt, Vaccinia virus
aaguagaaauuaucaaaugu

SEQ ID NO: 3276244 - RNA, 16 nt, Vaccinia virus
auauuuguuaaugccu

SEQ ID NO: 3276245 - RNA, 15 nt, Vaccinia virus
gauauucuaugaauu

SEQ ID NO: 3276246 - RNA, 17 nt, Vaccinia virus
uuagcaaaauuauuaau

SEQ ID NO: 3276247 - RNA, 17 nt, Vaccinia virus
auagauacgcauuuucu

SEQ ID NO: 3276248 - RNA, 15 nt, Vaccinia virus
cuuagaaauaaacga

SEQ ID NO: 3276249 - RNA, 21 nt, Vaccinia virus
uauguauuguaccaaagauuu

SEQ ID NO: 3276250 - RNA, 22 nt, Vaccinia virus
aucggcauuuauguuucuuuaa

SEQ ID NO: 3276251 - RNA, 19 nt, Vaccinia virus
caaaggauccgacccuaau

SEQ ID NO: 3276252 - RNA, 19 nt, Vaccinia virus
aacauauauaauaaauaac

SEQ ID NO: 3276253 - RNA, 13 nt, Vaccinia virus
gaucguaaugaac

SEQ ID NO: 3276254 - RNA, 18 nt, Vaccinia virus
uagaauaagaacuauaaa

SEQ ID NO: 3276255 - RNA, 18 nt, Vaccinia virus
aucgcauacuaguauuua

SEQ ID NO: 3276256 - RNA, 14 nt, Vaccinia virus
uauauuuuuggauu

SEQ ID NO: 3276257 - RNA, 18 nt, Vaccinia virus
cucuauuucuuaaugaau

SEQ ID NO: 3276258 - RNA, 15 nt, Vaccinia virus
uaaaacgauaaaaga

SEQ ID NO: 3276259 - RNA, 18 nt, Vaccinia virus
acccagaucucuuuuucu

SEQ ID NO: 3276260 - RNA, 21 nt, Vaccinia virus
uguuguuuauucaacauguac

SEQ ID NO: 3276261 - RNA, 20 nt, Vaccinia virus
aauuuuuauuaaugauacaa

SEQ ID NO: 3276262 - RNA, 16 nt, Vaccinia virus
cugugaugccaauaag

SEQ ID NO: 3276263 - RNA, 17 nt, Vaccinia virus
uauuuccaucaugaucu

SEQ ID NO: 3276264 - RNA, 16 nt, Vaccinia virus
uccuuauacaauuugu

SEQ ID NO: 3276265 - RNA, 18 nt, Vaccinia virus
gaacagcuaucaaaauau

SEQ ID NO: 3276266 - RNA, 14 nt, Vaccinia virus
cauuaauuauaacg

SEQ ID NO: 3276267 - RNA, 12 nt, Vaccinia virus
cauuuaaacauu

SEQ ID NO: 3276268 - RNA, 23 nt, Vaccinia virus
aucagacucugguauuuauauau

SEQ ID NO: 3276269 - RNA, 14 nt, Vaccinia virus
ugucaaaaauugua

SEQ ID NO: 3276270 - RNA, 20 nt, Vaccinia virus
gcaauacauuuuucuauguu

SEQ ID NO: 3276271 - RNA, 14 nt, Vaccinia virus
ugcuguuuuuuacu

SEQ ID NO: 3276272 - RNA, 18 nt, Vaccinia virus
aauacucaauacuuucca

SEQ ID NO: 3276273 - RNA, 22 nt, Vaccinia virus
aauguuugauaaaaauauguau

SEQ ID NO: 3276274 - RNA, 22 nt, Vaccinia virus
acucuauaaaauacuaaugcau

SEQ ID NO: 3276275 - RNA, 20 nt, Vaccinia virus
uacaaugcucaguaaaugua

SEQ ID NO: 3276276 - RNA, 16 nt, Vaccinia virus
uacuggauucauacau

SEQ ID NO: 3276277 - RNA, 19 nt, Vaccinia virus
guuaaaaaaaauuauccua

SEQ ID NO: 3276278 - RNA, 20 nt, Vaccinia virus
cuguuggaaccggcugugga

SEQ ID NO: 3276279 - RNA, 22 nt, Vaccinia virus
uaaaugggugccgcagcaagca

SEQ ID NO: 3276280 - RNA, 15 nt, Vaccinia virus
caaaacugaaaauau

SEQ ID NO: 3276281 - RNA, 23 nt, Vaccinia virus
guaucgauacgcauuuucaaaau

SEQ ID NO: 3276282 - RNA, 22 nt, Vaccinia virus
auuaguguauacaccaacagua

SEQ ID NO: 3276283 - RNA, 16 nt, Vaccinia virus
ucuaugaauaugauuu

SEQ ID NO: 3276284 - RNA, 16 nt, Vaccinia virus
cagucuaguauccauu

SEQ ID NO: 3276285 - RNA, 22 nt, Vaccinia virus
uguuugaaaacagaaacaucau

SEQ ID NO: 3276286 - RNA, 18 nt, Vaccinia virus
gaauaauuggaacacaag

SEQ ID NO: 3276287 - RNA, 14 nt, Vaccinia virus
guauauaacauugu

SEQ ID NO: 3276288 - RNA, 21 nt, Vaccinia virus
gaaaacauuguguuuaaucuu

SEQ ID NO: 3276289 - RNA, 22 nt, Vaccinia virus
aucuaauaaguugcgaugaaau

SEQ ID NO: 3276290 - RNA, 16 nt, Vaccinia virus
uagauacaacgucauc

SEQ ID NO: 3276291 - RNA, 13 nt, Vaccinia virus
cguuguuaagaua

SEQ ID NO: 3276292 - RNA, 14 nt, Vaccinia virus
auaugauuacuaga

SEQ ID NO: 3276293 - RNA, 14 nt, Vaccinia virus
auaaaauuacuuaa

SEQ ID NO: 3276294 - RNA, 15 nt, Vaccinia virus
gauucuagaauauca

SEQ ID NO: 3276295 - RNA, 16 nt, Vaccinia virus
agaaucauaaagaaca

SEQ ID NO: 3276296 - RNA, 13 nt, Vaccinia virus
ucuucuacaucuu

SEQ ID NO: 3276297 - RNA, 14 nt, Vaccinia virus
cuccuguagauaug

SEQ ID NO: 3276298 - RNA, 22 nt, Vaccinia virus
uuauuccaauagaugucuuauu

SEQ ID NO: 3276299 - RNA, 16 nt, Vaccinia virus
uaaaacauuaaauguc

SEQ ID NO: 3276300 - RNA, 14 nt, Vaccinia virus
uaaaucuauuauau

SEQ ID NO: 3276301 - RNA, 20 nt, Vaccinia virus
gcaagauuuuuaaacaacaa

SEQ ID NO: 3276302 - RNA, 13 nt, Vaccinia virus
uuaaauguuuucu

SEQ ID NO: 3276303 - RNA, 14 nt, Vaccinia virus
gcaaauuauuucuu

SEQ ID NO: 3276304 - RNA, 15 nt, Vaccinia virus
uggaaaaauaguguu

SEQ ID NO: 3276305 - RNA, 19 nt, Vaccinia virus
acagaaauauaugagaugu

SEQ ID NO: 3276306 - RNA, 16 nt, Vaccinia virus
aguaaauaauaaaaca

SEQ ID NO: 3276307 - RNA, 17 nt, Vaccinia virus
uacucuauaaaauacua

SEQ ID NO: 3276308 - RNA, 21 nt, Vaccinia virus
auauugcaccagaauuaauaa

SEQ ID NO: 3276309 - RNA, 14 nt, Vaccinia virus
aucuguauuaccga

SEQ ID NO: 3276310 - RNA, 22 nt, Vaccinia virus
agauauuuccauuuaucuacug

SEQ ID NO: 3276311 - RNA, 20 nt, Vaccinia virus
auuaucuuuguuuugauauc

SEQ ID NO: 3276312 - RNA, 18 nt, Vaccinia virus
caauagaugauagaauau

SEQ ID NO: 3276313 - RNA, 15 nt, Vaccinia virus
cucaugucaaauugu

SEQ ID NO: 3276314 - RNA, 13 nt, Vaccinia virus
aguacggauuaaa

SEQ ID NO: 3276315 - RNA, 20 nt, Vaccinia virus
gauugaggaagcacauaugu

SEQ ID NO: 3276316 - RNA, 15 nt, Vaccinia virus
auuucgauaaugaac

SEQ ID NO: 3276317 - RNA, 15 nt, Vaccinia virus
uuauuucauccaauu

SEQ ID NO: 3276318 - RNA, 19 nt, Vaccinia virus
uaguagcuucacaaagaug

SEQ ID NO: 3276319 - RNA, 22 nt, Vaccinia virus
uacacguaccucucuaaugggg

SEQ ID NO: 3276320 - RNA, 16 nt, Vaccinia virus
uaguuuuacuaucaua

SEQ ID NO: 3276321 - RNA, 23 nt, Vaccinia virus
auuaucaggaacauuaucaauuu

SEQ ID NO: 3276322 - RNA, 20 nt, Vaccinia virus
caaugaacaagauuaaucuc

SEQ ID NO: 3276323 - RNA, 15 nt, Vaccinia virus
uuccaucuagacuau

SEQ ID NO: 3276324 - RNA, 20 nt, Vaccinia virus
cgcuacaauuauagaacgaa

SEQ ID NO: 3276325 - RNA, 14 nt, Vaccinia virus
auauccuuuuguau

SEQ ID NO: 3276326 - RNA, 23 nt, Vaccinia virus
auaaaucacuaaauaauauccca

SEQ ID NO: 3276327 - RNA, 15 nt, Vaccinia virus
aucucgaugaaaaua

SEQ ID NO: 3276328 - RNA, 16 nt, Vaccinia virus
cuucucuccuuucaaa

SEQ ID NO: 3276329 - RNA, 18 nt, Vaccinia virus
guauauauuguuucucuc

SEQ ID NO: 3276330 - RNA, 15 nt, Vaccinia virus
aacuuaaacaaaaua

SEQ ID NO: 3276331 - RNA, 13 nt, Vaccinia virus
cauuuuacauuau

SEQ ID NO: 3276332 - RNA, 19 nt, Vaccinia virus
auugaugaaguucgaugau

SEQ ID NO: 3276333 - RNA, 18 nt, Vaccinia virus
ucauucauggaguuagaa

SEQ ID NO: 3276334 - RNA, 20 nt, Vaccinia virus
ugauagaacugguaugaaca

SEQ ID NO: 3276335 - RNA, 18 nt, Vaccinia virus
gugcucaaacaaaaugug

SEQ ID NO: 3276336 - RNA, 19 nt, Vaccinia virus
acuuucagaagaaauggua

SEQ ID NO: 3276337 - RNA, 15 nt, Vaccinia virus
gauauuaauaaugau

SEQ ID NO: 3276338 - RNA, 12 nt, Vaccinia virus
uaccgaaaauaa

SEQ ID NO: 3276339 - RNA, 13 nt, Vaccinia virus
auauguauuuccu

SEQ ID NO: 3276340 - RNA, 17 nt, Vaccinia virus
gaagguuggguagaugg

SEQ ID NO: 3276341 - RNA, 15 nt, Vaccinia virus
uacucuuaagagagc

SEQ ID NO: 3276342 - RNA, 21 nt, Vaccinia virus
gaaaaucuuucuucuacuaua

SEQ ID NO: 3276343 - RNA, 16 nt, Vaccinia virus
auauuaaagucuuuac

SEQ ID NO: 3276344 - RNA, 13 nt, Vaccinia virus
gaacacgauguuu

SEQ ID NO: 3276345 - RNA, 12 nt, Vaccinia virus
cagcuguagaac

SEQ ID NO: 3276346 - RNA, 13 nt, Vaccinia virus
gaaucaguauaua

SEQ ID NO: 3276347 - RNA, 21 nt, Vaccinia virus
ugauauuggagcaaaauccua

SEQ ID NO: 3276348 - RNA, 17 nt, Vaccinia virus
auugcaugauagaaugg

SEQ ID NO: 3276349 - RNA, 21 nt, Vaccinia virus
gauaauaacagaguaccauca

SEQ ID NO: 3276350 - RNA, 15 nt, Vaccinia virus
uuuauaaaguuuagu

SEQ ID NO: 3276351 - RNA, 20 nt, Vaccinia virus
aagauuucaucuauaucauu

SEQ ID NO: 3276352 - RNA, 18 nt, Vaccinia virus
aaacugguuaaaacagua

SEQ ID NO: 3276353 - RNA, 16 nt, Vaccinia virus
guaaaaaugaaaugau

SEQ ID NO: 3276354 - RNA, 17 nt, Vaccinia virus
acauaucgguguuucca

SEQ ID NO: 3276355 - RNA, 22 nt, Vaccinia virus
agauauacgcuaucuauauccu

SEQ ID NO: 3276356 - RNA, 14 nt, Vaccinia virus
cuaaauaaguagua

SEQ ID NO: 3276357 - RNA, 20 nt, Vaccinia virus
uaaugacaauaaaauuauca

SEQ ID NO: 3276358 - RNA, 13 nt, Vaccinia virus
uugaaauguguaa

SEQ ID NO: 3276359 - RNA, 13 nt, Vaccinia virus
aguaaaugaugaa

SEQ ID NO: 3276360 - RNA, 23 nt, Vaccinia virus
ucuauauucccgauuuuguagua

SEQ ID NO: 3276361 - RNA, 14 nt, Vaccinia virus
uacgccaaggaaag

SEQ ID NO: 3276362 - RNA, 23 nt, Vaccinia virus
acuucaaaguuguuaaaaaauua

SEQ ID NO: 3276363 - RNA, 15 nt, Vaccinia virus
gagauaauagaaaau

SEQ ID NO: 3276364 - RNA, 21 nt, Vaccinia virus
auaaaauucuuaguuauauau

SEQ ID NO: 3276365 - RNA, 14 nt, Vaccinia virus
cauuuccuacauau

SEQ ID NO: 3276366 - RNA, 19 nt, Vaccinia virus
acuaauucucauuaaaugg

SEQ ID NO: 3276367 - RNA, 21 nt, Vaccinia virus
aauauggacacgcggcuguaa

SEQ ID NO: 3276368 - RNA, 16 nt, Vaccinia virus
aauuacauagaugaua

SEQ ID NO: 3276369 - RNA, 17 nt, Vaccinia virus
cgucaugauaaaaauuu

SEQ ID NO: 3276370 - RNA, 15 nt, Vaccinia virus
auaacuaaacuacua

SEQ ID NO: 3276371 - RNA, 22 nt, Vaccinia virus
caacaaaaagaugcuauguaua

SEQ ID NO: 3276372 - RNA, 22 nt, Vaccinia virus
aucuauauauguauuuuaauaa

SEQ ID NO: 3276373 - RNA, 18 nt, Vaccinia virus
gaaacuaucugauaagau

SEQ ID NO: 3276374 - RNA, 22 nt, Vaccinia virus
agaaaguaugauacaauacuua

SEQ ID NO: 3276375 - RNA, 22 nt, Vaccinia virus
aaaacuguccaaauagauguac

SEQ ID NO: 3276376 - RNA, 13 nt, Vaccinia virus
acaguuugaaaaa

SEQ ID NO: 3276377 - RNA, 17 nt, Vaccinia virus
auaaaauuaucaugaca

SEQ ID NO: 3276378 - RNA, 23 nt, Vaccinia virus
caagucuucaguucuaucuucua

SEQ ID NO: 3276379 - RNA, 18 nt, Vaccinia virus
aaauauaauuuauaauau

SEQ ID NO: 3276380 - RNA, 14 nt, Vaccinia virus
gcauuaauaacauc

SEQ ID NO: 3276381 - RNA, 17 nt, Vaccinia virus
auagagaguucauuuau

SEQ ID NO: 3276382 - RNA, 15 nt, Vaccinia virus
auaucacuguuguac

SEQ ID NO: 3276383 - RNA, 14 nt, Vaccinia virus
cuagucuuaaaugg

SEQ ID NO: 3276384 - RNA, 18 nt, Vaccinia virus
cuacugacgauaguaucu

SEQ ID NO: 3276385 - RNA, 14 nt, Vaccinia virus
cauuuaaaugaauc

SEQ ID NO: 3276386 - RNA, 15 nt, Vaccinia virus
augguacuuaugaca

SEQ ID NO: 3276387 - RNA, 15 nt, Vaccinia virus
agaucgauagacacu

SEQ ID NO: 3276388 - RNA, 17 nt, Vaccinia virus
aaaugcugaagcaauaa

SEQ ID NO: 3276389 - RNA, 14 nt, Vaccinia virus
auacuauuguuuau

SEQ ID NO: 3276390 - RNA, 18 nt, Vaccinia virus
gauacgcuauuaaaauau

SEQ ID NO: 3276391 - RNA, 15 nt, Vaccinia virus
gauaccuagaagauc

SEQ ID NO: 3276392 - RNA, 13 nt, Vaccinia virus
uacauuucaucau

SEQ ID NO: 3276393 - RNA, 16 nt, Vaccinia virus
uuucuccacuacauau

SEQ ID NO: 3276394 - RNA, 14 nt, Vaccinia virus
agaaauuuuucuac

SEQ ID NO: 3276395 - RNA, 15 nt, Vaccinia virus
agugccaucagaaua

SEQ ID NO: 3276396 - RNA, 20 nt, Vaccinia virus
acaaaaucaucugauaauuu

SEQ ID NO: 3276397 - RNA, 20 nt, Vaccinia virus
aaugaguauauguauuuucu

SEQ ID NO: 3276398 - RNA, 16 nt, Vaccinia virus
ggacagcuauauucuc

SEQ ID NO: 3276399 - RNA, 13 nt, Vaccinia virus
ugguauguaucua

SEQ ID NO: 3276400 - RNA, 21 nt, Vaccinia virus
uuauacauugaauauaaaaua

SEQ ID NO: 3276401 - RNA, 21 nt, Vaccinia virus
ggaaaaauuauaauguuuccu

SEQ ID NO: 3276402 - RNA, 23 nt, Vaccinia virus
uacuauuuuuuacauuacuacau

SEQ ID NO: 3276403 - RNA, 17 nt, Vaccinia virus
uguugaugauaucuaca

SEQ ID NO: 3276404 - RNA, 21 nt, Vaccinia virus
auaguggacaacauuaauaca

SEQ ID NO: 3276405 - RNA, 20 nt, Vaccinia virus
cauagcauaguuuuucauaa

SEQ ID NO: 3276406 - RNA, 15 nt, Vaccinia virus
agaacaguaaauguu

SEQ ID NO: 3276407 - RNA, 15 nt, Vaccinia virus
auauuccuugaauaa

SEQ ID NO: 3276408 - RNA, 21 nt, Vaccinia virus
auaaauaugcaaagucuaaau

SEQ ID NO: 3276409 - RNA, 17 nt, Vaccinia virus
uaaaaaaaauagaaaaa

SEQ ID NO: 3276410 - RNA, 15 nt, Vaccinia virus
uuggaacuaguauuu

SEQ ID NO: 3276411 - RNA, 18 nt, Vaccinia virus
acaagcccgucaauaauu

SEQ ID NO: 3276412 - RNA, 23 nt, Vaccinia virus
acuauagaccaaacugcaaaugu

SEQ ID NO: 3276413 - RNA, 13 nt, Vaccinia virus
uuaaaaucauuau

SEQ ID NO: 3276414 - RNA, 19 nt, Vaccinia virus
guaauaagauuucuauucc

SEQ ID NO: 3276415 - RNA, 16 nt, Vaccinia virus
uaaaaauaauauuguu

SEQ ID NO: 3276416 - RNA, 18 nt, Vaccinia virus
cuucuguacaaaaucguu

SEQ ID NO: 3276417 - RNA, 19 nt, Vaccinia virus
agaucugcguguaaaaagu

SEQ ID NO: 3276418 - RNA, 13 nt, Vaccinia virus
uuauuacuaaaca

SEQ ID NO: 3276419 - RNA, 18 nt, Vaccinia virus
gaauggcguuugauauau

SEQ ID NO: 3276420 - RNA, 15 nt, Vaccinia virus
auauuauacaaaaua

SEQ ID NO: 3276421 - RNA, 23 nt, Vaccinia virus
aucaaaucucuaucaucacauau

SEQ ID NO: 3276422 - RNA, 15 nt, Vaccinia virus
auauuuaguauuauu

SEQ ID NO: 3276423 - RNA, 21 nt, Vaccinia virus
ucuucugaauucgaggaagau

SEQ ID NO: 3276424 - RNA, 19 nt, Vaccinia virus
gaacacauuaaacaaaaau

SEQ ID NO: 3276425 - RNA, 17 nt, Vaccinia virus
uuaagauuguacacuuu

SEQ ID NO: 3276426 - RNA, 15 nt, Vaccinia virus
uaaucuuuguuggau

SEQ ID NO: 3276427 - RNA, 13 nt, Vaccinia virus
cugucuaaaugua

SEQ ID NO: 3276428 - RNA, 14 nt, Vaccinia virus
uauucaacauaucu

SEQ ID NO: 3276429 - RNA, 18 nt, Vaccinia virus
uaaauguccacuauacau

SEQ ID NO: 3276430 - RNA, 14 nt, Vaccinia virus
uaauucauaagaau

SEQ ID NO: 3276431 - RNA, 15 nt, Vaccinia virus
acauugaaacuaugu

SEQ ID NO: 3276432 - RNA, 18 nt, Vaccinia virus
uuucucaaccauagauau

SEQ ID NO: 3276433 - RNA, 13 nt, Vaccinia virus
uaccagagauuuu

SEQ ID NO: 3276434 - RNA, 20 nt, Vaccinia virus
gacacgauuaccaauacuuu

SEQ ID NO: 3276435 - RNA, 20 nt, Vaccinia virus
aagcauuuuggaaacauaaa

SEQ ID NO: 3276436 - RNA, 18 nt, Vaccinia virus
uguagucgacagaagaau

SEQ ID NO: 3276437 - RNA, 21 nt, Vaccinia virus
cuuacaauccguguuauuuua

SEQ ID NO: 3276438 - RNA, 16 nt, Vaccinia virus
uaaagaacgaauguug

SEQ ID NO: 3276439 - RNA, 15 nt, Vaccinia virus
auaauauauucuaug

SEQ ID NO: 3276440 - RNA, 14 nt, Vaccinia virus
acuagauaaacuau

SEQ ID NO: 3276441 - RNA, 20 nt, Vaccinia virus
auauuacaaccaauguuaug

SEQ ID NO: 3276442 - RNA, 20 nt, Vaccinia virus
aguucuucggcgguuuucau

SEQ ID NO: 3276443 - RNA, 15 nt, Vaccinia virus
gcguggauuguuaac

SEQ ID NO: 3276444 - RNA, 19 nt, Vaccinia virus
gacucaucaacgaugaaaa

SEQ ID NO: 3276445 - RNA, 17 nt, Vaccinia virus
caaagaauauaucuaau

SEQ ID NO: 3276446 - RNA, 15 nt, Vaccinia virus
gaaauagauaaugaa

SEQ ID NO: 3276447 - RNA, 22 nt, Vaccinia virus
caaauaucggcauuuauguuuc

SEQ ID NO: 3276448 - RNA, 12 nt, Vaccinia virus
uuaaugaagauc

SEQ ID NO: 3276449 - RNA, 20 nt, Vaccinia virus
gauuauaauccuuauacauc

SEQ ID NO: 3276450 - RNA, 16 nt, Vaccinia virus
aacacuuuccugauuu

SEQ ID NO: 3276451 - RNA, 12 nt, Vaccinia virus
uuuuauaaacaa

SEQ ID NO: 3276452 - RNA, 14 nt, Vaccinia virus
uaggauaauaauua

SEQ ID NO: 3276453 - RNA, 16 nt, Vaccinia virus
gaucagguaaaacaau

SEQ ID NO: 3276454 - RNA, 16 nt, Vaccinia virus
auacguacugucuaua

SEQ ID NO: 3276455 - RNA, 15 nt, Vaccinia virus
agauauauagaauua

SEQ ID NO: 3276456 - RNA, 20 nt, Vaccinia virus
ucaaauucucguucauguau

SEQ ID NO: 3276457 - RNA, 23 nt, Vaccinia virus
uaacgaacgaggugugaauguac

SEQ ID NO: 3276458 - RNA, 18 nt, Vaccinia virus
cauaauaugagauguuua

SEQ ID NO: 3276459 - RNA, 23 nt, Vaccinia virus
guuccguuggaugguaauaaacu

SEQ ID NO: 3276460 - RNA, 15 nt, Vaccinia virus
aaaugcuaaauaugc

SEQ ID NO: 3276461 - RNA, 21 nt, Vaccinia virus
gauaacuagaaucagaaucua

SEQ ID NO: 3276462 - RNA, 20 nt, Vaccinia virus
agauauaaaauagaaaauaa

SEQ ID NO: 3276463 - RNA, 23 nt, Vaccinia virus
cuacgaaacugauacaaucucuu

SEQ ID NO: 3276464 - RNA, 20 nt, Vaccinia virus
ucauggauaauauuuguaau

SEQ ID NO: 3276465 - RNA, 15 nt, Vaccinia virus
guaucgauaauuauu

SEQ ID NO: 3276466 - RNA, 18 nt, Vaccinia virus
aaucauccauaaauuaua

SEQ ID NO: 3276467 - RNA, 21 nt, Vaccinia virus
uucagaaaguaauucauuaau

SEQ ID NO: 3276468 - RNA, 20 nt, Vaccinia virus
cucuaugacuucaucaucug

SEQ ID NO: 3276469 - RNA, 21 nt, Vaccinia virus
agccugaguaguuggaagaau

SEQ ID NO: 3276470 - RNA, 18 nt, Vaccinia virus
cggugcuguaacauucug

SEQ ID NO: 3276471 - RNA, 22 nt, Vaccinia virus
aaguguguaaccgcguuaaugu

SEQ ID NO: 3276472 - RNA, 14 nt, Vaccinia virus
acaucucgcaauaa

SEQ ID NO: 3276473 - RNA, 17 nt, Vaccinia virus
gaacaauaaaagagaau

SEQ ID NO: 3276474 - RNA, 23 nt, Vaccinia virus
uaucaauaagcauuaugauuugu

SEQ ID NO: 3276475 - RNA, 14 nt, Vaccinia virus
guaccauuuuuaac

SEQ ID NO: 3276476 - RNA, 21 nt, Vaccinia virus
auguuagcgcuuccuaaauaa

SEQ ID NO: 3276477 - RNA, 15 nt, Vaccinia virus
cauagaauaaauauc

SEQ ID NO: 3276478 - RNA, 23 nt, Vaccinia virus
ucacauauaaaauuuuaauuaau

SEQ ID NO: 3276479 - RNA, 21 nt, Vaccinia virus
uuaucuuuuuagacacguaua

SEQ ID NO: 3276480 - RNA, 19 nt, Vaccinia virus
auuuuuaguuuauacuauu

SEQ ID NO: 3276481 - RNA, 13 nt, Vaccinia virus
aagaagaugaugg

SEQ ID NO: 3276482 - RNA, 16 nt, Vaccinia virus
auacauccuguucuau

SEQ ID NO: 3276483 - RNA, 13 nt, Vaccinia virus
uaaaaauaaaagu

SEQ ID NO: 3276484 - RNA, 16 nt, Vaccinia virus
ucaaaauagaaaauug

SEQ ID NO: 3276485 - RNA, 18 nt, Vaccinia virus
ucuaucauggcaauaaca

SEQ ID NO: 3276486 - RNA, 18 nt, Vaccinia virus
cuugaaaauuguuuuucu

SEQ ID NO: 3276487 - RNA, 15 nt, Vaccinia virus
auauaugacauaaua

SEQ ID NO: 3276488 - RNA, 21 nt, Vaccinia virus
uaauaacaugcgguucaaaau

SEQ ID NO: 3276489 - RNA, 21 nt, Vaccinia virus
uuaauaauuguuauuauuuca

SEQ ID NO: 3276490 - RNA, 19 nt, Vaccinia virus
auauuaaaaauaagaauga

SEQ ID NO: 3276491 - RNA, 17 nt, Vaccinia virus
acuccaauuaucuuuac

SEQ ID NO: 3276492 - RNA, 14 nt, Vaccinia virus
gauggaauuaucau

SEQ ID NO: 3276493 - RNA, 17 nt, Vaccinia virus
uuaaaaaaugaaaauaa

SEQ ID NO: 3276494 - RNA, 19 nt, Vaccinia virus
aguauucgccccaaaggau

SEQ ID NO: 3276495 - RNA, 18 nt, Vaccinia virus
ucuuuuucucaaauccau

SEQ ID NO: 3276496 - RNA, 18 nt, Vaccinia virus
aauuaauaaaaauacaau

SEQ ID NO: 3276497 - RNA, 14 nt, Vaccinia virus
uaacguaucgcauu

SEQ ID NO: 3276498 - RNA, 15 nt, Vaccinia virus
gaggaagacacauua

SEQ ID NO: 3276499 - RNA, 19 nt, Vaccinia virus
uagaagguucauauguugu

SEQ ID NO: 3276500 - RNA, 14 nt, Vaccinia virus
aacgguauaugaau

SEQ ID NO: 3276501 - RNA, 24 nt, Vaccinia virus
uacaauugguuaugauaucaugua

SEQ ID NO: 3276502 - RNA, 12 nt, Vaccinia virus
auacuaaagaaa

SEQ ID NO: 3276503 - RNA, 21 nt, Vaccinia virus
uaguuaagaacaugucuucua

SEQ ID NO: 3276504 - RNA, 15 nt, Vaccinia virus
caaaugauuaucaaa

SEQ ID NO: 3276505 - RNA, 22 nt, Vaccinia virus
cauacaugaaaugaucucuauu

SEQ ID NO: 3276506 - RNA, 18 nt, Vaccinia virus
acauccuucuauguugac

SEQ ID NO: 3276507 - RNA, 18 nt, Vaccinia virus
ucugggaauaaaauacua

SEQ ID NO: 3276508 - RNA, 17 nt, Vaccinia virus
uacuucagguuucuuag

SEQ ID NO: 3276509 - RNA, 13 nt, Vaccinia virus
auaggaucuauau

SEQ ID NO: 3276510 - RNA, 22 nt, Vaccinia virus
gaaccaauacaacguaaaauau

SEQ ID NO: 3276511 - RNA, 18 nt, Vaccinia virus
ugacgauauuucuggaau

SEQ ID NO: 3276512 - RNA, 19 nt, Vaccinia virus
acaucuaaagaaaaaugau

SEQ ID NO: 3276513 - RNA, 18 nt, Vaccinia virus
gaugucaaaggaugaaag

SEQ ID NO: 3276514 - RNA, 21 nt, Vaccinia virus
uugagaaagaccaguaguauu

SEQ ID NO: 3276515 - RNA, 14 nt, Vaccinia virus
aacuaucuguaaaa

SEQ ID NO: 3276516 - RNA, 17 nt, Vaccinia virus
cuucucuguuuaaugaa

SEQ ID NO: 3276517 - RNA, 21 nt, Vaccinia virus
uuuugucgauaaaaauuaaaa

SEQ ID NO: 3276518 - RNA, 14 nt, Vaccinia virus
acuuauuuaacucu

SEQ ID NO: 3276519 - RNA, 19 nt, Vaccinia virus
uugucucauggccguguau

SEQ ID NO: 3276520 - RNA, 18 nt, Vaccinia virus
ucuauuuuaucauuuucc

SEQ ID NO: 3276521 - RNA, 23 nt, Vaccinia virus
caucugguacaauaaauagcuuu

SEQ ID NO: 3276522 - RNA, 22 nt, Vaccinia virus
aauaucuauuaaacgaauaaaa

SEQ ID NO: 3276523 - RNA, 16 nt, Vaccinia virus
auuuauacuucuucua

SEQ ID NO: 3276524 - RNA, 15 nt, Vaccinia virus
gaucacacauuauga

SEQ ID NO: 3276525 - RNA, 14 nt, Vaccinia virus
agacauuaauagaa

SEQ ID NO: 3276526 - RNA, 20 nt, Vaccinia virus
ucgaucaaaagacuauacau

SEQ ID NO: 3276527 - RNA, 21 nt, Vaccinia virus
augaucaagagugauuuaaga

SEQ ID NO: 3276528 - RNA, 20 nt, Vaccinia virus
aaucauuccaucgauacauc

SEQ ID NO: 3276529 - RNA, 22 nt, Vaccinia virus
cauguguuuuagaauauauaua

SEQ ID NO: 3276530 - RNA, 23 nt, Vaccinia virus
uccauugauaaagaaguuauaga

SEQ ID NO: 3276531 - RNA, 19 nt, Vaccinia virus
auuaauguggaauauagau

SEQ ID NO: 3276532 - RNA, 15 nt, Vaccinia virus
uacaguucuuuucua

SEQ ID NO: 3276533 - RNA, 23 nt, Vaccinia virus
ccucggauaaauaggaucaucua

SEQ ID NO: 3276534 - RNA, 15 nt, Vaccinia virus
cgaugauggaguaau

SEQ ID NO: 3276535 - RNA, 15 nt, Vaccinia virus
caggaaggagauauu

SEQ ID NO: 3276536 - RNA, 15 nt, Vaccinia virus
auuuucuuucuaaua

SEQ ID NO: 3276537 - RNA, 15 nt, Vaccinia virus
aucucuuucuccuuu

SEQ ID NO: 3276538 - RNA, 14 nt, Vaccinia virus
aucagauaugaauu

SEQ ID NO: 3276539 - RNA, 14 nt, Vaccinia virus
uuaucuaaugaaug

SEQ ID NO: 3276540 - RNA, 13 nt, Vaccinia virus
gagauuuucuauu

SEQ ID NO: 3276541 - RNA, 15 nt, Vaccinia virus
aguguaguuaaugua

SEQ ID NO: 3276542 - RNA, 13 nt, Vaccinia virus
acaaugaacuaau

SEQ ID NO: 3276543 - RNA, 17 nt, Vaccinia virus
uaacaugagacauaaau

SEQ ID NO: 3276544 - RNA, 21 nt, Vaccinia virus
ugugucuacauaaauaugcaa

SEQ ID NO: 3276545 - RNA, 15 nt, Vaccinia virus
ugcagaaguaaugaa

SEQ ID NO: 3276546 - RNA, 15 nt, Vaccinia virus
cagagguuguauuua

SEQ ID NO: 3276547 - RNA, 14 nt, Vaccinia virus
ugccauaauaauua

SEQ ID NO: 3276548 - RNA, 23 nt, Vaccinia virus
gcguuccuugugcuuaauguuuc

SEQ ID NO: 3276549 - RNA, 16 nt, Vaccinia virus
caauaagcauuaugau

SEQ ID NO: 3276550 - RNA, 19 nt, Vaccinia virus
aauaacauaggauuaaaaa

SEQ ID NO: 3276551 - RNA, 13 nt, Vaccinia virus
caggaacuauuaa

SEQ ID NO: 3276552 - RNA, 21 nt, Vaccinia virus
aggguauauccaucacuaaaa

SEQ ID NO: 3276553 - RNA, 19 nt, Vaccinia virus
aguucuggcaauguuucau

SEQ ID NO: 3276554 - RNA, 17 nt, Vaccinia virus
ucuuauaauuguaacau

SEQ ID NO: 3276555 - RNA, 18 nt, Vaccinia virus
uaccuccacaucuaaaaa

SEQ ID NO: 3276556 - RNA, 18 nt, Vaccinia virus
agaaacgcaacaaaugau

SEQ ID NO: 3276557 - RNA, 16 nt, Vaccinia virus
caauauuaucaucuug

SEQ ID NO: 3276558 - RNA, 18 nt, Vaccinia virus
auauguagcaaacaugau

SEQ ID NO: 3276559 - RNA, 21 nt, Vaccinia virus
aguuaaaaaagaccaguucau

SEQ ID NO: 3276560 - RNA, 14 nt, Vaccinia virus
agauuguucucuua

SEQ ID NO: 3276561 - RNA, 12 nt, Vaccinia virus
gccugaauaucu

SEQ ID NO: 3276562 - RNA, 17 nt, Vaccinia virus
cauuuaaauaucauaau

SEQ ID NO: 3276563 - RNA, 15 nt, Vaccinia virus
gacauaauacuaucu

SEQ ID NO: 3276564 - RNA, 15 nt, Vaccinia virus
guuauuuaugucaua

SEQ ID NO: 3276565 - RNA, 12 nt, Vaccinia virus
gcuacaguaaaa

SEQ ID NO: 3276566 - RNA, 13 nt, Vaccinia virus
gcaucuuguuaac

SEQ ID NO: 3276567 - RNA, 21 nt, Vaccinia virus
gugacuuaacuuguaauaauu

SEQ ID NO: 3276568 - RNA, 21 nt, Vaccinia virus
accgaucaaagaauuaaugau

SEQ ID NO: 3276569 - RNA, 13 nt, Vaccinia virus
aauacuuaaaaug

SEQ ID NO: 3276570 - RNA, 18 nt, Vaccinia virus
aagagcgacguacaacug

SEQ ID NO: 3276571 - RNA, 14 nt, Vaccinia virus
cauauuuucaguaa

SEQ ID NO: 3276572 - RNA, 15 nt, Vaccinia virus
gcaucgauuugcuaa

SEQ ID NO: 3276573 - RNA, 15 nt, Vaccinia virus
gaauaucuacaaauu

SEQ ID NO: 3276574 - RNA, 20 nt, Vaccinia virus
caugacuugguauuuggaaa

SEQ ID NO: 3276575 - RNA, 16 nt, Vaccinia virus
uaacuauuuagcaaaa

SEQ ID NO: 3276576 - RNA, 20 nt, Vaccinia virus
caugaagagauguuauauaa

SEQ ID NO: 3276577 - RNA, 14 nt, Vaccinia virus
uuuaauacagaugg

SEQ ID NO: 3276578 - RNA, 18 nt, Vaccinia virus
acaugggaaaugaaaugu

SEQ ID NO: 3276579 - RNA, 13 nt, Vaccinia virus
aaaagauaauaca

SEQ ID NO: 3276580 - RNA, 14 nt, Vaccinia virus
agcaauucauguac

SEQ ID NO: 3276581 - RNA, 24 nt, Vaccinia virus
uaaauagaauucucuucauaucau

SEQ ID NO: 3276582 - RNA, 15 nt, Vaccinia virus
guuuccaaaaaaugu

SEQ ID NO: 3276583 - RNA, 11 nt, Vaccinia virus
auuaugauacu

SEQ ID NO: 3276584 - RNA, 17 nt, Vaccinia virus
guuuguuccugugacaa

SEQ ID NO: 3276585 - RNA, 19 nt, Vaccinia virus
uaaaacuuaugauuaguca

SEQ ID NO: 3276586 - RNA, 23 nt, Vaccinia virus
ggaugguccaaacugccacugau

SEQ ID NO: 3276587 - RNA, 15 nt, Vaccinia virus
agcaaaacaaaauua

SEQ ID NO: 3276588 - RNA, 19 nt, Vaccinia virus
auaaucaaaauugucuaug

SEQ ID NO: 3276589 - RNA, 19 nt, Vaccinia virus
acaugcuccaauugaaugu

SEQ ID NO: 3276590 - RNA, 14 nt, Vaccinia virus
uaaaaaagauaaag

SEQ ID NO: 3276591 - RNA, 14 nt, Vaccinia virus
uuaaacauacuggu

SEQ ID NO: 3276592 - RNA, 21 nt, Vaccinia virus
ucgauaauaacagaauguaga

SEQ ID NO: 3276593 - RNA, 16 nt, Vaccinia virus
uaacaaccucuuuaau

SEQ ID NO: 3276594 - RNA, 23 nt, Vaccinia virus
aucucagucuguggcguuugcuu

SEQ ID NO: 3276595 - RNA, 16 nt, Vaccinia virus
uagaaacaugaaacca

SEQ ID NO: 3276596 - RNA, 14 nt, Vaccinia virus
cggacuuuaaacag

SEQ ID NO: 3276597 - RNA, 18 nt, Vaccinia virus
gcuacugcugauaaugau

SEQ ID NO: 3276598 - RNA, 22 nt, Vaccinia virus
aacaauaugguaauuuagagaa

SEQ ID NO: 3276599 - RNA, 16 nt, Vaccinia virus
uauacucuauucuuca

SEQ ID NO: 3276600 - RNA, 20 nt, Vaccinia virus
caagagacguaaauauucua

SEQ ID NO: 3276601 - RNA, 17 nt, Vaccinia virus
uuuaguaggacuaguau

SEQ ID NO: 3276602 - RNA, 20 nt, Vaccinia virus
uguuucuaccggcauagugg

SEQ ID NO: 3276603 - RNA, 23 nt, Vaccinia virus
acgcagaaauugguauaaauguu

SEQ ID NO: 3276604 - RNA, 16 nt, Vaccinia virus
ucucacugaauacgag

SEQ ID NO: 3276605 - RNA, 19 nt, Vaccinia virus
accaugaaauugagaagau

SEQ ID NO: 3276606 - RNA, 19 nt, Vaccinia virus
auauuguacgguagaauug

SEQ ID NO: 3276607 - RNA, 13 nt, Vaccinia virus
aagaaaaaugauu

SEQ ID NO: 3276608 - RNA, 14 nt, Vaccinia virus
uuccagaguguuua

SEQ ID NO: 3276609 - RNA, 21 nt, Vaccinia virus
gagauaucccguuagaaauau

SEQ ID NO: 3276610 - RNA, 16 nt, Vaccinia virus
auguuaaauguuuuac

SEQ ID NO: 3276611 - RNA, 16 nt, Vaccinia virus
uuuaccggcaucauaa

SEQ ID NO: 3276612 - RNA, 17 nt, Vaccinia virus
auaaaauugaaguaaua

SEQ ID NO: 3276613 - RNA, 16 nt, Vaccinia virus
ugauugugucucgaau

SEQ ID NO: 3276614 - RNA, 19 nt, Vaccinia virus
gucugauauucgaaaaucu

SEQ ID NO: 3276615 - RNA, 17 nt, Vaccinia virus
guauauguaagauguuu

SEQ ID NO: 3276616 - RNA, 16 nt, Vaccinia virus
auaacgauaacgauau

SEQ ID NO: 3276617 - RNA, 17 nt, Vaccinia virus
auuaugcgauagcaaga

SEQ ID NO: 3276618 - RNA, 15 nt, Vaccinia virus
gauagcaaaauaaag

SEQ ID NO: 3276619 - RNA, 22 nt, Vaccinia virus
acaacaucacgcucgauaauca

SEQ ID NO: 3276620 - RNA, 17 nt, Vaccinia virus
cuaauuuacuaucugua

SEQ ID NO: 3276621 - RNA, 23 nt, Vaccinia virus
uaaucauauaggcauugauuuuu

SEQ ID NO: 3276622 - RNA, 18 nt, Vaccinia virus
gugcauacgcauucaucu

SEQ ID NO: 3276623 - RNA, 14 nt, Vaccinia virus
acggauacugucuu

SEQ ID NO: 3276624 - RNA, 15 nt, Vaccinia virus
uuuacuuuucuaaau

SEQ ID NO: 3276625 - RNA, 22 nt, Vaccinia virus
caauuuuuagcaccauuaucuu

SEQ ID NO: 3276626 - RNA, 22 nt, Vaccinia virus
ucuuuaaguauauacgauaaga

SEQ ID NO: 3276627 - RNA, 23 nt, Vaccinia virus
aucugucuuaauuaacugucuuu

SEQ ID NO: 3276628 - RNA, 18 nt, Vaccinia virus
agaaauaaaaauuauuau

SEQ ID NO: 3276629 - RNA, 17 nt, Vaccinia virus
gcaaacgcgauaaggau

SEQ ID NO: 3276630 - RNA, 13 nt, Vaccinia virus
gucuauaguucuc

SEQ ID NO: 3276631 - RNA, 20 nt, Vaccinia virus
caaaugaguucuguguagau

SEQ ID NO: 3276632 - RNA, 17 nt, Vaccinia virus
aauauacaauagaugca

SEQ ID NO: 3276633 - RNA, 20 nt, Vaccinia virus
cugauuuauguuuuaaauau

SEQ ID NO: 3276634 - RNA, 17 nt, Vaccinia virus
augguagcaauaugcua

SEQ ID NO: 3276635 - RNA, 19 nt, Vaccinia virus
caguuucaucgauaaagga

SEQ ID NO: 3276636 - RNA, 21 nt, Vaccinia virus
aaauuauuuaauuuaauacau

SEQ ID NO: 3276637 - RNA, 14 nt, Vaccinia virus
aaauagauuauuua

SEQ ID NO: 3276638 - RNA, 23 nt, Vaccinia virus
guguacauccgaaauacaaaaug

SEQ ID NO: 3276639 - RNA, 16 nt, Vaccinia virus
auaucuagcaaaaauu

SEQ ID NO: 3276640 - RNA, 15 nt, Vaccinia virus
cgaaaagaaacagau

SEQ ID NO: 3276641 - RNA, 14 nt, Vaccinia virus
agaaacuuaaagua

SEQ ID NO: 3276642 - RNA, 12 nt, Vaccinia virus
ugauccacaaaa

SEQ ID NO: 3276643 - RNA, 15 nt, Vaccinia virus
auauucauagauuga

SEQ ID NO: 3276644 - RNA, 12 nt, Vaccinia virus
uaaaaauuauua

SEQ ID NO: 3276645 - RNA, 15 nt, Vaccinia virus
caaugggucguugga

SEQ ID NO: 3276646 - RNA, 12 nt, Vaccinia virus
aauuucaaaaua

SEQ ID NO: 3276647 - RNA, 19 nt, Vaccinia virus
auaauucauaagaauuuac

SEQ ID NO: 3276648 - RNA, 18 nt, Vaccinia virus
cuggggauggucuauaca

SEQ ID NO: 3276649 - RNA, 15 nt, Vaccinia virus
aucacucuucgaaaa

SEQ ID NO: 3276650 - RNA, 16 nt, Vaccinia virus
uagaucaagaaacauu

SEQ ID NO: 3276651 - RNA, 20 nt, Vaccinia virus
ugaugaaagauaaacuaaau

SEQ ID NO: 3276652 - RNA, 20 nt, Vaccinia virus
cauggucuagauguaaaaaa

SEQ ID NO: 3276653 - RNA, 19 nt, Vaccinia virus
uauuacguggagaaaucau

SEQ ID NO: 3276654 - RNA, 20 nt, Vaccinia virus
caucaaaauaggagauaucu

SEQ ID NO: 3276655 - RNA, 17 nt, Vaccinia virus
aauucuuaucaauaaca

SEQ ID NO: 3276656 - RNA, 18 nt, Vaccinia virus
ugauuguaaauacagaua

SEQ ID NO: 3276657 - RNA, 21 nt, Vaccinia virus
gacguauaagucuauuugaaa

SEQ ID NO: 3276658 - RNA, 17 nt, Vaccinia virus
auaucugugaauacuuu

SEQ ID NO: 3276659 - RNA, 20 nt, Vaccinia virus
aaugauacaaaaacgaaaua

SEQ ID NO: 3276660 - RNA, 21 nt, Vaccinia virus
cuagauagaaagauguagcua

SEQ ID NO: 3276661 - RNA, 15 nt, Vaccinia virus
uacuaaagaaacugu

SEQ ID NO: 3276662 - RNA, 21 nt, Vaccinia virus
ucuagacgauuaguaauauau

SEQ ID NO: 3276663 - RNA, 21 nt, Vaccinia virus
uaacaacgacuuauaauuaau

SEQ ID NO: 3276664 - RNA, 18 nt, Vaccinia virus
ucuccauagagaaauuag

SEQ ID NO: 3276665 - RNA, 13 nt, Vaccinia virus
auguuuucacaau

SEQ ID NO: 3276666 - RNA, 16 nt, Vaccinia virus
acaaauaguaauacau

SEQ ID NO: 3276667 - RNA, 13 nt, Vaccinia virus
augacaaacauug

SEQ ID NO: 3276668 - RNA, 21 nt, Vaccinia virus
aacuauugaagccauugaaaa

SEQ ID NO: 3276669 - RNA, 18 nt, Vaccinia virus
caauggucucggauuggu

SEQ ID NO: 3276670 - RNA, 18 nt, Vaccinia virus
aauaaacuagagaaacuu

SEQ ID NO: 3276671 - RNA, 16 nt, Vaccinia virus
caauuacugauaaugu

SEQ ID NO: 3276672 - RNA, 16 nt, Vaccinia virus
uuguauccuuaucuau

SEQ ID NO: 3276673 - RNA, 23 nt, Vaccinia virus
caugaacaaucacaagaacagag

SEQ ID NO: 3276674 - RNA, 15 nt, Vaccinia virus
uacuuaucauuuacu

SEQ ID NO: 3276675 - RNA, 13 nt, Vaccinia virus
auauuauuaaaga

SEQ ID NO: 3276676 - RNA, 17 nt, Vaccinia virus
ugauauacagucuuaaa

SEQ ID NO: 3276677 - RNA, 16 nt, Vaccinia virus
uaugcgggaauuaaug

SEQ ID NO: 3276678 - RNA, 18 nt, Vaccinia virus
aauacuuaccuaaugccu

SEQ ID NO: 3276679 - RNA, 18 nt, Vaccinia virus
ugcuucaacgaggaagau

SEQ ID NO: 3276680 - RNA, 21 nt, Vaccinia virus
auaaaaguuguaaaguaaaua

SEQ ID NO: 3276681 - RNA, 23 nt, Vaccinia virus
gucacgauguaggaauauagauc

SEQ ID NO: 3276682 - RNA, 13 nt, Vaccinia virus
uacccaucaugua

SEQ ID NO: 3276683 - RNA, 21 nt, Vaccinia virus
uauuaaugauacaaaaacgaa

SEQ ID NO: 3276684 - RNA, 21 nt, Vaccinia virus
auagugucuccuauguuguaa

SEQ ID NO: 3276685 - RNA, 16 nt, Vaccinia virus
auucauaaaacauaau

SEQ ID NO: 3276686 - RNA, 14 nt, Vaccinia virus
aucacgucauauau

SEQ ID NO: 3276687 - RNA, 21 nt, Vaccinia virus
agccauucuucccauggaugu

SEQ ID NO: 3276688 - RNA, 15 nt, Vaccinia virus
aaaacaauaaauauu

SEQ ID NO: 3276689 - RNA, 21 nt, Vaccinia virus
auaucugaaacaaagaauugu

SEQ ID NO: 3276690 - RNA, 16 nt, Vaccinia virus
cauuaauggcaauaac

SEQ ID NO: 3276691 - RNA, 21 nt, Vaccinia virus
aaucuaguacgcgaaauaaua

SEQ ID NO: 3276692 - RNA, 17 nt, Vaccinia virus
ucaucuugucuagaaug

SEQ ID NO: 3276693 - RNA, 13 nt, Vaccinia virus
agcaacuaaucaa

SEQ ID NO: 3276694 - RNA, 15 nt, Vaccinia virus
auuucacgaaaaaug

SEQ ID NO: 3276695 - RNA, 13 nt, Vaccinia virus
guaauaaacuguu

SEQ ID NO: 3276696 - RNA, 23 nt, Vaccinia virus
ucuucucguaggcgaaugauucc

SEQ ID NO: 3276697 - RNA, 22 nt, Vaccinia virus
gagagaucauuucuauaauuua

SEQ ID NO: 3276698 - RNA, 18 nt, Vaccinia virus
cauuuuggaaacauaaaa

SEQ ID NO: 3276699 - RNA, 12 nt, Vaccinia virus
auagcuaucaag

SEQ ID NO: 3276700 - RNA, 15 nt, Vaccinia virus
cugcuagaacaucca

SEQ ID NO: 3276701 - RNA, 16 nt, Vaccinia virus
uacguugauuucuagc

SEQ ID NO: 3276702 - RNA, 21 nt, Vaccinia virus
uuuacuuuucuaaauucauaa

SEQ ID NO: 3276703 - RNA, 22 nt, Vaccinia virus
agauuugcauuucuauacuugu

SEQ ID NO: 3276704 - RNA, 14 nt, Vaccinia virus
auuauuacauagau

SEQ ID NO: 3276705 - RNA, 20 nt, Vaccinia virus
ucaucguauagcaauguaau

SEQ ID NO: 3276706 - RNA, 18 nt, Vaccinia virus
guuccguaucuguauuua

SEQ ID NO: 3276707 - RNA, 15 nt, Vaccinia virus
ccauagauucuuuga

SEQ ID NO: 3276708 - RNA, 18 nt, Vaccinia virus
uuaagcauauccugaaua

SEQ ID NO: 3276709 - RNA, 15 nt, Vaccinia virus
aucagguaaaacaau

SEQ ID NO: 3276710 - RNA, 14 nt, Vaccinia virus
guuauaauagagau

SEQ ID NO: 3276711 - RNA, 14 nt, Vaccinia virus
uaaaauuguagcau

SEQ ID NO: 3276712 - RNA, 13 nt, Vaccinia virus
uaauaguaggaac

SEQ ID NO: 3276713 - RNA, 17 nt, Vaccinia virus
cugauuuuuuaacuuca

SEQ ID NO: 3276714 - RNA, 14 nt, Vaccinia virus
uucuauuuaauuuu

SEQ ID NO: 3276715 - RNA, 15 nt, Vaccinia virus
acguuacucaaacac

SEQ ID NO: 3276716 - RNA, 15 nt, Vaccinia virus
auuuguuaaaaauuu

SEQ ID NO: 3276717 - RNA, 23 nt, Vaccinia virus
auauuaaucauccacguuuugau

SEQ ID NO: 3276718 - RNA, 12 nt, Vaccinia virus
acacuauugaac

SEQ ID NO: 3276719 - RNA, 18 nt, Vaccinia virus
auuaacagauaaaaagac

SEQ ID NO: 3276720 - RNA, 14 nt, Vaccinia virus
cugacauucagaaa

SEQ ID NO: 3276721 - RNA, 16 nt, Vaccinia virus
uaucauaaaugaaaua

SEQ ID NO: 3276722 - RNA, 16 nt, Vaccinia virus
aucccauauaauacag

SEQ ID NO: 3276723 - RNA, 21 nt, Vaccinia virus
auacgaaauaaauaaugaauu

SEQ ID NO: 3276724 - RNA, 14 nt, Vaccinia virus
acgcguauauguuu

SEQ ID NO: 3276725 - RNA, 15 nt, Vaccinia virus
ucauuacuacuguaa

SEQ ID NO: 3276726 - RNA, 18 nt, Vaccinia virus
acaugcgguucaaaauag

SEQ ID NO: 3276727 - RNA, 20 nt, Vaccinia virus
aauuuguagauuuuguuaua

SEQ ID NO: 3276728 - RNA, 13 nt, Vaccinia virus
gucucauagagaa

SEQ ID NO: 3276729 - RNA, 15 nt, Vaccinia virus
aauaauuauguagua

SEQ ID NO: 3276730 - RNA, 21 nt, Vaccinia virus
acagaguauguaaaaauguua

SEQ ID NO: 3276731 - RNA, 23 nt, Vaccinia virus
caguguaaagaacgaauguugua

SEQ ID NO: 3276732 - RNA, 14 nt, Vaccinia virus
uauccaaucuuauu

SEQ ID NO: 3276733 - RNA, 18 nt, Vaccinia virus
gcaacggauuuaauuuua

SEQ ID NO: 3276734 - RNA, 16 nt, Vaccinia virus
uucaacgcuuggcuga

SEQ ID NO: 3276735 - RNA, 19 nt, Vaccinia virus
gcauguuugcucucugaau

SEQ ID NO: 3276736 - RNA, 15 nt, Vaccinia virus
ucuaucauggauaau

SEQ ID NO: 3276737 - RNA, 15 nt, Vaccinia virus
aucuauaaugucuac

SEQ ID NO: 3276738 - RNA, 14 nt, Vaccinia virus
uuaucaaaaauaag

SEQ ID NO: 3276739 - RNA, 15 nt, Vaccinia virus
gaaucuaaugaugac

SEQ ID NO: 3276740 - RNA, 14 nt, Vaccinia virus
ccuuaauauaauag

SEQ ID NO: 3276741 - RNA, 16 nt, Vaccinia virus
guuuaacaaaguuauu

SEQ ID NO: 3276742 - RNA, 22 nt, Vaccinia virus
uaguggaguaauuuacaaauug

SEQ ID NO: 3276743 - RNA, 22 nt, Vaccinia virus
agcuucgcugguaguuuaauau

SEQ ID NO: 3276744 - RNA, 13 nt, Vaccinia virus
gauagacuuucuc

SEQ ID NO: 3276745 - RNA, 13 nt, Vaccinia virus
uuauaaauagaug

SEQ ID NO: 3276746 - RNA, 22 nt, Vaccinia virus
gcuauuaaucauccaaagucaa

SEQ ID NO: 3276747 - RNA, 15 nt, Vaccinia virus
aaauguaaauccaau

SEQ ID NO: 3276748 - RNA, 19 nt, Vaccinia virus
uguaugugugauauugaua

SEQ ID NO: 3276749 - RNA, 21 nt, Vaccinia virus
ucacuucucuucauuacuacu

SEQ ID NO: 3276750 - RNA, 18 nt, Vaccinia virus
auacaaaauguuugacau

SEQ ID NO: 3276751 - RNA, 17 nt, Vaccinia virus
cuaauucgacuaucgaa

SEQ ID NO: 3276752 - RNA, 16 nt, Vaccinia virus
auugauuuuggaaacg

SEQ ID NO: 3276753 - RNA, 21 nt, Vaccinia virus
acuucuccuuauugauugaaa

SEQ ID NO: 3276754 - RNA, 18 nt, Vaccinia virus
guaugucgcggaugaaac

SEQ ID NO: 3276755 - RNA, 13 nt, Vaccinia virus
agccaauacuuua

SEQ ID NO: 3276756 - RNA, 20 nt, Vaccinia virus
auuaacgcaccuauaaagac

SEQ ID NO: 3276757 - RNA, 22 nt, Vaccinia virus
aauaauuucuagaacaucaucu

SEQ ID NO: 3276758 - RNA, 22 nt, Vaccinia virus
aaaugcgauacagacauuaaga

SEQ ID NO: 3276759 - RNA, 15 nt, Vaccinia virus
cgcucuuuugaugau

SEQ ID NO: 3276760 - RNA, 14 nt, Vaccinia virus
uuaauuuuuaguuu

SEQ ID NO: 3276761 - RNA, 13 nt, Vaccinia virus
cauauucucauaa

SEQ ID NO: 3276762 - RNA, 14 nt, Vaccinia virus
uauuguuacagaug

SEQ ID NO: 3276763 - RNA, 18 nt, Vaccinia virus
uuaguaauauaucucaga

SEQ ID NO: 3276764 - RNA, 12 nt, Vaccinia virus
auaaaaaaauua

SEQ ID NO: 3276765 - RNA, 14 nt, Vaccinia virus
cauaucuauccaua

SEQ ID NO: 3276766 - RNA, 15 nt, Vaccinia virus
aaagaugauauaucu

SEQ ID NO: 3276767 - RNA, 11 nt, Vaccinia virus
aacauguacau

SEQ ID NO: 3276768 - RNA, 21 nt, Vaccinia virus
uguaaaggauaugauauguug

SEQ ID NO: 3276769 - RNA, 18 nt, Vaccinia virus
cauaauuauucuaucaau

SEQ ID NO: 3276770 - RNA, 12 nt, Vaccinia virus
auauuuuaauga

SEQ ID NO: 3276771 - RNA, 17 nt, Vaccinia virus
acuuguuuaacaaaguu

SEQ ID NO: 3276772 - RNA, 12 nt, Vaccinia virus
auuuuuaucaug

SEQ ID NO: 3276773 - RNA, 15 nt, Vaccinia virus
uaugauaucucuauu

SEQ ID NO: 3276774 - RNA, 16 nt, Vaccinia virus
uucucucaacaucuuc

SEQ ID NO: 3276775 - RNA, 17 nt, Vaccinia virus
auccaauauuauugaaa

SEQ ID NO: 3276776 - RNA, 19 nt, Vaccinia virus
aacuuuauccauaucucua

SEQ ID NO: 3276777 - RNA, 18 nt, Vaccinia virus
auguguuuuagaauauau

SEQ ID NO: 3276778 - RNA, 18 nt, Vaccinia virus
uaugauagaaauuagcaa

SEQ ID NO: 3276779 - RNA, 13 nt, Vaccinia virus
aggaauaucugau

SEQ ID NO: 3276780 - RNA, 21 nt, Vaccinia virus
agaguauaaaacauuaaaugu

SEQ ID NO: 3276781 - RNA, 14 nt, Vaccinia virus
uuuguuagaguaua

SEQ ID NO: 3276782 - RNA, 18 nt, Vaccinia virus
guuaucaugaaauguuug

SEQ ID NO: 3276783 - RNA, 13 nt, Vaccinia virus
auuuauaaaaaaa

SEQ ID NO: 3276784 - RNA, 14 nt, Vaccinia virus
aggauagcaaaaua

SEQ ID NO: 3276785 - RNA, 13 nt, Vaccinia virus
cuacaaaauguug

SEQ ID NO: 3276786 - RNA, 15 nt, Vaccinia virus
auuuguuaacuauau

SEQ ID NO: 3276787 - RNA, 23 nt, Vaccinia virus
cacugucucauacacuacaguaa

SEQ ID NO: 3276788 - RNA, 14 nt, Vaccinia virus
auagaagauguuag

SEQ ID NO: 3276789 - RNA, 17 nt, Vaccinia virus
aguaagugucauuuaac

SEQ ID NO: 3276790 - RNA, 15 nt, Vaccinia virus
uauuauuauacauga

SEQ ID NO: 3276791 - RNA, 13 nt, Vaccinia virus
acucuaaguuugu

SEQ ID NO: 3276792 - RNA, 13 nt, Vaccinia virus
cuucguacauaag

SEQ ID NO: 3276793 - RNA, 20 nt, Vaccinia virus
auuucaucuccguaaauaua

SEQ ID NO: 3276794 - RNA, 20 nt, Vaccinia virus
uugacuacauucucauuaau

SEQ ID NO: 3276795 - RNA, 19 nt, Vaccinia virus
aacuauacgaaauaaauau

SEQ ID NO: 3276796 - RNA, 13 nt, Vaccinia virus
ucuuauagaugug

SEQ ID NO: 3276797 - RNA, 12 nt, Vaccinia virus
uguucagaaaua

SEQ ID NO: 3276798 - RNA, 17 nt, Vaccinia virus
augcaucuuauugaaug

SEQ ID NO: 3276799 - RNA, 15 nt, Vaccinia virus
auguuggagauacua

SEQ ID NO: 3276800 - RNA, 18 nt, Vaccinia virus
auuuauaucuaaaaauua

SEQ ID NO: 3276801 - RNA, 18 nt, Vaccinia virus
uuuacuguggcuagauac

SEQ ID NO: 3276802 - RNA, 13 nt, Vaccinia virus
gaugaauuauuau

SEQ ID NO: 3276803 - RNA, 16 nt, Vaccinia virus
uaaaaauaaacaacau

SEQ ID NO: 3276804 - RNA, 12 nt, Vaccinia virus
uaaaauaucuua

SEQ ID NO: 3276805 - RNA, 22 nt, Vaccinia virus
aucacaaaaaaaacuucucuaa

SEQ ID NO: 3276806 - RNA, 20 nt, Vaccinia virus
uguagcucucccagauuucu

SEQ ID NO: 3276807 - RNA, 13 nt, Vaccinia virus
uuuauuuauucuc

SEQ ID NO: 3276808 - RNA, 17 nt, Vaccinia virus
cauauacuauuacuuau

SEQ ID NO: 3276809 - RNA, 22 nt, Vaccinia virus
aguacucucucauaaaguggau

SEQ ID NO: 3276810 - RNA, 23 nt, Vaccinia virus
gugcauccaugcagcauuuccua

SEQ ID NO: 3276811 - RNA, 22 nt, Vaccinia virus
aauagcaccuagacaaguugcu

SEQ ID NO: 3276812 - RNA, 19 nt, Vaccinia virus
agaccgucuacaaaaaacu

SEQ ID NO: 3276813 - RNA, 20 nt, Vaccinia virus
aucaucauuuaccagaauac

SEQ ID NO: 3276814 - RNA, 20 nt, Vaccinia virus
aaaccaaggacuuuguagaa

SEQ ID NO: 3276815 - RNA, 21 nt, Vaccinia virus
aacaauauuaaggagauucua

SEQ ID NO: 3276816 - RNA, 15 nt, Vaccinia virus
uaugauuuugaugau

SEQ ID NO: 3276817 - RNA, 19 nt, Vaccinia virus
cuuguauucaacaugcuuu

SEQ ID NO: 3276818 - RNA, 21 nt, Vaccinia virus
guuuaacgaggacuuauucag

SEQ ID NO: 3276819 - RNA, 14 nt, Vaccinia virus
cuguuguacauaca

SEQ ID NO: 3276820 - RNA, 18 nt, Vaccinia virus
uucacaaaacuagacuuu

SEQ ID NO: 3276821 - RNA, 18 nt, Vaccinia virus
uaccaucaacuacuguag

SEQ ID NO: 3276822 - RNA, 21 nt, Vaccinia virus
auuacaauuugcauguugcau

SEQ ID NO: 3276823 - RNA, 23 nt, Vaccinia virus
auuaccauagaagauguuagaaa

SEQ ID NO: 3276824 - RNA, 21 nt, Vaccinia virus
acaaucuacucacauaugcau

SEQ ID NO: 3276825 - RNA, 12 nt, Vaccinia virus
ucuauuuggauu

SEQ ID NO: 3276826 - RNA, 13 nt, Vaccinia virus
aaauagaacuuau

SEQ ID NO: 3276827 - RNA, 16 nt, Vaccinia virus
acugaucccuaauuuc

SEQ ID NO: 3276828 - RNA, 13 nt, Vaccinia virus
auaucucuagaua

SEQ ID NO: 3276829 - RNA, 18 nt, Vaccinia virus
aaauauaugcucauauau

SEQ ID NO: 3276830 - RNA, 17 nt, Vaccinia virus
gaucgauaaugagaaua

SEQ ID NO: 3276831 - RNA, 16 nt, Vaccinia virus
uuuaauucuagacuau

SEQ ID NO: 3276832 - RNA, 20 nt, Vaccinia virus
guaauaucaugucuaaugau

SEQ ID NO: 3276833 - RNA, 22 nt, Vaccinia virus
uauaucuguccaauuaaaugua

SEQ ID NO: 3276834 - RNA, 19 nt, Vaccinia virus
gaugcuauguauauauauu

SEQ ID NO: 3276835 - RNA, 17 nt, Vaccinia virus
cuuuagaugaauuauua

SEQ ID NO: 3276836 - RNA, 18 nt, Vaccinia virus
ugaccuggaaaaauacuu

SEQ ID NO: 3276837 - RNA, 19 nt, Vaccinia virus
agauauauauggucuuaug

SEQ ID NO: 3276838 - RNA, 16 nt, Vaccinia virus
ucuuauccauuuauaa

SEQ ID NO: 3276839 - RNA, 18 nt, Vaccinia virus
acgaauuuccucagagga

SEQ ID NO: 3276840 - RNA, 21 nt, Vaccinia virus
augagaauaaaacucuacuau

SEQ ID NO: 3276841 - RNA, 16 nt, Vaccinia virus
aacgcaacaaaugauu

SEQ ID NO: 3276842 - RNA, 21 nt, Vaccinia virus
ucauacauaugguacgauguu

SEQ ID NO: 3276843 - RNA, 15 nt, Vaccinia virus
auguuuguucagagg

SEQ ID NO: 3276844 - RNA, 14 nt, Vaccinia virus
uuuagucgagauau

SEQ ID NO: 3276845 - RNA, 22 nt, Vaccinia virus
uacgcaauaugaucacaaagaa

SEQ ID NO: 3276846 - RNA, 16 nt, Vaccinia virus
aggagcauacaguaag

SEQ ID NO: 3276847 - RNA, 18 nt, Vaccinia virus
cguauaacaguaaaagaa

SEQ ID NO: 3276848 - RNA, 17 nt, Vaccinia virus
auaguuaaaaaaauaca

SEQ ID NO: 3276849 - RNA, 14 nt, Vaccinia virus
gagucucaucuuua

SEQ ID NO: 3276850 - RNA, 23 nt, Vaccinia virus
aauaauucauggaaauuuaacag

SEQ ID NO: 3276851 - RNA, 13 nt, Vaccinia virus
uagaacuuaacuu

SEQ ID NO: 3276852 - RNA, 19 nt, Vaccinia virus
ucacaaaucacacaagcca

SEQ ID NO: 3276853 - RNA, 18 nt, Vaccinia virus
ccauuaucuauaucaucu

SEQ ID NO: 3276854 - RNA, 22 nt, Vaccinia virus
auugauaaagaucuaaaaauua

SEQ ID NO: 3276855 - RNA, 22 nt, Vaccinia virus
auauuuuuuaucuaaaaaacua

SEQ ID NO: 3276856 - RNA, 11 nt, Vaccinia virus
uuuaaaaucau

SEQ ID NO: 3276857 - RNA, 15 nt, Vaccinia virus
gauuacaagaaauau

SEQ ID NO: 3276858 - RNA, 15 nt, Vaccinia virus
gugcuuaauguuucc

SEQ ID NO: 3276859 - RNA, 17 nt, Vaccinia virus
gcauauucgaaauuaga

SEQ ID NO: 3276860 - RNA, 17 nt, Vaccinia virus
uugauaauuacgcguau

SEQ ID NO: 3276861 - RNA, 21 nt, Vaccinia virus
cuauuucaacgucuaauguau

SEQ ID NO: 3276862 - RNA, 15 nt, Vaccinia virus
accagaugucauuau

SEQ ID NO: 3276863 - RNA, 14 nt, Vaccinia virus
aaucauugauacau

SEQ ID NO: 3276864 - RNA, 18 nt, Vaccinia virus
auaaauauuuuuauucag

SEQ ID NO: 3276865 - RNA, 14 nt, Vaccinia virus
cauacuacuauuau

SEQ ID NO: 3276866 - RNA, 21 nt, Vaccinia virus
agugauaaguaauaacuaugu

SEQ ID NO: 3276867 - RNA, 20 nt, Vaccinia virus
acauucaaccacucucgaua

SEQ ID NO: 3276868 - RNA, 19 nt, Vaccinia virus
gaugacuuuaguaaaucau

SEQ ID NO: 3276869 - RNA, 19 nt, Vaccinia virus
cuauguugacauguauaua

SEQ ID NO: 3276870 - RNA, 23 nt, Vaccinia virus
gaauaucaucgacuguugccaau

SEQ ID NO: 3276871 - RNA, 16 nt, Vaccinia virus
aacaccuauaagauua

SEQ ID NO: 3276872 - RNA, 21 nt, Vaccinia virus
uauacauccguagaaauauga

SEQ ID NO: 3276873 - RNA, 19 nt, Vaccinia virus
gcagucauuccaucauuua

SEQ ID NO: 3276874 - RNA, 13 nt, Vaccinia virus
uauuaucuauaaa

SEQ ID NO: 3276875 - RNA, 16 nt, Vaccinia virus
uuguauauuuuauuuu

SEQ ID NO: 3276876 - RNA, 17 nt, Vaccinia virus
ggacuauuugacuuugu

SEQ ID NO: 3276877 - RNA, 17 nt, Vaccinia virus
uccaaauugcgacacua

SEQ ID NO: 3276878 - RNA, 15 nt, Vaccinia virus
auaauuauuuuguaa

SEQ ID NO: 3276879 - RNA, 15 nt, Vaccinia virus
aagauuuaaauccua

SEQ ID NO: 3276880 - RNA, 12 nt, Vaccinia virus
cuccuguuugau

SEQ ID NO: 3276881 - RNA, 14 nt, Vaccinia virus
uuccauccuuugua

SEQ ID NO: 3276882 - RNA, 14 nt, Vaccinia virus
uaucuaacaucuug

SEQ ID NO: 3276883 - RNA, 15 nt, Vaccinia virus
acacgcauuaacaug

SEQ ID NO: 3276884 - RNA, 20 nt, Vaccinia virus
aauauagaacaucauuucca

SEQ ID NO: 3276885 - RNA, 19 nt, Vaccinia virus
uagacuuaucgacaucuug

SEQ ID NO: 3276886 - RNA, 16 nt, Vaccinia virus
uaaaggaugaguacau

SEQ ID NO: 3276887 - RNA, 19 nt, Vaccinia virus
cuccacaguuuuuaauuuc

SEQ ID NO: 3276888 - RNA, 17 nt, Vaccinia virus
agauucgcauaaaggau

SEQ ID NO: 3276889 - RNA, 15 nt, Vaccinia virus
uguuuaaaucaaaau

SEQ ID NO: 3276890 - RNA, 14 nt, Vaccinia virus
gaaagagaagaugg

SEQ ID NO: 3276891 - RNA, 17 nt, Vaccinia virus
cuaucuccgaauuuguu

SEQ ID NO: 3276892 - RNA, 19 nt, Vaccinia virus
aucuauuugauaauuacgc

SEQ ID NO: 3276893 - RNA, 14 nt, Vaccinia virus
agguacuaggaaaa

SEQ ID NO: 3276894 - RNA, 22 nt, Vaccinia virus
acauauuauucaaaauaugauu

SEQ ID NO: 3276895 - RNA, 15 nt, Vaccinia virus
uucuauucuuauucu

SEQ ID NO: 3276896 - RNA, 17 nt, Vaccinia virus
uacuuaaagauagaaau

SEQ ID NO: 3276897 - RNA, 15 nt, Vaccinia virus
aucugucuuaauuaa

SEQ ID NO: 3276898 - RNA, 21 nt, Vaccinia virus
auagguaauacauauaaaugu

SEQ ID NO: 3276899 - RNA, 16 nt, Vaccinia virus
agaucuuugauauacu

SEQ ID NO: 3276900 - RNA, 22 nt, Vaccinia virus
cugguuugauaaacuguuuauu

SEQ ID NO: 3276901 - RNA, 15 nt, Vaccinia virus
cauuaucaaaaagaa

SEQ ID NO: 3276902 - RNA, 13 nt, Vaccinia virus
aaacacuguuguu

SEQ ID NO: 3276903 - RNA, 13 nt, Vaccinia virus
cuauuuguuuaua

SEQ ID NO: 3276904 - RNA, 16 nt, Vaccinia virus
aauaggaauggauaau

SEQ ID NO: 3276905 - RNA, 20 nt, Vaccinia virus
acuuuuucaucuuuacauau

SEQ ID NO: 3276906 - RNA, 16 nt, Vaccinia virus
uagcagauagauaaag

SEQ ID NO: 3276907 - RNA, 18 nt, Vaccinia virus
uauauaucagauacaguu

SEQ ID NO: 3276908 - RNA, 22 nt, Vaccinia virus
uaugugugauauugauaucuuu

SEQ ID NO: 3276909 - RNA, 15 nt, Vaccinia virus
aauucuauucuagua

SEQ ID NO: 3276910 - RNA, 23 nt, Vaccinia virus
agaaggaguugauuaagaauaua

SEQ ID NO: 3276911 - RNA, 14 nt, Vaccinia virus
aguaagcauuuccu

SEQ ID NO: 3276912 - RNA, 19 nt, Vaccinia virus
cagcuauguuaucaugaaa

SEQ ID NO: 3276913 - RNA, 23 nt, Vaccinia virus
aauuucuaaaggagcaaauguua

SEQ ID NO: 3276914 - RNA, 17 nt, Vaccinia virus
aggacagaaaaaugcua

SEQ ID NO: 3276915 - RNA, 19 nt, Vaccinia virus
gaguauucgccccaaagga

SEQ ID NO: 3276916 - RNA, 19 nt, Vaccinia virus
acuauguguuaaaaaauuc

SEQ ID NO: 3276917 - RNA, 17 nt, Vaccinia virus
auuaauguaacuauaga

SEQ ID NO: 3276918 - RNA, 22 nt, Vaccinia virus
aguaaacuugacuaaaucuuaa

SEQ ID NO: 3276919 - RNA, 13 nt, Vaccinia virus
ucguucucuaaau

SEQ ID NO: 3276920 - RNA, 21 nt, Vaccinia virus
aauacuaaugcaucuauuuca

SEQ ID NO: 3276921 - RNA, 14 nt, Vaccinia virus
ccauauuuuuugca

SEQ ID NO: 3276922 - RNA, 14 nt, Vaccinia virus
auagauagaacuac

SEQ ID NO: 3276923 - RNA, 17 nt, Vaccinia virus
uauuaauuguaaaugau

SEQ ID NO: 3276924 - RNA, 15 nt, Vaccinia virus
auaaguuucauagau

SEQ ID NO: 3276925 - RNA, 15 nt, Vaccinia virus
auaauuuucauauau

SEQ ID NO: 3276926 - RNA, 13 nt, Vaccinia virus
augauauggaugu

SEQ ID NO: 3276927 - RNA, 14 nt, Vaccinia virus
uuacugaauuauua

SEQ ID NO: 3276928 - RNA, 14 nt, Vaccinia virus
uacaucuguuuccu

SEQ ID NO: 3276929 - RNA, 14 nt, Vaccinia virus
gauucaucaacauu

SEQ ID NO: 3276930 - RNA, 15 nt, Vaccinia virus
uuucuacuagacuau

SEQ ID NO: 3276931 - RNA, 13 nt, Vaccinia virus
guuuaauacuuau

SEQ ID NO: 3276932 - RNA, 14 nt, Vaccinia virus
agaacuuaacaaua

SEQ ID NO: 3276933 - RNA, 18 nt, Vaccinia virus
aaguuuauagcagaauuc

SEQ ID NO: 3276934 - RNA, 19 nt, Vaccinia virus
cuuuggagucucaucuuua

SEQ ID NO: 3276935 - RNA, 19 nt, Vaccinia virus
aucuugugaacuagacaua

SEQ ID NO: 3276936 - RNA, 12 nt, Vaccinia virus
uucgcugcuaug

SEQ ID NO: 3276937 - RNA, 18 nt, Vaccinia virus
uuggcaguacucauuaau

SEQ ID NO: 3276938 - RNA, 15 nt, Vaccinia virus
guuuucauuauuauu

SEQ ID NO: 3276939 - RNA, 22 nt, Vaccinia virus
cuuuaauaggaguaauagaacu

SEQ ID NO: 3276940 - RNA, 12 nt, Vaccinia virus
cauucuauuuuu

SEQ ID NO: 3276941 - RNA, 16 nt, Vaccinia virus
aguccuauauauuuga

SEQ ID NO: 3276942 - RNA, 14 nt, Vaccinia virus
gcgaggaaauguau

SEQ ID NO: 3276943 - RNA, 19 nt, Vaccinia virus
ucguaauuauaguucuuaa

SEQ ID NO: 3276944 - RNA, 14 nt, Vaccinia virus
agaggauuuucuag

SEQ ID NO: 3276945 - RNA, 16 nt, Vaccinia virus
aaccagaucaaaacaa

SEQ ID NO: 3276946 - RNA, 19 nt, Vaccinia virus
aaugccuuccaaaguuuaa

SEQ ID NO: 3276947 - RNA, 13 nt, Vaccinia virus
cgacaagauaucg

SEQ ID NO: 3276948 - RNA, 14 nt, Vaccinia virus
gcaaauaaaaucua

SEQ ID NO: 3276949 - RNA, 19 nt, Vaccinia virus
ugccaaaucuauaagaaaa

SEQ ID NO: 3276950 - RNA, 22 nt, Vaccinia virus
uggaucuccaucgaugauacau

SEQ ID NO: 3276951 - RNA, 17 nt, Vaccinia virus
augcaucgaacgaccau

SEQ ID NO: 3276952 - RNA, 19 nt, Vaccinia virus
acaagacuacaaagaaugu

SEQ ID NO: 3276953 - RNA, 15 nt, Vaccinia virus
ugguaucaacagaua

SEQ ID NO: 3276954 - RNA, 21 nt, Vaccinia virus
acauaaacggcuuuuaaacag

SEQ ID NO: 3276955 - RNA, 15 nt, Vaccinia virus
acuguuuauuaauga

SEQ ID NO: 3276956 - RNA, 20 nt, Vaccinia virus
acaucucugaacuauauaau

SEQ ID NO: 3276957 - RNA, 19 nt, Vaccinia virus
ucuaacgccgaucucugaa

SEQ ID NO: 3276958 - RNA, 15 nt, Vaccinia virus
ugcaaauguaguauu

SEQ ID NO: 3276959 - RNA, 19 nt, Vaccinia virus
uagccgauaaacaaaucau

SEQ ID NO: 3276960 - RNA, 17 nt, Vaccinia virus
acauaugacaaacauug

SEQ ID NO: 3276961 - RNA, 20 nt, Vaccinia virus
auauuguaccagauuaauga

SEQ ID NO: 3276962 - RNA, 18 nt, Vaccinia virus
ucaacguagaaaaaauag

SEQ ID NO: 3276963 - RNA, 19 nt, Vaccinia virus
agcguuaacuaucaaacaa

SEQ ID NO: 3276964 - RNA, 16 nt, Vaccinia virus
aucauacauuuaauaa

SEQ ID NO: 3276965 - RNA, 18 nt, Vaccinia virus
uaauggauauucugaaua

SEQ ID NO: 3276966 - RNA, 23 nt, Vaccinia virus
ucauucgcggaacuacauaguaa

SEQ ID NO: 3276967 - RNA, 20 nt, Vaccinia virus
guuauugguauuucuuacau

SEQ ID NO: 3276968 - RNA, 20 nt, Vaccinia virus
cguccaacgaguaacauccg

SEQ ID NO: 3276969 - RNA, 15 nt, Vaccinia virus
agaauguauaaaccu

SEQ ID NO: 3276970 - RNA, 17 nt, Vaccinia virus
uaugaacgaaauagcua

SEQ ID NO: 3276971 - RNA, 21 nt, Vaccinia virus
cucauuacauaguugauaaaa

SEQ ID NO: 3276972 - RNA, 16 nt, Vaccinia virus
gaauauaucuauaauu

SEQ ID NO: 3276973 - RNA, 19 nt, Vaccinia virus
ucauguucgaaaaagugaa

SEQ ID NO: 3276974 - RNA, 20 nt, Vaccinia virus
caucucguuuagauuuucca

SEQ ID NO: 3276975 - RNA, 14 nt, Vaccinia virus
aagaauauagaaau

SEQ ID NO: 3276976 - RNA, 20 nt, Vaccinia virus
caauaucugauuauuaugau

SEQ ID NO: 3276977 - RNA, 12 nt, Vaccinia virus
aaagauguuauu

SEQ ID NO: 3276978 - RNA, 20 nt, Vaccinia virus
cgucacagaaucuaccacag

SEQ ID NO: 3276979 - RNA, 18 nt, Vaccinia virus
gaaauagaggaagacaca

SEQ ID NO: 3276980 - RNA, 18 nt, Vaccinia virus
auguaugauucaauguau

SEQ ID NO: 3276981 - RNA, 16 nt, Vaccinia virus
cugauguuuguuuucg

SEQ ID NO: 3276982 - RNA, 14 nt, Vaccinia virus
uaucuguuaccaua

SEQ ID NO: 3276983 - RNA, 19 nt, Vaccinia virus
auagauuucgaaaauacua

SEQ ID NO: 3276984 - RNA, 21 nt, Vaccinia virus
aaauugucuagauaaaauacu

SEQ ID NO: 3276985 - RNA, 17 nt, Vaccinia virus
ugacacauuuuacgaua

SEQ ID NO: 3276986 - RNA, 17 nt, Vaccinia virus
gugauggauuuaaacau

SEQ ID NO: 3276987 - RNA, 17 nt, Vaccinia virus
auaaaggagaaggaaaa

SEQ ID NO: 3276988 - RNA, 22 nt, Vaccinia virus
cacugucuggcaauaaaugaua

SEQ ID NO: 3276989 - RNA, 14 nt, Vaccinia virus
uaaauaucauuaau

SEQ ID NO: 3276990 - RNA, 15 nt, Vaccinia virus
aaauacuuccaucaa

SEQ ID NO: 3276991 - RNA, 15 nt, Vaccinia virus
ucaucaauagacaua

SEQ ID NO: 3276992 - RNA, 22 nt, Vaccinia virus
aagauaccaaacagaauccuaa

SEQ ID NO: 3276993 - RNA, 21 nt, Vaccinia virus
agauaaugauauauuaaacaa

SEQ ID NO: 3276994 - RNA, 17 nt, Vaccinia virus
ugaacauaguaagaaau

SEQ ID NO: 3276995 - RNA, 17 nt, Vaccinia virus
uaaacucacauuucaaa

SEQ ID NO: 3276996 - RNA, 21 nt, Vaccinia virus
uauuuugauaggaucuauaau

SEQ ID NO: 3276997 - RNA, 17 nt, Vaccinia virus
cucauaaaauaguucuc

SEQ ID NO: 3276998 - RNA, 15 nt, Vaccinia virus
uaaagccguaauuga

SEQ ID NO: 3276999 - RNA, 15 nt, Vaccinia virus
gacaacgaauacaaa

SEQ ID NO: 3277000 - RNA, 15 nt, Vaccinia virus
aauccauucuaauga

SEQ ID NO: 3277001 - RNA, 22 nt, Vaccinia virus
aagauccaaacgaggaggaaau

SEQ ID NO: 3277002 - RNA, 19 nt, Vaccinia virus
gauaauauuagacauauga

SEQ ID NO: 3277003 - RNA, 22 nt, Vaccinia virus
aguucacaacucgccucuaaug

SEQ ID NO: 3277004 - RNA, 17 nt, Vaccinia virus
gaccggcaaucaugaau

SEQ ID NO: 3277005 - RNA, 14 nt, Vaccinia virus
cuuccaacauaaua

SEQ ID NO: 3277006 - RNA, 14 nt, Vaccinia virus
auguuguuaccaua

SEQ ID NO: 3277007 - RNA, 12 nt, Vaccinia virus
aggaaauacuug

SEQ ID NO: 3277008 - RNA, 11 nt, Vaccinia virus
ucaacaaacua

SEQ ID NO: 3277009 - RNA, 16 nt, Vaccinia virus
gaagaugcuauaucaa

SEQ ID NO: 3277010 - RNA, 14 nt, Vaccinia virus
uagagaucuaaagc

SEQ ID NO: 3277011 - RNA, 13 nt, Vaccinia virus
acucucgauaaau

SEQ ID NO: 3277012 - RNA, 18 nt, Vaccinia virus
aaacgauguacugaagau

SEQ ID NO: 3277013 - RNA, 16 nt, Vaccinia virus
aguuaaggauaauaag

SEQ ID NO: 3277014 - RNA, 22 nt, Vaccinia virus
auugucuauaucuaaaaucaua

SEQ ID NO: 3277015 - RNA, 13 nt, Vaccinia virus
agauauuaaugag

SEQ ID NO: 3277016 - RNA, 17 nt, Vaccinia virus
aaucuaucuuauauaca

SEQ ID NO: 3277017 - RNA, 21 nt, Vaccinia virus
auaucuuugguguaaaguuaa

SEQ ID NO: 3277018 - RNA, 21 nt, Vaccinia virus
auuccaacaacaucaacugaa

SEQ ID NO: 3277019 - RNA, 15 nt, Vaccinia virus
auacuagaguacuua

SEQ ID NO: 3277020 - RNA, 16 nt, Vaccinia virus
cugaaaagaagugagu

SEQ ID NO: 3277021 - RNA, 17 nt, Vaccinia virus
cauacccuccuguauau

SEQ ID NO: 3277022 - RNA, 15 nt, Vaccinia virus
uacucagaggauuac

SEQ ID NO: 3277023 - RNA, 19 nt, Vaccinia virus
caucuaacuauaugauauc

SEQ ID NO: 3277024 - RNA, 19 nt, Vaccinia virus
auccacugcugaacagcua

SEQ ID NO: 3277025 - RNA, 15 nt, Vaccinia virus
acgaugaaaauggua

SEQ ID NO: 3277026 - RNA, 20 nt, Vaccinia virus
ucucuauccaaggauguaau

SEQ ID NO: 3277027 - RNA, 13 nt, Vaccinia virus
agaaaacagacuu

SEQ ID NO: 3277028 - RNA, 16 nt, Vaccinia virus
aacauuaaauguauuu

SEQ ID NO: 3277029 - RNA, 12 nt, Vaccinia virus
agauaaaugguc

SEQ ID NO: 3277030 - RNA, 20 nt, Vaccinia virus
acaggcgaugguaaaaagac

SEQ ID NO: 3277031 - RNA, 17 nt, Vaccinia virus
cuuuaaguauauacgau

SEQ ID NO: 3277032 - RNA, 15 nt, Vaccinia virus
uaggguuguguauaa

SEQ ID NO: 3277033 - RNA, 22 nt, Vaccinia virus
gaaaaugaaaagguacuagaua

SEQ ID NO: 3277034 - RNA, 18 nt, Vaccinia virus
uguaacgaugaaaaccag

SEQ ID NO: 3277035 - RNA, 23 nt, Vaccinia virus
uuaugaaacuuggaaacaucucu

SEQ ID NO: 3277036 - RNA, 16 nt, Vaccinia virus
acagcaguaguuuaac

SEQ ID NO: 3277037 - RNA, 16 nt, Vaccinia virus
auguagcaaacaugau

SEQ ID NO: 3277038 - RNA, 22 nt, Vaccinia virus
auucuuagaaauauaaaacuug

SEQ ID NO: 3277039 - RNA, 17 nt, Vaccinia virus
uuauuagcgcaaucagu

SEQ ID NO: 3277040 - RNA, 16 nt, Vaccinia virus
uaucuauaaacauaag

SEQ ID NO: 3277041 - RNA, 19 nt, Vaccinia virus
aaaacauauauaauaaaua

SEQ ID NO: 3277042 - RNA, 23 nt, Vaccinia virus
uagugucaauuuuaaaugaugau

SEQ ID NO: 3277043 - RNA, 17 nt, Vaccinia virus
auuauccuaucauguau

SEQ ID NO: 3277044 - RNA, 19 nt, Vaccinia virus
ucaucaucguuacaauaaa

SEQ ID NO: 3277045 - RNA, 23 nt, Vaccinia virus
acaaauauuuaacucaugaugaa

SEQ ID NO: 3277046 - RNA, 17 nt, Vaccinia virus
uccuauaacuucuaauc

SEQ ID NO: 3277047 - RNA, 21 nt, Vaccinia virus
aucaauaccuuuucuggcuaa

SEQ ID NO: 3277048 - RNA, 13 nt, Vaccinia virus
cuuuuuauucucg

SEQ ID NO: 3277049 - RNA, 15 nt, Vaccinia virus
uaaaggauguggaca

SEQ ID NO: 3277050 - RNA, 20 nt, Vaccinia virus
uucucaaaagaucaaggaaa

SEQ ID NO: 3277051 - RNA, 19 nt, Vaccinia virus
aaaaugcgauguugauuua

SEQ ID NO: 3277052 - RNA, 22 nt, Vaccinia virus
auggucucggauugguggauau

SEQ ID NO: 3277053 - RNA, 15 nt, Vaccinia virus
uauugucuucuacau

SEQ ID NO: 3277054 - RNA, 15 nt, Vaccinia virus
aucagauucuuauau

SEQ ID NO: 3277055 - RNA, 18 nt, Vaccinia virus
uugagacgggucaaacaa

SEQ ID NO: 3277056 - RNA, 21 nt, Vaccinia virus
uccccaaaaguaaaauaauca

SEQ ID NO: 3277057 - RNA, 20 nt, Vaccinia virus
acuaucaaucgauaacaaga

SEQ ID NO: 3277058 - RNA, 16 nt, Vaccinia virus
uugguggaauagauga

SEQ ID NO: 3277059 - RNA, 21 nt, Vaccinia virus
ucaggacgaauaauucuaaua

SEQ ID NO: 3277060 - RNA, 17 nt, Vaccinia virus
ucuauaaauaaaagaca

SEQ ID NO: 3277061 - RNA, 20 nt, Vaccinia virus
uuagaaaacucucuauuucu

SEQ ID NO: 3277062 - RNA, 13 nt, Vaccinia virus
guuacugauuuuu

SEQ ID NO: 3277063 - RNA, 14 nt, Vaccinia virus
aagaauuuggaaau

SEQ ID NO: 3277064 - RNA, 14 nt, Vaccinia virus
uguuucuuuuagaa

SEQ ID NO: 3277065 - RNA, 18 nt, Vaccinia virus
agaucugagaauggauga

SEQ ID NO: 3277066 - RNA, 13 nt, Vaccinia virus
acguuaauacaaa

SEQ ID NO: 3277067 - RNA, 17 nt, Vaccinia virus
cugauuauuuacuauaa

SEQ ID NO: 3277068 - RNA, 21 nt, Vaccinia virus
acucucuauuucuuaaugaau

SEQ ID NO: 3277069 - RNA, 18 nt, Vaccinia virus
aggagucuuauagaugua

SEQ ID NO: 3277070 - RNA, 22 nt, Vaccinia virus
aguuuaagaaucucaugucaaa

SEQ ID NO: 3277071 - RNA, 16 nt, Vaccinia virus
cauaacauaaaaacuc

SEQ ID NO: 3277072 - RNA, 22 nt, Vaccinia virus
aaucuacauccaauuuuagaaa

SEQ ID NO: 3277073 - RNA, 12 nt, Vaccinia virus
ugacuucaucau

SEQ ID NO: 3277074 - RNA, 17 nt, Vaccinia virus
ugacuuucaaaccaauu

SEQ ID NO: 3277075 - RNA, 18 nt, Vaccinia virus
gaauugguggaaaaagug

SEQ ID NO: 3277076 - RNA, 12 nt, Vaccinia virus
ccaguauucucg

SEQ ID NO: 3277077 - RNA, 19 nt, Vaccinia virus
cugaacuugaggucaagga

SEQ ID NO: 3277078 - RNA, 13 nt, Vaccinia virus
uaucgaacaaauu

SEQ ID NO: 3277079 - RNA, 23 nt, Vaccinia virus
guucguaaacgaacuauaucauc

SEQ ID NO: 3277080 - RNA, 16 nt, Vaccinia virus
uauaauaaucaauaau

SEQ ID NO: 3277081 - RNA, 24 nt, Vaccinia virus
cuagacgauuaguaauauaucuca

SEQ ID NO: 3277082 - RNA, 22 nt, Vaccinia virus
uggagauccauaugaggaguca

SEQ ID NO: 3277083 - RNA, 12 nt, Vaccinia virus
auuuuuaucauu

SEQ ID NO: 3277084 - RNA, 17 nt, Vaccinia virus
auacaauccaugauauu

SEQ ID NO: 3277085 - RNA, 21 nt, Vaccinia virus
cuccucauuacguuucauuuu

SEQ ID NO: 3277086 - RNA, 13 nt, Vaccinia virus
guaugucaugaau

SEQ ID NO: 3277087 - RNA, 16 nt, Vaccinia virus
uauaauuuuuaacagu

SEQ ID NO: 3277088 - RNA, 16 nt, Vaccinia virus
cuuugguguaaaguua

SEQ ID NO: 3277089 - RNA, 20 nt, Vaccinia virus
auuaugaaaaaguaaaugau

SEQ ID NO: 3277090 - RNA, 17 nt, Vaccinia virus
aucuagauaauuaauaa

SEQ ID NO: 3277091 - RNA, 15 nt, Vaccinia virus
auuacacauuuccaa

SEQ ID NO: 3277092 - RNA, 22 nt, Vaccinia virus
agcagauuagacgauaugacau

SEQ ID NO: 3277093 - RNA, 18 nt, Vaccinia virus
aauaacauuuauuaucau

SEQ ID NO: 3277094 - RNA, 14 nt, Vaccinia virus
aacucaucgagaua

SEQ ID NO: 3277095 - RNA, 11 nt, Vaccinia virus
aaaagaaagua

SEQ ID NO: 3277096 - RNA, 20 nt, Vaccinia virus
aagauuuuugagaugucuca

SEQ ID NO: 3277097 - RNA, 17 nt, Vaccinia virus
uuauagauuuguaucuc

SEQ ID NO: 3277098 - RNA, 20 nt, Vaccinia virus
uacuccucauuacguuucau

SEQ ID NO: 3277099 - RNA, 17 nt, Vaccinia virus
auauaucacuauaagaa

SEQ ID NO: 3277100 - RNA, 14 nt, Vaccinia virus
uauucuauuucgaa

SEQ ID NO: 3277101 - RNA, 16 nt, Vaccinia virus
auuaacgaguuaaaaa

SEQ ID NO: 3277102 - RNA, 17 nt, Vaccinia virus
ucccauucuaauacuuu

SEQ ID NO: 3277103 - RNA, 22 nt, Vaccinia virus
auauacucuaaucuuuaauaga

SEQ ID NO: 3277104 - RNA, 19 nt, Vaccinia virus
acauugaugagacaauaau

SEQ ID NO: 3277105 - RNA, 18 nt, Vaccinia virus
caguaaguacaucaucug

SEQ ID NO: 3277106 - RNA, 17 nt, Vaccinia virus
gacacuauucauguaau

SEQ ID NO: 3277107 - RNA, 13 nt, Vaccinia virus
ucauucauauucu

SEQ ID NO: 3277108 - RNA, 13 nt, Vaccinia virus
auuuucauucacu

SEQ ID NO: 3277109 - RNA, 19 nt, Vaccinia virus
gcgguucaaaauagaaaau

SEQ ID NO: 3277110 - RNA, 18 nt, Vaccinia virus
gaagaacgguagaaacua

SEQ ID NO: 3277111 - RNA, 19 nt, Vaccinia virus
cucgaugggacauuucaac

SEQ ID NO: 3277112 - RNA, 13 nt, Vaccinia virus
uuuaaagaaguag

SEQ ID NO: 3277113 - RNA, 24 nt, Vaccinia virus
cguacucccaauauguguacgaac

SEQ ID NO: 3277114 - RNA, 19 nt, Vaccinia virus
guaaauuuuaucaugugua

SEQ ID NO: 3277115 - RNA, 21 nt, Vaccinia virus
ucaucaauguagaaaaugccc

SEQ ID NO: 3277116 - RNA, 13 nt, Vaccinia virus
uaacauugagaau

SEQ ID NO: 3277117 - RNA, 17 nt, Vaccinia virus
ugaugacacuagaugau

SEQ ID NO: 3277118 - RNA, 19 nt, Vaccinia virus
acauuguuuguauucucca

SEQ ID NO: 3277119 - RNA, 23 nt, Vaccinia virus
auaauacauccuacuaugcaauu

SEQ ID NO: 3277120 - RNA, 20 nt, Vaccinia virus
uacuucacucaucgauucaa

SEQ ID NO: 3277121 - RNA, 14 nt, Vaccinia virus
uuauacauuaucuu

SEQ ID NO: 3277122 - RNA, 21 nt, Vaccinia virus
gaaauacuaaaaaauguagaa

SEQ ID NO: 3277123 - RNA, 12 nt, Vaccinia virus
aauauuaaauau

SEQ ID NO: 3277124 - RNA, 22 nt, Vaccinia virus
aauuauuccucucaucacuaau

SEQ ID NO: 3277125 - RNA, 16 nt, Vaccinia virus
guggaugguuaaaaag

SEQ ID NO: 3277126 - RNA, 18 nt, Vaccinia virus
ucaaacaugacauuuucc

SEQ ID NO: 3277127 - RNA, 23 nt, Vaccinia virus
agauauuagucaaggaugugauu

SEQ ID NO: 3277128 - RNA, 14 nt, Vaccinia virus
ccacuauaaaauaa

SEQ ID NO: 3277129 - RNA, 15 nt, Vaccinia virus
uuguaauaucuuaaa

SEQ ID NO: 3277130 - RNA, 16 nt, Vaccinia virus
aguagacgacauagaa

SEQ ID NO: 3277131 - RNA, 12 nt, Vaccinia virus
aauacaggauua

SEQ ID NO: 3277132 - RNA, 16 nt, Vaccinia virus
auucauccuguugucu

SEQ ID NO: 3277133 - RNA, 15 nt, Vaccinia virus
cagagaggccaucug

SEQ ID NO: 3277134 - RNA, 14 nt, Vaccinia virus
aauugcuuuucuaa

SEQ ID NO: 3277135 - RNA, 17 nt, Vaccinia virus
auuagacgauaugacau

SEQ ID NO: 3277136 - RNA, 16 nt, Vaccinia virus
agauguuauuccuguu

SEQ ID NO: 3277137 - RNA, 17 nt, Vaccinia virus
caaaauccuauauugua

SEQ ID NO: 3277138 - RNA, 20 nt, Vaccinia virus
aggauacauaaaauuuaaga

SEQ ID NO: 3277139 - RNA, 19 nt, Vaccinia virus
ugauaucauguuagauaua

SEQ ID NO: 3277140 - RNA, 14 nt, Vaccinia virus
acgauaaugucuuu

SEQ ID NO: 3277141 - RNA, 17 nt, Vaccinia virus
acaucuauauacuauau

SEQ ID NO: 3277142 - RNA, 12 nt, Vaccinia virus
aauaaaacauuu

SEQ ID NO: 3277143 - RNA, 23 nt, Vaccinia virus
cauuacuucuuccauguccaaua

SEQ ID NO: 3277144 - RNA, 16 nt, Vaccinia virus
cuuaguaaacagucca

SEQ ID NO: 3277145 - RNA, 13 nt, Vaccinia virus
guccuuaauaucu

SEQ ID NO: 3277146 - RNA, 18 nt, Vaccinia virus
ucaccaauaagauaauag

SEQ ID NO: 3277147 - RNA, 18 nt, Vaccinia virus
ucauagccgcucuuagag

SEQ ID NO: 3277148 - RNA, 14 nt, Vaccinia virus
uuaaauaucauaau

SEQ ID NO: 3277149 - RNA, 16 nt, Vaccinia virus
agaugauaaaaacauu

SEQ ID NO: 3277150 - RNA, 14 nt, Vaccinia virus
cuccccaaacauug

SEQ ID NO: 3277151 - RNA, 15 nt, Vaccinia virus
gaugagauguuuaua

SEQ ID NO: 3277152 - RNA, 17 nt, Vaccinia virus
aauuuauuguaacagua

SEQ ID NO: 3277153 - RNA, 19 nt, Vaccinia virus
ucucuccaguuuuaguauu

SEQ ID NO: 3277154 - RNA, 13 nt, Vaccinia virus
uuuauucuagaau

SEQ ID NO: 3277155 - RNA, 21 nt, Vaccinia virus
acauguuccagaugucauaau

SEQ ID NO: 3277156 - RNA, 13 nt, Vaccinia virus
cauuuuauuucua

SEQ ID NO: 3277157 - RNA, 16 nt, Vaccinia virus
ugaaauaguuaucaag

SEQ ID NO: 3277158 - RNA, 15 nt, Vaccinia virus
auugaguaaauccuu

SEQ ID NO: 3277159 - RNA, 20 nt, Vaccinia virus
aauaugcucaugaacauuag

SEQ ID NO: 3277160 - RNA, 14 nt, Vaccinia virus
caaauauacuuuau

SEQ ID NO: 3277161 - RNA, 17 nt, Vaccinia virus
cagucuaguauccauuu

SEQ ID NO: 3277162 - RNA, 11 nt, Vaccinia virus
aauagaaucua

SEQ ID NO: 3277163 - RNA, 17 nt, Vaccinia virus
aauauaucaaacaugga

SEQ ID NO: 3277164 - RNA, 14 nt, Vaccinia virus
aagcuugacuacau

SEQ ID NO: 3277165 - RNA, 18 nt, Vaccinia virus
ucaacauacuauguuuug

SEQ ID NO: 3277166 - RNA, 21 nt, Vaccinia virus
ucaauaauuguggcuauauau

SEQ ID NO: 3277167 - RNA, 23 nt, Vaccinia virus
aauaaccguuagacauaaaauug

SEQ ID NO: 3277168 - RNA, 23 nt, Vaccinia virus
uuaauauugauacauacauuaau

SEQ ID NO: 3277169 - RNA, 20 nt, Vaccinia virus
caauuaccaacuagaagucu

SEQ ID NO: 3277170 - RNA, 17 nt, Vaccinia virus
uuuaccucuucugauau

SEQ ID NO: 3277171 - RNA, 16 nt, Vaccinia virus
aacgcuacaacagaua

SEQ ID NO: 3277172 - RNA, 19 nt, Vaccinia virus
uauucggcauuucuaaaau

SEQ ID NO: 3277173 - RNA, 19 nt, Vaccinia virus
cuucgauauaaaaucauuu

SEQ ID NO: 3277174 - RNA, 14 nt, Vaccinia virus
aauuuagaaauaua

SEQ ID NO: 3277175 - RNA, 20 nt, Vaccinia virus
gucaucuuguucagaaauau

SEQ ID NO: 3277176 - RNA, 13 nt, Vaccinia virus
acuucucuaaaug

SEQ ID NO: 3277177 - RNA, 15 nt, Vaccinia virus
ucguuaacuauaaga

SEQ ID NO: 3277178 - RNA, 12 nt, Vaccinia virus
augcuauguuua

SEQ ID NO: 3277179 - RNA, 12 nt, Vaccinia virus
agaccaaaaauu

SEQ ID NO: 3277180 - RNA, 18 nt, Vaccinia virus
uaguaucuuuuuuacgua

SEQ ID NO: 3277181 - RNA, 19 nt, Vaccinia virus
auaucacaaccuuuguuaa

SEQ ID NO: 3277182 - RNA, 19 nt, Vaccinia virus
cuauucucguccauuuuag

SEQ ID NO: 3277183 - RNA, 14 nt, Vaccinia virus
aauacaaaauaaua

SEQ ID NO: 3277184 - RNA, 14 nt, Vaccinia virus
uacgauucaggaau

SEQ ID NO: 3277185 - RNA, 22 nt, Vaccinia virus
acaaaauccaaacauuacaaau

SEQ ID NO: 3277186 - RNA, 19 nt, Vaccinia virus
auaucuagcaaaaauucua

SEQ ID NO: 3277187 - RNA, 19 nt, Vaccinia virus
gauacaacgguuacuauca

SEQ ID NO: 3277188 - RNA, 16 nt, Vaccinia virus
uauuccaaauuauucu

SEQ ID NO: 3277189 - RNA, 22 nt, Vaccinia virus
auauauugcaaaucacucaaua

SEQ ID NO: 3277190 - RNA, 15 nt, Vaccinia virus
acucgcguuuagagg

SEQ ID NO: 3277191 - RNA, 20 nt, Vaccinia virus
gcgauauacauaaacugauc

SEQ ID NO: 3277192 - RNA, 15 nt, Vaccinia virus
acauuuccuacuacu

SEQ ID NO: 3277193 - RNA, 13 nt, Vaccinia virus
caaaaaauauauu

SEQ ID NO: 3277194 - RNA, 17 nt, Vaccinia virus
cucacauccuuuauuuu

SEQ ID NO: 3277195 - RNA, 14 nt, Vaccinia virus
uuaaacuguaucga

SEQ ID NO: 3277196 - RNA, 13 nt, Vaccinia virus
uuggcaauuaaaa

SEQ ID NO: 3277197 - RNA, 15 nt, Vaccinia virus
caauauaaauccagu

SEQ ID NO: 3277198 - RNA, 18 nt, Vaccinia virus
auauuaacaucuaaacau

SEQ ID NO: 3277199 - RNA, 16 nt, Vaccinia virus
aaagcccauauauguu

SEQ ID NO: 3277200 - RNA, 16 nt, Vaccinia virus
uuaucaaauggaugcu

SEQ ID NO: 3277201 - RNA, 17 nt, Vaccinia virus
agauaggacgguauaug

SEQ ID NO: 3277202 - RNA, 20 nt, Vaccinia virus
aaaauaaacacauagaaaua

SEQ ID NO: 3277203 - RNA, 15 nt, Vaccinia virus
uuuaacaauuucuau

SEQ ID NO: 3277204 - RNA, 13 nt, Vaccinia virus
auagcuaaaaaug

SEQ ID NO: 3277205 - RNA, 15 nt, Vaccinia virus
auuaaaaauuuccau

SEQ ID NO: 3277206 - RNA, 19 nt, Vaccinia virus
uauuacauaauauauacag

SEQ ID NO: 3277207 - RNA, 13 nt, Vaccinia virus
uaguuuuuuucau

SEQ ID NO: 3277208 - RNA, 18 nt, Vaccinia virus
ucgucuagcguugcuucu

SEQ ID NO: 3277209 - RNA, 18 nt, Vaccinia virus
guacucguguccauaauc

SEQ ID NO: 3277210 - RNA, 22 nt, Vaccinia virus
uuauucaucgucgucuacuauu

SEQ ID NO: 3277211 - RNA, 19 nt, Vaccinia virus
ccaauuuuucuuaacaaac

SEQ ID NO: 3277212 - RNA, 20 nt, Vaccinia virus
auuagaguuaggcaauguau

SEQ ID NO: 3277213 - RNA, 13 nt, Vaccinia virus
uauauucuaugau

SEQ ID NO: 3277214 - RNA, 14 nt, Vaccinia virus
uuguaaauuauuuu

SEQ ID NO: 3277215 - RNA, 20 nt, Vaccinia virus
uauaugguucgcucaaaaau

SEQ ID NO: 3277216 - RNA, 15 nt, Vaccinia virus
gaauccgugauuuug

SEQ ID NO: 3277217 - RNA, 14 nt, Vaccinia virus
acaagaucaugaac

SEQ ID NO: 3277218 - RNA, 23 nt, Vaccinia virus
uaauaaaggugguaguauuguca

SEQ ID NO: 3277219 - RNA, 19 nt, Vaccinia virus
gaauuauuauuaauuauau

SEQ ID NO: 3277220 - RNA, 13 nt, Vaccinia virus
acaaaagugaaua

SEQ ID NO: 3277221 - RNA, 14 nt, Vaccinia virus
guuaaaaauuuaga

SEQ ID NO: 3277222 - RNA, 21 nt, Vaccinia virus
uuucugguuuucuauaaauaa

SEQ ID NO: 3277223 - RNA, 16 nt, Vaccinia virus
uauacguacuuaacau

SEQ ID NO: 3277224 - RNA, 22 nt, Vaccinia virus
uguauccgucaaucuaauauua

SEQ ID NO: 3277225 - RNA, 17 nt, Vaccinia virus
uacuaugccaaaugaau

SEQ ID NO: 3277226 - RNA, 18 nt, Vaccinia virus
aauucgguuauaaaugaa

SEQ ID NO: 3277227 - RNA, 14 nt, Vaccinia virus
cauauuuauggauu

SEQ ID NO: 3277228 - RNA, 13 nt, Vaccinia virus
agaggaaacuaau

SEQ ID NO: 3277229 - RNA, 21 nt, Vaccinia virus
aauauauaagacacagaaaua

SEQ ID NO: 3277230 - RNA, 18 nt, Vaccinia virus
agcucaauauaaaugcgu

SEQ ID NO: 3277231 - RNA, 12 nt, Vaccinia virus
aauuuuucuuaa

SEQ ID NO: 3277232 - RNA, 16 nt, Vaccinia virus
uuaggauuaacauagu

SEQ ID NO: 3277233 - RNA, 19 nt, Vaccinia virus
uccauauuucuuaauguaa

SEQ ID NO: 3277234 - RNA, 14 nt, Vaccinia virus
uauaguuaacauuu

SEQ ID NO: 3277235 - RNA, 19 nt, Vaccinia virus
ucaccaaauuuuacaaaaa

SEQ ID NO: 3277236 - RNA, 14 nt, Vaccinia virus
caauagauagucua

SEQ ID NO: 3277237 - RNA, 18 nt, Vaccinia virus
ugauauagcauugcgcau

SEQ ID NO: 3277238 - RNA, 13 nt, Vaccinia virus
ucauaauaaauuu

SEQ ID NO: 3277239 - RNA, 22 nt, Vaccinia virus
uguacucaugaaacguuuggaa

SEQ ID NO: 3277240 - RNA, 22 nt, Vaccinia virus
ggaacaguucuaccaccaguaa

SEQ ID NO: 3277241 - RNA, 16 nt, Vaccinia virus
guuaaaacuacaaaaa

SEQ ID NO: 3277242 - RNA, 16 nt, Vaccinia virus
aucacacuuaaaauaa

SEQ ID NO: 3277243 - RNA, 12 nt, Vaccinia virus
ucucaauuucua

SEQ ID NO: 3277244 - RNA, 17 nt, Vaccinia virus
agauacauuguaugaug

SEQ ID NO: 3277245 - RNA, 18 nt, Vaccinia virus
agaugguagaacaaugug

SEQ ID NO: 3277246 - RNA, 22 nt, Vaccinia virus
uaauaaacauuccacauucaga

SEQ ID NO: 3277247 - RNA, 13 nt, Vaccinia virus
uugauucuaguau

SEQ ID NO: 3277248 - RNA, 15 nt, Vaccinia virus
aaaugguauauuuua

SEQ ID NO: 3277249 - RNA, 13 nt, Vaccinia virus
agaauucuagauc

SEQ ID NO: 3277250 - RNA, 17 nt, Vaccinia virus
uagaucggaugauuuac

SEQ ID NO: 3277251 - RNA, 16 nt, Vaccinia virus
ucgcgcuuuacauucu

SEQ ID NO: 3277252 - RNA, 19 nt, Vaccinia virus
aauaaacucagaacaauau

SEQ ID NO: 3277253 - RNA, 16 nt, Vaccinia virus
ccuauacuauguuaua

SEQ ID NO: 3277254 - RNA, 21 nt, Vaccinia virus
uuucauaauauuaucaaaaga

SEQ ID NO: 3277255 - RNA, 20 nt, Vaccinia virus
uaacgauaacacaaaaugug

SEQ ID NO: 3277256 - RNA, 17 nt, Vaccinia virus
cuaguagcgaaaacuau

SEQ ID NO: 3277257 - RNA, 22 nt, Vaccinia virus
gauauagacgaaauauuagaaa

SEQ ID NO: 3277258 - RNA, 18 nt, Vaccinia virus
uuuuacguaguaaucguc

SEQ ID NO: 3277259 - RNA, 15 nt, Vaccinia virus
gagaauuaauaucua

SEQ ID NO: 3277260 - RNA, 17 nt, Vaccinia virus
ugcaaagucuaaauauu

SEQ ID NO: 3277261 - RNA, 14 nt, Vaccinia virus
auuaaguguggugu

SEQ ID NO: 3277262 - RNA, 14 nt, Vaccinia virus
auccuaacaaugaa

SEQ ID NO: 3277263 - RNA, 21 nt, Vaccinia virus
aaauauauuaauccacuauau

SEQ ID NO: 3277264 - RNA, 19 nt, Vaccinia virus
auuguuauugaucaaacau

SEQ ID NO: 3277265 - RNA, 22 nt, Vaccinia virus
gaugaaggugggacuauaucua

SEQ ID NO: 3277266 - RNA, 12 nt, Vaccinia virus
ucgauauucuca

SEQ ID NO: 3277267 - RNA, 15 nt, Vaccinia virus
aucagauuauuuaac

SEQ ID NO: 3277268 - RNA, 20 nt, Vaccinia virus
uauccucacaacuuaaugaa

SEQ ID NO: 3277269 - RNA, 14 nt, Vaccinia virus
cguuugaaugccac

SEQ ID NO: 3277270 - RNA, 22 nt, Vaccinia virus
cagaauagagccaaaaugguaa

SEQ ID NO: 3277271 - RNA, 22 nt, Vaccinia virus
aguuagaugugucauacuuguu

SEQ ID NO: 3277272 - RNA, 22 nt, Vaccinia virus
guaucucuaccuaugauuaaau

SEQ ID NO: 3277273 - RNA, 18 nt, Vaccinia virus
guuuaacuagucuucucu

SEQ ID NO: 3277274 - RNA, 21 nt, Vaccinia virus
uauuuuuucuggcauuaucua

SEQ ID NO: 3277275 - RNA, 18 nt, Vaccinia virus
uaagaagauuauauucua

SEQ ID NO: 3277276 - RNA, 14 nt, Vaccinia virus
uaucuacacaugua

SEQ ID NO: 3277277 - RNA, 18 nt, Vaccinia virus
uucauauuuuaguuuuua

SEQ ID NO: 3277278 - RNA, 15 nt, Vaccinia virus
acgaggaaacaaugc

SEQ ID NO: 3277279 - RNA, 15 nt, Vaccinia virus
ucuguaaauagaauc

SEQ ID NO: 3277280 - RNA, 22 nt, Vaccinia virus
ccuagaaggucgccguauguua

SEQ ID NO: 3277281 - RNA, 13 nt, Vaccinia virus
gcauaucaugaaa

SEQ ID NO: 3277282 - RNA, 23 nt, Vaccinia virus
cuucuggaagguuuguauucuga

SEQ ID NO: 3277283 - RNA, 22 nt, Vaccinia virus
ucuauuguuuagacuguuugua

SEQ ID NO: 3277284 - RNA, 18 nt, Vaccinia virus
caagaacaacuagaacag

SEQ ID NO: 3277285 - RNA, 17 nt, Vaccinia virus
caauuuuaaaucaucuu

SEQ ID NO: 3277286 - RNA, 19 nt, Vaccinia virus
uuauaacacuuauguauua

SEQ ID NO: 3277287 - RNA, 15 nt, Vaccinia virus
uccagaugucauaau

SEQ ID NO: 3277288 - RNA, 13 nt, Vaccinia virus
cucuacucuagau

SEQ ID NO: 3277289 - RNA, 21 nt, Vaccinia virus
agauccacugucacuggaaag

SEQ ID NO: 3277290 - RNA, 19 nt, Vaccinia virus
cacuggugucagacugugc

SEQ ID NO: 3277291 - RNA, 20 nt, Vaccinia virus
uauucgucgucgacuaucaa

SEQ ID NO: 3277292 - RNA, 23 nt, Vaccinia virus
auuaaacguaguuaugauaaaug

SEQ ID NO: 3277293 - RNA, 14 nt, Vaccinia virus
ggaacaauaaaaga

SEQ ID NO: 3277294 - RNA, 22 nt, Vaccinia virus
aucggaacacuugguaguugaa

SEQ ID NO: 3277295 - RNA, 17 nt, Vaccinia virus
aaguuuggagaaaugga

SEQ ID NO: 3277296 - RNA, 15 nt, Vaccinia virus
uguacacauaguguu

SEQ ID NO: 3277297 - RNA, 18 nt, Vaccinia virus
aaucuauaucauguagaa

SEQ ID NO: 3277298 - RNA, 17 nt, Vaccinia virus
guuaagagaauaauaga

SEQ ID NO: 3277299 - RNA, 12 nt, Vaccinia virus
uaaagaaaauau

SEQ ID NO: 3277300 - RNA, 12 nt, Vaccinia virus
uuauuuagugua

SEQ ID NO: 3277301 - RNA, 19 nt, Vaccinia virus
aacggcguuucggaaaaug

SEQ ID NO: 3277302 - RNA, 19 nt, Vaccinia virus
caacgaaucccuacauauu

SEQ ID NO: 3277303 - RNA, 20 nt, Vaccinia virus
cauacauucggacagacaca

SEQ ID NO: 3277304 - RNA, 19 nt, Vaccinia virus
agcucucccagauuucuuu

SEQ ID NO: 3277305 - RNA, 15 nt, Vaccinia virus
aucucaacaaaauuc

SEQ ID NO: 3277306 - RNA, 20 nt, Vaccinia virus
cuugagacuugauagauauu

SEQ ID NO: 3277307 - RNA, 15 nt, Vaccinia virus
aacuguuguaaauua

SEQ ID NO: 3277308 - RNA, 14 nt, Vaccinia virus
gucgauauacuuau

SEQ ID NO: 3277309 - RNA, 24 nt, Vaccinia virus
aguauacgaagaaaaaguaaauac

SEQ ID NO: 3277310 - RNA, 16 nt, Vaccinia virus
ggaaacaauucauaau

SEQ ID NO: 3277311 - RNA, 19 nt, Vaccinia virus
agauacuuuauuacuccau

SEQ ID NO: 3277312 - RNA, 19 nt, Vaccinia virus
uuuagaaaaaugcuaauau

SEQ ID NO: 3277313 - RNA, 18 nt, Vaccinia virus
caaagaauuaaugauagu

SEQ ID NO: 3277314 - RNA, 13 nt, Vaccinia virus
aaaacauaaucaa

SEQ ID NO: 3277315 - RNA, 13 nt, Vaccinia virus
cuaguuuugagaa

SEQ ID NO: 3277316 - RNA, 17 nt, Vaccinia virus
gaauauacaaguauuau

SEQ ID NO: 3277317 - RNA, 17 nt, Vaccinia virus
cuguauguacaacagug

SEQ ID NO: 3277318 - RNA, 18 nt, Vaccinia virus
auacuacuucuccaacau

SEQ ID NO: 3277319 - RNA, 16 nt, Vaccinia virus
ucaucuaccaauucau

SEQ ID NO: 3277320 - RNA, 14 nt, Vaccinia virus
agcaagauacuuua

SEQ ID NO: 3277321 - RNA, 23 nt, Vaccinia virus
aauaguucccaacccagauaaua

SEQ ID NO: 3277322 - RNA, 23 nt, Vaccinia virus
cucccauggaaugacccaauaag

SEQ ID NO: 3277323 - RNA, 16 nt, Vaccinia virus
auuaguaacagucuua

SEQ ID NO: 3277324 - RNA, 13 nt, Vaccinia virus
ucaaaaauuuaga

SEQ ID NO: 3277325 - RNA, 12 nt, Vaccinia virus
ugaauaauguac

SEQ ID NO: 3277326 - RNA, 22 nt, Vaccinia virus
aaaacugguuaaaacaguaugu

SEQ ID NO: 3277327 - RNA, 12 nt, Vaccinia virus
guaaacauauca

SEQ ID NO: 3277328 - RNA, 21 nt, Vaccinia virus
uaucaauaacgcaaucaugau

SEQ ID NO: 3277329 - RNA, 17 nt, Vaccinia virus
caugaguacuuguacac

SEQ ID NO: 3277330 - RNA, 15 nt, Vaccinia virus
gacggauaaaacaaa

SEQ ID NO: 3277331 - RNA, 18 nt, Vaccinia virus
uauauccguucuuaacuu

SEQ ID NO: 3277332 - RNA, 16 nt, Vaccinia virus
aaauuaauuauuguau

SEQ ID NO: 3277333 - RNA, 23 nt, Vaccinia virus
ucauaucuagaaugaagauauca

SEQ ID NO: 3277334 - RNA, 22 nt, Vaccinia virus
aaucuaacauugauuuuaaaau

SEQ ID NO: 3277335 - RNA, 14 nt, Vaccinia virus
uaucuccaguauuu

SEQ ID NO: 3277336 - RNA, 17 nt, Vaccinia virus
acacuaaaauuaaacau

SEQ ID NO: 3277337 - RNA, 14 nt, Vaccinia virus
uaauaucuaacaaa

SEQ ID NO: 3277338 - RNA, 13 nt, Vaccinia virus
agucauaucuaga

SEQ ID NO: 3277339 - RNA, 19 nt, Vaccinia virus
ggacauacguauauuucua

SEQ ID NO: 3277340 - RNA, 14 nt, Vaccinia virus
acuaaauugaacac

SEQ ID NO: 3277341 - RNA, 12 nt, Vaccinia virus
acacaugaugaa

SEQ ID NO: 3277342 - RNA, 22 nt, Vaccinia virus
aucaaacaaaaaagcucaauaa

SEQ ID NO: 3277343 - RNA, 15 nt, Vaccinia virus
agagaugucugaaac

SEQ ID NO: 3277344 - RNA, 14 nt, Vaccinia virus
uauuauaaacucuc

SEQ ID NO: 3277345 - RNA, 11 nt, Vaccinia virus
acuuuaaacau

SEQ ID NO: 3277346 - RNA, 19 nt, Vaccinia virus
agguacuauaauauuaaaa

SEQ ID NO: 3277347 - RNA, 12 nt, Vaccinia virus
uauuaucaugau

SEQ ID NO: 3277348 - RNA, 15 nt, Vaccinia virus
cgcuagucaucacau

SEQ ID NO: 3277349 - RNA, 20 nt, Vaccinia virus
uaacaaagauauuaccaguu

SEQ ID NO: 3277350 - RNA, 15 nt, Vaccinia virus
aaucauauuuagaaa

SEQ ID NO: 3277351 - RNA, 14 nt, Vaccinia virus
aagaugaaaugauu

SEQ ID NO: 3277352 - RNA, 22 nt, Vaccinia virus
gcaagaacacacgaacaucuuu

SEQ ID NO: 3277353 - RNA, 22 nt, Vaccinia virus
gaugcgguuuaauaaauguuuu

SEQ ID NO: 3277354 - RNA, 20 nt, Vaccinia virus
uagagauuguuaaauuauua

SEQ ID NO: 3277355 - RNA, 22 nt, Vaccinia virus
auccucagacucugauuugaac

SEQ ID NO: 3277356 - RNA, 23 nt, Vaccinia virus
uuguuuagcuauucguaacaaaa

SEQ ID NO: 3277357 - RNA, 15 nt, Vaccinia virus
cauauauuuuuggau

SEQ ID NO: 3277358 - RNA, 14 nt, Vaccinia virus
auacauguuuguaa

SEQ ID NO: 3277359 - RNA, 22 nt, Vaccinia virus
ccaauuguuuuuguacauaaua

SEQ ID NO: 3277360 - RNA, 17 nt, Vaccinia virus
aaucuaccuauagaaaa

SEQ ID NO: 3277361 - RNA, 18 nt, Vaccinia virus
uaaguacccuuauauuca

SEQ ID NO: 3277362 - RNA, 21 nt, Vaccinia virus
agaaaucaacgaucuaauaca

SEQ ID NO: 3277363 - RNA, 15 nt, Vaccinia virus
cauaagauauccaua

SEQ ID NO: 3277364 - RNA, 15 nt, Vaccinia virus
auagcugagaauauc

SEQ ID NO: 3277365 - RNA, 20 nt, Vaccinia virus
aacaucgaagaugaaucaaa

SEQ ID NO: 3277366 - RNA, 20 nt, Vaccinia virus
aaguauaucgacauacuacu

SEQ ID NO: 3277367 - RNA, 15 nt, Vaccinia virus
gacacaucugccaua

SEQ ID NO: 3277368 - RNA, 21 nt, Vaccinia virus
auacuaaaggcaacaaagaaa

SEQ ID NO: 3277369 - RNA, 19 nt, Vaccinia virus
uuaaaaaggaaaauacuau

SEQ ID NO: 3277370 - RNA, 14 nt, Vaccinia virus
ugaugaguuguaca

SEQ ID NO: 3277371 - RNA, 19 nt, Vaccinia virus
cacuucgaagaguuaauau

SEQ ID NO: 3277372 - RNA, 22 nt, Vaccinia virus
gcccaauuuugguguaaaucua

SEQ ID NO: 3277373 - RNA, 22 nt, Vaccinia virus
aauauguucucgucuaagagau

SEQ ID NO: 3277374 - RNA, 11 nt, Vaccinia virus
guuaauguuug

SEQ ID NO: 3277375 - RNA, 13 nt, Vaccinia virus
uuaaaaauuauua

SEQ ID NO: 3277376 - RNA, 15 nt, Vaccinia virus
uaauacuaucuggau

SEQ ID NO: 3277377 - RNA, 23 nt, Vaccinia virus
ugagacgggucaaacaauuuuaa

SEQ ID NO: 3277378 - RNA, 17 nt, Vaccinia virus
uuugucaacuuuguaaa

SEQ ID NO: 3277379 - RNA, 15 nt, Vaccinia virus
ucauuauauaguguu

SEQ ID NO: 3277380 - RNA, 17 nt, Vaccinia virus
aucccuauauucaacau

SEQ ID NO: 3277381 - RNA, 20 nt, Vaccinia virus
ucaugguuauacaggcauua

SEQ ID NO: 3277382 - RNA, 21 nt, Vaccinia virus
caaucggauuaauaucucuau

SEQ ID NO: 3277383 - RNA, 21 nt, Vaccinia virus
uuuuaucuauauuguauucua

SEQ ID NO: 3277384 - RNA, 16 nt, Vaccinia virus
acacugguaacuauau

SEQ ID NO: 3277385 - RNA, 13 nt, Vaccinia virus
guaaaauaaucuc

SEQ ID NO: 3277386 - RNA, 16 nt, Vaccinia virus
auauacguguuuaaaa

SEQ ID NO: 3277387 - RNA, 11 nt, Vaccinia virus
uuauucuaaug

SEQ ID NO: 3277388 - RNA, 13 nt, Vaccinia virus
uccuuucuaaaau

SEQ ID NO: 3277389 - RNA, 13 nt, Vaccinia virus
aucuuaauaagca

SEQ ID NO: 3277390 - RNA, 15 nt, Vaccinia virus
ggugaauccaucucu

SEQ ID NO: 3277391 - RNA, 14 nt, Vaccinia virus
uaacacacaugucu

SEQ ID NO: 3277392 - RNA, 15 nt, Vaccinia virus
ucauugauugagaag

SEQ ID NO: 3277393 - RNA, 20 nt, Vaccinia virus
cauauuugaacuuaacuuca

SEQ ID NO: 3277394 - RNA, 21 nt, Vaccinia virus
agaacuguuuuagaagucaag

SEQ ID NO: 3277395 - RNA, 14 nt, Vaccinia virus
augcgauucaaaaa

SEQ ID NO: 3277396 - RNA, 23 nt, Vaccinia virus
aaguaucuacgauuuuuacaaaa

SEQ ID NO: 3277397 - RNA, 22 nt, Vaccinia virus
uuuguagucuuucaacauccuu

SEQ ID NO: 3277398 - RNA, 18 nt, Vaccinia virus
cuucauucguaaaucuuu

SEQ ID NO: 3277399 - RNA, 13 nt, Vaccinia virus
guagugguuauau

SEQ ID NO: 3277400 - RNA, 22 nt, Vaccinia virus
aagauuuuuagcguauuauccu

SEQ ID NO: 3277401 - RNA, 20 nt, Vaccinia virus
uuuaauccgaauuucaaaau

SEQ ID NO: 3277402 - RNA, 15 nt, Vaccinia virus
ucauguguagaugcu

SEQ ID NO: 3277403 - RNA, 12 nt, Vaccinia virus
auuuuuuaucua

SEQ ID NO: 3277404 - RNA, 13 nt, Vaccinia virus
uuagaucauuaac

SEQ ID NO: 3277405 - RNA, 13 nt, Vaccinia virus
auuuuacaaaaaa

SEQ ID NO: 3277406 - RNA, 21 nt, Vaccinia virus
uaaccuuuuccuuaucuucau

SEQ ID NO: 3277407 - RNA, 21 nt, Vaccinia virus
uuaugacgcaguaacauauau

SEQ ID NO: 3277408 - RNA, 13 nt, Vaccinia virus
aauuugauaaaga

SEQ ID NO: 3277409 - RNA, 17 nt, Vaccinia virus
ucagcauccacucauau

SEQ ID NO: 3277410 - RNA, 14 nt, Vaccinia virus
ggaagaguaggaag

SEQ ID NO: 3277411 - RNA, 18 nt, Vaccinia virus
cuuucuguauccagguag

SEQ ID NO: 3277412 - RNA, 22 nt, Vaccinia virus
ugaugaugcagaauuuuggaua

SEQ ID NO: 3277413 - RNA, 15 nt, Vaccinia virus
aauaauuaugaugau

SEQ ID NO: 3277414 - RNA, 22 nt, Vaccinia virus
guacaaugauaaugauacagua

SEQ ID NO: 3277415 - RNA, 18 nt, Vaccinia virus
acuucagaugauggugca

SEQ ID NO: 3277416 - RNA, 16 nt, Vaccinia virus
uugacuaaaucuuaau

SEQ ID NO: 3277417 - RNA, 14 nt, Vaccinia virus
uuuaguuuaucaaa

SEQ ID NO: 3277418 - RNA, 14 nt, Vaccinia virus
cauaaacacagaau

SEQ ID NO: 3277419 - RNA, 15 nt, Vaccinia virus
aaaaugcuaauauua

SEQ ID NO: 3277420 - RNA, 20 nt, Vaccinia virus
ucagguuaucaucauccauu

SEQ ID NO: 3277421 - RNA, 19 nt, Vaccinia virus
ucucguauccacaaauagu

SEQ ID NO: 3277422 - RNA, 23 nt, Vaccinia virus
uacguauaacuuucuucugcaaa

SEQ ID NO: 3277423 - RNA, 17 nt, Vaccinia virus
aaaauagcgcugaaaau

SEQ ID NO: 3277424 - RNA, 13 nt, Vaccinia virus
uaccauuauuaau

SEQ ID NO: 3277425 - RNA, 21 nt, Vaccinia virus
uacguucggagacaauaaagc

SEQ ID NO: 3277426 - RNA, 20 nt, Vaccinia virus
uaauaauuugguauauacau

SEQ ID NO: 3277427 - RNA, 18 nt, Vaccinia virus
acaaugcuaauauauucu

SEQ ID NO: 3277428 - RNA, 22 nt, Vaccinia virus
aacacuauuccaucuguggaaa

SEQ ID NO: 3277429 - RNA, 13 nt, Vaccinia virus
caauauaucaucu

SEQ ID NO: 3277430 - RNA, 18 nt, Vaccinia virus
uccggagacgucaucugu

SEQ ID NO: 3277431 - RNA, 16 nt, Vaccinia virus
agaauaagaucaagau

SEQ ID NO: 3277432 - RNA, 11 nt, Vaccinia virus
uuaaaacauuc

SEQ ID NO: 3277433 - RNA, 14 nt, Vaccinia virus
uucuauuucgaauu

SEQ ID NO: 3277434 - RNA, 23 nt, Vaccinia virus
aucguguuguguuggugaauauu

SEQ ID NO: 3277435 - RNA, 22 nt, Vaccinia virus
auggauucauccuguugucuaa

SEQ ID NO: 3277436 - RNA, 15 nt, Vaccinia virus
caauuucauaaugag

SEQ ID NO: 3277437 - RNA, 23 nt, Vaccinia virus
cuucagauaaucugaaaaugaaa

SEQ ID NO: 3277438 - RNA, 15 nt, Vaccinia virus
aucauccaaguggau

SEQ ID NO: 3277439 - RNA, 14 nt, Vaccinia virus
ucuuaaauuucaua

SEQ ID NO: 3277440 - RNA, 23 nt, Vaccinia virus
gacauccaugguggaauaaacua

SEQ ID NO: 3277441 - RNA, 20 nt, Vaccinia virus
guauucaguagccaauccua

SEQ ID NO: 3277442 - RNA, 18 nt, Vaccinia virus
caaaaagggauauauauu

SEQ ID NO: 3277443 - RNA, 15 nt, Vaccinia virus
auauguagcaaacau

SEQ ID NO: 3277444 - RNA, 23 nt, Vaccinia virus
auccaugguuuuaaguaaaugau

SEQ ID NO: 3277445 - RNA, 16 nt, Vaccinia virus
ucauguuuauuucuag

SEQ ID NO: 3277446 - RNA, 12 nt, Vaccinia virus
guuccauauuau

SEQ ID NO: 3277447 - RNA, 13 nt, Vaccinia virus
uuaucaaaucuag

SEQ ID NO: 3277448 - RNA, 13 nt, Vaccinia virus
guaaagacaauga

SEQ ID NO: 3277449 - RNA, 19 nt, Vaccinia virus
uaguuuccuuaacaaaucu

SEQ ID NO: 3277450 - RNA, 12 nt, Vaccinia virus
auuacuuuacaa

SEQ ID NO: 3277451 - RNA, 17 nt, Vaccinia virus
aauacggacuucauaau

SEQ ID NO: 3277452 - RNA, 14 nt, Vaccinia virus
uuuguauugcacau

SEQ ID NO: 3277453 - RNA, 16 nt, Vaccinia virus
agaauauaaauuauau

SEQ ID NO: 3277454 - RNA, 15 nt, Vaccinia virus
aucauaaggaacuaa

SEQ ID NO: 3277455 - RNA, 17 nt, Vaccinia virus
uagaauaaauauccuug

SEQ ID NO: 3277456 - RNA, 23 nt, Vaccinia virus
acauauagaugcagaaguaauga

SEQ ID NO: 3277457 - RNA, 21 nt, Vaccinia virus
caaauggauguuaauguauua

SEQ ID NO: 3277458 - RNA, 19 nt, Vaccinia virus
accucuggcacuuauuuca

SEQ ID NO: 3277459 - RNA, 21 nt, Vaccinia virus
acauuuuauaaauauauaaug

SEQ ID NO: 3277460 - RNA, 13 nt, Vaccinia virus
aaagaauuuggaa

SEQ ID NO: 3277461 - RNA, 16 nt, Vaccinia virus
auguguuuuagaauau

SEQ ID NO: 3277462 - RNA, 13 nt, Vaccinia virus
agaauuaaaagag

SEQ ID NO: 3277463 - RNA, 15 nt, Vaccinia virus
gaagacacauuauuu

SEQ ID NO: 3277464 - RNA, 22 nt, Vaccinia virus
augauguguuauuuuuuaacug

SEQ ID NO: 3277465 - RNA, 14 nt, Vaccinia virus
auauuuuaguuuug

SEQ ID NO: 3277466 - RNA, 14 nt, Vaccinia virus
guuucguaauaucu

SEQ ID NO: 3277467 - RNA, 22 nt, Vaccinia virus
acguagucgaacguuaguucca

SEQ ID NO: 3277468 - RNA, 14 nt, Vaccinia virus
ucucaauugucugu

SEQ ID NO: 3277469 - RNA, 18 nt, Vaccinia virus
uggaacaaaacaaugacg

SEQ ID NO: 3277470 - RNA, 14 nt, Vaccinia virus
uuuucaguuaucua

SEQ ID NO: 3277471 - RNA, 18 nt, Vaccinia virus
aucgauuuucaaauccau

SEQ ID NO: 3277472 - RNA, 15 nt, Vaccinia virus
aucuuugucaaauau

SEQ ID NO: 3277473 - RNA, 18 nt, Vaccinia virus
auaacauuuuuuguaaau

SEQ ID NO: 3277474 - RNA, 14 nt, Vaccinia virus
agagacaaugaaaa

SEQ ID NO: 3277475 - RNA, 15 nt, Vaccinia virus
gauguaguaguauau

SEQ ID NO: 3277476 - RNA, 14 nt, Vaccinia virus
gacucgucuacuau

SEQ ID NO: 3277477 - RNA, 20 nt, Vaccinia virus
aaugcaauuaaaaaucgaua

SEQ ID NO: 3277478 - RNA, 14 nt, Vaccinia virus
uaaggaguugaaau

SEQ ID NO: 3277479 - RNA, 17 nt, Vaccinia virus
aucacacuuaaaauaaa

SEQ ID NO: 3277480 - RNA, 17 nt, Vaccinia virus
uacauuguauaaaaagc

SEQ ID NO: 3277481 - RNA, 18 nt, Vaccinia virus
aguaaaugaaaaaaaacu

SEQ ID NO: 3277482 - RNA, 20 nt, Vaccinia virus
gacgauauauaguaaugaag

SEQ ID NO: 3277483 - RNA, 16 nt, Vaccinia virus
cucguauacucugccc

SEQ ID NO: 3277484 - RNA, 16 nt, Vaccinia virus
uauaauuauauguaga

SEQ ID NO: 3277485 - RNA, 17 nt, Vaccinia virus
uaguguaucgacaucuu

SEQ ID NO: 3277486 - RNA, 22 nt, Vaccinia virus
auuuguauuuuuuaaucuaucu

SEQ ID NO: 3277487 - RNA, 13 nt, Vaccinia virus
guguuuaauaacu

SEQ ID NO: 3277488 - RNA, 22 nt, Vaccinia virus
guuauuacuacugaagaacuac

SEQ ID NO: 3277489 - RNA, 14 nt, Vaccinia virus
uagauauuaaacaa

SEQ ID NO: 3277490 - RNA, 21 nt, Vaccinia virus
aucauauuccggcguaugaau

SEQ ID NO: 3277491 - RNA, 21 nt, Vaccinia virus
uguaaauguaacauauuuaga

SEQ ID NO: 3277492 - RNA, 15 nt, Vaccinia virus
augugagaaguuugc

SEQ ID NO: 3277493 - RNA, 23 nt, Vaccinia virus
auauuauugggugguaaacuaga

SEQ ID NO: 3277494 - RNA, 16 nt, Vaccinia virus
ugagacgauguaucca

SEQ ID NO: 3277495 - RNA, 16 nt, Vaccinia virus
aacuaucaauauuaac

SEQ ID NO: 3277496 - RNA, 15 nt, Vaccinia virus
auaauugcuuuucua

SEQ ID NO: 3277497 - RNA, 14 nt, Vaccinia virus
uuucaccaauaaga

SEQ ID NO: 3277498 - RNA, 20 nt, Vaccinia virus
cauaacguccagaauguuua

SEQ ID NO: 3277499 - RNA, 16 nt, Vaccinia virus
ucaucaaacaacugaa

SEQ ID NO: 3277500 - RNA, 21 nt, Vaccinia virus
uuaaccaauacuauucauaau

SEQ ID NO: 3277501 - RNA, 14 nt, Vaccinia virus
gagagauagaagaa

SEQ ID NO: 3277502 - RNA, 22 nt, Vaccinia virus
uaguacguauaacuuucuucug

SEQ ID NO: 3277503 - RNA, 22 nt, Vaccinia virus
uuauaaagaccgaauacauaac

SEQ ID NO: 3277504 - RNA, 15 nt, Vaccinia virus
augauaaaaacauuu

SEQ ID NO: 3277505 - RNA, 13 nt, Vaccinia virus
uauccauuauucu

SEQ ID NO: 3277506 - RNA, 17 nt, Vaccinia virus
uauaaacguauacugua

SEQ ID NO: 3277507 - RNA, 19 nt, Vaccinia virus
ucgacaucuggauuucaga

SEQ ID NO: 3277508 - RNA, 18 nt, Vaccinia virus
ucuauguugacauguaua

SEQ ID NO: 3277509 - RNA, 24 nt, Vaccinia virus
aaagauuaaaucauuaaaugauug

SEQ ID NO: 3277510 - RNA, 16 nt, Vaccinia virus
uacaacauuccaaaga

SEQ ID NO: 3277511 - RNA, 23 nt, Vaccinia virus
uuaaaaacaaacuuuuuauccuu

SEQ ID NO: 3277512 - RNA, 15 nt, Vaccinia virus
uauaauuuuuggaca

SEQ ID NO: 3277513 - RNA, 16 nt, Vaccinia virus
ugauauaucuaguguu

SEQ ID NO: 3277514 - RNA, 19 nt, Vaccinia virus
uuaagaggacuauuagaag

SEQ ID NO: 3277515 - RNA, 15 nt, Vaccinia virus
ugaagaaaguaauua

SEQ ID NO: 3277516 - RNA, 22 nt, Vaccinia virus
aguauuuauacuuuuaggaaau

SEQ ID NO: 3277517 - RNA, 23 nt, Vaccinia virus
auagucagaauuuucauggaugu

SEQ ID NO: 3277518 - RNA, 13 nt, Vaccinia virus
aauaaauaauaac

SEQ ID NO: 3277519 - RNA, 21 nt, Vaccinia virus
uaaacaauugggguuuccagg

SEQ ID NO: 3277520 - RNA, 14 nt, Vaccinia virus
guacucuuaagaga

SEQ ID NO: 3277521 - RNA, 16 nt, Vaccinia virus
agaagauaucauaaau

SEQ ID NO: 3277522 - RNA, 23 nt, Vaccinia virus
auuccaggaucuagauaauuaau

SEQ ID NO: 3277523 - RNA, 20 nt, Vaccinia virus
acacuguuaucuaaugaaug

SEQ ID NO: 3277524 - RNA, 17 nt, Vaccinia virus
uuaaugaacaaauccuu

SEQ ID NO: 3277525 - RNA, 21 nt, Vaccinia virus
ucaaauccauaaauaaaguau

SEQ ID NO: 3277526 - RNA, 22 nt, Vaccinia virus
aucuccacacagucaaauccgu

SEQ ID NO: 3277527 - RNA, 21 nt, Vaccinia virus
uaacauuuuuuguaaauguaa

SEQ ID NO: 3277528 - RNA, 17 nt, Vaccinia virus
uauuauaaaaaaguuuu

SEQ ID NO: 3277529 - RNA, 15 nt, Vaccinia virus
augcuucagaauuag

SEQ ID NO: 3277530 - RNA, 16 nt, Vaccinia virus
cuaagcgguaaauaau

SEQ ID NO: 3277531 - RNA, 13 nt, Vaccinia virus
cuucugauuuuaa

SEQ ID NO: 3277532 - RNA, 20 nt, Vaccinia virus
gauauuuucguguuuuaguu

SEQ ID NO: 3277533 - RNA, 12 nt, Vaccinia virus
aauaauguuauu

SEQ ID NO: 3277534 - RNA, 21 nt, Vaccinia virus
uggauuauaaauauugauguu

SEQ ID NO: 3277535 - RNA, 20 nt, Vaccinia virus
cuccaugauuaaauauuuua

SEQ ID NO: 3277536 - RNA, 16 nt, Vaccinia virus
gaaaaccgauaacgau

SEQ ID NO: 3277537 - RNA, 19 nt, Vaccinia virus
aaaauuuauaacauugucc

SEQ ID NO: 3277538 - RNA, 15 nt, Vaccinia virus
aagauuuauauaucu

SEQ ID NO: 3277539 - RNA, 20 nt, Vaccinia virus
aaaauuuaaagaauguauaa

SEQ ID NO: 3277540 - RNA, 20 nt, Vaccinia virus
gcucgcaucaaucuagcauu

SEQ ID NO: 3277541 - RNA, 22 nt, Vaccinia virus
auuacucauguaaccuacuaga

SEQ ID NO: 3277542 - RNA, 14 nt, Vaccinia virus
aaucaaacaaaaaa

SEQ ID NO: 3277543 - RNA, 21 nt, Vaccinia virus
uuaucucuauagauaaugacg

SEQ ID NO: 3277544 - RNA, 23 nt, Vaccinia virus
aaaucaguaacuauguucauuuu

SEQ ID NO: 3277545 - RNA, 22 nt, Vaccinia virus
agaauuagucaaucuuauucaa

SEQ ID NO: 3277546 - RNA, 20 nt, Vaccinia virus
cgaagaauuaaaucuaacga

SEQ ID NO: 3277547 - RNA, 16 nt, Vaccinia virus
augugauucucugaaa

SEQ ID NO: 3277548 - RNA, 15 nt, Vaccinia virus
acuugacaaaaauug

SEQ ID NO: 3277549 - RNA, 18 nt, Vaccinia virus
acucaggaagauauuuua

SEQ ID NO: 3277550 - RNA, 18 nt, Vaccinia virus
auucuaauauuaugaaug

SEQ ID NO: 3277551 - RNA, 17 nt, Vaccinia virus
acaaucagauauaucua

SEQ ID NO: 3277552 - RNA, 22 nt, Vaccinia virus
acuccaaugacugaauacauua

SEQ ID NO: 3277553 - RNA, 21 nt, Vaccinia virus
uaacaagaucgauagacacug

SEQ ID NO: 3277554 - RNA, 19 nt, Vaccinia virus
auaaaucuuuaucaagcac

SEQ ID NO: 3277555 - RNA, 18 nt, Vaccinia virus
caaaucuucuuauaagau

SEQ ID NO: 3277556 - RNA, 14 nt, Vaccinia virus
gauacauuuugcau

SEQ ID NO: 3277557 - RNA, 20 nt, Vaccinia virus
auugcaauugguaagaugac

SEQ ID NO: 3277558 - RNA, 17 nt, Vaccinia virus
ugaaucuaaacuagugg

SEQ ID NO: 3277559 - RNA, 23 nt, Vaccinia virus
aggacuauuguuacaaaaguuaa

SEQ ID NO: 3277560 - RNA, 17 nt, Vaccinia virus
aucaaacaggagacuau

SEQ ID NO: 3277561 - RNA, 16 nt, Vaccinia virus
uccauguccaauauga

SEQ ID NO: 3277562 - RNA, 23 nt, Vaccinia virus
uaguugauagaacaaaauacaua

SEQ ID NO: 3277563 - RNA, 19 nt, Vaccinia virus
uguaugcguugauauuaca

SEQ ID NO: 3277564 - RNA, 15 nt, Vaccinia virus
uucauucguaaaucu

SEQ ID NO: 3277565 - RNA, 17 nt, Vaccinia virus
acuagacugauuucucu

SEQ ID NO: 3277566 - RNA, 21 nt, Vaccinia virus
auaaugguucaggauauagau

SEQ ID NO: 3277567 - RNA, 15 nt, Vaccinia virus
cucaacgcgauaucu

SEQ ID NO: 3277568 - RNA, 19 nt, Vaccinia virus
acuuguuggugaaauggua

SEQ ID NO: 3277569 - RNA, 21 nt, Vaccinia virus
auguucuucgcagaugaugau

SEQ ID NO: 3277570 - RNA, 14 nt, Vaccinia virus
aguagaaaauauau

SEQ ID NO: 3277571 - RNA, 22 nt, Vaccinia virus
uauaaauaaaagacaaaucuug

SEQ ID NO: 3277572 - RNA, 20 nt, Vaccinia virus
aguaaacauaucauaauauu

SEQ ID NO: 3277573 - RNA, 21 nt, Vaccinia virus
uauacuugucaucauuucuaa

SEQ ID NO: 3277574 - RNA, 21 nt, Vaccinia virus
aaauccuuguuugauaaaugu

SEQ ID NO: 3277575 - RNA, 14 nt, Vaccinia virus
gcugaguauuucau

SEQ ID NO: 3277576 - RNA, 23 nt, Vaccinia virus
uguuagauauagaagauaaacau

SEQ ID NO: 3277577 - RNA, 15 nt, Vaccinia virus
gaaguuauagaaugu

SEQ ID NO: 3277578 - RNA, 15 nt, Vaccinia virus
auuggaacauaagau

SEQ ID NO: 3277579 - RNA, 13 nt, Vaccinia virus
aagaucaaccaaa

SEQ ID NO: 3277580 - RNA, 23 nt, Vaccinia virus
ucuaugauauuguugauaauaca

SEQ ID NO: 3277581 - RNA, 14 nt, Vaccinia virus
aucucuauuaaaug

SEQ ID NO: 3277582 - RNA, 20 nt, Vaccinia virus
auaugcaccuagagaauugc

SEQ ID NO: 3277583 - RNA, 15 nt, Vaccinia virus
gcguaguauuacuuc

SEQ ID NO: 3277584 - RNA, 17 nt, Vaccinia virus
auguagcaaacaugaua

SEQ ID NO: 3277585 - RNA, 24 nt, Vaccinia virus
aguuguuguccguuaucuaacaug

SEQ ID NO: 3277586 - RNA, 16 nt, Vaccinia virus
guuuuuuuacuuucua

SEQ ID NO: 3277587 - RNA, 19 nt, Vaccinia virus
uaaaauaguuuauaacauu

SEQ ID NO: 3277588 - RNA, 14 nt, Vaccinia virus
uauauuaauacuuu

SEQ ID NO: 3277589 - RNA, 12 nt, Vaccinia virus
gaaauaauacaa

SEQ ID NO: 3277590 - RNA, 12 nt, Vaccinia virus
gaauuaauacau

SEQ ID NO: 3277591 - RNA, 13 nt, Vaccinia virus
aaacuagauacaa

SEQ ID NO: 3277592 - RNA, 20 nt, Vaccinia virus
acuuucgguucuuuaaaaga

SEQ ID NO: 3277593 - RNA, 16 nt, Vaccinia virus
ucgauaccuagaagau

SEQ ID NO: 3277594 - RNA, 19 nt, Vaccinia virus
acagaaaagauauuuguua

SEQ ID NO: 3277595 - RNA, 15 nt, Vaccinia virus
auccauucuaaugau

SEQ ID NO: 3277596 - RNA, 15 nt, Vaccinia virus
agcaauaguauaauu

SEQ ID NO: 3277597 - RNA, 16 nt, Vaccinia virus
aaugccucagaauauc

SEQ ID NO: 3277598 - RNA, 17 nt, Vaccinia virus
ucgauguaaaauuuuug

SEQ ID NO: 3277599 - RNA, 20 nt, Vaccinia virus
aauuaauucuuuauugucau

SEQ ID NO: 3277600 - RNA, 19 nt, Vaccinia virus
ucugccugaaauccaaaua

SEQ ID NO: 3277601 - RNA, 16 nt, Vaccinia virus
uauaaagauugugcaa

SEQ ID NO: 3277602 - RNA, 22 nt, Vaccinia virus
uaauauagggcugacgucguau

SEQ ID NO: 3277603 - RNA, 17 nt, Vaccinia virus
gaaugaaauauauacau

SEQ ID NO: 3277604 - RNA, 20 nt, Vaccinia virus
gauauauggacgauaauaau

SEQ ID NO: 3277605 - RNA, 23 nt, Vaccinia virus
uuuacaucgacgagauuauuauu

SEQ ID NO: 3277606 - RNA, 16 nt, Vaccinia virus
uggauacuaauuguag

SEQ ID NO: 3277607 - RNA, 17 nt, Vaccinia virus
gaauauuaaacaauuau

SEQ ID NO: 3277608 - RNA, 24 nt, Vaccinia virus
uaacaucaucaaaagacuuaugau

SEQ ID NO: 3277609 - RNA, 15 nt, Vaccinia virus
uuauugauauguaua

SEQ ID NO: 3277610 - RNA, 17 nt, Vaccinia virus
auacgcugauaaauaua

SEQ ID NO: 3277611 - RNA, 16 nt, Vaccinia virus
cuuuugcuauuaccaa

SEQ ID NO: 3277612 - RNA, 13 nt, Vaccinia virus
cacuaauugacua

SEQ ID NO: 3277613 - RNA, 20 nt, Vaccinia virus
aagacgguaacuaaauguuc

SEQ ID NO: 3277614 - RNA, 18 nt, Vaccinia virus
uccauuagccuuuccacu

SEQ ID NO: 3277615 - RNA, 22 nt, Vaccinia virus
ugcucggcaguaaucaacaaua

SEQ ID NO: 3277616 - RNA, 21 nt, Vaccinia virus
uccaugcagcauuuccuacau

SEQ ID NO: 3277617 - RNA, 12 nt, Vaccinia virus
agauaauacaaa

SEQ ID NO: 3277618 - RNA, 19 nt, Vaccinia virus
uauuacaagaguacguuau

SEQ ID NO: 3277619 - RNA, 19 nt, Vaccinia virus
uaacucucuggaugcuaug

SEQ ID NO: 3277620 - RNA, 17 nt, Vaccinia virus
cuuauacaggucauuac

SEQ ID NO: 3277621 - RNA, 21 nt, Vaccinia virus
uaacgauaucuugcaaaauag

SEQ ID NO: 3277622 - RNA, 13 nt, Vaccinia virus
aauuuuuuaaaaa

SEQ ID NO: 3277623 - RNA, 14 nt, Vaccinia virus
acuucgcaauaauu

SEQ ID NO: 3277624 - RNA, 23 nt, Vaccinia virus
uuagugaaacauuccacaucguu

SEQ ID NO: 3277625 - RNA, 15 nt, Vaccinia virus
aucuaacguauucua

SEQ ID NO: 3277626 - RNA, 16 nt, Vaccinia virus
uugugaaugacaucau

SEQ ID NO: 3277627 - RNA, 18 nt, Vaccinia virus
uccuagauauguaaaaua

SEQ ID NO: 3277628 - RNA, 16 nt, Vaccinia virus
uagaagccaauaucug

SEQ ID NO: 3277629 - RNA, 20 nt, Vaccinia virus
uaaguucauuaucugaaaua

SEQ ID NO: 3277630 - RNA, 19 nt, Vaccinia virus
caauaaaaauaaacuagag

SEQ ID NO: 3277631 - RNA, 18 nt, Vaccinia virus
auuuauccguaaaaaugu

SEQ ID NO: 3277632 - RNA, 17 nt, Vaccinia virus
gacgcguucauuggaaa

SEQ ID NO: 3277633 - RNA, 14 nt, Vaccinia virus
agauacuguauaua

SEQ ID NO: 3277634 - RNA, 19 nt, Vaccinia virus
uuaaaacuugauaauuaau

SEQ ID NO: 3277635 - RNA, 23 nt, Vaccinia virus
aguauacgaguaaauaacuauag

SEQ ID NO: 3277636 - RNA, 19 nt, Vaccinia virus
uccuauauuuuuuuauucu

SEQ ID NO: 3277637 - RNA, 22 nt, Vaccinia virus
auaagguacuuuuucucauaau

SEQ ID NO: 3277638 - RNA, 16 nt, Vaccinia virus
acguggauauguguuu

SEQ ID NO: 3277639 - RNA, 22 nt, Vaccinia virus
aucacagcuaucuugaagccau

SEQ ID NO: 3277640 - RNA, 21 nt, Vaccinia virus
ccaagucauaucuagaaugaa

SEQ ID NO: 3277641 - RNA, 21 nt, Vaccinia virus
uuccaccguauccauaaacaa

SEQ ID NO: 3277642 - RNA, 21 nt, Vaccinia virus
auaucugaugagaucaauaga

SEQ ID NO: 3277643 - RNA, 23 nt, Vaccinia virus
uaacccauuauaaaacuuaugau

SEQ ID NO: 3277644 - RNA, 22 nt, Vaccinia virus
acaacaccuaugauaaaggaga

SEQ ID NO: 3277645 - RNA, 19 nt, Vaccinia virus
aaguauacauguuagagaa

SEQ ID NO: 3277646 - RNA, 16 nt, Vaccinia virus
uuuaaugacuacuaua

SEQ ID NO: 3277647 - RNA, 16 nt, Vaccinia virus
uauuauccaauacaga

SEQ ID NO: 3277648 - RNA, 22 nt, Vaccinia virus
auccaagaguuccgagauaauu

SEQ ID NO: 3277649 - RNA, 17 nt, Vaccinia virus
aauuguaaaaacauaca

SEQ ID NO: 3277650 - RNA, 13 nt, Vaccinia virus
aagauuguagaau

SEQ ID NO: 3277651 - RNA, 15 nt, Vaccinia virus
aguuuuauaacgaag

SEQ ID NO: 3277652 - RNA, 22 nt, Vaccinia virus
cauuaacgauaucuugcaaaau

SEQ ID NO: 3277653 - RNA, 16 nt, Vaccinia virus
aguauuucuuacucaa

SEQ ID NO: 3277654 - RNA, 21 nt, Vaccinia virus
uuccaauuccguagguaaacg

SEQ ID NO: 3277655 - RNA, 17 nt, Vaccinia virus
ggagguggauauuucug

SEQ ID NO: 3277656 - RNA, 15 nt, Vaccinia virus
uuuuuuacguaguaa

SEQ ID NO: 3277657 - RNA, 20 nt, Vaccinia virus
ucgcauaaacauuacuaaaa

SEQ ID NO: 3277658 - RNA, 19 nt, Vaccinia virus
caaaaaacgacgauuggaa

SEQ ID NO: 3277659 - RNA, 11 nt, Vaccinia virus
agaaaauggau

SEQ ID NO: 3277660 - RNA, 18 nt, Vaccinia virus
gaaauacuaaaaaaugua

SEQ ID NO: 3277661 - RNA, 17 nt, Vaccinia virus
uuauuagagauuucagc

SEQ ID NO: 3277662 - RNA, 20 nt, Vaccinia virus
acaucaaaaagcuguuguau

SEQ ID NO: 3277663 - RNA, 18 nt, Vaccinia virus
uguuacaaaaguuaauaa

SEQ ID NO: 3277664 - RNA, 19 nt, Vaccinia virus
ugguguauuaaauuccagu

SEQ ID NO: 3277665 - RNA, 12 nt, Vaccinia virus
cugaaaauuaaa

SEQ ID NO: 3277666 - RNA, 19 nt, Vaccinia virus
gcuauaauaauaaauguau

SEQ ID NO: 3277667 - RNA, 17 nt, Vaccinia virus
uauuacguggagaaauc

SEQ ID NO: 3277668 - RNA, 12 nt, Vaccinia virus
ugcuaauuauuu

SEQ ID NO: 3277669 - RNA, 18 nt, Vaccinia virus
aaugucgaauaacuguaa

SEQ ID NO: 3277670 - RNA, 16 nt, Vaccinia virus
ccaacucuuuaauaaa

SEQ ID NO: 3277671 - RNA, 22 nt, Vaccinia virus
guauucuauacccaucauguaa

SEQ ID NO: 3277672 - RNA, 19 nt, Vaccinia virus
auaauuuuugaugcuguug

SEQ ID NO: 3277673 - RNA, 13 nt, Vaccinia virus
auucuaugaugaa

SEQ ID NO: 3277674 - RNA, 15 nt, Vaccinia virus
uaaagauauaaauga

SEQ ID NO: 3277675 - RNA, 17 nt, Vaccinia virus
acugcaauaaaacauuu

SEQ ID NO: 3277676 - RNA, 13 nt, Vaccinia virus
gaacagaugauau

SEQ ID NO: 3277677 - RNA, 20 nt, Vaccinia virus
auucaagcgaauuacucugu

SEQ ID NO: 3277678 - RNA, 20 nt, Vaccinia virus
uacaauaaacuccguagaga

SEQ ID NO: 3277679 - RNA, 20 nt, Vaccinia virus
ggcggaguaaguguugagcu

SEQ ID NO: 3277680 - RNA, 12 nt, Vaccinia virus
uuauauauguaa

SEQ ID NO: 3277681 - RNA, 21 nt, Vaccinia virus
uaacagagaggccaucuggaa

SEQ ID NO: 3277682 - RNA, 23 nt, Vaccinia virus
uaaaauaucuagcaaaaauucua

SEQ ID NO: 3277683 - RNA, 18 nt, Vaccinia virus
uucuauauagcuauucuu

SEQ ID NO: 3277684 - RNA, 13 nt, Vaccinia virus
aggauaaaguaaa

SEQ ID NO: 3277685 - RNA, 18 nt, Vaccinia virus
uaaauuuuaaacauaaag

SEQ ID NO: 3277686 - RNA, 21 nt, Vaccinia virus
uaacuagcuuaaacagaugag

SEQ ID NO: 3277687 - RNA, 14 nt, Vaccinia virus
acaaacgugggaag

SEQ ID NO: 3277688 - RNA, 22 nt, Vaccinia virus
aucgcaucaaauaaaauuauug

SEQ ID NO: 3277689 - RNA, 17 nt, Vaccinia virus
uaaaaucacugaacauu

SEQ ID NO: 3277690 - RNA, 21 nt, Vaccinia virus
uugaagaauuuauauaaauca

SEQ ID NO: 3277691 - RNA, 15 nt, Vaccinia virus
auacuagaacuauag

SEQ ID NO: 3277692 - RNA, 22 nt, Vaccinia virus
ugggaucaugcauucaaaugga

SEQ ID NO: 3277693 - RNA, 17 nt, Vaccinia virus
guaucuagccauaucua

SEQ ID NO: 3277694 - RNA, 18 nt, Vaccinia virus
aauccuuaaguucauaau

SEQ ID NO: 3277695 - RNA, 15 nt, Vaccinia virus
uauggagcaaacauu

SEQ ID NO: 3277696 - RNA, 18 nt, Vaccinia virus
uagacgaggaaacaaugc

SEQ ID NO: 3277697 - RNA, 21 nt, Vaccinia virus
uaucuucgauauaaaaucauu

SEQ ID NO: 3277698 - RNA, 20 nt, Vaccinia virus
ugaauuucgagauuaaaugc

SEQ ID NO: 3277699 - RNA, 22 nt, Vaccinia virus
guacuaaauucgauaucuuuuu

SEQ ID NO: 3277700 - RNA, 23 nt, Vaccinia virus
cacugggguaaaguaaguauuua

SEQ ID NO: 3277701 - RNA, 17 nt, Vaccinia virus
uauucuuaaauuucaua

SEQ ID NO: 3277702 - RNA, 18 nt, Vaccinia virus
ugaauugcgauuauaaga

SEQ ID NO: 3277703 - RNA, 14 nt, Vaccinia virus
uuguugcucccaug

SEQ ID NO: 3277704 - RNA, 19 nt, Vaccinia virus
uucuaucaucauaaucagu

SEQ ID NO: 3277705 - RNA, 20 nt, Vaccinia virus
uacuaucuggaucuacacau

SEQ ID NO: 3277706 - RNA, 15 nt, Vaccinia virus
auggauauauuaaag

SEQ ID NO: 3277707 - RNA, 13 nt, Vaccinia virus
ugugauauugaua

SEQ ID NO: 3277708 - RNA, 20 nt, Vaccinia virus
uuguacauuaauaaaugaaa

SEQ ID NO: 3277709 - RNA, 17 nt, Vaccinia virus
ucguaaaaagauucuug

SEQ ID NO: 3277710 - RNA, 16 nt, Vaccinia virus
gacaaguauaaugaca

SEQ ID NO: 3277711 - RNA, 15 nt, Vaccinia virus
aucuuugauauacua

SEQ ID NO: 3277712 - RNA, 23 nt, Vaccinia virus
uaaacuguuuguauaauaucucu

SEQ ID NO: 3277713 - RNA, 20 nt, Vaccinia virus
aaaaauugaauugaugauau

SEQ ID NO: 3277714 - RNA, 23 nt, Vaccinia virus
accaauauuggaauuauaauaua

SEQ ID NO: 3277715 - RNA, 12 nt, Vaccinia virus
augucuguuuga

SEQ ID NO: 3277716 - RNA, 19 nt, Vaccinia virus
acuagcauccccuuucaau

SEQ ID NO: 3277717 - RNA, 12 nt, Vaccinia virus
ugacauggaaau

SEQ ID NO: 3277718 - RNA, 23 nt, Vaccinia virus
aucaucuguaggaaauggaagau

SEQ ID NO: 3277719 - RNA, 15 nt, Vaccinia virus
uaaaucaacgucauc

SEQ ID NO: 3277720 - RNA, 13 nt, Vaccinia virus
aauaggaauaauu

SEQ ID NO: 3277721 - RNA, 20 nt, Vaccinia virus
aacaaaugcgccaaaguuau

SEQ ID NO: 3277722 - RNA, 22 nt, Vaccinia virus
uucucucauaaauacagagaug

SEQ ID NO: 3277723 - RNA, 15 nt, Vaccinia virus
aaauguugucauuau

SEQ ID NO: 3277724 - RNA, 24 nt, Vaccinia virus
uaucugaguaugaugauuuacaaa

SEQ ID NO: 3277725 - RNA, 15 nt, Vaccinia virus
augucaaaaaaagau

SEQ ID NO: 3277726 - RNA, 18 nt, Vaccinia virus
uguagcucucccagauuu

SEQ ID NO: 3277727 - RNA, 21 nt, Vaccinia virus
agauaugaauuugauaagacu

SEQ ID NO: 3277728 - RNA, 14 nt, Vaccinia virus
uuaauaauacuauu

SEQ ID NO: 3277729 - RNA, 22 nt, Vaccinia virus
aucuauuucaucguuuuguaua

SEQ ID NO: 3277730 - RNA, 16 nt, Vaccinia virus
guuuggauuaauaauu

SEQ ID NO: 3277731 - RNA, 13 nt, Vaccinia virus
cgauuagauggac

SEQ ID NO: 3277732 - RNA, 23 nt, Vaccinia virus
aauuuguauguuugggagaauua

SEQ ID NO: 3277733 - RNA, 20 nt, Vaccinia virus
uuacuaguuuuccaguguuc

SEQ ID NO: 3277734 - RNA, 16 nt, Vaccinia virus
uaugaucauuuugaua

SEQ ID NO: 3277735 - RNA, 18 nt, Vaccinia virus
gauaaaacaaguuuucau

SEQ ID NO: 3277736 - RNA, 16 nt, Vaccinia virus
caauauauguaaucau

SEQ ID NO: 3277737 - RNA, 22 nt, Vaccinia virus
auaggugcguuguauacacaua

SEQ ID NO: 3277738 - RNA, 23 nt, Vaccinia virus
uggaugcuauguuuauagauguu

SEQ ID NO: 3277739 - RNA, 23 nt, Vaccinia virus
aauuuauagaugcuggaagacaa

SEQ ID NO: 3277740 - RNA, 12 nt, Vaccinia virus
aggaaugagagu

SEQ ID NO: 3277741 - RNA, 18 nt, Vaccinia virus
cuucaucuaccaaagaaa

SEQ ID NO: 3277742 - RNA, 14 nt, Vaccinia virus
auuagacauaugau

SEQ ID NO: 3277743 - RNA, 19 nt, Vaccinia virus
acgaaguauuuauacuuuu

SEQ ID NO: 3277744 - RNA, 21 nt, Vaccinia virus
uaugauccacaaaacguauau

SEQ ID NO: 3277745 - RNA, 21 nt, Vaccinia virus
auacaaaugacuacguuguua

SEQ ID NO: 3277746 - RNA, 21 nt, Vaccinia virus
uuguuacccaugaucuauaaa

SEQ ID NO: 3277747 - RNA, 16 nt, Vaccinia virus
auacaauuaucauuuu

SEQ ID NO: 3277748 - RNA, 18 nt, Vaccinia virus
gauguaaauauauuuaca

SEQ ID NO: 3277749 - RNA, 15 nt, Vaccinia virus
acccaguuaguuuua

SEQ ID NO: 3277750 - RNA, 17 nt, Vaccinia virus
uaaauguuuaaacauca

SEQ ID NO: 3277751 - RNA, 13 nt, Vaccinia virus
auagaucauaucu

SEQ ID NO: 3277752 - RNA, 19 nt, Vaccinia virus
acguuucugucaacaaugu

SEQ ID NO: 3277753 - RNA, 17 nt, Vaccinia virus
uuuuguuugggaaacac

SEQ ID NO: 3277754 - RNA, 21 nt, Vaccinia virus
cuucuuuaaacgauuuuccaa

SEQ ID NO: 3277755 - RNA, 20 nt, Vaccinia virus
uaaaauuauugauauguaua

SEQ ID NO: 3277756 - RNA, 16 nt, Vaccinia virus
uuuaguccuauuucaa

SEQ ID NO: 3277757 - RNA, 16 nt, Vaccinia virus
aauaguacauuuucca

SEQ ID NO: 3277758 - RNA, 15 nt, Vaccinia virus
acgcugauaaauaua

SEQ ID NO: 3277759 - RNA, 20 nt, Vaccinia virus
aacuaguagaagguacgacu

SEQ ID NO: 3277760 - RNA, 18 nt, Vaccinia virus
ucuagccauaucuaaagc

SEQ ID NO: 3277761 - RNA, 13 nt, Vaccinia virus
uaguuaaauauua

SEQ ID NO: 3277762 - RNA, 11 nt, Vaccinia virus
ccaaacaaaau

SEQ ID NO: 3277763 - RNA, 19 nt, Vaccinia virus
gcaauaacuaaaaauguaa

SEQ ID NO: 3277764 - RNA, 19 nt, Vaccinia virus
uauauagguaauacauaua

SEQ ID NO: 3277765 - RNA, 17 nt, Vaccinia virus
aaaacauauauaauaaa

SEQ ID NO: 3277766 - RNA, 19 nt, Vaccinia virus
aaucagauagacuguuguu

SEQ ID NO: 3277767 - RNA, 14 nt, Vaccinia virus
aauaauuuacaaaa

SEQ ID NO: 3277768 - RNA, 15 nt, Vaccinia virus
uuguccuauauauca

SEQ ID NO: 3277769 - RNA, 17 nt, Vaccinia virus
gauuuaucauauuucuc

SEQ ID NO: 3277770 - RNA, 14 nt, Vaccinia virus
uuuuacucuauaaa

SEQ ID NO: 3277771 - RNA, 15 nt, Vaccinia virus
agauacuuuaauaca

SEQ ID NO: 3277772 - RNA, 18 nt, Vaccinia virus
uagcaaaggaaauugugc

SEQ ID NO: 3277773 - RNA, 19 nt, Vaccinia virus
ucugcguguaaaaaguugu

SEQ ID NO: 3277774 - RNA, 18 nt, Vaccinia virus
auacaauggaauacuuca

SEQ ID NO: 3277775 - RNA, 23 nt, Vaccinia virus
gucuaugucucuuauuagagauu

SEQ ID NO: 3277776 - RNA, 15 nt, Vaccinia virus
cuauauuaacaucua

SEQ ID NO: 3277777 - RNA, 13 nt, Vaccinia virus
cguaccagcauuu

SEQ ID NO: 3277778 - RNA, 13 nt, Vaccinia virus
auauccaaaauuu

SEQ ID NO: 3277779 - RNA, 21 nt, Vaccinia virus
cucagucaauauauuaagaag

SEQ ID NO: 3277780 - RNA, 21 nt, Vaccinia virus
agaugagcauaaacauaauaa

SEQ ID NO: 3277781 - RNA, 20 nt, Vaccinia virus
acuagauacaaaauuugcau

SEQ ID NO: 3277782 - RNA, 18 nt, Vaccinia virus
uaguuucaucauccauga

SEQ ID NO: 3277783 - RNA, 17 nt, Vaccinia virus
ugccauaucauacauga

SEQ ID NO: 3277784 - RNA, 14 nt, Vaccinia virus
aaucaaagaauugg

SEQ ID NO: 3277785 - RNA, 22 nt, Vaccinia virus
auguuguaauauuucacaugau

SEQ ID NO: 3277786 - RNA, 14 nt, Vaccinia virus
uacggaaagaacca

SEQ ID NO: 3277787 - RNA, 23 nt, Vaccinia virus
uacauacagguacgaaauacgua

SEQ ID NO: 3277788 - RNA, 14 nt, Vaccinia virus
uaccacuagcaaaa

SEQ ID NO: 3277789 - RNA, 19 nt, Vaccinia virus
ggaacauuaaauguauuuu

SEQ ID NO: 3277790 - RNA, 14 nt, Vaccinia virus
cauacuauuguuua

SEQ ID NO: 3277791 - RNA, 19 nt, Vaccinia virus
ccuaacgaugauauguuuu

SEQ ID NO: 3277792 - RNA, 18 nt, Vaccinia virus
aauauaaaagaauaugua

SEQ ID NO: 3277793 - RNA, 22 nt, Vaccinia virus
acgaggaaacaaugcgcuacau

SEQ ID NO: 3277794 - RNA, 17 nt, Vaccinia virus
acgcugaaguaauuaau

SEQ ID NO: 3277795 - RNA, 18 nt, Vaccinia virus
uaaucagaaaacuuauaa

SEQ ID NO: 3277796 - RNA, 15 nt, Vaccinia virus
uaucaaacacauaua

SEQ ID NO: 3277797 - RNA, 12 nt, Vaccinia virus
acaaaaugugau

SEQ ID NO: 3277798 - RNA, 22 nt, Vaccinia virus
uacgauauuauuacacauaaac

SEQ ID NO: 3277799 - RNA, 19 nt, Vaccinia virus
ccugccauaaauaaaugcu

SEQ ID NO: 3277800 - RNA, 20 nt, Vaccinia virus
ugauuaguauaacuagauuu

SEQ ID NO: 3277801 - RNA, 22 nt, Vaccinia virus
agagcuacuaacguauaauucu

SEQ ID NO: 3277802 - RNA, 18 nt, Vaccinia virus
ucaaaaaaagauuauucg

SEQ ID NO: 3277803 - RNA, 23 nt, Vaccinia virus
uuaaacguaguuaugauaaauga

SEQ ID NO: 3277804 - RNA, 17 nt, Vaccinia virus
agcuaucaagucuuuau

SEQ ID NO: 3277805 - RNA, 14 nt, Vaccinia virus
acucuaaaucgcuu

SEQ ID NO: 3277806 - RNA, 13 nt, Vaccinia virus
uguagauaucuuu

SEQ ID NO: 3277807 - RNA, 17 nt, Vaccinia virus
aauagugccaucagaau

SEQ ID NO: 3277808 - RNA, 19 nt, Vaccinia virus
aucaacggagauauaaaug

SEQ ID NO: 3277809 - RNA, 18 nt, Vaccinia virus
aauauagaaauaaugaua

SEQ ID NO: 3277810 - RNA, 24 nt, Vaccinia virus
auaaaccucuggcacuuauuucau

SEQ ID NO: 3277811 - RNA, 17 nt, Vaccinia virus
gaaaaugcgauguugau

SEQ ID NO: 3277812 - RNA, 16 nt, Vaccinia virus
cacuauguuagcauuu

SEQ ID NO: 3277813 - RNA, 17 nt, Vaccinia virus
uaaaauaaaaauccauu

SEQ ID NO: 3277814 - RNA, 19 nt, Vaccinia virus
auuauaucacaacaucuau

SEQ ID NO: 3277815 - RNA, 17 nt, Vaccinia virus
auuaguugaugugacug

SEQ ID NO: 3277816 - RNA, 21 nt, Vaccinia virus
auaauguuauuacuuguggua

SEQ ID NO: 3277817 - RNA, 12 nt, Vaccinia virus
uuucuacauaau

SEQ ID NO: 3277818 - RNA, 15 nt, Vaccinia virus
cuuuaacguauaaau

SEQ ID NO: 3277819 - RNA, 17 nt, Vaccinia virus
caagaguaacuauugac

SEQ ID NO: 3277820 - RNA, 17 nt, Vaccinia virus
augcauuuuuauauaca

SEQ ID NO: 3277821 - RNA, 16 nt, Vaccinia virus
ucaucaacuagacguu

SEQ ID NO: 3277822 - RNA, 16 nt, Vaccinia virus
auuuacaccaauagug

SEQ ID NO: 3277823 - RNA, 23 nt, Vaccinia virus
augauucucucaacaucuucaau

SEQ ID NO: 3277824 - RNA, 19 nt, Vaccinia virus
auguauuuccuagcacauc

SEQ ID NO: 3277825 - RNA, 15 nt, Vaccinia virus
auuuuuuuucaucuc

SEQ ID NO: 3277826 - RNA, 13 nt, Vaccinia virus
aacauguuccauu

SEQ ID NO: 3277827 - RNA, 19 nt, Vaccinia virus
aaucauauaaaaaaugauu

SEQ ID NO: 3277828 - RNA, 19 nt, Vaccinia virus
uaauaaauugguaaauccu

SEQ ID NO: 3277829 - RNA, 16 nt, Vaccinia virus
uagaauuucauuuugu

SEQ ID NO: 3277830 - RNA, 19 nt, Vaccinia virus
uguaucauccaguuuucca

SEQ ID NO: 3277831 - RNA, 14 nt, Vaccinia virus
auauugcuacauaa

SEQ ID NO: 3277832 - RNA, 23 nt, Vaccinia virus
acaucggugagugauaugccuau

SEQ ID NO: 3277833 - RNA, 23 nt, Vaccinia virus
aauaugaguuggaguugauucau

SEQ ID NO: 3277834 - RNA, 22 nt, Vaccinia virus
aauaguauuugagaaauaugua

SEQ ID NO: 3277835 - RNA, 13 nt, Vaccinia virus
acuaaauacauua

SEQ ID NO: 3277836 - RNA, 22 nt, Vaccinia virus
caauuauacguuuuuauauaau

SEQ ID NO: 3277837 - RNA, 18 nt, Vaccinia virus
acuuuccaacuuaucauu

SEQ ID NO: 3277838 - RNA, 14 nt, Vaccinia virus
auauguuccaguaa

SEQ ID NO: 3277839 - RNA, 18 nt, Vaccinia virus
gucgauaaaaauuaaaaa

SEQ ID NO: 3277840 - RNA, 20 nt, Vaccinia virus
uaauacagcaucuaacuuga

SEQ ID NO: 3277841 - RNA, 11 nt, Vaccinia virus
uguuuaagaua

SEQ ID NO: 3277842 - RNA, 14 nt, Vaccinia virus
uuuacuggaauuag

SEQ ID NO: 3277843 - RNA, 16 nt, Vaccinia virus
ucauauaggaaacuau

SEQ ID NO: 3277844 - RNA, 13 nt, Vaccinia virus
agaaaucauauau

SEQ ID NO: 3277845 - RNA, 16 nt, Vaccinia virus
uacaucuguuuccuau

SEQ ID NO: 3277846 - RNA, 16 nt, Vaccinia virus
aaaaaguuuucccaua

SEQ ID NO: 3277847 - RNA, 21 nt, Vaccinia virus
cuaauguauagauuguuuuca

SEQ ID NO: 3277848 - RNA, 15 nt, Vaccinia virus
aacgacgcauuaucu

SEQ ID NO: 3277849 - RNA, 22 nt, Vaccinia virus
uauguaaaacaaacuuguaauu

SEQ ID NO: 3277850 - RNA, 18 nt, Vaccinia virus
uucaucgcuuucuagaau

SEQ ID NO: 3277851 - RNA, 20 nt, Vaccinia virus
uguaaucgguguccaccugg

SEQ ID NO: 3277852 - RNA, 16 nt, Vaccinia virus
uguuauuacuacugaa

SEQ ID NO: 3277853 - RNA, 17 nt, Vaccinia virus
uagaagauaucauaaau

SEQ ID NO: 3277854 - RNA, 16 nt, Vaccinia virus
acuaugucaaaaauug

SEQ ID NO: 3277855 - RNA, 17 nt, Vaccinia virus
caauuaguuuauuggua

SEQ ID NO: 3277856 - RNA, 19 nt, Vaccinia virus
uaguucucuuuuguagaac

SEQ ID NO: 3277857 - RNA, 18 nt, Vaccinia virus
ucaaaaauauucauuaau

SEQ ID NO: 3277858 - RNA, 19 nt, Vaccinia virus
auuuaccgaacaggcauuu

SEQ ID NO: 3277859 - RNA, 18 nt, Vaccinia virus
aguaugacuuacuuguau

SEQ ID NO: 3277860 - RNA, 20 nt, Vaccinia virus
auuaccggucauauuaauaa

SEQ ID NO: 3277861 - RNA, 16 nt, Vaccinia virus
ucauuucacaauucau

SEQ ID NO: 3277862 - RNA, 15 nt, Vaccinia virus
uuacuagauuaaaaa

SEQ ID NO: 3277863 - RNA, 16 nt, Vaccinia virus
gccagagauaauuucu

SEQ ID NO: 3277864 - RNA, 15 nt, Vaccinia virus
auuuuacuuuaauaa

SEQ ID NO: 3277865 - RNA, 16 nt, Vaccinia virus
gauaauuaauaauaua

SEQ ID NO: 3277866 - RNA, 15 nt, Vaccinia virus
aaaaucgauaaacug

SEQ ID NO: 3277867 - RNA, 14 nt, Vaccinia virus
uugaaccaaacauu

SEQ ID NO: 3277868 - RNA, 19 nt, Vaccinia virus
ugucuguaucauauucaac

SEQ ID NO: 3277869 - RNA, 21 nt, Vaccinia virus
aauccaaaguucauucucaga

SEQ ID NO: 3277870 - RNA, 21 nt, Vaccinia virus
agaucuacuggcgaaauggua

SEQ ID NO: 3277871 - RNA, 15 nt, Vaccinia virus
acaaugaaaauggau

SEQ ID NO: 3277872 - RNA, 16 nt, Vaccinia virus
acauauuuuaaugaac

SEQ ID NO: 3277873 - RNA, 15 nt, Vaccinia virus
aacauaaucaaggau

SEQ ID NO: 3277874 - RNA, 16 nt, Vaccinia virus
uacugcuauacagaug

SEQ ID NO: 3277875 - RNA, 22 nt, Vaccinia virus
gcaauaacaaagauucuuccuc

SEQ ID NO: 3277876 - RNA, 14 nt, Vaccinia virus
uaucuacuagauag

SEQ ID NO: 3277877 - RNA, 18 nt, Vaccinia virus
acguuguacguuaaagca

SEQ ID NO: 3277878 - RNA, 17 nt, Vaccinia virus
auuaauaucuauuaaac

SEQ ID NO: 3277879 - RNA, 14 nt, Vaccinia virus
uaucaauagcaguu

SEQ ID NO: 3277880 - RNA, 15 nt, Vaccinia virus
uuucgaauacuuauu

SEQ ID NO: 3277881 - RNA, 23 nt, Vaccinia virus
acguuucauuuuuugucuauaau

SEQ ID NO: 3277882 - RNA, 23 nt, Vaccinia virus
cuacaaugaacuaagagaaaucu

SEQ ID NO: 3277883 - RNA, 21 nt, Vaccinia virus
auaaucaccauacuagaguuu

SEQ ID NO: 3277884 - RNA, 18 nt, Vaccinia virus
gaacuggaccguauaucu

SEQ ID NO: 3277885 - RNA, 13 nt, Vaccinia virus
gaaacugauacaa

SEQ ID NO: 3277886 - RNA, 19 nt, Vaccinia virus
acaaugaaccguaauauau

SEQ ID NO: 3277887 - RNA, 15 nt, Vaccinia virus
agccggacaaauaua

SEQ ID NO: 3277888 - RNA, 22 nt, Vaccinia virus
aacagaauaaacaaaauaaugu

SEQ ID NO: 3277889 - RNA, 23 nt, Vaccinia virus
aauagaaugcucuuaaauaaugu

SEQ ID NO: 3277890 - RNA, 19 nt, Vaccinia virus
uuauguaguaaagaugcua

SEQ ID NO: 3277891 - RNA, 22 nt, Vaccinia virus
cagaaauugguauaaauguugu

SEQ ID NO: 3277892 - RNA, 20 nt, Vaccinia virus
gaaacuaugucaaaaauugu

SEQ ID NO: 3277893 - RNA, 17 nt, Vaccinia virus
ucuuucuaauacuauau

SEQ ID NO: 3277894 - RNA, 17 nt, Vaccinia virus
aaugccuuuacagugga

SEQ ID NO: 3277895 - RNA, 14 nt, Vaccinia virus
uucuauucuagaaa

SEQ ID NO: 3277896 - RNA, 14 nt, Vaccinia virus
uaucaaaacauaua

SEQ ID NO: 3277897 - RNA, 12 nt, Vaccinia virus
uguaguaguaua

SEQ ID NO: 3277898 - RNA, 17 nt, Vaccinia virus
gaguagggauucaucau

SEQ ID NO: 3277899 - RNA, 16 nt, Vaccinia virus
agcuaucaaaauaugu

SEQ ID NO: 3277900 - RNA, 17 nt, Vaccinia virus
acuaaaaauaaacauug

SEQ ID NO: 3277901 - RNA, 13 nt, Vaccinia virus
ucauauagauauu

SEQ ID NO: 3277902 - RNA, 16 nt, Vaccinia virus
ugauacaccuguaauc

SEQ ID NO: 3277903 - RNA, 21 nt, Vaccinia virus
aucucuuuuucucaaauccau

SEQ ID NO: 3277904 - RNA, 20 nt, Vaccinia virus
acuuauggacaacagaggau

SEQ ID NO: 3277905 - RNA, 21 nt, Vaccinia virus
ugaagauggauucauccuuaa

SEQ ID NO: 3277906 - RNA, 15 nt, Vaccinia virus
uaguaucuaaacauu

SEQ ID NO: 3277907 - RNA, 22 nt, Vaccinia virus
acuugaaauaaucggagaaugu

SEQ ID NO: 3277908 - RNA, 15 nt, Vaccinia virus
aaauuagaucaaaga

SEQ ID NO: 3277909 - RNA, 23 nt, Vaccinia virus
acuagaguaguauauugucacau

SEQ ID NO: 3277910 - RNA, 18 nt, Vaccinia virus
aauaaauagauauaaaau

SEQ ID NO: 3277911 - RNA, 19 nt, Vaccinia virus
auaaauucaaccaugaauu

SEQ ID NO: 3277912 - RNA, 17 nt, Vaccinia virus
auccaaucuaagaaauu

SEQ ID NO: 3277913 - RNA, 15 nt, Vaccinia virus
cauuacuacuguaaa

SEQ ID NO: 3277914 - RNA, 12 nt, Vaccinia virus
cuucagaauaau

SEQ ID NO: 3277915 - RNA, 22 nt, Vaccinia virus
gaacucuaaucaaaaucuuaau

SEQ ID NO: 3277916 - RNA, 23 nt, Vaccinia virus
auaaaaagacuuuuauaauucau

SEQ ID NO: 3277917 - RNA, 19 nt, Vaccinia virus
gaugucaaaggaugaaaga

SEQ ID NO: 3277918 - RNA, 18 nt, Vaccinia virus
caauuauacuagaacuau

SEQ ID NO: 3277919 - RNA, 16 nt, Vaccinia virus
gaaucggauaguuuaa

SEQ ID NO: 3277920 - RNA, 22 nt, Vaccinia virus
uuucauuccaggaucuagauaa

SEQ ID NO: 3277921 - RNA, 20 nt, Vaccinia virus
gaaagaaucaaaagaaugau

SEQ ID NO: 3277922 - RNA, 22 nt, Vaccinia virus
aacgauuuuccaaaucaguaac

SEQ ID NO: 3277923 - RNA, 18 nt, Vaccinia virus
caagagugcauugacuuu

SEQ ID NO: 3277924 - RNA, 13 nt, Vaccinia virus
guaguaacucuaa

SEQ ID NO: 3277925 - RNA, 21 nt, Vaccinia virus
aggauaucucaaaaaauaaua

SEQ ID NO: 3277926 - RNA, 22 nt, Vaccinia virus
accaguucauucaagauaagca

SEQ ID NO: 3277927 - RNA, 22 nt, Vaccinia virus
ucauucaaauccauaaauaaag

SEQ ID NO: 3277928 - RNA, 22 nt, Vaccinia virus
auacuagaguuguuaaaguuaa

SEQ ID NO: 3277929 - RNA, 18 nt, Vaccinia virus
uaaagaugacgaugaaaa

SEQ ID NO: 3277930 - RNA, 19 nt, Vaccinia virus
gaaauagcucguuucuauu

SEQ ID NO: 3277931 - RNA, 22 nt, Vaccinia virus
ucuuaauagacacaucugccau

SEQ ID NO: 3277932 - RNA, 21 nt, Vaccinia virus
agacuaggugcuauggauggg

SEQ ID NO: 3277933 - RNA, 18 nt, Vaccinia virus
uacuaaugacaauaauua

SEQ ID NO: 3277934 - RNA, 14 nt, Vaccinia virus
agaaauuaauagaa

SEQ ID NO: 3277935 - RNA, 21 nt, Vaccinia virus
ucagcaucugguacaauaaau

SEQ ID NO: 3277936 - RNA, 22 nt, Vaccinia virus
gaauagucucuguaaucacugc

SEQ ID NO: 3277937 - RNA, 12 nt, Vaccinia virus
gaaucuauuuua

SEQ ID NO: 3277938 - RNA, 16 nt, Vaccinia virus
aucggaugauauuaau

SEQ ID NO: 3277939 - RNA, 21 nt, Vaccinia virus
uuucagcguggauuucucaua

SEQ ID NO: 3277940 - RNA, 14 nt, Vaccinia virus
auaaaauggauaac

SEQ ID NO: 3277941 - RNA, 14 nt, Vaccinia virus
ucaauaauucuauu

SEQ ID NO: 3277942 - RNA, 18 nt, Vaccinia virus
auaauuguacuuuguaau

SEQ ID NO: 3277943 - RNA, 18 nt, Vaccinia virus
gccaaaaugauagauauu

SEQ ID NO: 3277944 - RNA, 14 nt, Vaccinia virus
auagaaauauauau

SEQ ID NO: 3277945 - RNA, 17 nt, Vaccinia virus
ugacuagacugauuucu

SEQ ID NO: 3277946 - RNA, 18 nt, Vaccinia virus
ucugauccguauccauga

SEQ ID NO: 3277947 - RNA, 13 nt, Vaccinia virus
agaucaaggaaau

SEQ ID NO: 3277948 - RNA, 20 nt, Vaccinia virus
ucgacuauuuuaaauagcau

SEQ ID NO: 3277949 - RNA, 20 nt, Vaccinia virus
uuuaucgaccaagacacaua

SEQ ID NO: 3277950 - RNA, 14 nt, Vaccinia virus
cggcacauauuaau

SEQ ID NO: 3277951 - RNA, 23 nt, Vaccinia virus
auuuuuauuaaugauacaaaaac

SEQ ID NO: 3277952 - RNA, 16 nt, Vaccinia virus
uaaauuccuuaauauu

SEQ ID NO: 3277953 - RNA, 15 nt, Vaccinia virus
caaucaaacaaaaaa

SEQ ID NO: 3277954 - RNA, 17 nt, Vaccinia virus
aauuucaauauugaaaa

SEQ ID NO: 3277955 - RNA, 21 nt, Vaccinia virus
uauauaggccgaaucuaugau

SEQ ID NO: 3277956 - RNA, 16 nt, Vaccinia virus
uaaaaacucauuacau

SEQ ID NO: 3277957 - RNA, 20 nt, Vaccinia virus
aacacuauacucauauuaau

SEQ ID NO: 3277958 - RNA, 17 nt, Vaccinia virus
acaauuuauucagagag

SEQ ID NO: 3277959 - RNA, 15 nt, Vaccinia virus
auaaguauuaucaaa

SEQ ID NO: 3277960 - RNA, 16 nt, Vaccinia virus
caauacggccauccag

SEQ ID NO: 3277961 - RNA, 15 nt, Vaccinia virus
acaaaaucaaauaau

SEQ ID NO: 3277962 - RNA, 18 nt, Vaccinia virus
agaaucuauuuuaaugag

SEQ ID NO: 3277963 - RNA, 16 nt, Vaccinia virus
uaacgaggaagaaauu

SEQ ID NO: 3277964 - RNA, 17 nt, Vaccinia virus
cauuaucuauaucaucu

SEQ ID NO: 3277965 - RNA, 20 nt, Vaccinia virus
aucaauaauuguuuugaauu

SEQ ID NO: 3277966 - RNA, 17 nt, Vaccinia virus
agucuacugcuagaaaa

SEQ ID NO: 3277967 - RNA, 18 nt, Vaccinia virus
ugugauauugauaucuuu

SEQ ID NO: 3277968 - RNA, 16 nt, Vaccinia virus
aaguaugaugucuaug

SEQ ID NO: 3277969 - RNA, 19 nt, Vaccinia virus
cuggaauuaguuagauaua

SEQ ID NO: 3277970 - RNA, 23 nt, Vaccinia virus
uuuggagaaaugagaaacuguuu

SEQ ID NO: 3277971 - RNA, 19 nt, Vaccinia virus
uauccauaucucuagauac

SEQ ID NO: 3277972 - RNA, 21 nt, Vaccinia virus
auaauucuacacggcaugguu

SEQ ID NO: 3277973 - RNA, 16 nt, Vaccinia virus
auuuggucauaauaga

SEQ ID NO: 3277974 - RNA, 22 nt, Vaccinia virus
gagcauacaguaagcauagaua

SEQ ID NO: 3277975 - RNA, 19 nt, Vaccinia virus
gaagauucccaaauaauca

SEQ ID NO: 3277976 - RNA, 16 nt, Vaccinia virus
uacagaaacaaugauu

SEQ ID NO: 3277977 - RNA, 15 nt, Vaccinia virus
uauauuaauacacau

SEQ ID NO: 3277978 - RNA, 13 nt, Vaccinia virus
uuucaucgaugau

SEQ ID NO: 3277979 - RNA, 18 nt, Vaccinia virus
guaauaacagugcuauca

SEQ ID NO: 3277980 - RNA, 15 nt, Vaccinia virus
uugaaccauguaugc

SEQ ID NO: 3277981 - RNA, 18 nt, Vaccinia virus
aaauaggaucaucuauca

SEQ ID NO: 3277982 - RNA, 17 nt, Vaccinia virus
guauuaucagauaucca

SEQ ID NO: 3277983 - RNA, 14 nt, Vaccinia virus
acuccuugacuauc

SEQ ID NO: 3277984 - RNA, 16 nt, Vaccinia virus
cuucgcuuuauauacc

SEQ ID NO: 3277985 - RNA, 21 nt, Vaccinia virus
aaaucauaauaugagauguuu

SEQ ID NO: 3277986 - RNA, 13 nt, Vaccinia virus
aggucgcaaaaaa

SEQ ID NO: 3277987 - RNA, 13 nt, Vaccinia virus
gcgaguguuacaa

SEQ ID NO: 3277988 - RNA, 14 nt, Vaccinia virus
aaugcaaauuacuu

SEQ ID NO: 3277989 - RNA, 12 nt, Vaccinia virus
acgcaaugguuu

SEQ ID NO: 3277990 - RNA, 15 nt, Vaccinia virus
uauuauauaaacauu

SEQ ID NO: 3277991 - RNA, 19 nt, Vaccinia virus
aguccuaguuguauacuga

SEQ ID NO: 3277992 - RNA, 14 nt, Vaccinia virus
aacggaugaaaaua

SEQ ID NO: 3277993 - RNA, 12 nt, Vaccinia virus
acacuaauuaaa

SEQ ID NO: 3277994 - RNA, 19 nt, Vaccinia virus
uagagaauuaauaucuauu

SEQ ID NO: 3277995 - RNA, 19 nt, Vaccinia virus
uggcaaacaauguauacaa

SEQ ID NO: 3277996 - RNA, 14 nt, Vaccinia virus
agaaucuguuauau

SEQ ID NO: 3277997 - RNA, 18 nt, Vaccinia virus
acauuuuggcaaauugau

SEQ ID NO: 3277998 - RNA, 17 nt, Vaccinia virus
cauagaaaguuaaaagu

SEQ ID NO: 3277999 - RNA, 17 nt, Vaccinia virus
auccucagucaucuugu

SEQ ID NO: 3278000 - RNA, 17 nt, Vaccinia virus
gcaaauacgauagucua

SEQ ID NO: 3278001 - RNA, 16 nt, Vaccinia virus
uaaucaaaaucuuaau

SEQ ID NO: 3278002 - RNA, 17 nt, Vaccinia virus
aauuuuaagaaauggug

SEQ ID NO: 3278003 - RNA, 22 nt, Vaccinia virus
uggaugaggaaugagagugaua

SEQ ID NO: 3278004 - RNA, 14 nt, Vaccinia virus
augauauuguugau

SEQ ID NO: 3278005 - RNA, 16 nt, Vaccinia virus
guccauuaucaguaau

SEQ ID NO: 3278006 - RNA, 22 nt, Vaccinia virus
aucguauuugugugauggauuu

SEQ ID NO: 3278007 - RNA, 13 nt, Vaccinia virus
uuaccauguauga

SEQ ID NO: 3278008 - RNA, 17 nt, Vaccinia virus
uaauucguauucuugga

SEQ ID NO: 3278009 - RNA, 19 nt, Vaccinia virus
caacauccuccagagaaga

SEQ ID NO: 3278010 - RNA, 20 nt, Vaccinia virus
cagcuaucgcuuacgcauuu

SEQ ID NO: 3278011 - RNA, 14 nt, Vaccinia virus
ugaggaaauugaua

SEQ ID NO: 3278012 - RNA, 20 nt, Vaccinia virus
auuuuauaccgaauaagaga

SEQ ID NO: 3278013 - RNA, 15 nt, Vaccinia virus
auuuaguuuaucuua

SEQ ID NO: 3278014 - RNA, 19 nt, Vaccinia virus
auaauacuggagaacuuau

SEQ ID NO: 3278015 - RNA, 23 nt, Vaccinia virus
auguauaauuugguaaugguuuc

SEQ ID NO: 3278016 - RNA, 15 nt, Vaccinia virus
aucauaucacauagu

SEQ ID NO: 3278017 - RNA, 13 nt, Vaccinia virus
aggaaaaaagaua

SEQ ID NO: 3278018 - RNA, 13 nt, Vaccinia virus
uaaugaacucauu

SEQ ID NO: 3278019 - RNA, 21 nt, Vaccinia virus
guuucuuagcuugugauuuuu

SEQ ID NO: 3278020 - RNA, 22 nt, Vaccinia virus
uuacuauguuguuuaugucuuu

SEQ ID NO: 3278021 - RNA, 15 nt, Vaccinia virus
aucuagucuuaaaug

SEQ ID NO: 3278022 - RNA, 23 nt, Vaccinia virus
uagugaaucgacuauagacauaa

SEQ ID NO: 3278023 - RNA, 18 nt, Vaccinia virus
gucagcggcaucuaaauu

SEQ ID NO: 3278024 - RNA, 21 nt, Vaccinia virus
aggauuaguuuccgaacuaau

SEQ ID NO: 3278025 - RNA, 19 nt, Vaccinia virus
ucuaguuaguuuguauaaa

SEQ ID NO: 3278026 - RNA, 12 nt, Vaccinia virus
acauagaaauaa

SEQ ID NO: 3278027 - RNA, 17 nt, Vaccinia virus
agacccaaaugucuguu

SEQ ID NO: 3278028 - RNA, 16 nt, Vaccinia virus
cgaugcuguagcaucu

SEQ ID NO: 3278029 - RNA, 16 nt, Vaccinia virus
cacucuucgaaaagaa

SEQ ID NO: 3278030 - RNA, 15 nt, Vaccinia virus
uacucuaaaucgcuu

SEQ ID NO: 3278031 - RNA, 20 nt, Vaccinia virus
agauaguaaauagauaguuu

SEQ ID NO: 3278032 - RNA, 15 nt, Vaccinia virus
guauuuauauaugca

SEQ ID NO: 3278033 - RNA, 17 nt, Vaccinia virus
uuucguauaauuuuuaa

SEQ ID NO: 3278034 - RNA, 18 nt, Vaccinia virus
acaaagauggucuaaaau

SEQ ID NO: 3278035 - RNA, 15 nt, Vaccinia virus
uaugucguuaucauc

SEQ ID NO: 3278036 - RNA, 22 nt, Vaccinia virus
gacuaaauuagauuaugaggau

SEQ ID NO: 3278037 - RNA, 21 nt, Vaccinia virus
uuuaccaugggaugcuaauau

SEQ ID NO: 3278038 - RNA, 22 nt, Vaccinia virus
cguuauacaucuuaguuguaaa

SEQ ID NO: 3278039 - RNA, 19 nt, Vaccinia virus
cuguguaaagaaaugguaa

SEQ ID NO: 3278040 - RNA, 18 nt, Vaccinia virus
accgacucauuauuuccc

SEQ ID NO: 3278041 - RNA, 16 nt, Vaccinia virus
uguaguaguaacuguu

SEQ ID NO: 3278042 - RNA, 23 nt, Vaccinia virus
aauucucuuacgccgauauuucu

SEQ ID NO: 3278043 - RNA, 14 nt, Vaccinia virus
auuacaacauaaua

SEQ ID NO: 3278044 - RNA, 15 nt, Vaccinia virus
guuccauuacaaaua

SEQ ID NO: 3278045 - RNA, 16 nt, Vaccinia virus
ucauugaugaaaauac

SEQ ID NO: 3278046 - RNA, 17 nt, Vaccinia virus
cuaaugugauucucuga

SEQ ID NO: 3278047 - RNA, 17 nt, Vaccinia virus
uuaauauaguuauuaau

SEQ ID NO: 3278048 - RNA, 20 nt, Vaccinia virus
augguacuuaugacaaaguu

SEQ ID NO: 3278049 - RNA, 12 nt, Vaccinia virus
acuaucuaaaug

SEQ ID NO: 3278050 - RNA, 22 nt, Vaccinia virus
uguuauacacggucuagagcau

SEQ ID NO: 3278051 - RNA, 13 nt, Vaccinia virus
aagaauauaacgu

SEQ ID NO: 3278052 - RNA, 19 nt, Vaccinia virus
aaauuugcaucuacaucau

SEQ ID NO: 3278053 - RNA, 20 nt, Vaccinia virus
uguaauauucuaguuuggua

SEQ ID NO: 3278054 - RNA, 20 nt, Vaccinia virus
uagcguguuuuaaauccuua

SEQ ID NO: 3278055 - RNA, 16 nt, Vaccinia virus
acaauuacaaaugagu

SEQ ID NO: 3278056 - RNA, 15 nt, Vaccinia virus
aagaaucauccaagu

SEQ ID NO: 3278057 - RNA, 22 nt, Vaccinia virus
uuaaguauuguuuuuucauuau

SEQ ID NO: 3278058 - RNA, 23 nt, Vaccinia virus
gaaaauaaaucacugacgauauu

SEQ ID NO: 3278059 - RNA, 16 nt, Vaccinia virus
guuaucugaugaaaga

SEQ ID NO: 3278060 - RNA, 17 nt, Vaccinia virus
uaaauccaucucagaau

SEQ ID NO: 3278061 - RNA, 18 nt, Vaccinia virus
agauuuccuagauuuacu

SEQ ID NO: 3278062 - RNA, 22 nt, Vaccinia virus
aaaaucgucuucacaaagaaug

SEQ ID NO: 3278063 - RNA, 22 nt, Vaccinia virus
guaaauauucuaaauuaaccaa

SEQ ID NO: 3278064 - RNA, 20 nt, Vaccinia virus
uaaacagcauuucugucaac

SEQ ID NO: 3278065 - RNA, 20 nt, Vaccinia virus
caagaaauauggauccucua

SEQ ID NO: 3278066 - RNA, 23 nt, Vaccinia virus
agauuuuccauccacaauuauug

SEQ ID NO: 3278067 - RNA, 19 nt, Vaccinia virus
auacauccgcauacagcca

SEQ ID NO: 3278068 - RNA, 17 nt, Vaccinia virus
acacauuaggauacaga

SEQ ID NO: 3278069 - RNA, 16 nt, Vaccinia virus
uacuuuuacgagaaau

SEQ ID NO: 3278070 - RNA, 19 nt, Vaccinia virus
aaucuaagaaauuuaaaau

SEQ ID NO: 3278071 - RNA, 13 nt, Vaccinia virus
ugacauauuacaa

SEQ ID NO: 3278072 - RNA, 16 nt, Vaccinia virus
acacuacugaaaaaag

SEQ ID NO: 3278073 - RNA, 21 nt, Vaccinia virus
auguuugauaaaaauauguau

SEQ ID NO: 3278074 - RNA, 21 nt, Vaccinia virus
uacaguuucuguaaugaugga

SEQ ID NO: 3278075 - RNA, 16 nt, Vaccinia virus
caaaaggggugagaau

SEQ ID NO: 3278076 - RNA, 23 nt, Vaccinia virus
auauccucacaacuuaaugaaga

SEQ ID NO: 3278077 - RNA, 13 nt, Vaccinia virus
auacgauaaacau

SEQ ID NO: 3278078 - RNA, 14 nt, Vaccinia virus
aauauauuaccaug

SEQ ID NO: 3278079 - RNA, 16 nt, Vaccinia virus
auacacuaaaauuaaa

SEQ ID NO: 3278080 - RNA, 14 nt, Vaccinia virus
uguguuacauaucu

SEQ ID NO: 3278081 - RNA, 22 nt, Vaccinia virus
guuuuaacgaauuauauagucu

SEQ ID NO: 3278082 - RNA, 18 nt, Vaccinia virus
auuauaauaguuuaucau

SEQ ID NO: 3278083 - RNA, 14 nt, Vaccinia virus
cagaguuuagauua

SEQ ID NO: 3278084 - RNA, 13 nt, Vaccinia virus
auaauaaugaaua

SEQ ID NO: 3278085 - RNA, 23 nt, Vaccinia virus
aggagauuuaguauuuagcagug

SEQ ID NO: 3278086 - RNA, 14 nt, Vaccinia virus
uaucauaaaugaaa

SEQ ID NO: 3278087 - RNA, 21 nt, Vaccinia virus
auaacagagccaucuguaaaa

SEQ ID NO: 3278088 - RNA, 19 nt, Vaccinia virus
aagucugauauucagaaag

SEQ ID NO: 3278089 - RNA, 18 nt, Vaccinia virus
gacagaaccuugugucau

SEQ ID NO: 3278090 - RNA, 17 nt, Vaccinia virus
ugcaaugaauaucuaca

SEQ ID NO: 3278091 - RNA, 20 nt, Vaccinia virus
acaacgaauacaaacgccau

SEQ ID NO: 3278092 - RNA, 14 nt, Vaccinia virus
aguuguaucaucua

SEQ ID NO: 3278093 - RNA, 16 nt, Vaccinia virus
uuaauuccauaucuuu

SEQ ID NO: 3278094 - RNA, 13 nt, Vaccinia virus
uuauaagauaucc

SEQ ID NO: 3278095 - RNA, 18 nt, Vaccinia virus
agaugauguuaacuaugu

SEQ ID NO: 3278096 - RNA, 12 nt, Vaccinia virus
agaaaaacagaa

SEQ ID NO: 3278097 - RNA, 17 nt, Vaccinia virus
ucucagguacagauuuu

SEQ ID NO: 3278098 - RNA, 22 nt, Vaccinia virus
ucacagacacugucucauacac

SEQ ID NO: 3278099 - RNA, 20 nt, Vaccinia virus
cauauauuaaaacuaccaau

SEQ ID NO: 3278100 - RNA, 19 nt, Vaccinia virus
aauggucgauuauagaaau

SEQ ID NO: 3278101 - RNA, 11 nt, Vaccinia virus
aggauggugaa

SEQ ID NO: 3278102 - RNA, 18 nt, Vaccinia virus
gaaggagacggauacugu

SEQ ID NO: 3278103 - RNA, 18 nt, Vaccinia virus
ccgacucauuauuuccca

SEQ ID NO: 3278104 - RNA, 13 nt, Vaccinia virus
uugguuucuaaau

SEQ ID NO: 3278105 - RNA, 17 nt, Vaccinia virus
uagauauagauguuaua

SEQ ID NO: 3278106 - RNA, 12 nt, Vaccinia virus
auaauuucuaga

SEQ ID NO: 3278107 - RNA, 19 nt, Vaccinia virus
auuuuaggacggaucaaug

SEQ ID NO: 3278108 - RNA, 21 nt, Vaccinia virus
uucuuggcaaaagaauaccaa

SEQ ID NO: 3278109 - RNA, 18 nt, Vaccinia virus
aacucuugcuacaaaaug

SEQ ID NO: 3278110 - RNA, 13 nt, Vaccinia virus
caacgauauucua

SEQ ID NO: 3278111 - RNA, 16 nt, Vaccinia virus
caagucccaaauggag

SEQ ID NO: 3278112 - RNA, 23 nt, Vaccinia virus
cccgucuguuuaauuuuuucuac

SEQ ID NO: 3278113 - RNA, 15 nt, Vaccinia virus
uccacuauacauucu

SEQ ID NO: 3278114 - RNA, 15 nt, Vaccinia virus
guugacuauaacaga

SEQ ID NO: 3278115 - RNA, 15 nt, Vaccinia virus
gaaggcauaucguga

SEQ ID NO: 3278116 - RNA, 15 nt, Vaccinia virus
auuaacagaaaaaac

SEQ ID NO: 3278117 - RNA, 21 nt, Vaccinia virus
gauuguauauuuuauuuuaua

SEQ ID NO: 3278118 - RNA, 16 nt, Vaccinia virus
uguucuacacauguau

SEQ ID NO: 3278119 - RNA, 21 nt, Vaccinia virus
cuacaauugucuaaugauauc

SEQ ID NO: 3278120 - RNA, 19 nt, Vaccinia virus
cuaagauuccauuaucuaa

SEQ ID NO: 3278121 - RNA, 18 nt, Vaccinia virus
acuuagaacagauuuaac

SEQ ID NO: 3278122 - RNA, 15 nt, Vaccinia virus
aagguuaacaucuua

SEQ ID NO: 3278123 - RNA, 21 nt, Vaccinia virus
cugaaauggugguaaaacuaa

SEQ ID NO: 3278124 - RNA, 23 nt, Vaccinia virus
agaaaguaugauacaauacuuac

SEQ ID NO: 3278125 - RNA, 14 nt, Vaccinia virus
uauccaagaaaaag

SEQ ID NO: 3278126 - RNA, 13 nt, Vaccinia virus
acaucucucauaa

SEQ ID NO: 3278127 - RNA, 16 nt, Vaccinia virus
gccuauccaauaaucc

SEQ ID NO: 3278128 - RNA, 19 nt, Vaccinia virus
auuuauacccgcuaugaag

SEQ ID NO: 3278129 - RNA, 18 nt, Vaccinia virus
uccuauucccaacaaugu

SEQ ID NO: 3278130 - RNA, 16 nt, Vaccinia virus
uucguaaaauauucuu

SEQ ID NO: 3278131 - RNA, 16 nt, Vaccinia virus
auuuucauuuaaauga

SEQ ID NO: 3278132 - RNA, 19 nt, Vaccinia virus
caucaaaugguacaaaaaa

SEQ ID NO: 3278133 - RNA, 19 nt, Vaccinia virus
uguuucgaaacuuuaucaa

SEQ ID NO: 3278134 - RNA, 21 nt, Vaccinia virus
ucgcauguucagcaauuuauu

SEQ ID NO: 3278135 - RNA, 17 nt, Vaccinia virus
aguuaaauauuaaaacu

SEQ ID NO: 3278136 - RNA, 15 nt, Vaccinia virus
ucuuccuucgauaga

SEQ ID NO: 3278137 - RNA, 14 nt, Vaccinia virus
ugugacaugauguc

SEQ ID NO: 3278138 - RNA, 14 nt, Vaccinia virus
ggauauguuuuuaa

SEQ ID NO: 3278139 - RNA, 20 nt, Vaccinia virus
ugucaaugaagaguauacag

SEQ ID NO: 3278140 - RNA, 22 nt, Vaccinia virus
aucacgauuuugucuuucagga

SEQ ID NO: 3278141 - RNA, 21 nt, Vaccinia virus
uuccacaauacgagucauuau

SEQ ID NO: 3278142 - RNA, 18 nt, Vaccinia virus
uuaaaaaggaaaauacua

SEQ ID NO: 3278143 - RNA, 12 nt, Vaccinia virus
aaccuucuuauu

SEQ ID NO: 3278144 - RNA, 15 nt, Vaccinia virus
uggacaaaucuggaa

SEQ ID NO: 3278145 - RNA, 13 nt, Vaccinia virus
cgaucauaucuau

SEQ ID NO: 3278146 - RNA, 13 nt, Vaccinia virus
uauauaacguuau

SEQ ID NO: 3278147 - RNA, 15 nt, Vaccinia virus
uuuauaacgaaguag

SEQ ID NO: 3278148 - RNA, 16 nt, Vaccinia virus
uccuucauucauuaga

SEQ ID NO: 3278149 - RNA, 20 nt, Vaccinia virus
cuuuauaagagcuacuaacg

SEQ ID NO: 3278150 - RNA, 19 nt, Vaccinia virus
cucagauuaaauccaucuc

SEQ ID NO: 3278151 - RNA, 17 nt, Vaccinia virus
uauaccggcauugguaa

SEQ ID NO: 3278152 - RNA, 22 nt, Vaccinia virus
uuaccguccuccgccaauauag

SEQ ID NO: 3278153 - RNA, 23 nt, Vaccinia virus
acaagacauuuuuuguccuauau

SEQ ID NO: 3278154 - RNA, 18 nt, Vaccinia virus
aaaugauuaucaaacaca

SEQ ID NO: 3278155 - RNA, 13 nt, Vaccinia virus
uuauuaaaguuua

SEQ ID NO: 3278156 - RNA, 15 nt, Vaccinia virus
auauauuaacucaga

SEQ ID NO: 3278157 - RNA, 15 nt, Vaccinia virus
ucauauuuagaauau

SEQ ID NO: 3278158 - RNA, 18 nt, Vaccinia virus
aaaguuagaugugucaua

SEQ ID NO: 3278159 - RNA, 14 nt, Vaccinia virus
agaauaaauuauau

SEQ ID NO: 3278160 - RNA, 14 nt, Vaccinia virus
uucuccuggaugau

SEQ ID NO: 3278161 - RNA, 22 nt, Vaccinia virus
acguuuagccgccuuuaauaga

SEQ ID NO: 3278162 - RNA, 21 nt, Vaccinia virus
auuaaaggcuuuuuauaucau

SEQ ID NO: 3278163 - RNA, 19 nt, Vaccinia virus
uaauauaaucuagacagau

SEQ ID NO: 3278164 - RNA, 20 nt, Vaccinia virus
aaugaaacggugaauacaau

SEQ ID NO: 3278165 - RNA, 19 nt, Vaccinia virus
uaguacgggcgcuguaauu

SEQ ID NO: 3278166 - RNA, 11 nt, Vaccinia virus
aaguaaauacu

SEQ ID NO: 3278167 - RNA, 19 nt, Vaccinia virus
auagacaaugcuaauauau

SEQ ID NO: 3278168 - RNA, 19 nt, Vaccinia virus
auaacaaaauccaaacauu

SEQ ID NO: 3278169 - RNA, 11 nt, Vaccinia virus
ggaaacuauaa

SEQ ID NO: 3278170 - RNA, 21 nt, Vaccinia virus
augaaaaauuuuccacaucuc

SEQ ID NO: 3278171 - RNA, 18 nt, Vaccinia virus
ucacugggguaaaguaag

SEQ ID NO: 3278172 - RNA, 22 nt, Vaccinia virus
uacauuaaacguacauuuucca

SEQ ID NO: 3278173 - RNA, 18 nt, Vaccinia virus
agauuaaaucauuaaaug

SEQ ID NO: 3278174 - RNA, 17 nt, Vaccinia virus
auugauuacuauaaaug

SEQ ID NO: 3278175 - RNA, 14 nt, Vaccinia virus
ccguuaaugaaaaa

SEQ ID NO: 3278176 - RNA, 12 nt, Vaccinia virus
agaauuagaaca

SEQ ID NO: 3278177 - RNA, 12 nt, Vaccinia virus
aacauauucuca

SEQ ID NO: 3278178 - RNA, 14 nt, Vaccinia virus
agaaugauauagaa

SEQ ID NO: 3278179 - RNA, 16 nt, Vaccinia virus
uuguucagcuguagaa

SEQ ID NO: 3278180 - RNA, 17 nt, Vaccinia virus
uccaguaaaccguuuuu

SEQ ID NO: 3278181 - RNA, 13 nt, Vaccinia virus
aucauaaaaguug

SEQ ID NO: 3278182 - RNA, 14 nt, Vaccinia virus
gaauuuauaucuaa

SEQ ID NO: 3278183 - RNA, 17 nt, Vaccinia virus
uguacauuaauaaauga

SEQ ID NO: 3278184 - RNA, 17 nt, Vaccinia virus
aucaaauagcucaauau

SEQ ID NO: 3278185 - RNA, 16 nt, Vaccinia virus
cugcuuagacuuccaa

SEQ ID NO: 3278186 - RNA, 18 nt, Vaccinia virus
caaaagacaugauaauau

SEQ ID NO: 3278187 - RNA, 14 nt, Vaccinia virus
aaguuucaaacugu

SEQ ID NO: 3278188 - RNA, 15 nt, Vaccinia virus
aacucauucuauaua

SEQ ID NO: 3278189 - RNA, 17 nt, Vaccinia virus
acaauacauguacaaau

SEQ ID NO: 3278190 - RNA, 18 nt, Vaccinia virus
augucaaaaauuguagaa

SEQ ID NO: 3278191 - RNA, 23 nt, Vaccinia virus
ucucaucaucagaauaaaucaau

SEQ ID NO: 3278192 - RNA, 13 nt, Vaccinia virus
caaccaaauacuu

SEQ ID NO: 3278193 - RNA, 20 nt, Vaccinia virus
uaccauagaagauguuagaa

SEQ ID NO: 3278194 - RNA, 18 nt, Vaccinia virus
gaguaacagucgaacaau

SEQ ID NO: 3278195 - RNA, 16 nt, Vaccinia virus
cuagguuucucuauaa

SEQ ID NO: 3278196 - RNA, 19 nt, Vaccinia virus
aucaaauggaugcuaauug

SEQ ID NO: 3278197 - RNA, 17 nt, Vaccinia virus
ucagauuucaauucacg

SEQ ID NO: 3278198 - RNA, 14 nt, Vaccinia virus
uauauuuagauguu

SEQ ID NO: 3278199 - RNA, 15 nt, Vaccinia virus
ucguuauagaaugca

SEQ ID NO: 3278200 - RNA, 14 nt, Vaccinia virus
agauuaguaacagu

SEQ ID NO: 3278201 - RNA, 15 nt, Vaccinia virus
cgacaucaagaccca

SEQ ID NO: 3278202 - RNA, 16 nt, Vaccinia virus
uagacagaauaucgug

SEQ ID NO: 3278203 - RNA, 19 nt, Vaccinia virus
ucgauucccauaugauguu

SEQ ID NO: 3278204 - RNA, 15 nt, Vaccinia virus
aguauguaaaaaugu

SEQ ID NO: 3278205 - RNA, 16 nt, Vaccinia virus
uuucuacuacuucauu

SEQ ID NO: 3278206 - RNA, 22 nt, Vaccinia virus
uguauucaacaugcuuuucuau

SEQ ID NO: 3278207 - RNA, 13 nt, Vaccinia virus
uacagacauuaag

SEQ ID NO: 3278208 - RNA, 16 nt, Vaccinia virus
auuacauacuuaaaaa

SEQ ID NO: 3278209 - RNA, 19 nt, Vaccinia virus
aauaaucggagaauguuuc

SEQ ID NO: 3278210 - RNA, 17 nt, Vaccinia virus
acaaauaguaaaugaga

SEQ ID NO: 3278211 - RNA, 15 nt, Vaccinia virus
uuugcacguaaccau

SEQ ID NO: 3278212 - RNA, 13 nt, Vaccinia virus
auaauaaauacuu

SEQ ID NO: 3278213 - RNA, 16 nt, Vaccinia virus
uauucagauuaucaug

SEQ ID NO: 3278214 - RNA, 23 nt, Vaccinia virus
auagauggucgacguuucucaaa

SEQ ID NO: 3278215 - RNA, 15 nt, Vaccinia virus
cauauuucauuucca

SEQ ID NO: 3278216 - RNA, 16 nt, Vaccinia virus
auaauaaauuuuucca

SEQ ID NO: 3278217 - RNA, 14 nt, Vaccinia virus
uagcuauucuucuu

SEQ ID NO: 3278218 - RNA, 17 nt, Vaccinia virus
uccggagauagauuucc

SEQ ID NO: 3278219 - RNA, 15 nt, Vaccinia virus
gacuuaaucaugcau

SEQ ID NO: 3278220 - RNA, 12 nt, Vaccinia virus
uuuuacauuacu

SEQ ID NO: 3278221 - RNA, 12 nt, Vaccinia virus
cacuacaucuuu

SEQ ID NO: 3278222 - RNA, 16 nt, Vaccinia virus
auauauuaauccacua

SEQ ID NO: 3278223 - RNA, 21 nt, Vaccinia virus
agaacacuacaguaguaauua

SEQ ID NO: 3278224 - RNA, 22 nt, Vaccinia virus
aguuuacuuucaugauuucauu

SEQ ID NO: 3278225 - RNA, 16 nt, Vaccinia virus
augagaucaauagaca

SEQ ID NO: 3278226 - RNA, 18 nt, Vaccinia virus
uagaaacuggagaaauca

SEQ ID NO: 3278227 - RNA, 12 nt, Vaccinia virus
cuuucuauuuuu

SEQ ID NO: 3278228 - RNA, 12 nt, Vaccinia virus
gucuuagauaua

SEQ ID NO: 3278229 - RNA, 19 nt, Vaccinia virus
cguuguugaaucuauuuug

SEQ ID NO: 3278230 - RNA, 18 nt, Vaccinia virus
cuauaaaacuacuacaau

SEQ ID NO: 3278231 - RNA, 11 nt, Vaccinia virus
uuuuuaacaug

SEQ ID NO: 3278232 - RNA, 22 nt, Vaccinia virus
cuuaugauauaaggaaacagcu

SEQ ID NO: 3278233 - RNA, 15 nt, Vaccinia virus
aucaugaauggauuu

SEQ ID NO: 3278234 - RNA, 12 nt, Vaccinia virus
ucgaauacuuau

SEQ ID NO: 3278235 - RNA, 19 nt, Vaccinia virus
auaacguaaccagaauugu

SEQ ID NO: 3278236 - RNA, 15 nt, Vaccinia virus
uaugaagauaaacac

SEQ ID NO: 3278237 - RNA, 20 nt, Vaccinia virus
uaacuaugcgauuauuuuca

SEQ ID NO: 3278238 - RNA, 13 nt, Vaccinia virus
uauacgacuauga

SEQ ID NO: 3278239 - RNA, 16 nt, Vaccinia virus
agauacuaguaugaug

SEQ ID NO: 3278240 - RNA, 14 nt, Vaccinia virus
ugaaauauauacau

SEQ ID NO: 3278241 - RNA, 20 nt, Vaccinia virus
ucaacuaucguuggaaaaug

SEQ ID NO: 3278242 - RNA, 17 nt, Vaccinia virus
auacgaagacuauagau

SEQ ID NO: 3278243 - RNA, 17 nt, Vaccinia virus
auauaccgauauguaca

SEQ ID NO: 3278244 - RNA, 16 nt, Vaccinia virus
cauaacuguauaaaau

SEQ ID NO: 3278245 - RNA, 21 nt, Vaccinia virus
ucacuguucuuuacaguuucu

SEQ ID NO: 3278246 - RNA, 11 nt, Vaccinia virus
gcuauaaugau

SEQ ID NO: 3278247 - RNA, 20 nt, Vaccinia virus
uaaacgcgucaaauuuuuca

SEQ ID NO: 3278248 - RNA, 15 nt, Vaccinia virus
uaacagucgaacaau

SEQ ID NO: 3278249 - RNA, 19 nt, Vaccinia virus
aucuugucugcuuaauaca

SEQ ID NO: 3278250 - RNA, 22 nt, Vaccinia virus
auuuuguaguuaauuuaucaca

SEQ ID NO: 3278251 - RNA, 13 nt, Vaccinia virus
uagauauagauuu

SEQ ID NO: 3278252 - RNA, 12 nt, Vaccinia virus
auaaaaucucca

SEQ ID NO: 3278253 - RNA, 12 nt, Vaccinia virus
acaaaaucuuca

SEQ ID NO: 3278254 - RNA, 16 nt, Vaccinia virus
agaauacgaugauauu

SEQ ID NO: 3278255 - RNA, 22 nt, Vaccinia virus
auaagaguguaguaucauagau

SEQ ID NO: 3278256 - RNA, 17 nt, Vaccinia virus
aguuccgagauaauuuc

SEQ ID NO: 3278257 - RNA, 15 nt, Vaccinia virus
agaaaaggauguauu

SEQ ID NO: 3278258 - RNA, 20 nt, Vaccinia virus
auucuaugaugguauugaag

SEQ ID NO: 3278259 - RNA, 22 nt, Vaccinia virus
uuuugguuucuuucauuucagu

SEQ ID NO: 3278260 - RNA, 22 nt, Vaccinia virus
aaccaguauguuuaauaugaaa

SEQ ID NO: 3278261 - RNA, 13 nt, Vaccinia virus
uugaagaaaucaa

SEQ ID NO: 3278262 - RNA, 14 nt, Vaccinia virus
cguggauuauaaca

SEQ ID NO: 3278263 - RNA, 23 nt, Vaccinia virus
ucccauggaaugacccaauaagu

SEQ ID NO: 3278264 - RNA, 23 nt, Vaccinia virus
aacucuaguaaaauaaucauaca

SEQ ID NO: 3278265 - RNA, 22 nt, Vaccinia virus
ggaaauacaccucuacauaacu

SEQ ID NO: 3278266 - RNA, 15 nt, Vaccinia virus
agaauucaacuauau

SEQ ID NO: 3278267 - RNA, 20 nt, Vaccinia virus
gauugauccuagaacuagau

SEQ ID NO: 3278268 - RNA, 16 nt, Vaccinia virus
uaucaaguuggccauu

SEQ ID NO: 3278269 - RNA, 19 nt, Vaccinia virus
auucugaugauauuagaac

SEQ ID NO: 3278270 - RNA, 18 nt, Vaccinia virus
aucauucauuccuccaua

SEQ ID NO: 3278271 - RNA, 22 nt, Vaccinia virus
agauuagguguagaucuagaug

SEQ ID NO: 3278272 - RNA, 16 nt, Vaccinia virus
ccggaguuagaaagca

SEQ ID NO: 3278273 - RNA, 20 nt, Vaccinia virus
uccaugacauauuacaaaau

SEQ ID NO: 3278274 - RNA, 22 nt, Vaccinia virus
aaaucauuagugacggaaaauc

SEQ ID NO: 3278275 - RNA, 13 nt, Vaccinia virus
aaacuuuuagaaa

SEQ ID NO: 3278276 - RNA, 18 nt, Vaccinia virus
aggaugcauuaucauuau

SEQ ID NO: 3278277 - RNA, 15 nt, Vaccinia virus
auuugcauuucuaua

SEQ ID NO: 3278278 - RNA, 20 nt, Vaccinia virus
aaagaguacaaccucauacu

SEQ ID NO: 3278279 - RNA, 20 nt, Vaccinia virus
aaacgcguuaguaaaacaug

SEQ ID NO: 3278280 - RNA, 14 nt, Vaccinia virus
aucgucuucacaaa

SEQ ID NO: 3278281 - RNA, 15 nt, Vaccinia virus
auacauuuauuguau

SEQ ID NO: 3278282 - RNA, 22 nt, Vaccinia virus
uuacuacguucagauuucaauu

SEQ ID NO: 3278283 - RNA, 20 nt, Vaccinia virus
gaacacauaaccaauuuaua

SEQ ID NO: 3278284 - RNA, 14 nt, Vaccinia virus
agaauaucuauaca

SEQ ID NO: 3278285 - RNA, 15 nt, Vaccinia virus
uuugagauuucauaa

SEQ ID NO: 3278286 - RNA, 17 nt, Vaccinia virus
acuguauccucaaacau

SEQ ID NO: 3278287 - RNA, 12 nt, Vaccinia virus
aacuuaaaagaa

SEQ ID NO: 3278288 - RNA, 14 nt, Vaccinia virus
acuugauaaaaaug

SEQ ID NO: 3278289 - RNA, 19 nt, Vaccinia virus
gaucacauuuagauaaaaa

SEQ ID NO: 3278290 - RNA, 22 nt, Vaccinia virus
ucuaaagaaaaaugauuaucuu

SEQ ID NO: 3278291 - RNA, 15 nt, Vaccinia virus
uaauugaguaaauga

SEQ ID NO: 3278292 - RNA, 15 nt, Vaccinia virus
aaauuauauacugaa

SEQ ID NO: 3278293 - RNA, 16 nt, Vaccinia virus
acaaacaccauccuug

SEQ ID NO: 3278294 - RNA, 16 nt, Vaccinia virus
agauacuauauuuguu

SEQ ID NO: 3278295 - RNA, 14 nt, Vaccinia virus
auagaggaugaauu

SEQ ID NO: 3278296 - RNA, 16 nt, Vaccinia virus
cucuuucuccuuucuc

SEQ ID NO: 3278297 - RNA, 13 nt, Vaccinia virus
aauucauuuccau

SEQ ID NO: 3278298 - RNA, 23 nt, Vaccinia virus
auaauuauaauauaaaaauacuu

SEQ ID NO: 3278299 - RNA, 23 nt, Vaccinia virus
uaaaauuauuuaauuuaauacau

SEQ ID NO: 3278300 - RNA, 16 nt, Vaccinia virus
uaacaacgacuuauaa

SEQ ID NO: 3278301 - RNA, 12 nt, Vaccinia virus
agaaaaaaugau

SEQ ID NO: 3278302 - RNA, 16 nt, Vaccinia virus
ggacaaauucuuuuga

SEQ ID NO: 3278303 - RNA, 12 nt, Vaccinia virus
uuaaaaaaagau

SEQ ID NO: 3278304 - RNA, 17 nt, Vaccinia virus
ucgacguuucucaaagu

SEQ ID NO: 3278305 - RNA, 11 nt, Vaccinia virus
uaccuguuuuu

SEQ ID NO: 3278306 - RNA, 19 nt, Vaccinia virus
acaauuuuugccuugaauu

SEQ ID NO: 3278307 - RNA, 14 nt, Vaccinia virus
gacuacgauugcac

SEQ ID NO: 3278308 - RNA, 14 nt, Vaccinia virus
gaacauuuaagaga

SEQ ID NO: 3278309 - RNA, 21 nt, Vaccinia virus
acuuggaaaagauaacuauug

SEQ ID NO: 3278310 - RNA, 12 nt, Vaccinia virus
caaugaaaucac

SEQ ID NO: 3278311 - RNA, 20 nt, Vaccinia virus
aauauuuaacucaugaugaa

SEQ ID NO: 3278312 - RNA, 19 nt, Vaccinia virus
gaguuuuccguuagaaaag

SEQ ID NO: 3278313 - RNA, 15 nt, Vaccinia virus
accacaggagaaugg

SEQ ID NO: 3278314 - RNA, 16 nt, Vaccinia virus
guccaucauuacagaa

SEQ ID NO: 3278315 - RNA, 18 nt, Vaccinia virus
uguguaacacuuuggaua

SEQ ID NO: 3278316 - RNA, 16 nt, Vaccinia virus
cuauaaaaaacauaau

SEQ ID NO: 3278317 - RNA, 18 nt, Vaccinia virus
cugcagcauuuugaggau

SEQ ID NO: 3278318 - RNA, 19 nt, Vaccinia virus
acauaugguuucuaaaucu

SEQ ID NO: 3278319 - RNA, 14 nt, Vaccinia virus
caaagaaaugagua

SEQ ID NO: 3278320 - RNA, 19 nt, Vaccinia virus
auucuugguaauuaauaga

SEQ ID NO: 3278321 - RNA, 14 nt, Vaccinia virus
aucauauucaacau

SEQ ID NO: 3278322 - RNA, 20 nt, Vaccinia virus
gcuaacauacgagacauguu

SEQ ID NO: 3278323 - RNA, 16 nt, Vaccinia virus
guaauaucuuaaauaa

SEQ ID NO: 3278324 - RNA, 14 nt, Vaccinia virus
caacauaucuaucc

SEQ ID NO: 3278325 - RNA, 22 nt, Vaccinia virus
acuacauaauccucaucuggaa

SEQ ID NO: 3278326 - RNA, 16 nt, Vaccinia virus
gugauguuguaacacu

SEQ ID NO: 3278327 - RNA, 12 nt, Vaccinia virus
uggaaauuauuu

SEQ ID NO: 3278328 - RNA, 20 nt, Vaccinia virus
aguucauaacagauacauaa

SEQ ID NO: 3278329 - RNA, 19 nt, Vaccinia virus
caaagaauuuuagacacua

SEQ ID NO: 3278330 - RNA, 13 nt, Vaccinia virus
caguaguauacau

SEQ ID NO: 3278331 - RNA, 11 nt, Vaccinia virus
uacgacgucag

SEQ ID NO: 3278332 - RNA, 19 nt, Vaccinia virus
cuuaaaugccuuauucucu

SEQ ID NO: 3278333 - RNA, 14 nt, Vaccinia virus
aacgaugucaaaau

SEQ ID NO: 3278334 - RNA, 17 nt, Vaccinia virus
auccggauccuuuucuu

SEQ ID NO: 3278335 - RNA, 16 nt, Vaccinia virus
auguaugauucaaugu

SEQ ID NO: 3278336 - RNA, 20 nt, Vaccinia virus
guuaaauguugguauaucaa

SEQ ID NO: 3278337 - RNA, 15 nt, Vaccinia virus
gaugauauagauaug

SEQ ID NO: 3278338 - RNA, 15 nt, Vaccinia virus
auacgccaaggaaag

SEQ ID NO: 3278339 - RNA, 21 nt, Vaccinia virus
agaauaaaaugcuaaugucaa

SEQ ID NO: 3278340 - RNA, 17 nt, Vaccinia virus
uaaacauuguuaucuag

SEQ ID NO: 3278341 - RNA, 13 nt, Vaccinia virus
uaacuaucuguaa

SEQ ID NO: 3278342 - RNA, 22 nt, Vaccinia virus
uaauauaaaaaaacauuauucu

SEQ ID NO: 3278343 - RNA, 14 nt, Vaccinia virus
ugauggaugagaua

SEQ ID NO: 3278344 - RNA, 19 nt, Vaccinia virus
caaauuuuuuuuacaaaca

SEQ ID NO: 3278345 - RNA, 16 nt, Vaccinia virus
aaccagaauuguaaaa

SEQ ID NO: 3278346 - RNA, 16 nt, Vaccinia virus
gauuuaauaguuacca

SEQ ID NO: 3278347 - RNA, 17 nt, Vaccinia virus
aaauaaguaguaauaau

SEQ ID NO: 3278348 - RNA, 18 nt, Vaccinia virus
ugcauaucuuuuucaaca

SEQ ID NO: 3278349 - RNA, 15 nt, Vaccinia virus
agaguuuuauaacga

SEQ ID NO: 3278350 - RNA, 16 nt, Vaccinia virus
uaacaaaacuauuuca

SEQ ID NO: 3278351 - RNA, 19 nt, Vaccinia virus
acuauugaagccauugaaa

SEQ ID NO: 3278352 - RNA, 18 nt, Vaccinia virus
cacauccaucaauuguaa

SEQ ID NO: 3278353 - RNA, 18 nt, Vaccinia virus
uauauagcuuauuccaca

SEQ ID NO: 3278354 - RNA, 19 nt, Vaccinia virus
ggauucuuugcguaucuca

SEQ ID NO: 3278355 - RNA, 17 nt, Vaccinia virus
gcuucagcggauccugu

SEQ ID NO: 3278356 - RNA, 18 nt, Vaccinia virus
agaugcuauaucaaaaua

SEQ ID NO: 3278357 - RNA, 20 nt, Vaccinia virus
aaucugauagaaagaauaag

SEQ ID NO: 3278358 - RNA, 16 nt, Vaccinia virus
auguuuggagaaauga

SEQ ID NO: 3278359 - RNA, 16 nt, Vaccinia virus
aaagcaucacagaauc

SEQ ID NO: 3278360 - RNA, 17 nt, Vaccinia virus
uauccagcuaacuuauu

SEQ ID NO: 3278361 - RNA, 22 nt, Vaccinia virus
uaaugacaauaaaauuaucaug

SEQ ID NO: 3278362 - RNA, 13 nt, Vaccinia virus
uaaauauauuuac

SEQ ID NO: 3278363 - RNA, 20 nt, Vaccinia virus
cauuauagauguguauacau

SEQ ID NO: 3278364 - RNA, 16 nt, Vaccinia virus
augaaugaugauauau

SEQ ID NO: 3278365 - RNA, 21 nt, Vaccinia virus
acaucuauauugcuacauaau

SEQ ID NO: 3278366 - RNA, 22 nt, Vaccinia virus
uauagauggaggggauuggcau

SEQ ID NO: 3278367 - RNA, 17 nt, Vaccinia virus
cgugucaaccaguuaaa

SEQ ID NO: 3278368 - RNA, 16 nt, Vaccinia virus
uuauacuauuacuauu

SEQ ID NO: 3278369 - RNA, 12 nt, Vaccinia virus
gaguuuauacac

SEQ ID NO: 3278370 - RNA, 21 nt, Vaccinia virus
uuaaguucaccaaacaacuuu

SEQ ID NO: 3278371 - RNA, 23 nt, Vaccinia virus
auuuguuuccaugacauauuaca

SEQ ID NO: 3278372 - RNA, 11 nt, Vaccinia virus
ggcaucuuuuu

SEQ ID NO: 3278373 - RNA, 17 nt, Vaccinia virus
aggaaacuuaaaauaua

SEQ ID NO: 3278374 - RNA, 15 nt, Vaccinia virus
ucgagacgucaauau

SEQ ID NO: 3278375 - RNA, 14 nt, Vaccinia virus
guauugacaaauau

SEQ ID NO: 3278376 - RNA, 21 nt, Vaccinia virus
uggaaaaaugaugaauuaaug

SEQ ID NO: 3278377 - RNA, 21 nt, Vaccinia virus
gacgcuuguuaauaaguaaau

SEQ ID NO: 3278378 - RNA, 18 nt, Vaccinia virus
uucaucguaucuagauaa

SEQ ID NO: 3278379 - RNA, 13 nt, Vaccinia virus
auauacacauaau

SEQ ID NO: 3278380 - RNA, 16 nt, Vaccinia virus
augaacaaagaaaugg

SEQ ID NO: 3278381 - RNA, 20 nt, Vaccinia virus
auaucauuaggauuuaacuc

SEQ ID NO: 3278382 - RNA, 17 nt, Vaccinia virus
aguggugugaauacaac

SEQ ID NO: 3278383 - RNA, 15 nt, Vaccinia virus
ucagauaaucugaaa

SEQ ID NO: 3278384 - RNA, 16 nt, Vaccinia virus
uggauauguguuuaca

SEQ ID NO: 3278385 - RNA, 17 nt, Vaccinia virus
uaucaacagauagcuug

SEQ ID NO: 3278386 - RNA, 14 nt, Vaccinia virus
auauuaguacagaa

SEQ ID NO: 3278387 - RNA, 19 nt, Vaccinia virus
auccaaacccuugaucucc

SEQ ID NO: 3278388 - RNA, 18 nt, Vaccinia virus
auauauuguagauaagaa

SEQ ID NO: 3278389 - RNA, 14 nt, Vaccinia virus
agcuacucuagauu

SEQ ID NO: 3278390 - RNA, 18 nt, Vaccinia virus
uuaaucuuuuuauuagua

SEQ ID NO: 3278391 - RNA, 23 nt, Vaccinia virus
auacuaaaaaauguagaaauuga

SEQ ID NO: 3278392 - RNA, 22 nt, Vaccinia virus
uuaacucggucgguuuaucuac

SEQ ID NO: 3278393 - RNA, 13 nt, Vaccinia virus
agaauugucuauc

SEQ ID NO: 3278394 - RNA, 21 nt, Vaccinia virus
uucauaauuguuagcuguuuu

SEQ ID NO: 3278395 - RNA, 13 nt, Vaccinia virus
gaccuauaauuga

SEQ ID NO: 3278396 - RNA, 18 nt, Vaccinia virus
aaguuaacacaugucaca

SEQ ID NO: 3278397 - RNA, 19 nt, Vaccinia virus
acauccucacuauucaugg

SEQ ID NO: 3278398 - RNA, 16 nt, Vaccinia virus
cauagaugauauugua

SEQ ID NO: 3278399 - RNA, 19 nt, Vaccinia virus
ccaaaugcugucugcgaaa

SEQ ID NO: 3278400 - RNA, 23 nt, Vaccinia virus
ccacuacaucaauuuuacaaaag

SEQ ID NO: 3278401 - RNA, 16 nt, Vaccinia virus
aaauaugauuuuguaa

SEQ ID NO: 3278402 - RNA, 18 nt, Vaccinia virus
uaguaaaaauaauuauua

SEQ ID NO: 3278403 - RNA, 18 nt, Vaccinia virus
caauaccaaagaaggaag

SEQ ID NO: 3278404 - RNA, 19 nt, Vaccinia virus
aucggacuuugugcauaug

SEQ ID NO: 3278405 - RNA, 21 nt, Vaccinia virus
aucaggaauccaaagagcuau

SEQ ID NO: 3278406 - RNA, 15 nt, Vaccinia virus
cuuucucacaaaaau

SEQ ID NO: 3278407 - RNA, 23 nt, Vaccinia virus
auaucauuaggauuuaacuccuu

SEQ ID NO: 3278408 - RNA, 16 nt, Vaccinia virus
uuuacguuauuaauca

SEQ ID NO: 3278409 - RNA, 17 nt, Vaccinia virus
cauucuucccauggaug

SEQ ID NO: 3278410 - RNA, 12 nt, Vaccinia virus
uuaauucucuau

SEQ ID NO: 3278411 - RNA, 18 nt, Vaccinia virus
uacuuuacaaacgaugua

SEQ ID NO: 3278412 - RNA, 18 nt, Vaccinia virus
ucauauuaauaaaguguu

SEQ ID NO: 3278413 - RNA, 17 nt, Vaccinia virus
uauuauacaaaaauuuu

SEQ ID NO: 3278414 - RNA, 18 nt, Vaccinia virus
ucuauaauauaauaauca

SEQ ID NO: 3278415 - RNA, 23 nt, Vaccinia virus
ucagaaaggauagagcaauaagu

SEQ ID NO: 3278416 - RNA, 14 nt, Vaccinia virus
aaaagauaaaugua

SEQ ID NO: 3278417 - RNA, 12 nt, Vaccinia virus
auagaugaaugu

SEQ ID NO: 3278418 - RNA, 15 nt, Vaccinia virus
auccuuauccuuuac

SEQ ID NO: 3278419 - RNA, 13 nt, Vaccinia virus
auauauaaugaau

SEQ ID NO: 3278420 - RNA, 14 nt, Vaccinia virus
ucuuaaaaaguuuc

SEQ ID NO: 3278421 - RNA, 19 nt, Vaccinia virus
uagaauaucuccucaagga

SEQ ID NO: 3278422 - RNA, 21 nt, Vaccinia virus
cagccuuaauuuuuucaugau

SEQ ID NO: 3278423 - RNA, 21 nt, Vaccinia virus
cauuuuauggaaacuauaauu

SEQ ID NO: 3278424 - RNA, 18 nt, Vaccinia virus
aguauuaaauauuaauaa

SEQ ID NO: 3278425 - RNA, 20 nt, Vaccinia virus
aaucuagccauugucuuaua

SEQ ID NO: 3278426 - RNA, 21 nt, Vaccinia virus
guugcaauaauaaaaguuauc

SEQ ID NO: 3278427 - RNA, 23 nt, Vaccinia virus
aucuagaaacacuuggauauugu

SEQ ID NO: 3278428 - RNA, 23 nt, Vaccinia virus
uuaaaugaguguccauauuuugc

SEQ ID NO: 3278429 - RNA, 23 nt, Vaccinia virus
uguuauuuuuucuguaauaguua

SEQ ID NO: 3278430 - RNA, 22 nt, Vaccinia virus
gucaucuuauguuuuuaagaga

SEQ ID NO: 3278431 - RNA, 14 nt, Vaccinia virus
auugguacgaaaua

SEQ ID NO: 3278432 - RNA, 21 nt, Vaccinia virus
aaaaagauuccuauuuacaaa

SEQ ID NO: 3278433 - RNA, 23 nt, Vaccinia virus
aacuccaauaaaaagaugauaua

SEQ ID NO: 3278434 - RNA, 14 nt, Vaccinia virus
uuaauguauuauua

SEQ ID NO: 3278435 - RNA, 13 nt, Vaccinia virus
augaaaaaaagau

SEQ ID NO: 3278436 - RNA, 23 nt, Vaccinia virus
uucaauuacuacaaaaauuacuc

SEQ ID NO: 3278437 - RNA, 20 nt, Vaccinia virus
aaguuuuaucuuucucucuu

SEQ ID NO: 3278438 - RNA, 20 nt, Vaccinia virus
aucuagucaccgagggaaaa

SEQ ID NO: 3278439 - RNA, 22 nt, Vaccinia virus
gaugauguucuaccuauuucau

SEQ ID NO: 3278440 - RNA, 13 nt, Vaccinia virus
aucuaaaaaacua

SEQ ID NO: 3278441 - RNA, 22 nt, Vaccinia virus
cauaaauaauaaauacaauaau

SEQ ID NO: 3278442 - RNA, 22 nt, Vaccinia virus
uugugaucggauaguauucaag

SEQ ID NO: 3278443 - RNA, 17 nt, Vaccinia virus
auuuuaaguuuauugac

SEQ ID NO: 3278444 - RNA, 23 nt, Vaccinia virus
uugguguaauaaaaaaauuauuu

SEQ ID NO: 3278445 - RNA, 19 nt, Vaccinia virus
agugacaacaaaaaaugaa

SEQ ID NO: 3278446 - RNA, 22 nt, Vaccinia virus
agcacgaucgugguuaacaaua

SEQ ID NO: 3278447 - RNA, 14 nt, Vaccinia virus
aacaguaucauuua

SEQ ID NO: 3278448 - RNA, 15 nt, Vaccinia virus
aacuacuugaaauuc

SEQ ID NO: 3278449 - RNA, 17 nt, Vaccinia virus
auagaucgaaaaauaua

SEQ ID NO: 3278450 - RNA, 13 nt, Vaccinia virus
ugaagaugauguu

SEQ ID NO: 3278451 - RNA, 22 nt, Vaccinia virus
aauauaaagcacguaggucuua

SEQ ID NO: 3278452 - RNA, 13 nt, Vaccinia virus
aacuuucuagaca

SEQ ID NO: 3278453 - RNA, 11 nt, Vaccinia virus
agcauguagaa

SEQ ID NO: 3278454 - RNA, 18 nt, Vaccinia virus
aaacaauguauacaaaug

SEQ ID NO: 3278455 - RNA, 15 nt, Vaccinia virus
aauuacuuaaagaua

SEQ ID NO: 3278456 - RNA, 20 nt, Vaccinia virus
gaauucauccguccuucaga

SEQ ID NO: 3278457 - RNA, 23 nt, Vaccinia virus
guuuguuucggccugaaguuggu

SEQ ID NO: 3278458 - RNA, 17 nt, Vaccinia virus
aucacagcaguaguuua

SEQ ID NO: 3278459 - RNA, 13 nt, Vaccinia virus
uucgcaucguauu

SEQ ID NO: 3278460 - RNA, 20 nt, Vaccinia virus
gcacacaaucuaauauugau

SEQ ID NO: 3278461 - RNA, 21 nt, Vaccinia virus
caauucauuccuauaaguuua

SEQ ID NO: 3278462 - RNA, 18 nt, Vaccinia virus
agaaucauugcuguaaac

SEQ ID NO: 3278463 - RNA, 13 nt, Vaccinia virus
cacauaaacaucg

SEQ ID NO: 3278464 - RNA, 14 nt, Vaccinia virus
caguauaccaaaca

SEQ ID NO: 3278465 - RNA, 16 nt, Vaccinia virus
agaauauaaaaacucu

SEQ ID NO: 3278466 - RNA, 23 nt, Vaccinia virus
auucaguuuauagagcaaaauaa

SEQ ID NO: 3278467 - RNA, 14 nt, Vaccinia virus
aaacuuuuagaaau

SEQ ID NO: 3278468 - RNA, 16 nt, Vaccinia virus
aguucuuaauacuucg

SEQ ID NO: 3278469 - RNA, 20 nt, Vaccinia virus
accacuucucuaucaaugau

SEQ ID NO: 3278470 - RNA, 22 nt, Vaccinia virus
ucgacauccgucaaaaccaauu

SEQ ID NO: 3278471 - RNA, 21 nt, Vaccinia virus
auuagugaugaauugaaaauu

SEQ ID NO: 3278472 - RNA, 13 nt, Vaccinia virus
aacaaauacagaa

SEQ ID NO: 3278473 - RNA, 23 nt, Vaccinia virus
accaauuacugauaauguagaag

SEQ ID NO: 3278474 - RNA, 16 nt, Vaccinia virus
gaaaggcgguauaugu

SEQ ID NO: 3278475 - RNA, 14 nt, Vaccinia virus
aauuuuuuuuauga

SEQ ID NO: 3278476 - RNA, 13 nt, Vaccinia virus
acaccauagcacu

SEQ ID NO: 3278477 - RNA, 15 nt, Vaccinia virus
agauuuuaaauguau

SEQ ID NO: 3278478 - RNA, 15 nt, Vaccinia virus
aauaucagaaaggau

SEQ ID NO: 3278479 - RNA, 22 nt, Vaccinia virus
acuugguauuuggaaauuagug

SEQ ID NO: 3278480 - RNA, 18 nt, Vaccinia virus
uuauucuauuuuacuaaa

SEQ ID NO: 3278481 - RNA, 13 nt, Vaccinia virus
guuauaaauuagg

SEQ ID NO: 3278482 - RNA, 20 nt, Vaccinia virus
gcuauguauauauauuucuu

SEQ ID NO: 3278483 - RNA, 22 nt, Vaccinia virus
acgcauaaaaauaucuuccaau

SEQ ID NO: 3278484 - RNA, 21 nt, Vaccinia virus
uuauuaguuuuuuauuauuga

SEQ ID NO: 3278485 - RNA, 16 nt, Vaccinia virus
aacguuccguaucugu

SEQ ID NO: 3278486 - RNA, 15 nt, Vaccinia virus
cgauagcaauuuguu

SEQ ID NO: 3278487 - RNA, 16 nt, Vaccinia virus
agauuuuuuaaaggau

SEQ ID NO: 3278488 - RNA, 10 nt, Vaccinia virus
ucuaaacaaa

SEQ ID NO: 3278489 - RNA, 17 nt, Vaccinia virus
uaagauauccauaucau

SEQ ID NO: 3278490 - RNA, 20 nt, Vaccinia virus
caaucugggcguauaaugaa

SEQ ID NO: 3278491 - RNA, 13 nt, Vaccinia virus
aucauuaaaggau

SEQ ID NO: 3278492 - RNA, 15 nt, Vaccinia virus
auauguaucaaagau

SEQ ID NO: 3278493 - RNA, 15 nt, Vaccinia virus
ggaauaaacaugucu

SEQ ID NO: 3278494 - RNA, 21 nt, Vaccinia virus
aaauucuuaguuauauauacu

SEQ ID NO: 3278495 - RNA, 18 nt, Vaccinia virus
aucacaauauauguugau

SEQ ID NO: 3278496 - RNA, 13 nt, Vaccinia virus
guccaauauuuua

SEQ ID NO: 3278497 - RNA, 13 nt, Vaccinia virus
cgaggauuuugau

SEQ ID NO: 3278498 - RNA, 13 nt, Vaccinia virus
uagauuaucuauu

SEQ ID NO: 3278499 - RNA, 16 nt, Vaccinia virus
auagauuuccaaagau

SEQ ID NO: 3278500 - RNA, 16 nt, Vaccinia virus
guaaucauagaugaau

SEQ ID NO: 3278501 - RNA, 16 nt, Vaccinia virus
uaacuuuuguucuaug

SEQ ID NO: 3278502 - RNA, 14 nt, Vaccinia virus
cucucauugauuuu

SEQ ID NO: 3278503 - RNA, 23 nt, Vaccinia virus
auucuacaagugacaacaaaaaa

SEQ ID NO: 3278504 - RNA, 18 nt, Vaccinia virus
uuauuucugaauuauucc

SEQ ID NO: 3278505 - RNA, 14 nt, Vaccinia virus
ccgaucaacaaaag

SEQ ID NO: 3278506 - RNA, 21 nt, Vaccinia virus
gaguuaggccaauagaaauau

SEQ ID NO: 3278507 - RNA, 16 nt, Vaccinia virus
gaagagaaaggucaau

SEQ ID NO: 3278508 - RNA, 15 nt, Vaccinia virus
uauguugacauguau

SEQ ID NO: 3278509 - RNA, 23 nt, Vaccinia virus
ucuuuaugacaucgccuacaaau

SEQ ID NO: 3278510 - RNA, 15 nt, Vaccinia virus
uggucauuaaaucuu

SEQ ID NO: 3278511 - RNA, 18 nt, Vaccinia virus
uuugauagggacaaagua

SEQ ID NO: 3278512 - RNA, 15 nt, Vaccinia virus
aaucaguuuaggaaa

SEQ ID NO: 3278513 - RNA, 13 nt, Vaccinia virus
uacacgaaugauu

SEQ ID NO: 3278514 - RNA, 13 nt, Vaccinia virus
auaaauaguuuuu

SEQ ID NO: 3278515 - RNA, 14 nt, Vaccinia virus
uagaaaucaacgau

SEQ ID NO: 3278516 - RNA, 21 nt, Vaccinia virus
agcagcaucugcgauguuaua

SEQ ID NO: 3278517 - RNA, 19 nt, Vaccinia virus
uuagaaucauugcuguaaa

SEQ ID NO: 3278518 - RNA, 17 nt, Vaccinia virus
augucaucgaaauggua

SEQ ID NO: 3278519 - RNA, 22 nt, Vaccinia virus
gaugauacauguauuaaaauac

SEQ ID NO: 3278520 - RNA, 19 nt, Vaccinia virus
auaguaguguaguuaaugu

SEQ ID NO: 3278521 - RNA, 20 nt, Vaccinia virus
uuaucuucauagaauacuaa

SEQ ID NO: 3278522 - RNA, 15 nt, Vaccinia virus
auuugucuucuuucu

SEQ ID NO: 3278523 - RNA, 14 nt, Vaccinia virus
cuauaacuccuaua

SEQ ID NO: 3278524 - RNA, 22 nt, Vaccinia virus
uuuagcagucuaacauuuuuaa

SEQ ID NO: 3278525 - RNA, 16 nt, Vaccinia virus
auauauuuuucuagau

SEQ ID NO: 3278526 - RNA, 17 nt, Vaccinia virus
gaauauguuauaaauuu

SEQ ID NO: 3278527 - RNA, 21 nt, Vaccinia virus
cuugauucuaguaucuuuugu

SEQ ID NO: 3278528 - RNA, 15 nt, Vaccinia virus
aaagaaguagcuaau

SEQ ID NO: 3278529 - RNA, 19 nt, Vaccinia virus
guaaauauagaucaaacaa

SEQ ID NO: 3278530 - RNA, 20 nt, Vaccinia virus
uguauuaaauagaauauuua

SEQ ID NO: 3278531 - RNA, 17 nt, Vaccinia virus
aucuucauagaauacua

SEQ ID NO: 3278532 - RNA, 16 nt, Vaccinia virus
acuguggauacucugu

SEQ ID NO: 3278533 - RNA, 20 nt, Vaccinia virus
cagacucucaagauuuuaaa

SEQ ID NO: 3278534 - RNA, 21 nt, Vaccinia virus
gaacuauuuuuuuauacuucu

SEQ ID NO: 3278535 - RNA, 14 nt, Vaccinia virus
uaauaaucaauaau

SEQ ID NO: 3278536 - RNA, 19 nt, Vaccinia virus
gcaugcgugguagauguuu

SEQ ID NO: 3278537 - RNA, 14 nt, Vaccinia virus
ucuuuuuuacacau

SEQ ID NO: 3278538 - RNA, 20 nt, Vaccinia virus
auuacuuuacauauaauauc

SEQ ID NO: 3278539 - RNA, 13 nt, Vaccinia virus
ucauauacuauuu

SEQ ID NO: 3278540 - RNA, 16 nt, Vaccinia virus
uuaaagaaaaauacuc

SEQ ID NO: 3278541 - RNA, 17 nt, Vaccinia virus
aagcauaauacucuguu

SEQ ID NO: 3278542 - RNA, 18 nt, Vaccinia virus
uaguuucuauaucuacau

SEQ ID NO: 3278543 - RNA, 15 nt, Vaccinia virus
acaugugucauuuau

SEQ ID NO: 3278544 - RNA, 16 nt, Vaccinia virus
guuauuaguacuauca

SEQ ID NO: 3278545 - RNA, 22 nt, Vaccinia virus
uacaaacgauuauuagaucuuu

SEQ ID NO: 3278546 - RNA, 20 nt, Vaccinia virus
uuacuugauaggugaaaaga

SEQ ID NO: 3278547 - RNA, 18 nt, Vaccinia virus
caggucuauucgacacua

SEQ ID NO: 3278548 - RNA, 18 nt, Vaccinia virus
ucaguguggguacaaaua

SEQ ID NO: 3278549 - RNA, 15 nt, Vaccinia virus
cuuuuauaauucaua

SEQ ID NO: 3278550 - RNA, 13 nt, Vaccinia virus
auaauuuaacaau

SEQ ID NO: 3278551 - RNA, 22 nt, Vaccinia virus
uuauggaguuagcaauuucaaa

SEQ ID NO: 3278552 - RNA, 20 nt, Vaccinia virus
uaccacguaaaacuuaaaau

SEQ ID NO: 3278553 - RNA, 19 nt, Vaccinia virus
gagaaaguggauaaaacaa

SEQ ID NO: 3278554 - RNA, 20 nt, Vaccinia virus
uauggaucuccaucgaugau

SEQ ID NO: 3278555 - RNA, 24 nt, Vaccinia virus
uacuccaaaaaacaaaauaacuag

SEQ ID NO: 3278556 - RNA, 23 nt, Vaccinia virus
uggagacgccugauauguaggca

SEQ ID NO: 3278557 - RNA, 19 nt, Vaccinia virus
ucuuaccauguccucaaau

SEQ ID NO: 3278558 - RNA, 17 nt, Vaccinia virus
cccgcuucuauuuacuc

SEQ ID NO: 3278559 - RNA, 14 nt, Vaccinia virus
uuugaacauguaga

SEQ ID NO: 3278560 - RNA, 18 nt, Vaccinia virus
auuaucucagugcaaaga

SEQ ID NO: 3278561 - RNA, 16 nt, Vaccinia virus
auauucaguuuauaga

SEQ ID NO: 3278562 - RNA, 14 nt, Vaccinia virus
gaucuggaaaauaa

SEQ ID NO: 3278563 - RNA, 22 nt, Vaccinia virus
aauugaacaaaguauucuuaug

SEQ ID NO: 3278564 - RNA, 16 nt, Vaccinia virus
cuauuaucaaauacug

SEQ ID NO: 3278565 - RNA, 21 nt, Vaccinia virus
acagaacaucaaaaaauuaua

SEQ ID NO: 3278566 - RNA, 20 nt, Vaccinia virus
cauaaugucuagcagcaucu

SEQ ID NO: 3278567 - RNA, 14 nt, Vaccinia virus
gcaaacaacaacaa

SEQ ID NO: 3278568 - RNA, 14 nt, Vaccinia virus
ucuucuuauuuaga

SEQ ID NO: 3278569 - RNA, 20 nt, Vaccinia virus
accagaagguguuguaacuu

SEQ ID NO: 3278570 - RNA, 21 nt, Vaccinia virus
uucauauuuuaccaacucuuu

SEQ ID NO: 3278571 - RNA, 12 nt, Vaccinia virus
aauuaguuuauu

SEQ ID NO: 3278572 - RNA, 22 nt, Vaccinia virus
uacuagacugacuucuaacaaa

SEQ ID NO: 3278573 - RNA, 16 nt, Vaccinia virus
cauuaaucuauuagaa

SEQ ID NO: 3278574 - RNA, 22 nt, Vaccinia virus
acguaucucgucguccaauauu

SEQ ID NO: 3278575 - RNA, 20 nt, Vaccinia virus
agaacaugugugaaaauauu

SEQ ID NO: 3278576 - RNA, 19 nt, Vaccinia virus
aucauuuaaacauuuaacu

SEQ ID NO: 3278577 - RNA, 12 nt, Vaccinia virus
ggagaauguuuc

SEQ ID NO: 3278578 - RNA, 19 nt, Vaccinia virus
auaugaccgauaagagacg

SEQ ID NO: 3278579 - RNA, 15 nt, Vaccinia virus
uagaucaucugaaaa

SEQ ID NO: 3278580 - RNA, 19 nt, Vaccinia virus
uaucuauaucauccaugua

SEQ ID NO: 3278581 - RNA, 13 nt, Vaccinia virus
aagaauugugcau

SEQ ID NO: 3278582 - RNA, 12 nt, Vaccinia virus
auagaagauuac

SEQ ID NO: 3278583 - RNA, 22 nt, Vaccinia virus
uuucugguguaauauucuaguu

SEQ ID NO: 3278584 - RNA, 15 nt, Vaccinia virus
aacuuucaucuaaua

SEQ ID NO: 3278585 - RNA, 21 nt, Vaccinia virus
ugucuaauaauagcguuuucu

SEQ ID NO: 3278586 - RNA, 21 nt, Vaccinia virus
cuucagaaaagucaaauauug

SEQ ID NO: 3278587 - RNA, 18 nt, Vaccinia virus
cucaucguauaaaacucu

SEQ ID NO: 3278588 - RNA, 20 nt, Vaccinia virus
uuauccguauuuccauaaua

SEQ ID NO: 3278589 - RNA, 22 nt, Vaccinia virus
gauaauaucuauauaugaucua

SEQ ID NO: 3278590 - RNA, 22 nt, Vaccinia virus
ccuuguccaaugugaauugaau

SEQ ID NO: 3278591 - RNA, 14 nt, Vaccinia virus
ggauacucuauuaa

SEQ ID NO: 3278592 - RNA, 16 nt, Vaccinia virus
auaggaucuauaaugu

SEQ ID NO: 3278593 - RNA, 19 nt, Vaccinia virus
aagauaguugucaguucau

SEQ ID NO: 3278594 - RNA, 19 nt, Vaccinia virus
uauaaccaccgauaaaucu

SEQ ID NO: 3278595 - RNA, 13 nt, Vaccinia virus
gugcuguaacauu

SEQ ID NO: 3278596 - RNA, 14 nt, Vaccinia virus
acuaauaaacauuc

SEQ ID NO: 3278597 - RNA, 15 nt, Vaccinia virus
uaguaauuaaugaaa

SEQ ID NO: 3278598 - RNA, 15 nt, Vaccinia virus
aaauaaguaguuaug

SEQ ID NO: 3278599 - RNA, 16 nt, Vaccinia virus
acaccuaauacucugg

SEQ ID NO: 3278600 - RNA, 17 nt, Vaccinia virus
auguuugucauauguau

SEQ ID NO: 3278601 - RNA, 22 nt, Vaccinia virus
aaucaggguuaucaaaguguuu

SEQ ID NO: 3278602 - RNA, 15 nt, Vaccinia virus
gacauagauauucua

SEQ ID NO: 3278603 - RNA, 18 nt, Vaccinia virus
uacuuuuugcguauacau

SEQ ID NO: 3278604 - RNA, 16 nt, Vaccinia virus
aaaguauacauguuag

SEQ ID NO: 3278605 - RNA, 20 nt, Vaccinia virus
uuuagcaaggucccuaauau

SEQ ID NO: 3278606 - RNA, 17 nt, Vaccinia virus
aguugaagauucuaaug

SEQ ID NO: 3278607 - RNA, 21 nt, Vaccinia virus
uaccccucauaguauuaauau

SEQ ID NO: 3278608 - RNA, 22 nt, Vaccinia virus
aaaucauuaacggauagcaaaa

SEQ ID NO: 3278609 - RNA, 19 nt, Vaccinia virus
cgguuugcaaaacaaaaau

SEQ ID NO: 3278610 - RNA, 15 nt, Vaccinia virus
auuaucggaaauacu

SEQ ID NO: 3278611 - RNA, 22 nt, Vaccinia virus
ugaagcugguaaaguaaaucau

SEQ ID NO: 3278612 - RNA, 16 nt, Vaccinia virus
ucacuguuguacauac

SEQ ID NO: 3278613 - RNA, 17 nt, Vaccinia virus
aacacugauucagaaau

SEQ ID NO: 3278614 - RNA, 11 nt, Vaccinia virus
aagaagagaau

SEQ ID NO: 3278615 - RNA, 21 nt, Vaccinia virus
aagauuaaaucauuaaaugau

SEQ ID NO: 3278616 - RNA, 21 nt, Vaccinia virus
uuauaauagguguaaaucuag

SEQ ID NO: 3278617 - RNA, 13 nt, Vaccinia virus
gugauuuuccaac

SEQ ID NO: 3278618 - RNA, 15 nt, Vaccinia virus
ucaacaaucguuaau

SEQ ID NO: 3278619 - RNA, 18 nt, Vaccinia virus
auaguuuuuuucauuacu

SEQ ID NO: 3278620 - RNA, 22 nt, Vaccinia virus
uaaaauauacucgacaacuuua

SEQ ID NO: 3278621 - RNA, 17 nt, Vaccinia virus
uggaagguuuguauucu

SEQ ID NO: 3278622 - RNA, 18 nt, Vaccinia virus
acaguaaccaaaaugaaa

SEQ ID NO: 3278623 - RNA, 16 nt, Vaccinia virus
auucagaguuguuguu

SEQ ID NO: 3278624 - RNA, 15 nt, Vaccinia virus
acaaugcuuuaauaa

SEQ ID NO: 3278625 - RNA, 14 nt, Vaccinia virus
aaccauucauuaau

SEQ ID NO: 3278626 - RNA, 20 nt, Vaccinia virus
ucuuuggcucuucuaucaac

SEQ ID NO: 3278627 - RNA, 22 nt, Vaccinia virus
cauauaugguauugguccauua

SEQ ID NO: 3278628 - RNA, 14 nt, Vaccinia virus
cucauuaaaaauuu

SEQ ID NO: 3278629 - RNA, 20 nt, Vaccinia virus
ugacucauggauucauuaau

SEQ ID NO: 3278630 - RNA, 16 nt, Vaccinia virus
auuuuuuuaguaaugu

SEQ ID NO: 3278631 - RNA, 19 nt, Vaccinia virus
cgauauagugaaacaaaau

SEQ ID NO: 3278632 - RNA, 13 nt, Vaccinia virus
guugguagauauu

SEQ ID NO: 3278633 - RNA, 21 nt, Vaccinia virus
ucuagaauucauuagacguag

SEQ ID NO: 3278634 - RNA, 13 nt, Vaccinia virus
auuuauaaaaaug

SEQ ID NO: 3278635 - RNA, 13 nt, Vaccinia virus
cuuaguauacaaa

SEQ ID NO: 3278636 - RNA, 16 nt, Vaccinia virus
acuagcuuaaacagau

SEQ ID NO: 3278637 - RNA, 22 nt, Vaccinia virus
guuaucaucguauaaauuaaag

SEQ ID NO: 3278638 - RNA, 13 nt, Vaccinia virus
gaagagguuauau

SEQ ID NO: 3278639 - RNA, 15 nt, Vaccinia virus
ucaugauuucauuau

SEQ ID NO: 3278640 - RNA, 22 nt, Vaccinia virus
uuauuuuaggaucauauuuaca

SEQ ID NO: 3278641 - RNA, 14 nt, Vaccinia virus
aucaacagaaauau

SEQ ID NO: 3278642 - RNA, 23 nt, Vaccinia virus
gagagacccugcgcuuucucuau

SEQ ID NO: 3278643 - RNA, 16 nt, Vaccinia virus
uauaucuaacaucuug

SEQ ID NO: 3278644 - RNA, 17 nt, Vaccinia virus
gagaauaaaaauguuuu

SEQ ID NO: 3278645 - RNA, 18 nt, Vaccinia virus
acuguauccucaaacauc

SEQ ID NO: 3278646 - RNA, 13 nt, Vaccinia virus
cauagcuauuuua

SEQ ID NO: 3278647 - RNA, 22 nt, Vaccinia virus
ucuuuacaguuucuguaaugau

SEQ ID NO: 3278648 - RNA, 16 nt, Vaccinia virus
cguaugccuguuuaua

SEQ ID NO: 3278649 - RNA, 20 nt, Vaccinia virus
uauuggaaaggcguuaucua

SEQ ID NO: 3278650 - RNA, 14 nt, Vaccinia virus
accaauaaacuauu

SEQ ID NO: 3278651 - RNA, 20 nt, Vaccinia virus
uacuacagaaacuaauauag

SEQ ID NO: 3278652 - RNA, 13 nt, Vaccinia virus
uccuuaucaaaau

SEQ ID NO: 3278653 - RNA, 21 nt, Vaccinia virus
acuuuugaacuaaaauacaau

SEQ ID NO: 3278654 - RNA, 20 nt, Vaccinia virus
caacguaguaucaucuucua

SEQ ID NO: 3278655 - RNA, 17 nt, Vaccinia virus
aucuucauaauaaauaa

SEQ ID NO: 3278656 - RNA, 17 nt, Vaccinia virus
aacgucguauguagaaa

SEQ ID NO: 3278657 - RNA, 18 nt, Vaccinia virus
acagacacgaauaugacu

SEQ ID NO: 3278658 - RNA, 13 nt, Vaccinia virus
gagagagaaauac

SEQ ID NO: 3278659 - RNA, 13 nt, Vaccinia virus
aaacauaugccau

SEQ ID NO: 3278660 - RNA, 17 nt, Vaccinia virus
guuuucuacaauaacua

SEQ ID NO: 3278661 - RNA, 15 nt, Vaccinia virus
aauaauucagauaau

SEQ ID NO: 3278662 - RNA, 19 nt, Vaccinia virus
auuguaugguuuuaaauau

SEQ ID NO: 3278663 - RNA, 17 nt, Vaccinia virus
cagucuccaguuaauau

SEQ ID NO: 3278664 - RNA, 14 nt, Vaccinia virus
gcauauauuagaaa

SEQ ID NO: 3278665 - RNA, 16 nt, Vaccinia virus
cugaauauauugauuu

SEQ ID NO: 3278666 - RNA, 19 nt, Vaccinia virus
gucucgcauguucagcaau

SEQ ID NO: 3278667 - RNA, 23 nt, Vaccinia virus
ucaacguaacuauauuccaaauu

SEQ ID NO: 3278668 - RNA, 16 nt, Vaccinia virus
acucgagucauuuuac

SEQ ID NO: 3278669 - RNA, 11 nt, Vaccinia virus
caauuaaaugu

SEQ ID NO: 3278670 - RNA, 23 nt, Vaccinia virus
auguguuuaauuuucacaaguau

SEQ ID NO: 3278671 - RNA, 18 nt, Vaccinia virus
uucacaauaucaguaucu

SEQ ID NO: 3278672 - RNA, 19 nt, Vaccinia virus
cuauauaauucuauuagau

SEQ ID NO: 3278673 - RNA, 14 nt, Vaccinia virus
cagauaauaacaga

SEQ ID NO: 3278674 - RNA, 22 nt, Vaccinia virus
cauuuaucgcuaacaugcauuu

SEQ ID NO: 3278675 - RNA, 12 nt, Vaccinia virus
agaaaaaaaugg

SEQ ID NO: 3278676 - RNA, 15 nt, Vaccinia virus
uuaacuaucuguaaa

SEQ ID NO: 3278677 - RNA, 14 nt, Vaccinia virus
uuuauauuaaauau

SEQ ID NO: 3278678 - RNA, 21 nt, Vaccinia virus
uguuaacugacaauugcaaaa

SEQ ID NO: 3278679 - RNA, 19 nt, Vaccinia virus
auaucgccuuuauuuccac

SEQ ID NO: 3278680 - RNA, 17 nt, Vaccinia virus
aguaugcuaaacuuuau

SEQ ID NO: 3278681 - RNA, 20 nt, Vaccinia virus
aaaauuuuuuagauguagua

SEQ ID NO: 3278682 - RNA, 20 nt, Vaccinia virus
aacauggggauugaaaauag

SEQ ID NO: 3278683 - RNA, 12 nt, Vaccinia virus
aauauacucuau

SEQ ID NO: 3278684 - RNA, 21 nt, Vaccinia virus
uauacuauauaguaauaccaa

SEQ ID NO: 3278685 - RNA, 19 nt, Vaccinia virus
aaaauauaaugauauacaa

SEQ ID NO: 3278686 - RNA, 14 nt, Vaccinia virus
aaaugauuuuggaa

SEQ ID NO: 3278687 - RNA, 15 nt, Vaccinia virus
caagauauauacacu

SEQ ID NO: 3278688 - RNA, 14 nt, Vaccinia virus
uauuacguuagcau

SEQ ID NO: 3278689 - RNA, 20 nt, Vaccinia virus
uuaaauuauccgcacaugca

SEQ ID NO: 3278690 - RNA, 17 nt, Vaccinia virus
gaaaaaaaauuaucuau

SEQ ID NO: 3278691 - RNA, 18 nt, Vaccinia virus
auucugcaauaucuucgu

SEQ ID NO: 3278692 - RNA, 19 nt, Vaccinia virus
uaacaaaauccaaacauua

SEQ ID NO: 3278693 - RNA, 13 nt, Vaccinia virus
auaaauaaugaau

SEQ ID NO: 3278694 - RNA, 16 nt, Vaccinia virus
auaaugaguuagauua

SEQ ID NO: 3278695 - RNA, 20 nt, Vaccinia virus
guuauucuguucuauucaaa

SEQ ID NO: 3278696 - RNA, 16 nt, Vaccinia virus
auagaggauauuucau

SEQ ID NO: 3278697 - RNA, 19 nt, Vaccinia virus
uacacauaguguuacaaaa

SEQ ID NO: 3278698 - RNA, 22 nt, Vaccinia virus
aacauuaaaauguccacagaua

SEQ ID NO: 3278699 - RNA, 20 nt, Vaccinia virus
aaauuuuuuuuacaaacauc

SEQ ID NO: 3278700 - RNA, 17 nt, Vaccinia virus
uauagaucaaacaacac

SEQ ID NO: 3278701 - RNA, 18 nt, Vaccinia virus
agaaucauacaaugaauu

SEQ ID NO: 3278702 - RNA, 21 nt, Vaccinia virus
ucagauuauucuuaaaugccu

SEQ ID NO: 3278703 - RNA, 14 nt, Vaccinia virus
cauaaguauguuug

SEQ ID NO: 3278704 - RNA, 16 nt, Vaccinia virus
auauauaguauuaaug

SEQ ID NO: 3278705 - RNA, 22 nt, Vaccinia virus
uaaauauuuuucuaccuuuuca

SEQ ID NO: 3278706 - RNA, 15 nt, Vaccinia virus
aucugacauaaacau

SEQ ID NO: 3278707 - RNA, 21 nt, Vaccinia virus
acaaaagguauuacaagaaua

SEQ ID NO: 3278708 - RNA, 22 nt, Vaccinia virus
uguauagaggucagauacuggu

SEQ ID NO: 3278709 - RNA, 14 nt, Vaccinia virus
ucaucaucaaaaga

SEQ ID NO: 3278710 - RNA, 22 nt, Vaccinia virus
ucagguucaucgaucucuauaa

SEQ ID NO: 3278711 - RNA, 22 nt, Vaccinia virus
ugcucgacaguguauacuauuu

SEQ ID NO: 3278712 - RNA, 22 nt, Vaccinia virus
acuucuccuuauugauugaaaa

SEQ ID NO: 3278713 - RNA, 15 nt, Vaccinia virus
caccuccuauaucaa

SEQ ID NO: 3278714 - RNA, 19 nt, Vaccinia virus
cuguagaaugcgaaggaag

SEQ ID NO: 3278715 - RNA, 15 nt, Vaccinia virus
agaaacuuaguacua

SEQ ID NO: 3278716 - RNA, 17 nt, Vaccinia virus
uuagucaaucuuauuca

SEQ ID NO: 3278717 - RNA, 12 nt, Vaccinia virus
aauguucaauau

SEQ ID NO: 3278718 - RNA, 13 nt, Vaccinia virus
uauauguauguaa

SEQ ID NO: 3278719 - RNA, 21 nt, Vaccinia virus
aaauuuuacaaaucuauaaca

SEQ ID NO: 3278720 - RNA, 19 nt, Vaccinia virus
cuucuaaucuuguaauauu

SEQ ID NO: 3278721 - RNA, 22 nt, Vaccinia virus
auaagacuuuacuuuucuaaau

SEQ ID NO: 3278722 - RNA, 17 nt, Vaccinia virus
aucauugggaaacauua

SEQ ID NO: 3278723 - RNA, 18 nt, Vaccinia virus
aaaauggugcuauuagaa

SEQ ID NO: 3278724 - RNA, 19 nt, Vaccinia virus
gcgacaguaugugguacau

SEQ ID NO: 3278725 - RNA, 21 nt, Vaccinia virus
gaaugucauuuguauuuuaua

SEQ ID NO: 3278726 - RNA, 13 nt, Vaccinia virus
accaauaaacuau

SEQ ID NO: 3278727 - RNA, 13 nt, Vaccinia virus
uauaguuaacauu

SEQ ID NO: 3278728 - RNA, 18 nt, Vaccinia virus
auucauauuuuaguuuuu

SEQ ID NO: 3278729 - RNA, 16 nt, Vaccinia virus
aucuaugguauuaaga

SEQ ID NO: 3278730 - RNA, 15 nt, Vaccinia virus
caacaacauauaauu

SEQ ID NO: 3278731 - RNA, 15 nt, Vaccinia virus
uaaaauacuacuguu

SEQ ID NO: 3278732 - RNA, 13 nt, Vaccinia virus
acauguaauacau

SEQ ID NO: 3278733 - RNA, 13 nt, Vaccinia virus
aucaugaaaugau

SEQ ID NO: 3278734 - RNA, 13 nt, Vaccinia virus
aacauguuaaaau

SEQ ID NO: 3278735 - RNA, 13 nt, Vaccinia virus
aaaaaagcaaugu

SEQ ID NO: 3278736 - RNA, 19 nt, Vaccinia virus
agcauauuguaauaucuua

SEQ ID NO: 3278737 - RNA, 19 nt, Vaccinia virus
cauuuaaaguuacaaacaa

SEQ ID NO: 3278738 - RNA, 18 nt, Vaccinia virus
uuucgcaucguauuuuaa

SEQ ID NO: 3278739 - RNA, 22 nt, Vaccinia virus
gaagagacgccucguuccaagu

SEQ ID NO: 3278740 - RNA, 21 nt, Vaccinia virus
uuacuaaaauaucgauguuua

SEQ ID NO: 3278741 - RNA, 20 nt, Vaccinia virus
uuaacaucuuuuuauaucug

SEQ ID NO: 3278742 - RNA, 15 nt, Vaccinia virus
auaacaggaguuuuc

SEQ ID NO: 3278743 - RNA, 17 nt, Vaccinia virus
aguagauacauaucaau

SEQ ID NO: 3278744 - RNA, 16 nt, Vaccinia virus
auaaacugaucacuaa

SEQ ID NO: 3278745 - RNA, 16 nt, Vaccinia virus
agacacuaacucuguu

SEQ ID NO: 3278746 - RNA, 13 nt, Vaccinia virus
augaagaaugccu

SEQ ID NO: 3278747 - RNA, 19 nt, Vaccinia virus
augauaucuucacguagau

SEQ ID NO: 3278748 - RNA, 21 nt, Vaccinia virus
uuuggaaacauaaaauaacuc

SEQ ID NO: 3278749 - RNA, 20 nt, Vaccinia virus
aucaacagauagcuugaaug

SEQ ID NO: 3278750 - RNA, 15 nt, Vaccinia virus
aaaaguacagaauua

SEQ ID NO: 3278751 - RNA, 13 nt, Vaccinia virus
uaagacugucaau

SEQ ID NO: 3278752 - RNA, 17 nt, Vaccinia virus
guaucugaaguacuauu

SEQ ID NO: 3278753 - RNA, 14 nt, Vaccinia virus
aauucgauaucuuu

SEQ ID NO: 3278754 - RNA, 19 nt, Vaccinia virus
cucugacauucagaaagag

SEQ ID NO: 3278755 - RNA, 16 nt, Vaccinia virus
uacgcaauguuacaca

SEQ ID NO: 3278756 - RNA, 20 nt, Vaccinia virus
aaguaauuauaguauaaugu

SEQ ID NO: 3278757 - RNA, 20 nt, Vaccinia virus
cugucuauaaugacaauaaa

SEQ ID NO: 3278758 - RNA, 13 nt, Vaccinia virus
acuuuuucauaau

SEQ ID NO: 3278759 - RNA, 13 nt, Vaccinia virus
ucuuauucuuaaa

SEQ ID NO: 3278760 - RNA, 22 nt, Vaccinia virus
auagaugaacaaggaaauccua

SEQ ID NO: 3278761 - RNA, 15 nt, Vaccinia virus
agaaucguaauggau

SEQ ID NO: 3278762 - RNA, 16 nt, Vaccinia virus
agucgaacaaucuuaa

SEQ ID NO: 3278763 - RNA, 14 nt, Vaccinia virus
agcuuccagauaca

SEQ ID NO: 3278764 - RNA, 13 nt, Vaccinia virus
aucgaucauaucu

SEQ ID NO: 3278765 - RNA, 17 nt, Vaccinia virus
gaagauuaccucuaguu

SEQ ID NO: 3278766 - RNA, 19 nt, Vaccinia virus
agauauuuagcaauugcau

SEQ ID NO: 3278767 - RNA, 20 nt, Vaccinia virus
aaacuuauacauccuguucu

SEQ ID NO: 3278768 - RNA, 19 nt, Vaccinia virus
aguucuuacacauaucacu

SEQ ID NO: 3278769 - RNA, 17 nt, Vaccinia virus
aguaacgagucucaguu

SEQ ID NO: 3278770 - RNA, 15 nt, Vaccinia virus
uaacagcuuccguaa

SEQ ID NO: 3278771 - RNA, 21 nt, Vaccinia virus
aucgauaauugucucauaugu

SEQ ID NO: 3278772 - RNA, 19 nt, Vaccinia virus
aauaguuuguuuuggaaau

SEQ ID NO: 3278773 - RNA, 19 nt, Vaccinia virus
aaugaucauccagauaaua

SEQ ID NO: 3278774 - RNA, 15 nt, Vaccinia virus
guuuguauaauaucu

SEQ ID NO: 3278775 - RNA, 15 nt, Vaccinia virus
aaaaaucgauuuuau

SEQ ID NO: 3278776 - RNA, 22 nt, Vaccinia virus
uauaaauaugagcauuaguauu

SEQ ID NO: 3278777 - RNA, 20 nt, Vaccinia virus
uuaccagcauuaguaacagc

SEQ ID NO: 3278778 - RNA, 16 nt, Vaccinia virus
auaagaaauauauacu

SEQ ID NO: 3278779 - RNA, 20 nt, Vaccinia virus
uaguaauuuuuuaucauaaa

SEQ ID NO: 3278780 - RNA, 17 nt, Vaccinia virus
uagcgaacauauaucug

SEQ ID NO: 3278781 - RNA, 16 nt, Vaccinia virus
cacguaccagcauuug

SEQ ID NO: 3278782 - RNA, 17 nt, Vaccinia virus
caauuauaauauacgau

SEQ ID NO: 3278783 - RNA, 22 nt, Vaccinia virus
gaacgauauuugugaaaaauau

SEQ ID NO: 3278784 - RNA, 17 nt, Vaccinia virus
auuaaaaaauaacuuaa

SEQ ID NO: 3278785 - RNA, 15 nt, Vaccinia virus
auuaugauagaaauu

SEQ ID NO: 3278786 - RNA, 12 nt, Vaccinia virus
uagucacaauca

SEQ ID NO: 3278787 - RNA, 20 nt, Vaccinia virus
uuugucuccuucuccguaaa

SEQ ID NO: 3278788 - RNA, 23 nt, Vaccinia virus
cuaaagggauuuuauaugauauc

SEQ ID NO: 3278789 - RNA, 20 nt, Vaccinia virus
gauauaauauauuagauauu

SEQ ID NO: 3278790 - RNA, 19 nt, Vaccinia virus
uuacgacgugcuaaucuag

SEQ ID NO: 3278791 - RNA, 20 nt, Vaccinia virus
aggauaugauaaaaaauaua

SEQ ID NO: 3278792 - RNA, 18 nt, Vaccinia virus
cuuuuaauucuuaucaau

SEQ ID NO: 3278793 - RNA, 19 nt, Vaccinia virus
agauaucuucuuuuuucca

SEQ ID NO: 3278794 - RNA, 14 nt, Vaccinia virus
auacgagucauuau

SEQ ID NO: 3278795 - RNA, 16 nt, Vaccinia virus
agaauaagaacuauaa

SEQ ID NO: 3278796 - RNA, 16 nt, Vaccinia virus
aaguacuugauacaua

SEQ ID NO: 3278797 - RNA, 15 nt, Vaccinia virus
caacaaguauacaau

SEQ ID NO: 3278798 - RNA, 16 nt, Vaccinia virus
uaauacauuuugaacu

SEQ ID NO: 3278799 - RNA, 18 nt, Vaccinia virus
guaaaagaucuauaaugu

SEQ ID NO: 3278800 - RNA, 17 nt, Vaccinia virus
gucucucauaauaaauu

SEQ ID NO: 3278801 - RNA, 20 nt, Vaccinia virus
augugauggaaaaaugacua

SEQ ID NO: 3278802 - RNA, 13 nt, Vaccinia virus
ugaaucaucuguu

SEQ ID NO: 3278803 - RNA, 17 nt, Vaccinia virus
agauauaguauauucca

SEQ ID NO: 3278804 - RNA, 22 nt, Vaccinia virus
auacacgauuuaauccaucugu

SEQ ID NO: 3278805 - RNA, 18 nt, Vaccinia virus
cugaugcauguauuugcu

SEQ ID NO: 3278806 - RNA, 16 nt, Vaccinia virus
augauuucagauacua

SEQ ID NO: 3278807 - RNA, 12 nt, Vaccinia virus
agucauacuaga

SEQ ID NO: 3278808 - RNA, 14 nt, Vaccinia virus
aaauguguaauaau

SEQ ID NO: 3278809 - RNA, 14 nt, Vaccinia virus
caaacauccucuau

SEQ ID NO: 3278810 - RNA, 19 nt, Vaccinia virus
aacauuguuuguauucucc

SEQ ID NO: 3278811 - RNA, 16 nt, Vaccinia virus
gguugccaaauuuauu

SEQ ID NO: 3278812 - RNA, 19 nt, Vaccinia virus
uuaaaauauauucuaauau

SEQ ID NO: 3278813 - RNA, 22 nt, Vaccinia virus
acaaugaugcggaagaacaauu

SEQ ID NO: 3278814 - RNA, 16 nt, Vaccinia virus
acaagaaauauuucca

SEQ ID NO: 3278815 - RNA, 17 nt, Vaccinia virus
uacaaauuuuaagaaau

SEQ ID NO: 3278816 - RNA, 18 nt, Vaccinia virus
cuaaugcggaaugucaac

SEQ ID NO: 3278817 - RNA, 12 nt, Vaccinia virus
auucauuuccau

SEQ ID NO: 3278818 - RNA, 14 nt, Vaccinia virus
aucgacgucaaaga

SEQ ID NO: 3278819 - RNA, 22 nt, Vaccinia virus
aaaaguuguagaacguaaauua

SEQ ID NO: 3278820 - RNA, 15 nt, Vaccinia virus
cucuauaaaauacua

SEQ ID NO: 3278821 - RNA, 20 nt, Vaccinia virus
acucuuggucuaauacugau

SEQ ID NO: 3278822 - RNA, 16 nt, Vaccinia virus
uaaaauaaucucuuag

SEQ ID NO: 3278823 - RNA, 21 nt, Vaccinia virus
auuccuuuucguaggcacaca

SEQ ID NO: 3278824 - RNA, 20 nt, Vaccinia virus
auugaucuauuauuuaauga

SEQ ID NO: 3278825 - RNA, 18 nt, Vaccinia virus
augaggucgcaaaaaaac

SEQ ID NO: 3278826 - RNA, 17 nt, Vaccinia virus
ucaaagucacaaagcaa

SEQ ID NO: 3278827 - RNA, 22 nt, Vaccinia virus
ggaugucaucaauguagaaaau

SEQ ID NO: 3278828 - RNA, 23 nt, Vaccinia virus
uucuauaagguuucuuaaucagu

SEQ ID NO: 3278829 - RNA, 18 nt, Vaccinia virus
aaacaugaugagauguuu

SEQ ID NO: 3278830 - RNA, 20 nt, Vaccinia virus
aguuguauacuaucagaauc

SEQ ID NO: 3278831 - RNA, 16 nt, Vaccinia virus
ucagcggcaucuaaau

SEQ ID NO: 3278832 - RNA, 21 nt, Vaccinia virus
auacuguagaugguucuuuaa

SEQ ID NO: 3278833 - RNA, 17 nt, Vaccinia virus
auuucgaauacgauaau

SEQ ID NO: 3278834 - RNA, 19 nt, Vaccinia virus
agagccuguaacaucucaa

SEQ ID NO: 3278835 - RNA, 15 nt, Vaccinia virus
gacuggaguguauau

SEQ ID NO: 3278836 - RNA, 13 nt, Vaccinia virus
uaagacuuauucu

SEQ ID NO: 3278837 - RNA, 18 nt, Vaccinia virus
acacaguagaaaauaaua

SEQ ID NO: 3278838 - RNA, 16 nt, Vaccinia virus
aguauaugaacaaacg

SEQ ID NO: 3278839 - RNA, 16 nt, Vaccinia virus
auaauucuauucuagu

SEQ ID NO: 3278840 - RNA, 21 nt, Vaccinia virus
uccgcugccaaguuccuauua

SEQ ID NO: 3278841 - RNA, 15 nt, Vaccinia virus
gaaauugcaaaauau

SEQ ID NO: 3278842 - RNA, 14 nt, Vaccinia virus
acgucaaacaaugu

SEQ ID NO: 3278843 - RNA, 18 nt, Vaccinia virus
auacagacaauugacaaa

SEQ ID NO: 3278844 - RNA, 15 nt, Vaccinia virus
cugaaccuacuuuau

SEQ ID NO: 3278845 - RNA, 23 nt, Vaccinia virus
uaaacauuaucgagcaagcauug

SEQ ID NO: 3278846 - RNA, 22 nt, Vaccinia virus
uguuacaacuuuaccaaaauua

SEQ ID NO: 3278847 - RNA, 21 nt, Vaccinia virus
gaaggauuggucuuaaaagau

SEQ ID NO: 3278848 - RNA, 20 nt, Vaccinia virus
aacauguuacuauagcauua

SEQ ID NO: 3278849 - RNA, 15 nt, Vaccinia virus
uauacggauuucuau

SEQ ID NO: 3278850 - RNA, 15 nt, Vaccinia virus
aauuaggagaacuua

SEQ ID NO: 3278851 - RNA, 20 nt, Vaccinia virus
gaauuagucgucgaauauau

SEQ ID NO: 3278852 - RNA, 13 nt, Vaccinia virus
cuuguauuuugau

SEQ ID NO: 3278853 - RNA, 15 nt, Vaccinia virus
agaugaaauagcguu

SEQ ID NO: 3278854 - RNA, 14 nt, Vaccinia virus
auauaguuaaaggu

SEQ ID NO: 3278855 - RNA, 22 nt, Vaccinia virus
agaaauauauacuucaauugau

SEQ ID NO: 3278856 - RNA, 16 nt, Vaccinia virus
acaauaaaaaaaauug

SEQ ID NO: 3278857 - RNA, 22 nt, Vaccinia virus
gcaaaaaaucugauagaaagaa

SEQ ID NO: 3278858 - RNA, 20 nt, Vaccinia virus
auuaaacuaauucauuuuca

SEQ ID NO: 3278859 - RNA, 14 nt, Vaccinia virus
ucguguuaaauuuu

SEQ ID NO: 3278860 - RNA, 16 nt, Vaccinia virus
guuauugguauuucuu

SEQ ID NO: 3278861 - RNA, 20 nt, Vaccinia virus
uucgaauauaucaaaaucau

SEQ ID NO: 3278862 - RNA, 23 nt, Vaccinia virus
ccaaauuuuuuuuacaaacauca

SEQ ID NO: 3278863 - RNA, 14 nt, Vaccinia virus
aauaucuuauucca

SEQ ID NO: 3278864 - RNA, 12 nt, Vaccinia virus
acugaauuauua

SEQ ID NO: 3278865 - RNA, 15 nt, Vaccinia virus
auaacgucuucuaug

SEQ ID NO: 3278866 - RNA, 21 nt, Vaccinia virus
aggaauuacauagaugauauu

SEQ ID NO: 3278867 - RNA, 17 nt, Vaccinia virus
ccaauaaacuauuucua

SEQ ID NO: 3278868 - RNA, 20 nt, Vaccinia virus
uucuacaaaagcaauuauua

SEQ ID NO: 3278869 - RNA, 15 nt, Vaccinia virus
gacaacaaaaaauga

SEQ ID NO: 3278870 - RNA, 22 nt, Vaccinia virus
auacucuucaaaguuucugaaa

SEQ ID NO: 3278871 - RNA, 16 nt, Vaccinia virus
uccgaaugaauguuuu

SEQ ID NO: 3278872 - RNA, 21 nt, Vaccinia virus
ucaaaauuguaacaacaaugu

SEQ ID NO: 3278873 - RNA, 14 nt, Vaccinia virus
aaguuuuacauaag

SEQ ID NO: 3278874 - RNA, 17 nt, Vaccinia virus
cuacucuagguaacaaa

SEQ ID NO: 3278875 - RNA, 16 nt, Vaccinia virus
aucuguacuucuguac

SEQ ID NO: 3278876 - RNA, 17 nt, Vaccinia virus
ucaaccaccgaugaugc

SEQ ID NO: 3278877 - RNA, 13 nt, Vaccinia virus
augauacacguau

SEQ ID NO: 3278878 - RNA, 22 nt, Vaccinia virus
ucuggaaaaacaacacaaugua

SEQ ID NO: 3278879 - RNA, 22 nt, Vaccinia virus
gaauuguacccaaaucugaaaa

SEQ ID NO: 3278880 - RNA, 13 nt, Vaccinia virus
uauuauacaugug

SEQ ID NO: 3278881 - RNA, 13 nt, Vaccinia virus
cgauauagaguau

SEQ ID NO: 3278882 - RNA, 15 nt, Vaccinia virus
uggcuauuucaaaau

SEQ ID NO: 3278883 - RNA, 14 nt, Vaccinia virus
aauacuuaaaaaug

SEQ ID NO: 3278884 - RNA, 21 nt, Vaccinia virus
uaaacccucgaucaugaaugg

SEQ ID NO: 3278885 - RNA, 13 nt, Vaccinia virus
uauuucuuacaua

SEQ ID NO: 3278886 - RNA, 16 nt, Vaccinia virus
aaaacauucaaauguu

SEQ ID NO: 3278887 - RNA, 20 nt, Vaccinia virus
ugacuguagaacucaugaau

SEQ ID NO: 3278888 - RNA, 14 nt, Vaccinia virus
guuagacauaaaaa

SEQ ID NO: 3278889 - RNA, 17 nt, Vaccinia virus
aguuaacacaugucaca

SEQ ID NO: 3278890 - RNA, 23 nt, Vaccinia virus
auauguguuuacaguaguaauga

SEQ ID NO: 3278891 - RNA, 17 nt, Vaccinia virus
uauauagauauuaucua

SEQ ID NO: 3278892 - RNA, 15 nt, Vaccinia virus
ugcucaaacaaaaug

SEQ ID NO: 3278893 - RNA, 19 nt, Vaccinia virus
uaacucuuucgaauacuua

SEQ ID NO: 3278894 - RNA, 20 nt, Vaccinia virus
aaaaaaggagcagacccuaa

SEQ ID NO: 3278895 - RNA, 17 nt, Vaccinia virus
aaaucaggaaaaaagau

SEQ ID NO: 3278896 - RNA, 16 nt, Vaccinia virus
agaguaguauauuguc

SEQ ID NO: 3278897 - RNA, 13 nt, Vaccinia virus
ucuucucaaaaga

SEQ ID NO: 3278898 - RNA, 23 nt, Vaccinia virus
uuaaacaauacucuauuauuaau

SEQ ID NO: 3278899 - RNA, 14 nt, Vaccinia virus
gaaaaaaguuuauu

SEQ ID NO: 3278900 - RNA, 22 nt, Vaccinia virus
uucuggaaguggauauacauag

SEQ ID NO: 3278901 - RNA, 14 nt, Vaccinia virus
aauaguuucauaau

SEQ ID NO: 3278902 - RNA, 16 nt, Vaccinia virus
cauucauguacuaaca

SEQ ID NO: 3278903 - RNA, 20 nt, Vaccinia virus
uugaguuugucgcauacuuu

SEQ ID NO: 3278904 - RNA, 17 nt, Vaccinia virus
uaacauaucguuucuuu

SEQ ID NO: 3278905 - RNA, 22 nt, Vaccinia virus
uuauuggugcuucguacauaag

SEQ ID NO: 3278906 - RNA, 20 nt, Vaccinia virus
aauaaaguauauauaaguua

SEQ ID NO: 3278907 - RNA, 21 nt, Vaccinia virus
gauaaugauacaguaccauca

SEQ ID NO: 3278908 - RNA, 23 nt, Vaccinia virus
auguagagguguauuuccuauau

SEQ ID NO: 3278909 - RNA, 18 nt, Vaccinia virus
ucaaaugguaaauacugu

SEQ ID NO: 3278910 - RNA, 21 nt, Vaccinia virus
gauggaaacauuguuauugau

SEQ ID NO: 3278911 - RNA, 20 nt, Vaccinia virus
augucauggaaacaaaugaa

SEQ ID NO: 3278912 - RNA, 15 nt, Vaccinia virus
auuuauauaugcauu

SEQ ID NO: 3278913 - RNA, 16 nt, Vaccinia virus
cauaauauuaaacacu

SEQ ID NO: 3278914 - RNA, 19 nt, Vaccinia virus
uuaccagaagguguuguaa

SEQ ID NO: 3278915 - RNA, 14 nt, Vaccinia virus
acgugcuguaccaa

SEQ ID NO: 3278916 - RNA, 16 nt, Vaccinia virus
gagaugagauaagaac

SEQ ID NO: 3278917 - RNA, 23 nt, Vaccinia virus
augcuauccaucagaauguuucc

SEQ ID NO: 3278918 - RNA, 22 nt, Vaccinia virus
aauauaacuugguauaaagaua

SEQ ID NO: 3278919 - RNA, 17 nt, Vaccinia virus
uuaacgaggacuuauuc

SEQ ID NO: 3278920 - RNA, 15 nt, Vaccinia virus
caaaacucaaauguu

SEQ ID NO: 3278921 - RNA, 18 nt, Vaccinia virus
aaaugauaucuuagaaua

SEQ ID NO: 3278922 - RNA, 15 nt, Vaccinia virus
ucucauauguuuuaa

SEQ ID NO: 3278923 - RNA, 17 nt, Vaccinia virus
ucaucuacucauagaaa

SEQ ID NO: 3278924 - RNA, 13 nt, Vaccinia virus
aauugucuaauga

SEQ ID NO: 3278925 - RNA, 19 nt, Vaccinia virus
uaguaaaccgauaguguau

SEQ ID NO: 3278926 - RNA, 23 nt, Vaccinia virus
aaaaguuuuccaucuauguagaa

SEQ ID NO: 3278927 - RNA, 21 nt, Vaccinia virus
gaagcaacuaaacuaugugau

SEQ ID NO: 3278928 - RNA, 19 nt, Vaccinia virus
ugguuguugauggaucugu

SEQ ID NO: 3278929 - RNA, 22 nt, Vaccinia virus
aaugcgacgaguuaaaaagaua

SEQ ID NO: 3278930 - RNA, 15 nt, Vaccinia virus
acgauuuguuuaauu

SEQ ID NO: 3278931 - RNA, 16 nt, Vaccinia virus
ugcauuuuuauauaca

SEQ ID NO: 3278932 - RNA, 20 nt, Vaccinia virus
aguaucuuauguauauguuu

SEQ ID NO: 3278933 - RNA, 17 nt, Vaccinia virus
guagaaaauauauucua

SEQ ID NO: 3278934 - RNA, 16 nt, Vaccinia virus
guuuucuacaauaacu

SEQ ID NO: 3278935 - RNA, 16 nt, Vaccinia virus
uaauuugaguaagaau

SEQ ID NO: 3278936 - RNA, 13 nt, Vaccinia virus
uauaaaaaacuaa

SEQ ID NO: 3278937 - RNA, 20 nt, Vaccinia virus
uauaacuucugguaaauauu

SEQ ID NO: 3278938 - RNA, 19 nt, Vaccinia virus
uaggauuuuggacuuauau

SEQ ID NO: 3278939 - RNA, 20 nt, Vaccinia virus
agauuggguuaauaaauaca

SEQ ID NO: 3278940 - RNA, 17 nt, Vaccinia virus
gccgucuuuaucucuua

SEQ ID NO: 3278941 - RNA, 21 nt, Vaccinia virus
cguagagaaauaucuauaauu

SEQ ID NO: 3278942 - RNA, 22 nt, Vaccinia virus
ucuauagcgcuuuaguuccuua

SEQ ID NO: 3278943 - RNA, 15 nt, Vaccinia virus
aacauguuuagaaag

SEQ ID NO: 3278944 - RNA, 17 nt, Vaccinia virus
aucaucuguuuuaaaaa

SEQ ID NO: 3278945 - RNA, 17 nt, Vaccinia virus
uauaagacgauacuguu

SEQ ID NO: 3278946 - RNA, 19 nt, Vaccinia virus
gaaauggagagagacuguu

SEQ ID NO: 3278947 - RNA, 17 nt, Vaccinia virus
ucauccagaucauuaag

SEQ ID NO: 3278948 - RNA, 21 nt, Vaccinia virus
gccaagauaucuauauaauua

SEQ ID NO: 3278949 - RNA, 20 nt, Vaccinia virus
auaaucauuacuaacuuuau

SEQ ID NO: 3278950 - RNA, 16 nt, Vaccinia virus
acuccaauuaucuuua

SEQ ID NO: 3278951 - RNA, 20 nt, Vaccinia virus
aucauauucaucaucaauau

SEQ ID NO: 3278952 - RNA, 14 nt, Vaccinia virus
uuucagucauugau

SEQ ID NO: 3278953 - RNA, 16 nt, Vaccinia virus
gaaaguaaauaauaua

SEQ ID NO: 3278954 - RNA, 20 nt, Vaccinia virus
auuaaaaaauucgacaauga

SEQ ID NO: 3278955 - RNA, 15 nt, Vaccinia virus
uacuuucgguuucau

SEQ ID NO: 3278956 - RNA, 19 nt, Vaccinia virus
auaugaacagacauuguau

SEQ ID NO: 3278957 - RNA, 16 nt, Vaccinia virus
acgauuacuacauuau

SEQ ID NO: 3278958 - RNA, 20 nt, Vaccinia virus
ucacuauaagaaaucagaau

SEQ ID NO: 3278959 - RNA, 13 nt, Vaccinia virus
uuagauauucacg

SEQ ID NO: 3278960 - RNA, 22 nt, Vaccinia virus
aaccaguaucucuuaacgaugu

SEQ ID NO: 3278961 - RNA, 23 nt, Vaccinia virus
agcuaauauaaaaauauauuaau

SEQ ID NO: 3278962 - RNA, 20 nt, Vaccinia virus
cuaccacacuucuagauauc

SEQ ID NO: 3278963 - RNA, 20 nt, Vaccinia virus
cauaguuuguaucaauaaua

SEQ ID NO: 3278964 - RNA, 14 nt, Vaccinia virus
aacuguauaaaaug

SEQ ID NO: 3278965 - RNA, 13 nt, Vaccinia virus
aacuaauaaacau

SEQ ID NO: 3278966 - RNA, 13 nt, Vaccinia virus
agauauuaucuau

SEQ ID NO: 3278967 - RNA, 13 nt, Vaccinia virus
auguuucaaucau

SEQ ID NO: 3278968 - RNA, 10 nt, Vaccinia virus
uauuaucauc

SEQ ID NO: 3278969 - RNA, 15 nt, Vaccinia virus
ucaugaagagauguu

SEQ ID NO: 3278970 - RNA, 19 nt, Vaccinia virus
ggaaucgauuuuguaauau

SEQ ID NO: 3278971 - RNA, 20 nt, Vaccinia virus
acauuuauuaucaugaugac

SEQ ID NO: 3278972 - RNA, 20 nt, Vaccinia virus
aguuuggcaauuaaaaauua

SEQ ID NO: 3278973 - RNA, 18 nt, Vaccinia virus
cauccguuguuauauacc

SEQ ID NO: 3278974 - RNA, 15 nt, Vaccinia virus
uucuacuacuucauu

SEQ ID NO: 3278975 - RNA, 16 nt, Vaccinia virus
ugaugaguuagauauu

SEQ ID NO: 3278976 - RNA, 16 nt, Vaccinia virus
cucuaaguuaacacau

SEQ ID NO: 3278977 - RNA, 23 nt, Vaccinia virus
uuaaaucccaauucagaaaucaa

SEQ ID NO: 3278978 - RNA, 19 nt, Vaccinia virus
aguuucaucgauaaaggau

SEQ ID NO: 3278979 - RNA, 16 nt, Vaccinia virus
ucaacgucuaauguau

SEQ ID NO: 3278980 - RNA, 16 nt, Vaccinia virus
guauuucauuacccaa

SEQ ID NO: 3278981 - RNA, 13 nt, Vaccinia virus
aguuuauuagaca

SEQ ID NO: 3278982 - RNA, 22 nt, Vaccinia virus
cuuauuggucagaaauauugua

SEQ ID NO: 3278983 - RNA, 17 nt, Vaccinia virus
caaggaacuaaauagau

SEQ ID NO: 3278984 - RNA, 17 nt, Vaccinia virus
uagucauagaugaaaua

SEQ ID NO: 3278985 - RNA, 21 nt, Vaccinia virus
uagcauuguuauguauuucau

SEQ ID NO: 3278986 - RNA, 18 nt, Vaccinia virus
gaucaugcuguaaucaua

SEQ ID NO: 3278987 - RNA, 16 nt, Vaccinia virus
cugaaacaucacuaau

SEQ ID NO: 3278988 - RNA, 15 nt, Vaccinia virus
uaaaucuccuucaug

SEQ ID NO: 3278989 - RNA, 23 nt, Vaccinia virus
uaauccugaauauauugauuuuc

SEQ ID NO: 3278990 - RNA, 14 nt, Vaccinia virus
uuaacagauaaaaa

SEQ ID NO: 3278991 - RNA, 15 nt, Vaccinia virus
aacuuauccauuuau

SEQ ID NO: 3278992 - RNA, 11 nt, Vaccinia virus
auaaaaacaag

SEQ ID NO: 3278993 - RNA, 14 nt, Vaccinia virus
uaaaucauggauuu

SEQ ID NO: 3278994 - RNA, 16 nt, Vaccinia virus
aacgauuaaacaauau

SEQ ID NO: 3278995 - RNA, 16 nt, Vaccinia virus
ccacugucuaaaugua

SEQ ID NO: 3278996 - RNA, 22 nt, Vaccinia virus
gucuuauaugaagucuauacag

SEQ ID NO: 3278997 - RNA, 17 nt, Vaccinia virus
ugauaucuuuagauaua

SEQ ID NO: 3278998 - RNA, 16 nt, Vaccinia virus
cuccaaguucuauagu

SEQ ID NO: 3278999 - RNA, 21 nt, Vaccinia virus
cuagauaaaauacugaaucaa

SEQ ID NO: 3279000 - RNA, 16 nt, Vaccinia virus
aucuucauuaucugau

SEQ ID NO: 3279001 - RNA, 17 nt, Vaccinia virus
auuggucaaugugaaug

SEQ ID NO: 3279002 - RNA, 19 nt, Vaccinia virus
aauuguuuacuguauauac

SEQ ID NO: 3279003 - RNA, 22 nt, Vaccinia virus
agaagaaauacuaaaaaaugua

SEQ ID NO: 3279004 - RNA, 16 nt, Vaccinia virus
uaccgaacaggcauuu

SEQ ID NO: 3279005 - RNA, 17 nt, Vaccinia virus
gcaagaauuuauuucua

SEQ ID NO: 3279006 - RNA, 22 nt, Vaccinia virus
accuaucaaggaacaaauauug

SEQ ID NO: 3279007 - RNA, 20 nt, Vaccinia virus
auaucauuaaguucacuaga

SEQ ID NO: 3279008 - RNA, 19 nt, Vaccinia virus
uuuuuaaaaucauuauaua

SEQ ID NO: 3279009 - RNA, 21 nt, Vaccinia virus
aauguaugaacaucauggaau

SEQ ID NO: 3279010 - RNA, 15 nt, Vaccinia virus
gaaaauuagaaggau

SEQ ID NO: 3279011 - RNA, 15 nt, Vaccinia virus
auucgaauucaaaug

SEQ ID NO: 3279012 - RNA, 19 nt, Vaccinia virus
aacacgauuuaaaaucaaa

SEQ ID NO: 3279013 - RNA, 22 nt, Vaccinia virus
uuaaagcccauugaugcaaaua

SEQ ID NO: 3279014 - RNA, 19 nt, Vaccinia virus
gcaaucauuccucauaaga

SEQ ID NO: 3279015 - RNA, 19 nt, Vaccinia virus
cuucagacaacaucucaga

SEQ ID NO: 3279016 - RNA, 15 nt, Vaccinia virus
aaaaacgaggauauu

SEQ ID NO: 3279017 - RNA, 22 nt, Vaccinia virus
ggauacguccguccaagaauac

SEQ ID NO: 3279018 - RNA, 23 nt, Vaccinia virus
auaaagaugacgaugaaaaugau

SEQ ID NO: 3279019 - RNA, 15 nt, Vaccinia virus
caugucuacauuaua

SEQ ID NO: 3279020 - RNA, 15 nt, Vaccinia virus
auuucacaaauggau

SEQ ID NO: 3279021 - RNA, 21 nt, Vaccinia virus
acauuaauuccuuuuuaaauu

SEQ ID NO: 3279022 - RNA, 13 nt, Vaccinia virus
ucaacuacauaau

SEQ ID NO: 3279023 - RNA, 14 nt, Vaccinia virus
cuauagaaacaccu

SEQ ID NO: 3279024 - RNA, 12 nt, Vaccinia virus
agcauauguuua

SEQ ID NO: 3279025 - RNA, 16 nt, Vaccinia virus
aauguacauucgaaaa

SEQ ID NO: 3279026 - RNA, 20 nt, Vaccinia virus
uaaauguuuucucuguaaua

SEQ ID NO: 3279027 - RNA, 20 nt, Vaccinia virus
gaaaccacugucuaaaugua

SEQ ID NO: 3279028 - RNA, 21 nt, Vaccinia virus
ucaucauccucuggugguucg

SEQ ID NO: 3279029 - RNA, 20 nt, Vaccinia virus
ugauagugaaugaaucagau

SEQ ID NO: 3279030 - RNA, 13 nt, Vaccinia virus
uguucuacauauu

SEQ ID NO: 3279031 - RNA, 20 nt, Vaccinia virus
uauacauuacugaauuauua

SEQ ID NO: 3279032 - RNA, 13 nt, Vaccinia virus
acggcuauucugg

SEQ ID NO: 3279033 - RNA, 13 nt, Vaccinia virus
auguuuaucacac

SEQ ID NO: 3279034 - RNA, 15 nt, Vaccinia virus
ucaucuucuauauaa

SEQ ID NO: 3279035 - RNA, 19 nt, Vaccinia virus
agguguguuuuuuaccauu

SEQ ID NO: 3279036 - RNA, 16 nt, Vaccinia virus
auaaaaauuauguuuu

SEQ ID NO: 3279037 - RNA, 14 nt, Vaccinia virus
augauauaauuaau

SEQ ID NO: 3279038 - RNA, 13 nt, Vaccinia virus
ucauuaaacaucu

SEQ ID NO: 3279039 - RNA, 21 nt, Vaccinia virus
aauacauuucucaaaugaaua

SEQ ID NO: 3279040 - RNA, 12 nt, Vaccinia virus
agauuuagaaau

SEQ ID NO: 3279041 - RNA, 20 nt, Vaccinia virus
gagagcaugaaggagauuua

SEQ ID NO: 3279042 - RNA, 20 nt, Vaccinia virus
uggaggaauuuauagaugcu

SEQ ID NO: 3279043 - RNA, 15 nt, Vaccinia virus
acaccuauaagauua

SEQ ID NO: 3279044 - RNA, 17 nt, Vaccinia virus
aauauuuuaauagauua

SEQ ID NO: 3279045 - RNA, 13 nt, Vaccinia virus
auaucuagaauga

SEQ ID NO: 3279046 - RNA, 20 nt, Vaccinia virus
uuaucucaacaaaauucaga

SEQ ID NO: 3279047 - RNA, 21 nt, Vaccinia virus
auuacggcgaaauaaagaaaa

SEQ ID NO: 3279048 - RNA, 22 nt, Vaccinia virus
cccgagagaugcgauacaaaag

SEQ ID NO: 3279049 - RNA, 16 nt, Vaccinia virus
aauauuaaauaucugu

SEQ ID NO: 3279050 - RNA, 17 nt, Vaccinia virus
gaauaucugcaauauau

SEQ ID NO: 3279051 - RNA, 14 nt, Vaccinia virus
auagcuacaguaaa

SEQ ID NO: 3279052 - RNA, 12 nt, Vaccinia virus
aaaucuugugaa

SEQ ID NO: 3279053 - RNA, 20 nt, Vaccinia virus
agugcaggcuuaaagcaauu

SEQ ID NO: 3279054 - RNA, 22 nt, Vaccinia virus
gaacaucuugauuauaauauaa

SEQ ID NO: 3279055 - RNA, 19 nt, Vaccinia virus
aaacucuauuuuaaaauua

SEQ ID NO: 3279056 - RNA, 15 nt, Vaccinia virus
cuaccuuuucaauuu

SEQ ID NO: 3279057 - RNA, 19 nt, Vaccinia virus
uauuguuuagacuguuugu

SEQ ID NO: 3279058 - RNA, 15 nt, Vaccinia virus
agauugguacgaaau

SEQ ID NO: 3279059 - RNA, 22 nt, Vaccinia virus
gcuuccagauacagugauuuug

SEQ ID NO: 3279060 - RNA, 22 nt, Vaccinia virus
ucuacuaagcccaaaaccaaac

SEQ ID NO: 3279061 - RNA, 21 nt, Vaccinia virus
caucuauguagaauccaucag

SEQ ID NO: 3279062 - RNA, 15 nt, Vaccinia virus
augaaaaaaauacuu

SEQ ID NO: 3279063 - RNA, 14 nt, Vaccinia virus
uaucaguagaugca

SEQ ID NO: 3279064 - RNA, 17 nt, Vaccinia virus
aucuuagcgaacugaag

SEQ ID NO: 3279065 - RNA, 17 nt, Vaccinia virus
aucucagugcaaagauu

SEQ ID NO: 3279066 - RNA, 14 nt, Vaccinia virus
uugcaucuacauca

SEQ ID NO: 3279067 - RNA, 12 nt, Vaccinia virus
uucuuuauucuc

SEQ ID NO: 3279068 - RNA, 22 nt, Vaccinia virus
auaucuaguguuuuugugguau

SEQ ID NO: 3279069 - RNA, 20 nt, Vaccinia virus
auaaauauccuuggaauuga

SEQ ID NO: 3279070 - RNA, 21 nt, Vaccinia virus
accacaauaaaaaaaauugau

SEQ ID NO: 3279071 - RNA, 21 nt, Vaccinia virus
uaaaucauuccaucgauacau

SEQ ID NO: 3279072 - RNA, 13 nt, Vaccinia virus
uauugaguggaaa

SEQ ID NO: 3279073 - RNA, 14 nt, Vaccinia virus
augaauaaguacua

SEQ ID NO: 3279074 - RNA, 21 nt, Vaccinia virus
uuauacuucuccaacaucgau

SEQ ID NO: 3279075 - RNA, 22 nt, Vaccinia virus
uucuagaaguugauacaacaua

SEQ ID NO: 3279076 - RNA, 14 nt, Vaccinia virus
uaguaugguuucau

SEQ ID NO: 3279077 - RNA, 23 nt, Vaccinia virus
auaguaguacacagcauguuaua

SEQ ID NO: 3279078 - RNA, 13 nt, Vaccinia virus
cucaauaccccaa

SEQ ID NO: 3279079 - RNA, 20 nt, Vaccinia virus
ucaacgaucgucgauacaaa

SEQ ID NO: 3279080 - RNA, 21 nt, Vaccinia virus
cgauacauccuucuauguuga

SEQ ID NO: 3279081 - RNA, 18 nt, Vaccinia virus
cagugacggauauacaaa

SEQ ID NO: 3279082 - RNA, 15 nt, Vaccinia virus
augguucaaagacua

SEQ ID NO: 3279083 - RNA, 13 nt, Vaccinia virus
acauuguuucaua

SEQ ID NO: 3279084 - RNA, 16 nt, Vaccinia virus
caaaaauuacgauauu

SEQ ID NO: 3279085 - RNA, 22 nt, Vaccinia virus
acauaugcaucuauauaaucuu

SEQ ID NO: 3279086 - RNA, 14 nt, Vaccinia virus
aacuacaauauuuc

SEQ ID NO: 3279087 - RNA, 21 nt, Vaccinia virus
auauacaacucuuuaauacga

SEQ ID NO: 3279088 - RNA, 15 nt, Vaccinia virus
aauaaauaacaaugg

SEQ ID NO: 3279089 - RNA, 12 nt, Vaccinia virus
auuacuuaaaaa

SEQ ID NO: 3279090 - RNA, 15 nt, Vaccinia virus
uuagucuauuaucca

SEQ ID NO: 3279091 - RNA, 23 nt, Vaccinia virus
uuaucucuuuccuagauacugua

SEQ ID NO: 3279092 - RNA, 14 nt, Vaccinia virus
aauuauagacuuga

SEQ ID NO: 3279093 - RNA, 19 nt, Vaccinia virus
agucacugccguucuaaug

SEQ ID NO: 3279094 - RNA, 18 nt, Vaccinia virus
caucaguaucuucagaca

SEQ ID NO: 3279095 - RNA, 21 nt, Vaccinia virus
uucaaucucuaguuuuauuuu

SEQ ID NO: 3279096 - RNA, 17 nt, Vaccinia virus
guuguuaaaaaauuaag

SEQ ID NO: 3279097 - RNA, 16 nt, Vaccinia virus
uauaucauuuguacau

SEQ ID NO: 3279098 - RNA, 16 nt, Vaccinia virus
uucacauugaaacuau

SEQ ID NO: 3279099 - RNA, 22 nt, Vaccinia virus
caaugauugaagcauucuuucc

SEQ ID NO: 3279100 - RNA, 21 nt, Vaccinia virus
cacauauccacguucuacaaa

SEQ ID NO: 3279101 - RNA, 14 nt, Vaccinia virus
acgacuaaacauuu

SEQ ID NO: 3279102 - RNA, 19 nt, Vaccinia virus
aagacuuuguguugugcau

SEQ ID NO: 3279103 - RNA, 12 nt, Vaccinia virus
auuauuaaauau

SEQ ID NO: 3279104 - RNA, 21 nt, Vaccinia virus
uggucuagauguaaaaaaugu

SEQ ID NO: 3279105 - RNA, 15 nt, Vaccinia virus
caucuacauaaucua

SEQ ID NO: 3279106 - RNA, 17 nt, Vaccinia virus
cuuuccugggaaacucu

SEQ ID NO: 3279107 - RNA, 16 nt, Vaccinia virus
ucaauauugaaaauac

SEQ ID NO: 3279108 - RNA, 14 nt, Vaccinia virus
caaauaaaaaguau

SEQ ID NO: 3279109 - RNA, 19 nt, Vaccinia virus
acuaacgaaauuaauauga

SEQ ID NO: 3279110 - RNA, 19 nt, Vaccinia virus
agaugaggauagcaaaaua

SEQ ID NO: 3279111 - RNA, 18 nt, Vaccinia virus
gacuuuaaacagaaauau

SEQ ID NO: 3279112 - RNA, 18 nt, Vaccinia virus
cuauaauauccauuuugu

SEQ ID NO: 3279113 - RNA, 17 nt, Vaccinia virus
uuaaaauacuaaauuga

SEQ ID NO: 3279114 - RNA, 17 nt, Vaccinia virus
cuaauaaauuagauauu

SEQ ID NO: 3279115 - RNA, 20 nt, Vaccinia virus
gaauauacuucauaaaagaa

SEQ ID NO: 3279116 - RNA, 15 nt, Vaccinia virus
uaacgaugauauguu

SEQ ID NO: 3279117 - RNA, 18 nt, Vaccinia virus
uuaguuuuuuucucucaa

SEQ ID NO: 3279118 - RNA, 13 nt, Vaccinia virus
ccaugcagcauuu

SEQ ID NO: 3279119 - RNA, 21 nt, Vaccinia virus
aucacaacaucuauaaaagua

SEQ ID NO: 3279120 - RNA, 19 nt, Vaccinia virus
uaacacaaccaaauacuug

SEQ ID NO: 3279121 - RNA, 20 nt, Vaccinia virus
cugauaucauuaaugauaua

SEQ ID NO: 3279122 - RNA, 16 nt, Vaccinia virus
cugaguauuuggauuu

SEQ ID NO: 3279123 - RNA, 19 nt, Vaccinia virus
acguucuacuauagaauua

SEQ ID NO: 3279124 - RNA, 15 nt, Vaccinia virus
aacgaaguaaaaagu

SEQ ID NO: 3279125 - RNA, 22 nt, Vaccinia virus
gauuaaacuuuaaugauugcau

SEQ ID NO: 3279126 - RNA, 18 nt, Vaccinia virus
cuugguuuuaaucuauug

SEQ ID NO: 3279127 - RNA, 23 nt, Vaccinia virus
ggaagcaacuaaacuaugugaug

SEQ ID NO: 3279128 - RNA, 12 nt, Vaccinia virus
auaaaacuauau

SEQ ID NO: 3279129 - RNA, 15 nt, Vaccinia virus
uaacaauuucuauaa

SEQ ID NO: 3279130 - RNA, 21 nt, Vaccinia virus
uuauauacacauaauuauucu

SEQ ID NO: 3279131 - RNA, 17 nt, Vaccinia virus
agaagauuuaacuagau

SEQ ID NO: 3279132 - RNA, 23 nt, Vaccinia virus
aauugugucagaaacuuagaaga

SEQ ID NO: 3279133 - RNA, 18 nt, Vaccinia virus
uucaaugugcucuuuaca

SEQ ID NO: 3279134 - RNA, 11 nt, Vaccinia virus
uuuauauacau

SEQ ID NO: 3279135 - RNA, 17 nt, Vaccinia virus
uggaggauuauaugaua

SEQ ID NO: 3279136 - RNA, 20 nt, Vaccinia virus
aaccccauauaauguagaca

SEQ ID NO: 3279137 - RNA, 23 nt, Vaccinia virus
guucuagucgguauuucaucauu

SEQ ID NO: 3279138 - RNA, 13 nt, Vaccinia virus
gcgaaauaaagaa

SEQ ID NO: 3279139 - RNA, 22 nt, Vaccinia virus
auuauaacaucguaucuucaaa

SEQ ID NO: 3279140 - RNA, 17 nt, Vaccinia virus
auuagucauguuaaaaa

SEQ ID NO: 3279141 - RNA, 19 nt, Vaccinia virus
uccauuuauacauugaaua

SEQ ID NO: 3279142 - RNA, 13 nt, Vaccinia virus
auaugccuauaaa

SEQ ID NO: 3279143 - RNA, 14 nt, Vaccinia virus
auuacuuuaauagu

SEQ ID NO: 3279144 - RNA, 22 nt, Vaccinia virus
auuaggaucuacguucauaugu

SEQ ID NO: 3279145 - RNA, 14 nt, Vaccinia virus
agccaacaaauaua

SEQ ID NO: 3279146 - RNA, 22 nt, Vaccinia virus
uuucaucuuucuccaauacuaa

SEQ ID NO: 3279147 - RNA, 13 nt, Vaccinia virus
aauaacaggcuaa

SEQ ID NO: 3279148 - RNA, 20 nt, Vaccinia virus
ucgaaaauugcuauuucaga

SEQ ID NO: 3279149 - RNA, 16 nt, Vaccinia virus
uacuuuuguuacuaau

SEQ ID NO: 3279150 - RNA, 13 nt, Vaccinia virus
uguuaauuuugaa

SEQ ID NO: 3279151 - RNA, 22 nt, Vaccinia virus
caucuucuuugauuaaugauuu

SEQ ID NO: 3279152 - RNA, 17 nt, Vaccinia virus
ugguacgaaauauauug

SEQ ID NO: 3279153 - RNA, 13 nt, Vaccinia virus
auauguagcaaac

SEQ ID NO: 3279154 - RNA, 20 nt, Vaccinia virus
ucacugauuaauuauuugcc

SEQ ID NO: 3279155 - RNA, 16 nt, Vaccinia virus
aaucguuaagaaguuu

SEQ ID NO: 3279156 - RNA, 15 nt, Vaccinia virus
uguaauauucaucau

SEQ ID NO: 3279157 - RNA, 15 nt, Vaccinia virus
uuguaagguuguaaa

SEQ ID NO: 3279158 - RNA, 16 nt, Vaccinia virus
auuuauauaaaucauu

SEQ ID NO: 3279159 - RNA, 14 nt, Vaccinia virus
ccaaguagauaucc

SEQ ID NO: 3279160 - RNA, 18 nt, Vaccinia virus
caacaggucauauucuca

SEQ ID NO: 3279161 - RNA, 22 nt, Vaccinia virus
cuauagaguagacauuaauaga

SEQ ID NO: 3279162 - RNA, 20 nt, Vaccinia virus
aauuuucacaaguaugaaga

SEQ ID NO: 3279163 - RNA, 16 nt, Vaccinia virus
uccacaaauaguaaau

SEQ ID NO: 3279164 - RNA, 16 nt, Vaccinia virus
auaauuuuuauguuuu

SEQ ID NO: 3279165 - RNA, 19 nt, Vaccinia virus
ucagaguucagugaagaag

SEQ ID NO: 3279166 - RNA, 20 nt, Vaccinia virus
aaaaagcucuauauuacaaa

SEQ ID NO: 3279167 - RNA, 21 nt, Vaccinia virus
uaggaccacuagcaaaagaua

SEQ ID NO: 3279168 - RNA, 22 nt, Vaccinia virus
aaguuauccaaguuaaaggaua

SEQ ID NO: 3279169 - RNA, 15 nt, Vaccinia virus
caacucuaaucacuu

SEQ ID NO: 3279170 - RNA, 19 nt, Vaccinia virus
gaaaaugaugguacauaua

SEQ ID NO: 3279171 - RNA, 18 nt, Vaccinia virus
ugacgaacguauugcuau

SEQ ID NO: 3279172 - RNA, 19 nt, Vaccinia virus
uuuucuuucuaauacuaua

SEQ ID NO: 3279173 - RNA, 16 nt, Vaccinia virus
uauuucccuauaaaaa

SEQ ID NO: 3279174 - RNA, 13 nt, Vaccinia virus
aauacaugggaaa

SEQ ID NO: 3279175 - RNA, 20 nt, Vaccinia virus
ugccguguuuaaagauuucu

SEQ ID NO: 3279176 - RNA, 14 nt, Vaccinia virus
agugcaaugaauau

SEQ ID NO: 3279177 - RNA, 15 nt, Vaccinia virus
uaauaauuuaacaau

SEQ ID NO: 3279178 - RNA, 19 nt, Vaccinia virus
uaaucggagaauguuuccc

SEQ ID NO: 3279179 - RNA, 16 nt, Vaccinia virus
uucauaaaaaccaucg

SEQ ID NO: 3279180 - RNA, 17 nt, Vaccinia virus
aauaaauauccuuggaa

SEQ ID NO: 3279181 - RNA, 18 nt, Vaccinia virus
caaucaaaccuauaacau

SEQ ID NO: 3279182 - RNA, 14 nt, Vaccinia virus
cuaauuucuguaua

SEQ ID NO: 3279183 - RNA, 12 nt, Vaccinia virus
gaugauauuaac

SEQ ID NO: 3279184 - RNA, 13 nt, Vaccinia virus
ucaucuucauagg

SEQ ID NO: 3279185 - RNA, 18 nt, Vaccinia virus
agucugucaaaucaucuu

SEQ ID NO: 3279186 - RNA, 19 nt, Vaccinia virus
ucaucaaaagacuuaugau

SEQ ID NO: 3279187 - RNA, 23 nt, Vaccinia virus
uacuaagaggaugaucuguauua

SEQ ID NO: 3279188 - RNA, 14 nt, Vaccinia virus
auugguaaauccuu

SEQ ID NO: 3279189 - RNA, 17 nt, Vaccinia virus
uccaaaaagaaugagua

SEQ ID NO: 3279190 - RNA, 13 nt, Vaccinia virus
augaaaaaguaaa

SEQ ID NO: 3279191 - RNA, 22 nt, Vaccinia virus
gaaaucuauaauaucuuugaaa

SEQ ID NO: 3279192 - RNA, 16 nt, Vaccinia virus
gaacgauaaacaaauu

SEQ ID NO: 3279193 - RNA, 22 nt, Vaccinia virus
acaagugaaauguugucauuau

SEQ ID NO: 3279194 - RNA, 20 nt, Vaccinia virus
aauacuaaaaaauguagaaa

SEQ ID NO: 3279195 - RNA, 19 nt, Vaccinia virus
acagauagaucauuuugaa

SEQ ID NO: 3279196 - RNA, 16 nt, Vaccinia virus
aaacaacuaaacagua

SEQ ID NO: 3279197 - RNA, 18 nt, Vaccinia virus
ucaaauuaagcauuuugg

SEQ ID NO: 3279198 - RNA, 19 nt, Vaccinia virus
uauguugugauucuagaau

SEQ ID NO: 3279199 - RNA, 19 nt, Vaccinia virus
acaguaguaauuaaugaaa

SEQ ID NO: 3279200 - RNA, 17 nt, Vaccinia virus
uauauuagacaauacua

SEQ ID NO: 3279201 - RNA, 17 nt, Vaccinia virus
aauaaaagacaaaucuu

SEQ ID NO: 3279202 - RNA, 17 nt, Vaccinia virus
uauaugauauuccugga

SEQ ID NO: 3279203 - RNA, 17 nt, Vaccinia virus
aaauuguaacaacaaug

SEQ ID NO: 3279204 - RNA, 19 nt, Vaccinia virus
acccuggauaaaaaguaaa

SEQ ID NO: 3279205 - RNA, 14 nt, Vaccinia virus
aaauguuugaucaa

SEQ ID NO: 3279206 - RNA, 21 nt, Vaccinia virus
uaauacguuggucuaucuauu

SEQ ID NO: 3279207 - RNA, 22 nt, Vaccinia virus
gacacuaugcgacuuaauacaa

SEQ ID NO: 3279208 - RNA, 15 nt, Vaccinia virus
auaggagauauauau

SEQ ID NO: 3279209 - RNA, 22 nt, Vaccinia virus
aaugugauucucugaaaaugua

SEQ ID NO: 3279210 - RNA, 16 nt, Vaccinia virus
acuaauacaucugaaa

SEQ ID NO: 3279211 - RNA, 12 nt, Vaccinia virus
auaaacauagaa

SEQ ID NO: 3279212 - RNA, 17 nt, Vaccinia virus
aucuaucuuaucgaaug

SEQ ID NO: 3279213 - RNA, 14 nt, Vaccinia virus
aaaaagaauguaua

SEQ ID NO: 3279214 - RNA, 15 nt, Vaccinia virus
gucuggauuaaucug

SEQ ID NO: 3279215 - RNA, 15 nt, Vaccinia virus
cugcagcauuuugag

SEQ ID NO: 3279216 - RNA, 23 nt, Vaccinia virus
agaaaaucuuucuucuacuauau

SEQ ID NO: 3279217 - RNA, 21 nt, Vaccinia virus
cuucuuuuucugucucaauag

SEQ ID NO: 3279218 - RNA, 22 nt, Vaccinia virus
uucuauaccuuucgaaauuagu

SEQ ID NO: 3279219 - RNA, 18 nt, Vaccinia virus
uaaauguuguaauuguau

SEQ ID NO: 3279220 - RNA, 18 nt, Vaccinia virus
auuuuuguacauuaauaa

SEQ ID NO: 3279221 - RNA, 14 nt, Vaccinia virus
agcuaugaacuugu

SEQ ID NO: 3279222 - RNA, 23 nt, Vaccinia virus
uaaaugauucuaacgacaucucu

SEQ ID NO: 3279223 - RNA, 19 nt, Vaccinia virus
auaugccagaacuauuuuu

SEQ ID NO: 3279224 - RNA, 18 nt, Vaccinia virus
ucaucaaacaacugaaaa

SEQ ID NO: 3279225 - RNA, 19 nt, Vaccinia virus
acuuccaauaaaauuacuu

SEQ ID NO: 3279226 - RNA, 20 nt, Vaccinia virus
uagccaaaagacuaugggaa

SEQ ID NO: 3279227 - RNA, 22 nt, Vaccinia virus
augaagauagaucacaaaucac

SEQ ID NO: 3279228 - RNA, 17 nt, Vaccinia virus
guguauaaaauauacug

SEQ ID NO: 3279229 - RNA, 20 nt, Vaccinia virus
aauaaucucgucgauguaaa

SEQ ID NO: 3279230 - RNA, 19 nt, Vaccinia virus
gagaacuaacacaaccagc

SEQ ID NO: 3279231 - RNA, 14 nt, Vaccinia virus
cacaugauccauuu

SEQ ID NO: 3279232 - RNA, 14 nt, Vaccinia virus
aaaccaaaucuuga

SEQ ID NO: 3279233 - RNA, 13 nt, Vaccinia virus
uuaucaucauuau

SEQ ID NO: 3279234 - RNA, 20 nt, Vaccinia virus
aaauauauaguauuaaugau

SEQ ID NO: 3279235 - RNA, 13 nt, Vaccinia virus
aucuauucccuug

SEQ ID NO: 3279236 - RNA, 17 nt, Vaccinia virus
aaaacugguuaaaacag

SEQ ID NO: 3279237 - RNA, 20 nt, Vaccinia virus
uacaacagugauauguguaa

SEQ ID NO: 3279238 - RNA, 22 nt, Vaccinia virus
auacuuuaacaucacuaauauc

SEQ ID NO: 3279239 - RNA, 20 nt, Vaccinia virus
aggauuaucaaaucuuuaau

SEQ ID NO: 3279240 - RNA, 14 nt, Vaccinia virus
cagucuuuaaugaa

SEQ ID NO: 3279241 - RNA, 16 nt, Vaccinia virus
uacgaggauucaaaaa

SEQ ID NO: 3279242 - RNA, 11 nt, Vaccinia virus
gcguuaaacau

SEQ ID NO: 3279243 - RNA, 16 nt, Vaccinia virus
agucauguuaaaaaug

SEQ ID NO: 3279244 - RNA, 22 nt, Vaccinia virus
aagcuacuuguuuaacaaaguu

SEQ ID NO: 3279245 - RNA, 15 nt, Vaccinia virus
gaaucccuacauauu

SEQ ID NO: 3279246 - RNA, 15 nt, Vaccinia virus
agcuauauagaugac

SEQ ID NO: 3279247 - RNA, 18 nt, Vaccinia virus
aacagaaacuagaggaga

SEQ ID NO: 3279248 - RNA, 21 nt, Vaccinia virus
uaaacaucuuugcaucauacu

SEQ ID NO: 3279249 - RNA, 13 nt, Vaccinia virus
gaaugacauaacu

SEQ ID NO: 3279250 - RNA, 16 nt, Vaccinia virus
aaugaugucaggaaau

SEQ ID NO: 3279251 - RNA, 16 nt, Vaccinia virus
acuacaacuagugaag

SEQ ID NO: 3279252 - RNA, 14 nt, Vaccinia virus
ucuaauacauaauu

SEQ ID NO: 3279253 - RNA, 18 nt, Vaccinia virus
ucauaauuguuagcuguu

SEQ ID NO: 3279254 - RNA, 16 nt, Vaccinia virus
uuucugguuagauaac

SEQ ID NO: 3279255 - RNA, 17 nt, Vaccinia virus
aacuugaggucaaggau

SEQ ID NO: 3279256 - RNA, 20 nt, Vaccinia virus
uaagaaauuuagcaacgaua

SEQ ID NO: 3279257 - RNA, 16 nt, Vaccinia virus
auuauuacguauccuc

SEQ ID NO: 3279258 - RNA, 15 nt, Vaccinia virus
acgucauucuaaaag

SEQ ID NO: 3279259 - RNA, 18 nt, Vaccinia virus
uguauucacuuaacaguu

SEQ ID NO: 3279260 - RNA, 13 nt, Vaccinia virus
auucuaugauggu

SEQ ID NO: 3279261 - RNA, 16 nt, Vaccinia virus
agaaagugcaaaugag

SEQ ID NO: 3279262 - RNA, 18 nt, Vaccinia virus
acacauuuucaaauaaua

SEQ ID NO: 3279263 - RNA, 14 nt, Vaccinia virus
gacuagcauauuau

SEQ ID NO: 3279264 - RNA, 15 nt, Vaccinia virus
gugcaguauuagaau

SEQ ID NO: 3279265 - RNA, 19 nt, Vaccinia virus
acucuguuuuauuaaccga

SEQ ID NO: 3279266 - RNA, 15 nt, Vaccinia virus
aauauauacguugau

SEQ ID NO: 3279267 - RNA, 23 nt, Vaccinia virus
caaauucuuggauauaugauaua

SEQ ID NO: 3279268 - RNA, 16 nt, Vaccinia virus
auacauucuucuguua

SEQ ID NO: 3279269 - RNA, 16 nt, Vaccinia virus
ucauagaugaaauacu

SEQ ID NO: 3279270 - RNA, 13 nt, Vaccinia virus
auaaaauaauaca

SEQ ID NO: 3279271 - RNA, 17 nt, Vaccinia virus
uuacauuaguaaucuuu

SEQ ID NO: 3279272 - RNA, 12 nt, Vaccinia virus
aaucugaaaaua

SEQ ID NO: 3279273 - RNA, 17 nt, Vaccinia virus
gaugaaggaauaaucuc

SEQ ID NO: 3279274 - RNA, 19 nt, Vaccinia virus
augguuuacccuagaauac

SEQ ID NO: 3279275 - RNA, 17 nt, Vaccinia virus
aacaugucuucuauucu

SEQ ID NO: 3279276 - RNA, 18 nt, Vaccinia virus
gaaaacuagauacaaaau

SEQ ID NO: 3279277 - RNA, 15 nt, Vaccinia virus
acauauaguggauua

SEQ ID NO: 3279278 - RNA, 15 nt, Vaccinia virus
uuacaagcuguuuau

SEQ ID NO: 3279279 - RNA, 13 nt, Vaccinia virus
cauuuauacauau

SEQ ID NO: 3279280 - RNA, 13 nt, Vaccinia virus
ugauaauaugaaa

SEQ ID NO: 3279281 - RNA, 15 nt, Vaccinia virus
uagauauaaauucaa

SEQ ID NO: 3279282 - RNA, 21 nt, Vaccinia virus
cacguaaccauucuaaacaau

SEQ ID NO: 3279283 - RNA, 18 nt, Vaccinia virus
uagaucacccuaaucuua

SEQ ID NO: 3279284 - RNA, 19 nt, Vaccinia virus
gauaauagggagaaaugac

SEQ ID NO: 3279285 - RNA, 13 nt, Vaccinia virus
augucuaugaaua

SEQ ID NO: 3279286 - RNA, 18 nt, Vaccinia virus
auaauggaucuucuagua

SEQ ID NO: 3279287 - RNA, 23 nt, Vaccinia virus
ggaaagcuagacuugauuauucu

SEQ ID NO: 3279288 - RNA, 11 nt, Vaccinia virus
auaaaaaauua

SEQ ID NO: 3279289 - RNA, 16 nt, Vaccinia virus
ucaacuuauuaacauu

SEQ ID NO: 3279290 - RNA, 15 nt, Vaccinia virus
uuauaaaacauagau

SEQ ID NO: 3279291 - RNA, 23 nt, Vaccinia virus
cuaacauacgagacauguuagua

SEQ ID NO: 3279292 - RNA, 22 nt, Vaccinia virus
ugucaucuuguucagaaauaua

SEQ ID NO: 3279293 - RNA, 15 nt, Vaccinia virus
uuaacacucauaaau

SEQ ID NO: 3279294 - RNA, 19 nt, Vaccinia virus
uaaguauucacaaacggga

SEQ ID NO: 3279295 - RNA, 24 nt, Vaccinia virus
aaagagaacguauuuauuguuacu

SEQ ID NO: 3279296 - RNA, 12 nt, Vaccinia virus
gaaaauaaugac

SEQ ID NO: 3279297 - RNA, 20 nt, Vaccinia virus
cgagaaauaauaagaauaaa

SEQ ID NO: 3279298 - RNA, 13 nt, Vaccinia virus
acuagaagagaau

SEQ ID NO: 3279299 - RNA, 23 nt, Vaccinia virus
cuauuagaguauugcauuuugau

SEQ ID NO: 3279300 - RNA, 18 nt, Vaccinia virus
aucuacaaauuggagauc

SEQ ID NO: 3279301 - RNA, 21 nt, Vaccinia virus
ucuucaucuauaaaucaagau

SEQ ID NO: 3279302 - RNA, 13 nt, Vaccinia virus
gauaauuucuugu

SEQ ID NO: 3279303 - RNA, 13 nt, Vaccinia virus
caaauaugauaug

SEQ ID NO: 3279304 - RNA, 23 nt, Vaccinia virus
acaucuggccuguucauaaauaa

SEQ ID NO: 3279305 - RNA, 19 nt, Vaccinia virus
auuuaccguuacuaauaag

SEQ ID NO: 3279306 - RNA, 21 nt, Vaccinia virus
aauaagaucguccguaacaaa

SEQ ID NO: 3279307 - RNA, 17 nt, Vaccinia virus
aggauuauaaucucauu

SEQ ID NO: 3279308 - RNA, 17 nt, Vaccinia virus
aacugcauauuauacac

SEQ ID NO: 3279309 - RNA, 22 nt, Vaccinia virus
agcaugugaauauaauaauaca

SEQ ID NO: 3279310 - RNA, 15 nt, Vaccinia virus
cguguguuucaggau

SEQ ID NO: 3279311 - RNA, 21 nt, Vaccinia virus
uucuauccaaggacaaggaug

SEQ ID NO: 3279312 - RNA, 19 nt, Vaccinia virus
aaaaguacucaaucuguac

SEQ ID NO: 3279313 - RNA, 16 nt, Vaccinia virus
auauucuguuguguca

SEQ ID NO: 3279314 - RNA, 12 nt, Vaccinia virus
agauaaauaugg

SEQ ID NO: 3279315 - RNA, 13 nt, Vaccinia virus
augcauuaucauu

SEQ ID NO: 3279316 - RNA, 19 nt, Vaccinia virus
uuucacuacuaucuaugau

SEQ ID NO: 3279317 - RNA, 15 nt, Vaccinia virus
uaccauuucauugau

SEQ ID NO: 3279318 - RNA, 23 nt, Vaccinia virus
aaugaggcguuuaucauaucugu

SEQ ID NO: 3279319 - RNA, 19 nt, Vaccinia virus
aucuuuucacguuaaauga

SEQ ID NO: 3279320 - RNA, 18 nt, Vaccinia virus
gaaucccuacauauuuua

SEQ ID NO: 3279321 - RNA, 16 nt, Vaccinia virus
acuuggcgauucuaua

SEQ ID NO: 3279322 - RNA, 17 nt, Vaccinia virus
ucauaaauaaaaaugaa

SEQ ID NO: 3279323 - RNA, 22 nt, Vaccinia virus
auuaggcacagucaaacauuca

SEQ ID NO: 3279324 - RNA, 21 nt, Vaccinia virus
aauacuuuuguuacuaauauc

SEQ ID NO: 3279325 - RNA, 13 nt, Vaccinia virus
ccgacgaaaagau

SEQ ID NO: 3279326 - RNA, 19 nt, Vaccinia virus
uaaaacuuguaagaaguaa

SEQ ID NO: 3279327 - RNA, 17 nt, Vaccinia virus
gaaaacauuuuuaucau

SEQ ID NO: 3279328 - RNA, 13 nt, Vaccinia virus
acaaucucagaua

SEQ ID NO: 3279329 - RNA, 19 nt, Vaccinia virus
aagauuauuauggaaauca

SEQ ID NO: 3279330 - RNA, 21 nt, Vaccinia virus
guguauuguuuaguucauccu

SEQ ID NO: 3279331 - RNA, 19 nt, Vaccinia virus
cgaucaaagaauuaaugau

SEQ ID NO: 3279332 - RNA, 20 nt, Vaccinia virus
auuuggaauuuauuaauaca

SEQ ID NO: 3279333 - RNA, 16 nt, Vaccinia virus
caaaguuaguacagaa

SEQ ID NO: 3279334 - RNA, 22 nt, Vaccinia virus
uccagggaaauuaaagaagaag

SEQ ID NO: 3279335 - RNA, 23 nt, Vaccinia virus
acauuggcgccguuuaauuuccu

SEQ ID NO: 3279336 - RNA, 14 nt, Vaccinia virus
cuuacauaaaugaa

SEQ ID NO: 3279337 - RNA, 23 nt, Vaccinia virus
ugauuauucuauaaguauagaua

SEQ ID NO: 3279338 - RNA, 18 nt, Vaccinia virus
gaauugaugaguuguaca

SEQ ID NO: 3279339 - RNA, 15 nt, Vaccinia virus
auuaauucuguaaau

SEQ ID NO: 3279340 - RNA, 13 nt, Vaccinia virus
uauaauguuuccu

SEQ ID NO: 3279341 - RNA, 13 nt, Vaccinia virus
ucuaauauacuuu

SEQ ID NO: 3279342 - RNA, 17 nt, Vaccinia virus
cuuucaaacuuaaucuu

SEQ ID NO: 3279343 - RNA, 16 nt, Vaccinia virus
acgccgaucucugaau

SEQ ID NO: 3279344 - RNA, 16 nt, Vaccinia virus
uaaaucauggauuuua

SEQ ID NO: 3279345 - RNA, 18 nt, Vaccinia virus
aguuaucuaucuuaaaaa

SEQ ID NO: 3279346 - RNA, 17 nt, Vaccinia virus
gaacauuauaauaauca

SEQ ID NO: 3279347 - RNA, 17 nt, Vaccinia virus
acgauauaaauugauua

SEQ ID NO: 3279348 - RNA, 18 nt, Vaccinia virus
ugaggagaucuaaacaau

SEQ ID NO: 3279349 - RNA, 19 nt, Vaccinia virus
gucuucuaaaaauaaaagu

SEQ ID NO: 3279350 - RNA, 23 nt, Vaccinia virus
uauuaaaggaguaugucaugaau

SEQ ID NO: 3279351 - RNA, 12 nt, Vaccinia virus
aaacuaucugau

SEQ ID NO: 3279352 - RNA, 13 nt, Vaccinia virus
uagagaucuaauu

SEQ ID NO: 3279353 - RNA, 23 nt, Vaccinia virus
acaugcgguaaagauauuucuca

SEQ ID NO: 3279354 - RNA, 21 nt, Vaccinia virus
aucaagaguaacuauugacuu

SEQ ID NO: 3279355 - RNA, 20 nt, Vaccinia virus
auaaaucauauaaaaaauga

SEQ ID NO: 3279356 - RNA, 18 nt, Vaccinia virus
auagucgugaucaacauu

SEQ ID NO: 3279357 - RNA, 18 nt, Vaccinia virus
uuagucgugguaagaaag

SEQ ID NO: 3279358 - RNA, 21 nt, Vaccinia virus
augucugacaccuaaaaagaa

SEQ ID NO: 3279359 - RNA, 13 nt, Vaccinia virus
uuuacaguuucug

SEQ ID NO: 3279360 - RNA, 17 nt, Vaccinia virus
cauuauuuuuuuggaau

SEQ ID NO: 3279361 - RNA, 17 nt, Vaccinia virus
uauaucaaauacaucua

SEQ ID NO: 3279362 - RNA, 13 nt, Vaccinia virus
guuaaaaaaaaga

SEQ ID NO: 3279363 - RNA, 14 nt, Vaccinia virus
auaggcaucauuua

SEQ ID NO: 3279364 - RNA, 13 nt, Vaccinia virus
aagaugaugugaa

SEQ ID NO: 3279365 - RNA, 13 nt, Vaccinia virus
uuaagagauaucu

SEQ ID NO: 3279366 - RNA, 16 nt, Vaccinia virus
uaggaguuagaauaau

SEQ ID NO: 3279367 - RNA, 17 nt, Vaccinia virus
ccagcguguccccagga

SEQ ID NO: 3279368 - RNA, 19 nt, Vaccinia virus
uguauaacaugacauuuau

SEQ ID NO: 3279369 - RNA, 13 nt, Vaccinia virus
gcgcuauaguauu

SEQ ID NO: 3279370 - RNA, 19 nt, Vaccinia virus
aauaaugauucaacaaugu

SEQ ID NO: 3279371 - RNA, 15 nt, Vaccinia virus
cugaaaaagauauca

SEQ ID NO: 3279372 - RNA, 11 nt, Vaccinia virus
aacacaaauau

SEQ ID NO: 3279373 - RNA, 21 nt, Vaccinia virus
ccgguucuuaauauuguauug

SEQ ID NO: 3279374 - RNA, 22 nt, Vaccinia virus
auggauuuuuuuaaaaaggaaa

SEQ ID NO: 3279375 - RNA, 20 nt, Vaccinia virus
uaaaaaguucgaguuucuca

SEQ ID NO: 3279376 - RNA, 14 nt, Vaccinia virus
uagaaaucauauau

SEQ ID NO: 3279377 - RNA, 14 nt, Vaccinia virus
cauuaagucauuaa

SEQ ID NO: 3279378 - RNA, 22 nt, Vaccinia virus
ugauuaaugauuuagaaaugaa

SEQ ID NO: 3279379 - RNA, 14 nt, Vaccinia virus
gagugaagaaauaa

SEQ ID NO: 3279380 - RNA, 16 nt, Vaccinia virus
aaaaguaagauauuau

SEQ ID NO: 3279381 - RNA, 13 nt, Vaccinia virus
uguuauagaugug

SEQ ID NO: 3279382 - RNA, 14 nt, Vaccinia virus
ucuuaauacagauu

SEQ ID NO: 3279383 - RNA, 14 nt, Vaccinia virus
cuuaacaaaaauua

SEQ ID NO: 3279384 - RNA, 13 nt, Vaccinia virus
cgcaaaaaaacug

SEQ ID NO: 3279385 - RNA, 20 nt, Vaccinia virus
aaacacugauucagaaaugg

SEQ ID NO: 3279386 - RNA, 18 nt, Vaccinia virus
uaguaucguacaauucau

SEQ ID NO: 3279387 - RNA, 14 nt, Vaccinia virus
aacacagaacagua

SEQ ID NO: 3279388 - RNA, 12 nt, Vaccinia virus
ucauauuuagac

SEQ ID NO: 3279389 - RNA, 17 nt, Vaccinia virus
aguuuuuaggaaauauu

SEQ ID NO: 3279390 - RNA, 20 nt, Vaccinia virus
aaggacauuguaaauuuuau

SEQ ID NO: 3279391 - RNA, 14 nt, Vaccinia virus
aauuagauuucgaa

SEQ ID NO: 3279392 - RNA, 16 nt, Vaccinia virus
guacuuguacacauau

SEQ ID NO: 3279393 - RNA, 23 nt, Vaccinia virus
gaucuuuauuuuucguguauuuu

SEQ ID NO: 3279394 - RNA, 21 nt, Vaccinia virus
gaauaugaauucuaugaugaa

SEQ ID NO: 3279395 - RNA, 13 nt, Vaccinia virus
auaauuaauacaa

SEQ ID NO: 3279396 - RNA, 16 nt, Vaccinia virus
uggauauggguuucca

SEQ ID NO: 3279397 - RNA, 19 nt, Vaccinia virus
guuacauuuccaugucaau

SEQ ID NO: 3279398 - RNA, 15 nt, Vaccinia virus
auuagugacggaaaa

SEQ ID NO: 3279399 - RNA, 23 nt, Vaccinia virus
uuauuagucgccgucucuauaaa

SEQ ID NO: 3279400 - RNA, 14 nt, Vaccinia virus
ucgauccaauaaau

SEQ ID NO: 3279401 - RNA, 14 nt, Vaccinia virus
gagaauuaaaagag

SEQ ID NO: 3279402 - RNA, 16 nt, Vaccinia virus
auaucuaaaugaauac

SEQ ID NO: 3279403 - RNA, 14 nt, Vaccinia virus
agcgguguuauuau

SEQ ID NO: 3279404 - RNA, 12 nt, Vaccinia virus
aucaauguacau

SEQ ID NO: 3279405 - RNA, 17 nt, Vaccinia virus
cuacaguaauguccaaa

SEQ ID NO: 3279406 - RNA, 17 nt, Vaccinia virus
gcacuacuguuaagaau

SEQ ID NO: 3279407 - RNA, 14 nt, Vaccinia virus
aguaaguuuaugau

SEQ ID NO: 3279408 - RNA, 16 nt, Vaccinia virus
gauacaacaaauuaaa

SEQ ID NO: 3279409 - RNA, 20 nt, Vaccinia virus
auuuguaucuccuuucucuu

SEQ ID NO: 3279410 - RNA, 17 nt, Vaccinia virus
cgauaacggaauagacu

SEQ ID NO: 3279411 - RNA, 17 nt, Vaccinia virus
accauuuuaaaaucauu

SEQ ID NO: 3279412 - RNA, 16 nt, Vaccinia virus
uagcaauuucaaaaua

SEQ ID NO: 3279413 - RNA, 14 nt, Vaccinia virus
aucuauauauccuu

SEQ ID NO: 3279414 - RNA, 15 nt, Vaccinia virus
auuacgcucuacaaa

SEQ ID NO: 3279415 - RNA, 18 nt, Vaccinia virus
uaacccauuauaaaacuu

SEQ ID NO: 3279416 - RNA, 17 nt, Vaccinia virus
uauaaaaucuguaucga

SEQ ID NO: 3279417 - RNA, 15 nt, Vaccinia virus
ugcgacacuauucau

SEQ ID NO: 3279418 - RNA, 21 nt, Vaccinia virus
caagagaaugaaauauauaca

SEQ ID NO: 3279419 - RNA, 14 nt, Vaccinia virus
guucaaauauauga

SEQ ID NO: 3279420 - RNA, 18 nt, Vaccinia virus
auauaauacuuaaaaaug

SEQ ID NO: 3279421 - RNA, 13 nt, Vaccinia virus
uaccuguuuuuau

SEQ ID NO: 3279422 - RNA, 18 nt, Vaccinia virus
auacguaagaauauacua

SEQ ID NO: 3279423 - RNA, 23 nt, Vaccinia virus
cuauuauguuaacggaaaguauu

SEQ ID NO: 3279424 - RNA, 18 nt, Vaccinia virus
uauuaucguuuguaacau

SEQ ID NO: 3279425 - RNA, 12 nt, Vaccinia virus
gaauuucccaaa

SEQ ID NO: 3279426 - RNA, 19 nt, Vaccinia virus
aauccagcuagugaauaua

SEQ ID NO: 3279427 - RNA, 18 nt, Vaccinia virus
gucucagaauucuaaaug

SEQ ID NO: 3279428 - RNA, 22 nt, Vaccinia virus
aacauaauagucgaauacagua

SEQ ID NO: 3279429 - RNA, 18 nt, Vaccinia virus
uuauauacucuaaucuuu

SEQ ID NO: 3279430 - RNA, 21 nt, Vaccinia virus
uaucgacaauugcguggagau

SEQ ID NO: 3279431 - RNA, 18 nt, Vaccinia virus
aacauuaaccguuucauc

SEQ ID NO: 3279432 - RNA, 17 nt, Vaccinia virus
aauuuuuuuucuagaua

SEQ ID NO: 3279433 - RNA, 12 nt, Vaccinia virus
aauuuaucaugg

SEQ ID NO: 3279434 - RNA, 21 nt, Vaccinia virus
agcuagagugauaauuucguu

SEQ ID NO: 3279435 - RNA, 15 nt, Vaccinia virus
aauauaacaguaucu

SEQ ID NO: 3279436 - RNA, 16 nt, Vaccinia virus
uagauuuuccauccac

SEQ ID NO: 3279437 - RNA, 15 nt, Vaccinia virus
ucagauuauucuuaa

SEQ ID NO: 3279438 - RNA, 15 nt, Vaccinia virus
auaauauuagauuua

SEQ ID NO: 3279439 - RNA, 20 nt, Vaccinia virus
auacagcguuacauuauuau

SEQ ID NO: 3279440 - RNA, 22 nt, Vaccinia virus
ucagacgacccaaaacauagag

SEQ ID NO: 3279441 - RNA, 14 nt, Vaccinia virus
caaauuuuacuaca

SEQ ID NO: 3279442 - RNA, 19 nt, Vaccinia virus
ccgacuguaacauugacug

SEQ ID NO: 3279443 - RNA, 22 nt, Vaccinia virus
ucuuacacauucgcucauacau

SEQ ID NO: 3279444 - RNA, 15 nt, Vaccinia virus
guaauauuuuuaguu

SEQ ID NO: 3279445 - RNA, 12 nt, Vaccinia virus
auucauaacuaa

SEQ ID NO: 3279446 - RNA, 15 nt, Vaccinia virus
uuaauaauuguauug

SEQ ID NO: 3279447 - RNA, 20 nt, Vaccinia virus
aacuucugccugaaauccaa

SEQ ID NO: 3279448 - RNA, 16 nt, Vaccinia virus
auauauggauaaugcu

SEQ ID NO: 3279449 - RNA, 15 nt, Vaccinia virus
aauuguuguauuuau

SEQ ID NO: 3279450 - RNA, 13 nt, Vaccinia virus
auagaacaaaauc

SEQ ID NO: 3279451 - RNA, 16 nt, Vaccinia virus
cauucaccagaaacua

SEQ ID NO: 3279452 - RNA, 12 nt, Vaccinia virus
aaugaaaugaua

SEQ ID NO: 3279453 - RNA, 17 nt, Vaccinia virus
auaaacaaacuaauaaa

SEQ ID NO: 3279454 - RNA, 18 nt, Vaccinia virus
uauuaaugaucacaugcu

SEQ ID NO: 3279455 - RNA, 18 nt, Vaccinia virus
uuaaucucaaaauauguu

SEQ ID NO: 3279456 - RNA, 13 nt, Vaccinia virus
gccauccaaacaa

SEQ ID NO: 3279457 - RNA, 22 nt, Vaccinia virus
uguaaauucagcgguaaagaua

SEQ ID NO: 3279458 - RNA, 19 nt, Vaccinia virus
guuuagacggcaacauaga

SEQ ID NO: 3279459 - RNA, 16 nt, Vaccinia virus
caauucgguuauaaau

SEQ ID NO: 3279460 - RNA, 21 nt, Vaccinia virus
auaacucauuuuuugaauaua

SEQ ID NO: 3279461 - RNA, 15 nt, Vaccinia virus
ucagaugauguauua

SEQ ID NO: 3279462 - RNA, 18 nt, Vaccinia virus
gcaauauaucaucuuuuc

SEQ ID NO: 3279463 - RNA, 20 nt, Vaccinia virus
aguuguaaaguuaaaauugu

SEQ ID NO: 3279464 - RNA, 14 nt, Vaccinia virus
aggaaucaaugaua

SEQ ID NO: 3279465 - RNA, 20 nt, Vaccinia virus
agauaguagcuauaauauau

SEQ ID NO: 3279466 - RNA, 21 nt, Vaccinia virus
auguguuucccaaacaaaaug

SEQ ID NO: 3279467 - RNA, 17 nt, Vaccinia virus
acugaguuggcuacuau

SEQ ID NO: 3279468 - RNA, 12 nt, Vaccinia virus
cgucaguauuua

SEQ ID NO: 3279469 - RNA, 23 nt, Vaccinia virus
aauguccaaaucuaguuguggaa

SEQ ID NO: 3279470 - RNA, 21 nt, Vaccinia virus
ugcuuuucuauaaucaucuua

SEQ ID NO: 3279471 - RNA, 23 nt, Vaccinia virus
gaguaguaaacgcguacauaacu

SEQ ID NO: 3279472 - RNA, 21 nt, Vaccinia virus
agaaauaaaucagacaauaag

SEQ ID NO: 3279473 - RNA, 15 nt, Vaccinia virus
aauaacaucagaaaa

SEQ ID NO: 3279474 - RNA, 17 nt, Vaccinia virus
ggccuaaagaauaucuu

SEQ ID NO: 3279475 - RNA, 13 nt, Vaccinia virus
aaagguucuauca

SEQ ID NO: 3279476 - RNA, 18 nt, Vaccinia virus
uaaguaauaacuauguuu

SEQ ID NO: 3279477 - RNA, 13 nt, Vaccinia virus
acuguucaagaau

SEQ ID NO: 3279478 - RNA, 23 nt, Vaccinia virus
uggaaugacgaauccuguuucua

SEQ ID NO: 3279479 - RNA, 18 nt, Vaccinia virus
caaauuaaacucuggaau

SEQ ID NO: 3279480 - RNA, 16 nt, Vaccinia virus
uaaacacgaauacuau

SEQ ID NO: 3279481 - RNA, 12 nt, Vaccinia virus
ugucgguaaacg

SEQ ID NO: 3279482 - RNA, 16 nt, Vaccinia virus
caaaaugauauacagu

SEQ ID NO: 3279483 - RNA, 17 nt, Vaccinia virus
caauaaacaaaauacuc

SEQ ID NO: 3279484 - RNA, 21 nt, Vaccinia virus
uauaacagagccaucuguaaa

SEQ ID NO: 3279485 - RNA, 12 nt, Vaccinia virus
augcaaacauua

SEQ ID NO: 3279486 - RNA, 16 nt, Vaccinia virus
cuauacccaucaugua

SEQ ID NO: 3279487 - RNA, 12 nt, Vaccinia virus
uacuaucagaaa

SEQ ID NO: 3279488 - RNA, 17 nt, Vaccinia virus
cuagaagauauagcacc

SEQ ID NO: 3279489 - RNA, 17 nt, Vaccinia virus
auauaccgccucaaacu

SEQ ID NO: 3279490 - RNA, 16 nt, Vaccinia virus
cacaguauugacaaau

SEQ ID NO: 3279491 - RNA, 15 nt, Vaccinia virus
aucuaauauacuuug

SEQ ID NO: 3279492 - RNA, 17 nt, Vaccinia virus
uucccaaacauacaucu

SEQ ID NO: 3279493 - RNA, 17 nt, Vaccinia virus
auaucuuuuugaauugu

SEQ ID NO: 3279494 - RNA, 22 nt, Vaccinia virus
acaagaguggaaacucacauau

SEQ ID NO: 3279495 - RNA, 16 nt, Vaccinia virus
gaaaaaaaauuaucua

SEQ ID NO: 3279496 - RNA, 14 nt, Vaccinia virus
uagagcucgaugau

SEQ ID NO: 3279497 - RNA, 23 nt, Vaccinia virus
auaguaggucuggaucuggaaaa

SEQ ID NO: 3279498 - RNA, 13 nt, Vaccinia virus
uagauuuaucuag

SEQ ID NO: 3279499 - RNA, 15 nt, Vaccinia virus
guuauauauaaaaga

SEQ ID NO: 3279500 - RNA, 15 nt, Vaccinia virus
gcaauaauggaaucu

SEQ ID NO: 3279501 - RNA, 17 nt, Vaccinia virus
guauugcgcuacugauu

SEQ ID NO: 3279502 - RNA, 19 nt, Vaccinia virus
cauucuaauguucauaauu

SEQ ID NO: 3279503 - RNA, 11 nt, Vaccinia virus
cuauguuuaua

SEQ ID NO: 3279504 - RNA, 16 nt, Vaccinia virus
gcggaacaauaaacaa

SEQ ID NO: 3279505 - RNA, 20 nt, Vaccinia virus
aaugacaaaaucaacuacau

SEQ ID NO: 3279506 - RNA, 20 nt, Vaccinia virus
uugcacaauccaaacuuuuu

SEQ ID NO: 3279507 - RNA, 17 nt, Vaccinia virus
aguaaucauauaaaugu

SEQ ID NO: 3279508 - RNA, 22 nt, Vaccinia virus
ucaacaucugaugcgcuaagac

SEQ ID NO: 3279509 - RNA, 17 nt, Vaccinia virus
aaaucaaccaccgauga

SEQ ID NO: 3279510 - RNA, 15 nt, Vaccinia virus
aacacaucaauuucg

SEQ ID NO: 3279511 - RNA, 20 nt, Vaccinia virus
acggcuuuuaaacagucucc

SEQ ID NO: 3279512 - RNA, 16 nt, Vaccinia virus
uguacauuguuucaua

SEQ ID NO: 3279513 - RNA, 18 nt, Vaccinia virus
acaauggucgauuauaga

SEQ ID NO: 3279514 - RNA, 18 nt, Vaccinia virus
uaaaauuucauagacuuu

SEQ ID NO: 3279515 - RNA, 12 nt, Vaccinia virus
agaacucuuuuc

SEQ ID NO: 3279516 - RNA, 13 nt, Vaccinia virus
aacaaucuagaca

SEQ ID NO: 3279517 - RNA, 13 nt, Vaccinia virus
ugguguaaaucua

SEQ ID NO: 3279518 - RNA, 17 nt, Vaccinia virus
uacaaguuauacgucau

SEQ ID NO: 3279519 - RNA, 13 nt, Vaccinia virus
auaacaucauauu

SEQ ID NO: 3279520 - RNA, 14 nt, Vaccinia virus
uaaauacauuauca

SEQ ID NO: 3279521 - RNA, 16 nt, Vaccinia virus
cuuguuguuuauuuuc

SEQ ID NO: 3279522 - RNA, 20 nt, Vaccinia virus
ucguauuucauaaaaguuau

SEQ ID NO: 3279523 - RNA, 19 nt, Vaccinia virus
uacuaaugguaucaagaag

SEQ ID NO: 3279524 - RNA, 18 nt, Vaccinia virus
aguaaguaucuuauguau

SEQ ID NO: 3279525 - RNA, 20 nt, Vaccinia virus
auaucacauaucuaaaugaa

SEQ ID NO: 3279526 - RNA, 14 nt, Vaccinia virus
aucgacuauagaca

SEQ ID NO: 3279527 - RNA, 18 nt, Vaccinia virus
ucuaguuaucauguagua

SEQ ID NO: 3279528 - RNA, 21 nt, Vaccinia virus
caaauauaugcaaaauaauau

SEQ ID NO: 3279529 - RNA, 12 nt, Vaccinia virus
ucgucuuuagag

SEQ ID NO: 3279530 - RNA, 20 nt, Vaccinia virus
gcaugguaguucguagauuu

SEQ ID NO: 3279531 - RNA, 15 nt, Vaccinia virus
acaauauuacaaaau

SEQ ID NO: 3279532 - RNA, 19 nt, Vaccinia virus
aucugggaauaaaauacua

SEQ ID NO: 3279533 - RNA, 17 nt, Vaccinia virus
acggccauugcugccac

SEQ ID NO: 3279534 - RNA, 17 nt, Vaccinia virus
uugccguugucuguauu

SEQ ID NO: 3279535 - RNA, 20 nt, Vaccinia virus
auauagcggaugaaaaauuu

SEQ ID NO: 3279536 - RNA, 15 nt, Vaccinia virus
uuuauaucaauaaga

SEQ ID NO: 3279537 - RNA, 17 nt, Vaccinia virus
acaagcccgucaauaau

SEQ ID NO: 3279538 - RNA, 15 nt, Vaccinia virus
augaucacaaagaaa

SEQ ID NO: 3279539 - RNA, 17 nt, Vaccinia virus
uucugcgcaaugcauaa

SEQ ID NO: 3279540 - RNA, 22 nt, Vaccinia virus
guaucaaucaagaggauggaau

SEQ ID NO: 3279541 - RNA, 17 nt, Vaccinia virus
acuaaucgauuuugcau

SEQ ID NO: 3279542 - RNA, 16 nt, Vaccinia virus
aauaacaauuaacaau

SEQ ID NO: 3279543 - RNA, 20 nt, Vaccinia virus
agaacgaugucaaaauauga

SEQ ID NO: 3279544 - RNA, 15 nt, Vaccinia virus
ccaacucuuuaauaa

SEQ ID NO: 3279545 - RNA, 23 nt, Vaccinia virus
uaaauuuuuuuucaguuaucuau

SEQ ID NO: 3279546 - RNA, 19 nt, Vaccinia virus
aauguuagugaugaauauc

SEQ ID NO: 3279547 - RNA, 15 nt, Vaccinia virus
aaauacuucuuggaa

SEQ ID NO: 3279548 - RNA, 19 nt, Vaccinia virus
auuaucgcuaauugacaca

SEQ ID NO: 3279549 - RNA, 16 nt, Vaccinia virus
cauuguuuguauucuc

SEQ ID NO: 3279550 - RNA, 22 nt, Vaccinia virus
uagauaacggacaacaacuauc

SEQ ID NO: 3279551 - RNA, 22 nt, Vaccinia virus
ucagaauuuucauggauguaga

SEQ ID NO: 3279552 - RNA, 12 nt, Vaccinia virus
uccuccuaucaa

SEQ ID NO: 3279553 - RNA, 22 nt, Vaccinia virus
cgaaccagaaucagugaauaaa

SEQ ID NO: 3279554 - RNA, 18 nt, Vaccinia virus
uaagugauauaaaacuau

SEQ ID NO: 3279555 - RNA, 14 nt, Vaccinia virus
guuuaaaacuucua

SEQ ID NO: 3279556 - RNA, 23 nt, Vaccinia virus
aaaucuuuguucuaaaaacugua

SEQ ID NO: 3279557 - RNA, 16 nt, Vaccinia virus
uuaugccgaacuaaaa

SEQ ID NO: 3279558 - RNA, 20 nt, Vaccinia virus
gaauguaauuuuuguuuccg

SEQ ID NO: 3279559 - RNA, 18 nt, Vaccinia virus
uaaguaguuuaucaacau

SEQ ID NO: 3279560 - RNA, 20 nt, Vaccinia virus
aauaaaauguuaauacauca

SEQ ID NO: 3279561 - RNA, 20 nt, Vaccinia virus
auccuucagauaaucugaaa

SEQ ID NO: 3279562 - RNA, 12 nt, Vaccinia virus
gaaguaaugaag

SEQ ID NO: 3279563 - RNA, 16 nt, Vaccinia virus
agggaagcaaaugaug

SEQ ID NO: 3279564 - RNA, 19 nt, Vaccinia virus
aauccuauacucugaaaga

SEQ ID NO: 3279565 - RNA, 22 nt, Vaccinia virus
uucauaauuguuagcuguuuuc

SEQ ID NO: 3279566 - RNA, 15 nt, Vaccinia virus
auguuguuuuauaua

SEQ ID NO: 3279567 - RNA, 13 nt, Vaccinia virus
ucaucacauaucg

SEQ ID NO: 3279568 - RNA, 20 nt, Vaccinia virus
guuaaagaaauuaauaaaga

SEQ ID NO: 3279569 - RNA, 22 nt, Vaccinia virus
uagagugagucuagaauucauu

SEQ ID NO: 3279570 - RNA, 22 nt, Vaccinia virus
aucuagcugucuguaucauauu

SEQ ID NO: 3279571 - RNA, 21 nt, Vaccinia virus
gaaaucauuuuuuuaaaacug

SEQ ID NO: 3279572 - RNA, 15 nt, Vaccinia virus
gcguccgauuccguu

SEQ ID NO: 3279573 - RNA, 20 nt, Vaccinia virus
agacuaggugcuauggaugg

SEQ ID NO: 3279574 - RNA, 20 nt, Vaccinia virus
aaguccuaguuguauacuga

SEQ ID NO: 3279575 - RNA, 22 nt, Vaccinia virus
aucuagccauaucuaaagcuau

SEQ ID NO: 3279576 - RNA, 16 nt, Vaccinia virus
guaaauccuaguucug

SEQ ID NO: 3279577 - RNA, 20 nt, Vaccinia virus
acaauauauucucauaguau

SEQ ID NO: 3279578 - RNA, 13 nt, Vaccinia virus
accucgagaaugu

SEQ ID NO: 3279579 - RNA, 17 nt, Vaccinia virus
ucuauccaagauacuua

SEQ ID NO: 3279580 - RNA, 21 nt, Vaccinia virus
uagcacuacgcaauaugauca

SEQ ID NO: 3279581 - RNA, 21 nt, Vaccinia virus
uaccacuuuccaacuuaucau

SEQ ID NO: 3279582 - RNA, 11 nt, Vaccinia virus
auaucauauau

SEQ ID NO: 3279583 - RNA, 19 nt, Vaccinia virus
acuuuaaauaauuuacaaa

SEQ ID NO: 3279584 - RNA, 17 nt, Vaccinia virus
auguaauuaaauguuug

SEQ ID NO: 3279585 - RNA, 16 nt, Vaccinia virus
uacccauccaauacua

SEQ ID NO: 3279586 - RNA, 13 nt, Vaccinia virus
uuaucauacuguc

SEQ ID NO: 3279587 - RNA, 18 nt, Vaccinia virus
acugcuuuaggugcugaa

SEQ ID NO: 3279588 - RNA, 15 nt, Vaccinia virus
uaaucuuacuacgau

SEQ ID NO: 3279589 - RNA, 13 nt, Vaccinia virus
auucaucaacauu

SEQ ID NO: 3279590 - RNA, 19 nt, Vaccinia virus
cugcagcaacuugugcacu

SEQ ID NO: 3279591 - RNA, 21 nt, Vaccinia virus
ccaucgcuucuaucuuguuua

SEQ ID NO: 3279592 - RNA, 18 nt, Vaccinia virus
aauacgaugauauuaaaa

SEQ ID NO: 3279593 - RNA, 18 nt, Vaccinia virus
uagaacugccauauguug

SEQ ID NO: 3279594 - RNA, 15 nt, Vaccinia virus
aucgucucuaucuuu

SEQ ID NO: 3279595 - RNA, 18 nt, Vaccinia virus
uuaauaaauuucuuuuca

SEQ ID NO: 3279596 - RNA, 21 nt, Vaccinia virus
uaauauccucaauaacguuau

SEQ ID NO: 3279597 - RNA, 23 nt, Vaccinia virus
ucuugacugucgcuaauaucuaa

SEQ ID NO: 3279598 - RNA, 20 nt, Vaccinia virus
ucuuuuauuuuuuguaggaa

SEQ ID NO: 3279599 - RNA, 21 nt, Vaccinia virus
uauucacaagaugaauucagu

SEQ ID NO: 3279600 - RNA, 15 nt, Vaccinia virus
auccguucuuaacuu

SEQ ID NO: 3279601 - RNA, 21 nt, Vaccinia virus
cuucaucggcuuuaacaauug

SEQ ID NO: 3279602 - RNA, 16 nt, Vaccinia virus
ggcuccucucucaggc

SEQ ID NO: 3279603 - RNA, 23 nt, Vaccinia virus
gauuauaagauuaaauggcagac

SEQ ID NO: 3279604 - RNA, 17 nt, Vaccinia virus
aucgacgccuuagaaau

SEQ ID NO: 3279605 - RNA, 19 nt, Vaccinia virus
auuugguauauacauagau

SEQ ID NO: 3279606 - RNA, 20 nt, Vaccinia virus
ucaucggacuuugugcauau

SEQ ID NO: 3279607 - RNA, 17 nt, Vaccinia virus
gaaguacuauuaaaacc

SEQ ID NO: 3279608 - RNA, 13 nt, Vaccinia virus
uuaaauccuuaau

SEQ ID NO: 3279609 - RNA, 21 nt, Vaccinia virus
uaaaacuuccucauuaagauu

SEQ ID NO: 3279610 - RNA, 18 nt, Vaccinia virus
caauacgccaauaaugau

SEQ ID NO: 3279611 - RNA, 19 nt, Vaccinia virus
agaguuuuauucucauuau

SEQ ID NO: 3279612 - RNA, 10 nt, Vaccinia virus
uacuuuucua

SEQ ID NO: 3279613 - RNA, 14 nt, Vaccinia virus
ggcauguguuuccc

SEQ ID NO: 3279614 - RNA, 21 nt, Vaccinia virus
agaaauggagagagacuguuu

SEQ ID NO: 3279615 - RNA, 17 nt, Vaccinia virus
acaguaucauuuaaaca

SEQ ID NO: 3279616 - RNA, 17 nt, Vaccinia virus
augauugauuagaaaau

SEQ ID NO: 3279617 - RNA, 22 nt, Vaccinia virus
aucuuuuagaaaaguuaaacau

SEQ ID NO: 3279618 - RNA, 22 nt, Vaccinia virus
acauguauacuugacaaaaauu

SEQ ID NO: 3279619 - RNA, 16 nt, Vaccinia virus
auccauauuuucuggu

SEQ ID NO: 3279620 - RNA, 15 nt, Vaccinia virus
aggcauuaacuagau

SEQ ID NO: 3279621 - RNA, 14 nt, Vaccinia virus
cuauuuuuaauaua

SEQ ID NO: 3279622 - RNA, 23 nt, Vaccinia virus
uauucuaauacauaauucuucug

SEQ ID NO: 3279623 - RNA, 16 nt, Vaccinia virus
gauuauucuacuauca

SEQ ID NO: 3279624 - RNA, 13 nt, Vaccinia virus
auuaauacauauu

SEQ ID NO: 3279625 - RNA, 15 nt, Vaccinia virus
caguuucuguaauga

SEQ ID NO: 3279626 - RNA, 18 nt, Vaccinia virus
auguagccuugacuacau

SEQ ID NO: 3279627 - RNA, 12 nt, Vaccinia virus
ucaaaucuauau

SEQ ID NO: 3279628 - RNA, 15 nt, Vaccinia virus
aaguuucguacaaau

SEQ ID NO: 3279629 - RNA, 16 nt, Vaccinia virus
aucuuuucuguacuca

SEQ ID NO: 3279630 - RNA, 16 nt, Vaccinia virus
ccauuuuaaaaucauu

SEQ ID NO: 3279631 - RNA, 18 nt, Vaccinia virus
auuaacauaguugaauaa

SEQ ID NO: 3279632 - RNA, 20 nt, Vaccinia virus
uauaguucuuaacaucuauu

SEQ ID NO: 3279633 - RNA, 18 nt, Vaccinia virus
uaucagacuacuuauucu

SEQ ID NO: 3279634 - RNA, 17 nt, Vaccinia virus
gcaauugcauucccauc

SEQ ID NO: 3279635 - RNA, 18 nt, Vaccinia virus
gauguagugauagauaug

SEQ ID NO: 3279636 - RNA, 14 nt, Vaccinia virus
acugucuaaaugua

SEQ ID NO: 3279637 - RNA, 20 nt, Vaccinia virus
aguucaccaaacaacuuuua

SEQ ID NO: 3279638 - RNA, 15 nt, Vaccinia virus
auauuaauucuguaa

SEQ ID NO: 3279639 - RNA, 22 nt, Vaccinia virus
cuuaugaaacuuggaaacaucu

SEQ ID NO: 3279640 - RNA, 15 nt, Vaccinia virus
gccaccacuucucua

SEQ ID NO: 3279641 - RNA, 19 nt, Vaccinia virus
ucuaucuccaguauuuaca

SEQ ID NO: 3279642 - RNA, 12 nt, Vaccinia virus
cuaccuauuuca

SEQ ID NO: 3279643 - RNA, 15 nt, Vaccinia virus
acaucuugauacuuu

SEQ ID NO: 3279644 - RNA, 20 nt, Vaccinia virus
guuacauuaguaaucuuuuu

SEQ ID NO: 3279645 - RNA, 21 nt, Vaccinia virus
uuauuuuuugguauaauucua

SEQ ID NO: 3279646 - RNA, 17 nt, Vaccinia virus
auuaaaauuaacaagga

SEQ ID NO: 3279647 - RNA, 19 nt, Vaccinia virus
aaugaagaucuauuuccag

SEQ ID NO: 3279648 - RNA, 17 nt, Vaccinia virus
uaaacucuuuaguuucc

SEQ ID NO: 3279649 - RNA, 22 nt, Vaccinia virus
acaauuuuuuuauaauaauucu

SEQ ID NO: 3279650 - RNA, 22 nt, Vaccinia virus
caaguuuccuguaaauuuucua

SEQ ID NO: 3279651 - RNA, 12 nt, Vaccinia virus
aaguaauucaga

SEQ ID NO: 3279652 - RNA, 16 nt, Vaccinia virus
auacaauaaauguuua

SEQ ID NO: 3279653 - RNA, 18 nt, Vaccinia virus
uacauaggcaacauccga

SEQ ID NO: 3279654 - RNA, 12 nt, Vaccinia virus
aaucaauagcuu

SEQ ID NO: 3279655 - RNA, 14 nt, Vaccinia virus
aagaaaaugcagaa

SEQ ID NO: 3279656 - RNA, 20 nt, Vaccinia virus
uaguaaaauaaucauacaau

SEQ ID NO: 3279657 - RNA, 18 nt, Vaccinia virus
aaguaugauacaauacuu

SEQ ID NO: 3279658 - RNA, 22 nt, Vaccinia virus
uaauuugauucuucguucuuca

SEQ ID NO: 3279659 - RNA, 14 nt, Vaccinia virus
ggcauuuguauuuu

SEQ ID NO: 3279660 - RNA, 18 nt, Vaccinia virus
uuucuguaaauucaugau

SEQ ID NO: 3279661 - RNA, 14 nt, Vaccinia virus
auuauauauggauu

SEQ ID NO: 3279662 - RNA, 23 nt, Vaccinia virus
agucuauaugaucaaaaagagau

SEQ ID NO: 3279663 - RNA, 17 nt, Vaccinia virus
cauccuuuauuaaauca

SEQ ID NO: 3279664 - RNA, 23 nt, Vaccinia virus
ugugucuacaaccgcuacauaau

SEQ ID NO: 3279665 - RNA, 13 nt, Vaccinia virus
uagcggaugaaaa

SEQ ID NO: 3279666 - RNA, 17 nt, Vaccinia virus
uaugaauaaucuucauu

SEQ ID NO: 3279667 - RNA, 14 nt, Vaccinia virus
caaacaacugaaaa

SEQ ID NO: 3279668 - RNA, 16 nt, Vaccinia virus
aguguuauaaauggau

SEQ ID NO: 3279669 - RNA, 20 nt, Vaccinia virus
uaauaaccugacuaauuuga

SEQ ID NO: 3279670 - RNA, 23 nt, Vaccinia virus
cgucucugccauggauggaaaca

SEQ ID NO: 3279671 - RNA, 20 nt, Vaccinia virus
guagugcaggcuuaaagcaa

SEQ ID NO: 3279672 - RNA, 23 nt, Vaccinia virus
uagaaaauaucacgcuuuccauu

SEQ ID NO: 3279673 - RNA, 15 nt, Vaccinia virus
acuauuuuuuacauu

SEQ ID NO: 3279674 - RNA, 19 nt, Vaccinia virus
cuuagaaggaguguuuucu

SEQ ID NO: 3279675 - RNA, 19 nt, Vaccinia virus
gacuuugaacauuauugau

SEQ ID NO: 3279676 - RNA, 14 nt, Vaccinia virus
uuaucuaacucuuu

SEQ ID NO: 3279677 - RNA, 19 nt, Vaccinia virus
aaaucagaauguuacagca

SEQ ID NO: 3279678 - RNA, 14 nt, Vaccinia virus
agauguauacuccu

SEQ ID NO: 3279679 - RNA, 13 nt, Vaccinia virus
ggcauuguuucua

SEQ ID NO: 3279680 - RNA, 18 nt, Vaccinia virus
cgucuucccaaaauguua

SEQ ID NO: 3279681 - RNA, 15 nt, Vaccinia virus
aaauuauaaugaaua

SEQ ID NO: 3279682 - RNA, 12 nt, Vaccinia virus
cccauaacuggu

SEQ ID NO: 3279683 - RNA, 20 nt, Vaccinia virus
auuauugucauaaacauuau

SEQ ID NO: 3279684 - RNA, 19 nt, Vaccinia virus
auugguuacccuugucauu

SEQ ID NO: 3279685 - RNA, 11 nt, Vaccinia virus
uuauauuuugu

SEQ ID NO: 3279686 - RNA, 15 nt, Vaccinia virus
auaacuacauauucu

SEQ ID NO: 3279687 - RNA, 14 nt, Vaccinia virus
auuauccaauagau

SEQ ID NO: 3279688 - RNA, 17 nt, Vaccinia virus
cuauaagccuuuguuua

SEQ ID NO: 3279689 - RNA, 18 nt, Vaccinia virus
acgauccaaauuccggaa

SEQ ID NO: 3279690 - RNA, 20 nt, Vaccinia virus
uuagaauauauguauguaaa

SEQ ID NO: 3279691 - RNA, 17 nt, Vaccinia virus
uaaauguggcuacaaac

SEQ ID NO: 3279692 - RNA, 17 nt, Vaccinia virus
aguaaaugaaaaaaaac

SEQ ID NO: 3279693 - RNA, 15 nt, Vaccinia virus
auuauaaagauaugu

SEQ ID NO: 3279694 - RNA, 20 nt, Vaccinia virus
auuaugcauucguuuaaaga

SEQ ID NO: 3279695 - RNA, 20 nt, Vaccinia virus
guacauggaugauauagaua

SEQ ID NO: 3279696 - RNA, 15 nt, Vaccinia virus
uuaccagauaucuuc

SEQ ID NO: 3279697 - RNA, 12 nt, Vaccinia virus
augaaauguuug

SEQ ID NO: 3279698 - RNA, 19 nt, Vaccinia virus
uggauauuacaaauacuuu

SEQ ID NO: 3279699 - RNA, 21 nt, Vaccinia virus
uaccuaucaaggaacaaauau

SEQ ID NO: 3279700 - RNA, 16 nt, Vaccinia virus
auaaucaauguuguaa

SEQ ID NO: 3279701 - RNA, 14 nt, Vaccinia virus
agauauauagaauu

SEQ ID NO: 3279702 - RNA, 23 nt, Vaccinia virus
uuaaugucugcgccauuaucuau

SEQ ID NO: 3279703 - RNA, 14 nt, Vaccinia virus
aaugguuucgaaga

SEQ ID NO: 3279704 - RNA, 14 nt, Vaccinia virus
aguaaauucaagau

SEQ ID NO: 3279705 - RNA, 17 nt, Vaccinia virus
uauaucaauaagaaagu

SEQ ID NO: 3279706 - RNA, 13 nt, Vaccinia virus
aguauuuuuauca

SEQ ID NO: 3279707 - RNA, 19 nt, Vaccinia virus
cacauccuuuauuaauaau

SEQ ID NO: 3279708 - RNA, 19 nt, Vaccinia virus
auauagugaaacaaaauau

SEQ ID NO: 3279709 - RNA, 14 nt, Vaccinia virus
ucgauggucucaca

SEQ ID NO: 3279710 - RNA, 20 nt, Vaccinia virus
ccggacgacauauuaaucuu

SEQ ID NO: 3279711 - RNA, 17 nt, Vaccinia virus
uauacgaaaaaauagca

SEQ ID NO: 3279712 - RNA, 20 nt, Vaccinia virus
ugauuucguuagucauauua

SEQ ID NO: 3279713 - RNA, 21 nt, Vaccinia virus
uaacuaugcgauuauuuucau

SEQ ID NO: 3279714 - RNA, 18 nt, Vaccinia virus
aucagaauaaaucaauau

SEQ ID NO: 3279715 - RNA, 17 nt, Vaccinia virus
augcuauuagaaaugga

SEQ ID NO: 3279716 - RNA, 23 nt, Vaccinia virus
gauucuauuaagaguaacagcug

SEQ ID NO: 3279717 - RNA, 18 nt, Vaccinia virus
aucauaaauuauuucauu

SEQ ID NO: 3279718 - RNA, 18 nt, Vaccinia virus
caauaacgcaaucaugau

SEQ ID NO: 3279719 - RNA, 14 nt, Vaccinia virus
augaaauauauuaa

SEQ ID NO: 3279720 - RNA, 14 nt, Vaccinia virus
gacuagacauuuac

SEQ ID NO: 3279721 - RNA, 18 nt, Vaccinia virus
cauaaaacucauuguuua

SEQ ID NO: 3279722 - RNA, 17 nt, Vaccinia virus
aacuagaagucugaucu

SEQ ID NO: 3279723 - RNA, 21 nt, Vaccinia virus
acuucaucaugaguuaaauau

SEQ ID NO: 3279724 - RNA, 11 nt, Vaccinia virus
cuguggaauaa

SEQ ID NO: 3279725 - RNA, 15 nt, Vaccinia virus
guuugauaaauguag

SEQ ID NO: 3279726 - RNA, 22 nt, Vaccinia virus
cucucauuuucuuuaacaaauu

SEQ ID NO: 3279727 - RNA, 19 nt, Vaccinia virus
gcgauagcugauaauagaa

SEQ ID NO: 3279728 - RNA, 23 nt, Vaccinia virus
aauacauauuauucaaaauauga

SEQ ID NO: 3279729 - RNA, 19 nt, Vaccinia virus
acguuuuucgaaaaaauua

SEQ ID NO: 3279730 - RNA, 20 nt, Vaccinia virus
auuuuugacuuacauaaaug

SEQ ID NO: 3279731 - RNA, 22 nt, Vaccinia virus
agaaacuauagauaaugauaua

SEQ ID NO: 3279732 - RNA, 13 nt, Vaccinia virus
uaugaaucuggau

SEQ ID NO: 3279733 - RNA, 14 nt, Vaccinia virus
uuauuaucuguaga

SEQ ID NO: 3279734 - RNA, 14 nt, Vaccinia virus
acucccacaaauac

SEQ ID NO: 3279735 - RNA, 15 nt, Vaccinia virus
ugugaugauuguaca

SEQ ID NO: 3279736 - RNA, 14 nt, Vaccinia virus
aacuuuaucaucuu

SEQ ID NO: 3279737 - RNA, 23 nt, Vaccinia virus
aacaagaucaugaacacgaugau

SEQ ID NO: 3279738 - RNA, 13 nt, Vaccinia virus
aucauaauuacau

SEQ ID NO: 3279739 - RNA, 17 nt, Vaccinia virus
uaaucggagaauguuuc

SEQ ID NO: 3279740 - RNA, 21 nt, Vaccinia virus
acuauguuuuguauacauaaa

SEQ ID NO: 3279741 - RNA, 15 nt, Vaccinia virus
augagguuuugcaac

SEQ ID NO: 3279742 - RNA, 17 nt, Vaccinia virus
gccgcuauaaugaugau

SEQ ID NO: 3279743 - RNA, 18 nt, Vaccinia virus
uuaacgaggacuuauuca

SEQ ID NO: 3279744 - RNA, 16 nt, Vaccinia virus
uuuaaugugaaaucgu

SEQ ID NO: 3279745 - RNA, 19 nt, Vaccinia virus
cgccuccguugucauaaac

SEQ ID NO: 3279746 - RNA, 21 nt, Vaccinia virus
aaaaagauuaccguaugauau

SEQ ID NO: 3279747 - RNA, 13 nt, Vaccinia virus
guccaaugauugc

SEQ ID NO: 3279748 - RNA, 18 nt, Vaccinia virus
auaugaaccugacaugau

SEQ ID NO: 3279749 - RNA, 21 nt, Vaccinia virus
agaacauuuuuauaaacauga

SEQ ID NO: 3279750 - RNA, 17 nt, Vaccinia virus
uuauauuccucuauuaa

SEQ ID NO: 3279751 - RNA, 19 nt, Vaccinia virus
acccauuagguuaaaugau

SEQ ID NO: 3279752 - RNA, 16 nt, Vaccinia virus
cgguucuuuaaaagaa

SEQ ID NO: 3279753 - RNA, 15 nt, Vaccinia virus
aauauggauccucau

SEQ ID NO: 3279754 - RNA, 15 nt, Vaccinia virus
acuucaggaaauauc

SEQ ID NO: 3279755 - RNA, 19 nt, Vaccinia virus
aagaagugucuauaaaugu

SEQ ID NO: 3279756 - RNA, 16 nt, Vaccinia virus
auguuguuaaaauaua

SEQ ID NO: 3279757 - RNA, 23 nt, Vaccinia virus
caauauuguuaucguaauuggaa

SEQ ID NO: 3279758 - RNA, 13 nt, Vaccinia virus
ucuuuaauccaau

SEQ ID NO: 3279759 - RNA, 23 nt, Vaccinia virus
uuaaaaaguugacagaaccuugu

SEQ ID NO: 3279760 - RNA, 16 nt, Vaccinia virus
auuaacuuuguucauu

SEQ ID NO: 3279761 - RNA, 18 nt, Vaccinia virus
aauuacugauaauguaga

SEQ ID NO: 3279762 - RNA, 18 nt, Vaccinia virus
aauaaggaauauacuaau

SEQ ID NO: 3279763 - RNA, 17 nt, Vaccinia virus
guaaaggauaugauaug

SEQ ID NO: 3279764 - RNA, 12 nt, Vaccinia virus
aacacaaccaaa

SEQ ID NO: 3279765 - RNA, 20 nt, Vaccinia virus
acagcuaucaaaauauguag

SEQ ID NO: 3279766 - RNA, 14 nt, Vaccinia virus
acuguaaaaacaaa

SEQ ID NO: 3279767 - RNA, 22 nt, Vaccinia virus
aauaacauuuuuuguaaaugua

SEQ ID NO: 3279768 - RNA, 19 nt, Vaccinia virus
ucaaauacaucuauuagua

SEQ ID NO: 3279769 - RNA, 22 nt, Vaccinia virus
uauugcggcauauauaaaguug

SEQ ID NO: 3279770 - RNA, 13 nt, Vaccinia virus
gaaugaugauaua

SEQ ID NO: 3279771 - RNA, 14 nt, Vaccinia virus
uccagauaauaacc

SEQ ID NO: 3279772 - RNA, 21 nt, Vaccinia virus
cuacaucaguuuuguauucca

SEQ ID NO: 3279773 - RNA, 16 nt, Vaccinia virus
aaacguuuagagauua

SEQ ID NO: 3279774 - RNA, 20 nt, Vaccinia virus
uagguaugaucguuaagaau

SEQ ID NO: 3279775 - RNA, 21 nt, Vaccinia virus
uuaugggcauuuguauuuuga

SEQ ID NO: 3279776 - RNA, 15 nt, Vaccinia virus
uuaaaguuacaaaca

SEQ ID NO: 3279777 - RNA, 13 nt, Vaccinia virus
agugcaaugaaua

SEQ ID NO: 3279778 - RNA, 14 nt, Vaccinia virus
uauaauauauucua

SEQ ID NO: 3279779 - RNA, 15 nt, Vaccinia virus
ucuauacguuucuau

SEQ ID NO: 3279780 - RNA, 23 nt, Vaccinia virus
uacgcauuuuagcagucuaacau

SEQ ID NO: 3279781 - RNA, 20 nt, Vaccinia virus
cguauagcaauguaauggag

SEQ ID NO: 3279782 - RNA, 13 nt, Vaccinia virus
aucguauauuaag

SEQ ID NO: 3279783 - RNA, 12 nt, Vaccinia virus
agaauaauacag

SEQ ID NO: 3279784 - RNA, 22 nt, Vaccinia virus
ggaaaaucgucuucacaaagaa

SEQ ID NO: 3279785 - RNA, 19 nt, Vaccinia virus
uauggaaacuauaauuuug

SEQ ID NO: 3279786 - RNA, 22 nt, Vaccinia virus
ggaugaccauauauuuauuuuc

SEQ ID NO: 3279787 - RNA, 14 nt, Vaccinia virus
aaacauauucuaug

SEQ ID NO: 3279788 - RNA, 13 nt, Vaccinia virus
ccuaauaucauau

SEQ ID NO: 3279789 - RNA, 16 nt, Vaccinia virus
auuuauauauuaaaaa

SEQ ID NO: 3279790 - RNA, 14 nt, Vaccinia virus
caaauguagaagau

SEQ ID NO: 3279791 - RNA, 22 nt, Vaccinia virus
auggaguauuccaagaguuuua

SEQ ID NO: 3279792 - RNA, 23 nt, Vaccinia virus
gacuuguuagauagagaugagau

SEQ ID NO: 3279793 - RNA, 12 nt, Vaccinia virus
ucaucuguuuua

SEQ ID NO: 3279794 - RNA, 17 nt, Vaccinia virus
aagaugcaaacauuaug

SEQ ID NO: 3279795 - RNA, 23 nt, Vaccinia virus
ugcaucuauauaaucuuuuucau

SEQ ID NO: 3279796 - RNA, 17 nt, Vaccinia virus
ucuaauucuacauaugg

SEQ ID NO: 3279797 - RNA, 20 nt, Vaccinia virus
uuccauauagauauaauuuu

SEQ ID NO: 3279798 - RNA, 18 nt, Vaccinia virus
uucuuaaaagguuucaua

SEQ ID NO: 3279799 - RNA, 20 nt, Vaccinia virus
acaacauccuccagagaaga

SEQ ID NO: 3279800 - RNA, 13 nt, Vaccinia virus
auuuaacacuaua

SEQ ID NO: 3279801 - RNA, 17 nt, Vaccinia virus
caugagauugaaugcca

SEQ ID NO: 3279802 - RNA, 19 nt, Vaccinia virus
aacaggugguauauuauau

SEQ ID NO: 3279803 - RNA, 19 nt, Vaccinia virus
acuauuagaauuaaguaga

SEQ ID NO: 3279804 - RNA, 21 nt, Vaccinia virus
aaaacauaaaggaauauacaa

SEQ ID NO: 3279805 - RNA, 15 nt, Vaccinia virus
aaucuaugauauugu

SEQ ID NO: 3279806 - RNA, 20 nt, Vaccinia virus
aagauacuccuucaugaaca

SEQ ID NO: 3279807 - RNA, 15 nt, Vaccinia virus
ccucagguagguuua

SEQ ID NO: 3279808 - RNA, 18 nt, Vaccinia virus
uauaacacuuauguauua

SEQ ID NO: 3279809 - RNA, 23 nt, Vaccinia virus
guuucccuauuaaaauucuuaaa

SEQ ID NO: 3279810 - RNA, 17 nt, Vaccinia virus
gaacgaugucaaaauau

SEQ ID NO: 3279811 - RNA, 20 nt, Vaccinia virus
aaagauuaccguaugauaug

SEQ ID NO: 3279812 - RNA, 18 nt, Vaccinia virus
acuucuaucgauaauugu

SEQ ID NO: 3279813 - RNA, 15 nt, Vaccinia virus
auuucuauucaugaa

SEQ ID NO: 3279814 - RNA, 15 nt, Vaccinia virus
acauuguaugaugau

SEQ ID NO: 3279815 - RNA, 24 nt, Vaccinia virus
aucguauaucuucuucugugauag

SEQ ID NO: 3279816 - RNA, 22 nt, Vaccinia virus
acuauggacgcaugauaagaau

SEQ ID NO: 3279817 - RNA, 16 nt, Vaccinia virus
caucauccauuaauau

SEQ ID NO: 3279818 - RNA, 18 nt, Vaccinia virus
aucuaacagauacaaauu

SEQ ID NO: 3279819 - RNA, 12 nt, Vaccinia virus
uacuaagaaagu

SEQ ID NO: 3279820 - RNA, 22 nt, Vaccinia virus
caaaauucagauucuaucuuua

SEQ ID NO: 3279821 - RNA, 14 nt, Vaccinia virus
auauucuaugaauu

SEQ ID NO: 3279822 - RNA, 19 nt, Vaccinia virus
gauauacauuguauaaaaa

SEQ ID NO: 3279823 - RNA, 15 nt, Vaccinia virus
uaauaaaucaaaaua

SEQ ID NO: 3279824 - RNA, 22 nt, Vaccinia virus
acuacaaaaguuuucuuucaaa

SEQ ID NO: 3279825 - RNA, 14 nt, Vaccinia virus
aacugaaucuaaca

SEQ ID NO: 3279826 - RNA, 14 nt, Vaccinia virus
ucauauuaaugggu

SEQ ID NO: 3279827 - RNA, 14 nt, Vaccinia virus
auuuaucauggagu

SEQ ID NO: 3279828 - RNA, 14 nt, Vaccinia virus
uaauacuguuuucu

SEQ ID NO: 3279829 - RNA, 19 nt, Vaccinia virus
uuaucucagugcaaagauu

SEQ ID NO: 3279830 - RNA, 19 nt, Vaccinia virus
gacuagauccguuaguuua

SEQ ID NO: 3279831 - RNA, 21 nt, Vaccinia virus
cagaacgaauuaugauagaaa

SEQ ID NO: 3279832 - RNA, 18 nt, Vaccinia virus
agauagcuucaucuauau

SEQ ID NO: 3279833 - RNA, 13 nt, Vaccinia virus
caaaaaaugaauu

SEQ ID NO: 3279834 - RNA, 17 nt, Vaccinia virus
auuucaaagacuaacuu

SEQ ID NO: 3279835 - RNA, 21 nt, Vaccinia virus
agucacuauuuuuauaacuaa

SEQ ID NO: 3279836 - RNA, 12 nt, Vaccinia virus
ucauaguuuuua

SEQ ID NO: 3279837 - RNA, 22 nt, Vaccinia virus
auaacgaguacauucugcaaua

SEQ ID NO: 3279838 - RNA, 14 nt, Vaccinia virus
aauauaaaaugaca

SEQ ID NO: 3279839 - RNA, 17 nt, Vaccinia virus
aacgcucuuuugaugau

SEQ ID NO: 3279840 - RNA, 20 nt, Vaccinia virus
gugcaauuagauccaaagaa

SEQ ID NO: 3279841 - RNA, 16 nt, Vaccinia virus
augcaccuagagaauu

SEQ ID NO: 3279842 - RNA, 18 nt, Vaccinia virus
aguauucuauuuuggaaa

SEQ ID NO: 3279843 - RNA, 21 nt, Vaccinia virus
agauaacaacgacuuauaauu

SEQ ID NO: 3279844 - RNA, 21 nt, Vaccinia virus
uuagagauaauauccugaaca

SEQ ID NO: 3279845 - RNA, 20 nt, Vaccinia virus
agauuuuugacuuacauaaa

SEQ ID NO: 3279846 - RNA, 14 nt, Vaccinia virus
aaauuaaaaaagau

SEQ ID NO: 3279847 - RNA, 13 nt, Vaccinia virus
augcgaaggaagu

SEQ ID NO: 3279848 - RNA, 22 nt, Vaccinia virus
cauuaaacccucgaucaugaau

SEQ ID NO: 3279849 - RNA, 16 nt, Vaccinia virus
uaacaguauuauuaau

SEQ ID NO: 3279850 - RNA, 16 nt, Vaccinia virus
auuaucaaauguuguu

SEQ ID NO: 3279851 - RNA, 17 nt, Vaccinia virus
ugauugcagauuugcca

SEQ ID NO: 3279852 - RNA, 22 nt, Vaccinia virus
aaauuuguucguccgucaugau

SEQ ID NO: 3279853 - RNA, 19 nt, Vaccinia virus
uaaucuauaggcaacgaug

SEQ ID NO: 3279854 - RNA, 13 nt, Vaccinia virus
guguuaaaacaau

SEQ ID NO: 3279855 - RNA, 17 nt, Vaccinia virus
ucucuaugauccugaaa

SEQ ID NO: 3279856 - RNA, 22 nt, Vaccinia virus
gaucauuaauaugcucaugaac

SEQ ID NO: 3279857 - RNA, 18 nt, Vaccinia virus
cauacaucgccgucaucu

SEQ ID NO: 3279858 - RNA, 14 nt, Vaccinia virus
ucugauaauuuaga

SEQ ID NO: 3279859 - RNA, 22 nt, Vaccinia virus
guauacagcuggagauuaucau

SEQ ID NO: 3279860 - RNA, 10 nt, Vaccinia virus
gaaauacuua

SEQ ID NO: 3279861 - RNA, 17 nt, Vaccinia virus
caaguggcugcuauuuc

SEQ ID NO: 3279862 - RNA, 21 nt, Vaccinia virus
ucaccaauaaaaauaaacuag

SEQ ID NO: 3279863 - RNA, 15 nt, Vaccinia virus
uguaaaaaauauguu

SEQ ID NO: 3279864 - RNA, 14 nt, Vaccinia virus
aguuuucaucaaug

SEQ ID NO: 3279865 - RNA, 22 nt, Vaccinia virus
cuagacaccuuuucaauguuua

SEQ ID NO: 3279866 - RNA, 23 nt, Vaccinia virus
caaacuuugaagaauuuauauaa

SEQ ID NO: 3279867 - RNA, 22 nt, Vaccinia virus
gcaauauaaaugguauauuuua

SEQ ID NO: 3279868 - RNA, 17 nt, Vaccinia virus
ccauuagguuaaaugau

SEQ ID NO: 3279869 - RNA, 17 nt, Vaccinia virus
auguauuuugaggaaau

SEQ ID NO: 3279870 - RNA, 16 nt, Vaccinia virus
aacuuaaaagaauuac

SEQ ID NO: 3279871 - RNA, 13 nt, Vaccinia virus
gaagaaguuaaua

SEQ ID NO: 3279872 - RNA, 17 nt, Vaccinia virus
agguauuccuuuaucca

SEQ ID NO: 3279873 - RNA, 16 nt, Vaccinia virus
uuaaaauauauuauca

SEQ ID NO: 3279874 - RNA, 14 nt, Vaccinia virus
agcauaaacuauac

SEQ ID NO: 3279875 - RNA, 16 nt, Vaccinia virus
uuuaguuuauucauaa

SEQ ID NO: 3279876 - RNA, 14 nt, Vaccinia virus
uccauuuucuguaa

SEQ ID NO: 3279877 - RNA, 13 nt, Vaccinia virus
cauagaaaaugau

SEQ ID NO: 3279878 - RNA, 22 nt, Vaccinia virus
guguucauccaaggaucuucua

SEQ ID NO: 3279879 - RNA, 14 nt, Vaccinia virus
auuauuuuuggaag

SEQ ID NO: 3279880 - RNA, 17 nt, Vaccinia virus
cuccaccuucauauuua

SEQ ID NO: 3279881 - RNA, 13 nt, Vaccinia virus
gcggacauuuucu

SEQ ID NO: 3279882 - RNA, 19 nt, Vaccinia virus
cuucacauucggagauucu

SEQ ID NO: 3279883 - RNA, 17 nt, Vaccinia virus
cuauuucaacaaacugg

SEQ ID NO: 3279884 - RNA, 16 nt, Vaccinia virus
uagauaccauuaauca

SEQ ID NO: 3279885 - RNA, 16 nt, Vaccinia virus
uucuccaauacuaauu

SEQ ID NO: 3279886 - RNA, 17 nt, Vaccinia virus
uagcccucuucaagaac

SEQ ID NO: 3279887 - RNA, 13 nt, Vaccinia virus
cuacuuuuacagu

SEQ ID NO: 3279888 - RNA, 14 nt, Vaccinia virus
uuuugguucuucuc

SEQ ID NO: 3279889 - RNA, 19 nt, Vaccinia virus
ggcguguuauacggagaag

SEQ ID NO: 3279890 - RNA, 19 nt, Vaccinia virus
uugaccucucagaaucagu

SEQ ID NO: 3279891 - RNA, 14 nt, Vaccinia virus
acauguuacagaau

SEQ ID NO: 3279892 - RNA, 19 nt, Vaccinia virus
agugacacucuauaucuag

SEQ ID NO: 3279893 - RNA, 19 nt, Vaccinia virus
aaaguauccucuacucauu

SEQ ID NO: 3279894 - RNA, 18 nt, Vaccinia virus
aacauuccacauucagau

SEQ ID NO: 3279895 - RNA, 22 nt, Vaccinia virus
uucacgaaaaaugaugaaggca

SEQ ID NO: 3279896 - RNA, 23 nt, Vaccinia virus
uuuuguucacaaaaauacauaaa

SEQ ID NO: 3279897 - RNA, 16 nt, Vaccinia virus
aauacuucauuucuaa

SEQ ID NO: 3279898 - RNA, 17 nt, Vaccinia virus
uacauccgaaauacaaa

SEQ ID NO: 3279899 - RNA, 14 nt, Vaccinia virus
ucgcgauaauguag

SEQ ID NO: 3279900 - RNA, 14 nt, Vaccinia virus
augcaaucaaugau

SEQ ID NO: 3279901 - RNA, 17 nt, Vaccinia virus
gcccauagaguauuauu

SEQ ID NO: 3279902 - RNA, 23 nt, Vaccinia virus
uuagaaaacucucuauuucuuaa

SEQ ID NO: 3279903 - RNA, 15 nt, Vaccinia virus
agagauuuugaaaau

SEQ ID NO: 3279904 - RNA, 13 nt, Vaccinia virus
augacaaacauuu

SEQ ID NO: 3279905 - RNA, 13 nt, Vaccinia virus
cuaacaaaacuau

SEQ ID NO: 3279906 - RNA, 22 nt, Vaccinia virus
auguguauuaucagauauccaa

SEQ ID NO: 3279907 - RNA, 18 nt, Vaccinia virus
auauaaaccgcuauugaa

SEQ ID NO: 3279908 - RNA, 20 nt, Vaccinia virus
aagagauuucaacagacugu

SEQ ID NO: 3279909 - RNA, 22 nt, Vaccinia virus
caugucuaauguguuaaaaaaa

SEQ ID NO: 3279910 - RNA, 14 nt, Vaccinia virus
uuagucauugcaau

SEQ ID NO: 3279911 - RNA, 22 nt, Vaccinia virus
ucuuuuuauucucguuaaacag

SEQ ID NO: 3279912 - RNA, 17 nt, Vaccinia virus
augagugauaaguaaua

SEQ ID NO: 3279913 - RNA, 21 nt, Vaccinia virus
ucuauucgaaaacucuaagaa

SEQ ID NO: 3279914 - RNA, 19 nt, Vaccinia virus
agacuuugccacaacagaa

SEQ ID NO: 3279915 - RNA, 18 nt, Vaccinia virus
aucagaccguacauacau

SEQ ID NO: 3279916 - RNA, 23 nt, Vaccinia virus
acagagccaucuguaaaaagaua

SEQ ID NO: 3279917 - RNA, 18 nt, Vaccinia virus
aucuucuuauaagauugu

SEQ ID NO: 3279918 - RNA, 23 nt, Vaccinia virus
aggaacauuaucaauuuuuacau

SEQ ID NO: 3279919 - RNA, 13 nt, Vaccinia virus
uucacaaauacua

SEQ ID NO: 3279920 - RNA, 16 nt, Vaccinia virus
gagaaugacauaacua

SEQ ID NO: 3279921 - RNA, 21 nt, Vaccinia virus
aucuacgauccaucaaaaaac

SEQ ID NO: 3279922 - RNA, 13 nt, Vaccinia virus
acuauuugucuua

SEQ ID NO: 3279923 - RNA, 13 nt, Vaccinia virus
cuaagaaaacucu

SEQ ID NO: 3279924 - RNA, 14 nt, Vaccinia virus
caucaaaauauguu

SEQ ID NO: 3279925 - RNA, 20 nt, Vaccinia virus
acuacaauugucuaaugaua

SEQ ID NO: 3279926 - RNA, 15 nt, Vaccinia virus
cuucuuguauuuccu

SEQ ID NO: 3279927 - RNA, 20 nt, Vaccinia virus
cucauagucuauuaaguggu

SEQ ID NO: 3279928 - RNA, 22 nt, Vaccinia virus
aaacauuuuauauacuuuucua

SEQ ID NO: 3279929 - RNA, 13 nt, Vaccinia virus
aaugaauauagau

SEQ ID NO: 3279930 - RNA, 17 nt, Vaccinia virus
guugcaauaauaaaagu

SEQ ID NO: 3279931 - RNA, 19 nt, Vaccinia virus
uuuauaggcgguguauuua

SEQ ID NO: 3279932 - RNA, 16 nt, Vaccinia virus
acucaugauuaaaccu

SEQ ID NO: 3279933 - RNA, 15 nt, Vaccinia virus
ccagaacuauuuuua

SEQ ID NO: 3279934 - RNA, 21 nt, Vaccinia virus
uuccguuggaugguaauaaac

SEQ ID NO: 3279935 - RNA, 13 nt, Vaccinia virus
auuuuccauuuau

SEQ ID NO: 3279936 - RNA, 21 nt, Vaccinia virus
cuauuuuuuuauacuucuaau

SEQ ID NO: 3279937 - RNA, 15 nt, Vaccinia virus
uucucgaaaaaauua

SEQ ID NO: 3279938 - RNA, 20 nt, Vaccinia virus
auauagucuuggaucaaaua

SEQ ID NO: 3279939 - RNA, 22 nt, Vaccinia virus
acgucauccuuuccgaaagaua

SEQ ID NO: 3279940 - RNA, 14 nt, Vaccinia virus
uguauuuuggcaua

SEQ ID NO: 3279941 - RNA, 17 nt, Vaccinia virus
auauuugcacacauaau

SEQ ID NO: 3279942 - RNA, 19 nt, Vaccinia virus
auauagagauuagaggagg

SEQ ID NO: 3279943 - RNA, 13 nt, Vaccinia virus
aauagcucaauau

SEQ ID NO: 3279944 - RNA, 19 nt, Vaccinia virus
uuaaguagaucaucugaaa

SEQ ID NO: 3279945 - RNA, 16 nt, Vaccinia virus
caaaaauguucuuaau

SEQ ID NO: 3279946 - RNA, 11 nt, Vaccinia virus
gggaaucgaug

SEQ ID NO: 3279947 - RNA, 14 nt, Vaccinia virus
cuaucucuguaaac

SEQ ID NO: 3279948 - RNA, 19 nt, Vaccinia virus
gcacuaaugcaaauuacuu

SEQ ID NO: 3279949 - RNA, 22 nt, Vaccinia virus
aguuaggguucuuguuccauua

SEQ ID NO: 3279950 - RNA, 14 nt, Vaccinia virus
gugaaauuauuccu

SEQ ID NO: 3279951 - RNA, 18 nt, Vaccinia virus
aaacucguaaaaagauua

SEQ ID NO: 3279952 - RNA, 12 nt, Vaccinia virus
cagaaaugauuu

SEQ ID NO: 3279953 - RNA, 13 nt, Vaccinia virus
auuagaaauggau

SEQ ID NO: 3279954 - RNA, 18 nt, Vaccinia virus
auuaaaugcgucaaucau

SEQ ID NO: 3279955 - RNA, 19 nt, Vaccinia virus
uucuagaauaaguuucaua

SEQ ID NO: 3279956 - RNA, 17 nt, Vaccinia virus
gaaaauuauguaaaaca

SEQ ID NO: 3279957 - RNA, 23 nt, Vaccinia virus
uaaauccaaauucggaucuaauu

SEQ ID NO: 3279958 - RNA, 16 nt, Vaccinia virus
uucaucagauuauuua

SEQ ID NO: 3279959 - RNA, 15 nt, Vaccinia virus
uaaaccagacaaccc

SEQ ID NO: 3279960 - RNA, 21 nt, Vaccinia virus
cuauguuuccccuauaaucuu

SEQ ID NO: 3279961 - RNA, 13 nt, Vaccinia virus
acaaacuauacaa

SEQ ID NO: 3279962 - RNA, 19 nt, Vaccinia virus
acuauguuugguauacugu

SEQ ID NO: 3279963 - RNA, 13 nt, Vaccinia virus
aauuugacuacau

SEQ ID NO: 3279964 - RNA, 20 nt, Vaccinia virus
uauuccuaccaaacaaaauu

SEQ ID NO: 3279965 - RNA, 20 nt, Vaccinia virus
auauuacuauuggcaauugu

SEQ ID NO: 3279966 - RNA, 18 nt, Vaccinia virus
ggauuaucaaaucuuuaa

SEQ ID NO: 3279967 - RNA, 14 nt, Vaccinia virus
agauagaaaugaau

SEQ ID NO: 3279968 - RNA, 18 nt, Vaccinia virus
auucugauuggucaaugu

SEQ ID NO: 3279969 - RNA, 18 nt, Vaccinia virus
uguuuuacaacuaucaua

SEQ ID NO: 3279970 - RNA, 20 nt, Vaccinia virus
ccagugcuauaucucccugu

SEQ ID NO: 3279971 - RNA, 15 nt, Vaccinia virus
aucuauuuuaaauac

SEQ ID NO: 3279972 - RNA, 15 nt, Vaccinia virus
gucuaacauuuuuaa

SEQ ID NO: 3279973 - RNA, 16 nt, Vaccinia virus
aagacgauacuguuuc

SEQ ID NO: 3279974 - RNA, 22 nt, Vaccinia virus
gaaaaucuacuaccgaugaugu

SEQ ID NO: 3279975 - RNA, 14 nt, Vaccinia virus
augccuacauauca

SEQ ID NO: 3279976 - RNA, 14 nt, Vaccinia virus
auaccaacaugucu

SEQ ID NO: 3279977 - RNA, 15 nt, Vaccinia virus
ggcacuuauuucaug

SEQ ID NO: 3279978 - RNA, 13 nt, Vaccinia virus
accaaauuuuaca

SEQ ID NO: 3279979 - RNA, 17 nt, Vaccinia virus
auaucaguguccaucau

SEQ ID NO: 3279980 - RNA, 18 nt, Vaccinia virus
auucauauuaauacuuug

SEQ ID NO: 3279981 - RNA, 13 nt, Vaccinia virus
uaaaaaaacauua

SEQ ID NO: 3279982 - RNA, 17 nt, Vaccinia virus
acaauuuguauuaucca

SEQ ID NO: 3279983 - RNA, 22 nt, Vaccinia virus
ugaucauuuugauauugugaau

SEQ ID NO: 3279984 - RNA, 22 nt, Vaccinia virus
gacuugucaaaucuauauacca

SEQ ID NO: 3279985 - RNA, 21 nt, Vaccinia virus
uucuucuauaguccugucuuu

SEQ ID NO: 3279986 - RNA, 16 nt, Vaccinia virus
cuaaaaaauguagaaa

SEQ ID NO: 3279987 - RNA, 12 nt, Vaccinia virus
gacguagaaaac

SEQ ID NO: 3279988 - RNA, 11 nt, Vaccinia virus
gaguauuucuc

SEQ ID NO: 3279989 - RNA, 16 nt, Vaccinia virus
caucuauuuuaaauac

SEQ ID NO: 3279990 - RNA, 15 nt, Vaccinia virus
uaucguaucauuaaa

SEQ ID NO: 3279991 - RNA, 12 nt, Vaccinia virus
ccggaacaaaaa

SEQ ID NO: 3279992 - RNA, 15 nt, Vaccinia virus
ugucaugaauacguu

SEQ ID NO: 3279993 - RNA, 14 nt, Vaccinia virus
ugaugauagagaua

SEQ ID NO: 3279994 - RNA, 22 nt, Vaccinia virus
ccaaauuaucaucauuaaacau

SEQ ID NO: 3279995 - RNA, 20 nt, Vaccinia virus
guaucgacaucuuuauuauu

SEQ ID NO: 3279996 - RNA, 20 nt, Vaccinia virus
aucuuuacgaauuacuuuac

SEQ ID NO: 3279997 - RNA, 12 nt, Vaccinia virus
caacagaaaaag

SEQ ID NO: 3279998 - RNA, 23 nt, Vaccinia virus
cuacaucuuccuucuuauucuua

SEQ ID NO: 3279999 - RNA, 21 nt, Vaccinia virus
guucuagcccucuucaagaac

SEQ ID NO: 3280000 - RNA, 18 nt, Vaccinia virus
aaaugauguuaccacuuu

SEQ ID NO: 3280001 - RNA, 17 nt, Vaccinia virus
uuucgcgggauacauca

SEQ ID NO: 3280002 - RNA, 18 nt, Vaccinia virus
agauguaaguaugauguc

SEQ ID NO: 3280003 - RNA, 21 nt, Vaccinia virus
cuucagaauacaaucuguauu

SEQ ID NO: 3280004 - RNA, 12 nt, Vaccinia virus
aguucuggaaua

SEQ ID NO: 3280005 - RNA, 14 nt, Vaccinia virus
uaguaauguuuaug

SEQ ID NO: 3280006 - RNA, 19 nt, Vaccinia virus
cucauaaguguauauaucu

SEQ ID NO: 3280007 - RNA, 16 nt, Vaccinia virus
ugcaucuauaugucca

SEQ ID NO: 3280008 - RNA, 18 nt, Vaccinia virus
gccgaguuuaaaacuucu

SEQ ID NO: 3280009 - RNA, 21 nt, Vaccinia virus
aaucaguacguucuucauuua

SEQ ID NO: 3280010 - RNA, 13 nt, Vaccinia virus
auauuagauuuac

SEQ ID NO: 3280011 - RNA, 15 nt, Vaccinia virus
uaaaaaaaaugacuu

SEQ ID NO: 3280012 - RNA, 19 nt, Vaccinia virus
aucauaauuacauuuagac

SEQ ID NO: 3280013 - RNA, 20 nt, Vaccinia virus
uucgucaacaaguuggauga

SEQ ID NO: 3280014 - RNA, 20 nt, Vaccinia virus
auuuuaaaauuaaaaaggaa

SEQ ID NO: 3280015 - RNA, 21 nt, Vaccinia virus
agcuuccagauuuaaaaaggu

SEQ ID NO: 3280016 - RNA, 14 nt, Vaccinia virus
cacaacuuaaugaa

SEQ ID NO: 3280017 - RNA, 19 nt, Vaccinia virus
ucauauauuuauagaagau

SEQ ID NO: 3280018 - RNA, 14 nt, Vaccinia virus
auggaguuguaaau

SEQ ID NO: 3280019 - RNA, 19 nt, Vaccinia virus
guuuaacaaaguuauucau

SEQ ID NO: 3280020 - RNA, 18 nt, Vaccinia virus
gaaccaguaacauaugau

SEQ ID NO: 3280021 - RNA, 16 nt, Vaccinia virus
uucuuauucuuauucu

SEQ ID NO: 3280022 - RNA, 19 nt, Vaccinia virus
accguauuacucuacagua

SEQ ID NO: 3280023 - RNA, 16 nt, Vaccinia virus
cgggaauuaauguccu

SEQ ID NO: 3280024 - RNA, 24 nt, Vaccinia virus
agaagcugguaauaguuuacagau

SEQ ID NO: 3280025 - RNA, 19 nt, Vaccinia virus
cucucaacauuggaauaau

SEQ ID NO: 3280026 - RNA, 15 nt, Vaccinia virus
auggcacgaaauauc

SEQ ID NO: 3280027 - RNA, 20 nt, Vaccinia virus
acaaaauucguuagaauaua

SEQ ID NO: 3280028 - RNA, 16 nt, Vaccinia virus
guauucuauuuuggaa

SEQ ID NO: 3280029 - RNA, 18 nt, Vaccinia virus
aucuauuuuuuugucaug

SEQ ID NO: 3280030 - RNA, 19 nt, Vaccinia virus
auucugaauggauccacca

SEQ ID NO: 3280031 - RNA, 20 nt, Vaccinia virus
uucagaauuaauagauauau

SEQ ID NO: 3280032 - RNA, 15 nt, Vaccinia virus
uccaauuacaaaaac

SEQ ID NO: 3280033 - RNA, 19 nt, Vaccinia virus
agcauucacagauucuauu

SEQ ID NO: 3280034 - RNA, 10 nt, Vaccinia virus
guguuagcca

SEQ ID NO: 3280035 - RNA, 17 nt, Vaccinia virus
auuuccauuuuuaauuu

SEQ ID NO: 3280036 - RNA, 18 nt, Vaccinia virus
aaagaccgaauacauaac

SEQ ID NO: 3280037 - RNA, 14 nt, Vaccinia virus
ucgcuuucuagaau

SEQ ID NO: 3280038 - RNA, 21 nt, Vaccinia virus
ccauuauaaaacuuaugauua

SEQ ID NO: 3280039 - RNA, 19 nt, Vaccinia virus
guuuauuuagauacagaug

SEQ ID NO: 3280040 - RNA, 21 nt, Vaccinia virus
aucauacaaugaauuaauuaa

SEQ ID NO: 3280041 - RNA, 16 nt, Vaccinia virus
aaaugguuagauauua

SEQ ID NO: 3280042 - RNA, 17 nt, Vaccinia virus
uaucaugagauguguau

SEQ ID NO: 3280043 - RNA, 23 nt, Vaccinia virus
uaucaucauuuugauauuacuua

SEQ ID NO: 3280044 - RNA, 19 nt, Vaccinia virus
cauauuauuuuuauguuuu

SEQ ID NO: 3280045 - RNA, 22 nt, Vaccinia virus
auugcuagccucaucuucuaua

SEQ ID NO: 3280046 - RNA, 20 nt, Vaccinia virus
agaauuuucauggauguaga

SEQ ID NO: 3280047 - RNA, 15 nt, Vaccinia virus
ucuagagauuguacu

SEQ ID NO: 3280048 - RNA, 21 nt, Vaccinia virus
ccauccaagucaauaucuuua

SEQ ID NO: 3280049 - RNA, 17 nt, Vaccinia virus
cauuuuuuaaguauuug

SEQ ID NO: 3280050 - RNA, 19 nt, Vaccinia virus
aacgaugccuuuuguaaau

SEQ ID NO: 3280051 - RNA, 18 nt, Vaccinia virus
acuaaacacauuauuaau

SEQ ID NO: 3280052 - RNA, 22 nt, Vaccinia virus
acuuaaugaagaucuauuucca

SEQ ID NO: 3280053 - RNA, 14 nt, Vaccinia virus
cuaaaaucugcaua

SEQ ID NO: 3280054 - RNA, 17 nt, Vaccinia virus
aaaacauuauaauaaua

SEQ ID NO: 3280055 - RNA, 14 nt, Vaccinia virus
ucuacaugaaauag

SEQ ID NO: 3280056 - RNA, 15 nt, Vaccinia virus
uucaaccauucauaa

SEQ ID NO: 3280057 - RNA, 21 nt, Vaccinia virus
gaaaaugcagaaaugauuuug

SEQ ID NO: 3280058 - RNA, 22 nt, Vaccinia virus
gccuaaacccgacuuaguuaua

SEQ ID NO: 3280059 - RNA, 20 nt, Vaccinia virus
agagaaugaaauauauacau

SEQ ID NO: 3280060 - RNA, 19 nt, Vaccinia virus
aaaggauacuaaacauugu

SEQ ID NO: 3280061 - RNA, 22 nt, Vaccinia virus
acaauuuguauuuuuuaaucua

SEQ ID NO: 3280062 - RNA, 16 nt, Vaccinia virus
ucacucuucgaaaaga

SEQ ID NO: 3280063 - RNA, 21 nt, Vaccinia virus
aauagauuggaugguugacau

SEQ ID NO: 3280064 - RNA, 16 nt, Vaccinia virus
cauagggcuaaauguc

SEQ ID NO: 3280065 - RNA, 12 nt, Vaccinia virus
uuuuguaauaag

SEQ ID NO: 3280066 - RNA, 17 nt, Vaccinia virus
caauaugugaaucauuu

SEQ ID NO: 3280067 - RNA, 17 nt, Vaccinia virus
acuugagacuugauaga

SEQ ID NO: 3280068 - RNA, 18 nt, Vaccinia virus
auucuguucuauucaaag

SEQ ID NO: 3280069 - RNA, 21 nt, Vaccinia virus
auucuugaaacuuuuuagaau

SEQ ID NO: 3280070 - RNA, 18 nt, Vaccinia virus
uguacgauacauaauguu

SEQ ID NO: 3280071 - RNA, 20 nt, Vaccinia virus
agcuuucauaguuagauaca

SEQ ID NO: 3280072 - RNA, 13 nt, Vaccinia virus
ccauuuuuccaua

SEQ ID NO: 3280073 - RNA, 16 nt, Vaccinia virus
ucggauacucuauuaa

SEQ ID NO: 3280074 - RNA, 18 nt, Vaccinia virus
gaauaaaacucuacuaua

SEQ ID NO: 3280075 - RNA, 18 nt, Vaccinia virus
auggaugagaacacguau

SEQ ID NO: 3280076 - RNA, 20 nt, Vaccinia virus
aucuugaugcgguuuaauaa

SEQ ID NO: 3280077 - RNA, 12 nt, Vaccinia virus
aaugaacucauc

SEQ ID NO: 3280078 - RNA, 16 nt, Vaccinia virus
uuucaucuauaucauu

SEQ ID NO: 3280079 - RNA, 12 nt, Vaccinia virus
guaaaauaucua

SEQ ID NO: 3280080 - RNA, 13 nt, Vaccinia virus
uguagaacucaug

SEQ ID NO: 3280081 - RNA, 20 nt, Vaccinia virus
ucauagccgcucuuagaguu

SEQ ID NO: 3280082 - RNA, 16 nt, Vaccinia virus
ccaauuucaaggacaa

SEQ ID NO: 3280083 - RNA, 15 nt, Vaccinia virus
cauaaauaaaaacuu

SEQ ID NO: 3280084 - RNA, 13 nt, Vaccinia virus
acuagaagaaagu

SEQ ID NO: 3280085 - RNA, 14 nt, Vaccinia virus
uaguucgucauaac

SEQ ID NO: 3280086 - RNA, 23 nt, Vaccinia virus
uaauagcagaaagcuauaacuug

SEQ ID NO: 3280087 - RNA, 19 nt, Vaccinia virus
auagauguucaucauauaa

SEQ ID NO: 3280088 - RNA, 16 nt, Vaccinia virus
gugaugucuuggaauc

SEQ ID NO: 3280089 - RNA, 13 nt, Vaccinia virus
ugaagagaguucu

SEQ ID NO: 3280090 - RNA, 17 nt, Vaccinia virus
gaauaccauuaaacaau

SEQ ID NO: 3280091 - RNA, 13 nt, Vaccinia virus
aaauacauaaaga

SEQ ID NO: 3280092 - RNA, 19 nt, Vaccinia virus
ucuuaccaucuucuuugau

SEQ ID NO: 3280093 - RNA, 20 nt, Vaccinia virus
cuagucauaauaucuuuaau

SEQ ID NO: 3280094 - RNA, 13 nt, Vaccinia virus
aggaugaauuuga

SEQ ID NO: 3280095 - RNA, 16 nt, Vaccinia virus
gucugucaaaucaucu

SEQ ID NO: 3280096 - RNA, 12 nt, Vaccinia virus
auuuuguaacug

SEQ ID NO: 3280097 - RNA, 15 nt, Vaccinia virus
uguagaaaacaacaa

SEQ ID NO: 3280098 - RNA, 14 nt, Vaccinia virus
uuccacaauacgag

SEQ ID NO: 3280099 - RNA, 17 nt, Vaccinia virus
uacuucaccacccuugu

SEQ ID NO: 3280100 - RNA, 22 nt, Vaccinia virus
auaauguuucuauguuuucuac

SEQ ID NO: 3280101 - RNA, 23 nt, Vaccinia virus
uaucuccacucucgauaaaucua

SEQ ID NO: 3280102 - RNA, 16 nt, Vaccinia virus
ucgaugcauguuagau

SEQ ID NO: 3280103 - RNA, 17 nt, Vaccinia virus
auggaugucaucaaugu

SEQ ID NO: 3280104 - RNA, 14 nt, Vaccinia virus
uaaauaaauacuuu

SEQ ID NO: 3280105 - RNA, 13 nt, Vaccinia virus
uaucaauagcagu

SEQ ID NO: 3280106 - RNA, 13 nt, Vaccinia virus
auugaagaaggag

SEQ ID NO: 3280107 - RNA, 19 nt, Vaccinia virus
gaaugcuguuaugugcaua

SEQ ID NO: 3280108 - RNA, 21 nt, Vaccinia virus
aacgguuacuaucaauauuau

SEQ ID NO: 3280109 - RNA, 12 nt, Vaccinia virus
auuauaccaaaa

SEQ ID NO: 3280110 - RNA, 15 nt, Vaccinia virus
aaacgaauuacugaa

SEQ ID NO: 3280111 - RNA, 18 nt, Vaccinia virus
agaauugcugcaauauau

SEQ ID NO: 3280112 - RNA, 18 nt, Vaccinia virus
caguccgguucuuaauau

SEQ ID NO: 3280113 - RNA, 12 nt, Vaccinia virus
uuugcacacaua

SEQ ID NO: 3280114 - RNA, 20 nt, Vaccinia virus
acaaaauuuggguuuaauuu

SEQ ID NO: 3280115 - RNA, 23 nt, Vaccinia virus
caauuuauagucgcgcuuuacau

SEQ ID NO: 3280116 - RNA, 21 nt, Vaccinia virus
acguuguaaaacauaaaggaa

SEQ ID NO: 3280117 - RNA, 19 nt, Vaccinia virus
aucacauaucuaacaaugg

SEQ ID NO: 3280118 - RNA, 21 nt, Vaccinia virus
ugauacucucaaccauuauua

SEQ ID NO: 3280119 - RNA, 20 nt, Vaccinia virus
agaaucauugcuguaaacaa

SEQ ID NO: 3280120 - RNA, 15 nt, Vaccinia virus
agacgaauacauaua

SEQ ID NO: 3280121 - RNA, 22 nt, Vaccinia virus
agaaucagugaauaaauucaag

SEQ ID NO: 3280122 - RNA, 16 nt, Vaccinia virus
uguguaugaaaugcuu

SEQ ID NO: 3280123 - RNA, 23 nt, Vaccinia virus
aucaaaguggaaagaugcuguug

SEQ ID NO: 3280124 - RNA, 16 nt, Vaccinia virus
agaaagucagaaucua

SEQ ID NO: 3280125 - RNA, 14 nt, Vaccinia virus
ucuuuaaugugaaa

SEQ ID NO: 3280126 - RNA, 18 nt, Vaccinia virus
uauacuccucauuaacau

SEQ ID NO: 3280127 - RNA, 22 nt, Vaccinia virus
gguugccgcaaauagauagaac

SEQ ID NO: 3280128 - RNA, 18 nt, Vaccinia virus
gugauaucgaauauuuua

SEQ ID NO: 3280129 - RNA, 16 nt, Vaccinia virus
gaaguuaaacugugaa

SEQ ID NO: 3280130 - RNA, 14 nt, Vaccinia virus
gucuggauuaaucu

SEQ ID NO: 3280131 - RNA, 15 nt, Vaccinia virus
gauaaugaacauaua

SEQ ID NO: 3280132 - RNA, 16 nt, Vaccinia virus
auucgaaauuagaaag

SEQ ID NO: 3280133 - RNA, 16 nt, Vaccinia virus
uaucagacuacuuauu

SEQ ID NO: 3280134 - RNA, 21 nt, Vaccinia virus
aauuacggcgaaauaaagaaa

SEQ ID NO: 3280135 - RNA, 19 nt, Vaccinia virus
gggacgcguauauguuucu

SEQ ID NO: 3280136 - RNA, 17 nt, Vaccinia virus
gacuuuauaauuucauc

SEQ ID NO: 3280137 - RNA, 15 nt, Vaccinia virus
auuacuuaucauuua

SEQ ID NO: 3280138 - RNA, 23 nt, Vaccinia virus
uguacuucgaugagauugaucau

SEQ ID NO: 3280139 - RNA, 16 nt, Vaccinia virus
acaagaucaaaguaca

SEQ ID NO: 3280140 - RNA, 18 nt, Vaccinia virus
gaaacuauagauaaugau

SEQ ID NO: 3280141 - RNA, 16 nt, Vaccinia virus
caggaauaugacuauu

SEQ ID NO: 3280142 - RNA, 19 nt, Vaccinia virus
auuaauaguuuuauuugaa

SEQ ID NO: 3280143 - RNA, 22 nt, Vaccinia virus
uucaacaaguaggauuuuucca

SEQ ID NO: 3280144 - RNA, 23 nt, Vaccinia virus
uuuacacaguaaccaaaaugaaa

SEQ ID NO: 3280145 - RNA, 15 nt, Vaccinia virus
auuucauuaauuaau

SEQ ID NO: 3280146 - RNA, 23 nt, Vaccinia virus
guguauacaccaacaguaugaaa

SEQ ID NO: 3280147 - RNA, 17 nt, Vaccinia virus
ugaauucucauuuugca

SEQ ID NO: 3280148 - RNA, 16 nt, Vaccinia virus
uuaaaaaguuaucuuu

SEQ ID NO: 3280149 - RNA, 19 nt, Vaccinia virus
auauuguucuuaauagaca

SEQ ID NO: 3280150 - RNA, 18 nt, Vaccinia virus
aaacuguuuaauauugca

SEQ ID NO: 3280151 - RNA, 14 nt, Vaccinia virus
uauccauuggaaaa

SEQ ID NO: 3280152 - RNA, 21 nt, Vaccinia virus
aguagauacgcaaacuuagau

SEQ ID NO: 3280153 - RNA, 16 nt, Vaccinia virus
aucuaacagaaacguu

SEQ ID NO: 3280154 - RNA, 18 nt, Vaccinia virus
caaaugaaaaaaauacuu

SEQ ID NO: 3280155 - RNA, 18 nt, Vaccinia virus
auuaaacguauaaaaacg

SEQ ID NO: 3280156 - RNA, 15 nt, Vaccinia virus
auucaagucaaagaa

SEQ ID NO: 3280157 - RNA, 22 nt, Vaccinia virus
acagaauaaacaaaauaaugua

SEQ ID NO: 3280158 - RNA, 20 nt, Vaccinia virus
uuucuaacucgguaaaaaaa

SEQ ID NO: 3280159 - RNA, 14 nt, Vaccinia virus
augaucaaaaagag

SEQ ID NO: 3280160 - RNA, 17 nt, Vaccinia virus
uaaacauaagacuuauu

SEQ ID NO: 3280161 - RNA, 14 nt, Vaccinia virus
auacguaaugaagu

SEQ ID NO: 3280162 - RNA, 20 nt, Vaccinia virus
aagauacuugaagacauucc

SEQ ID NO: 3280163 - RNA, 20 nt, Vaccinia virus
aaguugugacacguuucaau

SEQ ID NO: 3280164 - RNA, 22 nt, Vaccinia virus
acugaagucugauauucagaaa

SEQ ID NO: 3280165 - RNA, 18 nt, Vaccinia virus
accuauagcaucaauaau

SEQ ID NO: 3280166 - RNA, 19 nt, Vaccinia virus
cguauaaaguuauauaauu

SEQ ID NO: 3280167 - RNA, 20 nt, Vaccinia virus
uuaccccucauaguauuaau

SEQ ID NO: 3280168 - RNA, 15 nt, Vaccinia virus
auauuguuuaauaua

SEQ ID NO: 3280169 - RNA, 15 nt, Vaccinia virus
aucauagucgaacau

SEQ ID NO: 3280170 - RNA, 22 nt, Vaccinia virus
uauauggaacacgauuauuaua

SEQ ID NO: 3280171 - RNA, 22 nt, Vaccinia virus
uucaucaauagacauaagaaau

SEQ ID NO: 3280172 - RNA, 23 nt, Vaccinia virus
aagaaacugacuugauaaaaaug

SEQ ID NO: 3280173 - RNA, 23 nt, Vaccinia virus
ucaaaucgcccaucuauuacaaa

SEQ ID NO: 3280174 - RNA, 13 nt, Vaccinia virus
aaaauaauaauua

SEQ ID NO: 3280175 - RNA, 17 nt, Vaccinia virus
guaacuauguaaaugau

SEQ ID NO: 3280176 - RNA, 14 nt, Vaccinia virus
uaaaguauuuggaa

SEQ ID NO: 3280177 - RNA, 15 nt, Vaccinia virus
uacguaaaaaagaua

SEQ ID NO: 3280178 - RNA, 15 nt, Vaccinia virus
aucucaucauuccau

SEQ ID NO: 3280179 - RNA, 22 nt, Vaccinia virus
aagcggaacaauaaacaaaaua

SEQ ID NO: 3280180 - RNA, 11 nt, Vaccinia virus
agaauuucauu

SEQ ID NO: 3280181 - RNA, 17 nt, Vaccinia virus
aaauuccccauauacca

SEQ ID NO: 3280182 - RNA, 23 nt, Vaccinia virus
uaucaggcgucuccauguuugau
